United States Patent Application Publication US 2006/0134663 A1 - sequence listing, part 123

SEQ ID NO: 397226 - DNA, 1000 bp, Homo Sapiens
tttggggggtgtgctgacaacttagctcaggtgccttacatcttttctaatcacagtgttgcatatgagcctgccctcactccctctgcagaatccctttgcacctgagaccctactgaagtggctggtagaaaaaggggcctgagtggaggattatcagtatcacgatttgcaggattcccttctgggcttcattctggaaacttttgttagggctgcttttcttaagtgcccacatttgatggagggtggaaataatttgaatgtatttgatttataagttttttttttttttttgggttaaaagatggttgtagcatttaaaatggaaaattttctccttggtttgctagtatcttgggtgtattctctgtaagtgtagctcaaataggtcatcatgaaaggttaaaaaagcgaggtggccatgttatgctggtggttaaggccagggcctctccaaccactgtgccactgacttgctgtgtgaccctgggcaagtcacttaactataaggtgcctcagttttccttctgttaaaatggggataataatactgacctacctcaaagggcagttttgaggcatgactaatgctttttagaaagcattttgggatccttcagcacaggaattctcaagacctgagtattttttataataggaatgtccaccatgaacttgatacgtccgtgtgtcccagatgctgtcattagtctatatggttctccaagaaactgaatgaatccattggagaagcggtggataactagccagacaaaatttgagaatacataaacaacgcattgccacggaaacatacagaggatgccttttctgtgattgggtgggattttttccctttttatgtgggatatagtagttacttgtgacaagaataattttggaataatttctattaatatcaactctgaagctaattgtactaatctgagattgtgtttgttcataataaaagtgaagtgaatctgattgcaaaaaa

SEQ ID NO: 397227 - DNA, 1000 bp, Homo Sapiens; identical to SEQ ID NO: 116330

SEQ ID NO: 397228 - DNA, 1000 bp, Homo Sapiens; identical to SEQ ID NO: 116331

SEQ ID NO: 397229 - DNA, 1000 bp, Homo Sapiens; identical to SEQ ID NO: 286698

SEQ ID NO: 397230 - DNA, 1000 bp, Homo Sapiens
ccacacagatctgtaattcactaggctcgtgtttgctacaaatagtgctaataaagttaaattgcacgtgcaatacggaacactgtcaatggactgcaccttgtgaaggaaaaacatgcttaagggggtgtaatgaaaatgatgtagacattttaagcattttctacacagcgagaaaacttcgtaagaacatgttacgtgtgcaacaggtaaacagaaatcctttcataaagcaccagcagtgtttaaaaaatgagcttccattaatttttactttttatgggttttgcttaaagatctcaacatggaaaaatcctgtcatggctctgaactgcacaatgcattgaaccgccgtccttcaattttcttcacactatcaacactgcagcattttgctgctttatcaaaatggtttattttaggaaactttttccacctttctgaatggaaagaggttttcacaaatgttttaaactcatcgttctaaaatcaagtgcacctacaccaactgctctcaaaatgtgaactgacttttttttttttttttttgccaaccctgtgtcacttagtgaggacctgacacaatccctacagggtgtctgtcagtgggcctcatggtaagagtcacaatttgcaaatttaggaccgtgggtcatgcagcgaaggggctggatggtaggaagggatgtgcccgcctctccacgcactcagctatacctcattcacagctccttgtgagtgtgtgcacaggaaataagccgagggtattatttttttatgttcatgagtcttgtaattaaaccgtgattcttgaaaggtgtaggtttgattactaggagataccaccgacatttttcaataaagtactgcaaaatgcttttgtgtctaccttgttattaacttttggggctgtatttagtaaaaataaatcaaggctatcggagcagttcaataacaaaggttactgttgagaaaaaagaccctatcatagatttacaag

SEQ ID NO: 397231 - DNA, 1000 bp, Homo Sapiens; identical to SEQ ID NO: 221617

SEQ ID NO: 397232 - DNA, 1000 bp, Homo Sapiens; identical to SEQ ID NO: 116333

SEQ ID NO: 397233 - DNA, 1000 bp, Homo Sapiens
gaggatgaaaagaaaaacagactggaaaagagtaacccatatttcatgtcaggggccaattcacagaaacagatgtgaaggtcaggaggcaagtggaggatggactgggcccgcagatgccctgacctctgcccccaggtagcaggacactccattggatggcccctgatgaggaagacttcagaattgggaactaaaccatgaatgctattttcttttttctttttcttttcttttttttttttttttttttgagacagagttttgctcttgttgtccaggctggagtgcaatggcacgatctcagctcactgcaacctccgcctcccaggttcaagtaattctcctgcctcagcctcccgagtggctgggattagcggcatgcaccaccacgcccagctatttttgtatttttagtagagatggggtttcaccatgttaaccaggatggtctcgatctcttgacctggtgatctgcccacctcggcctgccaaagtgctgggattacaggcttgagctaccgcgcccggccgtgaacgctattttctaagcagccagcagtgaatctaaaactctggaagaagtcttctgtttgaaaggcttatttaagccacacgtacacacactgtcttagagtactgtgagcccaccccacattggtcatcttccctatcacacaaatgatgttattttggactagcttaattttgaaatggtaacaaagtttcctattccatactgttcatttctaatactcttacgaaaactattctaaaggaggcaggagccaaggccaaaagtgaacgtacaggtttaaaatggctgtgataagggccagctggtattaactgataactttacctttgggtttttgttattttgtttttctagtccctacctgtgtttaaattatggataactcgaaagacaggctcaggtgaaggccgagtaatgattttttttgaagtttcaatggtgtgaaataaatttctgttctta

SEQ ID NO: 397234 - DNA, 1000 bp, Homo Sapiens; identical to SEQ ID NO: 220414

SEQ ID NO: 397235 - DNA, 1000 bp, Homo Sapiens
agctttgaggaattttgacagctgttgacatgggatttgggaaaggtgaagctgtgactggaggggcaggagatggtccaagtgtccatccagagatgagactcttagaatcaaagtgttcagcccaggaagtcttggagatcccaccttctgtggccctgcaccttatgggaagccattaagggggctcatctaggaattctggttacagcccagtgctcatcccagcgtatgctgcctctttagggcagccccaagggccagccagcctgtactctgggcaagagcccaaaatggctaggaatgtttgactcccttaatctcttccccagctacagaggaatcttttctctgcctggtctcagaatgggactgccaactggctcattggtgggagacacagtatcctcaaacctgtggccactggcatgacagtggtgctctgtctccctgggtgacacccaccctaggcttcctcctggatgtgatggggattgccagagaggctcttagcataaaaggcattaggtgggcatttttctgtgtgcccccaaaaagctccatggaaacaggcacctggtagctgcggaacacccgtggacttgtgtatatggtcataggctttgggaagacaggacgtaaaggaaaatgagagaaacaaaatgggtcagatagctttggccacagccccaggcagcctttggggcctatgacacttagtgcccttagatgggatacatcttgcctcggccccaagactcctccaacttacccgtcccatccagggcctgcacagcttagagaggctcacagcttggcaaatgctagggcttcatcagaccactgacttgactcagtgtttgttaaaatggaaccactcccgttggcctactgtttctctcctgtacttcttgtaatgatagttatttattgactctggtagcaggcagttcttaaataaagatggtttctcaacctgttggggaaaaaaaaaaaaaaa

SEQ ID NO: 397236 - DNA, 1000 bp, Homo Sapiens; identical to SEQ ID NO: 286701

SEQ ID NO: 397237 - DNA, 1000 bp, Homo Sapiens; identical to SEQ ID NO: 116334

SEQ ID NO: 397238 - DNA, 1000 bp, Homo Sapiens; identical to SEQ ID NO: 116335

SEQ ID NO: 397239 - DNA, 1000 bp, Homo Sapiens; identical to SEQ ID NO: 116336

SEQ ID NO: 397240 - DNA, 1000 bp, Homo Sapiens; identical to SEQ ID NO: 286704

SEQ ID NO: 397241 - DNA, 1000 bp, Homo Sapiens; identical to SEQ ID NO: 116337

SEQ ID NO: 397242 - DNA, 1000 bp, Homo Sapiens; identical to SEQ ID NO: 286707

SEQ ID NO: 397243 - DNA, 1000 bp, Homo Sapiens; identical to SEQ ID NO: 116338

SEQ ID NO: 397244 - DNA, 1000 bp, Homo Sapiens; identical to SEQ ID NO: 116339

SEQ ID NO: 397245 - DNA, 1000 bp, Homo Sapiens; identical to SEQ ID NO: 286709

SEQ ID NO: 397246 - DNA, 1000 bp, Homo Sapiens; identical to SEQ ID NO: 116340

SEQ ID NO: 397247 - DNA, 1000 bp, Homo Sapiens; identical to SEQ ID NO: 286711

SEQ ID NO: 397248 - DNA, 1000 bp, Homo Sapiens; identical to SEQ ID NO: 116341

SEQ ID NO: 397249 - DNA, 1000 bp, Homo Sapiens
ggtactttgttgttgctgacagttcaaaagctggttttactaccatttacaaatggaacggaaacggattctactcccatcaatccttacacgcgtggtacagggacactgatgtggaatatctagaaatagtcagaacacctcagacactcagaacgcctcatttaattctgtctagtagttcccagcgtcctgtaatttatcagtggaacaaagcaacacaattattcactaaccaaactgacattcctaacatggaggatgtgtacgcagtgaagcacttctcagtgaaaggggacgtgtacatttgcttgacaagattcattggtgattccaaagtcatgaaatggggaggctcctcgttccaggatattcagaggatgccatcgcgaggatccatggtgttccagcctcttcaaataaataattaccaatatgcaattcttggaagtgattactcctttactcaagtgtataactgggatgcagagaaagccaaatttgtgaaatttcaggaattaaatgttcaggcaccaagatcattcacacatgtgtccattaataagcgtaattttctttttgcttccagttttaagggaaatacacagatttacaaacatgtcatagttgacttaagcgcatgagacaccaaattctgtggctgccatcagaaattttctacagtacatgacccggatgaactcaatgcatgatgactcttcttatcacacttgcaaatgaatgcctttcaaacattgagactgctagaaccaagcactaccagtatctccatccttaactgtccagtccagtgatgtgggaagttaccttttataagacaaaatttaattgtgtaactgttctttgcagtgaagatgtgtaaataagcgtttaatggtatctgttactccaaaaagaaatattaatatgtacttttccatttatttattcatgtgtacagaaacaactgccaaataaaatgtttacattttctttcata

SEQ ID NO: 397250 - DNA, 1000 bp, Homo Sapiens; identical to SEQ ID NO: 286713

SEQ ID NO: 397251 - DNA, 1000 bp, Homo Sapiens; identical to SEQ ID NO: 221620

SEQ ID NO: 397252 - DNA, 1000 bp, Homo Sapiens
atgaaggaggacagtgaaaaagttccgagcttgttaactgattatattctgaaagttctgtgtcctacatagagcagcaactttatctgcggtgggctccaagctagatttccgacagcattattctgagagctggctaccattacccttcttgctattggaaactcagcacatttgaacttgggtttgattcagtattaacagatcttgactacactaattctttatattatagaaccaacggaaatatgggcactattttgaattctagagatggtttttgttaaatctactaataaactgttctcttagtagattaagagagagtaatattaattgtgcatgtgcagttgtatttctcattaactgacagtatgcccatttgtttttatggctttcttatctaaactgcactgatgaactagattaaagccttgggagatttatactataaattcagtgatggcaagaaccaacactgtttttttgtgagaattgtcagtgtaactattacctaccagtattgttcagagagattgaaacagaataaacgggctgttcttgaagaagcaaaaccagaatatgcattactttggtttaatacttagtgctaacattgaaactgttggtggtgatggattttgtagcttgctgcttgtttcaccactggtcaaattttaaccattaaattgccattcacttttagaatcttgtatttaagtaagttttgattttcaaatgttctgcttcatgtgtctgtgaagaattgtacttttttaaaagtgtgtgtcctctgaggtgcttgagaaagtgtacactgcagaactgcccattctcattactgtgtcctattttattcatgcctgtgtgtttttcttaagtatgaattctagatacagctacttatggattcatcaatatcatgagcacttttgctggttccagtcaaatcaatggcatttaataaattttttaagaagtaaaaaaaaaaaaaaaaaaa

SEQ ID NO: 397253 - DNA, 1000 bp, Homo Sapiens; identical to SEQ ID NO: 286715

SEQ ID NO: 397254 - DNA, 1000 bp, Homo Sapiens; identical to SEQ ID NO: 116344

SEQ ID NO: 397255 - DNA, 1000 bp, Homo Sapiens; identical to SEQ ID NO: 286718

SEQ ID NO: 397256 - DNA, 1000 bp, Homo Sapiens; identical to SEQ ID NO: 221621

SEQ ID NO: 397257 - DNA, 1000 bp, Homo Sapiens; identical to SEQ ID NO: 286720

SEQ ID NO: 397258 - DNA, 1000 bp, Homo Sapiens; identical to SEQ ID NO: 286723

SEQ ID NO: 397259 - DNA, 1000 bp, Homo Sapiens; identical to SEQ ID NO: 221622

SEQ ID NO: 397260 - DNA, 1000 bp, Homo Sapiens; identical to SEQ ID NO: 220415

SEQ ID NO: 397261 - DNA, 1000 bp, Homo Sapiens; identical to SEQ ID NO: 286725

SEQ ID NO: 397262 - DNA, 1000 bp, Homo Sapiens; identical to SEQ ID NO: 221623

SEQ ID NO: 397263 - DNA, 1000 bp, Homo Sapiens; identical to SEQ ID NO: 116345

SEQ ID NO: 397264 - DNA, 1000 bp, Homo Sapiens; identical to SEQ ID NO: 116346

SEQ ID NO: 397265 - DNA, 1000 bp, Homo Sapiens; identical to SEQ ID NO: 116347

SEQ ID NO: 397266 - DNA, 1000 bp, Homo Sapiens; identical to SEQ ID NO: 221624

SEQ ID NO: 397267 - DNA, 1000 bp, Homo Sapiens; identical to SEQ ID NO: 221625

SEQ ID NO: 397268 - DNA, 1000 bp, Homo Sapiens; identical to SEQ ID NO: 286731

SEQ ID NO: 397269 - DNA, 1000 bp, Homo Sapiens; identical to SEQ ID NO: 116348

SEQ ID NO: 397270 - DNA, 1000 bp, Homo Sapiens; identical to SEQ ID NO: 286732

SEQ ID NO: 397271 - DNA, 1000 bp, Homo Sapiens; identical to SEQ ID NO: 116350

SEQ ID NO: 397272 - DNA, 1000 bp, Homo Sapiens; identical to SEQ ID NO: 116351

SEQ ID NO: 397273 - DNA, 1000 bp, Homo Sapiens; identical to SEQ ID NO: 116352

SEQ ID NO: 397274 - DNA, 1000 bp, Homo Sapiens; identical to SEQ ID NO: 286737

SEQ ID NO: 397275 - DNA, 1000 bp, Homo Sapiens; identical to SEQ ID NO: 221627

SEQ ID NO: 397276 - DNA, 1000 bp, Homo Sapiens
caactcctctcccttcaatgtagacacaggagcaatggcaaccttggctctgacctgtatgtacaacaagatccctgtaggttcagaggaaggttacagatccctgtttggtcaggtactaaaggatattgtggagaaaatcagcatgaagatcaaagataatggcatcattggagacatctacagtactggcctcgccatgcaggctctctctgtaacacctgagccatctaaaaaggaatggaactgcaagaagactacggatatgatactcaatgagattaagcaggggaaattccacaaccccatgtccattgctcaaatcctcccttccctgaaaggcaagacatacctagatgtgccccaggtcacttgtagtcctgatcatgaggtacaaccaactctacccagcaaccctggccctggccccacctctgcatctaacatcactgtcatatacaccataaataaccagctgaggggggttgagctgctcttcaacgagaccatcaatgttagtgtgaaaagtgggtcagtgttacttgttgtcctagaggaagcacagcgcaaaaatcctatgttcaaatttgaaaccacaatgacatcttggggccttgtcgtctcttctatcaacaatatcgcggaaaatgttaatcacaagacatactggcagtttcttagtggtgtaacacctttgaatgaaggggttgctgactacatacccttcaaccacgagcacatcacagccaatttcacacagtactaacgaagaggtgggttcagcttctatcaaacatctccaaaggatgggtgaaattttttccacttcattttaaatctatgcaaaaaagcgaatgcctgtgatgctaccatattcctggtaaaaacatggagaaccactatgtagaataaaaatgcaaagttcactggagtctcaacatctatgactcatgaaaataaaattttcatcttctcaaaaaaaaaaaaaaaaaaaaaaaaa

SEQ ID NO: 397277 - DNA, 1000 bp, Homo Sapiens
gaagcagtggataaataaggctgttggagataaacttcctgaatgtgaagcagtatgtgggaagcccaagaatccggcaaacccagtgcagcggatcctgggtggacacctggatgccaaaggcagctttccctggcaggctaagatggtttcccaccataatctcaccacaggtgccacgctgatcaatgaacaatggctgctgaccacggctaaaaatctcttcctgaaccattcagaaaatgcaacagcgaaagacattgcccctactttaacactctatgtggggaaaaagcagcttgtagagattgagaaggttgttctacaccctaactactcccaggtagatattgggctcatcaaactcaaacagaaggtgtctgttaatgagagagtgatgcccatctgcctaccttcaaaggattatgcagaagtagggcgtgtgggttatgtttctggctgggggcgaaatgccaattttaaatttactgaccatctgaagtatgtcatgctgcctgtggctgaccaagaccaatgcataaggcattatgaaggcagcacagtccccgaaaagaagacaccgaagagccctgtaggggtgcagcccatactgaatgaacacaccttctgtgctggcatgtctaagtaccaagaagacacctgctatggcgatgcgggcagtgcctttgccgttcacgacctggaggaggacacctggtatgcgactgggatcttaagctttgataagagctgtgctgtggctgagtatggtgtgtatgtgaaggtgacttccatccaggactgggttcagaagaccatagctgagaactaatgcaaggctggccggaagcccttgcctgaaagcaagatttcagcctggaagagggcaaagtggacgggagtggacaggagtggatgcgataagatgtggtttgaagctgatgggtgccagccctgcattgctgagtcaatcaataaagagctttcttttgacccattt

SEQ ID NO: 397278 - DNA, 1000 bp, Homo Sapiens; identical to SEQ ID NO: 289719

SEQ ID NO: 397279 - DNA, 1000 bp, Homo Sapiens
ttgggtgtggcacagagtctggctcctgctaggtgagacctggccgtcaaatgacacaaacaactaaacgatggaagagagagcgagcccgggtcctctaaggctccttccttctcccctggctgtcggtcacacctctgcagggccggctctctgatagaaagtggaaggcggttttagaaactcatcaccctgctctctcctggcctcgggggctgcacaggtcactgtcctgtaatgtctcccggtcagggcagcccaggactgcccagcctggtgggctggggattgggctttgggtagggcacaggtgccaccttctgtcctggctgtcctgtgccaccctggtctgtgtctagaggagtgaaactcccagggttgggctgggagtatttggtgcacgcggtatggggagggctgagctcagtgcctcctgggagacttgtcccgtgtacagtgacccagaaagatgagattccttggcctgaactctgtgatagagtgtgactgagctgctgggggacatgtgagcctcaaatccatagaaagacaaacggccaccttgggtgcccaggatactggtgcccggccccacgtacacccacatacttctcagatggctcccacattttaagattttaaaaatgaaaccaaaaaataaattgaagaaaactgtaaactttaaagaataatcagctgggcgcagtggctcatgcttgtaatcacagcactttaggaggctgaggcaggaggactgtttgagcccaggagtttgagaccaacctgagtaaggtggcaaaaccccatctctaccaaaaatacaaagattagccaggcgtggtggtgagcgcctgtagtcccagctacttgggatgctgaggtgggaggatcacttgaacctgggagacacaggctgcagtgggccctgattgagccaccacactgcagcctaggtgacagtcagaccctgtctcaaaaaaaataaaaaaaatttaaaata

SEQ ID NO: 397280 - DNA, 1000 bp, Homo Sapiens
ggttaacaaaaagaataaagctaatcatgtattacaaacagcagtgtgcccagacttgtggaaatgaagtcatgtcactcctctgctcagaaaccttcaatggttcaccattaccagtggaatgaagtcaattctcctcactataactgggtgtggtagtttaagcctataatctcagcccttttggaggccaaggtaagaggatcgcttgaggtcaggagttcgagaccagcttgtgcaacaaagtgagagcctgtctctacaaaaaatagtcatgcacacaaaattagctgggcatggtggcctgtgcctatagtcccaactacttagaggaggatcgcttgatctcaggaggttgaggctgcagtgaattatgattgtggcattgcactccagcctgggtggtagatcaaggctttgtttcatttgaaaaaaaagaaagaaagaaagaaagaaaggaatcctactacgagcgatcacaccatctggcctgaaaccacttccccagcttaggtccctctgttatcctgttggcctcctatgtattggtcaaggcaggcatctctgttctctgaacattcattgcactttcccacctctataccttgcctgtgccttagtgtcctcttttttccagttcacctgtgcgaatccgacccacctcccagagcctggctgaaacgtcactccctgcatccaacatctgatctgctgagatatgtctgatctatctctgctcgctgttctcccgttgtttttgcctctgccatagagctcacctcattttgccttgtatttttgttacctgtgagtgtgtctctccctattagactgtaagcctctcgagggtgaggcctagccttcttgtctttgtaacccacagcagctggtactgtgccttgcctattgtaggtgcccaataaacatttgctgaactgaaaaaaaaaaaaaaaaaaaaaaaaaaaaaaaaaaaaaaaaaaaaaaaaaaaaaaaaaaaaaa

SEQ ID NO: 397281 - DNA, 1000 bp, Homo Sapiens; identical to SEQ ID NO: 116353

SEQ ID NO: 397282 - DNA, 1000 bp, Homo Sapiens
agaactttctgcgtgtgggccacctggtgctgattgggggccctgatgatggtgttattactccctggcagtccagcttctttggtttctatgatgcaaatgagaccgtcctggagatggaggagcaactggtttatctgcgggattcttttgggttgaagactctattggcccggggggccatagtgaggtgtccaatggccggtatctcccacacagcctggcactccaaccgtaccctttatgagacctgcattgaaccttggctctcctgaggatatattcaggggtccccaggaactcctcggtccagagaccaagtggtggccttggaaagcagatgtcaggctttggtgtgcctgtgaccacctcattgctcccatattatcccccatttttagtagagacggggttttagtagagacttggcctcccagaacccccttcctctgctcctccatgaatgacaattccaggcctcccctacctcatgtcctctcatttgggggattgctccgtgctgtccctttctctcaaggccgaagttgggaagtgagaaaccatgtttttaacttgtggctgcttttgctgctgctgctcctccgtatctggctgtatgggtggagaacccaccccctgcccaccacaggggtctccttccaggccactcaggacatttttagcttctctcctccccatgttcccttttttctctaaagtcccctgacatcagccctcccaactcctaagagggactacccatgagagtggggttctgaggctcccctatggggacagttccgttcttgaagtgtcagtgttggggaatatctgtggcctatgaggcccatctcaggtttggggatcccccagtccctatgatcagtgttggagtacccccctgggagagcctagtttctttgaggccccaggccctcttttaactacctttgaataggtgttatccctgtatttatggaaataaagttccatttcctca

SEQ ID NO: 397283 - DNA, 1000 bp, Homo Sapiens; identical to SEQ ID NO: 116355

SEQ ID NO: 397284 - DNA, 1000 bp, Homo Sapiens; identical to SEQ ID NO: 286744

SEQ ID NO: 397285 - DNA, 1000 bp, Homo Sapiens; identical to SEQ ID NO: 116356

SEQ ID NO: 397286 - DNA, 1000 bp, Homo Sapiens; identical to SEQ ID NO: 286747

SEQ ID NO: 397287 - DNA, 1000 bp, Homo Sapiens
atgccagtatctgccagcagaatggcattgtgcctattgtggaacctgaaatattgcctgatggagaccacgacctcaaacgttgtcagtatgttacagagaaggtcttggctgctgtgtacaaggccctgagtgaccatcatgtatacctggaggggaccctgctcaagcccaacatggtgaccccgggccatgcctgtcccatcaagtataccccagaggagattgccatggcaactgtcactgccctgcgtcgcactgtgcccccagctgtcccaggagtgaccttcctgtctgggggtcagagcgaagaagaggcatcattcaacctcaatgccatcaaccgctgcccccttccccgaccctgggcgcttaccttctcctatgggcgtgccctgcaagcctctgcactcaatgcctggcgagggcaacgggacaatgctggggctgccactgaggagttcatcaagcgggctgaggtgaatgggcttgcagcccagggcaagtatgaaggcagtggagaagatggtggagcagcagcacagtcactctacattgccaaccatgcctactgagtatccactccataccacagcccttggcccagccatctgcacccacttttgcttgtagtcatggccagggccaaatagctatgcagagcagagatgccttcacctggcaccaacttgtcttcctttctctcttcccttcccctctctcattgctgcacctgggaccataggatgggaggatagggagcccctcatgactgagggcagaagaaattgctagaagtcagaacaggatggctgggtctccccctacctcttccagctcccacaattttcccatgatgaggtagcttctccctgggctctccttcttgcctgccctgtctcctgggatcagagggtagtacagaagccctgactcatgccttgagtacataccatacagcaaataaatggtagcaaaacattctaaaaaaaaaaaaaaa

SEQ ID NO: 397288 - DNA, 1000 bp, Homo Sapiens; identical to SEQ ID NO: 221629

SEQ ID NO: 397289 - DNA, 1000 bp, Homo Sapiens; identical to SEQ ID NO: 286749

SEQ ID NO: 397290 - DNA, 1000 bp, Homo Sapiens; identical to SEQ ID NO: 221631

SEQ ID NO: 397291 - DNA, 1000 bp, Homo Sapiens; identical to SEQ ID NO: 116359

SEQ ID NO: 397292 - DNA, 1000 bp, Homo Sapiens; identical to SEQ ID NO: 116360

SEQ ID NO: 397293 - DNA, 1000 bp, Homo Sapiens; identical to SEQ ID NO: 116361

SEQ ID NO: 397294 - DNA, 1000 bp, Homo Sapiens; identical to SEQ ID NO: 116362

SEQ ID NO: 397295 - DNA, 1000 bp, Homo Sapiens; identical to SEQ ID NO: 286753

SEQ ID NO: 397296 - DNA, 1000 bp, Homo Sapiens
cactggctgctgttctgaaaccatctgattggctttctgaggtttggctgggtggggactgctcatttggccactctgcaaattggacttgcccgcgttcctgaagcgctctcgagctgttctgtaaatacctggtgctaacatcccatgccgctccctcctcacgatgcacccaccgccctgagggcccgtcctaggaatggatgtggggatggtcgctttgtaatgtgctggttctctttttttttctttcccctctatggcccttaagactttcattttgttcagaaccatgctgggctagctaaagggtggggagagggaagatgggccccaccacgctctcaagagaacgcacctgcaataaaacagtcttgtcggccagctgcccaggggacggcagctacagcagcctctgcgtcctggtccgccagcacctcccgcttctccgtggtgacttggcgccgcttcctcacatctgtgctccgtgccctcttccctgcctcttccctcgcccacctgcctgcccccatactcccccagcggagagcatgatccgtgcccttgcttctgactttcgcctctgggacaagtaagtcaatgtgggcagttcagtcgtctgggttttttccccttttctgttcatttcatctggctccccccaccacctccccaccccaccccccaccccctgcttcccctcactgcccaggtcgatcaagtggcttttcctgggacctgcccagctttgagaatctcttctcatccaccctctggcacccagcctctgagggaaggagggatggggcatagtgggagacccagccaagagctgagggtaagggcaggtaggcgtgaggctgtggacattttcggaatgttttggttttgttttttttaaaccgggcaatattgtgttcagttcaagctgtgaagaaaaatatatatcaatgttttccaataaaatacagtgactacctgaaaaaaaaaaaaaaaaaaa

SEQ ID NO: 397297 - DNA, 1000 bp, Homo Sapiens; identical to SEQ ID NO: 286755

SEQ ID NO: 397298 - DNA, 1000 bp, Homo Sapiens; identical to SEQ ID NO: 221634

SEQ ID NO: 397299 - DNA, 1000 bp, Homo Sapiens; identical to SEQ ID NO: 116365

SEQ ID NO: 397300 - DNA, 1000 bp, Homo Sapiens; identical to SEQ ID NO: 221636

SEQ ID NO: 397301 - DNA, 1000 bp, Homo Sapiens; identical to SEQ ID NO: 116367

SEQ ID NO: 397302 - DNA, 1000 bp, Homo Sapiens; identical to SEQ ID NO: 116368

SEQ ID NO: 397303 - DNA, 1000 bp, Homo Sapiens; identical to SEQ ID NO: 286762

SEQ ID NO: 397304 - DNA, 1000 bp, Homo Sapiens; identical to SEQ ID NO: 286763

SEQ ID NO: 397305 - DNA, 1000 bp, Homo Sapiens; identical to SEQ ID NO: 286764

SEQ ID NO: 397306 - DNA, 425 bp, Homo Sapiens; identical to SEQ ID NO: 116369

SEQ ID NO: 397307 - DNA, 1000 bp, Homo Sapiens; identical to SEQ ID NO: 221638

SEQ ID NO: 397308 - DNA, 700 bp, Homo Sapiens; identical to SEQ ID NO: 116370

SEQ ID NO: 397309 - DNA, 1000 bp, Homo Sapiens; identical to SEQ ID NO: 116371

SEQ ID NO: 397310 - DNA, 1000 bp, Homo Sapiens; identical to SEQ ID NO: 286769

SEQ ID NO: 397311 - DNA, 487 bp, Homo Sapiens; identical to SEQ ID NO: 286770

SEQ ID NO: 397312 - DNA, 1000 bp, Homo Sapiens; identical to SEQ ID NO: 116372

SEQ ID NO: 397313 - DNA, 1000 bp, Homo Sapiens
cgggtggggacctgaactggtcaccgccctgcacttctagccctcatttaagatttgagggtgaaaccaaagaaaaccccctaagtgagggaatcttttaatatttgtggctttagaggaaagaactaaaggagccatctctctcccctctcctccgttccgagaggaggggtgggtctcagacgtttttcctatggacttatttcttccatgtccaggactttgcacaactttggttttaaaagctgttgaaaaataggaaaacaaagggcattgttcacagatagggccaagtctccccttgcaagggtgcctctgttctgtccctgcccccacctcaccttctctactcctccagtaagttggcagttttggtgccaaaccccaaatctccaaagagacataccaggcaagacaaacccccaaacacctcctttccggtggccttggaaacagattgctccgagctggagaatgtcgggtgaggtgtatgggagaggaggggagagttagaacttgtgcctttgggagtaaggggtaactgcctggagggctggtggcactgcccctccctgacccagacatcccaccaaagctaactttcccccacccctgatgcagtaaaacattgaaaaaaaaaaaaaaggagaggtagaagactgtagctatatatataaatatatagtaagttttttttttttaagagcaacagagagaagcagcctcctccctgctgcggtttcctatttatgtggccatgttcctcctggacggatctccctgtgtgtttcaagctgagagatgtgggctccggctggatttgggttttgtgggaggtgcaggggccaagagagacgtggtaggtctccaagagtcccacccgggggggaagaagcaaagccatctcccaccccctcctagccttctcatttctgctttcttactggactcatctttatatataatgttaataaaaaagacgaaaataaaaaaaaaaaaa

SEQ ID NO: 397314 - DNA, 1000 bp, Homo Sapiens
cagtatcacggcgtgaacggctccgccgggagctacccagccaaagcttatgccgactatagctacgctagctcctaccaccagtacggcggcgcctacaaccgcgtcccaagcgccaccaaccagccagagaaagaagtgaccgagcccgaggtgagaatggtgaatggcaaaccaaagaaagttcgtaaacccaggactatttattccagctttcagctggccgcattacagagaaggtttcagaagactcagtacctcgccttgccggaacgcgccgagctggccgcctcgctgggattgacacaaacacaggtgaaaatctggtttcagaacaaaagatccaagatcaagaagatcatgaaaaacggggagatgcccccggagcacagtcccagctccagcgacccaatggcgtgtaactcgccgcagtctccagcggtgtgggagccccagggctcgtcccgctcgctcagccaccaccctcatgcccaccctccgacctccaaccagtccccagcgtccagctacctggagaactctgcatcctggtacacaagtgcagccagctcaatcaattcccacctgccgccgccgggctccttacagcacccgctggcgctggcctccgggacactctattagatgggctgctctctcttactctcttttttgggactactgtgttttgctgttctagaaaatcataaagaaaggaattcatatggggaagttcggaaaactgaaaaagattcatgtgtaaagcttttttttgcatgtaagttattgcatttcaaaagaccccccctttttttacagaggactttttttgcgcaactgtggacactttcaatggtgccttgaaatctatgacctcaacttttcaaaagacttttttcaatgttattttagccatgtaaataagtgtagatagaggaattaaactgtatattctggataaataaaattatttcgaccatgaaaaaaaaaaaaaaaaaaa

SEQ ID NO: 397315 - DNA, 1000 bp, Homo Sapiens; identical to SEQ ID NO: 116373

SEQ ID NO: 397316 - DNA, 1000 bp, Homo Sapiens; identical to SEQ ID NO: 221641

SEQ ID NO: 397317 - DNA, 1000 bp, Homo Sapiens; identical to SEQ ID NO: 116374

SEQ ID NO: 397318 - DNA, 1000 bp, Homo Sapiens; identical to SEQ ID NO: 221642

SEQ ID NO: 397319 - DNA, 1000 bp, Homo Sapiens; identical to SEQ ID NO: 221643

SEQ ID NO: 397320 - DNA, 1000 bp, Homo Sapiens; identical to SEQ ID NO: 116375

SEQ ID NO: 397321 - DNA, 1000 bp, Homo Sapiens; identical to SEQ ID NO: 221644

SEQ ID NO: 397322 - DNA, 1000 bp, Homo Sapiens
tgttcttatgcaaaatggaacgctaatgaaacacagcttacaatcgcaaatcaaaactcacaagtgctcatctgttgtagatttagtgtaataagacttagattgtgctccttcggatatgattgtttctcaaatcttggcaatattccttagtcaaatcaggctactagaattctgtattggatatataagagcatgaaatttttaaaaatacacttgtgattataaaattaatcacaaatttcacttatacctgctatcagcagctagaaaacattttttttttaaatcaagtattttgtgtttggaatgttagaatgagatctgaatgtggtttcaatctaattttttcccagactactattttcttttttaggtactattctgagcatactcaacaaaacccatgcatttcataaactaatagaagttgaggattgttgaatctatttcacttattttggctgtggtttccatctgaaagtagaggttgtatacaccatatactgttcttcattttattaatatttttctccttgacctctcataaatttactttacacaattcttaccctgtacatatgtaaacataagtgtacgattcttaaccatggagtagaggtactagaatgcttacggccatctctttgtacaggaactgcattgactttcagtaaacataaagccacaactcctacatgatgttatgtaccatatgatctgttttgtatcttaaatttgatttacatatattatttatttctggtaactcactcagtttatgctgtgctaaatatcaatcaagccatgtataaatgtgatatgattggcaatatgtgtttactttaaacttgtcttttcaaaatattactcagtttatgttgtacaatgtagatggcctcttactaatgtaaaatgatttgtagtggaaacatttatatttttataataaacataatgaaaatattttttacagattggaaaaaaaaaaaaaaaaaaa

SEQ ID NO: 397323 - DNA, 1000 bp, Homo Sapiens; identical to SEQ ID NO: 221645

SEQ ID NO: 397324 - DNA, 1000 bp, Homo Sapiens; identical to SEQ ID NO: 116377

SEQ ID NO: 397325 - DNA, 1000 bp, Homo Sapiens; identical to SEQ ID NO: 116378

SEQ ID NO: 397326 - DNA, 1000 bp, Homo Sapiens; identical to SEQ ID NO: 221647

SEQ ID NO: 397327 - DNA, 1000 bp, Homo Sapiens
tcttgtaccacttcatcaaaatcatggatcttggctgggtgcggtgcctcatgcctgtaatcctagcactttgggaggctgaggcaggcaatcacttgaggtcaggagttcgagaccagcctggccatcatggcgaaacctcatctctactaaaaatacaaaagttaaccaggtgtgtggtgcacgtttgtaatcccagttactcaggaggctgaggcacaagaattgagtatcactttaactcaggaggcagaggttgcagtgagccgagattgcaccactgcactccagcttgggtgataaaataaaataaaatagtcgtgaatcttgttcaaaatgcagattcctcagattcaataatgagagctcagactgggaacagggcccaggaatctgtgtggtacaaacctgcatggtgtttatgcacacagagatttgagaaccattgttctgaatgctgcttccatttgacaaagtgccgtgataatttttgaaaagagaagcaaacaatggtgtctcttttatgttcagcttataatgaaatctgtttgttgacttattaggactttgaattatttctttattaaccctctgagtttttgtatgtattattattaaagaaaaatgcaatcaggattttaaacatgtaaatacaaattttgtataacttttgatgacttcagtgaaattttcaggtagtctgagtaatagattgttttgccacttagaatagcatttgccacttagtattttaaaaaataattgttggagtatttattgtcagttttgttcacttgttatctaatacaaaattataaagccttcagagggtttggaccacatctctttggaaaatagtttgcaacatatttaagagatacttgatgccaaaatgactttatacaacgattgtatttgtgacttttaaaaataattattttattgtgtaattgatttataaataacaaaattttttttacaacttaaaaaaaaaaaaaaa

SEQ ID NO: 397328 - DNA, 1000 bp, Homo Sapiens
ccaatgaacagtatgcggggtggtctgccaccccgtgagggcagaggcatgccaccaccactccgtggaggtccaggaggcccaggaggtcctgggggacccatgggtcgcatgggaggccgtggaggagatagaggaggcttccctccaagaggaccccggggttcccgagggaacccctctggaggaggaaacgtccagcaccgagctggagactggcagtgtcccaatccgggttgtggaaaccagaacttcgcctggagaacagagtgcaaccagtgtaaggccccaaagcctgaaggcttcctcccgccaccctttccgcccccgggtggtgatcgtggcagaggtggccctggtggcatgcggggaggaagaggtggcctcatggatcgtggtggtcccggtggaatgttcagaggtggccgtggtggagacagaggtggcttccgtggtggccggggcatggaccgaggtggctttggtggaggaagacgaggtggccctggggggccccctggacctttgatggaacagatgggaggaagaagaggaggacgtggaggacctggaaaaatggataaaggcgagcaccgtcaggagcgcagagatcggccctactagatgcagagaccccgcagagctgcattgactaccagatttattttttaaaccagaaaatgttttaaatttataattccatatttataatgttggccacaacattatgattattccttgtctgtactttagtatttttcaccatttgtgaagaaacattaaaacaagttaaatggtagtgtgcggagtttttttttcttccttcttttaaaaatggttgtttaagactttaacaatgggaaccccttgtgagcatgctcagtatcattgtggagaaccaagagggcctcttaactgtaacaatgttcatggttgtgatgttttttttttttttttaaaataaaattccaaatgtttaataaaaaaaaaaaaaaaaaaa

SEQ ID NO: 397329 - DNA, 1000 bp, Homo Sapiens; identical to SEQ ID NO: 286782

SEQ ID NO: 397330 - DNA, 1000 bp, Homo Sapiens; identical to SEQ ID NO: 221648

SEQ ID NO: 397331 - DNA, 1000 bp, Homo Sapiens
ggccctggggcgcggttgcggcgcgatgcgggcggccgtggcggcgtctacgagcaccttggcggggcgccccggcgccgcaagctctactgcgccacgaagtaccacctccagctgcacccgagcggccgcgtcaacggcagcctggagaacagcgcctacagtattttggagataacggcagtggaggtgggcattgtggccatcaggggtctcttctccgggcggtacctggccatgaacaagaggggacgactctatgcttcggagcactacagcgccgagtgcgagtttgtggagcggatccacgagctgggctataatacgtatgcctcccggctgtaccggacggtgtctagtacgcctggggcccgccggcagcccagcgccgagagactgtggtacgtgtctgtgaacggcaagggccggccccgcaggggcttcaagacccgccgcacacagaagtcctccctgttcctgccccgcgtgctggaccacagggaccacgagatggtgcggcagctacagagtgggctgcccagaccccctggtaagggggtccagccccgacggcggcggcagaagcagagcccggataacctggagccctctcacgttcaggcttcgagactgggctcccagctggaggccagtgcgcactagctgggcctggtggccaccgccagagctcctggcgacatcttggcgtggcagcctcttgactctgactctcctccttgagcccttgcccctgcgtcccgcgtctgggttctcagctatttccagagccagctcaaatcagggtccagtgggaactgaagagggcccaagtcggagctcggagggggctgcctgcaatgcagggcatttgtgggtctgtgtggcaggaagccggcagggaagggcctgagtgccagccctggcagactgaggagcctcccaggagcagcggggcagtgtggggctttgtgtcatcacaacattaaagtattttattcta

SEQ ID NO: 397332 - DNA, 1000 bp, Homo Sapiens; identical to SEQ ID NO: 116380

SEQ ID NO: 397333 - DNA, 1000 bp, Homo Sapiens
aaagaaggacgtgtccaaggagaaggaggagcgggcccacctcaaggagccgcccccggcggcgtccaagggcgccccggccaccccccacctagcggacgcccccaaggaggccgagaagaaggtggtgatcaagagcgaggcggcgtccccggcgctgccggtcatcaccaaggtggagacgctgagccccgagagcgcgctgcagggcagcccgcgcagcgcggcctccacgcccgccggctcccccgacggttcgctgccggagcaccacgccgcggcgcccaacgggctgcctggcttcagcgtggagaacatcatgaccctgcgaacgtcgccgccgggcggagagctgagcccgggggccggacgcgcgggcctggtggtgccgccgctggcgctgccatacgccgccgcgccgcccgccgcctacggccagccgtgcgctcagggcctggaggccggggccgccgggggctaccagtgcagcatgcgagcgatgagcctgtacaccggggccgagcggccggcgcacatgtgcgtcccgcccgccctggacgaggccctctcggaccacccgagcggccccacgtcgcccctgagcgctctcaacctcgccgccggccaggagggcgcgctcgccgccacgggccaccaccaccagcaccacggccaccaccacccgcaggcgccgccgcccccgccggctccccagccccagccgacgccgcagcccggggccgccgcggcgcaggcggcctcctggtatctcaaccacagcggggacctgaaccacctccccggccacacgttcgcggcccagcagcaaactttccccaacgtgcgggagatgttcaactcccaccggctggggattgagaactcgaccctcggggagtcccaggtgagtggcaatgccagctgccagctgccctacagatccacgccgcctctctatcgccacgcagccccctactcctacgactgcacgaaatactga

SEQ ID NO: 397334 - DNA, 1000 bp, Homo Sapiens; identical to SEQ ID NO: 116381

SEQ ID NO: 397335 - DNA, 1000 bp, Homo Sapiens; identical to SEQ ID NO: 116382

SEQ ID NO: 397336 - DNA, 1000 bp, Homo Sapiens; identical to SEQ ID NO: 286788

SEQ ID NO: 397337 - DNA, 1000 bp, Homo Sapiens; identical to SEQ ID NO: 286790

SEQ ID NO: 397338 - DNA, 1000 bp, Homo Sapiens; identical to SEQ ID NO: 221650

SEQ ID NO: 397339 - DNA, 1000 bp, Homo Sapiens; identical to SEQ ID NO: 118911

SEQ ID NO: 397340 - DNA, 1000 bp, Homo Sapiens; identical to SEQ ID NO: 116383

SEQ ID NO: 397341 - DNA, 1000 bp, Homo Sapiens; identical to SEQ ID NO: 221651

SEQ ID NO: 397342 - DNA, 1000 bp, Homo Sapiens; identical to SEQ ID NO: 286794

SEQ ID NO: 397343 - DNA, 1000 bp, Homo Sapiens
cccacatccacagcctctcttttcccattacccccagccctctcctccccaatatctccagtcaggcccctatacccagccaccccctgattatcttccttcagaacccaggccttgcctggactttgattcccccacccattccacagggcagctcaaggctcagcttgtgtgtaattatgttcaatctcaacaggagctactgtgggagggtgggggcagggaagatgcccccgcccaggaaccttcctaccagagtcccaagtttctggggggttcccaggttagcccaagccgtgctaaagctccagtgaacacatatggacctggctttggacccaacttgcccaatcacaagtcaggttcctatcccaccccttcaccatgccatgaaaattttgtagtgggggcaaatagggcttcacatagggcagcagcaccacctcgacttctgcccccattgcccacttgctatgggcctctcaaagtgggaggcacaaaccccagctgtggtcatcctgaggtgggcaggctaggagggggtcctgccttgtaccctcctcccgaaggacaggtatgtaaccccctggactctcttgatcttgacaacactcagctggactttgtggctattctggatgagccccaggggctgagtcctcctccttcccatgatcagcggggcagctctggacataccccacctccctctgggccccccaacatggctgtgggcaacatgagtgtcttactgagatccctacctggggaaacagaattcctcaactctagtgcctaaagagtagggaatctcatccatcacagatcgcatttcctaaggggtttctatccttccagaaaaattgggggagctgcagtcccctgcacaagatgccccagggatgggaggtatgggctgggggctatgtatagtctgtatacgttttgaggagaaatttgataatgacactgtttcctgataataaaggaactgcatcag

SEQ ID NO: 397344 - DNA, 1000 bp, Homo Sapiens; identical to SEQ ID NO: 116384

SEQ ID NO: 397345 - DNA, 1000 bp, Homo Sapiens; identical to SEQ ID NO: 286795

SEQ ID NO: 397346 - DNA, 1000 bp, Homo Sapiens
cgggagctgcctggccacactgggtacctgtcgtgttgccgcttcctggatgacaaccaaatcatcaccagctctggggataccacctgtgccctgtgggacattgagacaggccagcagacagtgggttttgctggacacagtggggatgtgatgtccctgtccctggcccccgatggccgcacgtttgtgtcaggcgcctgtgatgcctctatcaagctgtgggacgtgcgggattccatgtgccgacagaccttcatcggccatgaatccgacatcaatgcagtggctttcttccccaacggctacgccttcaccaccggctctgacgacgccacgtgccgcctcttcgacctgcgggccgatcaggagctcctcatgtactcccatgacaacatcatctgtggcatcacctctgttgccttctcgcgcagcggacggctgctgctcgctggctacgacgacttcaactgcaacatctgggatgccatgaagggcgaccgtgcaggagtcctcgctggccacgacaaccgcgtgagctgcctcggggtcaccgacgatggcatggctgtggccacgggctcctgggactccttcctcaagatctggaactaatggccccacccccactgggcccaggccaggaggggccctgcccatgcccacactacaggccagggctgcggggctggcgcaatcccagcccccttccccgggccacggggccttgggtccctgccctcccacccaggtttggttcctcccggggcccccactgtggagataagaaggggatggaatgggggaagaggaggagcaggaggccctcatccttctgctgccctggggttggggcctcacccctctggagggccggaggcaggaggtggaaaccccaggggctggcttttttaaaactggttttattttaatttttattatattttcagtttttccataaaggagccaattccaactctgtaaaaaaaaaaaaaaaaaa

SEQ ID NO: 397347 - DNA, 1000 bp, Homo Sapiens; identical to SEQ ID NO: 221652

SEQ ID NO: 397348 - DNA, 1000 bp, Homo Sapiens; identical to SEQ ID NO: 286797

SEQ ID NO: 397349 - DNA, 1000 bp, Homo Sapiens; identical to SEQ ID NO: 221653

SEQ ID NO: 397350 - DNA, 1000 bp, Homo Sapiens; identical to SEQ ID NO: 286800

SEQ ID NO: 397351 - DNA, 1000 bp, Homo Sapiens
cctggtcctgtgggtcctggtgaagtatgagagcctggagtccctcaccaacatcttcatcctcaacctgtgcctctcagacctggtgttcgcctgcttgttgcctgtgtggatctccccataccactggggctgggtgctgggagacttcctctgcaaactcctcaatatgatcttctccatcagcctctacagcagcatcttcttcctgaccatcatgaccatccaccgctacctgtcggtagtgagccccctctccaccctgcgcgtccccaccctccgctgccgggtgctggtgaccatggctgtgtgggtagccagcatcctgtcctccatcctcgacaccatcttccacaaggtgctttcttcgggctgtgattattccgaactcacgtggtacctcacctccgtctaccagcacaacctcttcttcctgctgtccctggggattatcctgttctgctacgtggagatcctcaggaccctgttccgctcacgctccaagcggcgccaccgcacggtcaagctcatcttcgccatcgtggtggcctacttcctcagctggggtccctacaacttcaccctgtttctgcagacgctgtttcggacccagatcatccggagctgcgaggccaaacagcagctagaatacgccctgctcatctgccgcaacctcgccttctcccactgctgctttaacccggtgctctatgtcttcgtgggggtcaagttccgcacacacctgaaacatgttctccggcagttctggttctgccggctgcaggcacccagcccagcctcgatcccccactcccctggtgccttcgcctatgagggcgcctccttctactgaggggcctgtggcggtgcaggcgcaggtgcaggtggacagggactggaatgggggtcatggagaagcgggcctggaaggagcattgcagaacacagcagggtggagacgtctcctccgctgcaggcgtgcagtgaaggtcattcatta

SEQ ID NO: 397352 - DNA, 1000 bp, Homo Sapiens
ctgcagcgtggtgcgcccgctggcgcgcagccacgtggctctgctctccgccgccttcttcatggtcttcggcatcatgctgcacctgtacgtgcgcatctgccaggtggtctggcgccacgcgcaccagatcgcgctgcagcagcactgcctggcgccaccccatctcgctgccaccagaaagggtgtgggtacactggctgtggtgctgggcactttcggcgccagctggctgcccttcgccatctattgcgtggtgggcagccatgaggacccggcggtctacacttacgccaccctgctgcccgccacctacaactccatgatcaatcccatcatctatgccttccgcaaccaggagatccagcgcgccctgtggctcctgctctgtggctgtttccagtccaaagtgccctttcgttccaggtctcccagcgaggtctgaagggctcgccccgtgtcctctcaccaacaccacaccccaacaagccagcctttggtaagctcggtgcctgctgacgaactctgagatcccaatggtgtgagtctgactttggaaagaaaaagggactaaagagaaatgtaacaaacttacaaggacaaagaggcttgttggcactttacatatacagtgtatacatgtgtacatatatatacaaatatttgtatcttctggaggtgttcaggatgtggagcttcctgttctgtgaaaaaccaagaaaaagatatggttgtatactcaaattgtacatcacgtttgtcaaacgaagacattccaatactgcttaattatagcactttatttttagctgctgaactgccaaaacagtgttgccattttcaagggcagggaaaagggagtaaaaggtgtatttttgtcgtatgtgatagaatattttgctgcacatgcatcaacaaattacaacatgttttgtacacgaataaacccattacaagaatgtaaaaaaaaaaaaaaaaaaaaagaaaaaaaaaaaaaaaa

SEQ ID NO: 397353 - DNA, 1000 bp, Homo Sapiens; identical to SEQ ID NO: 286801

SEQ ID NO: 397354 - DNA, 1000 bp, Homo Sapiens; identical to SEQ ID NO: 286802

SEQ ID NO: 397355 - DNA, 1000 bp, Homo Sapiens; identical to SEQ ID NO: 286803

SEQ ID NO: 397356 - DNA, 1000 bp, Homo Sapiens; identical to SEQ ID NO: 221655

SEQ ID NO: 397357 - DNA, 1000 bp, Homo Sapiens
gtttgaaggtatactgtagagtttttattgctgttttgttcagtaattataggtcaaatctaattacaacaaccaagatggattgccaaactcttctgcttggttggaatttcattgtatcgcattatccaggtggctagtggcatttgataatatagagatgactttgaaactttcaaaaaggtatttctattccaatgatatttggtaattaggttgggcctataaatatagaacaaattcagggatttttaaaaaattgtgttactactgatatatgctagttttattttatttttttggactgtcattgagtttattttagcacaagaatatttttagcctaacattattaataagaaatgtgtcaaatttttaacattggtaaaatatgttatgtgcattttgaaaacagaaaacaaattgcgttggcatgtacgtgggtgggaagaaaaagaaaattaacaggatttacacaattataatcaccagcagtgtgagtttaaaaaacttcgttgtttttacaccaaattaaaattttcatgtcaaacttcaaagccagaaagctgctaaatacgtgtctggcaggtaaaagctggaaaattacttaaaacaggaaagtgtcaataaaaaaacttgagcaacaccaacatattttttcttaaaatgtcacgttatcttcattttgggaaactaggttctataaaatatttatcctccctgttatactttggagcacagcacagccagaaaggggctgcatttgtgcccaggtcaggagcaaattgaaaaaaaaaataaagtaatactaaaaaatcaaactataaacccaaaacatttattaaaacctgaattaatcctttttggagggaggagtagagatatataacctgaaaatacttattctttcttatcgaattttggagcctaatatagccaggagctgctgaatttgtgcccctggattggaaccaaataaaaaaaaaaaaaaaaaattcct

SEQ ID NO: 397358 - DNA, 1000 bp, Homo Sapiens; identical to SEQ ID NO: 116386

SEQ ID NO: 397359 - DNA, 903 bp, Homo Sapiens
atggacctgcccccgcagctctccttcggcctctatgtggccgcctttgcgctgggcttcccgctcaacgtcctggccatccgaggcgcgacggcccacgcccggctccgtctcacccctagcctggtctacgccctgaacctgggctgctccgacctgctgctgacagtctctctgcccctgaaggcggtggaggcgctagcctccggggcctggcctctgccggcctcgctgtgccccgtcttcgcggtggcccacttcttcccactctatgccggcgggggcttcctggccgccctgagtgcaggccgctacctgggagcagccttccccttgggctaccaagccttccggaggccgtgctattcctggggggtgtgcgcggccatctgggccctcgtcctgtgtcacctgggtctggtctttgggttggaggctccaggaggctggctggaccacagcaacacctccctgggcatcaacacaccggtcaacggctctccggtctgcctggaggcctgggacccggcctctgccggcccggcccgcttcagcctctctctcctgctcttttttctgcccttggccatcacagccttctgctacgtgggctgcctccgggcactggcccgctccggcctgacgcacaggcggaagctgcgggccgcctgggtggccggcggggccctcctcacgctgctgctctgcgtaggaccctacaacgcctccaacgtggccagcttcctgtaccccaatctaggaggctcctggcggaagctggggctcatcacgggtgcctggagtgtggtgcttaatccgctggtgaccggttacttgggaaggggtcctggcctgaagacagtgtgtgcggcaagaacgcaagggggcaagtcccagaagtaa

SEQ ID NO: 397360 - DNA, 1000 bp, Homo Sapiens; identical to SEQ ID NO: 221658

SEQ ID NO: 397361 - DNA, 1000 bp, Homo Sapiens
gagcttcaccgtgcactgggccaggcgcgtgaccactgccgccctcgtgcgctctgtgtcatcaaccctggcaaccccaccgggcaggtgcagacccgcgagtgcatcgaggccgtgatccgcttcgccttcgaagagcggctctttctgctggcggacgaggtgtaccaggacaacgtgtacgccgcgggttcgcagttccactcattcaagaaggtgctcatggagatggggccgccctacgccgggcagcaggagcttgcctccttccactccacctccaagggctacatgggcgagtgcgggttccgcggcggctatgtggaggtggtgaacatggacgctgcagtgcagcagcagatgctgaagctgatgagtgtgcggctgtgcccgccggtgccaggacaggccctgctggacctggtggtcagcccgcccgcgcccaccgacccctcctttgcgcagttccaggctgagaagcaggcagtgctggcagagctggcggccaaggccaagctcaccgagcaggtcttcaatgaggctcctggcatcagctgcaacccagtgcagggcgccatgtactccttcccgcgcgtgcagctgcccccgcgggcggtggagcgcgctcaggagctgggcctggcccccgatatgttcttctgcctgcgcctcctggaggagaccggcatctgcgtggtgccagggagcggctttgggcagcgggaaggcacctaccacttccggatgaccattctgccccccttggagaaactgcggctgctgctggagaagctgagcaggttccatgccaagttcaccctcgagtactcctgagcaccccagctggggccaggctgggtcgccctggactgtgtgctcaggagccctgggaggctctggagcccactgtacttgctcttgatgcctggcggggtggggtggggggggtgctgggcccctgcctctctgcaggtccctaataaagctgtgtggcagtctg

SEQ ID NO: 397362 - DNA, 1000 bp, Homo Sapiens; identical to SEQ ID NO: 115229

SEQ ID NO: 397363 - DNA, 1000 bp, Homo Sapiens; identical to SEQ ID NO: 116389

SEQ ID NO: 397364 - DNA, 947 bp, Homo Sapiens; identical to SEQ ID NO: 286807

SEQ ID NO: 397365 - DNA, 1000 bp, Homo Sapiens; identical to SEQ ID NO: 116390

SEQ ID NO: 397366 - DNA, 732 bp, Homo Sapiens
catcggcgctttgccacttgtacccgagtttttgattctcaacatgtccgagactgctcctgccgctcccgctgccgcgcctcctgcggagaaggcccctgtaaagaagaaggcggccaaaaaggctgggggtacgcctcgtaaggcgtctggtcccccggtgtcagagctcatcaccaaggctgtggccgcctctaaagagcgtagcggagtttctctggctgctctgaaaaaagcgttggctgccgccggctatgatgtggagaaaaacaacagccgtatcaaacttggtctcaagagcctggtgagcaagggcactctggtgcaaacgaaaggcaccggtgcttctggctcctttaaactcaacaagaaggcagcctccggggaagccaagcccaaggttaaaaaggcgggcggaaccaaacctaagaagccagttggggcagccaagaagcccaagaaggcggctggcggcgcaactccgaagaagagcgctaagaaaacaccgaagaaagcgaagaagccggccgcggccactgtaaccaagaaagtggctaagagcccaaagaaggccaaggttgcgaagcccaagaaagctgccaaaagtgctgctaaggctgtgaagcccaaggccgctaagcccaaggttgtcaagcctaagaaggcggcgcccaagaagaaataggcgaacgcctacttctaaaacccaaaaggctcttttcagagccacca

SEQ ID NO: 397367 - DNA, 785 bp, Homo Sapiens; identical to SEQ ID NO: 29597

SEQ ID NO: 397368 - DNA, 1000 bp, Homo Sapiens; identical to SEQ ID NO: 116391

SEQ ID NO: 397369 - DNA, 1000 bp, Homo Sapiens; identical to SEQ ID NO: 116392

SEQ ID NO: 397370 - DNA, 1000 bp, Homo Sapiens; identical to SEQ ID NO: 286812

SEQ ID NO: 397371 - DNA, 1000 bp, Homo Sapiens; identical to SEQ ID NO: 286813

SEQ ID NO: 397372 - DNA, 589 bp, Homo Sapiens
accaaggccagtcctgagcaggcccaactccagtgcagctgcccaccctgccgccatgtctctgaccaagactgagaggaccatcattgtgtccatgtgggccaagatctccacgcaggccgacaccatcggcaccgagactctggagaggctcttcctcagccacccgcagaccaagacctacttcccgcacttcgacctgcacccggggtccgcgcagttgcgcgcgcacggctccaaggtggtggccgccgtgggcgacgcggtgaagagcatcgacgacatcggcggcgccctgtccaagctgagcgagctgcacgcctacatcctgcgcgtggacccggtcaacttcaagctcctgtcccactgcctgctggtcaccctggccgcgcgcttccccgccgacttcacggccgaggcccacgccgcctgggacaagttcctatcggtcgtatcctctgtcctgaccgagaagtaccgctgagcgccgcctccgggacccccaggacaggctgcggcccctcccccgtcctggaggttccccagccccacttaccgcgtaatgcgccaataaaccaatgaacgaagc

SEQ ID NO: 397373 - DNA, 1000 bp, Homo Sapiens; identical to SEQ ID NO: 116393

SEQ ID NO: 397374 - DNA, 1000 bp, Homo Sapiens; identical to SEQ ID NO: 286815

SEQ ID NO: 397375 - DNA, 1000 bp, Homo Sapiens; identical to SEQ ID NO: 221665

SEQ ID NO: 397376 - DNA, 1000 bp, Homo Sapiens; identical to SEQ ID NO: 286817

SEQ ID NO: 397377 - DNA, 1000 bp, Homo Sapiens; identical to SEQ ID NO: 221666

SEQ ID NO: 397378 - DNA, 1000 bp, Homo Sapiens; identical to SEQ ID NO: 286819

SEQ ID NO: 397379 - DNA, 675 bp, Homo Sapiens
gcacgcgcaagattaggtggggcgccagagccggggcacctgcgcaggcttggctgcgccctctcgcgccgcacgctctgcgggttcctcccttcttccgagcctctcctctggccgccgcgcgggagagaggccgagatggcagatgagattgccaaggctcaggtcgctcggcctggtggcgacacgatctttgggaagatcatccgcaaggaaataccagccaaaatcatttttgaggatgaccggtgccttgctttccatgacatttcccctcaagcaccaacacattttctggtgatacccaagaaacatatatcccagatttctgtggcagaagatgatgatgaaagtcttcttggacacttaatgattgttggcaagaaatgtgctgctgatctgggcctgaataagggttatcgaatggtggtgaatgaaggttcagatggtggacagtctgtctatcacgttcatctccatgttcttggaggtcggcaaatgcattggcctcctggttaagcacgttttggggataattttctcttctttaggcaatgattaagttaggcaatttccagtatgttaagtaacacacttatttttgcctgtgtatggagagattcaagaaataattttaaaaccgcatacataataaaagacattgttgcatggctt

SEQ ID NO: 397380 - DNA, 1000 bp, Homo Sapiens; identical to SEQ ID NO: 116394

SEQ ID NO: 397381 - DNA, 1000 bp, Homo Sapiens; identical to SEQ ID NO: 286821

SEQ ID NO: 397382 - DNA, 1000 bp, Homo Sapiens; identical to SEQ ID NO: 221668

SEQ ID NO: 397383 - DNA, 1000 bp, Homo Sapiens; identical to SEQ ID NO: 286823

SEQ ID NO: 397384 - DNA, 1000 bp, Homo Sapiens
ataacctcagccagcgagatctggccatcagcattaacttctgggttcctgtcctgctgaacggggtggctgtgtgggatgtggtcatggaggccccatctcagagtctcccctgtgtttcagagagaaaacctccccagcattctgacttcctgacccagatttcaagaagtcccatgctggactgctccattgctgactgcctgcagttccgctgtgacgtcccctccttcagcgtccaggaggagctggatttcaccctgaagggcaatctcagtttcggctgggtccgcgagacattgcagaagaaggtgttggtcgtgagtgtggctgaaattacgttcgacacatccgtgtactcccagcttccaggacaggaggcatttatgagagctcagatggagatggtgctagaagaagacgaggtctacaatgccattcccatcatcatgggcagctctgtgggggctctgctactgctggcgctcatcacagccacactgtacaagcttggcttcttcaaacgccactacaaggaaatgctggaggacaagcctgaagacactgccacattcagtggggacgatttcagctgtgtggccccaaatgtgcctttgtcctaataatccactttcctgtttatctctaccactgtgggctggacttgcttgcaaccataaatcaacttacatggaaacaacttctgcatagatctgcactggcctaagcaacctaccaggtgctaagcaccttctcggagagatagagattgtaatgtttttacatatctgtccatctttttcagcaatgacccactttttacagaagcaggcatggtgccagcataaattttcatatgcttaagaattgtcacatgaaatgaggatgtttatagcacactttccttgcgtggaagagctataacccagggacctgagtgcctctctgggaatagtcgggggaacctatttgtgggcattgaaaaagttttttcactttc

SEQ ID NO: 397385 - DNA, 1000 bp, Homo Sapiens; identical to SEQ ID NO: 116395

SEQ ID NO: 397386 - DNA, 1000 bp, Homo Sapiens
ggtttatggtccagcagagtctcagagcgcggtctttggagatgtgtgccccctactcacttctctcttggatgggtacaatgtttgtgttatggcgtatggacagacgggcagcggaaagagctataccatgctgggacgccattcggacgacggccctgttctgccgcttgacccacagagtgacttaggaattatccctagagtggctgaggagctcttcaggctcattttggaaaatacctcaagaagcccaaaggttgaagtctccatagtggaagtttacaataatgacatttttgaccttctggccaaagacagcattgcagcagtgtcgggggtcaagcgtgaggtggtgacagccaaggatggacggacagaggttgcgctgctggcctctgaggctgtcggcagcgcctcgaaactgatggagctcgttcatggaggtctgcagctcagggcgaagcaccccaccctggtgcacgcggattcctccaggtctcacctgataattacggtgactctaaccacagcctcctgctctgacagcactgcagaccaagcctgcagtgccaccctccccagggagcaaacagaggcaggaagggcaggaaggagccgcagagcttctcaaggggccttggctccacagctggttcctgggaaccccgcagggcatgcggagcaggtgcaggctcgactacagctcgtggactcggccggcagcgagtgcgttggaggcgatgcgaagttactggtgattctctgcatttctcccagccagaggcacctggcacagacgttgcagggcctgggtttcgggatccgagctcggcaagtccagcgaggccctgcccgaaagaagccgcccagctcccaaacggaggggaagaggaggccggattgaatgcattaacaagtttttctcctaaaactgtgtttcttgtccttgctttataatgcatatgtgcttagaaataaacaggtttcacgtggactc

SEQ ID NO: 397387 - DNA, 1000 bp, Homo Sapiens; identical to SEQ ID NO: 286826

SEQ ID NO: 397388 - DNA, 1000 bp, Homo Sapiens; identical to SEQ ID NO: 116396

SEQ ID NO: 397389 - DNA, 1000 bp, Homo Sapiens; identical to SEQ ID NO: 116397

SEQ ID NO: 397390 - DNA, 1000 bp, Homo Sapiens; identical to SEQ ID NO: 221670

SEQ ID NO: 397391 - DNA, 1000 bp, Homo Sapiens; identical to SEQ ID NO: 286831

SEQ ID NO: 397392 - DNA, 1000 bp, Homo Sapiens
ctgcaacacaaagctccaccaggaggctggttcacgtcccctaccacggaagcgaggtcccagaaggccagcggtggttccaggagcaacagctcccaaaccctgagcaaggcaaccgatcgccaggaccaggaagcatcacccaggagatttggcgcccacttccacctcttctctcagttttggacaagtgacaaaccattttgccccctcactcttcttttttaactgttaaaccaaaggaaagcacaaatgaaggaaatcctgtgtaaagcattgagaaggaaagaagcctggagcagcctctcctgtccacagccaggggttaggtctgcaggcccgtctgcggtccccatcgagcatcaaggggacgctgtgtgtgctgcaagtgaccccgaaaacaaccacagccgtcacatggtcctcctgaagttggggcaccctcctctcagcaccaaaatggcccccactccttcgtgtcctcccgctatctccaaatcggacgttctttctagctgagatttttatttttccacatctgtagtgccatgaagcgattctgtctttgacttccaatggcaaacctgggtgatcgggaacaagcacgttgtacccttggctggacatggccaagacacaaggcattccacggcggcaagctgaccgcacagcagtctggcttgattttcagccgtcatcattgggttctgttttgacagctctgctgtcccatagggactgcgactgggaccaggtcaaccacgccaggggggtgtcaccagccttttctttttttctttctttttttttttttcctccttaagctgctgtcaatccaaaccattggcatcatcgtttcttttgaattaaaaccaacatatcagcaatagtctgctctccccgggaatctctaacatgctctgtttacatcgataaatgcacttaaggaaaacaaacaaattaaagctcatcttaaagtccaaaaaaaaaaaaaaaaaaa

SEQ ID NO: 397393 - DNA, 1000 bp, Homo Sapiens; identical to SEQ ID NO: 116398

SEQ ID NO: 397394 - DNA, 1000 bp, Homo Sapiens; identical to SEQ ID NO: 286832

SEQ ID NO: 397395 - DNA, 1000 bp, Homo Sapiens; identical to SEQ ID NO: 221672

SEQ ID NO: 397396 - DNA, 1000 bp, Homo Sapiens; identical to SEQ ID NO: 116399

SEQ ID NO: 397397 - DNA, 1000 bp, Homo Sapiens; identical to SEQ ID NO: 286835

SEQ ID NO: 397398 - DNA, 1000 bp, Homo Sapiens
cttcattcgaagacgctaaagaagctttaaattcctgtaataaaagggaaattgagggcagagcaatcaggctggagttgcaaggacccaggggatcacctaatgccagaagccagccatccaaaactctgtttgtcaaaggcctgtctgaggataccactgaagagacattaaaggagtcatttgacggctccgttcgggcaaggatagttactgaccgggaaactgggtcctccaaagggtttggttttgtagacttcaacagtgaggaggatgccaaagctgccaaggaggccatggaagacggtgaaattgatggaaataaagttaccttggactgggccaaacctaagggtgaaggtggcttcgggggtcgtggtggaggcagaggcggctttggaggacgaggtggtggtagaggaggccgaggaggatttggtggcagaggccggggaggctttggagggcgaggaggcttccgaggaggcagaggaggaggaggtgaccacaagccacaaggaaagaagacgaagtttgaatagcttctgtccctctgctttcccttttccatttgaaagaaaggactctggggtttttactgttacctgatcaatgacagagccttctgaggacattccaagacagtatacagtcctgtggtctccttggaaatccgtctagttaacatttcaagggcaataccgtgttggttttgactggatattcatataaactttttaaagagttgagtgatagagctaacccttatctgtaagttttgaatttatattgtttcatcccatgtacaaaaccattttttcctacaaatagtttgggttttgttgttgtttcttttttttgttttgtttttgttttttttttttttgcgttcgtggggttgtaaaagaaaagaaagcagaatgttttatcatggtttttgcttcagcggctttaggacaaattaaaagtcaactctggtgccagaaaaaaaaaaaaaaaa

SEQ ID NO: 397399 - DNA, 1000 bp, Homo Sapiens; identical to SEQ ID NO: 286837

SEQ ID NO: 397400 - DNA, 1000 bp, Homo Sapiens; identical to SEQ ID NO: 221675

SEQ ID NO: 397401 - DNA, 1000 bp, Homo Sapiens
gaggaagattgatattgcctgttggtcctgcaggcggaaaccaaatgttggagcagtatgacaagctacaagatggcagcatcaaaatgaagcctctgatgggggtgatatacgtgcctttaacagataaagaaaagcagtggtccaggtggaagtgattttatcttctgctctttcttcttccacacatgcaagggatgaattgtaaaagcaacatcagcttgaccagtataaaattacagtggattgctcatctcagtcctcaaagctttttgaaaaccaacaccatcacagcttgttttggactttgttacactgttattttcagcatgaaaatgtgtgtttttttagggtttctgattcttcaaagaggcacagagccaaattggtagaggaaggatgcaaagtataaatttgtgtaatattactttaacatgcccatattttacttggaaatattaaaagaaagggttctgtaaaatggaaaacttagtttgtgaattgattttgaggagtggtttttcttttcttggacacttaattctgttctgatattaatttatcagattgcttttgtgcattggataacaccaccattcacaagttaagattcttggtatttggatatctgttagatgctactaagaaaatagagatgagctttctttttaaagcttttgatgtggtgtcatagaatagcatgttgtagatacaatcagctgctttgttaccttaaaactaggcatttgtaaatattaaaccttaagatggcaggtgatgtcctgtaaacactcagctgttcagattggacataactgacttagttcttcccttctctctctctcaaaattataggagacttgtagtttagtgtggttttctgtttctaatttgctgctgataatgtatatgaacttaacatgctgtgtaagctgtgtcctagttcttgaacagtttatgcagtgctgctttgccaaataaagttaaaagtaaaagaggc

SEQ ID NO: 397402 - DNA, 1000 bp, Homo Sapiens; identical to SEQ ID NO: 286841

SEQ ID NO: 397403 - DNA, 1000 bp, Homo Sapiens; identical to SEQ ID NO: 286842

SEQ ID NO: 397404 - DNA, 1000 bp, Homo Sapiens; identical to SEQ ID NO: 286844

SEQ ID NO: 397405 - DNA, 1000 bp, Homo Sapiens; identical to SEQ ID NO: 116400

SEQ ID NO: 397406 - DNA, 1000 bp, Homo Sapiens; identical to SEQ ID NO: 286846

SEQ ID NO: 397407 - DNA, 1000 bp, Homo Sapiens; identical to SEQ ID NO: 221676

SEQ ID NO: 397408 - DNA, 1000 bp, Homo Sapiens; identical to SEQ ID NO: 286847

SEQ ID NO: 397409 - DNA, 1000 bp, Homo Sapiens
taatacacaagatttgagaaagaaagaaaaggaaaatcgaaagctgcaactggaactcaaccaagaaagagagaaattcaaccagatggtagtgaaacatcagaaggaactgaatgacatgcaagcgcaattggtagaagaatgtgcacataggaatgagcttcagatgcagttggccagcaaagagagtgatattgagcaattgcgtgctaaacttttggacctctcggattctacaagtgttgctagttttcctagtgctgatgaaactgatggtaacctcccagagtcaagaattgaaggttggctttcagtaccaaatagaggaaatatcaaacgatatggctggaagaaacagtatgttgtggtaagcagcaaaaaaattttgttctataatgacgaacaagataaggagcaatccaatccatctatggtattggacatagataaactgtttcacgttagacctgtaacccaaggagatgtgtatagagctgaaactgaagaaattcctaaaatattccagatactatatgcaaatgaaggtgaatgtagaaaagatgtagagatggaaccagtacaacaagctgaaaaaactaatttccaaaatcacaaaggccatgagtttattcctacactctaccactttcctgccaattgtgatgcctgtgccaaacctctctggcatgtttttaagccaccccctgccctagagtgtcgaagatgccatgttaagtgccacagagatcacttagataagaaagaggacttaatttgtccatgtaaagtaagttatgatgtaacatcagcaagagatatgctgctgttagcatgttctcaggatgaacaaaaaaaatgggtaactcatttagtaaagaaaatccctaagaatccaccatctggttttgttcgtgcttcccctcgaacgctttctacaagatccactgcaaatcagtctttccggaaagtggtcaaaaatacatctggaaaaactagttaa

SEQ ID NO: 397410 - DNA, 1000 bp, Homo Sapiens; identical to SEQ ID NO: 221677

SEQ ID NO: 397411 - DNA, 1000 bp, Homo Sapiens; identical to SEQ ID NO: 286851

SEQ ID NO: 397412 - DNA, 968 bp, Homo Sapiens
ccaagcagctggaggctctgtgtgtgggtcgctgatttcttggagcctgaaaagaaagtaacacagcagggatgaggacagatggtgtgagtcagtgagagcagcgactggacccagagccatgtggctgtgccctctggccctcaacctcatcttgatggcagcctctggtgctgtgtgcgaagtgaaggacgtttgtgttggaagccctggtatccccggcactcctggatcccacggcctgccaggcagggacgggagagatggtctcaaaggagaccctggccctccaggccccatgggtccacctggagaaatgccatgtcctcctggaaatgatgggctgcctggagcccctggtatccctggagagtgtggagagaagggggagcctggcgagaggggccctccagggcttccagctcatctagatgaggagctccaagccacactccacgactttagacatcaaatcctgcagacaaggggagccctcagtctgcagggctccataatgacagtaggagagaaggtcttctccagcaatgggcagtccatcacttttgatgccattcaggaggcatgtgccagagcaggcggccgcattgctgtcccaaggaatccagaggaaaatgaggccattgcaagcttcgtgaagaagtacaacacatatgcctatgtaggcctgactgagggtcccagccctggagacttccgctactcagacgggacccctgtaaactacaccaactggtaccgaggggagcccgcaggtcggggaaaagagcagtgtgtggagatgtacacagatgggcagtggaatgacaggaactgcctgtactcccgactgaccatctgtgagttctgagaggcatttaggccatgggacagggaggacgctctctggccttcggcctccatcctgaggctccacttggtctgtgagatgctagaactccctttcaaca

SEQ ID NO: 397413 - DNA, 1000 bp, Homo Sapiens; identical to SEQ ID NO: 286852

SEQ ID NO: 397414 - DNA, 1000 bp, Homo Sapiens; identical to SEQ ID NO: 286853

SEQ ID NO: 397415 - DNA, 1000 bp, Homo Sapiens; identical to SEQ ID NO: 221678

SEQ ID NO: 397416 - DNA, 1000 bp, Homo Sapiens
cttcccatcagtacaacacattgtaaagtgggctctgttgtgtctgttggctggctccggtccaagaaggctgttgactggcgtctctttcgtaacatttttatggcctggtttgtcacagtccccatttctggagttatcagtgctgccatcatggcaatcttcagatatgtcatcctcagaatgtgaagctgtttgagattaaaatttgtgtcaatgtttgggaccatcttaggtattcctgctcccctgaagaatgattacagtgttaacagaagactgacaagagtctttttatttgggagccagaggagggaagtgttacttgtgctataactgcttttgtgctaaatatgaattgtctcaaaattagctgtgtaaaatagcccgggttcctttggctcctgctgaggtcccctttccttctgggctgtgaattcctgtacatatttctctactttttgtatcaggcttcaattccattatgttttaatgttgtctctgaagatgacttgtgatttttttttcttttttttaaaccatgaagagccgtttgacagagcatgctctgcgttgttggtttcaccagcttctgccctcacatgcacagggatttaacaacaaaaatataactacaacttcccttgtagtctcttatataagtagagtccttggtactctgccctcctgtcagtagtggcaggatctattggcatattcgggagcttcttagagggatgaggttctttgaacacagtgaaaatttaaattagtaacttttttgcaagcagtttattgactgttattgctaagaagaagtaagaaagaaaaagcctgttggcaatcttggttatttctttaagatttctggcagtgtgggatggatgaatgaagtggaatgtgaacttcgggcaagttaaatgggacagccttccatgttcatttgtctacctcttaactgaataaaaaagcctacagtttttagaaaaaaaaaaaaaaa

SEQ ID NO: 397417 - DNA, 1000 bp, Homo Sapiens; identical to SEQ ID NO: 116402

SEQ ID NO: 397418 - DNA, 1000 bp, Homo Sapiens; identical to SEQ ID NO: 286857

SEQ ID NO: 397419 - DNA, 1000 bp, Homo Sapiens; identical to SEQ ID NO: 286858

SEQ ID NO: 397420 - DNA, 1000 bp, Homo Sapiens; identical to SEQ ID NO: 286859

SEQ ID NO: 397421 - DNA, 1000 bp, Homo Sapiens; identical to SEQ ID NO: 286860

SEQ ID NO: 397422 - DNA, 1000 bp, Homo Sapiens; identical to SEQ ID NO: 221679

SEQ ID NO: 397423 - DNA, 1000 bp, Homo Sapiens; identical to SEQ ID NO: 116403

SEQ ID NO: 397424 - DNA, 1000 bp, Homo Sapiens; identical to SEQ ID NO: 221680

SEQ ID NO: 397425 - DNA, 1000 bp, Homo Sapiens; identical to SEQ ID NO: 286861

SEQ ID NO: 397426 - DNA, 1000 bp, Homo Sapiens; identical to SEQ ID NO: 286862

SEQ ID NO: 397427 - DNA, 1000 bp, Homo Sapiens; identical to SEQ ID NO: 221681

SEQ ID NO: 397428 - DNA, 1000 bp, Homo Sapiens
ttaccaaaatatatattaataatcttggcaatttttgacattaattatgaaacattttagcccacgttagttctacattattcttcacttaaactcagctactgcaaattttgtctttctgtaaatgttattaaaatatccagtgagctctttagaaggactcagtattatttcaagactatttttgaggtaattctagccttttaaaatattctacagacctacggggcttaaaagaaccccagtaccgactaagcaaataggcaaaagacatgttggaaatgtagtatagtacttgaaacagtcactatcatagggataattggtgcatcctgtgtaaatggaagctgagcttgacacctggtgcttttaagtagggataaagtcatcctctcactgcaagcacagcatacctgtacctccaaaagtgacgttttagtgaacaggccgttttcaacacttgtgccttggggtgttcattgaagctttgtgaaaactactgatgttttctcagtctccttaaagttacgtccatgctttaaaatgtctgtgtaggagagaagtggggtttataatgttttctctaagatatctttgctgctttccagactttgaaactattaagcttcttaactgcctcttaccggaaatacttctggggaaacttcatggtcccaaaatgtcattgccatacagcttcactagagttctttgaaccacagctgaaaagagctttgtattattttttaattccctccccagatatcatttaggagtattatataaaggtggtgggcaaaaacaatgtaaggagcctttccagttatcttgagttgcagctctgtagtttcttgaggccaaacacactgtattttacaagtcaaaatataatttacattaatcactatgttaatgagtatgtaaaacattcttttgcattgatgaattttgtatctgcttccattaaaagcataacagccacaaaaaaaaaaaaaaaaaa

SEQ ID NO: 397429 - DNA, 1000 bp, Homo Sapiens
ccaaggtctaccaagagacatcagagatgcgctcggcaccaggcgggatccgggagacacggaggactgttcgggattcagacagtggactggagcagatgtccattgggcatcacatccgggacagggctcacatcctccagcgctcccgaaaccatcgcacgggggaccaggaggagcggcaggactatatcaacctggatgagagtgaggccgcagcgtttgatgacgagtggcggcgggagacctcccgattccggcagcagcgtcccctggagtttcggcggcttgagtcctcaggggctgggggacgaagggcggaggggcctccccgcctggccatccagggacctgaggactccccttcccgacagtcccgccgctatgactggtgaggccccgggccctcagcctctcttgtacaggctgagaggctgagaaatcatcccctgaataactttttcctctcgattcccatccccaatttaatattaaattaacaggcaagccggcccccacctctccctgggggtctcagggagaacctttcacggcaccctttccctaccttttccttctttaatctcctggtttaccattgatgacttcgcctctgcatctactgacttgatttttcattctgccactccatcttcaaaccccctcacctttcccatcctactcctgccatgcattgaagggtcaatgcattttggggtgagctctgggtttaggggccccctccatccctcagctaccctggatctttgcccacctcttcctcagagcccccactgaggggccgtagccctatctagggctgtggaaggagcagactggttcctaactctctccctcctcctgcccacacacatcaaaagaatcttccctacacccttctctgcctttattttttgatttgtgcaacttgtaactaggtgtttatggaataaaggagaatggaaaaaagaaaaaaaaaaaaaaaaaaaaaaaaaaaaaa

SEQ ID NO: 397430 - DNA, 1000 bp, Homo Sapiens; identical to SEQ ID NO: 286864

SEQ ID NO: 397431 - DNA, 1000 bp, Homo Sapiens; identical to SEQ ID NO: 221683

SEQ ID NO: 397432 - DNA, 1000 bp, Homo Sapiens; identical to SEQ ID NO: 286866

SEQ ID NO: 397433 - DNA, 1000 bp, Homo Sapiens; identical to SEQ ID NO: 116404

SEQ ID NO: 397434 - DNA, 1000 bp, Homo Sapiens
ctctcaatctccagagccatgtccatggggaggtgggctctgaagggcgaaggtgggagagcagggcccctgaggcctgggtatccaaggaggggcacgtgcacctgattctccttggggcccagaggaagctgatgtcatggctggacaaagtcacggagtaaagccagcaaagccaccctcttcctgtgtagtccttacaggcatgactggaaagttggggggcatctatggtagacatggcacagccatgaagagaccagtggggtggtgcagggtggacttggggaccctacccctgaagactgaggccctgcagctaccaggtgggctagaaggtaactggaacaggcctgggcacttgtgcacccatgtaggagcatgagggccacactcttttcacctcaaagcccttgaagagtgggcaaagacagcaagagagctgcagcctgggcccgagctcagaaacagctgtcgcctcagtctgcgcacaggcatgcaccccagggtagtgcctgcagggatgcatgtgtccccgtgggggtgcctgtgccaggcaggcctcaggtgcatgccatgctcagaaccctgctgccctttctaggcagcctccttggggcccaagctctgctccctggatctgccacctagcagacgtggggagcctgaccccatgcctgtcatggaaccctccttgcctggtgtgtgtggctcccctcttcactgggcacctggatccaggcccacctgtgtccctgactcagggtggtcccaggactggcacctactctttagagagccccagcatctttgatgtggattggagacaattgcctggttccctggggcaggtgaagacttggtgccacaaagaatgccacagtggatacgccagcaggccacatggctggccaagcaattattattatggatcccttgggctgtgggccttcccatccaccccaccacaactgcccaggtagctggagctgatcataaa

SEQ ID NO: 397435 - DNA, 1000 bp, Homo Sapiens
cgttgaaaggaggaaagccctctccaggcgggcccgccgactggccgtgaggatgcgcgccctggagagctcccagaggccccgcgggtcgccgcgaccgcgctcccaaaacaacatctacagcgcctgcccgcggcgcgctcgtggagcggacgctgcaggcacaggggaggcccccgttcccggccccggagcgccgttgccccccgccccgctgcaggtgtctgaatctccctggctccatgccccatctctgaagaccagctgtgaatacgtgagcctctaccaccagcctgccgccatgatggaggacagtgattcagatgactacatcaatgttcctgcctgacaactccccagctatcccccaaccccaggctcggactgtggtgccaaggagtctcatctatctgctgatgtccaatacctgcttcatgtgttctcagagccctcatcacttcccatgccccatctcgactcccatccccatctatctgtgccctgagcatggctctgcccccaggtcgtcttgcacaccttggcagccccctgtagttgacaggtaagctgtaggcatgtagagcaattgtcccaatgccacttgcttcctttccaagccgtcgaacagactgtgggatttgcagagtgtttcttccatgtctttgaccacagggttgttgctgcccaggctctagatcacatggcatcaggctggggcagaggcatagctattgtctcgggcatccttcccagggttgggtcttacacaaatagaaggctcttgctctgagttatgtgacatgcctcagccccatggactaagcaggggtctggtataaaaacactcctggaaacgcctttgccctgatccaaatgttagcacttgctagtgaacgtctacttatctcaagttctatgctaaaggcaatttatcttgatgtgatgataaaccaaacttattagcaagatatgcatatatatcaaaaaaaaaaaaaaaaaa

SEQ ID NO: 397436 - DNA, 1000 bp, Homo Sapiens
gaagcagcagccccgggcgcgcgccagaggcatggagcgctgccccagcctaggggtcaccctctacgccctggtggtggtcctggggctgcgggcgacaccggccggcggccagcactatctccacatccgcccggcacccagcgacaacctgcccctggtggacctcatcgaacacccagaccctatctttgaccccaaggaaaaggatctgaacgagacgctgctgcgctcgctgctcgggggccactacgacccaggcttcatggccacctcgccccccgaggaccggcccggcgggggcgggggtgcagctgggggcgcggaggacctggcggagctggaccagctgctgcggcagcggccgtcgggggccatgccgagcgagatcaaagggctagagttctccgagggcttggcccagggcaagaagcagcgcctaagcaagaagctgcggaggaagttacagatgtggctgtggtcgcagacattctgccccgtgctgtacgcgtggaacgacctgggcagccgcttttggccgcgctacgtgaaggtgggcagctgcttcagtaagcgctcgtgctccgtgcccgagggcatggtgtgcaagccgtccaagtccgtgcacctcacggtgctgcggtggcgctgtcagcggcgcgggggccagcgctgcggctggattcccatccagtaccccatcatttccgagtgcaagtgctcgtgctagaactcgggggccccctgcccgcacccggacacttgatcgatccccaccgacgccccctgcaccgcctccaaccagttccaccaccctctagcgagggttttcaatgaacttttttttttttttttttttttttctgggctacagagacctagctttctggttcctgtaatgcactgtttaactgtgtaggaatgtatatgtgtgtgtatatacggtcccagttttaatttacttattaaaaggtcagtattatacgttaaaaaaaaaaaa

SEQ ID NO: 397437 - DNA, 1000 bp, Homo Sapiens; identical to SEQ ID NO: 116406

SEQ ID NO: 397438 - DNA, 1000 bp, Homo Sapiens
actttttccagttaaaaaacatctctttctgcggatatcatccaaagaacaacaagtactttgggttcatcaccaagcaccccgccgaccaccggtttgcctgccacgtctttgtgtctgaagactccaccaaagccctggcagagtccgtggggagagcattccagcagttctacaagcagtttgtggagtacacctgccccacagaagatatctacctggagtagctgtgcagccccgccctctgcgtcccccagccctcaggccagtgccaggacagctggctgctgacaggatgtggcactgcttgaggaggggcacctgccaccgccagaggacaaggaagtgggggccgctggcccagggtaggggagggtggggcaatggggagaggcaaatgcagtttattgtaatatatgggattagattcatctatggagggcagagtgggctgcctggggattgggagggacagggcttggggagcaggtctctggcagagaaggatgtccgttccaggagcacacggccctgccccatcctgggccttacctcccctgccagggctcgggcgctgtggctcctgccttgatgaagcccgtgtcctgccttgatgaagcctgtgccacctgcaagtgcccgccctgcccctgccccaacccccaccgaagagccctgagctcaggctgagcccagccacctcccaaggactttccagtgaggaaatggcaacacgtggaggtgaagtccctgttctcagctccgtcatctgcggggcttctgggtggctcctgccactgacctcaccggcatgctggcctgtggcaggcctaggacctcaggcggggaggaggagctgccgcaaggccctgtcccagcagaagagggaggcttcctgactgacacaggccagccccatcttggtcctgtcaccctggccccaactattaaagtgccatttcctgtctggaaaaaaaaaaaaaaaaaaaaaaaaaaaaaa

SEQ ID NO: 397439 - DNA, 1000 bp, Homo Sapiens; identical to SEQ ID NO: 286872

SEQ ID NO: 397440 - DNA, 1000 bp, Homo Sapiens; identical to SEQ ID NO: 116408

SEQ ID NO: 397441 - DNA, 1000 bp, Homo Sapiens; identical to SEQ ID NO: 286873

SEQ ID NO: 397442 - DNA, 1000 bp, Homo Sapiens; identical to SEQ ID NO: 116409

SEQ ID NO: 397443 - DNA, 1000 bp, Homo Sapiens; identical to SEQ ID NO: 221687

SEQ ID NO: 397444 - DNA, 1000 bp, Homo Sapiens; identical to SEQ ID NO: 116410

SEQ ID NO: 397445 - DNA, 1000 bp, Homo Sapiens; identical to SEQ ID NO: 286878

SEQ ID NO: 397446 - DNA, 1000 bp, Homo Sapiens
attggataccacctcttgagagtccttcttgcacaggcctgccccttggttgagaaccattgttccaagtgaaggcacaaactctcaatatctaaaataagtgcaaggaagcagtctctttggtcagtaacaagtgcaatggaaagaaaacgatcccttccttcttccactttcacagcttttctctgaactaggagaacctgggggtggatttgggtgggtggggccaaagaggaggcttctattgataaatccagagcctcaaggggcccagccacgtcaaacttctctccctcagggactctccagcaccaaaaggcagaaggtggaagccgtttttcccccagagccctgtgtttttgtgaaaggcctcactgtggctcctctgttttacatactcattagtaagtgggaggtccactggggcaacagacactgccacaatttcagtgttgtgttcagccaaggggacggtctggacaggcagcttaagtgtgagtttagtcacaactcctgagtgtcccgctctcctgcttacctaggaggtgagtgccaggaaaatacaccaaatgcttctagtattgtttccccacttaaaatagtcctgcttaaattcacatggtgtggtctgatgttctgagagcatcaggaaatacaacccttttgcccatttacccttctccccggatcccaaggtggtctgttgctctggcttcctttcattgtcttaggccttcatggagtggatgctgcctcctcctggctgtttttgtgcctgtttgaagctactgctgcctccatttctgggaaagacctttgagagcctagcccaggcctaagggctatgtttggtaccagtattttgtctttagcttttctatgtgattgtgccgtcattctgttttaagctcatggatcaatggatttgtttacaatgtgatattttctattaaatccagtattttcaattaaaaaaaaaaaaaaaaaaaaaaaaaaaaaa

SEQ ID NO: 397447 - DNA, 1000 bp, Homo Sapiens; identical to SEQ ID NO: 286879

SEQ ID NO: 397448 - DNA, 1000 bp, Homo Sapiens; identical to SEQ ID NO: 286880

SEQ ID NO: 397449 - DNA, 1000 bp, Homo Sapiens; identical to SEQ ID NO: 116411

SEQ ID NO: 397450 - DNA, 1000 bp, Homo Sapiens
tgtttggggcaagagccacctcttctggggggccccctctgactgctggaccccagagggaacctggggccaggcctgagccagtgcgctccaaactgccatccaatctatgagctgggcccttccttccctcttctttcttcttttctctcccttccttcttccttcaggtttaactgtgattaggagatataccaataacagtaataattatttaaaaaaccacacacaccagaaaaacaaaagacagcagaaaataaccaggtattcttagagctatagatttttggtcacttgcttttatagactattttaatactcagcactagagggagggagggggagggaggagggagcaggcaggtcccaaatgcaaaagccagagaaaggcagatggggtctccggggctgggcaggggtgggagtggccagtgttggcggttcttagagcagatgtgtcattgtgttcatttagagaaacagctgccatcagcccgttagctgtaacttggagctccactctgcccccagaaaggggctgccctggggtgtgccctggggagcctcagaagcctgcgaccttgggagaaaagggccagggccctgagggcctagcattttttctactgtaaacgtagcaagatctgtatatgaatatgtatatgtatatgtatgtaagatgtgtatatgtatagctatgtagcgctctgtagagccatgtagatagccactcacatgtgcgcacacgtgtgcggtctagtttaatcccatgttgacaggatgcccaggtcaccttacacccagcaacccgccttggcccgcaggctgtgcactgcatggtctagggacgttctctctccagtcctcagggaagaggacgccaggacttcgcagcaggccccctctctccccatctctggtctcaaagccagtcccagcctgacctctcaccacacggaagtggaagactcccctttcctagggcctcaagcacacaccg

SEQ ID NO: 397451 - DNA, 1000 bp, Homo Sapiens; identical to SEQ ID NO: 116412

SEQ ID NO: 397452 - DNA, 1000 bp, Homo Sapiens; identical to SEQ ID NO: 116413

SEQ ID NO: 397453 - DNA, 1000 bp, Homo Sapiens; identical to SEQ ID NO: 116414

SEQ ID NO: 397454 - DNA, 1000 bp, Homo Sapiens; identical to SEQ ID NO: 116415

SEQ ID NO: 397455 - DNA, 1000 bp, Homo Sapiens; identical to SEQ ID NO: 116416

SEQ ID NO: 397456 - DNA, 1000 bp, Homo Sapiens; identical to SEQ ID NO: 116417

SEQ ID NO: 397457 - DNA, 1000 bp, Homo Sapiens; identical to SEQ ID NO: 116418

SEQ ID NO: 397458 - DNA, 1000 bp, Homo Sapiens; identical to SEQ ID NO: 221692

SEQ ID NO: 397459 - DNA, 1000 bp, Homo Sapiens; identical to SEQ ID NO: 286892

SEQ ID NO: 397460 - DNA, 1000 bp, Homo Sapiens; identical to SEQ ID NO: 286893

SEQ ID NO: 397461 - DNA, 1000 bp, Homo Sapiens
tccaagtccacccgttttatgtgtgcagcagacttccttgtcctcataagatagactgctttatttctagacccactgaaaagaccatcttccttctgataatgtatggtgttacaggcctttgcctcttgcttaacatttgggagatgcttcatttagggtttgggaccattcgagactcactaaacagtaaaaggagggaacttgaggatccgggtgcttataattatcctttcacttggaatacaccatctgctccccctggctataacattgctgtcaaaccagatcaaatccagtacaccgaactgtccaatgctaagatcgcctacaagcaaaacaaggccaacacagcccaggaacagcagtatggcagccatgaggagaacctcccagctgacctggaggctctgcagcgggagatcaggatggctcaggaacgcttggatctggcagttcaggcctacagtcaccaaaacaaccctcatggtccccgggagaagaaggccaaagtggggtccaaagctgggtccaacaaaagcactgccagtagcaaatcaggggatgggaagacctccgtctggatttaatcctggcgggcttaaaacctgtgcttttcatagtttatggtaagcagcagctcactgaataatgacttccattgagtaaacatttggctctggttatcttcagggatgctgttggctcatgatccaagctcaggggactctggaggcggggctgggctgagggagagaaagggaaacacagtgttcccaggcacatgttcttagcaataatacagttgcagaactttacatttgtgtcttccagatctggagaagaacagacatatttaaatcattcttgttgaacagtttttgtatgtacagtattatggtacttttttttttttagtatgagaactttttttgtatttgtacattgaactgctgtagttatacttttatattaaaggggaaaaagtccttataaataa

SEQ ID NO: 397462 - DNA, 1000 bp, Homo Sapiens; identical to SEQ ID NO: 116419

SEQ ID NO: 397463 - DNA, 1000 bp, Homo Sapiens; identical to SEQ ID NO: 116421

SEQ ID NO: 397464 - DNA, 1000 bp, Homo Sapiens; identical to SEQ ID NO: 116423

SEQ ID NO: 397465 - DNA, 1000 bp, Homo Sapiens; identical to SEQ ID NO: 286897

SEQ ID NO: 397466 - DNA, 1000 bp, Homo Sapiens; identical to SEQ ID NO: 286898

SEQ ID NO: 397467 - DNA, 1000 bp, Homo Sapiens
tggtgtcatcaaggtgttcaacgacatgaaggtgcgtaagtcttcaacgccagaggaggtgaagaagcgcaagaaggcggtgctcttctgcctgagtgaggacaagaagaacatcatcctggaggagggcaaggagatcctggtgggcgatgtgggccagactgtcgacgacccctacgccacctttgtcaagatgctgccagataaggactgccgctatgccctctatgatgcaacctatgagaccaaggagagcaagaaggaggatctggtgtttatcttctgggcccccgagtctgcgccccttaagagcaaaatgatttatgccagctccaaggacgccatcaagaagaagctgacagggatcaagcatgaattgcaagcaaactgctacgaggaggtcaaggaccgctgcaccctggcagagaagctggggggcagtgccgtcatctccctggagggcaagcctttgtgagccccttctggccccctgcctggagcatctggcagccccacacctgcccttgggggttgcaggctgcccccttcctgccagaccggaggggctggggggatcccagcagggggagggcaatcccttcaccccagttgccaaacagaccccccaccccctggattttccttctccctccatcccttgacggttctggccttcccaaactgcttttgatcttttgattcctcttgggctgaagcagaccaagttccccccaggcaccccagttgtgggggagcctgtattttttttaacaacatccccattccccacctggtcctcccccttcccatgctgccaacttctaaccgcaatagtgactctgtgcttgtctgtttagttctgtgtataaatggaatgttgtggagatgacccctccctgtgccggctggttcctctcccttttcccctggtcacggctactcatggaagcaggaccagtaagggaccttcgattaaaaaaaaaaaagacaataataaaaa

SEQ ID NO: 397468 - DNA, 1000 bp, Homo Sapiens; identical to SEQ ID NO: 286899

SEQ ID NO: 397469 - DNA, 1000 bp, Homo Sapiens; identical to SEQ ID NO: 221693

SEQ ID NO: 397470 - DNA, 1000 bp, Homo Sapiens; identical to SEQ ID NO: 221694

SEQ ID NO: 397471 - DNA, 1000 bp, Homo Sapiens; identical to SEQ ID NO: 116424

SEQ ID NO: 397472 - DNA, 1000 bp, Homo Sapiens; identical to SEQ ID NO: 286902

SEQ ID NO: 397473 - DNA, 1000 bp, Homo Sapiens; identical to SEQ ID NO: 116425

SEQ ID NO: 397474 - DNA, 1000 bp, Homo Sapiens; identical to SEQ ID NO: 116426

SEQ ID NO: 397475 - DNA, 1000 bp, Homo Sapiens; identical to SEQ ID NO: 286905

SEQ ID NO: 397476 - DNA, 1000 bp, Homo Sapiens
gcccgcgggctcgccctcgccggggtccgagcggccgcgggacggcggcgctgagcggcaggccggcgcggccaagaagaagacgcgcaccgtcttttcgcgcagccaggtgtaccagctcgagtccaccttcgacatgaagcgctacctgagcagctcggagcgcgcctgcctcgcctccagcctgcagctcacggagacccaggtaaagacttggttccagaaccgccgcaacaagtggaagcggcagctctcggctgagctggaggcggccaacatggcgcacgcgtcggcgcagactctggtgagcatgccgctggtgttccgggacagttcgctgctgcgcgtgccggtgccgcgctcgctcgcctttcccgcgccgctctactacccgggaagcaacctctcggccttacctctctacaacctatacaacaagctcgactactgaccggcccgccgccccgcgccgcccccagctgcccgcagagccgggcgcgtactgtactgtaagcagggctccggagcaaggcggcgtgtttccagaaatatgaagaaatacaccatgtgtattcattagctcttatttatggtctctgccctactttttgttttgattgtttcgggtatttattggcattccctaagtcagagagcctgcttcctacctagaccgaaccagtacgctttgaaaaccattcggagtgagatgttctcgggtggtggtgggaaagggagttttggccagacaggctgtggttggtagggaaaaaaatcaggaaaacacctacaaaaccaggtacactcctcccccatatatacacctgtatatatgtacatgcatacacgctcggccaagccaggccctcagaggctttggacaattactaaattgcttcttttcgtttccctcatcccgaggatggtagggacgaaaaggggagagttcagatctgtaaatatttttaaaaagaaaaaaaaataaaacattttaaacatc

SEQ ID NO: 397477 - DNA, 1000 bp, Homo Sapiens; identical to SEQ ID NO: 221696

SEQ ID NO: 397478 - DNA, 1000 bp, Homo Sapiens
accctctgtgcgtgcacaactcgtcgctcttcgccctgcagaatctgcagccgtggtctgacgactcgaccaaaatcactagcgtcacgtcggtggcgtcggcctgcgagtgagcctgcccattctgccctgtgggaccccaggcccactcaggggtcactgaggcctgagacccaggactcctccccaccctcctggcctcagactgcacccaggaggggaacactgccctcgcacgccccaaagggcccccacatttgtgccgacactgttctccttcggtggaagagctcaagggacaaggacacgcgcccccctcccagaggcgtcccgcacctgtctgaactgttaagaaatctgtttttgtttatttcattttattttaatttttaacgtgggattcagagaaaggcaagggaggtaagggaggaggagcttctggggtccccagggctgtcatctgaatttgccctgggaaaccccttctctgtgacccacttctcatcacacacacatggaaacccataggtccacacacaggtggtgttactgtccctcctggtgtcaccccagagccacacatgggcatctatgggagagtgtcaaccagacagagggtcacagtgtttacactttggaccttacgatcaggcacaggtcaggggtgacacagactcatcctgaacagcatggcactgggtccagcacaaacacaaggtcatggccacactgtgacacactacaccacacacaacagccaacagctacaacagcctcacttggtctgccaggcccccaccacacatcccagcccaatccaggtacgcacagacaggttttcacataaatgcagcccatttctccagaacccatttgaggggtgggggggtgttaatttatgcacttataaggtgttttctgtgtaaccattttataaagtgcttgtgtaatttatgtgaaaaaaataaataaaagcctcaaaagcctccggaaaaaaaaa

SEQ ID NO: 397479 - DNA, 1000 bp, Homo Sapiens; identical to SEQ ID NO: 221697

SEQ ID NO: 397480 - DNA, 1000 bp, Homo Sapiens
gtggtctccactggggattgggcccctgccagaccccctggagactaaccccaccacaccctccctctactgggagcctacccacccccaggacccctgagtaaaaaagctgtgtgctctccaagcccagttcagcttggggacaggggcaggaggaaggggtaggattactaggtgcccagaatgaggctgctttccaaagccaatgtgaacagcggctggacttggaggtagctttgaggtggaagagggctgcaaatccttgtgggaaaagaaatctatgattccaggtggcatcagtgtctttccactcctcctagccacccaccacactgatccagccctgagttcctagccaccgcctcctacagcccacctggcttttctttctaccaaatgagggtcttggttccagcctgccactcaggcccaaagcctcgacacagagtggactgttccctgaggtgggagatgtggaaaagccaagaggctgcagccaggccactggcccctgagatctctgcaggaaatggctgtggagtgtggcagtttggcaaactctccaccacacgtaatgaaacttggatttgctcagtgtctggctgcagagcagtgggcctggccagcaggtccccagctttggctatgagggccttgagtcccccaaaacaccgggttccagcaccacactcagccctcattggctcttgaactgagcttggaagcttctggtgaccttccaagagcctgagagtgaggtggaattattttaaaagataaatattatattatatatatatatatttccctgaaggaaccaaagcgaattttaaaagatgcaatgtagaggggaaaagagatgatgaaaatatttaaaggccctatctgtttacagtgttccgtggttaaactcgctcactgctaagaatatttgaatgtatgcttcatacagggatggtgttcaaaaaacttgtaaataaaggaaccataatcaattttc

SEQ ID NO: 397481 - DNA, 1000 bp, Homo Sapiens
cccgtacccctgaggtggggagggggagcaggaactttgagccagtgggggtgtgcttcaaattcccaggagtagaccagcatctctggtgggtgccacattttttcagccctcatagggagtggcaggtgctcaatggtaggggaaaggctgtgggcaggagccaggggtcctgtctgatgggctgggcttggttttcttgacctgcctgcctgctcttgagaaacctggaccagggcatatggtgaatgcagggggctggcaggtggggagggcttgaacacaggaggaagcaggagtccatgctctctggccttctgaggagtgggcaggcctgagtgagggtcactgaccaggcagggcctctgggtatgactggagccctggtgggtggatgtcatcagcatgggtcctggggagggacaggcaaagggagataaggggagtcctgccccaccccagctgcacccagaccgggaccctgggaacccaagcctgcacagccgctttgtggagctgagcgaggcataccgtgtgctcagccgtgagcagagccgccgcagctatgatgaccagctccgctcaggtagtcccccaaagtctccacgaaccacagtccatgacaagtctgcccaccaaacacacagctcctggacaccccccaacgcacagtactggtcccagtttcacagcgtgaggccacaggggccccagttgaggcagcagcaacacaaacaaaacaaacaagtgctggggtactgcctcctcctcatgctggcgggcatgggcctgcactacattgccttcaggtgatgcctgttctccccggggtgatgggcaaagggcaggagggtgggtgaattccagtgtggtcagccagtcctccacagcacctcgtggcccgtactcttgtgtctctcaagctaaaactgcttgaagttggtctctggacctctccttacttattaaaggcagcgctgcaccaaaaaaaaaaaaaaaa

SEQ ID NO: 397482 - DNA, 1000 bp, Homo Sapiens; identical to SEQ ID NO: 286907

SEQ ID NO: 397483 - DNA, 1000 bp, Homo Sapiens; identical to SEQ ID NO: 116427

SEQ ID NO: 397484 - DNA, 1000 bp, Homo Sapiens; identical to SEQ ID NO: 116430

SEQ ID NO: 397485 - DNA, 1000 bp, Homo Sapiens; identical to SEQ ID NO: 286911

SEQ ID NO: 397486 - DNA, 1000 bp, Homo Sapiens; identical to SEQ ID NO: 116431

SEQ ID NO: 397487 - DNA, 1000 bp, Homo Sapiens; identical to SEQ ID NO: 286913

SEQ ID NO: 397488 - DNA, 810 bp, Homo Sapiens
ccaccatggacccccgtctgcccgcctgggcgctggtgctgctgggccctgccctggtgttcgcgttgggccccgcgcccaccccagagatgcgtgagaagttgtgcggccaccacttcgtacgcgcgctagtgcgcgtgtgcgggggcccccgctggtccaccgaagccaggaggcctgcgaccggaggcgaccgtgagttgctacagtggctggagagacgacatctgctccatgggctggtggccgacagtaatctcacgctgggacctggcctgcagcccctgccccagacctctcaccatcaccgccaccaccgtgcagctgccaccaaccctgcacgctactgctgcctcagtggctgtacccaacaagacctgctgaccctctgtccctactgattcctccttgggtgcagcctcagagtggcctgaggcccagagggtctggtctggtgagctcctgaggccacacagcaccataaagtctcgcatctacaggcctttgattacctcctgggatgggtgctcactatctaccccagaccaatgccacctgcagcctgtggagtcaactgcagaataaatcacaccctagccctggcttggaggatccccgctttcacagatgctggacactgacagccaaatgtcctcactccaggggagccccagacgctccgctccctgcatgtgtaacaccccttcttgctgtctcttagtaaataaacgacccaaagcagaaaaaaaaaaaaaaaaaaaaaaaaaaaaaaaaaaaaaaaaaaaaaaaaaaaaaaaaaaaaaaaaaaaa

SEQ ID NO: 397489 - DNA, 1000 bp, Homo Sapiens; identical to SEQ ID NO: 221700

SEQ ID NO: 397490 - DNA, 1000 bp, Homo Sapiens; identical to SEQ ID NO: 116432

SEQ ID NO: 397491 - DNA, 1000 bp, Homo Sapiens; identical to SEQ ID NO: 221701

SEQ ID NO: 397492 - DNA, 1000 bp, Homo Sapiens
aagcagctagagaagcagcaggggcagccaaagcacctggaggaggaggaggggcagctgaagcacctggtgcagcaggaggggcagctgaagcatctggtgcagcaggaggggcagctggagcagcaggagaggcaggtggagcacctggagcagcaggtggggcagctgaagcacctagaggagcaggagggacaactgaagcatctggagcagcagcaggggcagttggaggtcccagagcagcaggtggggcagccaaagaacctggagcaggaggagaagcaactggagctcccagagcagcaagagggccaggtgaagcacctggagaagcaggaggcacagctggagctcccagagcagcaggtaggacagccaaagcacctggaacagcaggaaaagcacctagagcacccagagcagcaggacggacaactaaaacatctggagcagcaggaggggcagctgaaggacctggagcagcagaaggggcagctggagcagcctgtgtttgccccagctccaggccaggtccaagacattcaaccagccctgcccacaaagggagaagtattgcttcctgtagagcaccagcagcagaagcaggaggtgcagtggccacccaaacataaataaccacccgcagtgtccagaggccctcagatcgtctcatacaagggaagagagagccactggctccacttatttcgggtccgctaggtggcccgtctcatctgtgaacttgactctgtccctctacatgtctctttaatggggtgagggtgggggagagagggaattattgtccagtgccaaccccaatgaccccaatcccaacctcaggtgagcagagcctctacttgagggactattgttactataggaatccttacttccccagtattgaagctgaatcagtgagtgtgtacaatgatacataataaatcctggaagtcttgggatcctaaaaaaaaaaaaaaaaaaaaaaaaaaaaaaa

SEQ ID NO: 397493 - DNA, 1000 bp, Homo Sapiens; identical to SEQ ID NO: 116433

SEQ ID NO: 397494 - DNA, 1000 bp, Homo Sapiens; identical to SEQ ID NO: 116434

SEQ ID NO: 397495 - DNA, 1000 bp, Homo Sapiens; identical to SEQ ID NO: 116435

SEQ ID NO: 397496 - DNA, 1000 bp, Homo Sapiens
ccattgctgatgctgagcagcgtggggagatggccctcaaggatgccaagaacaagctggaagggctggaggatgccctgcagaaggccaagcaggacctggcccggctgctgaaggagtaccaggagctgatgaatgtcaagctggccctggacgtggagatcgccacctaccgcaagctgctggagggtgaggagtgcaggctgaatggcgaaggcgttggacaagtcaacatctctgtggtgcagtccaccgtctccagtggctatggcggtgccagtggtgtcggcagtggcttaggcctgggtggaggaagcagctactcctatggcagtggtcttggcgttggaggtggcttcagttccagcagtggcagagccattgggggtggcctcagctctgttggaggcggcagttccaccatcaagtacaccaccacctcctcctccagcaggaagagctataagcactaaagtgcgtctgctagctctcggtcccacagtcctcaggcccctctctggctgcagagccctctcctcaggttgcctgtcctctcctggcctccagtctcccctgctgtcccaggtagagctggggatgaatgcttagtgccctcacttcttctctctctctctataccatctgagcacccattgctcaccatcagatcaacctctgattttacatcatgatgtaatcaccactggagcttcactgttactaaattattaatttcttgcctccagtgttctatctctgaggctgagcattataagaaaatgacctctgctccttttcattgcagaaaattgccaggggcttatttcagaacaacttccacttactttccactggctctcaaactctctaacttataagtgttgtgaacccccacccaggcagtatccatgaaagcacaagtgactagtcctatgatgtacaaagcctgtatctctgtgatgatttctgtgctcttcactgtttgcaattgctaaataaa

SEQ ID NO: 397497 - DNA, 1000 bp, Homo Sapiens
ggctgccattgctgatgctgagcagcgtggggagatggccctcaaggatgctaagaacaagctggaagggctggaggatgccctgcagaaggccaagcaggacctggcccggctgctgaaggagtaccaggagctgatgaacgtcaagctggccctggacgtggagatcgccacctaccgcaagctgctggagggcgaggagtgcaggctgaatggcgaaggcgttggacaagtcaacatctctgtagtgcagtccaccgtctccagtggctatggcggtgccagcggtgtcggcagtggcttaggcctgggtggaggaagcagctactcctatggcagtggtcttggcgttggaggcggctttagttccagcagcggcagagccactgggggtggcctcagctctgttggaggcggcagttccaccatcaagtacaccaccacctcctcctccagcaggaagagctacaagcactgaagtcgtgccgccagctctcagtcccacagctctcaggcccctctctggcagcagagccctctcctcaggttgcttgtcctcccctggcctccagtctcccctgccctcccgggtagagctgggatgccctcacttttcttctcatcaatacctgttccactgagctcctgttgcttaccatcaagtcaacagttatcagcactcagacatgcgaatgtcctttttagttcccgtattattacaggtatctgagtctgccataattctgagaagaaaaatgacctatatccccataagaactgaaactcagtctaggtccagctgcagatgaggagtcctctctttaattgctaaccatcctgcccattatagctacactcaggagttctcatctgacaagtcagttgtcctgatcttctcttgcagtgtccctgaatggcaagtgatgtaccttctgatgcagtctgcattcctgcactgctttctctgctctctttgccttcttttgttctgttgaataaa

SEQ ID NO: 397498 - DNA, 1000 bp, Homo Sapiens; identical to SEQ ID NO: 286919

SEQ ID NO: 397499 - DNA, 1000 bp, Homo Sapiens; identical to SEQ ID NO: 116436

SEQ ID NO: 397500 - DNA, 1000 bp, Homo Sapiens; identical to SEQ ID NO: 116437

SEQ ID NO: 397501 - DNA, 1000 bp, Homo Sapiens; identical to SEQ ID NO: 221705

SEQ ID NO: 397502 - DNA, 1000 bp, Homo Sapiens; identical to SEQ ID NO: 116438

SEQ ID NO: 397503 - DNA, 845 bp, Homo Sapiens; identical to SEQ ID NO: 116439

SEQ ID NO: 397504 - DNA, 1000 bp, Homo Sapiens; identical to SEQ ID NO: 286922

SEQ ID NO: 397505 - DNA, 1000 bp, Homo Sapiens
gtccttggggaacatggagattccagtgtgcctgtatggagtggaatgaatgttgctggtgtctctctgaagactctgcacccagatttagggactgataaagataaggaacagtggaaagaggttcacaagcaggtggttgagagtgcttatgaggtgatcaaactcaaaggctacacatcctgggctattggactctctgtagcagatttggcagagagtataatgaagaatcttaggcgggtgcacccagtttccaccatgattaagggtctttacggaataaaggatgatgtcttccttagtgttccttgcattttgggacagaatggaatctcagaccttgtgaaggtgactctgacttctgaggaagaggcccgtttgaagaagagtgcagatacactttgggggatccaaaaggagctgcaattttaaagtcttctgatgtcatatcatttcactgtctaggctacaacaggattctaggtggaggttgtgcatgttgtcctttttatctgatctgtgattaaagcagtaatattttaagatggactgggaaaaacatcaactcctgaagttagaaataagaatggtttgtaaaatccacagctatatcctgatgctggatggtattaatcttgtgtagtcttcaactggttagtgtgaaatagttctgccacctctgacgcaccactgccaatgctgtacgtactgcatttgccccttgagccaggtggatgtttaccgtgtgttatataacttcctggctccttcactgaacatgcctagtccaacattttttcccagtgagtcacatcctgggatccagtgtataaatccaatatcatgtcttgtgcataattcttccaaaggatcttattttgtgaactatatcagtagtgtacattaccatataatgtaaaaagatctacatacaaacaatgcaaccaactatccaagtgttataccaactaaaacccccaataaaccttgaacagtg

SEQ ID NO: 397506 - DNA, 1000 bp, Homo Sapiens; identical to SEQ ID NO: 116440

SEQ ID NO: 397507 - DNA, 1000 bp, Homo Sapiens; identical to SEQ ID NO: 286923

SEQ ID NO: 397508 - DNA, 1000 bp, Homo Sapiens; identical to SEQ ID NO: 221706

SEQ ID NO: 397509 - DNA, 1000 bp, Homo Sapiens; identical to SEQ ID NO: 116441

SEQ ID NO: 397510 - DNA, 1000 bp, Homo Sapiens; identical to SEQ ID NO: 286926

SEQ ID NO: 397511 - DNA, 1000 bp, Homo Sapiens; identical to SEQ ID NO: 286927

SEQ ID NO: 397512 - DNA, 1000 bp, Homo Sapiens; identical to SEQ ID NO: 221707

SEQ ID NO: 397513 - DNA, 1000 bp, Homo Sapiens; identical to SEQ ID NO: 221708

SEQ ID NO: 397514 - DNA, 1000 bp, Homo Sapiens; identical to SEQ ID NO: 286930

SEQ ID NO: 397515 - DNA, 1000 bp, Homo Sapiens
gtccccactactttctaccgaacttagatctgtttcaaggcaaacctcactcagctctggaaaacgctgccaaacaaacgtggcgactggcaagagagatcctgaccaacccgaaaagtttggaaaaactttagaggatgatttaatcaagagccgaaattattacccttctcaaagtccttattaagtgtaaacttctgttcaattcctaatattccactccgcagtgcaaacaatctcttcctttaaaaaggaataataatacaatatttaaacatcatctcacccacccccacaaggggagaaaaagtaggggaagcggatggagaaaaacccaaagccactagtattagaagacttctttccacacgatttcctatctcccttgaaaagtacaccgtaacactccgtaaacagcccagctgtaacgccagaccgagacgaacactctgcctaactatcaaaggattatagcaatcctggtgatttaggtgcatctgtctgtgagtaaacacgatttggatatgccatctgaaagaaactgtaatgtatattttgatttgtaacaaatattgtgatctcacattgtctttgaaagtgtggatgttggtgttttgtgatttggtgaacagaacttaaattgccattctggatacttccagacattttccactaacaaagatatcatttaaaggtagatttcttcctggtacttttatctgtctttgaaagtgtctgaactttaaaaagtttacattttgtttcaaatattgcttgttctatttctaacattccataaatatacttgaaatgttatttaaatatattcaaagaaatttgaattcagcttatataataacgcttgaatatctgaattatatatttgaaaaatgcacttgaaatacactggataattacttttgtgatttagattttaatttgttgctggtttttatttaattagatggtaataaatgaagtaaaataaaaaaaaaaaaaa

SEQ ID NO: 397516 - DNA, 1000 bp, Homo Sapiens; identical to SEQ ID NO: 286931

SEQ ID NO: 397517 - DNA, 1000 bp, Homo Sapiens; identical to SEQ ID NO: 221709

SEQ ID NO: 397518 - DNA, 1000 bp, Homo Sapiens; identical to SEQ ID NO: 116443

SEQ ID NO: 397519 - DNA, 1000 bp, Homo Sapiens; identical to SEQ ID NO: 116444

SEQ ID NO: 397520 - DNA, 1000 bp, Homo Sapiens
gctacatcgagagcctgcaggagttgctgagagagcaggtggagaactactatagcctgccgggacagagctgctcggagcccaccagccccacctccaactgctctgatggcatgcccgaatgtaacagtcctgtctggtccagaaagagcagtacttttgacagcatctactgtcctgatgtatcaaatgtatatgccacagataaaaactccttatccagcttggattgcttatccaacatagtggaccggatcacctcctcagagcaacctgggttgcctctccaggatctggcttctctctctccagttgccagcaccgattcacagcctcgaactccaggggcttctagttccaggcttatctatcatgtgctatgaactaattttctggtctatatgacttcttccaggagggcctaatacacaggacgaagaaggcttcaaaaagtcccaaaccaagacaacatgtacataaagatttcttttcagttgtaaatttgtaaagattaccttgccactttataagaaagtgtatttaactaaaaagtcatcattgcaaataatactttcttcttctttattattctttgcttagatattaatacatagttccagtaatactatttctgatagggggccattgattgagggtagcttgttcgaatgcttaacttatatatacatatatatatattataaatattgctcatcaaaatgtctctggtgtttagagctttatttttttctttaaaacattaaaacagctgagaatcagttaaatggaattttaaatatatttaactatttcttttctctttaatcctttagttatattgtattaaataaaaatataatactgcctaatgtatatattttgatcttttcttgtaagaaatgtatcttttaaatgtaagcacaaaatagtactttgtggatcatttcaagatataagaaattttggaaattccaccataaataaaattttttactacaag

SEQ ID NO: 397521 - DNA, 1000 bp, Homo Sapiens
aggagagttggaggctttactgggccacagggttcctactcgcccctgggcctccggacaaaatggggtctgcggttggtgtcctggcaaaagcagggtagaagggctgcggggcgggcccagaatccgagcctgcagagatgggagcagttgcagtgttgagggcggaagaggagtgcgtcttgttttgggaactgcttcacaggatccagaaaaggaaatgcccggcgaagccacagaaaccgtccctgctacagagcaggagttgccgcagccccaggctgagacagggtctggaacagaatctgacagtgatgaatcagtaccagagcttgaagaacaggattccacccaggcaaccacacaacaagcccagctggcggcagcagctgaaatcgatgaagaaccagtcagtaaagcaaaacagagtcggagtgaaaagaaggcacggaaggctatgtccaaactgggtcttcggcaggttacaggagttactagagtcactatccggaaatctaagaatatcctctttgtcatcacaaaaccagatgtctacaagagccctgcttcagatacttacatagtttttggggaagccaagatcgaagatttatcccagcaagcacaactagcagctgctgagaaattcaaagttcaaggtgaagctgtctcaaacattcaagaaaacacacagactccaactgtacaagaggagagtgaagaggaagaggtcgatgaaacaggtgtagaagttaaggacatagaattggtcatgtcacaagcaaatgtgtcgagagcaaaggcagtccgagccctgaagaacaacagtaatgatattgtaaatgcgattatggaattaacaatgtaaccatatggaagcaactttttttggtgtctcaaaggagtaactgcagcttggtttgaaatttgtactgtttctatcataaataaagttatggcttcttgttggaaaaaaaaaaaaaaaaaaaaaaaaaaaaaa

SEQ ID NO: 397522 - DNA, 1000 bp, Homo Sapiens; identical to SEQ ID NO: 286937

SEQ ID NO: 397523 - DNA, 1000 bp, Homo Sapiens; identical to SEQ ID NO: 116445

SEQ ID NO: 397524 - DNA, 1000 bp, Homo Sapiens; identical to SEQ ID NO: 286940

SEQ ID NO: 397525 - DNA, 1000 bp, Homo Sapiens; identical to SEQ ID NO: 116446

SEQ ID NO: 397526 - DNA, 1000 bp, Homo Sapiens; identical to SEQ ID NO: 286944

SEQ ID NO: 397527 - DNA, 1000 bp, Homo Sapiens; identical to SEQ ID NO: 286945

SEQ ID NO: 397528 - DNA, 1000 bp, Homo Sapiens; identical to SEQ ID NO: 116447

SEQ ID NO: 397529 - DNA, 1000 bp, Homo Sapiens
tgaagtttgctgcctacctagagagggaatacaaagtccacatcaaccccaactcactcttcgacatccaggtgaagcggattcacgaatataaacgacagctcctcaactgcctccatgtcatcaccctgtacaaccgcatcaagagggagcccaataagttttttgtgcctcggactgtgatgattggagggaaggctgcacctgggtaccacatggccaagatgatcatcagactcgtcacagccatcggggatgtggtcaaccatgacccggcagtgggtgaccgcctccgtgtcatcttcctggagaactaccgagtctcactggccgagaaagtgatcccagctgcagacctctctgagcagatctccactgcgggcactgaagcctcaggcaccggcaacatgaagttcatgctcaacggggctctgaccattggcaccatggacggggccaatgtggagatggcagaagaggcgggagaggaaaacttcttcatctttggcatgcgggtggaggatgtggataagcttgaccaaagagggtacaatgcccaggagtactacgatcgcattcctgagcttcggcaggtcattgagcagctgagcagtggcttcttctcccccaaacagcccgacctgttcaaggacattgtcaatatgctcatgcaccatgaccggtttaaagtcttcgcagattatgaagactacattaaatgccaggagaaagtcagcgccttgtacaagaacccaagagagtggacgcggatggtgatccggaacatagccacctctggcaagttctccagtgaccgcaccattgcccagtatgcccgggagatctggggtgtggagccttcccgccagcgcctgccagccccggatgaggccatctgagcctccagaccagaccccaaaccagcccttgagtctgtcacactctcttgggccagccccagcacctcatgcagagggtggggtactggagttagatctct

SEQ ID NO: 397530 - DNA, 1000 bp, Homo Sapiens; identical to SEQ ID NO: 221714

SEQ ID NO: 397531 - DNA, 1000 bp, Homo Sapiens; identical to SEQ ID NO: 221715

SEQ ID NO: 397532 - DNA, 1000 bp, Homo Sapiens; identical to SEQ ID NO: 116449

SEQ ID NO: 397533 - DNA, 1000 bp, Homo Sapiens; identical to SEQ ID NO: 221717

SEQ ID NO: 397534 - DNA, 1000 bp, Homo Sapiens; identical to SEQ ID NO: 221718

SEQ ID NO: 397535 - DNA, 595 bp, Homo Sapiens; identical to SEQ ID NO: 116450

SEQ ID NO: 397536 - DNA, 1000 bp, Homo Sapiens; identical to SEQ ID NO: 116452

SEQ ID NO: 397537 - DNA, 1000 bp, Homo Sapiens; identical to SEQ ID NO: 286956

SEQ ID NO: 397538 - DNA, 1000 bp, Homo Sapiens; identical to SEQ ID NO: 286958

SEQ ID NO: 397539 - DNA, 1000 bp, Homo Sapiens; identical to SEQ ID NO: 286959

SEQ ID NO: 397540 - DNA, 1000 bp, Homo Sapiens; identical to SEQ ID NO: 221720

SEQ ID NO: 397541 - DNA, 1000 bp, Homo Sapiens; identical to SEQ ID NO: 286962

SEQ ID NO: 397542 - DNA, 1000 bp, Homo Sapiens; identical to SEQ ID NO: 286964

SEQ ID NO: 397543 - DNA, 1000 bp, Homo Sapiens; identical to SEQ ID NO: 116453

SEQ ID NO: 397544 - DNA, 1000 bp, Homo Sapiens; identical to SEQ ID NO: 221722

SEQ ID NO: 397545 - DNA, 1000 bp, Homo Sapiens; identical to SEQ ID NO: 116454

SEQ ID NO: 397546 - DNA, 1000 bp, Homo Sapiens; identical to SEQ ID NO: 116455

SEQ ID NO: 397547 - DNA, 668 bp, Homo Sapiens
cggggacccggctgcggtggctgcgggactgacgagaaactactaaagttcctggggaagcaaagtagaatttcataagaacaaaatggatggagaggagaaaacctatggtggctgtgaaggacctgatgccatgtatgtcaaattgatatcatctgatggccatgaatttattgtaaaaagagaacatgcattaacatcaggcacgataaaagccatgttgagtggcccaggtcagtttgctgagaacgaaaccaatgaggtcaattttagagagataccttcacatgtgctatcgaaagtatgcatgtattttacgtacaaggttcgctacactaacagctccaccgagattcctgaattcccaattgcacctgaaattgcactggaactgctgatggctgcgaacttcttagattgttaaataaaataaattataataaactgttaactcttttcagtatttaatacctgtagttcagttagtaactttttcatatatagcatgttgcctgtatgcagttgaactatataaagttcattgcaaagcagattatcttgtttttttgcatagcaatcaaagttgaaatttgtttgctacatcaacaaattaaggacattttcacaaactgagaaataaacaaatatgccaattaaaaaaaaaaaaa

SEQ ID NO: 397548 - DNA, 1000 bp, Homo Sapiens; identical to SEQ ID NO: 286970

SEQ ID NO: 397549 - DNA, 1000 bp, Homo Sapiens
gtgttagccaggatggtctcgatctcctgacctcgtgatccacccaactcggcctcccaaagtgctgggattacaggcatgagccaccgcgcctggcatctgctgtttctttcagaagctgggctgggatgagaattttgggcaacctccttcgacgtgggggaggtcccatttccacttcatcactgttggagatcatggagctaagaagcagagccaagtccacccatgtccttggcagagatgacaggcacacagcttgtgcagtgccagaatatcattagcgtttcccttctttagtggtttgcttaaatttaaatccctggtaatctgtagaaccttctcctaggaaatggtgaagtctattaggagccacttgtgactccatgacctgttaaaaccagcaatgtgagtattatttggagtaaatttgttccacgtcaagttctggccttctgatgcaaatgcaaaggaacttagtctgttatgaacccaggttgatgacagaccagtccttgtggaataagattccctttaaaaactctttagccagtcgtgacatcaaccctagacctgtctgccttggcatttgctgtcaacatctgctgggctatgtaggcaggttaatcctccacttctcatgtggttgaaccagtgtgttttttggtaaaatggtgattgtagataagattagttccctgatcccctgccccctgtcccctgcctcttttcccaattcccttccttatgctggacttttaaagcttaaaaaaaatccgattgaatataaatgcctaatttcattctttgtgaaatggttgcttcctcctgattccctaattgtgctgtgttcgtgtcttgcactggaattcaacattcccttctccttttgtactgtgttgtgcttgctgtctctcccggacacccttaaagactgtctttttagcaaaaaatttcagtaaagtgttttctgtaatctttttttaaaaaaaaaaaaaaa

SEQ ID NO: 397550 - DNA, 1000 bp, Homo Sapiens; identical to SEQ ID NO: 116456

SEQ ID NO: 397551 - DNA, 1000 bp, Homo Sapiens; identical to SEQ ID NO: 286973

SEQ ID NO: 397552 - DNA, 1000 bp, Homo Sapiens; identical to SEQ ID NO: 221723

SEQ ID NO: 397553 - DNA, 1000 bp, Homo Sapiens; identical to SEQ ID NO: 286977

SEQ ID NO: 397554 - DNA, 1000 bp, Homo Sapiens
ctgaccacagcgctgttctccgtgctcatgctgaatcgcagcctttcccggctgcagtgggcctccctgctgctcctcttcactggcgtcgccattgtccaggcacagcaagccggtgggggaggcccacggccactggatcagaaccctggggcaggcctggcagccgtcgtggcctcctgtctctcctccggcttcgcaggtgtctactttgagaagatcctcaaaggcagctcaggctccgtgtggctgcgcaacctgcaactgggcctcttcggcacagcactgggcctggtggggctctggtgggctgagggtaccgccgtggccacccgtggtttcttttttgggtacacacctgctgtctggggcgtggtgctcaaccaggccttcggcgggctactggtggctgtggttgtcaagtacgctgacaatatcctcaagggctttgccacctccctgtccattgtgctgtccactgttgcctccattcgcctctttggcttccacgtggacccattatttgcccttggcgctggactcgtcattggtgctgtctacctctacagccttccccgaggtgcagccaaagccatagcctctgcctctgcctccgcctccgggccctgcgttcaccagcagcctcccgggcagccaccaccaccgcagctgtcttcccaccgtggagacctcatcacggagccctttctgccaaagttgctcaccaaggtgaagggttcctagccgctgggattgaagacattggcctggcctcgttctctcttcttgcccttggcccagctgggaccaaactctgatcagtattaggggtagagtgaggtagacactggactccctgtccccaccacccctgccccacccagggccaacatgactaagctctctcatgacccacctcagctcagccccccagcccctgccagctccacactatctcttagctgagtttttgcaaataaaatgtgttgtgtatcttgcc

SEQ ID NO: 397555 - DNA, 1000 bp, Homo Sapiens; identical to SEQ ID NO: 116459

SEQ ID NO: 397556 - DNA, 1000 bp, Homo Sapiens; identical to SEQ ID NO: 116460

SEQ ID NO: 397557 - DNA, 1000 bp, Homo Sapiens; identical to SEQ ID NO: 286979

SEQ ID NO: 397558 - DNA, 1000 bp, Homo Sapiens; identical to SEQ ID NO: 221724

SEQ ID NO: 397559 - DNA, 1000 bp, Homo Sapiens
tatttttagttatataagattggaactaccaagcatgtggctcctggtcagtgtaattctaatctcacggatatcctctgttgggggagaagcaatgttctgtgattttccaaaaataaaccatggaattctatatgatgaagaaaaatataagccattttcccaagttcctacaggggaagttttctattactcctgtgaatataattttgtgtctccttcaaaatccttttggactcgcataacgtgcgcagaagaaggatggtcaccaacaccaaagtgtctcagactgtgtttctttccttttgtggaaaatggtcattctgaatcttcaggacaaacacatctggaaggtgatactgtacaaattatttgcaacacaggatacagacttcaaaacaatgagaacaacatttcatgtgtagaacggggctggtccactcctcccaaatgcaggtccactatttctgcagaaaaatgtgggccccctccacctattgacaatggagacattacttcattcctgttgtcagtatatgctccaggttcatcagttgagtaccagtgccagaacttgtatcaacttgagggtaacaatcaaataacatgtagaaacggacaatggtcagaaccaccaaaatgcttagatccatgtgtaatatcacaagaaattatggaaaaatataacataaaattaaagtggacaaaccaacaaaagctttattcaagaacaggtgacatagttgaatttgtttgtaaatctggatatcatccaacaaaatctcattcatttcgagcaatgtgtcagaatgggaaactggtatatcccagttgtgaagaaaaatagaatcaatggcattactattagtaaaatgcacacctttttctgaatttactattatatttgttttcaatttcatttttcaagtactgttttactcatttttattcataaataaagttttgtgttgatttgtgaaaatgcaattacaagagccaa

SEQ ID NO: 397560 - DNA, 1000 bp, Homo Sapiens; identical to SEQ ID NO: 286982

SEQ ID NO: 397561 - DNA, 1000 bp, Homo Sapiens; identical to SEQ ID NO: 116461

SEQ ID NO: 397562 - DNA, 1000 bp, Homo Sapiens
tgtgcctccagactatgcagctcatcaccctaggttctacaggaaatacagagatgaacaactttgccttcaaaaatgtgctgcctagaaacagacctgcattcaaccaactgtaatgcaggattggaccatgaatgatatgctagaatagaagaaagagaagtgtttttttaattgagagcctctatgtgcaaggtgatatataatcatatccagtttaatcttcacaatatccaatgaagaaggtctcattatctccatgataaagatggggaaactaaggtcagaagggttaactcaactgtctattgtcacatgatgaataaatagatgaagtgagatacaaagctgggtttgattcaaagcccttactttcctaattaaactatgatgcgtatttatttttctgcaccttcctttcttccacaaacacatattgatagatgcaagagactcttatttagaaggcgtgggggacaagaaggatacaaggtaagtttcagtggagctcagaggacggggagatagaactgtggcacttaggggagatgacatttgctttgggcagaggcagctagccaggacacatttccactataattttacaaagttaaatttataagctagcattaagtaaagtgaagtccagctcccttgctaaaaataactagaggtaataattggtattcaggtaactcatttacagtcataatgtgttgtgaaaatttaatcttaaaaattaaatttttaaactatgtgggtctgtgaatttctttaatgtctaagaaatccagcttcataatttccatgatacaaagatcttttttcaggtggatttttacctttgttccttttgctctgatagacaaaatcagtttaggactattaaagaatgttttggaataaactgtctttttcctcaatgaatgggatgtctaatgtatttcaaaatcacccaaaacttttggcaaataaaagcatttaaaaagacaaaaaaaaa

SEQ ID NO: 397563 - DNA, 1000 bp, Homo Sapiens
gaacttgcctaaacctttaactgaatttccgtctcctgctgaacagcccacatgcaaggagattcctgatttacctgaagaaccttctcaaacagcagaagaagtagttactgttgctctccgatgtcccagtgggaatgtcctgaggagaaggtttttgaagtcctacagctcacaggtcttatttgactggatgacgagaattgggtaccacatatctctatacagcctttctacttcctttcccagacggcctctggcagtggagggaggccagtcgctggaggacataggaataactgtggacactgtactcatcctggaggagaaggagcagaccaactaggaaagaagggagagctccctgtttgcatgaagtcagttatgctatgaccttctggcacaataaaggcttcactttcgaatcacaccataccttgattgagctcatggcagtaaactttgaacattgatatccatgggaataggattagaaaaggattgctttctatatataataatctgtggactgtgccattttacagtgtacccaaatgagaatgaggttgaaatgtatgcagtaaggtactcagtaattaattggtattttttcccagctgacatgatttcctcagtgttagaaaacaaacccttagaactttcctttctgcctcttcaatccatcttaccacacaatatttcatgattcaaattcttcaaagtcttatacgcaggaatgtttattctgctgtatttctgtgaaattaaaaacttggaagaagcttcaaagctcttggaggctttaaagttctttctgttgggtgtgcattacagtttacttaactgatgtttgcgatttatataattttgccttgtattaaatgttacaaagttccaaatgaatcagtattttaaaaaataaaactatgaaagcattaaaatataggtgaatttttaaaaaaaaaaaaaaaaaaaaaaaaaaaaaaccaaaggggggggg

SEQ ID NO: 397564 - DNA, 1000 bp, Homo Sapiens; identical to SEQ ID NO: 221726

SEQ ID NO: 397565 - DNA, 1000 bp, Homo Sapiens; identical to SEQ ID NO: 286985

SEQ ID NO: 397566 - DNA, 1000 bp, Homo Sapiens
ttgggacccttttgtgaagagttatgtagaaatgctggaattctatggggatcgagatggagcccaagaggtactcaccaattatgcatatgatgaaaagtttccatcaaatccaaatgcccatatctacttatacaactttctaaagagacagaaggcaccaagatcaaaattgataagtgtgcttaagattttgtatcagattgtaccatctcataaattgatgttggaattccatacattacttagaaaatcagaaaaagaagaacaccgtaaactggggttggaggtattatttggagtcttagattttgccggatgcactaagaatataactgcttggaaatacttggcaaaatatctgaaaaatatcttaatgggaaaccaccttgcgtgggttcaagaagagtggaactccaggaaaaactggtggccaggctttcatttcagctacttttgggcaaaaagtgattggaaggaagatacagctttggcctgtgagaaagcttttgtggctggtttactgttaggaaaaggttgtagatatttccggtatattttaaagcaagatcaccaaatcttagggaagaaaattaagcggatgaagagatctgtgaaaaaatacagtattgtaaatccaagactctgatactgaattttagttatttcacagttgtagctacacagtaagtagcttggtagatagttattgaatgtatttatgtagtgtattaagaagcttatattactacaaaaaacttatttttatatatttttatatttttgtattatttatagctagagaaacaatattactgcctttgctctttgtaactatgtctgttttcttttttgtaatgttaaatgttacatttgttaaggaataattcttcaaatgacaaactaattacagaatatagctctacagcagttattgtttgcaaatactttgcctcttgctattgtgtaataaactgtaacttgtaaaaaaaaaaaaaaa

SEQ ID NO: 397567 - DNA, 1000 bp, Homo Sapiens
aggagaggccctttgccaggagcacagcagcagctcgcctacctctgagcccaggccccctccctccctcagccccccagtcctccctccatcttccctggggttctcctcctctcccagggcctccttgctccttcgttcacagctgggggtccccgattccaatgctgttttttggggagtggtttccaggagctgcctggtgtctgctgtaaatgtttgtctactgcacaagcctcggcctgcccctgagccaggctcggtaccgatgcgtgggctgggctaggtccctctgtccatctgggcctttgtatgagctgcattgcccttgctcaccctgaccaagcacacgcctcagaggggccctcagcctctcctgaagccctcttgtggcaagaactgtggaccatgccagtcccgtctggtttccatcccaccactccaaggactgagactgacctcctctggtgacactggcctagggcctgacactctcctaagaggttctctccaagcccccaaatagctccaggcgccctcggccgcccatcatggttaattctgtccaacaaacacacacgggtagattgctggcctgttgtaggtggtagggacacagatgaccgacctggtcactcctcctgccaacattcagtctggtatgtgaggcgtgcgtgaagcaagaactcctggagctacagggacagggagccatcattcctgcctgggaatcctggaagacttcctgcaggagtcagcgttcaatcttgaccttgaagatgggaaggatgttctttttacgtaccaattcttttgtcttttgatattaaaaagaagtacatgttcattgtagagaatttggaaactgtagaagagaatcaagaagaaaaataaaaatcagctgttgtaatcacctagcaaactggaaaaaaaaaaaaaaaaaaaaaaaaaaaaaaaaaaaaaaaaaaaaaaaaaaaaaaaaaaaaaaaaaaaaaaaaaa

SEQ ID NO: 397568 - DNA, 1000 bp, Homo Sapiens
tcggaggctcaggccccctgagctgggcctctaagaaccacagccacagagtcaggctctgcagacccagaggtaaggctgcctggctgccccaaaccccagacactcctctccttgcctgcaggctgccctctcccatggccaccctagacagagacaccacccgtgatactctgagggagccagactttcacatgcaacggggcatttggggctggttcgggtcagtgtctacgggtggtggatttagtgaccaccctcctcccacttctttctctgcacgaggagttgggagcctgcctggtggagttgagtgatgcccgtcatgtgcacttgggtctaccaatgtgcttaaggccagatgggcttcctaagagacaagggtgggtggacctaaccaactatcatccccagcgatgttcaaacataaaatcttatctatgtgcagcatgactctctccaggtgacagaaagggctctagacagctgagaggacctgatcatgtagggagggacggggaggggagccaggacccaggagctgcatggctgtaagaggaaggtccttggagggtatcagcagtctcagtgtgatgtgacaactatggacctgtgggtgtgccctggggacccctgacccatcccaaaacactgtggaaagaagggcctcttctccgtggggacccgtgtctgtgggagcgggcacaggtccatgctgcaggccactacggctgctcggcaggagggccgagagtttggacccacatagctgcaacccaagctggcccataatcagcagtggggcccagcagcacaggaggggcggacggttagctttggaaaaaatgacttgattaatctgattcgccaaataaatagattcatgtgatgccttgtgaaaaaaaaaaaaaaaaaaaaaaaaaaaaaaaaaaaaaaaaaaaaaaaaaaaaaaaaaaaaaaaaaaaaaaaaaaaaaaaaaaaaaaaaaaaaaaaaaaaaaa

SEQ ID NO: 397569 - DNA, 1000 bp, Homo Sapiens
ggtgtgtctctcgatgccactcctgcttctctgggggcctctttctgtgcttctctttgtccccaaattgctacctctttgtcagtctgggtgtctcaggttctgtgtgtccttgtgtgcatttctgtctctctctgtcctcgtctctctgcaaggccctctatttctctctttcttggtgtctgtcctttgccccctgtgccctctggattctctgggtctatgtaggcccctggtctgccctgggctcatcagccttcctgacctcctcctgccctccccttcactccctccctggctctgccagtcggttcccacggagccatttttagctctgatcagcatgggaatgtgcctcggcctccaaggggctttgtcctggtgcccccgcccctggtcccaacctgatcccacgagggagttgggacaggaggattgatggtgctccccttcctgccagcgtcagaggccctggagaggggctgtccatggcagctggtctttattcctccctcatgagcacagggtcgggggggtccccattcttggaagaggttgagaagactcctgggcttcagcctctcccacccagccctgcccctcacctgcctgccctcccctcccccactctatactagggactggatctcagcctctgatcagtttcacaaagtttgttccctaaggaaatcaaatcccattgtcacctaactctgaagatctaaatagcccttggatcagtatgggaaccccaaatcccacagggccagatgtggagtctgtgtctgcccccgtcttctctccatcctcaaagcccccacttctctccaggctgtttctttttttatgactgtaaacatagatagtgctttattttgttaataataagataatgatgagtaacttaaccagcacatttctcctgtttacactcgggggatttttttgttttctgatgacataataaagacagatcatttcagaaaaaaaaaaaaaaaaa

SEQ ID NO: 397570 - DNA, 1000 bp, Homo Sapiens; identical to SEQ ID NO: 221729

SEQ ID NO: 397571 - DNA, 1000 bp, Homo Sapiens; identical to SEQ ID NO: 116462

SEQ ID NO: 397572 - DNA, 1000 bp, Homo Sapiens; identical to SEQ ID NO: 286988

SEQ ID NO: 397573 - DNA, 1000 bp, Homo Sapiens; identical to SEQ ID NO: 221731

SEQ ID NO: 397574 - DNA, 1000 bp, Homo Sapiens; identical to SEQ ID NO: 116465

SEQ ID NO: 397575 - DNA, 1000 bp, Homo Sapiens; identical to SEQ ID NO: 116466

SEQ ID NO: 397576 - DNA, 1000 bp, Homo Sapiens; identical to SEQ ID NO: 116467

SEQ ID NO: 397577 - DNA, 1000 bp, Homo Sapiens; identical to SEQ ID NO: 221734

SEQ ID NO: 397578 - DNA, 1000 bp, Homo Sapiens; identical to SEQ ID NO: 286994

SEQ ID NO: 397579 - DNA, 1000 bp, Homo Sapiens; identical to SEQ ID NO: 116468

SEQ ID NO: 397580 - DNA, 1000 bp, Homo Sapiens; identical to SEQ ID NO: 221735

SEQ ID NO: 397581 - DNA, 1000 bp, Homo Sapiens; identical to SEQ ID NO: 286997

SEQ ID NO: 397582 - DNA, 1000 bp, Homo Sapiens; identical to SEQ ID NO: 116469

SEQ ID NO: 397583 - DNA, 1000 bp, Homo Sapiens; identical to SEQ ID NO: 286999

SEQ ID NO: 397584 - DNA, 1000 bp, Homo Sapiens
tttgggaataacatttcttggaattggactgtgggcatggaatgaaaaaggagttctgtccaacatctcttccatcaccgatctcggcggctttgacccagtttggctcttccttgtggtgggaggagtgatgttcattttgggatttgcagggtgcattggagcgctacgggaaaacactttccttctcaagtttttttctgtgttcctgggaattattttcttcctggagctcactgccggagttctagcatttgttttcaaagactggatcaaagaccagctgtatttctttataaacaacaacatcagagcatatcgggatgacattgatttgcaaaacctcatagacttcacccaggaatattggcagtgctgtggggcttttggagctgatgattggaacctaaatatttacttcaattgcacagattccaatgcaagtcgagagcgatgtggcgttccattctcctgctgcactaaagatcccgcagaagatgtcatcaacactcagtgtggctatgatgccaggcaaaaaccagaagttgaccagcagattgtaatctacacgaaaggctgtgtgccccagtttgagaagtggttgcaggacaatttaaccatcgttgctggtattttcataggcattgcattgctgcagatatttgggatatgcctggcccagaatttggttagcgatatcgaagctgtcagggcgagctggtagaccccctgcaaccgctgctgcaagacactggacagacccagctttcgggaccctcccgcgtgccgaactgatcttcgagctgcatggacctaatcacagatgcagcctgcagtctcgcctaatggagctgccattaggggagtgtaaaactgggaaatgctgctcactgacagaattaaaaaaaaaaataaccagtatgaaagtcgttgcgccgtgaatctctactgtagccatgaatttatggacagttagatgcttaccaaaaaagaaaaaaaa

SEQ ID NO: 397585 - DNA, 1000 bp, Homo Sapiens; identical to SEQ ID NO: 116470

SEQ ID NO: 397586 - DNA, 1000 bp, Homo Sapiens
agtgtgcactaaaagtgtcacactcccaaaaaactcacaaaacattttgctaaaaagatatgactgcttgaaatagtctctctcccatggagaaccacatttctctttctgccatacttgctactgctactgattttggaggaaatttttctagaagaacaaaggtcatatttgaggcaagctaaaaacttaattatacatggctactttactgtgtctgtagctaaagaaaaattattttacaaaaattacttcatgaaatatagtttgtaccccagtagttgagaaatgtgaccttttaggcaaagaacaggcagtccatctctcttagctttagtttatctctctgcctgaagacaggaaacaggcccaagtgcatactcgggttctttccaactcagaatcatctctgattccacaaaagtgagtttagtttcctatctgaattaacaactttaaaggagactataatagttaaaagtggaagaatagaaataaataaatttaaaatgaaattaattaaagtagaagagaagggttctgttccatgtacgattaatgtgccccttttggagataagctttccaaaatatgcgtatgagtaaaattagagaattccaccactaagcaacaatagattttatatgtgtgtgtggatatatatacacacacacacagaaagatgaatatatatatatatatatctgtatagacacacatataatatatatagatatataatccctatatatcttgaatctacaaatatctttatatgtatataatttgaatatatacatgtatgtatatacagatgtgtgtgtatatatatatatacatacacatatacataaattttcagctatttctgttcccctgaactaatttgagattagacccaaacatgcttttaaatgtctcatgccaaggcactgaattaagacttcttaatgttgaaatattttaagtgatttcatattaaattttctatatactgaaa

SEQ ID NO: 397587 - DNA, 1000 bp, Homo Sapiens; identical to SEQ ID NO: 116471

SEQ ID NO: 397588 - DNA, 1000 bp, Homo Sapiens; identical to SEQ ID NO: 287003

SEQ ID NO: 397589 - DNA, 1000 bp, Homo Sapiens; identical to SEQ ID NO: 221736

SEQ ID NO: 397590 - DNA, 1000 bp, Homo Sapiens; identical to SEQ ID NO: 287005

SEQ ID NO: 397591 - DNA, 1000 bp, Homo Sapiens; identical to SEQ ID NO: 221737

SEQ ID NO: 397592 - DNA, 1000 bp, Homo Sapiens
ttggcggctccatcctggcctcgctggacacttttaagaagatgtgggtgtccaaaaaggagtatgaagaggatggctcccgtgctattcatcgcaaaactttctagtgcccaaggagggcggggcatgttgggagagggggagggaggggagacagagcctttaaccctttttggtcttggctcgtatactaggcttagggtcccctgcatgccctgaacccctgggtgggtggcacagcagtgcccccctgcagccttcccctctacacaggacatgcacacacaagtaacattgagctgcatggacaggagccttgagctggcgtgtgggaattgagcgccatgtcaggctgttgtgggtatccccctggcagggccagctaggcctgtggttcccctgctccgactctcagggctgcctccctgagctccagggccagaatgcctggatgcctgggtagccagtttggggagtgggctgcaaggggcagccagcagcgcccactggtgtgtcactgcatccattgccacctcctgttcgtgacctgacagggtgacacagcccctttcacactctgtcctcctatcttcctgggtagatgccctggtgtagggctgagtactgaatggtcttccatccccagcaagggggtgcagcccagggtcaggcccttcagagccagggctagaggatgcacggtggctagagccagctgcactatccttttcagagcacttcatccacttgctcctccctctaccctcggcaccctgggtgggaaagggttgatgctcatcatttattgaggggaagccacttaataaggagtcagacctaaaagggggtgggggacattttcttacctcacccaagaaagaggtcgtcacttttgctgtggccagggccccacctccctctctcagatatgtacaataatttaacacggttgcctgaaaaaaacttttgtaaatcattatagtaataattatggacaagg

SEQ ID NO: 397593 - DNA, 1000 bp, Homo Sapiens; identical to SEQ ID NO: 116473

SEQ ID NO: 397594 - DNA, 1000 bp, Homo Sapiens; identical to SEQ ID NO: 287007

SEQ ID NO: 397595 - DNA, 1000 bp, Homo Sapiens; identical to SEQ ID NO: 287008

SEQ ID NO: 397596 - DNA, 1000 bp, Homo Sapiens; identical to SEQ ID NO: 116475

SEQ ID NO: 397597 - DNA, 1000 bp, Homo Sapiens
tatcctgatgctaaacctgttcgctgcaaatgtgggcgccaattttgctttaactgtggagaaaattggcatgatcctgttaaatgtaagtggttaaagaaatggattaaaaagtgtgatgatgacagtgaaacctccaattggattgcagccaacacaaaggaatgtcccaaatgccatgtcacaattgagaaggatggtggttgtaatcacatggtctgtcgtaaccagaattgtaaagcagagttttgctgggtgtgtcttggcccatgggaaccacatggatctgcctggtacaactgtaaccgctataatgaggatgatgcaaaggcagcaagagatgcacaggagcgatctagggcagccctgcagaggtacctgttctactgtaatcgctatatgaaccacatgcagagcctgcgctttgagcacaaactatatgctcaggtgaaacagaaaatggaggagatgcagcagcacaacatgtcctggattgaggtgcagttcctgaagaaggcagttgatgtcctctgccagtgtcgtgccacactcatgtacacttatgtcttcgctttctacctcaaaaagaataaccagtccattatctttgagaataaccaagcagatctagagaatgccacagaggtgctctcgggctaccttgaacgagatatttcccaagattctctgcaggatataaagcagaaagtacaagacaagtacagatactgtgagagtcgacgaagggttttgttacagcatgtgcatgaaggctatgaaaaagatctgtgggagtacattgaggactgagaatggccctgcataaaatgaactctgaaaactttaccatctagagtgctcatgcaattaaaacaaaacaaacacaaacaaggaggcactaagcctattctgacaccactggtctgtagtaccagaattgttttgttaatggaaagtttaagtaaattatattgtaataaaaaggtagataaaccattgt

SEQ ID NO: 397598 - DNA, 1000 bp, Homo Sapiens; identical to SEQ ID NO: 116477

SEQ ID NO: 397599 - DNA, 888 bp, Homo Sapiens
ctgtttcaaccatatcctttcaaaccagatcagtgaggtcatgaccagaaaacaagccctgccagcctcctacctcaaatctaattaattataattttcttccttatgacaacccacacaaaagacagagataagaaaaacaaggacttcctgggaggctgtggatcaattaccaatggacacccagaagcaaattcacaagactcacaattcaaagaaccaattttttacaattttttttttcctgtcagttgaatttgggaaggaaggaacacgcaaaaatttttaccttcttctttcaattggacactatggacggaaatccaggagagctgaccttggaactgcagacactgcagataaaacagagccagaatgctttgctgccagctggacctttgacccaaaccccagtgtgactgtctccggtgctcactcaactgcagtgcatcaatgaaggaaaaaagaactgagcattggcaaaaagctgaggatgacaagcttaggggatgaaaggctgccttttcccccccttctgagcgtttctgacagctcccagctgggagaaaccaacatgacgaaaagacaaagaatactggagaagagagagggtgggcagagccacaacctcatcctcccagtggttcctcttgagtttgatttgacaagatgccttcccacccaggtaaccccgtgggaacgtgccagtacctcaccgcacgacctcactgagtcctcacaacaaatccaggctgcagatttttttccccacttggagatgacaaattgaaatgcaggaaggttaaagagtttgcctgaggttgcttagataataaaagaatctggattagaacccagacctacccagctaaaaaaaaaaaaaaaaaa

SEQ ID NO: 397600 - DNA, 1000 bp, Homo Sapiens
cagtttgttttcaaaaaatcacagtagcaatgcaactcatcactctagaaaagcaagcttaggctacctgaaagattttcccttggaagtttagcgtatgtttgactaacaaaaattccctacatcagagactctaggtgctatataatccaaaaacttttcagcctgttgctcattctgtcccatgctggcaataataccttgtcagcccattacccttattttgaattgctccatctcctggtgggacttgtatcttgtctgccatatcagaacacaaacccctgaagaggttctgatttgattttttttttttcttcatgcctaccctttttttggaagtttccagccgcaatttgaaatgaaatgacaaggtgtatatttgatcaattttcattcccaccattgcattacaacctctaacttaaatgggtaaccctaaggcatatcaaagaagcagattgcatgataaacggaaatagaaaaaaagaacctacatttattttgctttagcatccttactctcaccttttatgagattgagagtggacttacatttccttttttacattttcgtatatttattttttttagccatcattatatgtttaagtctattatgggcaaccaatctttggaagctgaaaactgaatttaaagaatgctatcttggaaaattgcatacgtctgtgcaattttttattctgcctagtgctattctgcttgtttaactagattgtacaaaataacttcattgcttaatatcaaattacaaagtttagacttggagggaaatgggctttttagaagcaaacaattttaaatatattttgttcttcaaataaatagtgtttaaacattgaatgtgttttgtgaacaatatcccactttgcaaactttaactacacatgcttggaattaagttttagctgttttcattgctcaataataaagcctgaattctgatcaataaaaaaaaaaaaaaaaaaaaaaaaaaaaa

SEQ ID NO: 397601 - DNA, 1000 bp, Homo Sapiens; identical to SEQ ID NO: 116478

SEQ ID NO: 397602 - DNA, 1000 bp, Homo Sapiens; identical to SEQ ID NO: 221739

SEQ ID NO: 397603 - DNA, 1000 bp, Homo Sapiens; identical to SEQ ID NO: 287014

SEQ ID NO: 397604 - DNA, 1000 bp, Homo Sapiens; identical to SEQ ID NO: 116479

SEQ ID NO: 397605 - DNA, 1000 bp, Homo Sapiens; identical to SEQ ID NO: 116480

SEQ ID NO: 397606 - DNA, 1000 bp, Homo Sapiens; identical to SEQ ID NO: 287017

SEQ ID NO: 397607 - DNA, 1000 bp, Homo Sapiens; identical to SEQ ID NO: 287019

SEQ ID NO: 397608 - DNA, 894 bp, Homo Sapiens
gcccgtcttcgtgtctcctccctccctcgccttcctccttcctagctcctctcctccagggccagactgagcccaggttgatttcaggcggacaccaatagactccacagcagctccaggagcccagacaccggcggccagaagcaaggctaggagctgctgcagccatgtcggccctcagcctcctcattctgggcctgctcacggcagtgccacctgccagctgtcagcaaggcctggggaaccttcagccctggatgcagggccttatcgcggtggccgtgttcctggtcctcgttgcaatcgcctttgcagtcaaccacttctggtgccaggaggagccggagcctgcacacatgatcctgaccgtcggaaacaaggcagatggagtcctggtgggaacagatggaaggtactcttcgatggcggccagtttcaggtccagtgagcatgagaatgcctatgagaatgtgcccgaggaggaaggcaaggtccgcagcaccccgatgtaaccttctctgtggctccaaccccaagactcccaggcacatgggatggatgtccagtgctaccacccaagccccctccttctttgtgtggaatctgcaatagtgggctgactccctccagccccatgccggccctacccgcccttgaagtatagccagccaaggttggagctcagaccgtgtctaggttggggctcggctgtggccctggggtctcctgctcagctcagaagagccttctggagaggacagtcagctgagcacctcccatcctgctcacacgtccttccccataactatggaaatggccctaatttctgtgaaataaagactttttgtatttctggggctgaggctcagcaacagcccctcaggcttccagtga

SEQ ID NO: 397609 - DNA, 1000 bp, Homo Sapiens
aagcaatttgcagcacacagcgttccactgcggggtttcacgctcacctgaaaacacctgttcccaacctacttcttggtgcaagttgaccaaatcgttttaagtggtaactctttccaaccgtagcagggttgttttctgttaagcaaagccgagatccagtgcaatacctggactgtcaccgtcctgtgagtggtgtacacaatgggaagataataagccgtggtgttttgctgtctgtctgtgtcacaagcatgaaaacccgtgtgtcattgatcagcaccatttgtggtatgttccgtgatgagcgtttagtgagcctgctggctgcagagcactatgaaatcatggtacgtagtccccggcacctgtcgttattcctatatcctcctgcaactgtggtttgaaactgcgcattctctagtagtatatatcgtgcctgtcttcaaaaacatttccctttttatactcattccccccaggcatggggtagtgtcagtcggactgcacagggaacacggtttccagtggctttggcccctactcgggaaacgtctgcctgttctcgatggtgatggggtggctgccattcccttggttttcctaagccctttctaacgagagtctcaaacaagcggaggcgagggccaattcaaccccattctttccagcgccccgcaccatagcacctgcccacctgagaaccaggaacgcaccctctctgtggagctctgactggtgtagctggaaacaaacagcaacttgcaaacggacgaagagcctgccgtgtgttaatcatttgccttacaagatgtaccagacggtttccagtactaacaaagggaataaaaatacctcacgccacaatccagcatattgatgttttaaggcaaaacaaaaaaaaaaaaaaaaaaaaaaaaaaaaaaaaaaaaaaaaaaaaaaaaaaaaaaaaaaaaaaaaaaaaaaaaaaaaaaaaaaaaaaaaaaaaaaaaaaaaaaaa

SEQ ID NO: 397610 - DNA, 1000 bp, Homo Sapiens
catgtacggaagcattctgttcttaacctgtattagtgtagatcgatttctggcaattgtctacccatttaagtcaaagactctaagaaccaaaagaaatgcaaagattgtttgcactggcgtgtggttaactgtgatcggaggaagtgcacccgccgtttttgttcagtctacccactctcagggtaacaatgcctcagaagcctgctttgaaaattttccagaagccacatggaaaacatatctctcaaggattgtaattttcatcgaaatagtgggattttttattcctctaattttaaatgtaacttgttctagtatggtgctaaaaactttaaccaaacctgttacattaagtagaagcaaaataaacaaaactaaggttttaaaaatgatttttgtacatttgatcatattctgtttctgttttgttccttacaatatcaatcttattttatattctcttgtgagaacacaaacatttgttaattgctcagtagtggcagcagtaaggacaatgtacccaatcactctctgtattgctgtttccaactgttgttttgaccctatagtttactactttacatcggacacaattcagaattcaataaaaatgaaaaactggtctgtcaggagaagtgacttcagattctctgaagttcatggtgcagagaattttattcagcataacctacagaccttaaaaagtaagatatttgacaatgaatctgctgcctgaaataaaaccattaggactcactgggacagaactttcaagttccttcaactgtgaaaagtgtctttttggacaaactatttttccacctccaaaagaaattaacacatggacattttaaagtctttagtataaagaaaatttgtattcaatgtgttaagcattaacatgtattttatttgtgtatccactccatctgatttttctgagccattttgatttgttccttcattaaaaaaaatctcttaaagttaaaaaaaaaaa

SEQ ID NO: 397611 - DNA, 1000 bp, Homo Sapiens; identical to SEQ ID NO: 116482

SEQ ID NO: 397612 - DNA, 1000 bp, Homo Sapiens
taaatatgcttcctttggtcaagaaagctcaagggagagttattaatgtctccagtgttggaggtcgccttgcaatcgttggagggggctatactccatccaaatatgcagtggaaggtttcaatgacagcttaagacgggacatgaaagcttttggtgtgcacgtctcatgcattgaaccaggattgttcaaaacaaacttggcagatccagtaaaggtaattgaaaaaaaactcgccatttgggagcagctgtctccagacatcaaacaacaatatggagaaggttacattgaaaaaagtctagacaaactgaaaggcaataaatcctatgtgaacatggacctctctccggtggtagagtgcatggaccacgctctaacaagtctcttccctaagactcattatgccgctggaaaagatgccaaaattttctggatacctctgtctcacatgccagcagctttgcaagactttttattgttgaaacagaaagcagagctggctaatcccaaggcagtgtgactcagctaaccacaaatgtctcctccaggctatgaaattggccgatttcaagaacacatctccttttcaaccccattccttatctgctccaacctggactcatttagatcgtgcttatttggattgcaaaagggagtcccaccatcgctggtggtatcccagggtccctgctcaagttttctttgaaaaggagggctggaatggtacatcacataggcaagtcctgccctgtatttaggctttgcctgcttggtgtgatgtaagggaaattgaaagacttgcccattcaaaatgatctttaccgtggcctgccccatgcttatggtccccagcatttacagtaacttgtgaatgttaagtatcatctcttatctaaatattaaaagataagtcaaacattaaaaaaaaaaaaaaaaaaaaaaaaaaaaaaaaaaaaaaaaaaaaaaaaaaaaaaaaaaaaaaaaaaaaaaaaaaaa

SEQ ID NO: 397613 - DNA, 1000 bp, Homo Sapiens; identical to SEQ ID NO: 221740

SEQ ID NO: 397614 - DNA, 1000 bp, Homo Sapiens
tttagccatagctctagcctcattacacaccagagaattcatactggaatgaggccttatgagtgcagtgaatgtgggaaatcttttatccatagttctagccttattacacaccagagagttcacactggtacaaggccttatatgtgcagtgaatgtgggaaatcctttagccagagctgtcacctcattaaacaccggagacttcacattggagaagggccttatgagtgtagtgaatgtgggaaattgtttacttatagatctcgtttcttccaacaccagagagttcatactggagtaagatctcatgaatgtcatgaatgtggaaaattatttagcaggaaatttgacctcattgtacatgagagagttcacacaggagaaaggccatatgagtgcagtgaatgtggaaaatcctttacctgtaaatcctacctcatctcacactggaaagttcatactggagcaaggccttatgaatgtggggagtgtgggaaatcatttactcatagctctacgctccttcaacaccagagagttcacactggagaaaggccttatgagtgcaatgaatgtgggaagttttttagccagagctccagcctcattagacataggagaagtcacaccggagaaaggccttatgagtgcagtgagtgttggaaatcctttagtaaccactctagcctcgttaaacaccgaagagttcataccggagaaaggccttatgaatgcagtgaatgtggaaaatcctttagccagagctctaacctcactaatcaccagcgaattcacagtggggaaaggccttatgagtgtagtgactgtggaaaattttttaccttcaactccaacctcctaaaacatcagaacgttcacaagggataaaggttaggtaacacacatagggctgttacggactgagaagtgtccctgcaaaattcacagacataaataaataaatacgtattttcaataaaaaaaaaaaaaaaaaaaa

SEQ ID NO: 397615 - DNA, 1000 bp, Homo Sapiens; identical to SEQ ID NO: 116484

SEQ ID NO: 397616 - DNA, 1000 bp, Homo Sapiens
cctgcagtgccacggctggagcgtgcagagggctgcccagtatctgaaggtggagcagctcttcgggctgggtctgcggcccagaggggagtgccacaaagtgctggagatgttcgactggaacctggagcaggccggctgccaccttctgggctcctggggccctgcccaccacaagcgctgagatgcgtctggagagccagagggcctgcctgaaggaatcacctgagcctgtccgtccaccaggagtggggagatgcccccatccagtcctggaggacccgctgctcctgctgctcccggggatggagcaaggccaaggctgcgggaggctgggagccctgccctgcccatccctcctgcaccagcgctgtccctgcacactttggttcagtcccggtgcccctgccaagatgtggaaggggccgggtgaagacaggcttgagggctgccccagcaggctctgggtatgacctgcctctggccctggtcctgggcggggcctgtgggtggagtagtacccccaggccctgccctgggtgacagactgggaggaaaccaggctggacctgggcaggcgggatgtgttggccacagggagaggcggaccggcacccggtgggacctcctaggactgggccttcttccagggggcccctggcagcagctggggtgtcgggcagaatgtgacttgtggccttaccatggacttgaatgggacttggctggcctcaggatcttgtgcctggaaatagcctgaggtggctcaggaagcggagaaagggtgccagaccattctctggcggggaccagggcccaaggccccagggctggaaggagaccaaggggcagccgccctggagggacatcagtgcttcctcttccacccaattcccccacgcggttccatgttttcccaccagcctgttggcgaagttgctgctccggcattcagtacctgcttcttccagagaaataaagttagtttctattttatgtt

SEQ ID NO: 397617 - DNA, 1000 bp, Homo Sapiens; identical to SEQ ID NO: 116486

SEQ ID NO: 397618 - DNA, 1000 bp, Homo Sapiens; identical to SEQ ID NO: 287028

SEQ ID NO: 397619 - DNA, 1000 bp, Homo Sapiens; identical to SEQ ID NO: 287029

SEQ ID NO: 397620 - DNA, 1000 bp, Homo Sapiens; identical to SEQ ID NO: 221742

SEQ ID NO: 397621 - DNA, 1000 bp, Homo Sapiens; identical to SEQ ID NO: 221743

SEQ ID NO: 397622 - DNA, 1000 bp, Homo Sapiens; identical to SEQ ID NO: 287032

SEQ ID NO: 397623 - DNA, 1000 bp, Homo Sapiens; identical to SEQ ID NO: 221744

SEQ ID NO: 397624 - DNA, 1000 bp, Homo Sapiens; identical to SEQ ID NO: 116488

SEQ ID NO: 397625 - DNA, 1000 bp, Homo Sapiens; identical to SEQ ID NO: 221747

SEQ ID NO: 397626 - DNA, 1000 bp, Homo Sapiens; identical to SEQ ID NO: 116489

SEQ ID NO: 397627 - DNA, 1000 bp, Homo Sapiens
gtgaaggcgtttaagaaaaagtttgcctgcaatggtactgtaattgagcatccggaatatggagaagtaattcagctacagggtgaccaacgcaagaacatatgccagttcctcgtagagattggactggctaaggacgatcagctgaaggttcatgggttttaagtgcttgtggctcactgaagcttaagtgaggatttccttgcaatgagtagaatttcccttctctcccttgtcacaggtttaaaaacctcacagcttgtataatgtaaccatttggggtccgcttttaacttggactagtgtaactccttcatgcaataaactgaaaagagccatgctgtctagtcttgaagtccctcatttaaacagaggtcaagcaataggcgcctggcagtgtcaagcctgaaaccaagcaataccgtcatgtttcagccaagcccagagccctaagattacaaacaactatggccggaacctcctcagctctccctctgcagagttccctaccctaagagaatgttaccacctgaacagtcctcggtgaatctgagaggagaggatggggtaaggcagaagcaccagctgtactactagaagggagcttttggtggtagatcccctggtgtctccaacctgactaggtggacagagctcaaagaggccctcttaccgctagcgaggtgataggacatctggcttgccacaaaggtctgttcgaccagacatatcctagctaagggatgtccaaacatcagaatgtgaggccaaccttctatcagagttaaacttttgacaagggaacaaatctcaaactgatccatcagtcatgtagctagctgtagagcttgcaacttaatagcagcagctgcccaatgccatgtgaagtaacaaactggtttttggtttttttttccccttcagttttaatgttatgtgtaatgtatttaaacccttatttaaataaaacttgttttcagaaaaaaaaaaaaaaaaaaaa

SEQ ID NO: 397628 - DNA, 1000 bp, Homo Sapiens; identical to SEQ ID NO: 116490

SEQ ID NO: 397629 - DNA, 1000 bp, Homo Sapiens; identical to SEQ ID NO: 116491

SEQ ID NO: 397630 - DNA, 1000 bp, Homo Sapiens; identical to SEQ ID NO: 116492

SEQ ID NO: 397631 - DNA, 1000 bp, Homo Sapiens
tgcagactcggcttgggcagcacttcggggggggagggggtgttatgggagggggacacattggggccttgctcctcttcctcctttcttggcgggtgggagactccgggtagccgcactgcagaagcaacagcccgaccgcgccctccagggtcgtccctggcccaaggccaggggccacaagttagttggaagccggcgttcggtatcagaagcgctgatggtcatatccaatctcaatatctgggtcaatccacaccctcttagaactgtggccgttcctccctgtctctcgttgatttgggagaatatggttttctaataaatctgtggatgttccttcttcaacagtatgagcaagtttatagacattcagagtagaaccacttgtggattggaataacccaaaactgccgatttcaggggcgggtgcattgtagttattattttaaaatagaaactaccccaccgactcatctttccttctctaagcacaaagtgatttggttattttggtacctgagaacgtaacagaattaaaaggcagttgctgtggaaacagtttgggttatttgggggttctgttggctttttaaaattttcttttttggatgtgtaaatttatcaatgatgaggtaagtgcgcaatgctaagctgtttgctcacgtgactgccagccccatcggagtctaagccggctttcctctattttggtttatttttgccacgtttaacacaaatggtaaactcctccacgtgcttcctgcgttccgtgcaagccgcctcggcgctgcctgcgttgcaaactgggctttgtagcgtctgccgtgtaacacccttcctctgatcgcaccgcccctcgcagagagtgtatcatctgttttatttttgtaaaaacaaagtgctaaataatatttattacttgtttggttgcaaaaacggaataaatgactgagtgttgagattttaaataaaatttaaagcaaaaaaaaaaaaaaaa

SEQ ID NO: 397632 - DNA, 1000 bp, Homo Sapiens; identical to SEQ ID NO: 287040

SEQ ID NO: 397633 - DNA, 1000 bp, Homo Sapiens; identical to SEQ ID NO: 287041

SEQ ID NO: 397634 - DNA, 1000 bp, Homo Sapiens; identical to SEQ ID NO: 116493

SEQ ID NO: 397635 - DNA, 1000 bp, Homo Sapiens; identical to SEQ ID NO: 221749

SEQ ID NO: 397636 - DNA, 1000 bp, Homo Sapiens; identical to SEQ ID NO: 221750

SEQ ID NO: 397637 - DNA, 1000 bp, Homo Sapiens; identical to SEQ ID NO: 287043

SEQ ID NO: 397638 - DNA, 1000 bp, Homo Sapiens; identical to SEQ ID NO: 116494

SEQ ID NO: 397639 - DNA, 1000 bp, Homo Sapiens; identical to SEQ ID NO: 287045

SEQ ID NO: 397640 - DNA, 1000 bp, Homo Sapiens; identical to SEQ ID NO: 287046

SEQ ID NO: 397641 - DNA, 1000 bp, Homo Sapiens; identical to SEQ ID NO: 287049

SEQ ID NO: 397642 - DNA, 1000 bp, Homo Sapiens; identical to SEQ ID NO: 287050

SEQ ID NO: 397643 - DNA, 1000 bp, Homo Sapiens; identical to SEQ ID NO: 116496

SEQ ID NO: 397644 - DNA, 1000 bp, Homo Sapiens
agacagtgaaaaggaaaatacgaaaaaagacttgttaggcattattaagggcatgaaagttgaattaagcacagtaaatgtacgaacaacaaagccccccaaaagaagaccacttaaaagtttggaagctacacttggcaggcttcgaagagctacagaatatgctccaaagaagagaattgagcccctgagtcctgagttggtggcagctgcatctgctgtggcagattctctcccttttgataagcaaacaaccaagtcagagctgctgagccagctccagcagcatgaggaagagtcaagggcacagagagatgcaaagcgacctaaaattagtttcagtaacataatatcagatatgaaagttgccagatctgctacagctagagttcgttcaagaccagagcttcggattcagtttgatgaaggctatgacaattatcctggccaggagaagacggatgatcttaaaaaaaggaaaaatatattcacagggaaaagacttaatatttttgacatgatggcagttactaaagaagcacctgaaacagacacatcaccttcactttggaatgtggaatttgctaagcagttagccacagtaaatgaacaaccccttcagaatggatttgaagagctgatccagtggacaaaagaggggaaactatgggagttcccaattaacaatgaagcaggttttgatgatgatggttcagaatttcatgaacatatatttctggagaaacacctggagagctttccaaaacaaggaccaattcgccacttcatggagctggtgacttgtggcctttccaaaaacccatatcttagtgttaaacagaaggttgaacacatagagtggtttagaaattattttaatgaaaaaaaggatattctaaaagaaagtaacatacagttcaattaagaccatggaaatttttatttcaaacaattagagatggatattacaactaaataaaataattttactagagtttgt

SEQ ID NO: 397645 - DNA, 1000 bp, Homo Sapiens; identical to SEQ ID NO: 116497

SEQ ID NO: 397646 - DNA, 1000 bp, Homo Sapiens; identical to SEQ ID NO: 287053

SEQ ID NO: 397647 - DNA, 1000 bp, Homo Sapiens; identical to SEQ ID NO: 287056

SEQ ID NO: 397648 - DNA, 1000 bp, Homo Sapiens; identical to SEQ ID NO: 116498

SEQ ID NO: 397649 - DNA, 1000 bp, Homo Sapiens; identical to SEQ ID NO: 116499

SEQ ID NO: 397650 - DNA, 1000 bp, Homo Sapiens; identical to SEQ ID NO: 287059

SEQ ID NO: 397651 - DNA, 1000 bp, Homo Sapiens; identical to SEQ ID NO: 116500

SEQ ID NO: 397652 - DNA, 1000 bp, Homo Sapiens; identical to SEQ ID NO: 116501

SEQ ID NO: 397653 - DNA, 670 bp, Homo Sapiens
agaggaaagaaccctgggaacgggaggcgaagggataatgagctggggatgggagcagtcgcaggaagaatcctctgcctggagccggcaggctccaacccctcagcttgagagtcaggagccccatagtccccacagcaataggaagcaccagctcctggtcccgaaaaaaggagggccccaactccagggactgcggcccgccctggagctgagaacacgcggactccagggagaggacagggcttcagggacccgagagccgctctgagcaccgggggatgtgactgcctcagcggcagagctggaagggccctcgaatgccattcacaggaacagcccaggaacccagggacttcagaagggctggtttgtccgaaaagtgagaggaggcggaggagagagcctgcgaggtcaagctgcagagaacatgagcttctacctccagatgtgccagggtgcatctcaataaacttggattttggccaggcgcggtggctcaggcctgtaatcccagctctggaagctgaaggatagcttgagcccaggagttcgaggctgcagtgagctatgatctcaccactacactccagcctgggtgacagcaagagatcttgtctcagaaataaataaataaaatttaaaaataaaaaaaaaaaaaaaaaaaaaa

SEQ ID NO: 397654 - DNA, 1000 bp, Homo Sapiens; identical to SEQ ID NO: 287061

SEQ ID NO: 397655 - DNA, 1000 bp, Homo Sapiens; identical to SEQ ID NO: 116502

SEQ ID NO: 397656 - DNA, 1000 bp, Homo Sapiens; identical to SEQ ID NO: 221755

SEQ ID NO: 397657 - DNA, 780 bp, Homo Sapiens
ggatataggcgcccccacacccgggcccggctaagcgccgccgccgctcctcgcctccttgctgcacgatggcctcgctccgggtggagcgcgccggcggcccgcgtctccctaggacccgagtcgggcggccggcagccgtccgcctcctccttctgctgggcgctgtcctgaatccccacgaggccctggctcagcctcttcccaccacaggcacaccagggtcagaaggggggacggtgaagaactatgagacagctgtccaattttgctggaatcattataaggatcaaatggatcctatcgaaaaggattggtgcgactgggccatgattagcaggccttatagcaccctgcgagattgcctggagcactttgcagagttgtttgacctgggcttccccaatcccttggcagagaggatcatctttgagactcaccagatccactttgccaactgctccctggtgcagcccaccttctctgaccccccagaggatgtactcctggccatgatcatagcccccatctgcctcatccccttcctcatcactcttgtagtatggaggagtaaagacagtgaggcccaggcctagggggcacgagcttctcaacaaccatgttactccacttccccacccccaccaggcctccctcctcccctcctactcccttttctcactctcatccccaccacagatccctggattgctgggaatggaagccagggttgggcatggcacaagttctgtaatcttcaaaataaaactttttttttga

SEQ ID NO: 397658 - DNA, 1000 bp, Homo Sapiens; identical to SEQ ID NO: 116504

SEQ ID NO: 397659 - DNA, 1000 bp, Homo Sapiens; identical to SEQ ID NO: 287066

SEQ ID NO: 397660 - DNA, 1000 bp, Homo Sapiens; identical to SEQ ID NO: 287067

SEQ ID NO: 397661 - DNA, 1000 bp, Homo Sapiens; identical to SEQ ID NO: 287068

SEQ ID NO: 397662 - DNA, 1000 bp, Homo Sapiens; identical to SEQ ID NO: 116505

SEQ ID NO: 397663 - DNA, 1000 bp, Homo Sapiens; identical to SEQ ID NO: 287070

SEQ ID NO: 397664 - DNA, 1000 bp, Homo Sapiens; identical to SEQ ID NO: 287071

SEQ ID NO: 397665 - DNA, 1000 bp, Homo Sapiens; identical to SEQ ID NO: 116506

SEQ ID NO: 397666 - DNA, 1000 bp, Homo Sapiens; identical to SEQ ID NO: 287073

SEQ ID NO: 397667 - DNA, 1000 bp, Homo Sapiens; identical to SEQ ID NO: 287074

SEQ ID NO: 397668 - DNA, 1000 bp, Homo Sapiens; identical to SEQ ID NO: 116507

SEQ ID NO: 397669 - DNA, 1000 bp, Homo Sapiens
ttcagtagaatgaaacgtgaagaaattgcatttgataactgctattcatttaacttttctcattatcagtaccacggttccctcaaagtttgttgaataaagcaacttttgtagatgctgtttcatacagcacttagatgaattattgatcttcctaatatcaggcgcctacttaacctatggtgtgtactttttgtaagttgtaacttgaaattttcagatgctttgaacttgacacatactctagcaattcattggaacaccaaggcaaaaacaccaacctgctaaaagagatcttttcatttttcttattttcagctttaaaacttagctgtcgttcagttaagcttaaagataggttaatttgtaaatggcaaagtttgttttgaggtttttcctcaataacttgtttcccaggcctattaggccatctctaaaattgatctagctgttttatttttatgtactcttagttttatgtaagaaaccttaggatgagctcccttttctaaggtgtttttgttttttgtatgtttgcttttttcctgttttttgttttttccatttacggcagtggtaccatgttttggatgtgtgatgtttatatgggagaacaaaaagctgatgtatagccctgtatacagtgtagatactatttttgtaaaaacacaaggctaaattaatgaacaagaatactgaatatttcatcattaaaaatttcttgtatttcttgtgcattaatctgacgataatttccctgtatattatgttcatttagctgtttgtaatttttgttaattagatcaggttgtctgcatttgttggtgtaagtgaacatcatcacagttatcctgagttgagtttaagccaaatacatgcatagaaaagggtcttcctattaatggaagaaggtaatttttaggatgtgtattatttcagttttgtatgtttaacttttattaaataaagtgtttttaaaatctccaaaaaaaaaaaaaaa

SEQ ID NO: 397670 - DNA, 1000 bp, Homo Sapiens
atatgagcttccagccccctcctctggtcaaaaaaatgacattactgcatggcaagaatgtgtaaacaattctatggcccagttagagcatcaagcagttagaattgagaatctggaactaatgtcacagcatggatgtaatgcctggaaagtatacaatgaaaatctagttcatatgattgaacacgcacagaaggaacttcagaagttaagaaaacatattcaagatttaaactggcagagaaagaacatgcaactcacagctggatctaaattgagagaaatggagtcaaattgggtatccctggtcagtaagaattatgagattgaacggactattgttcagctagaaaatgaaatctatcaaattaagcagcaacatggagaggcaaacaaagaaaacatccggcaagacttctgaaaagacaatttagcaggtagaagaaaagttgggctttcacaaaaggcatctgaacttttaatgaactttgaaggacaacagcatcttcccaaaaccattgatgtttaagtgtttagaaatcatagaaggtgtaggctgctgtggtaattctatttgtatatctcaacagaattaaaatgtctagcttggtggtatttttatagccataaaagaaaatctttaggctttcaaaataaggatgactttagaataatattgtgtcatagaattaattttcagccatgtggaccatattttgtatccaaggatccttatttaaagctttcaacatgtacaggaagttggaaatttttggtttatgactttgtctaataaagagatagttctaaacacattcttgatcaccaaacaacttcagaaagacagtgactgtacagttatcattatcatcatcatcgtcatcatcataggtaacagttatatcaagcttaatatgtgctgaacattgttctgaacactttaggtagatgaactagatgtatgtgaataaaaattatttggtcctcacaaaaaaaaaaa

SEQ ID NO: 397671 - DNA, 1000 bp, Homo Sapiens
ccattttgtgcgagaagccgcagcgccgcctcttctctcgcgccctcgcctcttcctccgcctcctccttcgcctcttcctgcctcctcccggcttccgccgccgccactccagcctaatcccaaccccagggcgaagcgttttcttatttatttccgttttctcgccactacagcctcctgacaaggtgatccgggcgggccccgcaggaattttatcccctcaccggcctcacactagtatcgcatgtccactatccagaacctccaatctttcgacccctttgctgatgcaactaagggtgacgacttactcccggcagggactgaggattacattcatataagaatccagcaacggaacggcagaaagacactgactactgttcagggcattgcagatgattatgacaaaaagaaacttgtgaaagctttcaaaaagaaatttgcctgtaatggtactgtgattgaacatcctgaatacggagaggttattcagcttcaaggtgaccaaagaaaaaacatctgccagtttctcttggaggttggcattgtaaaggaggaacagcttaaggttcatggattctaaaatgaacctaaatacgtggagaatttcttgaatagttttgttctctaaacccggtttggctgccttgtgaaatgattccctgcagtaaacggacttttcatttatttaatcattcaaacttccattcacatctgcatgattacagaaaacatggggtatgtagactagtaacacataagaaaattgcagtaagatggtaacaaaacctcatattgtctttacatgtttccaatggaaaatgttttgagtgtttattgttcagtttattacgtttcacttgattaaatttttttgttgttgtattaaaccatgtacgttgcagcttaacaataaaaaaaaatctatgaatctttgtgagcaattatgctcccaaatctaagcaagtaaaatacacattttgtctttcttaaaa

SEQ ID NO: 397672 - DNA, 1000 bp, Homo Sapiens; identical to SEQ ID NO: 221759

SEQ ID NO: 397673 - DNA, 1000 bp, Homo Sapiens
gatattgatctcaatgctacctttgatgtggatactcccccagcccggccctccagctcccagcatggttactacgaaaaactttgcctagagaagtcacactccccaattcaggatgtccccaagaagatatgcaaaggccccaggaaggagtcccagctctcactgggtggccagagctgtgcaggagagccagatgaggaactggttggtgccttccctatttttgtccggaatgccatcctaggccagaaacagcccaagaggcccaggtcagagtcctcttgcagcaaagatgtggtaaggacaggcttcgatgggctcggtggccggacaaaattcatccagcctactgacacagtcatgatccgcccattgcctgttaagcccaagaccaaggttaagcagagggtgagggtgaagacagtgccttctctcttccaggccaagctggacaccttcctgtggtcgtgagaacagtgagtctgaccaatggccagacacatgcctgcaacttgtaggtcaaggactgtccaggcaggggttttgtggacagagccccactttcgggaccagcctgaggtgtaagggcagacaaacaggtgagggtgagtgtggcacccagagactgctcttcctgccctcaccctgccccactcctacgactgggagctgacatgaccagcccactgatcctgtcagcaggtcctgctcctgttgccaggctcctgtttatagccatgatcagatgtggtcagactctttctgggcctggagaccacggtcacttgttgactgtctctgtggaccagagtgcttgaggcatctcaggcagcctcagcccaagcttctacctgcctttgacttgcttctaggcatagcctgggccaagcagggtggggaatggaggatagcatgggatgtatggagaggatggaagattttcatgtaaaataaaattaaaaaaaaaaaacaatctcttaaaaaaaaaaaaaaaaaa

SEQ ID NO: 397674 - DNA, 1000 bp, Homo Sapiens; identical to SEQ ID NO: 116509

SEQ ID NO: 397675 - DNA, 1000 bp, Homo Sapiens; identical to SEQ ID NO: 221761

SEQ ID NO: 397676 - DNA, 1000 bp, Homo Sapiens; identical to SEQ ID NO: 116510

SEQ ID NO: 397677 - DNA, 1000 bp, Homo Sapiens; identical to SEQ ID NO: 116511

SEQ ID NO: 397678 - DNA, 1000 bp, Homo Sapiens; identical to SEQ ID NO: 116512

SEQ ID NO: 397679 - DNA, 1000 bp, Homo Sapiens; identical to SEQ ID NO: 116513

SEQ ID NO: 397680 - DNA, 1000 bp, Homo Sapiens
aggggccctgcttgattccgtggtcatcctcggtggccagaaggcccacggccagttcaatgatggagtgtttgcttatatcatccaggagaacctgtggatgaagctctcagacatgccctatcgggcagcagcacttagtgccacctctgctggtcgctacatctacatctctggtggcaccactgagcagatttcagggctgaagacagcctggcggtatgacatggatgacaactcctggaccaagttgcctgacctgcccatcgggcttgtcttccacaccatggtgacctgtggggggacagtgtactcagtgggcgggagcattgccccaaggcggtatgtctccaacatctatcgctatgatgagcggaaggaagtctggtgcctggcaggaaagatgagcatccccatggatggcaccgccgtgatcactaaaggagacaggcatctgtacattgtcactggacggtggttggtgaaaggttatatctcccgggtcggggtagtggactgctttgacaccagcactggggacgtggtccagtgtatcaccttccccattgagttcaaccatcggcccctgctctctttccaacaggacaacatcctctgcgtgcacagccaccggcagagtgtggaaatcaatctgcagaaggtgaaggcaagcaagacgaccacctcagtgcctgtcttgcccaacagctgccccttggatgtgtcccatgctatatgctccattggagacagcaaggtgtttgtatgtgggggtgtcaccactgccagcgatgtccagacaaaggactacaccatcaatccaaatgccttcttgctggaccaaaagacaggcaagtggaagaccctggctcctccaccagaggcactggactgtcctgcctgctgtctagccaagctaccttgcaagattcttcaaaggatttaaacattttaagtgggagaataagtaaatgcattattattcacgatttaatgagag

SEQ ID NO: 397681 - DNA, 1000 bp, Homo Sapiens
cccggcacttctaccttccagagttacttcagtgcataaagtttgaattattttgttcttgtgggcagaagtgggaatgatggaatatcctcacggaaaaggcagtgaagttgggagtactgcttacaaaacagggtcaccagtgcattatgtggcgtgttcatccccacgccgtgtgtcacgggctagggcggcgtgttcatccccacaccgtgtgtcacaacaggctagggcacttcacgatgtcactacttgtttttctgacgttccaaaaacaacgtaacttggttttcatgtgtttttccgtggtatatgtgagattgatgctacgggtcttacggactcacacccgttcccactctctgcaatatggatcaggcagtgtttctgataggatgtgaaatggactctcctcgggtgggtccagcaggggccctgcccaccagaacacagtccgtgctgtgctgcgctaaggagctggccctcaactctccttggtgcagggttcccacaaccgagttctagttccctgaggtctttaaaaacaaaaacagaatgttgtacgtgaagattctaggaggggagggaccagcaaatctgagagaaccgtcctggggcctcccttcgaggagccctctgatgtgaggagggacttgagttgagtgacgctgtggtgtgaggtgttctgagctcactgaccggaaggtccaggtgaatctcgtcataagtgatctcaggctctcacaggatccggagggaaatgtgttagagggtctggaaaattcagtgcttttgagttacttgtttttattaaaaatttcctcacaaaagagagtcctcaagttgtggctgttcttgggaaaggggtcaccgtgtctgacaaagtgtaactttaaaaagcacgttgattttttacaaatgtaagtgtgcttgggaattccttaaattttgtgcaataaactattttttggtaaagattttcaaaaaaaaaaaaaaaaaa

SEQ ID NO: 397682 - DNA, 1000 bp, Homo Sapiens; identical to SEQ ID NO: 116516

SEQ ID NO: 397683 - DNA, 1000 bp, Homo Sapiens; identical to SEQ ID NO: 287086

SEQ ID NO: 397684 - DNA, 1000 bp, Homo Sapiens; identical to SEQ ID NO: 221764

SEQ ID NO: 397685 - DNA, 1000 bp, Homo Sapiens; identical to SEQ ID NO: 221765

SEQ ID NO: 397686 - DNA, 1000 bp, Homo Sapiens; identical to SEQ ID NO: 221766

SEQ ID NO: 397687 - DNA, 1000 bp, Homo Sapiens; identical to SEQ ID NO: 287089

SEQ ID NO: 397688 - DNA, 1000 bp, Homo Sapiens
tgtgccaccatgcctggctaatttttgtagtattagtagagacagggtttcaccatgttggtcaggctcaggctggtctcaaactcctgacctcaggtgatccacctgcctcggcctcccaaagtgcagggcttacaggtgtgagccacagtgcccagctttttttttttttttttagaaataaatttatctttaacatagagaatatcaaagttatgccacttgattttagtggacggcttgtgttttgatcttgaccagtacagttcccatgaattcaaggtgacaatcaagcccaatggcttgatgacttcaatagtaaccaagtcaaggttctcttggctggacatcattaagaaagttctggaaactgtgtttgtttgatgctggttcattggacttttcaaattgttttgtttctgtgtccctaccagacacaaagatgaagtgtgccagctggttcccccaagccagctcatgctgctgaccactgactcagctctgaccttcacatttgctctgaagcaagtgcgttcagctgctggggcagtgatatcacatagtacatatattatttccttagtttatttccaaactggtattttaaatagacacttcgaactttgggctactctgtttaaatctgccactttctggactggaccttagtactgtaaattctttttaaagaataataatgttaccaactgctgagatttttatgtattttgtgactttgtaacaactgctattgtaataagtgtcatcttgtgggcattatacaaaggcatattataaaataataatgatatttttgtatagaagagtcaactgttcagatgtaagatgttgaaaaatgttaaaatctaaagagtaatttatcctagtggtaatggttatatgtatttgtacagtttaaattaatgtctcaaagctgtgcagtcttttgttactgggacacttttaaactctgaataggcattaaaaaaaatatggctaa

SEQ ID NO: 397689 - DNA, 1000 bp, Homo Sapiens; identical to SEQ ID NO: 287090

SEQ ID NO: 397690 - DNA, 1000 bp, Homo Sapiens; identical to SEQ ID NO: 221767

SEQ ID NO: 397691 - DNA, 1000 bp, Homo Sapiens; identical to SEQ ID NO: 221768

SEQ ID NO: 397692 - DNA, 1000 bp, Homo Sapiens
aatatttaaaaaaaaacattcaaaaacatggccacatccaacatttcctcaggcaattccttttgattcttttttcttccccctccatgtagaagagggagaaggagaggctctgaaagctgcttctgggggatttcaagggactgggggtgccaaccacctctggccctgttgtgggggttgtcacagaggcagtggcagcaacaaaggatttgaaaactttggtgtgttcgtggagccacaggcagacgatgtcaaccttgtgtgagtgtgacgggggttggggtggggcgggaggccacgggggaggccgaggcaggggctgggcagaggggaggaggaagcacaagaagtgggagtgggagaggaagccacgtgctggagagtagacatccccctccttgccgctgggagagccaaggcctatgccacctgcagcgtctgagcggccgcctgtccttggtggccgggggtgggggcctgctgtgggtcagtgtgccaccctctgcagggcagcctgtgggagaagggacagcgggttaaaaagagaaggcaagcctggcaggagggttggcacttcgatgatgacctccttagaaagactgaccttgatgtcttgagagcgctggcctcttcctccctccctgcagggtagggcgcctgagcctaggcggttccctctgctccacagaaaccctgttttattgagttctgaaggttggaactgctgccatgattttggccactttgcagacctgggactttagggctaaccagttctctttgtaaggacttgtgcctcttgggagacgtccacccgtttccaagcctgggccactggcatctctggagtgtgtgggggtctgggaggcaggtcccgagccccctgtccttcccacggccactgcagtcaccccgtctgcgccgctgtgctgttgtctgccgtgagagcccaatcactgcctatacccctcatcacacgtcacaatgtcccgaattc

SEQ ID NO: 397693 - DNA, 1000 bp, Homo Sapiens; identical to SEQ ID NO: 116517

SEQ ID NO: 397694 - DNA, 1000 bp, Homo Sapiens; identical to SEQ ID NO: 287095

SEQ ID NO: 397695 - DNA, 1000 bp, Homo Sapiens
agataaagaagacgttgccttcaaagacctggatgtggccattcttgtgggctccatgccaagaagggaaggcatggagagaaaagatttactgaaagcaaatgtgaaaatcttcaaatcccagggtgcagccttagataaatacgccaagaagtcagttaaggttattgttgtgggtaatccagccaataccaactgcctgactgcttccaagtcagctccatccatccccaaggagaacttcagttgcttgactcgtttggatcacaaccgagctaaagctcaaattgctcttaaacttggtgtgactgctaatgatgtaaagaatgtcattatctggggaaaccattcctcgactcagtatccagatgtcaaccatgccaaggtgaaattgcaaggaaaggaagttggtgtttatgaagctctgaaagatgacagctggctcaagggagaatttgtcacgactgtgcagcagcgtggcgctgctgtcatcaaggctcgaaaactatccagtgccatgtctgctgcaaaagccatctgtgaccacgtcagggacatctggtttggaaccccagagggagagtttgtgtccatgggtgttatctctgatggcaactcctatggtgttcctgatgatctgctctactcattccctgttgtaatcaagaataagacctggaagtttgttgaaggtctccctattaatgatttctcacgtgagaagatggatcttactgcaaaggaactgacagaagaaaaagaaagtgcttttgaatttctttcctctgcctgactagacaatgatgttactaaatgcttcaaagctgaagaatctaaatgtcgtctttgactcaagtaccaaataataataatgctatacttaaattacttgtgaaaaacaacacattttaaagattacgtgcttcttggtacaggtttgtgaatgacagtttatcgtcatgctgttagtgtgcattctaaataaatatatattcaaatg

SEQ ID NO: 397696 - DNA, 1000 bp, Homo Sapiens; identical to SEQ ID NO: 221770

SEQ ID NO: 397697 - DNA, 1000 bp, Homo Sapiens; identical to SEQ ID NO: 287096

SEQ ID NO: 397698 - DNA, 1000 bp, Homo Sapiens; identical to SEQ ID NO: 221771

SEQ ID NO: 397699 - DNA, 1000 bp, Homo Sapiens; identical to SEQ ID NO: 287098

SEQ ID NO: 397700 - DNA, 1000 bp, Homo Sapiens; identical to SEQ ID NO: 287099

SEQ ID NO: 397701 - DNA, 1000 bp, Homo Sapiens
cgagaagcgcttgagaaggagaaagcagaaattgaacgcatgcgaaacctgactgaggaagagaggagagctgaacttcgggcaaacggcaaagtcattaccaacaaagctgttaagggcaaatacaagttcttacagaagtattatcaccggggtgccttcttcatggatgaggatgaagaagtatacaagagagatttcagcgctcctaccctggaggatcatttcaataaaaccattcttcctaaagtcatgcaggtcaagaactttggacgctcaggtcgcaccaaatacactcaccttgtggatcaagataccacctcctttgactcagcttggggccaagagagtgcccagaacacaaagttcttcaaacaaaaggcagctggggtacgagatgtatttgagcggccatctgccaagaagcggaaaactacctagggtccaactgcttattcttccaactgtggaacacaaggggagtctcagcatctggtccttgatttggttttttcattgtttccttggcccctgtatccagatattggacttactgctatacttgtgatactgggtagcccagactttgaaggtgctttgtgaggtttggactcatgctgagaaacccacaggaaagcactgtccaggtaggattagaggcttcccacttaaaactatttctgagaaatcttaggttttatcactgctatggtttcccatatttacttgggactgttctgactttctttttccagcccttagcttgggttagaaaagtggacatgtaagtgaacaatgcattacttctaccttaggtttaggagtaatatacccggaaatctaagctcatggaaacatgttttccatttttgcttggagtccgtttttctagttgtacatactttttgatccatatatgtgtgcatgtcaagaaataaaagaatcacacaacaaggagatttttagcatgatactggaaataaaatgtccaagctgacaa

SEQ ID NO: 397702 - DNA, 1000 bp, Homo Sapiens; identical to SEQ ID NO: 287100

SEQ ID NO: 397703 - DNA, 1000 bp, Homo Sapiens; identical to SEQ ID NO: 287101

SEQ ID NO: 397704 - DNA, 1000 bp, Homo Sapiens; identical to SEQ ID NO: 116518

SEQ ID NO: 397705 - DNA, 1000 bp, Homo Sapiens; identical to SEQ ID NO: 116519

SEQ ID NO: 397706 - DNA, 1000 bp, Homo Sapiens; identical to SEQ ID NO: 287104

SEQ ID NO: 397707 - DNA, 1000 bp, Homo Sapiens; identical to SEQ ID NO: 116520

SEQ ID NO: 397708 - DNA, 1000 bp, Homo Sapiens; identical to SEQ ID NO: 116521

SEQ ID NO: 397709 - DNA, 1000 bp, Homo Sapiens; identical to SEQ ID NO: 116522

SEQ ID NO: 397710 - DNA, 1000 bp, Homo Sapiens; identical to SEQ ID NO: 287108

SEQ ID NO: 397711 - DNA, 1000 bp, Homo Sapiens; identical to SEQ ID NO: 116523

SEQ ID NO: 397712 - DNA, 1000 bp, Homo Sapiens
gctcggggccccaccggggtggagatggaggccctgacctctgctgcagtggccgccctcaccctgtatgacatgtgcaaggctgtcagcagggacatcgtgttggaggagatcaagctcattagcaagactggtggtcagcggggggacttccatcgggcttagcacctgcccttctcacccatggcccacccaggcctggagctgggatgcaatgtaggctgagggaaagacgtcaggttcctttaatcacagtcactgtttgtttaccttgagcagtaaacccgaagtcagcctgctctactactaacaaacaggcctgctgctagatgatctctaatgaccaatggggcttcctttctatagggaggataccagcaggcccttaagccttccaggacactaaggtcgtgggagcgggactgcaacaagcaatgccagataactgagaaatcatgttctttgtggactatttcagacaaccaggttccgacagtccagcccagaacttttccttctcattttgggttttctcttctcctgctttcctggggagagattaagcgctcattaagcagaggagcccactttgaggagagcaaagcacaagcttgcctgaagaatggatcccaacttctccccggcagctctgcctccctaagtctgtgaagccgcagccctgccctgtcctgtcctgtcctgacttcatctctccttctgcccaagtctgtgtcccatcagacttgcagcctttcagcttaacagttgcccggtcctgctggccccttttcctctggcccccctcttctgaaacaggatgtgcacacatgggccatagccctaaggactcctgccagaccacacagcccacacctggccctgttcacggctgttccacgcacccctctttattctggagcatatcagggaaagaaaagttgatgatagattgccttcaccctcacagcgcacaaataaagctacgatgccaactttgaaa

SEQ ID NO: 397713 - DNA, 1000 bp, Homo Sapiens; identical to SEQ ID NO: 220695

SEQ ID NO: 397714 - DNA, 372 bp, Homo Sapiens; identical to SEQ ID NO: 287113

SEQ ID NO: 397715 - DNA, 599 bp, Homo Sapiens; identical to SEQ ID NO: 116524

SEQ ID NO: 397716 - DNA, 1000 bp, Homo Sapiens; identical to SEQ ID NO: 221775

SEQ ID NO: 397717 - DNA, 1000 bp, Homo Sapiens; identical to SEQ ID NO: 116525

SEQ ID NO: 397718 - DNA, 1000 bp, Homo Sapiens; identical to SEQ ID NO: 221776

SEQ ID NO: 397719 - DNA, 1000 bp, Homo Sapiens; identical to SEQ ID NO: 221777

SEQ ID NO: 397720 - DNA, 1000 bp, Homo Sapiens; identical to SEQ ID NO: 287117

SEQ ID NO: 397721 - DNA, 1000 bp, Homo Sapiens; identical to SEQ ID NO: 221778

SEQ ID NO: 397722 - DNA, 1000 bp, Homo Sapiens; identical to SEQ ID NO: 116526

SEQ ID NO: 397723 - DNA, 1000 bp, Homo Sapiens; identical to SEQ ID NO: 221779

SEQ ID NO: 397724 - DNA, 1000 bp, Homo Sapiens; identical to SEQ ID NO: 287121

SEQ ID NO: 397725 - DNA, 1000 bp, Homo Sapiens; identical to SEQ ID NO: 116527

SEQ ID NO: 397726 - DNA, 1000 bp, Homo Sapiens
tgcgctggggttctgtgcgccatgggcatcatcatcgtcatgagtgcaaaatgcaaatgcaagtttggccagaagtccggtcaccatccaggggagactccacctctcatcaccccaggctcagcccaaagctgatgaggacagaccagctgaaattgggtggaggaccgttctctgtccccaggtcctgtctctgcacagaaacttgaactccaggatggaattcttcctcctctgctgggactcctttgcatggcagggcctcatctcacctctcgcaagagggtctctttgttcaattttttttaatctaaaatgattgtgcctctgcccaagcagcctggagacttcctatgtgtgcattggggtggggcttggggcaccatgagaaggttggcgtgccctggaggctgacacagaggctggcactgagcctgcttgttgggaaaagcccacaggcctgttcccttgtggcttgggacatggcacaggcccgccctctgcctcctcagccatgggacctcatatgcaatttgggatttactagtagccaaaaggaatgaaagagagctctaaccagatggaacactggaacattccagtggaccctggaccattccaggaaaactgggacataggatcgtcccgctatgatggaagtgttcagacagtttataatagtaagcccctgtgaccctctcacttaccccgagacctcactttattacaagatctttccaaatacccaaatatccctgcaagcccgttaaataattccctatgctacccttaataacatacaatgaccacatagtgtgagaacttccaacaagcctcaaagtcccttgagactccccaatacctaataaggcatgcgaaatgttctcatgaactaccccacaacacgcctaaaactcaaaacacccaaaaatatctcctccaatgtcctgagacatgaacccaaaaagagacccacaataaactcgtgacttgtcccctc

SEQ ID NO: 397727 - DNA, 1000 bp, Homo Sapiens
ccacctggagttgagccatacccttaccccatccccactgtccctgaagagctgcctccaggcacggaaccagagccggctttccaggacgatgcagccaatgccccccttgaattcaagatggcagcaggttcaagtggggccccttggatgcctaagcctggggacgactacagctacaatcagttttccacatatggcgatgccaatgccgctggtgcttattatcaggattattacagtggtggctactatcctgcacaggacccggccctggtccccccccaggaaattgccccagatgcctccttcatcgatgacgaagcatttaagcggctgcagggcaagaggaaccgagggagagaagaaatcaactttgtggagatcaaaggtgatgaccagctcagtggggcccagcaatggatgactaagtcattgacagaagagaaaaccatgaagtcattcagcaaaaagaaaggtgagcagccaacaggccagcagcggcggaaacaccagatcacatatcttattcatcaggccaaggagcgggagctggaactgaagaacacctggtcagagaacaagctcagccgccgtcagacccaagccaaatatggattctagggctctggaactgattgctcccaggatctcctgccagcccagctggcctggcccccagcttcacctctgggaccccagctgctctaagcccaggatctctttccccaaggacccagccctcgcctctgcgagaatgaacatatttgatagatttttcttaacaagttagaaaattcagctcctttctgtcctggagctagcaaagacttgtgtgatgcctccgaaggggctctgagttctggggtgggagttttgctctctgtcaggtgtgataaaatgttgaaccctccccaccaccacttttttttttttaaaccagggatgtctgttgaaataaaacattcagtctgacaaacaaaaaaaaaaaaaaaaaaaa

SEQ ID NO: 397728 - DNA, 743 bp, Homo Sapiens; identical to SEQ ID NO: 116528

SEQ ID NO: 397729 - DNA, 1000 bp, Homo Sapiens; identical to SEQ ID NO: 116529

SEQ ID NO: 397730 - DNA, 1000 bp, Homo Sapiens
tagacctcacaggtaaaaatctgcacccggatgtgactggtcggttgctgtctcaaggggtgattgccttccgctgcccacgatcatttatggaccaaccattggctgaacatttcagcccttttcgtgtacagcacatggacctatcgaactcagttatagaagtgtccaccctccacggcatactgtctcagtgttccaagttgcagaatctaagcctggaaggcctgcggctttcggatcccattgtcaatactctcgcaaaaaactcaaatttagtgcgacttaacctttctgggtgttctggattctctgaatttgccctgcagactttgctaagcagctgttccagactggatgagctgaacctctcctggtgttttgatttcactgaaaagcatgtacaggtggctgttgcgcatgtgtcagagaccatcacccagctgaatcttagcggctacagaaagaatctccagaaatcagatctctctactttagttagaagatgccccaatcttgtccatctagacttaagtgatagtgtcatgctaaagaatgactgctttcaggaatttttccagctcaactacctccaacacctatcactcagtcggtgctatgatataatacctgaaactttacttgaacttggagaaattcccacactaaaaacactacaagtttttggaatcgtgccagatggtacccttcaactgttaaaggaagcccttcctcatctacagattaattgctcccatttcaccaccattgccaggccaactattggcaacaaaaagaaccaggagatatggggcatcaaatgccgactgacactgcaaaagcccagttgtctatgaagtatttattgcaggatggtgtctcttctttagaacagggaaaataggcaggaagcccaattgctggagtacttagctagttttattcttggttttccctttgccttcattctgcaagtatactagggagccatttgagaggg

SEQ ID NO: 397731 - DNA, 1000 bp, Homo Sapiens
aacaagggctgaaggggacgtaccagggcctcacagccactgtcctgaagcagggctcgaaccaggccatccgcttcttcgtcatgacctccctgcgcaactggtaccgaggggacaaccccaacaagcccatgaaccctctgatcactggggtcttcggagctattgcaggcgcagccagtgtctttggaaacactcctctggatgtgattaagacccggatgcagggcctggaggcgcacaaataccggaacacgtgggactgcggcttgcagatcctgaagaaggaggggctcaaggcattctacaaaggcactgtcccccgcctgggccgggtctgcctggatgtggccatagtgtttgtcatctatgatgaagtggtgaagctgctcaacaaagtgtggaagacggactaagcctagagaggccgcaaggggaccgccccaggcaccgccagagtgtcctgctacctttgtctcacatgattccagtgcagtagtgccaaaaggccccttcccacgtccctcgagctctgtagcctggtctgtgcattgtggctgtcaaatccatgtgtcccccctgtggtctgtgtgtgacaccaccactgtgtcccagtgtctggcccagccatggctggatgtgcatctggcctatgaccctgtgcccacttgtccatgtgcttactgtgaaccctgtgcctgtgtttcatgttctgtgtcacgtgaccctgtgccccgcctcccggggtgcccgtgtggcctgggtcctcggccctgtagccctggcccggtcccagtccggtgccttccaccctgccctggcctaccacagctgcctccgggcctcggcctggcttcaccgcattccaggggctgcagccccctgcttctcccgccattggccttaactggccctcgggccctctctccgccccggacagggtggcacccaccactctcaggaccaccctgccaaggcagaataaaccggatcctgttgc

SEQ ID NO: 397732 - DNA, 1000 bp, Homo Sapiens; identical to SEQ ID NO: 221783

SEQ ID NO: 397733 - DNA, 1000 bp, Homo Sapiens; identical to SEQ ID NO: 287124

SEQ ID NO: 397734 - DNA, 1000 bp, Homo Sapiens; identical to SEQ ID NO: 287125

SEQ ID NO: 397735 - DNA, 1000 bp, Homo Sapiens; identical to SEQ ID NO: 221784

SEQ ID NO: 397736 - DNA, 1000 bp, Homo Sapiens; identical to SEQ ID NO: 221785

SEQ ID NO: 397737 - DNA, 1000 bp, Homo Sapiens; identical to SEQ ID NO: 116532

SEQ ID NO: 397738 - DNA, 1000 bp, Homo Sapiens
agggtgcccagtggatgcgccagattgtgtcctttgacaagctcaagctgaccaacaacctgctggatgacaatggccacatcattctcaactctatgcaccgctaccagccccgtttccacgtggtcttcgtggacccacgcaaggacagtgagcgctatgcccaggagaacttcaagtccttcatcttcacagagacccagttcacagcagtgacagcctatcagaaccacaggatcacccagctgaaaatcgccagcaacccttttgccaaaggctttagagagagtgacctggactcctggcctgtggccccacggcccctgctcagtgtcccagcccggagtcacagcagcctcagtccctgtgtgctgaagggtgccacagacagggagaaagaccccaacaaagcttcagcttccacctccaagacccctgcttggctccatcatcagctgctgcccccacctgaggtcctgctggccccggccacctacaggcctgtcacgtatcagagcctgtactctggagccccgagccacctagggatcccaaggacccgaccagcaccataccccctccccaacatccgggctgatagggatcaaggaggcctgcctctcccagctgggctggggctcctgtcccccactgtggtgtgcctggggcctggccaggactcccagtgatgccagaagccctggggggaagccctgctaccctggaccttacaccgggtgtgggaatcagcctctgccccgccccctccagccccatctctgtctcaaggagagcagggtaggtgaaagtctagagaaagaggctacctgcccagggtcacagcaaggctgggaccatggcaagcttggaaccaggacttctacctcccaaccccagcagcctgaatactgtgccctcttgctttgggggtaactcccgaaaaccctgccttacctctcccttccccctaacattaaactatttggcatgaaaaaaaaaa

SEQ ID NO: 397739 - DNA, 1000 bp, Homo Sapiens; identical to SEQ ID NO: 287129

SEQ ID NO: 397740 - DNA, 1000 bp, Homo Sapiens; identical to SEQ ID NO: 116534

SEQ ID NO: 397741 - DNA, 1000 bp, Homo Sapiens
ggagcagcctgtgttggacctgaagcggcccttcctcagccgggagtcgctgagcggccaggccgtgcgccggcctttggtcgcctccgtgggcctcaatgtccctgcttctgtttgttattcccacacagacatcaaggtgcctgacttctctgaataccgccgccttgaagttttagatagtacgaagtcttcaagagaaagcagcgaggctaggaaaggtttctcctatttggtaactggagtaactactgtgggtgtcgcatatgctgccaagaatgccgtcacccagttcgtttccagcatgagtgcttctgctgatgtgttggccctggcgaaaatcgaaatcaagttatccgatattccagaaggcaagaacatggctttcaaatggagaggcaaacccctgtttgtgcgtcatagaacccagaaggaaattgagcaggaagctgcagttgaattatcacagttgagggacccacagcatgatctagatcgagtaaagaaacctgaatgggttatcctgataggtgtttgcactcatcttggctgtgtacccattgcaaatgcaggagattttggtggttattactgcccttgccatgggtcacactatgatgcatctggcaggatcagattgggtcctgctcctctcaaccttgaagtccccacgtatgagttcaccagtgacgatatggtgattgttggttaagagacttggactcaagtcataggcttctttcagtctttatgtcacctcaggagacttatttgagaggaagccttctgtacttgaagttgatttgaaatatgtaagaattgatgatgtatttgcaaacattaatgtgaaataaattgaatttaatgttgaatactttcaggcattcacttaataaagacactgttaagcactgttatgctcagtcatacacgcgaaaggtacaatgtcttttagctaattctaattaaaaattacagactggtgtacaagatacttgtg

SEQ ID NO: 397742 - DNA, 1000 bp, Homo Sapiens; identical to SEQ ID NO: 116535

SEQ ID NO: 397743 - DNA, 1000 bp, Homo Sapiens; identical to SEQ ID NO: 282393

SEQ ID NO: 397744 - DNA, 1000 bp, Homo Sapiens; identical to SEQ ID NO: 221790

SEQ ID NO: 397745 - DNA, 961 bp, Homo Sapiens
ggcgaccacggtgtcttcaaaagccccgtcagggttggcttcctggggccggaccgactgtgggtcagtttgcaccagcgctctggaatcgagttacgcgcgaaagggcagagtttctggaggaaaccgcagcctctcaaccgctgaccgggtctcagaaggcccccggcagggccgcttggcgggaactgaccacgcgccagtcaggctctccagggacctgcgcaggcgcgtgtgggcggagtcgtgcgcagggggcggggcttcgggaaggagccacagagagggcggggcgtaggacctgcgcttcgggggtggagtcggagcggcgcggcggcggtcatgcgggacgcggatgcagacgcaggcggaggcgctgacggcggggatggccggggtggccacagctgccgcgggggcgtggacacagccgcagctccggccggtggagctcccccagcgcacgcgccaggtccgggcagagacgccgcgtctgcggccagggggtcacgaatgcggccgcacatattcaccctcagcgtgcctttcccgacccccttggaggcggaaatcgcccatgggtccctggcaccagatgccgagccccaccaaagggtggttgggaaggatctcacagtgagtggcaggatcctggtcgtccgctggaaagctgaagactgtcgcctgctccgaatttccgtcatcaactttcttgaccagctttccctggtggtgcggaccatgcagcgctttgggccccccgtttcccgctaagcctggcctgggcaaatggagcgaggtcccactttgcgtctccttgtaggcagtgcgtccatccttccctagggcaggaattcccacagttgctactttcctgggagggcctcatgttttatctggttcttaaatgtttgttactacagaaaataaaactgcgctactaaaaaaaaaaaaaaaaaaa

SEQ ID NO: 397746 - DNA, 1000 bp, Homo Sapiens; identical to SEQ ID NO: 221792

SEQ ID NO: 397747 - DNA, 1000 bp, Homo Sapiens; identical to SEQ ID NO: 287135

SEQ ID NO: 397748 - DNA, 1000 bp, Homo Sapiens
ttttccagtattaaacactcatatgcttatggcttggagaaatttcttagttgggtgaattaaaggttaatccgagaattagcatggatataccgggacctcatgcagcttggcagatatctgagaaatggtttaattcatgctcaggagctgtgtgcctttccatcccttccggctccctacccctcacttccaagggttctctctcctgcttgcgcttagtgtcctacatggggttgtgaagcgatggagctcctcactggactcgcctctctcctctcctccccccaggaggaacttgaaaggagggtaaaaagactaaaatgagggggaacagagttcactgtacaaatttgacaactgtcaccaaaattcataaaaaacaatagtactgtgcctctttcttctcaaacaatggatgacacaaaactatgagagtgacaaaatggtgacaggtagctgggacctaggctatcttaccatgaaggttgttttgcttattgtatatttgtgtatgtagtgtaactattttgtacaatagaggactgtaactactatttaggttgtacagattgaaatttagttgtttcattggctgtctgaggaggtgtggacttttatatatagatctacataaaaactgctacatgacaaaaaccacacctaaagaaattttaagaatttggcacagttactcactttgtgtaatctgaaatctagctgctgaatacgctgaagtaaatccttgttcactgaagtctttcaattgagctggttgaatactttgaaaaatgctcagttctaactaatgaaatggatttcccagtaggggtttctgcatatcacctgtatagtagttatatgcatatgtttctgtgcatgttctctacacaattgtaaggtgtcactgtatttaactgttgcacttgtcaactttcaataaagcatataaatgttgataaaaaaaaaaaaaaaaaaaaaaaaaaaaaaaaaaaaaaaa

SEQ ID NO: 397749 - DNA, 1000 bp, Homo Sapiens; identical to SEQ ID NO: 287136

SEQ ID NO: 397750 - DNA, 1000 bp, Homo Sapiens; identical to SEQ ID NO: 287137

SEQ ID NO: 397751 - DNA, 1000 bp, Homo Sapiens
ttctacctgccacccaactgccgagccaggattgtgttcaagaccagtgtgctggtgggctacaccgtcttcagggtcaacatgtccaaccaggtgccacggagtgtagggagcacccctctgattgggcacttcttcaccatctgcatggccttcttggttctcagcttagctaagtccatcgtgttggtcaaattcctccatgatgagcagcgtggtggacaggagcagcccttcttgtgccttcgaggggacaccgatgctgacaggcctagagtggaacccagggcccaacgtgctgtggtaacagagtcctcgctgtatggagagcacctggcccagccaggaaccctgaaggaagtctggtcgcagcttcaatctatcagcaactacctccaaactcaggaccagacagaccaacaggaggcagagtggctggtcctcctgtcccgctttgaccgactgctcttccaaagctaccttttcatgctggggatctacaccatcactctgtgctccctctgggcactgtggggcggcgtgtgaagactgaagtgttcttcagtaattgtgctggcacttaggagagagaggagggggaataatagtgggttaaaaagctttctgggtcgggtgtggtggttcttgcctatagtcccagtgctttgggaggccatagcaggaggattgcttgagcccaggagttcgagaccagccagagcaacatagtgagaccacatctctaccagtaaataaataaataaataaataaataaataaataaataaatagctgggcatagtggctcatgcctgtactctcagctacttgggaggttgaggtgggaggattgcttgagcccaggatttcaaggctgcagtgagccatgattgcaccactgcaccccagcctgggtgacagagcaagaccctgtctcaaaaaaaataaaataaaaggctttctgccttcaaaaaaaaaaaaaaaaaaaaaaaaaaaaaaa

SEQ ID NO: 397752 - DNA, 1000 bp, Homo Sapiens; identical to SEQ ID NO: 287139

SEQ ID NO: 397753 - DNA, 1000 bp, Homo Sapiens; identical to SEQ ID NO: 287140

SEQ ID NO: 397754 - DNA, 1000 bp, Homo Sapiens; identical to SEQ ID NO: 287141

SEQ ID NO: 397755 - DNA, 1000 bp, Homo Sapiens; identical to SEQ ID NO: 221793

SEQ ID NO: 397756 - DNA, 1000 bp, Homo Sapiens; identical to SEQ ID NO: 116537

SEQ ID NO: 397757 - DNA, 1000 bp, Homo Sapiens; identical to SEQ ID NO: 287144

SEQ ID NO: 397758 - DNA, 1000 bp, Homo Sapiens; identical to SEQ ID NO: 221794

SEQ ID NO: 397759 - DNA, 1000 bp, Homo Sapiens; identical to SEQ ID NO: 116538

SEQ ID NO: 397760 - DNA, 1000 bp, Homo Sapiens; identical to SEQ ID NO: 287147

SEQ ID NO: 397761 - DNA, 1000 bp, Homo Sapiens; identical to SEQ ID NO: 221796

SEQ ID NO: 397762 - DNA, 1000 bp, Homo Sapiens
cttgggcttctccccagaatgcactttgtggctgagtgctccaggactcctagggagcaagctcctccctctaaggtgtttctagtcttctctttaaaggtctcatcccacaacccctgacttcctccctccccacatcatgaaggcagaggcatgcacattcctcactgaaaaagaaaacacacacccacccacacacacacacacagaagaaaatgaaagctgacacacctcgaagccttctttccaagagccctctaaatggggttgggtctcactcttcatgagtatcctgggttgtgcagaagcttagcatatgcccttgtgttcggatcaggcccacagggctgctcaaagagtagagtaattgtaaccgaggtcagagctctggggttggcagagatgagtggccatatctgggggtaaaagaagaaatcctgtcctcttggtgggaggttaccttacctgaagaccatctctcccaagcactgtagttctgagcatgtttttggggtggactctgtcccctagggtccctagaagggcaaagaccagagagttgacaagtctgttattaggaataatccttagccatgtaatggagaaaggagcagtcagcattcttccaatttgccccaccaccacctcctcgggcttcattttctctatttagagatggcagagagtgaggtagtggcgagaaagctgactccattcatcagatccagtttatgagggttgggggtgagcaagggctgtctgcagaaacccccatcaagagctgctgaatgaagtgtcccttcccatcagtttgattcaattaaaatgcatcatttgacataaagcacttgttcacagatctccaaaaccaggaattgttctagtaaaactggaaatttgtatgagtggggggagttaaatctgttcagctgttattaaactgtcatttctcccgctaaatgaaaaccgtgttgttataaagcttaatgcaacctgatta

SEQ ID NO: 397763 - DNA, 1000 bp, Homo Sapiens
tctcggactacacgcagacgctgtccaagcggcccgacatccccaccttcgagagcttgacgttcaaaaacaggacagcgggcctcatcgacacgtcgtggagcgccatccagatcggcatctacgccaagcacctggagcactggctgcgccacttccccatccgccagatgctcttcgtgagcggcgagcggctcatcagcgacccggccggggagctgggccgcgtgcaagacttcctgggcctcaagaggatcatcacggacaagcacttctacttcaacaagaccaagggcttcccctgcctgaagaaggcggagggcagcagccggccccattgcctgggcaagaccaagggcaggacccatcctgagatcgaccgcgaggtggtgcgcaggctgcgcgagttctaccggcctttcaacctcaagttctaccagatgaccgggcacgactttggctgggatggataaccatataatttaaaaagaaaaaaaaaatcaaaatataatatatttttttaccaatcggtagagaagagacagtttaatatttgtgctgaaaatatgtttcagtatttttttcaatgaatgttaagagattgttctcactcccgccccatcttaatgtataaccaacaccaaacacgtggatcaacagaaaaggaaaatttcactcgtctaaacactttcaattttcagtttttattttatgttctatatacccagtcataaagtataagcatcagttgtcattaaaagttttcagaaaatcttgaggttaaacatctctctctctttttttaaaatacaaggccctgataaaattgatatctatccttatatttttctccctttttcccgtgccactttttcttaaattatttcccagttagtattatcatatgtttgtacccgtcacagttttcatagtgctttcaaatacacctttttgatcattaaaataaaaaaataaatcttggaaaaaaaaaaaaaaaaaa

SEQ ID NO: 397764 - DNA, 1000 bp, Homo Sapiens; identical to SEQ ID NO: 221797

SEQ ID NO: 397765 - DNA, 1000 bp, Homo Sapiens; identical to SEQ ID NO: 116539

SEQ ID NO: 397766 - DNA, 1000 bp, Homo Sapiens; identical to SEQ ID NO: 116540

SEQ ID NO: 397767 - DNA, 1000 bp, Homo Sapiens; identical to SEQ ID NO: 287152

SEQ ID NO: 397768 - DNA, 1000 bp, Homo Sapiens; identical to SEQ ID NO: 221798

SEQ ID NO: 397769 - DNA, 1000 bp, Homo Sapiens; identical to SEQ ID NO: 116542

SEQ ID NO: 397770 - DNA, 1000 bp, Homo Sapiens; identical to SEQ ID NO: 287155

SEQ ID NO: 397771 - DNA, 1000 bp, Homo Sapiens; identical to SEQ ID NO: 116543

SEQ ID NO: 397772 - DNA, 1000 bp, Homo Sapiens; identical to SEQ ID NO: 287157

SEQ ID NO: 397773 - DNA, 1000 bp, Homo Sapiens; identical to SEQ ID NO: 221799

SEQ ID NO: 397774 - DNA, 1000 bp, Homo Sapiens; identical to SEQ ID NO: 287158

SEQ ID NO: 397775 - DNA, 1000 bp, Homo Sapiens
tttatcttcaaccccaaaaaaggagattggaaagatctggctccaatgaaaattcctcgttccatgtttggagtagcagtccataaaggcaaaattgtgattgcaggaggtgtcactgaagatggtctttcagcttcagttgaagcttttgaccttacaacaaataaatgggatgtaatgaccgaatttccccaagaaagaagctccatcagtttggtcagcctggctggatctctgtatgcaattggtggttttgctatgattcaactggagtctaaagaatttgcacccactgaagtcaatgacatatggaagtatgaagatgataaaaaagaatgggctgggatgttgaaggaaatacgttatgcttcaggagctagttgcctagcaacacgtttaaatctcttcaaactgtctaaactgtgaacaaggtgacaaaacataatagattgggaggtggtttgtttggtgaatggggctttaatttattctgttttttaaaagcttgtacagacactcatgtagaaattattcaagaagttattgtctaagagatgagcagtaggtaagaaaacctcagtcattgactcttcaatgtaatgatcagagtttaaaaccattttctaataataaattaaatcttcagttgaacaaattattttgtgaatctgtttcactcaatggattgtaaagaaggctcctaaatttgagttgtttgctaatcatttcatttgcatcattagggtatccttaaactgattttctattacaattggaagtggagaatatgtgcatctacactaaaaaaatgtttaagatatcaaaaacctctcctcgtgcttcaaaatgacaggaatcctgtgcattatactaagaattacatgccataagatgacttcagaaatcctacttcagaagtgtaataaatggatggggaaatcgtttgatggggaaaagtctcttgtaagtaaaagtagtcaaattcaaatggcaaaaaaaa

SEQ ID NO: 397776 - DNA, 1000 bp, Homo Sapiens; identical to SEQ ID NO: 116544

SEQ ID NO: 397777 - DNA, 1000 bp, Homo Sapiens; identical to SEQ ID NO: 221802

SEQ ID NO: 397778 - DNA, 1000 bp, Homo Sapiens; identical to SEQ ID NO: 287163

SEQ ID NO: 397779 - DNA, 1000 bp, Homo Sapiens; identical to SEQ ID NO: 116546

SEQ ID NO: 397780 - DNA, 1000 bp, Homo Sapiens; identical to SEQ ID NO: 221803

SEQ ID NO: 397781 - DNA, 1000 bp, Homo Sapiens
catgaagcaacggctgatgagaggcctggaaaagcccaaagacatgggtttcactcgcctcatgcaggccatgtggaaatgtgcacaggaaactgcctgggacttcgctttacccaaacagtaaccccacactgcaagaggggacccctccacccccagtaccctggaccccctccgcagagtctcggcagagccctttgtgctgctgcttctggaagtagtctcccttcctcccgggatgacctcaggactctgtcggtttcccctctttacccttccccgtccccgtgttctgctgggctctgattctgcccaatgagtatccccataggttctcaaaaacatgaacaagtctgtaaagctcagacatttgtcagcctcaacagcaccacccattcaagcatcctgtggataaagaattcagggaaccatccacacacctgccaaccctgggaagcatccagttctcaaatcgtttttgctatggatttatactaacaagaacattccttgacttccctcctgctggtgttttaaagccacaagtagggaagatatctggcaggcagaaagaagtctgtgatgataaacaatgatgaggatgacctaggcaccctacgctagtgtgagaagcctgcgccccaggaaggatctgtgttagtccctgggatggctccaaggcctgctctaggaaggcagcatgctcagtgggaacacagcaagattcagaatttaaagtagttgcttcatggctctgtgcactcccttttcttcctcgcagcctccctaagatgactccagtgtgaccctgtgcttagtgagcaatagtgattgagctcatgttccctgcaagtgccatttcctctccaggatgggcctctaaagctgaggcctggctcagagcctgtttgccctctgtcttaaacaattgtaaatatcacttaaattataaccatttgcaataaacatccccaaagttaaaaaaaaaaaaaaaaaaaaa

SEQ ID NO: 397782 - DNA, 1000 bp, Homo Sapiens
cgaagctgacacagcagaatatttcctccgggccgtgagggcctccagcattttcccaatcctgagtgtgattctgcttttcatgggtggcctctgcatcgcagccagcgagttctacaaaactcgacacaacatcatcctgagtgccggcatcttcttcgtgtctgcaggtctgagtaacatcattggcatcatagtgtacatatctgccaatgccggagacccctccaagagcgactccaaaaagaatagttactcatacggctggtccttctacttcggggccctgtccttcatcatcgccgagatggtcggggtgctggcggtgcacatgtttatcgaccggcacaaacagctgcgggccacggcccgcgccacggactacctccaggcctctgccatcacccgcatccccagctaccgctaccgctaccagcgccgcagccgctccagctcgcgctccacggagccctcacactccagggacgcctcccccgtgggcatcaagggcttcaacaccctgccgtccacggagatctccatgtacacgctcagcagggaccccctgaaggccgccaccacgcccaccgccacctacaactccgacagggataacagcttcctccaggttcacaactgtatccagaaggagaacaaggactctctccactccaacacagccaaccgccggaccacccccgtataaagaccgcgggcctcgccagaagaccgcgggaggagggcgcggtccccgggggcggggcggggcggggagacccagaccctccgctgggagaccttccaaaagcaaaaacaaaaaacaaaaaaaacaaaaaaacaaaaaacaaaaaaacacacacacacaaaaaaagagaaaaaacataacaagtaaattttaaaaaaaagaacaaaatataagaggaacaaagaagcaaaacaacaggaaatgtgggaaaatataaacgagggaagaaaacaaactttaaaaaaaagcgagagg

SEQ ID NO: 397783 - DNA, 1000 bp, Homo Sapiens; identical to SEQ ID NO: 287166

SEQ ID NO: 397784 - DNA, 1000 bp, Homo Sapiens; identical to SEQ ID NO: 116547

SEQ ID NO: 397785 - DNA, 1000 bp, Homo Sapiens
gcagcagcagccctgagccacaggaagttacagacacaactgaggccccctttcaaggggatcagaggtccctggagtttctgcttcctccagagccagactactcactgctgctcaccttcatctacaacgggcgcgtggtgggcgaggcccaggtgcaaagcctggattgccgccttgtggctgagccctcaggctctgagagcagcatggagcaggtgctgttccccaagcctggcccactggagcccacgcagcgcctgctgagccagcttgagaggggcatcctagtggccagcaacccccgaggcctcttcgtgcagcgcctttgccccatccccatctcctggaatgcaccccaggctccacctgggccaggcccgcatctgctgcccagcaacgagtgcgtggagctcttcagaaccgcctacttctgcagagacttggtcaggtactttcagggcctgggccccccaccgaagttccaggtaacactgaatttctgggaagagagccatggctccagccatactccacagaatcttatcacagtgaagatggagcaggcctttgcccgatacttgctggagcagactccagagcagcaggcagccattctgtccctggtgtagagcctgggggacccatcttccacctcacctctttgttcttcctgtctcctttgaagtagactcattcttcacacgattgacctgtcctctttgtgataattctcagtagttgtccgtgataatcgtgtcctgaaaatcctcgcacacactggctggtggagaactcaaggctaattttttatcctttttttttttttatttttgagatatacgccctctttcatctgtaagggactaggaaattccaaatggtgtgaacccagggggcctttccctcttccctgacctcccaactctaaagccaagcactttatatttttctcttagatattcactaaggacttaaaataaaatttttttgaaagagg

SEQ ID NO: 397786 - DNA, 1000 bp, Homo Sapiens; identical to SEQ ID NO: 116548

SEQ ID NO: 397787 - DNA, 1000 bp, Homo Sapiens; identical to SEQ ID NO: 116549

SEQ ID NO: 397788 - DNA, 1000 bp, Homo Sapiens
cgagatggagttcaccgaggccgagagcaacatgaatgacctggtatctgagtaccagcagtaccaggacgccacggccgaggagggcgagttcgaggaggaggcggaggaggaggtggcctaggctgctcccatcgcttcccacctgtcccctcgaggcttctgacctttgatccgctaggccccccatctctgaaccctagagccccgctttccctccaaggctgactccccgctgaccctaacaatacctttggagctcgctttacctctggctacttcatctccgaccctggctcccctttgagccctaatttatctttaacccccttgagctcttccaaccttgacattcccaggaggagccccgcttcaccccttctgactctggaaaccgcacctttaactttgcagaccttccttcacccctgacttctgcttcacctttgacctctgccccccatgaatcccattttacctctagacctataagttctggtttatgtttgacccctccctctgagctgcacttcaccgctgaccttgcctcacctttaaccccccacctgagccccagctcctacctctgaccccaacttctctttgatctctgaatcccctctgactccaacttctctttcaccctctatgagtcccattttacttctacacctgcaagtcctggtttatattggacccctccctccgagctgcagttcacctttgaccttgcctcacctttcaccccccaccccccacagcgtcagctcctacctctgaccccagcttctctctgattcccacaggccccatgcatcctccctgcctcactcccctcagcccctgccgaccttagcttatctgggagagaaacaaggcctggtgcctgtgaggaagagaggtcacccctaccctccctccccgcttccctgcctcaccctcaataaataaattaattgttgtcatggaaaaaaaaaaaaaaaaaaaaaaaaaaaaaaaa

SEQ ID NO: 397789 - DNA, 1000 bp, Homo Sapiens; identical to SEQ ID NO: 287169

SEQ ID NO: 397790 - DNA, 1000 bp, Homo Sapiens; identical to SEQ ID NO: 287170

SEQ ID NO: 397791 - DNA, 1000 bp, Homo Sapiens; identical to SEQ ID NO: 116550

SEQ ID NO: 397792 - DNA, 1000 bp, Homo Sapiens; identical to SEQ ID NO: 221806

SEQ ID NO: 397793 - DNA, 1000 bp, Homo Sapiens; identical to SEQ ID NO: 221807

SEQ ID NO: 397794 - DNA, 1000 bp, Homo Sapiens; identical to SEQ ID NO: 287173

SEQ ID NO: 397795 - DNA, 1000 bp, Homo Sapiens; identical to SEQ ID NO: 287174

SEQ ID NO: 397796 - DNA, 1000 bp, Homo Sapiens; identical to SEQ ID NO: 287175

SEQ ID NO: 397797 - DNA, 1000 bp, Homo Sapiens; identical to SEQ ID NO: 116551

SEQ ID NO: 397798 - DNA, 1000 bp, Homo Sapiens; identical to SEQ ID NO: 116552

SEQ ID NO: 397799 - DNA, 1000 bp, Homo Sapiens; identical to SEQ ID NO: 116554

SEQ ID NO: 397800 - DNA, 1000 bp, Homo Sapiens
ggagcgcttcatgcgccgcttcaatgagctgcagtactgggtggccaccgagctgtgtctctgccccgtgcccggcccccgggcccagctgctcaggaagttcattaagctggcggcccacctcaaggagcagaagaatctcaattccttctttgccgtcatgtttggcctcagcaactcggccatcagccgcctagcccacacctgggagcggctgcctcacaaagtccggaagctgtactccgccctcgagaggctgctggatccctcatggaaccaccgggtataccgactggccctcgccaagctctcccctcctgtcatccccttcatgccccttcttctcaaagacatgaccttcattcatgagggaaaccacacactagtggagaatctcatcaactttgagaagatgagaatgatggccagagccgcgcggatgctgcaccactgccgaagccacaaccctgtgcctctctcaccactcagaagccgagtttcccacctccacgaggacagccaggtggcgaggatttccacatgctcggagcagtccctgagcacccggagtccagccagcacctgggcttatgtccagcagctgaaggtcattgacaaccagcgggaactctcccgcctctcccgagagctggagccatgaggaggggctgggactggagctggagcaggcacttgcagccgggaaagccagggtgtgccgggccaagatactcacaggctggccacagctgggcaaggctctccgtggagtggactcgagtccctggagcaggcagtgtggaggcagccatcccctgtgatgactggcagctaaggaggacctcggagtggacccgagccaggaataacgaatgacccaaggccaaggaagggaggacagagaggccccaggagtgggtggagagtggagtgcgctgggacgttgtgtgcaatagagaggtctccacaccagatgtcttccagaaaaaaaaaaaaaaaa

SEQ ID NO: 397801 - DNA, 1000 bp, Homo Sapiens; identical to SEQ ID NO: 116556

SEQ ID NO: 397802 - DNA, 1000 bp, Homo Sapiens; identical to SEQ ID NO: 287182

SEQ ID NO: 397803 - DNA, 1000 bp, Homo Sapiens
tgacaaatatgccctgcagtcacagcagagatggaaagctgctaatgatgctggctactttaatgatgaaatggcaccaattgaagtgaagacaaagaaaggaaaacagacaatgcaggtagacgagcatgctcggccccaaaccaccctggaacagttacagaaacttcctccagtattcaagaaagatggaactgttactgcagggaatgcatcgggtgtagctgatggtgctggagctgttatcatagctagtgaagatgctgttaagaaacataacttcacaccactggcaagaattgtgggctactttgtatctggatgtgatccctctatcatgggtattggtcctgtccctgctatcagtggggcactgaagaaagcaggactgagtcttaaggacatggatttggtagaggtgaatgaagcttttgctccccagtacttggctgttgagaggagtttggatcttgacataagtaaaaccaatgtgaatggaggagccattgctttgggtcacccactgggaggatctggatcaagaattactgcacacctggttcacgaattaaggcgtcgaggtggaaaatatgccgttggatcagcttgcattggaggtggccaaggtattgctgtcatcattcagagcacagcctgaagagaccagtgagctcactgtgacccatccttactctacttggccaggccacagtaaaacaagtgaccttcagagcagctgccacaactggccatgccctgccattgaaacagtgattaagtttgatcaagccatggtgacacaaaaatgcattgatcatgaataggagcccatgctagaagtacattctctcagatttgaaccagtgaaatatgatgtatttctgagctaaaactcaactatagaagacattaaaagaaatcgtattcttgccaagtaaccaccacttctgccttagataatatgattataaggaaatcaaataaatgttgccttaacttc

SEQ ID NO: 397804 - DNA, 1000 bp, Homo Sapiens; identical to SEQ ID NO: 287184

SEQ ID NO: 397805 - DNA, 1000 bp, Homo Sapiens; identical to SEQ ID NO: 287185

SEQ ID NO: 397806 - DNA, 1000 bp, Homo Sapiens
ctttatttttccttagaggccgcctggatcagttgctcaggcacgtgatgaaccccttggaaaccctctcaataactaactgccggctttcggaaggggatgtgatgcatctgtcccagagtcccagcgtcagtcagctaagtgtcctgagtctaagtggggtcatgctgaccgatgtaagtcccgagcccctccaagctctgctggagagagcctctgccaccctccaggacctggtctttgatgagtgtgggatcacggatgatcagctccttgccctcctgccttccctgagccactgctcccagcttacaaccttaagcttctacgggaattccatctccatatctgccttgcagagtctcctgcagcacctcatcgggctgagcaatctgacccacgtgctgtatcctgtccccctggagagttatgaggacatccatggtaccctccacctggagaggcttgcctatctgcatgccaggctcagggagttgctgtgtgagttggggcggcccagcatggtctggcttagtgccaacccctgtcctcactgtggggacagaaccttctatgacccggagcccatcctgtgcccctgtttcatgcctaactagctgggtgcacatatcaaatgcttcattctgcatacttggacactaaagccaggatgtgcatgcatcttgaagcaacaaagcagccacagtttcagacaaatgttcagtgtgagtgaggaaaacatgttcagtgaggaaaaaacattcagacaaatgttcagtgaggaaaaaaaggggaagttggggataggcagatgttgacttgaggagttaatgtgatctttggggagatacatcttatagagttagaaatagaatctgaatttctaaagggagattctggcttgggaagtacatgtaggagttaatccctgtgtagactgttgtaaagaaactgttgaaaataaagagaagcaatgtgaagcaaaaaaaaaaaaaaaaaa

SEQ ID NO: 397807 - DNA, 1000 bp, Homo Sapiens; identical to SEQ ID NO: 287186

SEQ ID NO: 397808 - DNA, 1000 bp, Homo Sapiens; identical to SEQ ID NO: 116559

SEQ ID NO: 397809 - DNA, 1000 bp, Homo Sapiens
gggagaagaaagcaggatgtctggagaatgtgccccgaacgtgagtgtgtctgtgagcacaagccacaccaccatcagtggaggtggcagccgaggaggtggcggcggtggctacggctctggaggtagcagctatggctccggaggtggtagctatggttctggaggtggcggcggcggcggccgtggcagctatggctccggaggtagcagctacggctccggaggtggcagctatggctctggaggtggcggcggcggccatggcagctacggctccggaagcagcagtgggggctacagaggtggctctggaggcggcggcggcggcagctctggcggccggggctctggcggcgggagctctggaggctccataggaggccggggatccagctctgggggtgtcaagtcctctggtggcagttccagcgtgaggtttgtttctaccacttattccggagtaaccagataaagagatgccctctgtttcattagctctagttctcccccagcatcactaacaaatatgcttggcaagaccgaggtcgatttgtcccagccttaccggagaaaagagctatggttagttacactagctcatcctattcccccagctctttcttttctgctgtttcccaatgaagttttcagatcagtggcaatctcagtcccctggctatgaccctgctttgttctttccctgagaaacagttcagcagtgaccaccacccacatgacatttcaaagcacctccttaagccagccagagtaggaccagttagacccagggtgtggacagctccttagcatcttatctctgtgctgttttggttttgtacataaggtgtaagcaagttgtttttcttttgtggagaggtcttaaactccccatttccttgttttgctgcaataaactgcatttgaaattctccatgtctcgatcgcccttgtttacggctctgtctaacctggatgggtgttttgtgaggtaaaagaa

SEQ ID NO: 397810 - DNA, 1000 bp, Homo Sapiens; identical to SEQ ID NO: 116560

SEQ ID NO: 397811 - DNA, 1000 bp, Homo Sapiens; identical to SEQ ID NO: 287188

SEQ ID NO: 397812 - DNA, 1000 bp, Homo Sapiens
aaggagtacccccccaacaagaactgcatctggcagctggtggcccccacccagtaccgcatctccctgcagtttgacttctttgagacagagggcaatgatgtgtgcaagtacgacttcgtggaggtgcgcagtggactcacagctgactccaagctgcatggcaagttctgtggttctgagaagcccgaggtcatcacctcccagtacaacaacatgcgcgtggagttcaagtccgacaacaccgtgtccaaaaagggcttcaaggcccacttcttctcagtcttggagggggcaggggaccgacactcacatctatcaggcctggagttactgctctgcccccatgccctggtcgacactgtgcccgccccaccctcagccctgcacggagacacacacgcccacacgcacacacatgtgcacacacattgccccatcgcacaagaaacctgcagaggacccccactgggggcatcgaggctcagccctcagggcccggggcatctgactctggccccccaggaggggagctatttggacttttgggacacccaccgaggagaccctaagccaagaaggagaagaaagagcctgaagaccttcagtctgacccctgccaccttccggggcatttgggcactgtaggaaaagaggccagctctgcagccccctcggggacgcccccaccagctcaaattccgagtgcagaaaagaaaccggaccccccagtgaggcctgccaggcctcccggaccccttgttactcaggaacctcaccttggacggaatgggatgggggcttcggtgcccaccaaccccccacctccactctgccattccggcccacctccctctggccggacagaactggtgctctcttctccccactgtgcccgtccgcggaccggggacccttccccgtgccctaccccctcccattttgatggtgtctgtgacatttcctgttgtgaagtaaaagagggacccctgcgtcctgc

SEQ ID NO: 397813 - DNA, 1000 bp, Homo Sapiens
ctcaacaccctgggcagctacaagtgcagctgtgaccccgggtacgagctggccccagacaagcgccgctgtgaggggtgttatgatctacaggttgggaaacccctgttgtgggacagacactgtttccgcctctccacgcatggtcccgagatgctggggacagcactccgaggctaatggctccagctcactaggccgatcctgctgtgcccccgagctgctccctttcctgcacctcccaggaccgcccctccctgaactgctttccctgagtcccttattcccgctcactccctcttggaggaccttggcctgttcatttgcagagaagatagaaatggccacacttatgaccccttagctcccccactcctccctacaggcccacccctgaggacacccaggccaccctgcctcctcccgtccgccccagagggaccagacacaggtccctgagccttggggagtccacaggctccccatcttctccttactgcatctcagcccacatctcagcccttccccatggcaggggctccccgcagacgatgccaccttccttgtccccgcagctgcttgtggcggattcctcaccaagctcaacggctccatcaccagcccgggctggcccaaggagtacccccccaacaagaactgcatctggcagctggtggcccccacccagtaccgcatctccctgcagtttgacttctttgagacagagggcaatgatgtgtgcaagtacgacttcgtggaggtgcgcagtggactcacagctgactccaagctgcatggcaagttctgtggttctgagaagcccgaggtcatcacctcccagtacaacaacatgcgcgtggagttcaagtccgacaacaccgtgtccaaaaagggcttcaaggcccacttcttctcagaaaagaggccagctctgcagccccctcggggacgcccccaccagctcaaattccgagtgcagaaaagaaaccggaccccccag

SEQ ID NO: 397814 - DNA, 1000 bp, Homo Sapiens; identical to SEQ ID NO: 287189

SEQ ID NO: 397815 - DNA, 1000 bp, Homo Sapiens; identical to SEQ ID NO: 221809

SEQ ID NO: 397816 - DNA, 1000 bp, Homo Sapiens; identical to SEQ ID NO: 287192

SEQ ID NO: 397817 - DNA, 1000 bp, Homo Sapiens
ctcaccttgctggaattatgcgtaaccatctctaccatagccatgtggtgcaatgcaaactgctgtaattcaagagaggaaatttcctcacctcccaattctgtgtaatcaagaatacctccttaattctgagagcatgaatatttgaccttaaatctccagtgactcagagcttcacccacaaactcaggagaacataagcctgctcgtaaagctcaatccttctatcatggcaccaatcacaagaaccttggacgtttgactgactctatcctttctctcctaactataaatcctatttgtgtgtcgtgggtatggaaggacagatatatttctttaggcattcttggatatctgtaacttctatgatcattactccaaagttgtttccagaaattggttctatttcttcttatccacctactccattgctttatgaggtttaaggaaggaaggcggtataatccctattcaatatattttttctaaaatccaacttctgaccgcccagtaggaagaaaaatgagacattttttccattacagagaaatgcttcttgactttaacatcagcattataaaaagtgtcaaataaaaaattaccatcattatcattaaaataaattttcactgtatttgagatgggagggttaaggctcagggattttatttcagtgaactgctggaactcacacatgccctgatatgtaaatgatgatttatgttggcgagtctgagagcaagcccaaatgtgttcttcaaaggacaatgggaaactgtaaagtagagaactaaagaataaggcctttagaatctgacacatctgggttcaaattctgaaactgtcacttattacctgtatgaacatgggcaaattatctaatctctctgatctatttttcctcatctgtaaaataggtgtaataataacaactactttgtcggttgctctgagggttaaatgaaaataaaaagaaaatgtgaaacagcaaaaaaaaaaa

SEQ ID NO: 397818 - DNA, 1000 bp, Homo Sapiens; identical to SEQ ID NO: 221810

SEQ ID NO: 397819 - DNA, 1000 bp, Homo Sapiens; identical to SEQ ID NO: 116561

SEQ ID NO: 397820 - DNA, 1000 bp, Homo Sapiens; identical to SEQ ID NO: 287195

SEQ ID NO: 397821 - DNA, 1000 bp, Homo Sapiens
aggtggacgctgggtagtgcaacgtgcaaggttgtgcgatattttcaatatctcactccaggtgtccagatctacgttctcctctccatctgcatagaccggttctacaccatcgtctatcctctgagcttcaaggtgtccagagaaaaagccaagaaaatgattgcggcatcgtggatctttgatgcaggctttgtgacccctgtgctctttttctatggctccaactgggacagtcattgtaactatttcctcccctcctcttgggaaggcactgcctacactgtcatccacttcttggtgggctttgtgattccatctgtcctcataattttattttaccaaaaggtcataaaatatatttggagaataggcacagatggccgaacggtgaggaggacaatgaacattgtccctcggacaaaagtgaaaactatcaagatgttcctcattttaaatctgttgtttttgctctcctggctgccttttcatgtagctcagctatggcacccccatgaacaagactataagaaaagttcccttgttttcacagctatcacatggatatcctttagttcttcagcctctaaacctactctgtattcaatttataatgccaattttcggagagggatgaaagagactttttgcatgtcctctatgaaatgttaccgaagcaatgcctatactatcacaacaagttcaaggatggccaaaaaaaactacgttggcatttcagaaatcccttccatggccaaaactattaccaaagactcgatctatgactcatttgacagagaagccaaggaaaaaaagcttgcttggcccattaactcaaatccaccaaatacttttgtctaagttctcattctttcaattgttatgcaccagagattaaaaagctttaactataaaaacagaagctatttacatatttgttttcactcaactttccaagggaaatgttttattttgtaaaatgcattcatttgtttactgt

SEQ ID NO: 397822 - DNA, 878 bp, Homo Sapiens; identical to SEQ ID NO: 221812

SEQ ID NO: 397823 - DNA, 1000 bp, Homo Sapiens; identical to SEQ ID NO: 287196

SEQ ID NO: 397824 - DNA, 1000 bp, Homo Sapiens
atatcttatattgggcgatttgggggctcggggaggcagagaatctcttgggagtcttgggtggcgctggtgcattctgtttcctcttgatctcaaagcacaatgtggatttggggaccaaaggtcagggacacatccccttagaggacctgagtttgggagagtggtgagtggaagggaggagcagcaagaagcagcctgttttcactcagcttaattctccttcccagataaggcaagccagtcatggaatcttgctgcaggccctccctctactcttcctgtcctaaaaataggggccgttttcttacacacccccagagagaggagggactgtcacactggtgctgagtgaccgggggctgctgggcgtctgttctttaccaaaaccatccatccctagaagagcacagagccctgaggggctgggctgggctgggctgagcccctggtcttctctacagttcacagaggtctttcagctcatttaatcccaggaaagaggcatcaaagctagaatgtgaatataacttttgtgggccaatactaagaataacaagaagcccagtggtgaggaaagtgcgttctcccagcactgcctcctgttttctccctctcatgtccctccagggaaaatgactttattgcttaatttctgcctttcccccctcacacatgcacttttgggcctttttttatagctggaaaaaacaaaataccaccctacaaacctgtatttaaaaagaaacagaaatgaccacgtgaaatttgcctctgtccaaacatttcatccgtgtgtatgtgtatgtgtgtgagtgtgtgaagccgccagttcatctttttatatggggttgttgtctcattttggtctgttttggtcccctccctcgtgggcttgtgctcgggatcaaacctttctggcctgttatgattctgaacatttgacttgaaccacaagtgaatctttctcctggtgactcaaataaaagtataattttta

SEQ ID NO: 397825 - DNA, 1000 bp, Homo Sapiens; identical to SEQ ID NO: 221813

SEQ ID NO: 397826 - DNA, 1000 bp, Homo Sapiens
cacagcgttgccgggaccatgggcaacctgggtacaattcctggagagccttctgtgacctctcacagccgcagacactagaggagttgaacacagtgctgaagagcaagatgctggccaagaagttactgggtctctacgggacccctgacaacatcgacatctggataggggccattgctgagccgctggtggaaaggggtcgggtggggcctctcctggcctgcctcttgggcaagcagttccagcagatccgtgatggagacaggttctggtgggaaaaccctggggtcttcacgaacgagcagaaggactctctacagaaaatgtccttctcacgccttgtctgtgacaacacccgcatcaccaaggtcccacgggacccattctgggccaacagctacccctatgacttcgtggattgctcagccatcgacaagctggacctgtcaccctgggcctcagtgaagaattaggggcccgcgctgcacaggaaagttccctttggtccacagggccatttcaagcaagttcaatgacctggtcccttagagctccatatcccagtcccagcccttctttgcagctgggcctctctatacccctggatgaacagcttgctcaggccccagggtggctgcctcggccctcccagctcttacactcagctccagtggcttctcctttctgtcaagacttagccccgctgagatgcccttctgctccagcttgctggatgttacctgtcctcttccctccacaagtcttggcccttaacctttatctttcttcctgtcctctcacctagattgtaagctccctgggccaggacttcagcctgcctccgagggtcccctgtggcacctagcatggtgcacagcacattagaagtgctcaaaaacatctgatgactgactaaagatgctaggcgtgacaccgttccctccaaaagcagacctcggaatcactgccaaataagtaactagacgtttacaggcca

SEQ ID NO: 397827 - DNA, 1000 bp, Homo Sapiens; identical to SEQ ID NO: 116562

SEQ ID NO: 397828 - DNA, 1000 bp, Homo Sapiens; identical to SEQ ID NO: 287198

SEQ ID NO: 397829 - DNA, 1000 bp, Homo Sapiens; identical to SEQ ID NO: 287199

SEQ ID NO: 397830 - DNA, 1000 bp, Homo Sapiens; identical to SEQ ID NO: 116194

SEQ ID NO: 397831 - DNA, 1000 bp, Homo Sapiens
tggtgactgtcctcatgaaggggggctgaagcacaatggccaggtgtggaccttgaaagaagacaggtgttctgtctgctcctgcaaggatggcaagatattctgccgacggacagcttgtgattgccagaatccaagtgctgacctattctgttgcccagaatgtgacaccagagtcacaagtcaatgtttagaccaaaatggtcacaagctgtatcgaagtggagacaattggacccatagctgtcagcagtgtcggtgtctggaaggagaggtagattgctggccactcacttgccccaacttgagctgtgagtatacagctatcttagaaggggaatgttgtccccgctgtgtcagtgacccctgcctagctgataacatcacctatgacatcagaaaaacttgcctggacagctatggtgtttcacggcttagtggctcagtgtggacgatggctggatctccctgcacaacctgtaaatgcaagaatggaagagtctgttgttctgtggattttgagtgtcttcaaaataattgaagtatttacagtggactcaacgcagaagaatggacgaaatgaccatccaacgtgattaaggataggaatcggtagtttggtttttttgtttgttttgtttttttaaccacagataattgccaaagtttccacctgaggacggtgtttggaggttgccttttggacctaccactttgctcattcttgctaacctagtctaggtgacctacagtgccgtgcatttaagtcaatggttgttaaaagaagtttcccgtgttgtaaatcatgtttcccttatcagatcatttgcaaatacatttaaatgatctcatggtaaatgttgatgtattttttggtttattttgtgtactaacataatagagagagactcagctccttttatttattttgttgatttatggatcaaattctaaaataaagttgcctgttgtgaaaaaaaaaaaaaaaaaaaaaaaaaaa

SEQ ID NO: 397832 - DNA, 1000 bp, Homo Sapiens; identical to SEQ ID NO: 221816

SEQ ID NO: 397833 - DNA, 1000 bp, Homo Sapiens; identical to SEQ ID NO: 221817

SEQ ID NO: 397834 - DNA, 1000 bp, Homo Sapiens
cgagacgctgtatgcggcggcaggcggtggcggcgcgagcccggactacaacagctccgagtacgagggcccgctcagccccccgctctgtctcaatggcaacttctcactcaagcaggactcctcgcccgaccacgagaaaagctaccactactctatgcactactcggcgctgcccggttcgcggcccacgggccacgggctagtcttcggctcgtcggctgtgcgcgggggcgtccactcggagaatctcttgtcttacgatatgcaccttcaccacgaccggggccccatgtacgaggagctcaatgcgttttttcataactgagacttcgcgccggctcccttctttttcttttgcctttgcccgccccccctgtccccagcccccagagcgcagggacacccccatcctaccccggcgccgggcgcggggagcgggccaccggtcctgccgctctcctggggcagcgcagtcctgttacctgtgggtggcctgtcccaggggcctcgcttcccccaggggactcgccttctctctccgcaaggggttccctcctcctctctcccaaggagtgcttctccagggacctctctccgggggctccctggaggcacccctcccccattcccaatatcttcgctgaggtttcctcctccccctcctccctgcaggcccaaggcgttggtaagggggcagctgagcaatggaacgcgtttccccctctcattattattttaaaaacagacacccagctgccgaggcaaaaaggagccaggcgctccctctttcttgaagagggtagaagttagggcgccggagcccgggcctggaacgccctcacccccaacctccagtctccgcgttttgcgattttaattttggcgggaggggaagtggattgagaggaaagagagaggccaagacaatttgtaactagaatccgtttttcccttttcctttttttaaacaaacaaacatacaaaaaaaaaaaaaaaa

SEQ ID NO: 397835 - DNA, 1000 bp, Homo Sapiens
agggctgcccggaggcggtgcccgggagcgcctcctgccgccgcagtgcgtcccctgcctgcccggtcccccaagccccgccagcgacgcggagtcctggggctcaggtgccgccgccgcctccccgctctctgaccccagtagcccagccgcctccgaagacttcacctaccgccccggcgaccctgttttctccttcccaagcctgcccaaagacttgctccacacaacgccctgtttcattccttaccactaggccctttgtagacactgttactttccccctcccctagtcagcaggcaatagatggggccccagctgccgcctcgggaccccctctccaggcggagggaggaagcgggagctttaaagcagtcggggatacctgagccgcttgttaggtcgccgcaccctcgcggcggatgtctcttggtctgtttctccggccctcagcccagcgcccctcctgcccgcccctagacggcctttccttttgcactttctgaactccacaaaacctcctttgtgactggctcagaactgaccccagccaccacttcagtgtgatttagaaaagggacagatcagcccctgaagacgaggtgaaaagtcaattttacaatttgtagaactctaatgaagaaaaacgagcatgaaaattcggtttgagccggctgacaatacaatgaaaaggcttaaaaagcagagacaaggagtgggcttcatgcattatggatcccgacccccaccactgcagactcgctctaggaagaactggagactcttgcttagctattcaggcacagggctggagagtactttaatttattcaagatgcttcattcatatgaaaatgtatttttgtacataaagagtttattctattatgagctatcaaagtttacatttttgtactgcagacgcttcatgtaaataaaaactaaaaataaaaaaaaaaaaaaaaaaaaaaaaaaaaaaaaaaaaaaaaaaaaaaaaaaa

SEQ ID NO: 397836 - DNA, 1000 bp, Homo Sapiens; identical to SEQ ID NO: 287203

SEQ ID NO: 397837 - DNA, 1000 bp, Homo Sapiens; identical to SEQ ID NO: 287204

SEQ ID NO: 397838 - DNA, 1000 bp, Homo Sapiens
cggcttttcgcttgatgccagctcttggcgtgagtgtggctgaccagaagggaaaaagcacagtggcctcttcagaagcaaaaccagctgccacgatccgcatcgtgcagggactgggagtgatgcctcccaaagcaggccagaccatcaccgttgcaacccacgccaagcaaggggcctcggtggccagtgggtctggaactgtccatacttcagcggtgtccttacccagtatgaatgctgctgtgtccaagactgtagctgtggcttctggggctgcaagcacccccatcagcatcagcacaggagcccccaccgtgcggcaggtccctgtcagcaccacggttgtgtccacgtcccaggctgggaagttgcctacacggatcacagttcccctctctgtgatcagccagccaatgaagggcaagagcgtggtcacagcccccatcatcaaaggcaaccttggagccaacctcagtgggttgggccgcaacatcatcctcacaactatgccagcaggcactaagctcattgctggcaataagcctgttagtttcctcactgctcagcagttgcagcagcttcagcagcaaggtcaggccacacaggtgcgcatccagactgtccctgcatcccatctccaacagggaacagcttctggctcctccaaagcagtctccactgttgttgtgactacagctccgtctcctaaacaggcacctgagcaacaatgattatgagagaggatggcttccgtgaaagaccatgcctggtctgctctggctgagaagggaccagggaggttgcatcattgttttaagcttgcctgttcaaggcagccaggcgaggggtgatggcaacggtggcctggattcgtggcctggattctgctgccacgtgccatagtggagcaccctgagaaagttcactccagggttccaaggtctgctctctaccaatctaggagaatattctgttgaaattgcagaaccggaattcc

SEQ ID NO: 397839 - DNA, 1000 bp, Homo Sapiens; identical to SEQ ID NO: 221818

SEQ ID NO: 397840 - DNA, 1000 bp, Homo Sapiens; identical to SEQ ID NO: 116565

SEQ ID NO: 397841 - DNA, 1000 bp, Homo Sapiens
tgccgcgtatcccccgctgcctgccggccccccctcctcctcgtcctcgtcgtcgtcctcctcgtcgccctccccgcctctgggcacccacaacccaggcggcctgaagcccccggccacgggggggctctcatccctcggcagccccccgcagcagctctcggccgccaccccacacggcatcaacaatatcctgagccggccctccatgcccgtggcctcgggggccgccctgccctccgcctcgccctccggttcctcctcctcctcttcctcgtccgcctctgcctcctccgcctctgccgccgccgcggctgctgccgcggccgcagccgccgcctcatccccggcggggctgctggccggactgccacgctttagcagcctgagcccgccgccgccgccgcccgggctctacttcagccccagcgccgcggccgtggccgccgtgggccggtaccccaagccgctggctgagctgcctggccggacgcccatcttctggcccggagtgatgcagagcccgccctggagggacgcacgcctggcctgtacccctcatcaaggatccattttgttggacaaagacgggaagagaaaacacacgagacccactttttccggacagcagatcttcgccctggagaagactttcgaacaaacaaaatacttggcggggcccgagagggctcgtttggcctattcgttggggatgacagagagtcaggtcaaggtctggttccagaaccgccggaccaagtggaggaagaagcacgctgccgagatggccacggccaagaagaagcaggactcggagacagagcgcctcaagggggcctcggagaacgaggaagaggacgacgactacaataagcctctggatcccaactcggacgacgagaaaatcacgcagctgttgaagaagcacaagtccagcagcggcggcggcggcggcctcctactgcacgcgtccgagccggagagctcatcctgaacgccg

SEQ ID NO: 397842 - DNA, 1000 bp, Homo Sapiens
ctctgttagtgtttaaccaaccatctgttctaaaagaagggctgaactgatggaaggaatgctgttagcctgagactcaggaagacaacttctgcagggtcactccctggcttctggaggaaagagaaggagggcagtgctccagtggtacagaagtgagacataatggaatcaggcttcacctccaaggacacctatctaagccattttaaccctcgggattacctagaaaaatattacaagtttggttctaggcactctgcagaaagccagattcttaagcaccttctgaaaaatcttttcaagatattctgcctagacggtgtgaagggagacctgctgattgacatcggctctggccccactatctatcagctcctctctgcttgtgaatcctttaaggagatcgtcgtcactgactactcagaccagaacctgcaggagctggagaagtggctgaagaaagagccagaggcctttgactggtccccagtggtgacctatgtgtgtgatcttgaagggaacagagtcaagggtccagagaaggaggagaagttgagacaggcggtcaagcaggtgctgaagtgtgatgtgactcagagccagccactgggggccgtccccttacccccggctgactgcgtgctcagcacactgtgtctggatgccgcctgcccagacctccccacctactgcagggcgctcaggaacctcggcagcctactgaagccagggggcttcctggtgatcatggatgcgctcaagagcagctactacatgattggtgagcagaagttctccagcctccccctgggccgggaggcagtagaggctgctgtgaaagaggctggctacacaatcgaatggtttgaggtgatctcgcaaagttattcttccaccatggccaacaacgaaggacttttctccctggtggcgaggaagctgagcagacccctgtgatgcctgtgacctcaattaaagcaattcctttgacctgtca

SEQ ID NO: 397843 - DNA, 1000 bp, Homo Sapiens
atgagatgatcaacttaactcttcatccatccaaaaagagtgggcctcaggtgaaactctctggcagccataaatggagttattcattcatcaaaaaacacagaagaagatatagcaagaagacagcatgtgtgttacctgctccagaaagaccttctcaagagaaccactccagaatacttccagaaaactttggctctgtaagaagtcagctctcttcatccagtaagttcataccaggggtccccacttgctttgagataaaacctgaagaaaattcagatgttcatgaattgagagtaaaacgttctgttacaagaataaaaaagagatctcgaagtgttttctacagactgaccatactgatattagtatttgctgttagttggatgccactacaccttttccatgtggtaactgattttaatgacaatcttatttcaaataggcatttcaagttggtgtattgcatttgtcatttgttgggcatgatgtcctgttgtcttaatccaattctatatgggtttcttaataatgggattaaagctgatttagtgtcccttatacactgtcttcatatgtaataattctcactgtttaccaaggaaagaacaaatgctggggtcatataaaatatatttatgataactatttacatataataaatagaaattttgttaacatggaatttaatttatgtgaaagagttctggattcaaatgtcagttcataatatatggaagataattttatgtgttatagtaggattaatttatttagttgtgcagtcagtgtcaatccaatctgtaatttcactttagaaggttgtattaccttccacttccatgttgtcttataaacaaatgaattgtattttttgttgaaagtaaaagttatatctaaccaaaaaaaaaaaaaaaaaaaaaaaaaaaaaaaaaaaaaaaaaaaaaaaaaaaaaaaaaaaaaaaaaaaaaaaaaaaaaaaaaaaaaaaaaaaaaaa

SEQ ID NO: 397844 - DNA, 1000 bp, Homo Sapiens; identical to SEQ ID NO: 287205

SEQ ID NO: 397845 - DNA, 1000 bp, Homo Sapiens; identical to SEQ ID NO: 287207

SEQ ID NO: 397846 - DNA, 1000 bp, Homo Sapiens
tctcctgagatgtcaggaaggagggggccacctgtgtcctccacaggggccccccgaagcctggggactcccagccccagagctccgaggcggaggaggtgctgacaggtgctccgagagatgctccctctcccctcatgctccctccccatcctcctccttttcctcctccccagtgtgccaattgagtcccaacccccaccctcaacattgcccccttttctggcccctgagtgggaccttctctccccccgagtagtcctgtctaggggtgcccctgctgggccccctctgctcttcctgctggaggctggggcctttcgggagtcagcaggtgccccggccaaccgcagccggcgtggggtgagcgaaactgcaccagcgagtcgtcggggtgagctggctgtgtgcgatgcagtcagtggctgggtgacagaccgccggaccgctgtggacttgcgtgggcgcgaggtggaggtgttgggcgaggtgcctgcagctggcggcagtcccctccgccagtacttctttgaaacccgctgcaaggctgataacgctgaggaaggtggcccgggggcaggtggagggggctgccggggagtggacaggaggcactgggtatctgagtgcaaggccaagcagtcctatgtgcgggcattgaccgctgatgcccagggccgtgtgggctggcgatggattcgaattgacactgcctgcgtctgcacactcctcagccggactggccgggcctgagacccatgcccaggaaaataacagagctggatgctgagagacctcagggatggcccagctgatctaaggaccccagtttgggaactcatcaaataatcacaaaatcacaattctctgattttgagctcaatctctgcaggatgggtgaaaccacatggggttttggaggttgaataggagttctcctggagcaacttgagggtaataatgatgatgatataataaaaaaaaaaaaaaaaaaaaaaaa

SEQ ID NO: 397847 - DNA, 1000 bp, Homo Sapiens; identical to SEQ ID NO: 116567

SEQ ID NO: 397848 - DNA, 1000 bp, Homo Sapiens
ggcagagaggagggcttgctcatctgaacaggggtgtatttcattccaggccctcagtctttggcaatggccaccctggtgttggcatattggccccactgtaacttttgggggcttcccggtctagccacaccctcggatggaaagacttgactgcataaagatgtcagttctccctgagttgattgataggcttaatggtcaccctaaaaacacccacatatgcttttcgatggaaccaggtaagttgacgctaaagttcttatggaaaaatacacacgcaatagctaggaaaacacagggaaagaagagttctgagcagggcctagtcttagccaatattaaaacatactatgaagcctctgatacttaaacagcatggcgctggtacgtaaatagaccaatgcagttaggtggctctttccaagactctggggaaaaaagtagtaaaaagctaaatgcaatcaatcagcaattgaaagctaagtgagagagccagagggcctccttggtggtaaaagagggttgcatttcttgcagccagaaggcagagaaagtgaagaccaagtccagaactgaatcctaagaaatgcaggactgcaaagaaattggtgtgtgtgtgtgtgtgtgtgtgtgtgtgtgtgtttaatttttaaaaagtttttattgagatacaagtcaataccataaagctctcacccttctaaagtgtacaattcagtggtgtgagtatattcataagatttatacttggtgtctattcataagacttatatccagcatattcataactagagccatatcacagatgcattcatcataataattccagacattttcatcaccctaaaaggaaaccctgaaacccattagcagtcattccccattcctccaacccattctctccctaatccctagaaaccaccaatctgctgtgtatttcatctattgccaacatttcatataaatggcatcatacaaaaaaaaaaaaaaaaaaaaa

SEQ ID NO: 397849 - DNA, 588 bp, Homo Sapiens
atgagcatcacggacgtgctcagtgctgatgacattgcagcagcgctccaggaatgccaagacccagacacttttgaaccccaaaaattcttccagacatcaggcctctccaagatgtcagccaatcaggtgaaggatgttttccggttcatagacaacgaccagagcgggtacctggatgaagaagagcttaagtttttcctccagaagtttgagagtggtgccagagaactgaccgagtcagaaaccaagtccttgatggctgcggcggataatgatggagatgggaaaattggagcagaggaattccaggaaatggtgcattcttaaaagccccagtctctggagaaaagagagaaagggataatcacctggaagattccaaagccctgggaatggggaaccccacatcccatccctacctaatttgttaattttccctgaaaaccttctgcagtttgctcattgttttagcgaggtcacgagagagtcacttcatgactttcttggtgtgtgggtatatgccctgacaacttctgtaagccccccttcccccacaggcaatgcctctaaaaatcacccaataaa

SEQ ID NO: 397850 - DNA, 492 bp, Homo Sapiens
atggcggaggacaggccgcagcagccgcagctggacatgccgctggtcctggaccagggcctgaccaggcagatgcggctacgcgtggagagcctgaagcagcgcggggagaagcgccaggatggggagaagctgctgcagccagcggagtctgtgtaccgcctcaacttcacccagcagcagcggctacagttcgagcgctggaatgtcgtgctggacaagccgggcaaggtcaccatcacaggcacctcgcagaactggacgcctgacctcaccaacctcatgacacgccagctgctggaccccactgccatcttctggcgcaaggaggactcggatgccatagattggaatgaggccgacgccctggagtttggggagcgcctgtcggacctggccaagatccgcaaggtcatgtacttcctcgtcacctttggcgagggtgtggagcccgccaacctcaaggcctccgtggtttttaaccagctctga

SEQ ID NO: 397851 - DNA, 1000 bp, Homo Sapiens; identical to SEQ ID NO: 116568

SEQ ID NO: 397852 - DNA, 1000 bp, Homo Sapiens; identical to SEQ ID NO: 116570

SEQ ID NO: 397853 - DNA, 566 bp, Homo Sapiens
gccagaaccggtggagcagcgacccctgagcagtgttctctgtgctgagcggcgggactgagctgttgagttagagccaacatgagtgagcgacaaggtgctggggcaaccaatggaaaagacaagacatctggtgaaaatgatggacagaagaaagttcaagaagaatttgacattgacatggatgcaccagagacagaacgtgcagcggtggccattcagtctcagttcagaaaattccagaagaagaaggctgggtctcagtcctagtgggagaaccccctcctagtccacctgaaaacaccaaattcaaccatcatctgtcaagaaattaaaagaacaacaccctagagagaagtcatccacacacaatccacacacgcatagcaaacctccaatgcatgtacagaaacctgtgatatttatacccttgtaggaaggtatagacaatggaattgtgagtagcttaatctctatgtttctctccattttcattcctcctgcaactattttccttgatgttgtaataaaatgaagttacgatgagtgaattcaaaaaaaaaaaa

SEQ ID NO: 397854 - DNA, 1000 bp, Homo Sapiens
aatttccgaaagtggaacggttccgctatagccgagttgaagaccccacagacgactatggcacagaggattatgcaggtccctgcgaccctgagtgcagtgaggttggctgtgacgggccaggaccagaccactgcaatgactgtttgcactactactacaagctgaaaaacaataccaggatctgtgtctccagctgcccccctggccactaccacgccgacaagaagcgctgcaggaagtgtgcccccaactgtgagtcctgctttgggagccatggtgaccaatgcatgtcctgcaaatatggatactttctgaatgaagaaaccaacagctgtgttactcactgccctgatgggtcatatcaggataccaagaaaaatctttgccggaaatgcagtgaaaactgcaagacatgtactgaattccataactgtacagaatgtagggatgggttaagcctgcagggatcccggtgctctgtctcctgtgaagatggacggtatttcaacggccaggactgccagccctgccaccgcttctgcgccacttgtgctggggcaggagctgatgggtgcattaactgcacagagggctacttcatggaggatgggagatgcgtgcagagctgtagtatcagctattactttgaccactcttcagagaatggatacaaatcctgcaaaaaatgtgatatcagttgtttgacgtgcaatggcccaggattcaagaactgtacaagctgccctagtgggtatctcttagacttaggaatgtgtcaaatgggagccatttgcaaggatgcaacggaagagtcctgggcggaaggaggcttctgtatgcttgtgaaaaagaacaatctgtgccaacggaaggttcttcaacaactttgctgcaaaacatgtacatttcaaggctgagcagccatcttagatttctttgttcctgtagacttatagattattccatattattaaaaagaaaaaaaaaagccaaaaag

SEQ ID NO: 397855 - DNA, 1000 bp, Homo Sapiens; identical to SEQ ID NO: 221821

SEQ ID NO: 397856 - DNA, 1000 bp, Homo Sapiens; identical to SEQ ID NO: 287214

SEQ ID NO: 397857 - DNA, 1000 bp, Homo Sapiens; identical to SEQ ID NO: 287215

SEQ ID NO: 397858 - DNA, 726 bp, Homo Sapiens
aaagaaggcagctgggcagctgataggaacaacattcagctccgaggctgaaagggaaacatcagccgcccggggggagttaaaatgagtgacaacactactctgcctgctccagcttcaaaccagggtcctaccaccccacgcaaaggccctcccaagttcaagcagaggcagactcgccaattcaagagtaaacctccaaagaaaggtgtgaaaggatttggagatgacattccaggaatggaggggctaggaacagatatcacagtgatttgtccatgggaggcattcagccacctggaattgcatgagctcgctcagtttgggattatctgaagtgccagaggttctgccactctcaatgacatctgctgtaattttggttgcttttgccctgttgatctgccggagtcttgaaattcagctgattggaagtggtttctttgactttcaaggtcattccctatcagttactactaagagttctcttactgtcagaatctctcttgcagtacagctcaaaatagtggatgcatttcaaacttgaccaccttttcctaccagctagttagaagtcatcaatatttctctacattttgtttatctgtaagtcctttaaatctatttttgctaggcattcattatgattaatagtagacttttaagacaacatttatgtcactccccacctcctcatatttaataaaggagatatttaccttgaaa

SEQ ID NO: 397859 - DNA, 1000 bp, Homo Sapiens; identical to SEQ ID NO: 287216

SEQ ID NO: 397860 - DNA, 1000 bp, Homo Sapiens; identical to SEQ ID NO: 221822

SEQ ID NO: 397861 - DNA, 1000 bp, Homo Sapiens; identical to SEQ ID NO: 116571

SEQ ID NO: 397862 - DNA, 1000 bp, Homo Sapiens; identical to SEQ ID NO: 116573

SEQ ID NO: 397863 - DNA, 1000 bp, Homo Sapiens; identical to SEQ ID NO: 221825

SEQ ID NO: 397864 - DNA, 1000 bp, Homo Sapiens; identical to SEQ ID NO: 287221

SEQ ID NO: 397865 - DNA, 1000 bp, Homo Sapiens; identical to SEQ ID NO: 287222

SEQ ID NO: 397866 - DNA, 1000 bp, Homo Sapiens; identical to SEQ ID NO: 287223

SEQ ID NO: 397867 - DNA, 1000 bp, Homo Sapiens; identical to SEQ ID NO: 287224

SEQ ID NO: 397868 - DNA, 997 bp, Homo Sapiens; identical to SEQ ID NO: 116575

SEQ ID NO: 397869 - DNA, 1000 bp, Homo Sapiens; identical to SEQ ID NO: 287225

SEQ ID NO: 397870 - DNA, 1000 bp, Homo Sapiens; identical to SEQ ID NO: 116576

SEQ ID NO: 397871 - DNA, 1000 bp, Homo Sapiens; identical to SEQ ID NO: 287228

SEQ ID NO: 397872 - DNA, 1000 bp, Homo Sapiens
gaagtttctggtggaggactattgctttgctgaccttgctccccagaagcccgcacccccacttgacacagataggtttgtgctactggtgtccggcctgggcctgggtggcggtggaggcgagagcctgctgggcacccagctgctggtggatgtggtgacggggcagcttggggacgaaggggagcagtgcagcgccgcccacgtctcccgggttatcctcgctggcaacctcctcagccacagcacccagagcagggattctatcaataaggccaaatacctcaccaagaaaacccaggcagccagcgtggaggctgttaagatgctggatgagatcctcctgcagctgagcgcctcagtgcccgtggacgtgatgccaggcgagtttgatcccaccaattacacgctcccccagcagcccctccacccctgcatgttcccgctggccactgcctactccacgctccagctggtcaccaacccctaccaggccaccattgatggagtcagatttttggggacatcaggacagaacgtgagtgacattttccgatacagcagcatggaggatcacttggagatcctggagtggaccctgcgggtccgtcacatcagccccacagccccggacactctaggttgttaccccttctacaaaactgacccgttcatcttcccagagtgcccgcatgtctacttttgtggcaacacccccagctttggctccaaaatcatccgaggtcctgaggaccagacagtgctgttggtgactgtccctgacttcagtgccacgcagaccgcctgccttgtgaacctgcgcagcctggcctgccagcccatcagcttctcgggcttcggggcagaggacgatgacctgggaggcctggggctgggcccctgactcaaaaaagtggttttgaccagagaggcccagatggaggctgttcattccctgcagtgtcggcattgtaaataaagcctggcacttgctgatgcg

SEQ ID NO: 397873 - DNA, 1000 bp, Homo Sapiens; identical to SEQ ID NO: 116578

SEQ ID NO: 397874 - DNA, 821 bp, Homo Sapiens
tccggtcttgtccacgctagggggtgcacgtactcccaactgtggtcgcgctctcaccccttctgctgctctcgtggccccctcgcgatggcgggcatcctgtttgaggatattttcgatgtgaaggatattgacccggagggcaagaagtttgaccgagtgtctcgactgcattgtgagagtgaatctttcaagatggatctaatcttagatgtaaacattcaaatttaccctgtagacttgggtgacaagttccggttggtcatagctagtaccttgtatgaagatggtaccctggatgatggtgaatacaaccccactgatgataggccttccagggctgaccagtttgagtatgtaatgtatggaaaagtgtacaggattgagggagatgaaacttctactgaagcagcaacacgcctctctgcgtacgtgtcctatgggggcctgctcatgaggctgcagggggatgccaacaacctgcatggattcgaggtggactccagagtttatctcctgatgaagaagctagccttctgaacctcgcctgaagccagcctctctgccaagtcactcaggtcatgggcattgttcaagcctgagtggcagccgctcttgctcacctgttgaggaagggctggctcactgtccaccgtggcggcatctttaactggcctccactcaatgggaaactgactcgcctgtgaaagacacagtgggagagctgaaaatgaatcagaagctttatgtatatgatttttaaattaaactttactttttcagactgcccctcccctttttgtaaaaagtccatttactgt

SEQ ID NO: 397875 - DNA, 991 bp, Homo Sapiens; identical to SEQ ID NO: 221828

SEQ ID NO: 397876 - DNA, 1000 bp, Homo Sapiens; identical to SEQ ID NO: 287231

SEQ ID NO: 397877 - DNA, 1000 bp, Homo Sapiens; identical to SEQ ID NO: 287232

SEQ ID NO: 397878 - DNA, 1000 bp, Homo Sapiens; identical to SEQ ID NO: 287233

SEQ ID NO: 397879 - DNA, 1000 bp, Homo Sapiens; identical to SEQ ID NO: 116580

SEQ ID NO: 397880 - DNA, 1000 bp, Homo Sapiens; identical to SEQ ID NO: 287235

SEQ ID NO: 397881 - DNA, 1000 bp, Homo Sapiens
ttttctggcaactgtaaatggaaaaatatatggactaaacgtagccctgtgctgtatcatggccatagtatattgtaacctttgtctaatcattggatttattgtgtcacttctgaagtttcacagaaatgaatgaattttatcatctatgatatgagtgagataattatgggagtggtaagaattatgacttgaattcttctttgattgtgttgcacatagatatggtagtctgctctgtatatttttcccttttataatgtgcttttcacactgctgcaaaccttagttacatcctaggaaaaaatacttcctaaaataaaactaaggtatcatccttacccttctctttgtctcacccagaaatatgatggggggaattacctgccctaacccctccctcaataaatacattactgtactctggaatttaggcaaaaccttaaatctccaggctttttaaagcacaaaatataaataaaagctgggaaagtaaaccaaaattcttcagattgttcctcatgaatatcccccttcctctgcaattctccagagtggtaacagatgggtagaggcagctcaggtgaattacccagcttgcctctcaattcattcctcctcttcctctcaaaggctgaaggcagggcctttccagtcctcacaacctgtccttcacctagtccctcctgacccagggatggaggctttgagtcccacagtgtggtgatacagagcactagttgtcactgcctggctttatttaaaggaactgcagtaggcttcctctgtagagctctgaaaaggttgactatatagaggtcttgtatgtttttacttggtcaagtatttctcacatcttttgttatcagagtaccattccaatctcttaacttgcagttgtgtggaaaactgttttgtaatgaaagatcttcattgggggattgagcagcatttaataaagtctatgtttgtattttgccttaaaaaaaaaaaaaaaaaa

SEQ ID NO: 397882 - DNA, 1000 bp, Homo Sapiens; identical to SEQ ID NO: 287237

SEQ ID NO: 397883 - DNA, 662 bp, Homo Sapiens
gggggggggagcacaaagttgggagtgacaccagagcctcctgcaagatgcttctgattctgctgtcagtggccctgctggccttcagctcagctcaggatttaaatgaagatgtcagccaggaagatgttcccctcgtaatatcagatggaggagactctgagcagttcatagatgaggagcgtcagggaccacctttgggaggacagcaatctcaaccctctgctggtgatgggaaccaggatgatggccctcagcagggaccaccccaacaaggaggccagcagcaacaaggtccaccacctcctcagggaaagccacaaggaccaccccaacagggaggccatccccctcctcctcaaggaaggccacaaggaccaccccaacagggaggccatccccgtcctcctcgaggaaggccacaaggaccaccccaacagggaggccatcagcaaggtcctcccccacctcctcctggaaagccccagggaccacctccccaagggggccgcccacaaggacctccacaggggcagtctcctcagtaatccaggattcaatgacaggaagtgaataagaagataacagtgtttcaaatgccgtgaaacatggcatcatgctctaacttcagtataccaataaaacaatcagcttgcaatttc

SEQ ID NO: 397884 - DNA, 1000 bp, Homo Sapiens
tcttttggactttaaaagcattgatgatgaagtagtggagcagagatctggttcctcaacacctcagcgttcctgttctgctgctggcttacacagaccaagatcaagttttgattccacaactgcagagagccattcactttctggctctctcactggctctttgaccggaagcacattgtcttcagtttcacctcgcctgggcagtcacaccatggatttttttgaaatgtgtgccagtctgattactactttagcccgttgatctgtctctagtttctttctgttattgcactatgaaaatcagttatattctttaaatttttatcttacttttggataatatccactgcaatactaattgagaaacatgaattatttccaggggcacacaatgctattgaaattactgaaaacaaaatatctgacatcttatttacttgtagaaatctgtaattctattgtgcctatgataaattcacataggcaatatctttaataggttaatatcaatgaagatttttaattacaataatgagttcactacagacgattaacacaccacactggcgaaccatctcaatgtaagggtggtttggcaacacctccttgctttgctgtttggtgtaggtaaatctagtttacttcctaaatttcagtaggctttatgctgtgtttatgcccccaatttattttaacaaaagaagattaaaaagtaaaagaaccacgagtaagatattatttaaatgttgaaatcttaaaaacctgcctccaagatttcagaagccaagtttttctaacagtatttgtacaaatactgcctagtgtattcaacagaaggactgtggtcatgtaacaggtaaccacaattttcaggtttcttaaaaacagctgtaactaactcaggatttttatcttgagatttccctgaataatatatttatcttaagagccttcaagtttcaaattaatattggaacatctggaattgcaacaactt

SEQ ID NO: 397885 - DNA, 1000 bp, Homo Sapiens
aaacctacattctcgatttttcttaagccaaaaatgaatgctaactcctttgccagtaaaattctgggaaacagggactgaggccacacatcatttccagtcatctgtgtgtttttaaggccagccacttgtccctgttgaggcctggctatggaactaaatacagtgttggtcttgcctgtccttcaaaatcaacaacagattgtctctcggctccagggaggtgtcatttctatagaaattagaagctttctgatttctagatgaggttttacaattgtttcttacagtcatgtgcactaagtactctttttgtaagcagaggtggctggctctgcagccttaaggccattttttaagtcaccacgtctagaagtcacatgaactctgctcagcaataatctgttctcagaacagacttttcaacctgctgccggatttctccattcagctggatgatcctcaggactgaccagttagctggcaggttgtccagctttttattccagtcataataggtgacagtgttaaccgtgaaaacttgagaggcactctgccctcttccctataaaatcacacagcgtgattttacaaggtcccgtggcaccttgctcaggacctctgcccctagttagcaagactgcagcagttgctgttgcttattctgaaaggaatgtagaacttgacagcagccttctgagtctgggtcaggaagatgtcctttggaccaaagcagacttctttatacgcagctcagtttcccgggagtcgccacagatgtacccactagcccaggttgctgtgagtcagcggaagctcccgttatgccctttgctcctggtgggagagggaggagtgagctccctgggttccagtatttacttggtatacctgagtttgggggtacccttttttgtgacttttcaaaacagtgaattactgtcaccttgatggacaagtttcaataaaactttgtaaaaataattggaaaaaaaaaaaa

SEQ ID NO: 397886 - DNA, 1000 bp, Homo Sapiens; identical to SEQ ID NO: 221832

SEQ ID NO: 397887 - DNA, 1000 bp, Homo Sapiens; identical to SEQ ID NO: 287240

SEQ ID NO: 397888 - DNA, 1000 bp, Homo Sapiens; identical to SEQ ID NO: 287241

SEQ ID NO: 397889 - DNA, 1000 bp, Homo Sapiens; identical to SEQ ID NO: 287242

SEQ ID NO: 397890 - DNA, 1000 bp, Homo Sapiens
ggaagccacggtgaagcccgagctgacggcagcgctgagggacatccgcgcgcagtacgagagcatcgccgcgaagaacctgcaggaggcggaggagtggtacaagtccaagtacgcggacctgtccgacgctgccaaccggaaccacgaggccctgcgccaggccaagcaggagatgaacgagtcccgacgccagatccagagtctaacgtgcgaggtggacgggctgcgcggcacgaacgaggcgctgctcaggcagttgagagagctggaggagcagttcgccctggaggcggggggctaccaggcgggcgctgcgcggctcgaggaggagctgcgacagctaaaagaggagatggcgcggcacctgagggagtaccaggagctcctcaacgtcaagatggccctggacatcgagatcgccacctaccgcaagctgctggagggcgaggagagccggatctccgtgcccgtccattcttttgcctccttaaatataaagacgactgtgcctgaggtggagcctccccaggacagccacagccggaagacggttctgatcaagaccattgagacccggaatggggaggtggtgacagagtcccagaaggagcagcgcagtgagctggacaagtcttctgcccacagttactgaaccccttggtccggagccttgactctgccctaggcctgctcaaagcccaaaccctaagaccactcctgaattgtctcctctccctctgcatgtgtctaaaaggtggtaccaggcatccctttcctggcttatggccaagccctacccggccagcagtcgctgggcctctccctgccctgacacttgatgtgacctatgtgcttcccttttcatgtcccgataagaagccaatgatcccccctcaggacaaatctactccagccacgatgagaagtgggtgagccagggtctgagtttcacatttgaaccaaataaaatgctgtcaagagaaaactctccagtgca

SEQ ID NO: 397891 - DNA, 1000 bp, Homo Sapiens; identical to SEQ ID NO: 287244

SEQ ID NO: 397892 - DNA, 1000 bp, Homo Sapiens; identical to SEQ ID NO: 287245

SEQ ID NO: 397893 - DNA, 1000 bp, Homo Sapiens; identical to SEQ ID NO: 287246

SEQ ID NO: 397894 - DNA, 1000 bp, Homo Sapiens; identical to SEQ ID NO: 116583

SEQ ID NO: 397895 - DNA, 1000 bp, Homo Sapiens; identical to SEQ ID NO: 287248

SEQ ID NO: 397896 - DNA, 1000 bp, Homo Sapiens; identical to SEQ ID NO: 221834

SEQ ID NO: 397897 - DNA, 1000 bp, Homo Sapiens; identical to SEQ ID NO: 221836

SEQ ID NO: 397898 - DNA, 1000 bp, Homo Sapiens; identical to SEQ ID NO: 287252

SEQ ID NO: 397899 - DNA, 1000 bp, Homo Sapiens; identical to SEQ ID NO: 287253

SEQ ID NO: 397900 - DNA, 1000 bp, Homo Sapiens; identical to SEQ ID NO: 116586

SEQ ID NO: 397901 - DNA, 762 bp, Homo Sapiens
gttcgccgcctctcccaccggcccgatgagctgcagcggctccggcgcggaccccgaggcggcgccggcctccgccgcctcggccccgggccccgcgcccccggtctcggctcccgccgcgctgccctccagcaccgccgcggagaacaaggccagccccgcggggacagcggggggacctggggctggagcagctgctgggggcacgggacccttggcggcgcgggccggggagccagctgagcggcgtggggcggctccggtgtcggcgggtggcgcggcgcccccggagggggccatatctaacggggtttacgtactgccgagcgcggccaacggagacgtgaagcccgtggtgtccagcacgcctttggtggacttcttgatgcagctggaagattacacgcctacgatcccagatgcagtgactggttactacctgaaccgtgctggctttgaggcctcagacccacgcataattcggctcatctccttagctgcccagaaattcatctcagatattgccaatgatgccctacagcactgcaaaatgaagggcacggcctccggcagctcccggagcaagagcaaggaccgcaagtacactctaaccatggaggacttgacccctgccctcagcgagtatggcatcaatgtgaagaagccgcactacttcacctgagccacccaacctaaatgtacttatctgtccccatgtccccacaccagcctgttttcataataaactttattgtgacaggc

SEQ ID NO: 397902 - DNA, 1000 bp, Homo Sapiens; identical to SEQ ID NO: 287255

SEQ ID NO: 397903 - DNA, 1000 bp, Homo Sapiens
caaaaaaatgtgtacaagagataatgcaaacaggattataaagacaacattgcaacaagaaaagccagatttctgctttttggaagaagatcctggaatatgtcgaggttatattaccaggtatttttataacaatcagacaaaacagtgtgaacgtttcaagtatggtggatgcctgggcaatatgaacaattttgagacactggaagaatgcaagaacatttgtgaagatggtccgaatggtttccaggtggataattatggaacccagctcaatgctgtgaataactccctgactccgcaatcaaccaaggttcccagcctttttgaatttcacggtccctcatggtgtctcactccagcagacagaggattgtgtcgtgccaatgagaacagattctactacaattcagtcattgggaaatgccgcccatttaagtacagtggatgtgggggaaatgaaaacaattttacttccaaacaagaatgtctgagggcatgtaaaaaaggtttcatccaaagaatatcaaaaggaggcctaattaaaaccaaaagaaaaagaaagaagcagagagtgaaaatagcatatgaagaaatttttgttaaaaatatgtgaatttgttatagcaatgtaacattaattctactaaatattttatatgaaatgtttcactatgattttctatttttcttctaaaatcgttttaattaatatgttcattaaattttctatgcttattgtacttgttatcaacacgtttgtatcagagttgcttttctaatcttgttaaattgcttattctaggtctgtaatttattaactggctactgggaaattacttattttctggatctatctgtattttcatttaactacaaattatcatactaccggctacatcaaatcagtcctttgattccatttggtgaccatctgtttgagaatatgatcatgtaaatgattatctcctttatagcctgtaaccagattaagcccccc

SEQ ID NO: 397904 - DNA, 1000 bp, Homo Sapiens; identical to SEQ ID NO: 116587

SEQ ID NO: 397905 - DNA, 1000 bp, Homo Sapiens; identical to SEQ ID NO: 221839

SEQ ID NO: 397906 - DNA, 1000 bp, Homo Sapiens; identical to SEQ ID NO: 116588

SEQ ID NO: 397907 - DNA, 1000 bp, Homo Sapiens; identical to SEQ ID NO: 116589

SEQ ID NO: 397908 - DNA, 1000 bp, Homo Sapiens
tctctcgtcctatttcggcatcctatccgccataccaggcaacggggccaccaaatacttcctacatgccaggcatgccaggtggaatctctccatacccatccggataccctcccaatcccagtggttacccaggctgtccttacccacctggtggtccatatcctgccacaacaagttctcagtacccttctcagcctcctgtgaccactgttggtcccagtagggatggcacaatcagcgaggacaccatccgagcctctctcatctctgcggtcagtgacaaactgagatggcggatgaaggaggaaatggatcgtgcccaggcagagctcaatgccttgaaacgaacagaagaagacctgaaaaagggtcaccagaaactggaagagatggttacccgtttagatcaagaagtagccgaggttgataaaaacatagaacttttgaaaaagaaggatgaagaactcagttctgctctggaaaaaatggaaaatcagtctgaaaacaatgatatcgatgaagttatcattcccacagctcccttatacaaacagatcctgaatctgtatgcagaagaaaacgctattgaagacactatcttttacttgggagaagccttgagaaggggcgtgatagacctggatgtcttcctgaagcatgtacgtcttctgtcccgtaaacagttccagctgagggcactaatgcaaaaagcaagaaagactgccggtctcagtgacctctactgacttctctgataccagctggaggttgagctcttcttaaagtattcttctcttccttttatcagtaggtgcccagaataagttattgcagtttatcattcaagtgtaaaatattttgaatcaataatatattttctgttttcttttggtaaagactggcttttattaatgcactttctatcctctgtaaactttttgtgctgaatgttgggactgctaaataaaatttgttgcataaaaaaaaaaaaaaaaaa

SEQ ID NO: 397909 - DNA, 1000 bp, Homo Sapiens; identical to SEQ ID NO: 221841

SEQ ID NO: 397910 - DNA, 965 bp, Homo Sapiens; identical to SEQ ID NO: 25424

SEQ ID NO: 397911 - DNA, 1000 bp, Homo Sapiens; identical to SEQ ID NO: 116590

SEQ ID NO: 397912 - DNA, 1000 bp, Homo Sapiens
acaaatctgttggacgagctcccccagtcagtgcttaaatgggctccttctggaagcagttgctgtgaaatagcccaatttttggtatgtgctcatagtttagcatatgatgaaaagccaaactatcaagccctcaagaaaattttgaaccctcatggaatacctttaggaccactggacttttccacaaaaggacagagtataaatgtccatactccaaacagtcaaaaagttgattcacaaaaggctgcaacaaagcaagtcaacaaggcacacaataggttaatcgaaaaaaaagtccacagtgagagaagcgctgagtcctgtgcaacatggaaagtgcagaaagaggagaaactgattggattgatgaacaatgaagcagctcaggaaagcacaaggagaagacagaaatatcaagagtctcaagaacctttgaatgaagtaaacagtttcccacaaaaaatcagctatacacaattcccaaactcattttatgagcctcatcaagattttaccagtccagatatattcaagaagtcaagatctccatcttggtataaatacacttccacagtcagcacggggatcacagacttagaaagttcaactggactttggcctacaatttcccagtttactcttagtgaagagacaaacgcagatgtttattattatcgcatcatcatacctgtccttttgatgttagtatttcttgctttattttttctctgaagatgataccaaaattccttttgataattttttaagtttccagctcttcaccgaaatgttgtattcttatttcagtgtttccttccagacatttttaaggtaattggctttaaaaagagaacatattttaacaaagtttgtggacactctaaaaaataaaattgctttgtactagaaaaaaaaaaaaaaaaaaaaaaaaaaaaaaaaaaaaaaaaaaaaaaaaaaaaaaaaaaaaaaaaaaaaaaaaaaaaaaaaaaaaaaaaaa

SEQ ID NO: 397913 - DNA, 1000 bp, Homo Sapiens; identical to SEQ ID NO: 221843

SEQ ID NO: 397914 - DNA, 1000 bp, Homo Sapiens; identical to SEQ ID NO: 287264

SEQ ID NO: 397915 - DNA, 509 bp, Homo Sapiens
attctttccccaagtctctatggtagcgtcagcgtcggaggcggtagtgacggtggcgtttccttgaggaagagtgagggttccaacttttctgcttatctgggaggtgttgggcgcggacagtcgagatgtcagagaaaaagcagccggtagacttaggtctgttagaggaagacgacgagtttgaagagttccctgccgaagactgggctggcttagatgaagatgaagatgcacatgtctgggaggataattgggatgatgacaatgtagaggatgacttctctaatcagttacgagctgaactagagaaacatggttataagatggagacttcatagcatccagaagaagtgttgaagtaacctaaacttgacctgcttaatacattctagggcagagaacccaggatgggacactaaaaaaatgtgtttatttcattatctgcttggatttatttgtgtttttgtaacacaaaaaataaatgttttgatataaaaaaaaaaaaa

SEQ ID NO: 397916 - DNA, 1000 bp, Homo Sapiens; identical to SEQ ID NO: 221846

SEQ ID NO: 397917 - DNA, 1000 bp, Homo Sapiens; identical to SEQ ID NO: 287267

SEQ ID NO: 397918 - DNA, 1000 bp, Homo Sapiens
ctagaggcttcttggtgaagagcatttttgtgaagtgggttctgcaaggagcctataaagccaagggtggtgtccatttctgggaatggttaaacacaaaaggctgatagctggtatcacatagttggagtcagtgcataattccaagtggctttttttttttttggcacggggactgatcaggaagatatattcctgcataactcaatctgaaccaaggattgtagtttagttttcctccttgccttcccttctgtgtgaccgaccccttggccaaaaaaaaaacaaaaagcaaaaaacaaaaacctaccctgttctggtttttttcctccctttagttccacccccaacccccattccctggtgtccttcttagagatgaagaaataataaggaaacatctttcatagccacattaaataagagaaactgatatacattatttttttctttttaaagatgacttataagaaccctgaaatttatataggtgagacaatagaaataaaaagatcttcagccaggcctttctgaaggagttattctgctaaaaatggtcttagttgtctgaaaagccagctcttgaacctcttcacaacagtatcaacactggcttctcccggttcattttatgcgtgcgagaagtcagtggtaactgctgcagggcttaatacattagtggtaactggtttaaaaaacaaagactgtaagcctgtgtgtgccactgtttgcttcaacagtatatcctactaataagcctcacctatttaatccaatgagttttaaatctaaatctcattcccttcttctttccctaccttttttttctttttttcttaaaaaaatattttgtgttattaacagaaattcatatttggtgtggcttaacggtatttcagaaggtcatcagattgtgagactgcttccttgaaacatttttgtgctattgttttaaaaaaataattaaaaaacagttggcgttaataaaaatgtcaatgtg

SEQ ID NO: 397919 - DNA, 1000 bp, Homo Sapiens; identical to SEQ ID NO: 116591

SEQ ID NO: 397920 - DNA, 1000 bp, Homo Sapiens; identical to SEQ ID NO: 116592

SEQ ID NO: 397921 - DNA, 1000 bp, Homo Sapiens; identical to SEQ ID NO: 221847

SEQ ID NO: 397922 - DNA, 1000 bp, Homo Sapiens; identical to SEQ ID NO: 287271

SEQ ID NO: 397923 - DNA, 1000 bp, Homo Sapiens; identical to SEQ ID NO: 116593

SEQ ID NO: 397924 - DNA, 1000 bp, Homo Sapiens; identical to SEQ ID NO: 116594

SEQ ID NO: 397925 - DNA, 1000 bp, Homo Sapiens; identical to SEQ ID NO: 221850

SEQ ID NO: 397926 - DNA, 1000 bp, Homo Sapiens
tctcgccccaccagaagttgtcatggacccagctttggcagcacagtatgagcacgacttagaggttgctcagacaactgctctcccggatgaggatgatgacctgtgagaatgaagctggagcccagcgtcagaagtctagttttataggcagctgtcctgtgatgtcagcggtgcagcgtgtgtgccacctcattattatctagctaagcggaacatgtgctttatctgtgggatgctgaaggagatgagtgggcttcggagtgaatgtggcagtttaaaaaataacttcattgtttggacctgcatatttagctgtttggacgcagttgattccttgagtttcatatataagactgctgcagtcacatcacaatattcagtggtgaaatcttgtttgttactgtcattcccattccttttctttagaatcagaataaagttgtatttcaaatatctaagcaagtgaactcatcccttgtttataaatagcatttggaaaccactaaagtagggaagttttatgccatgttaatatttgaattgccttgcttttatcacttaatttgaaatctattgggttaatttctccctatgtttatttttgtacatttgagccatgtcacacaaactgatgatgacaggtcagcagtattctatttggttagaagggttacatggtgtaaatattagtgcagttaagctaaagcagtgtttgctccaccttcatattggctaggtagggtcacctagggaagcacttgctcaaaatctgtgacctgtcagaataaaaatgtggtttgtacatatcaaatagatattttaagggtaatattttcttttatggcaaaagtaatcatgttttaatgtagaacctcaaacaggatggaacatcagtggatggcaggaggttgggaattcttgctgttaaaaataattacaaattttgcactttttgtttgaatgttagatgcttagtgtgaagttgatacgcaagccg

SEQ ID NO: 397927 - DNA, 1000 bp, Homo Sapiens; identical to SEQ ID NO: 287278

SEQ ID NO: 397928 - DNA, 1000 bp, Homo Sapiens
agcaggccaagtattgcctctctgcaatagacagctactgtcaatacatgctgtaatttgacattctgggtcacagatataaggtatttaaaatctatttatgctttatagagaaaccagacattaaaacttcatgcactacttatttcgaattactgtaccttatccaaatttacacctagctattaggatcttcaacccaggtaacaggaataattctgtggtttcatttttctgtaaacaactgaaagaataattagatcatattctagtatgttctgaaatatctttaagactgatcttaaaaactaacttctaagatgatttcatcttctcatagtatagagtttactttgtacacgtttgaaaccaactactgtagaagatgaggaatctattgtaattttttgctttattttcatctgccagtggacttatttgaaattttcactttagtcaaattattttttgtattagtttttgatgcagacataaaaatagcaatcattttaaattgtcaaaatttccagattactggtaaaaattatttgaaaacaaacttatgggtaataaaggctagtcagaaccctataccataaagtgtagttaccatacagattaatatgtagcaaaaatgtatgcttgatatttctcaactgtgttaatttttctgctgtattccagctgaccaaaacaatattaagaatgcatctttataaatgggtgctaattgataatggaaataatttagtaatggactatacaggatgttaataatgaagccatatgtttatgtctggatttaaaaattttaaacaatcatttactatgtcatttttctttaccttgaagaacataaactgttatttcacttctacaaatcagcaagatattatttatggcaagaaatattccattgaaatattgtgctgtaacatgggaaagtgtaaatgtttttcatggtttctatcaatgtgaaataaaatttaattctgaaaaa

SEQ ID NO: 397929 - DNA, 1000 bp, Homo Sapiens
ggaaggaaatttgtgattagaagccgcgctgttcttatttaagagcgttagcgcaacttccggtattgttgcaagatggccgcgcccagtgatggattcaagcctcgtgaacgaagcggtggggagcaggcacaggactgggatgctctgccacccaagcggccccgactaggggcaggaaacaagatcggaggccgtaggcttattgtggtgctggaaggggccagtctggagacagtcaaggtagggaagacatatgagctactcaactgtgacaagcacaagtctatattgttgaagaatggacgggaccctggggaagcgcggccagatatcacccaccagagtttgctgatgctgatggatagtcccctgaaccgagctggcttgctacaggtttatatccatacacagaagaatgttctgattgaagtgaatccccagacccgaattcccagaacctttgaccgcttttgtggcctcatggttcaacttttacacaagctcagtgttcgagcagctgatggcccccagaagcttttgaaggtaattaagaatccagtatcagatcactttccagttggatgtatgaaagttggcacttctttttccatcccggttgtcagtgatgtgcgtgagctggtgcccagcagtgatcctattgtttttgtggtaggggcctttgcccatggcaaggtcagtgtggagtatacagagaagatggtgtccatcagtaactaccccctttctgctgccctcacctgtgcaaaacttaccacagcctttgaggaagtatggggggtcatttgacagtagtagaacctgttctgaaaccagaaactgttgatgtcacatcctttgaccctggtctgagctgactgctggaagatgatctttctgcactgagactgtggagtttggggaagccaaggctgtacatttgctatttgtttatcctatgaatactgttcttgcaaaaaaaaaaaaaaaaaaaaaaaaa

SEQ ID NO: 397930 - DNA, 1000 bp, Homo Sapiens; identical to SEQ ID NO: 116598

SEQ ID NO: 397931 - DNA, 1000 bp, Homo Sapiens; identical to SEQ ID NO: 116599

SEQ ID NO: 397932 - DNA, 1000 bp, Homo Sapiens; identical to SEQ ID NO: 221851

SEQ ID NO: 397933 - DNA, 1000 bp, Homo Sapiens
gcgtgaccccaaaaaacagctatgccaccaccgagaacaagactctgcctcgctcgagctccatggcagccggcctggagcgcaatggccgtatgcgggtgaaggccatcttctcccacgctgctggggacaacagcaccctcctgagcttcaaggagggtgacctcattaccctgctggtgcctgaggcccgcgatggctggcactacggagagagtgagaagaccaagatgcggggctggtttcccttctcctacacccgggtcttggacagcgatggcagtgacaggctgcacatgagcctgcagcaagggaagagcagcagcacgggcaacctcctggacaaggacgacctggccatcccaccccccgattacggcgccgcctcccgggccttccccgcccagacggccagcggcttcaagcagaggccctacagtgtggccgtgcccgccttctcccagggcctggatgactatggagcgcggtccatgagcagcgccgatgtggaagtggccagattctgagccgcctgactagagttagaatccctttgcccacgtccagctgaagccgacagtgaccaacgacaggtctgcccccctcctcagctgatggccacatctgcagtgctgcccatctggtggcttcccccgcccttcccatgtagcctgttctgtcatcatctgtgcgttcctgtgtagagaacatccaggccccggctgcctggtcttgccccacttgagtctggcctggactggatcccagctgttctaggcagggccgggcagagtggggcgcaggcccctgaagggcgagacccagtggctgggctgcccagggctgaggggccgcctcttgagggtacacgcctctggtcacatggccatggagccttgggtacccctgagttaagggaggacatttggccagctggtggctgggaggggagcctggctgccctgctgcttctcctgcctaataaacaggcttctcctgc

SEQ ID NO: 397934 - DNA, 1000 bp, Homo Sapiens
cggggccgggcccgatctcgggcgggaaccgagcgcagagccggtagcgggaaggatgaccacgctcacacgacaagacctcaactttggccaagtggtggccgctgtgctctgcgagttcctggaggtggctgtgcatctcatcctctacgtgcgcgaggtctaccccgtgggcatcttccagaaacgcaagaagtacaacgtgccggtccagatgtcctgccacccggagctgaatcagtatatccaggacacgctgcactgcgtcaagccactcctggagaagaatgatgtggagaaagtggtggtggtgattttggataaagagcaccgcccagtggagaaattcgtctttgagatcacccagcctccactgctgtccatcagctcagactcgctgttgtctcatgtggagcagctgctccgggccttcatcctgaagatcagcgtgtgcgatgccgtcctggaccacaaccccccaggctgtaccttcacagtcctggtgcacacgagagaagccgccactcgcaacatggagaagatccaggtcatcaaggatttcccctggatcctggcggatgagcaggatgtccacatgcatgacccccggctgataccactaaaaaccatgacgtcggacattttaaagatgcagctttacgtggaagagcgcgctcataaaggcagctgagggggcacctgccaccccactgatgcccaaactgtcagactttgggggatccccgcctagggcagtgctgcatggctgccctgattccaagtgctcttatcgcctctgtgtgtggatcgcccgccccagcccggggccgctcaggtctgcttggaggatgcctcccccaggagggcagtgagggatgccgcaacctcgacttctcagcctcctggggttccgccggccaacactgtctgtctcaaatactgtgctgtgagttgtttcaataaaggggcccaagggctgggctgaaaaaaaaaaaaaaaa

SEQ ID NO: 397935 - DNA, 1000 bp, Homo Sapiens; identical to SEQ ID NO: 116600

SEQ ID NO: 397936 - DNA, 1000 bp, Homo Sapiens; identical to SEQ ID NO: 221852

SEQ ID NO: 397937 - DNA, 1000 bp, Homo Sapiens; identical to SEQ ID NO: 287283

SEQ ID NO: 397938 - DNA, 1000 bp, Homo Sapiens; identical to SEQ ID NO: 293667

SEQ ID NO: 397939 - DNA, 1000 bp, Homo Sapiens; identical to SEQ ID NO: 287285

SEQ ID NO: 397940 - DNA, 1000 bp, Homo Sapiens
tgctcacggagatcctccgggtggacccggcctttgacaaggaccggtttctgaaacagtgcgagaacgacatcatccccaatgtcctggaggccatgatttctggagagcttgacattctcaaagactggtgctatgaagctacttacagccagctggcccaccccatccagcaggccaaggcactgggtctccagttccattctcgcatcctagacattgacaacgtcgacctggccatgggcaagatgatggagcaggggccggtgctgatcatcaccttccaggcacagctggtgatggtggtcaggaaccccaaaggcgaggtggtggagggtgacccggacaaggtgctgcggatgctgtacgtgtgggcgctctgccgagaccaggacgagctcaacccctacgcggcctggcggctcctggacatctcggcctccagcaccgagcagattctctgagtgtggtgccggagccaggtagccccggcctgggtcatcaggcacagaggcaccgcaacaccacctgcggcaactccagacctctgggaacaagactgcgggctctgcccccagctctgccaggacggctgcaagaccagctggcccgggaggggacaacgggctgttgcgggtgcgcggcagctggagacactcccccgcagggccaacccctgccctgttgctctgccctgcaggggtcccggcgcctggtcacctggggtgcacacaggtcacacagtgccaagaggccccagggcccagggactccccccacagcagggtgggacccgggacccgcggctcagtggcccgctagccacgtcagccaagccactttaggtccatttttttattttaacagtgctcttccatcttgtgcataagcctgagatttggaaagaataaaacaccgaattgcagaagagcaaaaaaaaaaaaaaaaaaaaaaaaaaaaaaaaaaaaaaaaaaaaaaaaaaaaaaaaaaaaaaaaaaaa

SEQ ID NO: 397941 - DNA, 1000 bp, Homo Sapiens; identical to SEQ ID NO: 116603

SEQ ID NO: 397942 - DNA, 1000 bp, Homo Sapiens; identical to SEQ ID NO: 116604

SEQ ID NO: 397943 - DNA, 1000 bp, Homo Sapiens; identical to SEQ ID NO: 287288

SEQ ID NO: 397944 - DNA, 1000 bp, Homo Sapiens; identical to SEQ ID NO: 221854

SEQ ID NO: 397945 - DNA, 1000 bp, Homo Sapiens; identical to SEQ ID NO: 116605

SEQ ID NO: 397946 - DNA, 1000 bp, Homo Sapiens; identical to SEQ ID NO: 116606

SEQ ID NO: 397947 - DNA, 1000 bp, Homo Sapiens
tttttccctcaggtctgagtagcattgccttaaatcttatccagttagaacattgatttatttacatgatgttcagattttccagtgaaaaatacccttctgaacaaaacatgtacttactctccgaaaggcatctatctgtgctattgcaaacactccttgagattttaggggaattctaatgttgtaccctttcgtggcagctttgactgttggcatagccatttgttatgtagtggtagcgactttcctgctatgcaggaatccctcccatgacgtgtatgttttacatgatgtgtgcctcttcacgcagtaaatagtttcttgttaatgtatgtttgaggagtttgaacgtcagtgtcacttacccacaaagttattcaagttgtaaaaggttataaataatttaacaactaccttttttattctgtcgggttactgacctcactttatgtaaatacttcgcatgacaaattcagtaactcgtctatttcagcatgcataagacttttcactagggaaactgataaagcttgagtcaactaaatctgccttcatactttatcaaggggaaccaagcctgctgtgcttacatcagcatctggaagactttcctctcctctaatctgtgtacacatctccaagcaaggaagaaaaaacaaactctgctcagacgcctatgaaacacctgaatgaactttgatgaagtacagtctgagttaccatcatgcacaagtagaactgctcttggacttgttttcctgttgtttgtggaacctacgcgtttgaatggcttgaacgttgcatcttttaaagttattttttaaggtttcttggcatttatcctagttgtccgtgtttggcaatgtgctgttaaagtaatagacttttaatctttatgtattttttgttttctctggagtacttggacagatgttatagtggtttcttttaggaaaatctgtcattaaaaaagttatagccttgcaaataaccactc

SEQ ID NO: 397948 - DNA, 1000 bp, Homo Sapiens
atcctggaaccagacaagcaagaagctttgattgaaagcctatgtgaaaagctggtcaaatttcgcgaaggtgaacgcccgtctctgagactgcagttgttaagcaaccttttccacgggatggataagaatactcctgtaagatacacagtgtattgcagccttattaaagtggcagcatcttgtggggccatccagtacatcccaactgagctggatcaagttagaaaatggatttctgactggaatctcaccactgaaaaaaagcacacccttttaagactactttatgaggcacttgtggattgtaagaagagtgatgctgcttcaaaagtcatggtggaattgctcggaagttacacagaggacaatgcttcccaggctcgagttgatgcccacaggtgtattgtacgagcattgaaagatccaaatgcatttctttttgaccaccttcttactttaaaaccagtcaagtttttggaaggcgagcttattcatgatcttttaaccatttttgtgagtgctaaattggcatcatatgtcaagttttatcagaataataaagacttcattgattcacttggcctgttacatgaacagaatatggcaaaaatgagactacttacttttatgggaatggcagtagaaaataaggaaatttcttttgacacaatgcagcaagaacttcagattggagctgatgatgttgaagcatttgttattgacgccgtaagaactaaaatggtctactgcaaaattgatcagacccagagaaaagtagttgtcagtcatagcacacatcggacatttggaaaacagcagtggcaacaactgtatgacacacttaatgcctggaaacaaaatctgaacaaagtgaaaaacagccttttgagtctttctgatacctgagtttttatgcttataatttttgttctttgaaaaaaaagccctaaatcatagtaaaacattataaactaaaaaaaaaaaaaaaaaaaaaaaa

SEQ ID NO: 397949 - DNA, 1000 bp, Homo Sapiens; identical to SEQ ID NO: 287293

SEQ ID NO: 397950 - DNA, 1000 bp, Homo Sapiens; identical to SEQ ID NO: 116607

SEQ ID NO: 397951 - DNA, 879 bp, Homo Sapiens
ctcctcacagaagcctggagctgggcatccaagaagaagcagcctcatttgttttctggtgtcatcgtaggtggccacctatggcttttgggaatgtaaaaagggcagctctctggcatgttcctgactgaggatctcataacatttaacttgaggaacttcctccttttccagctttgggagtcaagcttctcacctggggcgggtgggttctgcaccaccctcccaccctccttcctccgtgtggacgatagagccacatccagcaccacggacagctcccgggcgccttcatctcctcgtcctccaggcagcacaagccattgtggaatctccaccaggtgtacagaacggtgcctctgcgtcctgccactcaggacctctcaagtccccgatgtgatggctcctcagcatgatcaggagaaattccatgatcttgcttattcctgtcttgggaagtccttctccatgtctaaccaagatctatatggctatagcaccagctctttggctcttggcttggcatggctaagttgggagaccaaaaagaagaatgtacttcatctggttgggctggattccctctgataagccttcccagttgactgaaagatgaggctaggctctagcaagttgaagtcaaaccagctccttcaagaagctttgagcagaatgaagtggggaggacccagcttccagcccaggaagcccactgtacctggagccatctgggataagactttgacccatgactcccatatccacagcctgtccatcctagcccatcccagtttatcctgtatcatttgagctgggattcccacatcctctgagttggaagtcccatctcaagtcttcaataaagactcttgaatattg

SEQ ID NO: 397952 - DNA, 1000 bp, Homo Sapiens
cagctacctgccttcactgaaatatacctcaggctgagatttggggtgggatagcaggtcagttgatcttctgcaggaaggtgcagcttttccatatcagctcaaccacgccgccagtccattcttaaggaactgccgactaggactgatgatgcattttagctttgagcttttgggggttattctaccaacaaacagtccattggaaagaaaacagtccctggaattaacagatcagaatgttcacactggttaatctttttttaacaatgagcatgaaggtagcagaagctggtgtgtttccagatggttcttctaaccaaactaatttttcactgttgacaagcgaggcaagggttgcactggaccaaaggctgaggcttggccatctagcattccatacaaaattgtttcctataagcattccttttattctctattctatcctgggtctgcctcaaccgtgagataggagagtctctggtactagctgctgtagcagtgcccttcatccagggcagttaatggagtcttggaccctttctttctctgggatccctgcccagcaccttcctatagagatgactttaaaaggaaaaaaaaaaaaaaacccacatgatttcaaggagtctggcattcctgaatccttcttccctgccaggtgcctgtcacctgtcttcactgcctccttttccctgtcatgctcatcagcttatggcttctgtctaagcacctgaacagaggactgaaacctccactgcaggctggttttaggtcttgaattatgtaagaatcttgcacagcactgctaatgtaaatttcagttgtttttccctctaggacaaacacttaccaaaatatgcaacttttttttggtgggaagagagattgtcctgtgatttctacccatttcctgaggcctgtggaaataaacctttatgtacttaaagttatacagaaaatagaataaagttaataccaaacttgaaaaagcggccgc

SEQ ID NO: 397953 - DNA, 1000 bp, Homo Sapiens; identical to SEQ ID NO: 287295

SEQ ID NO: 397954 - DNA, 1000 bp, Homo Sapiens; identical to SEQ ID NO: 116608

SEQ ID NO: 397955 - DNA, 1000 bp, Homo Sapiens
aaagggcccagggcccgaatctcggtggccgctgctccagcgcggcctgcgccatggcctcctccgccgcctcctcggagcatttcgagaagctgcacgagatcttccgcggcctccatgaagacctacaaggggtgcccgagcggctgctggggacggcggggaccgaagaaaagaagaaattgatcagggattttgatgaaaagcaacaggaagcaaatgaaacgctggcagagatggaggaggagctacgttatgcacccctgtctttccgaaaccccatgatgtctaagcttcgaaactaccggaaggaccttgctaaactccatcgggaggtgagaagcacacctttgacagccacacctggaggccgaggagacatgaaatatggcatatatgctgtagagaatgagcatatgaatcggctacagtctcaaagggcaatgcttctgcagggcactgaaagcctgaaccgggccacccaaagtattgaacgttctcatcggattgccacagagactgaccagattggctcagaaatcatagaagagctgggggaacaacgagaccagttagaacgtaccaagagtagactggtaaacacaagtgaaaacttgagcaaaagtcggaagattctccgttcaatgtccagaaaagtgacaaccaacaagctgctgctttccattatcatcttactggagctcgccatcctgggaggcctggtttactacaaattctttcgcagccattgaacttctatagggaagggtttgtggaccagaactttgaccttgtgaatgcatgatgttagggatgtggatagaataagcatattgctgctgtgggctgacagttcaaggatgcactgtatagccaggctgtgggaggagggaggaaagatgaaaaaccacttaaatgtgaaggaacaacagcaacaagaccagtatgatataccaaggtaataaatgctgtttatgacttctttaaaaaaaaaaaaaaa

SEQ ID NO: 397956 - DNA, 1000 bp, Homo Sapiens; identical to SEQ ID NO: 287297

SEQ ID NO: 397957 - DNA, 1000 bp, Homo Sapiens; identical to SEQ ID NO: 287298

SEQ ID NO: 397958 - DNA, 1000 bp, Homo Sapiens; identical to SEQ ID NO: 287299

SEQ ID NO: 397959 - DNA, 1000 bp, Homo Sapiens; identical to SEQ ID NO: 287301

SEQ ID NO: 397960 - DNA, 1000 bp, Homo Sapiens; identical to SEQ ID NO: 287302

SEQ ID NO: 397961 - DNA, 1000 bp, Homo Sapiens; identical to SEQ ID NO: 116610

SEQ ID NO: 397962 - DNA, 1000 bp, Homo Sapiens; identical to SEQ ID NO: 287304

SEQ ID NO: 397963 - DNA, 1000 bp, Homo Sapiens
ctttcaacgactttgtggacatgttttccgtgctctgcgagtcggctccccgagagctcaaggcaaactatgccttcaagatctatgacttcaacactgacaacttcatctgcaaggaggacctggagctgacgctggcccggctcactaagtcagagctggatgaggaggaggtggtgcttgtgtgcgacaaggtcattgaggaggctgacttggacggtgacggcaagctgggctttgctgacttcgaggacatgattgccaaggcccctgacttcctcagcactttccacatccggatctgaggacactgccgaggctgtaggggcctagaagtccaccatcctgccctgcagtcacatgggtgtggcctccaagctccccaggaaagcagtggcagcctctggggtttacaccacaaatatatcctgtggccctttcagcaaaaaaaaaaccttaaccaggaagggggcctgtgaaggttaggacccttcccacagccccgctgtggtccagccccgggacccatggcctctctccaggccctccgcaccccgccccatgccccagtcctttcctactccagaaatgctccccacccccccaaagagggaaaagcagataacccaacaggaggtggtggggtctgacgtgtccaagtgctggcagacaccctggtcacccaggacagagcggaaaaaaaaaaaagaggtcagggttttaacgagctatgcaatctttttccaaaacccaaggttgggctgcttcccacccctgcctgttccccttctcccggcctccttcacaatgtgaagctgtgggtgcagtgggcccaagggctcttgctcctgtctctgcctctgggtcatgagtaccaccctgcctgcctccccaacaccgtggaatcctcactggtgtgctgtccacagatttgtgaactcctggtagtaaaacacttttgcatcccaaaaaaaaaaaaaaaaaaaaaaaaaaaaaaaaa

SEQ ID NO: 397964 - DNA, 905 bp, Homo Sapiens; identical to SEQ ID NO: 287305

SEQ ID NO: 397965 - DNA, 1000 bp, Homo Sapiens; identical to SEQ ID NO: 116612

SEQ ID NO: 397966 - DNA, 1000 bp, Homo Sapiens; identical to SEQ ID NO: 287308

SEQ ID NO: 397967 - DNA, 1000 bp, Homo Sapiens; identical to SEQ ID NO: 287309

SEQ ID NO: 397968 - DNA, 1000 bp, Homo Sapiens; identical to SEQ ID NO: 116613

SEQ ID NO: 397969 - DNA, 1000 bp, Homo Sapiens; identical to SEQ ID NO: 287312

SEQ ID NO: 397970 - DNA, 1000 bp, Homo Sapiens; identical to SEQ ID NO: 116614

SEQ ID NO: 397971 - DNA, 661 bp, Homo Sapiens; identical to SEQ ID NO: 287313

SEQ ID NO: 397972 - DNA, 1000 bp, Homo Sapiens
tcctgggcgtcgatgaggcgggcaggggccccgtgctgggccccatggtctacgccatctgttattgtcccctgcctcgcctggcagatctggaggcgctgaaagtggcagactcaaagaccctattggagagcgagcgggaaaggctgtttgcgaaaatggaggacacggactttgtcggctgggcgctggatgtgctgtctccaaacctcatctctaccagcatgcttgggcgggtcaaatacaacctgaactccctgtcacatgatacagccactgggcttatacagtatgcattggaccagggcgtgaacgtcacccaggtattcgtggacaccgtagggatgccagagacataccaggcgcggctgcagcaaagttttcccgggattgaggtgacggtcaaggccaaagcagatgccctctacccggtggttagtgctgccagcatctgtgccaaggtggcccgggaccaggccgtgaagaaatggcagttcgtggagaaactgcaggacttggatactgattatggctcaggctaccccaatgatcccaagacaaaagcgtggttgaaggagcacgtggagcctgtgttcggcttcccccagtttgtccggttcagctggcgcacggcccagaccatcctggagaaagaggcggaagatgttatatgggaggactcagcatccgagaatcaggagggactcaggaagatcacatcctacttcctcaatgaagggtcccaagcccgtccccgttcttcccaccgatatttcctggaacgcggcctggagtcagcaaccagcctctagcagctgcctctacgcgctctacctgcttccccaacccagacattaaaattgtttaaggagaaccacacgtaggggatgtacttttgggacagaagcaaggtgggagtgtgctctgcagccgggtccagctacttccttttggaaccttaaatagaatgggtgttggttgattaattttatttaaaaaa

SEQ ID NO: 397973 - DNA, 1000 bp, Homo Sapiens; identical to SEQ ID NO: 116615

SEQ ID NO: 397974 - DNA, 1000 bp, Homo Sapiens; identical to SEQ ID NO: 287316

SEQ ID NO: 397975 - DNA, 855 bp, Homo Sapiens
gaggcccggctgcagacctctcccgagaggggaataatccgtgccggccggttccgccatggagccaggtgcaggtcacctcgacggtcaccgcgcggggagcccaagccttcgtcaggctctgtgcgacggaagcgcagtgatgttttccagtaaagaacgcggacgttgcaccgtgatcaattttgtccctttggaggcgccgttacggtccacgccccgctcgcgtcaagtgactgaggcctgtggtggagaaggacgtgccgtgccgctgggttctgagccggagtggtcggtgggtgggatggaggcgaccttggagcagcacttggaagacacaatgaagaatccctccattgttggagtcctgtgcacagattcacaaggacttaatctgggttgccgcgggaccctgtcagatgagcatgctggagtgatatctgttctagcccagcaagcagctaagctaacctctgaccccactgatattcctgtggtgtgtctagaatcagataatgggaacattatgatccagaaacacgatggcatcacggtggcagtgcacaaaatggcctcttgatgctcatatctgttcttcagcagcctgtcataggaactggatcctacctatgttaattaccttatagaactactaaagttccagtagttaggccattcatttaatgtgcattaggcacttttctgtttatttaagagtcaattgctttctaatgctctatggaccgactatcaagatattagtaagaaaggatcatgttttgaagcagcaggtccaggtcactttgtatatagaattttgctgtattcaataaatctgtttggaggaaaaaaaaa

SEQ ID NO: 397976 - DNA, 1000 bp, Homo Sapiens; identical to SEQ ID NO: 116616

SEQ ID NO: 397977 - DNA, 1000 bp, Homo Sapiens
ggaggcgagcgttgggtgtggaacatcattctcaccaccagtctcttctctgtgcctttcttcctgacgtggagtgtggtgaactcagtgcattgggccaatggttcgacacaggctctgccagccacaaccatcctgctgcttctgacggtttggctgctggtgggctttcccctcactgtcattggaggcatctttgggaagaacaacgccagcccctttgatgcaccctgtcgcaccaagaacatcgcccgggagattccaccccagccctggtacaagtctactgtcatccacatgactgttggaggcttcctgcctttcagtgccatctctgtggagctgtactacatctttgccacagtatggggtcgggagcagtacactttgtacggcatcctcttctttgtcttcgccatcctgctgagtgtgggggcttgcatctccattgcactcacctacttccagttgtctggggaggattaccgctggtggtggcgatctgtgctgagtgttggctccaccggcctcttcatcttcctctactcagttttctattatgcccggcgctccaacatgtctggggcagtacagacagtagagttcttcggctactccttactcactggttatgtcttcttcctcatgctgggcaccatctcctttttttcttccctaaagttcatccggtatatctatgttaacctcaagatggactgagttctgtatggcagaactattgctgttctctccctttcttcatgccctgttgaactctcctaccagcttctcttctgattgactgaattgtgtgatggcattgttgccttcccttttgccctttgggcattccttccccagagagggcctggaaattataaatctctatcacataaggattatatatttgaactttttaagttgcctttagttttggtcctgatttttctttttacaattaccaaaataaaatttattaagaaaaaggaaaaaaaaaaaa

SEQ ID NO: 397978 - DNA, 1000 bp, Homo Sapiens
tttttattattctcttaaaaatcaaagatgatctctatcactttgccacctgtttgatgtgcagtggaaactggttaagccagttgttcatacttcctttacaaatataaagatagctgtttaggatattttgttacatttttgtaaatttttgaaatgctagtaatgtgttttcaccagcaagtatttgttgcaaacttaatgtcattttccttaagatggttacagctatgtaacctgtattattctggacggacttattaaaatacaaacagacaaaaaataaaacaaaacttgagttctatttaccttgcacattttttgttgttacagtgaaaaaaatggtccaagaaaatgtttgccatttttgcattgtttcgtttttaactggaacatttagaaagaaggaaatgaatgtgcattttattaattccttaggggcacaaggaggacaataatagctgatcttttgaaatttgaaaaacgtctttagatgaccaagcaaaaagactttaaaaaatggtaatgaaaatggaatgcagctactgcagctaataaaaaattttagatagcaattgttacaaccatatgcctttatagctagacattagaattatgatagcatgagtttatacattctattatttttcctccctttctcatgtttttataaataggtaataaaaaatgttttgcctgccaattgaatgatttcgtagctgaagtagaaacatttaggtttctgtagcattaaattgtgaagacaactggagtggtacttactgaagaaactctctgtatgtcctagaataagaagcaatgatgtgctgcttctgatttttcttgcattttaaattctcagccaacctacagccatgatctttagcacagtgatatcaccatgacttcacagacatggtctagaatctgtacccttacccacatatgaagaataaaattgattaaaggtttttttggtgagactttatttaaaaaaaaa

SEQ ID NO: 397979 - DNA, 1000 bp, Homo Sapiens; identical to SEQ ID NO: 287318

SEQ ID NO: 397980 - DNA, 1000 bp, Homo Sapiens; identical to SEQ ID NO: 287319

SEQ ID NO: 397981 - DNA, 1000 bp, Homo Sapiens
agcagggccaaaccctcttccttgtctcccctctccccacttattctcctatttggaatcttcaacttctgaagtgaatgtggatacagcgccactcctgccccctcttggccccatccatggactcttgcctcggtgcagtctccactcttgacccccacctcctactgtcttgtctgtgggacagttgcctccccctcatctccagtgactcagcctacacaagggaggggaacattccatccccagtggagtctcttcctatgtggtcttctctacccctctaccccacattggccagtggactcatccattctttggaacaaatcccccccactccaaagtccatggattcaatggactcatccatttgtgaggaggacttctcgccctctggctggaagctgatacctgaagcactcccaggctcatcctgggagctttcctcagcaccttcaccttccctcccagtgtagcctcctgtcagtgggggctggacccttctaattcagaggtctcatgcctgcccttgcccagatgcccagggtcgtgcactctctgggataccagttcagtctccacatttctggttttctgtccccatagtacagttcttcagtggacatgaccccacccagccccctgcagccctgctgcaccatctcaccagacacaaggggaagaagcagacatcaggtgctgcactcacttctgccccctggggagttggggaaaggaacgaaccctggctggaggggataggagggcttttaatttatttctttttctgttgaggcttccccctctctgagccagttttcatttcttcctggtggcattagccactccctgcctctcactccagacctgttcccacaactggggaggtaggctgggagcaaaaggagagggtgggacccagttttgcgtggttggtttttattaattatctggataacagcaaaaaaactgaaaataaagagagagagagaaaaaaaaa

SEQ ID NO: 397982 - DNA, 1000 bp, Homo Sapiens; identical to SEQ ID NO: 287320

SEQ ID NO: 397983 - DNA, 1000 bp, Homo Sapiens; identical to SEQ ID NO: 287323

SEQ ID NO: 397984 - DNA, 1000 bp, Homo Sapiens; identical to SEQ ID NO: 287325

SEQ ID NO: 397985 - DNA, 1000 bp, Homo Sapiens; identical to SEQ ID NO: 221859

SEQ ID NO: 397986 - DNA, 770 bp, Homo Sapiens; identical to SEQ ID NO: 116618

SEQ ID NO: 397987 - DNA, 1000 bp, Homo Sapiens
acacaggagataccatttcaatggctcagacacagttgtttgcatgggaagcctatgacaagggatctgaagtgcatctacaggcagatcctacaaagctagagctgttgtataagtccttcaaagtcaaaaaagaagatttcaaagaacagcagaaagaaagcatcctggaaaagtatggtggccaagaacatttggatgcccctccagctgaattgcttttagcccagactgaagactatgtggagtactcaagacatgggacagtcatcaaaggacaggagcgggctgttgcctgctctaagtatgaggaggatgtgaagatccacaatcacacacatatctggggatcgtactggaaagaaggccgatggggatacaaatgctgtcactcttttttcaagtattcctattgtactggagaagctgggaaggagattgttaactctgaggagtgtattataaatgagataactggggaagaatctgtgaaaaaacctcaaaccctcatggagctgcatcaagaaaaactgaaagaggaaaagaagaagaagaaaaagaaaaagaagaagcatcgaaagagcagttcagatagtgatgatgaagaaaagaagcatgaaaaattgaaaaaggcactgaacgcagaggaggcccgccttcttcatgtcaaggagaccatgcagattgatgagaggaagcggccttacaatagcatgtatgaaactcgagaacctactgaagaggaaatggaggcatatagaatgaaacgtcagaggccagatgaccccatggcctctttccttggacagtagcaactagtcagaagaccatccaagatagatgcagctgatacattcttttcagcttcttattgatgattgtagatagaaaaatccttgtttattcttcttgctgcctggctttaataaatatttcagatgcctcacaaaaaaaaaaaaaaaaaaaaaaaaaaaaaaaaaaaaaaaaaaaaaaaaaaaaa

SEQ ID NO: 397988 - DNA, 1000 bp, Homo Sapiens; identical to SEQ ID NO: 116620

SEQ ID NO: 397989 - DNA, 1000 bp, Homo Sapiens
aggcaattgttgatgctgagtggaacattctctatgacaagttagagaagatccatcattctggagccaaagttgtcttgtccaaactccccattggggatgtggccacccagtactttgctgacagggacatgttctgtgctggccgagtacctgaggaggatctgaagaggacaatgatggcctgtggaggctcaatccagaccagtgtgaatgctctgtcagcagatgtgctgggtcgatgccaggtgtttgaagagacccagattggaggcgagaggtacaatttttttactggctgccccaaggccaagacatgcaccttcattctccgtggcggcgccgagcagtttatggaggagacagagcggtccctgcatgatgccatcatgatcgtcaggagggccatcaagaatgattcagtggtggctggtggcggggccattgagatggaactctccaagtacctgcgggattactcaaggactattccaggaaaacagcagctgttgattggggcatatgccaaggccttggagattatcccacgccagctgtgtgacaatgctggctttgatgccacaaacattctcaacaagctgcgggctcggcatgcccaggggggtacatggtatggagtagacatcaacaacgaggacattgctgacaactttgaagctttcgtgtgggagccagctatggtgcggatcaatgcgctgacagcagcctctgaggctgcgtgcctgatcgtgtctgtagatgaaaccatcaagaacccccgctcgactgtggatgctcccacagcagcaggccggggccgtggtcgtggccgcccccactgagaggcaccccacccatcacatggctggctggctgctgggtgcacttaccctccttggcttggttacttcattttacaaggaaggggtagtaattggcccactctcttcttactggaggctatttaaataaaatgtaagacttcagataactttgtaaa

SEQ ID NO: 397990 - DNA, 1000 bp, Homo Sapiens; identical to SEQ ID NO: 287328

SEQ ID NO: 397991 - DNA, 1000 bp, Homo Sapiens; identical to SEQ ID NO: 287329

SEQ ID NO: 397992 - DNA, 905 bp, Homo Sapiens
caacacaggggcagtctccaggacctccacaccattaacaagatgagccttgtgctcccttgggctctagagaggaagcccctctgagccctcagcccctctttcctccctctcctaaagtaatttgatcctcaggaatttgttctgccctcatctggccctggccagctctgcatttgacaaatgccaggaagaggaaactgttgagaaaacggaactactggggaaagggagggctcactgagaaccatcccggtaacccgaccgccgctggtcaccatgaaccacattgtgcaaaccttctctcctgtcaacagcggccagcctcccaactacgagatgctcaaggaggagcaggaagtggctatgctgggggggccccacaaccctgctcccccgacgtccaccgtgatccacatccgcagcgagacctccgtgcctgaccatgtcgtctggtccctgttcaacaccctcttcatgaacacctgctgcctgggcttcatagcattcgcctactccgtgaagtctagggacaggaagatggttggcgacgtgaccggggcccaggcctatgcctccaccgccaagtgcctgaacatctgggccctgattttgggcatcttcatgaccattctgctcgtcatcatcccagtgttggtcgtccaggcccagcgatagatcaggaggcatcattgaggccaggagctctgcccgtgacctgtatcccacgtactctatcttccattcctcgccctgcccccagaggccaggagctctgcccttgacctgtattccacttactccaccttccattcctcgccctgtccccacagccgagtcctgcatcagccctttatcctcacacgcttttctacaatggcattcaataaagtgtatatgtttct

SEQ ID NO: 397993 - DNA, 1000 bp, Homo Sapiens; identical to SEQ ID NO: 116622

SEQ ID NO: 397994 - DNA, 1000 bp, Homo Sapiens
gaaacaagtgcctctcagtgctgaagactctgcgggaccgccacctggagctacccggccagccgctcaacaactaccacatgaagacgctgctgctgtacgagtgcgagaaacacccacgagaaacggactgggacgagtcgtgcctgggcgaccggctcaacggcatcctgctgcagctcatctcctgcctgcagtgccgccgctgccctcactactttctgcccaacctcgacctctttcagggcaagccccattcggccctggagagcgctgccaagcagacctggaggttggccagggaaattctcaccaatcccaaaagcctggacaaactatagggtgctggggactgcttgaaaagcgacacaaacgggcgtgctctctcagacacacaactcagctataaacagcagaaactctggacacaaacttttatgtaagtcacctgaaataggaatccggcagaagaccttcattaattaagaagcaaacaaaaagagagcaacccaaccaaaacaaatcacattcttgcacaaaagtgatcgttttcttccaaacaatgtgaatttaaaaggtcacacaaaagaagcaatcgggctccgccaccacaaaatgaaacccaaggtacattttcaaatcaatgtatagtagttccccccccttttccttctttccccctatcctttttctctccaccccatcccccccccatttcgttttgcttttggttgcctgaatgttgtcaccaagtgaaaaaattatttaactatatgtaaaatttctcttttaaaaaaaagttttactgatgttaaacgttctcagtgccaatgtcagactgtgctcctccctctcctgaacctctaccctcaccctgagctgtcttgttgaaaacagtaataaaaacattactttacattgtaaaaaaaaaaaaaaaaaaaaaaaaaaaaaaaaaaaaaaaaaaaaaaaaaaaaaaaaaaaaaaaaaaaaaaaaaaaaaa

SEQ ID NO: 397995 - DNA, 1000 bp, Homo Sapiens
gggtagatactagccccgacactcagaagatcctggtggactcccgggaagccacctctgtgccccacatctacgccattggtgacgtggtggaggggcggcctgagctgacacccatagcgatcatggccgggaggctcctggtgcagcggctcttcggcgggtcctcagatctgatggactacgacaatgttcccacgaccgtcttcaccccgctggagtatggctgtgtggggctgtccgaggaggaggcagtggctcgccacgggcaggagcatgttgaggtctatcacgcccattataaaccactggagttcacggtggctggacgagatgcatcccagtgttatgtaaagatggtgtgcctgagggagcccccacagctggtgctgggcctgcatttccttggccccaacgcaggcgaagttactcaaggatttgctctggggatcaagtgtggggcttcctatgcgcaggtgatgcggaccgtgggtatccatcccacatgctctgaggaggtagtcaagctgcgcatctccaagcgctcaggcctggaccccacggtgacaggctgctgagggtaagcgccatccctgcaggccagggcacacggtgcgcccgccgccagctcctcggaggccagacccaggatggctgcaggccaggtttggggggcctcaaccctctcctggagcgcctgtgagatggtcagcgtggagcgcaagtgctggacaggtggcccgtgtgccccacagggatggctcaggggactgtccacctcacccctgcacctctcagcctctgccgccgggcacccccccccaggctcctggtgccagatgatgacgacctgggtggaaacctaccctgtgggcacccatgtccgagccccctggcatttctgcaatgcaaataaagagggtactttttctgataaaaaaaaaaaaaaaaaaaaaaaaaaaaaaaaaaaaaaaaaaaaaaaaaaaaaaaaaaaaaaaaa

SEQ ID NO: 397996 - DNA, 857 bp, Homo Sapiens
gcgtgggcgtgagatggcggcggcagcggtgagcagcgccaagcggagcctgcggggagagctgaagcagcgtctgcgggcgatgagtgccgaggagcggctacgccagtcccgcgtactgagccagaaggtgattgcccacagtgagtatcaaaagtccaaaagaatttccatctttctgagcatgcaagatgaaattgagacagaagagatcatcaaggacattttccaacgaggcaaaatctgcttcatccctcggtaccggttccagagcaatcacatggatatggtgagaatagaatcaccagaggaaatttctttacttcccaaaacatcctggaatatccctcagcctggtgagggtgatgttcgggaggaggccttgtccacagggggacttgatctcatcttcatgccaggccttgggtttgacaaacatggcaaccgactggggaggggcaagggctactatgatgcctatctgaagcgctgtttgcagcatcaggaagtgaagccctacaccctggcgttggctttcaaagaacagatttgcctccaggtcccagtgaatgaaaacgacatgaaggtagatgaagtcctttacgaagactcgtcaacagcttaaatctggattactacagccaaataatcagtgttttatatgagagtaaagcaaagtatgtgtatttttcccttgtcaaaaattagttgaaattgttcattaatgtgaatacagactgcattttaaaattgtaattatgaaataccttatataaaaccatctttaaaaaccaatagaagtgtgaatagtagaatattaattaaaatggaggctatcagcctgtgattttcagctt

SEQ ID NO: 397997 - DNA, 988 bp, Homo Sapiens
gggcgggagcggcggtccagactggggagggacgcgcaccggccaggaggcttcaagaggagggcactagggccctgcgagcggcgtcttaaccggcggcgctaggactccgcgggaaacggcgggggcggagcgggcggcaccaggacccaggggaaccgcgacgggcgggcggcgagcaggcccgggagccgggaggctgcgggcggcggcgctggacccgacgcggcgagagaggccccgagatgccgagcaagaagaagaagtacaacgcgcggttcccgccggcgcggatcaagaagatcatgcagacggacgaagagattgggaaggtggcggcggcggtgcctgtcatcatctcccgggcgctcgagctcttcctagagtcgctgttgaagaaggcctgccaggtgacccagtcgcggaacgcgaagaccatgaccacatcccacctgaagcagtgcatcgagctggagcagcagtttgacttcttgaaggacctggtggcatctgttcccgacatgcagggggacggggaagacaaccacatggatggggacaagggcgcccgcaggggccggaagccaggcagcggcggccggaagaacggtgggatgggaacgaaaagcaaggacaagaagctgtccgggacagactcggagcaggaggatgaatctgaggacacagatactgatggggaagaggagacatcacaacccccaccccaggccagccacccctctgcccactttcagagccccccgacacccttcctgcccttcgcctctactctgcctttgcccccagcgcccccgggcccctcagcacctgatgaagaggacgaagaagattacgactcctagcgccttctgccccccagaccatagccccttttagttggttttagttgctctggggggaggagagaaggtagagctgttcttaaatttattaaaaaaaaaaataaaagggaatctcagtgtctgtt

SEQ ID NO: 397998 - DNA, 1000 bp, Homo Sapiens; identical to SEQ ID NO: 287333

SEQ ID NO: 397999 - DNA, 1000 bp, Homo Sapiens; identical to SEQ ID NO: 116623

SEQ ID NO: 398000 - DNA, 1000 bp, Homo Sapiens; identical to SEQ ID NO: 221861

SEQ ID NO: 398001 - DNA, 1000 bp, Homo Sapiens; identical to SEQ ID NO: 287335

SEQ ID NO: 398002 - DNA, 1000 bp, Homo Sapiens; identical to SEQ ID NO: 287336

SEQ ID NO: 398003 - DNA, 1000 bp, Homo Sapiens; identical to SEQ ID NO: 287337

SEQ ID NO: 398004 - DNA, 1000 bp, Homo Sapiens; identical to SEQ ID NO: 116625

SEQ ID NO: 398005 - DNA, 1000 bp, Homo Sapiens; identical to SEQ ID NO: 221863

SEQ ID NO: 398006 - DNA, 1000 bp, Homo Sapiens; identical to SEQ ID NO: 116626

SEQ ID NO: 398007 - DNA, 1000 bp, Homo Sapiens; identical to SEQ ID NO: 287342

SEQ ID NO: 398008 - DNA, 1000 bp, Homo Sapiens; identical to SEQ ID NO: 287343

SEQ ID NO: 398009 - DNA, 1000 bp, Homo Sapiens; identical to SEQ ID NO: 287344

SEQ ID NO: 398010 - DNA, 1000 bp, Homo Sapiens; identical to SEQ ID NO: 221864

SEQ ID NO: 398011 - DNA, 1000 bp, Homo Sapiens; identical to SEQ ID NO: 287346

SEQ ID NO: 398012 - DNA, 1000 bp, Homo Sapiens; identical to SEQ ID NO: 287347

SEQ ID NO: 398013 - DNA, 1000 bp, Homo Sapiens; identical to SEQ ID NO: 221865

SEQ ID NO: 398014 - DNA, 1000 bp, Homo Sapiens; identical to SEQ ID NO: 287349

SEQ ID NO: 398015 - DNA, 1000 bp, Homo Sapiens; identical to SEQ ID NO: 287350

SEQ ID NO: 398016 - DNA, 1000 bp, Homo Sapiens; identical to SEQ ID NO: 287351

SEQ ID NO: 398017 - DNA, 1000 bp, Homo Sapiens
aggtgaccgggcttccttccggcttgctaagcagaggccggaagcggtggtttttagcggctctctgggtagcagggtggtgtgatagcggcagcgaggggctcggagaggtgctcggattctcgtagctgtgccgggacttaaccaccaccatgtcgagcaaaagaacaaagaccaagaccaagaagcgccctcagcgtgcaacatccaatgtgtttgctatgtttgaccagtcgcagattcaggagttcaaagaggccttcaacatgattgatcagaacagagatggtttcatcgacaaggaagatttgcatgatatgcttgcttcattggggaagaatccaactgatgagtatctagatgccatgatgaatgaggctccaggccccatcaatttcaccatgttcctcaccatgtttggtgagaagttaaatggcacagatcctgaagatgtcatcagaaatgcctttgcttgctttgatgaagaagcaactggcaccatacaggaagattacttgagagagctgctgacaaccatgggggatcggtttacagatgaggaagtggatgagctgtacagagaagcacctattgataaaaaggggaatttcaattacatcgagttcacacgcatcctgaaacatggagccaaagacaaagatgactgaaataacttcaaattccagccaaacgttccttgttgccactttgggtattctgagattttctcttgcatgcccttagctttacagcttttgcatttcctgttgtatttattctcagccattttgggcatatgtatctttataatcagactggaaacgggactttctattaatatcattttcagaataaaaaataggataatttaacctaccagcccttctcccccaataactgtggtctatacagagtcaatatattttttcggagaaagttattcgctcgattttttctgaatcataattaaactttatgataaaataaaaaaaaaaaaaaa

SEQ ID NO: 398018 - DNA, 1000 bp, Homo Sapiens; identical to SEQ ID NO: 116628

SEQ ID NO: 398019 - DNA, 1000 bp, Homo Sapiens; identical to SEQ ID NO: 116629

SEQ ID NO: 398020 - DNA, 1000 bp, Homo Sapiens; identical to SEQ ID NO: 287355

SEQ ID NO: 398021 - DNA, 1000 bp, Homo Sapiens; identical to SEQ ID NO: 287356

SEQ ID NO: 398022 - DNA, 1000 bp, Homo Sapiens
actcatgggtgccaaggggcaggggcagtgggggctcgggcaggagcaccccccagactccccgtgcccgcagccctgcagcaccccggctttcccgggtctccagccccagtccagagttgggcaccacaccggccagcatcttccgcacacccctgcagctcgacccgcagcaggagcagcagctgttccggcgcctggaagaggagttcctggccaatgcccgggcccttgaggctgttgctagcgtgacccccactggaccagcccctgacccagctcgggcccccgaccctccagctcctgactctgcctattgttcctccagttcctcctcttcgtccctcagcgtcctgggtggcaaatgtggccaacctggggactctggccggacggccaatgggctgcctgggccccgaagccaagccctttccagctcctccgatgaaggcagcccctgccctggcatgggggggccactagatgcacctgggagccccctggcttgcactgaaccctcgaggacctgggcacggggtcggatggacacacagccagaccgtaaaccctcacgtatccccacgcctcggggcccccgccgcccctccggacccgcagagctggggacatggcatgccctgcactcagtcaccccgagggctgagccagattcctggatgtgatggaccagctcagctgtccccagaccccatcccttctccttttcctttgtggccttaacccttctgcatcagggagccccctctgcctcttgagtaccagacctcatgggaccagaccccttgggaccacatggcacaatgggacctctgttgtacattccggttgggggatgagcgttgctatttaattactaatattattgaatgccttagaggaggccgggcgagcccggtgttctgaagacctgtggcccagcagagcctctgacagtaaagttttgctccagcaaaaaaaaaaaaaaaaaaaaaaaaaaaaa

SEQ ID NO: 398023 - DNA, 1000 bp, Homo Sapiens; identical to SEQ ID NO: 116630

SEQ ID NO: 398024 - DNA, 1000 bp, Homo Sapiens; identical to SEQ ID NO: 116631

SEQ ID NO: 398025 - DNA, 1000 bp, Homo Sapiens; identical to SEQ ID NO: 221868

SEQ ID NO: 398026 - DNA, 1000 bp, Homo Sapiens; identical to SEQ ID NO: 287363

SEQ ID NO: 398027 - DNA, 1000 bp, Homo Sapiens; identical to SEQ ID NO: 287364

SEQ ID NO: 398028 - DNA, 1000 bp, Homo Sapiens
ctccccatgcatgtctccatattcccacccccatgggagtgtggctggcttcatgggggtgccagccccttctgcggctcaccctggcatctactccatccatggctttccccccaccctggggggccacagctttgagccttcctcagatggtgactataagtctccaagcctcgtctcgctcagggtaaagcccaaggagccacccggccttctgaactggaccacgtgatcggttgcatggacctgcagaatgagctgcccacctctttttccattcccagtcgctcccagcccacccccgcctggacaccacggaggaagcacctctgcctccaagccccagatggttctggaggctgcgagagcagctggcactgtcagcccccagcagggaacacgttacagggtcttttctcttagaacaaggtggggctgcctaggagaaggggcttcgaagcagccaggactcttcctaccacaaactgagtcccctcacctgaactctgggctggaggcagggagacactgccctgcttcctccagactttgtccaagtccattgtcatctctccagctaagacagcttacttggctcatcgttcagggaacccaggaaaatgggaggagaacgccccgtggactgaagctcttcatgatgagatggaaaccaaaagggagtctcccatgatggggtggagtcagccctgcttcccctccccaccagcagggggcgcactggtgtctgacactaaggagggtgtaaaggccaaggtcagcatagactgaggcacactggctcctcagctccagccaccctcactcctgccatgtgcctgcactcccagcatgccatgcagtcatcttcccctccaagggggcagaaattccaccagaaatcaccacatatttggaatcttcttccacgggaccagcccagagctatgccatggaaatgatattggatgttggtaagaataaaacagatttctacagactg

SEQ ID NO: 398029 - DNA, 1000 bp, Homo Sapiens; identical to SEQ ID NO: 287365

SEQ ID NO: 398030 - DNA, 1000 bp, Homo Sapiens; identical to SEQ ID NO: 221869

SEQ ID NO: 398031 - DNA, 1000 bp, Homo Sapiens; identical to SEQ ID NO: 221870

SEQ ID NO: 398032 - DNA, 1000 bp, Homo Sapiens
atcgtttttactgtaccgatgttaactgtagtaatccttagccagtatgttcttttgctgaaactgttgcattttgggacttttttccactttgtcatgtgtacatttttaatctgttatagttggcggcagtattaaaatggtgagtaaagagcccaggtttgctcctgtttgtaactagtcttttctggaaatactgtcttctgtttccttttgcctttgcagaatgtgctttagcctttgtctgagaatgggtttaggtagaagggtttcctgaaagtctagtcttttggtgtaatagtattgttgaaccttaggttttatgttatatctgcatatgagtgatatgtgatcatgattcattttgcagatttacattttgcttgtgtggaaagttacgttcacttcaacctacagacccttttgtataatgtacagcaaatgtcattaaatattgaatgctctattgggggaagacaaatgaagagaatgcattttgagcatttcaaatcagtagtttgggcagtgccttttggggtccaatctttttggattggattctatttcatcttttgatgtgacttttcacctagtttacaaaaaaaaggttggtggtcaacaaaaaaagcaagtcatagcagttcagtgcctttgttggtagtttttaactttttttgtgattctttttggaaaatcatagcttacagatggtataactgtattatataatggaattttctttaggtgtgggaaaaacttgatctgaaagaaaattatcagcttcaattggcgattgattcagtgcccacaatgtaaacagggttggtagttgttactcattttgaatataccttttccttattgtattctgtaatataggatcctggaaatgagacctggtggaatattattttcaactgtagtctttctatactgtggactaatgaaatggtgttgttgataaatctaaaataaccaataatccaaaaaagttcatttt

SEQ ID NO: 398033 - DNA, 1000 bp, Homo Sapiens; identical to SEQ ID NO: 287369

SEQ ID NO: 398034 - DNA, 915 bp, Homo Sapiens
acagtgagatgagtcagaaaccggccaaggagggtcccagactctccaaaaaccagaagtactccgaacacttcagcatacactgctgcccgccgttcaccttcctcaattccaagaaggagatagtggatcggaaatacagcatctgtaagagcggctgcttctaccagaagaaagaggaggactggatctgctgcgcctgccagaagaccagaaccagccgccgtgccaagtcccctcagaggcccaagcaacagccagctgcgccccccgcggtggtcagagcgccagccaagccacggtcccctccgaggtctgagcgtcagccacggtcccctccgaggtctgagcgtcagccacggtcccctccgaggtctgagcgtcagccacggtcccctccgaggtctgagcgtcagccacgtccccgcccagaggtccgaccaccgccagccaagcagcgtccccctcagaagtccaagcaacagccgcgcagcagccccctcagagggccaggcgccagccgtggggggtcccccgtcaaagcttctaggttctgattgaaaaggaggatcaggccaaccccaaagaagaagtgaccaaggaggagtttaaactgaatgaacaacctcggctcctggactcattgcttcacaacccatctacccctggatgaagttatctggcttcaaatattatgcaggggcaaacacctgctgatgtggcaactgctgatgctcatggtccccatggcatgggggcctcagggcagcctgcctggagtactttgaagatgtcatcccattgtcttctgacctctataattgccactgagagatctgctgtcagtctgcttatccttccacggactcaagtttcttcaatctgaagatacatgtctttctccagggacatgtg

SEQ ID NO: 398035 - DNA, 1000 bp, Homo Sapiens; identical to SEQ ID NO: 287370

SEQ ID NO: 398036 - DNA, 1000 bp, Homo Sapiens; identical to SEQ ID NO: 221871

SEQ ID NO: 398037 - DNA, 1000 bp, Homo Sapiens; identical to SEQ ID NO: 221872

SEQ ID NO: 398038 - DNA, 1000 bp, Homo Sapiens; identical to SEQ ID NO: 221873

SEQ ID NO: 398039 - DNA, 1000 bp, Homo Sapiens; identical to SEQ ID NO: 287376

SEQ ID NO: 398040 - DNA, 1000 bp, Homo Sapiens
ctgcccatcaagtatgctggcctgtctacctgcttccgtcaggaggtgggctcccatggccgtgacacccgtggcatcttccgagtccatcagtttgagaagattgaacagtttgtgtactcatcaccccatgacaacaagtcatgggagatgtttgaagagatgattaccaccgcagaggagttctaccagtccctggggattccttaccacattgtgaatattgtctcaggttctttgaatcatgctgccagtaagaagcttgacctggaggcctggtttccgggctcaggagccttccgtgagttggtctcctgttctaattgcacggattaccaggctcgccggcttcgaatccgatatgggcaaaccaagaagatgatggacaaggtggagtttgtccatatgctcaatgctaccatgtgcgccactacccgtaccatctgcgccatcctggagaactaccagacagagaagggcatcactgtgcctgagaaattgaaggagttcatgccgccaggactgcaagaactgatcccctttgtgaagcctgcgcccattgagcaggagccatcaaagaagcagaagaagcaacatgagggcagcaaaaagaaagcagcagcaagagacgtcaccctagaaaacaggctgcagaacatggaggtcaccgatgcttgaacattcctgcctccctatttgccaggctttcatttctgtctgctgagatctcagagcctgcccaacagcagggaagccaagcacccattcatccccctgcccccatctgactgcgtagctgagaggggaacagtgccatgtaccacacagatgttcctgtctcctcgcatgggcatagggacccatcattgatgactgatgaaaccatgtaataaagcatctctggggagggcttaggactcttcctcagtcttcttccccgggcttgaaccccgaaaaaaaaaaaaaaaaaaaaaaaaaaaaaaaaaaaaaaaaaaaaaaa

SEQ ID NO: 398041 - DNA, 1000 bp, Homo Sapiens
tatgtccagctttccccatgtgaggtgggaggctggcatcgacgacatgttcaacttccagaccttcgccaacagcatgctgtgcctcttccagattaccacgtcggccggctgggatggcctcctcagccccatcctcaacacagggcccccctactgtgaccccaatctgcccaacagcaatggcaccagaggggactgtgggagcccagccgtaggcatcatcttcttcaccacctacatcatcatctccttcctcatcgtggtcaacatgtacattgcagtgattctggagaacttcaatgtggccacggaggagagcactgagcctctgagtgaggacgactttgacatgttctatgagacctgggagaagtttgacccagaggccactcagtttattaccttttctgctctctcggactttgcagacactctctctggtcccctgagaatcccaaaacccaatcgaaatatactgatccagatggacctgcctttggtccctggagataagatccactgcttggacatcctttttgctttcaccaagaatgtcctaggagaatccggggagttggattctctgaaggcaaatatggaggagaagtttatggcaactaatctttcaaaatcatcctatgaaccaatagcaaccactctccgatggaagcaagaagacatttcagccactgtcattcaaaaggcctatcggagctatgtgctgcaccgctccatggcactctctaacaccccatgtgtgcccagagctgaggaggaggctgcatcactcccagatgaaggttttgttgcattcacagcaaatgaaaattgtgtactcccagacaaatctgaaactgcttctgccacatcattcccaccgtcctatgagagtgtcactagaggccttagtgatagagtcaacatgaggacatctagctcaatacaaaatgaagatgaagccaccagtatggagctgattgcccctgggccctagtga

SEQ ID NO: 398042 - DNA, 1000 bp, Homo Sapiens; identical to SEQ ID NO: 221874

SEQ ID NO: 398043 - DNA, 1000 bp, Homo Sapiens; identical to SEQ ID NO: 287379

SEQ ID NO: 398044 - DNA, 1000 bp, Homo Sapiens; identical to SEQ ID NO: 221875

SEQ ID NO: 398045 - DNA, 1000 bp, Homo Sapiens; identical to SEQ ID NO: 116633

SEQ ID NO: 398046 - DNA, 1000 bp, Homo Sapiens
aggcagcgccgcctgggagtggggaggctgcggcgacgacgtggacttcggggacgagaagtcgaggctctttatggacgcgcggcacaagcggggacgcggagacatccgcgcgttggtgcaactgcacaacaacgaggcgggcaggctggccgtgcggagccacacgcgcaccgagtgcaaatgccacgggctgtcgggatcatgcgcgctgcgcacctgctggcagaagctgcctccatttcgcgaggtgggcgcgcggctgctggagcgcttccacggcgcctcacgcgtcatgggcaccaacgacggcaaggccctgctgcccgccgtccgcacgctcaagccgccgggccgagcggacctcctctacgccgccgattcgcccgacttctgcgcccccaaccgacgcaccggctcccccggcacgcgcggtcgcgcctgcaatagcagcgccccggacctcagcggctgcgacctgctgtgctgcggccgcgggcaccgccaggagagcgtgcagctcgaagagaactgcctgtgccgcttccactggtgctgcgtagtacagtgccaccgctgccgtgtgcgcaaggagctcagcctctgcctgtgacccgccgcccggccgctagactgacttcgcgcagcggtggctcgcacctgtgggacctcagggcaccggcaccgggcgcctctcgccgctcgagcccagcctctccctgccaaagcccaactcccagggctctggaaatggtgaggcgaggggcttgagaggaacgcccacccacgaaggcccagggcgccagacggccccgaaaaggcgctcggggagcgtttaaaggacactgtacaggccctccctccccttggcctctaggaggaaacagttttttagactggaaaaaagccagtctaaaggcctctggatactgggctccccagaactgctggccacaggatggtgggtgaggttagtatcaataaagatatttaaaccacc

SEQ ID NO: 398047 - DNA, 1000 bp, Homo Sapiens; identical to SEQ ID NO: 116634

SEQ ID NO: 398048 - DNA, 1000 bp, Homo Sapiens
acagcctatggaatgggaccatgtctacaagcaaaggatggcatgactccaaagggccccaaccaccctgtccaggtaatgccaaaaagtcctgatgaaatgaggaaggtctttatcgaccgggccaagaagattgataccatctcccgagcctgcttcccattagcttttttgatttttaatattttctactgggttatctataaaattcttaggcatgaggatattcatcatcagcagcaagattaagtctctgggggcatgcaaatgcaaatggtcaattcagaagaaagtgtctctgccataggtgtgtatgtgtatatgtgtgcgtgtggtatacaaatgatgaccattgtattaaaatggcatatggaaaatgtattaaaatggcatatggaaaagctttgtattttggttagctatgcaaagtcatgagaaagatgagattcttttaatgaatataaaatatttattaggggattctatttcatattaattccaggtgatttgttttttcacagtaaaccatgtaagtggaagctttactgccaatgtgtttatatgttatataatatctcataatagtagacatgaaaactactttgaaattccttgatttgtaattcaatgctattaaatcatacaaaagcaaattttgcacagtaaactaatagtttgagatttaaaactattttcttatagtatagttacaaaatgggaaaataattagttacagtgggaaattcactcatattaatggaggattgtacatataaatactatttaaacaacatatgtaattttgaaaatttttaaataagagcattaaaagactttaatgatttggaatactaaatttaattgtttagaatattaagttttcctctgtgcaaatttaaaacaaataacaagagatcgtgttacagtcacaatctacttttcttaaactttgtatctctaggaacgaaggtggaaatacgggaaacaactttgtttttaa

SEQ ID NO: 398049 - DNA, 1000 bp, Homo Sapiens; identical to SEQ ID NO: 221878

SEQ ID NO: 398050 - DNA, 1000 bp, Homo Sapiens; identical to SEQ ID NO: 287386

SEQ ID NO: 398051 - DNA, 1000 bp, Homo Sapiens; identical to SEQ ID NO: 221879

SEQ ID NO: 398052 - DNA, 1000 bp, Homo Sapiens; identical to SEQ ID NO: 287388

SEQ ID NO: 398053 - DNA, 1000 bp, Homo Sapiens; identical to SEQ ID NO: 116637

SEQ ID NO: 398054 - DNA, 1000 bp, Homo Sapiens; identical to SEQ ID NO: 287390

SEQ ID NO: 398055 - DNA, 1000 bp, Homo Sapiens; identical to SEQ ID NO: 116639

SEQ ID NO: 398056 - DNA, 1000 bp, Homo Sapiens
aggattggatattgtgaaggaactgaaagaaaatggtgaattgctgcctatactgagaggagaaaattaataaatcttaaacttggtgcccaactattacggggtctggctctgtcacccaggctggagtgcagtggcacgattatggctcattgcagcctcgacttctcggggccaagcgatcctcctgcctcagccttctgagtagctgggaccacaggcgtgcaccaccatgcccacctaattttttatttcttgtagagatgaggtctcctgcctcagcctcccaaagtgctggaatttacaggagtgtcggctgtgccccttgtgatggatgaggaaaggtatccacctttctgaatcagacacaagctgcagtagcttcctgatgcctcattcaccaggatgggtaactttaaagacaagttttataactggcatcccatctggtttcagagtcttgggggcttttttcatacagctttgtctgatatttagagacattcagattcagaagccatgagttcagttagctcatgggccgggcacgtgcactgactcactggctgcagcagaacacattgagggagtcttggtgcacttaggtcactgtaaggttctagggctgggagctgggatttgaaccaggatctgtcagcgcagccccagtgctgtgcttgaagcctcgtgccacactggctttgaggtagcacgctgcaagttagtgagtggagttgcccaagtctggggcttctgaaatgacctggtatttttatgttcctgttagaaatggtgtggctttcacaaattaagtgccaggctgggcacaatggctcgtgcttgtaatcccagcactttgggaggcggaggcaggcgggttgcttgagctccggagcttgagaccagcctgagcaacatggcgaaacctcatatctacaaaaaataaaaaattaactggtcaaaaaaaaaaaaaaaaaaaaaaaaaaaaaaaaaaaaaaaa

SEQ ID NO: 398057 - DNA, 1000 bp, Homo Sapiens; identical to SEQ ID NO: 221882

SEQ ID NO: 398058 - DNA, 1000 bp, Homo Sapiens; identical to SEQ ID NO: 221883

SEQ ID NO: 398059 - DNA, 1000 bp, Homo Sapiens; identical to SEQ ID NO: 116640

SEQ ID NO: 398060 - DNA, 1000 bp, Homo Sapiens; identical to SEQ ID NO: 221884

SEQ ID NO: 398061 - DNA, 1000 bp, Homo Sapiens
ctgcgagggcacacagggccggggaggaggattaggctggactgatcgcgggtcgcaggtgaccccgggaccagatgtccctcccctcatgagcgtgcaacagggagcagccccagccagccccaccgccgccgtctgcgtggatggagggctcgaggcccttaggggcggcgcccatcgtcctgcctgccgcggtggcccagccccttctctccctgcaggtgacccgcgccgcccccgcccgcccgcccacgctgtcctccacttaggcgcctccacaaacgctggcgggtgtgccgccctccagcctctccgcccccgtcccctcggtcctgcagatcaccaagcagctctcctgggcccgcggctgctccgggcctcacatctgctgctggcctcggtgggctctgactgcggggctcacggggcctggggccatggctttcttctcggcccccaaatgcctttcctggagtggctaagcctctcctgacgaggctcctcatgcggggagagggctggggtccaggggtttcccggccctttctgcaggctgtgccagccccctccagtctgccactgccgtgcccgggggacatcctgcgcccaggctggaggccctgcctcgctgcttgccagcctcacctgctggggctggaggccatggatccctcatagtatccaaggtttgagttcctgtttttcgccttatagttttgtgagtgtttgagggacaacgaccaaaggtcttttccccaccatctttaaatcaaagttgtttaaaacaacattaattttaaaaaatacataaaagcaacccatgcttatggttaaaaaagagtacaggagtctggagtccgttgaagggtaaaggcctcccgcaagctgccagtcggctctttttcgcaaagccttccagaagttttctgtgcttatgaaagcgtatgtgtggcctttctcttcccttcttttattaaacacagataggtttatgctggat

SEQ ID NO: 398062 - DNA, 1000 bp, Homo Sapiens; identical to SEQ ID NO: 116641

SEQ ID NO: 398063 - DNA, 1000 bp, Homo Sapiens; identical to SEQ ID NO: 287398

SEQ ID NO: 398064 - DNA, 1000 bp, Homo Sapiens
tctaatgtcagcgtgggcacaacttatagacagtatcccttgtcctcaagatttttagtttggcccaagtgtggccccattagcgacaccctcctctaccagcaatgcctgctaaatgccaccacctcagttcaagccctgaagcatggggccagctgggacttgaagggagcacgagtccaggatggactcagtgcagagcaggacatgatgccatcgaaattggaaggttccctggtgctgcctcacactcctgagatccagaccacgagaagtgaccttcagggtcatcaggctgtcccagagaggtccgcgttctccccaccccgacggaatttctctcccattgttgacacggactccctggcagctcaagggcatgtcttaacgaagatcagcaaagaaaacaccaggcaccctctgccacttagacataatccattccactcattattccagcaaacacttactgacaaatcgggtcctgagttgaaaacaccatttgtcaaagaggcctttgaagagacccctaagaaacacagagagtgtttagttaaggacaaccagaagtacacatttacaatagatagatgtgcaaaagacctttttgtagccaaacaagttggaacaaaactctcggtgaatgaaccactgtcattttctgttgagtctattcttaagaggccttcatctgccatcactcgtgtctctcagtgaaaggctgcttaaacagaaagctggattttctgcagtcttagagcattatagccatttgctactttttttaaaagttaagatgtttgtgtaaagaaatttctaatgtaaagatgatgattttgaaaaattttatatattcctaatatgcatgtactttttcttatcacatatatttaaacttacagatggaaattgcccaatgtgcaaattgttaagtaccacactttacacagcatttcaaaaagcaataaaattgacactgtcttctcaaagacccaaaaaa

SEQ ID NO: 398065 - DNA, 1000 bp, Homo Sapiens; identical to SEQ ID NO: 221885

SEQ ID NO: 398066 - DNA, 1000 bp, Homo Sapiens; identical to SEQ ID NO: 287399

SEQ ID NO: 398067 - DNA, 1000 bp, Homo Sapiens; identical to SEQ ID NO: 287400

SEQ ID NO: 398068 - DNA, 1000 bp, Homo Sapiens; identical to SEQ ID NO: 116642

SEQ ID NO: 398069 - DNA, 1000 bp, Homo Sapiens; identical to SEQ ID NO: 287402

SEQ ID NO: 398070 - DNA, 1000 bp, Homo Sapiens
cagcctgaagtttcgaaagaacttctggaaacttgtgaaggacattggttgcctcccttaccttggggtctcacatcaatggaaatcttctgaggacaattccaagactttttctgcctcccacaatgtggaggccaccagcatgttccagttataggccttgccagggtttcgagaagctgctctggaatttgcaagtcatggctgtgccctcttgatgtggtgaggcaggctttgtttatagcttgcgcattctcatggagaagttatcagacactctggctggtttggaatgcttcttctcaggcatgaacatgtactgttctcttcttgaacactcatgctgaaagcccaagtagggggtctaaaatttttaaggactttccttcctccatctccaagaatgctgaaaccaagggggatgacatgtgactcctatgatctcaggttctccttgattgggactggggctgaaggttgaagaggtgagcacggccaacaaagctgttgatggtaggtggcacactgggtgcccaagctcagaaggctcttctgactactgggcaaagagtgtagatcagagcagcagtgaaaacaagtgctggcaccaccaggcacctcacagaaatgagatcaggctctgcctcaccttggggcttgacttttgtataggtagatgttcagattgctttgattaatccagaataactagcaccagggactatgaatgggcaaaactgaattataagaggctgataattccagtggtccatggaatgcttgaaaaatgtgcaaaacagcgtttaagactgtaatgaatctaagcagcatttctgaagtggactctttggtggctttgcattttaaaaatgaaattttccaatgtctgccacacaaacgtatgtaaatgtatatacccacacacatacacacatatgtcatatattactagcatatgagtttcatagctaagaaataaaactgttaaagtctccaaact

SEQ ID NO: 398071 - DNA, 1000 bp, Homo Sapiens; identical to SEQ ID NO: 221887

SEQ ID NO: 398072 - DNA, 1000 bp, Homo Sapiens; identical to SEQ ID NO: 287406

SEQ ID NO: 398073 - DNA, 1000 bp, Homo Sapiens; identical to SEQ ID NO: 221889

SEQ ID NO: 398074 - DNA, 1000 bp, Homo Sapiens; identical to SEQ ID NO: 116645

SEQ ID NO: 398075 - DNA, 1000 bp, Homo Sapiens
aatgatccattccctgtggtcacttattctaaaggccccaaccttcaaagttcaagtagtgatatggatgactccacagaaagggagcagtcacgccttacttcttgccttaagaaaagagaagaaatgaaactgaaggagtgtgtttccatcctcccacggaaggaaagcccctctgtccgatcctccaaagacggaaagctgctggctgcaaccttgctgctggcactgctgtcttgctgcctcacggtggtgtctttctaccaggtggccgccctgcaaggggacctggccagcctccgggcagagctgcagggccaccacgcggagaagctgccagcaggagcaggagcccccaaggccggcctggaggaagctccagctgtcaccgcgggactgaaaatctttgaaccaccagctccaggagaaggcaactccagtcagaacagcagaaataagcgtgccgttcagggtccagaagaaacagtcactcaagactgcttgcaactgattgcagacagtgaaacaccaactatacaaaaaggatcttacacatttgttccatggcttctcagctttaaaaggggaagtgccctagaagaaaaagagaataaaatattggtcaaagaaactggttacttttttatatatggtcaggttttatatactgataagacctacgccatgggacatctaattcagaggaagaaggtccatgtctttggggatgaattgagtctggtgactttgtttcgatgtattcaaaatatgcctgaaacactacccaataattcctgctattcagctggcattgcaaaactggaagaaggagatgaactccaacttgcaataccaagagaaaatgcacaaatatcactggatggagatgtcacattttttggtgcattgaaactgctgtgacctacttacaccatgtctgtagctattttcctccctttctctgtacctctaagaagaaagaatctaactgaaaatacca

SEQ ID NO: 398076 - DNA, 1000 bp, Homo Sapiens
ggcagcagcatcgccctcaggccccgcccaggagagccaggcagggacttggcctccagtgaaaatggcactgagtgccgcagtggctttgtgcggcataacggctcctgccggtcagtgtgcgacctcttcccaagttactgtcacaatggcggccagtgctacctggtggagaacataggggccttctgcaggtgcaacacgcaggactacatctggcacaaggggatgcgctgcgagtccatcatcaccgacttccaggtgatgtgcgtggccgtgggctcggctgccctcgtcctgctcctgctcttcatgatgacggtgttctttgccaagaagctctacctgctcaagacggagaataccaagctgcgtaggaccaacaaattccggaccccatctgagctccacaatgataacttctccctctccaccattgccgagggctctcacccaaatgatgatcctagtgctccccacaaaatccaggaggttctcaagtcctgcctgaaagaggaggagtcatttaacatccagaactccatgtcgcccaaacttgagggtggcaaaggtgaccaggctgacttggatgtgaactgtcttcagaataatttaacctaaagcagagcaagaagagaggaagcgggggtagtgggtggggggtaggggaagaaacattatctcctcttgtacagagtctatttcttgtaaccatttgttaaactcttttctttttctgatctcatggcatgcttttatgtattttgtacaggaggcaaaaaaatacttaaaataagcaaagaaactgaacagaattgcatacattgggttgttttttctgtgctgtctgtacattgcttctgctgctgtgatttctaaacctgtgctgttattcaactgacttttttttgtactttgacccacgtttttttgaaataccagtaaaaaacaaagttcttgaaataaaactttttaaaaagttaaaaaaaaaaaaaaaaaa

SEQ ID NO: 398077 - DNA, 1000 bp, Homo Sapiens; identical to SEQ ID NO: 116646

SEQ ID NO: 398078 - DNA, 1000 bp, Homo Sapiens; identical to SEQ ID NO: 287408

SEQ ID NO: 398079 - DNA, 1000 bp, Homo Sapiens; identical to SEQ ID NO: 221890

SEQ ID NO: 398080 - DNA, 1000 bp, Homo Sapiens
ttgaagctggtggtaactcgagcgttgatgattactgcagatattctagctgggtttggatttctcaccctgctccttggtcttgactgcgtgaaattcctccctgatgagccgtacattaaagtccgcatctgctttgttgctggagccacgttactaatagcaggtaccccaggaatcattggctctgtgtggtatgctgttgatgtgtatgtggaacgttctactttggttttgcacaatatatttcttggtatccaatataaatttggttggtcctgttggctcggaatggctgggtctctgggttgctttttggctggagctgttctcacctgctgcttatatctttttaaagatgttggacctgagagaaactatccttattccttgaggaaagcctattcagccgcgggtgtttccatggccaagtcatactcagcccctcgcacagagacggccaaaatgtatgctgtagacacaagggtgtaaaatgcacgtttcagggtgtgtttgcatatgatttaatcaatcagtatggttacattgataaaatagtaagtcaatccaggaacagttatttagaattcatattgaattaaattaattgctagcttaatcaaaatgtttgattctcctatactttttctttctattactcttatattttcccgtcattctctctgctaaccttccaccttatgcacacactttccctatattttaagataagtctgctaggatgtagaaatatttgtttgtgatttctatatagctattagagattatgacatagtaatattaaaatgaaatgatacttaaacagaaagcaatttccaaagaggccagggaccctaatctttgaagagatgaagaaacttacttttctccctggcttttggttcactttttgtacttttaacaagtgggtgaattatttgataattttgaggaagattattcttttaaattcaaactagtatgtcaatgcctaccatta

SEQ ID NO: 398081 - DNA, 1000 bp, Homo Sapiens
ttattctcatggtcttaaattaaattattcaagtatttttaaatatccaatttgttgtgattttcagcacctgggaagtaatcccaataatactttagaaaatctaagacagttctttctgctactgatgacactcattgtcataataaaacaaataatttcctcaaataacaaagaaaaatgatacctataaatatatttataaatggtgtcatttatgaacaatgtttaattatgtatcaatttaagatttttttctgaagccctaatatttaaaatggccttattttaccatatggatataagatttggctcataatgatgagccctatcatttgatttgagttctatcatttaagagagcctaaataaaattatcatcaaggtattaaatataagacgttaaatataataaagtggggatatatagaaaacacacagtgttagcacagagtaagatctcaatgcacatttgttggatgaataaataaatgcaattgaattcccagaaaaatgattgtttcaaggaagtgacagttctactttagaagtactaattggagatgacttttatatcccattttggtaattattcatacatagcacatatgaccatgatgttcagggctttatagaaccaaataaacctaccattacatgaaaattttgaagagtatattcctgaacttgcagctgcctatagcattctcctccataaggcgagaggagagccggatataagcagagatcgtaggtgaaaaaagatgggccattaaggattcttcaaggaaaacattcctcaaaatgatctttagtgcctttattcctttcaggccaataatccacccaaaaattagaatgttctgagacatccatttgggtctatttgtgacttattcgtattacaaattgacatcagcaaaattcaaaaagaattcagtaaaaagggcatagatccagctatccagactatcttgtgagagaataagctcaccccagc

SEQ ID NO: 398082 - DNA, 1000 bp, Homo Sapiens
taccataaactggaggaaaaatgatagatcttttgtgtcttacaccatgacagttattgcgataaattttattgtgcccttgacagtgatgttttactgctattaccatgtcacgctatccattaaacatcacactaccagtgactgcactgagtccctcaacagagactggtcagatcagatagatgtaacaaagatgtctgtgatcatgatctgcatgtttctggtggcatggtccccttattccatcgtgtgcttatgggcttcttttggtgacccaaagaagattcctccccccatggccatcatagctccactgtttgcaaaatcttctacattctataacccctgcatttatgtggttgctaataaaaagtttcggagggcaatgcttgccatgttcaaatgtcagactcaccaaacaatgcctgtgacaagtattttacccatggatgtatctcaaaacccattggcttctggaagaatctgaaataagataaaaggacacactatcaaaacactttagttttttgacaatgcttttcttttaaatatgagcccatttagatcaagtgcagacatggatcattgtcctatgagagtgtaagctcctcaagcacagctcgtgcttctgtttgtgcactctggctgctgtagtgtatgcttctctgtgtcctgatatatcaacttattgctcatctcctttgatgaattaggcatcagaggttaaggtcccctttctttctccctattatggcatgcattacactgtactgatgacctttaacttgcctggctcctccattagaataaaagcagtcactaatttaatgttagaataaatgaataattctagataattactgaaatgagttgttggatgttcccagttagaatagaaagcattttttgaatttcaacattttaacatttaaatcaattaacttatgttattaaacaaaaataaatgaacattaaacatgattgtttctaaataaaa

SEQ ID NO: 398083 - DNA, 1000 bp, Homo Sapiens; identical to SEQ ID NO: 287410

SEQ ID NO: 398084 - DNA, 1000 bp, Homo Sapiens; identical to SEQ ID NO: 116648

SEQ ID NO: 398085 - DNA, 1000 bp, Homo Sapiens
agcaagacatattgaatgcaaagttctttagatatcaatattaacacttgacattattggaccccccattctggatgtatatcaagatcataattttatagaagagtctctatagaactgtcctcatagctgggtttgttcaggatatatgagttggctgattgagactgcaacaactacatctatatttatgggcaatattttgttttacttatgtggcaaagaactggatattaaactttgcaaaagagaatttagatgagagatgcaattttttaaaaagaaaattaatttgcatccctcgtttaattaaatttatttttcagttttcttgcgttcatccataccaacaaagtcataaagagcatattttagagcacagtaagactttgcatggagtaaaacattttgtaattttcctcaaaagatgtttaatatctggtttcttctcattggtaattaaaattttagaaatgatttttagctctaggccactttacgcaactcaatttctgaagcaattagtggtaaaaagtatttttccccactaaaaaactttaaaacacaaatcttcatatatacttaatttaattagtcaggcatccattttgccttttaaacaactaggattccctactaacctccaccagcaacctggactgcctcagcattccaaatagatactacctgcaattttatacatgtatttttgtatcttttctgtgtgtaaacatagttgaaattcaaaaagttgtagcaatttctatactattcatctcctgtccttcagtttgtataaacctaaggagagtgtgaaatccagcaactgaattgtggtcacgattgtatgaaagttcaagaacatatgtcagttttgttacagttgtagctacatactcaatgtatcaacttttagcctgctcaacttaggctcagtgaaatatatatattatacttattttaaataattcttaatacaaataaaatggtaatggtctaa

SEQ ID NO: 398086 - DNA, 1000 bp, Homo Sapiens; identical to SEQ ID NO: 116649

SEQ ID NO: 398087 - DNA, 1000 bp, Homo Sapiens; identical to SEQ ID NO: 116650

SEQ ID NO: 398088 - DNA, 1000 bp, Homo Sapiens; identical to SEQ ID NO: 116651

SEQ ID NO: 398089 - DNA, 1000 bp, Homo Sapiens; identical to SEQ ID NO: 116652

SEQ ID NO: 398090 - DNA, 1000 bp, Homo Sapiens; identical to SEQ ID NO: 287416

SEQ ID NO: 398091 - DNA, 1000 bp, Homo Sapiens; identical to SEQ ID NO: 116653

SEQ ID NO: 398092 - DNA, 1000 bp, Homo Sapiens; identical to SEQ ID NO: 118513

SEQ ID NO: 398093 - DNA, 1000 bp, Homo Sapiens; identical to SEQ ID NO: 116654

SEQ ID NO: 398094 - DNA, 1000 bp, Homo Sapiens
aatttgagagcgtattttgcggtaaaactggccgaaggctaaagctgaccagaccggactccttggtgacctgtcctgcacaggggagtttacagagcagcccctcgatggagatcaagtgatcggactgaacaggaatcctcggggggtgaacagccattccttcgtgacctgtgcacgccttctgcaaccctggagctctgctcggctagtctgactcgaaaagggcgtgactcaagctgacgggactccagtagggactttgagagcacattttgtaaaaatatttatctagacgcaaatgcttatccatgaatgtcctcttagaccatttggggatgaagccatcttaataattagtaataattaattagtaataattagtaagcattttctcaatgctctgattccatcatgttttcttaacatgataacttaaaaaattgacatcctttgtactttctttaatcttaaaaagtacacggctttttacttatttaccttttaaatatgcccctttagcaattggaacaagttaaattgttaactaaaaacagtttggaaattttatttcattcgttatatcacacccccttgtcatgactctgagtcacgtgctgctgtattgcaacgtgcaggaccattttaaacctgtgtgctaaaaattttccagatacttgctttaaagctacttttgtccacaaatgaaatactgtcacagtagacgcttaaatgccacgttttcataccaagagtcattcattacttcatgtgtcacaaactgtggtgtttggaattgggtttttcaatgagtggctttacttatcaatcacaacaggtaatagcaatagacgttagtgcaatacaaagtcaccctcaataaatactgttaattggagatgtgagtttgtacacaaaacatcagactagacctttgtatgggagagaatttactgtacattaaattctttattttttgttaaaaaaaaaaaaaaaaaaa

SEQ ID NO: 398095 - DNA, 1000 bp, Homo Sapiens; identical to SEQ ID NO: 116655

SEQ ID NO: 398096 - DNA, 1000 bp, Homo Sapiens; identical to SEQ ID NO: 221892

SEQ ID NO: 398097 - DNA, 1000 bp, Homo Sapiens; identical to SEQ ID NO: 221893

SEQ ID NO: 398098 - DNA, 1000 bp, Homo Sapiens; identical to SEQ ID NO: 287421

SEQ ID NO: 398099 - DNA, 1000 bp, Homo Sapiens; identical to SEQ ID NO: 287422

SEQ ID NO: 398100 - DNA, 1000 bp, Homo Sapiens; identical to SEQ ID NO: 287423

SEQ ID NO: 398101 - DNA, 1000 bp, Homo Sapiens; identical to SEQ ID NO: 116656

SEQ ID NO: 398102 - DNA, 1000 bp, Homo Sapiens; identical to SEQ ID NO: 116657

SEQ ID NO: 398103 - DNA, 1000 bp, Homo Sapiens
acggagtcccaggacagtgctgagccttctggctcagaggaagagtctgaccctgtttccttggagagggaggacaaagtccctggccctctagagatccccagtgggatggaggatgcaggcccaggggcagacatcattggtgttaatggccagggtcccaacttggaggggaagtcacagcatgtgaatgggggagtgatgaacgggctggagcagtctgaggaagtggggcaaggaatgccgctagtctctgagggagaccgagggagcccctttcaggaggaggaggggagtgctctgaagacctcttgggcaggggctcctgttcacctgggccagggtcagttcctgaagttcactcagagggaaggagatagagagtcctggtcctcaggggaggactaggaaaagaccatctgcccggcactggggacttaggggtgcggggaggggaaggacgcctccaagcccgctccctgctcaggagcagcactcttaacttacgatctcttgacatatggtttctggctgagaggcctggcccgctaaggtgaaaaggggtgtggcaaaggagcctactccaagaatggaggctgtaggaatataacctcccaccctgcaaagggaatctcttgcctgctccatctcataggctaagtcagctgaatcccgatagtactaggtccccttccctccgcatcccgtcagctggaaaaggcctgtggcccagaggcttctccaaagggagggtgacatgctggcttttgtgcccaagctcaccagccctgcgccacctcactgcagtagtgcaccatctcactgcagtagcacgccctcctgggccgtctggcctgtggctaatggaggtgacggcactcccatgtgctgactccccccatccctgccacgctgtggccctgcctggctagtccctgcctgaataaagtaatgcctccgcttcaaaaaaaaaaaaaaaaaaaaaaaaaaaaaaaaaaaa

SEQ ID NO: 398104 - DNA, 1000 bp, Homo Sapiens; identical to SEQ ID NO: 287425

SEQ ID NO: 398105 - DNA, 1000 bp, Homo Sapiens; identical to SEQ ID NO: 221897

SEQ ID NO: 398106 - DNA, 1000 bp, Homo Sapiens
caacagatgctcctgagcaatttattagtcaagtgacggtgctgaaatacttttctcattacatggaggagaacctcatggatggtggagatctgcctagtgttactgatattcgaagacctcggctctacctccttcagtggctaaaatctgataaggccctaatgatgctctttaatgatggcacctttcaggtgaatttctaccatgatcatacaaaaatcatcatctgtagccaaaatgaagaataccttctcacctacatcaatgaggataggatatctacaactttcaggctgacaactctgctgatgtctggctgttcatcagaattaaaaaatcgaatggaatatgccctgaacatgctcttacaaagatgtaactgaaagacttttcgaatggaccctatgggactcctcttttccactgtgagatctacagggaagccaaaagaatgatctagagtatgttgaagaagatggacatgtggtggtacgaaaacaattcccctgtggcctgctggactgggtggaacccagaaccaggctaaggcatacagttcttgactttggacaatcccaagagtgaaccagaatgcagttttccttgagatacctgttttaaaaggtttttcagacaattttgcagaaaggtgcattgattcttaaattctctctgttgagagcatttcagccagaggactttggaactgtgaatatacttcctgaaggggagggagaagggaggaagctcccatgttgtttaaaggctgtaattggagcagcttttggctgcgtaactgtgaactatggccatatataattttttttcattaatttttgaagatacttgtggctggaaaagtgcattccttgttaataaactttttatttattacagcccaaagagcagtatttattatcaaaatgtctttttttttatgttgaccattttaaaccgttggcaataaagagtatgaaaacgcaaaaaaaaaaaaaaa

SEQ ID NO: 398107 - DNA, 1000 bp, Homo Sapiens; identical to SEQ ID NO: 116659

SEQ ID NO: 398108 - DNA, 1000 bp, Homo Sapiens; identical to SEQ ID NO: 116660

SEQ ID NO: 398109 - DNA, 1000 bp, Homo Sapiens; identical to SEQ ID NO: 221898

SEQ ID NO: 398110 - DNA, 1000 bp, Homo Sapiens; identical to SEQ ID NO: 116661

SEQ ID NO: 398111 - DNA, 1000 bp, Homo Sapiens; identical to SEQ ID NO: 116662

SEQ ID NO: 398112 - DNA, 1000 bp, Homo Sapiens; identical to SEQ ID NO: 116663

SEQ ID NO: 398113 - DNA, 1000 bp, Homo Sapiens
aagtgtgtggtaagggtttcatttacagttcaagttttcaggcccatcagggagtccacactggagagaagccatacaaatgcaatgagtgtgggaagagcttcagaatgaaaattcattatcaagtgcatctggtagtccacacaggggaaaaaccctataaatgtgaagtatgtggtaaagccttccgtcagagttcatatcttaaaatccatctgaaagcacatagtgtacagaaaccttttaagtgtgaagagtgtgggcagggcttcaatcagagctcacgacttcagattcaccagctgatccataccggtgagaaaccatacaaatgtgaagagtgcggaaagggatttagtcgtagagcagatcttaaaattcattgtaggatccacacaggggagaaaccatataattgtgaggagtgtgggaaggtcttcagtcaggcctcgcatcttctaacccatcagagagttcacagtggggaaaaaccatttaaatgtgaagagtgtgggaagagcttcagtcggagtgcacaccttcaagcccatcaaaaagtccacactggagaaaagccatacaaatgtggggagtgtggaaagggcttcaagtggagcttgaaccttgacatgcatcagagggtgcacacaggagaaaaaccctatacatgtggggagtgtgggaagcacttcagtcaggcctcaagtctccaacttcatcagagtgtccacacaggagagaaaccatacaaatgtgatgtatgtggtaaagtcttcagtcggtcttcacaattacagtatcataggcgagttcacactggggaaaaaccttacaaatgtgagatatgtggtaagaggttcagctggcgatcaaatcttgtaagtcatcacaaaattcatgctgctggtacattttatgaaaatgatgagaatagtaagaacatcagagagttgtcagagggaggaagttctacaaggtgattaaaaaaaaaaaaaaaaaa

SEQ ID NO: 398114 - DNA, 1000 bp, Homo Sapiens
tggaggtgttggctgtgtctgctgccttctctggtttgttgtgatttatgatgaccccttttcctatccatggataagcacctcagaaaaagaatacatcatatcctccttgaaacaacaggtcgggtcttctaagcagcctcttcccatcaaagctatgctcagatctctacccatttggtccatatgtttaggctgtttcagccatcaatggttagttagcacaatggttgtatacataccaacttacatcagctctgtgtaccatgttaacatcagagacaatggacttctatctgcccttccttttattgttgcctgggtcataggcatggtgggaggctatctggcagatttccttctaaccaaaaagtttagactcatcactgtgaggaaaattgccacaattttaggaagtctcccctcttcagcactcattgtgtctctgccttacctcaattccggctatatcacagcaactgccttgctgacgctctcttgcggattaagcacattgtgtcagtcagggatttatatcaatgtcttagatattgctccaaggtattccagttttctcatgggagcatcaagaggattttcgagcatagcacctgtcattgtacccactgtcagcggatttcttcttagtcaggaccctgagtttgggtggaggaatgtcttcttcttgctgtttgccgttaacctgttaggactactcttctacctcatatttggagaagcagatgtccaagaatgggctaaagagagaaaactcactcgtttatgaagttatcccaccttggatggaaaagtcattaggcaccgtattgcataaaatagaaggcttccgtgatgaaaataccagtgaaaagatttttttttcctgtggctcttttcaattatgagatcagttcattattttattcagacttttttttgagagaaatgtaagatgaataaaaattcaaataaaatgataactaagaaaaaaaaaaaaaaa

SEQ ID NO: 398115 - DNA, 1000 bp, Homo Sapiens; identical to SEQ ID NO: 221899

SEQ ID NO: 398116 - DNA, 1000 bp, Homo Sapiens; identical to SEQ ID NO: 221900

SEQ ID NO: 398117 - DNA, 1000 bp, Homo Sapiens
aagaagcaaagcaggccaatagaaatgcaatatttttaatttattctactgaaatggtttaaaatgatgccttgtatttattgaaagcttaaatgggtgggtgtttctgcacatacctctgcagtacctcaccagggagcattccagtatcatgcagggtcctgtgatctagccaggagcagccattaacctagtgattaatatgggagacattaccatatggaggatggatgcttcactttgtcaagcacctcagttacacattcgccttttctaggattgcatttcccaagtgctattgcaataacagttgatactcattttaggtaccagaccttttgagttcaactgatcaaaccaaaggaaaagtgttgctagagaaaattggggaaaaggtgaaaaagaaaaaatggtagtaattgagcagaaaaaaattaatttatatatgtattgattggcaaccagatttatctaagtagaactgaattggctaggaaaaaagaaaaactgcatgttaatcattttcctaagctgtccttttgaggcttagtcagtttattgggaaaatgtttaggattattccttgctattagtactcattttatgtatgttacccttcagtaagttctccccattttagttttctaggactgaaaggattcttttctacattatacatgtgtgttgtcatatttggcttttgctatatactttaacttcattgttaaatttttgtattgtatagtttctttggtgtatcttaaaacctatttttgaaaaacaaacttggcttgataatcatttgggcagcttgggtaagtacgcaacttacttttccaccaaagaactgtcagcagctgcctgcttttctgtgatgtatgtatcctgttgacttttccagaaattttttaagagtttgagttactattgaatttaatcagactttctgattaaagggttttctttcttttttaataaaacacatctgtctggtatggta

SEQ ID NO: 398118 - DNA, 1000 bp, Homo Sapiens; identical to SEQ ID NO: 221901

SEQ ID NO: 398119 - DNA, 1000 bp, Homo Sapiens; identical to SEQ ID NO: 287434

SEQ ID NO: 398120 - DNA, 1000 bp, Homo Sapiens; identical to SEQ ID NO: 221903

SEQ ID NO: 398121 - DNA, 1000 bp, Homo Sapiens; identical to SEQ ID NO: 287436

SEQ ID NO: 398122 - DNA, 1000 bp, Homo Sapiens; identical to SEQ ID NO: 287438

SEQ ID NO: 398123 - DNA, 1000 bp, Homo Sapiens; identical to SEQ ID NO: 221904

SEQ ID NO: 398124 - DNA, 1000 bp, Homo Sapiens
actgccgccacggcaggtccccaggggcgaggtcttccggccccaccggtggcacctgaagcacttggagcccgtggatttcctgggcaaggccaaggtggtggcctctgccatccccgacgaccagggctggggcgtccgccctcagcagccacagggaccaggagcgaaccatgatgccaggtccctaatcatggactccccaagagctggcacccaccagggccccctcgatgcagagacagaggtcggtgctgaccgctgcacgtcgactgcctaccaggagcagaggccccaggtggagcaagttggcaaacaggctcctctctccccagggctgccggcaatgggggggcctggccccggcccctgtgaggaccccgcgggtgctgggggagcaggtgcagggggctccgagcccctggtgactgtcaccgtgcagtgcgccttcacagtggccctgagggcacgaagaggagccgacctgtccagcctgcgggcactgctgggccaagccctccctcaccaggcccagcttgggcaactcagttacctagccccaggtgaggacgggcactgggtccccatccccgaggaggagtcgctgcagagggcctggcaggacgcagctgcctgccccagggggctgcagctgcagtgcaggggagccgggggtcggccggtcctctaccaggtggtggcccagcacagctactccgcccaggggccagaggacctgggcttccgacagggggacacggtggacgtcctgtgtgaagagcccgatgtcccccttgcagtggaccaggcatggctggagggccactgtgacggccgcatcggcatcttccccaagtgcttcgtggtccccgccggccctcggatgtcaggagcccccggccgcctgccccgatcccagcagggagatcagccctaatgatgctgtgtccatgatgcttttaataaaaacaacccccactgcaaaaaaaaaaaaaaaaaa

SEQ ID NO: 398125 - DNA, 1000 bp, Homo Sapiens; identical to SEQ ID NO: 221905

SEQ ID NO: 398126 - DNA, 1000 bp, Homo Sapiens; identical to SEQ ID NO: 220737

SEQ ID NO: 398127 - DNA, 1000 bp, Homo Sapiens
gctgcactatgagaacctgcccccactgccccctgtgtgggaaagccaagcccagcagctgggaggggaggctggggatgatggggactcgagggatgggctcacaccctcttccaatggcttccctgatggtgaggaggacgagaccccactgcagaagcccaccagcacccgggccgccatccgcagccacggcagctttcctgtgccactgacccgccgccgcggctccccaagggtcttcaactttgatttccgccggccggggcccgagcccccaaggcagcttaactacatccaggtggagctaaagggctggggtggagaccgccctaaggggccccagaacccctcgagcccccaagcccccatgcccaccacccaccctgcccgaagctcagactcctacgccgtgattgacctcaaaaagaccgtggccatgtccaacctgcagagagctctgccccgagacgatggcaccgccaggaaaacccggcacaacagcaccgacctgcctctgtagggacttcccggtcctcaccaccctctgccccaccatgatccagcctctgcctcacactcctgtcctctgaacccaccctccccagggttcagggttgctttgcagaaggcatggaggtgggaccagatgcttccctgtgctggctggagtccccagagatatcagccaccgagtctcctggtctgtctccaggctggggagagaagggtgaccaggcgaggagggagccgagacgtcaactgtgaagggttcctgtgattgcgtttagcgccctcccgttctgtccatttgtcttgtctgccgactgtccgtgtgtgttttttttggttggaattttgaaacattttgtacctgttgattttatttatcagtttatttttctatttattgttttaaatgtaatttaacatatttattattaatataattatttttaaattctgaaaaaaaaaaaaaaaaaaaaaaaaaaaaaaaaaa

SEQ ID NO: 398128 - DNA, 1000 bp, Homo Sapiens
actacaggtgtgcaagaagagcggaaaaaccgcacaagtgtgcatgttccattggaggcaagggtttctaacgctgaaagcagcacaccaaaagaagaaccaagtagtattgaggacagggatcctcagattcttcttgaacctgaaggagtcaaatttgttttagggccaacccctgttcaaaagcagttaatggaaaaagagaaactggagcaacttggaagagatcaagttagtggaagtggagcaaataacacagaatgggacactggctatgacagtgatgaacgaagagatgcaccctctgttaacaaactggtgtatgaaaatataaatgggctatctatccctagtgcctcaggggtcaggagaggtcgtctgacatccaccagtacctcagatacccagaatatcaacaactcagctcagagaagaactgcattattaaactatgaaaatctaccatctttgcctcctgtttgggaagcccgcaagctaagtagggatgaagatgacaatttaggaccaaagaccccatctctaaatggctaccataataatctagatccaatgcataactatgtaaatacagagaatgtaacagtgccagcaagtgctcacaaaatagaatattcaaggcgtcgggactgtacaccaacagtctttaactttgatatcagacgcccaagtttagaacacaggcagcttaattacatacaggttgacttggaaggtggcagtgactctgacaaccctcagactccaaaaacgcctacaactccccttccacaaacccctaccaggcgcacagagctgtatgccgtgatagacatcgagagaactgctgctatgtcaaatttgcagaaagcactgccacgagatgatggtacatctaggaaaactagacacaatagtactgatctgcccatgttagcctggaaatgaaattaaaaaaaaaaaaaaaaaaaaaaaaaaaaaaaaaaaaaaaaaaaaaaaaaaa

SEQ ID NO: 398129 - DNA, 1000 bp, Homo Sapiens; identical to SEQ ID NO: 221906

SEQ ID NO: 398130 - DNA, 1000 bp, Homo Sapiens; identical to SEQ ID NO: 287441

SEQ ID NO: 398131 - DNA, 1000 bp, Homo Sapiens
agcaggagaaggcgatggcgcacgccgaccccacggagctggcgctgagcggcctggaggccttctctttcgactacatcgtcaagtggcccctttcgctcatcatcaacaggaaagccctcactcgctaccagatgctcttcaggcacatgttctattgcaagcacgtggagcggcagctctgcagcgtctggatcagcaacaaaaccgccaagcagcactcgctgcactccgcccagtggtttgctggggctttcactctgcggcagcgaatgctcaacttcgtccagaatattcaatactacatgatgttcgaagtgatggaaccgacctggcacatcctggagaaaaacctgaaatccgcctccaacattgacgacgtccttggccaccacacaggcttcctggacacctgcctgaaggactgcatgctcaccaaccccgagctgctgaaggtcttctccaagctcatgtctgtgtgcgtcatgttcaccaactgcatgcagaaatttacacagagcatgaaattagatggcgagctgggcgggcagacgctggagcacagcaccgtcctggggctgcccgcaggggccgaggagcgggcccggaaggagctcgccaggaagcacctggctgagcacgcagacactgtgcagctggtgtccggcttcgaggccaccatcaacaagtttgacaagaacttctcagcccacctgctggacctcctggcccggctgagcatctatagcaccagtgactgtgagcacggcatggccagcgtcatctccaggcttgacttcaatggtttctacacggagcgcctggagcgcctgtctgcagagaggagccagaaggccaccccccaagtgcctgtcctgcgggggcccccggctcctgcacccagggtcgcagtcaccgcacagtgagccctggctgtgacaggaaggaagggtgtggggtcagcagggactggtgcaaatgggtccagaattttcaaatc

SEQ ID NO: 398132 - DNA, 1000 bp, Homo Sapiens; identical to SEQ ID NO: 287442

SEQ ID NO: 398133 - DNA, 1000 bp, Homo Sapiens; identical to SEQ ID NO: 221907

SEQ ID NO: 398134 - DNA, 1000 bp, Homo Sapiens; identical to SEQ ID NO: 116667

SEQ ID NO: 398135 - DNA, 1000 bp, Homo Sapiens
caatgtcaactcccccgacagccacggctggacacccttgcactgcgcggcgtcgtgcaacgacacagtcatctgcatggcgctggtgcagcacggcgctgcaatcttcgccaccacgctcagcgacggcgccaccgccttcgagaagtgcgacccttaccgcgagggttatgctgactgcgccacctacctggcagacgtcgagcagagtatggggctgatgaacagcggggcagtgtacgctctctgggactacagcgccgagttcggggacgagctgtccttccgcgagggcgagtcggtcaccgtgctgcggagggacgggccggaggagaccgactggtggtgggccgcgctgcacggccaggagggctacgtgccgcggaactacttcgggctgttccccagggtgaagcctcaaaggagtaaagtctagcaggatagaaggaggtttctgaggctgacagaaacaagcattcctgccttccctccagacctctccctctgttttttgctgcctttatctgcacccctcaccctgctggtggtggtccttgccaccggttctctgttctcctggaagtccagggaagaaggagggccccagccttaaatttagtaatctgccttagccttgggaggtctgggaagggctggaaatcactggggacaggaaaccacttccttttgccaaatcagatcccgtccaaagtgcctcccatgcctaccaccatcatcacatcccccagcaagccagccacctgcccagccgggcctgggatgggccaccacaccactggatattcctgggagtcactgctgacaccatctctcccagcagtcttggggtctgggtgggaaacattggtctctaccaggatccctgccccacctctccccaattaagtgccttcacacagctctggtttaatgtttataaacaaaatagagaaactttccttataaataaaagtagtttgcacagaaaaaaaaaaaaaaa

SEQ ID NO: 398136 - DNA, 1000 bp, Homo Sapiens; identical to SEQ ID NO: 287444

SEQ ID NO: 398137 - DNA, 1000 bp, Homo Sapiens; identical to SEQ ID NO: 287445

SEQ ID NO: 398138 - DNA, 1000 bp, Homo Sapiens
ttgatggggtcagagtccccggcaacaccccgctcttgttcagcacctatgtcatggggcggatggacacatactttgaggacccgctgactttcaaccccgatcgcttcggccctggagcacccaagccacggttcacctacttccccttctccctgggccaccgctcctgcatcgggcagcagtttgctcagatggaggtgaaggtggtcatggcaaagctgctgcagaggctggagttccggctggtgcccgggcagcgcttcgggctgcaggagcaggccacactcaagccactggaccccgtgctgtgcaccctgcggccccgcggctggcagcccgcacccccaccacccccctgctgagggggcctccaggcaggacgagactcctcgggcaagggccgtgcccgcccacctctgctgcccacggccacccacccttctcccctgccccgtcccctgggccacccttcacgctggcttccagcgggccctctgccgaccgcctgcttcacacccctcagcgctccctgtcgcctgcggactccatggcccttcctggactggcccttgcccaactcccagccaccaccactgtccctaccactgagcccttgcacaggccacttgctcagacgagacaccctaactcttgctcactccctaaagccctcttcaggggtcacctcctccaagaagccctccttgccaccccccgccggcaggggcccctcctctgtgctccctcggtcacctgtgctacctctaacaccacactgaccacactgtatcgtgagtgtccgttgacgtgaccaattgccctgccaggctgtcagcgcctcaagggtagggtctgcgtgtgatttgtctctgagccccctgtgcccacccagggcccggcacagagtcgatgctcaataaatgtgtgttgactgcaaaaaaaaaaaaaaaaaaaaaaaaaaaaaaaaaaaaaaaaaaaaaaaaaaaaaaaaaaaaaa

SEQ ID NO: 398139 - DNA, 1000 bp, Homo Sapiens; identical to SEQ ID NO: 287446

SEQ ID NO: 398140 - DNA, 1000 bp, Homo Sapiens; identical to SEQ ID NO: 287448

SEQ ID NO: 398141 - DNA, 1000 bp, Homo Sapiens; identical to SEQ ID NO: 221908

SEQ ID NO: 398142 - DNA, 1000 bp, Homo Sapiens; identical to SEQ ID NO: 116670

SEQ ID NO: 398143 - DNA, 1000 bp, Homo Sapiens; identical to SEQ ID NO: 116671

SEQ ID NO: 398144 - DNA, 1000 bp, Homo Sapiens; identical to SEQ ID NO: 221909

SEQ ID NO: 398145 - DNA, 1000 bp, Homo Sapiens; identical to SEQ ID NO: 221910

SEQ ID NO: 398146 - DNA, 1000 bp, Homo Sapiens
cgatgtgacaagattgtggagaccaaagggtcagcagggaaaaggaatggccgagtgtccatcagggacagtcctgcaaacctcagcttcacagtgaccctggagaatctcacagaggaggacgcaggcacctactggtgtggggtggatacaccgtggctccgagactttcatgatcccattgtcgaggttgaggtgtccgtgttcccggccgggacgaccacagcctccagcccccagagctccatgggcacctcaggtcctcccacgaagctgcccgtgcacacctggcccagcgtgaccagaaaggacagccccgaacccagcccacaccctggctccctgttcagcaatgtccgcttcctgctcctggtcctcttggagctgcccctgctcctgagcatgctgggtgccgtcctctgggtgaacagacctcagagaagctctagaagcaggcagaattggcccaagggtgagaaccagtagcatctgctgtccatcaaggccctgtgctgcaacagagcccctctgggggactggaatgacctcctgaccactccctcccgggctgctctctccacatctcctggaatcctttgtgagcctccttcagccttttccctgtgcccgatcctcatgtgtcacatgtgaacctgacggacatggacgccctgagctgtgagtccacgtctcatgtgcacgccccggccagctaagcctcgggccgtcagcaatacctctgagtgcccggatgccctccctgcacccttccatttctccaggagcctggcactgcttcctccaccgttttcacagggagaagcaggtctaggactcccctgcacctttgccaccataatggcccacactccctgggtccaggagtgtagaatatgcggctgcttccatttgctgagtgtgtcgattcaatgatgctttcaaactttaataaatgacaatgtgtaggccaaaaaaaaaaaaaaaaaaaaaaaaaaaaaaa

SEQ ID NO: 398147 - DNA, 817 bp, Homo Sapiens; identical to SEQ ID NO: 29754

SEQ ID NO: 398148 - DNA, 881 bp, Homo Sapiens
ccacatgctgatccccactacaatcagtgacctgaactcagagtccaagtaggacacgcaggtggacgtggtgactgagatgacatcctctctaaagatttggggcatactcttggccctgctttgcatcctttgcaggctgtgtgtatacagtaacaacatttactggagagaattcataaaacttcattacttaagtccaagtcgagaattcaaagagtacaaatgtgatgtcctcatgagagaaaaagaggctctgaaaggcaagagctttcatatgttcatctatagcttatggttcaaaattcagcgtgcatgcatcaatgagaaggggagcgaccgatatagaaatgcatatgtatgggccccaggtgccctcaaagtactcgagtgtcactgggagaagtacaacaataggtacacagagagcagaagcttcagctacattgaattccattgtggcgtagatggatatgttgataacatagaagacctgaggattatagaacctatcagcaactagaaagtctatgcacatcctcagatattggtagagtattcagtgcttccaaagtggtgggccctgcctccatcaatagcccctgccactccccgcttacatttatgtgtcagtgttttccaactacttagagtttatgtacctcgtgatttcttgataccaaatctttgtgtggtttctgtatctgtaatacaattttgtcctaatttgcctaatttacacccacattttttccaagattcagctcatatggcatctgtcctcgactaacctaagactttcctgatattgactctctttatacctacccaagctgaacgaccctccttttcttaaataaaatatattattctaacgtaaa

SEQ ID NO: 398149 - DNA, 1000 bp, Homo Sapiens
ccgctgaagcacggcatcgtggtggactgggactgcgtgcaggacatctgggagtacatcttccgcaccgccatgaagatcctccccgaggagcacgctgtgctggtctccgaccctccgctcagccccagcagcaaccgggagaagtacgcggagctcatgtttgagacattcggcatcccagccatgcacgtgacgtcccagtcgttgctgtccatctactcctacggcaagacctcggggctggtggtggagagcgggcacggcgtctcgcacgtggtgcccatatccgagggcgacgtgctgccgggcctgaccagccgcgccgactacgctgggggtgacctcaccaactacctgatgcagctgctcaatgaggcgggccacgcattcacggacgaccacctgcacatcatagagcacatcaagaagaagtgctgctatgcggccttcctgcccgaggaggagctgggcctggtcccggaggagctgcgcgtggactacgagctcccggacggcaaactcatcactattggccaggagcgcttccgttgctctgagatgctcttccagccctccctggcaggcagcacccagccgggcctcccggagctcacagctgcctgcctgggccgctgccaggacacgggcttcaaggaggagatggccgccaacgtgctactgtgtggcggctgcactatgctggatggcttccccgagcgcttccagagggagctgagcctcctctgccccggggacagccctgcagtggctgccgctcctgagaggaagacctccgtgtggaccggcggttccatcctggcctccctgcaggccttccaacagctctgggtcagcaaggaagagtttgaggagcggggcagcgtggccatctacagcaagtgctgagcctcggcatttccacagacaaggcctccagcacagatggcacaggcctctctatacacatttacagaatttcacataaaggtttactctg

SEQ ID NO: 398150 - DNA, 1000 bp, Homo Sapiens
gggagaagggtgagccaggcaagccgggccctccggggctgccgggcgcggggggcagcggcgccatcagcactgccacctacaccacggtgccgcgcgtggccttctacgccggcctcaagaacccccacgagggttacgaggtactcaagtttgacgacgtggtcaccaacctaggcaacaactacgacgcggccagcggcaagtttacgtgcaacattcccggcacctactttttcacctaccatgtcctcatgcgcggcggcgacggcaccagtatgtgggcagacctctgcaagaatggccaggtgcgggccagtgctattgcccaggacgcggaccagaactacgactacgccagcaacagcgtgatcctgcacctggacgccggcgacgaggtcttcatcaagctggatggaggcaaagcacacggcggcaacagcaacaaatacagcacgttctctggcttcatcatctactccgactgagctccccacgtctccctccacccacgtccctcacccgccggggtcccctccgggcggggcagacgatgactcgcccctcgcccacccgctcgctgcccggccctccccggctatgacgcccccggcccgtgctcaacaccgcctgggccacagctaggccctcccaccggctcgctgcagagccgggcccagcgcgccctgtccccgtgccagggaaccggggttgaccgcccccgcccagcccgcgctatatatttgtacaataggactgtttactgcccacctccgcctgccagcccaccccagcctggggagaggtcgcggcggcgggtttgcttcctgcgctctgagatgagctgccctcggctccctccggggtggcgcgcccgggggaggggggagttgggggctggatagcttcccagcaccctcagagcccccgcccggctgtgccccgtctgaccaaagttataataaaaacattttcaccccgcaaaaaaaaaaaaaaaaaa

SEQ ID NO: 398151 - DNA, 1000 bp, Homo Sapiens; identical to SEQ ID NO: 116672

SEQ ID NO: 398152 - DNA, 1000 bp, Homo Sapiens
cactgggagaaaggagttttgcaaagtgcaaggacctaaaacatctcatcagtatccagtggtaaaaaggcctcctggctgtctgaggctaggtgggttgaaagccaaggagtcactgagaccaaggctttctctactgattccgcagctcagaccctttcttcagctctgaaagagaaacacgtatcccacctgacatgtccttctgagcccggtaagagcaaaagaatggcagaaaagtttagcccctgaaagccatggagattctcataacttgagacctaatctctgtaaagctaaaataaagaaatagaacaaggctgaggatacgacagtacactgtcagcagggactgtaaacacagacagggtcaaagtgttttctctgaacacattgagttggaatcactgtttagaacacacacacttactttttctggtctctaccactgctgatattttctctaggaaatatacttttacaagtaacaaaaataaaaactcttataaatttctatttttatctgagttacagaaatgattactaaggaagattactcagtaatttgtttaaaaagtaataaaattcaacaaacatttgctgaatagctactatatgtcaagtgctgtgcaaggtattacactctgtaattgaatattattcctcaaaaaattgcacatagtagaacgctatctgggaagctatttttttcagttttgatatttctagcttatctacttccaaactaatttttatttttgctgagactaatcttattcattttctctaatatggcaaccattataaccttaatttattattaacatacctaagaagtacattgttacctctatataccaaagcacattttaaaagtgccattaacaaatgtatcactagccctcctttttccaacaagaagggactgagagatgcagaaatatttgtgacaaaaaattaaagcatttagaaaacttaaaaaaaaaaaaaaaaaaaaaaa

SEQ ID NO: 398153 - DNA, 1000 bp, Homo Sapiens
caaaacagcagcgcgggcaaccggggaccccggccactggagcaggtcacctgttacaagtgtggcgagaaaggacactacgccaacagatgcaccaaagggcacttggcctttctcagtggacagtgacagcagctggagccagctccgagcagcccgggggccccgctgttgggagtgtgcatttaactgtttcatgcgcttgttggcgcgactgtggctcgagctggcccgcagacacgtgggtttcatcactctgaggggccacgtctgttagtttcctatcattttgccgtagtattttttgaaaaagggacatgtgtcctgtgggtccctgcagtcgacatcatgtttggctgggcatcgatgcctcctttctgggactcccggcacaactcccctcatccagggagggaggcagctgctggggaggggcttggctaggtagttctgtgtggcggtggtcattcccctcattaaacaccagttcttggtgacgccaggggctggtaggtcattcaaagctgtggccagctcacgcctgcttcctccctccctgccctgctgaatcctaaagctgtgcctatatctgtgatttgaatgagggagccctttggggcaaattcaggtgcccccattgcctcaggctggccctggtcccaggtggcagcggttgaggaggggtacagggctctcaagcctgaggttttcttctctgggcttaattttctcttggggtacgtgcctgacagtgtttaaggtgtccgttgaactggagttgcagacttttaaatagatgaccccttcagatcatctgtgcctacctcctgcccatcaggcgtctacactgtcactcagacacctgtggcatgtggaggagactgccctgtcctgagcctggaaaatgtgaaactgtctcctgcaacctgctgggcatgtgggcctggctgtgttcaattgcaagaacaatttttatgaaatggattaaagcttgtttttt

SEQ ID NO: 398154 - DNA, 1000 bp, Homo Sapiens; identical to SEQ ID NO: 287454

SEQ ID NO: 398155 - DNA, 1000 bp, Homo Sapiens; identical to SEQ ID NO: 116673

SEQ ID NO: 398156 - DNA, 1000 bp, Homo Sapiens; identical to SEQ ID NO: 287456

SEQ ID NO: 398157 - DNA, 1000 bp, Homo Sapiens; identical to SEQ ID NO: 116674

SEQ ID NO: 398158 - DNA, 1000 bp, Homo Sapiens; identical to SEQ ID NO: 116675

SEQ ID NO: 398159 - DNA, 1000 bp, Homo Sapiens
cagaaaacattgtgccctctttctcccctgggccttcagggagatacggagctagtggtaggagtgaaggtggcaggaattcccgggtcacccctgcagctgccaactaccgcagcagaactgcaaaggcaaagccttccaagcaacagggagctggggatgcagaagaggaagaggaggagtaatggtgtctccagagactttacatcggttcctgtcttctgtgcacagcagcacttgccgctgtgcaggcccacctctttggctctttgggtgggagagtttttccagattttagatttttctaggttatggccattttgtgtcttttgaggttgtgctgtgggggtttgggtttgagggaagggagcagggtggcggttgaggaacgcttcagccttagctgctacctttcggcagcagtgaaatacaagctgcagcctcggctgccagggctcccttttgacttattgtcgccactgccccttggtgctgtgtggtcccagtggaaggaggggaagattttggaaacctggtagccaccagtaaggtgattctctgccctgttggggcctaaatttgggggcttttgggcaacctctccgtgtactgcgtctgtccacactcgattgggccccaggtgtgtatgaggcgctctggtaaggtgctcaggccagttgcaatgtctgtcagtaacgaggcttttgatgtgttgagctggaggtgagtggaccgggggctgtgttttaagctgcttccttggcatttgcatcactgccttctgttcccgggggagcatggatcttttgtcctcactgctttctaatggggagggctgagggctccctgtccccacagcaggtatgtttgctctgccccagccccacacttgctctgaaaaccaagtgtcagagccccttccccttgtttttattttactgttataataattattaacttccttgtaatagaaataaagtttgtacttggagttcagctc

SEQ ID NO: 398160 - DNA, 1000 bp, Homo Sapiens; identical to SEQ ID NO: 116676

SEQ ID NO: 398161 - DNA, 1000 bp, Homo Sapiens; identical to SEQ ID NO: 116677

SEQ ID NO: 398162 - DNA, 1000 bp, Homo Sapiens
ctgtgtttccgcagcgagagcgaggaggaggtgctactcgtgagcagtagtcgccatccagacagatggattgtccctggaggaggcatggagcccgaggaggagccaagtgtggcagcagttcgtgaagtctgtgaggaggctggagtaaaagggacattgggaagattagttggaatttttgagaaccaggagaggaagcacaggacgtatgtctatgtgctcattgtcactgaagtgctggaagactgggaagattcagttaacattggaaggaagagggaatggtttaaaatagaagacgccataaaagtgctgcagtatcacaaacccgtgcaggcatcatattttgaaacattgaggcaaggctactcagccaacaatggcaccccagtcgtggccaccacatactcggtttctgctcagagctcgatgtcaggcatcagatgactgaagacttcctgtaagagaaatggaaattggaaactagactgaagtgcaaatcttccctctcaccctggctctttccacttctcacaggcctcctctttcaaataaggcatggtgggcagcaaagaaagggtgtattgataatgttgctgtttggtgttaagtgatggggctttttcttctgtttttattgagggtgggggttgggtgtgtaatttgtaagtacttttgtgcatgatctgtccctccctcttcccacccctgcagtcctctgaagagaggccaacagccttcccctgccttggattctgaagtgttcctgtttgtcttatcctggccctggccagacgttttctttgatttttaattttttttttttattaaaagataccagtatgagatgaaaacttccaataatttgtcctataatgtgctgtacagttcagtagagtggtcactttcactgcagtatacatttatctacacattatatatcggacatataatatgtaaataaatgacttctagaaagaaaaaaaaaaaaaaaaaa

SEQ ID NO: 398163 - DNA, 1000 bp, Homo Sapiens; identical to SEQ ID NO: 287462

SEQ ID NO: 398164 - DNA, 1000 bp, Homo Sapiens; identical to SEQ ID NO: 287463

SEQ ID NO: 398165 - DNA, 1000 bp, Homo Sapiens; identical to SEQ ID NO: 116679

SEQ ID NO: 398166 - DNA, 1000 bp, Homo Sapiens; identical to SEQ ID NO: 116680

SEQ ID NO: 398167 - DNA, 1000 bp, Homo Sapiens
cttctggaagccattgcccacttcctggtggttcaggaaacgcaactcagcagcaaggtggtacagaagttggtcctgccctttgggcgactgaactacctgcccctggaacagcagtttatgccctgccttgagaggatcctggctcgggaagcaggggtggcacccctggctacagtcaacatcttgatgtcactgtgccaactgcggtgcctgcccttcagagccctgcactttgttttttcccctggcttcatcaactacatcagtggcacccctcatgctctgattgtgcgtcgctacctctccctgctggacacggccgtggagctggagctcccaggataccggggtccccgccttccccgaaggcagcaagtgcccatctttccccagcctctcatcaccgaccgtgcccgctgcaagtacagtcacaaggacatagtagctgaggggttgcgccagctgctgggggaggagaaataccgccaggacctgactgtgcctccaggctactgcacagacttcctgctgtgcgccagcagctctggtgctgtgcttcccgtgaggacccaggaccccttcctgccatacccaccaaggtcctgcccacagggccaggctgcctctagcgccactactcgagaccctgcccagagggtggtgctggtgttgcgggaacgctggcatttctgccgggacggccgggtgctgctgggctcgagggccctgagggagcggcacctaggcctgatgggctaccagctcctgccgctacccttcgaggaactggagtcccagagaggcctgccccagctcaagagctacctgaggcagaagctccaggccctgggcctgcgctgggggcctgaagggggctgaggggttgatgtggggttcaggatggcccccccatggggggtggatgatttgcactttggttccctgtgttttgatttctcattaaagttcctttccttccccgtaaaaaaaaaaaaaa

SEQ ID NO: 398168 - DNA, 1000 bp, Homo Sapiens; identical to SEQ ID NO: 116682

SEQ ID NO: 398169 - DNA, 1000 bp, Homo Sapiens; identical to SEQ ID NO: 221915

SEQ ID NO: 398170 - DNA, 1000 bp, Homo Sapiens; identical to SEQ ID NO: 116683

SEQ ID NO: 398171 - DNA, 1000 bp, Homo Sapiens
tcatgctttgtaccaaatttaatgaacgcgtgttctgtaatcaaactgcaaatattgtcataaccaacatccaaaatgacggctgctatatataagtgtttgtcatatggaatttaatcgtaagccatgatcataatgttaactaaataactttatgtggcactgcctagtaagggaactatggaaaggtttggatttctccaaatctgggagaattttcaaaataagaaaataacctttatatgatatactatgactaggctgtgtatttcttttcagggatttttctaccttcagggttggatgtagtttagttactattaccatagccaacctgtagttttacatatacattttcttgtggagcaatagagttctccattttacagaagcattttaaatgtagtttgaatattttccacaagatgctgcaatgtgagttatcacttcatttatcttaaagaaagactaaactggttgtcagttacatctgacagaaaaaaaaaaaaaatcactgtgtaaccaggttaagtggtaaaataatccaggcgtcagtcaaaggcattttgctgactttaatattgattatatttttaacaggaatttaagaaaatattactggaattaaaaatatatatatattaaacaagaattttctttgctctgtctagcttaaactactactcaagctgcttaagttcttaagtattgtttgtaatcaccaataaataagtgcatttgtaattcatcagtcattattagcttttattaaaagaagattacgttttacaatgtaactataatctcttgaatttggtatcttattaatgagttttaaagatgtaaaacctaaccttttttaaagctccattgtcttatgtttttagaggcttttccgtaaacatatatcttacatataataaacttttcaaatcttgcaaaaaaaaaaaaaaaaaaaaaaaaaaaaaaaaaaaaaaaaaaaaaaaaaaaaaaaaaaaaa

SEQ ID NO: 398172 - DNA, 1000 bp, Homo Sapiens; identical to SEQ ID NO: 115773

SEQ ID NO: 398173 - DNA, 1000 bp, Homo Sapiens
gagatgcatttgttggaggttttctgtctcaactggtctctgacaagcctctgactgaatgtatccgtgctggccactatgcagcaagcatcataattagacggactggctgcacctttcctgagaagccagacttccactgatggaagagctgaaaacacaagcccaggagtgcagacactgccctaattgcttcctgagaattcccatattaataaagaagaaaattatctgccattttttcctactataataatgctgaatcttaatttagagggtacaagggtatggtaatgcttgtagaatctttattatctcaacaatctaaaaaatgatgtttatttccatagtttgatagtgccacttaaatgccaattaaacaagaatataacatttcaatagaaatttttatttcattttcaattactttgtaaattcgtgtgtatttagtacactgatttgtttttttacatttctgctttgaatgcagatgcaatttaatataatagattttttaatgaattaatcttaacatagtaatctttagctttttatacaaatatatttaatttaggagtatatgtgtgtctatacacacacatacataaatataccacatatacacctgatagtcaaataaggtacagaaattttatcttgtcaattatgccaaataatctctttaatgtgcactcaaacatgtaataaactttggataattaaataatgtgccaaatttaagttgtaccacaatattcaaatcatagtcttatggaactctgtaattggacacaaacaaaaacttgtcatataggaatttttttctgtcttttccctgtgtacagcaaactgaggaagaaagatcattatttaatactgggccctgaaatgacacccaatttgttaatggaattatgaagaacagcaatataatacactgaagaataacttagtatcagagaccaataaatcacttttttaaggatgacaaaatggtata

SEQ ID NO: 398174 - DNA, 1000 bp, Homo Sapiens; identical to SEQ ID NO: 220511

SEQ ID NO: 398175 - DNA, 1000 bp, Homo Sapiens; identical to SEQ ID NO: 287469

SEQ ID NO: 398176 - DNA, 1000 bp, Homo Sapiens; identical to SEQ ID NO: 221918

SEQ ID NO: 398177 - DNA, 1000 bp, Homo Sapiens; identical to SEQ ID NO: 116684

SEQ ID NO: 398178 - DNA, 1000 bp, Homo Sapiens; identical to SEQ ID NO: 220752

SEQ ID NO: 398179 - DNA, 1000 bp, Homo Sapiens; identical to SEQ ID NO: 221920

SEQ ID NO: 398180 - DNA, 1000 bp, Homo Sapiens; identical to SEQ ID NO: 116685

SEQ ID NO: 398181 - DNA, 1000 bp, Homo Sapiens; identical to SEQ ID NO: 116686

SEQ ID NO: 398182 - DNA, 1000 bp, Homo Sapiens; identical to SEQ ID NO: 221921

SEQ ID NO: 398183 - DNA, 1000 bp, Homo Sapiens; identical to SEQ ID NO: 116688

SEQ ID NO: 398184 - DNA, 1000 bp, Homo Sapiens
ccacccacggagggacctacagatgcttcggctctttccgtgccctgccctgcgtgtggtcaaactcaagtgacccactgcttgtttctgtcacaggaaacccttcaagtagttggccttcacccacagaaccaagctccaaatctggtatctgcagacacctgcatgttctgattgggacctcagtggtcatcttcctcttcatcctcctcctcttctttctcctttatcgctggtgctccaacaaaaagaatgctgctgtaatggaccaagagcctgcgggggacagaacagtgaataggcaggactctgatgaacaagaccctcaggaggtgacgtacgcacagttggatcactgcgttttcatacagagaaaaatcagtcgcccttctcagaggcccaagacacccctaacagataccagcgtgtacacggaacttccaaatgctgagcccagatccaaagttgtctcctgcccacgagcaccacagtcaggtcttgagggggttttctagggagacaacagccctgtctcaaaaccaggttgccagatccaatgaaccagcagctggaatctgaaggcatcagtctgcatcttaggggatcgctcttcctcacaccacgaatctgaacatgcctctctcttgcttacaaatgcctaaggtcgccactgcctgctgcagagaaaacacactcctttgcttagcccacaaggtatctatttcacttgacccctgcccacctctccaacctaactggcttacttcctagtcctacttgaggctgcaatcacactgaggaactcacaattccaaacatacaagaggctccctcttaacacggcacttacacacttgctgttccaccttccctcatgctgttccacctcccctcagactatctttcagccttctgtcatcagtaaaatttataaattttttttataacttcagtgtagctctctcctcttcaaataaacatgtctgccctcatggtttcg

SEQ ID NO: 398185 - DNA, 1000 bp, Homo Sapiens; identical to SEQ ID NO: 116690

SEQ ID NO: 398186 - DNA, 1000 bp, Homo Sapiens; identical to SEQ ID NO: 116691

SEQ ID NO: 398187 - DNA, 941 bp, Homo Sapiens
cgcctccctcgctccacgcgcgcccggactcggcggccaggcttgcgcgcggttcccctcccggtgggcggattcctgggcaagatgaagtgggtgtgggcgctcttgctgttggcggcgctgggcagcggccgcgcggagcgcgactgccgagtgagcagcttccgagtcaaggagaacttcgacaaggctcgcttctctgggacctggtacgccatggccaagaaggaccccgagggcctctttctgcaggacaacatcgtcgcggagttctccgtggacgagaccggccagatgagcgccacagccaagggccgagtccgtcttttgaataactgggacgtgtgcgcagacatggtgggcaccttcacagacaccgaggaccctgccaagttcaagatgaagtactggggcgtagcctcctttctccagaaaggaaatgatgaccactggatcgtcgacacagactacgacacgtatgccgtgcagtactcctgccgcctcctgaacctcgatggcacctgtgctgacagctactccttcgtgttttcccgggaccccaacggcctgcccccagaagcgcagaagattgtaaggcagcggcaggaggagctgtgcctggccaggcagtacaggctgatcgtccacaacggttactgcgatggcagatcagaaagaaaccttttgtagcaatatcaagaatctagtttcatctgagaacttctgattagctctcagtcttcagctctatttatcttaggagtttaatttgcccttctctccccatcttccctcagttcccataaaaccttcattacacataaagatacacgtgggggtcagtgaatctgcttgcctttcctgaaagtttctggggcttaagattccagactctgattcattaaactatagtcacccgtgtcctgtgaaaaaaaaaaaaa

SEQ ID NO: 398188 - DNA, 1000 bp, Homo Sapiens; identical to SEQ ID NO: 116692

SEQ ID NO: 398189 - DNA, 1000 bp, Homo Sapiens; identical to SEQ ID NO: 287480

SEQ ID NO: 398190 - DNA, 1000 bp, Homo Sapiens
taaatcttgtacataactatttcgatggcaaatgttaagccttctaaaaggaaagtgtagattggaaaatgattttttttccaaatgatgtttttgccttctaatatactgtaaggtaatgagcttcagaacaggcaacctgaccctgcagaggtcgcgtgctgtgggatgacagcgggacgggagctcacaagtgctttcactgaagatttgttcatatactgtgtattgattgttgtgtaatatatcatcattgcttttgtaaatacgtaaaactgtaattttttaatggtgtgcttcccttatacttttttgatcagagaattttggaaagtaccaaagaagcaggggaatcattggccagtgttacgttttcacattgtctgtctcccaccctcactgatcacgcctgccccagagcagtgtgtggcggtgacaccgtcacccagcatgcgccacgccgtggctcccaccagcagtgccaccgccaccacaccccagatcccacccaccttgcagtggcctttccttgtcatcagagtagagaatgcacaggtgttggtgagggcgtgtggctgagcactacatgtcaagtccagagtcagtttctatcccaattctccctgcagcctgaagaacggatccttgtctccaatgtcagcacaaaggaggctttttctgtgctttgacattctagcacttcagggatgagagggagggagaatcctggatgctggatggagtatttctctgaggcccacacaaagctggacacccccaggctctactccatcccattggagtctcttctttttttgatagcgggagggaggaagtacgactaatgttggagcctgaaactatggaaatgctgctaaaatttttatattgacaaacattttcttggtacttcattgtcatttttcattaatcaaccatattaaatttataataaaaaatgcccctcagaaaaaaaaaaaaaaagaaaaaaaaaaaaaaa

SEQ ID NO: 398191 - DNA, 1000 bp, Homo Sapiens; identical to SEQ ID NO: 287482

SEQ ID NO: 398192 - DNA, 1000 bp, Homo Sapiens
aaaacagttatattgtcataccatagtaggaagaaaaacctttatttggaatatacactactgtaagtttgtacagatcatatacctaccacctgtctttgcttaaagagccttgattacataaatatgtaggaaaaaacatattgagttcaaaatttatatctaacattgtttatgttatgatttttttttaattgcaaagactaggtgtatatttttttctgtttttctaaatgacccgtggtacttaataggtgtactaaaattgtgttgggagcagggatttggaaatttctgagagatgtgtagttaatttagtaattctgtttcatgagatatgatctgttatgctagtggtttaataggcttgctatgtaagtagaacgtggctcaactagatatctttatatgtatgggcattactcttagtgatatttgtttcctgtcctttgttgctcatgctgtttaagtgcaggctgagacccagcctctttgtaagtacagtaaaataatccaccgttttttacagaccctagtcaaagggttaaaaaaattaagattgctttccatgtttgaaatttaccattgagagtcaatgaagttgctattttgagtttagcattgatattgtgaaaataagtgcaatttggatttcatgtttcttaatattcattcttgtttcacaaatgaatgattaaggaattatgcatcataaaggaacctaagtgaggtatatgatgagtgtattgtctttgcacacacatataggtatattctgaatacaagcttattcacattttgcttcctaatctttttgttgtacagggattcaggtttcttattcttacaacatgattgtttatatgtgaagcacatcttgctgttgccttatttttgatgcttttattcatgacaagaattgtcaatataagaatgtatatcttttttgcaaccaatttaataaaggagttgaaagaaaaaaaaaaaaaaaaaaaaaaaa

SEQ ID NO: 398193 - DNA, 1000 bp, Homo Sapiens; identical to SEQ ID NO: 116694

SEQ ID NO: 398194 - DNA, 1000 bp, Homo Sapiens; identical to SEQ ID NO: 116695

SEQ ID NO: 398195 - DNA, 932 bp, Homo Sapiens
gaaagcctgccagcacctattccacctcccagcccagcatggcacccctgctgcccatccggaccttgcccttgatcctgattctgctggctctgctgtccccaggggctgcagacttcaacatctcaagcctctctggtctgctgtccccggcgctaacggagagcctgctggttgccttgcccccctgtcacctcacaggaggcaatgccacactgatggtccggagagccaatgacagcaaagtggtgacgtccagctttgtggtgcctccgtgccgtgggcgcagggaactggtgagtgtggtggacagtggtgctggcttcacagtcactcggctcagtgcataccaggtgacaaacctcgtgccaggaaccaaattctacatttcctacctagtgaagaaggggacagccactgagtccagcagagagatcccaatgtccacactccctcgaaggaacatggaatccattgggctgggtatggcccgcacagggggcatggtggtcatcacggtgctgctctctgtcgccatgttcctgctggtgctgggcttcatcattgccctggcactgggctcccgcaagtaaggaggtctgcccggagcagcagcttctccaggaagcccagggcaccatccagctccccagcccacctgctcccaggccccaggcctgtggctcccttggtgccctcgcctcctcctcctgccctcctctcccctagagccctctcctccctctgtccctctccttgcccccagtgcctcaccttccaacactccattattcctctcaccccactcctgtcagagttgactttcctcccattttaccactttaaacacccccataacaattcccccatccttcagtgaactaagtccctataataaaggctgaggctgcatctgccaaaaaaaaaaaaaa

SEQ ID NO: 398196 - DNA, 1000 bp, Homo Sapiens
cagacatgcagggtgacggtgaagagcagaataaagaagcgctgcaggacgtggaagacgaaaatcagtgagacataagccaacaagagaaaccatctctgaccaccccctcctccccatcccaccctttggaaactccccattgtcactgagaaccaccaaatctgacttttacatttggtctcagaatttaggttcctgccctgttggttttttttttttttttttttaaacagttttcaaaagttcttaaaggcaagagtgaatttctgtggattttactggtcccagcttttaggttctttaagacactaacaggactacatagaggctttttcagcattactgtgtcgtctccgtgccagatgtggcaagatcaccattagcaaatggaaattacatttgaaagccattagacttataggtgatgcaagcatctaagagagaggttaatcacactatagaggcataagtggtatcagttttcatttttctaattgtttaaactgtgttttataccagtgtttgcaagtaattgggtgttagcttgagatggttaaaggtggtttggggagggacttcgttgtaatggttttgctgtaaaaaatgtttccaactccgctgaaatgttgctgaaaagcatggtgctggtaacagttcaacaatccgtggctgctcattcttgcctactttactctcccactgaagcaggttagcgttgaaggtggtatggaaaagcctgcatgcctgttcaattcttttgtttcttctccttccccctccccctacctccttcccctcactcctcccctccttcgctcgctcaacctcttttgttcagtatgtgtaacttgaagctaatttgtactactggatatctgactggagccacagatacagaatctgtattgttcttactgaaacacagcatggaattaacattaaacttaaataaaacaaacctaaattaaaaaaaaaaaaaaaaaaaaaaaaaaaaaaa

SEQ ID NO: 398197 - DNA, 1000 bp, Homo Sapiens
gttcagtaaaataatttggtcaaacaacagtctattgcattgatttataaatagttgtcagttcacatagcaatttaatcaagtaatcattaattagttaccccctatatataaatatatgtaatcaatttcttcaaatagcttgcttacatgataatcaattagccaaccatgagtcatttagaatagtgataaatagaatacacagaatagtgatgaaattcaatttaaaaaatcacgttagcctccaaaccatttaattcaaatgaacccatcaactggatgccaactctggcgaatgtaggacctctgagtggctgtataattgttaattcaaatgaaattcatttaaacagttgacaaactgtcattcaacaattagctccaggaaataacagttatttcatcataaaacagtcccttcaaacacacaattgttctgctgaagagttgtcatcaacaatccaatgctcacctattcagttgctctgtggtcagtgtggctgcatagcagtggattccatgaaaggagtcattttagtgatgagctgccagtccattcccaggccaggctgtcgctggccatccattcagtcgattcagtcataggcgaatctgttctgcccgaggcttgtggtcaagcaaaaattcagccctgaaatcaggcacatctgttcgttggactaaacccacaggttagttcagtcaaagcaggcaacccccttgtgggcactgaccctgccactggggtcatggcggttgtggcagctggggaggtttggccccaacagccctcctgtgcctgcttccctgtgtgtcggggtcctccagggagctgacccagaggtggaggccacggaggcagggtctctggggactgtcggggggtacagagggagaaggctctgcaagagctccctggcaatacccccttgtgtaattgctttgtgtgcgacagggaggaagtttcaataaagcaacaacaagcttcaaggaattc

SEQ ID NO: 398198 - DNA, 1000 bp, Homo Sapiens
ggctggctagtcagccttgcatgtattccttggctgaatgggagagtgccccatgttctgcaagactacttggtattcttgtagggccgacactaaataaaagccaaaccttgggcactgttttttctccctggtgctcagagcacctgtgggaaaggttgctgtctgtctcagtacaatccaaatttgtcgtagacttgtgcaatatatactgttgtgggttggagaaaagtggaaagctacactgggaagaaactcccttccttcaatttctcagtgacattgatgaggggtcctcaaaagacctcgagtttcccaaaccgaatcaccttaagaaggacagggctagggcatttggccaggatggccaccctcctgctgttgccccttagtgaggaatcttcaccccacttcctctacccccaggttctcctccccacagccagtcccctttcctggatttctaaactgctcaattttgactcaaaggtgctatttaccaaacactctccctacccattcctgccagctctgcctccttttcaactctccacattttgtattgccttcccagacctgcttccagtctttattgctttaaagttcactttgggcccacagacccaagagctaattttctggtttgtgggttgaaacaaagctgtgaatcactgcaggctgtgttcttgcatcttgtctgcaaacaggtccctgcctttttagaagcagcctcatggtctcatgcttaatcttgtctctcttctcttctttatgatgttcactttaaaaacaacaaaacccctgagctggactgttgagcaggcctgtctctcctattaagtaaaaataaatagtagtagtatgtttgtaagctattctgacagaaaagacaaaggttactaattgtatgatagtgtttttatatggaagaatgtacagcttatggacaaatgtacacctttttgttactttaataaaaatgtagtaggataaaaaaaaa

SEQ ID NO: 398199 - DNA, 1000 bp, Homo Sapiens; identical to SEQ ID NO: 221925

SEQ ID NO: 398200 - DNA, 1000 bp, Homo Sapiens; identical to SEQ ID NO: 116696

SEQ ID NO: 398201 - DNA, 1000 bp, Homo Sapiens; identical to SEQ ID NO: 287486

SEQ ID NO: 398202 - DNA, 1000 bp, Homo Sapiens; identical to SEQ ID NO: 116697

SEQ ID NO: 398203 - DNA, 1000 bp, Homo Sapiens; identical to SEQ ID NO: 221929

SEQ ID NO: 398204 - DNA, 1000 bp, Homo Sapiens; identical to SEQ ID NO: 116698

SEQ ID NO: 398205 - DNA, 1000 bp, Homo Sapiens; identical to SEQ ID NO: 287492

SEQ ID NO: 398206 - DNA, 1000 bp, Homo Sapiens; identical to SEQ ID NO: 116699

SEQ ID NO: 398207 - DNA, 1000 bp, Homo Sapiens; identical to SEQ ID NO: 116700

SEQ ID NO: 398208 - DNA, 1000 bp, Homo Sapiens; identical to SEQ ID NO: 287495

SEQ ID NO: 398209 - DNA, 1000 bp, Homo Sapiens; identical to SEQ ID NO: 287496

SEQ ID NO: 398210 - DNA, 1000 bp, Homo Sapiens; identical to SEQ ID NO: 287497

SEQ ID NO: 398211 - DNA, 1000 bp, Homo Sapiens; identical to SEQ ID NO: 287498

SEQ ID NO: 398212 - DNA, 1000 bp, Homo Sapiens; identical to SEQ ID NO: 287499

SEQ ID NO: 398213 - DNA, 1000 bp, Homo Sapiens; identical to SEQ ID NO: 221931

SEQ ID NO: 398214 - DNA, 1000 bp, Homo Sapiens; identical to SEQ ID NO: 116701

SEQ ID NO: 398215 - DNA, 1000 bp, Homo Sapiens
catgtgttgccaagaatagagcaggagaagccaccttcactgtgcagctggatgtccttgcaaaagaacataaaagagcaccaatgtttatctacaaaccacagagcaaaaaagttttagagggagattcagtgaaactagaatgccagatctcggctatacctccaccaaagcttttctggaaaagaaataatgaaatggtacaattcaacactgaccgaataagcttatatcaagataacactggaagagttactttactgataaaagatgtaaacaagaaagatgctgggtggtatactgtgtcagcagttaatgaagctggagtgactacatgtaacacaagattagacgttacggcacgtccaaaccaaactcttccagctcctaagcagttacgggttcgaccaacattcagcaaatatttagcacttaatgggaaaggtttgaatgtaaaacaagcttttaacccagaaggagaatttcagcgtttggcagctcaatctggactctatgaaagtgaagaactttaataactttaccaacattggaaaacagccaactacaccattagtaatatatttgattacatttttttgaaattaatccatagctgtattaacagattatggttttaattaggtaatatagttaatatatatttataatattatttatcctttgactcttgcacattctatgtacccctccgatttgtgaagcctacaggaaatctgggtatatggatttgtaactgcagaagactatcttaaaatacaggattttaacatttaagtcatgcacatttaacaattacaggttataaattagtatcaactttttaaacacatctaatgcttgtaataacgtttactggtactgctttctaaatactgttttacccgttttctcttgtaggaatactaacatggtatagattatctgagtgttccacagttgtatgtcaaaagaaaataaaattcaaatatttaaaacggac

SEQ ID NO: 398216 - DNA, 1000 bp, Homo Sapiens; identical to SEQ ID NO: 287503

SEQ ID NO: 398217 - DNA, 1000 bp, Homo Sapiens
aagaggtctcttcataattgaccccaatggagtcatcaagcatttgagcgtcaacgatctcccagtgggccgaagcgtggaagaaaccctccgcttggtgaaggcgttccagtatgtagaaacacatggagaagtctgcccagcgaactggacaccggattctcctacgatcaagccaagtccagctgcttccaaagagtactttcagaaggtaaatcagtagatcacccatgtgtatctgcaccttctcaactgagagaagaaccacagttgaaacctgcttttatcattttcaagatggttatttgtagaaggcaaggaaccaattatgcttgtattcataagtattactctaaatgttttgtttttgtaattctggctaagaccttttaaacatggttagttgctagtacaaggaatcctttattggtaacatcttggtggctggctagctagtttctacagaacataatttgcctctatagaaggctattcttagatcatgtctcaatggaaacactcttctttcttagccttacttgaatcttgcctataataaagtagagcaacacacattgaaagcttctgatcaacggtcctgaaattttcatcttgaatgtctttgtattaaactgaattttcttttaagctaacaaagatcataattttcaatgattagccgtgtaactcctgcaatgaatgtttatgtgattgaagcaaatgtgaatcgtattattttaaaaagtggcagagtgacttaactgatcatgcatgatccctcatccctgaaattgagtttatgtagtcattttacttattttattcattagctaactttgtctatgtatatttctagatattgattagtgtaatcgattataaaggatatttatcaaatccagggattgcattttgaaattataattattttctttgctgaagtattcattgtaaaacatacaaaataaacatattttaaaacatttgcattttaccacca

SEQ ID NO: 398218 - DNA, 1000 bp, Homo Sapiens; identical to SEQ ID NO: 221933

SEQ ID NO: 398219 - DNA, 1000 bp, Homo Sapiens
gtaaagctttaggaagacccactacgttatgtgagactatggggaaagctgaaatttggttaatccgaacatattgggattttgaatttcctcgtccatacttacctaattttgagtttgttggaggattgcactgcaaacctgccaaacctttacctaaggaaatggaagaatttatccagagctcaggtaaaaatggtgttgtggtgttttctctgggatcaatggtcaaaaaccttacagaagaaaaggccaatcttattgcctcagcccttgcccagattccacagaaggttttatggagatacaaaggaaagaaaccagccacattaggaaacaatactcagctctttgattggataccccagaatgatcttcttggacatcccaaaaccaaagcttttatcactcatggtggaactaatgggatctacgaagctatttaccacggagtccctatggtgggagttcccatgtttgctgatcagcctgataacattgctcacatgaaggccaaaggagcagctgtggaagtgaacctaaacacaatgacaagtgtggatttgcttagcgctttgagaacagtcattaatgaaccttcttataaagagaatgctatgaggttatcaagaattcaccatgatcaacctgtaaagcccctggatcgagcagtcttctggatcgagtttgtcatgcgccacaaaggagccaagcaccttcgggttgcagcccatgacctcacctggttccagtaccactctttggatgtaattgggttcttgctggtctgtgtgacaacggctatatttttggtcatacaatgttgtttgttttcctgtcaaaaatttggtaagataggaaagaagaaaaaaagagaataggtcaagaaaaagaggaaatatatatattcttaagtttggcaaaatcctgagtagtggaagtcctattaattccagacaaaagggagtttaacaaaaacacgtcttccatcctggttcca

SEQ ID NO: 398220 - DNA, 1000 bp, Homo Sapiens; identical to SEQ ID NO: 287506

SEQ ID NO: 398221 - DNA, 1000 bp, Homo Sapiens; identical to SEQ ID NO: 116703

SEQ ID NO: 398222 - DNA, 1000 bp, Homo Sapiens; identical to SEQ ID NO: 221935

SEQ ID NO: 398223 - DNA, 1000 bp, Homo Sapiens; identical to SEQ ID NO: 287509

SEQ ID NO: 398224 - DNA, 1000 bp, Homo Sapiens; identical to SEQ ID NO: 287510

SEQ ID NO: 398225 - DNA, 1000 bp, Homo Sapiens
tgtgaaaacagctgcatcttgtatagtgacctgggcttgccaaaggagctcactctctgggtggacccatgtgaggtgtgctgtcggtatggagagaaaaacaatgcattcattgttgccagctttgaaaataaagatgagaacaaggatgagatctccaggaaagttaccagggcccttgataaggttacctctgattatcattcaggatcctcttcttcagatgaagaaacaagtaaggaaatggaagtgaaacccagttcggtgactgcagccgcaagtcctgtgtaccagatttcagaacttatatttccacctcttccaatgtggcaccctttgcccagaaaaaagccaggaatgtatcgagggaatggccatcagaatcactatcctcctcctgttccatttggttatccaaatcagggaagaaaaaataaaccatatcgcccaattccagtgacatgggtacctcctcctggaatgcattgtgaccggaatcactggattaatcctcacatgttagcacctcactaacttcgtttttgattgtgttggtgtcatgttgagaaaaaggtagaataaaccttactacacattaaaagttaaaagttcttactaatagtagtgaagttagatgggccaaaccatcaaacttatttttatagaagttattgagaataatctttcttaaaaaatatatgcactttagatattgatatagtttgagaaattttattaaagttagtcaagtgcctaagtttttaatattggacttgagtatttatatattgtgcatcaactctgttggatacgagaacactgtagaagtggacgatttgttctagcacctttgagaatttactttatggagcgtatgtaagttatttatatacaaggaaatctattttatgtcgttgtttaagagaattgtgtgaaatcatgtagttgcaaataaaaaatagtttgaggcatgaaaaaaaaaaaaaaaaaaaaaaaaaaa

SEQ ID NO: 398226 - DNA, 1000 bp, Homo Sapiens; identical to SEQ ID NO: 287512

SEQ ID NO: 398227 - DNA, 1000 bp, Homo Sapiens; identical to SEQ ID NO: 116706

SEQ ID NO: 398228 - DNA, 1000 bp, Homo Sapiens; identical to SEQ ID NO: 287514

SEQ ID NO: 398229 - DNA, 1000 bp, Homo Sapiens; identical to SEQ ID NO: 116707

SEQ ID NO: 398230 - DNA, 1000 bp, Homo Sapiens; identical to SEQ ID NO: 116708

SEQ ID NO: 398231 - DNA, 1000 bp, Homo Sapiens; identical to SEQ ID NO: 116709

SEQ ID NO: 398232 - DNA, 1000 bp, Homo Sapiens; identical to SEQ ID NO: 116710

SEQ ID NO: 398233 - DNA, 1000 bp, Homo Sapiens
gcggatttaaagtccaatttctcatgaccaaaaaatgtgtggttttttcccatgtgtcccctaccccccaatttcttgtcccctcttaaagagcagttgtcaccacctgaacaccaaggcattgtattttcatgcccagttaacttatttacaatatttaagttctctgcttctgcatttggttggtttcctgaagcgcagcccctgtgaataacaggtggcttttcatggatgtctctagtcagagaaaaatgataaaggcttaaattgaggattaacagaagcagattaacctcagaaatcctgtctggctggcagatttcaagtaaaaaaaaaaaaaaggtgggttggggggacccttttctttctagttgtctttaaggaaaattaattttacttttttttttgttctggccgaaatttttatgagatatctctcacttgtcttccactttgaaccggttaaagctcatagctgtcagctctgaatgaggaggggagaagcccctgggtctttctttgaaaggaatccgctgcttgagggctgcctccctcatggtgtgcgtgtcgttctcttcctgacgcatctgtgatatcagaggtaactatgcaaagcatccaggcggttctgaatgtgaagcactacacccagcagagtcccggtgccctctgtccccactgccggcccatgtcctctctccggaggtcaccaaggaatgcacaggtttcgactaccagaaaggggagtccttgggttctttcaaaaaattcgtgaggagagctgtctacagtggaatagggggtctccctggggaatgcaggccaagtccttttattttaacatgatgtccatgaagaggtttgccgtctgggcagccctgtcggcaaggagcgtgcatactgcgtttgtgtaattgtttgctgtatctcccttccctctgagctgtattgttctttaatggctgtcttgcccttccaaaaaaaattgaaaaaaaaaaaa

SEQ ID NO: 398234 - DNA, 1000 bp, Homo Sapiens
tgcaagtgactgtgttttgtattactgtgaaaataagaaaatgtagttaattacaatttaaagagtattccacataacttcttaatttctacattccctcccttactcttcgggggtttcctttcagtaagcaacttttccatgctcttaatgtattcctttttagtaggaatccggaagtattagattgaatggaaaagcacttgccatctctgtctaggggtcacaaattgaaatggctcctgtatcacatacggaggtcttgtgtatctgtggcaacagggagtttccttattcactctttatttgctgctgtttaagttgccaacctcccctcccaataaaaattcacttacacctcctgcctttgtagttctggtattcactttactatgtgatagaagtagcatgttgctgccagaatacaagcattgcttttggcaaattaaagtgcatgtcatttcttaatacactagaaaggggaaataaattaaagtacacaagtccaagtctaaaactttagtacttttccatgcagatttgtgcacatgtgagagggtgtccagtttgtctagtgattgttatttagagagttggaccactattgtgtgttgctaatcattgactgtagtcccaaaaaagccttgtgaaaatgttatgccctatgtaacagcagagtaacataaaataaaagtacattttataaaccatttactatggctttgtaacaattgcatacccatattttaagggacaggtgaatttactactttctaaagtttattgatacttcccttttatgtaaaatgtagtagtgatacctatatttccacattgtgcattgtgacacacttgtctagggatgcctggaagtgtataaaattggactgcatttcttagagtgttttactatagatcagtctcatgggccatctcttcctcagatgtaaatgatatctggttaagtgttatatggaataaagtggacattttaaaacta

SEQ ID NO: 398235 - DNA, 1000 bp, Homo Sapiens; identical to SEQ ID NO: 116711

SEQ ID NO: 398236 - DNA, 1000 bp, Homo Sapiens; identical to SEQ ID NO: 287519

SEQ ID NO: 398237 - DNA, 1000 bp, Homo Sapiens; identical to SEQ ID NO: 116712

SEQ ID NO: 398238 - DNA, 1000 bp, Homo Sapiens
cgtccataagcaggtgtgtgagatcatcgagagccccctctttctgaagttgaaccctatgaccaagcacacagatcttcctgtcagcgtttttgagtctgtcattgatataatcaatggagaggccacaatgctgtttgctgagctgacctacactctggccacagaggaagcggaacgcattggtgtagaccacgtagcccgaatgacagcaacaggcagtggagagaactccactgtggctgaacacctgatagcacagcacagcgccatcaagatgctgcacagccgcgtcaagctcatcttggagtacgtcaaggcctctgaagcgggagaggtcccctttaatcatgagatcctgcgggaggcctatgctctgtgtcactgtctcccggtgctcagcacagacaagttcaagacagatttttatgatcaatgcaacgacgtggggctcatggcctacctcggcaccatcaccaaaacgtgcaacaccatgaaccagtttgtgaacaagttcaatgtcctctacgaccgacaaggcatcggcaggagaatgcgcgggctctttttctgatgagggtacttgaagggctgatggacaggggtcaggcaactatcccaaaggggagggcactacacttccttgagagaaaccgctgtcattaataaaaggggagcagcccctgagcacccctgctggtggctctgtcctctgttaggcaccacactggttggtcaacttggatgttcatcgaggctcattctggccttgctcagaagcccttctgatgctcttcagtgagggaggcactaccatttgaagtgaccccatgtcagtcacatggactggtctttagcaaagtccaaggctgcctgcttccacctaagtggtctctgttctacactttaatgtcaccctctacatcatcttacctagcccacccaaccttataaacatgataattgactactttcctgagctaaaaaaaaaaaaaaaaaa

SEQ ID NO: 398239 - DNA, 1000 bp, Homo Sapiens; identical to SEQ ID NO: 116716

SEQ ID NO: 398240 - DNA, 1000 bp, Homo Sapiens; identical to SEQ ID NO: 287523

SEQ ID NO: 398241 - DNA, 1000 bp, Homo Sapiens
ggctctgctgaagatggtgatgcatgccagatcgggaggcaacttggaagtgatgggtctgatgctaggaaaggtggatggtgaaaccatgatcattatggacagttttgctttgcctgtggagggcactgaaacccgagtaaatgctcaggctgctgcatatgaatacatggctgcatacatagaaaatgcaaaacaggttggccgccttgaaaatgcaatcgggtggtatcatagccaccctggctatggctgctggctttctgggattgatgttagtactcagatgctcaatcagcagttccaggaaccatttgtagcagtggtgattgatccaacaagaacaatatccgcagggaaagtgaatcttggcgcctttaggacatacccaaagggctacaaacctcctgatgaaggaccttctgagtaccagactattccacttaataaaatagaagattttggtgtacactgcaaacaatattatgccttagaagtctcatatttcaaatcctctttggatcgcaaattgcttgagctgttgtggaataaatactgggtgaatacgttgagttcttctagcttgcttactaatgcagactataccactggtcaggtctttgatttgtctgaaaagttagagcagtcagaagcccagctgggacgagggagtttcatgttgggtttagaaacgcatgaccgaaaatcagaagacaaacttgccaaagctacaagagacagctgtaaaactaccatagaagctatccatggattgatgtctcaggttattaaggataaactgtttaatcaaattaacatctcttaaacagtctctgagaagtactttacctgaaagacagtatgagaaaaatattcaagtaacactttaaaaccagttacccaaaatctgattagaagtataaggtgctctgaagtgtcctaaatattaatatcctgtaataaagctctttaaaatgaaaaaaaaaaaaaaaaaaaaaaa

SEQ ID NO: 398242 - DNA, 1000 bp, Homo Sapiens; identical to SEQ ID NO: 287524

SEQ ID NO: 398243 - DNA, 1000 bp, Homo Sapiens; identical to SEQ ID NO: 116717

SEQ ID NO: 398244 - DNA, 1000 bp, Homo Sapiens; identical to SEQ ID NO: 287525

SEQ ID NO: 398245 - DNA, 1000 bp, Homo Sapiens
aggaccaaatgcccacaaggtccctcccccatggctgattgccatgcagcgatatggaccacccccatcgtatcccaacctgaaaatccctgggctgaactcgcccatccctgagagctgttcctttgggtaccatgctggtggctggggcaaacctccagtggatgagactgggaaaccgctctatggggacgtgtttggaaccaatgctgctgaatttcagaccaagactgaggaagaagagattgatcggaccccttggggggaactggaaccatctgatgaagaatcctcagaagaagaggaagaggaagaaagtgatgaagacaaaccagatgagacaggctttattacccctgcagacagtggccttatcactcctggaggcttttcatcagtgcctgctggaatggagacccctgaactcattgagctgaggaagaagaagattgaggaggcgatggacggaagtgagacacctcagctcttcactgtgttgccagagaagagaacagccactgttggaggggccatgatgggatcaacccacatttatgacatgtccacggttatgagccggaagggcccggctcctgagctgcaaggtgtggaagtggcgctggcgcctgaagagttggagctggatcctatggccatgacccagaagtatgaggagcatgtgcgggagcagcaggctcaagtagagaaggaggacttcagtgacatggtggctgagcacgctgccaaacagaagcaaaaaaaacggaaagctcagccccaggacagccgtgggggcagcaagaaatataaggagttcaagttttaggtcccctcacactagccctttttttggccctacgtctggatgcctgggcttcacacaagaaccacctctcccgcagttcccaaggacttgtcatttcatgttcttattttagacctgttttgtaaataaagctgtttcccaaggaaagagatgaatatttaacactaaaaaaaa

SEQ ID NO: 398246 - DNA, 1000 bp, Homo Sapiens; identical to SEQ ID NO: 116718

SEQ ID NO: 398247 - DNA, 1000 bp, Homo Sapiens; identical to SEQ ID NO: 287529

SEQ ID NO: 398248 - DNA, 1000 bp, Homo Sapiens
agaaatggaaagcttatctgcaccagagaaaataaccctgttcgaggcccatatggcaagatgcacatcaataaatgtgctatgtgtcagagcatctttgatcgagaagctaatgaaagaaaaaagaaagatgaagagaaatcaagtagcaagccctcaaataatgcaaaggatgagtgcagtgaatttcgaaactatataaggaacaatgaactcatctgccctagagagaatgacccagtgcacggtgctgatggaaagttctatacaaacaagtgctacatgtgcagagctgtctttctaacagaagctttggaaagggcaaagcttcaagaaaagccatcccatgttagagcttctcaagaggaagacagcccagactctttcagttctctggattctgagatgtgcaaagactaccgagtattgcccaggataggttatctttgtccaaaggatttaaagcctgtctgtggtgacgatggccaaacctacaacaatccttgcatgctctgtcatgaaaacctgatacgccaaacaaatacacacatccgcagtacagggaagtgtgaggagagcagcaccccaggaaccaccgcagccagcatgcccccgtctgacgaatgacaggaagattgttgaaagccatgagggaaaaaataaaccccagttctgaatcacctaccttcaccatctgtatatacaaagaattcttcggagcttgtcttatttgctatagaaaacaatacagagcttttgggaatggactcactgattttcagtcttttccatctctttcctcctagactctgtgatctgagggtataaagacatctccaccaagtctgagccctcaaaatgtcctgattacaatgctgtctgtccaactgcctgttcaataaaagtaaactcagcagaacaccctttctgggatttctttgtcactatctggataatagatatttgcttttaaagaaactgaataaactctacccttttg

SEQ ID NO: 398249 - DNA, 1000 bp, Homo Sapiens; identical to SEQ ID NO: 221939

SEQ ID NO: 398250 - DNA, 1000 bp, Homo Sapiens; identical to SEQ ID NO: 221940

SEQ ID NO: 398251 - DNA, 1000 bp, Homo Sapiens
ggagtagtacaaaccatcttctactgtgacttcttctacttgtatgtgaccaaagtccttaagggaaagaagttaagtcttccaatgccaatctgaggaccttcagagacagtctacgccttaacaagcacatgaaggaaactattttgaatgttctctttggcaacttatccataatttgggatcaaatgttaaaaccagaaaagtgtttagtgtggatttcagcaaaacctgatcatcccacccagaagaccttctcatcaatagatcgcccttaaagacccattgtaaggtcataaaaaacctcggccacctgcacaaagatggtgcctcactgcaacaagaaaccttaaggtgtcttaccgacgaaataaaaaacataaatgattgttctccaaggcctgagggcaagactcatgatgagcaagtcaaccccaatctggaacaatgtccctcctcttagaatgtcccaactaaagaccagttaaaatattagggtacgttcttgtgaatttccactttccaggtagatgaccaaatttaggtggtcaagatataaaggtgtcagctagttttaagtgtgaaacttatttcactttcacactgccttcaggccagaagcaaaccaaatttaccaggtttggctggaggagttttgtgactcatcttttactggtttgaattttttcaaaccagtggctgatacctgccttgtacttagtaccttaataccaataacctaatggtacttaggcgagtaccatttgcacaatcactgttttacttatgagcagatacagatatatccaaacccttacctactaggtatcctgctagggttttcaattccaattcttgtattaagttttttcctttcagttttaggtgcgaaagtaatcagtcaatccaatatcccccatctttgtcttgaaacaaaaactgttttaagacgtctacgttgaattattcagagaattaagcaataaaagctcacacctta

SEQ ID NO: 398252 - DNA, 1000 bp, Homo Sapiens; identical to SEQ ID NO: 287533

SEQ ID NO: 398253 - DNA, 1000 bp, Homo Sapiens; identical to SEQ ID NO: 287534

SEQ ID NO: 398254 - DNA, 1000 bp, Homo Sapiens
cgcaaggctgatggggtacacacggtggagccaacggaggccggggactacaagctgtgctttgacaactccttcagcaccatctccgagaagctggtgttctttgaactgatctttgacagcctccaggatgacgaggaggtcgaaggatgggcagaggctgtggagcccgaggagatgctggatgttaaaatggaggacatcaaggagtccattgagaccatgcggacccggctggagcgcagcatccagatgctcacgctactgcgggccttcgaggcacgtgaccgcaacctgcaagagggcaacttggagcgggtcaacttctggtcagctgtcaacgtggcggtgctgctgctggtggctgtgctgcaggtctgcacgctcaagcgcttcttccaggacaagcgcccggtgcccacgtagcccctgccatggaaggaagaacgggacaaaggaggggcagcagggtgtgtgcatatgagacttgggggtccctccccaattttagtttcctgccaaaacgggagtgtgcagtcagggcctgcggtctggccccatgagtctccttccgtcctcagcgggcagggaacacctctggcttgtagaagggacggctcagtggctgcaccgacggtcctggaaatctcacatggtgggcactgcagcgttggaacgtgagcctcggatttcctggcccctctactgtaaatgtgccttagcctaagcctcccatcctgtgttagcgttgcctggtgcggggcagggcctaacaaggaaacctgggccctccaagccaggttgaggtctggtaacagaatgccaggaagggggcctggaagaccacctgccccggcccctctcctgcaggggccccacacaggcatgagggatggcccggccaaagtctaggcagaagcctcctataacaaagggtggtgtggcctgggcattggagtcaataaattatggtcagaaaatcaaaaaaaaaaaaaaaaaa

SEQ ID NO: 398255 - DNA, 1000 bp, Homo Sapiens; identical to SEQ ID NO: 287536

SEQ ID NO: 398256 - DNA, 1000 bp, Homo Sapiens; identical to SEQ ID NO: 221943

SEQ ID NO: 398257 - DNA, 1000 bp, Homo Sapiens; identical to SEQ ID NO: 287538

SEQ ID NO: 398258 - DNA, 1000 bp, Homo Sapiens
cctccagtgtgtttctgatgtcagctacgacagatttgttctgtataaggagggagaacgtgacttcctccagctccctggcccacagccccaggctgggctctcccaggccaacttcaccctgggccctgtgagccgctcctacgggggccagtacagatgctccggtgcatacaacctctcctccgagtggtcggcccccagcgaccccctggacatcctgatcgcaggacagttccgtggcagacccttcatctcggtgcatccgggccccacggtggcctcaggagagaacgtgaccctgctgtgtcagtcatgggggccgttccacactttccttctgaccaaggcgggagcagctgatgcccccctccgtctcagatcaatacacgaatatcctaagtaccaggctgaattccctatgagtcctgtgacctcagcccactcggggacctacaggtgctacggctcactcagctccaacccctacctgctgtctcaccccagtgactccctggagctcatggtctcaggagcagctgagaccctcagcccaccacaaaacaagtccgattccaaggctggagcagctaacaccctcagcccatcacaaaacaagactgcctcacacccccaggattacacagtggagaatctcatccgcatgggcatagctggcttggtcctggtggtcctcgggattctgctatttgaggctcagcacagccagagaagcctctgagatgcagccgggaggtgaacagcagagagaagaatgtacccttcagagtggtggagccttgggaacagatctgatgatgccaggaggttccgggagacaatttagggctgatgttatctggactgtctgccaatcatttttagagggaggaatcagtgttggattgcagagacattttctggagtgatccatgaaggaccattaacatgtgatacctttcctctctattaatgttgacttcccttggttggatcctct

SEQ ID NO: 398259 - DNA, 1000 bp, Homo Sapiens; identical to SEQ ID NO: 116721

SEQ ID NO: 398260 - DNA, 1000 bp, Homo Sapiens; identical to SEQ ID NO: 116722

SEQ ID NO: 398261 - DNA, 1000 bp, Homo Sapiens; identical to SEQ ID NO: 287540

SEQ ID NO: 398262 - DNA, 1000 bp, Homo Sapiens; identical to SEQ ID NO: 221945

SEQ ID NO: 398263 - DNA, 1000 bp, Homo Sapiens; identical to SEQ ID NO: 221946

SEQ ID NO: 398264 - DNA, 1000 bp, Homo Sapiens; identical to SEQ ID NO: 287543

SEQ ID NO: 398265 - DNA, 1000 bp, Homo Sapiens
cttgctgcggcccgcctacgtggtaccttggcaggacccctgggagccattctacgtggcaggaggcaaggtgcccaccttcgacgagcgctttcggcagtacggcttcaaccgaatcagccaggcctgcgagctgcatgtggcggggtttgattttgaggtcctgaacgaaggtttcttggttcataagggcttcaaagaagcgttgaagttccatccccaaaaggaggctgaaaatcagcacaataagatcctatatcgccagttcaaacaggagttgaaggccaagtaccccaactctccccgacgctgctgagcccttccctcccctaatctgagaagtcagcctcttggctcctcaggccaccatttaggcctgactggggtaagaaatgtcgctccactttacagaggtagctgtggtgttgaaacactggacttggatatggggtgctgggatcgattcctagctttaccactaactagctgtgtggccttgagtaaatcccgttacctctctgagcctcggttaccctgtctgtaaaaagggaggtgagaatacctacctcacggaactgttgggaggctcagatgagatgctatatgtgaaaacattctgtaagcttcgtacaaatgtgaagtattaatattatcgcagtattattgttgttattattattgttattattaacaatcttgggtgggtagtaggagagcaaaaagtatgaatgggatggagctaagaagtctgaatacttaatgaaatggactttttggaaagaaatcagatgaaggcataaaatttagttcttagctcttgaacagaagcctaaaattcctggttctctcagggcttcgccttcaagggttctggaggagggaagggtctgcaggttccatgggtgacagcctgagatctgtcccttcaacgggctgggctgggtatgtgcctaccgatgacaatgtgtaaataaatgcgtgttcacacccacaaaaaaaa

SEQ ID NO: 398266 - DNA, 1000 bp, Homo Sapiens
gaattcgtgaaacttgtccgtgccaaatttcctgaacacaccattatggcagggaacgtggtgacaggagaaatggtagaagagcttattctttccggagcagatatcatcaaagtgggagttggaccaggttctgtgtgcaccacccgcaccaagacgggagtggggtacccccagctgagtgccgtcattgagtgtgccgactctgcccatggcctgaagggccacatcatctctgatggaggctgtacgtgtccaggggatgtcgccaaagcctttggagctggagcagattttgtcatgctgggaggaatgttttcgggtcatacggagtgtgctggagaagtgattgagaggaacggacggaagctcaagctcttctacgggatgagctctgacaccgccatgaacaagcacgcaggaggagttgctgagtacagagcctctgagggtaagactgtggaagttccttacaaaggagatgtggaaaacactatcctggatattctcgggggactgaggtccacgtgcacctacgtgggggccgccaaactcaaggagctcagcaggagggcaacattcatccgggtgacccagcagcacaacaccgtgttcagctaaccctggggacaaagcagcgtctggctcgagtggaagcgtccaaacctgcttttcccatctccccccaagtctgttccgtcagagcttctggctgctcctgaatggtggaatgctgtgtcctctcttctgtctcctgccgcctggaggcttcggggctctcccgcctgccttgtcggggcccagacgcaaggcaccgattgggccaacatcagagccctgctgcccagaactcataacctcattgttcaaaccaacacttgcacctttctctttttctctttctctctccctttctttgtttttctttcttttttaaaagaagatggtttcactttaatataatgctattatcttaagacttaaaaaaaaaaaaaaaaaa

SEQ ID NO: 398267 - DNA, 1000 bp, Homo Sapiens; identical to SEQ ID NO: 221947

SEQ ID NO: 398268 - DNA, 1000 bp, Homo Sapiens; identical to SEQ ID NO: 287545

SEQ ID NO: 398269 - DNA, 1000 bp, Homo Sapiens; identical to SEQ ID NO: 285782

SEQ ID NO: 398270 - DNA, 1000 bp, Homo Sapiens; identical to SEQ ID NO: 221948

SEQ ID NO: 398271 - DNA, 1000 bp, Homo Sapiens; identical to SEQ ID NO: 287547

SEQ ID NO: 398272 - DNA, 1000 bp, Homo Sapiens; identical to SEQ ID NO: 116723

SEQ ID NO: 398273 - DNA, 1000 bp, Homo Sapiens; identical to SEQ ID NO: 116724

SEQ ID NO: 398274 - DNA, 1000 bp, Homo Sapiens; identical to SEQ ID NO: 221949

SEQ ID NO: 398275 - DNA, 1000 bp, Homo Sapiens; identical to SEQ ID NO: 221950

SEQ ID NO: 398276 - DNA, 1000 bp, Homo Sapiens
ccgtcgtcggccagcgtggactacagttgcgccgcgcagattccaggcaaccaccaccatggaccttgcgaccctcatcccacctacacagatctctcggcccaccactcgtctcagggacgactgccggaggctcccaaactgacgcatctgtagcggccgccgccagcccgaactcgcggcaaaattacctctcttgctgtagtggtggggtagagggtggggcccgcggggcagttcgggaacccccttccccgctcttgccctgccgccgcctcccgggtctcaggcctccagcggcggaggcgcaggcgaccgggcctcccctccatgggcgtcctttgggtgactcgccataaatcagccgcaaggatccttccctgtaaatttgacagtgccacatactgcggaccaagggactccaatctggtaatggtgtcccaaaggtaagtctgagacccatcagcggcgcgccctgcagagggaccagagcttggagagtcttgggcctggcccgcgtctagcttagtttcagagaccttaatttatattctccttcctgtgccgtaaggattgcatcggactaaactatctgtatttattatttgaagcgagtcatttcgttccctgattatttatccttgtctgaatgtatttatgtgtatatttgtagatttatccagccgagcttaggaattcgcttccaggccgtgggggccacatttcacctccttagtccccctggtctgaactagttgagagagtagttttgaacagtcgtaaccgtggctggtgtttgtagttgacataaaggattaagaccgcaaattgtccttcatgggtagagtcaggaagcccggtggcgtggcacaacacactttggtcatttctcaaaaaccacagtcctcaccacagtttattgatttcaaattgtctggtactattggaacaaatatttagaataaaaaaatttcccagtcaaaaaaaaaaaaaaaaaaaa

SEQ ID NO: 398277 - DNA, 1000 bp, Homo Sapiens; identical to SEQ ID NO: 287552

SEQ ID NO: 398278 - DNA, 1000 bp, Homo Sapiens; identical to SEQ ID NO: 287553

SEQ ID NO: 398279 - DNA, 1000 bp, Homo Sapiens; identical to SEQ ID NO: 287554

SEQ ID NO: 398280 - DNA, 1000 bp, Homo Sapiens; identical to SEQ ID NO: 287556

SEQ ID NO: 398281 - DNA, 967 bp, Homo Sapiens
ggttgagccgggtagggaaagcagcctaaagcccgggacaggcacacaggcccaggtgtgtaggccacagcagccgcagtcctgaaaggctgcaacacccagacctccaggagagaccaggcccaggatgcctcgcctgttcttgttccacctgctagaattctgtttactactgaaccaattttccagagcagtcgcggccaaatggaaggacgatgttattaaattatgcggccgcgaattagttcgcgcgcagattgccatttgcggcatgagcacctggagcaaaaggtctctgagccaggaagatgctcctcagacacctagaccagtggcagaaattgtaccatccttcatcaacaaagatacagaaactataattatcatgttggaattcattgctaatttgccaccggagctgaaggcagccctatctgagaggcaaccatcattaccagagctacagcagtatgtacctgcattaaaggattccaatcttagctttgaagaatttaagaaacttattcgcaataggcaaagtgaagccgcagacagcaatccttcagaattaaaatacttaggcttggatactcattctcaaaaaaagagacgaccctacgtggcactgtttgagaaatgttgcctaattggttgtaccaaaaggtctcttgctaaatattgctgagatgaagctaattgtgcacatcttgtctaattttcacacatagtcttgatgacatttcactgatgcttctgtcaggtcccactaattattagaatataagaaatctttattaatgtttagatttttcatttggtgtgtaagaaaatattctttgtatgattgtagtttctgtaaatgacactttctatgctgaagtctttttgtctttttattaacagtataattgtgttgattctttttaatgctgttaacttaaaattacaataaaacctttgccacttt

SEQ ID NO: 398282 - DNA, 1000 bp, Homo Sapiens; identical to SEQ ID NO: 287559

SEQ ID NO: 398283 - DNA, 1000 bp, Homo Sapiens; identical to SEQ ID NO: 221952

SEQ ID NO: 398284 - DNA, 1000 bp, Homo Sapiens; identical to SEQ ID NO: 287561

SEQ ID NO: 398285 - DNA, 1000 bp, Homo Sapiens; identical to SEQ ID NO: 287563

SEQ ID NO: 398286 - DNA, 1000 bp, Homo Sapiens; identical to SEQ ID NO: 116726

SEQ ID NO: 398287 - DNA, 1000 bp, Homo Sapiens; identical to SEQ ID NO: 287565

SEQ ID NO: 398288 - DNA, 1000 bp, Homo Sapiens; identical to SEQ ID NO: 287566

SEQ ID NO: 398289 - DNA, 1000 bp, Homo Sapiens
tacagatggcagcagtgaggccttggggtagaaggatcctccaaagtcacacagagtgcctgcctcctggtcccctcagctctgcctctgcagcccactgcctgcccagagccatcaggatgagcagtaccggccaagcataatgacagagagaggcagatttcagggaagccctgactgtgtggagctaaggacacagtggagattctctggcactctgaggtctctgtggcaggcctggtcaggctctccaggtggtcagagggcccagtggtgccccagcacggtggtgcccaagccaaccctgtgactgacatgtacgattcactcctttgagtctttggatgccaactcagccccctgacctggaggcagccggccaaggcctctagggaagagccccccactgcagacatgacccgagtaactttctgctgatgaacaaatctgcaccccacttcagacctcggtgggcattcacaccaccccccatgccaccggctccactttccccttttattaatacattcacccagataatcattaaaattaacatgtgccaggtcttaggatgtgtcttggggtgggcacagtacccggtgactcttggggatatttatttattttccctgagcctatatcttcatctgtgaaatggggataaaaatacttgttgctgtcacaattattaccatctctccagctagcaaaattactaccagagccgttactacacacaaaggctattgaccgagcacataccatgtgccacacaccttgacaaaatcttttaatacagtttattatgtactattcaatctttacacaatgtcacgggaccagtattgtttacccaattttttataaggacactgaagcttagaggagtgaaatgttttgagtgttatttcagagagcaaatggcaaagactggatccaaacccatcttcctggacctgaagttcatgctcccagccaccccacccctgagctgaataaa

SEQ ID NO: 398290 - DNA, 1000 bp, Homo Sapiens; identical to SEQ ID NO: 287568

SEQ ID NO: 398291 - DNA, 1000 bp, Homo Sapiens; identical to SEQ ID NO: 287569

SEQ ID NO: 398292 - DNA, 1000 bp, Homo Sapiens; identical to SEQ ID NO: 221956

SEQ ID NO: 398293 - DNA, 1000 bp, Homo Sapiens; identical to SEQ ID NO: 220874

SEQ ID NO: 398294 - DNA, 1000 bp, Homo Sapiens
tgcctctcccctgctcactccagtcacatagagaattggtgtttcccgcagtggggatgcagctgttggacaggtattgggggcaaggttggtagggaggacagactgtcacttgctgttacaggcacaggtgattaaaatgctaaatattgcaaatttaagctttgtcagtatatggaaaagttgaagggaaaatactggaatgcttcttcaaaggttaaaaaataaccgagtcttttggtaatttgaccccacgtgctctctggccctcaagcatgtaacctcggggtctgaggcccaggacccacccccctgccacccctcccaccccactccctgctcagtacctggcgttggtacacaggcaaggattggcacaaccaaaattggcctttttctccctcttaatattgaagaaattcccacatttctcatttggtaatggtgttgtggcctcagatttcttctagtatttgcttctgatgaatgattatggtctatacataaaaaagtaagactaagtattgctgaatttgcagttatgttgtcgtgtataagagctacttccaagtgtggttacaaatgaacccatggaatgatgacttcatgttcttctcgtgggtttgtgccgtgctgctttccaaataggtattgaatttatgcattagtctggtgatttcagttctgtgaaatattttgggatctataccaattaaacattttcatagttctgcctattgtccttccctgaggctccattgctgcttggtggccattctctgcctttttacagtcacctgaacaatgacccatcatctcttgcttgcttgaaatcttgctgaaatgttctcatttcctgtttgctgtatgggctcgggtgggatgtttgttggctctgttgtgtttattcaccaatttgtacattatttgttgtcctttactactgtaaacagtaaatatagtttggtattctgtcaaaaaaaaaaaaaaaaaaaaaaaa

SEQ ID NO: 398295 - DNA, 1000 bp, Homo Sapiens; identical to SEQ ID NO: 116729

SEQ ID NO: 398296 - DNA, 1000 bp, Homo Sapiens; identical to SEQ ID NO: 221957

SEQ ID NO: 398297 - DNA, 1000 bp, Homo Sapiens; identical to SEQ ID NO: 287574

SEQ ID NO: 398298 - DNA, 1000 bp, Homo Sapiens; identical to SEQ ID NO: 287575

SEQ ID NO: 398299 - DNA, 1000 bp, Homo Sapiens
gaatgttactaatatttttcatatctaaaaaaaaattcttagcaatgaaattgctgttaaaacacaaatttcaatcaaatacttttgtgtatagaaaatatgtatagtaggtagatagaaaagtataaaatgtttgttgaagtatcttattttagaatgaatggagaaatgccaaagatgaatccttcactgcattatgaaaatatttcacatgttctcttggactttatataaatctgtaatagattttagaattgaaaaattctttgtgaaggtcttctaaaagtgttccaatttatctcaaaatctccatatataggatcagcttaaaacataaagaaaaccttgaatttctcaaatgtttgagatgttcaagacagtctcttaatccgttaatgcttttggaaacaattgacaaaatagggcaggcagctcatctcatgtcctgaagttggaatttaaataattcctatttgcaaattagaatgacagtgttggaatttggaggcagtagttgagcatattctctagtatatagctacacctttaataaaatgaaggaatgtcttcaatcatattttagtgggctatttataaatagtcttgaagtcaatttagtttatttatttaaaagataatgcatcctgaaagggatcatttatgaataacaatctgaagtcttttcataaaaaaaattaataaactttagttgtacatttagccagtgttatttgaagtatgtaacttttaaaatattaagtgtcttgtatgattagaatatgtgaatgagtaacttattttgtatcaggaatgttttggtactgtgttttcactcaaaccactgacttaacagatactgctgtgtataacatgtactaaatattacagttattgtgcataacagattgttcctcttatatttgtgtgtatacaggcaattcatgttttaatgtaaataaataccattttgcagtttgttttttaaaaaaaaaaaaaaaaa

SEQ ID NO: 398300 - DNA, 1000 bp, Homo Sapiens; identical to SEQ ID NO: 287576

SEQ ID NO: 398301 - DNA, 1000 bp, Homo Sapiens; identical to SEQ ID NO: 287577

SEQ ID NO: 398302 - DNA, 1000 bp, Homo Sapiens; identical to SEQ ID NO: 116730

SEQ ID NO: 398303 - DNA, 1000 bp, Homo Sapiens; identical to SEQ ID NO: 287579

SEQ ID NO: 398304 - DNA, 1000 bp, Homo Sapiens; identical to SEQ ID NO: 116731

SEQ ID NO: 398305 - DNA, 1000 bp, Homo Sapiens
ggagaaaagccttatgaatgcaacaaatgtgggaaattctttaggtattgcttcacactgaatagacattagagagttcactctggagagaggccttatgaatgcagtgaatgtggcaaattctttgtggacagctgtacactgaagagtcatcagagagttcacactggagaaagaccttttgaatgcagcatttgtgggaaatcctttagatgtcgctccacacttgatacacatcagagaattcacactggtgaaaggccttatgagtgtagtgaatgtgggaaattctttaggcacaactcaaatcatattagacatcggagaaatcactttggagaaaggtcttttgagtgcactgagtgtgggagagtttttagccaaaattcccacctcattcggcaccaaaaagttcacactagggaaagaacttacaaatgcagcaaatgtgggaaattttttatggacagctccacactcattagtcatgagagagttcatactggagaaaagccttatgagtgcagtgaatgtgggaaagtctttagatacaactccagcctcattaaacatcggagaattcacactggagagagaccttatcagtgcagtgaatgtggaagagtctttaaccaaaattctcatctcattcagcaccagaaagttcacaccagataaagaatgtatatataaagcagatggggaaagacttcacacagaaatctactctgatttagcactgggacctacgttttaaaaaaagtattcttgtagaatacagataacataaaatctaacatcttaaccatgttaaagtgtatagttcagtaccgttaagtcattcacattgtgcaatgaatatctagaagtcttttcaacttatgaaactaagtctataccttttaaaaccttattcctcactccatccagcctcttgacaagcaccgctctgtatgaattttactagtccgggtacctcatataagaaaacttaagtttt

SEQ ID NO: 398306 - DNA, 1000 bp, Homo Sapiens; identical to SEQ ID NO: 221960

SEQ ID NO: 398307 - DNA, 1000 bp, Homo Sapiens; identical to SEQ ID NO: 221961

SEQ ID NO: 398308 - DNA, 1000 bp, Homo Sapiens; identical to SEQ ID NO: 116733

SEQ ID NO: 398309 - DNA, 1000 bp, Homo Sapiens; identical to SEQ ID NO: 116734

SEQ ID NO: 398310 - DNA, 1000 bp, Homo Sapiens; identical to SEQ ID NO: 115281

SEQ ID NO: 398311 - DNA, 1000 bp, Homo Sapiens; identical to SEQ ID NO: 221962

SEQ ID NO: 398312 - DNA, 1000 bp, Homo Sapiens; identical to SEQ ID NO: 221963

SEQ ID NO: 398313 - DNA, 1000 bp, Homo Sapiens; identical to SEQ ID NO: 287585

SEQ ID NO: 398314 - DNA, 1000 bp, Homo Sapiens; identical to SEQ ID NO: 116735

SEQ ID NO: 398315 - DNA, 1000 bp, Homo Sapiens; identical to SEQ ID NO: 287586

SEQ ID NO: 398316 - DNA, 1000 bp, Homo Sapiens
ggacaactgtaacagtctccgaatgtctcccgtgaaagggatgcaagagaagggagagctggatgaacttggggataaatgtgatacgaatgtatccagcagtaagaaacggaggcaccgaaccaccttcaccagtttgcagctagaggagctggagaaagtctttcagaaaactcattacccggatgtgtatgtcagagaacagcttgctctgaggacagagctcactgaggccagggtccaggtttggtttcaaaatcgaagggccaaatggagaaaaagggaacgttatggccaaatacaacaagcgaaaagccattttgctgccacctatgatatatcagttttgccaaggactgacagctacccacagattcagaacaatttgtgggcaggaaatgcaagtggtggttctgtggttacttcatgcatgttaccacgtgacacttcctcctgtatgacaccttattctcactcgcctcggacagattccagttacacggggttttcaaaccaccagaaccagttcagccacgtgcccctcaacaattttttcactgactctcttcttactggggcaaccaatggacatgcatttgaaacaaagccagagtttgaaaggaggtcttccagtatcgcagttcttcgaatgaaagccaaggagcacaccgccaatatttcatgggccatgtaacatacagtactcttttatttttcttttaatagcaaagttaaacattcttatttctcatatttaaaggataccacaataagctgctgtgtgtggaattgctaaaggtcaagatattcagtgagaccagcttaaatgaatagttgttatttaacattaaaatctaagaatgaacctctgaaaagactaaataggtttaccatgtgccagtctccacaaaccctgttttagtagtaaggttttctttttctattgtacaagtcaatgaaatatgatcacgcaacttattaaagaataaatgtgttaaac

SEQ ID NO: 398317 - DNA, 1000 bp, Homo Sapiens; identical to SEQ ID NO: 221965

SEQ ID NO: 398318 - DNA, 1000 bp, Homo Sapiens
atactctggctgaccatcgtcatcgtgggactgactttggtggaagtccttggttacttatcattactgtgtttctgagaagttataaatttgccatctccctctgcacaacttacctttgtgtgtctttcctgaagactatcttcccgtctcaaaatggacatgatggatccacggatgtacagcagagagccaggaggtccaaccgccgtagacaggaaggaattaaaattgtcctggaagacatctttactttatggagacaggtggaaaccaaagttcgagctaaaatccgtaagatgaaggtgacaacaaaagtcaaccgtcatgacaaaatcaatggaaagaggaagaccgccaaagaacatctgaggaaactaagcatgaaagaacgtgagcacggagaaaaggagaggcaggtgtcagaggcagaggaaaatgggaaattggatatgaaagaaatacacacctacatggaaatgtttcaacgtgcgcaagcgttgcggcggcgggcagaggactactacagatgcaaaatcaccccttctgcaagaaagcctctttgcaaccgggtcagaatggcggcagtggagcatcgtcattcttcaggattgccctactggccctacctcacagctgaaactttaaaaaacaggatgggccaccagccacctcctccaactcaacaacattctataattgataactccctgagcctcaagacaccttccgagtgtctgctcactccccttccaccctcagctctaccctcagcggatgataatctcaagacacctgcggagtgtctgctctatccccttccaccctcagcggatgataatctcaagacacctcccgagtgtctgctcactccccttccaccctcagctccaccctcagcggatgataatctcaagacacctcccgagtgtgtctgctcactccccttccaccctcagcggatgataatctcaagaaactaaggaagaataaataaata

SEQ ID NO: 398319 - DNA, 1000 bp, Homo Sapiens; identical to SEQ ID NO: 116737

SEQ ID NO: 398320 - DNA, 1000 bp, Homo Sapiens; identical to SEQ ID NO: 116738

SEQ ID NO: 398321 - DNA, 1000 bp, Homo Sapiens; identical to SEQ ID NO: 116739

SEQ ID NO: 398322 - DNA, 1000 bp, Homo Sapiens; identical to SEQ ID NO: 221966

SEQ ID NO: 398323 - DNA, 1000 bp, Homo Sapiens; identical to SEQ ID NO: 221967

SEQ ID NO: 398324 - DNA, 884 bp, Homo Sapiens; identical to SEQ ID NO: 287593

SEQ ID NO: 398325 - DNA, 1000 bp, Homo Sapiens; identical to SEQ ID NO: 287594

SEQ ID NO: 398326 - DNA, 1000 bp, Homo Sapiens; identical to SEQ ID NO: 221968

SEQ ID NO: 398327 - DNA, 1000 bp, Homo Sapiens
tctttcgccgggaaaacccactggacagcagcgtggagtttatgcagatttggcgcaaatatgacgctgacagcagtggctttatatcagctgctgagctccgcaacttcctccgagacctctttcttcaccacaaaaaggccatttctgaggctaaactggaagaatacactggcaccatgatgaagatttttgacagaaataaagatggtcggttggatctaaatgacttagcaaggattctggctcttcaggaaaacttccttctccaatttaaaatggatgcttgttctactgaagaaaggaaaagggactttgagaaaatctttgcctactatgatgttagtaaaacaggagccctggaaggcccagaagtggatgggtttgtcaaagacatgatggagcttgtccagcccagcatcagcggggtggaccttgataagttccgcgagattctcctgcgtcactgcgacgtgaacaaggatggaaaaattcagaagtctgagctggctttgtgtcttgggctgaaaatcaacccataatcccagactgctttgccttttgctcttactatgtttctgtgatcttgctggtagaattgtatctgtgcattgatgttgggaacacagtgggcaaactcacaaatggtgtgctattcttgggcaagaacagggacgctagggccttccttccaccggcgtgatctatccctgtctcactgaaagcccctgtgtagtgtctgtgttgttttcccttgaccctgggctttcctatcctcccaaagactcagctcccctgttagatggctctgcctgtccttccccagtcaccagggtgggggggacaggggcagctgagtgcattcattttgtgcttttcttgtgggctttctgcttagtctgaaaggtgtgtggcattcatggcaatcctgtaacttcaacatagatttttttgtgtgtgtggaaataaatctgcaattggaaacaaaaaaaaaaaaaaa

SEQ ID NO: 398328 - DNA, 1000 bp, Homo Sapiens; identical to SEQ ID NO: 116741

SEQ ID NO: 398329 - DNA, 1000 bp, Homo Sapiens
tcatggtagccagttttggtgtgggtgccgcactctgccgccgccggtccatggtcctcacgtacctggtgctcatgctcatcgtctacatcttcgagtgcgcctcctgcatcacgtcctacacccaccgtgactacatggtgtccaacccatccctgatcaccaagcagatgctgaccttctacagcgcggacaccgaccagggccaggagctgacccgcctctgggaccgcgtcatgattgagcaagaatgctgtggcacatctggtcccatggactgggtgaacttcacgtcagccttccgggcggccactccggaggtggtgttcccctggcccccactgtgctgtcgccggacgggaaacttcatccccctcaacgaggagggctgccgcctggggcacatggactacctgttcaccaagggctgcttcgaacacatcggccacgccatcgacagctacacgtggggtatctcgtggtttgggtttgccatcctgatgtggacgctcccggtcatgctgatagccatgtatttctacaccatgctctgagggacaggaggggaaggcaacatacacaccccggactcctccgcatcctcctcctgcttcctccgctgggcctggatggctgcctcacctctcacctcccaacgtccctagcccttacgtccttccacttccaagatctttttccaggttcctgagccctactgtgtctcaggtgtgccctgaaaccccagggcttgtgtgcacatatccttagcccatctttcaagggacctctccatgatcccacctcccattcacagatacctctcttgtagctctctgacctcctccttcatggcaggcatcgccattcttgctgaaccgtttgtgattgccatttgagctctggaagcctctattgccatgagagttctgtcacggtcactttactgtccccatcatcacccagcacggggctaagcatatactagatagtcaataaataa

SEQ ID NO: 398330 - DNA, 1000 bp, Homo Sapiens; identical to SEQ ID NO: 287596

SEQ ID NO: 398331 - DNA, 1000 bp, Homo Sapiens; identical to SEQ ID NO: 116742

SEQ ID NO: 398332 - DNA, 1000 bp, Homo Sapiens; identical to SEQ ID NO: 287598

SEQ ID NO: 398333 - DNA, 1000 bp, Homo Sapiens
acttgtaaaaatagagatttgacagacatagcaatctagtcaatgtgtaaggggtcaaaaaaaacagaggttttaacacataagtaaaaacccgtacatatttgatgtgtaatgcaggttaattacaacacagatgtaccgaaacacttaattgtgaaccgctaacattgaagaaattttgacaattccgatttgatgctgcaattacttgctgtttttattgatcttatggtttatttcttaagccatagtcagtgtaaatacagccctgcagcaggtaaatgtgagtaaagagagccttatattttccaattggtataaaatttttgaaggatgtgatgttcattaacattcggttgtattccccagtatttgtaatgggaaattacagataaaccgtgtctgcacagtttaaggaatactatgtatattcatgcaccgtattgattcatgctatagttacttaatcaaagatttttttcaaacctgccttacatataggcccactttaaaagcacctgactagcatgtgttcttgattgcaaaattggcagaggcagggtgtcaacttgattaggtgtttttatgggaatgtaatttgaaatcactacttcagaaatttgacttaaaattcttgagcacgttaatatgtttttaagatctgattatctttgagagatcttctgttaatacacattggttgttaaagagtacccaaattctaggacaatgcttaaagtgttaaaataccctagatactgtgttatgtgcaactgtagaaaccctccagaaatttccactgctgttcttcactttcatcttgtctgctatcaaaccacttctgacaaaattagctgttttgaattacccatatcactgccagttttattttaaaatattttgtgtttgaagtatctgtgcatgggatcgttgatgtttatcagaactgttcactttcagaaatgattttttaaagcattttgttgaaatgcggttgctt

SEQ ID NO: 398334 - DNA, 1000 bp, Homo Sapiens; identical to SEQ ID NO: 287599

SEQ ID NO: 398335 - DNA, 1000 bp, Homo Sapiens; identical to SEQ ID NO: 221970

SEQ ID NO: 398336 - DNA, 1000 bp, Homo Sapiens
ttagctgggcgtggtggtgtgtgtctgtaatcccagctactcggcctcccaaagtgctgggattacaggcgtgagccaccgcgtctggcctcagccaaggtttttaagtaacatatttcagcattggctctacagcgttgcagaacatgaacgattggatgcccatcgccaaggagtatgatccactcaaagcgggcagcattgatggcaccgatgaagacccacacgaccgcgcggtctggagggcaatgctggcacgatatgtccccaacaaaggtgtcataggagatcccctcctcaccctgtttgtggccagactaaacttgcagaccaaggaggacaaattaaaggaagtcttttcccgctatggtgacatccggcggcttcggctggtcagggacttggtcacaggtttttcaaagggctacgccttcatcgaatacaaggaggagcgtgccgtgatcaaagcttaccgagatgctgatggcctggttattgaccagcatgagatatttgtggactacgagctggaaaggactctcaaagggtggatccctcggcgacttggaggcggtcttgggggaaaaaaggagtctgggcaactgagatttgggggacgggaccggccttttcgaaaacctattaacttgccagttgttaaaaacgacctctatagagagggaaaacgggaaaggcgggagcgatctcgatcccgagaaagacactgggactcgaggacaagggatcgagaccatgacaggggccgggagaagagatggcaagaaagagagccgaccagggtgtggcccgacaatgactgggagagagagagggacttcagagatgacaggatcaaggggagggagaagaaggaaagaggcaagtagaggcccaacagcagaaccccaaagtgaagttacagtggaaatgagtggagggggattgtctttcaacgcagcgtgagtctaatggttgaataaaacttactgatgatcaaaaa

SEQ ID NO: 398337 - DNA, 1000 bp, Homo Sapiens; identical to SEQ ID NO: 116743

SEQ ID NO: 398338 - DNA, 1000 bp, Homo Sapiens; identical to SEQ ID NO: 287603

SEQ ID NO: 398339 - DNA, 1000 bp, Homo Sapiens; identical to SEQ ID NO: 116746

SEQ ID NO: 398340 - DNA, 1000 bp, Homo Sapiens; identical to SEQ ID NO: 287605

SEQ ID NO: 398341 - DNA, 724 bp, Homo Sapiens; identical to SEQ ID NO: 116747

SEQ ID NO: 398342 - DNA, 1000 bp, Homo Sapiens; identical to SEQ ID NO: 287608

SEQ ID NO: 398343 - DNA, 1000 bp, Homo Sapiens
agaggtgctgcttcgcgtaaaagaaaacgaactccagtacctaaagaaggaggtgcagtgcctccgggacgagctccagatgatgcagaaggacaagcgcttcacctcgggaaagtaccaggacgtctatgtggagctgagccacatcaagacacggtctgagcgggagatcgagcagctgaaggagcacctgcgtcttgccatggccgccctccaggagaaggagtcgatgcgcaacagcctggctgagtagaggtcccgcccagctgcagaccctccaggctggaggaccagccgccctccttccctcctggatggaagtaaaaagccaagctttctccccaccctctgtgggccacacgtgcacttgcacccaccacacacacacacacacacacacacacacacacagacacacagacacatacgcacacacgtgcacacatgtacacacggatacacacacacacacacacactgcatatctgagcgcgcccctcgcactgggtctcaccttgcaccttcttcaggattttatatgtgaagagatttttatatagatttttttcctttttttccaaaacactttatactttaaaaaaaaaaaaaaaaagcaattcctggtggctgtgtgcctccaaccctggtccccctctgtctccagccaccctctgcttgggcttctgagctggtggccctggcccagaggtctggcggaggcccaggcagcagccatggcggggtgtctctacaggggagaggcgggagcctgccaccctcttcctgccctacctcctactaacacttcctgccccatttggacccgtaccatggggctcaggacagagggagctagcagctggcctccatggccccacagcctccttcgaggctgtgctgggtgcagaaccgccagagccacccaaaaggtgtttctcttctgctccctgaacctcttaacttaataaaacgttccagcagcaaaaaaaaaaaaaaaaaa

SEQ ID NO: 398344 - DNA, 1000 bp, Homo Sapiens; identical to SEQ ID NO: 116748

SEQ ID NO: 398345 - DNA, 1000 bp, Homo Sapiens
ctgcctgcagaacgagattccttcagttatggacctcatcttcgctacctccgtctggatggaaatgaaatcaaaccaccaattccaatggctttaatgacctgcttcagacttctgcaggctgtcattatttaaacacattctcaccaaatctaaaattagtttaatgagctgtttctgacatgaaatgtggttaccattaataggtttaggacacaagtcatattccccattgctctcggccaccattttcatttgtgcagtgtattttttctattcaaagatgcttttgccagttacatgcatcacagcctgcattaatttgcttttcttttaattaataaaacagacacagagttaagatagtttatcaactcaaagatagttttattttggtctcttccatagcttattaacactaaagaaaacaattacattcttatacaataaaaaggacacatttgtgtatgtttaaaattacttatgcagataccgtaatttacagtataaatgtaataatcaaacaggaggataacgacctgaagaaaatgagaaaataaaatatttcttaattgtaatcataataaaacaattgcagattgctaagtagctgttggtggtacaagtttgatatttagcttgagaatgggtatggaatgaatcaaatacttcatcactaaagaattcttgttatttaatatcaaataatgaaacagcagtcacttctagttcattaccatttcttgtagctgttgtttttagatatagtccactgcattcttataagttctaaattttatgtttattataatgcatttcttgtggaatcttagtgttttaacatttgaaatccacttaaactgcaaattgttctttatatttgattgtgttttttggattttctaaataaaaatattgaatgctttctaacaaaacagaatatttcaaagaaattagcaagcttcattaaagaacatgttttaataaaaaaaaaaaaaaa

SEQ ID NO: 398346 - DNA, 1000 bp, Homo Sapiens
taagagcaggagaagatggggagggggtgggagtgggaaataaaatatttagcccttccttggtaggtagcttctctagaatttaattgtgctttttttttttttttggctttgggaaaagtcaaaataaaacaaccagaaaacccctgaaggaagtaagatgtttgaagcttatggaaatttgagtaacaaacagctttgaactgagagcaatttcaaaaggctgctgatgtagttcccgggttacctgtatctgaaggacggttctggggcataggaaacacatacacttccataaatagctttaacgtatgccacctcagagataaatctaagaagtattttacccactggtggtttgtgtgtgtatgaaggtaaatatttatatatttttataaataaatgtgttagtgcaagtcatcttccctacccatatttatcatcctcttgaggaaagaaatctagtattatttgttgaaaatggttagaataaaaacctatgactctataaggttttcaaacatctgaggcatgataaatttattatccataattataggagtcactctggatttcaaaaaatgtcaaaaaatgagcaacagagggaccttatttaaacataagtgctgtgacttcggtgaattttcaatttaaggtatgaaaataagtttttaggaggtttgtaaaagaagaatcaattttcagcagaaaacatgtcaactttaaaatataggtggaattaggagtatatttgaaagaatcttagcacaaacaggactgttgtactagatgttcttaggaaatatctcagaagtattttatttgaagtgaagaacttatttaagaattatttcagtatttacctgtattttattcttgaagttggccaacagagttgtgaatgtgtgtggaaggcctttgaatgtaaagctgcataagctgttaggttttgttttaaaaggacatgtttattattgttcaataaaaaagaacaagatac

SEQ ID NO: 398347 - DNA, 1000 bp, Homo Sapiens; identical to SEQ ID NO: 287610

SEQ ID NO: 398348 - DNA, 1000 bp, Homo Sapiens; identical to SEQ ID NO: 287611

SEQ ID NO: 398349 - DNA, 1000 bp, Homo Sapiens; identical to SEQ ID NO: 221973

SEQ ID NO: 398350 - DNA, 1000 bp, Homo Sapiens; identical to SEQ ID NO: 221974

SEQ ID NO: 398351 - DNA, 1000 bp, Homo Sapiens; identical to SEQ ID NO: 116749

SEQ ID NO: 398352 - DNA, 1000 bp, Homo Sapiens; identical to SEQ ID NO: 287615

SEQ ID NO: 398353 - DNA, 1000 bp, Homo Sapiens
agggatccatctggagtgcaggtccaccggctggtacccccaaccccaaatacagtggagcaacgccaagggagagaacatcccagctgtggaagcacctgtggttgcagatggagtgggcctatatgaagtagcagcatctgtgatcatgagaggcggctccggggagggtgtatcctgcatcatcagaaattccctcctcggcctggaaaagacagccagcatttccatcgcagaccccttcttcaggagcgcccagccctggatcgcagccctggcagggaccctgcctatcttgctgctgcttctcgccggagccagttacttcttgtggagacaacagaaggaaataactgctctgtccagtgagatagaaagtgagcaagagatgaaagaaatgggatatgctgcaacagagcgggaaataagcctaagagagagcctccaggaggaactcaagaggaaaaaaatccagtacttgactcgtggagaggagtcttcgtccgataccaataagtcagcctgatgctctaatggaaaaatggccctcttcaagcctggtgaggaaatgcttcagatgaggctccaccttgttaaataaattggatgtatggaaaaatagactgcagaaaaggggaactcatttagctcacgagtggtcgagtgaagattgaaaattaacctctgagggccagcacagcagctcatgcctgtaatcctagcactttggaaggctgaggagggcggatcacaaggtcaggagatcaagaccatcctggctaacacggtgaaaccccgtctctactaaaaatacaaaaaataaaaaattagccgggcatggtgacgggcacctgtagtcccagctactcgggaggctgaggcaggagaatggcatgaacccggaaggcagagcttgcagtgagccgagatcacgccactgcactccagcctgggagacagagcgagactctgtctcaagaaaaaaaaaaaaaaaaaaaaa

SEQ ID NO: 398354 - DNA, 1000 bp, Homo Sapiens
gcagttgggagatgttcagcttcagtccccggccctatggccgttcttttccaccctgtttcttcccccataggaagaacccacctgtagccctgaggttcttttcccaggatggctccaggataaggatcactgtaggtggttgtggagttgacacccctgttgactccttcccagctgattgtcagagccttagacccagcacgccttggattagctctgcagagtgtcttggttgagagaataacctcaccgtacccacatgacacgtgatttggaaagagactagaggccacacttgataaatcatggggaacagatgtgttccacccaacaaatgtgataagtgatcatgcagccagagccagccttccttcaatcaaggtttccaggcagagcaaataccctagagattctctgtgatataggaaatttggatgaagggagctagaagaaatacagggatttttttttttttttaagatggagtcttactctgttgctaggctggagtgcagtggtgcgatctcagctccctgcaacctccacctcctgggttcaaacaattctcctgcctcagcctcccgagtactgggaatataggtgcacgccaccacacccaacaaatttttgtacttttagtacagatgagggttcactatgttggccaggatggtctcgatctcttgacctcatgatccacccacctcggtctcccaaagtgctgggattacaggcttgagccaccgggtgaccggcttacagggatatttttaatcccgttatggactctgtctccaggagaggggtctatccacccctgctcattggtggatgttaaaccaatattcctttcaactgctgcctgctagggaaaaactactcctcattatcatcattattattgctctccactgtatcccctctacctggcatgtgcttgtcaagttctagttgttcaataaatttgttaataatgctgaaaaaaaaaaaaaaaaaa

SEQ ID NO: 398355 - DNA, 1000 bp, Homo Sapiens; identical to SEQ ID NO: 221975

SEQ ID NO: 398356 - DNA, 1000 bp, Homo Sapiens; identical to SEQ ID NO: 292120

SEQ ID NO: 398357 - DNA, 1000 bp, Homo Sapiens; identical to SEQ ID NO: 287619

SEQ ID NO: 398358 - DNA, 1000 bp, Homo Sapiens; identical to SEQ ID NO: 287620

SEQ ID NO: 398359 - DNA, 1000 bp, Homo Sapiens; identical to SEQ ID NO: 287621

SEQ ID NO: 398360 - DNA, 1000 bp, Homo Sapiens; identical to SEQ ID NO: 221977

SEQ ID NO: 398361 - DNA, 1000 bp, Homo Sapiens; identical to SEQ ID NO: 394167

SEQ ID NO: 398362 - DNA, 1000 bp, Homo Sapiens; identical to SEQ ID NO: 116751

SEQ ID NO: 398363 - DNA, 1000 bp, Homo Sapiens; identical to SEQ ID NO: 287627

SEQ ID NO: 398364 - DNA, 1000 bp, Homo Sapiens; identical to SEQ ID NO: 287628

SEQ ID NO: 398365 - DNA, 834 bp, Homo Sapiens; identical to SEQ ID NO: 221980

SEQ ID NO: 398366 - DNA, 1000 bp, Homo Sapiens; identical to SEQ ID NO: 287630

SEQ ID NO: 398367 - DNA, 1000 bp, Homo Sapiens; identical to SEQ ID NO: 116754

SEQ ID NO: 398368 - DNA, 1000 bp, Homo Sapiens; identical to SEQ ID NO: 115470

SEQ ID NO: 398369 - DNA, 1000 bp, Homo Sapiens; identical to SEQ ID NO: 116755

SEQ ID NO: 398370 - DNA, 1000 bp, Homo Sapiens
agacttgcttttctccagacagttcatcattcaaaggagctgcctccaccacccccatctactgaatagccaggggagggcaccaatgaacagcacagtatgggagacacaccaactactcttcaaatcagtgcgtacctgctctacgcgtgaaggtacagaaaacctccacggccttttcagtatttggtgcctttaaagaggcctaaggacttagtttatttgggctagactggaatgcagcagtactgccttcaggcctggacagccaggggctcctcgggccctgtgctctagaaggcccattctatgtctgcttcgccagcaccctttccccatcatggggcagatgcccaccagccctcactatctactgcttgaccatcctctgacttcctgggcccctagaatttataaggtccctagatatcccagaacctgccaccatggcctctgcaagcctctcctccaccttcaccccaagactaggggcaggaatgataagaaggctgggtggtagctgggatgtcccacctacgtgcctggggagagaagcaagagcaggctggagtctctactttgtattcttgtgaggcacaaatataggctagaatccaggccccacaaatataggctagaatccggaatgttttcttgatttaaagacatctttagaccgggcacagtggctcacgccagtaatcccagcactttggagggctgaagcaggaggattgcttgaggccgggagtttgagaccagcctgggcaacatggggagacccagtctctacaaaaaaatttaaaaagccaggcattggtggtgtgtgcctatagtcccaactactagggaggctgaggtgggaggatcacttgagcctgggggactgaggctgcagtgagccatgattgtgctactgcactccaatctggcaacagagcgagaccttgtctttaaaaataaaaataaaaacatctttacaacaaaaaaaaaaaaaaaa

SEQ ID NO: 398371 - DNA, 1000 bp, Homo Sapiens; identical to SEQ ID NO: 116756

SEQ ID NO: 398372 - DNA, 1000 bp, Homo Sapiens
cccgcagcgtccctggtctctccagccctcactcggaaccgcactgacaataccctcccctcccttgggctggacccctctctacagctaggagccaatggcagaagacaaaaccaaaccgagtgagttggaccaagggaagtatgatgctgatgacaacgtgaagatcatctgcctgggagacagcgcagtgggcaaatccaaactcatggagagatttctcatggatggctttcagccacagcagctgtccacgtacgccctgaccctgtacaagcacacagccacggtagatggcaagaccatccttgtggacttttgggacacggcaggccaggagcggttccagagcatgcatgcctcctactaccacaaggcccatgcctgcatcatggtgtttgatatacagaggaaagtcacctataggaacctgagcacctggtatacagagcttcgggagttcaggccagagatcccatgcatcgtggtggccaataaaattgatgacataaacgtgacccaaaaaagcttcaattttgccaagaagttctccctgcccctgtatttcgtctcggctgctgatggtaccaatgttgtgaagctcttcaatgatgcaattcgattagctgtgtcttacaaacagaactcccaggacttcatggatgagatttttcaggagctcgagaacttcagcttggagcaggaagaggaggacgtgccagaccaggaacagagcagcagcatcgagaccccatcagaggaggtggcctctccccacagctgaggggctggggctaggggaatagtttggaccttgtgcctcctgtgggaggctgaggactgcaagaggagagctagcagatatgcctgttcacccctctctggtacttgtggcttgctagtatgtttttatgataatctcgggcattgtttgcattgtgtttattaatagggttttgtttttattgtttccttttttacagtaaaggctgaatgacat

SEQ ID NO: 398373 - DNA, 1000 bp, Homo Sapiens
gcatctcggtgcgcctggcgcggctcgatgcgctggaccgcctggacgctgccgccttccagaagggcttgcaggctgcagtacagcaatggcgatcagaaggtagaacagctgtatggctgcacattcccatcctccaaagccgatttattgcccctgctgcttccctgggcttctgctttcaccacgcagaatcggattcatcaacgttgactctgtggctgagagaagggcccagcagattaccaggatatgcttcacatcaagtaggagttgcaggagctgtatttgatgaaagtactagaaaaatactggttgtacaagatcgaaataaattgaaaaatatgtggaagtttccaggaggcctgtcagagcctgaagaagatattggagacacagcggttcgagaagtttttgaagagactggtataaaatcagaattcaggtccgtcctgagtattcggcaacagcacacaaatcctggagcttttgggaagtcagatatgtatatcatctgccgcctaaagccatattcattcaccataaatttttgccaggaagaatgcttaagatgtgagtggatggatctcaatgacctggcgaagactgaaaatacaactcccatcaccagcagagttgctaggctgctgctgtatgggtacagagaagggtttgacaaaattgacctgactgtggaagaacttccagcagtttacacaggactgttttataaactctatcataaggaactgccagagaattataaaactatgaaaggaattgattaaattcacatttatatgtttagaaacatgtagactaacgaatgacataagaaatagtggacattttggattgattaaacatctgactgtgattttctaatgtatatgatttccatgaagaaattttgtttctaaacatgcacattttaaaagcctcttttcgaataaagcaaatgcgtgaaaaagaaaaaaaaaaaaaaaaaaaaaaaaaaaaa

SEQ ID NO: 398374 - DNA, 1000 bp, Homo Sapiens
agatccattcttgaccagtgaccggctcgaatctggccttttgtgtgagatgatcacggtttcttttgtttatcacgccatttgcaaatcagagcaagagctctttctcaagggcaagaaacgcaaacaagaaatatttgtgagatgaaagttgtcaattggattttcttcctaaacaaacaacaacaacaaactactagaagtctccctgagtccactcgcttggatttctgacacagtttacaaaaaaggaaaaaggcactgctcctattttcccttatggctgagttcaccttaagattgtaaatgtgtatatgtcagtgaaaacattgaggcttggaaaatgtgttattttcgttgccctaagtttgagtcgactttagactcaaaaacattttgagcgaatatcaaagttaacttttaaaaattgcgaaactatttcagaatcgcaattttatcgaagattaaatcagacttttttgtctggtaattatatatttattatttagcaaaactgaagaaaaaaagcacagaattgtttcaacagatgtctctcattttcagctagcatttctctcccaagttgagctggtttaatgtgttttggatttccctcctcaattggcttattttttagatcacctgcaattcatttgcaaattgcaataaaacacattttagaaaaaaggaaccttcaattattagctttgtttctttttaaatgtatatattttgactaatgtttgtgaatgaagttggctaacatgtatttagtttcattttggctttatgtaatataaagtttttaaaattttaaatatggttttaacctttatgtgtaaatgattttctagtgtgaccttctaatttaatattagacgtctaaggtatatctgtaaattagaatccgactatcactctgttcattttttttgaacaaagagtttaaataaagcctgaaccagggaaaagaaaaaaaaaaaaaaaaaaaaaaaaaaaa

SEQ ID NO: 398375 - DNA, 1000 bp, Homo Sapiens
gaaagcagattaaagaccatcagaaggaaattatttaggttgtaatgcacaggcaactgtgagaaactgttgtgccaaaaatagaattccttctagtttttcttgttctcatttgaaaggagaaaattccactttgtttagcatttcaagcttttatgtatccatcccatctaaaaactcttcaaactccacttgttcagtctgaaatgcagctccctgtccaagtgccttggagaactcacagcagcacgccttaatcaaaggttttaccagcccttggacactatgggaggagggcaagagtacaccaatttgttaaaagcaagaaaccacagtgtctcttcactagtcatttagaacatggttatcatccaagactactctaccctgcaacattgaactcccaagagcaaatccacattcctcttgagttctgcagcttctgtgtaaatagggcagctgtcgtctatgccgtagaatcacatgatctgaggaccattcatggaagctgctaaatagcctagtctggggagtcttccataaagttttgcatggagcaaacaaacaggattaaactaggtttggttccttcagccctctaaaagcatagggcttagcctgcaggcttccttgggctttctctgtgtgtgtagttttgtaaacactatagcatctgttaagatccagtgtccatggaaacattcccacatgccgtgactctggactatatcagtttttggaaagcagggttcctctgcctgctaacaagcccacgtggaccagtctgaatgtctttcctttacacctatgtttttaagtagtcaaacttcaagaaacaatctaaacaagtttctgttgcatatgtgtttgtgaacttgtatttgtatttagtaggcttctatattgcatttaacttgtttttgtaactcctgattcttccttttcggatactattgatgaataaagaaattaaagtgaaaaaaaaaaaaaaaaaaaaaaa

SEQ ID NO: 398376 - DNA, 1000 bp, Homo Sapiens
acttccttctgtgcttcaggcagcacgtgggctccagcgccgagtttatggaggcttggcggaagtacgacacagacaggagtggctacatcgaagccaatgagctcaagggattcctgtcagacctgctgaagaaggcgaaccggccgtacgatgagcccaagctccaggaatacacccaaaccatactacggatgtttgacttgaacggggatggcaaattgggcctctcagagatgtcccggatagaagcggctacattgacgagcatgagctggatgcccttttgaaggatctgtacgagaaaaacaaaaaggaaatcaatattcaacagctcaccaactacagaaagagcgtcatgtccttggcagaggcagggaagctctaccgcaaggacctggagattgtgctctgcagcgagccccccatgtaaagtggggacgggggctgcttctccacctcccccaaaccctgcttctgctgccctgatgcgtctacccagactcagagaccgtgagcgccccgcccccacccctacagcctgcacacacctgcctgcagagcaggaaacgagagatagaggatgggcagctggggggctgtcctgagccccctgcacccacccctgcccaggcagtctttgctcagtggatcacacacatggaaggtgatgggggcatgggtggagggtccctaattctcttcgctgtgatgcatgagctccctcgctgtatgatttaggcttctatgtccaacagagtggactcttccctctcgctcccctctgccggtcccccatgccaccacccaccccaaacttccaggttccatccaccaccttgccaatggtgtagctgtcctctcagaactcctgtgtgtggaaggcacccgccctttccttgccttctttactcggcgtgctccttttctctttgggtttcttgtttaccaaagaagagtttacagacaataaaatggaaaggtcctgctgtggaaactt

SEQ ID NO: 398377 - DNA, 1000 bp, Homo Sapiens
ccggcgcccctggcggtcccgcgctggggaacggagtggccggcgccggcgaagaagacccggctgcggccttcttggcgcagcaagagagcgagattgcgggcatcgagaacgacgaggccttcgccatcctggacggcggcgcccccgggccccagccgcacggcgagccgccggggggtccggatgctgttgatggagtaatgaatggtgaatactaccaggaaagtaatggtccaacagacagttatgcagctatttcacaagtggatcgattgcagtcagagcctgaaagtatccgtaaatggagagaagaacaaatggaacgcttggaagcccttgatgccaattctcggaagcaagaagcagagtggaaagaaaaggcaataaaggagctagaagaatggtatgcaagacaggacgagcagctacagaaaacaaaagcaaacaacagggtggcagatgaagctttctacaaacaacccttcgctgacgtgattggttatgtcacaaacataaaccatccttgctacagcctagaacaggcagcagaagaagcctttgtaaatgacattgacgagtcgtccccaggcactgagtgggaacgggtggcccggctgtgtgactttaaccccaagtctagcaagcaggccaaagatgtctcccgcatgcgctcagtcctcatctccctcaagcaggccccgctggtgcactgaagagccaccctgtggaaacactacatctgcaatatcttaatcctactcagtgaagctcttcacagtcattggattaattatgttgagttcttttggaccaaacctttttgtctttagagttgttcattgtttgtgattgcatgtttccttccttcaactgtgttctccctggcattcagagaggagggagaggaggaagaggaaggggagggaagcttcccaagagtagcctcaacctgtgcttctgtgcattattctgagaataaatttctgtttcaaactgt

SEQ ID NO: 398378 - DNA, 1000 bp, Homo Sapiens; identical to SEQ ID NO: 287634

SEQ ID NO: 398379 - DNA, 1000 bp, Homo Sapiens; identical to SEQ ID NO: 287635

SEQ ID NO: 398380 - DNA, 1000 bp, Homo Sapiens; identical to SEQ ID NO: 287637

SEQ ID NO: 398381 - DNA, 1000 bp, Homo Sapiens; identical to SEQ ID NO: 221984

SEQ ID NO: 398382 - DNA, 1000 bp, Homo Sapiens; identical to SEQ ID NO: 221986

SEQ ID NO: 398383 - DNA, 1000 bp, Homo Sapiens
tacgtcggggaggacgacgaggaggacgatgacttcaacgagaatgacgaggacgactgacgtcctccccacttcagattcggcttcaggaaaacgtttagcgaaaagaaactttttttttaatgtgggttttctgtttccttttggcctactcccaagaagatattggtaagctattgaatttagatatgcacctctgataagcaaggattgtttcccgtaggattaggacgtgctgtggatgtgtgttttgataccagtgtgctgatgcagagcgtttatttagttgttaggattttgtgttttcatttgctatttttctttaagtgcagagttcatttttgcccctgaaaagtttttgctgagtttgctgaagaaattgtatttcaaccacatccatgaaaataaaacacctcctgttgtggatggtgagcccctgatgccgcttatttgccgtgagtttggacggcacccctgctggcggatagcaagactctgtggagtttgttcagtggtacggtgtccaagcaaacagcagaatgcaactttctaaacagccccaagcaaacagcagaattcaactttttaaacaataaacaccatcaaccttattgactttattgtcccttaaattatattgactgttgtgattccatcaagtttgtacactcttttctctccctgttttgcagcaacaaattgcgaagtgcttttgtttgtttgttttcgtttggttaaagcttattgccatgctggtgcggctatggagactgtctggaaggcttggaatggtttattgcttatggtaaaatttgcctgatttcttacaggcagcgtttggaaaccttttattatatagttgtttacatacttataagtctatcatttaaagacatgtactgaaacaaatgtatttgtttcataagcatcttcctgtaatctattataaaattgaaattaaatatagagaatgttttaacaaaaaaaaaaaaaaaaaaaa

SEQ ID NO: 398384 - DNA, 1000 bp, Homo Sapiens; identical to SEQ ID NO: 116757

SEQ ID NO: 398385 - DNA, 1000 bp, Homo Sapiens; identical to SEQ ID NO: 221987

SEQ ID NO: 398386 - DNA, 1000 bp, Homo Sapiens; identical to SEQ ID NO: 287643

SEQ ID NO: 398387 - DNA, 1000 bp, Homo Sapiens; identical to SEQ ID NO: 287644

SEQ ID NO: 398388 - DNA, 1000 bp, Homo Sapiens; identical to SEQ ID NO: 116758

SEQ ID NO: 398389 - DNA, 1000 bp, Homo Sapiens; identical to SEQ ID NO: 287647

SEQ ID NO: 398390 - DNA, 1000 bp, Homo Sapiens; identical to SEQ ID NO: 116759

SEQ ID NO: 398391 - DNA, 1000 bp, Homo Sapiens
agggttgtagcggggacgagcgggagatggccaagatggttgctgacaccatctcccggacggagaagcaagtggtggtggaagggcaggagccagccaacttctggatggccctgggtgggaaggccccctatgccaacaccaagagactacaggaagaaaacctggtcatcaccccccggctctttgagtgttccaacaagactgggcgcttcctggccacagagatccctgacttcaatcaggatgacttggaagaggatgatgtgttcctactagatgtctgggaccaggtcttcttctggattgggaaacatgccaacgaggaggagaagaaggccgcagcaaccactgcacaggaatacctcaagacccatcccagcgggcgtgaccctgagacccccatcattgtggtgaagcagggacacgagccccccaccttcacaggctggttcctggcttgggatcccttcaagtggagtaacaccaaatcctatgaggacctgaaggcggagtctggcaaccttagggactggagccagatcactgctgaggtcacaagccccaaagtggacgtgttcaatgctaacagcaacctcagttctgggcctctgcccatcttccccctggagcagctagtgaacaagcctgtagaggagctccccgagggtgtggaccccagcaggaaggaggaacacctgtccattgaagatttcactcaggcctttgggatgactccagctgccttctctgctctgcctcgatggaagcaacaaaacctcaagaaagaaaaaggactattttgagaagagtagctgtggttgtaaagcagtaccctaccctgattgtagggtctcattttctcaccgatattagtcctacaccaattgaagtgaaattttgcagatgtgcctatgagcacaaacttctgtggcaaatgccagttttgtttaataatgtacctattccttcagaaagatgataccccaaaaaaaaaaaa

SEQ ID NO: 398392 - DNA, 1000 bp, Homo Sapiens; identical to SEQ ID NO: 116760

SEQ ID NO: 398393 - DNA, 1000 bp, Homo Sapiens; identical to SEQ ID NO: 221989

SEQ ID NO: 398394 - DNA, 1000 bp, Homo Sapiens; identical to SEQ ID NO: 221990

SEQ ID NO: 398395 - DNA, 1000 bp, Homo Sapiens
caaaaactagtgaagaaaatcttttggccacaggaaatatcttcctcagcatctgagaatttttccaggagggagacctgttggttattgtgcacttaaaagaaccacccacacctctctccatagtttatatcactaagccacttcaggatttttttttttttaagtaagaagggaactgtaaaagagaaaaaaagaaattcatgcatagcttctgtcagacttctctgaaagaaatgcctatcaaaatttgaattcagttcttcattttgcagatggctgaaagggacgagagaatgatggtgaagctgtgttgctttcccaggtgagccttgattatttcctctgtgctttctcagcttctttggccttctgtaagaggggcttctccaagagcatgtcactagttttctagaagttaaacaagagctaagacaaacaaaacaaaacacagcttatctaatctaatgagaaactcagaaaaaaatgttttgatgaatacaatgtattaaaatataaaacatgtagatcctttgacatgttaattcaattctagaatcctcaagaaatgtttttatattatgcagagatgtgcgtgcaaagaataatcgctggagttttgtttttatgtgtgaacgttgagacaatctaaatgtttatcagtggaagtaagtaggtacactgtctatgaaatactgtgaaacaataaggtatctctgtatgtactgatatcaaaagatctctaagatacagtatttagtaaaagagaaagtttcaggaaataaaactacatctagaagtataagcataaaactgttaatagtggttttctgcaggaaatgggatggaccagggttatatgcaatgttcagtttttacttttatacttaagtattgtttatgtttgaaaaataaaaagcatttattgtttttgcaataaatgtttaaaatatttcaataaagatagcatgttagaaaaaaaaaaaaaaaaaccgaattc

SEQ ID NO: 398396 - DNA, 1000 bp, Homo Sapiens; identical to SEQ ID NO: 287651

SEQ ID NO: 398397 - DNA, 1000 bp, Homo Sapiens; identical to SEQ ID NO: 221991

SEQ ID NO: 398398 - DNA, 1000 bp, Homo Sapiens; identical to SEQ ID NO: 287652

SEQ ID NO: 398399 - DNA, 1000 bp, Homo Sapiens; identical to SEQ ID NO: 116762

SEQ ID NO: 398400 - DNA, 1000 bp, Homo Sapiens; identical to SEQ ID NO: 221993

SEQ ID NO: 398401 - DNA, 1000 bp, Homo Sapiens
ggtcgaatgctcggtgtctgggtggcagctgagctgggactcaaggtggctcttggaacctgggaggcagcatctgggggcagtggatagaacacccggcctgtttctggttgcagatggttgccgatctgcccttgtcacagataggctacatcccagggtttctggctgcaagtgagactccaccctccccacctggctcatttccccgatgaccctggattgtaggaaagttaagcaggcaccatcctggaagtctacccctaggtggtcgagagacctgttctttcacagatgtgagaagccccaggatgattgaccatggtgttcaggagcggggagcactgatgaggtgctggggatgacaggaaggaaggaacactgggcagaaccagagagatgggacatggtagactgtggcccagaccccagagcagagaaacttgttcccatgacccttcccaaatctgctccagcaggactaaggtggctttcccactcctggcccacagccccagagagcctgtctgtgcatcctgaaccactctttgctgggcctccgcaagggcctctcttgggtctgtgtcctttttcaagcctgtttagatgggggagtgcccatgccctctgtgaagtgcccaaatgcgaaagaataacaccttttcttgcattctgagctaagccagacagcctttatactagattctatcaaaatcttgcaaaggaaaacaaaatgaacaacttctacccttaaacacatcctttctcccctgggcttgtaagaagatgcagcttgatgcagctcctcaaacaccaggccccctgggaactgggggtgcgggagttctccctctgggggacagaaaatctgactactaggaagacttctaggctatgaaactgacttctaggctatgaaacttacagggtatgggtgggcacattatcctttattttatgaaaaataaaatgtgtgtatgtgaaaaaaaaaaaaaaaaaa

SEQ ID NO: 398402 - DNA, 1000 bp, Homo Sapiens; identical to SEQ ID NO: 287655

SEQ ID NO: 398403 - DNA, 1000 bp, Homo Sapiens
ctttccctcctctccgcccatgaaaatgcctccaaactgagatgctttcagctgagaacagatttgactcacagacattaccaaagaggagcttgtgaatccaggaaaagctccagggggctagctgatctgagcagagagctttcagtgacccattttcctgtctagactctgccttaagctagtggcaactgctggggccccaggtacttgggacatggaaactcgttggatggctgggcagatgtaagcctgtccatgcagtcagccgatcctctgctcaggttcagctggactctgccatctgtgggcccagcatcactctgtaagttccttgaaaggaagaacaaccttagagtatttctgatacaaaatgagggcctctgctcttgatttaattataaaatgtctacgtctttctccagtttctgagccctatgcacattggcttgtgggcttgttcttcctgccaaatgatcagagagggaacattccatttatttgtagtggatttcctctggagggcatgtacccacactaaataccaactgctcttcctcagctgtagtccccaacatcagacttggcacgtggtggacactaacacacaggcactcaatgaatgagtgaaggaaataaaagtcaccccccgttggtgagaaggtgcctatccccctgagtcctcagtgcaggaccagtggatgaaaggcaaggtaaagaggcccaagataggctggcttcccccgttcaaggtatagtctgcctttaagggagttttagaaccaacatgcaagacattgaaagaaatcttgcaagagccattattgacttagatccaaaacagcctctctcatgtctaaaaaggcacagaattttgcagatctgaggaagagggatgcattacctttttgcttcttttcaattgcttagtgtttctaatcatacttaatccacactaatgtgcgcaattataataaatgctaaaatatcaaaaaaaaaa

SEQ ID NO: 398404 - DNA, 1000 bp, Homo Sapiens; identical to SEQ ID NO: 287656

SEQ ID NO: 398405 - DNA, 1000 bp, Homo Sapiens; identical to SEQ ID NO: 221994

SEQ ID NO: 398406 - DNA, 1000 bp, Homo Sapiens
taagaaaactcatgctggagagaaattctacaaatgtgaagcatgtggcaaagcctataatacattctcaatccttactaaacataaggtaattcatactggagagaaaccctacaaatgtgaagaatgtggcaaagctttcaactggtcatcaaaccttatggaacataagaaaattcacactggagagacaccctacaaatgtgaagaatgtgacaaagccttcagctggccctcaagccttactgaacataaggcaactcatgctggagaaaaaccctacaaatgtgaagaatgtggcaaagccttcagctggccctcaagacttactgaacataaggcaactcatgctggagaggaaccctacaaatgtgaagaatgtggcaaagctttcaactggtcctcaaaccttatggaacataagagaattcatactggagagaaaccctacaaatgtgaagaatgtggcaaaagctttagtacgttctcaatccttactaaacataaggtaattcatactggagagaaaccctacaaatgtgaagaatgtggcaaagcctataagtggtcctcaacccttagttatcataagaaaattcatactgtagagaaaccctacaaatgtgaagaatgtggcaaaggctttgttatgttctcaatccttgcaaaacataaggtaattcatactggagagaaactctacaaatgtgaagaatgtggcaaagcctataagtggccctcaacccttagatatcacaagaaaattcatactggagagaaaccctacaaatgtgaagaatgtggcaaagcctttagtacgttctcaatcctcactaaacataaggtaattcatactggagagaaaccctacaaatgtgaagaatgtggcaaagccttcagctggttatcagtcttcagtaaacataagaaaattcatactggagttcccaaccctcctacacataagaaaattcatgctggagagaaactctacaaatga

SEQ ID NO: 398407 - DNA, 1000 bp, Homo Sapiens
gaagtagttttggcaatgtctgtgttacatttcatgtaatttagccaactcccattccaactaggctttggctaaatctgacaattttatatatagcttaaaacaaagaatatacattcttttcacccctcccagtctacccatccagccttcatgattcattcctgtgtcaaggttagtcgctgttttccatttgaattggtttcttttatggtcagtttactttcttccctctcccctccctttcctgcacatccccatccttgctatgcctttctgtcctcttttataatggatatatctttttcctgccattatccctcagacattctcctcatggcacattttcttcaaatgctaacatttactgagtgtacattgaagttctgtgcatacaggaagaagttattttctgagcttagataatactatgtgtatatgtgattaaaatgaagattattttctaaagccttcaaattagaagtggatttctgtttcattacttccgttttaaaagtttttgccagagagttttgctaaatactctcttatttgctctagtgtactagtccagtagtgtttgcatgtggatgtctgtggatgacagttattgtagcactttggcagtgcactaaaattttgccactatgaaatgtttctttattgtgtgtgcgtgtgtgttttgaaatacgcacacagccacacccacatatatattaaaagtggttgtattcatttagtgaaaaacaaaaagtagatgtacttctgtaaatcagataaatgcttggaatttgattgtctacccaatcaacagttttccctctttgctctggaaatatttgtactcatatagcatatttcaaaaatgttgtcattcattaaggcctcttaaatagaccactattttttgtgtctggcagatgagtatgtcaaggattgagatgaacacataagtcttggaaattaaataaatttataaacataaagataaaaaaaaaaa

SEQ ID NO: 398408 - DNA, 1000 bp, Homo Sapiens; identical to SEQ ID NO: 116763

SEQ ID NO: 398409 - DNA, 1000 bp, Homo Sapiens; identical to SEQ ID NO: 116764

SEQ ID NO: 398410 - DNA, 1000 bp, Homo Sapiens; identical to SEQ ID NO: 221996

SEQ ID NO: 398411 - DNA, 1000 bp, Homo Sapiens
ttggatccaccatggggatgctagcagcactcactattgcgacgccctttgactccatctacttcggcctgtgtggcttcaacagcaccctcgcatgcatagcgataggaggcatgttctacgtcatcacctggcagacgcacctcctcgccatcgcctgcgcactgtttgctgcctacctgggtgctgccctggctaacatgttatctgtgtttggattgccgccctgcacttggcccttctgtctctcagctctcaccttcctgctcctgacgaccaataaccccgccatctacaagctcccgctcagcaaagtcacctacccagaggccaaccgcatctactacctgtcccaggagagaaacagaagggcatcaatcataacaaagtatcaggcctacgatgtctcctaagtttccctgtctaaaacacatcagtgtaaattcaggcttcagcacgccgtccagatccccaggataagagaccacttagccttccctttggtctgttctgtgactctctccccaaacacaaagaagcgtgtatgtagtcaccattccagaacctctcttttctaagatgcacaacacttatcaaagatatgtttagtttagactttatacccttagctttcccataagagctccctttgtggggaacttgccctcttctgcgaaataagcctcatccttaaagagaagtcaccggccgggcacggtggctcacgcctgtaatcccagcactttgggaggccgaggcgggtggatcacgaggtcaggagatcgagaccatcctggcgaacatggtgagacccatctctactaaaaatacaaaaaattagccaggcatggtggcgggcacctgtattcccagctacttgggaggctgaggcaggaaaatggcgtgaacccgggaggtggagcttgcagtgagccaagatcacgccactgcactccagcctgggcaacggattgagactctgtctcaaaaaaaaaaaaaa

SEQ ID NO: 398412 - DNA, 1000 bp, Homo Sapiens; identical to SEQ ID NO: 221997

SEQ ID NO: 398413 - DNA, 1000 bp, Homo Sapiens; identical to SEQ ID NO: 287664

SEQ ID NO: 398414 - DNA, 1000 bp, Homo Sapiens; identical to SEQ ID NO: 287666

SEQ ID NO: 398415 - DNA, 1000 bp, Homo Sapiens; identical to SEQ ID NO: 221998

SEQ ID NO: 398416 - DNA, 1000 bp, Homo Sapiens; identical to SEQ ID NO: 116766

SEQ ID NO: 398417 - DNA, 1000 bp, Homo Sapiens; identical to SEQ ID NO: 287670

SEQ ID NO: 398418 - DNA, 1000 bp, Homo Sapiens; identical to SEQ ID NO: 287671

SEQ ID NO: 398419 - DNA, 1000 bp, Homo Sapiens; identical to SEQ ID NO: 287672

SEQ ID NO: 398420 - DNA, 1000 bp, Homo Sapiens; identical to SEQ ID NO: 287673

SEQ ID NO: 398421 - DNA, 1000 bp, Homo Sapiens; identical to SEQ ID NO: 287674

SEQ ID NO: 398422 - DNA, 1000 bp, Homo Sapiens
atattcctgagggagagattttggttataacttatggacgatctattgcttttcatagtgcagtaagtttggacccaattaaatcctttgaagctcctgcaaccatcaattctgcatctcttcatcctgagaaagaatttcttgttgcaggcggtgaagattttaaactttataagtatgattataatagtggagaagaattagaatcctacaagggacactttggtcctattcactgtgtgagatttagtcctgatggagaactctatgccagtggttcagaagatggaacattgagactatggcaaactgtggtaggaaaaacgtatggcctttggaaatgtgtgcttcctgaagaagatagtggtgagctggcaaagccaaagattggttttccagagacaacagaagaggagctagaagaaattgcttcagagaattcagagtgcatctttccttcagctcctgatgttaaggcctgagcgtcaatcatatgttgcagttagtatacaactgactaaaacaagcaagcagagaaaagcatcagccttccagagttactgtctgcttaaggcagaaacagcagtaaataatgaggaaaatgaattagctccagtgctggaacaactaactaacttggtgttacctgtaagtgaaaactcaagtgtcagatgaagggaggtggagttatcctcttatagtacagtggcctgttatctttttaatgaatatatacaagccaacatccaatttctattattacaattagggttcttgtagctgtttatgttaatatggagaagaaaactatattggctgatttttttctgatcttaaagcagaatgccttttctttttttgcttcagttgtaaagaagagggaatacatgataaagtaactggtttgatttctcgttcattgtacactgcctctgaacatctaattgtttttagttgtctaaataaaatgcctctaaaacaaaaaaaaaaaaaaaaaaaa

SEQ ID NO: 398423 - DNA, 1000 bp, Homo Sapiens
gcttggagggaaagaactacctcctgaatcgctattatgtcccttatgggggacccaggcctgagtcctacagcaaagatgtggagttggctgacaccttgccagaaggagaccgggaggctctgtgggctgagctcaaggctggggctgagtctggctgggacttctcttcacgctggctcattggaggcccaaaccccaactcgcttagcggcatccgaacaagcaaactggtgcctgttgacctgaatgccttcctatgccaagcagaggagctgatgagcaacttctattccaggctggggaacgactcccaggccacgaagtacagaatcctgcggtcgcagcgcttggccgccctgaacacagtcctgtgggatgagcagaccggagcctggttcgattacgaccttgagaagaagaagaaaaaccgggagttttacccatccaacctcactccactctgggccgggtgtttctctgaccctggcgtggcggacaaggctctgaaatacctggaggacaaccggatcctgacttaccagtatgggatcccgacctctctccagaagacaggccagcagtgggatttccccaatgcctgggcccccctgcaggacttggtcatcagaggcctggccaaggcacctttacgtcgggcccaggaagtggctttccagctggctcagaattggatccgaaccaattttgatgtctactcgcagaagtcagccatgtatgagaagtatgacgtcagcaacggtggacagcccggtgggggaggagaatatgaagttcaggagggatttggctgggacgaaggtgtggtcctgatgctgctggaccgctatggtgaccggctgacctcaggggccaagctggctttcctggagccccactgcctggcggccacccttctgcccagcctcctgctcagcctcctgccatggtgacagccctcctctcctcacctggccccagctcctgccccccggaattc

SEQ ID NO: 398424 - DNA, 1000 bp, Homo Sapiens; identical to SEQ ID NO: 116768

SEQ ID NO: 398425 - DNA, 1000 bp, Homo Sapiens; identical to SEQ ID NO: 287677

SEQ ID NO: 398426 - DNA, 1000 bp, Homo Sapiens; identical to SEQ ID NO: 287678

SEQ ID NO: 398427 - DNA, 1000 bp, Homo Sapiens; identical to SEQ ID NO: 287679

SEQ ID NO: 398428 - DNA, 1000 bp, Homo Sapiens; identical to SEQ ID NO: 116771

SEQ ID NO: 398429 - DNA, 1000 bp, Homo Sapiens; identical to SEQ ID NO: 116772

SEQ ID NO: 398430 - DNA, 1000 bp, Homo Sapiens; identical to SEQ ID NO: 222003

SEQ ID NO: 398431 - DNA, 1000 bp, Homo Sapiens; identical to SEQ ID NO: 116774

SEQ ID NO: 398432 - DNA, 1000 bp, Homo Sapiens
ctagggagtctccactagataccacaaatttttctaaagaaaaagacattaatgaattcccactctgttcacttcctgaaggtgttgaccaagaagtcttcaagcagcttccagtagatattcaagaagaaatcctttctggaaaatctagggaaaaatttcaagggaaaggaagtgtgagttgtccattacatgcctctagaggagtattatctttcttttctaaaaaacaaatgcaagatattcccataaatcctagagatcatttatccagtagcaaacaggtatcctctgtatctccttgtgaaccgggaacatcaggctttaatagcagtagttcttcttacatgtctagccaaaaggattattcatattatttagataatagattaaaagatgaacgaataagtcaaggacctaaagaacctcaaggattccactttacaaattcaaaccctgctgtgtctgcttttcattcatttccaaacttgcagagtgagcaacttttctccagaaaccacactacagatagccataagcaaacagtagcaacagactctcatgaaggacttacagaaaatagagagccagattctgttgatgagaaaattactttcccttctgacattgatcctcaagttttctatgaactaccagaagcagtacaaaaggaactgctggcagagtggaagagaacaggatcagatttccacattggacataaataagcatattcagcaaaaaggtctgaaaagcaagggaataccattattttcggattagcggtttattaagctcttctatattaaacactaatagatattcaataacggagtaaactgttccagataaagcaagaatagttgcaagaagtaaattctggcacaaagcgtaaaaatataacagaagaaataatgtaaaatactatcttttatgtctaaagccattttatattacttttcaataaaaagaatatcatggtcaaaaaaaaaaaaaaaaa

SEQ ID NO: 398433 - DNA, 1000 bp, Homo Sapiens; identical to SEQ ID NO: 222004

SEQ ID NO: 398434 - DNA, 1000 bp, Homo Sapiens; identical to SEQ ID NO: 116775

SEQ ID NO: 398435 - DNA, 1000 bp, Homo Sapiens
cctgccctcggaatttctctgccaagctcttctgtttggcaggccggtgtgctgcaacgcgggcaaagttaagaccatcaatggatgaagttttaaatactcttgaaagtactcaagccagcttgtattttgctgaagatcctcccacatcactaaagtccttcaggtgtccttctcctctattcctggagaatgtaccaagtattccagtggaagatgatgaaagccagaataacaatttactaccttctgatgaaggcctgaggatagacagaatgactcagaaaactccttttgaatgcagccagtctgaggttatgtttctgagcttggacaaaaagccagagagcaagagaaatgaggaagcttgcaacatgcccagttcttcttgtgaagaaagttggttcccaaagtatatagttccatcccaggacttaaggccctataaggtaaatatagatccttcttcagaagctccagggcattcttgcaggagcaggccagtggagagcagctgttcctccaaattttcctgggatgaatatgaacagtacaaaaaagaataaattctaccagaagataaagaaaaaagcaagtattgcataggcacctgagcataggtatgaccttgggaagacattggctccataagcaatgccaagagaatgatcaatagtgagtttgggtgatgcagataaacaatctggataattccatttcttttttcccaaaccctcaaacagagtgccttaaaaaattgttttatcaggataattgtctcatgaccaaatccacgctcaattagagccattcaaaattccttaagatcatgggttctgacttcagccaaacaaaacaatcaaaacctaccaaaaagggactggattgtaatgtcctctccatcatcctcagtgtgagtcctcagagcctccatctgccaagaacattcagttggattccatcgtttggtttagcttgcttgcacgggttgtaggaaatg

SEQ ID NO: 398436 - DNA, 1000 bp, Homo Sapiens; identical to SEQ ID NO: 222005

SEQ ID NO: 398437 - DNA, 1000 bp, Homo Sapiens
ctgtgctcttgagttttttattcattcaagaaaccttgggccaccgctttgtacatagcaccgtgctaggctctgggatcccaaatggacccttttaactttctgaagatgggaccgtcccctggaggaaagtcattcctgcctaatccatcgagagaaagaggcttacgaaaaactttgcctctgatgctcagccccacccccaaatagcacacaagcttgttaaccccacctcttacaaaatgtttagattctgtaggtgttaaaagcctttctggaagtattgcattctgccgtgtttataggtgttcactttcctccagagctgattaactactgacatgacttggctttctcatccagaaattatggaaacagggtctgtcagtggcaggaggccgtgctgtgttttacttggatgacacaatgcagtttacttgcctcttcatacccatgcatgctgctcaccctagacaatgacatataagccgtatatagatcaatgtccacatatatatacacacacacatatatatatataaagtgtaacaaggaacactaaaacagtgttgattcttgtctctgaagacaaataattaaaccttttttttcccaactaaagaatggatttaattaaactatgtattgaaaaaaaagtagcctaagtgttagagatggtgaatatattccattttagttaaagaacaaatttcctgaattttaagcattcagtgagctgccaattttgattttgtgttgctctttacccaaattattttttctttgtttttctttttttgggggaggaggggaaaaaagcagcaatactgtgtttggaaattatactctgtatctggttttcctgtgtatgttaaccacttaaatgttattatcctgctttggttttagagtgattgtgaggcattcaatgcaagtatacagttattttctcattaaaatccaatgtgtgttgagtttttataaaaaaaaaaaaaaaaaa

SEQ ID NO: 398438 - DNA, 1000 bp, Homo Sapiens; identical to SEQ ID NO: 222006

SEQ ID NO: 398439 - DNA, 1000 bp, Homo Sapiens; identical to SEQ ID NO: 222007

SEQ ID NO: 398440 - DNA, 1000 bp, Homo Sapiens; identical to SEQ ID NO: 116776

SEQ ID NO: 398441 - DNA, 1000 bp, Homo Sapiens; identical to SEQ ID NO: 287691

SEQ ID NO: 398442 - DNA, 1000 bp, Homo Sapiens; identical to SEQ ID NO: 222008

SEQ ID NO: 398443 - DNA, 1000 bp, Homo Sapiens; identical to SEQ ID NO: 287693

SEQ ID NO: 398444 - DNA, 1000 bp, Homo Sapiens; identical to SEQ ID NO: 287694

SEQ ID NO: 398445 - DNA, 1000 bp, Homo Sapiens; identical to SEQ ID NO: 222010

SEQ ID NO: 398446 - DNA, 1000 bp, Homo Sapiens; identical to SEQ ID NO: 222011

SEQ ID NO: 398447 - DNA, 1000 bp, Homo Sapiens; identical to SEQ ID NO: 116778

SEQ ID NO: 398448 - DNA, 1000 bp, Homo Sapiens
aatgatagctcactgcagccttgaactcctaggctcaagcagtcctcctgccttagcctctagagtagctggggctacaggtgctggccgcctggcccagcttgtaatatctttttatgtctgacatttttgagctatctttttatgtttatccattagtggttctatagcactatacatagggattataatcaaaatttttaacatgtggtaaggcacagacactgaccagaactcaggccttgcagaaacagcctatgggcccagactggtacttcctggctgaatattggccatggttttagatgtattttattttataacatgaatgtgtattctttcataagggcttatcagtcagtatatttgccccagtgtttagttgttacaaggacatgatatgcttacttactatcagtttatgatgtagaaaatatattttgtaattataagaaaacaagacttttcctatacccagaaatccctttgcatttccgaagatcagatattttgcttaaaggtctgatcatataggaaatatatgcagaacattttaaagaaaatgcccggccttccagaaatatttttcaaaggactagtaatctaatagcctatagtttatattattattttgtattatttgcacgctgttacatagtatataatgataatgttttctacagtgaaagagctatcccgtcttccctttacaactgtctgaactttatttactcattagtcaaggttctttgcaaggcaggtgattaacttaaatatctcagtttatacagtggtttaaaagacttttgttatggtaatagggagagaaacttgtcagataggctaaaatctagataattctacatattctgaggaattcatgctcctgtggctcttgcttataaatatcttggaatgttaaaaaaaaaaaaaaaaaaaaaaaaaaaaaaaaaaaaaaaaaaaaaaaaaaaaaaaaaaaaaaaaaaaaaaaaaaaaaaaa

SEQ ID NO: 398449 - DNA, 1000 bp, Homo Sapiens; identical to SEQ ID NO: 222012

SEQ ID NO: 398450 - DNA, 1000 bp, Homo Sapiens
cgaccgtgcctgtacgacccgtcgcaggtgtgtttcaccgagcacacgcagagccaggccgcctggctctgtgccaagcccttcaaagtcatctgtatcttcgtctctttcctcagctttgactacaaactggtgcagaaggtgtgcccagactataacttccagagtgagcacccctacttcggatagcgcccctccccagccagtcctgagcctcccgccaaatcccagcctcactaggtgggacccccttcccagtgttctgccgctcctgtggccatgtcgcccactccttccactctgggggcggaggggaatggcttctcgggaccctcagctagcgtgggtgcccttttccttatgcggagtgcccgcaaggctggggtagccccctccagtacaccccaaagtgaaagggataagagtgcagccccagaataggcggggcttggaggcggtcccaatgtcccctgggtccacagtgggtccccttttcacccttggcgctaggctgcgcactccctttccccgcagctttaataactcctggcctggcaccctcaccccaccctgactttcccatcccccagcgcttgtcctgcttcaccataccccgcctaagactgtaaaggcctaaaaacctcggcctgtcctcccaccattctgcctgccatatgcctgtccccttttcctccaaaccctattagggtaccggaagcagaacccctgggctgaggccctggccctgcccccggcccctgcccctgcccgcccccctccagtccaggcagtcgagctccacctgccctctcctgctgcttcctctcggtgatattttttctacgccaaaacagacgggaaagggaacaaaataaagtgaaatcccaaaaaaaaaaaaaaaaaaaaaaaaaaaaaaaaaaaaaaaaaaaaaaaaaaaaaaaaaaaaaaaaaaaaaaaaaaaaaaaaaaaaaaaaaaaaaaaaaaaaaaaaaaaaaaaaaa

SEQ ID NO: 398451 - DNA, 1000 bp, Homo Sapiens
ttcttcgcgccctttggcgtcatgctgtgcgcctacatgtgcatcctcaacacggtccgcaagaacgccgtgcgcgtgcacaaccagtcggacagcctggacctgcggcagctcaccagggcgggcctgcggcgcctgcagcggcagcaacaggtcagcgtggacttgagcttcaagaccaaggccttcaccaccatcctgatcctcttcgtgggcttctccctctgctggctgccccactccgtctacagcctcctgtctgtgtttagccagcgcttttactgcggttcctccttctacgccaccagcacctgcgtcctgtggctcagttacctcaagtccgtcttcaaccccatcgtctactgctggagaatcaaaaaattccgcgaggcctgcatagagttgctgccccagaccttccaaatcctccccaaagtgcctgagcggatccgaaggagaatccagccaagcacagtctacgtgtgcaatgaaaaccagtctgcggtttagggggtcagggggccacagagaaggggcagctgagccccagtcccagggtggatctgtcctgctctgttccctggcatgttggtcatagtctgcactttgtggtggcaatttaagcacaaaggtactcatttgtaatcagatgagctgcagctcccaaatttcaaattttggcacgatgaattatttttgtttctctttgcagagagccaaatatggggctgatgggaactgcaacgtcattaagtcaaaaatggagtgggctggggagtgcagaagttgggcagaaagggaggaggagggcaacagggaatgaagctggttgagtgtggggcaggaggactggtcagtcacaagagcttcaacctgccctgcgagccctctctgcacctgctcaagagaaaccctgagaaaccccagtaggtgtgagctcctgggtgttcattcattttgtttgacaccagggttcttcagctattgatgtttgtggtgt

SEQ ID NO: 398452 - DNA, 1000 bp, Homo Sapiens; identical to SEQ ID NO: 116780

SEQ ID NO: 398453 - DNA, 1000 bp, Homo Sapiens; identical to SEQ ID NO: 222013

SEQ ID NO: 398454 - DNA, 846 bp, Homo Sapiens; identical to SEQ ID NO: 116781

SEQ ID NO: 398455 - DNA, 1000 bp, Homo Sapiens; identical to SEQ ID NO: 116782

SEQ ID NO: 398456 - DNA, 1000 bp, Homo Sapiens; identical to SEQ ID NO: 116783

SEQ ID NO: 398457 - DNA, 1000 bp, Homo Sapiens
gacggacctactcagccatctggaccggtgcgtggccttcatcggtcaggcccgcgctgagggccgtgcggtgttggtgcactgtcatgcaggagtcagtcgaagtgtggccataataactgcttttctcatgaagactgaccaacttccctttgaaaaagcctatgaaaagctccagattctcaaaccagaggctaagatgaatgaggggtttgagtggcaactgaaattataccaggcaatgggatatgaagtggatacctctagtgcaatttataagcaatatcgtttacaaaaggttacagagaagtatccagaattgcagaatttacctcaagaactctttgctgttgacccaactaccgtttcacaaggattgaaagatgaggttctctacaagtgtagaaagtgcaggcgatcattatttcgaagttctagtattctggatcaccgtgaaggaagtggacctatagcctttgcccacaagagaatgacaccatcttccatgcttaccacagggaggcaagctcaatgtacatcttatttcattgaacctgtacagtggatggaatctgctttgttgggagtgatggatggacagcttctttgcccaaaatgcagtgccaagttgggttccttcaactggtatggtgaacagtgctcttgtggtaggtggataacacctgcttttcaaatacataagaatagagtggatgaaatgaaaatattgcctgttttgggatcacaaacaggaaaaatatgaacatgatattttatagcttgggaagaaacttgcagatgatatgtgctgcctttgcttcttatcattcatggcagattgttagtgctttcaacatttcatttgaaatgggagaagataaaatcacttgatgtaacctggaaactatgctttacatggcaatcaaagccttttgatcatgtacattttatttgatattaaaatcttttataaccagaaaaaaaaaaaaaaaaaaaaaaa

SEQ ID NO: 398458 - DNA, 1000 bp, Homo Sapiens; identical to SEQ ID NO: 116784

SEQ ID NO: 398459 - DNA, 1000 bp, Homo Sapiens; identical to SEQ ID NO: 222015

SEQ ID NO: 398460 - DNA, 1000 bp, Homo Sapiens; identical to SEQ ID NO: 222016

SEQ ID NO: 398461 - DNA, 1000 bp, Homo Sapiens
cgtgatcaacacccagggcatcacgctgtcacccatcaagcccggccagcagctccaccaaccctcccagacgtcagtgggtcaagcagcctcccaaggcaaccttctgcacctggctcacagccaagcatccatgtctcaaagtcccgtccggcaggcttcctcttcttcctcctcatcctcctcttcttcagctttgagcgtgggccagttagtcagcaatcctcaaacggcagcgggtgaggtggatggggttaatctggaggagatccgagaatttgccaaagcttttaaaatccggcgcctgtcccttggcctgacccagactcaggtgggacaggctctcagtgctacagagggccccgcgtacagccagtcggccatctgcagacacaccatcctgagaagccactttttcctaccacaggaagcccaagagaacactatagctagcagtctgacagccaaactgaaccctggccttttgtatcctgccaggtttgaaaagctggacatcacccctaaaagtgcccagaagatcaagccggtgcttgagcggtggatggctgaggctgaggcccgccatcgagcaggtatgcagaacctgaccgagtttatcgggagtgaaccatccaaaaagcgcaagcggcgcacctccttcacaccccaggcccttgagatcctcaatgcccactttgagaagaacacacacccttctgggcaggaaatgaccgaaattgctgagaagctgaactatgaccgagaagtagttagagtttggttctgcaataagaggcaagccctgaagaacacaattaaacgcttaaaacagcacgagccggccacggcagtccctttggagcccttaacagactctctggaagaaaactcctaaagagatgcccacccataatcagaagcaaaattcacagaaactaaactccacccttgggactccacaacaacaacaacaacaaaatttaatttaatttaaaaatag

SEQ ID NO: 398462 - DNA, 1000 bp, Homo Sapiens; identical to SEQ ID NO: 222019

SEQ ID NO: 398463 - DNA, 1000 bp, Homo Sapiens; identical to SEQ ID NO: 222020

SEQ ID NO: 398464 - DNA, 1000 bp, Homo Sapiens; identical to SEQ ID NO: 116788

SEQ ID NO: 398465 - DNA, 1000 bp, Homo Sapiens; identical to SEQ ID NO: 116789

SEQ ID NO: 398466 - DNA, 1000 bp, Homo Sapiens; identical to SEQ ID NO: 222021

SEQ ID NO: 398467 - DNA, 906 bp, Homo Sapiens; identical to SEQ ID NO: 116790

SEQ ID NO: 398468 - DNA, 1000 bp, Homo Sapiens; identical to SEQ ID NO: 287715

SEQ ID NO: 398469 - DNA, 1000 bp, Homo Sapiens; identical to SEQ ID NO: 222023

SEQ ID NO: 398470 - DNA, 1000 bp, Homo Sapiens
cataccccttgaaagcaacatctacagtgaagcagtcctgggactggaccactgacatggatggctaccttggagagaccagtgctgggccaggaaagagcctgcctgtctttgccatcatcctcatcatctccttgtgctgtatggtggtttttaccatggcctatatcatgctctgtcggaagacatcccaacaagagcatgtctacgaagcagccagggcacatgccagagaggccaacgactctggagaaaccatgagggtggccatcttcgcaagtggctgctccagtgatgagccaacttcccagaatctgggcaacaactactctgatgagccctgcataggacaggagtaccagatcatcgcccagatcaatggcaactacgcccgcctgctggacacagttcctctggattatgagtttctggccactgagggcaaaagtgtctgttaaaaatgccccattaggccaggatctgctgacataattgcctagtcagtccttgccttctgcatggccttcttccctgctacctctcttcctggatagcccaaagtgtccgcctaccaacactggagccgctgggagtcactggctttgccctggaatttgccagatgcatctcaagtaagccagctgctggatttggctctgggcccttctagtatctctgccgggggcttctggtactcctctctaaataccagagggaagatgcccatagcactaggacttggtcatcatgcctacagacactattcaactttggcatcttgccaccagaagacccgagggaggctcagctctgccagctcagaggaccagctatatccaggatcatttctctttcttcagggccagacagcttttaattgaaattgttatttcacaggccagggttcagttctgctcctccactataagtctaatgttctgactctctcctggtgctcaataaatatctaatcataacagcaaaaaaaaaaaaaaaaaaa

SEQ ID NO: 398471 - DNA, 1000 bp, Homo Sapiens
tgataatagattagattcaaaagaatggccatattgttcccagtgtccagcagtatggaatggttcaggagctgtaagtgctcgccagaaacccagagctaattatttagaagaccgaaaaaatgggtcaaagctgattgtttttgtaattggagggatcacatactctgaagtgcgtggtgcttatgaagtttctcaggcacataaatcctgtgaagttattattggttctacacatgttttaacacccaaaaagctgttggatgatataaagatgctgaataaacccaaggataaagtctccttaattaaagatgaatagcatttctttttggagggtttagagattcttactaatatgttgaactaaaatagaaagaaaatgttgctgtcatgtaatttaaacaatgtaaatattttatggaataatggcttttcaaatacatttcttaaggaactgtttatgattattactggatttgtcatttttgataatttaaatattgctgctgctttgtagatgatgagaagaaatgttaaagtgctttctaaaaggaaattttttcacctttggaggagaatatattagagttgtgggtaatttttcacagccacctatgtacatactaattacccattggatacttatatctaaaagtctcatgctgaagtatagtttttgggaaagaatgattttaaataaagagattgtaaaagtaaaaaactgtaaatgtatatgtatgatagaattgtttcctctaagtgtagtttttctttcaactaaaattcagtttatgtgtaaaataattcagtcattaatagaaatggagtgatttcacagtgtgtactgttttgccacatacttctaaagaacacaattttatataattttgaaatcatgtatgtttaaattagaaaaccaaaaatcatgaacattctaagaggaaataaatatagaatttaaaaaattaaaaaaaaaaaaaaaaaaaaaaaaggaatt

SEQ ID NO: 398472 - DNA, 1000 bp, Homo Sapiens; identical to SEQ ID NO: 116792

SEQ ID NO: 398473 - DNA, 1000 bp, Homo Sapiens
aggcctggaaccctcttggctaaggtgctgttcctgttcctgcaaggtctccagaacccctttggaaatggtgaaggaaccagcccaatagaagtacagagccagctgacaagtccttgtaaagctcactcctcagtccttggcacagccatgttttgtcttctctcttggtatttcttctctcccaactttagccattttgccttggaatcatgattacaattttttcctttgcagatgccttcctgggggatactcctccccaccctaaagggtcgcctgcaacttaggcggattgggtctctctgctgtggcgttctctcttgagagaccctctgaattttagcacaaagtgccttctgtttcacagctgccaccacctttagaggaatttcgtcagaaaaatgtggaggctccatattaatgcattattttttaaaaagttttgataactcttaaagcatcatttgcacctatgtgggaactttgcctgttgcaaagtattgtggccgagctgcagctgggagcctgctttctgccagtcttgaggttctgaagatcagctttgaaaggaaagtatgtcctagcttagccattcagaagagaaaaatggaatatcagagttacagttgtcagtgaaactactttggattttaacctcttagaggaagaaaaaaggttagggaagtgtcaactctggatgaaggtgatgtgtttgcctctcagtctttcattcatagcctgctagtgaaaaggaagtaaatgagattcttttgtgtgactttgtagtctctttgtattaccaaatagttggggtgttgactcctgtgtgttttgcaagaatgtgtggtaagcctgggtaaagagaaggaactgcggtgttgggagagtctttgtgttggggagtggcaggggatgatttgtttcaggggaaaatgcccacattttaacttttaaacttctgaataaactgtgtaaaaacaaaaaaaaaaaaaaaaaa

SEQ ID NO: 398474 - DNA, 1000 bp, Homo Sapiens; identical to SEQ ID NO: 116793

SEQ ID NO: 398475 - DNA, 1000 bp, Homo Sapiens; identical to SEQ ID NO: 116794

SEQ ID NO: 398476 - DNA, 1000 bp, Homo Sapiens; identical to SEQ ID NO: 116795

SEQ ID NO: 398477 - DNA, 1000 bp, Homo Sapiens; identical to SEQ ID NO: 287721

SEQ ID NO: 398478 - DNA, 924 bp, Homo Sapiens; identical to SEQ ID NO: 287722

SEQ ID NO: 398479 - DNA, 1000 bp, Homo Sapiens; identical to SEQ ID NO: 287723

SEQ ID NO: 398480 - DNA, 907 bp, Homo Sapiens; identical to SEQ ID NO: 23909

SEQ ID NO: 398481 - DNA, 1000 bp, Homo Sapiens; identical to SEQ ID NO: 287724

SEQ ID NO: 398482 - DNA, 1000 bp, Homo Sapiens; identical to SEQ ID NO: 222028

SEQ ID NO: 398483 - DNA, 1000 bp, Homo Sapiens; identical to SEQ ID NO: 116797

SEQ ID NO: 398484 - DNA, 1000 bp, Homo Sapiens
tggaggagcaggagtccagggtgcactacaccgtgtgcatctggcggaacggcaaggtggggctgtctggcatggccatcgcggacgtcaccctcctgagtggattccacgccctgcgtgctgacctggagaagctgacctccctctctgaccgttacgtgagtcactttgagaccgaggggccccacgtcctgctgtattttgactcggtccccacctcccgggagtgcgtgggctttgaggctgtgcaggaagtgccggtggggctggtgcagccggccagcgcaaccctgtacgactactacaaccccgagcgcagatgttctgtgttttacggggcaccaagtaagagcagactcttggccaccttgtgttctgctgaagtctgccagtgtgctgaggggaagtgccctcgccagcgtcgcgccctggagcggggtctgcaggacgaggatggctacaggatgaagtttgcctgctactacccccgtgtggagtacggcttccaggttaaggttctccgagaagacagcagagctgctttccgcctctttgagaccaagatcacccaagtcctgcacttcaccaaggatgtcaaggccgctgctaatcagatgcgcaacttcctggttcgagcctcctgccgccttcgcttggaacctgggaaagaatatttgatcatgggtctggatggggccacctatgacctcgagggacacccccagtacctgctggactcgaatagctggatcgaggagatgccctctgaacgcctgtgccggagcacccgccagcgggcagcctgtgcccagctcaacgacttcctccaggagtatggcactcaggggtgccaggtgtgagggctgccctcccacctccgctgggaggaacctgaacctgggaaccatgaagctggaagcactgctgtgtccgctttcatgaacacagcctgggaccagggcatattaaaggcttttggcagcaaagtgtcagtgttggc

SEQ ID NO: 398485 - DNA, 1000 bp, Homo Sapiens; identical to SEQ ID NO: 222030

SEQ ID NO: 398486 - DNA, 1000 bp, Homo Sapiens; identical to SEQ ID NO: 222030

SEQ ID NO: 398487 - DNA, 1000 bp, Homo Sapiens; identical to SEQ ID NO: 222030

SEQ ID NO: 398488 - DNA, 1000 bp, Homo Sapiens; identical to SEQ ID NO: 222031

SEQ ID NO: 398489 - DNA, 1000 bp, Homo Sapiens
ggctggggcctgtgccttatcggctggaacgagttcatcctgcagcccatccacaacctgctcatgggtgacaccaaggagcagcgcatcctgaaccacgtgctgcagcatgcggagcccgggaacgcacagagcgtgctggaggccattgacacctactgcgagcagaaggagtgggccatgaacgtgggcgacaagaaaggcaagatcgtggacgccgtgattcaggagcaccagccctccgtgctgctggagctgggggcctactgtggctactcagctgtgcgcatggcccgcctgctgtcaccaggggcgaggctcatcaccatcgagatcaaccccgactgtgccgccatcacccagcggatggtggatttcgctggcgtgaaggacaaggtcacccttgtggttggagcgtcccaggacatcatcccccagctgaagaagaagtatgatgtggacacactggacatggtcttcctcgaccactggaaggaccggtacctgccggacacgcttctcttggaggaatgtggcctgctgcggaaggggacagtgctactggctgacaacgtgatctgcccaggtgcgccagacttcctagcacacgtgcgcgggagcagctgctttgagtgcacacactaccaatcgttcctggaatacagggaggtggtggacggcctggagaaggccatctacaagggcccaggcagcgaagcagggccctgactgcccccccggcccccctctcgggctctctcacccagcctggtactgaaggtgccagacgtgctcctgctgaccttctgcggctccgggctgtgtcctaaatgcaaagcacacctcggccgaggcctgcgccctgacatgctaacctctctgaactgcaacactggattgttcttttttaagactcaatcatgacttctttactaacactggctagctatattatcttatatactaatatcatgttttaaaaatataaaatagaaattaa

SEQ ID NO: 398490 - DNA, 1000 bp, Homo Sapiens; identical to SEQ ID NO: 116799

SEQ ID NO: 398491 - DNA, 1000 bp, Homo Sapiens; identical to SEQ ID NO: 287731

SEQ ID NO: 398492 - DNA, 1000 bp, Homo Sapiens; identical to SEQ ID NO: 222032

SEQ ID NO: 398493 - DNA, 1000 bp, Homo Sapiens; identical to SEQ ID NO: 116800

SEQ ID NO: 398494 - DNA, 1000 bp, Homo Sapiens
tggacttttgcagcttccttccaagtcttcctgaccaccttgcactattggactttggaaggaggtgcctatagaaaacgattttgaacatacttcatcgcagtggactgtgtcctcggtgcagaaactaccagatttgagggacgaggtcaaggagatatgataggcccggaagttgctgtgccccatcagcagcttgacgcgtggtcacaggacgatttcactgacactgcgaactctcaggactaccggttaccaagaggttaggtgaagtggtttaaaccaaacggaactcttcatcttaaactacacgttgaaaatcaacccaataattctgtattaactgaattctgaacttttcaggaggtactgtgaggaagagcaggcaccagcagcagaatggggaatggagaggtgggcaggggttccagcttccctttgattttttgctgcagactcatcctttttaaatgagacttgttttcccctctctttgagtcaagtcaaatatgtagatgcctttggcaattcttcttctcaagcactgacactcattaccgtctgtgattgccatttcttcccaaggccagtctgaacctgaggttgctttatcctaaaagttttaacctcaggttccaaattcagtaaattttggaaacagtacagctatttctcatcaattctctatcatgttgaagtcaaatttggattttccaccaaattctgaatttgtagacatacttgtacgctcacttgccccagatgcctcctctgtcctcattcttctctcccacacaagcagtctttttctacagccagtaaggcagctctgtcgtggtagcagatggtcccacttattctagggtcttactctttgtatgatgaaaagaatgtgttatgaatcggtgctgtcagccctgctgtcagaccttcttccacagcaaatgagatgtatgcccaaagcggtagaattaaagaagagtaaaatggctgttgaagc

SEQ ID NO: 398495 - DNA, 1000 bp, Homo Sapiens
ccatggacaccgaggaccagggcgtgaaggtcttcctgatctcggccagctccaaggacacaggtcagttgtatgcagccctgcaccaccgcatcctggccctgcgcagccgcgtggagcaggagcaggaggccaagatgcccgcgcctgagcctggggcagccccatccaacgaggaggacgacagcgacgatgacgatgtcctggctccttcaggggccaccgcagctggtgctggtgacgaaggggacgggcagacgaccgggagcacatagcggccgggagcccggctgcacaccaggctgctgctttgtccgtctatccacccgcccacccgcccccaccccaccggcagcgtccaggtgcggggccgggaaccacacaccccactgggccggccacagtctggacccgcacgtcctgttcaaaagcagactcgggaactgcctgaatgtggtttgggacacgagacctcatcatattgatgagcgaacaaacaagaacatttcctccctcccctcctttgaattgaaatggcacattaagacttgtcacggcttctcactgggactggagacctcgttccttcaccccgcgtgtcgccagcctctgggtccagccagagcccctggcttctccgccacccacacccttcccaccctgctgtggggccctgcctttgtggggagcagccagccctctgcccctgcccagggctccccaactataggcctgggacccccgcccagcttggggggctgctcgtacgagtgtagacactgggcccattggacgtgctgttaactactatcttcatttcccacttcccctctctgattgggggtgtatattttacatctttttttctttttattttcgaaaaaaaaaaaaaaaaaaaaaaaaaaaaaaaaaaaaaaaaaaaaaaaaaaaaaaaaaaaaaaaaaaaaaaaaaaaaaaaaaaaaaaaaaaaaaaaaaaaaaaaaaaaaaaaaaaaaaaaaa

SEQ ID NO: 398496 - DNA, 1000 bp, Homo Sapiens; identical to SEQ ID NO: 222033

SEQ ID NO: 398497 - DNA, 1000 bp, Homo Sapiens; identical to SEQ ID NO: 221564

SEQ ID NO: 398498 - DNA, 1000 bp, Homo Sapiens; identical to SEQ ID NO: 222035

SEQ ID NO: 398499 - DNA, 1000 bp, Homo Sapiens
gtgtatttctattttgcagcagtaccatcccactgatatcacgggcccgctcaacctctcagatccctcggtcagcaccgtggtgtgaggcccccggaggcgcccacctgcccagttagcccggccaaggacactgatgggtcctgctgctcgggaaggcctgagggaagcccacccgccccagagactgcccaccctgggcctcccgtccgtccgcccgcccaccccgctgcctggcgggcagcccctgctggaccaaggtgcggaccggagcggctgaggacggggcagagctgagtcggctgggcagggcgcagggcgctccggcagaggcagggccctggggtctctgagcagtggggagcgggggctaactggccccaggcggaggggcttggagcagagacggcagccccatccttcccgcagcaccagcctgagccacagtggggcccatggccccagctggctgggtcgcccctcctcgggcgcctgcgctcctctgcagcctgagctccaccctcccctcttcttgcggcaccgcccacccacaccccgtctgccccttgaccccacacgccggggctggccctgccctcccccacggccgtccctgacttcccagctggcagcgcctcccgccgcctcgggccgcctcctccagactcgagagggctgagcccctcctctcctcgtccggcctgcagcccagaacgggcctccccgggggtccccggacgctggctcgggactgtcttcaaccctgccctgcaccttgggcacgggagagcgccacccgcccgcccccgccctcgctccgggtgcgtgaccggcccgccaccttgtacagaaccagcactcccagggcccgagcgcgtgccttccccgtgcggcccgtgcgcagccgcgctctgcccctccgtccccagggtgcaggcgcgcaccgcccaacccccacctcccggtgtatgcagtggtgatgcctaaaggaatgtcacgc

SEQ ID NO: 398500 - DNA, 1000 bp, Homo Sapiens; identical to SEQ ID NO: 222036

SEQ ID NO: 398501 - DNA, 1000 bp, Homo Sapiens
tttctggttttgtttgccaatgagcataataaatgtaaaacctatatagtatccctgtgattattgtatgagcctttgtttgagatttgaaaaaaacatggctccatcacatattcccttttttcttttgatgtctactcaaatcatgaattaatcacatacctcatcattaatcttttcaaggtccttctattgttttgtctgattttctccatcatcctgattagcatgtttattccctcactacccccaggagatattcactgtaatgaatatgtctttggctatgtatgtgtccttgtgttatgttgtacagtgttgttttgagtctgttattatttacacagatgttattatgctatagcttctatttctgtttttgcttcttatttctcttataattctcacttatttcctattttttctactcatttctatttgttactcctttttactggacatgatgtttacaagatacaactgtgttactgtattccatctagtacggggcctttggtgtggcttactatttcattgtgtgcacccacccacccaccacactggacttttctagagatggacagcttggttacctccaccttcctgcactcattctcaaacatactgatgttcatacaaaccagcagagtgctgagggacgatatgtactattacaaaaccagacacttttacattcatggtccaacagaacacatggcctagaggcaatgttgcatataccttaatctttgatatgaataatatctttgttctttatatttcttaaaacagaaagggtggaaaatcactatacagaagcaatatccaaagatctcctgatcataaagacaaggggtcttttcagtcttccctctcctcaaaccttgtgtagcattgcacaatatagatctcagtcaacattcactgagtgccaagaatgtgagaaacactgtaccatgcctgtcatgcgaaatatttaaataaacagattgtcttacag

SEQ ID NO: 398502 - DNA, 1000 bp, Homo Sapiens; identical to SEQ ID NO: 222037

SEQ ID NO: 398503 - DNA, 1000 bp, Homo Sapiens; identical to SEQ ID NO: 287742

SEQ ID NO: 398504 - DNA, 1000 bp, Homo Sapiens
acagggtaaatgaactgaaaagtctaaatatatcaactaaagtagctttgctctctgatgtaaaggatggagtaaatcaagcagcacctgcatttggatttggcagcagtcaagcagcaacatttatgtcgccaggctttccagtcaataacagcagcagtgataatgctcagaactttagttttaaaacaaactctggatttgctgctgcctcttctggaagccctgctggttttgggagttccccagcatttggagctgcagcctctaccagttcaggtatctctacttctgctccagcttttggatttgggaagcctgaagtcacatcggctgcatcattttcattcaaaagccctgcagcttccagttttggatcacctggattttcaggacttccagcttccttggcaacaggtcctgtcagagctccagtggccccagcctttggaggtggcagttctgtggctggttttggtagtccgggctcacattctcacactgctttttctaagccatccagtgacacttttggaaatagcagcatatccacttctctgtcagcctcaagcagcatcattgcaacagataatgtgttattcacacccagagataaactaacagtagaagaactggaacaatttcaatccaagaaatttactctgggaaaaattccattaaagcctccacctctggaacttctaaatgtttaaaagggcaattttaaatacaaaaaagaatgatgtttaaaattgctttgagtgattcatacagagatgtatatatgcatacatgtatatattcataaggaatataagcttccatcaatagtgattttaaatttgatttttttcttaactctaaatatttaagtaaaaagtaacaaaaactctgcaagcaagggaatttttttgtactgtaattttgaatggaactgaaaaattatgcacgaataaagtacttttctcatgccgggaccaaaaaaaaaaaaaaaaaaaaa

SEQ ID NO: 398505 - DNA, 1000 bp, Homo Sapiens; identical to SEQ ID NO: 222039

SEQ ID NO: 398506 - DNA, 1000 bp, Homo Sapiens; identical to SEQ ID NO: 116802

SEQ ID NO: 398507 - DNA, 1000 bp, Homo Sapiens; identical to SEQ ID NO: 222040

SEQ ID NO: 398508 - DNA, 1000 bp, Homo Sapiens; identical to SEQ ID NO: 116803

SEQ ID NO: 398509 - DNA, 1000 bp, Homo Sapiens; identical to SEQ ID NO: 287747

SEQ ID NO: 398510 - DNA, 1000 bp, Homo Sapiens; identical to SEQ ID NO: 116804

SEQ ID NO: 398511 - DNA, 1000 bp, Homo Sapiens; identical to SEQ ID NO: 287749

SEQ ID NO: 398512 - DNA, 1000 bp, Homo Sapiens; identical to SEQ ID NO: 116805

SEQ ID NO: 398513 - DNA, 1000 bp, Homo Sapiens
caaagccacacagcaagatttggcaggtgagccttacttctcttcctgggctagcctgcggtcaggggcaaggcttttggatgataagagtgaggtgcagtcagctctatattgggggtggcagagggaaaaggagggggggttcccaaagcaccattctgctttctgtgagaagggatttcccctcaacaacttctgtcccatttttcagagctaaagtgacaagccacatccacgtccctggttaaaggtgctccccctgcaggaaacacatgtgcacttgggatggagccctctgtgcgggagcggcttgctcacctctcagccagtgccagctgggtgggtctctcccagctctcgaatcctaactgcagccaccatttattcagcacctgttatgtaccaggcactttatgtatcttattgctaaccctcaaaacaagcccttcccaacataagcgcttttgtgccaaacccataggtctgaaactgagacccagagaggctgaatgacatgctcacagtcacacagcaggcagtggcaggcagtagtgaagtcggctctatggattgtatacctgggctcctccaggcctctgcgctgcccggcctgataccctagcaggttgggtattcagaggtgcctggggagcttgttaaaagtgtagattccaggcctccttacccttagagactgtgactcagtatccggggcagggcccaggcatcttcattttgacaggccgtcccggtggctgccatgcgcaggcaggttttaggaacatcatgggtggatgattcctggtctccccagccctcttgacctggccacagagagctgcctttccagcgaggtcagccgagatgacgctgccgggagagcagtcttctctgtagtccccggaggggactcctcggaggaaggatgagtctgagggttccggttgtcttggcctgagaccacccaaggtcttttaacagaaaaaaacttcacccaaaa

SEQ ID NO: 398514 - DNA, 1000 bp, Homo Sapiens; identical to SEQ ID NO: 287751

SEQ ID NO: 398515 - DNA, 1000 bp, Homo Sapiens; identical to SEQ ID NO: 287752

SEQ ID NO: 398516 - DNA, 1000 bp, Homo Sapiens; identical to SEQ ID NO: 287753

SEQ ID NO: 398517 - DNA, 1000 bp, Homo Sapiens; identical to SEQ ID NO: 222041

SEQ ID NO: 398518 - DNA, 1000 bp, Homo Sapiens; identical to SEQ ID NO: 222042

SEQ ID NO: 398519 - DNA, 1000 bp, Homo Sapiens
tgtttgacaattgaatttgttttctgtgaattctaacctctaaaggcatgcttagaggtcaaggaccttcctgtgtagttggtgcaaaagcaatctccacaggacagcactgcttccatgcttcatacatcaggaaatgaggccagaacttgagtatttactaacacgtttttcaaaagatgtcagtgttatacctaaagctaaaaaaaagcaagggtttgtcatagagggaacctctaaataatttcaggggtaggggagatgttgtcaataggaaatgggataaaatatcaagagacaatgaaaacactgccttgacatgaggaccagcaagtttattcttttcattttcagtgatgttgggaatggactgggttttaaaagggagcttgaagagggaatgtttgacagtcacagaaggttcctgcagcagatgcctcttttagccatttctcatttttttcctcaaattttacctactgaggctcaagccttcacagtgagctgatggtctctacagggaggggagtctagggaatttatttggtatttgtaaggcaagaggtgatttctctctaatatatctgagttattgctcatttaaaactgttaagtccagtataattttccctgatatgaaaaaatgtgcatttttttcacttagcaacaaagtaccttctaatttccaatagtccgtgaaagttggggctgaagtacctaagtgtgaatgtctctcccgttaaactgagtgtagaaatctgaatttttaaaagagctgtaactagttgtaagtgcttaggaagaaactttgcaaacatttaatgaggatacactgttcatttttaaaattccttcacactgtaatttaatgtgttttatattcttttgtagtaaaacaacataactcagatttctacaggagacagtggttttatttggattgtcttctgtaataggtttcaataaagctggatgaacttaaaaaaaaaaaaaaaaaaaa

SEQ ID NO: 398520 - DNA, 1000 bp, Homo Sapiens; identical to SEQ ID NO: 116807

SEQ ID NO: 398521 - DNA, 1000 bp, Homo Sapiens; identical to SEQ ID NO: 287757

SEQ ID NO: 398522 - DNA, 1000 bp, Homo Sapiens; identical to SEQ ID NO: 287758

SEQ ID NO: 398523 - DNA, 1000 bp, Homo Sapiens
gggcagaccctggacatcaacatggctggagagcctaagcctgacagacccaaggggctaaagagagcagcatctgccatatacaggctcttcgactaccggggccgtctgtcgcccgtgccagtgcccagggcggtccctgtgaagcgaccccgggtcacagtccctttggtccggcgtgtcaaaactaacgtacctgtcaagctctttgcccgctccacagctgtcaccaccagctcagccaagatcaagttaaagagcagtgagctgcaggccatcaagacggagctgacacagatcaagtccaatatcgatgccctgctgagccgcttggagcagatcgctgcggagcaaaaggccaatccagatggcaagaagaagggtgatggaggtggcgccggcggcggcggcggtggtggtggcagcggtggcggtggcagtggtggtggcggtggcggtggcagcagccggccaccagccccccaagagaacacaacttctgaggcaggcctgccccagggggaagcacggacccgagacgacggcgatgaggaagggctcctgacacacagcgaggaagagctggaacacagccaggacacagacgcggatgatggggccttgcagtaagcagcctgacaggagcaatggccaccagcaggtgaagggcatcgctgccccaggcctcaagccgggcacccaaccctggatgccaccccccagcgggtaccagaggaaagctggcagcaggcgcctcctcccccaacgcatcccagccagtgccatgtcctctgcaggtggagttactggcctactccttccccatgagccctccctgtctgcactgcccaggccagagggtagagcacaggggtttccccatactacctcccctccccaggacactcccaggcttgggttttttctataggtttggcggggggccacagggaggggaccctgacaataaagagattggatcccaaaaaaaaaaaaaaaa

SEQ ID NO: 398524 - DNA, 1000 bp, Homo Sapiens
tgaggggtcagttttatggctgggaggtgcagaattacacagaagtcccagtctgaggatgtccttggtgcttgggggatacgggttctgtccacagagtcccttggagggaaaggtgtgggctccagcttctccaggcgtctgcggagcccacagttgaagcccacatcgttttgctgttgaatggggtttaaaatcagaattaacatttgccaccccccgtggaagtttgaagattttaaaaatagaaatgtacatttttcaagctgtttttctttatgtttttgaaggaccatttttaattagctctttgatacaaagtaactcagaacgtcaaaacctatacccactaaagggaaggctgccgggaaggcaaatggaacaggaatggagcctgtctcaggaaggccagctgcaggtcctccagaaaatcaaagaagggaagaaactctgagtttgaggtacaggggcttcggggtgcagacgtccctccagggcccatggtcagtattgcacctgtgttatgaacccccagatgctgtgcagggcaggggcgggggctgctgttttattggggaggggagcatcctaaaaatggggtccaggcagacccctccagacctcacactgccgaggaggcctttcccaaagggcgtcctcccgggatgcagacggcaggtgtgtgggaagcgccgtttaaatacacagcacgacgtatccttgtaccgacttctcccggttcttgtttgaaaatactgtagttcaggctcttgatctagatggcagataggaactttcttgtcacaaaaatactggaggaaaatgttgtaaaaatagacttttggacacacagctgttggggctgcactgagctgcaatttttaacatggatttataacttaatgtttctgtttataaaatactaatgatttgcaatgtattttactggccaattaaaacagatgttttattctttctgaaaaaaaaaaaaaaaaaaaaa

SEQ ID NO: 398525 - DNA, 1000 bp, Homo Sapiens; identical to SEQ ID NO: 287759

SEQ ID NO: 398526 - DNA, 1000 bp, Homo Sapiens; identical to SEQ ID NO: 116808

SEQ ID NO: 398527 - DNA, 1000 bp, Homo Sapiens; identical to SEQ ID NO: 287761

SEQ ID NO: 398528 - DNA, 1000 bp, Homo Sapiens; identical to SEQ ID NO: 116809

SEQ ID NO: 398529 - DNA, 1000 bp, Homo Sapiens; identical to SEQ ID NO: 287763

SEQ ID NO: 398530 - DNA, 1000 bp, Homo Sapiens; identical to SEQ ID NO: 287764

SEQ ID NO: 398531 - DNA, 1000 bp, Homo Sapiens; identical to SEQ ID NO: 287765

SEQ ID NO: 398532 - DNA, 848 bp, Homo Sapiens; identical to SEQ ID NO: 287766

SEQ ID NO: 398533 - DNA, 1000 bp, Homo Sapiens; identical to SEQ ID NO: 287767

SEQ ID NO: 398534 - DNA, 1000 bp, Homo Sapiens; identical to SEQ ID NO: 222043

SEQ ID NO: 398535 - DNA, 1000 bp, Homo Sapiens
tcatgagctggttggtgcaaacttcccttcctccccatcccaccacccttcgccgtgtgtgctgattgtgcatatgaatgtgagtgtggctgtgtctgagttttggggcatgagagctaaggaagcaaaaagaggtgccatcctatacctcccttcctcgacccagtatggtgagtactgggtaaccgacaccttaagtttctggcctttaccctgctgccagtcaagtgtgtggctcttgatttctgagggaacagagaagcagggagttactcctcacacgaggcagatggagagaagtggaggagacaaggcttccaagggttaggagaagggactcaagggaggtgggtggtgaaaacggagtattagccccagatcaggatgtaggtgtaccgaagaattggggggaagttaatgggaatatatagcctacttatcttagggatgcttgccccagggacttgggtggggaagtagctctgagaaaagtgaacactaggatttagctgttctgtaaagccacgtaaacctgtctacatccgctggctggttgtgttcattctgacataatggatctcttcagaggtcctgggccaaagagcttccaacctaaatagagcttgggcaagcctagaatctagaaaaattaagcagcttaactggtcagcctgacatccactgttgtggctgcctggcagatggtatttaagccccacaattgttccctaaggccaacacaggaaatctgattcctggagcaaataaatgaacgggtggtagtagggggcatgaggggagaggctttgactctgttctaatttatttagagcaaatcaaaacactcctcaaatggcatctttctgcttttatcactagttccgtgttttttttcttgttttgtgtctgtgtattttcatttctctgtcatccgtcctttcatcttgaagcaaatctcttctaactccctcataccccagaaattgattccttctattca

SEQ ID NO: 398536 - DNA, 1000 bp, Homo Sapiens; identical to SEQ ID NO: 287770

SEQ ID NO: 398537 - DNA, 1000 bp, Homo Sapiens; identical to SEQ ID NO: 287771

SEQ ID NO: 398538 - DNA, 1000 bp, Homo Sapiens; identical to SEQ ID NO: 287772

SEQ ID NO: 398539 - DNA, 946 bp, Homo Sapiens; identical to SEQ ID NO: 116810

SEQ ID NO: 398540 - DNA, 1000 bp, Homo Sapiens; identical to SEQ ID NO: 116811

SEQ ID NO: 398541 - DNA, 1000 bp, Homo Sapiens; identical to SEQ ID NO: 116812

SEQ ID NO: 398542 - DNA, 1000 bp, Homo Sapiens; identical to SEQ ID NO: 287775

SEQ ID NO: 398543 - DNA, 1000 bp, Homo Sapiens; identical to SEQ ID NO: 116813

SEQ ID NO: 398544 - DNA, 1000 bp, Homo Sapiens; identical to SEQ ID NO: 287777

SEQ ID NO: 398545 - DNA, 1000 bp, Homo Sapiens; identical to SEQ ID NO: 287778

SEQ ID NO: 398546 - DNA, 1000 bp, Homo Sapiens; identical to SEQ ID NO: 116814

SEQ ID NO: 398547 - DNA, 1000 bp, Homo Sapiens
acctgaagcagggcctgggccggtcggggacgagtggtgctcggaaaccagcttccagcaagtacaagctcaaggactctgtctacatcttccgggaaggggccttgccaccctatcggcagatgttctaccagttatgcgacttgaatgtggaagagttgcagaagatcattcaccgcaatgacggggcagagaattcctgcacagaacgggatgggtggtgcctccccaagaccagcgacgagctcagggacaccatgtccctcatgatccggcagaccatccgctccaagaggcctgctctcttttccagctcagccaaggctgatggcggaaaagagcagctgacgtacgagtctggggaagacgaggaggatgaggaggaggaggaagaggaggaggaggacttcaagccatccgacggcagtgaaaacgaaatggagacagagattctggactacgtgtgacagggcccaaggctgggcctccctgacccaaccagactggtgtctggcctaatgagggagccttgctccccattgccacccacagtgcccggaatggccctaggaggccctctgaggagagctagagtcccagcaaagggtgcagctgaccctagcactggctgtgacatgctgcttggtgctgcctctggtcctgaggggttagggacatcccaaaggtataccctgctctgccacccatgaaccagcccagcatccagccagtgagtggcacccaatgcctctcaggatgagaccagtaaatgccggaggtggagctgggcagctgtggagccccacgcacaggccagtctcgcttggctctcatgactgtggtggtggagatagcgtggggagcctcgcccatggtctcacgtggcaagaagtgcctttagctctggatcccaaccgtttggcacagctttgccacagccaggcccctctggaattgtccttattaaaccagtttcccgaaaaaaaaaaaaaaaaaaaaa

SEQ ID NO: 398548 - DNA, 1000 bp, Homo Sapiens; identical to SEQ ID NO: 118351

SEQ ID NO: 398549 - DNA, 1000 bp, Homo Sapiens
atctctgttgtgtaatacagatggaatctggaacttagagcaagctatacttgattgaagtagctctctgctaaaatggcatctcactaatgacctcactatctgacttccattgtgttttattgcttctctaaaatatgaaatcagagtttggaacatgatgctttgaaagtactctgcagcagctctgttttatgggttcctacattgattcagcaaatatttattgagctgaaatgatgtttgacgctctgcaagttttacagctttgcctagcatagcgaatatatattttgtattcccagcctttctttcttcagggagccattcttttcccattcttcagtggtcctgctctgtgcctcagacttggctgaagctaaccttactccctggctctaggaatagcctgtgagccagccctggactgccctggacttgttctcagaggtatcaggaaaggctttctgttttgatctggagctgtaagggtcacataatcatgggactgccggtggccatcttttcctactacctagagaaagccagcaaagaatgaaggcaacaaaggaaacagccaagagaatcaaagatctagtaacactgtttagatgtctcaattatgtgagacagattcctgttgttattttgattaagcctgtttgtgttggttttctgacttacaattgaaagagttctgtccaaaaagccaaaaggtggccaggcttggtggctcaggcctgtaatcccagcactttgggaagcccaggcaggcagatcacttgaggtcaggagttcaagaccagcctggccaacctggtgaaaccctgtctctactaaaaatgcaaaaactagccgggcatggtggcgcacacctgtaatcctagctactcgggaggctgaggcaggagaattgcttgaacccaggaggcggaggtagtggtgagcaaagatcgtaccgctgcactccagcctgggtgatagagcaagaccctatctc

SEQ ID NO: 398550 - DNA, 1000 bp, Homo Sapiens; identical to SEQ ID NO: 287783

SEQ ID NO: 398551 - DNA, 959 bp, Homo Sapiens
gcagtggaggcggcccaggcccgccttccgcagggtgtcgccgctgtgccgctagcggtgccccgcctgctgcggtggcaccagccaggaggcggagtggaagtggccgtggggcgggtatgggactagctggcgtgtgcgccctgagacgctcagcgggctatatactcgtcggtggggccggcggtcagtctgcggcagcggcagcaagacggtgcagtgaaggagagtgggcgtctggcggggtccgcagtttcagcagagccgctgcagccatggccccaatcaaggtgggagatgccatcccagcagtggaggtgtttgaaggggagccagggaacaaggtgaacctggcagagctgttcaagggcaagaagggtgtgctgtttggagttcctggggccttcacccctggatgttccaagacacacctgccagggtttgtggagcaggctgaggctctgaaggccaagggagtccaggtggtggcctgtctgagtgttaatgatgcctttgtgactggcgagtggggccgagcccacaaggcggaaggcaaggttcggctcctggctgatcccactggggcctttgggaaggagacagacttattactagatgattcgctggtgtccatctttgggaatcgacgtctcaagaggttctccatggtggtacaggatggcatagtgaaggccctgaatgtggaaccagatggcacaggcctcacctgcagcctggcacccaatatcatctcacagctctgaggccctgggccagattacttcctccacccctccctatctcacctgcccagccctgtgctggggccctgcaattggaatgttggccagatttctgcaataaacacttgtggtttgcggccaaaaaaaaaaaaaaaaaaaaaaaaaaaaaaaaaaaaaaaaaaaaaaaaaaaaaaaaaaaaaaaaaaaaaaaaaaaa

SEQ ID NO: 398552 - DNA, 1000 bp, Homo Sapiens; identical to SEQ ID NO: 116816

SEQ ID NO: 398553 - DNA, 1000 bp, Homo Sapiens; identical to SEQ ID NO: 287785

SEQ ID NO: 398554 - DNA, 1000 bp, Homo Sapiens
cttccagaatgtctacaatgctaatctctcacatagaggttcccagcttcttaagaaccccttttggcacctaatcaaatttcaaaatccctccccccacattttcatacttttccccattctcaggacttttcaccatccatcacccacttatcccttcatttgacaccattcattaagtgccttctgtgtgtcagtccctggccactcactgcagttcaaggccccctttccgctctgctgtactcctcgcctacctactccttgccttttctgtcgcacagccccttctttccaggcgagattcctcagcttctgagtaggaaacactccgggctccaggtttctggttgggaagggaaggccaggccaaaagctccaccggccgtatagataatgtactcgcagttttgtatcttccattcatactttaacctacaggtcatttgagtcttcacacaaataataacctatctggccaggagaattatctcagaacagaagtcatcagatcatcagagcccccagatggctacagaccagagattccacgctctcaggctgactagagtccgcatctcatctccaaactacacttccctggagaacaagtgccacaaaaatgaaaacaggccacttctcaggagttgaataatcaggggtcaccggaccccttggttgatgcactgcagcatggtggctttctgagtcctgttggccaccaagtgtcagcctcagcactcccgggactattgccaagaaggggcaagggatgagtcaagaaggtgagacccttcccggtgggcacgtgggccaggctgtgtgagatgttggatgtttggtactgtccatgtctgggtgtgtgcctattacctcagcatttctcacaaagtgtaccatgtagcatgttttgtgtatataaaagggagggtttttttaaaaatatattcccagattatccttgtaatgacacgaatctgcaataaaagccatcagtgct

SEQ ID NO: 398555 - DNA, 1000 bp, Homo Sapiens; identical to SEQ ID NO: 222045

SEQ ID NO: 398556 - DNA, 1000 bp, Homo Sapiens; identical to SEQ ID NO: 116817

SEQ ID NO: 398557 - DNA, 1000 bp, Homo Sapiens; identical to SEQ ID NO: 116818

SEQ ID NO: 398558 - DNA, 1000 bp, Homo Sapiens; identical to SEQ ID NO: 287789

SEQ ID NO: 398559 - DNA, 1000 bp, Homo Sapiens; identical to SEQ ID NO: 222048

SEQ ID NO: 398560 - DNA, 1000 bp, Homo Sapiens
cctccacctggacatactacttgcagactgacaatgggaaagtggtggtgtttcagactcagcccatagtggagagcctcggcttccaggggggccgtctgcagcgcgtggaggtgacctggcgaggctcccaccctgaagccctggaggtgcacgtggaccctgtaggccccctggacaaggtgaggaaggccaagatccgagtcaagaccagcagcaaggccaaggtggagtctgaagagccacaggacaatgacttcctcagttgcatgtcccggcgctcgggtctgcctcgctggatcctggcctgctgcctcttcctctccgtgctggtgatgctgtggctgagctgctccaccctggtgaccgcgcctggccagcacctcaagttccagcctctgaccctggagcagcacaagggcttcatgatggagcccgattggcccctgtacccgccgccgtcccacgcctgtgaggacagcctaccaccctacaagctgaagctggacctgaccaagctgtaggcctccactggccccatcactgccaactgcagggggcccctcgggcctcacttgccctgagcccaggagtccaagggcagggtgggtccagccttgagcccctccacccccaaatccttcctctcctcccagtcccaccccttgccccacggagtcctggggacgcagtgccccagctgggaagagggcgggatcgggcactggttcctccttgtccccgctttcttgggggcttgctactttttgtcttctattgtgtggctttctgagtatttgaaccccagtcctgtgtcaccttcctttttccttctatgtcccctctctgcggggggggcgctgaggctgagggggagctgcgtcttgctagggcttcccccttctccccatcccggtctccagagacccagcttttgagagacagggtgtgggcatctccatgcccctataaagcgtgcctggggcttgtctggggctgg

SEQ ID NO: 398561 - DNA, 1000 bp, Homo Sapiens; identical to SEQ ID NO: 116819

SEQ ID NO: 398562 - DNA, 1000 bp, Homo Sapiens; identical to SEQ ID NO: 287793

SEQ ID NO: 398563 - DNA, 1000 bp, Homo Sapiens; identical to SEQ ID NO: 287794

SEQ ID NO: 398564 - DNA, 1000 bp, Homo Sapiens; identical to SEQ ID NO: 222049

SEQ ID NO: 398565 - DNA, 1000 bp, Homo Sapiens
ctgggcacctgccaccctgtggaaccaggctgcacagccctggccttgcgcaccaccattgacctcacctgcagcgggcacgtgtccatcttcgagttcgacgtcttcaccaggctctttcagccatggccaacactcctcaagaactggcagctcctggcagtcacccacccaggctacatggccttcctcacctatgatgaggtccaagagcgtctgcaggcctgcagagacaagccaggcagttacatcttccggcccagctgtactcgcctggggcagtgggccatcggctatgtgagctcagatggcagcatcctgcagaccatccctgccaacaaacccctgtcccaggtgctcctggagggacagaaggacggcttctacctctacccagatggaaagacccacaacccagacctgactgagctcggccaggcagaaccccagcagcgcatccacgtgtcagaggagcagctgcagctctactgggccatggactccacatttgagctctgcaagatctgtgctgagagcaacaaggatgtgaagattgagccgtgcgggcacctgctctgcagctgctgcctggctgcctggcagcactcggacagccagacctgccccttctgccgctgcgagatcaagggctgggaggccgtgagtatctaccagttctacggtcaggctactgctgaggactcagggaacagcagtgaccaggaaggcagggagttggagctggggcaggtgcccctttcggctcctccattgcccccacggccagatctgccccccaggaagcccagaaatgcccagccgaaagtgagactcctaaaggggaactcccctccagctgcgctgggaccccaggaccctgccccggcctgaaggccagggcacccagatgtgctgctcaagggagccccaagggctggaagggggttgtgaaaccgaaataaactgccaagcctggtctgtcaaaaaaaaaaaaaaaaaa

SEQ ID NO: 398566 - DNA, 1000 bp, Homo Sapiens; identical to SEQ ID NO: 287797

SEQ ID NO: 398567 - DNA, 1000 bp, Homo Sapiens; identical to SEQ ID NO: 287798

SEQ ID NO: 398568 - DNA, 1000 bp, Homo Sapiens; identical to SEQ ID NO: 116820

SEQ ID NO: 398569 - DNA, 1000 bp, Homo Sapiens; identical to SEQ ID NO: 116821

SEQ ID NO: 398570 - DNA, 1000 bp, Homo Sapiens
cctggcgcgggagccgctggcagagatccgcgcactctacgccttcaccggcctgaccctcacgccacagctcgaggcctggatccacaacatcacccacgggtcggggatcggcaagccaatcgaggccttccatacttcgtctaggaatgcgcgcaacgtctcccaggcctggcgccacgcgttgcccttcactaagatcctgcgcgtgcaggaggtgtgcgccggcgcgctgcagctgctgggctaccggcctgtgtactctgcggaccagcagcgtgacctcaccctggatctggtgctgccacgaggcccagaccacttcagctgggcatcgcctgactgagaactctgggccttagagcaagccccgaactgtggtcgccaggcccaggaggcgactgcatggtggagagggagctggggcgcatggggaagcaggtccctactatcaaccgggagtttggggtcctcccctgaagtaggcaaggactgcacgtttctttctctcctgattctcggttttcctttgagtcttctggagctgccttctcatcaggtgcactcttcatggaaagcaactcttgcccctacctcttctgggcgcagggagtaagttactgctaaattaaattaaatgtgtgccaggccgggtgcggtggctcatgcctgtaatcccagcattttgagaggctgaggcgggtggatcacctgaggtcaggattcaaaaccagcctggccaacatagtgaaaccccctctctactaaaaatgcaaaaattagtccggcgtggtggcacactcctgtaatcccagctacttaggaggctgaggtgggagaatcacttggactccaaaggtggaggttgcagtaagctgaaatcatgccactgcaccctagcttgggtggcaaagcaaaactctatcaaaaaaataattaataaatttgttcaaaagtcctgccgaaaaaaaaaaaaaaaaaaaaaaaaaaaaaaaaaaaa

SEQ ID NO: 398571 - DNA, 1000 bp, Homo Sapiens; identical to SEQ ID NO: 287800

SEQ ID NO: 398572 - DNA, 1000 bp, Homo Sapiens; identical to SEQ ID NO: 222051

SEQ ID NO: 398573 - DNA, 1000 bp, Homo Sapiens; identical to SEQ ID NO: 287802

SEQ ID NO: 398574 - DNA, 1000 bp, Homo Sapiens; identical to SEQ ID NO: 287803

SEQ ID NO: 398575 - DNA, 1000 bp, Homo Sapiens; identical to SEQ ID NO: 116823

SEQ ID NO: 398576 - DNA, 1000 bp, Homo Sapiens; identical to SEQ ID NO: 116824

SEQ ID NO: 398577 - DNA, 1000 bp, Homo Sapiens; identical to SEQ ID NO: 116825

SEQ ID NO: 398578 - DNA, 1000 bp, Homo Sapiens; identical to SEQ ID NO: 116826

SEQ ID NO: 398579 - DNA, 1000 bp, Homo Sapiens; identical to SEQ ID NO: 116828

SEQ ID NO: 398580 - DNA, 1000 bp, Homo Sapiens
gcgacgcccgccctaccggccgcgctgcttcctccgaactccggctcggcggcgccctctcccgccgccctgggcgccttctcggacgtgctggtccgctgcgaggtgtcccgcgtgctgctgctgctcctcctgcaaccaccgcccgccaagctgctgccggagcacgcccagaccctggagaagtactcctgggaggcttttgacagccacgggcaggagagcagcggccagcttcccgaggagctctttctgctgctccagtctttggtcatggctacccacgaaaaggacacggaagccatcaagtcgctgcaggtggagatgtggccactgttgactgctgagcagaaccacctccttcacctcgttctgcaagaaaccatctccccctcaggacagggagtctgatccatcccattcacccagtgacttctttttgcccaggcctggactttttgcatcagtcacgttaaccagatgactttgcctgttaccaaacctcatgcatccacgtttgcgtctggggaggaataaaaagacatcgttcccgcttctgcgttttgttattcctactgccgccataggaattatttcgttggctgaacgttaccagcaccccgagaacacattttgatagaatcagagtagaggacatggctgtcttctaaaaagccacgacatgaaaatgacaatccctttcgtctccttcctccgctgcttccacctaacgcagcctcctgcctccgcctttgtttcatagtgaggattttattttgcacggcgccctccctctaaatacctaccctagatgatttcatcctgcccctcacttcttaacatattcctgtgtctttgtaatggccaaatttctccttccactcgtccgcacggtacgtcttcatgggagtcattttattccttacagcttccttgtaaccacagccctaaatccatgataaagctactcttgtactcctcaaaaaaaaaaaaaaaaaaa

SEQ ID NO: 398581 - DNA, 1000 bp, Homo Sapiens; identical to SEQ ID NO: 222052

SEQ ID NO: 398582 - DNA, 1000 bp, Homo Sapiens; identical to SEQ ID NO: 222053

SEQ ID NO: 398583 - DNA, 1000 bp, Homo Sapiens; identical to SEQ ID NO: 222055

SEQ ID NO: 398584 - DNA, 1000 bp, Homo Sapiens; identical to SEQ ID NO: 287812

SEQ ID NO: 398585 - DNA, 1000 bp, Homo Sapiens
ataggagccaagtgtaaaaaactccggaccctggatctgtggagatgtaagaatattactgagaatggaatagcagaactggcttctgggtgtccactactggaggagcttgaccttggctggtgcccaactctgcagagcagcaccgggtgcttcaccagactggcacaccagctcccaaacttgcaaaaactctttcttacagctaatagatctgtgtgtgacacagacattgatgaattggcatgtaattgtaccaggttacagcagctggacatattaggaacaagaatggtaagtccggcatccttaagaaaactcctggaatcttgtaaagatctttctttacttgatgtgtccttctgttcgcagattgataacagagctgtgctagaactgaatgcaagctttccaaaagtgttcataaaaaagagctttactcagtgacttaatatatgttctgtattaaaattaatgtgctttgttggggtttaattttgggattggttttgggttttgtttttagttgttttaatggtaagaattaagacatttgtagattttaaagaaaaatatgaaattgtccattaaatcaagtaaaaatgtgcacaaatgttttcataaaatactgcaagcacttctcttcaagaatatgagtggatattatttttaccttatgttaatcagtgatatgctttagtcaataatatgattgataaaagaataacatggaatcatgctaacttattttcaaaggaacactgagcaataaagtatcgtggcatttatgcaaaaaaaaaagttaattttttacaccttcatgtaaggatgtcttattaagcctgtgacctggcaagtgttttgtttggtatgtacaaaatggtcagagctagttggagaatgagacatgcttttccagctgtttggttatttctctggattaactgttcaactggaaaatttttagtttttctagccaggtgtggtggcacacacttgt

SEQ ID NO: 398586 - DNA, 1000 bp, Homo Sapiens
gtcagcactttcagtgatatgaatatcatcttggctggaggccaggtggacaacctgtcatcactgacttctgaaaagtatgtcttgtgtgcttctgatttcgtctgtgaatgaagggaaatggtctcaggttttgtcactttggggttaacaatttaaaaaacgtgtttaaagaattattaagataatagttcattccattttgtagtagacattggctaaggggcttactgaacataattctgcttacggttgaataattacatttttatatatattgtccttcaagaacttccttgagtcacattctccttaaaatttgacattgcctgttgatctttcctttgacagatgtggtactctgtgtgacctcaatgtgtcacctcctttctagtttcctcctttaaaggaaacacatggttagagtgtatctttatggcaaaacttctcagagcttctaatatgcccggtgctgtggaaatctggaaggagaatagcattacctgtgacagttcccaaatctgtttggtcacaaaacttttttccacagaatgtcttgcaagtcgtactggtttttggaaattctgtattagatcttttgaaaggctttttcaagcttaaaaattgtggatcttttttgttactaaggcttttgctttcaaagataaaaatatttgctcttctgtcttgggagccattacttcctttccatcttgaatgaaaatacatatcattttgagtttgaaacaattaggtggacataaatatcatttgtttccagcaggaaaatcagaccctaccccaccctcaatgcttgtaaacactactatttgtttcccactctgtttaatatttgcatcctagagtggtgacatggggacagactgttgcagatcagtatctataagaataatgtaagtcatcctagttatagtctctcttctggttatctctatgagctagatctgggaaaatagctaaagttgaggtccctggactg

SEQ ID NO: 398587 - DNA, 1000 bp, Homo Sapiens; identical to SEQ ID NO: 222057

SEQ ID NO: 398588 - DNA, 1000 bp, Homo Sapiens
cccattcgcagacgccgctgctcacgccttttttagcaagccttctgctgatggaagcactaggatgattctaggctgttaaatagatttctcaataatgtaaataactaaattgttctctgcatatagcaggaaaactagcatgaaatattgtttcaggccctgggttctatgtgacactacattaggaattggattgtttgggtttgctttgtgtttttgaggtagaggaagaaatgggaatcttttttttctcttccaggagtcagtggaagaatagttctctagctaaggaatggacatacctttgttttaaaatattttatacttacaaaaatctagaaatggagagggaactgttttgaataaggatttaaaatacctgcacaaggatagagagaaactatgtgactcattctgtgaaaagacttcttgcagttgtgagttatttagaaatgatcaaaatttgtaattaggctaatccatttagtgattcctaatattttgtactcacagagaactaattgactaaacaacttgaacgctagtggtttgtccttagacaatctgtctttgaatttaaagtctttatcgctaagaccttgactttaaatttttcatcactacaaccttgaatttaatttcaggtcttcaacatgatgaccttggatttaatttaaagtcttcaacactatgcgctttatcatattattcacagatgcatttttgaaatgtagtatgtaaaagtatgtaacgtgctgtttattaacaaaagattgttcacaacatctcatgtagtttaaatttgtaaatactgcttctgttttgtttctcctttatacacttgactgtctttgtgataagtgacatgaattttatgttaggattaagtatgttttcctgaaacttggattttttttgtaattatataattgagagttaagaatgaaatccttcaagtgttaaaaactcacattttaaaagcaaattttggttccaa

SEQ ID NO: 398589 - DNA, 1000 bp, Homo Sapiens; identical to SEQ ID NO: 287817

SEQ ID NO: 398590 - DNA, 1000 bp, Homo Sapiens; identical to SEQ ID NO: 287819

SEQ ID NO: 398591 - DNA, 1000 bp, Homo Sapiens; identical to SEQ ID NO: 287820

SEQ ID NO: 398592 - DNA, 1000 bp, Homo Sapiens; identical to SEQ ID NO: 287821

SEQ ID NO: 398593 - DNA, 1000 bp, Homo Sapiens; identical to SEQ ID NO: 222058

SEQ ID NO: 398594 - DNA, 1000 bp, Homo Sapiens
ttgcctgaaagctgggtgtccttgctccttttcctggaagccaatatacccagtttttactcagtttgatttatattctgggcaaggaagctttgcctactttattggcacaatccgttgttctgtcgtttagtgcatatctgctggcttcagccctggcagctgagaaattgttttctatatgtagaaggaaaacctgagcatttgcaggcatctggttaaagcagggtctgtgtgtacaattttaaaacgggtaatatgtcatgctcttagtcatcttcacaacaaaactatgagtaagcggtattagcctcacttaacagatgaggaagcaagattccagaaagtaccagaaggtcattttatacaacaggagattggttcctgcccagatgacagaaaatgggagctctgtctagttgtccttaagtctgactgacttcagtggctcataaccgtgagccaagtatttgttggttcataactgttgttttgtgaactatgtcttacatgtctagagttctgctggatctagggaaaggaggagctatcgaagtacaacggatcaaaaaaccacagggcttttgggcactgcctccttgggaagttagtggccacagaagagagatgaaacctgtaagaagtctggagtcttttggaacttcagccatttccccaggttgttactttcttagtatgtacagtcttctcaggatgagcagtaaaacctttgaacaaaggtctgtgtggttgtcttcacgggcaatcaggaagggagagagctggggaccatattctgcaatgcagccaaatccgaggaagagaaactgaagggagaagtagatggcaatggttatgataaaaagggataaaactaaatcttcgggacttctttaatgctacgttaatgtttcactgctcgtctagaaactcctaaatccagctttctatcatctgccccacattggtccccttgagtacattctgtgatttctaattc

SEQ ID NO: 398595 - DNA, 1000 bp, Homo Sapiens; identical to SEQ ID NO: 116830

SEQ ID NO: 398596 - DNA, 1000 bp, Homo Sapiens; identical to SEQ ID NO: 287824

SEQ ID NO: 398597 - DNA, 1000 bp, Homo Sapiens; identical to SEQ ID NO: 287825

SEQ ID NO: 398598 - DNA, 1000 bp, Homo Sapiens; identical to SEQ ID NO: 116831

SEQ ID NO: 398599 - DNA, 1000 bp, Homo Sapiens; identical to SEQ ID NO: 222059

SEQ ID NO: 398600 - DNA, 1000 bp, Homo Sapiens; identical to SEQ ID NO: 287828

SEQ ID NO: 398601 - DNA, 1000 bp, Homo Sapiens; identical to SEQ ID NO: 116832

SEQ ID NO: 398602 - DNA, 1000 bp, Homo Sapiens; identical to SEQ ID NO: 116833

SEQ ID NO: 398603 - DNA, 1000 bp, Homo Sapiens; identical to SEQ ID NO: 116834

SEQ ID NO: 398604 - DNA, 1000 bp, Homo Sapiens; identical to SEQ ID NO: 222062

SEQ ID NO: 398605 - DNA, 1000 bp, Homo Sapiens; identical to SEQ ID NO: 116835

SEQ ID NO: 398606 - DNA, 1000 bp, Homo Sapiens; identical to SEQ ID NO: 287835

SEQ ID NO: 398607 - DNA, 1000 bp, Homo Sapiens; identical to SEQ ID NO: 287838

SEQ ID NO: 398608 - DNA, 1000 bp, Homo Sapiens; identical to SEQ ID NO: 287839

SEQ ID NO: 398609 - DNA, 1000 bp, Homo Sapiens
gagaagccggacgaggccgtggtgtggagaggccccaagaaaaacgcgctgataaagcagtttgtgtccgacgtggcctggggggagctggactacctggtggtggacacgcccccggggacctccgatgagcacatggccaccatagaagccctgcgtccctaccagcccctgggggccctcgtggtcaccacgccccaggcggtgtccgtgggggacgtgaggcgcgagctgaccttctgtaggaagacgggcttgcgggtgatgggaatcgtggagaatatgagcggcttcacgtgcccacactgcacggagtgcaccagcgtcttctccaggggcggcggagaggagctggcccagctcgccggggtgcccttcttaggctccgtgcccctggaccctgcgctcatgaggactctggaggagggccacgacttcatccaggagttccccgggagccccgccttcgctgcactcacctccatagcccagaagattctggacgcgacgcccgcgtgcctcccctgactaaggccaccttgcagccgctttccagggccaccaagggctctgctccagcctctcagagaaacagaggcctgggctcggttcccgggccctgcaggggcaggcccaggcagcgtccagccggagagcttctccccgaccagcccagccccaggatgtgtcgcaccagcagctctgcctggttggcctgcagtgccgtggtctgcgtgctctgcagctgtgagacgggggcggcctgggctctcttcccatccatgttgcctacctgtgcccctggcagccgcgtgtccacacagttagcggagcgcaggacttctgcagtcctcaggtgaccccgggcctccagcaccctgggtcgctgtcatctgtgtttagctcggggcatgctccctaagggggcgaactgacctcaggcatgtcttgtaactgtagaggcgcctgccattaaacgtgtccgctgctgtggcgacag

SEQ ID NO: 398610 - DNA, 1000 bp, Homo Sapiens; identical to SEQ ID NO: 116836

SEQ ID NO: 398611 - DNA, 903 bp, Homo Sapiens; identical to SEQ ID NO: 222064

SEQ ID NO: 398612 - DNA, 1000 bp, Homo Sapiens; identical to SEQ ID NO: 222065

SEQ ID NO: 398613 - DNA, 1000 bp, Homo Sapiens; identical to SEQ ID NO: 287842

SEQ ID NO: 398614 - DNA, 1000 bp, Homo Sapiens; identical to SEQ ID NO: 116837

SEQ ID NO: 398615 - DNA, 1000 bp, Homo Sapiens; identical to SEQ ID NO: 116838

SEQ ID NO: 398616 - DNA, 1000 bp, Homo Sapiens; identical to SEQ ID NO: 116839

SEQ ID NO: 398617 - DNA, 1000 bp, Homo Sapiens; identical to SEQ ID NO: 116840

SEQ ID NO: 398618 - DNA, 1000 bp, Homo Sapiens
acctcctcctggtcatgggtacctccttgcaggtgcagccctttgcctccctcatcagcaaggcacccctctccacccctcgcctgctcatcaacaaggagaaagctggccagtcggaccctttcctggggatgattatgggcctcggaggaggcatggactttgactccaagaaggcctacagggacgtggcctggctgggtgaatgcgaccagggctgcctggcccttgctgagctccttggatggaagaaggagctggaggaccttgtccggagggagcacgccagcatagatgcccagtcgggggcgggggtccccaaccccagcacttcagcttcccccaagaagtccccgccacctgccaaggacgaggccaggacaacagagagggagaaaccccagtgacagctgcatctcccaggcgggatgccgagctcctcagggacagctgagccccaaccgggcctggccccctcttaaccagcagttcttgtctggggagctcagaacatcccccaatctcttacagctccctccccaaaactggggtcccagcaaccctggcccccaaccccagcaaatctctaacacctcctagaggccaaggcttaaacaggcatctctaccagccccactgtctctaaccactcctgggctaaggagtaacctccctcatctctaactgcccccacggggccagggctaccccagaacttttaactcttccaggacagggagcttcgggcccccactctgtctcctgcccccgggggcctgtggctaagtaaaccatacctaacctaccccagtgtgggtgtgggcctctgaatataacccacacccagcgtagggggagtctgagccgggagggctcccgagtctctgccttcagctcccaaagtgggtggtgggcccccttcacgtgggacccacttcccatgctggatgggcagaagacattgcttattggagacaaattaaaaacaaaaacaactaac

SEQ ID NO: 398619 - DNA, 1000 bp, Homo Sapiens; identical to SEQ ID NO: 287845

SEQ ID NO: 398620 - DNA, 1000 bp, Homo Sapiens; identical to SEQ ID NO: 222068

SEQ ID NO: 398621 - DNA, 1000 bp, Homo Sapiens; identical to SEQ ID NO: 287850

SEQ ID NO: 398622 - DNA, 1000 bp, Homo Sapiens; identical to SEQ ID NO: 116841

SEQ ID NO: 398623 - DNA, 1000 bp, Homo Sapiens; identical to SEQ ID NO: 116842

SEQ ID NO: 398624 - DNA, 1000 bp, Homo Sapiens; identical to SEQ ID NO: 116843

SEQ ID NO: 398625 - DNA, 1000 bp, Homo Sapiens; identical to SEQ ID NO: 116844

SEQ ID NO: 398626 - DNA, 1000 bp, Homo Sapiens; identical to SEQ ID NO: 287855

SEQ ID NO: 398627 - DNA, 1000 bp, Homo Sapiens; identical to SEQ ID NO: 116847

SEQ ID NO: 398628 - DNA, 1000 bp, Homo Sapiens; identical to SEQ ID NO: 116848

SEQ ID NO: 398629 - DNA, 1000 bp, Homo Sapiens; identical to SEQ ID NO: 287859

SEQ ID NO: 398630 - DNA, 1000 bp, Homo Sapiens
tcactggcctctagtgatccgcagaagacggtcaccatgatcctgtctgcggtccacatccaaccttttgacattatctcagattttgtcttcagtgaagagcataaatgcccagtggatgagcgggagcaactggaagaaaccttgcccctgattttggggctcatcttgggcctcgtcatcatggtaacactcgcgatttaccacgtccaccacaaaatgactgccaaccaggtgcagatccctcgggacagatcccagtataagcacatgggctagaggccgttaggcaggcaccccctattcctgctcccccaactggatcaggtagaacaacaaaagcacttttccatcttgtacacgagatacaccaacatagctacaatcaaacaggcctgggtatctgaggcttgcttggcttgtgtccatgcttaaacccacggaagggggagactctttcggatttgtagggtgaaatggcaattattctctccatgctggggaggaggggaggagggtctcagacagctttcgtgctcatggtggcttggctttgactctccaaagagcaataaatgccacttggagctgtatctggccccaaagtttagggattgaaaacatgcttctttgaggaggaaacccctttaggttcagaagaatatggggtgctttgctcccttggacacagctggcttatcctatacagttgtcaatgcacacagaatacaacctcatgctccctgcagcaagacccctgaaagtgattcatgcttctggctggcattctgcatgtttagtgattgtcttgggaatgtttcactgctacccgcatccagcgactgcagcaccagaaaacgactaatgtaactatgcagagttgtttggacttcttcctgtgccaggtccaagtcgggggacctgaagaatcaatctgtgtgagtctgtttttcaaaatgaaataaaacacactattctctggcaaaaaaaaaaaaaaaaa

SEQ ID NO: 398631 - DNA, 1000 bp, Homo Sapiens; identical to SEQ ID NO: 116849

SEQ ID NO: 398632 - DNA, 1000 bp, Homo Sapiens; identical to SEQ ID NO: 116850

SEQ ID NO: 398633 - DNA, 1000 bp, Homo Sapiens
cctgtccacctggccatgctggctggggagggacaccgccctagacggccccgtggggcactgccaccgtggctgtcgccgtggctgctgcttgccctgaccccactgctcagctctgagccacccttcctgcagctcctttgcggcctccttgccggcctggcctatgcagctggggccttccggtggctggaaccctcagagcgacggctgcaggtgctgcaggagggcgtcttgtgcaggaccttggcggggtgctggcccctgaggctccttgccaccccgggtagcctggcggagctgcctgtcacccatcctgccggagtgaggcctcccatccctggaccgccttatgtggcctcccctgacctctggtcccactgggaagactcagccctgcccccaccaagcctgaggcctgtgcagcccacctgggagggctcctcagaggcaggcctggactgggctggggccagcttctccccagggactccgatgtgggcggccttggatgagcagatgctgcaggagggcatccaggcctcgcttcttgacgggccagcccaggaaccccagagcgcaccatggctgtccaagtcctctgtctcctctctgcggctgcagcagctggagcgcatgggcttccctacggagcaggcggtggtggcactggcagccacaggccgtgtggagggtgccgtgtcactgttggttggaggacaagtgggcactgagaccctggtgacccatggaaagggtgggcctgcccactccgagggtcctgggcctccctagcccaggcagagagtggggcacaggcaggcccttgggtgctaagggctgggctgcatgtgggtagcccgagctcctactctgtctaaagagggccacagtggggagcaggggcacctctggaggcaggagaggccccccagcatgctgccctagtacgtgtttagaataaaaaccagtttgtttttcaacctggacctccttggag

SEQ ID NO: 398634 - DNA, 1000 bp, Homo Sapiens
ctatgacacccgctacaaccaagagacaccaatggagatctgcctcaatggaacccctgctctggcctacctggcgagtgcgcccccacccctgtgtccaagtggccgcactccagacctgaaggctctactcaacgtggtggacaatgcccggagtttcatctacgtcgctgtcatgaactacctgcccactctggagttctcccaccctcacaggttctggcctgccattgacgatgggctgcggcgggccacctacgagcgtggcgtcaaggtgcgcctgctcatcagctgctggggacactcggagccatccatgcgggccttcctgctctctctggctgccctgcgtgacaaccatacccactctgacatccaggtgaaactctttgtggtccccgcggatgaggcccaggctcgaatcccatatgcccgtgtcaaccacaacaagtacatggtgactgaacgcgccacctacatcggaacctccaactggtctggcaactacttcacggagacggcgggcacctcgctgctggtgacgcagaatgggaggggcggcctgcggagccagctggaggccattttcctgagggactgggactccccttacattcatgaccttgacacctcagctgacagcgtgggcaacgcctgccgcctgctctgaggcccgatccagtgggcaggccaaggcctgctgggcccccgcggacccaggtgctctgggtcacggtccctgtccccgcacccccgcttctgtctgccccattgtggctcctcaggctctctcccctgctctcccacctctacctccacccccaccggcctgacgctgtggccccgggacccagcagagctgggggagggatcagcccccaaagaaatgggggtgcatgctggcctgccccctggcccacccccactttccagggcaaaaagggcccagggttataataagtaaataacttgtctgtaaaaaaaaaaaaaaaaaaaaaaa

SEQ ID NO: 398635 - DNA, 1000 bp, Homo Sapiens; identical to SEQ ID NO: 287863

SEQ ID NO: 398636 - DNA, 1000 bp, Homo Sapiens; identical to SEQ ID NO: 287864

SEQ ID NO: 398637 - DNA, 1000 bp, Homo Sapiens
gccctccctcctgaccctgcagggccctgtcgtgacccccggagagaatctgaccctccagtgtggctctgatgtcggctacatcagatacactctgtacaaggagggggccgatggcctcccccagcgccctggccggcagccccaggctgggctctcccaggccaacttcaccctgagccctgtgagccgctcctacgggggccagtacagatgctacggcgcacacaacgtctcctccgagtggtcggcccccagtgaccccctggacatcctgatcgcaggacagatctctgacagaccctccctctcagtgcagccgggccccacggtgacctcaggagagaaggtgaccctgctgtgtcagtcatgggacccgatgttcactttccttctgaccaaggagggggcagcccatcccccgttgcgtctgagatcaatgtacggagctcataagtaccaggctgaattccccatgagtcctgtgacctcagcccacgcggggacctacaggtgctacggctcacgcagctccaacccctacctgctgtctcaccccagtgagcccctggagctcgtggtctcaggagcaactgagaccctcaatccagcacaaaagaagtcagattccaagactgccccacacctccaggattacacagtggagaatctcatccgcatgggtgtggctggcttggtcctgctgttcctcgggattctgttatttgaggctcagcacagccagagaagccccccaaggtgcagccaggaggcaaacagcagaaaggacaatgcacccttcagagtggtggagccttgggaacagatctgatgatctgaggaggttctggaagactggggcagcagttggggaagtgtctgctgagaatatcaaggggaagaagcatgggtcaggtgcaggaagatgtctgggtgtctgtagaagatgcttcctccattaaactgtggtgctttcctcctcaaaaaaaaaaaaaaaaaa

SEQ ID NO: 398638 - DNA, 1000 bp, Homo Sapiens; identical to SEQ ID NO: 287865

SEQ ID NO: 398639 - DNA, 1000 bp, Homo Sapiens; identical to SEQ ID NO: 222074

SEQ ID NO: 398640 - DNA, 1000 bp, Homo Sapiens
gcaaacccctgctggaccattcttacgacccagatttcaaccagctggatggtcccacccgcatcattgtgccttttgtgacctgtggggacctgagctcctatgattcggaccgcagttacccactggacctagagggcggctcagagtacaagtacactccacccacacagccccccatctcgccaccataccaggaggcctgcacgttgaagaggaaggggcagctggccaaggagatccgcccccaggactgccccatcagcagagtggacacgtttccccagcccctggccgcccctcagtgccacaccctgctggcccctgagatggaagacaatgaaatgagttgttcaccttaacccattacgctggcaaactgatacaactcagaaactgctcaatgtcaggaaaaccggaacttgttgatgaacttgttttcaaaatatcatctcatcaacgaggcctggacaaacaagccctgaggagggatctgcaacaaccctgaagacaacaaggaaagaaaccatgaaagtctgtctgtactgcagtgggaattcttgagtgaggtcttacctcttctttaaacctcttcaggagtgtcctgattatgtccagaattttccctaaaggcagggattcttaacctggatagaagccaggggtaaccatgaacttgatggaagaaaatgttacatctttattttcagcaatgaaactgaaatttagccttactcccaagttataaatgctggcaacaaatcacagtagtaaaagcagtacctgggattttcccaccaatacaaaccagttacagcaactgtaatgtaacataaaaagggcatcttgaagtattgttcatatttgtcacctcttggaatgatagcagatcctgtaagttgatgtattaattaaaaagcccatatattactgcatctcaattttgtttcaatttaatatatagtaataattgtaattcaatgtaattggcttccattgt

SEQ ID NO: 398641 - DNA, 1000 bp, Homo Sapiens; identical to SEQ ID NO: 220416

SEQ ID NO: 398642 - DNA, 1000 bp, Homo Sapiens
ttccccatgggcccagcgaggcaaggaacacagacacactggacaagcttcggcaggcggtgacagagctgtcagagcaggtgctgcagatgcgggaaggactgcagtcacttcgccaggctgtgcagcttgtcctggcgccccacagggagggtccgtgccctcgggcatcgggagaggggccgtgcccagccagcacctccgggcttctgcagcctctgtgtgtggacactggggcatcctcctactgcctgcagcccccagctggctctgtcttgagtgggacttggccccaccctcgtccggggcctcctcccctcatggcaccctggccctggggtcccccagcgtctcagagctccccctggcctcgagccacagctttctggacctccacctcagactcagagccccctgcctcaggagacctctgctctgagcccagcacccctgcctcccctcctccttctgaggaaggggctaggactgggcccgcagagcctgtgagccaggctgaggctaccagcactggagagcccccaccagggtcagggggcctggccttgccctgggacccccacagcctggagatggtgcttattggctgccatggctctggcacagtccagtggacccaggaagaaggcacaggggtctgagtaccagccctagaactcagcgttgccaggtgtgctgccatctgctgttcggcccaacctcagagtgaaggcagggtggcagcctccccacggactccatgcggcccgctggctcagggcagggagcctggaagcaaaggaggacctggctcctgactctcagagaggataggctggatccctggggcaggcctctcctcggcctgctcctctgacctcccggtctccctctgcaggctgggggcagaggcctgaggacaaggaagagctttgccatcccctgcatgtgcccctgcctctacctgtccccaaatttttatattaaaaaaaaaaaataaaat

SEQ ID NO: 398643 - DNA, 1000 bp, Homo Sapiens; identical to SEQ ID NO: 116851

SEQ ID NO: 398644 - DNA, 1000 bp, Homo Sapiens; identical to SEQ ID NO: 287868

SEQ ID NO: 398645 - DNA, 1000 bp, Homo Sapiens; identical to SEQ ID NO: 287869

SEQ ID NO: 398646 - DNA, 1000 bp, Homo Sapiens; identical to SEQ ID NO: 222075

SEQ ID NO: 398647 - DNA, 1000 bp, Homo Sapiens; identical to SEQ ID NO: 222076

SEQ ID NO: 398648 - DNA, 1000 bp, Homo Sapiens; identical to SEQ ID NO: 287872

SEQ ID NO: 398649 - DNA, 1000 bp, Homo Sapiens; identical to SEQ ID NO: 222077

SEQ ID NO: 398650 - DNA, 1000 bp, Homo Sapiens; identical to SEQ ID NO: 287874

SEQ ID NO: 398651 - DNA, 1000 bp, Homo Sapiens; identical to SEQ ID NO: 222078

SEQ ID NO: 398652 - DNA, 1000 bp, Homo Sapiens; identical to SEQ ID NO: 116852

SEQ ID NO: 398653 - DNA, 1000 bp, Homo Sapiens; identical to SEQ ID NO: 287877

SEQ ID NO: 398654 - DNA, 1000 bp, Homo Sapiens; identical to SEQ ID NO: 222080

SEQ ID NO: 398655 - DNA, 1000 bp, Homo Sapiens; identical to SEQ ID NO: 222081

SEQ ID NO: 398656 - DNA, 1000 bp, Homo Sapiens; identical to SEQ ID NO: 116853

SEQ ID NO: 398657 - DNA, 1000 bp, Homo Sapiens; identical to SEQ ID NO: 116854

SEQ ID NO: 398658 - DNA, 1000 bp, Homo Sapiens; identical to SEQ ID NO: 222083

SEQ ID NO: 398659 - DNA, 1000 bp, Homo Sapiens; identical to SEQ ID NO: 222084

SEQ ID NO: 398660 - DNA, 1000 bp, Homo Sapiens; identical to SEQ ID NO: 116855

SEQ ID NO: 398661 - DNA, 1000 bp, Homo Sapiens; identical to SEQ ID NO: 222086

SEQ ID NO: 398662 - DNA, 1000 bp, Homo Sapiens
cctcaccggggaagccgaggagtgggtggtgccctacatcgagatggatagccccatcctaggtgattaccgggccttcctcgatgagatgaaacagtgctttggctgggatgacgacgaagacgacgacgacgaagaagaggaggatgattattaggccctcgaccctcgggcctcgggggggagggccctgcacgccgccaccccctccccgcagccctcaccccgccaggagccactgctctcccccttgccctccggtccccttacctacccgcgcccgtctgctctctctcttcatttctccgtagtgcttgtctttgttccaggaatagcgctccagttacctgctgctggggtcggggctggagcctcactcactcggaagtgcttggaagtgtcatctaccctggccatccccgggatccctcccctgctaatctgaactgtgtcctgaaccccagctattggccaggcccctgttacaaactgcgcagaccacccatagccctgctgctgccacctgccctgctgccaggcttacatcttcccagagaactatgctgccacttcacatccactcaccacatcccacctacagactaccacctttcgagatcaggaccaacctggaaaatgccagagttggctatgccttttcagacattgatttggacagctcaccaacccctgaaggggccgttcagcctggttagttttctacctactccgagtgtcctcccctgccccaccagattgctgcaggggcgcggtgtgcctggcagccaaattgttgacacttcttttttcctatgcactggttttacacagctgtcatttttctttcaaaattgcagcagtcccacagatgtgtgcatttggacaaatagtacttaaaaacaaaacaaacaagcactcagcccagctcctcaatactacctggaaaaagcattggcattattttcaataaatatcaagcactaaaaaaagaaaaaaaaaa

SEQ ID NO: 398663 - DNA, 1000 bp, Homo Sapiens; identical to SEQ ID NO: 116856

SEQ ID NO: 398664 - DNA, 1000 bp, Homo Sapiens; identical to SEQ ID NO: 287886

SEQ ID NO: 398665 - DNA, 1000 bp, Homo Sapiens; identical to SEQ ID NO: 222087

SEQ ID NO: 398666 - DNA, 1000 bp, Homo Sapiens; identical to SEQ ID NO: 222088

SEQ ID NO: 398667 - DNA, 1000 bp, Homo Sapiens
agaggatgtgtttcagccctgagatgttacagttgaagagcttggtttcattgagcatttctctatttttccagttatcccgaaatttctatgtattattttttggggaagtgaggtgtgcccagttttttaatctaacaactacttttggggacttgcccacatctctgggatttgaatggggattgtatcccattttactgtcttttaggtttacatttaccacgtttctcttctctgctccccttgcccactgggactcctctttggctccttgaagtttgctgcttagagttggaagtgcagcaggcaggtgatcatgctgcaagttctttctggacctctggcaaagggagtggtcagtgaaggccatcgttaccttgggatctgccaggctggggtgttttcggtatctgctgttcacagctctccactgtaatccgaatactttgccagtgcactaatctctttggagataaaattcattagtgtgttactaaatgttaattttcttttgcggaaaatacagtaccgtgtctgaattaattattaatatttaaaatacttcattccttaactctccctcatttgctttgcccacagcctattcagttcctttgtttggcaggattctgcaaaatgtgtctcacccactactgagattgttcagcccctgatgtatttgtattgatttgtttctggtggtagcttgtcctgaaatgtgtgtagaaagcaagtattttatgataaaaatgttgtgtagtgcatgctctgtgtggaattcagaggaaaacccagattcagtgattaacaatgccaaaaaatgcaagtaactagccattgttcaaatgacagtggtgctatttctcttttgtggccttttagacttttgttgccctaaaattccattttattgggaacccattttccacctggtctttcttgacagggtttttttctactttaaacagtttctaaataaaattctgtatttcaaaaa

SEQ ID NO: 398668 - DNA, 1000 bp, Homo Sapiens; identical to SEQ ID NO: 287890

SEQ ID NO: 398669 - DNA, 1000 bp, Homo Sapiens; identical to SEQ ID NO: 287892

SEQ ID NO: 398670 - DNA, 1000 bp, Homo Sapiens; identical to SEQ ID NO: 222089

SEQ ID NO: 398671 - DNA, 1000 bp, Homo Sapiens; identical to SEQ ID NO: 116858

SEQ ID NO: 398672 - DNA, 1000 bp, Homo Sapiens; identical to SEQ ID NO: 222092

SEQ ID NO: 398673 - DNA, 1000 bp, Homo Sapiens; identical to SEQ ID NO: 287897

SEQ ID NO: 398674 - DNA, 1000 bp, Homo Sapiens
gcgatgggctgcccaagagctccaagcctacgcggaagggaatggccaagggaaaacctcggaggtcgtcccaagcccctacccgggcggcccctgcgccccccagaggcatggatcgcaatggggtgcccccctctgccagagggggccccctgcccctggagatcatgtctggagggggcacccacaggcctccccggggccctccgtccacatccctgggagccagcagacgaccccgggcacgtccgccctcagagcacaacacagaattcctcaacgtgcctgaccagggcatggccggcatgcagaggaagcgcagcgtggggcaacggccagtgcctggtgtgggccgacccaagccccagcctcggacacatggtcccaggtgccgggccctataccagtacgtgggccaagatgtggacgagctgagcttcaacgtgaacgaggtcattgagatcctcatggaagatccctcgggctggtggaagggccggcttcacggccaggagggccttttcccaggaaactacgtggagaagatctgagctgggccctgggatactgccttctctttcgcccgcctatctgcctgccggcctggtggggagccaggccctgccaatgagagcctcgtttacctgggctgcaatagcctaaaagtccagtcctttggcctccagtcctgcccaggccctgggtcaccaggtcactgctgcagcccccgcccctgggccctggtcttcctccaacatcacacctgctgcccattctccatttctgtgtgtgtcaaaggggactaacagcagaatctacctcccaactgccatgtgattaagaaatgggtcttgagtcctgtgctgttggcaaagtgccaggcacagttggggaggggggggtccttaacaagcgtgactttgctcattctgtcatcactaaggcaataaacctttgccaggtgaaaaaaaaaaaaaaaaaaaaaaaaaaaaaaaaaaaa

SEQ ID NO: 398675 - DNA, 1000 bp, Homo Sapiens; identical to SEQ ID NO: 116859

SEQ ID NO: 398676 - DNA, 1000 bp, Homo Sapiens; identical to SEQ ID NO: 222093

SEQ ID NO: 398677 - DNA, 1000 bp, Homo Sapiens
ttgattagcatttccgcatccatgcaaacgagtcacatatggtgggactggagccatagtaaaggttgatttacttctaccaactagtatataaagtactaattaaatgctaacataggaagttagaaaatactaataacttttattactcagcgatctattcttctgatgctaaataaattatatatcagaaaactttcaatattggtgactacctaaatgtgatttttgctggttactaaaatattcttaccacttaaaagagcaagctaacacattgtcttaagctgatcagggattttttgtatataagtctgtgttaaatctgtataattcagtcgatttcagttctgataatgttaagaataaccattatgaaaaggaaaatttgtcctgtatagcatcattatttttagcctttcctgttaataaagctttactattctgtcctgggcttatattacacatataactgttatttaaatacttaaccactaattttgaaaattaccagtgtgatacataggaatcattattcagaatgtagtctggtctttaggaagtattaataagaaaatttgcacataacttagttgattcagaaaggacttgtatgctgtttttctcccaaatgaagactctttttgacactaaacactttttaaaaagcttatctttgccttctccaaacaagaagcaatagtctccaagtcaatataaattctacagaaaatagtgttctttttctccagaaaaatgcttgtgagaatcattaaaacatgtgacaatttagagattctttgttttatttcactgattaatatactgtggcaaattacacagattattaaatttttttacaagagtatagtatatttatttgaaatgggaaaagtgcattttactgtattttgtgtattttgtttatttctcagaatatggaaagaaaattaaaatgtgtcaataaatattttctagagagtaaaaaaaaaaaaaaaaa

SEQ ID NO: 398678 - DNA, 1000 bp, Homo Sapiens; identical to SEQ ID NO: 116860

SEQ ID NO: 398679 - DNA, 1000 bp, Homo Sapiens; identical to SEQ ID NO: 116861

SEQ ID NO: 398680 - DNA, 1000 bp, Homo Sapiens; identical to SEQ ID NO: 287899

SEQ ID NO: 398681 - DNA, 1000 bp, Homo Sapiens
cgaactcgagacggcggacggggagccggagcccgcctcgcgagtgtgcacggtgctggtgagccgcaccgcgctccaagtctttatccaggtgaatgtgctggtgtccttcgtgctccccttggcactaactgctttcctgaatggggtcacagtgagccacctgctggccctctgctcccaagtgccgtccacttctaccccgggcagctccacccccagccgcctggagctgctgagtgaggagggtctcctcagcttcatcgtatggaagaagacctttatccagggaggccaggtcagcctggtgagacataaagacgtgcgccggatccgcagcctccagcgcagcgtccaggttctcagagccatcgtggtcatgtatgtcatctgctggctgccgtaccatgcccgcaggctcatgtactgctacgtacctgatgacgcgtggactgacccactgtacaatttctaccactacttctacatggtgaccaacacacttttctacgtcagctcagctgtgactcctcttctctacaacgccgtgtcctcctccttcagaaaactcttcctggaagccgtcagctccctgtgtggagagcaccaccccatgaagcggttacccccgaagccccagagtcccaccctaatggatacagcttcaggctttggggatcccccagaaacccggacctgaatgtaatgcaagaatgaacagaacaagcaaaatgaccagctgcttagtcacctggcaaagcaggtgagcaacctcatcactaatcattcaagcttcgcagccagggcgacttctatcaacccctgctctgctgagaaccatcaagcgcagggaagccacgtgacccctcctagcctcaggctccctcgtctgtgtagtggagataaagaacagcacccatctcttagtgttgcctgagactaaagtgcttagcacagaacctggtgcgtagtagatgctcaataaatttttgctggcacg

SEQ ID NO: 398682 - DNA, 1000 bp, Homo Sapiens; identical to SEQ ID NO: 116863

SEQ ID NO: 398683 - DNA, 1000 bp, Homo Sapiens
gtaatctcagcactttgggtggccaaggcgggcagatgacttgaggtcaggagttcgagaccagcctggccaacatggtgaaaccccgtctctactaaaaatacaaaaattagtcaggtgtggtggacgcctgtgatctcaatctcagctactcgggaggctgaggcaggagaatcacttgaacccaggaggtgttgcagtgaaccaagatcacaccactgcactccagcctaggcaacagagactctgtctcaaaaaaaaaaaaaaaaaaaaagaaactcccaggagacagcagcctagttttcgagtgtgagcttgtgcttgtgaaagctaaccatgctaaccaccaaggcaaagcagcacagtgtgaatagaacagagcgggatcaagaatttcacagaagacaggtcagctgaggggcctgcacacacagggtgttgaggaaccacagatgggcgccgagaggcctgccttttgcctggcccaggctcacccccaccttgggcctcacctcctccaggaagccttcccagctacccgaagctcaggtggccttcttgcaggtccccgtagcaccctgagcctgtaccttgggtggcacttgttatgctatcctgtgctagccgtttgtgcctcgtctcgctgttagattgtgagttcccatgggcagagacccactgtcgttccccgtgtgtccccagcccggtccctgtcacatttgttaaatgaaagaacaatgaagcccagtgtaacgtcagtccacagaaatagccacagcttccagtggtggccgtagacttggctcggaacttagtggcaccagagtaactctagtcagttacagtaaaatccactgtgtgtggaaggcagaagctagcggttgtatcccaagcatcttttgtatttgtctttatactttgctgaattctctgaaatacctattactgtatgttgcttttctaaataaatgtattgtgaaaccaaaaaaaaaaaaaaaaa

SEQ ID NO: 398684 - DNA, 1000 bp, Homo Sapiens; identical to SEQ ID NO: 116864

SEQ ID NO: 398685 - DNA, 719 bp, Homo Sapiens; identical to SEQ ID NO: 287903

SEQ ID NO: 398686 - DNA, 1000 bp, Homo Sapiens; identical to SEQ ID NO: 287904

SEQ ID NO: 398687 - DNA, 1000 bp, Homo Sapiens; identical to SEQ ID NO: 287905

SEQ ID NO: 398688 - DNA, 1000 bp, Homo Sapiens; identical to SEQ ID NO: 287906

SEQ ID NO: 398689 - DNA, 1000 bp, Homo Sapiens; identical to SEQ ID NO: 222099

SEQ ID NO: 398690 - DNA, 1000 bp, Homo Sapiens; identical to SEQ ID NO: 222100

SEQ ID NO: 398691 - DNA, 1000 bp, Homo Sapiens; identical to SEQ ID NO: 287910

SEQ ID NO: 398692 - DNA, 1000 bp, Homo Sapiens; identical to SEQ ID NO: 116865

SEQ ID NO: 398693 - DNA, 1000 bp, Homo Sapiens; identical to SEQ ID NO: 116866

SEQ ID NO: 398694 - DNA, 1000 bp, Homo Sapiens; identical to SEQ ID NO: 287913

SEQ ID NO: 398695 - DNA, 1000 bp, Homo Sapiens; identical to SEQ ID NO: 287914

SEQ ID NO: 398696 - DNA, 1000 bp, Homo Sapiens; identical to SEQ ID NO: 116867

SEQ ID NO: 398697 - DNA, 1000 bp, Homo Sapiens; identical to SEQ ID NO: 287917

SEQ ID NO: 398698 - DNA, 1000 bp, Homo Sapiens; identical to SEQ ID NO: 287918

SEQ ID NO: 398699 - DNA, 1000 bp, Homo Sapiens; identical to SEQ ID NO: 116868

SEQ ID NO: 398700 - DNA, 1000 bp, Homo Sapiens; identical to SEQ ID NO: 287919

SEQ ID NO: 398701 - DNA, 1000 bp, Homo Sapiens; identical to SEQ ID NO: 287920

SEQ ID NO: 398702 - DNA, 1000 bp, Homo Sapiens; identical to SEQ ID NO: 222101

SEQ ID NO: 398703 - DNA, 1000 bp, Homo Sapiens; identical to SEQ ID NO: 287923

SEQ ID NO: 398704 - DNA, 1000 bp, Homo Sapiens; identical to SEQ ID NO: 116869

SEQ ID NO: 398705 - DNA, 1000 bp, Homo Sapiens; identical to SEQ ID NO: 116870

SEQ ID NO: 398706 - DNA, 1000 bp, Homo Sapiens; identical to SEQ ID NO: 287927

SEQ ID NO: 398707 - DNA, 1000 bp, Homo Sapiens; identical to SEQ ID NO: 116871

SEQ ID NO: 398708 - DNA, 1000 bp, Homo Sapiens; identical to SEQ ID NO: 116872

SEQ ID NO: 398709 - DNA, 1000 bp, Homo Sapiens
aaaattttctgcttggacctctttggttctctcccctttcaagtgagcaacaccacaatgactgtctaaagcatgccttatttagcctctcctgtaagggtgatctagccaggtacattttaaacaatgcttcagtgtagaaggtgtaaactattttgggcttgatgtgctgtgaatgttgcttttttttttcctttgttaaaatatttaaatagaagtgaaaaggtcctctgaggatcagatcatgcatgcgccattttttacttaatgcagctgttaaattggcaaagctctaaaatgcactgctgccatctagtgatacacttttgtaaagtacagcaaaacctacaggtatatacagcatataaatatatatatatatatatttatatttttgggggtgggagaaatccaaaataaagtaaatgcttgtttcatttttaagctgctgatattcattccttattgtatgttgtcagatgaggaaattgtgcagttctggtacataaagatgagtaatataaactgaaatctataattttaagggcttaacctgtgactttaataagctggaacagtccactgaatgggtataatgaattgcagtatatacgtatgattgctttttaagtgattatcttttcttctgttaagtcatgtaaattcataaatccttttgcactgatgtgttgaaccttattcttgtacattcattcaatcaaggcaaacttttataatttttcttttgtttccaatgaccttgaaatgttatagcatggtaatattctatgcaactatagttatactttttggtttgacactgtattttttcacattgatttactggttgatgatagattttataacctaacggttctcatgcggtgcgtaattgtagatgcatgtacttgtgtgttttgtgtaactattgaagtgcaatgatgtataaaaaagtggattcacctgtttttaaaaataaaacattgataaaaaaaaaaaa

SEQ ID NO: 398710 - DNA, 1000 bp, Homo Sapiens; identical to SEQ ID NO: 116873

SEQ ID NO: 398711 - DNA, 1000 bp, Homo Sapiens; identical to SEQ ID NO: 222105

SEQ ID NO: 398712 - DNA, 1000 bp, Homo Sapiens; identical to SEQ ID NO: 116874

SEQ ID NO: 398713 - DNA, 1000 bp, Homo Sapiens; identical to SEQ ID NO: 116875

SEQ ID NO: 398714 - DNA, 1000 bp, Homo Sapiens; identical to SEQ ID NO: 287935

SEQ ID NO: 398715 - DNA, 1000 bp, Homo Sapiens; identical to SEQ ID NO: 287937

SEQ ID NO: 398716 - DNA, 1000 bp, Homo Sapiens; identical to SEQ ID NO: 116876

SEQ ID NO: 398717 - DNA, 1000 bp, Homo Sapiens; identical to SEQ ID NO: 222107

SEQ ID NO: 398718 - DNA, 1000 bp, Homo Sapiens; identical to SEQ ID NO: 287940

SEQ ID NO: 398719 - DNA, 1000 bp, Homo Sapiens; identical to SEQ ID NO: 287941

SEQ ID NO: 398720 - DNA, 1000 bp, Homo Sapiens; identical to SEQ ID NO: 116877

SEQ ID NO: 398721 - DNA, 1000 bp, Homo Sapiens; identical to SEQ ID NO: 287943

SEQ ID NO: 398722 - DNA, 1000 bp, Homo Sapiens; identical to SEQ ID NO: 222108

SEQ ID NO: 398723 - DNA, 1000 bp, Homo Sapiens; identical to SEQ ID NO: 287945

SEQ ID NO: 398724 - DNA, 1000 bp, Homo Sapiens; identical to SEQ ID NO: 220772

SEQ ID NO: 398725 - DNA, 1000 bp, Homo Sapiens; identical to SEQ ID NO: 116878

SEQ ID NO: 398726 - DNA, 658 bp, Homo Sapiens; identical to SEQ ID NO: 287947

SEQ ID NO: 398727 - DNA, 1000 bp, Homo Sapiens; identical to SEQ ID NO: 116879

SEQ ID NO: 398728 - DNA, 1000 bp, Homo Sapiens; identical to SEQ ID NO: 287950

SEQ ID NO: 398729 - DNA, 1000 bp, Homo Sapiens; identical to SEQ ID NO: 116880

SEQ ID NO: 398730 - DNA, 1000 bp, Homo Sapiens; identical to SEQ ID NO: 287952

SEQ ID NO: 398731 - DNA, 1000 bp, Homo Sapiens; identical to SEQ ID NO: 287953

SEQ ID NO: 398732 - DNA, 1000 bp, Homo Sapiens
ctggaaagaggctgctggctgtctggcttcgcagctctggcctcctaatcagcctcgctcttgtctctggtgttctctggctcttgtccatctgtctgtgtttctttttgccagctattgactaatctttgctgaagctgagctagaattctggtgtttataagcaggtaactagctgagcactagttgataactttggagttagtggataaccacagggctgggctactaagctttttcagttgaaaaataaataaataaataaataaacaccacacccagctaatttttgtatttttagtagagacagggtttcaccgtgttagccaggatggactccatctcctgacctcgtgatccgcctacctcggcctcccaaagtgctgggattacaggcgtgagccaccacgcccggtcacctttgtcctgttttctacaggttagaagcaaggcacaagtcatacctacattcaaggagaggggaccatgcaaaggataaactgcagagagacaacagatttacatcccagacacattcacactgggccaagagcagctgccattgcagattcgagtcacgtccttttttccttccttctccttcttggagttacaacagaagctggggaggtgagagtgcagaaaggacgtggatgaagcagagaggcacgtgcctgtctcattcgcctctggatctgctgcatccaggactgtgccagcacaaagtgggagcccgataaatatttattgaagaaatgaaaggtgacaaaaggcagaaggagggagaccccaaaaagagcagcacaggaagctgccccctcaaacactaaaggctcctggagctattcacagtgctggggaacaaccagaggaggaggaggacagagggagagaatactttttttaaaaatcccaaacaaaaccaaattctatacatgtatatctcgagtgagtaaatgtgtaacactcaccaaaaaaaaaaaaaaaaaaaaaaaaaaaa

SEQ ID NO: 398733 - DNA, 1000 bp, Homo Sapiens
tgatgagtacgagcgggcccggaggctgctggccaaggcgcggagcagtgcccccaccgcccgggtgttcatgaagtctgtgaagctggagtgggtgcaagacaacatcagggcagcccaagatctgtgcgaggaggccctgcggcactatgaggacttccccaagctgtggatgatgaaggggcagatcgaggagcagaaggagatgatggagaaggcgcgggaagcctataaccaggggttgaagaagtgtccccactccacacccctgtggcttttgctctctcggctggaggagaagattgggcagcttactcgagcacgggccattttggaaaagtctcgtctgaagaacccaaagaaccctgggctgtggttggagtccgtgcggctggagtaccgtgcggggctgaagaacatcgcaaatacactcatggccaaggcgctgcaggagtgccccaactccggtatcctgtggtctgaggccatcttcctcgaggcaaggccccagaggaggaccaagagcgtggatgccctgaagaagtgtgagcatgacccccatgtgctcctggccgtggccaagctgttttggagtcagcggaagatcaccaaggccagggagtggttccaccgcactgtgaagattgactcggacctgggggatgcctgggccttcttctacaagtttgagctgcagcatggcactgaggagcagcaggaggaggtgaggaagcgctgtgagagtgcagagcctcggcatggggagctgtggtgcgccgtgtccaaggacatcgccaactggcagaagaagatcggggacatccttaggctggtggccggccgcatcaagaacaccttctgattgagcggttgccatggccggtctccgtggggcagggttgggccgcatgtggaagggctctgagctgtgtcctccttcattaaaagtttttatgtctcgtgtcagaaaaaaaaaaaaaaaaaaaaaaaaaaaaaaaaa

SEQ ID NO: 398734 - DNA, 1000 bp, Homo Sapiens; identical to SEQ ID NO: 222112

SEQ ID NO: 398735 - DNA, 1000 bp, Homo Sapiens
aatatgagaaaagagcatcttcattttaattaactgctttataaaaatggcaactttaggtatagataacctaattcaggttgcagttttaatattcattgggggcagtggaattgcatgtgtaaattatgttagatatatatcataacaaccctagtggattcatggaattataaacgtgatccaaattctactgtcttccaagaaagctacatttatacatccaaacaaattcttttccacagcttaagagtacctcatcagaatacagtggttcaagttaaaaaataaagtccataatgcatatggtcatcattctagacctgataaccactgagaacctgctgagcaaggacggcttttaccaacattagcacaaaggtttcctcagtttagactctaacatatgacctgaaacaactctaggtctgagtcctagagattacataaatagtgtgtagcccagaaaagtaaaataggtgtcacgctgttttttttaatgtcaacaccaataggaatccatttagattaatgtatgtaatttctgataaaagtaagagaaatgaggaactttcgaactgcaaatatgcctccaaactagcttttgataagtgtggtttctgttatttgaatggattcccatctttgtctctagcctggagaagagcaaaatggagggggaggggccagaaataggaggaggttttgaagaataaagcctcatatccaggaaaaagtgatcaagtgaaaaagctgcatcaagacccatttggcaagaggttgtccgaaaataattccttgatcatatctgaagtggttatttactcaaatcaatttctcccctgcgtcgctaagactgtcataaaatggccttgacatttaatcacaggttactttccagaaaggtttctaaagttacagattcagcttttcaaattgtcaaattcactttgaataataatagaacctgggctacattcctaactcatattaacagcac

SEQ ID NO: 398736 - DNA, 1000 bp, Homo Sapiens; identical to SEQ ID NO: 116883

SEQ ID NO: 398737 - DNA, 1000 bp, Homo Sapiens; identical to SEQ ID NO: 287956

SEQ ID NO: 398738 - DNA, 1000 bp, Homo Sapiens; identical to SEQ ID NO: 116885

SEQ ID NO: 398739 - DNA, 1000 bp, Homo Sapiens
tcctcttcctggactatgtgatgttcacgattcacatgggctgccacggcttccgtgaccctttcgagtgtaacatgtgtggatatcgaagccatgatcggtatgagttctcgtctcacatagccagaggagaacacagagccctgctgaagtgaatatctggtctcagggattgctcctatgtattcagcatcgtttctaaaaaccaatgacctcgcctaacagattgctctcaaaacatactcagttccaaacttcttttcataccatttttagctgtgttcacaggggtagccagggaaacactgtcttccttcagaaattattcgcaggtctagcatattattacttttgtgaaacctttgttttcccatcagggacttgaattttatggaatttaaaagccaaaaaggtatttggtcattatcttctacagcagtggaatgagtggtcccggagatgtgctatatgaaacattctttctgagatatatcaaccacacgtggaaaagcctttcagtcatacatgcaaatccacaaagaggaagagctgaccagctgaccttgctgggaagcctcacccttctgcccttcacaggctgaagggttaagatctaatctccctaatctaaatgacagtctaagagtaagtaaaagaacagccataaaataagtatctgttacgagtaactgaagaccccattctccaagcatcagatccatttcctatcacaacatttttaaaaaatgtcatctgatggcacttctgcttctgtcctttaccttcccatctccagtgaaaagctgagctgctttgggctaaaccagttgtctatagaagaaaatctatgccagaagaactcatggttttaaatatagaccatcatcgaaactccagaaatttatccactgtggatgatgacatcgctttcctttggtcaaggttggcagagcaagggtataaagggggaaattgtttggcagcaccaacagaaaacaaa

SEQ ID NO: 398740 - DNA, 1000 bp, Homo Sapiens
tagctagccagatagatcctcagaaagacatagagcctagaacaacgtatcagattgagaactttgcacaagcgtttggttctcagtttaagtcgggcagcagggtgccaatgacctttatcactaactctaatggagaagtggaccatagagtaaggacttcagtgtcagatttctcagggtatacaaatatgatgtctgatgtaagtgagccatgtagtacaagagtaaagacacccaccagccagagttacaggtaaggtcccaaaagtggccaggctggaggtcttctaatgtaattttgttttattttgagaacactgccattggaatgtttctacacgatcctattaagaataatgtgatgccctttcaatgcaacttttcatatttagtttattttgttagcgtgattttagctctgtttgtattatgatttttaatcaaaatcaatagattaaaaatagtttgacattcaaagtgacaatgtttagcaatcaaatttacatgtatagatcgtcagggaatagcccaaatgttttaaacgcaaaaaaaaagacaaaaaaaaaccaaaaaaaaaaaacctacaaaaaaaactttgttgctaggattaaggttattctaattgctttactctcaggaaagtgtaataacgcatgggaattctgtacgttatcactgtaatggaatatccaatttacagatagtatgatatacatttcatcatttaagtaagggatcgaaaacatttcaaattgctctatctgggctgatagacatttcgtcatttaagtaagggatcgaagacatttcaaattgctatctccatctgggctgatccaaaattctgagattgttggctacctatattttgttgcagcttttaaatgtactctgaacttccaaaccacattcattccagcctggtagaacaaatattcttggatctttgatcaaagcctggaatgatagctttaataaaagaaaaaaaaaaaaaaaa

SEQ ID NO: 398741 - DNA, 1000 bp, Homo Sapiens; identical to SEQ ID NO: 116886

SEQ ID NO: 398742 - DNA, 1000 bp, Homo Sapiens; identical to SEQ ID NO: 222114

SEQ ID NO: 398743 - DNA, 1000 bp, Homo Sapiens; identical to SEQ ID NO: 287961

SEQ ID NO: 398744 - DNA, 1000 bp, Homo Sapiens; identical to SEQ ID NO: 222115

SEQ ID NO: 398745 - DNA, 1000 bp, Homo Sapiens; identical to SEQ ID NO: 222116

SEQ ID NO: 398746 - DNA, 1000 bp, Homo Sapiens; identical to SEQ ID NO: 222117

SEQ ID NO: 398747 - DNA, 1000 bp, Homo Sapiens; identical to SEQ ID NO: 287966

SEQ ID NO: 398748 - DNA, 1000 bp, Homo Sapiens; identical to SEQ ID NO: 116888

SEQ ID NO: 398749 - DNA, 1000 bp, Homo Sapiens; identical to SEQ ID NO: 222118

SEQ ID NO: 398750 - DNA, 924 bp, Homo Sapiens; identical to SEQ ID NO: 287968

SEQ ID NO: 398751 - DNA, 1000 bp, Homo Sapiens; identical to SEQ ID NO: 287969

SEQ ID NO: 398752 - DNA, 1000 bp, Homo Sapiens
tctccatcctctacagcatcggcagcaagcctctgcaaatctgggacaaaaaggtacggaatggccacatcaaaagaatcactgataatgacatccagtccctggtgctagagattgaagggacaaatgtaagcaccacatatatcacatgccctgcagaccccaagaagacgctgggaattaaacttcctttccttgtcatgattatcaaaaacctgaagaagtattttaccttcgaagtgcaggtactagatgacaagaatgtgcgtcgtcgctttcgggcaagtaactaccagagcaccacccgggtcaaacccttcatctgcaccatgcccatgcggctggatgacggctggaaccagattcagttcaacttgctagacttcacacggcgagcatacggcaccaattacatcgagaccctcagagtgcagatccatgcaaattgtcgcatccgacgggtttacttctcagacagactctactcagaagatgagctgccggcagagttcaaactgtatctcccagttcagaacaaggcaaagcaataactggaattgtgactcgagggatagacccctggatgtgactcttctttttaaaaggaaactatgtggaggacgatgcaaaaacatatttatcttagtttgctctgctgtagttctgttatttatacttggtgttgcttgtcatggacaccggtgaacatgccgtaactctgtgactgcattgtaagtgcagtgggggtaagcagtcctgtgagtggcgcatgaacgctggagcttattccgccgcctgccccagtgtggggggagatacctttaccatgaacttacagaattaaagatggcccataaggaattccagaccaatatttcttcctgcggtttattctatgttttatatattatctaaatatatgtatatgctgtgtcatactcataatctggaaatgaataaagtgatatattcctggtttgtaaaaaaaaaaaaaaaaaaa

SEQ ID NO: 398753 - DNA, 1000 bp, Homo Sapiens; identical to SEQ ID NO: 287970

SEQ ID NO: 398754 - DNA, 1000 bp, Homo Sapiens; identical to SEQ ID NO: 287971

SEQ ID NO: 398755 - DNA, 1000 bp, Homo Sapiens
tctcgcaccaaccccagcatgatgattgatgacctcctgactccatgctcaccaggggacccaggagccatggagatgacttggatggatgtccctggggacaaactcttagagcctgtggtttgcatgtcggacatgctgcggtctctggccaccacccggcccacggtgaatgcagacgacctcctgaaagtgaagaaattctcagaggactttgggcaagagagttaaaagctgcttcacttgggcaatggtgaaggtgggaggttgattggggcaaatccaggcactccccatgtcaacagccagacagggctccagggcttgtcccagtcaatacagagttccctctgctgtctggccgtctgccagggagccagaaggaagggccttgcagccacagagacactccactgccctggggcacacagtggacactgctcttcctacttcctcctctcctggatgctcatcagctccttctgcctcccccccttttttttccatcttttgttcccctaaattaatgctgcttggattttcatcttatttataaagataaaatcacctggaagtgtcaaggagtggggcggggtggcgggggagaagcagccgtgctgccaggtcacccagacctccagacagccggctagccccactgcccgttccttttacgcccaagttttgctccttgagagcagattggctgatgcccctgcaaccccagcccaagctctgcctcaaagaccgagtgacataagccattcccaccctcctaggttcacatccagggctgtgtcttccttgggggaggagatggtgtcgtttagatcagggtaaggcagtcaggcgggtgttcaccactgccttttcttcctctgagcgtgagaacactgaacccagccactgcccctgggtccctgtcctggaaatggtctaataaatccttttcccttcttgagctaaaaaaaaaaaaaaaaaaaaaaaaaaaaaaaaaaaa

SEQ ID NO: 398756 - DNA, 1000 bp, Homo Sapiens; identical to SEQ ID NO: 287974

SEQ ID NO: 398757 - DNA, 1000 bp, Homo Sapiens; identical to SEQ ID NO: 287976

SEQ ID NO: 398758 - DNA, 1000 bp, Homo Sapiens; identical to SEQ ID NO: 287977

SEQ ID NO: 398759 - DNA, 1000 bp, Homo Sapiens
gctgttgcagatgaaatgttctgttcaccctgcattacatgtgtttattcatccagcagtgttgctcagctcctacctctgtgccagggcagcattttcatatccaagatcaattccctctctcagcacagcctggggagggggtcattgttctcctcgtccatcagggatctcagaggctcagagactgcaagctgcttgcccaagtcacacagctagtgaagaccagagcagtttcatctggttgtgactctaagctcagtgctctctccactaccccacaccagccttggtgccaccaaaagtgctccccaaaaggaaggagaatgggatttttcttttgaggcatgcacatctggaattaaggtcaaactaattctcacatccctctaaaagtaaactactgttaggaacagcagtgttctcacagtgtggggcagccgtccttctaatgaagacaatgatattgacactgtccctctttggcagttgcattagtaactttgaaaggtatatgactgagcgtagcatacaggttaacctgcagaaacagtacttaggtaattgtagggcgaggattataaatgaaatttgcaaaatcacttagcagcaactgaagacaattatcaaccacgtggagaaaatcaaaccgagcagggctgtgtgaaacatggttgtaatatgcgactgcgaacactgaactctacgccactccacaaatgatgttttcaggtgtcatggactgttgccaccatgtattcatccagagttcttaaagtttaaagttgcacatgattgtataagcatgctttctttgagttttaaattatgtataaacataagttgcatttagaaatcaagcataaatcacttcaactgctcttctgtagttcttggatttcttttcccttttgactttgaataaatgtaaaatcctttcagccagaaaaagtaaaatagaaacaacctgtattaaaaatcttccatagaaaaaaaaaaa

SEQ ID NO: 398760 - DNA, 1000 bp, Homo Sapiens; identical to SEQ ID NO: 116890

SEQ ID NO: 398761 - DNA, 1000 bp, Homo Sapiens; identical to SEQ ID NO: 222119

SEQ ID NO: 398762 - DNA, 1000 bp, Homo Sapiens; identical to SEQ ID NO: 287981

SEQ ID NO: 398763 - DNA, 1000 bp, Homo Sapiens; identical to SEQ ID NO: 222120

SEQ ID NO: 398764 - DNA, 1000 bp, Homo Sapiens; identical to SEQ ID NO: 222121

SEQ ID NO: 398765 - DNA, 1000 bp, Homo Sapiens; identical to SEQ ID NO: 287984

SEQ ID NO: 398766 - DNA, 1000 bp, Homo Sapiens; identical to SEQ ID NO: 287985

SEQ ID NO: 398767 - DNA, 1000 bp, Homo Sapiens
aaaattgattgatttgactaagattcgtgtgtttgtcctggatgaagcagatgtgatgattgacactcaaggattctcagatcatagtattcgtattcaaagagctctaccctccgaatgccaaatgctcctcttttcagcaacctttgaggactctgtgtggcactttgctgagcgaatcatccctgaccctaatgttatcaagttacgcaaagaggagctcacactgaacaacatccggcaatattacgtgctgtgtgagcacaggaaagacaaataccaagctctgtgcaacatttatggcagcatcaccattggtcaggccatcatcttctgccagactcgtcgaaacgctaagtggttgaccgtggagatgatacaggatggccaccaggtgtctttgttaagcggggagctgaccgtggagcagcgagcttccatcattcagaggtttcgggatgggaaagagaaggttctcataacaactaatgtttgtgcccgagggattgatgtgaagcaggtcacaattgttgtgaactttgatctccctgtaaaacaaggagaggagccggactatgagacctacctccaccgcatagggcggacggggcgctttgggaaaaaaggccttgccttcaacatgattgaagtagatgagctgccctcgctcatgaaaatccaggaccactttaacagcagtattaagcaactcaacgctgaagacatggatgaaattgaaaagattgactattgaagaaagaactttattgtttgtgcagtatcctagtttatgtgagaatgtctcagtgggttttgaaggtaatttttttatgttgaggctttttcgacgtgaaactgtcacagatggcaaaataaatgtcacggtacttagttttaagacatgaggtctttttgaagccaaattgatgtgaagcttgtgatccttttgaataaaaaaaaggcaagattatttcttattctaaaaaaaaaaaaaaaaaaa

SEQ ID NO: 398768 - DNA, 1000 bp, Homo Sapiens; identical to SEQ ID NO: 287986

SEQ ID NO: 398769 - DNA, 1000 bp, Homo Sapiens
ttcatgatatcagatgttcagtcatgatgattcggaccccagaggaactggaggatgtttctgaccttgaagaggaacacgaggtccgcagtcacaccagcattcagaccgaagggaaaactgatagggctaagatgactcaactgcctgaggcagaaaaagaaaagattgctgagcaagttgctgatttcaagaaagtaaagagtaagctggatgctgagattgagatatgggatgatacaagcaacgacatcattgttctggccaagaacatgtgtatgatcatgatggagatgacagacttcactaggggcaaaggaccactaaagcatacaactgatgtgatctatgcagcgaaaatgatatcagaatcaggatcaaggatggatgtccttgctcggcagattgctaatcagtgcccagatccatcttgtaaacaggacttgttggcctacctggaacagattaagttctactcccaccaactgaaaatctgcagtcaagttaaagctgagatccagaacctgggaggagagctcatcatgtcagctttggacagtgtcacatccctgatccaagcagccaaaaatttaatgaatgctgtagtgcaaacagtgaaaatgtcttacattgcctcaaccaagatcatccgaatccagagtcctgctgggccccggcacccagttgtgatgtggagaatgaaggctcctgcaaaaaaacccttgattaaaagagagaagccagaggaaacgtgtgcagctgtcagacgaggctcagcaaagaaaaaaatccatccattgcaagtcatgagtgaatttagaggaagacaaatctactgaaaccactattctacatatagtgcctatatgacaaaatcctgcctaaccacactgctttattttacacttaagaagttctgtaatttcactaagttttggtgtttaactcacaaataacataaaatattgggcgctaaatcaacaaaagcaatatataaaaa

SEQ ID NO: 398770 - DNA, 990 bp, Homo Sapiens; identical to SEQ ID NO: 116891

SEQ ID NO: 398771 - DNA, 1000 bp, Homo Sapiens; identical to SEQ ID NO: 222122

SEQ ID NO: 398772 - DNA, 1000 bp, Homo Sapiens
gtatcttcagccgcctccttgacagtcttcggcaggaagggttcctcacagatgacttggtgagccaagaggagaatggtcagcaacagaagtacttgggggtgtgccggctcccagggccagggcggcggcaccggcgcctggacatcatcgtggtgccctatagcgagtttgcctgtgccctgctctacttcaccggctctgcacacttcaaccgctccatgcgagccctggccaaaaccaagggcatgagtctgtcagaacatgccctcagcactgctgtggtccggaacacccatggctgcaaggtggggcctggccgagtgctgcccactcccactgagaaggatgtcttcaggctcttaggcctcccctaccgagaacctgctgagcgggactggtgacccatggctgggggtgctgaggagagccgagttggactggctacccctcctggccacccagtactccctccagcctcagctggctgaacctcgccgctccaaccaccagcttcctcagcgagcagggcccagggctctgggcctgaagcaagagccagcccggctcccagtgtctgcccggctcccagtgtctgcccagccctctcccagacaggagcaggctgccaccccttctacctcaccactgcccctcgaagaattttgcaaatggccccttgccccattttaagcaggagcaggtggctggtttgaagccccaggtatcccccttccctgctatgggaaaggccaagctgctgggtggggacagaagctgcaggggagagggaagcagccgtgctgtcaacatcatccggcaccctctggggtaggagaacagccattccacatgtgttccctctatccgtcctgcttcctgggcagctggtggtgctgggaatggggtgccccagccttggtgaggacagtgttgggaggcccaggggcccagtaaagtgcatttgacattgaaaaaaaaaaaaaaaaaaaaaaaaaaa

SEQ ID NO: 398773 - DNA, 1000 bp, Homo Sapiens; identical to SEQ ID NO: 116892

SEQ ID NO: 398774 - DNA, 1000 bp, Homo Sapiens; identical to SEQ ID NO: 222124

SEQ ID NO: 398775 - DNA, 1000 bp, Homo Sapiens; identical to SEQ ID NO: 222125

SEQ ID NO: 398776 - DNA, 1000 bp, Homo Sapiens
atcttcccctccaacggcagcagcctctgcaaggccacacacaccattggctacggcaccacgcggggctaccgggacggcggcatccccgacatagactactcctacacatgatgcccgcccacccgggctgccccgcctcagccccagctgccctggcgtggccatgtggctttgcccagcctgctgcaatccaagagagcaaggaagagaaattccatgggtgactttcctccgcagaaagcaaagtttggggagggctgacgattttgtagaacacaacagtgacaattttttttaaaagaatagaaggcaggagggggaattcgacattgttgaagacataatttataccaagttatgccagttggggagggaaggactaaaaataatattgcaggcagggctgggttgggttttttttttttcccccctgaactggaaggatactacctgtacaacatctgtggacacctcatgctctgttcaaggccatcacaaaggaaccgccagggagaagcagccggctctcaaagctcccacgcagctctcccgccactggccactcgctggcgacccgatggaaggttttcaggctcctcacaaaggagagagggaagaaaagatcttttgccctggagatatggtcctgaaatctctcccctggcttattccataccatttcccttgcagatttgcagaaacatggcatctttcactgcattctttgaacaatcatgtagtcgattaaaaaaaaaaaacaaacttttttttcctaggctgaagccctcttcagttccatgcaccacgctccgtagaagccccggcggaagccgtagctttccctgccacctggaggtgcatctgtctgcctgtctatccctgtcgcggtgtctctaagtacagatgggtagatagagccacatgcacggtccttaccgttcttcttgggtcagttcttaccatttcctgaacaatagaattgtgaaagtgttaaaaa

SEQ ID NO: 398777 - DNA, 1000 bp, Homo Sapiens; identical to SEQ ID NO: 224631

SEQ ID NO: 398778 - DNA, 1000 bp, Homo Sapiens; identical to SEQ ID NO: 287995

SEQ ID NO: 398779 - DNA, 1000 bp, Homo Sapiens; identical to SEQ ID NO: 287996

SEQ ID NO: 398780 - DNA, 1000 bp, Homo Sapiens
ctgaggactttcttgagaagctcgctttccggactgggaagttactaaagggtggagagcccgacttgcagactgtgggtaagatggtcctcaatgactggcagaggggccggattcctttctttgtcaagccacccaatgcagagccacttgtggccccccagcttctaccctcctcatctttggaagttgtcccagaagcagcccagaacaatccaggggaggaagtcacagaaactgcaggtgaagggtcagaatccatcattaaggaagaaacagaagagaacagtcactgtgatgctaacacagagatgcagcagattctcacacgagttcggcagaactttggtaaaatcaacgtggtgcctcagttttctggggatgacctggttcctgtggaggtgtcagatcttgaggaagagcttgagagcttttctgatgaagaggaggaggaacaggagcaacaaagagatgatgcggaagagtcttcctcggagcctgaggaggaaaatgtgggaaacgacaccaaagccgttattaaagcactggatgagaagattgccaaatatcagaagtttctagacaaagccaaagccaaaaagttttcagcagtcagaatatccaagggactgagtgaaaagatatttgcaaaacctgaagaacaaagaaaaacactggaagaagatgtagatgacagagcaccttccaaaaagggaaagaagcggaaggcacaaagggaagaggaacaggaacattcaaataaagctcccagggcgcttacatcaaaagaacggaggcgagcagtacgacagcaacggccgaaaaaagttggtgtgcgctactatgaaacacacaacgtgaaaaataggaacaggaacaaaaagaagaccaatgactcagagggacagaaacacaaacgcaaaaaattcagacaaaagcagtaatgtttaaaaggtttttattaaattatacaaaaacaggcaaaaaaaaaaaaaaaaaa

SEQ ID NO: 398781 - DNA, 1000 bp, Homo Sapiens; identical to SEQ ID NO: 287999

SEQ ID NO: 398782 - DNA, 1000 bp, Homo Sapiens; identical to SEQ ID NO: 116895

SEQ ID NO: 398783 - DNA, 687 bp, Homo Sapiens
ggggactccttgcttctttccagccggagccgctgccttgccccccggagactgaagacatggcacccaagagggccaagagaaggacagtagagggcggaagctccagcgtcttctccatgttcgaccagactcagatccaggagttcaaagaggccttcactgtgatcgaccagaaccgtgatggtattatagacaaggaggaccttcgggacaccttcgcagccatgggccgcctcaatgtgaagaatgaggagttggatgccatgatgaaggaagccagcggtcccatcaacttcaccgtcttcctgaccatgttcggggagaagctcaagggtgccgaccctgaggatgtgatcaccggagccttcaaggtcttggaccctgagggaaagggcaccatcaagaagaagttcctggaggagctgctgaccacgcagtgtgaccgcttctcccaggaggagatcaagaacatgtgggcggccttcccccccgacgtgggcggcaacgtcgactacaaaaacatctgctacgtcatcacgcacggcgacgccaaggaccaggagtaggggcacccgcgggcctccgctgcccgacgcttctgttcggcccgacctccaccccggctcccaataaaatttaactgatctttgtttctcaaaaaaaaaaaaaaaaaaaaaaaaaaaa

SEQ ID NO: 398784 - DNA, 1000 bp, Homo Sapiens; identical to SEQ ID NO: 288001

SEQ ID NO: 398785 - DNA, 1000 bp, Homo Sapiens
cccagccagttgcgtccgccctccgtgctgctggccaccgtgcgctacctggccggtgaggtggcggagagcgccgacatcgcccgcgccgaggtggccagcttcgtggcagaccgcttgcgagctgtgcgcctggacctggcgctgcagggagcgggcgacgccgaggcagcggtggtgctggaggcggcgctggccacgctgctggccgtagtggcgcggctcgggcccgacgcggcgcggggacccgcggacccggtgctgctgcaggcccaggtgcaggagggcttcggctcgctgcggcgctgctacgcgcggggcgccgggccgcacccccgccaacccgccttccagggcctctttctgctctataacctgggctcggtggaagccctgcatgaggttctacagctgcctgctgccctgcgcgcctgcccgcccctccgcaaggccttggcggtagatgctgccttccgagagggcaatgctgcccgcctgttccgtctgctccagaccctgccctacctgccaagttgcgctgtgcagtgccatgtgggccatgcccgccgggaagccctggcccgcttcgctcgtgcctttagcacccccaagggccagaccttgcctctgggcttcatggtcaacctcttggccctggatggactcagggaagcacgggacctgtgccaggcccacgggctgcccttggacggagaggagagagttgtgttcctgaggggtcgctacgtggaggaagggctaccgcctgccagtacgtgcaaggtgttagtggagagcaaacttcgaggacgtaccctggaggaggtggtcatggcagaggaggaagatgagggcacggacagacctgggtccccagcctgaggagggagcgtgagcctcccagagccccaggactgggccagagcacttaggtttctttttccatggtttccaggtaataaaaggaacttgttttgttggtaaaaaaaaaaaaaaaaaa

SEQ ID NO: 398786 - DNA, 1000 bp, Homo Sapiens
agctcttctgcagagccgcccgctgtggccgggaccgagggtggcggcggcggatcagctggatactcttgttaccagaattccaaaggttctgatagaatcaaagatggatacaaagtgaactcacacatagctaagctgcaagagttatggaaaactccccaaaatcaaacaatccacctctctaaatcaatgatggaggcgtcctttttcaagcatccagacctcaccacaggccagaagcgttacctgtgcagcattgctaaaatctataatgcaaactatctgaagatgttaatgaagaggcagtacatgcacgtacttcagcacagctcacaaaagccaggtgtcctcactcatcacagaagccgccttagctcccgttactcacagaaacagcattacccttgcactacatggcgacatcaactggagagagaggactcggggtcttctgatatcgcagctgcatctgcacctgaaatgctcatacagcattccctttggtggccagtgagaaacaaagaagggataaaaactggatatgcatctaaaacaagatgtaagtcactgaagatttttagaagaccaaggaaactgttcatgcaaacagtttcttcagatgattctgaatcacacatgagtgaagaaaaaaaggaagaagatttactaaataattttatgcaatcaatgtcaattgaagaacagggagaacatctgatgttaacttgacagtcttgtctcgtgtattgaattcgtgccaaaggtgagggtaaggggttgtgagttgtgtcctgtatgtttaggatggtattgttatttattaaatcattaagtaattttggtttgttcagaaacttaaaacaatgtaattggtctgatgtagttccatgtaccaatgatagttatgtaagaaaatttacatgtaacatatacttgtacttctagctagatacaattaaaacttttcttgcattcaaaaaaaaaaaaaaaaaaaaaa

SEQ ID NO: 398787 - DNA, 1000 bp, Homo Sapiens; identical to SEQ ID NO: 288003

SEQ ID NO: 398788 - DNA, 1000 bp, Homo Sapiens
  misc_feature (960)..(960): n is a, c, g, or t
atcttcaacttcctgcacttgcacagccgaggcatcctccgcgtgcacacgggcacctgcagctgctgctgatggctgccagccaggctgcccggcaagcggcgccccctctcctgctgtccctcctggtggaactgggagccccgaaccgggcagcgtggggtcctggcgttcaggctgtctctccctccattgttcagctctgtacttggatcctggggtagggaggcagggttaggaaccggggcagagtcagctctgtgctgagcctcctggcctggcccccaccggtgcatccgcccagtgcgtccacctgccctggctagcatgctgctgggccacaccccaagatcaggggccctggggacggcaagtgaataaagcacatttccacccaattttgtcatccgagagagagcacaaactgcaggcccttgttgcagctgaaggaagaccctacagagaatggaattgagagtggagacaggacacttcacaggacacttgagcacagtcaagattttattcacacttttggttcctgtgttttatatcgaagacttagctatgaattgctatctaaatctcagagcttagaagccaacccagtgactagaccttccagtgaagaaagtgatctcaagaggtccagggacttaacagccaagccacaccacccgacaggttcttctgtgacaccgagagatctaacccaaggcctgggttatgtcttagtcgagacatcatcatctgagaagcaccacatcctttcagacacatcctcggacacacatgcggtcttggtgcccccaggttcaatcctgcgttagctcttttgatgagaaggaaataaaccaaaccagccacttgcactatggcttccaagccaatgttattgactcaataagtgcttagcaattggcttcctcttttgtcttcctattttcagctccatttaanccaggagttatttataaagacctcttcctctcatgtaaaa

SEQ ID NO: 398789 - DNA, 1000 bp, Homo Sapiens
aacaaagataatgaaaattacccaaatgtgaaaaaggctctcatcaacatacttttagtgaccacgggctacatcatatgctttgttccttaccacattgtccgaatcccgtataccctcagccagacagaagtcataactgattgctcaaccaggatttcactcttcaaagccaaagaggctacactgctcctggctgtgtcgaacctgtgctttgatcctgtcctgtactatcacctctcaaaagcattccgctcaaaggtcactgagacttttgcctcacctaaagagaccaaggctcagaaagaaaaattaagatgtgaaaataatgcataaaagacaggatttttgtgctaccaattctggccttactggaccataaagttaattatagctttgaaagataaaaaaaaaaaaaaaaacaaaaaaaaactcagtatgaaaaaatacagttagctagcaaatatggacaggtttacttagaaatcctgtttctaaatgcaagtcaagctttattgttaggcttgctgctactcattaacccaaatatttgtacaaaaaactaaagagtctcattgaacgaatgtaaaatcctgcaatatccttgaaatccaaaagaggtccatgacatagacccaaaggtattcatgagttattcatttaaatgcctggaactgacttcttgataaaaatataaaaaataatttccatgtaagttaccagaaagcccaccagcaacataattttaaagcctttcggattacttttaaaaaatgcagcttacatataacaacttgtgcctattttatttctaatctatcacttcaaaagatggtaatctttcaactcattattcctccaatttttaatgtcgaatttttttctaacacaataaccaaaagcttttatttataaaaaggcttgaaaaatataaaaaaaaaaaaaaaaaaaaaaaaaaaaaaaaaaaaaaaaaaaaaaaaaaaaaaaaaaaaaaaaaaaa

SEQ ID NO: 398790 - DNA, 1000 bp, Homo Sapiens; identical to SEQ ID NO: 222127

SEQ ID NO: 398791 - DNA, 1000 bp, Homo Sapiens
atgatgggaaacttgcaagtagcattacctttacatatactgctaaggccactgatgctcaactctgcctggaatcatcaccaaaagagaatgcatcaatttttgtgcattcccaacatgctctaatgcttcagattcaagtgctttttccactgtttccccaattggataatcggcagctcaatgacagtcaagtggaaacaactgtctgctcctgcttcaggtgcagaaatacagcgatttccagtgccagctgttgagccagtgccagcaccaggggcagattcccctccagggacagcgctggagctagaggaagctccagagccctcctgccgctgccctgggactgcccaggaccagcccagtgaggagctgcctgacttcatggcacctcctgtagagccaccggcctcagccctggagctgaaagtgtggctggagctagaggtggcagagaggggtggccagcacagctccagccagcagctcccacactgctcccagtcctgggcacagtggaagctatggaggcagagaccagggtttgcaatctgggctcctctgcctcactggagagggacttctctcattcagcagagcagcagccctgctgctgaagggcctgctgctactgctgctggggctgtttgcctgcctgcaggaggtgctggagagcaagaaaaggagcctgtgagcaggggttccagcaggtcctcctgctcccagaggcgacctcctcctccaggcatggaggtttgccctcagctgggcatctgggccatttgcccctaacgtgctgcccaggatggcctcctcttgacaggcggacagggggtgagggggccagggggcatctccaaaggaagcttttaaactcagcagctgcaccccagaatctgtatgcctgcacctgcccaaggatttattcatagcttacctaagaatttcaaatttctaccataacactgaataaagtttgactttttgaaacttcaaa

SEQ ID NO: 398792 - DNA, 1000 bp, Homo Sapiens; identical to SEQ ID NO: 222128

SEQ ID NO: 398793 - DNA, 1000 bp, Homo Sapiens; identical to SEQ ID NO: 288006

SEQ ID NO: 398794 - DNA, 1000 bp, Homo Sapiens; identical to SEQ ID NO: 222129

SEQ ID NO: 398795 - DNA, 1000 bp, Homo Sapiens; identical to SEQ ID NO: 116897

SEQ ID NO: 398796 - DNA, 1000 bp, Homo Sapiens; identical to SEQ ID NO: 288010

SEQ ID NO: 398797 - DNA, 1000 bp, Homo Sapiens; identical to SEQ ID NO: 116898

SEQ ID NO: 398798 - DNA, 1000 bp, Homo Sapiens; identical to SEQ ID NO: 116899

SEQ ID NO: 398799 - DNA, 1000 bp, Homo Sapiens; identical to SEQ ID NO: 288012

SEQ ID NO: 398800 - DNA, 1000 bp, Homo Sapiens; identical to SEQ ID NO: 116900

SEQ ID NO: 398801 - DNA, 1000 bp, Homo Sapiens
tgtccaaagacgacaagatgatattaaagatgaatcttcggagttttcaagccattcaaacaaagctctgatggcaccaaatcttgactcctttggacgcgatcgggcactgtatcaagagcatgcaaaacgtcgcattgcagagcgggaggccaggaggactcgtcgtagacaagccagagaacaaaccggtaagatggcagatcaccttgaaggcctttccagtgatgatgaagaaacttctacagatattactaatttcaatctggaaaaagatcgaatttcaaaagaatccggcaaagtttttgaagatgtccttgaaagtttctattcaattgactgtattaaatcacagtttgaagcatggcgttcaaaatactacacatcctacaaagatgcttacattggcctttgtttgccaaaattattcaaccccctcatacgacttcagctcctcacttggactcctcttgaggcaaaatgtcgtgactttgagaatatgctgtggtttgaatctttgctgttttatggttgtgaagaacgagagcaagaaaaagatgatgtagatgttgccctactacctaccattgtggaaaaggtgattcttcctaaactaacagtgatagctgaaaatatgtgggaccctttttctacaacacagacttcaagaatggtgggaattacactaaaattaatcaatggatatccttcagtagtgaatgcagaaaataaaaatacacaggtatacctaaaggcacttttattgagaatgagaagaactttagatgatgatgtatttatgcccttatatcccaaaaatgtcttagaaaataaaaattctgggccttacttgttttttcaacgacagttttggtcttcagttaaggtcataaaacccccattccagagagggtcctgccccatacccagaaggaaagaatgctgctcagagaggccaagaagaatctggacggacaggccttgtgttgtcttctcttga

SEQ ID NO: 398802 - DNA, 1000 bp, Homo Sapiens; identical to SEQ ID NO: 116902

SEQ ID NO: 398803 - DNA, 1000 bp, Homo Sapiens; identical to SEQ ID NO: 116903

SEQ ID NO: 398804 - DNA, 1000 bp, Homo Sapiens; identical to SEQ ID NO: 288019

SEQ ID NO: 398805 - DNA, 944 bp, Homo Sapiens
ctcaccatggtgggccccgcgccgcggcggcggctgcggccgctggcagcgctggccctggtcctggcgctggccccggggctgcccacagcccgggccgggcagacaccgcgccctgccgagcgggggcccccagtgcggcttttcaccgaggaggagctggcccgctatggcggggaggaggaagatcagcccatctacttggcagtgaagggagtggtgtttgatgtcacctccggaaaggagttttatggacgaggagccccctacaatgccttgacggggaaggactccactagaggggtagccaagatgtccttggatcctgcagacctcacccatgacactacgggtctcacggccaaggaactggaggccctggatgaggtcttcaccaaagtgtacaaagccaaataccccatcgtcggctacactgcccggagaattctcaatgaggatggcagccctaacctggacttcaagcctgaagaccagccccattttgacatcaaggatgagttctgatgttccccctgcaggagcaggttcttgggagcgtgaggcaggaagacactaggtgctgaatctcctgcaaaactggctgcctggaggccctgagccacccagatctgaataaaacagatgcttaccctggaagagcaaatgcctcctgttgtctttggtcaggggttctgtctacctggggacccctgtctgcacaccagggatcaataagagccaaagtgggacacctcctagatgtcagtatcagctggctgggcagtggaattttgagcgacctttactttatacttttctgtgcttgacagattttcagccatgaccatgttcactttataatcaaaacaaaaataaaggtcccatttttacaaaaggaaaaaaaaaaaaaaaaaaaaaaaaaaaaaaaaaaaaaaaaaaaaaaa

SEQ ID NO: 398806 - DNA, 1000 bp, Homo Sapiens; identical to SEQ ID NO: 288020

SEQ ID NO: 398807 - DNA, 1000 bp, Homo Sapiens; identical to SEQ ID NO: 288021

SEQ ID NO: 398808 - DNA, 1000 bp, Homo Sapiens; identical to SEQ ID NO: 222133

SEQ ID NO: 398809 - DNA, 1000 bp, Homo Sapiens
ctgatggcgctcgggctcttcgtccccgccatcctgctggtgaactacgccaaggacgcgggcgtgcccgacaccgacgccgccttcctgctgtccatcgtgggcttcgtggacatcgtggcgcgcccggcgtgcggcgccctggcgggcctggcgcgtctgcggccgcacgtcccgtatctgttcagcctggccctgctggccaatgggctcacagacctgagcagcgcacgcgcgcgctcctacggcgccctcgtcgccttctgcgtcgccttcggcctctcctacggcatggtgggcgcgctgcagttcgaggtgctcatggcggctgtgggcgcgccccgcttccccagtgcgctgggcctggtgttgctcgtggaggccgcggctgtgctcatcggaccgccctctgccggccgcctggtggatgcgttgaagaactatgagatcatcttctacctggccggctctgaggtggccctggctggggtcttcatggctgtcgccaccaactgctgcctgcgttgtgctaaagctgccccgtcaggcccaggcactgagggcggagccagtgacactgaggacgctgaggctgaaggggactctgagcccctgcctgttgttgcagaggaacccggcaacctggaggccctggaggtgctcagcgcccggggcgagcccacagaaccagaaatagaggcgaggccgaggctggctgccgagtctgtataactcagggtgctctgggtggggtggcccagtgacttgggaacacagcttcttgtctcagagagcctggtacgctgggaggctggtctggggtggtcactcccggggtccacgtctgggctccagttgatcccctgggtgtctgggaactgcctccctcatctgtgccccaagttccgccaggccctgccccatcgccagtgaagctgctatggagcaacaggaaactggtgataaagctcagctgaacgacaaaaaaaaaaaaaaaaaa

SEQ ID NO: 398810 - DNA, 1000 bp, Homo Sapiens
agaagagatgaggaaaatttgcaacagccataaagaaaagagaatggatggcagaaaggccagtggtgaagaacaagaatgcctcgactagagtgaaattgaactccatcaggcaaaatttaaaatcacaaattggctaaaagtactgatccattatcctttgaagaagtttttcctcttttttggcccgttgttattagtaatacctctagtagttgatacttcaggaagtctgattctcatgttatgttacacatagatcactataattcttacgggaattccaaccttcccagagctaaatagtttagctgcttcaactgctccagactattgaagtatgcaaatcagcacaaaatgtgacattctgacattctaaataccataactaagatttacattgcactatgacataatcccgaaaaaagatacatatacttaaatagaagtgtgactttcccccaaaagtatttcaattctacttcattaaaagctgctaagcttacctgtagggcagttaccacagaaacagaaattgacctccggtatatataaatatttacttataaaagtacaagtagacgtatattgtccgttgaataactgaatataccatcaaaggatcaaatcttattacctaattaaaccttaaaaatataatgtcataatatttcttaagaatactatagtattctataatttcaaactttgtggtaaccctacattttatagttgccatatcaaagccatgggagagttttaattcgttattctaagtttagttacaatcccttctttacctctacttaatgttccatatatttttattgactttccaaagtttcaggaattacttttatgtcacattgagtgggaggcttcatccaatggctttgctatggaaatcttggtggtgtagcttttcatgctaatttaaagattgcaagaggtttcttccccaaaatatatcatggactcaaggtgttataaaaaaaaaaaa

SEQ ID NO: 398811 - DNA, 1000 bp, Homo Sapiens
ttcagatggtcctcatgtcttttgaaccatcagcaagtccacagtggacaaaaatccttcaaatgtgaagaatgtgggaagggattttatacaaattcacgacgatcttcccatcagagatcccacaatggagaaaagccatataactgtgaggagtgtggtaaggactataaaaggaggttggatcttgagtttcaccagagggtccacacgggtgagagaccctataattgtaaggaatgtggcaagagctttggctgggcctcctgtcttttgaaacatcagagactccacagtggggaaaaacctttcaaatgtgaagagtgtggaaagagatttactcagagtacacaacttcattcccatcagacatgccatactggagaaaagctatacaaatgtgagcagtgtgagaaggggtacaacagtaaatttaatcttgacatgcaccagagggtccacaggggagagcgaccctataattgtaaggaatgtggaaagagctttggctgggcttcatgtcttttgaaacatcagagactccacagtggagaaaagccattgaaatctggagtgtgggaagagatctactcagaattcacagcttcatttacatcagtaagtctatgtgggagaaaagccatataaatgtgagaagtgtgggaagggctttggctgggcctcaactcatctgacccatcaattctccacagcagagaaaaaccattcaaatatgagaactgtgggaagagctttgtacatagatcatatctttttttttttttttgagacagagtctcactctttcacccaagcctgactgcagtggcgctatctcagctcgctgcaagctccgcctcccaagttcacgccattctcctgcctcagcctcccgagtaactgggactacaggtgcccgccaccacacccagctaattttttgtatttttagtaaaaacggggtttcaccgtgttagccaggatggtctcgatctcctga

SEQ ID NO: 398812 - DNA, 1000 bp, Homo Sapiens; identical to SEQ ID NO: 222134

SEQ ID NO: 398813 - DNA, 1000 bp, Homo Sapiens; identical to SEQ ID NO: 288023

SEQ ID NO: 398814 - DNA, 1000 bp, Homo Sapiens; identical to SEQ ID NO: 288024

SEQ ID NO: 398815 - DNA, 1000 bp, Homo Sapiens
acccccagaaggagaaggttcgcctccgctacaagctcaccttcaccatgggtgaccagacctacaacgagatgggggatgtggaccagttccccccacctgaaacctggggtagcctctagaacagaggggctggggagaggaaggggcagagggaccggtcactgtccagcctggagggaggcattggtggccaaggacaccctttgttgcccatggccattcacccccaggcctggtgcttctccccacacccctgtaggcctcaagtgactcttccccctcctgctccggccccgcccctgctgagccaaacccagtaggaggctgggcctgggtttgtgccgctggggtctccatcaccgggacctggagagggaggggctgtgtagccttggaagaacttgggtcatggggaggaagcacagctgttggggaagggccaggacctcaggcccagccccaaccccagctggggtggggtcttccccacctgtctcttatgccttatgggaaggcccagccataactcgggggccatgctggagctggggaccagcttaggcctcctccataggaacccagtgactggggggtgacgcctacacccccagctatttgcactctggtgtgtggtttgactctgcttttcttccggattggccctgtggtcacagcctcagggggccaggctgggggaacctcacctggcccgtactcctgggggtttccctttgccattgggccccctgagggactgtgggggctcaagggtaatgccagaggcccatggccccagcgaggggctgtggggcacctagagttctcggtgtgtctccttcattcattggcctctgctggggcctcctatgggtgtcttacgtctgtccatccatctgtccgtggtcagaagtggggtcagtgtgtgagtgagagcaggagtatttatgaaaataaaacgtcgtttttcctggaaaaaaaaaaaaaaaaaaaaaaaaaa

SEQ ID NO: 398816 - DNA, 1000 bp, Homo Sapiens; identical to SEQ ID NO: 222136

SEQ ID NO: 398817 - DNA, 1000 bp, Homo Sapiens; identical to SEQ ID NO: 116907

SEQ ID NO: 398818 - DNA, 1000 bp, Homo Sapiens; identical to SEQ ID NO: 222137

SEQ ID NO: 398819 - DNA, 1000 bp, Homo Sapiens; identical to SEQ ID NO: 288027

SEQ ID NO: 398820 - DNA, 1000 bp, Homo Sapiens
acagcatttcctcttatccacctgaataaaaatgaccagccctttccaaatggcagagagcactgagaggagacacaaggagcagcccgcaagcaccaagtgagaggcatgaagttacagtgtgtttccctttggctcctgggtacaatactgatattgtgctcagtagacaaccacggtctcaggagatgtctgatttccacagacatgcaccatatagaagagagtttccaagaaatcaaaagagccatccaagctaaggacaccttcccaaatgtcactatcctgtccacattggagactctgcagatcattaagcccttagatgtgtgctgcgtgaccaagaacctcctggcgttctacgtggacagggtgttcaaggatcatcaggagccaaaccccaaaatcttgagaaaaatcagcagcattgccaactctttcctctacatgcagaaaactctgcggcaatgtcaggaacagaggcagtgtcactgcaggcaggaagccaccaatgccaccagagtcatccatgacaactatgatcagctggaggtccacgctgctgccattaaatccctgggagagctcgacgtctttctagcctggattaataagaatcatgaagtaatgttctcagcttgatgacaaggaacctgtatagtgatccagggatgaacaccccctgtgcggtttactgtgggagacagcccaccttgaaggggaaggagatggggaaggccccttgcagctgaaagtcccactggctggcctcaggctgtcttattccgcttgaaaatagccaaaaagtctactgtggtatttgtaataaactctatctgctgaaagggcctgcaggccatcctgggagtaaagggctgccttcccatctaatttattgtaaagtcatatagtccatgtctgtgatgtgagccaagtgatatcctgtagtacacattgtactgagtggtttttctgaataaattccatattttacctatga

SEQ ID NO: 398821 - DNA, 1000 bp, Homo Sapiens; identical to SEQ ID NO: 288028

SEQ ID NO: 398822 - DNA, 1000 bp, Homo Sapiens; identical to SEQ ID NO: 222138

SEQ ID NO: 398823 - DNA, 1000 bp, Homo Sapiens; identical to SEQ ID NO: 288030

SEQ ID NO: 398824 - DNA, 1000 bp, Homo Sapiens
acgcagcggtggcacaggcacccccggccgtggcctctagctccctctttgacctctcagtgctcaagctccaccacagcctgcagcagagtgagccggacctgcggcacctggtgctggtcgtgaacactctgcggcgcatccaggcgtccatggcacccgcggctgccctgccacctgtgcctagcccacctgcagcccccagtgtggctgacaacttactggcaagctcggacgctgccctttcagcctccatggccagcctcctggaggacctcagccacattgagggcctgagtcaggctccccaacccttggcagacgaggggccaccaggccgtagcatcgggggagcagcgcccagcctgggtgccttggacctgctgggcccagccactggctgtctactggacgatgggcttgagggcctgtttgaggatattgacacctctatgtatgacaatgaactttgggcaccagcctctgagggcctcaaaccaggccctgaggatgggccgggcaaggaggaagctccggagctggacgaggccgaattggactacctcatggatgtgctggtgggcacacaggcactggagcgaccgccggggccagggcgctgagccctcgtgctggaatggttgtctggtatctgaactgagcctgctggctggaccaactgtcctcgaaaagacacagctggcttccctagtacagagaacagggcttgggccactttggagagacagaatctagtcctgggcaacttcacatccgtcctcctgtctcagggctggcagggggagcctggaattaccccctagtgatggaatgacagggtctggtggggactgaattccctggccctggggtcatagcttgggctgttccttctctgatacgggaagagaccccaatcagatttttcaaattaaagccagtcctgggaaaaaaaaaaaaaaaaaaaaaaaaaaaaaaaaaaaaaaaaaaaaaaaaaaaa

SEQ ID NO: 398825 - DNA, 548 bp, Homo Sapiens
gccttgcagaacttctacttgcctgcctccctgcctctggccatggcctgccggtgcctcagcttccttctgatggggaccttcctgtcagtttcccagacagtcctggcccagctggatgcactgctggtcttcccaggccaagtggctcaactctcctgcacgctcagcccccagcacgtcaccatcagggactacggtgtgtcctggtaccagcagcgggcaggcagtgcccctcgatatctcctctactaccgctcggaggaggatcaccaccggcctgctgacatccccgatcgattctcggcagccaaggatgaggcccacaatgcctgtgtcctcaccattagtcccgtgcagcctgaagacgacgcggattactactgctctgttggctacggctttagtccctaggggtggggtgtgagatgggtgcctcccctctgcctcccatttctgcccctgaccttgggtcccttttaaactttctctgagccttgcttcccctctgtaaaatgggttaataatattcaacatgtcaacaaaaa

SEQ ID NO: 398826 - DNA, 1000 bp, Homo Sapiens; identical to SEQ ID NO: 116908

SEQ ID NO: 398827 - DNA, 1000 bp, Homo Sapiens; identical to SEQ ID NO: 222140

SEQ ID NO: 398828 - DNA, 1000 bp, Homo Sapiens; identical to SEQ ID NO: 222141

SEQ ID NO: 398829 - DNA, 1000 bp, Homo Sapiens; identical to SEQ ID NO: 116909

SEQ ID NO: 398830 - DNA, 1000 bp, Homo Sapiens
cctcaagaaaatgacggagaacatcccagacagatgggactcaagcaggatgggtgctatatccaagaagccaagaagggagagtttcgtgcactgtggttaacaggagggccgcctggaggcagtggctgagccagaaagtaacacagagctcatgcttggagagatagagtcttggccatggctttcctgcaagaccactgacgagcagtcccatggtgataaagggcagcccggcgggtcccagcatctcgagaccctctgcagaagtattatcagagtagagctgacttccagtacccgggcagccagctctgtctccagggaggcctggcctggaggaggagtccactaacaggaaacacttctcaccccctcacacaggcccaggggagcccctggagggaaattccttggcaggggaacaggaaatgtggtcgcctctgccccactgccagcctgagtgggcaaggaagcaggtggatcccccagaaggaaccgcagctcgcgaggcacctctcctcgtccccacccacccccacatttgcacaccttccacagggtcaggatggagtagctgccttgcgaggtggtgagactcctgtctctggaggtctgcaagcactggtagtgatattgcagcagacaaggtctgggttgggcgtctgcaggaggagaccttgtgggacatctgaggacatccgcagattcttgtcagcctgtgaactaggccctgcctctgtcacctcattggtccatgaaggagcagccaggggtggtggaaggagcactgggctaggggtcaggggtcagagattctgtcctgctcctgggatgcactggctactcccttagtctactcccttcccctctctggtcctcagcttcctccatcatggaggagatgggatcatggattttctgggcataagtggctgttctgggagtcattccaaagagagaataaaactcctgatccaaaaaaaaaaaaaaaaaaaaa

SEQ ID NO: 398831 - DNA, 1000 bp, Homo Sapiens; identical to SEQ ID NO: 288038

SEQ ID NO: 398832 - DNA, 1000 bp, Homo Sapiens; identical to SEQ ID NO: 288039

SEQ ID NO: 398833 - DNA, 1000 bp, Homo Sapiens; identical to SEQ ID NO: 116910

SEQ ID NO: 398834 - DNA, 1000 bp, Homo Sapiens; identical to SEQ ID NO: 222143

SEQ ID NO: 398835 - DNA, 1000 bp, Homo Sapiens; identical to SEQ ID NO: 288042

SEQ ID NO: 398836 - DNA, 1000 bp, Homo Sapiens; identical to SEQ ID NO: 116911

SEQ ID NO: 398837 - DNA, 1000 bp, Homo Sapiens; identical to SEQ ID NO: 288045

SEQ ID NO: 398838 - DNA, 1000 bp, Homo Sapiens; identical to SEQ ID NO: 116913

SEQ ID NO: 398839 - DNA, 1000 bp, Homo Sapiens; identical to SEQ ID NO: 288047

SEQ ID NO: 398840 - DNA, 1000 bp, Homo Sapiens; identical to SEQ ID NO: 288048

SEQ ID NO: 398841 - DNA, 1000 bp, Homo Sapiens; identical to SEQ ID NO: 288049

SEQ ID NO: 398842 - DNA, 1000 bp, Homo Sapiens; identical to SEQ ID NO: 288050

SEQ ID NO: 398843 - DNA, 1000 bp, Homo Sapiens; identical to SEQ ID NO: 116914

SEQ ID NO: 398844 - DNA, 1000 bp, Homo Sapiens; identical to SEQ ID NO: 288053

SEQ ID NO: 398845 - DNA, 1000 bp, Homo Sapiens
tcggccccagcttctttctgagccaccagacagcactgggtagtgctttccaagatgctgagcacctgaagaccctgtccctgtcctacaacgccctgggagcccctgccctggccaggaccctgcagagcctgcccgccggcaccctcctgcacttagagctcagctccgtggcagccggcaagggtgattcggacctcatggagcctgtattccgatacctggccaaggaaggctgtgctctagcccacctgaccctgtctgcaaaccacctgggggacaaggctgttagagacctgtgcagatgtctctctctgtgcccctcactcatctcactggatctgtctgccaaccctgagatcagctgtgccagcttggaagagctcctgtccaccctccaaaagcggccccaaggccttagcttccttggcctgtcaggctgcgccgtccagggtcccctgggcctgggcctgtgggacaagatagccgcgcagctccgggaactgcagctgtgcagcagacgcctctgcgctgaggacagggacgccctgcgccagctgcagcccagtcggccgggccccggcgagtgcacgctggaccacggctccaagctcttctttcggcgcctctgaccctggcgctgcctttccccaccctcaccgaagcccctaataaatgaagctgctggccgggcgcggtggctcacgcctgtaatcccaacactttgggaggcccaggcgggcggatcacgaggtcaggagatcgagaccatcctggctaacatggtgaaaccccgtctctactaaaaataccaaaaattagccgggcgtggtggtggaagcctgtagtcccagctactccggaggctgaggcaggagaatggcgtgaacccgggaggcggagcttgcagtgagccgagatcgcaccactgcactccagcctgggcgacagaccgagactccgtctcaaaaaaaaaaaaaaaaaaaaaaaaaaaaaaaaa

SEQ ID NO: 398846 - DNA, 1000 bp, Homo Sapiens; identical to SEQ ID NO: 116915

SEQ ID NO: 398847 - DNA, 1000 bp, Homo Sapiens; identical to SEQ ID NO: 222148

SEQ ID NO: 398848 - DNA, 1000 bp, Homo Sapiens; identical to SEQ ID NO: 222149

SEQ ID NO: 398849 - DNA, 1000 bp, Homo Sapiens
gtgcgggacaagtcctatctcctgccgccccagcctgtcaagcagttcctcatctcccctccagcctctcccccggtggggtggaagcagagcgaagatgcgatgcctgttataaattatgatttactctgtgctgtttccaaattgggaccaggagagaaatatgaacttcacgcgggaacagagtcgacacccagcgtggtggttcatgtctgtgaaagtgaaactgaagaggaagaagagacaaaaaaccccaaacagaaaattgcccagacgaggcgccccgaccctccgaccgcagcgttgaatgagccccagacctttgattgcgcgctgtgaggcccttggttgtggtgcgaggcggctgccctggtgggctctggccatggcgctctgtgcctgcggccgatgcgttgctgcgaacagcataggtgagactctgccgagtgaggtataggtcttctcaccacgcctgtactgcagacacggtcgtgtagagtagcagctgatttgacctgtcccagattttaagtgatattccaaaagggactttacattaaaggagaagcccccaagatgtggccacccttaaccatttttaaatagtaacaaattaggaaaacagctcccctcccctccagccatgtaagtcctcctgattctgtatcacatgagacaccaaaaactggaaatgtagtcacacccagtacagtaccatttttatgaatttaaaaatagtcttataattttaattgtttgtgggtatttttctactggtataaatagcttctaattaataaatcgatcaaaggttgttactcagtatacatgaaattttttgcaggaaaagaaaccagaaatacagaataattcatagaaatcatggttctcaagtatttgttcaattagctttggggaagaaatgccaaatccactttgaggatgagtcttacgacacagatccacccacatgttgctcttatctggaatttgggacaaa

SEQ ID NO: 398850 - DNA, 1000 bp, Homo Sapiens
gaaattgtcatcaacgtgcctgagcagtcggctgtgactctcgacaatgtaactctgcaaatcgatggagtcctttacctgcgcatcatggacccttacaaggcaagctacggtgtggaggaccctgagtatgccgtcacccagctagctcaaacaaccatgagatcagagctcggcaaactctctctggacaaagtcttccgggaacgggagtccctgaatgccagcattgtggatgccatcaaccaagctgctgactgctggggtatccgctgcctccgttatgagatcaaggatatccatgtgccaccccgggtgaaagagtctatgcagatgcaggtggaggcagagcggcggaaacgggccacagttctagagtctgaggggacccgagagtcggccatcaatgtggcagaagggaagaaacaggcccagatcctggcctccgaagcagaaaaggctgaacagataaatcaggcagcaggagaggccagtgcagttctggcgaaggccaaggctaaagctgaagctattcgaatcctggctgcagctctgacacaacataatggagatgcagcagcttcactgactgtggccgagcagtatgtcagcgcgttctccaaactggccaaggactccaacactatcctactgccctccaaccctggcgatgtcaccagcatggtggctcaggccatgggtgtatatggagccctcaccaaagccccagtgccagggactccagactcactctccagtgggagcagcagagatgtccagggtacagatgcaagtcttgatgaggaacttgatcgagtcaagatgagttagtggagctgggcttggccagggagtctggggacaaggaagcagattttcctgattctggctctagcttccctgccaagattttggtttttatttttttatttgaactttagtcgtgtaataaactcaccagtggcaaacctgaaaaaaaaaaaaaaaaaaaaaaaaaaaa

SEQ ID NO: 398851 - DNA, 1000 bp, Homo Sapiens; identical to SEQ ID NO: 288057

SEQ ID NO: 398852 - DNA, 1000 bp, Homo Sapiens; identical to SEQ ID NO: 288058

SEQ ID NO: 398853 - DNA, 1000 bp, Homo Sapiens; identical to SEQ ID NO: 116917

SEQ ID NO: 398854 - DNA, 1000 bp, Homo Sapiens; identical to SEQ ID NO: 116918

SEQ ID NO: 398855 - DNA, 1000 bp, Homo Sapiens; identical to SEQ ID NO: 288063

SEQ ID NO: 398856 - DNA, 957 bp, Homo Sapiens
atgcagagagccaatcactccacagtgacccaattcatcctcgtcggcttctctgtcttcccccacctccagctgatgctcttcctgctgttcctgctgatgtacctgttcacgctgctgggcaacctgctcatcatggccaccgtctggagcgagcgcagcctccacacgcccatgtacctcttcctgtgcgccctctccgtctccgagatcctctacaccgtggccatcatcccgcgcatgctggccgacctgctgtccacccagcgctccatcgccttcctggcctgtgccagtcagatgttcttctccttcagcttcggcttcacccactccttcctgctcaccgtcatgggctacgaccgctacgtggccatctgccaccccctgcgctacaacgtgctcatgagcccgcggggctgcgcctgcctggtgggctgctcctgggctggtggcttggtcatggggatggtggtgacctcggccattttccacctcgccttctgtggacacaaggagatccaccattttgcttgccatgtgccacctctgttgaagttggcctgtggagacgatgtgctggtggtggccaaaggcgtgggcttggtgtgtatcacggccctgctgggctgttttctcctcatcctcctctcctatgccttcatcgtggccgccatcttgaagatcccttctgctgaaggtcggaacaaggccttctccacctgtgcctctcacctcactgtggtggtcgtgcactatggctttgcctccgtcatttacctgaagcccaaaagtccccagtctctggaaggagacaccttgatgggcatcacctacacggtcctcacacccttcctcagccccatcatcttcagcctcaggaacaaggagctgaaggtcgccatgaagaagaccttcttcagtaaactctacccagaaaaaaatgtaatgatgtag

SEQ ID NO: 398857 - DNA, 1000 bp, Homo Sapiens
gcattggtggaattgtccggggtcaaacagaggagagcatgaatgagagtcatcctcgcaagtgtgcagagtcttttgagatgtgggatgatcgtgactcccactgtaggcgccctaagtttgaagggcatccccctgagtcttggaagtggatccttgcaccggtcattctttatatctgtgaaaggatcctccggttttaccgctcccagcagaaggttgtgattaccaaggttgttatgcacccatccaaagttttggaattgcagatgaacaagcgtggcttcagcatggaagtggggcagtatatctttgttaattgcccctcaatctctctcctggaatggcatccttttactttgacctctgctccagaggaagatttcttctccattcatatccgagcagcaggggactggacagaaaatctcataagggctttcgaacaacaatattcaccaattcccaggattgaagtggatggtccctttggcacagccagtgaggatgttttccagtatgaagtggctgtgctggttggagcaggaattggggtcaccccctttgcttctatcttgaaatccatctggtacaaattccagtgtgcagaccacaacctcaaaacaaaaaaggttggtcatgcagcattaaactttgacaaggccactgacatcgtgacaggtctgaaacagaaaacctcctttgggagaccaatgtgggacaatgagttttctacaatagctacctcccaccccaagtctgtagtgggagttttcttatgtggccctcggactttggcaaagagcctgcgcaaatgctgtcaccgatattccagtctggatcctagaaaggttcaattctacttcaacaaagaaaatttttgagttataggaataaggacggtaatctgcattttgtctctttgtatcttcagtaatttacttggtctcgtcaggtttgagcagtcactttaggataagaatgtgcctctcaagccttg

SEQ ID NO: 398858 - DNA, 1000 bp, Homo Sapiens
cctattatttctctggacgcaactgctgcctcagctgtgtgggtgtcgtctgaggcatacacttcacctgtctctagggctcaatctgaaagtgaggttcaagttacagtgcaaggtgacaaggctgttgtctcctttgaaccatcagcggcaccgacaccgaagaatcgtatttttgccttttctttcttgccgtccactgcgccatccttcccttcacccacccggaaccctgaggtgagaacgcccaagtcagcaactcagccacaaacaacagaaactaatctccaaactgctcctaaactttctacatctacatccaccactgggacaagccatcttgtaaaatgtgcggagaaggagaaaactttctgtgtgaatggaggggagtgcttcatggtgaaagacctttcaaacccctcgagatacttgtgcaagtgcccaaatgagtttactggtgatcgctgccaaaactacgtaatggccagcttctacagtacgtccactccctttctgtctctgcctgaataggagcatgctcagttggtgctgctttcttgttgctgcatctcccctcagattccacctagagctagatgtgtcttaccagatctaatattgactgcctctgcctgtcgcatgagaacattaacaaaagcaattgtattacttcctctgttcgcgactagttggctctgagatactaataggtgtgtgaggctccggatgtttctggaattgatattgaatgatgtgatacaaattgatagtcaatatcaagcagtgaaatatgataataaaggcatttcaaagtctcacttttattgataaaataaaaatcattctactgaacagtccatcttctttatacaatgaccacatcctgaaaagggtgttgctaagctgtaaccgatatgcacttgaaatgatggtaagttaattttgattcagaatgtgttatttgtcacaaataaacataataaaaggaaaaaaaaaaccc

SEQ ID NO: 398859 - DNA, 1000 bp, Homo Sapiens
ggtgctgtgcaagcggtgcgccttgcctccccaattgaaagagatgaaaagccaggaatcggctgcaggttccaaactagtccttcggtgtgaaaccagttctgaatactcctctctcagattcaagtggttcaagaatgggaatgaattgaatcgaaaaaacaaaccacaaaatatcaagatacaaaaaaagccagggaagtcagaacttcgcattaacaaagcatcactggctgattctggagagtatatgtgcaaagtgatcagcaaattaggaaatgacagtgcctctgccaatatcaccatcgtggaatcaaacgctacatctacatccaccactgggacaagccatcttgtaaaatgtgcggagaaggagaaaactttctgtgtgaatggaggggagtgcttcatggtgaaagacctttcaaacccctcgagatacttgtgcaagtgcccaaatgagtttactggtgatcgctgccaaaactacgtaatggccagcttctacagtacgtccactccctttctgtctctgcctgaataggagcatgctcagttggtgctgctttcttgttgctgcatctcccctcagattccacctagagctagatgtgtcttaccagatctaatattgactgcctctgcctgtcgcatgagaacattaacaaaagcaattgtattacttcctctgttcgcgactagttggctctgagatactaataggtgtgtgaggctccggatgtttctggaattgatattgaatgatgtgatacaaattgatagtcaatatcaagcagtgaaatatgataataaaggcatttcaaagtctcacttttattgataaaataaaaatcattctactgaacagtccatcttctttatacaatgaccacatcctgaaaagggtgttgctaagctgtaaccgatatgcacttgaaatgatggtaagttaattttgattcagaatgtgttatttgtcacaaataaacataataaaagg

SEQ ID NO: 398860 - DNA, 1000 bp, Homo Sapiens; identical to SEQ ID NO: 288069

SEQ ID NO: 398861 - DNA, 1000 bp, Homo Sapiens; identical to SEQ ID NO: 222151

SEQ ID NO: 398862 - DNA, 1000 bp, Homo Sapiens
ccgcgcgcctctcgcccgtggacttccactactcgctggccacgcaggtgccaactttcgagatcacgtcccccaactcggcgcacgccgtgtcgctgccgccggcggcgcccatcagttaccgcctggccgagcagcagccgttactgcggcacccggcgccccccggcccgggacccggacccgggcccgggcccgggcccggcgcagacatgcagcgcagctatgacagctactattaccccgcggcggggcccggaccgcggcgcgggacctgcgcgctcggcggcagcctgggcagcctgcctgccagccccttccgcatccccgaggacgacgagtacgagaccacgcaggagtgcgcgcccccgccgccgccgcggccgcgcgcgcgcggtgcgtcccgcaggacgtcggcggggccccggcgctggcgccgctcgcgcctcaacgggctggcggcgcagcgcgcacgggcggcgagggactcgctgtcgctgagcagcggctcgggcggcggctcagcctcggcgtcggacgacgacgcggacgacgcggacggggcgctggcggccgagagcacacctttcctgggcctgcgtggggcgcacgacgcgctgcgctcggactcgccgccactgtgcccggcggccgacagcaggacttactactcactggacagccacagcacgcgggccagcagcagacacagccgcgggccgcccccgcgggccaagcaggactcggcgccactctagggccccgccgcgcgcccctccgccccgcccgccccactatctttaaggagaccagagaccgcctactggagagaaaggaggaaaaaagaaataaaaatatttttattttctataaaaggaaaaaagtataacaaaatgttttattttcattttagcaaaaattgtcttataatactagctaacggcaaaggcgtttttatagggaaactatttatatgtaacatcctgatttacagcttcgg

SEQ ID NO: 398863 - DNA, 1000 bp, Homo Sapiens
cggcatgaggcgcgacccggcccccggcttctccatgctgctcttcggtgtgtcgctcgcctgctactcgcccagcctcaagtcagtgcaggaccaggcgtacaaggcacccgtggtggtggagggcaaggtacaggggctggtcccagccggcggctccagctccaacagcacccgagagccgcccgcctcgggtcgggtggcgttggtaaaggtgctggacaagtggccgctccggagcggggggctgcagcgcgagcaggtgatcagcgtgggctcctgtgtgccgctcgaaaggaaccagcgctacatctttttcctggagcccacggaacagcccttagtctttaagacggcctttgcccccctcgataccaacggcaaaaatctcaagaaagaggtgggcaagatcctgtgcactgactgcgccacccggcccaagttgaagaagatgaagagccagacgggacaggtgggtgagaagcaatcgctgaagtgtgaggcagcagccggtaatccccagccttcctaccgttggttcaaggatggcaaggagctcaaccgcagccgagacattcgcatcaaatatggcaacggcagaaagaactcacgactacagttcaacaaggtgaaggtggaggacgctggggagtatgtctgcgaggccgagaacatcctggggaaggacaccgtccggggccggctttacgtcaacagcgtgagcaccaccctgtcatcctggtcggggcacgcccggaagtgcaacgagacagccaagtcctattgcgtcaatggaggcgtctgctactacatcgagggcatcaaccagctctcctgcaaatgtccaaatggattcttcggacagagatgtttggagaaactgcctttgcgattgtacatgccagatcctaagcaaagtgtcctgtgggatacaccggggacaggtgtcagcagttcgcaatggtcaacttctccaagcaccttggatttgaattaaagg

SEQ ID NO: 398864 - DNA, 1000 bp, Homo Sapiens
aagtcaatatagccaacagagcagcagctacgggcagcagagacccatggatgaaggaccagatcttgatctaggccctcctgtagatccagatgaagactctgacaacagtgcaatttatgtacaaggattaaatgacagtgtgactctagatgatctggcagacttctttaagcagtgtggggttgttaagatgaacaagagaactgggcaacccatgatccacatctacctggacaaggaaacaggaaagcccaaaggcgatgccacagtgtcctatgaagacccacccactgccaaggctgccgtggaatggtttgatgggaaagattttcaagggagcaaacttaaagtctcccttgctcggaagaagcctccaatgaacagtatgcggggtggtctgccaccccgtgagggcagaggcatgccaccaccactccgtggaggtccaggaggcccaggaggtcctgggggacccatgggtcgcatgggaggccgtggaggagatagaggaggcttccctccaagaggaccccggggttcccgagggaacccctctggaggaggaaacgtccagcaccgagctggagactggcagtgtcccaatccgggttgtggaaaccagaacttcgcctggagaacagagtgcaaccagtgtaaggccccaaagcctgaaggcttcctcccgccaccctttccgcccccgggtggtgatcgtggcagaggtggccctggtggcatgcggggaggaagaggtggcctcatggatcgtggtggtcccggtggaatgttcagaggtggccgtggtggagacagaggtggcttccgtggtggccggggcatggaccgaggtggctttggtggaggaagacgaggtggccctggggggccccctggacctttgatggaacagatgggaggaagaagaggaggacgtggaggacctggaaaaatggataaaggcgagcaccgtcaggagcgcagagatcggccctactag

SEQ ID NO: 398865 - DNA, 1000 bp, Homo Sapiens
acaaggtgtttctctgtaaaatgaactgcagtgggttctccaaactagattcatggctttaacagtaatgttcttatttaaattttcagaaagcatctattcccaaagaaccccaggcaatagtcaaaaacatttgtttatccttaagaattccatctatataaatcgcattaatcgaaataccaactatgtgtaaatcaacttgtcacaaagtgagaaattatgaaagttaatttgaatgttgaatgtttgaattacagggaagaaatcaagttaatgtactttcattccctttcatgatttgcaactttagaaagaaattgtttttctgaaagtatcaccaaaaaatctatagtttgattctgagtattcattttgcaacttggagattttgctaatacatttggctccactgtaaatttaatagataaagtgcctataaaggaaacacgtttagaaatgatttcaaaatgatattcaatcttaacaaaagtgaacattattaaatcagaatctttaaagaggagcctttccagaactaccaaaatgaagacacgcccgactctctccatcagaagggtttatacccctttggcacaccctctctgtccaatctgcaagtcccagggagctctgcataccaggggttccccaggagagaccttctcttaggacagtaaactcactagaatattccttatgttgacatggattggatttcagttcaatcaaactttcagcttttttttcagccattcacaacacaatcaaaagattaacaacactgcatgcggcaaaccgcatgctcttacccacactacgcagaagagaaagtacaaccactatcttttgttctacctgtattgtctgacttctcaggaagatcgtgaacataactgagggcatgagtctcactagcacatggaggcccttttggatttagagactgtaaattattaaatcggcaacagggcttctctttttagatgtagcactgaaa

SEQ ID NO: 398866 - DNA, 1000 bp, Homo Sapiens; identical to SEQ ID NO: 115307

SEQ ID NO: 398867 - DNA, 1000 bp, Homo Sapiens; identical to SEQ ID NO: 288070

SEQ ID NO: 398868 - DNA, 1000 bp, Homo Sapiens; identical to SEQ ID NO: 116921

SEQ ID NO: 398869 - DNA, 1000 bp, Homo Sapiens; identical to SEQ ID NO: 288073

SEQ ID NO: 398870 - DNA, 1000 bp, Homo Sapiens; identical to SEQ ID NO: 222153

SEQ ID NO: 398871 - DNA, 1000 bp, Homo Sapiens; identical to SEQ ID NO: 222155

SEQ ID NO: 398872 - DNA, 1000 bp, Homo Sapiens; identical to SEQ ID NO: 288076

SEQ ID NO: 398873 - DNA, 1000 bp, Homo Sapiens; identical to SEQ ID NO: 116922

SEQ ID NO: 398874 - DNA, 1000 bp, Homo Sapiens
tggtcgtggacacctgggaggccgagaaactggataaaagctggagccaggagtcatgcctgcaggggggcagtgcctatgtcatcgtatactccatcgcagaccgaggcagctttgagagtgcctctgagctccgcatccagctgcggcgcacacatcaggcagaccatgtgcccatcatcctcgtgggcaacaaggcagacttggcccgctgccgagaagtctctgtggaagagggccgcgcctgcgctgtggtgttcgactgtaaattcatcgagacatccgccacgctgcagcacaatgtggccgagctcttcgagggcgtggtgcgccaactgcgcttgcgccgccgggacagtgcggccaaggaacccccagcaccccgacggccggccagcctagcccagcgcgctcgtcgcttcctggcacgcctgacagcccgcagcgcacgccgccgggcactcaaggcccgctccaagtcctgccacaatctggccgtgctctgaagccccccgcccttctgagagttggcgggtcactgaggtgcattctgggctccagggacgccactgcggggcaaaggcgccgttacctggagtctgcatcatgggtcttgcttgcctgctgccctgatggcctgagcatcccccagatccaagcctgggggatcccgggaaagcgatggacagacagacgatggggccgaagccccaagctgggcacaaagtagttttttacgtggtgggtgtctttttgtaaaaaaatcttccttgtccctgggctctggccaaccctcagaaaccctcacaataaaccagaccagaaggatgtcccatctgaatgcccagacctctccatctcggctcttccaggcgtctccacctactgccctcccatctacacttgactgtagactggtctggcctgctggcctgggcgtcagggcgcatcaataaagtacttggaccagttttgtgctcaaaaaaaaaaaaaaaaaaaa

SEQ ID NO: 398875 - DNA, 1000 bp, Homo Sapiens; identical to SEQ ID NO: 116923

SEQ ID NO: 398876 - DNA, 724 bp, Homo Sapiens
caaaggtcagaggtaaagaagtcatggcggcgctgtgtcggacccgtgctgtggctgccgagagccattttctgcgagtgtttctcttcttcaggccctttcggggtgtaggcactgagagtggatccgaaagtggtagttccaatgccaaggagcctaagacgcgcgcaggcggtttcgcgagcgcgttggagcggcactcggagcttctacagaaggtggagcccctacagaagggttctccaaaaaatgtggaatcctttgcatctatgctgagacattctcctcttacacagatgggacctgcaaaggataaactggtcattggacggatctttcatattgtggagaatgatctgtacatagattttggtggaaagtttcattgtgtatgtagaagaccagaagtggatggagagaaataccagaaaggaaccagggtccggttgcggctattagatcttgaacttacgtctaggttcctgggagcaacaacagatacaactgtactagaggctaatgcagttctcttgggaatccaggagagtaaagactcaagatcgaaagaagaacatcatgaaaaataaatgaactttgcttagtggattgactcctttgctgaagtcagttattcatcaagaatgcaattagactaattgtgaataaatgattgaatgaagatataataaataaaagctataattataaaaaaaaaaaaaaaaaa

SEQ ID NO: 398877 - DNA, 1000 bp, Homo Sapiens; identical to SEQ ID NO: 288080

SEQ ID NO: 398878 - DNA, 1000 bp, Homo Sapiens; identical to SEQ ID NO: 288081

SEQ ID NO: 398879 - DNA, 1000 bp, Homo Sapiens; identical to SEQ ID NO: 222157

SEQ ID NO: 398880 - DNA, 1000 bp, Homo Sapiens; identical to SEQ ID NO: 222158

SEQ ID NO: 398881 - DNA, 1000 bp, Homo Sapiens; identical to SEQ ID NO: 288085

SEQ ID NO: 398882 - DNA, 1000 bp, Homo Sapiens; identical to SEQ ID NO: 288086

SEQ ID NO: 398883 - DNA, 1000 bp, Homo Sapiens; identical to SEQ ID NO: 288087

SEQ ID NO: 398884 - DNA, 1000 bp, Homo Sapiens; identical to SEQ ID NO: 116926

SEQ ID NO: 398885 - DNA, 1000 bp, Homo Sapiens; identical to SEQ ID NO: 116927

SEQ ID NO: 398886 - DNA, 1000 bp, Homo Sapiens; identical to SEQ ID NO: 288089

SEQ ID NO: 398887 - DNA, 902 bp, Homo Sapiens
gggggggagcggggaaaacaaaaggagacgaaggacgcatgcgtttggtgagtcccggattctggtgggttcttccgctcaggctgggtgaagcgcttccgggtcgccgccggcagcagcctcccggcgcgatgaagacactgaggctcagagaggttaagtgactcagccaaggtcaaacagctagtaagtggtggagccaggactcaaagccagtctaggagccatgtccactttgttcccctcactcttccctcgtgtgactgagactctgtggtttaatctggatcgaccctgtgtggaagagacagagctgcagcagcaggaacagcagcatcaggcctggctccaaagcatcgcggagaaagacaacaacctggttcctattggcaagccagcctcagagcactatgatgacgaggaagaagaggatgatgaagatgatgaggatagtgaagaggactcagaggatgatgaggatatgcaggacatggacgagatgaatgactacaatgagtcaccggatgatggagaggtcaatgaggtggacatggaaggcaacgaacaggatcaggaccagtggatgatctaggtagacaaggcagggtggcctcagggagattccaggccagcccaaactaccctgcatcccaacccccaacccctgcccacagaaccagctgatggccccagtgcctgaaagtgcccttgggcacctcctcagctgctgccaggatctggtctctttggcccctcccaggccatcagtctgcacttgaaatccccagggcctgaaacctactccaccttcctggccagtacctcaccccttgattgccaggtctggtctaagtttctttaataaagacaaaggagtgattttcaaaaaaaaaaaaaaaaaa

SEQ ID NO: 398888 - DNA, 1000 bp, Homo Sapiens; identical to SEQ ID NO: 116928

SEQ ID NO: 398889 - DNA, 1000 bp, Homo Sapiens; identical to SEQ ID NO: 288091

SEQ ID NO: 398890 - DNA, 1000 bp, Homo Sapiens; identical to SEQ ID NO: 116929

SEQ ID NO: 398891 - DNA, 1000 bp, Homo Sapiens; identical to SEQ ID NO: 116930

SEQ ID NO: 398892 - DNA, 1000 bp, Homo Sapiens
aggtgctgtcgggaatcaaataaaatatgttatcagagatatcatcacatctatagtgtttaacagagctttatgccaactactaagacaaagctttaacaaagtttatagaatactgaaactcgtaacaattacctctctacgtgatgctgtaaggaatcttgctaatttggtaggaagaggaagcatttaggaaagggtttagtatctaccaaaagtacttgacctcaagtaaccaatagtaatgcaaacttgctttaaaggaaccaaaggcattgccaagtatttgccaaaaggaggcactttttatttaaaatttgagactaatgagatctcaaaaatcagccccaaaaaggtattatccatttaaggttataattttcactaagatgtagatatttctcttattgttttcatgtaaaatagtatagagttgttttgttggtttaagagtaacattcagtagtaatacaaagttttttttctatgtagaaattagttttcttttcttgcttgcaatagaaatgcaatgtgataggtgtttctcttcttattttcattgtcacattatgtcttagcatctcactttatgaaaaaaaggagaaagataccaatctacagagccctgcttgttgaagcactagtttaatcaacaaaaaattatggcaatcgggggtccattcatctattgcctttatgttgttttttaaaagaaaaaccatgatgcctttgtatttgctgtttgcacccctgaaatcaattccatatcatgtttgaatgccatacattttgcacatgtactgtacataagtaatgcatactgtatttttatatgtgtgcacatttatcatcagatcttttgtacatagtggcagtattgtagctgatcgggaaatgtttgatatctcagcaattttgcatttttgtgtctcaaataaaagacattttgatgtaaaaaaaaaaaaaaaaaaaaaaaaaaaaaaaaaaaaaaaaaaaaaaa

SEQ ID NO: 398893 - DNA, 1000 bp, Homo Sapiens; identical to SEQ ID NO: 116931

SEQ ID NO: 398894 - DNA, 1000 bp, Homo Sapiens; identical to SEQ ID NO: 288094

SEQ ID NO: 398895 - DNA, 1000 bp, Homo Sapiens; identical to SEQ ID NO: 222162

SEQ ID NO: 398896 - DNA, 1000 bp, Homo Sapiens; identical to SEQ ID NO: 222163

SEQ ID NO: 398897 - DNA, 1000 bp, Homo Sapiens
cctgagccttagaagaagagatgctgtcttggtcttgttggaggagcttgctttagttagatgtcttattattaaagttacctattattgttggaaataaactaatttgtatgggtttagatggtaacatggcattttgaatattggcttcctttcttgcaggcttgatttgcttggtgaccgaattactagtgactagtttactaactaggtcattcaaggaagtcaagttaacttaaacatgtcacctaaatgcacttgatggtgttgaaatgtccaccttcttaaatttttaagatgaacttagttctaaagaagataacaggccaatcctgaaggtactccctgtttgctgcagaatgtcagatattttggatgttgcataagagtcctatttgccccagttaattcaactttcgtctgcctgttttgtggactggctggctctgttagaactctgtccaaaaagtgcatggaatataacttgtaaagcttcccacaattgacaatatatatgcatgtgtttaaaccaaatccagaaagcttaaacaatagagctgcataatagtatttattaaagaatcaccaactgtaaacatgagaataacttaaggttctagtttagttttttgtaattgcaaattatatttttgctgctgatatattagaataattttaaaatgtcatcttgaaatagaaatatgtattttaagcactcacgcaaaggtaaatgaacacgttttaaatgtgtgtgttgctaattttttccataagaattgtaaacattgaactgaacaaattacctataatggatttggttaatgacttatgagcaagctggtttggccagacagtatacccaaacttttatataatatacagaaggctatcacacttgtgaaattctcttgtctaatctgaatttgcattccatggtgttaacatggtatatgtattgttattaaagtaagtgacccatgaaaaaaaaaaaaaaaaaaaa

SEQ ID NO: 398898 - DNA, 1000 bp, Homo Sapiens
gtgctggctccttagaaggaaaaacagatgcatgccagggtgactctggaggaccactggttagttcagatgctagagatatctggtaccttgctggaatagtgagctggggagatgaatgtgcgaaacccaacaagcctggtgtttatactagagttacggccttgcgggactggattacttcaaaaactggtatctaagagacaaaagcctcatggaacagataacatttttttttgttttttgggtgtggaggccatttttagagatacagaattggagaagacttgcaaaacagctagatttgactgatctcaataaactgtttgcttgatgcatgtattttcttcccagctctgttccgcacgtaagcatcctgcttctgccagatcaactctgtcatctgtgagcaatagttgaaactttatgtacatagagaaatagataatacaatattacattacagcctgtattcatttgttctctagaagttttgtcagaattttgacttgttgacataaatttgtaatgcatatatacaatttgaagcactccttttcttcagttcctcagctcctctcatttcagcaaatatccattttcaaggtgcagaacaaggagtgaaagaaaatataagaagaaaaaaatcccctacattttattggcacagaaaagtattaggtgtttttcttagtggaatattagaaatgatcatattcattatgaaaggtcaagcaaagacagcagaataccaatcacttcatcatttaggaagtatgggaactaagttaaggaagtccagaaagaagccaagatatatccttattttcatttccaaacaactactatgataaatgtgaagaagattctgtttttttgtgacctataataattatacaaacttcatgcaatgtacttgttctaagcaaattaaagcaaatatttatttaacattgttactgaggatgtcaacatataacaataaaatataaatcaccca

SEQ ID NO: 398899 - DNA, 895 bp, Homo Sapiens
gcggccgcgtcgaccggcgcggctggagcgcagcgccgaagggactggcagggctgaagtgtgcgggacagcaagcccccgaatagccccggctgccacctcgcaggacccaaggccacgcgcgccgggcccagctgagccgcctcatgaagccgcccgcggaggacctgtcggacgcgctgtgcgagtttgacgcggtgctggccgacttcgcgtcgcccttccacgagcgccacttccactacgaggagcacctggagcgcatgaagcggcgcagcagcgccagtgtcagcgacagcagcggcttcagcgactcggagagtgcagattcactttataggaacagcttcagcttcagtgatgaaaaactgaattctccaacagactctaccccagctcttctctctgccactgtcactcctcagaaagctaaattaggagacacaaaagagctagaagccttcattgctgatcttgacaaaactttagcaagtatgtgaaacaagaagttctgggtcctttcatcataagggagaagcttcagaaagttccgaggacctgctaaaatcagctactagaatctgctgccagaggggacaaagacgtgcactcaaccttctaccaggccactctcaggctcaccttaaaatcagcccttgatcccatttctgggcaatttagacagtgaaactgactttgtttacctgcttgcagcatattagaacagacgatccatgctaatattgtattttctcttaaaacatagctttcctgtaatttaaagtgcttttatgaaaatatttgtaattaattatatatagttggaaatagcagtaagctttcccattataatatatttttgtatacaaataaaatttgaactgaacctcgtgcc

SEQ ID NO: 398900 - DNA, 943 bp, Homo Sapiens
gctacctccaactgctgaggaaccggttgcctaaaaggagccggcaaaagcgcctacgtggagtccagaggagcggaagtagtcagatttgactgagagccgtaaagcgcggctggctctcgttttccggataacgactacagctccgactgtcagtgccggccttcctcgtgtgaggggatctgccggacccctgcaaattcaatttctttcccattccgggcccttccctatcgtcgcccccttcaccttggatcatgttcaagaaatttgatgaaaaagaaaatgtgtccaactgcatccagttgaaaacttcagttattaagggtattaagaatcaattgatagagcaatttccaggtattgaaccatggcttaatcaaatcatgcctaagaaagatcctgtcaaaatagtccgatgccatgaacatatagaaatccttacagtaaatggagaattactcttttttagacaaagagaagggcctttttatccaaccctaagattacttcacaaatatccttttatcctgccacaccagcaggttgataaaggagccatcaaatttgtactcagtggagcaaatatcatgtgtccaggcttaacttctcctggagctaagctttaccctgctgcagtagataccattgttgctatcatggcagaaggaaaacagcatgctctatgtgttggagtcatgaagatgtctgcagaagacattgagaaagtcaacaaaggaattggcattgaaaatatccattatttaaatgatgggctgtggcatatgaagacatataaatgagcctcagaaggaatgcacttgggctaaatatggatattgtgctgtatctgtgtttgtgtctgtgtgtgacagcatgaagataatgcctgtggttatgctgaataaattcaccagatgctaaaaaaaaaaaaaaaaaaaaa

SEQ ID NO: 398901 - DNA, 1000 bp, Homo Sapiens; identical to SEQ ID NO: 116932

SEQ ID NO: 398902 - DNA, 1000 bp, Homo Sapiens; identical to SEQ ID NO: 288098

SEQ ID NO: 398903 - DNA, 1000 bp, Homo Sapiens
gacatctgcgttccttctggactctccaagtaagcacaggcttctgtcctactctgtaaccctagagggcacctctgctgaggtcagacatctccttgatgtctgtgatcaaaccatgacaggatgcaaccacaacacacggctatgatcatgacaaccacggtccccaccacgacacaatcacgttcacaaccacaaccacgcagccacagggtttcaccgtgttggccaggatggtctcgatctcctgacctcgtgatccgcccacctcggcctcccaaatcgctagaatggccggcgtgagccaccatgcccggctccacggcccctacttttcacaactttggactgtccaacttgcttcccgaggcccctacaagccggtggcctctgtaggacctggtcctgccctgctgcaggagtgacggtgatgacccagcagcaactgaaagggaggtgaggggcttcctttctgcagctgagatgcacgcagacccatctcccttgtcatgctgggcagcccaccggctaagcaggggagcagagcaccaggccgggcgcctgcccagcaggagctgatgccggaggcagtgggtgccctggttagggctgaggaccccaagataggctgaagtcctaacttgaagcacctcagaatgtgaccttgtttggaaacacagtcgttgcagattaattagtcaccatgaggtcactggggtggcccctaacccaccatgactggtgtccttctaaggagatggccacatgaacacagacacgcagggagaaggcagccgtgtgaaggagtcggagatcagagtgagggacgcaaccacaagccaaggaacccaaggactgccagaaaaccaccagctgcccggagaggcaggacaggatccttccctaaagccttcacaggggggcacggccctgcttgctgaccccccggtttcagatttccggcctccacagctgtgagacaataaatttctgttgtttt

SEQ ID NO: 398904 - DNA, 861 bp, Homo Sapiens
caggaaatcgagactcatgactcccagagaggatggcatctagaagtagacgatcaagggtggaatctacagtccatgggccctgacttcttgccttcgtctcaaatagactctgcagccagccatctatgcagcgccccagtggctttgaaatgcaacagaaaccatcacccccggaccgtgggctccatgccagtgggcaaagcacagcctgggaagaattggtttgcagccaggcagtcctccatccagtcttgactttggcacttgtgatatgacttgcacagaccaaaaaagtcactctcaaagagctctcggcacacagaccccagctttacaaggaccccagctccttaacacagatcccagctccaaggaaactcgtcccccccacgttaatcctgaccgactttgccacatggagccagcaaaccatttctggcatgcaggggacctccaagcaatgatatccaaggaattccatctggcagccacccaggatgactgcagaaaaggaaggacacaggaggatatcctggttccctcttcccacccagagctgtttgcatcagtcctgccaatggctccggaagaagctgccaggctccagcaacctcagccccttcctcctccctcaggaatccacctatccgcctctaggaccttggctccaactctattgtactcgtctcctccctcccattctccttttggtctcagctccttgatctaagcctcccagagagacccctagaatgtttccctcaaggacctttctgcctggaagtctgttagcctttcagaagtaacatgtccaaaataaaatttgattcctcccaggttgttccctgcctggtccgc

SEQ ID NO: 398905 - DNA, 1000 bp, Homo Sapiens; identical to SEQ ID NO: 222164

SEQ ID NO: 398906 - DNA, 1000 bp, Homo Sapiens
cattatatgctcctttcatgacgaaattgctgccgtggagaagactggaggaaactcgaggaagagggagaagccgacaagtgctcgacgggctaggaactgtcctgcttgggtgttagcgtttcccgccgggccagtaaggctgagtgacccggcgtggctactaggagaaggacgtacggtcctgctagtagaggaatatgtcgagtttctctagggcgccccagcaatgggccacttttgctagaatatggtatctcttagatgggaaaatgcagccacctggcaaacttgctgctatggcatctataagacttcagggattacataaacctgtgtaccatgcactgagtgactgtggggatcatgttgttataatgaacacaagacacattgcattttctggaaacaaatgggaacaaaaagtatactcttcgcatactggctacccaggtggatttagacaagtaacagctgctcagcttcacctgagggatccagtggcaattgtaaaactagctatttatggcatgctgccaaaaaaccttcacagaagaacaatgatggaaaggttgcatctttttccagatgagtatattccagaagatattcttaagaatttagtagaggagcttcctcaaccacgaaaaatacctaaacgtctagatgagtacacacaagaagaaatagacgccttcccaagattgtggactccacctgaagattatcggctataagagaataagaattgcagaaaataacagtgaagtgattgaaactttcttctgatgagtttctctaacctacaggatggagtaaaacaactgctacagttcagcacctgttttatgtgccgaatcactgtggggaaaggtcaggaaggtatagtccttcaataggaaattgtaattaaaatataattttatagaaccatttttatgtaatctgatttgaatgttatagttgataataataaaatcacttacttggttgactaaaa

SEQ ID NO: 398907 - DNA, 1000 bp, Homo Sapiens
aatgttaccagcccaccttctgaagcctgggaggtgtgaacccagggcccgccaaccgctgcctttctcgggagtacttagagcctcgaacccgcgtccctgggggctgggccccaggcgcacggggctggaggcaggccttcgtgccttcgtgccttcgtgccttcccgcggtggccaggcctctgctgcagccgctggttgcaggcagagttttggggacctggcccttctcccactgggctcccccatcctgggccaaggccagaactttagtgctaggggaagatgaaatgtgcagttttgaaatgttgggtttccagagagagtcatgctggaggagaaggaagtaggccagaagtccagggctgcactgtggtgtgagggtggctttgtctaagatgcctgctcagcatgatcaccagagggtgtgggcaggtccctggagcgggggggggggggggggggggcggaccgggccgctgggccctcatgtgggagagaggtgaaaagcgtcccccactagggggctggcagtgcatgtgcttgagttaaatgtgcagggcagacagagccagaagggcctgtacccaggggctcgtcccctcctccggtttcccagacaaatccagacaccagcctttagggtggccttgggaggagagggccaggctgtcctgggtgtgagagaactagatagagcctcccaaccctgatttagaaatgcattccttattttgtctagaaattaataaatgaactagcttgttttgacaggtttatttcacatcctatgaatgtatgtaaataaactgtacataggtccatccacataaaatatcttttaataacatatcaacatttgtgtaaatttgaaatttaaaaaaatctatgaagctggtgtacatatgttacaattacgtatattttctttggtccttcataaaaatatatttactttgccaataaaaagaaaaagaactcacaaaaaaaaaaaaaaa

SEQ ID NO: 398908 - DNA, 1000 bp, Homo Sapiens; identical to SEQ ID NO: 288099

SEQ ID NO: 398909 - DNA, 1000 bp, Homo Sapiens
tccaatacagagttctttcttatagggctattgatattgacaccaaatggagtggcttctcagcctcttaatgtcttaagtaagtgcttaatttggaatagagaaaccagtatattttaaaaaagaaaaatattctttgtagcaactgtaaattctcccattataacagtgaacagagctccaggtaataacgcataggcatgtcaggttgcatctgtatatttgactacattagtattagtgacatcaggtggatataaaagaaaacccttggaaagagaactgccttagccatgatttcgttagtagacctatttatgattcaattgcaattttcagataggatgtgaacatggaatttcattgaaaatagtttaattttttatataaaaggttttgtatataatgtgtgtcagtgactattttcaaaatcattttcatcaagacaccttttttctaaaataggcattgcatacacatatgcacacgtatgtgcatgtgccacacattttttgtataatgttgggtttgattataaaagtgttgtcaaatgttttatttatctgcatatagcagtggttggcttttttgaattgaaatttttgcgcattgatgcattgaaataaggaaaattatttatctctgagcactaaacttatttttgcatatttctgtaatattgcagtccccagatccagaacatgggaagttagggaaaatgtgtgattttgtgttttgaattactgtcagaattacatacacaattacaacaaactttttttaaaagacatttcattgtactgcaaaaatctgaatatttatatttcttgtttttttctttatatgttttgcattttaatatgttgagccactggaaatttgtaacagattaatttgttataggagtttaaatgtgttgtcattgtctccattgtctttgtccagagcctattattatggaaacaataaaatttattgtgtcagttgctttgattcttta

SEQ ID NO: 398910 - DNA, 1000 bp, Homo Sapiens; identical to SEQ ID NO: 222165

SEQ ID NO: 398911 - DNA, 1000 bp, Homo Sapiens; identical to SEQ ID NO: 288101

SEQ ID NO: 398912 - DNA, 1000 bp, Homo Sapiens; identical to SEQ ID NO: 285640

SEQ ID NO: 398913 - DNA, 1000 bp, Homo Sapiens; identical to SEQ ID NO: 288102

SEQ ID NO: 398914 - DNA, 1000 bp, Homo Sapiens
gtttggagttacctttgtttttctatcgtaaatttagattctggaattggggtttggtggtgcaatgtgttgctcacaagtggccagaactcctattcctaaaaggattttgagatggaggaacacatatttaattcccctttatgccttggttcttgctcctctttccacgttggataacaattttttggttgttttgtttaagttggtgctctgaagcttaatctcagtaccctttactctgaattgtcaaattttgataaaacgtgccattttctttggtaagagaaagcaggtcttaatgtctgccagaacacaatttatatgccttattggcttcattaaacttttagaaaactttagcatttgttacttttttccattgcatttactttcaaatgcacctaatgaatttgtcacccagtcgcaacttttcccttctctgtcccattgctttctcctttccccgacgcacagaataaacatgaagctcagcagtagaagcgtaatgatttccctcaggaaaaacttctgacagctaggtttttcaagggtttccctgtgctagctgagatgcaaaacaaatcatggaagattgcatacctgtgtggtattttaaaaacaagttgactttttcagtttcttgaacggttaagggtggatttaaaaactagacagtttagttttggggaacagaagctctcttcgtcttaagccagattctctgattcttttagacgtcatagctccttagttctgctcctgtcgccctaacttggcatgggcaagttgaagttcatccttagactgcagcgttctgagcatggctgaagtattaaaatgtttaatattttttagagcaaaattgatggaaagcatttggctgaatctaaagacctgcagtcagattcttcaatgtggtttacccaactggagtagtgataaacaccttaatcataaaatgaataaaaacaaaaaaaccaaaaaaaaaaaaaaaaaa

SEQ ID NO: 398915 - DNA, 1000 bp, Homo Sapiens; identical to SEQ ID NO: 288103

SEQ ID NO: 398916 - DNA, 1000 bp, Homo Sapiens; identical to SEQ ID NO: 116934

SEQ ID NO: 398917 - DNA, 1000 bp, Homo Sapiens; identical to SEQ ID NO: 288105

SEQ ID NO: 398918 - DNA, 1000 bp, Homo Sapiens
acaagcagtgaccatcaagtcctgagtggtaagaccaccaccaccaattccaagagagaggagaagcttttcaatgtgaccagcacactgagaatcaacacaacaactaatgagattttctactgcacttttaggagattagatcctgaggaaaaccatacagctgaattggtcatcccagaactacctctggcacatcctccaaatgaaaggactcacttggtaattctgggagccatcttattatgccttggtgtagcactgacattcatcttccgtttaagaaaagggagaatgatggatgtgaaaaaatgtggcatccaagatacaaactcaaagaagcaaagtgatacacatttggaggagacgtaatccagcattggaacttctgatcttcaagcagggattctcaacctgtggtttaggggttcatcggggctgagcgtgacaagaggaaggaatgggcccgtgggatgcaggcaatgtgggacttaaaaggcccaagcactgaaaatggaacctggcgaaagcagaggaggagaatgaagaaagatggagtcaaacagggagcctggagggagaccttgatactttcaaatgcctgaggggctcatcgacgcctgtgacagggagaaaggatacttctgaacaaggagcctccaagcaaatcatccattgctcatcctaggaagacgggttgagaatccctaatttgagggtcagttcctgcagaagtgccctttgcctccactcaatgcctcaatttgttttctgcatgactgagagtctcagtgttggaacgggacagtatttatgtatgagtttttcctatttattttgagtctgtgaggtcttcttgtcatgtgagtgtggttgtgaatgatttcttttgaagatatattgtagtagatgttacaattttgtcgccaaactaaacttgctgcttaatgatttgctcacatctagtaaaacatggagtatttgtaaaaaaaaaaaaaaa

SEQ ID NO: 398919 - DNA, 1000 bp, Homo Sapiens; identical to SEQ ID NO: 116935

SEQ ID NO: 398920 - DNA, 1000 bp, Homo Sapiens; identical to SEQ ID NO: 288108

SEQ ID NO: 398921 - DNA, 1000 bp, Homo Sapiens; identical to SEQ ID NO: 222169

SEQ ID NO: 398922 - DNA, 1000 bp, Homo Sapiens; identical to SEQ ID NO: 116936

SEQ ID NO: 398923 - DNA, 1000 bp, Homo Sapiens; identical to SEQ ID NO: 116937

SEQ ID NO: 398924 - DNA, 989 bp, Homo Sapiens
ggagagtttggggatctacagcagccaaaggcttgtccctgactttatatggctgctcctggcgagcgactgagtcgtccgtgaggaaaaagaggcgaggcttttccgagatcgtctcagcgatggcgcttcggtcgcggttttgggggttgttctcggtttgcaggaaccctgggtgcaggttcgcagccctgtcaaccagctccgagccggcagcgaaacctgaagtggaccctgtggaaaatgaagctgtcgccccagaattcaccaaccggaacccccggaacctggagcttttatctgtagccaggaaagagcggggctggcggacggtgtttccctcccgtgagttctggcacaggttgcgagttataaggactcagcatcatgtagaagcacttgtggagcatcagaatggcaaggttgtggtttcggcctccactcgtgagtgggctattaaaaagcacctttatagtaccagaaatgtggtggcttgtgagagtataggacgagtgctggcacagagatgcttagaggcgggaatcaacttcatggtctaccaaccaaccccgtgggaggcagcctcagactcgatgaaacgactacaaagtgccatgacagaaggtggtgtggttctacgggaacctcagagaatctatgaataaatggaagcattaattgttttgaacatgtaaatataaatctgtcagccactacagccatcaaaagagagcatctggaagaacagccagcttggaagttttacagcaataatgttgcagtggaatattatttgtagttaaggtcatcctcctcccctttctgtttttttaaatcaagaactacgttctgcccctctcttgggcttcagaagcatctaagaaaagcagtcatcaattataattaactttcaaagggcaagtcagaagttgtttataaattacaaaataaaggcatattatgaactcttaaaaaaaaaaaaaaaaaaa

SEQ ID NO: 398925 - DNA, 1000 bp, Homo Sapiens; identical to SEQ ID NO: 288112

SEQ ID NO: 398926 - DNA, 963 bp, Homo Sapiens; identical to SEQ ID NO: 222173

SEQ ID NO: 398927 - DNA, 1000 bp, Homo Sapiens
gatccatatggaaagaataagttctccacttgtagaatttgtaaaagttctgtgcaccaaccaggttctcattactgccagggctgtgcctacaaaaaaggcatctgtgcgatgtgtggaaaaaaggttttggataccaaaaactacaagcaaacatctgtctagatgtattgatggaatttctggctttctaaatgattttactttctgccttgaattttcaaggcatagatgtcaacttacagaataacatgttttaagataattaagtttaaaccagagaatttgattgttactcattttgctctcatgttctaaacagcaacagtgtaactagtcttttgttgtaaatggttattttccttataagaattttaagaactaagtggcaaattccatgaaaatatttctcagttctgtatgcacttttatttaacattattcatataattctccccccaccactttatttatagatactgcaaaagtgagaaggagataatagatactttgctctgaatttggcatccagagttaacatttctcccctcactcccttgctggtgtcatagttattagaatcagcagcctcttaactaattgcggtttcataggatatataaatgtttcaagccattattgctgaatggttctttagttattaacctagacccaaatcaaagaccagttggatttatgatattttttatttgttcttgcagccaaagtgccagtttctttaatatgtgaccaagaacacaaggagcatccatatggccaaataaatacactgaattttagaaaaacatattactttgaattcaaattgtcatgaaaaccagaacagtgtttgtccatgttgcatgtaatgaaaataaatccctgctctgagaaaagctctttgaagcaaaaaccaaactttttttttttttttttacctcctgtcttgccccctaaaagaaataaatagagcaaacatctcgaaaaaaaaaaaaaaaaa

SEQ ID NO: 398928 - DNA, 1000 bp, Homo Sapiens; identical to SEQ ID NO: 288115

SEQ ID NO: 398929 - DNA, 1000 bp, Homo Sapiens; identical to SEQ ID NO: 288116

SEQ ID NO: 398930 - DNA, 801 bp, Homo Sapiens; identical to SEQ ID NO: 222174

SEQ ID NO: 398931 - DNA, 1000 bp, Homo Sapiens; identical to SEQ ID NO: 116941

SEQ ID NO: 398932 - DNA, 652 bp, Homo Sapiens; identical to SEQ ID NO: 116942

SEQ ID NO: 398933 - DNA, 1000 bp, Homo Sapiens; identical to SEQ ID NO: 116945

SEQ ID NO: 398934 - DNA, 1000 bp, Homo Sapiens
cctaatcccttatcgcctgcagaaggagccaaattaggcttctgtttccctgatctggcactccaaggggacacgccgacagcgacagcagagacatgctggaaaggtacaagctcatccctggcaagcttcccacagctggactggggctccgcgttactgcacccagaagttccatggggggcggagcccgactctcaggctcttccgtggtccgggaactggacagacatggcgtgcacagcctgggactcttggagcggcgcctcgcagaccctgggccccgcccctctcggcccgggccccatccccgccgccggctccgaaggcgccgcgggccagaactgcgtccccgtggcgggagaggccacctcgtggtcgcgcgcccaggccgccgggagcaacaccagctgggactgttctgtggggcccgacggcgatacctactggggcagtggcctgggcggggagccgcgcacggactgtaccatttcgtggggcgggcccgcgggcccggactgtaccacctcctggaacccggggctgcatgcgggtggcaccacctctttgaagcggtaccagagctcagctctcaccgtttgctccgaaccgagcccgcagtcggaccgtgccagtttggctcgatgccccaaaactaaccaccgaggtcccattcagctgtggcagttcctcctggagctgctccacgacggggcgcgtagcagctgcatccgttggactggcaacagccgcgagttccagctgtgcgaccccaaagaggtggctcggctgtggggcgagcgcaagagaaagccgggcatgaattacgagaagctgagccggggccttcgctactactatcgccgcgacatcgtgcgcaagagcggggggcgaaagtacacgtaccgcttcgggggccgcgtgcccagcctagcctatccggactgtgcgggaggcggacggggggcagagacacaataaaaattcccggtcaaacctc

SEQ ID NO: 398935 - DNA, 1000 bp, Homo Sapiens
aaatggaagatttttttgtaacttgttctagaagtcttaatatgggctgttgccatgaaggcttgcagaattgagtccattttctagctgcctttattcacatagtgatggggtactaaaagtactgggttgactcagagagtcgctgtcattctgtcattgctgctactctaacactgagcaacactctcccagtggcagatcccctgtatcattccaagaggagcattcatccctttgctctaatgatcaggaatgatgcttattagaaaacaaactgcttgacccaggaacaagtggcttagcttaagtaaacttggctttgctcagatccctgatccttccagctggtctgctctgagtggcttatcccgcatgagcaggagcgtgctggccctgagtactgaactttctgagtaacaatgagacacgttacagaacctatgttcaggttgcgggtgagctgccctctccaaatccagccagagatgcacattcctcggccagtctcagccaacagtaccaaaagtgatttttgagtgtgccagggtaaaggcttccagttcagcctcagttattttagacaatctcgccatctttaatttcttagcttcctgttctaataaatgcacggctttacctttcctgtcagaaataaaccaaggctctaaaagatgatttcccttctgtaactccctagagccacaggttctcattccttttcccattatacttctcacaattcagtttctatgagtttgatcacctgatttttttaacaaaatatttctaacgggaatgggtgggagtgctggtgaaaagagatgaaatgtggttgtatgagccaatcatatttgtgattttttaaaaaaagtttaaaaggaaatatctgttctgaaaccccacttaagcattgtttttatataaaaacaatgataaagatgtgaactgtgaaataaatataccatattagctacccaccaaaaaaaaaaaaaaaaaa

SEQ ID NO: 398936 - DNA, 1000 bp, Homo Sapiens
ggcagggatcggggccgcgactgggacgggcggctcgtcggagccctcagcttgcagcgaccacccgatcccaggctgttcgctgaaggaggaggagaagcagcattcgcagccgcagcagcagcaacttgacccaaacaaccccgccgcgaactggatccacgctcgctccacccggaaaaagcgctgtccctacaccaaataccagacgcttgagctggagaaagaattcctcttcaacatgtacctcacccgggaccggcgctacgaggtggccaggattctcaacctaacagagagacaggtcaaaatctggtttcagaaccgtaggatgaaaatgaaaaagatgagcaaggagaaatgccccaaaggagactgacccggcgcggtgctggcgggagcgctcaagggcagcggatttgttgttgttgctgttttcctttgtgggtgtttggtgcttgatttccagaaactctccagcgacttggacttcttcttctttttttttttctttttagatagaagtgactgtgtggttggtctctgaggtatttgggggactctgtatttgctcgtttacgtgttggaaaaaccaagtggctttggggtttcgccctatcccactccctctctttcctgctccattggttccttaagaaatgctatattttgtgagtgcaagctggcttggggagccctctcttgtgtaaatgtcccccatgtttctgaaaagtgctgtagtttagtcccctcacccccagcactgcccaaacaggggccaagtgcgccccaattccaagaatgaaggcagagcgacaacagtgcggacaccccggctgctagcccacggtgaagcccggcggggttgcccaccagttgcgaaagccccctttcctcagggagcacgcgggacctcggtggagatctccagtgaggcttagaggagcccagggcctcgggcgggttggggtttgtcctcagtgcattggacgcgctgctc

SEQ ID NO: 398937 - DNA, 1000 bp, Homo Sapiens
tatgtatgtccctgatgaatgggaggtgcctcgggagcagatctcgataatccgggaactgggccagggctcttttgggatggtatatgaggggctggcacgaggacttgaggctggagaggagtccacacccgtggccctgaagacggtgaatgagctggccagcccacgggaatgcattgagttcctcaaggaagcttctgtcatgaaagccttcaagtgtcaccatgtggtgcgtctcctgggtgtggtatctcagggccagccaactctggtcatcatggagttaatgacccgtggggacctcaagagccatcttcgatctttgcggcctgaggcagagaacaaccctgggctcccacagccagcattgggggaaatgatccaaatggctggtgagattgcagacggcatggcctaccttgctgccaacaagtttgtgcaccgagatctagcagcccgcaactgcatggtgtcccaggacttcaccgtcaagatcggggacttcgggatgactcgggacgtgtatgagacagactattaccgcaagggtgggaaggggctgctgcccgtgcgctggatggcccccgagtccctcaaagatgggatcttcaccacccactcggatgtctggtcctttggcgtggtactctgggagattgtgaccctggcagaacaaccctaccagggcctgtccaatgagcaggtgctgaagttcgtcatggatggcggggtcctggaggagctggagggctgtccccttcagctgcaggagctgatgagccgctgctggcagccgaacccacgcctgcgcccatctttcacacacattctggacagcatacaggaggagctgcggccctccttccgcctcctctccttctactacagcccggaatgccggggggcccggggctccctgcctaccaccgatgcagagcctgactcctcacccactccaagagactgcagccctcaaaatgggggtccagggcactga

SEQ ID NO: 398938 - DNA, 1000 bp, Homo Sapiens; identical to SEQ ID NO: 116948

SEQ ID NO: 398939 - DNA, 1000 bp, Homo Sapiens; identical to SEQ ID NO: 288122

SEQ ID NO: 398940 - DNA, 1000 bp, Homo Sapiens; identical to SEQ ID NO: 116950

SEQ ID NO: 398941 - DNA, 1000 bp, Homo Sapiens
cgccaagtggcgggtgcggctggccatcattgagtacatgcccctcctggctggacagctgggagtggagttctttgatgagaaacttaactccttgtgcatggcctggcttgtggatcatgtatatgccatccgcgaggcagccaccagcaacctgaagaagctagtggaaaagtttgggaaggagtgggcccatgccacaatcatccccaaggtcttggccatgtccggagaccccaactacctgcaccgcatgactacgctcttctgcatcaatgtgctgtctgaggtctgtgggcaggacatcaccaccaagcacatgctacccacggttctgcgcatggctggggacccggttgccaatgtccgcttcaatgtggccaagtctctgcagaagatagggcccatcctggacaacagcaccttgcagagtgaagtcaagcccatcctagagaagctgacccaggaccaggatgtggacgtcaaatactttgcccaggaggctctgactgttctgtctctcgcctgatgctggaagaggagcaaacactggcctctggtgtccaccctccaacccccacaagtccctctttggggagacactggggggcctttggctgtcactccctgtgcatggtctgaccccaggccccttcccccagcacggttcctcctctccccagcctgggaagatgtctcactgtccacctcccaacgggctaggggagcacggggttggacaggacagtgaccttgggaggaaggggctactccgcccacgtcagggagagatgtgagcatcccgggtcactggatcctgctgctgtaatgggaacccctcccccatttacttctccacctcccgtcctccccatcattggtttttttttgtgtgtcaactgtgccgtttttattttattccttttattttcccccttttcacagagaaataaaggtctagaagtaaaaaaaaaaaaaaaaaaaaaaaaaaaaaaaaaaa

SEQ ID NO: 398942 - DNA, 1000 bp, Homo Sapiens; identical to SEQ ID NO: 222179

SEQ ID NO: 398943 - DNA, 1000 bp, Homo Sapiens; identical to SEQ ID NO: 288127

SEQ ID NO: 398944 - DNA, 1000 bp, Homo Sapiens; identical to SEQ ID NO: 116951

SEQ ID NO: 398945 - DNA, 1000 bp, Homo Sapiens; identical to SEQ ID NO: 116953

SEQ ID NO: 398946 - DNA, 1000 bp, Homo Sapiens; identical to SEQ ID NO: 288130

SEQ ID NO: 398947 - DNA, 1000 bp, Homo Sapiens; identical to SEQ ID NO: 288132

SEQ ID NO: 398948 - DNA, 1000 bp, Homo Sapiens; identical to SEQ ID NO: 116956

SEQ ID NO: 398949 - DNA, 1000 bp, Homo Sapiens; identical to SEQ ID NO: 116957

SEQ ID NO: 398950 - DNA, 1000 bp, Homo Sapiens; identical to SEQ ID NO: 288134

SEQ ID NO: 398951 - DNA, 1000 bp, Homo Sapiens; identical to SEQ ID NO: 288137

SEQ ID NO: 398952 - DNA, 1000 bp, Homo Sapiens
tggctgccgccggaggctggaccacaagatggtacaccgtggcttctgtgccgccctctcgaagcccaaagccatccgcagagcgtgcaacccacaggaatgctcccagccagtgtgggtcacaggcgaatgggagccatgtagccagacctgtgggcggacaggcatgcaggtgcgctccgtgcgctgcattcagccgctacacgacaacaccacccgctccgtgcacgccaagcactgcaatgacgcccggcccgagagccgccgggcctgcagccgcgagctctgccctggtcgttggcgagccgggccctggtcccagtgctcagtaacctgtggcaacggcacccaggagcggccagtgccctgccgcaccgcggacgacagcttcggcatctgccaggaggagcgtcctgagacagcgaggacctgcaggcttggcccctgtccccgaaacatctcagatccctccaagaagagctacgtagttcagtggctgtcccgcccggaccccgactcgcccatccggaagatctcgtcaaagggccactgccaaggcgacaagtcaatattctgtaggatggaagtcttgtcccgctattgctccatcccaggctacaacaagctgtcctgcaagtcctgtaacctgtacaacaacctcaccaacgtggagggcaggatagagccaccgcctgggaagcacaacgacattgacgtgttcatgcctaccctcccagtgcccactgtagccatggaggtgcggccatcaccaagcacccccctggaggtccctctcaatgcctccagcaccaatgccacagaggatcacccagaaaccaatgccgtagatgaaccctacaaaatccatggcctggaagatgaagtccagccacccaacctaatccctcgacgaccgagcccctatgaaaagaccagaaaccaaagaatccaagagctcattgatgagatgcggaagaaagagatgctcggaaagttctaa

SEQ ID NO: 398953 - DNA, 1000 bp, Homo Sapiens; identical to SEQ ID NO: 116959

SEQ ID NO: 398954 - DNA, 1000 bp, Homo Sapiens; identical to SEQ ID NO: 116961

SEQ ID NO: 398955 - DNA, 1000 bp, Homo Sapiens; identical to SEQ ID NO: 116962

SEQ ID NO: 398956 - DNA, 1000 bp, Homo Sapiens; identical to SEQ ID NO: 288140

SEQ ID NO: 398957 - DNA, 1000 bp, Homo Sapiens; identical to SEQ ID NO: 222182

SEQ ID NO: 398958 - DNA, 1000 bp, Homo Sapiens; identical to SEQ ID NO: 116963

SEQ ID NO: 398959 - DNA, 1000 bp, Homo Sapiens; identical to SEQ ID NO: 116965

SEQ ID NO: 398960 - DNA, 1000 bp, Homo Sapiens; identical to SEQ ID NO: 288145

SEQ ID NO: 398961 - DNA, 1000 bp, Homo Sapiens
accccagaaacatcccctcctcctcctcctcctcctccttcatctactccttgttcagctcacctgaccccctcctccctgttcccttcctccctggaatcatcatcggaacagaaattctataactttgtgatcctccacgccagggcagacgaacacatcgccctgcgggttcgggagaagctggaggcccttggcgtgcccgacggggccaccttctgcgaggatttccaggtgccggggcgcggggagctgagctgcctgcaggacgccatagaccactcagctttcatcatcctacttctcacctccaacttcgactgtcgcctgagcctgcaccaggtgaaccaagccatgatgagcaacctcacgcgacaggggtcgccagactgtgtcatccccttcctgcccctggagagctccccggcccagctcagctccgacacggccagcctgctctccgggctggtgcggctggacgaacactcccagatcttcgccaggaaggtggccaacaccttcaagccccacaggcttcaggcccgaaaggccatgtggaggaaggaacaggacacccgagccctgcgggaacagagccaacacctggacggtgagcggatgcaggcggcggcactgaacgcagcctactcagcctacctccagagctacttgtcctaccaggcacagatggagcagctccaggtggcttttgggagccacatgtcatttgggactggggcgccctatggggctcgaatgccctttgggggccaggtgcccctgggagccccgccaccctttcccacttggccggggtgcccgcagccgccaccccccccagccttccctacggcctcacccgcaccccctcagagcccagggctgcaacccctcattatccaccacgcacagatggtacagctggggctgaacaaccacatgtggaaccagagagggtcccaggcgcccgaggacaagacgcaggaggcagaatgaccgc

SEQ ID NO: 398962 - DNA, 1000 bp, Homo Sapiens; identical to SEQ ID NO: 116967

SEQ ID NO: 398963 - DNA, 1000 bp, Homo Sapiens; identical to SEQ ID NO: 222186

SEQ ID NO: 398964 - DNA, 1000 bp, Homo Sapiens; identical to SEQ ID NO: 288147

SEQ ID NO: 398965 - DNA, 1000 bp, Homo Sapiens
gaggaaaccccagatggtaaaggctgttcaaccccaagagatgagtcagatgaagccccatgtgtatgatctgccagtagaaggcaatgagcccccagcctcttttcataaagacacaaacgcacttccccctactgttttcaaggataatccaatgtctacacctaaggactcaaatccaaaagcatgaagcaacagctaagcaagaactaatggctaaattatcaacttggaaaactggaaaatctggatggcagagaaatatactatctcaccagtatttgctctcgactcaagaaggttaacattttctgattcatgttagactttgaagagactaaagaaaattttcaagaggaacatatgcctgagaacctttgcatgaatttaaaatttcaattatccattcttataagaaggaagatgattgtaaagaaatatctccgaagttaaaatctgtaataggaattgattcattctctaatgaaaacaaaacataaaaacatcacactaatcttggaggaataagaaaaattgtacatccattaaatgtacaattgattgcaacatcttgattgttttaaccattaacttgtcaaattacaatcacagttaagaaaatgatgtaaaattctgttttgtggatctctttcctagattagcttctgaaatcattattagctatatcatttgaggttttctacaatttggtataactaagaatttaaaaatgttttatcatatatatttgtataattaattactggcatggttaaagtggttttcactttttaaatggagaaaatttcagttaaattaataggataaaccaggttgcgaactggtgacctgtaggccatgtttgcactgcaaatatatttggtctgaatgatattgatattggacacatagtacttttacatgttttgaatgtattgctaatatttaaaaattgagagatcttgcataaacaatagattcccaaaaaaaaaaaaaaaaa

SEQ ID NO: 398966 - DNA, 1000 bp, Homo Sapiens; identical to SEQ ID NO: 288149

SEQ ID NO: 398967 - DNA, 1000 bp, Homo Sapiens
ttcagtgtgagaatgtgacagaaattcccaatatgagtgatcatactactgtgcattgggctcgcttcaatgacataatgtgctggagtactgattaccatttggggatgaagggacctgatattggtgaagtgaaagatggaacagagtgtgggatagatcatatatgcatccacaggcactgtgtccatataaccatcttgaatagtaattgctcacctgcattttgtaacaagaggggcatctgcaacaataaacatcactgccattgcaattatctgtgggaccctcccaactgcctgataaaaggctatggaggtagtgttgacagtggcccaccccctaagagaaagaagaaaaagaagttctgttatctgtgtatattgttgcttattgttttgtttattttattatgttgtctttatcgactttgtaaaaaaagtaaaccaataaaaaagcagcaagatgttcaaactccatctgcaaaagaagaggaaaaaattcagcgtcgacctcatgagttacctccccagagtcaaccttgggtgatgccttcccagagtcaacctcctgtgacgccttcccagagtcatcctcaggtgatgccttcccagagtcaacctcctgtgacaccctcccagagtcaacctcgggtgatgccttctcagagtcaacctcctgtgatgccttcccagagtcatcctcagttgacgccttcccagagtcaacctcctgtgacaccctcccagaggcaacctcagttgatgccttcccagagtcaacctcctgtgacgccctcctagagccaacctcagttgatgccttcccagagtcaacctcctgtgacgccctcccagagccaacctcgggtgacaccctcccagagtcaacctcatgtgacaccttaccggagtaaaagtggtaaacaaaagcaatcagtaccaattccaaaaactgtatccagaaaaggtacattaaaaaaataattcctagtaaaaaa

SEQ ID NO: 398968 - DNA, 1000 bp, Homo Sapiens; identical to SEQ ID NO: 288152

SEQ ID NO: 398969 - DNA, 1000 bp, Homo Sapiens
gcccggtagccccggctgcccaccctggagggctgcgcccgcgccaggcgcggggacgtgtttctgggttctaggccctgcttccttgcccctttgctgcagaagggcagctgaaggctcaccctagaaaccgggcctggtgggtcttacccggctcactccctcccttgtccttacacatacaggaagacaagacctgagtggtgctgtctttgtgtccgtcgtgtatggctctccctgtcttcatttcttctcactctgtctctaaacctctctctctctcccttccccctcagtacttagtctacagacctatgtgcgtgtccctatccttctgtccttttctctcttcagctctccctgcctctcacacacaattttacatgccccgaggagccaagtttgggacatttaccctccaggcatctgtgtcccctcttgaagagaaaacacacagcttcacacatccaggcatagggggcaagctcttggggcatcaggaccctggagcaccaggtccttcctggaatattagatccacctggagcaccgggtctctctaagtctcacctggggaattcggtcccacctggggcaccagttcccacctagagcactgtgtcctgccctagagcacaaagacctgctcctcccgagactctctctgactgcagccaggcatagtacctttgcctgtgtttgctccctggtccacagatttggtggctgggcaggtgcctggacagtgatgaggtcttgccgccttaactgtcccccccagtcacttctcccacaggcccagcaggacgcagtcctgaggatcagggattctacagctgcattaaaatcaatcctatccaaaaaaaaaaaaaaaaaaaaaaaaaaaaaaaaaaaaaaaaaaaaaaaaaaaaaaaaaaaaaaaaaaaaaaaaaaaaaaaaaaaaaaaaaaaaaaaaaaaaaaaaaaaaaaaaaaaaaaaaaaaaaaaaaaaaaaaaaaaaa

SEQ ID NO: 398970 - DNA, 1000 bp, Homo Sapiens; identical to SEQ ID NO: 222187

SEQ ID NO: 398971 - DNA, 1000 bp, Homo Sapiens; identical to SEQ ID NO: 222188

SEQ ID NO: 398972 - DNA, 1000 bp, Homo Sapiens; identical to SEQ ID NO: 116969

SEQ ID NO: 398973 - DNA, 1000 bp, Homo Sapiens; identical to SEQ ID NO: 288156

SEQ ID NO: 398974 - DNA, 1000 bp, Homo Sapiens; identical to SEQ ID NO: 222190

SEQ ID NO: 398975 - DNA, 1000 bp, Homo Sapiens; identical to SEQ ID NO: 288158

SEQ ID NO: 398976 - DNA, 1000 bp, Homo Sapiens; identical to SEQ ID NO: 222192

SEQ ID NO: 398977 - DNA, 1000 bp, Homo Sapiens; identical to SEQ ID NO: 288160

SEQ ID NO: 398978 - DNA, 1000 bp, Homo Sapiens
gcagtcctgtcggacgagctgaaccatgcctccatcatcgacggcatccggctgtgcaaggcccacaagtaccgctatcgccacctggacatggccgacctagaagccaagctgcaggaggcccagaagcatcggctgcgcctggtggccactgatggggccttttccatggatggcgacatcgcacccctgcaggagatctgctgcctcgcctctagatatggtgccctggtcttcatggatgaatgccatgccactggcttcctggggcccacaggacggggcacagatgagctgctgggtgtgatggaccaggtcaccatcatcaactccaccctggggaaggccctgggtggagcatcagggggctacacgacagggcctgggcccctggtgtccctgctgcggcagcgcgcccggccatacctcttctccaacagtctgccacctgctgtcgttggctgcgcctccaaggccctagatctgctgatggggagtaacaccattgtccagtctatggctgccaagacccagaggttccgtagtaagatggaagctgctggcttcactatctcgggagccagtcaccccatctgccctgtgatgctgggtgatgcccggctggcctctcgcatggcggatgacatgctgaagagaggcatctttgtcatcgggttcagctaccccgtggtccccaagggcaaggcccggatccgggtacagatctcagcagtgcatagcgaggaagacattgaccgctgcgtggaggccttcgtggaagtggggcgactgcacggggcactgccctgagctctgggtaaggacgagaagagccaaggtccgcctactgccacagggtcaaaggaggttttcgatcagcccagaccagaggctctgagccctgaaccaaagtcccagagctgggctgggacgtgacctgtgctgagggctgtgagaatgtgaaacaacagtgtgaaaattggctgtgaaaaaaaaaaaa

SEQ ID NO: 398979 - DNA, 1000 bp, Homo Sapiens; identical to SEQ ID NO: 222193

SEQ ID NO: 398980 - DNA, 1000 bp, Homo Sapiens; identical to SEQ ID NO: 288162

SEQ ID NO: 398981 - DNA, 1000 bp, Homo Sapiens; identical to SEQ ID NO: 222194

SEQ ID NO: 398982 - DNA, 1000 bp, Homo Sapiens; identical to SEQ ID NO: 288165

SEQ ID NO: 398983 - DNA, 1000 bp, Homo Sapiens; identical to SEQ ID NO: 116972

SEQ ID NO: 398984 - DNA, 1000 bp, Homo Sapiens; identical to SEQ ID NO: 222195

SEQ ID NO: 398985 - DNA, 1000 bp, Homo Sapiens
agattatttacagcaagggggccatcagtggacgaagtcgctggagcaacctggagaaggtctgtacctccgtgaacctcaacaaggcctgccggaagcaggaggagctggattccagcatggaggccctgacgctaaacctgacagaagtggtgaaaaggcagaactccaaatccaagaagggctttaaccagattagcacatcgcagatcaaagtggacaaggtgcagatcatcggctccaacagctgcccctttgctgtgtgcctggaccaggatgagagaaagatcctgcagagtgtagtcagatgtgaggtctcaccgtgctacaagccagagaagagcgacctctcctcaccaccccagacgcctcctgacctgccggcccaggccgcacctgatctctgctcccttctctgcctgcccatcatgactttcagtggagctctgccctagtgtgggcccagcgccagactggacagaagccctggggcaacctcctcggccacccctccaggacagtccctctctgtggagaactgaatggccctgtgcagagccatagtcccactgtgggtcctgcaatgagcaggggctgggagtagagggtttctggggcctcagggttctgggaaagcaacagctatcagagagagaagggccagaccccatagcctcttagattcctggcagtagaaggagaaggatgggtaaattgacctctgaagtccctgaccattagcatggtctaggatcctttctagaaggaagatctgaggctctggtgctcagggggatggcttgggccttttctctcaaccttggctgagcctaccccttactttgccaaagacttgaggaccctgtatgtctggagttcagtcccctcctctgtggggctcaggtgattgaaatgtggatgaaacatttctctacttcaagaccacctctccctgcaaacaccacacacacatggcatgcatgtacgcacatgcgcaccg

SEQ ID NO: 398986 - DNA, 1000 bp, Homo Sapiens; identical to SEQ ID NO: 116975

SEQ ID NO: 398987 - DNA, 1000 bp, Homo Sapiens; identical to SEQ ID NO: 116976

SEQ ID NO: 398988 - DNA, 1000 bp, Homo Sapiens; identical to SEQ ID NO: 222198

SEQ ID NO: 398989 - DNA, 1000 bp, Homo Sapiens; identical to SEQ ID NO: 116977

SEQ ID NO: 398990 - DNA, 1000 bp, Homo Sapiens; identical to SEQ ID NO: 222200

SEQ ID NO: 398991 - DNA, 1000 bp, Homo Sapiens
tgccaaggaattcctccatcatcaaaggacaaacttggtgtctgggtatataaaaacaagttaatattttttggagggtatggatatttgcctgaagataaagtattgggaacttttgaattcgatgaaacatctttttggaattcaagtcatccaagaggatggaatgatcatgtacatattttagatactgaaacatttacctggagccagcctataactactggtaaagcaccttcacctcgtgctgcccatgcctgtgcaactgtcggaaatagaggcttcgtgtttggaggcagatatcgagatgctagaatgaatgatcttcactatcttaatctggatacatgggagtggaatgaattaattccacaaggcatatgcccagttggtcgatcttggcactcactaacaccagtttcttcagatcatctttttctctttggaggatttaccactgataaacagccactaagtgatgcctggacttactgcatcagtaaaaatgaatggatacaatttaatcatccatataccgaaaaaccaaggttatggcacacagcttgtgccagcgatgaaggagaagtaattgtttttggtggatgtgccaacaacttgcttgtccatcacagagctgcacacagtaatgaaatactaatattttcagttcaaccaaaatctcttgtacggctaagcttagaagcagtcatttgctttaaagaaatgttagccaactcatggaactgccttccaaaacacttacttcacagtgttaatcagaggtttggtagtaacaacacttctggatcttaaggcttcataaataatgcctatgatcaccttgcatggacagcaatcctgtaaacatcacagagtggcatcatttgtataattatatgcattgttgtagtttgcacctgttggttttaatgtgcatgtgaatggcctagagaacctatttttgtgtctaaagtttacaataaatgtatttaacaccaaa

SEQ ID NO: 398992 - DNA, 722 bp, Homo Sapiens
cagggtcagccatgtcatctgagcctcccccaccaccacagccccccacccatcaagcttcagtcgggctgctggacacccctcggagccgtgagcgctcaccatcccctctgcggggcaacgtggtcccaagcccactgcccactcgccggacgaggaccttctcggcgacggtgcgggcttcacaggtccccgtctacaaaggagtctgcaaatgcttctgccggtccaagggccatggcttcattaccccagctgatggcggccccgacatcttcctgcacatctctgatgtggaaggggagtatgtcccagtggaaggcgacgaggtcacctataaaatgtgctccatcccacccaagaatgagaagctgcaggccgtggaggtcgtcatcactcacctggcaccaggcaccaagcatgagacctggtctggacatgtcatcagctcctaggagatggtggaagcaccccttgtcctgtgcttgaggagactttgcggggaggaggcagcagacactggagatgacattcttccacacgagacggggcttcagccggggatggtccctctcaagtatctcctggaggaaggggtatggggggcaggtgtggggtgtggggtgttcccggccatcagcacagcctatgaccattgcaacaacctctcaccatctgaagagcattaaaagcatttaaaaaggaaaaaaaaaaaaaaaaaa

SEQ ID NO: 398993 - DNA, 1000 bp, Homo Sapiens
ctttctgcagcatctatagctctggcacgaattggaaatacaactgttatatctattttaacccaagttattgaagatttggtgcgtggtgaatttcttcagctcgggtcaaaagaaaatgagaatgaaagatttgcacactaccttgagaagacattcaagaagaccgccagcctgatagccaacagttgtaaagcagtctctgttctaggatgtcccgacccagtggtgcatgagatcgcctatcagtacggaaaaaatgtaggaatagcttttcagctaatagatgatgtattggacttcacctcgtgttctgaccagatgggcaaaccaacatcagctgatctgaagctcgggttagccactggtcctgtcctgtttgcctgtcagcagttcccagaaatgaatgctatgatcatgcgacggttcagtttgcctggagatgtagacagagctcgacagtatgtactacagagtgatggtgtgcaacaaacaacctacctcgcccagcagtactgccatgaagcaataagagagatcagtaaacttcgaccatccccagaaagagatgccctcattcagctttcagaaattgtactcacaagagataaatgacaactctttctgttctttctggcagctatcttaccagactgtgcctaaagaattttgtggaatacactttgtttgcttcatgtgcagataaccaaaaatcattttaaaagatatcaaacttattgatgggcaatttatttttttttattgcaaaagttttttcagaaaactttttaaatgtaattaataaaccacctgaatctgtcattctagtcctataaattataatcaaggtatcttgatggttatatgtggtattgtttacactgttaatatccacatgtaaggccattacacaaataaataaccaatgttaaaattcaaaaaaaaaaaaaaaaaaaaaaaaaaaaaaaaaaaaaaaaaaaaaaaaaaaaaaaaaaaaaaa

SEQ ID NO: 398994 - DNA, 1000 bp, Homo Sapiens; identical to SEQ ID NO: 222201

SEQ ID NO: 398995 - DNA, 1000 bp, Homo Sapiens; identical to SEQ ID NO: 288172

SEQ ID NO: 398996 - DNA, 1000 bp, Homo Sapiens; identical to SEQ ID NO: 116978

SEQ ID NO: 398997 - DNA, 1000 bp, Homo Sapiens; identical to SEQ ID NO: 116979

SEQ ID NO: 398998 - DNA, 1000 bp, Homo Sapiens; identical to SEQ ID NO: 224722

SEQ ID NO: 398999 - DNA, 1000 bp, Homo Sapiens; identical to SEQ ID NO: 288175

SEQ ID NO: 399000 - DNA, 1000 bp, Homo Sapiens
catggaagccaggacgtcaggctgaccaacacctcagaccttctgaagcagcccattgctggcccgccatgttgtaattttgctcatttttattaaacttctggtttacctgatgcttggcttcttttagggctacccccatctcatttcctttagcccgtgtgcctgtaactctgagggggggcacccagtggggtgctgagtgggcagaatctcagaaggtcctcctgaaccgtccgcgcaggcctgcagtgggcctgcctcctccttgcttccctaacaggaaggtgtccagttcaagagaacccacccagagactgggagtggtggctcacgcctataatccctgcgctttggcagtccgaggcaggggaattgcttgaactcaggagttggagaccagcctgggcaacatggcaaaacgcagtctgtacaaaaaatacaaaaaattagccaggtgtaggggtaggcacctggcatcccagctactccaggggctgaggtgacagcattgcttaagcccagaaggtcgaggctgcagtgagctgagatcacgccactgcactccagtctgggtgacagagagagaccatatccaaaaaaaaaaaaagttgccagagacgagtatgcccatgctccctctacctcactgccaccactcctgctgttaggagctgagtgtgtctccctaaaatttctatgttgaagtcttaacccttggtaccacagaatatcactgtatttggagatggggtctttagaaaggcacttaaattaaaatgagctcactgatatgggccccgatgcaatataattggtgtccttataagaaggggaggttaggacacgcaggaaagaccacatgaaggcccaggagtgggagggggaatagccatcgacaaactaagggggcctcagaggaaaccaaccctgctgacacctcaatcttagactctggcctcaaaaattgtaagaaaataaacttctgtcttttaagcca

SEQ ID NO: 399001 - DNA, 1000 bp, Homo Sapiens; identical to SEQ ID NO: 222202

SEQ ID NO: 399002 - DNA, 1000 bp, Homo Sapiens; identical to SEQ ID NO: 116981

SEQ ID NO: 399003 - DNA, 1000 bp, Homo Sapiens; identical to SEQ ID NO: 222203

SEQ ID NO: 399004 - DNA, 1000 bp, Homo Sapiens; identical to SEQ ID NO: 116982

SEQ ID NO: 399005 - DNA, 1000 bp, Homo Sapiens; identical to SEQ ID NO: 222204

SEQ ID NO: 399006 - DNA, 1000 bp, Homo Sapiens; identical to SEQ ID NO: 288182

SEQ ID NO: 399007 - DNA, 1000 bp, Homo Sapiens; identical to SEQ ID NO: 288183

SEQ ID NO: 399008 - DNA, 1000 bp, Homo Sapiens
gttcgtgatggggattgcagtgagcatgctgacctaccccttcctgctagttggcgacctcatggctgtgaacaactgcgggctgcaagctgggctccccccttactccccagtgttcaaatcctggattcactgctggaagtacctgagtgtgcagggccagctcttccgaggctccagcctgcttttccgccgggtgtcatcaggatcatgctttgccctggagtaacctgaatcatctaaaaaacacggtctcaacctggccaccgtgggtgaggcctgaccaccttgggacacctgcaagacgactccaacccaacaacaaccagatgtgctccagcccagccgggcttcagttccatatttgccatgtgtctgtccagatgtggggttgagcgggggtggggctgcacccagtggattgggtcacccggcagacctagggaaggtgaggcgaggtggggagttggcagaatccccatacctcgcagatttgctgagtctgtcttgtgcagagggccagagaatggcttatgggggcccaggttggatggggaaaggctaatggggtcagaccccaccccgtctacccctccagtcagcccagcgcccatcctgcagctcagctgggagcatcattctcctgctttgtacatagggtgtggtcccctggcacgtggccaccatcatgtctaggcctatgctaggaggcaaatggcccagctctgcctgtgtttttctcaacactacttttctgatatgagggcagcacctgcctctgaatgggaaatcatgcaactactcagaatgtgtcctcctcatctaatgctcatctgtttaatggtgatgcctcgcgtacaggatctggttacctgtgcagttgtgaatacccagaggttgggcagatcagtgtctctagtcctacccagttttaaagttcatggtaagatttgacctcatctcccgcaaataaatgtattggtgatttggaaaaaaaaaa

SEQ ID NO: 399009 - DNA, 1000 bp, Homo Sapiens; identical to SEQ ID NO: 222205

SEQ ID NO: 399010 - DNA, 1000 bp, Homo Sapiens
tacagcgccgcctcgacttcctcgccaagcacattttgcactgtaaggccaagtacggccgccggtctgggacttagtgtcaccgggaggaaaagagagagatctggggctggggtatggatgatggggggaagggcggtcgcctctgccactgtcagggaccagccggccaacgcccacccgcaaaggtgtctaaaaacttcagcttttcacccacctgcccctttctttcaatcccacgctgtttcctttcaaagttctgggaggacgaactcaccgaggcgagaagtgtaacattctctccacccagcttataaaaggattctttactgtgccagcacggggattggatccgaagaaactggctactggggtttggcccccgagtggccgtccctgtgggagatgcaccccattcttgggcccccctcattccctttccgaaaaaggaaaacttgcgtttgagccgttgagctaattctgcaattttctaccaaacagagcgctggtggccccggagcagggctgtgacattggctggtggagccccttcctgtgttctccctttgttccagcgccgcgatggtgagatcactgttccaagcagggggacggctcgcgataggacaaagagagcaggacctccagactctggggagccctgcagaccttgacaatttgcctgactcattcctgacctcttgtcattttggcctgaaggctacaaattcagggtcagctgtatgcactaagtcaaataatgaatttcttcctccctctcgcaaccgaccaaaattttgacaacgatgatgttcaccagaaggaaaaaaaaatcagttttatgcactttattttgttttgattttcattttttattaagaaaaaattttattttacagaatttaccttctctgtatatatgtgcataaagtgtggtgtaaatatactaaacaaacttatatttcaataaaagggagtttaaaatttaaaaaaaaaaaaa

SEQ ID NO: 399011 - DNA, 1000 bp, Homo Sapiens; identical to SEQ ID NO: 222206

SEQ ID NO: 399012 - DNA, 1000 bp, Homo Sapiens
agtggggccgagactattcagagccagtaggaggccgacagtcacagcactgcactgtggtgcggcttcatgtgatatgacagtggatgctaaggtgagagggatgcaggcatgggttgggggtggcccagagaaacttatgacagctgtacacaaactggccgctggagagatgcccgctgagggtattctcccctcaacccactgcctctgttcatccaagacttcctaggggccagcctagcagacaagagaccacaagggactggggatcagggtctgggctctgtcagccgccacctctgggaaagagaaaaggtttgggtccactgaacatcatgtttgtagacgctgacaggtggggtcctaatgagagccaacacatgctcactgccagctcctgtcctgagtactgggaagtttctcctgaagccctgtgagatggctctgtggctggtatcccgacttggaagatgaggaaactgaggcacacggcctggcctggcttcacacacatagccgactcaggagagggatgcccatgggggaacatgtgactctcagcattggaaggacagagctaggatgatggctttccggtggcactcgttcaggtttttgcccaagtctcagcttggccaaggcctgtcactgactggtttaccaaagtcgatgtgaggaggaggctttatacctgaggggatgatgttaacttcagacaagatggagctgctcacttttgccgggtttggtggccacttcacccccaaccctgtctcacccccattatccctcctcaattggaggctggacagagctgaataggaaagacttgctattgcctaaggctatgtgtgacaccctcctgaggacctccccaccccagtgtaatggcccttcatggcagggacagaaaggtggactgggggccatttgcttcctgtggccttcagcagaccaggccctgtccctacctggagcctcacctccaaggaaattc

SEQ ID NO: 399013 - DNA, 1000 bp, Homo Sapiens; identical to SEQ ID NO: 288187

SEQ ID NO: 399014 - DNA, 1000 bp, Homo Sapiens
attctgacggagttcacttcttcagaaccttcctgaaatgagcagaaattgttcactaggtcttcagaatggacgtccttctgccagagacttccagcgggcggctccaaaggcccaatgcagaggagcccgcggagcatgtgctgagggaagtctgcctggtgaggctggcaggtgggagtctaatgcagtcaggagcatttgcatgcagtgggtggagagtcggccaccaaaggaccgagttgcgctcggaatttgagctgaattccacagccttactttgtttcctgaagtgatagcctactaatgctggcaagcagatgcttaatagtaaatttctaaaatccccgggtctttatcattcagtttgttctgtgcacctgaggcgctcagccgtgggaggaccattttgcgagtgtagccctgtttcactcggatcaggttggcacggccgcctgcgtgtctgtccacctcatccctccgtgtatctgagggagtaaaggtgaggtctttattgcttcactgcctaattttctcacccacattcgctgaagcgatggagagtcgggggccagtagccagccaaccccgtggggaccggggttgtctgtcatttatgtggctggaaagcacccaaagtggtggtcaggagggtcgctgctgtggaaggggtctccgttcttggtgctgtatttgaaacgggtgtagagagaagcttgtgtttttgtttgtaatggggagaagcgtggccaggcaggtggcacgtggcatcgcatggtgggctcggcagcaccttgcctgtgtttctgtgagggaggctgctttctgtgaaatttcatttatatttttctatttttagtactgtatggatgttactgagcactacacatgatccttctgtgcttgcttgcatctttaataaagacatgttcccggcaaaaaaaaaaaaaaaaaaaaaaaaaaaaaaaaaaaaaaaaaaaaaaaaaaaaaaaaaaaaaaa

SEQ ID NO: 399015 - DNA, 1000 bp, Homo Sapiens; identical to SEQ ID NO: 222208

SEQ ID NO: 399016 - DNA, 1000 bp, Homo Sapiens; identical to SEQ ID NO: 220419

SEQ ID NO: 399017 - DNA, 1000 bp, Homo Sapiens; identical to SEQ ID NO: 288189

SEQ ID NO: 399018 - DNA, 1000 bp, Homo Sapiens
tgccttccaaaaatctcctgaatccgggctctgtagcaggtcctcttctttctagcttctgacaagtctgtcttctcttcttggtttcataccgttcttatctcctgcccaagcatatatcgtctctttactcccctgtataatgagtaagaagcttcttcaagtcatgaaacttattcctgctcagaataccggtgtggcctttctggctacaggcctccactgcaccttcttagggaagggcatgccagccatcagctccaaacaggctgtaaccaagtccacccatccctggggcttcctttgctctgccttattttcaattgactgaatggatctcaccagattttgtatctattgctcagctaggacccgagtccaatagtcaatttattctaagcgaacattcatctccacactttcctgtctcaagcccatccattatttcttaacttttattttagctttcgggggtacatgttaaaggctttttatataggtaaactcatgtcgtggaggtttgttgtacagattatttcatcacccaggtattaagcccagtgcctaatattgtttttttcggctcctctccctcctcctaccttccgccctcaagtagactccagtgtctgttattcccttctttgtgtttatgaattctcatcatttagctcccacttataagtgaggacatgcagtatttggttttctgttcccatgtttgctaaggataatggtttccagttctaccgatgttcccacaaaagacataattttcttttttaaggctgcttagtattccatggtatctatgtatcacattttctctatccaatctattgttgactcacatttagattgattccatgtttttgctattgtgaatagtgctgcaatgaacattcgtgtgcatgtgtctttatggtagaaagatttatatttctctgagtatgtatccagtaatagcccattcatttattgcataaaattctaccaatac

SEQ ID NO: 399019 - DNA, 1000 bp, Homo Sapiens
cttccccgcctaccagcacttagcatcccccgccctggtctcctggaactggtgaggccgcagggcggcacctggggctaccctcgactttggagcgcgctctgcgattggagcagggccggagccgaacgcctggaacgctctccgtccgcctccctgcagccccatctccttgggcgccagggtccctggcgcgccctcatcagccgtcgcgcaagcacacacgagggacgtgtgccagagccccctccctcaccttccctccaccgccagccccagagttagattttatgcttgggccttatttgtatatttttaaatagcgatttgtataggaagcaagttatttttttaaaaaatagagtatttttcctcgtagttcgagaataaaatgtgtggggttgggtcccctgcgcgcctgcggggaacgtaggcgggagtcgtgccccccagaccggtgttcgcatcgctggctcgccccttgactggctaagtggggcccggccccagctggatcgaagggcgggttgcagtcccgacacggctttaggaagatacctgggggatggaggggtggtgatgtcagggttgggcgcgggaagaaaaggagaggaggaagctgaggcaactttgggattcttgtcagcgggaggcgtcactggccccagagtgactccgactctccgctgggctcccagagctgctggcgtttcgaataccgaaaagtcaaccctgtggaccacgacagggcagaaggagtttctccggagatgagccggcgaggccaggtgcggggcgcgctgcaccggagcagcccaggccgggccgcaagctgtttccagagtgcaggagccaagtgctcggggaccctttgaaaagtgcctggggacctgaagagcaccggggaatttgtaacccctatttaagcctgcaagtgcctaagttaaaaaaaaaaaaaaaaaaaaaaaaaaaaaaaaaaaaaaaaaaaaaaaaaaaaaaa

SEQ ID NO: 399020 - DNA, 1000 bp, Homo Sapiens
aaatacgttatatcacttcacagtgagggcttacaatggagctggatatgggccacctagcagtgaagtgagtgcaaccaccaagaaatcccctcctagtcaagcacctagcaacctcaggtgggagcagcaaggctctcaggtttctctgggctgggaacccgtcataccattagccaacgaatctgaagttgtgggttacaaggttttttataggcaagagggtcacagcaacagccaagttattgaaacacagaaacttcaagcagtagtaccactcccagatgctggagtctatattattgaagttcgagcatatagtgaaggaggagatggaacagctagttctcaaattagggtaccatcatattcaggtggaaaaatcacaagtgcacagtcgacccttcactctctctccacatcttcgtcatcagtcaccttgctcttggcattgatgattccttcaacttcctggtgaaaactgctgacttaatttgcttttgtttgctttagcttggtaacagcggtgaatagagtgtagtgtaagtggagaaccaggatcctgagatgagcttgagctttaaaaacttgggactatacatggtgaacttacaggaggttaggggggaaatattacttatccatcaggtttctctttggtttttgtaaacggagaggacagttcttagtccagtaaaaatatgcagattgtatgtaatgaatttttgtaaacaaaggtaatttctgtcaaatgtattctttacttttttaatatgttgggattttattttatatctgatgactccgagtgtgtgccatccatttgttaagtaactggcctttagcagatctgtttcaaaaacaaatacaaaaatgagaatgaaaagtttgcttaagactaagtccagtgtttttcattttccctttggctgaatatttcaattgacaaaccagcaggacatatgaaaaatgcttcagtgatgtggtccattataagata

SEQ ID NO: 399021 - DNA, 1000 bp, Homo Sapiens; identical to SEQ ID NO: 288190

SEQ ID NO: 399022 - DNA, 1000 bp, Homo Sapiens
tgtggaattcaggaatggacaactggtcgtggacaaccatgagatctctgtctaccagtgcaaagagcccaaacagatcccctggagggctgtcgggagcccctacgtggtggagtccacaggcgtgtacctctccatacaggcagcttcggaccacatctctgcaggtgctcaacgtgtggtcatctccgcgccctcaccggatgcaccaatgttcgtcatgggtgtcaatgaaaatgactataaccctggctccatgaacattgtgagcaacgcgtcctgcaccaccaactgtttggctcccctcgccaaagtcatccacgagcgatttgggatcgtggaagggttgatgaccacagtccattcctacacggccacccagaagacagtggacgggccatcaaggaaggcctggcgagatgggcggggtgcccaccagaacatcatcccagcctccactggggctgcgaaagctgtgaccaaagtcatcccagagctcaaagggaagctgacagggatggcgttccgggtaccaaccccggatgtgtctgtcgtggacctgacctgccgcctcgcccagcctgccccctactcagccatcaaggaggctgtaaaagcagcagccaaggggcccatggctggcatccttgcctacaccgaggatgaggtcgtctctacggacttcctcggtgatacccactcgtccatcttcgatgctaaggccggcattgcgctcaatgacaatttcgtgaagctcatttcatggtacgacaacgaatatggctacagtcaccgggtggtcgacctcctccgctacatgttcagccgagacaagtgaaacgggaaggtcctttctttccttcccaggggccggggccggaacatgtgcctcccgttccagcatctggctgcccgggggaggaaggacacccggggcgggcgccccacgccgatgggtccatggtgaaataaaaaacagtgctcgaaaaaaaaaaaaaaa

SEQ ID NO: 399023 - DNA, 1000 bp, Homo Sapiens; identical to SEQ ID NO: 224680

SEQ ID NO: 399024 - DNA, 1000 bp, Homo Sapiens; identical to SEQ ID NO: 116986

SEQ ID NO: 399025 - DNA, 1000 bp, Homo Sapiens
gccccggggggcggccgtagcctcagcgcgggctcacagacctcaggcttctccggctccctcttctctcctgcctcctgctccatcctctccggctcgtccaatcagcgagagaccgggggcctcctgtcgcctagcacaccattcggtgcctcgaacctcctggtgaaccccctggagccccaaaatgcagataagatcaagatcaagatcgcagacctgggcaacgcctgctgggtgcacaagcacttcacggaagacatccagactcggcagtaccgggccgtcgaggtgctgatcggcgccgaatacggccccccggcagacatctggagcacagcctgcatggccttcgagctggccactggtgactacctgttcgagccgcattctggagaagactacagtcgtgatgaggaccacatcgctcacatagtggagcttctgggggacatccccccagccttcgccctctcaggccgctattcccgggagttcttcaaccggagaggagagctgcggcacatccacaatctcaagcactggggcctgtacgaggtactcatggaaaagtacgagtggcccctagagcaggccacacagttcagcgcctttctgctgcccatgatggagtacatccccgaaaagcgggccagtgccgctgactgcctccagcacccctggctcaacccctaggcccggctgtggctccacctccagctctccgtgccttaagggaaaagcgggacagctcccaccaccctgctgggcgccagttctccacaaccacagggcagagagacgctggagccaggcccggctctcagagcgtgttctgcctgagacccccgtgagggctctcggagaaagtgtgtgtattcctttcttaataaagtgtggactgaacaaaaaaaaaaaaaaaaaaaaaaaaaaaaaaaaaaaaaaaaaaaaaaaaaaaaaaaaaaaaaaaaaaaaaaaaaaaaaaaaaaaaaaaaaaaaa

SEQ ID NO: 399026 - DNA, 1000 bp, Homo Sapiens; identical to SEQ ID NO: 116987

SEQ ID NO: 399027 - DNA, 1000 bp, Homo Sapiens; identical to SEQ ID NO: 116988

SEQ ID NO: 399028 - DNA, 1000 bp, Homo Sapiens
tgagaacacatccaagcagtattctctcttcaaagtcaccagggcttctagccagtgggtggtcggcccttcttactttgtggaatacttaattaaagaatcaccatgtactaaatcccaggccagcagctgttcacttcagtcctccgactctgtgcctgttggtctttgcaaaggttctctgactcgaacacactgggaaaagtttgtctctgtgacttgtgacttctttgaatcacaggctccagccactggaagtgaaaactctgctgttaaccagaaacctacaaaccttcccaaggtggaagaatcccagcagaaaaacacccccccaacagactccccctccaaagctgggccaagaggatctgtccaatatcttcctgacttggatgataaaaattcccaggaaaagggccctcaggaggcctttcctgtgcatctggacctaaccacgaatccccagggagaaaccctggatatttccttcctcttcctggagcctatggaggagaagctggtggtcctgcctttccccaaagaaaaagcacgcactgctgagtgcccagggccagcccagaatgccagccctcttgtccttccgccatgagaatcacacagagtcttctgtaggggtatggtgcgccgcatgacatgggaggcgatggggacgatggacagagacagagcgtgcacacgtagagtggctagtgaaggacgcctttttgactcttcttggtctcagcatgttgactgggattggaaataatgagactgagccctcggcttgggctgcactctaccctgtacactgccttgtaccctgagctgcatcacctcctaaactgagcagtctcataccatggagagatgcctctcttatgtcttcagccactcacttataaagatacttatcttttcagcagtatatatgtgctgaaatctcagcatgaaagcattgcatgagtaaagatactttccctaacaaaaaaaaaaaaaa

SEQ ID NO: 399029 - DNA, 1000 bp, Homo Sapiens; identical to SEQ ID NO: 288195

SEQ ID NO: 399030 - DNA, 1000 bp, Homo Sapiens
actgctcatcttaattaatttttgctgatatattgcttcatctactagaatatttcacatcacctataacaactgcacagtgttctgacacatttgagtgtccaaaatagccaattaacacaaccaaatacaactgggccaatataaacatgtttgaattgtcaaatataaaataatgttattgcaatacatacaaaaaagttaaagattttatgtatcactaacattagaagttttttgcaccactaattttttaaaaatggaaggtaaactgcatagcccagagaaagataagtaaatatttaagaacatattgaacaactttgctatttaaagatattatccaagtacataaattactccgttctctatcagttaaagctattgaatataatacttagctttacaagagaaaacccatatttgatgggcagagattatatccctatcttctttttcatgtaaaccactggtcacaaatgaactgatctctgtatcccattattactataagaggtgggaatcccaaaactgcttagattgcagtacatgagtctacacaaagacttcaacaattgcacatcttcattctcccaactgagtgtagtatgtggagcataaaacagcatatttcttagtatttcatgaatatcagatggtctttaaatgtctctttatggatgtattgttcacattatggctttaaaataatgaatatgtaaaagtgaggtagtgaacatcctaaatttctacactggaattactaaataatcttatttcataaaatgggaaatatatgttaaatgacatcactggatgaacttgaagatcttttacttgttaacaaaaaaatactatggacagctttctgattgttggggtaaatagcaaatgttcaaactttgcaggcattttgacattcatcataacaacacaattcctagacattgtattatataattaaagccaaaacctctaaagctaaaaaaaaaaaaaaaaa

SEQ ID NO: 399031 - DNA, 891 bp, Homo Sapiens; identical to SEQ ID NO: 288196

SEQ ID NO: 399032 - DNA, 1000 bp, Homo Sapiens; identical to SEQ ID NO: 222210

SEQ ID NO: 399033 - DNA, 1000 bp, Homo Sapiens; identical to SEQ ID NO: 288199

SEQ ID NO: 399034 - DNA, 1000 bp, Homo Sapiens; identical to SEQ ID NO: 116990

SEQ ID NO: 399035 - DNA, 1000 bp, Homo Sapiens
cagctgtcatcaaccttgtcccgttgtgttaaagacatagtaggatttgccatcatgttttttataatattctttgcttatgcccagttaggatttcttgtttttggatcacaagttgatgacttttccacttttcagaattccatatttgcacaatttcgaattgttcttggagattttaattttgctggtattcagcaagccaatcctatcttgggacccatttacttcatcactttcatcttttttgtgttctttgtcctgctgaatatgttcttggcaattattaatgatacctattctgaagtgaaagctgactattcaataggcagaaggccagattttgaacttggcaaaatgattaaacagagttacaaaaatgttctcgagaaattcagactgaagaaagctcaaaaagatgaagacaagaaaaccaaaggcagcggagatttggctgaacaagccagaagagaaggctttgacgaaaatgagattcaaaacgcagagcagatgaaaaaatggaaagagaggcttgagaaaaagtattattctatggaaattcaagatgactaccagcctgtcactcaagaagaatttcgagatggcaccacaaccaagtacaaaatgagattctctctgagtgcctgacaaaacgaatttaagtaccagccaagtacacacgatgatagcttcaaggaatacaactgactttatgatatgaattttcaaggaacgtatcttatatggattttgaagaatcttgtttgcttataagaacttcaagaagcctaagcttggctttaattttcttgtactctctgtactcctcaagcactggaacacgatcctctttctgggcattcctaggggagaaaataaaatttgtaatgttctagagatcatttggaaaaaaagatccaaaagttgtcttaatatgagacatactgttactaaacataagttcaaataaaaagttgttctgaaaaaaaaaaaaaaaaaa

SEQ ID NO: 399036 - DNA, 1000 bp, Homo Sapiens; identical to SEQ ID NO: 222212

SEQ ID NO: 399037 - DNA, 1000 bp, Homo Sapiens; identical to SEQ ID NO: 222213

SEQ ID NO: 399038 - DNA, 1000 bp, Homo Sapiens; identical to SEQ ID NO: 288202

SEQ ID NO: 399039 - DNA, 1000 bp, Homo Sapiens; identical to SEQ ID NO: 288204

SEQ ID NO: 399040 - DNA, 1000 bp, Homo Sapiens; identical to SEQ ID NO: 288205

SEQ ID NO: 399041 - DNA, 1000 bp, Homo Sapiens; identical to SEQ ID NO: 222215

SEQ ID NO: 399042 - DNA, 1000 bp, Homo Sapiens; identical to SEQ ID NO: 116991

SEQ ID NO: 399043 - DNA, 1000 bp, Homo Sapiens; identical to SEQ ID NO: 116992

SEQ ID NO: 399044 - DNA, 1000 bp, Homo Sapiens; identical to SEQ ID NO: 116993

SEQ ID NO: 399045 - DNA, 1000 bp, Homo Sapiens; identical to SEQ ID NO: 222217

SEQ ID NO: 399046 - DNA, 1000 bp, Homo Sapiens; identical to SEQ ID NO: 116995

SEQ ID NO: 399047 - DNA, 1000 bp, Homo Sapiens; identical to SEQ ID NO: 116996

SEQ ID NO: 399048 - DNA, 1000 bp, Homo Sapiens; identical to SEQ ID NO: 222218

SEQ ID NO: 399049 - DNA, 1000 bp, Homo Sapiens; identical to SEQ ID NO: 222219

SEQ ID NO: 399050 - DNA, 1000 bp, Homo Sapiens; identical to SEQ ID NO: 116997

SEQ ID NO: 399051 - DNA, 1000 bp, Homo Sapiens
agggcaagtaaattgaccatgagaaaagaacacagttattaaacactgttgacaggaaaattctccttgataacataggacaattaatggaaaaaaaaattctcattatttgcaaagaatgaacaagttaatgaacaaacaaactagatttggtatgttttcagcttttgtatcatgtttaattgtttaatttggttgaaaaactgcagttgagaaatcagatagcaatatagacattcacagcagctctgtggataccatgtaattgtcaggtaatttcagaatgttgaaaattattcagtgcagccctcatagtatcatacttgaagaaattgattaccgttccactaaattgttgaagataaattatttttaaaggttatgaaaactaagttatattaattcatatgtttgatttttaaatcccacctcctcaagctatccaattttctgactttgaaaataaccatgagagatgccacatttctctctgggaaactaccactcaaagaataattgttaaaaattaagcttttaggtattagaagctgttataaagtataaaattaagatataagcagatcacatgtaaatcattcctaaagcacaagaaaagaatgtgccttgatgtacatatattactaagttgcctctcccagtttactttaaaaatggctttaaggataaagaataaatgtgatagctgtgcatgcattatatatttgcatttgcaaatttcccattgttttaacagctgtgtggctgactttcaattttaagacgtgaattgacatacagcccataactttataatggctgctcatttatcttatctttcagttagtggaaaaacatttcaacctgactaaaatttggaattgtgtctttttatgttccatcctctgttgttactagatttagtttaaaaattgtgtatgaccattaatgtatgtcataaacatgtaaataaaagatgttgaatcttgttgaaagcgcggcc

SEQ ID NO: 399052 - DNA, 1000 bp, Homo Sapiens; identical to SEQ ID NO: 222221

SEQ ID NO: 399053 - DNA, 1000 bp, Homo Sapiens; identical to SEQ ID NO: 288217

SEQ ID NO: 399054 - DNA, 1000 bp, Homo Sapiens; identical to SEQ ID NO: 116998

SEQ ID NO: 399055 - DNA, 1000 bp, Homo Sapiens; identical to SEQ ID NO: 288219

SEQ ID NO: 399056 - DNA, 1000 bp, Homo Sapiens
cactcagcggagccgtgaggacctctcagctctgacccgacagggccgctacccgccctacgaacgagtggtgttgcgagaagccagtttcaagcgcccggtagtgatcctgggacccgtggccgacattgctatgcagaagttgactgctgagatgcctgaccagtttgaaatcgcagagactgtgtccaggaccgacagcccctccaagatcatcaaactagacaccgtgcgggtgattgcagaaaaagacaagcatgcgctcctggatgtgaccccctccgccatcgagcgcctcaactatgtgcagtactaccccattgtggtcttcttcatccccgagagccggccggccctcaaggcactgcgccagtggctggcgcctgcctcccgccgcagcacccgtcgcctctacgcacaagcccagaagctgcgaaaacacagcagccacctcttcacagccaccatccctctgaatggcacgagtgacacctggtaccaggagctcaaggccatcattcgagagcagcagacgcggcccatctggacggcggaagatcagctggatggctccttggaggacaacctagacctccctcaccacggcctggccgacagctccgctgacctcagctgcgacagccgcgttaacagcgactacgagacggacggcgagggcggcgcgtacacggatggcgagggctacacagacggcgagggggggccctacacggatgtggatgatgagcccccggctccagccctggcccggtcctcggagcccgtgcaggcagatgagtcccagagcccgagggatcgtgggagaatctcggctcatcagggggcccaggtggacagccgccacccccagggacagtggcgacaggacagcatgcgaacctatgaacgggaagccctgaagaaaaagtttatgcgagtacatgatgcggagtcctccgatgaagacggctatgactggggtccggccactgacctgtga

SEQ ID NO: 399057 - DNA, 1000 bp, Homo Sapiens; identical to SEQ ID NO: 288220

SEQ ID NO: 399058 - DNA, 1000 bp, Homo Sapiens; identical to SEQ ID NO: 222222

SEQ ID NO: 399059 - DNA, 1000 bp, Homo Sapiens
gcagaaagccctcatggccttgtgtgacctcatgcatgaccccgagtgtatctacaaggccatgaacataggctgtatggagaacctgaaagctttgctgaaggatagcaacagtatggtgcgcataaagaccaccgaggtgctccacatcacggcaagccatagcgtgggcagatacgcctttctagagcacgacatcgtccttgccctgtccttcctgctgaatgaccccagcccagtctgccgggggaacctgtacaaggcatacatgcagctggtccaggtgcctagaggggcccaagagatcatcagcaaaggtctgatttcctcactggtatggaagctgcaggtggaggtggaggaggaggagttccaggagttcatcctggacacactggtcctctgcctgcaggaggatgccaccgaggccctgggcagcaatgtggtgcttgtcctgaagcagaagctcctcagcgccaaccagaacatccgcagcaaggccgcccgtgcgctccttaatgtcagcatatctcgagagggcaagaaacaggtgtgtcattttgacgtcatccccatcctggtccatctgctgaaagacccagtggagcatgtgaagtctaacgctgccggtgccctgatgttcgccacagtgatcactgaagggaagtatgcggccctggaggcacaagccatcggcctgctcctggagctgctgcactcccccatgaccatagcgcgcctgaatgccaccaaggcccttaccatgctggcagaggcccccgagggccgcaaggccctgcagacgcacgtgcccactttccgtgccatggaggtggagacttacgaaaagcctcaagtggccgaagccttacagcgggcagcccggatcgccatcagtgtcatcgagttcaaaccctgagcccttcattcacctctgtgagtgaataaatgtgctaagtctctttaaaaaaaaaaaaaaaaaaaaaaaaaaaaaaaaaaa

SEQ ID NO: 399060 - DNA, 1000 bp, Homo Sapiens; identical to SEQ ID NO: 222224

SEQ ID NO: 399061 - DNA, 1000 bp, Homo Sapiens; identical to SEQ ID NO: 117000

SEQ ID NO: 399062 - DNA, 1000 bp, Homo Sapiens; identical to SEQ ID NO: 288224

SEQ ID NO: 399063 - DNA, 1000 bp, Homo Sapiens; identical to SEQ ID NO: 222225

SEQ ID NO: 399064 - DNA, 1000 bp, Homo Sapiens
tcccaggttcaagcaattctcctgcctcagcctcccaagtagccgggattgcaggcgcgcgccaccaggccaggctaatttttgtatttttagtagagacgggtttcaccgtgtcggccagctggtctcgaactcctgacctcgtgatccgcccgcctcagcctcccaaagtgttaggattaggggcatgagccaccgcacccagcttgcattgaatattttcaaggagctaaaagaagattttaaatggtctcacaaaaacagataaatatttgcacagatgggtgtgctaatcattgtgccttgatggttccacgatgtatccgggtgtggaaatctcactgggtctctctcaaggccactcggctactcaggacagggctggaatttaaagcctgtccgattctgaggtctcttctctcatctagcactgagtcaagcaatcagcaggctgggcaccccttagccataagttttcaggaaataaattccttgagggcattgactttacaaaagagggagcagcaatggcctagagtctcaggaacaagacaggtgcactgaggagatgaaggccgggaccccctgcccaacctgtatggcgggtctgtacttattttgtttacccccaatttaaaacgtttttttttattgcaggttgtttgtttgatatggtttggctgtgtccccacccaaatcttatctagaattgtaatcagaattataatccccatgtgttgggggagggacctggtgggaggtgataggatcatgggggtggttcccccatgctgttctgatagtgagtgagttatcacgagatctgatggttttgtaagtggtggtttcccctgctcttctctcttgcctgccaccatgtaagatgtgcctggttccccttccgccatgattgtaagtttcctgaggcctcccccgccatgtggaactgtgagtcaattacactctttccattgaaaaaaaaaaaaaaaaaaaaaaaaaa

SEQ ID NO: 399065 - DNA, 1000 bp, Homo Sapiens; identical to SEQ ID NO: 288225

SEQ ID NO: 399066 - DNA, 1000 bp, Homo Sapiens
tagtttgcaaatgctttttctagattaatgatttttcaatcattagggtactagacacatcagcctaaagtggcatctggaattgaatggatttactgataatgatcagtctttagtcttccctttgttatatgactttataggttatgattgatcaaatttacgttttactaatggtaagggtgagggtcatagggcaggttttgggttttctagtactgttgaaaactgcaagtattggctatttgtatacttagccataacttggtgaaaaaaaacctgagcagtgtctatgtattaatgcgttggaaagaaagctgcttgtgtttgctttgttaattgcctcaggatatttcttttaaaataagctgttttaagaggaacagaagggaaatctgctacctagtctatacacagcgtgaacctcacagggggcttctgataccctcaaacatggagaacagtaagggagcagagtggttaaggactttcaggaacttaactattctggaataaggaatgaatcaactgaccttgggccagcaggtttttaactaaattgttacttgcctttctcacccagttaatcagtctctgtacttgtttccctttttgaaacaagtgtcttggttaactaattctgttttatggttgtgctaaattcatagcaggtgccttattctttgcttttagtcaaaccattccatatcagaattttccttggtttactatagatatttggctttaagttgttgtttgtgttttttaatgtacaatgttctgataaatttgactgttaaattgctatagctagcaatcattttacatatgtaaaaaattgcattccctttgtatttcatgtgtaattcaccaattaagtgcagtttatattcaggttggattatgcatgtttaggtaaacgaaagctgtgtcttacttgatttattctttaaaaataaagttccctgaatatttgaaaaaaaaaaaaaaaaaaaaaaaa

SEQ ID NO: 399067 - DNA, 1000 bp, Homo Sapiens; identical to SEQ ID NO: 288226

SEQ ID NO: 399068 - DNA, 926 bp, Homo Sapiens; identical to SEQ ID NO: 29969

SEQ ID NO: 399069 - DNA, 1000 bp, Homo Sapiens; identical to SEQ ID NO: 288229

SEQ ID NO: 399070 - DNA, 1000 bp, Homo Sapiens; identical to SEQ ID NO: 288230

SEQ ID NO: 399071 - DNA, 1000 bp, Homo Sapiens; identical to SEQ ID NO: 222226

SEQ ID NO: 399072 - DNA, 1000 bp, Homo Sapiens
tgacagtcaatatctgtcacctagtaagcaaccaagagaccctcccttcatggcttccgatcagatggcaagggtctttgcagatgtgcattccagagccagccgggattccagtgagatgggtgctgttcttgagcagcttgaccaccccaacagggatctgggcagagagtctgtggatgcagaggaagttgtgagagaaattgataagcttttgcaagactgccggggaaacgaccctgtggctgtgagaaagtgaaaaaagaaaaaaaaaaaggcattggcattttcttgtctcttctgttgatttaaaaatgatccctcctggtgataacccattttacagggatgaagaaagaccaatgctgctttaaggcttttagtgaacatctgaagtgcccacaagtatgttctttccactgctgatttctttttcagagataacaatggtttcgttttgaccaaacttgtattaggacagaattaatgatgcttaaagagaaaagaaaaaaagagagaagaaaaaggagagatgaaaaaggaggatgaggagaagaattaccttttgacaatctgttaggaaggtatgcagtgtgagaactgaagtatttctgatcactctcagactgtcctccgtgatttatgctgacttaactgtttacctataaaccccatacaaagcagggtcataatttgtgatctgtggtggatttctagcagtcatcacaggcttctactgaaagtcctgaaaagaccttgcagtagtccaagctacaccaaacattaacacatatttgtggtaaacatttctgtataaagttacctgacacacatataaacacaaggaacattccatatcattagtcgaaaacaaaaacaaaaaaaaaacctttggtcatttgtaagacatctcatgtcatataaaagttaaatgtaaaaagatacagtccattttgtcctgcacacacgtagactaattcacgtcaaaaaaaaaaaaaaa

SEQ ID NO: 399073 - DNA, 1000 bp, Homo Sapiens; identical to SEQ ID NO: 288232

SEQ ID NO: 399074 - DNA, 1000 bp, Homo Sapiens; identical to SEQ ID NO: 288233

SEQ ID NO: 399075 - DNA, 1000 bp, Homo Sapiens; identical to SEQ ID NO: 117003

SEQ ID NO: 399076 - DNA, 1000 bp, Homo Sapiens; identical to SEQ ID NO: 222227

SEQ ID NO: 399077 - DNA, 1000 bp, Homo Sapiens; identical to SEQ ID NO: 288235

SEQ ID NO: 399078 - DNA, 1000 bp, Homo Sapiens; identical to SEQ ID NO: 222228

SEQ ID NO: 399079 - DNA, 1000 bp, Homo Sapiens; identical to SEQ ID NO: 288237

SEQ ID NO: 399080 - DNA, 1000 bp, Homo Sapiens
gtcggccacgtgcccccggggttctttgagaagacgcaaaacaaggcatggttccgggagggcttcaatgaaaaatacctgaaggtggtccggaagcatcatcgcgtcatagcagggcagttcttcgggcaccaccacaccgacagctttcggatgctctatgatgatgcaggtgtccccataagcgccatgttcatcacacctggagtcaccccatggaaaaccacattacctggagtggtcaatggggccaacaatccagccatccgggtgttcgaatatgaccgagccacactgagcctgaaggacatggtgacctacttcatgaacctgagccaggcgaatgctcaggggacgccgcgctgggagctcgagtaccagctgaccgaggcctatggggtgccggacgccagcgcccactccatgcacacagtgctggaccgcatcgctggcgaccagagcacactgcagcgctactacgtctataactcagtcagctactctgctggggtctgcgacgaggcctgcagcatgcagcacgtgtgtgccatgcgccaggtggacattgacgcttacaccacctgtctgtatgcctctggcaccacgcccgtgccccagctcccgctgctgctgatggccctgctgggcctgtgcacgctcgtgctgtgacctgccaggctcaccttcttcctggtaacgggtaacgggggcagcgcccaggatcacccagagctgggccttccaccatttcctccgcgcctgaggagtgaactgaaataggacaaccgaatcaggaagcgaagccccaggagctgcagccatccgtgatcgcgccactgcactccagcctgggcgacaaagccagactctctccaaaaacaaaccagaaacagaaaagaaatgacgacccaagacccccctacaagcatacttcttttgcgtattatgttttactcacaaaacaaagctcatcatgcgtttgaaaaaaaaaaaaaaaaaa

SEQ ID NO: 399081 - DNA, 1000 bp, Homo Sapiens; identical to SEQ ID NO: 288239

SEQ ID NO: 399082 - DNA, 1000 bp, Homo Sapiens; identical to SEQ ID NO: 288240

SEQ ID NO: 399083 - DNA, 1000 bp, Homo Sapiens
cctgtgggtgcagtcttgagtgtgtcctctgtgcctgcaaaacagtgcccacctctgtgcacccgcttcctccctgagtttgcaggcacccagctcaagatccttcgcttcctagttcctctcgaacaaagtcctgtgttggagcagtcgacgctgcagcacaacaatcaaacccgggtacagacatgccaaaacaaagcccaagtgcgctcaaccaggcctcagcccagtcaggttggctctagcagaggccagaaaaacctgaagagctactttcagccctcccctagctgtccccaagcctctcctgacatagagctgcctagcctaccactgatgagcgccctcatgaccccgaagactccagaagagaaggcagtggccaaagtggtgaaggggcaggccaagacttcagaagccaaagatgagaaggagttacggacctcattctggaagtctgtgctggcggggcccttgcgcacacccctctgtgggggccacagggagccatgtgtgatgcgtactgtgaagaagccaggacccaacttgggccgccgcttctacatgtgtgccaggccccggggtcctcccactgacccctcctcccggtgcaacttcttcctctggagcaggcccagctgaaccaatggaggcctggggacatctggcatggtcacccctgcacatgatctgaggccagctccccttccctgagctgcctcctgcttctccctcaaagtctcctacccttctcttcctcttttaagccctctcttcctcgctttccttcctacctagctccttgttggtgagcttcttgtgccttaatcctgtgacccagccccttacaccactttccaccttcctgtccgaagtacacggacactagctgccccaggaagttgtgtgattttaaatcacttctgtctttgctggaaagtgtatttgtgcataaataaagtctgtgtatttgtttcagggttgcaaaaaaaaaaaaaaa

SEQ ID NO: 399084 - DNA, 1000 bp, Homo Sapiens
caaatggcgtgcaggcacagatggctaagcaacaagagcaagacccaacaaacctatacatctcaaatctccccatttctatggatgagcaggagcttgagaatatgctgaaaccctttggacatgtcatttccacaagaatactaagagacgctaatggagtcagcagaggtgttggctttgccagaatggagtctactgaaaaatgtgaagtggtaattcaacattttaatggaaaatatctgaaaacaccaccaggcatcccagcccccagtgagcctttgctgtgcaaattcgctgatggaggacaaaagaagcgacagaatcaaagcaaatatacccagaatgggaggccttggcccagggaaggagaggctggcatggctttgacctatgaccccacagctgccatacagaatggattttattcttcaccgtacagtattgcaaccaaccgcatgattccacagacatctatcacgccattcattgctgcttcccctgtctccacataccaggtccagagtacttcatggatgcctcatccgccatacgttatgcaaccaacaggtgctgtgattacaccaaccatggaccatcccatgtcaatgcagccagccaacatgatgggcccactgacacagcagatgaatcacctttcgttgggcacaacaggaacgtatatgactgctgctgctcctatgcaagggacctacattcctcagtacacgcctgtgcctccgacagctgtttctattgaaggtgttgttgctgatacctctccccagacagtggcaccttcatcccaggacaccagtggtcagcagcaacagatagcagtggacacatccaacgaacatgcacctgcatattcttaccaacagtctaagtaagtctgggctgtgctaagctcttttcctcaagatcagccatcttgacatcactctctcatgttgtatgtgttagcttttgctgaaatataaaccatcccaaacttaaa

SEQ ID NO: 399085 - DNA, 1000 bp, Homo Sapiens; identical to SEQ ID NO: 288241

SEQ ID NO: 399086 - DNA, 1000 bp, Homo Sapiens
gactttacggaagaaagtccaagccattcctgccgtcgctaactggataaaacgaaggccccaaaccaaactctagctgatccatgttgccttcaagtttgtttttctcgggggcatctctctcatcagataagacagctacatcagcctgccagataatccacatgctccctccccagctccactaagattttcactttagccatattctgatttttaaaaaggaaaataaaaacaaatctttcttcagtatctttttctttcagaatagcttctcatcatttacaattacagaaaaatagtatgtaatacaggcagaccttgctttgcacaggttctaacatgcacgaattgcagtcataatggtttagcaacaccattcttcccctcccccaaaatgttttggacttcagctaccacaattacctgtaattgcataaaacacaaactttgctagtagctctccagttcacatatcgctgtgtaaataacctatgtacatcatgaccaatgaccagtcacttctatcaaagactgccagaggtcactgcacatctgttattcctgcatagatagcaaagtgtgtagttgtattgctattgcctgcttgtggcccagtgataaatccctttgacattttacaaaaatgaatcaaaagagggaactccccaacaaagatgaaagtgcagcaaaggaacaaaaactgataatcctggaatgaaattcaaactgaatataaagagttatcgagaaaagagctgactgtgggaatctgacacggctcaaaaggctctagatatgcagccagagaaacttgtaaagatgaatttactgacatgaataaagttgttgtgatgagaaaaatgtagataccccagagatcaagagaaggagaagacaagccacagacttggagaaaatacttgtaaaacatgtatctgacaaaagactattattcaaaattatatagaactcataaaactcggctgactctcttttc

SEQ ID NO: 399087 - DNA, 1000 bp, Homo Sapiens; identical to SEQ ID NO: 288243

SEQ ID NO: 399088 - DNA, 1000 bp, Homo Sapiens; identical to SEQ ID NO: 288245

SEQ ID NO: 399089 - DNA, 1000 bp, Homo Sapiens; identical to SEQ ID NO: 117006

SEQ ID NO: 399090 - DNA, 1000 bp, Homo Sapiens; identical to SEQ ID NO: 222230

SEQ ID NO: 399091 - DNA, 1000 bp, Homo Sapiens; identical to SEQ ID NO: 117007

SEQ ID NO: 399092 - DNA, 890 bp, Homo Sapiens; identical to SEQ ID NO: 288249

SEQ ID NO: 399093 - DNA, 1000 bp, Homo Sapiens
gctcaccaaggtgacagatgagacctccggctgctctctcacctgtgcacagttccaccctgacggactcatctttggaacaggaaccatggactctcagatcaagatctgggacttgaaggaacgtactaatgtggccaacttccctggccactcgggccccatcactagcatcgccttctctgagaatggttactacctggctacagcggctgatgactcctctgtcaagctctgggatctgcgcaagcttaagaactttaagactttgcagctggataacaactttgaggtaaagtcactgatctttgaccagagtggtacctacctggctcttgggggcacggatgtccagatctacatctgcaaacaatggacggagattcttcactttacagagcatagcggcctgaccacaggggtggccttcgggcatcacgccaagttcatcgcttcaacaggcatggacagaagcctcaagttctacagcctgtaggccctggcccttctgatggaagctgggcctcatctcagtagaggggtagaattagggtttggggggggggtggggggaatctatggggggagggggctctgtggggtgggacattcacatcatttcactctggtctgagtggtggcctgagaaccatggtggcatggaccaccctcatccatgcaactccaggccccatgggaacggatgtggaaggaagaactgtcaccctcttaaggcccagggtcggagcccagggcctctcccttcctgtcgttcaatggacgtggtggtggctgttccacacccattttgttgcagttcctgtgagacaggagaggctgagccaagggaactgtgaaggggatgggcaggagggcttgtgcagggttttgtaagcagtgatctagtttcattaaaaaaagaaaacaataaaaaaaaaaaaaaaaaaaaaaaaaaaaaaaaaaaaaaaaaaaaaaaaaaaaaaaaaaaaaaaaaaaaaaa

SEQ ID NO: 399094 - DNA, 1000 bp, Homo Sapiens; identical to SEQ ID NO: 222231

SEQ ID NO: 399095 - DNA, 1000 bp, Homo Sapiens; identical to SEQ ID NO: 117008

SEQ ID NO: 399096 - DNA, 1000 bp, Homo Sapiens; identical to SEQ ID NO: 117010

SEQ ID NO: 399097 - DNA, 1000 bp, Homo Sapiens; identical to SEQ ID NO: 288256

SEQ ID NO: 399098 - DNA, 1000 bp, Homo Sapiens; identical to SEQ ID NO: 222233

SEQ ID NO: 399099 - DNA, 1000 bp, Homo Sapiens; identical to SEQ ID NO: 117012

SEQ ID NO: 399100 - DNA, 1000 bp, Homo Sapiens; identical to SEQ ID NO: 222235

SEQ ID NO: 399101 - DNA, 1000 bp, Homo Sapiens; identical to SEQ ID NO: 222236

SEQ ID NO: 399102 - DNA, 1000 bp, Homo Sapiens; identical to SEQ ID NO: 222237

SEQ ID NO: 399103 - DNA, 1000 bp, Homo Sapiens; identical to SEQ ID NO: 117013

SEQ ID NO: 399104 - DNA, 1000 bp, Homo Sapiens
ccttcaactctgccgactgcttggattacaaggagcctggcgccgctgctgcttcctccgcctggaaactcaacttcaactcccccgactgtctggactataaggaccaagcctcatggcggttccaggtcttgtgagcccaggaatgaaagaggagaagaaacgcaactacctgcgccctccgtggtcccgatcctgttgctgctgctgcaccgcccgcctttgcctcgtcttctccaaaactgaattttcaccccccaaaaagatgtccattgcctgcactgccgcccccatttttgtgccacttgcttggggggatgtgcaaacccaccctgccccttggatggggggaccggtgcttcggcttggcctacacattctatacaggagagatgtattatttccccccttcagcccctactaaactcttaagcctccccttccagtctttctggacagctattaagcacttgcagccttcggaggctctgcgctctgatccgctgtttgagcccaacactttaatttattctttctggacactggagtcactaactggcgtgtttctgcccattggagcacccgcacactactccaaatcaaaaccactaagagttcctcccgcgcagactgctgccccttcagctgccctcgattttgctccacgcctgccggccagagcctcccggcgtttcttccgccccagcggagtgcgctggggcgcgccagggctaggcccgccggaggagcgcgtccccagccttccgcgcacagagccgcatcccgccccgccctgcgctggactggttcaagcttccgcctcggcgggaacgctgtacatagtcaggtccgttccagggaccacttaaactttttagttgctgttggttggttgaactgaacatatcttgtcttagcacccaggaaacagaactttaagatatatacagcacatatatatatatatacatatatatatacacatatataaaaaacaaaa

SEQ ID NO: 399105 - DNA, 1000 bp, Homo Sapiens; identical to SEQ ID NO: 117014

SEQ ID NO: 399106 - DNA, 1000 bp, Homo Sapiens
gttacatgacagtggataactttcaaagaggcatctttgtgtggcccatgaactttggttggagaacaattcctccagatgtcattgcaaaaaacagaattaaagaaactgatacaataaggtgccctgtcatggctggtggattgttttctattgacaaaagttacttttttgaacttggaacatacgaccctggccttgatgtttggggtggggaaaatatggagctctcattcaaggtgtggatgtgtggtggtgaaattgagatcattccctgctcccgagtgggccatatattcagaaatgacaatccatattccttccccaaagaccggatgaagacagtggagcggaacttggtgcgggttgccgaggtctggctggatgagtataaggagctgttctatggccacggagaccacctcatcgaccaagggctagatgttggcaacctcacccagcaaagggagctgcgaaagaaactgaagtgcaaaagtttcaaatggtacttggagaatgtctttcctgacttaagggctcccattgtgagagctagtggtgtgcttattaatgtggctttgggtaaatgcatttccattgaaaacactacagtcattctggaagactgcgatgggagcaaagagcttcaacaatttaattacacctggttaagacttattaaatgtggagaatggtgtatagcccccatccctgataaaggagccgtaaggctgcacccttgtgataacagaaacaaagggctaaaatggctgcataaatcaacatcagtctttcatccagaactggtgaatcacattgtttttgaaaacaatcagcaattattatgcttggaaggaaatttttctcaaaagatcctgaaagtagctgcctgtgacccagtgaagccatatcaaaagtggaaatttgaaaaatattatgaagcctgaagtgtaactgatgtttttatatagtaaacccattaaatactgtgaaaataaca

SEQ ID NO: 399107 - DNA, 1000 bp, Homo Sapiens
ctcaggcggcagtgaagtccagatagttttgcagattgttttgctactttttcatatggtatatgtttctgatttttaatatttcttttgagaaattctgagttctgatgtaggagctttcctgtgatttctgtttcacgttccttcctgtcacaccctcctttggcgtctctgtgtatatccttgctttattttcttggaacctttgatttcaacactgagggcctggagacctcggctcctcctgctcctgaaccaggaggcttcatgtgggggaggaggagaggtctccatgtgacacatgggctcagggctgccagaatcagcggatgctggatgggcctgcagaaacaacactcaccacacacacttccttcaaaagaccaaaagtgactggtgtctcgtgtgacagattgcttcatttatgtttctacatagtaaggtgactgccaaataatatttgaagtcatctgtctctttgtaaattattttatatgacctataaatttaaaaatgtttttcagtgagtgcttttaacaaacttaagcttctgccctgccaagggaattaatgttatcttgtgaaaggtgttgctgtttgaattgatgagaaatggaagatgagaactccctaagagttctcataataaatcatctcatcacaaatcaatacggtatacagagttaaagtggaatgaggtaagaagatacagctacagaaaatagttgcgtgtatgggagaacagtcattgtaattgggtagttttgttaataaatatttttaaatcttgcttttcagaaattaccgaatgtgtataaacaaataaagaaaaataatttagctgtgttttagacagcattagaatatattgttcagcacagtaaaatatatttgaaatttgataagccaaaaatgtggttttgaatgaatattttgtgaatctttcttaaaagctcaaatttgtagacttctaaatagaataaacacttgcagcagatgg

SEQ ID NO: 399108 - DNA, 1000 bp, Homo Sapiens; identical to SEQ ID NO: 222239

SEQ ID NO: 399109 - DNA, 1000 bp, Homo Sapiens; identical to SEQ ID NO: 222240

SEQ ID NO: 399110 - DNA, 1000 bp, Homo Sapiens
gtctgaatccttggatgacatggacttccttacaaggcaaaagaaattgcaagctgaagccaaaatggcccttgccatggccaaaccaatggccaaaatgcaagtagaagtggagaaacagaacaggaaaaagtctcccgtcgctgatcttctgccacacatgcctcatataagtgaatgcttgatgaaaagaagtttaaaacccaccgacctgagagacatgactattgggcagctacaagtgatagtcaatgatctccattcccagatagaaagcttgaatgaagagttggtccagctgcttctcatccgagatgagctgcacacagagcaggatgccatgctggtggacattgaagacttgaccagacatgctgaaagtcagcagaagcacatggcagagaaaatgcctgcaaagtgaaaagaagccattcaaccagagaacaagctagaatttattttgcttctgtggttgtaaaaatgctgttgctaaaggtggcgcagaaacaaatatcagtgttagtcattgataatgtctgaagcttaatgtccagtgattggcctttgcttcttaatttattttaattttttacttgtgccacttaatatcaggcattttaataaaatattgttacaaaaaatgtacagtactgacaccaccacaaatcatggttaataaaagagagtagttttaactttatttttatttgtttagagattttaagttggaacagtattttcccattgactacttttcattcttcactgtagttttaaagaagaactgtaaatgacggtgctatacaagtcaaaaaatacatgcctgcctcgtagtgaagttgtagctctccgtaatatgtatattttactcagttttcaacattttgtgaatgttgactacctgaagttcctttttagatgtgctattaacattctgttggattcagagggttccttgaaagttttatgtataaatatgtaaaataaaaattaaaacccg

SEQ ID NO: 399111 - DNA, 1000 bp, Homo Sapiens; identical to SEQ ID NO: 117017

SEQ ID NO: 399112 - DNA, 1000 bp, Homo Sapiens; identical to SEQ ID NO: 117018

SEQ ID NO: 399113 - DNA, 1000 bp, Homo Sapiens; identical to SEQ ID NO: 288269

SEQ ID NO: 399114 - DNA, 1000 bp, Homo Sapiens; identical to SEQ ID NO: 117020

SEQ ID NO: 399115 - DNA, 1000 bp, Homo Sapiens; identical to SEQ ID NO: 117021

SEQ ID NO: 399116 - DNA, 1000 bp, Homo Sapiens; identical to SEQ ID NO: 288270

SEQ ID NO: 399117 - DNA, 1000 bp, Homo Sapiens
tttttatttttgaagcttaaatgtgtttcttctgaaagctgttaaagatgtatttatgttctgtgttattttatctttaattaatgaggtaattcgggcaaagagtagaatttaagacaaaacggaagctgggaagcttcccttgagggcaggcaggaggtggagttgcagctgttggccggcatcacgttgctcgttgctcggcttatgggaggccgccctggagggcccggaggtcccaaggtccctgggaggactgggcccctcatgcctcgagcttggcaaccgaaaacccgagggaggagaagggacctgccttgtgacatctctgatcaggttggggtgccccagcacccagtaccagtttggggtttgggaagcaggactccgtccctgtccccgactgtgccacgtggtaggacacataggacacaggaattcctgggtccttgcccatgactgtgccatgtggtaggacacaggacacaggaattcctggaaagtggtggcttcagaagtgatcttggctcgcaggcaccagtgccacctaccaagctgtgaaactaaaccttctccactaaacgtcgttagggcctcagttctagacgagtcatacctgattcacctgcactgcttcccctgtgtgctgagcatagagcatacaatagcgcctacttcacggaaacttgtgcctttaaactttgtaaacttaaacacagccgagaagttgcttctttgtactttttctacttttcctacttttttgtagaaaaaaaagataatgcctctgcttctatttctctgggggtgggggtgggggccgggagccgtcgcagacccgtttcatgcagcgtctcccttggcaccgcgttcggaggacgcaccctcactcccctgctgccttcactcctttctgaccaagcaacgctaacttttgtacagatcgatttgataaaattaaacaaagtgctttttatggaaaaaaaaaaaaaaaaaaaaa

SEQ ID NO: 399118 - DNA, 1000 bp, Homo Sapiens; identical to SEQ ID NO: 222243

SEQ ID NO: 399119 - DNA, 1000 bp, Homo Sapiens; identical to SEQ ID NO: 288272

SEQ ID NO: 399120 - DNA, 1000 bp, Homo Sapiens
ctcctccaccccatgccccagatgcatttccccggattgctcccatccgagcagctgaatccctgcacagccaacccccacagcacctccagtgtcccctctaccggcctgactcgagcagctttgcagccagccttcgagagttggagaagtgtggttggtattgggggccaatgaattgggaagatgcagagatgaagctgaaagggaaaccagatggttctttcctggtacgagacagttctgatcctcgttacatcctgagcctcagtttccgatcacagggtatcacccaccacactagaatggagcactacagaggaaccttcagcctgtggtgtcatcccaagtttgaggaccgctgtcaatctgttgtagagtttattaagagagccattatgcactccaagaatggaaagtttctctatttcttaagatccagggttccaggactgccaccaactcctgtccagctgctctatccagtgtcccgattcagcaatgtcaaatccctccagcacctttgcagattccggatacgacagctcgtcaggatagatcacatcccagatctcccactgcctaaacctctgatctcttatatccgaaagttctactactatgatcctcaggaagaggtatacctgtctctaaaggaagcgcagctcatttccaaacagaagcaagaggtggaaccctccacgtagcgaggggctccctgctggtcaccaccaagggcatttggttgccaagctccagctttgaagaaccaaattaagctaccatgaaaagaagaggaaaagtgagggaacaggaaggttgggattctctgtgcagagactttggttccccacgcagccctggggcttggaagaagcacatgaccgtactctgcgtggggctccacctcacacccacccctgggcatcttaggactggaggggctccttggaaaactggaagaagtctcaacactgtttctttttcagaaaaaaaaaaa

SEQ ID NO: 399121 - DNA, 1000 bp, Homo Sapiens; identical to SEQ ID NO: 117023

SEQ ID NO: 399122 - DNA, 1000 bp, Homo Sapiens; identical to SEQ ID NO: 117024

SEQ ID NO: 399123 - DNA, 1000 bp, Homo Sapiens; identical to SEQ ID NO: 222245

SEQ ID NO: 399124 - DNA, 1000 bp, Homo Sapiens; identical to SEQ ID NO: 288276

SEQ ID NO: 399125 - DNA, 1000 bp, Homo Sapiens; identical to SEQ ID NO: 117026

SEQ ID NO: 399126 - DNA, 1000 bp, Homo Sapiens; identical to SEQ ID NO: 117027

SEQ ID NO: 399127 - DNA, 1000 bp, Homo Sapiens; identical to SEQ ID NO: 117028

SEQ ID NO: 399128 - DNA, 1000 bp, Homo Sapiens; identical to SEQ ID NO: 117029

SEQ ID NO: 399129 - DNA, 1000 bp, Homo Sapiens; identical to SEQ ID NO: 117030

SEQ ID NO: 399130 - DNA, 1000 bp, Homo Sapiens; identical to SEQ ID NO: 117031

SEQ ID NO: 399131 - DNA, 1000 bp, Homo Sapiens; identical to SEQ ID NO: 222246

SEQ ID NO: 399132 - DNA, 1000 bp, Homo Sapiens; identical to SEQ ID NO: 117032

SEQ ID NO: 399133 - DNA, 1000 bp, Homo Sapiens
ctggtgggcattcacgctgatcatcatctcatcctacacggccaacctggcagccttcctgaccgtgcagcgcatggatgtgcccattgagtcagtggatgacctggctgaccagaccgccattgaatatggcacaattcacggaggctccagcatgaccttcttccaaaattcccgctaccagacctaccaacgcatgtggaattacatgtattccaagcagcccagcgtgttcgtgaagagcacagaggagggaatcgccagggtgttgaattccaactacgccttcctcctggaatccaccatgaacgagtactatcggcagcgaaactgcaacctcactcagattgggggcctgctggacaccaagggctatgggattggcatgccagtcggctcggttttccgggacgagtttgatctggccattctccagctgcaggagaacaaccgcctggagatcctgaagcgcaaatggtgggaaggagggaagtgccccaaggaggaagatcacagagctaaaggcctgggaatggagaatattggtggaatctttgtggttcttatttgtggcttaatcgtggccatttttatggctatgttggagtttttatggactctcagacactcagaagcaactgaggtgtccgtctgccaggagatggtgaccgagctgcgcagcattatcctgtgtcaggacagtatccacccccgccggcggcgcgccgcagtcccgccgccccggccccccatccccgaggagcgccgaccgcggggcacggcgacgctcagcaacgggaagctgtgcggggcaggggagcccgaccagctcgcgcagagactggcgcaggaggccgccctggtggcccgcggctgcacgcacatccgcgtctgccccgagtgccgccgcttccagggcctgcgggcacggccgtcgcccgcccgcagcgaggagagcctggagtgggagaaaaccaccaacagcagcgagcccgagtag

SEQ ID NO: 399134 - DNA, 1000 bp, Homo Sapiens
ctccgcgccctagctaccctgagcgccagtatagctgcaccagtctccaggggcccggcaattcgcgaggccacgggccggcccaggcgggccaccaccaccccgagaaatcacagtcgctctgcgagccggcgcctctctcaggcgcctccgcctccccgtccccagccccgccagcctgcagccagccagcccccgaccatccctccagcgccgccagcaagcaacccatagtctacccatggatgaaaaaaattcacgttagcacggtgaaccccaattataacggaggggaacccaagcgctcgaggacagcctatacccggcagcaagtcctggaattagagaaagagtttcattacaaccgctacctgacccgaaggagaaggatcgagatcgcccactcgctgtgcctctctgagaggcagatcaaaatctggttccaaaaccgtcgcatgaaatggaagaaggaccaccgactccccaacaccaaagtcaggtcagcacccccggccggcgctgcgcccagcaccctttcggcagctaccccgggtacttctgaagaccactcccagagcgccacgccgccggagcagcaacgggcagaggacattaccaggttataaaacataactcacacccctgcccccaccccatgcccccaccctcccctcacacacaaattgactcttatttatagaatttaatatatatatatatatatatatatataggttcttttctctcttcctctcaccttgtcccttgtcagttccaaacagacaaaacagataaacaaacaagccccctgccctcctctccctcccactgttaaggacccttttaagcatgtgatgttgtcttagcatggtacctgctgggtgtttttttttaaaaggccattttggggggttatttattttttaagaaaaaaagctgcaaaaattatatattgcaaggtgtgatggtctggcttgggtgaatttcaggggaaatgagg

SEQ ID NO: 399135 - DNA, 868 bp, Homo Sapiens
accggcgccgggattcggatgggggcgggtgggggacgctgcagctggggccatttgaggggagcccatggggcctgaaaggcatctgtcaggcgcccctgcccggatggcaacagtagttctaggaggagacaccatgggccctgagcgtatcttccccaatcagactgaggaactgggacatcagggcccttcagaaggcactggggattggagcagtgaggagcctgaggaagagcaggaggaaacggggtcgggcccagctggctactcctaccagcccctgaaccaagatcctgaacaagaggaggtggaactggcaccagtgggggatggagatgtagttgctgacatccaggatcgaatccaggccctggggcttcatttgccagacccaccattagagagtgaagatgaagatgaggagggagctacagcgttgaacaaccacagctctattcccatggacccagaacatgtagagctggtgaaaaggacaatggctggagtaagcctgcctgcgccaggggttcctgcctgggctcgggagatatcggatgcccagtgggaagatgtggtacagaaagccctccaagcccggcaggcatcccctgcctggaagtgaccacagtgagagctgccttatattcctacattccaggccagaaccagcacaggactgaacacatccctggttgtaatgtccatttccatcttccccgtctccctttccacatcaaggcacatcagacttctcagagacccactttattcagttctgtacatatggggacatcggtccaagcccaacccaccttagcatgtatcactctgtggagaataaagcaccctatgtacacagccaaaa

SEQ ID NO: 399136 - DNA, 683 bp, Homo Sapiens
ctgcgcagatgaggggagactcgtcaccaggcgtgcagtgggcactgctgggctcccccatcccgtcctaacccggaacagccccgggcaggaggcgtggaaagtcgagggggtaaaccgcgaatgtgcgttgtgtaagccacggcgcagggtggggcgcgggcgggacttgggcgggcggggtgggcttggccgagctggcctccggggcaccgaccgctataaggccagtcggactgcgacacagcccatcccctcgaccgctcgcgtcgcatttggccgcctccctaccgctccaagcccagccctcagccatggcatgccccctggatcaggccattggcctcctcgtggccatcttccacaagtactccggcagggagggtgacaagcacaccctgagcaagaaggagctgaaggagctgatccagaaggagctcaccattggctcgaagctgcaggatgctgaaattgcaaggctgatggaagacttggaccggaacaaggaccaggaggtgaacttccaggagtatgtcaccttcctgggggccttggctttgatctacaatgaagccctcaagggctgaaaataaatagggaagatggagacaccctctgggggtcctctctgagtcaaatccagtggtgggtaattgtacaataaattttttttggtcaaattt

SEQ ID NO: 399137 - DNA, 1000 bp, Homo Sapiens
gaatagaaattaaagatgtgaggttgccagctgggcttcagcactcactggctgtggaggctgaagcgcaaagacaagccaaagtgcggatgattgctgcagaagcggaaaaggctgcttctgagtccctgaggatggcagctgagattctgtcaggcacccctgctgctgttcagcttcgatacctccacacccttcagtctctgtccacagagaagccttccactgtggttttacctttgccatttgacctactgaattgcctgtcttctcccagcaacagaactcagggaagcctccccttcccaagtccttccaaacctgttgagccactaaatcctaaaaagaaagactctcccatgttataggaaggatggggcataatgtgactgtaaaggggcctgccatagaaaagtcacatccctgagggagacactctgtcctcattccctgcccttcctttggttgccatatggaatggccatggaatgcacgaagtcacaatgcaccatccatgagaagacagtgaaatgatgtaatgacagagaaggcagacaacatgtttccgtgactcatctagtcagagcaattatgggaaacagctttggtcaacattctactttggaaagaattttgagtctagatgtggttaaattttgacttctgggaacttggttcagatgtccctttcactgtatgtcctctgacccctttggcaaggttgccacagctcccacagcccttcctacaagcacctatcattgggcttgtcacactctattgctcttctgtcccgaagatgcagtcttctctccaatgatactaccaagtcttagttttcctcaaccacactcaatctttttgctccaccctgaattcctcacacctaaccctgatagttacctaaagtgacacttaaatgtttcagagtgaatgcaaaaaagagagatgtacttggagtcggatatacaatttatccctaattaaagcatttaaaagg

SEQ ID NO: 399138 - DNA, 1000 bp, Homo Sapiens; identical to SEQ ID NO: 288284

SEQ ID NO: 399139 - DNA, 1000 bp, Homo Sapiens; identical to SEQ ID NO: 117033

SEQ ID NO: 399140 - DNA, 1000 bp, Homo Sapiens; identical to SEQ ID NO: 288286

SEQ ID NO: 399141 - DNA, 1000 bp, Homo Sapiens; identical to SEQ ID NO: 222250

SEQ ID NO: 399142 - DNA, 1000 bp, Homo Sapiens; identical to SEQ ID NO: 222251

SEQ ID NO: 399143 - DNA, 1000 bp, Homo Sapiens; identical to SEQ ID NO: 288289

SEQ ID NO: 399144 - DNA, 1000 bp, Homo Sapiens; identical to SEQ ID NO: 117034

SEQ ID NO: 399145 - DNA, 1000 bp, Homo Sapiens; identical to SEQ ID NO: 222252

SEQ ID NO: 399146 - DNA, 1000 bp, Homo Sapiens; identical to SEQ ID NO: 117035

SEQ ID NO: 399147 - DNA, 1000 bp, Homo Sapiens; identical to SEQ ID NO: 117036

SEQ ID NO: 399148 - DNA, 1000 bp, Homo Sapiens; identical to SEQ ID NO: 117037

SEQ ID NO: 399149 - DNA, 1000 bp, Homo Sapiens; identical to SEQ ID NO: 222254

SEQ ID NO: 399150 - DNA, 1000 bp, Homo Sapiens; identical to SEQ ID NO: 288297

SEQ ID NO: 399151 - DNA, 1000 bp, Homo Sapiens; identical to SEQ ID NO: 288298

SEQ ID NO: 399152 - DNA, 1000 bp, Homo Sapiens; identical to SEQ ID NO: 222255

SEQ ID NO: 399153 - DNA, 1000 bp, Homo Sapiens; identical to SEQ ID NO: 222256

SEQ ID NO: 399154 - DNA, 1000 bp, Homo Sapiens
gagaagtcatatctatgtagtgaatgtggaaaaggttttactgtgaaaagcatgctcatcatacatcagcgaactcatacaggagagaagccctacacatgcagtgaatgtgggaaaggcttccccttgaagagtcggctgattgtacatcagcgaactcatactggagagaaaccttacaggtgcagtgaatgtgggaaaggtttcattgtgaatagcggactgatgttacatcagcgaactcatactggagagaaaccgtacatatgcaatgaatgtggaaaaggttttgcctttaagagcaatcttgttgtacaccagcgaactcatactggagagaaaccctttatgtgcagtgaatgtggaaaaggcttcaccatgaaacgctatctcattgtacatcagcaaattcatacagaagagaaatcttgtatatgtagtgaatgtggaagaggctttgccaaggaaacagagcttgctttacataagcaagttcatactggagaaaaaccttatggatgtaatgaatgtggtaaaggcttcactatgaagagccgtctaattgttcatcaacgaactcatacaggagagaaaccctttgtatgcagtgaatgtagaaaagccttctcctcaaagagaaatctcattgtacatcagcgaactcataatggaaacaaaccctgacaatgcagtggacatgttcatgcctttgggaagaaaatctgccttgtacaacatcagagatttcacagtatagattttctacatgtgtactgagtatgaaaaatcatatttcaaaatccagtgttattcactaggatgaatgctatcaatgtcagaaaggcttcaacatgaattcaggctctgaattctttgatgtaccaatgtatagaaaattactcatctgagagagagtctgtggattgggggtaacctttcatttgtcaaccttcattaaaactatgacaacgtccacatgaaaaaaaaaaaaaaaaaaaaa

SEQ ID NO: 399155 - DNA, 1000 bp, Homo Sapiens; identical to SEQ ID NO: 117038

SEQ ID NO: 399156 - DNA, 1000 bp, Homo Sapiens
agtagcttcccacccagtccaaacctgcaccatccatcattatgtagatgaaaaagccataggtcatagcctctttgctattctattggagtagcctccctaggcagtccctctgaagccttggagtgcaggtaaatgctcattcccaagtagcaaagagaccatggagaaggtgcgtgtaaagagatatatttttgtaagaggaatatgattaatacattccgccccttggaacctggccatgcaaagcaagggcacagggattagacctgtggcacacttccccaattccctcatctgtaggatttgggctgccccaggcccacccagggggctctgaatgtattttgtaccgtgtttctttcccccaggagaatttttagtcttctttcatgaagcagtggaggggttggcctcccttctactgggaggttgactctctctgggagactcttggtccaagacctgggtcagttctttgctggtggtcccctctgaccacaagcttctgcctgaagattcctcaggtcaacaccatcattaaatgcgagttttgttgatgattctaccatgtggtagagtgttgtgtaagacaggttcacaaatgggatgttttcctagtgtgtgtgtgtgtgtgtgtgtgtgtgtatgagagagagagagagagacaacagagacagagagaggcagagaggcatagagagacagagagagagacaagaaacagagatagacagaaaatgttcggggtggcaggcgggttggtgtataactgctttgtgcctgtgtgactctggcatagctgctcagggagaattacgtgcctctgtgtgtaaaattgcctttgtgttctcctgcctctctatgttttgaaactgtatcccacaagttgccggtatgaccatcttatttgtaatgagtctgtgcaggtccttgtgtatggaattgcacccgtgtaaaggaggaaatggtcagtgtgcatgaaaaaaaaaaaaaaaaa

SEQ ID NO: 399157 - DNA, 1000 bp, Homo Sapiens; identical to SEQ ID NO: 288301

SEQ ID NO: 399158 - DNA, 1000 bp, Homo Sapiens; identical to SEQ ID NO: 117039

SEQ ID NO: 399159 - DNA, 1000 bp, Homo Sapiens; identical to SEQ ID NO: 222258

SEQ ID NO: 399160 - DNA, 1000 bp, Homo Sapiens; identical to SEQ ID NO: 288304

SEQ ID NO: 399161 - DNA, 1000 bp, Homo Sapiens; identical to SEQ ID NO: 222259

SEQ ID NO: 399162 - DNA, 1000 bp, Homo Sapiens; identical to SEQ ID NO: 117040

SEQ ID NO: 399163 - DNA, 1000 bp, Homo Sapiens; identical to SEQ ID NO: 288308

SEQ ID NO: 399164 - DNA, 1000 bp, Homo Sapiens; identical to SEQ ID NO: 117041

SEQ ID NO: 399165 - DNA, 1000 bp, Homo Sapiens; identical to SEQ ID NO: 222260

SEQ ID NO: 399166 - DNA, 1000 bp, Homo Sapiens; identical to SEQ ID NO: 117043

SEQ ID NO: 399167 - DNA, 1000 bp, Homo Sapiens; identical to SEQ ID NO: 222261

SEQ ID NO: 399168 - DNA, 1000 bp, Homo Sapiens; identical to SEQ ID NO: 288314

SEQ ID NO: 399169 - DNA, 1000 bp, Homo Sapiens; identical to SEQ ID NO: 288315

SEQ ID NO: 399170 - DNA, 1000 bp, Homo Sapiens; identical to SEQ ID NO: 222262

SEQ ID NO: 399171 - DNA, 1000 bp, Homo Sapiens; identical to SEQ ID NO: 288317

SEQ ID NO: 399172 - DNA, 1000 bp, Homo Sapiens
ctgagaagacagttccctggcagtcacagagtcaagcgattaacaggcatgagatttgaagccatggaaagatatgatgatgctatacagctatatgataggattttacaagaagatccaactaacactgctgcaagaaagcgtaagattgccattcgaaaagcccaggggaaaaatgtggaggccattcgggagctgaatgagtatctggaacaatttgttggagaccaagaagcctggcatgaacttgcagaactttacatcaatgaacatgactatgcaaaagcagccttttgtttagaggaactaatgatgactaatccacacaaccacttatactgtcagcagtatgctgaagttaagtatacccaaggtggacttgaaaacctcgaactttcaagaaagtattttgcacaggcattgaaactgaacaacagaaatatgagagctttgtttggactttatatgtcggcaagtcatattgcttctaatccaaaagcaagtgcaaaaacgaaaaaggacaacatgaaatatgctagttgggcagctagtcaaataaacagagcttatcagtttgcaggtcgaagtaagaaggaaaccaaatattctcttaaggctgtcgaagacatgttggaaacattgcagatcacccagtcttaaggtttcaaaaactctttgacattagatttcacaactgcacaattgaacttattggcctgtaacttatttactaaatgctcagtgctatttatatactacagtaattttctgttaagaaggcagttgtaaagaatgtgtttatataaacctaaaaatgccttttactgctaagtggggagatgggggaaatccatggaagagagatttaagacttattgattgtacatcagtctcttcatatcacatatacatgtatatatataaaactctaatgtagtataaccttgttaaataaaccatgatgatttacaaaaaaaaaaaaaaaaaaaaaaaaaaaaaa

SEQ ID NO: 399173 - DNA, 1000 bp, Homo Sapiens; identical to SEQ ID NO: 222263

SEQ ID NO: 399174 - DNA, 1000 bp, Homo Sapiens; identical to SEQ ID NO: 117044

SEQ ID NO: 399175 - DNA, 1000 bp, Homo Sapiens
acccctttaccagcagctattatctttcgaagagagtccacaaggaaaagttttacagatcatcgtctggggagattatggccgcatggatcacaaatcttttatgggagtggcccagatacttttagatgaactagagctatccaatatggtgatcggatggttcaaacttttcccaccttcctccctagtagatccaaccttggcccctctgacaagaagagcttcccaatcatctctggaaagttcaactggaccttcttactctcgttcatagcagctgtaaaaaaattgttgtcacagcaaccagcgttacaaaaaaaaaaaaaaaaatcacaggttgcaaaccctggtaacactgcatgcttaatgttgtgtcttctgagcctgtttctagggatacaaagcaatcctgtgttctcagaggaagttgcacacattgtgccctaaagaaggccctcaggtgaaagagcagagctgtgaagaactatcagatttggaattcaatgacactcgagttctggtccaatctgaagccatggattaatctcaaagaatcagtcagtttcatgcaacagaagcccttttcaatggcacctttatatttttatcattcctttttcttcatttatctaaccccaaagccctgatatgccacagaaatggagctatacagccatgaagcggtgttacaggtgaggagtgtaatcctaggaagcatcaggtgaaaagcaggagaccaaagaagtggtcaggaacaatcatcagccctcctctgggcgggaatcagagcagtcagtccagcaggaagagtggcagactttgtagctccatgggcacgtcaattactaatgctaagatgtgttggactctgaaaaacaaaattctgtggctacactgtactgaatgaaattaaagaaactttttttgcatggacacagattagctgaatacttaaattattttcttggggctgcaacttacaaaaaaaaaaaaaaaa

SEQ ID NO: 399176 - DNA, 1000 bp, Homo Sapiens; identical to SEQ ID NO: 117045

SEQ ID NO: 399177 - DNA, 1000 bp, Homo Sapiens; identical to SEQ ID NO: 288320

SEQ ID NO: 399178 - DNA, 1000 bp, Homo Sapiens; identical to SEQ ID NO: 117046

SEQ ID NO: 399179 - DNA, 1000 bp, Homo Sapiens; identical to SEQ ID NO: 288322

SEQ ID NO: 399180 - DNA, 1000 bp, Homo Sapiens; identical to SEQ ID NO: 117047

SEQ ID NO: 399181 - DNA, 1000 bp, Homo Sapiens; identical to SEQ ID NO: 222265

SEQ ID NO: 399182 - DNA, 1000 bp, Homo Sapiens; identical to SEQ ID NO: 288325

SEQ ID NO: 399183 - DNA, 1000 bp, Homo Sapiens; identical to SEQ ID NO: 222266

SEQ ID NO: 399184 - DNA, 1000 bp, Homo Sapiens; identical to SEQ ID NO: 222267

SEQ ID NO: 399185 - DNA, 1000 bp, Homo Sapiens
ccaccagctcttcttcgtgggatttgcccaggtgtggtgctcggtccgcacaccagagagctctcacgaggggctggtgaccgacccccacagccctgcccgcttccgcgtgctgggcactctctccaactcccgtgacttcctgcggcacttcggctgccctgtcggctcccccatgaacccagggcagctgtgtgaggtgtggtagacctggatcaggggagaaatgcccagctgtcaccagacctggggcagctctcctgacaaagctgtttgctcttgggttgggaggaagcaaatgcaagctgggctgggtctagtccctcccccccacaggtgacatgagtacagaccctcctcaatcaccacattgtgcctctgctttgggggtgcccctgcctccagcagagcccccaccattcactgtgacatctttccgtgtcaccctgcctggaagaggtctgggtggggaggccagttcccataggaaggagtctgcctcttctgtccccaggctcactcagcctggcggccatggggcctgccgtgcctgccccactgtgacccacaggcctgggtggtgtacctcctggacttctccccaggctcactcagtgcgcacttaggggtggactcagctctgtctggctcaccctcacgggctacccccacctcaccctgtgctccttgtgccactgctcccagtgctgctgctgaccttcactgacagctcctagtggaagcccaagggcctctgaaagcctcctgctgcccactgtttccctgggctgagaggggaagtgcatatgtgtagcgggtactggttcctgtgtcttagggcacaagccttagcaaatgattgattctccctggacaaagcaggaaagcagatagagcagggaaaaggaagaacagagtttatttttacagaaaagagggtgggagggtgtggtcttggcccttataggaccctgtgccaataaacagacatgcatccgtc

SEQ ID NO: 399186 - DNA, 1000 bp, Homo Sapiens
gcctcccgaggagagcacgtgtttcgagaggccctgcttcaagtggtacaccagcccctggtcagagtgcaccaagacctgcggggtgggcgtgaggatgcgagacgtcaagtgctaccaggggaccgacatcgtccgtggttgcgatccgttggtgaagcccgttggcagacaggcctgtgatctgcagccctgccccacggagcccccagatgacagctgccaggaccagccaggcaccaactgtgccctggccatcaaagtgaacctctgcgggcactggtactacagcaaggcgtgctgccgctcctgcaggcccccccactcctaggcccggcagctgcagccccttccagatgaagaccaagcgcccctcctggggctgctgcagcttctggggcctccacagacccccctcctgcggggcacgctggcctaagagacgtggcactgagcctcggctgtcgagaggggacttcccacggcccatggacctttgtgctcctggggcagagcctccggcacccagtggcctcccccagacagagccacccctgccgtgggaacctgtccgtgttcctgcgtggatcctgtgtttgtggctcccactccccagccccccagcagcccccagccgaggggcccagggcccacagccagcggtggaggtgtcttgctccgggcccgtagcccacgccctctctgggtggcagggccttctgaaggaaacttgcaggcgagcccaacgtggtggggggccttcctccctcagaggccatggggtgagaggggctcaggcagccaaggaggcccaggcgtgctccctcttatggagcccctcccatggagctctcttcccgccgcactttctaccccgggcagaggcgcttgcccacgggacgtttggggatggacctcggcccccgcccctgcagtcagcgtcagtgctcatctacgttaataaagtggtcctatttatggcggcaaaaaaaaaaaaaaa

SEQ ID NO: 399187 - DNA, 1000 bp, Homo Sapiens; identical to SEQ ID NO: 288327

SEQ ID NO: 399188 - DNA, 1000 bp, Homo Sapiens; identical to SEQ ID NO: 222268

SEQ ID NO: 399189 - DNA, 1000 bp, Homo Sapiens; identical to SEQ ID NO: 222269

SEQ ID NO: 399190 - DNA, 1000 bp, Homo Sapiens; identical to SEQ ID NO: 222270

SEQ ID NO: 399191 - DNA, 1000 bp, Homo Sapiens; identical to SEQ ID NO: 117049

SEQ ID NO: 399192 - DNA, 1000 bp, Homo Sapiens; identical to SEQ ID NO: 222272

SEQ ID NO: 399193 - DNA, 1000 bp, Homo Sapiens; identical to SEQ ID NO: 288331

SEQ ID NO: 399194 - DNA, 1000 bp, Homo Sapiens; identical to SEQ ID NO: 117050

SEQ ID NO: 399195 - DNA, 1000 bp, Homo Sapiens; identical to SEQ ID NO: 117051

SEQ ID NO: 399196 - DNA, 1000 bp, Homo Sapiens; identical to SEQ ID NO: 222275

SEQ ID NO: 399197 - DNA, 1000 bp, Homo Sapiens; identical to SEQ ID NO: 288333

SEQ ID NO: 399198 - DNA, 1000 bp, Homo Sapiens; identical to SEQ ID NO: 117052

SEQ ID NO: 399199 - DNA, 1000 bp, Homo Sapiens; identical to SEQ ID NO: 222276

SEQ ID NO: 399200 - DNA, 1000 bp, Homo Sapiens; identical to SEQ ID NO: 288336

SEQ ID NO: 399201 - DNA, 1000 bp, Homo Sapiens; identical to SEQ ID NO: 222277

SEQ ID NO: 399202 - DNA, 1000 bp, Homo Sapiens
gtctctgttcttatgtttataatcagttcaatgctggtttatggagcaatttcttatcaagtgggttggctgattccattcttctgttaccgactttttgacttcgtcctcagttgcctggttgctattagttctctcacctatttgccaagaatcaaagaatatctggatcaactacctgattttccctacaaagatgacctcctggccttggactccagctgcctcctgttcattgttcttgtgttctttgccttattcatcatttttaaggcttatctaattaactgtgtttggaactgctataaatacatcaacaaccgaaacgtgccggagattgctgtgtaccctgcctttgaagcacctcctcagtacgttttgccaacctatgaaatggccgtgaaaatgcctgaaaaagaaccaccacctccttacttacctgcctgaagaaattctgcctttgacaataaatcctataccagctttttgtttgtttatgttacagaatgctgcaattcagggctcttcaaacttgtttgatataaaatatgttgtcttttgtttaagcatttattttcaaacactaaggagctttttgacatctgttaaacgtctttttgtttttttgttaagtcttttacattttaatagtttttgaagacaatctaggttaagcaagagcaaagtgccattgtttgcctttaattggggggtgggaagggaaagagggtacttgccacatagtttcctttttaactgcactttctttatataatcgtttgcattttgttacttgctaccctgagtactttcaggaagactgacttaaatattcggggtgagtaagtagttgggtataagatctgaacttttcatctgcagaggcaagaaaaatatttgacattgtgacttgactgtggaagatgatggttgcatgtttctagtttgtatatgtttccatctttgtgataagatgatttaataaatctctttaaatact

SEQ ID NO: 399203 - DNA, 1000 bp, Homo Sapiens; identical to SEQ ID NO: 222278

SEQ ID NO: 399204 - DNA, 1000 bp, Homo Sapiens; identical to SEQ ID NO: 288339

SEQ ID NO: 399205 - DNA, 1000 bp, Homo Sapiens; identical to SEQ ID NO: 117053

SEQ ID NO: 399206 - DNA, 1000 bp, Homo Sapiens
ggtcctcagggcctacagttctgatggcttagcagcctttaacggacttgcaagtagcacagcaaattctggatgtatcaagaggccagacttgtgtggtaagtgacactccctgtcctagtcggtctatctggacttgcccttgtctgttcgtggtcctcggtggttatctgcagcttgttaatcgtgtaaagtcaagagaagaatgtatacacatatgtgtgttgaataattactattggcataggtatgtgtatacacacggtgcaccaatctacagtatatatagcagagaatcagaggctaaaaatattaccccatatgttccagtattagtcatggattgcaaaggcttagtaacttgagcaggagagaaaactccctcaaagtcataaatcctgagtgacaactgctgctggatgacagatcccttcacctgtggacaacctggctgggggtggggggctgttccaccagctcacctgagcatgtagaggtgggtcctgcagtggtctcgtgggtattactgcttgtgtctgattgtcctgtattttgtaacactttagaagaatacagaaaagtgcagtaattctctttctccatagtatttaagcagaaatattgctagtttaatattgtgtcaggtcgtcctattaaccaggagcagatgacagtaaaatttcagtgaatagcaccttgacatctacaacttaaaaatggtgattgaagcaaaatatgtaaacttgtacggggtgatcgtgtgctttggaacagagtattgttgaagtaattagaagatatattaaggtgttcctggtaatgaaggcatgtaagttataataattgtagctttctgaataagtgtcaaactatatctttaagtgtgctgtatgctgagttacaagttaggtcatttatgaatggaatgtaaaataatactaaaaatgcttcaataacttatcttggtattgctaataaaaaaaaaaagctgtgaaacatt

SEQ ID NO: 399207 - DNA, 1000 bp, Homo Sapiens; identical to SEQ ID NO: 117054

SEQ ID NO: 399208 - DNA, 1000 bp, Homo Sapiens; identical to SEQ ID NO: 288343

SEQ ID NO: 399209 - DNA, 1000 bp, Homo Sapiens; identical to SEQ ID NO: 222280

SEQ ID NO: 399210 - DNA, 1000 bp, Homo Sapiens; identical to SEQ ID NO: 288345

SEQ ID NO: 399211 - DNA, 1000 bp, Homo Sapiens; identical to SEQ ID NO: 117055

SEQ ID NO: 399212 - DNA, 1000 bp, Homo Sapiens; identical to SEQ ID NO: 288347

SEQ ID NO: 399213 - DNA, 1000 bp, Homo Sapiens; identical to SEQ ID NO: 288349

SEQ ID NO: 399214 - DNA, 1000 bp, Homo Sapiens; identical to SEQ ID NO: 222283

SEQ ID NO: 399215 - DNA, 1000 bp, Homo Sapiens; identical to SEQ ID NO: 222284

SEQ ID NO: 399216 - DNA, 1000 bp, Homo Sapiens; identical to SEQ ID NO: 288351

SEQ ID NO: 399217 - DNA, 1000 bp, Homo Sapiens; identical to SEQ ID NO: 222285

SEQ ID NO: 399218 - DNA, 1000 bp, Homo Sapiens; identical to SEQ ID NO: 117056

SEQ ID NO: 399219 - DNA, 1000 bp, Homo Sapiens; identical to SEQ ID NO: 288355

SEQ ID NO: 399220 - DNA, 1000 bp, Homo Sapiens; identical to SEQ ID NO: 117058

SEQ ID NO: 399221 - DNA, 1000 bp, Homo Sapiens; identical to SEQ ID NO: 288358

SEQ ID NO: 399222 - DNA, 1000 bp, Homo Sapiens; identical to SEQ ID NO: 222286

SEQ ID NO: 399223 - DNA, 1000 bp, Homo Sapiens; identical to SEQ ID NO: 222287

SEQ ID NO: 399224 - DNA, 1000 bp, Homo Sapiens; identical to SEQ ID NO: 117060

SEQ ID NO: 399225 - DNA, 1000 bp, Homo Sapiens; identical to SEQ ID NO: 288363

SEQ ID NO: 399226 - DNA, 1000 bp, Homo Sapiens; identical to SEQ ID NO: 288364

SEQ ID NO: 399227 - DNA, 1000 bp, Homo Sapiens; identical to SEQ ID NO: 288365

SEQ ID NO: 399228 - DNA, 1000 bp, Homo Sapiens; identical to SEQ ID NO: 117061

SEQ ID NO: 399229 - DNA, 1000 bp, Homo Sapiens; identical to SEQ ID NO: 222290

SEQ ID NO: 399230 - DNA, 1000 bp, Homo Sapiens; identical to SEQ ID NO: 288368

SEQ ID NO: 399231 - DNA, 1000 bp, Homo Sapiens; identical to SEQ ID NO: 117062

SEQ ID NO: 399232 - DNA, 1000 bp, Homo Sapiens; identical to SEQ ID NO: 284373

SEQ ID NO: 399233 - DNA, 1000 bp, Homo Sapiens; identical to SEQ ID NO: 288371

SEQ ID NO: 399234 - DNA, 1000 bp, Homo Sapiens; identical to SEQ ID NO: 117063

SEQ ID NO: 399235 - DNA, 1000 bp, Homo Sapiens
tctctagaaaggaactctctttcttctcttggcactgggggcgtcaggctgtcggatgttccttccttccataccccagcataccttctccttgcttagagtgcaggggtctgagacagcagccactggggttgaggagggggaggagacccctgagacccagaggtgccccttcctcagctgggagtgggccgcctcatgctctgctggggcctggcatggaacgtgagacctgtaagctgtcccgcgggccccggcaccccgcccagctgtgcactttgctcactcgctctgccatggtgccatgactgtactgtgcccatgcgtgacctggactgtggaccctctgctgctccgcctctcccctccccactggctctgtctgctctcctgccaccctgctggcggggagcccctccccggggagttcttggtgaagtccttcccgggcctccttgtgtttttgcctcattcctactgtcacacaggtcacgagggtggactccctacaatcaacaaagcaaacagagagcctgtgggaggggctgacagcagcaggcggctgtttgggggatgatggaggtgacatcaggcagaggagagtgcagcctcacagtgactttctcagaggtgacagagatgatggatgagcagctggattttcgtgatgaaggacggaagcagcagcgggccggcaaggccatacctcggtgagggacaggtggacaacggtcacctatctgtagccaggggcagttgtgtggccagctgtctctctgggatgagtcaggaggcctggaggcttggggagaggtgtggagaaggagagaacatggcccaggcactttccttcaccctgtgctgacagcattgctgtgggggtggcccactgccctcccctggccctcatgtccccccggggctggggtccgcctgcctgtgctgtgcttgcgacgtgcatcaataaaccaccatggcctgaggaaaaaaaaaaaaaaaa

SEQ ID NO: 399236 - DNA, 1000 bp, Homo Sapiens; identical to SEQ ID NO: 117064

SEQ ID NO: 399237 - DNA, 1000 bp, Homo Sapiens; identical to SEQ ID NO: 288374

SEQ ID NO: 399238 - DNA, 1000 bp, Homo Sapiens; identical to SEQ ID NO: 117065

SEQ ID NO: 399239 - DNA, 1000 bp, Homo Sapiens
ggcagttagagggagaacaggggtgggaaagggagcaaggggcagatagctcagcaaggaaagaatgggctcagaaaaaggagggctggctggaggagtgaggggcagcttaagtttggggagggtagaaacgccgtttccttgggaactggagtgcagtatgagctgggtgtcacttggctctgaacatactggctttgctgtaatgcttgaaaaggcgttggtatcttcattttacagttcattaacccaagtacgttttcttatttaaatgacaactttggtgctttaaaatgaggtaccactttttaaagctagctgtgtcgagttaaagaaaaaatcagcagttttttctcccagaaatgtaattgccaaacacttttcatccccatcttaagttttacaaggtgatgtaatcagcttgttgtagtgatgctggccaaatggtgctcagcaggtgagaacaaaaaaaccccagatttcagtgaactaatacacagcttgagcgtttccatgtgctaatgttgcacacttactaaaaaactttggaaatggaaaataatgtattagtgcaacagttgatgtgcttctttgggcaaagatatagttttgttccacaatttgtacttaaaagcgaaagaacattgaaaacatagacttactggctgtagcaatgctggcctgttaactgataactagaacttaggttcacgtttatgtaaagtgtgtaaaacctagtagagcttgcatagtcggcactcagtaaatgtttggttccttttgccccttggtaagtttattttaccatcctcccacctgccattctgactttattaaatcaacatgtggaccagagtgttaatgagatgttattgcagaagagattgagaaaattggtatatcatgcagataacatacaaaatctttttgtaacgtaaaaaatgcagttttattattgcttgtgcctcaactgtttaagtgaatattaaagggcttggag

SEQ ID NO: 399240 - DNA, 1000 bp, Homo Sapiens; identical to SEQ ID NO: 288376

SEQ ID NO: 399241 - DNA, 1000 bp, Homo Sapiens; identical to SEQ ID NO: 117067

SEQ ID NO: 399242 - DNA, 1000 bp, Homo Sapiens; identical to SEQ ID NO: 117068

SEQ ID NO: 399243 - DNA, 1000 bp, Homo Sapiens; identical to SEQ ID NO: 118970

SEQ ID NO: 399244 - DNA, 1000 bp, Homo Sapiens; identical to SEQ ID NO: 222293

SEQ ID NO: 399245 - DNA, 1000 bp, Homo Sapiens; identical to SEQ ID NO: 117070

SEQ ID NO: 399246 - DNA, 1000 bp, Homo Sapiens; identical to SEQ ID NO: 222296

SEQ ID NO: 399247 - DNA, 1000 bp, Homo Sapiens; identical to SEQ ID NO: 288383

SEQ ID NO: 399248 - DNA, 1000 bp, Homo Sapiens
cactcctggcctgttgcctcaatctgccacacactgaaccccagaacctgcctgccctcctacctgaggggcactttgaacagatactccaacttctacaacaagagtcagagccaccctgcccttgagcgaggctcacagaggcgactgcagtggacgtggctgggctgggctgagctgcagtttgggaaccagaccctgcatgtgtccaccgtgcagatgtggctactgctgtatctcaacgacctgaaggcggtctctgtggagagtctgctggcgttctcagggctctccgcagacatgctcaatcaggcgattgggcccctcacctcttcaagaggccccctggaccttcacgagcaaaaggatataccaggaggggtcctcaagattcgagatggcagcaaggaacccaggtcgagatgggacattgtgcggctcatcccacctcagacgtacctgcaagctgagggtgaagacggccagaacttggagaagagacggaatcttctgaactgcctcatcgtccgaatcctcaaggcccatggagatgaggggctgcacattgaccagcttgtctgtctggtgctggaggcttggcagaagggcccgtgtcctcccaggggtttggtcagcagccttggtaaggggtctgcatgcagcagcactgacgtcctctcctgcatcctacacctcctgggcaagggcacgctgagacgccatgacgaccggccccaggtgctgtcctatgcagtccctgtgactgtcatggagcctcacactgagtccctgaacccaggctcctcaggccccaacccacccctcaccttccataccctacagattcgctcccggggtgtgccctatgcctcctgcactgccacccagagcttctctaccttccggtagccctagacttggggtcaggggaaggtagagctggagcttttacagaaataaaacccaagagtttgattataaaaaaaaaaaaaaaaaaaaa

SEQ ID NO: 399249 - DNA, 1000 bp, Homo Sapiens; identical to SEQ ID NO: 288384

SEQ ID NO: 399250 - DNA, 1000 bp, Homo Sapiens; identical to SEQ ID NO: 222297

SEQ ID NO: 399251 - DNA, 1000 bp, Homo Sapiens; identical to SEQ ID NO: 222298

SEQ ID NO: 399252 - DNA, 1000 bp, Homo Sapiens; identical to SEQ ID NO: 288388

SEQ ID NO: 399253 - DNA, 1000 bp, Homo Sapiens; identical to SEQ ID NO: 222299

SEQ ID NO: 399254 - DNA, 1000 bp, Homo Sapiens
tgctgtccctggcagagaagtggatccagcagattgaaggagctgaggctgccctacaccagaaaatgatggaattggaaagtgacatggaacagttctgcaaaataaaaggctatctggaggaagaactagactacagaaaacaagctcttgaccaagcatatatgagaatccaggaactagaagctactttgtacaatgctctacagcaagaaactgttatcaagtttggtgaattattaagtgaaaaacagcaagaggagctgaggacggcagtagaaaagttacggcggcaaatgctgaggaagagcagagagtatgactgtcagattcttcaggagagaatggagctcttacagcaagcccatcagagaattcgtgacttagaagataaaacagacatccagaaaagacaaataaaagacttagaagaaaagagtaaccgaaaacatggataagatcccaggaagacaagtgcttctaaaccttcaaagatggcaaaattgtttacaccagtgagagggagatcaaaagctaagaactaccctgtagccaggactacaactgtgtattttaaagccattattcaaggtttcttacttgacagttcctacacaaccctgttgaaaatctacaatatatgctgcatttaatgaaacatgtatatgtcaaatcagaagagaagaactataaacatatattgtgtaaagaaaaagttcagcaatggaactagtttctgcagatcaagcaaagatgtgtcttgggcatggaaccaaagttacaatgaaatattcaacccctgctgtgcaggggggtcattttaatgtaacaccacaccccatggaaacactagtcctgataataaacatcattttaaaagatcaaaacaaacaaacaaaaaaaacaagggtgggtggggagtgaagcacgaggaatacctatgaagagctatttacaataaaatgtttcatttgaaaagtcaaaaaaaaaaaaaaaaaaa

SEQ ID NO: 399255 - DNA, 1000 bp, Homo Sapiens; identical to SEQ ID NO: 222300

SEQ ID NO: 399256 - DNA, 1000 bp, Homo Sapiens; identical to SEQ ID NO: 288391

SEQ ID NO: 399257 - DNA, 1000 bp, Homo Sapiens; identical to SEQ ID NO: 222301

SEQ ID NO: 399258 - DNA, 1000 bp, Homo Sapiens; identical to SEQ ID NO: 222302

SEQ ID NO: 399259 - DNA, 1000 bp, Homo Sapiens; identical to SEQ ID NO: 222303

SEQ ID NO: 399260 - DNA, 1000 bp, Homo Sapiens; identical to SEQ ID NO: 222304

SEQ ID NO: 399261 - DNA, 1000 bp, Homo Sapiens; identical to SEQ ID NO: 117072

SEQ ID NO: 399262 - DNA, 1000 bp, Homo Sapiens; identical to SEQ ID NO: 288397

SEQ ID NO: 399263 - DNA, 1000 bp, Homo Sapiens; identical to SEQ ID NO: 222305

SEQ ID NO: 399264 - DNA, 1000 bp, Homo Sapiens; identical to SEQ ID NO: 288399

SEQ ID NO: 399265 - DNA, 1000 bp, Homo Sapiens; identical to SEQ ID NO: 288400

SEQ ID NO: 399266 - DNA, 1000 bp, Homo Sapiens; identical to SEQ ID NO: 222306

SEQ ID NO: 399267 - DNA, 1000 bp, Homo Sapiens; identical to SEQ ID NO: 117073

SEQ ID NO: 399268 - DNA, 1000 bp, Homo Sapiens; identical to SEQ ID NO: 117074

SEQ ID NO: 399269 - DNA, 1000 bp, Homo Sapiens; identical to SEQ ID NO: 288404

SEQ ID NO: 399270 - DNA, 1000 bp, Homo Sapiens; identical to SEQ ID NO: 288405

SEQ ID NO: 399271 - DNA, 1000 bp, Homo Sapiens; identical to SEQ ID NO: 117075

SEQ ID NO: 399272 - DNA, 1000 bp, Homo Sapiens; identical to SEQ ID NO: 288407

SEQ ID NO: 399273 - DNA, 1000 bp, Homo Sapiens; identical to SEQ ID NO: 222310

SEQ ID NO: 399274 - DNA, 1000 bp, Homo Sapiens; identical to SEQ ID NO: 117076

SEQ ID NO: 399275 - DNA, 1000 bp, Homo Sapiens; identical to SEQ ID NO: 117077

SEQ ID NO: 399276 - DNA, 1000 bp, Homo Sapiens; identical to SEQ ID NO: 117078

SEQ ID NO: 399277 - DNA, 1000 bp, Homo Sapiens; identical to SEQ ID NO: 222312

SEQ ID NO: 399278 - DNA, 1000 bp, Homo Sapiens
ggttgggagtaagcagcccaccagaactgatccaaggaatatttaatgtgccatcttttgcacatatcaacacagatatgacattgctgcctgaagtgggaaacccatactctcaacaactcagaatgataatgggtattatccaacaaaagaggccatattcaatgaagctcacaattgtaaagcagcgagaacaaccagaaatggttttccgacagttcctggtagaagacaaaggactttacggaggctcttcttatgtggatttcctttgttgtgttcacaaggagatctgtcagctgcttaattaattgaaacttctctgtcattgatgttgcatttccaaggagataatctccttcttggtgcctaattttctagatgataataggctagttttgatttcttgctcattttcagaataactttccaggaagagatggcatttagaacttcagctttggtgctcaggtataaagccaattaaggtacaattgtaccataaagggaacaatctgtttctgattgcacagtttctaatttttaaaactgatgtggtttgcatttcataaaaggcaaagtttacagaaccataaacattctcaattttctttatgctagacatataaattatttttcaaactgtatagatttggggtaaaaagttgtctcagttcctctcccaattgcaatgagaaaaaaaagcttaatttttacattatacttaattttctaaaaccatgtaactccattgaacatttttcaacttaaggtctgcatagcagacttttaataaccttgggatttatctggtagaacaatatgtgttctacatttttttcataattatatattgtgtatgttaaaactattttccagttgttttgtctgtaaaactgtctttatcaatatgcttaatggttctttgtacaattttgaaagtttctacctgtatataatggatgttaaccagtatcaataaatcacttcgtataatctt

SEQ ID NO: 399279 - DNA, 1000 bp, Homo Sapiens
gaacctggtggctcgtggaggaaaccagctttctatgagaaaggactgaaggattgcgcaccctgcacaagtacagattgaccaggaaaagacaagtgtcttctgtgtgtcacagggaaagccaggagtggccttctctgcaggccagcaagcctgcagcagcaggtgcccccacgtcaggtgctgactgtccgctgtccgctcctgtagaaggtagggagcacaatacctagggactaagggatgttcgccggttgtggtttgttttttttttttttttccttggttaagaaatcaaatttgcagaatttaatctacaagttgtattatgctttgaaaactccatccctcctaagaatcttaaaaaacttgaaatgctcgccaaatgtccccatgggatttttgaccaaaagtaaggtgataactgaagaaatttttagttctttgatcacttcagtgacaatacccattaatgaatcttctccatgatttggggttttttttcgttgttgttttttacacttcttaacctgttgatctatttgaggtcttttgtgtttatcaaacttattcttaagtttaaaaaagaaattaaaagggtggtttttttaagattttaaagtttgctaacatattaaaaatcttcaaatgcttattaaatagagcagttcttgccacccagtcttgtattctgtctttagctagccaaattgtccttgaatttgggttttccacaacctcaaagggttatttgaaatcttttgttgtattttaaaatattttttggaagagctgctaattttattttaaaaaacaaagttgtgaaaacatgcctcctttttaaaaaataacccctccatccaggatatggaatccagcaccacagtgcacaggtcagggctcggagggagcctctgtgcagatgtgctttctttacagtggctgtaaaaagtttgtatttattatgtataaaatgttgaataataaaaaaaatggaatt

SEQ ID NO: 399280 - DNA, 1000 bp, Homo Sapiens; identical to SEQ ID NO: 222313

SEQ ID NO: 399281 - DNA, 1000 bp, Homo Sapiens; identical to SEQ ID NO: 117079

SEQ ID NO: 399282 - DNA, 1000 bp, Homo Sapiens; identical to SEQ ID NO: 222314

SEQ ID NO: 399283 - DNA, 1000 bp, Homo Sapiens; identical to SEQ ID NO: 117080

SEQ ID NO: 399284 - DNA, 1000 bp, Homo Sapiens; identical to SEQ ID NO: 288415

SEQ ID NO: 399285 - DNA, 1000 bp, Homo Sapiens; identical to SEQ ID NO: 288416

SEQ ID NO: 399286 - DNA, 1000 bp, Homo Sapiens; identical to SEQ ID NO: 288417

SEQ ID NO: 399287 - DNA, 1000 bp, Homo Sapiens
ccgtaaagttttttaaagttttgggttagtaatttgttttactagaatgacaaagaagatgtaaaccattttattctgtaggctttttactcaattatgtacaaaccacaaatcaggtactgtattttagtgaagcattgctttaattgcaacagaatagcttttgtggctatcaaatgaaatctgtaaataggaggtggagggcaagccatcctgactgagcagtttttaaccgcaggttctaaagtgtcccgcggagtacagataatattctggaaggtaactgtttactacgacagagacgtggcatttggaaacgaaacttagatgtttcatggagcttattttgagaactttcccatttcaggtttctgcattcaggctttacatggtcagttaactcagagataccccagctgtttatcatcagctcctctgaaatgtgatccctttgtaactgtgctcatcacttcgccagtgcgttcaatgacacgctgatggcaggtggtccctgctgaaacccccacgcctccgcttcagcatctccacgctctgaagctgtctttcaaaatgtgtgcactgacccccttgtttgatcaaatttgtgtaaaatttttttagaagagatggcttattaacagggaagaagcttgttatattccagttgtaagaatagccttagtgtttagatttttttatgatagggaagatgcggccatcactgggatattttcaaatcccaaggacatcagagtgaagtgtcagttgtcagatgattttaaaagttatgtcttcagagaaaaaaagattcattttctcattttaagccaattaaatattctgagtgagactaatcactcatttgcctacgaccttttagaaaagttgttttgttgaaatactgtacatacgcttaatctaaatttgcattgactatgttttagtgtatttataaatggtgaactcagtttctgaaattaaacttcttatttgcaatttt

SEQ ID NO: 399288 - DNA, 1000 bp, Homo Sapiens; identical to SEQ ID NO: 288418

SEQ ID NO: 399289 - DNA, 1000 bp, Homo Sapiens; identical to SEQ ID NO: 288419

SEQ ID NO: 399290 - DNA, 1000 bp, Homo Sapiens; identical to SEQ ID NO: 222316

SEQ ID NO: 399291 - DNA, 1000 bp, Homo Sapiens; identical to SEQ ID NO: 222317

SEQ ID NO: 399292 - DNA, 1000 bp, Homo Sapiens; identical to SEQ ID NO: 288422

SEQ ID NO: 399293 - DNA, 1000 bp, Homo Sapiens; identical to SEQ ID NO: 117082

SEQ ID NO: 399294 - DNA, 1000 bp, Homo Sapiens; identical to SEQ ID NO: 222318

SEQ ID NO: 399295 - DNA, 1000 bp, Homo Sapiens; identical to SEQ ID NO: 117083

SEQ ID NO: 399296 - DNA, 1000 bp, Homo Sapiens; identical to SEQ ID NO: 117084

SEQ ID NO: 399297 - DNA, 1000 bp, Homo Sapiens; identical to SEQ ID NO: 222321

SEQ ID NO: 399298 - DNA, 1000 bp, Homo Sapiens
tgcaaactccctcagggagcccccctgccctgtagctctcgcttaacttcctaggggctgctgagcccacccagaggttgttggagttcagcggggcagcttgtctcccttgtcagcaggggcgtaagggctgggtttggccatacaaggttggctacgccctcaatccctgaccgttccaggcactgagctgggcacccacggaaggacatgctgtccagactgtgatgactgccagcacagggcatctcgggcttggctggtctgcgaggccttgcccctgtggaactctgggttcctgttttctcagtcttttttgcggctttgctgtggttggcagctgccgtactccaggcttgtgtcggccactcagatgagggctgtggtgcgagccagtgcaggagagctgcgcttgggattgtgccctctcctgtgtctgtcctccggacctacccaggtctccaccatcaggaccctgtctttgggtttagaagaccaagtatggggaaaaccaggcaccagcctctgcagcaatgggtccctctagcctgtggacaccagctgggggatccagggtcaggccccctcctctccacagtttccctctgctgtgggttctgggctgtcatgtctccaccacttaaggatgtctttacactgacttcaggatagatgctgggatgcctgggcatggccacatgttacatgtacagaactttgtctacagcacaaattaagttatataaacacagtgactggtatttaatgctgatctactataaggtattctatatttatatgacttcagagacgcgtatgtaataaaggacgccctccctccagtgtccacatccagttcaccccagagggtcgggcaggttgacatatttatttttgtctattctgtaggcttccatgtccagaatcctgcttaaggttttagggtaccttcagtactttttgcaataaaagtatttcctatccaaaaaaaaaaaaaaaa

SEQ ID NO: 399299 - DNA, 1000 bp, Homo Sapiens; identical to SEQ ID NO: 288427

SEQ ID NO: 399300 - DNA, 1000 bp, Homo Sapiens; identical to SEQ ID NO: 288428

SEQ ID NO: 399301 - DNA, 1000 bp, Homo Sapiens; identical to SEQ ID NO: 288429

SEQ ID NO: 399302 - DNA, 1000 bp, Homo Sapiens; identical to SEQ ID NO: 288430

SEQ ID NO: 399303 - DNA, 1000 bp, Homo Sapiens; identical to SEQ ID NO: 288431

SEQ ID NO: 399304 - DNA, 1000 bp, Homo Sapiens; identical to SEQ ID NO: 288432

SEQ ID NO: 399305 - DNA, 1000 bp, Homo Sapiens; identical to SEQ ID NO: 117085

SEQ ID NO: 399306 - DNA, 1000 bp, Homo Sapiens; identical to SEQ ID NO: 117086

SEQ ID NO: 399307 - DNA, 1000 bp, Homo Sapiens; identical to SEQ ID NO: 117087

SEQ ID NO: 399308 - DNA, 1000 bp, Homo Sapiens; identical to SEQ ID NO: 288435

SEQ ID NO: 399309 - DNA, 1000 bp, Homo Sapiens; identical to SEQ ID NO: 288436

SEQ ID NO: 399310 - DNA, 1000 bp, Homo Sapiens; identical to SEQ ID NO: 117088

SEQ ID NO: 399311 - DNA, 1000 bp, Homo Sapiens; identical to SEQ ID NO: 222324

SEQ ID NO: 399312 - DNA, 1000 bp, Homo Sapiens; identical to SEQ ID NO: 288438

SEQ ID NO: 399313 - DNA, 1000 bp, Homo Sapiens; identical to SEQ ID NO: 117089

SEQ ID NO: 399314 - DNA, 1000 bp, Homo Sapiens; identical to SEQ ID NO: 288441

SEQ ID NO: 399315 - DNA, 1000 bp, Homo Sapiens; identical to SEQ ID NO: 117090

SEQ ID NO: 399316 - DNA, 1000 bp, Homo Sapiens; identical to SEQ ID NO: 222326

SEQ ID NO: 399317 - DNA, 1000 bp, Homo Sapiens; identical to SEQ ID NO: 222327

SEQ ID NO: 399318 - DNA, 1000 bp, Homo Sapiens; identical to SEQ ID NO: 222328

SEQ ID NO: 399319 - DNA, 1000 bp, Homo Sapiens
tgtggcatggcacgcccaaggacaggaaagtgattgtgaaaacaatgaagacttatgttgaaaaggtggctaatggccaatactcccatttggttttactggcggcatttgattgtattgatgatactaagcttgtgaagcagataatcatatcagaaattatcagttcattgcctagcatagtaaatgacaaatatggaaggaaggtcctattgtacttactaagccccagagatcctgcacatacagtacgagaaatcattgaagttctgcaaaaaggagatggaaatgcacacagtaagaaagatacagaggtccgcagacgggagctcctagaatccatttctccagctttgttaagctacctgcaagaacacgcccaagaagtggtgctagataagtctgcgtgtgtgttggtgtctgacattctgggatctgccactggagacgttcagcctaccatgaatgccatcgccagcttggcagcaacaggactgcatcctggtggcaaggacggagagcttcacattgcagaacatcctgcaggacatctagttctgaagtggttaatagagcaagataaaaagatgaaagaaaatgggagagaaggttgttttgcaaaaacacttgtagagcatgttggtatgaagaacctgaagtcctgggctagtgtaaatcgaggtgccattattctttctagcctcctccagagttgtgacctggaagttgcaaacaaagtcaaagctgcactgaaaagcttgattcctacactggaaaaaaccaaaagcaccagcaaaggaatagaaattctacttgaaaaactgagcacataggtggaaagagttaagagcaagatggaatgattttttctgttctctgttctgtttcccaatgcagaaaagaaggggtagggtccaccatactggtaattggggtactctgtatatgtgtttcttctttgtatacgaatctatttatataaattgtttttttaaatggt

SEQ ID NO: 399320 - DNA, 1000 bp, Homo Sapiens; identical to SEQ ID NO: 288447

SEQ ID NO: 399321 - DNA, 1000 bp, Homo Sapiens
aacccacatgctcttgttgtctgtggcacttactctattggaaaagagaaagtcttcctagccattgctgatgttttaggttcaaaagtgggcatgtcccaggaaaaatataaaactctacagtgcctcaatataccagaaattaattcactcatcactaccgacatgtgcagttcattggttcaccttctcccaatgatgcaaattaattttaagggcttacagagtcatttgaagaagtgtggtgggaaatacaatcagattttggcatttcgacctacaggatggacacactctaacaagttcactagaatagcagatgttattccccagaccaaaggaaacatttcaatatatggaattccttacagtgaacacagcagctacctagaaatgaagcgctttgtccagtggctgaagccccagaaaatcatacctactgtaaatgtgggcacctggaaatctaggagcacaatggagaaatattttagagagtggaaattggaagctggatattgatgatacctccgaggattcagtagtagttaagttccttggatgtagcttgttagtagttaaatctatagaaatgtgaaatacactttgtgtggaaaaacctcatgaagattgttcagatactttattttctcatttatgtttgaacaacatgttcgtggtgctgaatgcctctcagcatcatcaaggataactgaaactgggtctccctgggacccttaatttcttgtcccctgccctccatgggcagttatattctgcatcaagccttagaagaggaagcaaaggcagattcagggaccaaaaggattaatgataattaataaagtagtttgaagcattatatatataagtaattatgtgtctttaaaattatgagatgaaacttttatatgacgtgtatacttaaataaaattaatataaaatttgaaaaaaaaaaaaaaaaaaaaaaaaaaaaaaaaaaaaaaaaaaaaaaaaaaaaaa

SEQ ID NO: 399322 - DNA, 1000 bp, Homo Sapiens; identical to SEQ ID NO: 220731

SEQ ID NO: 399323 - DNA, 1000 bp, Homo Sapiens
gaattacaccgtaaacgctatggataccgtttggattaccatgagaaaaagagaaagaaggaaagtcgagaggctcatgaacgttcaaagaaggcaaagaaaatgattggtctgaaggctaagctttaccataaacagcgtcatgctgagaaaatacaaatgaaaaagactatcaagatgcatgaaaagagaaacaccaaacaaaagaatgatgaaaagacaccacagggagcagtacctgcctatctgctggacagagagggacaatctcgagctaaagtactttccaatatgattaaacagaaaagaaaagagaaggcgggaaaatgggaagtccctctgcctaaagtacgtgcccagggagaaacagaagtattaaaagttattcgaacaggaaagagaaagaagaaggcatggaagagaatggttactaaagtgtgctttgttggagatggctttacaagaaaaccacctaaatatgaaagattcatcaggccaatgggcttgcgtttcaagaaagcccatgtaacacatcctgaactgaaagccaccttttgcctaccaatacttggtgtaaagaagaatccctcatccccactgtatacaactttgggtgttattaccaaaggtactgtcattgaagtaaatgtgagcgaattgggccttgtgacgcaaggaggcaaagttatttggggaaaatatgcccaggttaccaacaatcctgaaaatgatggatgtataaatgcagtcttactggtttgacagcaatttcatatataattattgaggactacacaccaattgaagaaactgccattactgtgatgtttctgaatactaccaaacagccatacatgtctgcaatgaagagatttattaaattgtaaacattaaagtggtccagttttataaatggtctttattttgaaatacgctttgaccccatgttcataaaactgaatgattgaaaaaaagcaaatatacaaatatcctacttcat

SEQ ID NO: 399324 - DNA, 1000 bp, Homo Sapiens; identical to SEQ ID NO: 222329

SEQ ID NO: 399325 - DNA, 1000 bp, Homo Sapiens; identical to SEQ ID NO: 117092

SEQ ID NO: 399326 - DNA, 1000 bp, Homo Sapiens
actttgtgcaacctggagatctagtcctaagccacacacctgggcagccacttcatataaaggttactccagaccatgtacaaaacacagccactcttgaaatcacaagtccaaccacagagagtcctcactcttacacgagtactgcagtgataccgaactgtggcacgccaaagcaaaggataaccatcctccaaaacgcctccataacaccagtaaagtccaaaacctctaccgaagacctcatgaatttagaacaaggcatgtccccaattaccatggcaacctttgccagagcacagaccccagagtcttgtggttctctaactccagaaaggacaatgtccctattcaggttttggctgtgactggttcagctagctctcctgagcagggacgctccccagaaccaacagaaatcagtgccaagcatgcgatattcagagtctccccagaccggcagtcatcatggcagtttcagcgttcaaacagcaatagctcaagtgtgataactactgaggataataaaatccacattcacttaggaagtccttacatgcaagctgtagccagcccttcagcaccactgcaggataaccgaactcaaggcttaattaacggggcactaaacaaaacaaccaataaagtcaccagcagtattactatcacaccaacagccacacctcttcctcgacaatcacaaattacagtaagtaatatatataactgaccacgctcaccctcatccagtccatactgatatttttgcaaggaactcaatccttttttaatcatccctccatatcccccaagactgactgaactcgtactttgggaaggtttgtgcatgaactatacaagagtatctgaaactaactgttgcctgcatagtcatatcgagtgtgcacttactgtatatcttttcatttacatacttgtatggaaaatatttagtctgcacttgtataaatacatctttatgtatttgaaaaaaaaaaaa

SEQ ID NO: 399327 - DNA, 1000 bp, Homo Sapiens; identical to SEQ ID NO: 222330

SEQ ID NO: 399328 - DNA, 1000 bp, Homo Sapiens; identical to SEQ ID NO: 222331

SEQ ID NO: 399329 - DNA, 1000 bp, Homo Sapiens; identical to SEQ ID NO: 222332

SEQ ID NO: 399330 - DNA, 1000 bp, Homo Sapiens; identical to SEQ ID NO: 117093

SEQ ID NO: 399331 - DNA, 1000 bp, Homo Sapiens; identical to SEQ ID NO: 222334

SEQ ID NO: 399332 - DNA, 1000 bp, Homo Sapiens; identical to SEQ ID NO: 288456

SEQ ID NO: 399333 - DNA, 1000 bp, Homo Sapiens; identical to SEQ ID NO: 117094

SEQ ID NO: 399334 - DNA, 1000 bp, Homo Sapiens
tgtggggccggcacatcctagcaggcagcccctggcgcctgctgcctcagggatgctccaaccaccctcgttctcctcgcagtggccctggctcccacctcccgccccagcctgccgtggggcccgtcagcctggtcccacccccatggagaacccaaagtcttactgtatataactccaggtgacgtttctatatttatagcagtgttgaaaacccacgtgttttacacagaaccaccctctccaacccctcccttcccgaccccaacaaaacgttttcaaaccccttacagttcctggggcaggcggaaacaggctcacagattgtgtgtcggctgcagcagtgattccaacaagcagctattgggggggaaacacagcatttaaaaagatcatcattaaaaaacaagatttatacaacaattacttaggatgtttgtgatctgccgaccttgctatagatgccatgttaccaatgatttcctgtggtgggggcttgccattgtttactctcttatttaccaacttctggcctaggcatgacagtgggcaccttcccccagccctggctgggcccagcgcctgtgttctgtgttagaaaggttttatatatatataaaattacatatatatgtagaaatatatgtaattttgggggccctgttccttgcacattttacagttacctcatttttcccatgtatgtatttgagaaaatgctaatatatagagaaaaaaatggttcttaaagcttaaatgtgtggttttttccattccatgggattcacattggtttgtagcatttaacataactagtatgttgtattatatatatgtgtatactgattgaaatttttaacagatttgtactttttttaaaatgaaagttgctagttctgcttgaccaagtagtgcaatcattattttttttaatattgttgctgatttcagagggatattcactaataaatgtatgatgtataccaacgaccgcccacgc

SEQ ID NO: 399335 - DNA, 1000 bp, Homo Sapiens; identical to SEQ ID NO: 293820

SEQ ID NO: 399336 - DNA, 1000 bp, Homo Sapiens; identical to SEQ ID NO: 222335

SEQ ID NO: 399337 - DNA, 1000 bp, Homo Sapiens; identical to SEQ ID NO: 117095

SEQ ID NO: 399338 - DNA, 1000 bp, Homo Sapiens; identical to SEQ ID NO: 117096

SEQ ID NO: 399339 - DNA, 1000 bp, Homo Sapiens; identical to SEQ ID NO: 117097

SEQ ID NO: 399340 - DNA, 1000 bp, Homo Sapiens; identical to SEQ ID NO: 222337

SEQ ID NO: 399341 - DNA, 1000 bp, Homo Sapiens; identical to SEQ ID NO: 222338

SEQ ID NO: 399342 - DNA, 1000 bp, Homo Sapiens; identical to SEQ ID NO: 288465

SEQ ID NO: 399343 - DNA, 1000 bp, Homo Sapiens; identical to SEQ ID NO: 288466

SEQ ID NO: 399344 - DNA, 1000 bp, Homo Sapiens
cttcctggtggccacctccctcccgcccacccactctcaccccaaacaaaatcacaaaacctggacatccctcaaggggcgaagaggcggccgggagactgcagaagtggctccttttcataaactcccctaaaccacacacaggagagagcgacgggcctcggccctttgatgatagcacatggcgcaggacccttgtcctggtggcacaagggatggggacgcgagggggaggggaggcgaggaacaaggagaaggggcaactttccttaactggcagttgagcacatagtacatttcccctctaccaaacggaacacttggattccatctcttctctgaggagctcgacggcataaatcagaagcaagcacagagtttgtcaggtttgaagcccctatgatggtgtgtgtcaaatcagttgtagctaatctgtccagggagaatactggcttcattacacttgtacagccgagttcttcccgcattactgctgtttaatagaacgtgattagtcatcgccgagaagaaagcatattagccgaggaggtagtcacgcggcacgcgccggtgattgccacgatgtgattgcaatactcttagaagcaccatattatcccagacatgttctttcaagcccttggagccctctctaaattcactgtcatcatttagtatctgtttaatttttcagtccaaagagaggaaatcagtcgctgagtattatttgactccggtctccttggtgcaaaaacaaaatgggaaaaataaataagaataactcagaaactcaaaaggaaaccacaaattcagctaataatagcatttcgagtatatttcgtaaactaaggaaatacacaaaaggctgtttttttccgactgtaagagatatttgatgtccttttgccgaggtggatgtgttagtctcaggccctcctggaccacgttgcccaagtcacacaggcttctgtgttatgtatttagataagatgtgtgaaaa

SEQ ID NO: 399345 - DNA, 1000 bp, Homo Sapiens; identical to SEQ ID NO: 117098

SEQ ID NO: 399346 - DNA, 1000 bp, Homo Sapiens; identical to SEQ ID NO: 222340

SEQ ID NO: 399347 - DNA, 1000 bp, Homo Sapiens; identical to SEQ ID NO: 117099

SEQ ID NO: 399348 - DNA, 1000 bp, Homo Sapiens; identical to SEQ ID NO: 288468

SEQ ID NO: 399349 - DNA, 1000 bp, Homo Sapiens; identical to SEQ ID NO: 288469

SEQ ID NO: 399350 - DNA, 1000 bp, Homo Sapiens; identical to SEQ ID NO: 288470

SEQ ID NO: 399351 - DNA, 1000 bp, Homo Sapiens; identical to SEQ ID NO: 288471

SEQ ID NO: 399352 - DNA, 1000 bp, Homo Sapiens; identical to SEQ ID NO: 288472

SEQ ID NO: 399353 - DNA, 1000 bp, Homo Sapiens
gcagacttttgccagcaaatgttatcattatttttttatactgaaacttgagactttgactgtgccatgtataagatatactggggatcattgtatggatcctaattaagtaaaattcaatgtgtctttttattttcagtaactattttttttatagttgtagttttgatttaaagggggggaaacaagttgacatttgtcatttgtggctttctttcttatcatcatggcacagattctgtacatgtattaacaatgcagtttgctgcatgcctggaaactgcaagatggggagggagggggcgggtcttgctcgaatgttctcactcactatcttgtctctcatacacatatccatctgcagaccatggtccctaaacctgcagtttcttcctgctggtgcaggtacacacacacacacacacacacacacacacacacacacacactccataccatttccattcaactcaatctgcttagttcgggtttgatccatttttctcctctccatagttctaccacccttcactgctagtgtacagctcacagcatctctcctaccaccctgggaaaagtcacattctaggctggattctactgaagtagaggcctggtggtttaacagccgaagacacacgcctagggatgagcaccctctttgtgacacttcatcctgatgccaagattttttggagaacatctgcactttcttatatatatatataatattaaaaaaagcaactgggtatatatcactaacagctttgtaggaagcacttttaatgttttctctctcacacacaaagattcaaaagaaatgtgcatatatttattctgtaatttcagtgattataaattgtaaaggtaatgtttaatcattgtatagtgattatgcctctggtatagctttcctaataaaaagtttttgaaaaacataaaaaaaaaaaaaaaaaaaaaaaaaaaaaaaaaaaaaaaaaaaaaaaaaaaaaaaaaaaaa

SEQ ID NO: 399354 - DNA, 1000 bp, Homo Sapiens; identical to SEQ ID NO: 288473

SEQ ID NO: 399355 - DNA, 1000 bp, Homo Sapiens; identical to SEQ ID NO: 288474

SEQ ID NO: 399356 - DNA, 1000 bp, Homo Sapiens; identical to SEQ ID NO: 117100

SEQ ID NO: 399357 - DNA, 1000 bp, Homo Sapiens; identical to SEQ ID NO: 288476

SEQ ID NO: 399358 - DNA, 1000 bp, Homo Sapiens; identical to SEQ ID NO: 117102

SEQ ID NO: 399359 - DNA, 1000 bp, Homo Sapiens; identical to SEQ ID NO: 222342

SEQ ID NO: 399360 - DNA, 1000 bp, Homo Sapiens; identical to SEQ ID NO: 117103

SEQ ID NO: 399361 - DNA, 1000 bp, Homo Sapiens; identical to SEQ ID NO: 288479

SEQ ID NO: 399362 - DNA, 1000 bp, Homo Sapiens; identical to SEQ ID NO: 222344

SEQ ID NO: 399363 - DNA, 1000 bp, Homo Sapiens; identical to SEQ ID NO: 117105

SEQ ID NO: 399364 - DNA, 1000 bp, Homo Sapiens; identical to SEQ ID NO: 222345

SEQ ID NO: 399365 - DNA, 1000 bp, Homo Sapiens; identical to SEQ ID NO: 117106

SEQ ID NO: 399366 - DNA, 1000 bp, Homo Sapiens; identical to SEQ ID NO: 284380

SEQ ID NO: 399367 - DNA, 1000 bp, Homo Sapiens; identical to SEQ ID NO: 288484

SEQ ID NO: 399368 - DNA, 1000 bp, Homo Sapiens; identical to SEQ ID NO: 288485

SEQ ID NO: 399369 - DNA, 1000 bp, Homo Sapiens; identical to SEQ ID NO: 288486

SEQ ID NO: 399370 - DNA, 1000 bp, Homo Sapiens; identical to SEQ ID NO: 224693

SEQ ID NO: 399371 - DNA, 1000 bp, Homo Sapiens; identical to SEQ ID NO: 288487

SEQ ID NO: 399372 - DNA, 1000 bp, Homo Sapiens; identical to SEQ ID NO: 117107

SEQ ID NO: 399373 - DNA, 1000 bp, Homo Sapiens; identical to SEQ ID NO: 117108

SEQ ID NO: 399374 - DNA, 1000 bp, Homo Sapiens; identical to SEQ ID NO: 288491

SEQ ID NO: 399375 - DNA, 1000 bp, Homo Sapiens; identical to SEQ ID NO: 222349

SEQ ID NO: 399376 - DNA, 1000 bp, Homo Sapiens; identical to SEQ ID NO: 288494

SEQ ID NO: 399377 - DNA, 1000 bp, Homo Sapiens; identical to SEQ ID NO: 117109

SEQ ID NO: 399378 - DNA, 1000 bp, Homo Sapiens; identical to SEQ ID NO: 222350

SEQ ID NO: 399379 - DNA, 1000 bp, Homo Sapiens; identical to SEQ ID NO: 222351

SEQ ID NO: 399380 - DNA, 1000 bp, Homo Sapiens; identical to SEQ ID NO: 222352

SEQ ID NO: 399381 - DNA, 1000 bp, Homo Sapiens; identical to SEQ ID NO: 117110

SEQ ID NO: 399382 - DNA, 1000 bp, Homo Sapiens; identical to SEQ ID NO: 222355

SEQ ID NO: 399383 - DNA, 1000 bp, Homo Sapiens; identical to SEQ ID NO: 222356

SEQ ID NO: 399384 - DNA, 1000 bp, Homo Sapiens; identical to SEQ ID NO: 117111

SEQ ID NO: 399385 - DNA, 1000 bp, Homo Sapiens; identical to SEQ ID NO: 222357

SEQ ID NO: 399386 - DNA, 1000 bp, Homo Sapiens; identical to SEQ ID NO: 222358

SEQ ID NO: 399387 - DNA, 1000 bp, Homo Sapiens; identical to SEQ ID NO: 222359

SEQ ID NO: 399388 - DNA, 1000 bp, Homo Sapiens; identical to SEQ ID NO: 117112

SEQ ID NO: 399389 - DNA, 1000 bp, Homo Sapiens; identical to SEQ ID NO: 288504

SEQ ID NO: 399390 - DNA, 1000 bp, Homo Sapiens; identical to SEQ ID NO: 288505

SEQ ID NO: 399391 - DNA, 1000 bp, Homo Sapiens
ggcagggatcaggaactggactccacccacctgtcacatcttatcctccaacactaggcactagccacagctctcactctgtgcagtcgggcctggtcagacagtctcctgcccgggcctcagtagccagccagtcttcctactgctatagcagccggcattcatccctccggatgtccaccactgggtttgtgccttgtcggcgctcttctactagtcagatatcgcttcgaaacttgccatcatccatccaatcccgactgtcgatggtgaaccaaatggaaccctcaggtcagagcggcctggcctgtgtgcagcacggcctgccttcctccagcagctccagccaaagcatcccagcctgcaaacatcacactctcgtgggctttcttgcgacagagggaggtcagagcagtgccactgatgcacagccaggcaacaccttaagtcctgccaacaattcacactccaaaaaggcagaagtgatttacagagtccaaattgtggatcccagtcaaattctggaagggatcaacctgtctaaaaggaaagagctacagtggcctgatgaaggaatccggttaaaagctgggagaaatagctggaaagactggagtccgcaggagggcatggaaggccatgtgattcaccgatgggtgccttgcagcagagatccaggtaccagatcccacatcgacaaggcagtgcttctggtccagattgatgataaatatgtgactgtaattgaaactggggtactagaacttggggctgaagtgtgagccagtgtttattataaagacatttctttttccctctcaattccaaggcattggaaaaagagaggaacaagcagaagatgcctgcaggtatcactttgatcctatgtgggagcgactgaaaatagaatgagcttggttaagcacctctcctttgcccttcaccctgactcctgtcactgtctccatccccaaataaagctgaaatatttttttaagtt

SEQ ID NO: 399392 - DNA, 1000 bp, Homo Sapiens; identical to SEQ ID NO: 288506

SEQ ID NO: 399393 - DNA, 1000 bp, Homo Sapiens; identical to SEQ ID NO: 222360

SEQ ID NO: 399394 - DNA, 1000 bp, Homo Sapiens; identical to SEQ ID NO: 288509

SEQ ID NO: 399395 - DNA, 1000 bp, Homo Sapiens; identical to SEQ ID NO: 117114

SEQ ID NO: 399396 - DNA, 1000 bp, Homo Sapiens; identical to SEQ ID NO: 222361

SEQ ID NO: 399397 - DNA, 1000 bp, Homo Sapiens; identical to SEQ ID NO: 288513

SEQ ID NO: 399398 - DNA, 1000 bp, Homo Sapiens; identical to SEQ ID NO: 117115

SEQ ID NO: 399399 - DNA, 1000 bp, Homo Sapiens; identical to SEQ ID NO: 288514

SEQ ID NO: 399400 - DNA, 1000 bp, Homo Sapiens; identical to SEQ ID NO: 288515

SEQ ID NO: 399401 - DNA, 1000 bp, Homo Sapiens; identical to SEQ ID NO: 117116

SEQ ID NO: 399402 - DNA, 1000 bp, Homo Sapiens; identical to SEQ ID NO: 288517

SEQ ID NO: 399403 - DNA, 1000 bp, Homo Sapiens; identical to SEQ ID NO: 222363

SEQ ID NO: 399404 - DNA, 1000 bp, Homo Sapiens; identical to SEQ ID NO: 222364

SEQ ID NO: 399405 - DNA, 1000 bp, Homo Sapiens; identical to SEQ ID NO: 117118

SEQ ID NO: 399406 - DNA, 1000 bp, Homo Sapiens
tatgttcaagtacttgtagcttattttgctacatatattttcttgcaaacatttgctattccaggctctatatttctcagtatactctcagggtttctttatccctttccactagccttatttcttgtttgtttgtgttctggacttggtgcctctttctgttatatgctttcctatttagttgggagaccagttgtatacaaatacctaacagagaaagcagtaaaatggtcacagcaggttgaacgtcatagagaacatctcattaactacattatatttttgagaataacaccatttctgcctaattggtttattaatatcacatctcctgtgataaacgtgccattgaaagttttttttattggtacttttctaggtgtcgcacctccttcttttgtagccattaaggcaggaacaacactgtatcaacttacaacagcaggagaagctgtttcctggaactcaatatttattctgatgatcttggctgttctttctattctgccagccatcttccaaaaaaaactaaagcagaaatttgagtaaaaataatcatctgatttttagttttgctgtcatcaccatctcaggattaacagctgcgactttaggtggggtatattttcttctcctaagagaatagacagtttttccagattcatcatcattgactgtcaagaaaggacccttcagcaaggctgtaccctcaatgcagttgatggcctgtcttcacggatttacagacttggcctgatgcccatgtaaattcaagctttggcttgtggtaacaaccacaagaagacaagcatctgtggtgcggaggcaagcaggctaactaggagttgacaagctaagaaagtgaaactgttctttcttagttaactgtctttctctggagctctgttattttgagtataatatttccatgacacttagtaaatgcaagctaaaatgtaataataataaattgtattggagaaacctaaaaaaaaaaaaa

SEQ ID NO: 399407 - DNA, 1000 bp, Homo Sapiens; identical to SEQ ID NO: 288522

SEQ ID NO: 399408 - DNA, 1000 bp, Homo Sapiens; identical to SEQ ID NO: 288523

SEQ ID NO: 399409 - DNA, 1000 bp, Homo Sapiens; identical to SEQ ID NO: 117119

SEQ ID NO: 399410 - DNA, 1000 bp, Homo Sapiens; identical to SEQ ID NO: 288525

SEQ ID NO: 399411 - DNA, 1000 bp, Homo Sapiens; identical to SEQ ID NO: 288526

SEQ ID NO: 399412 - DNA, 1000 bp, Homo Sapiens; identical to SEQ ID NO: 222366

SEQ ID NO: 399413 - DNA, 1000 bp, Homo Sapiens; identical to SEQ ID NO: 117120

SEQ ID NO: 399414 - DNA, 1000 bp, Homo Sapiens; identical to SEQ ID NO: 288530

SEQ ID NO: 399415 - DNA, 1000 bp, Homo Sapiens; identical to SEQ ID NO: 117122

SEQ ID NO: 399416 - DNA, 1000 bp, Homo Sapiens; identical to SEQ ID NO: 117123

SEQ ID NO: 399417 - DNA, 1000 bp, Homo Sapiens; identical to SEQ ID NO: 222369

SEQ ID NO: 399418 - DNA, 1000 bp, Homo Sapiens; identical to SEQ ID NO: 117124

SEQ ID NO: 399419 - DNA, 1000 bp, Homo Sapiens; identical to SEQ ID NO: 222370

SEQ ID NO: 399420 - DNA, 1000 bp, Homo Sapiens; identical to SEQ ID NO: 117125

SEQ ID NO: 399421 - DNA, 1000 bp, Homo Sapiens; identical to SEQ ID NO: 117126

SEQ ID NO: 399422 - DNA, 1000 bp, Homo Sapiens; identical to SEQ ID NO: 222371

SEQ ID NO: 399423 - DNA, 1000 bp, Homo Sapiens; identical to SEQ ID NO: 222372

SEQ ID NO: 399424 - DNA, 1000 bp, Homo Sapiens
ttgacacaggttcagaagactaaagacctgctcaataatgtggcctctgatgaagctaatttagaagccaaaatcgaaaagagaaaattagaactggaaagaaatcggaagcgactagagactctgcagagtgtcaggccatgttttatggatgagtatgagaagactgaggaagaattacaaaagcagtatgacacttatctggagaaatttcaaaatctgacttatctggaacaacagcttgaagaccatcataggatggagcaagaaaggtttgaggaagctaaaaacactctctgcctgatacagaacaagctcaaggaggaagagaagcgcctgctcaagagtggaagtaacgatgactcggacatagacatccaggaggacgatgaatccgacagtgagttggaagaaaggcggctgcccaagccacagacagccatggagatgctcatgcaaggaagacctggcaaacgcattgtgggcacgatgcaaggtggagactccgatgacaatgaggactcggaggagagtgaaattgacatggaagatgatgatgacgaggatgacgatttggaagacgagagcatttctctctcaccaaccaagcccaatcgaagggtccggaaatctgaacccctggatgagagtgacaatgacttctgacccttttgccaagggaccctggcagattaaaaccctcagacttgtaggtaaatgggaacttagaaggttaggaaggtaacccctgttttgtttactaagctggctggactcatgatcactgaagcaatacttatttctgctttagcctcctatgtttgcattccatgaagcttaaataagaattgaagcaaatccctaagatttatttttttccaccttatttatcttctaaaacttgaggaatgcatgtgttcttagtgattcacatccacgggacaaaaactcaagaagaaataagagctgacgccacacaaaaaaaaaaaaaaaaaaaaaa

SEQ ID NO: 399425 - DNA, 1000 bp, Homo Sapiens; identical to SEQ ID NO: 288540

SEQ ID NO: 399426 - DNA, 1000 bp, Homo Sapiens; identical to SEQ ID NO: 117127

SEQ ID NO: 399427 - DNA, 1000 bp, Homo Sapiens; identical to SEQ ID NO: 117128

SEQ ID NO: 399428 - DNA, 1000 bp, Homo Sapiens; identical to SEQ ID NO: 222373

SEQ ID NO: 399429 - DNA, 1000 bp, Homo Sapiens; identical to SEQ ID NO: 288543

SEQ ID NO: 399430 - DNA, 1000 bp, Homo Sapiens; identical to SEQ ID NO: 117129

SEQ ID NO: 399431 - DNA, 1000 bp, Homo Sapiens; identical to SEQ ID NO: 222375

SEQ ID NO: 399432 - DNA, 1000 bp, Homo Sapiens; identical to SEQ ID NO: 288546

SEQ ID NO: 399433 - DNA, 1000 bp, Homo Sapiens; identical to SEQ ID NO: 222376

SEQ ID NO: 399434 - DNA, 1000 bp, Homo Sapiens; identical to SEQ ID NO: 288547

SEQ ID NO: 399435 - DNA, 1000 bp, Homo Sapiens; identical to SEQ ID NO: 288548

SEQ ID NO: 399436 - DNA, 1000 bp, Homo Sapiens; identical to SEQ ID NO: 117130

SEQ ID NO: 399437 - DNA, 1000 bp, Homo Sapiens; identical to SEQ ID NO: 288550

SEQ ID NO: 399438 - DNA, 1000 bp, Homo Sapiens; identical to SEQ ID NO: 288551

SEQ ID NO: 399439 - DNA, 1000 bp, Homo Sapiens
tcacaaagggatatctgtgtttgccttacatggcattgcagcagcatcatcttctctccgatgtcaccgttcgggggtttgttgctggagctactaacatcctttttcgacaacagaaacacctcagtgatgccattgtggaagtagaagaagctctgatccagatccatgatccagaactcaggaagctgcttaacccaaccactgcagacctaaggttcgcagactacctagtgaggcacgtgactgagaatcgggatgacgtcttcctagatggcacgggctgggagggaggtgacgaatggatccgggcccagtttgcggtctacattcatgccctgctggctgccacgctgcaattagacaatgaaaagatattatcggactatgggacaacttttgttacagcatggaagaatactcacaactacagggtgtggaacagcaacaagcatccagcacttgcagaaataaatccaaaccatccatttcaaggccaatactcagtatcagacatgaagttaaggttctcacattctgttcagaatagtgaacgtggcaaaaaaattggaaacgtcatggtcacaactagccggaatgttgtacaaacaggaaaagctgttggccagtcagttggaggagctttttccagtgcaaagacagctatgtcttcatggctttccactttcaccacttccacctcccaaagtctcactgagccaccagatgagaagccttgagcaaggcgtcagaggctgctattgctttctgaggtttaagtgtcccctgtctgtctgctgctcccaggctgttactagccacagatccacagcaggggaccatatgtcgaactgtttacatggatgttgctctaagtgaatgtttcgggatgccgaaatgatgaaatcacagccatagcagggatggctttccaggttggggtttcaattgactacttttatttcagtctgagcctgattaaaacatacagtgaaccttc

SEQ ID NO: 399440 - DNA, 1000 bp, Homo Sapiens; identical to SEQ ID NO: 288552

SEQ ID NO: 399441 - DNA, 1000 bp, Homo Sapiens; identical to SEQ ID NO: 222378

SEQ ID NO: 399442 - DNA, 1000 bp, Homo Sapiens
gagcctcagaacccaccctccctgggggaccctcgaaggaggctgtcagaggccgtctcagctcccagcccttccccccagccctcagggagctccgctcagccccggcggggaggagcgggtgggtgtgcgcgcaaggaggccgcacacctttccttccaatccctccactcgggttcttgggaggacactcattctccaggctcggagacgaggggagaagtttggggtttcagtcccagggcttagccggaggaagcacattttgaacctgcaacttcagacattccagctcccccactcgccctccactacctctgagagcccagccacgccttggagggaggggcttgtgtgtgtatatagtgtgtttgggggaggggggacgcgggagggtgcatgtcttgggaaaagggggtgacagacaacttttgagagggcagcagactccctcagccatgagaaccagctttggggaggaggccgggaatcaaagcgagtccagttgatctcccctgacaatctggaaggttcattttgccctcagtgccagccaatccgggcaggaccctcgaagaggagaccgagggtcccagaggaccaatgctacaagccagcaaatgctgccacatctctgcctgatggggggtggggatgggtggggggatgggactgggccaagggatctgggtgggcatttttaactttggaggccttccatctgtcggtaggccatctgcattttcttactgttgatgtttcctgcccaaaggacacatttgggcagtgccacccactccttgggcccctaggatgacccaactacccccataactttctgcttcccacaggttttcagcattctatcgtcctgttgtgctcagccccaacatcccagacccgttacccgctacccttctctcccccagctcatcatcagtcgctgtctcttttctgtgatttctgtaaaagttgccataaaactttgaaattctgcctg

SEQ ID NO: 399443 - DNA, 1000 bp, Homo Sapiens; identical to SEQ ID NO: 222379

SEQ ID NO: 399444 - DNA, 1000 bp, Homo Sapiens; identical to SEQ ID NO: 117131

SEQ ID NO: 399445 - DNA, 1000 bp, Homo Sapiens; identical to SEQ ID NO: 222381

SEQ ID NO: 399446 - DNA, 1000 bp, Homo Sapiens; identical to SEQ ID NO: 117132

SEQ ID NO: 399447 - DNA, 1000 bp, Homo Sapiens; identical to SEQ ID NO: 222383

SEQ ID NO: 399448 - DNA, 1000 bp, Homo Sapiens; identical to SEQ ID NO: 222384

SEQ ID NO: 399449 - DNA, 1000 bp, Homo Sapiens; identical to SEQ ID NO: 222385

SEQ ID NO: 399450 - DNA, 1000 bp, Homo Sapiens; identical to SEQ ID NO: 222386

SEQ ID NO: 399451 - DNA, 1000 bp, Homo Sapiens; identical to SEQ ID NO: 222387

SEQ ID NO: 399452 - DNA, 1000 bp, Homo Sapiens; identical to SEQ ID NO: 117133

SEQ ID NO: 399453 - DNA, 1000 bp, Homo Sapiens; identical to SEQ ID NO: 117134

SEQ ID NO: 399454 - DNA, 1000 bp, Homo Sapiens; identical to SEQ ID NO: 288564

SEQ ID NO: 399455 - DNA, 1000 bp, Homo Sapiens; identical to SEQ ID NO: 288565

SEQ ID NO: 399456 - DNA, 1000 bp, Homo Sapiens; identical to SEQ ID NO: 222390

SEQ ID NO: 399457 - DNA, 1000 bp, Homo Sapiens; identical to SEQ ID NO: 117135

SEQ ID NO: 399458 - DNA, 1000 bp, Homo Sapiens; identical to SEQ ID NO: 288568

SEQ ID NO: 399459 - DNA, 1000 bp, Homo Sapiens; identical to SEQ ID NO: 288569

SEQ ID NO: 399460 - DNA, 1000 bp, Homo Sapiens; identical to SEQ ID NO: 288570

SEQ ID NO: 399461 - DNA, 1000 bp, Homo Sapiens; identical to SEQ ID NO: 117136

SEQ ID NO: 399462 - DNA, 1000 bp, Homo Sapiens; identical to SEQ ID NO: 222393

SEQ ID NO: 399463 - DNA, 1000 bp, Homo Sapiens; identical to SEQ ID NO: 222394

SEQ ID NO: 399464 - DNA, 1000 bp, Homo Sapiens; identical to SEQ ID NO: 288574

SEQ ID NO: 399465 - DNA, 1000 bp, Homo Sapiens; identical to SEQ ID NO: 292577

SEQ ID NO: 399466 - DNA, 1000 bp, Homo Sapiens; identical to SEQ ID NO: 222395

SEQ ID NO: 399467 - DNA, 1000 bp, Homo Sapiens; identical to SEQ ID NO: 117137

SEQ ID NO: 399468 - DNA, 1000 bp, Homo Sapiens; identical to SEQ ID NO: 288577

SEQ ID NO: 399469 - DNA, 1000 bp, Homo Sapiens; identical to SEQ ID NO: 288578

SEQ ID NO: 399470 - DNA, 1000 bp, Homo Sapiens; identical to SEQ ID NO: 288579

SEQ ID NO: 399471 - DNA, 1000 bp, Homo Sapiens
ttcgggggacacagacagtgaggaaagtgagagctttcacctctcatccccaggagctgaagacagaccccaaaggtgtcttcgtgctgccgcctcgtggggtgcaggacctgcatgttggcgtgaggccccttagggccggcagccgctttgtccatctcaacctggtggacgtggattgccaccagctggtggcctcctggctcgtgtgcctctgctgccgccagccgctcatctccaaggcctttgagatcatgttggctgcgggcgaagggaagggtgtcaacaagaggatcacctacaccaacccctacccctcccggaggacattccacctgcacagcgaccacccggagctgctgcggttcagagaggactccttccaggtcgggggtggagagacctacaccatcggcttgcagtttgcgcctagtcagagagtgggtgaggaggagatcctgatctacatcaatgaccatgaggacaaaaacgaagaggcattttgcgtgaaggtcatctaccagtgagggcttgagggtgacgtccttcctgcggcacccagctggggcctgtctgtgcccctcctgccctgcaggctgtcctccccgcctctctgcagcctttcacttcagtgcccacctggctgacctgtgcacttggctgaggaagcagagaccgagcgctggtcattttgtagtacctgcatccagcttagctgctgctgacacccagcaggcctgggttccgtgagcgcgaactccgtggtggtgggtctggctctggtgctgccatctacgcatgtgggaccctcgttatcgctgttgctcaaaatgtattttatgaatcatcctaaatgagaaaattatgtttttcttactggattttgtacaaacataatctattatttgctatgcaatattttatgctggtattatatctgttttttaaattgttgaacaaaatactaaacttttacacgtctaaaaaaaaaaaaaaaaaa

SEQ ID NO: 399472 - DNA, 1000 bp, Homo Sapiens; identical to SEQ ID NO: 288580

SEQ ID NO: 399473 - DNA, 1000 bp, Homo Sapiens; identical to SEQ ID NO: 288581

SEQ ID NO: 399474 - DNA, 1000 bp, Homo Sapiens; identical to SEQ ID NO: 222397

SEQ ID NO: 399475 - DNA, 1000 bp, Homo Sapiens; identical to SEQ ID NO: 117138

SEQ ID NO: 399476 - DNA, 1000 bp, Homo Sapiens; identical to SEQ ID NO: 117139

SEQ ID NO: 399477 - DNA, 1000 bp, Homo Sapiens; identical to SEQ ID NO: 222399

SEQ ID NO: 399478 - DNA, 1000 bp, Homo Sapiens; identical to SEQ ID NO: 117140

SEQ ID NO: 399479 - DNA, 1000 bp, Homo Sapiens; identical to SEQ ID NO: 222400

SEQ ID NO: 399480 - DNA, 1000 bp, Homo Sapiens; identical to SEQ ID NO: 117141

SEQ ID NO: 399481 - DNA, 1000 bp, Homo Sapiens
ttactgcttaattccttgttaggtcttctcttgaggctcttagaaaagcgttttccagagagatttctatttttgaacaatggaacggatcactgcttttttgccacatcacatagtaactgccggtccagaatgtgacggattcgactctattcattttcaaataaagccatgagccgtggaacattcttggtcctggtgcttgggttatgatggcaggagtcaagaagaagattactttcattctagaagaatgtagtttctctaattatttgaaatgttcatttagcctttgattttcactgatattaactagcaaactgctttaagtcagctcaaaggattatatagtaactatatctgcatttggagcaatgtgatcagtttgcatttaaaaggaaaaaaaagaattttatcttagccagaatgtccctggattcaggggtgtctttgtataatatgagagggccttgttccaaggtcaaggcagcctccttattttacatgctgtttgccaaatcttgtttcttagcttggggagatgatggacttagcttcctcaagataaatttctagtttattaagatgcaaacagctctcatagatggctactacgaagaaaatcttatttttctgaacattttcatgaatccaggggacttgaaaatatggaagacccacatagttagaagaatatatttataaagattccttgctgctaagtcagatcagatttgctaacaggaagcattctttacatgacagtatcttgagttatgtgagttttttttcctcctgactttgtgttgattggtgaaatgcagggtatgtggaagttatctaattaacctcagttgtatatgaataacccacagatgtactgaattacttttggtgctatcttgtactcttcaatctgtaacacaataaaatccctttgtacgatgtctaatgagcaccctgagccataaattgcttaataaacacattttgggtgatt

SEQ ID NO: 399482 - DNA, 1000 bp, Homo Sapiens; identical to SEQ ID NO: 222402

SEQ ID NO: 399483 - DNA, 1000 bp, Homo Sapiens; identical to SEQ ID NO: 288587

SEQ ID NO: 399484 - DNA, 1000 bp, Homo Sapiens
actggggagctgaccatgaccttccctgctggcatcgtgcgtgtgttcagcgggaccccaccaccacctgtcctcagcttccggcttgtacacacaaccgctattgagcacttccagcccaacgccgatctgctgttcagtgacccctcccagagtgaccctgagaccaaagacttctggctcaacatggcagctctgaccgaagccctgcagcgccaggcagagcagaaccccactgcctcctactacaacgtggtgctgctgcgataccagttctcccgcccgggtccccagtctgtgcctctgcagctcagtgcccactggcagtgtggagccaccctcacccaggtctcagtggagtacggctaccggcccggtgccacggctgtgcccacaccactcacgaacgtccagatcctgctgcctgtgggggagcctgtgaccaacgtccgcttgcagccggctgccacctggaacctggaggagaagcggctcacttggaggcttccagatgtgtccgaggcaggcggttctggccgcctctctgccagctgggagccgctctcagggcccagcacacccagccccgtggctgcacagttcaccagcgaggggaccactctgtcgggcgtggacttggaactggtgggcagcggttaccgcatgtcgctggtgaagaggaggtttgccacagggatgtacctggtgagctgctgaacccgcaaatgctgctgccccagctctacactgcgccctggtgctggctgaccaccccctgccctcctgccggaccctggggcctcccaccccagcctccctgaggcccatactccacggagaggagccccatgcccagcctggctgagcccgagattcgctcctccccctcatgccaaccccacacaggtcccggccttttaatgttctttgaataaacactttattttctaataaaataaaaaaggaaaaaaaaaaaaaaaaaaaaaaaaaaaaaaaaaaa

SEQ ID NO: 399485 - DNA, 1000 bp, Homo Sapiens; identical to SEQ ID NO: 117142

SEQ ID NO: 399486 - DNA, 1000 bp, Homo Sapiens; identical to SEQ ID NO: 117143

SEQ ID NO: 399487 - DNA, 1000 bp, Homo Sapiens; identical to SEQ ID NO: 118625

SEQ ID NO: 399488 - DNA, 1000 bp, Homo Sapiens; identical to SEQ ID NO: 288592

SEQ ID NO: 399489 - DNA, 1000 bp, Homo Sapiens; identical to SEQ ID NO: 288593

SEQ ID NO: 399490 - DNA, 1000 bp, Homo Sapiens; identical to SEQ ID NO: 118381

SEQ ID NO: 399491 - DNA, 1000 bp, Homo Sapiens; identical to SEQ ID NO: 117144

SEQ ID NO: 399492 - DNA, 1000 bp, Homo Sapiens; identical to SEQ ID NO: 288595

SEQ ID NO: 399493 - DNA, 1000 bp, Homo Sapiens; identical to SEQ ID NO: 288596

SEQ ID NO: 399494 - DNA, 1000 bp, Homo Sapiens; identical to SEQ ID NO: 117145

SEQ ID NO: 399495 - DNA, 1000 bp, Homo Sapiens; identical to SEQ ID NO: 222406

SEQ ID NO: 399496 - DNA, 1000 bp, Homo Sapiens
gatttctttttttctataccttgaaatgattataaaatagattttcatgggaattttaaaaactctatccaaaacatttttggagcattttaaagccccatacacagaagtatacgaaagcacacaaaacactccaagtttcagcagttttagcgccaccattaacccactttgcttgtctcatgaaaaatctttgttaaagtttgtacacaggtaacaaaaagttactttaaaagatatataaagggctgtaagctaattgtggtgtctagtaagtagcataatgagatgtgaggagttggaactttgcgtgttttgcgtattttcatctgcattcagcttcttactctgggtttgtactcgagtgttatttctttacaaatgcccttgtaattaccactctgaagtctgctgactgtgtctcttgaacatacttaggatattctgcacattatggaaaaaggtaaattttagaagtttctgctctactaactgtagatatttatgactctgcgagttatctatttttataaccacctgtggtccattgttcattttaattcacatttcttatgaagtatggtaacagggagggagacacctagattagcagctcaatttgtactacttcagccaatctgtgaatgtaaaaactacactgttgccttgctaggatccaccctcctataatatggaacaaatatctgaatgaaatccaccctaggagacggagtcaaactaaacttgtggtttttcatttaacttttgactacagcatggccccatggcatccacaccaagagggtgttgtgatgaggtgccggtgtgcaaagggaactttagtttttccactggttcttatctgctagccttttacatacatgtgtactatatttgtttatagactgtaggtggatatataatttaaaagcttgatttaataaacatttaaccccataaaaaaaaaaaaaaaaaaaaaaaaagaaaaaaaaaaaaaaaa

SEQ ID NO: 399497 - DNA, 1000 bp, Homo Sapiens; identical to SEQ ID NO: 222408

SEQ ID NO: 399498 - DNA, 1000 bp, Homo Sapiens; identical to SEQ ID NO: 117146

SEQ ID NO: 399499 - DNA, 1000 bp, Homo Sapiens; identical to SEQ ID NO: 117147

SEQ ID NO: 399500 - DNA, 1000 bp, Homo Sapiens; identical to SEQ ID NO: 117148

SEQ ID NO: 399501 - DNA, 1000 bp, Homo Sapiens; identical to SEQ ID NO: 117149

SEQ ID NO: 399502 - DNA, 1000 bp, Homo Sapiens; identical to SEQ ID NO: 117150

SEQ ID NO: 399503 - DNA, 1000 bp, Homo Sapiens; identical to SEQ ID NO: 222411

SEQ ID NO: 399504 - DNA, 1000 bp, Homo Sapiens; identical to SEQ ID NO: 117151

SEQ ID NO: 399505 - DNA, 1000 bp, Homo Sapiens; identical to SEQ ID NO: 222413

SEQ ID NO: 399506 - DNA, 1000 bp, Homo Sapiens; identical to SEQ ID NO: 117152

SEQ ID NO: 399507 - DNA, 1000 bp, Homo Sapiens; identical to SEQ ID NO: 222414

SEQ ID NO: 399508 - DNA, 1000 bp, Homo Sapiens; identical to SEQ ID NO: 117153

SEQ ID NO: 399509 - DNA, 1000 bp, Homo Sapiens
gctgttcttctgtatgcccatgtcaactttgcaaaagcccagtctccgggcacccctaggcttggaaggaagacgtctcctggccccacccaccgaggttcatttgattgattgtatgcaaatagccctttatttacatgccactattaagctgctaattgttcctgttggggtgacagatactgaatgtatacgtattgtgcctgagctcaccagcaaacagaagcatcaagcccaggggtaaaggctgaagctttcacagtgcagagactgctagcctgggcacacacacctcctttctggccgtcttctgtgtagggcacactttaacccagtctctgttgctgttgagtctctgctccgttttgtacagtcacagggaattctgatctgaaggggcaccttctgttcactcccacaaagtggtgtctggttctcactgagacgttttaagatttttccacaaatatttatatgtactaaatgtggaaccattagaaagttcttccaaaatctcattccagcatagttttggatttttcttttgtcttattttaaaataaggaagtcgagatgactttgatcattggtaacttgggcctgggccagacaaagtataaaacttacaaaagaatattctcatttggtcttaactaggtagatgtaatatatgactttttataaaaagggtatctatatgaacttgacacagtattttcagcttttgtattccatactaaagccatgaagaactacacgtaacatcatcatttgtattaattgcacaactccaatgctaaaggttggattgtgttagaggaatcggctctgtatttgcctctagagaaacacagtgttctctttgtatttatggattcctttttaccgtgtcacatttactttggtcctctatgtatttaaatgtttgaagtgccttagactcttgccatattttcaaaataaaattccattaagctctaaaaaaaaaaaaaaaaaaaaa

SEQ ID NO: 399510 - DNA, 1000 bp, Homo Sapiens
aatttgtaggaaactttgatctttttgtccaagaaaaggaatgtctgacaggcttaagctttcgtccccttgcacttagactcgaagttagtaaatccttaaaggctttttaatagcagacttccaaaagattgcatttaggatttctagcatgcttttaatttcagattttcagctgacattagctatagtatacagtaggttaagactcatgtctatgactttcactctaagactggcaaaaggacagcagtcttctatgtttagtcaatattcatttcagtagaagataatcttatctaatttttgagaccagaataagccttttaaggtaaacctcaaaattatcattttatggtaatactgaccattttagtcccctaggtttgacatgggagatagtgactacactggtgtctgacttttttcctagagatttctccctgaaaaatacaagggctgttggtgagagcagacttgaggtgatgatagttggcctctggtctacaaagatttcataactccttggaaagcttcttataatcattcttaacttcttggtagctagaaatttagagtagttgaaatctttaggaatgaacttctgagggccaaaaaatgtgactgacgggaacaattcttaaactgattaactagctgtaatatagttttgtgaatttattgcactgatgttgtaccttgtggtatatctgtccctattaaataagtgttgttttctcctctttaatattgctgtgaacagtggtgcccattgtagcatatgtttgatttttttttattatttcataagaaaactacgttaattttaccttactttcattgtaaataagcctgtcttcctatctggattttttgtgtgcatacatattctactgattaactacttttgcagttttaatcctgtattatttcttctactttgttttgtgtaaaaggggaaaaaataaaaaaagctggaatcttaaaaaaaaaaaaaaaa

SEQ ID NO: 399511 - DNA, 1000 bp, Homo Sapiens; identical to SEQ ID NO: 288610

SEQ ID NO: 399512 - DNA, 1000 bp, Homo Sapiens; identical to SEQ ID NO: 222415

SEQ ID NO: 399513 - DNA, 1000 bp, Homo Sapiens; identical to SEQ ID NO: 288612

SEQ ID NO: 399514 - DNA, 1000 bp, Homo Sapiens
gcaccctaccggacaccagagtaaggaggagctgggccgcgccatgcaagtggccaaggtctccaccgcctctgtggggcgctttcaggagcgcctccccaaggagaaggtgccccggggctccggcaagaaaaggaagtttcaaccccttttcggggactttgcagccgagaaaaagaaccagttggagctgcttcgtgtcatgaacagcaagaagcctcagctggatgtgactagggccaccaataagcagatgagggaggaggaccaggaggaggccgccaagaggaggaaaatgagccagaagggcaagagaaagggaggccggcaggggcctgggggcaagaggaaagggggcccgcccagccagggagggaagaggaaagggggcttgggaggcaagatgaattctgggccgcctggcttgggtggcaagagaaaaggaggacagcgcccaggaggaaagaggaggaagtaatagtttctaactgtcggacccgtctgtaaaccaaggactatgaatactaaatgttaagttctaggcaattatacggggactcagaaggacctggccgctgccttcattgagtttaaagggacaggattgcccttccgtcaagaaagtatgtaagtgttggactgcacaaattaatgtttttcccacaaccgagactttggagattaagaacttatttgaggatttaagaattagggaaataatttggtggaaaccgggaatgagttctattcttaaacagcctttttttttctttttaatgttggatatacggcgaggtagagttggccatatttcagagacttagattgacgtatatgtttctgcattatttttacaacaagtttgtgtatcagagcgggagtgcgggggagggaaagaaaacaaacagtttcagaattgaataggcaagtgactgttttaaagattaagtaataaagatgtcttatctagtgtgacttttaaaaaaaaaaaaaaaaaaaa

SEQ ID NO: 399515 - DNA, 1000 bp, Homo Sapiens; identical to SEQ ID NO: 288613

SEQ ID NO: 399516 - DNA, 1000 bp, Homo Sapiens; identical to SEQ ID NO: 288615

SEQ ID NO: 399517 - DNA, 1000 bp, Homo Sapiens; identical to SEQ ID NO: 222416

SEQ ID NO: 399518 - DNA, 1000 bp, Homo Sapiens
cttgcctctagagggggaattgttcatccatttgtcctccagttttataggaacaagagactattaaagcccattgctttatctgctctctgtagggttcaggtacactggctaaggcagaaccccaaatttcaaggctctttctatcaatattggacctctgggagctaatactcctctttgctcaccaccatgtgatcattgatcagatgtggtgagtgagtaggggactcgacttgcgggatgcagttttgccattgcagcaaagttcattgaggaaaattgtaccatgaaaaagcattttgattatttcatttctggaggatgaccttgagggaagctttttaatattagtttcaagctttccttaccctacaactttaaacaaaagctttaattttgtttgcactcctattttgagcttgtaactggaaaagcatgtcttgcactgttcaacctcctgagtggtcgctttaacaacctccaaattgtgtacagtggttattttccccagttgtatagttttgagacattcaattatcactgtcttagttgtattttaatttactaaattatgtagctatctgactgttaagttcttttaaacaactgtttccttgggcttcagttatttaaagtaaatttaggtgtaatatagaaaactgtccctttccaggtgggagcttaacacctgtataaaacctaaggttttagtaagtaccttagttgaataaaagcacaaggttatcaccttttttatccgtccaccgtgacatggttatgcatcctttagattaacctcaccaaatgaagctttttctatccatttttaatattgtccttacataatattgtccttagattttgatcaattctatgtctgactttgaaataccatttacaatgtagtatgttttcaatgaaaaaccataaagtaacatccaagtgtttcatggtttgttgggaaggtaattttaaaataaaacaatttccaaaaaac

SEQ ID NO: 399519 - DNA, 1000 bp, Homo Sapiens; identical to SEQ ID NO: 117154

SEQ ID NO: 399520 - DNA, 1000 bp, Homo Sapiens; identical to SEQ ID NO: 222418

SEQ ID NO: 399521 - DNA, 1000 bp, Homo Sapiens; identical to SEQ ID NO: 118958

SEQ ID NO: 399522 - DNA, 1000 bp, Homo Sapiens; identical to SEQ ID NO: 288620

SEQ ID NO: 399523 - DNA, 1000 bp, Homo Sapiens; identical to SEQ ID NO: 222420

SEQ ID NO: 399524 - DNA, 1000 bp, Homo Sapiens
ggtagcagctatgaccatggatgaagactaccaacagaagagaagagaagccatgaataagcaaccagctggttttagagaaggcatcactcgtggaggaaaaggcttagtttctggatttgttagtggcataacaggaattgttacaaaaccaatcaaaggagctcaaaaaggaggagcagctggtttctttaaaggtgttgggaaaggtttagtaggagcggtagcaaggccaactggaggcatcatagacatggctagcagtacatttcagggaataaaaagagctacagagacttctgaagtggagagtctgcgacctcctcggttcttcaatgaagatggagttatcagaccgtacaggttgagggatgggactggaaatcaaatgttacagaaaattcaattctacagggagtggattatgactcacagtagcagtagtgatgatgatgatgatgatgatgatgatgatgagtcagatctaaaccattaaaattcatatgttctttattttacttggaatgtttcattaacatgttttgtatgacttataccataatgcccatatgtccatttatagggaggtaaaacacattttcttttaaaatgttttcctacacattttcataaagcaaaataattgtattatttaagcacagaaaaaaatgtatcttacatccaaagtagggagggcatccaacatattatagatttgcttttatatattttatagctttgtattgcatagtttgtctttaagagttcaagttagacttaaatataattttgatgttcactggttttattttaaattgccttcttatttgttagcaaaatgcctttttttaatggtctctgtaaattttctgggctttaatgtaatgccactgtgtaaaaaaaaaggaagaaaatagtaatagccatttaatgttttatatttatcattttaaagatatttttgtcaaatttcttttaataataataaacatatgtaatc

SEQ ID NO: 399525 - DNA, 1000 bp, Homo Sapiens; identical to SEQ ID NO: 117155

SEQ ID NO: 399526 - DNA, 1000 bp, Homo Sapiens; identical to SEQ ID NO: 222422

SEQ ID NO: 399527 - DNA, 1000 bp, Homo Sapiens; identical to SEQ ID NO: 222423

SEQ ID NO: 399528 - DNA, 1000 bp, Homo Sapiens
tcagctccagtgattcacgcccgcctggagaagaatcagagctcagctcatgactcacccatggcaggcggagggtcccagaggggctgagtcctcaaatccggctgaggcagcagctggcaccatcagagccaggagagtgacaacaggtctcaaggttcccacaaagtctttgctgctgtgctgggcaccacccacccctcaccttgcaggctgcctgcgtgggaggcgaagtcccaggacagcccagaggggggctacagagaggagtcggctgcagcagagggcaggagccccagcttagccctgagcgccagcgcgaggaccagggcctgccactaagcccgccccgctggccgccagctgcccgtccccagagccactgcagcaggagtcgggccctgcctccctcccagcagggaaaccccgcccgctgccaggccatcctctctgccagaggctttcatgagccccaaggctggggccacagctcctacccctgcccagcagccctgagctcagctgcaggaaggacatcccagaagccatggctcctggggcgcttccaggcattctgccctgccccgacaccagaaccctggtgctggtgggccactagcgtctgcagcctaagcaggtgctggctcagggttcatcgttctgccttgtccactgggggaccagccctgcagaccactctgacaagtcttcagcccacaccctgccagccccacagattttatttttgcacataagccataaccaatcctcaaggctggcacaggctttggggaagccctggagcctgtgaagaccctggaaacctcatgaggctgtggccaacccctgccccttgccccacacagaccaggccttaaatgtcggtccaggccctgtgcaccttaccccagagacagactctttttgtaagattttgttaataaaacactgaaacttcaaaaaaaaaaaaaaaaaaaaaaaaaaaaaaaaaaaaaaaaaa

SEQ ID NO: 399529 - DNA, 1000 bp, Homo Sapiens; identical to SEQ ID NO: 288625

SEQ ID NO: 399530 - DNA, 1000 bp, Homo Sapiens; identical to SEQ ID NO: 117157

SEQ ID NO: 399531 - DNA, 1000 bp, Homo Sapiens; identical to SEQ ID NO: 117158

SEQ ID NO: 399532 - DNA, 1000 bp, Homo Sapiens; identical to SEQ ID NO: 222424

SEQ ID NO: 399533 - DNA, 1000 bp, Homo Sapiens; identical to SEQ ID NO: 222425

SEQ ID NO: 399534 - DNA, 1000 bp, Homo Sapiens; identical to SEQ ID NO: 117159

SEQ ID NO: 399535 - DNA, 1000 bp, Homo Sapiens; identical to SEQ ID NO: 288630

SEQ ID NO: 399536 - DNA, 1000 bp, Homo Sapiens; identical to SEQ ID NO: 117160

SEQ ID NO: 399537 - DNA, 1000 bp, Homo Sapiens; identical to SEQ ID NO: 222427

SEQ ID NO: 399538 - DNA, 1000 bp, Homo Sapiens; identical to SEQ ID NO: 117161

SEQ ID NO: 399539 - DNA, 1000 bp, Homo Sapiens; identical to SEQ ID NO: 288634

SEQ ID NO: 399540 - DNA, 1000 bp, Homo Sapiens; identical to SEQ ID NO: 288635

SEQ ID NO: 399541 - DNA, 1000 bp, Homo Sapiens; identical to SEQ ID NO: 288636

SEQ ID NO: 399542 - DNA, 1000 bp, Homo Sapiens; identical to SEQ ID NO: 117162

SEQ ID NO: 399543 - DNA, 1000 bp, Homo Sapiens; identical to SEQ ID NO: 117163

SEQ ID NO: 399544 - DNA, 1000 bp, Homo Sapiens; identical to SEQ ID NO: 222429

SEQ ID NO: 399545 - DNA, 1000 bp, Homo Sapiens; identical to SEQ ID NO: 117164

SEQ ID NO: 399546 - DNA, 1000 bp, Homo Sapiens; identical to SEQ ID NO: 288640

SEQ ID NO: 399547 - DNA, 1000 bp, Homo Sapiens; identical to SEQ ID NO: 222431

SEQ ID NO: 399548 - DNA, 1000 bp, Homo Sapiens; identical to SEQ ID NO: 288642

SEQ ID NO: 399549 - DNA, 1000 bp, Homo Sapiens; identical to SEQ ID NO: 222432

SEQ ID NO: 399550 - DNA, 1000 bp, Homo Sapiens; identical to SEQ ID NO: 222433

SEQ ID NO: 399551 - DNA, 1000 bp, Homo Sapiens; identical to SEQ ID NO: 117165

SEQ ID NO: 399552 - DNA, 1000 bp, Homo Sapiens; identical to SEQ ID NO: 117166

SEQ ID NO: 399553 - DNA, 1000 bp, Homo Sapiens; identical to SEQ ID NO: 117167

SEQ ID NO: 399554 - DNA, 1000 bp, Homo Sapiens; identical to SEQ ID NO: 288647

SEQ ID NO: 399555 - DNA, 1000 bp, Homo Sapiens; identical to SEQ ID NO: 117168

SEQ ID NO: 399556 - DNA, 1000 bp, Homo Sapiens; identical to SEQ ID NO: 117169

SEQ ID NO: 399557 - DNA, 1000 bp, Homo Sapiens; identical to SEQ ID NO: 117170

SEQ ID NO: 399558 - DNA, 1000 bp, Homo Sapiens; identical to SEQ ID NO: 288651

SEQ ID NO: 399559 - DNA, 1000 bp, Homo Sapiens; identical to SEQ ID NO: 288652

SEQ ID NO: 399560 - DNA, 1000 bp, Homo Sapiens; identical to SEQ ID NO: 288653

SEQ ID NO: 399561 - DNA, 1000 bp, Homo Sapiens; identical to SEQ ID NO: 117171

SEQ ID NO: 399562 - DNA, 1000 bp, Homo Sapiens; identical to SEQ ID NO: 222436

SEQ ID NO: 399563 - DNA, 1000 bp, Homo Sapiens; identical to SEQ ID NO: 222437

SEQ ID NO: 399564 - DNA, 1000 bp, Homo Sapiens; identical to SEQ ID NO: 117172

SEQ ID NO: 399565 - DNA, 1000 bp, Homo Sapiens; identical to SEQ ID NO: 117173

SEQ ID NO: 399566 - DNA, 1000 bp, Homo Sapiens; identical to SEQ ID NO: 288659

SEQ ID NO: 399567 - DNA, 1000 bp, Homo Sapiens; identical to SEQ ID NO: 222438

SEQ ID NO: 399568 - DNA, 1000 bp, Homo Sapiens; identical to SEQ ID NO: 222439

SEQ ID NO: 399569 - DNA, 1000 bp, Homo Sapiens; identical to SEQ ID NO: 288662

SEQ ID NO: 399570 - DNA, 1000 bp, Homo Sapiens; identical to SEQ ID NO: 222440

SEQ ID NO: 399571 - DNA, 1000 bp, Homo Sapiens
gcagtgccctgggagaccccgctctggataagacacccaaccccaactccagcagctggactctgggcccacaaggggagggaccccagccagtattccctcagagccggcacgaccctgctgtggggcggcgggcccagtcgtgttcctgcagtgggcaccctaggcgtatgtgtatacacgcacagatatttattcctttcgcttttagtggttgttatttctgtagcagccaagtcctgcggctccctggggctgagatctccctttgtggaactccgagagccgccctgacagtcccagccgccacccaaggagccccatccgcccacccaccctgggacccacgcggccactccagggatcattgttgtccttttgtgaggggctgaggcgactgtcccatggaggcatccaaggctttctgtgccaagaatcccaagtgactggggctggggaccacttctccaggcctctctccccgaccatgagagcccctggccctggcccctgcacaccagtaggcccagaataaccgccacccttgccatcctgcaacagctggactcaagtttccaggaagtggagatgtgtttctagaagtttcctgtggaacctggaggctcctgatgcctttgactccaggctgggcgattccgatgctgacccgtcctcctgggctccccacccccgctccccaagtgtcacacaggcactttgtacacatcctggttttctaagaagggaacttgccatcaagattcctgtaccaggcccacggccgtctcgggcagagccacctgggccccgggtgcagccggagaccccgccgagcccctcctcccagtattcccatccccgcatgcttctagggagcgcctcttttccgttcttgaggaatttctgttctggggcttgtccttcctttgcagctgttttgaatgtagttttccttttctatttatttgcacattaaagttaataattgaatattgacatc

SEQ ID NO: 399572 - DNA, 1000 bp, Homo Sapiens; identical to SEQ ID NO: 288665

SEQ ID NO: 399573 - DNA, 1000 bp, Homo Sapiens; identical to SEQ ID NO: 117175

SEQ ID NO: 399574 - DNA, 1000 bp, Homo Sapiens; identical to SEQ ID NO: 222441

SEQ ID NO: 399575 - DNA, 1000 bp, Homo Sapiens; identical to SEQ ID NO: 222442

SEQ ID NO: 399576 - DNA, 1000 bp, Homo Sapiens; identical to SEQ ID NO: 288669

SEQ ID NO: 399577 - DNA, 1000 bp, Homo Sapiens; identical to SEQ ID NO: 288670

SEQ ID NO: 399578 - DNA, 1000 bp, Homo Sapiens; identical to SEQ ID NO: 288672

SEQ ID NO: 399579 - DNA, 1000 bp, Homo Sapiens; identical to SEQ ID NO: 117177

SEQ ID NO: 399580 - DNA, 1000 bp, Homo Sapiens; identical to SEQ ID NO: 222444

SEQ ID NO: 399581 - DNA, 1000 bp, Homo Sapiens; identical to SEQ ID NO: 222445

SEQ ID NO: 399582 - DNA, 1000 bp, Homo Sapiens; identical to SEQ ID NO: 288676

SEQ ID NO: 399583 - DNA, 1000 bp, Homo Sapiens; identical to SEQ ID NO: 222446

SEQ ID NO: 399584 - DNA, 1000 bp, Homo Sapiens; identical to SEQ ID NO: 288678

SEQ ID NO: 399585 - DNA, 1000 bp, Homo Sapiens; identical to SEQ ID NO: 117178

SEQ ID NO: 399586 - DNA, 1000 bp, Homo Sapiens; identical to SEQ ID NO: 117179

SEQ ID NO: 399587 - DNA, 1000 bp, Homo Sapiens; identical to SEQ ID NO: 223776

SEQ ID NO: 399588 - DNA, 1000 bp, Homo Sapiens
agaagaaaggtagaagggtttattttattaaatgagcctgacttagtgacagtgtgtgagcatttgcaatgtaagggcctcagcttccttggagaagccaccccaggtttccagacatagatgttgaattgtttgtggggggtgtgccaggccacgtctcgtgtgtccgtatgcaggcatgcctgtgtatactgtgtatgggcacactgggactagctgggacaattcctagagattcaactgcccaattctaaccaacattggcagcggctgaacttggcatttccttgctaactgccagatgtggccaacctttgtccatatgcaaaccactgaaaaatgatctggatttctatagcaaggcccttggggagggcactctcccatgcccttggcctcgctggccacattggccaatgagccagggctggagtctgagacctttggttgttctttaaggcacctcctgccactttctccctcagaggcacaaacactttgtgttccacgtcagtttgaggggacggtggggggatgatatgaatgtcacaggaggagacaccttctgtctttgtttcaaagaaagtgatgtgccatttgttaatatacaagagaaatattgaaaatatattgaaaagagcaattttaaattatttttggcttatgttgcaatatttattttcttgtattagaaaagattcctttgtagagaaaaaatgtatttttcattaacgcaaagacctatttctcctttttgtacattgtccatgtgcgcaacccttaacgagcaatagaatgtatggtcacctgggtgtggccagtgcccgctgtgccctgcatgattctgtgttgccgctgctgcatagttcccagccccatcctgtcctgctcactcatgggggcttccagaccccggccccaccagggcttgtgtcatagggagccctttgcactcctcgtgtgttggcaaacgcagttaataaagcagtgttttctgtgc

SEQ ID NO: 399589 - DNA, 1000 bp, Homo Sapiens; identical to SEQ ID NO: 117180

SEQ ID NO: 399590 - DNA, 1000 bp, Homo Sapiens; identical to SEQ ID NO: 288682

SEQ ID NO: 399591 - DNA, 1000 bp, Homo Sapiens; identical to SEQ ID NO: 117181

SEQ ID NO: 399592 - DNA, 1000 bp, Homo Sapiens; identical to SEQ ID NO: 117182

SEQ ID NO: 399593 - DNA, 1000 bp, Homo Sapiens; identical to SEQ ID NO: 222449

SEQ ID NO: 399594 - DNA, 1000 bp, Homo Sapiens; identical to SEQ ID NO: 117183

SEQ ID NO: 399595 - DNA, 1000 bp, Homo Sapiens; identical to SEQ ID NO: 222451

SEQ ID NO: 399596 - DNA, 1000 bp, Homo Sapiens; identical to SEQ ID NO: 288687

SEQ ID NO: 399597 - DNA, 1000 bp, Homo Sapiens; identical to SEQ ID NO: 117184

SEQ ID NO: 399598 - DNA, 1000 bp, Homo Sapiens; identical to SEQ ID NO: 117185

SEQ ID NO: 399599 - DNA, 1000 bp, Homo Sapiens; identical to SEQ ID NO: 222453

SEQ ID NO: 399600 - DNA, 1000 bp, Homo Sapiens; identical to SEQ ID NO: 118395

SEQ ID NO: 399601 - DNA, 1000 bp, Homo Sapiens; identical to SEQ ID NO: 117186

SEQ ID NO: 399602 - DNA, 1000 bp, Homo Sapiens; identical to SEQ ID NO: 288691

SEQ ID NO: 399603 - DNA, 1000 bp, Homo Sapiens; identical to SEQ ID NO: 117187

SEQ ID NO: 399604 - DNA, 1000 bp, Homo Sapiens; identical to SEQ ID NO: 288693

SEQ ID NO: 399605 - DNA, 1000 bp, Homo Sapiens; identical to SEQ ID NO: 117191

SEQ ID NO: 399606 - DNA, 1000 bp, Homo Sapiens; identical to SEQ ID NO: 288695

SEQ ID NO: 399607 - DNA, 1000 bp, Homo Sapiens; identical to SEQ ID NO: 222457

SEQ ID NO: 399608 - DNA, 1000 bp, Homo Sapiens; identical to SEQ ID NO: 117192

SEQ ID NO: 399609 - DNA, 1000 bp, Homo Sapiens; identical to SEQ ID NO: 222459

SEQ ID NO: 399610 - DNA, 1000 bp, Homo Sapiens; identical to SEQ ID NO: 117194

SEQ ID NO: 399611 - DNA, 1000 bp, Homo Sapiens; identical to SEQ ID NO: 288700

SEQ ID NO: 399612 - DNA, 1000 bp, Homo Sapiens; identical to SEQ ID NO: 288701

SEQ ID NO: 399613 - DNA, 1000 bp, Homo Sapiens; identical to SEQ ID NO: 117195

SEQ ID NO: 399614 - DNA, 1000 bp, Homo Sapiens; identical to SEQ ID NO: 288703

SEQ ID NO: 399615 - DNA, 1000 bp, Homo Sapiens; identical to SEQ ID NO: 117196

SEQ ID NO: 399616 - DNA, 1000 bp, Homo Sapiens; identical to SEQ ID NO: 117197

SEQ ID NO: 399617 - DNA, 1000 bp, Homo Sapiens; identical to SEQ ID NO: 288706

SEQ ID NO: 399618 - DNA, 1000 bp, Homo Sapiens; identical to SEQ ID NO: 117198

SEQ ID NO: 399619 - DNA, 1000 bp, Homo Sapiens; identical to SEQ ID NO: 222460

SEQ ID NO: 399620 - DNA, 1000 bp, Homo Sapiens; identical to SEQ ID NO: 222461

SEQ ID NO: 399621 - DNA, 1000 bp, Homo Sapiens; identical to SEQ ID NO: 288709

SEQ ID NO: 399622 - DNA, 1000 bp, Homo Sapiens; identical to SEQ ID NO: 117199

SEQ ID NO: 399623 - DNA, 1000 bp, Homo Sapiens; identical to SEQ ID NO: 222463

SEQ ID NO: 399624 - DNA, 1000 bp, Homo Sapiens; identical to SEQ ID NO: 222464

SEQ ID NO: 399625 - DNA, 1000 bp, Homo Sapiens; identical to SEQ ID NO: 117200

SEQ ID NO: 399626 - DNA, 1000 bp, Homo Sapiens
gatcctcagcaagacgctggcagccctgcgccacttcaccccagatgtctgccagattctgctggatcagtccctggaccttgctgaatacaacttcctgtttgccctgagctttaccactcccacctttgactccgaagtggccccctccttcgggacccttctggccacagtgaatgtggccctcaacatgcttggagagctggacaagaaaaaggagcccctcacccaggcagtggggctcagcacacaggcagaagggaccaggacgttaaagtccctcctgatgtttaccatggaaaactgcttctacctgctcatctctcaggcgatgcggtaccttagggacccggctgtgcacccccgggacaaacagcggatgaagcaggagctcagctctgagttgagcacgctgctgtccagcctctcgcgctacttccgccggggagcccccagctcccctgccactggtgtcctcccctcgccgcagggcaagtccacctctctctccaaagccagccctgagagtcaggagcctctgatccagttggtgcaggcgtttgtccggcatatgcaaagatagggcagtgctgttctgcccacctacccctctccaccagcctacactgcaccctggctggcaggggtgctgctggctgctagggcctatacaatggagggcacctcctgtcacccccctcccggagtagccacgactccagccaccacccactgacgttatttttatactagatgaagaggtcaacagcaggcatggggagccgagtcttctgtgctcaggtcctcacgctgcagacgccccctagaggaactttccttcctttccagcattccccacagcactgccggccaggggagaggcggcagcccagcagagggctctatgcacgggtttcaaacctgttttccacactctgtctttgcagttttggtaattctgtggtctatttatacagatattaaaatcttgtttatagac

SEQ ID NO: 399627 - DNA, 1000 bp, Homo Sapiens; identical to SEQ ID NO: 117201

SEQ ID NO: 399628 - DNA, 1000 bp, Homo Sapiens; identical to SEQ ID NO: 288714

SEQ ID NO: 399629 - DNA, 1000 bp, Homo Sapiens; identical to SEQ ID NO: 288715

SEQ ID NO: 399630 - DNA, 1000 bp, Homo Sapiens; identical to SEQ ID NO: 288716

SEQ ID NO: 399631 - DNA, 1000 bp, Homo Sapiens; identical to SEQ ID NO: 117202

SEQ ID NO: 399632 - DNA, 1000 bp, Homo Sapiens; identical to SEQ ID NO: 288718

SEQ ID NO: 399633 - DNA, 587 bp, Homo Sapiens; identical to SEQ ID NO: 117203

SEQ ID NO: 399634 - DNA, 1000 bp, Homo Sapiens; identical to SEQ ID NO: 117204

SEQ ID NO: 399635 - DNA, 1000 bp, Homo Sapiens; identical to SEQ ID NO: 222466

SEQ ID NO: 399636 - DNA, 1000 bp, Homo Sapiens; identical to SEQ ID NO: 222467

SEQ ID NO: 399637 - DNA, 1000 bp, Homo Sapiens; identical to SEQ ID NO: 222468

SEQ ID NO: 399638 - DNA, 1000 bp, Homo Sapiens; identical to SEQ ID NO: 117205

SEQ ID NO: 399639 - DNA, 1000 bp, Homo Sapiens; identical to SEQ ID NO: 288725

SEQ ID NO: 399640 - DNA, 1000 bp, Homo Sapiens; identical to SEQ ID NO: 288727

SEQ ID NO: 399641 - DNA, 1000 bp, Homo Sapiens; identical to SEQ ID NO: 288728

SEQ ID NO: 399642 - DNA, 1000 bp, Homo Sapiens; identical to SEQ ID NO: 222469

SEQ ID NO: 399643 - DNA, 1000 bp, Homo Sapiens; identical to SEQ ID NO: 117208

SEQ ID NO: 399644 - DNA, 1000 bp, Homo Sapiens; identical to SEQ ID NO: 117211

SEQ ID NO: 399645 - DNA, 1000 bp, Homo Sapiens; identical to SEQ ID NO: 117212

SEQ ID NO: 399646 - DNA, 1000 bp, Homo Sapiens; identical to SEQ ID NO: 288734

SEQ ID NO: 399647 - DNA, 1000 bp, Homo Sapiens
ggtatcgccaagggatcacgcccagctacccgcagggctccagctgggagcacgtgtccaacaacgtgtgccgagtgtccgtggggcccctggaccaggtctgggtgatcgccaacaaagtgcagggcagccacagcctgagccgggggacagtgtgtcatcgcaccggcgtgcagcctcacgagcccaagggccacggctgggactacggcatcgggggaggctgggaccatatctctgtccgggccaatgccaccagggccccccggagctcgtcccaggagcaggagccgagtgccccaccagaggcccatggccccgtctgctgctgaggcccccccacacacctacatgcagggacggtgcccagtttgggggatcaaggctgagccattcttgtgctggagtgtgcaccgtgggagcaatgtggcccaggtggactcaggagggaacctggccccaaggctgcggccacttcagaggcactggctgagacggccctgaaatgtgaagctccgcggacactcccacacgtgtccccgtctgcgaggagtcccggggtgtggggcatggggtggggctgcacctcccagaggcccctcccacccttcccttcccctctcccttctgcctttccaggactagaaccgggaacctggagccctccgggaacgccggccctggggcagcagagccaggatggagccctcctgagctggcatctcagacagcacccgggcccgccacccctcaccaagagagatggccatggggctcagggcctctttaccatgtgcagtgaccatttctcagagcaggacttgcaaagaggctttaatttcaaaagtgaaggaaggaggccaggcgccgtggctcacgcctgtaatcccagcactttgggaggctgaggtgggcagatcacctaggtcaagagtttcaaaccagacgggccaacatggtgaaaccccatctctactaaaaatacaaaaaaaaaaaaaaa

SEQ ID NO: 399648 - DNA, 1000 bp, Homo Sapiens
aaaactttactgaattatatacagtttgaatgaaatgttattttaaaaacaaaacaattgttaagtgttccataaaggttatgttgaattttggtcagatgaatatttgtaagtaaaaaatatatgcatttctgaacctcaacttacatagattttctttatataaaaaaaaagaaaaaaaaagaaaaagttggctatagttggcctgattaacaggcactatacatggtgctgtgcaaaatagtaagctagcatcttactgccgtcaatattagcaggtacagagccttttttcatcctaattcagtaagttctcaggcttccaagtcaaatggagaagtaaagtgaggcaacagattcaccataggctttttgaagcatcaaagggaaatataactactgatagtgaaagcccagccatgacccagatgggcttacccttgacaggaactggggaccaagagcctcccaattgccctaactcctgtcattggtattagcaatatctggccagatttagaaccagtcatggaaacttgtgctcaaactaaaagtaggtcatcacttcccagaaacagaataccttgtgcttcctgaaacagcatatatcactgtgaaactaaagaatattctacagacacccctgtagaaagaaacaaagaacaggatagtttagaaagctttctgttagctgtattcagcaaatttcatactagttgctcaggactgctagttggtatgcttttgtaaaacgagattgaaatttaataaaagatgcaactaaaatctttcctgcatgaagctaaaagcactcaagttgagagaggggcaagggaatctccccaggatgactgaagatgacttctttttacagcaagtactgttagcctttctgcaccccttagcttggcccctgctccaacttctgggtcagcagcaaggtgaactcaacagaagttgctcttgactgtttgaaggtagaagcagcctaccttttctc

SEQ ID NO: 399649 - DNA, 1000 bp, Homo Sapiens; identical to SEQ ID NO: 117213

SEQ ID NO: 399650 - DNA, 1000 bp, Homo Sapiens; identical to SEQ ID NO: 117214

SEQ ID NO: 399651 - DNA, 1000 bp, Homo Sapiens; identical to SEQ ID NO: 117215

SEQ ID NO: 399652 - DNA, 1000 bp, Homo Sapiens; identical to SEQ ID NO: 117216

SEQ ID NO: 399653 - DNA, 1000 bp, Homo Sapiens; identical to SEQ ID NO: 117217

SEQ ID NO: 399654 - DNA, 1000 bp, Homo Sapiens; identical to SEQ ID NO: 288741

SEQ ID NO: 399655 - DNA, 545 bp, Homo Sapiens; identical to SEQ ID NO: 288742

SEQ ID NO: 399656 - DNA, 1000 bp, Homo Sapiens; identical to SEQ ID NO: 117218

SEQ ID NO: 399657 - DNA, 1000 bp, Homo Sapiens; identical to SEQ ID NO: 117219

SEQ ID NO: 399658 - DNA, 1000 bp, Homo Sapiens; identical to SEQ ID NO: 288747

SEQ ID NO: 399659 - DNA, 1000 bp, Homo Sapiens; identical to SEQ ID NO: 222472

SEQ ID NO: 399660 - DNA, 1000 bp, Homo Sapiens; identical to SEQ ID NO: 117221

SEQ ID NO: 399661 - DNA, 1000 bp, Homo Sapiens; identical to SEQ ID NO: 222473

SEQ ID NO: 399662 - DNA, 1000 bp, Homo Sapiens; identical to SEQ ID NO: 222474

SEQ ID NO: 399663 - DNA, 1000 bp, Homo Sapiens; identical to SEQ ID NO: 288751

SEQ ID NO: 399664 - DNA, 1000 bp, Homo Sapiens; identical to SEQ ID NO: 117222

SEQ ID NO: 399665 - DNA, 1000 bp, Homo Sapiens; identical to SEQ ID NO: 288753

SEQ ID NO: 399666 - DNA, 1000 bp, Homo Sapiens; identical to SEQ ID NO: 222475

SEQ ID NO: 399667 - DNA, 1000 bp, Homo Sapiens; identical to SEQ ID NO: 222476

SEQ ID NO: 399668 - DNA, 1000 bp, Homo Sapiens; identical to SEQ ID NO: 288757

SEQ ID NO: 399669 - DNA, 1000 bp, Homo Sapiens; identical to SEQ ID NO: 117223

SEQ ID NO: 399670 - DNA, 1000 bp, Homo Sapiens; identical to SEQ ID NO: 117224

SEQ ID NO: 399671 - DNA, 1000 bp, Homo Sapiens; identical to SEQ ID NO: 117225

SEQ ID NO: 399672 - DNA, 1000 bp, Homo Sapiens; identical to SEQ ID NO: 117226

SEQ ID NO: 399673 - DNA, 1000 bp, Homo Sapiens; identical to SEQ ID NO: 288762

SEQ ID NO: 399674 - DNA, 1000 bp, Homo Sapiens; identical to SEQ ID NO: 117229

SEQ ID NO: 399675 - DNA, 1000 bp, Homo Sapiens; identical to SEQ ID NO: 288765

SEQ ID NO: 399676 - DNA, 1000 bp, Homo Sapiens; identical to SEQ ID NO: 288766

SEQ ID NO: 399677 - DNA, 1000 bp, Homo Sapiens; identical to SEQ ID NO: 222481

SEQ ID NO: 399678 - DNA, 1000 bp, Homo Sapiens
tgtttgttcctgatatagtctgaatcttaggaagaaggtaaaagaaaggaggcaagagaatagttatgatgaatatgtgttaagtgcctgctctgaaggaggcaatgttcttctcatttgaatccttatggcaaccttattcaataggttttcccatatttcagatttaataactgaaggccagagagattaatttgccaaagccacacctttatgctaattatgattggaatgcatcacaaaagcctaactctgttgttttcaacctctacgttattttgctgctatgtgcatttccagatctgattttctgctaacttgtgtgctatgatccactcctgatgggggtctacattaatcttccagtactccttgctgatgctgtgttatgtgtcatctaacagaaatgactcctttgaaataagtaaatctttggctttttgttctgttggtgtgattcaaagcaaaacaaacaaacaaaaacaaattttaagaacacaacaaaaaagatttgacttccgaatagaatgttttctttaagaggcatgaaaagcaactattgttgtgttacagtgttaaaaatattcagttttctttgacaaaaatgtgtactgtgtaagccttgcaaacaaaaaacaacaaaaaagaagcagcagcagcagcctgctgtgtggcatctgaacttttataaaggtttccttgtgccaaataagtgcaaagatttaatttactattaaaaaccataagcatatgttatagttccagaagaattattttgtcatcaagtgattttgatctttagtgtcaatatttatatttagattaatttttataaatgaaaatattttaatggtttaagaaaatgaggacaacaggataatatctttgatgacttctgaaagttatgcttcccttcatgttatatgcacattgccaagaattactgtcaagagaaatgataagtaaaagtcatttatgaaaataaaaaaaaaaaaaaaaa

SEQ ID NO: 399679 - DNA, 1000 bp, Homo Sapiens; identical to SEQ ID NO: 288769

SEQ ID NO: 399680 - DNA, 1000 bp, Homo Sapiens; identical to SEQ ID NO: 288771

SEQ ID NO: 399681 - DNA, 1000 bp, Homo Sapiens
tcaggaagcctttcagaagctgcagaacatcaagtacccatctgctacaaataacacacctgccaaacagctcctgcttcacatttgccatgacttgaccctggcagtgctgagccaacagatggcctcctgggacgaggctgtgcaggcgctccttcgggcggtggtccggagctatgactcagggagcttcaccatcatgcaggaagtgtactcagcctttctccctgatggctgtgaccacctaagagacaagttgggggaccatcaatcccctgccacaccagctttcaaaagtttggaggccttttttctttatgggcgtctgtatgaattctggtggtctctctccagaccttgcccaaattccagtgtctgggtaagggctggtcacagaacactctctgttgagccaagccagcagttagacactgccagcactgaagaaacggaccctgaaacttctcagccagagccaaacaggccttcagaactagacttgagactcacagaagaaggtgagcgaatgctgagtacttttaaggagctcttttcagaaaagcatgccagtctccaaaactcacagagaactgttgctgaagtccaagagaccttggcagaaatgatccgacaacaccaaaagagtcaactctgtaaatccacagcaaatggtcctgataagaatgaaccggaagtagaagcagagcagcccctctgcagttctcagagccagtgtaaagaagaaaaaaatgagccactttctctgcctgagttaaccaaaaggcttaccgaggcaaatcagagaatggcaaaatttcctgagagcattaaggcctggcccttcccagatgtgctggagtgctgcctcgtcctgcttctcatcaggtcccactttcctggctgtctggcccaggaaatgcagcagcaggcccaagagctccttcagaaatacggcaacacgaaaacttacagaagacactgccagaccttctgtatgtga

SEQ ID NO: 399682 - DNA, 1000 bp, Homo Sapiens; identical to SEQ ID NO: 288772

SEQ ID NO: 399683 - DNA, 1000 bp, Homo Sapiens; identical to SEQ ID NO: 117232

SEQ ID NO: 399684 - DNA, 1000 bp, Homo Sapiens; identical to SEQ ID NO: 117233

SEQ ID NO: 399685 - DNA, 1000 bp, Homo Sapiens
acctgagaactttataacacagatagaaaccacaccaacagagactgcttccaggaaaacctctgacgtggtactgaaaagaaagcaaactaaagactgcccccagagaaaatggtatccattgcggccaaagaaaattaatcttgatacatgagctctttctgtttattttgggagttgaaaataggcaccatcaacatttagattacagcctaattaatacctagataagacttcatttgaaataagaaataactcttttactagtgattcatttatacagatatagtatctctgtgcggggatatgatataatattgtatttccttactgttttatctattgtaaataaaaagcattttaaaaagtattgacacaaagcccatcagtgggcattaaaaatattaaaagtgcagacttttactgtccttaagtgccatcaactctcagctcccttgtagcttttgtgggatttaacaagtaacaaattctgttgtgtttccctggtatacatctttctaggaaaaaaaaaaaaagagagagagctgtataatgatttttcgtttacatgctgaaaagtaattatcagtttctgcacagcagcagatgcagggtttttttttaaagatgtagtttgatttatcaaattaatgtgctgatgataatactggctttgactttgttactccatgttcagctaatttaggtttgtgagattaactttaggattttttgttgtgtaagacaatgataactattatttgtgcaacattactctttgaaataaaaattggcatgtagccaatgtttcctgcccacactcacttttttctatagaccattaacataatttgacttggaactaatggtttctttttagggtttcttatttatttctttacaaatcattccagttcaaaatatatatcagattaatacactgaaaaaaaagtgtcattgtggtttattggaacctattttcaccttggagggtggttta

SEQ ID NO: 399686 - DNA, 1000 bp, Homo Sapiens; identical to SEQ ID NO: 288775

SEQ ID NO: 399687 - DNA, 1000 bp, Homo Sapiens; identical to SEQ ID NO: 288776

SEQ ID NO: 399688 - DNA, 1000 bp, Homo Sapiens; identical to SEQ ID NO: 288777

SEQ ID NO: 399689 - DNA, 1000 bp, Homo Sapiens; identical to SEQ ID NO: 288778

SEQ ID NO: 399690 - DNA, 1000 bp, Homo Sapiens; identical to SEQ ID NO: 222483

SEQ ID NO: 399691 - DNA, 1000 bp, Homo Sapiens; identical to SEQ ID NO: 117234

SEQ ID NO: 399692 - DNA, 1000 bp, Homo Sapiens
gagacagccacggtcctctttggccgatgctgtattctcattttggcccttgttcttaggcccgtctgcccgccttcctccatctaacctttcctgttttatccgcagcccttttcttctttgagttagtaaagatttattctgtaacctgacactcatctggccctttgcagtttgccagccatattcccatgtgatttcccactggatccaggcccccatccggctggcaggagggggctctgacgtgcaggttggaaatcagaagtctgtgagagcgcgggagtgcatggcagctctgggtcccagacctggcccgacccctctgcttcacctccagctctgctgctcctctactcttgggttgagatccctttggagccacagcgaggaaccctgtggtcctcaggcaggtgtaccttgagtcagccaggagccctcttttcctgtgtcaaagcctgccctcgggctctgctcacctctggtgaccctccaagatgcccctgccctcagtttcccctcatgatctggcctctgcccccttctctagccacagcctctagtacactttagcaataccaccagactagttagagttccgcactcaccaagcaagacatacagtttcatgcctctgtgccttcgctcatgctgtttcttccgactggaatgccttcccctgctcctcctgccttgtctgcctggcaagttcatctctcacgatcccctcaaaggccccctcctccaggaaggcaacccctgtgcccctcccctccaggctacctctgcactttgtcaatgcttctcttgtggcacttatcacgctgtattttacttgtttacatgtttgtctccccttctagactgtgaatccttaagggcatggactgtatcttatgcatctctgtatttctgcgcctagcacggtgcctagcacacagtaggcgctcaataaatgttgaatgaatgaatgatttaatcaagaaaaaaaaaaaaaaaa

SEQ ID NO: 399693 - DNA, 1000 bp, Homo Sapiens
tgctggtctaaaccaggcagcctctcttgctaggaggccacttctgctgttacataactcctccctgcagaagaggggacttctgcaacagattctgtttctttttcccgactcttttccttgctgccaggtatgtgatgctgtaggcttggctccaaaccagctgagtgcctgctttttactcctttatgtctggccttctaggatctgtccaagacactctcaggcctggaggcagggcatagaatcagttcttcactctccctaatactacactctgtaaggacctggggcaggatatcttctcccccagggatcttctatttaagtggcttctgagagggtgaacaggattgttacttttaagcctacctctgctgtgacccatcatgtgggtcttttgtttctcccttctgtggtttatgagcctgcccttaccttttccctgcctctgacttggtatttccaggtccgtatttctctgtagcccagggtctggggtagagctgactgctgttcaccctttgaacaactcatggacgtgagggatgggtgctgagcagaaccaagagaggaaactttggcgctgttaaaatggaatttctcatctgccggcattattaagggtgggctaggttggatggaaggtgaaagggatgaactgccttttgctggaagctgtcttaggctgtgagacaggagcaggggaaccacagcctatggggaactgcccttgactccacctatgttggagccttagcccaaggccattccttctgtgatgataaagcccagttctggaattggagccatattaaggaatgattctcttccagcgctgctcctcaagggttgggggtccttctccctcgcagccaccacatgtctcagggctaccttctccgattggatttgcatttgtggcactgtctttgatgcagtgatgtacttaatggtgcaataaagctgcttcgatttggtaaaaaaaaaaaaaaaaaaa

SEQ ID NO: 399694 - DNA, 1000 bp, Homo Sapiens; identical to SEQ ID NO: 222486

SEQ ID NO: 399695 - DNA, 1000 bp, Homo Sapiens; identical to SEQ ID NO: 117236

SEQ ID NO: 399696 - DNA, 1000 bp, Homo Sapiens; identical to SEQ ID NO: 117237

SEQ ID NO: 399697 - DNA, 1000 bp, Homo Sapiens; identical to SEQ ID NO: 117238

SEQ ID NO: 399698 - DNA, 1000 bp, Homo Sapiens; identical to SEQ ID NO: 288783

SEQ ID NO: 399699 - DNA, 1000 bp, Homo Sapiens; identical to SEQ ID NO: 288784

SEQ ID NO: 399700 - DNA, 1000 bp, Homo Sapiens; identical to SEQ ID NO: 222487

SEQ ID NO: 399701 - DNA, 1000 bp, Homo Sapiens; identical to SEQ ID NO: 288786

SEQ ID NO: 399702 - DNA, 1000 bp, Homo Sapiens; identical to SEQ ID NO: 117239

SEQ ID NO: 399703 - DNA, 1000 bp, Homo Sapiens; identical to SEQ ID NO: 117240

SEQ ID NO: 399704 - DNA, 1000 bp, Homo Sapiens; identical to SEQ ID NO: 117241

SEQ ID NO: 399705 - DNA, 1000 bp, Homo Sapiens; identical to SEQ ID NO: 288791

SEQ ID NO: 399706 - DNA, 1000 bp, Homo Sapiens; identical to SEQ ID NO: 220928

SEQ ID NO: 399707 - DNA, 1000 bp, Homo Sapiens
ggtgtaggtgggagtcacggacggttcggggcccgaggtgtccgcgaaggtggcgcagccatggcggcaggggagagcatggctcagcggatggtctgggtggacctggagatgacaggattggacattgagaaggaccagattattgagatggcctgtctgataactgactctgatctcaacattttggctgaaggtcctaacctgattataaaacaaccagatgagttgctggacagcatgtcagattggtgtaaggagcatcacgggaggtctggccttaccaaggcagtgaaggagagtacaattacattgcagcaggcagagtatgaatttctgtcctttgtacgacagcagactcctccagggctctgtccacttgcaggaaattcagttcatgaagataagaagtttcttgacaaatacatgccccagttcatgaaacatcttcattatagaataattgatgtgagcactgttaaagaactgtgcagacgctggtatccagaagaatatgaatttgcaccaaagaaggctgcttctcatagggcacttgatgacattagtgaaagcatcaaagagcttcagttttaccgaaataacatcttcaagaaaaaaatagatgaaaagaagaggaaaattatagaaaatggggaaaatgagaagaccgtgagttgatgccagttatcatgctgccactacatcgttatctggaggcaacttctggtggtttttttttctcacgctgatggcttggcagagcaccttcggttaacttgcatctccagattgattactcaagcagacagcacacgaaatactatttttctcctaatatgctgtttccattatgacacagcagctcctttgtaagtaccaggtcatgtccatcccttggtacatatatgcatttgcttttaaaccatttcttttgtttaaataaataaataagtaaataaagctagttctattgaaatgcaaaaaaaaaaaaaaaaaaaaa

SEQ ID NO: 399708 - DNA, 1000 bp, Homo Sapiens; identical to SEQ ID NO: 288794

SEQ ID NO: 399709 - DNA, 1000 bp, Homo Sapiens; identical to SEQ ID NO: 288795

SEQ ID NO: 399710 - DNA, 1000 bp, Homo Sapiens; identical to SEQ ID NO: 222492

SEQ ID NO: 399711 - DNA, 1000 bp, Homo Sapiens; identical to SEQ ID NO: 288797

SEQ ID NO: 399712 - DNA, 1000 bp, Homo Sapiens; identical to SEQ ID NO: 288798

SEQ ID NO: 399713 - DNA, 1000 bp, Homo Sapiens; identical to SEQ ID NO: 288799

SEQ ID NO: 399714 - DNA, 1000 bp, Homo Sapiens; identical to SEQ ID NO: 117243

SEQ ID NO: 399715 - DNA, 1000 bp, Homo Sapiens
gcctggaggaacacctgaatgccctggaccgggctgctggtgacggcgactgtggcaccacccacagccgtgcggccagagcaatccaggagtggctgaaggagggcccaccccctgccagccctgcccagctgctctccaagttgtctgtcctgctcctggagaagatgggaggctcatctggggcgctctatggcctgttcctgactgcggctgcacagcccctgaaggccaagaccagcctcccagcctggtctgctgccatggatgccggcctggaagccatgcagaagtatggcaaggctgctccaggggacaggactatgctggattctctgtgggcagcggggcaggagctccaagcctggaagagcccaggagctgatctgttacaagtcctgaccaaagcagtcaagagtgccgaagctgcagccgaggccaccaagaatatggaagctggagccggaagagccagttatatcagctcagcacggctggagcagccagaccccggggcggtggcagctgctgccatcctccgggccatcttggaggtcttgcagagctagggtgtgtgactgcctcccttggcctcagctcctctcactgctgtgctgaggtggcctttgtcacttccttctgccttccaaccctcaccttcccccggcctggccccattggcccaccctctaagttgagcaggaaatcctccaccaagcttccagaactacagacagcacccagagtgagctggagtgggtccccatgcctctccagcatgccctttccctttgcaggagggtggagtccctgggtcatgccctcccctgccagctctgggcttcagagataaggcattttccttgtgcagcctttacctggcaatcctaatttggttttaagactccctgtgaaatgctttccgcaccttaaccccagtgagcgtgaaaaagaaagttaataaactataatacatggaagcaagaaaaaaaaaaaaaaa

SEQ ID NO: 399716 - DNA, 1000 bp, Homo Sapiens; identical to SEQ ID NO: 117245

SEQ ID NO: 399717 - DNA, 1000 bp, Homo Sapiens; identical to SEQ ID NO: 222496

SEQ ID NO: 399718 - DNA, 1000 bp, Homo Sapiens; identical to SEQ ID NO: 288805

SEQ ID NO: 399719 - DNA, 1000 bp, Homo Sapiens; identical to SEQ ID NO: 117247

SEQ ID NO: 399720 - DNA, 1000 bp, Homo Sapiens; identical to SEQ ID NO: 222498

SEQ ID NO: 399721 - DNA, 1000 bp, Homo Sapiens; identical to SEQ ID NO: 224096

SEQ ID NO: 399722 - DNA, 1000 bp, Homo Sapiens; identical to SEQ ID NO: 288807

SEQ ID NO: 399723 - DNA, 1000 bp, Homo Sapiens; identical to SEQ ID NO: 117248

SEQ ID NO: 399724 - DNA, 1000 bp, Homo Sapiens; identical to SEQ ID NO: 222500

SEQ ID NO: 399725 - DNA, 1000 bp, Homo Sapiens; identical to SEQ ID NO: 288810

SEQ ID NO: 399726 - DNA, 1000 bp, Homo Sapiens
tcctgcgttttttgcaaacttggcttcccccaggggcaggctggactttccctgccccctatgattgaagtcctcctgcttttgggggctgccttcccagagtcccccgggtgctcccctgccgaggtcaggagctgaccaagccttggcccggtgacacctgcagccctcactcctgtcatcccaggacacttgaggcccaaggaggtggagtggagagtgggctcgggtacatgggagccagaagccagatggacttggtcaagtgttggtcacttggagcctccagtgtgcgtcagggtctgtgggcaggggacagggcgtgggtgggggccgaggctggcacgcccctctgccctcaccgtcttggtgacctggcctcggcccctcccccaagtctcttctgtgcaaggcccgcctcggcctcggcagctggttcctgtcccgttttctgtgtctgaaagtttacaggttgtggtgcatcagcccaaactcactggcgttgtgttttttttttctttaattttcagattttttttttaaacaaagtatttttttaggtgcgataacccagaaagggcccgttgggtgtgtgtgtgtgtcctgaactcctcaagcagcgattggagcccaagcacccctggagaggaagggagggtccccactggcccgtggggtctgagttcaggggtgtggagggagcagactccaccggcccaggcccagctaagagggggccgacccctttccccaggcacagccccaggctggcaaagggagggccctgggctgggtgcagggcgcgccaggagtcccagccagggtggccccggcgggggcgggtccagctttggaagccaggctcccctgtgagccgtggcttgtctggtcttcgcccacgggaggctggacagaggctgtagccaacacaatcacctttactttgtactctgtgtgtatgttttggttttctgtgttttaataaatcctttgggaaagg

SEQ ID NO: 399727 - DNA, 1000 bp, Homo Sapiens; identical to SEQ ID NO: 222502

SEQ ID NO: 399728 - DNA, 1000 bp, Homo Sapiens; identical to SEQ ID NO: 222503

SEQ ID NO: 399729 - DNA, 1000 bp, Homo Sapiens; identical to SEQ ID NO: 288813

SEQ ID NO: 399730 - DNA, 1000 bp, Homo Sapiens
tcttttgcttcctccccctcccccgcccctgccccacctctctttctccccttttaagccatgggtgggtctaactggcttttgtggagaaattagcacaccccaactttaataggaaatttgttctctttttccgcccctctccttctctcctcccctcccctcccttctcattccttttctttgtttttaaaggatgtgtttgtatgcattctggacatttgaattaaaaaaaaagtattgtgatcctgtaaaggatcaccatagatgtggacaaatcattaaaattacagagctatatgatccataattgattagtcaaaataacttattgatgaaatatacaaatattttattgtagcacctatttttatatgcacatttagcattcctctttccttcactatttagcctatgattttgcagaggtgtcacactgtattaggatctgcatttctaaaactgacgtggtatcaggaaggcattttcaatcattcaaaatgtggagaatttaatggctaaatctttaaaagccaatgcaacccacccaattgaatctgcattttcttttaagaaaacagagctgattgtatcccaatgtattttaaaaaatagggcaattgattgggccattccgagagaattgtttgcaagttttgggttttattagaaaatatttgaaagtatttttattaatgaaccaaaatgacatgttcatttgactactattgtagccgattttcgattgtttaaccaaacccagttgcatttgtacagatccacgtgtactggcacctcagaagaccaaatcatggactgtacaagtctctatacaatgtctttatccctgtgggcagcaagcaatgatgataatgacaaacaggatatctgtaagatggggctactgttgttacagtctcatatgtatcccagcacatgtaattttttaaatagtttctgaataaacacttgataactatgtcaaaaaaaaaaaaaaaaa

SEQ ID NO: 399731 - DNA, 1000 bp, Homo Sapiens; identical to SEQ ID NO: 288814

SEQ ID NO: 399732 - DNA, 1000 bp, Homo Sapiens; identical to SEQ ID NO: 222504

SEQ ID NO: 399733 - DNA, 1000 bp, Homo Sapiens
gtgccagggagggtgggatttgccagatgccaaaatcaggggacgggtggtggtgtctgtcagacacacacaggtcgccagtgacttcacacacacctcatgtgagaaccatgccttttttagtgtgtcctatttcatacctgtacacacttcctcgttttgtaatgagatttacttacacccaaacagatcctgaaagaaagcttcaagttttctcagatgatggatatgttttcactgtattcaataactgacggatgtaaggtgcacgtttcctgatgtgacgcactgtattccagctggtgatcaagtctgggaacagccgtaacaggtcaaccttgtggagccatcgcgagttagagggtgaaagatggcagaaaaaaaagtcttgtgtgtgagtgtgttttttgagtttgcatcaatcttaatgtctcttcataatacttttataatacattaagcctcttgtctacatatttggagagaatatgactttactagcagagaaatacaatatatcttgtctactggactgtaaaatatatgtatgaaataaaattagttccatttggtcttctagtatattaaagtgctatctgacgttgttatcctgtttttgcaaaaaaaaaaaaaaaaaaaagttaactacagaccattgtttctaataagcagagagatctattttagtagtaaactgaaggtttagttgtgagcttcagattttgtgaactccagatgttgtgcggtgtttttttttttttttaagacaacaactaaaaaaatgcaaggaatatgtacactggaactgtagtggtagctttcagtattgtaaagagattgttctatacggacctttttgctgtttatcctgtatgtaataaagtcctttctagatcctatgtgaaaagaaaagtgaagcaactgaatcttcagcatgttctcatcggcggagccttcttgtgtaatgtaaactgtgccatgttattaaaaaatgtgaact

SEQ ID NO: 399734 - DNA, 1000 bp, Homo Sapiens; identical to SEQ ID NO: 222505

SEQ ID NO: 399735 - DNA, 1000 bp, Homo Sapiens; identical to SEQ ID NO: 117249

SEQ ID NO: 399736 - DNA, 1000 bp, Homo Sapiens; identical to SEQ ID NO: 288816

SEQ ID NO: 399737 - DNA, 1000 bp, Homo Sapiens; identical to SEQ ID NO: 117250

SEQ ID NO: 399738 - DNA, 1000 bp, Homo Sapiens; identical to SEQ ID NO: 117251

SEQ ID NO: 399739 - DNA, 1000 bp, Homo Sapiens; identical to SEQ ID NO: 288819

SEQ ID NO: 399740 - DNA, 1000 bp, Homo Sapiens
cactgccgcacactgtctaaaggaggggctcaaagtttacctaggcaagcacgccctagggcgtgtggaagctggtgagcaggtgagggaagttgtccactctatcccccaccctgaataccggagaagccccacccacctgaaccacgaccatgacatcatgcttctggagctgcagtccccggtccagctcacaggctacatccaaaccctgcccctttcccacaacaaccgcctaacccctggcaccacctgtcgggtgtctggctggggcaccaccaccagcccccaggtgaattaccccaaaactctacaatgtgccaacatccaacttcgctcagatgaggagtgtcgtcaagtctacccaggaaagatcactgacaacatgttgtgtgccggcacaaaagagggtggcaaagactcctgtgagggtgactctgggggccccctggtctgtaacagaacactgtatggcatcgtctcctggggagacttcccatgtgggcaacctgaccggcctggtgtctacacccgtgtctcaagatacgtcctgtggatccgtgaaacaatccgaaaatatgaaacccagcagcaaaaatggttgaagggcccacaataaaagttgagaaatgtaccggcttccatcctgtcaccatgacttcctcacatggtctgcttagcccttctctgctccttattcccagtgttccatttgaaccagtgatccatgtcctgaaaaatgctcaatctcagctaacattccatgtttcagaagcattcaggcactgccaggcttgcagtctcccagatgttgcatccctgaaacatctcaacaacctgaatgtcccaacccagacaatggcccaggtctctcaacttcatcagtgtggcttctatgagcccagatcaccacctgaacgttctgtctgtggcacattcttaaatatttccatcagcccatctcaacaatatatgtcctataaatggaccatccttgaca

SEQ ID NO: 399741 - DNA, 1000 bp, Homo Sapiens
gcgcccagcgcaggccctgaccttcgccaagaagcacctgcagatctcccaggagatcggggaccgccatggggagctcacggcccgcatgaacgtggcgcagctgcagctggtgctcggccgcctgaccagcccggcagcctcagagaagcctgacctggccggctatgaggcccagggggccagacccaagaggacgcagaggctgagcgcggagacctgggacctgctgagactccccctggagcgggagcagaatggagacagccaccattcaggggactggcgggggcccagcagggactcgctacccctccccgtgaggagcaggaagtaccaggaaggcccggacgctgagaggaggccccgggagggcagccactccccgctggacagcgccgacgtccgggtgcacgtgccacgcacgagcatcccgagggccccgtcttcggacgaggagtgcttctttgacctgttgaccaagttccagagcagccgcatggacgaccagcgttgtcccctggacgatggccaggccggggctgccgaggccacggccgcccccaccctggaggacaggatcgcccagccctcgatgacggcctcgccccagaccgaggaattcttcgacctcatcgccagctcccagagccgccggctggacgaccagcgggccagcgtgggcagcctgccggggctgcgaatcacccacagcaatgcagggcacctccgaggccacggcgagccccaggagccgggggacgacttcttcaacatgctcatcaagtaccagtcctccaggatcgatgaccagcgctgcccgccacctgacgtactgccccggggccctaccatgccggacgaggacttcttcagcctcattcagagggtgcaggctaagcgcatggacgagcagcgggtggacctcgccgggggcccggagcagggggcaggcggcccgcccgagccccagcagcagtgccagcctggtgcgagctaa

SEQ ID NO: 399742 - DNA, 1000 bp, Homo Sapiens
tgtggtatgaggatgccttggcttccagccaccctatcattctgtacctgcatgggaacgcaggtaccagaggaggcgaccaccgcgtggagctttacaaggtgctgagttcccttggttaccatgtggtcacctttgactacagaggttggggtgactcagtgggaacgccatctgagcggggcatgacctatgacgcactccacgtttttgactggatcaaagcaagaagtggtgacaaccccgtgtacatctggggccactctctgggcactggcgtggcgacaaatctggtgcggcgcctctgtgagcgagagacgcctccagatgcccttatattggaatctccattcactaatatccgtgaagaagctaagagccatccattttcagtgatatatcgatacttccctgggtttgactggttcttccttgatcctattacaagtagtggaattaaatttgcaaatgatgaaaacgtgaagcacatctcctgtcccctgctcatcctgcacgctgaggacgacccggtggtgcccttccagcttggcagaaagctctatagcatcgccgcaccagctcgaagcttccgagatttcaaagttcagtttgtgccctttcattcagaccttggctacaggcacaaatacatttacaagagccctgagctgccacggatactgagacctcagcagggcccaggttccagcccagatcccagcatgtggtcagagctggtgtgactgaagccaacaggtgacacggtcatcgaagagcagcagacaaaactaaaactaacccaaaggcagctgaaagtggagggcaggtgaattcccagccctcgccggattcaacttttgccaacggtgaagaactgccctgagctgcaaaccttacaaagtctgtaactctagataaaccataccatgtgctaactgcactgaaataaaacactaactacattataatgtcaaaaaaaaaaaaaaaaaaaaaaaaaaaa

SEQ ID NO: 399743 - DNA, 1000 bp, Homo Sapiens; identical to SEQ ID NO: 288821

SEQ ID NO: 399744 - DNA, 1000 bp, Homo Sapiens; identical to SEQ ID NO: 222509

SEQ ID NO: 399745 - DNA, 1000 bp, Homo Sapiens; identical to SEQ ID NO: 117252

SEQ ID NO: 399746 - DNA, 1000 bp, Homo Sapiens; identical to SEQ ID NO: 288825

SEQ ID NO: 399747 - DNA, 1000 bp, Homo Sapiens; identical to SEQ ID NO: 288826

SEQ ID NO: 399748 - DNA, 1000 bp, Homo Sapiens; identical to SEQ ID NO: 117253

SEQ ID NO: 399749 - DNA, 1000 bp, Homo Sapiens; identical to SEQ ID NO: 288827

SEQ ID NO: 399750 - DNA, 1000 bp, Homo Sapiens; identical to SEQ ID NO: 117255

SEQ ID NO: 399751 - DNA, 1000 bp, Homo Sapiens; identical to SEQ ID NO: 117256

SEQ ID NO: 399752 - DNA, 1000 bp, Homo Sapiens; identical to SEQ ID NO: 288831

SEQ ID NO: 399753 - DNA, 1000 bp, Homo Sapiens; identical to SEQ ID NO: 288832

SEQ ID NO: 399754 - DNA, 1000 bp, Homo Sapiens; identical to SEQ ID NO: 115431

SEQ ID NO: 399755 - DNA, 1000 bp, Homo Sapiens; identical to SEQ ID NO: 288834

SEQ ID NO: 399756 - DNA, 1000 bp, Homo Sapiens; identical to SEQ ID NO: 117258

SEQ ID NO: 399757 - DNA, 1000 bp, Homo Sapiens; identical to SEQ ID NO: 222514

SEQ ID NO: 399758 - DNA, 1000 bp, Homo Sapiens; identical to SEQ ID NO: 222515

SEQ ID NO: 399759 - DNA, 1000 bp, Homo Sapiens; identical to SEQ ID NO: 222516

SEQ ID NO: 399760 - DNA, 1000 bp, Homo Sapiens; identical to SEQ ID NO: 222517

SEQ ID NO: 399761 - DNA, 1000 bp, Homo Sapiens; identical to SEQ ID NO: 222519

SEQ ID NO: 399762 - DNA, 1000 bp, Homo Sapiens
acatctgcagccgccgccagagggtttccttcggcgtctctgagcagcaggcagtggaagcctgggagaagctgacccgggaagaggggacacccttgaccttgtactacagccactggcgcaagctgcgtgaccgggagatccagctggagatcagtggcaaagagcggctggaagacctgaacttccctgagatcaaacgaaggaagatggctgacaggaaggatgaggacaggaagcaatttaaagacctctttgacctgaacagctctgaagaggacgacactgagggattctcggagagagggatactgaggcccctgagcactcggcatggggtggaagacgatgaagaggacgaggaggagggcgaggaggacagcagcaactcggaggatggagacccagacgcagaggcggggctggcccctggggagctgcagcagctggcccaggggccggaggacgagctggaggatctgcagctctcagaggacgactgaggcagcccatctggggggcctgtaggggctgccgggctggtggccagtgtttccacctccctggcagtcaggcctagaggctggcgtctgtgcagttgggggaggcagtagacacgggacaggctttattatttatttttcagcatgaaagaccaaacgtatcgagagctgggctgggctgggctggtgtggctgctgaagccccacagctgtgggctgctgaagtcagctccgcgggggagctgaccctgacgtcagcagaccgagaccagtcccagttccagggggaggcctgcaggcccctggccccttccaccacctctgccctccgtctgcagacctcgtccatctgcaccaggctctgccttcactcccccaagtctttggaaatttgttcttttcctttgaagtcacattttcttttaaaattttttgttttgcatccgaaaccgaaagaaataaagcggtgggaggcaggaaaaaaaaaaaaaaaaaaa

SEQ ID NO: 399763 - DNA, 1000 bp, Homo Sapiens
aggaagactgcatcagttcttagtaaagatgatgtggcacctgaaagtggtgatactacagtgaagaaacctgaatcaaagaaggaacagacgccagagcatgggaagaaaaaacgtggcagaggaaaagcccaagttaaagcaacaaatgaatccgaagacgaaatcccacagctggtaccaataggaaagaagactccagctaatgaaaaagtagagattcaaaaacatgccacaggaaagaagtctccagcaaagagtcctaatcccagcacacctcgtgggaagaaaagaaaggctttgccagcatctgagaccccaaaagctgcagagtctgagaccccagggaaaagcccagagaagaagccaaaaatcaaagaagaggcagtgaaggaaaaaagtccttcgctggggaaaaaagatgcgagacagactccaaaaaagccagaggccaagtttttcaccactcctagtaaatctgtgagaaaagcttcccacacccccaaaaaatggcccaaaaaacccaaagtaccccagtcgacctaaagtcagtgattcaactggaaggaaacctcaatgctgcctccagagctttttggaaatactcagatcctggccgcctttgtaaccttctctaaacgtcaggcctggacttaaaagattttttaaaacctccataagtagtccaggggcggtggctcacgcctgtaatcccagcactttgggaggccgaggcaggcggatcacaaggtcaacgagatcgagaccatcctggccaacatggtgaaaccctgtctgtaccaaaaatacaaaaattaattgggcatggtggtggacacctgtaatcccagctactagggaggctgaggcaggagaattgcttgaacctgggaggcggaggttgcagtgagccactgcactccagcctgatgacagagcaagactcagtctcaaaaataaataaaaataataaaacctcaaaaaaaaaaaaaaaaaaaaa

SEQ ID NO: 399764 - DNA, 1000 bp, Homo Sapiens; identical to SEQ ID NO: 117262

SEQ ID NO: 399765 - DNA, 1000 bp, Homo Sapiens; identical to SEQ ID NO: 288843

SEQ ID NO: 399766 - DNA, 1000 bp, Homo Sapiens; identical to SEQ ID NO: 117263

SEQ ID NO: 399767 - DNA, 1000 bp, Homo Sapiens; identical to SEQ ID NO: 222521

SEQ ID NO: 399768 - DNA, 1000 bp, Homo Sapiens; identical to SEQ ID NO: 117264

SEQ ID NO: 399769 - DNA, 1000 bp, Homo Sapiens; identical to SEQ ID NO: 288847

SEQ ID NO: 399770 - DNA, 1000 bp, Homo Sapiens; identical to SEQ ID NO: 117265

SEQ ID NO: 399771 - DNA, 1000 bp, Homo Sapiens; identical to SEQ ID NO: 117268

SEQ ID NO: 399772 - DNA, 1000 bp, Homo Sapiens; identical to SEQ ID NO: 288851

SEQ ID NO: 399773 - DNA, 1000 bp, Homo Sapiens; identical to SEQ ID NO: 288852

SEQ ID NO: 399774 - DNA, 1000 bp, Homo Sapiens; identical to SEQ ID NO: 288853

SEQ ID NO: 399775 - DNA, 1000 bp, Homo Sapiens; identical to SEQ ID NO: 117269

SEQ ID NO: 399776 - DNA, 1000 bp, Homo Sapiens; identical to SEQ ID NO: 117270

SEQ ID NO: 399777 - DNA, 1000 bp, Homo Sapiens; identical to SEQ ID NO: 222525

SEQ ID NO: 399778 - DNA, 1000 bp, Homo Sapiens; identical to SEQ ID NO: 222526

SEQ ID NO: 399779 - DNA, 1000 bp, Homo Sapiens
gatgagctgccgcagcacttgcaatcccttgggcagctgtccgggagatatgaggccagtatgtaccagaccccgctgcccggggagatgtcccccgagggcgaggagagccccccgcccctgcagctaggaaaccccgcagtgaaaaggctggcgccctccgtgcacggtgagcggcacctgagcgagaaccgcggggcctcgagccagcagcagcggaaccggcgcggcgagcggcccttcacatgcatggagtgcggcaagagcttccgcctgaagatcaacctcatcatccaccagcgcaaccacatcaaggaggggccctacgagtgcgccgaatgcgagatcagcttccggcacaagcaacagctcacgctgcaccagcgcatccaccgcgtgcgcggaggctgcgtctcacccgaacgcgggcccacgttcaaccccaagcacgcgctcaagccgcgtcccaagtcacccagctctggtagcggcggcggtggccctaagccctacaagtgccccgagtgcgacagcagcttcagccacaagtccagcctgaccaaacaccagatcacgcacacgggtgagcggccctacacgtgccccgccgccgccgcccggccaggtgcgcgggccgtgccccccctcggacaccgccaggcccgagcccagcgggcggggcggggcgccccccagcccctttgccgtgagctccccctctcctctcgtccctcctcccaaggacatgggggcagtgagaccaggtcccttgctgccgcgtttccccgggggccccaggggggagggcgcggacctggggaaccctttcgggctgttaatttccttgacaataaaatggatgaaaccaatcagcacggggggcgtgatttggccgccggccactcagaggggcggtgtagggcccatctagttggggatagaactttataattaccttttggatactgtggttctatttgataataatagagtaattttt

SEQ ID NO: 399780 - DNA, 1000 bp, Homo Sapiens; identical to SEQ ID NO: 288857

SEQ ID NO: 399781 - DNA, 1000 bp, Homo Sapiens; identical to SEQ ID NO: 117271

SEQ ID NO: 399782 - DNA, 1000 bp, Homo Sapiens; identical to SEQ ID NO: 117272
  misc_feature (956)..(956): n is a, c, g, or t

SEQ ID NO: 399783 - DNA, 1000 bp, Homo Sapiens
ccgcatgccaagaccagatgaggagcaagagaaagataaggaagatcagcctcaagggctggtgcctggaggagctgtggtggttctttctggccctcaccgaggcctctatgggaaggtggaaggccttgatcctgacaatgttcgggccatggttcgtctggctgtggggagccgggtggtgactgttagtgagtactacctgcggcctgtctcccagcaggagtttgacaagaacaccttggatctcaggcaacagaacggaactgcctcatcacggaagaccctctggaatcaagaactctacatccagcaggacaactcagagaggaagcggaaacaccttccagaccgacaggatgggcctgcagccaagagtgagaaagcagcccccagaagtcagcactggttgcacagggacctgcgtgtgcggtttgtggacaacatgtacaaaggaggccaatattacaacaccaagatgataattgaagatgtcctaagcccagatacctgtgtatgtcggacagatgaaggccgagtcctggaaggcctgagggaagacatgctggagaccctggttcccaaggcagagggtgaccgtgtgatggtggtgctgggcccacagactggaagggtgggacatttgctgagccgggacagagcacggagccgggctttggtgcaactgccaagagaaaatcaggtggtggagcttcactacgatgccatctgccagtacatgggccctagtgacacagatgatgactgacccatgggactcctcccatcccccaggctggtaccagttctgtaccatatgagaaagttgccttcagaaggtgggaagatcattgttccatcctctacttctggtgcagtcctgggacaaggacaagggaaagggatgggtgaaccagtagggaagctagaaacaaacccaatatttaccaaaatttagggtataataaaaaccatttcaagtaaaaaaaaaaaaaaaaaa

SEQ ID NO: 399784 - DNA, 1000 bp, Homo Sapiens; identical to SEQ ID NO: 288860

SEQ ID NO: 399785 - DNA, 1000 bp, Homo Sapiens; identical to SEQ ID NO: 117273

SEQ ID NO: 399786 - DNA, 1000 bp, Homo Sapiens; identical to SEQ ID NO: 117274

SEQ ID NO: 399787 - DNA, 1000 bp, Homo Sapiens; identical to SEQ ID NO: 222527

SEQ ID NO: 399788 - DNA, 1000 bp, Homo Sapiens; identical to SEQ ID NO: 117275

SEQ ID NO: 399789 - DNA, 1000 bp, Homo Sapiens; identical to SEQ ID NO: 117277

SEQ ID NO: 399790 - DNA, 1000 bp, Homo Sapiens; identical to SEQ ID NO: 288865

SEQ ID NO: 399791 - DNA, 1000 bp, Homo Sapiens; identical to SEQ ID NO: 117278

SEQ ID NO: 399792 - DNA, 1000 bp, Homo Sapiens; identical to SEQ ID NO: 288867

SEQ ID NO: 399793 - DNA, 915 bp, Homo Sapiens
gcatcctccgcatccacatccgcatcgtcgtcctccccgaccgcgtcctgcagcagctgccagtggagccgcctgacaagggactgccatccaccatggtgaagctgggctgcagcttctctgggaagccaggtaaagaccctggggaccaggatggggctgccatggacagtgtgcctctgatcagccccttggacatcagccagctccagccgccactccctgaccaggtggtcatcaagacacagacagaataccagctgtcctccccagaccagcagaatttccctgacctggagggccagaggctgaactgcagccacccagaggaagggcgcaggctgcccaccgcacggatgatcgccttcgccatggcgctactgggctgcgtgctgatcatgtacaaggccatctggtacgaccagttcacctgccccgacggcttcctgctgcggcacaagatctgcacgccgctgaccctggagatgtactacacggagatggaccccgagcgccaccgcagcatcctggcggccatcggggcctacccgctgagccgcaagcacggcacggagacgccggcggcctggggggacggctaccgcgcagccaaggaggagcgcaaggggcccacccaggctggggcggcggcggcggccaccgaaccccccgggaagccgtcggccaaggcggagaaggaggcggcgcggaaggcggccgggagcgcggcgcccccgcccgcgcagtgacgtctccagccccgcagcccggcccgggcgtcctccgccagctcctgtgaccagcgcgtctcccgatgctctccgccgtgttcgtgtccccaggcgccctcgctgcagccccgcccccgtgggtctctgactctgtcgcttttctctaagtaaagatttcacgtcc

SEQ ID NO: 399794 - DNA, 1000 bp, Homo Sapiens; identical to SEQ ID NO: 117279

SEQ ID NO: 399795 - DNA, 1000 bp, Homo Sapiens; identical to SEQ ID NO: 288869

SEQ ID NO: 399796 - DNA, 1000 bp, Homo Sapiens; identical to SEQ ID NO: 288870

SEQ ID NO: 399797 - DNA, 1000 bp, Homo Sapiens; identical to SEQ ID NO: 117280

SEQ ID NO: 399798 - DNA, 1000 bp, Homo Sapiens; identical to SEQ ID NO: 284848

SEQ ID NO: 399799 - DNA, 1000 bp, Homo Sapiens; identical to SEQ ID NO: 115458

SEQ ID NO: 399800 - DNA, 1000 bp, Homo Sapiens
aggatgtctggagaatgtcagagtgccgtgtgcatttcagtggtcagcaatgtcaccagcacaagtggcagctctggcagtagccgtggagtttttggaggggtcagtggcagtggcagtggtggctacaaaggcggcagcagcagcagcagcagcagcggctatggagtcagtggcggcagcggcagtggctatggaggggtcagcagtggcagcactgggggcaggggtagcagcgggagctaccagagcagcagtagtgggagcaggctcggcggtgcaggtagcatctccgtgagccacagtggaatgggctccagctctggcagcatccagacttctggaggaagtggctacaagtctggtggtggaggcagcaccagtatccgcttctcccagaccacgagctcaagccagcatagctccaccaagtgatctactgttccaaatctctataaccacctgcttcccactcagcctgcaatagtgtttcccactctctgcttggcatcaatagatgcataagggtcaaccacatttttcctcaagttccctggagaagaagctgaactcctggtttctccatccccatgaccttcccagggccatggaggtcctgctgctggtctgggatgatgatgcccctggaaaccttcctgcaatggccccttactttggacagcaacccctgagcccaagccagttttggccttcacagcctggccggttcccactctggcccatctcccattcttactgggagttggagatttgaagccagtcatctcagcactgtctgaggagggcagagccatgggttctgtgctggagggtgcacggccaagatctccagactgctggttcccagggaaccctccctacatctgggcttcagatcctgactcccttctgtcccctaattccctgagctgtagatcctctggtgatgagtatgttgcactttcttttctcaataaattgcactgaacttcaaaaaaaa

SEQ ID NO: 399801 - DNA, 1000 bp, Homo Sapiens; identical to SEQ ID NO: 117282

SEQ ID NO: 399802 - DNA, 1000 bp, Homo Sapiens
agctgggctgctacagccgcaaccccagggaccagtgcgcacgcctgggccgccctccgggagtcacccagcggccgcggacaactgaataaacaccccaaagcgctgcggtcggtcaagggcggggacagccacactgcgcgcggggcccgcaggccgtaataaagagtggctcgacctcgctgctgcctgtcgcgggagaggaacaagctttcgactagcgcctctccccggggcccgcgccccgagccccacgcgcaagacagcccaacagctgttcctcccctccccgccgactccaactcttcggaatctgcccactcggggctgcagggcaagtgtttaggatggttcccagccccgcgctggcggtgaaaatttcaacgtcattccttcaattaaaaaaaggggggggcaagggaggggctttgtgataactactcccagcttcttctgatcatttcaaaattaagtcgattttttttaaccagtccccacttactgtcctaactctcctcgctgaccctatctgggagcccggaaccgttaggtactgccgaatgcggtgcaaaatttccccctctcccccagttcgcagtgcctggagccgctggggttactcgtctgttctgatgccaccgcgagatggtccccgagctccccgagagtcctcagtgaaaggattccgcggcactgcctctattattataccgtaaatctttttaaattctggaactaattatatagaggatatgtctcaatttgttctgcattaatgccacagtggggatggaggccaggccgtggccagagcagatacgtaggcccatgaaattgatgaactgagagttgcttccagtcctgagcgcaccatctggaattccagtctgaggttacaattagaactcctgaccccagattcaactttgcaaacaacaggggaaaaaaatggggaaaagaaaaaccacgagagagggaaaaaaaattattctgcacctgt

SEQ ID NO: 399803 - DNA, 1000 bp, Homo Sapiens; identical to SEQ ID NO: 224709

SEQ ID NO: 399804 - DNA, 1000 bp, Homo Sapiens; identical to SEQ ID NO: 222528

SEQ ID NO: 399805 - DNA, 649 bp, Homo Sapiens; identical to SEQ ID NO: 288878

SEQ ID NO: 399806 - DNA, 1000 bp, Homo Sapiens; identical to SEQ ID NO: 288879

SEQ ID NO: 399807 - DNA, 1000 bp, Homo Sapiens; identical to SEQ ID NO: 288880

SEQ ID NO: 399808 - DNA, 1000 bp, Homo Sapiens; identical to SEQ ID NO: 117284

SEQ ID NO: 399809 - DNA, 1000 bp, Homo Sapiens; identical to SEQ ID NO: 288882

SEQ ID NO: 399810 - DNA, 1000 bp, Homo Sapiens; identical to SEQ ID NO: 288883

SEQ ID NO: 399811 - DNA, 1000 bp, Homo Sapiens; identical to SEQ ID NO: 288884

SEQ ID NO: 399812 - DNA, 1000 bp, Homo Sapiens; identical to SEQ ID NO: 288885

SEQ ID NO: 399813 - DNA, 1000 bp, Homo Sapiens; identical to SEQ ID NO: 222529

SEQ ID NO: 399814 - DNA, 1000 bp, Homo Sapiens; identical to SEQ ID NO: 222530

SEQ ID NO: 399815 - DNA, 1000 bp, Homo Sapiens; identical to SEQ ID NO: 117285

SEQ ID NO: 399816 - DNA, 1000 bp, Homo Sapiens
cacacaacctgccctgcctcctggtggaactgctggagcatagtccctggagccggcgggaaggaggcaagctgcagcagttcgagggcagccgttggcatactgtggccccctcagagcagcaaaagctgagcaagttggacgggcaagtgtggatcgccctgtacaacctgctgctaagccctgaggctcaggcgcgctactgcctcacaagttttgccaagggacggctactcaagcttcgggccttcctcacagacacactgctggaccagctgcccaacctggcccacttgcagagtttcctggcccatctgaccctaactgaaacccagcctcctaagaaggacctggtgttggaacagatcccagaaatctgggagcggctggagcgagaaaacagaggcaagtggcaggcaattgccaagcaccagctccagcatgtgttcagcccctcagagcaggacctgcggctgcaggcgcgaaggtgggctgagacctacaggctggatgtgctagaggcagtggctccagagcggccccgctgtgcttactgcagtgcagaggcttctaagcgctgctcacgatgccagaatgagtggtattgctgcagggagtgccaagtcaagcactgggaaaagcatggaaagacttgtgtcctggcagcccagggtgacagagccaaatgagggctgcagttgctgagggccgaccacccatgccaagggaatccacccagaatgcacccctgaacctcaagatcacggtccagcctctgccggagccccagtctccgcagtggagagcagagcgggcggtaaagctgctgaccgatctccctcctcctcaccccaagtgaaggctcgagacttcctgccccacccagtgggtaggccaagtgtgttgcttcagcaaaccggaccaggagggccagggccggatgtggggaccctcttcctctagcacagtaaagctggcctccagaaacacgggaaaaaaa

SEQ ID NO: 399817 - DNA, 1000 bp, Homo Sapiens; identical to SEQ ID NO: 222531

SEQ ID NO: 399818 - DNA, 1000 bp, Homo Sapiens; identical to SEQ ID NO: 222532

SEQ ID NO: 399819 - DNA, 1000 bp, Homo Sapiens
gagcacttgtgaaaatggatctttaaatatggaaataaatggtgaggaagaaatcctaatgaaaaataagaattccttatatttgaaatctgcagagatagactgcagcatatcaagtgaggaaaatacagatgataatataaccgtccaaggtgaaataatgaaggaagatagaatggaaaacctgaaaaatcatgacaataacttgtctcagtctggatcagactcaagttgctctccagaatgcctctgggaggaaggcaaagaagttatcccaactttctttagtaccatgaacacaagctttagtgacattgaacttctggaagacagtggcattcccacagaagcattcttggcatcatgttgtgctgtggttccagtattagacaaacttggccctacagtgtttgctcctgttaagatggatcttgttgaaaatattaagaaagtaaatcagaagtatataaccaacaaagaagagtttaccactctccagaagatagtgctgcacgaagtggaggcggatgtagcccaggttaggaactcagcgactgaagccctcttgtggctgaagagaggtctcaaatttttgaagggatttttgacagaagtgaaaaatggggaaaaggatatccagacagccctgaataacgcatatggtaaaacattgcggcaacaccatggctgggtagttcgaggggtttttgcgttagctttaagggcaactccatcctatgaagattttgtggccgcgttaaccgtaaaggaaggtgaccaccggaaagaagctttcagtattgggatgcagagggacctcagcctttacctccctgccatgaagaagcagatggccatactggacgctttataagaggtccatgggctggaatctgatgaggttgtatgatggctgctgggcagcacctcctaacttcagggaataaagtgctaaagtgtaaaaaaaaataaaaataaaaataaataaataaataaaatt

SEQ ID NO: 399820 - DNA, 1000 bp, Homo Sapiens; identical to SEQ ID NO: 117286

SEQ ID NO: 399821 - DNA, 1000 bp, Homo Sapiens; identical to SEQ ID NO: 117287

SEQ ID NO: 399822 - DNA, 1000 bp, Homo Sapiens
tgtgcctgattattacaaaataattaaaaatccaatggatttgtcaaccatcaagaaaagactacaagaagattattccatgtactcaaaacctgaagattttgtagctgattttagattgatctttcaaaactgtgctgaattcaatgagcctgattcagaagtagccaatgctggtataaaacttgaaaattattttgaagaacttctaaagaacctctatccagaaaaaaggtttcccaaaccagaattcaggaatgaatcagaagataataaatttagtgatgattcagatgatgactttgtacagccccggaagaaacgcctcaaaagcattgaagaacgccagttgcttaaataatatgcagcaccactagcttgtgctggtttttagatttttttgttttcaaaaaaacatttgtcagtaatttaacatcactacaaaaagaagagtttgtgactattctcatctctgttttggacgtttactagactttgatttccttaatagcccatttctgttaacctcttatcactaagaaagaaaggaaagaaggagatgaatagaagaaagaaaatggaaagaaggaaaaaaggaggatagaaaaaggatggaagaaagaagcattgaaaacaaagacattcttcccacttcttggatttttaaaccacagtctggagtgatagctactgtagaaaggaaatagactttgtatgaactctttaagttgaaaagtaaaaaatatatgtggtttggatgtgtgctttaattcagctttagaaattaataccactacccgtgaattatatggcctgacaatatgaattaggtgtactgtactgaagaacagtactccacaaacatgggtggtaacaagagttccatcccaggaggccaaacggtgcaacagaagggtaggttagatgctattaagaaggcacttaatagtacatcatgtaagatggcaactgtattaaagaaaaatccggaaaacaaaaa

SEQ ID NO: 399823 - DNA, 1000 bp, Homo Sapiens; identical to SEQ ID NO: 117288

SEQ ID NO: 399824 - DNA, 1000 bp, Homo Sapiens; identical to SEQ ID NO: 222534

SEQ ID NO: 399825 - DNA, 1000 bp, Homo Sapiens; identical to SEQ ID NO: 117289

SEQ ID NO: 399826 - DNA, 1000 bp, Homo Sapiens; identical to SEQ ID NO: 288899

SEQ ID NO: 399827 - DNA, 1000 bp, Homo Sapiens; identical to SEQ ID NO: 222536

SEQ ID NO: 399828 - DNA, 1000 bp, Homo Sapiens; identical to SEQ ID NO: 288900

SEQ ID NO: 399829 - DNA, 1000 bp, Homo Sapiens
ggcaccaagaatgtcattgaaacttgcaaagaggctggggttcagaaactcattttaaccagcagtgccagtgtcatctttgagggcgtcgatatcaagaatggaactgaagaccttccctatgccatgaaacccattgactactacacagagactaagatcttacaggagagggcagttctgggcgccaacgatcctgagaagaatttcttaaccacagccatccgccctcatggcattttcggcccaagggacccgcagttggtacccatcctcatcgaggcagccaggaacggcaagatgaagttcgtgattggaaatgggaagaacttggtggacttcacctttgtggagaacgtggtccatggacacatcctggcggcagagcagctctcccgagactcgacactgggtgggaaggcatttcacatcaccaatgatgagcccatccctttctggacattcctgtctcgcatcctgacaggcctcaattatgaggcccccaagtaccacatcccctactgggtggcctactacctggccctcctgctatccctgctggtgatggtgatcagtcctgtcatccagctgcagcccaccttcacacccatgcgggtcgcactggctggcacattccactactacagctgcgagagagccaaaaaggccatgggctaccagccactagtgaccatggatgatgctatggagaggaccgtgcagagctttcgccacctgcggagggtcaagtgagggacactggaggctgggctctctcgacacgttgctcagccagtcactccttcccctgtggattgatgaaataacatcctttgaatgagtttgctctgagcctgtgactccttctgctaggcagagagcgcaccctactctttccgtgacgatgagggcggcaaaaacagacatttcttccttcatggaactggatttggatttcttgaagcaggcagcttcatattataccgatttgttctctgtc

SEQ ID NO: 399830 - DNA, 1000 bp, Homo Sapiens; identical to SEQ ID NO: 117290

SEQ ID NO: 399831 - DNA, 1000 bp, Homo Sapiens; identical to SEQ ID NO: 222537

SEQ ID NO: 399832 - DNA, 493 bp, Homo Sapiens
gggggaagcggcggcaggcgccatgtccggccgcgaaggtggcaagaagaagccactgaaacagcccaagaagcaggccaaggagatggacgaggaagataaggctttcaagcagaaacaaaaagaggagcagaagaaactcgaggagctaaaagcgaaggccgcggggaaggggcccttggccacaggtggaattaagaaatctggcaaaaagtaagctgttccttgtgcctgaggagatggtgaccctttatttcatctgtatttaaacctctctattccctgccataacatcttttgccacgtatagctggaattaagtgttgtcttggagctgttgtacatttaagaataaacttttgtaaaaaaagaaaaatcttacagtggctcatcatctctttagttgttttcactaagtcattcctaccataactgtgaatttaaagtaaaaccagctcagaatccaaaaaaaaaaaaaaaaaaaaaaaaaaaa

SEQ ID NO: 399833 - DNA, 1000 bp, Homo Sapiens; identical to SEQ ID NO: 117293

SEQ ID NO: 399834 - DNA, 1000 bp, Homo Sapiens; identical to SEQ ID NO: 222349

SEQ ID NO: 399835 - DNA, 1000 bp, Homo Sapiens; identical to SEQ ID NO: 288910

SEQ ID NO: 399836 - DNA, 1000 bp, Homo Sapiens; identical to SEQ ID NO: 288911

SEQ ID NO: 399837 - DNA, 1000 bp, Homo Sapiens; identical to SEQ ID NO: 117294

SEQ ID NO: 399838 - DNA, 1000 bp, Homo Sapiens
ctgcattccagaggtgatggtggccccaaggccttgaaggggctgggctccagccccgacctggagctgctgctccggagcagccagcgggaggaaggtgacaatgaggaggaggagtactttgtggcccaggggcagcagtgaccagccagggcaaatggcttagaagcaggccactccccagcctgctgccagcactcactgtgctcaagccgccagggctcatcatggtagctgggagctgtggacgggagtcaccaggtggtggggccaagccagggactcatgacttttgcccctcccttcagagcctggtcacacaaggggcgagcaccaggccagcctgggactggccagagctgggcccaagctgcgctggaatcgcagcaggagaggggagtgggctggttcttcccaccacttcccaggctctgacagccgagactcatttccaaggcacagcagctttctaaagggactgagtttggactgggttttggacctccaggggctggagcttcatcacctgggcagtgtcttttctcagagagcaggtttctttatagtttggaaataaatggttcacggtccactggccgccttgtgttgctggagacgtgggggcagggaggggacagtgtgggcctggcctctcctttcctttccctgcctggagccttcttcaaatgtctggtcttaagccaggcctccttcattttctcgctcctgttagaacaccagtcccctccccagtggggccccactgcacctgctggcaggaaataaatgaatgtttactgagtactgcattctggagaccttacatgttttcacagcctagtttgaatactggctttgtcactagctgtgtgaccctaagcaaatgacctaacctgtctgtgccgtagttttttaatctgtgaaatggggataatgtctatctcagagtccttttgaagattgagtcattattagtaacagattaaatgttatataagca

SEQ ID NO: 399839 - DNA, 1000 bp, Homo Sapiens; identical to SEQ ID NO: 288916

SEQ ID NO: 399840 - DNA, 1000 bp, Homo Sapiens; identical to SEQ ID NO: 288917

SEQ ID NO: 399841 - DNA, 1000 bp, Homo Sapiens; identical to SEQ ID NO: 288918

SEQ ID NO: 399842 - DNA, 1000 bp, Homo Sapiens
tggcccttaatgccaactttgtgtcctggaagagtcgtaccaagtacaccattacaccagtgaagatgaggaagtctgggggccgagaccacacaggccgaatccgggtgcatggtattggcgggggccacaagcaacgttatcgaatgattgactttctgcgtttccggcctgaggagaccaagtcaggaccctttgaggagaaggttatccaagtccgctatgatccctgtaggtcagcagacatagctctggttgctgggggcagccggaaacgctggatcatcgccacagaaaacatgcaggctggagatacaatcttgaactctaaccacataggccgaatggcagttgctgctcgggaaggggatgcgcatcctcttggggctctgcctgtggggaccctcatcaacaacgtggaaagtgagccaggccggggtgcccaatatatccgagctgcagggacgtgtggtgtgctactgcggaaggtgaatggcacagccattatccagctgccctctaagaggcagatgcaggtgctggaaacgtgcgtagcaacagtaggccgagtatccaacgttgatcataacaaacgggtcattggcaaggcaggtcgcaaccgctggctgggcaagaggcctaacagtgggcggtggcaccgcaaggggggctgggctggccgaaagattcggccactaccccccatgaagagttacgtgaagctgccttctgcttctgcccaaagctgatatccctgtactctaataaaatgccccccccccccgttttaatctgttactgtggttttgttttgggtgttttttgttttttttgttgttgttttttttttgcgggggaggggatggtacagactaaacgtggggaaaagaagtaaaaagtgtggaagagaaagtacaggacactgggtctgtccccaccccaattcccttacaagtaatggagccggggatggaaataaatgacgtccaaggtcaaaaaa

SEQ ID NO: 399843 - DNA, 1000 bp, Homo Sapiens; identical to SEQ ID NO: 288919

SEQ ID NO: 399844 - DNA, 1000 bp, Homo Sapiens; identical to SEQ ID NO: 117298

SEQ ID NO: 399845 - DNA, 1000 bp, Homo Sapiens
gaatgctgtaggctgctgtggtttacagttatataagtttggagagacagtttctattatgctgatatcagtgatgttgcattccttgtggttggtgatccatttggacacttggagaccagaaagcttctttgacaaagtgaagaagaacagacaaaatggcatgcacacattatgtttactagacatcaaagtaaaggagcagtctttggaaaatctaatcaagggaaggaagatctatgaacctccacggtatatgagtgtaaaccaagcagcccagcagcttctggagattgttcaaaatcaaagaatacgaggagaagaaccagcagttaccgaggagacactttgtgttggcttagccagggttggagccgacgaccagaaaattgcagcaggcactttaaggcaaatgtgcactgtggacttgggagaaccattgcattccttgatcatcacaggaggcagcatacatccaatggagatggagatgctaagtctgttttccataccagaaaatagctcagaatctcaaagcatcaatggactttgaacatagatatttaccattgtctgatgtaaatttcagccatatatggattgatatggtttggatgtatccccacccaagtctcatcttgaattttaatcctcataattcccaggtgttgtggtaggtaattgaatcatgggggcagtttccctcatgctattctcatgatagtgagctttcatgagatctgatggttttataagtgcctggcatttcccctactggctctcattctcactcttgccgccctgtgaagaggtgccttccaccgtgattgttaagtttcctgaggccttcccagccatgtggaactgtgagtcgaaaattaaacctcttttataattacccagtctcgggtatttcttcatagcagtgtgagaatggattaatacctggatgcatgcatgtttgtgtaacaaacaggtcttttggcttatctagtaagta

SEQ ID NO: 399846 - DNA, 1000 bp, Homo Sapiens; identical to SEQ ID NO: 117299

SEQ ID NO: 399847 - DNA, 1000 bp, Homo Sapiens; identical to SEQ ID NO: 117300

SEQ ID NO: 399848 - DNA, 1000 bp, Homo Sapiens; identical to SEQ ID NO: 117301

SEQ ID NO: 399849 - DNA, 1000 bp, Homo Sapiens
acacaacctgttcaagcaacgactagataaagatggcatccccgtgagctcagaggctgagcggcatgagcttgggaaagtcgaggtgacggtgtttgaccctgactccctggaccctgatcgctgtgagagctgctatggtgctgaggcagaagatatcaagtgctgtaacacctgtgaagatgtgcgggaggcatatcgccgtagaggctgggccttcaagaacccagatactattgagcagtgccggcgagagggcttcagccagaagatgcaggagcagaagaatgaaggctgccaggtgtatggcttcttggaagtcaataaggtggccggaaacttccactttgcccctgggaagagcttccagcagtcccatgtgcacgtccatgacttgcagagctttggccttgacaacatcaacatgacccactacatccagcacctgtcatttggggaggactatccaggcattgtgaaccccctggaccacaccaatgtcactgcgccccaagcctccatgatgttccagtactttgtgaaggtggtgcccactgtgtacatgaaggtggacggagaggtactgaggacaaatcagttctctgtgaccagacatgagaaggttgccaatgggctgttgggcgaccaaggccttcccggagtcttcgtcctctatgagctctcgcccatgatggtgaagctgacggagaagcacaggtccttcacccacttcctgacaggtgtgtgcgccatcattgggggcatgttcacagtggctggactcatcgattcgctcatctaccactcagcacgagccatccagaagaaaattgatctagggaagacaacgtagtcaccctcggtgcttcctctgtctcctctttctccctggcctgtggttgtcccccagcctctgccaccctccacctcctcggtcagccccagccccaggttgataaatctattgattgattgtgatagtaaaaaaaaaaaaaaaaaa

SEQ ID NO: 399850 - DNA, 1000 bp, Homo Sapiens; identical to SEQ ID NO: 222545

SEQ ID NO: 399851 - DNA, 600 bp, Homo Sapiens; identical to SEQ ID NO: 117302

SEQ ID NO: 399852 - DNA, 765 bp, Homo Sapiens; identical to SEQ ID NO: 288926

SEQ ID NO: 399853 - DNA, 1000 bp, Homo Sapiens; identical to SEQ ID NO: 222546

SEQ ID NO: 399854 - DNA, 1000 bp, Homo Sapiens; identical to SEQ ID NO: 288928

SEQ ID NO: 399855 - DNA, 1000 bp, Homo Sapiens
ggagttaaaaaccgcccagaggagttcatggaaatgaataactttattgaactatttagccagaaaataaatttgatagataaaatatctcagagaatttataaggaagaaagggaatattttgatgaaatgaaagaatatggcccaattcatattctgtggtcagcgtcagaagaggatctggttgatactctaaaggatgttgccagctgcattgacagatgctgtaaggccactgaaaagcggatgtctggactctcagaggccctgcttcctgttgtacatgagtacgtgctttatagtgaaatgttaatgggtgttatgaaaagaagagaccaaatacaagcagaactggattccaaagttgaagttttgacctataaaaaggcagatactgatctgcttccagaggagattggaaaacttgaagataaagtggaatgtgctaataatgccctgaaagcagattgggagagatggaaacaaaatatgcaaaatgatatcaagttagcatttacagatatggctgaggagaatatccattattatgaacagtgccttgctacgtgggagtcattccttacatcacagaccaaccttcacttggaagaagcctctgaagataaaccttaatcccattgaggacttctgtttgatctttgggagacagcatttattaaccaaagttattctttctggatctgccgtgtccttataaagtggatgaaaaatgttttgtacccatctggaaaaccaacaacttgaaatctcaggtattccaggtcactgacatgaatttgaagatatatctatctgtatggatatatatctatatgtatatagatatataaatacagagagatatctggcttggttttaattatgttcttaaatttgtgtgccaataattgcatatagattttttttcttaaatatttgactgtggaacatgccattttaaatatgttgtaaggactgttttaataaaaagtttagtatg

SEQ ID NO: 399856 - DNA, 1000 bp, Homo Sapiens; identical to SEQ ID NO: 117304

SEQ ID NO: 399857 - DNA, 1000 bp, Homo Sapiens
gtaaggcctgtcatagaaaaaaggatacaaaagtacagtgaaggtgaaattcgatttaatttaatggccattgtgtctgacagaaaaatgatatatgagcagaagatagcagagttacaaagacaacttgcagaggaggaacccatggatacagatcaaggtaatagtatgttaagtgctattcagtcagaagttgccaaaaatcagatgcttattgaagaagaagtacagaaattaaaaagatacaagattgagaatatcagaaggaagcataattatctgcctttcattatggaattgttaaagactttagcagaacaccagcagttaataccactagtagaaaaggcaaaagaaaaacagaacgcaaagaaagctcaggaaaccaaatgaagatgttttcagatatgtacacatttctgcttctgcacatattttcatggaaaccattatgtataaagaacttagagcaacatcctaattggctcagtgcacgtttggcaatagtgccagcctgtcttgtctttaatgcatggattcataaacttcttccctacctgcatcatgtgcatgtagtgcatattaaatgaaagtgatattaagaatgctttcccaaattccattatttgacattgagtctgacaactgttagttttctggttgtccaactaccatatgaagctagaaaatgcacaaacgatattccttatctgtaatttaaatacttaaaatttgcaattgtcagatcttgattaaactggttgtcttatttcttctcatcattaacggaaaaaaaatcagtatttctatctttgatatctaagtgttttgaggattttaaaactgaattttatctgctataccagttatttgagaaagtatgattttaatgtaaatcatttaaaaaggacaaaagtataatttccagtgattttcactgctgtcagtagaaaagtaataaacatctcaattttaaaaaaaaaaaaaaaaaaaaaaaaaa

SEQ ID NO: 399858 - DNA, 1000 bp, Homo Sapiens; identical to SEQ ID NO: 222547

SEQ ID NO: 399859 - DNA, 1000 bp, Homo Sapiens; identical to SEQ ID NO: 288931

SEQ ID NO: 399860 - DNA, 1000 bp, Homo Sapiens; identical to SEQ ID NO: 222548

SEQ ID NO: 399861 - DNA, 967 bp, Homo Sapiens; identical to SEQ ID NO: 288933

SEQ ID NO: 399862 - DNA, 1000 bp, Homo Sapiens; identical to SEQ ID NO: 222549

SEQ ID NO: 399863 - DNA, 1000 bp, Homo Sapiens; identical to SEQ ID NO: 222550

SEQ ID NO: 399864 - DNA, 1000 bp, Homo Sapiens; identical to SEQ ID NO: 117306

SEQ ID NO: 399865 - DNA, 1000 bp, Homo Sapiens; identical to SEQ ID NO: 117307

SEQ ID NO: 399866 - DNA, 1000 bp, Homo Sapiens
atggctgtgatgtacatcactggagctggcctttatgctgctcgaattcctgagcgcttctttcctggaaaatttgacatatggttccagtctcatcagattttccatgtcctggtggtggcagcagcctttgtccacttctatggagtctccaaccttcaggaattccgttacggcctagaaggcggctgtactgatgacacccttctctgagccttcccacctgcggggtggaggaggaacttcccaagtgcttttaaaaataacttctttgctgaagtgagaggaagagtctgagttgtctgtttctagaagaaacctcttagagaattcagtaccaaccaagcttcagcccactttcacacccactgggcaataaactttccatttccattctcctagctggggatggggcatggtcaaacttagccatcccctcctcagcaaggcatctaccggcccctcacagagacagtactttgaaactcatgttgagattttaccctctcctccaaccattttgggaaaattatggactgggactcttcagaaattctgtcttttcttctggaagaaaatgtccctcccttacccccatccttaactttgtatcctggcttataacaggccatccatttttgtagcacacttttcaaaaacaattatataccctggtcccatctttctagggcctggatctgcttatagagcaggaagaataaagccaccaacttttacctagcccggctaatcatggaagtgtgtccaggcttcaagtaacttgagttttaattttttttttttcttggcagagtaatgtaaaatttaaatggggaaagatatttaatatttaatactaagctttaaaaagaaacctgctatcattgctatgtatcttgatgcaaagactatgatgttaataaaagaaagtacagaagagacttggcattcaaagatttcaaaaaaaaaaaaaaaaaaaaaaaaaaaaaaaaaaaaaaaa

SEQ ID NO: 399867 - DNA, 1000 bp, Homo Sapiens
ttcaggcagccatgactcttctaagtgatgcttctcatctgcctaaggcgggcggggtcttcacacctggagcagctttttccaaaacaaagttgattgacagactcaacaaacacggtattgagtttagtgttattagcagctctgaagtctaaacactggaagaattaactgaagtcataacgtgcgtgaattaacagcttctctatttgatatttgaaattcttctgtaagcctgtctgagtgtatgtggaaacgattgtcaaatctaaaatatctatatattaaaaagtaggaaattgtcctagcttaccctaaatttcaaatctgagttgattttgtgattttattgcttataacagagaactcatatttgacatatttttttcattgatgtgttcctggtagattttcacgaatgagctggcaggtctaatgggggaggcggcgtcccagtctgtgttgcagcagcattctcatcgggggtgcgcacaccatcgttactgtcgggcagtaactgccgcttgccttgccgcagtaggagggaaatctcaccttccttccacatactgtcttgagcctttgctaaattaaactgcactttttgctatttttgcctagtttttcgccaatctacactgattttggactgttacctaagttgaaaaataaaaggttgtcaatcgaatggtggtttaatgtttggacctgccgatgtatttgtatagtggtagaaacatgctgcttaagtggcctaacctgtttcttgccaataagtaggcttatcattttatctttacgtaattctatatctgtgactaggtttttaaggatacagcttataagttgctatcaattttcactacctaagcagaatttttctctaatttactttttgtattttaactaggttttacatggaagccctaaaataaggcaaaagactttttcttttgtaataagcatataataaacacgtatatacatagcaaaaaaaaaa

SEQ ID NO: 399868 - DNA, 1000 bp, Homo Sapiens; identical to SEQ ID NO: 115509

SEQ ID NO: 399869 - DNA, 1000 bp, Homo Sapiens; identical to SEQ ID NO: 288935

SEQ ID NO: 399870 - DNA, 1000 bp, Homo Sapiens; identical to SEQ ID NO: 222553

SEQ ID NO: 399871 - DNA, 1000 bp, Homo Sapiens
ctttgcagagtattccagtagtcttcagaaaccagtggcttctcctggcaaagcctcctcacagaggaagactgaaggggatttgcaaggagatcaccagaaagaagttgctttggatataacttcttctgaggagaagcctgatgttagtttcgataaagcaattagagatgaagcaatataccattttaggcttttgaaggatgaaattgtggatcattggagaggaccggaaggccaccctctgcatgaggtcttgctggaacaagccaaggttgtctggcaattccgggggaaagaagatttggataagtggacagtgacttctgataagacgattggaggcagaagtgaagtgtttttgaaaatgggcaagaataaccaaagtgcactgctatatggaactctgagctctgaggcgcctcaggacggggagtctacccgaagtgggtactgtgcaatgatatccaggattccaaggggtgcttttgagaggaagatgtcttacgattggtcccagttcaatactctgtatctccgtgtacgtggggatggtcggccttggatggtgaatatcaaggaggacacagatttcttccagaggacgaatcagatgtatagttacttcatgttcacccgcgggggaccctactggcaggaggtcaagattcctttttccaaatttttcttctctaatcgaggaagaatccgggatgttcagcatgagcttccgcttgataagatctcttctataggattcaccttggctgataaagtggatggtccattcttcctggagatagattttattggcgtgtttactgatccagctcatacagaagaatttgcctatgaaaattctccagagcttaacccaaggctttttaaataaagatcatatggtagttttgttttactaatctaagggtactagcatctacaatgatatagacaaaataaaatatttctttaatggcatccaaaaaaaaaaaaaaaaaaa

SEQ ID NO: 399872 - DNA, 1000 bp, Homo Sapiens; identical to SEQ ID NO: 117310

SEQ ID NO: 399873 - DNA, 1000 bp, Homo Sapiens; identical to SEQ ID NO: 222555

SEQ ID NO: 399874 - DNA, 1000 bp, Homo Sapiens; identical to SEQ ID NO: 288940

SEQ ID NO: 399875 - DNA, 1000 bp, Homo Sapiens; identical to SEQ ID NO: 288941

SEQ ID NO: 399876 - DNA, 1000 bp, Homo Sapiens
ccccacctgtcagctagccacctgcttgtttgtgttgggatattttttagcacctgaagcaccatctgaaaggggcaccattttcttcttccctttgatctcacatatgctccctaaaaatccttaagttgtcaatctgatccccagtgtgaggttaatgagcaaaattggtctttggggccctttttgtccaagccccactgaaaggcctcttcagaaaactattatctttaaagccctactttaactccttaattccagcatacagctaaaactggatgtatattctggcaagtaaaggctgaggactcctctttaatcctcagatctagataactcatgacattttatttgaccaacatagcacatgatgagatatcaaggtaattaaaatagcatgcttgaaaaaaaaatacgtaatctgtttcacctgtaactgtttaagccaataaacttttcaaaatttatgtaatgtggggcttttatgtagcactttacgttttcatgctgcttattgttttattctactgaaaaaaatgaatttcaagattctcaacttttttaatttcaaaaattgtttattgttttgactataggaatacaaaatttcctattttgggagaataagaactctttttgtcatttttggctatgaataaactttctggtcttttgagaccacccatttttatagatcagaatcagaaaacaggtaaacctcactcacacatttggactcatttgaacaaaaatctaggccaaaatactgaaaagcctatgtgtttttttaattggaagtatatgtaaggttaatgcatttagtgaacgtgactaacaaagactaatgtgcacattaacagatgtactttttaaggttttatgggaggctgtgcattgctcaaaagctgttgggaacgccttctgaacagttgccttcagaactagtttgagctgctcaataaaaccagtgactttactcataaaaaaaaaaaaaaaaaaa

SEQ ID NO: 399877 - DNA, 1000 bp, Homo Sapiens; identical to SEQ ID NO: 288943

SEQ ID NO: 399878 - DNA, 1000 bp, Homo Sapiens; identical to SEQ ID NO: 288944

SEQ ID NO: 399879 - DNA, 1000 bp, Homo Sapiens
tgtgtatatctttgtgtgtcttcctgtttatgtgtgccaagggagtattttcacaaagttcaaaacagccacaataatcagagatggagcaaaccagtgccatccagtctttatgcaaatgaaatgctgcaaagggaagcagattctgtatatgttggtaactacccaccaagagcacatgggtagcagggaagaagtaaaaaaagagaaggagaatactggaagataatgcacaaaatgaagggactagttaaggattaactagccctttaaggattaactagttaaggattaatagcaaaagatattaaatatgctaacatagctatggaggaattgagggcaagcacccaggactgatgaggtcttaacaaaaaccagtgtggcaaaaaaaaaaaaaaaaaaaaaaaaaaaaaatcctaaaaacaaacaaacaaaaaaaacaattcttcattcagaaaaattatcttagggactgatattggtaattatggtcaatttaataatattttggggcatttccttacattgtcttgacaagattaaaatgtctgtgccaaaattttgtattttatttggagacttcttatcaaaagtaatgctgccaaaggaagtctaaggaattagtagtgttcccatcacttgtttggagtgtgctattctaaaagattttgatttcctggaatgacaattatattttaactttggtgggggaaagagttataggaccacagtcttcacttctgatacttgtaaattaatcttttattgcacttgttttgaccattaagctatatgtttagaaatggtcattttacggaaaaattagaaaaattctgataatagtgcagaataaatgaattaatgttttacttaatttatattgaactgtcaatgacaaataaaaattctttttgattattttttgttttcatttaccagaataaaaactaagaattaaaagtttgattacagtcaaaaaaaaaaaaaaaaaaaaaaa

SEQ ID NO: 399880 - DNA, 1000 bp, Homo Sapiens; identical to SEQ ID NO: 117311

SEQ ID NO: 399881 - DNA, 1000 bp, Homo Sapiens; identical to SEQ ID NO: 117312

SEQ ID NO: 399882 - DNA, 1000 bp, Homo Sapiens
ggaactttcaacagaggccttttactctcagctttgtcgtatttgggttttgaaacttaccaggttatctctcaggctgctgtggttcatgccacagccaaagttgaagaaatacttgaacaagcagactacctgtatgaaagcggagaaacagaaaaactttatcagttgctaacccaatacaaggaaagtgaagatgcagagttactgtggcgtttggcacgggcatcacgtgatgtagctcagcttagcagaacctcagaagaggagaaaaagctattggtgtatgaagccctagagtatgcaaaaagagcactagaaaaaaatgaatcaagttttgcatctcataagtggtatgcaatctgccttagtgatgttggagattatgaaggcatcaaggctaaaattgcaaatgcatatatcatcaaggagcattttgagaaagcaattgaactgaaccctaaagatgctacttcaattcaccttatgggtatttggtgctatacatttgccgaaatgccttggtatcaaagaagaattgctaaaatgctgtttgcaactcctcctagttccacctatgagaaggccttaggctactttcacagggcagaacaagtggatccaaacttctacagcaaaaacttacttcttttaggaaagacatacttgaaactacacaacaaaaagcttgctgctttctggctaatgaaagccaaggactatccagcacacacagaggaggataaacagatacagacagaagctgctcagttgcttacaagtttcagtgagaagaattgagaacttttcagagaagatttatgaaatagctaataaacattgccttttcttttaattctaaacttaatatatgaactataactgttctacggctttttaaatgttgtgaccatttaaccgtgtaaatataaaatattctaggcttcttcacaaataatagggtaaaataaataatcgccataagagtggtagaaataaa

SEQ ID NO: 399883 - DNA, 1000 bp, Homo Sapiens
tataagccgcaaccggcagttctcgtacctgattgagaacatggcccgtgactgtggcgagtacgcccacactcgctacttcaggggcggcatgctgaccaacgcgcgcctcctctttggccccacggtccgcctgccggacctcatcatcttcctgcacacgctcaacaacatctttgagccacacgtggccgtgagagacgcagccaagatgaacatccccacagtgggcatcgtggacaccaactgcaacccctgcctcatcacctaccctgtacccggcaatgacgactctccgctggctgtgcacctctactgcaggctcttccagacggccatcacccgggccaaggagaagcggcagcaggttgaggctctctatcgcctgcagggccagaaggagcccggggaccaggggccagcccaccctcctggggctgacatgagccattccctgtgatgttcactctcctcccaaagcaaaccacagccaagcctgtctgagctgggagtccccttccccagccctgggtcagtggcatcctcagtcgttgttacttactcagctgatgtcacagtgcagacatccaccgttccaccacagaaccagtggctgagcggaccaacgttgccatgtgcgtttgctctgtggggaacagagcacagagggtgagcgacatgtgcagaacggccccttggctgcagttaggacctcagtggctggtatggccaagctgctagaagatgctgctgtccctgtgatcccagcagccctcccttcaccgtgacccctgacctttgtcaggaaggtgcagtttttcttctcaatctaaatgcctttcaggtgggccgcttccttggctacctggttccagggggctgttttgtaatgagatgctgctggcaggccactcagaggctcccagctgggttggtgggacagccaggccagatgacctgattccagcaaaaataaaactcagatttgggcaaaatgaaa

SEQ ID NO: 399884 - DNA, 1000 bp, Homo Sapiens; identical to SEQ ID NO: 288949

SEQ ID NO: 399885 - DNA, 1000 bp, Homo Sapiens; identical to SEQ ID NO: 288951

SEQ ID NO: 399886 - DNA, 1000 bp, Homo Sapiens; identical to SEQ ID NO: 288952

SEQ ID NO: 399887 - DNA, 1000 bp, Homo Sapiens
aatctttaaacactttcaaatatggagattaatcaccaacttcttattttttgggccagttggattcaattttttatttaacatgatttttctatatcgttactgtcgaatgctagaagaaggctctttccgaggtcggacagcagactttgtatttatgttcctttttggtggattcttaatgaccctttttggtctgtttgtgagcttagttttcttgggccaggcctttacaataatgctcgtctatgtgtggagccgaaggaacccctatgtccgcatgaacttcttcggccttctcaacttccaggccccctttctgccctgggtgctcatgggattttccttgttgttggggaactcaatcattgtggaccttttgggtattgcagttggacacatatattttttcttggaagatgtatttcccaatcaacctggtggaataagaattctgaaaacaccatctattttgaaagctatttttgatacaccagatgaggatccaaattacaatccactacctgaggaacggccaggaggcttcgcctggggtgagggccagcggcttggaggttaaagcagcagtgccaataatgagacccagctgggaaggactcggtgatacccactgggatcttttatcctttgttgcaaaagtgtggacacttttgacagcttggcagattttaactccagaagcactttatgaaatggtacactgactaatccagaagacatttccaacagtttgccagtggttcctcactacactggtactgaaagtgtaatttcttagagccaaaaaactggagaaacaaatatcctgccacctctaacaagtacatgagtacttgatttttatggtataaggcagagccttttcttcctcttcttgatagatgaggccatggtgtaaatggaagtttcagagaggacaaaataaaacggaattccatttttctctcactaaaaaaaaaaaaaaaaaaaaaaaaaaaaa

SEQ ID NO: 399888 - DNA, 1000 bp, Homo Sapiens; identical to SEQ ID NO: 288953

SEQ ID NO: 399889 - DNA, 1000 bp, Homo Sapiens
tatttgaatataattactttttgaagtaattgtgaccacaaaacatcttttttacatgaaggagctgtgtatcatttgaaattactcaaatgatgtcttgctctgaggcataaatcccaggtacttagtgtttttaataatatggtgccactgcaggatttgggggcggtggggaagaacaagcataatggtagggggaggcttggcctgaaactaaccactgagtgaattgcactgcaggttttacttaacgggaattccttatttgggatgtcaagagggcagctgcaaactgaaaaacaatccagtaaatgtactttgttttatgtattgtagcaggcaattaactactaaataatagctttgacatttgcaattgttgcatagagactatttttgctagaagatgattagctcttgcctttattttacagtgcttagtgtgataaacttctagtcatgtttcctatccaagagaccagttaatatatgtacataaaccacagaaatagtataacacactatttttaaattatcgttttcctacttaaattttgtttagcttaagacttcttaggacatttgtaaaagcaggttaaatttaataaggtttctgatttttttttgtaaccggagatagtttttacaagtgaaataacatttcagctaaataaaacatcgctaaataattgatatttgatgaaaatctgctttgtataatttctgtaaattatccttgttctgaaaaaggtgtaatgccctaatatttttaaatccttatcctttgattttttaaaaactgacctattgataaaactataaattttcattttccagtgcagttagttacctttttaaacataaatgcacaacaagcaaatgaatttaagagaactaaactggaataagtgttcataaatgaaacccttggactatttaataaagttgaaatgtgaattaaggaaaacttttgttaataaaaactttcttttaaaaaaaa

SEQ ID NO: 399890 - DNA, 1000 bp, Homo Sapiens
agctggtgtgagatgcagtgccctaagacccacactaaagaattccggaaagtagcccgagtacaacccgaattcttgcagacctaagaagccactttttaccctatggaagggggtaagctgttcctgagtataacaccaagatgctgctgtctttattcaaacacctggcgtcggccaacagccacttccagaaaaatcttccagtttacgctgtagatggaacatgtttctgtgaacctatcagtggatttcattctcttgagtaataaatcttatcttttcaaggcaccaacaaacaaaactgtgatattggaaatagcctatccctcctgacagtccttataaatacatattttttgctatgataaaacttttttactaaaaggatgttatagagtctgttgtcttaagcagagaaagacatctaaatggtgtcaggacatttcagtacttctgcttattgagtacttactgtgctaggcactgagtcaggtgctttacatacgtccccttcatttaggtacattgtgatttaatgaaaatttgaggacacgtggtgatacagatagcatgtgaggcaggcatggtggctcatgtttgtaaatcccagcactttgggaaggccgagttggttttgaactcctggcctcccaaggtgctgatagtacaggcatgaaccactgtgcttggccttttaaaattttgtagagatgcagtcttactatgttgcccaggctgtctcaaactcctggcctcaagtggtcctcctgccttggcctcccaaaatgttgcaattacaggcatgagcactgtgcttggcaagctaaggaggattttcactagcagtttcatttgacaataccaatctagaggtgagcttctcaatctttaatgtgtatccaaatcacctggggaatagatgccgattctgaaacaggtctggagtgagacctgaggttctgcatgtataacaagctcccagggggtccagctgtca

SEQ ID NO: 399891 - DNA, 783 bp, Homo Sapiens; identical to SEQ ID NO: 222558

SEQ ID NO: 399892 - DNA, 1000 bp, Homo Sapiens
gaaacttaaccagctagaccatttgagtaccagcatttagttacaaacgtcaaaggcttccggtgctgcttaccttccttttttgttaatgtgcttttatttattaaaaaaaattacaatgaagatgcctgttttgtctctactgtgtactctgatcgtatctttccaaagtgcagactcttgtgaagttttcttaaattgttcactttaaagaaaatgacgtaccaacaatgatttggcttttatattactgtaagatgttataatgttaatgtggatgtagtgcttttactttacagattgattggaataagattattgcatatgaatttacccacaggactctgaatcatgttacccactcccctcacaatgttgtccacttagtgagttgcattgatctatccgtaccaaatgatgttgaataattacatatctttcttgactatactgatttcttattttggtcactattactaaatctctgttaatattctctcttttaactgaaaagggatgggatagaagggtttgcaatgccatattattggtggagggctgttttaacatctttgaagtatggcttgctgaatatctttaccaacatcttgaatatatattctagtgtccacaagatttagcaaaaagataaagcttgggtggaatatcattttaaaatgttcatgttctgttctatattttcttcacctactctccaaatattgtaatgcaaaaagtctcagtaatgatttggtagtattaattttgtggtcattgtttctcttcgataaatttattttcattaaatacttgttagagggttttgaaatgtttttcaaatatgtgaaatgtgaaactgctgtcttttatattaaagtaattaaagaaaatgtattgtgattgaaattattttggcctccacaagatggctctatgagtattcttccagggattctaatatttatttaaggtaataaaatcttgacatttataatctttc

SEQ ID NO: 399893 - DNA, 1000 bp, Homo Sapiens; identical to SEQ ID NO: 117316

SEQ ID NO: 399894 - DNA, 1000 bp, Homo Sapiens
cttcagattaaagtaggagaaagaatgtgctgagtgttttcctccctttgcctctacctggccctcatcccaacagcccagcaaggggagagagaaagagaattcttttctatagaacgagtgggggcggggatgggtagggatttatccaatctaagccctaaccccacttagtgacctcagtgttttcttccattccttcttactgccctgtcctctgccttggaagaggctttgggaatagttcatagggaagggacaacatggaagaaacagcgatttaaattgtattgaacagggcatataaaatgcattctgtaccctgatctggcatatagcttcaaaactgcagtggcgagtgtccatctcttagttagctaccttaactgtccacccttactacctgtgggatcgttgcctggtttgtcttctctgtgtcctggagcaaagccagttcctaaaactaaaactccattctagtcttgggaagaaaagtttctactcagaactggggaaggagtggaacttatgacttgggcctctaggctgtctctgtcccctcagctccccgacatgcatttactctctgccgtgggtctgcagtcgctgcaacctaccctctctctgcctcagccttacacccaagcagtaggtctgtgctctccctgtctctaggtcgctgagagaggtgcttttcttcataaaacctttggggtttggatttccccaggaagatggagaatggaatactcactcttgggtctaatctttccccttgacccagaacttcctccccacaaaaatgcctttaaaaaccttcctgagacttaagcattctgccccacttactaactgccagttctccagcactgaggtggggcagataacggggcatatttaagggggcatctttgtgtaaaagatgcatggagtcaggagaaaaccaccttcataaactgctctgtgcaaagaggaataaaacattttttccaaactgaaa

SEQ ID NO: 399895 - DNA, 1000 bp, Homo Sapiens; identical to SEQ ID NO: 222559

SEQ ID NO: 399896 - DNA, 1000 bp, Homo Sapiens; identical to SEQ ID NO: 117317

SEQ ID NO: 399897 - DNA, 1000 bp, Homo Sapiens; identical to SEQ ID NO: 288958

SEQ ID NO: 399898 - DNA, 735 bp, Homo Sapiens
agtggttctccgcccctgccactgggccatggagactgtggcacagtagactgtagtgtgaggctcgcgggggcagtggccatggaggccgtgctgaacgagctggtgtctgtggaggacctgctgaagtttgaaaagaaatttcagtctgagaaggcagcaggctcggtgtccaagagcacgcagtttgagtacgcctggtgcctggtgcggacaaggtacaatgatgacatccgtaaaggcatcgtgctgctcgaggagctgctgcccaaagggagcaaggaggaacagcgggattacgtcttctacctggccgtggggaactaccggctcaaggaatacgagaaggccttaaagtacgtccgcgggttgctgcagacagagccccagaacaaccaggccaaggaactggagcggctcattgacaaggccatgaagaaagatggactcgtgggcatggccatcgtgggaggcatggccctgggtgtggcgggactggccggactcatcggacttgctgtgtccaagtccaaatcctgaaggagacgcgggagcccacggagaacgctccaggagggcctgtccatcctcgctgtcctttccctgttctccccctgccccccgtctctatcctctgtggccttcagctaatttctgctcccctgagattcgtccttcagccccatcatgtgctttgggatgagtgtaaataaaacggggctgtggcttgggaaa

SEQ ID NO: 399899 - DNA, 903 bp, Homo Sapiens
tagtcacgctcggtaccaggcgcagatcatggcaggcagccggctggaaaccgtagggagcatcttctctcggactcgggacctggttcgggccggggtgctgaaggagaagcccctgtggtttgacgtatatgacgcctttcccccgctgagggagcccgtcttccaaaggcctcgagtgcgatatggcaaagccaaagctcccatccaagacatctggtaccacgaggatcggattagagcgaagttttattcagtgtatgggtctggtcaaagagcttttgatctattcaatccaaacttcaagtctacctgtcaacggtttgtggagaagtacactgagctacagaaacttggagaaacagatgaagagaagttatttgtggaaacagggaaggctttattggcagaaggtgtcattttaagacgagtaggcgaagcaaggactcaacacggaggtagtcacgtttcccggaaatccgaacacttgagtgtcagaccacagactgcgttggaagaaaacgagactcagaaagaagttccacaggaccagcatttggaggcacctgcagaccagtcgaaaggtctcttgcctccctgaaggacctgtatactgtgtatgctggcattcacactctactcactggctgaatgttgagctatttttaaacagttgaactgtgtaaatgtttcttgatctctaaggtattatgtttgccttctcttagttatttctgggttgtcacaaagctcagtatcatggtttgacagaagcagttatgtgaacttttatgttaggacattactaaataaagaattccctagctgcttataaagtaaatttactttgaattgtaaataacatgaagaaacctttataaagattgttcaaatgggactcaa

SEQ ID NO: 399900 - DNA, 1000 bp, Homo Sapiens; identical to SEQ ID NO: 288961

SEQ ID NO: 399901 - DNA, 1000 bp, Homo Sapiens; identical to SEQ ID NO: 117318

SEQ ID NO: 399902 - DNA, 812 bp, Homo Sapiens; identical to SEQ ID NO: 288963

SEQ ID NO: 399903 - DNA, 1000 bp, Homo Sapiens; identical to SEQ ID NO: 117319

SEQ ID NO: 399904 - DNA, 1000 bp, Homo Sapiens
tctacagttcaaaattgagaatggatttaattaactagcatttagccagctttttcttgcccttggagaaaaagaatcattctcaacctgataatctgttaagaaaaatcccatatgaacaatctggtcattaacatacatatgatacggagtctctttgttgtcaccaagtgaacatacttctcatggtgggttggacagtaatacatgttagagggtcagaagcttctggtttctgctgtttgctttaaatacccttggggtttttttttaaacccttacaaggggagcatcagctttggaaagtgtgactctgtaggagtgtagaaggcagtggtgtatgatcttagcctcgtcctgatgcctgaatccagccagctgttgctctgacccacagcaatagagcaagttacccatcaccagcatttgtacagagcagggaattctggttttagtccattggtagcattgtgtgtatgaggagattcaacaccacagacagctgcaggactcgatatccatggcttctttccatcacaaaacgggtagaaacacattcactgcttcagggttctaatctgtgtgtctccttatgactccatttctgtaagctactctgtaactttgatatatgctgtattttctttctttaaaagatttagatgttttttcagcaagctagccatacaaccattgtatctctttctcttcagtatggtttagagcccagatcagttagtaggctttcgttgtcttctctttcaatacatgtacatctttactgtttgaaaagtgttacagctgtcaaagaatcttcatggacctgaagataatttcttgtgaagttgaatgcaagtgtactgtcattcatagtgtttatatcaaaataccaggaatcttcacttttgctaccttgatatagcattgggctatcatgttacaacattgaaatacattgatttattaaaaaatacttttataagaaaaaaaaaaaaaaaaa

SEQ ID NO: 399905 - DNA, 1000 bp, Homo Sapiens
gaaagtgttcatttacataggtaatggagacctttgcattttgatccatagaacataggaggatgttcttagtctgtctcaaagctctatatgtttacatattatttctgtagattgttttcaggagaaagttttgcttctatggtaagagtgagcactttggcttatgtataagttagaaataattgttagtttttaatatgcacttcgtggggaaatttcttagacgtatgcaagcaagtgaaaacaattagggccagtggtattaactactttataaaattttatttttgtttgtaagaagtcatctatttaaggcccagttaacataagtggaatcatcatagtttaaggaatacccagagattgctgctgttctatttattttacagaaaggatagctagattgaaagctcttcagtggaccttgagctaatagatcttttaccactaaaagagcattattctcatgtcataatgagaataataatttacatacttggcataataaatgcctaaaagacattttattttctgaatctatttttttcttgctataatggggatattgtaaattatgcatttgtattaatggtatttcttaaagcaatctatgtaactgtaaattaaaccaatctacaaactattgtaggcatctgtaaattctgttgtaggtattataaactttgttgaagtcttaatcagcagattatgttgtgaatatatttgtacattgttaaaatagtttttaagattatttgtttaattgaataagtgtcttattggagtgatagctttgaaggtgcaaaactttatatttgtataaaattctactatttacaaggcaaaaaaaaaaaaaaaaaaaaaaaaaaaaaaaagaaaaaaaaaaaaaaaaaaaaaaaaaaaaaaaaaaaaaaaaaaaaaaaaaaaaaaaaaaaaaaaaaaaaaaaaaaaaaaaaaaaaaaaaaaaaaaaaaaaaaaaaaaaaaaaaaaaaaaaaa

SEQ ID NO: 399906 - DNA, 1000 bp, Homo Sapiens; identical to SEQ ID NO: 117320

SEQ ID NO: 399907 - DNA, 1000 bp, Homo Sapiens; identical to SEQ ID NO: 117321

SEQ ID NO: 399908 - DNA, 1000 bp, Homo Sapiens; identical to SEQ ID NO: 117322

SEQ ID NO: 399909 - DNA, 1000 bp, Homo Sapiens
caactgttaaaaacccacctctgagatactggggggaggatcctgaaacatgcgggaaaaggagaggtaaacagtggaggtaaaaatataatttcatacattgtaaagaaaagcaccctttaaatgtgtaaagacagtgttttgtaaagaattttgtttaaaaagtttctattttgtaaatacagtacttaagttatatgatttatattaaaacatttattgacaaagcctaagagctaaggcagtaaaattatctcataaataatattagcttattttttttcatactattaatgctatttttttggacatcgaagagaatttaacttagcagttagttatatggatgtgtatttcttgctaaaatgacagttttatatgttatagattaaaatatgttgcaaaatatcaaaaatttgtgttatttcagcagtaagattaattgaattctcttttcacattagttatgcttaactcataaggttattataataaattatattagtaaaagtcttaactggaaaaaagaatctaaatcagaatagtgatcaatttgtggatttgatatcctggatatttattatattttatgtaatgctgcatttctatttgaatgttaagtggtctttcttgtttttaatattcatgcatgtatattcatcatattttacaaggttcctggtaaaaattacagggctctatttaaggatgtattttaatgtaaatgcttatgttttttatgaattgttaaatatttcagtattatatagaaaaaaatagatttttaaaattcagaatggacaaagagaatattcattttcttattaataagataaagaaatgtttccctgccccacagtcttcattctatttctctttaattttattcactgaggcagagaaacaatttttgaaaaagagcaaacccatggaaaatgtctcagatctaatattaaaatcaagactaagcatttaactgtgaaaaaaaaaaaaaaaaaaa

SEQ ID NO: 399910 - DNA, 1000 bp, Homo Sapiens; identical to SEQ ID NO: 288968

SEQ ID NO: 399911 - DNA, 1000 bp, Homo Sapiens; identical to SEQ ID NO: 117323

SEQ ID NO: 399912 - DNA, 1000 bp, Homo Sapiens; identical to SEQ ID NO: 222561

SEQ ID NO: 399913 - DNA, 1000 bp, Homo Sapiens; identical to SEQ ID NO: 117324

SEQ ID NO: 399914 - DNA, 1000 bp, Homo Sapiens; identical to SEQ ID NO: 222562

SEQ ID NO: 399915 - DNA, 1000 bp, Homo Sapiens; identical to SEQ ID NO: 394973

SEQ ID NO: 399916 - DNA, 1000 bp, Homo Sapiens; identical to SEQ ID NO: 117325

SEQ ID NO: 399917 - DNA, 1000 bp, Homo Sapiens; identical to SEQ ID NO: 117326

SEQ ID NO: 399918 - DNA, 1000 bp, Homo Sapiens; identical to SEQ ID NO: 117327

SEQ ID NO: 399919 - DNA, 1000 bp, Homo Sapiens; identical to SEQ ID NO: 117328

SEQ ID NO: 399920 - DNA, 1000 bp, Homo Sapiens
atcaatgacacatattcagaggtcaaggaggagctggctggacagaaggatgagctgcaactttctgacctcctgaaacagggctacaacaagaccctactaagactgcgtctgaggaaggagagggtttcggatgtgcagaaggtcctgcagggtggggagcaggagatccagtttgaggatttcaccaacaccttaagggaactgggacacgcagagcatgaaatcactgagctcacggccaccttcaccaagtttgacagagatgggaatcgtattctggatgagaaggaacaggaaaaaatgcgacaggacctggaggaagagagggtggccctcaacactgagattgagaaactaggccgatctattgtgagcagcccacaaggcaaatcgggtccagaggctgccagagcaggaggctgggtttcaggagaagaattctacatgctcacaaggagagttctgcagctggagactgtcctggaaggagtagtgtcccagattgatgctgtaggctcaaagctgaaaatgctggagaggaaggggtggctggctccctccccaggcgtgaaggaacaagctatttggaagcacccgcagccagccccagctgtgaccccagacccctggggagtccagggtgggcaggagagtgaggttccctataaaagagaagaggaagccttagaggagaggagactctcccgtggtgagattccaacgttgcagaggagttaagtgtgaggcactcccggagcaaagtctatgaaggatcttctgcaagaggctgcctcctggtccactgaacctggaaactgagtgggctttaaccaggagataaaaatggagcctgaagggaatcaggcaaggaaatgaactcaggattcagagatctttgaattaatatgtggtgggttctgacattattcttccataagaccatgtgggtttccatggtggctatcaataaaactccttaggaaaacttaaaaaaaaa

SEQ ID NO: 399921 - DNA, 1000 bp, Homo Sapiens; identical to SEQ ID NO: 117329

SEQ ID NO: 399922 - DNA, 1000 bp, Homo Sapiens; identical to SEQ ID NO: 222565

SEQ ID NO: 399923 - DNA, 1000 bp, Homo Sapiens; identical to SEQ ID NO: 222566

SEQ ID NO: 399924 - DNA, 1000 bp, Homo Sapiens; identical to SEQ ID NO: 288984

SEQ ID NO: 399925 - DNA, 1000 bp, Homo Sapiens; identical to SEQ ID NO: 117330

SEQ ID NO: 399926 - DNA, 1000 bp, Homo Sapiens; identical to SEQ ID NO: 222567

SEQ ID NO: 399927 - DNA, 1000 bp, Homo Sapiens
taacgtaactagatggagtcttgggatactgctggctttactctacctcatattaaaacttttggaattttttgggcatctgagaactttcagacaggttttacgaatattttttacacaaccaagttatggagtggctgccagcaagagacagtgttcagatgtggatgatatttgttcaatatgtcaagctgaatttcagaagccaattcttctcatctgtcagcatatattttgtgaagagtgcatgaccttatggtttaacagagagaaaacatgtccactctgcagaactgtgatttcagaccatataaacaaatggaaggatggagccacttcatcacaccttcaaatatattaagttgtataaactatcaaggccacaaaatactaatgtcatttggtcataatgactactgataaggcatcagaatggattttcagggctaccagaaaaatgtttccagatggttttagaatgtaggacttatgatccaattcaccaaaagattaaatgaaaccaccctgtgttttaaaatatatataatgttcaacctaatgtatatgcaacatttattctattctaattatttgacaggtaactgcagtgttaaattgtaaatgtgttttctttatgttaccaaaacagcaatttgaaattagaactagtggttttagagaactcaggtattctttcctgacattgttttcagaataaagaatatttttcataatattttaagatacatactatctaaaagtagaattttgttcagcattgacttttataattcccatcctaaaaattcttaatattttcataaaatttgtatttttaaatgaaaattctaaatgttgtattttatcagtaacattttctaagtgaagattaatttactgaggatgatacattatagtattgtattattctctgtagtaagattagtaataagtgaaaataaatgatttaaattcaaaaaaaaaaaaaaaaaaaaaaaaa

SEQ ID NO: 399928 - DNA, 1000 bp, Homo Sapiens; identical to SEQ ID NO: 117332

SEQ ID NO: 399929 - DNA, 1000 bp, Homo Sapiens
tgagctctcttacaagacaatagtccacgaaagtgaaagactagaggccttaaaacatgctttgcactgtacgatcttagcatcagcagggcagcagcgttctcggatgctagctactctttttaaggatgaaaggtgccagcaacttgctgcctatgggatcctagagaaaatgtatctagataggatcatcagaggaaatcaacttcaagaatttgctgccatgctgatgcctcaccaaaaagcaactacagctgatggttccagcatcttggacagagctgttattgaacacaatttgttgtctgcaagcaaattatataataatattaccttcgaagaacttggagctcttttagagatccctgcagctaaggcggaaaagatagcatctcaaatgataaccgaaggacgtatgaatggatttattgaccagattgatggaatagttcattttgaaacacgagaagccctgccaacgtgggataagcagatccaatcactttgtttccaagtgaataaccttttggagaaaattagtcaaacagcaccagaatggacagcacaagccatggaagcccagatggctcagtgaatccttgcagaacttctgtgcacatgacatctttttccatgttgtgcagatcagtttcactatctccaaagcatttgcatcatgaccttatacatttcaatcccttttatgctggattccgtttaaagaagacattattagagcaggaagtacaagcatttaaaatatgtagttcccatatatttcagggtctctgtgtattaagctaactcagatgttttgaaagctttttctttaaacagaggtgaaatatctgtggctaaaaagtttgagatttgtgataactttgtagtcatgtaaaacttaagtgcttcatgcctctccaaatgtggttattctaataaatggagaaatgagccaaataaaagtagtactttgtttttagttaaaaaaaaaaaaaaaaaa

SEQ ID NO: 399930 - DNA, 1000 bp, Homo Sapiens
cttgtattaccatgagtttggaaaaaggacaacgaaaggcttttcatgtaaagataagatctttggctatctctaaccctgtccttttttcactgcattttttctagttttgcttcattgcttatcattaggatagggtaagtgaagtttgctatgctgctagcatcctaagatgatacctttgttgaaagaattgtgaatagcatgattcatttctagcagaggctgagtttaggactgcagcttccattgagaagtctttctgtgtcgtgaatagcattttaatgacctcttggctcacataagcaaacaacatagggacgtatctgctatgaaaatccacaaatttttcagatagtgccctaaaaacaattttatatgcctcactggttgttattcttaggttattcccacacttgactttatcattgtttactactagtaaaaagcagcattgccaaataatccctaattttccactaaaaatataatgaaatgatgttaagctttttgaaaagtttaggttaaacctactgttgttagattaatgtatttgttgcttccctttatctggaatgtggcattagcttttttattttaaccctctttaattcttattcaattccatgacttaaggttggagagctaaacactgggatttttggataacagactgacagttttgcataattataatcggcattgtacatagaaaggatatggctaccttttgttaaatctgcactttctaaatatcaaaaaagggaaatgaagtataaatcaatttttgtataatctgtttgaaacatgagttttatttgcttaatattagggctttgccccttttctgtaagtctcttgggatcctgtgtagaagctgttctcattaaacaccaaacagttaagtccattctctggtactagctacaaattcggtttcatattctacttaacaatttaaataaactgaaatatttccaaaaaaaaaaaaaaaaaaaac

SEQ ID NO: 399931 - DNA, 1000 bp, Homo Sapiens; identical to SEQ ID NO: 117333

SEQ ID NO: 399932 - DNA, 1000 bp, Homo Sapiens
cagctaaagatgggggcaaagacctacccagatactgattccttcaacactgtagcagagatcactgggagcaaatatccagaacaggttgtactggtcagtggacatctggacagctgggatgttgggcagggtgccatggatgatggcggtggagcctttatatcatgggaagcactctcacttattaaagatcttgggctgcgtccaaagaggactctgcggctggtgctctggactgcagaagaacaaggtggagttggtgccttccagtattatcagttacacaaggtaaatatttccaactacagtctggtgatggagtctgacgcaggaaccttcttacccactgggctgcaattcactggcagtgaaaaggccagggccatcatggaggaggttatgagcctgctgcagcccctcaatatcactcaggtcctgagccatggagaagggacagacatcaacttttggatccaagctggagtgcctggagccagtctacttgatgacttatacaagtatttcttcttccatcactcccacggagacaccatgactgtcatggatccaaagcagatgaatgttgctgctgctgtttgggctgttgtttcttatgttgttgcagacatggaagaaatgctgcctaggtcctagaaacagtaagaaagaaacgttttcatgcttctggccaggaatcctgggtctgcaactttggaaaactcctcttcacataacaatttcatccaattcatcttcaaagcacaactctatttcatgctttctgttattatctttcttgatactttccaaattctctgattctagaaaaaggaatcattctcccctccctcccaccacatagaatcaacatatggtagggattacagtgggggcatttctttatatcacctcttaaaaacattgtttccactttaaaagtaaacacttaataaatttttggaagaacaaaaaaaaaaaaaaaaaaaaaaaaaaaaaa

SEQ ID NO: 399933 - DNA, 1000 bp, Homo Sapiens; identical to SEQ ID NO: 288991

SEQ ID NO: 399934 - DNA, 1000 bp, Homo Sapiens; identical to SEQ ID NO: 117335

SEQ ID NO: 399935 - DNA, 1000 bp, Homo Sapiens; identical to SEQ ID NO: 288993

SEQ ID NO: 399936 - DNA, 1000 bp, Homo Sapiens; identical to SEQ ID NO: 117336

SEQ ID NO: 399937 - DNA, 870 bp, Homo Sapiens; identical to SEQ ID NO: 117337

SEQ ID NO: 399938 - DNA, 1000 bp, Homo Sapiens; identical to SEQ ID NO: 117338

SEQ ID NO: 399939 - DNA, 1000 bp, Homo Sapiens; identical to SEQ ID NO: 288997

SEQ ID NO: 399940 - DNA, 1000 bp, Homo Sapiens; identical to SEQ ID NO: 222568

SEQ ID NO: 399941 - DNA, 1000 bp, Homo Sapiens; identical to SEQ ID NO: 222569

SEQ ID NO: 399942 - DNA, 1000 bp, Homo Sapiens
gtagagtgatcaatcaaaaactctttgaaaaggagattctcaaaagggacgtcgcacacaaagtgtttgccacaacttcgataaagagcttcttccgccagctaaacttgtatggcttccgaaaacggcgtcaatgcactttcaggaccttcacccgcattttctccgcaaaaaggctggtctccatcttgaataagttagagttctactgccatccttactttcaaagagactcccctcacctcctcgtgaggatgaagagaagagtgggtgtcaagtctgcaccaagacatcaggaggaggacaagccagaagctgctggatcctgtctggcaccagcagacactgagcaacaagatcacacgtctccgaatgagaatgaccaggtcacaccgcaacaccgggaaccggccggtcccaacacccaaatcaggagtggctctgctccaccagcaactcctgtgatggtgcctgattccgccgtggcgagtgacaacagtccagtgacccagccggccggcgagtggtcagagggcagccaggctcacgtcactccggtggccgctgtccctgggcctgcagcgctgcccttcctctatgtccctggatctcccactcagatgaattcttacgggcctgtggtggcccttcccacagcgtcccgtagtacccttgccatggacaccacaggacttcctgcacctggcatgctgcccttttgccatctctgggtaccggtgaccctagtggctgctggggctgcacagcctgctgcctccatggtcatgttcccccatctcccagctctgcaccaccattgcccccacagccaccgcacgtcacagtacatgccagctagcgatgggccccaggcgtacccagactacgcagaccagagcacatagagggcagcatttgggcagaatatgtgctggtcaataaatgtgtcagaaaatgagtaattttctgactgcccaaaaaaaaaaaaaaaaaaaaaaaa

SEQ ID NO: 399943 - DNA, 1000 bp, Homo Sapiens; identical to SEQ ID NO: 117340

SEQ ID NO: 399944 - DNA, 1000 bp, Homo Sapiens; identical to SEQ ID NO: 289003

SEQ ID NO: 399945 - DNA, 1000 bp, Homo Sapiens; identical to SEQ ID NO: 117341

SEQ ID NO: 399946 - DNA, 1000 bp, Homo Sapiens
aaaaccggacccctccgaagcggaagaagccgcgcacgtccttctcccgctcacaggtgctggagttggagcggcgcttcctgcgccagaagtacctggcctctgcggagagggcggcgctggccaaggccttgcgcatgaccgacgcacaggtcaaaacgtggttccagaaccgacgcaccaagtggcggcgccagacggcggaggagcgcgaggccgagcggcaccgcgcgggccggctgctcctgcatctgcagcaggacgcgttgccacggccgctgcggccgccgctgcccccggaccctctctgcctgcacaactcgtcgctcttcgcgctgcagaacctgcagccctgggccgaggacaacaaagtggcttcagtgtccgggctcgcctcggtggtgtgagcgacgcccgtccgatcggcgtggagcgccgggcccggagcggtggagcgcgcggctgcctgcgtccatggtctagtggcagccgggcgcgtgaggagcggcaggccttgaggctgtcgtcgagggctcctccaccaccggccggctcccaagccagcgttgcgcagatgcacggccagctcagaggcggcctttcccgccatttttcacttcactgccgttacgccctcgctggaacctgaggcgccgagagggcgggacctgcaggacagtagccaatgaggtgcggggagggggccgggctggccaatgggagctgctttcctgagggactcgaaattctccggcgggtggtcgggagctggggctctgaggggctctagcggcgttgcgcgcggtgccggctgggtctgtaccaaaggtgtgaaggaaagaagacaccgaccacggcgaagcaatagagggggtgctggagcgcgagaggctggctgattgtgaccgaaaccagagggttgtccaccccgggcatctcatccctcaactgtaaaataatcgctaaggattccttcctgacaaaaaaaaaaaaaaaaaaa

SEQ ID NO: 399947 - DNA, 1000 bp, Homo Sapiens; identical to SEQ ID NO: 222572

SEQ ID NO: 399948 - DNA, 1000 bp, Homo Sapiens; identical to SEQ ID NO: 222573

SEQ ID NO: 399949 - DNA, 887 bp, Homo Sapiens; identical to SEQ ID NO: 289008

SEQ ID NO: 399950 - DNA, 1000 bp, Homo Sapiens
aggaactaaagcaagacatttctagtttccgctttgaagtcctgggattactaagaggaagcaaactttccacaatacaatctgcgaatgcctcgaaggagtcttcaaattcggcagactcagatgaaaagagtgatagcgaaggtaatagcaaggacaagaaaaagaatttcagcctttttgatttaaccaccctgattcatccgagatcagcagcaattgcctctgaaagacataacataagcaatggctctgccctggtggttcaggagccgcccagggagaagcagagaaaagtgaattttgtgaccgatatcaaaaactttgggttatttcatagacgatcaaaacaaaatgctgctgagcaaaatgcaaaccaaatcttctctgtttcagaagaagttgctcgtcaacaggctgcaggaccacttgagagaaatattcaactggaatctcgaggattagcttcacggggtgacctgagcattcccggtctcagtgaacaatgtgtgttagtagaccatagagaaaggaatacggacacactggggttacaggtaggaaagagagtgtgtccattcaagtcagagaaggtggtggtggaggacacggttcctataataccaaaggagaaacatgcaaaagaagaggactctagtatagactatgatctaaacctcccagacacagtcacccacgaagattacgtgaccacaagattgtgatacttgaaggaggaagcgtttaccatacacatacgtattttccgtagtgctctgggtgggggaaaatgtttaaattgtattagcaaatgctaacttacactttatagcatttatcagctgtggcatattacctgtaacatgtttaaattaaggcaaaggcaatcaaaaacctttttgttttgtagcctgcttttgctttcacaatttgtcttacaattgtttttgttaataaataaatgcaccttgaaaaaaaaaaaaaaaaaaaaaaaaaaaaa

SEQ ID NO: 399951 - DNA, 1000 bp, Homo Sapiens; identical to SEQ ID NO: 289009

SEQ ID NO: 399952 - DNA, 1000 bp, Homo Sapiens; identical to SEQ ID NO: 222574

SEQ ID NO: 399953 - DNA, 1000 bp, Homo Sapiens; identical to SEQ ID NO: 289010

SEQ ID NO: 399954 - DNA, 1000 bp, Homo Sapiens; identical to SEQ ID NO: 289011

SEQ ID NO: 399955 - DNA, 1000 bp, Homo Sapiens; identical to SEQ ID NO: 289012

SEQ ID NO: 399956 - DNA, 1000 bp, Homo Sapiens; identical to SEQ ID NO: 222575

SEQ ID NO: 399957 - DNA, 1000 bp, Homo Sapiens; identical to SEQ ID NO: 117343

SEQ ID NO: 399958 - DNA, 489 bp, Homo Sapiens
cgcgacaagatggcggataaggagaagaagaaaaaggagagcatcttggacttgtccaagtacatcgacaagacgatccgggtaaagttccagggaggccgcgaagccagtggaatcctgaagggcttcgacccactcctcaaccttgtgctggacggcaccattgagtacatgcgagaccctgacgaccagtacaagctcacggaggacacccggcagctgggcctcgtggtgtgccggggcacgtccgtggtgctaatctgcccgcaggacggcatggaggccatccccaaccccttcatccagcagcaggacgcctagcctggccgggggcgcggggggtgcagggcaggcccgagcagctcggtttcccgcggacttggctgctgctcccaccgcagtaccgcctcctggaacggaagcatttctcctttttgtataggttgaatttttgttttcttaataaaattgcaaacctcaaaaaaaaaa

SEQ ID NO: 399959 - DNA, 1000 bp, Homo Sapiens; identical to SEQ ID NO: 117344

SEQ ID NO: 399960 - DNA, 1000 bp, Homo Sapiens; identical to SEQ ID NO: 289015

SEQ ID NO: 399961 - DNA, 1000 bp, Homo Sapiens; identical to SEQ ID NO: 117345

SEQ ID NO: 399962 - DNA, 1000 bp, Homo Sapiens
atgtaaaccagaacattctatgtactacaaacctggtttttaaaaaggaactatgttgctatgaattaaacttgtgtcgtgctgataggacagactggatttttcatatttcttattaaaatttctgccatttagaagaagagaactacattcatggtttggaagagataaacctgaaaagaagagtggccttatcttcactttatcgataagtcagtttatttgtttcattgtgtacatttttatattctccttttgacattataactgttggcttttctaatcttgttaaatatatctatttttaccaaaggtatttaatattcttttttatgacaacttagatcaactatttttagcttggtaaatttttctaaacacaattgttatagccagaggaacaaagatgatataaaatattgttgctctgacaaaaatacatgtatttcattctcgtatggtgctagagttagattaatctgcattttaaaaaactgaattggaatagaattggtaagttgcaaagactttttgaaaataattaaattatcatatcttccattcctgttattggagatgaaaataaaaagcaacttatgaaagtagacattcagatccagccattactaacctattccttttttggggaaatctgagcctagctcagaaaaacataaagcaccttgaaaaagacttggcagcttcctgataaagcgtgctgtgctgtgcagtaggaacacatcctatttattgtgatgttgtggttttattatcttaaactctgttccatacacttgtataaatacatggatatttttatgtacagaagtatgtctcttaaccagttcacttattgtactctggcaatttaaaagaaaatcagtaaaatattttgcttgtaaaatgcttaatatcgtgcctaggttatgtggtgactatttgaatcaaaaatgtattgaatcatcaaataaaagaatgtggctattttggggagaaaatt

SEQ ID NO: 399963 - DNA, 1000 bp, Homo Sapiens; identical to SEQ ID NO: 222580

SEQ ID NO: 399964 - DNA, 1000 bp, Homo Sapiens; identical to SEQ ID NO: 289020

SEQ ID NO: 399965 - DNA, 1000 bp, Homo Sapiens; identical to SEQ ID NO: 117346

SEQ ID NO: 399966 - DNA, 1000 bp, Homo Sapiens; identical to SEQ ID NO: 289021

SEQ ID NO: 399967 - DNA, 1000 bp, Homo Sapiens; identical to SEQ ID NO: 222581

SEQ ID NO: 399968 - DNA, 1000 bp, Homo Sapiens; identical to SEQ ID NO: 289023

SEQ ID NO: 399969 - DNA, 1000 bp, Homo Sapiens; identical to SEQ ID NO: 289024

SEQ ID NO: 399970 - DNA, 1000 bp, Homo Sapiens; identical to SEQ ID NO: 222582

SEQ ID NO: 399971 - DNA, 1000 bp, Homo Sapiens; identical to SEQ ID NO: 289026

SEQ ID NO: 399972 - DNA, 1000 bp, Homo Sapiens; identical to SEQ ID NO: 117348

SEQ ID NO: 399973 - DNA, 1000 bp, Homo Sapiens; identical to SEQ ID NO: 117349

SEQ ID NO: 399974 - DNA, 1000 bp, Homo Sapiens; identical to SEQ ID NO: 289029

SEQ ID NO: 399975 - DNA, 1000 bp, Homo Sapiens
acaccggtgcaacagtttgccagctaaattcaaaaaactcctggtgccaggaaaaattcagcacattctctgcacaggaaacctttgcaccaaagagagttatgactatctcaagactctggctggtgatgttcatattgtgagaggagacttcgatgagaatctgaattatccagaacagaaagttgtgactgttggacagttcaaaattggtctgatccatggacatcaagttattccatggggagatatggccagcttagccctgttgcagaggcaatttgatgtggacattcttatctcgggacacacacacaaatttgaagcatttgagcatgaaaataaattctacattaatccaggttctgccactggggcatataatgccttggaaacaaacattattccatcatttgtgttgatggatatccaggcttctacagtggtcacctatgtgtatcagctaattggagatgatgtgaaagtagaacgaatcgaatacaaaaaaccttaaagccaggcctgtcttgatgatttttggttttttttcattgtcctgttgaaatcaagtaattaaacatttaagagccacaaaattgtatcacttttataatattttgcagtaaaatataataccatcttctctgttaatacataattgctccaagcttcctgtaaactataagaatatatttagtttacagtatatggattctatgaaaaaatgtccacaacacagtaattggtcacttgttaagaaaaatttatccttgtaagtatcttcaaagttgatatttggaactttattccaaaagtagtgcatgtggagaaagaatctagactttcttgtatacatttttctcttctccagtaataaacaattacctttcatttatactttgataacctgtatttaatttaaaaaaaaacataaaaatgaggaaccaagtgaaactacggatataaatattaaagtggacgagatgacctttcaaaaaaa

SEQ ID NO: 399976 - DNA, 1000 bp, Homo Sapiens; identical to SEQ ID NO: 289030

SEQ ID NO: 399977 - DNA, 1000 bp, Homo Sapiens; identical to SEQ ID NO: 222583

SEQ ID NO: 399978 - DNA, 1000 bp, Homo Sapiens; identical to SEQ ID NO: 222584

SEQ ID NO: 399979 - DNA, 1000 bp, Homo Sapiens; identical to SEQ ID NO: 289034

SEQ ID NO: 399980 - DNA, 1000 bp, Homo Sapiens; identical to SEQ ID NO: 289035

SEQ ID NO: 399981 - DNA, 1000 bp, Homo Sapiens
gcgagataacgtggacctattgggaagcttggcagatctgtacttcagagctggagacaataaaaactctgtcctcaagtttgaacaggcacagatgttggatctttatctgataaaaggaatggatgtatatggctacctactggcacgagaagggcggctagaggatgttgagaaccttggatgccgccttttcaatatctctgatcagcatgcagaaccgtgggtggtttctggctgtcacagcttctatagcaaacgctactcccgggccctctatttaggagccaaggccattcagctgaacagtaatagtgttcaagctctgctacttaagggagcagcacttaggaacatgggcagagtccaagaagcaataatccactttcgggaggccatacggctcgcaccttgtcgcttagattgttatgaaggtcttatcgaatgttacttagcctccaacagtattcgagaagcaatggtaatggctaacaacgtttacaaaactctgggagcaaatgcacagacccttacccttttagccaccgtttgtcttgaagacccagtgacacaggagaaagccaaaacattattagataaagccctgacccaaaggccagattacattaaggctgtggtgaaaaaagcagaactacttagcagagaacagaaatatgaagatggaattgctttgctgaggaacgcactggctaatcagagtgactgtgtcctgcatcggatcctaggagatttccttgtagctgtcaatgagtatcaggaggcaatggaccagtatagtatagcactaagtttggaccccaatgaccagaagtctctagaggggatgcagaagatggagaaggaggagagtcccacggatgccactcaggaggaggatgtggacgacatggaagggagtggggaagaaggggacctggagggcagcgacagtgaggcggcccagtgggctgaccaggagcagtggttcggcatgcagtga

SEQ ID NO: 399982 - DNA, 1000 bp, Homo Sapiens; identical to SEQ ID NO: 289036

SEQ ID NO: 399983 - DNA, 1000 bp, Homo Sapiens; identical to SEQ ID NO: 222586

SEQ ID NO: 399984 - DNA, 1000 bp, Homo Sapiens; identical to SEQ ID NO: 117350

SEQ ID NO: 399985 - DNA, 1000 bp, Homo Sapiens; identical to SEQ ID NO: 222588

SEQ ID NO: 399986 - DNA, 1000 bp, Homo Sapiens; identical to SEQ ID NO: 289040

SEQ ID NO: 399987 - DNA, 1000 bp, Homo Sapiens; identical to SEQ ID NO: 289041

SEQ ID NO: 399988 - DNA, 1000 bp, Homo Sapiens; identical to SEQ ID NO: 117352

SEQ ID NO: 399989 - DNA, 1000 bp, Homo Sapiens; identical to SEQ ID NO: 289043

SEQ ID NO: 399990 - DNA, 1000 bp, Homo Sapiens; identical to SEQ ID NO: 222590

SEQ ID NO: 399991 - DNA, 1000 bp, Homo Sapiens; identical to SEQ ID NO: 222591

SEQ ID NO: 399992 - DNA, 1000 bp, Homo Sapiens
tcaaagctttggatactaccaaggctcctaagggctctctgaaggacatctacaaggtcttcaatggagaaggagaacagattagggccttcaagtgtgagcactgccgagtccttttcctagaccatgtcatgtacaccattcacatgggttgccatggctaccgggacccactggaatgcaacatctgtggctacagaagccaggaccgttatgagttttcatcacacattgttcgaggggagcacacattccactaggccttttcattccaaaggggacccctatgaagtaaagaactgcacatgaagaaataccgcacttacaatcccacctttcctcaaatgttgacataccttttattttttttaatattattactgttgataattcttattttgtggaggcagtgtcatttgctctgcctaattacgataaggaagaaacagaagagagaaggggcgggaatattgtttctttatcacctggcttgtttattttgtgggaatttaagagcagtccatttctaccaaggcatatcatgctttgaaaaatcacttgattcataaagattcacctaagagattctgatttgccactgatattcagaattatgatggaagacaggaaagtttagagttttctgggcaggactttggtggtttaaaaatggtataagtaactttattcttgaaagaagaatgtgtttcaaactgtaaaccaattttttgttcttcagagatcatggaacacaaacacattgttattttcagtgataactcctaagaggagctgagttgttgtgggttctatgtttacttcccctatggaatttataattcagtatgttttacactgtaccatatagcaaaacttttaaactacaggtagttaagggccacctacaatacatctgaggtcctgtgatcttatttttctaaacgtaagcactgtttttccatagttttgatgactggcattttatagacaccctggcagc

SEQ ID NO: 399993 - DNA, 1000 bp, Homo Sapiens; identical to SEQ ID NO: 289044

SEQ ID NO: 399994 - DNA, 1000 bp, Homo Sapiens; identical to SEQ ID NO: 117353

SEQ ID NO: 399995 - DNA, 1000 bp, Homo Sapiens; identical to SEQ ID NO: 222592

SEQ ID NO: 399996 - DNA, 1000 bp, Homo Sapiens; identical to SEQ ID NO: 289047

SEQ ID NO: 399997 - DNA, 1000 bp, Homo Sapiens; identical to SEQ ID NO: 222593

SEQ ID NO: 399998 - DNA, 1000 bp, Homo Sapiens; identical to SEQ ID NO: 222594

SEQ ID NO: 399999 - DNA, 1000 bp, Homo Sapiens
caaaataaagcataaaaaggttttttaaaaggaaatgtaaaagcacatgagaatgctagcaggctgtggggcagctgagcagcttttctccccccatatctgcgtgcacttcccagagcatcttgcatccaaacctgtaacctttcggcaaggacggtaacttggctgcatttgcctgtcatgcgcaactggagccagcaaccagctatccatcagcaccccagtggaggagttcatggaagagttccctctttgtttctgcttcatttttctttcttttcttttctcctaaagcttttatttaacagtgcaaaaggatcgtttttttttgcttttttaaacttgaatttttttaatttacactttttagttttaattttcttgtatattttgctagctatgagcttttaaataaaattgaaagttctggaaaagtttgaaataatgacataaaaagaagccttctttttctgagacagcttgtctggtaagtggcttctctgtgaattgcctgtaacacatagtggcttctccgcccttgtaaggtgttcagtagagctaaataaatgtaatagccaaaccccactctgttggtagcaattggcagccctatttcagtttattttttcttctgttttcttcttttctttttttaaacagtaaaccttaacagatgcgttcagcagactggtttgcagtgaattttcatttctttccttatcacccccttgttgtaaaaagcccagcacttgaattgttattactttaaatgttctgtatttgtatctgtttttattagccaattagtgggattttatgccagttgttaaaatgagcattgatgtacccattttttaaaaaagcaagcacagcctttgcccaaaactgtcatcctaacgtttgtcattccagtttgagttaatgtgctgagcatttttttaaaagaagctttgtaataaaacatttttaaaaattgtcatttaaaaaaaaaaaaaaaaaa

SEQ ID NO: 400000 - DNA, 1000 bp, Homo Sapiens; identical to SEQ ID NO: 117354

SEQ ID NO: 400001 - DNA, 1000 bp, Homo Sapiens; identical to SEQ ID NO: 222595

SEQ ID NO: 400002 - DNA, 1000 bp, Homo Sapiens
cagaagagaaggaatcgtggatcaatgccctcaactctgccatcacccgagccaagaaccgtatcttggatgaggtcaccgttgaggaggacagctatcttgcccatcccactcgagacagggcaaaaatccagcactcccgccgccccccaacaaggggacacctaatggctgtggcttccacctctacctcggatgggatgctgaccttggacttgatccaagaggaagacccttcccctgaggaaccaacctcttgtgctgagagctttcgggttgacctggacaagtctgtggcccagctggcagggagccggcggagagcggactcagaccgcatccagccctccgcagaccgggcaagcagtctctcccgaccttgggaaaaaacagacaaaggggccacctacaccccccaggcacccaagaagttgacgcccacagagaaaggccgctgcgcctccctggaggagatcctatctcagcgggatgctgcctctgcccgcaccctccagctgcgggctgaggaacccccaacccctgccctccccaacccggggcagctgtcccggatccaggacctggtagcaaggaaactggaggagactcaggagcttctggcagaggttcagggactgggagatgggaagcgaaaggccaaggacccccctcggtctccgccggattctgagtcagagcagctgctgctggagacggaacggctgctgggagaggcatcatcgaattggagccaggcaaagagggtgctgcaggaggtcagggagctgagagacctgtacagacagatggacctgcagaccccggactcccacctcagacagaccaccccgcacagtcagtaccggaagagcctgatgtgagggcagggtggggtctggaacttgtcgggttggacagactcttatctccgtgttgctggataaagcttttttatttacctcaatcaaaaaaagaaaacaaaaatgaaaaaaaaaaaaaa

SEQ ID NO: 400003 - DNA, 1000 bp, Homo Sapiens; identical to SEQ ID NO: 117355

SEQ ID NO: 400004 - DNA, 1000 bp, Homo Sapiens
ccgctacagatccccggaggccggacagtggccgcctgtgacctcctgcaaagccttctccacaaggaccagaggcagcggctgggctccaaagcagactttcttgagattaagaaccatgtattcttcagccccataaactgggatgacctgtaccacaagaggctaactccacccttcaacccaaatgtgacaggacctgctgacttgaagcattttgacccagagttcacccaggaagctgtgtccaagtccattggctgtacccctgacactgtggccagcagctctggggcctcaagtgcattcctgggattttcttatgcgccagaggatgatgacatcttggattgctagaagagaaggacctgtgaaactactgaggccagctggtattagtaaggaattaccttcagctgctaggaagagcgactcaaactaacaatggcttcaacgagaagcaggtttattttttccagcacataaaagaaaaataatgtttcggagtccaggactggcaggacaggtcatcagatactcagaggctgtatctctgccctgccaaccttgacaaatggcttccaatgttaggtttgctacaagatggttactggagctctagctgcctattttgtgtttagggaagggaaaatggaggaaaggggagaagagcaaagggcgcttttaaagagctttcccaaaagctccacccaatgacttctgcttccatctcactaaccacccacccctacctggaatggaggctgggagatgtggcttatttgctgggtacgtgactatccctaataacaaaggggttctgacactaagacattaggggagaatgttgggtaggcagccagcactcttttaccagagggcctcctggtgtttggattttgatctcaatgtgtaaaatgacagagatgtaacaagctcatagggtatcaatatctcttattgttctatgttgaaaaaaaaaaaaaaaaaaaaaaaaaaa

SEQ ID NO: 400005 - DNA, 1000 bp, Homo Sapiens; identical to SEQ ID NO: 224577

SEQ ID NO: 400006 - DNA, 1000 bp, Homo Sapiens
tgaagaggcaaagaaaaaaggaacctctgataatttcaaaagacgatgtccgggacaacattgtgacctacaacgatgaaggcggcggggaagaagatacccaagcttttgacattggcacattaaggaatccagaggcaagagaagacagtaaacttagacgggatgtaatgcctgaaactatttttcagataaggaggactgtgcctctgtgggaaaatattgatgtacaagattttatccatcgaagattaaaagaaaacgacgcagacccaagtgcacctccatatgattcgctggcaacgtatgcctatgaagggaatgattccatagcagattcgctcagttctttggaatctctcacagctgattgtaaccaagattatgattacctcagtgactgggggcctcgtttcaaaaaacttgccgatatgtatgggggtgatgatagtgaccgagactaagaggattgtttgacttaatcaatattagtggaagtactgtctatgttattagattgagtggcctgcattctcttcctgggaggaaatctttcaaaaattgaagttacaaacaatacgtagatgttgtcaagtagggatttgcttaatcagtaagtctttgtgaatgaatacgaatgatacagatttttaaaaaagtaataaccagttcaccctctttgcctaacaatctcggaaggaaaatatatcacatcaataatcaataaaaataagtaaaaggctttttgtgccttttcttaggtataataatttataaatgttttcttaactgactttcagtcacctttacaattaaactaaatattgtgcaaccgctttgtaaattaatatgaagaagatatatccctaatgaaataggaatgactattactgccatatttatttagttgaagaatgtctttgtgttaattcattcatatttttataaatgtatatttatatttttgtatttttatgaaataaactagtatttataaaac

SEQ ID NO: 400007 - DNA, 1000 bp, Homo Sapiens; identical to SEQ ID NO: 289051

SEQ ID NO: 400008 - DNA, 1000 bp, Homo Sapiens; identical to SEQ ID NO: 222596

SEQ ID NO: 400009 - DNA, 1000 bp, Homo Sapiens; identical to SEQ ID NO: 117356

SEQ ID NO: 400010 - DNA, 1000 bp, Homo Sapiens; identical to SEQ ID NO: 289059

SEQ ID NO: 400011 - DNA, 1000 bp, Homo Sapiens; identical to SEQ ID NO: 289060

SEQ ID NO: 400012 - DNA, 1000 bp, Homo Sapiens; identical to SEQ ID NO: 117357

SEQ ID NO: 400013 - DNA, 1000 bp, Homo Sapiens; identical to SEQ ID NO: 117358

SEQ ID NO: 400014 - DNA, 1000 bp, Homo Sapiens; identical to SEQ ID NO: 289064

SEQ ID NO: 400015 - DNA, 817 bp, Homo Sapiens; identical to SEQ ID NO: 30220

SEQ ID NO: 400016 - DNA, 1000 bp, Homo Sapiens; identical to SEQ ID NO: 289065

SEQ ID NO: 400017 - DNA, 548 bp, Homo Sapiens; identical to SEQ ID NO: 30221

SEQ ID NO: 400018 - DNA, 1000 bp, Homo Sapiens; identical to SEQ ID NO: 222601

SEQ ID NO: 400019 - DNA, 1000 bp, Homo Sapiens; identical to SEQ ID NO: 117360

SEQ ID NO: 400020 - DNA, 1000 bp, Homo Sapiens; identical to SEQ ID NO: 222602

SEQ ID NO: 400021 - DNA, 1000 bp, Homo Sapiens
gcttcgtctgcggcatcatctccaccctgggttttgtatacctgaccccattcctggagtcccggctgcacatccaggacacatgtggcattaacaatctgcatggcattcctggcatcataggcggcatcgtgggtgctgtgacagcggcctccgccagccttgaagtctatggaaaagaagggcttgtccattcctttgactttcaaggtttcaacggggactggaccgcaagaacacagggaaagttccagatttatggtctcttggtgaccctggccatggccctgatgggtggcatcattgtggggctcattttgagattaccattctggggacaaccttcagatgagaactgctttgaggatgcggtctactgggagatgcctgaagggaacagcactgtctacatccctgaggaccccaccttcaagccctcaggaccctcagtaccctcagtacccatggtgtccccactacccatggcttcctcggtacccttggtaccctaggctcccagggcaggtgaggagcaggctccacagactctcctggggcccagaggagctggtgctgacctagctagggatgcaagagtgagcaagcagcacccccacctgctggcttggcctcaaggtgcctccacccctgccctccccttcatcccagggggtctgcctgagaatggagaaggagaagctacaaagtgggcatccaagccgggttctggctgcagaagttctgcctctgcctggggtcttggccacattggagaaaaacaggctcaaagtggggctgggacctggtgggtgaacctgagctctcccaggagacaacttagctgccagtcaccacctatgaggctcttctaccccgtgcctgcacctcggccagcatctcctatgctccctgggtcccccagacctctctgtgttgtgtgcgtggcagcctccaggaataaacattcttgttgtcctttgtaaaaaaaaaaaaaaaaaaa

SEQ ID NO: 400022 - DNA, 1000 bp, Homo Sapiens; identical to SEQ ID NO: 117361

SEQ ID NO: 400023 - DNA, 1000 bp, Homo Sapiens; identical to SEQ ID NO: 222603

SEQ ID NO: 400024 - DNA, 1000 bp, Homo Sapiens; identical to SEQ ID NO: 289069

SEQ ID NO: 400025 - DNA, 1000 bp, Homo Sapiens; identical to SEQ ID NO: 222604

SEQ ID NO: 400026 - DNA, 1000 bp, Homo Sapiens; identical to SEQ ID NO: 222605

SEQ ID NO: 400027 - DNA, 1000 bp, Homo Sapiens; identical to SEQ ID NO: 117364

SEQ ID NO: 400028 - DNA, 1000 bp, Homo Sapiens; identical to SEQ ID NO: 289074

SEQ ID NO: 400029 - DNA, 1000 bp, Homo Sapiens; identical to SEQ ID NO: 289075

SEQ ID NO: 400030 - DNA, 1000 bp, Homo Sapiens
gcagtgggctcgggtagagcagtatcaggagctagggttgtctgctgcccacactcctgctttttgggatatctaactgctaaggagggagttgacatcccccttctggctcatgtgtctgacaccaacaacatggtctccgtccctctctcttagactctccctttgtcctccccatagagctggggtggggtggatccctatactggggcaggcagccccaaagtgggggagggggatggcagagactgtaaaggcgccactggactctggcaaggcctttattacctttactccctccctctcccatcaccagcctcaaggcctgaggggtgcaggggctcctggcagctactgggtgaggtttcctggcacagactcacccttctttctggcaccactctttcccttttgaagagacagcaacagccgtagcaaaagcagctgctgctcctgctatgagggtgtatatattttttacccaaagctctggaattgtacatttattttttaaaactcaaagagggaaagagccttgtatcatatgtgaacattgtatcataggtaatgttgtacagacccttttatacagtgatctgtcttgttcctgcagcaaaaatcctctatggacataggaggtgctgtgtcccatgccttcttgccctgacagtgtcccatgggcccccttctgctccctgccccctccctgctactgctgatgcactgtcctctccctgcagcccctggcttcccagccttcctcctgaccccttccaacagccttggaactccagctgccaccaccctctgggtcggacactgggacccactggcccagtcttggctgctgcttacccctagccttgatgcctgcccagggacccccagccccctcccgttgccctgcagctttaacagagtgaaccatgtgtattgtacaggcgcggttgtcattgcagaaaccgctgggtggagaagaagccgataaagtctatgaatc

SEQ ID NO: 400031 - DNA, 1000 bp, Homo Sapiens; identical to SEQ ID NO: 289076

SEQ ID NO: 400032 - DNA, 1000 bp, Homo Sapiens; identical to SEQ ID NO: 222606

SEQ ID NO: 400033 - DNA, 1000 bp, Homo Sapiens; identical to SEQ ID NO: 289078

SEQ ID NO: 400034 - DNA, 1000 bp, Homo Sapiens; identical to SEQ ID NO: 117367

SEQ ID NO: 400035 - DNA, 1000 bp, Homo Sapiens; identical to SEQ ID NO: 222608

SEQ ID NO: 400036 - DNA, 1000 bp, Homo Sapiens; identical to SEQ ID NO: 222609

SEQ ID NO: 400037 - DNA, 1000 bp, Homo Sapiens; identical to SEQ ID NO: 289082

SEQ ID NO: 400038 - DNA, 1000 bp, Homo Sapiens
acgcagggtgccctgcagccacggagacgaatgtggacggccagaaggtgtaccgagactgtagctgtatccctcagaatctttcctctggttttggccatgccactgcagggaaatgcacttcaacttgtcagagaaagcccctccttctggttttcatattcgttgtaattttctttacattcctcagcagcattcctgcactaacggcaactctacgatgtgtccgtgaccctcagagatcctttgccctgggaatccagtggattgtagttagaatactagggggcatcccggggcccatcgccttcggctgggtgatcgacaaggcctgtctgctgtggcaggaccagtgtggccagcagggctcctgcttggtgtaccagaattcggccatgagccgctacatactcatcatggggctcctgtacaaggtgctgggcgtcctcttctttgccatagcctgcttcttatacaagcccctgtcggagtcttcagatggcctggaaacttgtctgcccagccagtcctcagcccctgacagtgccacagatagccagctccagagcagcgtctgaccaccgcccgcgcccacccggccacggcgggcactcagcatttcctgatgacagaacagtgccgttgggtgatgcaatcacacgggaacttctatttgacctgcaaccttctacttaacctgtggtttaaagtcggctgtgacctcctgtccccagagctgtacggccctgcagtgggtgggaggaacttgcataaatatatatttatggacacacagtttgcatcagaacgtgtttatagaatgtgttttatacccgatcgtgtgtggtgtgcgtgaggacaaactccgcaggggctgtgaatcccactgggagggcggtgggcctgcagcctgaggaaggcttgtgtgtcctcagttaaaactgtgcatatcgaaatatattttgttatttaagcctgcgaaaaaaaaaaaaaaaaaaaa

SEQ ID NO: 400039 - DNA, 1000 bp, Homo Sapiens
cgaaattgaaacaaaatgtaaaattaaagaattcacaagaaaccattccaaatagtgatgaaggcattttcaaagctggagcagagaggtctgaaacacggggggcagcagaagtccaagaagatgaagatactcaggttgaggttccagtcgatcagaggccagcagaaatagtagacgaggaagaagatggagagaaggcaaacaaggatgcagaacagaaagaagacttttcaggaatgaatggtgaccttgaagaggaaggaggtagggaggctacagatgcccctgagcaagtcgaggagattctggatcacagtgagcagcaggcacgccctgctcgtgtaaatggaggcaccgatgaggagaatggtgaggagctgcagcaggttaataatgagcttcaactggtcctagacaaggaaagaaagtctcaaggagctggcagtggacaagatgaggctgatgtagaccctcaaagaccaccaaggccagaagtaaaaattaccagtccagaagaaaatgaaaacaaccaacaaaacaaggactatgctgccgtggcttagaagatttttaaaaagagagtatatggatcgcaagaaaaatgaagggttatcatacttgaaagataagcacatagttattgctgaatataatgtgacactatggtcgaatactacctacgaattataacattagaagcctagtggaaagaccagataactttaaatggctactaaaggataattacttacttttattgcatgtgttttaaaagtcatatagaaatattaaataagacggacagaggagaatttgcactggaagacaattgccacttgtaaaggatgaaaaataggatcactcttattgtacgctttattataagtttagaaggcagtttattctaaataatttttctctaggaaggcgtagaattttaaagaactggtaataggaaagcatgtactattttcttaaagcaataaactcttgaatg

SEQ ID NO: 400040 - DNA, 1000 bp, Homo Sapiens; identical to SEQ ID NO: 289083

SEQ ID NO: 400041 - DNA, 1000 bp, Homo Sapiens
agccgcgcatctggtccctggcccacacagccaccgccgccgccgccgccgccacctccctgagccagactgagtttccgtcgtgcatgctcaagcgccaaggtcccgcggcccctgcggctgtgtcctccgcgcccgccacgtccccgtctgtggcccttccccactctggcgccctggacaggcaccaggactccccggtaaccagtctcagaaactgggtggacggggtcttccacgaccccatcctcaggcacagcactttgaaccaggcctgggccaccgccaagggcgccctcctggaccccgggcctctgggacgctcgctgggggcgggcgcgaacgtgctgactgcacccctggcccgcgcctttccgcctgccgtgccccaggacgccccagctgcaggcgccgccagggagctgctcgccctgcccaaggccggcggcaaacccttctgcgcctgaggcgggcgggtcccgagcccaggagggaacccgcgctcaggcggacggcgccgactcttttcactgagtttccagaggaagactagcgcggccaccgcgaagccgccaacccaccggagagggggcttctgaacttggactcctgggaacatggacaagcccggcgctgccacgccggggcctccaccgcctgggcctgagcctgaccgggccattcccaaatttgggacgcggaaggagaggctctcggagcagaagaggccagataccctgaagcataaagtttaacgtcaaaagtttaacatggagaaggcggttccgttctgaagcgtggtctgctgtcccctgggcgtgaggcctcctgggcctgtcgggcctccgatttcatcctcagacgtaatgctcaccaacagcacttgcactgagttgactcttgcacactcgactccataatatgatgctttttaagatgtatgttcacaccaataattgcctgcttcagaggctaatataacaaaaccaataaaaccgag

SEQ ID NO: 400042 - DNA, 1000 bp, Homo Sapiens; identical to SEQ ID NO: 117368

SEQ ID NO: 400043 - DNA, 518 bp, Homo Sapiens; identical to SEQ ID NO: 117370

SEQ ID NO: 400044 - DNA, 1000 bp, Homo Sapiens; identical to SEQ ID NO: 289087

SEQ ID NO: 400045 - DNA, 986 bp, Homo Sapiens
aggcagcagcatccgccgaggcccacccgggccacccccggggttccaggcctggcatggttcagggcccatggggaactgtgccaagcggccctggcgccggggccctaaggaccccttgcagtggctcggctccccaccaaggggctcctgccccagccccagctccagccccaaggagcagggggaccccgcgccaggcgtccagggctactcggtgctcaacagcctggtggggcctgcctgcatcttcctgcggcccagcattgccgccacccaactcgaccgggagctgcggcccgaggagattgaagagctgcaggtcgccttccaggagtttgaccgagaccaggacggctacattggctgccgggagctgggtgcctgcatgcggaccctgggctacatgcccaccgagatggagctcatcgagatctcacagcaaatcagtggcggaaaggtggactttgaagacttcgtggagctgatgggccccaagctgctggcagagacggcagacatgatcggtgtccgggagctacgggacgccttccgggagttcgacaccaatggggacggccgcatcagcgtgggcgagctccgggcggccctcaaggccctgctgggggagcgcctcagccagcgggaggtggacgagatcctccaggacgtggacctcaatggggacggtctggtcgacttcgaagagtttgtgcgaatgatgtctcggtgagcctgtacagaagctggaggcagcataaaggactcaaggaccacagcctctgcccaccagcatgttccttgaagcccatcgcctctagcggggaccctccttttctccccatcccacctgtgtgcagtgcccttgcctgccttacccccaccaccactttttcaataaagccgcctggccttgtctctgtcaaaaaaaaaaaaaaaaaaaaaaaaaaaaaaaaaaaaaaaaaaaaaaaaaaaaaaaaaaaaaa

SEQ ID NO: 400046 - DNA, 1000 bp, Homo Sapiens; identical to SEQ ID NO: 289088

SEQ ID NO: 400047 - DNA, 1000 bp, Homo Sapiens; identical to SEQ ID NO: 115249

SEQ ID NO: 400048 - DNA, 1000 bp, Homo Sapiens
ctgcttcttcttcctggtctactctctggtggtcatccttcccaagaccccgctgaaggagcgcatctccctgccttctcggaggagcttctacgtgtatgcgggcatcctggcactgctcaacctactgcaggggctggggagtgtgctgctgtgcttcgacatcatcgaggggctctgctgtgtagatgccacaaccttcctgtacttcagcttcttcgctccgctcatctacgtggctttcctccggggcttcttcggctcggagcccaagatcctcttctcctacaaatgccaagtggacgagacagaggagccagatgtacacctaccccagccctacgctgtggcccggcgggagggcctggaggctgcaggggctgctggggcctcagctgccagctactcgagcacgcagttcgactctgccggcggggtggcctacctggatgacatcgcttccatgccctgccacactggcagcatcaacagcacagacagcgagcgctggaaggccatcaatgcctgagggcagctgccagggcctgtggaggacaggccagagaggaggccagcaggcccagagtccccaggggaggaggaccaggtcaagggacgttctgtgggcagtagccctgtgtggccctgttcccaccatgagtctggaggccccacctccctggggctcccaatcccctttgccatctctgctctcactggggaccctcctccccttcccacctgctctcatactgctcagtgacatggcccaggctttccttccagggccatgcttggcaaggttggctgagggcaccctccttctctgcacccttggcacgagggcagggctggctctcccaatgcctccatcccatccccatggtgctttggcctcctcaaagcatccaccatggtggatggactgaagtgtgtatattttcttgatctattttttaataaaaaggaaaaggagcaaaaaaaaaaaaaaaaagttttg

SEQ ID NO: 400049 - DNA, 1000 bp, Homo Sapiens; identical to SEQ ID NO: 118183

SEQ ID NO: 400050 - DNA, 1000 bp, Homo Sapiens; identical to SEQ ID NO: 117371

SEQ ID NO: 400051 - DNA, 1000 bp, Homo Sapiens; identical to SEQ ID NO: 289090

SEQ ID NO: 400052 - DNA, 1000 bp, Homo Sapiens; identical to SEQ ID NO: 117372

SEQ ID NO: 400053 - DNA, 1000 bp, Homo Sapiens
gatcagacatgaatgggtggaggggttaggttgttcacaaaaggccacattccaagtatttgtaatctagaaagtgttatgtaagtgatgttattagcatcgagattccctccacctgattttcaagctgtcacttgtttccttttctcccctctctgggttgactgcatttctagactctcgccggcccaggcccatcttccaaagcaagaggaaggaatgataatggtgactcaggggaagaagaaacagccctcctctgaaagcctggactgtccggctgtgaactggctggcaggttctgcacgtgggtgggggccagggcctgggctttactcaattgcagagaaaaaactttctccctgcatctcatacctttacctctggccagttggccaccagggggagtgggctgaagggagagtagatggtgcaaagcaagcccatctctaagtagaaaaatcacccagagcacatgctgacctgataactggggtgttgagaccagctttgtccatggtatgatgtttgatttatgaagacgcattgttagaaatccatttggcttcttcatagaagtggcttcccagaggaagaggcctctcagaaaccatgttctatttaagttctgagtcctgatgagtgttccccaggatgcacattgaagggagggctcaggcagctgagggctgagaatgaggcagttggaatctagacactatgctgggttccctgagtcgtcaggccagacatttcaacaaggctgtggggagcagggctgtgactctggctgagcccaggaaagcgacaagggtgaactgggagaggacttactcagagaccccaacaggtgatactgcacaaagcctggttcttcaattttcctaccctgtatctaacataggagtttcatataaaacggtgatatcatgcagatgcagtctgaattccttgcctgaattaaatttatgtatcctctccaaaaaaaaaaaaaaaaaaa

SEQ ID NO: 400054 - DNA, 1000 bp, Homo Sapiens; identical to SEQ ID NO: 117373

SEQ ID NO: 400055 - DNA, 1000 bp, Homo Sapiens; identical to SEQ ID NO: 116627

SEQ ID NO: 400056 - DNA, 1000 bp, Homo Sapiens; identical to SEQ ID NO: 117375

SEQ ID NO: 400057 - DNA, 1000 bp, Homo Sapiens; identical to SEQ ID NO: 289096

SEQ ID NO: 400058 - DNA, 1000 bp, Homo Sapiens; identical to SEQ ID NO: 222614

SEQ ID NO: 400059 - DNA, 1000 bp, Homo Sapiens
aaggagaaagagattcctattgaaggactggagttcatgggccatggcaaagaaaagcctgaaaattcttcttgaccttgacagtcaccttgaaggatttcgcaagtccagaaattgaggactctggatttttgtcaactaactctgtgaacatagccatcagatttgatgaggaacttaggagagaggagttttatttcctccttcgatgttttcctctcagttgtaaaagatgaactctttgagatgatttctcacctgctgtggtatcttgcaggaactgtgtgctaaaattgaacaatttttttgagattatggttgcaatacttggcgtggaatcagctttacataaatataccttgtatgcaaacgatgataaactagtcaggatgagcagagctgcctgacctcttgatttctgctgcaaaagacatatacactgtactggggtcactatttatgaaagcaattggttaggacctctttttttcctctcagggaactaatgctctgaaaagggatctgggcacaacagtttcagtgagtgcttttgagcacacttttatttttatatagtaactaatggttaagattgatggtggcctggattagcaaagaggaagacagcttttaacacagttccctgccttcacaagaggtgtcagattaagatgtgaaagctgcaagaatgttgcagtgaacaccatttcagagctctcagtgtgcagttcaggaattaagatacttggaatagctgtggaggaagaacctaaattgcaaagatctgctattgccagctctcaacccaagtcagtgaattgtcaacctgcatatcctaaaaatgtcaaaatgctgcatctggttaaatgtcggggtaggggggaagctgaaggtgctcgcttcatttgccttgtttactcatcctgccctgtaatgtctgtaatcctgaagatggaataaattgtaacatttagtttctatcattaaaaaaaaaaaaaaa

SEQ ID NO: 400060 - DNA, 1000 bp, Homo Sapiens; identical to SEQ ID NO: 289099

SEQ ID NO: 400061 - DNA, 1000 bp, Homo Sapiens; identical to SEQ ID NO: 289100

SEQ ID NO: 400062 - DNA, 612 bp, Homo Sapiens; identical to SEQ ID NO: 23369

SEQ ID NO: 400063 - DNA, 1000 bp, Homo Sapiens; identical to SEQ ID NO: 289101

SEQ ID NO: 400064 - DNA, 1000 bp, Homo Sapiens; identical to SEQ ID NO: 117380

SEQ ID NO: 400065 - DNA, 1000 bp, Homo Sapiens
taccaccaactataaaaccaagcaaggaggacttcgttttgctcatcttctggatcaggtctccagagtagatcctgaaatgaggatccgttttacctctccccaccccaaggattttcctgatgaggttctgcagctgattcatgagagagataacatctgtaaacagatccacctgccagcccagagtggaagcagccgtgtgttggaggccatgcggaggggatattcaagagaagcttatgtggagttagttcaccatattagagaatctattccaggtgtgagcctcagcagcgatttcattgctggcttttgtggtgagacggaggaagatcacgtccagacagtctctttgctccgggaagttcagtacaacatgggcttcctctttgcctacagcatgagacagaagacacgggcatatcataggctgaaggatgatgtcccggaagaggtaaaattaaggcgtttggaggaactcatcactatcttccgagaagaagcaacaaaagccaatcagacctctgtgggctgtacccagttggtgctagtggaagggctcagtaaacgctctgccactgacctgtgtggcaggaatgatggaaaccttaaggtgatcttccctgatgcagagatggaggatgtcaataaccctgggctcagggtcagagcccagcctggggactatgtgctggtgaagatcacctcagccagttctcagacacttaggggacatgttctctgcaggaccactctgagggactcttctgcatattgctgacctgagaggatggcctcagagctgacttgggcaatcctccccaacaggaaggggagacattgcctgccactgaggaaacaggtcatgaaggtggagataagctgcaaggggcgaagcaactttatgtcagtggaaaacgtgtctctttaaagctgctatgtgaacagcttttacagtcattaaatttacctaaactaaggttaaaaaaaaaaaaaa

SEQ ID NO: 400066 - DNA, 1000 bp, Homo Sapiens; identical to SEQ ID NO: 289102

SEQ ID NO: 400067 - DNA, 1000 bp, Homo Sapiens; identical to SEQ ID NO: 117381

SEQ ID NO: 400068 - DNA, 1000 bp, Homo Sapiens; identical to SEQ ID NO: 117382

SEQ ID NO: 400069 - DNA, 1000 bp, Homo Sapiens
agtcactcactggctgatacatttaaagcagcagtgtgaatagcaaggacagacaccttcaatttgtgaaatcaaagaactgatgcactatatagaacgaatttgggtttttaaagaaatattaaaagttaggtactgtaagtgttcttaaaacctgtaaacttcattctgtgggctagtggtgtgggacaaaatattcctaatgaaaggaagtaccaattagttgatttgttggtggcattccccttttgggaaagcaatgtaaggttatgtctgtgtatgtcattcacacttaggcaagcatacacaggcacatggctttaagaaccacactgatgccttgataattaaaaagaatacaagcattccatgtacacatgttaattagcagttagtgactgggccaacactttctcataaaaattggccttttacatgttgtctaattatcatttttccccaaattttgcgttgtaggactactgttcgaagatttttggaagaatactgagaacggcataaagtgaagatcgacatttaaaaaatgaggtgaaagaaagctatagtggcatagaaaaagtataaagctcagttagtttttttattattattattattaaaagttaattcaggactgatgtgacctaccagatttcagaacatgtgttaatagtatatatgccactgaaaacttaggtcctgtatcatacttttttctttaagactttttaagaaatattacttaaacatgtggcttgctcagtgtttaattgcaagttttcaatcttggactttgaaaacaggattaaacgttagtattcgtgtgaatcagactaagtgggatttcatttttacaactctgctctacttagcctttggatttagaagtaaaaataaagtatctctgactttctgttacaaagttgattgtctctgtcattgaaaagttttagtattaatctttttctaataaagttattgactctgaaaaaaaaaaaaa

SEQ ID NO: 400070 - DNA, 1000 bp, Homo Sapiens; identical to SEQ ID NO: 117383

SEQ ID NO: 400071 - DNA, 1000 bp, Homo Sapiens; identical to SEQ ID NO: 117384

SEQ ID NO: 400072 - DNA, 875 bp, Homo Sapiens; identical to SEQ ID NO: 289107

SEQ ID NO: 400073 - DNA, 1000 bp, Homo Sapiens; identical to SEQ ID NO: 117386

SEQ ID NO: 400074 - DNA, 1000 bp, Homo Sapiens; identical to SEQ ID NO: 222618

SEQ ID NO: 400075 - DNA, 1000 bp, Homo Sapiens; identical to SEQ ID NO: 289110

SEQ ID NO: 400076 - DNA, 654 bp, Homo Sapiens; identical to SEQ ID NO: 289111

SEQ ID NO: 400077 - DNA, 1000 bp, Homo Sapiens; identical to SEQ ID NO: 117387

SEQ ID NO: 400078 - DNA, 1000 bp, Homo Sapiens; identical to SEQ ID NO: 222620

SEQ ID NO: 400079 - DNA, 1000 bp, Homo Sapiens; identical to SEQ ID NO: 117388

SEQ ID NO: 400080 - DNA, 1000 bp, Homo Sapiens; identical to SEQ ID NO: 117389

SEQ ID NO: 400081 - DNA, 1000 bp, Homo Sapiens; identical to SEQ ID NO: 289114

SEQ ID NO: 400082 - DNA, 1000 bp, Homo Sapiens
aagtagcaaaaaaaagaaaaagatgatgtatctcacaaccagaaatgcagaatttgatcgtcatgaaatccagatatatgaggaggtagccaaaatgcctcccttccagagaaaaacattagtattgataggagctcaaggtgtaggccgaagaagcttgaaaaacaggttcatagtattgaatcccactagatttggaactacggtgccatttacttcacggaaaccaagggaagatgaaaaagatggccaggcatataagtttgtgtcacgatctgagatggaagcagatattaaagctggaaagtatttggaacatggggaatatgaaggaaatctctatggaaccaaaattgattctattcttgaggttgtccaaactggacggacttgcattctggatgtcaacccacaagcactgaaagtattgaggacatcagagtttatgccctatgtggtatttattgcggctccggagctagagacgttacgtgccatgcacaaggctgtggtggatgcaggaatcactaccaagcttctgaccgactctgacttgaagaaaacagtggatgaaagtgcacggattcagagagcatacaaccactattttgatttgatcatcataaatgataatctagacaaagcctttgaaaaactgcaaactgccatagagaaactgagaatggaaccacagtgggtcccaatcagctgggtttactgatgattcagtaaggttaacaatgaaaattaaactcttaaaaagtgactgcaacaaataaaccttctactgagaaaatacatcacagatagaagattatctgctaagtccaggcatttttatggtgtagattgaaataatagtacacttctgaatttttatataaaatgtggttggaaggtgtactaatatataatttatcttaatttttctaactttgtatggataatctttctattcatatcacataaagaaatgcgttgaagcaaaaaaaaaaaaaaa

SEQ ID NO: 400083 - DNA, 1000 bp, Homo Sapiens; identical to SEQ ID NO: 117390

SEQ ID NO: 400084 - DNA, 1000 bp, Homo Sapiens; identical to SEQ ID NO: 117391

SEQ ID NO: 400085 - DNA, 1000 bp, Homo Sapiens; identical to SEQ ID NO: 117393

SEQ ID NO: 400086 - DNA, 1000 bp, Homo Sapiens; identical to SEQ ID NO: 222622

SEQ ID NO: 400087 - DNA, 1000 bp, Homo Sapiens; identical to SEQ ID NO: 222623

SEQ ID NO: 400088 - DNA, 1000 bp, Homo Sapiens; identical to SEQ ID NO: 289117

SEQ ID NO: 400089 - DNA, 1000 bp, Homo Sapiens; identical to SEQ ID NO: 289118

SEQ ID NO: 400090 - DNA, 852 bp, Homo Sapiens; identical to SEQ ID NO: 117395

SEQ ID NO: 400091 - DNA, 1000 bp, Homo Sapiens; identical to SEQ ID NO: 222624

SEQ ID NO: 400092 - DNA, 710 bp, Homo Sapiens
ggtactcgtcttggtgagagcgtgagctgctgagatttgggagtctgcgctaggcccgcttggagttctgagccgatggaagagttcactcatgtttgcacccgcggtgatgcgtgcttttcgcaagaacaagactctcggctatggagtccccatgttgttgctgattgttggaggttcttttggtcttcgtgagttttctcaaatccgatatgatgctgtgaagagtaaaatggatcctgagcttgaaaaaaaactgaaagagaataaaatatctttagagtcggaatatgagaaaatcaaagactccaagtttgatgactggaagaatattcgaggacccaggccttgggaagatcctgacctcctccaaggaagaaatccagaaagccttaagactaagacaacttgactctgctgattcttttttcctttttttttttttaaataaaaatactattaactgggacttcctaatatatacttctatcaagtggaaaggaaattccaggcccatggaaacttggatatgggtaatttgatgacaaataatcttcactaaaggtcatgtacaggtttttatacttcccagctattccatctgtggatgaaagtaaacaatgttggccacgtatattttacacctcgaaataaaaaatgtgaatactgctccaaaaaaaaaaaaagtggcgagctttccctaggggggt

SEQ ID NO: 400093 - DNA, 1000 bp, Homo Sapiens
aaaacagggactgaaatagttctgtattccgtgtttgcaacagccagccaactaagcagaggataaaccgttagcaaatgaatgtaataattactcatttccaagatatctaagcacataagcaaatacaggaacagacttcattctttttcttaacaaaaaagcatcttcagtgtgtgatttaaaagaaagaagattctggtttcctagaaaacaatattttggcctgtgttgattcttattctgaatgtgtgtttacataatgtacagtatatattcagaaagtatttttgcttcaacgtttactttctatgatgtagtgctttggtattcctacagcaccccaccttccccaacagatgtacagtgttctgtctccattcgaaatctacaatgtaatatgagtgcattgtatgggtttgaaaccaaaggatgaatgaagcattcagagacttaatatttgaaaaaggaatagtcagtattttatattttattacaggtactgatatttataaatttaataaactgtaccatgctgctgcatgttttcaagtacatgttgaacagtaaggattggggagttgttttttaatggtcacctaaagcagctgctatagaaatgttgaactaaaattttgcatctggtcataccttcatgcatttatcatttgcagatatttttccatcattattaaaaaacaggaacttttaggctctgaagatcatgtggaccagagcaaattaaagttcagtttgtgtcacaattcattgccagacttcattggaatgctttgtttgatgatgtatgttcattctcagctttattttcagatgcttaactgggcaatgaagtctaacttcaggttgaactttctcatgtttaatctcaggctaaatgtaaatgatatttgtaaagtttgaataaaattctgtttactcattttgagttagtatgaaaaaaaaaaaaaaaaaaaaaaaaaaaaaaaaaaaaaaaaaaaaa

SEQ ID NO: 400094 - DNA, 1000 bp, Homo Sapiens; identical to SEQ ID NO: 222625

SEQ ID NO: 400095 - DNA, 1000 bp, Homo Sapiens; identical to SEQ ID NO: 289121

SEQ ID NO: 400096 - DNA, 1000 bp, Homo Sapiens; identical to SEQ ID NO: 117396

SEQ ID NO: 400097 - DNA, 1000 bp, Homo Sapiens; identical to SEQ ID NO: 289123

SEQ ID NO: 400098 - DNA, 1000 bp, Homo Sapiens; identical to SEQ ID NO: 222626

SEQ ID NO: 400099 - DNA, 1000 bp, Homo Sapiens; identical to SEQ ID NO: 117397

SEQ ID NO: 400100 - DNA, 1000 bp, Homo Sapiens; identical to SEQ ID NO: 289126

SEQ ID NO: 400101 - DNA, 1000 bp, Homo Sapiens; identical to SEQ ID NO: 117398

SEQ ID NO: 400102 - DNA, 1000 bp, Homo Sapiens; identical to SEQ ID NO: 117399

SEQ ID NO: 400103 - DNA, 923 bp, Homo Sapiens
agcctggaggctgcagtccgcgcggccggggagggacgagagggcctgacgtacagattataagcgccatggctatggctagtgttaaattgcttgccggtgttttaagaaagccagatgcctggattggactctggggtgttctccgagggacaccttcatcatacaaactctgtacttcctggaatcgatacttgtatttttctagtaccaagttacgtgcaccaaattataaaacacttttttataatattttctcactgagactcccagggcttttactatctccagaatgtatttttcctttttccgtaagactcaaaagtaatataaggtctacaaaatctactaaaaagtctctgcaaaaagtagatgaagaggactctgatgaagaaagccatcatgatgagatgagtgagcaggaagaggagcttgaggatgatcctactgtagtcaaaaactataaagacctggaaaaagcagttcagtcttttcggtatgatgttgtcctgaagacggggctagatattgggagaaacaaagtggaagatgctttctacaaaggtgaactcaggctgaatgaggaaaaattatggaagaaaagcagaacggtgaaagtgggagatacattggatcttctcattggagaggataaagaagcaggaacagagacagttatgcggattctcttgaaaaaagtgtttgaagagaagactgaaagtgaaaaatacagagtggtgttacggcggtggaaaagtttaaagttgcctaagaagagaatgtctaaataaatggattgctttttagcaatagagctgctttctagtggtaaaggaaggggtcacctgaaaaataggacatttttattaaaataaagttctcttagcgtttgtggaaaaaaaaaaaaaaaaaccaaaaaaaaa

SEQ ID NO: 400104 - DNA, 1000 bp, Homo Sapiens; identical to SEQ ID NO: 289128

SEQ ID NO: 400105 - DNA, 1000 bp, Homo Sapiens; identical to SEQ ID NO: 289132

SEQ ID NO: 400106 - DNA, 676 bp, Homo Sapiens; identical to SEQ ID NO: 117401

SEQ ID NO: 400107 - DNA, 649 bp, Homo Sapiens
gccggaacaaaaatgcctcagtttggaggtcgcgctcactgcgacggcaggctttgagtgtagcacttggtagttcttcctctgctctgcttcccttcggaggaaaatttcaggctgaaggtttagcgggtgccgcctctaaagagagcaatcactacacttatggctgggattttgcgcttagtagttcaatggcccccaggcagactacagactgtgacaaaaggtgtggagtctcttatttgtacagattggattcgtcacaaattcaccagatcaagaattccagaaaaagtgtttcaggcctcacctgaagatcatgaaaaatacggtggggatccacagaaccctcataaactgcatattgttaccagaataaaaagtacaagaagacgtccatattgggaaaaagatataataaagatgcttggattagaaaaagcacatacccctcaagttcacaagaatatcccttcagtgaatgcaaaattgaaagtagttaagcatttgataaggtttgttgtttcttctcagctctttttaaaatgtattgcctagtgtaattctaaatgcatttttcttttttcgttaatgttctgaaaaaaactttttaaaaaactaaaaaaaaaaaaaaaaaaaaaaaaaaaaa

SEQ ID NO: 400108 - DNA, 728 bp, Homo Sapiens
ttttcgagaccggaagtgagtgatcgaaagcatggcgtcggtggtgttggcgctgaggacccggacagccgttacatccttgctaagccccactccggctacagctcttgctgtcagatacgcatccaagaagtcgggtggtagctccaaaaacctcggtggaaagtcatcaggcagacgccaaggcattaagaaaatggaaggtcactatgttcatgctgggaacatcattgcaacacagcgccatttccgctggcacccaggtgcccatgtgggtgttgggaagaataaatgtctgtatgccctggaagaggggatagtccgctacactaaggaggtctacgtgcctcatcccagaaacacggaggctgtggatctgatcaccaggctgcccaagggtgctgtgctctacaagacttttgtccacgtggttcctgccaagcctgagggcaccttcaaactggtagctatgctttgatgtcctgttgaggccatcggacagagactggagcccaggtgacaggagatggtgataccagaagtcaagggttggggtggcgacacggcctcccgaggaagaggtctgcttgatggtgactctgcaggagactctgaagtgactgctgggaaaccctttgggagacctgacctggggccaaaaataaagtgagccagcgtcatgaacgcatgctatttagggacaaaaaaaaaaaaaaaaaaaaaaaaaa

SEQ ID NO: 400109 - DNA, 1000 bp, Homo Sapiens; identical to SEQ ID NO: 117402

SEQ ID NO: 400110 - DNA, 1000 bp, Homo Sapiens; identical to SEQ ID NO: 222627

SEQ ID NO: 400111 - DNA, 1000 bp, Homo Sapiens; identical to SEQ ID NO: 289134

SEQ ID NO: 400112 - DNA, 1000 bp, Homo Sapiens; identical to SEQ ID NO: 289135

SEQ ID NO: 400113 - DNA, 1000 bp, Homo Sapiens; identical to SEQ ID NO: 222629

SEQ ID NO: 400114 - DNA, 1000 bp, Homo Sapiens; identical to SEQ ID NO: 222630

SEQ ID NO: 400115 - DNA, 1000 bp, Homo Sapiens; identical to SEQ ID NO: 117404

SEQ ID NO: 400116 - DNA, 1000 bp, Homo Sapiens
ccagtggctgccaccaaaggccctgagaacgaagaaggaggtgcacaaggctcccctatgccggaggccaacccagacaatctagaaaacccagctttccttacagagctagaacctgctccccacgcagggctccttgctctccctaaggatgacattcccggcctgccaaggagcccttcagggaagatgaagggactccccagcgtcaccccagcagctgctgacccactgatgacccctgaattagctgatgtttataggacctacgatgctgacatgaccacatccgtggatttccaggaagaagcaaccatggataccacgatggccccaaactctctgcaaacatccatgccaggaaacaaagcccaggagcccgagatgatgcatgacgcatggcatttccaagagccctgacagctctaagatattagctactttctgtatgcacaagcttcccagctttgtccccacagtgtacctttttgctaaaacacttattacccttctgcagcaaaggcattaaaagcgctaagcatatattaataaatgcaagtggctagaaatagtgtaggtccccttcttgctttcaatatcttgttgaaataaaatgtgtcaattgtctctgtgatttagaaacactattaataacatcagagcaaggttctaagggtctcagcatttgatcatcactttttcttagctgtcttaagcattatagaatttctcttaccagcatgacactattatattcaggaaacatggcactgcttttttctctaagcaaaggcaaatatcctcataattctaagctaattcatttaaactttattaaatggggattggtggaaaactcctgactggtattactgggtttggtataatttaatttaaaattctcatttatagagtattttatttaatctagtataaaaaatctagcctattttaaataaagaatttttctcactgaaaaaaaaaaaaaaaaaaaaaaaaa

SEQ ID NO: 400117 - DNA, 1000 bp, Homo Sapiens; identical to SEQ ID NO: 117405

SEQ ID NO: 400118 - DNA, 1000 bp, Homo Sapiens; identical to SEQ ID NO: 117407

SEQ ID NO: 400119 - DNA, 1000 bp, Homo Sapiens; identical to SEQ ID NO: 289143

SEQ ID NO: 400120 - DNA, 1000 bp, Homo Sapiens
gggcagctccctgcagcagggcgtcccgcatgggtatgctttttctcaagaagaacacggagctgttagtcaggaagaagtcatccgtgcttatgacaccaccaaaaagaaatccaggaagaaataagacatgaattttcctgactgatcttaggaaagagattcagtttgttgcacccagtgttaacacatctttgtcagagaagactggcgtcagcagccaaaacaccaggaaacacatttctgtggccttagccaagcagtttgttagttacatattccctcgcaaacctggagtgcagaccacaggggaagctatctttgccctcccaactcgtctgcagtgcttagcctaacttttgtttatgtcgttatgaagcattcaactgtgctctgtgaggtgtgaaattaaaaacattatgtttcaccaatatttaaacatcagtactagttgtcctgggagaaagggaaaggagttttatgttgcgtgagaggcccatcctgtgtaattggagcagggcacacttgcttcctgttgagttaactcagaggttaagtccaacgggccacatgcagacttcactgtaggcaggttgctctcctgctttgattcctgttttgtgtgtaaaattggcataaacttcttgattgcagtgaaatcacaaaattctctatcggggtggtcaacctgagaacatttatttgaacctcttagccacatttccagcagggcaaaccaactgatgccctggaagagtcttccgcaccctctccaggtgcactcggcccagtcctgccgccgtgtccaggcgcccctcacccccacacctgctgcatggctggccacaccactcagtgcatggcggccgatgggcagccaacccaaacccgcgcctttccttgttccactgcagactcagatacagatgcgaaaaattccttcttccaccgcccttctcgttctgtaaagaaagaaaagaaacatagcctttctgcatat

SEQ ID NO: 400121 - DNA, 1000 bp, Homo Sapiens; identical to SEQ ID NO: 222632

SEQ ID NO: 400122 - DNA, 1000 bp, Homo Sapiens; identical to SEQ ID NO: 117408

SEQ ID NO: 400123 - DNA, 1000 bp, Homo Sapiens; identical to SEQ ID NO: 289147

SEQ ID NO: 400124 - DNA, 1000 bp, Homo Sapiens; identical to SEQ ID NO: 117409

SEQ ID NO: 400125 - DNA, 1000 bp, Homo Sapiens; identical to SEQ ID NO: 222635

SEQ ID NO: 400126 - DNA, 1000 bp, Homo Sapiens; identical to SEQ ID NO: 222636

SEQ ID NO: 400127 - DNA, 1000 bp, Homo Sapiens; identical to SEQ ID NO: 289151

SEQ ID NO: 400128 - DNA, 1000 bp, Homo Sapiens; identical to SEQ ID NO: 289152

SEQ ID NO: 400129 - DNA, 1000 bp, Homo Sapiens; identical to SEQ ID NO: 289153

SEQ ID NO: 400130 - DNA, 1000 bp, Homo Sapiens; identical to SEQ ID NO: 117411

SEQ ID NO: 400131 - DNA, 1000 bp, Homo Sapiens
catcgtggccttctgagcccttggcccccctgcggggaggaggtggagcagcgggcgtccccgaagtgagggccaggcccttcccggctgcgaggacgcccagagaccgcgggcgctgagcgcgttgggcagactggttgcctctgggcatcgcaaactgcccccgggcgcatctggcttatctggagacctgggagcttgaggctcattggaagaggacgatcgttaacttttgtgtttgtgtatgtctgtgtatgtaagtttgtcttgtggcattaagactattttgctcttctggaatgcaccactccttccccagggtttaagagattgggggcagacagggactttcctctgccggctgcgtggagaaggaagcggctaaaaggtttgggccggggagttccccattcgttctccggggagggagggactttacacctacccctcaccggaaagctagacccgcttcagggccaggagtggcgtttccgcacaggatttcctaagacgagagggatttagccaagagcacagacttggattccttctgtccctccccacctttctctcccaatgaagaaacgtttatatcctgtgattactctaggaaaggggcgtattaacggtcctttgcttccccgcaggggagaaaaagcttgacgaacttcacagaagagttcaagcttggaaataatggagtttatagagaaaagatatatttttaaaagctctaggtcagaagtactacacagtgcttttaaaaagtgtttaatgagagtttacagacagaagcccgaagtggaaagaccttatggttttgtagatatggtgactccagtctttgttgtataaaggttgggggagctgataaggtttttgtacagtattttctccttcgttgtattgatttttgtataaaaatgtaacttctacgtgtctaacacgtattaaatattttgaagcaaaaaaaaaaaaaaaaaaaaaaaaaaaaaaaaaa

SEQ ID NO: 400132 - DNA, 1000 bp, Homo Sapiens; identical to SEQ ID NO: 117412

SEQ ID NO: 400133 - DNA, 1000 bp, Homo Sapiens
aacatttgtggtctttatttactttgcttcgtgtgtgggcaaagcaacatcttccctaaatatatattaccaagaaaagcaagaagcagattaggtttttgacaaaacaaacaggccaaaagggggctgacctggagcagagcatggtgagaggcaaggcatgagagggcaagtttgttgtggacagatctgtgcctactttattactggagtaaaagaaaacaaagttcattgatgtcgaaggatatatacagtgttagaaattaggactgtttagaaaaacaggaatacaatggttgtttttatcatagtgtacacatttagcttgtggtaaatgactcacaaaactgattttaaaatcaagttaatgtgaattttgaaaattactacttaatcctaattcacaataacaatggcattaaggtttgacttgagttggttcttagtattatttatggtaaataggctcttaccacttgcaaataactggccacatcattaatgactgacttcccagtaaggctctctaaggggtaagtaggaggatccacaggatttgagatgctaaggccccagagatcgtttgatccaaccctcttattttcagaggggaaaatggggcctagaagttacagagcatctagctggtgcgctggcacccctggcctcacacagactcccgagtagctgggactacaggcacacagtcactgaagcaggccctgtttgcaattcacgttgccacctccaacttaaacattcttcatatgtgatgtccttagtcactaaggttaaactttcccacccagaaaaggcaacttagataaaatcttagagtactttcatactcttctaagtcctcttccagcctcactttgagtcctccttggggttgataggaattttctcttgctttctcaataaagtctctattcatctcatgtttaatttgtacgcatagaattgctgagaaataaaatgttctgttcaacttataaaa

SEQ ID NO: 400134 - DNA, 1000 bp, Homo Sapiens; identical to SEQ ID NO: 289157

SEQ ID NO: 400135 - DNA, 1000 bp, Homo Sapiens
ccagggacatagtccggctccttctatcccacggagcaaatcctaacctgctgtggagtggccactccccgctctccctgtccattgccagtgggaatgagctggttgtgaaggagctcctgacccagggagctgaccccaacctgcccctgaccaaaggcttgggcagtgccctgtgtgttgcctgtgacctgacctacgagcaccagaggaacatggacagcaagctggccctgattgaccgactcatcagtcacggggccgacatcctgaagcctgtaatgctcaggcagggagaaaaggaggcagtgggcacagccgtggactatggctacttcagattcttccaggaccggaggattgcccgctgccccttccacacgctgatgccagcagagcgcgagacgttcctggcgcggaagcggctcctggagtacatgggcttgcagctacggcaggctgtctttgccaaggagagccagtgggaccccacgtggctgtacctgtgcaagagagcggagctgatccccagccacaggatgaagaagaagggccccagcctgcccaggggcctggatgtgaaggagcaggggcaaattcccttcttcaagttctgctaccagtgtggccgctccatcggggtccgcctcttgccctgccctcgctgctacgggatcctgacctgcagcaagtactgcaagaccaaggcctggaccgagttccacaagaaggactgcggggacctggtggccatcgtgacacaactggagcaagtttccaggaggagagaagaattccagtgaagcagcagctgcacgtccgaggcttggggaggacccaggactgtgtgggtttcttacctgcctgagccacctcagggaatcttccagcctaatgcaggcatttctgcacctttggggtcatgctttgtagcagtgtctcccttgcgacctcgcaataaattggccccacggggtgattttgacagtcaaaaaaaaaa

SEQ ID NO: 400136 - DNA, 1000 bp, Homo Sapiens; identical to SEQ ID NO: 222639

SEQ ID NO: 400137 - DNA, 1000 bp, Homo Sapiens; identical to SEQ ID NO: 289162

SEQ ID NO: 400138 - DNA, 1000 bp, Homo Sapiens; identical to SEQ ID NO: 117415

SEQ ID NO: 400139 - DNA, 1000 bp, Homo Sapiens
atagatcatttgtcttttggagagcttgttccagcaattattaatcctttagatggaactgaaaaaattgctatagatcacaaccagatgttccaatattttattacagttgtgccaacaaaactacatacatataaaatatcagcagacacccatcagttttctgtgacagaaagggaacgtatcattaaccatgctgcaggcagccatggagtctctgggatatttatgaaatatgatctcagttctcttatggtgacagttactgaggagcacatgccattctggcagttttttgtaagactctgtggtattgttggaggaatcttttcaacaacaggcatgttacatggaattggaaaatttatagttgaaataatttgctgtcgtttcagacttggatcctataaacctgtcaattctgttccttttgaggatggccacacagacaaccacttacctcttttagaaaataatacacattaacacctcccgattgaaggagaaaaactttttgcctgagacataaaacctttttttaataataaaatattgtgcaatatattcaaagaaaagaaaacacaaataagcagaaaacatacttattttaaaaaagaaaaaaaaggataaaaaaacccaaactgaaattctatatacgttgtgtctgttacaaatgtcgtagaagaaatcatgcagctaaacgatgaagaagcccaactggagtgttgctttgaagatgacgccttcttatattttcatagcaaatgggtggtatcaaaatcagacattgcttcttgctgataaaaagcctgaaggaaataagtgaaactacatctatgggaaaaaaaaaaacattgagaagtgcaaatgttcgcatccttttgtttttaaaagatatgatgtcagaataaaatgtggaaaacatacggaaaactagtctagactttaaagaattgtgatcaggtcacattgttaataaaaaaaaaaaacgggctaaaaa

SEQ ID NO: 400140 - DNA, 1000 bp, Homo Sapiens
agactggattttgtgattcagggattttgtctcatagtctctgggatgtcgataggaagaaaaacatgttctgcagcacttctggaactgagcagctcacgatcactgggaaaaaatggttggcaggactcttgaagcactctgctgcgctcagctgcctgatggcgccttctgttagctgccgaaagcgttattccaaggacaggaaagacctgaagaagagtgtgcctacaacatggggatacaatgacaacagctgtatatttaatatcaaatgtcatggagagaaaggcacccggatagaaaataaactaggctcagcaacagcaaacccttacttggtgctggctgcaactgttgctgccggcttagatggacttcatagcagtaatgaggtcttggctggtccagatgagagcacagacttttaccaagtggaaccttctgagatccctttaaaactagaagatgcccttgtggcactggaagaagatcaatgccagagacaggctctaggagaaacctttattcgatattttgttgccatgaagaaatatgagttggagaatgaagaaatagctgcagagagaaataaattcttagagtattttatttagaatagagctcacaactactcctttagacatgtaattgttacttaaagctaatctaccaaaacaaaaagactgaacttttgtaattaacaacagcaacaataacaagattacgaatgcttttgacttttttttttgtccatggaatatttgacagatgaagtaggactgctgagaagattctgataacagaaacaaacaacaaagttgtggtgaagctataatatgcaaacttaccagatcttgtcagtcatttcctatgtgtatgttgacctggataagaatatccaattttgggtggcaataaatatattcgcacattaagaaaaaaaagacttaagcattagaaagcaaaatttaaatgactaaaaaaaaaaaaaaaaaaa

SEQ ID NO: 400141 - DNA, 1000 bp, Homo Sapiens
cctcagaccccggcccagacccccagcaccacagtaccctggagcagcatcccacggccacacctaccgagattccaactccacagagtgaccagagagaggacgtggctgaagacaccaaagatgggggaggggaagtgtccagccaaggcccagaggactcactcctggggacacagtctcgtggccacttcagccgccagccatgtaagtatccccggggcggtgtgaggcctgtaacccaccagctgtccagtctggccctggtggcttccaagctgtgcgaggagacccccatcacatcagtgcccagagggagtttgcgggggcgggggcccagccctgcagctgcctcccctgagggcagccccctgcgccgcaccccgctgcccaagcattttgagattacccaggagacagcccggctactctcgaaattggacagcgaggctgtgcccagggccacctgctgcccggacgtccagcctgaggaagccgaggaccatctctgaccaccctggcaccttaaataaggaagaggcccagattgtgaacacggacccatatatccctacctcccaccacctagtggccaaacaccccgccaggagttcaatgctgggagaggtccagagggttcctataaggaaaaactatttaatacatgacctaggggaggcctaaaacccttttggggataatgtcccagagtccccccactagacacaggtcactgccaagcatcagggccactcgggctcagaggtcactcagggtcaatactcagggtcagtgcaggttatgagatccttggggtccaccctagtctctgacacctgggacaggggtgcttttgctactttggttgtggtcactcccccacacctgcctgcctccttcacggactcgaagtgaccttcctggaggaggtgggcagctcagactccacatgctggtggtgcctgaggtctgatggcctctaataaactgtgtcctataa

SEQ ID NO: 400142 - DNA, 1000 bp, Homo Sapiens; identical to SEQ ID NO: 117416

SEQ ID NO: 400143 - DNA, 1000 bp, Homo Sapiens; identical to SEQ ID NO: 222640

SEQ ID NO: 400144 - DNA, 1000 bp, Homo Sapiens; identical to SEQ ID NO: 289166

SEQ ID NO: 400145 - DNA, 1000 bp, Homo Sapiens
tggcccaagtgcaagggctggaggccagacagacccagaacaggaggaagggcctttggatcctgaagaggacctctctgtgaagcaactgctagaagaagagctgtcaagtctgctggaccccagcacaggtctggccctggaccggctgagcgcccctgacccggcctggatggcgagactctctttgcccctcaccaccaactaccgtgacaatgtgatctccccggatgctgcagccacggaggagccaaggaccttccagacgttcggcaaggcagaggcaccagagctgagcccaacaggcacgaggctggccagcacctttgtctcggagatgagctcactgctggagatgctgctggaacagcgctccagcatgcccgtggaggccgcctccgaggcgctgcggcggctctcggtctgcgggaggaccctcagtttagacttggccaccagtgcagcctcaggcatgaaagtgcaaggggacccaggtggaaagacggggactgagggcaagagcagaggcagcagcagcagcagcaggtgcctgtgaacatacctcagacgcctctggatccaagaaccaggggcctgaggatctgtggacaagagctggtttctaaaatcttgtaactcactagctagcggcggcctgagaactttagggtgactgatgctacccccacagaggaggcaagagccccaggactaacagctgactgaccaaagcagccccttgtaagcagctctgagtcttttggaggacagggacggtttgtggctgagataagtgtttcctggcaaaacatatgtggagcacaaagggtcagtcctctggcagaacagatgccacggagtatcacaggcaggaaagggtggccttcttgggtagcaggagtcagggggctgtaccctgggggtgccaggaaatgctctctgacctatcaataaaggaaaagcagtgattcaaaaaaaaaaaaaaaaaaaaaaaaaaaaa

SEQ ID NO: 400146 - DNA, 1000 bp, Homo Sapiens
aaccagagacgcgctgaacagagagaatcaggctcaaagcaagtggaagtgggcagagattccaccaggactggtgcaaggcgcagagccagccagatttgagaagaaggcaaaaagatgctggggagcagagctgtaatgctgctgttgctgctgccctggacagctcagggcagagctgtgcctgggggcagcagccctgcctggactcagtgccagcagctttcacagaagctctgcacactggcctggagtgcacatccactagtgggacacatggatctaagagaagagggagatgaagagactacaaatgatgttccccatatccagtgtggagatggctgtgacccccaaggactcagggacaacagtcagttctgcttgcaaaggatccaccagggtctgattttttatgagaagctgctaggatcggatattttcacaggggagccttctctgctccctgatagccctgtgggccagcttcatgcctccctactgggcctcagccaactcctgcagcctgagggtcaccactgggagactcagcagattccaagcctcagtcccagccagccatggcagcgtctccttctccgcttcaaaatccttcgcagcctccaggcctttgtggctgtagccgcccgggtctttgcccatggagcagcaaccctgagtccctaaaggcagcagctcaaggatggcactcagatctccatggcccagcaaggccaagataaatctaccaccccaggcacctgtgagccaacaggttaattagtccattaattttagtgggacctgcatatgttgaaaattaccaatactgactgacatgtgatgctgacctatgataaggttgagtatttattagatgggaagggaaatttggggattatttatcctcctggggacagtttggggaggattatttattgtatttatattgaattatgtacttttttcaataaagtcttatttttgtggctaaaaaaaa

SEQ ID NO: 400147 - DNA, 1000 bp, Homo Sapiens
tcaagaaaatagttgtgcaagaactgatgcgatttttaccccttaccccggatttaaaagtcacgtaaaagtttctagagttgtgaatacatacggaccacagactagacctgaaggaattccagggtcaggtcataaacctaacagcatgcttcgagactgtggtaatcaggctgtagaagaacgactacaaaatattgaggcccacttgcggttacagacaggtggtccagtgccaagagacatttatcagagaattaaaaaacttgaggataaaatccttgaattggaaggcatctctcctgaatattttcagtctgtaagcttttctggaaaaagaagaaaagttcaaccacctcaacagaactattcactggctgaacttgatgagaaaattagtgccctcaaacaagccctcctcagaaaatcaagagaagcagaatccatggcaacccaccaccttccatgaaaaactcctctcgtccttgtcattttacttttttgtatacatatgtgtaacttacactgttattaattcaacggatatatatttatcaatgtagacttctctgtgaagtcaaggtttattttcacatgagtccagcttgcagcaagtaatcttcaaatattccagtaagttttgaaataatgaatgcattgaaaatagcattgttggaatttattcccttctgttttaaaggaggtattttggaaattgaaaaacttaatttacaagtgctggtacatcttttttcttttgtggaccaccggaaggaagatttattttgatattgatactttaaacggactttatatttgtaacattgatgttaaccagtttattagtttaaatcagtactttgcatataataagcattcaacaaaaatttattgactgaaatgaattttaaatgcatgtgtatgaacttgtttttcttaatctttaagatgtcagtattcatgtaaataaacaatagatccagctttaaaaaaaaaaaaa

SEQ ID NO: 400148 - DNA, 1000 bp, Homo Sapiens; identical to SEQ ID NO: 289168

SEQ ID NO: 400149 - DNA, 1000 bp, Homo Sapiens
acgaggcttcattcgttatggctggcgctggggttggagaactgcagtgtttgtgactatattcaacacagtgaacactagtctgaatgtataccgaaataaagatgccttaagccattttgtaattgcaggagctgtcacgggaagtctttttaggataaacgtaggcctgcgtggcctggtggctggtggcataattggagccttgctgggcactcctgtaggaggcctgctgatggcatttcagaagtactctggtgagactgttcaggaaagaaaacagaaggatcgaaaggcactccatgagctaaaactggaagagtggaaaggcagactacaagttactgagcacctccctgagaaaattgaaagtagtttacaggaagatgaacctgagaatgatgctaagaaaattgaagcactgctaaaccttcctagaaacccttcagtaatagataaacaagacaaggactgaaagtgctctgaacttgaaactcactggagagctgaagggagctgccatgtccgatgaatgccaacagacaggccactctttggtcagcctgctgacaaatttaagtgctggtacctgtggtggcagtggcttgctcttgtctttttcttttctttttaactaagaatggggctgttgtactctcactttacttatccttaaatttaaatacatacttatgtttgtattaatctatcaatatatgcatacatgaatatatccacccacctagattttaagcagtaaataaaacatttcgcaaaagattaaagttgaattttacagttcgtatattcatgtggtcctttgaaagggtattctagaaatcactggaaagaggagaggaaagaaccaggtaggcaaatggtctgtgaaacccttgggtcctggaagcagtgtgagtgtaaatgtgtagtgtttggtttcatctaaataaacaaagatgatttctttgacacttgaaataaaatacaaattcaacaaaaa

SEQ ID NO: 400150 - DNA, 1000 bp, Homo Sapiens; identical to SEQ ID NO: 222642

SEQ ID NO: 400151 - DNA, 1000 bp, Homo Sapiens; identical to SEQ ID NO: 222643

SEQ ID NO: 400152 - DNA, 727 bp, Homo Sapiens; identical to SEQ ID NO: 289170

SEQ ID NO: 400153 - DNA, 1000 bp, Homo Sapiens; identical to SEQ ID NO: 117419

SEQ ID NO: 400154 - DNA, 1000 bp, Homo Sapiens
gttattatattcatttagcattaagtcaaggagactgagaatgactcaagggacgtcatagtaccatagttttaaggaccaaggtgtgcccagaattcaagtttcacaaatcccaatgctgtgcattgattatgttcaactttatgtgtgcattcttagaagagtaagaacaaataaagtacaccgtaatatacatataaatacattcatgtttgtgagagaaggaaagagtaagtaatttgaattggcagctttctttgctaaatctttaaattctgttaagatcctcaagtaactggggagtacatgctttaggacacaaacaaaaacaaagggcatgaaagtatctgaaagcaatgtagcacatatctatcgtaatatatgtaatatattgacataaaagacacaaactaatataaagttatagttatatcttaaaatataattgaagaagcatatgacatataacttatagaaatcagtatcaattcctcccatttcaattcagttaagacttctgtgatagatgtttatagcagagaagaaatgtctcatcaataggaaaactatcagataaagtttaggagataggaagaaggactgtgtgtagtaatgaaaataccaagttgcaacattacatgtttacaaaaaaaatctgtgtttgtagtgtggaagttggtgactgttttaatcatcatctagacttgttaagtagaaaaattttaaaaatttgcttatgaaaatataacccccagaaagtaacaatgacaaagtattatatttatatatattattgtagagaatttgtatatttttaaagatgtcttaagatatcttaattttatttataagttttggtgtttacctgttttaaaatgataatgttggcatctgtgataaactatcaatgaggctcccatcatgccattttttgttcattttaatctttaaaaaataaaaattaggcatattaaaaaaaaaaaaaaaaaaaaaaaaaaaa

SEQ ID NO: 400155 - DNA, 1000 bp, Homo Sapiens; identical to SEQ ID NO: 222644

SEQ ID NO: 400156 - DNA, 1000 bp, Homo Sapiens; identical to SEQ ID NO: 117420

SEQ ID NO: 400157 - DNA, 1000 bp, Homo Sapiens; identical to SEQ ID NO: 289175

SEQ ID NO: 400158 - DNA, 1000 bp, Homo Sapiens
cacccaaggaggtggggactgctcggcctccaccgctgttccgctgcagccccgccctgccccacccacccagtgccttgctgaagcccatagcaatccgcttctcagaggtcctatcgtgtttccactgctcgccttggtttgggagcagggagggggaagtcctagcccagatggaccaaggacgggcctgaaggcacatgggggaaagggagcacacggggaggacgttggggaccctgggtggggcctccaggtgcagctgtggatggaagacagggattggcctgtgcttcagcgaccaggatggccaggccagagctgcagctgggggctcttttcctggtcattgggtggggctgagtgccacatgttcccacattaaaaaggggggtccagggctgtgtgagtgtgtctttctgggtctagggctcggggtagtttgggtcaaggactgtccctccagcagtcgcctcctcccaccctgagccccacagtcatctggccctttccctgctcaaccctccatcctaggctctgagcctcagaggacccagcccatgagagaacggggatctggggggcctctcacctgctcctatgaccttgctcccttttaggtcaccccattgccaccgtgcccctgggctggactcccatgctcctcagggcccacccctgctctgtctggtacaggcccctgctgagtgggcccctctcctctgcccctggggtccatcccctcttgcccagggtccccatcctgtaccaagcagactgggccctaagacccctggcagaacccagcctctgctcacacccgccccagcttctgccacggcttcagtcagggccaggaggaacacgtgaaggagaaagagaaatgcaggagccgcggggctcccggttccttgggaagagggtgcccattggacctttggcactggatgagccaataaaccaaactctggcacctcatttaaaaaaaaaaaaaaaaaaa

SEQ ID NO: 400159 - DNA, 1000 bp, Homo Sapiens; identical to SEQ ID NO: 289176

SEQ ID NO: 400160 - DNA, 1000 bp, Homo Sapiens
ctttgcttccctcctcaactaccgcaacatctggaaaaatctgcttatcctgggcttcaccaacttcattgcccatgccattcgccactgctaccagcctgtgggaggaggagggagcccatcggacttctacctgtgctctctgctggccagcggcaccgcagccctggcctgtgtcttcctgggggtcaccgtggaccgatttggccgccggggcatccttcttctctccatgacccttaccggcattgcttccctggtcctgctgggcctgtgggattatctgaacgaggctgccatcaccactttctctgtccttgggctcttctcctcccaagctgccgccatcctcagcaccctccttgctgctgaggtcatccccaccactgtccggggccgtggcctgggcctgatcatggctctaggggcgcttggaggactgagcggcccggcccagcgcctccacatgggccatggagccttcctgcagcacgtggtgctggcggcctgcgccctcctctgcattctcagcattatgctgctgccggagaccaagcgcaagctcctgcccgaggtgctccgggacggggagctgtgtcgccggccttccctgctgcggcagccaccccctacccgctgtgaccacgtcccgctgcttgccacccccaaccctgccctctgagcggcctctgagtaccctggcgggaggctggcccacacagaaaggtggcaagaagatcgggaagactgagtagggaaggcagggctgcccagaagtctcagaggcacctcacgccagccatcgcggagagctcagagggccgtccccaccctgcctcctccctgctgctttgcattcacttccttggccagagtcaggggacagggagagagctccacactgtaaccactgggtctgggctccatcctgcgcccaaagacatccacccagacctcattatttcttgctctatcattctgtttcaataaagacatttgg

SEQ ID NO: 400161 - DNA, 1000 bp, Homo Sapiens; identical to SEQ ID NO: 289177

SEQ ID NO: 400162 - DNA, 1000 bp, Homo Sapiens
tgtagggtccggcgtggggatcagccgggatgggctgcgcgtctccagcctctgcacacacattggcgggtggggtgcagggagggagaggcaggggagagagaatggcatctcgcgtggagggctgtcgtttgaactctcccagcgcgagagaccctgccccgcccccttcctggagcgttgactcccttctcgtctcgaggcctgtggcgtctgggtccgttggggcagaaccatggaggaaaagccttcgaaagtgtcgctcaagtcttccgaccgccaaggctcggacgaggagagcgtgcatagcgacactcgggacctgtggaccacgaccacgctgtcccaggcacagctgaacatgccgctgtccgaggtctgcgagggcttcgacgaggagggccgcaacattagcaagacccgcgggtggcacagcccggggcggggctcgttggacgaggggtacaaggccagccacaagccggaggaactggacgagcacgcgctggtggagctggagttgcaccgcggcagctccatggaaatcaatctgggggagaaggacactgcatcccagatcgaggccgaaaagtcttcctcaatgtcatcactcaatattgcgaagcacatgccccatcgagcctactgggcagagcagcagagcaggctgccactgcccctgatggaactcatggagaatgaagctctggaaatcctcaccaaagccctccggagctaccagttagggatcggcagggaccacttcctgactaaggagctgcagcgatacatcgaagggctcaagaagcgccggagcaagaggctgtacgtgaattaaaaacgccaccttgggctcgagcagcgacccgaaccagccccgtgccagcccggtccccagacccaagcctgaccccatccgagtggaatttgagtcctaaagaaataaaagagtcgatgcatgaaaaaaaaaaaaaaaaaaaaaaaaaaaaaaaaaaaaaaa

SEQ ID NO: 400163 - DNA, 1000 bp, Homo Sapiens; identical to SEQ ID NO: 289178

SEQ ID NO: 400164 - DNA, 1000 bp, Homo Sapiens; identical to SEQ ID NO: 117421

SEQ ID NO: 400165 - DNA, 1000 bp, Homo Sapiens; identical to SEQ ID NO: 289181

SEQ ID NO: 400166 - DNA, 1000 bp, Homo Sapiens
tttcatgaaaggaaagatgatgttttgcgtattattaaagatgaagacttcaaaatactggagcaaagacaagtagtattatcggaaaaagaagcacaagcactgtgcaaggaatatgaaaatgaagactattttaataaacttatagaaaacatgaccagtggtccatctctagcccttgttttattgagagacaatggcttgcaatactggaaacaattactgggaccaagaactgttgaagaagccattgaatattttccagagagtttatgtgcacagtttgcgatggacagtttgccggtcaaccagttgtatggcagcgattcattagaaaccgctgaaagggaaatacagcatttctttcctcttcaaagcactttaggcttgattaaacctcatgcaacaagtgaacaaagagagcagatcctgaagatagttaaggaggctggatttgatctgacacaggtgaagaaaatgttcctaactcctgagcaaactgagaaaatttatccaaaagtaacaggaaaagacttttataaagatttattggaaatgttatctgtgggtccatctatggtcatgattctgaccaagtggaatgctgttgcagaatggagacgattgatgggcccaacagacccagaagaagcaaaattactttcccctgactccatccgagcccagtttggaataagtaaattgaaaaacattgtccatggagcatctaacgcctatgaagcaaaagaggttgttaatagactctttgaggatcctgaggaaaactaaagtatatactgtgaaaactttgagaagataatacatatgttcacgtcaatatacaaccatttggcacagcttcctgggaggaataataagaaaaacatgctttggaggaaaactcaagatacaaaaatgaatggctatgcataataacaataaaaatgtattccccaaccaaaaaaaaaaaaaaaaaaaaaaaaaaaaaaaaaaaaaaaaa

SEQ ID NO: 400167 - DNA, 1000 bp, Homo Sapiens; identical to SEQ ID NO: 117425

SEQ ID NO: 400168 - DNA, 1000 bp, Homo Sapiens; identical to SEQ ID NO: 222649

SEQ ID NO: 400169 - DNA, 1000 bp, Homo Sapiens; identical to SEQ ID NO: 289186

SEQ ID NO: 400170 - DNA, 1000 bp, Homo Sapiens; identical to SEQ ID NO: 289187

SEQ ID NO: 400171 - DNA, 1000 bp, Homo Sapiens; identical to SEQ ID NO: 289188

SEQ ID NO: 400172 - DNA, 1000 bp, Homo Sapiens; identical to SEQ ID NO: 289189

SEQ ID NO: 400173 - DNA, 1000 bp, Homo Sapiens; identical to SEQ ID NO: 222650

SEQ ID NO: 400174 - DNA, 1000 bp, Homo Sapiens
agagctggcagctcgctgacatcctttcagtggaggccctctggacaccaggggctaggagcacagctggctgagacgagggacccccaggatgcaaagggtacccccaccatggaggggtctttggagttcaagcagcacctgctgcctggcgggaggcagcctagctcgagctcctgggacagctgccgcgggaccttgcagggcagctctctgagcctgttcctggatgagaggatggcagcggagaaagtagcttccatagccctccttgacctcacgggagcccggtgtgagaggctgcggggccgccacggcaggaaacacacattctccttaaggctgaccagtggggcagagatcctgtttgcagcaccgtccgaagagcaggctgagagctggtggcgagccctgggcagcactgcagcccagagtctgagcccaaaactcaaagccaaacctgtcagctctctgaatgagtgcacgaccaaggatgcccggcctggatgtctactcaggtctgatccctgaggtgaaccccagtgcaacaccaaacttcaggggcacaagcgaggacacatctaagggaccagaataagactcagctacaggcaaaagggctccttcccgtggctgcttcaacccagttccccaggcccagcttctggaatagacagttccttctggttagatgggtcctaccatgtggcaggaaacagccattgcctggcctccccctgcattcctgtctgggtgaagaggagacgtgttacggcagagcaggtgggcaaggccagggctaccccaggcccatgtggcctcctccttgcttggaaggggtgactctgagcacaggtagacgcagacgtgtgcagagaatgtgctcttcggaggaagaacactgatgagcgagctctgtaccagcccttgtcatgtacagccaagagcctagaatgacatggcccttctcagcagtaataacagatggtctcagcgcctc

SEQ ID NO: 400175 - DNA, 1000 bp, Homo Sapiens
ccaggctcctcctcgccccggcctccgggtctgggaaattgaggggacggcaggcccggctgccctggaactgggagacagggagaatcccctgccggggtccctggaaacagtgcccaccccacatcactacattccctcggcccgtgttagtgaataaagtattatatcctcaccccacccgtgcctgtgagtgaggtgggtgggagaggaagaaagttggggttctccaggctcaggtgccaagtgagttgtcaaggaaccaaatggggatgtaaacctaaaaggggttcccggcacctcggtttgtgttggttggaggtgatcgcacacttggcccttggttacgtcctcataaccttagacctgaaagggcccataaatatactatgttcacgatcagacacgcactgcattcggcagagctccagtgagcaaggcacgaccctcagatctcagtctagtgaaggagagaaaactgtaataacactacgttaaaggttttaactgctttgttatgtaagcttacccagcccggcgcacagtgactcacgcctgtaatcccagcactttgggagggcgaggctagcagatcacttgaggttaggagttcgataccagcctggccaacatggtgaaacccggtctctactaaaaatacaaaaattaactgggtgtggtggcgggcgcctgtaatcccagctactgagggggctgaggcatgagaatcacttgaacctgggagacagaggttgcaatgaaccgagatagtgccattgcactccggcctgggcaacagaggaagactgcctcaaacaaacaaaaaacaacaaaccaaaccaaaccaaaaaaatctcaaagcgattggacctagcagctcatgcctgtaatctccagcactttgggaggcggaggcaggaggatctcttgaagtcaagagtttgagatcagcctggagaacaaagtgagacccccatctattaaaaaaaaaaaaaaaaaa

SEQ ID NO: 400176 - DNA, 1000 bp, Homo Sapiens
gctgaaggctttgatgtcagcactgatgtgatccgaagagttttaaaaagcaagtttttacccacattggagcagaagctgaagcaggatcaaaaagtccttaagaaagctgggcttgcccactcgctgcagcacctccggggctctggaaatacctcaaagctgctccctgcaggccactctgtatcaggctctttgcttatgccagggcatgaagcctcatctaaagacccaaatcacagcacagctttgaaagtgatagagtcagacactcacaggacaaatacaccaaggagaaggaagggaagaaataaagaaatccaggacctggaggagagctttgtgcctgttgctgcacccctaggtcatccaagagagctgcagaagtactccagtgattctgagagccccagaggaactggcagtggtgcgttgccaagtggtcagaagctggaggagttgaaggcagaggagccagataacttcagcagcaaagtagtgcagaggggccgagagttctttgacagcaacgggaacttcctgtacagaatttgagtcggggcttggcttatggagatgcctcgtgaaacacagctgggcaagtattaatgtatatggaacagcctggatttctgcatatggataagccaccttggaataggaagaggtgttgagcctggactgtgggaggaaagagctgcgtggatagattcaaacttcctgtggtagtgctcccagtctgacctctgtagaccttcagtactcactcttcttgcttaggctctctgtgtgttgaaagccatcccgtgttgcatgtgttgttacaattttctgtgatacttgcaatttatgtttgagaagaagtgaaaagtttgccttctgacctcatttccttcttgatcagtgaacactaacattttggggacaacttagtcaattggttttccttacaacaaaataaagtaaaatgtagcagtcaaaaaaaaaaaaaaaaaaaaaa

SEQ ID NO: 400177 - DNA, 1000 bp, Homo Sapiens; identical to SEQ ID NO: 289192

SEQ ID NO: 400178 - DNA, 1000 bp, Homo Sapiens; identical to SEQ ID NO: 117427

SEQ ID NO: 400179 - DNA, 1000 bp, Homo Sapiens; identical to SEQ ID NO: 222652

SEQ ID NO: 400180 - DNA, 1000 bp, Homo Sapiens; identical to SEQ ID NO: 118902

SEQ ID NO: 400181 - DNA, 1000 bp, Homo Sapiens; identical to SEQ ID NO: 222655

SEQ ID NO: 400182 - DNA, 1000 bp, Homo Sapiens
tgctctaaacagttagggtttgttcccgcaggaactgaacccaaaggatcacctggtattccctgagagtacagatttctccggcgtggccctcaagggacagacatggctcagcggatgacaacacagctgctgctccttctagtgtgggtggctgtagtaggggaggctcagacaaggattgcatgggccaggactgagcttctcaatgtctgcatgaacgccaagcaccacaaggaaaagccaggccccgaggacaagttgcatgagcagtgtcgaccctggaggaagaatgcctgctgttctaccaacaccagccaggaagcccataaggatgtttcctacctatatagattcaactggaaccactgtggagagatggcacctgcctgcaaacggcatttcatccaggacacctgcctctacgagtgctcccccaacttggggccctggatccagcaggtggatcagagctggcgcaaagagcgggtactgaacgtgcccctgtgcaaagaggactgtgagcaatggtgggaagattgtcgcacctcctacacctgcaagagcaactggcacaagggctggaactggacttcagggtttaacaagtgcgcagtgggagctgcctgccaacctttccatttctacttccccacacccactgttctgtgcaatgaaatctggactcactcctacaaggtcagcaactacagccgagggagtggccgctgcatccagatgtggttcgacccagcccagggcaaccccaatgaggaggtggcgaggttctatgctgcagccatgagtggggctgggccctgggcagcctggcctttcctgcttagcctggccctaatgctgctgtggctgctcagctgacctccttttaccttctgatacctggaaatccctgccctgttcagccccacagctcccaactatttggttcctgctccatggtcgggcctctgacagccactttgaataaaccagacaccgc

SEQ ID NO: 400183 - DNA, 1000 bp, Homo Sapiens; identical to SEQ ID NO: 222656

SEQ ID NO: 400184 - DNA, 1000 bp, Homo Sapiens; identical to SEQ ID NO: 289198

SEQ ID NO: 400185 - DNA, 1000 bp, Homo Sapiens
ttcacagaactacagagagacttcctgaagcagcgccccaccaagctcaagagcctcatccgcctagtcaagcactggtaccaaaattgtaagaagaagcttgggaagctgccacctcagtatgccctggagctcctgacggtctatgcttgggagcgagggagcatgaaaacacatttcaacacagcccagggatttcggacggtcttggaattagtcataaactaccagcaactctgcatctactggacaaagtattatgactttaaaaaccccattattgaaaagtacctgagaaggcagctcacgaaacccaggcctgtgatcctggacccggcggaccctacaggaaacttgggtggtggagacccaaagggttggaggcagctggcacaagaggctgaggcctggctgaattacccatgctttaagaattgggatgggtccccagtgagctcctggattctgctggctgaaagcaacagtgcagacgatgagaccgacgatcccaggaggtatcagaaatatggttacattggaacacatgagtaccctcatttctctcatagacccagcacactccaggcagcatccaccccacaggcagaagaggactggacctgcaccatcctctgaatgccagtgcatcttgggggaaagggctccagtgttatctggaccagttccttcattttcaggtgggactcttgatccagagaggacaaagctcctcagtgagctggtgtataatccaggacagaacccaggtctcctgactcctggccttctatgccctctatcctatcatagataacattctccacagcctcacttcattccacctattctctgaaaatattccctgagagagaacagagagatttagataagagaatgaaattccagccttgactttcttctgtgcacctgatgggagggtaatgtctaatgtattatcaataacaataaaaataaagcaaataccatttaaaaaaaaaaa

SEQ ID NO: 400186 - DNA, 1000 bp, Homo Sapiens
gtattttttttcttgtatttttccaattagctcctcctttttccttccagtctaaaaaaggaatcctctgtgtcttcaaagcaaagctctttactttccccttggttctcataactctgtgatcttgctctcggtgcttccaactcatccacgtcctgtctgtttcctctgtatacaaaaccctttctgcccctgctgacacagacatcctctatgccagcagccagccaaccctttcattagaacttcaagctctccaaaggctcagattataactgttgtcatatttatatgaggctgttgtcttttccttctgagcctgcctttctcccccccacccaggagtatcctcttgccaaatcaaaagactttttccttgggctttagccttaaagatacttgaaggtctaggtgctttaacctcacataccctcacttaaacttttatcactgttgcatataccagttgtgatacaataaagaatgtatctggattttgtgcctagttcctagcacacagcttcaaaaattctagagtttcctgataggagtgtcttttgtattcataacaagcccttttcacccatgcctgggtttatgctaacaaggttacccatggtgggcccttagtttcaaggaaggagttggccaagccagaaagaccaagcatgtggttaaagcattggaattttcagccccatcccacccccaatctccaaggaggtgatggggctggaaattgagttcaattttaacatggccagtgatttaagcaatgctgcctatgtaaagaaaccccaataaaaactctggacagtgaggcttggggagcttcctgattggcagacattccaatgtactaggaaggtagcgcatcttgattccacagggacaaaggctcctgagctctgggcccttccagtgcttgccaccctacatactctttgtctggctcttcatttgtattctttataataaaatggtgattgtaagtagagca

SEQ ID NO: 400187 - DNA, 1000 bp, Homo Sapiens; identical to SEQ ID NO: 294448

SEQ ID NO: 400188 - DNA, 1000 bp, Homo Sapiens; identical to SEQ ID NO: 117428

SEQ ID NO: 400189 - DNA, 1000 bp, Homo Sapiens; identical to SEQ ID NO: 289201

SEQ ID NO: 400190 - DNA, 1000 bp, Homo Sapiens; identical to SEQ ID NO: 397692

SEQ ID NO: 400191 - DNA, 1000 bp, Homo Sapiens
catgctcctgacacagcccagtttgcaggaaaagagcagacttattaccagggaagacacttaggagacacttttggcgaagactggcagcaaacacctttaaggcaagggtcctcggacatctacagcacgccagaagggaaactgcacgtggcccccacgggagaagcacccacctacgtcaacactcagcagatcccaccacaggcctggccggctgcggtcagcagtgctgagagcagcccaaggaaagacctctttgacatgaaaccttttgaagatgctctcaagaaccagcccttggggcccgtgttaagcaaggcagcctccgtggagtgcatcagccctgtgtcacctagagccccagatgccaagatgctggaggaactgcaagccgagacttggtaccaaggagagatgagcaggaaggaggcagaggggctgctggagaaagacggagacttcctggtcaggaagagcaccaccaacccgggctcctttgtcctcacgggcatgcacaatggccaggccaagcacctgctgctcgtggacccagaaggcacgatccagacaaaggacagagtctttgacagtatcagccacctcatcaaccaccacctagaaagcagcctgcccattgtctctgcagggagtgagctgtgtctccagcagccagtggagaggaagcagtgacatggccagcactgctcccggcactgcgcaccaggtcaggaggacctggagtggactagaatcggggctgctggaactgggacagctgcctgtggctcagagccttcttcaaaagcttcaaaaggaaggcttcctttaaggtcaagtttcataaacttggttctgaatttctcatatgcatattaaaggtgtacatacctatacatcctgtacaaattatccctctatatttatattttttaagactaagaaagacgtaagactaatgttctgtgctgtatgtttttaatgaaaaaaaaaaaaaaaa

SEQ ID NO: 400192 - DNA, 1000 bp, Homo Sapiens; identical to SEQ ID NO: 222657

SEQ ID NO: 400193 - DNA, 1000 bp, Homo Sapiens
tggacctgggctcctagaacccatttgccttgatgagcttgccttttgtgacttgacactggggacgtggagtggcggtgtccaggggcgccccgcccctgcggccccaccaggtactgaaagacccgcaggctgagcgggtagaacagccgggtagggcagatagctgtctatgttggttcttgtttgggatttattttcaacaagttacttttaggatccttttggggctggagactgagtcttgaaccacagaagggaataaattatacaccactgtcattctctctctccctctgtctcttccttttaccctctcttgtcttgccttttccccctttcctcttcctttcccttccttctcttttcttttttctgctttctgtctttctccctctccttgtattgctttccttctagatttctagcttgccaccgttcattctctccttctgtctctccctttctctctccttctctgtttctcctctcttctctcctgccagtctcttgtactctgtgtcctggtccctccgtatgtacccctgtctttctcctcctgactggtggtctatctgcccctacctctggccctcgctttaccggagtagggggtgggagagggaagaggagagaaaagacagggactttgaacctaggccatctcctgaggccttttccctcgcccatgtgggtcagtgggagctgcaggtgtcagcttttcgtctagtaacttaagtgagagagaaagggcagcgccacagaagcccctaaacgccgcctcgtcatacgcccctcctccttctctcttggcgaggccccgccacaccgcgctcttcctcccgggactgtgactacagcgctcccggctgagcgcgccccccgagccgccgacttgccgtctccccgtaatgccctcatgtgaatgttcttcgggaaatatttctgcttttattttataataaaattagaaatcataaataaaaaaaaaaaaaaaaaa

SEQ ID NO: 400194 - DNA, 1000 bp, Homo Sapiens; identical to SEQ ID NO: 117431

SEQ ID NO: 400195 - DNA, 1000 bp, Homo Sapiens; identical to SEQ ID NO: 117432

SEQ ID NO: 400196 - DNA, 1000 bp, Homo Sapiens; identical to SEQ ID NO: 117433

SEQ ID NO: 400197 - DNA, 1000 bp, Homo Sapiens
acacagtgtcatggcagtgttggacagtgctggtgtgttgacagatatggaaatgaagtcatgggatccagaataaatggtgttgcagattgtgctatagattttgagatctccggagattttgctagtggcgattttcatgaatggactgatgatgaggatgatgaagacgatattatgaatgatgaagatgaaattgaagatgatgatgaagatgaaggggatgatgatgatggtggtgatgaccatgatgtatacatttgattgatgacagttgaaatcaataaattctacatttctaatatttacaaaaatgatagcctatttaaaattatcttcttccccaataacaaaatgattctaaacctcacatatattttgtataattatttgaaaaattgcagctaaagttatagaactttatgtttaaataagaatcatttgctttgagtttttatattccttacacaaaaagaaaatacatatgcagtctagtcagacaaaataaagttttgaagtgctactataataartttttcacgagaacaaactttgtaaatcttccataagcaaaatgacagctagtgcttgggatcgtacatgttaattttytgaaagataattctaagtgaaatttaaaataaataaatttttaatgacctgggtcttaaggatttaggaaaaatatgcatgctttaattgcatttccaaagtagcatcttgctagacctagatgagtcaggataacagagagataccacatggcaagaaaaacaaagtgacaattgtagagtcctcaattgtgtttacattaatagtggtgtttttacctawgaaattattctggatctaayaggacattttacaaaatggcaagtatggaaaaccatggattctgaaagttaaaaatttagttgttctccccaatgtgtattttaatttggatggcagtctcatgcagattttttaaaagattctttaataacatgatttgtttgcc

SEQ ID NO: 400198 - DNA, 1000 bp, Homo Sapiens; identical to SEQ ID NO: 222659

SEQ ID NO: 400199 - DNA, 1000 bp, Homo Sapiens; identical to SEQ ID NO: 289208

SEQ ID NO: 400200 - DNA, 1000 bp, Homo Sapiens; identical to SEQ ID NO: 289209

SEQ ID NO: 400201 - DNA, 1000 bp, Homo Sapiens
ttacagacagacaagtcaaaatctggtttcaaaatcgcagaatgaaactcaagaaaatgaaccgagagaatcggatccgggaactgacctccaattttaatttcacctgagagcgcggcctctcctcctcccttcccgctccttcctctccccgcccctcctccctttgtgcctggtgatatatttttttttcctccctgagtataaatgcaatgcgactgcaaaaaaggcaaagacctcagactctccttccaagggacctgtggttcgtgctgcgaagatgcttccacttaaagcatgagaaatggggtgccgggatgtggggtgtggtgtgtgccctcatagatgggggtgggagtgtggctggtgtgtgtgtcaagccctcactcacccacgcactcacacacagcattctgttctccatgcaaagttaagatcgaatccatccgcttgtaggggaaaaaaaggaaaaaaattaaccagagagggtctgtaatctcgcagagcacaggcagaatcgttccttccttgctgcatttcctccttagactaatagacgttttggaaagttcggctagtgttcgtgtgtttgtcgtagcacccagagcctccaccaaaccctctccatgtctttacctcccagtcgctctaagaatctgcttgaagtctcgtatttgtactgctttctgcttttctcccacccctcctagcacccccacatcccccatctagtaacatctcagaaatttcatccagaggaacaaaaaaattaaaaatagaacatagcaaagcaaagacagaatgcccccccccccaaatattgtcctgtccctgtctgggagttgtgttatttaaagatattctgtatgttgtatcttttgcatgtagcttccttaatggagaaaaaaaaacctaataaatttccagaatcataatcctcaaaaaaaaaaaaaaaaaaaaaaaaaaaaaaaaaaaaaaaaaaaaaaaaaaaaaaaaaaaa

SEQ ID NO: 400202 - DNA, 1000 bp, Homo Sapiens
agcccaatcattccaaccaaagcagggttggggaatcccgaatggccccaattcttgcctcatcctatgaccaggcttttagaggaccttccctaagggcgcagcttcggagcaggatctgtccagctcatactttccttcgctgtccctcccgcactccttaggcaagatttcccagtaaagattttctgtgcgtattttaaaagtcgtgttaatactcatgataattattagggacctggcagcgtgattggagtatggatgtttccgtaaaagctggaattccgtaaaagcattgacgcagcccctacactccatcccaaccaagaaactgcatttcctggggccaggtgggagctgcctttgccccactgcctcccctgttctgctctctcagtcaacatgtggaaatccaaggaggacaaagactccagccacgctgctaaatagggctcctctctcctctctctctctctaggtggtaaggttggggattagtccaggtacagaagcagaacttttttctaaggataaacatctcttccaaggggatggagagtgggtccctcaacaaagtccctgtccagtcacctttccatcagggcactagcccaggaatgactcctcacactttcacctttactgatttccagaggaaagctagaggatctagttcaagaggcaagaagatctggccctcaattagctagatgtagatgctgcctaacagttccctcctcaaaggccaccttggtgctgtgggggccccttgcctcttcccttcccactggtgcattacaaaacagtgttcttttgaaatgttcatcaggaataggcttttttaaaaaatgttgtgtatctgtatatagtattgtgatgtctgaatgacaatgtactgaatgcaaaaaggaaaaaaacccacaaacatgtttttaaaataaaatatctttttttgccttgaaaaaaaaaaaaaaaaaaaaaaaaaaaaaaaaaaaaaaaa

SEQ ID NO: 400203 - DNA, 1000 bp, Homo Sapiens; identical to SEQ ID NO: 117435

SEQ ID NO: 400204 - DNA, 1000 bp, Homo Sapiens; identical to SEQ ID NO: 289211

SEQ ID NO: 400205 - DNA, 1000 bp, Homo Sapiens; identical to SEQ ID NO: 222662

SEQ ID NO: 400206 - DNA, 1000 bp, Homo Sapiens; identical to SEQ ID NO: 289213

SEQ ID NO: 400207 - DNA, 1000 bp, Homo Sapiens; identical to SEQ ID NO: 289214

SEQ ID NO: 400208 - DNA, 1000 bp, Homo Sapiens; identical to SEQ ID NO: 117436

SEQ ID NO: 400209 - DNA, 854 bp, Homo Sapiens
cccggatccctgcggctgcctgcactctggaccacgagctctgagagcagcaggttgagggccggtgggcagcagctcggaggctccgcgaggtgcaggagacgcaggcatggccggtgagctgactcctgaggaggaggcccagtacaaaaaggctttctccgcggttgacacggatggaaacggcaccatcaatgcccaggagctgggcgcggcgctgaaggccacgggcaagaacctctcggaggcccagctaaggaaactcatctccgaggttgacagcgacggcgacggcgaaatcagcttccaggagttcctgacggcggcaaggaaggccagggccggcctggaggacctgcaggtcgccttccgcgccttcgaccaggatggcgacggccacatcaccgtggacgagctcaggcgggccatggcggggctggggcagccgctgccgcaggaggagctggacgccatgatccgcgaggccgacgtggaccaggacgggcgggtgaactacgaggagttcgcgaggatgctcgcccaggagtgaggctccccgcctgtgtccccctggctgcgctctgagccttcagggccaccgcccgctgctgcttttgtgctgggactctccggggaaacctggtcggtggatgggaaactgcctccccctgggaggaaggctttgcgctccggggcctggatgcggcgccctcgggccgcctgcgagcccctctctgcctccagaccttgggcagaaggaggcctccttgggcctggtccccctttgccctgcagtggaatgagggcccctcagccccgcattgatctaaataaaggactgccgagttccaaaa

SEQ ID NO: 400210 - DNA, 1000 bp, Homo Sapiens; identical to SEQ ID NO: 289215

SEQ ID NO: 400211 - DNA, 1000 bp, Homo Sapiens
attatgctcacaatggaaagcaataccgatatgtctttgctacaggagttcagtggagtccaatcccaaccaagataataaaatatgacattctcacaaagtcatccttaaaatggagagaggacgactgctggccagcggaacccctgtttgtgcccgcgccaggtgccaaggatgaggatgacggagtaatcttatcagccattgtctctactgatccccaaaagctgccttttctgctcattctggatgccaaaagctttacggaattggcccgtgcctctgttgatgtcgatatgcacatggatctccatggattattcattacagacatggactgggacacaaaaaagcaggccgcttctgaggaacagcgggacagggcttccgactgccacggggctcctctgacctgatggtgttggggtttgggtaggggaggggagctcggctgtcagaactccatggatatgtttctttggatggaggggagggcctttgttaccttttgcacttattctttctgtgggtgctttgacaagggcatggcaagagagcttgtcagtatcatttctttcattttattttggctgtaaaaattttgtttgaaagtcaaacatttgaacatcaaatatgtattgattagatccagtccttctaagaaacctcctttcctttaacaaaaagaccttgaccatgaatcagagattgtattcaatgacattatcatcatttttagaacgagccactaacctattagagaagaggcagataattatttatcattgtgccttcctctgtctctttctctttcctttgctccctcccatgtttctggtggactaaattgtgtatctgggagttctcactttctagccaggcctgatgagttaagttacatgaccaggaaggttatgccactttgtggtcattccatgcaagtcatggcgtaatataaaataataaaaactttaaagtctgaaaaaaaaaaaaaaaaaaa

SEQ ID NO: 400212 - DNA, 1000 bp, Homo Sapiens; identical to SEQ ID NO: 289217

SEQ ID NO: 400213 - DNA, 1000 bp, Homo Sapiens
caacagagactgcgactcgctcaaggggctctgccgcatcatgggcaacggcttcgcgggctgcatgctgttcccccacatctccccctgtgaggtgcgcgtgctcatgctcctgtactcgtccaagaagaagatcttcatgggcctcatcccctacgaccagagcggcttcgtcagtgccatccggcaggtcatcaccacccgcaagcaggcagtgggacctggtggtgtcaactcaggcccagtccagatcgtcaacaacaagtttctggcatggagtggtgtcatggagtggcaggagcccaggcctgagcccaacagtcggtccaagaggtggctgccatcccacgtctacgtgaaccagggggagatcctgaggaccgagcagtggccaaggaagctgtacatgcagctcatcccgcagcagctgctgaccaccctagtgccgctgttccggaactcgcgcctggtccagttccacttcaccaaggacctggagacactgaagagcctgtgccggatcatggacaatggcttcgccggctgcgtgcacttttcctacaaagcatcgtgtgagatccgcgtgcttatgctcctgtactcttcagagaagaaaatcttcattggcctcatcccccatgaccagggcaactttgtcaacggcatccggcgtgtcattgccaaccagcagcaggtcctgcagcggaacctggagcaggagcaacagcaacgagggatgggggggtagtggttaccccgggctgggcccctccaggagtcacagatgaggcccccgcagagactgtgcttgggagcctgtggccagcagcccccactgtacccctgcccccaggtgacacgcttctgagcaggggcccctggggacttcaactgcccagcaacatggaggatggtgtcctgaggcctccaaggacggtccccacccctctacgtttccccaataaagccttttaaaaaccaaaaaaaaaaaaaaaaaaaa

SEQ ID NO: 400214 - DNA, 1000 bp, Homo Sapiens; identical to SEQ ID NO: 289218

SEQ ID NO: 400215 - DNA, 1000 bp, Homo Sapiens; identical to SEQ ID NO: 222664

SEQ ID NO: 400216 - DNA, 1000 bp, Homo Sapiens
acacagaagttttataaccaagagagaaagaacaatggtgtctacaagattccaaaaggaaaattacactacaagtgatcatctgctacaacccaactactggccaggcaaggaaactcaactttagaaacatgatgactggaagtcatgtcttctaattggttgacattttgcaaacaaataaattgtaatcaaaagagctctaaatttgtaatttctttctcctttcaaaaaatgtctactttgttttggtcctaggcattaggtaatataactgataatatactgaaatatataatggaagatgcagatgataaaactaattttgaactttttaatttatataaattattttatatcatttacttatttcactttattttgctttgtgctcattgatatatattagctgtactcctagaagaacaattgtctctattgtcacacatggttatatttaaagtaatttctgaactgtgtaatgtgtctagagtaagcaaatactgctaacaattaactcataccttgggttccttcaagtattactcctatagtattttctcccatagctgtcttcatctgtgtattttaataatgatcttaggatggagcagaacatggagaggaagatttcattttaagctcctccttttccttgaaatacaataatttatatagaaatgtgtagcagcaaattatattggggattagaattttgaattaatagctctcctactattaatttacatgtgctttttgtgtggcgctataagtgactatggttgtaaagtaataaaattgatgttaacatgcccaattattgttcttttatgaattcaatgaatttaaaactattgttaaatataatactgccccactttaatatatgtaagcaacttcctacttatacacgacgtgttcctaaaacatgtttgaaaggtgaatttctgaaagtctcccataaatgtaggtgttacaacaggaaaaaaaaaaaaaaaaa

SEQ ID NO: 400217 - DNA, 1000 bp, Homo Sapiens; identical to SEQ ID NO: 289219

SEQ ID NO: 400218 - DNA, 1000 bp, Homo Sapiens; identical to SEQ ID NO: 222665

SEQ ID NO: 400219 - DNA, 1000 bp, Homo Sapiens; identical to SEQ ID NO: 115318

SEQ ID NO: 400220 - DNA, 1000 bp, Homo Sapiens; identical to SEQ ID NO: 117437

SEQ ID NO: 400221 - DNA, 1000 bp, Homo Sapiens; identical to SEQ ID NO: 222666

SEQ ID NO: 400222 - DNA, 1000 bp, Homo Sapiens; identical to SEQ ID NO: 222667

SEQ ID NO: 400223 - DNA, 1000 bp, Homo Sapiens; identical to SEQ ID NO: 289225

SEQ ID NO: 400224 - DNA, 1000 bp, Homo Sapiens; identical to SEQ ID NO: 289226

SEQ ID NO: 400225 - DNA, 1000 bp, Homo Sapiens; identical to SEQ ID NO: 222668

SEQ ID NO: 400226 - DNA, 1000 bp, Homo Sapiens; identical to SEQ ID NO: 289228

SEQ ID NO: 400227 - DNA, 1000 bp, Homo Sapiens; identical to SEQ ID NO: 289229

SEQ ID NO: 400228 - DNA, 1000 bp, Homo Sapiens; identical to SEQ ID NO: 117438

SEQ ID NO: 400229 - DNA, 1000 bp, Homo Sapiens
ctggacaaggtggagaccaagatggtgcagggaaaagctctactggacatagcacaaacttgcctgatcttgtctcggggctgggagattctgccaacagggttccatttgctcccttatctttttcccccacggcagccattcctggaatccctgagcctccctggctgccatccccggcttatccaagatctctgaggccagatggcatgaatccagctccacagttacaggatgagatacaaccacagctgccactgctgatgcaccttcaggcagccatggcaaacccccgtgccctgcaagccctgcggcagattgagcagggtctacaggtcctagctactgaagcacctcgcctcctactctggttcatgccttgcctagcagggacgggtagtgtggcaggaggtatagagtctagagaagatccccttatgtctgaggatcctctcccaaatccacctcctgaggtgttcccagcactggactctgcagagctgggcttcctttcccctccctttctccatatgctgcaagatttagttagtacaaatccccagcagctgcagcctgaggctcactttcaggtgcagctggagcaactgcggtccatgggctttctgaatcgtgaagccaatcttcaggccctcattgctacggggggcgacgtggatgctgctgtggagaagctgagacagtcgtaggagccttattcattcaaaccatacgttttcctctgtgcctttttcccatatcctagttccctagctctcccatttttgaatacagctgcattataaaccaaatttactatgaagtcctttgctgtggaggcaatgttgttccagagtcaacgaggaagactaatggccaaaacatagtggaggtgctgtgtgtgagtcaaccacttgtaccactataccactggggggccccagtctaagctctgcttatgcctatcttgagatgcaattacacccaatttccaatgtgaaaa

SEQ ID NO: 400230 - DNA, 1000 bp, Homo Sapiens
caacacctacctgcgggtcaatgtggccgatgaggtccagaggagcatgggcagcccccgacccaagaccacgtggatgaaggctgacgaggtggagaaatccagcagtggcatgccgattcgcatcgaaaacccaaaccaatttgtgcctctctatactgacccccaggaagtactggagatgaggaacaagattcgagaacaaaaccgacaagatgtgaagtcagcggggcctcagtcccagctcctggcgagcgtcattgccgagaagagccgaagcccggtagagcagaggctgcccctgactggcggggaaacgtgtttgccttgccttcggggtcttgtgcctggggctgggttgcaggacccctgatcctcatacccaccttcccctgtgatcttgggtgcctttgctcttgctgcaaatggaggccaacctcacaggggtgctgtgaggaccagggaggacaatgtctgatggcccctgtgggcactgggctggagaacacgagcccagcctgcctgcaggagtgatgcggccggcttccgtacctcctgccatggaactccactctgtcctccttactaccccgtgaagtggggactcataggcttggggctggagactcccaggtgccccaggtgtgcccagccctgagagtctctgagcctctagcctggtatgacatcatccaaccagagctctggaaagatgatcatgtacccatagagaaggggtatatagacaggacccatgctcctacaggatgggaagggacaatattacccacacaaacccacattgagttagaaagtattgtaattgtttttgtgcttgagatagaacagtgttttgtctagtgcttagcaaaaggggtgaagttcagaattctggcatgtgtttgaaatcactgctgctccttgcaaggtagcaatgggcatgcattttccttagcagtaaaaattggggaaatacaggaaatgttcctctctgcagggc

SEQ ID NO: 400231 - DNA, 1000 bp, Homo Sapiens; identical to SEQ ID NO: 289232

SEQ ID NO: 400232 - DNA, 1000 bp, Homo Sapiens; identical to SEQ ID NO: 117439

SEQ ID NO: 400233 - DNA, 1000 bp, Homo Sapiens; identical to SEQ ID NO: 222669

SEQ ID NO: 400234 - DNA, 1000 bp, Homo Sapiens
cggaacatgtcatttctctatttctgtgacgcgcccccatgcccccaccccaccacaagaggcaggagggcccagtcatgaccctcgtctctgcagggtgtctgtacacgttcttctgaaagctttagacagtaacagtttgcacatgaaaaataaagcgagcacctaaacaatgtgtggagcataactaaaacccacagcccaaccaaaccttgagaatgcgaaacattccagaggcagtagcctccaaagcacacagagcccctggccccgccgcggctctcactatctgtcaggggaggttgtacaggtgaatgagccggggggctcatgttcctgcctgcagaacatttctgtactagtgagaagagggaatatgcattgcagttcagcaaagccggaattctgtgttgaacagatgtctgtctccctagtgtgtgactcacaccttgtggctgccttcagagcgccacctccagatcagatggggacacacaacccctggatatgtttcattgtcagattttgtgcttgattttaagaatggaattgtgggtatctttcctttttttttaatgtatcttaactgttgcctgtcagtgtttacaaactagtgcgttgacggcaccgtgtccaagtttttagaacccttgttagccagaccgaggtgtcctggtcaccgtttcaccatcatgctttgatgttcccctgtctttccctcttctgctctcaagagcaaaggttaatttaaggacaaagatgaagtcactgtaaactaatctgtcattgtttttaccttccttttctttttcagtgcagaaattaaaagtaagtataaagcaccgtgattgggagtgtttttgcgtgtgtcggaatcactggtaaatgttggctgagaacaatccctccccttgcacttgtgaaaacactttgagcgctttaagagattagcctgagaaataattaaatatcttttctcttcaaaaaaaaaaaaaaaaaa

SEQ ID NO: 400235 - DNA, 1000 bp, Homo Sapiens; identical to SEQ ID NO: 293849

SEQ ID NO: 400236 - DNA, 847 bp, Homo Sapiens; identical to SEQ ID NO: 289234

SEQ ID NO: 400237 - DNA, 1000 bp, Homo Sapiens; identical to SEQ ID NO: 289235

SEQ ID NO: 400238 - DNA, 1000 bp, Homo Sapiens
ccagcgctgggatgtgcctgaggcggtggagtggatgtccaagctggccaagttcaagccattgtggattgaggagccaacctcccctgatgacattctggggcacgccaccatttccaaggcactggtcccattaggaattggcattgccacaggagaacagtgccacaatagagtgatatttaagcaactcctacaggcgaaggccctgcagttcctccagattgacagttgcagactgggcagtgtcaatgagaacctctcagtattgctgatggccaaaaagtttgaaattcctgtttgcccccatgctggtggagttggcctctgtgaactggtgcagcacctgattatatttgactacatatcagtttctgcaagccttgaaaatagggtgtgtgagtatgttgaccacctgcatgagcatttcaagtatcccgtgatgatccagcgggcttcctacatgcctcccaaggatcccggctactcaacagaaatgaaggaggaatctgtaaagaaacaccagtatccagatggtgaagtttggaagaaactccttcctgctcaagaaaattaagtgctcagccccaacaacttttttctttctgaagtgaaagggcttaaaatttcttggaaatagttttacaaaaatggatttaaaaaatcctaccgatcaagatgagttcagctagaagtcataccaccctcaggaatcagctaagtaattattacttgattcttttagcaaatcaatgcacgttatcctacttaatccttaaataagtttagatttaactaacccaaagtccaggaggatgttcttacaaaaatagctatatcaagggctggcacctagacattaaactgtaatttgaaaataagcaacatgttgcataacttgttggaataattccttgttctgtttaacacttgtcataaattagcagaataaaaatagtcgtgcaacaaaaaaaaaaaaaaaaaaaaaaaaaaaaaaaaa

SEQ ID NO: 400239 - DNA, 1000 bp, Homo Sapiens
tcagcctcgtgtccagcgacagctaaggtggtggaatcggtgaggagggggcttctcagtcctgtgccgtcctcccatccaggggagtggctggctcaagcctgggtccccgggctgagccctggattgggtatcgtggggcaggtcaccctggccacgatgcccccggcacacccaggcccccttcattagtgccttgctttgggccctgcagggggaggggtgacagggcgagcccccaccccagcagcagcaatacccccaccctcctgccctgtgcccaggtgttgggacagtcccaccctccctgctatttatatccctctgcctatttattgaatcgaacttcgcctctgtctccatctgtaaatatgtgtccccccaccggatgtcgccaccctcactcacctgcctcttcttgagctgtcctgggccctgccacccgtctgggctcctttgtgtagcattatcagcctcggtctggcctctggcacctcacccttgccatggctgaccccacccattccaaggcggggtcacggtaccagcagcacttggggtgaggcctccaaagcttcctcagaattgtggctgtgccacgctggaccacagggtccccctcaagcatctcggggccctattctctctgagcacctggagggctggactcaggcttgtgccagggcctgacttgggcctgggggccctagaacactcctcctcctgagcctactgccaaacgtcctcagtgttgtctgcacctgctccgactccttcagccgccccattcagcgcccgctccgtccagtgcccgccctgtggggccaaggcggccgtgccttactactctgtgtcttctgcctcctctgaggaatctggccctgtctgacagtcccagaccccccgttctctcctctttagttgcatgagtttttctttgttcatggaatgttttttcctgattaaatgttggggaaatgccaaaaaaaaaaaaaaaaaa

SEQ ID NO: 400240 - DNA, 1000 bp, Homo Sapiens; identical to SEQ ID NO: 117440

SEQ ID NO: 400241 - DNA, 1000 bp, Homo Sapiens; identical to SEQ ID NO: 222670

SEQ ID NO: 400242 - DNA, 1000 bp, Homo Sapiens; identical to SEQ ID NO: 117441

SEQ ID NO: 400243 - DNA, 1000 bp, Homo Sapiens; identical to SEQ ID NO: 117442

SEQ ID NO: 400244 - DNA, 1000 bp, Homo Sapiens; identical to SEQ ID NO: 289240

SEQ ID NO: 400245 - DNA, 1000 bp, Homo Sapiens; identical to SEQ ID NO: 222672

SEQ ID NO: 400246 - DNA, 1000 bp, Homo Sapiens; identical to SEQ ID NO: 289241

SEQ ID NO: 400247 - DNA, 1000 bp, Homo Sapiens
gccaaccgccaggctgctgaggcactaaggaatcttagaaacacacaaggaatactgaaggacactcagctacatttggatgatgccatcagaggccaagatgaccttaaggaacaattggcaatggttgagcgcagagctaacctgatgcaggctgaagttgaagagctcagggcatccctggaacggactgagagaggcaggaaaatggcagagcaagagcttctggatgccagtgaacgtgtgcaacttctgcacactcagaacaccagcctgatcaacaccaagaagaagctggaaacagacatttcccaaatccagggagagatggaggacatcgtccaggaagcccgcaatgcagaggagaaggccaagaaggccatcactgatgctgccatgatggctgaggagctgaagaaggaacaggacaccagcgcccacctggagcggatgaagaagaacatggagcagaccgtgaaggatctgcagctccgtctgggtgaggctgagcagctggcgctgaagggtgggaagaagcagatccagaaactggaggccagggtgagagagcttgaaagtgaggtggaaagtgaacagaagcacaatgttgaggctgtcaagggtcttcgcaaacatgagagaagagtgaaggaactcacttaccagactgaggaggaccgcaagaatattctcaggctgcaggacttggtggacaaattgcaaaccaaagtcaaagcttacaagagacaagctgaagaggctgaggaacaatccaatgtcaaccttgccaagttccgcaagctccagcacgagctggaggaggccgaggaacgggctgacattgctgagtcccaagtcaacaagctgagagtgaagagtcgggaggttcacacaaaagtcataagtgaagagtaattcattctaatgaaagaaaatgtgaccaaagaaatgcacgaaatgtgaagttctttgtcactgtcctgtatatcaaggaaataaa

SEQ ID NO: 400248 - DNA, 1000 bp, Homo Sapiens
gatacccagatccacctggatgatgctctccggagccaggaggacctgaaggaacagctggccatggtggagcgcagagccaacctgctgcaggctgagatcgaggagctgcgggccactctggaacagacagagaggagcagaaaaatcgcagaacaggagctcctggatgccagtgagcgtgttcagctactgcacacccagaacaccagcctgatcaacaccaagaagaagctggagacagatatttcccaaatgcaaggagagatggaggacattctccaggaagcccgcaatgcagaagaaaaggccaagaaggccatcactgatgccgccatgatggctgaggagctgaagaaggagcaggacaccagcgcccacctggagcggatgaagaagaacatggagcagaccgtgaaggatctgcagctccgtctggatgaggctgagcagctggccctgaagggtgggaagaagcagatccagaaactggaggccagggtacgggagctggaaggagaggttgagagtgagcaaaagcgtaatgctgaggctgtcaaaggtctgcgcaaacatgagaggcgagtgaaggaactcacttaccagacggaagaagatagaaagaatattctcaggcttcaagatttggtagataaacttcaggcaaaagtgaaatcttataagagacaagctgaggaggctgaggaacaatccaacaccaatctagctaaattccgcaagctccagcatgagctggaggaggccgaggaacgggctgacattgctgagtcccaggtgaacaaactgcgggtgaagagccgggaggttcacacaaaagtcataagtgaagagtgatcatgtcctgatgccatggaatgactgaagacaggcacaaaatgtgacatctttggtcatttccctctgtaattattgtgtattctaccctgttgcaaaggaaataaagcatagggtagtttgcaaacaaaaaaaaaaaaaaaaa

SEQ ID NO: 400249 - DNA, 1000 bp, Homo Sapiens; identical to SEQ ID NO: 220420

SEQ ID NO: 400250 - DNA, 1000 bp, Homo Sapiens; identical to SEQ ID NO: 289243

SEQ ID NO: 400251 - DNA, 1000 bp, Homo Sapiens; identical to SEQ ID NO: 222673

SEQ ID NO: 400252 - DNA, 1000 bp, Homo Sapiens; identical to SEQ ID NO: 117443

SEQ ID NO: 400253 - DNA, 1000 bp, Homo Sapiens; identical to SEQ ID NO: 289248

SEQ ID NO: 400254 - DNA, 1000 bp, Homo Sapiens; identical to SEQ ID NO: 289249

SEQ ID NO: 400255 - DNA, 1000 bp, Homo Sapiens; identical to SEQ ID NO: 117445

SEQ ID NO: 400256 - DNA, 1000 bp, Homo Sapiens; identical to SEQ ID NO: 289252

SEQ ID NO: 400257 - DNA, 1000 bp, Homo Sapiens; identical to SEQ ID NO: 117446

SEQ ID NO: 400258 - DNA, 1000 bp, Homo Sapiens
aaaaatccctttggacgattgaacccaatgaaggcatggttcctccagaaactgatgttcaactggcactgaccgccaacctgaatgacacactgacattcaaggactgtgttattttggacattgaaaatagcagtacctatcggattcctgttcaggcttccggaactggttccactattgtttcagataagccctttgctccagaactcaatttgggggcacattttagcctggatacccactattaccactttaagttgatcaacaagggacgtcggatccaacagttgttctggatgaatgatagcttccgaccccaggccaagctgagtaagaagggccgggttaagaagggacatgctcatgtccaaccccagcccagtggctctcaggagcccagggatccacagagccccgtgtttcatctccaccccgccagcatggagctgtacccaggccaggcaattgatgtgatactcgaaggctattctgctactcccagggtaaggggatagcacatttggaagctattgttttttcctaaataaatctctactgtatctatttcttaggaaagtcccttgacatttatctgaggaaggatatggtttctcaaggattgtgtacaatcctgagttaccatagtagcatccgttgctttcggggtgcagctctgctcagtcttcaatttgtttctgtagctactgtgaacccaatcttaaaggaggttctcatgcccagggtccacagtgaccagccagcaagtctctggtagaaaaacacccagtttttagccaaagcaaattctcctattaacacttagcaggatgaatttaatattcattcaaaaagggtgtttatatcgacactctgggctgcctctcctattcaggtattgggacatccctgttcctttctttccagcctgactgcaactcacatttcaaaacatcttctttttatgcattaataaaagagccacatttatcttcagcaa

SEQ ID NO: 400259 - DNA, 1000 bp, Homo Sapiens; identical to SEQ ID NO: 289255

SEQ ID NO: 400260 - DNA, 1000 bp, Homo Sapiens; identical to SEQ ID NO: 222677

SEQ ID NO: 400261 - DNA, 1000 bp, Homo Sapiens
ggtttggactcggatgaacccttcgggggtcaagcccaccccacggtctggcttttccgtggccatggccccgaatcaccagacactgttcttcgggggtgtctgtgacgaggaagaggaggagagcctgtcgggcgagttcttcaacgatctgtacttctacgacgccaccaggaaccgttggtttgagggacagctgaagggacccaagtctgaaaagaagaaacgcaggcggggcagaaaagaggagcccgaaggtggtagcaggccggcgtgtgggggagctggcacccaggggcctgtgcagctggtcaaggaggtggtggccgaggatggcaccgtggtcaccattaagcaggtgctcaccgcgccaggctcggcggggcagccccggtctgaggacgaagacagccttgaggaggccggcagccccgcacctgggccgtgtccacgctccaacgccatgctggctgtgaagcatggggtgctctacgtctatgggggcatgtttgaggccggcgaccgccaggtcaccctcagcgacctgcactgcctggacctgcacaggatggaggcgtggaaggccttggtggagatggacccagaaactcaggagtggctggaggagacggactcggaagaggacagtgaggaggttgagggcgccgagggtggggtcgacgacgaagacagcggagaggagagcggtgcggaggactgagaagagcccctgccaggggcgcctggcaagtgctgtgcccacgtccgcccaggacccagccgtgttgagtgaagctcttggggccagcgtgcgtcctgacgcacaggagagagctgaaggtgggtggcccaggccagggtgtgaactttctcccatggtttagtctctgacgcggcactgggccggaagttcaactgagtgcagtgcaggtggattccctcagcagcctgtgtgttgtgtgaaataaattggacttgaaacaagaaaaaaaaaaaaaaa

SEQ ID NO: 400262 - DNA, 1000 bp, Homo Sapiens
gcaatgcaggcagcttctcaagcaggtgttccatttggtttaaaaaatacttcaagtctcaggcccttaaatctactccagcttccaggtggttcacttatttttaacactctgcagcagcagcaacagcagctctcccagtttacaccacaacaacctcagcagcccacaacttgtagtcctcaacagccaggggagcagggttctgagcaaggttcaaccagtcaagaacaggccttatctgctcagcaagctgctgttattaaccttactggagtaggaagttttatgcagtcacaggcagctgcagttgcgattcttgcagcatcaaatggctatggcagcagcagcagcacaaacagctcagctacatcatcatcggcatacaggcagccagtcaaaaagtaaaatgaagagaggcacgccaaccactccaaaattttgagtcttgcattactttttgttccttttttaaaaacacaagagcactgaatcaaaagaattgagtttctactttttgttttttttaatgtgtcagtattttacattgctagatgtacaaactttatacagaagcacaaccttatcatttttaaataaaaacagggaaatggtttaacaaaaaaaaagacctccccagcccctagcccaggagagagaaagccaggcaggtagccagggggactagcccctgtggagactggggggcttgaaattgtccccgtggtctcttactttcctttccccagcccagggtggacttagaaagcaggggctacaagagggaatccccgaaggtgctggaggtgggagcaggagattgagaaggagagaaagtgggtgagatgctggagaagagaggagaggagagaggcagagagcggtctcaggctggtgggaggggcgcccacctccccacgccctcccctcccctgctgcaggggctctggagagaaacaataaagagattcacacaaaaaaaaaaaaccggaattaagcc

SEQ ID NO: 400263 - DNA, 1000 bp, Homo Sapiens; identical to SEQ ID NO: 289257

SEQ ID NO: 400264 - DNA, 1000 bp, Homo Sapiens
tccacccacttctgggatgagaacccacagggcgtgtggaccctgggcctagagaacaagggctactatttcaacacggggacgttgtaccgctacacgctgctgctctatgggacggccgaggacatgacagcgcggcctacaggcccccaggtgaccagcagcgcgtgtgtgcagcgggacacagaggggctgtgccaggcgtgtgacggccccgcctacatcctgggacagctctgcctggcctactgccccccgcggttcttcaaccacacaaggctggtgaccgctgggcctgggcacacggcggcgcccgcgctgagggtctgctccagctgccatgcctcctgctacacctgccgcggcggctccccgagggactgcacctcctgtcccccatcctccacgctggaccagcagcagggctcctgcatgggacccaccacccccgacagccgcccccggcttagagctgccgcctgtccccaccaccgctgcccagcctcggccatggtgctgagcctcctggccgtgaccctcggaggccccgtcctctgcggcatgtccatggacctcccactatacgcctggctctcccgtgccagggccacccccaccaaaccccaggtctggctgccagctggaacctgaagttgtcagctcagaaagcgaccttgcccccgcctgggtccctgacaggcactgctgccatgctgcctccccaggctggccccagaggagcgagcaccagcacccgacgcctggcctgccagggatgggccccgtggaaccccgaagcctggcgggagagagagagagagaagtctcctctgcattttgggtttgggcgggagtgggctggggggagaggctggagcaccccaaaagccaggggaaagtggagggagagaaacgtgacactgtccgcctcgggcaccgcgtccaacctcagagtttgcaaataaaggttgcttagaaggtgaaaaaaaaaaaaaaaaaa

SEQ ID NO: 400265 - DNA, 1000 bp, Homo Sapiens; identical to SEQ ID NO: 117447

SEQ ID NO: 400266 - DNA, 1000 bp, Homo Sapiens; identical to SEQ ID NO: 117448

SEQ ID NO: 400267 - DNA, 1000 bp, Homo Sapiens; identical to SEQ ID NO: 117449

SEQ ID NO: 400268 - DNA, 1000 bp, Homo Sapiens; identical to SEQ ID NO: 117450

SEQ ID NO: 400269 - DNA, 1000 bp, Homo Sapiens
cttagcccaggtggggcttggcagaagcgggcgggtgtggaagatattccatctggggccaaccccaggctgggcctgcgctgagcttctggagcgcaggtactgggtcttgctaagtgaactgtttcccaggaacacctctcgggcccatctgcgtctgaggctgggagtggcatctgaggccgggagtggcatctgaggccaggagtggcaggctggtgggctgggcgtggggttttctgggccctgcccagtactgccctggggacttggtgggctcctgggtcagcagcatcccacccctgggagtctggccagctgagccccagggtggcaggggcattatagcctggtggacatgtgccttcagggttcctccggggccaccttcctcaggccagtgctgggttcaaagggctgtgtgtgtgtgtgtgtgtgtgtgtgtatgtatatgtgtgtgggtgcacacatctgtcccatgtatgcagtgagacctgtctacctcccacaaggagcaagggctctgcccgccctctgctcattcctacccaggtagtgggaccccgggcccccttctgcctggcttgcctgcttctgccctttccagaggggtctcactgacagccagagacagcaggagaagggttggctgtggatcaaggaaggctgcccctgtaccctgtggggaaatggtgggtgcatggctggatgcagaggtggaaggccctgggccacaggcgagagtgggcgtgtcacctgtcccaggttcccagcaagtctgcagctgtgcagtcctggggtccctgaccctgtcgcccagggggcgtgctgtccagcaggggccctgccttgcaaggaacgtctcttccggcggctgggccgctcctgcctggtctgggctgtgtgtggcgccctttccttcttgtttgttcctctgtgttctgtgtgcgtcttaagcaataaagcgtggccgtggctcgcgaaaaaaaaaaaaaaaaaa

SEQ ID NO: 400270 - DNA, 1000 bp, Homo Sapiens; identical to SEQ ID NO: 222682

SEQ ID NO: 400271 - DNA, 1000 bp, Homo Sapiens; identical to SEQ ID NO: 289265

SEQ ID NO: 400272 - DNA, 1000 bp, Homo Sapiens; identical to SEQ ID NO: 289266

SEQ ID NO: 400273 - DNA, 1000 bp, Homo Sapiens; identical to SEQ ID NO: 117453

SEQ ID NO: 400274 - DNA, 1000 bp, Homo Sapiens; identical to SEQ ID NO: 117454

SEQ ID NO: 400275 - DNA, 1000 bp, Homo Sapiens; identical to SEQ ID NO: 117455

SEQ ID NO: 400276 - DNA, 1000 bp, Homo Sapiens; identical to SEQ ID NO: 117456

SEQ ID NO: 400277 - DNA, 1000 bp, Homo Sapiens; identical to SEQ ID NO: 222685

SEQ ID NO: 400278 - DNA, 1000 bp, Homo Sapiens; identical to SEQ ID NO: 222686

SEQ ID NO: 400279 - DNA, 1000 bp, Homo Sapiens; identical to SEQ ID NO: 289273

SEQ ID NO: 400280 - DNA, 1000 bp, Homo Sapiens; identical to SEQ ID NO: 117457

SEQ ID NO: 400281 - DNA, 1000 bp, Homo Sapiens; identical to SEQ ID NO: 222687

SEQ ID NO: 400282 - DNA, 1000 bp, Homo Sapiens; identical to SEQ ID NO: 117458

SEQ ID NO: 400283 - DNA, 1000 bp, Homo Sapiens; identical to SEQ ID NO: 222689

SEQ ID NO: 400284 - DNA, 1000 bp, Homo Sapiens; identical to SEQ ID NO: 289278

SEQ ID NO: 400285 - DNA, 1000 bp, Homo Sapiens; identical to SEQ ID NO: 289279

SEQ ID NO: 400286 - DNA, 1000 bp, Homo Sapiens; identical to SEQ ID NO: 289280

SEQ ID NO: 400287 - DNA, 1000 bp, Homo Sapiens; identical to SEQ ID NO: 117459

SEQ ID NO: 400288 - DNA, 1000 bp, Homo Sapiens; identical to SEQ ID NO: 222693

SEQ ID NO: 400289 - DNA, 1000 bp, Homo Sapiens; identical to SEQ ID NO: 117460

SEQ ID NO: 400290 - DNA, 1000 bp, Homo Sapiens; identical to SEQ ID NO: 222696

SEQ ID NO: 400291 - DNA, 1000 bp, Homo Sapiens; identical to SEQ ID NO: 289287

SEQ ID NO: 400292 - DNA, 1000 bp, Homo Sapiens; identical to SEQ ID NO: 222697

SEQ ID NO: 400293 - DNA, 1000 bp, Homo Sapiens; identical to SEQ ID NO: 117461

SEQ ID NO: 400294 - DNA, 1000 bp, Homo Sapiens; identical to SEQ ID NO: 289290

SEQ ID NO: 400295 - DNA, 1000 bp, Homo Sapiens; identical to SEQ ID NO: 117462

SEQ ID NO: 400296 - DNA, 1000 bp, Homo Sapiens; identical to SEQ ID NO: 289292

SEQ ID NO: 400297 - DNA, 1000 bp, Homo Sapiens; identical to SEQ ID NO: 117463

SEQ ID NO: 400298 - DNA, 1000 bp, Homo Sapiens; identical to SEQ ID NO: 289294

SEQ ID NO: 400299 - DNA, 1000 bp, Homo Sapiens
aacgagttttaactgaaatctccttggggagtctcctgatcctggtggtaataagaaccattcaatacaacatgactaggacacgagacaagtaccttcacacaaattgtttggcagctttagcaaatatgtcggcacagtttcgttctctccatcagtatgctgcccagaggatcatcagtttattttctttgctgtctaaaaaacacaacaaagttctggaacaagccacacagtccttgagaggttcgctgagttctaatgatgttcctctaccagattatgcacaagacctaaatgtcattgaagaagtgattcgaatgatgttagagatcatcaactcctgcctgacaaattcccttcaccacaacccaaacttggtatacgccctgctttacaaacgcgatctctttgaacaatttcgaactcatccttcatttcaggatataatgcaaaatattgatctggtgatctccttctttagctcaaggttgctgcaagctggagctgagctgtcagtggaacgggtcctggaaatcattaagcaaggcgtcgttgcgctgcccaaagacagactgaagaaatttccagaattgaaattcaaatatgtggaagaggagcagcccgaggagttttttatcccctatgtctggtctcttgtctacaactcagcagtcggcctgtactggaatccacaggacatccagctgttcaccatggattccgactgagggcaggatgctctcccacccggacccctccagccaagcagcccttcaagttcttttatttctgggtaacagaagtagacagacaggttacttggtgtatcttctgttaaagaggattgcacgagtgtgttttcctcacacactttgatttggagaattggtgctagttggcaatagataactcagcgtagatagtattgcaaaaaggggaggaaatacacaacaataataaatgtaaaaacctgctattcaaaaaaaaaaaaaaaaaa

SEQ ID NO: 400300 - DNA, 1000 bp, Homo Sapiens; identical to SEQ ID NO: 289295

SEQ ID NO: 400301 - DNA, 1000 bp, Homo Sapiens
agaactacttgcatttgatttttttttcagtccttaaaacattatttctttttttcactcatagccacttttatgttaccttttataagcactccagggaagattttatatttttttgtagagtttttggaaagatatttactcaaaataactatgctttagaactttttttttttttttttttttggttaaacagcagcactttttagttccctaaactttagaagaaatgctatcagaaatagatttccttccagtggaaagaaaggaggaagggagaattgagaaaatatattagtctattattttagagttctaatacactctaaattatagagaaaattgagagtaaatgactgtcttatcactcttatttgacatttcgtaggtgtaagagaaatggaaatgaatggtttcaacaaagatcatttaatacagcagagcatggcatgaccaagcatctttgtaaagtgttagatggaaaatgctgtgtgctgccatggtaatcagaaataataacctgttagggatgtattctaggaaatcagaagtagttctcttttcttgctggattattgcttagataactcttgttttctggtaaaactttagttgtattgccatccactcctttttcaaatgagtttaatgccataaagctgatattctttgtccgattaatttgaaatctgcacagaagctgttttagtcattaatgtgtaacaaaagtagcttatagaatatggactgccttattgctgttgcttatcatttgaaaataaaatccagctcaggttgtaacttgttggtacttgtttagtgagttcgttttggaggttctgaaatacctattaattcttaatattacctctcttggaaagacacaaaaaaagagctgttatttttaggcataagatgacttaggaggcccatagaaacgttctcgtttaaacaacaacaacaaaataaatttatcagcactagaaaaaaaaaaaaaaaa

SEQ ID NO: 400302 - DNA, 1000 bp, Homo Sapiens; identical to SEQ ID NO: 222698

SEQ ID NO: 400303 - DNA, 1000 bp, Homo Sapiens; identical to SEQ ID NO: 222699

SEQ ID NO: 400304 - DNA, 1000 bp, Homo Sapiens; identical to SEQ ID NO: 222700

SEQ ID NO: 400305 - DNA, 1000 bp, Homo Sapiens; identical to SEQ ID NO: 222701

SEQ ID NO: 400306 - DNA, 1000 bp, Homo Sapiens; identical to SEQ ID NO: 289300

SEQ ID NO: 400307 - DNA, 1000 bp, Homo Sapiens; identical to SEQ ID NO: 289301

SEQ ID NO: 400308 - DNA, 1000 bp, Homo Sapiens; identical to SEQ ID NO: 117465

SEQ ID NO: 400309 - DNA, 1000 bp, Homo Sapiens; identical to SEQ ID NO: 289303

SEQ ID NO: 400310 - DNA, 1000 bp, Homo Sapiens; identical to SEQ ID NO: 117466

SEQ ID NO: 400311 - DNA, 1000 bp, Homo Sapiens; identical to SEQ ID NO: 289305

SEQ ID NO: 400312 - DNA, 1000 bp, Homo Sapiens; identical to SEQ ID NO: 222702

SEQ ID NO: 400313 - DNA, 1000 bp, Homo Sapiens; identical to SEQ ID NO: 222703

SEQ ID NO: 400314 - DNA, 1000 bp, Homo Sapiens; identical to SEQ ID NO: 222704

SEQ ID NO: 400315 - DNA, 1000 bp, Homo Sapiens; identical to SEQ ID NO: 289310

SEQ ID NO: 400316 - DNA, 1000 bp, Homo Sapiens; identical to SEQ ID NO: 289311

SEQ ID NO: 400317 - DNA, 1000 bp, Homo Sapiens
cagatgtgcatgaactagaaaagaaactaaaagtccgtgatgagccaccagaagagatctgtacctgctctcaattaggaaacatattatcccagcatctgggaagtcctttgaccaatcctcttggctttatgggtatcaatggagacctgaataccctgatggagaatggcaccctatccagggaaggaggcctccgagctcagatggatcaagtaaaaagccagggtgcagacctccaccataactgttgtgagattgtgggcagccttagggccataaatatctctggggatgtgggcatctctgaggccatgggcatctctggagacatgtgcacctttgaggctacgggcttctccaaagacttaggaatctgtggggccatggacatctctgaggccactggcatctctggaaacttgggtatttctgaggccaggggtttctctggggacatgggcatcttgggggacacaggcatctccaaggccagcaccaaggaggcagactactccaagcatcagtgagttagttactcatcttccatgctaggtatacctacagcagctacaatgattcttgtcccagagagggctatgctgcttttccaattggtttaagtgggtgaagccagggcacccctctccccacttaagtctggaagggaattactttactgattaagtgaccaatatgttcatattaagcagtacagagtgtaggcaagagaaagaatatgttattgttctaaaatgggatttaactatagaaatgttgcctctcagctgagacacatattaagctggttctactgtctgttttccttaattatcgacctgccctattttctatcctcactgcagtaatgtgaaagtgaagtggaaatattgtcacaatggtcaataatgacccttttgagggtatggagagatggtatacagcaggtaactgtgaattgcagaataaattgaaagaaaattttaaaaaaaaaaaaaaa

SEQ ID NO: 400318 - DNA, 1000 bp, Homo Sapiens; identical to SEQ ID NO: 289313

SEQ ID NO: 400319 - DNA, 1000 bp, Homo Sapiens; identical to SEQ ID NO: 289314

SEQ ID NO: 400320 - DNA, 1000 bp, Homo Sapiens; identical to SEQ ID NO: 289315

SEQ ID NO: 400321 - DNA, 1000 bp, Homo Sapiens; identical to SEQ ID NO: 117468

SEQ ID NO: 400322 - DNA, 1000 bp, Homo Sapiens; identical to SEQ ID NO: 222706

SEQ ID NO: 400323 - DNA, 1000 bp, Homo Sapiens; identical to SEQ ID NO: 117469

SEQ ID NO: 400324 - DNA, 1000 bp, Homo Sapiens; identical to SEQ ID NO: 222708

SEQ ID NO: 400325 - DNA, 1000 bp, Homo Sapiens
acaaaaatcactgaattcctaagagttccttaaataagcagtactagttacaaatcacagtataagatttaagtgcctgggggaaggatacaatttttagaaattacatattgggtcagttttgttttgtttttggtgaggaaaaggtggtaaataggaaaccatgaatgggaaggatggcaataagtagcaactatactttccaatgactaaagaaagaaaatctcagtatattcgttctcatgaagacacagtcagacactggacaatgtaatgtatgcaactgcaaacgttacaactgcagccagaacaatggctgggtggatcgcacgtaaagcttgccactaaaaatcaaagcagaggttaacaggaaacctggggggagtgtggaaaagggaaaactgttttagctgaataaaggtgaattatataatttataatagctgtggatgagcacaggagagagaggaaagaaaagaacagtcgaaatgagcaactcaccttaccctctgaccctgattagacaggatcaattgtaaagtgagggcttctccatgacaccatagttctgcccaatactgcatttgggataagaaattctacacttggatgtctcgcttcacaataaaacacagcttaaaaataaaataactgaaagaaatagaattcagcaaatagttattttttgcacttgaactgaaacgtactgtactgtaaattatgactcattttaagtgacctttaaaatcagatgtatttattatgcttgtgtaattatagaaataaagaaatgggtgacaggcttaacctcacctatgaatgtacagtatgtggatttgtgaaactgactgtaggaagtcaaaaacttgtactgtatcttgtgtttacagttctgatttattcctttgaaaagcctgctgttttggaaatgcacagttgacatgttgaaataaaaatgaataccatttttaaaaaaaaaaaaaaaaaaaaaaaaaaaaaa

SEQ ID NO: 400326 - DNA, 1000 bp, Homo Sapiens; identical to SEQ ID NO: 117470

SEQ ID NO: 400327 - DNA, 1000 bp, Homo Sapiens; identical to SEQ ID NO: 222709

SEQ ID NO: 400328 - DNA, 1000 bp, Homo Sapiens; identical to SEQ ID NO: 222711

SEQ ID NO: 400329 - DNA, 1000 bp, Homo Sapiens; identical to SEQ ID NO: 289323

SEQ ID NO: 400330 - DNA, 1000 bp, Homo Sapiens; identical to SEQ ID NO: 117472

SEQ ID NO: 400331 - DNA, 1000 bp, Homo Sapiens; identical to SEQ ID NO: 222712

SEQ ID NO: 400332 - DNA, 1000 bp, Homo Sapiens; identical to SEQ ID NO: 222714

SEQ ID NO: 400333 - DNA, 1000 bp, Homo Sapiens; identical to SEQ ID NO: 289326

SEQ ID NO: 400334 - DNA, 1000 bp, Homo Sapiens; identical to SEQ ID NO: 222716

SEQ ID NO: 400335 - DNA, 1000 bp, Homo Sapiens; identical to SEQ ID NO: 222717

SEQ ID NO: 400336 - DNA, 1000 bp, Homo Sapiens; identical to SEQ ID NO: 222718

SEQ ID NO: 400337 - DNA, 1000 bp, Homo Sapiens
ccggattcgggagccactgacagcccagcagttggagacgacgacagagaggtggctggtcattgaccctgtgccggcagctgtgcccacagttgctgggcccaaagggaaggcccctcctgtgcctgcccctgcaagggagtcagggaacagatcagcccggcccctgcatagcctcagtgtgctggcgtttgaccaagagcgtctggagcggaagatcctggccctcaggcaggcgcggcggccggtgcccccagaagtggcccagcagtaccaggacatcatgcaacgcagccagtggcagagggcacagctggagcaggggggtgtgggcatccgacgggaatacgcagcccagctggagcggcagctgcagttctacacggaggctgcccggcgcctgggcaacgatggcagcagggatgctgcaaaggaggcgctctataggcggaatctggtagagagtgagctgcagcggctccgcaggtgaggagcccatggggcgggcaacccccagaaagcgggcagcaggccccgataccgggaagagccgacacagccacgaaccagacaagcagacaatcagcggacaatcggttctggactcacccctcatccgggcccccagccccgccagagcctccgtggctgcgggtgttgggaaccatgcctgccagccagtatgtgcccctcacccaggcctggctgggccctggagagtcctgtttgcacagcccaggggtgtccggcctctggcccgccccggagcagggagggtggctggggccaagccccgagggcccctgcaagcactttacttcctgttcctccccagccttaaccccaaagccctcctgcaccccaaagaagccactgaggctggccgagccacactgtctccccaggggcgtcgacctggcccagctgggtccccagggccagcacatggaataaaatagccagggccacactcaaaaaaaaaaaaaaaaaaaaaaaaaaa

SEQ ID NO: 400338 - DNA, 1000 bp, Homo Sapiens; identical to SEQ ID NO: 117473

SEQ ID NO: 400339 - DNA, 1000 bp, Homo Sapiens; identical to SEQ ID NO: 117474

SEQ ID NO: 400340 - DNA, 1000 bp, Homo Sapiens
cagtccctcaggaaagggaagaaaaagaagaggtggcaccatgaagaggagaagatgggggtcttggaggaaggaggaaaaggcaaggaggctgcaggcagtgtcaggacagaggaggtagagagcagggcatatgctgacccatgcagccgaagaaagaagaggcagcaacaggaggaggaggacttgaacctagaagatagaggtgaggaaacttttaggtggtggaaccagggaagcagagagcagagcatgcagtgatggaagaagcaggaaaagcaagaagaaaagacagcagcatcaagaggaggaggacatcttggatgtaagggatgagaaggatggcggggctagggaagcagagagcagagcacacactggctcaagcagcagaggtaagaggaagaggcagcagcatcccaagaaggaaagagctggagtcagcactgtccagaaagccaaaaagaaacagaagaagagagactaaaggtctggtaaaggtagggctcaattgattgattttcaggagttgaagcctcaaagaccagggttgatgcaggtctgcaggtcttctgcacccccctcaatgaggagtccctcccagaaaggaaactgatctctgggacgtcagctgctgagaggagcaagcggtagtaccaccccttagttgagggagtcagcacagtcctttctgcagcttctaacccaggaccatgaactcaggtgcctagagaagccaggcagctaaaggacaaggaatgctgggggctgtgggaacaggaatgcagataccctttgaaggagcattcctgctaaaagaagctgaaaatgtagacctatgtgaagtgctctgatttctaaatattgtgaaggttaagaaaaacataaatttaggtctatgggctagatttagcccacagttgccagtttctagcgctaccaaatgaatgaataaacatgagcttgcgctcctagcctagagataaaaaaaaaaaaaaaa

SEQ ID NO: 400341 - DNA, 1000 bp, Homo Sapiens; identical to SEQ ID NO: 117476

SEQ ID NO: 400342 - DNA, 1000 bp, Homo Sapiens; identical to SEQ ID NO: 222719

SEQ ID NO: 400343 - DNA, 1000 bp, Homo Sapiens; identical to SEQ ID NO: 117477

SEQ ID NO: 400344 - DNA, 1000 bp, Homo Sapiens; identical to SEQ ID NO: 294066

SEQ ID NO: 400345 - DNA, 1000 bp, Homo Sapiens
cgaggggctgtaccggggacccacgccaggtggccagtgcatctggaaacccaactcaatgccccccgaccatgagcgaaacttcggcttcacccagtttgccttggagctgaatgagctgacagcagagctgaaacggtcgctgccttccaccgacacgagactccggccagaccagaggtacctggaggaggggaacatacaggccgctgaggcccagaagagaaggatcgagcagctgcagcgagacaggcgcaaagtcatggaggaaaacaacatcgtacaccaggctcgcttcttcaggcggcagacggatagcagcgggaaagagtggtgggtgaccaacaatacctactggaggctgcgggccgagccaggctatgggaacatggatggggccgtgctctggtagccctggccccgggggcaggaggctctggttcctcactcctcctgcctccaccccctaccatggacacatgggtgaggccgggctccccgcctcactgcccttctgcccatctccagcatcttcttccccttccctggccctgcagggccttctccagctccctttggttagtccctggccatccctcctgtcctggatcccttctccctaactgcaaaatgcctgcagcttccagctccttcgtccctgatcctcaagcggttccctcccgtctcagctcagcggatcccccagagtggaggaggcctctccatgaggaggggagcagcccaaggcacctgtcctctgacccaccggcagcgagtgcgcaggtgtgagtgtaagttcatgtaggagagtgtatgcgtgtgcgcctgtgccctgcttgcaggcaagcagggctccctcatgtagccccgccttccccctgctgggggtccaccacatcgctgctctttctcacagtctgcctctgatgagggcgaattgctatgacattccaagctccaataaagactgtcccagactttgaaaaaaaaaaaaaaaaaa

SEQ ID NO: 400346 - DNA, 1000 bp, Homo Sapiens; identical to SEQ ID NO: 117478

SEQ ID NO: 400347 - DNA, 1000 bp, Homo Sapiens; identical to SEQ ID NO: 222720

SEQ ID NO: 400348 - DNA, 1000 bp, Homo Sapiens; identical to SEQ ID NO: 222721

SEQ ID NO: 400349 - DNA, 1000 bp, Homo Sapiens; identical to SEQ ID NO: 289338

SEQ ID NO: 400350 - DNA, 1000 bp, Homo Sapiens; identical to SEQ ID NO: 222722

SEQ ID NO: 400351 - DNA, 1000 bp, Homo Sapiens; identical to SEQ ID NO: 117479

SEQ ID NO: 400352 - DNA, 1000 bp, Homo Sapiens; identical to SEQ ID NO: 117480

SEQ ID NO: 400353 - DNA, 1000 bp, Homo Sapiens; identical to SEQ ID NO: 289342

SEQ ID NO: 400354 - DNA, 1000 bp, Homo Sapiens; identical to SEQ ID NO: 117481

SEQ ID NO: 400355 - DNA, 1000 bp, Homo Sapiens; identical to SEQ ID NO: 222726

SEQ ID NO: 400356 - DNA, 1000 bp, Homo Sapiens; identical to SEQ ID NO: 289344

SEQ ID NO: 400357 - DNA, 1000 bp, Homo Sapiens; identical to SEQ ID NO: 117482

SEQ ID NO: 400358 - DNA, 1000 bp, Homo Sapiens; identical to SEQ ID NO: 289346

SEQ ID NO: 400359 - DNA, 1000 bp, Homo Sapiens
agctgactgggaactggacatgtggaagagctgctggctgcatcagggaacaggaggaggaagagggtcagggtggagaggaagatcagtcagtgggcacaagacagtcaaatgggcaaggcctgcctcggggaactagaaccttccaggatctggagcccgggagagccacactgtgggcttaatgtgaatagaggaacaagtgggtatctctgccaggcaccccactttctcctagtaacatgggctcaggggactcagccctggacagagagcctccagagagtgaacagtcttccagatctgggccaatcatcctggacagaggcccgcgaggcagctttgccctgtccacctgttgggtgggcagagccaccaggaacccagacaccacctccaactctgagccttccagagcttcagcctctcttcgtcgtcttaccccactgaaaccaacagggatcgggccaggctcccagattcttgaggacagggacttcggcatttactaatgggggactactgtggggtaagggggcgcctgcttgcctgatacaggatggggtcaagggacagtgggcaggtcctcactcaggagtggggggtgtaggctggccagcccccagggcttgtccaccagtcttctccccgcaaggccctcagagcagcgcctgtgggtgtcagtattacctgagcctaggccaaagctagcccaaggctggggaaggggaggagactccaggtcagaatgtgaggtctcagtctgtgatttaaggtgttgcatgtggactcttaactgtacgtgtagtttctagtggagaaatcaaggctctgatcattttgtttttagtatgaaaatgtgatttcctttctgtttgtaactcatcatagaaacattgtggtgggaggagaggggatagtctacagctaatgagggaaacaccaaagatcacatcattaaaatgatgacatgcccctcaaaaaaaaaaaaaaaaaaaag

SEQ ID NO: 400360 - DNA, 1000 bp, Homo Sapiens
atcacaattccgaatctggggcaatggaatcactgcttccagctggggcaggtgagatctttacgccttttataacatgccatccctactaataggatattgacttggatagcttgatgtctcatgacgagcggcgctctgcatccctcacccatgcctcctaactcagtgatcaaagcgaatattccatctgtggatagaacccctggcagtgttgtcagctcaacctggtgggttcagttctgtcctgaggcttctgctctcattcatttagtgctacgctgcacagttctacactgtcaagggaaaagggagactaatgaggcttaactcaaaacctgggcatggttttggttgccattccataggtttggagagctctagatctcttttgtgctgggttcagtggctcttcaggggacaggaaatgcctgtgtctggccagtgtggttctggagctttggggtaacagcaggatccatcagttagtagggtgcatgtcagatgatcatatccaattcatatggaagtcccgggtctgtcttccttatcatcggggtggcagctggttctcaatgtgccagcagggactcagtacctgagcctcaatcaagccttatccaccaaatacacagggaagggtgatgcagggaagggtgacatcaggagtcagggcatggactggtaagatgaatactttgctgggctgaagcaggctgcagggcattccagccaagggcacagcaggggacagtgcagggaggtgtggggtaagggagggaagtcacatcagaaaagggaaagccacggaatgtgtgtgaagcccagaaatggcatttgcagttaattagcacatgtgagggttagacaggtaggtgaatgcaagctcaaggtttggaaaaatgacttttcagttatgtctttggtatcagacatacgaaaggtctctttgtagttcgtgttaatgtaacattaataaatttattgattccattgcttt

SEQ ID NO: 400361 - DNA, 1000 bp, Homo Sapiens; identical to SEQ ID NO: 222728

SEQ ID NO: 400362 - DNA, 1000 bp, Homo Sapiens; identical to SEQ ID NO: 222729

SEQ ID NO: 400363 - DNA, 1000 bp, Homo Sapiens; identical to SEQ ID NO: 289350

SEQ ID NO: 400364 - DNA, 1000 bp, Homo Sapiens
aatgaagaagcacttaaatactcatctactaggcaagcatggagttggcaccccaaaagaaaggaaatttacatgccacttatgtgatagaagtttcacagagaagtgggccctgaacaaccacatgaaactccacacgggagaaaagccgtttaaatgtacctggcccacgtgccattactcattcctcacagcctccgcaatgaaagaccactacaggacgcacacaggcgagaagtcgtttctgtgtgacctctgcggctttgccggcgggacccgccacgccctcaccaagcatcgcagacagcacacaggagaaaaacctttcaagtgcgatgagtgtaactttgcctccacaactcagtcccatttgactcggcataaacgtgtccacactggagaaaagccctacagatgcccctggtgtgactacaggtcaaactgtgctgaaaatatccgcaaacacattctgcatactggcaaacatgaaggagtcaagatgtacaactgtcccaagtgtgactacgggaccaacgtcccggtggagttccggaaccatttgaaggaacagcatcctgacatcgaaaacccggacctcgcttacctgcatgctggtaagggacagaaactgtgaaaacttgtttctaacaggatttcatgtgatcacagcagttataatgctatttgtacattaccatgatttattgtaatggagtagagtatgtgatagtatctgcttcaagacctatagaaaagtacattccagtttgatcccactcaactatgaaaacaggacttttcaactgtattttatcaaaaaaggaaatctgacagagtaattatttgatgactgtaaagttaataatagtaaatatttaaagcatagttgacctgaaatgagagtagttgttaaatcttcatatgttgactaattgctaaaattttaattttttttcttaaaaaatgcttgtgatttgaaaaaagaaaaaaaaaaaaaaaa

SEQ ID NO: 400365 - DNA, 1000 bp, Homo Sapiens; identical to SEQ ID NO: 222731

SEQ ID NO: 400366 - DNA, 1000 bp, Homo Sapiens; identical to SEQ ID NO: 222732

SEQ ID NO: 400367 - DNA, 1000 bp, Homo Sapiens; identical to SEQ ID NO: 117483

SEQ ID NO: 400368 - DNA, 1000 bp, Homo Sapiens; identical to SEQ ID NO: 289353

SEQ ID NO: 400369 - DNA, 1000 bp, Homo Sapiens
ccgtgtccccttcctccatccttgctgggggcccatggcttgtggcagttcagcttcaccctcaggagtggcccgaaccctgctggacccaggctcccttctcaccatcctgaatagcgactttgctgagcctctggccctgccgagatttcaggataagttacccccaggcccgaagccccagcttgccctggcctgtgcctgcctcaggtgccagctagatgtctcgctccacctgggtctgggacctggctccacaccagttacctgggaccagtaggtgcccttccagcctgaagatctgggggcacagtatagccacatgagccccaagtgtggtcctgaactggggccgggtggggaagagtgagatgggataacatagcccctgcttggaggcccttctctgatggggtgacataatcccttcctcctgggaaacaccagcttttggggtgatagcactttcaggcaggagctatggttccttcctcaggaggcctccaatctgatggggaagacatggcccctccccctggggagtgccctgtgtgatggaggcgatacagcccctaccttcagagagcacctggcctgcagctcatccaaacctgagtctcctctcccttggaggcctcattccagcgccccaaggaggattcaaactgttggggctggaagaacttggtggcctgggtccctggagccctgttgaaggagctggtgacattctgatgctggaggcaggtgacggggagcacagactttgtgtcctgcacactgagctccaagtgtgccccagccactgagccttgtgacttgagcagatgtccgaagccgtttcttcatcccatgagaccagtaatactgtctgcctcagaacatagccgtgatcaagatgagcacggaggctcgtgtcccagcacctggcacacagtaagtgcctggtaaataaacaatggctatatttgcttgtcaaaaaaaaaaaaaaaaaaaaaaa

SEQ ID NO: 400370 - DNA, 1000 bp, Homo Sapiens; identical to SEQ ID NO: 222733

SEQ ID NO: 400371 - DNA, 1000 bp, Homo Sapiens; identical to SEQ ID NO: 222734

SEQ ID NO: 400372 - DNA, 1000 bp, Homo Sapiens
aaccagtgcataattcttacattagattttaaaaaagaattatgctataaatctttataaatgtgtacatatatttcttaaatattgcaattgcctaaatgttgtatattttaaggctgttttctcttgctcttaatgttgaggaaaactataaattgatctataatgcatctactgttaatggttttggttagtttgatattcattgtttttaaacactttccaatatggaaactttaacaccttttatacaattctctactattcaagatattctttaaaatatctcaccagaaacttacaattttatactttgtaatttttagtttctgtaatttgaggaagtgactttttttgtttgggttaagtaaaaagcctttgattgattaccagcatgagaattcaccttggtttctattttatgcatttgtaaatttttcccctaattatatggaagctattggaacttttgtattcagtgctaaatactaagtcaaggggagtatattaggtaagttttttcagtgactgtgcctttagcattcagtcattataagaaaatgatcagaacaaaatcattacattataaacatgtaattcttttatatagtgattatcatgtactgcattgttactttaaaataagctattaaactagtttttatggttcaagtaatgcaatacaaagtttcatgcttcaagtaatgcaatacaaaacataacccatttaatgatgaattacttgaatgtatattatctgtggtttaggaaaatttggattgtcttgaagagacttagttttcaagttctgattttgaccattatctcttctaattcataaacatatcccagtacctacactatgccaggtattatgctaggtgatcgtttatatgtcagcctatttcccccccttttaaagactgccagattaaccaaaaagcgtgacatttataacaatgttttataaataaataaatgtgtttatgccactaaaggt

SEQ ID NO: 400373 - DNA, 1000 bp, Homo Sapiens; identical to SEQ ID NO: 289355

SEQ ID NO: 400374 - DNA, 1000 bp, Homo Sapiens; identical to SEQ ID NO: 222735

SEQ ID NO: 400375 - DNA, 1000 bp, Homo Sapiens; identical to SEQ ID NO: 222736

SEQ ID NO: 400376 - DNA, 1000 bp, Homo Sapiens; identical to SEQ ID NO: 289358

SEQ ID NO: 400377 - DNA, 1000 bp, Homo Sapiens; identical to SEQ ID NO: 117484

SEQ ID NO: 400378 - DNA, 1000 bp, Homo Sapiens; identical to SEQ ID NO: 117485

SEQ ID NO: 400379 - DNA, 1000 bp, Homo Sapiens; identical to SEQ ID NO: 220421

SEQ ID NO: 400380 - DNA, 1000 bp, Homo Sapiens; identical to SEQ ID NO: 222737

SEQ ID NO: 400381 - DNA, 1000 bp, Homo Sapiens; identical to SEQ ID NO: 117486

SEQ ID NO: 400382 - DNA, 1000 bp, Homo Sapiens; identical to SEQ ID NO: 289363

SEQ ID NO: 400383 - DNA, 1000 bp, Homo Sapiens; identical to SEQ ID NO: 222739

SEQ ID NO: 400384 - DNA, 1000 bp, Homo Sapiens; identical to SEQ ID NO: 222740

SEQ ID NO: 400385 - DNA, 1000 bp, Homo Sapiens; identical to SEQ ID NO: 222741

SEQ ID NO: 400386 - DNA, 1000 bp, Homo Sapiens; identical to SEQ ID NO: 222742

SEQ ID NO: 400387 - DNA, 1000 bp, Homo Sapiens; identical to SEQ ID NO: 289366

SEQ ID NO: 400388 - DNA, 1000 bp, Homo Sapiens
cctgaggaaccccctctacctccagagtgtgaagctgcaggaaggttcttcagaagacctgaaattctgcgtgctctatctagcagagaaggcagagtgcttattcactttggaagcgcactcgcaggagcagaagaagagagtgtgctggtgcctgtcggagaacatcgccaagcagcaacagctggcagcatcacccccggacagcaagaaactccaccctttcggctctctccagcaggagatggggccggtcaactcaaccaatgccacccaggatagaagctttacctcaccaggacagactctgattggctgagcaaacccaagggcgggactctgcttctggcaacttaaccctttcttgggcatcccctaccacacagtaacctcacctcaactggacctgaaacagaggaccaagatggtgggtctagggtcatctgaagggagtggtcccaagggtgcatgtggatgtcaacagaaggaccacaatggtgtgagaggccttgtgggcatgcagagactggcagcagaaagtcccaagaggagaggactcagaggcttcttccttccaaggaggaggaggaggaggacattccacatctgggcttccagtggtggctcccggacctgccttgggggcagcaggagaggttgggagaggtcaccctgatgaagaacaatgccatgatctgctgctgccagaggacatctccgcccatccactcattttccacctgtacacattggctcattcattcgatggatatttcgggtgcatctactttatgccaggctctatgctaggagctggggatactgtggagaaaaagtcggatatggtctcgctctcatcaagatttcagtctagctgggagtgagcgttaaataagtcaataccaacacacacacgtgcacacacgtgatggcaagctgtgatcatctatgaaagaaaaaacacagatttctttaagagggaaaaaaaaaaaaaaaaaaa

SEQ ID NO: 400389 - DNA, 1000 bp, Homo Sapiens; identical to SEQ ID NO: 222743

SEQ ID NO: 400390 - DNA, 1000 bp, Homo Sapiens; identical to SEQ ID NO: 222745

SEQ ID NO: 400391 - DNA, 1000 bp, Homo Sapiens; identical to SEQ ID NO: 222746

SEQ ID NO: 400392 - DNA, 1000 bp, Homo Sapiens; identical to SEQ ID NO: 289372

SEQ ID NO: 400393 - DNA, 1000 bp, Homo Sapiens; identical to SEQ ID NO: 222747

SEQ ID NO: 400394 - DNA, 1000 bp, Homo Sapiens; identical to SEQ ID NO: 117488

SEQ ID NO: 400395 - DNA, 1000 bp, Homo Sapiens
gccgtcatccacaagcaccgctcggccacctactgcgagcagctcctgcagcatgtgcaggccgtgccagccacacagtgaccacgctggtttcagccacggcacacccttgtccccacctgagccagagtttgtggcatttaaatctcataaacaaggcacctctgtgccagcagtgagactgtgacagcaagaatgtactcctcaggacacctgcccgctctttccctggaataacagcctctgagtggattctgcatgttatgtgatttgttctgttcatcgagagggctcccaaacatctgcagctgatttgaaattaaaagtaagtcgcagccgctcctcccgcagccacttcagcagcatcttagattttaagcctcacgtgcgcagctggttcatgaactattggctgcatcctgcttaggtgcccaccaagaaggtttttacctacttaacaaaaaagaaagaagccaaagtgattagaaagaaatgaaatctctttttgggttctgtctactgaaatttaatatctcagtgaacagactaaaaggaatttagaatcctaacaacttaccagatttctcctgttttaaatatactgggactttaaaggttatatgtccggtcaccgtatgttttaagtcggtgttaatgctaacagtgttgaaaacaatatttcatgagatctaattgtggttgcccctataggtagcaggaaagtaaagttgcatttccctctcgcacattctacacccaagtgcctaaaagatctcattgtaagtgggtagtgttaccggaagccattgtgttcacacgggggaaatgccgtatatatttttcaacaaatattaacgtttatactttcatgtttgaaaatttaattaaaaatatttgttttaaaaaaaaaaaaaaaaaaaaaaaaaaaaaaaaaaaaaaaaaaaaaaaaaaaaaaaaaaaaaaaaaaaaaaaaaaaaaaaaaaaaaaaaaaaaaaaaaaa

SEQ ID NO: 400396 - DNA, 1000 bp, Homo Sapiens; identical to SEQ ID NO: 222748

SEQ ID NO: 400397 - DNA, 1000 bp, Homo Sapiens; identical to SEQ ID NO: 117489

SEQ ID NO: 400398 - DNA, 1000 bp, Homo Sapiens; identical to SEQ ID NO: 222750

SEQ ID NO: 400399 - DNA, 1000 bp, Homo Sapiens; identical to SEQ ID NO: 117491

SEQ ID NO: 400400 - DNA, 1000 bp, Homo Sapiens; identical to SEQ ID NO: 289379

SEQ ID NO: 400401 - DNA, 1000 bp, Homo Sapiens
cctccactgctggggctggagaaagcggaccttctggaactcatgccactcacagaggattttgtgtggatgagggctcggctacagcaagaagtagaggagcagctcaaaaagaaatgtttcactctgctctgctactatgatcccaattcagatgctgacagtgaaaccgtgaaggcagcaaaggtgtggaaactcgcagaggtcctggtgggtgagcagcagcagtgccaggatgccaagagccagcagaaggagcagatgttgctgctggagaagaagagtgctgcttactcccaggtgcttctccgctgcctcactttgctgcagaggcttcttcaagaacaccggctgaagactcaatccgagctagaccgcatcaatgcccagtacctggaagtcaagtgcggtgctatgatccttaagctgaggatggaggagctaaagattttgtccgacacttacactgttgagaaagtggaagttcatcgtctgattagggaccgtttggagggagccattcacctacaggagcaggacatggagaactcaagacaggtcctgaactcctatgaggtccttggggaggagtttgacaggctggtgaaagagtacaccgtactcaagcaggcaacagagaacaagcggtgggccctccaggagttcagcaaggtctaccgttgagctctggcagggccaggagacatggcttctgcatagctgctgcctcctaatcttcctgctagtgggaccaccttcacctggggctgccttcagtgcaagggagtgtggaaatgcttacgcttgaaacactgcagtcatttaggcactctcctggtttctctttattttttatgactgggcctcttctggaaaatctagcaaggagatttatataatttttatgcatagctgtgtgtcagtgtcagccctgtattgtatttgattatctcctgaataaagttatgatattatatcttaaaaaaaaaaaaaaaaaaaa

SEQ ID NO: 400402 - DNA, 1000 bp, Homo Sapiens; identical to SEQ ID NO: 289380

SEQ ID NO: 400403 - DNA, 1000 bp, Homo Sapiens; identical to SEQ ID NO: 289381

SEQ ID NO: 400404 - DNA, 1000 bp, Homo Sapiens; identical to SEQ ID NO: 289382

SEQ ID NO: 400405 - DNA, 1000 bp, Homo Sapiens; identical to SEQ ID NO: 289383

SEQ ID NO: 400406 - DNA, 1000 bp, Homo Sapiens; identical to SEQ ID NO: 222752

SEQ ID NO: 400407 - DNA, 1000 bp, Homo Sapiens; identical to SEQ ID NO: 117492

SEQ ID NO: 400408 - DNA, 1000 bp, Homo Sapiens
gctgtaacaaatcagaacatttcaattcatttaccttcagccatgcccccggtctcaaagcttctccctcggtactgcacttctgggttgggccagacgtgcactacacatcccaactgtctgcaacagttttgggcgtattaaaagcacatgtttgaaattcacactctcaaccacctactgggcgcagtttgacaatctaggaaaagtggaacaaagaatgattttgaaagctccacccaaagacctaatatcaaaagagttggcatggtttggcttctgataaatgcactcaaagcttctgcagatagaaagaccagcagcgaaaaagctggccacacactgtcactcatcttcatacacacttggatccccgccagccagagagctacaagaacaaatggcctcagtgacctacactctcttttctcaaaaaatattccacaatttatgaaaaaagcatgctataaggaagatccatgtagacacgataaaatgattagattgggaaggtgtgttgataccttgtgtcactgagtacagatattacaacttgattcttatttttagtatccctgtgaattactgtcactcatttctaggtggtcttttccttatttgacattttagagagtttccttcttcattcaccatccaaactaagatatgcagagagatgctgaaagaggggtttacctcctcacttgacaactaatgaataaattgatgtgtgcttttgcatttcacaatcccttgagtgaaacgatggctaataggtaaatatttctttctggaccttaagttacagactagcaggttttttgtttttcatctcttcctccctatgggtattagaaaggacagttgaaaataagggggaaaaaggtttgttttatatttcactgaattgttcttatatgtaagttttattattaaataaaatactcagttttcaccctgaaaaaaaaaaaaaaaaaaaaaaaaaaaaaaaaaaaaaaaa

SEQ ID NO: 400409 - DNA, 1000 bp, Homo Sapiens; identical to SEQ ID NO: 220422

SEQ ID NO: 400410 - DNA, 1000 bp, Homo Sapiens; identical to SEQ ID NO: 223721

SEQ ID NO: 400411 - DNA, 1000 bp, Homo Sapiens; identical to SEQ ID NO: 117495

SEQ ID NO: 400412 - DNA, 1000 bp, Homo Sapiens; identical to SEQ ID NO: 289390

SEQ ID NO: 400413 - DNA, 1000 bp, Homo Sapiens; identical to SEQ ID NO: 117496

SEQ ID NO: 400414 - DNA, 1000 bp, Homo Sapiens; identical to SEQ ID NO: 222756

SEQ ID NO: 400415 - DNA, 1000 bp, Homo Sapiens; identical to SEQ ID NO: 289392

SEQ ID NO: 400416 - DNA, 1000 bp, Homo Sapiens
ctcgagtcctgctcttgctggtggtcccaggccatctgattttcttctacatcatctacctggtggagggtcagtcagtcataaacagccagacctttgtggtgctctacctgctggcaggcctgatccaggtgacaatcctgctgtacctcgcagaagtgatggttcggctgacttggcaccaggccctggatcctgacaaccactgcatcccctaccttacagggctgggggacctgctcggtactggcctcctggcactctgctttttcactgactggctactgaagagcaaggcagagctgggtggcatctcagaactggcatctggacctccctaactgggccccgctggtcccatttgctcattagaatttcctctcacatcagtgggatacagaattcagtttctcccttgccaggtccttgggatggttgacccctgcctctgcagtagccttttgtgagtctgctaaggtagctctcacacacctcggctctggggttgatacctgagcctgcaatagagccctgaaatcaagagcatggcttgagtgtgtgaatatgatgtgtgcacatgcttaatgagcgtgcaagtgtgcacacgtttgtggagaggagggtgttctggcctgagaaggtaaagaagaggcatgtccagtatgctttgcagggtgtgtttgctcttttccatgcccatgcaacccagattggggtggagcaggaaggagctcttttctgttcccaagcctcagaactcttgagctgtggcttacttgctgtcttcaccaggttcaagctccgtgggccacactgctgctgtgccaagaaggtgtacagcctccccaggatggggcctcatacaacccttcatctgcactcaacatttaatcgtgtccttgctgtctttttattttcctttttgtttgttagcaaaaacctctatttagatttcaataatcagagaagtgtaaaataaaacagattatattgtacttga

SEQ ID NO: 400417 - DNA, 1000 bp, Homo Sapiens; identical to SEQ ID NO: 222757

SEQ ID NO: 400418 - DNA, 867 bp, Homo Sapiens; identical to SEQ ID NO: 289394

SEQ ID NO: 400419 - DNA, 1000 bp, Homo Sapiens; identical to SEQ ID NO: 222758

SEQ ID NO: 400420 - DNA, 1000 bp, Homo Sapiens
tggaggctgctggctcgcgctagtgcgccgctcctgcgggtgcccttgtcagattcctgggcactcctccccgccagtgctggcgtaaagacactgctcccagtaccaagttttgaagatgtttccattcctgaaaaacccaagcttagatttattgaaagggcaccacttgtgccaaaagtaagaagagaacctaaaaatttaagtgacatacggggaccttccactgaagctacggagtttacagaaggcaattttgcaatcttggcattgggtggtggctacctgcattggggccactttgaaatgatgcgcctgacaatcaaccgctctatggaccccaagaacatgtttgccatatggcgagtaccagcccctttcaagcccatcactcgcaaaagtgttgggcatcgcatggggggaggcaaaggtgctattgaccactacgtgacacctgtgaaggctggccgccttgttgtagagatgggtgggcgttgtgaatttgaagaagtgcaaggtttccttgaccaggttgcccacaagttgcccttcgcagcaaaggctgtgagccgcgggactctagagaagatgcgaaaagatcaagaggaaagagaacgtaacaaccagaacccctggacatttgagcgaatagccactgccaacatgctgggcatacggaaagtactgagcccatatgacttgacccacaaggggaaatactggggcaagttctacatgcccaaacgtgtgtagtgagtgtaggagataactgtatataggctactgaaagaaggattctgcatttctattcccctcagcctacccactgaagtctttgggtagctcttaagccataactaaggagcagcatttgagtagatttctgaaaaacaatgttatttgttgatttaaaaagaaaactgtatttttattaaataaaatttaaacatcacttcaggaaaaaaaaaaaaaaaaaaaaaaaaaaaaaaaaaaaaaaaaa

SEQ ID NO: 400421 - DNA, 1000 bp, Homo Sapiens; identical to SEQ ID NO: 289396

SEQ ID NO: 400422 - DNA, 1000 bp, Homo Sapiens
ttcctggggaggagggggtacagattgtggagctgctgttgcatgccatcaccgatgtggacgccaaggcatccgacgaggacgacacttacaagcccggcaaggttgtgaaggagctcctgacccagggagctgaccccaacctgcccctgaccaaaggcttgggcagtgccctgtgtgttgcctgtgacctgacctacgagcaccagaggaacatggacagcaagctggccctgattgaccgactcatcagtcacggggccgacatcctgaagcctgtaatgctcaggcagggagaaaaggaggcagtgggcacagccgtggactatggctacttcagattcttccaggaccggaggattgcccgctgccccttccacacgctgatgccagcagagcgcgagacgttcctggcgcggaagcggctcctggagtacatgggcttgcagctacggcaggctgtctttgccaaggagagccagtgggaccccacgtggctgtacctgtgcaagagagcggagctgatccccagccacaggatgaagaagaagggccccagcctgcccaggggcctggatgtgaaggagcaggggcaaattcccttcttcaagttctgctaccagtgtggccgctccatcggggtccgcctcttgccctgccctcgctgctacgggatcctgacctgcagcaagtactgcaagaccaaggcctggaccgagttccacaagaaggactgcggggacctggtggccatcgtgacacaactggagcaagtttccaggaggagagaagaattccagtgaagcagcagctgcacgtccgaggcttggggaggacccaggactgtgtgggtttcttacctgcctgagccacctcagggaatcttccagcctaatgcaggcatttctgcacctttggggtcatgctttgtagcagtgtctcccttgcgacctcgcaataaattggccccacggggtgattttgacagtcaaaaaaaaaa

SEQ ID NO: 400423 - DNA, 1000 bp, Homo Sapiens; identical to SEQ ID NO: 222760

SEQ ID NO: 400424 - DNA, 1000 bp, Homo Sapiens; identical to SEQ ID NO: 222761

SEQ ID NO: 400425 - DNA, 1000 bp, Homo Sapiens; identical to SEQ ID NO: 289400

SEQ ID NO: 400426 - DNA, 1000 bp, Homo Sapiens
catgaatcattctgaatgctttgtctttgaagtgctcccctattgctgttaccatctcagaggaagtaactgggcatggtgagactcctaaaatgacaggagtttttttggccaaagctggcatctgacttgccacattcctctgagtctggagtagccgcaggggtgggagaatgccagcccagagtcagtccatcggggttacatttccaaggtctgctgccttcatctatgtaatggccgtgttactttcagatctttcagcttcccagagtgttgtgggaatcttggtcattgaatgtaaagggacttagtaaagggtatagatatttttcaaaaatgaaaataactttttttcttataagtgataagcttttataaagatcataggaaaactagaaaaaatgtaaaatgtagaaaattgtaaaacaaacttcattagagatattttgatagataccttttcagtgtctatttacaaattttttcttttaatatagatagggtctcactatattgcccagctcactcctgagctcaagggatcctcccaccatagcctcccaaaatattggaaatacaggcatgagccactgctcctgaccaattcacaaatttttttaaagaacaaacgtgctatcatcgatacatactgttaggttgtctttttttaaaaaacctaatgtaatttgttcatctttttatatctgtaaatatagctcaacacagttatattctttttgtgaatgtattatatctacaatttaccttttttcttagattttacatgcattttcccaaatctttgtgtttgcctatctgtaaaggtaatacattctgattacaaaaaatgaaaatgttacatagaaatgtaccgttatccatctaccagataactattattaataatgtgtatttatttttccaggaattaaaaaacatctatcatataagtattgcaaataaaacttaaaaagcaaaaaaaaaaaaaaaaaaaaaa

SEQ ID NO: 400427 - DNA, 1000 bp, Homo Sapiens; identical to SEQ ID NO: 117498

SEQ ID NO: 400428 - DNA, 1000 bp, Homo Sapiens; identical to SEQ ID NO: 222762

SEQ ID NO: 400429 - DNA, 696 bp, Homo Sapiens
agtgcgaatcatgggaggcggctggtggtgggctcgggccgctcgccttgcccgtcttcgcttccggaggtcgctactgccgcctcagcggccccggagcgggggcgcccgggggtccttcgcccccggccacggtccccgcgccggggcttcgccgcccccagtgtccgagctggatcgtgcggacgcctggctcctccgaaaagcgcacgagacagccttcctctcctggttccgcaatggcctcctggcatcgggcatcggggtcatctccttcatgcagagtgacatgggtcgggaagcagcatatggcttcttcctgctgggcggcctgtgcgtggtgtggggcagcgcctcgtacgccgtgggcctggcggcgctgcgaggacccatgcagctgacgctggggggcgcggccgtgggcgcgggcgccgtgctggccgccagcctgctctgggcgtgcgccgtgggcctctacatggggcagctggagctggacgtggagctggtgcccgaggacgacgggacggcctccgcggaaggccctgatgaggcgggtcggccgccacccgagtgagcgacacggccgtggggcctggcaggcgctggacagcgcccgaggactgggacattaaacctgacctcccctcctccaaaaaaaaaaaaaaaaaaaaaaaaaaaaaaaaaaaaaaaaaa

SEQ ID NO: 400430 - DNA, 917 bp, Homo Sapiens
tgatgccctatgtattctccttcaaaatgcctcaagagcaaggacagatgtttcaatactatccagtttacatggtcctaccctgggaacaacctcagcaaacagttccaaggtcacctcaacaaacaagacagcaacagtatgaggagcagataccattctatgctcaatttggatacattccacaactagcagaacctgctatatcaggaggacagcagcaactagcttttgatccccaactaggcacagctcctgaaattgctgtgatgtcaacaggagaagagataccatatttacaaaaagaagcgatcaactttagacatgacagtgcaggagttttcatgccctcaacttcaccaaaacccagcacaaccaatgttttcacttctgctgtagaccaaactattaccccagagctcccagaagagaaggacaagactgacagcctaagggaaccataagaagttgccctgatcattcagacattttgggaaaaagatgtggccatgccttggatataattttaggctattagcttcctcaatactagtatcagttctttggaatacatgaaatatcttgactcttctcctaaatttgtttttacttatacatgttattaaactctttaaatatgtcatagaaaataatacaatcatgtaatgagtcttgtcttacaaaattatatgtctcttcaaatatcctatcattgtataatatggaatataataacacagaataaagctagtatcattaaatcaattggataattgcattagtaaatgatgcctctgcaaaatggtagtacccatgaagatatgtatattgtcattggatgtatgatgagtgttgtgattggaactgatgaagtaaaataagtatctaaaaaaaaaaaaaaaaaaaaaaaaaaaaaa

SEQ ID NO: 400431 - DNA, 1000 bp, Homo Sapiens; identical to SEQ ID NO: 117499

SEQ ID NO: 400432 - DNA, 1000 bp, Homo Sapiens; identical to SEQ ID NO: 222764

SEQ ID NO: 400433 - DNA, 1000 bp, Homo Sapiens
tcgaccagtacatccagcccaccatgcgcctggcagacatcgtggtccccagagggagcggcaacacggtggccatcgacctgattgtgcagcacgtgcacagccagctggaggagcgtgaactcagcgtcagggctgcgctggcctcggcacaccagtgccacccgctgccccggacgctgagcgtcctgaagagcacgccgcaggtacggggcatgcacaccatcatcagggacaaggagaccagtcgcgacgagttcatcttctactccaagagactgatgcggctgctcatcgagcacgcgctctccttcctgccctttcaggactgcgtcgtacagaccccgcaggggcaggactatgcgggcaagtgctatgcggggaagcagatcaccggtgtgtccattctgcgcgccggtgaaaccatggagcccgcgctgcgcgctgtgtgcaaagacgtgcgcatcggcaccatcctcatccagaccaaccagcttaccggggagcccgagctccactacctgaggctgcccaaggacatcagcgatgaccacgtgatcctcatggactgcaccgtgtccacgggcgcggcggccatgatggcagtgcgcgtgctcctggaccacgacgtgcctgaggacaagatctttttgctgtcgctgctcatggcagagatgggcgtgcactcagtggcctatgcatttccgcgagtgagaatcatcaccacggcggtggacaagcgggtcaatgaccttttccgcatcatcccaggcattgggaactttggcgaccgctactttgggacagacgcggtccccgatggcagtgacgaggaggaagtggcctacacgggttagctgcccagtgagccatcccgtccccaccaccctcctcctgcctcctgacccaggactgctgaatacaaagatgttaatttttaaaatgttactagtataatttattctatgcattttataaaataaataaagctttagaaaaa

SEQ ID NO: 400434 - DNA, 1000 bp, Homo Sapiens; identical to SEQ ID NO: 222765

SEQ ID NO: 400435 - DNA, 1000 bp, Homo Sapiens; identical to SEQ ID NO: 117500

SEQ ID NO: 400436 - DNA, 1000 bp, Homo Sapiens; identical to SEQ ID NO: 289406

SEQ ID NO: 400437 - DNA, 1000 bp, Homo Sapiens; identical to SEQ ID NO: 117501

SEQ ID NO: 400438 - DNA, 1000 bp, Homo Sapiens; identical to SEQ ID NO: 289408

SEQ ID NO: 400439 - DNA, 1000 bp, Homo Sapiens; identical to SEQ ID NO: 117502

SEQ ID NO: 400440 - DNA, 1000 bp, Homo Sapiens; identical to SEQ ID NO: 118872

SEQ ID NO: 400441 - DNA, 1000 bp, Homo Sapiens; identical to SEQ ID NO: 117503

SEQ ID NO: 400442 - DNA, 1000 bp, Homo Sapiens; identical to SEQ ID NO: 117504

SEQ ID NO: 400443 - DNA, 1000 bp, Homo Sapiens; identical to SEQ ID NO: 117505

SEQ ID NO: 400444 - DNA, 1000 bp, Homo Sapiens; identical to SEQ ID NO: 289412

SEQ ID NO: 400445 - DNA, 1000 bp, Homo Sapiens; identical to SEQ ID NO: 117506

SEQ ID NO: 400446 - DNA, 1000 bp, Homo Sapiens; identical to SEQ ID NO: 289413

SEQ ID NO: 400447 - DNA, 1000 bp, Homo Sapiens; identical to SEQ ID NO: 289414

SEQ ID NO: 400448 - DNA, 1000 bp, Homo Sapiens; identical to SEQ ID NO: 289415

SEQ ID NO: 400449 - DNA, 1000 bp, Homo Sapiens; identical to SEQ ID NO: 289416

SEQ ID NO: 400450 - DNA, 1000 bp, Homo Sapiens
gtgcttcgcgtgctacggggccacacccgtggtgtctccgacttcgcctggtccctctccaatgacatcctcgtgtccacctcactggatgccaccatgcgcatctgggcctctgaggatggtcgctgcatccgagagatccctgaccccgatagcgctgaactgctctgctgcaccttccagcctgtcaacaacaacctcactgtggtggggaacgccaagcacaacgtgcatgtcatgaacatctccacaggcaagaaagtgaaggggggctccagcaagctgacaggccgtgtccttgctctgtcctttgatgcccctggccggctgctctgggcgggtgatgaccgtggcagtgtcttctctttcctctttgatatggccacagggaagctgaccaaagccaagcgtttggtggtgcatgaggggagccctgtgaccagcatctcagcccggtcctgggtcagccgcgaggcccgggatccctcactgctcatcaatgcttgcctcaacaagttgctgctctacagggtggtagacaacgaggggaccctgcagctgaagagaagcttccccatcgagcagagctcacatcctgtgcgcagcatcttctgtcccctcatgtccttccgccagggggcctgcgtggtgacgggcagtgaggacatgtgcgtgcacttctttgatgtggagcgggcggccaaggctgctgtcaacaagctgcagggccacagtgcacctgtgcttgatgtcagcttcaactgcgacgagagcctactggcctccagtgacgccagcggcatggtcatcgtctggaggcgggagcagaagtagggtcctgtcggccctgctgctgtcctccatcccacccctcttactccagcctcgtgttgtaaataaagtttcggtggtcatgctgagggccggctcccagctctgccggggacggacagggcagagggcagcgggcagctccaggaacacggtgaaaaaaaaaaaa

SEQ ID NO: 400451 - DNA, 1000 bp, Homo Sapiens; identical to SEQ ID NO: 222768

SEQ ID NO: 400452 - DNA, 1000 bp, Homo Sapiens
ggtggtacctgaagatgaaatgtggcaactgtggtgagatttcggacaagtggcagtacatccggctgatggacagtgtggcactgaaggggggccgtggcagtgcttccatggtccagaagtgcaagctgtgtgcaagagaaaattccatcgagattttaagcagcaccatcaagccttacaatgctgaagacaatgagaacttcaagacaatagtggagtttgagtgccggggccttgaaccagttgatttccagccgcaggctgggtttgctgctgaaggtgtggagtcagggacagccttcagtgacattaatctgcaggagaaggactggactgactatgatgaaaaggcccaggagtctgtgggaatctatgaggtcacccaccagtttgtgaagtgctgatccctcttccttcccagttgcccttaagaactgagaaaggacaaagtactctaagcagcagagcccacagaggctcgttcctttgacccttgtctcctggtggctatacgaaaccttcacaatttgcatgctggactttattacagcttcccaagccccatcaataaagcccctgttcacgctgcactggtgcatgaaggtgaagtaaggaggcagctactccctccacaaataagaattcgtgcagcagcagttcactccttaggaaaatgaagagtatttttaaggagatggtatctccccagtcaagggcaagtttacagagatgaaaccgcgatccccccatcactcaatgagccagaagccaatggtgacgtactgttacctgaacttactgaacttgctgttggaaagatctttgtgaggattaggaattaggttaaaagaaattaagaaccatcttcaagcaaaaattaaactttatttctgcttaaacaataaatacacctgagttagttttccaaacctttcctcctgattaaatgcccttaaaacttaaaaaaaaaaaaaaaaaaaaaaaaaaaaaaaaaaaa

SEQ ID NO: 400453 - DNA, 1000 bp, Homo Sapiens; identical to SEQ ID NO: 118685

SEQ ID NO: 400454 - DNA, 1000 bp, Homo Sapiens; identical to SEQ ID NO: 222770

SEQ ID NO: 400455 - DNA, 1000 bp, Homo Sapiens; identical to SEQ ID NO: 289422

SEQ ID NO: 400456 - DNA, 1000 bp, Homo Sapiens
cggtgccccacgggcttgagccggggtgaatctggaggggccgggccgagcccgggggcgctttcgcacgcgaagcaaccgctagagcaggacctggtctcccgagagcgggactacttgttgatatttgaggagggaagtgtcttacctgagagcctggctggagaagactgaggtccaaggcttgaagcctaagtgattgccccaggactgtggatgatggctgcagacatcccgagagtgaccactccgctgagctccttggtccaggtgcctcaagaggaagatagacaggaggaggaggtcaccaccatgatcctggaggatgactcctgggtgcaagaagctgtgctgcaggaggatggccctgagtctgagccctttccccagagtgctggcaagggcggcccccaggaggaggtgaccaggggaccacagggtgcactcggccgcctccgagagctctgccggcgctggctgagaccagaggtacacaccaaggagcagatgttaaccatgctgccaaaggaaattcaggcttggctgcaagagcatcggcctgaaagcagtgaggaggcagcggccctggtggaagacttgacccagacccttcaggacagtgctgtagctgtctttgcttcccttccggtggaggtgaccagtttgtaatgaacttctggatctccagtcagatactatggaggagagagtgatggagggctgaggagaggcctcaggttgttatttggttggggaggcacagagcagaggttcaggtctcagcaggtgtcagaggtgattacagcccttcccatccaccttgcagcaggggctttgtgcctttcatctttaactgggcacctgagatgggaaccaatggggaccatcccagacacatgggtttgtctgtccctgacttctgcctctgagattgtctttgttggtctttgtttaataaacgccccgaccttcctcatgaaaaaaaaaaaaaaaaaaaaaa

SEQ ID NO: 400457 - DNA, 1000 bp, Homo Sapiens; identical to SEQ ID NO: 117509

SEQ ID NO: 400458 - DNA, 1000 bp, Homo Sapiens; identical to SEQ ID NO: 117510

SEQ ID NO: 400459 - DNA, 1000 bp, Homo Sapiens; identical to SEQ ID NO: 289424

SEQ ID NO: 400460 - DNA, 1000 bp, Homo Sapiens; identical to SEQ ID NO: 117511

SEQ ID NO: 400461 - DNA, 1000 bp, Homo Sapiens
cttgtttgacttctccgtgacagtgttcgccttcctgggactgctggcgctggccctcaacatggagcccttctatttcatcgtggtcctgcgccccctccagctgctgaggttgtttaagttgaaggagcgctaccgcaacgtgctggacaccatgttcgagctgctgccccggatggccagcctgggcctcaccctgctcatcttttactactccttcgccatcgtgggcatggagttcttctgcgggatcgtcttccccaactgctgcaacacgagtacagtggcagatgcctaccgctggcgcaaccacaccgtgggcaacaggaccgtggtggaggaaggctactattatctcaataattttgacaacatcctcaacagctttgtgaccctgtttgagctcacagttgtcaacaactggtacatcatcatggaaggcgtcacctctcagacctcccactggagccgcctctacttcatgaccttttacattgtgaccatggtggtgatgacgatcattgtcgcctttatcctcgaggccttcgtcttccgaatgaactacagccgcaagaaccaggactcggaagttgatggtggcatcacccttgagaaggaaatctccaaagaagagctggttgccgtcctggagctctaccgggaggcacggggggcctcctcggatgtcaccaggctgctggagaccctctcccagatggagagataccagcaacattccatggtgtttctgggacggcgatcaaggaccaagagcgacctgagcctgaagatgtaccaggaggagatccaggagtggtatgaggagcatgccagggagcaagagcagcagcgacaactcagcagcagtgcagcccccgccgcccagcagcccccaggcagccgccagcgctcccagaccgttacctagcccagcgcccgaaagccgtctcttctatgcaataacacaatagtattactctaaaaaaaaaaaaaaaaaaaa

SEQ ID NO: 400462 - DNA, 1000 bp, Homo Sapiens; identical to SEQ ID NO: 289426

SEQ ID NO: 400463 - DNA, 1000 bp, Homo Sapiens; identical to SEQ ID NO: 289427

SEQ ID NO: 400464 - DNA, 1000 bp, Homo Sapiens; identical to SEQ ID NO: 117513

SEQ ID NO: 400465 - DNA, 1000 bp, Homo Sapiens; identical to SEQ ID NO: 222775

SEQ ID NO: 400466 - DNA, 1000 bp, Homo Sapiens; identical to SEQ ID NO: 289430

SEQ ID NO: 400467 - DNA, 1000 bp, Homo Sapiens; identical to SEQ ID NO: 289431

SEQ ID NO: 400468 - DNA, 1000 bp, Homo Sapiens; identical to SEQ ID NO: 117517

SEQ ID NO: 400469 - DNA, 1000 bp, Homo Sapiens; identical to SEQ ID NO: 289437

SEQ ID NO: 400470 - DNA, 1000 bp, Homo Sapiens; identical to SEQ ID NO: 222777

SEQ ID NO: 400471 - DNA, 1000 bp, Homo Sapiens; identical to SEQ ID NO: 117519

SEQ ID NO: 400472 - DNA, 1000 bp, Homo Sapiens; identical to SEQ ID NO: 289438

SEQ ID NO: 400473 - DNA, 1000 bp, Homo Sapiens; identical to SEQ ID NO: 289439

SEQ ID NO: 400474 - DNA, 1000 bp, Homo Sapiens; identical to SEQ ID NO: 289440

SEQ ID NO: 400475 - DNA, 1000 bp, Homo Sapiens; identical to SEQ ID NO: 222779

SEQ ID NO: 400476 - DNA, 1000 bp, Homo Sapiens; identical to SEQ ID NO: 289444

SEQ ID NO: 400477 - DNA, 1000 bp, Homo Sapiens; identical to SEQ ID NO: 117520

SEQ ID NO: 400478 - DNA, 1000 bp, Homo Sapiens
tgatcttatgttaacctgagaattgatttaaaggaagattgataatcctatactttataacgtaaaaatacaggggctacaggagggtacctaattagacagttctccaaacacagaacacacactggaaaattttccggccaattttgctacctcccaacttgatggattagaggtagcgcaaatgctggtgctcccatctaccttgtagacacttagccatcaagaatcaaggcacaagaagtgcactctctcattaacagtaaatgtttgcaagatattcagtttaactttcagcatcatgaatgttcttatccagattttgaatccgaaaaactataatccttttatgttatacaaaattactatgattttttacagttctgagcatattaaaattctactggatttcaaaaagagactaatacccaactgactaactaaacaaatatcaacttgtaatactcaatgaatttttttgccatttacatttgaccgttggctttagtgaatgtccatatttaattttttaaggcaccattacacagtttatcctacatttatcacatttcttaaagtgttaagattctatggctcatttctatgtatttttcttactttacaaaataacctgaaacagtatagattttgtaacacttaatttgagcagcttttttattacattgaattatataaagtgcatgttaccttagaaaaattaatatttgctgctttactcttttgcaaaacatttgctgtaatgaatggatttgtatttccaatatgtatcttgactgcattttgtaatatttactgctttattcctaattctgctttaaagtactgaactgggcatgaaacattaaaatattaatccagaaactgtataaactggatgttgcttaaaatctgtatcactgccatgttgaaaactcagactgcttttgtgatgtttcaaatgaataaaactatcctcccctcgttaaaaaaaaaaaaaaaa

SEQ ID NO: 400479 - DNA, 1000 bp, Homo Sapiens; identical to SEQ ID NO: 289446

SEQ ID NO: 400480 - DNA, 1000 bp, Homo Sapiens; identical to SEQ ID NO: 117521

SEQ ID NO: 400481 - DNA, 1000 bp, Homo Sapiens; identical to SEQ ID NO: 117522

SEQ ID NO: 400482 - DNA, 1000 bp, Homo Sapiens; identical to SEQ ID NO: 117523

SEQ ID NO: 400483 - DNA, 1000 bp, Homo Sapiens; identical to SEQ ID NO: 289450

SEQ ID NO: 400484 - DNA, 1000 bp, Homo Sapiens; identical to SEQ ID NO: 222783

SEQ ID NO: 400485 - DNA, 1000 bp, Homo Sapiens; identical to SEQ ID NO: 222784

SEQ ID NO: 400486 - DNA, 1000 bp, Homo Sapiens; identical to SEQ ID NO: 222785

SEQ ID NO: 400487 - DNA, 1000 bp, Homo Sapiens; identical to SEQ ID NO: 117524

SEQ ID NO: 400488 - DNA, 1000 bp, Homo Sapiens; identical to SEQ ID NO: 289454

SEQ ID NO: 400489 - DNA, 1000 bp, Homo Sapiens; identical to SEQ ID NO: 222786

SEQ ID NO: 400490 - DNA, 1000 bp, Homo Sapiens; identical to SEQ ID NO: 289456

SEQ ID NO: 400491 - DNA, 1000 bp, Homo Sapiens; identical to SEQ ID NO: 117525

SEQ ID NO: 400492 - DNA, 1000 bp, Homo Sapiens; identical to SEQ ID NO: 289458

SEQ ID NO: 400493 - DNA, 1000 bp, Homo Sapiens; identical to SEQ ID NO: 222787

SEQ ID NO: 400494 - DNA, 1000 bp, Homo Sapiens; identical to SEQ ID NO: 117526

SEQ ID NO: 400495 - DNA, 1000 bp, Homo Sapiens; identical to SEQ ID NO: 289461

SEQ ID NO: 400496 - DNA, 1000 bp, Homo Sapiens; identical to SEQ ID NO: 117527

SEQ ID NO: 400497 - DNA, 1000 bp, Homo Sapiens; identical to SEQ ID NO: 222778

SEQ ID NO: 400498 - DNA, 1000 bp, Homo Sapiens; identical to SEQ ID NO: 289466

SEQ ID NO: 400499 - DNA, 1000 bp, Homo Sapiens
ctcgcccagccgcagccaggccgtgaaagtgctaagtaacctcgtgcctgctgggcacagcccccctgccagtcacctgcccaggcccacggctggcgggccaaggagcacaggtctgggcagcacagtgggggcagccttgaggcagctgcctgagaccgggacagcagagcttaaagacagctctgccctggcctctacaggcatcccagccagtgctcacctgcctaagaatcaggatgcccctgcagcctgtccggacagagaccagggcagagccccggatgccagggcctgtgagctctggcaggtgctgggagcccccagttccactgagctccctctccagacttctcagggtcaagcatcagtcccctcctctcccagactcgagacccatgtcccctctcctggcctaactcaccctgcaaagcagcctgtggtgcccactcaccccggggcccggctcactccccttgttctgccccctaaaaaaaggacgggcccgtggacccccctgctgccaccgtcctgcccatggtgaggagcgagcatgtgacagtccctggacaacctcctgctccatccactacaagaaggaaggatgtccccagcccaggaggtctttctgctccatcgtccccaaggaataagtttgttcagaactctgaaaatgtccctgtcctcccctttacccagagggaggtcgtgaagggccccggtgctgtgggccgagagccgcctgccgcgccagacgtggagcatcagtgaatcgggccacatctgcagccagatgttcgaaggccagatcctggacgtgaagggaggccggggctacgaccgggaccacgtggtgctatgggagccggatgaggacagggcatcccagatctggactatccacgtgctttgaaacttttcccctcaccctccagccctggaggcttttgctgggatgaatgtttttatagggtttttgttgtaacataagctattttct

SEQ ID NO: 400500 - DNA, 1000 bp, Homo Sapiens; identical to SEQ ID NO: 289467

SEQ ID NO: 400501 - DNA, 1000 bp, Homo Sapiens; identical to SEQ ID NO: 117528

SEQ ID NO: 400502 - DNA, 1000 bp, Homo Sapiens; identical to SEQ ID NO: 117529

SEQ ID NO: 400503 - DNA, 1000 bp, Homo Sapiens; identical to SEQ ID NO: 289470

SEQ ID NO: 400504 - DNA, 1000 bp, Homo Sapiens
atggatcccagtcaacatgctaaagaacttccaggagctgtccctggagctatcagtcatgaaaaagcgcagaaatgactgcagccagaaactgggggtggccctgatgatggctcaagaggcagaacagatcagcattcaggaacgggttaacttgtttggtttctggagccgattcaacggatctaacagtaatggggaaagaaaagacttacagctctctggtttgaacagcccaggatcctgcttagagaaaaaggagaaagaggaagagttggaaaaggaggaaggagagaaaacagacccaattttgcccattcgtaagcgagtcaaaatacagacccaaaaaaaccaagccaagagggcttgggggtgatgcaggcacagcagatggccgaggcaggacactgcagaggaagataatgaagagatctctaggcaggaaatccacagctcctcctgcacccagaatgggaaggaaagaaggccaagggaattcagattctgaccagccaggccctaagaaaaaatttaaagctccccagagcaaggccttggcagccagcttttcagagggaaaagaagttagaacagtgccaaagaacctgggcctatcagcgtgtaagggggcctgcccctcatctgcgaaagaagagcccagacaccgggaacccctgacccaggaggctggaagtgtcccccttgaggacgaagcctccagtgacctggacctggagcaactcatggaagatgttgggagagagctggggcagagcggggagctgcagcacagcaacagtgatggcgaggacttccccgtggcgctgtttgggaagtagctggtgctcctctgctccctctttttctcccttctctggggcgcaggagggagaagttgctaagtgctgggtctgttcattggctatgaggttcaaatgtgtgtggtgcagtttctgtgttaataaagcaggttacagtcgaaaaaaaaaaaaaaaaaaaa

SEQ ID NO: 400505 - DNA, 1000 bp, Homo Sapiens; identical to SEQ ID NO: 289471

SEQ ID NO: 400506 - DNA, 1000 bp, Homo Sapiens; identical to SEQ ID NO: 289472

SEQ ID NO: 400507 - DNA, 1000 bp, Homo Sapiens; identical to SEQ ID NO: 222792

SEQ ID NO: 400508 - DNA, 1000 bp, Homo Sapiens; identical to SEQ ID NO: 289474

SEQ ID NO: 400509 - DNA, 1000 bp, Homo Sapiens; identical to SEQ ID NO: 289475

SEQ ID NO: 400510 - DNA, 1000 bp, Homo Sapiens; identical to SEQ ID NO: 117530

SEQ ID NO: 400511 - DNA, 1000 bp, Homo Sapiens
aagaaaaagaacagcttttccgaacagaagaaaacctcaccaaggaccagcaactgcagtttctgcagcaaaccatgcaaggcatgcagcagcaattgctaaccatccaggaggagttaaacaacaaaaagtcagaattggaacaagcaaaggaagagcagtcccatacacaagcgttactaaaagtcctgcaggaacaattaaaaggtaccaaggaattggtcgagaccaatggccacagccatgaggattcaaatgaaatcaatgtgttgacagttgcattagtcaaccaagaccgagagaacaatattgagaaaagaagccaaggcttaaaatcagagaaagaagctctgctaataggtatcatatcaacgtttcttcacgtccatccttttggagccaacatagaatatctttggtcatacatgcagcagctggactccaagatatctgcaaatgaaatagaaatgcttttgatgaggctgccacgcatgttcaaacaggaattcacgggtgtgggagccacgctggaaaaaagatggaagttgtgtgcctttgaaggaattaaaaccacctaactgcgaagagcaaagcatctctggaaatgaaaccatgtgaacctggccagggcggtgcgacggggaagcaggaggtgtggggttggtcccgcacgcaacctttgtggagccatcgaagcctgcctttagttatatctgtggcgttctcttgtaagtggaaatgtaattgtgtaccagtttcttaaaataaacaaagcttcatactgtgacagatctgtttcctatgaaaaccaaacaatgattccacagtcataatgatggcaaaatcttaaaatgtgctacatttgagaatagctcaccaagcaaaatatttaaagttaatgatggtgtagcaatgattgttgctaggctacagagttgtatatgtaatgtatagctgaaatcattaaatgacattttcctgaaagtctttctgttttagt

SEQ ID NO: 400512 - DNA, 1000 bp, Homo Sapiens
tacaatcctttctggtgttataagggggccattggaaaagtctatcatgctttaaatcccaagcttacagtgattgttccagatgatgaccgttcattaataaatttgcatctcatgcacaccagttacttcctctttgtgatggtgataacaatgttttgctatgctgttatcaagggcagacctagcaaattgcgtcagagcaatcctgaattttgtcccgagaaggtggctttggctgaagcctaattccacagctccttgttttttgagagagactgagagaaccataatccttgcctgctgaacccagcctgggcctggatgctctgtgaatacattatcttgcgatgttgggttattccagccaaagacatttcaagtgcctgtaactgatttgtacatatttataaaaatctattcagaaattggtccaataatgcacgtgctttgccctgggtacagccagagcccttcaaccccaccttggacttgaggacctacctgatgggacgtttccacgtgtctctagagaaggattcctggatctagctggtcacgacgatgttttcaccaaggtcacaggagcattgcgtcgctgatggggttgaagtttggtttggttcttgtttcagcccaatatgtagagaacatttgaaacagtctgcacctttgatacggtattgcatttccaaagccaccaatccattttgtggattttatgtgtctgtggcttaataatcatagtaacaacaataatacctttttctccattttgcttgcaggaaacataccttaagttttttttgttttgtttttgtttttttgttttttgttttcctttatgaagaaaaaataaaatagtcacattttaatactaaaaaaaaaaaaaaaaaaaaaaaaaaaaaacccacgcgtccgcccacgcgtccgcggacgcgtgggcggacgcacgcgtccgaaaaaaaaaaaaaaaaaaaaaaaaaaaaaaaaaaaaaaa

SEQ ID NO: 400513 - DNA, 1000 bp, Homo Sapiens; identical to SEQ ID NO: 222793

SEQ ID NO: 400514 - DNA, 1000 bp, Homo Sapiens; identical to SEQ ID NO: 289478

SEQ ID NO: 400515 - DNA, 1000 bp, Homo Sapiens; identical to SEQ ID NO: 289479

SEQ ID NO: 400516 - DNA, 1000 bp, Homo Sapiens; identical to SEQ ID NO: 289480

SEQ ID NO: 400517 - DNA, 1000 bp, Homo Sapiens; identical to SEQ ID NO: 222794

SEQ ID NO: 400518 - DNA, 1000 bp, Homo Sapiens; identical to SEQ ID NO: 117531

SEQ ID NO: 400519 - DNA, 1000 bp, Homo Sapiens; identical to SEQ ID NO: 222795

SEQ ID NO: 400520 - DNA, 1000 bp, Homo Sapiens; identical to SEQ ID NO: 117533

SEQ ID NO: 400521 - DNA, 1000 bp, Homo Sapiens; identical to SEQ ID NO: 222796

SEQ ID NO: 400522 - DNA, 1000 bp, Homo Sapiens; identical to SEQ ID NO: 289484

SEQ ID NO: 400523 - DNA, 1000 bp, Homo Sapiens
atcttattctgtagtcatcagaatgttaatgtaaggtacatttgatttttattttttacatgtgtagttttctttcttcacagtcaaagcatttatattattgggggtgggggcagggaattaagttggtgggctcgaaaatcccattcatatgtatctgtctacaaatgtctggggataatttaaatttgaaacctaagttatatatagtttggcaatgctcttcttcaatatttacaataataggatgatctacaagaaaataagtttctttttgcaaatttttatcatactaaagttgttcttttaatttagcatatctaaaataggaattagttcagtttagctcacacaggtgtttgctgacattcattggccatttaatacagtgttgagtggttctccgtaaaagtataagtgctaacactacgaagaaatgcacacgatcattcttgctcacttctataacaaacttacataaaatggatttaaaaattcctactcacagcctaaaacttctggagttcactacctttttttcaaatcatagtaagatcacttgtgtattttatattttagtaaagccaattatgaagtacaagtatcatacacgtacttttgagctactattatttgaaaaaaatctgccaaatagcatctttaggatatatttacattttcactcatctaaaaagtatacaaaaataaaaagtggaaaaaggtatcttctgaatgttcaagagcatcctatagtgccaaataataaagcaccatttttttcttcataaccaggattaaaattcatatatactgcagggcagacatacatatgatagcttgtgctgattaatttaaccccatttgtaaacagatgaaaattttattttcttatttcatttataagatggctcaatgtattgggaggcttcttttttattacagaaagtgtatattggtatataataaatgaacttttcaaatgacaaaaaaaaaaaaaaaa

SEQ ID NO: 400524 - DNA, 1000 bp, Homo Sapiens; identical to SEQ ID NO: 289485

SEQ ID NO: 400525 - DNA, 1000 bp, Homo Sapiens; identical to SEQ ID NO: 222798

SEQ ID NO: 400526 - DNA, 1000 bp, Homo Sapiens; identical to SEQ ID NO: 289488

SEQ ID NO: 400527 - DNA, 1000 bp, Homo Sapiens; identical to SEQ ID NO: 117534

SEQ ID NO: 400528 - DNA, 1000 bp, Homo Sapiens; identical to SEQ ID NO: 289490

SEQ ID NO: 400529 - DNA, 1000 bp, Homo Sapiens; identical to SEQ ID NO: 117535

SEQ ID NO: 400530 - DNA, 1000 bp, Homo Sapiens; identical to SEQ ID NO: 222799

SEQ ID NO: 400531 - DNA, 1000 bp, Homo Sapiens; identical to SEQ ID NO: 117536

SEQ ID NO: 400532 - DNA, 1000 bp, Homo Sapiens; identical to SEQ ID NO: 289494

SEQ ID NO: 400533 - DNA, 1000 bp, Homo Sapiens
gaggtgacgattcattaaaattatgggacatccgacaatttaataaaccacttttttcagcctcgggtcttcccaccatgttcccaatgactgactgctgtttcagtccagatgataagctcatagtcactggtacatctattcaaagaggatgtggcagcggcaaacttgttttctttgagcgtaggactttccaaagggtgtatgaaatagacatcacagatgcgagtgttgttcgctgcctgtggcatccaaagctgaaccagatcatggttggaactggaaatggattggctaaagtctattacgaccccaacaagagtcagaggggagcaaaattatgtgtggttaaaacccagcggaaggcaaaacaagctgagactctaactcaggactacatcatcacccctcatgccttgcctatgttccgtgagccccgccaacggagtacaaggaaacagctggagaaggacagactggatcccctgaagtcgcataaacctgaacctcctgtagcaggcccaggtcgtggtggccgagttggaacccacgggggcactctctcttcctatattgtgaagaacattgctttggacaagaccgatgacagtaatcctcgggaagccattttgcgtcatgccaaagcagcagaagacagcccatattgggtttctccagcatattccaagactcagcccaaaaccatgtttgcccaagttgaatctgatgatgaggaagcaaagaatgagccagaatggaaaaaacgtaaaatttgaagaatctcatttgagagctgtttgcatgagtgggaggggtatgggacaggtttgggttttttttttatgctcatgaaattaaaaattcatttttatgaaaaaaaaaaaaaaaaaaaaaaaaaaaaaaaaaaaaaaaaaaaaaaaaaaaaaaaaaaaaaaaaaaaaaaaaaaaaaaaaaaaaaaaaaaaaaaaaaaaaaaaaaaaaaaaaaaaaaaaaaaaaaaa

SEQ ID NO: 400534 - DNA, 1000 bp, Homo Sapiens; identical to SEQ ID NO: 222800

SEQ ID NO: 400535 - DNA, 1000 bp, Homo Sapiens; identical to SEQ ID NO: 222802

SEQ ID NO: 400536 - DNA, 1000 bp, Homo Sapiens; identical to SEQ ID NO: 289497

SEQ ID NO: 400537 - DNA, 1000 bp, Homo Sapiens
gacacaagaaaaattgttctgtgagaacagccagcaggcaaacaagcatgcatttaggatccttatgcacgggagatatcaaacggagaagaaaagctgcacctttgcctggacctactactgcaggatttgtaggtgaaaatgcccagccaatcctagaaaataatattggaaaccgaatgcttcagaatatgggctggacgcctgggtcaggccttggacgagatggcaaggggatctctgagccaattcaagccatgcagaggccaaagggattaggacttggatttcctctaccaaaaagtacttccgcaactactacccccaatgcaggaaaatccgcctaagaaaagcaaagaagaaatgttttacagactttattcactatgtcccattgttctaaaatgataacatgacttctgtttttgaagcaaaaatctacattgcctcaaacacatcactctagcttccttactgcatacagtcctgccatagtgagagaaatgggatttcatcacaattcatggtgctaaaatgaaaacctctgcactttaatttttttcagtaatttccagctatttctaggtataaagagcagctcgtttctcttatttattttagtctcatgtgtcaatactttccgatgctttgcttaattcatgtatgtgtgcagtgctgcaatgcccagacaaacgtgagcacacccaccagtttctaaaatggaatagacaggaaaagattgtgttttatatcatccctatctattgtaacccaaaagacctaccatcgcatcagtgaagtccgaacacatctttgtttgaaaggcttgtcaatttcatattccttgaattggcttcttggtgaggattttctgacagagtgatacccatcaattttctatccttagacaatgtagtgtgaagttcacagttgacaaacaacaattaatgtttcccttggatgttttgacaaaaataaacctcatcgttgttatcaccag

SEQ ID NO: 400538 - DNA, 1000 bp, Homo Sapiens; identical to SEQ ID NO: 289498

SEQ ID NO: 400539 - DNA, 1000 bp, Homo Sapiens; identical to SEQ ID NO: 289499

SEQ ID NO: 400540 - DNA, 1000 bp, Homo Sapiens; identical to SEQ ID NO: 222803

SEQ ID NO: 400541 - DNA, 1000 bp, Homo Sapiens; identical to SEQ ID NO: 117538

SEQ ID NO: 400542 - DNA, 1000 bp, Homo Sapiens; identical to SEQ ID NO: 289502

SEQ ID NO: 400543 - DNA, 1000 bp, Homo Sapiens; identical to SEQ ID NO: 222804

SEQ ID NO: 400544 - DNA, 1000 bp, Homo Sapiens; identical to SEQ ID NO: 289504

SEQ ID NO: 400545 - DNA, 1000 bp, Homo Sapiens; identical to SEQ ID NO: 117539

SEQ ID NO: 400546 - DNA, 1000 bp, Homo Sapiens; identical to SEQ ID NO: 117540

SEQ ID NO: 400547 - DNA, 1000 bp, Homo Sapiens; identical to SEQ ID NO: 222806

SEQ ID NO: 400548 - DNA, 1000 bp, Homo Sapiens
aaggtcaagttccaggtggacttcaacctgatcggatggggctcctggatcatctaccccaagcagtacaacgcctatcgctgtgagggcgagtgtcctaatcctgttggggaggagtttcatccgaccaaccatgcatacatccagagtctgctgaaacgttaccagccccaccgagtcccttccacttgttgtgccccagtgaagaccaagccgctgagcatgctgtatgtggataatggcagagtgctcctagatcaccataaagacatgatcgtggaagaatgtgggtgcctctgatgacatcctggagggagactggatttgcctgcactctggaaggctgggaaactcctggaagacatgataaccatctaatccagtaaggagaaacagagaggggcaaagttgctctgcccaccagaactgaagaggaggggctgcccactctgtaaatgaagggctcagtggagtctggccaagcacagaggctgctgtcaggaagagggaggaagaagcctgtgcagggggctggctggatgttctctttactgaaaagacagtggcaaggaaaagcacaagtgcatgagttctttactggattttttaaaaacctgtgaaccccccgaaactgtatgtgaaagttgagacatatgtgcatgtattttggaggtgggatgaagtcacctatagctttcatgtattctccaaagtagtctgtgtgtgacctgtccccctccccaaagattaaggatcactgtatagattaaaaagagtccgtcaatctcattgcctcaggctgggttgggggagccccacagctttctggctggccagtggcaatctactggccttgtccagaggctcactggagtggttctctgctaatgagctgtacaacaataaagccattgtctagttaaaaaaaaaaaaaaaaaaaaaaaaaaaaaaaaaaaaaaaaaaaaaaaaaaaaaaaaaaaaaaaaaaaaaaaaaaaaaaa

SEQ ID NO: 400549 - DNA, 1000 bp, Homo Sapiens
ggccccgggaggcggtcagtggcctggcaaagagccgggactacctcctgacactgcgggagacgtggaagcagcacacaagacagctgtatggcccggacgccatgcccacccatgcctgctgcctgtcacccagcctcatccgcagtgaggtggagttcctcaagatggacttcaactggcgcatgaaggaagtgctcgtcagctccatgctgagcgcctactatgtggcctttgtgcctgtctggttcgtgaagaacacacattactatgacaagcgctggtcctgtgaactcttcctgctggtgtccatcagcacctccgtgatcctcatgcagcacctgctgcctgccagctactgtgacctgctgcacaaggccgccgcccatctgggctgttggcagaaggtggacccagcgctgtgctccaacgtgctgcagcacccgtggactgaagaatgcatgtggccgcagggcgtgctggtgaagcacagcaagaacgtctacaaagccgtaggccactacaacgtggctatcccctctgacgtctcccacttccgcttccatttctttttcagcaaacccctgcggatcctcaacatcctcctgctgctggagggcgctgtcattgtctatcagctgtactccctaatgtcctctgaaaagtggcaccagaccatctcgctggccctcatcctcttcagcaactactatgccttcttcaagctgctccgggaccgcttggtattgggcaaggcctactcatactctgctagcccccagagagacctggaccaccgtttctcctgagccctggggtcacctcagggacagcgtccaggcttcagccaagggctccctggcaaggggctgttgggtagaagtggtggtgggggggacaaaagacaaaaaaatccaccagagctttgtatttttgttacgtactgtttctttgataattgatgtgataaggaaaaaagtcctatttttatactcccaac

SEQ ID NO: 400550 - DNA, 1000 bp, Homo Sapiens
caatctgaaacaatgagttaaatataataacaatgactttatgaggaattaaaggttaagctttgtgtttacctactaaacagaaaatgcctccaaataaacagtgtcacaagtacagaagagagaaatattgtttaaggctagcacatggaaaaacaacttagaggatttagcagctaaaagaagaatgagtcagctggtgatgtgcttggtcaaaacacacagtcatacatgcatatacatataccccaaaatgctaagtggaaactgcatgaattaaaagaggggtatgatagggacattgtcctttgggctaggtaggcacatatcagttggaccacatctgcaatactggattttactgaaatcttgtattttcctttttattatgagaaatttcagctcagtgatcaaagtcttcaaatagttaaaccaaaagaagaatagggctgctttgtgtggccatagagagcaaaactatgatcaaatagtgggtattatggaggaggttgtgatggtggtaagccttcaaagaaagaaaggcctttcaagaatcaaacttgataataatgaaatcagttgcctcaatggtagagagctcagcatcactggaggtggtcacacagaggtagcatgtgccctagttacagaatctattaaggggatgactgtctcaaatatgtaggacagaaatgagaagccccaagcttgcttttaactctaaggtagtattttctactctgactactttcctgttgttactactactatgctaaatactatgcatacattatcttgtttattctttctatcagctagataatttgcatattttatccccattttactgcaaagttgacaagctcagggaaaataaatagttggccagaattaagcaaccaatacatgatagacagggctaaaactgggctacagaattttcaaaaagaatgatacattctgaaggtatgtttataataaacatttttcatatgtaaaa

SEQ ID NO: 400551 - DNA, 1000 bp, Homo Sapiens; identical to SEQ ID NO: 117541

SEQ ID NO: 400552 - DNA, 1000 bp, Homo Sapiens; identical to SEQ ID NO: 289508

SEQ ID NO: 400553 - DNA, 1000 bp, Homo Sapiens
cgacgctcttgtcagactgcattagttgaaattttggatgtaatagttcgttcttttgctcccattcttcctcacctggctgaagaggtgttccagcacataccttatattaaagagcccaagagtgttttccgtactgggtggattagtactagttctatctggaaaaagcccgggttggaagaagctgtggagagtgcgtgtgcaatgcgagactcatttcttggaagcatccctggcaaaaatgcagctgagtacaaggttatcactgtgatagaacctggactgctttttgagataatagagatgctgcagtctgaagagacttccagcacctctcagttgaatgaattaatgatggcttctgagtcaactttactggctcaggaaccacgagagatgactgcagatgtaatcgagcttaaagggaaattcctcatcaacttagaaggtggtgatattcgtgaagagtcttcctataaagtaattgtcatgccgactacgaaagaaaaatgcccccgttgttggaagtatacagcggagtcttcagatacactgtgtcctcgatgtgcagaagttgtcagtggaaaatagtattaacagctcactcgagcaagaaccctcctgacagtactggctagaagtttggatggattatttacaatataggaaagaaagccaagatttaggtaatgagtggatgagtaaatggtggaggatgggagtcaaaatcagaattatagaagaagtatttcctgtaactatagaaagaattatgtatatatacatgcagaaatatatatgtgtgtgtgtatctgtggatggatatatgtatatctcttcctatatatatccatagtggacttattcagaacatagatatgtattcagcttgtcttcaaatacggccaagcagaaaatgttttatattttataaatcatcttttgactctgtatttaaattctatgatactgaaaataaaggcattctggaaaaata

SEQ ID NO: 400554 - DNA, 1000 bp, Homo Sapiens; identical to SEQ ID NO: 222807

SEQ ID NO: 400555 - DNA, 1000 bp, Homo Sapiens; identical to SEQ ID NO: 117542

SEQ ID NO: 400556 - DNA, 1000 bp, Homo Sapiens; identical to SEQ ID NO: 222808

SEQ ID NO: 400557 - DNA, 1000 bp, Homo Sapiens; identical to SEQ ID NO: 289512

SEQ ID NO: 400558 - DNA, 1000 bp, Homo Sapiens; identical to SEQ ID NO: 117543

SEQ ID NO: 400559 - DNA, 1000 bp, Homo Sapiens
tctggaggagatcatgaagaggactcggaagtcagaagtttctgaaaccaagaagcaggacagcaaggagcgcrawcgccaacggttccagcccagagcctgtgaaagctgtggaggctcggtccccagggctgcagaaggaggctgtgcagaaagaggagcccatcccacaggagcctcagtggagtctcccaagcaaggagttgccagcgtccctggtgaatggcctgcagcctctcccagcacaccaggagaatggcttctccaccaacggaccctctggggacaagagtctgagccgaacaccagagacactcctgccctttgcagaggcagaagccttcctcaagaaagctgtggtgcagtccccgcaggtcacagaagtcctttaagagggtttgccttggatccgggcacagttgtgagggctcctctgcatcacctaccaggatgtctggaggagaaaaagacagaacaaagatggaagtggcctgggcccctgggggtgggtcctctctgttgtttttaatctgcaccttatagactgatgtctctttggccggagccagatctgcccctcagtgcattcgtgtgctcgcacgcgcagacatcccttctcccccatacacacatatacactcacagcctctctggcctcttcccttggggaggggccacctgtagtatttgccttgatttggtggggtacagtggatgtgaatactgtaaatagcttgtgctcagactcctctgcgtggagagggtgggtgcaggaggcagaccctccccccaaagccccctggggagatcttcctctctctatttaactgtaactgagggggatcccaggtctggggatgggggacaccttgggccacaggatactggttgcttcaggggtacccatgccccctgccctcgcctggaatcagtgttactgcatctgattaaatgtctccagaaataaagaataattctgccaaaaaaaaaaaaaaaaaaa

SEQ ID NO: 400560 - DNA, 1000 bp, Homo Sapiens
agtgttttgaagcttttgagaattatcagcccaagatggtggtgtttgtagttcagaagaaaatcagtactaatctatatctggctgctcctcagaactttgtaactcccactcctggaactgtggtagatcatacaataacaagctgtgagtgggtggatttctatcttcttgcccatcatgtacggcagggctgtggcattcctacgcattatgtctgtgttctcaacaccgcaaacctgagccctgatcatatgcagaggctgactttcaaactgtgccacatgtactggaattggcctggcaccatcagagttccagctccttgcaagtatgcccacaagctagctttcctgtcaggacacatcttgcatcatgaaccagccatccagctgtgcgagaacctgttcttcctgtgactgcacagcttggagatgggctggtgagaagaaaggcggcctcagaactcagctgtgactcttgcagaatcaacagagactgaagtgggcttttgtgttataattttccctttctccaaccctgtagaataagatttctttcttgtcttttaaacctaatatcaccaagaagcaagtttctgagtaacagctgaaaatggccttgttgcctgtgtagagcaagttacggtggtactgccactctgcaggtggagcgggtgactctgggggaccattaagacctccagaccgggtgcggtggttcacacctgtaatccaagcactttgggaggccgaggcgggtggatcatgaggtcaggagatcaagaccatcctggccaacatggtgaaaccccgtctctactaaaatacaaaaaattagccgggtgtggcggtgcacgcctgtagtcccagctactcaggaggctaaggcaggagaatcgcttgaacccgggaggtggaggttgcagtgagccgagatcacgccactgcactccagcctgttgacaaagcaagactctgtctcaaaaaaaaaaaaaaaa

SEQ ID NO: 400561 - DNA, 1000 bp, Homo Sapiens; identical to SEQ ID NO: 222809

SEQ ID NO: 400562 - DNA, 1000 bp, Homo Sapiens; identical to SEQ ID NO: 222810

SEQ ID NO: 400563 - DNA, 1000 bp, Homo Sapiens
actgtcccttggactccaggagaccagtgtcctagtcttgccttttttctctaagtggcaggatcagaaaacctgcgagctttagtttgtattttcactttatgaatgaggaaactgaaatggccttaagggagcaagttatttctttttttttgacacggagtctcactctgttgcccaggctggagtgcagtggcacgatctcggctcactgcaggctctgcctcctgggttcacgccattctcctgcctcagcttcccgagtagctgggactacaggcgcccaccacgacgcctggctcatttttttgtatttttagtagagacggagtttcaccatgttagctaggatggtctcgatctcctgacctcatgatccgccctcctcagcctcccacagtgctgggattagaggcatgagccactgcgcccggcccctggagcaagttatttcttacaaagctgctgaaggtaagattatcaaaattataaagcatttttcacactcaagtgaaacaaggttgacaaactcacttcgcaggtcacatgcctatacatcacttattatatttgggtctgaaacttctcacatgtttgggaggttttatgtgtcctcattgggaaaatgggtgtaattcagcataaaacctcatatgattgtcctgcctcatggagctgttgtatagatcccagatccatcccatgatttgttcctgtctgaggcatagaggcaggcaagccgtggattttgcacatggtgactttcccactgtgccatgatacagtctgcatcttatagcagtgcctttgtctcagggcctctgctggcagtctagaccttttgggcagaaaggagcttcaaatggctgtgataaggaatattaaaaattgtgtttctactttaattgtattggctgttcatgtatgtaggagttaaaataggccaaactggagaaataaacgcattctgtccaccatgaaaaaaaaaaaaaaaaaaaaa

SEQ ID NO: 400564 - DNA, 1000 bp, Homo Sapiens; identical to SEQ ID NO: 289517

SEQ ID NO: 400565 - DNA, 1000 bp, Homo Sapiens
cttaaaaatgtgcagggtcttcaaacgtccattctcagaaccttcagccaatattggtgtgtggcagttggcttttgaaatgatgagtgttatatctgtggtcactaactgtgcgctgattggaatgtcaccacaagtgaatgcagcctttccagaatcaaaagcagacctcattttgattgtagtagcagtggagcacgcactcctggctttaaagtttatacttgcatttgccatacctgataagccacggcatatccagatgaaactagccagactggaatttgagtctttggaggcactcaagcagcagcaaatgaagctcgtgaccgagaacctgaaggaggaaccaatggaaagcgggaaggagaaggcaacctgagtgcccagcgtgcccagctgccctgttggcagaggcctgtgtctgtgccacacctgccacggtggcagggggggtacccggggcagcatcgtggctcctgaacccagacccaatgcttagccaaacgaagtggctcccatgtggcaagcacccttctcagtttcgcagtggcttggctcgggatccttggcagttcccccagccccaccctgtctgctccttcccagttccttcccgggccccacacgctgctccagctgccaactttgctgcagagccactgccgcccttgagcctctcaccatgagtgagccaccagctctccacgttcccctcatagcagtgtcactcccaaccccaccatggcccagggacccgtggacaggttggggatggggtgtgtgcccactgtgctcatcacaggagcctcagttgagagtgagcggggtacagtaaggcagtgcttcccacactggacctctttcctggttctcttttgcaatacattaacagaccctttatcaacataaacaatagtaactgagctattaaaggcaaaaaaaaaaaaaaaaaaaaaaaaaaaaaaaaaaaaaaaaaaaaaaaaaaaaaaaaaaaaaa

SEQ ID NO: 400566 - DNA, 1000 bp, Homo Sapiens; identical to SEQ ID NO: 289518

SEQ ID NO: 400567 - DNA, 1000 bp, Homo Sapiens; identical to SEQ ID NO: 222811

SEQ ID NO: 400568 - DNA, 1000 bp, Homo Sapiens; identical to SEQ ID NO: 222812

SEQ ID NO: 400569 - DNA, 1000 bp, Homo Sapiens; identical to SEQ ID NO: 117544

SEQ ID NO: 400570 - DNA, 1000 bp, Homo Sapiens; identical to SEQ ID NO: 222813

SEQ ID NO: 400571 - DNA, 1000 bp, Homo Sapiens; identical to SEQ ID NO: 117545

SEQ ID NO: 400572 - DNA, 1000 bp, Homo Sapiens; identical to SEQ ID NO: 289525

SEQ ID NO: 400573 - DNA, 1000 bp, Homo Sapiens; identical to SEQ ID NO: 117546

SEQ ID NO: 400574 - DNA, 1000 bp, Homo Sapiens; identical to SEQ ID NO: 289528

SEQ ID NO: 400575 - DNA, 1000 bp, Homo Sapiens
tgagctgggggccccggagaatctccaacctccgccagccgcaaccgaacttggaccacgtacgtcaccccagataggcacgaggacacccgcccaggtgcttagcggcgaccggcagcctccgcacagcagaccttgcctgcctactgcccaggcctgcaccatgtcccatcacccagcggccagccatgatggggcccagcctctcagagtgctctttcggagactggaaaacggacgctggagctccagcctgctgacggccccctcatttcactctcctgagaagccgggagccttcctcgctcagagccctcatgtctcagagaagtctgagggtccctgtgttcgtgtcccaccaagcgtcctctatgaggaccttcaggttccctcctcctcagaggacagcgattctgacctggagtgagactgcaggtggcaggggctccttggcctccagctcccgtgacttggaggggactgtgggactgaggagcacagagcagagagcagactctgtgcggtgactccgaagctccccggctgtggcccttctgtggatgtgggagcccaggccaggcagggagcagatgcagggactctgccacgttgaattctggtgagggacattgtagttcgcatggttctctggaaacgcgccaggaaaagcttccgtgccagtgattcgttgcctcagaaactgcatgacgcgcaggagtcagacttccgctgggacgtcaataggaaacgggggaattactgtgtatttgctctctagacgactgaataagggaaaagttagggaaccctgagaggtgcagcccttccgctgtgccccgccctgagagcagtgtttccgacgctgggaagcgcgctgtgcaaagcgctctcggggtctttcctcagcctcgaaaagtgggctctggaatccctttgtaaataggtgtgttgaatttgttttgaagtgaataaaattctcaaaaagatgaaaaaaaaaaaa

SEQ ID NO: 400576 - DNA, 1000 bp, Homo Sapiens
tcaagaagaggagccttccacacagtcatcccaggcagttgctgcccccttgggccctttgctggatgaggccaaagcccctggtcagccagagctctggaatgcactgcttgctgcttgccgagctggagatgttggagtgctaaagctgcagctagctcccagccctgcagaccctagagttctgtctctgctcagtgcccccttgggctccggtggctttactctcctgcatgcagcagctgcagctggaagaggctcagtggttcgtctgctgctggaagcaggtgctgaccccactgtgcaggactctcgggcccggccaccttatactgttgcggctgacaaatcaacacgtaatgagttccgaaggttcatggagaagaatccagatgcctacgattacaacaaggctcaggtgccaggaccattgacaccagaaatggaggcacggcaggctacacggaaaagggagcagaaggcagcccggcggcaacgggaggaacagcagcagaggcagcaggagcaggaggagcgtgaacgagaagagcagcggcgatttgccgccctcagtgaccgagagaagagagctctggctgcagagcgccgactcgctgcccagttgggagcccctacctctccaatccctgactctgcaatcgtcaatactcgacgctgctggagttgtggggcatccctccaaggcctgactccctttcactacctcgacttctctttctgctccacacgttgcctccaggatcatcgccgtcaggcagggaggccctcttcctgatctcttacagctctacctggggccaactcagggacctgagagggcacattcacagcagccctaggttttttcttccccgtgaaaccagagatgatttggaagatgggggtgaaggacactcgggaactagggcaaagacagggctagaggtatgtggagctggtactgtctctggaattttaatcacaataaagtttggcaagg

SEQ ID NO: 400577 - DNA, 1000 bp, Homo Sapiens; identical to SEQ ID NO: 289529

SEQ ID NO: 400578 - DNA, 1000 bp, Homo Sapiens; identical to SEQ ID NO: 117547

SEQ ID NO: 400579 - DNA, 1000 bp, Homo Sapiens; identical to SEQ ID NO: 289531

SEQ ID NO: 400580 - DNA, 1000 bp, Homo Sapiens; identical to SEQ ID NO: 117548

SEQ ID NO: 400581 - DNA, 1000 bp, Homo Sapiens
tgtagtcatatgaagtctatttctagttgactgtaacatgggtattaatagtctttgctgctggtaatactgaaagaacctgctttatattggagtatcaagatctcaggttcattaagaccaaactgacttttcctttgtttttcatatatttttattctacctttcagtaaaactagagaagctaaaaaagagccatgacaatttattaatataagtgaattaaccatttctcaggtgggaaattctctttttttaaaaatgtgtgtttatcgtctggtgtggtggctcacacctgtaatcctaacacttggggaggctgaggcgggcagatcacttaaacccaggagttcaagaccagcctgggtaacatggtgaaatcccatatctacaaaataaacaaaaaattagccgaccatggtggtgcatgcctgtagtcccagctattcgggaggctgaggtaagaggatcacctaagcctgtgaggtcatggttgcaatgagtcatgatcacgccactgcgctacagcctgggcgacacagtaagaccctgtctcaaaaaaaagaagtgtgtttctggccaggcacggtggctcacgcctgtaatcccagcactttgggaggcctaggtgggcagatcatgaggtcaggagttcgagaccagcctggccaacatggcgaaacacctgtctctactaaaaatacaaaaattaggccgggcgcagtggctcacacctgtaatcccaacactttgggaggccgacccagatgggtggatcacctgaggtcaggagtttgagaccagccttgacaacatggtgaaaccccatctctggtagaaatataaaaaattaaccgggcatggtggtggacgcctgtaatcccagctacttgggaggctgaggcagaataatcgcttgaacccaggaggcagaggttgcagtaagccaagatcgtgcctctgcactccaacctgggtgatggagcaagactccatctcc

SEQ ID NO: 400582 - DNA, 1000 bp, Homo Sapiens; identical to SEQ ID NO: 289533

SEQ ID NO: 400583 - DNA, 1000 bp, Homo Sapiens; identical to SEQ ID NO: 289534

SEQ ID NO: 400584 - DNA, 1000 bp, Homo Sapiens; identical to SEQ ID NO: 222817

SEQ ID NO: 400585 - DNA, 1000 bp, Homo Sapiens; identical to SEQ ID NO: 289537

SEQ ID NO: 400586 - DNA, 1000 bp, Homo Sapiens
tccaagcactgcagtgtgtgtaactggtgtgtgcaccgtttcgaccatcactgtgtttgggtgaacaactgcatcggggcctggaacatcaggtacttcctcatctacgtcttgaccttgacggcctcggctgccaccgtcgccattgtgagcaccacttttctggtccacttggtggtgatgtcagatttataccaggagacttacatcgatgaccttggacacctccatgttatggacacggtctttcttattcagtacctgttcctgacttttccacggattgtcttcatgctgggctttgtcgtggttctgagcttcctcctgggtggctacctgttgtttgtcctgtatctggcggccaccaaccagactactaacgagtggtacagaggtgactgggcctggtgccagcgttgtccccttgtggcctggcctccgtcagcagagccccaagtccaccggaacattcactcccatgggcttcggagcaaccttcaagagatctttctacctgcctttccatgtcatgagaggaagaaacaagaatgacaagtgtatgactgcctttgagctgtagttcccgtttatttacacatgtggatcctcgttttccaagcaaaaaaaaatggcttgtttgttttgatttctgctgtgcttataaatcactttcggtgggcaagggagagaggggaaaatgggtgttgactgaggaatcccccttgcttgtcttcttttgaaaccgggcatctctgaagtcctggtgtcaaggggatcaagagatgacttctcagaggttctaggtgatgctgagaccttggtgtctctaaactctgggcatgtggacaggaggggcttgcggccgtgtctctgacctgtgtgatgtgcaggagggtctcattgactcagcgcctgcgcgttagtgcctggctgtgctctcttttatgccccctctattctcctctctcccccaggggattttcatctcaacaacagagtg

SEQ ID NO: 400587 - DNA, 1000 bp, Homo Sapiens; identical to SEQ ID NO: 289538

SEQ ID NO: 400588 - DNA, 1000 bp, Homo Sapiens; identical to SEQ ID NO: 289540

SEQ ID NO: 400589 - DNA, 1000 bp, Homo Sapiens; identical to SEQ ID NO: 222820

SEQ ID NO: 400590 - DNA, 1000 bp, Homo Sapiens; identical to SEQ ID NO: 222821

SEQ ID NO: 400591 - DNA, 1000 bp, Homo Sapiens; identical to SEQ ID NO: 117552

SEQ ID NO: 400592 - DNA, 1000 bp, Homo Sapiens; identical to SEQ ID NO: 222822

SEQ ID NO: 400593 - DNA, 1000 bp, Homo Sapiens; identical to SEQ ID NO: 289547

SEQ ID NO: 400594 - DNA, 1000 bp, Homo Sapiens
ttgaacacagtagtcccctagaaaaacaactctacaaaaattttgcagccttattcattataattttgataaaattaacacaaaatcagtcaagaaggaaacatgtatattagtgaagtgtttttggagactgtttgaatgtgaccaaatgtggttctagttgacttcttttcactttggcttatatcaattcttgagagttaatgtgatcatgatattgcaaacaactataaatggtctctaggccttactttgtgattatacgttatctccggctagaaaaaaataatggtagtaaagaaactgacaaactgaaaataagaaaacaaaaatcaaatgcctataataccataatgccagtttggtatagagtccaactttaaaacatgaattgctcgacagagttctattcagtaggtgtttctttgtattgtcttttgtgaatttattatgaaaatgctgcgttgtgttgaatgaaaaagacccaaattactgcttatgaagaaataaagccagcattgatcacttaatcctgtttctcatgtccagccagaaaaaagaacttcagtgaaggtaagataaataaatacatacacatatgtttttttggtagataagtgctaattacatatatgtaatgctttattaaatttctgaaatatttggtaactaaaattttctttttggaaattaataaatccagatacatattaatgttgatatgagtaaaaacaaataggaagaaattgaaatttcttttcatcaacatgtagagctgctattttactatttggagaatatgatgtgaaaattggacctcaaagggtttccttgtgttttcattgtaaaataccatcatcagtgagagtcttgagttcactaacattgtcaccttctggagagagagttaatggggggcattgaggatgatatttttttacatgtgtttggtttctgattcaagtgacacgcacaaactgaaaaaaaaaaaaaaaaaaaa

SEQ ID NO: 400595 - DNA, 1000 bp, Homo Sapiens; identical to SEQ ID NO: 222823

SEQ ID NO: 400596 - DNA, 1000 bp, Homo Sapiens; identical to SEQ ID NO: 117553

SEQ ID NO: 400597 - DNA, 1000 bp, Homo Sapiens; identical to SEQ ID NO: 222825

SEQ ID NO: 400598 - DNA, 1000 bp, Homo Sapiens; identical to SEQ ID NO: 289551

SEQ ID NO: 400599 - DNA, 1000 bp, Homo Sapiens; identical to SEQ ID NO: 289552

SEQ ID NO: 400600 - DNA, 1000 bp, Homo Sapiens; identical to SEQ ID NO: 117554

SEQ ID NO: 400601 - DNA, 1000 bp, Homo Sapiens; identical to SEQ ID NO: 222827

SEQ ID NO: 400602 - DNA, 1000 bp, Homo Sapiens; identical to SEQ ID NO: 117555

SEQ ID NO: 400603 - DNA, 1000 bp, Homo Sapiens; identical to SEQ ID NO: 289556

SEQ ID NO: 400604 - DNA, 1000 bp, Homo Sapiens; identical to SEQ ID NO: 222829

SEQ ID NO: 400605 - DNA, 1000 bp, Homo Sapiens; identical to SEQ ID NO: 117557

SEQ ID NO: 400606 - DNA, 1000 bp, Homo Sapiens; identical to SEQ ID NO: 222831

SEQ ID NO: 400607 - DNA, 1000 bp, Homo Sapiens; identical to SEQ ID NO: 289560

SEQ ID NO: 400608 - DNA, 1000 bp, Homo Sapiens; identical to SEQ ID NO: 289561

SEQ ID NO: 400609 - DNA, 1000 bp, Homo Sapiens; identical to SEQ ID NO: 222832

SEQ ID NO: 400610 - DNA, 1000 bp, Homo Sapiens; identical to SEQ ID NO: 117558

SEQ ID NO: 400611 - DNA, 1000 bp, Homo Sapiens
aaggtctcctacccaaattctccagctggtctttggttaaactaggccctgctaagtcttataactttcatacaggtttggaccaacagggctttattccaggaacaaattatcttatgccttgggacattgtcatcaggactagagctgaagatgaaggagacttagacacaaactcttggcctgctccaaataaagctattcctggaaagagaagtgcggttgtaatgggaagaggaagacggcgagatgacatagctcgagcttttgtgggctttgaatatgaagactctcgaggtcggagattcatgtgctctgggcctgacaaagtaatgaaagtaatgggaagtgggccaaaggaatcagctttaaaagccctaaatagtgacatgcccttatatattctgtcatcctctcaaggtagagggctgaaacctcattatgctcaacttatgaggctttttgttgtggttcctgatgctcctttgcagataatactaatgcctcaggttcagccaggcccaccaccatgtccggtattctacccagaaaaacaagaaatcacccttccacctgatggcctttgggttttgagatttccttatgcatatgtgactgagagaggaccttgtttcccccctaaggaaaatgtgcagttaatgagctacaaggtgctccgtggggttcttaaggcagtaacacaataagtgttttccagccagttcaatcctatacttgagctggtttttgtttttggtatttgtggctgtgtttttggtatgtgtttactgtgttttcccaaatccaaaatgtgttttggttacaggagttcagtatttggaaactaatttgttctactttttcattatattgttgatatttattgtaaacgtgactacaactttctaataaagattggttgttctagaaaagaatataaaataaaaaaaaaaaaaaaaaaaaaaaaaaaaaaaaaaaaaaaaaaaaaaaaaaaaaaaag

SEQ ID NO: 400612 - DNA, 1000 bp, Homo Sapiens; identical to SEQ ID NO: 117559

SEQ ID NO: 400613 - DNA, 1000 bp, Homo Sapiens; identical to SEQ ID NO: 289568

SEQ ID NO: 400614 - DNA, 1000 bp, Homo Sapiens; identical to SEQ ID NO: 222834

SEQ ID NO: 400615 - DNA, 1000 bp, Homo Sapiens
agcagagaataccgcctgctccctccggacagcacactcctgaaaacggggagagaggagccaaacatgctcggtttacactttccttatttactgaatgagtggagggcagagacaggcctggagttacgcacactgagtgccccaacatggaaagaaacatcaggagggacaggaaacgttccctccttaaccaacagttttcaagaccttactggaggcactttattggctacataatcactccatgcggtgggcatcaggcagaatcctggtgcagacccaactttgaggtggaggatttcacagtttctttattttgaacttcccccaggctcccactaattcctctccattctatcctcctccctttcccacaaaagaaaacagaaaggagcagcagtgtttgataccgtatcatccagaggcctggttctctcccattatagggcaaacaagccctggcaagatatttcactcccgccccatgccatgcattaaaaatccaaaattgcctatattccacctgccaagcaagagatgctttcattattgaagttccaaatgtatacctttgagaacagtgccttctcgtcttaaaagagaggtcctcattttgtgagttgggagcagagggaattaaagaaagccatgatgcagggatttggccattcaagccgggcagccttcagagaatgtcatccctaatgacacatgcccgaatgaaggagcggggctgagcttgtcctgccttcgtattgaatgttgcctgtctgcctccttaatagcgggcctctgtgtgagcatttgacaagacttaaaactattcattgaagaaaatggatgatcccccaacaggaagatgcaaccccatgggctgcctgcttgaccacagaagtgcttccagctccagttgctcatctgagaactccccccaccacttgctgttaaaattgttaaaattaaaggccatgttgattgaaaaaaaaaaaaaaaaaaa

SEQ ID NO: 400616 - DNA, 1000 bp, Homo Sapiens; identical to SEQ ID NO: 117560

SEQ ID NO: 400617 - DNA, 1000 bp, Homo Sapiens; identical to SEQ ID NO: 289571

SEQ ID NO: 400618 - DNA, 1000 bp, Homo Sapiens; identical to SEQ ID NO: 117561

SEQ ID NO: 400619 - DNA, 1000 bp, Homo Sapiens; identical to SEQ ID NO: 222836

SEQ ID NO: 400620 - DNA, 1000 bp, Homo Sapiens; identical to SEQ ID NO: 117563

SEQ ID NO: 400621 - DNA, 1000 bp, Homo Sapiens; identical to SEQ ID NO: 222838

SEQ ID NO: 400622 - DNA, 993 bp, Homo Sapiens; identical to SEQ ID NO: 30353

SEQ ID NO: 400623 - DNA, 1000 bp, Homo Sapiens; identical to SEQ ID NO: 222839

SEQ ID NO: 400624 - DNA, 1000 bp, Homo Sapiens; identical to SEQ ID NO: 222840

SEQ ID NO: 400625 - DNA, 1000 bp, Homo Sapiens; identical to SEQ ID NO: 222842

SEQ ID NO: 400626 - DNA, 1000 bp, Homo Sapiens; identical to SEQ ID NO: 117564

SEQ ID NO: 400627 - DNA, 1000 bp, Homo Sapiens
cctcctaagggttttaacgtctctgacatacaggcacactgacctgatttccgaaggctgacaatcgtttgtggaatgtaatcttgatgccttgatactgagacttgggagggaaactaagaaatggttgacagcgttcccacccatctacaatgttattttaggtgctttgtggtaagtcttttttcttagattgcgctaaaatttcttagattgttcagcgctcagaacaaaagtttgaaaaatgcattgttcatatgaatgtcatctcttttcagtttccagtatcctttttaaaaaatggcaaaagcctagatttacaatttgatgaacactaaatatttcttattaatataatctatttttgtattttacttaatgagctttaagtgcctgtcgttctgaaaattgtgtatttataattcagcttatctcacaattggacctaatagcatttctttgtgcagttaggtgacgagcactgctttgaggcccaagcactagtagagatgcgcgatacaggtctagtttcggtaactgttccagacatcaagcaataaaaaaatgaataccacaaaagatgtttgattttacagtggagccttactgaaccagcattcagaagtttaaggtcctcctaggtatgagtatttttagtagtggatcactgtggacagggtgcagctctaccagttcctgtttcttctgagccagaccctcttcagggaagggaccaattaattttaaaactcacttgaagcacagctggtcatggggcttggtataaagttcctatttccaccctgatacttccaattcctggaaccccagcccactcccccatccctcctccctatcaaactagtataatgattttgaatcggtacagtgtgtttaactgtaactaagttcaacagactattattatctttgtaataaattaacctagcaataaaaattattctgtttctttaaaaaaaaaaaaaaaaaaaaaaaaaaa

SEQ ID NO: 400628 - DNA, 1000 bp, Homo Sapiens; identical to SEQ ID NO: 289583

SEQ ID NO: 400629 - DNA, 1000 bp, Homo Sapiens
tccccttgtgccagatgatacctcagactctggctacggcactttgatcccaggcacccccacggggtcccgctccccactgagccgtctacgccaaagagcccttcggcgggaccctcgcctcaccttctccaccctggaactccgggacatccctctgcgtccccaccctcccgacccccaagctccccaacgccgaagcgcccccgaactgccggaaggaatcctaaaaggaggcagtcttccccaggaagacccaccaacctggtctgaggaagaagatggggcctccgagcgagggaatgtggtggtggaaacactccacagggcccggcttcggggccagcttccctcctccccaacccatgctgactctgccggggaaagcccctgggagtcctcaggggaggaggaagaagaggggcctctgttcctgaaagctggccacacatccctgcgcccaatgcgggctgaggacatgctcagagagatccgggaggagctggccagccaaaggattgagggggccgaggagccccgggacagcaggccacggaagctgactcgggcccagctgcagaggatgcgggggccccacatcattcagctggacacccctctgtccgcatcagaggtatgaggaatgcagaggacctttggcatgcatctctcccagaggagatctctccccagtagtgctggtcaccctccggcatctgtgactctacctcaaggaccacatttcccaaaggaagcctggcccaggcaccctgcctcctgctctgtttggggatcaagaactgtaaatttatgtatcataggtgcacctgagccccacagaaagttgtgcataaaaatgactgccctggctgggcatggctgcctgtaatcccagcactttgggaggctgaggtgggaggatcccttgagcccaggagttccagaccagcctgggcaatatagggaaaccctgtctttacaaaaaaaaattttaaaaatt

SEQ ID NO: 400630 - DNA, 1000 bp, Homo Sapiens; identical to SEQ ID NO: 117565

SEQ ID NO: 400631 - DNA, 1000 bp, Homo Sapiens; identical to SEQ ID NO: 222843

SEQ ID NO: 400632 - DNA, 1000 bp, Homo Sapiens; identical to SEQ ID NO: 222844

SEQ ID NO: 400633 - DNA, 1000 bp, Homo Sapiens; identical to SEQ ID NO: 117566

SEQ ID NO: 400634 - DNA, 1000 bp, Homo Sapiens; identical to SEQ ID NO: 222846

SEQ ID NO: 400635 - DNA, 1000 bp, Homo Sapiens; identical to SEQ ID NO: 222848

SEQ ID NO: 400636 - DNA, 1000 bp, Homo Sapiens; identical to SEQ ID NO: 289590

SEQ ID NO: 400637 - DNA, 1000 bp, Homo Sapiens; identical to SEQ ID NO: 222849

SEQ ID NO: 400638 - DNA, 1000 bp, Homo Sapiens; identical to SEQ ID NO: 117568

SEQ ID NO: 400639 - DNA, 1000 bp, Homo Sapiens; identical to SEQ ID NO: 222850

SEQ ID NO: 400640 - DNA, 1000 bp, Homo Sapiens; identical to SEQ ID NO: 289593

SEQ ID NO: 400641 - DNA, 1000 bp, Homo Sapiens; identical to SEQ ID NO: 222851

SEQ ID NO: 400642 - DNA, 1000 bp, Homo Sapiens
tttgggatgtaagagtgttcaactgtgagtttcatcatgtgtgtccgttgagcttgcttttaagagcaatgttttgctttgctctctggtccatgaactcatttccatttgagtgagttcccttagtgaattttgtctcctgcttggaaagtctctcttctgaacctggagcctgaatacattttcagagccaaattacaagtgggtgaagacatgctacaactactatttttagcaatgtttttaaatttgtgtctattggggtgggaaggggagtgaggccctaaagataggaattcactgatagctgaaatagatacaagcctaggagccccagcccccttttcttgaccatatcacaagtgattgaagcccagtgaattagtcggttagaattcgttctacaacatgatagaacttttcttactagcttcagaaatgcacattgatttgtgctatgatgggtggtgtttgtaacaatcactgttctataggcttatgatctgagcaaaatgtgaacttcagtatgtttactattgctcttacttgaaaactttttttcaaaaaaagcacaaattaaagtagtaaattcatatccatagatagttcattcattcaacaaatatttaccaagttcctaatataagtgaaggaccacttctcatattagattactaagtcatttgtatgaatatgtgtggcagtgaagagaacaggtctttcaaaaagcatttgattattttttttaaatacactctcttatttttctacttgtttttttgttaatcatagcaggatatgacaactcttatttgaattgattttttcatctaatgtaataatggaagccaaagtattcatatttcttaagatagccctaaatgtactcttgaacttcttactggaacaatgtttgatactctagtatgtaagctgtatttatgtaatatttagaacgacatgttaataaacaaagtaacattaaaacaggaaaaaaaaa

SEQ ID NO: 400643 - DNA, 1000 bp, Homo Sapiens; identical to SEQ ID NO: 289594

SEQ ID NO: 400644 - DNA, 1000 bp, Homo Sapiens; identical to SEQ ID NO: 117569

SEQ ID NO: 400645 - DNA, 1000 bp, Homo Sapiens; identical to SEQ ID NO: 289596

SEQ ID NO: 400646 - DNA, 1000 bp, Homo Sapiens; identical to SEQ ID NO: 222852

SEQ ID NO: 400647 - DNA, 1000 bp, Homo Sapiens; identical to SEQ ID NO: 117570

SEQ ID NO: 400648 - DNA, 1000 bp, Homo Sapiens; identical to SEQ ID NO: 223212

SEQ ID NO: 400649 - DNA, 1000 bp, Homo Sapiens; identical to SEQ ID NO: 289599

SEQ ID NO: 400650 - DNA, 1000 bp, Homo Sapiens; identical to SEQ ID NO: 117571

SEQ ID NO: 400651 - DNA, 1000 bp, Homo Sapiens; identical to SEQ ID NO: 117572

SEQ ID NO: 400652 - DNA, 1000 bp, Homo Sapiens; identical to SEQ ID NO: 222855

SEQ ID NO: 400653 - DNA, 1000 bp, Homo Sapiens; identical to SEQ ID NO: 117573

SEQ ID NO: 400654 - DNA, 1000 bp, Homo Sapiens; identical to SEQ ID NO: 289603

SEQ ID NO: 400655 - DNA, 1000 bp, Homo Sapiens; identical to SEQ ID NO: 289604

SEQ ID NO: 400656 - DNA, 1000 bp, Homo Sapiens; identical to SEQ ID NO: 222856

SEQ ID NO: 400657 - DNA, 1000 bp, Homo Sapiens; identical to SEQ ID NO: 289606

SEQ ID NO: 400658 - DNA, 1000 bp, Homo Sapiens; identical to SEQ ID NO: 289607

SEQ ID NO: 400659 - DNA, 1000 bp, Homo Sapiens; identical to SEQ ID NO: 220743

SEQ ID NO: 400660 - DNA, 1000 bp, Homo Sapiens; identical to SEQ ID NO: 289608

SEQ ID NO: 400661 - DNA, 1000 bp, Homo Sapiens
tgccacggcactccagcctgggcagcagagtgagactctctctcaaaaaaacaaaacttggctgttaatgtctgccctctgaattcagacacactatattagaccagaccaccatgtgtcattgtgtgtgtgtgtgtgtgtgtttgcgtgcgcatgtgtagaggagagagcagggtccctgagataatggtttccaaactgtatcgtagccgtccacaaagatgtaatccaaatctatttttctcacgtgtttaaaaaactgaaaagtgactactcagatatgttggaagtcacatcgaagactatcagaatattaccttgtgttcataggttaacttgtttttgtacacgtcttagttatttcaggcatctctttgcttaaaattgagtttcttgtaaatgtgactgatgagcgaggttagaagtggaagaaattcctgtgcatgttctataatctgacaccctgaaagcaagtttcctttcgtcattcacatgctcttgttctgccgtgactgttcaggtgtatggtagtaagtaaatgtattaacatggtgaacagtagtaatattctatcatagagtattagcccttgcaagttttcagggcgtcttttccgacttcagtttttgtgataaagaatgtgaacagttgttagatgttctcagtgattcaactttaaaacaaatttctcgtgatgattcatttcaaaatcctgagtgagtctgactgaaaaatacgagagaaaagagagtggtttccgtttgcagctacacagctgtgtgcatcgacgttctcctggggtgtgtgccaagcgaaacccaggggtgaattggattcttgaagagaccaaagcctgtaactgtccagcttctaatttcaaaacgggtccattagggcttcgttgtgttaacaagttgacaccatgactagtaaatgtaaacgtgtatgtataaaataaagtttagcaaattaagtgtcctgttaaaaaaaaaaaaaaaaa

SEQ ID NO: 400662 - DNA, 1000 bp, Homo Sapiens
agaagatgcaacactgaaagaacttctgatatgttctggagatactttgcttttaattgaaggacaacttcctcctctgggtttcctgaaggtgcccatctggtggtaccagcttcagggtccctcaggacactgggagagtcatcaggaccagaccaactgtacttcgtcttggggcagagtttggagagccacttccagccaaggtgcttctgggaacgagcctgcgcaagtttctctcctctacttgggagacatagagatctcagaagatgccacgctggcggagctgaagtctcaggccatgaccttgcctcctttcctggagttcggtgtcccgtccccagcccacctcagagcctggacggtggagaggaagcgcccaggcaggcttttacgaactgaccggcagccactcagggaatataaactaggacggagaattgagatctgcttagagccccttcagaaaggcgaaaacttgggcccccaggacgtgctgctgaggacacaggtgcgcatccctggtgagaggacctatgcccctgccctggacctggtgtggaacgcggcccagggtgggactgccggctccctgaggcagagagttgccgatttctatcgtcttcccgtggagaagattgaaattgccaaatactttcccgaaaagttcgagtggcttccgatatctagctggaaccaacaaataaccaagaggaaaaagaaaaaaaaacaagattatttgcaaggggcaccgtattacttgaaagacggagatactattggtgttaagaatctcctgattgacgacgatgatgatttcagtacaatcagagatgacactggaaaagaaaagcagaaacaacgggccctggggagaaggaaaagccaagaagccctccatgagcagagcagctacatcctctccagtgcagagacgcctgcccggccccgagccccggaaacttctctctccatccacgtggggagcttcagataa

SEQ ID NO: 400663 - DNA, 1000 bp, Homo Sapiens; identical to SEQ ID NO: 117577

SEQ ID NO: 400664 - DNA, 1000 bp, Homo Sapiens; identical to SEQ ID NO: 117578

SEQ ID NO: 400665 - DNA, 1000 bp, Homo Sapiens; identical to SEQ ID NO: 289614

SEQ ID NO: 400666 - DNA, 1000 bp, Homo Sapiens
cgcctcagagcccagcacggagctgggcaaggctgaagcagacacagactcggacgcacaggccctgctgcttggggacgaggcccccagcagtgccatctctctcagggacgtcaatgtgtctgcctagccctgttggcgggctgaccctcgacctcccagacaccacaattgtgccttctgtgggccaggcctgccatgactgcgtctcggctctggccatgagctctgcccaggcccacaagcccctcccctgggctctcccaggcagggagaatggggagagggacctccttgtgtctggcagagacctgtggacctggcctccccactcccagctctcttgcactgcaggccctggggccagcccgcacacaccatgcctcctgtctcaacactgacagctgtgcctagccccggatgccagcacctgccaggtgccgccccggggcaagggccccagcagccctatggtgaccgccacactgtgccttaatgtctgccgggggcccaggctgtgctgtccctgcagcacgcctccttgcagggatctgagccaccctccccgcacagccctgcaccccgcccctagggttggcagcctcagttggcccctggcagaggaacaaggacacagacattccctcagtgtggggggcaggggacacagggagaggatggttgtccctggggagggccctctggccccaggcaaccttagcccctcagaacagggagtcccaggacccagggagagtgtggggacaggacagcctgtctcttgtagcttcctggggtgggaggcacaggggcaaagcaataccccagggaaagtgggaggtggtgctggtgctctctccaggcccaccatgctgggagaggcggccagagcctggggcctccagcctgggactgctgtgatggggtatcacggtgatggtcccattaaacttccactctgcaaaaaaaaaaaaaaaaaaaaaaaaaaaaaaaaaaaaaa

SEQ ID NO: 400667 - DNA, 1000 bp, Homo Sapiens; identical to SEQ ID NO: 117579

SEQ ID NO: 400668 - DNA, 1000 bp, Homo Sapiens; identical to SEQ ID NO: 289616

SEQ ID NO: 400669 - DNA, 1000 bp, Homo Sapiens; identical to SEQ ID NO: 289618

SEQ ID NO: 400670 - DNA, 1000 bp, Homo Sapiens; identical to SEQ ID NO: 222859

SEQ ID NO: 400671 - DNA, 1000 bp, Homo Sapiens
attgaggtaaaatatttataacataaaactgaccagcttacccatttttaaatatgcaattcagtggattaagtacattctcattgttgtccagccatcaccatcatccatctccagaagttttccatcttcccaaattctgtgcccattgaacaataactccccacctccccttcccctagcaacagccatactttttgtctctatcatcaacttcactactcatatttctcatgtaagtggaatcatacagtatttgtccttttgtgactggtttcacttagcataaagtctttaagatgcatccatgtttccagtgtttcggtttttttagaaaaactcatacgtgattgcagccgggcatggtggctcacgcctgtaatcccagcacttgggaggccaaggcaggcggatcacctgaggtcaggagttaaagaccagcctgacaaacatggagaaaccccatctctactaaaaatacaaaattagctgggcgtggtggcacatgcctgtaatcccagctactcaggaggctggggcaggagaattggttgaacccaggaggcggaggttgcagtgagccgagattgtgccactgcactccagcctgggcaacaagggtgaaactctgtctcaaaaaaaaaaaagaagaaaaaaacataagtgattgcagaattttgttcttctcataatttctggtttagaaaattatggagccttacatcctgatcatgctgggccttagaattctgacacagtgagtcatcacatttcctcccactgcctgtggccttgttccaccatgactctcacagtacagtgtaggcttagtgtagtagtattcccttggaaagggtctggcctaccatcacatgccccaagaaacttctggttggtaaagaagataggctgcttattgccatgtgtagtcacttccaagtgcccactgcctttccatcctgcaattgtggcctgtgtataattaaatgattttagcctc

SEQ ID NO: 400672 - DNA, 1000 bp, Homo Sapiens; identical to SEQ ID NO: 289619

SEQ ID NO: 400673 - DNA, 1000 bp, Homo Sapiens
gaaaagactcaaatgatcacaattaacagagatctgttaatggcttttgtttattttgatcaaagtcattgtggttaccttcttgaaaaggatttggaagaaatactttatactcttggactacatctttctcgggctcaggtaaagaagcttcttaataaagtagtgctccgtgaatcttgcttttaccggaaattaacagacacctcaaaagatgaagagaaccatgaagagtctgagtcattgcaggaagatatgctaggaaacagattattacttccaacaccaacagtaaagcaggaatcaaaggatgtggaagaaaatgttggcctcattgtgtacaatggtgcaatggtagatgtaggaagcctcttgcaaaaattggaaaagagcgaaaaagtaagagctgaggtagaacagaagctgcagttactagaagaaaaaacagatgaagatgaaaaaaccatattaaatttggagaattccaacaaaagcctctctggtgaactcagagaagttaaaaaggaccttagtcagttacaagaaaacttaaagatttcggaaaacatgaatttacaatttgaaaaccaaatgaataagacaatcagaaacttatctacggtaatggatgaaatccacactgttctcaagaaggataatgtaaagaatgaagacaaagatcaaaaatccaaggagaatggtgccagtgtatgataaaatccatgtagtgatgaggaatggtgttaaataatgtaatatataaaaatcatgatataagaatgtttgaaggtgatgcatgtttgattttagtagtataaatgtattttagttcaaatgatgtataaagttttatgaatgtgagtttctgcttttgaaaattgcttgtaattcctagccttcaaattattaaacactccttgagtgaaataattttgcattgcaaagtgttttaggatgaactttgttatagttttaactccaataaagttcatcagtttaa

SEQ ID NO: 400674 - DNA, 1000 bp, Homo Sapiens; identical to SEQ ID NO: 117581

SEQ ID NO: 400675 - DNA, 1000 bp, Homo Sapiens; identical to SEQ ID NO: 117582

SEQ ID NO: 400676 - DNA, 1000 bp, Homo Sapiens
acacctcccagcactcggactacggccagcgattccagcagcgcatgcagactcacgtgtaggggccagagcctggctggggcatctctgcggggcagaggagaaggctttcacagctgttccctgatattcagggacattgctcattgctcccttctcggaccagccttcttcctcccaccatggcaggtggggagcaggtctcccagaaacaccccgtcccgaggatggtgctctgtgcatgccccagcctcctgggcctgcccttccctcttcttcgggaggatgtgtctcttctgacctgcactcttgcctgaccctagaatggggacagggaaagtgaaggttagggaaagcagaggggggcactttttagcattccctttctatcccacccctctgatctcccataagtggaaatgggggtacccagggatgggcaggctttggcctagggacatgaagtatgggagtgggtggctgtggcacagacaggtggaaaacgggatagcctggccagtccctctgttgtctgcattcgtgccctgggtgcctctctccttcctcagggtactgcagaagggagcgaacagggtactgttcgctcttgtctacagaacagccctggcactgcattcaaatccagtcttcattcagctgggatcaaaatgccagtcaccttggctacccactgtggacagctgtctgtcagcatgcagagggatccaggaatccccccggcagcacggcccgctttccttctcctccatgctgggccagccagataagtcagggtcctggtggagaaagaaaggctaggaccatgtcctcattgacccagatactgctgtgtgctgcacagcagtgaaccaacactagagggagccacacaagcctcctctccccagtctgccccacttcctggctttaactcttgagctggtttggggagtggtgaggtaggggtgggggtgctgtaggctctttttcaaaaaaaaac

SEQ ID NO: 400677 - DNA, 1000 bp, Homo Sapiens; identical to SEQ ID NO: 289622

SEQ ID NO: 400678 - DNA, 1000 bp, Homo Sapiens; identical to SEQ ID NO: 117583

SEQ ID NO: 400679 - DNA, 1000 bp, Homo Sapiens; identical to SEQ ID NO: 117584

SEQ ID NO: 400680 - DNA, 1000 bp, Homo Sapiens; identical to SEQ ID NO: 222862

SEQ ID NO: 400681 - DNA, 1000 bp, Homo Sapiens; identical to SEQ ID NO: 289625

SEQ ID NO: 400682 - DNA, 1000 bp, Homo Sapiens; identical to SEQ ID NO: 289626

SEQ ID NO: 400683 - DNA, 1000 bp, Homo Sapiens; identical to SEQ ID NO: 222863

SEQ ID NO: 400684 - DNA, 1000 bp, Homo Sapiens; identical to SEQ ID NO: 289628

SEQ ID NO: 400685 - DNA, 1000 bp, Homo Sapiens; identical to SEQ ID NO: 289629

SEQ ID NO: 400686 - DNA, 1000 bp, Homo Sapiens; identical to SEQ ID NO: 289630

SEQ ID NO: 400687 - DNA, 1000 bp, Homo Sapiens; identical to SEQ ID NO: 289632

SEQ ID NO: 400688 - DNA, 1000 bp, Homo Sapiens; identical to SEQ ID NO: 117587

SEQ ID NO: 400689 - DNA, 1000 bp, Homo Sapiens; identical to SEQ ID NO: 224472

SEQ ID NO: 400690 - DNA, 1000 bp, Homo Sapiens; identical to SEQ ID NO: 222864

SEQ ID NO: 400691 - DNA, 1000 bp, Homo Sapiens; identical to SEQ ID NO: 117589

SEQ ID NO: 400692 - DNA, 1000 bp, Homo Sapiens; identical to SEQ ID NO: 222865

SEQ ID NO: 400693 - DNA, 1000 bp, Homo Sapiens; identical to SEQ ID NO: 117590

SEQ ID NO: 400694 - DNA, 1000 bp, Homo Sapiens; identical to SEQ ID NO: 117591

SEQ ID NO: 400695 - DNA, 1000 bp, Homo Sapiens; identical to SEQ ID NO: 289639

SEQ ID NO: 400696 - DNA, 1000 bp, Homo Sapiens; identical to SEQ ID NO: 117592

SEQ ID NO: 400697 - DNA, 1000 bp, Homo Sapiens; identical to SEQ ID NO: 289642

SEQ ID NO: 400698 - DNA, 1000 bp, Homo Sapiens; identical to SEQ ID NO: 117594

SEQ ID NO: 400699 - DNA, 1000 bp, Homo Sapiens
catcctggggaagctcccctgactcctggctctcctggaagcctgtggtgctccttcacaatggcccgtggcccttcataggtcccgtaagccagtgtcacagggattcggcttttctcttctgtgtttgcctgctgcgggactgtgagcagcttcagggccaagacagtgcctttccatccgtgaatctcctgatccatcagaatactcgaaagagaaataccgactgagtgtattcattaaagaattaatgttccttacaggatcattgttgttgaactgacctgacatgtgtatagtaatctcatgaacaagaaagaatgtgttcacacgtttgcttaaattgaatttagcaatcgcattaggatactgatatttccacaatgtatatacactatccttttaaatttaacttatttgctttttagacggaagctcctcagtcttagagagttctgaaggtggatttctcagccacgttcaacctgatgagttcactgcttcttccccaaacattgcagagctgcaggaaatttgggctgtgaacttacgtgtgatgtttactattatgcaaatgctcagacgacacacacgacctaccctgatggtttggaagttgtgcagtttcttaacaagcagacagatcagaccctctagttgcaggaaaaaaagctcagggcggtcgagtgcagtggctcgcgcctgtaatcccagcactttgggaggccaaggtgggcagatcacgaggtgaggagttcgagaccaacctggtaaacatagggaaaccctatctcttctaaaaaaaaaaaaatacaaaaaattagttgggcgtggtggatggcacctgtagtcttagctactcaggaggctgaggcaggagaatcgtttgaacctgggaggtggaggttgcagtgagccaagatcatgccattgcactccagcccgggttacagtgtgaggctttctaaaaacaaaaacaaaacaacaacaacaacaaaac

SEQ ID NO: 400700 - DNA, 1000 bp, Homo Sapiens; identical to SEQ ID NO: 289644

SEQ ID NO: 400701 - DNA, 1000 bp, Homo Sapiens; identical to SEQ ID NO: 117596

SEQ ID NO: 400702 - DNA, 1000 bp, Homo Sapiens; identical to SEQ ID NO: 117597

SEQ ID NO: 400703 - DNA, 1000 bp, Homo Sapiens; identical to SEQ ID NO: 117598

SEQ ID NO: 400704 - DNA, 1000 bp, Homo Sapiens
ccacaacctgcacgagctgcgcgtgctgcggcgttaccggctgcagcggcgggaggactacacgcgctacaaccagctgagccgtgccgtgcgtgagctggcgcggcgcctgcgcgacctgcccgaacgcgaccagttccgcgtgcgcgcttcggccgcgctgctggacaagctgtatgctctcggcttggtgcccacgcgcggttcgctggagctctgcgacttcgtcacggcctcgtccttctgccgccgccgcctccccaccgtgctcctcaagctgcgcatggcgcagcaccttcaggctgccgtggcctttgtggagcaagggcacgtacgcgtgggccctgacgtggttaccgaccccgccttccttgtcacgcgcagcatggaggactttgtcacttgggtggactcgtccaagatcaagcggcacgtgctagagtacaatgaggagcgcgatgacttcgatctggaagcctagcggatctcccactttgcatggctgtcttttacagatgggaaaactgaggcctgatgctggagattctatgagggtgctctcctcaagggtatcagacggtcgtaggttcttaagaatttgattcatcagtggcaggccatgcatagagccacgggaggtgcgtccttgttttccagggaatgttcttagaacttggactactgattattaattgactgtgccttgggaaacagtgggaagtaacttggtgcagcactggggtattgttggcttcttgtgttggaaactttgtaatgtaaaaggaaaaactggaaatccccacgccctgtttccctttatcgtcttgtggttggactggttcaattcgtttaactcgaattcttgctcctggccgtggttaagctgtgtacagatgatggagagtttggcctcaagtttttataaactgagcgagactagtgttcaggatctcctcccttgtttaaatgtcaataaatgccccaactgctttgtaagtgc

SEQ ID NO: 400705 - DNA, 1000 bp, Homo Sapiens; identical to SEQ ID NO: 289651

SEQ ID NO: 400706 - DNA, 1000 bp, Homo Sapiens; identical to SEQ ID NO: 222871

SEQ ID NO: 400707 - DNA, 1000 bp, Homo Sapiens
ttaatgtgtgcttgaaatatccagaaaacctatggagttagtaaattctgggctgtcatatgtaggatagccactttttaggtatatgtacatttatatttctatcaattccttagaaagtaaaataaatgaatagatcaaatgttgtgttcatgtttggggaaaatataatttgcagaaacctatgaagtagagcaaagatgctttaaaaagataagtttttttgaactaaattttttttagttctaataatgcacataggatattagtacatcgtacacgtgctaggaaaaaacagcttcagtgtctttgtttaatgtgttgaaactcatctttttaaatcttgaaaaaccaattgtttacttgaaacttgaaagtagcatatttttctgttttttggttgtttgttcatttgtattagcacaatttaatgtaattcctggtttggaggcagcaagacctatgagcaagaactatttacttgaccctcgtttttttctcttgttcttgtgtggtctgaaatctaaaactagactttattatgatagatttcctataagccaatttctaataacaaatagatttattatttaatctgtaccttctatcttctcataattcgtggtcttacagccttccaaaataactccagttgggcacccatgagctaggatcaaactttctttatatactttatatattttacattatttctgatttttaaagcaaatgattgtgattacactcaacctaaatagttatgaacagtttcagaacaatgaaaaattacaatactatgtgatagtattgtaactatttttctattttagtcatatgtcgcttatatcctaccagaactcttaaatctataatattcgatatattctacaaactgctttattgtagaagccatatttatgtttattttataatgttttctagtgtcaaactgtactgtggagaaaagaaatgttagatctgtaaaaaaaaaaaaaaaaaa

SEQ ID NO: 400708 - DNA, 1000 bp, Homo Sapiens; identical to SEQ ID NO: 289652

SEQ ID NO: 400709 - DNA, 1000 bp, Homo Sapiens
cagtttagttcagaatggaaacgaacgttctgatgacactgtttcaaatataagcttgatagaccaaaagatgcctgacatagagccaaattctgaaaataattgtagtagtagtgatatagtcaatggacacagtgaaatagagcaaacacctttagtttcatcagatcctgctttgaaaattgatacaaacagaatcaggacagaaaatggttccattttgcccagtgttgtaccacaagaacacaacaccttgccagtatctcaggcaccttccaaaccaaatctgacaagtgtacatacttcatatggcttaattttaacaaaaccatacgtcagaccattgcctcccagttaccttgatgaacggtatcttagtatgccaaaacgcagaaaatttctgactgatagagtagatgcctgttctgatcaagataacgtgtataaaaaatcagtgaaaagattaagatgtggcaaatgcctgaccacctactgtaatgcagaagcacttgaggctcatcttgcacaaaagaaatgtcagacactctttggatttgattcagatgatgaaagtgcctgatgaaaatggttcagaaagatctgtcaatcaagcagtagtgtgaaaaaagcactataagaaaatgcatcatcagtttgctatttccctgatggccttaattttagagtggtcttggattactaaagataaagacaaagcacattttctagaatgaactcacagagatgtgctggcttagactccaaaaggattataaaactcccaaagtaccagttttccagaaaaccacattttacagtttatgatgattaatagcagcagcatgttcagtttcgcttatatgagaaacatgtttaggcaactagtcagaaaaccagctatggccttacagaaagggaaaagtttaacccattattaaaaagtgtgtgtgggaggggggctggtttacaatattaaaccatttaaagtattttattctac

SEQ ID NO: 400710 - DNA, 1000 bp, Homo Sapiens; identical to SEQ ID NO: 117600

SEQ ID NO: 400711 - DNA, 1000 bp, Homo Sapiens
aagaggtcactaagcccatcgaagagaggattcaaatggaaggacaatatccttgccaacctgaatctaaagcatggtttccaagatgctacaggcagcgagcctctctctagtgacctgggtagtttgcacggtttggctggaaaccacagtccccccatctctgccagaaccccccatgtggccactgtcctcagacagctcctggagcttgtggataagcactggaatggctccggctccctcctcctcaacaagaagtttctcggtcctgcccgagatttgcttctgtctttggtagtcccggctccttctcagccgaggtgttgctcacatcctgaagacacgatgaaagcattctgcaggagggagcttgaactgaaggaggctgcgcagctggtccctaatgacatggaaagtttgaagcaaaaactggtcagagtgctggaggaaaacctcattttgtcagaaaaaattcaacagttggaggaaggtgctgccatctcaattgtgagtgggcaacagtcacatacttatgatgatcttctgcacaaaaaccaacagctgaccatgcaggtggcttgcctgaaccaggagcttgcccagctgaaaaagctggagaagacagttgccattctccatgaaagtcagagatccctggtggtaactaatgagtatctgctgcagcagctgaataaggagccaaaaggttattccgggaaagcgctcctgcctcctgagaagggtcatcatctggggagatcatcgccctttgggaaaagcacgttgtcttcctcctcaccagtggcacatgagactggtcagtatctaatacagagcgtcttggatgctgccccagagcctggcttatagagctagcatggaactcacaccacagcttccctggtccacagaggctctcaccgccattgccaccagtatggtggtatgtactcacaaagattaagaaagaaatgtattccgaaaaaaaaaaaaaaaa

SEQ ID NO: 400712 - DNA, 1000 bp, Homo Sapiens; identical to SEQ ID NO: 117602

SEQ ID NO: 400713 - DNA, 1000 bp, Homo Sapiens; identical to SEQ ID NO: 289654

SEQ ID NO: 400714 - DNA, 1000 bp, Homo Sapiens; identical to SEQ ID NO: 289655

SEQ ID NO: 400715 - DNA, 1000 bp, Homo Sapiens; identical to SEQ ID NO: 222874

SEQ ID NO: 400716 - DNA, 1000 bp, Homo Sapiens; identical to SEQ ID NO: 117604

SEQ ID NO: 400717 - DNA, 1000 bp, Homo Sapiens; identical to SEQ ID NO: 117605

SEQ ID NO: 400718 - DNA, 1000 bp, Homo Sapiens
cctccctggaaaccgttggcatctacttcggactagtgtaccgtatccacagcgtcctccaaggcttcatccccctcttccagaagtttaggctgacagggttcaggaagactgactgaggccacttccaggtgggcagcagaggcaggccccagtgtgaccaccactgcgacccctgagcccacaagggcagagcagcgttctgagagacgcacaggagaccaagccagaccaataaacagaacacttttccttccatgtggtctgaatgttggcaccagcccgggcaggggcatctcatttgggcagtactgctgtgcaacccagctgcaaggatggaaggcagagggtgggtgtggggcctgaggcttcacagtacctggaccagcaggaagattctgggaggtcactgctctcagaggacagcaagggaccctgagctctgcaagctgtgatctgtctgggttcatggtttttctcaaatcccaggctatctgcatgcgctctcaggtgctaccgagccatcctgggagagatggatggtccactgctttgaggcagggagccatcgggctggggccccttggtgaacctgatgcaggtaagatgctgaggactaaaaccattttttttgcacccaaaaaaaaaggcaggaaaatgatcatcagaaactaaatggcagccaggcatgggggctcacaactgtaatcctcgcactttgggaggctcaggctaagggtcgcttgaagctgagagttcaagaccaacctgggcaacatagtgagacccccatctctacaatttttttttaatgaccaaatgtggcggtacatacctgtacatacctgcggttccagctactcaagaggctgaggcaggaggactgcttgagcccaggagttcagggctgcagtgaggtacgatcaagccactgcactccagcctgggcgacagagcaagatcgtttctctaaaattaaaaaaaaaaaaaaaagacaaat

SEQ ID NO: 400719 - DNA, 1000 bp, Homo Sapiens; identical to SEQ ID NO: 289660

SEQ ID NO: 400720 - DNA, 1000 bp, Homo Sapiens
tttatcaactgctttccactcagattcagacctgatgcttcagaatccatctgagtttgcacagtcagtaaaatccttgctggaagcacagaagcagtccattgagtctggctccatagctggtggggagcacctctgttttatgggcagtggcagggaggaagaagacatgtatatgaacatggtcctggcacactttttacagaaaaacaaagaatatgtgagtattgccagtggaggatttatggcactgcagcagcacctggcagacattaatgtggatggaccagaaaatggatatggccattggattgctagtacctcaggctcaaggagcagtatcaattctgttgatggtgaatctcctaatggctcaagtgatagaggaatgaaatcactagtaaataaaatgactgtggctttgaagacaaaatccgttaatgtcagggaaaaagttatcagttttatagagaatacatcaactcctgtggatcggcatgtgagcagcagtgacagagtgggcaagccttaccgtggcgtaaagcctgttttcagcattggggatgaagaagaatacgacacagatgaaattgacagttcttcaatgtcagatgatgatagaaaagaggttgtaaacattcagacttggataaacaaaccagatgtcaaacatcattttccttgtaaagaagtaaaagaaagtggacacatgtttcccagtcatctgttggttactgcaacacatatgtactgtttaagggagattgtttcacggaaaggattggcttatatacagtctcgacaagcgctgaattctgtagttaaaattacatccaaaaaaaaacatcctgaactcattaccttcaagtatggaaatagcagtgcttcaggaatagaaatcttggcaatcgaaaggtatttgattccaaatgcaggggatgcaactaaagccataaaacagcagatcatgaaagttttggatgctttggaaagttaatat

SEQ ID NO: 400721 - DNA, 1000 bp, Homo Sapiens; identical to SEQ ID NO: 117606

SEQ ID NO: 400722 - DNA, 1000 bp, Homo Sapiens; identical to SEQ ID NO: 222875

SEQ ID NO: 400723 - DNA, 1000 bp, Homo Sapiens; identical to SEQ ID NO: 289663

SEQ ID NO: 400724 - DNA, 1000 bp, Homo Sapiens; identical to SEQ ID NO: 222876

SEQ ID NO: 400725 - DNA, 1000 bp, Homo Sapiens; identical to SEQ ID NO: 117607

SEQ ID NO: 400726 - DNA, 1000 bp, Homo Sapiens; identical to SEQ ID NO: 117608

SEQ ID NO: 400727 - DNA, 1000 bp, Homo Sapiens; identical to SEQ ID NO: 117609

SEQ ID NO: 400728 - DNA, 1000 bp, Homo Sapiens; identical to SEQ ID NO: 289671

SEQ ID NO: 400729 - DNA, 1000 bp, Homo Sapiens
aacaaggctcttcaacaccccccaaaatataatactagttcaccggcaatggatccaaaccaagaagaaatccctgatttacctgaaaaagaattcaggaggttattaagctaatcagggagaggccagagaaaggcaaagcccaatgcaagaaaatccaaaaaatgttacaagaagtgaagagagaaatattcaaggaaatagatggcttaaagtaaaaacaatcaaaaattcaagaaactttggacacacttttagaaatgcaaaatgctctggaaagtctcagcaatagaattgaactagtagaagaaaaaaattcagagcttaaagacaaggtcttcgaattaacccaattcaacaaagacaaagaaaaattaataagaaaatatgaacaaagcctccaagaagtctgggattatgttaaacaaccaaacctaagaataatcaatgttcctgaggaagaagagaattctaaaagcctggaaaacatatttgggggaataattgaggaaaacttccctggccttgctagagacctagacatccaaatacaagaagcacaaagatcacccaggaaattcatcaccaaaagatcttcacctaggtacactgtcatcaggttatccaaaggaaaccattttaagagctgtgagcagaagcaccaggtaacttacaaaggaaaaatctatcagattaacagcagatttctcagcagaaaccctacaagctaagacagaattggggccctatcttcagccccctcaaacaaaacaattatcagccaagaattttgtatacagcgaaactaagcatcatatttgaaggaaagatacagtcatcttcagacaaacaaatgccaagataattcacaccaagccaccactacaagaactgataaaaggagctctaaatattgaaacaaatcctggaaaacagagcttctttaaagcataaatcacgtgggacctattaaaaaacacacacacacaagttaaaaagc

SEQ ID NO: 400730 - DNA, 1000 bp, Homo Sapiens; identical to SEQ ID NO: 222878

SEQ ID NO: 400731 - DNA, 1000 bp, Homo Sapiens; identical to SEQ ID NO: 289674

SEQ ID NO: 400732 - DNA, 1000 bp, Homo Sapiens; identical to SEQ ID NO: 289676

SEQ ID NO: 400733 - DNA, 1000 bp, Homo Sapiens; identical to SEQ ID NO: 117612

SEQ ID NO: 400734 - DNA, 1000 bp, Homo Sapiens
ttacctgaaatatttattccgtcaaccccctctcccatcctctgtggattttactcagagccagggaagttctgggtttctttgggtggctatgattctggttttctatatcactgtgagttccccccttgtgatgaaagcagtgatttcaaagaacaaaaagatgaacctattgatgtccgttatcttgcggatacagaggacaatcccatccaaactatcactttcaacattaacaaagttatgatgttttgtggaatgaaaaatggagcaattcgagtctatgtcctaaatcaaaatgatccttcattgaccagtttggtggactactggcacttcaatatgcatgacaataattatggatgtattaaaagtattgctaatagctttgatgatcgtttcttggtgactgctggagcagatggcaatatctttgttttcaacattttttctgaatttatgctaaggaaagacatgaaggccaaagttccatctcccaggtttggaattgaaacagagccaattccagaagacattgaagatcccaaagcctacagtatcgagaatgctaggagaaaaagagaacatgacaagttaatgaaagaagtgggagaaataaaggcacggaagagagagcaaatcaaagctttgaggagtgaattttgtaatctattagaaatgaatgaaaaattaccaaagcatatgcagtttaaacgaacagtaagcctaatataaacttgatttttattttaacatatgctatttctggatagagatgactattttcccaacaagtagaaacacttaaaatcatctttcttttttgtttgttcctttcaaaatttcaatagccatttattttgggcatcttttaatttgtatgtggggtttatcccttttaatcagttaagattcttgttgacacaaattgttttacatcaactgttgttatagaacacatgaaaggaatacatggggaagaaataaagtagaacccaag

SEQ ID NO: 400735 - DNA, 1000 bp, Homo Sapiens; identical to SEQ ID NO: 222881

SEQ ID NO: 400736 - DNA, 1000 bp, Homo Sapiens; identical to SEQ ID NO: 117613

SEQ ID NO: 400737 - DNA, 1000 bp, Homo Sapiens
gagagcctgctatggaatttctctgggatttcctgaaccatcaggagggtccccgcataagagatcatttaagccacggggagatcaacttacatgaattttcaaaagaaacaactaatcagttgcttgcattttctcttgtactgctactcagattcgttgatgactgtctgctatcagtttttaaggaaaaatcagccgtagaattgttgattagtcttgcagaaggctatagttctcgctgtcatccggtttttcagcttaaaaaacaggtgctgagctgtgaggagagcatcagggtttgggctctgctgcctttccccgaagaactcactcggcaagccgtcagattagaagataattctgaaacaaatgcctgccactctttgattacaaaaatgacggatgagctgtatcaccatatgcctgagaatcgttgtgtgttaaaggacttggatcgtcttcctactgagacgtggccccagcttctccgtgagctctgcagcacacctgttcccaccctgttctgccccaggattgtgctggaagtgctggttgtgctccgaagcatcagcgaacagtgccgccgtgtgtccagccaggtcaccgttgcctcagagctgagacacaggcagtgggtggaaaggacgctgcggtctcgccagcggcagaactacctgcgtatgtggagtagtatcagactactgtcccctgtgctcagcctgatactgttactcattgcgctggagttggtcaacattcatgctgtttgtgggaagaatgcgcatgagtatcagcagtacctaaagtttgtaaagtcgatcttgcagtacacggagaacctggtggcttacaccagttacgaaaagaacaagtggaatgaaactatcaatcttacacatacagctttgttgaaaatgtggacttttagtgagaagaaacaaatgttaatacatttagccaagaaatccacaagtaaagtactcttatgaaaacttgt

SEQ ID NO: 400738 - DNA, 1000 bp, Homo Sapiens
acaaccactcttttgaatgtacaacttttttttctgaaatacacttttctaaaaccctcttaactggaggtttcctgttttcttcttgttttaactggtggtttccagtaggcaaaataaaatgacaggcatgctagttttttttttttttttttttttttaagaaaactgaaattaagccaggcagggtggcgcactactataatcccagctgctggggcggctgaagtaggagggtcacttagcccaagagtgcaaatctaccagcctaggcaacatagcaaggtcccatctctaaaaaagaaatttaatttaaatttgtaagaaaaaagaaaactgaaacagaactgccagtacaatgtttgttgcaattgtttccaaaactttgaaataacgaaaccactattcaaatgtaaattttacccattcccacctgatagtactgtttattactttgctatgcaggagaaacaaaacagctttttatttgtgtgtatactctgaagtcaatgtgcatgggttaaatcccacctctgcttcattttatttgtgtggctttggacaagttcctaagccctctgtgtcaggcccctcattaacaaaatggagtttatgatggcatctacctcacatggttattgtgtggttgaaattagttcaaatctgtaaagtatgttgatgagtatctggtacttggcaaacactatataattgttagctttattattatgtgttgtttgaaggggaaaaaagtttttgtagattggagaacaccatgtaagagctactaagctcaccaccttcccatccaattattactcctctaaatgaatactacttaaaagtgatggagcttctgtttgtttattgaattgctaatacaaataaatatttgactataacttcttatactcattttaattttaacctgaaatgtcattaaattatgctgataaactttgaataaattgtgatacaaaagataaaaaaaaaaaaaaaa

SEQ ID NO: 400739 - DNA, 1000 bp, Homo Sapiens; identical to SEQ ID NO: 289679

SEQ ID NO: 400740 - DNA, 1000 bp, Homo Sapiens; identical to SEQ ID NO: 117614

SEQ ID NO: 400741 - DNA, 1000 bp, Homo Sapiens; identical to SEQ ID NO: 222883

SEQ ID NO: 400742 - DNA, 1000 bp, Homo Sapiens; identical to SEQ ID NO: 289682

SEQ ID NO: 400743 - DNA, 1000 bp, Homo Sapiens
ataagtatggcttagattacctgaaaaatcaaccagcaagagtatgtgaacattgtttccaagaactgcagaaattagatcaccagcactcccctaggattggatctcctggaaatcacaaatctccttcaagtgccttatcatcagtcttacatagcattccatcagggaggaaacagaaaaaaatcccagctgctctcaaagaagtatcagcaaacacagaggattcttctatgagtggctacttgtacagatcaaagggcaataaaaaaccctggaaacacttttggtttgtcataaaaaataaagtactatatacatatgctgcaagtgaggacgtggccgctttggagagtcagcctttattaggattcactgttattcaagttaaagatgagaattccgagtctaaagtatttcagttactgcacaaaaacatgttattttatgtattcaaagcagaggatgctcattcggctcagaagtggatagaagcatttcaggaaggcacaatattgtagcagtattggtttcatctcttctgtgattccaaagaggtggaatttcatcagaatggagtaaatgcaattcaaaaattgtataaaaatgaacactgccaagataaagccaaccagacccttcatcaaagaaattgttttgttaggtataagcaatttttaaaaggtgtttgttttttcatttatgttatttattaaaattttgatgtttacttaatggtcagaattatttctgagacacactgaattctaaagtaccatttctttagagaccagaaaaactatcttaatactgtatactgtattaactattcgtgacatagttcacactgttttcttaccttacattgtaacaatcttactggtggaaagtctttgtaaggaaaaaacacatagcaaggagcaaatttccacaaagtgcttggtttaggaattgtgattattataaaactgctgatgaaaaaaatgcatgtctttgaatc

SEQ ID NO: 400744 - DNA, 1000 bp, Homo Sapiens; identical to SEQ ID NO: 289683

SEQ ID NO: 400745 - DNA, 1000 bp, Homo Sapiens; identical to SEQ ID NO: 222884

SEQ ID NO: 400746 - DNA, 1000 bp, Homo Sapiens; identical to SEQ ID NO: 222885

SEQ ID NO: 400747 - DNA, 1000 bp, Homo Sapiens; identical to SEQ ID NO: 222886

SEQ ID NO: 400748 - DNA, 1000 bp, Homo Sapiens; identical to SEQ ID NO: 117616

SEQ ID NO: 400749 - DNA, 1000 bp, Homo Sapiens; identical to SEQ ID NO: 289687

SEQ ID NO: 400750 - DNA, 1000 bp, Homo Sapiens; identical to SEQ ID NO: 117617

SEQ ID NO: 400751 - DNA, 1000 bp, Homo Sapiens; identical to SEQ ID NO: 289688

SEQ ID NO: 400752 - DNA, 1000 bp, Homo Sapiens; identical to SEQ ID NO: 289689

SEQ ID NO: 400753 - DNA, 1000 bp, Homo Sapiens; identical to SEQ ID NO: 222889

SEQ ID NO: 400754 - DNA, 1000 bp, Homo Sapiens; identical to SEQ ID NO: 222890

SEQ ID NO: 400755 - DNA, 1000 bp, Homo Sapiens; identical to SEQ ID NO: 117618

SEQ ID NO: 400756 - DNA, 1000 bp, Homo Sapiens; identical to SEQ ID NO: 117619

SEQ ID NO: 400757 - DNA, 1000 bp, Homo Sapiens; identical to SEQ ID NO: 289693

SEQ ID NO: 400758 - DNA, 1000 bp, Homo Sapiens; identical to SEQ ID NO: 117620

SEQ ID NO: 400759 - DNA, 1000 bp, Homo Sapiens; identical to SEQ ID NO: 289695

SEQ ID NO: 400760 - DNA, 1000 bp, Homo Sapiens; identical to SEQ ID NO: 222894

SEQ ID NO: 400761 - DNA, 1000 bp, Homo Sapiens; identical to SEQ ID NO: 117622

SEQ ID NO: 400762 - DNA, 1000 bp, Homo Sapiens; identical to SEQ ID NO: 289698

SEQ ID NO: 400763 - DNA, 1000 bp, Homo Sapiens; identical to SEQ ID NO: 222895

SEQ ID NO: 400764 - DNA, 1000 bp, Homo Sapiens; identical to SEQ ID NO: 289699

SEQ ID NO: 400765 - DNA, 1000 bp, Homo Sapiens; identical to SEQ ID NO: 117623

SEQ ID NO: 400766 - DNA, 1000 bp, Homo Sapiens; identical to SEQ ID NO: 117624

SEQ ID NO: 400767 - DNA, 1000 bp, Homo Sapiens; identical to SEQ ID NO: 117625

SEQ ID NO: 400768 - DNA, 1000 bp, Homo Sapiens; identical to SEQ ID NO: 117626

SEQ ID NO: 400769 - DNA, 1000 bp, Homo Sapiens; identical to SEQ ID NO: 117627

SEQ ID NO: 400770 - DNA, 1000 bp, Homo Sapiens
gtggggaacagaagtatatgtgcttaagaacatgacaggttcatgcaaatatgctctctttctttagaatatttctgtaggtttcttgggactgacatttaaaacgcctcacttttgaatgtgcacaaaacctgctcattaacatgcatgtgtataatttgtacctgcagatctgatgttgcataatacaatcaaattactagattttttaaagagagaaataattacctgcacaaagcagagaacttcataaaacattaacccctaattcactcttcttaaatagcttggcaaataagactttacctttaaatgaatttctcagcatttatactaaaaattatgtaacgtgctcattagattttttgtgtgtgtggcttgagaatcccatctcctaaattgagtgtctaaaactgagccatttgtcatcttcagctgagaaactggtacttgggagcttaaaaatatgctaattacaagttataaatcaaacggagagatgggggcatggagatagtttttacgtactggaggaaagtgtgtaaaaccatggcaatgtcaccttttacacaaatgccattttccaaatgcaaatggctcatgctctttagactactctttgaataacaagtaagatgcaatctagcaaaagtcagtcagggtgaaagagaattggttgcaaatgaggacttccctccccaaatggacagtcttctctgttgatcacagagggagcctgagtacaggcttggagaaatggctaggacagggaacagggaagcacttacaattattccttgatttattcaaaagaactgggaaagatggttgtagttgtctttagcttcggttcaactgagtttcgttttgttaaacagttcagtgaaggagaaagcacctgtgatatatggcaagtgtccccctgcccaaactttaacatcagaccctctcacatcataaaaaaaaaaaaaaaaaaaaaaaaaaaaaaaaaaaaaaaaaa

SEQ ID NO: 400771 - DNA, 1000 bp, Homo Sapiens; identical to SEQ ID NO: 117628

SEQ ID NO: 400772 - DNA, 1000 bp, Homo Sapiens; identical to SEQ ID NO: 117629

SEQ ID NO: 400773 - DNA, 1000 bp, Homo Sapiens; identical to SEQ ID NO: 222900

SEQ ID NO: 400774 - DNA, 1000 bp, Homo Sapiens; identical to SEQ ID NO: 289710

SEQ ID NO: 400775 - DNA, 1000 bp, Homo Sapiens
gcagtcttgatattatcattctcatatttgttctttcagcaattgttccagacaagatgcagaaggctatcaacaggctgagcaggcttctgaaacctggggggatggtacttctgcgagattacggccgctatgacatggctcagcttcggtttaaaaaaggtcagtgtctatctggaaatttctatgtgagaggtgatggaaccagagtttacttcttcacacaagaggaactggacacgcttttcaccactgctggactggaaaaagttcagaacctggtggaccgccgactgcaggtgaaccgagggaagcaactgacaatgtaccgggtttggattcagtgcaaatactgcaagccccttctgtccagcaccagctaagaggcacctgctgccaacacgatgcaagcccgttgtgtttccgagctttttttaaaaaaaaatttgtagcaccgggcatggtgcatgcctgtaatcccagccactcaggaggctgaggcagggaggatccattgagcccaggagtccagcctgggcaaaatagcgagagaccctgaatctgaaagtaatgataaaataaaaagaatataaatgaggtctcgttgatgctggacaattcaagaattcagacttgaaccttaaacctaggaaaagttactttgtatcaggattctaacaattatgcttcatatttgtgaagtcctttaaaacataattttctcaagttctttctttgagacctcaatctgtcttagcattttgtaactaataactgaaattttattcaaaggaattgtaaaccttaaaccaccaatttatttccatgtgaaaaagtgttatatatgacaagtgttttttgattgtaattgcgttaaatcttttgagagtgtaaatgccgggctaggcaattgcagttaatacatacaggggttagtgaagggcttattaagttgtaggggaagcaagctgggaagaatcagatcagatattttcctgac

SEQ ID NO: 400776 - DNA, 1000 bp, Homo Sapiens
cctgtggtgtgccacctacctggggttggccagaacctgcaagaccacctggagatctacattcagcaggcatgcacccgccctatcaccctccattcagcacagaagcccctgcggaaggtctgcattggtctggagtggctctggaaattcacaggggagggagccactgcccatctggaaacaggtgggttcatccgcagccagcctggggtcccccacccggacatccagttccatttcctgccatcccaagtgattgaccacgggcgggtccccacccagcaggaggcttaccaggtacatgtggggcccatgcggggcacgagtgtgggctggctcaaactgagaagtgccaatccccaagaccaccctgtgatccagcccaactacttgtcaacagaaactgatattgaggatttccgtctgtgtgtgaagctcaccagagaaatttttgcacaggaagccctggctccgttccgagggaaagagctccagccaggaagccacattcagtcagataaagagatagatgcctttgtgcgggcaaaagccgacagcgcctaccacccctcgtgcacctgtaagatgggccagccctccgatcccactgccgtggtggatccgcagacaagggtcctcggggtggaaaacctcagggtcgtcgatgcctccatcatgcctagcatggtcagcggcaacctgaacgcccccacaatcatgatcgcagagaaggcagctgacattatcaaggggcagcctgcactctgggacaaagatgtccctgtctacaagcccaggacgctggccacccagcgctaagacagttgctgctggaggatgaccagggaagccccctgataagccaagagggccagcacagcccttgctcccaggctcctgcctgaaactatctagcacactaggacccaggtggtaccctactcagtggctgagaattggataaagtcttgggaaatgagacaaaaaaaaaaaaaaa

SEQ ID NO: 400777 - DNA, 1000 bp, Homo Sapiens; identical to SEQ ID NO: 222901

SEQ ID NO: 400778 - DNA, 1000 bp, Homo Sapiens; identical to SEQ ID NO: 289713

SEQ ID NO: 400779 - DNA, 1000 bp, Homo Sapiens; identical to SEQ ID NO: 289714

SEQ ID NO: 400780 - DNA, 1000 bp, Homo Sapiens; identical to SEQ ID NO: 289715

SEQ ID NO: 400781 - DNA, 861 bp, Homo Sapiens; identical to SEQ ID NO: 117630

SEQ ID NO: 400782 - DNA, 1000 bp, Homo Sapiens
tcgattctgcagcaccggcctcgggaagccccatccaacactggatggtcatctcggagttccagtaccgccctcggggcccggtcattgacttcctgaacaaccagctgctggccgcggtggtggaggcgttcttataccacgttccacggaggagtgaggagcccaggaacgacgtggtcttccagcccatttccggggaagacgtgcgcgatgtgacagccctgaacgtgagcacgctgaaggcttacttcagatgcgatggctacaagggctacgacctggtctacagcccccagagcggcttcacctgcgtgtccccgtgcagtaggggctactgtgaccatggaggccagtgccagcacctgcccagtgggccccgctgcagctgtgtgtccttctccatctacacggcctggggcgagcactgtgagcacctgagcatgaaactcgacgcgttcttcggcatcttctttggggccctgggcggcctcttgctgctgggggtcgggacgttcgtggtcctgcgcttctggggttgctccggggccaggttctcctatttcctgaactcagctgaggccttgccttgaaggggcagctgtggcctaggctacctcaagactcacctcatccttaccgcacatttaaggcgccattgcttttgggagactggaaaagggaaggtgactgaaggctgtcaggattcttcaaggagaatgaatactgggaatcaagacaagactataccttatccataggcgcaggtgcacagggggaggccataaagatcaaacatgcatggatgggtcctcacgcagacacacccacagaaggacactagcctgtgcacgcgcgcgtgcacacacacacacacacacacgagttcataatgtggtgatggccctaagttaagcaaaatgcttctgcacacaaaactctctggtttacttcaaattaactctatttaaataaagtctctctgactttttgtgtctcc

SEQ ID NO: 400783 - DNA, 1000 bp, Homo Sapiens; identical to SEQ ID NO: 117631

SEQ ID NO: 400784 - DNA, 1000 bp, Homo Sapiens; identical to SEQ ID NO: 289717

SEQ ID NO: 400785 - DNA, 1000 bp, Homo Sapiens; identical to SEQ ID NO: 289718

SEQ ID NO: 400786 - DNA, 1000 bp, Homo Sapiens; identical to SEQ ID NO: 289719

SEQ ID NO: 400787 - DNA, 1000 bp, Homo Sapiens; identical to SEQ ID NO: 289721

SEQ ID NO: 400788 - DNA, 1000 bp, Homo Sapiens; identical to SEQ ID NO: 289722

SEQ ID NO: 400789 - DNA, 1000 bp, Homo Sapiens; identical to SEQ ID NO: 222904

SEQ ID NO: 400790 - DNA, 1000 bp, Homo Sapiens; identical to SEQ ID NO: 289723

SEQ ID NO: 400791 - DNA, 1000 bp, Homo Sapiens
gaaatcgtggcatacgtggctgagacactggtcttcaacaagctcataatgggacacctggatttggccattgagttaggctcccgagcccttcagatgtgggcactgctccagaatcccaaccgacattatcagtccctctgcagacttagcagatgtctccttctgaacagcagatacccgcaattgatccaggtgctggggcggctgtgggagctttctgtaacacaggaacacatcttcagcaaggcatttttctattttgtctgcttggacatcctgctttattctggttttgtttatagaacatttgaagaatgtttggaattcatacaccaatacgaaaacaacagaatcctcaagttccacagtggactcctcctgggactttattcctctgtagctatctggtatgccagacttcaggaatgggacaacttttacaaattttccaatagagctaaaaatcttttgccaagaagaaccatgacacttacttactatgacggaatatctaggtacatggaggggcaagttcttcaccttcaaaaacaaatcaaagaacagtcagagaatgcccaagccagtggggaggagctactcaagaacttggagaatctggtggctcaaaataccactggccctgtcttttgcccaaggctctaccacctgatggcttacgtctgtatattaatgggagatgggcagaaatgtggcctcttcctgaacacagccttgcggctctctgaaacacaggggaatatactggagaaatgctggctgaacatgaacaaagaatcatggtactcaacctctgagttaaaagaagaccaatggcttcagacgatcttgagtctcccatcatgggaaaaaattgtagcaggcagggtaaacattcaggatcttcaaaaaaacaaattcctgatgagagctaataccgtggacaatcatttctaacatgtcaaagaaaaaagattttaataagcactaaaaaaaaaaa

SEQ ID NO: 400792 - DNA, 1000 bp, Homo Sapiens; identical to SEQ ID NO: 222905

SEQ ID NO: 400793 - DNA, 1000 bp, Homo Sapiens
gggcgccgagttcgacggcctggggctgcccacgcccgagcgctcgcctctggacggcctggagcccggcgaggctgccttcttcccaccgcccgcggcgcccgaggactgcgcgctgcggcccttccgcgcgccctacgcgcccaccgagttgtcgcgggaccccggcggttgctacggggctcccctggcggaggcgctcaggaccgcgccccccgcggcgccgctcgctggcctgtactacggcaccctgggcacgcccggcccgtaccccggcccgctgtcgccgccgcccgaggccccgccgctggagagcgccgagccgctggggcccgccgccgatctgtgggccgacgtggacctcaccgagttcgaccagtacctcaactgcagccggactcggcccgacgcccccgggctcccgtaccacgtggcactggccaaactgggcccgcgcgccatgtcctgcccagaggagagcagcctgatctccgcgctgtcggacgccagcagcgcggtctattacagcgcgtgcatctccggctaggccgccggcgccgcccgggtccctgcagcgcttcctcccgcagcccccgcgaccgatccgaccgcgtcgctgccgctctgctctctcatacgcgtgtatgtttggttccatgtcacagccccctaggagccagtgatgctcggccttgcgcccgttccacctcccaggccacccttcctgggcttctgggccacctgccctcggggggcccctgcgagggtgcctggagttcccacgtgtcccggggcttttccaggaagcccgagcccaggacctgttggcagagttgccagggttacatttttgaagcacctgctccttttcttgcagtgtattttctacaaccagattgtattaatattttttactttgcccttttaaaaaatatacctaatacaatatatttaatttttaattaaactcttaaacttttcttccaaaaaaaaaaaaaaa

SEQ ID NO: 400794 - DNA, 1000 bp, Homo Sapiens; identical to SEQ ID NO: 117632

SEQ ID NO: 400795 - DNA, 1000 bp, Homo Sapiens
cctgctggtcctagaggaggaggagagcgccttctggtgcctggtggccattgtggagaccatcatgcccgctgattactactgcaacacgctgacggcatcccaggtggaccagcgggtgctccaggacctgctctcggagaagctgcccaggctgatggcccatctggggcagcaccacgtggatctctccctcgtcaccttcaactggttcctcgtggtctttgcggacagtctcattagcaacatcctccttcgggtctgggatgccttcctgtacgaggggacgaagtacaacgagaaggagatcttgaggctacagaatggcctggaaatctaccagtacctgcgcttcttcaccaagaccatctccaacagccggaagctgatgaacatcgccttcaatgacatgaaccccttccgcatgaaacagctgcggcagctgcgcatggtccaccgggagcggctggaggctgagctgcgggagctggagcagcttaaggcagagtacctggagaggcgggcatcccggcgcagagctgtgtccgagggctgtgccagcgaggacgaggtggagggggaagcctgacttggccacctcccctccccacagccttcctcacccttggctggcagacccactggaggtcaggcacggaccagtggcccagccctgggtgtcccatcaccatgtgaccttggacatgtcccttcccctctctggccctcagtttccccactgggacattgtgtgctgcaaagccattggttgggctacttcttcataggcacttacttacccagggatgccaccctttcgtcacctcttccacagagcactttggcatgtaaacaagcaagagcactgcctctatagggtaacctggaacattctctaggttatatcaatataaaacaatgtaaatggtggaaaaaaaaaaaaaaaaaaaaaaaaaaaaaaaaaaaaaaaaaaaaaaaaaaaaaaaaaaaaaaaaaaaaa

SEQ ID NO: 400796 - DNA, 1000 bp, Homo Sapiens; identical to SEQ ID NO: 117633

SEQ ID NO: 400797 - DNA, 1000 bp, Homo Sapiens; identical to SEQ ID NO: 117634

SEQ ID NO: 400798 - DNA, 1000 bp, Homo Sapiens; identical to SEQ ID NO: 289727

SEQ ID NO: 400799 - DNA, 1000 bp, Homo Sapiens; identical to SEQ ID NO: 117635

SEQ ID NO: 400800 - DNA, 1000 bp, Homo Sapiens; identical to SEQ ID NO: 117636

SEQ ID NO: 400801 - DNA, 1000 bp, Homo Sapiens
gtgaagggctgtttatctttcagacccgagacggggaggccatctatcagaaagtccactctgctgccttggccatagccgagcagcacgagcgcttgctacagagtgtgaaaaactcgatgctccagatgaagatgagtgagcgggccgcctcgctgagcaccatggtgcccctgcctcgcagcgcctactggcagcacatcacacggcagcacagcacgggacagctctaccgcttgcaagatgtttccagccctctgaagcttcatcgaacagagacttttccagcctacagatctgagcactgacagtaactgccaagaattgttaacacacttgtgatgtgtcagccacagattcacccaggaggtcacagaatgacagcaagggaaatgacgaccaagagaagaagcttaaagtcctggctaattgtgtggtcattggaaaactctgcaatacaataattttctttattttctttttcttttttaaattcttagtgtaattgaaacgtgctctatagatattgactctgtgttccctcttttacagctggacagaaagaagtcaatgtcacgaaatgattttctattgtagatactttgtcccttgcacttctctgaatctgtccttttgtggattcttgtgattttccttccaagtgtttcagttgtatgacagtcagtattgacaataaaatggcttttaattatttgttatttgtttacaccctattcctcagttattattactgtggttctgattaactactggaaattatatttgattatatcaccaattagttaaatcagtgcttcgactcactcttatctgttctgttcaaaactatttgttcaaagaacccgttagtgttgtttacagggttacagtttctctcacatgctttcctcacccctttacccccctttttgaaagcctttattttgttcggagtctcttcataaaacatttgaaaataaaagatcattcttcacccata

SEQ ID NO: 400802 - DNA, 1000 bp, Homo Sapiens; identical to SEQ ID NO: 289730

SEQ ID NO: 400803 - DNA, 1000 bp, Homo Sapiens; identical to SEQ ID NO: 117637

SEQ ID NO: 400804 - DNA, 1000 bp, Homo Sapiens; identical to SEQ ID NO: 289731

SEQ ID NO: 400805 - DNA, 1000 bp, Homo Sapiens; identical to SEQ ID NO: 289732

SEQ ID NO: 400806 - DNA, 1000 bp, Homo Sapiens; identical to SEQ ID NO: 117638

SEQ ID NO: 400807 - DNA, 1000 bp, Homo Sapiens; identical to SEQ ID NO: 222911

SEQ ID NO: 400808 - DNA, 1000 bp, Homo Sapiens; identical to SEQ ID NO: 117639

SEQ ID NO: 400809 - DNA, 1000 bp, Homo Sapiens
tttaatacaagccaatatcagcttcccattgtgtaataacttgggtgtttaggagtcttttcacattttttggggatatgaactagatgttcaagaactccttctggactgtggatactgaatcagtgtactattggctgcagaatttgtttcaattgaaaatagactcaggaagattgctgctcagaatatcatataatgtttattttttgaggtgtttttgtttttatttgtgtgtttttttttttttaagtcagcttggaacttttttcctgggtagtatttgggagagggaaaggctgtactatatatttatttctaaatgttttgactgggcatttttcttttaatgaaatatgtggactgctctagcaaaccctattttcagctactatttgaatattcttgaacaccaccactgaagagtttcatatacaccaaataatgtctcatctctatagtacagggaatataaaattggtttcctgtggtcatgatcaagatagtagtattattacacaagaaacttggtctgcagtctggaagcttgtctgctctatagaaatgaaaatgcagcatgaagttgacattgtggaaatgaaagtaattgggtattagaaatctgaaagtactgtcatctaaaagcaattgtgattttattgtaattggttgtcactgttgtacggtgtctagaattaaagaatacatgtaaactttcatggtatttagcctttcttaaatttttttaaaatttaaactttctaacctatgtattcaacttctgtatttatatttaatcagtggttcatgttatataatacacccttaactagttaaatggaatgttggtatggtacagagtaccatattgctaagaaaactgtcttataaaagatgtatatgtgtgaagacatgaaagtttaatgtacagaatggttggagaaatgcctatggtgaattaaagcttcatatctgctttctgaaaaaaaaaaaaaaaaaa

SEQ ID NO: 400810 - DNA, 1000 bp, Homo Sapiens
aagagaagcaactgtgccccggagaagagaagctcgcccattccagactgggaaccagctttcagtgaagatggcagggccagaactgttgctcgactccaacatccgcctctgggtggtcctacccatcgttatcatcactttcttcgtaggcatgatccgccactacgtgtccatcctgctgcagagcgacaagaagctcacccaggaacaagtatctgacagtcaagtcctaattcgaagcagagtcctcagggaaaatggaaaatacattcccaaacagtctttcttgacacgaaaatattatttcaacaacccagaggatggatttttcaaaaaaactaaacggaaggtagtgccaccttctcctatgactgatcctactatgttgacagacatgatgaaagggaatgtaacaaatgtcctccctatgattcttattggtggatggatcaacatgacattctcaggctttgtcacaaccaaggtcccatttccactgaccctccgttttaagcctatgttacagcaaggaatcgagctactcacattagatgcatcctgggtgagttctgcatcctggtacttcctcaatgtatttgggcttcggagcatttactctctgattctgggccaagataatgccgctgaccaatcacgaatgatgcaggagcagatgacgggagcagccatggccatgcccgcagacacaaacaaagctttcaagacagagtgggaagctttggagctgacggatcaccagtgggcactagatgatgtcgaagaagagctcatggccaaagacctccacttcgaaggcatgttcaaaaaggaattacagacctctattttttgaagaccgagcagggattagctgtgtcaggaacttggagttgcacttaaccttgtaactttgtttggagctggcacctcttgaaataaaaaggaggatgcacgagctggcaggcatgcaaaaaaaaaaaaaaaaaaaaaaaaaaaa

SEQ ID NO: 400811 - DNA, 1000 bp, Homo Sapiens; identical to SEQ ID NO: 117640

SEQ ID NO: 400812 - DNA, 1000 bp, Homo Sapiens; identical to SEQ ID NO: 224128

SEQ ID NO: 400813 - DNA, 1000 bp, Homo Sapiens; identical to SEQ ID NO: 289738

SEQ ID NO: 400814 - DNA, 1000 bp, Homo Sapiens; identical to SEQ ID NO: 289739

SEQ ID NO: 400815 - DNA, 1000 bp, Homo Sapiens; identical to SEQ ID NO: 117641

SEQ ID NO: 400816 - DNA, 1000 bp, Homo Sapiens; identical to SEQ ID NO: 289740

SEQ ID NO: 400817 - DNA, 1000 bp, Homo Sapiens
gtggggggaggcacagtgagtccactggggcacggcagcgtctaagccacaagccgagcacataagccaggtcctaacggagcctatgtgtaagtccactactggtgcaaggttgcacacttctaagaagagcggcgtggggggctcggcgaccttcgcttcagtcgctcccccgtgcagtcccctgtgcccaagacacagcctgatgcttgtgctccggtgggcggagcttggaggcggcgggaactgcaattggtggctttgaaggcgcggcgagcgggaacagctcttgaggagtgagactgcaggagatgtgggccgtgccaaagagatggatgagactgttgctgagttcatcaagaggaccatcttgaaaatccccatgaatgaactgacaacaatcctgaaggcctgggattttttgtctgaaaatcaactgcagactgtaaatttccgacagagaaaggaatctgtagttcagcacttgatccatctgtgtgaggaaaagcgtgcaagtatcagtgatgctgccctgttagacatcatttatatgcaatttcatcagcaccagaaagtttgggatgtttttcagatgagtaaaggaccaggtgaagatgttgacctttttgatatgaaacaatttaaaaattcgttcaagaaaattcttcagagagcattaaaaaatgtgacagtcagcttcagagaaactgaggagaatgcagtctggattcgaattgcctggggaacacagtacacaaagccaaaccagtacaaacctacctacgtggtgtactactcccagactccgtacgccttcacgtcctcctccatgctgaggcgcaatacaccgcttctgggtcaggagttagaagctactgggaaaatctacctccgacaagaggagatcattttagatattaccgaaatgaagaaagcttgcaattagtgaacatgaaaggaaaataaaaattcctcacagtcaaaaaaaaaaaaaaaaaaa

SEQ ID NO: 400818 - DNA, 927 bp, Homo Sapiens; identical to SEQ ID NO: 289744

SEQ ID NO: 400819 - DNA, 1000 bp, Homo Sapiens; identical to SEQ ID NO: 117644

SEQ ID NO: 400820 - DNA, 1000 bp, Homo Sapiens; identical to SEQ ID NO: 289746

SEQ ID NO: 400821 - DNA, 918 bp, Homo Sapiens
tggttgaacggactcaccaggaaacgtgactttcgtgtccgacctctgctgtatcaggattcgattcttggtgttaaacaagacaacgctgaaggctcggtgcagcagccctgcaaaggagtggagccccaacccacgcagggcgtgtcttcatggcttttcctggccaatctgataccaagatgcagtggccagaagtacctgcacttccactcctgtcaagtctctgcatggctatggtgaggaagagctctgcactgggcaaggaagttggccgtcgaagtgaaggaaatggtgatgctggtggcccctttccggcagtcaagttccctatcaaggacattcagttctcggaaagtggtgaaggcacacgcttcctgcatggtgcccgcctctctccactctctagaaatattaaggctaggctgctgctgtatgtcagggctagtcccctcttctatgaatccagaataactctgaagaagccgagtaacaggcatgaagtgaagagaaatcgctgtaacaggaagacagcaaagcagatgctaatgaccacactatttaacgaactggaaccaacgagaaaatacggtattactgaagactgcacttccttgaacagagtgctcttctcagcaaatcggaaatgcctacacaaatcgctttacaagaaagactgtttcaaagcagcacctttctcaatgttctcgttcaggtgacaattcttcttggtctcagctccaattttattgtcattttcatcaataaggatacacatctctgccaggagttgaacctgttgcttgtcgaggtggttagtgtttatttcaggcatcattacaaaatgtctgatctgttctagaaccctaatattaaaggaaaagagaaagaaaaaaaaaaaaaaaaaaaaaaaaaaaa

SEQ ID NO: 400822 - DNA, 1000 bp, Homo Sapiens; identical to SEQ ID NO: 289747

SEQ ID NO: 400823 - DNA, 1000 bp, Homo Sapiens; identical to SEQ ID NO: 289748

SEQ ID NO: 400824 - DNA, 1000 bp, Homo Sapiens; identical to SEQ ID NO: 222914

SEQ ID NO: 400825 - DNA, 1000 bp, Homo Sapiens; identical to SEQ ID NO: 289750

SEQ ID NO: 400826 - DNA, 1000 bp, Homo Sapiens
aacaatgtactgttgacacaagtgttgctaaagaacagagccttccctcagtgatgggttcagttccggaaggtgtcttagaggacattaaagcgcgtacttgctttgtaagtgatctgaagcgaggactaaaaatccaagcagcaaaatttaatattgatgggaataatgagcgtccctccccacccccaaatgttgactatccattagatggagagaagattttacatatccttggatcaatcagagattcagttgtggaaattctttttgaacaagataatgaagagcaatcagttgccactttaatattggattcccttatacagtgtccgatagacaccaggaagcaactagcagagaatttggtagtcataggtggcacttctatgttgccaggatttctccacagattgcttgcagaaataaggtatttggtagaaaaaccaaaatataaaaaagcacttggcactaagacatttcgaattcatactccacctgcaaaagctaattgtgtggcctggttgggaggggctatttttggagcattacaagatatacttgggagccgttctgtttcaaaggaatattataatcagacgggccgtatacctgattggtgttctctcaataacccacctttggaaatgatgtttgatgtcgggaaaactcaaccacctctgatgaagagagcattttccactgagaaatagaagtttgattaaaaatcaaccttgcttcatatcaaatatttaaccaattataagcaaattgtacaaagtatgtaggatgttttgttatagaggactatagtggaagtgaaagcattctgtgtttactctttgcattaatatataattcttttgactttgtttctcttgtgtagtggtaaaatggtagctggtgcttattgagatttgctgtatttatatcaataaagtatagtaaagcaagcagtttgattttggaaaaaaaaaaaaaaaaaaaaaaaaaaaaaaaa

SEQ ID NO: 400827 - DNA, 1000 bp, Homo Sapiens
cctctacccgcaggagctgacatggacccaaatcctcgggccgccctggagcgccagcagctccgccttcgggagcggcaaaaattcttcgaggacattttacagccagagacagagtttgtctttcctctgtcccatctgcatctcgagtcgcagagaccccccataggtagtatctcatccatggaagtgaatgtggacacactggagcaagtagaacttattgaccttggggacccggatgcagcagatgtgttcttgccttgcgaagatcctccaccaaccccccagtcgtctgggatggacaaccatttggaggagctgagcctgccggtgcctacatcagacaggaccacatctaggacctcctcctcctcctcctccgactcctccaccaacctgcatagcccaaatccaagtgatgatggagcagatacgcccttggcacagtcggatgaagaggaggaaaggggtgatggaggggcagagcctggagcctgcagctagcagtgggcccctgcctacagactgaccacgctggctattctccacatgagaccacaggcccagccagagcctgtcgggagaagaccagactctttacttgcagtaggcaccagaggtgggaaggatggtgggattgtgtacctttctaagaattaaccctctcctgctttactgctaattttttcctgctgcaaccctcccaccagtttttggcttactcctgagatatgatttgcaaatgaggagagagaagatgaggttggacaagatgccactgcttttcttagcactcttccctcccctaaaccatcccgtagtcttctaatacagtctctcagacaagtgtctctagatggatgtgaactccttaactcatcaagtaaggtggtactcaagccatgctgcctccttacatcctttttggaacagagcacggtataaataataaactaataataatatgccaacaaaaaaaaaaaaaaaaaaaaaaaaa

SEQ ID NO: 400828 - DNA, 1000 bp, Homo Sapiens; identical to SEQ ID NO: 222915

SEQ ID NO: 400829 - DNA, 1000 bp, Homo Sapiens; identical to SEQ ID NO: 289752

SEQ ID NO: 400830 - DNA, 1000 bp, Homo Sapiens; identical to SEQ ID NO: 222916

SEQ ID NO: 400831 - DNA, 1000 bp, Homo Sapiens
ttgctccacctggccgtggcggatttgctgtgctgtttgtctctgcccatcctggcagtgcccattgcccgtggaggccactggccgtatggtgcagtgggctgtcgggcgctgccctccatcatcctgctgaccatgtatgccagcgtcctgctcctggcagctctcagtgccgacctctgcttcctggctctcgggcctgcctggtggtctacggttcagcgggcgtgcggggtgcaggtggcctgtggggcagcctggacactggccttgctgctcaccgtgccctccgccatctaccgccggctgcaccaggagcacttcccagcccggctgcagtgtgtggtggactacggcggctcctccagcaccgagaatgcggtgactgccatccggtttctttttggcttcctggggcccctggtggccgtggccagctgccacagtgccctcctgtgctgggcagcccgacgctgccggccgctgggcacagccattgtggtggggttttttgtctgctgggcaccctaccacctgctggggctggtgctcactgtggcggccccgaactccgcactcctggccagggccctgcgggctgaacccctcatcgtgggccttgccctcgctcacagctgcctcaatcccatgctcttcctgtattttgggagggctcaactccgccggtcactgccagctgcctgtcactgggccctgagggagtcccagggccaggacgaaagtgtggacagcaagaaatccaccagccatgacctggtctcggagatggaggtgtaggctggagagacattgtgggtgtgtatcttcttatctcatttcacaagactggcttcaggcatagctggatccaggagctcaatgatgtcttcattttattccttccttcattcaacagatatccatcatgcacttgctatgtgcaaggcctttttaggcactagagatatagcagtgaccaaaacagacacaaatcctgccc

SEQ ID NO: 400832 - DNA, 1000 bp, Homo Sapiens; identical to SEQ ID NO: 117646

SEQ ID NO: 400833 - DNA, 1000 bp, Homo Sapiens; identical to SEQ ID NO: 222917

SEQ ID NO: 400834 - DNA, 1000 bp, Homo Sapiens; identical to SEQ ID NO: 289756

SEQ ID NO: 400835 - DNA, 1000 bp, Homo Sapiens; identical to SEQ ID NO: 117647

SEQ ID NO: 400836 - DNA, 1000 bp, Homo Sapiens
ccctgagcaggtcctgctgcagtgcctgccccgaaacaaggtggacgccacccttcggcggctgctggagcggtaccggggccccgagccctctgacacggtggagatgttcgagggcgaagagttctttgcggccttcgagcgcggcatcgacgtggatgctgaccgccctgactgtgtggagggcagaatctgctttgtcttctactcgcacctgaagaatgtgaaggaggtatacgtgaccaccactctggaccgggaggctcaggctgtgcggggccaggtgtccttctaccgtggcgcggtgcctgtgcgggtgcccgaggaggctgaggctgcccggcagaggaagggcgcagacgccctgtggatggccactctgcccatcaagctgccgagacttcgagggtccgaggggccacggcggggggctggcctctccttggcacccttgaatctgggagatgccgagaccggctttctgacgcagagcaacctgctgagtgtggctgggcgtctgggtctggactggccagccgtggccctgcacctgggggtgtcctaccgggaggtgcagcgcatccggcacgagttccgggatgatctggatgagcagatccgtcacatgctcttctcctgggctgagcgccaggctgggcagccaggggctgtggggctcctggtgcaggccctggagcagagtgaccggcaggacgtggctgaagaggtgcgcgcagtcttggagctcggccgccgcaagtaccaggacagcatccgacgcatgggcttggcccccaaggaccccgctctgcctggctcctcggctccacagcccccagagcctgcccaggcctaggccccacagacttttaggctggcccagatattccccagtggatgggcagagcccccaccttcaagtctctccagtgtgtggggacgggtccctgtgagcaacaaaactgcactgtttctttcacctcaaaaaaaaaaaaaaaaa

SEQ ID NO: 400837 - DNA, 1000 bp, Homo Sapiens
gagatagaaatctcttgctatcatcaggtcacgggcagctcctgtggagtcctgcccaacttatgtggcttccataaaatggcaacagtccaggctccttgcctaattttagagcattaactccctaattgccagtaagcaaggaggtggatctctgcaaacctacactgtctatgacagctctagttgtacttggtgtgactaaatacctcaaaggcaacctgcttctgcaggttttgaagtgtcagcttcataagacactgaggtttagaattgtttgattctagaccataactgaagggcataaatggaaacaggatatgaagggaaacaagtagcatcatggagctgaaaagtggtgcatcacccaatggctagcacagacaaggatcacactgtccattctcttgtctgctaaattaagcattttcttgcctcctttgcttcatcttttcacaacagctggatagagggatcagaaatgactgtgtcatggtgctcattcactgcaaactcccagttgcaagctccttggctcccccggagggagcaagaatctcatagttcagagacacagagggccttttagccctaatgaccttttggatgggactgcaactcatgactatcctgatattagaagaaaggactttgttaatcttctcccccatagctctgctgcgtaggtctacatcttactcagaatcactacacattcctttagtcttcctccaagctccagagccattggtacaaatgctttattgaaactaaatacataatacacacaatgagatgaagacaatatagaagtccgcatagtcatcataatcccgttccttggccggttgaggcagctcagtggctgagcccagtcaagccaacccgcagcttcactcacgacttcaagatttgatgctaattcttttggatttctacagttattaaataagtgtctgagtggaaaaaaaaaaaaaaaaaaaaaaaaaaaaaaaaaaaa

SEQ ID NO: 400838 - DNA, 1000 bp, Homo Sapiens; identical to SEQ ID NO: 222918

SEQ ID NO: 400839 - DNA, 1000 bp, Homo Sapiens
gacctcagaggtgcaccagtgccgcccaggtagataagagctgcagcattgactgtgcttccgttcttccctcggggattgctcatggcatgggcctcttacgtgctgtcagcttgatgtgaagatcaagttcagtgctgtgggatttttaggaacaaaaaactgtgacgtctggatttggggttgatttttgtgctggggtgggattatgggtcaatgttgaagaatttttaagtctgtattatgtttaaaacatgaatgatttgaaagtttaaatttttaatttttatatgtggaaattcttcctgttggctaaaggggaagctcaagtggtgtcgtcttttgtgctgttaaatatatattctattctttggaagaaggcagagagaggagtcttattatttttaaatgctcctagttgtatagtctgtctgttgtacatagagttcagcttgttttttggctccagtaggaaaaaaaatccatccatctgagatggggtcctgttgtttattatcactctagaagttatacattgatatttattctttctgtccccacgttgtggcacctgaagacatcttcaaaattggcagaaaagataatagttataaaaattttagttcatttatttttaaactcctttcagattattttaccattaggaggaggtagattgtttcgtcttcctgtctgatttttgttttgtagtatttaattttgtattcctctgcagttttaagaaacagtgtttttcttcggtttgctggaacatgggcgttagagatggtaataaaccgtggtcctttttgcgatgtcacgactcttcacctgcctgggctgttgtgcacacagtgcagcctggatcctgtcgatctttacttgtggcggagctaatggtcacattgatagttgattacactgtggcacgaattaatgcagaacactgttattaataaaggaagtaaagggctgcaagatttgagagctgcaacaaaaa

SEQ ID NO: 400840 - DNA, 1000 bp, Homo Sapiens; identical to SEQ ID NO: 117648

SEQ ID NO: 400841 - DNA, 1000 bp, Homo Sapiens; identical to SEQ ID NO: 222921

SEQ ID NO: 400842 - DNA, 1000 bp, Homo Sapiens
cattgatatctatatcctcgtgtgcttgttctttgtgttcctgtccttgctggagtatgtctacatcaactatcttttctacagtcgaggacctcggcgccagcctaggcgacacaggagaccccgaagagtcattgcccgctaccgctaccagcaagtggtggtaggaaacgtgcaggatggcctgattaacgtggaagacggagtcagctctctccccatcaccccagcgcaggcccccctggcaagcccggaaagcctcggttctttgacgtccacctccgagcaggcccagctggccacctcggaaagcctcagcccactcacttctctctcaggccaggcccccctggccactggagaaagcctgagcgatctcccctccacctcagagcaggcccggcacagctatggtgttcgctttaatggtttccaggctgatgacagtattattcctaccgaaatccgcaaccgtgtcgaagcccatggccatggtgttacccatgaccatgaagattccaatgagagcttgagctcggatgagcgccatggccatggccccagtgggaagcccatgcttcaccatggcgagaagggtgtgcaagaagcaggctgggaccttgatgacaacaatgacaagagcgactgccttgccattaaggagcaattcaagtgtgatactaacagtacctggggccttaatgatgatgagctcatggcccatggccaagagaaggacagtagctcagagtctgaggatagttgccccccaagccctgggtgctccttcactgaagggttctccttcgatctctttaatcctgactacgtcccaaaggtcgacaagtggtcccggttcctcttccctctggcctttgggttgttcaacattgtttactgggtataccatatgtattagtcccccagtgctccagaacagcgggagcactgtgctgtgctcctttcagtttcttttgggtttgtttttccctctttcctt

SEQ ID NO: 400843 - DNA, 1000 bp, Homo Sapiens; identical to SEQ ID NO: 289763

SEQ ID NO: 400844 - DNA, 1000 bp, Homo Sapiens; identical to SEQ ID NO: 222922

SEQ ID NO: 400845 - DNA, 1000 bp, Homo Sapiens; identical to SEQ ID NO: 117650

SEQ ID NO: 400846 - DNA, 860 bp, Homo Sapiens; identical to SEQ ID NO: 222924

SEQ ID NO: 400847 - DNA, 1000 bp, Homo Sapiens; identical to SEQ ID NO: 289769

SEQ ID NO: 400848 - DNA, 1000 bp, Homo Sapiens; identical to SEQ ID NO: 289770

SEQ ID NO: 400849 - DNA, 1000 bp, Homo Sapiens
aatcactgaaatccagggtccagagttattttgatggtataaaagctgattggttggatagcataagaccacaaaaagaaggagacttcagaaaggagattaacaagtggtggaataacctaagtgatggccagcggactgtgacaggtattatagctgcaaatgtccttgtattctgtttatggagagtaccttctctgcagcggacaatgatcagatatttcacatcgaatccagcctcaaaggtcctttgttctccaatgttgctgtcaacattcagtcatttctccttatttcacatggcagcaaatatgtatgttttgtggagcttctcttccagcatagtgaacattctgggtcaagagcagttcatggcagtgtacctatctgcaggtgttatttccaattttgtcagttacgtgggtaaagttgccacaggaagatatggaccatcacttggtgcatctggtgccatcatgacagtcctcgcagctgtctgcactaagatcccagaagggaggcttgccattattttccttccgatgttcacgttcacagcagggaatgccctgaaagccattatcgccatggatacagcaggaatgatcctgggatggaaattttttgatcatgcggcacatcttgggggagctctttttggaatatggtatgttacttacggtcatgaactgatttggaagaacagggagccgctagtgaaaatctggcatgaaataaggactaatggccccaaaaaaggaggtggctctaagtaaaactgggattggacagtagtggtgcatctggtccttgccgcctgagagccccaggagacatcggctagagtgaccatggctatgctcccgtctggaagatgccagcatctggcctcccactgttttcagctgtgtcccccagtccgtgtctttttagaatgtgaatgatgataaagttgtgaaataaaggtttctatctagtttgtaaaaaaaaaaaaaaaaaa

SEQ ID NO: 400850 - DNA, 1000 bp, Homo Sapiens; identical to SEQ ID NO: 117651

SEQ ID NO: 400851 - DNA, 1000 bp, Homo Sapiens; identical to SEQ ID NO: 289772

SEQ ID NO: 400852 - DNA, 1000 bp, Homo Sapiens; identical to SEQ ID NO: 115223

SEQ ID NO: 400853 - DNA, 1000 bp, Homo Sapiens; identical to SEQ ID NO: 117653

SEQ ID NO: 400854 - DNA, 1000 bp, Homo Sapiens; identical to SEQ ID NO: 289775

SEQ ID NO: 400855 - DNA, 1000 bp, Homo Sapiens; identical to SEQ ID NO: 289776

SEQ ID NO: 400856 - DNA, 1000 bp, Homo Sapiens; identical to SEQ ID NO: 117654

SEQ ID NO: 400857 - DNA, 1000 bp, Homo Sapiens; identical to SEQ ID NO: 289778

SEQ ID NO: 400858 - DNA, 1000 bp, Homo Sapiens
ccctataaatgcaatgattgtgggaaagcttttagtgacagctcacagcttattgtacaccagagagtccacaccggagagaaaccttatgaatgtagtgaatgtgggaaagcctttagtcagcgttccacttttaatcaccaccagcgaactcacactggagagaagtcctcaggtctggcttggtcagtttcttaaggtatggttctctgagacagagagcaacgacctttgagttaagctgtctttataagcaggatgctcatagtggtttcccggagccagtagtcacggtggaccattccctacttgcttttccttggatcactaaggtgggagagtaggagtaacttattccagttcttacccattattaggaaggtaaggactacacatgtcattgaattgtaggtttcctttttttttctttacttttaaattttaacttttaaaatctatttcatttcttagttatgcatctcataatcagactccatgctttttaaagacagagataatatcttctctattctattctacttcctccatttcaccatttatacaaagtcattcaaaaaggctgattcatgccttcctgcctcttggctatggccctccccatctactctttaaactttaatctataacttttcatcagttttgttccctatctagaaaacattttcttctgtttgctaatctttgtccctcacaatttttgaaatccatctcatcactgaaatactttcttcttcaagtacttttttatttttcttcaacttctcttgatttgacctcagtgctttgaattcactggtgctacaatatgtaactgtggttaattgccttgtaaattttgcgtgtctgtatacttttataccaacttattgtaggctctttgaggtcaggtatgtatttctttcccatatagatagtattttgtacataccagttgttaaataaataatttttaaaatctcaaaaaaaaaaaaaaaaaaaa

SEQ ID NO: 400859 - DNA, 1000 bp, Homo Sapiens; identical to SEQ ID NO: 289779

SEQ ID NO: 400860 - DNA, 1000 bp, Homo Sapiens
cacagccacctccgttgccatatgggtggtgtggatcgtcatgtatacttacggcaacaagcagcacaacagtcccacctgggatgaccccacgctggccatcgccctcgccgccaatgcctgggccttcgtcctcttctacgtcatccccgaggtctcccaggtgaccaagtccagcccagagcaaagctaccagggggacatgtaccccacccggggcgtgggctatgagaccatcctgaaagagcagaagggtcagagcatgttcgtggagaacaaggccttttccatggatgagccggttgcagctaagaggccggtgtcaccatacagcgggtacaatgggcagctgctgaccagtgtgtaccagcccactgagatggccctgatgcacaaagttccgtccgaaggagcttacgacatcatcctcccacgggccaccgccaacagccaggtgatgggcagtgccaactcgaccctgcgggctgaagacatgtactcggcccagagccaccaggcggccacaccgccgaaagacggcaagaactctcaggtctttagaaacccctacgtgtgggactgagtcagcggtggcgaggagaggcgggcggatttggggagggccctgaggacctggccccgggcaagggactctccaggctcctcctccccctggcaggcccagcaacatgtgccccagatctggaagggcctccctctctgccagtgtttgggtgggtgtcatgggtgtccccacccactcctcagtgtttgtggagtcgaggagccaaccccagcctcctgccaggatcacctcggcggtcacactccagccaaatagtgttctcggggtggtggctgggcagcgcctatgtttctctggagattcctgcaacctcaagagacttcccaggcgctcaggcctggatcttgctcctctgtgaggaacaagggtgcctaataaatacatttctgctttattaaaaaaaaaaaaaaaaaa

SEQ ID NO: 400861 - DNA, 1000 bp, Homo Sapiens
tcttctctgtgacgccgaggggccatggggcatcattctggagtccctggccatacttggcatcgtggtcacaattctgctactcttagcatttctcttcctcatgcgaaagatccaagactgcagccagtggaatgtcctccccacccagctcctcttcctcctgagtgtcctggggctcttcggactcgcttttgccttcatcatcgagctcaatcaacaaactgcccccgtacgctactttctctttggggttctctttgctctctgtttctcatgcctcttagctcatgcctccaatctagtgaagctggttcggggttgtgtctccttctcctggacgacaattctgtgcattgctattggttgcagtctgttgcaaatcattattgccactgagtatgtgactctcatcatgaccagaggtatgatgtttgtgaatatgacaccctgccagctcaatgtggactttgttgtactcctggtctatgtcctcttcctgatggccctcacattcttcgtctccaaagccaccttctgtggcccgtgtgagaactggaagcagcatggaaggctcatctttatcactgtgctcttctccatcatcatctgggtggtgtggatctccatgctcctgagaggcaacccgcagttccagcgacagccccagtgggacgacccggtcgtctgcattgctctggtcaccaacgcatgggttttcctgctgctgtacatcgtccctgagctctgcattctctacagatcgtgtagacaggagtgccctttacaaggcaatgcctgccccgtcacagcctaccaacacagcttccaagtggagaaccaggagctctccagagcccgagacagtgatggagctgaggaggatgtagcattaacttcatatggtactcccattcagccgcagactgttgatcccacacaagagtgtttcatcccacaggctaaactaagcccccagcaagatgcaggaggagtataa

SEQ ID NO: 400862 - DNA, 1000 bp, Homo Sapiens; identical to SEQ ID NO: 222930

SEQ ID NO: 400863 - DNA, 1000 bp, Homo Sapiens; identical to SEQ ID NO: 289782

SEQ ID NO: 400864 - DNA, 980 bp, Homo Sapiens
ggggcagacgtgggacgggaaggacggctgccgggactggcgcgcggggacactgggccgacgcgtggagtagcggggagagcgggaagcctgagggggcggggccggcgcgaggccgtgggtgcggcacgaggatgccggcggcgggacagcgcccgtaggcagccccacgggcagggcgcgcgggcggggcggggcgggccgggccagaggagctcccggcatgtcgcaagggctcccggccgccggcagcgtcctgcagaggagcgtcgcggcgcccgggaaccagccgcagccgcagccgcagcagcagagccctgaggatgatgacaggaaggtccgaaggagagaaaaaaaccgagttgctgctcagagaagtcggaagaagcagacccagaaggctgacaagctccatgaggaatatgagagcctggagcaagaaaacaccatgctgcggagagagatcgggaagctgacagaggagctgaagcacctgacagaggcactgaaggagcacgagaagatgtgcccgctgctgctctgccctatgaactttgtgccagtgcctccccggccggaccctgtggccggctgcttgccccgatgaagccggggacactcctctgcccagcaaggagccttggtcattttcatacctgggaggaaggcttttccttcacaattgtatacagggggcacctgtggccaggcctcctcctgggagctccaggaccagccagctgtgttccctgcagactgggctcagcccgacatccaacaggcgccaaactcacagagcccttgtgcagatccagcatggaggccaccctcaggagtgacttctcatccaccctggcagctagtaggttctgctgttatgcagagccatttcctctagaatttggataataaagatgcttattgtctctcccttctccagttctgggaatttacaggcacaatacacttccttttcctgg

SEQ ID NO: 400865 - DNA, 1000 bp, Homo Sapiens
ctgaagaatataacctacttggttttagatgaagcagacaagatgttggacatgggatttgaaccccagataatgaagattttgttagatgtgcgcccagataggcagacagttatgaccagtgctacatggcctcattcagttcatcgcctcgcacaatcttatttgaaagaaccaatgattgtctatgttggtacattggatctagttgctgtaagttcagtgaagcaaaatataattgtaaccaccgaggaagagaaatggagtcacatgcaaacttttctacagagtatgtcatccacagacaaagtcattgtcttcgtttctcgaaaagctgttgcggatcacttatcaagtgacctaatacttggaaatatatcagtagagtctctgcatggagatagagaacagagagatcgggagaaagcattagagaactttaaaacaggcaaagtgagaatactaattgcaactgatctagcctctagaggacttgatgtccatgacgttacacatgtctataattttgactttccacggaatattgaagaatacgtacaccgaatagggcgcacgggaagagcagggaggactggtgtttccattacaactttgactagaaatgattggagggttgcctctgaattgattaatattctggaaagagcaaatcagagtattccagaggagcttgtatcaatggctgagaggtttgaggcacatcaacggaaaagggaaatggaaagaaaaatggaaagacctcaaggaaggcccaagaagtttcattaatgtcttctgtactagtggggtagagaattcaagattttttagaaatatagtaagacagaagtattggacatgttggcagtatgaagagaccggactgatttgactgattcttaaaataatagtgtttgaaaatatagaatccagtgttttatactttctttaataaaaatagaagtatttaaacttaaaaaaaaaaaaaaaaaaaaaaaaa

SEQ ID NO: 400866 - DNA, 1000 bp, Homo Sapiens; identical to SEQ ID NO: 222932

SEQ ID NO: 400867 - DNA, 1000 bp, Homo Sapiens
gcctatagaaagcctgcgcctcatgtgccttttgtccatcactgagaatggtttgatccccaaggattaccgatctctgaaaacacagtatctgcagagctatggccctgagcacctgctaaccttctccaatctgcgaagagctgggctcctaacggagcaggcccccggggacaccctcacagccgtggagagtaaagtgagcaagctggtgaccgacaaggctgcaggaaagattactgatgccttcagttctctggccaagaggagcaattttcgtgccatcagcaaaaagctgaatttgatcccacgtgtggacggcgagtatgatctgaaagtgccccgagacatggcttacgtcttcagtggtgcttatgtgcccctgagctgccgaatcattgagcaggtgctagagcggcgaagctggcagggccttgatgaggtggtacggctgctcaactgcagtgactttgcattcacagatatgactaaggaagacaaggcttccagtgagtccctgcgcctcatcttggtggtgttcttgggtggttgtacattctctgagatctcagccctccggttcctgggcagagagaaaggctacaggttcattttcctgacgacagcagtcacaaacagcgctcgccttatggaggccatgagtgaggtgaaagcctgatgtttttcccggccagtgttgacatcttccctgaacacattcctcagtgagatgcaggcatctggcacccagctgctataaccaagtgtccaccaactacctgctaagagccgggagcatggaacgtgttgggatttagagaacattatctgagaaaagagttcacttcctgctcccaggatatttctcttttctgtttatgaagtacaacccatgctgctaagatgcgagcaggaagaggcatcctttgctaaatcctgtttgaatgtcattgtaaataaagcctctgctctcagatgtaaaaaaaaaaaaaaaaaaaaa

SEQ ID NO: 400868 - DNA, 1000 bp, Homo Sapiens; identical to SEQ ID NO: 222933

SEQ ID NO: 400869 - DNA, 1000 bp, Homo Sapiens; identical to SEQ ID NO: 222934

SEQ ID NO: 400870 - DNA, 1000 bp, Homo Sapiens
ctggatctaaatgtgactcaggccagttgtgccataagccccagccagactctgatccgcaagtcacaggcaaggcacgtgggcagcagagggggcccgtccgaaaggagccatgccaggaacgcccatttcaggaggacagcgagtttccatgaagccaggcaggcccggccgttccgagagaggagcatgtccactctgactccacggcaggcccctgcctacagctctaggacgcggacctgcgagcaggcagaggacagatttaggcctcagagtcgaggtgcccacctgtttcctgaaaaactggagcatttccaagaggcaagtggaacccgtggtccattaaaccctctccctaaatcctacactttggggcagcccttgaggaaaccagaccttggggatcaccaggcaggattagtggccggaattgagagaacagagccccacagagctcgtcggggaccgtcccccagtcacaagagtgtctcaaggaagcagtcttctcccatatcccccaaagataactaccagagggtcagttctctgagcccttctcagtgtagaaaagacaagtgtcaaagcttccccactcaccctgagtttgccttctatgacaatacgtcgtttggcctcactgaggctgagcagaggatgctggacctcccaggatattttgggtcaaatgaagaggatgaaaccacaagtacacttagcgtggagaagctggtgatctagactgagaatcagcctgagctttacacagctggggtctgctactcgcgttttgtagacttttgtgtaactatttgtaccgtaggacagaatgtgaggaggaagtaacacacagaggaggatgtgtgtgtatgcatgtgtttgaattcacaaggaagaaattatttatcttgagctttttcctttgttattcaatttctattgatttattagtaataacaatgataataaaatgtaaatgagcaaaaaaaaaaaaaaaaaa

SEQ ID NO: 400871 - DNA, 1000 bp, Homo Sapiens; identical to SEQ ID NO: 222935

SEQ ID NO: 400872 - DNA, 1000 bp, Homo Sapiens; identical to SEQ ID NO: 289787

SEQ ID NO: 400873 - DNA, 1000 bp, Homo Sapiens; identical to SEQ ID NO: 222936

SEQ ID NO: 400874 - DNA, 1000 bp, Homo Sapiens
aagacatttgatagagatgggttacttgcagggtggaaaaatggcatactacgaaatgcgagctgaacatagtgtggatatagatgtggatattgattggcctattgcagagcaaagagtattaagatatggctattttggcaaagagaagcttaaggaaataaaacttttggtttgcaatattgatggatgtctcaccaatggccacatttatgtatcaggagaccaaaaagaaataatatcttatgatgtaaaagatgctattgggataagtttattaaagaaaagtggtattgaggtgaggctaatctcagaaagggcctgttcaaagcagacgctgtcttctttaaaactggattgcaaaatggaagtcagtgtatcagacaagctagcagttgtagatgaatggagaaaagaaatgggcctgtgctggaaagaagtggcatatcttggaaatgaagtgtctgatgaagagtgcttgaagagagtgggcctaagtggcgctcctgctgatgcctgttctactgcccagaaggctgttggatacatttgcaaatgtaatggtggccgtggtgccatccgagaatttgcagagcacatttgcctactaatggaaaaggttaataattcatgccaaaaatagaaattagcgtaatattgagaaaaaaatgatacagccttcttcagccagtttgcttttatttttgattaagtaaattccatgttgtaatgttacagagagtgtgatttggtttgtgatatatatatattgtgctctacttttctctttacgcaagataattatttagagactgattacagtctttctcagatttttagtaaatgcaagtaagaacatcatcaaagttcactttgtattgtaccctgtaaaactgtgtgtttgtgtgctttcaaagatgttgggattttatttatctggggacagtgtgtatggtaagacatgcccttctattaataaaactacatttctcaaacttga

SEQ ID NO: 400875 - DNA, 1000 bp, Homo Sapiens; identical to SEQ ID NO: 222937

SEQ ID NO: 400876 - DNA, 1000 bp, Homo Sapiens; identical to SEQ ID NO: 289789

SEQ ID NO: 400877 - DNA, 1000 bp, Homo Sapiens; identical to SEQ ID NO: 117658

SEQ ID NO: 400878 - DNA, 1000 bp, Homo Sapiens; identical to SEQ ID NO: 222939

SEQ ID NO: 400879 - DNA, 1000 bp, Homo Sapiens; identical to SEQ ID NO: 117659

SEQ ID NO: 400880 - DNA, 1000 bp, Homo Sapiens
gaatatgttactgaacctatagtccagtttttttatttcttgttttagtctgaaattatttgggccctaataatcctaaaaagaatggagctgcattgatgaattggctcagtatttaaagggagcaaactttttgataataaatctttttaagagaaaaaaaacccagcatcctttttgaagtccagatttgtcaaaatgatagactattcagttatacatcttattttgtgctactaccacagatagccaatattccatgcagtcctgggcttagcttctgcccagctttattgctgctattggcaaagagcacaggactcagccctcgtggctaaaaatggtattttggcagtttgtattgaatctgtttgtgttattaacagaagagggagaaatgtcatgagacgttggacaggcaggattgatgatagcatgaccatagctttgctggaatactgaatgcagggtttggctaggtgtttattttaacattttattaaactttctatttgggtcttaacccatggttctcagctggggtgacactgctcctctagaagcaggtttgaaattatgggtatgttttcttgtcacagtgactgagtacggtggtggtagtggtggtactactactactggtatttagtcagcagggataagggatgttagctgtcctgcaaagttttggtcagtcatatacaataaagaatcatctcaccccgaaatgcaaattgcaggcccattgagatacacagcaagttagtttatactcttgatgtgaatatagtttaccaaaattagtgacataatgagtggaattactaggtaagtcaaatcctaaagagtgaatgtgttagaattgcagtgtcataccaaataacattcaaaagaaatgagccattaagtgaagcttatgaacctggaggtaaaaaatgcttatctgttaaactgaggtttcattgacgtgtccctattaataaacgttatttgccccaca

SEQ ID NO: 400881 - DNA, 1000 bp, Homo Sapiens
ccgaaatgtgtgacattcagcttctaaacgatgcctggagagtctgtttgctgcagacacccttgctcctgagtcattattttctttcatgttagattgatgacttctgtgaatagaaatcatcctgatcctattttacctggcctccagggcctgttgatgggctttgcaggcagtccagcagcccacacctgcaggcaggatgctgtcgtcaatgagctgagggtagctgctttgctgaagacctcacacgatgtccaatctcatccaaataacattgttcccatcctccccacccaccacatcaaaacataacacatcacagcactcagtagaggtcctgcctccccatttctcaagggaagccagtaggcaacacagccagcacggtgctctccagggcagcccctctcagacgaggaggcagcgggtgcagccaggtgtctgcagagcagccacaaaggtggcctaggatgcgggtgtctccccaggtgagtccatccacacacgtttgaaaaacactattagtctttctaacacactgagggaaagattaaaatctgtggaataaaggaggagattttatttacagatttttttaaaagccacctgggttgacaccttcctacttatccactagatgtcatcagaggtgctgttccgtggttctgcattaacccctgcctcatgtctgtaacatgtgacagtaattccagctcggtccctccaggcaaaggagaaacgggacttacttcacaggacagaggattgacagaagtcagtttaagataagtgtttgaatcagatttcagtacatctcattcatttcttagatttgtattcacaattgtgttctctaaaatgtgtctaaattttaaaaatatgtacatgcataatgtcattttaaaatctgaaggaaagaatttgaagtccacaaaaagtgtttgaggttctttggttttgttagtaaaagccagttctgtggtgatgacctatggaa

SEQ ID NO: 400882 - DNA, 1000 bp, Homo Sapiens; identical to SEQ ID NO: 222940

SEQ ID NO: 400883 - DNA, 1000 bp, Homo Sapiens; identical to SEQ ID NO: 289795

SEQ ID NO: 400884 - DNA, 1000 bp, Homo Sapiens; identical to SEQ ID NO: 222941

SEQ ID NO: 400885 - DNA, 1000 bp, Homo Sapiens; identical to SEQ ID NO: 222942

SEQ ID NO: 400886 - DNA, 1000 bp, Homo Sapiens; identical to SEQ ID NO: 222943

SEQ ID NO: 400887 - DNA, 1000 bp, Homo Sapiens; identical to SEQ ID NO: 289799

SEQ ID NO: 400888 - DNA, 1000 bp, Homo Sapiens; identical to SEQ ID NO: 289800

SEQ ID NO: 400889 - DNA, 1000 bp, Homo Sapiens
gcaccaggtgacaacctcagaacgccgttaccccctgggaactgaggactgaggccaaagtgaatcaagctgaagtcagagcacgggcctccccttctgaagcagcgaaggccacggttccgacttctttcctggccccctccttggtcaggctgaatggtgacttttattgttttttgagacggagtcttgatctgtcgcccaggctggagtgcagtagcgtgatctcggctcactgcaactctgcctcccgggttcaagcaattctcctgtctcagcctcccgagtagctgggattacaggtgcccacctgtactttttagtagagacagggtttcaccatgttggccaggctggtctcgaactcctgacctcaagtgatccacccgcctcggcctcccacagtgctgagattacaggtgggagccactgcacccggcctgaatgatgactcttgaggggaaaaagtttactcaggtttgcaggtacaaaatccaaaatccagggctttgggttttgtgcatgggtagacagctgaatgggcagagaaaccagaaggatgctacacccaccatctcatcccatggggatcaggggaccaggattccctgatgcgaagctgctcctctgtccagggacgtcttgatcattacacaaaggcagcccctggagttccattcatggagcctgccgtggagtggagaggggtgggaggactcaggtgtgtgaaatgtatatgttttcaaaggaagcagtgggaggccagttggttttgagttggtctccgcaggcaacatcacttctgggatttggtttactggagccttttttcccatggtgaaggcaggggacatagacaaggagggaggaagctggcagatcccatcaaaggccagagcagacagacctactgcttgaagtaaacattgcaaggaagccaatttgtgcgttcaactcttattaaaacatgtcagtgatggacattgaaaaaaaaaaaaaa

SEQ ID NO: 400890 - DNA, 1000 bp, Homo Sapiens; identical to SEQ ID NO: 289802

SEQ ID NO: 400891 - DNA, 1000 bp, Homo Sapiens; identical to SEQ ID NO: 289804

SEQ ID NO: 400892 - DNA, 1000 bp, Homo Sapiens; identical to SEQ ID NO: 222945

SEQ ID NO: 400893 - DNA, 1000 bp, Homo Sapiens; identical to SEQ ID NO: 289806

SEQ ID NO: 400894 - DNA, 1000 bp, Homo Sapiens; identical to SEQ ID NO: 289807

SEQ ID NO: 400895 - DNA, 1000 bp, Homo Sapiens; identical to SEQ ID NO: 289809

SEQ ID NO: 400896 - DNA, 1000 bp, Homo Sapiens; identical to SEQ ID NO: 289811

SEQ ID NO: 400897 - DNA, 1000 bp, Homo Sapiens; identical to SEQ ID NO: 289812

SEQ ID NO: 400898 - DNA, 1000 bp, Homo Sapiens
ttcttccaaatcactgggacaactgtgggaaggctgggaaggttaagaaacaacagaggtggacctccaaaaacatagaggcatcacctgactgcacaggcaatgaaaaaccatgtgggtgatttccagcagacctgtggtattggccaggaggcctgagaaagcaagcacgcactctcagtcaacatgacagattctggaggataaccagcaggagcagagataacttcaggaagtccatttttgcccctgcttttgctttggattatacctcaccagctgcacaaaatgcattttttcgtatcaaaaagtcaccactaaccctcccccagaagctcacaaaggaaaacggagagagcgagcgagagagatttccttggaaatttctcccaagggcgaaagtcattggaatttttaaatcataggggaaaagcagtcctgttctaaatcctcttattcttttggtttgtcacaaagaaggaactaagaagcaggacagaggcaacgtggagaggctgaaaacagtgcagagacgtttgacaatgagtcagtagcacaaaagagatgacatttacctagcactataaaccctggttgcctctgaagaaactgccttcattgtatatatgtgactatttacatgtaatcaacatgggaacttttaggggaacctaataagaaatcccaattttcaggagtggtggtgtcaataaacgctctgtggccagtgtaaaagaaaatccctcgcagttgtggacatttctgttcctgtccagataccatttctcctagtatttctttgttatgtcccagaactgatgttttttttttaaggtactgaaaagaaatgaagttgatgtatgtcccaagttttgatgaaactgtatttgtaaaaaaaattttgtagtttaagtattgtcatacagtgttcaaaaccccagccaatgaccagcagttggtatgaagaacctttgacattttgtaaaaggccatttcttgg

SEQ ID NO: 400899 - DNA, 1000 bp, Homo Sapiens
gaggcatagggtagcttacgtagtggaggatgtgccaaatattctcttcaaatgccaccttctcaatttataactaaaatagtgttatctgactaattcctctgaattttgatgtaagatctatataggcccccaaaatgatcgtagtacatgccagtcatttctcagtgaaataaatacaataccagagtacattatgggttttattgctttcttttatggtagacctgttaatggggaaaaaatacatcaaatcaaatagaatcttatatctgtatgttaaaatagagcacttacctgaagtcagtggcctggatcatagccctggatcatttcccagtctgtcctgtgctgtgtgaccttggacaaggcgcttcatctctctgggcctctatttctccatttgtaaaacaagtggctgcagtagatgatggctgagagcccttcctgttcccagatgccttggtccaaagaccccacccctctgctggtcctgccaacgtgttggtgctataagctgcttcagatataaaattggtttatctataatgtttgttcatttaatagcttctaaaaggcctttttgttatacagtgctttttttctagttttatggacttggttactgtaataatgtcttgtttttagccatgtaactacaaacagatattctcttgatgtcttagtaaatttgcatttgatatatcattgatgagattttgttgttatgtaatattctttggctacgcatctgtccagcatcttattaaccataatactgtgatcattatttggaaatatgtcctatggaaagaataaaagcatgtacttcacagctagcatgttcacagatttgaaagaagtttcattaaaagcaccattgctttctgtccaaaaaaaaaaaaaaaaaaaaaaaaaaaaaaaaaaaaaaaaaaaaaaaaaaaaaaaaaaaaaaaaaaaaaaaaaaaaaaaaaaaaaaaaagaaaaaaaaaaaaaaaaa

SEQ ID NO: 400900 - DNA, 1000 bp, Homo Sapiens; identical to SEQ ID NO: 289813

SEQ ID NO: 400901 - DNA, 1000 bp, Homo Sapiens; identical to SEQ ID NO: 222946

SEQ ID NO: 400902 - DNA, 1000 bp, Homo Sapiens; identical to SEQ ID NO: 289815

SEQ ID NO: 400903 - DNA, 1000 bp, Homo Sapiens; identical to SEQ ID NO: 117662

SEQ ID NO: 400904 - DNA, 1000 bp, Homo Sapiens
atgtatgttgaaaaattgtatggaccttacagggtgttttctgcaattgtatttggtgcagtggctctaggacatgccagttcatttgctccagactatgctaaagctaagctgtctgcagcccacttattcatgctgtttgaaagacaacctctgattgacagctacagtgaagaggggctgaagcctgataaatttgaaggaaatataacatttaatgaagtcgtgttcaactatcccacccgagcaaacgtgccagtgcttcaggggctgagcctggaggtgaagaaaggccagacactagccctggtgggcagcagtggctgtgggaagagcacggtggtccagctcctggagcggttctacgaccccttggcggggacagtgcttctcgatggtcaagaagcaaagaaactcaatgtccagtggctcagagctcaactcggaatcgtgtctcaggagcctatcctatttgactgcagcattgccgagaatattgcctatggagacaacagccgggttgtatcacaggatgaaattgtgagtgcagccaaagctgccaacatacatcctttcatcgagacgttaccccacaaatatgaaacaagagtgggagataaggggactcagctctcaggaggtcaaaaacagaggattgctattgcccgagccctcatcagacaacctcaaatcctcctgttggatgaagctacatcagctctggatactgaaagtgaaaaggttgtccaagaagccctggacaaagccagagaaggccgcacctgcattgtgattgctcaccgcctgtccaccatccagaatgcagacttaatagtggtgtttcagaatgggagagtcaaggagcatggcacgcatcagcagctgctggcacagaaaggcatctatttttcaatggtcagtgtccaggctgggacacagaacttatgaacttttgctacagtatattttaaaaataaattcaaattattctacccatttt

SEQ ID NO: 400905 - DNA, 1000 bp, Homo Sapiens; identical to SEQ ID NO: 222948

SEQ ID NO: 400906 - DNA, 1000 bp, Homo Sapiens; identical to SEQ ID NO: 222950

SEQ ID NO: 400907 - DNA, 1000 bp, Homo Sapiens; identical to SEQ ID NO: 222951

SEQ ID NO: 400908 - DNA, 1000 bp, Homo Sapiens; identical to SEQ ID NO: 222951

SEQ ID NO: 400909 - DNA, 1000 bp, Homo Sapiens; identical to SEQ ID NO: 222951

SEQ ID NO: 400910 - DNA, 1000 bp, Homo Sapiens; identical to SEQ ID NO: 222951

SEQ ID NO: 400911 - DNA, 1000 bp, Homo Sapiens; identical to SEQ ID NO: 289819

SEQ ID NO: 400912 - DNA, 1000 bp, Homo Sapiens; identical to SEQ ID NO: 289819

SEQ ID NO: 400913 - DNA, 1000 bp, Homo Sapiens; identical to SEQ ID NO: 289819

SEQ ID NO: 400914 - DNA, 1000 bp, Homo Sapiens; identical to SEQ ID NO: 289819

SEQ ID NO: 400915 - DNA, 1000 bp, Homo Sapiens; identical to SEQ ID NO: 289819

SEQ ID NO: 400916 - DNA, 1000 bp, Homo Sapiens; identical to SEQ ID NO: 289819

SEQ ID NO: 400917 - DNA, 1000 bp, Homo Sapiens; identical to SEQ ID NO: 289819

SEQ ID NO: 400918 - DNA, 1000 bp, Homo Sapiens; identical to SEQ ID NO: 289819

SEQ ID NO: 400919 - DNA, 1000 bp, Homo Sapiens; identical to SEQ ID NO: 289819

SEQ ID NO: 400920 - DNA, 1000 bp, Homo Sapiens; identical to SEQ ID NO: 222953

SEQ ID NO: 400921 - DNA, 1000 bp, Homo Sapiens
ggttccgagacaaatgaattcaagttcctaaaaccggttatccctaatatccaggcaaaaggtcttgggaagaatagtgaagaaaactccacctttcgaaatagctttggatttaatttttagtaagaatgctatttacatttgcatgtacttttttagttttatgtaaccatatcaatattatttagtcttaaactagttacgttattatgcaatacgactaattgtatttttaattttttcttttctcccccaattttttttttttttttgagaccgagtctcattctgtcgccctggctggagtgcaatggtgtgatctcagctcactgcaccctccgcctctcgggttcaagcaattctcctgcatcagcctcccgagtagctggcattacaggcgcccaccaccacgctcggctaaattttttttttttttatctttagtagagacggggtttcaccacgttggccgggcaggttttaaactcttgacctcatgttccacccgccacggcctcccaaagtgctgtgattaccggtgtgagccactgcgcccggccttttttttttcttttcttttcttttttttgatacagagtcttagtcacccagactagaggtcagtggcaggatctcagctcactgcaacctctgcctcctgggctcaagagaccagcccacctccgcctccaagtagctgggactacaggcgtgcgccaccatgcccggctacttcttgtattttttgtagagacggatcgtcaccatatttcttaggctggcctttaacttctgagctcaagagatgcactcccctcagcctcccaaagtgctgggattacaggcggccaggcctattttcaattttcaagtattgcatatcattgtgaataacattgtaaatcctttttatattaagtaacaggtagttaatccatttctaatgaataattttaaggttttaatcctttccaagtgtacaataatttactgattatta

SEQ ID NO: 400922 - DNA, 1000 bp, Homo Sapiens
tgtcccagagctaccactatgaggtgtgtgtgactggaggctccaggtcaaataagttcaaatttctgaaaccaattatccccaacttcctaccccagagcacaggtagtgaagtcgaagaaaatcccccatttcagaataatttgggtttctgataaagaatgaaaaataaaacctgtgtttatgaatacatttataattaggaacttatcgtgaggtgcctgtaaagtagtatttttgatcacttcaaatacatactcttcaagtcaagaaataaatttctttacatagaaaaggatacagatttagtaccaagaacacttcacaaagcaggaaatgtgcatgtgtaatggtttatgtcaaacaattatgcttaatataaagtctattaagtggtaagtcttgtttgagatattttaaattgctttccattgttttcaatatttactgtgacttttgttttctgagttgattagaatgctgttcgagtatacctaccctagtttcagaagcatagattgtagtgtacctttttaaactttatttttttaaaaaaagttgttttatgaatcatacactattttcacacttttaatctcagaagaaacatatgtgacatggtattttagtaatgaccaaatagacggtcttagagattcagtaagttcactaaggtccactaactaataagtgacaaaactgagcatccatcctagatctgcctgactctaagtcagtgactttgctcccattccatactgtttttgtcattggatatcacctggcaagtttctgcctaactaaagagaagaaaagtttttatcgtattcatactactgttcaatctttatttagaaataaactttatctatgatttcattttcttataaaccagtaatcttgcttttctgggtaaattttcagctattattactaatgctctgatctgcccaaatcttaagtaaaaaacaaaattgaaagagcaaaaaaaaaaaaaaaa

SEQ ID NO: 400923 - DNA, 1000 bp, Homo Sapiens
ctgaagccgattatccccaacttccctccccagtgccctgggaaagaaatacaaggaaattctaccttccccaataactttgggttcaatattcagtgaccatagttgacttttacattccataggtattttattttgtggcatttccatgccaatgtttatttcccccaatttgtgtgtatgtaatattgtacggatttactcttgatttttctcatgttctttctccctttgttttaaagtgaacatttacctttattcctggttcttaaaaggtgacaattcattctttaacccagatggtcttaatttgtaattaatttgcctccctaaagagcaataccaaatcacatttttttcatgcccctatctttagctgaacttcacccactattatgcttatggtaaaattaaatagagcaatttggaagtgattccaattttccagcatttcttcatttgattctctttttttagtcttaaaataatgactcctattcagacatatcatttttcttttttgtaaatccagtgcgtttttagttaacctttaaatatgctttttgctttcaaaaataaaccagaaaacctatatcctatgatacaactctaagtgttatcacttgattcgaaagggtcagaagaccagttttttagtatcctttcctcattcatcctggagaggattgtgcaggcacattaatattgtgaccaatcacagaatctgggaatatgaagctataattttttaattaatgtcacaaagctctagtgcaatctagttgaatgcagatgcctgtgcccaaataataattcatatagcataaattggagttgtgtgttaatgtgtaaaaatttttgcctgtactatcatataatttaatgtatatacaccagaaactatttttcaaactttttttactgcaaccaatagttaagattatattttacatattttgaaacacacaagcttaatagaaataaatgcttgtgaacaatg

SEQ ID NO: 400924 - DNA, 1000 bp, Homo Sapiens; identical to SEQ ID NO: 117665

SEQ ID NO: 400925 - DNA, 1000 bp, Homo Sapiens; identical to SEQ ID NO: 222954

SEQ ID NO: 400926 - DNA, 1000 bp, Homo Sapiens; identical to SEQ ID NO: 222955

SEQ ID NO: 400927 - DNA, 1000 bp, Homo Sapiens
ttaatctttttgtaatcataaattactcaattaggataaaaataaattatgttttaatgaaattcttaaattaacatctttttaatggaacatttaagtgaatatatgaatattgaatttctaaatatttgttgtgcctgtctttaccatgtaacttaatgtttgcaaggccagagtgtttgaaagttttgtatttaactttataattaccttgtcctttctggttgactatactaggctaagccctcttaatagccatgagtgtaaaatttagtttactcatttttcacaaattgtatataaacatgcacttcactacattggtaatacactaaaattgtggtccttttcctcttgtgaccaccacatgtctagtgattattttgtttatttggttgctacttacctagcacattgtaatgttccatgaatgctaatattaaattttgtaaaaataacttatttataaataatttttaaagagaaaaatctcatataatttgtcataacctttcaataaataaaactgttaaatcatggcctgatatcatcttaaaaaaaaatctcagaatctgaaataagccctaaatttctccccaaaatcaagactcttgagagcatcataggtctccttgtgctaccttttactccctataaatagaaatccaagtatactttaatatgtgtatattttttggttttcctacagcttctccccatctttcaaaagaatcacgaaatttcttctgcaccttggctattctgtttaaatctgataatcagttgatctcaggtttttcactgtacattactttgcagatatggacagcctttacaaaaataatttttaaatgcttaattattttaatttgttctttaaggtaaccttcagttattttgaattaatttaacttctcaattatgccaaagttgcacttgcatgaaataaatattattttgtccttgtatagactggaacagtaataaatttatctgaatt

SEQ ID NO: 400928 - DNA, 1000 bp, Homo Sapiens
ccaagcccaggccgactctctcaccgtctacctggtggtggcgttggcctcggtgtcgtcgctcttcctcttttcggtgctcctgttcgtggcggtgcggctgtgcaggaggagcagggcggcctcggtgggtcgctactcggtgcccgagggtccctttccagggcatctggtggatgtgagcggcaccgggaccctatcccagagctaccagtacaaggtgtgtctgacgggaggctcagaaacaaatgagttcaagttcctgaagccgattatgcccaacttccctcctcagggcactgagagagaaatggaagaaacccccacctctcggaatagcttcccgttcagttaagtgtgggattattttactaaatcttacttatgtttggagatctcttttaacttaaagttacatggtctgtttcttgtttattttacctctattctttaggttgaaattttatataaagtaagatactggtatcttagtatttcctgttcatgcttagtagtttattacttcacttgagggtacttgacaatatgaacaaaaagtaaatttttatttgcataattttaagcttttgaaattaaattatctattcttcccccccccaaaaaaaagtattgtaaatccttaagtaaaattgtatttctagctattggtaagagttgtttcactattgctatgtaggactgtttaaaatgtgagtatctgatattatttaatcctccaatgtctcattttgcagtaactcctacagtgtgtaacactaaaaataagaactaatgatggctaaacactaaagtagccattcatacttatgcatattttagtatcccataatagtcaatccaaaatttttgtgactatagactttactgaagtgtcaacacattagtttgtgagcctcatgtaagaacatgatggtctttttttaaaaaaaaagtcgtgccaattataagtgcttaataaatatttgctgaatgttactaa

SEQ ID NO: 400929 - DNA, 1000 bp, Homo Sapiens; identical to SEQ ID NO: 117666

SEQ ID NO: 400930 - DNA, 1000 bp, Homo Sapiens; identical to SEQ ID NO: 222957

SEQ ID NO: 400931 - DNA, 1000 bp, Homo Sapiens; identical to SEQ ID NO: 117667

SEQ ID NO: 400932 - DNA, 1000 bp, Homo Sapiens
acgtagccaagcgcatgatccgcatggccaaggagtgtggggctgattgtgctaagttccagaagagtgagctagaattcaagtttaatcggaaagccttggagaggccatacacctcgaagcattcctgggggaagacgtacggggagcacaaacgacatctggagttcagccatgaccagtacagggagctgcagaggtacgccgaggaggttgggatcttcttcactgcctctggcatggatgagatggcagttgaattcctgcatgaactgaatgttccatttttcaaagttggatctggagacactaataattttccttatctggaaaagacagccaaaaaaggtcgcccaatggtgatctccagtgggatgcagtcaatggacaccatgaagcaagtttatcagatcgtgaagcccctcaaccccaacttctgcttcttgcagtgtaccagcgcatacccgctccagcctgaggacgtcaacctgcgggtcatctcggaatatcagaagctctttcctgacattcccatagggtattctgggcatgaaacaggcatagcgatatctgtggccgcagtggctctgggggccaaggtgttggaacgtcacataactttggacaagacctggaaggggagtgaccactcggcctcgctggagcctggagaactggccgagctggtgcggtcagtgcgtcttgtggagcgtgccctgggctccccaaccaagcagctgctgccctgtgagatggcctgcaatgagaagctgggcaagtctgtggtggccaaagtgaaaattccggaaggcaccattctaacaatggacatgctcaccgtgaaggtgggtgagcccaaaggctatcctcctgaagacatctttaatctagtgggcaagaaggtcctggtcactgttgaagaggatgacaccatcatggaagaattggtagataatcatggcaaaaaaatcaagtcttaaaaataaagtgccattctctg

SEQ ID NO: 400933 - DNA, 1000 bp, Homo Sapiens; identical to SEQ ID NO: 117668

SEQ ID NO: 400934 - DNA, 1000 bp, Homo Sapiens; identical to SEQ ID NO: 117669

SEQ ID NO: 400935 - DNA, 1000 bp, Homo Sapiens; identical to SEQ ID NO: 289831

SEQ ID NO: 400936 - DNA, 1000 bp, Homo Sapiens; identical to SEQ ID NO: 222958

SEQ ID NO: 400937 - DNA, 1000 bp, Homo Sapiens; identical to SEQ ID NO: 289832

SEQ ID NO: 400938 - DNA, 971 bp, Homo Sapiens
cactcgttgcataaatttgcgctccgccagcccggagcatttaggggcggttggctttgttgggtgagcttgtttgtgtccctgtgggtggacgtggttggtgattggcaggatcctggtatccgctaacaggtcaaaatgcagatcttcgtgaaaacccttaccggcaagaccatcacccttgaggtggagcccagtgacaccatcgaaaatgtgaaggccaagatccaggataaggaaggcattccccccgaccagcagaggctcatctttgcaggcaagcagctggaagatggccgtactctttctgactacaacatccagaaggagtcgaccctgcacctggtcctgcgtctgagaggtggtatgcagatcttcgtgaagaccctgaccggcaagaccatcaccctggaagtggagcccagtgacaccatcgaaaatgtgaaggccaagatccaggataaagaaggcatccctcccgaccagcagaggctcatctttgcaggcaagcagctggaagatggccgcactctttctgactacaacatccagaaggagtcgaccctgcacctggtcctgcgtctgagaggtggtatgcagatcttcgtgaagaccctgaccggcaagaccatcactctggaggtggagcccagtgacaccatcgaaaatgtgaaggccaagatccaagataaagaaggcatcccccccgaccagcagaggctcatctttgcaggcaagcagctggaagatggccgcactctttctgactacaacatccagaaagagtcgaccctgcacctggtcctgcgcctgaggggtggctgttaattcttcagtcatggcattcgcagtgcccagtgatggcattactctgcactatagccatttgccccaacttaagtttagaaattacaagtttcagtaatagctgaacctgttcaaaatgttaataaaggtttcgttgcatggta

SEQ ID NO: 400939 - DNA, 1000 bp, Homo Sapiens; identical to SEQ ID NO: 289833

SEQ ID NO: 400940 - DNA, 1000 bp, Homo Sapiens
gacatgagcaagcccccgacagctcagccagacttcccctatggtcagtatgcaggttacgggcaggacttgagtggcttcggacagggcttctcagaccccagccagcagcctccttcctacgggggtccctccgtgccagggtcggggggcccccccgccggcggcagcggctttggacgagggcagaaccacaacgtgcaagggttccacccctaccgacgctagcccgcggcgccgcgacgtctgcacggcccagacccaggattccaaacttgtgaactcgtgacaatcacaaacttggcggcaaagtggcgactcaaccttgggggggggggcggggggagggcgcgaggcttttggagcggctgtgggtgtcgtctggactgaggtttttaaatatttctttctctaacccatcagcacaataaaaaaaagtcactggttcaacaacagggtttaaaaaaaatgtcttcagctttaattcaaaacttcaggtttctttttcttccttttttttggaaattattttcctgagccttttgttttacggtatattgtaaacttttatgttaaagaaaaaatatacatttacaaattgtgagatttttaagagaaattttctacgatgtatactggcttattttttaatttaaaacggggtttccgtcggcactggtggagggggtgcgctgttagtcccctcgctcctggctttgggggttgggacttggtggtccagaaactctgggagcttctagaagaaatctactgagtgtatttctgttttttgtttaattccttgcttttgtcgactgacctgcttggtagtgtctgaggtgaactgtgggggttgcgcacagccagccgcgtggatcccacgcagcgctgaaccgaaccgagtaggaagcctttctccccaggcacgtggcttcagggcgtttcccattgaccagtttgaccctggtttgaataaagagaagtgcgtttggattagaaa

SEQ ID NO: 400941 - DNA, 1000 bp, Homo Sapiens; identical to SEQ ID NO: 220425

SEQ ID NO: 400942 - DNA, 1000 bp, Homo Sapiens
acctgggaatttcagctggagatactgattattgagttctgaagtagagtgttggaaataggcaattagagaaagtccattgatgtcattttgtttataatattgcagttcatactgaatgaccacttgatatgactaattcagggaatatatatttttctatgaaagctatgaatgttactatcacggcttttccttatttttacttgtatgtagcagcatttacagaaatgccaaaaatgtgcctcattaagaggcaggtcttaatcagttagataaaaataaaatgtatagcttaagatcaaaacagtcatatttttagatacagtgaaatcttttatgtttctctacagcaccttaaaaattagaacttgaatactttgagtaaacttactacaatctcatcccaacaaactttaatggtagcatgtttggcctatttcattgtggcctgtactaggattagaaaatttggtcgtggtataacaaagaagtgtatttacaataggatttaatttgttgttaatatgtatttgttgaaattaaaattgccagattaaatgaatatactgtcgcatctttttaacatagtaacgtgttactggaaaaattaagttgttgaaagtaagttgttttcccatttaaaaatatctgaatatatgatttgcatgtgtaaatctgaaaaactaaactacagaaacctagggttttctatttcttttttaagtcaaatgcatttttttttttttgttatacagatgaaccaagtgtctaaaatacttgagaaatttgtggttgcatgtctgttttaaaaaaaaggctttttgttttttagcataagccagaatattctaacctactaagtctgtgtcctttgctccttttgtagtatactttcatctaaattactgatccccaatatgttgatacacaggtgagaaagggaagaattcctaataaactgctattacttttaggtgaaaaaaaaaaaaaaaaaaaa

SEQ ID NO: 400943 - DNA, 1000 bp, Homo Sapiens
ggtgggagaagcgatggtgcgacctcagactgatccctctacttcattcgcgcttctctcagtatgtgcccggcacagatttgagtcggcagaatgcctttcaagtcattgctgtggatggggtctgcactgggattattcagtgcctctctgctgaagactgcgttgactggctacaagcaatagcaactaacatttcaaatctcacaaagcacaatattaaaaaaatcaacagaaactttcctgtaaaccagcagattgtctacatgggctggtgtgaagcccgggagcaagaccccctccaggacagagtgtactccccgaccttcctggccctgaggggctcatgtctctacaagtttctggcacctccagtgaccacctgggactggacgagagcagagaaaacattctcagtttatgagattatgtgcaagatcctcaaggacagtgacctgctggaccgacggaaacagtgcttcaccgtgcagtctgagtctggggaggacctgtacttctcagtggagctggaaagtgacctcgcccagtgggaaagagccttccagacagcaacctttctagaagtagaacggatacagtgcaagacctatgcatgtgtgctagaaagtcatctaatgggactcacaattgatttcagcacaggatttatctgctttgatgctgcaacaaaggctgtcctttggaggtataaattctctcagcttaaaggttcttcagatgatggcaagagcaaaatcaaatttttgtttcagaatccagatactaaacagattgaagcaaaggagttggaattttctaatttatttgctgttcttcactgcattcattccttctttgctgccaaggtagcttgtttggaccctctatttttaggcaatcaagctactgcttctactgctgccagctctgctaccacgagcaaagcaaagtatacaacttgacatactgaactcttcattgacacaccccatgactgtat

SEQ ID NO: 400944 - DNA, 1000 bp, Homo Sapiens; identical to SEQ ID NO: 117670

SEQ ID NO: 400945 - DNA, 1000 bp, Homo Sapiens
gtggccatggccttcccacctgtctttgacgtgggcacctacaagtttattcgggaggaggaccagtgcatctttgagcatcgctacttcaaggccaatgacacgctgggcttcatgcttatgttggctgtgctcatggcagctacccatgctgtctacggcaagctgctcctcttcgagtatcgtcaccgcaagatgaagccagtgcagatggtgccagccatcagccagaactggacattccatggtcccggggccaccggccaggctgctgccaactggatcgccggctttggccgtgggcccatgccaccaaccctgctgggtatccggcagaatgggcatgcagccagccggcggctactgggcatggacgaggtcaagggtgaaaagcagctgggccgcatgttctacgcgatcacactgctctttctgctcctctggtcaccctacatcgtggcctgctactggcgagtgtttgtgaaagcctgtgctgtgccccaccgctacctggccactgctgtttggatgagcttcgcccaggctgccgtcaacccaattgtctgcttcctgctcaacaaggacctcaagaagtgcctgaggactcatgccccctgctggggcacaggaggtgccccggctcccagagaaccctactgtgtcatgtgaagcaggctggtaggcagacaggcagagagaaggtcatggccaccgtgatggggccaacagcaagggaggggtaggggcccatacaggagtcctcctttctgagctccagccccagcccctcgaaccacctgtaatctaggcacctttgccaacacctcccaaggatggaggactgggcgagggactgggaaagaggcatatttagttttgtggggcctgtctccgctgcctccttctccacttctacaatctcattctctctctctctctctctgtctctctctctctctctctctctcagaagtgacaattcaaaaaaaaaaaaaaaaaa

SEQ ID NO: 400946 - DNA, 1000 bp, Homo Sapiens; identical to SEQ ID NO: 289836

SEQ ID NO: 400947 - DNA, 1000 bp, Homo Sapiens
cgtgcgggagcgcagcctgcaccgcgccccgtactacctgctgctcgacctgtgcctggccgacgggctgcgcgcgctcgcctgcctcccggccgtcatgctggcggcgcggcgtgcggcggccgcggcgggggcgccgccgggcgcgctgggctgcaagctgctcgccttcctggccgcgctcttctgcttccacgccgccttcctgctgctgggcgtgggcgtcacccgctacctggccatcgcgcaccaccgcttctatgcagagcgcctggccggctggccgtgcgccgccatgctggtgtgcgccgcctgggcgctggcgctggccgcggccttcccgccagtgctggacggcggtggcgacgacgaggacgcgccgtgcgccctggagcagcggcccgacggcgcccccggcgcgctgggcttcctgctgctgctggccgtggtggtgggcgccacgcacctcgtctacctccgcctgctcttcttcatccacgaccgccgcaagatgcggcccgcgcgcctggtgcccgccgtcagccacgactggaccttccacggcccgggcgccaccggccaggcggccgccaactggacggcgggcttcggccgcgggcccacgccgcccgcgcttgtgggcatccggcccgcagggccgggccgcggcgcgcgccgcctcctcgtgctggaagaattcaagacggagaagaggctgtgcaagatgttctacgccgtcacgctgctcttcctgctcctctgggggccctacgtcgtggccagctacctgcgggtcctggtgcggcccggcgccgtcccccaggcctacctgacggcctccgtgtggctgaccttcgcgcaggccggcatcaaccccgtcgtgtgcttcctcttcaacagggagctgagggactgcttcagggcccagttcccctgctgccagagcccccggaccacccaggcgacccatccctgcgacctgaaaggcattggtttatga

SEQ ID NO: 400948 - DNA, 1000 bp, Homo Sapiens; identical to SEQ ID NO: 289837

SEQ ID NO: 400949 - DNA, 532 bp, Homo Sapiens
ggcccttccaccttttgtgggcactcaagttcggacctctgggatcggcgattcccctctggccagggctggttttaatgctctccgtgggcgggcttcggttgagtttggtccgcttttcctttctgctcctcaggggagcattgcttccttctctcgcagtgaccatgacgaaattagcgcagtggctttggggactagcgatcctgggctccacctgggtggccctgaccacgggagccttgggcctggagctgcccttgtcctgccaggaagtcctgtggccactgcccgcctacttgctggtgtccgccggctgctatgccctgggcactgtgggctatcgtgtggccacttttcatgactgcgaggacgccgcacgcgagctgcagagccagatacaggaggcccgagccgacttagcccgcagggggctgcgcttctgacagcctaaccccattcctgtgcggacagcccttcctcccatttcccattaaagagccagtttattttctaaaaaaaaaaaaaaaaa

SEQ ID NO: 400950 - DNA, 1000 bp, Homo Sapiens; identical to SEQ ID NO: 289839

SEQ ID NO: 400951 - DNA, 1000 bp, Homo Sapiens; identical to SEQ ID NO: 289840

SEQ ID NO: 400952 - DNA, 1000 bp, Homo Sapiens; identical to SEQ ID NO: 289841

SEQ ID NO: 400953 - DNA, 1000 bp, Homo Sapiens; identical to SEQ ID NO: 117671

SEQ ID NO: 400954 - DNA, 1000 bp, Homo Sapiens; identical to SEQ ID NO: 289843

SEQ ID NO: 400955 - DNA, 1000 bp, Homo Sapiens; identical to SEQ ID NO: 222959

SEQ ID NO: 400956 - DNA, 1000 bp, Homo Sapiens; identical to SEQ ID NO: 289846

SEQ ID NO: 400957 - DNA, 1000 bp, Homo Sapiens
acagcttccggcccgaggcctcacctggacaacggtgcttccccaacagctgataccgccgtcctggggacttgggcttcttgccttcataaggcacagagcagatggagatgggacagtggagccagtttggttttctccctctgcactaggccaagaacttgctgccttgcctgtggggggtcccatccggcttcagagagctctggctggcattgaccatgggggaaagggctggtttcaggctgacatatggccgcaggtccagttcagcccaggtctctcatggttatcttccaacccactgtcacgctgacactatgctgccatgcctgggctgtggacctactgggcatttgaggaattggagaatggagatggcaagagggcaggcttttaagtttgggttggagacaacttcctgtggcccccacaagctgagtctggccttctccagctggccccaaaaaaggcctttgctacatcctgattatctctgaaagtaatcaatcaagtggctccagtagctctggattttctgccagggctgggccattgtggtgctgccccagtatgacatgggaccaaggccagcgcaggttatccacctctgcctggaagtctatactctacccagggcatccctctggtcagaggcagtgagtactgggaactggaggctgacctgtgcttagaagtcctttaatctgggctggtacaggcctcagccttgccctcaatgcacgaaaggtggcccaggagagaggatcaatgccataggaggcagaagtctggcctctgtgcctctatggagactatcttccagttgctgctcaacagagttgttggctgagacctgcttgggagtctctgctggcccttcatctgttcaggaacacacacacacacacactcacacacgcacacacaatcacaatttgctacagcaacaaaaaagacattgggctgtggcattattaattaaagatgatatccagtc

SEQ ID NO: 400958 - DNA, 1000 bp, Homo Sapiens
cctagcctggaagcattcaggagagcctgccattcctgggatgatccctgctgggtatttgcacgagagtggtttggtttagctgcctctgctgccctttactgtgacaagcaaggaggggttgcttccctccctacctcatccatcccacacaccttggccttctgcaagccaagtggttctgcaaggtcaaggcactagtatcagatggcaagctcagtgcccgggattcccactgctggcaggagaaggcccattttcacagtccacagaagcgtgttaggctggggctgggggtgggatgggctggtgagaaagttcaaattccaggaagccactttttattggatataaggtatctaacggcaaaagtacttagtagcaaagtggccaccttttgattgattgggcttcctcataggaagcactgagggtgtgtctttgtacttggttcattgcccttcacctggtagagaaagagaggtcagaaatagcaagcaaaaagcaggactcccaggagccacaagaaaagagcacaggctgcaccaaagcaggggcagcagagaataaaatatccctttgaacttgtcaacaattaaaaaactgcaaggagtcaccttataacactatttccagtaaaggtggaattgagtatcagagggattactgcggtgttaaggtagccctgccacgtggctctccaggcagggccaagaagacagcacaaagtatgggtttggccataagctcatatgctgcccccaaagactggggagagctgtgtgcctcagtgttgcagtgtgaattcctaaatagagggtaaagtgagcctagccaggaggtgtttggggctctatcgcgcatctctcctaccaagctgggcaagagcttttaggagattcatccagctttgtggatttagaaaggaagccttcagttccaatcagaatcctctttcctttaaaaaaaaaaaaaaaaaaaaaaaaaaaaaaaaaaaaaa

SEQ ID NO: 400959 - DNA, 1000 bp, Homo Sapiens; identical to SEQ ID NO: 222960

SEQ ID NO: 400960 - DNA, 1000 bp, Homo Sapiens
cccctgttggtcacaaagctggtgaagaactaccggtcccacgaggccctgctgatgctgccctcacggctgttctaccacagggaactcgaggtctgtgcggaccccacagtggtgacctccttgctgggctgggagaagttgcctaagaaaggcttccctctcatcttccatggtgtgcggggcagcgaggcacgggagggaaaaagcccatcgtggttcaacccggccgaggccgtccaggtcctgcgctactgctgcctcctggcccacagcatctccagtcaggtgtctgccagcgacattggcgtcatcacgccctaccggaagcaggtggagaaaatcagaattcttttgcgtaatgttgatctgatggatataaaggttggatcagtagaggagtttcaaggacaagagtatctggtcatcatcatttcgaccgtacggtcaaatgaagatagatttgaagatgatcgatattttttgggtttcttgtccaactcaaaaagatttaatgttgcaatcaccagacccaaagctttgctgatagtgctgggaaacccccatgttctcgttcgagacccctgttttggtgctttgctggaatacagtattacaaacggtgtttacatgggatgcgatttacctcctgcactgcagtctctgcaaaactgtggcgagggggtggcagacccctcctacccagtggtgccagaatccacaggaccagagaagcatcaggagcccagctgatctgcagtggctgacagcagggaggccatgtgctcagcctggccacgttgccgttacagtctgctccgtggctcctgtggcctgcccttgtctcgcagccaggcagggtcgtgtgtgggtgtggggctgccaggttggacgcagctgctgctgccctgactttggcatatgccagcctgttcctgccacagggcagtcactgccgcctaccctgaaataaaccctcgagtgacccccaaaaaaaaaa

SEQ ID NO: 400961 - DNA, 1000 bp, Homo Sapiens; identical to SEQ ID NO: 222961

SEQ ID NO: 400962 - DNA, 939 bp, Homo Sapiens; identical to SEQ ID NO: 289851

SEQ ID NO: 400963 - DNA, 1000 bp, Homo Sapiens; identical to SEQ ID NO: 289852

SEQ ID NO: 400964 - DNA, 1000 bp, Homo Sapiens; identical to SEQ ID NO: 117673

SEQ ID NO: 400965 - DNA, 1000 bp, Homo Sapiens; identical to SEQ ID NO: 289854

SEQ ID NO: 400966 - DNA, 1000 bp, Homo Sapiens; identical to SEQ ID NO: 117674

SEQ ID NO: 400967 - DNA, 1000 bp, Homo Sapiens; identical to SEQ ID NO: 222963

SEQ ID NO: 400968 - DNA, 1000 bp, Homo Sapiens; identical to SEQ ID NO: 289857

SEQ ID NO: 400969 - DNA, 1000 bp, Homo Sapiens; identical to SEQ ID NO: 117675

SEQ ID NO: 400970 - DNA, 1000 bp, Homo Sapiens; identical to SEQ ID NO: 117677

SEQ ID NO: 400971 - DNA, 1000 bp, Homo Sapiens; identical to SEQ ID NO: 117678

SEQ ID NO: 400972 - DNA, 1000 bp, Homo Sapiens; identical to SEQ ID NO: 289860

SEQ ID NO: 400973 - DNA, 1000 bp, Homo Sapiens; identical to SEQ ID NO: 117679

SEQ ID NO: 400974 - DNA, 1000 bp, Homo Sapiens; identical to SEQ ID NO: 222966

SEQ ID NO: 400975 - DNA, 1000 bp, Homo Sapiens; identical to SEQ ID NO: 289864

SEQ ID NO: 400976 - DNA, 1000 bp, Homo Sapiens; identical to SEQ ID NO: 289865

SEQ ID NO: 400977 - DNA, 1000 bp, Homo Sapiens; identical to SEQ ID NO: 289866

SEQ ID NO: 400978 - DNA, 1000 bp, Homo Sapiens; identical to SEQ ID NO: 117680

SEQ ID NO: 400979 - DNA, 1000 bp, Homo Sapiens; identical to SEQ ID NO: 222968

SEQ ID NO: 400980 - DNA, 1000 bp, Homo Sapiens; identical to SEQ ID NO: 117681

SEQ ID NO: 400981 - DNA, 1000 bp, Homo Sapiens; identical to SEQ ID NO: 117682

SEQ ID NO: 400982 - DNA, 1000 bp, Homo Sapiens
tgtggctcgatatgatcaacactgcctgtggactggacggtgcataggttttggcaaccatcactattacatattcttcttgtttttcctttccatggtatgtggctggattatatatggatctttcatctatttgtccagtcattgtgccacaacattcaaagaagatggattatggacttacctcaatcagattgtggcctgttccccttgggttttatatatcttgatgctagcaactttccatttctcatggtcaacatttttattattaaatcaactctttcagattgcctttctgggcctgacctcccatgagagaatcagcctgcagaagcagagcaagcatatgaaacagacgttgtccctcaggaagacaccatacaatcttggattcatgcagaacctggcagatttctttcagtgtggctgctttggcttggtgaagccctgtgtggtagattggacatcacagtacaccatggtctttcacccagccagggagaaggttcttcgctcagtatgaagaaaagcaacccaaaactctcaatctgatttgtttttgtttatgtcgatgccctgtagtttgaaagtgaagtaaagatttagaattcacctaagtccaaaggaaaacacgtggtttttaaagccattaggtaaaaaaagttctcaataaaggcattacaattttttaggtttagaaagatggacttttctgataaatcttggcagacatctaaaaaaaaaaccatatttttcacaagaaaatgcaagttactttttttggaaataatactcactgattatggataaaatggaatattttcagatactatattggctgtttcaaaatagtactattctttaaacttgtaatttttgctaagttatttgtctttgttgtatctataaatatgtaaaaaatatttaaatagatgtacctgttttgctttcacacttaataaaaaatttttttttgtagttgaaaaaaaaaaaaaaa

SEQ ID NO: 400983 - DNA, 1000 bp, Homo Sapiens; identical to SEQ ID NO: 289871

SEQ ID NO: 400984 - DNA, 1000 bp, Homo Sapiens
aacgcagacacgggaggtccagtgcctgagcaccaaccagaccctcagcacccgatgccctcctcaactgcggccctccaggaagcgcccctgtaacagccaaccctgcagccagcgccctgatgatcaatgcaaggacagctctccacattgccccctggtggtacaggcccggctctgcgtctacccctactacacagccacctgttgccgctcttgcgcacatgtcctggagcggtctccccaggatccctcctgaaaggggtccggggcaccttcacggttttctgtgccaccatcggtcacccattgatcggcccactctgaaccccctggctctccagcctgtcccagtctcagcagggatgtcctccaggtgacagagggtggcaaggtgactgacacaaagtgactttcagggctgtggtcaggcccatgtggtggtgtgatgggtgtgtgcacatatgcctcaggtgtgcttttgggactgcatggatatgtgtgtgctcaaacgtgtatcacttttcaaaaagaggttacacagactgagaaggacaagacctgtttccttgagactttcctaggtggaaaggaaagcaagtctgcagttccttgctaatctgagctacttagagtgtggtctccccaccaactccagttttgtgccctaagcctcatttctcatgttcagacctcacatcttctaagccgccctgtgtctctgaccccttctcatttgcctagtatctctgcccctgcctccctaattagctagggctggggtcagccactgccaatcctgccttactcaggaaggcaggaggaaagagactgcctctccagagcaaggcccagctgggcagagggtgaaaaagagaaatgtgagcatccgctcccccaccaccccgcccagcccctagccccactccctgcctcctgaaatggttcccacccagaactaatttattttttattaaagatggtcatgacaaatgagaaa

SEQ ID NO: 400985 - DNA, 1000 bp, Homo Sapiens; identical to SEQ ID NO: 222970

SEQ ID NO: 400986 - DNA, 1000 bp, Homo Sapiens; identical to SEQ ID NO: 222971

SEQ ID NO: 400987 - DNA, 1000 bp, Homo Sapiens; identical to SEQ ID NO: 222972

SEQ ID NO: 400988 - DNA, 1000 bp, Homo Sapiens; identical to SEQ ID NO: 117684

SEQ ID NO: 400989 - DNA, 1000 bp, Homo Sapiens
aatgcagctgcaccagctcagccatctacaggacctaaaacaggcaccacccagcccaatggacagattccccaggctacacattctgtcagtgctgttctccaagaggcccagagacatgctgaaacatcgaaggataagaagccagccctcgggaaccaccacgacccggcagtgccccgggccccgcacgcccccaagtccagcctgcccccgccccctccggtgcggaggtcctccgacaccagcggcagtcccgccacgcccctcaaggccaagggcacaggcggcgggggcttgcccgccccacccgacgacttcctgccgccgccgccaccgccgccgcccctcgatgaccctgagctcccgccgccgcccccggacttcatggagccgcccccagacttcgtgcccccgcccccgccgtcgtacgcagggatcgcgggctcagagctgcccccgccgccgccgccgccgcccgcgcccgcgcccgcccccgtccccgactccgccaggccgccccccgcggtggccaagaggcctcctgtgccccccaagaggcaagagaacccagggcaccccggcggagcaggaggcggggagcaagatttcatgtcagacctcatgaaagctttgcaaaagaagagaggcaacgtgtcctagggacgggcatgatgagtgttccagagggagaagcatcgctgaccccgagcgcaggttttgctagcagattgccctgacatcttgttcatttcagataaaatgtgatgggaaacttctcactgatgtgctcaagtacaggcataaccattaacccagtagagttcagaatatctgcccaaatgtacatatcgttcccatgtattttaacctaaatggaatgtatcttcccttccaagctgcctaaagcgctgttttaggttcatttattttattatgttcagaagcatcaaataaaagttaaacgtttttccggaaaaaaaaaaaaaaaaaaaaaaaa

SEQ ID NO: 400990 - DNA, 1000 bp, Homo Sapiens; identical to SEQ ID NO: 222973

SEQ ID NO: 400991 - DNA, 1000 bp, Homo Sapiens; identical to SEQ ID NO: 222974

SEQ ID NO: 400992 - DNA, 1000 bp, Homo Sapiens; identical to SEQ ID NO: 289878

SEQ ID NO: 400993 - DNA, 1000 bp, Homo Sapiens; identical to SEQ ID NO: 289879

SEQ ID NO: 400994 - DNA, 1000 bp, Homo Sapiens; identical to SEQ ID NO: 289880

SEQ ID NO: 400995 - DNA, 1000 bp, Homo Sapiens
ggcgcgatctgtgtcgggcattaccagaagagtcttcatgtggacagtctcagggacaccatgtagagaattttggtctcgattcagaaaagagaaagagccagtggttgttgagacagtagaagagaaaaaggaacctatcctagtgtgtccacctttacgaagccgagcatacacaccacctgaagatctccagagtcgtttggaatcttacgttaaagaagtttttggttcatctcttcctagtaattggcaagacatctccctggaagatagtcgtctaaagttcaatcttctggctcatttagctgatgacttgggtcatgtagtccctaactccagactccaccagatgtgcagggttagagatgttcttgatttctataatgtccctattcaagatagatctaaatttgatgaactcagtgccagtaatctgccccccaatttgaaaatcacttggagttactaagcaattcggaagagaaacacattgaaatcactgtctttccctgagcaagggggctgctcattagatcttttgatactttaccatgtgaaatactaccagaactgttctctaaacccactttttctgtagaggaatgtatcatctttttttttctcatattacaaatggacaaataacggactttctattttcatatttgctgaaaccattttttaaatgaaattaggtcattatttatgaaaagttttgagagggcactgtcaacttgggtttaagacaggaggacattgcaagttcacacctttcataagcataaagtagttgcaagaaagtattttcatcctgttaggattcatatctaagatagagttatgcattgcacatacacaaataaacttttattagatagatacctataaaagaaacataaaagtatgttgtgtattactgacagttctagattaatttcttttagaattaaagtagatttgttaaagtgaaaaaaaaaaaaaaaaaaaaaaaaaaaaa

SEQ ID NO: 400996 - DNA, 1000 bp, Homo Sapiens; identical to SEQ ID NO: 117685

SEQ ID NO: 400997 - DNA, 953 bp, Homo Sapiens; identical to SEQ ID NO: 117686

SEQ ID NO: 400998 - DNA, 1000 bp, Homo Sapiens; identical to SEQ ID NO: 289883

SEQ ID NO: 400999 - DNA, 699 bp, Homo Sapiens
gcccattccagttggagaacgtagtgagtctttcagtggagccagggtctggtttgtcgtgaggagctccgcgatgtcctctcaacagagcgccgtttccgccaaaggcttttccaaggggtcgtcccagggccccgctccgtgtcccgccccggcgcccaccccggcgcccgcctcctcctcctcctgctgtggctccggcaggggctgctgcggcgactcaggctgctgcggctccagctccaccagttgctgctgcttcccaaggagacgccgtcgacagcggagtagtggttgctgctgctgcgggggcggcagccagaggtcccagcgctccaacaaccggagctcaggatgctgctccggctgctgagaggcccgcaacccccagcgctgcgctagagaaacccgcccagcccagagcgggcccgccccgctgcggctcccacgcggggctgggcctcggagtttgccccgtaaagcgaattgcactttgatgttcagaaacccactttgttctcagccacgcaaaactccctgaccccgatgtgatttttctccccggggattcgagagccatgcgtgggacactggaccctactgtctacacgggcttgcacacagcaggtgctcagcaaatgcctattgatttgattgtcttttgaagatgtcataataaagcttctacctcctgaaaaa

SEQ ID NO: 401000 - DNA, 1000 bp, Homo Sapiens; identical to SEQ ID NO: 117687

SEQ ID NO: 401001 - DNA, 1000 bp, Homo Sapiens; identical to SEQ ID NO: 222977

SEQ ID NO: 401002 - DNA, 1000 bp, Homo Sapiens; identical to SEQ ID NO: 117688

SEQ ID NO: 401003 - DNA, 1000 bp, Homo Sapiens
gtcagcagagcaccctctaccgtccccccagcagcctggccccaggctcccgggctcccatagcaggattttcatcatttgtttgacatcagaagaggaaaaagcagaaagagaaatggcaccaaactcctccttcacccctcctctcactgcctgccagaaaacaaaaacaccaagaaaccaagtcaacttttcacctcctgagtttatttttccagagattccagggccagcaaagccggcgttcagaaggagggagaaaaccgtgagaggatgtgtgtggccagcagctcttcagctttgagatggtggggttcactgctcccttgggaattacacggagctggggaagtggctgtgtcactgctatggacacggagtggggcgggcatctggagagagagagggagcggaggctaaggactggaggccgccaggcaggcgtggccgagggaagaaaaagcttctggatgtccagccagctgcccccttccagcccctccaggacccctggacccactgccgctgctctctgcaaaaagaatgggcatcccggaggccacgcctatcttctctctctgctcctccttccctccatgcaccatcactgtggctggcaggcatcggacagcctcatccagaccccctgccctgtcttggcaacctctactgcccatctcccctgctcaacttctccaccaagcatttggtttatttagaaaaaggaagaaaaacaaaaaacaaaaaactaaagggtgagaatttgcttagcgccttccttgttcctgcatattttttaaaatattgaatccaaggaagagagcccaagggtaggggagaaaccccccacaactgacccctgcctccctgtgctggaattgactttcctgagcatggacaaggaaaggtgaagtctggggagcagaggtgtaaataaggcgactggccttggcactgtgggatgattaggtttaacgcattgtgggcaagataagaatga

SEQ ID NO: 401004 - DNA, 1000 bp, Homo Sapiens
acagcgcggcacagacctggtgtggaagccccactcccgcctctgcccccaaccacaagctcatggctatggaacaaggcaagacccttccatctgccacggaggatgcaaaggaagagggtctggaagcccagatcagccgcttggcagagctgattgggaggctggagagcaaagcactgtggttcgacctgcagcagcgcctgtcagatgaagatggcaccaacatgcacctgcagctggtccggcaggagatggccgtgtgccccgagcaactgagcgagtttctggactctctgcgccagtatctgcgggggaccactggcgtgaggaactgcttccacatcactgccgtgaggctctcagatggcttcacctttgtcatctatgagttctgggagacagaggaggcgtggaagaggcacctgcagagccccctgtgtaaggcgttccggcacgtcaaggtggacacactgagccagcctgaggccctctccaggatcttggtgccagctgcttggtgcacggtgggacgggactgacagcctcccagaggcccgtggaggagcccaccagccccttcttcttgtgaaggaaatcccgtttttttctagacagacactttggtgcagaagcttcttttcaatccatcctccacaagaaggtgtttccctgttgttaagtgaaggaggccgcccctgcccccacctgagaaggcagagcagtgtctgtgctgccaggtcctggtgaagcccaaggttgaagggggcggcttcctggagccagcacccctgcctcctggtcctggcctctcccctacccctcacatggccacgcatgacccacactgaccacaccctgccctcttcggtgacattcttctacctagtaggagtcatgcccctgtagtgcccaacctagccaggtagccaccactgtgcccaggcgccaaataaaccctggttgggaaaaaaaaaaaaaaaaaaaaaaaaaaaaaaaa

SEQ ID NO: 401005 - DNA, 1000 bp, Homo Sapiens; identical to SEQ ID NO: 289887

SEQ ID NO: 401006 - DNA, 1000 bp, Homo Sapiens; identical to SEQ ID NO: 222979

SEQ ID NO: 401007 - DNA, 1000 bp, Homo Sapiens; identical to SEQ ID NO: 117689

SEQ ID NO: 401008 - DNA, 1000 bp, Homo Sapiens
gttctggtgaacagagaatcttaagagctgttagaaagtagcacttgatgcaagggatgttttgaaaagaaaaaattggtaatgcgaatgtatagaaagtaaaggtaggatgctcaggttttctgcatagttcttaactaatcttgtctgcagtttggtattgataatattagcatggccacttatgctaaatacacaataagatacatttagaaatccttaatgtactggttaggtcagtggtacaactgtttgacttaattatcacaatttccccaatggtaaccttaccttggaaactatcaaatataaatatactttaactaagccagtgacctggtcctaagttaaggattttctaaatggtatttaattctgtgcccataaacactgattttttttaaaaagaaaacttagtaattatttgatggataacaaaaagcatctatcactaacattgcttgttcatgtaatcttctgtgataatttggcttggcatgccagtcttataattaacataatttaaatttgatgcaatttaaatataacaggagacttaaaatattttattataaattagatgccatattagttagtggagaaaaggggcattaggtattaattgcatgggtctaactacattgatgatgagagtttaattccaactagagtatattttttgtttattaataatgaaattggtgctgacatgtaatgacttcacaagttttacgagggaaaactgaaaaaggaagtaatataaattttgtggggtttttttgagatggagtcttgctcttttgccaggctagagtggtgttgcagtgtcagctcactgcaacctccacctcctggattcgagtgattctcgagccttaagctcccaggtagctgggattacgggcgcccaccaccatgcccagctaatttttttttttttttttcttgagatggagtctctctgcactccagcctgggtgacagagcaagactccatttc

SEQ ID NO: 401009 - DNA, 1000 bp, Homo Sapiens; identical to SEQ ID NO: 222980

SEQ ID NO: 401010 - DNA, 1000 bp, Homo Sapiens; identical to SEQ ID NO: 117690

SEQ ID NO: 401011 - DNA, 1000 bp, Homo Sapiens; identical to SEQ ID NO: 283779

SEQ ID NO: 401012 - DNA, 1000 bp, Homo Sapiens; identical to SEQ ID NO: 289890

SEQ ID NO: 401013 - DNA, 1000 bp, Homo Sapiens; identical to SEQ ID NO: 117692

SEQ ID NO: 401014 - DNA, 1000 bp, Homo Sapiens; identical to SEQ ID NO: 117693

SEQ ID NO: 401015 - DNA, 1000 bp, Homo Sapiens; identical to SEQ ID NO: 222982

SEQ ID NO: 401016 - DNA, 1000 bp, Homo Sapiens; identical to SEQ ID NO: 222983

SEQ ID NO: 401017 - DNA, 1000 bp, Homo Sapiens; identical to SEQ ID NO: 289895

SEQ ID NO: 401018 - DNA, 1000 bp, Homo Sapiens
ccgccttagtaagcgccgggccaaggctggggttcagtcaggcaccaacgccctgcttgtggtcaaacatcgggacatgaatgagaaggaactggaagctcaggaggcacggaaggcccagctagaaaaccacgaaccggaggaggaagaggaagaggagatggagacagaagagaaagaagctgggggctcagatgaggagcaggagaagggcagcagcagtgagaaggagggcagtgaagatgagcactcgggcagcgagagtgaacgggaggaaggtgacagggacgaggccagtgacaagagtggcagtggtgaggacgagagcagcgaggatgaggcccgggctgcccgtgacaaagaggagatctttggcagtgatgctgattctgaggacgatgccgactctgatgatgaggacagaggacaggcccaaggtggcagtgacaatgattcagacagcggcagcaatgggggtggccagcggagccggagccacagccgcagcgccagtcccttccccagtggcagcgagcactcggcccaggaggatggcagtgaagctgcagcttctgattccagtgaagctgatagtgacagtgactgagtcccagggcattcagggctggttcagacaccattattgtgagcagcaaagcacttttctagtggtctgtttgtgagcctttcacttgtttgttccccacccccaaacctttgctgttaataaagtcaacttctctttacttcccctcccagcccctatgatgtcattcagcccagcacatacctcccgcaacccccaggtgctcaaggatcttggcttgaggcttagaaacacaggccagaggcagggccaatggtttcccacaaaatgtagcacaacgaaggtcagaattcgttttttttgtttgttttttttttttccaaaataagcccagaccattaaacaagtgaaactccaacaaaaaaaaaaaaaaaaaaaaaaaaaaaaaaaaaa

SEQ ID NO: 401019 - DNA, 1000 bp, Homo Sapiens; identical to SEQ ID NO: 222984

SEQ ID NO: 401020 - DNA, 1000 bp, Homo Sapiens; identical to SEQ ID NO: 117694

SEQ ID NO: 401021 - DNA, 1000 bp, Homo Sapiens; identical to SEQ ID NO: 222985

SEQ ID NO: 401022 - DNA, 1000 bp, Homo Sapiens
aggcagactctacacatgtcagattgacatatccccacaatttccggaacctacatgtatagctgtttacaaaatctccaagttaattaagggcactttagaagttgtcctcatgaattagctagcattagcataattaccgacgttgcatgctgtgaggaggctacaaaggccaggctggtgtcggaagtaataatacatatagaaattccattctaataaatgccattagtgtataacatcaagttctgtgtaatgaggctatttccaagtcccccaaagatggtcactgttacagcactttgctgagagggttttaacaaatcatattagccaaaaagcctacaacatagatgcatttagcaaaccatgtacaaatcaatcactataataaactgcatcatttgatagagtcaccgtttttgcatgtagtgttagagtatcacaaaatataacaagttttactaaaggatggttggttttttcaggatttaagggaatatggacaaattgttaaatagtatttatttgataaatgggagtttgtatgcagaaagagtgaattgcgtataaaaagggtgatttaaaaacccagaaacaaaaggtagaatagggctgaagcatctgataataggaaaagaaaaggacaaaagtcctcaacttgtgagcaatatgctttccctttacaccctgtaatttattcaaatgatattaaaatacaagaccattgcaatttatgcttttcgcctggcagttattttcccccccaagctatcctgtttcagataatatcaatttatttccaatccatcagactaaaatctaagaaaattcaagaactcttttattgttgatttggtgccaccaaattctttttctttttaaatctttctaattatcctttctttttcaatcccattgctaacacccagaacatattttctgttcaatgcaaataaacattcactttttacctaaaaaaaacaaaaaaaaaaaaaaa

SEQ ID NO: 401023 - DNA, 1000 bp, Homo Sapiens
cctctttgacctcagccgccgctttgacctgcgttttgttgttatccatgaccggtatgaccaccagcagttcaagaagcgttctgtggaagacctgaaggagcggtactaccacatctgtgctaagcttgccaacgtgcgggctgtgccaggcacagaccttaagataccagtatttgatgctgggcacgaacgacggcggaaggaacagcttgagcgtctctacaaccggaccccagagcaggtggcagaggaggagtacctgctacaggagctgcgcaagattgaggcccggaagaaggagcgggagaaacgcagccaggacctgcagaagctgatcacagcggcagacaccactgcagagcagcggcgcacggaacgcaaggcccccaaaaagaagctaccccagaaaaaggaggctgagaagccggctgttcctgagactgcaggcatcaagtttccagacttcaagtctgcaggtgtcacgctgcggagccaacggatgaagctgccaagctctgtgggacagaagaagatcaaggccctggaacagatgctgctggagcttggtgtggagctgagcccgacacctacggaggagctggtgcacatgttcaatgagctgcgaagcgacctggtgctgctctacgagctcaagcaggcctgtgccaactgcgagtatgagctgcagatgctgcggcaccgtcatgaggcactggcccgggctggtgtgctagggggccctgccacaccagcatcaggcccaggcccggcctctgctgagccggcagtgactgaacccggacttggtcctgaccccaaggacaccatcattgatgtggtgggcgcacccctcacgcccaattcgagaaagcgacgggagtcggcctccagctcatcttccgtgaagaaagccaagaagccgtgagaggccccacggggtgtgggcgacgctgttacgtaaatagagctgctgagttggaaaaaaaaaaaaaaaaaa

SEQ ID NO: 401024 - DNA, 929 bp, Homo Sapiens; identical to SEQ ID NO: 117698

SEQ ID NO: 401025 - DNA, 1000 bp, Homo Sapiens; identical to SEQ ID NO: 222987

SEQ ID NO: 401026 - DNA, 1000 bp, Homo Sapiens; identical to SEQ ID NO: 117699

SEQ ID NO: 401027 - DNA, 1000 bp, Homo Sapiens; identical to SEQ ID NO: 222988

SEQ ID NO: 401028 - DNA, 1000 bp, Homo Sapiens
aagaaggagacggtctggcggcttgaagaatttggacgatttgccagctttgaggctcaaggtgcattggccaacatagctgtggacaaagccaacctggaaatcatgacaaagcgctccaactatactccgatcaccaatgtacctccagaggtaactgtgctcacgaacagccctgtggaactgagagagcccaacgtcctcatctgtttcatagacaagttcaccccaccagtggtcaatgtcacgtggcttcgaaatggaaaacctgtcaccacaggagtgtcagagacagtcttcctgcccagggaagaccaccttttccgcaagttccactatctccccttcctgccctcaactgaggacgtttacgactgcagggtggagcactggggcttggatgagcctcttctcaagcactgggagtttgatgctccaagccctctcccagagactacagagaacgtggtgtgtgccctgggcctgactgtgggtctggtgggcatcattattgggaccatcttcatcatcaagggattgcgcaaaagcaatgcagcagaacgcagggggcctctgtaaggcacatggaggtgatggtgtttcttagagagaagatcactgaagaaacttctgctttaatggctttacaaagctggcaatattacaatccttgacctcagtgaaagcagtcatcttcagcattttccagccctatagccaccccaagtgtggatatgcctcttcgattgctccgtactctaacatctagctggcttccctgtctattgccttttcctgtatctattttcctctatttcctatcattttattatcaccatgcaatgcctctggaataaaacatacaggagtctgtctctgctatggaatgccccatggggcatctcttgtgtacttattgtttaaggtttcctcaaactgtgatttttctgaacacaataaactattttgatgatcttgggtggaaaaaaaaaaaaaaaaa

SEQ ID NO: 401029 - DNA, 1000 bp, Homo Sapiens; identical to SEQ ID NO: 289904

SEQ ID NO: 401030 - DNA, 1000 bp, Homo Sapiens; identical to SEQ ID NO: 117701

SEQ ID NO: 401031 - DNA, 1000 bp, Homo Sapiens; identical to SEQ ID NO: 289905

SEQ ID NO: 401032 - DNA, 1000 bp, Homo Sapiens; identical to SEQ ID NO: 289906

SEQ ID NO: 401033 - DNA, 1000 bp, Homo Sapiens; identical to SEQ ID NO: 289907

SEQ ID NO: 401034 - DNA, 1000 bp, Homo Sapiens
gcacatcggcagcgtcagcgccacagacagagactcgggcaccaacgcccaggtcacctactcgctgctgccgccccaggatccgcacctgcccctcgcctccctggtctccatcaacacagacaacggccacctgttcgccctcaggtcgctggactacgaggccctgcaggcgttcgagttccgggtgggcgcttcagaccgcggctccccggctttgagcagcgaggcgctggtgcgcgtgctggtgctggacgccaacgacaactcgcccttcgtgctgtacccgctgcagaatggctccgcgccctgcaccgagctggtgccccgggcggccgagccgggctacctggtgaccaaggtggtggcggtggacggcgactcgggccagaacgcctggctgtcgtaccagctgctcaaggccacggagcccgggctgttcggtgtgtgggcgcacaatggcgaggtgcgcaccgccaggctgctgagcgagcgcgacgcggccaagcagaggctggtggtgctggtcaaggacaatggcgagcctccgtgctcggccaccgccacgctgcacttgctcctggtggacggcttctcccagccctacctgccgcttccggaggctgccccagcccagggccaggccgactctctcaccgtctacctggtggtggcgttggcctcggtgtcttcgctcttcctcttctcggtgctcctgttcgtggcggtgctgctgtgtaggaggagcagggcggcctcggtgggtcgctgctcagtgcctgagggcccctttccagggcatctggtggacgtgaggggcaccgggagcctgtctcagaactatcagtacgaggtgtgcctggcaggaggctcagggacgaatgagttccagttcctgaaaccagtattacctaatattcagggccattcttttgggccagaaatggaacaaaactctaactttaggaatggctttggtttcagccttcagttaaagtaa

SEQ ID NO: 401035 - DNA, 507 bp, Homo Sapiens
ggtgcttctgagatgtgggcttgcacacgctgttgctatagtacgtgtgatcctgactgctgtcatggcgtgccctctggagaaggccctggatgtgatggtgtccaccttccacaagtactcgggcaaagagggtgacaagttcaagctcaacaagtcagaactaaaggagctgctgacccgggagctgcccagcttcttggggaaaaggacagatgaagctgctttccagaagctgatgagcaacttggacagcaacagggacaacgaggtggacttccaagagtactgtgtcttcctgtcctgcatcgccatgatgtgtaacgaattctttgaaggcttcccagataagcagcccaggaagaaatgaaaactcctctgatgtggttggggggtctgccagctggggccctccctgtcgccagtgggcacttttttttttccaccctggctccttcagacacgtgcttgatgctgagcaagttcaataaagattcttggaagttt

SEQ ID NO: 401036 - DNA, 1000 bp, Homo Sapiens; identical to SEQ ID NO: 117702

SEQ ID NO: 401037 - DNA, 1000 bp, Homo Sapiens; identical to SEQ ID NO: 222990

SEQ ID NO: 401038 - DNA, 1000 bp, Homo Sapiens; identical to SEQ ID NO: 289911

SEQ ID NO: 401039 - DNA, 1000 bp, Homo Sapiens; identical to SEQ ID NO: 117704

SEQ ID NO: 401040 - DNA, 1000 bp, Homo Sapiens; identical to SEQ ID NO: 289913

SEQ ID NO: 401041 - DNA, 1000 bp, Homo Sapiens; identical to SEQ ID NO: 289914

SEQ ID NO: 401042 - DNA, 1000 bp, Homo Sapiens; identical to SEQ ID NO: 117705

SEQ ID NO: 401043 - DNA, 1000 bp, Homo Sapiens; identical to SEQ ID NO: 222992

SEQ ID NO: 401044 - DNA, 1000 bp, Homo Sapiens; identical to SEQ ID NO: 289917

SEQ ID NO: 401045 - DNA, 1000 bp, Homo Sapiens; identical to SEQ ID NO: 289918

SEQ ID NO: 401046 - DNA, 1000 bp, Homo Sapiens; identical to SEQ ID NO: 117706

SEQ ID NO: 401047 - DNA, 1000 bp, Homo Sapiens; identical to SEQ ID NO: 117707

SEQ ID NO: 401048 - DNA, 1000 bp, Homo Sapiens; identical to SEQ ID NO: 117708

SEQ ID NO: 401049 - DNA, 1000 bp, Homo Sapiens; identical to SEQ ID NO: 289921

SEQ ID NO: 401050 - DNA, 1000 bp, Homo Sapiens; identical to SEQ ID NO: 222995

SEQ ID NO: 401051 - DNA, 1000 bp, Homo Sapiens; identical to SEQ ID NO: 117709

SEQ ID NO: 401052 - DNA, 1000 bp, Homo Sapiens; identical to SEQ ID NO: 289923

SEQ ID NO: 401053 - DNA, 1000 bp, Homo Sapiens
gccagggcaagaagttctactttgtgcgcaccaaggtggacgaggacctggcggccacgcgcacccagcggccgtcgggcttcagagaggccgctgtcctgcaggagatccgagaccactgtgccgagcggctgcgggaggccggcgtggctgaccctcgcatcttcctggtgtccaacctctcgccggcccgctacgactttcccacgctggtgtccacctgggagcacgacctgccctcccaccggcgccacgctggcctgctgtcgctccccgacatctcgctggaggccttgcagaagaagaaggccatgcttcaagagcaagtcctcaagaccgccctggtgttgggcgtcatccaggccctgccggtcccagggctggcggccgcctacgatgatgcgttgctcatccactcactgcgtggctaccaccgcagctttggtctggacgacgactcgctggccaagctggccgagcaggtgggcaaacaggcaggtgacctgcgctcggtcatccgctccccactggccaacgaggtctcgcctgagactgtcctgcggctctattcccagtcgtccgacggcgccatgcgggtggcccgcgcctttgagaggggcatccctgtgtttgggacgctggtggctggcggcatcagctttggcgctgtctacaccatgctccagggctgcctcaacgagatggctgaggacgcccagcgtgtccgcatcaaggccctggaggatgacgagccgcagccggaggtcagcttggaagtggccagtgacaatggcgtggaaaaggggggctccggggagggaggtggggaggaagccccactctcaacctgcaggaagctcggcctccttcttaagtacattctggacagctggaagaaacacgactcagaagagaaataaagagtgcagccccgcccccctgcctcacccacaaactaagtcttaacaaaatccaaattaccaacaaaaaaaaaaaaaaa

SEQ ID NO: 401054 - DNA, 1000 bp, Homo Sapiens; identical to SEQ ID NO: 117710

SEQ ID NO: 401055 - DNA, 1000 bp, Homo Sapiens; identical to SEQ ID NO: 289927

SEQ ID NO: 401056 - DNA, 758 bp, Homo Sapiens; identical to SEQ ID NO: 289928

SEQ ID NO: 401057 - DNA, 1000 bp, Homo Sapiens; identical to SEQ ID NO: 117711

SEQ ID NO: 401058 - DNA, 1000 bp, Homo Sapiens
cagatgctggggcttcagcccgccgcagacttcacagctggccacaacgagcctgtagccaacggcagtcacaaggcctgatggggggcccctgcttctcccggtggggcagaggacccggtgcctgcctggcagatgtgcccacggaggcccccagctgccctccgagcccaggcctgcagcactgaaagacgacctgccatgtcccatggatcaccgcttcctgcatcttgcccctggtccctgccccattcccagggcactccttacccctgctgccctgagccaacgccttcacggacctccctagcctcctaagcaaaggtagagctgcctttttaaacctaggtcttaccagggtttttactgtttggtttgaggcaccccagtcaactcctagatttcaaaaacctttttctaattgggagtaatggcgggcactttcaccaagatgttctagaaacttctgagccaggagtgaatggcccttccttagtagcctgggggatgtccagagactaggcctctcccctttacccctccagagaaggggcttccctgtcccggagggagacacggggaacgggattttccgtctctccctcttgccagctctgtgagtctggccagggcgggtagggagcgtggagggcatctgtctgccatcgcccgctgccaatctaagccagtctcactgtgaaccacacgaaacctcaactgggggagtgaggggctggccaggtctggaggggcctcaggggtgcccccagcccggcacccagcgctttcgcccctcgtccacccacccctggctggcagcctccctccccacacccgcccctgtgctctgctgtctggaggccacgtggatgttcatgagatgcattctcttctgtctttggtggatgggatggtggcaaagcccaggatctggctttgccagaggttgcaacatgttgagagaacccggtcaataaagtgtactacctcttacccctaa

SEQ ID NO: 401059 - DNA, 1000 bp, Homo Sapiens; identical to SEQ ID NO: 289930

SEQ ID NO: 401060 - DNA, 1000 bp, Homo Sapiens
tacagatcccacctcctctcccagccatcaagcatctgcccaggccagaaactctgcaccctaaccctgcaggcttacaggaaagcatttctgacgtcaccacctgccttgttgcctccaaggaaaatgttcaggttgcacagtcaaatctcaccaaggaccgttctatgaggaaaagctttgacatgggaggagaaactctgttgtctgtctgtcccatggtgccgaaggacttgggcaaatctttgtctgtgcaaaacctgatcaggtcgaccgaggaactgaatatacaactttcagggagtgagtcaagtggctccagaggcagccaagatttttaccccaaatggagggaatccaaattgtttataactgatgaagaggtgggtcccgaagagacagagacagacacttttgatgccgcaccgcagcctgccagggaagctgcctttgcatcagactctctaaggactggaaggtcacgatcatctcagagcatttgtaaggcaggagaaagtacagatgccctcagcttgcctcatgtcaaactgaaataagttcttcattttctttccaggcatagcagttctttagccatacatatcattgcatgaactatttcgaaagcccttctaaaaagttgaaattgcaagaatcgggaagaacatgaaaggcagtttataagcccgttaccttttaattgcatgaaaatgcatgtttagggatggctaaaattccaaggtgcatcgacattaacccactcatttagtaatgtaccttgagttaaaaagcctgagaaaccaaacacagctaatgctatggggtgtatgaatatgtcaagtttaggtcatttagaagatttgacactgtattttgaaattatgggagtaaacaccttcaaatttcaggcatttctgctttgtgactaaatacaaactacattttcaagattaggccataatgtatatttaaacacaatggctatcaacagctgctaata

SEQ ID NO: 401061 - DNA, 1000 bp, Homo Sapiens; identical to SEQ ID NO: 289931

SEQ ID NO: 401062 - DNA, 1000 bp, Homo Sapiens; identical to SEQ ID NO: 289932

SEQ ID NO: 401063 - DNA, 1000 bp, Homo Sapiens; identical to SEQ ID NO: 289933

SEQ ID NO: 401064 - DNA, 1000 bp, Homo Sapiens; identical to SEQ ID NO: 222998

SEQ ID NO: 401065 - DNA, 1000 bp, Homo Sapiens
ccactggtgaccttcgtgtacacgttcaccaacattgcctacttcacggccatgtccccccaggagctgctctcctccaatgcggtggctgtgaccttcggggagaagctgctgggctacttttcttgggtcatgcctgtctccgtggctctgtcaaccttcggagggatcaatggttacctgttcacctactccaggctgtgcttctctggagcccgcgaggggcacctgcccagcctgctggccatgatccacgtcagacactgcacccccatccccgccctcctcgtctgttgcggggccacagccgtcatcatgctcgtgggcgacacgtacacgctcatcaactatgtgtccttcatcaactacctctgctacggcgtcaccatcctgggcctgctgctgctgcgctggaggcggcctgcactccacaggcccatcaaggtgaaccttctcatccccgtggcgtacttggtcttctgggccttcctgctggtcttcagcttcatctcagagcctatggtctgtggggtcggcgtcatcatcatccttacgggggtgcccattttctttctgggagtgttctggagaagcaaaccaaagtgtgtgcacagactcacagagtccatgacacactggggccaggagctgtgtttcgtggtctacccccaggacgcccccgaagaggaggagaatggcccctgcccaccctccctgctgcctgccacagacaagccctcgaagccacaatgagatttttgtagagactgaagcagttgtttctgtttacatgttgtttattgaggaggtgttttggcaaaaaagttttgttttgtttttttctggaaaaaaaagaaaaaagatacgactctcagaagcctgttttaaggaagccctaaaatgtggactgggtttcctgtcttagcactgccctgctagctcttcctgaaaaggcctataaataaacagggctggctgttaaaaaaaaaaaaaaaaaaaa

SEQ ID NO: 401066 - DNA, 1000 bp, Homo Sapiens; identical to SEQ ID NO: 222999

SEQ ID NO: 401067 - DNA, 1000 bp, Homo Sapiens; identical to SEQ ID NO: 289936

SEQ ID NO: 401068 - DNA, 1000 bp, Homo Sapiens; identical to SEQ ID NO: 117712

SEQ ID NO: 401069 - DNA, 1000 bp, Homo Sapiens
gagcgctaccgcgccgacgtgcgcacagtgtgggagcaatgcgtggccatcatgtctgaggaggatggagatgacgatgggggctgtgacgactatgcagagggccgagtttgcaaagttcgctttgatgctaacggagccacaggaccagggagccgggaccccgcccaggtgaagctgctgcctggaaggcacatgctcttccctcctcttgagagagtccactacttacaggtccccctatcccggcgtctgtcccatgatgagacaaacatcttctctacccctcgggaaccaggctccttcctgcacaagtggtcatcctctgatgacatccgggtcctcccagcccagagccgggccctcgggggtcctcctgagtacctgggacaaagacacaggttggaggacgaggaggacgaggaagaggctgaaggtggggggctggccagccttcgccaattcttggagagtggggttctggggtcaggtgggggacccccacggggtcctggcttcttccgggaggagatcaccaccttcatcgatgagacacctctgccttctccgactgcctcaccagggcactctcctcgtcggccccggccactgggcctctcaccccgccgactctcccttgggtcccctgagagcagagccgttggacttcctttgggactaagcgcagggagacgctgctccctgacggggggtgaagaaagtgcaagggcttggggaggatcctggggcccaggcaaccccatctttccccagctgaccctgtgagcccaagcaggcctgctgaactcagaggagaaagcctgagtgagtaacacctcattctggccgagagtagggcagctgcctccagactctggggagacgggcgctagatttggggctcagaaggccctgctctctcccatccaagtgaccagatgccctactcagcttccatcacccctagcaatatgtattaaagtctgaagtgttgccatgg

SEQ ID NO: 401070 - DNA, 1000 bp, Homo Sapiens; identical to SEQ ID NO: 223001

SEQ ID NO: 401071 - DNA, 1000 bp, Homo Sapiens; identical to SEQ ID NO: 223002

SEQ ID NO: 401072 - DNA, 1000 bp, Homo Sapiens; identical to SEQ ID NO: 223003

SEQ ID NO: 401073 - DNA, 1000 bp, Homo Sapiens; identical to SEQ ID NO: 289942

SEQ ID NO: 401074 - DNA, 1000 bp, Homo Sapiens; identical to SEQ ID NO: 223004

SEQ ID NO: 401075 - DNA, 1000 bp, Homo Sapiens; identical to SEQ ID NO: 223005

SEQ ID NO: 401076 - DNA, 1000 bp, Homo Sapiens; identical to SEQ ID NO: 223006

SEQ ID NO: 401077 - DNA, 1000 bp, Homo Sapiens; identical to SEQ ID NO: 289945

SEQ ID NO: 401078 - DNA, 710 bp, Homo Sapiens
cggcggccgcgcgcagcacgctcaaggccgggatggcggcggcggcggcggcaggaagcgggacgccccgagaggaggagggacctgctggggaggcagcggcctcgcagccccaggccccaacgagtgtgcctggggctcgtctctcgaggttgcctctggcgcgagtgaaggccttggtgaaggcagatcccgacgtgacgctagcgggacaggaagccatcttcattctggcacgagccgcggaactgtttgtggagaccattgcaaaagatgcctactgttgcgctcagcagggaaaaaggaaaacccttcagaggagagacttggataatgcaatagaagctgtggatgaatttgcttttctggaaggtactttagattgattgccgagcggggcagttttgtgagccttcatctgaagccttcagttcacccctctgcacaggcctcagctttgaagaacggagtctttgcacttacacacactcttcctgttctgccttcacctatgccgggataagcagagatctcatcaattagctcttctctgcaaggtcttccactatttctgtctgtcttccatatcaagcctggatgcagctgctgctgcttagagcagagatgaagaaagtgttctgcataagtggcttcctgaatgatgaggaccagaataaaggtttttgatcaacctcaaaaaagaaaaaaaa

SEQ ID NO: 401079 - DNA, 1000 bp, Homo Sapiens; identical to SEQ ID NO: 289946

SEQ ID NO: 401080 - DNA, 1000 bp, Homo Sapiens; identical to SEQ ID NO: 117713

SEQ ID NO: 401081 - DNA, 1000 bp, Homo Sapiens; identical to SEQ ID NO: 117714

SEQ ID NO: 401082 - DNA, 1000 bp, Homo Sapiens; identical to SEQ ID NO: 284002

SEQ ID NO: 401083 - DNA, 1000 bp, Homo Sapiens
ccaggtctctggctacttcgtgctgggccaccctatgtgtgtcctggagggctacaccgtctccctgtgtgggatcacaggtctctggtctctggccatcatttcctgggagaggtggctggtggtgtgcaagccctttggcaatgtgagatttgatgccaagctggccatcgtgggcattgccttctcctggatctggtctgctgtgtggacagccccgcccatctttggttggagcaggtactggccccacggcctgaagacttcatgcggcccagacgtgttcagcggcagctcgtaccccggggtgcagtcttacatgattgtcctcatggtcacctgctgcatcatcccactcgctatcatcatgctctgctacctccaagtgtggctggccatccgagcggtggcaaagcagcagaaagagtctgaatccacccagaaggcagagaaggaagtgacgcgcatggtggtggtgatgatctttgcgtactgcgtctgctggggaccctacaccttcttcgcatgctttgctgctgccaaccctggttacgccttccaccctttgatggctgccctgccggcctactttgccaaaagtgccactatctacaaccccgttatctatgtctttatgaaccggcagtttcgaaactgcatcttgcagcttttcgggaagaaggttgacgatggctctgaactctccagcgcctccaaaacggaggtctcatctgtgtcctcggtatcgcctgcatgaggtctgcctcctacccatcccgcccaccggggctttggccacctctcctttccccctccttctccatccctgtaaaataaatgtaatttatctttgccaaaaccaacaaaaaaaaaaaaaaaaaaaaaaaaaaaaaaaaaaaaaaaaaaaaaaaaaaaaaaaaaaaaaaaaaaaaaaaaaaaaaaaaaaaaaaaaaaaaaaaaaaaaaaaaaaaaaaaaaaagaaaaaaaaaaaaaaaaaaaa

SEQ ID NO: 401084 - DNA, 1000 bp, Homo Sapiens; identical to SEQ ID NO: 117715

SEQ ID NO: 401085 - DNA, 1000 bp, Homo Sapiens
tcgggttggagctgctggcggaggcaggcaattactcagcgctccagcggatgttcccgtcgccttatttctacccgcagagtctggtttccaacctggaccccggcgcggcgctctacctgtaccgcggccccagcgcgccgccgcctgctctccagagacctctggtgccccgcatcctcatccacggactccagggcgccagcgagccgcccccgccgctgccccccctggccggcgtcctcccacgcgccgcgcagcctcggtgaggcgcccgtcggctccggggcctcctcccgcgggctcggcgtggccccttccgcccgcctttctgagggcgcaggttcgacgccctttcccgggagggggccctgcccggccctccctggcgccccagcccagtgccccccgaagggccaaatgccaagtccactgaggcccggaccccggactgcgtctccccagcccccctcggcgtcctctctcgcggccgctctgtccgggagccatccccacccgccgggtgtacatacgcgtctctgccactccccacccccagcctctgccggctcccctaggcaacccctttctccccaggagcgggtgcggctgattcccaggcttcgctctctcccacgccccttctacgctccaggtggagaacagcccctctccccgcgcccccgccagggagagaaggggagtgcggagccccgtctccctacccctcgagcacctgggccagcggctgagctgtacataccgtgtgcaaagtgtatatgaagttatttattcgtgacccatgagcccgtgaccgtgtccgtggattagtgagtctgtggcctgtgccctccccactcccaggcggggcaggaaggggccgagggggcttgcccacccaccccgaccccagcccccagcctcagccccggtccgggggcagccaggcctctcgggttctctcttttttaaatgtcgaaataaacttcttacaaatgac

SEQ ID NO: 401086 - DNA, 1000 bp, Homo Sapiens
aaattcagctgacctgagagtgggagggaaactaccgtcattctgctcatgtttcttcttgacctcttgcataatctttttgttttctagacagttcactaattgttgaattttactgtatattcatataaaaatgcaaacgtactagaccagtggagaatttgacaccttttctttttgtaaaagtttatggtattataccgatagaccaaaacagcatgtgtaagaggcagtatctgcactaattctcaacatgctaaacattaactacaattcactgttgtgagaatattcctcgtcacagcaaaaacactttcctttctactgacaaccagtcctccacatcacagcatttagacatatgggtaaaatgttatttctagtgaattgtttgtatcagtttcatgtctaagtataaattttctattttaaaatttaagaaccgtttataatcagtgctttcccaactcttgggttgctctccataactatgtatttgtgaaagaaaatggtcattttttttactgaagtcatataatgacttgggtcagctcgtaatgcattgtgatggttttgtatgagctgggtgtttttttccattacttttaatgatcttcgttgcaagttatagttgtggataaaggggagaatttattgctcttgcaaaccaattatggaaagcaacttaagaaaaccaatgttctaaatcataattgtttgtatttatgtaaagtatggtctcttactttttagtttgtagtttaagtgcaaagaaacagtagtggttttttttctattgttttgtagtcttcctgtccccttcagtccctccagtgtgtatattaccattctccaatgaaataatagggcatttaacaaagatcgctatgtgcaatactgtatttagtgtttctatttcaatttttctaggatgttaatttatatgaaaataaaatgaataataaaagaataaagatacttgcaaaagaaaaaaaaaaaa

SEQ ID NO: 401087 - DNA, 993 bp, Homo Sapiens
gccccaacacactaccctgcacacagaaaataatcattggtcttcactagtgaaataagcagtgggttgctaagggccaacttgcctgaacaggctacacaagaacctcagagcccaacccattgtgaagaaacatgggttacttctgaggttctagaattcccagaagctctgcttcagcactggaagcttttgctcgcagtttgcttcatagctctgtgaagaagctgtggcccacactggggtcccctcttttcctaaatccagatgaacaggtttctcttgctaatgagtctttatctgcttggatctgccagaggaacatcaagtcagcctaatgagctttctggctccatagatcatcaaacttcagttcagcaacttccaggtgagcaggcctcgggtgaacagccttcaggtgagcacgcttcaggggaacaggcttcaggtgcaccaatttcaagcacatctacaggcacaatattaaattgctacacatgtgcttatatgaatgatcaaggaaaatgtcttcgtggagagggaacctgcatcactcagaattcccagcagtgcatgttaaagaagatctttgaaggtggaaaactccaattcatggttcaagggtgtgagaacatgtgcccatctatgaacctcttctcccatggaacgaggatgcaaattatatgctgtcgaaatcaatctttctgcaataagatctagaagcctgggcccttgcttgttttgactcaggcagtaaaaagcctccatcactctatttggctcattttatatttagttccttccccagtcaacaactgaccacatctgcctctgcctgagcattaggatgctcaaacatcctatctttcttcttctattcatgcttttatccattcttctctgtcctgtcttccctgctccaactctttctctcaatattcctgatttttttttcaataaatttcacatggttaaagcaaaaaaaaaaaaaaa

SEQ ID NO: 401088 - DNA, 1000 bp, Homo Sapiens
tgtttcatcatcaggaactttcggttttaaaaaagaaacattacttttgtctgctaaagtaaacaatatatagggaaattaacacctaggaaaagaaaactggcaagagaattgatgaggtattagtggcttagaagaattagtaatataagttgggaataaaggggtagcccgacagtggtaagtaaaaatgtagtactccattgtttttgctatttaaatataatgtatcaaaaacctttattctaaaatttccacaaatgattccttttatccatcttcttgtaatcctaaaagcatcttctcactatgtgctgtagtttgaaacctaacgaatcctcctacttgagacactgtagaaaagtaaaaattgttgcttctgttttcttttaagaggaaatgagaaggccagcagaagtagattaaaactagagagctggtttattaaaataagcagataattatccaggcttaaagtaatagcttacatgttttgaaaatccttgtacttatttttgtttttattgttgcaaaaaaatgttaatgggctgttgaaatgacctccatttacttaaggtaatccaataaggtcttttttaaatatacaaattttactcaagtttaaattgtataaaactgcttagaaacctgaaattttatagtgtgtaatatcttatgtgtatatagcatcctgagctgtgtgatacagtagatttcttcttagcagaaacatgcgaggtagatttaataaacaacaaaaatcagcttatgtttctacttattgaatctgctttactttttagcaattttcttccttgtgaacatgaaccatataaagtgtctgtgacttaatgatttcatgtaagtctgtcgcatacatccttcttttgtagcttacaccatgtggatgctctgtctgtagacactgcttgataaaaggagaataaacctcttacattttaaaaaaaaaaaaaaaaaaaaaaaagaaaaaaaaaaaaaa

SEQ ID NO: 401089 - DNA, 1000 bp, Homo Sapiens; identical to SEQ ID NO: 289952

SEQ ID NO: 401090 - DNA, 1000 bp, Homo Sapiens; identical to SEQ ID NO: 289953

SEQ ID NO: 401091 - DNA, 1000 bp, Homo Sapiens; identical to SEQ ID NO: 223008

SEQ ID NO: 401092 - DNA, 1000 bp, Homo Sapiens; identical to SEQ ID NO: 117718

SEQ ID NO: 401093 - DNA, 1000 bp, Homo Sapiens; identical to SEQ ID NO: 117719

SEQ ID NO: 401094 - DNA, 1000 bp, Homo Sapiens; identical to SEQ ID NO: 117720

SEQ ID NO: 401095 - DNA, 1000 bp, Homo Sapiens; identical to SEQ ID NO: 220795

SEQ ID NO: 401096 - DNA, 1000 bp, Homo Sapiens
tttctgccttggcctcggcgggcttttctggggcccaggaagcccacactatgcacagagcccaatgcatagagccctggccagcccttcctctcactcctgcctccgctggctttgggaaagcccagactttagtgccctgccccctggctgactggccagttgcccagagcactttagcagatgtggtttcaaagtaaaggcctcctcccccaccccttaggccccgtggtgacatttcccaagtcagacagatgtcagcttcccagccatgcccaggacgtcctatctcccccaacccacctctggccctgtgtaggggcagggatgggggtggctgggactcctggtgcccctcgccagcttctcctgcgccccgcccacaccctcgggggggtcacaggcccagaagggtagctgggcggggctcgaggctggtgccaggcgcgtgtaaatggttttgttttgcacgtttggtttgcgcagtagtttggtttgacttgtttgtgcatcctgtgaaaaataacggtgcttgtgtcactagcatagaatagcgacaggaatagatgtggtccttaggagacgctgcacttgacaccaaccagacagcacagggcaggggtggtggagggggctgggctcacaggcctctcttttccccgcctgcagtcttctgggctgcgggaggccctggccctttccccttcccctcccctccttgtctagtttcccacattccaaaagggggcctgggatgctagccccagagatgccagcccttcaggaagcaggtgtcctttcccctctctgcccctgatcactcccagcactccccttgccttcccctgtcttcacctgccaccacacacacacacacacacacacacacacacacacgcatggcttcctataacttcttcctgctggacagagactcagcgctcctcctgtgtgactggcaagaggcctcatgcctgctgagagagggtcgacgcggccg

SEQ ID NO: 401097 - DNA, 1000 bp, Homo Sapiens; identical to SEQ ID NO: 117722

SEQ ID NO: 401098 - DNA, 1000 bp, Homo Sapiens; identical to SEQ ID NO: 289961

SEQ ID NO: 401099 - DNA, 1000 bp, Homo Sapiens; identical to SEQ ID NO: 289962

SEQ ID NO: 401100 - DNA, 1000 bp, Homo Sapiens
caggctgcacgacgatcccccacagaagccccctcggtccatcaccctcaggacaggagactggggagaaccttccattaccttgcgacctccgaatgaagccacagcctctaccccggtacagtactggcagcatcacccagaaaagcttatcttccagtcgtgtgattacaaagctttttatttaggttctatgctgataaaagagcttagggggacagaatcaacccaagatgcttgtgcaaaaatgcgggctaactgtcagaagtctacagagcaaatgaagaaggtccctactattattctttctgtctcatataaaggagtcaaatttattgatgcaacaaataagaacataattgctgagcatgaaattcgtaatatctcctgtgctgcccaggacccagaagacctctcaacatttgcctatatcacaaaagatttgaagtctaatcaccactactgtcatgtgtttactgcctttgatgtgaatttagcctatgaaatcatcctaaccctgggacaggcattcgaagtcgcttaccagctagcactacaagcaagaaaagggggacactcctccacacttccagaaagctttgaaaacaaaccctccaaacccatccccaagccccgcgttagcattcgcaagtccgtggatcttcttcatgccagccataccgggcaggaaccatcagagagacacactgaggaggcactcagaaaattttgatagaattgaatttacatatagctgataaagcctaaatagaaaggttgatgtatttagcttgaatccttcactttagtggtctaatcaacagataaatgacaagcaaagaatgaaacaatccaaaaatgtttttcaaaacaattttgtgaattttatttttacaaaaattttttaaattcatattttaaaatgtataccaaggcaaaaaaatcatataagctatatcataaatacaagagtttcaaaacatacaagagacatataatg

SEQ ID NO: 401101 - DNA, 1000 bp, Homo Sapiens; identical to SEQ ID NO: 117723

SEQ ID NO: 401102 - DNA, 1000 bp, Homo Sapiens; identical to SEQ ID NO: 223012

SEQ ID NO: 401103 - DNA, 1000 bp, Homo Sapiens; identical to SEQ ID NO: 117724

SEQ ID NO: 401104 - DNA, 1000 bp, Homo Sapiens; identical to SEQ ID NO: 223013

SEQ ID NO: 401105 - DNA, 1000 bp, Homo Sapiens; identical to SEQ ID NO: 117725

SEQ ID NO: 401106 - DNA, 1000 bp, Homo Sapiens; identical to SEQ ID NO: 289970

SEQ ID NO: 401107 - DNA, 1000 bp, Homo Sapiens; identical to SEQ ID NO: 223015

SEQ ID NO: 401108 - DNA, 1000 bp, Homo Sapiens; identical to SEQ ID NO: 223016

SEQ ID NO: 401109 - DNA, 1000 bp, Homo Sapiens; identical to SEQ ID NO: 117726

SEQ ID NO: 401110 - DNA, 1000 bp, Homo Sapiens; identical to SEQ ID NO: 223017

SEQ ID NO: 401111 - DNA, 1000 bp, Homo Sapiens
aaaagagcaaaagtggccaaaaaatgcatgtctgtaattttggactgacgttttaagaatttgttaccttacagaagagcaagggcttaggggttggaggtggcagataaaagaggattttcaactcaaatcttgtttcctgctggcctggtctgcccacgagctagagcggggaaatgttgagctcaaatgggtaaattgagaccagaaaattattttttcaacctagagaatctcctcttacagggggatgcatataacagatcatgtatgtgtagttatttctaagtagtaattcttcccagctctttgatttgccatatataaaataggtgggtcgtatgtcttccctttagacatgatgttttctactcatttgtctctctggccaattgaattattaataaaaggtctgtattatcaaagagtattctagtatttttgttacttttaatatttgatgccttttggaggtaaagctgttgggggaagaagagtttttggacccatagatgtttggatgatgtctctaatttgtcatttagaaaaatctcaaaaatgatttcagttgaataacttgccttctaaatgatcaatttacttctcccccaattttaaagaagtatgtgtatatttaataggggaaggtagtttatggaaatatttttaatggaatagttttcccttaatatgtatccttgctggatattattcaagctgcaagtcatcaaaagacccagaaaaaaaaaagtctgtaggttattttctctacttctatttcaactttgaatttcctcttcctgtgcaaattcctctagtcaagtgtgatatatcaagaaatctgaggaggatgcaggttttgtggtcctgatgggcccacaagtttttctatatttaactggaaatatgctttgattttgtgttattaatataattcttttgatgtagtcatgagtttttctttgtttgcatataattaaaatgcctctacttaatgtca

SEQ ID NO: 401112 - DNA, 1000 bp, Homo Sapiens; identical to SEQ ID NO: 117727

SEQ ID NO: 401113 - DNA, 1000 bp, Homo Sapiens
gcgtggcctctcccagttctggtggagaagatgaggacttggaccaggagcgacggcgaaacaagaagagggggatcttccccaaggtggccaccaacatcatgcgagcctggttgttccagcacctctcgagacgctcagaagcgccggttctcccagacgtctgcctgggcctgggctccccatcccccggaccccggtgggccagaccttggggttcagactgcggccggccaggcaggcagagtgactcttgctggtggctgcagcacccgtacccctcggaggagcagaagaaacagctggcgcaggacacggggctcaccatcctgcaagtcaacaactggttcattaacgcccggagacgcatcgtgcaacctatgatcgatcaatccaaccgcacagggcagggtgcagccttcagcccagagggccagcccatcgggggctataccgagacgcagccacacgtggccgtccggcctccgggatcagtggggatgagtttgaacttggaaggagaatggcattatctatagaggctgatgcaggagagacccagcctccggctgtgacccccagcctcacacctgcctctggttcccgcctggtcctccagcttcaggaccccacctccaaaggcccctctgctcaatgcctacctccctagggccctgctgggacatgggggcctgagtgcccatccaagggctctcaaggacaccggcaaggcctccaggccctgagccccacttctgccttcacctctgcctgggacccgagctgggctcctgggccttggtccccagaagatggcggctagggcctcgccgccaggacagagaagggacggggtggctgggcagtcagggaaggagggtcgcccggatccgacattttggagagattccttcactctcctgtcccccctacctcccttctctaatttcttcttttttttaatgataaagtcttaaaaacacgaaaaaaaaaaaaaaaa

SEQ ID NO: 401114 - DNA, 1000 bp, Homo Sapiens; identical to SEQ ID NO: 289974

SEQ ID NO: 401115 - DNA, 1000 bp, Homo Sapiens; identical to SEQ ID NO: 289975

SEQ ID NO: 401116 - DNA, 1000 bp, Homo Sapiens; identical to SEQ ID NO: 223019

SEQ ID NO: 401117 - DNA, 1000 bp, Homo Sapiens; identical to SEQ ID NO: 291534

SEQ ID NO: 401118 - DNA, 1000 bp, Homo Sapiens; identical to SEQ ID NO: 289976

SEQ ID NO: 401119 - DNA, 1000 bp, Homo Sapiens; identical to SEQ ID NO: 289977

SEQ ID NO: 401120 - DNA, 1000 bp, Homo Sapiens; identical to SEQ ID NO: 289978

SEQ ID NO: 401121 - DNA, 1000 bp, Homo Sapiens; identical to SEQ ID NO: 223020

SEQ ID NO: 401122 - DNA, 1000 bp, Homo Sapiens; identical to SEQ ID NO: 289980

SEQ ID NO: 401123 - DNA, 1000 bp, Homo Sapiens
ctctacagctgcctggcgccctgtgtgcggcggctgcccttcggcaagtgcaggatccccaacaacagcctgccctacttccacaagcgcccgcaggcccgtatgctgctcctggcgctcttctgcgtggccgtcagcgtggtgtggggcgtcttccgcaacgaggaccagtgggcctgggtcctccaggatgccctgggcatcgccttctgcctctacatgctgaagaccatccgtctgcccaccttcaaggcctgcacgctgctgctgctggtgctgttcctctacgacatcttcttcgtgttcatcacgcccttcctgaccaagagtgggagcagcatcatggtggaggtggccactgggccctcggactcagccacccgtgagaagctgcccatggtcctgaaggtgcccaggctgaactcctcacctctggccctgtgtgaccggcccttctccctcctgggtttcggagacattttggtgccagggctgctggtggcctactgccacaggtttgacatccaggtacagtcctccagggtatacttcgtggcctgcaccatcgcctatggcgttggcctccttgtgacattcgtggcactggccctgatgcagcgtggccagcccgctctcctctacctggtgccctgcacgctggtgacgagctgcgctgtggcgctctggcgccgggagctgggcgtgttctggacgggcagcggctttgcgaaagtcctacctccatctccgtgggccccagcaccagccgacggcccgcagcctcccaaagactctgccacgccactctccccgcagccgcccagcgaagaaccagccacatccccctggcctgctgagcagtccccaaaatcacgcacgtccgaggagatgggggctggagcccccatgcgggagcctgggagcccagctgaatccgagggccgggaccaggcccagccgtccccggtaacccagcctggcgcctcggcctaggggaggg

SEQ ID NO: 401124 - DNA, 1000 bp, Homo Sapiens; identical to SEQ ID NO: 117728

SEQ ID NO: 401125 - DNA, 1000 bp, Homo Sapiens; identical to SEQ ID NO: 117729

SEQ ID NO: 401126 - DNA, 1000 bp, Homo Sapiens; identical to SEQ ID NO: 289982

SEQ ID NO: 401127 - DNA, 1000 bp, Homo Sapiens; identical to SEQ ID NO: 294114

SEQ ID NO: 401128 - DNA, 1000 bp, Homo Sapiens; identical to SEQ ID NO: 223022

SEQ ID NO: 401129 - DNA, 1000 bp, Homo Sapiens; identical to SEQ ID NO: 289984

SEQ ID NO: 401130 - DNA, 1000 bp, Homo Sapiens
caattgagcaagaacaaggtgacacatattctgtctgtccatgatagtgccaggcctatgttggagggagttaaatacctgtgcatcccagcagcggattcaccatctcaaaacctgacaagacatttcaaagaaagtattaaattcattcacgagtgccggctccgcggtgagagctgccttgtacactgcctggccggggtctccaggagcgtgacactggtgatcgcatacatcatgaccgtcactgactttggctgggaggatgccctgcacaccgtgcgtgctgggagatcctgtgccaaccccaacgtgggcttccagagacagctccaggagtttgagaagcatgaggtccatcagtatcggcagtggctgaaggaagaatatggagagagccctttgcaggatgcagaagaagccaaaaacattctggccgctccaggaattctgaagttctgggcctttctcagaagactgtaatgtacctgaagtttctgaaatattgcaaacccacagagtttaggctggtgctgccaaaaagaaaagcaacatagagtttaagtatccagtagtgatttgtaaacttgtttttcatttgaagctgaatatatacgtagtcatgtttatgttgagaactaaggatattctttagcaagagaaaatattttccccttatccccactgctgtggaggtttctgtacctcgcttggatgcctgtaaggatcccgggagccttgccgcactgccttgtgggtggcttggcgctcgtgattgcttcctgtgaacgcctcccaaggacgagcccagtgtagttgtgtggcgtgaactctgcccgtgtgttctcaaattccccagcttgggaaatagcccttggtgtgggttttatctctggtttgtgttctccgtggtggaattgaccgaaagctctatgttttcgttaataaagggcaacttagccaagtttaaaaaaaaaaaaaaaaaaaaaaaaaaaaaaaa

SEQ ID NO: 401131 - DNA, 957 bp, Homo Sapiens
gcgcgtcggcgtggggcgctatgccggggcggcacgtttctcgagtccgggcattgtacaagcgcgtcttgcagctgcaccgtgttctgcccccggacctcaaatccctgggcgaccagtacgtgaaagacgaatttaggagacataagaccgttggttctgacgaggcacagcgtttcttgcaagaatgggaggtgtatgcaacagcgttattgcaacaggctaacgaaaacagacaaaattcaactggaaaagcatgttttggcaccttcctcccagaagaaaaacttaatgactttcgtgatgaacaaattggacagttgcaggagctgatgcaagaagccacaaaacccaataggcaatttagtatttctgagtctatgaaaccaaaattttagtctatacaacaaagcttaataagacatgcaaaaatttagaacccctactttaactgtcattggtttttgaaatatatttaagctttgaaaacacctgttattaatgaaatactcttttattttggatattatgattgcagtatatggatcaagatcactagtgacaattgaaaaaaactattggaataatagcacttgtataaaattcagttttggaactaaacagcaaatttctagaattttgctgaaaatgttttaaaatgctattctcatccagccatattagtcttctggcttttctttagcttcatcaaataagcatgttgtgataatgatagatgtacaattccaacaaggttattattttttaaatacattgtcattctgaacattttatcacttctagtttaataatacatacatgatttttcttctgaatgtctcttctccctgcatcactgttcattcacaatgaaaggttaggaagaagctttaaaattcactattttactatcaatcatttgtataataaactatacaaagtataaaaaaaaaaaaa

SEQ ID NO: 401132 - DNA, 1000 bp, Homo Sapiens
cgccgccggttcagctccgaggccgcagaatctggtagcccagagaccaagaaacctacatttatggatgaggaagttcaaagcatactcacgaaaatgacaggcttgaacttgcagaagacttttaagccagctatacaagaactgaagccaccaacctataagctaatgactcaggcacagttggaagaggctacaagacaggcagttgaggcagctaaagtacgattaaaaatgccaccagttctggaagagcgagtaccaataaatgatgtgttagctgaagataagattttggaaggaacagaaacaaccaaatatgtgtttactgatatatcatatagcataccacaccgggagcgttttattgtcgtcagagaaccaagtggcacactacgcaaagcctcttgggaagaacgggaccgaatgatacaagtttatttcccaaaagaaggtcgtaaaattttgacaccaataattttcaaggaagaaaatcttaggactatgtatagccaggacaggcatgttgatgtcctcaatctctgctttgcccagtttgagccagattccacagagtatatcaaggttcatcacaagacctatgaagatatagataaacgtggaaaatatgaccttttacgttcaacaagatactttggtggaatggtgtggtattttgtaaataataaaaagattgatggtttgctgattgaccagattcagagagatttaatcgatgatgcaaccaacttggtccagctgtatcacgtgctccatccagatggccagtcggctcaaggggccaaggatcaggctgctgagggaataaatttaatcaaggtctttgcaaaaacagaagcacagaagggagcctatatagaactaacactgcagacttatcaagaagcactcagtcgccattctgcagcttcctaaaaatattttaaaaatacatttattttactaaaaaaaaaaaaaaaaaaaaaaaaaaaaaaaaaaa

SEQ ID NO: 401133 - DNA, 1000 bp, Homo Sapiens; identical to SEQ ID NO: 117730

SEQ ID NO: 401134 - DNA, 1000 bp, Homo Sapiens
accttccaaaaagaggttctcggcagccgcctagagaccacccaattgctggctaaagccatcaccaaagccccacaaccccccaaggcctgggtcttagtcacaggtgtagcttactaccagcccagtctgactgcggagtatgatgaagacagcccaggaggggactttgactttttctccaacctcgtaaccaaatgggaagctgcagccaggcttcctggagattctacacgccaggtggtggtgcgctcaggggttgtgctgggccgtgggggtggtgccatgggccacatgctgctgccctttcgcctgggcctggggggccccatcggctcaggccaccaattcttcccctggatacacatcggggacctggcaggaatcctgacccatgcccttgaagcaaaccacgtgcacggggtcctgaatggagtggctccatcctccgccactaatgctgagtttgcccagaccttgggtgctgccctgggccgccgagccttcatccctctccccagcgctgtggtgcaagctgtctttgggcgacagcgtgccatcatgctgctggagggccagaaggtgatcccacagcgaacactggccactggctaccagtattccttcccagagctaggggctgccttaaaggaaattgtagcctaagtaggtcgtggcaagggcctgaggcctgttcctcacaggcttccaggttaggcactgtgaataggctcagctcctctagagagctgaagccatctggttcttagattcctctcccagtcctctttcccattgttctgttgctccaccttattgtctcaaggccgtaatctcatcaggttgggacattaatcttttcaactccttgtaagatttcccagtttggtttctctacatgtcctgcagctgccccacttctcctttacgctgtgtagagaatgctctgcagtttaggcaataaaaataaattgtctcactaaaaaaaaaaaaaaaaaaa

SEQ ID NO: 401135 - DNA, 1000 bp, Homo Sapiens; identical to SEQ ID NO: 289989

SEQ ID NO: 401136 - DNA, 1000 bp, Homo Sapiens
acaggagcatcattttttccttacctgataccacgaaccagtgacaacgtgaatgctgtattttaagtggttgtatgtttattttcttgagtaacaaatgcatgaaaaattaatgcttcacctaggtaagatcattggtctgtgtgaaatcacaaatgttttttccttcttggttgctgcagcctgggtggatgttcatggagaagctctgttctctatattatggctgtgtgccgttgcttctccctctgcttttatcttttccacagttgaggctgggtatgttctttcaaagaaatggccatgaatatgtgtaagtatacttttgaaaatgagctttcctaaactattgagagttctttccacctcttgcggaaccaactcttggaggagaggcccatgtatctgcacgagcacttagcttgttcagatctctgcattttataaatgcttcttaccaagaaagcatttttaggtcattgcttgtaccaggtaatttttgccggggatgggtaagggttgggttttctggtgggagtggggtggtgggtattttttgttgatgctttagtgcaggcctgttctgaggcaataacaagttgctgtgaaaacagcatgtgctgctgcctttgtaactgcatggaaacttttcacatgggtttttctccaagttaatacagaaatatgtaaactgagagatgcaaatgtaatatttttaacagttcatgaagttgttattaaaataactaacataaaacttaattactttaatattatataattatagtagtggccttgttttacaaacctttaaattacattttagaaatcaaagttgatagtcttagttatcttttgagtaagaaaagctttcctaaagtcccatacatttggaccatggcagctaattttgtaacttaagcattcatatgaactacctatggacatctattaaagtgattgacaaaatctcaaaaaaaaaaaaaaaaaaaaaaaaaaa

SEQ ID NO: 401137 - DNA, 1000 bp, Homo Sapiens; identical to SEQ ID NO: 289990

SEQ ID NO: 401138 - DNA, 1000 bp, Homo Sapiens; identical to SEQ ID NO: 289991

SEQ ID NO: 401139 - DNA, 1000 bp, Homo Sapiens; identical to SEQ ID NO: 223024

SEQ ID NO: 401140 - DNA, 1000 bp, Homo Sapiens; identical to SEQ ID NO: 289993

SEQ ID NO: 401141 - DNA, 1000 bp, Homo Sapiens; identical to SEQ ID NO: 290526

SEQ ID NO: 401142 - DNA, 1000 bp, Homo Sapiens; identical to SEQ ID NO: 117731

SEQ ID NO: 401143 - DNA, 1000 bp, Homo Sapiens; identical to SEQ ID NO: 223026

SEQ ID NO: 401144 - DNA, 1000 bp, Homo Sapiens
ggagacccacctgcatgttgttttggctcatatttggaaatcaagaaacagatggacaagttggatcccctggcccatcctctcctgcagtggatcatctctagcaacaggtcacacattgtcaaactacctctcagcaggctgaagttcatgcacacctcacaccagttcctcctgctgagcagccctcctgccaaggaggctcggttccggaccgccaagaagctctatggcagcacctttgccttccatgggtcccacattgagaactggcattcgatcctgcgcaatgggctggtcaatgcatcctacaccaaactgcagctgcatggagcagcctatggcaaaggcatctacctgagccccatctccagtatttcctttggatactcaggaatgggaaaaggacagcacaggatgccctccaaggatgagctggtccagagatacaacaggatgaataccatcccccagacccgatccattcagtcacggttcctgcagagtcggaatctaaactgtatagcactttgtgaagtgattacatctaaggacctccagaagcatgggaacatctgggtgtgccctgtgtccgaccatgtctgcacaagattcttctttgtatatgaggatggtcaggtgggcgatgccaacattaatactcaggaccccaagatacagaaggaaatcatgcgtgtgatcggaactcaggtttacacaaactgagggggccccagccctcgtaccacccctgttaccccaggatccatctgccctcataaaagtgttcaggtacagcagctgaggctgccctgaggaatcaaggggccattaccaaggggcaggaaaaggatatgtaagaggtggccttcatggtagagcttgacccaagaactactccacattcggatggcccagactgactccatcccctgactttccctttgacttcaccctgtttgtaaataaaacaataaaatggaaaaaaaaaaaaaaaaaa

SEQ ID NO: 401145 - DNA, 1000 bp, Homo Sapiens; identical to SEQ ID NO: 117732

SEQ ID NO: 401146 - DNA, 1000 bp, Homo Sapiens; identical to SEQ ID NO: 117733

SEQ ID NO: 401147 - DNA, 1000 bp, Homo Sapiens; identical to SEQ ID NO: 289997

SEQ ID NO: 401148 - DNA, 1000 bp, Homo Sapiens
cacatggatggcgaccacagagaagccagaattgggccctgctcatgatgctggtgacaacaacatctatgaagtgatgccctctccagtcctcctggtgtcccccatcagtgacacaaggtccataaacccagcccggcccctgcccacacccccacacctgcaggcggagccagagaaccaccagtaccagcaggacctgctaaaccccgaccctgccccctactgccagctggtgccaacttcctgatgggtcctgggccaggccagccagggagaagacaaggccccagccctcctctgggagcctcacacctgagaccagcaggacaaggccattgggggctgtggggccgatgaggtggactcagccaaagactcagcagcacatggggcaggtgtcctggcagggggacaggagactgtaacaggcccaggtccttgtgcagcccctgaatgcacgcccgccttcggtctgttccttcaagcaagctggcctgggccatgtgcctgtgaaaggcaggctctggcccctttccatgccaaagtcccccaagatctggatatctggggacaagatggtggcctcaggcctgcctcccaggcagttggctgggctcccaactgtctgtcctcaatgccctaccccaactccactagtgaccctcagagtcttctccccttaggacaaggcagacaccccaccatgcgggcctcaggtggcagagaggcccagcctcacaggcctgtggccccacacaccagtcccagcaaggtgaccacggctgctggaccccttccctgttcaggcaggcccagcccctctcagaacctgctgccagctgctggtcttggcccccaccctgaatcttactgagtccctctgggcagcagctcccttctccaccccaccccagcacccgtcccaaatgtggcctcagcttgtcctccccttccccaaactatgcattcattcagcaataaatgagcctttgctgca

SEQ ID NO: 401149 - DNA, 1000 bp, Homo Sapiens; identical to SEQ ID NO: 223028

SEQ ID NO: 401150 - DNA, 1000 bp, Homo Sapiens; identical to SEQ ID NO: 223029

SEQ ID NO: 401151 - DNA, 1000 bp, Homo Sapiens
gcaccacaaaaaggagtatgcgatggagcccttggtgaagcggcggcgagaggagaaactcaagtgccccatctgcaatgagtccttcagggagcgccaccacctctccaggcacatgacctcgcataattgactcggaaaggaccccagctttccacgcgcgcgcaagcacagttaagccacctgcaggaataaacacgcgagaacatccaccgcttccttgcaccccgaaaccctgcacaaagacacatacattcaccgcccccccgcccccccaacgcgcacacacacgtcctctcctcccaggaacctcattcaaatatttacccgggacacacacccccccccacacacacacacagacacactcacacacaagagccaggatggtggagttttgattgggtgggttgtttgagggggttttcttttgaatgcacgcattttcactttccccaaaacaaaggtacattttttaaaatgtcatatattgcaacatattgatgcatttgtcatacgtttctacttaaattattaagcacttacgatttagatgtaataattatatgtaagggcaaaatttattttagatataaagtaaaggaggagggtgagatgctttctgcatttcttgatgacagtttgtgttcctacaaaaataaacaaaatgaataaaaagggatcaccattcaatttgagtttccagggggaagtgcatgtataatgaaatgataatggacttcaatgaagaatgtcatcaattatgtacatatgtattttcttttaatacaaagtgtaattttgtgccagtgaaatggagtctgaatagttatgtgtttcttttatccctggaaatatttattaaactttatagtttatccgagtatgttggatgctttgacaataaatgactattttcttcaaagcaaaaaaaaaaaaaaaaaaaaaaaaaaaaaaaaaaaaaaaaaaaaaaaaaaaaaaaaaaaaaaaaaaaaaaaaa

SEQ ID NO: 401152 - DNA, 1000 bp, Homo Sapiens
gtgggcggggctttcgcaataagtcacacctcctcagacaccagaggacacacacaggggagaagccctacgtctgcagggagtgtgggcggggctttagcgataggtcaagcctctgctatcaccagaggacacacacaggggagaagccctacgtctgcagggaggatgagtaagtcattagtaataaaacctcatctcaatagccacaaaaagacaaatgtggtcaccacacacttgcacaccccagctgtgaggtggcttcagcggaagtctgctgaccccttatattccccgagagtataaagagatcggaaataactgattaaacaaatccgccactttcatgactagagatgaggaagaacaagggatagttctgtaagtgttcgggggacatcagcatgtgtggttctttcccgcactgatcccctccattttttgtttgtttttttgcctcctgttctaataaattttgtctccatacaaatctgaaccccaagtgtgtacctcattcttcccttatcactgaaggcaagaagagtccagaagggccacagagaactcatgtgttcagctcaagactccacaggaattcaacccccagaaagacataaacttggagtccgtctggtttaattattggagaatcgattcccaagtccaggaagagaaatgtaagattctagaaagtcgcagcaggaaagggagttccctggtctcctgggaagtgtggcttcttctcctaatggacacctctcctctgctgccatactctcccttggctccccagtctcctctcctgatctcctccaatctctgtagcccaagatgtgaaagccagacaagaacacgcgtgtgtgtatatatgtgttcgggtgtgggggtatgtgccctccgtgtaggtaactgtgtgagtgtggggggtttcaagggtgtgttaggaacaacgctcaaaatcctaaggaaactgaacactcgaacgaaggattcttagcaa

SEQ ID NO: 401153 - DNA, 1000 bp, Homo Sapiens; identical to SEQ ID NO: 223030

SEQ ID NO: 401154 - DNA, 1000 bp, Homo Sapiens; identical to SEQ ID NO: 290002

SEQ ID NO: 401155 - DNA, 1000 bp, Homo Sapiens; identical to SEQ ID NO: 290004

SEQ ID NO: 401156 - DNA, 1000 bp, Homo Sapiens; identical to SEQ ID NO: 117734

SEQ ID NO: 401157 - DNA, 1000 bp, Homo Sapiens
gggcccgaggcaccccgctcagccaggctatcattcaccagtactaccagccaccgaaccttctggagctctttggaaccattctcccactggacttggaggatatcttcaagaagagcaagccccgctatcacaagcgcaccagctctgctgtctggaactcaccgcccctgcagggcgccagggtccccagcagcctggcctacagcctgaagaagcactgaggctggcctgcggccttcttggcagcctcgcctcctgtccatgtctatctgtctgtctgtcggtctgtgtcttggtctgttgccctccttcttggcatgccattgtggagggcttggccaggtgtatataaacgtcctctgtgctgggtgtttctgctgcaggtggcaggtggccccaggcctgtttggaggatgggctgggtgggtgggtggggaagaaatgggcccagccccacatggcctgcagacagtgctctgtaaatagttgttttaatttagctgaatgttagcattttagtctttggcattttagcgtttgggaggtagattaataaagtatattccttcaagcctgctgttgataccatgaagactgggcgcctcagtcccagccctgtagctgtgtgtcttgggccaccagtggcctgcaggacgaaggtactgttccatcacctgcggtgtgcctcaggatcaccaggtgcaggcccccaccctcggagatgctgctgcagtgagtggttccactgcctggataacccttgaggaacacgtcagttactgtcacgatggggcaggtggagctccttcctattttttggggtgctccctgtttgtaaaggggagtttgttcattgggaaagacctgggtcttgacacggccctgccacttagtcccctaccctctccattccccaggctccacccgtgctgctcaagtgcaaatggacttgagagtatttatgtgctggtgaagtatgaggtctgagtagaaaagg

SEQ ID NO: 401158 - DNA, 1000 bp, Homo Sapiens; identical to SEQ ID NO: 290005

SEQ ID NO: 401159 - DNA, 1000 bp, Homo Sapiens; identical to SEQ ID NO: 223032

SEQ ID NO: 401160 - DNA, 1000 bp, Homo Sapiens; identical to SEQ ID NO: 290008

SEQ ID NO: 401161 - DNA, 1000 bp, Homo Sapiens
gaaacaagccagaagaacaaactcttgttcccctttaggggagctctttgaccatggctgtgactctctttccacagtatttatggcagtgggagcttcaattgccgctcgcttaggaacttatcctgactggttttttttctgctcttttattgggatgtttgtgttttattgcgctcattggcagacttatgtttcaggcatgttgagatttggaaaagtggatgtaactgaaattcagatagctttagtgattgtctttgtgttgtctgcatttggaggagcaacaatgtgggactatacgattcctattctagaaataaaattgaagatccttccagttcttggatttctaggtggagtaatattttcctgttcaaattatttccatgttatcctccatggtggtgttggcaagaatggatccactatagcaggcaccagtgtcttgtcacctggactccacataggactaattattatactggcaataatgatctataaaaagtcagcaactgatgtgtttgaaaagcatccttgtctttatatcctaatgtttggatgtgtctttgctaaagtctcacaaaaattagtggtagctcacatgaccaaaagtgaactatatcttcaagacactgtctttttggggccaggtcttttgtttttagaccagtactttaataactttatagacgaatatgttgttctatggatggcaatggtgatttcttcatttgatatggtgatatactttagtgctttgtgcctgcaaatttcaagacaccttcatctaaatatattcaagactgcatgtcatcaagcacctgaacaggttcaagttctttcttcaaagagtcatcagaataacatggattgaagagacttccgaacacttgctatctcttgctgctgctgtttcatggaaggagatattaaacatttgtttaatttttatttaagtgttatacctatttcagcaaataaaatatttcattgctta

SEQ ID NO: 401162 - DNA, 1000 bp, Homo Sapiens; identical to SEQ ID NO: 115319

SEQ ID NO: 401163 - DNA, 1000 bp, Homo Sapiens; identical to SEQ ID NO: 117735

SEQ ID NO: 401164 - DNA, 1000 bp, Homo Sapiens
ccctcaaggacctgaagctgagctatctggacgtctatcttattcactggccacagggattcaagtctggggatgaccttttccccaaagatgataaaggtaatgccatcggtggaaaagcaacgttcttggatgcctgggaggccatggaggagctggtggatgaggggctggtgaaagcccttggggtctccaatttcagccacttccagatcgagaagctcttgaacaaacctggactgaaatataaaccagtgactaaccaggttgagtgtcacccatacctcacacaggagaaactgatccagtactgccactccaagggcatcaccgttacggcctacagccccctgggctctccggatagaccttgggccaagccagaagacccttccctgctggaggatcccaagattaaggagattgctgcaaagcacaaaaaaaccgcagcccaggttctgatccgtttccatatccagaggaatgtgattgtcatccccaagtctgtgacaccagcacgcattgttgagaacattcaggtctttgactttaaattgagtgatgaggagatggcaaccatactcagcttcaacagaaactggagggcctgtaacgtgttgcaatcctctcatttggaagactatcccttcgatgcagaatattgaggttgaatctcctggtgagattatacaggagattctctttcttcgctgaagtgtgactacctccactcatgtcccattttagccaagcttatttaagatcacagtgaacttagtcctgttatagacgagaatcgaggtgctgttttagacatttatttctgtatgttcaactaggatcagaatatcacagaaaagcatggcttgaataaggaaatgacaattttttccacttatctgatcagaacaaatgtttattaagcatcagaaactctgccaacactgaggatgtaaagatcaataaaaaaaataataatcataaaaaaaaaaaaaaaaaa

SEQ ID NO: 401165 - DNA, 953 bp, Homo Sapiens; identical to SEQ ID NO: 290010

SEQ ID NO: 401166 - DNA, 1000 bp, Homo Sapiens; identical to SEQ ID NO: 290011

SEQ ID NO: 401167 - DNA, 1000 bp, Homo Sapiens
ccagtgctgtcaaatcctctttccttcccaattgcctctcaggggtagtgaagctgcagactgacagtttcaaggatacccaaattcccctaaaggttccctctccacccgttctgcctcagtggtttcaaatctctcctttcagggctttatttgaatggacagttcgacctcttactctctcttgtggttttgaggcacccacaccccccgctttcctttatctccagggactctcaggctaacctttgagatcactcagctcccatctcctttcagaaaaattcaaggtcctcctctagaagtttcaaatctctcccaactctgttctgcatcttccagattggtttaaccaattactcgtccccgccattccagggattgattctcaccagcgtttctgatggaaaatggcggtttcaagtccccgattccgtgcccacttcacatctcccctaccagcagattctgcgaaagcaccaaatttctcaagaccctcttctccctagcttagcataatgtctggggaaacaaccaaaatcgcaattttaacaatatgcctctctacccccgtgcactttttctgacatggttttcaggtctaaatagtggctgctccagtccatgaactcaaaggtttgaagctaccaccattgaactcccccatggtggtttcatgatgccccctccccaattcctcgcactttattctcctgggtggtttcgaactaccctgtttctcagtggccatttgttgtgtccctcaggggcttaatgactcaaaatctgggatccttcccctctcagacacccctctttcagcttagaatttggggaacctatagagaagtcacagaatcccatgaaagggaatggggcaggagacaggggtgttttttcccagtgcagggttgtgtctttgtgtctctgtctctgtgactgtaaatcctgccctgccccactcccaataaaagctttggtgtataggcaaaaaaaaaaa

SEQ ID NO: 401168 - DNA, 1000 bp, Homo Sapiens
ctttgctattcccattgtgacagcgatggcaggcctgacccacggggcagttagagcagcctcgtggagctcgcccctcccctcagcctgcccacctctccctgcatcctgaggccagtggcccccgggcctgcacagatacctcatcatccacccgctgcccctccccgtccctgtcccccagcatcgggggcctgcaaatctagtgccgaatgactatgtccagattggtgacgatgggtgttgctgtttttcttgtcgtttgtgaacgctgtgatgctgtgtgcccaagtgggcagtcaccacccagcccttccttgggcgtctcccccagagtgctgtcgggaccacatctgtcctcaccctgtgggaccgcctggccctccctccctagcccttccagcctgggacacacacacacacacacacacacacacacgcacgcacacgcacacatcttacctctcatgcgtgttttaccttttgatgttcagagtggctcactggctgggagtccttacctcggggagagggggaggttggttccttggggggccaaagaaggcagggaatgcctggagggtaactggggggccaccatgaccccttctctctccagaaacagctgcttctccccccatcccagggtcccacccccaacccccagaggtggcccttgtttacagtgaggactcggccactgtgtctctgtttcctgaaatataaactgtagcgaccccagactgtagagatttttatgtgtttggatacatctgctgtgtggaaaaaaaaaaaaactacaaaaaccctaattttgtacatactgtatttttactattgaactgtattctagtggctgttcatgctccaagactttagttaccgagacatgaatactatccatgtaataagcacttgcctggaataaaatataaaactgaaataaacctgcactgaaacctgagatggagctgccaaaaaaaaaaaaaaaaaaaaaaaa

SEQ ID NO: 401169 - DNA, 1000 bp, Homo Sapiens; identical to SEQ ID NO: 290012

SEQ ID NO: 401170 - DNA, 1000 bp, Homo Sapiens; identical to SEQ ID NO: 117737

SEQ ID NO: 401171 - DNA, 1000 bp, Homo Sapiens; identical to SEQ ID NO: 117738

SEQ ID NO: 401172 - DNA, 1000 bp, Homo Sapiens; identical to SEQ ID NO: 117739

SEQ ID NO: 401173 - DNA, 1000 bp, Homo Sapiens; identical to SEQ ID NO: 290017

SEQ ID NO: 401174 - DNA, 1000 bp, Homo Sapiens
agaccaggaggactgacagcgaagatcgagctcaggttcgccacatagatcccgtgcaggagccacatgggtcctgtgcaggacccctagcagtggtgggctgagcccaggtctaggtttctgtgggggacactgaatctcccagtgttcagtctcccaggactctgctgcctcagccagagcctccatatgcttgaagtgctgattacctacaaatgatttcagatcatgtttgctaaagagaaatctggaagtgtgagatctgtaagaaatgaaagaaatgactcttggagtcaagagatctggaaatcttttaatcagttaaattgtgcagcaatagatttttaactttaactgaccatttaagttttttaataagttttttacaaagaaaagttaaacattaaaaagaattacagctttctgtcttctctatcatggaatgatcttttttattgaatctccagatttgtatttgacagcttggtgggaagggaagcacactctgctgttctggaatcttatgcccagggtttttcacttctccccacatctccctttccacttgccagtgttgtgtagttagaacctgaaccactaacttccaggggcctttggtctgccctaccttaacccaaatgaaagtaaatccctttccccttagccaaaataaggttgggttttctaaaaaaatagtctatattagggaacaacaacagcaaattagacaaaacccagaaagcacaaagcatgaggtggagttactgtgcccaaagtcctcactcagaccagtgcccctccagttcagttgtctatgtattaccttccttaccttcataatttttgccaggcttctgtacttctagtacttgagttacttaatatttttaaaaacaaaccttttaagtttaaatggatttttaagtgaaattttacacttaacatagatggaaagtaactaaaaataaatacaagaaaaacaaaaaaaaaaaaaaaaaaa

SEQ ID NO: 401175 - DNA, 1000 bp, Homo Sapiens; identical to SEQ ID NO: 117741

SEQ ID NO: 401176 - DNA, 1000 bp, Homo Sapiens
ggtcagtagatgtgggcagacaccctggttggactgggcatgtttctaccagttggtctattaattgttgtgatgatggtgaaggatctcaacaagaagtgatttcctctgaagatattggagctagcattttcaatggacagaagaaggtgctgtattatgctgatgcccttacagaaattgcttttgtggttccttctcctgtggagtccttaactgattcattggaaagtaacatctcggaccaagatagtgattcaaatatggatcttatgccaggaattctgaaacagccatccctgacacttgagcttttccccaatcatacagacaatcttaattcctcacagaggctcagtcccagttccagaatgaggaagctgcctcagggtcgccctgttcctccccttggacctgagacaagagtttctgtagtctgggtggaacgctatgatgatatagaaaactttcccctctcagagctgatgacagagatcagtactggtgtggaaactactgcaaatagtagcacttcactgagatctacaactcttgaaaaagaagttcctgtcatcttcatccaccctttaaacactggattattccggataaaaattcaaggagccactggaaaatttaatatggtcatccctcttgtggatgggatgattgtcagcaggcgagctcttggctttctggtgaggcagactgtaattaacatttgtagaagaaagagactggaaagtgactcctacagtcccccccatgtccgccggaaacagaaaatcaccgacattgtcaacaagtaccggaacaagcagctggagccagagttttatacttcacttttccaggaggttggactcaagaactgcagttcttagaccactgaatttctaagactgttgaactccagtttgggaactataacacagcagaacagtttgataggtgatcactgtaaaaataaaaacaaatcactccaaaaaaaaaaaaaaaa

SEQ ID NO: 401177 - DNA, 1000 bp, Homo Sapiens; identical to SEQ ID NO: 117742

SEQ ID NO: 401178 - DNA, 1000 bp, Homo Sapiens; identical to SEQ ID NO: 290022

SEQ ID NO: 401179 - DNA, 1000 bp, Homo Sapiens; identical to SEQ ID NO: 290023

SEQ ID NO: 401180 - DNA, 1000 bp, Homo Sapiens; identical to SEQ ID NO: 290024

SEQ ID NO: 401181 - DNA, 1000 bp, Homo Sapiens
acaagatcgccaagaagaaatgtcatgtggatgagaacgagcggcagaatggggctgccaaccacgtggaaaaaattgagcttccaaacagcaccagcacagatgttgaaatgacaccatccagtgatgcttcagaacctgtacaaaatggaaatctctcccacaacattgaaggtgcagaagcccagaccgctgatgaggaggaggaccagcctctcagccttgcctggccttctgaaacccgcaagcaagtcacgtttctgattgttttccccatagtgtttcctctctggattacgttacctgacgttcgcaaaccttcatcgaggaagttttttcccatcacgttctttggctccattacctggattgcagtattctcttacttgatggtctggtgggcgcaccaggttggagagacaattggcatcagtgaagagattatgggcctgaccatcttggctgctgggacctccatccctgatcttatcaccagtgtcatagtggcccggaaggggttaggggacatggctgtgtccagctctgttggaagcaacatttttgacatcactgtagggctcccactgccctggctcctgtacaccgtcattcacagattccagccagtggctgtcagcagcaatggccttttctgtgccatcgtccttctcttcatcatgctgctcttcgtcatcctctctatcgccctctgcaagtggcgaatgaacaaaatcctgggcttcatcatgtttggcctctactttgtgttcctggtggtgagcgttctcctagaagacagaattcttacatgccccgtctccatctagcaggaaaagccatatcttgcaccagcagcatgaatggtccctccacactctgggctctgggctccttgacctcttgagaagaggcagctggcacacagccctgggtgccaagtgtccctccttggtgaatttgaggagagatggattcacactgggcccattcacttcacagg

SEQ ID NO: 401182 - DNA, 1000 bp, Homo Sapiens; identical to SEQ ID NO: 223034

SEQ ID NO: 401183 - DNA, 1000 bp, Homo Sapiens
tattacaactttgtactggttgtaacttgcattagaaaaaaaaaagagatatataaaccacaaagaatctaataagaaatttattatggagatatagcccttaaaatgcaatattaagaacaaagaaatagaaaatggtttagatatctttcttccttcataattaaatactatatgaaacttgtgccacagagctatatgtaatatgaaaagattaacttcatagagatattgtaagtaggtaattttattatttaaagtcctattaagaaatatttgtcttaaatatataggacaatacattatattaaaatggtctctctctatatatatctgtatatcttatacatgtccatacacagaaacataataaacaatcttcacacgaaaccaaaaatagcatacacctaatgttgggttagggaattgcaatttctactttcatagagtcatagaattttaggtggggaagaggcattttgcttgtcatttcttaatataactcaacaagaattgcaacatttgtgtaccaagcaataagtgcaatgcataaaatttcctgtctgtatattaccttcattttgcttgtagtagctgtttgggtggttggaataattttatttttcttttaaaaaagctaacatcagacccctttataatgtcctaaaattatgataatacatttcccaattcaactcaaaatattattggtgtattttgtctattctggatatttgatctgtttaatgtactgtgctagtgactggaggccctgctactgcaaatataaaacctaaagtttgtttaaaaaaatgcaaatcattctttaccttaagaaaaaaaaaataccctttgctttgtgcctcaaagtgatgtaatgtgatcacagcttttgttgtgttgaatgaaaatatgtggactgtcattttgttgcagcaaaaaagtgttaataaaatgctctatttatccttttttaaaaaaaaaaaaaaaaaaaaaaaaa

SEQ ID NO: 401184 - DNA, 1000 bp, Homo Sapiens; identical to SEQ ID NO: 223035

SEQ ID NO: 401185 - DNA, 1000 bp, Homo Sapiens; identical to SEQ ID NO: 290027

SEQ ID NO: 401186 - DNA, 1000 bp, Homo Sapiens; identical to SEQ ID NO: 290029

SEQ ID NO: 401187 - DNA, 1000 bp, Homo Sapiens; identical to SEQ ID NO: 223038

SEQ ID NO: 401188 - DNA, 1000 bp, Homo Sapiens
gtggagattccgagactatctggaggccaacattgatgcaatccacaggtccactgatcacatagaagaatctgtaagagaatttctggattttgcccgaggagtccatgggactgcctgtaacctcactgacagtaaccttcagaacagaattcgggaccagatgcagaccatctccaactcctaccgcatcctgcttgaaacaaaggaaagcttggataatcgcaattggcctctggaagttcttgtgactgacagtgtccagaacagcccagatgaccttgagaggtttgtcatggtggcacggatgcttccagaagacatcaagaggtttgcctccattgtcattgccaatggaaggctcctttttaagcggaactgtgaaaaggaagagactgtgcagttgaccccaaatgcagaatttaagtgtgaaaaatacatccagcctccccaaagagaaactgaatcacaccaaaagagtaccccttccactaagcaaagggaagatgaacactcttctgaactattaaagaaaaatagggcaaatatctgtggacagaatcctggccctcttatacctcagccttcgagtcaacagactcctgagaggaaaccccgcttatctgaacactgccggctgtactttggggcgctcttcaaagccatcagcgcatttcacggcagcctcagcagcagccagcccgcggagatcatcactcagagcaagctggtcatcatggtgggacagaagctggtggacacgctgtgcatggagacccaggagagggacgtgcgcaatgagatcctccgcggcagcagtcacctctgcagcctgctcaaggacgtagcgctggccactaagaatgccgtgctcacataccccagccctgccgcgctggggcacctccaggcggaggctgagaagctggagcaacacacgcggcagttcagagggacactgggatgaggactgtctacctcccttcctcctctgctcacc

SEQ ID NO: 401189 - DNA, 1000 bp, Homo Sapiens
attggccacgtgctacagacctggcatcccttcctccccaagttctccatccaggatgccgatcgccagacagtcttgcgagtggtggggccctgctggacctgtggctgtggcacagacaccaactttgaggtgaagactcgggatgaatcccgcagtgtgggccgcatcagcaagcagtgggggggcctggtccgagaagccctcacagatgcagatgactttggcctacagttcccgctggacctggatgtgagggtgaaggctgtgctgctgggagccacattcctcattgactacatgttctttgagaagcgaggaggcgctgggccctctgccgtcaccagttagaggccaccatggtgtgaggagaccatcacctcgaccagaactccagatggtcacctgccctggcccctcctctgggcagcccctttcctccatgtacactgcaggggacagaaggggggccccatccctaccctactccctggccgcctgcccctgtggttcccaaggaggggtatgtatgagagccgctctcctgctacctcccaccactgtcccagcagtccctcggcacacaggcatatcagctttcacactttccccatgcactctctcccacccccttccagggcctctgctccaaaggaggcctctggaacccaggactctggggttttacaagagggctggggtgtggaagggcaagctgcaccaaagacggtggatatagccaccgcccccccgccgctgcctagcatctgcttggccaattagttcagcctcagaccatggcactttgagggggtctctacctccccatcaacagctgcagggggaccccagtgccaacttcctctcccactagggccctgccttcagctggtgcttgctgcgattcctgtgccttatgtaactgcccttccttcccttgccctaggaaaaaggctgcatctttatatgttacattcatataaactttgtaactttttgg

SEQ ID NO: 401190 - DNA, 1000 bp, Homo Sapiens; identical to SEQ ID NO: 290033

SEQ ID NO: 401191 - DNA, 1000 bp, Homo Sapiens
gctcttcatggctaatgaagcagacttggatgaagagctggtcattaagggatccatcctacagaagcatcctagaatacgtttccacacgggtcttgtggatgcccacctctactgtttgaaaaaatacatcgtggatttcctaatggaaaatgggtcaataacttctatccggagtgaactgattccatatttagtgagaaaacagttttcctcagcttcctcacaacagggacaagaagaaaaagaggaggatctaaagaaaaaggagctgaagtccttagatatctacagttttataaaagaagccaatacactgaacctggctccctatgatgcctgctggaatgcctgtcgaggagacaggtgggaagacttgtccagatcacaggtgcgctgctatgtccacatcatgaaagaggggctctgctctcgagtgagcacactgggactctacatggaagcaaacagacaggtgcccaaattgctgtctgctctctgtccagaagaaccaccagtccattcgtcagcccagattgtcagcaaacacctggttggagttgacagcctcattgggccagagacacagattggagagaagtcatccattaagcgctcagtcattggctcatcctgtctcataaaagatagagtgactattaccaattgccttctcatgaactcagtcactgtggaggaaggaagcaatatccaaggcagtgtcatctgcaacaatgctgtgatcgagaagggtgcagacatcaaggactgcttgattggaagtggccagaggattgaagccaaagctaaacgagtgaatgaggtgatcgtggggaatgaccagctcatggagatctgagttctgagcaagtcagactccttccttttggcctccaaagccacagatgttggccggcccacctgtttaactctgtatttatttcccaataaagaagggcttccaaaggtaaaaaaaaaaaaaaaaaaaaaaaaaaaaaaa

SEQ ID NO: 401192 - DNA, 1000 bp, Homo Sapiens; identical to SEQ ID NO: 117743

SEQ ID NO: 401193 - DNA, 1000 bp, Homo Sapiens; identical to SEQ ID NO: 223040

SEQ ID NO: 401194 - DNA, 1000 bp, Homo Sapiens; identical to SEQ ID NO: 223041

SEQ ID NO: 401195 - DNA, 1000 bp, Homo Sapiens
gagggcttgtggcactgtgtgatggagaaggaggcatgttatatccacagggcacgcatctgctcttgggcatgggctgcaaccccatgaggggtgaggagtggttcatcctacagcactgcccaacctgggtcagcctcaggtcaaagactgggcggttcatctcagtcatctacgatggtgaggtgcgtgctgcttctgagcgcttaaaccgaatgtccttgttccagtttgaatgtgacagtgagagccccactgtgcagcttcgttcagccaatggctactacctatcccagaggcgccacagggcagtaatggctgatgggcaccccctggagtctgacacgttcttccgaatgcactggaactgtggcaggatcatcctgcagtcctgcagggggcgcttcctgggcattgcacccaacagcctgctgatggccaatgtcatccttccaggcccaaatgaggaatttgggattttatttgccaatcgctccttccttgtattgcgaggtcgttatggctatgtgggctcctcatcgggccatgacctcatacagtgcaaccaggatcagcccgaccgcattcatctactaccctgccgaccgggtatctaccacttccaggcacaggggggatccttctggtcaataacatcctttggcacctttcgcccttggggcaagtttgccctcaacttctgtatcgagcttcaggggagcaacttactcactgtactggcccccaatggcttctacatgcgagccgaccaaagtggcaccctgttggcagacagtgaagacattaccagagagtgtatctgggaattttaggtcaatgggatgtcacctaccaaaatccaaatcctccaggaaaaactactacactaaatggaccaggaacctcagagtcaagatccaagagaagaacatctgttacaacttttcctacccagtttagcaaaacacctgttttatgcaacaatacatcacaacaggcc

SEQ ID NO: 401196 - DNA, 1000 bp, Homo Sapiens; identical to SEQ ID NO: 223043

SEQ ID NO: 401197 - DNA, 1000 bp, Homo Sapiens; identical to SEQ ID NO: 117744

SEQ ID NO: 401198 - DNA, 1000 bp, Homo Sapiens
gggcatttggtgtcataagatggcatgtcttgatgacaagaaacaaaacgcccttcattaatatgcctcagtgtaataactattatagaaactgttggcaagcagagtgctttcctataacagaatgtgtcttaattttctactcgagggaaaggtttgtccaggtaacaacactaaagacaaccctaagaacacccactccagcagtatgtccattagacactaaaactctccaaattatttgtcagggagcctggcgattctgccaagaaggcaggtgttttgcccttagagcctatacagttctcttggagaaattgtctttcaggcaccactgttaatcactgagactgattctaatgcaaagcagggaagacagaggcagaaaccaggagagtggtagatcagtgcagcccagatatcggaatggaggagcaaagtttcattcacggatgtttgttgaatgctgctgcccaactcttcctttgtcacctctaggctattccactaagttacttataaactggtggctttaactgagggctgtgtaaaggtactatttggcatgtgaagtcaggataaatttatcgaatgtccgttttccacatgcaactgtgttacagaagtagtaaaattggaagaatcatgtttatggtgttaccactgatggaaacacacaaacaccaagctaataataaatatataacttaaaaagctaattatatgcactgaaatggtgggaattttagtgatgcagtaattgaggagtctggagttttgtatttggaccaagaattatgagatgaggatctttttctgagtgttctaaagggcttcttgagggggagtggtttaaagcacttcatgaatgatgtgaagaaggtaccttgggctgagacagcattctaggtacagatggcactctgttcaaccaactgtggatggaaaatattctgaaaaaaaatacaataaaaattttaaaaatacaaaaaaaaaaaaa

SEQ ID NO: 401199 - DNA, 1000 bp, Homo Sapiens
gcgctaagtgagctgagggccatggccaaagcagccagggaagagtgccctgtgtttacaccgcccggaggagagacgctggaccaggtgaaaatgcgtggaatagacttttttgaatttctttgtcaactaatcctgaaagaagcggatcaaaaagaacagttttcccaaggatctccaagcaactgtctggaaacttctttggcagagatatttcctttaggaaaaaatcacagctctaaagttaattcagacagcggtattccaggattagcagccagtgtcttagttgtgagtcacggtgcttacatgagaagtctgtttgattattttctgactgaccttaagtgttccttaccagccactctgagcagatctgaacttatgtcagtcactcccaatacagggatgagtctctttatcataaactttgaggaaggaagagaagttaaaccaacggttcagtgtatttgtatgaacctacaggatcatctaaatggactgactgaaactcgctaaggttaaatctgcatcaaaatctaaccaatttgagcctctgaagggagtgccattggctttatttacttctctcctctgctagtcctgatttggaaacagttaaaagccaatttttagctccagtggaaccatagccacataaaactttaatggacaaccatatagaattaacttattttgtccaagtacagttggcattttccagaataattttaccaccctgctagatgtcatctctggattgcacatggatgatgaaggaactcagcattgaaagttgggggattagtaaccttgttacaacggtttctttttcattttagcctattttaatggctattggtaagatactgtatgtttttagtatctcatccagtgcttagaagaaagaatggtttataattcccagtacatgtttatattgactgtgttatatttttaaatcctttaaataaaaaatccttataagtttatgtaaagc

SEQ ID NO: 401200 - DNA, 1000 bp, Homo Sapiens; identical to SEQ ID NO: 117745

SEQ ID NO: 401201 - DNA, 1000 bp, Homo Sapiens
agtcccaagtaaggacagtgagagaaaagggggagaaggattggagcaaaagagaactggcaataagtaggggaaggaagaatttcattttgcattgggagagaggttctaacacactgaaggcaaccctatttctactgtttctctcttgccagggtattaggaaggacaggaaaagtaggaggaggatctggggcattgccctaggaaatgaaagaattgtgtatagaatggaagggggatcatcaaggacatgtatctcaaattttctttgagatgcaggttagttgaccttgctgcagttctccttcccattaattcattgggatggaagccaaaaataaaagaggtgcctctgaggattagggttgagcactcaagggaaagatggagtagagggcaaatagcaaaagttgttgcactcctgaaattctattaacatttccgcagaagatgagtagggagatgctgccttcccttttgagatagtgtagaaaaacactagatagtgtgagaggttcctttctgtccactgaaacaaggctaaggatactaccaactactatcaccatgaccattgtactgacaacaattgaatgcagtctccctgcagggcagattatgccaggcactttacatttgttgatcccatttgacattcacaccaaagctctgagttccattttacagctgaagaaattgaagcttagagaaattaagaagcttgtttaagtttacacagctagtaagagttttaaaaatctctgtgcagaagtgttggctgggtgctctccccaccactacccttgtaaacttccaggaagattggttgaaagtctgaataaaagctgtcctttcctaccaatttcctccccctcctcactctcacaagaaaaccaaaagtttctcttcagagttgttgactcatagtacagtaaagggtggaggtgatatggcattctgaaagtagggagggactaagtcagtcatcatactaaac

SEQ ID NO: 401202 - DNA, 1000 bp, Homo Sapiens; identical to SEQ ID NO: 290041

SEQ ID NO: 401203 - DNA, 1000 bp, Homo Sapiens; identical to SEQ ID NO: 223045

SEQ ID NO: 401204 - DNA, 1000 bp, Homo Sapiens; identical to SEQ ID NO: 290043

SEQ ID NO: 401205 - DNA, 1000 bp, Homo Sapiens; identical to SEQ ID NO: 290045

SEQ ID NO: 401206 - DNA, 1000 bp, Homo Sapiens
tgattttctgcagtcggagcggtgtgcaaatggattaggaaatgataactccagtaacactttaaatactgactattcattcttagaaattaataataagaaagaaagaattgagcaacagctaccaaaagaacaagccttgtctccaagatcccaagaaaaggaggttcagattcctgaattgtctcaggtatttgtggaggatgtaaaggatatcttaaaaagcaggttgaaagaaggtcatatgaaccctcaagaggttgaagaaccttcagcctgtgcagacactaaaattttaattcaaaatttaattaaaaggattaccacatcacagttggtaaatgaggcatctactgtgcccagcgactctcaaatgagtgactcttctggagtttcccccatgactaactcatcagaactaaagccagaaagtagagatgatcctttctgtattggaaatcttaagtctgagcttctccttaatatattgaagcaagatcaacatagccaaaaaattacaggagtatttgaattgatgagagaattaactcatatggagtatgacctagagaaaagaggcattacgtctaaagtacttccactgcagcttgaaaatattttctacaaactgcttgctgatggatattcagagaaaatagaacatgttggagactttaatcaaaaagcatgttctacatctgagatgatggaagaaaagccacatattcttggtgatattaaaagcaaagaaggaaactactattctcctaatttagaaactgtaaaagaaattggactagaaagctctactgtgtgggcatcaacattgccaagagatgagaagctcaaggatctgtgtaatgatttcccaagccatttggaatgtacttcagggtctaaagagatggcttctggagatagctcaaccgaacaagtaagttgacctatacattttatacagaaaaagctgcatgaaccatgtgagaataatcccatacat

SEQ ID NO: 401207 - DNA, 1000 bp, Homo Sapiens; identical to SEQ ID NO: 290047

SEQ ID NO: 401208 - DNA, 1000 bp, Homo Sapiens; identical to SEQ ID NO: 290048

SEQ ID NO: 401209 - DNA, 880 bp, Homo Sapiens; identical to SEQ ID NO: 223046

SEQ ID NO: 401210 - DNA, 887 bp, Homo Sapiens; identical to SEQ ID NO: 290050

SEQ ID NO: 401211 - DNA, 1000 bp, Homo Sapiens; identical to SEQ ID NO: 223047

SEQ ID NO: 401212 - DNA, 1000 bp, Homo Sapiens; identical to SEQ ID NO: 223048

SEQ ID NO: 401213 - DNA, 1000 bp, Homo Sapiens; identical to SEQ ID NO: 290052

SEQ ID NO: 401214 - DNA, 1000 bp, Homo Sapiens; identical to SEQ ID NO: 290053

SEQ ID NO: 401215 - DNA, 1000 bp, Homo Sapiens
atatccggagctcttccctgcccaccagtcccccatgtttccagacacccgggtcgctggcacccagaccaccactcatttgcctggaatcccacctaaccatgcccctctggtcaccaccctcggtgcccagctaccccctcaagccccagatgcccttgtcctcagaacccaggccacccagcttcccattatcccaactgcccagccctctctgaccaccacctccaggtcccctgtgtctcctgcccatcaaatctctgtgcctgctgccacccagcccgcagccctccccaccctcctgccctctcagagccccactaaccagacctcacccatcagccctacacatccccattccaaagccccccaaatcccaagggaagatggccccagtcccaagttggccctgtggctgccctcaccagctcccacagcagccccaacagccctgggggaggctggtcttgccgagcacagccagagggatgaccggtggctgctggtggcactcctggtgccaacgtgtgtctttttggtggtcctgcttgcactgggcatcgtgtactgcacccgctgtggcccccatgcacccaacaagcgcatcactgactgctatcgctgggtcatccatgctgggagcaagagcccaacagaacccatgccccccaggggcagcctcacaggggtgcagacctgcagaaccagcgtgtgatggggtgcagacccccctcatggagtatggggcgctggacacatggccggggctgcaccagggacccatgggggctgcccagctggacagatggcttcctgctccccaggcccagccagggtcctctctcaaccactagacttggctctcaggaactctgcttcctggcccagcgctcgtgaccaaggatacaccaaagcccttaagacctcagggggcgggtgctggggtcttctccaataaatggggtgtcaaccttacccaaggaaaaaaaaaaaaaaaaaa

SEQ ID NO: 401216 - DNA, 1000 bp, Homo Sapiens; identical to SEQ ID NO: 223049

SEQ ID NO: 401217 - DNA, 1000 bp, Homo Sapiens
ctccctggctgccagcacccttggcacctttgccttgtcagcccttgtaggggaagatgggaggcttgacatggtccacatccaaaatgcagcgctggctggaggggttgtggtggggacctcaagtgaaatgatgctgacaccctttggggctctggcagctggcttcttggctgggactgtctccacgctggggtacaagttcttcacgcccatccttgaatcaaaattcaaagtccaagacacatgtggagtccacaacctccatgggatgccgggggtcctgggggccctcctgggggtccttgtggctggacttgccacccatgaagcttacggagatggcctggagagtgtgtttccactcatagccgagggccagcgcagtgccacgtcacaggccatgcaccagctcttcgggctgtttgtcacactgatgtttgcctctgtgggcgggggccttggagggctcctgctgaagctaccctttctggactcccccccagactcccagcactacgaggaccaagttcactggcaggtgcctggcgagcatgaggataaagcccagagacctctgagggtggaggaggcagacactcaggcctaacccactgccagcccctgagaggacacgctccttttcgaagatgctgactggctgctactaggaagttctttttgagctcccattcctccagctgcaagaagggagccatgagccagaaggaggcccctttccacaggcagcgtctccacagggagaggggcaacaggaggctgggaaatggtggggagtggggccgtaactgggtacaatagggggaacctcaccagatgcccaacccgactgccctaccagcctgcacatgggtagaagaggccaaattgaggcacccaagtgatccactggccccacgtcacacagttacagtgaagcccaagccaggcctggttgagggtgataaacgccactgtctctaaaaaaaaaaaaaaaaaa

SEQ ID NO: 401218 - DNA, 1000 bp, Homo Sapiens; identical to SEQ ID NO: 290056

SEQ ID NO: 401219 - DNA, 905 bp, Homo Sapiens
tgctggggaccatggagttcacggcgtcccccaagccccaactctcctctcgggccaacgccttctccattgccgcgctcatgtcgagcggcggctctaaggagaaggaggcgacggagaacacaatcaaacccctggagcaatttgtggagaagtcgtcctgtgcccagcccctgggtgagctgaccagcctggatgctcatggggagtttggtggaggcagtggcagcagcccgtcctcctcctctctgtgcactgagccactgatccccaccacccccatcatccccagtgaggaaatggccaaaattgcctgcagcctggagaccaaggagctttgggacaaattccatgagctgggcaccgagatgatcatcaccaagtcgggcaggaggatgtttccaaccatccgggtgtccttttcgggggtggatcctgaggccaagtacatagtcctgatggacatcgtccctgtggacaacaagaggtaccgctacgcctaccaccggtcctcctggctggtggctggcaaggccgacccgccgttgccagccaggctctatgtgcatccagattctccttttaccggtgagcaactactcaaacagatggtgtcttttgaaaaggtgaaactcaccaacaatgaactggatcaacatggccatataattttgaactcaatgcataagtaccagccaagggtgcacatcattaagaagaaagaccacacagcctcattgctcaacctgaagtctgaagaatttagaactttcatctttccagaaacagtttttacggcagtcactgcctaccagaatcaactgataacgaagctgaaaatagatagcaatccttttgccaaaggattccgggattcctccaggctcactgacattgagaggtaa

SEQ ID NO: 401220 - DNA, 1000 bp, Homo Sapiens; identical to SEQ ID NO: 290058

SEQ ID NO: 401221 - DNA, 1000 bp, Homo Sapiens; identical to SEQ ID NO: 290060

SEQ ID NO: 401222 - DNA, 872 bp, Homo Sapiens
gagattggaaacagccaggttggagcagtgagtgagtaaggaaacctggctgccctctccagattccccaggctctcagagaagatcagcagaaagtctgcaagaccctaagaaccatcagccctcagctgcacctcctcccctccaaggatgacaaaggcgctactcatctatttggtcagcagctttcttgccctaaatcaggccagcctcatcagtcgctgtgacttggcccaggtgctgcagctggaggacttggatgggtttgagggttactccctgagtgactggctgtgcctggcttttgtggaaagcaagttcaacatatcaaagataaatgaaaatgcagatggaagctttgactatggcctcttccagatcaacagccactactggtgcaacgattataagagttactcggaaaacctttgccacgtagactgtcaagatctgctgaatcccaaccttcttgcaggcatccactgcgcaaaaaggattgtgtccggagcacgggggatgaacaactgggtagaatggaggttgcactgttcaggccggccactcttctactggctgacaggatgccgcctgagatgaaacagggtgcgggtgcaccgtggagtcattccaagactcctgtcctcactcagggattcttcatttcttcttcctactgcctccacttcatgttattttcttcccttcccatttacaactaaaactgaccagagccccaggaataaatggttttcttggcttcctccttactcccatctggacccagtcccctggttcctgtctgttatttgtaaactgaggaccacaataaagaaatctttatatttatcgaaatattaaagcactcgctctgc

SEQ ID NO: 401223 - DNA, 1000 bp, Homo Sapiens; identical to SEQ ID NO: 117754

SEQ ID NO: 401224 - DNA, 1000 bp, Homo Sapiens; identical to SEQ ID NO: 223051

SEQ ID NO: 401225 - DNA, 1000 bp, Homo Sapiens; identical to SEQ ID NO: 223052

SEQ ID NO: 401226 - DNA, 1000 bp, Homo Sapiens; identical to SEQ ID NO: 290065

SEQ ID NO: 401227 - DNA, 1000 bp, Homo Sapiens
tgcaggaggcctggggccggcgagaaatctcctgtgatgccctgtgaaatggcttgtctcctcccccatcagggcccaccgaaagctcaggggagcacagaagcccatggaagcccagggagatgtccctggggcagacactaaggcaggtgttgaagacaagctgcttgtcaagaagcatttcccggcaagagaggggcaagtctggggctccaactgggtacagcctgggtgcagttataagcccctttggcttacttggtagaagatggctacttggatgtacctcacttaaagatgttttgtaccacactaggtctctgggcccttgtgcttcctgtgggtggggtgagggccaaaggctatggtttcctgcctccaggagaatggagagaaagggcttccaggcccctccaagcctggggaaggacgtggcatccaagctgagccagagggaactgctgctgtcctcccttcatttctgtggaccttggaggctttggctttgtggcagggcctccccaggcagctctgggacctaggagtttgcttctgatagggtcagctttcccatttcccttcaatgcttgggaaccttctcccttagcttcacacttgccgtttcaagccctgctgggaccttgtggcttggctggaatccaggactgtattttcatggagaagaacctgcagattcttccatcctcagctggccatggcccacagctctgcatctgcatctgagcttctcaagactcctggagcatgaggggaatggggcggggccactgctctgtgctgacgggctccgtctcggagattcttgtcctgttttttttctgttgtttttttttggctggtgctggggacaagcctgtgcctgccaaagctcccaggccaagtttgggggctggtgtttggggttgggtttggggttcaggatgctgcagtctgtgcaataataaacccgcatctgctcacggaaaaaaaaaaaaaaaaa

SEQ ID NO: 401228 - DNA, 1000 bp, Homo Sapiens; identical to SEQ ID NO: 290066

SEQ ID NO: 401229 - DNA, 1000 bp, Homo Sapiens
gaaagcatcaagtcaaagtctcccgatgctgggagcaaagcagagagctccgagaacagccgcactgagatggaaggtcggagcagtctcccttccacgtttatccgagccccgccgacctatgtcaaggttgaagttcctggcacatttgtgggaccctcgacattgtccccagggatgacccctttgttagcagcccagccacgccgacaggccaagcaacatggctgcacacggtgtgggaagaacttctcgtctgctagcgctcttcagatccacgagcggactcacactggagagaagccttttgtgtgcaacatttgtgggcgagcttttaccaccaaaggcaacttaaaggttcactacatgacacacggggcgaacaataactcagcccgccgtggaaggaagttggccatcgagaacaccatggctctgttaggtacggacggaaaaagagtctcagaaatctttcccaaggaaatcctggccccttcagtgaatgtggaccctgttgtgtggaaccagtacaccagcatgctcaatggcggtctggccgtgaagaccaatgagatctctgtgatccagagtgggggggttcctaccctcccggtttccttgggggccacctccgttgtgaataacgccactgtctccaagatggatggctcccagtcgggtatcagtgcagatgtggaaaaaccaagtgctactgacggcgttcccaaacaccagtttcctcacttcctggaagaaaacaagattgcggtcagctaagggagaacttgcgtggaaggagcaatgcagacacagtgaaatctctagaatctgctttgttttgtaagaactcatctcctcctgttttctttttcttactgatatgcaaatgatgtttactacgttggttgtgaccacaacctcaggcaagtgctacaatcacgattgttgctatgctgctttgcaaaaagttgaaaaaataaaaaaaaaatgcataccaaaa

SEQ ID NO: 401230 - DNA, 1000 bp, Homo Sapiens; identical to SEQ ID NO: 117755

SEQ ID NO: 401231 - DNA, 1000 bp, Homo Sapiens; identical to SEQ ID NO: 223053

SEQ ID NO: 401232 - DNA, 1000 bp, Homo Sapiens; identical to SEQ ID NO: 223054

SEQ ID NO: 401233 - DNA, 1000 bp, Homo Sapiens; identical to SEQ ID NO: 117757

SEQ ID NO: 401234 - DNA, 1000 bp, Homo Sapiens; identical to SEQ ID NO: 117758

SEQ ID NO: 401235 - DNA, 1000 bp, Homo Sapiens
ttaccctaggtaagaactttgatcactgcttactaggtaaagaatgtttgtactgttccaaaacccaggcttctttattcctttaccactatccatgtgagcattgacaaatcatggcttagaggtgctcactgactcgctaagacgactttggccctgttgatgactggtgctgtgctccagccttatcagttaggggacccaaggtttgtttgggacctgggtacaggtaaaagccagacttggcagggacccctctttctaggctgaaccttgagtccccctgctttttggcagacctaatggatcactgtcttgcagctagttcttcatgtggggcctcttaggccagtgccggaggaggcatgctcctctttctatgccacagaacaaacactactctagcagagcctttcttgcactttaaagtgagattaatttagctgtaatttggttaaaaacttcctaagagagaaaattaagtctactgatttggtataggtaaatggacattaaacttttttaaagtaaaggagatggtagataccgttagattatagtcttgaggttcatgtgaagccagtggtgttaacttactttgatttccttgttcaggtcagggcctggaacgcctgtgcggggaggtcactcaattcaaaattttctgtatgaaagcatttttcaccaaaatgagcctcatccctttatgcaacacataaccttactgagggagggaaatacggaagccacctttttatttctcttcactgtgtacaagttcacttgttgtcttgaacactgtctcaaatacctgctttttgttttggatagtaccttgtctgtataagaagctggcctttccatagagaggccctggagtctaaaattatgagaacaattaatttatttgtgtcttctattatgatctcgttttgacaataaaaatccttactactttctcaaaaaaaaaaaaaaaaaaaaaaaaaaaaaaaaaaaaaaa

SEQ ID NO: 401236 - DNA, 1000 bp, Homo Sapiens; identical to SEQ ID NO: 223057

SEQ ID NO: 401237 - DNA, 1000 bp, Homo Sapiens; identical to SEQ ID NO: 223058

SEQ ID NO: 401238 - DNA, 1000 bp, Homo Sapiens; identical to SEQ ID NO: 117759

SEQ ID NO: 401239 - DNA, 1000 bp, Homo Sapiens; identical to SEQ ID NO: 117760

SEQ ID NO: 401240 - DNA, 1000 bp, Homo Sapiens; identical to SEQ ID NO: 223060

SEQ ID NO: 401241 - DNA, 1000 bp, Homo Sapiens; identical to SEQ ID NO: 223061

SEQ ID NO: 401242 - DNA, 1000 bp, Homo Sapiens; identical to SEQ ID NO: 117761

SEQ ID NO: 401243 - DNA, 1000 bp, Homo Sapiens
tcaccaaggtgaagctggagcaggtgctgaaaggcccagaggaagccctcgtgacctgcagacaagtgctgaggctgtggcagaccctgtacagcttctcccagctgggaggcctagaaaaggatggcagcttcggtgagggcctcaccatgaagaagcagagtggcatgcacctgactttgcctgatgcccatgatgcagactctggctcccggcgggcttcgtccatcgccgcctcccggctggaggaggccatgtcagagctgactatgccctcttcggtcctgaagcagggccccatgcagctgtggaccacgctggaacagatctggctgcaggctgctgagctgttcatggagcagcagcacctcaaggaagcaggtttctgcatccaggaggcggcgggcctcttccccacttctcactcagtactctatatgcggggccggctggctgaggtgaagggcaacctggaggaggccaagcagctgtacaaggaggcgctcacggtgaacccagatggcgtgcgcatcatgcatagcctgggtctgatgctgagtcggctgggccacaagagcttggcccagaaggtgcttcgtgatgccgtggagaggcagagtacgtgccacgaggcgtggcagggcctgggcgaggtgctgcaggcccagggccagaacgaggctgccgttgactgcttcctcaccgcccttgagctggaggccagcagccctgtactgcccttctccatcatccccagagagctctgacgacgctgcagccgcagggagggaggggctggccagagggagaggcagcagggaacgtgggtcagggtggggcaacagtggcatcaggtgcggggcctcagggaaatacatctttagtgaacgcctctgcagctgcagccctcgttctcttggctgggccaagagggccttcctggatttctttgttggtgccttgggaaacagtctgacttgaaccctaaaaaaaaaaaaaa

SEQ ID NO: 401244 - DNA, 1000 bp, Homo Sapiens; identical to SEQ ID NO: 290080

SEQ ID NO: 401245 - DNA, 1000 bp, Homo Sapiens; identical to SEQ ID NO: 290081

SEQ ID NO: 401246 - DNA, 902 bp, Homo Sapiens; identical to SEQ ID NO: 117762

SEQ ID NO: 401247 - DNA, 1000 bp, Homo Sapiens; identical to SEQ ID NO: 290083

SEQ ID NO: 401248 - DNA, 1000 bp, Homo Sapiens
atgcgccgcatggagatgatcagtgacttctgcgagcggcgcttcctcagcgaggtggattacctggtgtgcgtggacgtggacatggagttccgcgaccacgtgggcgtggagatcctgactccgctgttcggcaccctgcaccccggcttctacggaagcagccgggaggccttcacctacgagcgccggccccagtcccaggcctacatccccaaggacgagggcgatttctactacctgggggggttcttcggggggtcggtgcaagaggtgcagcggctcaccagggcctgccaccaggccatgatggtcgaccaggccaacggcatcgaggccgtgtggcacgacgagagccacctgaacaagtacctgctgcgccacaaacccaccaaggtgctctcccccgagtacttgtgggaccagcagctgctgggctggcccgccgtcctgaggaagctgaggttcactgcggtgcccaagaaccaccaggcggtccggaacccgtgagcggctgccaggggctctgggagggctgccggcagccccgtccccctcccgcccttggttttagcagaacgggtaaactctgtttcctttgtccgtcctgttgtgagtaactgaagcctaggccccgtccccacctcaaatcacacacaccccctccccaccacagagacaccattacatacacagacacacacagaaagacacacacagacacaaaatcacacacacaccctccccgccacagagacaccattacatacacagacacacacagaaagacacagacacaaaatcacacacacaccctccccgccacagagacacaccattacatacacagacacgcaatcgcagatacgcccttccggccacagaaacacaccattacacacacatacacagaaagacacacacagacacacaatcacacgcagcccctccccgccacagagacacaccattacatacacagacacacacagaaagacac

SEQ ID NO: 401249 - DNA, 1000 bp, Homo Sapiens; identical to SEQ ID NO: 290085

SEQ ID NO: 401250 - DNA, 1000 bp, Homo Sapiens; identical to SEQ ID NO: 223062

SEQ ID NO: 401251 - DNA, 1000 bp, Homo Sapiens; identical to SEQ ID NO: 223062

SEQ ID NO: 401252 - DNA, 1000 bp, Homo Sapiens
tcaagacagccagtggcatagcgaatgctttaactgcgggaaatgctctgtctccttggtgggtaaaggcttcctgacccagaacaaggaaatcttctgccaaaaatgtggctccggaatggacactgacatctaggagacagtccttgcccacctaaaatccattttgccttcgttgtcactaaagccagaactcagttgcggtcttatttttgacttaagttttagaaaatattcatgtagtttagagtggaaaagtttttgcacacattttgatcgaactatattctaagcacacaaaaagcacagtagaacagaaatgaatatatgctaaatcacaaagacaactctccttgcaaaatactgcactctgctgttagaagcagaggaaaatatctcttcataatcaaatatatgacatatacctaggagctgtggatgtaattactgaagaatgaggtttttcatacctgaagagtaaaagaaaaactaagagatcaaactgagaggtatacatgaggctagtgtttgcattcctggttatatgtaatgtgataaattagctatgaatggtaaaagaacaaaactgatcagagtaaattcattagcaattatcacatttaagaattgttatcatttaaaaatcatcctttttttcacacatactgactgtagaattaaaaaacaaagctacaatttgccctcatacacactgcttccacagcttgctagttctgtgtttactcaatggaatatgagaactgaggacattatggctctcataatctgcataggtataaagaggatcatttctacctagggatagccaaagcatgggtttcaacacgttttgtattaaatatattttcaaagtccacagtgatttttctaaacgcttacagattccatgaaataaaagtctattctttcaagtggagctaaccaggataatctttgtccccaaaggcaaacctttaaaataaatagatcattaaatctt

SEQ ID NO: 401253 - DNA, 1000 bp, Homo Sapiens; identical to SEQ ID NO: 117763

SEQ ID NO: 401254 - DNA, 1000 bp, Homo Sapiens; identical to SEQ ID NO: 290088

SEQ ID NO: 401255 - DNA, 1000 bp, Homo Sapiens
tgacagctcccgggtccccaaacctgttcccctctgctactagccactgagaagtgcactttaagaggtgggagctgggcagacccctctacctcctccaggctgggagacagagtcaggctgttgcgctcccacctcagccccaagttccccaggcccagtggggtggccgggcgggccacgcgggaccgactttccattgattcaggggtctgatgacacaggctgactcatggccgggctgactgcccccctgccttgctccccgaggcctgccggtccttccctctcatgacttgcagggccgttgcccccagacttcctcctttccgtgtttctgaaggggaggtcacagcctgagctggcctcctatgcctcatcatgtcccaaaccagacacctggatgtctgggtgacctcactttaggcagctgtaacagcggcagggtgtcccaggagccctgatccgggggtccagggaatggagctcaggtcccaggccagccccgaagtcgccacgtggcctggggcaggtcactttacctctgtggacctgttttctctttgtgaagctagggagttagaggctgtacaaggcccccactgcctgtcggttgcttggattccctgacgtaaggtggatattaaaaatctgtaaatcaggacaggtggtgcaaatggcgctgggaggtgtacacggaggtctctgtaaaagcagacccacctcccagcgccgggaagcccgtcttgggtcctcgctgctggctgctccccctggtggtggatcctggaattttctcacgcaggagccattgctctcctagagggggtctcagaaactgcgaggccagttccttggagggacatgactaatttatcgatttttatcaatttttatcagttttatatttataagccttatttatgatgtatatttaatgttaatattgtgcaaacttatatttaaaacttgcctggtttctaaaaaaaaaaaaaaaaaa

SEQ ID NO: 401256 - DNA, 1000 bp, Homo Sapiens
gaatgaaaacgcccaaaataattagtaggagttcatctttaaaggggatattcatttgattatacgggggagggtcagggaagaacgaaccttgacgttgcagtgcagtttcacagatcgttgttagatctttatttttagccatgcactgttgtgaggaaaaattacctgtcttgactgccatgtgttcatcatcttaagtattgtaagctgctatgtatggatttaaaccgtaatcatatctttttcctatctatctgaggcactggtggaataaaaaacctgtatattttactttgttgcagatagtcttgccgcatcttggcaagttgcagagatggtggagctagaaaaaaaaaaaaaaaagcccttttcagtttgtgcactgtgtatggtccgtgtagattgatgcagattttctgaaatgaaatgtttgtttagacgagatcataccggtaaagcaggaatgacaaagcttgcttttctggtatgttctaggtgtattgtgacttttactgttatattaattgccaatataagtaaatatagattatatatgtatagtgtttcacaaagcttagacctttaccttccagccaccccacagtgcttgatatttcagagtcagtcattggttatacatgtgtagttccaaagcacataagctagaagaagaaatatttctaggagcactaccatctgttttcaacatgaaatgccacacacatagaactccaacatcaatttcattgcacagactgactgtagttaattttgtcacagaatctatggactgaatctaatgcttccaaaaatgttgtttgtttgcaaatatcaaacattgttatgcaagaaattattaattacaaaatgaagatttataccattgtggtttaagctgtactgaactaaatctgtggaatgcattgtgaactgtaaaagcaaagtatcaataaagcttatagacttaaaaaaaaaaaaaaaaaaaaaaaaaaaaaaa

SEQ ID NO: 401257 - DNA, 1000 bp, Homo Sapiens
ctccctgtccttcctcctctgcgcccgctcactccttcgaggcttcctgctgcagaacgagtttgtggggttcatgtggcggcagcggggacgggtcatcagcctgtgggagcggctggaatttgtcaatggctggtacatcctgctcgtcaccagcgatgtgctcaccatctcgggcaccatcatgaagatcggcatcgaggccaagaacttggcgagctacgacgtctgcagcatcctcctgggcacctcgacgctgctggtgtgggtgggcgtgatccgctacctgaccttcttccacaactacaatatcctcatcgccacactgcgggtggccctgcccagcgtcatgcgcttctgctgctgcgtggctgtcatctacctgggctactgcttctgtggctggatcgtgctggggccctatcatgtgaagttccgctcactctccatggtgtctgagtgcctgttctcgctcatcaatggggacgacatgtttgtgacgttcgccgccatgcaggcgcagcagggccgcagcagcctggtgtggctcttctcccagctctacctttactccttcatcagcctcttcatctacatggtgctcagcctcttcatcgcgctcatcaccggcgcctacgacaccatcaagcatcccggcggcgcaggcgcagaggagagcgagctgcaggcctacatcgcacagtgccaggacagccccacctccggcaagttccgccgcgggagcggctcggcctgcagccttctctgctgctgcggaagggacccctcggaggagcattcgctgctggtgaattgattcgacctgactgccgttggaccgtaggccctggactgcagagacccccgcccccgaccccgcttatttatttgtagggtttgcttttaaggatcggctccctgtcgcgcccgaggagggcctggacctttcgtgtcggacccttgggggcggggagactgggtggggagggtgttgaataaa

SEQ ID NO: 401258 - DNA, 1000 bp, Homo Sapiens; identical to SEQ ID NO: 293468

SEQ ID NO: 401259 - DNA, 1000 bp, Homo Sapiens; identical to SEQ ID NO: 290090

SEQ ID NO: 401260 - DNA, 1000 bp, Homo Sapiens; identical to SEQ ID NO: 290091

SEQ ID NO: 401261 - DNA, 1000 bp, Homo Sapiens; identical to SEQ ID NO: 290092

SEQ ID NO: 401262 - DNA, 1000 bp, Homo Sapiens; identical to SEQ ID NO: 290093

SEQ ID NO: 401263 - DNA, 1000 bp, Homo Sapiens; identical to SEQ ID NO: 223065

SEQ ID NO: 401264 - DNA, 1000 bp, Homo Sapiens
cactggggtctcccgagacttatgctacgtaaaggagctgggcgtccgcgggaatgtacttcgctttctcccagaccaaggtttctttctttacccaaagaaaatttcccaagcttcctcctgcctgcagaagctcctctactttaacctgtctgccatcaaagaaagggaacagttgacattggcccagctgggcctggacttggggcccaattcttactataacctgggaccagagctggaactggctctgttcctggttcaggagcctcatgtgtggggccagaccacccctaagccaggtaaaatgtttgtgttgcggtcagtcccatggccacaaggtgctgttcacttcaacctgctggatgtagctaaggattggaatgacaacccccggaaaaatttcgggttattcctggagatactggtcaaagaagatagagactcaggggtgaattttcagcctgaagacacctgtgccagactaagatgctcccttcatgcttccctgctggtggtgactctcaaccctgatcagtgccacccttctcggaaaaggagagcagccatccctgtccccaagctttcttgtaagaacctctgccaccgtcaccagctattcattaacttccgggacctgggttggcacaagtggatcattgcccccaaggggttcatggcaaattactgccatggagagtgtcccttctcactgaccatctctctcaacagctccaattatgctttcatgcaagccctgatgcatgccgttgacccagagatcccccaggctgtgtgtatccccaccaagctgtctcccatttccatgctctaccaggacaataatgacaatgtcattctacgacattatgaagacatggtagtcgatgaatgtgggtgtgggtaggatgtcagaaatgggaatagaaggagtgttcttagggtaaatcttttaataaaactacctatctggtttatgaccacttagatcgaaatgtca

SEQ ID NO: 401265 - DNA, 513 bp, Homo Sapiens
atgcgccgccgcctgtggctgggcctggcctggctgctgctggcgcgggcgccggacgccgcgggaaccccgagcgcgtcgcggggaccgcgcagctacccgcacctggagggcgacgtgcgctggcggcgcctcttctcctccactcacttcttcctgcgcgtggatcccggcggccgcgtgcagggcacccgctggcgccacggccaggacagcatcctggagatccgctctgtacacgtgggcgtcgtggtcatcaaagcagtgtcctcaggcttctacgtggccatgaaccgccggggccgcctctacgggtcgcgactctacaccgtggactgcaggttccgggagcgcatcgaagagaacggccacaacacctacgcctcacagcgctggcgccgccgcggccagcccatgttcctggcgctggacaggaggggggggccccggccaggcggccggacgcggcggtaccacctgtccgcccacttcctgcccgtcctggtctcctga

SEQ ID NO: 401266 - DNA, 1000 bp, Homo Sapiens; identical to SEQ ID NO: 290095

SEQ ID NO: 401267 - DNA, 1000 bp, Homo Sapiens; identical to SEQ ID NO: 290097

SEQ ID NO: 401268 - DNA, 1000 bp, Homo Sapiens; identical to SEQ ID NO: 290098

SEQ ID NO: 401269 - DNA, 1000 bp, Homo Sapiens; identical to SEQ ID NO: 290100

SEQ ID NO: 401270 - DNA, 1000 bp, Homo Sapiens; identical to SEQ ID NO: 290101

SEQ ID NO: 401271 - DNA, 1000 bp, Homo Sapiens; identical to SEQ ID NO: 223067

SEQ ID NO: 401272 - DNA, 1000 bp, Homo Sapiens; identical to SEQ ID NO: 223068

SEQ ID NO: 401273 - DNA, 1000 bp, Homo Sapiens; identical to SEQ ID NO: 290104

SEQ ID NO: 401274 - DNA, 1000 bp, Homo Sapiens; identical to SEQ ID NO: 290105

SEQ ID NO: 401275 - DNA, 1000 bp, Homo Sapiens
cacactggagagaaatcctatatatgtaatatatgtgggaaagccttcagccagagtgcaaatcttactcaacatcatagaacacatactggagagaaaccatataaatgcagtgtgtgtgggaaagcattcagccagagtgtgcaccttactcaacatcagaggattcataatggagaaaaaccctttaaatgcaatatatgtgggaaagcatatagacaaggcgcaaatcttactcagcatcaaaggattcatactggagaaaaaccctataaatgtaatgaatgtgggaaagctttcatttattcctcatcacttaatcaacatcagagaactcatactggagagagaccctataaatgtaatgaatgtgataaggattttagccagagaacatgccttattcaacaccagagaattcacacaggagagaaaccctatgcatgtcgtatatgtggtaaaaccttcacccagagtacaaaccttattcagcatcaacgtgttcatacaggtgccaaacatcgtaattaatggataagggaaacttcaattcggttttacaactttgtttcaattttgttttgtgcattctatgtgtcagaacattcagaagaagtctgaagaagtgcaatatgttagatactcagcagaagtatcagaagtagtggtatggatataacctatttagatttaatgtgaaatttaagaaggaaacttgacttcttaaccttaatttgatatgattttaattcattacagaaagaaaccctgtgaagggtattcaaaaacataactcatcaactctctatttcaagtacacttatcctttggtatactcgggggattggttccaggaccacccatgtatacgaaaatctacccatactcaagttgcacggtcagcctggtggaacctgtgtatatgaaaagccctacatctatgcaggtttcccatccctgaataatgtgctttcaaactctgttcagttgaaaaaaaaaa

SEQ ID NO: 401276 - DNA, 1000 bp, Homo Sapiens; identical to SEQ ID NO: 117766

SEQ ID NO: 401277 - DNA, 1000 bp, Homo Sapiens; identical to SEQ ID NO: 290107

SEQ ID NO: 401278 - DNA, 1000 bp, Homo Sapiens; identical to SEQ ID NO: 223070

SEQ ID NO: 401279 - DNA, 1000 bp, Homo Sapiens; identical to SEQ ID NO: 290108

SEQ ID NO: 401280 - DNA, 1000 bp, Homo Sapiens; identical to SEQ ID NO: 290110

SEQ ID NO: 401281 - DNA, 1000 bp, Homo Sapiens; identical to SEQ ID NO: 223071

SEQ ID NO: 401282 - DNA, 1000 bp, Homo Sapiens; identical to SEQ ID NO: 290112

SEQ ID NO: 401283 - DNA, 1000 bp, Homo Sapiens
cctttctttgacttattaaaaaagaaatgaaatgggaatcagtggtcttactatatacttctctagaagagattacttaagactgtgtcagtcaactaaacattctaatatttttgtaaacattaaattattttgtacagttaagtgtaaatattgtatgttttgtatcaatagcataattaacttgttaagcaagtatggtcttgataatgcattagaaaaattaaaattaatttttctttttgaaattaccatttttaaatacctttgaaatatcctttgtgtccagtgataaatgtgattgatcttgccttttgtacatggaggtcacctctgaagtgattttttttgagtaaaaggaaatcttgactactttatattcttaaaggaatattctttatatacttcaaatttagaacttaactttaaaagtttttcttctgtaattgttgaacgggtgattattattaactctagataagcaggtactagaaaccaaaactcagaaaatgtttactgttagaattctattaaattttaagtgttgtattctttttcattgggtgatgtcagggtgataaccagacattcatggaaaggcatgcagtttgtccattgtgacagtttgtttaataaaaccacatacacactttatttaagattaaaatctaactggaaagtcagcttggaaaatggacatttccaagtatgtttggtgagtcacagatataaaaatagaaattctgatgagaggtttcagtttttaataccaagtccttaggagtcttaacattggccagcatctgtttatcaaatgacataaatacgtaaacctataagaattaagtttattaattaggcaatttatgtctgtgataattcttacgggagaaagaggatttgattggaaagcagtttgggaagaaagtgctgctgaaatttccagaatttaattgattggttacataaactttttgacttcaaaaaaaaaaaaaaaaaa

SEQ ID NO: 401284 - DNA, 1000 bp, Homo Sapiens; identical to SEQ ID NO: 117767

SEQ ID NO: 401285 - DNA, 1000 bp, Homo Sapiens; identical to SEQ ID NO: 290115

SEQ ID NO: 401286 - DNA, 1000 bp, Homo Sapiens; identical to SEQ ID NO: 223072

SEQ ID NO: 401287 - DNA, 1000 bp, Homo Sapiens; identical to SEQ ID NO: 117768

SEQ ID NO: 401288 - DNA, 1000 bp, Homo Sapiens; identical to SEQ ID NO: 223073

SEQ ID NO: 401289 - DNA, 1000 bp, Homo Sapiens; identical to SEQ ID NO: 290120

SEQ ID NO: 401290 - DNA, 1000 bp, Homo Sapiens; identical to SEQ ID NO: 117769

SEQ ID NO: 401291 - DNA, 1000 bp, Homo Sapiens; identical to SEQ ID NO: 290121

SEQ ID NO: 401292 - DNA, 1000 bp, Homo Sapiens; identical to SEQ ID NO: 223074

SEQ ID NO: 401293 - DNA, 1000 bp, Homo Sapiens
cccacaccctgcttcctcaccccactggctcttgggcaaatgactgttggtaccaggaccctgggggtctcccctacaaagcagaccagcctggggcagatatacctaccacaggagccccctgtctttcataggccaaggatccacatacccatagagttcatggattctagagggtctaggaatctcttgaaattgtccctaaaatactgcatgtgtgtgcatacatgcattttcctggggaaaaagtccatggcttctaaaagaggtccctgatccccaaagggcctgaacctctgctctggattgaagccactgtctgcccaagctgccaccccctaatcttcctccctggcgtgctcaaactgccatcgcctgctccctccacacggcccttggggtcagcagccaagtgtctgtggtccgcagcacctgctctggagggctctccagcagtttcgcctcctgactctcaccagcgtcctctcggcagcactcccgtgcccaagtgcacccctctggacttgccagcgcaggccccttcgctcccagggccatgctttgcctgtcctctgtcgtgatgtttcttccgcagccaggtgcagcctcagatcccctgttcatctgggaagcctcctgccacagcttaggacagaactgggcccagggcaaaggcctctccccagaggatggactagaaggcctgggccacactcgggcatggacctttggggctggggagccggggctgcgcctgttgaatgtaagaggactgctgaccagagggccttcaagagggtctctctgtcctttgctgtggtcagatcaggctctgcacttatcagccggtcctttgtggcaacgcagccctgttctgtttttgcttttcctcttcttgaccaaagcatgtgccactagctgtccttgaggacctcgtctttatgaaacacacacctggaataaaaccacttcttacatgtcaaaaaaaaaaaaaaaaaaa

SEQ ID NO: 401294 - DNA, 1000 bp, Homo Sapiens; identical to SEQ ID NO: 290122

SEQ ID NO: 401295 - DNA, 1000 bp, Homo Sapiens; identical to SEQ ID NO: 290123

SEQ ID NO: 401296 - DNA, 853 bp, Homo Sapiens
ggcctctgtatcgtcgcgaatccgtcgcggaacctgtctttacccagagctaccatgagcaagcggaaccaggtatcgtacgtgcggccagccgagccggcgtttctggcccgcttcaaggaacgggtcggctacagggagggacccaccgtagagactaagagaattcagcctcagcccccagatgaagatggggatcacagtgacaaagaagatgaacagcctcaagtggtggttttaaaaaagggagacctgtcagttgaagaagtcatgaaaattaaagcagaaataaaggctgccaaagcagatgaagaaccaactccagccgatggaagaatcatatatcgaaaaccagtcaagcatccctcagatgaaaaatattcaggtttaacagcaagctcaaaaaagaagaagccaaatgaagatgaagtaaatcaggactcggtcaaaaagaactcacaaaaacaaattaaaaatagtagcctcctttcttttgacaacgaagatgaaaatgagtaagtgtaaatattttgaatttagtctactttgaaagtatatggagtgttcattaaaatcacattttttcctattataaagatactacaagttctttatagaaagtttaggaaatagagaaaaaaatttaataaactacatctattcatcaatacccctctgacttaaaatgccaactctatagaaattagctagtattaacattttgttatttcccttgtgtggttgtatatatatgtaaattatatttttaagcaaaatacattttttgtgtgtaaacaaaattttataaatacaactgtattgcaaaaaaaaaaaaaaaaaaaaaaaaaaaaaa

SEQ ID NO: 401297 - DNA, 1000 bp, Homo Sapiens; identical to SEQ ID NO: 290124

SEQ ID NO: 401298 - DNA, 1000 bp, Homo Sapiens; identical to SEQ ID NO: 290125

SEQ ID NO: 401299 - DNA, 1000 bp, Homo Sapiens; identical to SEQ ID NO: 223075

SEQ ID NO: 401300 - DNA, 1000 bp, Homo Sapiens; identical to SEQ ID NO: 290127

SEQ ID NO: 401301 - DNA, 1000 bp, Homo Sapiens; identical to SEQ ID NO: 223076

SEQ ID NO: 401302 - DNA, 1000 bp, Homo Sapiens; identical to SEQ ID NO: 223077

SEQ ID NO: 401303 - DNA, 1000 bp, Homo Sapiens; identical to SEQ ID NO: 290130

SEQ ID NO: 401304 - DNA, 1000 bp, Homo Sapiens
tacagtacctccagccccagggccctgacctgcgcacctagcttgacatctcacgcacctcccagagctggcgccactgagtaatccggacctcaccacctcttttcctttgagcccaaggcagagctggagctggcgccacccagacagcgtcaggtgtggctggggtaggtttggaggtctgccagttacgccaagtcccctctgagattcgatcaggggactggatagattctttcaggtactcaatcaggaagctggaggtgttagacaccagccccctgcatccttcagtagacctccctctgaacaccacagccaggtcctgccttctgggggcctgaatattccagagctgatgtgatgggctgtgcagaagggggctgtatcaacatcaattagggaaccaaagttgcactatctgggcccagattgtctggttggcaagagcaaagtttccgttgatgaaacagacatcccacaacaaaaacccaagttttctgtgctacatgtgcaatatttgttatgaatgttatcacaagtcattcatcaagttatctttataatcactgtagttagatgtttcatgtccattcaagtgacttttattctgagtgcaatatttcaatagccttgtagtgataactagtgttgcttttgttttagatgatctatgtgcagggcaatgcaatgaagttgaaaacccttgtaaataggagaggttgcaaaccaaatcaagagtatttattactattactgctattattattaggcctgcctttaattttcagtgtaagtgttcagtatgccgcatcctgcctcagtattgatcttgtgttctttgtgccaatatgaaaaggagagggttggttctttcctttattgttgaatgctcccatttaatgctttatggcttttactgtattacttttttagactcccgtctgcacaaaatgcaataaaaataattttattatacccttaaaaaaaaaaaaaaaaa

SEQ ID NO: 401305 - DNA, 1000 bp, Homo Sapiens; identical to SEQ ID NO: 223079

SEQ ID NO: 401306 - DNA, 1000 bp, Homo Sapiens; identical to SEQ ID NO: 223080

SEQ ID NO: 401307 - DNA, 1000 bp, Homo Sapiens; identical to SEQ ID NO: 290134

SEQ ID NO: 401308 - DNA, 1000 bp, Homo Sapiens; identical to SEQ ID NO: 290135

SEQ ID NO: 401309 - DNA, 1000 bp, Homo Sapiens
gagcacaactaagagatcccccagttccaaaggcacttctgagccagagaaaagcttgcggaaggggagaccagccttggcaagccaggagtcatccctttcaagtacatccccttcttctcctcttcctgtaaaagtctctctaaagccctcccgctcccgcagcaaagcagattcttcttccaggggcagtggacggcattcatcccctgcccctgcccaacccaaaaaggagtcatccccgaaatctcaggactccgtgtcatctccttcgccacagaagcagaagtcagcctcggccctcacctacactgcttcctccacatctgccaaaaaggcctcgggccctgccacaaggagccctttcccacctgggaagagcaggacttcagaccacagcttgagtagagagggctccagacaaagcttgggttctgacagagccagcgccacctccacctccaaacccaattcccctcgggtgagccaggcccgagcaggggagggcaggggggccgggaagcacgtgcggagctcctccatggccagcctgcgctcccccagcacaagcatcaagtctggtttgaagagggacagcaagtctgaggacaaggggctgtccttcttcaaatcagccttgagacagaaggaaacccggcgctcgacggatcttggcaagacagccttgctctctaaaaaggctggtgggagctctgttaagtctgtctgtaagaacaccggggacgacgaggcagagagaggccaccagcctccagcttcccagcagccaaatgcaaatacaacgggaaaagagcagcttgtcaccaaggaccctgcttctgccaaacattccctgctgtccgctcgcaaatccaagtcttcccaactagactctggagttccctcgtctccgggtggcaggcagtctgcagagaaatcctcaaaaaagttatcttctagcatgcaaacctctgcacggccttctcaaaaacctcagtga

SEQ ID NO: 401310 - DNA, 1000 bp, Homo Sapiens; identical to SEQ ID NO: 290136

SEQ ID NO: 401311 - DNA, 1000 bp, Homo Sapiens; identical to SEQ ID NO: 223081

SEQ ID NO: 401312 - DNA, 1000 bp, Homo Sapiens; identical to SEQ ID NO: 290138

SEQ ID NO: 401313 - DNA, 1000 bp, Homo Sapiens; identical to SEQ ID NO: 117772

SEQ ID NO: 401314 - DNA, 1000 bp, Homo Sapiens; identical to SEQ ID NO: 290140

SEQ ID NO: 401315 - DNA, 1000 bp, Homo Sapiens
cagtgcctactccagccggaccagcagacccatgcgggatgtcggtgaggaccaggtgcaccctcccctctgccactttccccagaggagcctgcagcaccagctccctcagcctggagctcagcgttttgccacgaggggctatcccatggaggacatgaagctgcaaggtgtaccgatgcctccgggggacctgtgtggtccgacgctgctgctagatgtgtccatcaagatggagaaggactctgggtgtgagggtgctgcagacggctgtgtgcccagccaggtgtggctgggggccagtgacaggagccacccagccaccttccctaccaggatgcacctgaaaacagagccagactctcggcaacaggtgtacatctcgcacctggggcacggcgtgcggggggctcagccccatgggagggccactgctgggcgcagcagggagctgacccctttccaccctgcacactgtgcctgcctggagcccacagacggccttccccagtcggagcctccccaccagctctgtgcacggggccgaggtgaacagtcctgcacctgcagagctgctgaggccgcccctgtggtcaagcgggagcccttggactcaccccagtgggctactcacagccagggaatggtgcccgggatgttgcccaaaagtgccttggccacgctggtcccgccccaagcttcggggtgcacattcctgccatagcgcagtgaccaccatccaagctcagatctgtctgtctacgctcagatgcgtcggtggctgggctgccctgcgcctggtcagtccggagcccgtcctaagacacactctttgcagagctgtgcatgcgcagtctgctagtgtgtgtgtgcagcatacgcaggagcctatcctgaattttgtaaaatatcccaacagttcttaaatgaaaactggccttaagtctattcaagcatgacagcatttctctttgaggaattaaaatctttaggaaagtga

SEQ ID NO: 401316 - DNA, 1000 bp, Homo Sapiens
caaccacgaggcccccagcaagatggcagcggccgtgagcaatgtgtactcgcagaccaacggcgcccagccaccgcctccaagcagcgcaccagccggggccccgccgcagggcccgccgaaggtggtggtgcgcaacgagctcctggacttcaccgccagcctggcccgcgccagtgactcctcttcctccagctccctgggcagtggggaggctgcggggctgggacgggccccctggaggatcccaccctccgccccgcgccccaagcccagccttgaccgcctgatgggggccttcgcctccctggacctcaagagtcagagaaaggaggagctgctggactccaggactccagccgggagaggggctgggacgtcggcccggggccaccactcggaccgagagccactgctggggccccctgcggcccgggccaggagcctgctccccttgccgttggagggcaaggccaaacgcagccactccttcgacatgggggactttgctgctgcggcggcgggaggggtcgtgccgggcggctacagtcctcctcggaaggtctcgaacatctggacgaagcgcagcctctctgtcaacggcatgctcttgccctttgaggagagtgacctggtgggggcccgggggacttttggcagctccgaatgggtgatggagagcacggtctaggtgggggtgggcatgctccctttcctgtgcgcagggtgggagaaggggaaagaatctcactggcaagtgtttgtggagtttccatggtgatgtttacatccagggacagtttcgtctccctgtcaatggcctcgtgtccccccctaccccgcaacacccacatcacctccccaccacccggccggggtgtgctcagggaatgtggactcgctcaaatgccggactgagccctgagtgtttggaaaggcgagactccgcctttctaatcacaaatgtagcctacaagcaagcggctttggattgcttatg

SEQ ID NO: 401317 - DNA, 1000 bp, Homo Sapiens; identical to SEQ ID NO: 223083

SEQ ID NO: 401318 - DNA, 1000 bp, Homo Sapiens; identical to SEQ ID NO: 223084

SEQ ID NO: 401319 - DNA, 1000 bp, Homo Sapiens; identical to SEQ ID NO: 224501

SEQ ID NO: 401320 - DNA, 1000 bp, Homo Sapiens
agtttgcatatgagtgctgctgcagcttcccgagacatcaccttgtttcacgctatggatacattgtatagacacagctatgatttgagcagtgccattagtgtcttagtaccactcggaggacctgttttatgcagagatgaaatggaggaatggtcagcctctgaagctagcttatttgaagaggcactggaaaaatatggcaaagacttcaatgacatacggcaagattttcttccttggaaatcattgactagcatcattgaatattattacatgtggaaaactactgacagatatgtgcaacagaaacgtctaaaagcagcagaagctgagagtaaactgaaacaagtatatatcccaacctacagcaaaccaaatcccaaccaaatatccactagtaatgggaagcctggtgctgtgaatggagctgtggggaccacgttccagcctcagaatcctctcttagggagagcctgtgagagctgctatgctacacagtctcaccagtggtattcttggggcccacctaatatgcagtgtagattatgtgcaatttgttggctttattggaaaaaatatggaggcttgaaaatgcccacccagtcagaagaagagaagttatctcctagcccaactacagaggaccctcgtgttagaagtcacgtgtcccgccaggccatgcagggaatgccagtccgaaacactgggagtccaaagtctgcagtgaagacccgccaagctttcttccttcatactacatatttcacaaaatttgctcgtcaggtctgcaaaaataccctccggctgcggcaggcagcaagacggccgtttgttgctattaattatgctgccattagggcagaatgtaagatgcttttaaattcttaaccttatatgttgtgcttctgaccattttctcttttcctctctttccttttttttttgtttgtttgtttgcaataaacataagttcttgtgtacaaaaaaaaaaaaaaaa

SEQ ID NO: 401321 - DNA, 1000 bp, Homo Sapiens; identical to SEQ ID NO: 117773

SEQ ID NO: 401322 - DNA, 1000 bp, Homo Sapiens; identical to SEQ ID NO: 223085

SEQ ID NO: 401323 - DNA, 1000 bp, Homo Sapiens; identical to SEQ ID NO: 117774

SEQ ID NO: 401324 - DNA, 1000 bp, Homo Sapiens; identical to SEQ ID NO: 117775

SEQ ID NO: 401325 - DNA, 1000 bp, Homo Sapiens; identical to SEQ ID NO: 117776

SEQ ID NO: 401326 - DNA, 1000 bp, Homo Sapiens; identical to SEQ ID NO: 290148

SEQ ID NO: 401327 - DNA, 1000 bp, Homo Sapiens; identical to SEQ ID NO: 117777

SEQ ID NO: 401328 - DNA, 1000 bp, Homo Sapiens; identical to SEQ ID NO: 117778

SEQ ID NO: 401329 - DNA, 1000 bp, Homo Sapiens; identical to SEQ ID NO: 290151

SEQ ID NO: 401330 - DNA, 1000 bp, Homo Sapiens; identical to SEQ ID NO: 223089

SEQ ID NO: 401331 - DNA, 1000 bp, Homo Sapiens; identical to SEQ ID NO: 117779

SEQ ID NO: 401332 - DNA, 1000 bp, Homo Sapiens; identical to SEQ ID NO: 290155

SEQ ID NO: 401333 - DNA, 1000 bp, Homo Sapiens; identical to SEQ ID NO: 117780

SEQ ID NO: 401334 - DNA, 1000 bp, Homo Sapiens
ggggatgtttgggggtggggctgggaccgggtggctttatattgataatgaaatattccagagcaaaacacattgtcctaatgaagttgttgcagctctcttcgttttcttgtgccgctggaattggcttgtgggtcacttgttgtgcaaaagtgaattaatttcaaataggaatcatattgcttttgtgaaacaaagaaaatttaccaccttgtctgatacatagattggaaggcgctcttggtaaagaataacccacaaacacctgatcttgattggaaagcattgtaggtcattagggaaaactgatgatgctgactgttgctccagccgtgttggcaattcaagatgaccttgttactaactgaaagttgctgtcaaccttagcaaacaaaccagctaacaccattacagcactggttaagtagatttttactggcactggctggcgttcagctgaggaaggctaggatacagactttaatgaccaagagccagactagctcgagctagaaatcagcaacaaatacctccttgtgctatttgaatgctaaggtattagttgcaataggcttacgccttcgctcctctagtgaggggaatgagcctgatgacactattactgtttacctgtcaaaccagggtggaaatttagagggatgcaagtacagtatgtctcattaagcagtctctgttgctgattatatgaagataaaattgttgtatatgctgatctgtatgttatgtacattttcacagtgattgaatcattgtaaaaagaaaaaagacaaaaaagaatcaccactgtctattttatgaagatgataaagcagctttattaaattattacagttatgtttcaaatggtgttatctgccacattgtttccttttatctggtggttctctgtttccccctttaaatgtgttttctctgcttcaaaaatttaatgcattttagtattaaaggctattatggaaaaagtaataaaaaaaaaaaa

SEQ ID NO: 401335 - DNA, 1000 bp, Homo Sapiens; identical to SEQ ID NO: 290157

SEQ ID NO: 401336 - DNA, 1000 bp, Homo Sapiens
tcttctcctgtgatatctgactcgaccgctaactggaggactggttcctggacccattccattaaactacattataaaccttgttgccttcacccttcagcctcccgctccaggcacatcccaccttacctctcacttggctgatttgaccttctctttcacccacatgcctaagacctgccctgacaatcagagtatggactacaagagtgtatggtgtatgaggttctgaactcccatcaccaccgaggccagtcctagttcttggtccagggagaagtctaggcaggataaatcatatcttacctcaaaaaacccttagcgtatcttgccatgtgtcagcaggcaaacttgaggaagccctggttctatttcacctggcaggggagcctataaggagagcgatgcccactcctataccacccttgtaacccagtagacttgccccatatgccccaactcatagcacctaaaatgggtctccagggtccttgccctgtttatagtatccatcctgaaccattcgttttgacccataataatagtgatagtataatggctaccagttattgataatgtatcatgtgacaggcattgggctaaactcttgacaagcaccatctcactacattcttacagtaacacaacttgttcttgtgttgtcagcttctgacctcttgatctgttgtttatggcctttgtcttgtccctcagtgggggttctctagctctgacctctgggtgaccccctcagttgttgattgctctcactccccttggctgttgtgcttcatggccagcactcttgatgagggtcttggtctataaacaggcatagatagctagaacataatgtgagcagtgtttgccttcaggtggtggggttatgggtagtttttattttcttccttctacttctctatacatttcagattctctacagtaagcatgtgttacatttgtaattataaaagtaaataaacttcatttatgaaaaaag

SEQ ID NO: 401337 - DNA, 1000 bp, Homo Sapiens; identical to SEQ ID NO: 117781

SEQ ID NO: 401338 - DNA, 1000 bp, Homo Sapiens; identical to SEQ ID NO: 290159

SEQ ID NO: 401339 - DNA, 1000 bp, Homo Sapiens; identical to SEQ ID NO: 223093

SEQ ID NO: 401340 - DNA, 1000 bp, Homo Sapiens; identical to SEQ ID NO: 117782

SEQ ID NO: 401341 - DNA, 1000 bp, Homo Sapiens; identical to SEQ ID NO: 223095

SEQ ID NO: 401342 - DNA, 1000 bp, Homo Sapiens; identical to SEQ ID NO: 117783

SEQ ID NO: 401343 - DNA, 1000 bp, Homo Sapiens
agagtggagttttattgcttctttgcctctccatgaatggccaatttggaaaagcagagatgggctttcagcagaatatcaaccaatacatttttcacatgcaaaactcatcaccagttgcctttttctaacttaatggacattttgttggtgttggtgcaagggcaataggatgtaaatttgtatataatctaatgtcttcattattaattgaatagtacatgttaacattttaatctatttaaatttactttgaaatatatacatacatatgaatgaaaggttgttacagagcctcaaagctgttgcagactatcccaagagaaaggatctggcacaaaggaatctgcctttcctccgtctcaagtctcccacccttgactggttgggatttgctcgtccagcctctagacacttcccaaagcaagactggacacatgccgagggcgttgcggatagtgcctcaccattgcccaccctgctgcccaactcctgtgagagaaaaaccaatcaatgtttacaaaatggaaaaggacacagcatgtcctttgaactccctaagtaaggcccacagttcttgatgcagagaaccaaagtgaatcatagaaaagcttttgctaacagtccgctttccaggaggcaaacttgtgtttatccaaacctgatccccatgatggggacttttctagagcaccccaaatgtcatggggagagagggactctttctgctccctcagagctactcttcacttgtccctgcttccggcaccaagttcataatagagatcttctggccagagaatcaggggagaggagaggcctgatggggcagagctggacgaagtctgctaagagagatggaggctgtggcggactccttccaactcacgatttatcctcagctcagagtgtattttgaatatgagcaaatgtttatgtacgtatgagatttcaagttaataaatcatctctatggctaaaaaaaaaaaaaaaaaaaaaa

SEQ ID NO: 401344 - DNA, 1000 bp, Homo Sapiens; identical to SEQ ID NO: 223096

SEQ ID NO: 401345 - DNA, 1000 bp, Homo Sapiens; identical to SEQ ID NO: 223097

SEQ ID NO: 401346 - DNA, 1000 bp, Homo Sapiens; identical to SEQ ID NO: 117784

SEQ ID NO: 401347 - DNA, 1000 bp, Homo Sapiens; identical to SEQ ID NO: 223098

SEQ ID NO: 401348 - DNA, 1000 bp, Homo Sapiens
gtgtttgatatcacagtgtttgtaaattctatgaaaaatgcattttccaaacaacttatacatgctttttatgactatgcctaatgtaaagaaaatgtattacattctgtatgtacaaagattaaaaatcaacctcttttttgtgctttaaaatgactttgggattaaaaaagcatatttcccaatcattgtcttcattccactacaaagtcacctcacagcatcttgctccactcggcatctctgtgaaagcaacatgaaatgaactgtagtaggtgtgtagtttggggaagtcaaatggccattttatgtatgtgcatttggtatcatgggccgtggaacagaatatatgttggacctctgaaaagttgtaaggggccaattctaagtattcttcacggcagccagaagttaatggtggtagcagctgaggtatggttgttggacgaggccgatttttttttttaacatggaacaatgaaaccaacaacaaacatttttaaaattaaaatggataatttgtaaatagtttttagcttttaaaatttaaagtgtttttgagtgtgaaaagttgagtaaaactatttgcaactggttttcagaaaagagaaaagaaacaacaaaggaattgaaacaggcagggagatcttaatacctaatttcatcatttctgaaaatgtactgttttagaatgtattacaatatcaatgtgaatatcttgaatcctgttacaaatcctgcactgtattaaacatgtaaattaattgtttgtctgattagccaatctcaccacccaaatggggaggtatacatgtttgaagaactgtgtaactcagtaattgatttgttctgatgttgtaactcaatagaagtgttttggaaggaagcatggtgtgtgagacagtgtctgttcttttgtgccagctctgtatgatgtttgtaagaccatgtttgtaagacatgaataaattgctgcttttgcccaaaaaaaaaaaaaaaa

SEQ ID NO: 401349 - DNA, 1000 bp, Homo Sapiens; identical to SEQ ID NO: 290166

SEQ ID NO: 401350 - DNA, 1000 bp, Homo Sapiens; identical to SEQ ID NO: 290167

SEQ ID NO: 401351 - DNA, 1000 bp, Homo Sapiens; identical to SEQ ID NO: 290168

SEQ ID NO: 401352 - DNA, 1000 bp, Homo Sapiens; identical to SEQ ID NO: 223099

SEQ ID NO: 401353 - DNA, 1000 bp, Homo Sapiens; identical to SEQ ID NO: 117785

SEQ ID NO: 401354 - DNA, 1000 bp, Homo Sapiens
tataaaaataaccattgaagctaacttgctaatgtacttaggcaagccacttcccatctctgggcctcgtctttcctccctctaaaatcaaagagctgaattatgtgatccttgaggtctcttccacttataataccaactgtcttgtcagactggcaaattatattggcctctccttatgtggtggtttttttggtaggtcatagttccttatacacagacacctgcatcatcgaaggtctttttttcctaaaaaaaaaaaatgggattttagttcttattctgtgataactatcctcctcatataatactattctttttgacaccatttgaaggaaccaatatttggaccttattttgaggttgtctgtctcgaagaaaaagaaaataaaatgtataggcagggttccttcaattggcattttccccagaattgtgagccaaagcctatagtaattgcagacagcaaatgattccggatctctaaaaggctctctcagatgaaaagggagtaaaggaaaaaagaggtcaaccactgtttctgataatgtacttgagtttcattgttcttttagtttgtattcttataaaaaatgtttacactctgcagattgattttttttttttagtactgtggctttcttttcctattttatgaaaaaaatgataatctttttgtaaaattgtctgtgaaatataaacattaatatataaagaaaaaccttgaagtgctgtatagtgaagtataaattaatgttttattgatttgtgaagaatttaagactattatataattatcttggtggatctattttatgcatgaccttttaacctttgactttgcttatttcccactacgaaggggaaggtagattttatgaatgattttaatagcaaatatattttataaagtgaaaatccagtgtggaggtagcaaagcatctatctattctgaatcatgtttggaaataaaattgctccatctgggaatgtgctttca

SEQ ID NO: 401355 - DNA, 1000 bp, Homo Sapiens
atcatcaagaactacctcttcagaaaaccccgtcccagcaaagcaacattttagacaatggacaagaagatgtatctcctagtggccaatggaatccttatccacttgggaggcgggatgtacctccggacaccattactaagaaggcaggcagccacatccagacgttgatggggtcccaaagccttcagcatcgcagccgggagcagcagccgtatgaaggaaatataaacaaagtgaccatccagcaatttcagtcaccattgcctattcagatcccctcttcacaggccacccggggacctcagcctggacggtgcttaattcaaactaaagggcaaaggagtatggatggatatccagagcagttttgtgtgagaatagaaaagaatcctggccttggatttagtatcagtggtggaattagtggacaaggaaatccattcaaaccttctgacaagggtatctttgttactagggttcagcctgatgggccagcatcaaacctactgcagcctggtgataagatccttcaggcaaatggacacagttttgtacatatggaacatgaaaaagctgtattactactgaagagtttccagaacacagtagacctagttattcaacgtgagcttactgtctaaatattttttataaatagtgaagatacgtctagccagacctaatgttcaaaaataaatttatacatagaaacaaattttgccaattgctggaccaatggcaaacattagtgccaaatgtataatactatatgttagcactgaccatccttaaaaaatgttaactctataaatatgatgttcatgtggttatgtattagttttaattgtcagcctctggctgtgcattggtgcagttttgtttctgtttttgtttttgtttttaatcaaataagtttcttctcaaaatggatttcatataatttcggagcacggaagcacacacaagctctttatgaattctgctctccatcagaaac

SEQ ID NO: 401356 - DNA, 1000 bp, Homo Sapiens; identical to SEQ ID NO: 117786

SEQ ID NO: 401357 - DNA, 1000 bp, Homo Sapiens; identical to SEQ ID NO: 290172

SEQ ID NO: 401358 - DNA, 1000 bp, Homo Sapiens; identical to SEQ ID NO: 290174

SEQ ID NO: 401359 - DNA, 1000 bp, Homo Sapiens; identical to SEQ ID NO: 117787

SEQ ID NO: 401360 - DNA, 1000 bp, Homo Sapiens; identical to SEQ ID NO: 117788

SEQ ID NO: 401361 - DNA, 1000 bp, Homo Sapiens; identical to SEQ ID NO: 117789

SEQ ID NO: 401362 - DNA, 1000 bp, Homo Sapiens; identical to SEQ ID NO: 223103

SEQ ID NO: 401363 - DNA, 1000 bp, Homo Sapiens; identical to SEQ ID NO: 290179

SEQ ID NO: 401364 - DNA, 1000 bp, Homo Sapiens; identical to SEQ ID NO: 290180

SEQ ID NO: 401365 - DNA, 1000 bp, Homo Sapiens
ctaacctataagaagttgctctgagcccatttatttaaactctttagttcaccatcagatggacctttctctcacaagctagcttattccaaattatttgtcttattaatcaccagaaaatggtcatatcaaatgttctttcttttttgttctaaaggttgcattttcagttataggggaaaaaatattttctctaagatagaagaagttatttcagtattagctataggtgctacctacctcttggggacatggccctgtttgcgctaaccattacaatgatcttttagaactctgtatccaaagagctacttcgtgacactggccatctgagtcacagatgtgaagtcgatttcactttataactaaccagtcctacatattaagacttctaagtgtccatatgcctcttttttggtataatatataaagtcagcagggactcccctttcccttagggcatactactgtcagtcagaactgcaagatgtgaatgaagctcttaacggcttggagtgtctttctggaagaaattgccttttttttttttttcatgttagcaggtaaaaaatcattcacccaatttgaagcatagaagaaaatagttgctgaggttttttaataaccattcctactatctgtgttcccttagatactcctgtaattcttaatgtgaatagtttgttaatattgctgtaaagtattatattgtatgatttgaagacagactatatgtcattttattatactccatcaatctataatatattagactgatgctttatctaaaatgctttgagtttgtataatatatcttgacaaattttactaccatatgttatgtaataaatgtgtatttttgtacttgcagaaactgctgctaacttttaaagttgtttggttttcaaggcactgataatggatatgtatgaagtccatgctgtctgttaaataaaatgccattctgcagaattaaccatccaaaaaaaaaaaaaaaaaa

SEQ ID NO: 401366 - DNA, 1000 bp, Homo Sapiens; identical to SEQ ID NO: 290181

SEQ ID NO: 401367 - DNA, 1000 bp, Homo Sapiens; identical to SEQ ID NO: 117790

SEQ ID NO: 401368 - DNA, 1000 bp, Homo Sapiens; identical to SEQ ID NO: 223104

SEQ ID NO: 401369 - DNA, 1000 bp, Homo Sapiens
cagccagaaaaggaggaggcacgggtgagctggcagggacacactgcctttggggctcctgggctcatttggatgagcaagattcgctgacaaatggctgtggggatggtggggtggatggtcagggagggatcctcagggagggatatgctggtgtgagcagccagagggagagtgtgtctccttcctgaaggaacttccaaatggaactcccgatttcaggtgggctaaaagagggcttaggtttggaaaagggtgtccttctgtgcccttgttaatttattttatagtgatttggttcaaagatgtttacaggacacacacacacacacacacacacacacacacacacacacacccctagagaaaagtacagatttccagtggatatttcaagcacagttctgctgctgtggcttcagctttggaagctgtcaatcccggagcaactttcccaactacccaaccccaccatggccaggacatgtgcaatgccagccccttcttgtcttggcacatgcacagacccagtcccctcacggtagggcacccctgacctacgggcttccaagagagcagctgcagtggttgggaggagcttgaccagtgtgccccaaggagtggagtagagcccaatctaagtattccttgctgcttggaaccctccctgtttggaaccctccccaaagaggcagtcaggctgatgctcagtgctttgtgctccctgctccttcccgcgtagccaggtgggcccaagggtgcctggcagggagcactacccctggacccctcctgctcgctctggggaccctgccagggaaggccactgggtgttcacctgcaaagtttctggttgtcactgcacagtggtcgcgtcatccatgggtattaaaaggacactgtcaagtacttttttaaactagtttttagggttttttaaaactctctgttgtttgtaatattctcttaaaagcttgaaaataaaacttctttccctacc

SEQ ID NO: 401370 - DNA, 1000 bp, Homo Sapiens
gacgaagataacggcttctggaagatcccacatcccgtcatcacaaaaaccagcctcccagtagcagtttcaactgggccacagaacaaaccagcccgcaaaacctctgcagcagacaatggcgagccgaacatggaggaggaccgctacaggctcatgctcagtcggagcaacagtgaaaacattgccagcaactacttccgatctaagtgggccagccagatcctcagcacagacgccaggaagagcctcacacatcacaactcgccaccaggcctcagctgcccactcagcaacaactctgccatcccacccacccaggcccctgaaatgccccagccccggcccttccgcctcgagtccctcgacatccctttcaccaaggccaagcgtaagaaaagcaaaagcaactttggcagtgagcctctgtgagcacagctgcttgccattgcctgccttataggcatgtagagactgccaggccctcccagggcagccccaaccaggtctcctcccacctgccacacagcgctccggggcctgagggctccctcagccctgggaagacacattcccttccctgttccccagagagcccacctctgccctgggcaggagcccctcggaggctgtatagtcctccttagagaggcctgctccagctgttcataccacatcagtgtttccgtctgctcacctgccacagagcccacacccatgcccaccagtgttggtctttgcctcaaagcctgagacctgcttcacggccttcaccagccctgatggagagggcagcagctgccacgtggaggaagctcaatatcagctgggaaggaactgtgcctctgtctgactggccccacttcctaagcactgccctgccccatggggtggcacaggggtcccacagcaggtcttcctgcactgcccacccctggctggtctgtggcccaaggaaggccactccacattaagctgcccaataaactgcttttaagat

SEQ ID NO: 401371 - DNA, 1000 bp, Homo Sapiens; identical to SEQ ID NO: 223105

SEQ ID NO: 401372 - DNA, 1000 bp, Homo Sapiens; identical to SEQ ID NO: 290184

SEQ ID NO: 401373 - DNA, 1000 bp, Homo Sapiens; identical to SEQ ID NO: 117792

SEQ ID NO: 401374 - DNA, 1000 bp, Homo Sapiens; identical to SEQ ID NO: 117793

SEQ ID NO: 401375 - DNA, 1000 bp, Homo Sapiens; identical to SEQ ID NO: 290187

SEQ ID NO: 401376 - DNA, 1000 bp, Homo Sapiens; identical to SEQ ID NO: 117794

SEQ ID NO: 401377 - DNA, 1000 bp, Homo Sapiens; identical to SEQ ID NO: 290189

SEQ ID NO: 401378 - DNA, 1000 bp, Homo Sapiens; identical to SEQ ID NO: 117795

SEQ ID NO: 401379 - DNA, 1000 bp, Homo Sapiens; identical to SEQ ID NO: 290191

SEQ ID NO: 401380 - DNA, 1000 bp, Homo Sapiens; identical to SEQ ID NO: 290192

SEQ ID NO: 401381 - DNA, 1000 bp, Homo Sapiens; identical to SEQ ID NO: 117797

SEQ ID NO: 401382 - DNA, 1000 bp, Homo Sapiens; identical to SEQ ID NO: 117798

SEQ ID NO: 401383 - DNA, 1000 bp, Homo Sapiens; identical to SEQ ID NO: 290195

SEQ ID NO: 401384 - DNA, 1000 bp, Homo Sapiens; identical to SEQ ID NO: 290196

SEQ ID NO: 401385 - DNA, 1000 bp, Homo Sapiens; identical to SEQ ID NO: 117799

SEQ ID NO: 401386 - DNA, 1000 bp, Homo Sapiens; identical to SEQ ID NO: 117800

SEQ ID NO: 401387 - DNA, 1000 bp, Homo Sapiens; identical to SEQ ID NO: 290199

SEQ ID NO: 401388 - DNA, 1000 bp, Homo Sapiens
acgagcggacacagagccaggcggatggcgagcagcggggccagcgcagcatgagtgtggcggccggctgctggggccgcgccatgactggccgcctggagccgggggcagccgcgggccccaagtagggcaccgtgagtgcagcgcggggtctccatggtgctaggccagggtggccagccccgccaggaggcctggcctgggcacacgcactgacgtgggcctgggagattgtcccagggccttgtggaggacacgggccgcaccacacagtgctccctgccctgcctcacgtcctcgggcctgacgggtccggcttgtcatggaagctggcagggaccaccagccccaggatggcagagggaccagaacctcccactcagactggcccgggaggttctcccagacattttgccctgtgtggatctccaagtgtcctggtgccaggtgtgggcccaggcgcagcctgccacctccccatccactggccaccctcactcccaggtcccctcccatttggtagcagctccaacaggggtccagcctgcatcttgttaactcgagtttctcaactgttcaacctcactggttttgcactgatttttgagagcggagacccattaccacctcctatggctacagccccgttgacatgcatgaaactcagtacctgctgacccaggacctacaaccacactgaaggctccagtgcggcagagcctcgtgcaagcaggagagaaaggctgtatcttaatttctgcaccccggaccctgcccacctgtctgcctgccccgcctggagcccaggccagtgttgtttccagcctcaggccacgggctggacgggcctggccgcctcttccgctccctgccatcagtcaaggccgcccgcccacgtttctacgcctttctacttctcaatctgatttctatgaggtttttttaaacgagcaatccttggctgcttccttttcttaactctttcagtactgagagcagc

SEQ ID NO: 401389 - DNA, 1000 bp, Homo Sapiens; identical to SEQ ID NO: 290200

SEQ ID NO: 401390 - DNA, 1000 bp, Homo Sapiens; identical to SEQ ID NO: 290201

SEQ ID NO: 401391 - DNA, 1000 bp, Homo Sapiens; identical to SEQ ID NO: 290203

SEQ ID NO: 401392 - DNA, 1000 bp, Homo Sapiens; identical to SEQ ID NO: 117801

SEQ ID NO: 401393 - DNA, 1000 bp, Homo Sapiens; identical to SEQ ID NO: 117802

SEQ ID NO: 401394 - DNA, 1000 bp, Homo Sapiens; identical to SEQ ID NO: 223111

SEQ ID NO: 401395 - DNA, 1000 bp, Homo Sapiens; identical to SEQ ID NO: 290207

SEQ ID NO: 401396 - DNA, 1000 bp, Homo Sapiens; identical to SEQ ID NO: 223112

SEQ ID NO: 401397 - DNA, 1000 bp, Homo Sapiens; identical to SEQ ID NO: 117803

SEQ ID NO: 401398 - DNA, 1000 bp, Homo Sapiens; identical to SEQ ID NO: 290210

SEQ ID NO: 401399 - DNA, 1000 bp, Homo Sapiens; identical to SEQ ID NO: 290211

SEQ ID NO: 401400 - DNA, 1000 bp, Homo Sapiens
ttgctaaaattcgactaaatttgggtaaaaaaagaaaaatggtaaaagtttacacaaaaaccgatggcctggttgctgttcatcctaaatctgttaatgtggagcaaacagactttcactacaactggcttatctatcacctaaagatgagaacaagcagtatatacttgtatgactgcacagaggtttccccatactgtctcttgttttttggaggtgacatttccatccagaaggataacgatcaggaaactattgctgtagatgagtggattgtatttcagtctccagcaagaattgcccatcttgttaaggaattaagaaaggaactagatattcttctgcaagagaagattgaaagtcctcatcctgtagactggaatgacactaaatccagagactgtgcagtactgtcagctattatagacttgatcaaaacacaggaaaaggcaactcccaggaactttccgccacgattccaggatggatattacagctgacagcttttcaggggtggtctgaaaagccagtttgacagccattcttcatcattgtttaaattttggctggatgccaaaccctgggacatgaacaattttcatgtgtaaggtagaagccttcagtaggtagtaaagacttaatgtgcatgacttgatgttatatgtagagatatatatatatatatatataccataaaagcaatatgttctctgatcatatactctgctgtggtcatgcccactctttgggagtatattccctttatatatattgagtattgtaccacttgagaaattcctttgttctgttatacaaaattaatctttctgctcataatgattgatgataccaccagtaaaaataggatgtttaccccaaaacaagtgtcaattaagaatttgaacacaaccacattttttaaaatgaaacttctatcggaagtaaattaatttgttgtaataaagtccagtatttaataaaatgtacaatgttaaatctc

SEQ ID NO: 401401 - DNA, 1000 bp, Homo Sapiens; identical to SEQ ID NO: 290212

SEQ ID NO: 401402 - DNA, 1000 bp, Homo Sapiens; identical to SEQ ID NO: 223114

SEQ ID NO: 401403 - DNA, 1000 bp, Homo Sapiens; identical to SEQ ID NO: 290214

SEQ ID NO: 401404 - DNA, 1000 bp, Homo Sapiens
aaattcaaatgatcacattttattctttctcaaaaaaaaaaagtttttttaaattaaaaaaggaattgtttccttcacagctatgaataagctttcaggttttattaaaacctagaggaaaaaatcaggaatgacctgaatctcaacccaaatattaaacaaaatccacataatccctcatttcaatttccaattccattaagggaccctctctttttggatggcagagatggttttttaatgaaatcccaccatctatctgagtgagtctggcaggctttttagttcctgagttaaatttgtaatagaaccaaggcaatgctgctgactttgatatgtatgactcagtctttcaatatgtggttttcaaaaaattgttgaagacgtgacttcatagcaatatatagagaataaattaaaatcagcagattgagttttcaacattgcaaaatcagttttttacctctttcctaccaatttcacattttgcagaaacttgttcacatttccaacaatatcagaattagaaaacagttcagataacaagaaagattaaaaattagggaaattctgatatcaccataaagcactattttacatttagagattacatttaagataaagtcatcatacacaaaaacaataaatatttataactttctctataaggtccgcatatactgtatatattgaaacaatctgaatgactagtagatttcatatgaccattgttatttccactttctccaatacttgtattttatgctacatgtaatgaagttggacctttttattatttagtaattcctatatgttcctatacttttcattttcaagatgattgctctattgtttcatgttgtttctagcaatatatctccatgagatatgcactttgtttcatattgaaaagtataaaatttatctttcaattcctgtgtgtgtatcctatggttatctgtatgtattattttctattctaataaaatttataacaagc

SEQ ID NO: 401405 - DNA, 1000 bp, Homo Sapiens
aatcccactaaatgagctgtacccaccactcattaacctctgggaaggtgacagcgagaaagacaaagatggttctgcagacaccaagccaacccaggtcgacacatccagaagctattacatgtggtaactcagaggatattttgcttctggtagtaaggagcacaaagacgtttttgctttattctgcaaaagtgaacaagttgaagacttttgtatttttgactttgctagtttgtggcagagtggagaggacgggtggatatttcaaatttttttagtatagcgtatcgcaagggtttgacacggctgccagcgactctaggcttccagtctgtgtttggtttttattcttatcattattatgattgttattatattattattttattttagttgttgtgctaaactcaataatgctgttctaactacagtgctcaataaaatgattaatgacaggatggggttcccctgtgcttttaccagtagcatgaccccttctgaagccatccgtagaaagtactttgtcctccaaaaagctaacatacggttttgaagcagcattgaaacttttgtagcaatctggtctatagacttttaactcaagaagctaaggctagacttgttaccttcgttgaatgatgttagttgactgtactgtaatgttgtatcaactgaattgaatgtttgcctttaaacaatgaattttctttttctttccttttttttttttgttgtaatagttaaagaggcttagaacaagctaacaggcaatagaaatatgtatatcagattttttaatgtaacaaactacatgttaattgttatcttattctttttatctttagtagacacttttaaaagaaaagacaattttgttgtgtttaactcaccaacacgtggtgtataatgaagacagaactataataaattagttttgttctgattttttaaaaaaaaaaaaaaaaaaaaaaaaaaaaaaaagaaaaaaaaaaaaaaa

SEQ ID NO: 401406 - DNA, 1000 bp, Homo Sapiens; identical to SEQ ID NO: 290215

SEQ ID NO: 401407 - DNA, 1000 bp, Homo Sapiens; identical to SEQ ID NO: 223115

SEQ ID NO: 401408 - DNA, 1000 bp, Homo Sapiens; identical to SEQ ID NO: 117804

SEQ ID NO: 401409 - DNA, 1000 bp, Homo Sapiens
atgctgcagatcgtgtgcagtgacacctgggccgatgaggaccggtgctgtgagctccctgcctcgagggatggagagacctgccccgccttcgtgtctgcctgttcctgttcctcagagacccctgggcccccaggacctcaaggacccccaggcctccctgggaggaatggcaccccaggagagcagggcttcccagggcccaggggtccaccaggggtcaaaggagagaagggagaccatgggcttccaggcttgcagggccaccccggccaccagggcatccccgggagagttggcctccagggaccaaagggaatgagaggcctggagggaactgctggcctgcctggaccccctggccccagggggttccagggcatggcaggggccaggggcactagtggagagcgaggacctccagggaccgtggggcccacaggactgccagggcccaaaggggaacgaggagagaagggcgagcagcagtcccttgccaccctctaccagcttgtgagccaggcctcacacgtgtcaaagttcgactccttccacgagaacaccaggccccccatgcccatcttggagcagaagctggagccgggcactgagcccctggggtcacctggcacccgcagcaaggccctggttcctggagaatgggggcgtggtggccgccaccttgagggcagaggggagcctggagctgttggtcagatgggcagccctgggcagcagggggctagcacccagggcctctgggagtgacaggacattttctgcactgccccgaggaacgctgagccttcctccctgggtttgtctggacaccgagagcgaccacatcctggagaagccaggagaaaagctcaggaagagcctgcaggtggaaggagagggaagcagcggcctcggccaaggcccaccccatactcttggctctgtagcatttccaagttcagataaacccctgagtgctcacccaaaaaaaaaaaaaaaa

SEQ ID NO: 401410 - DNA, 1000 bp, Homo Sapiens; identical to SEQ ID NO: 223116

SEQ ID NO: 401411 - DNA, 1000 bp, Homo Sapiens; identical to SEQ ID NO: 223117

SEQ ID NO: 401412 - DNA, 1000 bp, Homo Sapiens
ttttactcaagtcttctctagtcaatgaggggcacccagtgcttctagggcaggctgggtggtggtcccctaggtatcagcctctcttactgtactctccgggaatgttaacctttctattttcagcctgtgccacctgtctaggcaagctggcttccccattggcccctgtgggtccacagcagcgtggctgccccccagggccaccgcttctttcttgatcctctttccttaacagtgacttgggcttgagtctggcaaggaaccttgcttttagcttcaccaccaaggagagaggttgacatgacctccccgccccctcaccaaggctgggaacagaggggatgtggtgagagccaggttcctctggccctctccagggtgttttccactagtcactactgtcttctccttgtagctaatcaatcaatattcttcccttgcctgtgggcagtggagagtgctgctgggtgtacgctgcacctgcccactgagttggggaaagaggataatcagtgagcactgttctgctcagagctcctgatctaccccaccccctaggatccaggactgggtcaaagctgcatgaaaccaggccctggcagcaacctgggaatggctggaggtgggagagaacctgacttctctttccctctccctcctccaacattactggaactctatcctgttaggatcttctgagcttgtttccctgctgggtgggacagaggacaaaggagaagggagggtctagaagaggcagcccttctttgtcctctggggtaaatgagcttgacctagagtaaatggagagaccaaaagcctctgatttttaatttccataaaatgttagaagtatatatatacatatatatatttctttaaatttttgagtctttgatatgtctaaaaatccattccctctgccctgaagcctgagtgagacacatgaagaaaactgtgtttcatttaaagatgttaattaaatgattgaaacttg

SEQ ID NO: 401413 - DNA, 1000 bp, Homo Sapiens; identical to SEQ ID NO: 290216

SEQ ID NO: 401414 - DNA, 1000 bp, Homo Sapiens
tacagcgatgtgactgacagcaaggcaatcgggtccctagctgtgggccacctcaccaagtgcagccatgccttccacctgctgtgcctcctggccatgtactgcaacggcaataaggatggaagtctgcagtgtccctcctgcaaaaccatctatggagagaagacggggacccagccccagggaaagatggaggtattacggttccagatgtcgctccccggccacgaggactgcgggaccatcctcatagtttacagcattccccatggtatccagggccctgagcaccccaatcccggaaagccgttcactgccagagggtttccccgccagtgctaccttccagacaacgcccagggccgcaaggtcctagagctcctgaaggtggcctggaagaggcggctcatcttcacagtgggcacgtccagcaccacgggtgagacggacaccgtggtatggaacgagatccaccacaagacagagatggaccgcaacattacgggccacggctatcccgaccccaactacctgcagaacgtgctggctgagctggctgcccagggggtgaccgaggactgcctggagcagcagtgacctcgcaccccagcacgcccgcctctggtggccaccccgctgccccatggctggctgggtggccaggcaggaagtgcccagcccgagaggctgggaggtttgttgagggtgtggggtgtgccccacctgaagccggggctccccctgcctgcctctctctcctcctcccctctgggaattgggcagccctgggcagttgtactcatgggggcttaggatgcagctacctcagtgcgcagggcccgtctgtcctctgggggctgcttcgggcccgcggtgctcggggcctggtgtggggcgagtagagacttccccagcctggacgggcgtgggttctgggtcagcttcttttacctcaattttgtttgcaataaatgctctatagccaaaaaaaaaaaaaaaa

SEQ ID NO: 401415 - DNA, 1000 bp, Homo Sapiens
gctccatctaaatcttggacaccccgtacatttccaagaaatggagtctctacacttaagtgaagaggaaaggcaggaagagctggacagcatgattaggatgaacaaggagaagctggaggaatgtaccagaaggaatggccaggttttcataaccaacttggccaccttcaccgagaagttcctactgcagttggatgaggtggtcaccattgacgatgtccaggttgcaaggatggagccccccaaacagaaattatcaatgctcatacgaaggaaactcgctgggctctccctgaaggaagagagtgagaaacccctgattgaacgtggaagcaggaagtggccagggatcaaacccaccgaagtcaccatccaaaacaagattcttctccagccaacatcatcgatttccaccaccaaaaccaccctgggccacctggcggccgtggaagcccgagatgctgtgtacctgaaatatttagcatcatttgaggaggagctaaagaggatccaggatgactgtacatctcagataaaggaggctcagcgctggaaggacagctggaagcagtccctgcacactatccaaggcctgtatgtgtgaccctccgccccaccatgaataaacactttcttatacagactccttccctgtccatctacctgcctacctactttccgtccatccctccctcccttcatccctccacccctgctctgtgccgggcactgtagctttaccagcgaacaggacacagcatggtccctgcccacgtggagccctcttcccatgaggaaggcaagcatgaaaggggaattccacttggttagcagggagggtgagtaccaggaatcagtcacttcaaataggcaccagagcttcaaaggacatcacctccaaacagcatgctgggcagggcacgtcatcttgaaaaatgaaataaaggtcatgggaaaatgatattttaatttaacagaataaacaagtatgggttat

SEQ ID NO: 401416 - DNA, 1000 bp, Homo Sapiens; identical to SEQ ID NO: 117805

SEQ ID NO: 401417 - DNA, 1000 bp, Homo Sapiens
ccaccatctggagcgagagctcgccaaggctgagaagctgtctctggaggaaggcgggaaggatgcccggggcttgctatccggcctgcggcggcggaagcggcccctgagctggcgggctcacggggacgggccccagcacccagatcctgacccctgtgcccgggccggcattcacacctcgggctccctcagctcccgcttctccgaaccatctgtggaccagggccccggggcaggcatccccagtgccctggttctcatcagcattgtgatctgtgtgagccttatcatcctcatcgccctcaacgtcctgctcttctaccgcctctggtccctggaaaggacagcccacacctttgagtcctggcacagcctggccctggccaagggcaagttcccccagacggccacagagtgggccgagatcctggcgctgcagaagcaattccacagcgtggaggtgcacaagtggaggcagatcctgcgggcctccgtggagctcctggatgagatgaagttctcgctggagaagctgcaccaaggcatcacagtctcagaccctccctttgacacccagccccggcccgatgacagcttttcctgaggaccccggccacgcagctgttcccccacatggacagatggacacacagagcctcggcggccactgctggcacggtgtgagcgccaggcatctcccacccgcccctcccgacggcccaaccaggggctgtgcagacgtggggaccacggaaccgagatgcactttagaccagggagctggcccggcctctggcaggccccccactaacttattttgcccggctgaggttgtggggggcgcctcctggggtgcacgattccctcagctctgggtttaatgtattatatttatttggggccgacagtgccccaataaagggtcagaagtgaaaaaaaaaaaaaaaaaaaaaaaaaaaaaaaaaaaaaaaaaaaaaaaaaaaaaaaaaaaaaaaaa

SEQ ID NO: 401418 - DNA, 1000 bp, Homo Sapiens; identical to SEQ ID NO: 292579

SEQ ID NO: 401419 - DNA, 1000 bp, Homo Sapiens; identical to SEQ ID NO: 290218

SEQ ID NO: 401420 - DNA, 1000 bp, Homo Sapiens; identical to SEQ ID NO: 117807

SEQ ID NO: 401421 - DNA, 1000 bp, Homo Sapiens; identical to SEQ ID NO: 290222

SEQ ID NO: 401422 - DNA, 1000 bp, Homo Sapiens; identical to SEQ ID NO: 223121

SEQ ID NO: 401423 - DNA, 1000 bp, Homo Sapiens; identical to SEQ ID NO: 290224

SEQ ID NO: 401424 - DNA, 1000 bp, Homo Sapiens; identical to SEQ ID NO: 117809

SEQ ID NO: 401425 - DNA, 1000 bp, Homo Sapiens; identical to SEQ ID NO: 117810

SEQ ID NO: 401426 - DNA, 1000 bp, Homo Sapiens; identical to SEQ ID NO: 290227

SEQ ID NO: 401427 - DNA, 1000 bp, Homo Sapiens; identical to SEQ ID NO: 223123

SEQ ID NO: 401428 - DNA, 1000 bp, Homo Sapiens
tggagtgcatggaagagcctaatcaccttgatgtggacctggagacccggatccctgtcatcaataaggtggatggtactttgctggtgggtgaggatgcccctcgccgggctgaactggagatgtggttacagggtcatccagagtttgctgttgatccccgatttctagcgtatatggaggatcgcagaaaacagaagtggcaaagatgtaaaaaaaataataaggcagaattgaactgtttgggaatggaaccagtacagacagctaactctagaaatgggaaaaagggtcatcacactgaaacggtgttcaaccgggttttgccagggcctattgcaccagagagcagcaagaagcgggcccgtaggatgcgaccagacctttctaagatgatggccctcatgcagggtggaagcactgggtctctatctctgcataacacgttccaacacagcagtagtggcctacagtctgtgtcatctttgggtcacagcagtgccacttctgcatctttgccttttatgccatttgtgatgggtggtgcacaatcatcccctcatgtagactccagcaccatgcttcatcaccaccaccaccacccccacccccaccatcaccaccatcaccatccaggcttgagagcccctggctacccctcttcaccagtgactaccgcctctggtactaccttgcggttgccaccactgcaacctgaggaggatgacgatgaggatgaagaagatgatgatgacttatctcagggctatgatagctcagaaagggacttctcactcattgatgatcctatgatgccagctaactcagactccagtgaagatgctgatgactgaagccccagcatgggccccattgcttgggcggctgctgtattttcatttactctggcccttggactatggaaacgtgggaggggcaggggagatgtggggaagtccaggactccaggaggtgaaaaggaaaaaaaaaaaaaaaaaaa

SEQ ID NO: 401429 - DNA, 1000 bp, Homo Sapiens; identical to SEQ ID NO: 290229

SEQ ID NO: 401430 - DNA, 1000 bp, Homo Sapiens; identical to SEQ ID NO: 290230

SEQ ID NO: 401431 - DNA, 1000 bp, Homo Sapiens; identical to SEQ ID NO: 290231

SEQ ID NO: 401432 - DNA, 1000 bp, Homo Sapiens; identical to SEQ ID NO: 290232

SEQ ID NO: 401433 - DNA, 1000 bp, Homo Sapiens
agcaattacctgatttccaaagtccttttgtagcaaatgtcacctcattcgtggtctttttacctatcctaagcttatgatgatgagttatgtatgccaaatatttatctgaagagtttctcctcattgtgaatgtgtatgtaaaatatgaagacaagaaagggtgctttcatctgaggaaccaaggggtgagagtatcccaaaggaggacaccagcatcatcttttcttcgtactccaggacccaccaatattccagttctgggtcatttagagagataatggggcgtttattcccctattacctttgctaagtgctatattattggctgtttctcccgtaaccatgctgaaaagggggtcttagggagaactgtcatccaagtggcattcctagtaagttgggtagaaatgacattttccagagctgaaggagtgaagagcccttggccatactagggctctccttcccccggggagtgggaattcagccacattcagaattcacatcgcctttgttatgtccagaggagaggcataaaaaggcactctcccccaccacccctaccgaatctgggtttggtttggttttatttaactagcaaagttaatccagtaatcgcaaattactccagatggttaaagaaaaccctttcagaatacagaacgagaaaactagagtttgaccaataagaccaatttctgccatgaagaaccgggggacgcaagttaattgtttaacgtactctcattttaagcaccttctttcctgtctcttgattgttttttctgaaggaagtgtaaagaatgtctcagtctgccttaaaggaactgtgaaggcttctctgtaatttaagcttgattgaagtgaactgaaacattgtctaatgtctttgtggctttagagcttttgttatattgtgcctataaagcaaattatgtttacataaaaatataaataaagtattcagcatagcaaaaccccaaaaaaaaaaaaaaaa

SEQ ID NO: 401434 - DNA, 1000 bp, Homo Sapiens; identical to SEQ ID NO: 223124

SEQ ID NO: 401435 - DNA, 1000 bp, Homo Sapiens; identical to SEQ ID NO: 290233

SEQ ID NO: 401436 - DNA, 1000 bp, Homo Sapiens
aggaatcactcctatactctgtacaaccgaagggagatggaagaaactgaggagatcgtagacagtccaaacaggcctggcaacaactttttgatgcaggtcctaagcttcatctttattatgggcaaccatgccagggagtctgcagtctgggcctttctgcggggcttaggggttcaagctgggagaaagcatgtgattacctgcagatacttgagtcagcgctatatagacagtttacgggttcctgacagtgatccagtgcaatatgagtttgtatggggtcctagagcccgtttggaaacctctaagatgaaagccttgcgatatgtggccagaatccacagaaaggaaccacaggactggccacagcagtacagggaggcaatggaagatgaggccaatagagctgatgttgggcacaggcaaatctttgttcacaacttcaggtagaggaatgcatggcagtcagaggggccttgcaaggaggggcctttgagcctcagttctcatgtattggggggtgggggtgggtacatattgtatttggtatttgtgttccagttatatttatgtcttttcatatttagttctggtgtggtgtctggaaatgtttcaactgttttaatatattgtctgattgggtaaatgtgattgaccacttgctgtctctgttgtattttggtatgagttttgatagctctataaaatgttttggaaatctttccatcttgttgcattatctagaaaagaatatagcatatagctatagatataggcttttccttgaaagcttgaaaaaaattcgccagtaaaataatctagcttaaagtgataaactaacaaacaaatataacaacaactgaaaaggcactctaaattgtggctggcttccctttctgtctgctattgtatgaagaatactgatgtttacctgtatttgctttgctgtactaaaatgtaatgaaaaataaaagattaataaatgaaacataatgct

SEQ ID NO: 401437 - DNA, 1000 bp, Homo Sapiens; identical to SEQ ID NO: 223125

SEQ ID NO: 401438 - DNA, 1000 bp, Homo Sapiens; identical to SEQ ID NO: 223126

SEQ ID NO: 401439 - DNA, 1000 bp, Homo Sapiens; identical to SEQ ID NO: 223127

SEQ ID NO: 401440 - DNA, 1000 bp, Homo Sapiens; identical to SEQ ID NO: 290237

SEQ ID NO: 401441 - DNA, 1000 bp, Homo Sapiens; identical to SEQ ID NO: 290238

SEQ ID NO: 401442 - DNA, 1000 bp, Homo Sapiens; identical to SEQ ID NO: 290239

SEQ ID NO: 401443 - DNA, 1000 bp, Homo Sapiens
tgtggggcacaggacatccaggataagttttcttctatcctcagccggggccaagaagcctatgagagactgctgtggaatggccgctattacaactatgacagcagctctcggcctcagtctcgtagtgttatgtctgaccagtgtgctggacagtggttcctgaaggcctgtggcctaggagaaggagacactgaggtgtttcctacccaacatgtggtccgtgctctccaaactatctttgagctgaacgtccaggcctttgcaggaggggccatgggggctgtgaatgggatgcagccccatggtgtccctgataaatccagtgtgcagtctgatgaagtctgggtgggtgtggtctacgggctggcagctaccatgatccaagagggcctgacttgggagggcttccagacagctgaaggctgctaccgtaccgtgtgggagcgcctgggtctggccttccagaccccagaggcatactgccagcagcgagtgttccgctcactggcctacatgcggccactgagcatatgggccatgcagctagccctgcaacagcagcagcacaaaaaggcctcctggccaaaagtcaaacagggcacaggactaaggacagggcctatgtttggaccaaaggaagccatggcaaacctgagcccagagtgagccgtctgaactgtgggagggaagtgctaacagcccagcctccagcctggcctttcctccttcccctctgaacctcctgcaaccctgagccatcaggacaatcataccccttcccttctctccacccaattgtgccagtaaatgggggttgagggtgacctaggcagcattagaatcacttatttatttctttcctcacctgttccctgactgcgtgaaatgttcagggaggtcagttgatttccccaggtacattcatggtgtgacagacacatgggtacaaataaaagacccagaaagccaaaaaaaaaaaaaaaaaaaaaaaaaaaaa

SEQ ID NO: 401444 - DNA, 1000 bp, Homo Sapiens; identical to SEQ ID NO: 117812

SEQ ID NO: 401445 - DNA, 1000 bp, Homo Sapiens; identical to SEQ ID NO: 290241

SEQ ID NO: 401446 - DNA, 1000 bp, Homo Sapiens; identical to SEQ ID NO: 117813

SEQ ID NO: 401447 - DNA, 1000 bp, Homo Sapiens; identical to SEQ ID NO: 117814

SEQ ID NO: 401448 - DNA, 1000 bp, Homo Sapiens
tggagcccaggttgcaggtggtgagctgctggtgggtgagggtgtctttaagatgcccaccgtgacagtgccccagcttgagctggacgtggggctaagccgagaggcacaggcgggcgaggcggccacaggcgagggtgggctgaggctgaagttgcccacactgggggccagagctagggtggggggcgagggtgctgaggagcagcccccaggggccgagcgtaccttctgcctctcactgcccgacgtggagctctcgccatccgggggcaaccatgccgagtaccaggtggcagagggggagggagaggccggacacaagctcaaggtacggctgccccggtttggcctggtgcgggccaaggagggggccgaggagggtgagaaggccaagagccccaaactcaggctgccccgagtgggcttcagccaaagtgagatggtcactggggaagggtcccccagccccgaggaggaggaggaggaggaggaagagggcagtggggaaggggcctcgggtcgccggggccgggtccgggtccgcttgccacgtgtaggcctggcggccccttctaaagcctctcgggggcaggagggcgatgcagcccccaagtcccccgtcagagagaagtcacccaagttccgcttccccagggtgtccctaagccccaaggcccggagtgggagtggggaccaggaagagggtggattgcgggtgcggctgcccagcgtggggttttcagagacaggggctccaggcccggccaggatggagggggctcaggctgcggctgtctgaagcccctagtcagatggggatcccttcttgccttcctttctctaccccctcgctgttgtgtgtgtgataactagcactaaccctaagagggccgggaggtgggtgactgaccagggctggcagggaggcctgctcctgtctctctggcaggagtgcctgtaccccaccaagccatgtgaataaaataatctggaagta

SEQ ID NO: 401449 - DNA, 1000 bp, Homo Sapiens; identical to SEQ ID NO: 290244

SEQ ID NO: 401450 - DNA, 1000 bp, Homo Sapiens; identical to SEQ ID NO: 223132

SEQ ID NO: 401451 - DNA, 1000 bp, Homo Sapiens; identical to SEQ ID NO: 290245

SEQ ID NO: 401452 - DNA, 1000 bp, Homo Sapiens
gcacatcaagagttaactctgccttctgggccaaattcgaaataaccagtccatttttccttttttttttttttttttttaaatggtggaatgtctctcagcacagttgcggcttcctcaaaccctgaaagcatctgtgtttattatactcgggtgtcactcactgttgatgtctgcacctacgtttccacctcctccccctccttcagccagcctatgataacactaaagattattaatgttggttttgtatctcgttaaagacagaattgtcacttgtagtatttctgtagcattcagcgctgctgtggctaacaccactgtgtatgtttcatcattgctctgaaggtcaaaagcctcattttattttgctggtttgattttttttttttaaagaagaaaaaaaaactgccctgaattaaatggctgttttaacagtaggctcttagcattataccacatagtcatttttcatgttcttgtttaacaggcactgaggttctggtttaaattaaatagctgcaaatgagacaatttataacccattaggttgggtggaaaattgtttctcaaaagcaaataagtaataaatctggtatctgcctataactcacagttgataagaaagtggccatttctcactagcactatatatgatttgggctctgggtaatttggaagtgttaggtttgtgtctttgtagcagtatttttattagaaaagaatctattggccttttacagggtattaatccctttgtcacctaccattgatgccttaagttttctgagtctcaattaaaaatcttccttttcttgatgcatgacaagtgtaatcagtacttgctcatttatttgtctgtatttagtttatgctgtactatttaattatccttccagcgttttttttttctccttacaaatatgatactctttagtgttaagctaaggcattgattcatgtatctgtccttataatgaattaataaactattttccag

SEQ ID NO: 401453 - DNA, 1000 bp, Homo Sapiens
ctgtgctgatgtcgtggatcgagaacgcttctgccgctgggcgggcctacctcgacagggctttcccatcatctttcacggcgtaatgggcaaagatgagcgtgaaggcaacagcccatccttcttcaaccctgaagaggctgccacagtgacttcctacctgaagctgctcctggccccctcctccaagaagggcaaagctcgcctgagccctcgaagtgtgggcgtcatctccccgtaccggaaacaggtggagaaaatccgttactgcatcaccaaacttgacagggagcttcgaggactggatgacatcaaggacttgaaggtgggttcagtagaagaattccaaggccaagaacgaagcgtcatcctcatctccaccgtgcgaagcagccagagctttgtgcagctggatctggactttaatctgggtttccttaagaaccccaagaggttcaatgtagctgtgacccgggccaaggccctgctcatcatcgtggggaacccccttctcctgggccatgaccctgactggaaagtattcctggagttctgtaaagaaaacggagggtataccgggtgtcccttccctgccaaactggacctgcaacagggacagaatttactgcaaggtctgagcaagctcagcccctctacctcagggccccacagccatgactacctcccccaggagcgggagggtgaagggggcctgtctctgcaagtggagccagagtggaggaatgagctctgaagacacagcacccagccttctcgcaccagccaagccttaactgcctgcctgaccctgaaccagaacccagctgaactgcccctccaagggacaggaaggctgggggagggagtttacaacccaagccattccaccccctcccctgctggggagaatgacacatcaagctgctaacaattgggggaaggggaaggaagaaaactctgaaaacaaaatcttgttctatgcaaaaaaaaaaaaaaaaaa

SEQ ID NO: 401454 - DNA, 1000 bp, Homo Sapiens; identical to SEQ ID NO: 290247

SEQ ID NO: 401455 - DNA, 1000 bp, Homo Sapiens; identical to SEQ ID NO: 290249

SEQ ID NO: 401456 - DNA, 1000 bp, Homo Sapiens; identical to SEQ ID NO: 290250

SEQ ID NO: 401457 - DNA, 1000 bp, Homo Sapiens
acgcagagatcgcccgctggggccagacactacccactacttcatccacagatgagggcaaccctaagagggaaggcggagatcgcagggccagcgggcgcaggaagtgacttcccacccccaggacctgacacatctcgtctcccctcttttccgcactgtgggcacaaagacactttttcttccgcaggggcgggagcccctagttccaacactgaggacgcgtgacatggtgggcaccggaaaggaggggacttctcctgcaccccaagaagtggtggggagattgctgcccctatagccatatctcggccccttcccactcaccacccccaccccaggtgctgggggtcccttatttttatgcaataactgagcttgatgggggtgggcagggggccagttgagccaagcccccagccccgatctgcagatcctgccccaagaagctggggtggtgggggcagtaattcctgcccccctctctgccctagggatgggcacgggggcgctggtgaggtcccctggaccatccagggtgctagggggcagggaggggacaccccctccccgcctttacctcacttccaatgctgccttgatctctgtctgggaggggggagtgaaggggccctagccccctgcactccgccgcctcagagccatgcggttaattcctgacttagtttatttttgcaaaacgtcgatctcctcctcccccgccccgcatccgcgaaggcttttaatgggaggggcgtcaaagctcaaaactgttttcctctctcctcccccctccagttgtaaatgccacttcatgaggggaggggcgaggggaagcccacccctgcatgcttctggctggagcacctccctggggagtcgggggattgggttgtgggcagtccccatggccgcctggagaagccgctggggcccgggggtgtggggcggtgtggcgggcgcacactgtatgtacctataataaaccctttggctttga

SEQ ID NO: 401458 - DNA, 1000 bp, Homo Sapiens; identical to SEQ ID NO: 223135

SEQ ID NO: 401459 - DNA, 1000 bp, Homo Sapiens
tattaaggatacatataataaccctgtaatttacatcactgagaatgggtttccccagagtgacccagcgcctcttgatgacactcaacgctgggagtatttcagacaaacatttcaggaactgttcaaagctatccaacttgataaagtcaatcttcaagtatattgtgcatggtctcttctggataactttgagtggaaccagggatacagcagccggtttggtctcttccacgttgattttgaagacccagctagaccccgagtcccttacacatcggccaaggaatatgccaagatcatccgaaacaatggccttgaagcacatctgtaggcaagatggctgagaaatacaggagaggcgtctgcttttggaaaggaaatctgctttggtgatgatctttcaggcaatctcaacttacttctttaatcaacatttaatatcaatggatctgtgattaaaaggtctgaatatgtaatgcctcgtgaagtatttaataatggcctttatttgtatttggatcaatgaggtttttaaaaaaaatggaagagaaaaccactaaccttgatttttgtattgcaaaatcagatagacctggaaacataaatttaaatccttagacatttttctagaaaaaaatgcaaagtttataaagatgatacaaccatgatttgcaactgtaacaggagaccatttattataagcgtacctgtttgtgaacttaattattctgattccataagctgtttttgcttaggtgatccactgccatgtgatccataatttttctacataaaaaatcaaagttaaaagtcacattatacagttatgcattcatttcaacaaaatagtgaattgataatctacttgttaatatattcggcccatattttgtgtgtttggacaaggtacatctcccttttgcctaatgaacttttgaaaaataataaaataatagaataaattagactttgaatggcaaaaaaaaaaaaaaaaaaa

SEQ ID NO: 401460 - DNA, 1000 bp, Homo Sapiens; identical to SEQ ID NO: 290252

SEQ ID NO: 401461 - DNA, 1000 bp, Homo Sapiens; identical to SEQ ID NO: 290253

SEQ ID NO: 401462 - DNA, 1000 bp, Homo Sapiens; identical to SEQ ID NO: 117815

SEQ ID NO: 401463 - DNA, 1000 bp, Homo Sapiens; identical to SEQ ID NO: 117816

SEQ ID NO: 401464 - DNA, 1000 bp, Homo Sapiens
ggcctcctgcagctgtgagctcctgactgatgcagtcgacctgccccgccccccagagacgacagccgtgggtgcagtggtgacagccccccacagccgaggtcgagatgccgtcagagaatccctgatccacgtcccgctagagacctttctgcagaccctggaatccccgggcggcagcggcagtgacagcaataacacaggggaacagggtgcagagacggatcccgaggctgaacccgagctggagctatccgactacccatggttccacgggacactgtcccgggtcaaggctgctcaactggttctggcaggggggccccggaaccacggcctcttcgtgatccgccaaagtgagactcggcctggggagtacgtgctgaccttcaacttccagggcaaggccaagcacctgcgcctgtccctgaacggccacggccagtgtcacgtacagcatctgtggttccagtctgtgcttgacatgctccgccacttccacacacaccccatcccactggagtcagggggctcggccgacatcacccttcgcagctatgtgcgggcccaggaccccccaccagagccgggccccacgccccctgccgcgcccgcgtccccggcctgctggagcgactcgcccggccagcactacttctccagcctcgccgcggccgcctgcccgcctgcctcgccctccgacgccgccggcgcctcctcgtcttccgcctcgtcgtcctctgccgcgtcggggcccgcccccccgcgccccgtcgagggccagctcagcgcgcggagccgcagcaacagcgccgagcgcctgctggaggccgtggccgccaccgccgccgaggagcccccggaggccgcgcccggccgcgcgcgcgccgtggagaaccagtactccttctactagcccgcggcgccgcccgggtgggacacgccaagctcttcagtgaagacacgatgttattaaaagcctgttttagggactgcaaaa

SEQ ID NO: 401465 - DNA, 1000 bp, Homo Sapiens; identical to SEQ ID NO: 223138

SEQ ID NO: 401466 - DNA, 1000 bp, Homo Sapiens; identical to SEQ ID NO: 288672

SEQ ID NO: 401467 - DNA, 1000 bp, Homo Sapiens; identical to SEQ ID NO: 115533

SEQ ID NO: 401468 - DNA, 1000 bp, Homo Sapiens; identical to SEQ ID NO: 117817

SEQ ID NO: 401469 - DNA, 1000 bp, Homo Sapiens
gaagcagtggataaataaggctgttggagataaacttcctgaatgtgaagcagtatgtgggaagcccaagaatccggcaaacccagtgcagcggatcctgggtggacacctggatgccaaaggcagctttccctggcaggctaagatggtttcccaccataatctcaccacaggggccacgctgatcaatgaacaatggctgctgaccacggctaaaaatctcttcctgaaccattcagaaaatgcaacagcgaaagacattgcccctactttaacactctatgtggggaaaaagcagcttgtagagattgagaaggtggttctacaccctaactaccaccaggtagatattgggctcatcaaactcaaacagaaggtgcttgttaatgagagagtgatgcccatctgcctaccttcaaagaattatgcagaagtagggcgtgtgggttacgtgtctggctggggacaaagtgacaactttaaacttactgaccatctgaagtatgtcatgctgcctgtggctgaccaatacgattgcataacgcattatgaaggcagcacatgccccaaatggaaggcaccgaagagccctgtaggggtgcagcccatactgaacgaacacaccttctgtgtcggcatgtctaagtaccaggaagacacctgctatggcgatgcgggcagtgcctttgccgttcacgacctggaggaggacacctggtacgcggctgggatcctaagctttgataagagctgtgctgtggctgagtatggtgtgtatgtgaaggtgacttccatccagcactgggttcagaagaccatagctgagaactaatgcaaggctggccggaagcccttgcctgaaagcaagatttcagcctggaagagggcaaagtggacgggagtggacaggagtggatgcgataagatgtggtttgaagctgatgggtgccagccctgcattgctgagtcaatcaataaagagctttcttttgacccaaaa

SEQ ID NO: 401470 - DNA, 1000 bp, Homo Sapiens
cccggcagccgctgctgctacaggtgtcggtgcagagggagcatctgggcccgctggcgtccggcgcccacaagctggtccgctttgcctcgcagggggcgccagccgggcttggggagccccagctggagctgcacaccctggaccttggggactatggagctcagggcgactgtgaccctgaagcaccaatgaccgagggcacccgctgctgccgccaggagatgtacattgacctgcaggggatgaagtgggccgagaactgggtgctggagcccccgggcttcctggcttatgagtgtgtgggcacctgccggcagcccccggaggccctggccttcaagtggccgtttctggggcctcgacagtgcatcgcctcggagactgactcgctgcccatgatcgtcagcatcaaggagggaggcaggaccaggccccaggtggtcagcctgcccaacatgagggtgcagaagtgcagctgtgcctcggatggtgcgctcgtgccaaggaggctccagccataggcgcctagtgtagccatcgagggacttgacttgtgtgtgtttctgaagtgttcgagggtaccaggagagctggcgatgactgaactgctgatggacaaatgctctgtgctctctagtgagccctgaatttgcttcctctgacaagttacctcacctaatttttgcttctcaggaatgagaatctttggccactggagagcccttgctcagttttctctattcttattattcactgcactatattctaagcacttacatgtggagatactgtaacctgagggcagaaagcccaatgtgtcattgtttacttgtcctgtcactggatctgggctaaagtcctccaccaccactctggacctaagacctggggttaagtgtgggttgtgcatccccaatccagataataaagactttgtaaaacatgaataaaacacattttattctaaaaaaaaaaaaaaaaaaaaaaaaaaaaaaaa

SEQ ID NO: 401471 - DNA, 1000 bp, Homo Sapiens
caaccctcgggtgcgcccactgtccaagtgacccgtgagacggagcggtccttccccagagcctcggaagacgaagtgacctgccccacgtccgccccgcccagccccactcgcacacgggggaactgcgcagaggcggaagagggaggctgccgaggggccccgaggaagctccgggcacggcgcgggggacgcagccggcctaagagcgagttggcactgagcaagcagcgacggagtcggcgaaagaaggccaacgaccgcgagcgcaatcgaatgcacaacctcaactcggcactggacgccctgcgcggtgtcctgcccaccttcccagacgacgcgaagctcaccaagatcgagacgctgcgcttcgcccacaactacatctgggcgctgactcaaacgctgcgcatagcggaccacagcttgtacgcgctggagccgccggcgccgcactgcggggagctgggcagcccaggcggttcccccggggactgggggtccctctactccccagtctcccaggctggcagcctgagtcccgccgcgtcgctggaggagcgacccgggctgctgggggccaccttttccgcctgcttgagcccaggcagtctggctttctcagattttctgtgaaaggacctgtctgtcgctgggctgtgggtgctaagggtaagggagagggagggagccgggagccgtagagggtggccgacggcggcggccctcaaaagcacttgttccttctgcttctccctggctgacccctggccggcccaggcctccacgggggcggcaggctgggttcattccccggccctccgagccgcgccaacgcacgcaacccttgctgctgcccgcgcgaagtgggcattgcaaagtgcgctcattttaggcctcctctctgccaccaccccataatctcattcaaagaatactagaatggtagcactacccggccggagccgcccaccgtcttgggtcgccctaccctcactca

SEQ ID NO: 401472 - DNA, 1000 bp, Homo Sapiens; identical to SEQ ID NO: 290258

SEQ ID NO: 401473 - DNA, 1000 bp, Homo Sapiens; identical to SEQ ID NO: 117819

SEQ ID NO: 401474 - DNA, 804 bp, Homo Sapiens; identical to SEQ ID NO: 290260

SEQ ID NO: 401475 - DNA, 1000 bp, Homo Sapiens; identical to SEQ ID NO: 223140

SEQ ID NO: 401476 - DNA, 1000 bp, Homo Sapiens; identical to SEQ ID NO: 117820

SEQ ID NO: 401477 - DNA, 1000 bp, Homo Sapiens; identical to SEQ ID NO: 117821

SEQ ID NO: 401478 - DNA, 1000 bp, Homo Sapiens; identical to SEQ ID NO: 290262

SEQ ID NO: 401479 - DNA, 1000 bp, Homo Sapiens; identical to SEQ ID NO: 290263

SEQ ID NO: 401480 - DNA, 1000 bp, Homo Sapiens
actcacgcccttcaccgtgacccggcgcatcggccacccctaccagaaccggacgccgcccaagcgtaagaagccgcgcacgtccttttcccgggtgcagatctgcgagctggaaaagcgcttccatcgccagaagtacctggcctctgccgagagggcggcgctcgccaagtccctcaaaatgacggacgcgcaggtcaagacctggttccaaaaccggaggaccaagtggcggcggcagacggcggaggagcgggaggcggagcggcagcaggcgagccggctcatgctgcagctgcaacacgacgccttccaaaagagcctcaacgactccatccagcctgacccgctctgtctgcacaactcgtcactctttgctctgcagaatctgcagccctgggaggaggatagttccaaggttcccgctgtcacctccctggtgtgagcccaccagcgcgcaccgtcgccacggatcgccgcccccacccagccgggcgccccggaccccccaggagggctgcgggggaaccggcgccgagaggggaaggggccgcctagcccgagtaggccccagggcgcggccacagactggcgggccgcggaagggggtagggcccgagctccgcgcggccgcacaatccgagcccccgccccgcgccccgtcccgccccaggcccgggcctgacaagaaagcgccttacgtttctccgccccccgcccgcaccccccgggccgggcgcctgtattatactttgtacttttgcccaaacgtgtaaataataaaaaagttttggcttttttctttagaaaccggccacctgcttcccccgcgggggccgctggaggaagggcagccgacccggccgctgggggaagtgccaggggcccggggcaccctgcgtttaggctgggtccactcttcttctttttcgttccttttatttaagtctttttatttaataaaaaagttagctatttcaaaaaaaaaaaaaaaaaaaaa

SEQ ID NO: 401481 - DNA, 1000 bp, Homo Sapiens
cctggccgtgttctgggtggagtttgtgatgaggcacaagggcgcgccacacctgcgccccgcagcccacgacctcacctggtaccagtaccattccttggacgtgattggtttcctcttggccgtcgtgctgacagtggccttcatcacctttaaatgttgtgcttatggctaccggaaatgcttggggaaaaaagggcgagttaagaaagcccacaaatccaagacccattgagaagtgggtgggaaataaggtaaaattttgaaccattccctagtcatttccaaacttgaaaacagaatcagtgttaaattcattttattcttattaaggaaatactttgcataaattaatcagccccagagtgctttaaaaaattctcttaaataaaaataatagactcgctagtcagtaaagatatttgaatatgtatcgtgccccctctggtgtctttgatcaggatgacatgtgccatttttcagaggacgtgcagacaggctggcattctagattacttttcttactctgaaacatggcctgtttgggagtgcgggattcaaaggtggtcccacggctgcccctactgcaaatggcagttttaatcttatcttttggcttctgcagatggttgcaattgatccttaaccaataatggtcagtcctcatctctgtcgtgcttcataggtgccaccttgtgtgtttaaagaagggaagctttgtacctttagagtgtaggtgaaatgaatgaatggcttggagtgcactgagaacagcatatgatttcttgctttggggaaaaagaatgatgctatgaaattggtgggtggtgtatttgagaagataatcattgcttatgtcaaatggagctgaatttgataaaaacccaaaatacagctatgaagtgctgggcaagtttactttttttctgatgtttcctacaactaaaaataaattaataaatttatataaattctatttaaaaaaaaaaaaaaaaaaaaa

SEQ ID NO: 401482 - DNA, 596 bp, Homo Sapiens
ccatgaggaagtgcgatcgggaacctcctatatacttccgtttgcctcgcggtttctttctttccgcgccgatagcgctcacgcaagcatggttaacgtccctaaaacccgccggactttctgtaagaagtgtggcaagcaccaaccccataaagtgacacagtacaagaagggcaaggattctctgtacgcccagggaaagcggcgttatgacaggaagcagagtggctatggtgggcaaactaagccgattttccggaaaaaggctaaaactacaaagaagattgtgctaaggcttgagtgcgttgagcccaactgcagatctaagagaatgctggctattaaaagatgcaagcattttgaactgggaggagataagaagagaaagggccaagtgatccagttctaagtgtcatcttttattatgaagacaataaaatcttgagtttatgttcacttcatttgtttgctgttcatcttttgggagggaataagctagagccatcaatacaattccgcttgtggggaaatttatgcctcttactggtactacttgttttgcattgaagctgactggttgagttcacatcatatgt

SEQ ID NO: 401483 - DNA, 1000 bp, Homo Sapiens; identical to SEQ ID NO: 223141

SEQ ID NO: 401484 - DNA, 1000 bp, Homo Sapiens; identical to SEQ ID NO: 223142

SEQ ID NO: 401485 - DNA, 1000 bp, Homo Sapiens; identical to SEQ ID NO: 290267

SEQ ID NO: 401486 - DNA, 1000 bp, Homo Sapiens
gagactgggttttggcggccgatgcgtcaggccgggtggtgcccacgccggtgctgctcttcctggaccgggacttgcagcgccgggcttcatttgtggctgtggagaccgagtggcctccacgcaaactgttgctcacgccctggcacctggtgtttgccgctcgagggccggcgcccgcgccaggcgactttgcaccggtgttcgcgcgccggctacgcgctggggactcggtgctggcgcccggcggggatgcgcttcggccagcgcgcgtggcccgtgtggcgcgggaggaagccgtgggcgtgttcgcgccgctcaccgcgcacgggacgctgctggtgaacgatgtcctggcctcttgctacgcggttctggagagtcaccagtgggcgcaccgcgcttttgcccccttgagactgctgcacgcgctaggggcgctgctccccggcggggccgtccagccgactggcatgcattggtactctcggctcctctaccgcttagcggaggagctactgggctgagcgtcccaggcatagaaacctcgaagcgcccgaggaaacgagggcctgctggctgagatatggggctgtgggcagcagacgatgccgactggaagggagggagagggagggggagggagaaaatggggctatgcctggcttaggggcaacctcgtactgagaggaggtgataccgggtcctaggtaggtagggctgatggtgcgcactccttaaagaggactatttagcctctcccccagtgcttcagccccacccgataattttattttatttcttatttataaattgtaatataatgattcccttgcccagcttgccaaggtgaggggctggggcatggcattaacactgtctgacacagccagccagtctgacatctgacgttttcctgcaaggtgggctaataaagggaaggctttcaggagcttactggaaaaaaaaaaaaaaaaaaaaaaaaaaaaaaaaaaaaaaa

SEQ ID NO: 401487 - DNA, 1000 bp, Homo Sapiens; identical to SEQ ID NO: 117822

SEQ ID NO: 401488 - DNA, 1000 bp, Homo Sapiens; identical to SEQ ID NO: 290270

SEQ ID NO: 401489 - DNA, 564 bp, Homo Sapiens
cattctttttctttattcagtggattgttagttcttctgctgttaggaagccactatgtctggacgtggaaagcaaggcggcaaagctcgggcaaaagctaaaacgcgttcttccagggccggtcttcagtttccagttggccgtgtgcaccgcctcctccgcaaaggcaactactccgaacgagtcggggccggcgctccagtgtacctggcagcggtgctggaatatctgacggccgagatcttagagctagctggcaacgcggctcgcgacaataagaagacccgcatcatcccgcgccacctgcagctagccatccgcaacgacgaggagctaaataagcttctaggtcgcgtgaccatcgcgcagggcggtgtcctgcccaacatccaggccgtattgctgcctaagaagacggagagccaccataaggccaagggcaagtgaaatgattactagtcaaatccgtcagtgatcccgagtcccagaaaccaaaggctcttttcagagccacccaccttttctgtaaagtgctggaatacacatacgatgcctgaaatctc

SEQ ID NO: 401490 - DNA, 1000 bp, Homo Sapiens; identical to SEQ ID NO: 290271

SEQ ID NO: 401491 - DNA, 1000 bp, Homo Sapiens; identical to SEQ ID NO: 290272

SEQ ID NO: 401492 - DNA, 1000 bp, Homo Sapiens; identical to SEQ ID NO: 290273

SEQ ID NO: 401493 - DNA, 1000 bp, Homo Sapiens; identical to SEQ ID NO: 290274

SEQ ID NO: 401494 - DNA, 1000 bp, Homo Sapiens; identical to SEQ ID NO: 221351

SEQ ID NO: 401495 - DNA, 1000 bp, Homo Sapiens; identical to SEQ ID NO: 290277

SEQ ID NO: 401496 - DNA, 1000 bp, Homo Sapiens
aatatccaatgatgaggagagcctttgagacagttgccattgaccgactagatcgaataggaaagaaaaattcaattcttctgcaaaagttccagaaggatctgaacactggtgttttcaacaatcaggagaacgaaatcctcaagcagattgtgaaacatgacagggagatggtgcaggcaatcgctcccatcaattatcctcaaatgacaaccctgaattccgcatcgtctactacgaccccgacctcccgcatgaggacacaatctccaccggtgtacacagcgaccagcctgtctcacagcaacctgcactcccccagtcccagcacacagaccccccagccatcagccatcctgtcaccctgctcctacaccaccgcggtctgcagccctcctgtacagagccctctggccgctcgaactttccactatgcctcccccaccgcctcccagctgtcactcatgcaacagcagccgcagcagcaggtacagcagtcccagccgccgcagactcagccacagcagccgtccccgcagccacagacacctggcagctccacgccgaaaaatgaagtgcacaagagcacgcaggcgcttcacaacaccaacctgacccgggaagtcaggccactctccgcctcgcagccctcgctgccccatgaggtgcccactctgatttccagacctcatcccactgtgggcgagtccctggcctccatccctcaacccgtgacggcggtccccggaacgggccttcaggcagggggcaggagcactgtcccgcagcgcgtcaccctcttccgacagatgtcgtcgggagccatccccccgaaccgaggagtccctccagcaccccctccaccagcagctgctcttccaagagaatcttcctcagtcttaaacacagacccagacgcagaaaagccacgatttgcttcaaatttatgatccctgctgattgtcaaagcagaaagaaatactctcataaactgagacta

SEQ ID NO: 401497 - DNA, 1000 bp, Homo Sapiens; identical to SEQ ID NO: 290278

SEQ ID NO: 401498 - DNA, 827 bp, Homo Sapiens; identical to SEQ ID NO: 117824

SEQ ID NO: 401499 - DNA, 1000 bp, Homo Sapiens; identical to SEQ ID NO: 290279

SEQ ID NO: 401500 - DNA, 1000 bp, Homo Sapiens; identical to SEQ ID NO: 290280

SEQ ID NO: 401501 - DNA, 1000 bp, Homo Sapiens; identical to SEQ ID NO: 290281

SEQ ID NO: 401502 - DNA, 1000 bp, Homo Sapiens; identical to SEQ ID NO: 117825

SEQ ID NO: 401503 - DNA, 1000 bp, Homo Sapiens
atgggcgctgtcctcccgtccttctggggtcagcagcccctcgtccaacagcagatggtcatgggtgcccagccaccagtcgctcaggtgatgccgggggctcagcccatcgcatggggccagccgggtctctttcctgccactcagcagccctggccaactgtggccgggcagtttccgccagccgccttcatgcccacacaaactgttatgcctttgccagctgccatgttccaaggtcccctcaccccccttgccaccgtcccaggcacgagtgactccaccaggtcaagtccacagaccgacaagcccaggcagaaaatgggcaaagaaacgtttaaggatttccagatggcccagcctccgcccgtgccctcccgcaaacccgaccagccctccctcacctgtacctcagaggccttctccagttacttcaacaaagtcggggtggcacaggatacagacgactgtgatgactttgacatctcccagttgaatttgacccctgtgacttctaccacaccatcgaccaactcacctccaaccccagcccctagacagagctctccatccaaatcatctgcatcccatgccagtgatcctaccacagatgacatctttgaagagggctttgaaagtcccagcaaaagcgaagagcaagaagctcctgatggatcacaggcctcatccaacagtgatccatttggtgagcccagtggggagcccagtggtgataatataagtccacaggccggtagctagatagcgcaggtctgggagccagagcctctgtacgcgcagatcaacagacctaagaaatagcatcgatgcgagctcgtggtgggtgctcaagactggcatggacatcagcatcacgacaggctctcttgtattctttcacctcttcccacaagaaattcatgattgcccaatggaactcgctcagaagagggaactaagcatttttggcaaccaatggcagatatctatggcagcacac

SEQ ID NO: 401504 - DNA, 454 bp, Homo Sapiens
atgccactctgggtgttcttctttgtgatcctcaccctcagcaacagctcccactgctccccacctccccctttgaccctcaggatgcggcggtatgcagatgccatcttcaccaacagctaccggaaggtgctgggccagctgtccgcccgcaagctgctccaggacatcatgagcaggcagcagggagagagcaaccaagagcgaggagcaagggcacggcttggtcgtcaggtagacagcatgtgggcagaacaaaagcaaatggaattggagagcatcctggtggccctgctgcagaagcacagcaggaactcccagggatgaagattcctcctgtgacccgggctacctgtagccaaaatgcaactggatccagttaatcctctcatttctgacccactttttcctttgaaaatacaataaaattcccccataccggtgtgcatttaaa

SEQ ID NO: 401505 - DNA, 1000 bp, Homo Sapiens; identical to SEQ ID NO: 117826

SEQ ID NO: 401506 - DNA, 1000 bp, Homo Sapiens
ttggcataaaacaaaccagcaacttttctcatgtgtttggagttaaaatgtgtttttcagttataatttcaatttttaaatttcttggtgctttgtctaattaattacatcccataacttgtcaggatagttgctccaactgaattgctatcatttggctggatgggggtgaagtatgtcttcaaaatatattgaagtaagttcatcaaacatgtttagacttcctctcattgctggagacagcccagtgtagagattggcacttccctgtccagcactacaacttaattgctctatgcctcagtttccccataatacccttttccaacctacctcacaaggttatcagaaagatcaaattaaataatagatgtgaaaatgctttgaaaatgtttttaagtgctatgcatatttatagagttattatagttattcaaatccataagcaggttatttttatttttttactgtttgaaaagaaataagtagtgtcattcatatgagttcctgagtggatatgcgaatctttggtcttctcgacaggtgccctttctcttaccactagttgcttacaaaaatagcacccaaacacatggcacttggaagaaaaagacccactgaatctgagaaagtactttctggtggcaaatgaatttatcattttagtatagttttcgataaaggatatagcaacatcttttgataattgtgctttacaacttgaatgctgattcaaggcattatttggatgtgagtttaatcttttcagccttgtaaatgggaaaatatatattaaaattgattgtcaaatacagcatttctttggaaaccaccttaaaacattagtgctatggttatgagtgtatgtgccagtacttaccagtcaatgcattgtggatatgagctttcgttgactgcttctctgcagtcgttgatgctaataaatattgtcctgtttcttcatataataaattaatttttcaatttctccttgtaaaaa

SEQ ID NO: 401507 - DNA, 1000 bp, Homo Sapiens; identical to SEQ ID NO: 223146

SEQ ID NO: 401508 - DNA, 1000 bp, Homo Sapiens; identical to SEQ ID NO: 117827

SEQ ID NO: 401509 - DNA, 1000 bp, Homo Sapiens; identical to SEQ ID NO: 290285

SEQ ID NO: 401510 - DNA, 1000 bp, Homo Sapiens; identical to SEQ ID NO: 290286

SEQ ID NO: 401511 - DNA, 1000 bp, Homo Sapiens; identical to SEQ ID NO: 223147

SEQ ID NO: 401512 - DNA, 1000 bp, Homo Sapiens; identical to SEQ ID NO: 290287

SEQ ID NO: 401513 - DNA, 1000 bp, Homo Sapiens; identical to SEQ ID NO: 117828

SEQ ID NO: 401514 - DNA, 1000 bp, Homo Sapiens
aaggaggagtgcctcaagaaatgtgccactgtcacagagaatgccacgggtgacctggccaccagcaggaatgcagcggattcctctgtcccaagtgctcccagaaggcaggattctgaagaccactccagcgatatgttcaactatgaagaatactgcaccgccaacgcagtcactgggccttgccgtgcatccttcccacgctggtactttgacgtggagaggaactcctgcaataacttcatctatggaggctgccggggcaataagaacagctaccgctctgaggaggcctgcatgctccgctgcttccgccagcaggagaatcctcccctgccccttggctcaaaggtggtggttctggcggggctgttcgtgatggtgttgatcctcttcctgggagcctccatggtctacctgatccgggtggcacggaggaaccaggagcgtgccctgcgcaccgtctggagctccggagatgacaaggagcagctggtgaagaacacatatgtcctgtgaccgccctgtcgccaagaggactggggaagggaggggagactatgtgtgagctttttttaaatagagggattgactcggatttgagtgatcattagggctgaggtctgtttctctgggaggtaggacggctgcttcctggtctggcagggatgggtttgctttggaaatcctctaggaggctcctcctcgcatggcctgcagtctggcagcagccccgagttgtttcctcgctgatcgatttctttcctccaggtagagttttctttgcttatgttgaattccattgcctcttttctcatcacagaagtgatgttggaatcgtttcttttgtttgtctgatttatggtttttttaagtataaacaaaagttttttattagcattctgaaagaaggaaagtaaaatgtacaagtttaataaaaaggggccttcccctttagaataaatttcagcatgtgctttcaaaaaaaaaaaaaaaaaaa

SEQ ID NO: 401515 - DNA, 482 bp, Homo Sapiens; identical to SEQ ID NO: 290289

SEQ ID NO: 401516 - DNA, 478 bp, Homo Sapiens
acccggcgctccattaaatagccgtagacggaacttcgcctttctctcggccttagcgccatttttttggaaacctctgcgccatgagagccaagtggaggaagaagcgaatgcgcaggctgaagcgcaaaagaagaaagatgaggcagaggtccaagtaaaccgctagcttgttgcaccgtggaggccacaggagcagaaacatggaatgccagacgctggggatgctggtacaagttgtgggactgcatgctactgtctagagcttgtctcaatggatctagaacttcatcgccctctgatcgccgatcacctctgagacccaccttgctcataaacaaaatgcccatgttggtcctctgccctggacctgtgacattctggactatttctgtgtttatttgtggccgagtgtaacaaccatataataaatcacctcttccgctgttttagctgaagaattaaatcaaaaaaaaaa

SEQ ID NO: 401517 - DNA, 1000 bp, Homo Sapiens; identical to SEQ ID NO: 290290

SEQ ID NO: 401518 - DNA, 656 bp, Homo Sapiens; identical to SEQ ID NO: 290291

SEQ ID NO: 401519 - DNA, 1000 bp, Homo Sapiens; identical to SEQ ID NO: 290292

SEQ ID NO: 401520 - DNA, 1000 bp, Homo Sapiens; identical to SEQ ID NO: 223149

SEQ ID NO: 401521 - DNA, 1000 bp, Homo Sapiens; identical to SEQ ID NO: 117829

SEQ ID NO: 401522 - DNA, 1000 bp, Homo Sapiens; identical to SEQ ID NO: 223151

SEQ ID NO: 401523 - DNA, 1000 bp, Homo Sapiens; identical to SEQ ID NO: 117830

SEQ ID NO: 401524 - DNA, 1000 bp, Homo Sapiens; identical to SEQ ID NO: 290297

SEQ ID NO: 401525 - DNA, 1000 bp, Homo Sapiens; identical to SEQ ID NO: 290298

SEQ ID NO: 401526 - DNA, 927 bp, Homo Sapiens; identical to SEQ ID NO: 117831

SEQ ID NO: 401527 - DNA, 1000 bp, Homo Sapiens
tatcctagaatctttgtgctctcgctgcagttccctttgggttccatgttttccttgttccctcccatgcctagctggattgcagagttaagtttatgattatgaaataaaaactaaataacaattgtcctcgtttgagttaagagtgttgatgtaggctttattttaagcagtaatgggttacttctgaaacatcacttgtttgcttaattctacacagtacttagattttttttactttccagtcccaggaagtgtcaatgtttgttgagtggaatattgaaaatgtaggcagcaactgggcatggtggctcactgtctgtaatgtattacctgaggcagaagaccacctgagggtaggagtcaagatcagcctgggcaacatagtgagacgctgtctctacaaaaaataattagcctggcctggtggtgcatgcctagtcctagctgatctggaggctgacgtgggaggattgcttgagcctagagtgagctattatcatgccactgtacagcctgggtgttcacagatcttgtgtctcaaaggtaggcagaggcaggaaaagcaaggagccagaattaagaggttgggtcagtctgcagtgagttcatgcatttagaggtgttcttcaagatgactaatgtcaaaaattgagacatctgttgcggttttttttttttttttttcccctggaatgcagtggcgtgatctcagctcactgcagcctccgcctcctgggttcaagtgattctagtgcctcagcctcctgagtagctgggataacgggcgtgtgccaccatgcccagctaatttttgtatttttagtatagatggggtttcatcattttgaccaggctggtctcaaactcttgacctcagctgatgcgcctgccttggcctcccaaactgctgagattacagatgtgagccaccgcaccctacctcattttctgtaacaaagctaagcttgaacactgttgatgttcttgagggaagcat

SEQ ID NO: 401528 - DNA, 1000 bp, Homo Sapiens; identical to SEQ ID NO: 117833

SEQ ID NO: 401529 - DNA, 1000 bp, Homo Sapiens; identical to SEQ ID NO: 290302

SEQ ID NO: 401530 - DNA, 1000 bp, Homo Sapiens; identical to SEQ ID NO: 290303

SEQ ID NO: 401531 - DNA, 1000 bp, Homo Sapiens; identical to SEQ ID NO: 290304

SEQ ID NO: 401532 - DNA, 1000 bp, Homo Sapiens
gtcctgatgtggctcctgacctacgttggcgctctcttcaatggcctgaccctgctgctcatggctgtggtttcaatgtttactctacctgtagtgtatgttaagcaccaggcacagattgaccaatatctgggacttgtgaggactcacataaatgctgttgtggcaaagattcaggctaaaatcccaggcgctaagaggcacgctgagtaaactgatttcccaccggggactggacacaaacaggaatgtctggagtggtaacagctctcttcttactcattactgcaaattgattgtctttcccccctccctccagtaccataatcttagagacaaaccttaaaacagctgtttttaggctgttccttgtactcttaggatatttgagtcacttgtgtcaaccactaaagtatagagaaaagtgtattagatgtggtttttaattttgtgttgctaaaaaaagtgcatgatggtgagagcccaagttatctttccctcttcggtgttcttcttctcttctctgcaatgcttctgtagcttctaatgttccccgtggctaggcctttcctgccgagtgctctgatgcaatagtggaaatcgcttatatgtccttgggttgctggttggattaatctttaataacaatatatagaattgtagactgatgttttagcatttttccaacacacacaacgtaaaaataaaagcagtcgaccgcacttatggtaatcagttttgtataacttaaaataattaaataaatgaataaatccaaaacaaacatgcagtacttttgttgtatgggattggtgggctgatttacatgtatggttactaaaaagtaccagcatgttaactttattacaatttgtattactttctctgtagttcctaatggattcaattacggactctggatatttgcacttatgtacttgatactgaatgcataaataaatgttactaaatgtagaatgttaaaaaaaaaaaaaaaaaa

SEQ ID NO: 401533 - DNA, 1000 bp, Homo Sapiens; identical to SEQ ID NO: 290305

SEQ ID NO: 401534 - DNA, 1000 bp, Homo Sapiens; identical to SEQ ID NO: 290306

SEQ ID NO: 401535 - DNA, 1000 bp, Homo Sapiens; identical to SEQ ID NO: 290308

SEQ ID NO: 401536 - DNA, 1000 bp, Homo Sapiens; identical to SEQ ID NO: 117834

SEQ ID NO: 401537 - DNA, 1000 bp, Homo Sapiens
aaacagccctgtccttcagagagtgacatcattactgaagaggacaaaagtaagaaaaaggggcaagagggaaaacaacctaaaaagcagcctaagaaggatgaagagggccagaaggaagaagataagccaagaaaagagccggataaaaaagaggggaagaaagaagttgaatcaaaaaggaaaaatttagctaaaacaggggttacttcaacctccgattctgaagaagaaggagatgatcaagaaggtgaaaagaagagaaaaggtgggaggaactttcagactgctcacagaaggaatatgctgaaaggccaacatgagaaagaagcagcagatcgaaaacgcaagcaagaggaacaaatggaaactgagcaccaaacaacatgtaatctacagtaataaaaaatatatctcattttgggctcaaagcattaatccagttactgaaaagagaatacaagtggagcaaacaagagatgaagatcttgatacagactcattggactgaatttcccccttccccccatgatggaagaatgttcagattctaaattgaggacttcattattaatggcattactgtgttatgattaacaaatttcttgtaaggtacacactacatactaaggtcggccatcattccgtttttttttttttttttttttttaaccaagcttaaaatgaagcttaaaatgaagctttgtgtttgaaagtaataacaagctcagacgaagatggtggttgtacattattcatctagaaaatataaaaattcattttgttttgaagctagttattaaactggaatagcagttatatccctgagaatggggcccttctcttgacattccttttgttgtttaattctttagaatcttaataaatgtttttttaatcctgagagattaaacagtagtagacttgttaagaatgaaactgtaaccaaaattttaaaataaagttttttttaaaaaaaaaaaaaaaaaaaaaaaaaaaa

SEQ ID NO: 401538 - DNA, 1000 bp, Homo Sapiens; identical to SEQ ID NO: 117836

SEQ ID NO: 401539 - DNA, 1000 bp, Homo Sapiens
ccgcccagaagacttcaagccttaaaaggaggctgccgtggagcacggatacagaaactgagacacgtggagactggatgagggcagatgaggacaggaagagagtgttagaaagggtaggactgagaaacagcctataatctccaaagaaagaataagtctccaaggagcacaaaaaaatcatatgtaccaaggatgttacagtaaacaggatgaactatttaaacccactgggtcctgccacatccttctcaaggtggtagactgagtggggtctctctgcccaagatccctgacatagcagtagcttgtcttttccacatgatttgtctgtgaaagaaaataattttgagatcgttttatctattttctctacggcttaggctatgtgagggcaaaacacaaatccctttgctaaaaagaaccatattattttgattctcaaaggataggcctttgagtgttagagaaaggagtgaaggaggcaggtgggaaatggtatttctatttttaaatccagtgaaattatcttgagtctacacattatttttaaaacacaaaaattgttcggctggaactgacccaggctggacttgcggggaggaaactccagggcactgcatctggcgatcagactctgagcactgcccctgctcgccttggtcatgtacagcactgaaaggaatgaagcaccagcaggaggtggacagagtctctcatggatgccggcacaaaactgccttaaaatattcatagttaatacaggtatatctatttttatttactttgtaagaaacaagctcaaggagcttccttttaaattttgtctgtaggaaatggttgaaaactgaaggtagatggtgttatagttaataataaatgctgtaaataagcatctcactttgtaaaaataaaatattgtggttttgttttaaacattcaacgtttcttttccttctacaataaacactttcaaaatgtgaaaaaaaaaaaaaaaaaa

SEQ ID NO: 401540 - DNA, 1000 bp, Homo Sapiens; identical to SEQ ID NO: 223152

SEQ ID NO: 401541 - DNA, 1000 bp, Homo Sapiens; identical to SEQ ID NO: 290312

SEQ ID NO: 401542 - DNA, 1000 bp, Homo Sapiens
acaaagtttaaagtaacttggggatggctacaaaaagttaacacagtatttttctcaaatgaacatgtttattgcagattcttcttttttgaaagaacaacagcaaaacatccacaactctgtaaagctggtgggacctaatgtcaccttaattctgacttgaactggaagcattttaagaaatcttgttgcttttctaacaaattcccgcgtattttgcctttgctgctactttttctagttagatttcaaacttgcctgtggacttaataatgcaagttgcgattaattatttctggagtcatgggaacacacagcacagagggtaggggggccctctaggtgctgaatctacacatctgtggggtctcctgggttcagcggctgttgattcaaggtcaacattgaccattggaggagtggtttaagagtgccaggcgaagggcaaactgtagatcgatctttatgctgttattacaggagaagtgacatactttatatatgtttatattagcaaggtctgtttttaataccatatactttatatttctatacatttatatttctaataatacagttatcactgatatatgtagacacttttagaatttattaaatccttgaccttgtgcattatagcattccattagcaagagttgtaccccctccccagtcttcgccttcctctttttaagctgttttatgaaaaagacctagaagttcttgattcatttttaccattctttccataggtagaagagaaagttgattggttggttgtttttcaattatgccattaaactaaacatttctgttaaattaccctatcctttgttctctactgttttctttgtaatgtatgactacgagagtgatactttgctgaaaagtctttcccctattgtttatctattgtcagtattttatgttgaatatgtaaagaacattaaagtcctaaaacatctaaaaaaaaaaaaaaaaaaaaaaaaaaaaaaaaaaa

SEQ ID NO: 401543 - DNA, 1000 bp, Homo Sapiens
tatctccaaatctgcaagctcctgttttactgtagaagggacaattaactccatccttctccatgactctgaaatccaagggggggttccgggttttgccatgtggcgccattttccaactcattttcagcctgatccagcatcttctggacagcttccggtttttgtttcttctgtcgtttctgttcctcctcctctctctctttcctctgctgttcttcccattgttcctttaactttcgctcttgttcttgccgttttctagccacctcttccttttccttctttattctgaattcttcttgtgccttctgctctctcagcaaccactcctcatgtaatctttgcctctctcttccccatagcttttctagttgttgtttttcaataaaagtgtcctcctctttctgtgagagtcctgagtccctcagtggagcaagttcctgctggcgtttctttcgtttctccttcttcagggcggccctgtactttttgtggcttggtttctctggaaatgtcaccttttcgggcgcagccatcttgccggcaccgccccgcccctctagttgtatcctttataataaaatggtaaacattgtaaccgcagattcagcccaatctggttcaactttgtgtaataaaatggcgagttgtttttcagttgtcgtggacccccaggttgcaagttacataccctgggcatgtccagatgaacgaagcgtgcaaatccacgtggaacctaagtgctcagactgaggaacagggactgagttaagaagtggacaccacgtggcatgatccttgatccaatcagattgagccctggcgtgatccagtcagatcaagcctcctgaatcccctcattacaagatccaatcatatcatgcctcactaccctctgtatataaaatctgccccagcctccaacttggagagacagatttgggccagactcctgtgtccttgcttggctgccttgcaataaatttttctctctaca

SEQ ID NO: 401544 - DNA, 1000 bp, Homo Sapiens; identical to SEQ ID NO: 290315

SEQ ID NO: 401545 - DNA, 1000 bp, Homo Sapiens
ccaacaacctgcgcctgaaggggccggagcagctgaacaagcatgggcagggtgcgtccgaggacaacatcatcaacaagttcgggtccacctccagactcaccaagaggaaaaacaaggacctcaaaaagaccttgcccgaggacgttcagaaaatctacaagaccttccggaattactccctggacgaggagaagaaagaggaggagacggaaaagatgtgtaactcagacaactccagcacagccatgctgacggactgtatccagcagcacgctgagttggagaacggaatgatacccacggacaccaaagaccgggagccggagaacaactcattacttgaagacagaaactaaatgtgaaggacattggtcttggactgagcgttgtgtgtgtgtgtgtgtgtgtgtttttaatattcacactgagacatgtgccttaaacagactttttagtccaaaattacatagcattgaagaatatatttcactgtgccataaacaactgaaagcttgctctgccaaaaggaatcagagaacaagaacttcatttcagatagcaaacgcaggacacaccaagagtgtccgtgcacgtagccggttctggccgtacatgttaagggcatttcagtggcagtgctgtacccctgggcagtgctacctgggcacacacgtagacaagggcagctattccttagaccagcctcctgaaagaaacaggtgtgtctttttagtggagtcgtagtaatatgtgcacacacagaaggggacctgattgggtgggagctggttatgtgtaactagcgttggagttgacattttggcatgtgctctgagcttgaattttgataccaaccattcagtgcatcatacctagtctttctatgctccaaatgaatgtctgtggggacctgagagcacctggaatttgttggaagcagatcagagcacacgtacgaaaaggtgcaattgcttttctcatgacaaaagaaaaaaaa

SEQ ID NO: 401546 - DNA, 1000 bp, Homo Sapiens; identical to SEQ ID NO: 223154

SEQ ID NO: 401547 - DNA, 1000 bp, Homo Sapiens
agctgccaaaccctgtggaatatgagaccggcaaactctgtagctaatgggcggcccacttcagcactgggcaaggaggggatccatgaatctggggtacaaagataatctaagccctcaccttagtgccaacagggtgtgctcccacgagactttcagcatccagtagatgggacctcgaggctcgagctgaagcaggcgagagagaaacagctactgcgtgcgtgcgcgcacgcatacacacacacacacacacactggcacagggaggctacaactaagtagcctcagatctgtaaagttgattggtgctttctaaaatgaatgcaattgaaagaaaggagccaaggaagagattaagaaaaagaaccagctgaaccatgaaacaaacaaaaatcctaaaagtgattcttgtcattcaagaaagcaagaggggacaacaatgggaggggtcggagctcttccttcccctctgtggagtcacttttgtattctttttaaccagatttcttaaaatgttgttgttttgtgaatcctgacattggttcttacttttgtatgctgcctcctctgtgccctcccagacgctgactgggaaacacaagaagtacaaccaacaggaaccagcgccaagggcaggcagcggcctccttgctcccctcccttactcctccctctgctgcctcctccccccaccaagtttcagggccctggattgttcccagttcccattgtggtcccttcagagctcctttccaacagcatctctctgtcgaagaaagaagctctgtcaagttagagagagacaatgtgtaggaaatgttcttttttaaaaaaaaataacaaaaacaaaacaaaactatttattttgtgattgttttccttgttaatctgctccaaccacctgaacatctaagtaaacatttatctggtttaatataaaaaaaaaaaaaaaaaaaaaaaaaaaaaaaaaaaaaaaaaaaaaaaaaaaaaaaaaaaa

SEQ ID NO: 401548 - DNA, 1000 bp, Homo Sapiens; identical to SEQ ID NO: 290318

SEQ ID NO: 401549 - DNA, 893 bp, Homo Sapiens; identical to SEQ ID NO: 117837

SEQ ID NO: 401550 - DNA, 946 bp, Homo Sapiens; identical to SEQ ID NO: 117838

SEQ ID NO: 401551 - DNA, 430 bp, Homo Sapiens; identical to SEQ ID NO: 223156

SEQ ID NO: 401552 - DNA, 907 bp, Homo Sapiens
ctcctctctactctacccagcttgcgctccccagccgcaagtcggccgcgctttgcccgtcagcgcttggagctttctgcgtcgcttcccgctgcgcctgcgcggtcccgcctcgccccacgcgcgggctcgcgcttcggtttccccagacctgctcgcagcaccctgctgtcttcccggtccggcccgctgcccgcggcgccagcaccatgctcttctattcttttttcaagtcccttgtgggcaaggatgtggtcgtggaactaaagaatgacctgagcatctgtggaaccctccattctgtggatcagtatctcaacatcaaactaactgacatcagtgtcacagaccctgagaaataccctcacatgttatcagtgaagaactgcttcattcggggctcagtggtccgatacgtgcagctgccagcagatgaggtcgacacacagttgctacaggatgcggcaaggaaggaagccctgcagcagaaacagtgatggctcctcctcctcttcccctccctctttcattggtgacccataaccccaagtcccagcccagaacccctaacccccaatacttgaaggggttttgtttttttactaatgatggttttgtgggttttttttaagggatgagtggatgagaggagtaatagggaacagctatcctctcttgagaaggggaggataagtaggctgggaaacttcaaagccttcccagtccccagcacctgcctttctcactacttctctggagatggtaggagagtttcctaggtctttccagggcagcatgtgattcatttggggatggaaggaatctgtcccgcatcgggaataaaatttatgatgcaaaaaaaaaaaaaaaaaaaaaaaaaaaaaaaaaaaaaaaaaaaaaaaaaaaa

SEQ ID NO: 401553 - DNA, 1000 bp, Homo Sapiens; identical to SEQ ID NO: 223157

SEQ ID NO: 401554 - DNA, 1000 bp, Homo Sapiens; identical to SEQ ID NO: 290322

SEQ ID NO: 401555 - DNA, 1000 bp, Homo Sapiens; identical to SEQ ID NO: 290323

SEQ ID NO: 401556 - DNA, 1000 bp, Homo Sapiens; identical to SEQ ID NO: 117839

SEQ ID NO: 401557 - DNA, 1000 bp, Homo Sapiens; identical to SEQ ID NO: 290326

SEQ ID NO: 401558 - DNA, 1000 bp, Homo Sapiens; identical to SEQ ID NO: 117841

SEQ ID NO: 401559 - DNA, 1000 bp, Homo Sapiens
ggaaatgtcaaaaacttttgtaaaatccaaggagatgggagagctagtcaacacaccatcctggatggataaaggtctgggctcccaaaatgaggtgaaggaggaagagagcagaccaggtacttatgggatgctcagcagcttaactgaagagcatgacagtattgaggaagaagaagaagaggaagaagatggggagaaacctaagagaaggggtcccaagaaaaagaagatgaccaaagctcgccttgagagattcagggctcgaagagtcaaggctaatgccagagaacggacccggatgcatggcctgaatgacgccctggataacctgaggcgagtcatgccatgctactctaaaacccaaaaactttccaagatagagactcttagactggccaggaactatatttgggctttatctgaagtcctggagactggccagacacctgaagggaaaggctttgtggagatgctgtgtaaagggctctctcagcccacaagcaacctggtggctggatgtctccaactgggccctcagtctgtcctcctggagaagcacgaggataaatctcctatttgtggctctgccatctctgtccacaacttcaactatcagtctccggggcttcctagccctccttatggtcatatggaaacacatctccttcatctcaagccccaagtattcaagagtttgggagaatcgtcctttgggagccatctgcctgactgcagtacacccccttatgagggcccactcactccacccctgagcatcagtgggaacttctccttgaagcaagatgggtctcctgacctagaaaaatcctacagcttcatgccacattacccttcttcaagtctaagctcagggcatgtgcattcaactccttttcaggctggtaccccccgttatgatgttcctatagacatgtcctatgattcctacccccatcatggtattgggacccaactcaatacagtcttcactgagtga

SEQ ID NO: 401560 - DNA, 1000 bp, Homo Sapiens
acggccccgcgggcgccgcctccaacttctacagcgcggtgggccgcaatggcatcttgccacagggcttcgaccagttctacgaggcagcgcccgggcccccgttcgccgggccgcagcccccgccgccacccgcgccgccacagcccgagggcgcagccgacaagggcgaccccaggaccggggctggtggcggcgggggcagtccctgcaccaaggcgacccctggctcggagcccaagggggcagcagaaggcagcggtggcgacggcgagggccccccgggagaggcgggggccgagaagagcagcagcgcagttgccccccagcggtcccggaaaaagcgctgtccctataccaagtaccagatccgcgaactggaacgcgagtttttctttaacgtgtacataaacaaagagaaaagacttcaactctctcggatgctcaacctcactgaccggcaagtcaaaatctggttccagaatcgcaggatgaaagaaaagaaactgaacagagaccgtctgcagtatttcactggaaaccccttattttgagagctccaggaagcgccctcaccccagccccactcacccaccctccttcccaccagcctgctctccgcaggcccactgtccttgggtttaatgacgtctcttctctgtggaacttcacgattccttcccacggtcaactcgggacctcccagcgaccactgcagcctgcggacgaggccgggacttggccgagcggatcctaataaggggaaaatggtaaatgcaaacgtcccgttacaattttaccgccagtgtgctgtcgttccccctccccctctccgagtcctcgtggggacacggcggggtctgtaggaagttgggccgggttgggggttgctagaaggcgctggtgttttgctctgagttttaagagatcccttccttcctcttcggtgaatgcaggttatttaaactttgggaaatgtacttttagtctgtcatatcaa

SEQ ID NO: 401561 - DNA, 840 bp, Homo Sapiens
atgtgtgagcgcagtctctacagagcgggctatgtgggctcgcttctgaatctgcagtcgccagactctttctacttctccaacctgaggccgaatggcggccagttggccgcgcttccccctatctcctacccgcgcggcgcgctgccctgggccgccacgcccgcctcctgcgcccccgcgcagcctgcgggcgccactgccttcggcggcttctcgcagccctacctggctggctccgggcctctcggcctgcagcccccaacagccaaagacggacccgaagagcaggctaagttctatgcgcccgaagcggccgctgggccagaggagcgcggtcgtacccggccgtccttcgcccccgagtctagcctggctcctgcagtggctgctctcaaagcggccaagtatgactacgctggtgtgggtcgtgccacgccgggctccacgaccctgctccagggggctccctgcgcccctggcttcaaggacgacaccaagggcccgctcaacttgaacatgacagtgcaggcggcgggcgttgcctcttgcctgcgaccttcactgcccgacggtaaacggtgcccatgctccccgggccggcctgccgtggggggcggccccggggaggcccgcaagaagcggaaaccctacacgaagcagcagattgcggagttggagaacgaattcctcgtcaacgaattcatcaacaggcagaaacgcaaggaattgtccaataggctgaacctcagcgaccagcaagtcaaaatctggttccagaacaggcgtatgaagaagaagcgcgtggtgcttcgggagcaggcgctggcgctctactag

SEQ ID NO: 401562 - DNA, 1000 bp, Homo Sapiens; identical to SEQ ID NO: 223158

SEQ ID NO: 401563 - DNA, 1000 bp, Homo Sapiens
tgtgcccagtgtcatcaagccaccgcggcctgaccgaggctggttcgtggccccctttgggaagaacccgtggtgggtatacccagcaagcatcctgcccgccctgctggtgaccatcctgatcttcatggaccagcagatcactgccgtcattgtcaaccggaaggagaacaaactgaagaaggctgccggctaccatctggacctgttctgggtgggcatcctcatggctttgtgctcctttatggggctcccctggtacgtggctgccacggtcatctccatcgcccacatcgacagcctcaagatggagacagagaccagtgcccctggggagcagccccagtttctgggagtcagggaacagagagtaaccggcatcatcgtcttcatcctgacgggaatctctgtcttcctggctcccatcctaaagtgtatccccctgccggtgctgtacggagtcttcctctacatgggcgtggcctccctgaatggcatccagatggggaccggagggtcagaattcaaaatccagaagaagctgactccattctgggaacgctgcaagctcttcctgatgccagccaagcaccagccggaccatgccttcctgcggcacgtgccgctgcgccggatccacctcttcaccctggtgcagatcctctgcctggcggtgctctggatcctcaaatccacggtggctgccatcatcttcccggtcatgatcctgggcctcatcatcgttcgaaggcttctggatttcatcttttcccagcacgacctggcctggattgacaacatcctcccagagaaggaaaaaaaggagacagacaagaagaggaagagaaaaaaaggggcccacgaggactgtgatgaggagccccagttccctcctccctcggttataaagattcccatggaaagtgtccaatcagatccccaaaacggtatccactgcattgccagaaaaagatcttccagttggagttactcactctga

SEQ ID NO: 401564 - DNA, 1000 bp, Homo Sapiens
ccccccggcgcctgccaggccgcgcgctgtcaggcggactccgagtgcccgcggcaccggcgctgctgctacaacggatgcgcctacgcctgcctagaagctgtgccgcccccgccagtcttagactggctggtgcagccgaaacctcgatggcttggtggcaatggctggctcctggatggccctgaggaggtgttacaagcagaggcgtgcagcaccacggaggatggggccgaacccctgctctgtccctcgggctatgagtgccacatcctgagcccaggtgacgtggccgaaggtatccccaaccgtgggcagtgcgtcaagcagcgccggcaagcagatgggcgaatcctacgacacaaactttacaaagaatatccagaaggtgactcaaagaatgtggcagaacctggaaggggacaacagaagcactttcagtaaagcaacggcaagcagctaggttgcaagaacattcctctactttctgctaagccttggaaacagttgggaaaagtagtttgaccctcacagttcacattcagctcagcagagcaagaccccagagatgcttagagacaggacacctggccctcaaacccagtttggcccagcctggttgggtgactttgtgggagccacttaacagctctgggtccctgttttaccatcctgggagcaaggccctgcagctccacgagacctttaccccgggaagaagccgccgcccatgaaagcatttctgaagcccctttctaagacaaggctcagcatcttgatatttttgacagattcctcccaagtctggctctgggaggtatgtacccatctcaaatgttcccaagataaattcatccttcaggaaatggaaatgaacttgcttactaatgtgtgattcctagttgtagccaccggatgtgctgaggcctaaatgttagcaggtgggaggaggccacagaacaataaaaacaaccaaataagaaaaaaaaaaaaaaaaaaa

SEQ ID NO: 401565 - DNA, 1000 bp, Homo Sapiens; identical to SEQ ID NO: 290329

SEQ ID NO: 401566 - DNA, 1000 bp, Homo Sapiens
ttatagacatttatggatacatttcctctaaacacaacagggcacagcaaatacgacttcatttggcttcgagttccccaggcgctgtagacacaacatgaatcgggctctctgctctctccttagggagctcgagtcctggtggggagaacaggagtaaacaaggacttgacaaagctgaagagttatcagtcctttgacaaggacaggtggggcagggagcaagacaggtaggctggaagaacagttattggcaagtatgcagagccgtgaacgtcatggcatgtccaaggaattaaatgggagttcatttgggctggggtggaggctgggatcagaccgtggtgggccttcaagctaaggagcttcctaggtgaaaggggagatgtgagccttctctggagggaagtttcatgattgcatctataatgaatatattgcctgttttgtgaatactgacacatgtccatacctaaaacactcctgagttaagtcccatccttcccacaaacagcttcctggctggtacccatgataacaattgagctgaacctggggacccctggttggggaacaggtgagttctatttgagacttccagccctagaaagctgcctccgtccagaaatgcctctcacaccaggagctcggccctctctttatagctgtgactgtcaccctctcaggctttgtctcatccttcattctgaataagatggcagtgttctcctctggggcctgatccacctctacaccagcccaggaagccccatctgtgcctgccctcaggtggtccaccagtctccccctttggttcccttccagtctcttccccctttctatcccaatcaccaatagaaatgctaacatccctgcctggtagccagactagcccactaaagctcccctgtaaatgggggctccattagttctgctgccgagactaataaagatttggttggttctagcagtaaaaaaaaaaaaaaaaaaaaaaaaaaaa

SEQ ID NO: 401567 - DNA, 1000 bp, Homo Sapiens; identical to SEQ ID NO: 117842

SEQ ID NO: 401568 - DNA, 1000 bp, Homo Sapiens; identical to SEQ ID NO: 117843

SEQ ID NO: 401569 - DNA, 1000 bp, Homo Sapiens
ctggagtgcagtgccaagggtggaagaggggacgtgggctctgctgacatccaggacttggagaaatggctggctaaaattgcctgagaggcagctctaaagcacaagacctggatgtgtgacacacagttttggaaaaaggtctgtggtagtctggagttgatgaggaaggggtacaagatgtggttagaaacatttctttgttctggaaacaaagtactgttgaaaccagcttggaattttttttttttttttttttaagttcagttctcccttatggctgcctttcaaacaagtaccttttatctgatgcctgtatcttccctttgttaaggtgtaacttgatgtagggtcaaggtttttgtgacaacaggcagactccacacagagaggatatgatgagaatatggccatcacctgaaaagttttcttatcttctgtgcttttggtccctggaaacaaatccgcctatgtatgaagctagttgatttccagttgcactatttccagttgcctctgaagttcacaggcaatacattgtctagtcctttgcgaatttctctgatttgtgggcacagttatgaagtttccccacatgtgaagacaggtacaaaatagcagagccaagcagacagtgggtctattcttcattagctcagtgacttgtccacactcgtcttagcacttacgtttcaaaagcttgtcacaaacccttggagtcattcccagataatagaactggaaatgataaatcccctaatgccaagggtctagtgtgttcttagtggttatactgggaagtgtgtggagatttaggtgctgctctgctgctctggatggctgaaggctcctgggccatcttcatgtgctgcttgaagagctcctattttgtactcctggctagaatgctgtggaacaaatacaaagtgaaaaaagttctctgtagatttctgaagtgcatattcattgatgccaagaaaaaaaaaaagttgcctttttg

SEQ ID NO: 401570 - DNA, 1000 bp, Homo Sapiens; identical to SEQ ID NO: 117844

SEQ ID NO: 401571 - DNA, 1000 bp, Homo Sapiens; identical to SEQ ID NO: 223161

SEQ ID NO: 401572 - DNA, 773 bp, Homo Sapiens; identical to SEQ ID NO: 290335

SEQ ID NO: 401573 - DNA, 1000 bp, Homo Sapiens; identical to SEQ ID NO: 117845

SEQ ID NO: 401574 - DNA, 832 bp, Homo Sapiens; identical to SEQ ID NO: 290337

SEQ ID NO: 401575 - DNA, 1000 bp, Homo Sapiens; identical to SEQ ID NO: 117846

SEQ ID NO: 401576 - DNA, 1000 bp, Homo Sapiens; identical to SEQ ID NO: 223163

SEQ ID NO: 401577 - DNA, 1000 bp, Homo Sapiens; identical to SEQ ID NO: 117848

SEQ ID NO: 401578 - DNA, 1000 bp, Homo Sapiens
accctgtcagtgtaaacattgcggaaaagcgttcacttgttactcgtctcttcgagaacatgggagaacgcacagtggagagaaaccctatgaatgtaaggaatgtggcaaagccttcaggtacccctcctctctgcgagcacacatgagaatgcacaccggagagaagccctatgtgtgcaagcagtgtgggaaggccttcggatgtcccacttactttagaagacatgtgaaaacacacagcggggtgaagccctatcaatgtaaagagtgtgggaaagcctacagtttttcctcctcccttcgaatccacgtgaggacgcatactggagagaagccctttgagtgtaagcattgtgggaaagccttcagctgtcactcctcccttcgagagcatgtgcgaacccacagcggagagaaaccgtacgaatgtaatcaatgtgggaaagccttcagccacgctcagtactttcaaaagcatgtgagatcacacagtggggtcaaaccctacgaatgtactgaatgtgggaaagcctacagttgttcctcgtcccttcgtgtgcacgtgagaacgcacactggagagagaccgtatgaatgcaagcagtgtgggaaaaccttcaggtatctcgcatcgcttcaagcacatgtgagaacacatgctggagcgtgaatctacaaatacagtggacctgggagagtgttcaaccgtaaaaccttgttgtaaatgtgagaaacgttatttatgtagagcatgtaggaaaacctggtatagcacttattttgtacctaaaaattcagagtaggagagaaatctcttaattatgattaatatggtattgcctttacatgcctcagccttaatagtgattccttttgtattaatttctagtgtatgtttgtgatataaacatttaataaatatcctgttttgtacgctttcaaaaaaaaaaaaaaaaaaaaaaaaaaaaaaaaaaaaaaaaaaaaaaaaaaaaaaaaa

SEQ ID NO: 401579 - DNA, 1000 bp, Homo Sapiens; identical to SEQ ID NO: 223164

SEQ ID NO: 401580 - DNA, 1000 bp, Homo Sapiens; identical to SEQ ID NO: 290342

SEQ ID NO: 401581 - DNA, 1000 bp, Homo Sapiens
aaaatcaagttcaccacaggcacgtgcagcgactcggtggttcacagctgtgacctgtgtggcaagggcttccgtctgcagcgcatgctgaaccgtcacctcaagtgccacaaccaggtgaaaagacacctgtgcaccttctgcggcaagggcttcaacgacaccttcgacctgaagaggcacgtccgcacacacacaggcattcgtccctacaaatgcaacgtctgcaataaagccttcacccagcgctgctctctggagtcccacctgaagaaaatccatggggtgcagcagcagtatgcctataagcagcggcgggacaagctctacgtctgcgaggattgcggctacacgggccccacccaggaggacctgtacctgcacgtgaacagtgcccatccgggcagctcgtttctcaaaaagacatctaaaaaactggcagcccttctgcagggcaagctgacatccgcacaccaggagaataccagcctgagtgaggaggaggagaggaagtgaggagaaggaaggggaggacagacgttcacactgccacgtatgtctacgtggatttttggttttcagcttcccccaccccactggctcttcttaattagaagtgaccagttcacctctgtgtccttttgaaacatcagcagtagggtccattccaagattgtcagttaccgttagtgacgtcaggccctgtaacctgtgtcctgtctggcgcagttgctcacattcaccaaagtttgttttcatgatcctgatggccaagaacaccgtgtgggatttttttttcccccaaggattttcacacacggaaggagaggtatttcttagagagatcatcattttatggtgccttgaaataaaaatacttctacttgaaatgctgtttaagcaaggcaagtgaattttgttattctgaaagagtttacagaaactattttaataaatgaaatgttcttgtgaagcttttaaaagcaaaatggaacattga

SEQ ID NO: 401582 - DNA, 1000 bp, Homo Sapiens; identical to SEQ ID NO: 223165

SEQ ID NO: 401583 - DNA, 1000 bp, Homo Sapiens; identical to SEQ ID NO: 290348

SEQ ID NO: 401584 - DNA, 1000 bp, Homo Sapiens; identical to SEQ ID NO: 117850

SEQ ID NO: 401585 - DNA, 1000 bp, Homo Sapiens; identical to SEQ ID NO: 290350

SEQ ID NO: 401586 - DNA, 1000 bp, Homo Sapiens; identical to SEQ ID NO: 117851

SEQ ID NO: 401587 - DNA, 1000 bp, Homo Sapiens; identical to SEQ ID NO: 117852

SEQ ID NO: 401588 - DNA, 832 bp, Homo Sapiens
cgcccgtcgggggcgcgtctctttcagcagccaatgggctctgcccaccttcgtcctcgtcagcattttgtctaatcgcggcctgtgacgctcgaagggcggggagcagagggagatacagaaaccgacaggggccaggcgcccggtggctccgaagcggggaagtgggacaagatggtttacatctcgaacggacaagtgttggacagccggagtcagtctccatggagattatctttgataacagatttcttctggggaatagctgagtttgtggttttgtttttcaaaactctgcttcagcaagatgtgaaaaaaagaagaagctatggaaactcatctgattccagatatgatgatggaagagggccaccaggaaaccctccccgaagaatgggtagaatcaatcatctgcgtggccctagtccccctccaatggctggtggatgaggaaggtaaatgtctgctctaagaagcagacaaccggacatgcgcattcatagcagaaggaaaccatcaagaagtggaaggctgaccatgatgagcagtagatgaatgtgtatgtctaaacaaggactgctctgtgtcctcacagatgaatgaggtcatgctgggaattccctctgcagggaactggcctgactgacatgcagttccataaatgcagatgtttgtctcattacctttttgtatagtttattaaagtattaatatagttttaataagtaaatatttttaggttgcagaatggactcctcatctttatattcacgaaaaagcaatctgaagaaaacaaataaaagcctgtgtatttagcaaaaaaaaaaaaaaa

SEQ ID NO: 401589 - DNA, 1000 bp, Homo Sapiens; identical to SEQ ID NO: 290352

SEQ ID NO: 401590 - DNA, 1000 bp, Homo Sapiens; identical to SEQ ID NO: 290353

SEQ ID NO: 401591 - DNA, 1000 bp, Homo Sapiens; identical to SEQ ID NO: 290355

SEQ ID NO: 401592 - DNA, 1000 bp, Homo Sapiens
gactatgagatgatcttccggggaacaggagcactgatatttgtcattgactcacaggatgattacatggaagccctggccaggctccacctcacggtgaccagggcctacaaagtgaatactgacatcaacttcgaggtgtttattcataaagtggatggtctgtcagatgaccacaaaattgaaacccaaagagatattcaccagagggcaaacgatgaccttgcagatgctggattagaaaaaattcacctcagcttttatctgacaagcatatatgatcattcaatatttgaagcttttagcaaagttgttcagaaactgattccacaactcccaactctggagaatttgctgaacatctttatctcaaattctggaattgaaaaggcatttctatttgatgtggtcagtaaaatttatattgcaactgatagtactccggtggatatgcaaacctatgagctctgctgtgatatgatagatgtggttattgacatctcttgtatttatggtctcaaagaagatggagcaggaaccccctatgacaaggaatccacagccatcataaagcttaataatacaaccgtgctttatttaaaagaggtgacaaagttcctggctctcgtttgctttgtcagagaggaaagctttgaaagaaaagggctaattgactataattttcattgcttccggaaggccattcatgaagtttttgaggtgagaatgaaagtagtaaaatctcgaaaggttcagaatcggctgcagaagaaaaagagagccacccctaatgggacccctagagtgctgctgtaggtgaggtttcaggaatgtcttttgaaatcagaccttatccatgaggctgctgcgccatgttgcactaaaggaagaggaagaaggagattgggacacataccattgatttgttgttaaaaaaaaaaaaattcctgcaaccctcttgatcttctcttttataattaaagtcagcacttgaagcggg

SEQ ID NO: 401593 - DNA, 1000 bp, Homo Sapiens
cacagctggtcagggattctcatacagcaagagcaacggcagaggcggcagccaggcagggggcagtggctctgccggacagtatggctctgatcagcagcaccatctgggctctgggtctggagctgggggtacaggtggtcccgcgggccaggctggcagaggaggagctgctggcacagcaggggttggtgagacaggatcaggagaccaggcaggcggagaaggaaaacatatcactgtgttcaagacctatatttccccatgggagcgagccatgggggttgacccccagcaaaaaatggaacttggcattgacctgctggcctatggggccaaagctgaacttcccaaatataagtccttcaacaggacggcaatgccctatggtggatatgagaaggcctccaaacgcatgaccttccagatgcccaagtttgacctggggcccttgctgagtgaacccctggtcctctacaaccaaaacctctccaacaggccttctttcaatcgaacccctattccctggctgagctctggggagcctgtagactacaacgtggatattggcatccccttggatggagaaacagaggagctgtgaggtgtttcctcctctgatttgcatcatttcccctctctggctccaatttggagagggaatgctgagcagatagcccccattgttaatccagtatccttatgggaatggagggaaaaaggagagatctacctttccatcctttactccaagtccccactccacgcatccttcctcaccaactcagagctccccttctacttgctccatatggaacctgctcgtttatggaatttgctctgccaccagtaacagtcaataaacttcaaggaaaatgaaaaaaaaaaaaaaaaaaaaaaaaaaaaaaaaaaaaaaaaaaaaaaaaaaaaaaaaaaaaaaaaaaaaaaaaaaaaaaaaaaaaaaaaaaaaaaaaaaaaaaaaaaaaaaaaaaaaaaaaaa

SEQ ID NO: 401594 - DNA, 312 bp, Homo Sapiens
atgggttcccgctgtgccaagctcaacacaggccagagcccaggccacagcccaggccacagcacgggccatggccggggccacgaatcctccatgaaaaagctcatggcctgtgtgagtcaggataacttctccttgtcatcagcgggcgaggaagaggaggaagaggaggaggagggggaagaggaggagaaagaagagctgccggtgcagggcaagctgctgctgctggagcctgagcggcaggaggagggccagaaggacaacgccgaggcccagcagagccccgagcccaagcagacaccctcctga

SEQ ID NO: 401595 - DNA, 1000 bp, Homo Sapiens
gacggggacctgtcggtgccgccctacgacgccttccagacctacgccttcgagggcgcggactcgccggccgcctcgctcagctccctgcacagcggctcgtcgggctccgagcaggacttcgcctatctcagcagctggggtccgcgcttccggcccctggccgcgctctacgccggccaccgcggggacgacgaggcccaggcctcctagcccctcgccctgccgtcggggcgcggctgctcacccgcccagcacacgccggggccccaggacaacgcgtttcccccgcggaccccctttcctgccctcccccaaccctcccttggcggctggacggaggggggacttgctaggagcggactcttccattcctcctcctctaggggtgcagctttggagcccagaggtgcgggattctgaccaacggcattaaaactgaggcgagaccgggcacggtgtggctctggggttagaatgggagatgggggtggcgttgcagagtcgggaaggggcgggtcactcaatcctggcctgggggagaatgctggagggagcacgccgctgagatgcccccaccccaggtttcccccatcagagttaagaggaaagaaggctgttcacttactaagcacctactgtgtgctgggacgctgtacagagaccagctcagtcgtcagagaaaccatgaggtggtgtcctgcacggaatagaaggggaaaggaccccagagaagtggctgtgacccgtccaagggcacctggccagtgaatggcagagcctctggcactgaccagctgcctggcctcgggcaagtcacttcacttctctggtcctcagtttcctcatctgtcaaatggggttaataacagaacctacctcgaagagttgtgaggctaaaaagggttcatatgtgtcaagtggttaggacagtgcctggcacatagtaggtgttcaataaatgctagcctttgttactattaaaaaaaaaaaaaaaaaa

SEQ ID NO: 401596 - DNA, 1000 bp, Homo Sapiens; identical to SEQ ID NO: 290356

SEQ ID NO: 401597 - DNA, 1000 bp, Homo Sapiens; identical to SEQ ID NO: 290358

SEQ ID NO: 401598 - DNA, 1000 bp, Homo Sapiens; identical to SEQ ID NO: 290359

SEQ ID NO: 401599 - DNA, 1000 bp, Homo Sapiens; identical to SEQ ID NO: 118880

SEQ ID NO: 401600 - DNA, 980 bp, Homo Sapiens
gttcaaggttacccatctcaagtagcctagcaacatttgcaacatcccaatggccctgtccttttctttactgatggccgtgctggtgctcagctacaaatccatctgttctctaggctgtgatctgcctcagacccacagcctgggtaataggagggccttgatactcctggcacaaatgggaagaatctctcctttctcctgcctgaaggacagacatgactttggacttccccaggaggagtttgatggcaaccagttccagaagactcaagccatctctgtcctccatgagatgatccagcagaccttcaatctcttcagcacagaggactcatctgctgcttgggaacagagcctcctagaaaaattttccactgaactttaccagcaactgaataacctggaagcatgtgtgatacaggaggttgggatggaagagactcccctgatgaatgaggactccatcctggctgtgaggaaatacttccaaagaatcactctttatctaacagagaagaaatacagcccttgtgcctgggaggttgtcagagcagaaatcatgagatccctctctttttcaacaaacttgcaaaaaatattaaggaggaaggattgaaaactggttcaacatggcaatgatcctgattgactaatacattatctcacactttcatgagttcctcaatttcaaagactcacttctataaccaccacgagttgaatcaaaattttcaaatgttttcagcagtgtaaagaagcgtcgtgtatacctgtgcaggcactagtactttacagatgaccatgctgatgtctctgttcatctatttatttaaatatttatttaattatttttaagatttaaattatttttttatgtaatatcatgtgtacctttacattgtggtgaatgtaacaatatatgttcttcatatttagccaatatattaatttcctttttcattaaatttttactatac

SEQ ID NO: 401601 - DNA, 1000 bp, Homo Sapiens; identical to SEQ ID NO: 290361

SEQ ID NO: 401602 - DNA, 1000 bp, Homo Sapiens
ctggcggcagggcccgggctgcccggcgccgcgggtgcgccacacctgccgctcgagttgcagctccgcgggaagctggaggcggcaggccctggggagccaggcaccaaagccaagaaggggcgtcggagccgcactgtgttcaccgagctgcagctgatgggcctggagaaacgcttcgagaagcagaagtacctttccacgccggacagaatagatcttgctgagtccctgggcctgagccagttgcaggtgaagacgtggtaccagaatcggaggatgaagtggaagaaaatagtgctgcagggcggcggcctggagtctcccaccaagcccaaggggcggcccaagaagaactcaattccaacgagcgagcagcttactgagcaggagcgcgccaaggatgcagagaaaccggcggaggtgccgggcgagcccagcgacaggagccgcgaggactgagggcggtatacggtgcggggcctgggatgcccgcgccacccgcagccccctcactcggcggaaacccgcgagccggcccttccgcgtccaagaagtttacttcctaagcctttttattatgatcttgaatgcggacaattggggccaaacgaggaaggacacagacccaaaagccagacccaggtcccagcgcgcttctgggctctaacctgggagactcgcatccagcccggcggaagctacagtctctaccctgagctccggtgcgcagagcgctccacgcgtattcacgccccgctcctcgcctgcacccccaccccgtctggggcctgccctcccggccggggagcctccaggcacacacccgcttctggacgtcggggacccagcggttgggctcaggccacaacggcctgagattgccccggggcaacccgtcggctatgcctggaggccgggtccccgatgtcgctggggcccctaccccctgttgcgaagacggtgactttttttccaataaaatattttatgacacaaa

SEQ ID NO: 401603 - DNA, 1000 bp, Homo Sapiens; identical to SEQ ID NO: 290362

SEQ ID NO: 401604 - DNA, 1000 bp, Homo Sapiens
aggaggtgggcatctaccgcgtgtccggtgtggccacggacatccaggcactgaaggcagccttcgacgtcaataacaaggatgtgtcggtgatgatgagcgagatggacgtgaacgccatcgcaggcacgctgaagctgtacttccgtgagctgcccgagcccctcttcactgacgagttctaccccaacttcgcagagggcatcgctctttcagacccggttgcaaaggagagctgcatgctcaacctgctgctgtccctgccggaggccaacctgctcaccttccttttccttctggaccacctgaaaagggtggcagagaaggaggcagtcaataagatgtccctgcacaacctcgccacggtctttggccccacgctgctccggccctccgagaaggagagcaagctccctgccaaccccagccagcctatcaccatgactgacagctggtccttggaggtcatgtcccaggtccaggtgctgctgtacttcctgcagctggaggccatccctgccccggacagcaagagacagagcatcctgttctccaccgaagtctaaaggtcccagtccatctcctggaggcagacagatggcctggaaacctctggctaatcgggccatccgtagagcgggaaccttcctgaggtgtccttgggccacccccaagtgttgggccatctgccaagagacagcgacccaaagccgaaggacaggtggcctgggcagatctgcccaggtctgggagccccaagctggcctcagactgtggttttttatgtggccacccgagggcgccccaagccagttcatctcggagtccaggcctgaccctgggagacagggtgaagggagtgatttttatgaacttaacttagagtctaaaagatttctactggatcacttgtcaagatgcgccctctctggggagaagggaacgtgaccggattccctcactgttgtatcttgaataaacgctgctgcttcaaaaaaaa

SEQ ID NO: 401605 - DNA, 1000 bp, Homo Sapiens
cagcctggacagcctcagccgcgccctgggcgtcctagaggagcacgccaacagctcgaggcggagggcacgcaggcatgctgcagacgatgactacaacatcgaggtcctgctgggcgtggatgactctgtggtgcagttccacgggaaggagcacgtacagaagtacctgctgacactcatgaacattgtcaatgaaatctaccatgacgagtccttgggtgcccacatcaacgtggtcctggtgcggatcatcctcctgagctatggaaagtccatgagcctcatcgagatcgggaacccctctcagagcctggagaatgtctgccgctgggcctacctccagcagaagccagacacgggccacgatgaataccacgatcacgccatcttcctcacacggcaggactttgggccttccggcatgcaaggctatgctcctgtcaccggcatgtgccatccggtccgcagctgcaccctgaaccatgaggacggcttctcctcagcgtttgtggtggcccatgagactggccacgtgctgggcatggagcacgacgggcagggcaaccgctgtggcgacgaggtgcggctgggcagcatcatggcgcccctggtgcaggccgccttccaccgcttccactggtcccgctgcagccagcaggagctgagccgctacctgcactcctatgactgcctgctggatgaccccttcgcccacgactggccggcgctgccccagctcccgggactgcactactccatgaacgagcaatgccgctttgacttcggcctgggctacatgatgtgcacggcgttccggacctttgacccctgcaagcagctgtggtgcagccatcctgacaacccctacttttgcaagaccaagaaggggccccccttggacgggactatgtgtgcacctggcaagttcaggccgggcgcggtggctcatgcctgttatcccagcactttgggaggccaaggtaggtggatcgcctga

SEQ ID NO: 401606 - DNA, 958 bp, Homo Sapiens
caggggacaggctgcagccggtgcagttacacgttttcctccaaggagcctcggacgttgtcacgggtttggggtcggggacagagcagtgaccatggccaggctggcgttgtctcctgtgcccagccactggatggtggcgttgctgctgctgctctcagctgagccagtaccagcagccagatcggaggaccggtaccggaatcccaaaggattcagcaccttggcacagctgaagcagaggaacacgctgaaggatggtatcatcatgatccagacgctgctgatcatcctcttcatcatcgtgcctatcttcctgctgctggacaaggatgacagcaaggctggcatggaggaagatcacacctacgagggcctggacattgaccagacagccacctatgaggacatagtgacgctgcggacaggggaagtgaagtggtctgtaggtgagcacccaggccaggagtgagagccaggtcgccccatgacctgggtgcaggctccctggcctcagtgactgcttcggagctgcctggctcatggcccaacccctttcctggaccccccagctggcctctgaagctggcccaccagagctgccatttgtctccagcccctggtccccagctcttgccaaagggcctggagtagaaggacaacagggcagcaacttggagggagttctctggggatggacgggacccagccttctgggggtgctatgaggtgatccgtccccacacatgggatgggggaggcagagactggtccagagcccgcaaatggactcggagccgagggcctcccagcagagcttgggaagggccatggacccaactgggccccagaagagccacaggaacatcattcctctcccgcaaccactcccaccccagggaggccctggcctccagtgccttcccccgtggaataaacggtgtgtcctgagaaacca

SEQ ID NO: 401607 - DNA, 1000 bp, Homo Sapiens; identical to SEQ ID NO: 290365

SEQ ID NO: 401608 - DNA, 1000 bp, Homo Sapiens; identical to SEQ ID NO: 290366

SEQ ID NO: 401609 - DNA, 1000 bp, Homo Sapiens; identical to SEQ ID NO: 290367

SEQ ID NO: 401610 - DNA, 1000 bp, Homo Sapiens; identical to SEQ ID NO: 290368

SEQ ID NO: 401611 - DNA, 1000 bp, Homo Sapiens; identical to SEQ ID NO: 290369

SEQ ID NO: 401612 - DNA, 1000 bp, Homo Sapiens; identical to SEQ ID NO: 290372

SEQ ID NO: 401613 - DNA, 1000 bp, Homo Sapiens
tgaatgtgggaaagcctttagcacaaagcaaaagctcattgtccatcaaaggactcatacaggagagagaccctatggctgtaacgagtgtgggaaagcgtttgcgtatatgtcgtgtctggttaagcataagagaatacacacaagggagaaacaagaggcagccaaggtggaaaatcctcctgcagagaggcacagctcattacacaccagtgatgtcatgcaggagaaaaactctgctaacggggcgactacacaagtgccttctgtggcccctcagacatcattaaacatcagcggcctcctcgcaaacaggaacgtagtccttgtgggacagccagtggtcagatgtgcagcctcaggagataacagaggatttgcacaggacagaaaccttgtgaatgcagtgaatgtggttgtgccttccgtgatcaattatgtcttattttatgttacagaaaacccataggaagaaaactcagatctatgtggaaaagggttgagcaaaaatttgtagttcattatgtggccgaaaagcatacactgagagaacatgtataaggctgagatagcctgataaactcatcctattaaaatgtatgctgtgatacacaggcaaatttgatgttaacctaagcacatacacagcaattgctcgactgtgtcaattaaatgagtaaaggaagcccaagtacttttaagtggaggaaatgaagtactgtgaatttttaaaacagatgagataattggtgtcgggagtgttgcagtgactgaaaagcttcataaggggcagttggtgggaaagggctaatactgtaatggtggaatgtgggacacatatgtgtcaattcagtttccttagaccagtgccagtgtggaggattaattgaaaaccaggaccataaactttcagaactttgtattatgcagagggatctgtgaaactagtcaatttgtttcattaaacaaatattttaaaattaaaaaaaaaaaaaaaaaa

SEQ ID NO: 401614 - DNA, 1000 bp, Homo Sapiens
aagtctttttttttttttccaggaacaactacattttctcatatacaggtagctaggggcaacacagttccattctagagggaaacaaaagggagagccccacaaaactttggggacaagggagagagagactcatctgacacttcttttggaggtcaggatttgtatatcagaattgaagttagaattaagtgaattaaactgaatttgattgtgagtgaacctagaacagcactgaagtattacataacctggaagactgagaagggtatattatttgaaggatctttttatttccccgaggtctttcgcactggagacagcataaaagagtgaacaaatgttgggatgagagaagatgacatcaatgtgggagttcagtataactggggataaactagaagaacctgtgattttacagtcatcttattacctgccagggctcatctagccatggcaatgtttgccttgaatgggggtgaaagcctttctttgttggatcaaatactactacactattacacttccacactatttatttggggatgggctgggagtgacagtagcctagtagttcagctacctgattactgccccattcttttagaagcacatgtctgccaaggagtggtttgtactgctgtgtttggtacatctagtcttttttctgctataagttttccttacctgtcctttagtgtagattttattcatcacaggacagaataatcaaggacaaccaaaatccttttgttagtttcagtacctcagctatcaacatttctgagctaccattcaatgttcctctgtgtcatggagtgaaattcttgttttgtgggtattaggagtgtgggaatgtgataacctaaacaacctttgctctgaaattccatttttccctctttccctgagttgtattgacctacagagttaatttcctttgtatttttttaagaaaatattaaaaatcaacggtctcaaatgccgagagtttgtggct

SEQ ID NO: 401615 - DNA, 1000 bp, Homo Sapiens; identical to SEQ ID NO: 290373

SEQ ID NO: 401616 - DNA, 1000 bp, Homo Sapiens
gatcttgaactaatcctgcacaggcatccttccctttatagattgattccagcaaaggcggaataaaacaaatttcctatgaagagaatcctgatatgaaacaagtcatgtagtctcatggccgggaatctctccacagatactaacaacttaaacttactactttaggagaaaaaaaaaaacattcaatttcggacactgagttatatatgaaattaattaggctctagtccaacagttgtttacattttaaatagtccatattgaatttaattaaaacaagggatgcatgcagtcaaattgatagtttaattcttcaagtgataatataggaagtttcaccttgcctttgtccaagccccacctattaaaaccctttactcacagtttgaaactgaagcagtaaacttgtttccagacatctttttcagattgtcttaagcccaaagttgcctcacttccactattctcagcagccaaccaggatttggcagctgctccactgttacggttgagggaacagggatcagccctgttagaagtctgtgagcctcaaactctacctgttctctgcaatcatccaaaatttgaaaaagaagctatatccagtgtttcactgccaaacagattcactactcttactgattcttcactgagctttgctagtataagcagagttccaagtctcccctagggttgtctctacatttctttatcattccagtgggtagggtttagctgggggaaggacatttcataagggttagttggactgagcagtatggacatttgcttttttcattacgtactgttgtttttccttgttaggtgtgctttggtggttttaatattattgtgccagggatggggaaatggggggggttgtgtgggaagagtacttattattgtgttttcttcagtgtaattgttcttggtaattgatacctctctgttttatttctctcattctttcaaaataaaactttttgaaatttggagg

SEQ ID NO: 401617 - DNA, 1000 bp, Homo Sapiens; identical to SEQ ID NO: 223169

SEQ ID NO: 401618 - DNA, 1000 bp, Homo Sapiens; identical to SEQ ID NO: 290375

SEQ ID NO: 401619 - DNA, 1000 bp, Homo Sapiens; identical to SEQ ID NO: 223170

SEQ ID NO: 401620 - DNA, 1000 bp, Homo Sapiens; identical to SEQ ID NO: 223171

SEQ ID NO: 401621 - DNA, 1000 bp, Homo Sapiens; identical to SEQ ID NO: 290377

SEQ ID NO: 401622 - DNA, 1000 bp, Homo Sapiens; identical to SEQ ID NO: 290379

SEQ ID NO: 401623 - DNA, 1000 bp, Homo Sapiens; identical to SEQ ID NO: 223172

SEQ ID NO: 401624 - DNA, 1000 bp, Homo Sapiens; identical to SEQ ID NO: 117856

SEQ ID NO: 401625 - DNA, 1000 bp, Homo Sapiens; identical to SEQ ID NO: 117857

SEQ ID NO: 401626 - DNA, 1000 bp, Homo Sapiens; identical to SEQ ID NO: 223173

SEQ ID NO: 401627 - DNA, 1000 bp, Homo Sapiens; identical to SEQ ID NO: 290383

SEQ ID NO: 401628 - DNA, 1000 bp, Homo Sapiens
agcacaaactcagcatctagttctaagaagaggtcaaatgggctctctcattcttggagtgaaaggattccagacacaaaacatatttcagacatctgtgaaaatgggcgacctcgaagtaactcttggcaaggtaacctgggaggcaacaaaaagaaaatcagaggcaaaagatttagacctcggtctaattcaactgagactttatctcctgccaagtctccttcttcatcaactgggtctattgcctccagcagaaaatacccttacccaatgcctccacttcctgatgaggacaagaaagtgaaccgacaaagtgccaggctatgggagacatccatttaagatcaactgtttacatgtgatacatcgaaaactgtttacttcaacttttatagaaacccaggctcatggaatcactgcaaatctatctgctcttcagacaatacgaagaccctctgagatgctacagaggagaggaagcggagtttcacatctggttaccattttctttttgtcattggcttaggatttaactaaccatgaaaagaactactgaaatattacactataacatggaacaataaaggtactggtatgttaatggataatccgcatgacagataatatgtagaaatattcataaagttaactcacatgacccaaatgtagcaagtttcctaaggtacaatagtggattcagaacttgacgttctgaggcacatcctcactgtaaacagtaatgctatatgcatgaagcttctgtttattgttttccatatttaaggaaacaacatcccataatagaaatgagcatgcagggctaaggcatataggatttttctgcaggactttaaagctttgaaaggccaatatcccataggctaactttaaacatgtatttttatttttgttttgttttttacttttcatatttatattagcatacaaggacaattgtatatatgtaacatttttaaaattttaaaaaaaaaaaaaa

SEQ ID NO: 401629 - DNA, 1000 bp, Homo Sapiens; identical to SEQ ID NO: 117858

SEQ ID NO: 401630 - DNA, 1000 bp, Homo Sapiens; identical to SEQ ID NO: 223175

SEQ ID NO: 401631 - DNA, 1000 bp, Homo Sapiens
ctgggctggacattccagttttagccaggcattggttaaaagagttagatgggatgatgctcagactcatctgatcaaagttccgagaggcatagaaggaaaaacgaagggccttagaggggcctacaaaccagcaacatgaaatggacaaaccaatctgcttaagatcctgtcatagttttagatcattggttatcctgatttgcaaagtgatcaaaagcattctagccatgtgcaaccaaacaccaccaaaaataaaatcaaacaaaactaagttgtgaaggaagggagggaaggtcatagccttcttaagcagaggtgttccattgttttagccaatccttggttgaatcttaggaatgaacagtgtctcaagctcattcacgtttcatgaccaactggtagttggcactgaaaaaacttttcagggctgtgtgaattgtgtgactgattgtcctagatgcactactttatttaaaaaataatgttcataaggagtcaatatgtagtttaagagacaatcagtgtgtgtcttataaatggtacatctgtggtttttaatctgtgctagacttcaaaactgtgatctcctgttattgtatgcaaccttgaactccacctctgcaggggttcttctgtgattaaataggttataattataagcaaaattcagagcaactgagtactgatctaaaaagattacctttggctggaggtgagctgcactgaaactttacgacaaaatgtctctggacaaagagagtcagagaagagaagcaaaaggacactaattcatctgtaatttactgttggtaagcctagcagtaaagagacattggtcaattgctctgaccctgatgaattattaaactgagatcattgtcgtttatgcttgcagatgttaaatggaaaagttatatatgcataaaccttttcttcctggatttggcagatatgtataattatattaaaatggttctagcacaaaaaaaaaaaaaaa

SEQ ID NO: 401632 - DNA, 1000 bp, Homo Sapiens; identical to SEQ ID NO: 117859

SEQ ID NO: 401633 - DNA, 1000 bp, Homo Sapiens
aatgtttcatgacgactattcttgcaagtgtccttctacaatatgtgtgatggacaaagcactgagcttctatatacccacagacttcagttcctgcagccgtctcagctatgacaagttttttgaagataaattatcaaattgcctctttaatgctccattgcctacagatatcatatccactccaatttgtgggaaccagttggtggaaatgggagaggactgtgattgtgggacatctgaggaatgtaccaatatttgctgtgatgctaagacatgtaaaatcaaagcaacttttcaatgtgcattaggagaatgttgtgaaaaatgccaatttaaaaaggctgggatggtgtgcagaccagcaaaagatgagtgcgacctgcctgaaatgtgtaatggtaaatctggtaattgtcctgatgatagattccaagtcaatggcttcccttgccatcacgggaagggccactgcttgatggggacatgccccacactgcaggagcagtgcacagagctgtggggaccaggtaggaggacaaatcctttcccctgtgcatgtgcgaaggaaaatcatttcagatgacagtgtttaaccatggtcaaaggaccattctgtcctatccttcttagaagcttcgaactcaaaatcatggaaaggttttaagatttgaggttggttttagggttgctagatttagcaagtaaaaataaggatggccccgttaaattttaacttaaaattaacaagttttttgttaattttttgttttttgtctcagcatcagtatatcccatgcaatatttgaggtgtgctcatactaaaattatttgtgtatctgaaattcaaattaaactgggtgtctttttcttttcatctggcaaccctactaagatcataaacccttggaaatctgtgtgtgtgcgggtgtgtgtgtgtgtgtgtgtgcaggggtggcagaagtactgtgggatgggacagaaataaaaaaaaaaaaaa

SEQ ID NO: 401634 - DNA, 1000 bp, Homo Sapiens; identical to SEQ ID NO: 290388

SEQ ID NO: 401635 - DNA, 1000 bp, Homo Sapiens; identical to SEQ ID NO: 293065

SEQ ID NO: 401636 - DNA, 1000 bp, Homo Sapiens; identical to SEQ ID NO: 117861

SEQ ID NO: 401637 - DNA, 1000 bp, Homo Sapiens; identical to SEQ ID NO: 223176

SEQ ID NO: 401638 - DNA, 1000 bp, Homo Sapiens; identical to SEQ ID NO: 223177

SEQ ID NO: 401639 - DNA, 1000 bp, Homo Sapiens
aggctgatggtcactgctgcagtagctgctggcatctccaatatccagtctggctatgagatcccccaactgtcacagtacctggactacatccatgtcatgacctacgacctccatggctcctgggagggctacactggagagaacagccccctctacaaatacccgactgacaccggcagcaacgcctacctcaatgtggattatgtcatgaactactggaaggacaatggagcaccagctgagaagctcatcgttggattccctacctatggacacaacttcatcctgagcaacccctccaacactggaattggtgcccccacctctggtgctggtcctgctgggccctatgccaaggagtctgggatctgggcttactacgagatctgtaccttcctgaaaaatggagccactcagggatgggatgcccctcaggaagtgccttatgcctatcagggcaatgtgtgggttggctatgacaacatcaagagcttcgatattaaggctcaatggcttaagcacaacaaatttggaggcgccatggtctgggccattgatctggatgacttcactggcactttctgcaaccagggcaagtttcccctaatctccaccctgaagaaggccctcggcctgcagagtgcaagttgcacggctccagctcagcccattgagccaataactgctgctcccagtggcagcgggaacgggagcgggagtagcagctctggaggcagctcgggaggcagtggattctgtgctgtcagagccaacggcctctaccccgtggcaaataacagaaatgccttctggcactgcgtgaatggagtcacgtaccagcagaactgccaggccgggcttgtcttcgacaccagctgtgattgctgcaactgggcataaacctgacctggtctatattccctagagttccagtctcttttgcttaggacatgttgcccctacctaaagtcctgcaataaaatcagcagtcaaaaca

SEQ ID NO: 401640 - DNA, 1000 bp, Homo Sapiens
attactgggatgtgatgaactatcttcggttgaacaaatcctggcagaatttaaagtcagagctctggaatgtcacccagacaagcatcctgaaaaccccaaagctgtggagacttttcagaaactgcagaaggcaaaggagattctgaccaatgaagagagtcgagcccgctatgaccactggcgaaggagccagatgtcgatgccattccagcagtgggaagctttgaatgactcagtgaagacgtcaatgcactgggttgtcagaggtaaaaaagacctgatgctggaagaatctgacaagactcataccaccaagatggaaaatgaggaatgtaatgagcaaagagaaagaaagaaagaggagctggcttcaaccgcagagaaaacggagcagaaagaacccaagcccctagagaagtcagtctccccgcaaaattcagattcttcaggttttgcagatgtgaatggttggcaccttcgtttccgctggtccaaggatgctccctcagaactcctgaggaagttcagaaactatgaaatatgaaatatctctgcttcaaaaaatgaggaagagcaagactgtcccctatgctgccaacatgcagtctttgtttatgtcttaaaaatgtcatgtttatgtcatgtctgtgaattgctgagtactaattgattcctccatccttgaatcagttctcataatgctttttaaataagaaaaattcagaagatgaatttcttccaatatttgaataaattaaagctcttagatacagagtagattgtattatatgctttttcctattaatactacttatagaaatccattaaaaagcaatctctgtacagtgtatttaaatatttcattgacatactgtgatctctattagtgatggatgtacaaaaaatgttttcttacccttgacttacaatgaaatgtgaaattacttgtctgaaccccgtggggagaaataaataattttcccaaagttcaaaaaaa

SEQ ID NO: 401641 - DNA, 998 bp, Homo Sapiens; identical to SEQ ID NO: 290392

SEQ ID NO: 401642 - DNA, 642 bp, Homo Sapiens
gctgaagtgaaaacgagaccaaggtctagctctactgttggtacttatgagatccagtcctggcaacatggagaggattgtcatctgtctgatggtcatcttcttggggacactggtccacaaatcaagctcccaaggtcaagatcgccacatgattagaatgcgtcaacttatagatattgttgatcagctgaaaaattatgtgaatgacttggtccctgaatttctgccagctccagaagatgtagagacaaactgtgagtggtcagctttttcctgttttcagaaggcccaactaaagtcagcaaatacaggaaacaatgaaaggataatcaatgtatcaattaaaaagctgaagaggaaaccaccttccacaaatgcagggagaagacagaaacacagactaacatgcccttcatgtgattcttatgagaaaaaaccacccaaagaattcctagaaagattcaaatcacttctccaaaagatgattcatcagcatctgtcctctagaacacacggaagtgaagattcctgaggatctaacttgcagttggacactatgttacatactctaatatagtagtgaaagtcatttctttgtattccaagtggaggagccctattaaattatataaagaaata

SEQ ID NO: 401643 - DNA, 1000 bp, Homo Sapiens; identical to SEQ ID NO: 290393

SEQ ID NO: 401644 - DNA, 1000 bp, Homo Sapiens
gaacggggtcagcggcgagctcatcgaggcccgggcctttgacatgtgggccggagatgtcaacgacctgttgaagtttattcggccactgcacgaaggcaccctggtgttcgtggcatcctacgacgacccagccaccaagatgaatgaagagaccagaaagctcttcagtgagctgggcagcaggaacgccaaggagctggccttccgggacagctgggtgtttgtcggggccaagggtgtgcagaacaagagcccctttgagcagcacgtgaagaacagtaagcacagcaacaagtacgaaggctgccccgaggcgctggagatggaaggctgtatcccgcggagaagcacggccagctagcacggccagtgccaggaccgggccgagggaggccagaccaagggaggcacgcgcgctgccgggcggacagaggctgaggctcacaccccacacccgggcaggagcgctccctggccccaacacatcggggctccgaggcagtgaccagaacgtggtctcaaggtggtgggggctatgggggctgcagggggtagccctgccgcactttgtcacgggagcccagggtacccgcctccttttcgtaacactgttccccccggtcagcccatctagccctgtcctccattcctcacgccatctccatccccatcttgagtcctggaacggccctgggtgcctgcccctcactgtgcatctctgggagcagcccggcaggttggggcgtcttccagaacctctcccttctggagccactctgcactgcgggctaaacatgtttccagtgtgattccttccagtgagccaaacccggtggctgcttcatgagcctgactgcctctcgcctgctctcagcaggaagggacccctggagcaggctggcccggggtggtgaagtagctggagcccgatcacagtcccgcggtttgtcagggggcccaccttctagatgaccccttaataaagtgatggccccac

SEQ ID NO: 401645 - DNA, 1000 bp, Homo Sapiens; identical to SEQ ID NO: 117863

SEQ ID NO: 401646 - DNA, 1000 bp, Homo Sapiens; identical to SEQ ID NO: 223178

SEQ ID NO: 401647 - DNA, 1000 bp, Homo Sapiens
atgtagcatctactggtaccctggaactgtgctgaactttatagctacacagatgactaagacgcaatttggccttgccagttcatgactgagttatacatgaacagaacaagatcctcatgaaacctctgatatggacatggtcagatgttgaaggccagaggccggctctgctcatctgcacagctgcagcaggacccacgcagggagttaaggatctcgaggaagtgcctccatctgcagcgagtcagtcagcccaagcacgctgtgctctggggagctggggttatggcaagccctttgagccaagaagtgtgaaaaacatacactctactcctgcttacccagatgccacaatgcacagacaactcctggctccggtggaaggaaggatggcagagacattgaatcagaaactccatgttgccaatgtgctggaagatgaccccggctacctacctcacgtctacagcgaggaaggggagtgtggaggggccccatccctcagctctctggccagcttggaacaggagttgcaacctgatttgctggactctttgggttcaaaagcgactccgtttgaggaaatatattcagagtcaggtgttccttcctaaaaaaaaaagtctattttggagaattgaaataattcatggaagggaatcactattcagggatttttcccctttgctcttcttttccctccttaaaagaaaaattaccttctagtcctaggatgaggacacactattagtttgaattaaatgctttgatattctcagatcagccatcttgaaccaaagcaaaaccacaagttacactttcttaaaatttgatttgtcatattttctagagaaacttgaatttaattgtgttattcttagcttccactggcagcctagctttgagggtaaatgaaaatataacccatagattacccagccacttgggaacagcaggtaatactgaagaaaaataaaaatagattttgaaaacgtta

SEQ ID NO: 401648 - DNA, 1000 bp, Homo Sapiens; identical to SEQ ID NO: 290396

SEQ ID NO: 401649 - DNA, 1000 bp, Homo Sapiens; identical to SEQ ID NO: 117864

SEQ ID NO: 401650 - DNA, 1000 bp, Homo Sapiens; identical to SEQ ID NO: 117865

SEQ ID NO: 401651 - DNA, 1000 bp, Homo Sapiens; identical to SEQ ID NO: 220426

SEQ ID NO: 401652 - DNA, 1000 bp, Homo Sapiens; identical to SEQ ID NO: 117866

SEQ ID NO: 401653 - DNA, 1000 bp, Homo Sapiens
tggagatgcagcagctccgcctggcgaggcagctggaagggctgtgggcaaggctgggcttgggcaccagggaggatgtaactccaaaatcagactctgaagctcaaggagaaggggaaaggctctttgacctggaggagacgctgggcagacaccgccggatcctgcaggctctgcggggtctctccaagcagctggcccaggctgagagacaatggaagaagcagctggggcccccaggccaagccaggcctgacggaggctgggccctggatgcttcctgccagattccatccaccccagggaggggtggccacctctccatgtcactcaataaggactctgccaaggtcggtgccctgctccatggacagtggactctgctccaggccctgcaagagatgagggatgcagctgtccgcatggctgcagaagcccaggtctcctacctgcctgtgggcattgagcatcatttcttagagctggaccacatcctgggcctcctgcaggaggagcttcggggcccggcgaaggcagcagccaaggccccccgcccacctggccagcccccaagggcctcctcgtgcctgcagcctggcatcttcctgttctacctcctcattcagactgtaggcttcttcggctacgtgcacttcaggcaggagctgaacaagagccttcaggagtgtctgtccacaggcagccttcctctgggtcctgcaccacacacccccagggccctggggattctgaggaggcagcctctccctgccagcatgcctgcctgacccacctcagagcctgctttgcatcactgggaagcaggcagtgtcttgggtgggggcttggtcagtatcctctccgtctgggtgcccagctcccacgcacacctgagctttcggcatgctcccacctcgttaaaggtgatttccctctccccaaaaaaaaaaaaaaaaaaaaaaaaaaaaaaaaaaaaaaaaaaaaaaaaaaaaaaaaaaaa

SEQ ID NO: 401654 - DNA, 1000 bp, Homo Sapiens; identical to SEQ ID NO: 290401

SEQ ID NO: 401655 - DNA, 1000 bp, Homo Sapiens; identical to SEQ ID NO: 117868

SEQ ID NO: 401656 - DNA, 1000 bp, Homo Sapiens; identical to SEQ ID NO: 117869

SEQ ID NO: 401657 - DNA, 1000 bp, Homo Sapiens
gcattgagtgtccagattacagaggcaatcgtcttagtactcaccttcagcaagaggggtctgaattgctgtggtatttagcagagaaggatatgaattcaaagcctgaattcttagaaactgtctttttactggagaccatgctgggggggccccagtacgtcaagcaccatatgattttgcctcatacccgatcttctgacttagaggtccagcttgatgttaacctgaagccattaccatttaatagagaagccacgccggctgaaaatgtagccaaattaaggcttgagcatgtgggagtcagccttacagatgatttgatgaataagttactaaaagggaaagcaagaggacatttccagggcaaaactgagtcagagcctgggcagcagcccatggagttggagaataaggcagctgtacctctggggggcttcctttgcaatgtagcagataaatcaggggccatggagatggctggcctgtgccccgcagcctgcatgcagaccccaagaatgaagctggctgttcagttcacaaacaggaaccagtattgctatggctccagggatctccttggactgcacaatatgaagaggcggcagctggctcggcttggctaccgtgtggtagagttatcctactgggaatggctcccactactgaaacgaactcgcttagaaaagttggcgtttcttcatgagaaagtattcacctctgctctctgaagggcatttaggggcatttctatggcaaagctataggtgtatactgtaccaggtgttgcaaaatgattataaaagccagaatgtaagtttggcgataaaatagtgtgttgaggagacttaattgtatccaaggcaggttagagctagtgtatgttactgtgaattgtaatgtagttggattgtacaaattactgcaaatgtatacatgttactcttagtaaataataaacatcttaatatgtcctacggtcaagtaaaaaaaaaaaaaa

SEQ ID NO: 401658 - DNA, 1000 bp, Homo Sapiens; identical to SEQ ID NO: 117870

SEQ ID NO: 401659 - DNA, 1000 bp, Homo Sapiens; identical to SEQ ID NO: 290405

SEQ ID NO: 401660 - DNA, 1000 bp, Homo Sapiens; identical to SEQ ID NO: 117871

SEQ ID NO: 401661 - DNA, 1000 bp, Homo Sapiens
caatggcactctgaatctggaagttttaggccagatagcccaggctctgggaacgcgaggcctaacaacccagactggggcacatttgaagaggtgtcaggaaatgtaagtccagggacaaggagagagtaccacacagaaaaactggtcacttctaaaggagataaagagctcaggactggtaaagagaaggtcacctctggtagcacaaccaccacgcgtcgttcatgctctaaaaccgttactaagactgttattggtcctgatggtcacaaagaagttaccaaagaagtggtgacctccgaagatggttctgactgtcccgaggcaatggatttaggcacattgtctggcataggtactctggatgggttccgccataggcaccctgatgaagctgccttcttcgacactgcctcaactggaaaaacattcccaggtttcttctcacctatgttaggagagtttgtcagtgagactgagtctaggggctcagaatctggcatcttcacaaatacaaaggaatccagttctcatcaccctgggatagctgaattcccttcccgtggtaaatcttcaagttacagcaaacaatttactagtagcacgagttacaacagaggagactccacatttgaaagcaagagctataaaatggcagatgaggccggaagtgaagccgatcatgaaggaacacatagcaccaagagaggccatgctaaatctcgccctgtcagaggtatccacacttctcctttggggaagccttccctgtccccctagactaagttaaatatttctgcacagtgttcccatggccccttgcatttccttcttaactctctgttacacgtcattgaaactacacttttttggtctgtttttgtgctagactgtaagttccttgggggcagggcctttgtctgtctcatctctgtattcccaaatgcctaacagtacagagccatgactcaataaatacatgttaaatggatgaatg

SEQ ID NO: 401662 - DNA, 1000 bp, Homo Sapiens; identical to SEQ ID NO: 119142

SEQ ID NO: 401663 - DNA, 1000 bp, Homo Sapiens; identical to SEQ ID NO: 119142

SEQ ID NO: 401664 - DNA, 1000 bp, Homo Sapiens
ctcttctagttaccacggcaacccctgcagctcctctgcctttgtgctctgttcctgtccagcaggggtctcccaacaagtgctctttccaccccaaaggggcctctccttttctccactgtcataatctctttccatcttacttgcccttctatactttctcacatgtggctccccctgaattttgcttcctttgggagctcattcttttcgccaaggctcacatgctccttgcctctgctctgtgcactcacgctcagcacacatgcatcctcccctctcctgcgtgtgcccactgaacatgctcatgtgtacacacgcttttcccgtatgctttcttcatgttcagtcacatgtgctctcgggtgccctgcattcacagctacgtgtgcccctctcatggtcatgggtctgcccttgagcgtgtttgggtaggcatgtgcaatttgtctagcatgctgagtcatgtctttcctatttgcacacgtccatgtttatccatgtactttccctgtgtaccctccatgtaccttgtgtactttcttcccttaaatcatggtattcttctgacagagccatatgtaccctaccctgcacattgttatgcacttttccccaattcatgtttggtggggccatccacaccctctccttgtcacagaatctccatttctgctcagattccccccatctccattgcattcatgtactaccctcagtctacactcacaatcatcttctcccaagactgctcccttttgttttgtgtttttttgaggggaattaaggaaaaataagtgggggcaggtttggagagctgcttccagtggatagttgatgagaatcctgaccaaaggaaggcacccttgactgttgggatagacagatggacctatggggtgggaggtggtgtccctttcacactgtggtgtctcttggggaaggatctccccgaatctcaataaaccagtgaacagtgtgactcggcaaaaaaaaaaaa

SEQ ID NO: 401665 - DNA, 1000 bp, Homo Sapiens; identical to SEQ ID NO: 290408

SEQ ID NO: 401666 - DNA, 1000 bp, Homo Sapiens; identical to SEQ ID NO: 290409

SEQ ID NO: 401667 - DNA, 1000 bp, Homo Sapiens; identical to SEQ ID NO: 223183

SEQ ID NO: 401668 - DNA, 1000 bp, Homo Sapiens; identical to SEQ ID NO: 223184

SEQ ID NO: 401669 - DNA, 1000 bp, Homo Sapiens; identical to SEQ ID NO: 290412

SEQ ID NO: 401670 - DNA, 1000 bp, Homo Sapiens; identical to SEQ ID NO: 223185

SEQ ID NO: 401671 - DNA, 1000 bp, Homo Sapiens; identical to SEQ ID NO: 290414

SEQ ID NO: 401672 - DNA, 1000 bp, Homo Sapiens; identical to SEQ ID NO: 223186

SEQ ID NO: 401673 - DNA, 1000 bp, Homo Sapiens; identical to SEQ ID NO: 223187

SEQ ID NO: 401674 - DNA, 1000 bp, Homo Sapiens; identical to SEQ ID NO: 290415

SEQ ID NO: 401675 - DNA, 1000 bp, Homo Sapiens; identical to SEQ ID NO: 117873

SEQ ID NO: 401676 - DNA, 1000 bp, Homo Sapiens
aacaaaaaatgtgccagaaagaaatgctcttgcttcctcaactttccaagtaacatttttatctttgatttgtaaatgatttttttttttttttttatcgaaagagaattttacttttggatagaaatatgaagtgtaaggcattatggaactggttcttatttccctgtttgtgttttggtttgatttggcttttttcttaaatgtcaaaaacgtacccattttcacaaaaatgaggaaaataagaatttgatattttgttagaaaaacttttttttttttttctcaccaccccaagccccatttgtgccctgccgcacaaatacacctacagcttttggtcccttgcctcttccacctcaaagaatttcaaggctcttaccttactttatttttgtccatttctcttccctcctcttgcattttaaagtggagggtttgtctctttgagtttgatggcagaatcactgatgggaatccagctttttgctggcatttaaatagtgaaaagagtgtatatgtgaacttgacactccaaactcctgtcatggcacggaagctaggagtgctgctggacccttcctaaacctgtcactcaagaggacttcagctctgctgttgggctggtgtgtggacagaaggaatggaaagccaaattaatttagtccagatttctaggtttgggtttttctaaaaataaaagattacatttacttcttttactttttataaagttttttttccttagtctcctacttagagatattctagaaaatgtcacttgaagaggaagtatttattttaatctggcacaacactaattaccatttttaaagcggtattaagttgtaatttaaaccttgtttgtaactgaaaggtcgattgtaatggattgccgtttgtacctgtatcagtattgctgtgtaaaaattctgtatcagaataataacagtactgtatatcatttgatttattttaatattatatccttatttttgtc

SEQ ID NO: 401677 - DNA, 1000 bp, Homo Sapiens; identical to SEQ ID NO: 290416

SEQ ID NO: 401678 - DNA, 1000 bp, Homo Sapiens
cgggctgcctgccacacccatcgctcctgcctctgggctgcactcacccccgctgctgggcaccaccgctgtgcctggcctcgtggctcccatcaccaatggctttgcaggtgtcgtgccctttccaggtgggcaccctgccctggaaaccgtctatgccaatggccttgtgccctacccagctcagagcccgactgtggccgagacactgcatcctgccttctccggagtccagcagtacacagccatgtaccccaccgcggccatcacgcccatcgcgcacagcgtcccccagccgccgcccctcctgcagcagcagcagcgagaaggtcccgagggctgtaacctgtttatctaccacctcccccaggagtttggagacacggagctgacgcagatgttcctacccttcggcaatatcatttcctccaaggtgtttatggatcgagctaccaaccagagcaagtgtttcggcttcgtgagctttgataacccggccagcgcccaggcagccatccaggccatgaacggcttccagatcggcatgaagaggctcaaagtccagctgaagcggcccaaagacccgggacacccctactgaccgcgcccacagccgccctgaggctgtaggcatggcccagacctgcgtgatttgtacaatgtactttatttctgctacgagtaatttcatgaagtttcaacttgcaaactgacttttgggacaaaccaacacacacacagaagagaaagcaaagaacttggaactttgggttgactcggtttgagttttgtgtcaaagaagatttcccgcggctgaagaggttggtgttcctgttacgtgtttcaggtgagaagcagcaaagcgtcttaatgttcaaaacgcctctctttggtctggagaaaaaaaaaaaaaaaaaaaaacaactaaaaatttatttaataaaagttttacttgctaaaaaaaaaaaaaaaaaaaaaaaaaaaaaaaaaaaaaaaaaaa

SEQ ID NO: 401679 - DNA, 1000 bp, Homo Sapiens; identical to SEQ ID NO: 117875

SEQ ID NO: 401680 - DNA, 1000 bp, Homo Sapiens; identical to SEQ ID NO: 290419

SEQ ID NO: 401681 - DNA, 1000 bp, Homo Sapiens; identical to SEQ ID NO: 223188

SEQ ID NO: 401682 - DNA, 1000 bp, Homo Sapiens; identical to SEQ ID NO: 290422

SEQ ID NO: 401683 - DNA, 1000 bp, Homo Sapiens; identical to SEQ ID NO: 223189

SEQ ID NO: 401684 - DNA, 1000 bp, Homo Sapiens; identical to SEQ ID NO: 117877

SEQ ID NO: 401685 - DNA, 1000 bp, Homo Sapiens; identical to SEQ ID NO: 117878

SEQ ID NO: 401686 - DNA, 1000 bp, Homo Sapiens
tgtacggcgcgcatctggccagcatcagcacacccgaggaacaggacttcatcaacaaccggtaccgggagtaccagtggatcggactcaacgacaggaccatcgaaggcgacttcttgtggtcggatggcgtccccctgctctatgagaactggaaccctgggcagcctgacagctacttcctgtctggagagaactgcgtggtcatggtgtggcatgatcagggacaatggagtgacgtgccctgcaactaccacctgtcctacacctgcaagatggggctggtgtcctgtgggccgccaccggagctgcccctggctcaagtgttcggccgcccacggctgcgctatgaggtggacactgtgcttcgctaccggtgccgggaaggactggcccagcgcaatctgccgctgatccgatgccaagagaacggtcgttgggaggccccccagatctcctgtgtgcccagaagacctgcccgagctctgcacccagaggaggacccagaaggacgtcaggggaggctactgggacgctggaaggcgctgttgatccccccttccagccccatgccaggtccctagggggcaaggccttgaacactgccggccacagcactgccctgtcacccaaattttccctcacaccctgcgctcccgccaccacaggaagtgacaacatgacgaggggtggtactggagtccaggtgacagttcctgaaggggcttctgggaaatacctaggaggctccagcccagcccaggccctctccccctaccctgggcaccagatcttccatcagggccggagtaaatccctaagtgcctcaactgccctctccctggcagccatcttgtcccctctattcctctagggagcactgtgcccactctttctgggttttccaagggaatgggcttgcaggatggagtgtctgtaaaatcaacaggaaataaaactgtgtatgagcccaggcaaaaaaaaaaaaaaaaaaaaaaaa

SEQ ID NO: 401687 - DNA, 1000 bp, Homo Sapiens; identical to SEQ ID NO: 290425

SEQ ID NO: 401688 - DNA, 1000 bp, Homo Sapiens; identical to SEQ ID NO: 290426

SEQ ID NO: 401689 - DNA, 1000 bp, Homo Sapiens
gtccgagctctgcctcaatcagggatgctaacctctatgttagcggccttcccaaaaccatgacccagaaggaactggagcaacttttctcgcaatacggccgtatcatcacctcacgaatcctggttgatcaagtcacaggagtgtccagaggggtgggattcatccgctttgataagaggattgaggcagaagaagccatcaaagggctgaatggccagaagcccagcggtgctacggaaccgattactgtgaagtttgccaacaaccccagccagaagtccagccaggccctgctctcccagctctaccagtcccctaaccggcgctacccaggtccacttcaccaccaggctcagaggttcaggctggacaatttgcttaatatggcctatggcgtaaagagactgatgtctggaccagtccccccttctgcttgttcccccaggttctccccaattaccattgatggaatgacaagccttgtgggaatgaacatccctggtcacacaggaactgggtggtgcatctttgtctacaacctgtcccccgattccgatgagagtgtcctctggcagctctttggcccctttggagcagtgaacaacgtaaaggtgattcgtgacttcaacaccaacaagtgcaagggattcggctttgtcaccatgaccaactatgatgaggcggccatggccatcgccagcctcaacgggtaccgcctgggagacagagtgttgcaagtttcctttaaaaccaacaaagcccacaagtcctgaatttcccattcttacttactaaaatatatatagaaatatatacgaacaaaacacacgcgcgcacacacacacatacacgaaagagagagaaacaaacttttcaaggcttatattcaaccatggactttataagccagtgttgcctaagtattaaaacattggattatcctgaggtgtaccaggaaaggattttataatgcttagaaaaaaaaaaaaaaaaaaaa

SEQ ID NO: 401690 - DNA, 1000 bp, Homo Sapiens; identical to SEQ ID NO: 117879

SEQ ID NO: 401691 - DNA, 628 bp, Homo Sapiens; identical to SEQ ID NO: 117880

SEQ ID NO: 401692 - DNA, 1000 bp, Homo Sapiens
ccaacgacagaaggatttaaatatcccaggccttcctcagtaccaccttctccttcagggtctcaggcctccagtcctcagagcagtgatgtggaagatgaagtggaggatgagagatacgatgaggaagaggaggctgaaagggatcggttaaatatcaagtcaccattttcactgagccacgttcctcatgggaagaaaaagctgcatggtgaatataagaactgaattcatgtgctgcatgaagagctaatttaaaaaagcaaagtaagactaattatttaaaataaaaatgccacaaatttcattttctccttctaagtattacaatggagtttattctctgcctaaaaagtggaagaaattgagtgaatgataattttgtaatttaggataagatccaagttattttccccaactcttgtttcccccataaagttaggcatgaggaggagcactcattaaaggcagaagacggaaaagtgtttttaaaatggtgaatttaagtggtaaggattttctcttactctgtttatttttaaatgatcatcataatcctttgcttactatttatgcagcttctctaccccaccacacaaatttcccatttcccccccgaaaaccttgatcttacccatgaatgtgcactacctacattttttaaatagctaggtttttactgattattttcatttttcacatgcatcagaaccatgatttagatgtagttttacagagacaaaaatccatgagtgaatagctatcctaagtccatattttgatgcatattaatggacatttatgtcacttttgaaatctagaattgatgttgtaattaatgcaagatattaccatgtacatggtaccaccatcttactgtaacatttttctattgtttaaatagaaagcctttttaaaatttggtcaatcttcatagatgataacttgtaaaatccaagtaaataaacacattaatatttaataacttaaaaaaaaaaaa

SEQ ID NO: 401693 - DNA, 1000 bp, Homo Sapiens; identical to SEQ ID NO: 290427

SEQ ID NO: 401694 - DNA, 1000 bp, Homo Sapiens; identical to SEQ ID NO: 290428

SEQ ID NO: 401695 - DNA, 1000 bp, Homo Sapiens; identical to SEQ ID NO: 223192

SEQ ID NO: 401696 - DNA, 1000 bp, Homo Sapiens; identical to SEQ ID NO: 290430

SEQ ID NO: 401697 - DNA, 1000 bp, Homo Sapiens
tattcccacaaagctaatggacagcatgagatatccttcagtgttgcagatactgaagtgacttctagcatatcaataaattcttcagaagtaccagaggtcaccccatcagagaatgttggatcaagctcccaagcatcctcatcagataaagccaacatgttgcaggaatactccaagtttctgcagcaggctttggacagaactagccaaaatgatgcctatttgaatagcccgagccttaactttgtgactgataaccagaccctcccaaatcagccagcattctcttccatagacaagcaggtctatgccaccatgcccatcaatagctttcgatcaggaatgaattctccactaagaacaactccagataagtcccactttggactaatagttggtgattcacagcactcatttcccttttcaggtgatgagacaaaccatgcttctgccacatcaacacaggactttctggatcaagtcacttctcagaagaaagctgaggcccagcctgtccaccaagcttaccaaatgagctcctttgaacagcccttccgtgctccctatcatggatcaagagctggaatagctactcaatttagcactgccaatggacaggtgaaccttcggggaccagggacaagtgctgaattttcagaatttcccttggtgaatgtaaatgataatagagctgggatgacatcttcacctgatgccacaactggccagacttttggctaaaaaaaaaaaaaaagtgaaataatactggcactttagaacagattaatcaagagtggggttactatgtgtaaatggagtgctgtacagatttaagagcaatgcgtaataacaagttaagctgatatacgatgataataactgcatttcgtttggttagtcagcattctttgaactgccttacatgttgtcacctttatagaagcaatgcattacttgttttagatcagaaacttgctattccacccacaccaagtaa

SEQ ID NO: 401698 - DNA, 1000 bp, Homo Sapiens
caggcagaaggagacactcccagcatggaggagggtttatcttttcatcctaggtcaggtctacaatgggggaaggttttattatagaactcccaacagcccacctcactcctgccacccacccgatggccctgcctcccccatcccatccccaacatccctgtaccaccttctctcacatcttctaaagctttgtacaaatcacaatggtgcacttccaacaaaatatatcaataggtgttttcctctcttattttgtaaatagtattattttagctattaagctggataccttctttcaaattcagccattcagttgtaaagttgggaagaagtttcttgacaagactctgcaattaaatgcttaaaatttggaggggatccttccttgattacatcaagtatgttggtacatgggtttatacaagttcctcttgagaaggcaaaaagaccaccatgtgtgagagctctttgacttggccaataggggcctatcttaatgcacttgtttggacacatttctgatcttatttgtaaaggctgcaaaaggagaggatgaaatgctgtaaaagtaggaaatgaagtggaagctggaagaaaatgtaattggtggtacagctatgggccagatggtggaggggagggtggggacccctgccggcaagcagagtgtcacagctggctttcctcacttgggaaaagggtactgccggtctagcagcctcctctgtactcagccaggacacccagcgcgtgggacctgtttgtgtctgttttgcttccttgggaacggcacagtcactcaccctgccatttgcggaaatgacctggtgcactttgactgttaagcaatgcgttattgctgtagtcaaggttagtgcaagcaaggaaacattcccagtaaggtatttgtttccattttctgtctgtgcttctgtcagaaacttgctaggacatttagtggccaataaaaaagaaattcctaatttcaaccttaaaa

SEQ ID NO: 401699 - DNA, 1000 bp, Homo Sapiens; identical to SEQ ID NO: 117882

SEQ ID NO: 401700 - DNA, 356 bp, Homo Sapiens
atgtctggccgcggcaaaggcgggaagggtcttggcaaaggcggcgctaagcgccaccgtaaagtactgcgcgacaatatccagggcatcaccaagccggccatccggcgccttgctcgccgcggcggcgtgaagcgcatctccggcctcatctacgaggagactcgcggggtgctgaaggtgttcctggagaacgtgatccgggacgccgtgacctatacagagcacgccaagcgcaagacggtcaccgccatggatgtggtctacgcgctcaagcgccagggccgcaccctctacggtttcggtggttgagcgtccctttctatcaataaaaggcccttttcagggccacccta

SEQ ID NO: 401701 - DNA, 546 bp, Homo Sapiens
gcgcgagtcgtagtgtcgctgtttgcgggtctccgcggcgggaccggggcgcagcggggtcgctgaggcgagggtgtcatgtcagacaacgaggacaattttgatggcgacgactttgatgatgtggaggaggatgaagggctagatgacttggagaatgccgaagaggaaggccaggagaatgtcgagatcctcccctctggggagcgaccgcaggccaaccagaagcgaatcaccacaccatacatgaccaagtacgagcgagcccgcgtgctgggcacccgagcgctccagattgcgatgtgtgcccctgtgatggtggagctggagggggagacagatcctctgctcattgccatgaaggaactcaaggcccgaaagatccccatcatcattcgccgttacctgccagatgggagctatgaagactggggggtggacgagctcatcatcaccgactgagctggagtcatcttcctgcccttgccccatgcccaattttcattctcactttatatgtgtaaataataaaatattcaactttcc

SEQ ID NO: 401702 - DNA, 1000 bp, Homo Sapiens; identical to SEQ ID NO: 223195

SEQ ID NO: 401703 - DNA, 1000 bp, Homo Sapiens
tcccccaaatcgaggttaccttcgacattgacgccaatggcatccttaacgttaccgccgccgacaagagcaccggtaaggaaaacaaaatcaccatcaccaatgacaaaggtcgtctgagcaaggacgacattgaccggatggtgcaggaggcggagcggtacaaatcggaagatgaggcgaatcgcgaccgagtcgcggccaaaaacgccctggagtcctatacctacaacatcaagcagacggtggaagacgagaaactgaggggcaagattagcgagcaggacaaaaacaagatcctcgacaagtgtcaggaggtgatcaactggctcgaccgaaaccagatggcagagaaagatgagtatgaacacaagcagaaagagctcgaaagagtttgcaaccccatcatcagcaaactttaccaaggtggtcctggcggcggcagcggcggcggcggttcaggagcctccgggggacccaccatcgaagaagtggactaagcttgcactcaagtcagcgtaaacctctttgcctttctctctctctctttttttttgtttgtttctttgaaatgtccttgtgccaagtacgagatctattgttggaagtctttggtatatgcaaatgaaaggagaggtgcaacaacttagtttaattataaaagttccaaagtttgttttttaaaaacattattcgaggtttctctttaatgcattttgcgtgtttgctgacttgagcatttttgattagttcgtgcatggagatttgtttgagatgagaaaccttaagtttgcacacctgttctgtagaagcttggaaacagtaaaatatataggagcttaaattgtttatttttatgtactactttaaaactaaactgaacattgcagtaatgttaaggacaggtatactttttgcaaacaaatgcataaatgcaaatgtaaagtaaagctgaaattgatctcaaaaaaaaaaaaaaaaaaaaaaaaaaaaaaaaaaa

SEQ ID NO: 401704 - DNA, 1000 bp, Homo Sapiens; identical to SEQ ID NO: 117884

SEQ ID NO: 401705 - DNA, 1000 bp, Homo Sapiens
tggctgccattcacccaagctactacgccgttccccgccagcagttcccctatgagcgcaggcgtgtttccactgcctttgtggcagacagcgaaggggacttctattatggtggggcagtcttcggggggcaggtggccagggtatatgagtttactaggggctgccacatggccatcctggcggacaaggccaatggcatcatggctgcctggcgggaggaaagccacctgaaccgtcacttcatctcaaacaagccgtccaaggtgctgtcccccgagtacctctgggacgacaggaagccccagccacccagcctgaagctgatccgcttttctacactggacaaggatatcagctgcctgaggagctgaccacggagctgggggttgccatggatggggacccaaagacctgcagccaccagtgcttcactagcgtgcagaccagccctgtcccgcctccctgtcagtcaggcgaattcaaccggaaaagggacgtggaaaggccactgtgaactgcagagggctgtgcacacagtagcacacaggatctcacagtaacgcggcatgggaacagtgagacagggggaggggaggcgcagttacaaaggcagggcccggcaggcttgccacgttctgcagccgtgcctttgcggggcaggctctgaagcctcagcccgactcagagtgcctgaaccctgccgcgccagtcccccgtttattgcatattgcccttaacgtagcatttctaataccctggtgtgaaggcgccctagaccccttttctctggtcacaggggtcctgggtcctttgatgtctcccaaccacatgtagccaattcctcactcaggcccccagagtgagcctttgaaatggaacaggtctaggctccctcggtttcctgcaccccaaagtgagccgcactctcaggggactagccacctccttcttaagagggtttggggcagtttataataaagggggcgtgtgctcaaaa

SEQ ID NO: 401706 - DNA, 1000 bp, Homo Sapiens; identical to SEQ ID NO: 223197

SEQ ID NO: 401707 - DNA, 1000 bp, Homo Sapiens; identical to SEQ ID NO: 290436

SEQ ID NO: 401708 - DNA, 1000 bp, Homo Sapiens; identical to SEQ ID NO: 290437

SEQ ID NO: 401709 - DNA, 713 bp, Homo Sapiens
ccccacatcggtccgtcctgcttccagctgctgcagcgcgccttcgccgccaaagcatccagcagccccctgctccggcccagcatggcgaccccgacccagacccccacaaaggctcctgaggaacctgacccattttactatgactacaacacggtgcagactgtgggcatgactctggcaaccatcttgttcctgctgggtatcctcatcgtcatcagcaagaaggtgaagtgcaggaaggcggactccaggtctgagagcccaacctgcaaatcctgtaagtctgagcttccctcttcagcccctggtggcggcggcgtgtaacaccttcccgaggaaactccgctgccgaccctgcctgagcgcgggagcctgaggaccgggtggaggcggtggggacccagccgcgcgccgggagcgctccccggaatgagccgccccacccaccccaaggctggagccgctgcaccctgctgtccctctccaggccttggcaatgacgatcccccaaagagcccgtctgcaccccagacccagggcctcaggcctccagctcctgggatccgggagtccatcccggcccagcacccccagcatccccgtgtatggcccccctgcacctccttgtctcatccccgaagatccgtccccctggcccctcagtgtccatgtcttgagcttaataaatgtgcatttggttttttcctctg

SEQ ID NO: 401710 - DNA, 1000 bp, Homo Sapiens; identical to SEQ ID NO: 400860

SEQ ID NO: 401711 - DNA, 1000 bp, Homo Sapiens; identical to SEQ ID NO: 117886

SEQ ID NO: 401712 - DNA, 1000 bp, Homo Sapiens
ctggcccggtgggaagcccagacgaggaggacggggaaccggattacgtgaatggggaggtggcagccacagaagcctagggcagaccaagaagaaaggagccaaggcaaagagggaccactgtgctcatggacccatcgctgccttccaaggaccatttcccagagctactcaacttttaagcccctgccatggttgctcctggaaggagaaccagccaccctgaggaccacctggccatgcgtgcacagcctgggaaaagacagttactcacgggagctgcaggcccgtcaccaagccctctcccgacccaggctttgtggggcaggcacctggtaccaagggtaacccggctcctggtatggacggatgcgcaggatttaggataagctgtcacccagtccccataacaaaaccactgtccaacactggtatctgtgttcttttgtgctatgaatttggattcctaattgctattgttggttgctggggttttaaatgattgataagcttgtacagttaacttatagagggggagccatatttaacattctggatttcagagtagagatttctgtgttgtctcctagaaagcattacatgtagtttatttcagcatccttgttgggtggggccctggctctcttcccctttggtgggacctcccctttctttgggcttcagttcactcaggaagaaatgaggctgtcgccatctttatgtgcttccagtggaaatgtcacttgctacagacaatagtgcatgagagtctagagaagtagtgaccagaacagggcagagtaggtcccctccatggccctgaatcctcctctgctccagggctggcctctgcagagctgattaaacagtgttgtgactgtctcatgggaagagctggggcccagagggaccttgagtcagaaatgttgccagaaaaagtatctcctccaaccaaaacatctcaataaaaccattttagttgaaaaaaaaaaaaaaaaaa

SEQ ID NO: 401713 - DNA, 1000 bp, Homo Sapiens; identical to SEQ ID NO: 223199

SEQ ID NO: 401714 - DNA, 1000 bp, Homo Sapiens; identical to SEQ ID NO: 290441

SEQ ID NO: 401715 - DNA, 876 bp, Homo Sapiens; identical to SEQ ID NO: 290442

SEQ ID NO: 401716 - DNA, 1000 bp, Homo Sapiens; identical to SEQ ID NO: 223200

SEQ ID NO: 401717 - DNA, 1000 bp, Homo Sapiens
gctgctcactgcggccgcccgatccttcaggttgccctgggcaagcacaacctgaggaggtgggaggccacccagcaggtgctgcgcgtggttcgtcaggtgacgcaccccaactacaactcccggacccacgacaacgacctcatgctgctgcagctacagcagcccgcacggatcgggagggcagtcaggcccattgaggtcacccaggcctgtgccagccccgggacctcctgccgagtgtcaggctggggaactatatccagccccatcgccaggtaccccgcctctctgcaatgcgtgaacatcaacatctccccggatgaggtgtgccagaaggcctatcctagaaccatcacgcctggcatggtctgtgcaggagttccccagggcgggaaggactcttgtcagggtgactctgggggacccctggtgtgcagaggacagctccagggcctcgtgtcttggggaatggagcgctgcgccctgcctggctaccccggtgtctacaccaacctgtgcaagtacagaagctggattgaggaaacgatgcgggacaaatgatggtcttcacggtgggatggacctcgtcagctgcccaggccctcctctctctactcaggacccaggagtccaggccccagcccctcctccctcagacccaggagtccaggcccccagcccctcctccctcagacccgggagtccaggcccccagcccctcctccctcagacccaggagccccagtccccagcatcctgatctttactccggctctgatctctcctttcccagagcagttgcttcaggcgttttctccccaccaagcccccacccttgctgtgtcaccatcactactcaagaccggaggcacagagggcaggagcacagaccccttaaaccggcattgtattccaaagacgacaatttttaacacgcttagtgtctctaaaaaccgaataaataatgacaataaaaatggaatcatcctaaattgta

SEQ ID NO: 401718 - DNA, 1000 bp, Homo Sapiens; identical to SEQ ID NO: 223201

SEQ ID NO: 401719 - DNA, 1000 bp, Homo Sapiens; identical to SEQ ID NO: 117887

SEQ ID NO: 401720 - DNA, 1000 bp, Homo Sapiens
cttctgttttctctttaacatttaaaatatctcaatgcacatgatataattaaacactaataataccatgactgcatagctaatattagctgctattgcatgctcctagatgctagaacttattgggcatgtggtatactgaagcgatacccgttagacaaggatattttacttcttccagacaccagaagaaatggccttcaattatttgaaaagagacacagagacacctctggctacctagagttcttcctgtcttgaccaatttatgagaaagctcccagttgggactttatctcacaagtggaatcacagtcaagacggatcaataatatggttggctcagcaaagccagctgtgctcttttagggtttaaacaagccacacgttagaaagcaacactgtttttatgtagttcatatatattaccacgacatttaacatcaatattgtatatgttgaaggaggtataataaactcagtcatatatagtgaacagttcaaatgggaaagtgttctaaaacatattatttgaggtttgtcatattcatctttggtttactaaatttacttagaaatatttgaaatgcaaaattgtgtgaaatcaccttatcaaattaaaatgggaagaaagtaattttaataatttttaataatcatatgtcagcattctgactacttaccacatcaaatctgggcccaaacagcctcagttaactgcataattcaggaacaaaaccagcttgctttgttgcacgcctgggcaatttcagccaggacattaggaccacttgttgtacatctgaataattatggaagttgggacatgttaaggaaaacaaatatgttcatcaccaacaatcagctgtcattttattaatctatcccttttgtgcatgcaccatttctctcttactaacagtttcatctgttcacattttccttgattcaaatattaaagttcagaaaaaaaaaaaaaaaaaaaaaaaaaaaaaaaaaa

SEQ ID NO: 401721 - DNA, 1000 bp, Homo Sapiens; identical to SEQ ID NO: 290446

SEQ ID NO: 401722 - DNA, 1000 bp, Homo Sapiens; identical to SEQ ID NO: 117888

SEQ ID NO: 401723 - DNA, 1000 bp, Homo Sapiens
gaagcccagtgtgcacgaccttctcggatacctccagcaacataaactccatcctggaattgttccccaaattattatgcctggatggccagcagtcacccagagcaactttatgtggtactgaagcccacaagaggttaccaacctgtaagggaagcttctttggatctgagatgttgaagaatctggtcctgcaattcctgcagcagtattacttgatctatgactctggagatcgacagggtctccttagtgcttaccacgatgaggcctgcttctccctgagcattcccttcaatcctgaggactcagccccgagcagcttctgcaagttcttcaaggatagcaggaatataaaaattctcaaggacccctaccttcggggggagctgctgaagcacacaaaacttgatattgtggactccctcagtgcgttgcctaaaactcagcatgacctcagctccttcctggtggacatgtggtaccagacggaatggatgctctgcttttctgtcaacggggtgttcaaggaagtggaaggacagtctcagggttctgttctcgccttcacccggaccttcattgctacccctggcagcagttccagtctgtgcatcgtgaatgacaagctctttgtgcgggataccagccaccaagggacccagagtgccttgttcaccctagtgcccacagccttctccagctccgtgcctgccttctcccaggagcagcagaaaatgctgccttcgtaacaaccagtgtgactacgtcagagctcctcatgttcttgcatggcccaagatgtatttccctgtgactgaaccaggagatctggctggggctaagaagccgaagcccaactcacagggctgactctcatccttccaaaggggccagttgttctgtgcacttgtccacccctgttacccccaggatctctgttccttttcacaataaagtatggtgtcttgttatgtcaaaaaaaaaaaaaaaaaaaaaa

SEQ ID NO: 401724 - DNA, 1000 bp, Homo Sapiens
gctgttcggctgcgctgggaccatcctgttcttcaacctcttcctggagcgcatcatctcgctgctggccttcatcatgcgcgcctgccgggagcgccagctgcgccgcagcggcctgctgcccgccaccttccgccgcggctccgcgctctcggaggccgacagcctggcgggctggaagccctcggtgtaccacgtgctgctcatcctgggcctgttcgccgtgctgctgtcctgctgcgcctcggccatgtacaccagcgtggagggctgggactacgtggactcgctctacttctgcttcgtcaccttcagcaccatcggcttcggggacctggtgagcagccagcacgccgcctaccggaaccaggggctctaccgcctgggcaacttcctcttcatcctgctcggcgtgtgctgcatttactcgctcttcaacgtcatctccatcctcatcaagcaggtgctcaactggatgctgcgcaagctgagctgccgctgctgcgcgcgctgctgcccggctcctggcgcgcccctggcccggcgcaatgccatcaccccaggctcccggctgcgccgccgcctggccgcgctcggtgccgaccccgcggcccgcgacagcgacgccgagggccgccgcctctcgggcgagctcatctccatgcgcgacctcacggcctccaacaaggtgtcgctggcgctgctgcagaagcagctgtcggagacggccaacggctacccgcgcagcgtgtgcgtcaacacgcgccagaacggcttctcgggcggcgtgggcgcgctgggcatcatgaacaaccggctggccgagaccagcgcctccaggtagaccgcccgtccgcccgcgccggggaccctctccaggccgcggggccgccgggcgtggtttgcttctctcagtcactgctggcgctttcttaatctttatccaataaaatgaaacaaaaaaaatttttttaaaaaaaaaaaaaaaaaaaaaaaaaaa

SEQ ID NO: 401725 - DNA, 1000 bp, Homo Sapiens
gcttcgaaaagtgcatctcttcacaattattcagatgagttgccttggccttttgtggataataaaagtttcaagagctgctattgtctctcccatgatggtgttatccctggtttttgtaagaaagttgatggacttgttgttcacgaaacgggaactctgctggttggatgatttgatgcctgagagtaagaaaaagaaactggaatatgctgaaaaagaagaagaacaatgtgtgctacctatggaagatgagggcacagtacaactcccattggaagggcactatagagatgatccatctgtgatcaatatatctgatgaaatgtcaaagactgccttgtggaggaaccttctgattactgccgataactcaaaagataaggagtcaagctttccttccaaaagctccccttcctaatcactctagaagctgattccccaaagcattgaaagccgaaaagagaagaaagctgactcagggatagttgttgacagggagacttgtctatgactcgatcttcaatttattttttacatatatatgagaagagtgtcacaattattaataaaactgcttggatcatgtatggtaaattctgtccctcaacccaaatccactttcatacggtaagtagggcaaaacttgtttcatttcggtgttaaaatttcggagcaggagacatccctgtgagcagaaacaatagccaatgcagaatctgtgtgttccttgctgaacgtaagacatttgtaaactggattctgattgtcagttttatgagagcaatagcttccttaaagagataagtcatatacacctagtttgtattctcatactttagagacctgaagacgcctgataatttcattcaggagaatttttgaaaggtagtcaaacttctttttagtttttatagcttagcattagtgacttatttcaaaagacccaaatcaaaaagttagtttgaaagcattttttaataattgtatttatgcattt

SEQ ID NO: 401726 - DNA, 1000 bp, Homo Sapiens; identical to SEQ ID NO: 290448

SEQ ID NO: 401727 - DNA, 1000 bp, Homo Sapiens
aacatgcggctgtcggtcgctgcagcgatctcccatggccgcgtatttcgccgtatgggcctcggtcccgagtcccgcatccatctgttgcggaacttgctcacagggctggtgcggcacgaacgcatcgaggcaccatgggcgcgtgtggacgaaatgaggggctacgcggagaagctcatcgactatgggaagctgggagacactaacgaacgagccatgcgcatggctgacttctggctcacagagaaggatttgatcccaaagctgtttcaagtactggcccctcggtacaaagatcaaactgggggctacacaagaatgctgcagatcccaaatcggagtttggatcgggccaagatggcagtgatcgagtataaagggaattgcctcccacccctgcctctgcctcgcagagacagccaccttacactcctaaaccagctgctgcagggtttgcggcaggacctcaggcaaagccaggaagcaagcaaccacagctcccacacagctcaaacaccagggatttaactggatctgaagagtctgcagcccttaatcagtacccatgatcacaggcctttggagcacttttactctctgagaagaactggagctagagatgtaaaatggacagtcttgatggggttgagaaccttctggggagccagatgaccctctctttgcacaatagataaaagtctttatatgaatatatataaatttatttattttttccttcctgtgggatttctggagaatgagaattatccaaatgctcagtctacctgagatagtaaattcatggcttatgcttctggtccttaaatttgggttatttttggttagtgcaattttgtttttcttaatgccagtttacatgggaatgcatcctataattccaaatgttgccagaggtggttgtgttttgacatctggtctcctagagatgagtgcttgggatttcttagagaaagattacttcctgacaggggtaggg

SEQ ID NO: 401728 - DNA, 1000 bp, Homo Sapiens; identical to SEQ ID NO: 290450

SEQ ID NO: 401729 - DNA, 1000 bp, Homo Sapiens; identical to SEQ ID NO: 117890

SEQ ID NO: 401730 - DNA, 1000 bp, Homo Sapiens; identical to SEQ ID NO: 290452

SEQ ID NO: 401731 - DNA, 1000 bp, Homo Sapiens
tctgagacttgcttccaaagtcatttcccaccacatgcagacatgtgtggagaacagggaattgatagctgctgagctgaagcagtgggttcagctggtcatcttgtcatgtgaagaccatcttcctacagagtctaggctggccgtcgttgaagtcctcaccagtactacaccacttttcctcaccaacccccatcctattcttgagttgcaggatacacttgctctctggaagtgtgtccttacccttctgcagagtgaggagcaagctgttagagatgcagccacggaaaccgtgacaactgccatgtcacaagaaaatacctgccagtcaacagagtttgccttctgccaggtggatgcctccatcgctctggccctggccctggccgtcctgtgtgatctgctccagcagtgggaccagttggcccctggactgcccatcctgctgggatggctgttgggagagagtgatgacctcgtggcctgtgtggagagcatgcatcaggtggaagaagactacctgtttgaaaaagcagaagtcaacttttgggccgagaccctgatctttgtgaaatacctctgcaagcacctcttctgtctcctctcaaagtccggctggcgtcccccaagccctgagatgctctgtcaccttcaaaggatggtgtcagagcagtgccacctcctgtctcagttcttcagagagcttccaccagctgctgagtttgtgaagacagtggagttcacaagactacgcattcaagaggaaaggactttggcttgcttgaggctgctggcctttttggaaggaaaggaaggggaagacaccctagttctcagtgtttgggactcttatgcagaatcgaggcagttaactcttccaagaacagaagcggcatgttgaagaaaatctgggggattgggatgggggtatgtgtggatttttcctccactaaatctgcaggaaacatgttgaacataaattcaaaaattttatccc

SEQ ID NO: 401732 - DNA, 1000 bp, Homo Sapiens; identical to SEQ ID NO: 117891

SEQ ID NO: 401733 - DNA, 1000 bp, Homo Sapiens
gaagaattaagtggcattgactaccttgaagcctgcctcatttcctcctctcctgcctgtgaaagcagagagagctcttctttgggagagctgcggcatcacatcgcttgggcccattacccatgggcagtgccagctactcttgacacagataacttcagactgatcttctgtccaaggaacatcatctgaggatcgagatctaaagctttgagtcatgagaatgattctctccacctggtgctcatatgaaggtgggagtgatttctagattgggcccctactgggtaagatctcacttggtctgagaaaagtgactgctccagaaaggaagaggtatgggagtcatagggtggctactgcattccactcagctaattatgatccaggacttggcgctggacattggcagttctgctctgaatgaagtcagaacagaaccaaaatggcctcaggaaggaatgccagtgtttcccaagacctcctggagatgcactcacaccagactgcacagacccctccacattatgccacacacggcctagacgttgtgtttcctcagccattttccctctgctgccccagtttactctgtccaaaaccctaaggttcttctctcacttgaacacagacgaccttgcttgggtgatgagacatcccctttatctcttcctctactgctggccaagacccgtcactttataagaagctcagatgcagcagtgctggagagctctctctttatgcaaaaatctcatttcaccaggagctttcagaagtttcacctgggctaaattcagcagcatttctgttaggatatttagatggaggttttattttcacacttggattcttgctctgtaccaatatttgcctccttttctgtgactgaactgggtttttctgacatgcctagactcctaataaaggtatttcttccttggtgccttcaaaaaaaaaaaaaaaaaaaaaaaaaaaaaaaaaaaaaaaaaaaaaaaaa

SEQ ID NO: 401734 - DNA, 1000 bp, Homo Sapiens
ggccctggaactggtggtcttcaatgacaaagtcagtcccccaagtctggggttcctggctggctatggtattatgggattatatgcttcagttgtccttgtgattgggaaatttgtccgtgaattcttcagtgggatttctcactccatcatgtttgaagagcttccaaatgtggatcgaattttgaagttgtgcacagatatttttttagttcgagagacaggagaactggagctagaagaagatctctatgccaaattaatattcctatatcgctcaccagagacaatgatcaaatggactagagaaaaaacaaattgaaaccttagaacacagactgcaaataatgttaacatttgaattttttttaaaagcacaatattctcataagagctaagcatttctagttcgacggaaatggtttgtttctcttctgataggtagacaaaaggagctgatatccttctgcagtaaaagctacctggcaagttaaggcactgttgaaaatgttatttgtaactccatttctctgaaatcagggctacttgctttatgttttagtcaacagtgtctcgcattctgattgatcatgtgaaggaatcatttatgggccccgtccctaagagaaacagaagaggagtcagaaagaaagatgcctgtgttttcctctgtggggcccgtgcacttcctggagagatgctacaatgcaatatacagcgctccatccccactggggaagctgctgtgatgagactagatgagccttcaacacactcagaaaatgcaacagcaatagggggcagacagctcctacctgtgtttctaggagcaaaagagagggaactaattgcccgtgaagacgccagtggaaggatcagcctcattctaagcaaaaacatagtattagtgatactcttactgccttatcttaaccaaggactaataggatacctttccattaaacaccagtgacttctcaggaaaaaaaaaaaaaaaaaa

SEQ ID NO: 401735 - DNA, 1000 bp, Homo Sapiens; identical to SEQ ID NO: 223207

SEQ ID NO: 401736 - DNA, 1000 bp, Homo Sapiens; identical to SEQ ID NO: 290455

SEQ ID NO: 401737 - DNA, 1000 bp, Homo Sapiens; identical to SEQ ID NO: 290456

SEQ ID NO: 401738 - DNA, 1000 bp, Homo Sapiens; identical to SEQ ID NO: 117893

SEQ ID NO: 401739 - DNA, 1000 bp, Homo Sapiens; identical to SEQ ID NO: 290458

SEQ ID NO: 401740 - DNA, 1000 bp, Homo Sapiens; identical to SEQ ID NO: 117894

SEQ ID NO: 401741 - DNA, 1000 bp, Homo Sapiens; identical to SEQ ID NO: 118713

SEQ ID NO: 401742 - DNA, 1000 bp, Homo Sapiens; identical to SEQ ID NO: 290461

SEQ ID NO: 401743 - DNA, 1000 bp, Homo Sapiens; identical to SEQ ID NO: 290463

SEQ ID NO: 401744 - DNA, 1000 bp, Homo Sapiens; identical to SEQ ID NO: 117895

SEQ ID NO: 401745 - DNA, 1000 bp, Homo Sapiens; identical to SEQ ID NO: 223212

SEQ ID NO: 401746 - DNA, 1000 bp, Homo Sapiens; identical to SEQ ID NO: 290466

SEQ ID NO: 401747 - DNA, 1000 bp, Homo Sapiens
ctgcatctgcaacaattgagcaacttcttccatggatatttttccattggagatcttaatgaggcaagtaaatggatattggatccatttctttttaatatcgattttgttgatgatagttatttaatgaaaaatgatcttgctgaattacgagctagtggccaaatcctaatggaatttgagacaatgaagcttgaggatttctggtgtgcccaattcacagcatttccaaacctggcaaagacagctctagaaatccttatgccatttgcaactacatacctttgtgagttgggattttcatcacttttacatttcaaaacaaagtccagaagctgctttaatctgagtgatgatatccgtgtggctatttcaaaaaaagttcctcgtttctcggacatcattgaacaaaagctacagctacagcagaagtcactgtaagctgatatacttttttaatgaataatttcaatcttaatatcattgtaaaattaagctgtaattctgtctctttcatatttatgatatactgaattctatgtctaaaaaacttaagaactttaattttgaatgaggcatgtgaaaatatgttttgagaataaaaacacagcagaaaagattaagtactactgcctagttgctatcatgagattttcccaattctaagtatctgtttaacctgttcgtgtggtatatgaaaaagatacctaagcactagaatatccagctaaatggtgcaataggctaggaattgagccaggagaaaagagaagatatcccagaagtcaaaaaggcaaaatgaaagattgagttcgcccgtctttgttatggagaggttaatgaaatcagaagaggattatgaaatataatgggaaaaggaatgatctggcttatgtaagacttacttttaaatatactctttggagttagtctcacaatgtccattcccctagctcctgtgctatgaatatcatattaataaatagcctaatatattaaa

SEQ ID NO: 401748 - DNA, 1000 bp, Homo Sapiens
tcacagccagagcttccagctgctgcgctacccacccttcctgcccgtggccttccatgtgctgtttgcttccagccacacacccaggatcaccttccccagcagccagcaggaggcccagaaccggatgagccagatgaggaacctgatccagacgctggtgtccggcatcgcgccagccacgcgcagccgggccacgccccaggccctgctcctcgatgccctctgcctgctcctggacattcttgcacccaagctccgccccgtgagcacacagctgtacagcacccgtgaaaagcaacagctggccagcctggtgggcacgatgctcgcttacagcctgacctaccgccaggagcgcacgcccgatggccagtacatctacaggctggagccgaacgtggaggaactctgccgcttccctgagctgcctgcccgcaagcccctcacctaccagacgaagcagctcatcgcccgcgagatcgaggtggagaagatgcggcgggcggaggcttctgcccgggtagagaacagcccccaggtggatgggagccccccagggctcgagggtctgctggggggcattggggagaaaggggtgcaccgacctgccccacgcaaccatgagcagcggctggagcacatcatgaggcgagcggcccgggaggaacagcctgagaaggacttctttggacgtgtggtcgtcaggagcacagcagtcccgagtgcaggggacacggccccggagcaggactcagtggagcggcgcatgggcacagcggtgggcaggagcgaggtctggttccgcttcaacgagggtgtttccaacgccgtgcggcgcagcctgtacatcagggacttgctttagttttttgagccgcggacatgccctcgcattgcttcccgcagagtgcagagacaggaagctggagatgtctttataaagtcacacctttacaggctgtaaaaaaaaaaaaaaaaaaaaaaaaaaaaaaaaaaa

SEQ ID NO: 401749 - DNA, 1000 bp, Homo Sapiens; identical to SEQ ID NO: 290468

SEQ ID NO: 401750 - DNA, 1000 bp, Homo Sapiens; identical to SEQ ID NO: 290469

SEQ ID NO: 401751 - DNA, 1000 bp, Homo Sapiens; identical to SEQ ID NO: 290470

SEQ ID NO: 401752 - DNA, 1000 bp, Homo Sapiens; identical to SEQ ID NO: 290471

SEQ ID NO: 401753 - DNA, 1000 bp, Homo Sapiens; identical to SEQ ID NO: 223215

SEQ ID NO: 401754 - DNA, 1000 bp, Homo Sapiens; identical to SEQ ID NO: 223216

SEQ ID NO: 401755 - DNA, 1000 bp, Homo Sapiens; identical to SEQ ID NO: 290475

SEQ ID NO: 401756 - DNA, 1000 bp, Homo Sapiens
cgatctgctcctccatcccctcctcctccagggacccgccacacagccctgggaccccgctcggcctccctgctctccctgcagactgaactccttctggacctggtggctgaagcccagtcccgccgcctggaggagcagagggccaccttctacaccccccaaaacccctcaagcctagcccctgccccactccgtcctctcgaggacagagaacagctttacagcactatcctcagtcaccagtgccagcggatggaagcccagcggtcagagcctcccctccctccaggggggcaagagctcctggagttgctgctgagagttcagggtgggggtcgaatggaggagcaaaggtcccggccccccacacacacctgctgagacttgagccccaaccagcccttccttgccactggtctcaaagctgggcagcccattgcatgccctcaactcttgcttggcaggggtaccagagactgaaagacacggcacaaatctcaatattcatctcccacatcaccttccctgggaactggacagggtgaaagtcctcaaactctgggaacaggcgagatggaacagggatttaactccccgcccacaggtccatgggagcttgaggcagtaagggggatcccaggcacccatctcaaggagtggctgggagtcttttccctaacttgtggggacaccaccagttgtcaagctactaggcagtagggtctgagggctcaggcctccacctgagaggttataacctgagagacagctctacccttcctcccagtaagaagggaaggtgggtgggcacctgagagattaagactattctcccagtcccactaccagcacccccgatccctgagactgaggggtttacgggctgtgaatggaccttcagccctgcccaccctccctccccactgctgctgagtctgtctgatgttttggttgtgtgaataaatataattcccctctggaaaaaaaaaaaaaaaaa

SEQ ID NO: 401757 - DNA, 1000 bp, Homo Sapiens; identical to SEQ ID NO: 117897

SEQ ID NO: 401758 - DNA, 1000 bp, Homo Sapiens; identical to SEQ ID NO: 223217

SEQ ID NO: 401759 - DNA, 1000 bp, Homo Sapiens; identical to SEQ ID NO: 290479

SEQ ID NO: 401760 - DNA, 1000 bp, Homo Sapiens; identical to SEQ ID NO: 223218

SEQ ID NO: 401761 - DNA, 1000 bp, Homo Sapiens; identical to SEQ ID NO: 117898

SEQ ID NO: 401762 - DNA, 1000 bp, Homo Sapiens; identical to SEQ ID NO: 290482

SEQ ID NO: 401763 - DNA, 1000 bp, Homo Sapiens; identical to SEQ ID NO: 223219

SEQ ID NO: 401764 - DNA, 1000 bp, Homo Sapiens; identical to SEQ ID NO: 117899

SEQ ID NO: 401765 - DNA, 1000 bp, Homo Sapiens; identical to SEQ ID NO: 117901

SEQ ID NO: 401766 - DNA, 1000 bp, Homo Sapiens; identical to SEQ ID NO: 223221

SEQ ID NO: 401767 - DNA, 1000 bp, Homo Sapiens; identical to SEQ ID NO: 117902

SEQ ID NO: 401768 - DNA, 1000 bp, Homo Sapiens; identical to SEQ ID NO: 290486

SEQ ID NO: 401769 - DNA, 1000 bp, Homo Sapiens; identical to SEQ ID NO: 290487

SEQ ID NO: 401770 - DNA, 1000 bp, Homo Sapiens
aattgaaacagcacagtaaatacttaatataaaatgtcccttggattttgcttcccatgtaaatctattgtattattacacttgttataattttaactataaaggtccaattgtttcacagagccagtttgggatgggctgcattccatttatgctgtatatagtttgaattatatataaattaccccttcttctggccacccctgctcccatcttagtattttgcaagatctaatcagttgtacacctggtgcccctcgcttgcttcaatcatggttatttgatggcaaaatcgacctcttgtcgctgaaggagagagaaaagatgtgtgtctgattggtcctgggattttttgagctgtgccatttatggtactctttgcctatgcatccccttgttagattttttttaaattttatcttactgtttttataatttctattgggaagaggcttgtgaccagtaccaatcttgagtttctttttctgtccacaagtaaattaatatctgctctgaaatgtcatttatctactcacacattcttggggaaaaaaatcaaatgtcagtcctagcagatgttgcatgtaaattggtagcaagtaatgattacaacccagaggattaagaattttgtaacagaaagctctatgttttaattttttatatacaattaggataattagcattgtcagactataaacctttgctttttaaagtttatttttactatttctttatcactttattgtatcatcaccattggtttcataatgtaaatactatatgttgaacaaattaaatgtcaaaattttttattaccatagtccatgttaatagtggggctttcaggtgtttagagattttttttgttgttgttaacattcattgcaaaagtactagatggtgtataactctagagttgaattttaagggattccctaatatgtatactatctttttatctgaagtaataaataaacaatgatcttgaaagtgcctg

SEQ ID NO: 401771 - DNA, 1000 bp, Homo Sapiens; identical to SEQ ID NO: 290488

SEQ ID NO: 401772 - DNA, 1000 bp, Homo Sapiens; identical to SEQ ID NO: 290489

SEQ ID NO: 401773 - DNA, 1000 bp, Homo Sapiens; identical to SEQ ID NO: 223223

SEQ ID NO: 401774 - DNA, 1000 bp, Homo Sapiens; identical to SEQ ID NO: 290491

SEQ ID NO: 401775 - DNA, 1000 bp, Homo Sapiens
ggtgcccaccatgtttgcacttttaataactcttacttgcgtgttttgtttttggtttcattttaaaacaccaatatctaataccacagtgggaaaaggaaagggaagaaagactttattctctctcttattgtaagtttttggatctgctactgacaacttttagagggttttgggggggtgggggagggtgttgttggggcctgagaagaaagagatttatatgctgtatataaatatatatgtaaattgtatagttcttttgtacaggcattggcattgctgtttgtttatttctctccctctgcctgctgtgggtggtgggcactctggacacatagtccagctttctaaaatccaggactctatcctgggcctactaaacttctgtttggagactgacccttgtgtataaagacgggagtcctgcaattgtactgcggactccacgagttcttttctggtgggaggactatattgccccatgccattagttgtcaaaattgataagtcacttggctctcggccttgtccagggaggttgggctaaggagagatggaaactgccctgggagaggaagggagtccagatcccatgaatagcccacacaggtaccggctctcagagggtccgtgcattcctgctctccggacccccaaagggcccagcattggtgggtgcaccagtatcttagtgaccctcggagcaaattatccacaaaggatttgcattacgtcactcgaaacgttttcatccatgcttagcatctactctgtataacgcatgagaggggaggcaaagaagaaaaggacacacggaagggcctttaaaaaagtagatatttaatatctaagcaggggaggggacaggacagaaagcctgcactgaggggtgcggtgccaacagggaaactcttcacctccctgcaaacctaccagtgaggctcccagagacgcagctgtctcagtgcccaggggcagattgggtgtgacctctcca

SEQ ID NO: 401776 - DNA, 1000 bp, Homo Sapiens; identical to SEQ ID NO: 290492

SEQ ID NO: 401777 - DNA, 1000 bp, Homo Sapiens; identical to SEQ ID NO: 117903

SEQ ID NO: 401778 - DNA, 1000 bp, Homo Sapiens; identical to SEQ ID NO: 117904

SEQ ID NO: 401779 - DNA, 1000 bp, Homo Sapiens; identical to SEQ ID NO: 117905

SEQ ID NO: 401780 - DNA, 1000 bp, Homo Sapiens
ggatctgggaggagatggccccagattgggtctgttaatgatgatcctgggccttatctatatgagaggtaatagcgccagggaggcccaggtctgggagatgctgcgtcggttgggggtgcaaccctcaaagtatcatttcctctttgggtatccgaagaggcttattatggaagattttgtgcagcagcgatatctcagttacaggcgggtgcctcacaccaatccaccagaatatgaattctcttggggtccccgaagcaacctggaaatcagcaagatggaagtcctggggttcgtggccaaactgcataagaaggaaccgcagcactggccagtgcagtaccgtgaggccctagcagacgaggccgacagggccagagccaaggccagagctgaagccagtatgagggccagggccagtgctagggccggcatccacctctggtgagggttggtgaaaagttggccagtgggtccccgtgaggacgaactactgtcctgagtcataagtaatatgggtggggcgagggtcttatttctgtagaaatcgtgtgactttaaggatttagattttgtatcttatgttttgtaacatttaataattactgttaaaatgctgtttgtaaatgagattggtctactttttcctgtaggattttattgtagagttttgctggttttgtaaaatggatggaagaactttgtatttatactgtgattttgaacagattatgcaacattggaaggaaggctgtactttgatggtttgaaggaactcagcagtatgatgatctggttccaggggaaaaaaatagctggttggtgtctagccccccaacacttttgtctgttgtgtataaaagaagaaagactggcatgtaccttcatttgcttagctatttgagtatctagagaaaaattaaaatgcaatgagttagcagtataccctggcacacttaataaattaaacatttgtggaaaaaaaaaaaaaaaaaaa

SEQ ID NO: 401781 - DNA, 1000 bp, Homo Sapiens; identical to SEQ ID NO: 223226

SEQ ID NO: 401782 - DNA, 1000 bp, Homo Sapiens; identical to SEQ ID NO: 290498

SEQ ID NO: 401783 - DNA, 1000 bp, Homo Sapiens; identical to SEQ ID NO: 117907

SEQ ID NO: 401784 - DNA, 1000 bp, Homo Sapiens; identical to SEQ ID NO: 290499

SEQ ID NO: 401785 - DNA, 1000 bp, Homo Sapiens; identical to SEQ ID NO: 223229

SEQ ID NO: 401786 - DNA, 755 bp, Homo Sapiens
gccggcgccagggcaggcgggcggctggcagctgtggcgccgacatggctgcgctggtggagccgctggggctggagcgggacgtgtcccgggcggttgagctcctcgagcggctccagcgcagcggggagctgccgccgcagaagctgcaggccctccagcgagttctgcagagccgcttctgctccgctatccgagaggtgtatgagcagctttatgacacgctggacatcaccggcagcgccgagatccgagcccatgccacagccaaggccacagtggctgccttcacagccagcgagggccacgcacatcccagggtagtggagctacccaagacggatgagggcctaggcttcaacatcatgggtggcaaagagcaaaactcgcccatctacatctcccgggtcatcccagggggtgtggctgaccgccatggaggcctcaagcgtggggatcaactgttgtcggtgaacggtgtgagcgttgagggtgagcagcatgagaaggcggtggagctgctgaaggcggcccagggctcggtgaagctggttgtccgttacacaccgcgagtgctggaggagatggaggcccggttcgagaagatgcgctctgcccgccggcgccaacagcatcagagctactcgtccttggagtctcgaggttgaaaccacagatctggacgttcacgtgcactctcttcctgtacagtatttattgttcctggcactttatttaaagatatttgaccctca

SEQ ID NO: 401787 - DNA, 1000 bp, Homo Sapiens; identical to SEQ ID NO: 223230

SEQ ID NO: 401788 - DNA, 1000 bp, Homo Sapiens; identical to SEQ ID NO: 117910

SEQ ID NO: 401789 - DNA, 1000 bp, Homo Sapiens
gtctaggtcaccactcccaatcctggggattggagaggcctggggctgtgggatgccccatccccctccccatcacctttggtgggggcagggcctggtggcacctgtgcaataatgtctgtgtttctctcccacctgccactggaactggagaatgcactttattctgggcggggggtgagtgggggaagacccaaccctcctttctcgctgcccctaacgcatgcacggtctcgtgatgctccctccctctccggagtgacaggcacatacatgagaacaggccatctcagccctacacacttgccatcccctacagcacagaggaagagtgatggtggcatgctggtggtggcgggtgctggtgggaggacagtgccaacctcctcctggggatcccatgttggagactctaaggataaggctggtgctgcccagggtgtctacaggaactgcaggtgtctacccccaagtcttccctcctcccaagccaggggtggcacagggcactagatccctggagttcaggaaccaacacaagcacaaccacgggcataagttggccttggccactgccacccacggccctccttttgtgctccatgctggcatcttcactcccctaccccttccccagccactgctgctcattcaaacttctgtccatgtccctccactgttcctatcagcaggtggcccctgggcatcagaacagcctgccctgggcaccaggtggcagacacactcagagcatgtctggctttcctggtgggtccaggctcattctgcttctgatttcccctcccccagggctcattttccccctttttcctgtacacatccctgtctacctcctctcaccctgccacagattcttcctatcacacagggatgccagttgtatttgtgggatttcacccattattaataaaacctatatttatacagtatgcaatgtgtaaaaaaaaaaaaaaaaaaaaaaaaaaaaaaaaaaaaaaaa

SEQ ID NO: 401790 - DNA, 1000 bp, Homo Sapiens; identical to SEQ ID NO: 117911

SEQ ID NO: 401791 - DNA, 1000 bp, Homo Sapiens; identical to SEQ ID NO: 117912

SEQ ID NO: 401792 - DNA, 1000 bp, Homo Sapiens; identical to SEQ ID NO: 290505

SEQ ID NO: 401793 - DNA, 1000 bp, Homo Sapiens; identical to SEQ ID NO: 290507

SEQ ID NO: 401794 - DNA, 1000 bp, Homo Sapiens; identical to SEQ ID NO: 223231

SEQ ID NO: 401795 - DNA, 1000 bp, Homo Sapiens; identical to SEQ ID NO: 290509

SEQ ID NO: 401796 - DNA, 1000 bp, Homo Sapiens
gaggcgtctggtgctgggtcctcccgaaccgccgttctcgcacgtgtgccaagtcggggacccggtgctgcgcggcgtggcggccccggtggagcgggcgcagctaggcgggcccgagctgcagcggctgacgcaacggctggtccaggtgatgcggcggcggcgctgcgtgggcctaagcgcgccgcagctgggggtgccgcggcaggtgctggcgctggagctccccgaggcgctgtgtcgggagtgcccgccccgccagcgcgcgctccgccaaatggagcccttccccctgcgcgtgttcgtgaaccccagcctgcgagtgcttgacagccgcctggtcacctttcccgagggctgcgagagcgtcgccggcttcctggcctgcgtgccccgcttccaggcggtgcagatctcagggctggaccccaatggagaacaggtggtgtggcaggcgagcgggtgggcagcccgcatcatccagcacgagatggaccacctgcagggctgcctgtttattgacaaaatggacagcaggacgttcacaaacgtctattggatgaaggtgaatgactaaagctttgctactggggctgaggattccggataccaagacgcaaacactttcactttgagctgggcaaatcttacttggcatcaacttggatggctcgcatatgacaggaaactggattgccaaggcatggcagactgagctggaggaagatgtcagaaatgtttgccctgaaatcagttacggacaaaatgttggctacaacttgaggagaaaaatcacccccaaaggagtggacatttcctaacaattctgtatggaggaaggtggggtaattgcattcgtctgcagtagacacgagttcctcggacctgtataatctcccaaagccaaggtttggtaataatgtagtccccaaatacctgaaagctgtctttaaaaatgcaggtaagcatgtgactggcaaaaaaaaaaaaaaaaaaaaaa

SEQ ID NO: 401797 - DNA, 1000 bp, Homo Sapiens; identical to SEQ ID NO: 223232

SEQ ID NO: 401798 - DNA, 1000 bp, Homo Sapiens
taatctacttttggtagataattaagattattaaaccctcatttaaatgtgacataaaatacagctttaagcacataaatataaagcagcttccatcaggaacatggagcaggcagggactccattttacagaattactgagatttctcagttgtaaaacatgatgtcatcctgcatgcctcctggaattctccaatggggtcgccaaacaacaaatggagaaaaaaagttttacttccttgcattcttctacctttaaatagcaaagtaccactaccaccaccacctcttgcccccttccctcttttcttaaacttctggcatttcagagctcagcaggctacccctggtttctggagagttgggctaggcctgaagctccccctcccccacctctgctaggcagcccaggcctggtctgggagacagcccctcaccctgcctgggctcttggccaagcggccttggatggatgaagtcagagaggtggggtgagggtgagcttactcagggcccccagaggaagccctcagcctctgccctccccccacacagggcgggagcccaggcctgttcctggcagctgtggctgcagctgtgctcctgctccctcctggaatgtgcgacaagcccaaatgttccagggaggcggccggggcagggggcttagaagtgctaatatggttctgtgttttgcctgaaacgataccaggttcccctgaatagcaactttacaaggtccatgtgggagggaccaacccagatgccctgctgagtgtccctgaaaccatggcagctccatctgtcaagatggcaggggccggagtgagggggctgctggcttaacagcaggcatctgggcaggccagtcctcaaagcagctcctgaaggtctgtgttgcactgtcaccagtctcaagctatgcctctaatttcaccagggatattgactaagaagacaataaaatctttttctttgtgtaaaaaaaaaaaaaaaaaaa

SEQ ID NO: 401799 - DNA, 1000 bp, Homo Sapiens
gatgttgtatgcccaatccaaagggttgttcttctctttcaggaaaagcttacctttctgctacatgctgctttgagttacactcctgttgaagttaaagaatcagatgaaaaaacaaagagagacattaacaggtttctgagtgtggccagtcttcaaggacttattcatgaaggcaccatgacttctttgtgcatggccatgacagaggagcagcataagtctgtggtcatcgattgcagcagctcccagcctcagttctgcaatgcaggaagtaaccggttttgtgaggattggatgcaagcttttttaaatggtgccaaaggaggtaacccttttcttttccgacaagtactggagaactttaaactaaaggccatacaagacacaaacaatttgaagagatttatccgacaggcagaaatgaatcattatgctttgtttaaatgttacatgttcctaaagaactgtggtagtggagatatacttttgaagattgttaaagtggaacatgaagaaatgcctgaagccaaaaatgtgatagctgtccttgaagaattcatgaaagaagctcttgaccaaagtttttgatcatatgttttgagataattgtatgatcaagttgtatatttaagtcttagtgtttgaaattgcagttataattgttcataggattgctatttaagatgatttgaaactcaatccagattttctttttgtattttaccaatttaacttaaataaaaatctgaagaacatcttcactgagtcctagatagataatgtatgtgagagttgtgaaattttagtgtctcactggccccataaattccacgcttcaggaagttgttgcttaaaaaatttcagagatgattttgtttgtggcttttctcaggaaaagcctgagtttgctgcagtatttagcaacttttcttctcagaaaaaccataatacttccttttcagtggactgtagcttcttaaaaaaaaaaaaaaaaaaa

SEQ ID NO: 401800 - DNA, 1000 bp, Homo Sapiens; identical to SEQ ID NO: 223233

SEQ ID NO: 401801 - DNA, 1000 bp, Homo Sapiens
tttggcatctgcttccttctctccaaattttacccaagtgacttctacactgttgaactctgcttacccattcataggaccctttttttttatcatctctggctctctatcaatcgccacagagaaaaggttaaccaagcttttggtgcatagcagcctggttggaagcattctgagtgctctgtctgccctggtgggtttcattatcctgtctgtcaaacaggccaccttaaatcctgcctcactgcagtgtgagttggacaaaaataatataccaacaagaagttatgtttcttacttttatcatgattcactttataccacggactgctatacagccaaagccagtctggctggaactctctctctgatgctgatttgcactctgctggaattctgcctagctgtgctcactgctgtgctgcggtggaaacaggcttactctgacttccctggggtgagtgtgctggccggcttcacttaaccttgcctagtgtatcttatccctgcactgtgttgagtatgtcaccaagagtggtagaaggaacaaccagccaatcacgagatacacatgggagggcatttgcattgtgatggaagacagagaagaaaagcagatggcaattgagtagctgataagctgaaaattcactggatatgaaaatagttaatcatgagaaatcaactgattcaatcttcctattttgtcagcgaagggaatgagactctgggaagttaaatgactggcctggcattatgctatgagtttgtgcctttgctgaggacactagaacctggcttgcctcccttataagcagaaacaatttctgccacaaccactagtctctttaatagtattgacttggtaaagggcatttacacacgtaactggatccagtgaatgtcttatgctctgcatttgcccctggtgatcttaaaattcgtttgcctttttaaagctatattaaaaatgtattgttgaatcaaaaaaaaaaaaaaa

SEQ ID NO: 401802 - DNA, 1000 bp, Homo Sapiens; identical to SEQ ID NO: 117913

SEQ ID NO: 401803 - DNA, 1000 bp, Homo Sapiens; identical to SEQ ID NO: 117914

SEQ ID NO: 401804 - DNA, 1000 bp, Homo Sapiens
ctcttcaggcactgaaaacccacatggagtgaaggctgtcaccagggggcagcgctgtgccatcgccctgtggttcaccctggaccctcgacacagcgagcgggtgagagcagctcgagcgggtgagagcagctggtgctgtggtgacccgttcccagagcgcccttggtttgcctttctcttccccaaatcccattgccagtggctgagacacgaaaggagcacttgggacaccagctccaacgccctgtcattatggtcacattgccttgtcctccctgggcctgctgtgaacgggatccaggtggggaaagaggtcaagacagggagcgatgctgagttcttggttccctccttgggccccacttcagctgtccttttccagagagtaggacctgctgggaaggagatgagcctggggccattaaggaaccttccttgtcccctgggaagtagcagctgagagatagcgagtgtctggagcggaggcctctctgaatgggcaggggtttgtccttgcaggacagggtgcaggcagatgacctggtgaagatgctcttcagcccagaagagatggtcctctcccaggagcagcccctggatgcccagcagggcccccccgaacctgcacaagagtctctctcaggcagtgaatcgaagcccaaggatgagctatgacagcgtccaggtcagacggatgggtgactagacccatggagaggaactcttctgcactctgagctggccagcccctcggggctgcagagcagtgagcctacatctgccactcagccgaggggaccctgctcacagccttctacatggtgctactgctcttggagtggacatgaccagacaccgcaccccctggatctggctgagggctcaggacacaggcccagccacccccaggggcctccacaggccgctgcataacagcgatacagtacttaagtgtctgtgtagacaaccaaagaataaatgattcatggtttttttt

SEQ ID NO: 401805 - DNA, 1000 bp, Homo Sapiens; identical to SEQ ID NO: 290517

SEQ ID NO: 401806 - DNA, 1000 bp, Homo Sapiens; identical to SEQ ID NO: 223236

SEQ ID NO: 401807 - DNA, 1000 bp, Homo Sapiens; identical to SEQ ID NO: 290520

SEQ ID NO: 401808 - DNA, 1000 bp, Homo Sapiens; identical to SEQ ID NO: 117916

SEQ ID NO: 401809 - DNA, 1000 bp, Homo Sapiens
cactgtcctctttgccttagtgctttcaggagccctcatcatcctcgtggcctccccattgagagcactccgggctcggggcaaggttcagggctgtgagaccctgcgccctggggagaaggccccgttaagcagagagcaacacctccagtctcccaaggaatgcaggacctctgccagtgatgtggacgctgacaacaactgcctaggcactgaggtagcttaaactctaggcacaggccggggctgcggtgcaggcacctggccatgctggctgggcggcccaagcacagccctgactaggatgacagcagcacaaaagaccacctttctcccctgagaggagcttctgctactctgcatcactgatgacactcagcagggtgatgcacagcagtctgcctcccctatgggactcccttctaccaagcacatgagctctctaacagggtgggggctacccccagacctgctcctacactgatattgaagaacctggagaggatccttcagttctggccattccagggaccctccagaaacacagtgtttcaagagaccctaaaaaacctgcctgtcccaggaccctatggtaatgaacaccaaacatctaaacaatcatatgctaacatgccactcctggaaactccactctgaagctgccgctttggacaccaacactcccttctcccagggtcatgcagggatctgctccctcctgcttcccttaccagtcgtgcaccgctgactcccaggaagtctttcctgaagtctgaccacctttcttcttgcttcagttggggcagactctgatcccttctgccctggcagaatggcaggggtaatctgagccttcttcactcctttaccctagctgaccccttcacctctccccctcccttttcctttgttttgggattcagaaaactgcttgtcagagactgtttattttttattaaaaatataaggcttaaaaaaaaaaaaaaaaaaaaaaaaaaaa

SEQ ID NO: 401810 - DNA, 1000 bp, Homo Sapiens
cagctccagtggagggtgcctggtcaccccatcccgaagggaaaccccctctcccacaccttcctatggacagcagtccacagccactcttacaccctcacctcctgaccctccccagcccccaactgacatgccccatctccatcagatgcccaggagggtgccccttgggccgagttcccctctcagtgtatcccagcccatgctgggcatccgtgaagcgaggcctgctggcttgggtgctggccctgcagcctcaccccacctcagccccagtcctgcccctagcacagccagcagtgccccaggcagaacctggcaggggaatggggagatgactcccccacttcaaggaccccgtgctcgattccggaagaaacccaaggctcttccctacaggagggagaacagtcctggggacttgcccccaccacccttgccaccgccagaggaagaggcgagctgggccctagagctgagggcagcaggcagcatgtcctccctggagcgggagcgcagtggggagaggaaagcggtccaggccgtgcccctggcagcccagcgggtgctccacccagatgaagaggcctggctcccatacagcagaccaagcttcctgtcccggggccagggcaccagcacatgttccacggccggcagcaactcttccaggggctccagcagctctaggggctcccggggccctggccggagccggagtcggagtcagagccggagccagagccaaaggccaggacagaaacgccgagaggaaccaagatgacccttgttggggcattgagaatatcatgagtgccacggggaaggggagtagggatgtcttttcccccccagcagtgatgagtggggctagctgaagcccattggtttccacgatttcaattggctgagaaggcagagagctagctcctccctttctttctttttccacctgagacttgtttataaaaaacaaaacaataaaaagagtctgatcaga

SEQ ID NO: 401811 - DNA, 1000 bp, Homo Sapiens; identical to SEQ ID NO: 117917

SEQ ID NO: 401812 - DNA, 1000 bp, Homo Sapiens
acgtccaacttctccctgatgacggagctgagcatcaagagcggcaaccccggggagtcctcccgcggctggatgtggggctgcgccttctcgggggactcccagtacatcgtcactggtgagccccgccctggcctcccccatccctggcccccggcgctggcctccagagccagcccacctcggctgcagcttcccctctgctggggccgcctgcttggcctgcacctgcgctcttagccctgcacaatctccccctccagcttcctcggacaacctggcccggctctggtgtgtggagactggagagatcaagagagagtatggcggccaccagaaggctgttgtctgcctggccttcaatgacagtgtgctgggctagcctgtgacccctcgggactgcctggtgcaggtggtggcagctggagggacccatgcagcacccaggtcagagcagaccctcccctgccggcctgcgccagctggacctgatggccccctgtggcgccttgacctgctgggccaggctgccctgggactctcagcccccagttgcttatccagatgtgacagagctcgacccaagccaggctgcacactcctggactgggctagcctgcactgcctgggaaagtcggccgagggcccaaagctgctgaggggtctgaggctggtgcccacccccaagctagtgcgttctctgcccctccctgcccgcgtttcagggcctcggtccatagagaacaccaccaccatggccaggtggaagggtttattagtccctgccagcagctgtcctccctggtgcaggtggcctggccagcccactggattggggacgggccaggctgggccaggtcgggggctcagtctgggaggtaataaaagcagaccgacacgcagatgttgctcgggaaaaaaaaaaaaaaaaaaaaaaaaaccaaaaaaaaaaaaaaaaaaaaaaaaaaaaaaaaaaaaaaaaaaaaaaaaaaaaaaaaaa

SEQ ID NO: 401813 - DNA, 1000 bp, Homo Sapiens; identical to SEQ ID NO: 223238

SEQ ID NO: 401814 - DNA, 1000 bp, Homo Sapiens; identical to SEQ ID NO: 290525

SEQ ID NO: 401815 - DNA, 1000 bp, Homo Sapiens; identical to SEQ ID NO: 290526

SEQ ID NO: 401816 - DNA, 1000 bp, Homo Sapiens; identical to SEQ ID NO: 290527

SEQ ID NO: 401817 - DNA, 1000 bp, Homo Sapiens; identical to SEQ ID NO: 117920

SEQ ID NO: 401818 - DNA, 1000 bp, Homo Sapiens; identical to SEQ ID NO: 290528

SEQ ID NO: 401819 - DNA, 1000 bp, Homo Sapiens
gataaatgatgattcgtggagccctactcacacattaacccccaaattcaaaagtaagaatgcaaaagtctagagggggtaacagtctgcatcatcatcacaacctaaatggagaaagctgtgcagaggaaacttaagcataaaaattgaattcgtttctgacataccttagactgaaaaactgttggttcatccagaagtgtattcatattaccagaaaatgagtttgtctatggggatacatgaacttcatatactaaggagcctaactccaaagcctgcgttctcatcccagtctgatattcacctaagtttccggacccttttccttagctgtaaaatggaagcggttggactgatggtgtctgaggttctttcccacactgaaattctaaatattgacacttagcagtcatagggctgataatacacacagttactgacttagcctaaacaacctggtgcatcgaaatgtattcacctttcttttgtaaagagaccatcttctatcttctttccacctttctctgttttatgaaaccaactgttgacatacaaaccatgattgaaggagaacctgtccaacatgttttatgtacacaaatccctatgttgctataagaaaagtgaaagtaactgttttcttcttggtgctatgacagtgtgagactcaggttgtctgtagagaatgaaaggagcagtggcccgcgtgattgtggcatttaaggagcagtggcccatgtgactgtggcattttcggcacttttcattactttctgcttgaccggaagttgaggcttagctatgtttccatcttcagtttctgaagactagttatatattccttactagaaatatattcataatatataaaagaaatatatctgtgattttaaaattttgctaccaaagaatgcatgttctgtgtgccctgaaaatgttaccagtgttaataaatggatacttatcgaaaaaaaaaaaaaaaaaaaaaaaaaaaaaa

SEQ ID NO: 401820 - DNA, 1000 bp, Homo Sapiens; identical to SEQ ID NO: 290529

SEQ ID NO: 401821 - DNA, 1000 bp, Homo Sapiens; identical to SEQ ID NO: 223239

SEQ ID NO: 401822 - DNA, 1000 bp, Homo Sapiens; identical to SEQ ID NO: 117921

SEQ ID NO: 401823 - DNA, 1000 bp, Homo Sapiens; identical to SEQ ID NO: 290531

SEQ ID NO: 401824 - DNA, 1000 bp, Homo Sapiens; identical to SEQ ID NO: 290532

SEQ ID NO: 401825 - DNA, 1000 bp, Homo Sapiens; identical to SEQ ID NO: 290533

SEQ ID NO: 401826 - DNA, 1000 bp, Homo Sapiens; identical to SEQ ID NO: 223240

SEQ ID NO: 401827 - DNA, 1000 bp, Homo Sapiens; identical to SEQ ID NO: 290536

SEQ ID NO: 401828 - DNA, 1000 bp, Homo Sapiens; identical to SEQ ID NO: 290538

SEQ ID NO: 401829 - DNA, 1000 bp, Homo Sapiens; identical to SEQ ID NO: 223241

SEQ ID NO: 401830 - DNA, 1000 bp, Homo Sapiens; identical to SEQ ID NO: 117922

SEQ ID NO: 401831 - DNA, 1000 bp, Homo Sapiens; identical to SEQ ID NO: 117923

SEQ ID NO: 401832 - DNA, 1000 bp, Homo Sapiens; identical to SEQ ID NO: 223245

SEQ ID NO: 401833 - DNA, 1000 bp, Homo Sapiens; identical to SEQ ID NO: 290542

SEQ ID NO: 401834 - DNA, 1000 bp, Homo Sapiens; identical to SEQ ID NO: 223246

SEQ ID NO: 401835 - DNA, 1000 bp, Homo Sapiens; identical to SEQ ID NO: 290543

SEQ ID NO: 401836 - DNA, 1000 bp, Homo Sapiens; identical to SEQ ID NO: 290545

SEQ ID NO: 401837 - DNA, 1000 bp, Homo Sapiens; identical to SEQ ID NO: 223247

SEQ ID NO: 401838 - DNA, 1000 bp, Homo Sapiens; identical to SEQ ID NO: 290547

SEQ ID NO: 401839 - DNA, 1000 bp, Homo Sapiens; identical to SEQ ID NO: 290548

SEQ ID NO: 401840 - DNA, 1000 bp, Homo Sapiens
cagatgacacctgcctgttcacgccccaaggcagctactgcccctaacccttcccaccagggtagctttgggcactgcagctctggacttttctggcccctcctgagatgacctgatggagctgatgctttctctcctaatccctgggcactaggctcttatcagtgtgcttgggccagctctcctgcctgtgtctagaggaagccagagacagaaataggctaagcctgcagtaggatctcagccacaagggccccgcaggatggagctgggtcaaggaccagggagccctgactcccagaggctgccaccggggagaagcagcggtcctccatccagaacctaagggctgaagcaaaggctgccaggacccttgaagatgcttttggctcacctcatttcaccccacgctctgctggctggcagaggagaaggcagtcgtttcctctctgaagagtatttttttcgattgccctctggttagggtgcacatataaatcagagttaatatatgaacgcgtgtgcatgcacaagtgtgtgtgtgcctgcgtgctgtgcgtggcagggtgtgtgtgtgtgtgtctggctgtgcgttccggagtgtgtgacgatgctgacctagctgtgtggccttgggcttgctgcttcattactcacctggatggggacgagggatgagaagggtgtgggtttggccccatgtcactggccggaaggatgtgtctcagccctgccctgtggggtgcccccgatgggaggctgtcccatctcccagtccccatctctttttccccacactgtccctggccaagccctgcccagagctgaaccctgtagctgcccccttgccctgtgtgggattcgcagtgtctcatttggtgacgtcttactggtgatcatctcctcaccccatctcccaccttgtggaataaatacatgttagcacttcccaaaaaaaaaaaaaaaaaaaaaaaaaaaaagaaaaaaaaaaaaaaaaaaa

SEQ ID NO: 401841 - DNA, 1000 bp, Homo Sapiens
ccacctactcagggccttgctcagtgctgtggcccggtggggacacagttgctcgtggccactcagtggagctgggcctgcagcagactcaaggctccgagtgccctgggggtcacccctcccctcccctcctcagagcccaccctgagaggcagcagtgacccccatggcacacacctgccaacagcactgggggcttctccccaggagaccacgctgccctccaagaccaggagcagctgtgagctggagacagcagagggaccccagggtgtcccctgcagatcccaccagggccgcatccatctcagtgtggaggacagtgacgggaccctcaccatcctcttgcgttttggcccccatttgctccctgagctccaagataagaatggccccgagagaactgctgaacatttgttcattgctgtcacctcctgagtcactggggtccctcaccagcacctccctgacacctgggctatggagaggttggcgcctgtcagtgaccatcctaatgcctctcgctcactcccaagccaccatttgagagggaggggtgttggtgccctgacagggactgggcagggtgtccaaacttggggcttcccaggcacctgcagtgtgaacactgcttggctggctcaagattagggccgcggagggggctgtgcacataccagttacttaagcagccacgagtgtcccccatgccttggtgcgggtcctggaggcctcttgggggtgggacctttgggcagggtttgcccactgacgcgcccgccatggggcactggctgcatggggctccttggaccctgtagacccagcaggagcctggccgcggggactgcagggagggtgcctggacccgtggggttgcttcattgagataaagcacacttatcacatagcacaaaggacgtgccatggtgctttccccaaaagttgtgttgcttttatcagttttctaacttaataaaaagagttgagaaaaaaaaaa

SEQ ID NO: 401842 - DNA, 1000 bp, Homo Sapiens; identical to SEQ ID NO: 290549

SEQ ID NO: 401843 - DNA, 1000 bp, Homo Sapiens; identical to SEQ ID NO: 117924

SEQ ID NO: 401844 - DNA, 1000 bp, Homo Sapiens
ctttttctttcaggttgatcttctattaaaatgattcctctttattagagaaggaaaatttagttgctatacatcttatatttgcacagtttattaaagtcagtgccctaaaggtacctgcttttctttgtggcatatatggcatctgctgtcttcagattttcttacacttttgtgatttataatgttagtgattggtgccttattctctgaggaaagatggagggttcataaagcaatgccttatccacagcagattttcttgtatattaagttaaacagaattctgtaaattattatgaaggttcaagctctttaggggagttttttttttcttgttgttaacaaattggttgcaatctattatattttgcaattgattagatattacagtctacttatttttcaagagtaattattgtataagtttggttggtataatggtaaatattatatagtgggggtaaatttgattagagttttttttttaagcactggcttcagaaatccatggaaataaagtctgtatcttgtgtaacaattcctgactaaattgcaaaaccttttctactttttctttcttcatattaaacaaataaatattattaaaaatatagggccttatttaagaatgctacatagtgaccggacgtggtggctcacgcctgtaatcccaacactttgggaggccgaggcaggcaggtcacttgaggtcaggagttcgagaccagcctggccaacatggtgaaaccccgtctctactaaaaatacaaaaattaactgggcgtgctggtgtgcacctgtagtttcagctattcgggaggctgaggcagacaatggcttgaacctgggaggcagaggttgtagtgagctgagatggggccactgcactgcagcctgtgtgacaaagggagactgtcttaaaaaataaacataaaataaataaataagaatgctacataggcaaaaaaaaaaaaaaaaaaaaaaaaaaaaaaaaaaa

SEQ ID NO: 401845 - DNA, 1000 bp, Homo Sapiens; identical to SEQ ID NO: 223248

SEQ ID NO: 401846 - DNA, 1000 bp, Homo Sapiens; identical to SEQ ID NO: 290552

SEQ ID NO: 401847 - DNA, 1000 bp, Homo Sapiens; identical to SEQ ID NO: 223249

SEQ ID NO: 401848 - DNA, 1000 bp, Homo Sapiens; identical to SEQ ID NO: 290554

SEQ ID NO: 401849 - DNA, 1000 bp, Homo Sapiens; identical to SEQ ID NO: 117925

SEQ ID NO: 401850 - DNA, 1000 bp, Homo Sapiens
ccgaggatgcggtgaccgactcctcggggtcgggcacactccccagggcccggggccgggcctcaaaggggaccgggaagcgaaggaagaagcgtccctccaggagccaggaagaggttccccctgattctgatgataataaaacaaagaaactgtgtgtgatccagtaaggcctcaggcccaggcccaaggccaagtgagagagcccaggccacaggacatgctgccattctgccaagagaggctcttctgggggccaggctgggactgggccccggaaaccaaaactccgtgccttacccagccggggccctcctggagccttcttggggtgttgtggctgggaacccgacaggcaccagtgccctgccaggcctggtgccctcctggaccgcctgcacgtgccagcctcccacctgcttcctaaaggcaaccctggcccacacccgcatgcgcccggtgcagcctgccaagggccagtcggggggtgctgcgtcctgccagtgtccaccacagctctgcctgcccttcagcccagcaaggtttaatcaaaatgcaatgctttgcaagtctttactgcttggaggtggctgagttgggggccctaggcaggggtaagctggcaggcagtgccatggcaggccagggtcccctcccatggggtctggcccccgttccagcatgtccagcccctgaagttggagtggggggcggtctgcctttgctgccactgccaggcctctgccctgcagctgaaacttggccatcacatcaacagaaaacccctcccagtgccagctgcccagcgtgggcaggccctggggacaatacaggtccacctgaggggctgcagggtgacacccagcagccgctgccccctcactgcccacccagcgagggcaggctacccgagcctgccccctgccaggtgtgtgccctgaggctggcggctggatgcgtggccaataaaaagcagacctaaaaaaaaaaaaaaaaaaaa

SEQ ID NO: 401851 - DNA, 1000 bp, Homo Sapiens
attgcacctttgtcatagaagcgttgaagtctttgccatcagatgtggagagccgagaccgccaggcccgatgcatatggtttctggataccctcatcaaatttcgagctcatagggtagttaagcggaaaagtgctctgggacctggagttccccacatcatcaacaccaaactgctgaagcactttacttgcttgacctacaacaatggcagattacggaacttaatttcggattctatgaaggcgaagattactgcatatgtgatcatacttgccttgcacatacatgacttccaaattgacctgacagtgttacagagggacttgaagctcagtgagaaaaggatgatggagatagccaaagccatgaggctgaagatctccaaaagaagggtgtctgtggccgccggcagtgaagaagatcacaaactgggcaccctgtccctcccgctgcctccagcccagacctcagaccgcctggcaaagcggaggaagattacctagacgcatgctttccagacagggcgttttggctgcatcacagccactggctggtcctattcatttccatttttatgtatgttttgaaaagaaaaggtccggggatggtggctcacacctgaaatcccagcactttgggaggccgaggcaggaagatcattgagctcaggagtttgaaaccagtctggacaacatggggagaccccatctctaccggaggaaaaaaaaaagagtcaggcctggtggtgtgcgcctgtaatcccagctactcgggaggctgaggcaggacgattacttgagcttgggaaatcaaggttgcagtgagctatgattgtgtggccacactccatcctgggtcacagagtgagaccttgtctcaaaaaagtaacataaggaaaaaagaagccttgctttagcacaggtatgaagccagaagccagcatctcaactgtgcttgtcttatgcagaaatataaagcgatggccaggttggacttc

SEQ ID NO: 401852 - DNA, 1000 bp, Homo Sapiens; identical to SEQ ID NO: 223250

SEQ ID NO: 401853 - DNA, 1000 bp, Homo Sapiens; identical to SEQ ID NO: 117926

SEQ ID NO: 401854 - DNA, 1000 bp, Homo Sapiens; identical to SEQ ID NO: 290556

SEQ ID NO: 401855 - DNA, 1000 bp, Homo Sapiens
tagatgaagtctttgtttttccatatgatatgggaagtagatggaggaactttaaacaggtatttacgtggtcaggggtccctgaaggagatggacttgagtggccagtaagagaaggctgtcaccaatacagcttaacaatagaacagttgaaacaaaaagcagataagagagtcagaagtgttcgctataaagtaatagaagattatagtggtgcctgctgccctctgaataaaggaatcaaaaccttcttcacaagtccctgcaccgaagagcctcgaatacagctgcaaaaaggggaattcattttagccacaagaggtttacgatactggttatatggagacaaaattcttgatgattcctttatagaaggtgtttcaagaataaggggttggttccctagaaaatgtgtggaaaagtgtccctgtgatgctgaaacagatcaagccccagagggggagaagaaaaatagatagctgctgttaaaacaaaattatcctttaagtctgcttaattacttgaaaattgtacatattactaaagaattatgcaatgagcctactctggttaagatgttcttttcctcaaaggtgccctagtgccatgatttaaatatttttattaccattttgaaatggagaagccattctgcatatgcctttgaattcctgcccttctttaccacctcttcctccccctcaaaggaaaaacatttcatccaagtaagttaacggcattttctgtaggattttcttatgcactgcacactctggacctcacctgcagatacagttccccccttgccaggagcatctgcatgtggtacttctcttttccctcagttgatatttcttatatgatattctagatactatagaactcaatttgtcagattcagtataacctcagattttgttacctgtcttttaaaaatgcagattttgtcaaatcaaataaagatcaatggatgttgggtataaaaaaaaaaaaaaaaaaa

SEQ ID NO: 401856 - DNA, 1000 bp, Homo Sapiens; identical to SEQ ID NO: 290559

SEQ ID NO: 401857 - DNA, 1000 bp, Homo Sapiens
ctttatatcagtggaaatccagcgagatattagaaataaaggccagaaaaaattaattaaccatgatggatgaatctatgttattggactaatttgcttcaagaaacaccagaattttgaaaatcccgaatttttgacagcccctcaggcctggagagttatctacagatgttaggatatgtccacataagaaagcatctaaactgaactgagagcacagcgggctaccctggacaaagtaaaggtggaaactaggtgatgtggcctttgagtatgcagattcctggtatcacttgctcgctactttctagggtcttaatagtagtcaagaaaagggatctgagaaaagtactctttcaggagggactagaaagagaagggggtgatatgttacacaaattaaagaaggatgtcttaggcatttagtaaaaattcagtggttccccgctatcctcgggggatgtgtttttttgttttgttttgttttgtttttttttgagatgaagtttcattctatcgcccaggctggagtgcaatggcacaattttggctcactgcaacctccacctcccaggttcaagctattctcctgcctcagcctcctgagtagctgggactacaggtgtgcgccaccatgcccgactaatttttgtattttgagtagagatgggagtttcaccatgttggccaggctggtctcgaactcctgacctggtgatttgcccgccttggcctcccaaagtgctgggattacaggcgtgagtcaccacacctggcccatggtgggggatatgttttaagacccccagttaatgcctgaaaccgctgctagtaccaaaccctaatgttttttcctgtatgtacgtacatatgataaagttcagtttataagttaggcacagtaagagactaacaacagctcacagccaaatagagcaattataacaatatattgtaataaaaattatgtggatgtgaaaaaaaaaaaaaaaaaaaaaaa

SEQ ID NO: 401858 - DNA, 549 bp, Homo Sapiens
ctctcttccacaggaggcctacacgccgccgcttgtgctgcagccatgtctctagtgatccctgaaaagttccagcatattttgcgagtactcaacaccaacatcgatgggcggcggaaaatagcctttgccatcactgccattaagggtgtgggccgaagatatgctcatgtggtgttgaggaaagcagacattgacctcaccaagagggcgggagaactcactgaggatgaggtggaacgtgtgatcaccattatgcagaatccacgccagtacaagatcccagactggttcttgaacagacagaaggatgtaaaggatggaaaatacagccaggtcctagccaatggtctggacaacaagctccgtgaagacctggagcgactgaagaagattcgggcccatagagggctgcgtcacttctggggccttcgtgtccgaggccagcacaccaagaccactggccgccgtggccgcaccgtgggtgtgtccaagaagaaataagtctgtaggccttgtctgttaataaatagtttatatacaaaaaaa

SEQ ID NO: 401859 - DNA, 1000 bp, Homo Sapiens; identical to SEQ ID NO: 223251

SEQ ID NO: 401860 - DNA, 1000 bp, Homo Sapiens
atgctcggacacaggaattcattgaagagttgctgtctcccccttttgggggtttagtggcatttgtgaaggaggctgaggctttgattgagcgtggacaggctgagcgacttcgaggggaagaagcccgggtaactcagctgatccgtggctttggtagttcctggaaatcatcagtggaatctctgagtcaggatgtaatgcggagtttcaccaacttcagaaatggcaccagtatcattcagggagcgctgacccagctgatccagctctatcatcgcttccaccgggtgctgtcccagccgcagctccgagccctccctgcccgggctgagctcatcaacattcaccaccttatggtggagctcaagaagcataagcccaacttctgatgtgccagaaaccgccctgagatctgccggtcatctccatggacttctgcaccccattccatacccttcttcacctggggtaccccttccagttttccccttgcttcccaggcccttgacatggcttacctgccttcactcccagcaccttgcccaacaggataagctggatccccttggccttctgaatatcccagtgtcttcaggtttcccaagaccacttccctgtgggcttccaaaatggcctttatcatttctccagtctgtcaccctcctttcctgctcccatacacccaaggcttgtttcttcccctgtaaaaaccactgcctcaatctctggttcactcaactagtcaccatgtcctgaggcatgaagcctcctcagctcttggaattgctggcaaggggtgactgcctctgagtcattgtgtttttcaaagtgatttcttttctgtagctttttgacctaagatctcagcaatttgaacactaacctctcccctcctggctcaagaattactccgaagtcagtctgcagaaaataaatatttagtatgacatgacacttaaaaaaaaaaaaaaaaaaaaaaaaaaaaaaaaaaaaaaaa

SEQ ID NO: 401861 - DNA, 1000 bp, Homo Sapiens; identical to SEQ ID NO: 117927

SEQ ID NO: 401862 - DNA, 1000 bp, Homo Sapiens
tttgagctcttccctgagcagaaagaccctctatggcagaatccatgtgatgataaacgacacaaagacatctggtccagagagaaaacttgtgaccacttaccaaaatttctagtaattggtccacaaaaaacaggaacaactgcactttatttatttcttcttatgcatccttcaatcatcagcaatctccctagtccaaagacatttgaggaagttcagttctttaatggcaacaactatcacaaaggaatagactggtatatggactttttccctacaccatccaatactacaagtgactttctgtttgaaaagagtgctaattacttccattcggaagaagctccaagacgagccgcatctcttgtccccaaagccaagatcatcaccatcctcattgacccctcagacagggcatactcttggtaccagcaccaacgatcacatgaagatccagctgctctgaggttcaatttctatgaagttatttcaacaggacattgggctccatctgacttaaaaactttgcagagaagatgcctagtacctggatggtatgcagtccacatagaaagatggctaacttactttgctacttctcagttgctaattattgatggacagcagctgagatctgacccagctactgtgatggatgaagtccagaagtttctgggagttacacctcgttataattactctgaagcactaacgtttgatccccaaaagggtttttggtgtcaattactggaaggaggaaagacaaaatgccttggaaaaagcaaaggccgaaaatatccacctatggatccagagtctagaacgttcctctctaattactaccgagatcataatgtggaactatccaaactgctacacagactgggacagcctctgccatcgtggctgagacaggaactgcagaaagtgagatagcactggagacaagaactaagcctctcaagatacttttagtgctaaaaaaaaaaaaaaaaaa

SEQ ID NO: 401863 - DNA, 1000 bp, Homo Sapiens; identical to SEQ ID NO: 290562

SEQ ID NO: 401864 - DNA, 1000 bp, Homo Sapiens; identical to SEQ ID NO: 223253

SEQ ID NO: 401865 - DNA, 1000 bp, Homo Sapiens
ggacgtccctgctcctggcttttgccctgctctgcctgccctggcttcaagaggctggtgccgtccaaaccgttccgttatccaggctttttgaccacgctatgctccaagcccatcgcgcgcaccagctggccattgacacctaccaggagtttgaagaaacctatatcccaaaggaccagaagtattcattcctgcatgactcccagacctccttctgcttctcagactctattccgacaccctccaacatggaggaaacgcaacagaaatccaatctagagctgctccgcatctccctgctgctcatcgagtcgtggctggagcccgtgcggttcctcaggagtatgttcgccaacaacctggtgtatgacacctcggacagcgatgactatcacctcctaaaggacctagaggaaggcatccaaacgctgatgggggtgagggtggcgccaggggtcaccaatcctggaaccccactggcttcgagggctgggggagagaaatactgctgccctctttttagcagtaaggcgctgacccaagagaactcaccttattcttcatttcgcctggtgaatcctccaggcctttctctacaccctgaaggggagggaggaaaatggataaatgagagagggagggaacagtgcccaagcgcttggcctctccttctcttccttcactttgcagaggctggaagacggcagccgccggactgggcagatcctcaagcagacctacagcaagtttgacacaaactcgcacaaccatgacgcactgctcaagaactacgggctgctctactgcttcaggaaggacatggacaaggtcgagacattcctgcgcatggtgcagtgccgctctgtggagggcagctgtggcttctaggtgcccgagtagcatcctgtgacccctccccagtgcctctcctggccctgaaggtgccactccagtgcccaccagccttgtcctaataaaattaagttgtatcatttca

SEQ ID NO: 401866 - DNA, 1000 bp, Homo Sapiens; identical to SEQ ID NO: 223254

SEQ ID NO: 401867 - DNA, 1000 bp, Homo Sapiens; identical to SEQ ID NO: 290567

SEQ ID NO: 401868 - DNA, 1000 bp, Homo Sapiens; identical to SEQ ID NO: 287553

SEQ ID NO: 401869 - DNA, 1000 bp, Homo Sapiens; identical to SEQ ID NO: 223256

SEQ ID NO: 401870 - DNA, 1000 bp, Homo Sapiens; identical to SEQ ID NO: 223257

SEQ ID NO: 401871 - DNA, 1000 bp, Homo Sapiens; identical to SEQ ID NO: 223258

SEQ ID NO: 401872 - DNA, 1000 bp, Homo Sapiens
gctaagaacctcaggcggctgctgtacgtctcatgcaacccccgggcagccatgggcaactttgtggacctctgcagagccccatctaaccgggtgaagggcattcccttccggccggtcaaggctgtggcagtggacctgttcccgcagaccccgcactgtgagatgctcatcctgtttgagagggtggagcaccccaatggcacaggggtcttggggccccacagccctccagctcaacccacaccaggacccccagataacaccctacaagaaactgggaccttcccctcatcctaggcccaggacccattatggggacaggagctgaagggctcccagggccccaggggcggggaaggcatggcttgctggccaggatattcagaggtaggcagccaaagggcacagaaccctgtgccccaccaggattggcctgctgctaggggccaggggccctgaccaggaagacaggtgggttcctgtagcctgttgcccatccccagggcctttgtggactagccaaggctgtgagggccagaataaacaactgctcaacaaagggtgtttctgtgatgagagccaggggtctgaacacagggcctgggtgccagggaaagggccaaactaggcctaggcagctctgcaagcctctctgcatggctgggggagtcagggcagagcttactttaaaaaagaatgttcgatttgatacttaaacttgaggagaggcagagagaggtctgggaactgcaccagctgggggcatggggtggagaacactgggcagagttggcccctctgtggccagcctggccctcagcccagcagagagggcatcaaccaaggaaggggccatgctggggtgctgctcagctgttacaaaggcagggtccagcctgcagggaggccccaggaggggatctggccagtcaagggtccacagggtgccagcctctcaccctcagaataaagacatcagccattcaaaaaaaaaaaa

SEQ ID NO: 401873 - DNA, 1000 bp, Homo Sapiens
caagaagaaaccttggactatggtaaaaattacaattacggcatgcattactgtgcagtgccacccaggggtccccttgggcagggtgccatgttcaggttgcccaccgacagccacttcccttacgacttacatctgcgcagccaatctctcacaatgcaagatgaattaaatgcagtttttcataattaatgaggaaaatgaaaataaacagtggtcattcacctcccctgtctaattaagacaaagcagatgcttgtgggctgagtaattggcacaactctatctaaggtgtttactagtttctgaagtgtgtttcaactattgtgagaattttctatgtaataataaatctcttttcgtatgagaacttcttttcctttccttttgtctgtgaagcactgtgattctgtttctactggaaagatttttttctttttaattttcttttaaacttatttaatttgtttgaacaaggtgtctaagaatatactgttgaataaagacatgcacacagcataattcaatgtctattttggttgtacagtaattataaaatgcatgttattaaaaccagatgagtaaaatgatgtgtttataattattaggaattatatattatgtatcttttaaaaattgaaattttaaaatatggagaatatcactaagctgacaatgatattgggagatgaatttgcaacaatataaaaagctatgcaattttctttttattaaggatgaatctaaatgcattcaattggtaactattcctcttcaagtatttgcagatggggcaacatgatatttgggtagctgatgtcataattcggggacaattatctcaatcatcaagaaaaaaatttcagcacttgttttgtattattcagaaattaactgtacaggtttgttatcacaatgtataattgtgtttttccaccccacatttttaaggcaattaaatatagatatttccactcgtaaaaaaaaaaaaaaaaaaaaa

SEQ ID NO: 401874 - DNA, 1000 bp, Homo Sapiens; identical to SEQ ID NO: 117928

SEQ ID NO: 401875 - DNA, 1000 bp, Homo Sapiens
gaaggcacttaaactgtgggagaagtgtgcacacctttgagtcccttccctcaaggttaaagctcctgtcagactctcagaagggtctgtgggtgttgtatattaggcaaacaggggaaagcttagaggtccttctatatgtgttaataagctgtttctaagtgtttaaatttgaaaagcatcatgttctcatgatttatgggaatgaagcaagtactgaaatcaaattaaatactccctgggtcctgggtcagtttgaccctagccctggggtgaggcaagccccctcctatgaggatgagcaaaaatactactctcttcgccctgagttgctttctggatctggggcttcaggacttgctgcttcagtcagcttttattagcaccaaagactttatgaagatcccacacacagacacacatcccttcccgcctcccccctgccttcagtaggatctggctccgtggctggaggaccaacccctatagtgggaatgcagagcttaacgtgtactgcttgtgtgtgtgcgtgagtgtgtgtgtgtgtatgagtgtgtgttccgcctcccaccctctccccatctgctctgggtatttttgtttttgtttagttttaggtttacaacagagaggaattaatttatcagcagcctaaaactgttgtgtttttcttatggtttaaaaaacgccatgtcattgataactccctttctcccttcccttctcccggtctgctgatcactctttcatgcctgtgtatccagggtgctctgtttccccaccgttcccaggtgtacgaggcagagggccgggacagctttcctctcagtcattgttcaccccacttgaaaattcagacaagaaaactttgcttaaaagatttcatgtgtgggaaccacagttcctggctgcctttctcctgtgtatgtgtaaattccttaataaatattgcagggaaaaaaaaaaaaaaaaaaaaaaaaaaaaaaaaaaaaaaaaaaaa

SEQ ID NO: 401876 - DNA, 1000 bp, Homo Sapiens
gggctcgaaatccagcatttcagccacaaactttgatggactttggctcaggtactggttctgtcacctgggctgctcacagtatttggggccagagcctacgtgaatatatgtgtgtggacagatcagctgccatgttggttttggcagaaaaactactgaaaggtggttcagaatctggggagccttatattccaggtgtctttttcagacagtttctacctgtatcacccaaggtgcagtttgatgtagtagtgtcagctttttccttaagtgaactgcccagcaaggctgaccgcactgaggtagttcaaaccttatggcgtaagacaggtcatttcctggtactggtggagaatggaacaaaagctgggcacagccttctcatggatgccagggatctggtccttaagggaaaagagaagtcacctttggaccctcgacctggttttgtctttgccccgtgtccccatgaactcccttgtccccagttgaccaacctggcctgtagcttctcacaggcgtaccatcccatccccttcagctggaacaagaaaccaaaggaagaaaagttctctatggtgatccttgctcgggggtctccagaggaggctcatcgctggccccgtatcactcagcctgtccttaaacggcctcgccatgtgcattgtcacttgtgctgtccagatgggcacatgcagcatgctgtgctcacagcccgccggcacggcagggatttgtatcgttgtgcccgtgtcagctcctggggagatcttttacctgtgcttactccgtctgcgtttcctccatctacggctcaggatccctctgagagttgatgaggatgtgtaacaagtattttcttctatcgtgcctgccagggctgaagctgcctggtatccaggaggggaatgctggtatccccatatgtctgtgtttgtttgagatttttaataataaataataaatttttgaagaatggaaaaaaaaaaaaaaaaaa

SEQ ID NO: 401877 - DNA, 1000 bp, Homo Sapiens; identical to SEQ ID NO: 117929

SEQ ID NO: 401878 - DNA, 1000 bp, Homo Sapiens; identical to SEQ ID NO: 117931

SEQ ID NO: 401879 - DNA, 1000 bp, Homo Sapiens; identical to SEQ ID NO: 223259

SEQ ID NO: 401880 - DNA, 1000 bp, Homo Sapiens; identical to SEQ ID NO: 223260

SEQ ID NO: 401881 - DNA, 1000 bp, Homo Sapiens; identical to SEQ ID NO: 290576

SEQ ID NO: 401882 - DNA, 1000 bp, Homo Sapiens; identical to SEQ ID NO: 117933

SEQ ID NO: 401883 - DNA, 1000 bp, Homo Sapiens
tactgatcggaaagagacctacgggttagtggagacctttaacctcagaccaaatgagttcaaatatatgtctgtcatcgctgaattggagcaaagcggacttggagcagaactgaaatgtgcccagaaccaaaataagacttagaactgtacaggttggcccttcacctagttgactcagccctcgatagtctagagcccaccccctcctcaggaactcaagagctcagcatttataatgagcagttggtaatgagttgccctatgtgcttgtcgcaagcagtcacagagatgagccctattacttgatattcaggaacaaaggtacctgaacattctgataattatctcagcatacttgaggtttccttttttaagtgttcgaggttataacaagagacagccaaggacctacaagacagttgacttgattttgcacagtgtaacagcgcagttgcattctggccactttgaccttatagctcccaaatgatgagtttgtcatctttatgaactcatgacaggataataagcttgaagacctgctgtagttagatatgggctttaatccttcccatgcaccagtcagctgaacaaaagcataagccaaacatcctgtttaaactgtagaataaccagatattcccatcaggttaaagacttcatctagatgatgccccccagagatgcctttagtgtaagtagctggcttggggtatcagcaaatttcaggtatagttagataaacaggtacagggcctgcatactattaaaccatagtttgtggcacccgcttttctaactccacctgttagaagctatgtgtttgaaggaatgaatcagtgcagtataaataaaattcttttgtaaggagaagattaaaaaaaaaaaaaaaaaaaaaaaaaaaaaaaaaaaaaaaaaaaaaaaaaaaaaaaaaaaaaaaaaaaaaaaaaaaaaaaaaaaaaaaaaaaaaaaaaaaaaaaaaaaaaaaaaaaaaaaa

SEQ ID NO: 401884 - DNA, 1000 bp, Homo Sapiens; identical to SEQ ID NO: 290577

SEQ ID NO: 401885 - DNA, 1000 bp, Homo Sapiens; identical to SEQ ID NO: 290578

SEQ ID NO: 401886 - DNA, 1000 bp, Homo Sapiens; identical to SEQ ID NO: 223261

SEQ ID NO: 401887 - DNA, 1000 bp, Homo Sapiens; identical to SEQ ID NO: 117934

SEQ ID NO: 401888 - DNA, 1000 bp, Homo Sapiens; identical to SEQ ID NO: 117935

SEQ ID NO: 401889 - DNA, 1000 bp, Homo Sapiens; identical to SEQ ID NO: 117936

SEQ ID NO: 401890 - DNA, 1000 bp, Homo Sapiens; identical to SEQ ID NO: 290582

SEQ ID NO: 401891 - DNA, 1000 bp, Homo Sapiens; identical to SEQ ID NO: 117937

SEQ ID NO: 401892 - DNA, 1000 bp, Homo Sapiens; identical to SEQ ID NO: 290584

SEQ ID NO: 401893 - DNA, 1000 bp, Homo Sapiens; identical to SEQ ID NO: 290585

SEQ ID NO: 401894 - DNA, 1000 bp, Homo Sapiens; identical to SEQ ID NO: 117938

SEQ ID NO: 401895 - DNA, 1000 bp, Homo Sapiens
cccaggccacatagggccagtggtaggggttccctctatgtcgggcagtgctgagggctgggatgctctgtgaccccagctggagcccacacctaagggctggcatccacatcatttcaccctgcagtgagggaagaggccaccaggtggcagcacagccacacccgttcccacgtcagaggagggcaaggctgggtactcagcagccactctgagccggggctccttccaggagctgaaatccacctgtctccatcttccttgcctgcctgggtactcatgccaagcagagactgggattaggggttctgtgctcttgcctaattaggaacattctcccatgtctcttgtgtggtcccagaaggagaagtgagtttgccaaggatatggggcaggaggctccctctgctgaccccctgcagcctggagccagcccggggactgtcctgggtggagggcaggtgaacacaagctgctgccggggactgtcctgggtggacggcaggtgaacacaagcggctgccgcatgtagccactcactcgactttttttcagctgtgaccattcccgggagctctttgagcctttctgtctcatttggaaccagggggaaccaggaaggggctcctggcctctctgtgtcctctgcagtgggggttgtggggggcgcagcatccacgccttgctgcccttctttcatgaagtctgttttttaagtgctggttcccccgaatattttatgcagaggagggaaaatttatagtggcaattattttctcacagtctggtgagcaggcaattaattaggagtaagggggcctagtagagcgtggcgtgtggcagaatcgcaccgccccggctccccagcccaccgccatgcagggctcgcgtgcgggaaaactaatatgccggcgtttaagcctgtgcccctctgctgggtgtaactgctctgaaataaatgatctgacattgtgaaaaaaaaaaaaaaaaaaaaaaaaaa

SEQ ID NO: 401896 - DNA, 1000 bp, Homo Sapiens; identical to SEQ ID NO: 223264

SEQ ID NO: 401897 - DNA, 1000 bp, Homo Sapiens; identical to SEQ ID NO: 290588

SEQ ID NO: 401898 - DNA, 1000 bp, Homo Sapiens
ttcttctcagaagtcaccgctcagtgaacgcccaggccctcctgtgagtggggaagccgccctgcggttcatctcacagcgcgcagagactgcagcctcccaatcgtgcaggctcgggccttgagtcggtttctgtttctctggagggacagagcagaggggccagggactgagtgagtggctaagcaggggagggtgatgtgaaggtgatctcgagtttgccaggggtgggctgaacaggagaagatgaacaaaggatccggctctcaaaaggccctggcagggactggatgctgggtacagaagcgcgcccttgggcttcaggctcctgagctggcagcacggcagggagagctccatccatgtcgcaggagcccaggaagctcagcccctgggtaaaaagtgctcactgcagctcagatcagtcctcaggtcacatttcggggagccagcctcccctcttcccctccccagccccgctcctccctctgtggacacactccgggccctcagccagctggctgcatgaggagcagctttgtgctgtgggagagaccggctctgggagaatgggtttcatcccagcctacgtcacatttgcccagtgccttatgttttctgggtttttcttcctccagttctgtttctaaaaaccagcttgagtttggctgaactgtcctttctcaacagaagcgcttttgcaattgatcccgggcaacaagtcaaaataagcttttaagtggagattttgtttttttcaaatgtatatgctttggaaattttgattttttagccagagggttttaccaagtgttctttgaagcacattacgatgcctcgagagggcggcccgtgcacgcgctttcaagaaaatgttctcgggacactcggtcttctctttgaaaggacattttctcattggttttgccgtgaaaatcctgtggagacttcgcaaagaaaacgcagccttacatttgctcattaaagacagatttccttc

SEQ ID NO: 401899 - DNA, 1000 bp, Homo Sapiens; identical to SEQ ID NO: 117941

SEQ ID NO: 401900 - DNA, 1000 bp, Homo Sapiens
ctttattgtccctggtaaatgtttcccggctgggcgcggtggctcacgcctgtaatcccagcactttgggaggccgaggcgggtggatcacctaaggtcaggagtttgagatcagcctgcccaacatggtgaaacctcgtctctactaaaaatacacaacttagccagtcttgttggcgcacgcctgtaatctcagctactagggatgctgaggcaggagaatcgcttgaacccaagaggtggaggttgcggtgagccaagattgcgccactgcactccagcctgggcaaacagagggagactccatcgccccccccaacaaaaaaaaaagtttcccatacactggcctgccccaaaacccactaacaattttagcaaaacagtccaggccaaagaggaagcatttcatgttcaataagaaacccagccattccgcatggctggttcctgagtggctctggtgatactctccagccacctgctgacattcagaatctcagacctcgggactgctgttgcggtaccgtgtgtctgacacctgccagcagccctttgctatctgcgcgcaggatgggggtgactgcccagacattcccgctagataggctctgatttccggggcagcctttcagatgcggcagacatacaacacctgtactttagagttttaagggaaaaaaaatcagaagtgctggttagatagtaaaaacttaggataacttagaaaggctagttttagcttcctttgtggctccctggtgcaaaacaattagcagttatgcaatggacctgattctagtttattctaattaagaagtgaggccgagtttgacttcgttcctgaatacaatcttgagtaactgggaaagtctgagtgaaaggatggcctcattctctttctaatcttgctggtttcaagattagaaaatggcattatttgatctgaaatgtttgagaagacacgaataaagttacttgggcagaaaaaaaaaaaaaaaaa

SEQ ID NO: 401901 - DNA, 1000 bp, Homo Sapiens; identical to SEQ ID NO: 117942

SEQ ID NO: 401902 - DNA, 1000 bp, Homo Sapiens; identical to SEQ ID NO: 223266

SEQ ID NO: 401903 - DNA, 1000 bp, Homo Sapiens; identical to SEQ ID NO: 290592

SEQ ID NO: 401904 - DNA, 1000 bp, Homo Sapiens; identical to SEQ ID NO: 290593

SEQ ID NO: 401905 - DNA, 1000 bp, Homo Sapiens; identical to SEQ ID NO: 117943

SEQ ID NO: 401906 - DNA, 1000 bp, Homo Sapiens; identical to SEQ ID NO: 117944

SEQ ID NO: 401907 - DNA, 1000 bp, Homo Sapiens
gtggtgggtgcggaagaggatcggagcctacttccctccgctcagcctggaggagctgaggccctacttcagggaccgtgggtggcctctgcccgggcccctctagacgtgcaccagaaataaaggcgaagacccagcccctcggcggctcagcaacgtttgcccttccctgcgcccagcccaagctgggcatcgccaagagagacgtggagaggagagcggtgggacccagcccccagcacgggggtccagggtggggtctgttgtcacatactgtggcggctcccaggccctgcccacctggggccccacatccaggccaacccttgtcccaggcgccaggggctctgatctcccatccatcccaccctcctcccagaggcccagcctggggctgtgccgcccacaggagttgagacaatggcaatcctgacaccttcctccactacagccctgaccatagacccagccaggtagctcttggggtctctagcgtcccagggcctggtttctgttccctcttcaatggtgtgttcccagccaggtcctgaccctcagagccaagtccctgtcacgtctggggcagccaaaccctcgccccacagggacctggacacgcccggccaggatgtggggttggatgggccattttctgtcctatccctcatctccacccccgccacagcctacacgcatcccacacatgcaggcacacacagcctgtgcacacatgtgttcttggcccggtttcatccccccatgactggtgtctgtgaggtgcagatggacacagcgcacacccagaccctccaccaggctgtgacctcgctgcctctgaggccttgacaaggcccctcaatcggaggacagccggccgtgcacactttcatcatcgtcggacaaacagcgtctactgcacatttttcttattcctattcttgagccatagctatggcatattcttctactattcctattataccacttaccagcttactcg

SEQ ID NO: 401908 - DNA, 1000 bp, Homo Sapiens; identical to SEQ ID NO: 117945

SEQ ID NO: 401909 - DNA, 1000 bp, Homo Sapiens; identical to SEQ ID NO: 223268

SEQ ID NO: 401910 - DNA, 1000 bp, Homo Sapiens; identical to SEQ ID NO: 290596

SEQ ID NO: 401911 - DNA, 1000 bp, Homo Sapiens; identical to SEQ ID NO: 223269

SEQ ID NO: 401912 - DNA, 1000 bp, Homo Sapiens; identical to SEQ ID NO: 290597

SEQ ID NO: 401913 - DNA, 1000 bp, Homo Sapiens; identical to SEQ ID NO: 290598

SEQ ID NO: 401914 - DNA, 1000 bp, Homo Sapiens; identical to SEQ ID NO: 290599

SEQ ID NO: 401915 - DNA, 1000 bp, Homo Sapiens; identical to SEQ ID NO: 290600

SEQ ID NO: 401916 - DNA, 1000 bp, Homo Sapiens; identical to SEQ ID NO: 223270

SEQ ID NO: 401917 - DNA, 1000 bp, Homo Sapiens; identical to SEQ ID NO: 290602

SEQ ID NO: 401918 - DNA, 1000 bp, Homo Sapiens; identical to SEQ ID NO: 290603

SEQ ID NO: 401919 - DNA, 1000 bp, Homo Sapiens
gagccctcagaaggggccagagcattcgctacttggtaccagatcttgtccaagaatacattgaaaagcataatttgtacagctctgagagtgaagacaggaatgctggggtcatcctggcccctttgcagagaaacactgcagaagctaagacataggaattctacagcatgatatttcagacttcccatttggggatctgaaacaatctgggagttaataactggggaaagaagttgtgatctgttgcctaaactaaagcttaaaagtttagtaaaaatcgtctgggcacagtggctcacgcctgtagtcccagctacttgggaggctgaggcaggagaatcacttgaccccaggtggtggaggttgcagtgagccaagattgcaccattgcactccagcctggcgacagagcaagactctgtctcaaaaaaaaaaaaaaaatttagtaaaaatcaatggtaagctaaaataagtttttgtttgtttatttgtttttgagatggagtctctactaaaaatacaaaaaattagccaggcatggtgccgcataactataatcccagctacttgggaggctgaggcaggagaatcgcttgaacccgggaggcacaggttccagtgggccaaggttgtgccactgcactccagcctgggcaaaaaagcaaaactccatctcaaagagaaaaaaaaaaaagaccgggtgtggtggctcacacctgtaatcccagcactttgggaggcctaagtgggtggatcacgtgaggtcaagagttcaagaccagcctggccaatatggtgaaaccccatctctactaagaatacaaaaaattagctgagcatggtggtgggctcctgtagtcccagctacttgggaggctgaggcaggagaatcgcttgaacctgggaggcagaggttgcagtaagccaagatcgtgccattgcactccagcctgggtgacagagcgagactccatctcaaaaaaaaaaaaaaaaaaaa

SEQ ID NO: 401920 - DNA, 1000 bp, Homo Sapiens
ggtcatgggaacccacacctacagccactggcccagctgctgccccagcaaagggcaggacacctctgaggagctgctgaggtggagcactgtgcctgtgcctcccctagagcctgctaggcccaaccgccacccagagtcctgtagggccagtgaagatggacccctcaacagcagggccatctccccctggagatatgagttggacagagacttgaaccggctcccccaggacctgtaccacgcccgttgcctgtgcccgcactgcgtcagcctacagacaggctcccacatggacccccggggcaactcggagctgctctaccacaaccagactgtcttctaccggcggccatgccatggcgagaagggcacccacaagggctactgcctggagcgcaggctgtaccgtgtttccttagcttgtgtgtgtgtgcggccccgtgtgatgggctagccggacctgctggaggctggtccctttttgggaaacctggagccaggtgtacaaccacttgccatgaagggccaggatgcccagatgcttggcccctgtgaagtgctgtctggagcagcaggatcccgggacaggatggggggctttggggaaagcctgcacttctgcacattttgaaaagagcagctgctgcttagggccgccggaagctggtgtcctgtcattttctctcaggaaaggttttcaaagttctgcccatttctggaggccaccactcctgtctcttcctcttttcccatcccctgctaccctggcccagcacaggcactttctagatatttcccccttgctggagaagaaagagcccctggttttatttgtttgtttactcatcactcagtgagcatctactttgggtgcattctagtgtagttactagtcttttgacatggatgattctgaggaggaagctgttattgaatgtatagagatttatccaaataaatatctttatttaaaaatgaaaaaaaaaaaaaaaaaaaa

SEQ ID NO: 401921 - DNA, 1000 bp, Homo Sapiens; identical to SEQ ID NO: 290604

SEQ ID NO: 401922 - DNA, 347 bp, Homo Sapiens
cagagtggagcggccgccggagatgcctgacgcatctgtctgaggagcggtcagtgacgcgatggagcgggcaagggatcgcttacacctgagacgaactacagaacagcacgtaccagaggtggaagtccaagtcaaacgcagaaggactgcctcactgagcaaccaagagtgtcagttgtacccgaggcgttctcagcagcagcaagtacctgtggtggatttccaggctgaactgaggcaggcattcttagctgagacaccaagaggtggttaaagccatattggagtagcgaggaatctgattccaagcaaaaaccagacaatgtaataaaaatattattcat

SEQ ID NO: 401923 - DNA, 1000 bp, Homo Sapiens; identical to SEQ ID NO: 290605

SEQ ID NO: 401924 - DNA, 1000 bp, Homo Sapiens; identical to SEQ ID NO: 285205

SEQ ID NO: 401925 - DNA, 1000 bp, Homo Sapiens; identical to SEQ ID NO: 290606

SEQ ID NO: 401926 - DNA, 1000 bp, Homo Sapiens; identical to SEQ ID NO: 117946

SEQ ID NO: 401927 - DNA, 1000 bp, Homo Sapiens; identical to SEQ ID NO: 290607

SEQ ID NO: 401928 - DNA, 1000 bp, Homo Sapiens; identical to SEQ ID NO: 223271

SEQ ID NO: 401929 - DNA, 1000 bp, Homo Sapiens
tgagtgagatataagtagacaatctttctactgttgttgctctttttgctttgctttgggttcttgaacaggttttttggatatatgcatgttgtcattttggactagttctcatgctactgcaaagatctattgctagctaatatatgagttaagaaagaaaattagaaaatctgttcattgaaattctgtttacacttgtcagaaataagcatttctttgtttaattaaggattgccagcttcagttaagacaagacctatcagtaaatgaatatatgttttgatttaacacatctttacaattaattcataatagggactcaggctcaaataactgttcctgtgtctagatttataatgaggacatcagggagcctttttaagctaaagagtgattatctttcacagtagaactagaaacaaaaccctaacttgtgaagttgctatttatttttccctgagtgaatataactgttatttggtctttaacagatatactgaggtttgagtttcactttctttaagtctcacattgctaacatgacattagctgtaagaaacaagatagctttacatttgaatgccatttactgatttctaatgattctctttttttgtaaacaactgtttcctttgattatgtcaacatgtttctgatgtggcatttttgttttaatcccaatcggttaggaaaatctagtcagtaagcgccatgagtattcttcccataactaaatgggtttctaatttaatttgaagggaataaaatttgtgtaagaaaaaagctgtttaacattaataaactatatttcttcttacacattgaactgtatcattttcatatccacttccccaccactgaaatatcttatttcacaatattttaactgatttttaatccaaaactaatttataagacagtatgtatagtaatagtagcttgagtgaatatgcaaaagtttaatttttatatatgtcatactatattttaaatagtt

SEQ ID NO: 401930 - DNA, 1000 bp, Homo Sapiens; identical to SEQ ID NO: 223275

SEQ ID NO: 401931 - DNA, 1000 bp, Homo Sapiens; identical to SEQ ID NO: 290613

SEQ ID NO: 401932 - DNA, 1000 bp, Homo Sapiens; identical to SEQ ID NO: 223277

SEQ ID NO: 401933 - DNA, 1000 bp, Homo Sapiens; identical to SEQ ID NO: 117951

SEQ ID NO: 401934 - DNA, 1000 bp, Homo Sapiens; identical to SEQ ID NO: 223280

SEQ ID NO: 401935 - DNA, 1000 bp, Homo Sapiens; identical to SEQ ID NO: 290617

SEQ ID NO: 401936 - DNA, 1000 bp, Homo Sapiens; identical to SEQ ID NO: 290618

SEQ ID NO: 401937 - DNA, 1000 bp, Homo Sapiens; identical to SEQ ID NO: 117952

SEQ ID NO: 401938 - DNA, 1000 bp, Homo Sapiens; identical to SEQ ID NO: 290619

SEQ ID NO: 401939 - DNA, 1000 bp, Homo Sapiens; identical to SEQ ID NO: 290620

SEQ ID NO: 401940 - DNA, 1000 bp, Homo Sapiens; identical to SEQ ID NO: 223281

SEQ ID NO: 401941 - DNA, 1000 bp, Homo Sapiens; identical to SEQ ID NO: 290622

SEQ ID NO: 401942 - DNA, 1000 bp, Homo Sapiens; identical to SEQ ID NO: 223282

SEQ ID NO: 401943 - DNA, 1000 bp, Homo Sapiens; identical to SEQ ID NO: 115660

SEQ ID NO: 401944 - DNA, 841 bp, Homo Sapiens; identical to SEQ ID NO: 290625

SEQ ID NO: 401945 - DNA, 1000 bp, Homo Sapiens; identical to SEQ ID NO: 290626

SEQ ID NO: 401946 - DNA, 1000 bp, Homo Sapiens; identical to SEQ ID NO: 117953

SEQ ID NO: 401947 - DNA, 1000 bp, Homo Sapiens; identical to SEQ ID NO: 223284

SEQ ID NO: 401948 - DNA, 1000 bp, Homo Sapiens; identical to SEQ ID NO: 223285

SEQ ID NO: 401949 - DNA, 1000 bp, Homo Sapiens; identical to SEQ ID NO: 117954

SEQ ID NO: 401950 - DNA, 1000 bp, Homo Sapiens; identical to SEQ ID NO: 117955

SEQ ID NO: 401951 - DNA, 1000 bp, Homo Sapiens; identical to SEQ ID NO: 223286

SEQ ID NO: 401952 - DNA, 1000 bp, Homo Sapiens; identical to SEQ ID NO: 290632

SEQ ID NO: 401953 - DNA, 1000 bp, Homo Sapiens; identical to SEQ ID NO: 117956

SEQ ID NO: 401954 - DNA, 1000 bp, Homo Sapiens
tctttttcttttttttttttttttttttgagacaaagtctcgcactgtctcccaggctggactgcagcagcgcagtctcagatcactgcaacctccgcctcctgggttcaagcaattcttctgactcagcctcccgagtagctgggagtacaggtgcacaccaccatgcctggctaatttctgtatttttagtagagacagggtttcaccatgttggccaggctggtctcgaacgcctgacctcatgatctacccgcctcggcctcccaaagtgctgggattacaggcatggagcaccgtgcctggccaagattctttacaataggatttatgtaaaacttaactaagctaaactgctctctgattattcaagagcaaagtattaaaaatttctcgaacttacttgacaacaaaacccattctttcagttacatctactaagagctcgtagttcaataacattccaaagaacgtagtttggaaaacactggcctatcggctgtaataggaagggtctaaagaaaattatttgctgagtcctcataatcaattggctataatcacaatttaataatttatcaatgcaaacagtacattaaaaactgtagcacaatctataatttttaccttcatatgcagagaaattaagaatttacatcttttacaaatatgtgtatctctgaaataatgaaatatattgatgggtgaaataatatttctggtattttcttcattataacacgtggaatgggacagtggctagaggtatggatggagcaaggtcaaatatgagctgatggagctgggcgctaaataagggtataatatgctacttctgtgtatgttgtgtatggtatagtatgctatttctgtgtatgttcaaattgtttatgtatataataaagttttaaaaatttgtatgtacttgacaattccttagaaaaaagaggctaaaataaaatagatctacgtcataaaaaaaaaaaaaaaaaaaaaaaaa

SEQ ID NO: 401955 - DNA, 1000 bp, Homo Sapiens; identical to SEQ ID NO: 117958

SEQ ID NO: 401956 - DNA, 1000 bp, Homo Sapiens; identical to SEQ ID NO: 117959

SEQ ID NO: 401957 - DNA, 1000 bp, Homo Sapiens; identical to SEQ ID NO: 290637

SEQ ID NO: 401958 - DNA, 1000 bp, Homo Sapiens; identical to SEQ ID NO: 223287

SEQ ID NO: 401959 - DNA, 1000 bp, Homo Sapiens; identical to SEQ ID NO: 290639

SEQ ID NO: 401960 - DNA, 1000 bp, Homo Sapiens; identical to SEQ ID NO: 223288

SEQ ID NO: 401961 - DNA, 1000 bp, Homo Sapiens; identical to SEQ ID NO: 223289

SEQ ID NO: 401962 - DNA, 1000 bp, Homo Sapiens
gggaaacacaagaatatcataaatcttcttggagcctgcacacaggatgggcctctctatgtcatagttgagtatgcctctaaaggcaacctccgagaatacctccgagcccggaggccacccgggatggagtactcctatgacattaaccgtgttcctgaggagcagatgaccttcaaggacttggtgtcatgcacctaccagctggccagaggcatggagtacttggcttcccaaaaatgtattcatcgagatttagcagccagaaatgttttggtaacagaaaacaatgtgatgaaaatagcagactttggactcgccagagatatcaacaatatagactattacaaaaagaccaccaatgggcggcttccagtcaagtggatggctccagaagccctgtttgatagagtatacactcatcagagtgatgtctggtccttcggggtgttaatgtgggagatcttcactttagggggctcgccctacccagggattcccgtggaggaactttttaagctgctgaaggaaggacacagaatggataagccagccaactgcaccaacgaactgtacatgatgatgagggactgttggcatgcagtgccctcccagagaccaacgttcaagcagttggtagaagacttggatcgaattctcactctcacaaccaatgagatctgaaagtttatggcttcattgagaaactgggaaaagttggtcaggcgcagtggctcatgcctgtaatcccagcactttgggaggccgaggcaggcggatcatgaggtcaggagttccagaccagcctggccaacatggtgaaaccctgtctctactaaagatacaaaaaattagccgggcgtgttggtgtgcgcctgtaatcccagctactccgggaggctgaggcaggagagtcacttgaaccggggaggcggaggttacagtgagccgagatcatgccattgcattccagccttggcgacagagcgagactccatct

SEQ ID NO: 401963 - DNA, 1000 bp, Homo Sapiens
accattattatcaagtagactactgttcagcttttattccttccctggttgtttatcccttaggaatgagtttcttagactttcccaatatgtgattttttttcccatttagaatggtgattttaaatgtgtgagtgcatgtactatcttatctcagatatttgcacccccaatctgcccccaactcccaaaagctagaacactgccaactgatctgttataggtcctttagaaacacataattaacacttaaggttgggtgctgctaattctttgcaaaaatccaaatattgttaagggaccagggagatgccactaccccttgattttccatctaaaaatatacatgtttatgtaaacaaatctttccatatccatagtgacttttcaagtatttaagcctaaagattttgatctcacatttttatacctgtttaaattgctcacagttattacatacacatcagccatcaactaaagttgtactttaaaaatttactacaatatgtacatttctaagtcaaacacttgtgacttttgctttaattccatgaatgttcctgcctccttgatatttgtatttattctttttttctctagagtagaggtataattgtgtgatatttcagaaatacagataaatgattcaaaaagtcacagttaaggagaatcatgtttctttgatcatgaataactgattagtaagtcttgcctatattttcctgatagcatatgacaaatgtttctaaggtaacaagatgagaacagataaagattgtgtggtgttttggatttggagagaaatattttaatttttaaatgcagttacaaattataatgtattcatatttgtactttctgttaaaatgcatgattgcagaattgtttagattttgtgtttattcttgatgaaaagctttgtttgttcttgtttttaagtttgcactcaaatcttaagaaataaatccacccatgttatcaaaaaaaaaaaaaaaaaaaa

SEQ ID NO: 401964 - DNA, 1000 bp, Homo Sapiens; identical to SEQ ID NO: 290643

SEQ ID NO: 401965 - DNA, 1000 bp, Homo Sapiens; identical to SEQ ID NO: 223290

SEQ ID NO: 401966 - DNA, 1000 bp, Homo Sapiens
caaactgtccctgtccccaggcccactccagttccagaccaccctccatgctccacccccaggcggtttggaccccaccactgttgccatggtgaccaaactctggagtccgaggtaacagaacacctgtccccctaggcttttccttgtggacaacggggccctgttcaccaagctgttgccatagagactgtcaacgttgtcctcatgacaaccagacttccagttctcaggaacttctcattgtgggccagaagtcctgggtgcctcctactagggctaccctactgcaccccatcaggggcctgatggctgccccttccccagacagggctggacttctggagctgctaagccaccctccgtttgcacgttaactctatgccggatagcagctgtgcacgagacaatcttgcaacacccgggcatgtttgtcgtcgtcctacaaatgaggaaaccgagcctatggcgtgccctggtctgttgagatatgcaagcactgagctcctcttttgtcctctgagaccccatctccattctcacccagttcctctctccttccctgacccccacccacatttccctccttagagatccaggagggatggaatgttctttaaaattcaacacccaccaggctctaagcggcgatctgtgctaagaggtcaggacccagccgaagtcctcggcgttgacaggcagctggggggacatgatccatggacaaggccatcccggccgtgggagaccccagtcccgaagtcttgcctgcaggagtactggggtccccctggggccctctttactgtcacgtcatctctaggaaacctatctctgagttttgggaccaggtcggtttgggtttgaattctgcctcttcttgctcactgtgtgaccaagtgacaaactccttctgaacctgtgttctcccactgtaccagggctgttctgtggtccccgtgagtgccaagcatacagtaggggctcaataaatccttgt

SEQ ID NO: 401967 - DNA, 1000 bp, Homo Sapiens; identical to SEQ ID NO: 117961

SEQ ID NO: 401968 - DNA, 1000 bp, Homo Sapiens; identical to SEQ ID NO: 223291

SEQ ID NO: 401969 - DNA, 1000 bp, Homo Sapiens; identical to SEQ ID NO: 117962

SEQ ID NO: 401970 - DNA, 1000 bp, Homo Sapiens; identical to SEQ ID NO: 290648

SEQ ID NO: 401971 - DNA, 1000 bp, Homo Sapiens; identical to SEQ ID NO: 117963

SEQ ID NO: 401972 - DNA, 1000 bp, Homo Sapiens; identical to SEQ ID NO: 290650

SEQ ID NO: 401973 - DNA, 1000 bp, Homo Sapiens; identical to SEQ ID NO: 223293

SEQ ID NO: 401974 - DNA, 1000 bp, Homo Sapiens; identical to SEQ ID NO: 117964

SEQ ID NO: 401975 - DNA, 1000 bp, Homo Sapiens
gtcaattatctaacgccaattaaatatctcagaaagtcattgaaaataatatacattaatagtattggggagctggaaattcacaacacgtgctggccacatctgataagaaagctttattgttacctgaaggagatgaagactctttgcaaactcgttttctccaggtgccatcattacacgtcagataatgaactcgagggatggttagtcaccagattcacctctgtgttcctcaggctggaacacctccagttgcttaaaataaaattgatcaccttcttcagtgggcacctggaacagctgatcaggtgcctccagaaccccttggagaacttggaattaacttgtggcaacctattagaagaggacttgaagtgtctctcccagttcccaagcctcggttacctaaagcatctgaatctcagctacgtgctgctgttccgcatcagtcttgaacccctaggagctctgctagagaaaattgctgcctctctcgagaccctcgtgttagagggctgtcagatccactactcccaactcagtgccatcctgcctggcctgagctgctgctcccagctcaccaccttctactttggcagcaattgcatgtctattgacgccctgaaggacctgctgcgccacaccagtgggctgagcaagttaagcctggagacgtatcctgcccctgaggagagtttgaattccttggttcgtgtcaattgggagatcttcaccccacttcgggctgagctgatgtgtacactgagggaattcaggcagcccaagaggatcttcattggccccaccccctgcccttcctgtggctcatcaccgtctgaggaactggagctccatctttgctgctagggaaggcgtgcccagtggggtagagaaatccaaagttctcttccaggcacttggacactaaaatctactatgtaggtgcaaactatttttctcttttcttatttatttcattttttaataattccaaaat

SEQ ID NO: 401976 - DNA, 1000 bp, Homo Sapiens; identical to SEQ ID NO: 290653

SEQ ID NO: 401977 - DNA, 1000 bp, Homo Sapiens; identical to SEQ ID NO: 223294

SEQ ID NO: 401978 - DNA, 1000 bp, Homo Sapiens; identical to SEQ ID NO: 290657

SEQ ID NO: 401979 - DNA, 1000 bp, Homo Sapiens; identical to SEQ ID NO: 223296

SEQ ID NO: 401980 - DNA, 1000 bp, Homo Sapiens
cttggggacagacctgagcatgaccacccaatccggggacctgccgtcgaaggagcgggaccaggagcggggccggcccaaggatcggaagcatcgacagcaccaccaccaccaccaccaccaccaccatcccccgccccccgacaaggaccgctatgcccaggaacggccggaccacggccgggcacgggctcgggaccagcgctggtcccgctcgcccagcgagggccgagagcacatggcgcaccggcagggcagtagttccgtaagtggaagcccagccccctcaacatctggtaccagcactccgcggcggggccgccgccagctcccccagaccccctccaccccccggccacacgtgtcctattcccctgtgatccgtaaggccggcggctcggggcccccgcagcagcagcagcagcagcagcagcagcagcaggcggtggccaggccgggccgggcggccaccagcggccctcggaggtacccaggccccacggccgagcctctggccggagatcggccgcccacggggggccacagcagcggccgctcgcccaggatggagaggcgggtcccaggcccggcccggagcgagtcccccagggcctgtcgacacggcggggcccggtggccggcatctggcccgcacgtgtccgaggggcccccgggtccccggcaccatggctactaccggggctccgactacgacgaggccgatggcccgggcagcgggggcggcgaggaggccatggccggggcctacgacgcgccaccccccgtacgacacgcgtcctcgggcgccaccgggcgctcgcccaggactccccgggcctcgggcccggcctgcgcctcgccttctcggcacggccggcgactccccaacggctactacccggcgcacggactggccaggccccgcgggccgggctccaggaagggcctgcacgaaccctacagcgagagtgacgatgattggtgctaagcccgggcgagg

SEQ ID NO: 401981 - DNA, 1000 bp, Homo Sapiens; identical to SEQ ID NO: 117966

SEQ ID NO: 401982 - DNA, 1000 bp, Homo Sapiens; identical to SEQ ID NO: 117967

SEQ ID NO: 401983 - DNA, 1000 bp, Homo Sapiens
gggcagtatcgacagtgggcctatgccccctgagagtgtgggtcctgtggtagctggagtgttggtggccatcttggtgctggcggtcctcatgctgatgtactactgctgcagacagaacaacaaactaggccaactcaagccctcagctctcccttccaagctgaggcaacagttcagttgtcccttcagggtttctcagaacagcgggactggtcatgccaacccaactttcaagctgcagacgccccagggcaagcgaaaggtgatcaacactccggaaatcctgcggaagccctcccagcctcctccccggccccctccagattatctgcgtggtgggtccccacctgcaccactgccagctcacctgagcagggctgctaggaactccccagggcccgggtctcaaatagagaggacggagtcgtccaggaggcctcctccaagccggccaattccccccgcaccaaattgcatcgtttcccaggacttctccaggcctcggccgccccagaaggcactcccggcaaacccagtgccaggccgcaggagcctccccaggccaggaggtgcatccccactgcggccccctggtgctggccctcagcagtcccggcctctggcagcacttgccccaaaggtgagtccacgggaagccctcaaggtgaaagctggtaccagagggctccaggggggcaggtgtagagttgagaaaacaaagcaattcatgcttcttgtggtctggactgaacttccagaacaaaagccaagggcaaaacattcatgtttcttggtgcccgcttgactgtggagttttggcttcatgtgaaaggtgattcttagaatcctgagctgtggtggcttcagtcctgcccctgcacctgacctggggagggaccctgagcaagtccctcttgagtctgtttcctcatttgtacagaggctatgatgagcagtagtaccagccccatcaggttgttgtgaagagcaaggaagt

SEQ ID NO: 401984 - DNA, 1000 bp, Homo Sapiens; identical to SEQ ID NO: 117968

SEQ ID NO: 401985 - DNA, 1000 bp, Homo Sapiens; identical to SEQ ID NO: 290661

SEQ ID NO: 401986 - DNA, 1000 bp, Homo Sapiens
aatgtgaagtcagaagttatgccaggaccaataggtcttccaagaaaaagagatcgtaaatatgacacacctggaaagagaagcagatacaacatagatttagttaatcattcaaggagttatacaaaaatgaaaacctttgagtgtaatatttgtgaaaaaatcttcaaacagcttattcaccttactgaacacatgagaattcataccggggagaaacctttcagatgtaaggaatgtggaaaagcctttagccaaagttcatctcttattccgcatcagagaattcatactggtgagaaaccctatgaatgtaaggagtgtgggaaaaccttcagacatccttcatcgcttactcaacatgttagaattcataccggggaaaagccctatgaatgtagggtatgtgagaaagccttcagccagagcattggactgatccagcatttgagaactcatgttagagagaaaccttttacatgcaaagactgtggaaaagcgtttttccagattagacaccttaggcaacatgagattattcatactggtgtgaaaccctatatttgtaatgtatgtagtaaaaccttcagccatagtacatacctaactcaacaccagagaactcatactggagaaagaccatataaatgtaaggaatgtgggaaagcctttagccagagaatacatctttctatccatcagagagtccatactggagtaaaaccttatgaatgcagtcattgtgggaaagcctttaggcatgattcatcctttgctaaacatcagagaattcatactggagaaaaaccttatgattgtaatgagtgtggaaaagccttcagctgtagttcatcccttattagacactgcaaaacacatttaagaaataccttcagcaatgttgtgtgaaatatactaaacatcaaagaatctatgttggagcacaagattctaaatcagtggttccctgatccctcaaaaatccatttgtttttggatt

SEQ ID NO: 401987 - DNA, 1000 bp, Homo Sapiens; identical to SEQ ID NO: 290663

SEQ ID NO: 401988 - DNA, 1000 bp, Homo Sapiens; identical to SEQ ID NO: 223298

SEQ ID NO: 401989 - DNA, 1000 bp, Homo Sapiens; identical to SEQ ID NO: 223299

SEQ ID NO: 401990 - DNA, 1000 bp, Homo Sapiens; identical to SEQ ID NO: 223300

SEQ ID NO: 401991 - DNA, 1000 bp, Homo Sapiens; identical to SEQ ID NO: 223302

SEQ ID NO: 401992 - DNA, 1000 bp, Homo Sapiens
ggggtctgcacaagagaccctctcccctgcagtaaagccaggggccctggcctgatggggcccccatggggagctggagcctgccctgcagcctggagaagagggtggctgtggtgggcgtgctcatcccctgctaaggagcaggagctgctgggccaggtctgcggcagtgctggggtggcaccaggtgggcagtggtaggtggggtggcttgaggtctgggagggtggccctggccagccaggacacatgcagacccctggcttagtctggatacaggctccctctttcctcccaatcctaagctcctgacaagtggccaggtggctctgggccctcctgccccgtgcctaggtcaggggtcctggaataccccgtagctctggcaccaccacactggcctctgatggcaagacttggcccctccacctgtccctaacggacggcaggtcaggaaagccaggactcaggggagaagcaaacccccaggattgaaggctagggttctagggcctttgggtggggagggcccgggccggacagcctcagctccgtcccctgccccacaagattcacctgggcctccagtcccacgctggccccaactgctgcagctctcggcttccgcccaacagcctctggaggtgaggcgggagcatgccctcagcgaggctgggcggcgggtcctgctgtgccatctccctgtgcgcctgagcagatcaatccaccagtgcaaaacagggctaacggcacctgcaggacagcagcacgctccatccctcatgctcagctgcctctgcggccacggacttctgcccttcatctgctctctcttactctcctgagcctagcccgtccgtaagctccctcccctgcctggttcccagggcaggctgactcagttgactgcttggtccaagcctggccctggcacttgtcagggtcagcctaaggagatgggaataaagaggccagagagcaccaagtgagctcatgtttc

SEQ ID NO: 401993 - DNA, 1000 bp, Homo Sapiens; identical to SEQ ID NO: 290669

SEQ ID NO: 401994 - DNA, 1000 bp, Homo Sapiens; identical to SEQ ID NO: 223304

SEQ ID NO: 401995 - DNA, 1000 bp, Homo Sapiens; identical to SEQ ID NO: 290671

SEQ ID NO: 401996 - DNA, 1000 bp, Homo Sapiens; identical to SEQ ID NO: 290672

SEQ ID NO: 401997 - DNA, 1000 bp, Homo Sapiens; identical to SEQ ID NO: 223306

SEQ ID NO: 401998 - DNA, 954 bp, Homo Sapiens
atgggtggtgtcataaagagcatatttacattcgttttaattgtggaatttataattggaaatttaggaaatagtttcatagcactggtgaactgtattgactgggtcaagggaagaaagatctcttcggttgatcggatcctcactgctttggcaatctctcgaattagcctggtttggttaatattcggaagctggtgtgtgtctgtgtttttcccagctttatttgccactgaaaaaatgttcagaatgcttactaatatctggacagtgatcaatcattttagtgtctggttagctacaggcctcggtactttttattttctcaagatagccaatttttctaactctatttttctctacctaaagtggagggttaaaaaggtggttttggtgctgcttcttgtgacttcggtcttcttgtttttaaatattgcactgataaacatccatataaatgccagtatcaatggatacagaagaaacaagacttgcagttctgattcaagtaactttacacgattttccagtcttattgtattaaccagcactgtgttcattttcataccctttactttgtccctggcaatgtttcttctcctcatcttctccatgtggaaacatcgcaagaagatgcagcacactgtcaaaatatccggagacgccagcaccaaagcccacagaggagttaaaagtgtgatcactttcttcctactctatgccattttctctctgtcttttttcatatcagtttggacctctgaaaggttggaggaaaatctaattattctttcccaggtgatgggaatggcttatccttcatgtcactcatgtgttctgattcttggaaacaagaagctgagacaggcctctctgtcagtgctactgtggctgaggtacatgttcaaagatggggagccctcaggtcacaaagaatttagagaatcatcttga

SEQ ID NO: 401999 - DNA, 1000 bp, Homo Sapiens; identical to SEQ ID NO: 290674

SEQ ID NO: 402000 - DNA, 1000 bp, Homo Sapiens
gagaaaagctacgcgctggggggcgcccggggcccccaaccgtccacccgcgaagcccaggcgggggctagggcgggcggtcccccagagagcgtggagggcgaggctccccccgcacccccagaggcgcagaggtgagccgctgtgctgtcccgttccggaggggccgctttgccggccgtgaatcccagacgaggcattgggcctttccacgcccctgggtggcggcttcctgtggtgtttgtggacgtcctctgcctgtgccctgaatccgctcctgaggctaagcgctcccaacgagaagggtccacgggaagccctcacctctgtaaacacaccctgggccagcgctcgcatccgaggggagccgccggatgtggaagaagactcggctttcctgcagccatttagtgccgccccatgctaggttatttgacattgtgcagtgtagagttgccttaaagtgcgtgatctgccagtgctttcttcaagtcacccttgccccgattcctcctgtttgcgctccccagggttgctcaagtggaaattttgtcagctgtttagccttttcgtacttggcgtgatgtcaacttcacttctaatctgcaaaagcagaagctgtttcctagtttacctcgcgtgtgtttacctatatggagtagctcgcagagatcacagaaatgcttgcagcctaaggcagggttttcagaccgtgggtcccagcccatttagtaaaatgggaaatcaattagcaagtggtcaccagcattacacagcaatgaagcagaataaagtaggccagaatgcatcatgtagtaaaggcaaatactgttttgtgaaacttttcacccatacatctaaatgtgagaactggttgcaatgtaagacatttcttgctgggaagttgtgagcaaaataagttgaaaacactaataaagatctgtctgtctgagcaaaggagactaaactccttgggctacataaaaaaaaaaaaaaaaaa

SEQ ID NO: 402001 - DNA, 1000 bp, Homo Sapiens; identical to SEQ ID NO: 290675

SEQ ID NO: 402002 - DNA, 1000 bp, Homo Sapiens; identical to SEQ ID NO: 290676

SEQ ID NO: 402003 - DNA, 1000 bp, Homo Sapiens; identical to SEQ ID NO: 117971

SEQ ID NO: 402004 - DNA, 1000 bp, Homo Sapiens; identical to SEQ ID NO: 290677

SEQ ID NO: 402005 - DNA, 1000 bp, Homo Sapiens; identical to SEQ ID NO: 290679

SEQ ID NO: 402006 - DNA, 1000 bp, Homo Sapiens; identical to SEQ ID NO: 117972

SEQ ID NO: 402007 - DNA, 1000 bp, Homo Sapiens; identical to SEQ ID NO: 117973

SEQ ID NO: 402008 - DNA, 986 bp, Homo Sapiens
ccggctacctgttggtgtgtatgcagagcatccctgtgccccgcggatatagactggcgcgcctctgttgcgcaggcgcagaactacaacttcagggttttccccaacggcctcttttttgcacgttaggagaaactacatttcccataatcctttgttccagggctggagcggctctgggctccggaatcgcccgcagccggtactgcgggacccactgcggatatggctgtcttggctggatccctgttgggccccacgagtaggtcggcagcgttgctgggtggcaggtggctccagccccgggcctggctggggttcccagacgcctggggcctccccaccccgcagcaggcccggggcaaggctcgcgggaatgagtatcagccgagcaacatcaaacgcaagaacaagcacggctgggtccggcgcctgagcacgccggccggcgtgcaggtcatccttcgccgaatgctcaagggccgcaagtcgctgagccattgaggatcgcgacgcagtcggcgggaccctcatggaagcatcgccctcgcctcggaccttgcctggcgctatttttgcagggagctggggagcaggaacgcctcggacctgagtgctctccatattgtggggttgaagtctggatgggagcttgccaagtccctttttaggctttttaattaggaagcatttcgaacctgcgcaacagaccaaagaacagtacaaagaacatccgtgtacccagtaccctgactaccgactacctacaacccgtccctgccccatcctgagttcttttgaagctgatctcaggcatcggattatttcttctgtaaatatttcagaatgtatctctccaagatgagagctcattaaaagacaattacaaagcttatcacatccaaaagaattatcaataattttgaaatattattaaacgtgtaataaatgttcaaagttccacttgcaaaaaaaaaaaaaaaaaa

SEQ ID NO: 402009 - DNA, 1000 bp, Homo Sapiens; identical to SEQ ID NO: 117974

SEQ ID NO: 402010 - DNA, 1000 bp, Homo Sapiens; identical to SEQ ID NO: 290683

SEQ ID NO: 402011 - DNA, 1000 bp, Homo Sapiens; identical to SEQ ID NO: 117975

SEQ ID NO: 402012 - DNA, 1000 bp, Homo Sapiens
ttgccaccatcttggagctcagtgcccttgtagagaaaagaagccagcatatcctccagcacatggactttctgtattacctctcccatgacgggcggcgcttccacagggcctgccgcctggtgcatgacttcacagacgctgtcatccgggagcggcgtcgcaccctccccactcagggtattgatgattttttcaaagacaaagccaagtccaagactttggatttcattgatgtgcttctgctgagcaaggatgaagatgggaaggcattgtcagatgaggatataagagcagaggctgacaccttcatgtttggaggccatgacaccacggccagtggcctctcctgggtcctgtacaaccttgcgaggcacccagaataccaggagcgctgccgacaggaggtgcaagagcttctgaaggaccgcgatcctaaagagattgaatgggacgacctggcccagctgcccttcctgaccatgtgcgtgaaggagagcctgaggttacatcccccagctcccttcatctcccgatgctgcacccaggacattgttctcccagatggccgagtcatccccaaaggcattacctgcctcatcgatattataggggtccatcacaacccaactgtgtggccggatcctgaggtctacgaccccttccgctttgacccagagaacagcaaggggaggtcacctctggcttttattcctttctccgcagggcccaggaactgcatcgggcaggcgttcgccatggcggagatgaaagtggtcctggcgttgatgctgctgcacttccggttcctgccagaccacactgagccccgcaggaagctggaattgatcatgcgcgccgagggcgggctttggctgcgggtggagcccctgaatgtaggcttgcagtgactttctgacccatccacctgtttttttgcagattgtcatgaataaaacggtgctgtcacctctgcctgggcctcactgacagcctgcag

SEQ ID NO: 402013 - DNA, 762 bp, Homo Sapiens
caggcagcctcagcacaagaaaagaacatggtctagactgaagtaccaactaaatcatctcctttcaaattatcaccgacaccatcatggattcaagcaccgcacacagtccggtgtttctggtatttcctccagaaatcactgcttcagaatatgagtccacagaactttcagccacgaccttttcaactcaaagccccttgcaaaaattatttgctagaaaaatgaaaatcttagggactatccagatcctgtttggaattatgaccttttcttttggagttatcttccttttcaccttgttaaaaccatatccaaggtttccctttatatttctttcaggatatccattctggggctctgttttgttcattaattctggagccttcctaattgcagtgaaaagaaaaaccacagaaactctgataatattgagccgaataatgaattttcttagtgccctgggagcaatagctggaatcattctcctcacatttggtttcatcctagatcaaaactacatttgtggttattctcaccaaaatagtcagtgtaaggctgttactgtcctgttcttgggaattttgattacattgatgactttcagcattattgaattattcatttctctgcctttctcaattttggggtgccactcagaggattgtgattgtgaacaatgttgttgactagcactgtgagaataaagatgtgttaaaataaaaaaaaaaaaaaaaaaaaaaaaaaaaaaaaaaaaaaaaa

SEQ ID NO: 402014 - DNA, 1000 bp, Homo Sapiens; identical to SEQ ID NO: 290684

SEQ ID NO: 402015 - DNA, 1000 bp, Homo Sapiens; identical to SEQ ID NO: 223310

SEQ ID NO: 402016 - DNA, 1000 bp, Homo Sapiens; identical to SEQ ID NO: 117976

SEQ ID NO: 402017 - DNA, 1000 bp, Homo Sapiens; identical to SEQ ID NO: 290687

SEQ ID NO: 402018 - DNA, 1000 bp, Homo Sapiens; identical to SEQ ID NO: 285510

SEQ ID NO: 402019 - DNA, 1000 bp, Homo Sapiens
agaaggagaaggagggcttcccgatcacgtccctgagggagatcaacaccatcctcaaggcccagcatcccaacattgtcaccgttagagagattgtggtgggcagcaacatggacaagatctacatcgtgatgaactatgtggagcacgacctcaagagcctgatggagaccatgaaacagcccttcctgccaggggaggtgaagaccctgatgatccagctgctgcgtggggtgaaacacctgcacgacaactggatcctgcaccgtgacctcaagacgtccaacctgctgctgagccacgccggcatcctcaaggtgggtgattttgggctggcgcgggagtacggatcccctctgaaggcctacaccccggtcgtggtgacccagtggtaccgcgccccagagctgctgcttggtgccaaggaatactccacggccgtggacatgtggtcagtgggctgcatcttcggggagctgctgactcagaagcctctgttccccgggaattcggaaatcgatcagatcaacaaagtgttcaaggagctggggacccccagtgagaaaatctggcccggctacagtgagctcccagtagtcaagaagatgaccttcagcgagcacccctacaacaacctccgcaagcgcttcggggctctgctctcagaccagggcttcgacctcatgaacaagttcctgacctacttccccgggaggaggatcagcgctgaggacggcctcaagcatgagtatttccgcgagacccccctccccatcgacccctccatgttccccacgtggcccgccaagagcgagcagcagcgtgtgaagcggggcaccagcccgaggccccctgagggaggcctgggctacagccagctgggtgacgacgacctgaaggagacgggcttccaccttaccaccacgaaccagggggcctctgccgcgggccccggcttcagcctcaagttctgaaggtcagagtggaccccgtcatgggg

SEQ ID NO: 402020 - DNA, 1000 bp, Homo Sapiens
caaagacgacctgcgccccagctcgcccctgctctcggtcttcggagtgcttattctcaccttgctgggctttctggtggcggcgacgttcgcctggaacctgctggtgctggcgaccatcctccgtgtacgcaccttccaccgcgtgccccacaacctggtggcatccatggccgtctcggatgtcctggtggccgcgctggtcatgccgctgagcctggtgcatgagctgtccgggcgccgctggcagctaggtcggaggctgtgccagctttggatcgcgtgcgacgtgctttgctgcacggccagcatctggaacgtgacggccatagccctggaccgctactggtccatcacgcgccacatggaatacacgctccgcacccgcaagtgcgtctccaacgtcatgatcgcgctcacctgggcactctccgctgtcatctctctggccccgctgctttttggctggggagagacgtactctgagggcagcgaggagtgccaggtaagccgcgagccttcctacgccgtgttctccaccgtaggcgccttctacctgccgctctgtgtggtgctcttcgtgtactggaagatctacaaggctgccaagttccgcgtgggctccaggaagaccaatagcgtctcacccatatccgaagctgtggaggtgaaggactctgccaaacagccccagatggtgttcacggtccgccacgccaccgtcaccttccagccagaaggggacacgtggcgggagcagaaggagcagcgggccgccctcatggtgggcatcctcattggcgtgttcgtgctctgctggatccccttctttctcaccgagctcatcagtcccctctgctcctgtgacatccccgccatctggaaaagcatcttcctgtggcttggctactccaactccttctttaaccccctgatctatacggctttcaacaagaactacaacagcgccttcaagaacttcttttctaggcaacactga

SEQ ID NO: 402021 - DNA, 863 bp, Homo Sapiens; identical to SEQ ID NO: 56663

SEQ ID NO: 402022 - DNA, 1000 bp, Homo Sapiens
ttcaaatctcttgctttctttcttaaaaaaaagaaaaagaaaaagcaagaagaaggaagaaagaaaaagacagaaagagaaataggaggaggctgcagctcctcgttttcagctttggcgaagatggatccacgtttcatctttaatcacgccaggtccaggcccatctgtcttgtttcctctgccgaggagaagacgggcctcggtggcgaccattacctcgacacccgctaacaaatgaggcccggctcggccgcctccgcctctgctactgccgctgctggaagacagcctggatttcctttctttgtcccccactcccgatacccagcgaaagcaccctctgactgccagatagtgcagtgttttggtcacggtaacacacacacactctccctcatctttcgtgcccattcactgagggccagaatgactgctcacccacttccaccgtggggttgggggtgggcaacagaggaggggagcaagtagggaagggggtggccttgacaactcaggagtgagcagggaaattgagtccaaggaaaaagagagactcagagacccgggagggccttcctctgaaaggccaagccaagccatgcttggcagggtgaggggccagttgagttctgggagctgggcactactctgccagtccagagttgtacagcagaagcctctctcctagactgaaaatgaatgtgaaactaggaaataaaatgtgcccctcccagtctgggaggaggatgttgcagagccctctcccatagtttattatgttgcatcgtttattattattattgataatattattattactatttttttgtgtcatgtgagtcctctctccttttctctttctgacattccaaaaccaggccccttcctacctctggggctgcttgagtctagaacccttcgtatgtgtgaatatctgtgtgctgtacagagtgacaatagaaataaatgtttggtttcttgtgaaaaaaaaaaaaaa

SEQ ID NO: 402023 - DNA, 1000 bp, Homo Sapiens; identical to SEQ ID NO: 223312

SEQ ID NO: 402024 - DNA, 1000 bp, Homo Sapiens
tattctgatgatacccattgccatatgcatctactggatcaacaatctccaaaaggaaaaaaaagattctcatctcatgacattcaacctctgtctgtcccttgcaggatggagaagaacattcttacatgctgccaatgttgtcctggaccaagacactggtcatccctatctcttcgtgtcagaggacaaaagaagtgtgacattggacccctccagggagagcattccgggcaacccagagagattcgacagtcagctttgtgtcctgggccaggagagcttcgcctcagggaaacattacttggaggtagatgtggaaaatgtgattgagtggactgtggggatctgtagagacaatgttgagaggaaatgggaggtcccactacttcctcagaatggcttctggaccttggagatgcataaaaggaaatactgggccctgacctcccttaagtggattctctctctggaggagcccctttgccaggtgggcatcttcctggactatgaagctggagacgtctccttctacaacatgagggacagatcacacatctacacatttccccattcagccttttctgtgcctgtgaggcccttcttcagcttagggtcttatgacagccaaatcttaatctgctctgcattcacaggagccagtggggtcacggtgcctgaagagggctggacacttcacagagcagggacccaccacagcccacagaatcagttccccagtctcacagccatggaaacaagccctggccatctcagcagccactgcacaatgcctctggtggaagacacgccctcctcccctctggtcacacaagagaacatcttccagctgcctctttcacacccactccagacctcagcccctgttcacctcctcattaggtgtggctttagtagttcctttggttgtaactatgggatggaatccaggcatagggaactagttgttccacagctcccagccaggaagaaagtgtga

SEQ ID NO: 402025 - DNA, 1000 bp, Homo Sapiens
attgtcaaagccaagggtggcgttttgggggcgcttcttgagacgaaaaagaccctgggaagagatgatggtggcatatctaaagagtttgcagagcggactgacgctcctcccctttctctttaacgccgaaggacttggtgcagttcgtgtgaatctcacagggggaatgcaactggttcctgtgatctcttcacctttgcttctacatagagatgttaatgtcgagtagaaagaaatgtatcttagcatctgaatgattttgctggtaataatattatccacagatttgcaatggctggcatctgctttattcccattgctgtctgcaggctgtgggaatttcacctgtcaaaccaaacttccctctctgatgtgcactttgttctgtttcccagattcgtcacaatgcctattgtcctgtccttctctttcctttttcttccccattttgccatctgtctcttatgatttataaggggaaaaaaacttgttttgttagaggggcaggttagaagtcattgtataatttgtaggctttgtaatgattgaatgcaagcgtggaaatttaggctgaactctctatcaaaaggaaaaatgtggaggaaaagggaaaaatcaggagggaggattgcctcatgtattatttatttcgaccttttaggggagaaggaactcccccattctttcaagagattaaaaataaatcaacagtctgaaaacctaagcagacacggagcattatccggatcagccacacacgtgttcccttctatttattataaagaaatttttcatgggaaaatatgtattttttgtatattctacagagtttattctagtatgtatttacatcttgaagaacaagaaagttgttcttgtgattaaactataaataaactatctaattttcataaaaaaaaaaaaaaaaaaaaaaaaaaaaaaaaaaaaaaaaaaaaaaaaaaaaaaaaaaaaaaaaaaaaaaaaaaaaaaaaaaaaa

SEQ ID NO: 402026 - DNA, 1000 bp, Homo Sapiens; identical to SEQ ID NO: 223314

SEQ ID NO: 402027 - DNA, 1000 bp, Homo Sapiens; identical to SEQ ID NO: 223315

SEQ ID NO: 402028 - DNA, 1000 bp, Homo Sapiens; identical to SEQ ID NO: 290690

SEQ ID NO: 402029 - DNA, 1000 bp, Homo Sapiens; identical to SEQ ID NO: 117977

SEQ ID NO: 402030 - DNA, 1000 bp, Homo Sapiens; identical to SEQ ID NO: 290692

SEQ ID NO: 402031 - DNA, 1000 bp, Homo Sapiens; identical to SEQ ID NO: 290693

SEQ ID NO: 402032 - DNA, 1000 bp, Homo Sapiens; identical to SEQ ID NO: 223316

SEQ ID NO: 402033 - DNA, 1000 bp, Homo Sapiens; identical to SEQ ID NO: 117978

SEQ ID NO: 402034 - DNA, 1000 bp, Homo Sapiens; identical to SEQ ID NO: 117979

SEQ ID NO: 402035 - DNA, 1000 bp, Homo Sapiens; identical to SEQ ID NO: 290696

SEQ ID NO: 402036 - DNA, 1000 bp, Homo Sapiens; identical to SEQ ID NO: 290697

SEQ ID NO: 402037 - DNA, 1000 bp, Homo Sapiens; identical to SEQ ID NO: 223318

SEQ ID NO: 402038 - DNA, 1000 bp, Homo Sapiens
ccctaggcaggccctgcaggtcccacactctcccaggccctaaacttgggcggccttgccctgagagctggtcctccagcgaggccctgtcagcggtcttaggctcctgcacatgaaggtgtgtgcctgtggtgtgtgggctgctctaggagcagatacaggctggtatagaggatgcagaaaggtagggcagtatgtttaagtccagacttggcacatggctagggatactgctcactagctgtggaggtcctcaggagtggagagaatgagtaggagggcagaagcttccatttttgtccttcctaagaccctgttatttgtgttatttcctgcctttccgagtcctgcagtgggctgccctgtaccctgaacctcatgagcctctaagggaaaggaggaacaattaggacgtggcaatgagacctggcagggcagagtacaagcccagcacccagtgtcccagccttactgggtccttaccctgggccaaacagggagggctgatacctccttgctcttcctagatgcccacctcctacaatctcagcccacaagtcctctccaccctagggggcttgctgcatggcaataactcataatctgatttggaggtttgccctttacaggggcagattttctgctcagttcaacaatgaaatgaagaggaactccctctttctacagctcacttctatcagaggcccaggtgcctcagagccacattgagttgctttttctgggatgaggaagtagggttaaactccccagtttcctgagggaggctcctgacaggtgccctttgtcagaccctaccacagcctggataggcagccacattggtcctcgcccttgctcggcactccgtggtggtcctgcccttctccctgcatgcctgtgggtctgctctggtgtgtgaaggtcggtgggttaactgtgtgcctactgaacctggcaaataaacatcaccctgcaaagccaaaaaaaaaaaaaaaaaaaa

SEQ ID NO: 402039 - DNA, 1000 bp, Homo Sapiens; identical to SEQ ID NO: 117982

SEQ ID NO: 402040 - DNA, 1000 bp, Homo Sapiens; identical to SEQ ID NO: 223320

SEQ ID NO: 402041 - DNA, 1000 bp, Homo Sapiens; identical to SEQ ID NO: 223321

SEQ ID NO: 402042 - DNA, 1000 bp, Homo Sapiens; identical to SEQ ID NO: 117983

SEQ ID NO: 402043 - DNA, 1000 bp, Homo Sapiens; identical to SEQ ID NO: 290710

SEQ ID NO: 402044 - DNA, 1000 bp, Homo Sapiens; identical to SEQ ID NO: 223323

SEQ ID NO: 402045 - DNA, 1000 bp, Homo Sapiens; identical to SEQ ID NO: 117984

SEQ ID NO: 402046 - DNA, 1000 bp, Homo Sapiens; identical to SEQ ID NO: 290711

SEQ ID NO: 402047 - DNA, 1000 bp, Homo Sapiens; identical to SEQ ID NO: 223324

SEQ ID NO: 402048 - DNA, 1000 bp, Homo Sapiens; identical to SEQ ID NO: 290713

SEQ ID NO: 402049 - DNA, 1000 bp, Homo Sapiens; identical to SEQ ID NO: 117985

SEQ ID NO: 402050 - DNA, 1000 bp, Homo Sapiens; identical to SEQ ID NO: 117986

SEQ ID NO: 402051 - DNA, 1000 bp, Homo Sapiens; identical to SEQ ID NO: 117987

SEQ ID NO: 402052 - DNA, 1000 bp, Homo Sapiens
gtctttccccaccaaggccagcctgtatggagccatcctcttcaccctccagcagacccgctggctcccagtgtccaaagccagcctcatcttcatcttcaccttgttcatggtgtcctgtaaggtgtttctgacagccacccactcacacagctccccctttgatgccctggagggctacatctgccccgtgctgtttggttcggcctgcgggggtgaccatcaccacgacaaccatggtgggtcccacagcggtggtgggccaggagctcagcattcggccatgcccgccaagtccaaggaggagttgagcgagggctccaggaagaagaaggccaagaaggcggattagggggtggcccaaggggcaccggggagaggacccggacccaggaccctctgagctgggaggcttcctgcgctcagacctatcctttcctggccttgacttccccatctgcaaatcagggtcattggctcaccctccagggctgacgtgggggttgagatatggggatgaggatgaagaacttttgtagaaatcggggttccctctttctctctgccaggaccccatagagtcacagcttttggaggggttcacagaatcctggcagcagctccagtcaagaatgtcactggttggcatgatattcttagttctatttttccttctttaaaattgcatcttgaccaggcacagtggctcatgcctataatcctagcactttgggaggccgaggcgggcagatcacctgaggtcaggagttcaagaccagcttggccaacatggtgaaaccccatctctaccaaaaatacaaaaattagccagacgtggtggtgcacgcctttaatcccagctactcgggaggctgaggcaggagaatcacatgaatccaggaggtggaggttgcagtgagctgagatcttcccactgcactccagcctggccaataagacctgtctccagcaagaccctgtctcaaaaaaaaaaaaaaaa

SEQ ID NO: 402053 - DNA, 1000 bp, Homo Sapiens
ttggaagagccgtctgcagctacttcagaggagctgtttatccctctccacgcggggcagactctggcgggtctcctagcgtccgagagatggcttatttttctacagtatttaaaatggatgcagccctaactgcaaaagtcagagaggctgacaaggaccaatgcttctttatctggtgctcagttctcagtcagacgtgcagcatggctgcagggtggaccagctgcctggcattcaggcccagatgcctgcagggctggggctctcgggacagatgcagggatgtgtgctgcagggctgctgggaggagagtggtgggggcctgagggctgagtgattctgtaaccacctgagaccttcacgtttgctgccgttgggggctcaggctgcactccccgggtcacctgacctgctgcccaggggcttccagtcctgtctgtgtggactggcacctgggctgctggagaagtctcctcccgttcggaccagcctcagggctgcacgttacctcaggaatgggccccaccatgaaggggcccatctgtcagcagcgtcttctaggtccccagctcagggagccatccccagctccagttttctcatgcgaatatgcacagttttaattcacgttgttacactagcctgccgatgagacccagacacaggcagacctggcgctcttgacccctgattccagtgaggactggccctgaggagtccttgcagacctgctgcctgccccacgacaggcccaaagatggaccccccctggccttgtgacagctccccaagtgttctccggtggagaaactgcagaggactggtgggcggggctccccagccatcaccatcctgtgtacaatggctgtagacttgtatatggctcctttaatattgtaaagatgctgatgtacaattgtcgtgcatttgtgtgaacacattgcgttcccagtccatgccataaatgatgctctcaagcaaaaaaaaaaaaaaaaaa

SEQ ID NO: 402054 - DNA, 1000 bp, Homo Sapiens; identical to SEQ ID NO: 117988

SEQ ID NO: 402055 - DNA, 1000 bp, Homo Sapiens; identical to SEQ ID NO: 223326

SEQ ID NO: 402056 - DNA, 1000 bp, Homo Sapiens; identical to SEQ ID NO: 223327

SEQ ID NO: 402057 - DNA, 1000 bp, Homo Sapiens; identical to SEQ ID NO: 290720

SEQ ID NO: 402058 - DNA, 1000 bp, Homo Sapiens
tctgtccgagacccctcgcagagctcagatgccatgtatgtggtggtaccccttctgggggtggcactgctgattgtcatcgccttgttcatcatctggaggtgccagctgcagaaagcgacccgtcaccacccctcctatgctcagaaccggtacctagccagtcgcgccgggcacaccctcccccgggtcatggtgtaccggggtactgtgcatagccaaggggagccttctgggcaccgagaggcagcgagcagcccccaggtggtgctggggcccagtcgggggggcaggaccacagtccggctagagagcaccctctacctccctgagctctctctctccagactgtccagcaccccccctcccccctcctacgaggaggtgactgcgccccaagagagcagcagtgaggaggccagcgtgtcttacagtgacccacccccaaagtacgaggagatagtggccgccaaccctggcgctgacaagtagtgggacgtttgtgccctgtcctggatgaacgcctctttccgaggtctcctattttctttttaactttttaaagactgcgccaccacaaaacagccttagcctccttgttgccaaataattccctaactgtggagttttaggaagtcagttgtcagagacaggtggggagggtgggggtagggaccacgcatgagtcgaagcccccgggaagagccaaaggccaaagtgcccaactctttgggatgacccccaagcctccaacatcctgtctttccatcaggaactggcttctcttatgccaaaggaataaccccattgagttgattgtggccagaatgtccacaggcctggcctgggggctgtgggactggctggaggcctgcctgtgtctagagctctgggcctcaggggtaagggaaggaagccagcctttcagcaccccttaccctccacagttctgtgatttctgtccttgcttacatttggaggacagggacaaggactgagc

SEQ ID NO: 402059 - DNA, 1000 bp, Homo Sapiens; identical to SEQ ID NO: 117990

SEQ ID NO: 402060 - DNA, 1000 bp, Homo Sapiens; identical to SEQ ID NO: 223328

SEQ ID NO: 402061 - DNA, 1000 bp, Homo Sapiens; identical to SEQ ID NO: 223329

SEQ ID NO: 402062 - DNA, 1000 bp, Homo Sapiens; identical to SEQ ID NO: 290724

SEQ ID NO: 402063 - DNA, 1000 bp, Homo Sapiens; identical to SEQ ID NO: 290725

SEQ ID NO: 402064 - DNA, 1000 bp, Homo Sapiens; identical to SEQ ID NO: 223330

SEQ ID NO: 402065 - DNA, 1000 bp, Homo Sapiens; identical to SEQ ID NO: 290726

SEQ ID NO: 402066 - DNA, 1000 bp, Homo Sapiens
taaggcgctgtcatggaggacgccgccgcgccggggcggaccgagggggtccttgaaaggcaaggagcgccgccagctgcaggccagggaggagccctggtggagctcaccccgacccccggcggcctggccctggtgagcccctaccacacccaccgggccggggaccccttagacctcgtggcgctcgcagagcaggtgcagaaggctgatgaattcatccgagcaaatgccaccaacaagctgacagtcatagctgagcaaatccaacatttgcaagaacaagccaggaaggtactggaagatgctcacagagatgccaacctgcaccatgtagcttgtaatatagtgaaaaaacctggcaacatttactatctctataaacgggagagtggtcagcagtatttttccatcatttctccaaaggaatgggggacaagttgtccacatgacttccttggtgcctacaaactacagcatgacttgtcctggactccgtatgaggacattgagaagcaagatgctaaaatcagcatgatggacatgttgctaagccagtcagtggccctgcctccgtgcactgaacccaacttccagggactgactcactgagagtgggctttgacaaacagctctcacaggacctggctgtcaacctccttgttgcccccactgttgccttgagaattgaagacatgtaggtgactcacaaacttcttggaaagagaccctgtgtgaatgtaaatgctgtcattatgacttttaattgggatgggaataatcattgagacagagtcactgtctttcgggatcctctttggaccacagatacccaagtcagtcagtttcagagtattggccagtgtactttccttcttcctctccatcacttcttcccttaagttaaagtgttagagaagaccttcttcccataaaaaggttggtggatcgttttccaaaaaaaaaaaaaaaaaaaaaaaaaaaaaaaaaaaaaaaaaaa

SEQ ID NO: 402067 - DNA, 1000 bp, Homo Sapiens; identical to SEQ ID NO: 117993

SEQ ID NO: 402068 - DNA, 1000 bp, Homo Sapiens; identical to SEQ ID NO: 117994

SEQ ID NO: 402069 - DNA, 1000 bp, Homo Sapiens; identical to SEQ ID NO: 117995

SEQ ID NO: 402070 - DNA, 1000 bp, Homo Sapiens; identical to SEQ ID NO: 223332

SEQ ID NO: 402071 - DNA, 1000 bp, Homo Sapiens
ccaagctcgtggtgggtggaaaagtgttcgccgaggtgtgcatggtttcccagccacgtccctgttttcaaagatagtttcactttggtctctgaattgaaatgctgtctactgaaagggtttcaggagcgtttatgtaaggggctgtgatgaaattgcattccccatagataaaagaaaaatcatttctatccagagatctgagcagaaggattggcttgttagtttaacacagccgtatttttggacattcagtgttacttgctgagtctgacagcctctgggcccggccaggggccctgttaacaaactgctttcacatcccaacagggtctgcttggccactcagtgcagctgcgattaaccctaaaggctttaaggaacgggccacctgtaacagagacaccagccttcctgtatagacactaaattgttagcaagagtgttgagctagttcctggtgaagtgtttccacagaagacatgtggagcagttgtggggatattaagggaaactttcctctgccttgacccctttgttaaataaaatgactttgggagccattcattgtacagttgcaggaatgagagtgattttatgatgtggtacattgggaccatgttctaaaaccttgggtttctgagtctgctttttgagtaggtgattttgaggttgaaaaaccaggggccttcatctaggaaatacagcattttccagaagcttctttgaaagggaatcctggttttgttgccaaaatgaaacgcccggggttggcgctgaatcccacaactgtgtgatttgcttgttgagttttttgttgtctggtttttttgtttgtttgtttataccaataagaatgagcctgaatgttggtggtttttgaaatcctgacttggaggtaaacctggaggaaggaaaaaaagtaaatatgcaggcttttaggactgagtagccttgaaaataaacctcatttctaaaaaggaaaaaaaaaaaaaaaaaa

SEQ ID NO: 402072 - DNA, 1000 bp, Homo Sapiens; identical to SEQ ID NO: 223334

SEQ ID NO: 402073 - DNA, 1000 bp, Homo Sapiens
aattcttcacagcacctgccactgtctccctggtgggagtcaccgtcttcttcagcttcctagtatttgggatgtatggacgataaggacataggaagaaaatgaaaggcatggtctttctcctttatggcctccccacttttcctggccagagctgggcccaagggccggggagggaggggtggaaaggatgtgatggaaatctcctccataggacacaggaggcaagtatgcggcctccccttctcatccacaggagtacagatgtccctcccgtgcgagcacaactcaggtagaaatgaggatgtcatcttccttcacttttagggtcctctgaaggagttcaaagctgctggccaagctcagtggggagcctgggctctgagattccctcccacctgtggttctgactcttcccagtgtcctgcatgtctgcccccagcacccagggctgcctgcaagggcagctcagcatggccccagcacaactccgtagggagcctggagtatccttccatttctcagccaaatactcatcttttgagactgaaatcacactggcgggaatgaagattgtgccagccttctcttatgggcacctagccgccttcaccttcttcctctaccccttagcaggaatagggtgtcctcccttctttcaaagcactttgcttgcattttattttatttttttaagagtccttcatagagctcagtcaggaaggggatggggcaccaagccaagcccccagcattgggagcggccaggccacagctgctgctcccgtagtcctcaggctgtaagcaagagacagcactggcccttggccagcgtcctaccctgcccaactccaaggactgggtatggatcgctgggccctaggctcttgcttctggggctattggagggtcagtgtctgtgactgaataaagttccattttgtggtcctgcaaaaaaaaaaataaaaaaaaaaaaaaaaaaaaaaaaaaaaaaaaaaaa

SEQ ID NO: 402074 - DNA, 1000 bp, Homo Sapiens; identical to SEQ ID NO: 223335

SEQ ID NO: 402075 - DNA, 632 bp, Homo Sapiens; identical to SEQ ID NO: 117997

SEQ ID NO: 402076 - DNA, 1000 bp, Homo Sapiens; identical to SEQ ID NO: 117998

SEQ ID NO: 402077 - DNA, 1000 bp, Homo Sapiens; identical to SEQ ID NO: 290738

SEQ ID NO: 402078 - DNA, 1000 bp, Homo Sapiens; identical to SEQ ID NO: 117999

SEQ ID NO: 402079 - DNA, 1000 bp, Homo Sapiens
ggagctggagcagctgaatgcagagctgggcttggagccagagacaccgccaaaaccccctgatgctccacccctggggcccgacatccattctctggtacagtcagaccaagaagctcaggccgtggcagagccatgagccagccgttgaggaaggagctgcaggcacagtagggcttcttggctaggagtgttgctgtttcctcctttgcctaccactctggggtggggcagtgtgtggggaagctggctgtcggatggtagctattccaccctctgcctgcctgcctgcctgctgtcctgggcatggtgcagtacctgtgcctaggattggttttaaatttgtaaataattttccatttgggttagtggatgtgaacagggctagggaagtccttcccacagcctgcgcttgcctccctgcctcatctctattctcattccactatgccccaagccctggtggtctggccctttctttttcctcctatcctcagggacctgtgctgctctgccctcatgtcccacttggttgtttagttgaggcactttataatttttctcttgtcttgtgttcctttctgctttatttccctgctgtgtcctgtccttagcagctcaaccccatcctttgccagctcctcctatcccgtgggcactggccaagctttagggaggctcctggtctgggaagtaaagagtaaacctggggcagtgggtcaggccagtagttacactcttaggtcactgtagtctgtgtaaccttcactgcatccttgccccattcagcccggcctttcatgatgcaggagagcagggatcccgcagtacatggcgccagcactggagttggtgagcatgtgctctctcttgagattaggagcttccttactgctcctctgggtgatccaagtgtagtgggaccccctactagggttaggaagtggacactaacatctgtgcaggtgttgacttgaaaaataaagtgttgattggctag

SEQ ID NO: 402080 - DNA, 1000 bp, Homo Sapiens; identical to SEQ ID NO: 118000

SEQ ID NO: 402081 - DNA, 1000 bp, Homo Sapiens; identical to SEQ ID NO: 290744

SEQ ID NO: 402082 - DNA, 794 bp, Homo Sapiens; identical to SEQ ID NO: 25295

SEQ ID NO: 402083 - DNA, 1000 bp, Homo Sapiens; identical to SEQ ID NO: 118003

SEQ ID NO: 402084 - DNA, 1000 bp, Homo Sapiens; identical to SEQ ID NO: 223340

SEQ ID NO: 402085 - DNA, 1000 bp, Homo Sapiens; identical to SEQ ID NO: 223341

SEQ ID NO: 402086 - DNA, 1000 bp, Homo Sapiens; identical to SEQ ID NO: 290752

SEQ ID NO: 402087 - DNA, 1000 bp, Homo Sapiens; identical to SEQ ID NO: 290753

SEQ ID NO: 402088 - DNA, 1000 bp, Homo Sapiens; identical to SEQ ID NO: 223342

SEQ ID NO: 402089 - DNA, 1000 bp, Homo Sapiens; identical to SEQ ID NO: 118004

SEQ ID NO: 402090 - DNA, 921 bp, Homo Sapiens; identical to SEQ ID NO: 223343

SEQ ID NO: 402091 - DNA, 1000 bp, Homo Sapiens
cttccccgaccactcgggttcggctatgcgggagccgtgaggaggaggcttgcagtcgtggacctgagacctcgggaggtcatgctgtcttgcttttaagtggcttggggaaagtgaagaaaccccaaaatggaggactttgctaccaggacctacggcaccagtggcctggacaacagacctctgtttggggagacgtccgccaaggatcgaatcatcaatttagttgttggcagcttaacatccttattgattctagtaacgctgataagtgcttttgttttccctcaactacctccaaaaccgttgaatatattctttgctgtctgcatctctttgagtagtattactgcctgcatacttatctactggtatcgacaaggagacttagaaccgaaatttagaaagctaatttactatatcatattttctatcatcatgttgtgtatatgtgcaaacctgtacttccatgatgtgggaaggtgaggctgccaaggagaagtacttaccaggactcttcaaaatgatacattaggacagtgagtaatttttggataaggtatgctgaagaatctcctgcagaagtctgatacatgattttcatgttaattgtaaatgttaattccctcttgcaagggagacatatcctagatcactttgctttttctttaaggagctgatgttgcacctaaacattccaacccttaaagctaaaacagcacaaaaaaatttcacttttgaaatgaaatttttataattgtatggcaaaaggctatgtaaaaacaaatcttgcatcttaagacaaatattcttttatttctgttaaactgaatatacaattgttccctaggcaaccaacttttgcttataactacaatttaatttcacgttgacaaaacacagtgaaaagacaactttgtgaagatctaattacaataataaataaaataatttatacaaaaaaaaaaaaaaaaaaaaaaaaaaaaaaaaaaaaaaaaaa

SEQ ID NO: 402092 - DNA, 906 bp, Homo Sapiens
cagctacgacgccatgaatatcttgcccaagaagagctggcacgtccggaacaaggacaatgtcgcccgcgtgcggcgtgacgaggcccaggcccgggaggaggagaaggagcgtgagcggagggtgctgctggctcagcaagaggcccgtacagaattcctacggaagaaagccagacatcagaactcactgcctgagcttgaagcagcagaggcgggagccccaggttctggccctgtggacctgtttcgggagctgctggaggaagggaaaggagtgatcagaggcaataaagagtacgaggaagaaaagcgacaggagaaagagaggcaagagaaagctctgggcatcctgacatacctgggccagagtgcagcggaggcacagactcaacccccttggtaccagctacccccagggcgagggggccccccgcccggcccagccccagatgagaagatcaagagccgtctggaccctctgcgggagatgcagaagcatctggggaagaagagacagcacggcggtgatgaaggcagtcgcagcagaaaggaaaaggaggggtctgagaagcagcgacccaaggagcctccatccctggaccagcttcgagctgaacgtctgcggagggaagcagctgagaggtctcgggcagaggccctgctggcccgggtccaaggccgggcactacaggagggtcagccggaagaagacgagacggatgaccggcggcggcggtacaactcccaattcaacccccagctggcccggcgcccccgccagcaggaccctcaccttactcactgactcctgagggggtacaggagaggccgctgctgccagccgtcatataaaactatttattcataaatattttccaaaatgaaaaaaaaaaaaaaaaaaaa

SEQ ID NO: 402093 - DNA, 1000 bp, Homo Sapiens; identical to SEQ ID NO: 118005

SEQ ID NO: 402094 - DNA, 1000 bp, Homo Sapiens
tcacgaggaaggacggtcatcaaagtgaagggctgaggagggtgctagcacctcttggctccctgccatcagccagatctgagacaggaccttgccacgctggcctctttggccatagctgaagctgtggggccagttgatacctgctggcaggaaatggctgttttttaggtttgtatttatgtgccgccacttttgtaaggcctgggagatcccagggtcctccaccctccccctgaccacatacaaaggcactctagttcaagagtgaaaaatctcacccaggaggaacagccctccttgaagcaatggcagggccagcagggaggtgggcatggcagggaatggagagagtgagccagacagacttcacctccttactggacacagggtcaagggcgagtttcaattgctgctccctttactttctctacctgtgactactccctggaccaatcctgaggagggcacattttccagaagccacgtgataggggctggtttctgtggagccagaggcagagacactgaacttgagctcacctcctaacaccggcagtaaacttcctggaactttgccctcaggtgcggaggggacagaggaccctggcactctgttagggtgctgtagaagactagattgatggtagtttggcctgttagttcctgttttggccatgacttttgcagatggcaagtcacacaccctcaaagggaagctacacgggccaaatcgggggagtgggtggggaattttctcctctccctttcctactataatagtatttaagacatatcagctccagagatgagtcctggagccttgaattttgtttaacaaaataattgtaggtttctctctgtaataacaacgctggaaaggccgagaacctcttttatgctcatgtcttgcatttattgagatgactgtttctcatgcctttatgttccttcatgtaagtaaagtggacctttgtgctcaaaaaaaaaaaaaaaaaaa

SEQ ID NO: 402095 - DNA, 1000 bp, Homo Sapiens
tgggccccctggaccacccatgatgctgccaccaatggctcgggctccagggcccccgctgggctccatggctgcactgaggccccctctggaagagccagcagcaccccgagagctgggcctaggcctggggttgggcctgaaagagaaggaagaggcagtggtggcggcggcggctgggctggaggaggctagcgcggctgtggccgtgggggcaggaggtgccccagctggccctgcagtcattgggcccagcctgccgctggccctggccatgccattgcccgagcctgagcccctgcccctcccgttggaggtcgtccgcggcctcctgcccccgctgcgcattcctgaactcctgtccctgcgtcctcggccccggccccctcggccagagccacccccaggcctcatggctcttgaggtcccagagcccctgggtgaagacaagaagaaggggaagccagagaaattgaaacggtgcattcgcacagcggcagggagcagctgggaggaccccagcctgctggagtgggatgcagatgacttccggatcttctgtggggatctgggcaatgaggtgaacgatgacatcttggcacgcgccttcagccgcttcccatccttccttaaggccaaggtgatccgtgacaagcgcacaggcaagaccaagggctacggcttcgtcagcttcaaggaccccagcgactacgtgcgcgccatgcgtgagatgaatgggaagtatgtgggctcgcgccccatcaagcttcgcaagagcatgtggaaggaccggaatctggacgtggtccgcaagaagcagaaggaaaagaagaagctgggcctgagatagggtctgtggccaggcacccgctcccacctggccgggcgctggctcctccctcagttctctttggaaaacccccagctgtccacccatcccctgccccaaaaccagtttcaataaatttacgttcatttccaaaaaaaaaaaaaaaaaaaa

SEQ ID NO: 402096 - DNA, 1000 bp, Homo Sapiens; identical to SEQ ID NO: 118006

SEQ ID NO: 402097 - DNA, 1000 bp, Homo Sapiens
tgctcaagaggaagccgagttaggtggccagaacctcgaacgagacctcgaggggttccgtgtgtccccgcaagcctctgttgtgctggaacacagagaaatagcagacgaccctctccaggagcccggggctcagcagggcattccagacaccacctcagagctggcagggcagcgagaccacctgcctcattctgcagaccagggcacctgggcagactctttagctgtggaactcgacttcctgctggacagccagatacaggatgccctggacgcctctgacttcgaagccccacctgagcagctctttccttcggggaacaagccgggcccttgctggccgggccccagctcacatgccaatggagaccctgttgcagtggccaaggcccagccgagccggctgatcatgggcacccaccgggacctggaagctttcaagcgccttaactaccggaagacaaagctgggaggcaaagcccccctgccttacccttccaaggggcctgggaatatccctcgaggggacccaccctggagggagttgtaggccactttgaggtctgtgtttcctttgccacccagcccccatgtccgcagacctcctccaagatgctccagggggtcctagtggaccctacaaacctcccttcagttgcccggaagttggtcttccatggacaacacaaaggaggccgtgaggtcctggcctcacctggccagggtcaaggtcatttgccacccttggcttcagggagggaaactgtgtctcccacagccccagtgacttcaagcgggcctgggctccaggaagctggccacctctgagcagggcccatcctgtccggatttgcaaattttagggtcctgagccaagtatggatggttcagaatttgtttctttcctggaggagaagagagctccctttgttttctttctccccatttccattttatttcttctgggaagacccataataaatgattctgtagaggc

SEQ ID NO: 402098 - DNA, 1000 bp, Homo Sapiens; identical to SEQ ID NO: 223344

SEQ ID NO: 402099 - DNA, 1000 bp, Homo Sapiens; identical to SEQ ID NO: 290757

SEQ ID NO: 402100 - DNA, 1000 bp, Homo Sapiens; identical to SEQ ID NO: 290758

SEQ ID NO: 402101 - DNA, 1000 bp, Homo Sapiens
ttgggagctgatgaagaggagccacagctcagggtggacttggatacagccgactttggctacgctgtgggtgaggtagaggccctggtgcatgaggaggctgaagtaccaactgccctagagaagatccacaggctcagcagcatgcttggtgtgcctgcacaggagacagcaccagccaagctgattgtgtatctacagcgtttccggcctcaagactatcagcgcctgctagaagtgaacagctccagagagaggccacaggagactgaagatcctgaccactgcctgggctaggggtgtcacttcctagaaggggaagggaactctgggtctaacggagtccactcctgggcccactgtgcctctcccctcagtgtcccttctgacagtgactcctctctctccagcgctgcctgtttcttccccctcctctaagctactcttccttgagccctccctggctgcttcctctcgctcatccgtcagatgcaatctgtgggccgcccctctcccctggccgctaagcagcctccattgatttccgctcgtgtttataggatttccacttagccgtgatcagtagttaagcacaggaaaatcccttgccaccccccctcccttggtcgatgccattgattctgccagcggctcctaaaccgccttacagctgagttagaagatgaggagaggcagcagggatttccctgccttgggatgtgggaaacagaagaaaagttgaggaaatggttgggaatcgctgttagaactctagaaattctaatctgactttgccactgtgcccagctctggcccagagggtagagtgcctcctgtggaagtttaggggcaaatttgttccctgacctggagagggttagaaagaaccaacagctgccccctccccgcccccgtgttgagacaggttctcaaggctcaggggaagatgcatacctcctatgtaagaatgctcttcccttgctgttattcatacacactt

SEQ ID NO: 402102 - DNA, 1000 bp, Homo Sapiens; identical to SEQ ID NO: 118007

SEQ ID NO: 402103 - DNA, 1000 bp, Homo Sapiens; identical to SEQ ID NO: 223346

SEQ ID NO: 402104 - DNA, 1000 bp, Homo Sapiens; identical to SEQ ID NO: 290761

SEQ ID NO: 402105 - DNA, 1000 bp, Homo Sapiens; identical to SEQ ID NO: 223347

SEQ ID NO: 402106 - DNA, 1000 bp, Homo Sapiens; identical to SEQ ID NO: 118008

SEQ ID NO: 402107 - DNA, 1000 bp, Homo Sapiens; identical to SEQ ID NO: 118009

SEQ ID NO: 402108 - DNA, 1000 bp, Homo Sapiens; identical to SEQ ID NO: 290764

SEQ ID NO: 402109 - DNA, 1000 bp, Homo Sapiens
gtcctctgctttgagctcagaagccaaagaggaaagtaagaagccggtggtgactttccaagcccatgatgggcccgtctatagcatggtttccaccgatcgacatctgcttagtgctggggatggggaggtgaaggcctggctttgggcggagatgctcaagaagggctgtaaggagctgtggcgtcgtcagcctccatacaggaccagcctggaagtgcctgagatcaacgctttgctgctggtccccaaggagaattccctcatcctggctgggggagactgtcagttgcacactatggaccttgaaactgggactttcacgagggtcctccggggccacacagactacatccactgcctggcactgcgggaaaggagcccagaggtgctgtcaggtggcgaggatggagctgttcgactttgggacctgcgcacagccaaggaggtccagacgatcgaggtctataagcacgaggagtgctcgaggccccacaatgggcgctggattggatgtttggcaactgattccgactggatggtctgtggagggggcccagccctcaccctctggcacctccgatcctccacacccaccaccatcttccccatccgggcgccacagaagcacgtcaccttctaccaggacctgattctgtcagctggccagggccgctgcgtcaaccagtggcagctgagcggggagctgaaggcccaggtgcctggctcctccccagggctgctcagcctcagcctcaaccagcagcctgccgcgcctgagtgcaaggtcctgacagctgcaggcaacagctgccgggtggatgtcttcaccaacctgggttaccgagccttctccctgtccttctgatctctgacgacacccccagccagctcagggttttagagtgtttttcattttctttttttttttttttacaataaagtttcaggcttttttaaaaaaaaaaaaaaaaaaaaaaaaaaaaaaaaaaaaaaaaaa

SEQ ID NO: 402110 - DNA, 1000 bp, Homo Sapiens; identical to SEQ ID NO: 290765

SEQ ID NO: 402111 - DNA, 1000 bp, Homo Sapiens
tgcacagagggtgctcatgggactcgcatgcagctctcagcactgggtgggagggcgttggcttgtccagaatggggacgtggggcagccacccctgcccagcgagagcgcagacaccgtgtgaggggacagcagcccttggtgcaaagccagagactgatcctggctctgacggctgaagagggaagacccaaggctgggtggcgtggctcgtgaatccacttagaattcttggcttgtgtcgcatactgggtgtcacggcacacatttactctgcattgtccccgtctttcccatcgcctagcgtttggggaggaacagggagagagcttcggggcgtctgtctccgtgctctcctgcctccaccgccttggttttgcttcctgctggaggcagggcacctgctgcgacccagattcttctgcaggatgtgtctgtctttgtcacggtggacagagggtgacatcataggagcagctcgctggccagaaggggatgggggcatccctgtgcctcactcagctcctgctgctcttagggaaaggaggcctgggtcaagccagcatccccttggtaaagacccccgcaggccaccaggcattctggacacgcacacacacacacacacacacacacacacacaaaacttcacagcaggccagctgcagtgacttgtcatcaagagtcacctcagctgcgcccccctcccatcctttcctatgagaagccactgctttgggggcgccggctagaaaaagtagggtgcggtggccaggagggcccctgccgcgcggggggctgggtctggttgagtcgctgctttcccgagggcagcgcagggatccggggaagctgcggcagggagcgggcgccggcttcgtggctctgaggtgtaacgggggtgggctccctccctcggaggacatcgtctgtgtccaggtcagaaagtggcccaggaagggggcagtttctgtcgcgggtccggtgggggcgcggccgc

SEQ ID NO: 402112 - DNA, 1000 bp, Homo Sapiens; identical to SEQ ID NO: 290766

SEQ ID NO: 402113 - DNA, 787 bp, Homo Sapiens; identical to SEQ ID NO: 118010

SEQ ID NO: 402114 - DNA, 1000 bp, Homo Sapiens; identical to SEQ ID NO: 290768

SEQ ID NO: 402115 - DNA, 1000 bp, Homo Sapiens
attgccttatattggatcaggaacccttacagtagagggtccagtcttctagtgggtttaatgtttagtcagtgtactctgagtcctcattgttcagaaaagcacctcttgaagaactgacttcctgaactcccagtcatgttggtaccctggacagtgcctaactccttacagaagggagtgaaaacctctttcggaaatgattgagagcagcctcttgaatgcttaaatgatcaaggagggagaaaggcaaaccaatttgttctgtgcaacaaactcaaaatgtggaccagttccctcagccctcattaaactaattaaactgatgggtatcatgcttctactccatggtgaactgaagcagagtcaagctgatgaagttaagcacaaccatgttcttgagcagctgaattggctgccaagagtccaagccatctggcccaacatacgcactgggcattgggtaagggactccagaagcagcagctagaaagagaaaaagccctcttcaatccccataatgcttctttcctcttaatgtctcaaaataaaaccagaaagaggaataaaatgattaagtgcttgaggccaaatgagttcccttgattcaaataaccctgaatcagaggcagagacctcctgatgtcttggtttccatcaaagccctccctgtctgtctgtctctcttttgctctctcattcccaggcactctcttttggtttgtgggtccaggagatgaggctggataggagaggaaaaggcttgagtctggataatttgtataagatgctgctgagcacatctcttcatgcgcagtccccaggtatctgatgatgttctgaaatggatagattgttttagagttattttgtgtcctttaaaaaaatcccatttatgcaatttacttggaatttgcttagcctttaataggcttgtgtaatttcctgctcctccagtacaataaataaaagaaagatgctgatgaaaaaaaaaaaaaaa

SEQ ID NO: 402116 - DNA, 1000 bp, Homo Sapiens
agaggaaattcaaaggttggctgcagagtttttaaagtcaaattatctgtttgttgctgttggacaagtgggtggagcatgtagagatgttcagcagaccgttctccaagttggccagttctcaaaaagagaaaagctcgttgaaattctgcgaaacataggggatgaaagaactatggtctttgttgaaactaagaaaaaagcagattttattgcaacttttctttgtcaagaaaaaatatcaactacaagtattcatggtgatcgggaacagagagagcgggagcaagctcttggagattttcgctttggaaagtgcccagttcttgttgctacttcagtagctgccagagggctggatattgaaaatgtgcaacatgttatcaattttgatcttccttctaccattgatgaatatgttcatcgaattgggcgtactggtcgttgtgggaatactggcagagcaatttccttttttgatcttgaatcggataaccatttagcacagcctctagtaaaagtattgacagatgctcaacaggatgttcctgcatggttggaagaaattgcctttagtacatacattcctggcttcagtggtagtacaagaggaaacgtgtttgcatcagttgataccagaaagggcaagagcactttgaacacagctgggttttcttcttcacaagctcccaatccagtagatgatgagtcatgggattaaagccaaaacatccttcaagtctgtggttttgatgcagagaagaaaatagttttgatttttgagtttttaacagaagtataaaacttaacattctcatagctcctgtccttgtattctcactcctacacttaaaaaaaaaatccttactgactagttatgtgagatgctaaaacttacaacattgcagttactgatacaaatggtgttaactgggaatattaaagcattctaaatgtcaaaaaaaaaaaaaaaaaaaaaaaaaaaaaaaaaaaaaaaaaa

SEQ ID NO: 402117 - DNA, 1000 bp, Homo Sapiens; identical to SEQ ID NO: 118013

SEQ ID NO: 402118 - DNA, 1000 bp, Homo Sapiens; identical to SEQ ID NO: 389827

SEQ ID NO: 402119 - DNA, 1000 bp, Homo Sapiens; identical to SEQ ID NO: 290770

SEQ ID NO: 402120 - DNA, 1000 bp, Homo Sapiens; identical to SEQ ID NO: 290771

SEQ ID NO: 402121 - DNA, 1000 bp, Homo Sapiens; identical to SEQ ID NO: 223348

SEQ ID NO: 402122 - DNA, 1000 bp, Homo Sapiens; identical to SEQ ID NO: 290772

SEQ ID NO: 402123 - DNA, 1000 bp, Homo Sapiens; identical to SEQ ID NO: 223350

SEQ ID NO: 402124 - DNA, 1000 bp, Homo Sapiens; identical to SEQ ID NO: 290774

SEQ ID NO: 402125 - DNA, 1000 bp, Homo Sapiens
tggtgagaagccatatgagtgtgaagaatgtggtaaggccttcagtcatagctcagaccttatcaagcatcagagaacccacactggggagaagccctatgagtgtgatgactgtgggaagaccttcagccagagctgcagcctccttgaacatcacagaatccacactggggagaagccgtatcagtgcagtatgtgtggcaaagcctttaggcgaagttcacatctcctgagacatcagaggatccatactggggataaaaatgttcaggaacctgagcagggagaggcctggaaaagtaggatggaaagccagttggaaaatgttgaaactcccatgtcttataaatgtaatgagtgtgaaagaagtttcactcagaatacaggcctcattgaacatcaaaaaatccacactggtgagaaaccctatcagtgtaatgcgtgtggaaaaggcttcacccgaatttcataccttgttcaacatcagagaagccatgtagggaaaaacatcctatcacagtgacccatgccatacatgccagttggtgctcatttgtcactgatctgaagccactccccctggagtctcaactatagaaattgtgggctgggctttatttaccactacacattatcaggtgttagaaaatgtagactgggttagacaaattatcttctaagttctagaaggggtttgtaatcaaaacatatttgataggaggctacgggagagttgtctagaagaggtaagacctgaaactgtttgttctctcccactagaattaaatggatgtttagactggctacttgccctaaaccagcacttggtgatgtctactgggtggatggttgtgatttgggggctgcttctctgaccattctttttgactgtaatgaatcctccacagttggtcagattcataaagtcttatatccccctctgtgccttttctgcaggtgctaataaatgtttattgaatgtaaaaaaaaaaaaaaaaaa

SEQ ID NO: 402126 - DNA, 1000 bp, Homo Sapiens
ctaggcactgcaggccgtgtctgcagcaagacatcaaaaggaacagacggttgtgaaatcatgtgctgtggccgagggtacgacacaactcgagtcacccgtgttacccagtgtgagtgcaaattccactggtgctgtgctgtacggtgcaaggaatgcagaaatactgtggacgtccatacttgcaaagcccccaagaaggcagagtggctggaccagacctgaacacacagatacctcactcatccctccaattcaagcctctcaactcaaaagcacaagatccttgcatgcacaccttcctccaccctccaccctgggctgctaccgcttctatttaaggatgtagagagtaatccatagggaccatggtgtcctggctggttccttagccctgggaaggagttgtcaggggatataagaaactgtgcaagctccctgatttcccgctctggagatttgaagggagagtagaagagatagggggtctttagagtgaaatgagttgcactaaagtacgtagttgaggctccttttttctttcctttgcaccagcttcccgacacttcttggtgtgcaagaggaagggtacctgtagagagcttctttttgtttctacctggccaaagttagatgggacaaagatgaatggcatgtcccttctctgaagtccgtttgagcagaactacctggtaccccgaaagaaaaatcttaggctaccacattctattattgagagcctgagatgttagccatagtggacaaggttccattcacatgctcatatgtttataaactgtgttttgtagaagaaaaagaatcataacaatacaaacacacattcattctctctttttctctctaccattctcaacctgtattggacagcactgcctcttttgcttacttgctgcctgttcaaactgaggtggaatgcagtggttcccatgcttaacagatcattaaaacaccctagaacactcctaggatagattaatgt

SEQ ID NO: 402127 - DNA, 1000 bp, Homo Sapiens; identical to SEQ ID NO: 223351

SEQ ID NO: 402128 - DNA, 1000 bp, Homo Sapiens; identical to SEQ ID NO: 290776

SEQ ID NO: 402129 - DNA, 1000 bp, Homo Sapiens; identical to SEQ ID NO: 290777

SEQ ID NO: 402130 - DNA, 1000 bp, Homo Sapiens; identical to SEQ ID NO: 223352

SEQ ID NO: 402131 - DNA, 1000 bp, Homo Sapiens
cattgcggccaatgcagctggcgaggccacagctgctgtggagctgactgtgggtcccccaccacctcctcagctagccaacagcaccagctgtgaccccccgcgggacggggatcctgatgctctcaccccaccctccgctgcctctgcttctgccaaggtggccgacactgggccccctaccgaccgtggcgtccaggtgactgagcacggggccacagctgctcttgtccagtggccggatcagcggcctatcccgggcatccgcatgtaccagatccagtacaacagctcggctgatgacatcctcgtctacaggatgatcccggcggagagccgctcgttcctgctgacggacctggcgtcaggccggacctacgatctgtgcgtgctcgccgtgtatgaggacagcgccacggggctcacggccacgcggcctgtgggctgcgcccgcttctccaccgaacctgcgctgcggccatgcggggcgccgcacgctcccttcctgggcggcacgatgatcatcgcgctgggcggcgtcatcgtagcctcggtactggtcttcatcttcgtgctgctaatgcgctacaaggtgcacggcggccagccccccggcaaggccaagattcccgcgcctgttagcagcgtttgctcccagaccaacggcgccctgggccccacgcccacgcccgccccgcccgccccggagcccgcggcgctcagggcccacaccgtggtccagctggactgcgagccctgggggcccggccacgaacctgtgggaccctagccaggcgcccccccctctaagggtcctctggccccacggacagcaggacccggacaccctgtgggacctggcctcaaactcaccaaatcgctcatggtttttaaaactctgatggggagggtgtcggggacaccggggcaaaacaagaaagtcctatttttccaagcttgggcgaaaaaaaaaaaaaaaaaaaaaaaaaaaaaaaaaaaa

SEQ ID NO: 402132 - DNA, 1000 bp, Homo Sapiens; identical to SEQ ID NO: 223353

SEQ ID NO: 402133 - DNA, 1000 bp, Homo Sapiens; identical to SEQ ID NO: 118014

SEQ ID NO: 402134 - DNA, 1000 bp, Homo Sapiens; identical to SEQ ID NO: 223354

SEQ ID NO: 402135 - DNA, 1000 bp, Homo Sapiens; identical to SEQ ID NO: 223355

SEQ ID NO: 402136 - DNA, 1000 bp, Homo Sapiens; identical to SEQ ID NO: 118015

SEQ ID NO: 402137 - DNA, 1000 bp, Homo Sapiens
ggaaggaggccgagaggagaccgagcgtgaggggtccgggggcgaggaggcgcagggagaagtccccagcgctgggggagaagagcctgccgaggaggactccgaggactggtgcgtgccctgcagcgacgaggaggtggagctgcctgcggatgggcagccctggatgcccccgccctccgaaatccagcggctctatgaactgctggctgcccacggtactctggagctgcaagccgagatcctgccccgccggcctcccacgccggaggcccagagcgaagaggagagatccgatgaggagccggaggccaaagaagaggaagaggaaaaaccacacatgcccacggaatttgattttgatgatgagccagtgacaccaaaggactccctgattgaccggagacgcaccccaggaagctcagcccggagccagaaacgggaggcccgcctggacaaggtgctgtcggacatgaagagacacaagaagctggaggagcagatccttcgtaccgggagggacctcttcagcctggactcggaggaccccagccccgccagccccccactccgatcctccgggagtagtctcttccctcggcagcggaaatactgattcccactgctcctgcctctagggtgcagtgtccgtacctgctggagcctgggccctccttccccagcccagacattgagaaacttgggaagaagagagaaacctcaagctcccaaacagcacgttgcgggaaagaggaagagagagtgtgagtgtgtgtgtgtgttttttctattgaacacctgtagagtgtgtgtgtgtgttttctattgaacacctatagagagagtgtgtgtgttttctattgaacatctatatagagagagtgtgtgagtgtgtgttttctattgaacacctattcagagacctggactgaattttctgagtctgaaataaaagatgcagagctatcatctcttaaaaaaaaaaaaaaaaaaaaaaaaa

SEQ ID NO: 402138 - DNA, 1000 bp, Homo Sapiens; identical to SEQ ID NO: 290784

SEQ ID NO: 402139 - DNA, 735 bp, Homo Sapiens; identical to SEQ ID NO: 290785

SEQ ID NO: 402140 - DNA, 1000 bp, Homo Sapiens; identical to SEQ ID NO: 290786

SEQ ID NO: 402141 - DNA, 1000 bp, Homo Sapiens; identical to SEQ ID NO: 223356

SEQ ID NO: 402142 - DNA, 1000 bp, Homo Sapiens
ttcaagctctctcctccaggaaagtggggccccaactcagtcactccacccccttccaggtccctgaggctggttctactgtatccccatcacctccacaactccactcacccctgacggctccatccacctcaccagttggaaggcttgtggtttcagagaggagcaatgctggtcagcgctgcccagactccagtgtttacagatcaccagcatttacaaccaatccaatggccagaagcctcctctaacaagcccagaaggagttctgaaggggcagatgggggtgtgagtagtcggggagtcgggattgccagcaccctcacccttccttgggggcaagtagaggtgagaacactttccccacctccctccacagacactcctgaggacgctgcatcccacgcactgcctggtgcgtccatagagagaggatcaggtctcagcatttcatctgtgaaagaggcatggccctgggttagaaaggagggcaggagacatggaggaactggggggcacccagatggtgcagatggtttgcacacctgagcctgtctgtggtgaccattccgctcctctcccactaccctccaatctatcattccctactctctaaggccaaaatatcctgagcaaggctggcaaccccaccccaccatcccaaatgcaagcagccaggcccaggagttcctctggcccccacaggcatggagctcccagctggtgggtacagcttgagaggggggcagctccctcaggctaagctactgcccttcactgggccagccctgcctccagccctcacctctctcaccccaactctcccccaagcccctttctactcaacgggtgtagccactggtgctttgaagccttttgtttttataagatggtttttgcaaggggaccaggttctcttttcactgggaccttgcaaggaggggagtgctctcctggtttctgtgcaggcgggttgattaaagatggtgttttcttctct

SEQ ID NO: 402143 - DNA, 1000 bp, Homo Sapiens
ccctctcatcacagtctgagtctggtccattgctaccccaattctctggggacataaaaccaggctggaaagggaccaggaagtttgaaatagtgacatatcatccactagtcccaagggctaaggaatagtgagtttattctggaaggaactgggaagcttagtctaattagtgcctggggatgacctatgcaatcacaccgcttatgaccatcctagagagggccctgagcaccagcttgatcttagggatttccaaagtaacctgctttttgcctggatagggttaaaatagacctttcttgcctatccttgccttaacctatctgcctgaggttggcctgagattgtgagtcaacgactttgctatcttttcctcagtgttgaactttcattaagaaataaagtcctagcttcttacagagaggggtccaaatggtgaatgctcatcctgcctggattcaaggaattagctcagagattggcccctagcttttctgcctttgtagggacagcaaaaggggaaaatttgctgcagaaaattccaaaagattgctgtagctctcacagggaagtggtaaagatcagctaaacctgggttggggtgctttctgcccagtgggtcttggcataagtagattaatcctgctcttttaagaaaaggcaacttattcaggcagtctggaaagggggttctcagaaaactcagtttctttattccttcttttctcccaactactgttactggttatagaggtctttggactctaaagaccaatgtttggccactaactggactaatatgtatctttctgtgatttcatcatagaggtctgttttgtgagggtttggggtgcagaaaactttgattaaatcttaatgggaggctgggtgacctggattatctacagtgagcagacttaaatggaacagaagtttatgtgtccaaatgatggaatcattaaacctgagtgacttgaaaaaaaaaaaaaaaaaaaaa

SEQ ID NO: 402144 - DNA, 1000 bp, Homo Sapiens
gcaacttaatcttatccttagtttattacttttataatttaatgccactctctcgaggatccagtgtaattgcttactcggtcatcgtgggagcactgatggcaagtggaaaagaagtagcaggaaaaattcccaaagggaagttagtcgactttgaagctatgacagcccctggttcagaggcctttagcaaagtcgccaaaagctggatgaacttgaaaagtatttcaccttcttataagactcttccatcagtttcagaaacgtttccaacgttaagatcgatgattgaggtgctaaacacagactcttctccacgttgtcttaagaaactctagttctgctgctgtatttatacaagtaaagggccggacctcttgcttcttaagttattttttaaaacatggaattataaagaaattaggtcctctattacttttgataccaatttttataggaattgaatacttgaaatcattttctttacttttctgaaccataatgaaaatcatgaaagaggctttcggggggaaaaagctacttgacttggagggaaagcgtatgtattagccggcagcctgttggttcccacttataaagtcatataactccttccttacagtaaaaaaaattttcctcaacaactaaaatataatactgaagatgaacaaaaacaaaaccaaataggagtgtttgtattcctttagagatctggatatttttcaaagacttgctttttacgcacattgtgatagagcatcttttgttgactcacgtaacctccatgtgtgggtcctttgttttattagaaccatggaagaaggttcctgggccatcagtatgtgttgcagagctcacagccaggaacacttattttgaacaatgcagacagtacttgccagagtcccaaatgctgaattattgaaccatgttttttttttcctttgttgaaaaaaataaaccagggtgatttctataaatcaccagtttttggcattgg

SEQ ID NO: 402145 - DNA, 1000 bp, Homo Sapiens; identical to SEQ ID NO: 118016

SEQ ID NO: 402146 - DNA, 1000 bp, Homo Sapiens; identical to SEQ ID NO: 290787

SEQ ID NO: 402147 - DNA, 1000 bp, Homo Sapiens; identical to SEQ ID NO: 223357

SEQ ID NO: 402148 - DNA, 1000 bp, Homo Sapiens
tgctgccttccagggtcttctgctgctgttgccgccaccaccatctgtacccacaggggagttaggatcaggcctccaggtgggagccccaggagcagaggaagaggtggaagagtcctcaccactgcaagagccaccaagccaggcagcaggcaccacccctggtccagaccctaaggcctatcagcttctatcagcccgcagtgcctgcctgctgggcctgttggccgccaccaacgcgctgaccaatggcgtgctgcctgccgtgcagagcttttcctgcttaccctacgggcgtctggcctaccacctggctgtggtgctgggcagtgctgccaatcccctggcctgcttcctggccatgggtgtgctgtgcaggtccttggcagggctgggcggcctctctctgctgggcgtgttctgtgggggctacctgatggcgctggcagtcctgagcccctgcccgcccctggtgggcacctcggcgggggtggtcctcgtggtgctgtcgtgggtgctgtgtcttggcgtgttctcctacgtgaaggtggcagccagctccctgctgcatggcgggggccggccggcattgctggcagccggcgtggccatccaggtgggctctctgctcggcgctgttgctatgttccccccgaccagcatctatcacgtgttccacagcagaaaggactgtgcagacccctgtgactcctgagcctgggcaggtggggaccccgctccccaacacctgtctttccctcaatgctgccaccatgcctgagtgcctgcagcccaggaggcccgcacaccggtacactcgtggacacctacacactccataggagatcctggctttccagggtgggcaagggcaaggagcaggcttggagccagggaccagtgggggctgtagggtaagcccctgagcctgggacctacatgtggtttgcgtaataaaacatttgtatttaatgagttggcattaaggaagccaatacct

SEQ ID NO: 402149 - DNA, 1000 bp, Homo Sapiens; identical to SEQ ID NO: 290790

SEQ ID NO: 402150 - DNA, 1000 bp, Homo Sapiens; identical to SEQ ID NO: 223358

SEQ ID NO: 402151 - DNA, 1000 bp, Homo Sapiens; identical to SEQ ID NO: 290792

SEQ ID NO: 402152 - DNA, 1000 bp, Homo Sapiens; identical to SEQ ID NO: 290794

SEQ ID NO: 402153 - DNA, 1000 bp, Homo Sapiens; identical to SEQ ID NO: 290795

SEQ ID NO: 402154 - DNA, 1000 bp, Homo Sapiens; identical to SEQ ID NO: 118019

SEQ ID NO: 402155 - DNA, 1000 bp, Homo Sapiens; identical to SEQ ID NO: 290798

SEQ ID NO: 402156 - DNA, 1000 bp, Homo Sapiens; identical to SEQ ID NO: 290800

SEQ ID NO: 402157 - DNA, 1000 bp, Homo Sapiens; identical to SEQ ID NO: 290801

SEQ ID NO: 402158 - DNA, 1000 bp, Homo Sapiens; identical to SEQ ID NO: 223362

SEQ ID NO: 402159 - DNA, 1000 bp, Homo Sapiens; identical to SEQ ID NO: 223363

SEQ ID NO: 402160 - DNA, 1000 bp, Homo Sapiens; identical to SEQ ID NO: 223364

SEQ ID NO: 402161 - DNA, 1000 bp, Homo Sapiens; identical to SEQ ID NO: 290805

SEQ ID NO: 402162 - DNA, 1000 bp, Homo Sapiens; identical to SEQ ID NO: 118020

SEQ ID NO: 402163 - DNA, 1000 bp, Homo Sapiens; identical to SEQ ID NO: 290807

SEQ ID NO: 402164 - DNA, 1000 bp, Homo Sapiens; identical to SEQ ID NO: 290808

SEQ ID NO: 402165 - DNA, 1000 bp, Homo Sapiens; identical to SEQ ID NO: 290809

SEQ ID NO: 402166 - DNA, 1000 bp, Homo Sapiens; identical to SEQ ID NO: 290810

SEQ ID NO: 402167 - DNA, 1000 bp, Homo Sapiens; identical to SEQ ID NO: 118021

SEQ ID NO: 402168 - DNA, 1000 bp, Homo Sapiens; identical to SEQ ID NO: 118022

SEQ ID NO: 402169 - DNA, 1000 bp, Homo Sapiens
aatcagttcaatcaggaggtcttctccattttgccacacctgtggatcctctatttctgcttctccactacctcataaaggctgataaggaggggaagtttcagccccttgatcaagttgtggtggataacgtgtttccaaattgcatcttgttgctgaaacttcctggacttgagaagttacttcatcatgtgacagaggaaaaaggtaatccagaaatagacaacaagaaatattacaagtacagcaaagagaagacattaaagtggctggaaaaaaaggttaatcaaactgtggcagcattaaaaaccaataatgtgaatgtcagttcccgggtacagtcaactgcatttttctctggtgaccaagcttccactgacaaggaagaggattatattcgttatgcccatggtctgatatctgactacatccctaaagaattaagtgatgacttatctaaatacttaaagcttccagaaccttcagcctcattgccaaatcctccatcaaagaaaataaagttatcagatgagcctgtagaagcaaaagaagattacactaagtttaatactaaagatttgaagactgaaaagaaaaatagcaaaatgactgcagctcagaaggctttggctaaagttgacaagagtggaatgaaaagtattgataccttttttggggtaaaaaataaaaaaaaaattggaaaggtttgaaactttgaaaataaaatctagcaaaaatatttgctttttacatgtttcagtttgtccttcctgactgttaatgactacctttggttgggggaaggaagaggccaatttcatgttctcttaaacatttctttgcatttggtttttgtgttcctgaacaaaatatgggaaagtgtctaacttcatggctatggccttttggagtctcatctgacataatgaaaagtaatcacttgaagagaattaacatatagcatcatgattttctcaataaactgatgtgtgacaatgtt

SEQ ID NO: 402170 - DNA, 1000 bp, Homo Sapiens; identical to SEQ ID NO: 290813

SEQ ID NO: 402171 - DNA, 1000 bp, Homo Sapiens; identical to SEQ ID NO: 290814

SEQ ID NO: 402172 - DNA, 1000 bp, Homo Sapiens; identical to SEQ ID NO: 223366

SEQ ID NO: 402173 - DNA, 1000 bp, Homo Sapiens; identical to SEQ ID NO: 290816

SEQ ID NO: 402174 - DNA, 1000 bp, Homo Sapiens; identical to SEQ ID NO: 290817

SEQ ID NO: 402175 - DNA, 519 bp, Homo Sapiens
acagcaatagtgcagaatccagaatggatgtcctctttgtagccatctttgctgtgccacttatcctgggacaagaatatgaggatgaagaaagactgggagaggatgaatattatcaggtggtctattattatacagtcacccccagttatgatgactttagtgcagatttcaccattgattactccatatttgagtcagaggacaggctgaacaggttggataaggacataacagaagcaatagagactaccattagtcttgaaacagcacgtgcagaccatccgaagcctgtaactgtgaaaccagtaacaacggaacctagtccagatctgaacgatgccgtgtccagtttgcgaagtcctattcccctcctcctgtcgcgtgcctttgttcaggtggggatgtatttcatgtagaaggtggaagaaggctgctatgactctttggatgggagtctggcaagaggaaattggaagataaaataaataataagtgaaataaagaaaaaaaaaaaaa

SEQ ID NO: 402176 - DNA, 1000 bp, Homo Sapiens; identical to SEQ ID NO: 118024

SEQ ID NO: 402177 - DNA, 1000 bp, Homo Sapiens; identical to SEQ ID NO: 290819

SEQ ID NO: 402178 - DNA, 1000 bp, Homo Sapiens; identical to SEQ ID NO: 290820

SEQ ID NO: 402179 - DNA, 1000 bp, Homo Sapiens; identical to SEQ ID NO: 290821

SEQ ID NO: 402180 - DNA, 1000 bp, Homo Sapiens
gatttatttcatctagctaaattgtatttctttatagagaaagtacctttaaggatagcattccaaatagactttgaatagcgttctgccagtttatcctcattccttttgaccaacttagcagacaaaagcagtttttacaagctctttgtgagtttgtgccagtgaccaggtagctccttctagttttctcatgagtgaaaaagcattctgataacagcaagtccagtaagtgctaggcagagtgacctttcatctgatgctaagcccctacaagtttgagaaggtaagaaaagatgaaggagacatatattaggtcagctcttacttttgaaaatgttttatttgaagaaacacctgtagcattgaggtgactgaatgcctccacttatttcaggaaaacgtatccaaaaaaagttgaaatatttggacaactttttttttaagtgccatcgatttccctagcagcattctaaaagatagcaagtaaaatgatgtttgttatcctaaatgctttagttttaggtcatttattaattttcttacaggtgcactttctagtacatgaagtatcctttgtaattaatgtgtgccatatgtttattcccatttagtataactataaattatattttaaattatatatttttaggatagttatattttttttgggttctacgacattgaagttggactagtgatttatttgaatgctgaatcctagtataggggaatataatcttatattttaacaggggtcctctatgggaaaataggatgaactttgtttcccagaaattgttaagtgatgaaaaacttcaaaataattttcctgcattttctgctttatttacatgtaaagtgaattccctgaaaattggatttaaaaagcattctccttcaatgtgcctttaccttgtaactttaacaacttttctgttaaatatgtagttttttattaaacaatgttattaaataaaaacatttatccactgatttt

SEQ ID NO: 402181 - DNA, 1000 bp, Homo Sapiens; identical to SEQ ID NO: 290822

SEQ ID NO: 402182 - DNA, 1000 bp, Homo Sapiens; identical to SEQ ID NO: 290823

SEQ ID NO: 402183 - DNA, 1000 bp, Homo Sapiens; identical to SEQ ID NO: 118025

SEQ ID NO: 402184 - DNA, 1000 bp, Homo Sapiens; identical to SEQ ID NO: 118026

SEQ ID NO: 402185 - DNA, 1000 bp, Homo Sapiens; identical to SEQ ID NO: 223367

SEQ ID NO: 402186 - DNA, 1000 bp, Homo Sapiens; identical to SEQ ID NO: 223368

SEQ ID NO: 402187 - DNA, 1000 bp, Homo Sapiens; identical to SEQ ID NO: 118027

SEQ ID NO: 402188 - DNA, 1000 bp, Homo Sapiens; identical to SEQ ID NO: 290827

SEQ ID NO: 402189 - DNA, 1000 bp, Homo Sapiens; identical to SEQ ID NO: 290828

SEQ ID NO: 402190 - DNA, 1000 bp, Homo Sapiens; identical to SEQ ID NO: 290829

SEQ ID NO: 402191 - DNA, 1000 bp, Homo Sapiens; identical to SEQ ID NO: 290830

SEQ ID NO: 402192 - DNA, 1000 bp, Homo Sapiens
gcttccaggagtcccgaggcaccgtcaaactgcagttcgacatgatgcgcgcctgcaacctggtggccacggccgcgctcaccgcaggccagctcaccttcctcctggggctggtgggcctgcccctgctgtcacccgacgccccgtgctgggaggaggccatggccgctgcattccaactggcgagttttgtcctggtcatcgggctcgtgactttctacagaattggccatacaccaacctgtcctggtcctgctacctgaacattggcgcctgccttctggccacgctggcggcagccatgctcatctggaacattctccacaagagggaggactgcatggccccccgggtgattgtcatcagccgctccctgacagcgcgctttcgccgtgggctggacaatgactacgtggagtcaccatgctgagtcgcccttctcagcgttccatcgatgcacacctgctatcgtggaacagcctagaaaccaagggactccaccaccaagtcacttcccctgctcgtgcagaggcacgggatgagtctgggtgacctctgcgccatgcgtgcgagacacgtgtgcgtttactgttatgtcggtcatatgtctgtacgtgtcgtgggccaacctcgttctgcctccagctttcctggttagcgcaacgcggctccacgaccacacgcacttcagggtggaagctggaagctgagacacaggttaggtggcgcgaggctgccctgcgctccgctttgctttgggattaatttattctgcatctgctgagaggggcaccccagccatatcttacactttggtaaagcagaaaaccaggaaaattttcttaaaatatccacaatattccttgagtgagtcagaatctatagccggttagtgatggtttcaggcagaatcgtgttcgtgtctgttttgctcgattcctttcctaagttaaataaatgcaagcctctgaacttctgtctataaaaaaaaaaaaaaaaa

SEQ ID NO: 402193 - DNA, 1000 bp, Homo Sapiens; identical to SEQ ID NO: 223370

SEQ ID NO: 402194 - DNA, 1000 bp, Homo Sapiens; identical to SEQ ID NO: 290833

SEQ ID NO: 402195 - DNA, 1000 bp, Homo Sapiens; identical to SEQ ID NO: 290834

SEQ ID NO: 402196 - DNA, 1000 bp, Homo Sapiens; identical to SEQ ID NO: 290835

SEQ ID NO: 402197 - DNA, 1000 bp, Homo Sapiens; identical to SEQ ID NO: 118029

SEQ ID NO: 402198 - DNA, 1000 bp, Homo Sapiens
tagcccgggtagaagaggcaatcacccgtatgcttgtgtgtgccctgaaaactgcagagaatccacaaaataccagagcctggttaaaccccactgaggttgaggaaacgtcccatgcagtcaactgttgctacttaaatgcagctgtttctgcattttttgatcgctgcagaacatctgaggtagtagaaatccaagcactgagaacagatggagagcacatgaaaaaggaagaattaaatgtgtgcaaccacatggaggtgggccaaacaggtagccagaacttgaccacaggaacagacaaaccggaggcagcaagtccctttggccctgatctggtccctgtagcacagaggtccgaagaaccgccttcagaaagaggaggcatatttggaagtgatgggaaagactttgtggacaaggatggagaacactttggaaaattgcattgtgccaagagacaacaaataatgagcaacagtgaaaatgcaattgaggaacagattgcctcaaatactactacgactcctcaaacattcatttctacggatgacttgctggactgcttggtgaatccacaagtaaccaggatagtggcacaacttttgatacaaggaagaagtttatgattcaagtggaagatgacttttaaaataatattttttaaatatatatttttaagtagtatgactaaaataaagatgaaccagcaaaaggtcagtttgcacatttgtaaatgtatttatccttaccgaattacatgtcagtctgttgccaccttctttcatgcacattcctctttggccaaactggctgctctttgtttgtaagcttttgttcctctctcatcccatacttttagcctgtgtcaaatgtaagtcccaagtatttccagcaggaagtaatgtcttcctcagcctcaaccagggaccaaccggctgcttacttttgcaaataaaattttactagaacacgaacaaaaaaaaaaaaaaaaaaaaaa

SEQ ID NO: 402199 - DNA, 1000 bp, Homo Sapiens; identical to SEQ ID NO: 118030

SEQ ID NO: 402200 - DNA, 1000 bp, Homo Sapiens; identical to SEQ ID NO: 290837

SEQ ID NO: 402201 - DNA, 1000 bp, Homo Sapiens; identical to SEQ ID NO: 290838

SEQ ID NO: 402202 - DNA, 1000 bp, Homo Sapiens
gcagcgatttcatctccgtttcccctcatcacctgttcttttaactgtttaaaaacagcattacatgttgttgcaagtggcctcaaattctttttggtagaagggaaattgtaatccatgagaagaaaaaaattttcctaactattctcaggtgtgtttaagggctgcattccatgatgctatcagtgccttctttcagctcacaggatatcggccatgttaatgagtctgatgttgctagtatcacaggcaccggaaaatatgcacattatgctggagcattagaatgcaacagaaagagccctgggcttggagtatgcagaactggttcttgttacaactcctcttactagtgggctctggaagaaaacacattgaattcatgatcatggttaacctttggagagagagaggagaccaggatgaaggagccagtcgaagatcctgttcaagtgtacactgagccagcaggttcaccagaaagctattgagcgtttgctggaacacattatgcagggtgaatttcttctggaatgttgccaaggattttttatgcttctgtggcaggcatttcttgaacattgtcatttagccaagcaaagaagattttcttaaaggatagaaagtgtttaaaaatttttgtttgtttgaagataggttaaatggctatatgatctcaggataagacagagaaaatcacttatttctctaagtgatctgattaggttagtgatgttttgcctttaaacagattcatcattattcctaaagtattgctgtattaatactgtcttctagaaagtatccaccagtgcctacttttcttcgatatcattagctgtttttcgaaactgaatttgctcttcagagatttctcatatgtttgcgtataaggaactactggtaatagccaagaaaatttggaggtgcagagaacatgctgaaacagaatttttcactttcaattctagaactatgccataaaaaaaaaggaaaatgt

SEQ ID NO: 402203 - DNA, 1000 bp, Homo Sapiens; identical to SEQ ID NO: 118031

SEQ ID NO: 402204 - DNA, 1000 bp, Homo Sapiens; identical to SEQ ID NO: 290840

SEQ ID NO: 402205 - DNA, 1000 bp, Homo Sapiens; identical to SEQ ID NO: 290841

SEQ ID NO: 402206 - DNA, 1000 bp, Homo Sapiens; identical to SEQ ID NO: 118032

SEQ ID NO: 402207 - DNA, 1000 bp, Homo Sapiens
tggccaggctggtcttgaactcctgacctcatgatccgcccacctcagcctcccaaagtgttgggattacaggcatgagacactgcctggcctgaatcaaccttttttaagtgtaatcagaaagagaggctttggcaggggctcttactgtgttttctgtaacaacaaaggtgtacaatgagagagtccacacagtgctgtactgcacacaccacagaatgtgtgagattttcctgtttgaatgtatgtctgcattatactcctgcaataatgctgaggactcgttgcaggagggcaaactaggtgaataaattacctgtgaatgaacaatgaagtcgttcctcttaagactgaaacaagcaggccagatgtggtggctcacgcctgtaatcctagcactttgggaggccgaggcggccagatcacaaggttaggagttcaagaccagcctggccagcatggtgaaaccccatctctaccaaaaatacaggaaattatctgggcatagtagtgtgtgcctgtaatcccagctacttgggaagctgaggcaggagaattgcttgaacctgggaggtggaggttgcagtgagctaagatcgcaccactgcactccagcctgggtgacagagcgagactccatttcaaaaaaaaagactgaaacaagcttgtgctaagatggaaagggctgcttctaacagatgtggtttgttgctttagttgttgaagcaaaaatactgagttgttatgtttatgttatcaccccaccactacctccatggttgttcatttaggatgcttctaattcagccactgtgaaccattataaaggttttattgccatgttgaaaatgtttataatatggcaaaaaggggcatcaaatagaagatttactattattccagccatgtaaaaatatgtgcacatatggatgtatgttgaaagtggatgatggagaaataaaatgtggttttctttggggactggaaaaaaaaaaaaaaa

SEQ ID NO: 402208 - DNA, 1000 bp, Homo Sapiens; identical to SEQ ID NO: 223374

SEQ ID NO: 402209 - DNA, 1000 bp, Homo Sapiens; identical to SEQ ID NO: 223375

SEQ ID NO: 402210 - DNA, 1000 bp, Homo Sapiens; identical to SEQ ID NO: 118033

SEQ ID NO: 402211 - DNA, 1000 bp, Homo Sapiens; identical to SEQ ID NO: 223376

SEQ ID NO: 402212 - DNA, 1000 bp, Homo Sapiens; identical to SEQ ID NO: 118034

SEQ ID NO: 402213 - DNA, 1000 bp, Homo Sapiens; identical to SEQ ID NO: 223378

SEQ ID NO: 402214 - DNA, 1000 bp, Homo Sapiens; identical to SEQ ID NO: 118035

SEQ ID NO: 402215 - DNA, 1000 bp, Homo Sapiens; identical to SEQ ID NO: 223379

SEQ ID NO: 402216 - DNA, 1000 bp, Homo Sapiens; identical to SEQ ID NO: 118036

SEQ ID NO: 402217 - DNA, 1000 bp, Homo Sapiens; identical to SEQ ID NO: 290856

SEQ ID NO: 402218 - DNA, 1000 bp, Homo Sapiens; identical to SEQ ID NO: 290857

SEQ ID NO: 402219 - DNA, 1000 bp, Homo Sapiens; identical to SEQ ID NO: 118037

SEQ ID NO: 402220 - DNA, 1000 bp, Homo Sapiens; identical to SEQ ID NO: 223380

SEQ ID NO: 402221 - DNA, 1000 bp, Homo Sapiens; identical to SEQ ID NO: 223381

SEQ ID NO: 402222 - DNA, 1000 bp, Homo Sapiens; identical to SEQ ID NO: 223382

SEQ ID NO: 402223 - DNA, 1000 bp, Homo Sapiens; identical to SEQ ID NO: 290860

SEQ ID NO: 402224 - DNA, 1000 bp, Homo Sapiens; identical to SEQ ID NO: 290861

SEQ ID NO: 402225 - DNA, 1000 bp, Homo Sapiens; identical to SEQ ID NO: 290862

SEQ ID NO: 402226 - DNA, 1000 bp, Homo Sapiens
gcgaagaaccgctttcatggagaaggtgcgggtcttggttgcccgcctgggacactttgctcctgttgatgctgtggccgaccagcgagccaaagacttcattcacgattctctgccccctgttttgactgatagggagagggcactaagtgtttacgggcttccaattcgctgggaggctggagaacctgtaaacgtgggggcccagttgacaacagaaacagaagtccatatgcttcaggatgggatagctcggctggtgggtgaggggggccatttgtttctctattacacagtggaaaactcccgtgtgtatcatctggaagaacccaagtgcttggaaatatacccccagcaagctgatgccatggaactgttgcttggttcttatccagagtttgtgagagtgggggacctgccctgtgacagtgtggaggaccagctgtccttggcaaccacgttgtatgataaggggctgctgctcactaagatgcctctagccctaaattagtttcttgttgattgctggaaacaaggcagtagtgattctccgctgccactgctaccttttttttttttttttttccttaaactcacgttcttaccttgataagcatcagtgtgctcacatttacctttatcactgcttcagtgtcacaaacctcggaaggtcttctaggaagaaccatctcatctaggtacaaaaggaaaaggagaagttggaggtggaaaaaaaacccttgatccgtgatcatttcagagcaccaacttcatcaccttcaggcttcagtgtactgggtaacactgaccatgtcgttctgcttgagacagatattagattttttttggaatttggatctttcatctgagttctttttcatgggcgggtcggggtcagtatcctgtttgttattgttaaatttgtatgaaccttagaaaagttattaaagtgccaaagaatgaaaaaaaaaaaaaaaaaaaaaaaaaaaaaaaaaaaaaa

SEQ ID NO: 402227 - DNA, 1000 bp, Homo Sapiens; identical to SEQ ID NO: 118038

SEQ ID NO: 402228 - DNA, 1000 bp, Homo Sapiens; identical to SEQ ID NO: 118039

SEQ ID NO: 402229 - DNA, 1000 bp, Homo Sapiens; identical to SEQ ID NO: 290868

SEQ ID NO: 402230 - DNA, 1000 bp, Homo Sapiens; identical to SEQ ID NO: 118041

SEQ ID NO: 402231 - DNA, 1000 bp, Homo Sapiens
ggctttggcatctgtagaggcattgacatggagaagcggctgtaccacatcctcacccctgtgcccccggaagagctaaggaccgtgaattgtctgctcgttggagctattgccattccacattgtgtccttaagtgccagcgtgggatcgaagggacagtaccttatgtcacaacggattacaattttaaacttcctggagcatcagagaaaattggagcaagagaacctgaggaggcacataaagagaaaccataccgaagacctaagttctgtcgaaaaatgaagtgatgctcgcgtttttaataagggaagaaactttcctaccagaaagctttgtctcaagcctgaccacaagagacatgatggagtttcatggccatgaatggtgcccttattagcaacagtgttttttgtgtaattcgtgaatgtcatatagtagtcttaagtttctcttttaaagctgcatgagctagaatttgttctagtcttctgtgtgatactcatacttgctgtccagagggagtaaaacagcagagaacagtttgtgtgccattaaaacagagattcctcagaaagttcttcagggacctggttattagaatcaggataaaaataaggaaactggggccattacaatgtaccgagaaggaaggaagaaggccgacctgcaggatctcaagcataatggatacaagggctcgccacgggccttgcctgagccatgtgcagagctggggtccagcggtctgcttccttggagccagtgtggatggttacagcccatccatttggtgcagttgtacttggtctgttatattcaatcaaggtttaatagatagggctgggcatggtggctcatgcacacctgtaatcctagcactttgggaggctgaggcgggaggattgcttgagcctcggagttccaggctggagtacaccaactactccagcctgagcgacagagtaagaccttatcttttaaaaaagaaaagaaaaa

SEQ ID NO: 402232 - DNA, 1000 bp, Homo Sapiens; identical to SEQ ID NO: 290869

SEQ ID NO: 402233 - DNA, 1000 bp, Homo Sapiens; identical to SEQ ID NO: 290871

SEQ ID NO: 402234 - DNA, 1000 bp, Homo Sapiens
ttccagagtgtgcccatatttacctgatcagagagaaaagaaaatctgcagaggaagctgagcctggctgcttgtcatagctgacacagagccatctgccacaaacctgtggcggcttcagatctccaatccctgccaccaccccaactcaaattaaatacagattcctagagacgttatgatggttacacatgtcctcggcatcacatgtaggagactgttcaaaaaaaatatgtggcctgttgtataaccgcactcatgtatcccatatgtggtgccacattgaatttccggttgaatccgtttttatcctttgtactggatgacatggtgcctgaattctttcttttcgccgacacgatggcagccaaactgcagcttcaaacgctcacacttggctgggtttctacctaggttgccaggttatcatcggagccttcttgtgtcctcaaagggccacgaggcctgaaaggaggatcagaatgctttgggattaattgggcagccatcgcagaattgtttgtgggcaaagggctgctttagcacttttcttttagcaaattaatgactctcaggcacagggggttttaagtgaaggtattaataagaggtctggcaggtattcccatgattcacagagttacatttgcatttaattaatcttaaagttgcaagataaacagctgtaattcggacaaacatgacaaacacagtgaagccaactatcccataaaatgaacactgacatacttgttttaatttttttcccagcgtaaaaatagaaaaatcaaaatactcctaacaaaaccagtgattttgatagaaatatttctccaatatacttgcatccacctacaaatataaccttttcaagataaatcgcttatgatttcaatagtcaaactgctgtgtttgttgatgtaaagatgttttgaatggctagatggtaaaataaattcttaataaagtacccactgcaatttttaaaaaaaaaaaaaaa

SEQ ID NO: 402235 - DNA, 1000 bp, Homo Sapiens; identical to SEQ ID NO: 290872

SEQ ID NO: 402236 - DNA, 1000 bp, Homo Sapiens; identical to SEQ ID NO: 290874

SEQ ID NO: 402237 - DNA, 1000 bp, Homo Sapiens; identical to SEQ ID NO: 290875

SEQ ID NO: 402238 - DNA, 1000 bp, Homo Sapiens; identical to SEQ ID NO: 118044

SEQ ID NO: 402239 - DNA, 1000 bp, Homo Sapiens
tcccatagggccacttcccatgcaggcctgagctctgctcctcatcatatggcccagcgatctcagaaaagtcgaagtgagcaggatttattaaataacagaactggctgccagatgttactagataacccctggaagagtgattctaatcaggtattttcctacaaagtttggactgtgtcttcttctgataagctgctggacagattgctcagtgtccggcctggtcaccaagaggtctccgtgccaccacaccttcgccatctacataatccatcatcaggacaaaattttcagcatctttccccaaacagacacaaaatcagggatcttcctttcactcggaacaacctagctcccctaccagatcaaaaatttctatctggagaacctctgcggacaaaccgagtgcttcctgcaattccaagtcaacgaagacacagcacagcagcagaagagagtgaacattctgccaaccccaccagtgatgaaaattaactgtgggccactcgctgcagaaatgtagatgaatatgtattttcaactctcaaaggacaagattactccagtttgtaagaacgaagaccaatttagtaagctgcattctataagccatcagttttataactcgaaattctttattccaaataaagatactccctaaataagcacttagaatatttgggtgtgcatattaagtctgtgaatttctgtgacttccacatgccaaaattaaaagacaaaatatgttatcagtaggaaaactgagctatgtttggtttgctttgtggcatgtgcactgtttttttgttattgttctttggttgtttttttgctgaatgattttatgttttgggaaaaaaagtacgctttgctgaataaaagcaaaaaacaaaacaaaaaaaaaaccacatcccagacaaacatgtcttcacatttattgtcattctaacttgaactaatgaaacctatttaaaaataaattcctatgatcagtcac

SEQ ID NO: 402240 - DNA, 1000 bp, Homo Sapiens; identical to SEQ ID NO: 118046

SEQ ID NO: 402241 - DNA, 1000 bp, Homo Sapiens; identical to SEQ ID NO: 118047

SEQ ID NO: 402242 - DNA, 1000 bp, Homo Sapiens; identical to SEQ ID NO: 223386

SEQ ID NO: 402243 - DNA, 1000 bp, Homo Sapiens; identical to SEQ ID NO: 223387

SEQ ID NO: 402244 - DNA, 1000 bp, Homo Sapiens; identical to SEQ ID NO: 290880

SEQ ID NO: 402245 - DNA, 1000 bp, Homo Sapiens
cccggggccgcgggcggggcgcccacgagatgctgatgacgagcaggcagaggatcaaataaacggagtcttggagagattgaattgactttaccaaaaccgtcaggatttgaatctgctgctctctgatcctaaagcctgagctagaaaccaccgctccccctcctaggaggccccttccaggcaaagctgcttctcttccccagacccatgctggactggaagggaggggactgtccacccctccttccagggcccaggcttgaatgtgtcccctggccgagctctggtctagtcacgcagggttaatgattgttggactccagctttgagccagggcccggccagcagtctcgcagaccccagcgtggggcctctgtgcctgcgagctcctgcgctcttgtgcaccaagcagcttgtggcggcttgtggcagatcccaccccatcccgtcccccaccccaaggctaaacctgcctgtgctcacacacgcatttcccacctgggcttgtgcatgcaatgtggtgtgtgatcagtgtgtgtggcggggggcttccttctgccctgtctccacggggcccccccatcatggacctcccctcccttgctggagctagaatgagggggaggccgccttggcgggagccttagagaggaggaggaaagggggagaggaaattgcagacatagctgaaggcgctgcctgaggcctgtgggccagcgaccctctccctgtccgggctgcagacccctactcccccagtcccgagactgggttcaagtagagggcagatctagatgggggaggactaggactgactcctatggggatggaaaagggactcctgggtgtctttgtgactgtttagtgtgttctgtgaatgtgcgggcaggtatttttgcccacatctgtatatttgtctattaatgtgatgtatttgagtattgttgtgggggcgggtatgtctgtatataaatctgtgcagccactagtcaacaaa

SEQ ID NO: 402246 - DNA, 1000 bp, Homo Sapiens; identical to SEQ ID NO: 290882

SEQ ID NO: 402247 - DNA, 1000 bp, Homo Sapiens; identical to SEQ ID NO: 223388

SEQ ID NO: 402248 - DNA, 1000 bp, Homo Sapiens; identical to SEQ ID NO: 223389

SEQ ID NO: 402249 - DNA, 1000 bp, Homo Sapiens; identical to SEQ ID NO: 118048

SEQ ID NO: 402250 - DNA, 1000 bp, Homo Sapiens; identical to SEQ ID NO: 290886

SEQ ID NO: 402251 - DNA, 1000 bp, Homo Sapiens; identical to SEQ ID NO: 223390

SEQ ID NO: 402252 - DNA, 1000 bp, Homo Sapiens; identical to SEQ ID NO: 290888

SEQ ID NO: 402253 - DNA, 1000 bp, Homo Sapiens; identical to SEQ ID NO: 223391

SEQ ID NO: 402254 - DNA, 1000 bp, Homo Sapiens; identical to SEQ ID NO: 223392

SEQ ID NO: 402255 - DNA, 1000 bp, Homo Sapiens; identical to SEQ ID NO: 118050

SEQ ID NO: 402256 - DNA, 1000 bp, Homo Sapiens
taattctgatagccaggctgcggcccactacaaaggcacgaaacatgccaagaagctcaaagcactggaagccatgaaaaataagcagaaatctgtaactgccaaggacagcgcaaagactaccttcacctccatcactaccaataccatcaataccagctctgacaaaacagacggtactgcagggacaccagcaatatcaacgacgacaactgtggaaatccgcaaaagcagtgttatgacaactgagatcacctctaaagtggaaaaaagcccaacgacagccactggcaatagctcatgtccttctactgagaccgaggaagaaaaggcaaaacggcttctttactgttcgctatgcaaggttgctgtcaactctgcctcgcagctggaggcgcacaacagtggtactaagcacaaaaccatgttagaagcccggaatggaagtggcactatcaaagcctttcctagggcaggagtgaaaggcaaaggacctgttaataaaggaaacacaggcctccaaaataaaacatttcactgtgaaatctgtgatgtgcacgtcaactcggaaacgcaacttaaacagcacattagcagtagaaggcacaaagacagagctgctgggaagcccccgaaacctaaatacagtccttacaacaaactacagaagacagcacatccactgggggtaaaattagtattttcaaaagaaccttcaaagccattggctccacgaattctaccaaaccctctagcagctgcagcagccgcagcagcagtggcagtgagttcccccttcagtcttcgaactgctccagcagcaacactgttccagacttctgcgcttcctccggcactcctgcggccagctcccggacccattcggaccgcccacactcctgtgctgtttgctccttactaaattccaaataggagtaattgtactgcaataatttttcaaaaaacaaaaaacaaaacaaaaaaaaaaaaaaaaaaaaaa

SEQ ID NO: 402257 - DNA, 1000 bp, Homo Sapiens; identical to SEQ ID NO: 290893

SEQ ID NO: 402258 - DNA, 1000 bp, Homo Sapiens
taaaaatgttgaatcttacttggaatagtcattcaaagattcaagtcagaaatcacagggaaaattctattacatgtttaagtccatttattttactacaaatactatttttgtaatttttaaaagttgctttttaacttatttccccttatgtcacattttaaattatgagttttctattagagttttttggttttaagtttaattgtgtacggatcctcaattattagcaaattcttatatttaattagctttcattagtttatgctgtagtgacaacaacaaagatgtatttcctggtgggggatgtcagctgttgattggctgtgacactgctttgtgtcatcttcttaccatgatcaaaggcgaaggaagggatctcttttgggacattgtgattgttttagcagagagagaaagagatgaaatacacttcggttttctcttaaaagatgcatgtatcatacgtgctttaagcaagtcatgtggccaagcctagcatcatggagccagaaagtatagccttgctgtctgtctacatcatgatgtataaattgatatatctacatgaattatagaaacttagaagtgatctttattcagtcttataatttttacatgaagaatcttaggcctaggaggagaaaatgattttctttctattacctaactagattggggcatatttctgataaagacccacctctagtgagattcatcttttttgtttgtgtgactatattccatagagaagaaagatgggatagctcaacttcattatataccaaagcaaaacacatgccaaatgatgactacattttaccaacatatttagacgagtattcttgactagtgtttactatctatacccccaaaactactactatatagacagaatggaaagtatttctatttgtcctttttttgttttctgttctaattgtcagggacatatgtagtggctataggtttacttaaagggaataaatttggaatgctc

SEQ ID NO: 402259 - DNA, 1000 bp, Homo Sapiens; identical to SEQ ID NO: 118051

SEQ ID NO: 402260 - DNA, 1000 bp, Homo Sapiens; identical to SEQ ID NO: 290897

SEQ ID NO: 402261 - DNA, 1000 bp, Homo Sapiens; identical to SEQ ID NO: 118053

SEQ ID NO: 402262 - DNA, 1000 bp, Homo Sapiens; identical to SEQ ID NO: 290899

SEQ ID NO: 402263 - DNA, 1000 bp, Homo Sapiens
cttttctgcttgaggctaaggcactgtatcccaggcctcccaatgttcccgagccaggaactctgggccccatggagttatgagctcccttggaattttgagccaagctttaagcaagtctggactcctgagacctcctgggtctagtcagtaaaattctgcaactctaggaattctaagatcccattggaaggaatgctctacctcacagaactctgaaccctacagaaatatgggcctgctgccatttcctgaagaccggggcatcggggtggggtgataaaggatacaacctgcacagggggaagttattaaagaggctgcaaagtccagccaccctgaagatactccccagtgctcccctcctgctaaagaaccagttaccccaggaaaattcgactcctgtttttctttaattaactataccgacggggatggagtcatctttaggggctggtagggtggttatccaagggctgaatccagtggagctgggccaagtacgacaggagtccagataaaggtgtaggggctgcacggccgcaagtctcctggaaaggctggagtgaccggcatgccgggattgggagattaggatttgatttcattttggggcgggcggtggctcgtgctgggtcacgtggtcgtgcccaagcgctcctcctgttgccccacctgtggttgctgtggactgcacacgacagcagattcgctgtcccctcgttggaggcgaatggtcggaccccgagtggcggcgcccctgataaaaggccgaggattcgcgatcagggtgcaacttcactccctcctcttttctctccagccttgcagcgtggccgttcacatcacgcgcttcactaagcctcctatcactagtaacctttcagcgcattgtttaaaaagaaagcagtttctgtccctttctgtagttcctttaagttcaggatgtaagcgaagccttccattaagtaaaggtgagtgtcgtttcgtctcagtcgcg

SEQ ID NO: 402264 - DNA, 1000 bp, Homo Sapiens; identical to SEQ ID NO: 290902

SEQ ID NO: 402265 - DNA, 1000 bp, Homo Sapiens; identical to SEQ ID NO: 290903

SEQ ID NO: 402266 - DNA, 1000 bp, Homo Sapiens; identical to SEQ ID NO: 118054

SEQ ID NO: 402267 - DNA, 1000 bp, Homo Sapiens; identical to SEQ ID NO: 284108

SEQ ID NO: 402268 - DNA, 1000 bp, Homo Sapiens; identical to SEQ ID NO: 118055

SEQ ID NO: 402269 - DNA, 1000 bp, Homo Sapiens; identical to SEQ ID NO: 290905

SEQ ID NO: 402270 - DNA, 1000 bp, Homo Sapiens; identical to SEQ ID NO: 223398

SEQ ID NO: 402271 - DNA, 1000 bp, Homo Sapiens; identical to SEQ ID NO: 118056

SEQ ID NO: 402272 - DNA, 1000 bp, Homo Sapiens; identical to SEQ ID NO: 223400

SEQ ID NO: 402273 - DNA, 1000 bp, Homo Sapiens; identical to SEQ ID NO: 118057

SEQ ID NO: 402274 - DNA, 1000 bp, Homo Sapiens; identical to SEQ ID NO: 223403

SEQ ID NO: 402275 - DNA, 1000 bp, Homo Sapiens; identical to SEQ ID NO: 118058

SEQ ID NO: 402276 - DNA, 1000 bp, Homo Sapiens; identical to SEQ ID NO: 223405

SEQ ID NO: 402277 - DNA, 1000 bp, Homo Sapiens; identical to SEQ ID NO: 290912

SEQ ID NO: 402278 - DNA, 1000 bp, Homo Sapiens; identical to SEQ ID NO: 223406

SEQ ID NO: 402279 - DNA, 1000 bp, Homo Sapiens; identical to SEQ ID NO: 223407

SEQ ID NO: 402280 - DNA, 1000 bp, Homo Sapiens; identical to SEQ ID NO: 223408

SEQ ID NO: 402281 - DNA, 1000 bp, Homo Sapiens; identical to SEQ ID NO: 290918

SEQ ID NO: 402282 - DNA, 1000 bp, Homo Sapiens; identical to SEQ ID NO: 118060

SEQ ID NO: 402283 - DNA, 1000 bp, Homo Sapiens; identical to SEQ ID NO: 223410

SEQ ID NO: 402284 - DNA, 1000 bp, Homo Sapiens; identical to SEQ ID NO: 118061

SEQ ID NO: 402285 - DNA, 1000 bp, Homo Sapiens; identical to SEQ ID NO: 290923

SEQ ID NO: 402286 - DNA, 1000 bp, Homo Sapiens; identical to SEQ ID NO: 118062

SEQ ID NO: 402287 - DNA, 1000 bp, Homo Sapiens; identical to SEQ ID NO: 118063

SEQ ID NO: 402288 - DNA, 1000 bp, Homo Sapiens
aggagtaaaaacagcagcttctaagtgtgggatccaatttctccatttaccaaagttgttgacaacctcaactgaacagcatccaaacttatgtgaagtcccaggtgtagaagagcaaagcgatcctttatttataggaggaccaagaccaaccatggccaagttaatggaaaagggcattgaagtgatgttttctccccacccttgccctacttggactcttgattggaatgttctccctgcagcagtcagcccaaaggaaggtaaaatgtccagtgatcgagctttgaggaagcagcaacagttgaacaaccttgtctatgtggtaacaaatcaggccaaacctggtgacagaattgtggatttctgcagcggtggggtattttatctctcctttcatcctttttagtctttctaagattatgagacttttctatattacattcaaggtcatgtttttatttggcaagattgtggtttcagaatgaggaaaagctgtggggaccaaagctaacttgtttgtcttactgactttttcagggccatgttggaattgtccttgctcacatgctgccatcatgtcaggtaaagccagaataagagataaaaggaaatattttaaaattatacagttcagctagccaaatttggtttatcccgctcttggagtttctagtcactcacccaagtcaaatatgtggcacaggcattgtcttttctttgaaataaactttcaagactcagaatcttaaggaaaaaaaagtaaagtaagatcataaaacatttatcaatttttaaaagaggtttataggtttaagtaatttttcaaagaagtagctattttattgctaaataaaataattatgattcaactagtttaattttcaatataattttaaatggaaatattgacctctgaaacttgctgagcatattcttttggtatcttgattttgatccattgcatcaaaattataacaatagcaaaattttttaaagc

SEQ ID NO: 402289 - DNA, 1000 bp, Homo Sapiens; identical to SEQ ID NO: 223412

SEQ ID NO: 402290 - DNA, 1000 bp, Homo Sapiens; identical to SEQ ID NO: 290926

SEQ ID NO: 402291 - DNA, 1000 bp, Homo Sapiens; identical to SEQ ID NO: 223413

SEQ ID NO: 402292 - DNA, 1000 bp, Homo Sapiens; identical to SEQ ID NO: 118064

SEQ ID NO: 402293 - DNA, 1000 bp, Homo Sapiens
gtctgagtcttgtgctcttcaagacaaaacagattgcgtcgctgacaagttctcaagaagaacttatgagtaagcagtctgagaactaaagagtttatgccaagaaaactttctgctgaaagtgtcattgctggctgtgaagtcgggataatcagtagaattctcacccaaacagcaacatttctaaggaacttggattaattgggggaaaaaaaaaggagtacttgtactgctttgattttttttcctttgatgaaagatggaggataaaggggaagtgaggagaatttctttcaagattatctaaacattagaaacatgacatttaaaaaaactatgaaataatactgtataagcattccatatttctatatcttccttttaaacatttttttttttgagatggagttttgcttgtcacccaggctggagtgcaatggcatgatctcggttcattgcaacctccgcctcccgagttcaatcgattctcctgcctcagcctcctgagtacctgggattacgggtgcctgccaccacgcctggctaatttttgtatttttagtccagacagggtttcaccacattggccaggctggtcttgaactcctgacctaaggtgatccgcccgcctcagcctccttaaagtgctgggattacaggcatgagccaccgcacccagccgctttttaaaattttgatgatctgcttcctagagtattgagtatcttcctttaaactacagctcctcctcggacgctgcagtgagctgagatcgcaccactgcactccagcctgggtgccagagcaagactccatctcaaaaaaaaaaaaaaaaaatacagcttctcctatgaggtgcttagggctgcatcttggttttaggaccactgtgaacgtaagtaaaaagtataaagtaacacggagagcctaatgaagaaacttcttgctcagaggcctagaagggtacacaaaatgtcttctaaactagaaaacctaaggc

SEQ ID NO: 402294 - DNA, 1000 bp, Homo Sapiens; identical to SEQ ID NO: 290930

SEQ ID NO: 402295 - DNA, 1000 bp, Homo Sapiens; identical to SEQ ID NO: 223414

SEQ ID NO: 402296 - DNA, 1000 bp, Homo Sapiens; identical to SEQ ID NO: 223415

SEQ ID NO: 402297 - DNA, 1000 bp, Homo Sapiens; identical to SEQ ID NO: 290934

SEQ ID NO: 402298 - DNA, 1000 bp, Homo Sapiens; identical to SEQ ID NO: 223416

SEQ ID NO: 402299 - DNA, 1000 bp, Homo Sapiens; identical to SEQ ID NO: 290936

SEQ ID NO: 402300 - DNA, 1000 bp, Homo Sapiens; identical to SEQ ID NO: 223417

SEQ ID NO: 402301 - DNA, 1000 bp, Homo Sapiens; identical to SEQ ID NO: 290938

SEQ ID NO: 402302 - DNA, 1000 bp, Homo Sapiens; identical to SEQ ID NO: 118065

SEQ ID NO: 402303 - DNA, 1000 bp, Homo Sapiens; identical to SEQ ID NO: 118066

SEQ ID NO: 402304 - DNA, 1000 bp, Homo Sapiens; identical to SEQ ID NO: 223419

SEQ ID NO: 402305 - DNA, 1000 bp, Homo Sapiens; identical to SEQ ID NO: 223420

SEQ ID NO: 402306 - DNA, 1000 bp, Homo Sapiens; identical to SEQ ID NO: 290943

SEQ ID NO: 402307 - DNA, 1000 bp, Homo Sapiens
gcagatcattaatgagggcaaagataaaatgttcctgatagaaaaattgatcaagctgcaggatatggagaagaaagcaaaccccagctcacttgttctggaaaggagagaggtggagcaacaaggctttttgcatttgggggaacatgatggcagtcttgacttgcgatctagaagatcagttcaagaaggtaatccaagggcctgatgactcttttggtaaccagacaccaatcaaataaggggaggagacgaaaatggaatgatttcttccatgccacctgtgcctttaggaactgcccagaagaaaatccaaggctttagccaggagcggaaactgactaccatgtaattatcaaagtaaaattgggcattccatgctatttttaatacctggattgctgatttttcaagacaaaatacttggggttttccaataaagattgttgtaatattgaaatgagcctacaaaaacctaggaagagataactagggaataatgtatattatcttcaagaagtgtgtgcaggaatgattggttcttagaaatctctcctgccagacttcccagacctggcaaaggtttagaaactgttgctaagaaaagtggtccatcctgaataaacatgtaatactccagcagggatatgaagcctctgaattgtagaacctgcatttatttgtgactttgaactaaagacatcccccatgtcccaaaggtggaatacaaccagaggtctcatctctgaactttcttgcgtactgattacatgagtctttggagtcggggatggaggaggttctgcccctgtgaggtgttatacatgaccatcaaagtcctacgtcaagctagctttgcacagtggcagtaccgtagccaatgagatttatccgagacgcgattattgctaattggaaattttcccaataccccaccgtgatgacttgaaatataatcagcgctggcaatttttgacagtctctacggagactgaataag

SEQ ID NO: 402308 - DNA, 1000 bp, Homo Sapiens
ccttgaaagaagcttacatggcagcaatatttctaaaatagtgatacagtcagaggcctcctgtaagggcgagagaactgaagttgatgttgacaggcccacagggaattggccttccctgttcaagtggaagccagtctctgagaatcccgtgctctcctctcttttggtggaggttctgtaggttcaggtttctaccatggactttaggtatatagggcaagtcagcaagaaagcaccacacactcaggaagccttgtctacctttccctagcgtctctagccagccagccccagatactcctcagagacccacttctctcttttgcatggaataaaaagcactcacagtccctgcttttgggattacttatgctgtggaactcataacccaattcacttccttcactgggtcccaccccattgttgtctctggatgaagtctagccatcagtctggtccttcagattcttcgtaaacttttctgcagttgccagagctaagtctccatttggaaactttggtctcaagaactctcttgatggtgggcacaagacagatagatgattgctgctttcctttgccaaacttggatgcatttttctctttgtttccaaagtataggcaacaggttaaactaccacgtggggtagtttatcaatcctcccgcctcatccttctgcataactgggactaaaggcacacaccaccacacctagctaatttttgtatttttttgtgtgtggagacaaggctttgccatgttgcccaggctggtcttgaactcctggactctagtgatctgcccacctcaacctcccaaagtgctgggattacaggcatgagctaccacgcctatccaatttctggtttatttactttcgatggttaaatgcctccttattcaaatatcctgtatatatactggcgtttctgtcctgatgtcaagtctcgagagaagatgatcaaacaataataaaataattataataagaacaac

SEQ ID NO: 402309 - DNA, 1000 bp, Homo Sapiens
agaagttaaagttaacagaagatacctcagaaaaggcaggatttgcttctactctgcaaaagcagccaacctttttcaaaaactcagagaattccagttttttaccaatgaaaaatgaaaacccaaggttaaatgagacaaatttaaatagaagagacaaagacacccccctggacccatcaatggccaccctgattctgcctaagaataaagggagaatgcagaataagaagccaggctttacagtatcatgctctccaaagagaaccataaactccagccaagagccagctccaggtatgaagccaaactggcctaggagcagatatcctgccacaaagagaggctgtgctgccatggcggcatacccatccttgcacatatacacatacccgtaggtgagcctgggctgtgccacacaagcacttcatcgggggttttgagattagacacattttataatgggggagatgtatgactgggaactgcatttacttgtggtatactgtgttgtgcactcatgcactgaccttacactttgtacttacactgtgggcatgtggtcaagatgcatacctcatgaattcaactattttttcataaaatgaaattttattatgatgtgtaaaaatgctttatcagaaactgaagtgtgttctcatggcacacttcatggcagcacagatatacctcattttaaccaatagatattctctctaaaattatgtgcaaatcaatttttaaaaatcaaaatctatgttaaacacattttggcagtgtgctataataaaaaaaagtgttgtgtcaaagctttctagtgacggtcagtcctactgctgtatgtcaggtttgctcacaatgaggtattcccacatagaaataacaatgcatgtattacccagaatttaatgttgcgtaccttatgttcaatgaggttttgtaatttttttaggctgatgattaaaattctttctctctaaaaaaaaaaaaaaaaaaaaaa

SEQ ID NO: 402310 - DNA, 1000 bp, Homo Sapiens; identical to SEQ ID NO: 223422

SEQ ID NO: 402311 - DNA, 1000 bp, Homo Sapiens
aagatgaagaagaattctttatatagcataaaataaatgtggttttctaaaacacaagatcagataaaatgttctagaaatggagtactgacccagaatcagcctgttagttgttcatctgaggggggctgaatgctccccatgcacaatctgtattgattttatttcaaatgttcaaagtctaaaggtgctgggaatgattgtttatttgccgtcacagtcataagagaacacagccaacacacagggaaaaaaaccgaatgcttttgttccgtggagatgcactaacccagctggatgtgttgaatccagcacctatcaggataattgcattgtatgcaaatgaatcggtatgttatacaacactaattagtgtctgtaatttggttttaatttttacttaggttgcatagctcatccccctggacaatatggactgctatttactcttgaatgctttttaattttcatgtgacctcttttggtaactaggccttgttcacataccctccttgtgattttgtctttaaagttgtttgtatctggaatgagtgaaaatgcaaagtgttttgaaaattataaacagttaattttgttttcctgtttaatgagccaaaatactggaagccagaaaatcaggttgaacatgaatgctaggctctagggctttcctgctcatctgcttctcatttgtttctgcactatgtcaaagaggacagtggttcttgttacaaaccaaagaggaacattgagcacagtgggaaaattggactggttgatctggtcactggagcaggacttgggttcttctggccagattttgactcccagattcctttacaaaacgcactcattcattcatttatatatgttcattcaataaacattttttgaatacctaaaaaaaaaaaaaaaaaaaaaaaaaaaaaaaaaaaaaaaaaaaaaaaaaaaaaaaaaaaaaaaaaaaaaaaaaaaaaaaaaaaaaaaaaaaaaaaaaaaa

SEQ ID NO: 402312 - DNA, 1000 bp, Homo Sapiens; identical to SEQ ID NO: 290945

SEQ ID NO: 402313 - DNA, 1000 bp, Homo Sapiens; identical to SEQ ID NO: 290946

SEQ ID NO: 402314 - DNA, 1000 bp, Homo Sapiens; identical to SEQ ID NO: 118068

SEQ ID NO: 402315 - DNA, 1000 bp, Homo Sapiens
aggagaaaaaaaatgtaattatggaattatcagaaatgagaaaacagcttcgtagtgaagagaagcgtctacaagagcgattgctacacatggacagtgatgatgaaattcctatcaggaaaaaggaaaggaatcccatggatatatttgatatggctagacatcggttgcaagctcctgtcagaagacagtcccctaagggcttagacgctgccacttttcagaatgttcatgattttaatgagctgaaagatagagattcagaaacacgagttgatctgaaatttatgtacctggatcctccaagagatcatcacaccttagagattcagcagcaagccctgctaagagagcagcagaagaggctgaacagaataaaaatgcaggaaggtgccaaagttgacttagatgccatcccaagtgctaaagtacgagagcaaagaatgcccagagatgacactagtgatttcttgaaaaactcattattggaatctgatagtgcttttattggggcttacggtgagacatatcctgccattgaagatgacgtcctccctccaccatcacagttgccctctgcacgggagcgcaggaggaacaaatggaaaggactagacattgatagcagtcgtcctaatgtagcaccagatggtctctctctaaaatctatatccagtgtaaatgttgatgagcttagagtgagaaatgaggaacgaatgcgaagactgaatgaatttcacaataaacctattaatacagatgatgagagttcactggttgaccctgatgacatcatgaaacacataggggatgacggatcaaactctgtagcaactgagccctggctccgccctggcacttcagaaacgctgaaacgtttcatggcagagcagctgaaccaggagcagcagcagattcctggaaaaccaggcactttcacttggcagggcctgtcgactgcacatggttaaaataaacctgtactggacaaaaaaaaaaa

SEQ ID NO: 402316 - DNA, 1000 bp, Homo Sapiens; identical to SEQ ID NO: 290949

SEQ ID NO: 402317 - DNA, 1000 bp, Homo Sapiens; identical to SEQ ID NO: 223424

SEQ ID NO: 402318 - DNA, 1000 bp, Homo Sapiens; identical to SEQ ID NO: 223425

SEQ ID NO: 402319 - DNA, 1000 bp, Homo Sapiens; identical to SEQ ID NO: 290952

SEQ ID NO: 402320 - DNA, 1000 bp, Homo Sapiens; identical to SEQ ID NO: 290953

SEQ ID NO: 402321 - DNA, 1000 bp, Homo Sapiens; identical to SEQ ID NO: 290955

SEQ ID NO: 402322 - DNA, 1000 bp, Homo Sapiens; identical to SEQ ID NO: 290957

SEQ ID NO: 402323 - DNA, 1000 bp, Homo Sapiens; identical to SEQ ID NO: 290958

SEQ ID NO: 402324 - DNA, 1000 bp, Homo Sapiens; identical to SEQ ID NO: 223426

SEQ ID NO: 402325 - DNA, 1000 bp, Homo Sapiens; identical to SEQ ID NO: 290959

SEQ ID NO: 402326 - DNA, 1000 bp, Homo Sapiens; identical to SEQ ID NO: 223427

SEQ ID NO: 402327 - DNA, 1000 bp, Homo Sapiens; identical to SEQ ID NO: 118069

SEQ ID NO: 402328 - DNA, 1000 bp, Homo Sapiens
caaactatatcaataaattccatgtttagcagaaataggcagcctattggtgttatgtttatgtaacatagtccagagaactgacatgcaggtcaaaagtcagatacgcaacctccttatctgctaactctgttattcttcaaacacaagtgggtagtgtcatttttccttccttccttccattggcagattgtatatttattcacaaaacattaaatgtccatcctgtgccaggtactatgcagatgttgagggatttggggtctggttagtcgtgactatctatcctgaatctaacagtgacttcataactaggagactgaattagacccttaaggtatagtgtgtgttgcaaatcactctgcaatggaaacttttatattcagggtaggtttgtgtcttaaactaggtgttctaatcaatgtacaagactttaccatacacgcaactatagtttttctaaaccttcatcattttgtgattctttgagaaagggcttttaggaactttatgttctaaaaaatgtttttaacaataataagataaaagaaaaacctgtgattcatatgtccccactggcattactcagcaggagcccccagctgccaaaggttggcagtgatcctgcaagttcaagggctctttctccctggggatgtgctttgtggcttctctttacagctttgtttctgcatcagttcactgctgcatgttgtttggaatttatcaccttaagaaagtgtctctgttttatatagaaacactttctcacttacaggggagaaggaaatgcagggcacatgatctggccctccccagaacaatctggatttcacggagacagcaaccagaagttaaaccatgtgactaaaaatgcatctggctactttttcatgtatgtatgagacagaaactaatccttactatcctattaggataccacttttcattgcaaagtttgtgtcaataaagtcattaattttaaacataaaaaaaaaaa

SEQ ID NO: 402329 - DNA, 1000 bp, Homo Sapiens; identical to SEQ ID NO: 290961

SEQ ID NO: 402330 - DNA, 1000 bp, Homo Sapiens; identical to SEQ ID NO: 290963

SEQ ID NO: 402331 - DNA, 1000 bp, Homo Sapiens; identical to SEQ ID NO: 223428

SEQ ID NO: 402332 - DNA, 1000 bp, Homo Sapiens; identical to SEQ ID NO: 118071

SEQ ID NO: 402333 - DNA, 1000 bp, Homo Sapiens; identical to SEQ ID NO: 223430

SEQ ID NO: 402334 - DNA, 1000 bp, Homo Sapiens; identical to SEQ ID NO: 223431

SEQ ID NO: 402335 - DNA, 1000 bp, Homo Sapiens; identical to SEQ ID NO: 290968

SEQ ID NO: 402336 - DNA, 1000 bp, Homo Sapiens; identical to SEQ ID NO: 290971

SEQ ID NO: 402337 - DNA, 1000 bp, Homo Sapiens; identical to SEQ ID NO: 118072

SEQ ID NO: 402338 - DNA, 1000 bp, Homo Sapiens; identical to SEQ ID NO: 290973

SEQ ID NO: 402339 - DNA, 1000 bp, Homo Sapiens; identical to SEQ ID NO: 290974

SEQ ID NO: 402340 - DNA, 1000 bp, Homo Sapiens; identical to SEQ ID NO: 118073

SEQ ID NO: 402341 - DNA, 1000 bp, Homo Sapiens; identical to SEQ ID NO: 290976

SEQ ID NO: 402342 - DNA, 1000 bp, Homo Sapiens; identical to SEQ ID NO: 223434

SEQ ID NO: 402343 - DNA, 1000 bp, Homo Sapiens; identical to SEQ ID NO: 118074

SEQ ID NO: 402344 - DNA, 1000 bp, Homo Sapiens; identical to SEQ ID NO: 223435

SEQ ID NO: 402345 - DNA, 1000 bp, Homo Sapiens; identical to SEQ ID NO: 290979

SEQ ID NO: 402346 - DNA, 1000 bp, Homo Sapiens
catccatcaagtaatcaaagagtgcagcatcgccctgagcaactggtggtttgtggcccacctgacagacctgctggaccactgcaagctcctccagtcacacaacctctatttcggttccaacatgagagagttcctcctgctggagtacgcctcgggactgtttgctcatcccagcctgtggcagctgggggtcgattactttgattactgccccgagctgggccgagtctccctggagctgcacattgagcggatacctctgaacaccgagcagaaagccctgaaggtgctgcggatctgtgagcagcggcagatgactgaacaagttcgcagcatttgtaagatcttagccatgaaagccgtccgcaacaatcgcctgggttctgccctctcttggagcatccgtgctaaggatgccgcctttgccacgctcgtgtcagacaggttcctcagggattactgtgagcgaggctgcttttctgatttggatctcattgacaacctggggccagccatgatgctcagtgaccgactgacattcctgggaaagtatcgcgagttccaccgtatgtacggggagaagcgttttgccgacgcagcttctctccttctgtccttgatgacgtctcggattgcccctcggtctttctggatgactctgctgacagatgccttgccccttttggaacagaaacaggtgattttctcagcagaacagacttatgagttgatgcggtgtctggaggacttgacgtcaagaagacctgtgcatggagaatctgataccgagcagctccaggatgatgacatagagaccaccaaggtggaaatgctgagactttctctggcacgaaatcttgctcgggcaattataagagaaggctcactggaaggttcctgagaactgcttcaatgtggtatctttgtatggcaatgtatatagattttttaaaagaataaatgttgttttgcaaatgtaaaaaaaaaaaaaaaaaaa

SEQ ID NO: 402347 - DNA, 1000 bp, Homo Sapiens; identical to SEQ ID NO: 118075

SEQ ID NO: 402348 - DNA, 1000 bp, Homo Sapiens; identical to SEQ ID NO: 290980

SEQ ID NO: 402349 - DNA, 1000 bp, Homo Sapiens; identical to SEQ ID NO: 223436

SEQ ID NO: 402350 - DNA, 1000 bp, Homo Sapiens; identical to SEQ ID NO: 290982

SEQ ID NO: 402351 - DNA, 1000 bp, Homo Sapiens; identical to SEQ ID NO: 118077

SEQ ID NO: 402352 - DNA, 1000 bp, Homo Sapiens; identical to SEQ ID NO: 290984

SEQ ID NO: 402353 - DNA, 1000 bp, Homo Sapiens; identical to SEQ ID NO: 290988

SEQ ID NO: 402354 - DNA, 1000 bp, Homo Sapiens; identical to SEQ ID NO: 290989

SEQ ID NO: 402355 - DNA, 1000 bp, Homo Sapiens; identical to SEQ ID NO: 118081

SEQ ID NO: 402356 - DNA, 1000 bp, Homo Sapiens; identical to SEQ ID NO: 290991

SEQ ID NO: 402357 - DNA, 1000 bp, Homo Sapiens
gttggaatcttgggccgtcacctgcatgactcatggtgatgctgagtatccaggaggaaatttccagaagaaacagaccgtcagtcacgggcttccacttcacagacctccttatggccaagatgagcctcatgttttaacaaaacagttcttgggattgaatgactcacatttaccttgtgctaggttctaaagattgaatccacattttgtcactaatgattttcccgctaacataaggatgatgagcagggcactatcatacacactggctgagaactggaactgtttttgggaaggtggcatttgtctcattccctgaaataccttaaaatgtcctctacaccaacccttccgtctaccctgctcacatgtacagtgacggggaactcaccaccttttgaagaggcagttcattttctttgcaaagctctctcctaacttcctccgtaaattccagccagcatggccacatgggtcacgcctggtgccttcacacgtttgaggggtcttcgtctctttttaaagcttagaggtacaagctcaggacagtcttcagtaaggaaatttgtggatttccctttggatctttcttcctctccagcccacaagtggctctagtgagacgagcatttaagctgcaggtggtggcactcgggtctcagagccaccagacgtgcaggtgggacagtggttccagctccgactgcctgtcagcgtccctcccaggtgctagccctggcaggcacagccctcccctcatgccagcaaaggaaatgctcttgatgagaggctcgctttaaagaagcccaaagcgtgtgcttatccaaggggttcagctattcctgacttcacggcttgcatgtttgatttttctaagagaaaagaggctgcctgctgggtgtctgtggaaatgagattaaaaactgtacaatctcagattttactaaaatgcaaaaatgtagtttcagtttcttaaattataagcacgagtcttctc

SEQ ID NO: 402358 - DNA, 1000 bp, Homo Sapiens
gccctctacagctggccctaccacttcctgcgcaagctcggctccgacaagggcgtgttctcctttgaggccggccgtcgctgccactcgggtgagggcctctttgccttcagcaccccctgtgcccctgacctgtgcagggctgtggccggggccatcgcccgccagcgggagcggctgccagagctgaccaggccccagccctgccccctgccacgggccacctctctgccctccctggacacccccggagagcttcgggagatgccaccaggacctgagccacccacgtccaggaaaatgcacctggccgagcccggaccccagagcctgccgctactgctaggcccggagcccaacgatctggcgtccgggctctacgcttcagtgtgcaagcgtgccagtgggcccccaggcaatgagcacctctatgagaacctgtgtgtgctggaggccagccccacgctgcacggtggggaacctgagccgcacgagggccccggcagccgcagccccacaaccagtcccatctaccacaacggccaggacttgagctggcccggcccggccaacgacagtaccctggaggcccagtaccggcggctgctggagctggatcaggtggagggcacaggccgccctgaccctcaggcaggtttcaaggccaagctggtgaccctgctgagtcgtgagcggaggaagggcccagccccttgtgaccggccctgaacgcccagcagagtggtggccagaggggagaggtgctccccctgggacaggagggtgggctggtgggcaaacattgggcccatgcagacacacgcctgtgtccaccctggcctgcaggaacaaggcaggccgcctgtggaggacctcagccctgccctgccctcctcatgaatagtgtgcagactcacagataataaagctcagagcagctcccggcaggggcactcacggcaaaaaaaaaaaaaaaaaaaaaaaaaaaaaaaaaaaaaaa

SEQ ID NO: 402359 - DNA, 1000 bp, Homo Sapiens
cttggcagatggatgatgcacgactccctgaaaatctcttcagcatattgctgttggatgcacaaaaatgattctatgatttaggcaactcagtgtttgctgcagggatattgtatgttgatttaaagtgcatatgtgtgtgtgtgtgtgtgtgtgtgtgtgtgtttcctggggtaaaaatttctgcagttgtaaacgtttaacattgctcccattcttcttccacagggccttagttctttagctatttgactacatattgttgacctcagtgatcctaaacgtagaattgaagaggtgtatatacctcgttaaattaaataagtggttcaatctgaataagatggttaattggaagctattccttagacagatcatttctttaagatggtgagaaattgtgcgcctgcatcacaagacttgattatgaaagataaagtcttgggctgggtgcagtggctcatgcctataatcccagcactttgggaggctgaggcaggtggattgctttgaggccaggagttctagaccagcctggccagcatggtgaaaccccatctctactataaatacaaaaattagccaggctcgtggcacacacctataaacccagctactcaggaggcttgaggcgggaggatcacttgagcccagggaggcagaggttgctgtaagttgagatcgccactgcactccagcctgggaaatagagtgagcaagactcagtgccccctacccacccactccacaccaccaaaaaaaaaaaaaaaaaaaaaaggaagacaaagtcctgatgggatgatgatggctatatggctatgctgtgtccatatatacttacagaaatatttcagacatatggatttatagttaaatctgtgtttttccttcctatggatttgattaattttaatgaaaaacttaattctgactcctcaagccaattaaaatgaaaatggaatttatttaaaaaaaaaaaaaaaaaaaaaaaaaaaaaaaa

SEQ ID NO: 402360 - DNA, 1000 bp, Homo Sapiens; identical to SEQ ID NO: 118082

SEQ ID NO: 402361 - DNA, 1000 bp, Homo Sapiens; identical to SEQ ID NO: 223440

SEQ ID NO: 402362 - DNA, 1000 bp, Homo Sapiens; identical to SEQ ID NO: 118083

SEQ ID NO: 402363 - DNA, 1000 bp, Homo Sapiens
ctgagcctggcgcaccgcttgctcgacggggcgggctccaggctccagccagaactttacaggtgtagtcttggcggaggaagtgtatggggtcaccgcagcttcagggacttaccttcctggtcatttttacggtctcggagaatgagagacaattattgaggaggaggtggcacctagacttgatttttctgggtgtgggagagaatggggtgggaggacccccattagtccagatctggggtctcttaaccttgccccagagtggaagatagtctcccaggcccagaagatgctcctattgccttccagggctgagaacgaaggatcacccaggcctcgagtcctccatctctgtatctggtggtggatggggtgttcctttagctgctagggccgctaaccatgctaccaggtggcagggcgaaccatggtttccctcagcctgtgcacccagcatagagaggatggctgcccatcctcagctcccctccttgcttcctcgagtgttctgactccgcactagccgcgccctgtaggaagaatagggtgtccacctctccccggtgctcgcctagtcactccagttgaagacgggacgcgtgcccgatctcaagagagcccccgacccgtccgtggggaaccacatcgacgcttcttctcagcctccagtctccagttccaaggatgggtcatctccaaccacttgccctgcctcagtttctccatctccctgctgcagccccgaggaactgggcaccctcgagccgtgcatggcccgcgctgcgctccgaggtcccgcgccgggtcgcgccgcagtcttcctcaagtatgcgcggccccagcgccagggggccagccttgccgccgcctgcctgctccgccgcctccagtctgagcctccctgagtactgggactcagtcacaaaaaaatcaacaacaaaaaacaaaaccctcccagtgtgtgtccgtctctcatctcaataaaagaatttatttt

SEQ ID NO: 402364 - DNA, 1000 bp, Homo Sapiens; identical to SEQ ID NO: 224652

SEQ ID NO: 402365 - DNA, 1000 bp, Homo Sapiens; identical to SEQ ID NO: 118084

SEQ ID NO: 402366 - DNA, 1000 bp, Homo Sapiens; identical to SEQ ID NO: 220428

SEQ ID NO: 402367 - DNA, 1000 bp, Homo Sapiens
tcatttccctacaggaacagttgcagcgttttctgaagaagtgaggagagccattggcgtggcccacaaaccttggattcaccatccagactgcagattggatgaaactgtgcacgtttttgtcccttcagttgccttatgttgaatcagttatatttatctgtaccttctttgctacttaaaatatgctcacagtttgtagtcatgtagaaaaggccagtataaaaatgtagtagacttaaagaccccactcgaccatgagactttctctttgtcaatttgggaattattattattaatttagaaatggggtcttgttatgttgcccaggctgaattcagactcctgggcttaagggatccttccgcctcagcctcctgagtagctgggactacagttgtgcaccaccacaccaaacaagaattgattatattgcttctgtgctatggtaccagcagattattcagccatgcttctaaaggcagtctagcctagaggccgtacagctgtttggtttgcatatgttttagcttttcttttggtttttagtatttcctaaaacataggggaaaaaacgaggtcatttctactaagcactaggacctgccatagtgagtttaagtgcctaccttgcagcagttaatactagattgtgttctgtctctgttcaggtaacaggactgcattcctgctcaaggatgattccttgctgctgcttatgttctgttgtttttaggatggagctggttgttattcaccaactaagggaacagttagagcagagatgaagaaattatgaactgttatccttattctgagccttctcctcctaaccctcatcagttaaggttaggaagaacaagatgccataatgcctatgaagacttctttaacaatcttgtttgggtttttttctaggtatattattagtgttttatggtctatgttctttaagcaataaataaattgttcattttaaatggaaaaaaaaaaaaaaaaa

SEQ ID NO: 402368 - DNA, 1000 bp, Homo Sapiens; identical to SEQ ID NO: 118086

SEQ ID NO: 402369 - DNA, 1000 bp, Homo Sapiens; identical to SEQ ID NO: 290998

SEQ ID NO: 402370 - DNA, 1000 bp, Homo Sapiens; identical to SEQ ID NO: 118087

SEQ ID NO: 402371 - DNA, 1000 bp, Homo Sapiens; identical to SEQ ID NO: 291000

SEQ ID NO: 402372 - DNA, 1000 bp, Homo Sapiens; identical to SEQ ID NO: 118088

SEQ ID NO: 402373 - DNA, 1000 bp, Homo Sapiens; identical to SEQ ID NO: 223444

SEQ ID NO: 402374 - DNA, 1000 bp, Homo Sapiens; identical to SEQ ID NO: 291002

SEQ ID NO: 402375 - DNA, 1000 bp, Homo Sapiens; identical to SEQ ID NO: 291003

SEQ ID NO: 402376 - DNA, 1000 bp, Homo Sapiens; identical to SEQ ID NO: 223445

SEQ ID NO: 402377 - DNA, 1000 bp, Homo Sapiens; identical to SEQ ID NO: 291004

SEQ ID NO: 402378 - DNA, 1000 bp, Homo Sapiens; identical to SEQ ID NO: 291005

SEQ ID NO: 402379 - DNA, 1000 bp, Homo Sapiens; identical to SEQ ID NO: 291006

SEQ ID NO: 402380 - DNA, 1000 bp, Homo Sapiens; identical to SEQ ID NO: 291007

SEQ ID NO: 402381 - DNA, 1000 bp, Homo Sapiens
tatacaacagcgaggcttggtgataacgtatagaataacagacggggactccacacccaggccttttttaacggtgtgaagcatagacagagctgcagtctgtgctaacattaggttatttattgattcaatcagttgacacaaggaggcagctacggggaggtaaaatatggtcctaaaatcaaaaagatttcagttttgtcattctgtctctgagattctatttccacatctagagcagggtaataatgatacctaccttacaaaattattgggagaatacattagttaatatatgtgaaagtatggaggagatgtgcaataaatatttgtgttattaactacacatacagcactctataggagatattccatttataaaaactttaggttctaaaaacctgtacacgttgattatttttgtaagtcaaaagtgattaagaggagtttaagctatcatttccagatgtatttctataaataaaaacataagtatattcagttgatttggggtggagagttccatagatgtctgttaggtccgcttggtccagagctgagttcaagtcctgaatatccttgttaattttctgtcttgttgatctgtctaatattgacagtggggtattaaagtctcccactattattatatgggagtctaagtctccttgtaggtctctaagaacttgctttatgaatctgggtgctcctgtattaggtgcatacatatttaggatagttagctcttcttgctgcattgatcccattaccattatataatgcccttctttgtcttttttgatctttgttggtttaaagtctgttttattagagactaggattgcaacccctgctatttttttttttttttttgcttgataaatattcctgtatccctttattttgagcctatatgtgtctttgcacgtgaggtgggtctcctgaatacagcacaccgatgggttttgactctaaaaaaaaaaaaaaaaaaaaaaaaaaa

SEQ ID NO: 402382 - DNA, 1000 bp, Homo Sapiens; identical to SEQ ID NO: 291009

SEQ ID NO: 402383 - DNA, 1000 bp, Homo Sapiens; identical to SEQ ID NO: 118089

SEQ ID NO: 402384 - DNA, 1000 bp, Homo Sapiens; identical to SEQ ID NO: 291011

SEQ ID NO: 402385 - DNA, 1000 bp, Homo Sapiens; identical to SEQ ID NO: 291012

SEQ ID NO: 402386 - DNA, 1000 bp, Homo Sapiens; identical to SEQ ID NO: 291013

SEQ ID NO: 402387 - DNA, 1000 bp, Homo Sapiens; identical to SEQ ID NO: 223446

SEQ ID NO: 402388 - DNA, 1000 bp, Homo Sapiens; identical to SEQ ID NO: 291014

SEQ ID NO: 402389 - DNA, 1000 bp, Homo Sapiens; identical to SEQ ID NO: 223447

SEQ ID NO: 402390 - DNA, 1000 bp, Homo Sapiens; identical to SEQ ID NO: 118090

SEQ ID NO: 402391 - DNA, 1000 bp, Homo Sapiens; identical to SEQ ID NO: 223448

SEQ ID NO: 402392 - DNA, 1000 bp, Homo Sapiens
cccactttggcagcacttgaggagcccttcaacccgccgctgcactgtaggagcccctttctgggctggccaaggccggagccagctccctcagcttgcggggaggtgcggagggagaggggcgggcaggaaccggggctgcgcgcagcgcttgcgggccagagtgagttccgggtgggcgtgggctcggcggggccccactcagagcagctggccggccccaggcagtgagggccttagcacctgggccagcagctgctgtgctcgatttctcgctgggccttagctgcctccccgcggggcagggctcgggacctgcagccctccatgcctgaccctccccccaccccccgtgggctcctgtgcggccggagcctccccaaggagcgccgccccctgctccacagcgcccagtcccatcgaccacccaagggctgaggagtgcgggtgcacagcgcgggactggcaggcagctccacctgctgccccagtgctggatccactgggtgaagccagctgggctcctgagtctggtggggacttggagaacctttatgtctagctaagggattgtaaatacaccgatgggcactctgtatctagctcaaggtttgtaaacacaccaatcagcaccctgtgtctagctcagtgtttgtgaatgcaccaatccacactctgtatctggctactctggtggggacttggagaacctttgtgtccacactctgtatctagctaatctagtggggatgtggagaacctttgtgtctagctcagggatcgtaaacgcaccaatcagcaccctgtcaaaacagaccacttgactctctgtaaaatggaccaatcagcaggatgtgggtggggcgagacaagagaataaaagcaggctgcctgagccagcagtgacaacccccctcgggtcccctcccacgccgtggaagctttgttctttcgctctttgcaataaatcttgctactgcccaaaaaaaaaaaaaaaaaa

SEQ ID NO: 402393 - DNA, 1000 bp, Homo Sapiens; identical to SEQ ID NO: 291018

SEQ ID NO: 402394 - DNA, 1000 bp, Homo Sapiens; identical to SEQ ID NO: 291019

SEQ ID NO: 402395 - DNA, 1000 bp, Homo Sapiens; identical to SEQ ID NO: 291020

SEQ ID NO: 402396 - DNA, 1000 bp, Homo Sapiens; identical to SEQ ID NO: 223449

SEQ ID NO: 402397 - DNA, 1000 bp, Homo Sapiens; identical to SEQ ID NO: 223450

SEQ ID NO: 402398 - DNA, 1000 bp, Homo Sapiens
ggacaagaaggactttgcccgtgagatgacgaaaatgaagatgttcaagagccagctgaccctcatggagcacaactacctgattgagtatcaaggtcaaggatgcagtgtgcacttcccatttgccttttcccccatcacaccagagactctcctatggcaggacatttctctactatcagactgtggattcctttggagaagaagggaattgtctttctaaagagcacaaaattctcagagaagctgctatcagaaagtggctccacggcaagctgcacccaggccactctctggtctccaataccaagcaagcccgggccaccgccctctccaagaccccagagcaacgggaatcgcagcgttccaggagcttccacccctctgtggatgcacgcctgcaatgcattccacagcccacggagatgcccaagcccatctacaggaagcccacggtcaagcggcccgcgatgtggaatgttagcaacaaccccgccagaccccccaccacccagatcagccactcgcagggcatccgcctgggcgtgcatccagaccccactccggagcacgacttcagcagcttcctggaggtgaggcctgatgggcacggcggtgcgcggctgcacacagtggacggccactgggtggcgcccgtgccgcggctgccttttgaggtgctgctgcgcatgctgtacccacgtgtatggccatacagaatgaaggtgccccagggcttttaccccatcagcatgagggaagtgcccaggaagcggcacctgggtgacaacaccttctggaccgacactctggccatgaacctgcgtgacacattcgatgaagccttcctggcagctgtgcgatctcatcaaggactccccaccctgccctccccacaaaccaacccataaatttattatggctacctctccccctgaggcagcccagtgaaaaaaaaaaaaaaaaaaaaaaaaaaaaaaaaaaaaaaaaaaaaaaaaaa

SEQ ID NO: 402399 - DNA, 1000 bp, Homo Sapiens; identical to SEQ ID NO: 291024

SEQ ID NO: 402400 - DNA, 1000 bp, Homo Sapiens; identical to SEQ ID NO: 223451

SEQ ID NO: 402401 - DNA, 1000 bp, Homo Sapiens; identical to SEQ ID NO: 118091

SEQ ID NO: 402402 - DNA, 1000 bp, Homo Sapiens; identical to SEQ ID NO: 223453

SEQ ID NO: 402403 - DNA, 1000 bp, Homo Sapiens; identical to SEQ ID NO: 223454

SEQ ID NO: 402404 - DNA, 1000 bp, Homo Sapiens
agtgtttgataaaaatgaactgttctaatatttatttttatggcatctcatttttcaatacatgctcttttgattaaagaaacttattactgttgtcaactgaattcacacacacacaaatatagtaccatagaaaaagtttgttttctcgaaataattcatctttcagcttctctgcttttggtcaatgtctaggaaatctcttcagaaataagaagctatttcattaagtgtgatataaacctcctcaaacattttacttagaggcaaggattgtctaatttcaattgtgcaagacatgtgccttataattatttttagcttaaaattaaacagattttgtaataatgtaactttgttaataggtgcataaacactaatgcagtcaatttgaacaaaagaagtgacatacacaatataaatcatatgtcttcacacgttgcctatataatgagaagcagctctctgagggttctgaaatcaatgtggtccctctcttgcccactaaacaaagatggttgttcggggtttgggattgacactggaggcagatagttgcaaagttagtctaaggtttccctagctgtatttagcctctgactatattagtatacaaagaggtcatgtggttgagaccaggtgaatagtcactatcagtgtggagacaagcacagcacacagacattttaggaaggaaaggaactacgaaatcgtgtgaaaatgggttggaacccatcagtgatcgcatattcattgatgagggtttgcttgagatagaaaatggtggctcctttctgtcttatctcctagtttcttcaatgcttacgccttgttcttctcaagagaaagttgtaactctctggtcttcatatgtccctgtgctccttttaaccaaataaagagttcttgtttctgaagaaaaaaaaaaaaaaaaaaaaaaaaaaaaaaaaaaaaaaaaaaaaaaaaaaaaaaaaaaaaaaaaaaaaaaaaaaaaaaaaaa

SEQ ID NO: 402405 - DNA, 1000 bp, Homo Sapiens; identical to SEQ ID NO: 291029

SEQ ID NO: 402406 - DNA, 1000 bp, Homo Sapiens; identical to SEQ ID NO: 291031

SEQ ID NO: 402407 - DNA, 1000 bp, Homo Sapiens; identical to SEQ ID NO: 223455

SEQ ID NO: 402408 - DNA, 1000 bp, Homo Sapiens; identical to SEQ ID NO: 118093

SEQ ID NO: 402409 - DNA, 1000 bp, Homo Sapiens; identical to SEQ ID NO: 291035

SEQ ID NO: 402410 - DNA, 1000 bp, Homo Sapiens; identical to SEQ ID NO: 223457

SEQ ID NO: 402411 - DNA, 1000 bp, Homo Sapiens; identical to SEQ ID NO: 118094

SEQ ID NO: 402412 - DNA, 1000 bp, Homo Sapiens; identical to SEQ ID NO: 118095

SEQ ID NO: 402413 - DNA, 1000 bp, Homo Sapiens; identical to SEQ ID NO: 118096

SEQ ID NO: 402414 - DNA, 1000 bp, Homo Sapiens; identical to SEQ ID NO: 118097

SEQ ID NO: 402415 - DNA, 1000 bp, Homo Sapiens; identical to SEQ ID NO: 291040

SEQ ID NO: 402416 - DNA, 1000 bp, Homo Sapiens; identical to SEQ ID NO: 291041

SEQ ID NO: 402417 - DNA, 1000 bp, Homo Sapiens; identical to SEQ ID NO: 291042

SEQ ID NO: 402418 - DNA, 1000 bp, Homo Sapiens; identical to SEQ ID NO: 291043

SEQ ID NO: 402419 - DNA, 1000 bp, Homo Sapiens
cctgggcatcctgaaggccgtgaacgactccatgcacctcatcgctatcaccggctatgacgggaatctcggcgacctgggcaagctgctgatgcagggctcgttcagcgtctggaccgaccacaagaggggccacaccaaggtgaaggagctggccaggttcaagcccatgcagcggcacctgttcctgcacgagaaggcagtgctcttctgcaagaagagggaggagaatggggaggggtatgagaaagctccctcctacagctacaagcagtccttaaacatggctgccgttggcattacggagaacgtgaagggagatgctaagaagttcgagatctggtacaacgcgcgcgaggaggtctacatcgtccaggcgccaactcctgagattaaagccgcgtgggtgaatgaaattcggaaagtgctgaccagccagctgcaggcttgtagagaagccagccagcaccgggcgctggagcagtcacagagcctgcccctgccggccccgaccagcaccagtccctcaagaggaaactcaaggaacatcaagaagctggaagaaaggaaaacagaccccctaagcctggagggatacgtcagctcagcgccactgacaaagccccccgaaaagggcaaagagccctaggaccccacagaagagcccctccctctccattgctctgcacccctgcatcagcaaggccagccccagaaggagcctcggccgagcgtgcaacccggagccgccttgggccctccctgcgacagccggacccgcctccgcatcgggttgcgatgccctctgcatagtttctttctcttccttcatagatgacacggtcactagctctgcctcagaaagctctgcgctttccagaaagcgctttaccctgcagggttttgctaacctcaaaggtcagaaaggtaaaagtagtgcctgccccaaaaaaaaaaaaaaaaaaaaaaaaaaaaaaaaaaaaaaaaaaaaaaaaaaaaa

SEQ ID NO: 402420 - DNA, 1000 bp, Homo Sapiens; identical to SEQ ID NO: 223458
  misc_feature (601)..(601): n is a, c, g, or t

SEQ ID NO: 402421 - DNA, 1000 bp, Homo Sapiens; identical to SEQ ID NO: 223459

SEQ ID NO: 402422 - DNA, 1000 bp, Homo Sapiens; identical to SEQ ID NO: 223460

SEQ ID NO: 402423 - DNA, 1000 bp, Homo Sapiens; identical to SEQ ID NO: 291046

SEQ ID NO: 402424 - DNA, 1000 bp, Homo Sapiens; identical to SEQ ID NO: 291047

SEQ ID NO: 402425 - DNA, 1000 bp, Homo Sapiens; identical to SEQ ID NO: 291048

SEQ ID NO: 402426 - DNA, 1000 bp, Homo Sapiens; identical to SEQ ID NO: 223461

SEQ ID NO: 402427 - DNA, 1000 bp, Homo Sapiens
tacatccaagaattgcaggaaccctccttgcaattacattgtggtaacagcagactcatcacagtgtgcaaacaactgtggatttagttacagacaaaggattacatattgcaccgagatcccatctactaagaaacataagctccatcgacttcggcctatagtttatcaagaatgccctgtggtgccttcctctcaggtttaccaatgcattaacagctgtttgcatttggccacttggaaagttggaaaatggagcaagtgctcagtgacttgtggaattgggataatgaagagacaagtgaaatgcattaccaaacatggtttgtccagtgacttatgtttaaaccatttaaaaccaggtgctcaaaagaaatgttatgccaatgactgtaaatcatttaccacctgcaaagaaattcaagtgaaaaaccacattagaaaggatggtgactattaccttaacattaagggaagaataataaagatttattgtgcagacatgtacttggagaaccctaaggaatatttaacactggtccaaggtgaagaaaacttttctgaagtgtatggctttaggctaaaaaatccatatcaatgtccttttaatgggagtagaagggaagactgtgaatgtgacaatggacacttagctgctggatacactgttttcagcaaaataagaattgatctcacttccatgcaaattaaagctacggaccttcttttttccaaaacaatatttggaaatgcagttccatttgccacagctggagattgctacagtgctttcagatgcccacagggacagtttagcattaatttgtcaggaactgggatgaagatatccagcacagcaaagtggctcactcaggggagttatacctctgtcagcatacgaagatcacaggatggaactagatttttcggcaaatgtggagggtactgtggaaagtgtcttcctcacatgactactggtctcccaattcaagtcatatga

SEQ ID NO: 402428 - DNA, 1000 bp, Homo Sapiens; identical to SEQ ID NO: 291051

SEQ ID NO: 402429 - DNA, 1000 bp, Homo Sapiens; identical to SEQ ID NO: 223463

SEQ ID NO: 402430 - DNA, 765 bp, Homo Sapiens
atgacgccgcggaggcggccccgtccccgcgctcccgcccctcccgccagggcagcccgggaggccagacgttgacgctgcagggagagggtggtgggcgcagccgctagggggcgcggcggggcggagcgcacctttccgcgggccgcggggatggcggcgcagggcgtagggcctgggccggggtcggcggcgcccccggggctggaggcggcccggcagaagctggcgctgcggcggaagaaggtgctgagcaccgaggagatggagctgtacgagctggcgcaggcggcgggcggcgctatcgaccccgacgtgttcaagatcctggtggacctgctgaagctgaacgtggcccccctcgccgtcttccagatgctcaagtccatgtgtgccgggcagaggctagcgagcgagccccaggaccctgcggccgtgtctctgcccacgtcgagcgtgcccgagacccgagggagaaacaaaggcagcgctgccctcgggggagcattggccctggcggaacgcagcagccgcgaaggatccagccagaggatgccacgccagcccagcgctaccaggctgcccaaggggggcgggcctgggaagagccctacacggggcagcacctaggatggggcagagacttgttgcatctttgtccccagcaaaggctacatgttacctccttcaattgataataaacctttctgagatgcagagggtccaggtcaaaaaaaaaaaaaaaaaaaaaaaaaaaaaaaaaaa

SEQ ID NO: 402431 - DNA, 1000 bp, Homo Sapiens
tctccaaatacagtccatattgggaattagggtttcaacaatatgaatagggagggagagcacaattcagtccatagcactgtagaatacgtgtttctataataataatggggtagctctgttgtttctccaagctgagttctagcactaagcaaagagtcctttatttagcagacgtttgattgttgtagtgttcatagagtcatgggcttatcgctcgttttaacttcttgtcctgccatcttggaaagatctatcaggagacataatcagcctatattatgaaaagagacctggaagtgagttcatggaagtctaaatcagtaatttagaggatagtgacactcaatcagtttgtagtttgcagtgcccctaatctcatcctaatgacctacaggaattttcagtgaaataagataggaaatcaattatcatttaccctcttcctgtggttttgggaggccaccctctaccttcttgcctttttgtctaagcctttctaatcagcatttacctcccactttgacttcaaggctttgggaaaataccaagtagctcctctcctgaagtaaattttatgtaacctattcccttcattgagcaccacagactgactctcaacccaaagtcttccaccagccaatcagtgcacatcctgtgtcatcaatgtaaaaatctgttaaaaatctgcatttaggttgggcacggtggctcacgcttgtaatcccagcactttgggaggccaaggtgggcggatcacctgaggtcaggagttcgagaccagcctgaccaacatggagaaaccccatctctcccgaaaatacaaaattagccaggcgtggtggtgcatgcctataatcccaggtacttgggaggctgaggcaggagaatcacttgaacccaggaggcagagattgcagtgagctgagatcatgccattgcactccagcctgggcaacaagagaagaaactccatctcaaaaaaaaaaaaaaaaaaaaa

SEQ ID NO: 402432 - DNA, 1000 bp, Homo Sapiens; identical to SEQ ID NO: 291056

SEQ ID NO: 402433 - DNA, 1000 bp, Homo Sapiens; identical to SEQ ID NO: 291057

SEQ ID NO: 402434 - DNA, 1000 bp, Homo Sapiens; identical to SEQ ID NO: 118098

SEQ ID NO: 402435 - DNA, 1000 bp, Homo Sapiens
ggcgccaggagagtccgcgccctggtctcccactcggagggcgccaaccacacgctgctgcgcttctccgctggggacgtggtggaggtgttggtgcccgaggcccagaacggctggctctacggcaagctggagggctcgtccgcgagcggttggttccccgaggcgtacgtgaaggctctggaggaggggcccgtgaatcccatgacccccgtgacccccatgacctccatgacctccatgtcccccatgacacccatgacacccatgaaccccgggaacgagctgccttccaggtcctacccactccggggcagccacagcctcgatgacctcctggaccggccgggcaactccaccccaagccgggtgccaagccgtgcccccagccctgcacctccacccttgcccagcagccgccgcagcagcatgggcagcacagcagttgccactgacgtcaagaaactgatgtcctcagagcagtacccaccacaggagctcttcccgaggggcacaaatccttttgccactgtcaagcttcgtcccaccatcaccaatgaccgctcagcacccctcatccgctgaggcggggtccgaggtcgtaccccacagtgcacctgcccaggggctgttcagagctggcaatggcagcgacagcagcaacagcagcagatccaagaagcgggtccctgagacggggggtggctgccctccccagaccaccccggcagcctgagcagctccaaagcactggcttggggtccgagaccttcaaagtaaagcaggcggaatggggggacaggacaatttctccccctccaggggctccaggactctccctggggggcccacctcttgccccctaacctctttcccccttttctgcccccgtggggaggagccccttgtacctgctccgtgcccaacacatgccctctctgtacatcttttgtaaatgatgagaaataaaggaagtggacgcaaaaaaaaaaaaaaaaaa

SEQ ID NO: 402436 - DNA, 1000 bp, Homo Sapiens; identical to SEQ ID NO: 223464

SEQ ID NO: 402437 - DNA, 1000 bp, Homo Sapiens
gaagatattttctgaaaatagtttaaagtctgaagaacctatcctatggaccaagggtgagattcttggaaagggagcctacggcacagtatactgtggtctcactagtcaaggacagctaatagctgtaaaacaggtggctttggatacctctaataaattagctgctgaaaaggaataccggaaactacaggaagaagtagatttgctcaaagcactgaaacatgtcaacattgtggcctatttggggacatgcttgcaagagaacactgtgagcattttcatggagtttgttcctggtggctcaatctctagtattataaaccgttttgggccattgcctgagatggtgttctgtaaatatacgaaacaaatacttcaaggtgttgcttatctccatgagaactgtgtggtacatcgcgatatcaaaggaaataatgttatgctcatgccaactggaataataaagctgattgactttggctgtgccaggcgtttggcctgggcaggtttaaatggcacccacagtgacatgcttaagtccatgcatgggactccatattggatggccccagaagtcatcaatgagtctggctatggacggaaatcagatatctggagcattggttgtactgtgtttgagatggctacagggaagcctccactggcttccatggacaggatggccgccatgttttacatcggagcacaccgagggctgatgcctcctttaccagaccacttctcagaaaatgcagcagactttgtgcgcatgtgcctgaccagggaccagcatgagcgaccttctgctctccagctcctgaagcactccttcttggagagaagtcactgaatatacatcaagactttcttcccagttccactgcagatgctcccttgcttaattgtggggaatgatggctaagggatctttgtttccccactgaaaattcagtctaacccagtttaagcagatcctatggagtcattaactgaaagt

SEQ ID NO: 402438 - DNA, 1000 bp, Homo Sapiens; identical to SEQ ID NO: 291060

SEQ ID NO: 402439 - DNA, 1000 bp, Homo Sapiens
tgccaccccgcctgggcatctgcctggactatgagcggggccgggtttccttcctggatgctgtttccttccgtgggctcttggagtgccccctggactgctcagggcctgtgtgccctgccttttgcttcatcgggggtggcgcagtacagctccaggagccagtgggcactaagcctgagaggaaagtcaccattgggggcttcgccaagctggactgagccttccaggcccctcatgcagacctggggtcctcctgggccctggcccccaaacctcttggcacccggttgttaccccctggcagcttctcccccaaactctcctaccatgtggccctgctccttctcccgtgtctgtcttcccacagttttctcttgacccaggggctctcttctgcccacctctctggatggcccccgttctctccattgcttgttagccaggcccccacccccactgagtctgccctatgacctgcctttggcatgttacccaagccatggagagagccccttctccatccctgtcctgtgccccccaggctgattgggagggagggcacctggaacactgggcatgatctccagctctgcccttgccctgccaagctccctgccctgttgatgctgaactacagccttgggacaggcaggctttggggctggacgctgtccaggcattcctggtgaggggaaggggaccctgtcatcctgctttatttatttgggtcccaacaccccgcagccgcatgccccttatgtccctcttctccctcttgcatgctttacctgtcccacacccatgccaatgtgccaagtctcccttggggacccagctgagtctgggtgttcccattgggttgggccaggcaaggcctctggtgcccgctgccgtccccctgcagtgggctctgctaggcctgtgctgagcaacagctgttattgtcatggtttataaacaataaactgtgatgccaggcacatctctgccttccctg

SEQ ID NO: 402440 - DNA, 1000 bp, Homo Sapiens; identical to SEQ ID NO: 223465

SEQ ID NO: 402441 - DNA, 1000 bp, Homo Sapiens; identical to SEQ ID NO: 223466

SEQ ID NO: 402442 - DNA, 1000 bp, Homo Sapiens; identical to SEQ ID NO: 291063

SEQ ID NO: 402443 - DNA, 1000 bp, Homo Sapiens; identical to SEQ ID NO: 291064

SEQ ID NO: 402444 - DNA, 1000 bp, Homo Sapiens; identical to SEQ ID NO: 118099

SEQ ID NO: 402445 - DNA, 963 bp, Homo Sapiens
ctcagcttgcgccgccgccgccgccgccgccgccgcgcacgccatgggagccgtgactgacgacgaagttatacggaagcgtctcctcattgatggagatggtgctggaggtgatcggagaattaatctgctagtgaagagtttcattaaatggtgcaactctgggtcccaggaggagggatatagccagtaccaacgtatgctgagcacgctgtctcaatgtgaattttcaatgggcaaaactttactagtatatgatatgaatctcagagaaatggaaaattatgaaaaaatttacaaggaaatagaatgtagcatagctggagcacatgaaaaaattgctgagtgcaaaaagcaaattcttcaagcaaaacgaatacgaaaaaatcgccaagaatatgatgctttggcaaaagtgattcagcaccatccagacaggcatgagacattaaaggaactagaggctctgggaaaagaattagagcatctttcacacattaaagaaagtgttgaagataagctggaattgagacggaaacagtttcatgttcttcttagtaccatccatgaacttcagcaaacattggaaaatgatgaaaaactctcagaggtagaagaagctcaggaagcaagcatggaatcagatcctaagccatagacaggctaattgcccaccactcccaggaatattgaaatagctacatgaccataatgtgtttaaaatgtggtatgctcttgagatatttaaagttttggcagtaaaatactctgtttttaagtatgaatgtatttcattcatatttcctctcacaaaggaaaatgacttcagtatagatttgtttttattaaaatgcattttttattcttaagtggtaggaagcaacatccaaaaatgcttaataaaatgcttttaagctgcaaaaaaaaaaaaaaaaaaaaaaaaaaaaaaaaaaaaaaaaaaaa

SEQ ID NO: 402446 - DNA, 1000 bp, Homo Sapiens; identical to SEQ ID NO: 291066

SEQ ID NO: 402447 - DNA, 1000 bp, Homo Sapiens
ctgtgcggacgcagggtcaccgtgctccgggttttctgacagttggtgtttcctgggcctttggagtggctgcgaggcctgaacgccttgtggatccgctgtgtccagcccggctgagcatcgccagggctagctcatgctgctcttgtcagcctctggttctcctcgagtccttggggacgtggcagatgccagcgaccatcagacaacgtggaggccctcatgggcaatggctgagggggccgggctgaggctgtgcacatgcagtctgcacgccactcttgggctctgctggcggagatccccttccttctgggtgcagactgcacctccggatgcagttttgatgtccatcttccaggagagagacggtctcgggtccagggagtggagggggctgcccctgccgtgcaggtcctggccgatggcgccttaccctgctgccctgggcttttggcctgaagcaaattcctgagtggggggtactggggcctgccgcatcctgtcctgtccactgcccacccccgtgtgctggctccctcacttctggctgcagtgggagccgccagtctgacccttgtcaccgcacgctctgcccccaccccgttgcaagaggtcacaccatgtcagcagccttgcactgaccgcagccggcccccaggcctcagagttctggatgcttccgtgcggctccaacaggcatcgtcttcccttccgcaggtggaggggccgcttcccgcaggcatctgagctctgtgccggggccgtggccatgggaagatgttccacgctgcctcctcctcgagttttcctcggaaacactcttgaatgtctgagtgagggtcctgcttagctctttggcctgtgagatgctttgaaaatttttatttttttaagatgaagcaagatgtctgtagcggtaattgcctcacattaaactgtcgccgactgcaaaaaaaaaaaaaaaaaaaaaaaaaaaaaaaaaaaaaaaaaaaaaaaa

SEQ ID NO: 402448 - DNA, 1000 bp, Homo Sapiens; identical to SEQ ID NO: 223467

SEQ ID NO: 402449 - DNA, 1000 bp, Homo Sapiens; identical to SEQ ID NO: 118100

SEQ ID NO: 402450 - DNA, 1000 bp, Homo Sapiens; identical to SEQ ID NO: 118101

SEQ ID NO: 402451 - DNA, 1000 bp, Homo Sapiens; identical to SEQ ID NO: 291070

SEQ ID NO: 402452 - DNA, 1000 bp, Homo Sapiens; identical to SEQ ID NO: 118102

SEQ ID NO: 402453 - DNA, 1000 bp, Homo Sapiens; identical to SEQ ID NO: 118104

SEQ ID NO: 402454 - DNA, 1000 bp, Homo Sapiens; identical to SEQ ID NO: 223469

SEQ ID NO: 402455 - DNA, 1000 bp, Homo Sapiens; identical to SEQ ID NO: 118105

SEQ ID NO: 402456 - DNA, 1000 bp, Homo Sapiens; identical to SEQ ID NO: 223471

SEQ ID NO: 402457 - DNA, 1000 bp, Homo Sapiens; identical to SEQ ID NO: 118107

SEQ ID NO: 402458 - DNA, 1000 bp, Homo Sapiens; identical to SEQ ID NO: 291079

SEQ ID NO: 402459 - DNA, 1000 bp, Homo Sapiens; identical to SEQ ID NO: 118108

SEQ ID NO: 402460 - DNA, 1000 bp, Homo Sapiens; identical to SEQ ID NO: 118109

SEQ ID NO: 402461 - DNA, 1000 bp, Homo Sapiens; identical to SEQ ID NO: 223473

SEQ ID NO: 402462 - DNA, 1000 bp, Homo Sapiens; identical to SEQ ID NO: 223474

SEQ ID NO: 402463 - DNA, 961 bp, Homo Sapiens
aaaaaaaaaaaaaaaaaaacaatgcgggggcggggcagcggcgacgctgggtgtgtgggcgcaaatggcggcggcgcacggcgcctgagcgggccggggccatgagcgccgcccggccccagttcagcattgatgatgccttcgagctgtccctggaggacgggggccctgggcccgagtccagcggggtcgcgcgctttgggccgctgcacttcgagcgtcgggcccggttcgaggtggctgacgaggacaagcagtcccggctgcgctaccagaacctggagaacgatgaggatggagcccaggcctctccggagccggatgggggagtcggcaccagggattccagccgaacttccatccgcagctcccagtggtccttcagcaccatcagcagcagcacccagcgctcctacaacacctgctgcagctggacccaacaccctttgatccagaagaaccgccgagtggtgctggcctccttcctgctcctgctgctggggctggtgctgatcctggtcggcgtgggactggaggcgaccccctctccaggtgtctccagcgccatcttcttcgtgccgggcttcctgttgttggtgcctggagtctatcacgtgatcttcatctactgcgcggtcaagggccaccggggcttccagttcttctacctgccctacttcgagaagtgatcgcggcgcagcgtggaccccttgcgcccatgggggcgcccctcttgccctgttccgttcccctcatctcaagggaagaggccctccaggaccctcgaaaccccagcccctagggagtttgctcaggaagttcggggcatgcaggcctggccctgggaaagccgcccgtcgcctgctctgtgccttaacttattctcgggccgtgcggctgctaggttgctgttattttgtgctaataaaagagtaattaattccaaaaaaaaaaaaaaaaa

SEQ ID NO: 402464 - DNA, 1000 bp, Homo Sapiens; identical to SEQ ID NO: 118110

SEQ ID NO: 402465 - DNA, 1000 bp, Homo Sapiens; identical to SEQ ID NO: 118111

SEQ ID NO: 402466 - DNA, 1000 bp, Homo Sapiens; identical to SEQ ID NO: 291085

SEQ ID NO: 402467 - DNA, 1000 bp, Homo Sapiens; identical to SEQ ID NO: 223476

SEQ ID NO: 402468 - DNA, 1000 bp, Homo Sapiens; identical to SEQ ID NO: 118112

SEQ ID NO: 402469 - DNA, 1000 bp, Homo Sapiens; identical to SEQ ID NO: 118113

SEQ ID NO: 402470 - DNA, 1000 bp, Homo Sapiens; identical to SEQ ID NO: 291089

SEQ ID NO: 402471 - DNA, 1000 bp, Homo Sapiens; identical to SEQ ID NO: 291090

SEQ ID NO: 402472 - DNA, 1000 bp, Homo Sapiens; identical to SEQ ID NO: 118114

SEQ ID NO: 402473 - DNA, 1000 bp, Homo Sapiens
atagccacaaccagaggagtgtgcttcagttgctgcactccacgagcgacgtggtgcggcagtacatggccaggctcatcaatgcttttgcgtcactggcagaaggtcgcctctaccttgcccagaacacaaaggtgctgcagatgctggagggaaggctgaaggaggaggacaaggatatcatcaccagggagaatgttcctggggccctgcagaagttcagtctcaggcgcccgctgcagacagcgatgattcaagacggcctcatcttctggctggttgatgttctgaaggaccctgactgcctgtctgactacacgctggagtactcggtggctttgctcatgaacctctgcctccgcagcacagggaagaacatgtgtgccaaggtggcaggcctcgtgctcaaagtcctttcggatcttcttggccatgaaaaccatgagatacagccgtatgtgaatggagctctgtacagcatcctttctgttccatccattcgtgaggaagcaagagcaatgggaatggaagacatcctacgctgcttcatcaaagaaggcaatgctgaaatgatccgccagatagaattcatcatcaagcagctaaattccgaagagctaccagatggtgttcttgaatctgatgatgatgaagatgaagatgatgaagaggaccatgacatcatggaagccgatctggacaaagacgaactgatccagccccagctcggagaactctcaggagagaagcttctgaccacggagtacctggggatcatgaccaacacggggaagacaaggcggaaggggctggctaatgtgcagtggagcggggatgagcccctgcaaaggcccgtcacccccggcggccacagaaacgggtacccagtgtaagtcagggctaaaggaagcgggaattgactttcttaagctttgttttgattacagtgtaagatgtatgtatttttaaaattcaaaatagagcattcattttgaaaggc

SEQ ID NO: 402474 - DNA, 1000 bp, Homo Sapiens; identical to SEQ ID NO: 118115

SEQ ID NO: 402475 - DNA, 1000 bp, Homo Sapiens; identical to SEQ ID NO: 291093

SEQ ID NO: 402476 - DNA, 1000 bp, Homo Sapiens; identical to SEQ ID NO: 291094

SEQ ID NO: 402477 - DNA, 1000 bp, Homo Sapiens; identical to SEQ ID NO: 118116

SEQ ID NO: 402478 - DNA, 1000 bp, Homo Sapiens; identical to SEQ ID NO: 223479

SEQ ID NO: 402479 - DNA, 1000 bp, Homo Sapiens; identical to SEQ ID NO: 291098

SEQ ID NO: 402480 - DNA, 1000 bp, Homo Sapiens; identical to SEQ ID NO: 291099

SEQ ID NO: 402481 - DNA, 1000 bp, Homo Sapiens; identical to SEQ ID NO: 223481

SEQ ID NO: 402482 - DNA, 1000 bp, Homo Sapiens; identical to SEQ ID NO: 291101

SEQ ID NO: 402483 - DNA, 1000 bp, Homo Sapiens; identical to SEQ ID NO: 118118

SEQ ID NO: 402484 - DNA, 1000 bp, Homo Sapiens; identical to SEQ ID NO: 118119

SEQ ID NO: 402485 - DNA, 1000 bp, Homo Sapiens; identical to SEQ ID NO: 291105

SEQ ID NO: 402486 - DNA, 1000 bp, Homo Sapiens; identical to SEQ ID NO: 118121

SEQ ID NO: 402487 - DNA, 1000 bp, Homo Sapiens
agaaaatcagctcctgaccctgcctaaaagcattggaaaactaaagaagttgagcaacttgaatgcagacagaaataaattagtgtccttaccaaaagaggtatgtgcttttagagaaatcacatgataataattatgaagaaataataataatacataagggatcaaaaatgtcaaatgctttgaaaagacgcatgtgttgttttttaaaggtgtgaactctaaatctgtgagtatagagccaactggaggaattatgtcaaagaatgatcatcagtaacattaaggagagttggaaaaggtgaatttataggattttaaatgggagaaagaaagagattgacattttgggtttgatatacagagaatggtgacaccattggcagaaattgataatttgggagtttgacagaggaagtggatgcctttgggtttgatttttgaatttaatgtgaaattaagctccatcccataagcaattggaattataaaaattgatcttgatgcaaccatatttctgggcagagatttacattgggccatgctcatgtcttggatgaggttgaacaaactgttcacaaaggcatacacatagaggaaggtgaatgggaagctaaagccagcttcctaggactttttttttggttagtagtctaagcacgagaaaatgagacatcaccatctgttgtggagagtagctgtatggactgagaggcatttaaattctggcaagggaggtggaaatgctgacaatgaggaggaagcttatagtgggtcaaacaaggaggtgtctagtgtgttgtttaaaaagaaggcttacaattagccaggcgtggtggcgggcgcctgtagtcccagctactcgggaggctgaggcaagagaattgcctgaacccgggaggctaaggttgcagtgagccgagaccacgccactgcactccagcccgggtgacagagcgagactctatctcaaaaaaaaaaaaaaaaaaaaaaaaaaatg

SEQ ID NO: 402488 - DNA, 1000 bp, Homo Sapiens; identical to SEQ ID NO: 291107

SEQ ID NO: 402489 - DNA, 1000 bp, Homo Sapiens; identical to SEQ ID NO: 291108

SEQ ID NO: 402490 - DNA, 1000 bp, Homo Sapiens; identical to SEQ ID NO: 223482

SEQ ID NO: 402491 - DNA, 1000 bp, Homo Sapiens; identical to SEQ ID NO: 118122

SEQ ID NO: 402492 - DNA, 1000 bp, Homo Sapiens; identical to SEQ ID NO: 291111

SEQ ID NO: 402493 - DNA, 1000 bp, Homo Sapiens; identical to SEQ ID NO: 291112

SEQ ID NO: 402494 - DNA, 1000 bp, Homo Sapiens; identical to SEQ ID NO: 223483

SEQ ID NO: 402495 - DNA, 1000 bp, Homo Sapiens
ttgctggtgggatgttcttgaaaagaagtcgcgttaagaagcctggacaagaagtctttaaaagtgaactatctgaatatatcaaggccgaggagctgtacattggagtcacggtgaatgtgaatggttacctatttcgtttgctcaatgctgatgagtataccttaaactacatggagcagaatacagataagtatcctttcagtaacctcaaacttgccctacaaaagctgaagcaagaagaaggaaaatccagagagctcaagcaggtatttaaagctgctgactctaagcacacaaatatggtggattataatacattcagagacatattgatgtctttgactgttggaaaccttgcagagcaagaatttgtaaccattgcacgtcactaccgtgtgcctgagggcacatgttcagatatggatttcttaatcgcactggcccacgaaaagttcaagaaaaatatgtttgagaatttcgacactttcatttattcctgtgtgtatgaagatcgagaaaaaaaaaatgtattacccaccaaagacattaaaaggctgtgcaaatcctccagattacctttgagtgatgatcttctagaatccttattgtcaaggtttgaagacagtgaaaaacaaatagattataagtcatttttctctgccctgaactggagaaagaatccagtgcctgaattgcaaccagcatcataccttaaagagagatgtgaagatgtttggcttggtatgccatcacctattcctgcgaaatacattgactactggacctttttgaaggacgcgtttggcttagaggaggaataaccatgccagttttggtcaattctctatgatttacttctctcattttgccacatttactttagtagatataatttcattaaaaacaaaaaagaaacaaggtttatattaaatggaaatccataaaccacaaaaaaaaaaaaaaaaaaaaaaaaaaaaaaaaaaaaaaaaaaaaaaaa

SEQ ID NO: 402496 - DNA, 1000 bp, Homo Sapiens; identical to SEQ ID NO: 223484

SEQ ID NO: 402497 - DNA, 1000 bp, Homo Sapiens; identical to SEQ ID NO: 223485

SEQ ID NO: 402498 - DNA, 1000 bp, Homo Sapiens; identical to SEQ ID NO: 223486

SEQ ID NO: 402499 - DNA, 1000 bp, Homo Sapiens; identical to SEQ ID NO: 223487

SEQ ID NO: 402500 - DNA, 1000 bp, Homo Sapiens; identical to SEQ ID NO: 291119

SEQ ID NO: 402501 - DNA, 1000 bp, Homo Sapiens; identical to SEQ ID NO: 291120

SEQ ID NO: 402502 - DNA, 1000 bp, Homo Sapiens; identical to SEQ ID NO: 118123

SEQ ID NO: 402503 - DNA, 1000 bp, Homo Sapiens; identical to SEQ ID NO: 291122

SEQ ID NO: 402504 - DNA, 1000 bp, Homo Sapiens; identical to SEQ ID NO: 118124

SEQ ID NO: 402505 - DNA, 1000 bp, Homo Sapiens; identical to SEQ ID NO: 223488

SEQ ID NO: 402506 - DNA, 1000 bp, Homo Sapiens; identical to SEQ ID NO: 118126

SEQ ID NO: 402507 - DNA, 761 bp, Homo Sapiens; identical to SEQ ID NO: 57058

SEQ ID NO: 402508 - DNA, 1000 bp, Homo Sapiens; identical to SEQ ID NO: 291126

SEQ ID NO: 402509 - DNA, 1000 bp, Homo Sapiens; identical to SEQ ID NO: 223490

SEQ ID NO: 402510 - DNA, 1000 bp, Homo Sapiens; identical to SEQ ID NO: 291127

SEQ ID NO: 402511 - DNA, 1000 bp, Homo Sapiens; identical to SEQ ID NO: 291128

SEQ ID NO: 402512 - DNA, 1000 bp, Homo Sapiens; identical to SEQ ID NO: 118128

SEQ ID NO: 402513 - DNA, 1000 bp, Homo Sapiens; identical to SEQ ID NO: 223491

SEQ ID NO: 402514 - DNA, 1000 bp, Homo Sapiens; identical to SEQ ID NO: 291130

SEQ ID NO: 402515 - DNA, 1000 bp, Homo Sapiens; identical to SEQ ID NO: 118129

SEQ ID NO: 402516 - DNA, 1000 bp, Homo Sapiens; identical to SEQ ID NO: 291132

SEQ ID NO: 402517 - DNA, 1000 bp, Homo Sapiens
tgcccacggatgccaccccttttgtgttgccaaggcatgtgggtaccgagggctccatggccaccgtgggcctctcccagcagctgtttgactctgcgctcctgctgctgcagaaggccggtgccctcaacctggacatcacagggcagctgaggtcggatgacaacctgctgaacacctctgctctgggccggctcatcccggaggtggcccgccagtttcccgagcccatgcctgtggtgctcaaggtgcggctgggtgccacacctgtggccatgctccacacaaacaacgccaccctgcggctgcagcccttcgtggaggtcctggccacagcctccaactcggctttccagtccctcttctccctggatgtggtagtgaacttgagactccagctctctgtgtccaaggtgaagcttcaggggaccacgtctgtgctgggggatgtccagctcacggtggcctcctccaacgtgggcttcattgatacagatcaggtgcgcacactgatgggcaccgtttttgagaagcccctgctggaccatctcaatgctctcttggccatgggaattgccctccctggtgtggtcaacctccactatgtcgcccctgagatctttgtctatgagggctacgtggtgatatccagtggactcttctaccagagctgaggcaagaccactgggaggcctgagagtgggccagctcgctgctcaggcgaatttctcatttcaagccactggggaaactgaggcaaaaccatacttagtcatcaccaacaagctggactgcttagctgggctgttttatcttccctgagtgcctgggtctccctccctcacttctgccctttcccttcctcctcctcttctcctccctcttccctcatctcccccctccttcctctgccccaccccagcggggagcagactgctcctccaggctgtatagacctgccctcttgcattaaacaacttctcttgagctgcaactttca

SEQ ID NO: 402518 - DNA, 1000 bp, Homo Sapiens; identical to SEQ ID NO: 223492

SEQ ID NO: 402519 - DNA, 1000 bp, Homo Sapiens; identical to SEQ ID NO: 118130

SEQ ID NO: 402520 - DNA, 1000 bp, Homo Sapiens; identical to SEQ ID NO: 118131

SEQ ID NO: 402521 - DNA, 1000 bp, Homo Sapiens
gtgaaggtctggaaatggcgtgatgagaggctggacctacagtggagtctggagggacatcagctgggagtggtgtctgtggacatcagccacaccctgcccattgctgcatccagctctcttgatgctcatattcgtctttgggacttggaaaatggcaaacagataaagtccatagatgcaggacctgtggatgcctggactttggccttttctcctgattcccagtatctggccacaggaactcatgtcgggaaagtgaacatttttggtgtggaaagtgggaaaaaggaatattctttggacacgagaggaaaattcattcttagtattgcatatagtcctgatgggaaatacctagccagtggagccatagatggaatcatcaatatttttgatattgcaactggaaaacttctgcataccctggaaggccatgccatgcccattcgctccttgaccttttccccggactcccagctccttgtcactgcttcagatgatggctacatcaagatctatgatgtacaacatgccaatttggctggcacgctgagcggccatgcctcctgggtgctgaacgttgcattctgtcctgatgacactcactttgtttccagttcgtctgacaaaagtgtaaaagtttgggatgttggaacgaggacttgtgttcacaccttctttgatcaccaggatcaggtctggggagtaaaatacaatggaaatggttcaaaaattgtgtctgttggagatgaccaggaaattcacatctatgattgtccaatttaaacatcaaagtctccaggcttatgctgcaaagagaatgtacggattgatcatgacattccttaccttcttaggcttgtttaaaagaaatatagcatttattgtagcaaagacttaaattttgtagatacaatatgaatcttttcatgttttattggaaatgctgttcatactttaacataaagctttcttaatgcaaaaaaaaaaaaaaaaa

SEQ ID NO: 402522 - DNA, 1000 bp, Homo Sapiens; identical to SEQ ID NO: 118132

SEQ ID NO: 402523 - DNA, 1000 bp, Homo Sapiens; identical to SEQ ID NO: 118133

SEQ ID NO: 402524 - DNA, 1000 bp, Homo Sapiens; identical to SEQ ID NO: 291140

SEQ ID NO: 402525 - DNA, 1000 bp, Homo Sapiens; identical to SEQ ID NO: 118134

SEQ ID NO: 402526 - DNA, 1000 bp, Homo Sapiens; identical to SEQ ID NO: 291141

SEQ ID NO: 402527 - DNA, 1000 bp, Homo Sapiens
cctgtcgtgagttcaccacgcacgtcaccaacctcctccaggagcagagcaggatgaggcctgtctcccctaaggagattgagcgcatggtcggcgccattcacggcaagttcagcgccatccagatgcagttgaagcagagcacctgtgaggcagtgatgaccctgcgttcgcggctgctcgatgccaggcgcaagcggcggaatttcagcaagcaggcgacggaagtgctgaatgagtatttttactcccatctgaacaacccttaccccagcgaagaagccaaagaagagctggccaggaagggcggcctcaccatctcccaggtctctaactggtttggcaacaaaagaatccggtataaaaagaacatggggaagtttcaagaagaggctaccatttacacgggtaaaacggctgtggataccacggaagttggggtcccagggaaccacgccagctgcctgtcaacacctagctccggctcctctggacccttcccgctgcccagcgctggggacgccttcctcaccctgcggactctggcctctctccagcctcctcctgggggaggctgcctgcagtcccaggcccagggtagctggcagggggccaccccccaacctgcaactgcctcacctgctggagaccctggcagcatcaactccagtacatctaattaagtttgggggataagcaggaaagagcgctgcgtgagctgccatgtatcgccagccgttgctttgttactgaacgtgccgccgacgacctcagaaaacccagatgggtggtggtgcccatgagcccctgctcctcagccaggcccgtggcgccggctcatgtgtctgctgcgactcgagatggcctgaaacgccactcattctcccacttcagttcgtttttttgacagtaattttatggtaacgctatgaattgaattgtctgttctaggactgggcacagattttcccattaaaatttttgacttattttaaaaaaa

SEQ ID NO: 402528 - DNA, 1000 bp, Homo Sapiens; identical to SEQ ID NO: 223493

SEQ ID NO: 402529 - DNA, 1000 bp, Homo Sapiens
aggccccccacggccagaaggcagccccccgaacggagcccagtgggaggaggggctcagatgagttgaccgtgccccgataccgcacagagaagccctccaagtcgcccccaccgccccctccccgccggagcttcccctcctcccatggcctgaccaccacacgtaccggagaggtggtggtcaccagcaagaaggactcggccttcatcaagaaggctgagtccgaggagctggaggtgcagaagccccaggtgaagctgcgccgggctgtgtctgaggtggcccgcccagcctccacaccacccatcatggcctcggccatcaaggacgaggatgacgaggatcgcatcatcgcagagctagagagtggcggaggcagtgtaccacccatgaaggtggtgactccgggggcctctcggctgaaggcggcccagggccaggcgggcagccccgacaaaagcaaacatggcaagcagagggccgagtacatgcggatccaggcccagcagcaggccactaaaccatctaaagagatgagcgggtcgaatgagacctcgagcccagtctcagaaaagccctcggcttccagaacctctatccctgtattgacttcctttggggcaaggaattcttccatctccttctagaagcccctcaccccgctgccccgcctgtccccctccctcactcctgccatttctcccctctcttccttcatctccaccccaccccaccctactccccagaccctggggcctggctggggaaggtccgcacctggggagagctgggagctgttgaaggtttggggggaggggaaacgggttgtgtttcttcatttctttttttgtttttgcctttgttggttcatccttgttttctagctttggatcatttttgtaccaaggcgagcaagcctttttgaaaaataacaaaagaggaaaaaaaaaatccctcctggaaaaaaaaaaaaaccctggaaaaaaaaaaaaaaaaa

SEQ ID NO: 402530 - DNA, 1000 bp, Homo Sapiens; identical to SEQ ID NO: 118135

SEQ ID NO: 402531 - DNA, 1000 bp, Homo Sapiens; identical to SEQ ID NO: 223494

SEQ ID NO: 402532 - DNA, 1000 bp, Homo Sapiens; identical to SEQ ID NO: 291145

SEQ ID NO: 402533 - DNA, 1000 bp, Homo Sapiens
ctggggctcttctggacccttaactgggtactggccctgggccaatgcgtcctcgctggagcctttgcctccttctactgggccttccacaagccccaggacatccctaccttccccttaatctctgccttcatccgcacactccgttaccacactgggtcattggcatttggagccctcatcctgacccttgtgcagatagcccgggtcatcttggagtatattgaccacaagctcagaggagtgcagaaccctgtagcccgctgcatcatgtgctgtttcaagtgctgcctctggtgtctggaaaaatttatcaagttcctaaaccgcaatgcatacatcatgatcgccatctacgggaagaatttctgtgtctcagccaaaaatgcgttcatgctactcatgcgaaacattgtcagggtggtcgtcctggacaaagtcacagacctgctgctgttctttgggaagctgctggtggtcggaggcgtgggggtcctgtccttcttttttttctccggtcgcatcccggggctgggtaaagactttaagagcccccacctcaactattactggctgcccatcatgacctccatcctgggggcctatgtcatcgccagcggcttcttcagcgttttcggcatgtgtgtggacacgctcttcctctgcttcctggaagacctggagcggaacaacggctccctggaccggccctactacatgtccaagagccttctaaagattctgggcaagaagaacgaggcgcccccggacaacaagaagaggaagaagtgacagctccggccctgatccaggactgcaccccacccccaccgtccagccatccaacctcacttcgccttacaggtctccattttgtggtaaaaaaaggttttaggccaggcgccgtggctcacgcctgtaatccaacactttgagaggctgaggcgggcggatcacctgagtcaggagttcgagaccagcctggccaacatggtgaaac

SEQ ID NO: 402534 - DNA, 1000 bp, Homo Sapiens
cgtggatgggctgctccagaagatcacagtccggatccacggagacatcagcagcttctggatcaagaaccctgcaggggtctcccagggccaggaggaaggcgggggtcctctaggtcacactcgccgctttgggcagttctggatggtgaccatggatgaccctccacagacaggaacctgggagatccaggtcacagctgaggacacccctggggtgagagtgcaagcccagacctccctggacttcctcttccactttgggatccccatggaggatggaccccaccctggcctctaccccctgactcagccagttgcaggtcttcagacccagctgctggtagaagtgacagggttgggttccagagccaatcctggggatcctcagccgcatttctcccacgtcatccttcgaggggtcccagagggtgccgaactaggccaggtgcccttggagcccgtgggacctccggagcgaggtctcctcgcagcctcgctgtcgcccacgctgctgtccacccctagacccttctccctggagctgattggccaggacgcagcggggcggcgcctgcacagggctgcccctcagcctagcactgtagtccctgtccttctggagcttagtggcccctcgggtttcttggccccgggcagcaaagtcccgctcagtctccgcatcgccagcttctcgggccctcaggatcttgaccttaggactttcgtcaaccccagcttctccctcacctccaacctctccagggctcacctggaactgaatgagtcggcctggggccgcctgtggctggaggtcccagattcagcggccccggattccgtggtgatggtgactgtgactgcagggggacgagaagccaacccagtacccccgactcatgctttcctccggctcctggtatcggccccagccccgcaggtgaggaactactactttccatcacagggaccggcacaccacccctaccggctcatctga

SEQ ID NO: 402535 - DNA, 1000 bp, Homo Sapiens; identical to SEQ ID NO: 291148

SEQ ID NO: 402536 - DNA, 1000 bp, Homo Sapiens; identical to SEQ ID NO: 291150

SEQ ID NO: 402537 - DNA, 1000 bp, Homo Sapiens; identical to SEQ ID NO: 291151

SEQ ID NO: 402538 - DNA, 1000 bp, Homo Sapiens; identical to SEQ ID NO: 291153

SEQ ID NO: 402539 - DNA, 1000 bp, Homo Sapiens
cctccaggggcttccagaacccggagacactggctgacattccggcctccccacagctgctgaccgatggccactacatgacgctgcccctgtctccggaccagctgccctgtggcgaccccatggcgggcagcggaggcgcccccgtgctgcgggtgggccatgaccacggctgccaccagcagcccttctgcaacgcgcccctccctggccctggaccctatcgggaagacccccggatccatcgacacctggccagggcggcgaagtggcagcatgatcgtcattacctccatcctctcttctctggccggcctcctactcttggccttcttggcagcctctaccatgcgcttctccagcctgtggtggccggaggaggccccggagcagctgcggatcggctccttcatgggcaagcgctacatgacccaccacatcccacccagcgaggccgccacactgccggtgggctgcaagcctggcctggaccccctccccagcctcagcccctagcctggcctctttgcatggggctgggggagatggggcgccgggagtgagtgcatggtgctttgtcccagctcctgcacccacaggccccctcagggctccttgcctttcccccccaccagcacaccccgtaccctgcctggaatcccagcaccagcccccctgcctctcctctgcctttctggtttctctccctctccaagcatctgtaagttgcactcaggagggtttaggggagggccatgggcaggctggtctcgtgatagtgagtgagtgctcatgggatctggttgtttagaagcatgcagccctcctgcttcactctctctgtctctcctgctccaccatggccagacgtgcctgcttccccttcgccttctgccgtgattgtcagtttcttgagggctccccagccatgcttcctgtacagcctgcaaaactgtgagtcaattaaacctcttttcttcataaaaaaaaaaaaaaaaaa

SEQ ID NO: 402540 - DNA, 639 bp, Homo Sapiens
ctgacaagatgtccctgtggactcccaaactctactccagatggggaggtgcccttaacaccaagattttaaaagctccaatttcagagcaagagtcgaaaactcacagataaagttatagttatttcagggttctgaaaagacgcagaacatgaagggactcagaagtctggcagcaacaaccttggctcttttcctggtgtttgttttcctgggaaactccagctgcgctccgcagagactgttggagagaaggaactggactcctcaagctatgctctacctgaaaggggcacagggtcgccgcttcatctccgaccagagccggagaaaggacctctccgaccggccactgccggaaagacgaagcccaaatccccaactactaactattccggaggcagcaaccatcttactggcgtcccttcagaaatcaccagaagatgaagaaaaaaactttgatcaaaccagattcctggaagacagtctgcttaactggtgaaaatatactggattatgtttaattatggttctattctctttgaaaacatgaaccatgtgaataaaacctttggaccctttttaaaaaaaaaaaaaaaaaaaaaaaaaaaaaaaaaaaaaaaaaaaaaaaaaaaaaaa

SEQ ID NO: 402541 - DNA, 1000 bp, Homo Sapiens; identical to SEQ ID NO: 223496

SEQ ID NO: 402542 - DNA, 1000 bp, Homo Sapiens; identical to SEQ ID NO: 291156

SEQ ID NO: 402543 - DNA, 1000 bp, Homo Sapiens; identical to SEQ ID NO: 118138

SEQ ID NO: 402544 - DNA, 1000 bp, Homo Sapiens
gagctgcgagttcatcaatcaccgaaggatgcactcaggagagattccctaccggtgtgacgagtgtgggaagacattcacccggaggcccaacctcatgaagcaccagaggattcacactggggagaaaccctacaagtgtggggagtgtgggaagcactttagcgcctactcttccctgatttatcaccagagaatccacaccggagagaaaccctataaatgtaatgactgcgggaaagccttcagtgatggctcaatccttatccgacatcgtcggactcacaccggagagaagccatttgagtgcaaggaatgtggcaaaggctttacacaaagttctaaccttatccaacatcagagaattcacactggagagaaaccctataaatgtaatgaatgtgagaaagctttcattcaaaaaaccaaactcgtggaacatcagagaagccacactggagagaagccctatgaatgcaatgactgtggcaaagttttcagccaaagcacacacctcatccagcaccagagaatccacacaggagagaagccctacaagtgcagcgagtgtgggaaggccttccacaacagttccagactcatccaccaccagaggctgcaccacggagagaaaccctacagatgcagcgattgcaagaaagccttcagccagagcacgtacttgattcagcaccggaggatccacaccggggagaagccctacaagtgcagcgagtgtgggaaggccttccggcacagttccaacatgtgtcagcatcagcggattcacctccgggaggacttctccatgtaacagtggcgcggtgtccgagggcagagtccagctgagcacttcctgcatgcgcccccggcacctgactctgccctttatgtattatccacacgatgttttcacagagtgaaaggacgtttctcattaaacaaacctcttttcttaaaaaaaaaaaaaaaaaaaaaaaaaaaaaaaaaaaaaaaaaaa

SEQ ID NO: 402545 - DNA, 1000 bp, Homo Sapiens; identical to SEQ ID NO: 291159

SEQ ID NO: 402546 - DNA, 1000 bp, Homo Sapiens
agtcagcgctgcttttgtggagatcaaaaccaccaagttcacaaagaaggttcagattgacccctacctagaagattctctgtgtcatatctgcagttctcagcctggtcctttcttctgtcgagatcaggtctgcttcaaatacttctgccggagctgctggcactggcggcacagcatggagggcctgcgccaccacagccccctgatgcggaaccagaagaaccgagattccagctagaggagctggccttgcccagtggcctgtggcgcccaaagctggcaggtcaggcaagcagcctgcaccaccctgccactggcgaccagggagctggcttcccaaggacaagggaaaattgtagtcacctttgcacttgctgaatctgtctttgtttctgcactaattaatgcacattgagttttgtcaggttttgttttcagggggtgtaccaagggcaaggaccctctggcttaccctccaagcgactctgtagttttcccagattttagttcctcattttgcagatgaaaagcggggaaaaaaaaaaaaaaaaaaattcctgaaggtattgacacggatgcctacacctaggtttatttattaaaagcgcttttttacattccttgcaatactgatggtgatgatgcgcaggtctcattggtttcattcttgcagttgccatacagtgcctttccatttatttaacccccacctgaacggcataaactgagtgttcagctggtgttttttactgtaaacaataaggagactttgctcttcatttaaaccaaaatcatatttcatattttacgctcgagggtttttaccggttcctttttacactccttaaaacagtttttaagtcgtttggaacaaaatattttttctttcctggcagcttttaacattatagcaaatttgtgtctgggggactgctggtcactgtttctcacagttgcaaatcaaggcatttgcaaccaaaaaaaaaaaaaaaaaaaa

SEQ ID NO: 402547 - DNA, 1000 bp, Homo Sapiens
atgtaacaaatgcgggaaatcctttagccaaagtacatatcttatagaacatcagagacttcattctggagtaaaaccttttgaatgtaacgagtgtggaaaagctttcagtaagaattcatctctaactcaacatcggagaattcacactggagagaaaccttatgagtgtatggtgtgtggaaaacatttcactggacgatcatcccttaccgtgcatcaggtcattcacactggagagaaaccttatgagtgcaatgaatgtggaaaggcattcagccagagtgcttaccttattgaacatcaaagaattcatactggtgagaaaccctatgaatgtgatcagtgtggaaaagccttcattaagaattcatcccttacagtgcatcagagaactcatacaggagagaaaccctatcagtgtaatgaatgcggaaaagccttcagccggagtacaaaccttacacgacatcaaagaactcatacgtgaggaatgttttcactggcccttacctcatgattaactcttcagtaataatcatatgagacatacaatgtagaaacctaataaatgtaatgattgtgggaatctttcagttgaagtacaatatatcatatcagataataccactgcagagaatccatctaaaagtagagaaatcttgattcagaatgtataatttcctttatatcagaaggtttaaatagctaatataaacaatgaagagtcatgctgaagataagttctgttatatcataccgcacattctcctttggccatcagagactttacactggagagaaaaatgtgagagtgtttaactggacagcccagagacctggtacgtagtcctaatctgccactgccttggacaacttgcctacttccaccaggttatggttctttatttggtaaatgaatgattttggagttagaaatcttgtaggagctctgttagctctaaaatgctacaactctataaatataatgaatgctggg

SEQ ID NO: 402548 - DNA, 1000 bp, Homo Sapiens; identical to SEQ ID NO: 291162

SEQ ID NO: 402549 - DNA, 1000 bp, Homo Sapiens; identical to SEQ ID NO: 223498

SEQ ID NO: 402550 - DNA, 1000 bp, Homo Sapiens; identical to SEQ ID NO: 223499

SEQ ID NO: 402551 - DNA, 1000 bp, Homo Sapiens; identical to SEQ ID NO: 118142

SEQ ID NO: 402552 - DNA, 1000 bp, Homo Sapiens; identical to SEQ ID NO: 118143

SEQ ID NO: 402553 - DNA, 1000 bp, Homo Sapiens; identical to SEQ ID NO: 223502

SEQ ID NO: 402554 - DNA, 1000 bp, Homo Sapiens
ccatgtggttccgcacctacatgtggggcgtcatctatctgaggaatgtggacccccctgtctggtacgacaccgacgtgaagctgtttgagatacagcgggtgtgaggatgaagccgacgaggggctcagtctaggggaaggcagggccttggtccctgaggcttcccccatccaccattctgagctttaaattaccacgatcagggcctggaacaggcagagtggccctgagtgtcatgccctagagacccctgtggccaggacaatgtgaactggctcagatccccctcaacccctaggctggactcacaggagccccatctctggggctatgcccccaccagagaccactgcccccaacactcggactccctctttaagacctggctcagtgctggcccctcagtgcccacccactcctgtgctacccagccccagaggcagaagccaatgggtcactgtgccctaaggggtttgaccagggaaccacgggctgtcccttgaggtgcctggacagggtaagggggtgcttccagcctcctaacccaaagccagctgttccaggctccaggggaaaaaggtgtggccaggctgctcctcgaggaggctgggagctggccgactgcaaaagccagactggggcacctcccgtatccttggggcatggtgtggggtggtgagggtctcctgctatattctcctggatccgtggaaatagcctggctccctcttacccagtaatgaggggcagggaagggaactgggaggcagccgtttagtcctccctgccctgcccactgcctggatggggcgatgccacccctcatccttcacccagctctggcctctgggtcccaccacccagccccccgtgtcagaacaatctttgctctgtacaatcggcctctttacaataaaacctcctgctccaaaaaaaaaaaaaaaaaaaaaaaaaaaaaaaaaaaaaaaaaaaaaaaaaaaaaaaaaaaaaaaaaaaa

SEQ ID NO: 402555 - DNA, 1000 bp, Homo Sapiens; identical to SEQ ID NO: 291166

SEQ ID NO: 402556 - DNA, 1000 bp, Homo Sapiens; identical to SEQ ID NO: 291167

SEQ ID NO: 402557 - DNA, 1000 bp, Homo Sapiens; identical to SEQ ID NO: 291168

SEQ ID NO: 402558 - DNA, 1000 bp, Homo Sapiens; identical to SEQ ID NO: 291169

SEQ ID NO: 402559 - DNA, 1000 bp, Homo Sapiens; identical to SEQ ID NO: 291170

SEQ ID NO: 402560 - DNA, 1000 bp, Homo Sapiens; identical to SEQ ID NO: 291172

SEQ ID NO: 402561 - DNA, 1000 bp, Homo Sapiens; identical to SEQ ID NO: 223503

SEQ ID NO: 402562 - DNA, 1000 bp, Homo Sapiens; identical to SEQ ID NO: 291173

SEQ ID NO: 402563 - DNA, 1000 bp, Homo Sapiens; identical to SEQ ID NO: 118145

SEQ ID NO: 402564 - DNA, 1000 bp, Homo Sapiens; identical to SEQ ID NO: 223504

SEQ ID NO: 402565 - DNA, 1000 bp, Homo Sapiens; identical to SEQ ID NO: 118146

SEQ ID NO: 402566 - DNA, 1000 bp, Homo Sapiens; identical to SEQ ID NO: 223505

SEQ ID NO: 402567 - DNA, 1000 bp, Homo Sapiens
ggccgagatcgcttcacgcgaggcccggaacttctccttcatctccctggccgtgggcatcgcggccatggtgctctgtaccatcctcaccgtagtcatcatcatcgccgcgcagcaccacgagaactactgggatccctaaaaacgcccctggtccggccccactctgcgcccctcgatctcccaggctctttctgcagtcataccgcggacccaatgggcgccctgcacacccgtttctggggccgtcagacttggatacatcgtaaactccgcctccacggaacgtctcgccttgcgagcaagctcggaatccagttcctcaggaacccctccaaaacccacacccccagggacgccgctttccgggatcccggccaaacgccggaccctcagtcgctccaggccccctcaccctcaaagtgtagcgcccccaaccgagcaacctcggtttggtccctaaaaccccgcctcctctataagcaccgccccagctctgacaaaaccccgcctccaggtcggcaggctccgccttcttttcttctccgcggggtgattcagtccagtgattgggtttgtggctccaggcctcgcccacagacggacagacccctccctttcttccggcaaaaggaccgagccctggggtagtaaggcccccacactcctgttttttgcaagtacatttttgtccctcctccacccaggtatctgcctattttcttgctaatcccagaacctttccttttgctttttttaaggacatttgggaagttcctggtgtaggacccttctccctgggataagaaacctgcctgtaaacgctctgtaaatactcccttccacccatcccagcccctgggcagccgggcagaagggaatccaggctatggacctcccaagtccccgctccccgctcccctcggcggccccgccttgttctgatctgtgtgtgagtgtgtgtgaacttctgaaagacaatattaaagagacttagttg

SEQ ID NO: 402568 - DNA, 1000 bp, Homo Sapiens
cgggagaagtcggcctcttcctgatgggcaaccacaccactgcctggcgccgtgcccttcctttgtcctgcccgctggagacagtgtttgtcgtgggcgtggtctgcggggatcctgttacaaaggtgaaacccaggaggagagtgtggagtccagagcgctgccaggacccaggcacaggcgttagctcccgtaggagaaaatgggggaatcctgaatgaacagtgggtcctggctgtccttggggcgttccagggcagctcccctcctggaatagaatctttctttccatcctgcatggctgagagccaggcttccttcctggtctccgcaggaggctgtggcagctgtggcatccactgtggcatctccgtcctgcccaccttcttaagaggcgagatggagcaggcccatctgcctctgccctttctagccaaggttatagctgccctggactgctcactctctggtctcaatttaaaatgatccatggccacagggctcctgcccaggggcttgtcaccttcccctcctccttcctgagtcactccttcagtagaaggccctgctccctatcctgccccacagccctgcctggatttgtatccttggcttcgtgccagttcctccaagtctatggcacctccctccctctcaaccacttgagcaaactccaagacaccttctaccccaacaccagcaattatgccaagggccattaggctctcaacatgactatagagaccccgtgtcatcacggagacctttgttcctgtgggaaaatatccctcccacctgcaacagctgcccctgctgactgcgcctgtcttctccctctgaccccagagaaaggggctgtggtcagctgggatcttctgccaccatcagggacaaacgggggcaggaggaaagtcactgatgcccagatgtttgcatcctgcacagctacaggtccttaaataaaagtgtgctgttggttaaaaaaaaaaaaaaaaaaaaa

SEQ ID NO: 402569 - DNA, 1000 bp, Homo Sapiens; identical to SEQ ID NO: 224305

SEQ ID NO: 402570 - DNA, 784 bp, Homo Sapiens; identical to SEQ ID NO: 291178

SEQ ID NO: 402571 - DNA, 1000 bp, Homo Sapiens; identical to SEQ ID NO: 223506

SEQ ID NO: 402572 - DNA, 1000 bp, Homo Sapiens
taatagattatatggagagaaaacttacaatttccttcctgagttcttggtttcgactcagaaaacatatggtgctgacctggccagtgtggattttcagcatgcctctgaagatgcaaggaagaccataaaccagtgggtcaaaggacagacagaaggaaaaattccggaactgttggcttcgggcatggttgataacatgaccaaacttgtgctagtaaatgccatctatttcaagggaaactggaaggataaattcatgaaagaagccacgacgaatgcaccattcagattgaataagaaagacagaaaaactgtgaaaatgatgtatcagaagaaaaaatttgcatatggctacatcgaggaccttaagtgccgtgtgctggaactgccttaccaaggcgaggagctcagcatggtcatcctgctgccggatgacattgaggacgagtccacgggcctgaagaagattgaggaacagttgactttggaaaagttgcatgagtggactaaacctgagaatctcgatttcattgaagttaatgtcagcttgcccaggttcaaactggaagagagttacactctcaactccgacctcgcccgcctaggtgtgcaggatctctttaacagtagcaaggctgatctgtctggcatgtcaggagccagagatatttttatatcaaaaattgtccacaagtcatttgtggaagtgaatgaagagggaacagaggcggcagctgccacagcaggcatcgcaactttctgcatgttgatgcccgaagaaaatttcactgccgaccatccattccttttctttattcggcataattcctcaggtagcatcctattcttggggagattttcttccccttagaagaaagagactgtagcaatacaaaaatcaagcttagtgctttattacctgagtttttaatagagccaatatgtcttatatctttaccaataaaaccactgtccagaaaaaaaaaaaaaaaaaaaa

SEQ ID NO: 402573 - DNA, 1000 bp, Homo Sapiens; identical to SEQ ID NO: 223507

SEQ ID NO: 402574 - DNA, 1000 bp, Homo Sapiens; identical to SEQ ID NO: 223507

SEQ ID NO: 402575 - DNA, 1000 bp, Homo Sapiens; identical to SEQ ID NO: 223507

SEQ ID NO: 402576 - DNA, 1000 bp, Homo Sapiens; identical to SEQ ID NO: 291182

SEQ ID NO: 402577 - DNA, 1000 bp, Homo Sapiens; identical to SEQ ID NO: 118147

SEQ ID NO: 402578 - DNA, 1000 bp, Homo Sapiens
tcctgcgccgagggcacctccaccatttgcggctgtgactcgcatcataaggggccgcctggcgaaggctggaagtggggcggctgcagcgaggacgctgacttcggcgtgttagtgtccagggagttcgcggatgcgcgcgagaacaggccggacgcgcgctcggccatgaacaagcacaacaacgaggcgggccgcacgactatcctggaccacatgcacctcaaatgcaagtgccacgggctgtcgggcagctgtgaggtgaagacctgctggtgggcgcagcctgacttccgtgccatcggtgacttcctcaaggacaagtatgacagcgcctcggagatggtagtagagaagcaccgtgagtcccgaggctgggtggagaccctccgggccaagtactcgctcttcaagccacccacggagagggacctggtctactacgagaactcccccaacttttgtgagcccaacccagagacgggttcctttggcacaagggaccggacttgcaatgtcacctcccacggcatcgatggctgcgatctgctctgctgtggccggggccacaacacgaggacggagaagcggaaggaaaaatgccactgcatcttccactggtgctgctacgtcagctgccaggagtgtattcgcatctacgacgtgcacacctgcaagtagggcaccagggcgctgggaaggggtgaagtgtgtggctgggcggattcagcgaagtctcatgggaagcaggacctagagccgggcacagccctcagcgtcagacagcaaggaactgtcaccagccgcacgcgtggtaaatgacccagacccaactcgcctgtggacggggaggctctccctctctctcatcttacatttctcaccctactctggatggtgtgtggtttttaaagaagggggctttctttttagttctctagggtctgataggaacagacctgaggcttatctttgcacatgttaaagaaaaaaaaaaaaa

SEQ ID NO: 402579 - DNA, 526 bp, Homo Sapiens
cagctacagcacagatcagcaccatgaagcttctcacgggcctggttttctgctccttggtcctgagtgtcagcagccgaagcttcttttcgttccttggcgaggcttttgatggggctcgggacatgtggagagcctactctgacatgagagaagccaattacatcggctcagacaaatacttccatgctcgggggaactatgatgctgccaaaaggggacctgggggtgcctgggccgcagaagtgatcagcaatgccagagagaatatccagagactcacaggccatggtgcggaggactcgctggccgatcaggctgccaataaatggggcaggagtggcagagaccccaatcacttccgacctgctggcctgcctgagaaatactgagcttcctcttcactctgctctcaggagacctggctatgagccctcggggcagggattcaaagttagtgaggtctatgtccagagaagctgagatatggcatataataggcatctaataaatgcttaagaggtgg

SEQ ID NO: 402580 - DNA, 1000 bp, Homo Sapiens; identical to SEQ ID NO: 118148

SEQ ID NO: 402581 - DNA, 1000 bp, Homo Sapiens; identical to SEQ ID NO: 223508

SEQ ID NO: 402582 - DNA, 1000 bp, Homo Sapiens; identical to SEQ ID NO: 118149

SEQ ID NO: 402583 - DNA, 1000 bp, Homo Sapiens
ttgccaccacatgcagaaactgctacagcctcctcaacctggcagaagttcgcagcaaatactgggaaagccaaggacattccaatccccaatcttcctcccttggattttccatctccagaacttcctcttatggagctctctgaggatattctgaaaggacttatgaataattaaaatggaaggccacagaaaaggggaaaagaggaaataatacagtaatcgttaatccagcaaaaagaaatgaaaagggaaaaccacatagaagggtaatcccggaaatgcttcatctggtggactgtgggagcagaggcattgccaggacttgggaaacagtcactgtgaaatgcgctgcgtatctcattcactcacttcagctaatgactccgacttggcagacgctaaactcatggaggttcggtttctcctgatacaaaccaaatggctacctggaagaatttctttcaagcaacagttatttttcttatcttcagggttaaaatgtataaaagttatgtgtaattaatctataatgccataaatgataatgcaaaacctaaataatatggtggccggaggggctgccttatatttgaaacatgctttctatcatgcattgactgtatgcattttgttaatgcacattctgtttgtttaaggtgtgtgagatacacacctttctagatgaaactatatgtgccacactttgcactactcataatgataacctcaagactatcagaagaaatatttaaatttccattttatgaagaaaggaaccaaattattatgctttttaaaacaaattaccagtttacataattaatcagggtgcattttaagttctaacttcgtttattgtataatgcatcatttgaaaataccaaggaggaaataccctttgtttttaatgatgcaagagtggacgtaatgctagttggcagtattttattgtaagaaatcaataaagtaattgtgttttaaaaaaaaaaaaaaaaaa

SEQ ID NO: 402584 - DNA, 1000 bp, Homo Sapiens; identical to SEQ ID NO: 118150

SEQ ID NO: 402585 - DNA, 1000 bp, Homo Sapiens; identical to SEQ ID NO: 223511

SEQ ID NO: 402586 - DNA, 1000 bp, Homo Sapiens; identical to SEQ ID NO: 223512

SEQ ID NO: 402587 - DNA, 1000 bp, Homo Sapiens
ggctgttccaaggataccttcttgctcctggccatcaagtcacagcctggtcacgtggagcgacgtgcggctatccgcagcacgtggggcagggtggggggatgggctaggggccggcagctgaagctggtgttcctcctaggggtggcaggatccgctcccccagcccagctgctggcctatgagagtagggagtttgatgacatcctccagtgggacttcactgaggacttcttcaacctgacgctcaaggagctgcacctgcagcgctgggtggtggctgcctgcccccaggcccatttcatgctaaagggagatgacgatgtctttgtccacgtccccaacgtgttagagttcctggatggctgggacccagcccaggacctcctggtgggagatgtcatccgccaagccctgcccaacaggaacactaaggtcaaatacttcatcccaccctcaatgtacagggccacccactacccaccctatgctggtgggggaggatatgtcatgtccagagccacagtgcggcgcctccaggctatcatggaagatgctgaactcttccccattgatgatgtctttgtgggtatgtgcctgaggaggctggggctgagccctatgcaccatgctggcttcaagacatttggaatccggcggcccctggaccccttagacccctgcctgtatagggggctcctgctggttcaccgcctcagccccctcgagatgtggaccatgtgggcactggtgacagatgaggggctcaagtgtgcagctggccccataccccagcgctgaagggtgggttgggcaacagcctgagagtggactcagtgttgattctctatcgtgatgcgaaattgatgcctgctgctctacagaaaatgccaacttggttttttaactcctctcaccctgttagctctgattaaaaacactgcaacccaaaaaaaaaaaaaaaaaaaaaaaaaaaaaaaaaaaaaaaaaaaaaaaaaaa

SEQ ID NO: 402588 - DNA, 1000 bp, Homo Sapiens; identical to SEQ ID NO: 223513

SEQ ID NO: 402589 - DNA, 1000 bp, Homo Sapiens; identical to SEQ ID NO: 291192

SEQ ID NO: 402590 - DNA, 1000 bp, Homo Sapiens; identical to SEQ ID NO: 291193

SEQ ID NO: 402591 - DNA, 1000 bp, Homo Sapiens; identical to SEQ ID NO: 118151

SEQ ID NO: 402592 - DNA, 1000 bp, Homo Sapiens; identical to SEQ ID NO: 291196

SEQ ID NO: 402593 - DNA, 1000 bp, Homo Sapiens
gtctcgatctcctgaccttgtgatccacccgcctcagcctcccaaagtgttgggattacaggtgtgaaccactgtgcccggcctgtgtacaactttttaaatagggaatatgatagcttcgcatggtggtgtgcacctatagcccccactgcctggaaagctgaggtgggagaatcgcttgagtccaggagtttgaggttacagtgatccacgatcgtaccactacactccagcctgggcaacggagcaagaccctgtctcaaagcataaaatggaataacatatcaaatgaaacagggaaaatgaagctgacaatttatggaagccagggcttgtcacagtctctactgttattatgcattacctgggaatttatataagcccttaataataatgccaatgaacatctcatgtgtgctcacaatgttctggcactattataagtgcttcacaggttttatgtgttcttcgtaactttatggagtaggtaccatttgtgtctctttattataagtgagagaaatgaagtttatattatcaaggggactaaagtcacacggcttgtgggcactgtgccaagatttaaaattaaatttgatggttgaatacagttacttaatgaccatgttatattgcttcctgtgtaacatctgccatttatttcctcagctgtacaaatcctctgttttctctctgttacacactaacatcaatggctttgtacttgtgatgagagataaccttgccctagttgtgggcaacacatgcagaataatcctgttttacagctgcctttcgtgatcttattgcttgcttttttccagattcagggagaatgttgttgtctatttgtctcttacatctccttgatcatgtcttcattttttaatgtgctctgtacctgtcaaaaattttgaatgtacaccacatgctattgtctgaacctgagtataagataaaataaaattttattttaaattttaaaaaaaaaaaaaaaaaa

SEQ ID NO: 402594 - DNA, 1000 bp, Homo Sapiens; identical to SEQ ID NO: 291197

SEQ ID NO: 402595 - DNA, 1000 bp, Homo Sapiens; identical to SEQ ID NO: 223514

SEQ ID NO: 402596 - DNA, 1000 bp, Homo Sapiens; identical to SEQ ID NO: 291199

SEQ ID NO: 402597 - DNA, 1000 bp, Homo Sapiens; identical to SEQ ID NO: 291200

SEQ ID NO: 402598 - DNA, 1000 bp, Homo Sapiens
tgcgggacatcacattgaggtacaaggagacccggtggcagaagtggcagaacaaggatgaccagggcagcaccgtcggcaacggggaccagcacccactggggctggacgaagacctgctggggcctggggtggccgagggcgagggagcaccaactccaaactgacctgggccgtggctgcctcgtgagcctcccagagcccaggcctccgtggcctcctcctgtgtgagtcccaccaggagccacgtgcccggccttgccctcaaggttttttgcttttctcctgtgcacctggcgaggctgaaggcgaggggtggaggaggccccagcacagcctcatctccatgtgtacacgtgtgtacgtgtgtatgcgtgtgtgtacgcgtgtgtacgcgcgtgtgtacacatgcgtggccgcctgtggtgtgcacgtgtgctctgggctccgaggcttctccagagctgggagctggctggcgtggcaagggcatgctctggggcagtgtgtccctcaggaaccagggtcctccctcccctttctgcctggtcagccccgtggcctctggcccaccaagctccctgtcacccagccatggtgtggtccaggcagggacatctcggtaccctttctgcactccgtgggccctgggtgcgctgaggcctggaggcgtctacactggctccacatccacttcccccgcagctcgtgtgggcgctcgtccacaaacactccgtggctgagaggcagcggatccaggcagcgatgctgagccacctcctccgagccttcctttcacacagaccaccccggaggacacgtggatgatggggtcagagatcactgagctgcccctcaagggggcctggaacccgggtgctggggtcatgctgcctccgtggctccaaggtgagggtcatcttcacgagcaaagagaaccaataaagtgacaacgaacgtctgaggcttccaaaaaaaaaaaaaaaaaaaaaaaaaaaaa

SEQ ID NO: 402599 - DNA, 1000 bp, Homo Sapiens; identical to SEQ ID NO: 291202

SEQ ID NO: 402600 - DNA, 1000 bp, Homo Sapiens; identical to SEQ ID NO: 291203

SEQ ID NO: 402601 - DNA, 1000 bp, Homo Sapiens; identical to SEQ ID NO: 118152

SEQ ID NO: 402602 - DNA, 1000 bp, Homo Sapiens
tgtgcctgggcctgagcagcatcgttggcgtctggtacctgctgaggaagcactggattgccaacaacctttttggcctggccttctcccttaatggagtagagctcctgcacctcaacaatgtcagcactggctgcatcctgctgggcggactcttcatctacgatgtcttctgggtatttggcaccaatgtgatggtgacagtggccaagtccttcgaggcaccaataaaattggtgtttccccaggatctgctggagaaaggcctcgaagcaaacaactttgccatgctgggacttggagatgtcgtcattccagggatcttcattgccttgctgctgcgctttgacatcagcttgaagaagaatacccacacctacttctacaccagctttgcagcctacatcttcggcctgggccttaccatcttcatcatgcacatcttcaagcatgctcagcctgccctcctatacctggtccccgcctgcatcggttttcctgtcctggtggcgctggccaagggagaagtgacagagatgttcagttatgaggagtcaaatcctaaggatccagcggcagtgacagaatccaaagagggaacagaggcatcagcatcgaaggggctggagaagaaagagaaatgatgcagctggtgcccgagcctctcagggccagaccagacagatgggggctgggcccacacaggcgtgcaccggtagagggcacaggaggccaagggcagctccaggacagggcagggggcagcaggatacctccagccaggcctctgtggcctctgtttccttctccctttcttggccctcctctgctcctccccacaccctgcaggcaaaagaaacccccagcttcccccctccccgggagccaggtgggaaaagtgggtgtgatttttagattttgtattgtggactgattttgcctcacattaaaaactcatcccatggccagggcgggccactgtgctcctggaaaaaaaaaa

SEQ ID NO: 402603 - DNA, 1000 bp, Homo Sapiens; identical to SEQ ID NO: 223515

SEQ ID NO: 402604 - DNA, 1000 bp, Homo Sapiens; identical to SEQ ID NO: 291206

SEQ ID NO: 402605 - DNA, 1000 bp, Homo Sapiens; identical to SEQ ID NO: 118153

SEQ ID NO: 402606 - DNA, 1000 bp, Homo Sapiens; identical to SEQ ID NO: 291207

SEQ ID NO: 402607 - DNA, 1000 bp, Homo Sapiens
cagacaaaaaggggattaaatgagcagtttgagttacattattttattgtattaaatttatttgatttatattgtcatgttctcttgccagagagaatctgtaggaaaatactgtatcttgtatactgatcattggctttttctagaaaaactgtctctgattctggacaaagctcagttatagttacgagaaagatatggtacagggaggaaaatactgccttttttttttttttaaagagattttcagactaaatagaaatgtcaaaatgatgtatcaatggttcttttttagaacaagttttcaaagcataaaaagaggttgagagaaataacatatttattgattcacataagtatgtttttcttcattaatcgtctggagaaacccacttgtcattaatttgttttgggctaggttttcaaacttaccaaattgctttaaaaaagcaatttggaaggtaatttgataggctttccaacttaaccaaattttttattgtaattcttggatagtatttttgtctttttcaattcatttgtctttttcagtatagtttttgttaaggcaaatgtcttcccttaatatccaaatattgctaataaacggtagaagatgctttggaaattaaaattatctcgctgttggttagacttaacactgttaatcttcagccaaatatcacatatggatcaaattattttcttttttgttgtttaccctatcctcaacaacatttttagtttaaattattgtagagattttttttgtggtggttattttttattttgctccaaaataataaggtgcaaagctattttatgcttaactgttgctctgtcaaaacagctatgcagtggagttgcatttgatgttctagagtttgattacatgcagagttgtatatagccaaaacttctcttatcaaactctgttatgtaggcatatttatatatacattaaagactgttgtactgtgtctcaaaaaaaaaaaaaaaa

SEQ ID NO: 402608 - DNA, 1000 bp, Homo Sapiens; identical to SEQ ID NO: 291209

SEQ ID NO: 402609 - DNA, 1000 bp, Homo Sapiens; identical to SEQ ID NO: 118154

SEQ ID NO: 402610 - DNA, 1000 bp, Homo Sapiens; identical to SEQ ID NO: 118155

SEQ ID NO: 402611 - DNA, 1000 bp, Homo Sapiens; identical to SEQ ID NO: 118156

SEQ ID NO: 402612 - DNA, 1000 bp, Homo Sapiens; identical to SEQ ID NO: 223522

SEQ ID NO: 402613 - DNA, 1000 bp, Homo Sapiens; identical to SEQ ID NO: 291213

SEQ ID NO: 402614 - DNA, 1000 bp, Homo Sapiens
cgtgagaggcagcagagtgccttggatgagagcaacacctatcagctcccagacggctcccgcgtggagctgacccccatgcagcgggtggctcctgagatgttctttagcccgcaggtgttcgagcagccggggcccagcatcccacgggccattgtggaatccgtggagtcctgcgagatctccctgcgccccctgctggtctcccacgtgatggcctgcgggggcaacaccctctatcccgggttcacaaagcgcctgttcagggagctgatgggggatcacgtctcctccaccaaggccacagtctgggagggttccaatagaaactttagtgtctggctaggagcgtccgtggtggctcacctttctacctaccagtctgagtggatgtcccgagaggagtatggtgagcatatgaggatgtgaccctactggctcactcctgagaatgggctcctgttagatgggcacgggcggattaattttagcaaaatgttctgggtgggggtagaatgaggtggggtggggtgagctggctttggaattctaggggcatgagggtattttttaggttctaaggttttatcttgttgcaagagtgggacctacccaagggggaagacaagatgtcatccttggaaaccctgcaggggacagtttttccagggtggcctatcattggggtatgagtggctgactgccatctccatgcctgagagccactgatttttcattggcatttcccctggtttgtctcattcttcttggttgagtaggttttaactggggtagcactcctgctaggagtcccaattatttttgactaggggatgggggacagttgacatttctggtcctacaggccctttctggccagggaggcattgctgcaggtgagcctgggatgcccttgccacccgtggttggatcttgttttatatctgcaaataaatagcttgtttggaagcaaaaaaaaaaaaaaaaaaaaaaaaaaaaa

SEQ ID NO: 402615 - DNA, 1000 bp, Homo Sapiens; identical to SEQ ID NO: 223524

SEQ ID NO: 402616 - DNA, 1000 bp, Homo Sapiens; identical to SEQ ID NO: 223525

SEQ ID NO: 402617 - DNA, 1000 bp, Homo Sapiens; identical to SEQ ID NO: 291217

SEQ ID NO: 402618 - DNA, 1000 bp, Homo Sapiens; identical to SEQ ID NO: 118157

SEQ ID NO: 402619 - DNA, 1000 bp, Homo Sapiens; identical to SEQ ID NO: 291219

SEQ ID NO: 402620 - DNA, 1000 bp, Homo Sapiens
tgtgaaacaacagtggagctcttgtttgacagtgttatacatttaggttgtaaaccatatctggacagccaacgagccgcatgcaggtgtcattatgaagaaaaaactgatctttaaaggagatgccgacagctagtgacagatgaagatggaagaacatacctttgacaaataactaatgtttttacaacataaaactgtcttatttttgtgaaaggattattttgagaccttaaaataatttatatcttgatgttaaaacctcaaagcaaaaaaagtgagggagatagtgaggggagggcacgcttgtcttctcaggtatcttccccagcattgctcccttacttagtatgccaaatgtcttgaccaatatcaaaaacaagtgcttgtttagcggagaattttgaaaagaggaatatataactcattttcacaaccacatttaccaaaaaaagagatcaaatataaaattcatcataatgtctgttcaacattatcttatttggaaaatggggaaattatcacttacaagtatttgtttactatgaaattttaaatacacatttatgcctagaaggaacggacttttttttttctattttaattacacataatatgtaattaaagtacaacataatatgttgtttctctgtagcccgttgagcatatgagtaagtcacatttctattaggactacttacaaggacaaggtttccatttttccagttgtaaaattggaaccatcagctgataacctcgtagggagcaaccccaggatagctaagtgttatgtaatatgcctagaaggtgatgtgaatgcgattcagaagcatagccactcccattttatgagctactcacatgacaaatgtcatcttttgctataacctttgccaagttagagaaaagatggatttaatgagataaatgaaaagatatttaacctaatatatcaaggcaaaaaaaaaaaaaaaaaaaaaaaaaaaaaaaaaaaaaaaaa

SEQ ID NO: 402621 - DNA, 1000 bp, Homo Sapiens; identical to SEQ ID NO: 116611

SEQ ID NO: 402622 - DNA, 1000 bp, Homo Sapiens; identical to SEQ ID NO: 118159

SEQ ID NO: 402623 - DNA, 1000 bp, Homo Sapiens; identical to SEQ ID NO: 285474

SEQ ID NO: 402624 - DNA, 1000 bp, Homo Sapiens; identical to SEQ ID NO: 118160

SEQ ID NO: 402625 - DNA, 972 bp, Homo Sapiens; identical to SEQ ID NO: 118161

SEQ ID NO: 402626 - DNA, 930 bp, Homo Sapiens
atggaaccagagaatgacacagggatttcagaatttgttcttctgggactttctgaggaaccagaattgcagcccttcctctttgggctgtttctgtccatgtacctggtcactgtgctcgggaatctgctcatcatcctggccacaatctcagactcccacctccacacccccatgtacttcttcctctccaacctgtcctttgcagacatctgtttcatctccactacaatcccaaagatgctcattaacatccagacacagagcagagtcatcacctatgcaggctgcatcacccagatgtgcttttttgtactttttggagggttagacagcttactcctggctgtgatggcctatgatcggtttgtggccatctgtcatcctctgcactacacagtcatcatgaaccctcggctctgtggactcctggttctggcatcctggatgattgctgccctgaattccttgtcacaaagcttaatggtattgtggctgtccttctgcacagacttggaaatcccccactttttctgtgaacttaatcaggtcatccaccttgcctgttctgacacctttcttaatgacatggggatgtattttgcagcagggctgctggctggtggtccccttgtggggatcctttgctcttactctaagatagtttcctccatacgtgcaatctcatcagctcaggggaagtacaaggcattttccacctgtgcatcacacctctcagttgtctctttattttgttgtacgggcctaggtgtgtaccttacttctgctgcaacccacaactcacacacaagtgcaacagcctcagtgatgtacactgtggccacccccatgctgaacccctttatctacagtctgaggaataaagacataaagagggctctgaaaatgtccttcagaggaaagcaataa

SEQ ID NO: 402627 - DNA, 1000 bp, Homo Sapiens; identical to SEQ ID NO: 118162

SEQ ID NO: 402628 - DNA, 1000 bp, Homo Sapiens; identical to SEQ ID NO: 291231

SEQ ID NO: 402629 - DNA, 1000 bp, Homo Sapiens; identical to SEQ ID NO: 223528

SEQ ID NO: 402630 - DNA, 1000 bp, Homo Sapiens
acccttagaggggagaacgaagcaatcagacatccccttgggccctgcttccaggtctccctgtcccccttgcctgccttcttccctgctctgtcccctaagctccctccaggcagggaaaagaggccaggtgctaaaaatgagcctttctcaagcacgtgagcagcggaaggcagacaggcgccagagcccagcactcccttttccagcagctgtggtgggggagggttcccctccagtttgtcaagagttgaaggaggctctgtggccaggtgacctggctgccttccaccccttgtacctcagtctaaacatggagtggccgctgacaaggcgctccagccccagagccagcgtcttcatggggaagatgaatggacctgagtagctgaaggaaggcccctccctacccaaagactggaggcttctcagcctcaatttccctgtctgtacagctgagggctctgcctgtcccccactgctatcagtatggaaccccagctggggtcccctattgagtgccgactccccccaccgccagcagctgctcctccagccacacccctcctgctccccccacccctagcccttgaccctggctggcctgccccgctccacaggccaccagatgggctcctgagaccctccccaggctgcttacagctcattctgctgggggtagagatgaggggagggagtaagttaaaccttggactagcaagtagaagcctggggggatgcgtgtgcctcagtttcctcctccacaactgaatatttatagtggctgaaaactggggagatacttgatggcgcgaatgtccgttttctctcccttcccacctcctgcaggaagcaggacggggcaggcagcacctggtaggcacagtgctttgcccctcctccccttcccttctggaagtcttggggcctcagtgcttgcaacagccggccttgggcaaataaaagactaggttgtttactaaaaaaaaaaaaaaaaaaa

SEQ ID NO: 402631 - DNA, 1000 bp, Homo Sapiens; identical to SEQ ID NO: 291234

SEQ ID NO: 402632 - DNA, 1000 bp, Homo Sapiens; identical to SEQ ID NO: 291235

SEQ ID NO: 402633 - DNA, 1000 bp, Homo Sapiens; identical to SEQ ID NO: 291236

SEQ ID NO: 402634 - DNA, 1000 bp, Homo Sapiens; identical to SEQ ID NO: 118164

SEQ ID NO: 402635 - DNA, 1000 bp, Homo Sapiens
atgttggcctctcaaatgatttggataccactctgcaaagtatttctaacctttaattcccagttttaaaacagatataataatagcatttaattggaatatactaggcagctggaaaagtatttgaaactaaattgacattaaaattaagatttgttttcaagtggatgtccattaaaagtagaaaaatatttgggataagtgagtgtgtatttccttacatggctactaaataaaatataatgagtatacaagtatatctcctcttttgctatggaggctccatgttcaaggcaatggctttttaaatcttggctatctaaaattttttccctttgttttgaatatttgtaagtttttaagaagttagtgtcagcaaattaattgaagttatgcttctatactgggacatatttaaatactgagtatagtactgctgctactgcttctacaatgtaaaatgtatgacttggtgttttaaagtaaaaattatgatgttacttgtggagaaactaaaaatgttgtacaactgaccgaaagaaaacccttggggataagtttagtgaggggattggaatccccaaaaagataacatttttcttctgcttttaaaaactgaaattccctgttctagttcctaacaattctcattacatactatgccagattacaaaatacttatttttaaaatgaaatctatatattgactttcttatcaatcatcttactgtgcaatcaaaattagagtactttggtttgaaaacaacacttagagcctccagataacttttaagacttatttagctttgtgggtggtattttcatgcaaataagtaagggtgggttttatattttgtagaagttttcggtcctattttaatgcttttgtatggcagtatgtatatattgtgttaagttcctcaagaatctccttaaaaactttgaagttaatacttttgtgcaactgtgttttgaataaagccatgacagtgttaaaaac

SEQ ID NO: 402636 - DNA, 1000 bp, Homo Sapiens
ctctggggatctgggccagctggacggtctgggtttcctctatgtcaccggccacatcaaagaaatccttatcactgctggtggtgaaaatgtgccccccattcctgttgagaccttggttaagaagaagatccccatcatcagtaacgccatgttagtaggagataaactgaagtttctgagcatgttgctgacgctgaagtgtgagatgaatcagatgagcggagaacctctggacaagctgaactttgaggccatcaacttctgtcgggatctggacagccaggcatccaccgtgactgagattgtgaagcagcaagaccccctggtctacaaggccatccagcaaggcatcaatgctgtgaaccaggaagccatgaacaatgcacagaagattcaaaagtgggtcatcttggagaaggacttttccatctatggtggagagctaggtccaatgatgaaacttaagagacattttgtagcccagaaatacaaaaaacaaattgatcacatgtaccactgactgctttgatggagctgctctcagctgttctgatgccttcagcaggaagacctcattgcaataagtgaaatgctgctctaggtagaagctctccctgctgtttttaagaagccacattcctcattggtcagtttcttgattgttcgtctgttggagaggtgctccctagaagaacctgccatacgtttcaaagcaataaaatcactgtatatctttctaaggaccttcaagtcatgactccagggaagcctattgggaagtctactaaaaactgcctgatttacaagaaagacctgaacttgtgggctcccatttgatttttttctcctcaggggactcagacattagaaagaaaaagcctcacagatttgaagaactggacccccaaatcaactcacctgcctggaagcaactgggaaacccttccaataagtcctgataataaagcacttcagggtcccaaaaaaaaaaaaaaaa

SEQ ID NO: 402637 - DNA, 1000 bp, Homo Sapiens; identical to SEQ ID NO: 291238

SEQ ID NO: 402638 - DNA, 1000 bp, Homo Sapiens; identical to SEQ ID NO: 118165

SEQ ID NO: 402639 - DNA, 1000 bp, Homo Sapiens; identical to SEQ ID NO: 118166

SEQ ID NO: 402640 - DNA, 1000 bp, Homo Sapiens
ctgggcccaccagcattttcttttatgaacatgatacactttggccttcctttccccagcgcccctgagggccagaggcagatgtgggctgcaggctgcacagcccgagggtctctggctgcgggcggtgggccccttcatggggctcacctggtggattcacattaaaccggtttctgtgggcacctttgtccttgctgctggtggggaagggaagccagatccagcaccccctggggggccatcgggagtgtggctgggggtgaagggggctctgtggcaatatggggttgggtagtgtgggtggcaggccatcccctctaatcttggaacctctgaatatgggacctcccacagcaaagggtgacttttgtcattaagaaagactggggtgggtgtggtggctcacgcctgtaaccccagcactttgggaggccaaggtgggcagatcacgaggtcaagagatcgagaccatcctggcgaacatggtgaaaccccatctctactaaaaatacaaaaaattagccgggtgtggtggtgggcacctgtcgtcccagctactagggaggctgaggcaggagaatggtgtgaacccaggaggcacagcttgcagtgagcgaagatcgcaccactgcacgcactccagcctgggtgacagagcgagactccgtctcaaaaaaaaaaatttcaagactggagaggtgatcctgaattgtccagctacgccccatgtcatcacagggccttcatgacagggccagagccagccagctttgaagacgcggccctgccccgacacaggcagcctggagaagctgggcaggacaagtaggacatccctggagcctccagaagggactggcctctgcccacaccttgacttcagtatttctgacctcctaaactctaataaagtcatgcttacagccactaaaaaaaaaaaaaaaaaaaaaaaaaaaaaaaaaaaaaaaaaaaaaaaaaaaaaaaaaaaaaaaaaaaa

SEQ ID NO: 402641 - DNA, 1000 bp, Homo Sapiens; identical to SEQ ID NO: 118167

SEQ ID NO: 402642 - DNA, 1000 bp, Homo Sapiens; identical to SEQ ID NO: 223530

SEQ ID NO: 402643 - DNA, 1000 bp, Homo Sapiens
tcatggacctttctttccaagaattctgaggcgtaggaaaggaaaaagagaatttggaaagactataacacatattgtagcaaaaatgatgactactgaaatgataaaggatttatcttcagacacacttctccaacagcatggtgatttggatttggctttggataattgttatagtggagatacagtaataatttttccaggagaatatcaagctgcaaatcttgctttgttgacagatgacatcattataaagggagttggaaagagagaggaaattatgattacttctgaaccttctcgtgacagttttgtggtgtccaaagctgacaatgtgaaactaatgcatctatctttgatacaacaagggacggttgatggtatcgtggtggtggagtctggtcacatgactctagaaaactgcatattaaaatgtgaaggaacaggagtgtgtgttcttacaggggctgctttgacaattacagacagtgaaataactggcgcccagggtgctggtgttgaactgtatcctggaagcatagctattttggaaagaaatgaaattcatcactgtaataacctcagaaccagtaacagttcaaaaagcaccttaggtggagttaatatgaaggttcttccagcacccaaattgaagatgactaataatcatatttatagcaacaaaggctatggagtaagcattcttcaaccaatggaacagttttttatcgtagcagaagaagctctcaacaaaagggcttcttcaggagataaaaaagatgataaaatgctcttcaaagtaatgcaaaatctgaatctggaaatgaataataataagatagaagcaaacgtcaagggggatatcagaatagtcacaagttaaagcgtctgaattgatgttaaagttttatatttcacaaatttgtttaatacatgattctcataccccactgaaatggtagtttcaattcaaagcttaattaaaaaatatttaaatatc

SEQ ID NO: 402644 - DNA, 1000 bp, Homo Sapiens; identical to SEQ ID NO: 223531

SEQ ID NO: 402645 - DNA, 1000 bp, Homo Sapiens; identical to SEQ ID NO: 291242

SEQ ID NO: 402646 - DNA, 1000 bp, Homo Sapiens
aatccaagcctactggagaggatgtgttgttagaaagtggtacagaaacctgaggaaaacagtacctcccacagatgccaagttaagaaaaaaattctttgaaaaaaagttcacagaaatcagccaccgcatcctgtgctcatacaacaccaacattgaagagctctttgcagaaatcgatcagtgcttggccataaatcgaagtgttcttcagcagttggaagaaaaatgtggccatgagatcacagaagaggaatgggagaaaatccaagtgcaggctctgcgccgggagacccacgagtgctccatctgcctggcccctctctccgctgctggcggtcagcgcgtgggtgcaggcaggcgttccagagagatggccctcctgtcctgctcacatgtgttccaccatgcgtgtctgctggcactagaggagttctccgtgggagacaggcctcctttccatgcctgtcctctctgccgctcctgctaccagaagaagattcttgaatgttgaattcatagtcaaggaaagttaggtaattctgaggaaaaaagtttaccatcattttggatgaactgcatgagttctgggttaagtactacaatgtaatctgtttcccagggaaataagctattggtagttgtaggaaatcttagtatattttaaaagctgacatcccacctaattttaatctttggtctctaaaaagtaaatttcaaatttatgagtttaatcacttcaaatatgaatagcaaaaaatgagagcttgcttacttctaaaaattgaggttaagatatagctagtgtctgaacgacactccttaaagtaagttccaaatgtaaaacactccttaagttccaaatgttttccgctaatagtctgtcctaaagcctttgccattcctaatactcgttttgtaataattgctgtatttctgtgtaataaaatataaaaataaaatattcagtggtattcaacatcaaaaaaaaaaaaaaaaa

SEQ ID NO: 402647 - DNA, 1000 bp, Homo Sapiens; identical to SEQ ID NO: 118168

SEQ ID NO: 402648 - DNA, 1000 bp, Homo Sapiens; identical to SEQ ID NO: 118169

SEQ ID NO: 402649 - DNA, 1000 bp, Homo Sapiens; identical to SEQ ID NO: 118170

SEQ ID NO: 402650 - DNA, 1000 bp, Homo Sapiens
tctatgctgggccatttagcaaaaattgcaatctcagggctctgaagaggctgtttaaaagctttggcccagtccagtcaatgacttttgttcttgaaacccgtcagcctcatctctgtatacagtatgaagtcctagaagctgcccagctggccatagagtccttggatggtattctggtagatggtatctgcatcaaggtgcagaggcctgtgacagagctcacgcttgattgtgacaccctcgtgaatgagctggaaggagattctgaaaaccaaggctctatatatctgtctggagtgagtgaaaccttcaaagaacagctattgcaggagccccgcctctttcttggcctggaagctgtgatcttgcctaaagatcttaaaagtggaaagcagaaaaaatactgtttcctgaaattcaaaagttttggcagtgcccagcaggccctcaacattctcacaggcaaggactggaagctgaaaggcaggcatgccctaacccccaggcacctccatgcctggctcagaggcttaccacctgaatcaacaaggctcccagggcttcgtgttgtacctcccccctttgaacaggaggccttgcagactctgaaactggaccacccgaagatagcagcctggcgctggagccggaagattggaaagctctacaacagcttgtgcccgggcactctctgcctcatcctgctgccaggaaccaagagcactcatggttcactctctggtctaggactgatgggaataaaagaggaagaagaaagcgctggcccaggcctgtgttcgtgagtcggcctgccatgtttccatgtgccatttcttaccccttgtaggcaatggcaaagaatgtggtcaggctgtagcctccccaaccagcagacagttttatggaaacttggtatagcagctaaaagagtttagtttgtttatatggcatgtataagttttcaataaatgcctaaagttcaagcataaaaaaaaaa

SEQ ID NO: 402651 - DNA, 1000 bp, Homo Sapiens
atggaaagagatgggcaaaaccaaaaatcaccacagagaaaaaaaatcatccagatttcatgatagattggatgtattttgaaacacctctctccatacaaatgaaataattcagcaaaattctagaaaatgctggtgtaggagctcagtggaaatctcccgtaagtgctgtgagaaattataaattctggggactccagctgatacagtgtgcattcacttacagcttcctttgcccctttgtacactagagcacaacaggaaatattggcttatctctgtaggaagtgtctctataggagttgcttactgaactgaatatctttgtttagaactaattgacctttctaaaacagcatttttaaagagcttactcaaataaggcagactttaaccatctgataagtcagagacaaatcagtcctcttctaagcaaggttgacagtcagtgcaagagaaaagaaagcacagaaagaaaggcaccatcagacaaaagaacagtgtattagtaaaaaccagataattaagaaaattttatttaatgtgaacattgaattctaacacaaatccttttcctgcattatgatagtatctgtgtgaaccaaccttttttcagccctttttgttatggaatgttaagaatgttagtttacaaggttataaagtagaagagtctaattagaaaccagaaaatatctcagtcttttggtctgaatttgttttcctttggttagattcttaaagtagaaaaaaaaaaaactactacttattttgtaaacattttgaggattttgattcagatattttaaattattatgagagataaagaataaccctgtccaaaaaagtaagaaaatgaataaaatttgtttaaaagaggattctcttaaaatataaccaaagggacagattttgacagcagtcttcattgttgttccatatgagtgttttctaaacctaacagatgtaagcaataaataagtaaaaaaaaaaaaaaaaa

SEQ ID NO: 402652 - DNA, 1000 bp, Homo Sapiens; identical to SEQ ID NO: 223532

SEQ ID NO: 402653 - DNA, 1000 bp, Homo Sapiens; identical to SEQ ID NO: 118171

SEQ ID NO: 402654 - DNA, 1000 bp, Homo Sapiens; identical to SEQ ID NO: 291245

SEQ ID NO: 402655 - DNA, 1000 bp, Homo Sapiens; identical to SEQ ID NO: 220430

SEQ ID NO: 402656 - DNA, 1000 bp, Homo Sapiens; identical to SEQ ID NO: 223533

SEQ ID NO: 402657 - DNA, 1000 bp, Homo Sapiens; identical to SEQ ID NO: 291248

SEQ ID NO: 402658 - DNA, 1000 bp, Homo Sapiens; identical to SEQ ID NO: 223534

SEQ ID NO: 402659 - DNA, 1000 bp, Homo Sapiens; identical to SEQ ID NO: 220842

SEQ ID NO: 402660 - DNA, 1000 bp, Homo Sapiens; identical to SEQ ID NO: 223535

SEQ ID NO: 402661 - DNA, 1000 bp, Homo Sapiens; identical to SEQ ID NO: 291250

SEQ ID NO: 402662 - DNA, 1000 bp, Homo Sapiens
acacccttaggaacaaagaagtgatgatggctctgaagaaaatctttggtaggaagttgtttaaagactggcagcaacaccactaggactaatgagggatatctgatttctattaagactgatttccatcacttcactgtaagaaatgatttgtttacctggtttatatttttctttcaaaaattttgagcacatattatattaggcagtgtagtaggttcaagaaacacaggagcaagcaaaacaaattccataatgtcatcaaacataaagtttaatgtgatggaggccccaaataaccaaacgcgtaagtacatatgtcaggataattcggtggcaaggagaactaaggaggtaggaagtatggggagggttagagtaggaatctgctgtgtaaaaaagaatgtggcatttctcctaggacaaaaacctttggaattttccaagtaatagaagtatcttactgaaattccatatgagataatctttatttttgcctattttttttccttttgtgtttccttcagcaggaatgtactgatgataatttttctcacaacagtttttatctagaatatcatttttgttaatcttaattcttgaagagaatttttaatgggtatttaattttagggagagatttttctagccattgaaaatatcttgtttttccccagcttattgaagtataattaacaaataaaaattgcatatatttaggcttcacaacatgatgctttagtatatgtatacattgtgaagagactaccacaatcaagctaaacctacattactgtccctgcattagtttactgttgaatactagaagttcttcattctatctaactgcattttcatacccattaagccaatgtgacaagctctttgtttcagttggagtgtttgcacaatttaaatttgataaatttttgatagaattaaatttaaatttatcctccaactaaatttttgatagaattaaatttaaatttgtcctcca

SEQ ID NO: 402663 - DNA, 1000 bp, Homo Sapiens; identical to SEQ ID NO: 118172

SEQ ID NO: 402664 - DNA, 1000 bp, Homo Sapiens; identical to SEQ ID NO: 118173

SEQ ID NO: 402665 - DNA, 1000 bp, Homo Sapiens; identical to SEQ ID NO: 118174

SEQ ID NO: 402666 - DNA, 1000 bp, Homo Sapiens; identical to SEQ ID NO: 223536

SEQ ID NO: 402667 - DNA, 1000 bp, Homo Sapiens; identical to SEQ ID NO: 223537

SEQ ID NO: 402668 - DNA, 1000 bp, Homo Sapiens
cctgccaggtctacgtgaatcatggcgagaacctgaagacggagcagtggccccagaagctgatcatgcagctcatcccccagcagctgctgaccaccctgggccctttgttccggaactcaaggatggtccagttccatttcaccaacaaggacctggagtctctcaaaggcctctaccgcatcatgggcaacggcttcgcgggctgcgtgcacttcccccacacggcgccctgtgaggtgcgcgtgctcatgctcctgtactcgtccaagaagaagatcttcatgggcctcatcccctacgaccagagcggcttcgtcaacggcatccggcaggtcatcaccaaccacaagcaggtccagcagcagaagctggagcagcagcagcgaggaatggggggacagcaggcacccccagggctggggcccattctggaggaccaagccaggccctcacagaatctgctccagctccgcccaccgcagccccagcctcagggtaccgtaggggcctctggggccacggggcagccccagccccaaggtactgcccagcccccgccaggtgcccctcaaggccctcctggagcagcttctggcccaccccctcctggacccatccttcggccccagaaccctggggccaaccctcagctgcgaagcctcctcctcaacccaccaccgccgcagactggggtgcccccaccccaggcctccctccaccacctccagccaccaggggctcctgcgctgctgcctccgccgcaccagggcctggggcagccccagttggggcccccactcctgcatccaccacctgcccagtcctggcccgcacaacttccccctcgggctccactgccaggtcagatgctgctgagcgggggtccccggggcccggtcccccagccgggcctgcagcccagcgtcatggaggacgacatcctcatggatctcatctgaatccccaacacccaataaagttcctttttaacacacaa

SEQ ID NO: 402669 - DNA, 1000 bp, Homo Sapiens
tcagcggtgggcagtcctagtccgaggtgccaccgtggaaggacagaatggcagcaagagcaactcaccaccagccttgggcccagaagcatgccctgtctccctgcccagtcccccggaagcctccacactcaagggccctccacctgaggcagatcttcctaggagccctggaaacttgacggagagagaagagctggcagggagcctggcccgggctattgcaggtggagacgagaagggggcagcccaagtggcagccgtcctggcccagcatcgtgtggccctgagtgttcagcttcaggaggcctgcttcccacctggccccatcaggctgcaggtcacacttgaagacgctgcctctgccgcatccgccgcgtcctctgcacacgttgccctgcgggtccacccccactgcactgttgcagctctccaggagcaggtgttctcagagctcggtttcccgccagccgtgcaacgctgggtcatcggacggtgcctgtgtgtgcctgagcgcagccttgcctcttacggggttcggcaggatggggaccctgctttcctctacttgctgtcagctcctcgagaagccccagccacaggacctagccctcagcacccccagaagatggacggggaacttggacgcttgtttcccccatcattggggctaccccaggcccccagccagctgcctccagcctgcccagtccactccagcccagctggtcctgtccttcctgcaccttcatcaatgccccagaccgccctggctgtgagatgtgtagcacccagaggccctgcacttgggacccccttgctgcagcttccacctagcagccaccagaggttacaaggggagagtggcccttccctcacaagtccgacatctccaggcccccactgaactccggggacctctactgactgcttgctgggacagtcaccagggttggggggaagggccacaaaatgaaaccattaaagacccttaagagcc

SEQ ID NO: 402670 - DNA, 1000 bp, Homo Sapiens
tgcactgggttctctccttcttcttcctgctgtcctgcccaagaactgagggtctccccggcctctactgccctggctgcagtcagtgcccagggcgaggaatgtggccaggggatccaggacctgggatccagggccctgggctggacctcaggacaggcatggaggccacaggggcccagcagcccaccctttcctctccccactgcctcctctcccttcctacactcccagctcgagccgtccagctgcggtgggatctgagtatatctagggcgggtgggcgggtagcagtgctgggcctgtgtcttgagcctggagggagactgctcctgccgccctctgccctgccggagacagacccatgcgctgcctgcccaccgtgcccctttgtccccatgtcaggcggaggcggaaggcccaccgtgccagaggctgggcaccagccttaaccctcactctgctagcacctcctccctttccccaaggtagcacatctggctcactccccactccgtctctggagcccaccagggaaggccctcatcccctgccgctacttctctggggaatgtgggttccatccaggattgggggcctctctgctcacccactctgcacccaggatcctagtcccctgccctctggcacagctgcttcctgcaagaaagcaagtctttggtctccctgagaagccatgtccctcgtgctgtctcttgcctgtcccacctgtgccctgccctccagcttgtatttaagtccctgggctgcccccttggggtgccccccgctcccaggttcccctctggtgtcatgtcaggcattttgcaaggaaaagccacttggggaaagatggaaaaggacaaaaaaaattaataaatttccattggccctcgggtgagctgagggtttttgcaaggaaaaaaaaaaaaaaaaaaaaaaaaaaaaaaaaaaaaaaaaaaaaaaaaaaaaaaaaaaagaaaaaaaaaaaaaaaaaaaa

SEQ ID NO: 402671 - DNA, 1000 bp, Homo Sapiens
ctgcaattacaccacagatgtggttgccagcgtcccgtttggcaccccggtggactcctggcaggcccctgaggatccctttgtgaaacactgcaagcgtttcttcgaattctgcatccccagacctatcctggttttactcttatcatttccatccataatggtcccactggcccggattttgcccaataagaaccgagacgaactgaatggcttttttaacaaactcattaggaatgtgattgccttgcgggaccagcaagctgccgaagagaggcggagagacttcctccaaatggtcctggatgcccgacattctgcaagtcccatgggcgtgcaagactttgacatcgtcagagacgttttctcctctactgggtgcaagccgaacccttcccggcaacaccagcccagccctatggccaggcctttgactgtggatgagattgtgggccaggccttcatcttcctcatcgctggctatgaaatcatcaccaacacactttcttttgccacctacctactggccaccaaccctgactgccaagagaagcttctgagagaggtagacgtttttaaggagaaacacatggcccctgagttctgcagcctcgaggaaggcctgccctatctggacatggtgattgcagagacgctgaggatgtacccgccagctttcagattcacacgggaggcagctcaggactgcgaggtgctggggcagcgcatccccgcaggcgctgtgctagagatggccgtgggtgccctgcaccatgaccctgagcactggccaagcccggagaccttcaaccctgaaaggtaccgctgcagctagaatccaaatctgccctaggtccaaaaaatggtgtctatatcaagatcgtatcccgctgacacagaaggctgccgggtggggggagggcacccccaaattcaaagaaaaccctaagtgtggatgttcagaattttggaaaaatgtcactgaagtgattgaaagccg

SEQ ID NO: 402672 - DNA, 1000 bp, Homo Sapiens; identical to SEQ ID NO: 291258

SEQ ID NO: 402673 - DNA, 1000 bp, Homo Sapiens
cgccggagcatcaatgccgctgcctctggaggagcccttggattttctccatgcactgtgaacttctgtggcttcagttctcatgctgcctcttccaaaaggggacacagaagcactggctgctgctacagaccgcaaaagcagaaagtttcgtgaaaatgtccatctttgggaaattttctaccctgctcttgagcctgataacccatgccaggtcttatagattcctgatctagaacctttccaggcaatctcagacctaatttccttctgttctccttgttctgttctgggccagtgaaggtccttgttctgattttgaaacgatctgcaggtcttgccagtgaacccctggacaactgaccacacccacaaggcatccaaagtctgttggcttccaatccatttctgtgtcctgctggaggttttaacctagacaaggattccgcttattccttggtatggtgacagtgtctctccatggcctgagcagggagattataacagctgggttcgcaggagccagccttggccctgttgtaggcttgttctgttgagtggcacttgctttgggtccaccgtctgtctgctccctagaaaatgggctggttcttttggccctcttctttctgaggcccactttattctgaggaatacagtgagcagatatgggcagcagccaggtagggcaaaggggtgaagcgcaggccttgctggaaggctatttacttccatgcttctccttttcttactctatagtggcaacattttaaaagcttttaacttagagattaggctgaaaaaaataagtaatggaattcacctttgcatcttttgtgtctttcttatcatgatttggcaaaatgcatcacctttgaaaatatttcacatattggaaaagtgctttttaatgtgtatatgaagcattaattacttgtcactttctttaccctgtctcaatattttaagtgtgtgcaattaaagatcaaatagatacatt

SEQ ID NO: 402674 - DNA, 1000 bp, Homo Sapiens
cctgatgctggcccagaactgcgcagtcatgcacaacctgctgggccctgcctgcattttcctgcgcaagggcttcgctgagaacaggcagcctgatagatcactgcgaccagaggaaattgaagagctccgagaggccttcagagaattcgacaaggacaaggatggctacatcaactgccgggatctgggcaactgcatgcgcaccatgggctacatgcccaccgagatggagctcatcgaactgtcccagcagatcaacatgaacctgggtggccatgtagattttgatgacttcgtggagctaatggggcctaaactcctggcagagacagcagatatgattggtgtaaaggaactgcgagatgctttccgagagtttgacaccaatggtgatggggaaataagcaccagtgagctgcgagaggctatgaggaagctcctgggtcatcaggtgggacaccgagacatagaggaaattatccgagatgtggacctcaatggggatggacgagtggactttgaagagtttgtccggatgatgtcccgctgaggccgcgagggcccctccaggactgccaagctcccaaaggcggggctaagaggagctagagcttgcctcacccgctgtagccgccgagagcccaggatgtactggcggatggggcctgcctgcaccccggggaggcgcccaccccggacccccacccctccgcactgtgaaagactaactcctgcaactggaaagcgggggcgcccgccgacgaggaggccaccgtgccaagccggcagaggtcatgccaggcgccaagggccatgtgcccagctgctgctggctgggtgggccagggagcccgccagcagaccccacacagcatgtccgccccagggcaaagcctcccaccttcgctctgcgcccgtcccagctcgcctcagccctgttatctcagaaccaataaaaatatttccaagagcaaaaaaaaaaaaaaaaaaaaaaaaa

SEQ ID NO: 402675 - DNA, 1000 bp, Homo Sapiens; identical to SEQ ID NO: 118177

SEQ ID NO: 402676 - DNA, 999 bp, Homo Sapiens; identical to SEQ ID NO: 291259

SEQ ID NO: 402677 - DNA, 1000 bp, Homo Sapiens; identical to SEQ ID NO: 291261

SEQ ID NO: 402678 - DNA, 1000 bp, Homo Sapiens; identical to SEQ ID NO: 291262

SEQ ID NO: 402679 - DNA, 1000 bp, Homo Sapiens; identical to SEQ ID NO: 223539

SEQ ID NO: 402680 - DNA, 1000 bp, Homo Sapiens; identical to SEQ ID NO: 291263

SEQ ID NO: 402681 - DNA, 1000 bp, Homo Sapiens; identical to SEQ ID NO: 291265

SEQ ID NO: 402682 - DNA, 1000 bp, Homo Sapiens; identical to SEQ ID NO: 291266

SEQ ID NO: 402683 - DNA, 1000 bp, Homo Sapiens
ccaaggggatttttatgtctggggcagaaacactcaagttgattagaaagaccaggccaatgtcagggtacctggggccaaacccacctgctagtgtgaattaaagtactttaattttgttttctgtggaggtggaaaagcaacattcatagtctttggagaaatgcttagaaattcagcatttgacccttgctgtgaattaagcccaattaattcctgtttgtctacatatgatctgtctgtggcaaaagtttaatcagaggaaattctttcccagtctgtcgatttatgcctcagccacttgcctgtgctacaattcattgtgttacctgtagattcaggtaatacaaactatatataatcatcaagtaatacaaactaatttagtaatagcctgggttaagtattattagggccctgtgtctgctgtagaaaaaaaaattcacatgatgcacttcaaattcaaataaaaatccttttggcatgttcccatttttgcttagctcaattagtgtggctaaccaagagataactgtaaatgtgacattgatttgctcttactacagcttcagtgattgggggaggaaaagtcccaacccaatgggctcaaacttctaaggggtactcctctcatccccttatccttctccctcgacattttctccctctttcttcccatgaccccaaagccaagggcaacagatcagtaaagaacgtggtcagagtagaacccctgaagtattttttaatcctacctcaaaatttaacagttacctgagagatttaacattatctagttcattgaatcattgtatgtggtcatggataaattgcacaccttggaattcgctttctaaaggaaatcaaatgaatggaggaactttccaaacaccactttacttgtgttatatagccaatataactatctctactgaatgtcattgaaaaactaaaaaattaaacttatttacaaataggtaaaaaaaaaaaaaaaaaaaaa

SEQ ID NO: 402684 - DNA, 1000 bp, Homo Sapiens; identical to SEQ ID NO: 118178

SEQ ID NO: 402685 - DNA, 1000 bp, Homo Sapiens
aggcaactttggctttggggattcacgtggtggcggtggaaatttcggaccaggaccaggaagtaactttagaggaggatctgatggatatggcagtggacgtggatttggggatggctataatgggtatggaggaggacctggaggtggcaattttggaggtagccccggttatggaggaggaagaggaggatatggtggtggaggacctggatatggcaaccagggtgggggctacggaggtggttatgacaactatggaggaggaaattatggaagtggaaattacaatgattttggaaattataaccagcaaccttctaactacggtccaatgaagagtggaaactttggtggtagcaggaacatggggggaccatatggtggaggaaactatggtccaggaggcagtggaggaagtgggggttatggtgggaggagccgatactgagcttcttcctatttgccatgggcttcactgtataaataggagaggatgagagcccagaggtaacagaacagcttcaggttatcgaaataacaatgttaaggaaactcttatctcagtcatgcataaatatgcagtgatatggcagaagacaccagagcagatgcagagagccattttgtgaatggattggattatttaataacattaccttactgtggaggaaggattgtaaaaaaaaatgcctttgagacagtttcttagctttttaattgttgtttctttctagtggtctttgtaagagtgtagaagcattccttctttgataatgttaaatttgtaagtttcaggtgacatgtgaaaccttttttaagatttttctcaaagttttgaaaagctattagccaggatcatggtgtaataagacataacgtttttcctttaaaaaaatttaagtgcgtgtgtagagttaagaagctgttgtacatttatgatttaataaaataattctaaaggaaaaaaaaaaaaaaaaaaaaaaaaaaaaaaaaaaaa

SEQ ID NO: 402686 - DNA, 1000 bp, Homo Sapiens; identical to SEQ ID NO: 291268

SEQ ID NO: 402687 - DNA, 1000 bp, Homo Sapiens; identical to SEQ ID NO: 118179

SEQ ID NO: 402688 - DNA, 1000 bp, Homo Sapiens; identical to SEQ ID NO: 223542

SEQ ID NO: 402689 - DNA, 1000 bp, Homo Sapiens; identical to SEQ ID NO: 118180

SEQ ID NO: 402690 - DNA, 1000 bp, Homo Sapiens; identical to SEQ ID NO: 291272

SEQ ID NO: 402691 - DNA, 1000 bp, Homo Sapiens; identical to SEQ ID NO: 293978

SEQ ID NO: 402692 - DNA, 1000 bp, Homo Sapiens; identical to SEQ ID NO: 291274

SEQ ID NO: 402693 - DNA, 1000 bp, Homo Sapiens
caccttgtaaagcctgataataggaattgcaagaggccaagagaattggagtctccagtgccagatagtccacagctgtcctctcttggaaaatcagattcatctttctctgaaatttccggactattttataaagatgaagccttggagaaagatttaaatgatgtgagcaaggaaattaatctaatgttgtctacctatgcaaagcttttaagtgagagagcagcagtagatgcatcttacattgatgagatagatgaactcttcaaagaagccaatgctattgaaaactttctaatacaaaaaagagagttcctgcgacagaggtttacagtgattgcaaacacattacacagataaaatatatacttgaaataagctgagaatttaaacctattattgttataatgaaagaatgacatttatgctttgaaagctctcgagttgttaaagaaaatgtatatctcgaatagagaaggggaaactccttgaatttctaggtttaaaaaggaacttttaaattccttaatgttaatattaatgttcatgttaatgtcctaagctggccattaacatgaactacgtcacttttcttttgagggtcaaatatttagtgcattttatagaagtgtaaattatttaaatcttatgtggattcttttattttttccttaaacttcttagtgtttctgaaacttctaaaaaaggattcagttaatttataatgtttaataatattatacttttagaatattttgtttaaatatcagatagttttggagataattttgaaattttttttatggtcaggattataaaagaagattaaaaccttagaggtgatttttccagtttcttagaatataatgacataactgtgtgctatttccatttgattattttcactattagttattatgtatgactaataaaagctctcggcttaaaattattttcttgtggtaaaagtagtaaaataaaaaccagaaattactcacca

SEQ ID NO: 402694 - DNA, 1000 bp, Homo Sapiens
ttgcaacagcatcccctaaaaccattgctgtgttacctcagatgggatctagccctgatgtgataattgaagaaattattgaagacaacgtggaaagttctgcagagctagtttttgtaagccatgtaatagatccttgccatttctacattcggaagtattcacaaataaaagacgccaaagtactggagaagaaggtgaatgaattttgcaataggagttcacaccttgatccttcagacattttggaactaggtgcaagaatatttgtcagcagtattaaaaatggaatgtggtgtcgaggaactatcacagaattaattccaatagagggtagaaataccagaaaaccttgtagtccaaccagattatttgtccatgaagttgcactaatacaaatattcatggtagattttggaaattctgaagtcctgattgtcactggagttgttgatacccatgtgagaccagaacactctgctaagcaacatattgcactaaatgatttatgtctggttctaaggaaatctgaaccatatactgaagggctgctaaaagacatccagccattagcacaaccatgctcattgaaagacattgttccacagaattcaaatgaaggctgggaagaggaagctaaagtggaatttttgaaaatggtaaataacaaggctgtttcaatgaaagtttttagagaagaagatggtgtgcttattgtagatctgcaaaaaccaccaccgaataaaataagcagtgatatgcctgtgtctcttagagatgcgctagtttttatggaactagcaaaagatctgatctaataaagttggttgagacactttctcattttttcaatgtttctgtattggaagaagaacttaaagcttcctaatctattttgttggcgtcattcctctgctgaatttttaaatgttcactctggcttacctgttaatggaagaatttgcataatatctacttagaaagatagtgggccccggag

SEQ ID NO: 402695 - DNA, 1000 bp, Homo Sapiens; identical to SEQ ID NO: 291275

SEQ ID NO: 402696 - DNA, 891 bp, Homo Sapiens
cctgggccagcatggcggcgcccatgtaacccggtccgtgccgcaaagcgaacggcggccgcggcgcgggccccgcgggggttagaggtcaccatgctgagggtcgcgtggaggacgctgagtttgattcggacccgggcagttacccaggtcctagtacccgggctgccgggcggtgggagcgccaagtttcctttcaaccagtggggcctgcagcctcgaagtctcctcctccaggccgcgcgcggatatgtcgtccggaaaccagcccagtctaggctggatgatgacccacctccttctacgctgctcaaagactaccagaatgtccctggaattgagaaggttgatgatgtcgtgaaaagactcttgtctttggaaatggccaacaagaaggagatgctaaaaatcaagcaagaacagtttatgaagaagattgttgcaaacccagaggacaccagatccctggaggctcgaattattgccttgtctgtcaagatccgcagttatgaagaacacttggagaaacatcgaaaggacaaagcccacaaacgctatctgctaatgagcattgaccagaggaaaaagatgctcaaaaacctccgtaacaccaactatgatgtctttgagaagatatgctgggggctgggaattgagtacaccttcccccctctgtattaccgaagagcccaccgccgattcgtgaccaagaaggctctgtgcattcgggttttccaggagactcaaaagctgaagaagcgaagaagagccttaaaggctgcagcagcagcccaaaaacaagcaaagcggaggaacccagacagccctgccaaagccataccaaagacactcaaagacagccaataaattctgttcaatcattaaaaaaaa

SEQ ID NO: 402697 - DNA, 1000 bp, Homo Sapiens; identical to SEQ ID NO: 223543

SEQ ID NO: 402698 - DNA, 1000 bp, Homo Sapiens; identical to SEQ ID NO: 291276

SEQ ID NO: 402699 - DNA, 1000 bp, Homo Sapiens; identical to SEQ ID NO: 291277

SEQ ID NO: 402700 - DNA, 1000 bp, Homo Sapiens; identical to SEQ ID NO: 291278

SEQ ID NO: 402701 - DNA, 1000 bp, Homo Sapiens
acgccgggcccacgcagccgtcccctgccaagcctcagctcaaactcaaaatcaagcttgggggacaagtcctggggaccaagagtgttcctaccttcactgtgatcccagaggggcctcgctcaccctctccccttatggttgtggataatgaagaggaacctatggaaggagtcccccttgagcagtaccgtgcctggctggatgaagacagtaatctctctccctctccacttcgggacctatcaggagggttagggggtcaggaggaagaggaggaacagaggtggctggatgccctggagaagggggagctggatgacaatggagacctcaagaaggagatcaatgagcggctgcttactgctcgacagcgagctctgctccagaaggcgcggagtcaaccttcccctatgctgccgctgcctgtagctgagggctgcccacctcccgccctcacagaggagatgctgctgaagcgcgaggagcgggcgcggaagcggcggctccaggcggcgcggcgggcagaagagcacaagaaccagactatcgagcgcctcaccaagactgcggcgaccagtgggcggggaggccgggggggcgcacggggcgagcggcggggagggcgggctgcggctccggcccccatggtgcgctactgcagcggagcacagggttccaccctttccttcccacctggcgtccccgcccccacggcagtgtctcagcggccatccccctcaggcccgccgccgcgctgctctgtccccggctgtccccatccgcgccgctacgcttgctcccgcacaggccaggcactctgtagtcttcagtgctaccgcatcaacctgcagatgcggctgggggggcccgagggtcctggatccccccttttggctacgtaaggcccttaacccggactctgcgccccgtcccatgcccgctcttgagtatcttccccaccctattaaattacatccggtgcaaaaaaaaaaaaaaa

SEQ ID NO: 402702 - DNA, 1000 bp, Homo Sapiens
ttttcattgctcaagttgtgactacatgctctggaatactttcttatccctttgacacagttagaagacgtatgatgatgcagagtggtgaggctaaacggcaatataaaggaaccttagactgctttgtgaagatataccaacatgaaggaatcagttccttttttcgtggcgccttctccaatgttcttcgcggtacagggggtgctttggtgttggtattatatgataaaattaaagaattctttcatattgatattggtggtaggtaatcgggagagtaaattaagaaataacatggatttaacttgttaaacatacaaattacatagctgccatttgcatacattttgatagtgttattgtctgtattttgttaaagtgctagttctgcaataaagcatacattttttcaagaatttaaatactaaaaatcagataaatgtggattttcctcccacttagactcaaacacattttagtgtgatatttcatttattataggtagtatattttaatttgttagtttaaaattctttttatgattaaaaattaatcatataatcctagattaatgctgaaatctaggaaatgaaagtagcgtcttttaaattgctattcatttaatatacctgttttcccatcttttgaagtcatatggtatgacatatttcttaaaagcttatcaatagatgtcatcatatgtgtaggcagaaataagctttgttctatatctcttctaagacagttgttattactgtgtataatatttacagtatcagcctttgattatagatgtgatcatttaaaatttgataatgactttagtgacattataaaactgaaactggaaaataaaatggcttatctgctgatgtttatctttaaaataaataaaatcttgctagtgtgaatatatcttagaacaaaaggtatcctcttgaaaattagtttgtatattttgttgacaataaaggaagcttaactgttaaaaaaaaaa

SEQ ID NO: 402703 - DNA, 1000 bp, Homo Sapiens; identical to SEQ ID NO: 291279

SEQ ID NO: 402704 - DNA, 1000 bp, Homo Sapiens
gacaaagagcctgcagcaaagcttgacacagacccaagagaagaaagctcagctggaagaggaaatcattgcttatgaggaaaggatgaaaaagctcaatacggaattaagaaaactgcggggcttccaccaggagagtgagctggaggtgcacgcctttgacaagaagctagaggagatgagctgccaggtgctgcagtggcagaagcaacaccagaatgacctcaagatgctggcagccaaagaggagcagctcagggagttccaggaggagatggccgccttaaaagagaacctccttgaggacgataaggagccctgctgcctgccccagtggtctgtgcccaaagacacctgtaggctctaccgagggaatgatcagattatgaccaacttggagcaatgggcaaaacagcagaaggtcgccaatgagaaactaggaaaccagctccgagagcaggtgaactacattgccaagctgagtggcgaaaaggaccacctccacagtgtaatggtccacttgcagcaggaaaacaagaagctgaagaaggagatagaagagaagaagatgaaagccgagaacacaaggctatgcaccaaagccctaggcccgagcagaacggagtccacacagagggagaaagtgtgcggcaccttgggctggaaggggttgccccaggatatgggtcaaagaatggacctcaccaagtacatcgggatgccccactgcccgggttcctcatactgctagaatccacatctagccctgagcagcatttccacgggtgtttcttcagaggacagtgagttcccagccctccctctctcttgacctggatcagctcttacaggagtatatcacggtcccagcctattttgcaagacactaacttttgttgagttttgtccacttcctgccatggagtgagctttagaaccatactaccatctccaggcccaaactctgaaataaagacatgagcatgagcaaaaaaaaaaa

SEQ ID NO: 402705 - DNA, 1000 bp, Homo Sapiens; identical to SEQ ID NO: 291280

SEQ ID NO: 402706 - DNA, 1000 bp, Homo Sapiens; identical to SEQ ID NO: 291281

SEQ ID NO: 402707 - DNA, 1000 bp, Homo Sapiens; identical to SEQ ID NO: 223544

SEQ ID NO: 402708 - DNA, 1000 bp, Homo Sapiens
ctgtatgacaccaccttggccctgggccacgcggcggctttctcagatgactgcgatttgccctctgctcaggacataaacagactcgtgggacttcagaacacatatatgggctatctggactaccggaagaaggccatcaaggaccttggcatcagccccagcacctgctctttcaatcctggtgtgattgttgccaacatgacagaatggaagcaccagcgcatcaccaagcaattggagaaatggatgcaaaagaatgtggaggaaaacctctatagcagctccctgggaggaggggtggccacctccccaatgctgattgtgtttcatgggaaatattccacaattaaccccctgtggcacataaggcacctgggctggaatccagatgccagatattcggagcattttctgcaggaagctaaattactccactggaatggaagacataaaccttgggacttccctagtgttcacaacgacttatgggaaagctggtttgttcctgaccctgcagggatatttaaactcaatcaccatagctgatataactctacccttaaaatattccctgtatagaaatgtggaattgtccctttgtagccaactataacattgttctttatgaatattacctttgatacatatgatccacaatataaaaaccaaaaactactgtgtgcaaattataccttggaccatataggcattgattaacttctttaagtacatgtgataactatggaaatcaagattatgtgactgaaaaacataaaggaagagacccatctagataacagcaatcaacctgcttaattctgaatgacaattatatccacaaatttttaaaacttctacatgtatttttcacatgaagatctccttaacaggttgccaaccttttcttttataaaactattacatttaaaatatggacgtctgaaaaataaaatattcatcatttttacaaaaaaaaaaaaaaaaaaaaaaaaaaaaa

SEQ ID NO: 402709 - DNA, 1000 bp, Homo Sapiens; identical to SEQ ID NO: 291283

SEQ ID NO: 402710 - DNA, 1000 bp, Homo Sapiens; identical to SEQ ID NO: 291284

SEQ ID NO: 402711 - DNA, 1000 bp, Homo Sapiens; identical to SEQ ID NO: 291285

SEQ ID NO: 402712 - DNA, 1000 bp, Homo Sapiens; identical to SEQ ID NO: 291286

SEQ ID NO: 402713 - DNA, 1000 bp, Homo Sapiens; identical to SEQ ID NO: 291287

SEQ ID NO: 402714 - DNA, 1000 bp, Homo Sapiens
aggtgtccttccgcggcctgaggcgccaggtgtccgcctccgagctgcacacgtccgggatcctgggccccgagaccctgcgggacctggcccagggcactaagacgctgcaggaggtgacggagatggactcggtcaagcgctacctggagggcaccagctgcatcgcgggcgtcctggtgcccgccaaggaccagcccggccgccaggagaagatgagcatctaccaggccatgtggaagggcgtgctgcggcccggcacggccctggtgctgctggaggcgcaggcggccaccggcttcgtcatcgaccccgtgcgcaacctgaggctgtcggtggaggaggccgtggccgcgggcgtggtgggcggcgagatccaggagaagctgctgtcggccgagcgcgccgtcaccggctacaccgacccctacaccgggcagcagatctccctcttccaggccatgcagaaggacctcatcgtccgggagcacggcatccgcctgctggaggcccagatcgccacgggcggcgtcatcgaccccgtgcacagccaccgcgtgcccgtggacgtggcctaccggcgcggctacttcgacgaggagatgaaccgcgtcctggccgaccccagcgacgacaccaagggcttcttcgaccccaacacgcacgagaacctcacgtacctgcagcttctgcagagggccaccctggaccctgagacggggctcctatttctttctctctctctacagtgactgggcttcctccgtgcagttttctgcaactctggagaagttgaggcatacttgtgtgtctgggttgtttttttttttttttgtcattctttaattttgttgttttacccattcgttatctgtggaaaacgttttaagttgtcatgtgacagaaacttttcctttgtccatcgaggtgtttcataagttttttggtgtgttttctgggtcgtctatgtgtcatatggttttacttttctcccggaatt

SEQ ID NO: 402715 - DNA, 1000 bp, Homo Sapiens; identical to SEQ ID NO: 291288

SEQ ID NO: 402716 - DNA, 1000 bp, Homo Sapiens
ggaagatcctggagtcccagaggccccctgcaggcatccctgtagccccatccagtggctgaggaggctccaggcctgaggaccaagggatggcccgactcggcggtttgcggaggatgcagggatatgctcacagcgcccgacacaaccccctcccgccgcccccaaccacccagggccaccatcagacaactccctgcatgcaaacccctagtaccctctcacacccgcacccgcgcctcacgatccctcacccagagcacacggccgcggagatgacgtcacgcaagcaacggcgctgacgtcacatatcaccgtggtgatggcgtcacgtggccatgtagacgtcacgaagagatatagcgatggcgtcgtgcagatgcagcacgtcgcacacagacatggggaacttggcatgacgtcacaccgagatgcagcaacgacgtcacgggccatgtcgacgtcacacatattaatgtcacacagacgcggcgatggcatcacacagacggtgatgatgtcacacacagacacagtgacaacacacaccatgacaacgacacctatagatatggcaccaacatcacatgcacgcatgccctttcacacacactttctacccaattctcacctagtgtcacgttcccccgaccctggcacacgggccaaggtacccacaggatcccatcccctcccgcacagccctgggccccagcacctcccctcctccagcttcctggcctcccagccacttcctcacccccagtgcctggacccggaggtgagaacaggaagccattcacctccgctccttgagcgtgagtgtttccaggaccccctcggggccctgagccgggggtgagggtcacctgttgtcgggaggggagccactccttctcccccaactcccagccctgcctgtggcccgttgaaatgttggtggcacttaataaatattagtaaatccttaaaaaaaaaaaaaaaaaaaaaaaaaaaaaaa

SEQ ID NO: 402717 - DNA, 1000 bp, Homo Sapiens; identical to SEQ ID NO: 291289

SEQ ID NO: 402718 - DNA, 1000 bp, Homo Sapiens; identical to SEQ ID NO: 291290

SEQ ID NO: 402719 - DNA, 1000 bp, Homo Sapiens
tcccactttggaggaccagattatgaagaaggccctaacagtctgattaatgaagaagagttctttgatgctgttgaagctgctcttgacagacaagataaaatagaagaacagtcacagagtgaaaaggtgagattacattggcctacatccttgccctctggagatgccttttcttctgtggggacacatagatttgtccaaaaggttgaagagatggtgcagaaccacatgacttactcattacaggatgtaggcggagatgccaattggcagttggttgtagaagaaggagaaatgaaggtatacagaagagaagtagaagaaaatgggattgttctggatcctttaaaagctacccatgcagttaaaggcgtcacaggacatgaagtctgcaattatttctggaatgttgacgttcgcaatgactgggaaacaactatagaaaactttcatgtggtggaaacattagctgataatgcaatcatcatttatcaaacacacaagagggtgtggcctgcttctcagcgagacgtattatatctttctgtcattcgaaagataccagccttgactgaaaatgaccctgaaacttggatagtttgtaatttttctgtggatcatgacagtgctcctctaaacaaccgatgtgtccgtgccaaaataaatgttgctatgatttgtcaaaccttggtaagcccaccagagggaaaccaggaaattagcagggacaacattctatgcaagattacatatgtagctaatgtgaaccctggaggatgggcaccagcctcagtgttaagggcagtggcaaagcgagagtatcctaaatttctaaaacgttttacttcttacgtccaagaaaaaactgcaggaaagcctattttgttctagtattaacaggtactagaagatatgttttatctttttttaactttatttgactaatatgactgtcaatactaaaatttagttgttgaaagtatttactatgtttttt

SEQ ID NO: 402720 - DNA, 1000 bp, Homo Sapiens; identical to SEQ ID NO: 118182

SEQ ID NO: 402721 - DNA, 1000 bp, Homo Sapiens; identical to SEQ ID NO: 118183

SEQ ID NO: 402722 - DNA, 1000 bp, Homo Sapiens; identical to SEQ ID NO: 116409

SEQ ID NO: 402723 - DNA, 1000 bp, Homo Sapiens; identical to SEQ ID NO: 291293

SEQ ID NO: 402724 - DNA, 1000 bp, Homo Sapiens; identical to SEQ ID NO: 291294

SEQ ID NO: 402725 - DNA, 1000 bp, Homo Sapiens; identical to SEQ ID NO: 223545

SEQ ID NO: 402726 - DNA, 1000 bp, Homo Sapiens; identical to SEQ ID NO: 118184

SEQ ID NO: 402727 - DNA, 1000 bp, Homo Sapiens; identical to SEQ ID NO: 291296

SEQ ID NO: 402728 - DNA, 1000 bp, Homo Sapiens; identical to SEQ ID NO: 118185

SEQ ID NO: 402729 - DNA, 1000 bp, Homo Sapiens; identical to SEQ ID NO: 291298

SEQ ID NO: 402730 - DNA, 1000 bp, Homo Sapiens; identical to SEQ ID NO: 223547

SEQ ID NO: 402731 - DNA, 1000 bp, Homo Sapiens; identical to SEQ ID NO: 291299

SEQ ID NO: 402732 - DNA, 1000 bp, Homo Sapiens; identical to SEQ ID NO: 118186

SEQ ID NO: 402733 - DNA, 1000 bp, Homo Sapiens
gaggacgcttctcggctacagaatccctccccaccttggagctcttatctcaggtggacatggactgcagggtccacatgcgacccatcggcctgacgtgggtgctgcaactgaccttggcatggatcctgctagaagcctgtggagggagccgcccactccaagccaggtcccagcaacaccatgggctggcagctgatctgggcaaaggcaagctgcacctggcaggaccttgttgtccctcagagatggacacaacagagacatcgggccctggaaaccatccagaacgctgtggagtgccgagccctgaatgcgaatccttcctggaacacctccaacgtgcccttcgcagtcgcttccgcctgcggctattgggggtacgccaggcacagccgctctgcgaggagctctgccaggcctggttcgccaactgcgaagatgatatcacctgcggcccgacttggctcccactctcagaaaaaaggggctgtgagcccagctgccttacctatggacagaccttcgcagacgggacggacctttgtcgctcggctctgggccacgccctaccggtggctgctcctggagcccgtcactgcttcaacatctccatctccgcggtacctcgtcccagaccaggacgacggggccgggaagctccctcccggcgttcccgcagccctcgcacctccatcctggacgctgcgggcagcgggagtggcagtggaagcggcagcggcccctagcggacgcgtggccctgagttgggggagcgacccttcccccagccccgcccctcaggacacccagaaccccacccctcgtcctctcggccttctgtaatagttttgagatgtctgtccctcctccctggagctccagagacccacccctctccaggttatcccagaaatgacccaactctctcacttttccctctcccctttgaataaagtcgccagctagagcaaaaaaaaaaaaaaaaaaaaaaaaaaaa

SEQ ID NO: 402734 - DNA, 1000 bp, Homo Sapiens; identical to SEQ ID NO: 291302

SEQ ID NO: 402735 - DNA, 1000 bp, Homo Sapiens; identical to SEQ ID NO: 118187

SEQ ID NO: 402736 - DNA, 1000 bp, Homo Sapiens
tgttcccacccccagagctggcctgtgagcctgtccaggtggagatgtgcctcggtctgagctacaacaccacagccttccctaacatctgggtgggcatgatcacccaggaggaggtggtagaggtcctcagcggttacaagagcctgacaagcctgccctgctaccagcatttccggaggctcctgtgtgggctgcttgtgccccgttgcaccccactaggcagtgttctgcccccttgccgctctgtctgccaggaagcggagcaccagtgccagtctggcctggcactactgggcaccccctggcccttcaactgcaacaggctgccagaggcagctgacctggaagcttgtgcccagccctgaccctgaagccggcccctgccctcttcctgcccgtcctcttttgccggtcagggctggcacgcaggggaacaaaggaaggagcatcagcagggtctctacccatccttctctggggctcccagggagggggaagagaagtcctcagctggggctcatgggaccctaccaccctccctgctccttcctgtccctttaccggtcccaggctgctgactggccccacactgtgccaccggacaatcgagaccacttcccatccaggcctcttcccctttccatctgctttttcagcttctccatcgcctgccttctgaccttttccttgattcaacaaaaatgtactgagcatctattcatgtggcaggcccctgtcctaggccctagggatccaactggctgtctgcctctagaactctccaccctcatctctctgcgtatttctccctgaaatggggtctggtccttggtctctgccactgccctgcctctcctctggccctgggaacaggaggtgccctgtgtgtccgtctctcgaagttctgcctctctgtgcccagctcaagtctctctccccctcctttctccccctaaactttggccggccgccgggcgacaccacgagttatttccca

SEQ ID NO: 402737 - DNA, 1000 bp, Homo Sapiens; identical to SEQ ID NO: 118188

SEQ ID NO: 402738 - DNA, 1000 bp, Homo Sapiens; identical to SEQ ID NO: 291303

SEQ ID NO: 402739 - DNA, 1000 bp, Homo Sapiens
agattgagtgccacccatatcttactcagaagaatctgatcagtttttgccaatccagagatgtgtccgtgactgcttaccgtcctcttggtggctcgtgtgagggggttgacctgatagacaaccctgtgatcaagaggattgcaaaggagcacggcaagtctcctgctcagattttgatccgatttcaaatccagaggaatgtgatagtgatccccggatctatcaccccaagtcacattaaagagaatatccaggtgtttgattttgaattaacacagcacgatatggataacatcctcagcctaaacaggaatctccgactggccatgttccccatgtaaatatggctccttctttttaaaacagagggaagaatatacagattgaatgattggtgtctgaatagaactaaaaatcacaaagactatcctttccacatagaatactgaggacgcttccccttccttgtttctgctcagcccagatgcacagacactattggcaatgttgaccctcctctgtcatcacagcgccagggcagctgtgcctgggacaggagccacacagtcagagggggatgtaagagccaccttctctgacaaatctggagaattgagtgtgttctaagtgaaggcaatggggtttctccaagacagcctgtgtggcctctactctgaacaaatacactgatgagtcatcagtgaaatttgccttcacattttaagaaaactttatcttatggagttatttaagccatctacagagctgaggaaacagtgtaatgtgtctctgccccattgcgcagctccacccattgtgccccaggccagcccgcgtcacctacacttccttctgtgccctgccagtgacccccaggttattctaaagcagagtccttcccttcccccagtgagaaggaaaatgggataagtctgggacactgtttcagttcaataaagaggcttttttcttccttaaaaaaaaaaaaaaaaaaaaa

SEQ ID NO: 402740 - DNA, 1000 bp, Homo Sapiens; identical to SEQ ID NO: 291305

SEQ ID NO: 402741 - DNA, 1000 bp, Homo Sapiens; identical to SEQ ID NO: 118189

SEQ ID NO: 402742 - DNA, 1000 bp, Homo Sapiens; identical to SEQ ID NO: 223551

SEQ ID NO: 402743 - DNA, 1000 bp, Homo Sapiens; identical to SEQ ID NO: 118190

SEQ ID NO: 402744 - DNA, 1000 bp, Homo Sapiens; identical to SEQ ID NO: 291307

SEQ ID NO: 402745 - DNA, 1000 bp, Homo Sapiens; identical to SEQ ID NO: 118191

SEQ ID NO: 402746 - DNA, 1000 bp, Homo Sapiens; identical to SEQ ID NO: 118194

SEQ ID NO: 402747 - DNA, 1000 bp, Homo Sapiens; identical to SEQ ID NO: 118195

SEQ ID NO: 402748 - DNA, 1000 bp, Homo Sapiens
ggttcacagcccaagagagtctgtatccagtaaacaaactgtgatccaagagctcctaccaggcaaacctcccaagtcccgagtactcctgaagccggccaagttctcttcagatgatgtggagaaagcacaaaaacaaggacaattggaaactcctggaaaactgcccagtcacccaaagaaaaagtcttggaaaatccctatgtcacctgaccaattcctcctgactgttagcgccctgcagcacgcccataattccggggaatttgcctatccctgtaggccccaaacagaaattactgatgtctggggaccttcaatttcatacccaaggaaggtcttgaatttcaaaggaaaatcaatccaacgtgcagttgatcggttgagattgagcaatcctcctatagatgtgaaacgaaccagtattccccttgaaatccagaaactgcagcccaacttgaagatctctttgcacagtcctagagtccagtccaccataccccagcccatgattatccgctccaggttctctggcagcttaaagggtggagaccaagtgaccagttcaattgaaagggctgtgtgcagtacgggtcccctgaccagtatgcaggtcattaaaccaaaccgcatgctagctccacaagtgggcacagccaccctgtctcttaagaaagaacggcctcgcatctatacagcccttgatccttttagagtgaacactgagttcgtgctgttgaccgtgaaggaggagaaggagcaccaggaagccaagatgaaggaatatcaggccagggagtccactggagtggttgatccaggaaaagtcagcaaagctgcatggatcaggaagatcaaaggcctgcctattgataatttcacgaagcaagggaaaacagcggcccctgaacttggacaaaatgtatttatctaaaccagccttgggaaattacaatgttttacaataaacagaaagccaagcggaaaaaaaaaaaaaaaa

SEQ ID NO: 402749 - DNA, 1000 bp, Homo Sapiens; identical to SEQ ID NO: 118196

SEQ ID NO: 402750 - DNA, 1000 bp, Homo Sapiens; identical to SEQ ID NO: 291313

SEQ ID NO: 402751 - DNA, 1000 bp, Homo Sapiens; identical to SEQ ID NO: 291314

SEQ ID NO: 402752 - DNA, 1000 bp, Homo Sapiens; identical to SEQ ID NO: 223554

SEQ ID NO: 402753 - DNA, 1000 bp, Homo Sapiens; identical to SEQ ID NO: 118197

SEQ ID NO: 402754 - DNA, 1000 bp, Homo Sapiens; identical to SEQ ID NO: 118198

SEQ ID NO: 402755 - DNA, 1000 bp, Homo Sapiens; identical to SEQ ID NO: 223555

SEQ ID NO: 402756 - DNA, 1000 bp, Homo Sapiens; identical to SEQ ID NO: 291318

SEQ ID NO: 402757 - DNA, 1000 bp, Homo Sapiens
atcacagcagtcatcctcaaccgcatggaatacagactgcagaagggagctggcttccacctggacctcttctgtgtggctgtgctgatgctactcacatcagcgcttggactgccttggtatgtctcagccactgtcatctccctggctcacatggacagtcttcggagagagagcaaagcctgtgcccccggggagcgccccaacttcctgggtatcagggaacagaggctgacaggcctggtggtgttcatccttacaggagcctccatcttcctggcacctgtgctcaagttcattccaatgcctgtgctctatggcatcttcctgtatatgggggtggcagcgctcagcagcattcagttcactaatagggtgaagctgttgttgatgccagcaaaacaccagccagacctgctactcttgcggcatgtgcctctgaccagggtccacctcttcacagccatccagcttgcctgtctggggctgctttggataatcaagtctacccctgcagccatcatcttccccctcatgttgctgggccttgtgggggtccgaaaggccctggagagggtcttctcaccacaggaactcctctggctggatgagctgatgccagaggaggagagaagcatccctgagaaggggctggagccagaacactcattcagtggaagtgacagtgaagattcagagctgatgtatcagccaaaggctccagaaatcaacatttctgtgaattagctggagtaggagtctgggagtggagaccccaggaaacagcatgagatgctcagtcggcttggggaaggactgaagggcagctgccaagacctcagttacctcctgacctgagggtggagagtggcaggaagcaagcatgtttgctgtgcacttaggaaaggctggtgagccagagggactgatcaggccccattcaccctctactcattaaaaggtcctgaaaaaaaaaaaaaaaaaaaaaaaaaaaaaaaaa

SEQ ID NO: 402758 - DNA, 1000 bp, Homo Sapiens
cagcctgcagcgcacgggcagtgggggcccgggcaaccacccccacggccctgatgcctctgccgagggcctcaacccctacggcctcgttgccccccgtttccagcgaaagttcaaggccaagcagctcaccccacggatcctggaagcccaccagaatgtggcccagttgtcgctggcagaggcccagctgcgcttcatccaggcctggcagtccctgcccgacttcggcatctcctatgtcatggtcaggttcaagggcagcaggaaagacgagatcctgggcatcgccaacaaccgactgatccgcatcgacttggccgtgggcgacgtggtcaagacctggcgtttcagcaacatgcgccagtggaatgtcaactgggacatccggcaggtggccatcgagtttgatgaacacatcaatgtggccttcagctgcgtgtctgccagctgccgaattgtacacgagtatatcgggggctacattttcctgtcgacgcgggagcgggcccgtggggaggagctggatgaagacctcttcctgcagctcaccgggggccatgaggccttctgagggctgtctgattgcccctgccctgctcaccacctgtcacagccactcccaagcccacacccacaggggctcactgccccacacccgctccaggcaggcacccagctgggcatttcacctgctgtcactgactttgtgcaggccaaggacctggcagggccagacgctgtaccatcacccaggccagggatgggggtgggggtccctgagctcatgtggtgccccctttccttgtctgagtggctgaggctgatacccctgacctatctgcagtcccccagcacacaaggaagaccagatgtagctacaggatgatgaaacatggtttcaaacgagttctttcttgttactttttaaaatttcttttttataaattaatattttattgttggatcctcaaaaaaaaaaaaaaaaaaaaaaaaaaaa

SEQ ID NO: 402759 - DNA, 1000 bp, Homo Sapiens; identical to SEQ ID NO: 291320

SEQ ID NO: 402760 - DNA, 1000 bp, Homo Sapiens; identical to SEQ ID NO: 223557

SEQ ID NO: 402761 - DNA, 1000 bp, Homo Sapiens; identical to SEQ ID NO: 223558

SEQ ID NO: 402762 - DNA, 1000 bp, Homo Sapiens; identical to SEQ ID NO: 291321

SEQ ID NO: 402763 - DNA, 1000 bp, Homo Sapiens; identical to SEQ ID NO: 223559

SEQ ID NO: 402764 - DNA, 1000 bp, Homo Sapiens; identical to SEQ ID NO: 291323

SEQ ID NO: 402765 - DNA, 1000 bp, Homo Sapiens; identical to SEQ ID NO: 118201

SEQ ID NO: 402766 - DNA, 1000 bp, Homo Sapiens; identical to SEQ ID NO: 291325

SEQ ID NO: 402767 - DNA, 1000 bp, Homo Sapiens; identical to SEQ ID NO: 118203

SEQ ID NO: 402768 - DNA, 1000 bp, Homo Sapiens; identical to SEQ ID NO: 118204

SEQ ID NO: 402769 - DNA, 1000 bp, Homo Sapiens; identical to SEQ ID NO: 223563

SEQ ID NO: 402770 - DNA, 1000 bp, Homo Sapiens
ccaaagcacaactgtgaccagccacctcaactctacttctgttgatccctatgacagacacctattgccaaactctggcgctgctgccacttcagctgctatggctgctgctgcagccaccacttcctcctactatggaagggacaggagcccactgcgtcgtgctgcagccatgctccccacagttggagagggctacggttatgggccagagagtgaattatctcaggcttccgcagctacacggaattctctgtatgacatggcccggtatgaacgggagcagtatgtggaccgagcccggtactcagccttttaaaaactggaggtaggataattgcggactgaaccctcgggctgcggtcatatatgagaacttgctccgcgcggtcccctttgccgggatgtttccattgcttcatgtttcagtaaacaaaaggagtttgtgaccaactatgttttctttcttaattcttctaagttgacttttctttcctcctgaaactagtctctgtagcctttcactctgttccttatattctcagcctctgagcagccctaggtaaggattatgctggcatcccctttttcctgtgcagtggaacccctcttatcttgctttccctaggagttgaatccttctccctgcctacctgcagcatctcctttccctttaaaatgaccatgtagtggcaagcagccttttactcttctgttagctctggactcttaacacttaagttactcttctgaaattgctaggaccattgggggttttgttgttttgtttgttttttatgtccgacctgtgatcgtggtacagcattagctgaaatttacccttgttttactccactcctcccttttttaaaaaaattttttgacaaataaatgtttctaacacttaaaaaaaaaaaaaaaaaaaaaaaaaaaaaaaaaaaaaaaaaaaaaaaaaaaaaaaaaaaaaaaaaaaaaaaaaaaaaaaaaaaaaaaaaaaaaa

SEQ ID NO: 402771 - DNA, 1000 bp, Homo Sapiens; identical to SEQ ID NO: 118205

SEQ ID NO: 402772 - DNA, 1000 bp, Homo Sapiens; identical to SEQ ID NO: 291331

SEQ ID NO: 402773 - DNA, 1000 bp, Homo Sapiens; identical to SEQ ID NO: 222951

SEQ ID NO: 402774 - DNA, 1000 bp, Homo Sapiens; identical to SEQ ID NO: 222951

SEQ ID NO: 402775 - DNA, 1000 bp, Homo Sapiens; identical to SEQ ID NO: 223565

SEQ ID NO: 402776 - DNA, 1000 bp, Homo Sapiens; identical to SEQ ID NO: 118206

SEQ ID NO: 402777 - DNA, 1000 bp, Homo Sapiens
cacagtgttcgtgaaggagaacaacccgccgggctgccacatcttcacggtgtcggcatgggacgcggacgcgcagaagaacgcgctggtgtcctactcgctggtggagcggcgggtgggcgagcacgcactgtcgagctacgtgtcggtgcacgcggagagcggcaaggtgtacgcgctgcagccgctagaccacgaggagctggagctgctgcagttccaggtgagcgcgcgcgacgccggcgtgccgcctctgggcagcaacgtgacgctgcaggtgttcgtgctggacgagaacgacaacgcgccggcactgctggcgactccggctggcagcgcaggaggcgcagttagcgagttggtaccgcggtcggtgggtgcgggccacgtggtggcgaaagtgcgcgcggtggacgctgactccggctataacgcttggctgtcctacgagttgcaaccggcggcggtcggcgcgcacatcccgttccacgtggggctgtacactggcgagatcagcacgacacgcatcctggatgaggcggacgctccgcgccaccgcctgctggtgctggtgaaggaccacggtgagcccgcgctgacgtccacggccacggtgctggtgtcgctggtggagaacggccaggccccaaagacgtcgtcgcgggcctcagtgggcgctgtggatcccgaagcggctctggtggatattaacgtgtacctcatcatcgccatctgtgcggtgtccagcctgctggtgctcacgctgctgctgtacactgcgctgcgttgctcagcgccgcccaccgtgagccggtgcgcgccgggcaagcccacgctggtgtgctccagcgccgtggggagttggtcttactcgcagcagaggaggcagagggtgtgctctgcagagagcccgcccaagacggacctcatggccttcagcccaagccttcagctgtctcgagaagattgtttaaatcctcccagtgaagtaagttattaa

SEQ ID NO: 402778 - DNA, 1000 bp, Homo Sapiens
ggtgtctgctcaggacgcggacgcacaggagaacgcgctggtctcctactcgctggtggagcggcgggtgggcgagcgtgcgctgtcgagctacgtgtcggtgcacgcggagagcggcaaggtgtacgcgctgcagccgttggaccacgaggagctggagctgttgcagttccaggtgagcgcgcgcgactctggcgtgccgcctctgggcagcaacgtgacgctgcaggtgttcgtgctggacgagaacgacaacgctccggcgctgctgacgcccggggctggcagcgcgggaggcacagtgagcgagctgatgccgcggtcggtgggtgcaggccacgtggtggcgaaggtgcgcgcggtggacgccgattcgggctacaatgcgtggctttcgtatgaattgcagctggcggcggtcggcgcgcgcatcccgttccgcgtggggctgtacactggcgagatcagcacgacgcgccctctggacgaggtggacgcgccgcaccaccgccttctggtgctggtgaaggaccacggtgagcccgcgctgacggccacggcaacggtgctgttgtcgctggtggagagcggccaagcgccacaggcttcgtcgagggcgtcggcaggcgctgtgggtccagaagcggcgctggtggatgtcaatgtttacttgatcattgccatctgcgcggtgtccagcctgttggtgctcacgttgctgctgtatactgcgctgcggtgctcggcaccgcccaccgagggcgcgtgcgcgccgggcaagcccactctagtgtgctccagcgcggcagggagttggtcgtactcgcagcagaggcggccgagggtgtgctctggggagggcccgcataagacggacctcatggccttcagtcccagccttcctccttgtctgggttctgcagagggaacaggccagagggaggaggactcagaatgcttgaaagaggtaagcttatattttaaaaaattgtcttagtaa

SEQ ID NO: 402779 - DNA, 1000 bp, Homo Sapiens
gattgctattagcatgataatgaactcttaatggtatccattagctgggacttaaatgactcacttagaacaaagtacctggcattgaagcctcccagacccagccccttttcctccattgatgtgcggggagctcctcccgccacgcgttaatttctgttggctgaggagggtggactctgcggcgtttccagaacccgagatttggagccctccctggctgcacttggctgggtttgcagtcagatacacagatttcacctgggagaacctctttttctccctcgactcttcctacgtaaactcccacccctgacttaccctggaggaggggtgaccgccacctgatgggattgcacggtttgggtattcttaatgaccaggcaaatgccttaagtaaacaaacaagaaatgtcttaattatacaccccacgtaaatacgggtttcttacattagaggatgtatttatataattatttgttaaattgtaaaaaaaaaaagtgtaaaatatgtatatatccaaagatatagtgtgtacatttttttgtaaaaagtttagaggcttacccctgtaagaacagatataagtattctattttgtcaataaaatgacttttgataaatgatttaaccattgccctctcccccgcctcttctgagctgtcacctttaaagtgcttgctaaggacgcatggggaaaatggacattttctggcttgtcattctgtacactgaccttaggcatggagaaaattacttgttaaactctagttcttaagttgttagccaagtaaatatcattgttgaactgaaatcaaaattgagtttttgcaccttccccaaagacggtgtttttcatgggagctcttttctgatccatggataacaactctcactttagtggatgtaaatggaacttctgcaaggcagtaattccccttaggccttgttatttatcctgcatggtatcactaaaggtttcaaaaccctgaaaaaaaa

SEQ ID NO: 402780 - DNA, 1000 bp, Homo Sapiens
gtggttcgggaccatggagacccaccactttcctcctctgtcactctgggtgtgctgttgagcaactctgtccctcagttacttccagactttgaagatgtctgggaaccaggagggcagctttctgcccagaacttgtatttagtaattgccttggcttgtatttcctttttatttctggggtgcttacttttcttcgtgtgtaccaagttgcaccagagcccaggctgttgcgctcagagctgctgtcgctctacagaggatctgaggtatggaagtaagatggtttcaaatccttgcatgacatcagccaccatagatgtcactacagttgagagactttctcagacttatctctatcgggcctctctgggacttggttctgataataacagtttgctgttgcgtggggagtacaatgctgccgacctgcgaaatcttgccactggggtaggactgaatttgccaatatcctgtattcagattcggaataggaaaggggatcacgctaatgtcaatgccatggtaagcaaattttatggaatttgattcctttggcccggagatggctgctagctgtgttttgaaatatttcttagacaagcctttcacaacatttcatcaattgaactaaacactccttcttagcacttcctgtgccaagaaatctggaagtatagaagtattagaagattgccctaggcctcaagggacttatagtttatttttgagaaacaagggcaaaaattaaaacctatttaagaacaataaaagtaatatgacataaaggtctaaaattaaaaataaaataccaaaatattttataagcaacagatgtgtaaggcactctaatatttaaagtgaagaatgaaaaatatgtaagagtctgctttatatgaatataatatggaaggtgaaacatttacttaaactattgcaatgcattattaaaagatgacgataaccacaaaagatgtaaaaataaattacaatgggggtt

SEQ ID NO: 402781 - DNA, 1000 bp, Homo Sapiens
tcccttgaccctgagaggtagaggctgcattgagccatgattgcaccactgcactccagcctgggcaacagagggagcccccgtctcaacaaacaaacaaaaagagccagtgggggagggagggacagagacccagagggcagcgtcagacacccagagttggagacagaacaacagagtctcagggaaagagaaccacaatagaaaaaggcagaaaaggccgggcgcggtggctcatgcctgtaaccccagcactttgggaggccgaggtgggcaaattacgaggtcaggagatccagaccatcctggctaacacggtgaaaccccgtctctactaaaaatacaaaaaaattagccgggtgcggtggcgggcacctgtagtcccagctactcgggaggctgaggcaggagaatggcatgaacctgggaggcggagcttgcagtgagccgagattgcgccactgcactccagcctgggcagcagagcaacactctgtctcaaaaaaaaaaagaaaagaaaagaaaaagccagaaaaagttggtgcccctgaacccaagagtgatgtacagtctattccatagaatcacagaacaatcctgaaccaggcctgtcacctaccctccctgcagctcaggaaggctgtcagacaggctgggggcctcactctgttttccaggggagaaacctgagtctcagagcaggggagtggcttcccaaggtctcacagcttgtccccaggggccaggcaggctgtctgtctgcttcacatgtccccatcagcctgctgggacacacgggtcctcctgagtcccgtagcctcatttcttacagacggggaaactgaggctcagagcagcaggtgttacccaaggtcacaaggccgaacattttcagaaatctttcagaactcaaagggcatttagaggaagaaggctgaaatcactaacacatatagggcttcctttggtatcaaagtactttacttgggttaatttatta

SEQ ID NO: 402782 - DNA, 1000 bp, Homo Sapiens; identical to SEQ ID NO: 291336

SEQ ID NO: 402783 - DNA, 1000 bp, Homo Sapiens
tcaagcaattccctgcctcagcctcatgaatagctgggattacaggtgcccaccaccatgcctggctggtttttgtatttttagtagaggcaaggtttcaccatcttggtcaagttggtctggaactcctgaccctgtgatccacctgccttggcttcccaaagtgctgggattacaggcgtgcaccactgagtccagcctatattcttgtttatcagttcaaaaatgctctgcactgtttttgactctttaaaaataacttagattcaaatttatagtagaagaaaaaaaatctttcagataagaggtgttctccagaatggaagaacgacttggcatgtaagaaatagcgtcagtgtcctaatgcatattgtgactgtttgcatatacttctgtttgtaaaaatatcggttttattttcagaggatttgtaagaaacatttaaattttcattgaaataaatgacaagtcatactgtcacttaaaaaaaaaaaaaagacctttgtcaaggagagtgcagtcaaccagtaaactgcagattctcagaatgtttattgacgtactgattattcattctgttatactctaacatctgtatatttttaccagtattctcagaccacttctaccaaaacataaatctgtgattgtgatctctgaaagtcagtccttttatctactcaataactgatctgataatgtcaacttttgaaaacagatagttatgactcaaggctttgagaatgtaaagagacgcccttcacatgttgagaaatggtacgatttcacgttatcagtgcagttcggttctcagggggaaagaagtgtgaaactgtcaggaagacagatgaaatgatttgcctgaggccgtatcatcaaacaagaaattcatattcacctttctggaattcttaggataatgattacatgtgttcaattgttaaaaattggcagataaaattttatgtatttaccacgtacaacatgaaattttgaaaca

SEQ ID NO: 402784 - DNA, 1000 bp, Homo Sapiens; identical to SEQ ID NO: 291337

SEQ ID NO: 402785 - DNA, 1000 bp, Homo Sapiens; identical to SEQ ID NO: 291338

SEQ ID NO: 402786 - DNA, 1000 bp, Homo Sapiens
tcagtttgagccggggcgccctcattgccatcctcgcctgcatctttgtcctcttagtgctggtgttgctcattttgtccatgaggcggcaccggaaacaaccatacatcatcgacgacgaggaaaacatccacgagaacatcgtccgctacgacgacgagggcggcggcgaggaggacaccgaggccttcgacatcgcggccatgtggaacccccgggaggcgcaggcgggggccgcccccaagacgcggcaggacatgctgcccgagatcgagagcctctcccgctacgtgcctcagacgtgcgcagtgaacagcactgtccacagctacgtgctggccaagctctacgaggccgacatggacctgtgggcaccgcccttcgactccctccagacgtatatgttcgagggggacggctctgtggcggggtcgctgagctccctgcagtcggccacgtcggactcggaacagagcttcgacttcctgacggactgggggccccgcttccggaagctggccgagctctacggggcgtcggagggacccgcgccgctgtggtgacggaagccaggaggcaggcgcgcgtccaaatccagacgttctccgcgggtgcttcgcggacaaggtgcagccaaccacacgagcaatactgtgctggagagtgagaatgggggtgagcaggcgaacagagctctctctggatcagctttacttgggtagattaagttaaataagcaaaaggaaacccagaaggaagagggcagaatctttaattacctttttttcttttctttttgatttttctgacactgtgtgcgaaggcttggagtccaaggtgttctgacaagggtggcttttctctgccattcgctaaggcctttgtcacttttccaccacagaaaggctctggccttggatacagagatgccaattgaaagcagaaagttctactctcgtatctgttttttatcttatcttattctccatttaagagtttt

SEQ ID NO: 402787 - DNA, 1000 bp, Homo Sapiens; identical to SEQ ID NO: 118208

SEQ ID NO: 402788 - DNA, 1000 bp, Homo Sapiens
tgccattggatctgctgtgcttgaggtgattaaagaagaaaatctacaggaaaacagtcaagaagttgggacctacatgttactaaagtttgctaagctgcgggatgaatttgaaattgttggagacgtccgaggcaaaggtctcatgataggcatagaaatggtgcaggataagataagctgtcggcctcttccccgtgaagaagtaaatcagatccatgaggactgcaagcacatgggactcctcgttggcagaggcagcattttttctcagacatttcgcattgcgccctcaatgtgcatcactaaaccagaagttgattttgcagtagaagtatttcgttctgccttaacccaacacatggaaagaagagctaagtaacattgtcagaaataaataaaaccacaagtctcaagaatttgccacgtatgttcaagggtgaatttgaagaatttcagaaccactggtatccagagaaagcctgcagctctccacaggagctgtaaaagtcatggttgactgcctaccaaccatatttgttagcagagcccctcttatcttgagaactccattcttcagggaaaggatctccctagctcagagaataaatcctaattagtttatgttaggtatggtaatttgattcccctttgcagtgattggtttatgcatgaatatgtgatgtatttttgtccagtgaatcttgaagaaaaatcttttggtggaggtgccttcagggaaagttttcttcaccctcactcttcagttcaagaagagatgtcttcttgttgcgctgagaacaccatatgttcatgacgagattcctggcaccatgtcagccggcttgtagtcatgaggacaaccctttttggtgaggttggaagatggatggaagccaagtgcttagtgatgtcaaagaagcactcacttaagcattcctggagccaccctacctcagggcctcttgatatttgaggtaataaattcattgttctgtat

SEQ ID NO: 402789 - DNA, 1000 bp, Homo Sapiens
tgcagaccattgcccaaagaagcaaggaagagcaggagaaggtggaggcagacatgatccagcagagagaagagtgggaccgaaagaagaagatgaaggttaaacgggagcgaggatggagtggaaactcatggggaggcatcagtcttggcccccctgaccctggtccctgtggagaaacatatgaggattttgataccaggatacttgaggtaagaaacgttttcactatgactgcgaaagagggaagaaagaaatcgatccgtgtcttggtggctgtggggaacggaaaaggagctgcaggtttttctattgggaaagctactgatcggatggatgctttcaggaaagcaaagaacagagcagttcaccatttgcattatatagaacgatatgaagaccatacaatattccatgatatttcattaagatttaaaaggacgcatatcaagatgaagaaacaacccaaaggttacggcctccgctgccacagggccatcatcaccatctgccggctcattggcatcaaagacatgtatgccaaggtctctgggtccattaatatgctcagcctcacccagggcctcttccgtgggctctccagacaggaaacccatcaacagctggctgataagaagggcctccatgttgtggaaatccgggaggaatgtggccctctgcccattgtggttgcgtccccccgggggcccttgaggaaggatccagagccagaagatgaggttccagacgtcaaactggactgggaagatgtgaagactgcacagggaatgaagcgctctgtgtggtctaatttgaagagagccgccacgtaacctctctggccttgtgcagccagttcctgtgctgccctgcacctaggagagactcagcccctcacagcttgggatgttaccttgccttttgtttgttttgagggaagtttaatctttaaactctttggaaataaataattatagctttcaaaaaaaaaaaaaaaaaa

SEQ ID NO: 402790 - DNA, 1000 bp, Homo Sapiens; identical to SEQ ID NO: 223568

SEQ ID NO: 402791 - DNA, 1000 bp, Homo Sapiens; identical to SEQ ID NO: 291342

SEQ ID NO: 402792 - DNA, 1000 bp, Homo Sapiens
tctttttttaagtttgtgtttttaggtttacttacatacagtgactctccagattttaagttgacaactcagtgaataatttttgcttatgtgcacactctgaaacctccatgtagatcaaagaacaagctatttccaacttctcacctcccttccccaaaagctctcttaagacccctctaagtcagtacctggaaaatttccatttttgagctgagttccaaagaaggaaatagagcaacacaaaggcctcgaaaagaggtctccagcaaaaggctctgcaagtgcaaagaccttgacaggaaagagggaggggccaaggtaagaactgagaagggaggcatgaggcgtgaggctggaagataatacagaatgtcccaggccatggcagagctcgttccattcacgaaggcttatcagaatacaaagtgacactgataggcggatcatcttgaatctgctcattgcatgagtcaagtcggccacagacttgagcgctttattattagttaatcttttgcaggcccgcttctcaatgaatgagatacaccaggatatgcacgtgcatctgagaaccgctgctctgagatggcaggaatggatcccacgcaaatgaatcgcaccccaagcacaggtgttgccagtatgcagggatctgggggcttaagaagctgcagtaaaagtgccaggtgctggcgggatgtggtagctcatgcctataatcccaggactttgggaagctgaggtggacggatcatttgaggtcaggagttcaagaccagcctgaccaacatggcaaaacatcgtctaaaaaaatacaaaaattagacaggcgtggtgttgggcgcctgtaatcccagctactggggaggctgaggcgggagaatcgcttgaacccaggaggtggaggttgcagttagctgagatcctgccactgcactccagcctgggcaacagagtgagactatctcaaaaaaaaccaaaaaaaaaaaaaaaaaaa

SEQ ID NO: 402793 - DNA, 1000 bp, Homo Sapiens; identical to SEQ ID NO: 223569

SEQ ID NO: 402794 - DNA, 1000 bp, Homo Sapiens; identical to SEQ ID NO: 291345

SEQ ID NO: 402795 - DNA, 1000 bp, Homo Sapiens; identical to SEQ ID NO: 291346

SEQ ID NO: 402796 - DNA, 1000 bp, Homo Sapiens; identical to SEQ ID NO: 291347

SEQ ID NO: 402797 - DNA, 1000 bp, Homo Sapiens; identical to SEQ ID NO: 291348

SEQ ID NO: 402798 - DNA, 1000 bp, Homo Sapiens
ccaaagcctcaggcgccaatccacagagggcagcttggagatggagacagcttttgaacaggacaggaccaatttgcaggtgccatccggggtctcagagcccatctcaaagtgtggtgacctagatgtcatctttgaatatagagccgccagccagaagctcacagtgaccattgtgagggcacagggcctcccagataaggaccgaagtggtgtcaactcctggcaagttcatgtagtgctgctgcctggtaagaaacacaggggcaggacgaacatacagagagggcccaaccccgtcttcagggagaaggtcacctttgccaagctggagcccagagatgtggctgcctgtgctgtccgcttccgcctgtacgctgcccggaagatgacccgagagagaatgatgggagagaaactattctatctcagccacctgcacccagaaggggaaatgaaagtgactctggttctggagccaagaagtaatataagcagtggagggtctccgctcagcccatctgcggtttctcacagtgatagtacttcatccacgcagtcgctgtctcatggaggggcgccagagctgttggtggggctctcgtacaatgccacaacggggcgattatctgtggaaatgatcaaaggcagccatttccgaaacctcgctgttaaccgagcacctgatacatatggaaaactctttctcctcaattctgtgggtcaagagatgtcccgttgcaagacgtccattcggcgtggtcagcccaatcctgtctataaggagacctttgttttccaggtggccctctttcagctgtctgatgtcacgttgatgatttccgtttataacaggcgtactatgaagcgtaaagagatgattggctggattgccctgggccagaacagcagtggagaggaggaacaagatcactgggaggagatgaaggaaaccaaaggccagcagatctgcagatggcacactttgctggaatcctag

SEQ ID NO: 402799 - DNA, 1000 bp, Homo Sapiens
atatgtgtctgcaagagcttattatgagagagccttacagctggttccagacagcaaactgctgaaggaaaatcttgccaaattggatcgcctagaaaaacgattacaagaagttcgagaaaaggatcaaacatagcaccaccgtctgacccaacctcataggataatgtggtgcctctgaaaggggagtgatggaagccttgctttcacatcagcaggggcacaactaatgagattttctctcattccgagttcagggtgacacattttgggacatctgctggtagcccagtgctgaaggacttgcttttccatgaagaagacgaaaacagcaaacaagggcaagaaggtctgagagggaaggagaatgacatttacacattttacagatttttgtttggtttaactccagatttctcttgatatatctctgtgcttttgagacctggagatctaattctgtttagacattttttgtcccagaaatacagaagcttgaaatgctatgaaggcagagcttctattctttatgggatgaaatatttcaaaagaggataaatcctctgtggtaagccatttggaaaatcctaccaagaattggcttatttaattttccagaaccaggaatgagtatctaatagcttttgtagaaccttccagaatatgtggggaaaaagggctattgctaagtgagctttatctaatatcctcctaagagttttactagtgcttttttgaggaattacagggaagctcctggaattgtacatggatatctttatccctagggggaaatcaaggagctgggcacccctaattctttatggaagtgtttaaaactattttaattttattacaagtattactagagtagtggttctactctaagatttcaaaagtgcatttaaaatcatacatgttcccgcctgcaaatatattgttattttggtggagaaaaaaatagtatattctacataaaaaattaaagatattaactaag

SEQ ID NO: 402800 - DNA, 1000 bp, Homo Sapiens; identical to SEQ ID NO: 118209

SEQ ID NO: 402801 - DNA, 1000 bp, Homo Sapiens; identical to SEQ ID NO: 118210

SEQ ID NO: 402802 - DNA, 1000 bp, Homo Sapiens; identical to SEQ ID NO: 223572

SEQ ID NO: 402803 - DNA, 1000 bp, Homo Sapiens; identical to SEQ ID NO: 223573

SEQ ID NO: 402804 - DNA, 1000 bp, Homo Sapiens; identical to SEQ ID NO: 291355

SEQ ID NO: 402805 - DNA, 1000 bp, Homo Sapiens
cccctgagaaggtcaaagcctgccagggccagtacgagaccatcgagcgactgcggagcctcagccccaagatcatgcaggaggcctttctggtccaggaggtagtggagttgcccgtgacagagcgccagattgagcgcgaacacctcattcagctgcggcgctggcaggagacccggggtgagctgcagtgccgctccccgcccaggctgcatggtgccaaggctatcttggatgcagaacctggtccccggcctgccctacaaccttcaccatccatccgcctgcccctagatgcccccctccctggctccaaagccaagcccaagccacccaagcaggcccagaaggagcagcggaaacagatgaaggggagagggcagctggagaagcccccagccccaaatcaagccatggtggtggccgctgcaggagatgcatgtcccccacagcatgtgcccccgaaggactcagcccccaaggactcagcccctcaggatttggctccccaggtctcagcccaccaccgctcccaggagagcttgacgtcccaagagagtgaggacacctacttgtaaccctggcagctaaggcctccagggcggggtctccatataactacacggttcatgaactgacattccacatcctgcccaccctctgagggccaagctgcctggccactgggctgggctggagtctggctggtccaacacagattctgcctggtccaacacagattctgcctgagcctccttatttattttctttacagtggcactcaggctggcccagccagggcaggcagaagctagggcctggggggtggggcctccttcagccccctcctcctgggggatgctccccagggttagggtgctggtgtgaggggaaagggtggggtgttctttgtgtaaaatagaaacatggttttgtacagaaataaacagccttgtatagagaaaaaaaaaaaaaaaaaaaaaaaaaaaaaaaaaaaaaa

SEQ ID NO: 402806 - DNA, 1000 bp, Homo Sapiens; identical to SEQ ID NO: 118212

SEQ ID NO: 402807 - DNA, 1000 bp, Homo Sapiens; identical to SEQ ID NO: 291357

SEQ ID NO: 402808 - DNA, 1000 bp, Homo Sapiens
aggagcgccgttctctaatgaagattctctcagagcctggccccaccttggcacccatgcccactgtgccccgtgcagaagccatggtgcaggccattctggggacccaggctggcccagctcttccccgactggagaagacacaaattcagcaggacctggtggccgcaagggaggccctggcggacctgatgcttcggctgcagctggtgcggcgtgagaagcggggcctagagctgcgggaggctgccctccgagccctgggtccagctcacgtgctcctgctggagcagctgcggtgggaacgggcagagctccaggctggtggggcaaacagcagtggcggacatagcagcggaggtggcagcagcggggacgaggaagagtggtatcagggccttcctgctgtccctggtggcaccagtggcattgatggtggccaggtgggcagagcctgggacccagagaagttagcccaggaactggcagcatcgctcaccaggacactggacctgcaggagcagctgcagtctctgcgcagggagctggaacaggtggctcagaaggggcgagccagacggtctcagagtgccgagctgaacagggatttatgcaaagcccacagcgccctggtcctggccttccgaggagcccaccggaagcaggaagagcaacgccggaagttggagcagcagatggcactcatggaggctcagcaggccgaggaggtggcggtgctcgaagccactgcaagggccctggggaagcccaggcctcccctcccgcctccccagcttggggacacctttctgtaggccccttacccagccatgtctggacatgccagacagctgtggcatgtcataaactgtcctggagtgacatcatgtcatgttgcatgatttggcatgttggggcacatttggcgtgagggaagctggtgcacatgggtgtccagggcctgatggggtgtggccaggcaatgaagaaagactcaggt

SEQ ID NO: 402809 - DNA, 1000 bp, Homo Sapiens; identical to SEQ ID NO: 118213

SEQ ID NO: 402810 - DNA, 1000 bp, Homo Sapiens; identical to SEQ ID NO: 223575

SEQ ID NO: 402811 - DNA, 1000 bp, Homo Sapiens; identical to SEQ ID NO: 223576

SEQ ID NO: 402812 - DNA, 1000 bp, Homo Sapiens; identical to SEQ ID NO: 118214

SEQ ID NO: 402813 - DNA, 1000 bp, Homo Sapiens; identical to SEQ ID NO: 291361

SEQ ID NO: 402814 - DNA, 1000 bp, Homo Sapiens
ttgaggaagccatcaccagagctgaatctttctcggttatgtacacaccatttgcgacaaaaataagagctgataaaatagaaaaagtaaaagatgctttcacaaaaactcatcctgcatatgcagagtatatgtacacagatcttcaagcactccacatgttgcctcagacagttgactggtcatcttttcctccccaacaatatctcttgactcttgggttcaaaaacaaagatgatggaaaatttttggaaaaaatatcaagcaggaagctgccgatattcacagagcataaaacacctttcggtctgaccagagaagatacagtgaggcaaatggagacaatggggaagcgaatcttgccaatattggattttattagaagcacccaattgaatgggagttttcctgcatcctcaggtgtgatggagaagttgcaatatgccagcctcctcagccagctgcagagagtaaaggagcagtcccaggtgattaatcaagcaatggcagagctagcaaccattccctacctacaggacatcagtcaacaggaggcagaattgctgcagtcactaatggcagatgctatggacacccttgaaggaagaagaaacaataatgaacgtgtgtggaatatgatccaaaaggttggacaaattgaagattttctataccaattagaggacagtttcttaaaaactaaaaaactgagaactgctcgaaggcaaaaaacaaaaatgaagcgacttcaaactgttcagcaaaggtagtcattagggagcaggcactaccactaagatatcccagaagaagaggcaagggcatccactccaatgcccacctagtactgtgaagctggataacaaaagcttgtcaccaaaagaaagaggtggtattcccctcagttcatctttaccaaagacactctatgtttcattaatctcaactggcagcaataaatattctcagcaagttggactcgaaaaaaaaaaaaaaaaaa

SEQ ID NO: 402815 - DNA, 1000 bp, Homo Sapiens
ggaagatggtcagcttctggaagctgctgagcattatgaagcattccatcaattgacacaggggcggatatggaaggatgagacaggccgctctctcaacttgttggcctgtgagagtctcctgaggacttacagattactctcagacaaaatgctagaaaataaagaatacaaacaggccatcaaaattctaataaaagcttctgaaatagccaaagaaggaagtgacaaaaagatggaagcggaaacctcttactacttgggcttagcacacttagctgctgaggaatatgaaacagcattaacagtccttgacacttactgtaaaatctccacagacctggatgatgatctcagtctggggagaggctatgaagccatagccaaggtcctgcagagccaaggagagatgacagaagcaattaaatacttgaaaaaatttgtgaaaattgcaagaaacaattttcaaagcctagatttggtgagagcaagtacaatgcttggggacatctacaatgaaaaaggatactacaacaaagcttctgaatgctttcagcaagcttttgacacaacagtagagctaatgagcatgcctctgatggatgagacaaaagttcactatggaatagcaaaagctcatcagatgatgcttacagtgaacaactatatagagtctgcagatctcaccagcctcaactacctgctgtcatggaaggagagcagaggtaacattgaacctgatccagttactgaagagtttagaggatccacagtggaagctgtatctcaaaactcagaacgtttggaagaactcagtaggtaggtttccaggtgatcaaaaaaatgaaacttaaagcagcttttcacttaacatcaaagcaagaagaaatccatcatgtcaccttagacttcaatacttgtaataggagcatgttacagataatatagagttataataaaacggactatgactcttttcaaaaaaaaaaaaaaaaaaaaa

SEQ ID NO: 402816 - DNA, 1000 bp, Homo Sapiens; identical to SEQ ID NO: 291363

SEQ ID NO: 402817 - DNA, 1000 bp, Homo Sapiens; identical to SEQ ID NO: 285665

SEQ ID NO: 402818 - DNA, 1000 bp, Homo Sapiens; identical to SEQ ID NO: 115881

SEQ ID NO: 402819 - DNA, 1000 bp, Homo Sapiens
aatagaggacactatccagggggcacccctatctgcctacctctccatcaactccgacactggggtcctgtatgcgctgcgatccttcgactatgagcagttccgggacatgcaactgaaagtgatggcgcgggacagtggggatccgcccctcagcagcaacgtgtctctcagcctattcctgctggaccagaacgacaacgcgcccgagatcctgtaccccgccctccccacagatggttctaccggcgtggagctggcgcccctctccgcagagcccggctacctggtgaccaaggtggtggcggtggacagagactcgggccagaacgcctggctgtcctaccgcctgctcaaggccagcgagccgggactcttctcggtgggtctgcacacgggcgaggtgcgcacggcgcgagccctgctggacagagacgcgctcaagcagagtctcgtggtggccgtccaggaccacggccagcccccgctctccgccactgtcacgctcaccgtggccgtggccgacaggatctccgacatcctggccgacctgggcagcctcgagccctccgccaaacccaacgattcggacctcactctgtacctggtggtggcggcggccgcggtctcctgcgtcttcctggccttcgtcatcgtgctgctggcgcacaggctgcggcgctggcacaagtcacgtctgctacaggcttcgggaggcggcttagcgagcatgcccggttcgcactttgtgggcgtggacggggttcgggctttcctgcagacctattcccacgaggtctccctcactgcggactcgcggaagagccacctgattttcccccagcccaactatgcggacacactcatcagccaggagagctgtgagaaaaagggttttctatcagcaccccagtctttacttgaagacaaaaaggaaccattttctcaggtaaacttttgtgatgaatgtatcagctatctagagaaaaataattcttga

SEQ ID NO: 402820 - DNA, 1000 bp, Homo Sapiens; identical to SEQ ID NO: 291366

SEQ ID NO: 402821 - DNA, 1000 bp, Homo Sapiens
gagacgtggttcctggatttcaaagtgttacctcaagaagcagaagaagaaaacagactcctgatagttcaggatgcttcagagagggcagcacttatacctggtggtctttctgatggtcagttttattcccctcctgaatccgaagcaggatctgaagaagctgaagaaaaacaggacagtgagaaaccacttttagaactatgagtactacttttgttaaatgtgaaaaaccctcacagaaagtcatcgaggcaaaaagaggcaggcagtggagtctccctgtcgacagtaaagttgaaatggtgacgtccactgctggctttattgaacagctaataaagatttatttattgtaatacctcacagacgttgtaccatatccatgcacatttagttgcctgcctgtggctggtaaggtaatgtcatgattcatcctctcttcagtgagactgagcctgatgtgttaacaaataggtgaagaaagtcttgtgctgtattcctaatcaaaagacttaatatattgaagtaacacttttttagtaagcaagatacctttttatttcaattcacagaatggaatttttttgtttcatgtctcagatttattttgtatttcttttttaacactctacatttcccttgttttttaactcatgcacatgtgctctttgtacagttttaaaaagtgtaataaaatctgacatgtcaatgtggctagttttatttttcttgttttgcattatgtgtatggcctgaagtgttggacttgcaaaaggggaagaaaggaattgcgaatacatgtaaaatgtcaccagacatttgtattatttttatcatgaaatcatgtttttctctgattgttctgaaatgttctaaatactcttattttgaatgcacaaaatgacttaaaccattcatatcatgtttcctttgcgttcagccaatttcaattaaaatgaactaaattaaaaaaaaaaaaaaaaaaaaaaaaaaaaaa

SEQ ID NO: 402822 - DNA, 1000 bp, Homo Sapiens; identical to SEQ ID NO: 223578

SEQ ID NO: 402823 - DNA, 1000 bp, Homo Sapiens; identical to SEQ ID NO: 118215

SEQ ID NO: 402824 - DNA, 1000 bp, Homo Sapiens; identical to SEQ ID NO: 223579

SEQ ID NO: 402825 - DNA, 902 bp, Homo Sapiens
ggttgaagaaagaggatctggctgaaagacccgcaactttcacttgttgagaacctttagccagcgccggcgtgcatgtgttttagttttattctttttcccttgcccccaaagccgtggagtacctgctgttgctctcatgcctcttgccaacagtggcatctgctcagtgtagccatcaagaatttgaatgtcaatatctttgccttgaaatgaatggaaaagtatttgtcactcagcggcaatcattcttcaaataaaaggtcactggaaggactgagcgcattcaggagcctggaggaactcatcttggacaacaatcagctgggggacgaccttgtgttgccagggttacccagactgcataccttaaccctcaacaagaaccgaatcactgatttggagaacctgctggatcacttggcagaagtgacaccagctctggagtacctcagtctgctgggcaacgtggcctgtcccaacgagctggtcagcttggaaaaggatgaggaagactacaagagatacagatgctttgttctgtacaagctgcccaacttgaaatttctggatgcccagaaagtaaccagacaagaacgagaggaggcgttggtcagaggagtcttcatgaaggtggtgaagcccaaggcttctagtgaggacgttgccagctccccggagcgccactacacgcccttgccttctgcttccagggaactcaccagtcaccaaggtgtcctggggaagtgtcgctacgtttactatgggaaaaactcagagggcaacaggtttatccgagatgaccagctctgaagccaacttctgtataccttcacccatttcatgaaaataaaatcaaaagggaaatcaaaaataaagaaaacgctaaagaaaaaaaaaaa

SEQ ID NO: 402826 - DNA, 1000 bp, Homo Sapiens; identical to SEQ ID NO: 118217

SEQ ID NO: 402827 - DNA, 1000 bp, Homo Sapiens
ctgggacctcctgctcctcgccatcatcaacacagggctgtctctgtttgggctgccttggatccatgccgcctacccccactccccgctgcacgtgcgagccctggccttagtggaggagcgtgtggagaacggacacatctatgacacgattgtgaacgtgaaggagacgcggctgacctcgctgggcgccagcgtcctggtgggcctgtccctgttgctgctgccggtcccgcttcagtggatccccaagcccgtgctctatggcctcttcctctacatcgcgctcacctccctcgatggcaaccagctcgtccagcgcgtggccctgctgctcaaggagcagactgcgtaccccccgacacactacatccggagggtgccccagaggaagatccactacttcacgggcctgcaggtgcttcagctgctgctgctgtgtgccttcggcatgagctccctgccctacatgaagatgatctttcccctcatcatgatcgccatgatccccatccgctatatcctgctgccccgaatcattgaagccaagtacttggatgtcatggacgctgagcacaggccttgactggcagaccctgcccacgccccattcgccagccctccacgtcctcccaggctggctctggagctgtgaggggaggtgtaggtgtgtgggtgactgctctgtgctgcgccttctcatggctgactcaggcctggggcatctgggcattgtaggggtgcagtggtatgtgcccacccctctcccattatcctttagctttaggccaagagcgttgctcagggcagcttctgcccagggtgggtgggactgagcaggatggattttcttttgataaaagagtcgatgcctgaaagagaaaccatttccttgattgtgtaaggaacttgctggacgcacattaaagaataaagctcctgtttctaggctcctaaaaaaaaaaaaaaaaaaaaaaaaaaaaaaaaaaaaaaaaaaaaa

SEQ ID NO: 402828 - DNA, 1000 bp, Homo Sapiens
gcacatcgtgcacgtcttcgagttcatcgaggtgtgcaacgggaaactgtacatcgtgatggaagcggccgccaccgacctgctgcaagccgtgcagcgcaacgggcgcatccccggagttcaggcgcgcgacctctttgcgcagatcgccggcgccgtgcgctacctgcacgatcatcacctggtgcaccgcgacctcaagtgcgaaaacgtgctgctgagcccggacgagcgccgcgtcaagctcaccgacttcggcttcggccgccaggcccatggctacccagacctgagcaccacctactgcggctcagccgcctacgcgtcacccgaggtgctcctgggcatcccctacgaccccaagaagtacgatgtgtggagcatgggcgtcgtgctctacgtcatggtcaccgggtgcatgcccttcgacgactcggacatcgccggcctgccccggcgccagaaacgcggcgtgctctatcccgaaggcctcgagctgtccgagcgctgcaaggccctgatcgccgagctgctgcagttcagcccgtccgccaggccctccgcgggccaggtagcgcgcaactgctggctgcgcgccggggactccggctagaagccgggtggttccagccattcctgcagccaagggcactgggccagggcggcgcacgcgcaagaggcgcgcttcgagggaatatgcgaagctgccgcgtgctgctgcacatgcgctttttcccttccgcttccctccctttcttcccacgggggagtccgcagttgcccttgttcggaatccacgttccccgcgatcccgggagctggaggcgcatgcgcatccgcgattccctgcgaccaggccccgagagggcgagaccagaggggacggaagcattgcgcctgcgcggaactctcagcctctgcgcggagggcgtcccttcccaaccagccgtgggtgccaggttcccggttggaacctgcaataaactcgctgttcctcgca

SEQ ID NO: 402829 - DNA, 1000 bp, Homo Sapiens; identical to SEQ ID NO: 118220

SEQ ID NO: 402830 - DNA, 1000 bp, Homo Sapiens; identical to SEQ ID NO: 291376

SEQ ID NO: 402831 - DNA, 1000 bp, Homo Sapiens; identical to SEQ ID NO: 223581

SEQ ID NO: 402832 - DNA, 1000 bp, Homo Sapiens; identical to SEQ ID NO: 223582

SEQ ID NO: 402833 - DNA, 1000 bp, Homo Sapiens; identical to SEQ ID NO: 223583

SEQ ID NO: 402834 - DNA, 1000 bp, Homo Sapiens; identical to SEQ ID NO: 291380

SEQ ID NO: 402835 - DNA, 1000 bp, Homo Sapiens; identical to SEQ ID NO: 291381

SEQ ID NO: 402836 - DNA, 1000 bp, Homo Sapiens; identical to SEQ ID NO: 291382

SEQ ID NO: 402837 - DNA, 1000 bp, Homo Sapiens; identical to SEQ ID NO: 291384

SEQ ID NO: 402838 - DNA, 1000 bp, Homo Sapiens
catggagctggcaccccgctccgcagagcccggctacctggtgaccaaggtggtggcggtggacaaagattcaggccagaacgcctggctgtcatacctcctgcttaaggccagcgagccaggactctttgcggttgggctgtacacgggcgaggtgcgcacggctcgggccctgctggacagagatgccctcaagcagagcctcgtggtggccgtccaggaccacggtcagcctcctctgtcagccaccgtcacactcaccgtggctgtggctgacagcatccccgaagtcttggccgacctgggcagccttgagccctccgacggtccttacaactatgacctcacgttgtacctggtggtggcggtggccacagtctcctgcgtcttcctagccttcgtcctcgtactgctggcgctcaggctgcggcgctggcacaagtcacgcctgctgcaggcttcagaaggtggcttggcgaacgtgcccacctcgcactttgtgggcatggacggggtgcaggctttcctgcagacctattcccatgaggtctccctcaccgcggactctcggaagagtcacctgatcttcccccagcccaactatgtagacatgctcatcagccaggagagctgtgagaaaaatgattctttgctaacatccgtagattttcaggaatgtaaagaaaacctgccaagtattcaggtgagcccagcccttcctttatttccatgaggaatttatttgcatgatatttctctattattttgcaaaacaaatgttttgaaaatagggatttaaaaaactttatagaggtaaaaatgagtttaccagtttccttcagtggtgacactttaatatagaacacataggatatagtatttctttagtgaaagcctatggacaagattatgaatatgtggactatcacattttataatttccacctactttccaatctatgttccaacctactttcttaactcatatattttatacatt

SEQ ID NO: 402839 - DNA, 1000 bp, Homo Sapiens
gggggagcacacgggcgaggtgcgtacagcgcgggcactgctggacagagacgcgctcaagcagagcctcgtggtggccgtccaggaccacggccagccccctctctcggccaccgtcacgctcaccgtggctgtggccgacagcatccccgaagtcctggcggacctcggcagcctcgagtctctggctaactctgaaacctcagacctctcgctgtacttggtggtggcggtggccgcagtctcctgcatcttcctggtctttgtcatcgtgctgctggcactcaggctgtggcgctggcataagtcacgcctgctgcaggcttctgaaggcgggttggcaggtatgcccacgtcacattttgtaggcgtggacggggtacaggctttcctgcaaacctattcccacgaggtctctctcattgcggactcgcagaagagtcacctgattttcccccagcccaactatggggacacgctcatcagccaggagagctgtgagaaaagcgagccactcttgatagctgaagactcagctatcattttaggcaaatgtgacccgacaagtaatcaggtgagatttatttctctgcctcctaattgttggtgtcttggcacaagtcttttaaggagatgttttttgagcctgttatgaaaactgtttggggggggggtggggcggcatatatttagttcatatatatttagagcaatacatgtgagttttactttgcctttcatgagattacgataatctttcagaacgtttttgtgaaagtcatttttcaatcttggcatattttcttttgatttcaaaggggccattcaactatgctggtttggtttgaagtaagttgaattttagtattatttttctattatcagtgtatgaggctctcaatttattatatatagatacaaattaatgattcacaaacactttttatttccatttcaattttgctgtgccttcactgatttgtagttatattccaccatt

SEQ ID NO: 402840 - DNA, 1000 bp, Homo Sapiens
agctgcgcaccttcgagctcacgctgcaggcccgcgaccagggctcgcccgcgctcagcgccaatgtgagcctgcgcgtgttggtgggcgaccgtaacgacaacgcaccgcgggtgctgtaccctgcgctgggtcccgacggctccgcgctcttcgacacagtgccgcgggccgcgcagccaggctacctggtgaccaaggtggtggccgtggacgcggactcggggcacaatgcctggctgtcctaccacgtggtgcaggccagtgagcccgggctcttcagcctggggctgcgaacaggcgaggtgcgcatggtgcgtgctttgggtgacaaggactcggtccgccagcgcctgctagtcgctgtaagagatggaggacagccacccctttcagccactgccacgctgcacctggtgttcgcagatagcttgcaagaggtactgccggatttcagcgaccatcccacaccctctgactcccaggctgagatgcagttttacctggtggtggccttggccttgatttctgtgctctttctcctcgcggtgattctagctattgctctacgcctgcgacagtctttcagccctactgcaggagactgctttgagtcagttctctgctccaagtccggacctgtgggtccccccaactacagtgagggaacgttgccctatgcctataatttttgtgtgcctggggatcaaatgaatccagaatttaattttttcacatctgttgatcattgtccagccacacaagataacctcaacaaagatagcatgctactggctagcattttaactcccagcgttgaagcagataagaagattcttaaacaggtaagtatttaaaaatgtatttaatcctttttatattacaatatgccaatatattccaatatagtggtattattttaagattctagataacttcttcatagagttcgcaaaatataggtcaaatttatggttatcattattaaaacaaaagttta

SEQ ID NO: 402841 - DNA, 1000 bp, Homo Sapiens; identical to SEQ ID NO: 118222

SEQ ID NO: 402842 - DNA, 1000 bp, Homo Sapiens; identical to SEQ ID NO: 291386

SEQ ID NO: 402843 - DNA, 1000 bp, Homo Sapiens; identical to SEQ ID NO: 221163

SEQ ID NO: 402844 - DNA, 1000 bp, Homo Sapiens
ctcgctcacgctcagacgctacacacgcgcgcgcacagacacggtgcacctaggtcacacacggacgtgttcaagggacagcacaatgttagggatttttgtcttaaaggaggacaagcattgctaccaaccgcctcatctgagggcccaactgatatgatttgatttatccttgtactctccaagctcctgtctttctttcctctcccaccacgctacccttgcccagtccacccagtcacatccgtgcagccctctcttggcttgcaagataacgcttttatttttattttatcttattttcattttcttaagcacaactgtgtgagagtgtagaagggaaggcttctcaggaggaacgtgacagtggattgggtggctggagtagactaaagcagtcatgtgacgaggaagaggtgatctgacccattttgataagtctttataaggaagaataaaataaacgtgtaagcaaaattttcttttgtaaaagcaaaagccacatctcttttctggatccttcaggactggggtttgtttgcttccttttctgtttctgtcttctcgctgctctgtgcccttggttgttttgtggtggtcctgtcgtccctcgtgcccctcggccacctgctggcagccgatgggggcactcggacatctacaaccctgcaactttgtacagagaaacacaatcagctctttctgcatgtgctggtcaaatccaaacccagagaacagaagcgctttctaagaatgaacaaatatgtgaaataggatgttttgtgtagataaagcattcttgttacatactggtcaatttgtgatatgttttaacttaatgtctgtgtttatttatggaattcggttttcttaataaatgtttgagctaatataaagcatattatttgacttttccggacaagtttatatcaagttaaatgtaaatggataaaataaaatcattttcagtatgtgaaaaaaaaaaaaaaaaaaaaaaaaa

SEQ ID NO: 402845 - DNA, 941 bp, Homo Sapiens; identical to SEQ ID NO: 291391

SEQ ID NO: 402846 - DNA, 1000 bp, Homo Sapiens; identical to SEQ ID NO: 118224

SEQ ID NO: 402847 - DNA, 1000 bp, Homo Sapiens; identical to SEQ ID NO: 291393

SEQ ID NO: 402848 - DNA, 1000 bp, Homo Sapiens; identical to SEQ ID NO: 118225

SEQ ID NO: 402849 - DNA, 1000 bp, Homo Sapiens; identical to SEQ ID NO: 223586

SEQ ID NO: 402850 - DNA, 1000 bp, Homo Sapiens
ctaggacagtggcctggtcccaggggctgttgtggggagttgaagaacaccctggcctcctccatcatgtcggccaagagggcagaattgaagaaaacacatctgtgcaagaactacaaggcagtttgcctggaattgaagccagagccgaccaaaacatttgattacaaagcagttaaacaagaagggcggtttaccaaagcaggagtgacacaggacctaaagaatgaactcagggaagtgagagaagagctcaaggagaaaatggaggagataaaacagataaaggatctaatggacaaggattttgataaacttcacgaatttgtggaaattatgaaggaaatgcagaaagatatggatgagaagatggacattttaataaatacacagaagaactataagcttccccttagaagagcaccaaaggagcagcaggaactcaggctgatgggaaagactcacagagaaccacagctcaggcccaagaaaatggatggagccagtggagtcaatggagcaccctgtgctcttcacaagaagacgatggcaccacaaaaaacaaaacagggctcactggatccccttcatcactgtgggacctgctgcgagaaatgtttgttgtgtgctctaaagaacaactacaatcgggggaacattccttcagaggcctcaggcctttacaaaggtggagaggagccagtgaccacccaaccttctgtgggccacgctgtgcctgccccaaagtcccagactgagggaaggtgaagcttaactgccagcttgaaatgagagtaaagaagatacagagcaaacagtgtttcagaaactgtcctgccctgggtgtgattctttggcttcaatttgaaggaggaggaatgatgggatttcatattttatttcacaccagttcctccttgtttcatctctttgctaagctggctgcttctaccatctaataaataattggccaagttaaaaaaaaaaaaaaaaaaaaaaa

SEQ ID NO: 402851 - DNA, 1000 bp, Homo Sapiens; identical to SEQ ID NO: 291398

SEQ ID NO: 402852 - DNA, 1000 bp, Homo Sapiens; identical to SEQ ID NO: 118226

SEQ ID NO: 402853 - DNA, 1000 bp, Homo Sapiens
tcccaggaccatgatgtctgcgatttcattgtgcagaacaatgtccacaggttcatgatggcgctgctggatgctcagcatcaggatatctgcttttctgcctgtggtgttctcctcaatctcactgtggataaagacaagcgtgtcatcttgaaagaaggaggtggcattaaaaagttagtggactgtttaagagatttgggtcctactgattggcagctggcctgcttggtttgtaaaactttatggaacttcagtgaaaacatcactaatgcttcgtcatgttttggaaatgaagacaccaacacactcttactcttgctctcatcatttttagatgaagaactagcactggatggcagttttgatccagacctaaaaaactatcacaaactccattgggaaacagaattcaaacctgtggcacagcagcttctaaaccgaattcagagacatcacaccttcctggaacccctgcccattccctctttctaacatgatgcagattaacagtagaaacgagaactcacgtctccctcattcttaagaactggtaacaaacgtgaacatttttttcagcattaacaaatgtggaaagtttttcaagaactggttttagtgagtagctgaagtattttttaaaattaagcatttcttcttgttaggtattatggaaaaatgaatatacacattatatttcctgttgagagaaatgtaagatgaaaatatgtgcattttcaagtaaatgactttttcttctattctctattaaacaatttagttctagtcttaaaatcttgatttaacaattttggaattgaagtgttcataagttaaatgaactgtgcaatgaaggctgttagattatatagaaagaagggtaggcaacatgagtggaacacgttacaacataggatctgtactaattcttactatgtcaaataataaatgctctcattaggaaaaaaaaaaaaaaaaaaaaataaaaaaaaaaaaaaaa

SEQ ID NO: 402854 - DNA, 1000 bp, Homo Sapiens
ggccctcagggaatccgggtcccagaaggccagagtggggaccaagagtcctcagcggaagagcatcatggaggagatcctggtggaggaaagcccagatgtggacagcaccaagagcccctgggagccggatggccttcccctgctggagtggaacctctgcttggaggacttcagaaaggcagtgatggtgctccctgatgagaaccacagagaggatgcgttgatgaggctcaacaaagcagccctggagctgtgccagaagccaaggccattgcagtccaacctcctgcaccagatgtgtttgcagctgtggcgagatgtgattgacagcctggtgggccattccatgtggctgaggtctgtgctgggcctgcctgagaaggagaccatctatttgaatgtgcctgaagagcaagatcaaaaatcacctcctatcatggaagtgaaggtacctgtggggaaagctgggaaggaggagcggaaaggagcagcccaggaaaagaagcaactggggatcaaagacaaagaagacaagaaaggagccaagctgctcgggaaagaggaccgtcccaacagcaagaagcacaaggcaaaggatgacaagaaagtcataaaatctgcaagtcaggacaggttttctttggaagaccctacccctgacatcatcctctcttctcaagaacccatagaccccctggtcatggggaaatacacccagagcctgcacagtgaggtccgtgggctgctggacaccctggtgactgacctgatggtcctggctgatgagctcagccccataaagaatgtcgaggaggctttgcgcctctgcaggtgactctcgggcccaagcaaccttctggaaaacgggttaataaataaatcaataaagaaccttcaagtttctactaaaaaaaaaaaaaaaaaaaaaaaaaaaaaaaaaaaaaaaaaaaaaaaaaaaaaaaaaaaaaaaaaaaaaaaaaaaaaaaaaaaaaaaaaa

SEQ ID NO: 402855 - DNA, 1000 bp, Homo Sapiens; identical to SEQ ID NO: 223589

SEQ ID NO: 402856 - DNA, 1000 bp, Homo Sapiens
caggtgaagagaccactgcagaagaggcctctgctgcaattcagcttctagcagctacagaggcttctgcagaagaggctcctgctgaagttcagcctccaccagctgaggaggcccccgctgaagttcagcctccaccagctgaggaggcccccgctgaagttcagcctccaccagctgaggagacccccgctgaagttcagcctccaccagctgaggaggcccccgctgaagttcagcctccaccagctgaggaggcccccgctgaagttcagcctccaccagctgaggaggcccctgctgaagttcagtctctaccagctgaggagactcctatagaagagacccttgctgcagtacactctcccccagctgatgatgtccctgcagaagaggcctccgttgacaaacattccccaccagctgatttgcttctgactgaggagtttcctataggagaggcctctgctgaagtttcacctccaccatctgaacaaacccctgaagatgaggctctggtagagaatgtgtctacagaatttcagtcaccgcaggtggcaggaattccagcagtaaaattaggatcggttgttttggaaggtgaagcaaaatttgaagaggtttcaaaaatcaattctgtccttaaagatttgtctaataccaatgatggacaggctcccactcttgaaatagaaagtgtttttcatatagaattaaaacaacgtcctcctgaactgtagtcaggttgtacctaagctagcaatcagaagctacatggttttggaagaacatactttagaaaagggtgggcagcgggaagtagctttgtcaataaggcaaattaaaggggaccccaagacttggaatacaggttggaaaatgaacaataaaaactgtagcagcataaaaaaaaaaaaaaaaaaaaaaaaaaaaaaaaaaaaaaaaaaaaaaaaaaaaaaaaaaaaaaaaaaaaaaaaaaaaaaaaaaaaaaaaaaaaaaa

SEQ ID NO: 402857 - DNA, 1000 bp, Homo Sapiens
gcggccgagttatcacagtggaggatcactacagggaaggtggcattggagaagctgtttgtgcagctgtctccagggagcctgatatccttgttcatcaactggcagtgtcaggagtgcctcaacgtgggaaaactagtgaattgctggatatgtttggaatcagtaccagacacattatagcagccgtaacacttactttaatgaagtaaactaggcttatttctaaaaagtcaagtctattggctttggcccaaaagcactggtatctttgtattaaattcatgtttattgtcacaaaaccattatttatacctatacagttgtactgtttcttttaaagcaaagccatttaacatctttcttcattcctaatttggaaattaaagtttacctttctgttaatctatgtataaatgttactctgagttattaatgtggattttaaaattgtaagcaatagaataggaaataaaacaactacctaatacaaatatttctgataagactacaaatatcttactgagctggggattaaagtagaggtaactgtatcttaaatgagtatgatttccttgtaagttaaaaaaattgaaatttaattgtagacttcaatagtccaagttttgaaggatgtttgagcttttgtataatgccatttatacctgcagttttacagataatgtttgactgcagttgccttggaaattcctccaaagtttgccttcatctctcctctacagtttggaggtgatggtgcagcagtggaacatctcttgatgcaccacactacttgtgttgtgtgaagtgatgaaagtataactggttctagtttgcacactacacacatagttttgtgaagcttcagaaatgttttttcttttccttgtggccaaaccagtttgttaatctgattatattcatctgctaatgatactaaagttaatgtaataaagcatttaaaaatcaaaaaaaaaaaaaaagaaaaaaaaaaaaaaaa

SEQ ID NO: 402858 - DNA, 1000 bp, Homo Sapiens
cggaagaccaccaaaatccacaccaaagccaaggtcacatccagagggaaggcccgcgaggggcgcagccccaccaggtgggcggccttgccctcagactgcccgctggtgctgcggaagctcatgctcaaggaagacacccgtgctggctgcaagtgcctggtgaaggcgcccctggtctctgacgtggagctggagcgcttcctgttggcgccccgagaccccagccaagtgctggtgtttgggatcatctcaagccagaactacaccagcactgggcagctccagtggctgctgaacactctctacaaccaccagcagcggggccgtggctccccctgcatccagtgccggtatgactcctaccgcctgctgcagtatgacctggacagccccctgcaggaggaccctcccctgatggtgaagaagaactctgtggtgcaggggatgattctgatgtttgccggggggaagctcatttttgggggccgtgttttgaatggatatggcctcagcaagcagaatctgctgaaacagatcttccggtctcaacaggattacaagatgggctacttcctgccggatgactacaaattcagtgttcccaactctgtcctgagcctggaggattctgaatcagtcaagaaagccgagtcagaagatatccaaggaagcagctcctcattggccctggaagactatgtggagaaggagttatctctggaggctgagaagacaagagagcctgaagtggagctacatcctctcagcagggacagcaagataactagttggaagaagcaggcctccaagaagtagcgccatcctggcagcagccaagtgagccaggccccggcccggggtgctggggcttcttgccagcccagccctgcctccccggtctcccaccctgtcctccaagcttctataataaaccagcgggcctccagcattggggtgaggctctggggaaggacaaaaaaaaaaaaaaaaaaaaaaa

SEQ ID NO: 402859 - DNA, 1000 bp, Homo Sapiens; identical to SEQ ID NO: 291401

SEQ ID NO: 402860 - DNA, 1000 bp, Homo Sapiens; identical to SEQ ID NO: 291402

SEQ ID NO: 402861 - DNA, 1000 bp, Homo Sapiens; identical to SEQ ID NO: 223591

SEQ ID NO: 402862 - DNA, 1000 bp, Homo Sapiens; identical to SEQ ID NO: 291406

SEQ ID NO: 402863 - DNA, 1000 bp, Homo Sapiens; identical to SEQ ID NO: 223592

SEQ ID NO: 402864 - DNA, 1000 bp, Homo Sapiens; identical to SEQ ID NO: 291407

SEQ ID NO: 402865 - DNA, 1000 bp, Homo Sapiens
gagctcactgcctgcggccgtggccggcttcagctcccggcacccgctcagccctgggtttggagcggctgggacaccccgctggaggtcaggaggcctggttcacagtggaggggccaggccaggcctcagacccagccatccaccccggcggaggcctctgccccctgccagcagcctgggacaccctccagccaagcccccgctgcccccggggcccgtggatatgcagagctttcggagaccctctgcagcatccatagatctacggaggacccgctcggccgctgggctccacttccaggaccgacagcctgaagacatcccggtcccagatgagatctacgagctgtatgacgatgtggaacccagagatgactccagccccagccccaagggcagagatgaagcgccctcagttcagcaagccgccaggaggccaccacaagacccagcgctcaggaaggagaaggatccccagccacagcagttgccacccatggacccaaagttgctgaagcagctgaggaaggcagagaaggccgagagggagttccggaagaagttcaagtttgaaggggagatcgtggttcacacgaagatgatgatcgaccccaacgctaagacacgtcgcgggggtggcaagcacctcgggatccggcgcggggagatcctggaggtgatcgagttcaccagcaatgaggagatgctgtgccgggaccccaaaggcaaatatggctacgtgcccagaacagcgctcctgcccctggagacggaggtgtacgatgatgtcgacttctgcgatcccctggaaaaccaaccactccccctgggacggtaagaccggtaggcgtggggccaggacagccagccagcccagcgcccgctcacccaggagccctggatcccggcgcgggaaagtcacagagctgcctgggcttgtacctggccacataaagccccagtttaaagcaaaaaaaaaaaaaaaaaaaaaaaaaaa

SEQ ID NO: 402866 - DNA, 1000 bp, Homo Sapiens
atcagcccaagttgggtcacatagatgggtttcctttgggtacccctcaggctcctaatattcttgcccaggatccttggaacttaagaatgcagccaagcaattgttaatatctcctgctccttcaaagccacctctgctaaaaatagacccattgtgtgtttcttctcactagcagcaatcaacaagccctttctgccgttaataagaaggagaatagctgaaggagagagatattttattaatttcctgtttccttcagaatcttggcaattgaagtttagaaggtttggtctacaacacagtgatcgaaaatgcatgtaaatgcccatccttcccttcattcacgtgtgaagttgttcattttatattgtgcccagcaaagaaactttcacccagttcaggtttccccaaaactcctgtggtggttttaaaggtggtttaaataaataaggatgtgctggtccccctactctgtgtgtgctgaataaatggcttgtaaagaagtttttccaagctgtaacccatgctgttattatagttgctgcaaaatgttcttcctgatattgattttatttgttaactgaaggtctccatatgtttgtttatattgctaatttatgagaaaatgtaataattgcaatgaatgtgaattatacagacaggcaaacattttgtaatcataattcacatatacacaaaagcctggctgaaatctttagactatttgtaccctctctacccacactgtttgtgatttatcatctgtctctttagtgtcagttaaattatgaactaacttgaaaataaaagttgtttgactgaaagtgattgttgaatgaacaacaaagttgaaagccatggcttgatcttgtaaatatataaatgtaaatgatattaaatctgtgattccttttccctccaaaggcttttgtgtacatggcgctgcatttggctattttctttggaaataaataatgtgatgtttctcttcctcttt

SEQ ID NO: 402867 - DNA, 1000 bp, Homo Sapiens; identical to SEQ ID NO: 223593

SEQ ID NO: 402868 - DNA, 1000 bp, Homo Sapiens; identical to SEQ ID NO: 223594

SEQ ID NO: 402869 - DNA, 1000 bp, Homo Sapiens; identical to SEQ ID NO: 223595

SEQ ID NO: 402870 - DNA, 1000 bp, Homo Sapiens; identical to SEQ ID NO: 223596

SEQ ID NO: 402871 - DNA, 1000 bp, Homo Sapiens; identical to SEQ ID NO: 291412

SEQ ID NO: 402872 - DNA, 1000 bp, Homo Sapiens; identical to SEQ ID NO: 223597

SEQ ID NO: 402873 - DNA, 1000 bp, Homo Sapiens; identical to SEQ ID NO: 291413

SEQ ID NO: 402874 - DNA, 1000 bp, Homo Sapiens; identical to SEQ ID NO: 291414

SEQ ID NO: 402875 - DNA, 1000 bp, Homo Sapiens
gtgtatgacatttactacttggagacggccactccaggctggattgagaacatcctctccgtgcagccctacagccaagaatgggagctggtgaatgatgatcaagaaccagaggacatttacgacgatgaagatgacgagaacagtgagaataactggcgcaatgagtacccagaggaggagagcagtgatggagatgaggattccagaggctctgctgactacaacagcctgagtgaggaggaaagaggcagcagcagacagcggatgtggagcaagtaccctctggatgtgcagaaggagttcggctatgacagcccccacgacctggattcagactgatggtcttgtgatgtccatgaggttctgccacatgcccttgagggctctgagtccagagttaactgccctgctgacatcctgttaggtttcctagcttaacatgtggaaggaaaagcatatcaagcatatcgggcggcaccatcccaccacagtgaaaacttatgttaggggagtgagtcttttccacttacagtaggacccctttgcctcaatcaaaagtgaccctacagtttgaaagaaaaaaaaacgttgaaaaaaggaaggtttctttagctttagcttcttggcccaggaatttttcctggcattcaggttctgtgctgaaaccacaagggagggggaggttcccatttcattagcagtaagcttctgctgtgccataccaccaggctgcctgcctctaggaaaaccctgttccttttgatagaatctaaaaggggtaccagtgggtcccttgtagcaatacagactggatagtaatggccattagggcagaaagtagtctgagcagtgggagattttagttaacagctatttctgcttccaaactctgataacggttgtgaaattactgactgacttcctttggcagtggggccaagaaacaatatatatgaatgtgatacatgtgtttagtaaaatctagctttgaacatgg

SEQ ID NO: 402876 - DNA, 1000 bp, Homo Sapiens; identical to SEQ ID NO: 291415

SEQ ID NO: 402877 - DNA, 1000 bp, Homo Sapiens; identical to SEQ ID NO: 118228

SEQ ID NO: 402878 - DNA, 1000 bp, Homo Sapiens; identical to SEQ ID NO: 118229

SEQ ID NO: 402879 - DNA, 1000 bp, Homo Sapiens; identical to SEQ ID NO: 223599

SEQ ID NO: 402880 - DNA, 1000 bp, Homo Sapiens; identical to SEQ ID NO: 118230

SEQ ID NO: 402881 - DNA, 1000 bp, Homo Sapiens; identical to SEQ ID NO: 118231

SEQ ID NO: 402882 - DNA, 1000 bp, Homo Sapiens; identical to SEQ ID NO: 118232

SEQ ID NO: 402883 - DNA, 1000 bp, Homo Sapiens; identical to SEQ ID NO: 118234

SEQ ID NO: 402884 - DNA, 1000 bp, Homo Sapiens; identical to SEQ ID NO: 291424

SEQ ID NO: 402885 - DNA, 1000 bp, Homo Sapiens; identical to SEQ ID NO: 291425

SEQ ID NO: 402886 - DNA, 1000 bp, Homo Sapiens; identical to SEQ ID NO: 291427

SEQ ID NO: 402887 - DNA, 1000 bp, Homo Sapiens; identical to SEQ ID NO: 291428

SEQ ID NO: 402888 - DNA, 1000 bp, Homo Sapiens
cagtttgaagtgggcccctatggctgcatcctgctcaccctttctgccatcctgtccaggtctacagagctcatccgccaggactttgatgtccccaccagccacctgattggagcacatggctactgtacacaggaacttgtcaatctgctcctaactgggaaagctgtgtccaaacgttttcaacgatgtggttgagctggattctggggatgggaacttcacacttctcagaggcattgctgcacgcagtgatattggcttcttttctctctttgagcattacaacatgtgccaggttggctgcttcctgaagaccccgaggttccccatctgggtggtttgcagtgagagccacttcagcatcctctttagcctgcagccggggctcctgcgtgactggaggactgagaggctctttkacttgtactactacgatggcctggccaaccagcaggagcagatccggctgaccattgacaccacccaaaccatctctgaggacacagacaacgaccttgtcccacccctcgagctctgcatcagaaccaagtggaagggggcatcagtgaactggaacggctcagaccccatcctgtgaccgttggatgtgggtaaaccctgtggtccaccactcatcacctcatcaccgaggatgacagctgaaccccaagcctctggggcaggtctcatgtaccccaacctgggtcagcatgactgcagaagcatccagagcctccctgccccttccatgaagggcccacccaagactgtgctggggacccagtgtgttgctgggtcccctcccagctgagctgtgactgctgagtactggaaggaggttgccagggtctctgctacctttgtctgcatccctcccttgctccctgctgggtggtccctcacccaggcctccaatgtggttggccctggggactcattacttctggtagctggctttctataaaaatgggtcaaacccaaaaaaaaaaaaaaaaaa

SEQ ID NO: 402889 - DNA, 1000 bp, Homo Sapiens; identical to SEQ ID NO: 118236

SEQ ID NO: 402890 - DNA, 1000 bp, Homo Sapiens; identical to SEQ ID NO: 291430

SEQ ID NO: 402891 - DNA, 1000 bp, Homo Sapiens; identical to SEQ ID NO: 118237

SEQ ID NO: 402892 - DNA, 1000 bp, Homo Sapiens; identical to SEQ ID NO: 291432

SEQ ID NO: 402893 - DNA, 1000 bp, Homo Sapiens; identical to SEQ ID NO: 291433

SEQ ID NO: 402894 - DNA, 1000 bp, Homo Sapiens; identical to SEQ ID NO: 223601

SEQ ID NO: 402895 - DNA, 1000 bp, Homo Sapiens; identical to SEQ ID NO: 118240

SEQ ID NO: 402896 - DNA, 1000 bp, Homo Sapiens; identical to SEQ ID NO: 223604

SEQ ID NO: 402897 - DNA, 1000 bp, Homo Sapiens; identical to SEQ ID NO: 291437

SEQ ID NO: 402898 - DNA, 1000 bp, Homo Sapiens; identical to SEQ ID NO: 291438

SEQ ID NO: 402899 - DNA, 1000 bp, Homo Sapiens; identical to SEQ ID NO: 291439

SEQ ID NO: 402900 - DNA, 1000 bp, Homo Sapiens
aaaaaatgatcaagtttgactgtggccgagccccagggctagaaaagagggtcaagagagagccggaggaagtggaaaggacagaggaaaaggtcccatgcagccctcgggagagacccagccaccatccaactcccaagttaaagaccaagagttataggagggagtccatcctcagctccagcccaaatgcaggctccaagcggacccccgagctgttgggaagtgcagagagccagggcatttttccatgcagagagtgtgaaagggtgtttgacaagatcaagagtcgaaatgcccatatgaagcggcaccgccttcaggaccacgtggagcccatcatcagggtgaagtggccagtgaagcccttccagctaaaggaagaggagctgggagctgacatcggccccctgcagtggtgactcccgtggcagcaagtccgaatggggcctccagtgctgcccctcctcccttcggcctctccagggcgtttggggcacccctctgcctccccccaccctccctgtcccctgttggccaacctgcctgcaaacatggagggcatttggccacagataggcaggaggagctcagttgtcggacagctatgcagtccctgtccggtggtgctggaggctccactctccttaggttcatagtctctccccttctttcccttccacttctagagcagggaggcttggggaggggaaaatttagctctgggtagctcttaaatcttagcctcagttgtggggtttggtttcatgtgttagataaggccaagacttagagaatcagtgggaaaaaaccttgagatctccaacacgctgggcccctccctggggcggggactctaccttccagattcagtccctagtcttgcgatgaattctgcattgttcggtgttttttgtacatgtcaactcgtaaatctgattaaattgggttcttgaaaaaaaaaaaaaaaaaaaaaaaaaaaaaaaaaaaaaaaaaaaag

SEQ ID NO: 402901 - DNA, 1000 bp, Homo Sapiens; identical to SEQ ID NO: 291440

SEQ ID NO: 402902 - DNA, 1000 bp, Homo Sapiens; identical to SEQ ID NO: 223606

SEQ ID NO: 402903 - DNA, 1000 bp, Homo Sapiens
aatacatagggagaagtgttcattattggaagaaagttttgccattgttgaagataataaagaagaacagtattcctgaacctattgatcctctgtttaaacattttcatagtgtagacattcaggcatcagaaattgttgaatatgaagaagacgcacacataacttttgctatgttggatgcagtaaatggaaatatagaagatgctgtgactgcttttgaatctataaaaagtgttgtttcttattggaatcttgcactgatttttcacaggaaggcagaagacattgaaaatgatgccctttctcctgaagaacaagaagaatgcagaaattatctgacaaagaccagggactacctaataaagattatagatgacggtgattcaaatctttcagtggtcaagaaattgcctgtgcccctggagtctgtaaaacagatgcttaattcagtcatgcaggaactcgaagactatagtgaaggaggtcctctctataaaaatggttctttgcgaaatgcagattcagaaataaaacattctacaccgtctcctaccaaatattcactatcaccaagtaaaagttacaagtattctcccgaaacaccacctcgatggacagaagatcggaattctttactgaatatgatttgccaacaagtagaggccattaagaaagaaatgcaggagttgaaactaaatagcagtaagtcagcatcccgtcatcgttggcccacagagaattatggaccagactcggtgcctgatggatatcaggggtcacagacatttcatggggctccactaacagaagcagcacatcgtcattttacaattgagaaacatggagactccaaatggattatttacaggttcacaaaacagctttgtggcactgaaagggcgagagccaagatctcctgatttctgttcctgtgttcatagattctttttccttaataaaagtaaacatatatcaaaaaaaaaaaaaaaaaaaaaaa

SEQ ID NO: 402904 - DNA, 1000 bp, Homo Sapiens; identical to SEQ ID NO: 118242

SEQ ID NO: 402905 - DNA, 1000 bp, Homo Sapiens; identical to SEQ ID NO: 118244

SEQ ID NO: 402906 - DNA, 1000 bp, Homo Sapiens
ggaggagccatcgcagtccctcagagagaagccatcacagtccctctgagagaagccatcacagtccctctgagagaagacatcacagtccctctgagagaagccattgcagtccctctgagagaagccattgcagtccctctgagagaagacatcgcagtccctctgagagaagacatcacagtccctcagagaaaagccatcacagtccctctgagagaagccatcacagtccctctgagagaagacgtcacagtcccttggagaggagccgtcacagtctcttggagaggagccatcgcagtccctctgagaggagatctcacaggtcctttgagaggagccatcgtaggatttctgagagaagtcacagtccctcagagaagagccacctcagtcccttggaaagaagccgttgcagtccctctgagaggagaggacacagttcctctgggaaaacctgtcacagtccctctgagagaagccatcgcagtccctccgggatgaggcaagggaggacctctgagaggagccatcgcagttcctgtgagagaacccgtcacagtccctctgagatgaggccagggaggccctctgggaggaaccattgcagtccctctgagaggagccgacgcagtccccttaaggagggactcaagtacagtttccctggagagaggcccagccatagtttgtctagagatttcaagaatcaaacaactctcctcgggaccacacataaaaatcccaaagcagggcaagtgtggaggcctgaagctactcgatgaggcgaggtccgcccctattattcattgtcctaagtcttcatcgtgctgccctttccaggcttctttcctgctcagccactgcctccaattcctgcgcccccagcgtggaaaggcttccatttctctctaccgggggggaggcgggtgagaatgggtctgtaatttctctaagatgaataaaggggcagtaaataaaaaaaaaaaaaaaaaaa

SEQ ID NO: 402907 - DNA, 1000 bp, Homo Sapiens
tcaaaggaaacaagaatcagttccctggaaaaggatatgcattatgcaaaaatatccagcatggagaataaagccaagagccacctccacatggaagccccctttgagacaaaggtctctacccacctgaggactgtcatccccattgtcaatcactcctccaagatgacaattcagaaggccatcaagcaaagcttctccttaggatacatccacttggccttgtgtgctgatgcctgtgcagggaaccctttccgggaccacctgaagaagctgaatttgaaagtggagatccaacttcttgacctctggcaggacttgcagcatttcctcagtgtccttctgaataacaaaaagaatgggaatgcaatctttcgtcacttgctgggtgacagaatctgcgagctctacctgaatgagcagattggtccgtgcttaccactcaaatcccaaaccattcagggcctgaaggaactattgccctctggggatgtgatcccctggattcccaaagcccagaaggagatttgcaagatgctcagtccctggtatgatgagtttctagatgaagaggactactggtttctcctttttacggtaggaaggactttgggttaggaaggaatcatgaggatgagggaagaagaaagagtaattactgttttaaaagggttatgtgttaaagtaaatgaaattgttatttttcctagagtcaaccaaagatcagcatggtccctgttgttctaaagctaaacctctcaaggaaaaggactcagtgcataagatgactttggtgaaaccccgtctctactaaaaatacaaaaaattagccgggcgtagtggcgggcgcctgtagtcccagctacttgggaggctgaggcaggagaatggtgtgaacccgggaggcggagcttgcagtgagccgagatcccgccactgcacgccagcctgggcgacagagcgagactccgtctcaaaaaaaaaaaaaaaaaaaaaaaag

SEQ ID NO: 402908 - DNA, 1000 bp, Homo Sapiens; identical to SEQ ID NO: 223609

SEQ ID NO: 402909 - DNA, 1000 bp, Homo Sapiens; identical to SEQ ID NO: 223610

SEQ ID NO: 402910 - DNA, 1000 bp, Homo Sapiens; identical to SEQ ID NO: 291446

SEQ ID NO: 402911 - DNA, 1000 bp, Homo Sapiens; identical to SEQ ID NO: 294303

SEQ ID NO: 402912 - DNA, 1000 bp, Homo Sapiens; identical to SEQ ID NO: 118245

SEQ ID NO: 402913 - DNA, 1000 bp, Homo Sapiens
aggaaaaccatttagacagccaacttatacaaactatatatttgtccttgtgctgataatacagcttggtgtatgtctattcattctatttgctgatataccagaattatatagacgtttggatctgctctgcactcccgtcctgtggagggcctccattgtcatcatgctcagcttgaatttcattgtgtcccttgtggccgaggaggctgttattgaaaatcgagccctgtggatgatgattaaaagatgtttcggctatcagtcaaaaagccagtatcggatatggcagagggacttggcaaatgaccctagttggcccccgctaaaccaaacctcccactctgacatgccggagtgtggcagaggagtgtcttacagcaatccagtatttgagagcaatgaagaacaactctgaaggacatgtgatatccaagttgatattacagagaaacaatgacaaaagggaccagtttcattgattttaagaaatgagactcttgtaacatcagctggagttttggggctacctatcaaatcatggtgacaaactaaagtctgtttgataaaatactgtctacagagaagaacattgacccagaagagtgctttcctcttggcttctgaaggtattagaggcattcagtgaaggcaagaatgggccaagaatttctatgggccaagagacaagcaggctaaaggggaaaaatatgtgatctttcctcttaggacaggacaatactttcctttttataaaaatgagttgaggggaagtagtactgtgtatactcacggagttgtaatttttgaatttttacttcatcgatggaaaaactaatgcgtgggaaacattacaccaatctttactgtctgggttccttttctctgtagtacttttcagatttgaggctttttcttctgtttctggccttacccaacatattgttaaggataagcttagcctatgctgcaataaaaaacaactctcagataaaaaaaa

SEQ ID NO: 402914 - DNA, 1000 bp, Homo Sapiens; identical to SEQ ID NO: 118246

SEQ ID NO: 402915 - DNA, 1000 bp, Homo Sapiens; identical to SEQ ID NO: 291451

SEQ ID NO: 402916 - DNA, 1000 bp, Homo Sapiens; identical to SEQ ID NO: 118247

SEQ ID NO: 402917 - DNA, 1000 bp, Homo Sapiens; identical to SEQ ID NO: 118248

SEQ ID NO: 402918 - DNA, 1000 bp, Homo Sapiens
aacaggagaagctccccagagtaggggagaaggttggggtgtagggccttccacgtggaacagacagcccctgtgtctctgtctcttggggacctgagtttgggtggggtggcagttggcacagcgcagatgcggtagagatgggaggaaacccagctcctcacttccgtgtgcctcatgcctttgcatacacaagcaccaaacctactaggtcttctcattacccatgtaaaccacatgttagataaatttttgcaagtagaggaaagaaggaaataaaacatcacattttggtgtctctcaggctttcccccccaactatggtttctttgctttttgttttaacatagttttgttgctgtcttctgtaatgatacagttttgtgcagctgttttcacttagcatatcgtgggcatctccccttatgattactaaatattttattttggagtggctgtgtactctcccattgactagatggaccattgtgccagttgccaatcactaatgctgttactaacttttcagttataaattgatgaatatctttgtgcacaggctgtttcccaatgtcaagttattagggtagactccaggaggtgggattcttcaactaaagaatatgaaaacctttgaggcttttactacatattgacaaaatggtttccggaaatatttgtatccccttacactgccaccagcaaggataaacatgtccatcttgcccgtattgggaattatcatctggctaaatatttgctaatttgataatgaaaaaatagcatcgtgtttcagttggcatttcactgacttctagcacggttgaacatctttcatgtggagcgattgtatttcctcctttgtggattgtcagtgtcctttgctctatcttctggggtcagataaatttgtatgagctcggtatatattaaagatattaacctggtgtgtgtcatatttgctacagcaaaaaaaaaaaaaaaaaaaaaaaaaaaaaaa

SEQ ID NO: 402919 - DNA, 1000 bp, Homo Sapiens; identical to SEQ ID NO: 291455

SEQ ID NO: 402920 - DNA, 1000 bp, Homo Sapiens
ctcaaatcaaagaagaactgtttgctattacaaaaatagaagatacagtggagaactttcatgcacaagcagagaaacattttcattaccagcaacttgaatttggctcctttttacttagtaggatgttgctaaatttttgttcaatttttgatttatcttcagagttcattttagcttccaaagggttaactcatctaaatgaactgcttatggcttgtaaaagtcataaagaaaccaccagtgttcatactgactggttactggatctttatgctggaaatataaagacattgcagaaactcccacacattcttaaggaactgcctgagaatttgaaagtgtgtcctggggtacacactgaggccttgatgataacattggaaatgatgtgtcggtcagtcatggagttttcatgatgatgctagaaagtatggattgactttctaaatctgttcagtttgcattggtacttactgtggacttcatagcttactgacagatagtaatttgatttatttattgacagactttgcagccttgctaaattttaaaagcatttttaaaaaaacttctacaaaactctagtatgggcttctgactttttccagggtgtagaatttgactcaaaagtaaaaataattttgttttagtatattctactttcattaatgtttttttgttctgaaagtgatattatattgtacatgtaaaattaatttaaatattttttcaaataaaaatgtaatgtcctgtattctagatgttctaggtcttagaatcatggcaagcatattcatacaaatgcgtacctataaacttgtagctcctgactcttagggatggattttgaggaaaaaacaagactaaacaaaaacatgtagctccctatttcttctctctaggttgttggactgaaatatgcattttagctttgtgtgtttctaaaataaacatttctaaaatttacagtaaaaaaaaaaacaaaaaaaaaaaaaaa

SEQ ID NO: 402921 - DNA, 1000 bp, Homo Sapiens; identical to SEQ ID NO: 291456

SEQ ID NO: 402922 - DNA, 1000 bp, Homo Sapiens; identical to SEQ ID NO: 118249

SEQ ID NO: 402923 - DNA, 1000 bp, Homo Sapiens; identical to SEQ ID NO: 291458

SEQ ID NO: 402924 - DNA, 1000 bp, Homo Sapiens; identical to SEQ ID NO: 223612

SEQ ID NO: 402925 - DNA, 1000 bp, Homo Sapiens; identical to SEQ ID NO: 118250

SEQ ID NO: 402926 - DNA, 1000 bp, Homo Sapiens; identical to SEQ ID NO: 291460

SEQ ID NO: 402927 - DNA, 1000 bp, Homo Sapiens; identical to SEQ ID NO: 118251

SEQ ID NO: 402928 - DNA, 1000 bp, Homo Sapiens; identical to SEQ ID NO: 291461

SEQ ID NO: 402929 - DNA, 1000 bp, Homo Sapiens; identical to SEQ ID NO: 291462

SEQ ID NO: 402930 - DNA, 1000 bp, Homo Sapiens; identical to SEQ ID NO: 291463

SEQ ID NO: 402931 - DNA, 1000 bp, Homo Sapiens; identical to SEQ ID NO: 223614

SEQ ID NO: 402932 - DNA, 1000 bp, Homo Sapiens; identical to SEQ ID NO: 118252

SEQ ID NO: 402933 - DNA, 1000 bp, Homo Sapiens; identical to SEQ ID NO: 223615

SEQ ID NO: 402934 - DNA, 1000 bp, Homo Sapiens; identical to SEQ ID NO: 291468

SEQ ID NO: 402935 - DNA, 1000 bp, Homo Sapiens; identical to SEQ ID NO: 118254

SEQ ID NO: 402936 - DNA, 1000 bp, Homo Sapiens; identical to SEQ ID NO: 291471

SEQ ID NO: 402937 - DNA, 1000 bp, Homo Sapiens
ctcatgtcagtgcagttgggctgggctgacctactaaaacctgctccatgtatggacctggaaggccattgctgccatggcacttgggacacttgaggaagaaacagaaaccttatttcttcctgtgtgtcccctagtggttttctttccatttgtgttatgccacagagagaaatttcctgtctgaactcttctgctgcctgcctaggaaggaaacctgaagatttgggcagcctgagtctcttggtttctgagctggctcctgaatatatgttcaagtgggtgtgcccatagggcctgggcacgtgtctctagcaaaaccagggcctgagcataagaactgggattgcaggcgtgagccaccgcgcccggcctgcccctttccaagagatatgctcagcataatgagagatcaaccgtggtggggagtgggtccaagtaagggttctcattgttgccttttaagaggcctaagtcctgcattaactcagtccaaccattaagtgatgcaggctgctcttccctcatgtgagaaaaacctgtttccctctggttcttcctggctttgcacctggtggctattacaaagcagtactgcagtatgtcttggacctggaaagttggacatgtgtgtggctcaacagttttctcgggggagttcagtgaccttttggtggccaccctctgttctcacctgtgagttcttgcaggtggcgacttcatctgcaaggtcacttacatagccccactcagctgcttcggaaagcgtgacgaagcagtagtcctcagtgtgtgtgtaagtgaagaggaccttgtggtagcagggaccatgcttcattcgtggctgtgtccccatctgagggcctggtatgcaataagatcaataaatacttgtggaatgcaaaaaaaaaaaaaaaaaaaaaaaaaaaaaaaaaaaaaaaaaaaaaaaaaaaaaaaaaaaaaaaaaaaaaaaaaaaaaaaaaaaaaaaaaaaaaaaaaa

SEQ ID NO: 402938 - DNA, 1000 bp, Homo Sapiens; identical to SEQ ID NO: 118256

SEQ ID NO: 402939 - DNA, 802 bp, Homo Sapiens
gcggtttgctaagtggtcggttcctggagctgcggtcttctgctagcctgatccgcagcttcagcctccgccgcctcctcagccctcggcgccgccgcctgacccgcaggccgccgcgggccgcagagcccatgagggcgcgggcaccgccgccgcctccgcggcgtcgccgtcgtcccggagcgccccgagctggcgcgggcatggccgcggcatgagcgtggagccgccgccggagctggaggagaaggcggcgtcggagcccgaggcgggagccatgccggagaagcgcgcgggcgcgcaggccgcggggagcacctggctacaaggctttggcccaccaagtgtgtaccatgctgctattgtcatcttccttgaattctttgcgtggggccttttgacaactccaatgttgactgttctacatgaaacattttctcaacacacattcctcatgaatggtctcattcaaggtgtaaagggcctgctctcttttttgagtgccccactcattggtgccctgtctgatgtgtgggggaggaagccctttctcctcggcactgtattctttacctgcttcccaatcccactgatgaggatcagcccatgccgggtgtggtggcgtgcacctgtagtcccagctacctgtggcaggagaatggcttgaacccaggaagcggaggttgcagtgagccaagatcacaccattgcactccagcctaggcatggtgagactccatctcaaaaaaaaaaaaaaattaaattgtattgattttctcttttcaaaaaaaaaaaaaaaaaa

SEQ ID NO: 402940 - DNA, 1000 bp, Homo Sapiens; identical to SEQ ID NO: 118257

SEQ ID NO: 402941 - DNA, 1000 bp, Homo Sapiens; identical to SEQ ID NO: 291474

SEQ ID NO: 402942 - DNA, 1000 bp, Homo Sapiens
aacctctactacatgttcgtggtggagccggagcgcatgctcactgccaccgagagccgcctggactacccggaccacgcccgctcggcctccgactacaggccccgcccctggggctgagcctctccgccctcgccctcggagtagggggtagcggcttgggtctgacacatctttgaaccttgtggccaggcctggacttcgcccccaggcctaggaccgcggtgggtggaaccctgctactgccccaacagggactccaatcaatcggagttctccccttgccggagctgcccttcacctttggggcccgagacagtcataagggatggacttagttttcttgcagggaaaaaggtggacagccgtgtttcttaaggatgctgagggcatggggccaggaccaggggagaggcacagctccttcctgagcagcctctcaccactgccacaaggctccctaatgctggtctctgctccactccccggcttcccgtgaggcaggaggcagagccacagccaaggccctgaccacttctgtgccagttgtctaagcagagcgcctcagggacgctggaaatgccttaaggatagaggctgggcatcacatcaaatgggactgtggtgtttggtgaaaaccttcctgaggatctggattcaggaccctccatgactggcctatttactgtttacagctggccagtgcagagctgctgctcttttacctttttaggcccctgtaacttcccacctttaaactgcccagaaggcatgcctctcccacaggaagaggggagcagacagggaaatctgcctaccaagaggggtgtgtgtgtctttgtgcccacacgtggtggctggggagtgcctggatggtgcggtggttgatgttaacctagtgtgtgtgtgtgtgtgtgtgtgtgtgtgtgtaacaataaattactaccagtcaaaaaaaaaaaaaaaaaaaaaaaaaaaaaaaaaaaaaaaaaaaaaaaaa

SEQ ID NO: 402943 - DNA, 926 bp, Homo Sapiens; identical to SEQ ID NO: 118258

SEQ ID NO: 402944 - DNA, 1000 bp, Homo Sapiens; identical to SEQ ID NO: 118259

SEQ ID NO: 402945 - DNA, 1000 bp, Homo Sapiens; identical to SEQ ID NO: 118260

SEQ ID NO: 402946 - DNA, 1000 bp, Homo Sapiens; identical to SEQ ID NO: 118262

SEQ ID NO: 402947 - DNA, 1000 bp, Homo Sapiens
accatctctaagattgctgccgcatttgcttgttaaactgaaagcatgtttcttgcaaaggctctattggaaggagcagatcgaggtcttggagaagctcttggaggcctctttggaggaggtggtcagagaagagaaggaggaggaagaaatattggagggatagttggaggaattgtgaattttatcagtgaggctgcagcagctcagtatactccagaaccgcctcccactcagcagcatttcaccagtgtggaggcctcagaaagtgaggaagttaggcgatttcggcaacaatttacacagctggctggaccagacatggaggtgggtgccactgatctgatgaatattctcaacaaagtcctttctaagcacaaagatcttaagactgacggttttagtcttgacacctgccggagcattgtgtctgtcatggacagtgacacgactggtaagctgggctttgaagaatttaagtatctgtggaacaacatcaagaaatggcagtgtgtttataagcagtatgacagggaccattctgggtctctgggaagttctcagctgcggggagctctgcaggccgcaggcttccagctaaatgaacaactttaccaaatgattgtccgccggtatgctaatgaagatggagatatggattttaacaatttcatcagctgcttggtccgcctggatgccatgtttcgtgccttcaagtctctggatagagatagagatggcctgattcaagtgtctatcaaagaatggctgcagttgaccatgtattcctgaagtgggaactgagaagtcaagatcctccctggaggacaggactgaaaaccttgccaagctgtacacagttgctgataccctgtgcaacagctctcatttcctggcaagctctttcacaaccctacatatttctgatcatgtgctgccttttactgctgaattaaaacagatatttcataaaaaaaaaaaaaaaaaaaaaaaaaaaaaa

SEQ ID NO: 402948 - DNA, 1000 bp, Homo Sapiens; identical to SEQ ID NO: 291478

SEQ ID NO: 402949 - DNA, 1000 bp, Homo Sapiens; identical to SEQ ID NO: 223622

SEQ ID NO: 402950 - DNA, 1000 bp, Homo Sapiens; identical to SEQ ID NO: 223623

SEQ ID NO: 402951 - DNA, 1000 bp, Homo Sapiens
caagagaaaatgcaatgtgaggtaaaagatgaaaaagatgacatgaaaatggagactgatattaagagaaacaaaaagactcttctagaccagcatggacagtacccaatatggatgaaccaaaggcaaagaaaaaggctgaaggcaaagcgagagaaaagaaaggggaaaagcaaagcaaaagcagtgaaagtggcaaagggtttggcctggtagactcttaaaaccttggaaaatgccacatgggatagatgacggattagaatgtatacacatgtatactttgatttcaactgccaccaaatgaaaaccatttgttttcctattttaacttggccttttttcttcaattcaaacccagcataactcctcaagtttgttttgggaacttgaataaaatattttctttgatacatccaagctctactgatactttaactggatgctacccaatatccagttataatcaggcctcaacgttctgtcaggtattaatatggttagaattgttcttacaactggtaattatagtcaatagagataaaacagatgatgtactgacaaatttttgtgaacttagattttaaagaaagttgttgtataatcatatcatttaaaaatactacattagggctgggcatggtggctcacacctgtaatcccagcactttgggaggccgaggcaggtggatcacgaggtcagttcgagactagcctggctaatacagtgaaaccccatctctactaaaaatacaaaattagccgggcatgggggcgcgcacctgtagttccagctactcgggaggctgaggcaggataattgcttgaacccaggagatggaggttgcagtgagccaagattgccccactgcactccaccctgggcaatggagtaggactctgtctcaaaaaaaaaaaaaataatattaatggatcttataaagtacttgtgtggagctttgattccacagaataaaagatattttgtgtgtagatcttc

SEQ ID NO: 402952 - DNA, 1000 bp, Homo Sapiens
gctatggaagaggctccggaaagttttggccaagtagtgatgctttatattaactgcaaagtgaatggacatcctgtgaaagcctttgttgactcaggtgcccagatgactatcatgagccaagcttgtgcagaaaggtgtaacataatgagactggtggaccgtcggtgggcagggattgccaaaggagtgggcacccagaagattattggaagggtacatctagctcaggttcagattgaaggagattttttgccatgttccttctctatacttgaggaacagcccatggacatgcttctgggactggacatgcttaaacggcaccagtgttccatcgacctgaagaaaaatgtactcgtgatcggcaccacaggctcccagaccacctttcttcctgagggagagctaccagagtgtgcccggttggcatatggggctggaagagaggatgtacggccagaggagattgcagaccaagaattagcagaagcccttcaaaaatcagcagaggatgcagagcgtcagaagccatgatgcatgtagtgtgtgtgtactgcagctggagtgggccccagaccagagaaaagtggtaaagaatctacctcactgggaatgtcatcattaccaacttcagatgggtttaaccatcccgcccgttcttcaggacagagtcctgatgttggtaatcctatgagtcttgctcgctctgtctctgcttcagtctgccctatcaagcccagtgactcagatcgcattgaacctaaagctgtgaaggctttgaaggcttcagctgaattccagctaaactctgaaaagaaagaacatctttctttacaagatctttctgatcatgcttcctcagcagaccatgctccaacagaccagagtccagctatgcctatgcagaattcatccgaagaaataactgttgcaggtaatctggagaaatctgctgaaagaagcacccagggcctcaaatttcatctccatacaagac

SEQ ID NO: 402953 - DNA, 1000 bp, Homo Sapiens; identical to SEQ ID NO: 118264

SEQ ID NO: 402954 - DNA, 1000 bp, Homo Sapiens; identical to SEQ ID NO: 223624

SEQ ID NO: 402955 - DNA, 1000 bp, Homo Sapiens
ggagggtgaaagaaggatatgtgccccaggaggaggtcccagtatatgaaaacaagtatgtgaagtttttcaagagtaaaccagagttgcccccagggctaagccctgaggccactgctcctgtcaccccatccaggcctgaaggtggtgaaccaggcctctccaagacagccaaacgtaacctgaagcgaaaggagaagaggcggcagcagcaagagaaaggagaggcagaggccttgagcaggactcttgataaggtgtccctggaagagacagcccaactccccagtgctccacagggctctcgggcagcccccacagctgcatctgaccagcctgactcagctgccaccactgagaaagccaagaagataaagaacctaaagaagaaactccggcaggtggaagagctgcagcagcggatccaggctggggaagtcagccagcccagcaaagagcagctagaaaagctagcaaggaggagggcgctagaagaggagttagaggacttggagttaggcctctgaggcctttggggaatagggaatggactgcagaacaaaccgtggggctctctggggtctgggggaatacgggcaacagcagtcaggaggggtaccccccatactggcttccacctcctgcggcccagctctgtcctccagagcctagcgtctccctcaatccttcccttttcttcccaacttctactttttggactttccccctcccattcccagtgttcaaaatctcagtgactaccccaggtacctttgctgctgatttgggtgtcttgtttaaaagaaaatcaggtgggtgggaatctcttggagaactgaggctgagggtagagggagtatgcccaagtcttggagtcttggttcctgttcgcggtgtttatgggttatttccctctccatccctcattttttttttttttttaaaaaaagcaaaaatgagaataaacacaagtagacatgtcaaaaaaaaaaaaaaaaaa

SEQ ID NO: 402956 - DNA, 1000 bp, Homo Sapiens; identical to SEQ ID NO: 291483

SEQ ID NO: 402957 - DNA, 1000 bp, Homo Sapiens
gcacctgtacgcgcggcagctgacgctggagcagctgcacgccgtggagatcagcgcggtgcactcgcgcgaccacggcctggaggtgctgggcctcgtgcgggtcccgctgtacacccagaaggaccgagtcggaggcttccccaacttcctgagcaacgccttcgtgagcacggctaagtgccagctcctctttgccctcaaggtgctcaacatgatgcccgaggagaagctggttgaggccctggctgcagccaccgagaagcagaagaaggccctggagaagttgctcccggcctcctcttgagggctgcctgagctggtggcaccctcccctgggccggaagactgggaattcctgctaagtgtggcttctagagtgtttgtgtgtaccccgcttctgactgcctagggcgagtgggcatcctgtcatcatctccactgtcccaagcagtcactaggtggcggccgggccagctggaacccagcccatcctctcaggcagagcagggtggtccgggcacactgggcctgcctctccagcctcaggatgctcttgtttattctgggctcagaccctcctcttgtacgtctcatcacagctggtagagacccaggagtgcctgattgtcccacaggggtggcgcacagctctgggaccactcagaagatgggatgtgtgggtggaggatgccttgtctcggtcagctcattcctgcctccttcctgagccagttcagggcctgggggagagccagcttggggtaggaagttaataatactgttaatttgggttgttgttggatttactttgctagattttctctttcaccacgtgtgaactgtgggtgaggtttcaaagtagcttcaccccacgtggcttggttcccagggacagtcagggcctcgggggcccagctatgtacaacgaagctgtcgaaggagaagacaataaagtcgctccgcagctgcaaaaaaaaaaaaaaaaaaaaaaaaaaaa

SEQ ID NO: 402958 - DNA, 1000 bp, Homo Sapiens; identical to SEQ ID NO: 291485

SEQ ID NO: 402959 - DNA, 1000 bp, Homo Sapiens; identical to SEQ ID NO: 118266

SEQ ID NO: 402960 - DNA, 1000 bp, Homo Sapiens; identical to SEQ ID NO: 291487

SEQ ID NO: 402961 - DNA, 1000 bp, Homo Sapiens; identical to SEQ ID NO: 118267

SEQ ID NO: 402962 - DNA, 1000 bp, Homo Sapiens; identical to SEQ ID NO: 291488

SEQ ID NO: 402963 - DNA, 1000 bp, Homo Sapiens; identical to SEQ ID NO: 118268

SEQ ID NO: 402964 - DNA, 1000 bp, Homo Sapiens; identical to SEQ ID NO: 291490

SEQ ID NO: 402965 - DNA, 1000 bp, Homo Sapiens
ttccgggatggcctgcagctggccgcagacatagccagcctccagaaccgcattgactggggtcgaagccagctccggggactccaagagaaactcaagcagctggagcctggggctgcctgacatgcgcgcaaagaggcagggcagcgagcacagctgttctccgacatggctacgtgatctcaggccttcttccttcacaattagctcttgcccctaccccacgccagctaatgccccttctgtgtccctgctctgcatgtttccattttccttaggtgtgaagtttgaagaggcaaacagtaattttgaaagccactactttgaaaccattctaaggcctgagttcccataggacacactcacataggcaggtgcacgttagtcaacaattggaactgcctcttggatcactcagctgtgctttcatggctggatgatggaacactgtgcgaagagagatgggggccaggaagtagcgcttcatgcttagtacatcctccaaattgtctttgctggaggagaaaaccgtactcagccaaaagatcaggacaatatgacttgagtccacaaggacacaaacacctgagtagctgggcagcccttggcagggtctaagccaggaagtaaaaatgatctggcctagatatttaagggaactctaggaagaggcctaggtttttaaaatcctgtctctttgtcttaccataagaggctgggcctctcttcatttttttgaagggccacttgtgttttctgttctgggaacttcattcatttttctactgggttgttgatctttgcagtaatttctaggagctgtttatgtttggaggtaattggtcctttgtccatatatatgagatgtaagtcttattttccagtttatctttttgcttattttttttgactttttattgtaaaataaaacatcaaactgcacagaacagttgaatagcttaatgaataactacagtaaaagctatggtaaccactaccc

SEQ ID NO: 402966 - DNA, 1000 bp, Homo Sapiens; identical to SEQ ID NO: 291491

SEQ ID NO: 402967 - DNA, 1000 bp, Homo Sapiens; identical to SEQ ID NO: 291493

SEQ ID NO: 402968 - DNA, 1000 bp, Homo Sapiens; identical to SEQ ID NO: 291495

SEQ ID NO: 402969 - DNA, 1000 bp, Homo Sapiens; identical to SEQ ID NO: 118269

SEQ ID NO: 402970 - DNA, 1000 bp, Homo Sapiens; identical to SEQ ID NO: 118270

SEQ ID NO: 402971 - DNA, 1000 bp, Homo Sapiens; identical to SEQ ID NO: 291498

SEQ ID NO: 402972 - DNA, 1000 bp, Homo Sapiens
ttttctgaaaaacccttaatcatgtgaacatttgaactagttataggataaaataaactcagaataaggatttaaaataagtaaccaagtggctgtgactttttcctcttgttttatcaacgttttggagactacacaatgaaaacacatctgttggggtgatcagacccaacacccggccatgggggctacaaagtccagccgagtcaaaggaaagagaaaagacaagtcaagagagaaagtgggaccagggggccaatgctagtatggaggctgtgaagtccccaagctctggaagcccacactatttgttggtgatcaaacaaagaaacaggtgatgaggatgtgggagttgaaagaaagtggtgtatcaagcgaatgaactacagctgtgagggtttagcattttctttgaaacatatggctacttgagataatgggagtgctagaagcaaggagccagcaagtctggacacattacaaaggccacaaggggttttatcctggaccccggacatgttccaagccctgcctcaacttttctcccaacactaagctttcctcccaacacacatccatctcgtgtgttcatgtcttaacttttgcttcacttcacagtcaggcctctccgagtattttttacacatatcctggagtctacctatgtcactgatagcagatatttttcttcaacatatattatcaatgttttaatacttttcttcaattttagtaactggtaaaatacatgtaagatgtaccatcttaaccatttttaagtgtacagatcagttgtattaagtagattcatattcttgtgcaaccatcatcaccatccggctgcaaaactctttcatcttgcaaaactgaaactctacacccattaaaaaataactcgccatttctctctctccccagcccctggcaaccaccattctttctgtctctgtgatttagattactctgtaagtatgttgtataaatagactcatacaatgtt

SEQ ID NO: 402973 - DNA, 1000 bp, Homo Sapiens; identical to SEQ ID NO: 291500

SEQ ID NO: 402974 - DNA, 1000 bp, Homo Sapiens; identical to SEQ ID NO: 291501

SEQ ID NO: 402975 - DNA, 1000 bp, Homo Sapiens; identical to SEQ ID NO: 118271

SEQ ID NO: 402976 - DNA, 1000 bp, Homo Sapiens
tccagctgttcttcgtgctgtatggcatcctggccctggcctttctgtcaggctactacgtgaccctcgctgcccagatcctggctgtactgctgccccctgtcatgctgctcattgatggcaatgttgcttactggcacaacacgcggcgtgttgagttctggaaccagatgaagctccttggagagagtgtgggcatcttcggaactgctgtcatcctggccactgatggctgagttttatggcaagaggctgagatgggcacagggagccactgagggtcaccctgccttcctccttgctggcccagctgctgtttatttatgctttttggtctgtttgtttgatcttttgcttttttaaaattgttttttgcagttaagaggcagctcatttgtccaaatttctgggctcagcgcttgggagggcaggagccctggcactaatgctgtacaggtttttttcctgttaggagagctgaggccagctgcccactgagtctcctgtccctgagaagggagtatggcagggctgggatgcggctactgagagtgggagagtgggagacagaggaaggaagatggagattggaagtgagcaaatgtgaaaaattcctctttgaacctggcagatgcagctaggctctgcagtgctgtttggagactgtgagagggagtgtgtgtgttgacacatgtggatcaggcccaggaagggcacaggggctgagcactacagaagtcacatgggttctcagggtatgccaggggcagaaacagtaccggctctctgtcactcaccttgagagtagagcagaccctgttctgctctgggctgtgaaggggtggagcaggcagtggccagctttgcccttcctgctgtctctgtttctagctccatggttggcctggtgggggtggagttccctcccaaacaccagaccacacagtcctccaaaaataaacattttatatagacaaaaaaaaaaaaaaaaaaaaaaaaa

SEQ ID NO: 402977 - DNA, 1000 bp, Homo Sapiens; identical to SEQ ID NO: 118273

SEQ ID NO: 402978 - DNA, 1000 bp, Homo Sapiens; identical to SEQ ID NO: 291504

SEQ ID NO: 402979 - DNA, 1000 bp, Homo Sapiens; identical to SEQ ID NO: 223626

SEQ ID NO: 402980 - DNA, 1000 bp, Homo Sapiens; identical to SEQ ID NO: 118274

SEQ ID NO: 402981 - DNA, 1000 bp, Homo Sapiens
aaaagtttcaggtactcttgacactcctgagaagactgtggatagccagggccccacaccagtttgtacaccaacatttttggagaggcgaaaatctcaagtggctgaactgaatgatgatgataaagatgatgaaatagttttcaaacagcccatatcctgtgtaaaagaagaaatacaagagactcaaacacctacacattcacggaaaaaaagacgaagaagcagcaatcagtgattttcaatgtattatatttcttttgaaaaatataatatttttatgagagtggactttgtatttcactaggtacaatggaatacaacctttgacaagattttcagaggaaaaatacactgtttggtcaagttaaggaaagcagtgtgtaattttggattgcctgcccttggctgaaatacaggggtgcataccatcttgcagtggcttggctgacattgcctctttgtcctggcctctagttttcttttgatatttcatagctctccttagtttactctgcctggatagaaagttgaccactaactgcaggtttaagtactaaactgcagccttttctgtcgccagcaattaaagaccaccaatcttgtttgtccatctacatggtttgtcggggacatttaactcatggaggtgctttagatttcaacatcagatggttgaagctggaagtttaattatatgtagagtgagaaggcagttccagttttagcacagatttgtttatgtgttcagattttaatagagattcaaaaatgactcatttttaccaataatgttaaattagttttggttgtgctagcatgaattaataaccaccattttataccagtatcatcagtgaagaattgtatttcaagattcaaacaataaccagcaattaaacttttttctacaatgtatttgtttgcgagtaggacttgggagtcattggaaaaaaaaaataataaattttccccttcattaacaaaaaaaaaaaaaaaa

SEQ ID NO: 402982 - DNA, 1000 bp, Homo Sapiens; identical to SEQ ID NO: 291508

SEQ ID NO: 402983 - DNA, 1000 bp, Homo Sapiens
cttcttcaaaggtataggctttgtaatgaattagattttctgccaataattgatatacaatttatattctttattgtgcctgtgtgttaccatgctaagaatgtctttgtttaaagggaattaatctttttatgatgtattaatctgtgttttcaattgttttccaagtacagttcaaataacttgcatatttactatacaaaatggttgacaagtgttctttttgcaaagacttgaatacattggcagaggtgctaatcacatcttccctaaggcacctggaagaattatttgaggaaaaaatgagttttcacattgttttataggaaattaaatttgtccaaagatttggagactatttttaaaacataaatacataaaatttcattatttcctgctatcttgtttgctggcagaagtgaatgtttggtgaggttattttgggataaattacaaaagaaaaaaaattagacactgcattaatttcttgttcttttggaatatcttagtaactgaggatcattttctaacaatgtggttgacataccttcagttgctttccacatctaaaagagttatctttcatatatgtacaagttattggtagtcttatttttgggctgtttgttgacttatgccccatttgttttacttgttctttaatataaacccttccattttttaacaattcctaacacttgatatcttaatatcagtcactaacattagtaacttcttgtatgttatattatggcagatctctttacgttttttctcacatctatctgctagtccaggaatttgttactaaatagattttcttggatatttggttgcctcaaagtgcttacatttgttaacagattgtaaaccacatttatttacattgatgaatgggctgttgaataatcattgtaaagcactttgtatatataaggtgctatataagtgtgaaatatcattcatttataaatgaaatgccttctaactttccatattg

SEQ ID NO: 402984 - DNA, 1000 bp, Homo Sapiens; identical to SEQ ID NO: 118278

SEQ ID NO: 402985 - DNA, 1000 bp, Homo Sapiens; identical to SEQ ID NO: 223629

SEQ ID NO: 402986 - DNA, 1000 bp, Homo Sapiens
cgcagccacaccggcatctgcccagacggccaagcgcgagatctacctgtgagccccctactggccggccggcccccctcccccagccgccggccagctcccaaatggcccattccagggcctcactctccaccccttcagcgtggacttcctggccagggccccaagtgggggtatcactgacctcatgaccacgctggcccttctcccatgcagggtccaggtcctctcccctcatttccatctcccagcccccaggggccccttcccctttatggggcttcccccatctgatgcccaagagggctcctctgcaatgactgggctccttcccttgacttccagggagcaccccctcgatttgggcagatggtggagtcaagggtgggcagcgtacttctaactcattgtttccctcatggccgaccagggcggggatagcatgcccaattttagccctgaagcagggctgaactggggagcccctttccctgggagctcccagaggaaactcttgaccaccagtggctccctgaagggcttttgttaccaaaggtggggtagggacgggggtgggagtggagcggaggccttgttttcccgtgctgctcctggactggcccacctgcctgccacatgcccacgcctagtcccatctgggcccccattccctgctggtcatgcagtgtctgtatataaggaccttggaatgacgtccccatttctgcctgatttgcaacttttcttgttgatgtcgtgttgtcttgggggacccctctggggggggacctgccctgtgccccctcctccctgccgcagtgccccccaacccaggcctctattgttccatgttgtaaatacccctggggccatggtgggatgggggtgcaggccagggaaacaacgggtgggtgggggtggggacgggggtaacatttgcctatcagcagagctgggcttttatttaatttttcttaaaaatacaaaaaaaaaaaaaaaa

SEQ ID NO: 402987 - DNA, 1000 bp, Homo Sapiens; identical to SEQ ID NO: 291512

SEQ ID NO: 402988 - DNA, 1000 bp, Homo Sapiens; identical to SEQ ID NO: 223630

SEQ ID NO: 402989 - DNA, 1000 bp, Homo Sapiens; identical to SEQ ID NO: 291514

SEQ ID NO: 402990 - DNA, 1000 bp, Homo Sapiens
tggcgctgctccttcgaccgtggcgacccctcctcgggcactggccgcgggcgcctcttctgcggcgacgtgggccagaacaagttcgaggaggtggacgtggtggagcgcggcggcaactatggctggcgcgcgcgcgaagggttcgagtgctacgaccgcagcctgtgcgccaacacctctctcaatgacttgctgccgattttcgcctacccgcacacggttggcaagtcggtcacagggggctacgtgtaccggggctgcgagtaccccaacctgaacggcctctacatttttggggatttcatgagcgggcgtctgatgtccctccaagagaacccagggacaggccagtggcagtacagtgagatctgcatgggccacggccagacctgtgagttcccaggcctcatcaacaactactacccgtacatcatctccttcggggaggacgaggccggggagctgtacttcatgtcgacaggggagccgagtgccacagctccacgcggagttgtctacaaaataattgacgcatccagctgtaaggccagaagcgccatgcccggctatgtcccagctccttccgtgtgcagctcattgacgtctcagccgttcattttacagtggtggaaatgagcacaaagacacgaagtcatgggcctggggcccagggccagggtggggcccaggccactggctccagagccctgccctaaccccttggctgtgtgccttcacctcaccctcttcaagcaccttccccaacccacgttgccctccaggcctctgtccagcccttcctcagctctcatcactcagacttggtaatccctgggctacacgactgactctctcccagctgctctgggagtctcagggccaagcctgtatctcttcactctgcagaggccgcccaggtgctgggaatggcacggagcagagactcaggaacacttgatgaataaatgagtgatcagctttcaaaaaaaaaaaaaaa

SEQ ID NO: 402991 - DNA, 1000 bp, Homo Sapiens; identical to SEQ ID NO: 291515

SEQ ID NO: 402992 - DNA, 1000 bp, Homo Sapiens
ttaaacgcgagatgacatatatagagtttaattttacggtccctccgcaggggagcggcctccagccttattctccaccgctcggatctgtgtggtttcagtctgttcttggtgtggtcctcatacacagagctccctgtctagtttcttttctttttcttttttctttttctcgtcacacaggtaaccttaaagacagacccctctaaagaacgctttgtaaatacatgtgaggtatagccaccactgttttccttgctgttatttttccaagtcttggggagaaaacatcctcctctgatggccaaagccctggaatcaagggtttccacgtaccctgcctaatacccgacgtagctcttgatgcaccgtccttgtgctgtggctggcggtgtctcagcctgaaacataaaccccacatgccccaggagcgatgtgctccctgaaacagacaaccacacgctgttggggagagaaggatggagataggatggagataggatggagatgtggctcttctcatctttgaagccagcagggcatcccggagcaggaggctggccgggctccccaagcgaaggcgttggtgtctgtcattaggtgtgtgttagggtgcagcaccggccgtcacaggatgctgataagcgcgctgagaggtggatgaaacaccaaagtctgtttccccgtccgcagtgggtgttgcctctttgtgtgtgtcccgatgttcctgcctgtgagtcggccttactccgtttccttagcgcccatgacacgccaagtcccgtttcgcactcggcttctcacccgcccagctcggctagggagggggagtttttagcacctaatatgcttcctgccattgcgcaatctgagcctgagcaactggaaacccccatttctcattagtgcaatgtcatatctgatcccaggaagcctggaaaataaaagacgatgcattataacttgcggaagtacaaaaaaaaaaaaaaaaaaaaaaaaa

SEQ ID NO: 402993 - DNA, 1000 bp, Homo Sapiens; identical to SEQ ID NO: 118280

SEQ ID NO: 402994 - DNA, 1000 bp, Homo Sapiens; identical to SEQ ID NO: 118281

SEQ ID NO: 402995 - DNA, 1000 bp, Homo Sapiens; identical to SEQ ID NO: 291519

SEQ ID NO: 402996 - DNA, 1000 bp, Homo Sapiens; identical to SEQ ID NO: 291520

SEQ ID NO: 402997 - DNA, 1000 bp, Homo Sapiens; identical to SEQ ID NO: 291521

SEQ ID NO: 402998 - DNA, 1000 bp, Homo Sapiens; identical to SEQ ID NO: 118282

SEQ ID NO: 402999 - DNA, 1000 bp, Homo Sapiens; identical to SEQ ID NO: 223634

SEQ ID NO: 403000 - DNA, 1000 bp, Homo Sapiens; identical to SEQ ID NO: 118283

SEQ ID NO: 403001 - DNA, 1000 bp, Homo Sapiens; identical to SEQ ID NO: 223635

SEQ ID NO: 403002 - DNA, 1000 bp, Homo Sapiens; identical to SEQ ID NO: 291525

SEQ ID NO: 403003 - DNA, 1000 bp, Homo Sapiens; identical to SEQ ID NO: 291526

SEQ ID NO: 403004 - DNA, 1000 bp, Homo Sapiens; identical to SEQ ID NO: 223636

SEQ ID NO: 403005 - DNA, 1000 bp, Homo Sapiens; identical to SEQ ID NO: 291528

SEQ ID NO: 403006 - DNA, 1000 bp, Homo Sapiens; identical to SEQ ID NO: 291529

SEQ ID NO: 403007 - DNA, 1000 bp, Homo Sapiens; identical to SEQ ID NO: 291530

SEQ ID NO: 403008 - DNA, 1000 bp, Homo Sapiens; identical to SEQ ID NO: 223637

SEQ ID NO: 403009 - DNA, 1000 bp, Homo Sapiens; identical to SEQ ID NO: 291532

SEQ ID NO: 403010 - DNA, 1000 bp, Homo Sapiens; identical to SEQ ID NO: 118284

SEQ ID NO: 403011 - DNA, 1000 bp, Homo Sapiens
ctactattatcatgcaaaaatgctttgttggcacctcagattaatcatataatagctatagtctcttcagcatttgtttaaattttagaaaacctgtataaattactggtgcataacttaaagattattctgcctttggctaattgagtaattcccctccagcactagagaccgctcagtgctcttactagatgaactcagtaacgccttgagctgggttgattgaggatgtgtgaaaagctcacagagcccgatgcctgctgctatttcacggcaatgagcctttttctttctacactgaagattttcttcttatttaatgtggtttattttgggctcagaaataattgctctgttgaaaataatcctttgtcagaaaagaaggtagctaccacatcattttgaaaggaccatgagcaactataagcaaagccataagaagtggtttgatcgatatattaggggtagctcttgattttgttaacattaagataaggtgactttttccccctgcttttaggattaaaatcaaagatacttctatatttttatcactatagatcatagttattatacaatgtagtgagtcctgcatgggtactcgatgtgtaatgaaacctgaaataataagataataagaaaagcaataattttctaaagctgtgctgtcggtgatacagagacgatactcaaattataataaaactcttcattttgtgaattatagaagctactttttataaagccatatttttttagggaaactaaggagtgacatagaactgatgaatgagcaaaagtaagttttgctggatttttgtagaactctggacgttgaggattcattatgctgtggttaactttaaatatttttgaattccaaatatctgaattaatgagccttgtgtttacaaatatgtgccattgtgcaacatcggtggattttctaaaaataatgtaaatgtcttctattaaatgttgagtgcaataaaatccagaa

SEQ ID NO: 403012 - DNA, 1000 bp, Homo Sapiens
ttggcacctcagattaatcatataatagctatagtctcttcagcatttgtttaaattttagaaaacctgtataaattactggtgcataacttaaagattattctgcctttggctaattgagtaattcccctccagcactagagaccgctcagtgctcttactagatgaactcagtaacgccttgagctgggttgattgaggatgtgtgaaaagctcacagagcccgatgcctgctgctatttcacggcaatgagcctttttctttctacactgaagattttcttcttatttaatgtggtttattttgggctcagaaataattgctctgttgaaaataatcctttgtcagaaaagaaggtagctaccacatcattttgaaaggaccatgagcaactataagcaaagccataagaagtggtttgatcgatatattaggggtagctcttgattttgttaacattaagataaggtgactttttccccctgcttttaggattaaaatcaaagatacttctatatttttatcactatagatcatagttattatacaatgtagtgagtcctgcatgggtactcgatgtgtaatgaaacctgaaataataagataataagaaaagcaataattttctaaagctgtgctgtcggtgatacagagatgatactcaaattataataaaactcttcattttgtgaattatagaagctactttttataaagccatatttttttagggaaactaaggagtgacatagaactgatgaatgagtaaaagtaagttttgctggatttttgtagaactctggacgttgaggattcattatgctgtggttaactttaaatatttttgaattccaaatatctgaattaatgagccttgtctttacaaatatgtgccattgtgcaacatcggtggattttctaaaaataatgtaaatgtcttctattaaatgttgagtgcaataaaatacagaagaattctctaaaaaaaaaaaaaaaaaa

SEQ ID NO: 403013 - DNA, 1000 bp, Homo Sapiens; identical to SEQ ID NO: 223640

SEQ ID NO: 403014 - DNA, 1000 bp, Homo Sapiens; identical to SEQ ID NO: 291537

SEQ ID NO: 403015 - DNA, 604 bp, Homo Sapiens
gcagacgcaggggtcggcgccgggtgagagcgtgcggccggattcaccacaacatggcaaatctttttataaggaaaatggtgaaccctctgctctatctcagtcgtcacacggtgaagcctcgagccctctccacatttctatttggatccattcgaggtgcagcccccgtggctgtggaacccggggcagcagtgcgctcacttctctcacccggcctcctgccccatctgctgcctgcgctggggttcaaaaacaagactgtccttaagaagcgctgcaaggactgttacctggtgaagaggcggggtcggtggtacgtctactgtaaaacccatccgaggcacaagcagagacagatgtagaccctttccctccagagtcacgcacatactcgtcatcgcatcacttgggagaatggttgtatcttatggaaggaattatcacatcaaggagtcaggggaaagtgactggaagcaaacgccctaaaagttacccatcacgtttcagtgtaaatgagtaactatagaagacattgcgttatcttatttccaaaacgttccaactaaaaaacattttcctattaaaatagaccttccgaata

SEQ ID NO: 403016 - DNA, 849 bp, Homo Sapiens; identical to SEQ ID NO: 56229

SEQ ID NO: 403017 - DNA, 1000 bp, Homo Sapiens; identical to SEQ ID NO: 118287

SEQ ID NO: 403018 - DNA, 1000 bp, Homo Sapiens; identical to SEQ ID NO: 223643

SEQ ID NO: 403019 - DNA, 538 bp, Homo Sapiens; identical to SEQ ID NO: 223644

SEQ ID NO: 403020 - DNA, 1000 bp, Homo Sapiens
cagatgaaggacatggtaacggaattattcgaccctctggtacagggggaagtgcagcaccgggtggcggcggctccagacgaggacttggacggtgatgatgaagatgatgcagaagatgaaaataacattgataacagaactaacttcgatggaccatctgcaaaacggccaaaaacaccgtcttaacaatagccttcatgacatttaaaagatggctgttgtatccttattgtcacactaggacatttaaggaagacttatgctctaatttggaaaaagcatttgtgttgttctcctgggacaattttgtcaaagagaaaactggtttttctgtttctagcaaagatagtaaaggcttagaaataaaatctgttttcttgagaaataaatttcagaccctggaaggaaaatagaacacttcataatgtataaaatcctctaagttggcaactgaatttttatcattgttttctatttttaaaataatcattgatttgtgtgatgtctacatcttttaacttctggttctgttataaagagtacatgtcacggttcataggcagtaacatttcagagaactgacatgaacaagtagtgaaaattgggcattaaatataaaaataacagttcttcataaacagaaggaaaataaggaaatagaaataccaacgagaaaggagagtccttgaaagagacccaaggaaaccctgaattcatacccacgtcaaatatgcacatatcctgagatgatgccactttgatgaatgtgcattagtctgatttatcatgtaccttaagagagccagatggggtatgtttttgtgctgtgatatggtatttatacaggtacaaatataaggccttaagtaaacaatctgcattgattacaatttggatatttcctctcctcctgtagccatactttgattttgctttaaaaagattattgaatccttttaaaaatatatattcctaaaatatgaaaaaaaaaaaaaaa

SEQ ID NO: 403021 - DNA, 1000 bp, Homo Sapiens
cattgagaagagtgggtaccaggccctgccctgggtgcgttatatcacgcagaatggagattaccagctccggacccagtgaggggctgtcgcagccaacaccccggcctcggggctcctggtggcagcaccaggggacacacctgccaaacccaccagatggaggggccctccctggtctctggccaccctcccagcctctgcccagggacccctgccttccccaggccatctgctctgccgtcgacactcgtctcagaagcccctttcccagaagaggctggtcttcaagaagtctcgtttctttgcccctgaagtcagtttcaggggaaggatgtgaaatttttccgtgtagaggttacagccttttatgctgttgagctcccaggtaccaaaaagcttggccaacgcttgccagccagccagctgcaggtggcatctgccacgaaggaagcgccagcctcgccaggccagcaggggcgtcgttttgttgccattttgttgaacgttatgggtttatgggtgttcctggaacttgtctttgtgcattcgttgctgtttgtgttaccctcactgtccccatgtcccacccacgtcctacggcactcaggaagcacttggtgaggacgagccctcacccttcttgtcttccttcccagcagcgcccgcagcgggccatttacacgtcgaggctggcacctggcgcgctcgggggccactgtagcgtctgcctgctccctggactcgcaggcctcgcctgtggcgccttcccagggccagcctgggtcacgagatgctgtcactcagccagatcagtattgacccaccaggggaggtggggtttggtgagagacgccagcctcagactttttcccactgagggtccagagagcggggccacgtgtcacccacgtctgcgcttggtcacccgtcctccccaccctgtgtgtgtttatgtcatagttacattaaattccattcattgaaaaaaaaaaaaaaa

SEQ ID NO: 403022 - DNA, 1000 bp, Homo Sapiens; identical to SEQ ID NO: 118289

SEQ ID NO: 403023 - DNA, 1000 bp, Homo Sapiens; identical to SEQ ID NO: 291544

SEQ ID NO: 403024 - DNA, 1000 bp, Homo Sapiens; identical to SEQ ID NO: 291545

SEQ ID NO: 403025 - DNA, 1000 bp, Homo Sapiens; identical to SEQ ID NO: 291546

SEQ ID NO: 403026 - DNA, 1000 bp, Homo Sapiens; identical to SEQ ID NO: 223645

SEQ ID NO: 403027 - DNA, 1000 bp, Homo Sapiens; identical to SEQ ID NO: 291548

SEQ ID NO: 403028 - DNA, 1000 bp, Homo Sapiens; identical to SEQ ID NO: 223646

SEQ ID NO: 403029 - DNA, 1000 bp, Homo Sapiens; identical to SEQ ID NO: 291549

SEQ ID NO: 403030 - DNA, 1000 bp, Homo Sapiens; identical to SEQ ID NO: 118290

SEQ ID NO: 403031 - DNA, 1000 bp, Homo Sapiens
ttggccgcttctccgaggaagagatttacatgctgatggagaaggacatgcggtctttagcagggcttttgggtgataagaagtacatcatggggcccaagctttccactcttgacgccactgtctttggacacttggcacaggcaatgtggaccttaccagggacaagacccgaacggctgatcaaaggtgagctgatcaaccttgccatgtactgtgagaggataaggaggaaattttggccagagtggcaccacgatgatgacaataccatctatgagtctgaggagagcagcgaaggcagcaaaacccacaccccgctgctggattttagcttttactcaaggacagagacctttgaagatgagggagcagaaaacagtttttccagaaccccagacacagattttactggacactcactctttgattcggatgtggacatggatgactatacagaccacgaacagtgcaagtgacgtccagcctcactgaccctcttccttgggacctgccactccctgggtcggtccattttcccaggtagcaatccatccgagctgggaggagatcttcgtgcttggcagagttttcacatgctaactggactatagcagccttatttctttttttgtacaaacaaaacacagaaccattcagatgactccattgaaaacaaacaggcaaaaaataatgtcagcatggttcctgaaatccatttttgttttcattagaaaactattaataatattgtgtggtagagcaggtgtaagagctggttgtcagctgatagtttttatgatgatcctcttcaaccctgaggtcttaattgtgagatggattcttgaacctccttcctccaccaggatttgaagtaatgagagatatcatcagaaaaatgttttacggtggctgcttgtactttatgtgtgtatattgtatgttgagacataagtcaaataaaatccacagatattaaacgaaaaaaaaaaaaaaaaaa

SEQ ID NO: 403032 - DNA, 1000 bp, Homo Sapiens; identical to SEQ ID NO: 291552

SEQ ID NO: 403033 - DNA, 1000 bp, Homo Sapiens
cttgctctcacctgagccccaggtgaaggggcccggaacacctgctctcacctgagcccccggtgaaggggcccggaacacttgctctcacctgagccccaggtgaaggggcccggaacacctcctctcacctgagccccaggtgaaggggcccggaacacctcctgtcacctgagccccaggtgaaggggcccgggaacacctctcacctgaacccgggggtcccatcccaggaagaagggccatctcaggacatgagtcctcaggggccctgcacattcaatctgaaggtgaccctggcctggctgaagctggaagagctgtggggactcagcctgtaaacagagcgtaaggttcacatgctggttgcttaatccgtttctggaggaagagtatgacacccacttgtgatggggtccttgtgcggtggggaccggggccggcgggctccaggccagcacacctaacccatggatgtggaacctacggccgagaaggaatgttgcatgagtcggatcccagtccattgtcagtggagggtgagggtgaccccatctgctatttttgtgctcatcctcatacaaccatttggggatgtgcctattagggctccgtaagaactcagatgcctgggaagcccagcccctcaggtgcccccacacacagccttcccttgacgcctacatttctaggcacatgtgaggcatctttcctggagccccgagccagccctgtccctccccagtgcagcatggcactcaggagatacaggctggacatggggcagtcgttctggggaggcctggcctagcagccacccacctgagccctcccggccaggcttcgtgctggggtgggccatgtgccaggacaggagggtcccggcggaaagccagccccggactcatcgtgacattgagatcccactggagggtaggggtggtaataaacttctccaaacgatcgttgtcattttagacagaaaaaaaaaaaaaaaaaa

SEQ ID NO: 403034 - DNA, 822 bp, Homo Sapiens
tcttgagctaggaaaggattactcgcgcctcgttagaatcagacatggcttcaggggatgcaggacgctcccctgagctgcctgtcaccgactaagtggagcagtgtttcttccgcagactcaactgagaagtcagcctctggggcaggcaccaggaatctgccttttcagttctgtctccggcaggctttgaggatgaaggctgcgggcattctgaccctcattggctgcctggtcacaggcgccgagtccaaaatctacactcgttgcaaactggcaaaaatattctcgagggctggcctggacaattactggggcttcagccttggaaactggatctgcatggcatattatgagagcggctacaacaccacagcccagacggtcctggatgacggcagcatcgactatggcatcttccagatcaacagcttcgcgtggtgcagacgcggaaagctgaaggagaacaaccactgccatgtcgcctgctcagccttgatcactgatgacctcacagatgcaattatctgtgccaggaaaattgttaaagagacacaaggaatgaactattggcaaggctggaagaaacattgtgagggcagagacctgtccgagtggaaaaaaggctgtgaggtttcctaaactggaactggacccaggatgctttgcagcaacgccctaggatttgcagtgaatgtccaaatgcctgtgtcatcttgtcccgtttcctcccaatattccttctcaaacttggagagggaaaattaagctatacttttaagaaaataaatatttccatttaaatgtcttcaaaaaaaaaaa

SEQ ID NO: 403035 - DNA, 1000 bp, Homo Sapiens; identical to SEQ ID NO: 291555

SEQ ID NO: 403036 - DNA, 1000 bp, Homo Sapiens
gcaaggacaagcttttcgggctcacaaagtggtgctggctgccagctccccctatttccgggatcacatgtccttgaatgagatgagtacagtctccatttcagtcatcaagaaccctactgtttttgaacagctcctttctttctgttacacagggcggatatgcctgcaactggcagatatcatcagctacctaacagctgccagttttctgcaaatgcagcatattatagacaaatgtacacagatcctggagggcattcatttcaaaattaatgtggctgaggttgaagcagaattaagtcaaacaaggacaaagcatcaagagagacctccagagtctcacagggttacaccaaatctcaaccgctcccttagcccacgacataataccccaaagggaaaccggcgaggtcaggttagtgctgtgctggatatcagagagctaagtcctcctgaggagtccaccagccctcagatcattgaaccaagttctgatgtagagagccgggagcccattcttcggatcaaccgagcaggacagtggtatgtggagacaggagtggcggaccgtgggggtcggagtgatgatgaagttagagttcttggagcagtacacatcaaaactgaaaatctggaggagtggcttgggcctgagaatcagccttctggagaagatgggagtagtgcagaggaagtaacagccatggtgattgataccacaggccatggttctgtaggacaggaaaattatactttagggtcttcaggagccaaggtggctcggccaacaagcagtgaagttgacagatttagcccctccggcagtgttgttcccttgacagagagacacagagccagaagtgagtctcctgggagaatggatgagcctaagcaacccagctcccaggtatggagttgtggatttagaactgctttggtggttggaggaattgctactgtgtatgaatagaaaataatgaaaaaaaaaaaaaaaaaa

SEQ ID NO: 403037 - DNA, 1000 bp, Homo Sapiens
ccccctctgcaaagtgcatttggagaccaggttccatgccaacaaactatgagctgtactatggcttcacaaggtttgctattgagctcaatgagttagatccagtactaaaagatctccttccaccaacagacgcccggttccggccagatcaaagatttttggaagaaggaaatttagaagctgcagcatcagagaagcaaagagtagaggaactccagagatctcggagacgatatatggaagaaaacaatcttgaacatataccaaaattttttaaaaaagttattgatgccaatcaaagagaagcctgggtttctaacgacacctactgggagcttcgaaaggaccctgggtttagcaaagtagacagccctgttctttggtagactgggaatgtagagctagccaacatatcacattctgaatgaataaataactatgcacaattatgtttcttatagctatgtgtggtttctgggtcaactgaaaacctaccatttgcttttctattcatctttataatggactttcagaagtgcattagacaaggcccctaaccactttgggatcctttctgttttgctgcaaccatattccttaaaaaaaaaaaaaaaaaaaaaaaaaaaatccacaccgtccttggaaagcagaataaaaggagcagaatataaaatccaaagtctgaccagtttgtaaagaaaaacaaatggtaactggtgcttaaagctgatcaagaaagttaacaacaacatagaaaccacacgattgttccactgtctggaagcaccatcccctatcgcaggactcctgggccacaagcagtcggtcagtgcagacttcaagtgtgtctgtttgatgtggtgtgattgtgctggccttgtcgaaaaagatgtgatgcttctcagaacctgttccatctgtatgccattgttcatgccttaagaaatgcaaagatgtacaataaatcatttttaaaaaaaaaaaaaaaaaaaaaaaa

SEQ ID NO: 403038 - DNA, 1000 bp, Homo Sapiens; identical to SEQ ID NO: 291556

SEQ ID NO: 403039 - DNA, 1000 bp, Homo Sapiens
acagagtccgactcagacagcgacggtacgggtgactccagctatgccagagtggtggggtcggacgccgtggactctgcacagtcctctgccctctgtccgtctcttgcagtggtggggtcagatgctgtggactctgggacctgcagctctgcctttgctggctgggaggtgcacacgcgaggtataggctccagactcctcaccaagatgggctatgagtttggcaagggtttgggccgacacgcggaaggccgggtggagcccatccatgctgtggtgttgcctcgagggaagtcgctggaccagtgtgtggagaccctgcagaagcagaccagggttggcaaggctggcaccaacaagccccccaggtgccggggaagaggggccaggcctgggggccgcccagctcctcggaatgtgtttgacttcctcaatgaaaagctgcaaggtcaggctcctggggccctagaagccggggcggccccagcggggaggaggagcaaggacatgtaccatgccagcaagagtgccaagcgggccctgagcctgcggctcttccagactgaggagaagatcgagcgaacccagcgggacatcaggagcatccaggaggctctcgcccgcaacgctggccggcatagcgtggcgtcagcccagctgcaggagaagctggcaggagcccagcgccagctggggcagctccgggctcaggaagccggcctgcagcaggagcagaggaaggcagacacccacaagaagatgactgagttctagagaccccacaagcactatggacgaagcgtgggaccccagcacgggctgccctcaggaagaccagtgttgcccgaggaggggccggcctgctggcctggggcgtgcggacactgctgagtggagacagagctgcggggtcccatctggacacttacttgcccacctgccagtgtcttgggcatttccttggcaaggacattaaagtgatttcatcacagtgtca

SEQ ID NO: 403040 - DNA, 1000 bp, Homo Sapiens
agagggcttcctattcaaggagatgatgacctgggtccagggcccagacctggactccaaggccggcctgcgcacttgctgccaccagaaactggaggacatgatccaggagcttcaggagaccccatcgcagacgtcagtggtctctggggcacccacacgcgcctccgtgataccctcgggcacctcctggtcggcctccggcatcttcgggaggctctcgcaggtctcagaggtgcctttgatggtggtctcacctgcggagccgcactctttagccccggagctccaggcccagcggatgctggcacccacgcgcagctgggggacccctcagctccgtctcagagtgctctccgagacgctgaagagcttctgcctggagcccgaggcccgcctgcaccctgccgggcctgctcagctgcccggagagccgccgccgctggaggagaccgactggtcgcactcgcagctgctggacttgggccccatcgacgcgctcaacttcttctgtgagcagctgcgggcgcagcagcggagttcgctccaggagaaggctgcgcacccacacccgccagtgccctacacggtggcgccggtgcccgacatggtggtgccacctccgcgggagcactggtaccaccccatcctccggctgcaggaggccaagccgcagaggtccgcgaggtccgcgatgagactgaggggccccatgccgtcccggctctgtgcgggccgcaccctggacggccccatccggacgctgaagctgccgttgccgcgtgtggagccgcagcctttccccctggactggcctatgcccccgcgcccgctgcccccgcggctcctgcagccggccctgcagcgctactttctgccagcggacgcggaccctgacacctacagctgaccggactggtggcctcagcccgcctggctctggggcctgtcattggtatttggccaaggcctgcatcgggaataaagtccagagaatttc

SEQ ID NO: 403041 - DNA, 1000 bp, Homo Sapiens; identical to SEQ ID NO: 291558

SEQ ID NO: 403042 - DNA, 1000 bp, Homo Sapiens; identical to SEQ ID NO: 291559

SEQ ID NO: 403043 - DNA, 1000 bp, Homo Sapiens; identical to SEQ ID NO: 223652

SEQ ID NO: 403044 - DNA, 1000 bp, Homo Sapiens
agggccactgcctcccacctagagcttctccgaatgacaatcagctcgtgccaggtggggaccaggatatgactcctggtgcccaggccctgggcctgctccttgccaccaaccgaaccgtgaatgtagggcccccagcctcacctctgccccaggaccaacaacaccctggtttggagctgggaggaagaagggggcctgagagagccccaggtccattctacccccagcttcactcagcactggagctggcagagacgcaaaacccagtctgcccttgggattccaaacctccctagggctcccaactgacctcaggcctctgagtcactgaatgtcaccaggagaggtgggggagggaaagtgggccagtggggagggggtcacctaggggactgcctctgtgcctctccccaggaagcatccagggcagaggaagccacatctcccggtgcccccaaccccagctgcagcctcctccccctgagcattcattctctccaccaggcctccaggtcctgagcccttcctctgtaaaagtgtcacaccacctccctcagcacttccccatcacaacaacctatgtcactgactcagatgcagggtctgctcaccccaacacatgccttccctccccagccacaccgtgcacgaagggggcacaggagaggagaggggctgtgccccaggctccccatttcccagctcctcacagaggcctggtttgctcagtcttctgaactccagggaccagccctggtgggcatggggtggggagcagggagttgcccttcccctccctcgggaagccacctaagaatgtttacatgccaaacagaatgtaacacccctccccaagcccttcccagtcactgcatggcctctgcccatcctgcacctgtccaccccaccccaacaccctggaagccactgtcaatgattagatcgggtctcggaagggaagtagccatcacaccattaaaaagcctgtggacctttt

SEQ ID NO: 403045 - DNA, 1000 bp, Homo Sapiens
tttgtggggcagtcaaaacccaaccaccctttactgcaagctaagccgcaatcagaaccggactacctcgaagttctggaaaaacaaactgcaatcagtcagctgtgaagggaaatcatttacaaccctaaggcatcagaggatgctgctccgaactgttggaaacaaggacattagcttttgtgtttgtttttgttctccctttcccagtgttaatgggggactttgaaaatgtttgggagataggatgaagtcatgattttgcttttgcaagttttcctttaaattatttctctctcgctctcctcccctcctttttttttttttttttttctttttcccttctcttcttaggaaccatcagtggacatgaatgtttctacaatgcatttcttcatagattttgtttatggttttgtttcttttttcttctttgtttttcagtgtgggagtgggaagaggagattatagtgactgaagaaagaataggcaaacttttcaaatgaaaatggatatttagtgtattttgtagaagatctccaaagatcttttgtgactacaacttcttttgtaaataatgatatatggtatttccatcgtcagttaccgagtatagccactgggtatcactactttgtgttaaagtgccttcgcactttaagtacattacttaaatgttgcttttagctttgataaattgaaaatattttaatgtgttgtatttttgaaattgaaaacactgtaaaatagattgatgtgtcagctatattaagtcaacgtacagtttgcttgagttatagaaaccagcctgtcatcaaatgattctagttctaggactttgtaggcttaactataaaatatttcctttcctctgggtttaagtgattttatttaagtcaactaaggggatttaacagtggactagaggtaataagccacctcagtcaggattaataattcattaataaaatatatttaacccaaaaaaaaaaaaaaaaaa

SEQ ID NO: 403046 - DNA, 1000 bp, Homo Sapiens; identical to SEQ ID NO: 118291

SEQ ID NO: 403047 - DNA, 1000 bp, Homo Sapiens; identical to SEQ ID NO: 118292

SEQ ID NO: 403048 - DNA, 1000 bp, Homo Sapiens; identical to SEQ ID NO: 118293

SEQ ID NO: 403049 - DNA, 1000 bp, Homo Sapiens; identical to SEQ ID NO: 291562

SEQ ID NO: 403050 - DNA, 1000 bp, Homo Sapiens
acctagtgcaaaaactgtaaaagtgtacagactcttcacagatttttatcttaattgcaagtctgccgattttgtaaatgttcttggtgtttgactgtaatgtaactatctcacctaatggttgtacatatcctttggtcctggtgctgccgagggctggccgggactgctgctctcccaagggttttattttatttctgaatctagagaacagtattgggcaggaggaaaaggcttggtgtctgcggggggtgtcttccctgcctgtggcatttgtgtgttggctttgcagctgctgtctgagtagtggccactggggtgccttcactgggccagtcaacggggggctcctgcccaggccacagagaacctgagttcccgggagctgggccctgcctgcagccagggctggggttgccagaggccctggagggaaggacagtccctgctggggaagaacagccccggggccccctggtcaccgagactcagcctctgctggagaaagccacgccctccctgctagcacagaggcctgactgacttttttgcttaacttccatgttctgggtgatggaaactgccaaacctcctgtcagtgaggactctttccgactgcccagaaagtgggggtggaggaccgaggctacagctccacacgccccggtcccccagagcatctgccccaggtacacctccccctgcgccccgcacgactgcgggagccagactgtccagggaaacagcctctctcttttctacacactcagccacaaagccccccagctcccacaccgcgtcccagctcccctcttttgtaagtatgtgaaaaggaaaaaatgcaaacgttggagtttgggctggagctcctccctccagctgcgacttttaactatgtaataatgtacagaggaagctgttggtgttctaagactctgtgtggctgtgcaatttctgtacatttgcaattagaaatattaaagatttatttagctatttt

SEQ ID NO: 403051 - DNA, 1000 bp, Homo Sapiens; identical to SEQ ID NO: 118294

SEQ ID NO: 403052 - DNA, 1000 bp, Homo Sapiens; identical to SEQ ID NO: 223654

SEQ ID NO: 403053 - DNA, 1000 bp, Homo Sapiens; identical to SEQ ID NO: 118296

SEQ ID NO: 403054 - DNA, 931 bp, Homo Sapiens
ttgctttcctctgccgcatggtcctgggccgttggcgtcggaagcctgaagcatgggcgctgagtgggagctgggggccgaggctggcggttcgctgctgctgtgcgccgcgctgctggcggcgggctgcgccctgggcctgcgcctgggccgcgggcagggggcggcggaccgcggggcgctcatctggctctgctacgacgcgctggtgcacttcgcgctggaaggcccttttgtctacttgtctttagtaggaaacgttgcaaattccgatggcttgattgcttctttatggaaagaatatggcaaagctgatgcaagatgggtttattttgatccaaccattgtgtctgtggaaattctgaccgtcgccctggatgggtctctggcattgttcctcatttatgccatagtcaaagaaaaatattaccggcatttcctgcagatcaccctgtgcgtgtgcgagctgtatggctgctggatgaccttcctcccagagtggctcaccagaagccccaacctcaacaccagcaactggctgtactgttggctttacctgtttttttttaacggtgtgtgggttctgatcccaggactgctactgtggcagtcatggctagaactcaagaaaatgcatcagaaagaaaccagttcagtgaagaagtttcagtgaactttcaaaaccataaacaccattatctaacttcatgaaccagaatgaatcaaatctttttgtttggccaaaatgtaatacattccagtctacactttgtttttgtattgttgctcctgaacaacctgtttcaaattggttttaaggcgaccagttttcgttgtattgttgttcaattaaatggtgatatagggaaaagagaacaaatttgaatttgtaataataaaatgtttaattatacaaaaaaaaaaaaaaaaa

SEQ ID NO: 403055 - DNA, 1000 bp, Homo Sapiens; identical to SEQ ID NO: 118297

SEQ ID NO: 403056 - DNA, 800 bp, Homo Sapiens
tggcgcggtgcagggctcttaagaacgaacggcttgggcgcgggtaatcagctccctttcccccactttctcacttattctaggtacttgggactgtcgtagagtttccagaccccatgtaggcgcccagtcgtggactgtcccactctgctgctctactgctcgtggtgctcccgcgcccagactggtatccggggactgtgacttgcagggtccgccatggagccagagcagatgctggagggacaaacgcaggttgcagaaaatcctcactctgagtacggtctcacagacaacgttgagagaatagtagaaaatgagaagattaatgcagaaaagtcatcaaagcagaaggtagatctccagtctttgccaactcgtgcctacctggatcagacagttgtgcctatcttattacagggacttgctgtgcttgcaaaggaaagaccaccaaatcccattgaatttctagcatcttatcttttaaaaaacaaggcacagtttgaagatcgaaactgacttaatgggaagaacagaaaaatttagttgctactgtagatttacatgattaagaggcagctttaattgccatgatcattccctctttttggatgtataagaaccttccggacaacagaacctatttctggaattgcagaagataacatatttcccttattttgatttaatcaccataaaccatacctatttaatgagtgtattctgtgcaatttttttctcagattgtctttaactttgtttttaaaatgaccttcaaaataaactgtcaaaacaccatt

SEQ ID NO: 403057 - DNA, 1000 bp, Homo Sapiens; identical to SEQ ID NO: 291572

SEQ ID NO: 403058 - DNA, 1000 bp, Homo Sapiens; identical to SEQ ID NO: 291573

SEQ ID NO: 403059 - DNA, 1000 bp, Homo Sapiens; identical to SEQ ID NO: 223656

SEQ ID NO: 403060 - DNA, 1000 bp, Homo Sapiens; identical to SEQ ID NO: 291575

SEQ ID NO: 403061 - DNA, 1000 bp, Homo Sapiens; identical to SEQ ID NO: 291576

SEQ ID NO: 403062 - DNA, 1000 bp, Homo Sapiens; identical to SEQ ID NO: 223657

SEQ ID NO: 403063 - DNA, 1000 bp, Homo Sapiens; identical to SEQ ID NO: 284225

SEQ ID NO: 403064 - DNA, 1000 bp, Homo Sapiens; identical to SEQ ID NO: 223658

SEQ ID NO: 403065 - DNA, 1000 bp, Homo Sapiens; identical to SEQ ID NO: 291578

SEQ ID NO: 403066 - DNA, 1000 bp, Homo Sapiens
gcgtgtggagaggttggagctgttccctgtggagctggagaaggactccgagggcctgggcatcagcatcatcggcatgggcgccggggcagacatgggcctggagaagctgggtatcttcgtcaagaccgtgacggagggtggtgcggcccatcgggatggcaggatccaggtgaatgatctcctggtggaggtggatggaacaagtctggtgggagtgacccagagcttcgcggcgtctgtgctccggaacaccaagggccgagtgcggtgcaggtttatgattggccgggagcggccgggagagcagagcgaagtggcccagctaattcagcagactttggaacaggagcgatggcagcgggagatgatggagcagagatacgcccagtatggggaggatgacgaggagacgggagagtatgccactgacgaggatgaggagctgagccccacgttcccgggtggtgagatggccatcgaggtgtttgagctagcggagaacgaggatgcactgtcccctgtggacatggagcccgagaagctggtgcacaagttcaaggagctccagatcaagcatgcggtcactgaggcagagatccagcagctgaaaagaaagctgcagagcctggagcaggagaaggggcgctggcgggtggagaaggcgcagttggagcagagtgtggaggagaacaaggagcgcatggagaaactggaaggctactggggtgaggcccagagcctgtgccaggctgtggacgagcacctgcgggagactcaggcgcagtaccaggccctggagcgcaagtacagcaaggccaagcgcctcatcaaggactaccagcagaaggagatcgagttcctgaaaaaggagactgcacagcgtcgggttctggaggagtcggagctggccagaaaggaggagatggacaagctcctggacaagatctcagaactggaaggaaacttgcaaacactgaggaattccaattctacttaa

SEQ ID NO: 403067 - DNA, 1000 bp, Homo Sapiens
aaataccacattcagcttctcgtcctctgagaagtcaagattctgtctttaactctattcaatcaaatactggaagaagccagggtggttggagctacagagatggtaacaaaaataccagcttgaaaacttggaataaaaatgattttaagcctcaatgtaaacgaacaaacttagtggcaaatgatggaaaaaattcttgtccagtgagttcgggagctcaacaacaaaaacaattaagaatacctgaacctcctaacttatctcgcaacaaagaaaccgagctactcagacaaacacattcatcaaaaatatctggctgcacaatgagagggctagacaaaaacagtgcactacagacacttaagcccaattttcaacaaaatcaatataagaaacaaatgttggatgatattccagaagacaacaccctgaaggaaacctcattgtatcagttacagtttaaggaaaaagctagttctttaagaattatttctgcagttattgaaagcatgaagtattggcgtgaacatgcacagaaaactgtacttctttttgaagtattagctgttcttgattcagctgttacacctggcccatattattcgaagacttttcttatgagggatgggaaaaatactctgccttgtgtcttttatgaaatcgatcgtgaacttccgagactgattagaggccgagttcatagatgtgttggcaactatgaccagaaaaagaacattttccaatgtgtttctgtcagaccggcgtctgtttctgaacaaaaaactttccaggcatttgtcaaaattgcagatgttgagatgcagtattatattaatgtgatgaatgaaacttaagtagtgataaaaggaagtttagcataaattatagtagttttctgttattgcttaatttaccatctccatagttttatagctactattgtatttcacttgttgaattaaagtatttgaattcttttaaaaaaaaaaaaaaaaaa

SEQ ID NO: 403068 - DNA, 1000 bp, Homo Sapiens; identical to SEQ ID NO: 223659

SEQ ID NO: 403069 - DNA, 1000 bp, Homo Sapiens
gtggacttcaaatctctccaaggtcagacagtctcttaaaaatgtttaccacaaatgtaagattcggcaccaagattcaactggatatcccactgtgacatctgatgattgtaatcaagatgatgatagttatgacggaaaaatgaatcttccagtagtgctccaagatgttaaaactgctcaagttgaacttttcagccaaatgactgacattgtccatatgataccaaaagtccaggaaaagactgacttgtatcaaaaacagatggaggtcctggaaaccagaatgaatgttaatgaagacaaacaatgcacaacgactaaagatatcctctctatgaaagaagacatcaaggcattaaagaagaaggtgacagaactggaaattcagaattcctgctccacgatacattgtctagagattctggagggagaaaggggtaaagaaatcacagaactgctttacaaactcatacaaccagcaactctgaagaacactttggcctctacagacatggaaatctcttcagcagaaccagagaaagtgcccagttatccaaagtccactgaccatcttgagaaaaaaacaatttctccccaaatgaaaactctgaagaaacgtaaccatcaaaatgcatcaaggagctttgaaaaagcaaagccaaatatttacatttacccagacttcagtacatggatcaagctaacttttgttcatggaggaaaatggacatttttcctcagtgctaccaagttagaagaattcatccagtggcttctttctaggccaaccattcttcctgaggaaccccaggtcataacccagagatactgtccattcactgggcccattttgagcttgaccacaatctgtctctccatcttcaacaatatttacggctttatttgttccttaaaagaagaagtaactcgactatagagttatgttctgctttgcttggcacaaaataaatgtaacctggaggctccaagtattcac

SEQ ID NO: 403070 - DNA, 850 bp, Homo Sapiens
gctttccaaaatggcgcgggtgctgaaggctgcagccgcgaatgccgtagggcttttttccagacttcaagctcccattccaacagtaagagcttcttccacatcacagcccttggatcaagtgacaggttctgtgtggaacctgggtcgactcaaccatgtagccatagcagtgccagatttggaaaaggctgcagcattttataagaatattctgggggcccaggtaagtgaagcggtccctcttcctgaacatggagtatctgttgtttttgtcaacctgggaaataccaagatggaactgcttcatccattgggacttgacagtccaattgcaggttttctgcagaaaaacaaggctggaggaatgcatcacatctgcatcgaggtggataatattaatgcagctgtgatggatttgaaaaaaaagaagatccgcagtctaagtgaagaggtcaaaataggagcacatggaaaaccagtgatttttctccatcctaaagactgtggtggagtccttgtggaactggagcaagcttgatttatatttgcaagcaactaaattaattgacctgaaaaagcctatcaaatactatcaaaatgtactatgacattgagtccttcactgcttccatcatgtaaaagttcacagttaaagactgaattacagaaagattaaaatatatacatatataaatacataaatatgtatattatttagattaacaaacatatttgttaatttgaatttgaagaaaatcttgattactaattacttagggaacattattaaaatcatatagaaataaattattcctcttcaaaaaaaaaaaaaaaaaaaaaaaaaaaa

SEQ ID NO: 403071 - DNA, 1000 bp, Homo Sapiens; identical to SEQ ID NO: 223660

SEQ ID NO: 403072 - DNA, 1000 bp, Homo Sapiens; identical to SEQ ID NO: 291582

SEQ ID NO: 403073 - DNA, 1000 bp, Homo Sapiens
ggacgtgaggccaagaccccagcagagatgccagaatgggggaggcacagctcatagccacacacccagggcctgactgaggcccacgcaggaaccgacactcagacacaaggcaaagagggccacaggacccgggaaatacacacagagccaggagcagaagcaaagagcagacacacatacagcctgaaacagacctggacagacagacacagcctgaaacagacccggacagacagacacagcctgaaacagacccagacaaacagacagacagacacagcctgaaacagacccagacagacagacagacagcctgaaacagacccagacacagcctgaaacagatccggacagacagacagaaacagcctgaaacagacccagacagacagacagacacagcctgaaacagacccggacagacagacagacacagcctgaaacagacccggacagacagacagacacagcctgaaacagacccggacagacagacagacacagcctgaaacagacctagacagacagacacagattgaaacagacccagacaaacagacagacacagcctgaaacagacccagacacagcctgaaacagacccggacagacagacagacacagcctgaaacagacccagacagacagacagacacagcctgaaacagacccagacagacagaccgacgcagcctgaaagagacccagacagagagacaggcagacacagcctaaaacagacctggacagacaggcagacgtagtctgaaacagacctgaacagacagacagacgcacacacacaacagatgcgcagcaactccccgcccagggacccctcccggcctccctcgcacactgggaggaggaagccgccgagactgcagggagcctggccccggagccccgggtgcgccctggtctttggagcagccacggcccacaatcaccccccttttctaagactgcctgatccgaaataaagtattttgacaaa

SEQ ID NO: 403074 - DNA, 684 bp, Homo Sapiens; identical to SEQ ID NO: 291584

SEQ ID NO: 403075 - DNA, 1000 bp, Homo Sapiens; identical to SEQ ID NO: 291586

SEQ ID NO: 403076 - DNA, 878 bp, Homo Sapiens
aacagccacacgtgatcggccaacactgagtcttacctcgttgtggcgtcagaaccgccgtcgctcgctcccttctcggcagtggtacctgttcccggtgtccctgaggacgtgcgggccaggtacggccccgaaagtaggaagcggagggggagcaggtttgcggggccaagtgttgcggcgacgcacctcacgtcgagaatcgggaggaggagactgcaaggataggcccaggagtaatggagtccaaagaggaacgagcgttaaacaatctcatcgtggaaaatgtcaaccaggaaaatgatgaaaaagatgaaaaggagcaagttgctaataaaggggagcccttggccctacctttgaatgttagtgaatactgtgtgcctagaggaaaccgtaggcggttccgcgttaggcagcccatcctgcagtatagatgggacataatgcataggcttggagagccacaggcaaggatgagagaggagaatatggaaaggattggggaggaggtgagacagctgatggaaaagctgagggaaaagcagttgagtcatagtttgcgggcagtcagcactgatccccctcaccatgaccatcacgatgagttttgccttatgccctgaatcctgatggtttccctgaagttaatagggagacccctgcttcctaaacttacacatttgtggtgtacctttgtcgtaaacgttttgatgttacctatttcttgtgggtctcctattaccagcttctaaatgaatgttgtttttgacccagtttgtaagtttctgtcagcaggagagttttacctattgcatggaaagatgctcattatatattgtgaagttaataaaacagttttaaaaagcaaaaaaaaa

SEQ ID NO: 403077 - DNA, 1000 bp, Homo Sapiens
tgtaggcgtcacagtcagtgctggtggatattatgcttacaagacagtcacatcagaccaagccaaacacacagaacataaaacaaatttgaaagaaaaaacaaaagcagagatacatccatttcaaggtgaaaaggagaatgttgcggaaactgagaaagcaagttcagaagccccagaagaacttatagtggaagctgaggtggtagatgctgaagaaagtcccagtgctacagttgtggtcataaaagaggcatctgcctgtccaggtcacgtggaggctgctccggagaccacagcagtcagtgctgaaaccgggccagaggtcacagatgcagcggcgagggaaaccacggaagtaaaccctgaaacaaccccagaggttacaaatgctgccctggatgaagctgtcaccatcgataatgataaagatacaacaaagaacgaaacctctgatgaatatgctgaactagaagaagaaaattctccagctgagtcagagtcctctgctggagatgatttacaggaggaagccagtgttggctctgaggctgcttcggctcaaagggcgaatctccagccggtagacatttcagcaacaaatgccatagggtgtctgataagtgcttttgtgtttttagtacacttagtttaaaaaaaaaaagacttattttctagaaaacgttaatgggtcttgaagatttttggcatccactgatagattttaggactgagagacttgagattgtacatttcttactactcttctactgtctgagatcagaatatgacattgcagtaaagagcttaaatagtttcatctttggtttttttttctagacacttttcttttatcccagtcatctctgaatttacattttatattaaagaaattgagctatccatacaacctgtatttactttaatttcactatgctttcagcttactttattgtatgatatgtaggtctaaaatatagtttgagtcaaataaaattag

SEQ ID NO: 403078 - DNA, 1000 bp, Homo Sapiens
tggcggattctcgatttcccctcttccccgtcctcgtcctcctcctcccccatgaagtgattctgagtatcggggggtctctggattattgttctgacgaacccctgcttgtggttggggggtatttaatctgaggccttagggtccttcggtgtctttgagtgttttgtgtgtacatattttgctcttaaagtttataaatatacgtatattgagagtgtccacgtctcctcgctgaaccttaggaatcccttggcaccatgtcctgtgtgcattataaattttcctctaaactcaactatgataccgtcacctttgatgggctccacatctccctctgcgacttaaagaagcagattatggggagagagaagctgaaagctgccgactgcgacctgcagatcaccaatgcgcagacgaaagaagaatatactgatgataatgctctgattcctaagaattcttctgtaattgttagaagaattcctattggaggtgttaaatctacaagcaagacatatgttataagtcgaactgaaccagcgatggcaactacaaaagcagtatgtaaaaacacaatctcacactttttctacacattgcttttacctttataatgtagcagtgaagtaaatcattttagaacttaatatccaactgatcatagtacatattgtaaataaaatgtattttgatgacagctcagttgaatatggataatatgtggcatcacttgcacacttattttgtagaaatgggtaatttgtgcccgtaacactgtttcatattaaatatgatagcattatccctgtatgacactgtgttgtacagttaatgtatgatcctttttagatcgtttaggttttacactaaggaacatgatgacatgttctacatttgtctgtctatagttagtattttgtatgtatgtacaggctgttgtgtgctttttgtttcttgcaataaaaaatgtttggagtgtaaaaaaaaaaaaaaaaaa

SEQ ID NO: 403079 - DNA, 996 bp, Homo Sapiens; identical to SEQ ID NO: 291588

SEQ ID NO: 403080 - DNA, 1000 bp, Homo Sapiens; identical to SEQ ID NO: 118300

SEQ ID NO: 403081 - DNA, 1000 bp, Homo Sapiens
aagaagttatcccaactttctttagtaccatgaacacaagctttagtgacattgaacttctggaagacagtggcattcccacagaagcattcttggcatcatgttatgctgtggttccagtattagacaaacttggccctacagtgtttgctcctgttaagatggatcttgttggaaatattaagaaagtaaatcagaagtatataaccaacaaagaagagtttaccactctccagaagatagtgctgcacgaagtggaggcggatgtagcccaggttaggaactcagcgactgaagccctcttgtggctgaagagaggtctcaaatttttgaagggatttttgacagaagtgaaaaatggggagaaggatatccagacagccctaagaaatccaacagaaaacacttgacaccaaaacataccctgatgaagatcctgaacttcaagaatgaagaaagaattcctcaccattcaggcagaaaaagcaagtcaccaagggacctcaaacttcctttccacaagattctgtgacgggaaacaatgggggagtatttccgaagttctgagtaggaaaaaagaatgactcaaatgtattattgccaaccaagtcgtcaaatctaatgtcaagttctcttaagcaggtaagaactcagaacataatacctgagtgccttcttaaggaaaccatttgataggaaagatgaaccaaataactcaatgatggatgagctggtagaaaaaaagctggtggtgaaccaaggtcaaactggaaattatagtcacagtatagatatagattataaatattacaaaccctaagatagctaataaattgggaatgggagaagggaggatataagagcactaatgccctcttattttcatagcagagacttgatactgtctcaacttttttcaaaaacacaatttcttaaattttttggtaatcttttaaataaacagatttctaaaaagaaaaaaaaaaaaaaaaaaaaaaaa

SEQ ID NO: 403082 - DNA, 1000 bp, Homo Sapiens; identical to SEQ ID NO: 221113

SEQ ID NO: 403083 - DNA, 1000 bp, Homo Sapiens; identical to SEQ ID NO: 118302

SEQ ID NO: 403084 - DNA, 1000 bp, Homo Sapiens; identical to SEQ ID NO: 223667

SEQ ID NO: 403085 - DNA, 959 bp, Homo Sapiens; identical to SEQ ID NO: 291596

SEQ ID NO: 403086 - DNA, 1000 bp, Homo Sapiens
aggaggagattctaatgcacctctggaggtacccatctctttctattcatgggatcgagggcgcgtttgatgagcctggaactaaaacagtcatacctggccgagttataggaaaattttcaatccgtctagtccctcacatgaatgtgtctgcggtggaaaaacaggtgacacgacatcttgaagatgtgttctccaaaagaaatagttccaacaagatggttgtttccatgactctaggactacacccgtggattgcaaatattgatgacacccagtatctcgcagcaaaaagagcgatcagaacagtgtttggaacagaaccagatatgatccgggatggatccaccattccaattgccaaaatgttccaggagatcgtccacaagagcgtggtgctaattccgctgggagctgttgatgatggagaacattcgcagaatgagaaaatcaacaggtggaactacatagagggaaccaaattatttgctgcctttttcttagagatggcccagctccattaatcacaagaaccttctagtctgatctgatccactgacagattcacctcccccacatccctagacagggatggaatgtaaatatccagagaatttgggtctagtatagtacattttcccttccatttaaaatgtcttgggatatctggatcagtaataaaatatttcaaaggcacagatgttggaaatggtttaaggtcccccactgcacaccttcctcaagtcatagctgcttgcagcaacttgatttccccaagtcctgtgcaatagccccaggattggattccttcaaaccttttagcatatctccaaccttgcaatttgattggcataatcactccagtttgctttctaggtcctcaagtgctcgtgacacataatcattccatccaatgatcgcctttgctttaccactctttccttttatcttattaataaaaatgttggtctccaccactgactacaaaaaaaaaaaaaaa

SEQ ID NO: 403087 - DNA, 1000 bp, Homo Sapiens; identical to SEQ ID NO: 291597

SEQ ID NO: 403088 - DNA, 1000 bp, Homo Sapiens; identical to SEQ ID NO: 291598

SEQ ID NO: 403089 - DNA, 1000 bp, Homo Sapiens; identical to SEQ ID NO: 223669

SEQ ID NO: 403090 - DNA, 904 bp, Homo Sapiens; identical to SEQ ID NO: 118303

SEQ ID NO: 403091 - DNA, 1000 bp, Homo Sapiens; identical to SEQ ID NO: 291602

SEQ ID NO: 403092 - DNA, 1000 bp, Homo Sapiens; identical to SEQ ID NO: 291603

SEQ ID NO: 403093 - DNA, 1000 bp, Homo Sapiens; identical to SEQ ID NO: 223670

SEQ ID NO: 403094 - DNA, 1000 bp, Homo Sapiens; identical to SEQ ID NO: 118304

SEQ ID NO: 403095 - DNA, 1000 bp, Homo Sapiens; identical to SEQ ID NO: 291605

SEQ ID NO: 403096 - DNA, 733 bp, Homo Sapiens; identical to SEQ ID NO: 30944

SEQ ID NO: 403097 - DNA, 1000 bp, Homo Sapiens; identical to SEQ ID NO: 291609

SEQ ID NO: 403098 - DNA, 1000 bp, Homo Sapiens; identical to SEQ ID NO: 118306

SEQ ID NO: 403099 - DNA, 1000 bp, Homo Sapiens; identical to SEQ ID NO: 291611

SEQ ID NO: 403100 - DNA, 1000 bp, Homo Sapiens; identical to SEQ ID NO: 291612

SEQ ID NO: 403101 - DNA, 1000 bp, Homo Sapiens; identical to SEQ ID NO: 118307

SEQ ID NO: 403102 - DNA, 1000 bp, Homo Sapiens; identical to SEQ ID NO: 118308

SEQ ID NO: 403103 - DNA, 1000 bp, Homo Sapiens; identical to SEQ ID NO: 223674

SEQ ID NO: 403104 - DNA, 1000 bp, Homo Sapiens; identical to SEQ ID NO: 291617

SEQ ID NO: 403105 - DNA, 1000 bp, Homo Sapiens
tgggagcgctatgggcctgccccatggacaaatacatccacaagcgctgggccctcgtgtggctggcctgcctactctttgccgctgcgctttccctcatcctccttctcaaaaaggatcacgcgaaagggtggctgaggctcttgaaacaggacgtccgctcggggggtgagtgggagcaagcgctgggcggagggccgcccccggggagccaggcctgtgccagctcacctcttccctccccatctgttttctccggcagcggccgccaggggccgcgcggctctgctcctctactcagccgatgactcgggtttcgagcgcctggtgggcgccctggcgtcggccctgtgccagctgccgctgcgcgtggccgtagacctgtggagccgtcgtgaactgagcgcgcaggggcccgtggcttggtttcacgcgcagcggcgccagaccctgcaggagggcggcgtggtggtcttgctcttctctcccggtgcggtggcgctgtgcagcgagtggctacaggatggggtgtccgggcccggggcgcacggcccgcacgacgccttccgcgcctcgctcagctgcgtgctgcccgacttcttgcagggccgggcgcccggcagctacgtgggggcctgcttcgacaggctgctccacccggacgccgtacccgcccttttccgcaccgtgcccgtcttcacactgccctcccaactgccagacttcctgggggccctgcagcagcctcgcgccccgcgttccgggcggctccaagagagagcggagcaagtgtcccgggcccttcagccagccctggatagctacttccatcccccggggactcccgcgccgggacgcggggtgggaccaggggcgggacctggggcgggggacgggacttaaataaaggcagacgctgtttttctacccatgtggcccaaaaaaaaaaaaaaaaaaaaaaaaaaaaaaaaaaaaaaaaaaaaaaaaaaaaaaaaaaaaa

SEQ ID NO: 403106 - DNA, 1000 bp, Homo Sapiens; identical to SEQ ID NO: 291618

SEQ ID NO: 403107 - DNA, 1000 bp, Homo Sapiens; identical to SEQ ID NO: 291619

SEQ ID NO: 403108 - DNA, 1000 bp, Homo Sapiens; identical to SEQ ID NO: 291620

SEQ ID NO: 403109 - DNA, 1000 bp, Homo Sapiens; identical to SEQ ID NO: 223675

SEQ ID NO: 403110 - DNA, 1000 bp, Homo Sapiens; identical to SEQ ID NO: 118309

SEQ ID NO: 403111 - DNA, 1000 bp, Homo Sapiens; identical to SEQ ID NO: 118310

SEQ ID NO: 403112 - DNA, 1000 bp, Homo Sapiens; identical to SEQ ID NO: 291623

SEQ ID NO: 403113 - DNA, 1000 bp, Homo Sapiens
taatcggccagagactgtttctctactcctctctaagtatgctttgtttttcgtaaggaatgcttttagctaatctgtaacctatagaaacaatgcttatcactggcttgctgtcaataaacatgtgggtcaaactctgtttgtggctctcagctctcaaggctgttttccccctgattcccactttgcactttatttctgtgtgtttgtcttcattcctctagcaccactgggttggggtctccttgaccaagctggtctcggcacatatgcatgtatgcccaggtcctgaaatcagccttgtggagcctgtgggtaggaaaagtcaaccctctgtgcatgtaggcctggaacctgaccaatactgtattttcctaccacgtttggtttcaaatgtggaaactgcccatacggacctactgcatttgtttttaaaaatcctctgtaagtggacctgcacagttcaggcccagattgttccaggatcaaccctacagtagaaatcaagtatctttttcattgtctcttgggatctgccttttcaccaataaaatatgagggctgttgggagcaggcccccccaaatctggccataaactgtccccaaaactggccataaacaaaatctctgcagcactataacatgttcataatggccataacgcccaagttggaaggttgtggatttacaggaatgagggcaaggaacacctggcctgcccagggtggaaaaccacttaaaggcattcttaagccacaaacaatagcatgagtgatctgtgccttaagaacatgctcctgctgcagttaactagcccaacatattcctttaattcagtccatcccttcgtttcccataagggatacttttagttaatttaatatctatagaaagaatgctaatgactggtttgctgttaataaatacgtgggtaaatctctgtttggggctctcaactctgaaggctgtgagacccctgatttcccacttgacacctct

SEQ ID NO: 403114 - DNA, 1000 bp, Homo Sapiens; identical to SEQ ID NO: 223677

SEQ ID NO: 403115 - DNA, 1000 bp, Homo Sapiens
ttcccacaggagtggtacttaaaccagacagcagggttcagaggtggcacaccgggacaaagctgaggccctgcacctcaacagctgactgccaggtgcctgtgggtgaactgaggggagtagagggagagggcaggtggaactggggcagaatctagtcatgccctaaagctagtcctgtaaacaatggtgccccagaaagctgcaggtggtgtttggagaagcagttacttttcagttacaagacccatctccctagtctcagccttacaacaccacgggactaaggaagagcacttccttgcctccgtaaggccagaggaagaaccatcccaatcatttgatctccagctccacagtagagagaaacctacaaaatgtcaaaccagcttcccgactcccaggagctcaagccaagcccagaggcagtggctggggtccctgcaggtcatgaggggcctatgcctttactccttttaaacaccagcacccgtcttttccccaacctaaaaccaaccaccagcatttcactacaggaccaaatggaaaccgagggaaccctgggtcttgggaagaacaacaggaaaccaaggtctgacctagggttccctcccagtcttcacatcactctggcctcatcaccaaggtgacagaggacacaggggagggggaaaacccacacacactccttggaatgggtcctgttatttatgcttgctgcacagacatattagaagaaaaaaaaaagctttgtattattcttccacatatgctggctgctgtttacacaccctgccaatgccttagcactggagagctttttgcaatatgctggggaaaggggagggagggaatgaaagtgccaaagaaaacatgtttttaagaactcgggttttatacaatagaatgttttctagcagatgcctcttgttttaatatattaaaattttgcaaagccctttgagctacaaaaaaaaaaaaaaaaaaaaaaaaaaaaaaa

SEQ ID NO: 403116 - DNA, 1000 bp, Homo Sapiens; identical to SEQ ID NO: 118312

SEQ ID NO: 403117 - DNA, 1000 bp, Homo Sapiens
gcagctgtcccaccagtccccagaatgactgcgcttctcctacaaggttctctgggcactgcccagcctgagtctcggccctcacccagggccctgcctcgggtcctgggcctgctccccgcttcctccccttcagtcagctccctctgtcctctgtcagcctggcctgacccctaccctccagcattgctcttcctactgtacatattggggagtggggggcagggtcgggaagggacatgccaggccaggcctggggccccggggcctgacccacaccacgcagaccccgggctccagtttttaacgatggttccatcaatacctgatccagaatgtttccgtgctacactttgtgtcctgctgcaatgtgttctgtctgtccatccatctctgccctctgtaccggacactgtgtctcctcagccaggaaggggtaatgagctccagcccctaagcaaccggacttgcctgcctcggcctcacccgcacttctcccaaaaggcagatgacggggagttaggcatggggagctccagaaggtcaccagagagctttcagctgagggagagttctctaggttggagtgggcatcacagccagggtggcctctgggtgtcagatgctctcaggagggtgcccagcctgtgaggcactggcaaggtagggggcagatggggcatggagaacccagaggatctaggccctgttggggaggggaggggagctcaaggtttgggtggggactcagcccagatctacgtgagacatttttctgtgtcactgtgggaaagccttcccagaagtctcactgcgtgtgttgagagcccatcaggagggcatgcatgactctttggcaacatgtattatcttggagccacgtgtttttattgctgactttaaatatttatcccacggcagacagagacatttggtgtctttttataattcgctcgtggtcattgaatagagcaataaacggagcattttgagcaaaact

SEQ ID NO: 403118 - DNA, 1000 bp, Homo Sapiens; identical to SEQ ID NO: 118313

SEQ ID NO: 403119 - DNA, 1000 bp, Homo Sapiens; identical to SEQ ID NO: 291631

SEQ ID NO: 403120 - DNA, 1000 bp, Homo Sapiens; identical to SEQ ID NO: 223678

SEQ ID NO: 403121 - DNA, 1000 bp, Homo Sapiens
agttctaggcacagggaatgtaacagagaacatactaaagacaagaatgtctttacatgggggaaagagggaactcacacgcagtcctaggagtcagggaagatttcccaggaaaagagacatctaaactgagattttttgtttgtttgtttttgagatggagtctcactctgttacccaggctagagtgtagtggcatgatctcagctcactgcaacttctgcctcctgggttcaagcgattcccctgcctcagcctcctgagtagctgggattacaggtgtgcgccaccatgtccggctaatttttgtatttttagcagagatggggttttaccatgttggtcaggctggtctcaaacttctgacctcgtgatccacctgcttcggcctcccaaagtgctgagattacaggtgtaagccactgagcccggcctaaactgagtttttaatatgaactagtcaaactgggtgagggtgttgttgaagggaggatgtggtagacagaggggggagtacagaaggtatgggcagaagctgtaagtggtcccttagggctgaaggacttcagactcaatgataagtctgaagtggaaagatgtaagaagtttgatcttgaatgtagacaatggaaggacagattcgagggggccagtattgtagacagggacatgcattaggaggctgttataaaaatccaggtgagaaataatccaggccaagaccagagtggtggctgtagaatacttagaatgtggaactgagaagacttggtaattgactatttgggagtggcgacagggaatgggagctcgtgattggaaggggttaaggtgagtagagaggctatgcacaagctgagcaggtcgtgatactgatggacctaccctgccttgttctgtcctctagaggatgagaagaggaaacaaactgcaccagggaagctcaggccgattcaatgcatgcaagggtgatttaacctgggttctgtttgaaatactt

SEQ ID NO: 403122 - DNA, 1000 bp, Homo Sapiens; identical to SEQ ID NO: 118314

SEQ ID NO: 403123 - DNA, 1000 bp, Homo Sapiens; identical to SEQ ID NO: 118315

SEQ ID NO: 403124 - DNA, 1000 bp, Homo Sapiens; identical to SEQ ID NO: 291634

SEQ ID NO: 403125 - DNA, 1000 bp, Homo Sapiens
gcagcccccagtactcagctgggggaggtcccggctccctctgctgctcccaccacggccccctcaggcacccctgctcgcaccccaggtgctgagccacctacgtatgagtgcagccactgtcgcaagacgttcagctcccggaaaaactacaccaagcacatgttcatccactcgggggagaagccgcaccagtgcgccgtgtgctggcgatccttctctctacgcgactacctgctcaaacacatggtcacgcacaccggcgtgcgcgccttccagtgcgccgtctgcgccaagcgcttcacgcagaagagctcgctcaacgtgcacatgcgcactcaccggcccgagcgcgcgccctgccccgcctgcggcaaggtcttctcgcaccgcgcgctgctggagcgccacctggcggcgcaccctgcgccctgatggcgctggggcctggcctcgcccacggtggatccggggcctcccgcacagtcggccacgcccgctgcgggacccgtggttcccgccactagaccacgctccctcctgagcgcaggtcctctctctcccttcaccctttctccataccagggcctaagtccgccttactcctctcctccatgtacttgaaccctccaggtggtgccgggctggggctggggctggttagaccacttctgagaactggactatttcctgcgtaaaccgggcgctcaggcgcttggacccggcccaagatttgactccggttctcaccccgccctctcctggggtggtggtgggggctggggggccgcttgcctgccccagggtcaggctgggcaaggtccctagctctctacccaagctgttactccctcatggggcgcctaaggagactcaagtggacccatcatatatgggggctgggcctcgggactctcgctctaataaaggactgtaggccatggggcctaaaccacgaaaaaaaaaaaaaaaaaaaaaaaaaaaaaaaaaaaaaaaaaaa

SEQ ID NO: 403126 - DNA, 1000 bp, Homo Sapiens; identical to SEQ ID NO: 118316

SEQ ID NO: 403127 - DNA, 1000 bp, Homo Sapiens; identical to SEQ ID NO: 118317

SEQ ID NO: 403128 - DNA, 1000 bp, Homo Sapiens; identical to SEQ ID NO: 291637

SEQ ID NO: 403129 - DNA, 1000 bp, Homo Sapiens
tcctgctcctggtgctgggctccctgctgctctacctcgctgtgtcactcatggaccctggctacgtgaatgtgcagccccagcctcaggaggagctcaaagaggagcagacagccatggttcctccagccatccctcttcggcgctgcagatactgcctggtgctgcagcccctgagggctcggcactgccgtgagtgccgccgttgcgtccgccgctacgaccaccactgcccctggatggagaactgtgtgggagagcgcaaccacccactctttgtggtctacctggcgctgcagctggtggtgcttctgtggggcctgtacctggcatggtcaggcctccggttcttccagccctggggtctgtggttgcggtccagcgggctcctgttcgccaccttcctgctgctgtccctcttctcgttggtggccagcctgctcctcgtctcgcacctctacctggtggccagcaacaccaccacctgggaattcatctcctcacaccgcatcgcctatctccgccagcgccccagcaaccccttcgaccgaggcctgacccgcaacctggcccacttcttctgtggatggccctcagggtcctgggagaccctctgggctgaggaggaggaagagggcagcagcccagctgtttagggttgctggaggccgggctaccgtcttgtgcctgaaaaccacggggcctgtccccagctggggtgagcgctcagagggcctggggccctcactcctgcccacgcctcccagaccccagaacggagcttcaagtcagacagatccctgccttggtgggcagttctgccttccaaggaagaaggggaagaaaaggacctgtgggtggctcaggcccaagcagaccccgggctccaccccagccccgcccaggctgctgccagtgcacacttttacaaatttaatataaagcaagtccagtcttaaaaagacaaaaaaaaaaaaaaaaaaaaaaaaaaaaaaaaaaa

SEQ ID NO: 403130 - DNA, 1000 bp, Homo Sapiens; identical to SEQ ID NO: 291638

SEQ ID NO: 403131 - DNA, 1000 bp, Homo Sapiens; identical to SEQ ID NO: 118318

SEQ ID NO: 403132 - DNA, 1000 bp, Homo Sapiens; identical to SEQ ID NO: 291640

SEQ ID NO: 403133 - DNA, 1000 bp, Homo Sapiens
gccgggactccgaccggaggcccttcgtgtgcagcgactgcggcaaggccttccggcgcagcgagcacctggtggcccaccggagggtgcacacgggcgagcggcccttctcctgccaggcttgcggccgcagcttcacgcagagctcgcagctggtcagccaccaacgggtgcacacgggcgagaagccctacgcctgtccgcagtgcgggaagcgctttgtgcgccgggccagccttgcccgccacctgctgacccacggtggccctcggccccaccactgcacccagtgcgggaagagtttcggccagacccaggatctggcccgccaccagcgcagccacacgggcgagaagccctgccgctgcagcgagtgcggtgagggcttcagccagagcgcccacctggcgcgccaccagcgcatccacacaggggagaagccccacgcctgcgacacctgcggccaccgtttccgcaatagctccaacctggcccgccatcgccgcagccacacgggcgagcggccctacagctgtcagacgtgcggtcgcagcttccggcgcaacgcgcatctgcggcggcacctggctacccatgcggagcccgggcaggagcaggccgagcccccgcaggagtgcgtggagtgcgggaagagcttcagccgcagctgcaatctgctgcgacacctgctggtgcacacgggcgccaggccctactcctgcacgcagtgtggccgcagcttcagccgcaactcccacctgctgcgccacctgcgcacccacgcccgcgagacgctgtactagcttggcccgccttccgccagccgcgccctgcgccacctacccggggtcctccacagcggaggcctgcaggaatgtcccttcccaccacaccccacttccctctccttccactttcacagctgtccttccctggccgaggcattgctttctggcctcagctatgtaattaaaacgcccgaagtaaaatggccttctcc

SEQ ID NO: 403134 - DNA, 1000 bp, Homo Sapiens
ctgagcggccctgggatcaggggggcatcacccatctggaccgggctgagcaagcccgtatcctgcaaagccgtgaggtcccacggcatctctgttgccggaaccccgagtggctcttccgaatctaccaggacaccaaggtggacatcccatccctcattcaaaccatacggcgcgtggtgaagggccggccaggaccacggaagcagaagtggacagtcggcctatatccaggcaaggtgcgggaggcacggtgccaggcgtcagtgcatggcgcctccgaggcccgcctcactgtctcctggcagatcccatggaaccttaaatacctgaaggtgagggaggtgaagtacgaggtgtggctgcaggagcagggggagaacacctacgtgccttacatcctggctctgcagaaccacaccttcactgagaacatcaagcccttcaccacctacctggtgtgggtccgctgcatcttcaacaagatcctcctgggaccctttgcagatgtgctggtgtgcaacacgtagcgagcaggccacagcctggcctcgggaaggtggctcctgcagttcagcgtccctgggcccattaatcccactgtggagacttctgggaactatttattgagcaggcctgtgcctccacatcatcttgttgtctctggggtgtggtgtcacagcactcctctttgccctagagataagggacctgacttccccttctcccatcctgaacatttgtacccctggagaagttccttagcagggaggaggaagaggagaggaggaagcaaagaatcacaaggaacctctggctaggtgatcctgatgtttcctactgagtttttctggtatccagatttctggaaaccgagtaatcatgtactgtttgattgggtggttcatctgcttccatcccagtgaaatttacctgtagcccagtgaagggtgtgtttggaacattcattaaatgattctaaacaaaaaaaaaaaaaaaa

SEQ ID NO: 403135 - DNA, 1000 bp, Homo Sapiens; identical to SEQ ID NO: 223683

SEQ ID NO: 403136 - DNA, 1000 bp, Homo Sapiens; identical to SEQ ID NO: 223684

SEQ ID NO: 403137 - DNA, 1000 bp, Homo Sapiens; identical to SEQ ID NO: 291644

SEQ ID NO: 403138 - DNA, 1000 bp, Homo Sapiens; identical to SEQ ID NO: 291645

SEQ ID NO: 403139 - DNA, 1000 bp, Homo Sapiens; identical to SEQ ID NO: 223685

SEQ ID NO: 403140 - DNA, 1000 bp, Homo Sapiens; identical to SEQ ID NO: 291647

SEQ ID NO: 403141 - DNA, 1000 bp, Homo Sapiens
aggactccccttcatcctgatcctcctggccaaactgtgctttcagcataagctcggcattgctgtgtgcatcgggatggccagcaccttcgcctatgccaactccacgcttcgagaacaggtctcactgaaggagaagaggtcagtgctggtcatcttgtggatcctggcctttctggcggggaacaccctctatgtgctttatacattcagctcccagcagctgtacaacagcctcatattcctgaagcccaacctggagatgctggacttctttgacctgctatggattgtggggatcgcagactttgttctgaagtacatcaccatcgccctcaagtgcctcatcgtggccctgcccaagatcatcctggccgtcaagtccaagggaaagttctatctggtcatcgaggagctgagccagctgttccgatcccttgtccccatccagctgtggtacaaatacatcatgggtgacgactcctccaacagctacttcctgggcggggtcctgatcgttctctacagcctctgcaagtccttcgacatctgtggacgtgtgggcggagttaggaaagccctgaagcttctctgtacctctcagaactatggagtccgagccaccgggcagcagtgcacagaagctggtgacatctgcgccatctgtcaggccgagttccgagagcctctgattctcctgtgccagatgctgttgaaggggcacaagaaattggagctggagaagattgatgaaagtgcaggtgtgtaaggaaatagaacagtctgctgggagtcagacctggaattctgattccaaactctttattactttgggaagtcactcagcctccccgtagccatctccagggtgacggaacccagtgtattacctgctggaaccaaggaaactaacaatgtaggttactagtgaataccccaatggtttctccaattatgcccatgccaccaaaacaataaaacaaaattctctaacactgat

SEQ ID NO: 403142 - DNA, 1000 bp, Homo Sapiens; identical to SEQ ID NO: 223686

SEQ ID NO: 403143 - DNA, 1000 bp, Homo Sapiens
aatcgcagtggaagttcataaatcaattgtgaatgaattaaaaagccaattacagaaggaagaagagaaagaaagggctgagatggaggagttgatggagaagctgacagtcctgcaagcgcagaagaagagcctgctgttagagaagaacagtttgacagagcaaaacaaagcactggaagccgaacttgaacgagcacagaaaatcaataggaaatctcaaaagaaaattgaggtcctcaaaaagcaggtggaaaaagccatggggaacgaaatgtctgctcatcagtacctggcaaaccttgttggcctggcagaaaatataacccaggaacgtgacagtcttatgtgtttggcaaaatgtttagaaagtgagaaggatggagtgcttaataaagtcataaaaagcaacattcgcctgggaaagttagaggaaaaagtcaagggctacaagaagcaggcagcactgaagctgggggacatcagtcaccgtctgctggagcagcaggaggacttcgccggcaagacagcccagtaccggcaggagatgcggcacctgcaccaggtgctgaaggacaagcaggaggtgctggaccaggcgctgcagcagaacagagaaatggaaggtgaacttgaagttatttgggaatctaccttcagggaaaaccgaagaatccgagaacttctccaggacacactcacgaggacaggcgtgcaggacaaccccagagctctggttgcccccagcctcaatggcgtctctcaggcagacctgctggacggctgcgatgtctgctcctatgacctgaagtctcatgcccccacctgctagaatctgcgggagcccgtggtgtagcctcctctggcctgaaaggtctgcctcacacaggccttccctgcagggcagcccatggtggcagccggaggtgcgtaagcccactgaacgctgcagggcagggaagaaataaatggtctcatagtttaatccattgataaaaaa

SEQ ID NO: 403144 - DNA, 1000 bp, Homo Sapiens; identical to SEQ ID NO: 223687

SEQ ID NO: 403145 - DNA, 1000 bp, Homo Sapiens; identical to SEQ ID NO: 223688

SEQ ID NO: 403146 - DNA, 1000 bp, Homo Sapiens; identical to SEQ ID NO: 291651

SEQ ID NO: 403147 - DNA, 1000 bp, Homo Sapiens; identical to SEQ ID NO: 118319

SEQ ID NO: 403148 - DNA, 1000 bp, Homo Sapiens; identical to SEQ ID NO: 291653

SEQ ID NO: 403149 - DNA, 1000 bp, Homo Sapiens; identical to SEQ ID NO: 223689

SEQ ID NO: 403150 - DNA, 1000 bp, Homo Sapiens; identical to SEQ ID NO: 223690

SEQ ID NO: 403151 - DNA, 1000 bp, Homo Sapiens
gctgcttcgcactttgccctctgcctggtggggaggggagagctcagcccccgactcactcagaccccaaggcccactgtccagctgcagaaattcgttgccaaagattggacagagacaccgaaggaaatggggtggtgaaaccccacagcgaaaagccacaccgttgctctgtgacttttgctcctcctgttgcctgagccccatctcaagccaaagatgagtcagtggttctgctaggaactcatggaatggatgggcatttgatgacccctgggggtcatcttggccctctgacctggtgctctctctccactgggccttgtgctggctgagtgcaagacaagccttaggggctgtgagagggaggctggggtgcctgggcggggctgggagtgggacctgagatccctgcccactctctccccttcattggctgcccaggccactggccccagttctcagtgtcccttgggtccaggctccttgggccctaagcatcaccagaagggagtaagcagggagagaagcaatattactccctcccctacaccagggacttgccccagggcagctacctatgggtctttgcttccccagccagcctctcctcactgtgacccacccccatgggcccccgtcccaggcagccagcaccatgggcaggccctgccatggacagaaaaagagtttttctcttgttcagcctgcacgtggcctgaggaaggagtagaggctgggttggctggagccgtcctactgggcaagatggcgccccacttggagggcggtggtctgttacagggtgtgcaggggcagagaaggaagggaccaggggactgggccagtatgtggaggatggggcctgcgtgttcaaagccaaggcccgccccttccttgtgctcaaatggccaaagctgttcacgtctgtgctcaaccatctgcttcaaattgaagtaaaagccccaaaatgtcaagaaaaaaaaaaaaaaaaaaaaaa

SEQ ID NO: 403152 - DNA, 1000 bp, Homo Sapiens
ctgcctgcctcagcttctcaggtgtgacctactgtgcttggcctaatgtacaactttttaagcaatgccaaactatgacttaagaatgaaattattgctcatttgtatatctatctaccatcagtgtccaagaatttctgttctatcttaccaagagggagtatggttagtatttgaaattgtttattattttaataagtggttataacttttgagtcagtggtttatgttttgcattttttttgttttgagacagagtctcgctctgtctcccaggctagagtaccgtggcacaatctcggctcattgcaacctctgcttcctgggctcaagcactctgcccacctcagcctccagagtagctggaaatacagtgccacccagatagcctcacaaaactttgacccagccactgttagtgtcgccaccgcccataaaggagctgagcccagcaggggcactgcctggggccctgtagccaaaaggctacagcaggagctgatgaccctcatgatgcctggtgacaaaagaatttctgcctaccctgaaagccttatcaaatggacaccatccatgaagcagctggcacagtgtatgaagatctgaggtataagctcttgctggagttcctcaatgactacccacctttacgatgcacccacagtgaagttcctcacaccctgctaccaccctaacgtggacacccagggtaacatatgcctggacatcctgaaggagaagtggtctgccccgtatgatatcaggaccatcctgctctctatccagtgcctgctaggacaactcaacattgatagccctttgaacacacatgctaccaagctctgggaaaaccccatagctttaagaagtacctgcaagggtcaggcgcagtggctcacacctgtaatcccagcactttgggaggccgaggtgggtggatggatcacctgacgtagagagtccaaggcctgacaaacatggagaaatgtcatccctattt

SEQ ID NO: 403153 - DNA, 1000 bp, Homo Sapiens
gttgccccaggacacagtgagggcctgggggcagccactgacgcccatgccttcctttatctaagctggcagaggcagggagagagaaaccactcaaaaacaggaatggttctttctgggcctcctgggacaggggcccaggccaaggtggggtgcaggaggaaacaggcgcaccagagtcagggtgggggcagggcagcccccccaggggtcaggcagctgtgtctccccacactggctccccagtattctggaaaaggggtacaggaggccgataggaagtcactgggcccaaagtgtctccccaccagccaggtgaagaccactctgatagaggctccagggactataccagtccccctgttcctccttcccctacccccaccattccttcctaacacagagttgcacccccatccccattctccaaaccctggactaccatattcccccttccctccaatacatcttatagggctgctgggtacagttgttcaggctgtgcactgcacaagggcaccttgtccaaggagacaccactttcacccaaacttgtatatttattacaattttctgcatcttgaggaaggggcgtcattttcctgttcgcacaaaggcaccacaggggctaacagtgggcctgcaatcttagatcccatccttgccttcttcgagggatctcttgggaccctcctggttttaactgggaggcccagaccaactcctttcctgcaaaccaccctccaaggcctgtcccacacgatcaaggcagggaaagataggcaggagtcccctcacgaagtcctcaagtcctggcccctctggcgctctggaagcggtactgtatctctctccaaggcctggtcaagcactaagtgcatttacaaatctctgagaatgttttttttatactaaaattgaccattatattctactgtgagaagtgcagtctgcactatattgttttaaaaacgaagagaaagaagaaaaaggaaaacac

SEQ ID NO: 403154 - DNA, 1000 bp, Homo Sapiens; identical to SEQ ID NO: 291655

SEQ ID NO: 403155 - DNA, 1000 bp, Homo Sapiens; identical to SEQ ID NO: 291657

SEQ ID NO: 403156 - DNA, 1000 bp, Homo Sapiens; identical to SEQ ID NO: 223691

SEQ ID NO: 403157 - DNA, 1000 bp, Homo Sapiens; identical to SEQ ID NO: 118321

SEQ ID NO: 403158 - DNA, 1000 bp, Homo Sapiens
tagttggaggctgtgttgttggaatagctatggcaaggtttgcagattttatcaggggtatgctgaaactaattcttctcctcctgttttcgggagctacactgtcatccacgtggttcaccctgacctgtttgaacagcatcacacacctacctttaaccacagtgacattgtatgcctcctgtattctcctgggagtgttcttgaatagcagcgtgcctatattttttgagctttttgtggaaactgtctacccagttccagaaggaattacttgtggagttgtcacttttttaagtaatatgtttatgggagtacttttattttttctcacattttatcatacagagttgtcttggttcaactggtgccttcccgggtcgtgtttgctcagtctcctcctcattctgtgcttcagggaatcctatgacagactctatcttgatgtggttgtctccgtttaatagcacagacttgaaggagtttaaaaggaggctggaaatcaatactgcacactgcacatttgctcagaattgcacatctaacaggaaaagagggagaagaaagaaacttcattcagaggttttgttaggttacagattatcacattaatttaattactactaggtaataataatgggagacttgagtgataataggggattttaaaactctacagatggcatacctgtgcctgcttctggggttggaagtgtgacttcttacacataaagcactacctaagtaattctctctctgttttgtgccagtgctaaactactgattacttgtaattatgaaaagaaataaagggtgtctatcatatgaagataacgccttccctaagtcacatatcagaataggaagatatgccactaacttctaaagaagttcaaaccctgtatccaattttaatgataaaatagccaagaggtatatcgatgatggaaattagccacatgtacactacattttttctaataaagccatttcttatatg

SEQ ID NO: 403159 - DNA, 1000 bp, Homo Sapiens; identical to SEQ ID NO: 291661

SEQ ID NO: 403160 - DNA, 1000 bp, Homo Sapiens; identical to SEQ ID NO: 291662

SEQ ID NO: 403161 - DNA, 1000 bp, Homo Sapiens; identical to SEQ ID NO: 291663

SEQ ID NO: 403162 - DNA, 1000 bp, Homo Sapiens; identical to SEQ ID NO: 291664

SEQ ID NO: 403163 - DNA, 1000 bp, Homo Sapiens
gcagctgaggtggctatcgatgaaagctggaaaggaggaggcccagctgcctctctccagaatgatctcaaccagggtggcccagggagcactaattccaagaggcaggccaactggtccttggaggaggagaagagcagactgctggctgaggcagcacttgagttgcgggaggagaacacgaggcaggaacggattctggccctggccaagcgactagccatgctgcggggacaggaccccgagagagtgaccctccaggactatcgcctcccagacagtgatgacgacgaggatgaggagacagccatccaaagagtcctgcagcagctcactgaagaagcttccctggatgaggcaagtggctttaacatccctgcagagcaggcttctcgaccctggacgcaaccccgcggggcagagcctgaggcccaggatgtggaccccaggcctgaggctgaggaagaggagctcccctggtgctgcatctgcaatgaggatgccaccctacgctgcgctggctgcgatggggacctcttctgtgcccgctgcttccgagagggccatgatgcctttgagcttaaagagcaccaagacatctgcctactctcctccacgtgcaggccaagagcactgaagacaccctggtcctcccggaagggcagtcccacaggcagcggcacccatttctgggcccagccacaggacgtccgatgggagagcttgtctggctctactgatgatggataggccccttcctgagccttggtgtccctggaatgaggaaagattctccattcgagagaatgactgggagggaagaagtcggggccctcctattagaagcccagactggaagtgagaggcatgatggggagagaccagactgaatctacgggtgagccctgtaacctggctctagggcacaggcccctcccctggcacttagtgggtctaataaagtatgttgattcattgggaaaaaaaaaaaaaaaaaaaa

SEQ ID NO: 403164 - DNA, 1000 bp, Homo Sapiens; identical to SEQ ID NO: 223693

SEQ ID NO: 403165 - DNA, 1000 bp, Homo Sapiens; identical to SEQ ID NO: 118323

SEQ ID NO: 403166 - DNA, 1000 bp, Homo Sapiens
tttggctttgtgggaataggtgtggagaaattaaagagtgaaggccatatttcattttttataaattatctttcaagctcagatagcttaagagcagtttatattaaggagacccttttctccttgaggatagggataggtaaggtaaacttgtaaaaaggatgtcacagaagtcactttttaattaagtcatgattgagatactgaactcttccactcattcttctttcccattttcctattatgtttgataattatatgtatttttaaaaactgtgagaggaaaaattagtcataacccttttgggttatccacttaaatttaggtattttcatattactcaggtaaagatggaaatgacagagcacagacatttattttttaaattgatagggtagaaaatgaaatgtacttctgtttattcttaatactatatatatatatacacacatagttttagcaaattggaaataatatattcatttgtatggcaagataaatgcagtcatcttaatactagtctatacatttttgccaaatggcgcaaatatacctccatttatattttgtatcttaaaatgtagtttaaaaataggaccatgtatgagacacttttttacaaaaagtgccgtatatacatatgtaacaggtgagtgtgtgtttaacataatttataattatttctgtcagtacagcgtatatggaaaattcaagttgtttttaacatattcaagtatgttcagtataaaataagttaatcccatttcataatgtaaatcatatttttgttatttgccatattttatttgaagtgataaaattttataactcaaatttgaatgtcatagtacattgtgtgctaaccatggcaagcaaacatttacatttgttttttacaataaatttcttttaaaatatactttctatttttctgtactgacatatgcaataaattggtacattaaaaatttgattaatgtcttcaaaaaaaaaaaaaaa

SEQ ID NO: 403167 - DNA, 1000 bp, Homo Sapiens; identical to SEQ ID NO: 291671

SEQ ID NO: 403168 - DNA, 1000 bp, Homo Sapiens; identical to SEQ ID NO: 118324

SEQ ID NO: 403169 - DNA, 1000 bp, Homo Sapiens; identical to SEQ ID NO: 223697

SEQ ID NO: 403170 - DNA, 1000 bp, Homo Sapiens; identical to SEQ ID NO: 223698

SEQ ID NO: 403171 - DNA, 1000 bp, Homo Sapiens; identical to SEQ ID NO: 291676

SEQ ID NO: 403172 - DNA, 1000 bp, Homo Sapiens; identical to SEQ ID NO: 118325

SEQ ID NO: 403173 - DNA, 1000 bp, Homo Sapiens; identical to SEQ ID NO: 291678

SEQ ID NO: 403174 - DNA, 1000 bp, Homo Sapiens; identical to SEQ ID NO: 292664

SEQ ID NO: 403175 - DNA, 1000 bp, Homo Sapiens; identical to SEQ ID NO: 118326

SEQ ID NO: 403176 - DNA, 1000 bp, Homo Sapiens; identical to SEQ ID NO: 223700

SEQ ID NO: 403177 - DNA, 1000 bp, Homo Sapiens; identical to SEQ ID NO: 118327

SEQ ID NO: 403178 - DNA, 869 bp, Homo Sapiens; identical to SEQ ID NO: 291684

SEQ ID NO: 403179 - DNA, 1000 bp, Homo Sapiens; identical to SEQ ID NO: 118330

SEQ ID NO: 403180 - DNA, 1000 bp, Homo Sapiens
gtggcatcagcacctgcagcctgctccccagggacaaatcgctctacctcacctaatcccgcctccctaccatccctgaggctcgctggaaggcactgctcagagcctgaagggctgacagcagaaaagaggccctggccagaggcagggtggcccatcggagagagcagtgacacacccattgcccgggggctgagtctcttcctcaacctcccaccagactctgcagaggcagcccactgcccaccaccagcccaaagaacctgcaggaaccttccgcccgctgacctgcttgctccagggtaactgtggaccctgtcctcgccctgcgcacggtaccctatgtctggacacccggccccagctccagccccagcccaggtgggccgcccctggcggggtcgcttaccaacggacacccaccccagatgcatgggccagagggccggcccccggcatagatgtgcacatcggttttccagtgtgaacaaaagattacgaaacctagaaactgttggttccgtgtaagtagttgactacgtgttttagaactgtgctgaagacatctgtaagactattttgtgggggaaaaaagtagtttcctttaaggtaaaaagcattttatatgatccttagcacatttttaagttttatcttaagggagacgcgcacaaaagcggctgccaaaccgtttcgtcatcctcacagcaaggaccggacgcttgctagccaccccggagcactgctctccttttaatcatgtattcatctattttaaattgccggcgacgacttttgtctatttatgaagaaaccttgagaacgaagttacagcttatcctaccgtgtgtgtggttttggggtttcgtttgggtttgggttcttgacgtcgtttgcagctgtttcctggccctggcgagtgtctgtcttggtgcccagtgcttctctcaaatctctttataataaaacttctgaaaagctgaaaaaaaaaaaaaaaaaa

SEQ ID NO: 403181 - DNA, 1000 bp, Homo Sapiens
cttggggccaccaagaacccaagcgggcagccgagacttcgaaacaaagtggaagtggatgggccggagctgaaatttaacgcacctgtgacggttgctgacaagaacaacccgaagtacacagggaatgttttcactccacactttcctacagccatgacctcagcaaccctgaaccagccactctggctcaacctgaactatccacctccaccagtgttcacgaatcactctaccttcttgcagtatcagggcctgtacccacagcaggcagcgaggatgccctatcagcaggctttgcacccgcagctgggatgttactcccaacaggtgatgccatacaacccacagcagatgggacagcagatcttccgctcttcctacacccctctgctgagctacatcccttttgtccagcccaattatccctaccctcagaggacacctccaaagatgtctgccaacccccgagaccctcccctaatggcaggagatggaccgcagtacctctttccccaaggatatgggttcggctcgacatccggagggcccttgatgcacagcccctatttttcttccagtgggaatggcataaacttttagatctcctcttctcccttctcctcccttagcccttggatcaggactaggggctctgatttttggattctgcaaaagcttggtatgaagtttggaaaagcaaagttctgaccaggtcacagacaaaacagcaagaccagattcatctattggccaacactgacacaaaaatagccctcctcacacatggcacaagctacacacacacacacacacatgaccctcatattcatacttgcttgctcaaccacttatgcttctgtatttagctaacatgagtgatttttgtttttgtttttgttggtaaaatagaagtaagacacttaattttagaaagtttgtattttatgataaaagtatgagctacttgaaaaaaaaaaaaaaaaaaaaaaaaaaaaaa

SEQ ID NO: 403182 - DNA, 1000 bp, Homo Sapiens; identical to SEQ ID NO: 118331

SEQ ID NO: 403183 - DNA, 1000 bp, Homo Sapiens; identical to SEQ ID NO: 118332

SEQ ID NO: 403184 - DNA, 1000 bp, Homo Sapiens
ggctgtagccagctggatagggctggggcctgtagcgccctttgtggctgccatccctctcctggctctggcaggggccttggcccttcgaaactggggggagaactatgaccggcagcgtgccttctcaaggacctgtgctggaggcctgcgctgcctcctgtcggaccgccgcgtgctgctgctgggcaccatacaagctctatttgagagtgtcatcttcatctttgtcttcctctggacacctgtgctggacccacacggggcccctctgggcattatcttctccagcttcatggcagccagcctgcttggctcttccctgtaccgtatcgccacctccaagaggtaccaccttcagcccatgcacctgctgtcccttgctgtgctcatcgtcgtcttctctctcttcatgttgactttctctaccagcccaggccaggagagtccggtggagtccttcatagcctttctacttattgagttggcttgtggattatactttcccagcatgagcttcctacggagaaaggtgatccctgagacagagcaggctggtgtactcaactggttccgggtacctctgcactcactggcttgcctagggctccttgtcctccatgacagtgatcgaaaaacaggcactcggaatatgttcagcatttgctctgctgtcatggtgatggctctgctggcagtggtgggactcttcaccgtggtaaggcatgatgctgagctgcgggtaccttcacctactgaggagccctatgcccctgagctgtaaccccactccaggacaagatagctgggacagactcttgaattccagctatccgggattgtgcagatctctctgtgactgactttgtgactgtcctgtggtttctcctgccattgctttgtgtttgggaggacatgatgggggtgatggactggaaagaaggtgccaaaagttccctctgtgttactcccatttagaaaataaacacttttaaatgat

SEQ ID NO: 403185 - DNA, 1000 bp, Homo Sapiens; identical to SEQ ID NO: 223705

SEQ ID NO: 403186 - DNA, 1000 bp, Homo Sapiens; identical to SEQ ID NO: 291690

SEQ ID NO: 403187 - DNA, 1000 bp, Homo Sapiens; identical to SEQ ID NO: 291691

SEQ ID NO: 403188 - DNA, 1000 bp, Homo Sapiens; identical to SEQ ID NO: 118333

SEQ ID NO: 403189 - DNA, 1000 bp, Homo Sapiens; identical to SEQ ID NO: 291692

SEQ ID NO: 403190 - DNA, 1000 bp, Homo Sapiens; identical to SEQ ID NO: 118336

SEQ ID NO: 403191 - DNA, 1000 bp, Homo Sapiens; identical to SEQ ID NO: 223708

SEQ ID NO: 403192 - DNA, 1000 bp, Homo Sapiens; identical to SEQ ID NO: 291698

SEQ ID NO: 403193 - DNA, 1000 bp, Homo Sapiens; identical to SEQ ID NO: 118337

SEQ ID NO: 403194 - DNA, 1000 bp, Homo Sapiens
ggtcccggcaggtctgcgcgtctgttcccagcgctctgcgaggcctaaaaaggaggagcaacctgtccagaatccctgcaggacaggaaaaggaggggaaatctcgacatggaaaaaccctacaataaaaatgaaggaaacctggaaaacgagggaaagccagaagatgaagtagagcctgatgatgaaggaaagtcagacgaggaagaaaagccagacgtggaggggaagacagaatgcgagggaaagagagaggatgagggagagccaggtgatgagggacaactggaagatgagggaagccaggaaaagcagggcaggtccgaaggtgagggcaagccacaaggcgagggcaagccagcctcccaggcaaagccagagagccagccgcgggccgccgaaaagcgcccggctgaagattatgtgccccggaaagcaaaaagaaaaacggacagggggacggacgattcccccaaggactctcaggaggacttacaggaaaggcatctgagcagtgaggagatgatgagagaatgtggagatgtgtcaagggctcaagaggagctaaggaaaaaacagaaaatgggtggttttcattggatgcaaagagatgtacaggatccattcgccccaaggggacaacggggtgtcaggggagtgaggggtggaggtaggggccagaggggcttacacgatatcccatacctttaatgcctttggccttccattctgatttctctgatgagaatattgctggccctgctttccctggtaggtatttgccaggcccaatgctttaaccttaagctgatactttgctttagatgtcagtctcgttaccagcagccttttgacccaactacggcgctctatattttagtagaggattttcacccatgtgcatggaaaagatgttcatggtacattgtaaaaaaataaaattaaaattaaaaaaagtttgcagaaccgcaaaaaaaaaaaaaaaaaaaaaaaaaaaaaa

SEQ ID NO: 403195 - DNA, 1000 bp, Homo Sapiens; identical to SEQ ID NO: 118339

SEQ ID NO: 403196 - DNA, 1000 bp, Homo Sapiens; identical to SEQ ID NO: 118340

SEQ ID NO: 403197 - DNA, 1000 bp, Homo Sapiens; identical to SEQ ID NO: 118341

SEQ ID NO: 403198 - DNA, 1000 bp, Homo Sapiens; identical to SEQ ID NO: 118342

SEQ ID NO: 403199 - DNA, 1000 bp, Homo Sapiens
ttgattgccaagatttccaaatgagcccaaattccactggctcctccactgaaaactactaaaccggtggaatctgatcttgaaaatctgagtaggtggacaaatatcctcactttctatctattgcacctaaggaatactacacagcatgtaaaagtcaatctgcatgtgcttctttgattacaaggcccaagggatttaaatataacaaaatgtgtaatttgtgactctaatattaaataagatatttgaacaagctaggaaaattgaatttctgctgctgcttcaaagaaaaagctgccccagagcattaaacatggggtattgttaagaagcaaaatgttcttgtttgccatcatgtgtttcacaccacaattctgtgccacagttaagagggtctggtacccttgcaggacctttgtaggttgtgggaaaaagtcgcagaaagatactcaaagtggagcagggaatggagacagacatcagtgatgataaaaaaaaaaatggaccttaagaaactatttactctgtaatctctaataaaatatggaattccatattagggcaatgagactgaaactactggtgtttttctgccttgagaaaacaaacagttaaaacaagcctcaaatgtattttagtgccacccactggccataggtacaattcagttgttggcttgttttgacttaattctaaaataggtctcaagcctgtatttttatgagtttatttttttaaaaccctgcatatatatgattgtttttcttataactttactatatgaaagcagcataagagtagtcacaaacatgttttgcaacaaagttttaattagaatgtaagttgctcagttatactgttcttcttatgtatgtaaaattttcgtattttgtaaaaacccttagaataaattatcatttgatttaaattgtattagaaaattagcgtgacttctcattttaaataaaatattttaggaattctaaacatctaaaaa

SEQ ID NO: 403200 - DNA, 1000 bp, Homo Sapiens; identical to SEQ ID NO: 223709

SEQ ID NO: 403201 - DNA, 1000 bp, Homo Sapiens
agatgcgagacatgtttgatgactacgtccgaacccgtacgctgcacaactggaagttctgggtgttcagcatcctcatccggcctctgtttgagtccttcaacgggatggtgtccacggcaagtgtgcacaccctccgccagacctcactggcctggctggaccagtactgctctctgcccgctctccggccaactgtcctgaactccctacgccagctgggcacatctaccagtatcctgaccgacccgggccgcatccctgagcaagccacacgggcagtcacagagggcacccttggcaaacctttatagtcctggccagaccctgctgctcactcagctgccctgggggctgctttccctgggcacgggctccagggatcatctctgggcactcccttcctgccccaggccctggctctgcccttccctggggggtggagcagggtccaggtttcacacttgccacctcctggaggtcaagaagagcagagtccccgtccctgctctgccactgtgctccagcaccgtgaccttgggtgactcgtccgctgtctttggaccgctgtgtttcaatctgcaaaatggggatggggaaggttcaatcagcagatgacccccaggccttggcagctgtgacattgggggcctaggctggcaactccgggggctcaacggtggaaagaggaggatgctgtttatctgtcacctccacttgctccccgacaggtggggcacagacctctgttcctgagcagagaagcagaaaaggaggttccctctctctgctccttcactgctgacccagaggggctgcaggatggtttcccctgggagaggccaggagggcctgatcccaggagacaccagggccagagtgaccacagcagggcaggcatcatgtgtgtgtgtgtgtgtggatgtgtgtgtgtgggttttgtaaagaattcttgaccaataaaagcaaaaactgtctgctggttaaaaaaaaaaaaaaa

SEQ ID NO: 403202 - DNA, 1000 bp, Homo Sapiens; identical to SEQ ID NO: 223710

SEQ ID NO: 403203 - DNA, 1000 bp, Homo Sapiens; identical to SEQ ID NO: 223711

SEQ ID NO: 403204 - DNA, 1000 bp, Homo Sapiens; identical to SEQ ID NO: 291707

SEQ ID NO: 403205 - DNA, 1000 bp, Homo Sapiens; identical to SEQ ID NO: 223712

SEQ ID NO: 403206 - DNA, 1000 bp, Homo Sapiens; identical to SEQ ID NO: 118344

SEQ ID NO: 403207 - DNA, 955 bp, Homo Sapiens
tgcagactgatatggattcaccactgctaacacctcctggttggaactacaggaatagaactggaaagggaaaaaaggcagcattcaccacatcccaatcctgaatccaagagtctaagatagtcccccactcctatctcaggcttagaggattagattaatctcctggagggaagactcttccttgaaacatttttttttatctgcctgtagctattgggataattcgggaaatccacagggacagttcaagtcatctttgtcctctactttctgttgcactctcagccttgttctctttttagaaactgcatggtaactattatatagctaaagaagagcattctgacctctgccctgggacttcctggatcctcctcttcttataaatacaagggcagagctggtatcccggggagccaggaagcagtgagcccaggagtcctcggccagccctgcctgcccaccaggaggatgaaggtctccgtggctgccctctcctgcctcatgcttgttgctgtccttggatcccaggcccagttcataaatgatgcagagacagagttaatgatgtcaaagcttccactggaaaatccagtagttctgaacagctttcactttgctgctgactgctgcacctcctacatctcacaaagcatcccgtgttcactcatgaaaagttattttgaaacgagcagcgagtgctccaagccaggtgtcatattcctcaccaagaaggggcggcaagtctgtgccaaacccagtggtccgggagttcaggattgcatgaaaaagctgaagccctactcaatataataataaagagacaaaagaggccagccacccacctccaacacctcctgtgagtttcttggtctgaaatacttaaaaaatatatatattgttgtgtctggtaatgaaagtaatgcatctaataaagagtattcaatttttt

SEQ ID NO: 403208 - DNA, 1000 bp, Homo Sapiens
tgcccctggctctgaccgaaacagcgctgggtccaccccatgtcaccggatcctgggtggtctgcaggcagggctgactctaggtgcccttggaggccagccagtgacctgaggaagcgtgaaggccgagaagcaagaaagaaacccgacagagggaagaaaagagctttcttcccgaaccccaaggagggagatggatcaatcaaacccggcggtcccctccgccaggcgagatggggtggggtggagaactcctagggtggctgggtccaggggatgggaggttgtgggcattgatggggaaggaggctggcttgtcccctcctcactcccttcccataagctatagacccgaggaaactcagagtcggaacggagaaaggtggactggaaggggcccgtgggagtcatctcaaccatcccctccgtggcatcaccttaggcagggaagtgtaagaaacacactgaggcagggaagtccccaggccccaggaagccgtgccctgcccccgtgaggatgtcactcagatggaaccgcaggaagctgctccgtgcttgtttgctcacctggggtgtgggaggcccgtccggcagttctgggtgctccctaccacctccccagcctttgatcaggtggggagtcagggacccctgcccttgtcccactcaagccaagcagccaagctccttgggaggccccactggggaaataacagctgtggctcacgtgagagtgtcttcacggcaggacaacgaggaagccctaagacgtcccttttttctctgagtatctcctcgcaagctgggtaatcgatgggggagtctgaagcagatgcaaagaggcaagaggctggattttgaattttctttttaataaaaaggcacctataaaacaggtcaatacagtacaggcagcacagagacccccggaacaagcctaaaaattgtttcaaaataaaaaccaagaagatgtcttcaaaaaaaaaaaaaaaaaaaaaaa

SEQ ID NO: 403209 - DNA, 1000 bp, Homo Sapiens; identical to SEQ ID NO: 291709

SEQ ID NO: 403210 - DNA, 1000 bp, Homo Sapiens; identical to SEQ ID NO: 291710

SEQ ID NO: 403211 - DNA, 1000 bp, Homo Sapiens; identical to SEQ ID NO: 291711

SEQ ID NO: 403212 - DNA, 1000 bp, Homo Sapiens; identical to SEQ ID NO: 291712

SEQ ID NO: 403213 - DNA, 1000 bp, Homo Sapiens; identical to SEQ ID NO: 223713

SEQ ID NO: 403214 - DNA, 1000 bp, Homo Sapiens
ccccagaggtataagtttcaaaccagtcttagcttttcaagttgttgatcagacccttctcttaacagagagataccacagtcactagagataccctgaggttcatgtcatcccaaaacccacagcactcagaagctaacctctacacccactcacactgtgagtattcagttcggtttcattttactgaaaacctgtgaaacctctttttataaaaatcaggcaattaaatcccttttcatcacacaattattgagccttgttccccatggctcaccaaaatgtgctcaattttgtgagagaaagactgtactccataactgactattcacgtcccatctttttggctcttccccaaagcagaatccttactgttggttgacagtaatctctttttaaaaagtaactctcagctttttccttagcaccagagcctttcggctccgggagacgagagggtcattacatacttttttttttttctggaaataggggcattgtgactttatagcctaaactggagctgtctgaacctgtggtcaggctcaagagccagcagggggagcagcaaactcaaaaaaaaaaacaaattaaattaaattaaattaaattaaatagaagcaaaataaaagcagctttaatttcaagtgcatgtaccacgctatgtatgacaatatatcccactcactagcattatttaaaagtttcacattatttccatggatcaattagaaccacaacctgtccaatttcaacgtatctttcatttcttctgtatgctcttttctattattcattatgtgtgtttgtgtgtaacaaagaatgtttggaaaatgctggacacatttttacccttcattcccatggtctgtaaaaaaggaaagtgtaaaatcaatctgtaatgtcagacaataaagataatgtattacattattttgtattttgtgaaaaaaattactttactaaattaaagtcaaattttaacagaagacagtccccc

SEQ ID NO: 403215 - DNA, 1000 bp, Homo Sapiens; identical to SEQ ID NO: 223714

SEQ ID NO: 403216 - DNA, 1000 bp, Homo Sapiens; identical to SEQ ID NO: 403214

SEQ ID NO: 403217 - DNA, 1000 bp, Homo Sapiens; identical to SEQ ID NO: 291715

SEQ ID NO: 403218 - DNA, 1000 bp, Homo Sapiens; identical to SEQ ID NO: 223715

SEQ ID NO: 403219 - DNA, 1000 bp, Homo Sapiens; identical to SEQ ID NO: 403201

SEQ ID NO: 403220 - DNA, 1000 bp, Homo Sapiens; identical to SEQ ID NO: 118347

SEQ ID NO: 403221 - DNA, 1000 bp, Homo Sapiens; identical to SEQ ID NO: 291717

SEQ ID NO: 403222 - DNA, 1000 bp, Homo Sapiens
agcagagggcgctggggagcggcatgtcaccatcactggctctccggtctccatcgccctggcccagtacctcatcactgcctgtctagagacggccaagtctacctctggggggacgcccagctcggcccccgcagacctgcctgcccccttctcgccacccctgacggccctgcccacagctccccctggcctgctgggcacaccctatgccatctccctctccaacttcatcggcctcaagcccatgcccttcttggctttaccacctgcttccccagggccgccgccgggcttggcggcctacactgccaagatggcagcagctaatgggagcaagaaggctgagcggcagaaattctccccctactgaggccagctgaggtacaggcaggggcaggcaggaccaccagcagggggctgcctctgcaccctacccgcccaaggagactccaccctggggtcccaaacgccgctaacgcccagacgcatggatgcaccccctaccctgcctccatctatgggagttctttctctcagagtgggggcagtttctggcccaggggtctgagctgcggcagccccagggcagggggccctacctcctcagctctgtgcttggatacagggagcagccaggagactccctagtgcccccaccatggcgggtgtcactcacgcactccccatcccttagggcttcctggcctactgcatccttgtgggagtcagggaggagggcccgttgggtagctggggccaggcttctctccccaccacctgcagatttcttgctgcttccactgatacccttttgactggaatgaactggctgggcttgtcagggggcaccccaaagagggggcactgccaggtagctgggggagtggcatggggcaggggcccagttctcagcagcagacactctgtacagttttttcaatccctgtttttgaataaatattctcagcgaccaaaaaaaaaaaaaaaaaaaaaaaaa

SEQ ID NO: 403223 - DNA, 1000 bp, Homo Sapiens
ggcacatatcaagatcgggaaccaagcagagggcgctggggagcggcatgtcaccatcactggctctccggtctccatcgccctggcccagtacctcatcactgcctgtctagagacggccaagtctacctctggggggacgcccagctcggcccccgcagacctgcctgcccccttctcgccacccctgacggccctgcccacagctccccctggcctgctgggcacaccctatgccatctccctctccaacttcatcggcctcaagcccatgcccttcttggctttaccacctgcttccccagggccgccgccgggcttggcggcctacactgccaagatggcagcagctaatgggagcaagaaggctgagcggcagaaattctccccctactgaggccagctgaggtacaggcaggggcaggcaggaccaccagcagggggctgcctctgcaccctacccgcccaaggagactccaccctggggtcccaaacgccgctaacgcccagacgcatggatgcaccccctaccctgcctccatctatgggagttctttctctcagagtgggggcagtttctggcccaggggtctgagctgcggcagccccagggcagggggccctacctcctcagctctgtgcttggatacagggagcagccaggagactccctagtgcccccaccatggcgggtgtcactcacgcactccccatcccttagggcttcctggcctactgcatccttgtgggagtcagggaggagggcccgttgggtagctggggccaggcttctctccccaccacctgcagatttcttgctgcttccactgatacccttttgactggaatgaactggctgggcttgtcagggggcaccccaaagagggggcactgccaggtagctgggggagtggcatggggcaggggcccagttctcagcagcagacactctgtacagttttttcaatccctgtttttgaataaatattctcagcgacca

SEQ ID NO: 403224 - DNA, 1000 bp, Homo Sapiens
cacgactcagtatccatgctcttgaccttgtagagaacacgcgtatttacagccagtgggagatgttagactcatggtgtgttacacaatggtttttaaattttgtaatgaattcctagaattaaaccagattggagcaattacgggttgaccttatgagaaactgcatgtgggctatgggaggggttggtccctggtcatgtgccccttcgcagctgaagtggagagggtgtcatctagcgcaattgaaggatcatctgaaggggcaaattcttttgaattgttacatcatgctggaacctgcaaaaaatactttttctaatgaggagagaaaatatatgtatttttatataatatctaaagttatatttcagatgtaatgttttctttgcaaagtattgtaaattatatttgtgctatagtatttgattcaaaatatttaaaaatgtcttgctgttgacatatttaatgttttaaatgtacagacatatttaactggtgcactttgtaaattccctggggaaaacttgcagctaaggaggggaaaaaaatgttgtttcctaatatcaaatgcagtatatttcttcgttctttttaagttaatagattttttcagacttgtcaagcctgtgcaaaaaaattaaaatggatgccttgaataataagcaggatgttggccaccaggtgcctttcaaatttagaaactaattgactttagaaagctgacattgccaaaaaggatacataatgggccactgaaatctgtcaagagtagttatataattgttgaacaggtgtttttccacaagtgccgcaaattgtaccttttttgttttttcaaaatagaaaagttattagtggtttatcagcaaaaaagtccaattttaatttagtaaatgttatcttatactgtacaataaaaacattgcctttgaatgttaattttttggtacaaaaataaatttatatgaaaacctgaaaaaaaaaaaaaaaaaaaaaa

SEQ ID NO: 403225 - DNA, 1000 bp, Homo Sapiens; identical to SEQ ID NO: 291718

SEQ ID NO: 403226 - DNA, 1000 bp, Homo Sapiens; identical to SEQ ID NO: 291719

SEQ ID NO: 403227 - DNA, 1000 bp, Homo Sapiens; identical to SEQ ID NO: 223717

SEQ ID NO: 403228 - DNA, 1000 bp, Homo Sapiens; identical to SEQ ID NO: 118349

SEQ ID NO: 403229 - DNA, 1000 bp, Homo Sapiens; identical to SEQ ID NO: 118350

SEQ ID NO: 403230 - DNA, 1000 bp, Homo Sapiens; identical to SEQ ID NO: 291723

SEQ ID NO: 403231 - DNA, 1000 bp, Homo Sapiens; identical to SEQ ID NO: 291724

SEQ ID NO: 403232 - DNA, 1000 bp, Homo Sapiens; identical to SEQ ID NO: 291725

SEQ ID NO: 403233 - DNA, 1000 bp, Homo Sapiens
gcgcctggccgccatccccgcggcgctggcgcgggcggcgcgcacctggaacgccctggacgccggcctctacgaccacttcaacgccaccttctggcgccacgtggcgcgcgcgggccgcgcgtgcgtggagcgcgaggcgcgcgagctgcgcgaggcccgccagcgcctactgcggcgctgcttcggggacgagccactgctgcggcctgccgcgcagatccgcaccaagcagctgcagccatggcagcccagccgcaaggtggacattatgggctatgacctgcccggcggcggcgccggcccggccaccgaggcctgcctcaagctggccatgcccgaggtccagtactcgaactacctgttgcgcaagcagaagcgccggggcggtgcgcgggctcggcccgagcccgtcctggacaatcccccgcctcggcccatccgagtgctgcctcgcggccctcaaggtccctgagctccgcaggcctccaggagtatgggtcctgccctgccctcccaggagtccagccaggggctgcctccatgtcctgcccccatgagagccctttcttttcaatgggcttgagtccctcgctgaactttggggtacgcctccctatctgagcccccgctcccgatcgtgggctgaaccttgccttcgggcacggcgctgataggctggatccagcgctgggccaccctctccttcccagctggttggtgattttgacaagaggcctgagggctgtccagaactgctcaccctgcctttttctgggggctgagcccccacaacctgtcttttccaagtggataagcccaggccccatggagagaggctcagccctagggaaaggctgctcttgctctccctcccagggcttgaggctccctatacttttctgtcttccaggttctaccctccccacagacctaagctgctcccagtctcccagaaccaagagttcttgggttgggatttttgtttggttggtttttc

SEQ ID NO: 403234 - DNA, 1000 bp, Homo Sapiens; identical to SEQ ID NO: 118351

SEQ ID NO: 403235 - DNA, 1000 bp, Homo Sapiens
aatgccaagctgggcctggacatcgagatcgccacctacaggcgcctgctggagggcgaggagagccggctctgtgaaggtgttggaccagtaaacatatccgtcagcagctcccggggcggcctggtgtgcgggcctgagcctttggttgccggctccaccctctcccgcggcggggtcaccttctcaggtagcagcagcgtctgtgccaccagtggggtcctggcttcctgtggccccagcctgggtggagcccgggtcgccccggccactggggacctgctgagcactggcacaaggagtggctccatgctcatcagcgaggcctgtgtccccagcgtcccctgccccctgcccacccaggggggcttcagcagctgcagcggcggccgcagctccagcgtccgctttgtgtccaccaccacctcctgccggaccaagtactgagagcccagccccagacagctgctgcccagagaagaaccagctccacggctcctgcttctgcccccagggttcgtgggctctgggcttgacggtctccagctcccctttctgccaggaagccaccccttagcactcccccgattattctgcctggccccatgtcctcttggaggatttttctgccatgtagatgctccattagcagttccagctaagctggcttctccctgcctcccaatttctgtcctttggatcactcctctccctaaaccccgagatggcttttctcccagtggcttctctccggctgtttctcttcctgggttgttggtgtaactccagcatgcaagtccacgaggtggggtgcaggcggacaggcgggctttgcaatgatccccgtactcctgcccctgctcgtggtgtgaggcccagccctgtccactgcagggttgtgtctgcaagctccaaggaggcctgggggttgggtggggtgggctgcctgtgtgcactactctttgtgttcctgggttttcaataaacttgccaagctcac

SEQ ID NO: 403236 - DNA, 1000 bp, Homo Sapiens; identical to SEQ ID NO: 284613

SEQ ID NO: 403237 - DNA, 1000 bp, Homo Sapiens; identical to SEQ ID NO: 291727

SEQ ID NO: 403238 - DNA, 1000 bp, Homo Sapiens; identical to SEQ ID NO: 291728

SEQ ID NO: 403239 - DNA, 1000 bp, Homo Sapiens
atgtgaaggggagccagggaacgtttctgaactaagcaaggacaaattcagagaccctgagctttagaaagacaagtgggtggctttgatggacggtttggaggaggcaagactggaggtgggaaaattagcaaggaggtctgtgaaataatccaggagaacaatgatgaggcctggattggattcggtaaaaagagggggttgctagaaggaaaaacaggtgtgacctgatcctgccccttccttcttgcctgtagctcctgctggaggaagaggattccagcctgttggcccctgtcttcgacccagcccagccccctctgttgctctgcatattggccgtctggggtccatctccctcctgagctagaaacccagagatggaggctgtcttgctatggcagggaggtgacagcctgctggcactgtatatttagtgtcttacttaaggatttatgcatggaatttaatgtagtacaagcttcgggcttttttgtttgtttgtttgtttgtttgtttaagctttcaggtgcttcattagctttcagttcctttggtagtgtgggcatttccttggctgacagtggatattcttgtacccttcttgggtcctgggatctcttgaaatccccaataaagagagagttgtgctatttaagctgaccagtatctataaacgtgtttgcatgagtttacatcccaggattccatgattctgtaaatgcctatgcattcatgtctgtctccatgcatgtgaaaacaggagagtgttttcattttgtgtctaggtttgtgtgagtaagcaagaaataaacctttgttgttgtaagccactgagatttggagagtgttaccacagcctaacctagtctatcctgactgacagaaaggacttgttcatttcgcttctcaaagtgaaaaatctgttatccaatagctaccatagatgaaaacaaacttggatttttttctttgtccaaataaaaaaaatgatgtaaag

SEQ ID NO: 403240 - DNA, 1000 bp, Homo Sapiens
tttggccaatgaggcagggctcatgggattgcttttgattcggaggtccgggagggagtggatgattgggcttcctgaggaagtgagaacgcctcagggtcttgcctgctgtgagtgccttgaagagggagcagcgggcacgatcaaagagacacctggctcaaggaccaataaggagtatggctgcccctcccaaagctcccatccgtgtcaggaatttgaccatcagagcaggagccctcactgggaaggagaacaacatgctgcagcccgagacccacatcttcacagcccccgaggaggtccccaaagtctctgaccaggctttggtttctgcccactcagagtggcagcggaagctggaggccgctgaggctctgctgactctgagaaactctgcccaggcccctcctgactccatctccctgcaccagccttgcaacccaccagctcctgctggagataaaggattccagcctcccagcccctctctccgccccaggccagccagctccatctcgctgcctattggacatctgggatgcatctccctcttgagctaggaacccagaggaggaggcctcaatagagcactgcctatttggtatccagtttctgaatgtgcaaaatggttaacgtccaaaacgcttaacgtctttttttaaagccttcaggtgttttataagctttttattatatggggcaactccttggctgagggtggatattcttgtacctctgtcccttactcttttggatgctggggcctttttctgtctcataaagacaggattgtgcaatctaagttgatcagtctctcagtggggttctgtgtgagttcatatgccagagtttttattcgtcttgtgattgctgacatacctgtgcactcatgtgtatacccctgcatgtggaaacatgaagatgttttcactttgtgtctaggtttatgtacgtgaacaaataataaaccgttgttgttataaaaaaaaaaaaaaaa

SEQ ID NO: 403241 - DNA, 1000 bp, Homo Sapiens
cagaaggcatggcggggcaccttggcgaggtggcgctgccggaggctgagggctatctacaccatcatgcgctggttccggagacacaaggtgcgggctcacctggctgagctgcagcggcgattccaggctgcaaggcagccgccactctacgggcgtgaccttgtgtggccgctgccccctgctgtgctgcagcccttccaggacacctgccacgcactcttctgcaggtggcgggcccggcagctggtgaagaacatccccccttcagacatgccccagatcaaggccaaggtggccgccatgggggccctgcaagggcttcgtcaggactggggctgccgacgggcctgggcccgagactacctgtcctctgccactgacaatcccacagcatcaagcctgtttgctcagcgactaaagacacttcgggacaaagatggcttcggggctgtgctcttttcaagccatgtccgcaaggtgaaccgcttccacaagatccggaaccgggccctcctgctcacagaccagcacctctacaagctggaccctgaccggcagtaccgggtgatgcgggccgtgccccttgaggcggtgacggggctgagcgtgaccagcggaggagaccagctggtggtgctgcacgcccgcggccaggacgacctcgtggtgtgcctgcaccgctcccggccgccattggacaaccgcgttggggagctggtgggcgtgctggccgcacactgccagggggagggccgcaccctggaggttcgcgtctccgactgcatcccactaagccatcgcggggtccggcgcctcatctccgtggagcccaggccggagcagccagagcccgatttccgctgcgctcgcggctccttcaccctgctctggcccagccgctgagcgcccgcacccgccgcaccccgaggccgccaattgtccgccccgccagcgctgcaaataaaccttctgagtcagccaaaaaaaaaaaaaaaaa

SEQ ID NO: 403242 - DNA, 1000 bp, Homo Sapiens
cttttgaaaaaccttttgtttattagcaccaatttcttgccactaagctatttgttttattatacatcctttaattaaaaactatatatgtaacttcttagatattagcaaatgtctctgctaccatttccttaaggtgttgagctttaactctatgctgactcagtgagacacagtaggtagtatggttgtggacctatttgttttaacattgtaaaattttgagtcagattttaatattgtaaaatcttgggtcaaataattcaaagccttaatgcagatgcactaaaacaaagaaatggtaaatgaattgtttgcatttaaaaaaaaaaactcttaagaaaactgtactaaatctgaatcatgttttgagcttgtttgcagtacttttaaacattattcactactgtttttgaagtgagaaagtatcagccatttagcatttaagttggggtatttagagcctgtaatctaaatgctggctcaaatttattccccagctacttcttataccactattcttttaatgtttgcataatcataagcacctcaacacttgaatacataatctaaaaattatatagtaaagctggtagccttgaaaatgtcagtgtgatatctattatgtagataaatatatatagtggcctttcaggactgtcacagtaacactttatttacagagctaatgtttgtcctaaattttcaggaccctagaggagagctttatacaattaccgatgtgaatttctctaaagtgtatatttttgtgtccagttatattatttaaaaaagtgttactttgtaaaaattgtatataaagaactgtatagtttacactgttttcatcttgtgtgtggttattgcttaatgctttttaaacttggaacactcactatggttaaataaggtcttaaaagaaatgtaaatattctgttaataaagttaaatattttaatgattttttttttaaaaaaaaaaaaaaaaaaaaaaaaaaaaa

SEQ ID NO: 403243 - DNA, 1000 bp, Homo Sapiens
agagagaaccaaaaggcatcctcagacacgttaaaaacttagcagaacttgaaaaatcagtagctaacatgtacagtcaaatagaaaaaaactatctacgcacaaatgtttcagaacttcaaactatgtgcccttcagaagtaacaaatatggaaatcacatctgaacaaaacaaggggagtttgaacaatattgtcgagggaactgaaaaacaatctcacagtcaatctacttcactgtaatgttgcttttcttattttagtcgggcaaacctcttgttgatcatagtcttcaagttgaacatcaaatttgaacgtcaaagaagactctattattttaccccaaattcaatgaaatgcagttttttttctcgtttttaatttaaaaagatattaacctcatcactactaactcactcatataatagatttaccttactttttaaaaactacaaagtagcataatttgttctacatttatttgaaaagtaagtaattttaatctcttttttagtgggaatatgtgggcatgaaaattagatacccaacttaaaccaaaggcatgtctatcatgtggatgcagtaacatttacatttagtttttgatcgtagttttatatgaatgttccaagaaaaaagcagactgttacaaataagttaaaactgatatgattgataggttctgttttttcttgaagcctatgtatttggtaagaagaaatactaccgaagtaaaatataatgtacctagattgtaggagatgacagacataaggtatttcaaaataaatctcaggtgctataacatgtagtcatctgttttctgataagaacatcttttactctgacttgcttttatcttagtagtatgcttatggatttagtagtatgcttatggatttgataaatcttatactttttcagttgctgtcttattctctttatttctcattgtgctttcccttcccttctttataatgaaaataaatcttgagtcgttg

SEQ ID NO: 403244 - DNA, 1000 bp, Homo Sapiens
tgctgccagcccacctgctgccgccccagatgctgcatctccagctgctgtcgccccagctgctgtgtgtccagctgctgcaagccccagtgctgccagtctatgtgctgccagcccacttgctgccgccccagatgctgcatctccagctgctgtcgccccagctgctgtgtgtccagctgctgcagaccccagtgctgccagtctgtgtgctgccagcccacctgctgccaccccagctgcagcatctccagctgctgccgcccctcttgctgtgaatccagctgctgccgcccctgctgctgcctgcgtccagtctgtggcggagtctcctgccacaccacttgctatcgcccaacctgtgtcatctccagctgcccccgccccttgtgctgtgcctcctcttgctgctgagcccactgccctggctcatctctcccttcactgcaggcccacagttgtagaccattcttctgtgctgactattaggacacatggagtgggattgatgtcattcagcagggtggacttcatgtttccaatgagcccatcaccatcccactgactctgtgagaacattctggttcattttaaactccctcccttgctttctttctcttccagtcatggcaccaaatatgaaataatttgtaatccactagctaagaaattattccaatcctctaaattcctcattttttaaatcgttttgagcctacagaatatccttcccagtgaggtacacattatctccatttcaaacatattatttgtctgtcagcctttcagtcattcttttctcttggaaaggtaggaggctgcccctcccatgctctcctgctttctccctgttctctctttgtctctgtttgttcaagtttgccagaatttttctattttattggttctttatctttattgtgttcacaaaatatattgtattaaacttttcatttagaaaaaaaaaaaaaaaaaaaaaaaaaaaaaaaaaaaaaaaaaa

SEQ ID NO: 403245 - DNA, 1000 bp, Homo Sapiens; identical to SEQ ID NO: 291729

SEQ ID NO: 403246 - DNA, 1000 bp, Homo Sapiens; identical to SEQ ID NO: 223720

SEQ ID NO: 403247 - DNA, 1000 bp, Homo Sapiens
gcttcatgagccggcaattgcccttctttccagtccccagacccagtcaagattacagatagatgcgttcatcgcgcgcaggtgctggggaagccagtgggacatcactggctacattcaccaacaggattttccaactgcagtatttatcggtttttcaaacgaattcaacatctgtattcctcacccatttactgagtggctacaatgtgtaaggaaatattctcagtcatggggagttagaaaaggtcaaaggcatataagatatggaatgtgctctgagagaactcatcatctatccagaacctactcatcacttttggaaagagaagagaaactagcattctatggagtacttaccatgtgccagatttggagtgagacatagtacgagtgttactcatttacgtctcatggccaacctccaatgtggacatttagcatctccatcttacaagtgagaaatttcactgtagagaggttaaatatcatgtgtcattgattctgtgacatgtattattttcacatttgaacatctgaaatatagatatgtctaaaagggcttttctttcttggtagtaagataactgtaggtctttgcagtagtgtcttagattatgtgaaatatggtattttggcaagtgtacatggctaagaacaagtggaatcagaattcaacttaagtttgcttgactccaaagcttatgtgttttccagtataatgtgctgcagtatcaatggtctgtatgaacaaaggccatatcatttttattgacaaagtatagaaacggggaaatggtgactgaactggaacttgcatcatctaattccataactgaggagacaatagcctggggactgcatgtatcccacaggatgttaaaaaattgagaaaatgttatttcatgatcttcacttctctgttgattataacttatttttgaagaggctaaaataaatggcaaactcttgtatggataaaaaaaaaaaaaaaaaaaaa

SEQ ID NO: 403248 - DNA, 1000 bp, Homo Sapiens; identical to SEQ ID NO: 223721

SEQ ID NO: 403249 - DNA, 1000 bp, Homo Sapiens; identical to SEQ ID NO: 223722

SEQ ID NO: 403250 - DNA, 1000 bp, Homo Sapiens; identical to SEQ ID NO: 118352

SEQ ID NO: 403251 - DNA, 923 bp, Homo Sapiens; identical to SEQ ID NO: 291734

SEQ ID NO: 403252 - DNA, 1000 bp, Homo Sapiens; identical to SEQ ID NO: 291735

SEQ ID NO: 403253 - DNA, 1000 bp, Homo Sapiens
acagctggttgtgatggcaggaggccctcccaacaccaaggcggagatggaaatgtccctggcagaagaactgaatcatggacgccaaggggaaaaccaagagcacctggtgatagcagaaatgatggagcttggatctcggtcccggggtgcctcccagaagaagcagaagttggaacaaaaagctgctggctctgcttcagccaaacgagtttggaatatgactgccacccgacccaagaaaatggggtcccagctgccaaagcccagaatgctgagagaatcaggccatggggatgcccatctccaggagtacgctggcaatttccaaggcatacgtttccattatgatcgcaacccagggacagatgcagtggcgcagactagcctggaagagttcaatgtactggagatggaagtcatgagaagacagctgtatgcagtcaaccggcgtctgcgcgccctggaggaacagggcgccacctggcgccacagggagaccctgatcatcgccgtgctggtgtcggccagcattgccaacctgtggctgtggatgaaccagtgatcgccccagcgcggcctccgtattggagccctccctgcttccccttctttctttcctctttccccaggccgccactgcccttgcccctttcatctcccagcagccctcaggagcgtcaggatcattttcaactctggttaggcctcctacctggggaggccaggtcactgcactgggaggtcctggctgctgcgaagctggaggaggactgcgtgggctgagatgccaccctttgaagggtgaacagcatggcggcatctgggccccacagtaacacctagtggcaaccttgccttcctgacctcagcggcccttctgttccatcctctgtgggcaggggtgtggctttgttttcctccctcgtttgcttccacctcgtgcacagcgctctgcacagacaacacgctcaataaaagttcagccatagcagcaaaa

SEQ ID NO: 403254 - DNA, 1000 bp, Homo Sapiens; identical to SEQ ID NO: 118353

SEQ ID NO: 403255 - DNA, 1000 bp, Homo Sapiens; identical to SEQ ID NO: 291738

SEQ ID NO: 403256 - DNA, 1000 bp, Homo Sapiens; identical to SEQ ID NO: 118355

SEQ ID NO: 403257 - DNA, 1000 bp, Homo Sapiens
aaccagtgtctgttcctgacaacttgctgaaaatatgcaaggccaagccagtgatatttaaaggccatgggaacttcccttacctctgtgggaacctgaatgacgtcgtggtcagccccctcttgtacacgtgctaccagaattcccagtctgtctcacgggcatacgagcagtacggcgcctctgccatccagcccatctccgaggagatgcagctcctgcttaccgtctactacctggtccagctggcacatcaaatacgaaatccggacgtataaaccagacaattcataaaagagaaaataccagaaggaaacaaatattgaaaagtattcagtctcactcatcatcaaagacatgcaaatcacaaatcaagtcatctttttctgaattaataacccaaatgatggtacccagtggtgcttaggtgcggtaaaaccagcgcttgtccgatgcaccgttcgcgtggtaaactgacgcattcaggctcttgggaagcaagctgatgatatgtagtagctggttctgtaaatccacctttgagaatttaggcgaaggaagtaacgttctatacgtcaagatgtgcattgcagagggatttataaaggtgaatatttggaagaaataagagaatccacaatagagaccttgctaagtaaacggtggtgctcacgtatgatgggacattatggacacactaacagcactctttatgttggctgaaaatggcactgaaactgatgatagggtcatggttaaggaaagaatgcaagacccaaagtttatactgacaatcattgcagctatttgtaaggacagttttaatactaattccagcaatacatgtttttattccctgtcctggagtaggagaaagcctatattcccaggctgaatgttctacacatttaccactgtatatgcacatagggacagtgtaacctgtctataccaccgtagttccagtcctaactttctgaattctgtttaaagaccttct

SEQ ID NO: 403258 - DNA, 1000 bp, Homo Sapiens; identical to SEQ ID NO: 118348

SEQ ID NO: 403259 - DNA, 1000 bp, Homo Sapiens; identical to SEQ ID NO: 291742

SEQ ID NO: 403260 - DNA, 1000 bp, Homo Sapiens; identical to SEQ ID NO: 291743

SEQ ID NO: 403261 - DNA, 1000 bp, Homo Sapiens; identical to SEQ ID NO: 291744

SEQ ID NO: 403262 - DNA, 1000 bp, Homo Sapiens; identical to SEQ ID NO: 223725

SEQ ID NO: 403263 - DNA, 1000 bp, Homo Sapiens; identical to SEQ ID NO: 291746

SEQ ID NO: 403264 - DNA, 1000 bp, Homo Sapiens; identical to SEQ ID NO: 291747

SEQ ID NO: 403265 - DNA, 1000 bp, Homo Sapiens
tatagccaaggtgggacactactggagggagctagaagggatcagccagccatgcctccagttcaggtacttggcattgctaagctcagaacaggacttgccagtgtctagatgaaaaagaggagagatctcaagagggataaccaattggctggcaaagtaacaaatgaaaagtaacctgactctattgacctgcttaaccctgcatgggggggaaggatggaaaggagcagctgtttgctttgaaacggtggaacagttttgcagccttagaaaatggcatgtaacatacctaaccaaagacagcggactctgtcaacaacaggagaagctctatacgaaattcttggtctgcataagggagcatcaaatgaagaaattaagaaaacctacagaaaattggccctgaaacaccatccagacaagaatccagatgatccagctgctactgagaagtttaaagaaatcaacaacgcccacgcaatacttaccgacatttcaaagagaagcatatacgacaagtacggatcgctgggactctacgtggccgagcagtttggagacgaaaacgttaacacctacttcatgctgtcgagctggtgggcaaaggccctgtttgtcatcgttggcctcttgacgggctgctacttttgctgctgcctgtgctgctgctgcaactgctgctgtggacactgccggcccgagtcatcagtgccagaagaggacttctatgtgtccccagaggatctggaggagcagatcaagtctgacatggaaaaagatgtggactttccagtttttctccagcctacaaatgcaaatgagaaaacacagctaatcaaagaaggatctcgaagttattgcacagactcttgatattgagccctcagagagtccacagtccctcctctcagttcagtcttgtctccagatggtcgtaggggagcgtgtggggcataaagtgctgtgaacttttaaaaaaaagaaaaaaaaaaaaaaa

SEQ ID NO: 403266 - DNA, 1000 bp, Homo Sapiens; identical to SEQ ID NO: 223726

SEQ ID NO: 403267 - DNA, 1000 bp, Homo Sapiens; identical to SEQ ID NO: 118356

SEQ ID NO: 403268 - DNA, 1000 bp, Homo Sapiens; identical to SEQ ID NO: 291750

SEQ ID NO: 403269 - DNA, 1000 bp, Homo Sapiens; identical to SEQ ID NO: 291751

SEQ ID NO: 403270 - DNA, 1000 bp, Homo Sapiens; identical to SEQ ID NO: 291752

SEQ ID NO: 403271 - DNA, 1000 bp, Homo Sapiens; identical to SEQ ID NO: 291753

SEQ ID NO: 403272 - DNA, 1000 bp, Homo Sapiens; identical to SEQ ID NO: 291754

SEQ ID NO: 403273 - DNA, 1000 bp, Homo Sapiens; identical to SEQ ID NO: 291755

SEQ ID NO: 403274 - DNA, 1000 bp, Homo Sapiens
ctcctgtgcaagcaaagcaggagccccagggcagggcctcgcacctccaggcccggtcccgctcccaggagccagatacacatgccgtacaccaccgcaggtcacaggtgctggtggaacacgtcgtgccagcctcggagcctgctgcccgggccctggacacgcagccccggccgaaggggccggagaagcagttcctcaagtcccccaagggctccgggaagccgcctggggtgccagccagcagcaagtccgggaaagccttcagctactacctgccggccgtcctgccgccccaggcccctcaggacggccaccacctcccgcagcccccaccgccaccctacggccacaagcggtaccgccaaaagggcagggagggccactcgccactcaaggccccacacgctcagcctgccacagtggagcacgaggtggtgcgggacctgccgcccacgccagcaggagagggctacgcggtgccagtgatccagcggcacgagcaccaccaccaccacgagcaccaccaccaccaccaccaccaccacttccacccgtcctagcgccactgccaagcacacctcgctcccagcacaccacggcccgcgacctcagggcagggagcagagcagctgccggctgtgtgcccatggggagcccagcccccaccccccacctccgacagcaaacagcaactgactgcaggtgctggcatgatggaggtggtgcaccttggacacgtggacaaggcccaggcgccctctgctcttctgccctcgatgccacatggcggtgaacacatctgaagccactatgtttcctggctctaaggctcgtctgtgtaacccataaaacctgctttgattccaaaatgaggccctggagtgcgcaaggagtgcccggatgcttggggtgggtgttcctcccggggcttcaaggggtgactgctgtaggctgtcccagtgcgaggccgggagcgaatggaaaagctgaggctttg

SEQ ID NO: 403275 - DNA, 1000 bp, Homo Sapiens; identical to SEQ ID NO: 118358

SEQ ID NO: 403276 - DNA, 1000 bp, Homo Sapiens
tgcctttccacgtaaaaaggatgaagctgatatgagcaattataattcctccatcaaatccaatgtccctgctgatgaggctgtccaggtcactgattccattattcctgaggctgaaatccctcctgctcctgaagaaagcttcactactattccagacataactgcccttgaagaagagaaaataaccgaaattgacctaagtgttttagaagatgacaccagtgctgtggctacattaactgactctgatgagaagtttatcactgtgtttgaactcactacctctgctgaaaaagacaaagataaacgggaagatactctgctaactgatgaagaaactaccgagggagccagtattgggatggagagagatactgcaaatgaagcagagacccattctgttttgcttactgctgttgaatccagatatgacttcgttgtccctgcatcaatagctacaaacctagtggaagaatcatctacagaagaagatttgtctgaaactgataatacagagactgtacctaagatcactgagccattttctggaactacctctgtattagataccccagactataaggaagacacctccacaactgaaacggatatctttgaactactgaaagaagaacccgatgagttcatgatttaaaagcaacaaaagggataccatgtagaattgtgcaatagtctagccagctagccttaacatctaagaaatttttccaacaagcaaaaacctttagaaatgaaagaatgtgggcatttaaggtcttaaacactgaatatcacactcttcttatgactcttgttagcgattcaaggacataaatcttcattcttttctggcacagactacttaaatgggtctgttttcactttgctcatttttcttcaataaatctttttggcaagcaactgaaaaaaaaaaaaaaaaaaaaaaaaaaaaaaaaaaaaaaaaaaaaaaaaaaaaaaaaaaaaaaaaaaaaaaaaa

SEQ ID NO: 403277 - DNA, 1000 bp, Homo Sapiens; identical to SEQ ID NO: 291757

SEQ ID NO: 403278 - DNA, 1000 bp, Homo Sapiens
aaatagttgacatcatggccaagtggaacagggcaagctcctgtaaactgtcagaacttttatcactggacctacaaggtcctgttagtaatagccccactgaagttcagaagcacaacctatcatatctgttttataactggagcattacgaaaaggacacttaccgtttggctaatctggttcactggaagtttgggattctactcgttttccttgaattctgttaacttaggaggcaatgaatacttaaacctcttcctcctgggtgtagtggaaattcccgcctacaccttcgtgtgcatcgccatggacaaggtcgggaggagaacagtcctggcctactctcttttctgcagtgcactggcctgtggtgtcgttatggtgatcccccagaaacattatattttgggtgtggtgacagctatggttggaaaatttgccatcggggcagcatttggcctcatttatctttatacagctgagctgtatccaaccattgtaagatcgctggctgtgggaagcggcagcatggtgtgtcgcctggccagcatcctggcgccgttctctgtggacctcagcagcatttggatcttcataccacagttgtttgttgggactatggccctcctgagtggagtgttaacactaaagcttccagaaacccttgggaaacggctagcaactacttgggaggaggctgcaaaactggagtcagagaatgaaagcaagtcaagcaaattacttctcacaactaataatagtgggctggaaaaaacggaagcgattacccccagggattctggtcttggtgaataaatgtgccatgcctgctgtctagcacctgaaatattatttaccctaatgcctttgtattagaggaatcttattctcatctcccatatgttgtttgtatgtctttttaataaattttgtaagaaaattttaaagcaaatatgttataaaagaaataaaaactaagatgaaaaaaaaaaaaaaaa

SEQ ID NO: 403279 - DNA, 1000 bp, Homo Sapiens; identical to SEQ ID NO: 291759

SEQ ID NO: 403280 - DNA, 1000 bp, Homo Sapiens; identical to SEQ ID NO: 223728

SEQ ID NO: 403281 - DNA, 1000 bp, Homo Sapiens
ccagctggactgggaggtcaggaagccaggcaaggagagggacagcacaggccacagagggctgcccccaccacacacacccccgcgtctcgggagaaacccaccctcttcagagcctgcactcgctaaggaaggggactcgagaatgggggggcagcttgctgaccctcaactgggggggtgagggagcatcaggaggtccaggcgtggggcaggtccccaccttcctgaaccttcccctgccactccaggcggcccggagagaggagcctcttcgatttgtttcctgtttattcttcttcccgagggaccccaggttccagggaccgactgagccccggacccgctggggcctctggcctgctccccgggaggggcgctctctcccggccatgtctatgcaactctcccggacagaggggccgggctgccagccacccgcccgttggccgccactacctcctccgctgcgcttttgcatgcccgggcgaggaccgaagcacacacctccacgcgcacgggccctggccccctccgctttaagcacacgcctctgccccattgctctgcagccagcttgggggcaggagtcctggactctcagatcctcctctcccctcctcttagccacaaaagaggggggagactggaggcacccctgcagcaggggcacttccctagggctccagaggggtgaatgggcctttgctcagctccaggcccagcgggaagggaggctgcagggatggtgggagggagaggggtagcagaagcaattatggaggcgttgaccctgtaaatagcaacttctgacagcaataattttccatgcatgctaagccttttggccatattttgtatgagcgcttggcgctcctcctccgtcctatcccaactcacccccaaacccccatcccttccccacctccagcagtattacttgtaacgcaattcagggatattaaagggactttggccactcaaaaaaaaaaaaaaaaaa

SEQ ID NO: 403282 - DNA, 1000 bp, Homo Sapiens; identical to SEQ ID NO: 291761

SEQ ID NO: 403283 - DNA, 1000 bp, Homo Sapiens; identical to SEQ ID NO: 118359

SEQ ID NO: 403284 - DNA, 1000 bp, Homo Sapiens; identical to SEQ ID NO: 223730

SEQ ID NO: 403285 - DNA, 1000 bp, Homo Sapiens; identical to SEQ ID NO: 286358

SEQ ID NO: 403286 - DNA, 1000 bp, Homo Sapiens; identical to SEQ ID NO: 223731

SEQ ID NO: 403287 - DNA, 1000 bp, Homo Sapiens; identical to SEQ ID NO: 118360

SEQ ID NO: 403288 - DNA, 1000 bp, Homo Sapiens; identical to SEQ ID NO: 291765

SEQ ID NO: 403289 - DNA, 1000 bp, Homo Sapiens; identical to SEQ ID NO: 118361

SEQ ID NO: 403290 - DNA, 1000 bp, Homo Sapiens
aagtttgaagatgtttatgtcgggatctgtttgaatttattaaaagtgaacattcatattccagaagacacaaatcttttctttctatatagaatccatttggatgtctgtcaactgagacgtgtgattgcagcccatggcttttcttccaaggagatcatcactttttggcaggtcatgctaaggaacaccacatgccattattaacttcacattctacaaaaagcctagaaggacaggatactttgtggaaagtgttaaataaagtaggtactgtggaaaattcatggggaggtcagtgtgctggcttacactgaactgaaactcatgaaaaacccagactggagactggagggttacacttgtgatttattagtcaggcccttcaaagatgatatgtggaggaattaaatataaaggaattggaggtttttgctaaagaaattaataggaccaaacaatttggacatgtcattctgtagactagaatttcttaaaagggtgttactgaattataagctcactaggctgtaaaaacaaaacaatgtagagttttatttattgaacaatgtagtcacttgaaggttttgtgtatatcttatgtggattaccaatttaaaaatatatgtagttctgtgtcaaaaaacttcttcactgaagttatactgaacaaaattttacctgtttttggtcatttataaagtacttcaagatgttgcagtatttcacagttattattatttaaaattacttcaactttgtgtttttaaatgttttgacgatttcaatacaagataaaaaggatagtgaatcattctttacatgcaaacattttccagttacttaactgatcagtttattattgatacatcactccattaatgtaaagtcataggtcattattgcacatcagtaatctcttggactttgttaaatattttactgtggtaatatagagaagaattaaagcaaaaaaaaaaaaaaaaaaaaaaaaaaaaaa

SEQ ID NO: 403291 - DNA, 1000 bp, Homo Sapiens; identical to SEQ ID NO: 223732

SEQ ID NO: 403292 - DNA, 1000 bp, Homo Sapiens; identical to SEQ ID NO: 291766

SEQ ID NO: 403293 - DNA, 1000 bp, Homo Sapiens; identical to SEQ ID NO: 291767

SEQ ID NO: 403294 - DNA, 942 bp, Homo Sapiens
tagaaatccacccagaacctccaccctctgacaccatggtcagctcctgttgtggctctgtcagctctgagcagagctgtggcctggagaactgctgccgccccagctgctgccagaccacctgctgcaggaccacctgctgccgccccagctgctgcaagccccagtgctgccagtctgtgtgctaccagcccacctgctgccaccctagctgctgcatctccagctgctgccacccctattgctgtgaatccagctgctgccgcccctgctgctgccgccccagctgctgccagaccacctgctgcaggaccacctgctgcaggaccacctgctgctgccccagctgctgtgtgtccagctgctgcagaccccagtgctgccagtctgtgtgctgccagcccacttgctgccgtcccagctgctgcatctccagctgctgccacccctcttgctgtgaatccagctgctgccgcccctgctgctgcgtgcgtccagtctgtggccgagtctcctgccacaccacttgctatcgcccaacctgtgtcatctccacctgcccccgccccttgtgctgtgcctcctcttgctgctaatgtctccttgtgatatttgtcatactatgaatgtcttcattagtcatttaaaatgcactgtagccagccagtcactggaaaaatgaacacttccctgccagtttgtctcatgtggcattcagagtggacattcagctcttctaggaaatgacagacaatcacattcattaaaatatgttatgccaggccccaatgcagttatttttagatgagcagtgtcttcattcgaaggggacactaactgtgatgatctcatataatattgttttcatgtattaataaacagccacttccctaaaaaaaaaaaaaaaaaaaaaaaaaaaaaaaaaaaaaaaaaaaaaaaaaa

SEQ ID NO: 403295 - DNA, 1000 bp, Homo Sapiens; identical to SEQ ID NO: 291769

SEQ ID NO: 403296 - DNA, 1000 bp, Homo Sapiens; identical to SEQ ID NO: 223733

SEQ ID NO: 403297 - DNA, 1000 bp, Homo Sapiens; identical to SEQ ID NO: 291770

SEQ ID NO: 403298 - DNA, 1000 bp, Homo Sapiens; identical to SEQ ID NO: 291771

SEQ ID NO: 403299 - DNA, 1000 bp, Homo Sapiens; identical to SEQ ID NO: 223735

SEQ ID NO: 403300 - DNA, 1000 bp, Homo Sapiens
taggttttatccttccttttctttgagagttcgtgaagagggaagccaggattggggacctgatggagagtgagagcatgtgaggggtagtgggatggtggggtaccagccactggaggggtcatccttgcccatcgggaccagaaacctgggagagacttggatgaggagtggttgggctgtgcctgggcctagcacggacatggtctgtcctgacagcactcctcggcaggcatggctggtgcctgaagaccccagatgtgagggcaccaccaagaatttgtggcctaccttgtgagggagagaactgagcatctccagcattctcagccacaaccaaaaaaaaataaaaagggcagccctccttaccactgtggaagtccctcagaggccttggggcatgacccagtgaagatgcaggtttgaccaggaaagcagcgctagtggagggttggagaaggaggtaaaggatgagggttcatcatccctccctgcctaaggaagctaaaagcatggccctgctgcccctccctgcctccacccacagtggagagggctacaaaggaggacaagaccctctcaggctgtcccaagctcccaagagcttccagagctctgacccacagcctccaagtcaggtggggtggagtcccagagctgcacagggtttggcccaagtttctaagggaggcacttcctcccctcgcccatcagtgccagcccctgctggctggtgcctgagcccctcagacagccccctgccccgcaggcctgccttctcagggacttctgcggggcctgaggcaagccatggagtgagacccaggagccggacacttctcaggaaatggcttttcccaacccccagcccccacccggtggttcttcctgttctgtgactgtgtatagtgccaccacaagcttatggcatctcattgaggacaaagaaaactgcacaataaaaccaaagcctctggaatccgaaaaaaaaaaaaaaaaa

SEQ ID NO: 403301 - DNA, 1000 bp, Homo Sapiens; identical to SEQ ID NO: 223736

SEQ ID NO: 403302 - DNA, 1000 bp, Homo Sapiens; identical to SEQ ID NO: 223737

SEQ ID NO: 403303 - DNA, 1000 bp, Homo Sapiens; identical to SEQ ID NO: 223738

SEQ ID NO: 403304 - DNA, 1000 bp, Homo Sapiens; identical to SEQ ID NO: 118364

SEQ ID NO: 403305 - DNA, 1000 bp, Homo Sapiens; identical to SEQ ID NO: 223739

SEQ ID NO: 403306 - DNA, 1000 bp, Homo Sapiens; identical to SEQ ID NO: 223740

SEQ ID NO: 403307 - DNA, 1000 bp, Homo Sapiens; identical to SEQ ID NO: 291778

SEQ ID NO: 403308 - DNA, 1000 bp, Homo Sapiens; identical to SEQ ID NO: 291779

SEQ ID NO: 403309 - DNA, 1000 bp, Homo Sapiens
ttccagtcattaccacggcaccagcagtggctctgtggcggctgccattctggttcctttctttgctctaattttatcagggtttgcattttacctctacaaacacagaacgagaccaaaagttcaatacaatggctatgctgggcatgaaaacagcaatggacaagcatcgtttgaaaaccccatgtatgatacaaacttaaaacccacagaagccaaggctgtgaggtttgacacaactctgaacacagtctgtacagtggtatagccctcagtgccccaacaggactgattcatagccatacctctgatggacaagcagtgattcctttggtgccatataccactctcccttccactctggctttactgcagcgatcttcaaccttgtctactggcataagtgcagcggggatctctactcaaatgtgtcagggtcttctacggatcaaactacacatgcgttttcattccaaaagtgggttctaaatgcctggctgcatctgtatgaaatcaaggcacactccaggaagactgccgcgtcgcgccaacacgtcatactcaatgcctcagactttcatatttctgtgttgctgagatgcctttcaatgcaatcgtctgggctcgtggatatgtccctcaggtgcggtgacagaatggtggcaccacgatatgtgttctcttgtgttgtttttcctttttaaacccccatgaacacgaatactctgaaaaaaataaaaagctttctggaagaagacacctttctgatagaggctcacacctacaaatgcttcactctgtccttccgagacctgacaagctttgaggacctcacagctcccctgtgtgttcatctctagggatgtttgcaatttcccagtcagctgttctgtcgcagaatgtttaatgcacaattttttgcactagtgtgttatgaatgactaagattctgataaaaaaaataaattatttacacagggtttatacacactaaaaaaaa

SEQ ID NO: 403310 - DNA, 1000 bp, Homo Sapiens; identical to SEQ ID NO: 224078

SEQ ID NO: 403311 - DNA, 1000 bp, Homo Sapiens; identical to SEQ ID NO: 291782

SEQ ID NO: 403312 - DNA, 1000 bp, Homo Sapiens; identical to SEQ ID NO: 118365

SEQ ID NO: 403313 - DNA, 1000 bp, Homo Sapiens; identical to SEQ ID NO: 118366

SEQ ID NO: 403314 - DNA, 1000 bp, Homo Sapiens; identical to SEQ ID NO: 118366

SEQ ID NO: 403315 - DNA, 1000 bp, Homo Sapiens; identical to SEQ ID NO: 291784

SEQ ID NO: 403316 - DNA, 723 bp, Homo Sapiens; identical to SEQ ID NO: 118367

SEQ ID NO: 403317 - DNA, 1000 bp, Homo Sapiens; identical to SEQ ID NO: 118369

SEQ ID NO: 403318 - DNA, 1000 bp, Homo Sapiens
aaggatgccatcggagtgaggagggcagcccagaggcgtctgcaagcagagctgggaattcctggggagcagatttctccagaggacattgtgttcatgacaatctatcaccacaaggcaaaatcagacagaatttggggagagcatgaaatttgttaccttctgcttgtgaggaaaaacgtcactctgaacccggatcccagtgaaacgaaaagcatcctctacctgtcccaggaggagctgtgggagctgctggagagggaggcgaggggtgaagtcaaagtcaccccctggctaagaaccattgccgagaggtttctgtaccggtggtggcctcacctggatgacgtgaccccgtttgtggagcttcacaaaatacacagagtgtgagaggcagggaggtcgagtcagccatgtgtaatgccctcagtgcaggcagacgcaccattgaggcaatgatacaccctctccaaaaaacagggcaaaaggggcacttgattgcccatcatgtataaatcactatttcaaccttttcatcaactttgtcatatcttcattttcccttttccttatttccatatttctcatctgcctggttgcagggaggaaatttaacatttcctttgtcccaatttccattttataagcacttgtttgattaacagcagctgatcctgaaagtcttggggagatcttgagagtcctgaagcaggcagactagcctggctggaccatgaggctgtctccccacagctttatccaagcctccaaggtcaggatgggatctctgtatcatgtttttctttttaaatcacttatttcagagtgcaacacaaggctgcatttttaaaaaaaagacacattcaatcttgcatcctaatacaagcagtacggaagatgcgtatggtctcagccaagtgactcgacgtttatccacttctgttcatttgatcgtttcagtaatatgcttacaaataaagacatacttgctttaaaacat

SEQ ID NO: 403319 - DNA, 1000 bp, Homo Sapiens; identical to SEQ ID NO: 223742

SEQ ID NO: 403320 - DNA, 1000 bp, Homo Sapiens; identical to SEQ ID NO: 118370

SEQ ID NO: 403321 - DNA, 1000 bp, Homo Sapiens; identical to SEQ ID NO: 118371

SEQ ID NO: 403322 - DNA, 1000 bp, Homo Sapiens; identical to SEQ ID NO: 118372

SEQ ID NO: 403323 - DNA, 1000 bp, Homo Sapiens
gcaaccagaagtgccagcttaggctcctgaagacgctggagacaaatccatatgtcaaacttctgcttgatgctatgaaacactcaggttgtgctgttaacaaagatagacacttttcttgcgaagactgtaatggaaatgtcagtggaggttttgatgcttcaacatctcagatagttttgtgccagaataatatccataatcaggcccatatgaacagagtggtcacacacgagcttattcatgcatttgatcattgtcgtgcccatgtcgactggttcaccaacatcagacatttggcgtgctcagaggttcgagctgctaaccttagtggagactgctcacttgtcaatgaaatattcaggttacattttggattaaaacaacaccaccagacttgtgtgcgagacagagccactctttctatcctggctgttaggaatatcagcaaagaagtagctaaaaaggctgttgatgaagtttttgaatcttgtttcaatgaccatgaaccttttggaaggatcccacataacaagacttatgcaagatatgctcacagagactttgaaaaccgtgatcggtattattcaaatatatgagcacaatgacatttttatattacagagcttccatcatcatgaagaaaaaaaaatttggttctcaagtgaacaaacatataaaatgtaaacaatccctacaatccagataaaacagagaagactgtgattctagcatattatcagaaaaagtaactatggcaaaaaatgaaactgctttaaactccaaggcagaaattgtatctttatagctaaccatttagtaaataaatacattacatttttgtattttagtcatttgtttttattacatgtgattattttaaaatttgattatgaaacctgtgaagtgtgctcttccatgatgttgataggtgaccactgttggtatttacattaaatgtaaagaaatgtgtactgaaaaaaaaaaaaaaaaaaaaaaa

SEQ ID NO: 403324 - DNA, 1000 bp, Homo Sapiens; identical to SEQ ID NO: 287342

SEQ ID NO: 403325 - DNA, 794 bp, Homo Sapiens; identical to SEQ ID NO: 118373

SEQ ID NO: 403326 - DNA, 1000 bp, Homo Sapiens
cctaccccagctaccgctccacccaccgctccacgctgaccagccacacctccaacctcagctggatctccatacggaggcgccaggagtccctgggctcggagagtgaggtgggctggacacacatggaggcagcagctgtgtggggagctgcccagcaagcaaatgggcggtccctctacggtcagggtctggaggacttggaagccaaggcaccccccagaccccagggacacgaagcagagactccagggaagaccaaggggctgatccccagccaggaccccaggatgtaggacgcccactggctctccctttcttctgagacacatccagcccccccacgtctccctcatatacacagacccaggattatgctgtgagcctgcaggctttggaagtggccctgtcacccgtgctgcacgggattcacagccccagccccatggcccctctccacacctcaaaactcctgccccataacgtcctccgcatccactttccagctcagcagccgcacccgaggctcagcctgaggggtatgtgcccaggccctcccacttcccgagttgtctgcctctcctcaaatgctgtgtgctgcaattgtccaggcgatgacaatggtgatggctccagagaacacaccagctatttatgagcctctgcccccaggctgggcctgtcactggcataggaaggccagccccgcatctcccactgccaacagctgaagccgagcacagacctccctttgcacgctggaacagttactcacctgtggcttcttcccccagtgtaccgttccactgtggcccacattcttgtgcacgcgggcatttgcaggcacgctctcgcgtagttacctatctgaatgcacaccaagcacatgcgtgcacactctgcgtctgtgattcatttcatgtagtggtctaagctcctcccagggctgtgtggatctgacagggtataggaaaataaaaagcggagaaggtgtcttcag

SEQ ID NO: 403327 - DNA, 1000 bp, Homo Sapiens; identical to SEQ ID NO: 291793

SEQ ID NO: 403328 - DNA, 1000 bp, Homo Sapiens; identical to SEQ ID NO: 223744

SEQ ID NO: 403329 - DNA, 1000 bp, Homo Sapiens; identical to SEQ ID NO: 223745

SEQ ID NO: 403330 - DNA, 1000 bp, Homo Sapiens; identical to SEQ ID NO: 118375

SEQ ID NO: 403331 - DNA, 1000 bp, Homo Sapiens; identical to SEQ ID NO: 291795

SEQ ID NO: 403332 - DNA, 1000 bp, Homo Sapiens; identical to SEQ ID NO: 291796

SEQ ID NO: 403333 - DNA, 1000 bp, Homo Sapiens; identical to SEQ ID NO: 291797

SEQ ID NO: 403334 - DNA, 1000 bp, Homo Sapiens; identical to SEQ ID NO: 291798

SEQ ID NO: 403335 - DNA, 1000 bp, Homo Sapiens; identical to SEQ ID NO: 223747

SEQ ID NO: 403336 - DNA, 1000 bp, Homo Sapiens; identical to SEQ ID NO: 118377

SEQ ID NO: 403337 - DNA, 1000 bp, Homo Sapiens; identical to SEQ ID NO: 291802

SEQ ID NO: 403338 - DNA, 1000 bp, Homo Sapiens
tttgcagggaatcagaaagggattacaacatggattttttgactttgagacatttgatgtggatgaatatgaacattatgagcgagttgaaaatggtgacttcaactggattgttccaggaaaatttttagcatttagtggaccacatcctaaaagcaaaattgagaatggttatcctcttcacgcccctgaagcctactttccttatttcaaaaagcataatgtgactgcagttgtgaggctaaacaaaaagatttatgaggcaaagcgcttcacagacgctggcttcgagcactatgacctcttcttcatagatggcagcacacccagtgacaacatcgtgcgaaggttcctgaacatctgtgagaacaccgaaggggccatcgccgttcactgcaaagctggtcttggaagaacagggacattgatagcctgttatgtaatgaaacactacaggtttacacatgctgaaataattgcttggattagaatatgccggccaggctctattataggaccccagcagcacttcctggaagaaaaacaagcatcgttgtgggtccaaggagacattttccgatccaaactgaaaaatcgaccatccagtgaaggaagtattaataaaattctttctggcctagatgatatgtctattggtggaaatctttcaaaaacacaaaacatggaacgatttggagaggtaagttttccctaggagattctatcttcttaaaactgatgttctgcatttgtttctcagttggacctatataacatagcagtgtcttttctctggatgccacgagtaccaagtttttagaagtagagccatccgtctatatagcaagaagcagaggaaagaaaccaattgcccttaaaaaaaaaaagctataatttaaggagtaaattataaaggaggctactctggtaaggggtaatatttatagaaaggaaacagaaaagcaaactttctatttgaaaaaaaaaaaaaaaaaaaaaa

SEQ ID NO: 403339 - DNA, 1000 bp, Homo Sapiens; identical to SEQ ID NO: 223749

SEQ ID NO: 403340 - DNA, 1000 bp, Homo Sapiens; identical to SEQ ID NO: 291804

SEQ ID NO: 403341 - DNA, 1000 bp, Homo Sapiens; identical to SEQ ID NO: 223750

SEQ ID NO: 403342 - DNA, 1000 bp, Homo Sapiens; identical to SEQ ID NO: 223751

SEQ ID NO: 403343 - DNA, 1000 bp, Homo Sapiens; identical to SEQ ID NO: 291807

SEQ ID NO: 403344 - DNA, 1000 bp, Homo Sapiens; identical to SEQ ID NO: 291808

SEQ ID NO: 403345 - DNA, 1000 bp, Homo Sapiens; identical to SEQ ID NO: 291809

SEQ ID NO: 403346 - DNA, 1000 bp, Homo Sapiens
tctagcgctggcggcagagctgcagggcgaggcgacgtgctccatctgcctagagctctttcgtgagccggtgtccgtcgagtgcggccacagcttctgccgcgcctgcatagggcgctgctgggagcgcccgggcgcggggtctgttggggccgccacccgcgcgccccccttcccactgccctgtccgcagtgccgcgagcccgcgcgccccagtcagctgcggcccaaccggcagctggcggcagtggccacgctcctgcggcgcttcagcctgcccgcggctgccccgggagagcacgggtctcaggcggccgcggcccgggcagcggctgcccgctgcgggcagcatggcgaacccttcaagctctactgccaggacgacggacgcgccatctgcgtggtgtgcgaccgcgcccgcgagcaccgcgagcacgccgtgctgccgctggacgaggcggtgcaggaggccaaggagctcttggagtccaggctgagggtcttgaagaaggaactggaggactgtgaggtgttccggtccacggaaaagaaggagagcaaggagctgctggtgagccaggcacccgcaggccccccgtgggacattacagaggcctgagaactcagcaccagggctcggtgtgtgtggtgttggagtgtgtgctatggaaccgcagaatcgatttcagaaagataatagagtccatattatatagggtgtccacataattgttgtacaaaccagagctttttaaagtgaaaagcagtgctaaaataattattgcaaaacaactggcttaaactggagctgtcccagcgaatcaggacgctcagtcactctgatattacgtaacataccagttagggcctgcggaagcatcttgtaatggaacacattactatttctgcagagaaacatggatattcaataagtgggaatattaatacaataaagagcctcatggcatgttttgtcaacaaaacagtagtgaaaaaaaaa

SEQ ID NO: 403347 - DNA, 1000 bp, Homo Sapiens; identical to SEQ ID NO: 223752

SEQ ID NO: 403348 - DNA, 1000 bp, Homo Sapiens
ctgcctgaggaataccagtgggcaagagaattagcatttctggagcatctgctgtctgagcagcccctgggtgcgtccactttctgggcacgtgaggttgggccttggccgcctgagcccttgagttggtcacttgaaccttgggaatattgagattatattctcctgccttttaaaaagatggacttcagcagaaatctttatgatattggggaacaactggacagtgaagatctggcctccctcaagttcctgagcctggactacattccgcaaaggaagcaagaacccatcaaggatgccttgatgttattccagagactccaggaaaagagaatgttggaggaaagcaatctgtccttcctgaaggagctgctcttccgaattaatagactggatttgctgattacctacctaaacactagaaaggaggagatggaaagggaacttcagacaccaggcagggctcaaatttctgcctacagggtcatgctctatcagatttcagaagaagtgagcagatcagaattgaggtcttttaagtttcttttgcaagaggaaatctccaaatgcaaactggatgatgacatgaacctgctggatattttcatagagatggagaagagggtcatcctgggagaaggaaagttggacatcctgaaaagagtctgtgcccaaatcaacaagagcctgctgaagataatcaacgactatgaagaattcagcaaagagagaagcagcagccttgaaggaagtcctgatgaattttcaaatgactttggacaaagtttaccaaatgaaaagcaaacctcggggatactgtctgatcatcaacaatcacaattttgcaaaagcacgggagaaagtgcccaaacttcacagcattagggacaggaatggaacacacttggatgcagggtttgagaatgtttttagctggtggcaataaatattagaagcctgcagaatccagctacgaatatagagggttttgctcttg

SEQ ID NO: 403349 - DNA, 1000 bp, Homo Sapiens; identical to SEQ ID NO: 291812

SEQ ID NO: 403350 - DNA, 1000 bp, Homo Sapiens; identical to SEQ ID NO: 118378

SEQ ID NO: 403351 - DNA, 1000 bp, Homo Sapiens; identical to SEQ ID NO: 118379

SEQ ID NO: 403352 - DNA, 732 bp, Homo Sapiens
ccccagggccagtgagggccctgcgttccgtggcgccccctggagggaggaaggggaactgtatctgagagagagcagccaattgggtccgctgactccggccgggttcccgtgccgcgtccaacacccctcactccctgtctcactcccccacggagactcaatttactttccatgtccacatccccagtgcttgcggaagatatcccgctaagagagagacatgtcaaaggggctgctgctgttgctgctgctgagcatgggcgggacatgggcatccaaggagccgcttcggccacggtgccgccccatcaatgccaccctggctgtggagaaggagggctgccccgtgtgcatcaccgtcaacaccaccatctgtgccggctactgccccaccatgacccgcgtgctgcagggggtcctgccggccctgcctcaggtggtgtgcaactaccgcgatgtgcgcttcgagtccatccggctccctggctgcccgcgcggcgtgaaccccgtggtctcctacgccgtggctctcagctgtcaatgtgcactctgccgccgcagcaccactgactgcgggggtcccaaggaccaccccttgacctgtgatgacccccgcttccaggcctcctcttcctcaaaggcccctccccccagccttccaagcccatcccgactcccggggccctcagacaccccgatcctcccacaataaaggcttctcaatccgca

SEQ ID NO: 403353 - DNA, 948 bp, Homo Sapiens; identical to SEQ ID NO: 291814

SEQ ID NO: 403354 - DNA, 1000 bp, Homo Sapiens; identical to SEQ ID NO: 291815

SEQ ID NO: 403355 - DNA, 1000 bp, Homo Sapiens
cagcggtgattcagccctgcccaacctgattctgatgactgcggatgctgtgacggacccaaggggcaaatagggtcccagggtccagggaggggcgcctgctgagcacttccgcccctcaccctgcccagcccctgccatgagctctgggctgggtctccgcctccagggttctgctcttccaggcaggccagcaagtggcgctgggccacactggcttcttcctgccccatccctggctctgagtctctgtcttcctgtcctgtgcaggcgcccttggatctcagtttccctcactcaggaactctgtttctgaagtcttcagttaagtttgagtttatgactgagtggcctgtactgtcagacgtgaatgggcctgacgggcaaatccatccctctctccctcacagttccaggagcggcttccctcgtctccccttactccacagggagcctcccttgccaggaccagggctgcgacggccatgctggggcaggtgagtgctctgttagctgctcccagtgctgtccccaggctgcagttctggtccctggttgtcaggtaggaagggtgcacttgaagcaggtgctcatctcggttccttaacgtttatagtctgacccctcacttaggctttcctctgccaccccggtccagggaagaggctcgctcccgcccatggtcatcactggtctgtctgctctgttgtctgttctttccctgactccctcccaccgaaggcctgatggctactcacccctctgggatggctatgggagaggaggagtgatggggaccgccaccttttctgcaggaaatgtgcccagcagctcttggtcaaagcactgttgctataagctatctctgggatgcctctaggcccccttccctctacacacctctgggaaaagattacactgtattaactctcgaggagtttcctcaccaataaacagacaacctcaactgccagtgccctgcaaaaaaaaaaaaaaaaaa

SEQ ID NO: 403356 - DNA, 1000 bp, Homo Sapiens
cgtgggacggtgtgggaaccaaagtccctgccctgctcctttgtccacgggctattgcgtttattcaaggggtgcttaatgaccgtttagccactgccgtcggtctccgggcccagctcgtgccaggaggctgtcctgggacacactgggctggagctgccggctggcacggtgctcagggggcccctgatgggggccaggacctccccgcagaaactgcaggttctcttgtgaggatggaggccgtgccaccccgaaaggcagtagccttaggggaacagtgggtcccagctgcatgtctgaggatgggtggggacagggctgggactcagctttcattcactggagacttctccactcaggtctttgttgcactaaagcagggacaggaccctgggggttcaggaagcgggtctcaggccgctggtttattcctggaggtggggctggagaccagaatggaaaggggcttcctgagctgctagggggtgaaggacccccgaacccgcatttcttgagtgagagcaaacactcgaggcaggagccagcacccctcccactgcatgcccggcccccagcccaccttgccccctgacccaccttcacccgtgccccttctttctgcccttcctcaccgaagaagggctaggaacaccctggagaggctgcaggtccggccacggacgctcagctgagccccggtctgctccttcagcctccttgctcttgttggagcacaggccccaggcttcctgccagggccccgattcttcttatgtcctccagccccgccctggcgtggacatccactcactccttccagcaataagaaccgtccttggtcgtggagagtactgtgaaacaaaccaatgcacttaccaggaggcacaagactcttgaagaagatgtaaaatgaaccttttttttttttacaaaaaacaaaaagcaaatattcataaagagaaataaaatgtaattttaaagtaaaaaaaaaaaaaaa

SEQ ID NO: 403357 - DNA, 1000 bp, Homo Sapiens; identical to SEQ ID NO: 291816

SEQ ID NO: 403358 - DNA, 1000 bp, Homo Sapiens; identical to SEQ ID NO: 118380

SEQ ID NO: 403359 - DNA, 1000 bp, Homo Sapiens; identical to SEQ ID NO: 118381

SEQ ID NO: 403360 - DNA, 1000 bp, Homo Sapiens; identical to SEQ ID NO: 223755

SEQ ID NO: 403361 - DNA, 1000 bp, Homo Sapiens; identical to SEQ ID NO: 223756

SEQ ID NO: 403362 - DNA, 1000 bp, Homo Sapiens; identical to SEQ ID NO: 118382

SEQ ID NO: 403363 - DNA, 1000 bp, Homo Sapiens; identical to SEQ ID NO: 223757

SEQ ID NO: 403364 - DNA, 1000 bp, Homo Sapiens; identical to SEQ ID NO: 223758

SEQ ID NO: 403365 - DNA, 1000 bp, Homo Sapiens
ttcaccacataatgattaacagagaagaaggagtggtctttatagagattgacgataatagaaggagacaagttcacctgtcatcaggcacagaattcagtgcagtcaaatctctggtattgggcaggattttagaacacagtgatgtggaccaggagactgcactggcaggtgcgcagggcttcacaggctgcctctctgcagtgcagctcagccacgtggcccctctgaaggcagctctgcaccccagccacccagaccctgtcactgttacaggacacgtgaccgagtccagctgtatggcccagcctggcactgatgccacatcaagggaaaggacacactcgtttgcagatcattctggaacaatagatgacagagagccccttgctaatgcaatcaaaagtgactctgcagtaattggaggtctgatagctgttgtgatttttatcttgctttgcatcactgccatagctgttcgcatttatcagcagaaaaggttatataaaagaagtgaggcaaaaaggtcagagaatgtagacagtgctgaggctgttctgaaaagtgagcttaatatacaaaatgcagtcaatgaaaatcagaaagagtacttcttctgattggcagctatgatttaacataaaattatgatagtttgttttaatagccaggggttctcaatggaaaaacgaatgctcttacactgaatgtacaggcagtgggcttgcagcactgccatcttgccatgtacaggcttggggtggctccaggaagcctcgtccagtgatatatttctcatagcattcattctatggaacaagaaattagatattgctgttaattttcaactgttctggtatgatctaaaacaagtttaacctgcttaatggctacagtttttacatgtgaaaactgtagccttggtctcttaaccatgtaatacataagttttgttagaggtaaaaattaaatttggactataatgtccttgctttatttg

SEQ ID NO: 403366 - DNA, 1000 bp, Homo Sapiens; identical to SEQ ID NO: 118384

SEQ ID NO: 403367 - DNA, 1000 bp, Homo Sapiens; identical to SEQ ID NO: 291825

SEQ ID NO: 403368 - DNA, 1000 bp, Homo Sapiens; identical to SEQ ID NO: 291826

SEQ ID NO: 403369 - DNA, 1000 bp, Homo Sapiens; identical to SEQ ID NO: 223761

SEQ ID NO: 403370 - DNA, 1000 bp, Homo Sapiens; identical to SEQ ID NO: 118385

SEQ ID NO: 403371 - DNA, 1000 bp, Homo Sapiens; identical to SEQ ID NO: 118386

SEQ ID NO: 403372 - DNA, 1000 bp, Homo Sapiens; identical to SEQ ID NO: 291832

SEQ ID NO: 403373 - DNA, 1000 bp, Homo Sapiens
ataggtgacagggccgtgagcatgggcctgggtgtgtgtgagctcaggcctaggtgcgcagtgtggagacgggtgttgtcggggaagaggtgtggcttcaaagtgtgtgtgtgcagggggtgggtgtgttagcgtgggttaggggaacgtgtgtgcgcgtgctggtgggcatgtgagatgagtgactgccggtgaatgtgtccacagttgagaggttggagcaggatgagggaatcctgtcaccatcaataatcacttgtggagcgccagctctgcccaaggcgccacctgggcggacagccaggagctctccatggccaggctgcctgtgtgcatgttccctgtctggtgcccctttgcccgcctcctgcaaacctcacagggtccccacacaacagtgccctccagaagcagcccctcggaggcagaggaaggaaaatggggatggctggggctctctccatcctccttttctccttgccttcgcatggctggccttcccctccaaaacctccattcccctgctgccagcccctttgccatagcctgattttggggaggaggaaggggcgatttgagggagaaggggagaaagcttatggctgggtctggtttcttcccttcccagagggtcttactgttccagggtggccccagggcaggcaggggccacactatgcctgcgccctggtaaaggtgacccctgccatttaccagcagccctggcatgttcctgccccacaggaatagaatggagggagctccagaaactttccatcccaaaggcagtctccgtggttgaagcagactggatttttgctctgcccctgaccccttgtccctctttgagggaggggagctatgctaggactccaacctcagggactcgggtggcctgcgctagcttcttttgatactgaaaacttttaaggtgggagggtggcaagggatgtgcttaataaatcaattccaagcctcaaaaaaaaaaaaaaaaaaaaaa

SEQ ID NO: 403374 - DNA, 1000 bp, Homo Sapiens; identical to SEQ ID NO: 291833

SEQ ID NO: 403375 - DNA, 1000 bp, Homo Sapiens
gcagccattcctcctcctgttggcctttcttctgacccctggggctgggacagaggagatcatcgggggccatgaggccaagccccactcccgcccctacatggcctttgttcagtttctgcaagagaagagtcggaagaggtgtggcggcatcctagtgagaaaggactttgtgctgacagctgctcactgccagggaagctccataaatgtcaccttgggggcccacaatatcaaggaacaggagcggacccagcagtttatccctgtgaaaagacccatcccccatccagcctataatcctaagaacttctccaacgacatcatgctactgcagctggagagaaaggccaagtggaccacagctgtgcggcctctcaggctacctagcagcaaggcccaggtgaagccagggcagctgtgcagtgtggctggctggggttatgtctcaatgagcactttagcaaccacactgcaggaagtgttgctgacagtgcagaaggactgccagtgtgaacgtctcttccatggcaattacagcagagccactgagatttgtgtgggggatccaaagaagacacagaccggtttcaagggggactccggggggcccctcgtgtgtaaggacgtagcccaaggtattctctcctatggaaacaaaaaagggacacctccaggagtctacatcaaggtctcacacttcctgccctggataaagagaacaatgaagcgcctctaacagcaggcatgagactaaccttcctctgggcctgaccatctctgggacagaggcaagaatccccaaggggtgggcagtcagggttgcaggactgtaataaatggatctctggtgtagaaaaaaaaaaaaaaaaaaaaaaaaaaaaaaaaaaaaaaaaaaaaaaaaaaaaaaaaaaaaaaaaaaaaaaaaaaaaaaaaaaaaaaaaaaaaaaaaaaaaaaaaaaaaaaaaaaaaaaaaaaaaaaaaaaaaaaaaaaaaaaaa

SEQ ID NO: 403376 - DNA, 1000 bp, Homo Sapiens; identical to SEQ ID NO: 223764

SEQ ID NO: 403377 - DNA, 1000 bp, Homo Sapiens; identical to SEQ ID NO: 118388

SEQ ID NO: 403378 - DNA, 1000 bp, Homo Sapiens; identical to SEQ ID NO: 291836

SEQ ID NO: 403379 - DNA, 1000 bp, Homo Sapiens; identical to SEQ ID NO: 223765

SEQ ID NO: 403380 - DNA, 1000 bp, Homo Sapiens; identical to SEQ ID NO: 118389

SEQ ID NO: 403381 - DNA, 1000 bp, Homo Sapiens; identical to SEQ ID NO: 223766

SEQ ID NO: 403382 - DNA, 1000 bp, Homo Sapiens; identical to SEQ ID NO: 291842

SEQ ID NO: 403383 - DNA, 1000 bp, Homo Sapiens; identical to SEQ ID NO: 291843

SEQ ID NO: 403384 - DNA, 1000 bp, Homo Sapiens
acaggctccggcaagtcttccctgttgttggtgctcttccggctgctagagcccagttcagggcgagtgctgctggacggcgtggacaccagccagctggagctggcccagctcagatcccagttggctatcatcccccaggagccctttttgttcagtgggactgttcgggaaaacctggacccccagggcctacataaggacagggccttgtggcaggccctgaagcagtgccacctgagtgaggtgattacatccatgggtggtctggatggtgagctgggtgaggggggccggagcttatctcttgggcagaggcagctgttgtgtttggccagggctctcctcacagatgccaagatcctgtgtatcgatgaggccacagcaagtgtggaccagaagacagaccagctgctccagcagaccatctgcaaacgctttgccaacaagacagtgctgaccattgcccataggctcaacacgatcctgaactcagaccgggtgctggtgctacaagcggggagagtggtagagctggactccccggccaccctgcgcaaccagccccactccctgttccagcagctgctgcagagcagccagcagggagtccctgcctcactcggaggtccctgagcccaatcccacaccctgcagagttctcccctctctctgatccaggccgggcctatacagaggtgctggctgcttgtttacattctcctctggggctctacctctccacacttccccagaagggaaaagggcaccctggattactctttggaaatcactccttggtgggcagcatcctgaggcttccccagaaccaggcctctgctctggccctcttgcatctggaacgccaggtgggtttttctggcataggagcccacttgcattttcatagttttatttgataaaattccatcttacattctgtgtattaaaaaaataatatttctggtgtaaaaaaaaaaaaaaaaaaaaaaaaaaaaaa

SEQ ID NO: 403385 - DNA, 1000 bp, Homo Sapiens; identical to SEQ ID NO: 118390

SEQ ID NO: 403386 - DNA, 1000 bp, Homo Sapiens
agagggcaggacctgggaccttccctcagccctgctcttcgctgccagcatcctcaccaccacaggttatggccacatggccccactatcgccaggcggaaaggccttctgcatggtctatgcagccctggggctgccagcctccttagctctcgtggccaccctgcgccattgcctgctgcctgtgctcagccgcccacgtgcctgggtagcggtccactggcagctgtcaccggccagggctgcgctgctgcaggcagttgcactgggactgctggtggccagcagctttgtgctgctgccagcgctggtgctgtggggccttcagggcgactgcagcctgctgggggccgtctacttctgcttcagctcgctcagcaccattggcctggaggacttgctgcccggccgcggccgcagcctgcaccccgtgatttaccacctgggccagctcgcacttcttggtaagtccagccacctaacagcgtgtgggggaagggggaagaggagcctggactaggactcccataaatcactggggggctgggccttgcaggtggagggacctcactccagggcacggcgtgggaggggtagtcgaagagctctggtggcagcgttgagaagggggttacttgcttctaggactcttggccatgctgctggcagtggagaccttctctgagctgccgcaggtccgtgccatggggaagttcttcagacccagtggtcctgtgactgctgaggaccaaggtggcatcctagggcaggatgaactggctctgagcaccctgccgcccgcggccccagcttcaggacaagcccctgcttgctgaagcgtcaggtgaccgagttcagctccgtaaggtggcggcacctgaggaggaagcagccaggagtggctggggaagaatctggagatggagccgcggtgagggtgggcgggaggcctcaggggatactgttaatcataaaatgagcaacgaaaaaaaaaaaaaaa

SEQ ID NO: 403387 - DNA, 1000 bp, Homo Sapiens
ctggatcatcggggcggcggtggtcaatgcgttctactccccaaaccgaaaccagattgtattccctgccgggatcctccagccccccttcttcagcaaggagcagccacaggccttgaactttggaggcattgggatggtgatcgggcacgagatcacgcacggctttgacgacaatggccggaacttcgacaagaatggcaacatgatggattggtggagtaacttctccacccagcacttccgggagcagtcagagtgcatgatctaccagtacggcaactactcctgggacctggcagacgaacagaacgtgaacggattcaacacccttggggaaaacattgctgacaacggaggggtgcggcaagcctataaggcctacctcaagtggatggcagagggtggcaaggaccagcagctgcccggcctggatctcacccatgagcagctcttcttcatcaactatgcccaggtgtggtgcgggtcctaccggcccgagttcgccatccaatccatcaagacagacgtccacagtcccctgaagtacagggtactggggtcgctgcagaacctggccgccttcgcagacacgttccactgtgcccggggcacccccatgcaccccaaggagcgatgccgcgtgtggtagccaaggccctgccgcgctgtgcggcccacgcccacccgctgctcggaggcatctgtgcgaaggtgcagctagcggcgacccagtgtacgtcccgccccggccaaccatgccaagcctgcctgccaggcctctgcgcctggcctagggtgcagccacctgcctgacacccagggatgagcagtgtccagtgcagtacctggaccggagccccctccacagacacccgcggggctcagtgcccccgtcacagctctgtagagacaatcaactgtgtcctgcccaccctccaaggtgcattgtcttccagtatctacagcttcagacttgagctaagtaaatgcttcaaag

SEQ ID NO: 403388 - DNA, 1000 bp, Homo Sapiens; identical to SEQ ID NO: 118392

SEQ ID NO: 403389 - DNA, 1000 bp, Homo Sapiens; identical to SEQ ID NO: 223767

SEQ ID NO: 403390 - DNA, 1000 bp, Homo Sapiens; identical to SEQ ID NO: 115097

SEQ ID NO: 403391 - DNA, 1000 bp, Homo Sapiens
cagcctcgggagccgcgctgaagccgggggcgggaccagcgcggagccgacatgtgtctgcgcctcggaggcctgagtgtgggcgacttccggaaggtgctgatgaagacaggcctggtgctggtggtgctgggccatgtgagcttcatcacagctgccctgttccatggcacagtgctgcgctacgtgggcacccctcaagatgcggtggctctgcagtactgcgtggtcaacatcctctctgtcacttccgccatcgtggtcatcacttcaggcatcgcagccatcgtgttgtcacgctacctccctagcacccccctgcgctggacagtgtttagctcgagcgtggcctgtgctctcctttctctgacctgtgccctcggcctcttggcctccatcgccatgacctttgccacccagggcaaggcactgctggctgcctgcacttttgggagctctgaactactggccctcgcacctgactgtcccttcgaccccacacgcatttatagctccagcctgtgcctctggggcatcgccctagtgctctgcgtggcggagaacgtgtttgctgtacgctgtgctcagctcacccaccagctgctggagctgaggccctggtgggggaaaagcagccaccacatgatgcgggagaacccagagctggtggagggccgtgacctgctgagctgcaccagctctgagcctctgaccctctgagagatgatgtcctgcccaggcccgatggccactaggaccctgcaagcaactctgctctgtgaccaggccaggattcctggagctggcctgagagggctcaatggaccctcggggacccaagtggggctttcaaccctctcccccaccacccagcccactgcactgaaatgagactttattctgaaattattaaaaagaacagagatgctcaaaaaaaaaaaaaaaaaaaaaaaaaaaaaaaaaaaaaaaaaaaaaaaaaaaaaaaaaaaaaaaaaaaaaa

SEQ ID NO: 403392 - DNA, 1000 bp, Homo Sapiens; identical to SEQ ID NO: 291850

SEQ ID NO: 403393 - DNA, 1000 bp, Homo Sapiens
tgtccccagatgacctggatgacactgggcagccagtccttgagcgaggccagctcaatgggaagcgggacaccctgtggctggcgctgagggagacagtgtatgacccatcattgcccgcttcccatcacagcagcttgtcctggaagggccgaggggggccaggggatggcagccctgtggtgctgcccaatagccagccagacctgccagatgtttggctgcgcaggcccagcactcacacgtcaggctatagcagctgagggggacccggggaggctggacagggcgcggaaccctgtcatggatgacaaggcaagggcagcaataggctggagcccgaaggtatttctccagatccacagggagaggtctcaccctccagctgtggatgttaaaccctgccagatgtcccagccttgatctgtctgctcctactcctcacatctggaggattccagcaggaggggttttggaggggacctgcttgcgacctgctgagggcttgtctgctcccacagcaccatctaagacccctcctctagaagtggggaaggccagatgtgtagcttcgggtatcagaggaggctgacctggcccccatcccaagttacaagaacttcagtgagactaagggacccccatcctagggatcttgtcagggttccttactgaccagaggagcccgcagcaatctccacagcctcctgggtctcacccctttcatgggctcttcatcaggacacttccctctcttttgggagcttctctgggcagaattgggctgggacctctctccccaactgccctgctctcctcatactcaccggtttgaccagaaattctccaaatccagccatagatggctgctgggtgtgcagcaggagaaggaggatggtcagccttggagcatctctcaattacgggacagtccctctttggaagcaggctcctgtgctttcctgtgttaataaacagtaataatcctttccatctctgc

SEQ ID NO: 403394 - DNA, 1000 bp, Homo Sapiens; identical to SEQ ID NO: 291851

SEQ ID NO: 403395 - DNA, 1000 bp, Homo Sapiens; identical to SEQ ID NO: 291852

SEQ ID NO: 403396 - DNA, 1000 bp, Homo Sapiens; identical to SEQ ID NO: 223768

SEQ ID NO: 403397 - DNA, 1000 bp, Homo Sapiens
atcaagaaaacttcatcttctctgagactcagaaaaagaggggaaaatagtggtagtgcactaattgttacattactaatatagcttttgtaaaactcgtttgttttcaaaggtctggactaagcaaaacaacagtgtcagtttaggaaattattactactttgaacacaaactgaaattgcaactttgccttgtgctttgtttataatttctttgtatatcaaaatgagtgttttaaagtttaacccttgaagcagcatgtctttgccatagcagcacttcacttaaaaggaagaaattgcctctctggcagcaattcctagttagttaccacctccagctgaggggctggaggaaaacaggtatagccaaattcaagaaagataaacccctgtctcaaggaacattttaaaaagaacgtctgtcccctgtgatgctggctgttatgcctttgaatggacctaactatacatctttgctcttaactccaagtctgcccttctttttaggaaaccctaaaggagaaggaagcagaatataaccctctggagagctcaagacagtaggaacctggacggtgcttgtttgaattttctgatatctgattttcacacgaatatactttttgtttgttttccttttccattttcaaaatgccaagatctgggagcctctttcactcctctagacacactgcctgagatagaagtttgcatcttattggctgtgggcagagactaggacccttatgggtacatttcagtaatctctcactgcctaaaatggtaatccctccagcctaagaggatgattctgttttgttgactcttgaatgctcccccaacattcctttggttttcctataagcaaaaccaaataccactataaatacaaaagcatctggtaaactgtaaagttactcatgtatcccaaccctccacagatttctgaagacaaagttttgcttggattaaaacaagatgttttactattttgcaaa

SEQ ID NO: 403398 - DNA, 1000 bp, Homo Sapiens; identical to SEQ ID NO: 118393

SEQ ID NO: 403399 - DNA, 1000 bp, Homo Sapiens; identical to SEQ ID NO: 118394

SEQ ID NO: 403400 - DNA, 1000 bp, Homo Sapiens; identical to SEQ ID NO: 291856

SEQ ID NO: 403401 - DNA, 1000 bp, Homo Sapiens
tggtgtggagaataagcaggtggtgattatacatcacatgaggctgcaggccaaagctttgcaacttatagtaacagcacgaactacacgaggacttgaccccttatttgggatgtgtgaaaaatttttacaggaagtagacttttttcagaggtatttcatcgctgatttgccccacttgcaggacagctttgtggacaaactccttgaccttatgccccgactcatgacatccaaacctgcagaagtggtcaaaattctacagaccatgctgcgacagagtgcctttctgcatctcccgcttccagagcagatccacaaagcctcagccaccatcatcgagccagcgggcgagtcagacaaccctttgcggtttacctctgggttggtggttgccctggatgttgatgcaaccctggagcatgtgcaggatcctcagaacactgttaaggtccaggtcttatatccagatggccaggctcagatgattcaccccaagcctgcagacttccggaatcctggcccagggcggcaccggctcatcactcaggtttatctctcccacaccgcttggacagaggcatgccaggtggaagtgaggctgctgctggcctacaactccagtgctcgcattccaaaatgcccctggatggagggtggtgagatgtcaccacaggtggaaaccagcatcgagggcaccattcccttcagcaagcctgtaaaagtttatataatgcccaaacctgcacggcgctaaggcaaaaacagtcttcccaaccgtggcctagagggcccttcttaggtgtcagaatgagccaagcctgaagcacttcacctggaattgatgtgtaggcttaaggagtatgtgacccttacagtctcatctggtatcaaacacaggataaattgtttcttcattaaaaaataaaaaaccttcaagtctacttacccttctcctgtccacaataaagttgagaaaacaccaaaaaaaaaaaaaaaa

SEQ ID NO: 403402 - DNA, 1000 bp, Homo Sapiens; identical to SEQ ID NO: 291857

SEQ ID NO: 403403 - DNA, 1000 bp, Homo Sapiens; identical to SEQ ID NO: 118395

SEQ ID NO: 403404 - DNA, 1000 bp, Homo Sapiens; identical to SEQ ID NO: 118396

SEQ ID NO: 403405 - DNA, 1000 bp, Homo Sapiens
tggttgggttcattcctgttcccatgcccaaccaggttccattcaggaaccccctccataaaatggaccatatcgggtctcagggccatttagggcagccaggagactccggtgtgaacagaaatccctgccacgcatcgccagggcagttggggcagtgggctctctgcccacacttggaaggactgcagtctgggtgggatgcctgaaagagcccaaccccctctgtgcccatggcctctgccctgaccacccccagtcaggaggccccacaggaggggcacccggtagatgccagtgaaatcctcaggggaggtctgcctgaaagagcccaaccccctctgtgcccatggcctctgccctgaccacccccagtcaggaggccccacaggaggggcacccggtagatgccagtgaaatcctcaggtgaggtctgcctacgggccacgggccactcaccactcacaccttccttggctttccttccacccttttttttttctcgagacggagtcttgctctgtcaccaggctggagtgcagcggcgcaatctcagctcactgcaacctctgcctcctgggttctcctgcctcaccctcccgagtagctgggattacaggcacacgccaccatgcccggctaatttttgtattcttagtagagacaaggtttcaccatattggccaggctggtcttgaactcttgacctcgtgatctgcccgccttggcctcccaaagtgctgggattacagccgtgagccactgcacccagccccaatccaccactttttaagcaaacccacacaagttgtgttttctatgatacctgtctgtgattttcggagctgggggttcccctacccccttttcctggcgttaagcttttctttttataccagtggatctggacccaagacattacccacactggaaggggatttgtataataaatgtgtaaactgaacccaaaaaaaaaaaaaaaaaaaaaaaaaaaaaaaaa

SEQ ID NO: 403406 - DNA, 1000 bp, Homo Sapiens; identical to SEQ ID NO: 118397

SEQ ID NO: 403407 - DNA, 1000 bp, Homo Sapiens
ctggagttgctggtcctagaacagttcccgactgtccttctccaggagatccagatctgggtcagacagcagcatccggagagtggagaggaggcagtggccctggtggaagacttgcagaaagaacctggaagacagaggctggagcctcgggcgaggccgtccggccgcacccctcctgctcagctgcggtcgccatggccaatgacagctgcgggcccggcgagccgagctcgagcgagcgagaccggcagtactgcgagctgtgcgggaagatggagaacctgctgcgctgcagccgcagctccttctgctgcaaggagcgccagcgccaggactggaagaagcacaagctcgtgtgccagggcagcgagggcgccctcggccacggagggggccctcaccaggactccggccccgcgccgcccgctgcagcgccgccgtccagggaccgggccctggaggccaggaaggcagcgaggcgccgggacagcgcctccggggacgcagccaaggcaaaggccaagtccgcggccgaccccgcggcggccgcgtccccgcctcgcgcgtccccgggccggacaaaagccatggctgcttgttatccggtcaatggaacgggttatgtacgtcatgttgataatccaaatggagacggaagacgtgtgaaatgtattacattacgttaaagaacgggatgccaagccctgcctgatgtggctctgggaattcctgcagagaagagcaggggtggccaggagatagtgagcagctcccaggaggcatggagggatccagaacctggactgaagaaccacctagaaataactcagcagaattctgaaaatgaggtcacgctgggacttccagttccccagccagatggggtcacaatgctgcagaaaagtgaagagctttggaatgaagatctcccggacttcaaggagattcagaaaacgtccagtgcaggtgggaaatgaatgggagctagcattccacc

SEQ ID NO: 403408 - DNA, 1000 bp, Homo Sapiens
ggatccacgaaaaactccgcacctgccatcgaaaccaccaggtgtaccggattatggctgagcagctgtgagaacatggcttcctgtggaccctggagcaatgttgctatcggttcaaaaacctcctgaccgactactgcaaagccaggagcacctacacaccaggcaccagtgtcttctatgatgagatggatgccctgttgagtcttggggcactttctaacacctttgatgccttagaggtggtaggaggccttctttgggattgagaggattccaaagggaaccagggcatagcactagaagatgtggcgggatggtaatgaaatagtggaggagtctcaagaggaatcctggaggcttggtccccaggccttgaggtggaatcccagtggcaactctcccccacaatggacctcagagcagtgggagcgacgcagtcctgtgggaagcattcaggctcagaatcaggagatgtgattattgtcctggctctgttatgactaatttgggtctgggatggcctcatcgggggaaaaattggtgacaactttaagaaatactgtttatatcccgtcctcaaatattgcttgactcaaccctctactgaaccagtagtccagggtggctcacaaagaccactttgaggctcttgctctgctctttagccaaggagtctcccttcctgccttcagtaacaacattacaggaagagaggagagaaaggtaggagttaaagatccagtcatttgtttccatctaaagtgccctataagccgggcatcgtggcgcaagcctgtagtcccagctactcgggaggctggggcaggagaatcacttgagcccaggagttggaggccgcagtgagctgtgatcatgccactgcattccagcctgggcgacagagtgagacccagactcagctgaaaaataataatattattaaaagaatttaaaataaagtgttccatagatgtgaaaaaaaaaaaaaaaaaaaaaa

SEQ ID NO: 403409 - DNA, 1000 bp, Homo Sapiens
tgttgtaccaggaatgcatacctctcagacttactacctgaaaatatctctggaagtcagcaaaataatgatctagatgccagtagtgaagacttttctggtacgcttcctgattttgctaaaaataagcgtgactttgaaagtaacgttcgactgtgcaatggagagatatttttcataacaaatgatgtaactgatgtaacttttggaaagagaagatctttgaccattaataatatggctggcctggaagtaactgtggattttaagaaactaatgaaatattgtcgcataaaacatgcatgggcaagaactattcacacttttcaggggtccgaggagcaaacagttgtctatgtggtggggaaggcgggccgccagcactggcagcatgtctacaccgccgtgaccaggggccgctgccgagtgtatgtgattgcagaggagtctcagctccggaatgccattatgaaaaacagttttcctagaaaaactcgtttgaaacatttcttgcaaagtaagctctcctctagcggcgcacctccagcagattttccgtccccacggaagagctctggagacagtggaggacccagcacaccgtcagcatctccactccctgtagtcacagaccacgccatgacaaatgatgtcacctggagcgaggcctcttcgcctgatgagaggacactcacctttgctgaaagatggcaattatcttcacctgatggagtagatacagatgatgatttaccaaaatcgcgagcatccaaaagaacctgtggtgtgaatgatgatgaaagtccaagcaaaatttttatggtgggagaatctccacaagtgtcttccagacttcagaatttgagactgaataatttaattcccaggcaacttttcaagcccaccgataatcaagaaacttagttttatttcaaattgttccgagtaactatgtttttctattggagacaaaatgaacatcgtaacgtcaaagtaccaa

SEQ ID NO: 403410 - DNA, 1000 bp, Homo Sapiens; identical to SEQ ID NO: 291864

SEQ ID NO: 403411 - DNA, 1000 bp, Homo Sapiens; identical to SEQ ID NO: 223773

SEQ ID NO: 403412 - DNA, 1000 bp, Homo Sapiens; identical to SEQ ID NO: 118398

SEQ ID NO: 403413 - DNA, 1000 bp, Homo Sapiens; identical to SEQ ID NO: 291867

SEQ ID NO: 403414 - DNA, 1000 bp, Homo Sapiens
attagctgtcaggctgattattaaagtcctttctaagtattttattcccccaaaagtttcttactcaaggaatttgcatttagtgaaaaacagaaagcatcctaaatatatcccattgaaacaaaacattgattataagcatgtatattctggttcatgtggccgatatttttatttctttaatgattttgatcctaaatctgccttttcatctaatgtgaagtagaatcctaaataatgttatctgtgtagcaagctattcaatgggaaagctgcttctttctttaaaacaaacaaacaaaaaaaaccttcagtggaaagccaaattccaaaaggttatataccaagcttgtccaactcgcagctcgtcggccaggacatgcagcccagaatagctttgaatgtggccccaacacaaatttgtaaactttcttagaaattgtaattattattattatttttttttggtaactttttttaaagctcatcagctatcgttagtgtattttatgtgtggcccaagacagttcttcttcttgccagtgtggcccagggaagccaaaagattggacacccctgctatatactatatgattccatttagaggacattctggaaaagcaaaactgtaggggcaaaaatcagtggttgctaggggctggaatgggggaaagtgttgaccacagaggggcgtaagggatcttccttgggatgacttgattgtgggtggatttatgtatttgaaaactcacagaactatgtactttaaaaagatgtatgttcctctatgaaaattatatctcagtaaactttggcttataaaaatcttaaaagccctaagtgaccgaaaggttatgttagcattgagtgctttgaaatatggagtcagagggtggggtaaccaaatgttggcctttgtgtattcatcttttgatacaagaaagcaatgccaatcttcagtatttttaaattgtaaatgaattttgtagttcccgaattc

SEQ ID NO: 403415 - DNA, 1000 bp, Homo Sapiens
gtgaatgcagcacagatgaagttaacagtgaagacatggatgcttactgcaggaaagaaaacagttcagaaatctgcagtaacaatggagagtgcgtctgcggacagtgtgtttgtaggaagagggataatacaaatgaaatttattctggcaaattctgcgagtgtgataatttcaactgtgatagatccaatggcttaatttgtggaggaaatggtgtttgcaagtgtcgtgtgtgtgagtgcaaccccaactacactggcagtgcatgtgactgttctttggatactagtacttgtgaagccagcaacggacagatctgcaatggccggggcatctgcgagtgtggtgtctgtaagtgtacagatccgaagtttcaagggcaaacgtgtgagatgtgtcagacctgccttggtgtctgtgctgagcataaagaatgtgttcagtgcagagccttcaataaaggagaaaagaaagacacatgcacacaggaatgttcctattttaacattaccaaggtagaaagtcgggacaaattaccccagccggtccaacctgatcctgtgtcccattgtaaggagaaggatgttgacgactgttggttctattttacgtattcagtgaatgggaacaacgaggtcatggttcatgttgtggagaatccagagtgtcccactggtccagacatcattccaattgtagctggtgtggttgctggaattgttcttattggccttgcattactgctgatatggaagcttttaatgataattcatgacagaagggagtttgctaaatttgaaaaggagaaaatgaatgccaaatgggacacgcctggagtgcagtggtgtgatatcagctcactgcaacctctgacttccagattccagcaattctcctgcctcagcctcccgagtacctgggattacagggtgaaaatcctatttataagagtgccgtaacaactgtggtcaatccgaagtatgagggaaaatgagta

SEQ ID NO: 403416 - DNA, 1000 bp, Homo Sapiens; identical to SEQ ID NO: 291868

SEQ ID NO: 403417 - DNA, 1000 bp, Homo Sapiens
acgtaaggactccaagatgtacaaggaccgcatcgaggccatcctgctgcagatggaggaggtcgccattgagcgggaccaggccatagccacgcgggaggagctgcacgcacagcacgcccggggcctgcaggagaaggacgcgctgcgcaagcaggtgcgggagctgggcgagaaggcggatgagctgcagctgcaggtgttccagtgtgaggcgcagctactggccgtggagggcaggctcaggcggcagcagctggagacgctcgtcctgagctccgacctggaagatggctcacccaggaggtcccaggagctctcactcccccaggacctggaggacacccagctctcagacaaaggctgccttgccggcggggggagcccgaaacagccctttgcagctctgcaccaggagcaggttttgcggaacccccatgacgcaggcctgagcagcggggagccgcccgagaaggagcggcggcgcctcaaagagagttttgagaactaccgcaggaagcgcgccctcaggaagatgcagaaaggatggcggcagggggaggaggaccgggagaacaccacgggcagcgacaacaccgacactgagggctcctagccgcagcagcgcaggccccgaccagggcacacccaccggcccggcctcctgccacccgggggtgccgacgccctggggcgcagacttccccgagccgtcgctgacttggcctggaacgaggaatctggtgccctgaaaggcccagccggactgccgggcattggggccgtttgttaagcggcactcattttgcggaggccatgcgggtgctcaccacccccatgcacacgccatctgtgtaacttcaggatctgttctgtttcaccatgtaacacacaatacatgcatgcattgtattagtgttagaaaacacagctgcgtaaataaacagcacgggtgacccgcaaaaaaaaaaaaaaaaaaaaaaaaaaaaaaaaaaaaaaa

SEQ ID NO: 403418 - DNA, 1000 bp, Homo Sapiens; identical to SEQ ID NO: 223774

SEQ ID NO: 403419 - DNA, 1000 bp, Homo Sapiens; identical to SEQ ID NO: 118400

SEQ ID NO: 403420 - DNA, 1000 bp, Homo Sapiens
cacacagcttcgccagctgcaggcagagcctccgggtgtgctcaagcaggaagccaggaccagggagccctgtccacgggagaagcagcggctggtgcggatgcatgccatctgccccagagacgacagcgactgcagcctcgtcagctccacagagtctcagctcttgtcggacctgagtgccacgtccagccgcgagctggtggacagcttccgctccagcagccccgcgccccccagccagcagtccctgtacaagcgggtggccgaggacttcggggaagaaccctggtctttcagcagctgcctggagatcccggagggagacccgggagccctgccgggagctaaggcaggcgacccacacctggattatgagctcctagacacggcagaccttccgcagctggaaagcagcctgcagccagtctcccctggaaggcttgatgtctcggagagcggcgtcctcatgcggcggaggccagcccgcaggatcctgagccaggtcaccatgctggcgttccagggggatgcattgctggagcagatcagcgtcatcggcgggaacctcacgggcatcttcatccaccgggtcaccccgggctcggcggcggaccagatggccttgcgcccgggcacccagattgtgatggtgagccgtgcgaggcccctcctgtcccccgggctcctcatggggacagtggcagcgggtggggtgacccaggcagacttcacctcccccagacgatgcagatccactctgggctgggcctctgctctttcctgggctgacgtaaagcgttctgctcatttatagatgagagtcgtgccgtgcagaacccagcatgtcacccgtggtgctgctgccatgcggcgcttctgaccaggggtttttgcatgaggccccttgacagggctgctctgggtggtcactttgggtgtgtacagtaaaatacacgtgacataaaattcactattttaaccaaaaaaaaaaaaaaaa

SEQ ID NO: 403421 - DNA, 1000 bp, Homo Sapiens; identical to SEQ ID NO: 117451

SEQ ID NO: 403422 - DNA, 1000 bp, Homo Sapiens
ttagatgcacttaagttagcctccaccaccctttcccccttctcttagttattgctgaagagggttggtataaaaataattttaaaaaagccttcctacacgttagatttgccgtaccaatctctgaatgccccataattattatttccagtgtttgggatgaccaggatcccaagcctcctgctgccacaatgtttataaaggccaaatgatagcgggggctaagttggtgcttttgagaaccaagtaaaacaaaaccactgggaggagtctattttaaagaattcggttgaaaaaatagatccaatcagtttataccctagttagtgttttgcctcacctaataggctgggagactgaagactcagcccgggtggggctgcagaaaaatgattggccccagtccccttgtttgtcccttctacaggcatgaggaatctgggaggccctgagacagggattgtgcttcattccaatctattgcttcaccatggccttatgaggcaggtgagagatgtttgaatttttctcttccttttagtattcttagttgttcagttgccaaggatccctgatcccattttcctctgacgtccacctcctaccccataggagttagaagttagggtttaggcatcattttgagaatgctgacactttttcagggctgtgattgagtgagggcatgggtaaaaatatttctttaaaagaaggatgaacaattatatttatatttcaggttatatccaatagtagagttggcttttttttttttttttttggtcatagtgggtggatttgttgccatgtgcaccttggggttttgtaatgacagtgctaaaaaaaaaaaagcatttttttttatgatttgtctctgtcacccttgtccttgagtgctcttgctattaacgttatttgtaatttagtttgtagctcattaaaaaaatgtgcctagttttataaaaaaaaaaaaaaaaaaaaaaaaaaaaaaaaaaaaaaa

SEQ ID NO: 403423 - DNA, 1000 bp, Homo Sapiens; identical to SEQ ID NO: 118401

SEQ ID NO: 403424 - DNA, 1000 bp, Homo Sapiens; identical to SEQ ID NO: 118402

SEQ ID NO: 403425 - DNA, 1000 bp, Homo Sapiens; identical to SEQ ID NO: 223776

SEQ ID NO: 403426 - DNA, 1000 bp, Homo Sapiens
caagaccaggcctctgtccaccctggccaacttggccatcatcatcacagatgtccaggacatggaccccatcttcatcaacctgccttacagcaccaacatctacgagcattctcctccgggcacgacggtgcgcatcatcaccgccatagaccaggataaaggacgtccccggggcattggctacaccatcgtttcagggaataccaacagcatctttgccctggactacatcagcggagtgctgaccttgaatggcctgctggaccgggagaaccccctgtacagccatggcttcatcctgactgtgaagggcacggagctgaacgatgaccgcaccccatctgacgctacagtcaccacgaccttcaatatcctggttattgacatcaatgacaatgccccggagttcaacagctccgagtacagcgtggccatcactgagctggcacaggtcggctttgcccttccactcttcatccaggtggtggacaaggatgagaatttgggcctgaacagcatgtttgaggtgtacttggtggggaacaactcccaccacttcatcatctccccgacctccgtccaggggaaggcggacattcgtattcgggtggccatcccactggactacgagaccgtggaccgctacgactttgatctctttgccaatgagagtgtgcctgaccatgtgggctatgccaaggtgaagatcactctcatcaatgaaaatgacaaccggcccatcttcagccagccactgtacaacatcagcctgtacgagaacgtcaccgtggggacctctgtgctgacagtcctggtgagtccccgcttcactgcagggccactgagctctccagggccgactgtggtgaggcacccagagggattttgtccaagggacctcagcaatcagggaaggaggcacccccaaatccctgagctgtgtttgttggtgtattaaataaagtttttggactcttaaaaaaaaaaaaaaaaaaaa

SEQ ID NO: 403427 - DNA, 1000 bp, Homo Sapiens; identical to SEQ ID NO: 291875

SEQ ID NO: 403428 - DNA, 1000 bp, Homo Sapiens; identical to SEQ ID NO: 291877

SEQ ID NO: 403429 - DNA, 1000 bp, Homo Sapiens; identical to SEQ ID NO: 291878

SEQ ID NO: 403430 - DNA, 1000 bp, Homo Sapiens
ggagcgtcacatgcaaattgagcgtgcacccagcgttccgccctttctacgctgggccggttatcgacccggcccagtgcgcaggcgcgggaaagttgaactaataaagtttgtacgagttcagtggaggagaccgcaagttgagtggaggaggcggcggtggggccccggaccaggtgcctccatggcaggctctgaagagctggggctccgggaagacacgctgagggtcctagctgccttccttaggcgtggtgaggctgccgggtctcctgttccaactccacctaggcccagctactccagacttctatgctttggtggcccagcggctggaacagctggtccaagagcagctgaaatctccgcccagcccagaattacagggtcccccatcgacagagaaggaagccatactgcggaggctggtggccctgctggaggaggaggcagaagtcattaaccagaagctggcctcggaccccgccctgcgcagcaagctggtccgcctgtcctccgactctttcgcccgcctggtggagctgttctgtagccgggatgacagctctcgcccaagccgagcatgccccgggcccccgcctccttccccggagcccctggcccgcctggccctagccatggagctgagccggcgcgtggccgggctggggggcaccctggccggactcagcgtggagcacgtgcacagcttcacgccctggatccaggcccacgggggctgggagggcatcctggctgtttcacccgtggacttgaacttgccattggactgagctctttctcagaagctgctacaagatgacacctcatgtccctgccctcttcgtgtgcttttccaagtcttcctattccactcagggctgtggggtggtggttgccctacctgtttttgccaaaaataaattgtttaaaacttttcttattaaaaacgttacaaagtaaaaaaaaaaaaaaaaaaaaaaaaaaaaaaaaaaaaaaa

SEQ ID NO: 403431 - DNA, 1000 bp, Homo Sapiens; identical to SEQ ID NO: 291880

SEQ ID NO: 403432 - DNA, 1000 bp, Homo Sapiens; identical to SEQ ID NO: 118403

SEQ ID NO: 403433 - DNA, 1000 bp, Homo Sapiens
attgacaggcgaggctcagaaactcctggcttagattgaagtgtgtgtgatgggggtgcagcttagaggaccccctctgaaagggatggagatgctgatgagaacaacactaccacttgaaggtgaacattccctgtctggttggactgagtcaagggtctgcggtgcagcatcttcagcttgagaaaatgaggttgtcagtttccagcaaggctgacatccaccagactgatttctccgatgttgcacttggctggcttatgcctctgagatcggtgccacggctgtatttatttcagttgtcactgctgctccctcctgctatgaaacgacactgccagtgccagcagtgtccttgggaaaggcaatatttatgaagggcagaagaggcagccccaagaacctaaagactgcaggctgctaattgcaggaaatgactttggaagggcaggctcttgtccagtttcagggctgaaatgcctggcgaactccattcagccatcacatattgactgagtggctgcttagcatgggccaccgcgctaggctcgggacagctggtctttccggccatctttcttgctggcaagtcagcaaacattaccttcttagtcacgtgcatatttttgccttcattcttaccacctggcctgcaaagtttgcaggagggccaggtatattcacttgtgtcttctgggtcctttcattgctgacaggctgtgatggccctcttgagccttgggcagggtgggtgaggtgcagatgaccaggagtgtgtgaatgccttccaggaggtggctttgttccgtgcctccctgcccccatcgtcactaccaggtctggtacggagtcggtgctcagtgtttgcaaaacagagctgaaaacggactttgggaggccgaggcaggcagatcacctgaggtcaggagtttgagaccagcctggtcaacatggtaaaaccccatttctgctaaaaaaaaaaaaaaaaaaaaaaaaaaaa

SEQ ID NO: 403434 - DNA, 1000 bp, Homo Sapiens; identical to SEQ ID NO: 291881

SEQ ID NO: 403435 - DNA, 1000 bp, Homo Sapiens; identical to SEQ ID NO: 118404

SEQ ID NO: 403436 - DNA, 1000 bp, Homo Sapiens; identical to SEQ ID NO: 118405

SEQ ID NO: 403437 - DNA, 1000 bp, Homo Sapiens; identical to SEQ ID NO: 291885

SEQ ID NO: 403438 - DNA, 1000 bp, Homo Sapiens; identical to SEQ ID NO: 291886

SEQ ID NO: 403439 - DNA, 1000 bp, Homo Sapiens; identical to SEQ ID NO: 223778

SEQ ID NO: 403440 - DNA, 1000 bp, Homo Sapiens; identical to SEQ ID NO: 118406

SEQ ID NO: 403441 - DNA, 1000 bp, Homo Sapiens; identical to SEQ ID NO: 291889

SEQ ID NO: 403442 - DNA, 1000 bp, Homo Sapiens; identical to SEQ ID NO: 118408

SEQ ID NO: 403443 - DNA, 1000 bp, Homo Sapiens; identical to SEQ ID NO: 223780

SEQ ID NO: 403444 - DNA, 1000 bp, Homo Sapiens; identical to SEQ ID NO: 223782

SEQ ID NO: 403445 - DNA, 1000 bp, Homo Sapiens; identical to SEQ ID NO: 118409

SEQ ID NO: 403446 - DNA, 1000 bp, Homo Sapiens; identical to SEQ ID NO: 291892

SEQ ID NO: 403447 - DNA, 1000 bp, Homo Sapiens; identical to SEQ ID NO: 118410

SEQ ID NO: 403448 - DNA, 1000 bp, Homo Sapiens
ctcctacaagctggtgcccacgcacacgcaggtgccggtgcatcggcgctacaagcacttcgactggctgtacgcgcgcctggcggagaagttcccggtcatctccgtgccccacctgcccgagaagcaggccaccggccgcttcgaggaggacttcatctctaagcgcaggaagggcctgatctggtggatgaaccacatggccagccacccagtgctggcgcagtgcgacgtcttccagcacttcctgacgtgccccagcagcaccgacgagaaagcctggaagcagggcaagaggaaggccgagaaggacgagatggtgggcgccaacttcttcctgacccttagcacgccccccgccgctgcccttgacctgcaggaggtggagagcaagatagacggcttcaagtgcttcaccaagaagatggacgacagcgcgctgcagctcaaccacacggccaacgagttcgcgcgcaagcaggtgaccggcttcaaaaaggagtatcagaaggtgggccagtccttccgcggcctcagccaggcctttgagctggaccagcaggccttctcggtgggcctgaaccaggctatcgccttcaccggagatgcctatgacgccattggcgagctcttcgcggagcagcccaggcaggacctggatcccgtcatggacctattagcgctgtatcaggggcatctggctaacttcccggacatcatccacgttcagaaaggtaaagcctggcccttagagcaggtgatatggagtgtattgtgcaggctgaaaggggcgactttgacagcagtaccactgtgggtttcagactcatattctacaggtgaggaagcgagcagagacgtggacgcctgggtcttttccctagagtgtaagttggattgctcgacaggcagcttcctcctcgagtatcttgcattagggaatgagtactctttctcgaaggttcaaagagtacctttgatgacagtgctatcattttag

SEQ ID NO: 403449 - DNA, 808 bp, Homo Sapiens
gaacacaggcatacacaggaagatacattcacagaaagagcttcctgcacaaagtaagccaccagcgcaacatgacagtgaagaccctgcatggcccagccatggtcaagtacttgctgctgtcgatattggggcttgcctttctgagtgaggcggcagctcggaaaatccccaaagtaggacatacttttttccaaaagcctgagagttgcccgcctgtgccaggaggtagtatgaagcttgacattggcatcatcaatgaaaaccagcgcgtttccatgtcacgtaacatcgagagccgctccacctccccctggaattacactgtcacttgggaccccaaccggtacccctcggaagttgtacaggcccagtgtaggaacttgggctgcatcaatgctcaaggaaaggaagacatctccatgaattccgttcccatccagcaagagaccctggtcgtccggaggaagcaccaaggctgctctgtttctttccagttggagaaggtgctggtgactgttggctgcacctgcgtcacccctgtcatccaccatgtgcagtaagaggtgcatatccactcagctgaagaagctgtagaaatgccactccttacccagtgctctgcaacaagtcctgtctgacccccaattccctccacttcacaggactcttaataagacctgcacggatggaaacagaaaatattcacaatgtatgtgtgtatgtactacactttatatttgatatctaaaatgttaggagaaaaattaatatattcagtgctaatataataaagtattaataattt

SEQ ID NO: 403450 - DNA, 1000 bp, Homo Sapiens; identical to SEQ ID NO: 223783

SEQ ID NO: 403451 - DNA, 1000 bp, Homo Sapiens; identical to SEQ ID NO: 118411

SEQ ID NO: 403452 - DNA, 1000 bp, Homo Sapiens; identical to SEQ ID NO: 291897

SEQ ID NO: 403453 - DNA, 1000 bp, Homo Sapiens; identical to SEQ ID NO: 291898

SEQ ID NO: 403454 - DNA, 1000 bp, Homo Sapiens
ttttgtattagcccagacatctgtaatgtttttgcactggtgacagacaaaatctgttttaaaatcatatccagcacaaaaactatttctggctgaatagcacagaaaagtattttaacctacctgtagagatcctcgtcatggaaaggtgccaaactgttttgaatggaaggacaagtaagagtgaggccacagttcccaccacacgagggcttttgtattgttctactttttcagccctttactttctggctgaagcatccccttggagtgccatgtataagttgggctattagagttcatggaacatagaacaaccatgaatgagtggcatgatccgtgcttaatgatcaagtgttacttatctaataatcctctagaaagaaccctgttagatcttggtttgtgataaaaatataaagacagaagacatgaggaaaaacaaaaggtttgaggaaatcaggcatatgactttatacttaacatcagatcttttctataatatcctactactttggttttcctagctccataccacacacctaaacctgtattatgaattacatattacaaagtcataaatgtgccatatggatatacagtacattctagttggaatcgtttactctgctagaatttaggtgtgagattttttgtttcccaggtatagcaggcttatgtttggtggcattaaattggtttctttaaaatgctttggtggcacttttgtaaacagattgcttctagattgttacaaaccaagcctaagacacatctgtgaatacttagatttgtagcttaatcacattctagacttgtgagttgaatgacaaagcagttgaacaaaaattatggcatttaagaatttaacatgtcttagctgtaaaaatgagaaagtgttggttggttttaaaatctggtaactccatgatgaaaagaaatttattttatacgtgttatgtctctaataaagtattcatttgataaaaaaaaaaaaaaa

SEQ ID NO: 403455 - DNA, 1000 bp, Homo Sapiens; identical to SEQ ID NO: 291899

SEQ ID NO: 403456 - DNA, 1000 bp, Homo Sapiens; identical to SEQ ID NO: 223785

SEQ ID NO: 403457 - DNA, 1000 bp, Homo Sapiens; identical to SEQ ID NO: 118412

SEQ ID NO: 403458 - DNA, 1000 bp, Homo Sapiens
tgctggcctcagagattcatgtcacatattgaaatagcaaatagaaatgtgcaggagcggagggacagcgacacctggttcttaagcaaattctagattggaacaattagaagatctgactgatgttaagagtggccagaggaaagtgagaggcgtccatttccagcagacacaatggaggctgacagaggcaggagcctacccctggccacaccacctctgggacacggcacccccctgggcctggagggagagggccaatccagacacactcacactctcatctctttccttggctggaaacaagtgcaggaagctcccctcccaatttcttatgctcccttcccccttacactcctctccttcgactgctcccttcccccttcttatgcccctctcagaccacccagcggatgcctattcccgccccccacccctcccctgcgtctccttgtaaagttccatgagatgctcgaggagcacctgctggtggggcacccagcactctgctgggcatcaccctccgcacccctgacatttctctccacctccagaggcttggaagggaacagggcagatgaggcccttcacccaccatctacgccatatacccatcaccatcccatgaggaaaaaaaaaaaagtaaaacaaagacaaaaaaaatcttttgtacagagatatatttttattatacaaagtttgtacagtaccaaaaaagaaaaaaaaaaggtgtaaatttttttttcattattgtaggtaaacggtagtggaagccttttttgtaaatgtaataaaatgtataaatatggttttcagaaaacatcaagtgctgtaaatatgtaatctacacaccttcttggcttgtctgcagtatatacatttaatttatctgtctctgtatatgaggcttccccctggggtcctgcattatggtactttcctgaatttgaaagcaattttaaattttttgaattcaaataaaatataaatttttgcattg

SEQ ID NO: 403459 - DNA, 1000 bp, Homo Sapiens; identical to SEQ ID NO: 291902

SEQ ID NO: 403460 - DNA, 1000 bp, Homo Sapiens
gtttccagacgcagaatgagtggctctgtgtgaccataggcagatgctgactctggaagactccgtgccactcctttctagtgccaaacaccatccaaccacaggactgacgtggaagccccaaacaactgagaatgagtggcatgagccccctaaaagcaggcgagagaacgagcaatcaagttctccactgtgtacagacttttcctccccccaatccaaggtcaaagtgatgtgtcttttagaggctttgggacactttttagtaagtatgagcagacaaatgcaatgaatatgctatgaaaaaacccttctgaactgagagagggcttatcactatatccagctaagatttgtatttgaatcatctgtaaagtcgcactcttacaacaagcttctgggttttaaatacctccgtacagcaagtaaacgttccccgctttctgttctcagtgtcctcggtcatggtgcttttcgttgcattaaaagtgccggtcaaactttgatagtatttttttatagttggtgcagagtggaataactcatggattatttcaatatttttgtaataaaaaatatagggtatacacataggcatcatcacattttttatagacctggaatcgtttaaaatactttaagcatcataattacttgggatgtcagaaactggtccacaaattccatcagcctgcctcagcagattgaaaacatttgtctcttgcaagatcaccctactttgcaagttggtgcccccaggaacctggccaggggtgctatcagaatatcaggtgaagagagaatcagcttaaatagaaagggcttgtcaagactggccaatgtttcccaggaaatcaaagatgtaaatgattactttcatccatccattataacaaacctgaccacagtggaagctgtcttaaacttccttccctggttttatattaacccaactgatagattaagtattagtcaaaccactaaaaaaaaaaaaaaaaaa

SEQ ID NO: 403461 - DNA, 1000 bp, Homo Sapiens; identical to SEQ ID NO: 223786

SEQ ID NO: 403462 - DNA, 1000 bp, Homo Sapiens; identical to SEQ ID NO: 118413

SEQ ID NO: 403463 - DNA, 1000 bp, Homo Sapiens; identical to SEQ ID NO: 118414

SEQ ID NO: 403464 - DNA, 1000 bp, Homo Sapiens; identical to SEQ ID NO: 118415

SEQ ID NO: 403465 - DNA, 1000 bp, Homo Sapiens
aaggaaatgtcaaggtcaaattcgaaccaagtagtgatgagcaccaaggaggcagcaatgatattgagggcataaatcgggaatataaagaccacctcagtaattccatagagcgcgaaggaaaccaggagagagcagtccaggaatggttccaccgtggcacacctgttggccaagaggaaagtaccaacaaaagcacaaccccccagtctcccatggaagggaagaataagttactcaaaagtggtggtccagatgcctttacaagcttccccactcaagggaagtcaccggaccccaataatcctagtgacctcacagtgacctcaagggggctaacggacttggagattggcatgtatgccttgctctgcgtcttctgtctggccattctggtcttcttgatcaactgcgtggcgtttgcctggaaatacagacacaaaaggtttgctgtgagtgagcagggcaacatcccccattcccacgactgggtctggcttgggaatgaagtggaacttttggaggaccctgttgacattacactcccatcagaggagtgcacaaccatgatagacaggggcctgcagttcgaggagaggaacttccttctgaatggcagttcccagaagacttttcatagtcaactactcagaccctctgactatgtctatgagaaagaaattaaaaatgaacctatgaattcttcgggcccaaagaggaagagagtcaagttcacttcctacaccaccatcctcccagaggacggcggcccatacaccaactccatcctgtttgacagcgatgataacatcaagtgggtctgccaagatatggggctgggggattcacaggactttagagactatatggaaagtctgcaagaccagatgtaaactcctttcttatgtttgtattcacctttatgccttctgttttttgaatgctggagcagtgagtttgatcagcaataggggatgatttaacaaagtttgatttgtgg

SEQ ID NO: 403466 - DNA, 1000 bp, Homo Sapiens; identical to SEQ ID NO: 291906

SEQ ID NO: 403467 - DNA, 1000 bp, Homo Sapiens; identical to SEQ ID NO: 118416

SEQ ID NO: 403468 - DNA, 1000 bp, Homo Sapiens; identical to SEQ ID NO: 291908

SEQ ID NO: 403469 - DNA, 1000 bp, Homo Sapiens; identical to SEQ ID NO: 118417

SEQ ID NO: 403470 - DNA, 1000 bp, Homo Sapiens; identical to SEQ ID NO: 291910

SEQ ID NO: 403471 - DNA, 1000 bp, Homo Sapiens
ttaaagatgtgaattggacagccagacttgcttatttgtctgatatcttcagtatttttaatgatcttaatgcttctatgcaagggaagaatgcaacttatttttcaatggcagataaagttgaaggacaaaaacagaagttagaagcttggaaaaacagaatttctacagattgttatgacatgtttcataatttaacaacaattatcaatgaagtaggtaatgatcttgatattgcacatctgcgaaaagttatcagtgaacatcttacaaatttgttagaatgttttgaattttattttccatcaaaagaagatccacgcataggaaatttgtggatccaaaatccatttctttcatcaaaagataacttaaatttaactgtaactctacaggataagttgttgaagctggctaccgacgaaggattgaaaatcagttttgaaaatacagcatcacttccttcattttggataaaagctaaaaatgactatcctgagcttgctgagattgctttaaaattgctgcttcttttcccctcaacatacctctgtgagaccggattctctactttaagtgttattaaaacaaaacatagaaacagtttaaatatacattatcccctgagggtagcattgtcatcaatccaacctagattagacaaattaacaagcaagaagcaagctcacttatcacattaaaagctttaaatattgatatgtaaggtattggttcaaagtatgcatataagcattgagtgtgaggaatttgctatttcactttaaactttctgtctagttacagttatggaagtatgagaagttatgagtgaaacagcaattttctatataaattgcctatatgtatattttcaattaagaatgtgtacagtttttataattctatttttcctcatatttgtcgtatttattaaaatataattttaaatctgttgattctaatattaaaacatttgatcttaaaaaaaaaaaaaaaaaaa

SEQ ID NO: 403472 - DNA, 1000 bp, Homo Sapiens; identical to SEQ ID NO: 223791

SEQ ID NO: 403473 - DNA, 1000 bp, Homo Sapiens; identical to SEQ ID NO: 291913

SEQ ID NO: 403474 - DNA, 1000 bp, Homo Sapiens; identical to SEQ ID NO: 223792

SEQ ID NO: 403475 - DNA, 1000 bp, Homo Sapiens; identical to SEQ ID NO: 223793

SEQ ID NO: 403476 - DNA, 1000 bp, Homo Sapiens
aataggagtacaataaaactgttgtcagcttttgttttacagagaacgctagatattaagaattttgaaatggatcatttctacttgctgtgcattttaaccaataatctgatgaatatagaaaaaaatgatccaaaatatggatatgattggatgtatgtaacacatacatggagtatggaggaaattttctgaaaaatacatttagattagtttagtttgaaggagaggtgggctgatggctgagttgtatgttactaacttggccctgactggttgtgcaaccattgcttcatttctttgcaaaatgtagttaagatatactttattctaatgaaggccttttaaatttgtccactgcattcttggtatttcactacttcaagtcagtcagaacttcgtagaccgacctgaagtttctttttgaatacttgtttctttagcactttgaagatagaaaaaccactttttaagtactaagtcatcatttgccttgaaagtttcctctgcattgggtttgaagtagtttagttatgtctttttctctgtatgtaagtagtataatttgttactttcaaatacccgtactttgaatgtaggtttttttgttgttgttatctataaaaattgagggaaatggttatgcaaaaaaatattttgctttggaccatatttcttaagcataaaaaaatgctcagttttgcttgcattccttgagaatgtatttatctgaagatcaaaacaaacaatccagatgtataagtactaggcagaagccaattttaaaatttccttgaataatccatgaaaggaataattcaaatacagataaacagagttggcagtatattatagtgataattttgtattttcaamaaaaaaaaagttaaactcttcttttctttttattataatgaccagcttttggtatttcattgttaccaagttctatttttagataaaattgttctccttctaaaaaaaaaaaaaaaaaaaaaaa

SEQ ID NO: 403477 - DNA, 1000 bp, Homo Sapiens; identical to SEQ ID NO: 291917

SEQ ID NO: 403478 - DNA, 1000 bp, Homo Sapiens; identical to SEQ ID NO: 118419

SEQ ID NO: 403479 - DNA, 1000 bp, Homo Sapiens; identical to SEQ ID NO: 291919

SEQ ID NO: 403480 - DNA, 1000 bp, Homo Sapiens
tccgggagctgacctgcctggatctttcctgttgcaagcttggagatgagcatgaacttctagaacatctcaccaatgaagccctgtctagtgtaactcagctccacctgaaggataattgtttatctgatgctggggtgcggaagatgacagcaccagttcgagtgatgaaaagaggccttgagaatctaacattattagacttatcatgtaaccctgagatcacagatgcaggcattggatacctcttttcttttaggaaactaaactgcttagatatctctgggacagggctcaaggacatcaaaaccgtcaagcacaagctccagacccacataggccttgttcactccaaagtgcctttgaaggaatttgatcatagtaactgcaagacagagggctgggctgaccagatcgttctgcagtgggagcgtgtgactgcggaagctgtgaagccacgggagacctcggagcctagagcagcagctcagcgcttctatgggaagcggtctcgagcagaagccccactgaagtgtcccctggcagacacccacatgaactcttccgagaaactccagttctataaagagaaagccccagattgccatgggccagtgttgaaacacgaagctatctcaagccaggagtcaaagaagagcaagaagagaccttttgaggagtcagagacagaacagaataactcttcacaaccttcaaagcagaaatatgtatgtcttgctgtggaagactgggacttgttaaattcctattgattagtagatacaagttgacctttctctggcccccagctctagtgtttgagtaaaggagactgaggatgatttactttttgtttgaatttacctatggcattagcatagtaagcagatatttctacttttgtggtgtgggaggggaatgctatggaagtaagtaataatttctaatgtatattttcaatacatagtaattttttcaaataaacatttttgctgtcctt

SEQ ID NO: 403481 - DNA, 1000 bp, Homo Sapiens; identical to SEQ ID NO: 223794

SEQ ID NO: 403482 - DNA, 1000 bp, Homo Sapiens; identical to SEQ ID NO: 291921

SEQ ID NO: 403483 - DNA, 1000 bp, Homo Sapiens; identical to SEQ ID NO: 291922

SEQ ID NO: 403484 - DNA, 1000 bp, Homo Sapiens
taccagagcattctggagctggagaaggaaagaattcaacttttatgcaataacttaaaccagtacagccaacatatttctctttttggccaaaccctgaccacatgccacacgcagattcactgtgccatcagcaagattgacattgaaaaagatatccaggctgtaatggaagaaactgcaattttatctacagaaaacaaatctgagttcctgttaacggattactttgaagaagatcctaacagtgcaatggataaagagagacgaaagtctttactaaaaccaaaattattgagactgcagagagacattgaaaaagcctcaaaagacaaggaaggcctggaacgaatgcttaaaacgtactccagcacctcctccttctctgatgcaaagagccagaaagacacagcagcgttaatggatgagaacaatttgaaactagaccttttggaagcgaactcctacaaactgtcatcaatgttagcagaacttgagcaaagacctcaacccagccatccttgtagtaattccatcttcaggtggagggaaaaggagcatactcatagctatgtgaaaatatctcggccttttttaatgaagagattagagaatattgtgagcaaggcatcttctggtgggcagagcaatccaggttcttcaactccagcccctggtgcagcccagctcagcagcagactttgcaaggccttgtattcttttcaagccaggcaagatgatgagttgaatttggaaaagggtgacattgtgattatacacgagaaaaaagaagaaggatggtggtttggatctttgaatgggaaaaaaggccattttcctgccgcttatgtggaggagttaccttcaaatgctggcaacacagctacaaaggcataaaacaagactctgaacatactaccttcacactcggtaatcaacaatacagtgtggttcaaataagaataaagtgctcttacctttaaaaaaaaaaaaaaaaaaa

SEQ ID NO: 403485 - DNA, 1000 bp, Homo Sapiens; identical to SEQ ID NO: 291923

SEQ ID NO: 403486 - DNA, 1000 bp, Homo Sapiens; identical to SEQ ID NO: 293112

SEQ ID NO: 403487 - DNA, 1000 bp, Homo Sapiens
aggttatcggaccagtgctgtggcctcaggcctgcaatttgatgttgaaacccggcatgtgtttatcggtgaccactcaggccaagtaacaatcctcaaactggagcaagaaaactgcaccctggtcacaacattcagaggacacacaggtggggtgaccgctctctgttgggacccagtccagcgggtgttgttctcaggcagttcagatcactctgtcatcatgtgggacatcggtgggagaaaaggaacagccatcgagctccaaggacacaacgacagagtccaggccctctcctatgcacagcacacgcgacaattgatctcctgtggcggtgatggtgggattgtcgtctggaacatggacgtggagaggcaggagacccctgaatggttggacagtgattcctgccaaaagtgtgatcagcctttcttctggaacttcaagcaaatgtgggacagtaagaaaattggtctaagacagcaccactgccgcaagtgtgggaaggccgtctgtggcaagtgcagctccaagcgctcctccatccccctgatgggcttcgagtttgaagtgagggtctgtgacagctgccacgaggccatcacagatgaagaacgtgcacccacagccaccttccatgacagtaaacataacattgtgcatgtgcatttcgatgcaaccagaggatggttactgacttctggaactgacaaggttattaagttgtgggatatgaccccagtcgtgtcttgatgactctcccaggaatcagaaagatagtatttactaaagaaacggttgttttaacccaaatcattaccagagtggtaaagcagacatgtgagaagtaagaaagaaactaaagaccctgaatgaatttgcagattacccatgtgcacagtggggacctggccagtgagcactcgcaaggggactcttccaacttgttcatacaatataaaagaagctatttttttaacaaaaaaaaaaaaaaaaaaa

SEQ ID NO: 403488 - DNA, 1000 bp, Homo Sapiens; identical to SEQ ID NO: 291924

SEQ ID NO: 403489 - DNA, 1000 bp, Homo Sapiens; identical to SEQ ID NO: 291925

SEQ ID NO: 403490 - DNA, 1000 bp, Homo Sapiens; identical to SEQ ID NO: 291926

SEQ ID NO: 403491 - DNA, 1000 bp, Homo Sapiens; identical to SEQ ID NO: 291927

SEQ ID NO: 403492 - DNA, 1000 bp, Homo Sapiens; identical to SEQ ID NO: 118420

SEQ ID NO: 403493 - DNA, 1000 bp, Homo Sapiens; identical to SEQ ID NO: 291929

SEQ ID NO: 403494 - DNA, 1000 bp, Homo Sapiens; identical to SEQ ID NO: 291930

SEQ ID NO: 403495 - DNA, 1000 bp, Homo Sapiens; identical to SEQ ID NO: 291931

SEQ ID NO: 403496 - DNA, 1000 bp, Homo Sapiens
gctctgtggcgtctttcttcaaaatgagacgaatgaaaccatacatatgcagatgagcatggcagtgggacagcaggccctgcccttgaatatcattgcccccaaggctgtgctggtctccctctgtggggtcttattgaatggcactgtcttctggctgctttgctgtggggccacgaatccctacatggtatacatcctccacctggtcgctgctgacgtgatctatctttgctgctcggcagtggggttcttacaggtgactctgctaacttatcatggagtcgtgttttttatccctgatttcctggccatattgtctcccttctcctttgaggtgtgtctctgtctcctggtggccatcagcacagagcggtgtgtgtgtgtcctcttccccatctggtacagatgccaccgcccaaaatacacatctaatgttgtctgcaccctcatctggggcctgcctttttgcatcaacatagtaaaatcacttttcctaacttactggaaacatgtaaaggcatgtgtcatatttctaaagctttctgggctcttccatgctatcctttcacttgtgatgtgtgtgtcgagtctgactctactcattagattcctgtgctgctcccagcagcaaaaggccaccagggtctatgcggtggtgcagatctcggcccccatgttcctactctgggccctacccctgagcgtggcacccctcataacagatttcaaaatgtttgtcaccacctcctatttaatttccttgttcctcattataaacagcagcgccaaccctatcatttatttctttgtggggagcctcagaaagaaaaggctgaaggaatctctcagagtgattctccaacgggcgttagcagataagccagaggtggggaggaacaaaaaggcagctggcatcgacccaatggagcaaccacactctactcagcatgtggagaaccttcttcccagggagcacagggtcgatgtggaaacataa

SEQ ID NO: 403497 - DNA, 1000 bp, Homo Sapiens
gaactgtaggccttgctgaagcatcctcccacagaaaggagataagggccttatccaattggctgtacacaatagatcagtgcttctttcctagacaaggctgaaaggggccaacattatttctgaagacttcattattggaattctatgggagtgatctcactgagctattttggaatagaaatgtggctagttgcctgacctccctcaatggtttcacgtggctttcaaagggaaggaagggcagtgctgacttttggtaaaatgggcgaaagggtccatgccagcaacacaatcactcaaagtccagatgagggatcagtaaatacaacgtgcctgaaaggtggcccttgagcacattcctccggtagacattaacttattaaattgattctgattacaaatataaactttgcccccatctcacccagtaacaatgcaagagttgatgtcagtctataaaaggaagtaggaactgtccctggctttcaggctccaacatcctccccctgtcaagatgtggcacctcaaactttgtgcagtcctcatgatcttcctgttgctgttgggccagatagatggctccccaataccagaagtgagttcggcaaagagaaggccacggagaatgaccccattttggagaggggtttccctcaggcctattggagcctcctgccgggatgattctgagtgtatcacaaggctatgcagaaaaagacgctgttccttaagtgtggcccaggaatgatgtacataccagggaaagaaaggacagcagtcacctccgacaatgctccgttctatggaatattgattaactgcattttggctggagacacccaagtgaagcaatcttgtatttttaatatttaaaggcagatgtacgctttaaattggtctccatttcttcttagaatgttgatatatggataagcataactaaacttgtcaatttagagtttatttttctatggatactattaaatgtctcaaattg

SEQ ID NO: 403498 - DNA, 1000 bp, Homo Sapiens; identical to SEQ ID NO: 223800

SEQ ID NO: 403499 - DNA, 1000 bp, Homo Sapiens
ttctaccacttccagcgtttggcagagctgtaccatggttaccatgccatccatcgccacacggaagatccgttcagtgtccatcgtcctgaaactcttttcaacatctccaggttcctgctgcacagcctgcccaaggacaccccctcgggcatctctaaagtgaaaatactcttcaccttggccaagcagagcaaggccctcggtgcctacaggctggcccggcacgcctatgacaagctgcgtggcctgtacatccctgccagattccaaaagtccattgagctgggtaccctgaccatccgcgccaagcccttccacgacagtgaggagttggtgcccttgtgctaccgctgctccaccaacaacccgctgctcaacaacctgggcaacgtctgcatcaactgccgccagcccttcatcttctccgcctcttcctacgacgtgctacacctggttgagttctacctggaggaagggatcactgatgaagaagccatctccctcatcgacctggaggtgctgagacccaagcgggatgacagacagctagagattgcaaacaacagctcccagattctgcggctagtggagaccaaggactccatcggagatgaggacccgttcacagctaagctgagctttgagcaaggtggctcagagttcgtgccagtggtggtgagccggctggtgctgcgctccatgagccgccgggatgtcctcatcaagcgatggcccccacccctgaggtggcaatacttccgctcactgctgcctgacgcctccattaccatgtgcccctcctgcttccagatgttccattctgaggactatgagttgctggtgcttcagcatggctgctgcccctactgccgcaggtgcaaggatgaccctggcccatgaccagcatcctggggacggcctgcaccctctgcccgccttggggtctgctgggctgtgaaggagaataaagagttaaactgtcaaaaaaaaaaaaaaa

SEQ ID NO: 403500 - DNA, 1000 bp, Homo Sapiens; identical to SEQ ID NO: 291936

SEQ ID NO: 403501 - DNA, 1000 bp, Homo Sapiens
tcttcccttatcactgaaggaaggaagagtccagaagggccacagagaactcaaacgttcagttcaagtctccacaggaattcaaccccagaaagacataaacttggagtccatctggtttaattattggagaatcgattcccaagtccaggaagagaaatgtagggttttacagagtcgcagcaggaaagagagctccctggtctcctgggaagtgtgacctcttctaatggacccctctcctctgctgccatactcccccttggctccccctgtctcctctcctgatttcctccaatctctgtagccccagaagtgaacgccagacaggaacacgcatgtgtgtatatatgtgttcacgtgtgctatgtgtgttaagcctgcatgcatgggtgtgggggtatgtgccctctgtgtacgtatctgtgtgagtgtgggggtttcaagggtgtattaggaataacgctcaaaatcctaaggaaattgaatactctgagagaagagagacagaccctctcatactgttttatattgttttatactcagaaaaggaaaaagaagcaaaactaaaggcaggtagcctggcgcctaggaaccagacctgaaaccaaggaaccagacccgaaaccaggcctgggccggcctgacctaagcctggtagttaaaattcgacccctgacctagcaactgatgttatctatagattatagaaagacattgtgaaacttcccggtctgttctgttccactctgaccatcggtgcatgcagcccctgtcacctaccccctgcttgctcaatcgatcacgaccctctcacgtggacccccttagagttgtgagcccttaaaagggacaggaattgctcactcggggagctcggctcttgagacagcagtcttgctgatgctcctggccgaataaaccgcttccttctttaaaaaaaaaaaaaaaaaaaaaaaaaaaaaaaaaaaaaaaaaaaaaaaaaaaaaaaaaaaaaaaa

SEQ ID NO: 403502 - DNA, 1000 bp, Homo Sapiens; identical to SEQ ID NO: 291939

SEQ ID NO: 403503 - DNA, 1000 bp, Homo Sapiens
ctatgctcagtccatcgcagacgcccggctcgtgtttgaaatgggcaccgagctgggtcacaagatgcacgttctggaccttggtggtggcttccctggcacagaaggggccaaagtgagatttgaagagattgcttccgtgatcaactcagccttggacctgtacttcccagagggctgtggcgtggacatctttgctgagctggggcgctactacgtgacctcggccttcactgtggcagtcagcatcattgccaagaaggaggttctgctagaccagcctggcagggaggaggaaaatggttccacctccaagaccatcgtgtaccaccttgatgagggcgtgtatgggatcttcaactcagtcctgtttgacaacatctgccctacccccatcctgcagaagaaaccatccacggagcagcccctgtacagcagcagcctgtggggcccggcggttgatggctgtgattgcgtggctgagggcctgtggctgccgcaactacacgtaggggactggctggtctttgacaacatgggcgcctacactgtgggcatgggttcccccttttgggggacccaggcctgccacatcacctatgccatgtcccgggtggcctgggaagcgctgcgaaggcagctgatggctgcagaacaggaggatgacgtggagggtgtgtgcaagcctctgtcctgcggctgggagatcacagacaccctgtgcgtgggccctgtcttcaccccagcgagcatcatgtgagtgggcctcgttccccccggagaatcccagcggggcctcagagatgcatctgggagaggtggggaagatggcaggcaagggtacccttggccaggactctggtgcccaccctgccacccccgcgctccacctgcagtgtttctgccctgtaaataggaccagtcttacactcgctgtagttcaagtatgcaacataaatcctgttccttccaaaaaaaaaaaaaaaaaaaaaaaaaaaaa

SEQ ID NO: 403504 - DNA, 780 bp, Homo Sapiens
aaggaaagccaccacacgcccacccccaaagcccacactcccaccccccacgccctctgcacacactgaatccaaactcttaaatgagatggcgatcaaagagcgcgtggagggccgagccaaagtcccgtacaaattcagggacagcctcaaacgtttctccttctcgcccactggaatgttgaagatcctgagactgagtcttatcttaggagcattagcttgtttcatcatcacccaagccaatgagtcatttataacaatcacaagtctggaaatctgcattgtcgttttttttattctaatatatgtgctaacccttcaccacttgctgacctatttacattggcccttacttgatcttaccaacagtatcattacagctgtgttcctttcagtagttgccatcttggccatgcaagaaaagaaaagaaggcatttactctatgtcggggggtccctgtgtctcacagcggtaatcgtgtgttgcatcgatgcgtttgtggtcaccacgaagatgaggaccaacttgaaaagattcctgggagtcgaagttgaaaggaagctttcccccgccaaggacgcctaccccgaaaccggccccgacgccccgcagaggcccgcctgaagccagcccggcgccctagcagatgcacgtgtctgtcgaatcgctgcctccgagcccacccccgagctcgcatgctgtcacccattccagcctaaatgtgaccataaaattagggctgctgcttttatcgagaaaaaaaaaaaaaaaaaaaa

SEQ ID NO: 403505 - DNA, 1000 bp, Homo Sapiens
cgtggtctaaagtcctttgggctcctgccgctgccagcactgatcatatgctcttgaccctggtcgggtggggggatgtctggatacctcctctgtggaaagaactggccacacatccgcagaggtgactcgggctgagaacccaggctcctcctccctttggtgacacgcccctcggtccctcactggcacttctccctccggccacacggcggcgtctcgccatagcgcagcggccgatggtacagcccgctcccccctcgcgctctcggacagtgggtccttccacttgtagaaaagcattgtgggacggaagcctgtcctttcttccttttggtgcgagcttgctgtggtttttgctctgggtcctctgggatggcgcctggctgtggccgcgtggtctctcacgcaggggcgccgggcgggggaacgcggccaccctgagtctggtgagtcgactgcggcggcctgtgtccgaagtgtccggggccgtgaacaagggcagcggcctggcctcaggcctgcgttcccacgtttggaaacggggagcttcgtcgatttgtgtttacatcatcgactatgccagggagttctccagataagcctggttttattttcgtcagtgaaaaggccttaccgtataactgactttatgcttgccctgcccccgtataaaataacttaaaagcagcgtgcctggttacagctgtttccacgtgcggtgctcgtcgggagtgatcacctaccctacaggtggaagatggatgcctgaagtgtagactgctgctagctgaataccatctgggagcataaaggtgacctgaaggatgtccttggtgaggattttgaaaatttgatcttcacaagagttgcctggatcatttgaaatttctgggagtctgaggagtactgacataattacctgctggagtctgtaaatacacatttaagacagtgaggatgtgaataaatatattaatgcaaaaaaaaaaaaaaaaaa

SEQ ID NO: 403506 - DNA, 1000 bp, Homo Sapiens
tgccttttaccacccacctattccaccccaagcagggggccattgcccacgtcctcccagccctgcacaaggaccggccccgttttgactttgccaatttggcggtggctgccacgcaagaggatccgcctgggatgggagacctgagcaagctgagcccaggactgggtagccccatctcgggcctcagtaaattgactccggacagaaagccctctcgaggaaggttgccctccaaaacgaaaaaagagtttatctgcaagttttgcggcagacactttaccaaatcctacaatttgctcatccatgagaggacccacacggacgagaggccgtacacgtgtgacatctgccacaaggccttccggaggcaagatcacctgcgggatcacagatacatccattccaaagaaaaacccttcaaatgtcaggagtgtgggaaaggattttgtcagtctagaactctagcagttcacaaaactttacacatgcagacatcaagccctacagctgcgagcagtgcggcaaagtgttcaggcgaaactgtgatctgcggcggcacagcctgactcacaccccgcggcaggacttctagagaagcccaggatctgtcccgtgccgccgctgctcccctccccagacacctctccacgtctcctacccagggggtcgcatccctagcccttcactgaccccagctcttcccttgctgcagccgcacctgcagctccagggagttaactcttcttctgggggactgagaactgtagaaagccacacactactacatcccttcacaaagagtatatgctagtttcttgtagatattcacagctcattttagagctctgtacataatgttgtgggtctttgttttgttgttttgtttgctttgggatcttgttggatgcacttagatatggaaaatggaagccaaattttatctttaaagactgtattttcaaaataaaactttttcttgtttgtttcaaaaaaaaaa

SEQ ID NO: 403507 - DNA, 1000 bp, Homo Sapiens; identical to SEQ ID NO: 118423

SEQ ID NO: 403508 - DNA, 1000 bp, Homo Sapiens
ggaggagaaggcagcccccctgctaaaggaggaaatggcccaccatgccctgctgcgggaatcctgggaggcagcccaggagacctgggaggacaagcgtcgagggcttaccttgccccctggcttcaaagcccagaatggaatagccattatggtctacaccaactcatcgaacaccttgtactgggagttgaatcaggccgtgcggacgggcggaggctcccgggagctctacatgaggcactttcccttcaaggccctgcatttctacctgatccgggccctgcagctgctgcgaggcagtgggggctgcagcaggggacctggggaggtggtgttccgaggtgtgggcagccttcgctttgaacccaagaggctgggagactctgtccgcttgggccagtttgcctccagctccctggataaggcagtggcccacagatttggtaatgccaccctcttctctctaacaacttgctttggggcccctatacaggccttctctgtctttcccaaggagcgcgaggtgctgattcccccccatgaagtctttttggttaccagattctctcaggatggagcccagagcttggtgactctctggagctataatcagacctgtagccattttaactgcgcctatctgggtggggagaagaggcggggctgtgtgtctgcgccaggagccctgggaacgggtgaccttcatatgacgaagaggcacctccagcagccttgagaagcaagaacatggttccggacccagccctagcagccttctccccaaccaggatgttggcctggggaggccacagcagggctgagggaactctgctatgtgatggggacttcctgggacaagcaaggaaagtactgaggcagccacttgattgaacggtgttgcaatgtggagacatggagttttattgaggtagctacgtgattaaatggtattgcagtgtggagacatggaaaaaaaaaaaaaaaaaaaaaaaaaaaa

SEQ ID NO: 403509 - DNA, 1000 bp, Homo Sapiens
accgctctcccaacaaaaaaacaactagttagttctactaattagaaacttgctgtactttttcttttcttttaggggtcaaggaccctctttatagctaccatttgcctacaataaattattgcagcagtttgcaatactaaaatattttttatagactttatatttttccttttgataaagggatgctgcatagtagagttggtgtaattaaactatctcagccgtttccctgctttcccttctgctccatatgcctcattgtccttccagggagctcttttaatcttaaagttctacatttcatgctcttagtcaaattctgttacctttttaataactcttcccactgcatatttccatcttgaattggtggttctaaattctgaaactgtagttgagatacagctatttaatatttctgggagatgtgcatccctcttctttgtggttgcccaaggttgttttgcgtaactgagactccttgatatgcttcagagaatttaggcaaacactggccatggccgtgggagtactgggagtaaaataaaaatatcgaggtatagactagcatccacatagagcacttgaacctcctttgtacctgtttggggaaaaagtataatgagtgtactaccaatctaactaagattattatagtctggttgtttgaaataccatttttttctccttttgtgtttttcccactttccaatgtactcaagaaaattgaacaaatgtaatggatcaatttaaaatattttatttcttaaaagccttttttgcctgttgtaatgtgcaggacccttctcctttcatgggagagacaggtagttacctgaatataggttgaaaaggttatgtaaaaagaaattataataaaagggatactttgcttttcaaatctttgttttctcttattctaggtaaggcatattaaaaataaatatgtaaagaaaaaaaataaaagttgtcttcatggaaaaaaaaaaaaaaaaaa

SEQ ID NO: 403510 - DNA, 1000 bp, Homo Sapiens; identical to SEQ ID NO: 118425

SEQ ID NO: 403511 - DNA, 1000 bp, Homo Sapiens; identical to SEQ ID NO: 291943

SEQ ID NO: 403512 - DNA, 1000 bp, Homo Sapiens; identical to SEQ ID NO: 291943

SEQ ID NO: 403513 - DNA, 1000 bp, Homo Sapiens
gtcttagtgaggagaaagccacttacttttctgaaaagtggaagcagaatactcccacccttgctcgatgggccataggtcagactctgatgattaaccagctcatagatatggagtggaaatttggagtgacatctgggagcagcgaattggagaaagtgggaagtatatttttacaactaaagttggtggttaagaaaggaaatcaaaccaaaaatgtgtatatagaattaaccttgcctcagttctacagcttcctgcacgagatggagcgagtcagaaccagcatggagtgtttctgctgatttctgtccctgcatctcccctagccccgttccctgccctcctcccttccctgggtgactgctctgagaggcacttcactcacaggcctgtgggatgctccatggggccctgctggctccatggggcccaggtgcaaagggtttctgaaaaacagcaggattaagtactgaaagagcccaacacaattaccctgtaaactctctgttagggcaaccaccaccacctgtcttccaggacacatttttagatactctgacaggccactgcatctcagattcaggggagaaaataagttgtcacctccccttcaaagttccagagtaaacaaatggtgccatcattcaagataacatgctgatcaccctcctcccaaaaagcaagagcttgtttatggctgaggaatcggcggattgtctgaatgacacatatacagagcccccacggatttctgcacactctgggtctgtgctggtggaacattgccaatcagttcttaatgaggcacctgtgtgtaaatacatgcttggtcttctctgcagagaactgaggctaaactctgtccctacttctggttttgccctgtcatgtcgtaacgaggtgggccttttgaggccattttagtttgagttcgagccaaccacctctgttggttagatgatgaataaaaaggttctgaagaaaaaaaaaaaaaaaa

SEQ ID NO: 403514 - DNA, 1000 bp, Homo Sapiens; identical to SEQ ID NO: 223803

SEQ ID NO: 403515 - DNA, 1000 bp, Homo Sapiens; identical to SEQ ID NO: 223804

SEQ ID NO: 403516 - DNA, 1000 bp, Homo Sapiens
ccaagcgtcagagcctgcagacaacggagggcagcgcccccccgagatcaggacgaaggaccaccgtcggtcctcagcagggcggcagcctcctcctggctgtccggggcagagcggaggctgggcttggccaggggcccgaatttccgcctggggagtgttggatccacatcccggtgccggggagggaagcccaacatccccttgtacagatgatcctgaaagtcacttccaagttctccggatattcacaaaactgccttccatggaggtcccctcctctcctagcttcccgcctctgcccctgtgaacacccatctgcagtatcccctgctcctgcccctcctactgcaggtctgggctgccaagcttcttcccccctgacaaacgcccacctgacctgaggccccagcttccctctgccctaggacttaccaagctgtagggccagggctgctgcctgccagcctggggtccctggaggacaggtcacatctgatccctttggggtgcgggggtggggtccagcccagagcaggcactgagtgaatgccccctggctgcggagctgagccccgccctgccatgaggttttcctccccaggcaggcaggaggccgcggggagcacgtggaaagttggctgctgcctggggaagtttttcctccccaaggcggccatggggcagcctgcagaggacagtggacgtggagctgcggggtgtgaggactgagccggcttccccttcccacgcagttttgggatgcagcagccgctcgcatggaagtgccgcccagaggcatgcaggctgctgggcccccccccctcatccagggaacgagtgtgtctcaaggggcatttgtgagctttgctgtaaatggattcccagtgttgcttgtactgtatgtttctctactgtatggaaaataaagtttacaagcacacggttttcaaaaaaaaaaaaaaaaaaaaaaaaaaaaaaaaaaaaaaaaaaaaaaaaa

SEQ ID NO: 403517 - DNA, 1000 bp, Homo Sapiens; identical to SEQ ID NO: 291946

SEQ ID NO: 403518 - DNA, 1000 bp, Homo Sapiens; identical to SEQ ID NO: 291947

SEQ ID NO: 403519 - DNA, 1000 bp, Homo Sapiens; identical to SEQ ID NO: 118426

SEQ ID NO: 403520 - DNA, 1000 bp, Homo Sapiens; identical to SEQ ID NO: 291951

SEQ ID NO: 403521 - DNA, 1000 bp, Homo Sapiens; identical to SEQ ID NO: 118427

SEQ ID NO: 403522 - DNA, 1000 bp, Homo Sapiens; identical to SEQ ID NO: 118428

SEQ ID NO: 403523 - DNA, 1000 bp, Homo Sapiens; identical to SEQ ID NO: 223806

SEQ ID NO: 403524 - DNA, 1000 bp, Homo Sapiens; identical to SEQ ID NO: 118429

SEQ ID NO: 403525 - DNA, 1000 bp, Homo Sapiens; identical to SEQ ID NO: 291956

SEQ ID NO: 403526 - DNA, 1000 bp, Homo Sapiens
caacctctttccagataagcccttgaggtctcgggctgacctacacacacacacacacacacacacacccccccccacacacacacacgacagagaacatgccataaacatccttgaacccatgcaggaaagcccatcccatattctgaaaaaatgccaaattaggtttttctttctttttggaaatcagtcattacagtaaccgaaaccattgggttcagcgaaaatggaaagatttagctgaatgtagtcagtccaattaagttggatgcaactgagtgatttagttgcttgggtaacccagtgcttgcttgctttcttcattctctgggtggaaactaagatcaagacacatgtttggggataagttaaatgtctgagctattttgctcggtttatcctaagagaactttattatgggatgaggaggtgacccaagatgagaagtggagggggacagcgatgttttctaaacatcgtccagtgttgactggcttccttactttgcacagtgaacacaactaaccacattaattcagctttgtgaagtccctgctctctgtgggtctatgagtcagcagcaacattggcctaacctccgtcccagcctcctggctcaccacatgtgtacagtgctgtttgcagttgtactcattatccatccatctctctgccatccccaagcatcgctgggtgtaaaacgcaaactctccaccgacactgccatgcgtggtcatgtcttgatgccttcaggggctcagtagctatcaaagaggcctggagggcctgggcaggcttgacgatgcctgaccgagttcaagacccacaccctgtagcaataccaagtgctattacataatcaatggacgatttatacttttattttttatgattatttgtttctatattgctgttagaaaaagtgaaataaaaatacttcaaaagaagatatccatataaaaataaaaggagagaaaaatgaaaaaaaaaaaaaaaaaaa

SEQ ID NO: 403527 - DNA, 1000 bp, Homo Sapiens; identical to SEQ ID NO: 291957

SEQ ID NO: 403528 - DNA, 1000 bp, Homo Sapiens
ctttctcttacctatcatcaaattgtagtaatgtatttcaccccactggacttatcttcagagttttaaaagagaggagctctcgacttagaggtaatatgaacagatgaacagacactgtggctggagccccaaagtgtggagcattgtgagatttggggtcacagcaatttatggctactattccctgggtctggtaggtaggacaaatgtcctcttttacttttcaaaactggcttaggtattcatggaccttgattcttctatatacattttataataaatacgtgaaattgcttaaaacctctttttggaatttttaatgaacttgcaacaaatttgtaaataggagagaactgacgttcttgtgatgttttcccatgcataaacatgccacatccatgttcttgggtcatcttttttgccctttcatggagtcataaattttcccaactgaagtcttgtatattctgttagattaattcctatttctagttgctgtaaatgatatcttatgttttattacatttctaataggatatggtgttggtgaaatgttaaccctctcattagatctactagtttacctgttgattctattgtgttttctatgtaaatgattttgtcagctataaataataacattttattttctctttccttgcaatacctatgctcatttattttttatgtttacccattggttagggcctcctgtatacattaaacagttcatagtcatgatagtgagtattcttacactgttcccagtattacagggaatgcttagaaattttctttatttaaacattatgtttgttgtagccttgttaaaggctattttataatttttactagaaatattttgacatttattgtgatttttttctatctctaatctattgagatagtcacattccttttgtcttcactccattataaaggtaagttaccttaataaaattgttgatatcatttcatcaaaaaaaaaaaaaaaaaa

SEQ ID NO: 403529 - DNA, 1000 bp, Homo Sapiens; identical to SEQ ID NO: 223809

SEQ ID NO: 403530 - DNA, 1000 bp, Homo Sapiens; identical to SEQ ID NO: 291959

SEQ ID NO: 403531 - DNA, 1000 bp, Homo Sapiens; identical to SEQ ID NO: 223810

SEQ ID NO: 403532 - DNA, 1000 bp, Homo Sapiens; identical to SEQ ID NO: 223811

SEQ ID NO: 403533 - DNA, 1000 bp, Homo Sapiens; identical to SEQ ID NO: 223812

SEQ ID NO: 403534 - DNA, 1000 bp, Homo Sapiens; identical to SEQ ID NO: 223813

SEQ ID NO: 403535 - DNA, 1000 bp, Homo Sapiens
gcaccagcgctgccagccctctggtgccaccaatggcctgctggtggccctgctgggtgggggcctgcctgctggcttcgtgggccccctttctcgtatggcttaccagggttccaacctgccctcgctggagctgctcatctgtcgatgcctcttccacctccctattgccctgctacttaaactgcgtggcgacccccttctgggacctcctgacatccgaggctgggcctgcttctgtgccctgctcaacgtcctcagcattggatgtgcctacagtgcagttcaggtggtgcccgctggcaacgctgccactgttcgcaaaggttcttccaccgtatgctccgctgtcctcaccctctgccttgagagccagggtctcggtggctacgagtggtgtggactgttgggcagcatcctaggactaatcatcattctgggacctggactctggacactacaggaggggaccacaggtgtctacaccaccctgggctatgtgcaggctttcctgggaggcctggcgctgtccctggggcttctggtctatcgttctctgcactttccctcctgcctcccaacagtggccttcctatctggcttggtggggctgctgggctgtgtgccaggcctctttgtgctgcagacccccgtgttgcccagtgacctcctgagttggagttgtgtgggggcagaggggatcctcgccttggtctccttcacatgtgtgggctatgcggtcaccaaggcccaccctgccctggtgtgcgctgtcctgcattccgaggtggttgtggcccttatactgcagtattatatgctccatgagactgtggcactttctgacatcatgggggcaggggttgtgctgggcagcattgccatcattacagcccggaacctcagctgtgagaggacagggaaggtggaggagtgagatagaacttgggagcccgggggttgggagggacagggataaataaagacaaagactgaagac

SEQ ID NO: 403536 - DNA, 1000 bp, Homo Sapiens
ctttgcccctgtctgtctgatttgctgaactttctcagtcctgattttaaaacagttaagagagtccttgtgaggattaagtgagacagtgcctatgaaacaaacactaagtgcagtgtctctggaactgccttactcacaggcttccaccacagccctatgagagctttgccaactctgcggtccatgactgttcccacttttaatgaatcctacctttcgcagaaggctgaaagcagggcagaaaagatctacatttctttggacactgcacttgatagggactcaaagaatgttatatttttaattaatttctttttctcttccgtacaatttctgtctcaacaaaattagaagaattaaatttaaaactagctccaaaagagcagtcgtctttcattttggcagaccttagaatatccccctagcttaataaatctttgttgaatggcttaatgaatgaataaactggttaatgtttaagttaaacctctgaaaagtctccatttaccagatttgagtcactaaatttattgctttcactacttttgaattttgcaaacatgaaattaagttttataattagataaatcaatgtcaacacatatttaaagtttgaggtacactgtcttcctgtggtttcctttcacatgccatcccttaaaatcccagctacacgccttcccattccttcccctttgcctttgttctaatcttccctctctgggggctctctaattcgtcctggaagtttccagtggtcttatagactccatgttcttggaggacaggctgtatgtcagatttaccttttattccgaagaactcggagcatttattttgttaattaaattgcacatatttttaaaagttacgtgttccacagaataaaatattaattgtaaaaaaaaaaaaaaaaaaaaaaaaaaaaaaaaaaaaaaaaaaaaaaaaaaaaaaaaaaaaaaaaaaaaaaaaaaaaaaaaaaaaaaaaaaaaaaaaa

SEQ ID NO: 403537 - DNA, 1000 bp, Homo Sapiens; identical to SEQ ID NO: 291962

SEQ ID NO: 403538 - DNA, 1000 bp, Homo Sapiens
ggggagtacgcgctccgcctccctaggattcccccacccctccccaaacccgcctcgcgaaccgccggtaccgggcccaaggaccagccgcctgcgctcagacgttcagctgtgccccactcaggtctaaatagcatttccccccttgaattagaagaatccgtgggattcgcagcgttggtccagctcccagccaagcagcctccgccgggcacattagaacagggcagaagcatccagcaaggggagaaggctgtagttagcttggagaccacacccagccagaaagcagactggagttcaattccaaagcctgagaatgaaggcaagttaataaagcaagcagctgagggaaaaccaagacccagacctggagacctgattgagatttttcgaattggctatgagcactgggccatctatgtagaagatgattgcgtggtccatctggctcccccaagtgaggagtttgaggtgggcagcattacttccatctttagcaatcgggccgtggtgaaatacagtcgtctggaggatgtgctgcatggctgctcctggaaggtcaataacaagctagatgggacgtacctgcccttgccggtggacaagatcatccagcgtacaaaaaagatggtcaacaagatcgtgcagtacagcctgattgaagggaactgtgagcactttgtcaatggcctcagatatggcgtaccccggagccagcaggtagagcacgccctgatggaaggagcgaaggctgctggagcagttatttcagctgtagtggatagcataaagcccaaaccaataactgcctgaaggtgatgaaaactccagctagaggaagagttactgacacaagcaaaaagaacatgcttccttcccttgccttctctcaatggctccgattaagaaaattgtgaacttctggaagaatctacaatgtatccaattacccttccagaaatacatccaatatatacgaaaaaaaaaaaaaaaaaaa

SEQ ID NO: 403539 - DNA, 1000 bp, Homo Sapiens; identical to SEQ ID NO: 223814

SEQ ID NO: 403540 - DNA, 1000 bp, Homo Sapiens
tagtccagacaccccttagatgtcttcataatagtcctatctaccttcaaaaaccatctctatatatggcagactatattaacagctgctgaacaaatcagctctggaggtgattccacatcccctggcattatgctctaatgctgctcatcggagaacagacagccaggataaagtggcaccttctggagtacactggagggggcagcccaagttagaggccagcattgctgacattctggaatatttgcatctaaaaatgtttactcgttgccatgctgcagtccgcacaagctgtgaggcagaaaacttgacttgaagcagccttgaagagtgagttcatgagctcatggtttttctccttgtatggactgctcgctccaagggcaggcagagctcatgaatgcctcttatcttcctaagcggagttttaggtgacacaggatgaagcagaagagatctacccatctcatctgctctgcacccagcttctaagtggacaaagccaagcccaggcatgagctctggcaaagcaagaccccagattctccatttttgcctgtggaaaggagggtccctttacaggcttttttttcctttttttcccccaaaatctcttaaaatgaggaatctcttagcagactttggagttccccattctgccacattctgaccatgagacgcggcttgcagtgggggtgaacgcacataaaaagggaccactgacgtcctgctctactctctgctttctatttatttattttgggggtgggttggggagtcagaagaacctggaggacggaggaaaccaggggcaatgtttacaagactggtggacaagtgtaaatatggaataagaacaaacagttctaattaattccttcttctgcagtatggaaacctattacgatgcccttgagtcaagcactgagatacgttacccaattagggaaataaatttgttaataaaattgctgaggtcaaaaaaaaaaaaaaaaaa

SEQ ID NO: 403541 - DNA, 589 bp, Homo Sapiens
ctaccacctcctgcttcccaaggaccatgaaactcctgctgctggctcttcctatgcttgtgctcctaccccaagtgatcccagcctatagtggtgaaaaaaaatgctggaacagatcagggcactgcaggaaacaatgcaaagatggagaagcagtgaaagatacatgcaaaaatcttcgagcttgctgcattccatccaatgaagaccacaggcgagttcctgcgacatctcccacacccttgagtgactcaacaccaggaattattgatgatattttaacagtaaggttcacgacagactactttgaagtaagcagcaagaaagatatggttgaagagtctgaggcgggaaggggaactgagacctctcttccaaatgttcaccatagctcatgacttcctctcggctatcactcacccctgtcctcagagtgataaactaagtcacatacagataaagcactgaaaacaccacagtgaccctcccaccccccaccaatatgtaattctattaatagaaacagctgtgtaaagaagtctaaaattttcactatttccaatgataaactcttcagtgctcttcttga

SEQ ID NO: 403542 - DNA, 958 bp, Homo Sapiens
gtgggacgcgccgagccggaggctgcaggatgatgcggttcatgctattattcagccggcagggaaaactgcggctgcaaaaatggtacctggccacttcggacaaggaacggaagaagatggtgcgcgagctcatgcaggttgtcctggctcgaaagcccaagatgtgcagcttcctggagtggagggacctcaaagttgtctataagagatatgccagcctctacttctgctgcgccatcgagggccaagacaatgagctcatcacactggagctgatccaccgatacgtggagctcttagacaaatactttggcagtgtgtgcgagctggacatcatcttcaactttgagaaggcctacttcatcctggatgagtttttgatggggggggatgtccaggacacctccactttccccttttcccactgaaggttttagaagctaggaggcaggaaaatgtgacccagatgggggtgctatttggcttttattccctgcctttgcagaactgatgtcaccccagatgtccttccctccctaataactgtaaatatataaatatgtcaggttaaagggaaaaggtgttcagggcacttcttgtcctctctgtcccataacctacctccaccctccccctagccagccaggcagcttctctgcctgggaggggagcctggacccccctctttctccttggctgcagtggggcctttatccagtgccagggaggaacaacatagttaatttttttctaaccttgccactttgagggaaggaagggttgggggaagggcaagctttatgggaccctggtcctggccctggcctttcactccagttctgggtgaggcaggagctgggaggggtggggagggggagggggaagtgtctgcctttatgtcctttcttctgaaataaaaggaaaagcatttctggaaaaaaaaaaaaaaaaaaaa

SEQ ID NO: 403543 - DNA, 1000 bp, Homo Sapiens; identical to SEQ ID NO: 221414

SEQ ID NO: 403544 - DNA, 714 bp, Homo Sapiens; identical to SEQ ID NO: 118432

SEQ ID NO: 403545 - DNA, 709 bp, Homo Sapiens
atttccctcgcgtgccgcgctcacccacccgcggcatgagcagcgcccccgcgccgggcccggcgcccgccagcctcacgctctgggacgaggaggacttccagggccgtcgctgtcggctgctaagcgactgtgcgaacgtctgcgagcgcggaggcctgcccagggtgcgctcggtcaaggtggaaaacggcgtttgggtggcctttgagtaccccgacttccagggacagcagttcattctggagaagggagactatcctcgctggagcgcctggagtggcagcagcagccacaacagcaaccagctgctgtccttccggccagtgctctgcgcgaaccacaatgacagccgtgtgacactgtttgagggggacaacttccaaggctgcaagtttgacctcgttgatgactacccatccctgccctccatgggctgggccagcaaggatgtgggttccctcaaagtcagctccggagcgtgggtggcctaccagtacccaggctaccgaggctaccagtatgtgttggagcgggaccggcacagcggagagttctgtacttacggtgagctcggcacacaggcccacactgggcagctgcagtccatccggagagtccagcactaggctccacggccccagacaccttccctgaggacactcaataaaggttcctgaatcttcctgccaaaaaaaaaaaaaaaaaa

SEQ ID NO: 403546 - DNA, 1000 bp, Homo Sapiens; identical to SEQ ID NO: 393732

SEQ ID NO: 403547 - DNA, 1000 bp, Homo Sapiens; identical to SEQ ID NO: 223815

SEQ ID NO: 403548 - DNA, 1000 bp, Homo Sapiens; identical to SEQ ID NO: 291968

SEQ ID NO: 403549 - DNA, 1000 bp, Homo Sapiens; identical to SEQ ID NO: 399909

SEQ ID NO: 403550 - DNA, 1000 bp, Homo Sapiens; identical to SEQ ID NO: 223817

SEQ ID NO: 403551 - DNA, 1000 bp, Homo Sapiens; identical to SEQ ID NO: 291970

SEQ ID NO: 403552 - DNA, 1000 bp, Homo Sapiens; identical to SEQ ID NO: 223818

SEQ ID NO: 403553 - DNA, 1000 bp, Homo Sapiens; identical to SEQ ID NO: 291971

SEQ ID NO: 403554 - DNA, 1000 bp, Homo Sapiens; identical to SEQ ID NO: 291972

SEQ ID NO: 403555 - DNA, 1000 bp, Homo Sapiens; identical to SEQ ID NO: 118435

SEQ ID NO: 403556 - DNA, 1000 bp, Homo Sapiens; identical to SEQ ID NO: 291975

SEQ ID NO: 403557 - DNA, 1000 bp, Homo Sapiens
tttcaagtgtggtcaagaataatcttcttggcttacccctttacataagcattataaactaaaatgaaaaccaaaccagacacctgacatagagtctttattttaccccaagttttttgggccactgacattgaatgcaacaactgatttcatacaactgagttactctgttcactccactgaatgcaacccatatagtttcttgcacaaggtgcatctggattccaaatattggatttgagttgactctactcatttattatacactaaagaaattttgttcttcatagttaaatgtactagcatttaatttatattttacatacaacttgcaataatgaaattccttatgtcaggaccctgaaaataagcacatttgaaaactcttagaaaaaaaaaattctgtaatgtcctctagatttagattatgagccctgaggagttattggcaagatttgtgcaaaataaaatatggggagacttgggagttgtctttgtggtttcaaaagtgtaaataaccaattcagaaaacaaaatggaaaaacgaccccttgttaccttgattcactgtatgtggaaaaataatgtaaccaaaagggaagagctttaataatacttatgttaataactctatgaaacatataagctaactatatatcaaacatttcattgagtttggatgtattttcaacatattaaaaaaatagttccctaaggcagctttatggaaactaatataggttggttttacaatttaaaaagtatattctataataaataataaaacaaattgttttaaatgtttagtttcacacatacatagtaccatgattttctttgaaagataaggatgtaatgatttagataaagcatcatgtaaagaaatcctaacatttaagtgtaattcatttcaaatgtcacaagtaaagcatcatcctcaaatatctcactgtcaaaattgtagaattaaataacccaatctcgaaaaaaaaaaaaaaaa

SEQ ID NO: 403558 - DNA, 1000 bp, Homo Sapiens; identical to SEQ ID NO: 291976

SEQ ID NO: 403559 - DNA, 1000 bp, Homo Sapiens; identical to SEQ ID NO: 291977

SEQ ID NO: 403560 - DNA, 1000 bp, Homo Sapiens; identical to SEQ ID NO: 291978

SEQ ID NO: 403561 - DNA, 1000 bp, Homo Sapiens; identical to SEQ ID NO: 291979

SEQ ID NO: 403562 - DNA, 1000 bp, Homo Sapiens
ccaaggtcggggatggagaggacgcgagccccgcggcagtcgagatggcctttttaaaattctatatttgagaaggagtctcgcgctgtcgcccaggctggagcgcaatggcgcgaaatcggctcattgcagcctcgacgtccaggactcgagcgatcctcccgcctcagcctctcgagaagcagcacaaaacagagtaagacagtgacaaagatactcacctgtacaaaggaggaagcttcaaaagaagccattcatgtatggggtgggactgcagaaggaccacagtagagaatccctcaccaataaggaactgtgttaatcaggagtggccagaaggctcctctccaggcctcacagagggaaacactggtctagtgagagacctgcgtcctgcccatcaggaccgaagcggcacgcgtgaggatcctgcaggccaagagacaacagcgattacaaaccccagtcccagccttgcagctgaccttgcaggtgacgccctgcctgggtgtctcggtgcagctgcacatcaggggcctctgctggacagaagctctgagtccacacttggcccccaggcgctggagctggagcactgccacgagaggggatgctgccgtggctgcgccagcttcagccctttccctgcaccgagatgtcccagtgagcggctgggtgctcacagttcccgttgggccatcagaggaagatcaaagatcaaccctcccccatgggctcctgcctgcctgccaggtgggtttcctgcctgtctcccagcccccaagagctccacggactctgccagtagctgctttaaaggagggagggagttttctgatcctctggacatccctggggctggagctatgggctgagccataggagagccagcccagctccctgggggttgggggctgtgtctctccatcccttagtaaaaatacagcaactcccaactcaaaaaaaaaaaaaaaaaaaaaaaaaaaaaaaaaaaaaaaaa

SEQ ID NO: 403563 - DNA, 964 bp, Homo Sapiens
ccgtgctccgccgggaagatggggaaagtgagggggttgcgcgcccgagtgcaccaggctgccgtgaggccgaaaggggaggccgcccccggccccgcgccccctgccccggaggcgacccctccgccggcctcggccgcggggaaggactgggcgttcatcaacaccaacatctttgccaggaccaagatagaccccagcgccttggtgcagaagctggagctggacgtgaggagtgtcacttccgtcaggagaggtgaggcaggctcgagtgcacggagcgtcccttccatcaggagaggtgcagaggccaagaccgttttgcccaagaaggagaaaatgaagctgaggcgtgagcaatggttgcagaaaatcgaagccataaaactggctgagcagaagcacagggaggagcggaggcggagggccacggtggtggtgggggacctgcaccctctcagggatgccctgcccgagctgctggggctcgaggctggcagccggcgccaagcccgcagcagggagagcaacaagccccggccctcagagctcagccggatgagcgcagcccagagacagcagcttctcgaggaagaaaggacccggtttcaggagctgctggccagtccggcctacagagccagccccctggtggccatcgggcagacgctggcccggcagatgcagctggaagatggcggccagctctgaccagggcagcgggcatgccacaactcctcaggacacatgtgggccaagtagagagcgccggcccctcaaggaccatggcctgagcctggtggacgcccttccctctggtcggttgtggggctcaataaatggctctgtgaacttcccctgcactgccagggccgttcccaaaaaaaaaaaaaaaaaaaaaaaaaaaaaaaaaaaaaaaaaaaaaaaaaaaaaaaaaaaaaaaaaaaaaaaaaaaaaaaaaaaa

SEQ ID NO: 403564 - DNA, 1000 bp, Homo Sapiens; identical to SEQ ID NO: 291980

SEQ ID NO: 403565 - DNA, 1000 bp, Homo Sapiens; identical to SEQ ID NO: 291981

SEQ ID NO: 403566 - DNA, 1000 bp, Homo Sapiens
gagaacatggtgcgcaggttcttggtgaccctccggattcggcgcgcgtgcggcccgccgcgagtgagggttttcgtggttcacatcccgcggctcacgggggagtgggcagcgccaggggcgcccgccgctgtggccctcgtgctgatgctactgaggagccagcgtctagggcagcagccgcttcctagaagaccaggtcatgatgatgggcagcgcccgagtggcggagctgctgctgctccacggcgcggagcccaactgcgccgaccccgccactctcacccgacccgtgcacgacgctgcccgggagggcttcctggacacgctggtggtgctgcaccgggccggggcgcggctggacgtgcgcgatgcctggggccgtctgcccgtggacctggctgaggagctgggccatcgcgatgtcgcacggtacctgcgcgcggctgcggggggcaccagaggcagtaaccatgcccgcatagatgccgcggaaggtccctcagacatccccgattgaaagaaccagagaggctctgagaaacctcgggaaacttagatcatcagtcaccgaaggtcctacagggccacaactgcccccgccacaacccaccccgctttcgtagttttcatttagaaaatagagcttttaaaaatgtcctgccttttaacgtagatatatgccttcccccactaccgtaaatgtccatttatatcattttttatatattcttataaaaatgtaaaaaagaaaaacaccgcttctgccttttcactgtgttggagttttctggagtgagcactcacgccctaagcgcacattcatgtgggcatttcttgcgagcctcgcagcctccggaagctgtcgacttcatgacaagcattttgtgaactagggaagctcaggggggttactggcttctcttgagtcacactgctagcaaatggcagaaccaaagctcaaataaaaataaaataattttcattcattcactcaaaa

SEQ ID NO: 403567 - DNA, 677 bp, Homo Sapiens; identical to SEQ ID NO: 118437

SEQ ID NO: 403568 - DNA, 444 bp, Homo Sapiens; identical to SEQ ID NO: 291983

SEQ ID NO: 403569 - DNA, 1000 bp, Homo Sapiens; identical to SEQ ID NO: 118438

SEQ ID NO: 403570 - DNA, 990 bp, Homo Sapiens
atggtgacgaaggcctttgtcttgttggccatctttgcagaagcctctgcaaaatcgtgtgctccaaataaagcagatgtcattcttgtgttttgctatcccaaaaccatcatcaccaaaatccccgagtgtccctatggatgggaagttcatcagctggccctcggagggctgtgttacaatggggtccacgaaggaggttactaccaatttgtgatcccagatttatcacctaaaaacaagtcctattgtggaacccagtctgagtacaagccacctatctatcacttctacagtcacatcgtttccaatgacaccacagtgattgtaaaaaaccagcctgtcaactactccttctcctgcacctaccactccacctacttggtgaaccaggctgcctttgaccagagagtggccactgttcacgtgaagaacgggagcatgggcacatttgagagccaactgtctctcaacttctacactaatgccaagttctccatcaagaaagaagctccctttgtcctggaggcatccgaaatcggttcagatctgtttgcaggagtggaagccaaagggttaagcattaggtttaaagtggtcttgaacagctgttgggccaccccctcggctgacttcatgtatcccttgcagtggcagctgatcaacaagggctgccccacggatgaaaccgtcctcgtgcatgagaatgggagagatcacagggcaaccttccaattcaatgctttccggttccagaacatccccaaactctccaaggtgtggttacactgtgagacgttcatctgcgacagtgagaaactctcctgcccagtgacctgcgataaacggaagcgcctcctgcgagaccagaccgggggagtcctggtcgtggagctctccctgcggagcaggggattttccagtctctatagcttctcagatgttctccaccacctcatcatgatgttggggatttgtgccgtgttatag

SEQ ID NO: 403571 - DNA, 1000 bp, Homo Sapiens
tctggattccagaagatttaactacgtggtccggctgttggagctgatagcaaagtcacagctcacatccctgagtggcatcgcccaaaagaacttcatgaatattttggaaaaagtggtactgaaagtccttgaagaccagcaaaacattagactaataagggaactactccagaccctctacacatccttatgtacactggtccaaagagtcggcaagtctgtgctggtcgggaacattaacatgtgggtgtatcggatggagacgattctccactggcagcagcagctgaacaacattcagatcaccaggcctgccttcaaaggcctcaccttcactgacctgcctttgtgcctacaactgaacatcatgcagaggctgagcgacgggcgggacctggtcagcctgggccaggctgcccccgacctgcacgtgctcagcgaagaccggctgctgtggaagaaactctgccagtaccacttctccgagcggcagatccgcaaacgattaattctgtcagacaaagggcagctggattggaagaagatgtatttcaaacttgtccgatgttacccaaggaaagagcagtatggagatacccttcagctctgcaaacactgtcacatcctttcctggaagggcactgaccatccgtgcactgccaataacccagagagctgctccgtttcactttcaccccaggactttatcaacttgttcaagttctgaatcccagcacatgacaacacttcagaagggtccccctgctgactggagagctgggaatatggcatttggacacttcatttgtaaatagtgtacattttaaacattggctcgaaacttcagagataagtcatggagaggacattggaggggagaaatgcagttgctgactgggaatttaagaatgtgaacttctcactagaattggtatggaaaagcaaaatactgtaaataaactttttttctaacaatttgccaaaaaaaaaaaaaaaa

SEQ ID NO: 403572 - DNA, 1000 bp, Homo Sapiens; identical to SEQ ID NO: 291986

SEQ ID NO: 403573 - DNA, 1000 bp, Homo Sapiens
taaattttgggtttttttttttgttgttgttaatgagcagaaagagagacataatgacagctgatgttaaacttttcatatttcaaattagattccctaggaggtataatatatatttcttgagtaataatgtggttacggaattccaatgttatagtgaagtgtaatgaaaaacatctctaggaatgtgctttaaccactgctgcaaaagagacaagtctgcatttatttgtgcaggaaaccagccatttaattgttctagagttttagcatttaaaaatcgtatgaaagtctacatcagctgaattgtcctagcttgataagcacttggagggggacttggaaggtgagaaagatactgcattttctcatgagtctccaagcccacttgaaaagtcacactgaaaggatgcaaatagccgtctgcgattttggcggccctccggattgtggtgacaatatgttgtacccggacattcccaaatttaaatttggcagtgaaaattccacaaagatttctggtaactttgagctataaataccttaaaaataatagattgatgattttctttatttcctagagaatttattttataaatactttgtttacattttagattgtacttgtctttatttaaaatgatgaatctagtctgaatcagctgttattccaagctatcatgcttaagctatgtcaacagcatttatttgtactaatgctaatatttccatcaaaatttgcctgtggaatatatacagttcttaattttaaactgtcagttcttgagatataccgtgtgaagctattgtcagcttctctatttcaaaatgcaatcagcatataactatattgatattagaagatatttgttttttaaaatatattgatgtatgataaagatgatctaatttgtgaatgcatatgtatgtgtggttactttttataatgtgaaataatgaataatgaatttactcaaaataaaacataggttaatgagat

SEQ ID NO: 403574 - DNA, 1000 bp, Homo Sapiens; identical to SEQ ID NO: 223822

SEQ ID NO: 403575 - DNA, 1000 bp, Homo Sapiens; identical to SEQ ID NO: 114801

SEQ ID NO: 403576 - DNA, 1000 bp, Homo Sapiens; identical to SEQ ID NO: 223823

SEQ ID NO: 403577 - DNA, 1000 bp, Homo Sapiens; identical to SEQ ID NO: 291988

SEQ ID NO: 403578 - DNA, 1000 bp, Homo Sapiens; identical to SEQ ID NO: 118439

SEQ ID NO: 403579 - DNA, 1000 bp, Homo Sapiens; identical to SEQ ID NO: 291989

SEQ ID NO: 403580 - DNA, 1000 bp, Homo Sapiens; identical to SEQ ID NO: 118440

SEQ ID NO: 403581 - DNA, 1000 bp, Homo Sapiens
agacttcgagagttgtggatcaagaggaaactctgacatgatgattccaaattcagaaagatttccatcattatccagtgctgccagataatctaagtcttccaatgcctgcatcaaactttctggtgctaggaaaggaaaaaaataataatttaagagtctcatatggctaagatggagaaacaggtactggacttttccctcctgcatgaaacaagcaaacaatggacaaaatatgtgaaacaacggtttgcaagccaccaaataccagggagtgaaggatagtgattcttgagagggcaaactcaggaggggagccctgtgattgtccagctcatgctccgaggagggtcccagctgcagtgtgcatgcggggggaacccaggtggagcctgccagcctccctgcagtaggaaaacaatgccagggatccagggagactaaggtggccggaactcgcggtcacagtactggagagagacacacagatctaagtcgggggccagagggagctccctcaactaggcagcacagccctactgatcagcgcatgtgtgtaaggaaccacctcaggccagagaaagagccatgtgagaagattagaaggaacagtggtgctgacacaggacctagggtagggcctgttcccaccaccctagctggaaaacctcatgatttatggggcactgggtagaaaacacaagtgagaaaccctagatgggcactgccacctgacacagctatacagcaggacctgaaaggatcacactgcatcctaggacaaagctcaaaagtacctctgggactacaaaaatattcagtgcccaagaaggtaaaatgtacaatgtctagcatccagtagagaggcatgaaaagcaggaaaatacattgcataatacagagaaaaattaatcacaactgacctggatctcagatgctagaaatagtagacaaagatgttatttcccagtgcaaataaagaaataaagatagcaagctg

SEQ ID NO: 403582 - DNA, 1000 bp, Homo Sapiens; identical to SEQ ID NO: 223825

SEQ ID NO: 403583 - DNA, 1000 bp, Homo Sapiens; identical to SEQ ID NO: 291991

SEQ ID NO: 403584 - DNA, 1000 bp, Homo Sapiens; identical to SEQ ID NO: 223827

SEQ ID NO: 403585 - DNA, 1000 bp, Homo Sapiens; identical to SEQ ID NO: 118443

SEQ ID NO: 403586 - DNA, 1000 bp, Homo Sapiens; identical to SEQ ID NO: 291996

SEQ ID NO: 403587 - DNA, 1000 bp, Homo Sapiens; identical to SEQ ID NO: 291997

SEQ ID NO: 403588 - DNA, 1000 bp, Homo Sapiens; identical to SEQ ID NO: 118444

SEQ ID NO: 403589 - DNA, 1000 bp, Homo Sapiens; identical to SEQ ID NO: 285212

SEQ ID NO: 403590 - DNA, 1000 bp, Homo Sapiens; identical to SEQ ID NO: 118445

SEQ ID NO: 403591 - DNA, 1000 bp, Homo Sapiens; identical to SEQ ID NO: 118446

SEQ ID NO: 403592 - DNA, 1000 bp, Homo Sapiens; identical to SEQ ID NO: 292002

SEQ ID NO: 403593 - DNA, 1000 bp, Homo Sapiens; identical to SEQ ID NO: 293183

SEQ ID NO: 403594 - DNA, 1000 bp, Homo Sapiens
ctgctcatggagcggctctcagtggattacggcaagaagtccaagctagagtttgccatttacccagccccccaggtctccacagccgtggtggagccctacaactccatcctgaccacccacacgaccctggaacattctgactgtgccttcatggtcgacaatgaagccatctatgacatatgtcggcgcaacctggacattgaacgtcccacgtacaccaacctcaatcgcctgattgggcagatcgtgtcctccatcacagcctccctgcgatttgatggggccctgaatgtggacttgacggaattccagaccaacctagtgccgtacccccgcatccacttccccctggccacctatgccccagtcatctcagctgagaaggcctaccacgagcagctgtctgtggccgagatcaccaatgcctgcttcgagccagccaatcaaatggtcaagtatgaccctcgccacggcaagtacatggcctgctgcatgttgtacaggggggacgtggtccccaaagacgtcaacgcggccatcgccaccatcaagaccaagcgcaccatccagtttgtggattggtgcccgactggatttaaggtgggcattaactaccagccccccacagtggtccccgggggagacctggccaaggtgcagcgggccgtgtgcatgctgagcaacaccacggccattgcggaggcctgggcccgcctggaccataagttcgatctcatgtatgccaagcgggcctttgtgcactggtacgtgggcgaaggcatggaagagggagagttctctgaggcccgcgaggacctggcagctctagagaaggattatgaagaggtgggcgtggattccgtggaagctgaggctgaagaaggcgaagaatactgaggggagggtgtggtgggttctcccctgccacccccgggatggctgcttccaagttgtttgcaattaaaggttctgtataaaaccaaaaaaaaaaaaaaaa

SEQ ID NO: 403595 - DNA, 1000 bp, Homo Sapiens
ttattttgtttgattcattcgagacaacatgtgtgtatgtgtgtgtgtgtgtgtgtagataatgtggtttttgtatggtgtttgatggaaggaataatctttctttgctttcttagtagtatttcaaggtgtttacttttcaattggtgtgcactgaatgcatgtatggaagaatagcgtgaataatgcaatctctttgtcatttttccccttctcagactcttagctcttaaaattcaaagatgggatattctaactggtagtggtgcatcatttttaacccaaatattgcaagcactttaaagatttgaaaccacatttttattgtttgatgtttcattttcagactttttaatgtcagtcattacaattacattgcatgaggaaaatttttccagaacaacagtgtggaatagttctgaattatgctgttctacagatagaaaaaaagtccaaatgcctttaaaaatttacttcttactccacccaacacgtttttgcaaagcaagaagtctttgtaagacaccttaaacaaagtccttcaattctacagcagaggaaataaaatcccccagaagccaaagggctcaccttcacattgttagttcatgacagacccaggtgtgcttcattagagataacatacattccctttggtatcacaggaagttactggggattactcgacctcattacttagctaacgactggataaaatttcttaattgtttgaagtaacattgtattcgtgtttgcattattaatttgaatagaaaataatcacattttcaacccatttatacaaattgttaatgtttctttagagctgtataactatagtttgaactagcaaggaagttattgttttgacaaccagaaattatgcttttctggtgcatgaaacattaattgcaaagggcagtcacatccaactttaataaaatatggtggtctttcttaaaaaaaaaaaaaaaaaaaaaaaaaaaaaaaaaaaaaaaaa

SEQ ID NO: 403596 - DNA, 1000 bp, Homo Sapiens
aggccccgccagcaggcgaagcagggagatgtcagactgctacacggagctggagaaggcagtcattgtcctggtggaaaacttctacaaatatgtgtctaagtacagcctggtcaagaacaagatcagcaagagcagcttccgcgagatgctccagaaagagctgaaccacatgctgtcggacacagggaaccggaaggctgcggataagctcatccagaacctggatgccaatcatgatgggcgcatcagcttcgatgagtactggaccttgataggcggcatcaccggccccatcgccaaactcatccatgagcaggagcagcagagcagcagctagagacccctttggccacaccttccaggcactggcctgatgccccgccctggtgctctccccaggctccctcctcagcctcctgcccacccagggccctttactctcttctccctccagaccttcctctgacccttgctgaactggggtccctttgtgagtgtctcagtctagaggtacctccctccctggggggtctcagctcctggagtcgcaggcccttggggcccctctgtgagatctcaatgctgtctggggaccctaagagttttctcacctgttcagtctcatctaaccttccaatgtctgatgttcctgccaaattcctgcctgattctgggtccgtcctgacctccaaaggtcagcttggtgcttgaggtctccctgctcttggtggcagtggtagcagcaacagcagcagcagcagcagcagcagcagcagagacctctccactttcccttagcccctctgctgggtagagaggcactttcagggacttccctccagctgcctcttcatctgggaatgagctaagcaaggctgagcctcctcctgttgcttgaaataatgatgatataaaggctggatttggagtttgtatcccctggtccctctgggatgctcattaaaaccttcccactccttaaaaaaaaaaaaaaaaa

SEQ ID NO: 403597 - DNA, 1000 bp, Homo Sapiens; identical to SEQ ID NO: 290563

SEQ ID NO: 403598 - DNA, 1000 bp, Homo Sapiens; identical to SEQ ID NO: 223831

SEQ ID NO: 403599 - DNA, 739 bp, Homo Sapiens
cgtggcgcagcgactcggaggttcgcctccagcttgcgcatcatctgcggccgggtcccgatgagcctcctgttgcctccgctggcgctgctgctgcttctcgcggcgcttgtggccccagccacagccgccactgcctaccggccggactggaaccgtctgagcggcctaacccgcgcccgggtagagacctgcgggggatgacagctgaaccgcctaaaggaggtgaaggctttcgtcacgcaggacattccattctatcacaacctggtgatgaaacacctccctggggccgaccctgagctcgtgctgctgggccgccgctacgaggaactagagcgcatcccactcagtgaaatgacccgcgaagagatcaatgcgctagtgcaggagctcggcttctaccgcaaggcggcgcccgacgcgcaggtgccccccgagtacgtgtgggcgcccgcgaagcccccagaggaaacttcggaccacgctgacctgtaggtccgggggcgcggcggagctgggacctacctgcctgagtcctggagacagaatgaagcgctcagcatcccgggaatacttctcttgctgagagccgatgcccgtccccgggccagcagggatggggttggggaggttctcccaaccccactttcttccttccccagctccactaaattccctcctgccttaaaaaaaaaaaaaaaaaaaaaaaaaaaaaaaaaaaaaaaaaaaaaaaaaa

SEQ ID NO: 403600 - DNA, 1000 bp, Homo Sapiens; identical to SEQ ID NO: 292008

SEQ ID NO: 403601 - DNA, 1000 bp, Homo Sapiens; identical to SEQ ID NO: 292009

SEQ ID NO: 403602 - DNA, 1000 bp, Homo Sapiens; identical to SEQ ID NO: 222077

SEQ ID NO: 403603 - DNA, 1000 bp, Homo Sapiens; identical to SEQ ID NO: 223832

SEQ ID NO: 403604 - DNA, 1000 bp, Homo Sapiens; identical to SEQ ID NO: 292015

SEQ ID NO: 403605 - DNA, 1000 bp, Homo Sapiens
tcgtcttcacgctgctcatggccatttatgtgccgcacttcgcgctgctcatgggcctcaccggcagcctcacgggcgccggcctctgtttcttgctgcccagcctctttcacctgcgcctgctctggcgcaagctgctgtggcaccaagtcttcttcgacgtcgccatcttcgtcatcggcggcatctgcagcgtgtccggcttcgtgcactccctcgagggcctcatcgaagcctaccgaaccaacgcggaggactagggcgcaagggcgagcccccgccgcgcttctgcgctctctcccttctcccctcaccccgcccccaccagcccagtgcgccctgccgccgcgcttgggaggccaagctttaaacatctctggttcctagtttctgattattcggggatgggggggatgggaggggacagggattcacgatccatcgcgtctgcgtttctgttgtcctttcttttccacaacaccctggttttggggggaggcggggtgcatttgcgggcagggttctctgtccttccaagtggggccccgacactttggttccagtcatcgagggggttgggaagggagggagagggggcgcagctcgcaggcgtggcaacttgaccttgggggaatatttcacatccatccagagctcggaatctacagcgtccagccatttccagcaagagcgcttcccattccggagacgtttcaaccctgcagcgggaaaggctgactgggaaatccattttgggtgggcaatttccttcaacgaagccggaaggcgagaagccgcggcggggccagcttgcctgccggttttcaggaatctaaactctcatcttgtgcaatttatcaggtgtggaactgttctactgtgcgtgtggtgtgctcgtggtgaataagatgaaatgtatatcagaaaaaaatctatctctaatttagagtgcggtacataattatatccgcaaataaagaagagacaaaggctaaaaaaa

SEQ ID NO: 403606 - DNA, 1000 bp, Homo Sapiens; identical to SEQ ID NO: 292016

SEQ ID NO: 403607 - DNA, 1000 bp, Homo Sapiens; identical to SEQ ID NO: 223833

SEQ ID NO: 403608 - DNA, 820 bp, Homo Sapiens; identical to SEQ ID NO: 118449

SEQ ID NO: 403609 - DNA, 1000 bp, Homo Sapiens
acaaaagcagggtataaggcgatattggtgatgaaagtcttaggaaaaatgcataattttgctataaaatgtacttatttggaatactattttatatagaggtaagagaacactgctggggaatatgctttttatggttgctgttgccatatttactgaaggtttatacctaaatgtaactttagctttatggaactatatagtaatcccaaatcaagttattttgaatatttttatgctgtcatgcttgaatgttttagatgtaacctttgacatatttagaactctcctcctatacaatgtttattctcagatatagaggttatgtcattttataaagacttcattgataagatggcttttattcatactaatcctcccaatgttaccccttccatcttccaagaagaaaaaaaatgcctgaatattcagaatagatatttctgatttgaaaattctaaagaattaaactggaaaagtatttcatttacttagtgctctgaatttacttttacagttttctgcagtcagtatcattaaaatggttaagtttacatttgaactgaaaatatgtataaaatctagcaattcacaaaaatgccctagaaatatagattttaatcaccattacataatgacaaaccttgttaaatgcttccacttccagtggcaaatgccactagggaaagtaagttgcactcatgtaagtatcaaactatataaaaggaggccttgtgcatttcaagtttgcaaagtacctgtgtacttaaaatatgtgtggagacctactgtacagtagttttgcccctttaattggggcacattcatcttaaatcttatagtatttatccacccaaaccccagactgagatactgctcccaggggcctaggtagctgccagtccgtgattttaattgctgtcttgaagttaacaagtgttataatgaaataatctacctgatgctaaataaaggctttagaatgttccccaaaaaaaaa

SEQ ID NO: 403610 - DNA, 1000 bp, Homo Sapiens; identical to SEQ ID NO: 286499

SEQ ID NO: 403611 - DNA, 1000 bp, Homo Sapiens; identical to SEQ ID NO: 292018

SEQ ID NO: 403612 - DNA, 1000 bp, Homo Sapiens; identical to SEQ ID NO: 118450

SEQ ID NO: 403613 - DNA, 1000 bp, Homo Sapiens; identical to SEQ ID NO: 118451

SEQ ID NO: 403614 - DNA, 902 bp, Homo Sapiens; identical to SEQ ID NO: 118453

SEQ ID NO: 403615 - DNA, 1000 bp, Homo Sapiens
aaacttcattgatgccaaagacctggatcagctgggccgaaataagatcacacacatcatctctatccatgagtcaccccagcctctgctgcaggatatcacctaccttcgcatcccggtcgctgatacccctgaggtacccatcaaaaagcacttcaaagaatgtatcaacttcatccactgctgccgccttaatggggggaactgccttgtgcactgctttgcaggcatctctcgcagcaccacgattgtgacagcgtatgtgatgactgtgacggggctaggctggcgggacgtgcttgaagccatcaaggccaccaggcccatcgccaaccccaacccaggctttaggcagcagcttgaagagtttggctgggccagttcccagaagcttcgccggcagctggaggagcgcttcggcgagagccccttccgcgacgaggaggagttgcgcgcgctgctgccgctgtgcaagcgctgccggcagggctccgcgacctcggcctcctccgccgggccgcactcagcagcctccgagggaaccgtgcagcgcctggtgccgcgcacgccccgggaagcccaccggccgctgccgctgctggcgcgcgtcaagcagactttctcttgcctcccccggtgtctgtcccgcaagggcggcaagtgaggatgcagtccagccgtggctccccacttccgactggctcccttcgggggctgtctgcgccttccacgccccccaggacgggcccagaggctgggggagccccgcggcggcctgaaccctgcctcccgcgcccgccctgctcgtccgcgtctgcagtcagcgtccccaacctgtgcgtctctgtgtccgggccggcctgctgcagccacctggtgccttagtccttgggctgggggagggggcccacccttaaaggcggcgggaggggagggagggagagtggagggtttgacgggcctggagggtattaaagagacacagaagaagctgcctgtc

SEQ ID NO: 403616 - DNA, 1000 bp, Homo Sapiens; identical to SEQ ID NO: 292022

SEQ ID NO: 403617 - DNA, 1000 bp, Homo Sapiens
caacctgcagccccctgcctccctccaaacaggaaaccacagtaatgggcccacggacctcagcatgaaaggcggggcctctaccacctccaccacccccacgcccaccccctccagcaccagcaccagcaggcccgtgcccaccgctcagctcagccccacggagatcagcgccgtgcggcagctcatcgcgggctaccgggagtctgctgccttcctgctgcgctctgcagatgaactggaaaacctcatcctacagcagaactgaccccaccggcacctggagcgcactgccctagggaaggaggctgtcccagcctggacctggcttcctgcctcaccagttggtacattttgtttttgaaagaggtgggatccaaaagagctgtttctagccacactccaagcacctgagactttgggcacaaggacacttttttttttttttttttttttttttttggaatctcaccacacgggtgctctgacctgcttggaagaggccaacggggcagctctggaagggttgggggctcccctgacaaggcgctggggctgcagctctgtttagaatcaccttcgtggaccctgatgttagaatcccacccccagataattacctttcaagtcttaggtgagcagaattgcatatttattgagaaaagcaaagtggaccctttcttcctctccccttagtaatttatttttctgaaaatggattcttttgtgtttgtacagattgctagtctgtgtctgtctgatcagaaggatgtatccccatacctaacattccatatcactacactgatgtgggctggggccagtaggggcaggacaggtgccaggctggctgttcctctgcatgcctggtgcaccctgtggccgctagcccttggccaggccatcctgttgcagatcccagtgctgccacagggacaccaccaggcacctccctaggcaacgccaagcaggaggacctcacccacacccatggcaaagc

SEQ ID NO: 403618 - DNA, 1000 bp, Homo Sapiens
gtcaaagctggacatttttatgttgcattatatacacccatgatatttctaataatatatggttttaaacattaaagacaaatgtttttatacaaatgaattttctacaaaatttaaagctaccataatgcttttaattagttctaaattcaaccaaaaaatgttttactcttataaaaaggaaaactgagtaggaaatgaaatactagattagactagaaaataaggaataaatcgattttactttggtataggagcaaggttcacctttagatttttgtattctcttttaattatgctccttggcaggtatgaaattgccctggttacattccattattgcttattagtatttcactccataacccttttttctgctaaaactactctttttatatttgtaaaataattggcagagtgagaagaaacataaaatcagataaggcaaatgtgtacctgtaaggaatttgtactttttcataatgcccagtgattagtgagtatttcccttttgccagttgacaagatttttccaccctcgagcagcgtgagagatgcctctttaacacttgaaattcatttctatctggatacagaggcagatttttcttcattgcttagttgagcagtttgttttgctgccaacctgtctccacccctgtatttcaagatcattgataagccctaaattcaaattcttaagatatggaccttttattgaaaatatcacaagttcagaatccctatacaatgtgaatatgtggaaataatttcccagcaggaagagcattatattctctttgtaccagcaaattaatttaactcaactcacatgagatttaaattctgtgggctgtagtatgccatcattgtgactgaatttgtgcaatggtttcttaatttttttactgttatttaaagatgttttacataattcaataaaatgaaatgacttaaaattgcaaaaaaaaaaaaaaaaaaaaaaaaaaaaaaaaaaaaa

SEQ ID NO: 403619 - DNA, 1000 bp, Homo Sapiens; identical to SEQ ID NO: 223837

SEQ ID NO: 403620 - DNA, 1000 bp, Homo Sapiens; identical to SEQ ID NO: 223838

SEQ ID NO: 403621 - DNA, 1000 bp, Homo Sapiens
agccaaatcagccccttttggaatgatgacttcattggaatgcaaatcaagtcattttggtgcatcagtggctcttaggcctgcacacacgagacatcagaatccaatcctctgaccctgtgccagccctttcccccagtttatttcccaccaaaggctgacctctaagaggtcttgctttctatgaactcaagatgggtcccacctctaggtgtccccaggtgcactcttctaccggttggcttccgatgtgacaaggccaagggcccaaagacttgaccctcttacacccttgctgacatggttccatcatgtccacccgcatgcacttttatggtttcatcacccagcctcttctcctctggcccacccagcgtccaggctctttctccctctcccctcctatctagaatgtcccctgcttctagcctcaccagaccccccaagctcccactacttcttccataataatagtaataacaatggttatcatcatcccctgcacatcccgcctaaagcactttactatatagaaaacgtttcccctggccgggcatggtggctcacgcctgaaatcccagctctttgggaggctgaggcgagcggatcagttgaggtcaggagttcaacgccagcctggccaacgtggtgaatccctgtctgtactaaaagtacaaaaaattagctgagcatggtggtgcgtgcctgtaatcccagctactcgggaggctgaggtgggagaatcgcttgagcccaggaggcggaggttgcaggagcagagattgcgccactgcactccagcctggatgacagagtgagacccaatctcaaaaaagaaatcgtttcccaccccacatctccttcagacctctcagggacaactctgggaggcagccttggcaggacatgggttagtgcgcccattttgctgtgaggaaactgaggtacaggtctcatcccagagcatgagaagtcactgagtttagatgagaacttgggt

SEQ ID NO: 403622 - DNA, 1000 bp, Homo Sapiens; identical to SEQ ID NO: 118454

SEQ ID NO: 403623 - DNA, 1000 bp, Homo Sapiens; identical to SEQ ID NO: 292027

SEQ ID NO: 403624 - DNA, 1000 bp, Homo Sapiens; identical to SEQ ID NO: 118455

SEQ ID NO: 403625 - DNA, 1000 bp, Homo Sapiens; identical to SEQ ID NO: 223839

SEQ ID NO: 403626 - DNA, 1000 bp, Homo Sapiens; identical to SEQ ID NO: 292029

SEQ ID NO: 403627 - DNA, 923 bp, Homo Sapiens; identical to SEQ ID NO: 118456

SEQ ID NO: 403628 - DNA, 1000 bp, Homo Sapiens; identical to SEQ ID NO: 223840

SEQ ID NO: 403629 - DNA, 1000 bp, Homo Sapiens
aactccagagacactcctgaaattgtcctaagtcaaaggagccaaacggtgtacgagctccctctctgccgtcccctctgagagcagccatggccctgagtgatgtcgatgtgaaaaagcagattaagcacatgatggctttcattgagcaggaagccaatgagaaagcagaggaaatcgatgccaaggctgaggaagagtttaacattgagaaaggacgcctcgtgcaaacccaacgactgaagattatggagtattatgagaaaaaggagaagcagatagagcagcagaagaaaatcctgatgtccaccatgaggaatcaggcgaggctgaaagtcctgagagcccgaaatgacctcatctcagatttgctcagtgaggcgaagctgagactcagcaggattgtggaggacccagaggtctaccaggggctgctggataaactggtgctccagggtctgctccgactgctggaacctgtgatgattgtacgctgccggccacaagacctcctcctggtggaggctgctgtacaaaaagccatccccgagtacatgacaatttcccagaaacatgtggaggtccagattgataaagaggcatacctggctgtgaatgcagctggaggtgtggaggtctacagtggcaatcagagaataaaggtttcaaataccttggaaagccgactggatctctcagccaagcaaaagatgccagaaatacgaatggccttgtttggtgctaacaccaacagaaagttctttatataagcctctgggaagtgaagctagtgttgaaccactaaaccataaaagtttaagttttttggggaaaggaaactagtagtgtttcctcctctttgatgctctgatactgttctgtttttcttcacgaaataccctttggatagctaaagtgttaactttgaaataaagcccaaattaatgctcagaaaaaaaaaaaaaaaaaaaaaaaaaaaaaaaaaaaaaaaaaaaaaaaa

SEQ ID NO: 403630 - DNA, 1000 bp, Homo Sapiens
gatctctttccattatatctttcaacttgttgtttacttcttatactggattgtaagctacataagggcagggatttttgcctcttttgttcagttttccaggagctagatgaatacctgcgcatgatatatgtccaaaaatagtttaattgagtgaagatgttcattgaatggctgcattttttccttttaattttaatatattcttctatggatcacacacattcgaaattttaaaaatacttattctgtggtcaatttgtcttctgttgtgatttttacatatttagagtggtactgcttttattattataatccagttttacaaatgtggaaaaatgtttaaattgtaggacaatattttaaattttaattctaactttttatctttattgttgaatctaatgcctaatggtattaataagagtactaagtaaataatttcagtaaattgaagatgatataaccttcttcatccaagtattataagaaggaaattggttagatgtatgtgtgttataaccatatttgtttagaagtcaattactttgtttttttaaaaaagtttacttcatcccatgatataacatgaaagagatctttgtgaataaattcaaaaatcaaaataaatctctgtgactgttataaaactttgggtaatatctttttgaaatttgtaactataaaacaaaattattttacacatgcagaatagtttgctctttcctctaaaagtccttcttatcttctaactccattaagctaattttaccatgccaatcaaacctagttgttgtttgtctaggaatgtaagatacttctgggagacaatatattcactgttttaattagtggcagtagacctaatccaattatttgaagaaaaaaaaaattatttcttttggagggaagtggcttgccctgacataaatcactagttattgaaggcaaaattccgtaatgttgagaattatttaaaaataaaactgagacgttatat

SEQ ID NO: 403631 - DNA, 1000 bp, Homo Sapiens; identical to SEQ ID NO: 292031

SEQ ID NO: 403632 - DNA, 1000 bp, Homo Sapiens; identical to SEQ ID NO: 223841

SEQ ID NO: 403633 - DNA, 1000 bp, Homo Sapiens; identical to SEQ ID NO: 292033

SEQ ID NO: 403634 - DNA, 1000 bp, Homo Sapiens; identical to SEQ ID NO: 292034

SEQ ID NO: 403635 - DNA, 1000 bp, Homo Sapiens; identical to SEQ ID NO: 223842

SEQ ID NO: 403636 - DNA, 1000 bp, Homo Sapiens; identical to SEQ ID NO: 292036

SEQ ID NO: 403637 - DNA, 1000 bp, Homo Sapiens; identical to SEQ ID NO: 292037

SEQ ID NO: 403638 - DNA, 1000 bp, Homo Sapiens; identical to SEQ ID NO: 292038

SEQ ID NO: 403639 - DNA, 1000 bp, Homo Sapiens; identical to SEQ ID NO: 292039

SEQ ID NO: 403640 - DNA, 1000 bp, Homo Sapiens; identical to SEQ ID NO: 223843

SEQ ID NO: 403641 - DNA, 1000 bp, Homo Sapiens; identical to SEQ ID NO: 118457

SEQ ID NO: 403642 - DNA, 1000 bp, Homo Sapiens; identical to SEQ ID NO: 118458

SEQ ID NO: 403643 - DNA, 1000 bp, Homo Sapiens
ttttccccagaaggactgatgaagaaagacaggagatccggcagcagatcgagatgaagctttccaaacggctgagccaaagacctgccgtggaagagctggagagaagaaatatcttgaaacaaaggaatgatcagacagagcaggaagaaagaagagaaatcaagcaaagattgacaagaaagcttaatcagagacccactgttgatgaattaagagacagaaaaattctgatacgattcagtgattacgtggaagtagcaaaagcgcaggactatgacaggagggcagacaaaccctggacgagactgtcagcagcagataaggcagcaattcgtaaagaattaaatgagtacaaaagtaatgaaatggaggtacatgcatcaagcaagcacttgacaagattccacaggccatagagattttcttctgagaagaatttgtgtttaattttttgataccaacactgaacattcatcagggaactttcctgaagttcagctcaagactaccctacctgctgtgtttgtgagaagagtaggatcacacacacaggtgcaatcttgaccacacttacctgcaagaggagtaaccagaggacacacttccttccttctttggtgtctgaggagtgtgaactgttggggtcagttaagacccaacataactctatcagaagaaaactgttgtttgcctttcaaccttgttttacagttctgcagtgtaatggaggacgggcaacgtgcatgtgcaggctcaccactcccaggcctctgacatgagggacatgtgacagtgtcattcagtattatgttcaaaagacatttttatcctgatcataattaatttgaaaactctttaagttcatgttatacaagatgatttactgtattatacttttccttttttatataatgtctaacaaaaaatacagctgcaacattttgattcctgttaattttgttctttaattaaatgactacttattgcaggaaattaa

SEQ ID NO: 403644 - DNA, 1000 bp, Homo Sapiens; identical to SEQ ID NO: 292047

SEQ ID NO: 403645 - DNA, 1000 bp, Homo Sapiens
gagggcaatgacccttgaagatattcagaccagagaggtgcgccatatttctcatctgaatttcactgcctggccagaccatgatacaccttctcaaccagatgatctgcttacttttatctcctacatgagacacatccacagatcaggcccaatcattacgcactgcagtgctggcattggacgttcagggaccctgatttgcatagatgtggttctgggattaatcagtcaggatcttgattttgacatctctgatttggtgcgctgcatgagactacaaagacacggaatggttcagacagaggatcaatatattttctgctatcaagtcatcctttatgtcctgacacgtcttcaagcagaagaagagcaaaaacagcagcctcagcttctgaagtgacatgaaaagagcctctggatgcatttccatttctctccttaacctccagcagactcctgctctctatccaaaataagatcacagagcagcaagttcatacaacatgcatgttctcctctatcttagaggggtattcttcttgaaaataaaaaatattgaaatgctgtatttttacagctactttaacctatgataattatttacaaaattttaacactaaccaaacaatgcagatcttagggatgattaaaggcagcatttgatgatagcagacattgttacaaggacatggtgagtctatttttaatgcaccaatcttgtttatagcaaaaatgttttccaatattttaataaagtagttattttataggggatacttgaaaccagtatttaagctttaaatgacagtaatattggcatagaaaaaagtagcaaatgtttactgtatcaatttctaatgtttactatatagaatttcctgtaatatatttatatactttttcatgaaaatggagttatcagttatctgtttgttactgcatcatctgtttgtaatcattatctcactttgtaaataaaaacacaccttaaaacatg

SEQ ID NO: 403646 - DNA, 1000 bp, Homo Sapiens; identical to SEQ ID NO: 223847

SEQ ID NO: 403647 - DNA, 1000 bp, Homo Sapiens
cagcctgtgtgggtgacggaggagtggggtgcctgcagccggagctgtgggaagctgggggtgcagacacgggggatacagtgcctgctgcccctctccaatggaacccacaaggtcatgccggccaaagcctgcgccggggaccggcctgaggcccgacggccctgtctccgagtgccctgcccagcccagtggaggctgggagcctggtcccagtgctctgccacctgtggagagggcatccagcagcggcaggtggtgtgcaggaccaacgccaacagcctcgggcattgcgagggggataggccagacactgtccaggtctgcagcctgcccgcctgtggaggaaatcaccagaactccacggtgagggccgatgtctgggaacttgggacgccagaggggcagtgggtgccacaatctgaacccctacatcccattaacaagatatcatcaacggagccctgcacgggagacaggtctgtcttctgccagatggaagtgctcgatcgctactgctccattcccggctaccaccggctctgctgtgtgtcctgcatcaagaaggcctcgggccccaaccctggcccagaccctggcccaacctcactgccccccttctccactcctggaagccccttaccaggaccccaggaccctgcagatgctgcagagcctcctggaaagccaacgggatcagaggaccatcagcatggccgagccacacagctcccaggagctctggatacaagctccccagggacccagcatccctttgcccctgagacaccaatccctggagcatcctggagcatctcccctaccacccccggggggctgccttggggctggactcagacacctacgccagtccctgaggacaaagggcaacctggagaagacctgagacatcccggcaccagcctccctgctgcctccccggtgacatgagctgtgccctgccatcccactggcacgtttacactctgtgtactgcccc

SEQ ID NO: 403648 - DNA, 1000 bp, Homo Sapiens; identical to SEQ ID NO: 292051

SEQ ID NO: 403649 - DNA, 1000 bp, Homo Sapiens; identical to SEQ ID NO: 118459

SEQ ID NO: 403650 - DNA, 1000 bp, Homo Sapiens; identical to SEQ ID NO: 292054

SEQ ID NO: 403651 - DNA, 1000 bp, Homo Sapiens
attaagtttatgaatcacatgaagcatcatttggaatttgagaagcagaggaacgacagctgggaagaccacaccacctgccagcactgccaccggcagtttcccactcccttccagctacagtgtcacattgatagtgtacacatcgccatggggccctctgctgtctgtaaaatctgtgaattgtcatttgaaacagatcaggtcctcttacaacacatgaaggaccatcataagcctggcgaaatgccctacgtgtgccaggtttgccattacagatcgtcggtctttgctgatgtggaaacacattttagaacgtgccatgaaaacacaaagaatttgctttgtctgttttgtctcaaacttttcaaaactgcaataccatacatgaatcattgttggaggcacagcagaaggagggtccttcagtgttccaagtgccggctacagtttttgacgttgaaggaggaaatagagcacaaaaccaaggaccatcaaacatttaaaaagccggagcaactgcaagggttccctcgtgaaacaaaagttattattcaaacttcagttcagccaggatcaagtggtatggcttccgttattgttagcaacactgaccctcagtcttctcctgtaaaaactaaaaagaagacggctatgaacactagagattccagactcccttgcagcaaggattctagctgaaaatatgttcgactgacttccaggagttccgaaaggcagaagtgaggctaggccatatgtgcattgtggctgtagatgctagcaagcaatgtcatcaactgtcaggttgtttttcacagtgacatctcatcagctccctattgtcaagaagtagctccaaagtctttgagccctttcccagtcaaatgctcccaacaaggcatcccttattctgacctcagaggtttttcttgtttatgaactttaaataaatggaatcacacaaaaaaaaaaaaaaaaaaaaaaaaaaaaaaaaaaa

SEQ ID NO: 403652 - DNA, 1000 bp, Homo Sapiens
ttcagtggacgttcagctgctagaggactctcaccaggttagcaaagatggctgtagctgcagctgttcctttcaacaatggtaccacctgccatgccgacacattttggctctgctgcacaccagccagcagccggttggtgaagccatggtgtgccgccggtggcagaagaagtaccagtacctccttgggcccaatggggagctccaggatcgtggtatggtcccaaacacaggccagcctgagaagcaaggacggaacgacatgattcaggacctaagcagggagttagcaaacctgctcatgcagaccgaggggccagagctggaggaacgctactccaccctgcgcaagattgtggatatctgggctggcccctcccagccatctgagctctttcagcagccaggagactttaaggacgtgggccgcctccctttcctctggggaaagcaagaagaaggggagggattccctcctgctacagctgtgatgcattattgaagcactttagctgaagcattggaccacaaacacttctccttggaagtgtgagagtttaaagtgggcaggacatactagggtttagcattttagccaatgtcttcctaggtggggctaggaatattgttacagtagagaggaagggaactccactgtgtgacagtcctttcaatctgccccttttcagccctacttttggcattccttgggagcctcagttgttgttcaaggccaaagttatctccgtgctgcaaggtcaccctcttcctcccccagcccctgagatcagatcttatttgctctgcaaagatgaatccctgcctcaggttagggtgagacaaaatcggtctggtaaaagggcctgttttcagggacaaagggaatgaggatgatctttggctgttgctgctctttatgaagaatcttatttgtaactttttattcatattaaagttgtttttaataaaattaaacaagggaaaaaaaaaaaaaaaa

SEQ ID NO: 403653 - DNA, 1000 bp, Homo Sapiens; identical to SEQ ID NO: 223851

SEQ ID NO: 403654 - DNA, 1000 bp, Homo Sapiens; identical to SEQ ID NO: 292062

SEQ ID NO: 403655 - DNA, 1000 bp, Homo Sapiens; identical to SEQ ID NO: 292063

SEQ ID NO: 403656 - DNA, 1000 bp, Homo Sapiens
ctacccctttagtgaccgcccccatcccggctttctgagctgatccttgaagaagaaatcttccatttctgctctcaaaccctactgggatcaaactggaataaattgaagacagccagggggatggtgcagctgtgaagctcgggctgattccccctctgtcccagaaggttggccagagggtgtgacccagttaccctttaacccccacccttccagtcgggtgtgagggcctgaccgggcccagggcaagcagatgtcgcaagccctatttattcagtcttcactataactcttagagttgagacgctaatgttcatgactcctggccttgggatgcccaagggatttctggctcaggctgtaaaagtagctgagccatcctgcccattcctggaggtcctacaggtgaaactgcaggagctcagcatagacccagctctctgggggatggtcacctggtgatttcaatgatggcatccaggaattagctgagccaacagaccatgtggacagctttggccagagctcccgtgtggcatctgggagccacagtgacccagccacctggctcaggctagttccaaattccaaaagattggcttgtaaaccttcgtctccctctcttttacccagagacagcacatacgtgtgcacacgcatgcacacacacattcagtattttaaaagaatgttttcttggtgccattttcattttattttattttttaattcttggagggggaaataagggaataaggccaaggaagatgtatagctttagctttagcctggcaacctggagaatccacataccttgtgtattgaaccccaggaaaaggaagaggtcgaaccaaccctgcggaaggagcatggtttcaggagtttattttaagactgctgggaaggaaacaggccccattttgtatatagttgcaacttaaactttttggcttgcaaaatatttttgtaataaagatttctgggtaataaaaaaaaa

SEQ ID NO: 403657 - DNA, 1000 bp, Homo Sapiens; identical to SEQ ID NO: 292065

SEQ ID NO: 403658 - DNA, 1000 bp, Homo Sapiens; identical to SEQ ID NO: 223852

SEQ ID NO: 403659 - DNA, 1000 bp, Homo Sapiens
gcccaggagagaagggggaaaaaggggagacaggacaagcaggctcaccgggagagaaaggagaagccggggagaagggcaatccaggagcagaggttcctgggctgccagggccagaggggcctcccggacctccggggctccaaggtgttcctggaccaaagggggaagcaggactagatggagcaaaaggagagaaaggcttccagggagaaaaaggagaccgtggtcccctgggactacccggagcttcaggtttggacggcaggcctgggccaccgggtactccaggaccaattggagttccaggcccagcgggaccaaagggcgagaggggcagcaaaggagaccctgggatgacaggaccaacgggagcagctgggcttcctggtttacatggaccacccggggacaagggaaaccggggggagagggggaagaaaggctctagagggcctaaaggggataagggagaccaaggagcgcctggattagatgccccctgcccattgggcgaagatggcttaccagtccaaggctgctggaacaagtgatgcctctaaccttggattggcctgtgtgtgtgtttgtacatagaatatttatttttatacagttttcactttttgaaaatgccagaagtatgatgcatcttacagattattaaaaaagaaagaaaaacctgcatattttgtacagaaaatatcaacctcttcccttttgtttacaagatgttttgtataagcctatgtctctaatacattttttgtttggtcgtaatgtctgcatgatatttgtgcacatttattaagtatcgaagcttaataaattattgtgtcctggtgccaaagggggccagccagaactgaggtgctggctagctcatgtgtgaattcacataaatgtagaggtccatgatatttgctaagctaggtgtgtctaagagtattttaaacccttatggattttcattattaaaggaaatgaaacatggcaattc

SEQ ID NO: 403660 - DNA, 1000 bp, Homo Sapiens
gggcttcgtgctgccgctggcggtgctctgcctcacctcgctccaggtgcaccgggtggcacgcagacactgccagcgcatggacaccgtcaccatgaaggcgctcgcgctgctcgccgacctgcaccccagtgtgcggcagcgctgcctcatccagcagaagcggcgccgccaccgcgccaccaggaagattggcattgctattgcgaccttcctcatctgctttgccccgtatgtcatgaccaggctggcggagctcgtgcccttcgtcaccgtgaacgcccagtggggcatcctcagcaagtgcctgacctacagcaaggcggtggccgacccgttcacgtactctctgctccgccggccgttccgccaagtcctggccggcatggtgcaccggctgctgaagagaaccccgcgcccagcatccacccatgacagctctctggatgtggccggcatggtgcaccagctgctgaagagaaccccgcgcccagcgtccacccacaacggctctgtggacacagagaatgattcctgcctgcagcagacacactgagggcctggcagggctcatcgcccccaccttctaagaagccctgtggaaagggcactggccctgccacagagatgccactggggacccccagacaccagtggcttgactttgagctaaggctgaagtacaggaggaggaggaggagagggccggatgtgggtgtggacagcagtagtggcggaggagagctcggggctgggctgcctggctgctgggtggccccgggacagtggcttttcctctctgaaccttagcttcctcacccttgttctggggtcatggcgatgcttcgagacagtgggtagggaagtgccctgtgtggcatatggtactcgtgggcgtgctataagtgactgctgttcatgtgggtgaggtggtcactcttgctcagggtctgttgtgcagcccagatggacacctgtttctccaaaaaaaaaaaaaaaa

SEQ ID NO: 403661 - DNA, 1000 bp, Homo Sapiens; identical to SEQ ID NO: 118462

SEQ ID NO: 403662 - DNA, 1000 bp, Homo Sapiens
catgcccagtcagagaccgttttgaggcattgcgactgcccttggttcagttccgggaagtgtggctgcccttctgagaccctcaactgctcctcctgccaccacacagccgacgaatggaactggcttgatgcgtgctccaggaagactatggggtacctgatgaggacaagagagtctatgacctctgacactgtgctctggtggttggtcagtggtcaacactgggcccggccatatcccccatgctttccgggcctcacccatctcccactttccgcccaaatccctgcccttggccctgtcttcacagcctctggatggagatctcacccacccagctctgttttctctcccctgggcccagcccccaatctccctcttgctgtttccagggcatgaactcagggagcgagcttgggaaattgtggaggaagctgtttaaagggattcccaggctctcggtgagccattttgatttctattgtgggacttgtgtgctgttggggcgcccacagatcccgcagggctccagccttggcaacgacatcgaccaataccccgtggttttcaggaatgccagcgaccagggctcctggatgcagctggagatgctactgcggaagctctctgacctggtgtggacttcagatgctctaagtgataagattttggaagatggtctggttccctagtggagtggaagatagcaaagacacggtcaccctctttggatttggatcagaatagcaaggaaagtgtttctatcactggaaggaggataatcagaccaagggctccaaggaaatactgcccacgtctagtgcaggagcagaaatcgaagtcatccatcagctagcgtgtggacaagctcactattcacacaagctcagcctagctgagtccatacaaatcctatttctgggtgggtaaagggcaggaggaaattgtaagatcagtctggtactgaataaaatcctggcctgattgtcttacctgt

SEQ ID NO: 403663 - DNA, 1000 bp, Homo Sapiens; identical to SEQ ID NO: 292068

SEQ ID NO: 403664 - DNA, 1000 bp, Homo Sapiens; identical to SEQ ID NO: 223853

SEQ ID NO: 403665 - DNA, 1000 bp, Homo Sapiens; identical to SEQ ID NO: 292071

SEQ ID NO: 403666 - DNA, 872 bp, Homo Sapiens
gccagctctggggtctcggcaggtggtccacaacatgacctctgagttcttcgctgcccagctccgggcccagatctctgacgacaccactcacccgatctcctactacaagcccgagttctacacgccggttgatgggggcactgctcacctgtctgtcgtcgcagaggacggcagtgctgtgtccgccaccagcaccatcaacctctactttggctccaaggtccgctccccggtcagcgagatcctgttcaatgatgaaatggatgacttcagctctcccaacatcaccaacgagtttggggtgcccccctcacctgccaatttcatccagccagggaagcagccgctctcgtcaatgtgcccgacgatcatggtgggccaggacggccaggtccggatggtggtgggagctgctgggggcacacagatcaccacagccactgcactggccatcatctacaacctctggttcggctatgacgtgaagcgggccgtggaggagccccggctgcacaaccagcttctgcccaacgtcacgacagtggagagaaacattgaccaggcagtgactgcagccctggagacccggcaccatcacacccagatcgcgtccaccttcatcgctgtggtgcaagccatcgtccgcacggctggtggctgggcagctgcctcggactccaggaaaggcggggagcctgccggctactgagtgctccaggaggacaaggctgacaagcaatccagggacaagatactcaccaggaccaggaaggggactctgggggactggcttcccctgtgagcagcagagcagcacaataaatgaggccactgtgccaggctccaggtggcctccctgccctgtcaaa

SEQ ID NO: 403667 - DNA, 1000 bp, Homo Sapiens; identical to SEQ ID NO: 285698

SEQ ID NO: 403668 - DNA, 951 bp, Homo Sapiens
atggaggctgccaatgagtcttcagagggaatctcattcgttttattgggactgacaacaagtcctggacagcagcggcctctctttgtgctgttcttgctcttgtatgtggccagcctcctgggtaatggactcattgtggctgccatccaggccagtccagcccttcatgcacccatgtacttcctgctggcccacctgtcctttgctgacctctgcttcgcctccgtcactgtgcccaagatgttggccaacttgttggcccatgaccactccatctcgctggctggctgcctgacccaaatgtacttcttctttgccctgggggtaactgatagctgtcttctggcggccatggcctatgactgctacgtggccatccggcaccccctcccctatgccacgaggatgtcccgggccatgtgcgcagccctggtgggaatggcatggctggtgtcccacgtccactccctcctgtatatcctgctcatggctcgcttgtccttctgtgcttcccaccaagtgccccacttcttctgtgaccaccagcctctcttaaggctctcgtgctctgacacccaccacatccagctgctcatcttcaccgagggcgccgcagtggtggtcactcccttcctgctcatcctcgcctcctatggggccatcgcagctgccgtgctccagctgccctcagcctctgggaggctccgggctgtgtccacctgtggctcccacctggctgtggtgagcctcttctatgggacagtcattgcagtctacttccaggccacatcccgacgcgaggcagagtggggccgtgtggccactgtcatgtacactgtagtcacccccatgctgaaccccatcatctacagcctctggaatcgcgatgtacagggggcactccgagcccttctcattgggcgaaggatctcagctagtgactcctga

SEQ ID NO: 403669 - DNA, 1000 bp, Homo Sapiens; identical to SEQ ID NO: 292072

SEQ ID NO: 403670 - DNA, 1000 bp, Homo Sapiens
ccctgagatgctgaaacactgcgccaacttccctcgggccctggaagtcctgcttaatgcctatccttgtgtcccatcctgtgagacctgggtggaggcggtgctcccagagctgtggaaggagcacgaagccttctacagctcggccctgtgcatggtgaaccagccaaggcagctgcagcacctggcccgactagctgtgcgcgctcggttgggaagccgctgccggcagggtgccacccggctgccactgcccccgctcctcagggactacctgctgctgcgtgtggaggggtgcatccagtgaaccccatgtcaggctgtcccatggtgtgttctgcccctcccacctgtccccgcctccaactgcggaggaccagttcctggccctcttttcttttctttttgagacctagtctcactctgttgcccaggctggagtgcagtggcgctatctcggctcactgcaacttctaccacctaggttcaagcgattcttgtgccccaaacttccgagtagctgggactacaggcatgagtcaccacacctggctgattttgtatttttagtagagacagggtctcaccatgttggccaggctggtctcacactgacctcaggtgatccacccgccttggcctcccaaagtgttgggattacaggcatgagccactgcgcctggttgcctgcccctcttttctgtactccacgtgctgtcctggtccacctcactcctccatgggcttcttgagacacctgctgacctctagccggacctgagcttcagaccctctctccagcaggaagggctgcagactcggcctgttcccagactcggccttcacctcccttctcctcctgtgtttaagtggatggcccctctatccatccaggtcccatgccaagaaccagtgattctagtggcccaccacctccctctcctgccacccttatacctgttcagcctcctaaagagggacaaactctgtctctgcgtgc

SEQ ID NO: 403671 - DNA, 1000 bp, Homo Sapiens
tacgggctgctgcagcgccccgtgcgcttggcactgggccgcctctctcgccgtgcactgcctggacctgtgcgggcctgcactccgcaagcctggcacccgcgggcactcttgcaatgcctccagagacccccagagggccctgccgtaggcccttctgaggctccagaacagacccccgagttggcaggagggcggagccccgcataccaggggccacctgagagttctctctcctgagcaggagaaaggagggtggtttccgtgggggctcatccaacccctgcacaggtcacagcaggtgccctgctggatatctgggtctggaacaggaggagaaagggtgtctgctgcctggtgaggcccacggacttctgagagccaggaatcctgcggtctgggcccaacactgcatagcactgtgcataggccgacccttccttaggcctcagctttcccatctgcaccctgcagcatctctaagggcccctccagcataggtggtttgtgaaactcacaggtggtccccaggccaagatgggcaggtgtcacaaagaagagggccctaagggctcacaaccaaagtgatccgccaagcagggcagtatctgggttacagccacagcaggaagaaccactggagagacactcagaaggacttccctgacatctgcaccaaggagagtctggacaaagctactgaaactcctccacctgcttctaaaatgcccagaagacaactggaccagtttggtattagaagtaggaggctggacgacttcacccccaaagggtcctgaagccccagaactggcatgtggaaggggctgaggcctaattgaggttggtggattcacacatgggggtcctccaggacctcagctgcacccattttctggaggttttgctgcccacaacaccagtatttcacaacttcctggtcgctgagaatatttattcaaaaacagggattgaaaaaactgtaaaaaaaaaaaaaaaa

SEQ ID NO: 403672 - DNA, 1000 bp, Homo Sapiens
acattgcttctacattcttactggtttacattaaaatcctttaagccaaaaggaagcttgctctatggatttaaatgcaaacttcatttaccagtgcaggaagtctcataaaactcagatgtactcccacaaaaattttattggcctttttgtaagagatgaaaaagaattgacacagttctctttaaagagaagaacttttttattattatttttatctccaactgcaggtggtgtcttttgccaaggtctctgtatttttctttcagttgtctttgggaggggatgttaagtcaaatcactaaaacagggttctctttggattaaaagttctggatttattgcaactattttccttgagaaacattctcagcatcaggattgataaacaaatgtagatgattaaaataggataattggttttagataatatcttctactgccaaacttctggcaaatttacctgtgaatttcaaaatgttataaaatctcttgatatgcttttgtttttccttttagccattttctcttcaatttcttagtccctctgccctctgtaaatgtgttgagtgatatagctatcagatgtattgaaggcaaagttctcgcagaggtctctgttccagctctgtaaaggtcacaggaatcgtgaaggagctgagaaatcttcctctccggcccactgtctgtggcccattgtcattgtttcctcatgaaacattgcagagtttgaatcctcagtaactctcattgactggattagaggtgatggccacagcaaatgggagagcaaaatgttggcctacagagaatgacacaattttattcgcctttggtgttagttgccatagtgctgtatttgaaaatcgatgctttagccaaaagctgaatgaccaccgtttccgtagtttccactgttttgtctgcatagaattttcctgaactacaagcaaaaatgtattttgtccaatgtcacaaaagtgaaaatgttactaatctt

SEQ ID NO: 403673 - DNA, 972 bp, Homo Sapiens
atggaagatggtcctgttttctatggctttaaaaacatttttattacaatgtttgctacgttttttttctttaagcttttaattaaagtttttttggctctcctaacccatttctatatcgtcaaaggaaatagaaaagaagcggctaggatagcagaagagatctatggtggaatttcagattgctgggctgatcgatccccacttcatgaagctgcagctcaggggcgcttactggcccttaaaactttaattgcacaaggtgtcaatgtgaaccttgtgacaattaaccgggtgtcttctctccacgaggcatgccttggaggtcacgtggcctgtgccaaagccttattggaaaatggtgcacacgtcaatggagtgacagttcacggagccacacccctcttcaatgcttgctgcagcggcagtgctgcatgtgtcaatgtgctgctggagttcggagccaaggcccagttggaggtgcacctggcctcgcccatccatgaggcagtgaagagaggtcacagagagtgcatggagatcctgctggcaaataatgttaacattgaccatgaggtgcctcagctcggaactcccctatatgtggcctgcacctaccagagggtagactgtgtgaagaaacttctagaattaggagccagtgtcgaccatggccagtggctggacaccccactccatgctgcagcgaggcagtccaatgtggaggtcatccacctgctaaccgactatggagctaacctgaagcgtagaaatgctcagggcaaaagtgcgcttgatctggcggctccaaaaagcagcgtggagcaggcactcttgctccgtgaaggcccacctgctctttcccagctctgccgcctgtgtgtccggaagtgtctcggtcgagcatgtcatcaagccatccacaagctacatctgccagagccactcgaacgattcctcctataccaatag

SEQ ID NO: 403674 - DNA, 1000 bp, Homo Sapiens; identical to SEQ ID NO: 292074

SEQ ID NO: 403675 - DNA, 1000 bp, Homo Sapiens; identical to SEQ ID NO: 118463

SEQ ID NO: 403676 - DNA, 1000 bp, Homo Sapiens; identical to SEQ ID NO: 118464

SEQ ID NO: 403677 - DNA, 1000 bp, Homo Sapiens; identical to SEQ ID NO: 223856

SEQ ID NO: 403678 - DNA, 702 bp, Homo Sapiens
aggagctctacggtgactttgaagacttggaaacaggggacgtgcacaagggaaaatcgggccccgatactcagaatgaagatgtagagaaacaaggaagaaattgaccctgacgaagaagaaagtgccaagaaaaagcatttggataagaagagaaaattgaaggagatgtttgatgtggaatatgatgaaggagaaagcacatattttgatgatcttaaaggagaaatgcagaaacaagcacagctgaatcatgcagaatttgaagatcaagatgatgaagccagagttcagtatgagggttttcgacctgggatgtacgtctgcgttgagattgaaaatgttccctgtgaatttgtgtagaactttgacccccgttaccccattatcctgggtggcttgggcaacagcgagggaaatgttggatacgtgcagatgcgtctgaagaaacatcgctggtataagaaaatcctcaagtcccgagatccaatcatattttctgtagggtggaggaggtttcagaccatcccgctctgttatatcgaagaccacaatggaagacaaaggcttctaaagtataccccacagcatgtgcatcgcggagcagccttttgggatcctatcactccacagggaactggtttcttggcaatacagtctgtcagtggcataatgcctgattttcggatagctgccacataa

SEQ ID NO: 403679 - DNA, 1000 bp, Homo Sapiens; identical to SEQ ID NO: 118466

SEQ ID NO: 403680 - DNA, 1000 bp, Homo Sapiens; identical to SEQ ID NO: 292083

SEQ ID NO: 403681 - DNA, 1000 bp, Homo Sapiens
aaggaacttgaaaagctaaaaaatcagaattccttcatggtgtgaagatgtgaataattgcacatggttttgagaacaggaactgtaaatctgttgcccaatcttaacatttttgagctgcatttaagtagactttggaccgttaagctgggcaaaggaaatgacaaggggacggggtctgtgagagtcaattcaggggaaagatacaagattgatttgtaaaacccttgaaatgtagatttcttgtagatgtatccttcacgttgtaaatatgttttgtagagtgaagccatgggaagccatgtgtaacagagcttagacatccaaaactaatcaatgctgaggtggctaaatacctagccttttacatgtaaacctgtctgcaaaattagcttttttaaaaaaaaaaaaaaaaaaattgggggggttaatttatcattcagaaatcttgcattttcaaaaattcagtgcaagcgccaggcgatttgtgtctaaggatacgattttgaaccatatgggcagtgtacaaaatatgaaacaactgtttccacacttgcacctgatcaagagcagtgcttctccatttgttttgcagagaaatgtttttcatttcccgtgtgtttccatttccttctgaaattctgattttatccatttttttaaggctcctctttatctcctttcttaaggcactgttgctatggcacttttctataaccttttcattcctgtgtacagtagcttaaaattgcagtgattgagcataacctacttgtttgtataaattattgaaatccatttgcaccctgtaagaatggacttaaaagtactgctggacaggcatgtgtgctcaaagtacattgattgctcaaatataaggaaatggcccaatgaacgtggttgtgggaggggaaagaggaaacagagctagtcagatgtgaattgtatctgttgtaataaacatgttaaaacaaaaaaaaaaaaaaaaaaaaaaaaaaaa

SEQ ID NO: 403682 - DNA, 1000 bp, Homo Sapiens; identical to SEQ ID NO: 118467

SEQ ID NO: 403683 - DNA, 1000 bp, Homo Sapiens; identical to SEQ ID NO: 223857

SEQ ID NO: 403684 - DNA, 1000 bp, Homo Sapiens; identical to SEQ ID NO: 223858

SEQ ID NO: 403685 - DNA, 1000 bp, Homo Sapiens; identical to SEQ ID NO: 291199

SEQ ID NO: 403686 - DNA, 1000 bp, Homo Sapiens; identical to SEQ ID NO: 223859

SEQ ID NO: 403687 - DNA, 1000 bp, Homo Sapiens; identical to SEQ ID NO: 292087

SEQ ID NO: 403688 - DNA, 1000 bp, Homo Sapiens; identical to SEQ ID NO: 223860

SEQ ID NO: 403689 - DNA, 1000 bp, Homo Sapiens; identical to SEQ ID NO: 223860

SEQ ID NO: 403690 - DNA, 1000 bp, Homo Sapiens; identical to SEQ ID NO: 223860

SEQ ID NO: 403691 - DNA, 1000 bp, Homo Sapiens; identical to SEQ ID NO: 287138

SEQ ID NO: 403692 - DNA, 1000 bp, Homo Sapiens; identical to SEQ ID NO: 118467

SEQ ID NO: 403693 - DNA, 1000 bp, Homo Sapiens; identical to SEQ ID NO: 221777

SEQ ID NO: 403694 - DNA, 1000 bp, Homo Sapiens; identical to SEQ ID NO: 118468

SEQ ID NO: 403695 - DNA, 1000 bp, Homo Sapiens; identical to SEQ ID NO: 222304

SEQ ID NO: 403696 - DNA, 1000 bp, Homo Sapiens; identical to SEQ ID NO: 223862

SEQ ID NO: 403697 - DNA, 1000 bp, Homo Sapiens; identical to SEQ ID NO: 223864

SEQ ID NO: 403698 - DNA, 1000 bp, Homo Sapiens; identical to SEQ ID NO: 292094

SEQ ID NO: 403699 - DNA, 1000 bp, Homo Sapiens; identical to SEQ ID NO: 223865

SEQ ID NO: 403700 - DNA, 1000 bp, Homo Sapiens
ctccaggctgggggccacgtctgtgaccagggcctgcaccacgggcagccgcaggtgggacaagtgccacgtggaagtcgtggacactccggacattttcagctcccaagtgtccaagacagatcctggctgtgaggagagaggtcactgctacctgctctcggcccccggaccccacgcgctgctcctggtgacccagttgggtcggttcaccgcccaggaccagcaggcggtgaggcaggtgagggacatgttcggggaggacgtcctaaaatggatggtcatcgtcttcaccaggaaggaggacctggccgggggctccctgcacgattacgtgagcaacacagagaaccgggccttgcgcgagctggtggccgagtgcgggggccgggtctgtgcctttgataaccgggccaccggccgggagcaggaagcccaggtggagcagctgctggggatggtcgagggcttggtgctggagcacaagggcgcccattactccaacgaggtgtatgagctggcgcaggtgctgcgctgggcaggccctgaggagcggctccggcgggtggcggagcgcgtggcagccagggtgcagaggaggccatggggcgcctggctgtcggcccggctgtggaagtggctgaagtcccccaggagctggaggctgggcctggccctgctgctggggggcgcgctcctgttctgggtgctgctccacaggcggtggtcggaggccgttgcggaggtcgggcctgactgacagcgcaggtcctaaaactgaaggcaacttggttaagggaggctgaattcttggagctgaagggaaaacttcattccaacggaaggaatcctgtagtttcaggcatagttttaatgacacagaaaactttgctgcatcacctttgcaactttgccaaagctcagagttcactttttaagtttttaactcattttaaatgatgtgtatgcagagttttaaaataaattcgtctaacaataa

SEQ ID NO: 403701 - DNA, 1000 bp, Homo Sapiens; identical to SEQ ID NO: 292097

SEQ ID NO: 403702 - DNA, 1000 bp, Homo Sapiens
ggcctttgactgtcaggaatgggccgagggccgagggcgtcacatcaacagtgcttttctcatttacaatgctgctgatgataaggaaaatctcatcacgtttcccagaatccaacccatttcaaaggatgatttcagacgctatcggggagctattgcacgcaagcgaattcgcctaggcagaaaatatgttatttcccacaaagaagaggttccactttgcatacactgggatatcagcaagcaggcatccctgagtgacagcaatgtggaggccctcaaaaaactggcagccaaaaggggttgggaggttaccagcactgtggaaaagataaaaatatatactctggaagagcatgatgttttatctgtttgggttgaaaagcacgtgggaagtccagcacatttggcttatcgtctcttgtctgactttacaaagcgacctttgtgggacccccattttgtgtcctgtgaagtcatagactgggtgagtgaagatgatcagctgtatcacatcacctgtcctatactgaatgatgacaaacccaaagacttggtagtactcgtatcacgaagaaaacccctcaaagatggtaacacttacacagtggcagtgaagtcggtcattttgccatcggtccccccgtctccacagtacatcagaagtgaaatcatatgtgccggatttctcatccatgctattgacagcaattcatgcatcgtatcttactttaaccatatgtctgctagcatccttccttactttgctggaaatcttggtggctggtcaaaatccattgaagaaacagcagcctcttgtatacagttcttagagaatcctcctgatgatgggtttgtaagcacattttaaaggtcaactttcaattactggtaatttaatttcccacttttaattccaagcacccttagccctgacatctgtcaagctttggggccacaaaataatttaatataacctaagcaaaatgcagtgacggag

SEQ ID NO: 403703 - DNA, 1000 bp, Homo Sapiens
acatttttagttcatatacagcatttggagatctggaagtatttttacatggtcttggacttgaacatatgacagatttactaaaggaaagggatataacgttaagacatcttttgaccatgagggaagatgaatttacaaagaatggaattaccagtaaagaccagcagaaaattctggctgctcttaaagaactacaggtagaagagatacaatttggagagctatctgaagagacaaagttggaaatcagtggtgatgagttcctcaactttcttctcaaattaaataaacagtgtggccatttaataacagctgtacagaatgttattactgagttacctgtaaattctcaaaagataacactggaatgggcttctccccagaattttacttcagtttgtgaagaattggttaataatgttgaagatttgagtgaaaaggtctgcaaactaaaagacctaattcaaaagttgcaaaatgaacgggaaaatgatccaactcatatacaattaagggaagaagtatctacatggaatagtagaattttgaagaggacagctattaccatatgcggattcggttttcttcttttcatttgcaagctaactttccagaggaaataatccaaatatttgttttaagttatatatacacatcttattgaaccatccaaaaatcattgcttttaactgtttgcagcacaatataactttacattctttgccaatattccataggaaaaattttgacaatgtggagtttttttttaaaaagtggtttgttactttgacttataaatacaatttgttatgtttatgttaattgtgattaggtagtaaagtataagtaattttttggtttgatcgtatctaaatcacattcaaaattaaagttatatctaatatctttgacattttttaaagtgtgttcatttgtcagtgaatcgtacaggatttgtaaagtgttcataaattgagctttcttttgtttctttttt

SEQ ID NO: 403704 - DNA, 1000 bp, Homo Sapiens
agaaactgcagggttcctactactcttttttcttgttgttcaattatctcctccccctcttctctcctgtcttttgatttggtcattctctttattttctgcttgccatgtcttttctggaacatacttgcatccaccacagcatcaattcccttgatccagcccaagagaccaggcagccatggccactgccttcctctctgatgaacctatcgggtgaaaacgaccactcaagagactgacttcgccattcaagacaaggaagagacacatgtgtgcactcctgcatgttcagttctgtacttccagtttctaaaatgcactgttcagttttccaaccacttggtggttcaggcttgctttgaacctgagctcttaggcacatgacggtcattcctgacatcctccccagctcaagtctattcttaccatagaacccagggcagggagagaagaacctagaggcctggtttgctttggtggcattgtaaaaagagtaagagaggtttggtttgtggtggtttgctttctttaccataagcaatcccttgccttaactcatcaccctttttcactatgacccttagaccctgagtattttcaaatatatgattgctgatagtagtgaccaaaactactttgttcctttcttaccactctctcctggggccgacacgttgggacagcacaccatagcataaagctaggggatgcatggaaatagcagcttgaaactaggaggtaacaagaaagcttctaggaagtagatgttccatatcttcaaaatgcctcctccaattttgtaagaatgctagctaggtattcctgggattattatactgagatatatatatatacacacacacacacatatgtgtatatatgtatatatatatgtgagtatatatacacacacacacacacacacacatatatatatatacacacacgcacacatatatgttgctgcagcataaagaaattgaaataaaagtttaaa

SEQ ID NO: 403705 - DNA, 1000 bp, Homo Sapiens; identical to SEQ ID NO: 118470

SEQ ID NO: 403706 - DNA, 1000 bp, Homo Sapiens; identical to SEQ ID NO: 223867

SEQ ID NO: 403707 - DNA, 1000 bp, Homo Sapiens; identical to SEQ ID NO: 292100

SEQ ID NO: 403708 - DNA, 1000 bp, Homo Sapiens; identical to SEQ ID NO: 292103

SEQ ID NO: 403709 - DNA, 1000 bp, Homo Sapiens; identical to SEQ ID NO: 292104

SEQ ID NO: 403710 - DNA, 1000 bp, Homo Sapiens
cagcgaaagaggacgaggaggaggactaagctcaggtcgctctaagcacaaacgtggctctttctacaaccagatgcaaccgagggatttccctgccctccctcttccctcggaggggcggggcggggcggggccgggtgttccatagcatgtgtgtctcggatgcggaaggcagttttgcttgggaaacaagctccttccccggggtcatcactcacggcctccatggcaccagggacaacgctgtccccgcagcagcgcctcctcccggcgcccgagagaccggcacgccacggcccctcccccaaggaacagagcaaaggatggtggccgcaggccccacgcgagcccacaggacaccggcccctagattccagccaccaagcggaagcatgagacccgcccacactagcctctgtgttcccgttagggacatcacaccctgtctcacgtcgcagtgccatggacgcagcagttacagcaccattgttttagcagtgcgtgttcatatatgggcttgctacttcctgtaatgaggacgttcaacatggtgaggggctacaagaaaacgcttttctgtacagagtcttactgtagctacgctaatggttaacctgatagaattaactcgtatttttctatggttttaacctgatgctccactgtctccgtcatggggttgttttgctgtttggggttgggccttgtttccctttcctttctccagtccacgtgtagactttgcgcttgatgaagaagcagatcggaagtaactgctccctcctcaaggttgtcttcagacgtcttggggacgttcctaaacactgagggggaagacagccaatagcacccattaaaagaaatacctaaataaaacctctctcccactcagctatgctagggcttggctgtaggtgtgcactgtctatttacatccgtccttacaaccatccttgtcctccttggtaccgtatcaagctctttcccatgacatttggtt

SEQ ID NO: 403711 - DNA, 1000 bp, Homo Sapiens; identical to SEQ ID NO: 286141

SEQ ID NO: 403712 - DNA, 1000 bp, Homo Sapiens; identical to SEQ ID NO: 292108

SEQ ID NO: 403713 - DNA, 1000 bp, Homo Sapiens
atgaccaaacagaagatattggaagcaaagggtattctcttggaattttcctaggtgtgaacttgctggcttttctcatcattgtgttttcctatattactatgttctgttccattcaaaaaaccgccttgcagaccacagaagtaaggaattgttttggaagagaggtggctgttgcaaatcgtttcttttttatagtgttctctgatgccatctgctggattcctgtatttgtagttaaaatcctttccctcttccgggtggaaataccagacacaatgacttcctggatagtgatttttttccttccagttaacagtgctttgaatccaatcctctatactctcacaaccaacttttttaaggacaagttgaaacagctgctgcacaaacatcagaggaaatcaattttcaaaattaaaaaaaaaagtttatctacatccattgtgtggatagaggactcctcttccctgaaacttggggttttgaacaaaataacacttggagacagtataatgaaaccagtttcctagcaatcattttggatcactggactttcagtggactacctaaaacaggggacagcttttggaagatgacatctgcaatgcttttcatctttaccaacggcaagcctttctgcacagagagcacagcagaatggctcctgtcactgcattccaatggcagctgtactatctaccaaccatgctgaggacagcaccaaaggttcctctcctcaccccacatgcctgaaaagcacatgtgaattcgtgtatagtgggctgaggtgcagctgatctctagctaatcaacacaacccaccaacaaatgaccacaggttggcactgtgtggtctttcacatcgggttgcactgtccatgaaatagaaacactcacaacatctgattccagtgtggccataataacagaaatctaacaactctttccttgccttttcaatatcaaataaaaccatcagcatcctgctggattgata

SEQ ID NO: 403714 - DNA, 1000 bp, Homo Sapiens; identical to SEQ ID NO: 118471

SEQ ID NO: 403715 - DNA, 1000 bp, Homo Sapiens; identical to SEQ ID NO: 223869

SEQ ID NO: 403716 - DNA, 1000 bp, Homo Sapiens
ttgctccaaaagggagaaattcagaaaatatatttactgagaagttaaaggaagacagtattcctgctcctcgctctgttggcagtattaaaatcaactttacccctcgagtattcccaacagctcttcgtgaatcacaagtagcagaagaggaggagtggctacacaaacaagctgaggcacgaagagcaatgaatactgacatagctgaactttgcgatttaaaagaagaagaaaagaacccagaatggttgaaggataaaggaaacaaattgtttgcaacggaaaactatttggcagctatcaatgcatataatttagccataagactaaataataagatgccactattgtatttgaaccgggctgcttgccacctaaaactaaaaaacttacacaaggctattgaagattcttctaaggcactggaattattgatgccacctgttacagacaatgctaatgcaagaatgaaggcacatgtacgacgtggaacagcattctgtcaactagaattgtatgtagaaggcctacaggattatgaagcggcacttaagattgatccatccaacaaaattgtacaaattgatgctgagaagattcggaatgtaattcaaggaacagaactaaaatcttaatgactattagaagtaactaagtattgttataagttttttaaaaacaactggaggcatctttgtacatattatggccagttgtacagaatcgctttctgtttagtactttagttctgttgagggcaaaatattataaatctatagaaaataaactgtttgacttgaatcatttctgaataagtaaatctaaataagaatctattttaattccttatttcttcatattaatacatatgtatacttttttgtgttactgaattaagcttgcccttgtaacaaaatatgttttggtatagttaccaggacacttactgattaatttttaacaaggtagaattttaaaataaaagatttataaataa

SEQ ID NO: 403717 - DNA, 1000 bp, Homo Sapiens; identical to SEQ ID NO: 223870

SEQ ID NO: 403718 - DNA, 1000 bp, Homo Sapiens
tactgtgcacagatactcttcaagcactggacgtggattctctctctagccctcagcacccctgcggtaggagtgccgcctctacccacttgtgatggggtacagaggcacttgctcttctgcatggtgttcaataggctgggagttttatttatctcttcaaactttgtacaagagctcatggcttgtcttgggctttcgtcattaaaccaaaggaaatggaagccattcccctgttgctctccttagtcttggtcatcagaacctcacttggtaccatatagatcaaaagctttgtaaccacaggaaaaaataaactcttccatcccttaaagaatagaatagtttgtccctctcatgggaattgggctgtatgtatattgttcttcctccttagaatttagagatacaagagttctacttagaacttttcatggacacaatttccacaacctttcagatgctgatgtagagctattgggaaagaacttccaaactcaggaagtttgcagagagcagacagctagagataactcgggacccagagttggtcgacagatgttagatgtatcctagcttttagctataaaccactcaaagattcagcccccagatcccacagtcagaactgaatctgcgttgttgggaagccagcagtggccttgggaaggaagccatggctgtggttcagagagggtgggctggcaagccacttccggggaaaactccttccgccccaggtttcttcttctcttaaggagagattattctcaccaacccgctgccttcatgctgccttcaaagctagatcatgtttgccttgcttagagaattactgcaaatcagccccagtgcttggcgatgcatttacagatttctaggccctcagggttttgtagagtgtgagccctggtgggcagggttggggggtctgtcttctgctggatgctgcttgtaatccatttggtgtacagaatcaacaataaataatatacatgta

SEQ ID NO: 403719 - DNA, 1000 bp, Homo Sapiens; identical to SEQ ID NO: 292112

SEQ ID NO: 403720 - DNA, 1000 bp, Homo Sapiens; identical to SEQ ID NO: 223871

SEQ ID NO: 403721 - DNA, 1000 bp, Homo Sapiens; identical to SEQ ID NO: 292114

SEQ ID NO: 403722 - DNA, 1000 bp, Homo Sapiens; identical to SEQ ID NO: 395994

SEQ ID NO: 403723 - DNA, 1000 bp, Homo Sapiens; identical to SEQ ID NO: 292116

SEQ ID NO: 403724 - DNA, 1000 bp, Homo Sapiens; identical to SEQ ID NO: 292117

SEQ ID NO: 403725 - DNA, 1000 bp, Homo Sapiens; identical to SEQ ID NO: 223873

SEQ ID NO: 403726 - DNA, 1000 bp, Homo Sapiens; identical to SEQ ID NO: 223873

SEQ ID NO: 403727 - DNA, 1000 bp, Homo Sapiens; identical to SEQ ID NO: 223874

SEQ ID NO: 403728 - DNA, 499 bp, Homo Sapiens
gtgatcatcttttctttgacattggaagcagaatctgaaactttctgaggagagcatttgagcttcagatttctaacagcctctttgcaacaaaatagaccagtagctgaaggcaactgcaatccttcatgatgtttcccttggccagaaatgcactaagcagtctcaagattcaaagcattctgcaaagcatggcaagacatagccatgtaaaacactcaccagattttcatgataaatatggtaatgctgtgctagccagtggaactgctttctgtgttgctacatgggtgtttacagccactcagattggaatagaatggaacctatcccctgttggcagagttaccccaaaagagtggaaacatcagtaaccatcacagttgctgtaatgacagaattgtttaaaaaaccaacttgtcatgtaagcactctactgcttattaaaatatagcacaattgaaaaaataaaatgtgttttaaatctttaaaaaaaaaa

SEQ ID NO: 403729 - DNA, 1000 bp, Homo Sapiens; identical to SEQ ID NO: 118474

SEQ ID NO: 403730 - DNA, 1000 bp, Homo Sapiens; identical to SEQ ID NO: 292120

SEQ ID NO: 403731 - DNA, 1000 bp, Homo Sapiens; identical to SEQ ID NO: 292121

SEQ ID NO: 403732 - DNA, 1000 bp, Homo Sapiens
cagggcctttcgcttgtcccatgggcgggtggtgggccaaggaggagcttagcaagtctgcagcccagccccacctccatagggtcctgcaggcctgtgctgagaggcctggtgctgcctggcagagtgacaaaggctcaggacggctggctctgggggactcaggccaagccccttggcaccatcctggcttttggcagggatgagtgaggccctgcagagagcatcccaggccaaggttcccactcagcctgccccctctgcatgtgggtagaggatgtactgggacttggcatttaggattccatctggcccagcccctgaaggtcctggggaagcaggtctcaattctgaatagccagtggggcacactgactgtcctccccaggggaactgcagcgccctcctccccactgccccctgcagcccctgagatattttgctcactatccctccccacttgcttccctgatatgtgctctgagcttccctgaaccaggatctgcctattactgctgtgccccatggggggctccttccctgcctgacccactgttgcagaatgaagtcacctcgcccccctcttcctttaatcttcaggcctcactggcctgtcctgctcagcttgggccagtgacaatctgcaaggctgaacaacagcccctggggttgaggcccctgtgctcctggtcaggctgcccgttgtggggaggggcagtgttagagcagggctggtcataccctctggagttcagaggaagaggtaggaccagtgcttttttgtttcttttgttatttttgggtgggtgggtgggaaggtctctttaaaatggggcaggccacacccccattccgtgcctcaatttccccatctgtaaactgtagatatgactactgacctacctcgcagggggctgtggggaggcataagctgatgtttgtaaagcgctttgtaaataaacgtgctctctgaatgccaaaaaaaaaaaaaaaaaaaaaa

SEQ ID NO: 403733 - DNA, 1000 bp, Homo Sapiens; identical to SEQ ID NO: 118475

SEQ ID NO: 403734 - DNA, 1000 bp, Homo Sapiens; identical to SEQ ID NO: 118476

SEQ ID NO: 403735 - DNA, 1000 bp, Homo Sapiens
ggtgccccacccaaggacagcacgctgctgagagaccatgagatccgtgctagcctcaccaaacactttgggctgctggagaccgccctggaggaggaagacctggcctcctgcaagagccctgagtatgacactgtctttgaagacagcagcagcagcagcggcgagagcagcttcctcccagaggaggaagaggaagaaggggaggaggaggaggaggacgatgaagaagaggactcaggggtcagccccacttgctctgaccactgcccctaccagagcccaccaagcaaggccaaccggcagctctgttcccgcagccgctcaagctctggctcttcaccctgccactcctggtcaccagccactcgaaggaacttcagatgtgagagcagagggccgtgttcagacagaacgccaagcatccggcacgccaggaagcggcgggaaaaggccattggggaaggccgcgtggtgtacattcaaaatctctccagcgacatgagctcccgagagctgaagaggcgctttgaagtgtttggtgagattgaggagtgcgaggtgctgacaagaaataggagaggcgagaagtacggcttcatcacctaccggtgttctgagcacgcggccctctctttgacaaagggcgctgccctgaggaagcgcaacgagccctccttccagctgagctacggagggctccggcacttctgctggcccagatacactgactacgattccaattcagaagaggcccttcctgcgtcagggaaaagcaagtatgaagccatggattttgacagcttactgaaagaggcccagcagagcctgcattgataacagccttaaccctcgaggaatacctcaatacctcagacaaggcccttccaatatgtttacgttttcaaagaaatcaagtatatgaggagagcgagcgagcgtgagagaacacccgtgagagagacttgaaactgctgtcctttaaaaaaaaaaaaaaaaa

SEQ ID NO: 403736 - DNA, 1000 bp, Homo Sapiens; identical to SEQ ID NO: 223876

SEQ ID NO: 403737 - DNA, 1000 bp, Homo Sapiens; identical to SEQ ID NO: 292125

SEQ ID NO: 403738 - DNA, 1000 bp, Homo Sapiens
gctcagcacacatcccatttgatagattttcactggccaaggagggagaactttctctgccacagcaccaaagtggggaacacccggccaacttctctttgggtcctgtggacctcaatgtctcagggatctacaggtgctacggttggtacaacaggagcccctacctgtggtccttccccagtaatgccttggagcttgtggtcacaggtaggtaccgcccagtccagccctgtgtctgggttggctgtccagggccttgccaccgggcaggaatatgaagacgtgcactgagagtgaagtgaagagaggcaaaggctctcactccaggacagtggagagagaaaggcttccccaccacactttccgctttcacttcctcgctagagttctccagacagggttcattgaaaacttagtctgtggagaacagaagggctaactcagtttgtttcattttatttatttcattttattttccgggatagagtcttgctctttcgccaaggctggagtgcagtggcacgatctcgactcactgcaaccttcgcctcccaggttcaagcaattctcctgcctcagctcctcgagtagctgggaccacacagacagggtttcaccatgttggccaggctggtctcgaactcccgacctcaggtgatccacctgcctcggcctcccaaagtgctgggattacaggcgtgagccaccgcgcctggccaggctgcacacattcttattaggattccaccttgttctggtgttgtagagatgtgattaggtatttagtgaattcaccaagtgaggagagaatgaaaagaaaacacaacctgcctggccgggcgtggtggcgtgagcctgtcgtcccagctactcaggaggctgaggcaggagaatcacttgaacccaggaggcagctgttgcagtgagccaagatcacgccattgcactccagcctgggtgacagaacgagactccacctcaagaaaaaaaaaaaaaa

SEQ ID NO: 403739 - DNA, 1000 bp, Homo Sapiens; identical to SEQ ID NO: 292127

SEQ ID NO: 403740 - DNA, 1000 bp, Homo Sapiens
ggcccggcggtggcgagacagggcagcggctgctgagcttggagctggacgcagcttcggggggcctgctggctgccttcccccgctgcgtggtccgagtgcctgtggctcgctgccagcagtactcggggtgtatgaagaactgtatcggcagtcaggacccctactgcgggtgggcccccgacggctcctgcatcttcctcagcccgggcaccagagccgcctttgagcaggacgtgtccggggccagcacctcaggcttaggggactgcacaggactcctgcgggccagcctctccgaggaccgcgcggggctggtgtcggtgaacctgctggtaacgtcgtcggtggcggccttcgtggtgggagccgtggtgtccggcttcagcgtgggctggttcgtgggcctccgtgagcggcgggagctggcccggcgcaaggacaaggaggccatcctggcgcacggggcgggcgaggcggtgctgagcgtcagccgcctgggcgagcgcagggcgcagggtcccgggagccgacgctggggcttccagaaggcccgggggtctccgaggtgccggttaggagtttgaaccccccccactctgcagagggaagcggggacaatgccggggtttcaggcaggagacacgaggagggcctgcccggaagtcacatcggcagcagctgtctaaagggcttgggggcctggggggcggcgaaggtgggtggggcccctctgtaaatacggccccagggtggtgagagagtcccatgccacccgtccccttgtgacctcccccctctgacctccagctgaccatgcatgccacgtggctggctgggtcctctgccctctctggagtttgcctcccccagccccctccccatcaataaaactctgtttacaaccaccggcaaaaaaaaaaaaaaaaaaaaaaaaaaaaaaaaaaaaaaaaaaaaaaaaaaaaaaaaaaaaaaaaaaaaaaaaaaaaaaaaaaaaaaa

SEQ ID NO: 403741 - DNA, 1000 bp, Homo Sapiens; identical to SEQ ID NO: 223878

SEQ ID NO: 403742 - DNA, 1000 bp, Homo Sapiens; identical to SEQ ID NO: 223877

SEQ ID NO: 403743 - DNA, 1000 bp, Homo Sapiens; identical to SEQ ID NO: 223878

SEQ ID NO: 403744 - DNA, 1000 bp, Homo Sapiens; identical to SEQ ID NO: 118478

SEQ ID NO: 403745 - DNA, 1000 bp, Homo Sapiens; identical to SEQ ID NO: 292132

SEQ ID NO: 403746 - DNA, 1000 bp, Homo Sapiens; identical to SEQ ID NO: 292133

SEQ ID NO: 403747 - DNA, 1000 bp, Homo Sapiens; identical to SEQ ID NO: 223879

SEQ ID NO: 403748 - DNA, 1000 bp, Homo Sapiens; identical to SEQ ID NO: 292135

SEQ ID NO: 403749 - DNA, 1000 bp, Homo Sapiens; identical to SEQ ID NO: 118479

SEQ ID NO: 403750 - DNA, 1000 bp, Homo Sapiens; identical to SEQ ID NO: 118480

SEQ ID NO: 403751 - DNA, 1000 bp, Homo Sapiens
taattctcagaacaaccctgagagaaagatattgttgtccccactttacagatgtggatatttaggccaaaaggaggaagtgacttgtccaggggcagacaccaaatgggaatctgattccagtggatgtctcttttcagtgcactgggtggtcaatgcccactcgctctgaaatcatctgactgtgatgccctgccttggagtttagaagttgagtgcaggcttgggagtcagactggatggggtaggttctaactctgccactgctagccggatgaacttgagcaagtcatttcacatctccgagcctctgtttctccaagtgtaagatgaggacaagtataaaacctcctttatgggtttgttgtgaacacagtgcagggcacatttataataagagctcagtcaatggtaggtttcatgcaactgctgctctaggctggaaaagttgttcttgcactggatgcagcatgagaagctggctgctaagatgtcactgggggtcactaaagctgaagcctgaaggaaagcctctcattgctgtagagctctccctgcctctctctctgggggcgatggggaaggtcaggagtccagcccattcccagggtgtgtgggatagcgattgcattttccttttgctctggagtttcactccccttctgggtcccaagggcccaatggcctgacttttagaattgcttgcaattggtgttttctcttgaatttgggggctgccatttaaagccaggtttccatgagctgaagaccagccattcaagaatctgaaaagtagacaagaggactccagttgcctcaggttggttctgctgtgctctggaaagtaactgcagccaccaggtatgaaaaggagcctggtggggagaccactgcacccaaaacaaatcctttcttcttctgagaatgtgactttttctggtgttgtaaaaaagaaaaaaaaaagaatgctcattgtaaaaataaaaaaataataataagc

SEQ ID NO: 403752 - DNA, 1000 bp, Homo Sapiens; identical to SEQ ID NO: 292138

SEQ ID NO: 403753 - DNA, 1000 bp, Homo Sapiens; identical to SEQ ID NO: 292139

SEQ ID NO: 403754 - DNA, 1000 bp, Homo Sapiens; identical to SEQ ID NO: 292140

SEQ ID NO: 403755 - DNA, 1000 bp, Homo Sapiens; identical to SEQ ID NO: 292141

SEQ ID NO: 403756 - DNA, 1000 bp, Homo Sapiens; identical to SEQ ID NO: 118481

SEQ ID NO: 403757 - DNA, 1000 bp, Homo Sapiens; identical to SEQ ID NO: 292143

SEQ ID NO: 403758 - DNA, 1000 bp, Homo Sapiens; identical to SEQ ID NO: 118481

SEQ ID NO: 403759 - DNA, 1000 bp, Homo Sapiens; identical to SEQ ID NO: 223882

SEQ ID NO: 403760 - DNA, 1000 bp, Homo Sapiens; identical to SEQ ID NO: 292147

SEQ ID NO: 403761 - DNA, 1000 bp, Homo Sapiens
tcaactcctttgaggctcaaaaaaaacacaaagatcagaagccttcagatagagggtggtattctggtaaagaagaaagagataagggacgctaccttgcttttctggcacaggaagcacatgataaagcatgctcagaggagctggaacagatatagctacctggttcgtgtaaataagaataatcaaggccccagagtgtgtatgcttccaggtggaggagaaaggggaatctcccaaaatttaaaaacaaattggaagaataaccaggacagccaagtgaagcagccacagggacccaagcagtcgaggtctttaatgtgcctggagatgactctctgctattcatgaatcttgctattgcacaaaccctatcaagagctgctgcttcccttccagccagaaaagtggtaagcggagcaagtgccaagcagaacagaccttatcatctgggtaacagacttctcagtgttggtgctgtgtctgttagagccttagagcaagttaagcacttccttggtgtgggtaaagaataaaggggaaagaaactactttagagcctctttttctcccaactcatatttttgataggaaaaacagaaaacccatccagttcttcagaaattgctttctaggcattaatactactttactatctatactgtttagttattcctttctttacccacctaaactatccatctaatccaggattccctcactctttttttttagttactaatcattttatgaaaataatgtatttataagtattttcttaaggtttgtgaagagtatttgcattgtgtcttcattttaatgtgtttgcaatcgctccgctccaggaagaacggaaatgctgtcttgtgagcatgaagtgaacgggctgttttgctccagccacttttcttgtacaaccacatggatggattagatgtcctcaggtcttttccatcttcagtttctatgactgtggaataaatgttcagatagaaacttc

SEQ ID NO: 403762 - DNA, 1000 bp, Homo Sapiens; identical to SEQ ID NO: 292149

SEQ ID NO: 403763 - DNA, 1000 bp, Homo Sapiens; identical to SEQ ID NO: 223883

SEQ ID NO: 403764 - DNA, 1000 bp, Homo Sapiens; identical to SEQ ID NO: 118482

SEQ ID NO: 403765 - DNA, 1000 bp, Homo Sapiens; identical to SEQ ID NO: 223885

SEQ ID NO: 403766 - DNA, 1000 bp, Homo Sapiens
cccaaaggaatctctggccacccaggagagaagggcgagagaggactgcgtggggagcctggcccccaaggctctgctgggcagcggggggaacctggccctaagggagaccctggtgagaagagccactggggggaggggttgcaccagctacgcgaggctttgaagattttagctgagagggttttaatcttggaaacaatgattgggctctatgaaccagagctggggtctggggcgggccctgccggcacaggcacccccagcctccttcggggcaagaggggcggacatgcaaccaactaccggatcgtggcccccaggagccgggacgagagaggctgagggtggtggcggcccctgaggcagaccaggccaggcttcccctcctacctggactcggccagctgcctccagggaccgcccgtccatatttattaatgtcctcagggtcccttctgccatctaggccttaggggtaagcaggtctcagtcctggcaccatgcacatgtctgaggctgagcaagggctgagaggagaggcttgggcctcagtttccctctgtgaagtggggggaggcaggccttcaaggagggatagaggtacaaggcttcgtctcatctgctgtctgagcatccaggcccaaaggcactgagggagtcaggagctggggctcggcacatgcagagatgacagggcagggggcagtcttcctccccctccccgaccaaacctcggggagccctcctgtgcccctccctccttgttgtccagtgctgggctccccaccccgaggtcaggctgcccaatcctctgactggatcaccgggggcttcttgcctcagttcttccctctgagcccccaggccctcccgcatctcaggttggggatggggacatggagaggaaggggccgcctactcctgcaaatgcttgtgacagatgccaggaggtagatgtgtgctggccaataaaggcccctacctgattccccgcaaa

SEQ ID NO: 403767 - DNA, 1000 bp, Homo Sapiens; identical to SEQ ID NO: 223886

SEQ ID NO: 403768 - DNA, 1000 bp, Homo Sapiens
ggtgacggtgctggagtggagatgctgccctggcttcaccgggagcaactgtgatgaggaatgcatgaactgcacccggctcagtgacatgagtgagcgactgaccacactggaggccaaggtcctcctgctagaagcagcagaacggccctccagcccggacaacgacctgccagcccccgagagcactccgccgacctggaatgaggacttcctccccgacgccatccctcttgctcaccctgtgccacgacagagaaggcccacgggcccagccgggcccccggggcagacaggaccaccagggcctgcaggcccccccgggtctaaaggtgaccgaggccagacaggagagaagggtccagcggggccgcctgggctcctggggcctccagggccccgtgggcttcctggagagatggggcgccccggccccccaggaccacccggcccagcaggcaacccaggcccctcaccaaacagcccccagggcgccctctactccctgcagccgcctacagacaaagacaatggagactcaaggctggcctctgccatcgtggacacagtgctggcaggtgtcccaggaccccggggtccccctggtccaccaggtccccctgggcctcgaggtcccccaggacccccaggaacacctggatcccagggcctggctggagagcgaggcacagtggggccgtccggtgaacctggcgtgaagggggaagaaggagagaaagccgccactgcagagggcgagggggtgcagcagctgagagaggccctgaagatcctggcagagcgagtcctcatcctggagcacatgattgggatccacgatcccctggcctccccagagggaggttctggccaggatgctgccctgagagccaacctcaagatgaagaggggtggcgcccaacccgatggggtccttgctgccctgcttgggcccgaccctggacagaagagcgtggaccaggccagcagcaggaagtga

SEQ ID NO: 403769 - DNA, 1000 bp, Homo Sapiens; identical to SEQ ID NO: 118483

SEQ ID NO: 403770 - DNA, 1000 bp, Homo Sapiens; identical to SEQ ID NO: 292154

SEQ ID NO: 403771 - DNA, 1000 bp, Homo Sapiens; identical to SEQ ID NO: 292155

SEQ ID NO: 403772 - DNA, 1000 bp, Homo Sapiens; identical to SEQ ID NO: 292156

SEQ ID NO: 403773 - DNA, 1000 bp, Homo Sapiens; identical to SEQ ID NO: 220432

SEQ ID NO: 403774 - DNA, 1000 bp, Homo Sapiens
gggatttctctctgatttcttctactaccatgtagtgtgatggagagaacttgactgcagtcacataacttggattctgtcccagtttgccaaccaacttgctgtatacaccttggacaagtcatttgacctttcagaattttattttcgtcaccagcagaatgaagggatgggattaatgatttttgccttttttggttttttagttttttattggtatcctgataatctctgaagctgtggacataagttatttttttttatttgtcattactttcaagtttctctagtaaaaaatacaataccactattcaggatgctggacttcttttcttttttttttcttttttttttttcaatttttcttttttgggatggagtctcactatgttgcccagactggtcttgaactcctgggctcaagtgatccttccatctcactttcctgagtagctgacattacgggtacactccatcaagcctggttcctaggatgctggacttctagcttagtgagaatgcagtatactttttgaaaacttcgtgcaggaatccctcaaatgctgtaactaggaatgggtcagtgaagttcaaacgacttttccttgagggagtattttaatcggacaagggaactctttttcttttgggcattggccaacaggactgagaagccagagagcttgcacctgagccatctcagccgtgagagtaacagtcctaggaaaatagatgggggctgggggtaaggaaatgtgctgaagacagagctattctggatggattttggtttgcaaaaattctactttaaaacaattttgcctgtagcaagtacatttttttgcaattggagtgtaaacattctgtgtggcaacagttaaaagctgttataacaatttgcttgggtgtgtgtgcatgtgtgtgtgtgtgtgtgtgtgtgtatacattgttgccactatctaaaattagggcatttcatactaaaaacaaagcttgtctt

SEQ ID NO: 403775 - DNA, 1000 bp, Homo Sapiens; identical to SEQ ID NO: 223887

SEQ ID NO: 403776 - DNA, 1000 bp, Homo Sapiens; identical to SEQ ID NO: 118484

SEQ ID NO: 403777 - DNA, 1000 bp, Homo Sapiens
accctcgtatctgcagcctgaggtagtcaggtcattgtttcaatgctgcccttggaaagaagactttgacttaggtgctttgggatctaagtgtggtttgtgactatccccattatttaagcatttgggggtctcacttttgcttatctgtaacacaaagaggccatgtagtatagtgagcagggttgagaatcgggaaaactagacccctgccactaacaggctaggagactttgggcagtaatgggaggcactgagggtttgcaaatactttcctacttgtaatctcattgattccctgctctgccctgacaggaggggtagggaaaatcagttgacgttgcctggtggttcctaccttctgtaaaacgaacagattccttaagattagctttaaatcccttttcagttcactgttggttctcatctttgaaagagggcagcataagggaaatgatggagaagggagaattgtggatggttatttatagctcatgattcatccaaggactgagttattctccccatgaggctaaccggcctctttcccaacacttaatcatggcagccaggatgggtgaatgatgaaagctcttctgcatgagccggtttcatcatcttgggtgggttgattacaagtttgtgtggcattcctttagctggggattagcttaatctctgtacatttttctcatttctaattgaagaagaaagggagggcagagaggacagaaaattacttgggtttactaattcaaagagccatctctgatgggagagggtgaggaaatcagctgaatggttggcctgcatattcttttttaggccacaggctacagctgagcaatggcttagtctaatgattgggcacaatgaggatttaccaagtgcttcaatgagagcagtcctgtttcattcacatgggatgttttcaattggttcttcaactaagctcttgcagagtgagatgacttgaaataaaaatgttctatgaatattg

SEQ ID NO: 403778 - DNA, 1000 bp, Homo Sapiens; identical to SEQ ID NO: 292161

SEQ ID NO: 403779 - DNA, 1000 bp, Homo Sapiens; identical to SEQ ID NO: 223888

SEQ ID NO: 403780 - DNA, 1000 bp, Homo Sapiens; identical to SEQ ID NO: 223889

SEQ ID NO: 403781 - DNA, 1000 bp, Homo Sapiens; identical to SEQ ID NO: 292163

SEQ ID NO: 403782 - DNA, 1000 bp, Homo Sapiens; identical to SEQ ID NO: 292164

SEQ ID NO: 403783 - DNA, 1000 bp, Homo Sapiens; identical to SEQ ID NO: 292165

SEQ ID NO: 403784 - DNA, 698 bp, Homo Sapiens
gtttgagcagcattgttagagcctgtggaaaacactttacaactgtgtaactgtcttcatctttacagaggaatagtctacaaaggaagacttgtaacctggagaagagacctgtcatttactccatcctttatagtgatgctacaggacgaagaggaatggataaaaacattggcgagcaactcaataaagcgtatgaagccttccggcaggcatgcatggatagagattctgcagtaaaagaattacagcaaaagactgagaactatgagcagagaatacgtgaacaacaggaacagctgtcacttcaacagactattattgacaagctaaaatctcagttacttcttgtgaattccactcaagataacaattatggctgtgttcctctgcttgaagacagtgaaacaagaaagaataatttgactcttgatcagccacaagataaagtgatttcaggaatagcaagagaaaaactaccaaaggtagacattgcttctgcagaaagcagcatttaaatgctgatgcgtgacatagcttcctcattttatttttctgaagtgatctgctggaattccaaacagaagttccatatatacaaatatgtggcttaaatatttctaaatagaagaactattttcaagtaaaataaaggctgaggttttgtatttaaaaaaaaaaaaaaaaaaaaaaaaaaa

SEQ ID NO: 403785 - DNA, 1000 bp, Homo Sapiens
tcctggcttgcatcaacatctccagcatgcgccaggtgttctgccagatgcaggaacttccacaactatggcacatcagccgagtggactttctcctccaggtcccggggctctgcatcctgagctatccaacaccactgtactttgggacccgtgggcagtttcgctgcaacctggagtggcacctggggctcggagaaggagaaaaggagacttcaaagccagatggcccaatggttgcagttgctgagcctgtcagggtggtggtcctagacttcagtggtgtcacctttgcagatgctgctggggccagagaagtggtgcaggtgagggagaggctggccagccgatgtcgagatgctaggatccgcctcctcctggctcagtgtaatgccttggtgcaggggacactgacccgggtaggactcctggacagggtgactccagatcagctgtttgtgagtgtgcaggatgcagctgcttatgccctggggagcctgttaaggggcagtagcaccaggagcgggagccaggaggcactgggctgcggcaagtgaggcaggggtaagtggctggagacccagggagaggggtttgggaaagggtctgaggaagatcaagaagaaaagggtggggacggaatgaatagtagattgaagaccaaatcagggagcccgggctgagctatgggtgaggaactgaagaactcagatccctaagtaggtggggtacccctgagaggactgccacatttcattaaggaagaggggtgcctaatctattcctgacatgtctcctctcttctccaggagctcactgacccaaagatttgcaccgtgtgggtctgacctcatcatgtggagtgcagagggccctgatgacatgtgtgtgatgaggaccatgacccttgaacccccttacctaacgtaactaataaaatgaagctgagagctttggaatccaaaaaaaaaaaaaaaaaaaaaaaaaaaaaaaaaaaaaa

SEQ ID NO: 403786 - DNA, 1000 bp, Homo Sapiens
ctcccactccgtgaaatgggtaacatcacctcgaaggtttactcacccagtgaactcaacatgtgtttactgaacaccactctgtgctaagccctagagcaggtcaaaaacataaaatccctgccttcttgagctaacattctcctgggcatccccactccattttcagatgaggaaactgaggcatgggccatttattttcctcggagctccacagtaaggatgccaatgatgcaaaggtccccggcctcagtttccctgcagtgctcagtgtctgggccagtctcactggatgggaaactcacagatgagctgatctgtaagtcactctgccccaggaggccagagtaaaaagtgctgcttgcccacaccttcgtcccctttgcagggagttacaggagaccccgagacaccctccctccactcgggagccagatggtctgagaagtgaaataagaacctagcatttggttgagagggttattggaaagcttcaaacagagaattagattgtttcctgatttaaaaaatcactcctctccagcaccgagctcccccagggctgcccatcatcttaatgtttggagcttgccttgtaatcaacagagagagaaactaaacacatacgtaagatggtgcttgctctatttggctcctaacagttgccagcccacctaagttctcttcgcttaaagatatgtcccagggcaagacaacaggatcagagaacttgccagatagaaaagacttaaatggagaaccagcccatgcctcacagacagtaggatcccagtaaatatgggttgaataaaatgtgtcttgtccaacctacaaaagtttggccctaaaaaaacccacaaaatatttggacctttaaacagcttgttttcccatggagaagatgacaatgccaatcataggcattttttcattctacagcataaaaacatgagatttaagagcctgaaaaaaaaaaaaaaaaaaaaaaaaaaaaaaaaaa

SEQ ID NO: 403787 - DNA, 953 bp, Homo Sapiens; identical to SEQ ID NO: 292166

SEQ ID NO: 403788 - DNA, 1000 bp, Homo Sapiens; identical to SEQ ID NO: 118486

SEQ ID NO: 403789 - DNA, 1000 bp, Homo Sapiens; identical to SEQ ID NO: 118487

SEQ ID NO: 403790 - DNA, 1000 bp, Homo Sapiens; identical to SEQ ID NO: 292171

SEQ ID NO: 403791 - DNA, 1000 bp, Homo Sapiens; identical to SEQ ID NO: 221232

SEQ ID NO: 403792 - DNA, 1000 bp, Homo Sapiens; identical to SEQ ID NO: 292175

SEQ ID NO: 403793 - DNA, 1000 bp, Homo Sapiens
accgattatctatatttgttcccattttccttcaccgtgacattccagcattgtctgactgtgaggtgggcctttgagagcctccaggttcctcaaaacaggcctgagcgatgggcatcacaccctctgcctacccacgtgcctgcttacctgccagataaccaagtgagatgtctgcgagtggctagttttcacattcttactagtgtttggctcacctttgggcaaaggccccctctaggccttgccccacctccatcaaacgcagacactgtagtcagacctcagcaatataggaggcaataatcttttaacagtgttttgcaaacaaacaaaaagagaaaaatcccagccaggggaactcgccacctgcccacgctagttccatccacgctcaagacccgcccttagaccaggcaggcaaaggcccccatcacactcggccactagtggggtcctgaggccaagaaagaaaccagaccctgtatgacaagtggggtctttcagaacacgacagaaacaggggggcccttgtaatgccactcatactcagagcattattcttatttggacagccaagggcagatcacaggttattgtaggaataaagactagtttacaaaggagaaagaggccctggacttcccaaggaaagggtcaggttagggctcctgtacccattctgttccaccactgtttgatctctctggcctcccaccaggaatgccgtttcctttttatggatctgttgggaaccagagagaatcaacagatcaatgacataggatccgaagtgcaatgatagtcacttctagtttggcatttcacaaactctgtacagcaaggtattggtaggttactcaatttcaaaagggccccatggccaaatatgtttaggaaccgctgtttgtatttctttttttggagacgcattgtatataatatatgtcaaaggctttcggaattcctgcaggaaagaaatcagctttgttaaatccaa

SEQ ID NO: 403794 - DNA, 1000 bp, Homo Sapiens; identical to SEQ ID NO: 222433

SEQ ID NO: 403795 - DNA, 1000 bp, Homo Sapiens; identical to SEQ ID NO: 223896

SEQ ID NO: 403796 - DNA, 1000 bp, Homo Sapiens; identical to SEQ ID NO: 223897

SEQ ID NO: 403797 - DNA, 1000 bp, Homo Sapiens; identical to SEQ ID NO: 223898

SEQ ID NO: 403798 - DNA, 1000 bp, Homo Sapiens; identical to SEQ ID NO: 223899

SEQ ID NO: 403799 - DNA, 1000 bp, Homo Sapiens; identical to SEQ ID NO: 292177

SEQ ID NO: 403800 - DNA, 1000 bp, Homo Sapiens; identical to SEQ ID NO: 223901

SEQ ID NO: 403801 - DNA, 1000 bp, Homo Sapiens; identical to SEQ ID NO: 292180

SEQ ID NO: 403802 - DNA, 1000 bp, Homo Sapiens; identical to SEQ ID NO: 222448

SEQ ID NO: 403803 - DNA, 1000 bp, Homo Sapiens; identical to SEQ ID NO: 292182

SEQ ID NO: 403804 - DNA, 1000 bp, Homo Sapiens
ccctactgttcgttcaccaacggcgagacttccccaactgtgtccatggcagaattagaacaccttgcacagaatatatctaaatcgcatctggaaacctgccaatacttgagagaagagctccagcagataacgtggcagacctttttacaggaagaaattgagaactatcaaaacaagcagcgggaggtgatgtggcaattgtgtgccatcaaaattacagaagctatacagtatgtggtggagtttgccaaacgcattgatggatttatggaactgtgtcaaaatgatcaaattgtgcttctaaaagcaggttctctagaggtggtgtttatcagaatgtgccgtgcctttgactctcagaacaacaccgtgtactttgatgggaagtatgccagccccgacgtcttcaaatccttaggttgtgaagactttattagctttgtgtttgaatttggaaagagtttatgttctatgcacctgactgaagatgaaattgcattattttctgcatttgtactgatgtcagcagatcgctcatggctgcaagaaaaggtaaaaattgaaaaactgcaacagaaaattcagctagctcttcaacacgtcctacagaagaatcaccgagaagatggaatactaacaaagttaatatgcaaggtgtctacattaagagccttatgtggacgacatacagaaaagctaatggcatttaaagcaatatacccagacattgtgcgacttcattttcctccattatacaaggagttgttcacttcagaatttgagccagcaatgcaaattgatgggtaaatgttatcacctaagcacttctagaatgtctgaagtacaaacatgaaaaacaaacaaaaaaattaaccgagacactttatatggccctgcacagacctggagcgccacacactgcacatcttttggtgatcggggtcaggcaaaggaggggaaacaatgaaaacaaataaagttgaacttgtttttctca

SEQ ID NO: 403805 - DNA, 1000 bp, Homo Sapiens; identical to SEQ ID NO: 118489

SEQ ID NO: 403806 - DNA, 1000 bp, Homo Sapiens; identical to SEQ ID NO: 118490

SEQ ID NO: 403807 - DNA, 1000 bp, Homo Sapiens; identical to SEQ ID NO: 292185

SEQ ID NO: 403808 - DNA, 1000 bp, Homo Sapiens
tggctccttgccctcaagcaatataggccagacttggtcctaagcacctgcctcagcaattgtctacattcagttgttttgcataacgtctgccttctttcctttacggtccatgcctttaatgttgcccacattaagcactgtggatcacgacaggaaaaaggttggagcaaggcttttcactactttgtatcaatccaggctacaatcttcatttaatataaataatttatggatttatgacattacaatcctgcattgtttcaagactgacattttttcctaaggaaggaaataatcatctaagaccacgaaaaaaggctgttttttgtttttttttttttttttttttttgagacggggtctggctgtgttgccctgactggagttcagtggtgcaaacacagctctctccacaacctcttgggcccaagtgatactcccacctctgccttacaaaatacagggattactggtgtgagccactgtgtctggccagaaaaggcatttttgagaaagcaaatcgtataccttattaacaaaatagaatatatatatattgcttatctgaaatgcttgaaaccagaattgttttgcattttttgaatatttgtatacacataatgagaccttggggatgggacccaagtctgaacgtggaattcacctgtgtttcgtgtatatgcctcatacacataattttgtgcatgaaacagagtttttgtataagaagatacactgcagctgaagagggctgggtttttttttctcttagggtcgctgcataaactgttgtatgcctggtgctttgcgacttgtcacacgaggtcacgtgtggaattttccacttctggcatcacgtcagtgctcagaaattttctgatctcagagcatttcaattagggatgctcaaacgcaactgtttctacttccccatttcaggtgtgagatgtaacccaccttgaccataaattggcttttcatagtgctcagatgtttc

SEQ ID NO: 403809 - DNA, 1000 bp, Homo Sapiens; identical to SEQ ID NO: 403808

SEQ ID NO: 403810 - DNA, 1000 bp, Homo Sapiens
ctggggcaggtgccagacacggatatttacagagatgtggcagagtactcagaggccaaggaagtccggggggtgaaggtcttccgctcctcggccaccgtgtactttgccaatgctgagttctacagtgatgcgctgaagcagaggtgtggtgtggatgtcgacttcctcatctcccagaagaagaaactgctcaagaagcaggagcagctgaagctgaagcaactgcagaaagaggagaagcttcggaaacaggcagggccccttttgtctgcatgtctggctccccagcaggtgagctcaggagataagatggaagatgcaacagccaatggtcaagaagactccaaggccccagatgggtccacactgaaggccctgggcctgcctcagccagacttccacagcctcatcctggacctgggtgccctctcctttgtggacactgtgtgcctcaagagcctgaagaatattttccatgacttccgggagattgaggtggaggtgtacatggcggcctgccacagccctgtggtcagccagcttgaggctgggcacttcttcgatgcatccatcaccaagaagcatctctttgcctctgtccatgatgctgtcacctttgccctccaacacccgaggcctgtccccgacagccctgtttcggtcaccagactctgaacatgctacatcctgcccaagactgcacctctggaggtgcagggcacccttgagaagcccctcacccctaggccgcctccaggtgctacccaggagtcccctccatgtacacacacacaactcagggaaggaggtcctgggactccaagttcagcgctccaggtctgggacagggcctgcatgcagtcaggctggcagtggcgcggtacagggagggaactggtgcatattttagcctcaggaataaagatttgtctgctcaaaaaaaaaaaaaaaaaaaaaaaaaaaaaaaaaaaaaaaaaaaaaaaaaaaaaaaaaaaaa

SEQ ID NO: 403811 - DNA, 1000 bp, Homo Sapiens; identical to SEQ ID NO: 292188

SEQ ID NO: 403812 - DNA, 1000 bp, Homo Sapiens; identical to SEQ ID NO: 291316

SEQ ID NO: 403813 - DNA, 1000 bp, Homo Sapiens
cactagtgaaagcagtgctgctgaatttgatgataggcggggagttttgaggagtatcagctgcgaagaagccacttgcagtgacaccagtgagagcattttggaagaggaaccacaagaaaatcaaaagaaacttttgcccttatcagtaacacctgaggctttttctggaactgttatagaaaaagaatttgtatcaccttccttaacaccacccccagccattgctcatcccgcactacccactattccagaacgaaaggaagttctgttggaagcatctgaagaaactggaaagagggtttcaaagtttaaagctgccagattgcaacagaaagactaggccctgtctaggaaatgggaatttacatcctaaaacctagttgttcatttgtttagagtatctatagcaaaataggttacatgtagtttgaaataaggtatcctgagttactttggcaacaagttcttttacccttacccgtggtatttgaaaaaaatcaaggtaactgtctgaatactttaatatcagcttgttttgtgaattctctgaatactgtcaacactcttatctaagtttgcctttatgatgcagtggcagcattttgaattacttttcaaagaatactgttcatatgcattgtttttgtgtttcaaactaaatacaggcagttttgtgccagctgtgatattgtgcataccatatggaccattttaaagaaaattttaaaatttcaaatagattcaacaattacattacttgctttcacattttaaaggcactttaaaaaaatctacttctcttgtaggttttgcggctagttggctattcaagaaacctcgcccctctgaatgtcatactgtaatctttaaggaagaaagctacatgaattaattgtactctatgggaaaatttctttggaaagatattttgtaaaacttttttttccaagtaaaaactttatgaaacttggtctcaaaaaaaaaaaaaaaaaaaaaa

SEQ ID NO: 403814 - DNA, 1000 bp, Homo Sapiens; identical to SEQ ID NO: 292191

SEQ ID NO: 403815 - DNA, 1000 bp, Homo Sapiens; identical to SEQ ID NO: 223906

SEQ ID NO: 403816 - DNA, 982 bp, Homo Sapiens; identical to SEQ ID NO: 220433

SEQ ID NO: 403817 - DNA, 1000 bp, Homo Sapiens; identical to SEQ ID NO: 118491

SEQ ID NO: 403818 - DNA, 736 bp, Homo Sapiens
agggggatcctgcaagcagaaatctgtggtgggcgggcggcaggtgagcaaggagaacgtgtctgtaaaggaagcacagggaacaggtggtggctttgtaagacagttggaacccaaggaaggcaggccatcccccaggaaagcctatgttggtgagggttatgatgggagaatgagtgaactgcagcctggcaccaccacaccctggaaggtgcagttgggaagaaagtttctgaggctgtagacatggggatcggatgctggagaaaccccctgctgctgctgattgccctggtcctgtcagccaagctgggtcacttccaaaggtgggagggcttccagcagaagctcatgagcaagaagaacatgaattcaacactcaacttcttcattcaatcctacaacaatgccagcaacgacacctacttatatcgagtccagaggctaattcgaagtcagatgcagctgacgacgggagtggagtatatagtcactgtgaagattggctggaccaaatgcaagaggaatgacacgagcaattcttcctgccccctgcaaagcaagaagctgagaaagagtttaatttgcgagtctttgatatacaccatgccctggataaactatttccagctctggaacaattcctgtctggaggccgagcatgtgggcagaaacctcagatgagggctcatatgattgagttgtgcactggctgttattaaactgtaaaggatca

SEQ ID NO: 403819 - DNA, 1000 bp, Homo Sapiens
gcttcatctgacacgggcatccctggcttgcttttagctacaagcaagcagcgtggctggaagctgatgggaaacgacccggcacgggcatcctgtgtgcggcccgcatggagggtttggaaaagttcacggaggctccctgaggagcctctcagatcggctgctgcgggtgcagggcgtgactcaccgctgggtgcttgccaaagagatagggacgcatatgctttttaaagcaatctaaaaataataataagtatagcgactatatacctacttttaaaatcaactgttttgaatagaggcagagctattttatattatcaaatgagagctactctgttacatttcttaacatataaacatcgttttttacttcttctggtagaattttttaaagcataattggaatccttggataaattttgtagctggtacactctggcctgggtctctgaattcagcctgtcaccgatggctgactgatgaaatggacacgtctcatctgacccactcttccttccactgaaggtcttcacgggcctccaggtggaccaaagggatgcacaggcggctcgcatgccccagggccagctaagagttccaaagatctcagatttggttttagtcatgaatacataaacagtctcaaactcgcacaattttttcccccttttgaaagccactggggccaatttgtggttaagaggtggtgagataagaagtggaacgtgacatctttgccagttgtcagaagaatccaagcaggtattggcttagttgtaagggctttaggatcaggctgaatatgaggacaaagtgggccacgttagcatctgcagagatcaatctggaggcttctgtttctgcattctgccacgagagctaggtccttgatcttttctttagattgaaagtctgtctctgaacacaattatttgtaaaagttagtagttcttttttaaatcattaaaagaggcttgctgaaggaaaaaaaaaaaaa

SEQ ID NO: 403820 - DNA, 1000 bp, Homo Sapiens; identical to SEQ ID NO: 292195

SEQ ID NO: 403821 - DNA, 1000 bp, Homo Sapiens; identical to SEQ ID NO: 118492

SEQ ID NO: 403822 - DNA, 1000 bp, Homo Sapiens; identical to SEQ ID NO: 292196

SEQ ID NO: 403823 - DNA, 1000 bp, Homo Sapiens; identical to SEQ ID NO: 220475

SEQ ID NO: 403824 - DNA, 1000 bp, Homo Sapiens
cgccccttaaaataagtaaataaataaccttgagagaaagaacaagatcaatatatcctgcaggttgctacaaacccttgtgctttcactgtatagccagttcattcagaaaaggaggaaagggtagtttaatttcaaaaaagaatcccttcctctttcctctgctgctttccttccttctgtggcagggtattttaatatatttttcaaatttttttcctttctgtgttatccttcttatcccactccaaagaaagcacataactgtggcctgaagggatggggagtagcaacataaaaagaagtggctcaagtcttcttggagtttgttcatgaatgctgatcccagggtgaggagaagattgggacatagaaaggaaactgcatcagaaacatgaacagagaaagattgtctgccttctagaatcagatctgtttggggctgggggttggagaataaaagcaggagaagtctatgggattctagaaatagtacctgcatccagcttccctgccaaactcacaaggagacatcaacctctagacagggaacagcttcaggatacttccaggagacagagccaccagcagcaaaacaaatattcccatgcctggagcatggcatagaggaagctgagaaatgtggggtctgaggaagccatttgagtctggccactagacatctcatcagccacttgtgtgaagagatgccccatgaccccagatgcctctcccacccttacctccatctcacacacttgagcttgccactctgtataattctaacatcctggagaaaaatggcagtttgaccgaacctgttcacaagggtagaggctgatttctaacgaaacttgtagaatgaagcctggaaagagtgatgaattatattatattatataaaaataataataaaaatataaagaaagctaaaaaaaaaaaaaaaaaaaaaaaaaaaaaaaaaaaaaaaaaaaaaaaaaaaaaaaaaaaaaaaaaaaaa

SEQ ID NO: 403825 - DNA, 1000 bp, Homo Sapiens
caccgatttctgctctctatgtgggttctaccacctggcaccttcacagacgccttccccgggctgctgtttcattttcccagaagaagccaaaaagactgcctccttggcctttccaagtctgaccagcgggccatggcttgttactttgggatccttttaatagtctctgccacactgtgttttggaatgctgagaggttttctcatgactttaccccaaaaaagaaaatcttttcaaagtaaatcttttgtgagacttaaagatgtcactgcttatatgtgggaaaaggtcctcacctttctgagactggaaacaccaaagttggaagaggctgagatggttgagaatcacaattactacttggatgaatttgcaaatctgttagacgaacttctgatgaagattaatggtttgtccgacagcctacaactcccccttctggaaaaaacatccaacaacacaggggaggcaaggacagaagagagtcccttagtggacatttctagttaccaagctgctgagccagcagacatcaaggacttctgaggagcctggtaccttgcataggcactatggaccctgttttgcttaacccacccaacagccaattttagcagacatcctagttttgcaggtgagaagagctgaggtacgaagaagttttgttaatttttccagttcacgtaacaagtaaatgggaaaccaggatgaaaatcaaggtttatctgtcatcagactgttactcataatcaccattcggagagttcagatgtgggacaagattctaactccagccttctcccaaatggttaatttgccagttgccctagagttacatattgtcttatttgtttgttttactgaatctgtctgagtattaaaagccttgtatcttgtgaaatttctttcaggtctcataaaagcgatgaaagagaccaggataacattctaatatttaaataagatttttgaagtaaaatccttattttgtaaattt

SEQ ID NO: 403826 - DNA, 1000 bp, Homo Sapiens; identical to SEQ ID NO: 292199

SEQ ID NO: 403827 - DNA, 1000 bp, Homo Sapiens; identical to SEQ ID NO: 118493

SEQ ID NO: 403828 - DNA, 1000 bp, Homo Sapiens; identical to SEQ ID NO: 292201

SEQ ID NO: 403829 - DNA, 1000 bp, Homo Sapiens; identical to SEQ ID NO: 292202

SEQ ID NO: 403830 - DNA, 1000 bp, Homo Sapiens
gaatcgtgtctcccaccatgttaagtgtgtcctctgctgccaaggaccctcgtctacaccttagaccaccagccccagctgttctctgtcagcacacccacctccatcccctctcccaaccatgacttccaagcggggccacagggtggggtcatagggtcacttcacctgacccaggcctctccccaggtcaggaggcagctgtctggtcagaggggttctctttgtggcatctggctttctcctcagcaggtcccaccaccctctcagcagcacttccccatggccaaggctggccgtgtcctctgtgcctctttccttgtctgaggtggctgccagcccagggggtggtgtgtaaatcttcaggctggtggaggtaggttggccttttatccacaggatacagaaactgaaagctggggaatccccaaacagcagccatagactcactggctctcattaaacgggagaggaatcacagaaactggggaagggaaaacaaaccttcaaaggagaaatttcgctttaatgacaccattcatcattcgttttttaattaggaaaagctccctaatgaggctcttttgccagctaataggactctcgatttccatgagaaccattcttgcccagaggattaggggagctgttgctcaccacaccaggatcttcccccagcgtccaatttaatttgcaaatacgtaatgcagattccctgggtgccgtgaaagcctttcctggcatcattcatgttgctccccgtgctggctggaaagcacggttctcctctgccttaaaaacagtgcccaacagtgaactgcccctccgaggacttgagtaagtggaaaaaacaaaacacagactgcaatgtttgtttctaagtatttttgtattgtgtacattctgtatatttttgttgtaacatattatttgagcacagattccattaaatattttttttctttttccaagcaaaaaaaaaaaaaaaaaaaaaaaaaaa

SEQ ID NO: 403831 - DNA, 1000 bp, Homo Sapiens; identical to SEQ ID NO: 292203

SEQ ID NO: 403832 - DNA, 1000 bp, Homo Sapiens; identical to SEQ ID NO: 292204

SEQ ID NO: 403833 - DNA, 1000 bp, Homo Sapiens; identical to SEQ ID NO: 118494

SEQ ID NO: 403834 - DNA, 789 bp, Homo Sapiens; identical to SEQ ID NO: 31130

SEQ ID NO: 403835 - DNA, 1000 bp, Homo Sapiens; identical to SEQ ID NO: 223910

SEQ ID NO: 403836 - DNA, 1000 bp, Homo Sapiens; identical to SEQ ID NO: 294217

SEQ ID NO: 403837 - DNA, 1000 bp, Homo Sapiens; identical to SEQ ID NO: 118496

SEQ ID NO: 403838 - DNA, 1000 bp, Homo Sapiens
cccctcactgcaaaagcatctccttaagtagcaacctcagggactgggggctacagtctgcccctgtctcagctcaaaaccctaagcctgcagggaaaggtgggatggctctgggcctggctttgttgatgatggctttcctacagccctgctcttgtgccgaggctgtcgggctgtctctagggtgggagcagctaatcagatcgcccagcctttggccctcagaaaaagtgctgaaacgtgcccttgcaccggacgtcacagccctgcgagcatctgctggactcaggcgtgctctttgctggttcctgggaggcttggccacatccctcatggccccattttatccccgaaatcctgggtgtgtcaccagtgtagagggtggggaaggggtgtctcacctgagctgactttgttcttccttcacaaccttctgagccttctttgggattctggaaggaactcggcgtgagaaacatgtgacttcccctttcccttcccactcgctgcttcccacagggtgacaggctgggctggagaaacagaaatcctcaccctgcgtcttcccaagttagcaggtgtctctggtgttcagtgaggaggacatgtgagtcctggcagaagccatggcccatgtctgcacatccagggaggaggacagaaggcccagctcacatgtgagtcctggcagaagccatggcccatgtctgcacatccagggaggaggacagaaggcccagctcacatgtgagtcctggcagaagccatggcccatgtctgcacatccagggaggaggacagaaggcccagctcagtggcccccgccccccaccccccacgcccgaacagcaggggcagagcagccctccttcgaagtgtgtccaagtccgcatttgagccttgttctggggcccagcccaacacctggcttgggctcactgtcctgagttgcagtaaagctataaccttgaatcacaaaaaaaaaaaaaaaaaaaaaaaa

SEQ ID NO: 403839 - DNA, 1000 bp, Homo Sapiens; identical to SEQ ID NO: 292209

SEQ ID NO: 403840 - DNA, 1000 bp, Homo Sapiens; identical to SEQ ID NO: 223912

SEQ ID NO: 403841 - DNA, 1000 bp, Homo Sapiens; identical to SEQ ID NO: 292211

SEQ ID NO: 403842 - DNA, 1000 bp, Homo Sapiens
ggatgctgcgccattctcctaccatagcaccttcctgctggctgaccgcactgaggcgtgggtgctggagacagctgggaggctctgggctgcacagaggatccaggagggggcccgcaacatctccaaccagctgagcattggcacggacatctcggcccaacacccggagctgcggactcatgcccaggccaagggctggtgggatgggcagggtgcctttgactttgctcagatcttctccctgacccagcagcctgtgcgcatggaggctgccaaggcccgcttccaggcagggcgggagctgctgcggcaacggcaagggggcatcacggcagaggtgatgatgggcatcctcagagacaaggagagtggtatctgtatggactcgggaggctttcgcaccacggccagcatggtgtctgtcctgccccaggatcccacgcagccctgcgtgcactttcttaccgccacgccagacccatccaggtctgtgttcaaacctttcatcttcggggtgggggtggcccaggccccccaggtgctgtcccccacttttggagcacaagaccctgttcggaccctgccccgattccagactcaggtagatcgtcggcataccctctaccgtggacaccaggcagccctggggctgatggagagagatcaggatcgggggcagcagctccagcagaaacagcaggatctggagcaggaaggcctcgaggccacacaggggctgctggccggcgagtgggccccacccctctgggagctgggcggcctcttccaggccttcgtgaagagggagagccaggcttatgcgtaagcttcatagcttctgctggcctggggtggacccaggacccctggggcctgggtgccctgagtggtggtaaagtggagcaatcccttcacgctccttggccatgttctgagcggccagcttggcctttgccttaataaatgtgctttattttcaaaaaaaaaaaaaaaaaaa

SEQ ID NO: 403843 - DNA, 1000 bp, Homo Sapiens; identical to SEQ ID NO: 118498

SEQ ID NO: 403844 - DNA, 1000 bp, Homo Sapiens; identical to SEQ ID NO: 223913

SEQ ID NO: 403845 - DNA, 1000 bp, Homo Sapiens; identical to SEQ ID NO: 292214

SEQ ID NO: 403846 - DNA, 1000 bp, Homo Sapiens; identical to SEQ ID NO: 223914

SEQ ID NO: 403847 - DNA, 1000 bp, Homo Sapiens; identical to SEQ ID NO: 118499

SEQ ID NO: 403848 - DNA, 1000 bp, Homo Sapiens; identical to SEQ ID NO: 118500

SEQ ID NO: 403849 - DNA, 1000 bp, Homo Sapiens; identical to SEQ ID NO: 223916

SEQ ID NO: 403850 - DNA, 1000 bp, Homo Sapiens
atggtctgaggcagagtgtggttcagtcagggatgttggaagctggagtagacaggattatttctcaggtggtggatccaaaacttaaccacatcttcaggccacaaatagaacgagcaattcatgagttcctggcggcccagaaaaaagcagctgtgccagcaccccctccagagcccgaaggccaggaccctccagctccatctcaggacacttcctaagaatacgccagacaccttttgaaagctaatttttggtgaagaaatggattcggttacataagagtgcaacttcagactgaagataggccaaggtcgtcactgatctcaagatttcaaccttgaccatgggcagtgaccagattgaaaggggagcaagttcggcagtgggagagttgaccgtgtcaccccctgcattgtgctgccatttggccagcctgtccaagggcatgacaccaagtagacactacagagagagaaacactacagcaacccagggttgtcctgaaacagacttttatacttgaacatggagactgcacatggactttagggtttgtgctgtgggataaacggaagctacagtgagaacatagccagtcccaaagacaatttcaaagaaaaatgacagtaaagattagctgggagtagtctttgacagtgcttatttgatactgtctctcagagtttgcaaaccagattgtacaagtcattagcgtcagatagctttaaagttgtgaccttcttgtacatgaatcttctagccagtttcctttcctttgtaacgaaacatgaaatcctagaatgtatgagaagttcagacattaggcataaggaaactcgtttgcaggctctctgtccagggctgcttcctgtcctggaggggccagtgagtcttaggtatgtttattttattctcacatttgtgtttttttagaaaagtgaatggtcaataaatggcttatctttcataataaaaaaaaaaaaaaaaaaaaaaaaaa

SEQ ID NO: 403851 - DNA, 1000 bp, Homo Sapiens; identical to SEQ ID NO: 223918

SEQ ID NO: 403852 - DNA, 1000 bp, Homo Sapiens; identical to SEQ ID NO: 292219

SEQ ID NO: 403853 - DNA, 1000 bp, Homo Sapiens
ccagatctgttccaacttggagtgtgaagggcttgagcatacgggggaagagagtctgcagaagttgggggaaaacttttaaaagataccctcattgtgtcaaagagtgtgccaatctatttttgtatcagcattggaagtgcactttcccctggggcgtgtgggtgtgtgaatgtgcaagtgtctgagagatactgcatcagccctagacccccagagccagtcccgccctttacagagcagcccttagcctggggccatgggtcaggctgaccttcaacaattatttctagatgatttctggataagaattgctctctcggtaccagacagtttgacatcctccacccttagaaaatgactgacattgttttgttactgctcctacccaccaaggggataaagaaggcgagttctgagtgttggatgagtcagtcgcgtggaaggacgtggagcgtggcgctctgtaacttcctgccgtctgccaccccgccacgtgtatttaaccctcgcactttctccactgtggagatggctggggcggcgccccacagtgtgtattcctgtcctctatgttagagtgcatcagaagcacatttactgtgctatttatatcgctatataaaagtgttttataaaaacccagaataggagcccgacgcatgattggtgtttgaggcgtttgccagctgggacaaactgcgtttggagctgtggttaagctgactaaggaggcggtggctctttcttaacattcccacgtgcccagggctgttcatgcaagattttaatggtgacttgtcctggcttactgggacagtctgtatgaggcatgtcaccacactgtcgcctcatagctgcaagagagaggcaccagctgaagttcccctgactgaagagagcctgtggccatgtaaaaagagaattaaactcttgttgctttttgtaaaaaaaaaaaaaaaaaaaaaaaaaaaaaaaaaaaaaaaaaaaaaaaaaaaaa

SEQ ID NO: 403854 - DNA, 1000 bp, Homo Sapiens; identical to SEQ ID NO: 223921

SEQ ID NO: 403855 - DNA, 1000 bp, Homo Sapiens; identical to SEQ ID NO: 223922

SEQ ID NO: 403856 - DNA, 1000 bp, Homo Sapiens
tgcatgatcacaggagcagccctctggcccataatgacggccctgtcttcgcaggtggccactcgggcccgcagccgctgggtaagggtgatgcctagcctggcttattgcaccttccttttggcggttggcttgtcgcgaatcttcatcttagcacatttccctcaccaggtgctggctggcctaataactggcgctgtcctgggctggctgatgactccccgagtgcctatggagcgggagctaagcttctatgggttgactgcactggccctcatgctaggcaccagcctcatctattggaccctctttacactgggcctggatctttcttggtccatcagcctagccttcaagtggtgtgagcggcctgagtggatacacgtggatagccggccctttgcctccctgagccgtgactcaggggctgccctgggcctgggcattgccttgcactctccctgctatgcccaggtgcgtcgggcacagctgggaaatggccagaagatagcctgccttgtgctggccatggggctgctgggccccctggactggctgggccacccccctcagatcagcctcttctacattttcaatttcctcaagtacaccctctggccatgcctagtcctggccctcgtgccctgggcagtgcacatgttcagtgcccaggaagcaccgcccatccactcttcctgacttcttgtgtgcctccctttcctttccctcccacaaagccaacactctgtgaccaccacactccaggaggcagccccatccccttccagcccctaagtaggccctcccctccctaaatctgcttccgcaccacctggtcttagccccaaagatgggccttctctctcccagataagttggtcctccctctgcctttcctctcaagcccccaaagagcaaaggcaacagcaagaccagcgggttcttgcaacactgtgaggggcagccagggcggccccaataaagcccttgaatactttga

SEQ ID NO: 403857 - DNA, 1000 bp, Homo Sapiens; identical to SEQ ID NO: 223923

SEQ ID NO: 403858 - DNA, 1000 bp, Homo Sapiens; identical to SEQ ID NO: 223924

SEQ ID NO: 403859 - DNA, 1000 bp, Homo Sapiens; identical to SEQ ID NO: 292225

SEQ ID NO: 403860 - DNA, 1000 bp, Homo Sapiens; identical to SEQ ID NO: 118503

SEQ ID NO: 403861 - DNA, 1000 bp, Homo Sapiens; identical to SEQ ID NO: 223927

SEQ ID NO: 403862 - DNA, 1000 bp, Homo Sapiens
ctagagaacccgcaggagaacgtggtggccgatatccagatcgtggtggacaagagccccctgccgctgggcttctcccccgtctgcgaccccatggattccaaggcctctgtgtccaagaagaaacgcatgtgtgtgaagctgttgcccctgggagccacggacacggctgtgtttgatgtccggctgagtgggaagaccaagacagtgcctggataccttcgaataggggacatgggcggctttgccatctggtgcaagaaggccaaggccccgaggccagtgcccaagccccgaggtctcagccgggacatgcagggcctctctctggatgcagccagccagccaagtaagggcggcctcctggagcggacagcgtcaaggctgggctctcgggcatccactctgcggaggaatgactccatctacgaggcctccagcctctatggcatctcagccatggatggggttcccttcacactccacccacgatttgagggcaagagctgcagccccctggccttctctgcttttggggacctgaccatcaagtctctggcggacattgaggaggagtataactacggcttcgtggtggagaagaccgcggctgcccgcctgccccccagcgtctcatagtccctcacccttccgcggaaagagcccccttactccacctccccgccagcctggggccaccccccctcactgcatcctggggccacccccactcactgcatcctgggaaccttcgccctgcaaggcgtttgctatcttcagccactgggcggagctgcagccctggaggagggggcgggtcgaggctgcgtggtgatggggtctccgcccccacgccctgccgggcagggctggagctggacagaagccagtgcctttaagtcatttgtgtcaaaaccctctggggtccggaggctgtgcgggtgtcctcctggcaataaacactacccggttctcgcaaaaaaaaaaaaaaaaaaaaaaa

SEQ ID NO: 403863 - DNA, 1000 bp, Homo Sapiens; identical to SEQ ID NO: 223928

SEQ ID NO: 403864 - DNA, 963 bp, Homo Sapiens
tctccacgtgggtaccggcgctctcggcgcccgtagccacccgcccgccggaagccgacatctcgagttctggcagaagcaatttgcgcggcgaggagcggagcggcaggaacccaataagctgcttcgcctcggagctgaagcccgtactcaagatggcggctccgggcgggcgtggccagtgactagaaggcgaggcgccgcgggaccatggcggcggcggcggacgagcggagtccagaggacggagaagacgaggaagaggaggagcagttggttctggtggaattatcaggaattattgattcagacttcctctcaaaatgtgaaaataaatgcaaggttttgggcattgacactgagaggcccattctgcaagtggacagctgtgtctttgctggggagtatgaagacactctagggacctgtgttatatttgaagaaaatgttgaacatgctgatacagaaggcaataataaaacagtgctaaaatataaatgccatacaatgaagaagctcagcatgacaagaactctcctgacagagaagaaggaaggagaagaaaacataggtggggtggaatggctgcaaataaaggataatgatttctcctatcgacccaacatgatttgtaactttctacatgaaaatgaagacgaagaagtggtagcttcagccccagataaatctttggaattggaagaggaagagattcaaatgaacgacagttcaaacctgagttgtgaacaggagaaaccaatgcacttggaaatagaagattctggtcctcttattgatataccttctgagacagaaggttctgtttttatggaaactcaaatgctgccttagaaatcactctcctagatgaaatgtttctcataataacttgtcaagaactttttagagttgttacataaaaataattgctgctgtagcttgtcaaaaaaaaaaaaaaaaaaa

SEQ ID NO: 403865 - DNA, 1000 bp, Homo Sapiens; identical to SEQ ID NO: 118504

SEQ ID NO: 403866 - DNA, 1000 bp, Homo Sapiens
cggccctgctgaaagtggcgcaaatggtcaccctgctgattgccttcatctgtgtgcggagctccctgtggaccaactacagcgcctacagctactttgaagtggtcaccatttgcgacttgataatgatcctcgccttttacctggtccacctcttccgcttctaccgcgtgctcacctgtatcagctggcccctgtcggaacttctgcactatttaatcggtaccctgctcctcctcatcgcctccattgtggcagcttccaagagttacaaccagagcggactggtagccggagcgatctttggtttcatggccaccttcctctgcatggcaagcatatggctgtcctataagatctcgtgtgtaacccagtccacagatgcagccgtctgatgaggccacaacccctaggcccctcaggagctttgcagagaggaggacgtgtactccaggcgaggcctctggacctgtgttcctgtgccaaagtcctgtcaggctggtgggcaccaggaaaggcctgcaccctcttcctgctctcccaggaagccagctccctgagctcctgagccagccggaaactcttcctccagccttccggggagaacatccctcccattctgggaaaggaaagcagcctccagggaaatgttttctgccttcctgcttctagaaccacctcaggtactgatgaaccccacttagcacagctgaaggggtttgtgaatactcccgcctaaatcccttctacttcactcctcaggggagtgaagtgccttaagaaacaaagccctgtcctaatttatctagcttgtcagtccggtcttagagataccctctttcctgaagtgaggcgtgcctgtagaaacactatgtggtcagcctgtccccaaggagatcttgtgtctcctctccatctctgcctttgttaccagtgtgcatgtgtttgtgtgttttttaataaaatattgactcggccagttaaaaaaaaaaaaaaaaaa

SEQ ID NO: 403867 - DNA, 1000 bp, Homo Sapiens
ccagcaccacactcgggcccatcttctggctgctggtcaagagccccgagctggccgcccagcccagcacatacctggccgtggcggaggaactggcggatgtttccggaaagtacttcgatggactcaaacagaaggccccggcccccgaggctgaggatgaggaggtggcccggaggctttgggctgaaagtgcccgcctggtgggcttagaggctccctctgtgagggagcagcccctccccagataacctctggagcagatttgaaagccaggatggcgcctccagaccgaggacagctgtccgccatgcccgcagcttcctggcactacctgagccgggagacccaggactggcggccgccatgcccgcagtaggttctagggggcggtgctggccgcagtggactggcctgcaggtgagcactgccctgggctctggctggttccgtctgctctgctgccagcaggggagaggggccatctgatgcttcccctgggaatctaaactgggaatggccgaggaggaaggggctccgtgcacttgcaggccacgtcaggagagccagcggtgcctgtcggggagggttccaaggtgctccgtgaagagcatgggcaagttgtctgacacttggtggattcttgggtccctgtgggaccttgtgcatgcatggtcctctctgagccttggtttcttcagcagtgagatgctcagaataactgctgtctcccatgatggtgtggtacagcgagctgttgtctggctatggcatggctgtgccgggggtgtttgctgagggcttcctgtgccagagcccagccagagagcaggtgcaggtgtcatcctgagttcaggctctgcacggcatggagtgggaaccccaccagctgctgctacaggacctgggattgcctgggactcccaccttcctatcaattctcatggtagtccaaactgcagactctcaaacttgctcatttaaaaaaaaaaaaaaaaaa

SEQ ID NO: 403868 - DNA, 1000 bp, Homo Sapiens; identical to SEQ ID NO: 223929

SEQ ID NO: 403869 - DNA, 1000 bp, Homo Sapiens; identical to SEQ ID NO: 292232

SEQ ID NO: 403870 - DNA, 1000 bp, Homo Sapiens; identical to SEQ ID NO: 292233

SEQ ID NO: 403871 - DNA, 1000 bp, Homo Sapiens
gggaccggcctttattcactttggtgggcctagaggagccgttgcccctggcggggatccgctctgccctgtttgagaaccgggccccaccaccccatcagtctacgcagtcccagcccctcgcctccggcagctttctgcaccagttggaccaggtcacgagtcaagtactggccggattgatggaagcgcagaagagcgctgtccccggggacttgctcacgcttcctggtaccacagagcacttgcggtttacccggcccttgaccatggcagaactgagtcgccttcgtcgccagtttatttcgtacactaaaatgcatcccaacaatgagaacttgccgcaactggccaacatgtttcttcagtatttgagccagagcctgcactgaccagaggaggtaggggggaagccatggcttctgatctccactccactttatttctctgggaaaaataggctgcaggtctccagagcatatcgatgcagtactgtactagagctgttgtgactgattcactcaaactttcctgcatacccctgtgccaggccttgggtttacagcataagttcagactaaagagaatggagaactattgtggtgcaacctggcaaatccctcagaggacagagctaaggtggacagggattacctagattggatcctacttgggctatcacagagcattgaccattggcttccctcatctgaggcgtgggagagcagactggatagatgagaattgttttaaaacaattgtgaacagaaactgaagatggtacagttctacatctgcacctgcccttttttcataccacaaaagtattttttgagtactgtactgactttttgctagtttctattctgggaccgagttcacagataaatccattggtttgtatccttgagaaactttgtttttgtggaagtaagaaagttatctactagattatttcctctaataaaatcttttaaaatagtcaaaaaaaaaaaaaaaa

SEQ ID NO: 403872 - DNA, 928 bp, Homo Sapiens
cgagcccgtgcgggccctttaagggccgggggcgtgtagcgggcccgccccctccccgcggcgcccgcagtccgttaagtgcgagccccggcgcaggggccggatctggccgggggccggcggcggtgtgggagcggcgcgtcatgtacaccatcaccaaggggcccagcaagctggtcgcgcagcgccgcacaggtcccacgcagcagcaggtggagggccggctcggcgagctcctgaaatgccggcagcccgcgccgccgacctcgcagcccccgcgggcgcagccctttgcgcagccgccgggaccctggcccctgtcgagtccagggccaaggcttgtgttcaatcgtgtgaatggccggcgggccccctccacgtccccatccttcgaggggacccaggagacctacacagtggcccacgaggagaatgtccgctttgtgtccgaagcctggcagcaggtgcaacagcagctggatggtggcccagccggtgagggcgggccaaggcctgtgcagtacgtggagaggacccccaatccccggctgcagaactttgtgcccattgacctagacgagtggtgggcgcagcagttcctggcgagaatcaccagctgttcctagtggctgctgggagggggcgctgctacacggccgacctgtcgccaggagagaagcatggcgccctgcccacccactgcgcctggctgggtgccggccacacctgaagtgccagcatttggacttttgcacctttttttcccttggcccggctgtcccaaccaagctgccatggccaagggccgaacccgtctgacctcagccctgctcactgtgcccagggaccagcgaccagcccctggggctggcagggaggagctccaggctaataaagtggagaaactgtcaaaaaaaaaaaaaaaaaa

SEQ ID NO: 403873 - DNA, 1000 bp, Homo Sapiens; identical to SEQ ID NO: 223931

SEQ ID NO: 403874 - DNA, 1000 bp, Homo Sapiens; identical to SEQ ID NO: 118867

SEQ ID NO: 403875 - DNA, 1000 bp, Homo Sapiens; identical to SEQ ID NO: 292235

SEQ ID NO: 403876 - DNA, 1000 bp, Homo Sapiens; identical to SEQ ID NO: 292237

SEQ ID NO: 403877 - DNA, 1000 bp, Homo Sapiens; identical to SEQ ID NO: 223932

SEQ ID NO: 403878 - DNA, 1000 bp, Homo Sapiens
gcggggttgctgctgttgttgaacctgggtgccgccatgcaggatgtggccctggacgcgctggctgtgcagctgctggagccggccgaactggggccgggcaataccgtgcaggtggtcgcgtacaagctgggggccgcgctagctgggggcgcgctgctggcgctgctgcccaccttctcgtggccgcaactctttctgctcctggctgccacctactggctggccgcggccctggcctgggctgcaccagccctgcggcggctcccacagcagcccccttccgagcagcgtccccacaccgcgcaccttctgcgggacgtgctagccgtgccggggaccgtgtggacggcaggctttgtgctcacctacaagctgggtgagcagggtgccagcagcctgtttcctcttctcctgctggaccacggcgtttctgctcccgagttgggactgtggaatggtgtgggtgctgtggtctgctccatcgctggctcctccctgggtgggaccttgctggccaagcactggaaactgctgcctctgttgaggtcggtgctgcgcttccgcctcgggggcctagcctgtcagactgccttggtcttccacctggacaccctgggggccagcatggacgctggcacaatcttgagagggtcagccttgctgagcctatgtctgcagcacttcttgggaggcctggtcaccacagtcaccttcactgggatgatgcgctgcagccagctggcccccagggccctgcaggccacacactacagccttctggccacgctggagctgctggggaagctgctgctgggcactctggccggaggcctggctgatgggttggggccacatccctgcttcttgctcctgctcatcctctctgcctttcccgttctgtacctggacctagcacccagcacctttctttgagctgagtggctggagtggtcaataaagccacatgtgcctgtgaaaaaaaaaaaaaaaaaaaaaa

SEQ ID NO: 403879 - DNA, 1000 bp, Homo Sapiens; identical to SEQ ID NO: 292239

SEQ ID NO: 403880 - DNA, 1000 bp, Homo Sapiens
gcatgtgttcaacccccgggagaacacctggcggcccctgacccaggtgcccgaggaggccccgcttcggggctgcggtctctgcaccatgcacaactacctgtttctggcggggggcatccgtggctccggtgccaaggccgtctgctccaacgaggtcttctgctacaaccctctgaccaacatctggagccaggttcggcccatgcagcaggcccgagcccagctcaagctggtggccctggacgggctgctctatgccatcggtggcgaatgcctgtacagcatggagtgctacgacccgcgaacagacgcctggaccccacgcgcgccactccccgcaggcaccttccctgtggcccacgaggctgtggcctgccgtggggacatctacgtcaccgggggtcacctcttctaccgcctgctcaggtacagccccgtgaaggatgcttgggacgagtgcccatacagtgccagccaccggcgttccagcgacatcgtggcactggggggcttcctgtaccgcttcgacctgctgcggggcgtgggcgccgccgtgatgcgctacaacacagtgaccggctcctggagcagggctgcctccctgcccctgcccgcccccgccccactgcactgcaccaccctgggcaacaccatttactgcctcaacccccaggtcactgccaccttcacggtctctggggggactgcccagttccaggccaaggagctgcagcccttccccttggggagcaccggggtcctcagtccattcatcctgactctgccccctgaggaccggctgcagacctcactctgagtggcaggcagagaaccaaagctgcttcgctgctctccagggagaccctcctgggatgggcctgagaggccggggctcagggaaggggctgggatcggaacttcctgctcttgtttctggacaactttccccttctgctttaaaggttgtcgattattttgaaaaaaaaaaaaaaaaaaa

SEQ ID NO: 403881 - DNA, 1000 bp, Homo Sapiens; identical to SEQ ID NO: 292240

SEQ ID NO: 403882 - DNA, 1000 bp, Homo Sapiens; identical to SEQ ID NO: 223933

SEQ ID NO: 403883 - DNA, 827 bp, Homo Sapiens
gtaaccgtttcccgcgcgcccggccccgactccggggtaaagagccccggagcggagcagcgctggccgcgtgccgcctccggagccggcagcccccatggctgggggttatggagtgatgggtgacgatggttctattgattatactgttcacgaagcctggaatgaagccaccaatgtttacttgatagttatccttgttagcttcggtctcttcatgtatgccaaaaggaacaaaaggagaattatgaggatattcagtgtgccacctacagaggaaactttgtcagagcccaacttttatgacacgataagcaagattcgtttaagacaacaactggaaatgtattccatttcaagaaagtacgactatcagcagccacaaaaccaagctgacagtgtgcaactctcattggaatgaaacctcagaaaaagagcaacagaagtaattgtttcaagctcctgattctttctactaaatcatgaacagctttaaaaacatttctgtctgcataaaattattttacttgtaacttttccccaattgttctgtgcattgttttgcctttttaaattacatctccaagtggctcaaaaggccttgacacagggaacctgcacatatccaggatatgtgtaaccagcgatggtgacttgaccttgccaagacctgtgattccttcaggatacaatcagtgagaaataaaaacacatcttgggaagtgggaatcctggagtttatgccatttgcaatattaaaaaataaaaatgcaagttattatttcaataataaaaaaaaaaaaaaaaaaaaaaaaaaaaaaaaaaaa

SEQ ID NO: 403884 - DNA, 1000 bp, Homo Sapiens; identical to SEQ ID NO: 292241

SEQ ID NO: 403885 - DNA, 1000 bp, Homo Sapiens; identical to SEQ ID NO: 118506

SEQ ID NO: 403886 - DNA, 1000 bp, Homo Sapiens; identical to SEQ ID NO: 292243

SEQ ID NO: 403887 - DNA, 1000 bp, Homo Sapiens; identical to SEQ ID NO: 292244

SEQ ID NO: 403888 - DNA, 1000 bp, Homo Sapiens
aggtggtctctggctgtccacaagtgtagccccaaggccccaaactgtagccctagatctgctatcgggggctccagtcagaggggcaacgcccattagaaggggaaggactgcctacgttcatttcattttatggagggtcccagaaaagggaaggaggagccccaggtcatacagggcagagtcagaactaaacccgggtctcctgctgcacagagctgaactttgtatcttgcaatgcgctggctgcctccctgtgcgtgtctggaacagtcccattaggagaggtgacgtcatttgcttaaagttttccaagctaccctatcctaaaatagtttgtgtggatatcagggctaaaagttctccccatctattttaggggctgtctgcttttctagtctgtccacacagggattacctgtcatcttgcatgcaatcaggagaatctcataggggcaggaccttcccctactctgcctcttcctccatactaggttggaaaaatctggtttagcccactttttgcaacactcctgccaagtggtcttctacccattgcttgaaaatctctcttgacagggagctcactacctcacaaggcaggtcatttcattgtgggatctatagaaggttaagtaccacattctcctctaaaccttgcctacgacatgtttaatacttcatctacatagcagcccttcagataatcacaaccactttgcccccaagttttcaggttaagtagcatgaatttggtcattccttaaagacagggtttcaatttccacacatgatctctgcaaacaggcactgggttttcagtgtcctttttgaagggtcatataaaaataaggtaacaccacagtgccactacaccttctggggctggacttgtttcagcagctttggttgcactgaatttgggggagctgcatggtaccaggggtttattgggttgcagatatataaatgccctaaacttaaaaaaaaaaaaaaaaaa

SEQ ID NO: 403889 - DNA, 1000 bp, Homo Sapiens; identical to SEQ ID NO: 292246

SEQ ID NO: 403890 - DNA, 1000 bp, Homo Sapiens; identical to SEQ ID NO: 292247

SEQ ID NO: 403891 - DNA, 948 bp, Homo Sapiens
ccggggaccacacgccgcgctgtccccagcacccaacccaggttaccatggcctccctgttctctggccgcatcctgatccgcaacaatagcgaccaggacgagctggatacggaggctgaggtcagtcgcaggctggagaaccggctggtgctgctgttctttggtgctggggcttgtccacagtgccaggccttcgtgcccatcctcaaggacttcttcgtgcggctcacagatgagttctatgtactgcgggcggctcagctggccctggtgtacgtgtcccaggactccacggaggagcagcaggacctgttcctcaaggacatgccaaagaaatggcttttcctgccctttgaggatgatctgaggagggacctcgggcgccagttctcagtggagcgcctgccggcggtcgtggtgctcaagccggacggggacgtgctcactcgcgacggcgccgacgagatccagcgcctgggcaccgcctgcttcgccaactggcaggaggcggccgaggtgctggaccgcaacttccagctgccagaggacctggaggaccaggagccacggagcctcaccgagtgcctgcgccgccacaagtaccgcgtggaaaaggcggcgcgaggcgggcgcgaccccgggggagggggtggggaggagggcggggccggggggctgttctgacccgctagggtggaggagaggagtggggtttgttgatgaacctccacccccaccccacccccgcacgcctgtaatcccagcacttggggaggccaaggcgggaggatcgcttgagcccagaggttcgagatcaacctgggcaagagagtgagaccctgactctacgaaaattaaaagttagcccggtgtggtggcgcgcacctgtggcttagctaccctgaaaaaaaaaaaaaaaaaaaaaaaaaaaaaaaaaaaaaaaaaa

SEQ ID NO: 403892 - DNA, 1000 bp, Homo Sapiens; identical to SEQ ID NO: 223935

SEQ ID NO: 403893 - DNA, 1000 bp, Homo Sapiens; identical to SEQ ID NO: 118508

SEQ ID NO: 403894 - DNA, 1000 bp, Homo Sapiens; identical to SEQ ID NO: 292251

SEQ ID NO: 403895 - DNA, 975 bp, Homo Sapiens; identical to SEQ ID NO: 292252

SEQ ID NO: 403896 - DNA, 1000 bp, Homo Sapiens; identical to SEQ ID NO: 223937

SEQ ID NO: 403897 - DNA, 1000 bp, Homo Sapiens; identical to SEQ ID NO: 118509

SEQ ID NO: 403898 - DNA, 1000 bp, Homo Sapiens; identical to SEQ ID NO: 223939

SEQ ID NO: 403899 - DNA, 1000 bp, Homo Sapiens; identical to SEQ ID NO: 292255

SEQ ID NO: 403900 - DNA, 1000 bp, Homo Sapiens; identical to SEQ ID NO: 292256

SEQ ID NO: 403901 - DNA, 1000 bp, Homo Sapiens; identical to SEQ ID NO: 223940

SEQ ID NO: 403902 - DNA, 1000 bp, Homo Sapiens; identical to SEQ ID NO: 220434

SEQ ID NO: 403903 - DNA, 1000 bp, Homo Sapiens; identical to SEQ ID NO: 118510

SEQ ID NO: 403904 - DNA, 1000 bp, Homo Sapiens
agccccacgccaccattgcggagatcaagaacctcttcactaagacccatccgcagtggtaccccgcccgccagtccctccgcctggaccccaagggcaagtccctgaaggatgaggatgttctgcagaagctgcccgtgggcaccacggccacactgtacttccgggacctgggggcccagatcagctgggtgacggtcttcctaacagagtacgcggggccccttttcatctacctgctcttctacttccgagtgcccttcatctatggccacaaatatgactttacgtccagtcggcatacagtggtgcacctcgcctgcatctgtcactcattccactacatcaagcgcctgctggagacgctcttcgtgcaccgcttctcccatggcactatgcctttgcgcaacatcttcaagaactgcacctactactggggcttcgccgcgtggatggcctattacatcaatcaccctctctacactccccctacctacggagctcagcaggtgaaactggcgctcgccatctttgtgatctgccagctcggcaacttctccatccacatggccctgcgggacctgcggcccgctgggtccaagacgcggaagatcccataccccaccaagaaccccttcacgtggctcttcctgctggtgtcctgccccaactacacctacgaggtggggtcctggatcggtttcgccatcatgacgcagtgtctcccagtggccctgttctccctggtgggcttcacccagatgaccatctgggccaagggcaagcaccgcagctacctgaaggagttccgggactacccgcccctgcgcatgcccatcatccccttcctgctctgagcgctcacccctgctgaggctcagcccctcaacccggtggcattctgggggaggagtggggcccacagctctccagcacccggaataaagcccgcctgccccagtcggaaaaaaaaaaaaaaaaaaaaaaaaaaaaaaaaaaa

SEQ ID NO: 403905 - DNA, 1000 bp, Homo Sapiens
ggaagaaacaaagtaggaaaaagtgaacaggggatgtcaaatcgattcttgaattcccgctgcaagctagagccgcaggcaccctctcactcaatttccactcagaaccctataaacaccagtgggaagggcaacccactgcacgtgggaatgcactgatttttcctaggagtagacatgttcctctaattactccctgagggttagttggggctaaaccatgacagaagtggggaagttcaatgtccttaaatccatcttacttgccaacaggtaagaggaagcttacattacatgtccagtccacatttaaagagcacttactgtggaacaagccttcagccaaacaatggggatagaaaagtaggtaagactcagcctttgtccagagaagctcagggtatagctgaataggcagtttcttttgtcctgaggaaaatcaggacatgcctgctttctaaaaatcttcctctgaagacctgacccaagctcttaaatgctattgtaagagaaatttctttgtctattaactccattttagtagggattcactgactagattttactgaactatgaaaataaatacacataatttttcacaaaattttgggcccaattcccctaaaagaattgaggattagggagaaaggagacaactcaaagtcatcccattaagtgcagtttctttgaatcttctgctttatctttaaaaatttgtataatttatatattttattctatgtgttccatagatatcttaatgtaaaattagtcatttaaattacactgtcaattaaaagtaatgggcaagagattgcatcatactaatttagtaagaacgttcccaaatgttgtaacaatgtggatcatacatctctggttttttaaatgtattgaggctttcttggtggactagtatagtatacggtcagttatgtcaatgtttcatggtcaataaaaaggaagttgcaaattgtgaaaaaaaaaaaaaaaaaaaaaa

SEQ ID NO: 403906 - DNA, 1000 bp, Homo Sapiens; identical to SEQ ID NO: 286605

SEQ ID NO: 403907 - DNA, 1000 bp, Homo Sapiens; identical to SEQ ID NO: 292260

SEQ ID NO: 403908 - DNA, 1000 bp, Homo Sapiens; identical to SEQ ID NO: 292261

SEQ ID NO: 403909 - DNA, 1000 bp, Homo Sapiens; identical to SEQ ID NO: 223941

SEQ ID NO: 403910 - DNA, 1000 bp, Homo Sapiens; identical to SEQ ID NO: 223943

SEQ ID NO: 403911 - DNA, 1000 bp, Homo Sapiens; identical to SEQ ID NO: 292265

SEQ ID NO: 403912 - DNA, 1000 bp, Homo Sapiens; identical to SEQ ID NO: 292266

SEQ ID NO: 403913 - DNA, 1000 bp, Homo Sapiens; identical to SEQ ID NO: 292267

SEQ ID NO: 403914 - DNA, 1000 bp, Homo Sapiens; identical to SEQ ID NO: 292268

SEQ ID NO: 403915 - DNA, 697 bp, Homo Sapiens
ggggacactgcagccatataaatcagatttttgacatgttataaaatgcaagtcacagctgctgttgtctgcggtattcaaaaacttttgaaacactgcatgtccaacaaaatttattttttgtgtgaatgtactgtttttcaaccctactctcttgaccaagaatgaaactatttacaaattaagatgccaacagatcacgaagagccctgtggtcccagtcacaagtcgttttgcctgaatggggggctttgttatgtgatacctactattcccagcccattttgtaggtgcgttgaaaactatacaggagctcgttgtgaagaggtttttctcccaggctccagcatccaaactaaaagtaacctgtttgaagcttttgtggcattggcggtcctagtaacacttatcattggagccttctacttcctttgcaggaaaggccactttcagagagccagttcagtccagtatgatatcaacctggtagagacgagcagtaccagtgcccaccacagtcatgaacaacactgaagaaacgtcaaagtgaaccaaatcattgtttttattttacaaaggcagaaaatgaaacaccactaggtaaaagaattaaaaatctaatcctttatttcttaaataaaacgcttgtgtaactcgtatcatgaaccaaaaaaaaaaaaaaaaaaaaaaaaaaaaa

SEQ ID NO: 403916 - DNA, 1000 bp, Homo Sapiens
tttccgacttggggttcaggcaggctgttttcacctctagacacccctctccacccctcctgcttccccaggcattatgaacctctgcttaggaatatgggtaggagtgaaaggcctggcagataaagagcagagggcacttgcagggcctgggatgagcagtcttcaagctgtggtagttagcgggcaggagagcgacatcttcctgagctcctgtccatgcctgccatacctgccagcttcagacatttagggaaaaggggcagcatgtggggaatgccccccgccttccacaaatccttttgctgacccaggaagttctgggagttgccgtttttcatcaaaacgtttgggggcttccaagttgtttgtgagatctgaaaacttaactttgcccaatatcctggttggggaccgtgagaaatatctgtcccatttagatctctggggccactgatgggatgccctgggaagatccttggctgccgctttctctccccacagcctcaaggccaccctaccgtcatatatatcactcaggcgtagaagaaaagacacatattttataaaatctttttaataaaaggaagttccaagaagaatttttaagaactacctctaggtgtgcctccacgctggccctagctttcccattgctgttccattgctgagacaaactggaaggctccctttctgtttgaagttttatgacttgtagtcaggctttgctgttcgtcacagtgtcattttccattcaggtaccatcacctggtcccatcaacaggtctagtatgtagctcactgataacagaggaagatgtgtctcctcccaccctcttcctaatggtcattatgcctttctccatctattgtctctttcaccccttcccctctcccttgggctctgatgaaaaattgttgactgcagtttcggaagtttgatctgagaaccaaccatagaatgtttcagttctaggaaataaaaccagttgattaaagc

SEQ ID NO: 403917 - DNA, 1000 bp, Homo Sapiens
acaggcgagaaccactgtctctgatcaacgtgcggaagaggaacgtggaatctggggaagaagagctggcgtccaagctggaccactacaaagccaaggccacgcggcacatcttcctcatcaggcattcccagtaccacgtggatggctccctggagaaggaccgcactctgaccccgctgggtcgggagcaggctgaactcactgggctccgcctggcaagcttggggttgaagtttaataaaatcgtccattcgtctatgacgcgcgccatagagaccaccgatatcatcagccggcacctgccaggcgtctgcaaagtcagcacagatctgctgcgggaaggcgcccccatcgagccagacccgcccgtgtctcattggaagccggaagctgtgcagtattacgaagacggagcccggatcgaggccgccttccggaactacatccaccgcgcagatgccaggcaggaggaggacagttacgaaatcttcatctgtcacgccaacgtcatccgctacatcgtgtgcagcatcccgccgctgttgtccgctggggattttgtggttctggggtcctgacctctttcacttgctgatctgtgggcgctcccacccgtgtgccagcgtgacggctcggggtgtccgctcccctctgggtcgaggccacagctgagtcacgttgctgctcgggctgctccctcggggggcccttgtccctcaacctgctctggtgccccactctcagcaccacagaatgatccgggttcaggttgcgttttccctgccaccaccctgcaatcagccacttctttaaggagctccagggctgcagccacgttagagggccccttggggggcagggccagctctacggttacatgcctgaaacagtcagaagggttggccaaatctcactaaatgcaaatttgaaacaacaaaaaaaaaaaaaaaaaaaaaaaaaaaaaaaaaaaaaaaaaaaaaaaaaaaaaaaaaaaaaa

SEQ ID NO: 403918 - DNA, 1000 bp, Homo Sapiens; identical to SEQ ID NO: 118511

SEQ ID NO: 403919 - DNA, 1000 bp, Homo Sapiens; identical to SEQ ID NO: 114988

SEQ ID NO: 403920 - DNA, 1000 bp, Homo Sapiens
tcattcagagcctttttgccttcctggagcaccggcgcatgcgacgtgccggccaggccctgaagctgccctccccgcggcggggctcggtggcactgtgcattgccgcataccaggaggaccctgactacttgcgcaagtgcctgcgctcggcccagcgcatctccttccctgacctcaaggtggtcatggtggtggatggcaaccgccaggaggacgcctacatgctggacatcttccacgaggtgctgggcggcaccgagcaggccggcttctttgtgtggcgcagcaacttccatgaggcaggcgagggtgagacggaggccagcctgcaggagggcatggaccgtgtgcgggatgtggtgcgggccagcaccttctcgtgcatcatgcagaagtggggaggcaagcgcgaggtcatgtacacggccttcaaggccctcggcgattcggtggactacatccaggtgtgcgactctgacactgtgctggatccagcctgcaccatcgagatgcttcgagtcctggaggaggatccccaagtagggggagtcgggggagatgtccagcccccagggaaaggtatggcagtagaggatgaccaggtccaagctgcccaggtcagagctacggaagcatggtccgttcaccaacgccacgtttctagagagcagtgagctgattctccaatggtgagcaggggactacatgtgaactgggacctgcaggccaatgtatccctgaggaaaagtccacaagaacaattcaagaaactagtaagaaacaatgggcagaaagctgtgggacgaaagcacagcaggcttctgggaggctggagatcctttctctcaagggcaggattattcccacctgccacagttcacatgccacaaataacatctcaccttcagtcaagaaaaacgcaaaggaaaaaaaaaaaaaaaaaaaaaaaaaaaaaaaaaaaaaaaaaaaaaaaaaaaaaaaaaaaaaaaaaaaaaaa

SEQ ID NO: 403921 - DNA, 1000 bp, Homo Sapiens
tggtggtgatggtgctggtggaggtgacagctttaggcaccctgaggatggtcatcagtaatatcttcaacacagactaccacatgaacctgaggcacttctacgtgttcgcagcctattttgggctgactgtggcctggtgcctgccaaagcctctacccaagggaacggaggataatgatcagagagcaacgatacccagtttgtctgccatgctgggcgccctcttcttgtggatgttctggccaagtgtcaactctgctctgctgagaagtccaatccaaaggaagaatgccatgttcaacacctactatgctctagcagtcagtgtggtgacagccatctcagggtcatccttggctcacccccaaaggaagatcagcatgacttatgtgcacagtgcggtgttggcaggaggcgtggctgtgggtacctcgtgtcacctgatcccttctccgtggcttgccatggtgctgggtcttgtggctgggctgatctccatcgggggagccaagtgcctgccggattggcttccaggtcctcctcagcattggggaactcagcttggccatcgtgatagctctcacgtctggtctcctgacaggtttgctcctaaatctcaaaatatggaaagcacctcatgtggctaaatattttgatgaccaagttttctggaagtttcctcatttggctgttggattttaagcaaaagcatccaagaaaaacaaggcctgttcaaaaacaagacaacttcctctcactgttgcctgcatttgtacgtgagaaacgctcatgacagcaaagtctccttatgtataatgaaacaaggtcagagacagatttgatattaaaaaattaaagactaaaaacttagtttaagagtcaatttaataagtttaaaataaatgtttagtttcattaggatgatgctatcaatattttcttggttacagacacattattaaagttttgggttaattttaaaaaaaaaaaaaaaaaa

SEQ ID NO: 403922 - DNA, 1000 bp, Homo Sapiens; identical to SEQ ID NO: 223945

SEQ ID NO: 403923 - DNA, 1000 bp, Homo Sapiens
cttgctatcagcgacactcacagaaggtgtaacgcggctagctgatatcagtttgcatgatccagtcagtatttctgtcctggacaagagccatgaccagttgaacccaaaggacaaagcggtccaggaggtctgtcctccaccagctggcgacaagctggacagctttgcaataccagagagtctcaagcagcatgtgactgtggttcccagcaaactgaggcttgtctgcctagcggccttcatccttcagaaatgcaagtttgaggaagaccagaagatggttgtctttttctcaagttgcgagctggtggagttccactacagcctcttcctacagaccctgctgagcagctcaggggcgccggcatcagggcagttgccatctgcctccatgcgattaaaattcctacggctgcatggcggcatggagcaggaggaaagaacagcagtgtttcaggaattttcacattccagaagaggcgtccttctttgcacgtgaagaactcaccctaagccagaggaaaggaaccttgcttttaataccatcattatgttgacgagttgataagaagtaccaccgaatggccggaaaatggagtttctaagccacctgattttaaggctgacattaggttttctgttggtctccggtggctgtccttgattgtccctggatggagtgcagtcacctttttcccagaaaggaaagatacctgcagcccgccctgggcgccaactgtcccttggcatcctccttggctgtccggcgcgtgcatttctttttcagaagatgcacctaaatcacctgtgctgctttcctccaccttctccgtatttttttccgcttgaagcatactgttctgtctgtgcagttcttaatttcctctcctcctggggaatttccaccgtgccaggaggctaggagacaaaggagatacggctgtgaagagtcacaatgtcagttctgtgtcccaaataaatgtagactttcgtgctt

SEQ ID NO: 403924 - DNA, 825 bp, Homo Sapiens
ggccacagcagcgcgaggcgggcacggggtattgtccggctccggcggcggcggtcggtgctgcgagagcggcggcggcggcgcgggtcggcagcgggagggcgcgcggccgagcggaggcggagtcggcgccgagaacatggctggaggcaaagctggaaaggacagtgggaaggccaaggctaaggcagtatctcgctcacagagagctgggctacagtttcctgtgggccgcatccacagacacttgaagactcgcaccacaagccatggaagggtgggtgccactgctgccgtgtacagtgctgcgattctggagtacctcactgcagaggtgctggagctggcaggtaatgcttctaaggatctcaaagtaaagcgtatcactccgcgtcacttgcagcttgcaatccgtggtgatgaagagttggattctcttatcaaggctaccatagctgggggtgagaagagaaggtgttcttagatcagaagatgccattgtattaggtgacggcaaggttttgctgatttagtggaacaagattctactgggatgtgtgctgagctgaaccaaggaactgcccgaatgtgctgaacaaggacatttgcttctcagatacgtgaattcaattttaagcaagattcttgatctgcttcagagcagctttgatttaaagtaatttcagagcgcttttccttgcatgagtaattttctgaatgtataaaatattctatttatgtttgaccttttggataaactgtgttgctgcagtgttggtccacactaccatcctaagtgaagacttagtaagtctgaggatctcc

SEQ ID NO: 403925 - DNA, 1000 bp, Homo Sapiens
gctggctcccgcctccggcgccgcggcggtctgcgctcccgagagctcctccgatgcgcccgccgtcccaagcgcgcctgctgccccgggcgcaccagcagcctctggtgggttctctggaggggccctaggggcaggccccgcccccgccgcggatcaggcgccccggaggaggtctgtcacacctgctgccaagcgccaccaatgccccttcccgggctgcaccaaagcctattacaagtcgtcgcacctcaagtcccaccagcgcacccacacgggtgagcgccctttctcctgcgactggctcgactgcgacaagaagtttacgcgttccgacgagctggcccgccactacaggacgcacacgggcgagaagcgcttctcctgccccctctgccccaagcagttctcccggagcgaccacctgaccaagcatgctcgccgccacccaacctatcatccagatatgatcgagtaccggggacgtcgtcgaactccccgcatcgacccgccactcaccagcgaggtggaaagctccgcctccggctccggtcccggcccggcgcccagcttcaccacctgcctgtaggacagtcattgctgtcagtcttaccctcaaggatgatcccccaggccgttgtccctgctttctctctgcccatccttctttcccagagtcattacaccaaggcacagactggttcctctgctctgagggtgggtccaggcagacatgtggactctggggaggtactgggggccggaaaatagcgggaattcttgcaacgtgtatatcatcctaaaagtgggggttgcctcaagacagcccccaggaactgataagaagggatgaactcccgtactctccagagtactgaagattctcccctccctggaaccagggatgtgaaactggaattctcagatgcctgaggagctcccagtctcaaaggactctggtgtctcacccatccaccaggcggaccttggagagggtgtc

SEQ ID NO: 403926 - DNA, 1000 bp, Homo Sapiens; identical to SEQ ID NO: 292274

SEQ ID NO: 403927 - DNA, 1000 bp, Homo Sapiens; identical to SEQ ID NO: 223946

SEQ ID NO: 403928 - DNA, 1000 bp, Homo Sapiens; identical to SEQ ID NO: 292276

SEQ ID NO: 403929 - DNA, 1000 bp, Homo Sapiens; identical to SEQ ID NO: 292278

SEQ ID NO: 403930 - DNA, 1000 bp, Homo Sapiens; identical to SEQ ID NO: 292279

SEQ ID NO: 403931 - DNA, 1000 bp, Homo Sapiens; identical to SEQ ID NO: 118513

SEQ ID NO: 403932 - DNA, 1000 bp, Homo Sapiens
agaggaatgatttctttgacgctggcatcaccaagacccagctgttcctcagcgttcacgacgccgtgctgtttgccttgtcaaggaaggtcataggctcctctgagttaagcatcgatgaatccgagacagtgatacgggaaacctactcagaaacagacaagaatgacaattcaagatataaaatgagcagcagttttctaggaagccaaaaaaatgtaagtccaggcttcatcaagatccaacagcctgtagaagaggagtcggagttggatttggagctggaatcagaacaagaggctgggctgggtctggacctagacctggatcgggagctggagcctgaaatggagcccaaggctgagaccgagaccaagacccagaccgagatggagccccagcctgagactgagcctgagatggagcccaaccccaaatctaggccaagagctcacacttttcctcagcagcgttactggcctatgtatcatccgtctatggcttccacccagtctcagactcagactcggacatggtcagtggagaggagacgccatcctatggattcatactcaccagagggcaacagcaatgaagatgtctaggagatgaactagaaataaggggtcagataatgctggcaaatcctcctacccaaaaaggggtcaattgtccagagacctagactggatacgaactagcagtacttccttcctgactgtgactcctactacctgccagccttcttccttgctctgcgctgggatcatactcccaaatcacattactaaatgccaacaattatctctgaattccctatccaggctcccctcatttcaccttcagcatatattctagtcatgaatttccttcttcacacaccccacatctctgggctttgtgccagaccatctctaacttaatcctctcatccctgttcccctttctccaaagagatgaagctcaaataaaatgtataactctaaaaaaaaaaaaaaaa

SEQ ID NO: 403933 - DNA, 1000 bp, Homo Sapiens
gcctggggaattgttcagcaaatgagtcatggacagaggtgtcatggccttgcagaaattcccaatccagtgagaaggccataaaccttggcaagaaaaagtcttcttggaaagcattctttggagtagtggagaaggaagattcgcagagcacgcctgccaaggtctctgctcagggtcaaaggacgttggaataccaagattcgcacagccagcagtggtccaggtgtctttctaacgtggagcagtgcttggagcatgaagctgtggaccccaaagtcatttccattgccaaccgagtagctgaaattgtttactcctggccaccaccacaagcgacccaggcaggaggcttcaagtccaaagagatttttgtaactgagggtctctccttccagctccaaggccacgtgcctgtagcttcaagttctaagaaagatgaagaagaacaaatactagccaaaattgttgagctgctgaaatattcaggagatcagttggaaagaaaggaaaaagaatgggaggagtcagcaaagaccaagataaaaatggcacttctctggaggagcagtggtggtggacccagagttctgagtatacctgaggcatttatgaagaacagcttcactctcaccccacctggcttctcagaacacaattagaaaaaatgactgactcaccccaaggtgtccaaaagccccaaacaagcatttgggaatagtccctaacttggcagcagcctcaagttcagtacaagatacccggcagagagagagcactgctttttcattgtttgcactgctgtcaaatcctactcttcaactaccatctctggactcacagcttccaccctttcacacaattcatgtcatcagacagagaaagtagattaggctttaagtgaagaggagtttgaagaatttacggatttctgcttcctaatagaagtgaaaagaaaaaaagaattgtgaagaaatcggacctacttctgcacttcccc

SEQ ID NO: 403934 - DNA, 1000 bp, Homo Sapiens; identical to SEQ ID NO: 223947

SEQ ID NO: 403935 - DNA, 1000 bp, Homo Sapiens
tgtgtctggcacctctctccacaaggcccaggcgcccagggtcccaccgacctgcccaggaatgcatcacattgttctctggtgctgtaatttggctgcaggagctaggctgaatgcctcccagggatgagaaacatactctccctggcgtcctcccttcgccccagctagcttgagcttctgccctatgaccactgagtgcatttaaataaaaacctcagaaagactgaggaaaaaaaaatcctaattatctctcttctgttaagccatgtagagactcgtgtcctgagtgggtctgagaatttggcaaagacttactggttggtgttcttgataagggaagtgagacaaaggagaagaaattactccctgcaacaggaggaatagaaatgaagcagtgagtgttcagaaattagatctacaagaagttttgcaaacagaccctcagggccaggcaatgtttgtttttgttttttgttttttgtttttttttttaatctgaagcccctgattttatttttccagcatcactctaaggaagagtgtggattagtgccattattcagggctggtattaataaaagttagcttttatctgcagggctaggttaaggctggcattcttacttttacattaaaaaaactggctacaggctgcgcagctgaggtacttcagtcatgtgccttctctaaaggattcttagatccttaaaatatatagtatgttttaagtttgtatctaaatagcacttactgtaatgtattatacctaaatgtttattaaaagttagaagaaatgagtaccaacaggaaggaatggaagagaggagaggggctaagacattgctgatctgagggacagacctctatcaaatagaagagggctgggagaaggggtgattagaagcagagtgagggaactaaatggagccctgactgcaccaaataaagttctcattttgctgcttgttccaaaaaaaaaaaaaaaaaaaaaaaaaaa

SEQ ID NO: 403936 - DNA, 899 bp, Homo Sapiens; identical to SEQ ID NO: 118516

SEQ ID NO: 403937 - DNA, 1000 bp, Homo Sapiens; identical to SEQ ID NO: 223948

SEQ ID NO: 403938 - DNA, 1000 bp, Homo Sapiens; identical to SEQ ID NO: 292285

SEQ ID NO: 403939 - DNA, 1000 bp, Homo Sapiens; identical to SEQ ID NO: 223949

SEQ ID NO: 403940 - DNA, 1000 bp, Homo Sapiens; identical to SEQ ID NO: 286582

SEQ ID NO: 403941 - DNA, 1000 bp, Homo Sapiens
cctcaaagaggatggcatcagcgccgccaaagacgtgaaattactcctgctcggggctggagaatcaggaaaaagcaccattgtgaagcagatgaagatcatccatgaagatggcttctccggagaagacgtgaaacagtacaagcctgttgtctacagcaacactatccagtccctggcagccatcgtccgggccatggacactttgggcatcgaatatggtgataaggagagaaaggctgacgccaagatggtgtgtgatgtggtgagtcggatggaagacaccgagcccttctctgcagagctgctttctgccatgatgcggctctggggcgactcaggaatccaagagtgcttcaaccggtcccgggagtatcaactcaacgactctgccaaatactacctggacagcctggatcggattggggccgccgactaccagcccactgagcaggacatcctccgaaccagggtcaaaaccactggcatcgtagaaacccacttcacattcaagaacctccacttcaggctgtttgacgtcggaggccagcgatctgaacgcaagaagtggatccattgcttcgaggacgtcacggccatcattttctgtgtcgcgctcagcggctatgaccaggtgctccacgaagacgaaaccacgaaccgcatgcacgaatccctgaagctttttgacagcatctgcaacaacaaatggttcacagacacgtccatcatcctgtttcttaacaagaaggacatatttgaagagaagatcaagaagtccccgctcaccatctgctttcctgaatatacaggccccagcgccttcacagaagccgtggcttacatccaggcccagtacgagagcaagaacaagtcagcccacaaagagatctacagccacgtcacctgcgccacggacaccaacaacatccagtttgtctttgatgctgtgacggacgtcatcatcgccaaaaacctgcggggctgtggactctactga

SEQ ID NO: 403942 - DNA, 1000 bp, Homo Sapiens; identical to SEQ ID NO: 292288

SEQ ID NO: 403943 - DNA, 1000 bp, Homo Sapiens; identical to SEQ ID NO: 292289

SEQ ID NO: 403944 - DNA, 1000 bp, Homo Sapiens
gctggacgccacctgtgacgttgcctgcttgatgtttgatggcagtgacccaaagtcctttgcacattgtgccagcgtctacaagcaccattacatggacgggcagaccccctgcctctttgtctcctccaaggccgacctgcccgaaggtgtcgcggtgtctggcccatcaccggccgagttttgccgcaagcaccggctacccgctcccgtgccgttctcctgtgctggcccagccgagcccagcaccaccatcttcacccagctcgccaccatggccgccttcccacatttggtccacgcagagctgcatccctcttccttctggctccgggggctgctgggggttgtcggggccgccgtggccgcagtcctcagcttctcactctacagggtcctggtgaagagccagtgaggcccctggtacccaagccccctcccctgacctgggtgtgcctcgctgctggggctctgcaggggcagcacagctggggtgcaggccaggctgccactccgggaacgcctttgcgccgggactttttgtttctgaaggcagtcgatctgcagcggggccttatgctgccatgcactgccctggctcctgccggacccccagggtgggccgtggcaggtggctgagcaggagctcccaagtgccggccaccgctgtcagggattgcccacccctgggcatcatgtgtgtggggccggggagcacaggtgtgggagctggtgaccccagacccagaattctcagggctctacccccctttcctggtcctaggtggccagtgggtatgaggagggctggaaggcagagctttgggccaaaagcaggcgttggggggtcccccctcaagtttggagccgtttccgtggttgtagcagaggaccggaggttgggttcctgattaaacttcactgtgtgttttctatctcggatcccagtctctgaagacaacttgctttgattcaacctaaaaaaaaaaaaaaaaaaaaa

SEQ ID NO: 403945 - DNA, 1000 bp, Homo Sapiens; identical to SEQ ID NO: 223950

SEQ ID NO: 403946 - DNA, 1000 bp, Homo Sapiens; identical to SEQ ID NO: 292291

SEQ ID NO: 403947 - DNA, 1000 bp, Homo Sapiens
ggggctgctcctgtccgcctacctggagcagcacagctgatggcggccccgcggagaccccgctgccacctcgcccagccatcaagccctccgataccttcggctaaaatatctttcatatttttagaatttgtcctcggaaacctttttcgcttggggtggtctctctcactctgccccctcctcacgcagctcttggcagtcaacagacgctggcggctggggctgcccatgccatcccagctccaagcttcccactccgggacttgtgtttgggtggggagacctgacctgggcatgttcctgtttcttcatcgttgagcttttctggcccggtctgaagctcaagtgaggagggggaggctgggtttttatcacttttaatgaatttggtgtgatttgttgtagatttttaaatttcccttttggagagaaaaaccaaaaaaactcgccccactggtaaaacatgggtcttggtcccagcccctgctcagcccctcccagtttttagcttgaatgagggtggggtctctgggaccctgcccctcatgccagaagcatcttgtgttgtatatgtgtgcgcgcgtgtgccctgagacccaggacagaagccacggtcctaagagccggttttatcctcgtcattctgcgtgtcctcccccacgccacctgtgtcggggctcagggtctcctgctttatatgagcccccttcctttcctcccctcctttatgctgggggtccaggacttccagccagaagcctctgcccttgcactaccttgtctgtcaccccatcccgtgtcccctcgtcccccagcctgactcctgcctgatagctcctgtgtccccatgctggtcctcctggcccaggctgcaggagccaggctggggggcctccgcacccccttgctgcgtgtgggtaattgtgttttgggggaaagtggggaatttaataaatttctggtgctctggcaaaaaaaaaaaaaaaaaaaaaaaaaa

SEQ ID NO: 403948 - DNA, 1000 bp, Homo Sapiens
taagccattatctgggggtcttcctgacatttgtgaaagctttttggagaaatggttgaggaaaggttacattaaacataaacctgatcaaatgaccataaatcagtatgaacctgggcaagattgtcatggattttaagcacccagatggcattgcagtgccagttatgttgcctcgtcggagtttgctggtgatgacaggagaatctagatacctttggacccatggaatcacgtgcagaaaatttgatactgttcaagcatctgagagtcttaaaagtggaattatcaccagtgatgttggagacttaactttaagcaagaggggactacgaacatcatttacatttaggaaagtgaggcaaacaccttgtaactgtagagcgtagagtggcagctctccaagaaattgttcgactcctgagaccaggtgggaaggcactcatttatgtctgggcaatggaacaagaatataataagcagaagtccaagtatcttagaggaaacagaaatagccaaggaaagaaagaggagatgaacagtgatacctcagtgcagaggtcacttgtggagcaaatgcgtgacatgggcagtcgagactcggcatcttctgtcccccgcattaatgactctcaggaaggaggatgtaattcaaggcaagtttctaattccaagctgcctgttcatgttaacaggacttctttttattctcaagatgtactggttccctggcaccttaagggaaatcctgataaaggcaaacctgttgagccatttggtcccataggatcccaggacccaagtcctgtgtttcatcgttactaccatgtgttccgtgagggagaactggaaggtgcctgcaggactgtgagtgatgtcagaattctgcaaagctactacgatcaaggaaactggtgtgtgattcttcaaaaggcctgattatttacctgaacacatcatatataaagaagaaatgctcacttaaaaaaaaaaaaaaaaa

SEQ ID NO: 403949 - DNA, 1000 bp, Homo Sapiens; identical to SEQ ID NO: 292295

SEQ ID NO: 403950 - DNA, 1000 bp, Homo Sapiens; identical to SEQ ID NO: 118517

SEQ ID NO: 403951 - DNA, 1000 bp, Homo Sapiens
accatggacgccaccgcagtagcaggcatcgagaccaagaaagagaaggaggacctgtgcttgctaaagaaggaggagaaggaggagccagtagccccggagctggcaacaacggtgcctgagagcgcagagcctgaggcagaggcggacggggaggagctggacggcagcgacatgtcagccatcatctatgaaatccccaaggagcctgagaagaggcggcggagcaagcggtcgcgggtgatggatgctgacggcctgctcgagatgttccactgcccatacgagggctgcagccaagtctacgtggccctcagcagcttccagaaccacgtcaatcttgtgcatcggaaaggaaagaccaaagtgtgccctcatcctggctgtggcaagaagttctatttatccaaccacctgcggcggcacatgatcatccattcaggtgtccgtgaattcacctgcgagacctgcggcaagtccttcaagaggaagaaccacctggaggtacatcggcgcacccacaccggcgagacccccctgcagtgcgagatctgtggctaccagtgccggcagcgcgcgtcgctcaactggcacatgaagaagcacactgcggaggtgcagtacaacttcacgtgcgatcgctgcgggaagcgcttcgagaagctggacagcgtcaagttccacacgctcaaaagccacccggatcacaagcccacctgacccacctgaccactgaccgcccctatttattcgtccgctcggacaccacgcccgggcttgccggggcctggacagctgcgagggccgcccggaccgcgggccggaaggaggcgcccccgccccgccccagagctgggccccctgggcaggttccccaccccgccccaccgcatccttctcggagctggtgcctggggctgcattgctggaactgtgtcaagagagcagagtgagattaaagagcgagaaagcaaaaaaaaaaaaaaaaaaaaaaaaaaaa

SEQ ID NO: 403952 - DNA, 837 bp, Homo Sapiens
ctgggagaggggactcctgcaatgtgtctgtgaataaagactagccgaagatactgtggcctcatgaataggaatgtctgcccatatgtcaggattggaaataatggatgaagatcaattaatcaaagacgtcttggataaattccttaattgtcatgagcaaacatatgatgaagaatttctgaacacttttactcatctttcacaagaggatcatgtgtccaaaaggggagtgtttggaactgattcttcagaaaacatttttacctcagcaaaagttactcataaaaatgaagcagatgactaccatcttagaaataaaaccatctttcttcgtacttcatcacaatgtttggaagaacaggtagataatttcctagatttagaagatttggacatggatgaagagattaaaccccaaatgagtgaggatttgctgctgcttccaggagaagtggagcaggatgtaagcaccagcattccttcctgtatcccttttgtggcccagcctcctacctgtgaagtgaagccaaagcccagtgttaaaagaatggacaaacagacggaagagatacttggagatgaagttcaacttttttcacttgatgaagaatttgattatgacaatgtgatgctaacctccaagtttagtcctgcagagatagagaacatcaaagagctatgcaagcagcagaagagaaaggacaccagcccagacttagagaaatcctgtgactgattcacagaggcattttgtgtgtgtgtgcttattttaattttgttcttattctagcaacattagaataaaagataaacctacaaaaaaaaaaaaaaaaa

SEQ ID NO: 403953 - DNA, 1000 bp, Homo Sapiens; identical to SEQ ID NO: 292298

SEQ ID NO: 403954 - DNA, 1000 bp, Homo Sapiens
aaaacctggcctcagaacttctcatctcacttcaaccgtttccagcccttccacggcctctttgatggggtgcccaccactgcctacttctcagcgtcgccaccagcactctgtccccagggccgcacccgggacctggaggcgctgctggcggtgatggggagcgcccaggagttcatctatgcctccgtgatggagtatttccccaccacgcgcttcagccaccccccgaggtactggccggtgctggacaacgcgctgcgggcggcagccttcggcaagggcgtgcgcgtgcgcctgctggtcggctgcggactcaacacggaccccaccatgttcccctacctgcggtccctgcaggcgctcagcaaccccgcggccaacgtctctgtggacgtgaaagtcttcatcgtgccggtggggaaccattccaacatcccattcagcagggtgaaccacagcaagttcatggtcacggagaaggcagcctacataggcacctccaactggtcggaggattacttcagcagcacggcgggggtgggcttggtggtcacccagagccctggcgcgcagcccgcgggggccacggtgcaggagcagctgcggcagctctttgagcgggactggagttcgcgctacgccgtcggcctggacggacaggctccgggccaggactgcgtttggcagggctgaggggggcctctttttctctcggcgaccccgccccgcacgcgccctcccctctgaccccggcctgggcttcagccgcttcctcccgcaagcagcccgggtccgcactgcgccaggagccgcctgcgaccgcccgggcgtcgcaaaccgcccgcctgctctctgatttccgagtccagccccccctgagccccacctcctccagggagccctccaggaagccccttccctgactcctggcccacaggccaggcctaaaaaaaactcgtggcttcaaaaaaaaaaaaaaaaaaaaaaaaaaaaaaaa

SEQ ID NO: 403955 - DNA, 1000 bp, Homo Sapiens; identical to SEQ ID NO: 292299

SEQ ID NO: 403956 - DNA, 1000 bp, Homo Sapiens; identical to SEQ ID NO: 292300

SEQ ID NO: 403957 - DNA, 1000 bp, Homo Sapiens; identical to SEQ ID NO: 118519

SEQ ID NO: 403958 - DNA, 1000 bp, Homo Sapiens; identical to SEQ ID NO: 292302

SEQ ID NO: 403959 - DNA, 1000 bp, Homo Sapiens; identical to SEQ ID NO: 118522

SEQ ID NO: 403960 - DNA, 1000 bp, Homo Sapiens; identical to SEQ ID NO: 292305

SEQ ID NO: 403961 - DNA, 1000 bp, Homo Sapiens
atagagcagcaaaatatcctgatatcaaattggaataaaaataggaaagactttatacagaaggctgtgctgacactcactgaggcttgtgcaacacatgaaatggagagcatgttggctaaggacaagaaaaagcaacaggaattgtgtgctgatctgaaagccaaggttcgtcaatggcgagcccaccaagaagaggtagcaagactggaaatggaaatttctgccagaagaagagaaaaggaagaggagaaagagaaactgtggaagaagaaggaattgttgcaaagagcagagaagaaaaaaaaaataaaaaaatactgggccaagaaaaaacagaagtggcaagaaatggaaatgagagatcttcagcgtctagaagaactgaagaaattaatcgctgaacagtcactaaaagacagagaaagggttaaatatagacaagaattattggaaaggcgtttgatggagaaaaaggaagtggcccttcaagaagctcatgaagacaaagagagagcacggcggctagaagcccttaggaaacaggttgctgttgttgctcaatttgatcctgttagaatgatgtcagatacaatggcatcaaaagctagaatgggcattgaaattgaagaagaatttattcttcaaaagccactcttcacattgaatacatacaatgaacagcagataatttctgaccctagacttcgcttcgagttagcacttcgagaagctggacttcatagaacactttatgctaaagagatattaccaaaaattagtcctcaaaaacctccaagaaaggacatggagtctactgtatttaaaatatagagctcatcctcaaattctatatgtaaagagcatttttctttgaaaacatgtatatggataataataattactactttctaaaatgtttgaaatatcagacatagaaatcatagcatctattaaaacaactttgcctttcttttgtgaaaaaaaaaaaaaaaaaaaa

SEQ ID NO: 403962 - DNA, 1000 bp, Homo Sapiens; identical to SEQ ID NO: 118523

SEQ ID NO: 403963 - DNA, 1000 bp, Homo Sapiens; identical to SEQ ID NO: 292307

SEQ ID NO: 403964 - DNA, 1000 bp, Homo Sapiens; identical to SEQ ID NO: 223958

SEQ ID NO: 403965 - DNA, 1000 bp, Homo Sapiens
aattttccaaaatcacaaaaagcaatgtgtacaacaaagtttacatcattgtttcaccaaaaaaaattgaaaagctggaaagaactcaaatgatcaataattaatgaatgactatacaaattatagtatcttaataaaaatgagaacactgtccctttatgtaaatttttgtacatagtagcattaggtagaaaagacaaaacccaaacacctagttaattgagggatggacacctctaaaaactatattgtcttaaaagtatgtggactctgttcctttatgtaaacatgtaaagaaaataagtcagcgaaaaaaatgaaacccaaaactctctgcatgtacacattacaaattgaattgtttgcttacccttaaccttctgattgagaaacataactgtttcttttatgcagataaaattattttactgaagatctagcaatggccttaattagcaactggtgagttctaattatagcaagaaaggatggcttggtatcagttattacagagccccaaatcttcatttctggagtgtgttctctaagagtttggctaactcccatatgcaagtcaattcatttaatgtgccaagaggtagattttaaacatagtctatcgtggaagttcaagaggaatttctttaagtattttgtgaatatttattttaattttatgaccaacatgtcatttggttgtaacctccttaaaactattctgggctaaagttagagaatttttttccaactgcattctgtacagcactagttacattatgacaggaagtaaaagtttacatggtgaaataatactggggaaatcggagcaacaatgtcagttgcatgccttggtcactgggttctctatagcctttaatatgtaatgcaattgggagtgtctgaagtgagggagatatagtgtacacactttttatcacagagtagatcactggaatggaattccaaataataaactttggaaggtgtaactctccagtat

SEQ ID NO: 403966 - DNA, 1000 bp, Homo Sapiens; identical to SEQ ID NO: 292312

SEQ ID NO: 403967 - DNA, 1000 bp, Homo Sapiens
tgtcaaactggagaagcctaagaaatacaatccaggtcatctacttcaaacaaatgagcaatttacagctccacaaaaagctagatgcaaaataccagcccttcccttgccgaccatttcgcctcccattaataaggtgtgtcgggacactttgcgggactggtgtcaacaactcggtttgagtactaatggcaagaaaatcgaagtttatctgaggcttcataggcatgcttaccctgaacaacggcaagatatgcctgaaatgtcacaagagaccagattacagcgatgttcgaggaaacgcaaggcagtgaccaagagagcaaggcttcagagaagttatgagatgaatgagagagcagaagagaccaatacagtcgaagtgataacttcagcaccgggagccatgttggcatcatgggcaagaattgctgcaagagctgttcagcctaaggctttgaattcatgttccattcccgtttctgttgaggcctttttgatgcaagcctctggcgtcaggtggtgtgtggtccatggcagacttctctcggcagacacaaagggttgggtacgcctgcagtttcatgcaggtcaggcctgggtgcctaccactcacaggaggatgatttctctcttcttgttacctgcctgcattttcccatccccaggcatagaagataatatgttatgccccgactgtgctaagaggaataagaagatgatgaaaagattaatgacagtagagaagtagcagcaacctgtttgaatacaatgtactaaaggagggatgtactttcagatcatgtaacctattacgaaggagtggaagaggagacaatttgaatgaatcctcatgatctacaaaacaaaatcatagtgactaggactccacagtgaagatggttgactagtgacacagccccatctaaagaatccctttctgtatgtctgaaaacccattaaaataaagtcactgcaattggcaaaaaaaaaaaaaaaa

SEQ ID NO: 403968 - DNA, 1000 bp, Homo Sapiens; identical to SEQ ID NO: 223961

SEQ ID NO: 403969 - DNA, 960 bp, Homo Sapiens
ccccggcccacaagcccctgcagggagcgggcccgggcggcgcgcgatcgaggtcgggtcgccgtccagcctgcagcatgagcgcccccagcgcgacccccatcttcgcgcccggcgagaactgcagccccgcgtggggggcggcgcccgcggcctacgacgcagcggacacgcacctgcgcatcctgggcaagccggtgatggagcgctgggagaccccctatatgcacgcgctggccgccgccgcctcctccaaagggggccgggtcctggaggtgggctttggcatggccatcgcagcgtcaaaggtgcaggaggcgcccattgatgagcattggatcatcgagtgcaatgacggcgtcttccagcggctccgggactgggccccacggcagacacacaaggtcatccccttgaaaggcctgtgggaggatgtggcacccaccctgcctgacggtcactttgatgggatcctgtacgacacgtacccactctcggaggagacctggcacacacaccagttcaacttcatcaagaaccacgcctttcgcctgctgaagccggggggcgtcctcacctactgcaacctcacctcctggggggagctgatgaagtccaagtactcagacatcaccatcatgtttgaggtgcgcccacctgaagttccccatgggtctccaggaagtgaccttggatgggggtgggaaggggctgctggagccaccttgctacctggggagggtcccttcctgaccccctgggtgggctggactgtgctggttcatttagaaatcaaagtcctttgcctggcgcagtggctgccaggagcagtggctcaggtctataatcccagcactgtggaaggccgaggtgggcagattgcttgagcctaggagttcaagaccagcctgggctacagagcaagacctcatctttcctaaaaaaaaaaaatacaaaaaa

SEQ ID NO: 403970 - DNA, 1000 bp, Homo Sapiens; identical to SEQ ID NO: 118525

SEQ ID NO: 403971 - DNA, 1000 bp, Homo Sapiens; identical to SEQ ID NO: 118526

SEQ ID NO: 403972 - DNA, 1000 bp, Homo Sapiens; identical to SEQ ID NO: 223963

SEQ ID NO: 403973 - DNA, 1000 bp, Homo Sapiens; identical to SEQ ID NO: 118528

SEQ ID NO: 403974 - DNA, 1000 bp, Homo Sapiens; identical to SEQ ID NO: 115530

SEQ ID NO: 403975 - DNA, 1000 bp, Homo Sapiens; identical to SEQ ID NO: 223965

SEQ ID NO: 403976 - DNA, 881 bp, Homo Sapiens
cgctgtttgtctttctcggaaacaacagtaacgataagcctcttggaatatggaggccgctgcggacggcccggctgagacccaaagcccggtggaaaaagacagcccggcgaagacccaaagcccagcccaagacacctcaatcatgtcgagaaataacgcagatacaggcagagttcttgccttaccagagcacaagaagaagcgcaagggaaacttgccagccgagtccgttaagatcctccgcgactggatgtataagcatcggtttaaggcctacccttcagaagaagagaagcaaatgctgtcagagaagaccaatttgtctttgttgcagatttctaactggtttatcaatgctcgcagacgcattctcccggatatgcttcaacagcgtagaaacgaccccatcattggccacaaaacgggcaaagatgcccatgccacccacctgcagagcaccgaggcgtctgtgccggccaagtcagggcccagtggtccagacaatgtacaaagcctgcccctgtggcccttgccaaagggccagatgtcaagagagaagcaaccagatccggagtcggcccctagccagaagctcaccggaatagcccagccgaagaaaaaggtcaaggtttctgtcacatccccgtcttctccagaacttgtgtctccagaggagcacgccgacttcagcagcttcctgctgctagtcgatgcagcagtacaaagggctgccgagctggagctagagaagaagcaagagcctaatccatgattgatgatgttccaaaaacccaagtagtcagtcccttatgtactgtggtaaacctgtttatgttcaccccaaaaaaaaaaaaaaaaaaaaaaaaaaaaaaaaaaaa

SEQ ID NO: 403977 - DNA, 1000 bp, Homo Sapiens; identical to SEQ ID NO: 292322

SEQ ID NO: 403978 - DNA, 1000 bp, Homo Sapiens; identical to SEQ ID NO: 292323

SEQ ID NO: 403979 - DNA, 1000 bp, Homo Sapiens; identical to SEQ ID NO: 223967

SEQ ID NO: 403980 - DNA, 1000 bp, Homo Sapiens; identical to SEQ ID NO: 223967

SEQ ID NO: 403981 - DNA, 1000 bp, Homo Sapiens
aggccatccccgagcgctatctccccggagcggagcacgccggctcccagtactaggggctgcgctcgagcagtggcgggggcggaggggtggttcttttccttctcctccgccagaggccacgggcgcccttgttcccgccggccaggtcctatcaaaggaggctgccggaactcaagaggcagaaaaagaccagttaggcggtgcagacggtctgggacgtggcagacggacggaccctcggcggacaggtggtcggcgtcggggtgcggtgggtaggggcgaggacaacgcagggtgcgctgggttgggacgtgggtccacttttgtagaccagctgtttggagagctgtatttaagactcgcgtatccagtgttttgtcgcagagagttttcgctcttaaatcctgggggtttcttagaaagcaacttagaactcgagattcacctttcgtttccctttccccaaaagtagcgtaaccaacatttaagcttgcttaaaaacgaaaaccaaccgccttgcatccagtgttcccgatttactaaaataggtaaccaggcgtctcacagtcgccgtcctgtcaagagcgctaatgaacgttctcattaacacgcaggagtaccgggagccctgaaccgcccgctgctcggcggatcccagctgcggtggcgacggcgggaaggcgctttccgctgttcctcagcgggccgggcccttgaccagcgcggcccgcaggtcttccttctcgccgtcttgcagttgaagagctacatacgtagtcagtttcgatttgttacagacgttaacaaattcctttacccaaggttatgctatgacctttccgcagtttactttgattttctatgtttaaggttttggttgttggtagtagccgaatttaactggcactttattttacttctaaccttgtttcctgacggtgtacagaatcaacaaaataaaacatttaaagtctgattttttaaaaaaaaaaaaaaa

SEQ ID NO: 403982 - DNA, 1000 bp, Homo Sapiens
tctctggtcagacatcgctggaaatgaatagccaggcctgacctcaagcaaccatgaactcagctattaagaaaatcacatttccagggcagcagccgggatcgatggtggcgctttctcctgtgcccacccgtcttcaatctctgttctgctcccagatgccttctagattcactgtcttttgattcttgattttcaagctttcaaatcctccctacttccaagaaaaataattaaaaaaaaaacttcattctaaaccaaaacagagtggattgggctgcaggctctatggggttcgttatgccaaagtgtctacatgtgccaccaacataaaacaaaaccaagccttggctcgttctcttctctcttcaatctctggaaaaataagtacatatagttgataacccctcttagcttacaggaagctttttgtattaattgcctttgaggttattttccgccagacctcaacctgggtcaaagtggtacaggaaggcttgcagtatgatggcaggagaatcagcctggggcctggggatgtaaccaagctgtacccttgagacctggaaccagagccacaggccccttttgtgggtttctctgtgctctgaatgggagccagaattcactaggaggtcatcaaccgatggtcctcacaagcctcttctgaagatggaaggccttttgcccgttgaggtagaggggaaggaaatctcctcttttgtacccaatacttatgttgtattgttggtgcgaaagtaaaaacactacctcttttgagactttgcccagggtcctgtgcctggatgggggtgcaggcagccttgaccacggctgttcccctcacccaaaagaattatcatcccaacagccaagacccaacaggtgctgaactgtgcatcaaccaggaagagttctatccccaagctggccactatcacatatgcttactcttgcttaaaattaataaatcatgttttgatgagaaaaaactattcta

SEQ ID NO: 403983 - DNA, 1000 bp, Homo Sapiens
gcggagcctcctttcctcccctcggtcttgtcaaactgggagtcaagcttggtccacacctgagtcgggccagagcttacatccagcttttgagcgatgtttactgaggtctggtgcagcaggtcctctgggaagtgtcgcacaaaggagtcgcccactggaaggttctgggcaggcgagatgcccagaggtgatccctgcccgcccctcccacctcccttcccacacagcccatggaggtgtttgtggacgacgagaccaagctcacgctgcacggcctgcagcagtactacgtcaaactcaaagacagtgagaagaaccgcaagctctttgatctcttggatgtgctggagtttaaccaggtgataatcttcgtcaagtcagtgcagcgctgcatggccctggcccagctcctcgtggagcagaacttcccggccatcgccatccaccggggcatggcccaggaggagcggtgagtgcgagccgcccgccaaggctgcagggagcaccaccaggagcccagtgtctgacggcctccacttgtttctcctgcaccccagcctgtcacgctatcagcagttcaaggatttccagcggcggatcctggtggccaccaatctgtttggccgggggatggacatcgagcgagtcaacatcgtctttaactacgacatgcctgaggactcggacacctacctgcaccgggtggcccgggcgggtcgctttggcaccaaaggcctagccatcacttttgtgtctgacgagaatgatgccaaaatcctcaatgacgtccaggaccggtttgaagttaatgtggcagaacttccagaggaaatcgacatctccacatacatcgagcagagccggtaaccaccacgtgccagagccgcccacccggagccgcccgcatgcagcttcacctcccctttccaggcgccactgttgagaagctagagattgtatgagaataaacttgttattatggaaaaaaaaaaaaaaa

SEQ ID NO: 403984 - DNA, 1000 bp, Homo Sapiens
cgtgagtgacacgcagcctgcagactcactgtgggaaggagacaaaactagagactcaaagagggagtgcatttatgagctcttcatgtttcaggagagagttgaacctaaacatagaaattgcctgacgaactccttgattttagccttctctgttcatttcctcaaaaagatttccccatttaggtttctgagttcctgcatgccggtgatccctagctgtgacctctcccctggaactgtctctcatgaacctcaagctgcatctagaggcttccttcatttcctccgtcacctcagagacatacacctatgtcatttcatttcctatttttggaagaggactccttaaatttgggggacttacatgattcattttaacatctgagaaaagctttgaaccctgggacgtggctagtcataaccttaccagatttttacacatgtatctatgcattttctggacccgttcaacttttcctttgaatcctctctctgtgttacccagtaactcatctgtcaccaagccttggggattcttccatctgattgtgatgtgagttgcacagctatgaaggctgtacactgcacgaatggaagaggcacctgtcccagaaaaagcatcatggctatctgtgggtagtatgatgggtgtttttagcaggtaggaggcaaatatcttgaaaggggttgtgaagaggtgttttttctaattggcatgaaggtgtcatacagatttgcaaagtttaatggtgccttcatttgggatgctactctagtattccagacctgaagaatcacaataattttctacctggtctctccttgttctgataatgaaaattatgataaggatgataaaagcacttacttcgtgtccgactcttctgagcacctacttacatgcattactgcatgcacttcttacaataattctatgagataggtactattatccccatttcttttttaaatgaagaaagtgaagtaggccgggcac

SEQ ID NO: 403985 - DNA, 1000 bp, Homo Sapiens; identical to SEQ ID NO: 220436

SEQ ID NO: 403986 - DNA, 1000 bp, Homo Sapiens
cttgtatatggataagctgctgtccttccccttcacaactgaccccgcagttacaaactagtatagcatttgtgctgattgatgatagactcatggacttcaggagcccttacttggttttgatcagtgtagcaaattagggatgaagagttcaaaccttttggccctttctttcttttctaggcttctccctcgcagggtgttccgtagtttcttctcgagccaatgcatgtattatagcagcaggtgtctttgtgctttctcatcatagtaacgtactacttgtaaatacatttttctattttctatttttttgtatttttttttttgacattttgtttcattggtgtgctgtatattttccatgccctcactcctttaagaaaaaaaaaaaggaaaaaagcaacacaatcctgtccttgctgttgtgattatagtcttggtttacctgtggtgacaaccgggtgttggggacacatgtcaaatgcccctctgagatgggccctaaattccagtaactggggaaagaaccagctgctgtgtcctgagagcctggccctgtgctgtggtctctgctgcaagcccagatttctgggagtaactagtgttaggtctgctgacctttacctaagcagcccctgcctggtaagaaggtgcccattgttcagaggcaaagagaagcctgcggttggcatgaggatgcctgacaacaaaggctggagaagggccctgagttccagcctctccccaagggtccccgccccagtggctgcctctgtcttgacctgtgtaatgaattagtgtgctgtgtcactgtggcttgaagtcactgtggatcgagctcacagggggcacccatcctgttgtcaacagagtctgaagcagtcagggtgttggattcctctgttgttgtcatcaattcctgctgaggggtttctggggttttgtttttaataaatgactcctttgtaaaaaaaaaaaaaaaaaaaaaaaaaaaaaa

SEQ ID NO: 403987 - DNA, 1000 bp, Homo Sapiens; identical to SEQ ID NO: 118531

SEQ ID NO: 403988 - DNA, 1000 bp, Homo Sapiens
aatgttgcatgacaaagttggcgagccatattccatccaggcttatgccaaagaaggcgttccatcagaaggtcctgagaccaaggtggagaacattggcgtgaagacggtcacgatcacatggaaagagattcccaagagtgagagaaaggggatcatctgcaactacaccatcttttaccaagctgaaggtggaaaaggattctccaagacagtcaattccagcatcttgcagtacggcctggagtccctgaaacgaaagacctcttacattgttcaggtcatggccagcaccagtgctgggggaaccaacgggaccagcataaatttcaagacattgtcattcagtgtctttgagattatcctcataacttctctgattggtggaggccttcttattctcattatcctgacagtggcatatggtctcaaaaaacccaacaaattgactcatctgtgttggcccaccgttcccaaccctgctgaaagtagtatagccacatggcatggagatgatttcaaggataagctaaacctgaaggagtctgatgactctgtgaacacagaagacaggatcttaaaaccatgttccacccccagtgacaagttggtgattgacaagttggtggtgaactttgggaatgttctgcaagaaattttcacagatgaagccagaacgggtcaggaaaacaatttaggaggggaaaagaatgggtatgtgacctgccccttcaggcctgattgtcccctggggaaaagttttgaggagctcccagtttcacctgagattccgcccagaaaatcccaatacctacgttcgaggatgccagaggggacccgcccagaagccaaagagcagcttctcttttctggtcaaagtttagtaccagatcatctgtgtgaggaaggagccccaaatccatatttgaaaaattcagtgacagccagggaatttcttgtgtctgaaaaacttccagagcacaccaagggagaagtctaa

SEQ ID NO: 403989 - DNA, 1000 bp, Homo Sapiens; identical to SEQ ID NO: 223969

SEQ ID NO: 403990 - DNA, 1000 bp, Homo Sapiens; identical to SEQ ID NO: 292329

SEQ ID NO: 403991 - DNA, 1000 bp, Homo Sapiens
gacatttggctgtgatggtaggatggactcccagcaggtatgggacaggtgccaggtgtgtggtggggacaacagcacgtgcagcccacggaagggctctttcacagctggcagagcgagagaatatgtcacatttctgacagttacccccaacctgaccagtgtctacattgccaaccacaggcctctcttcacacacttggcggtgaggatcggagggcgctatgtcgtggctgggaagatgagcatctcccctaacaccacctacccctccctcctggaggatggtcgtgtcgagtacagagtggccctcaccgaggaccggctgccccgcctggaggagatccgcatctggggacccctccaggaagatgctgacatccaggtgggaggtgtcagagcccagctcatgcacatcagctggtggagcaggcctggccttggagaacgagacctgtgtgccaggggcagatggcctggaggctccagtgactgaggggcctggctccgtagatgagaagctgcctgcccctgagccctgtgtcgggatgtcatgtcctccaggctggggccatctggatgccacctctgcaggggagaaggctccctccccatggggcagcatcaggacgggggctcaagctgcacacgtgtggacccctgcggcagggtcgtgctccgtctcctgcgggcgaggtctgatggagctgcgtttcctgtgcatggactctgccctcagggtgcctgtccaggaagagctgtgtggcctggcaagcaagcctgggagccggcgggaggtctgccaggctgtcccgtgccctgctcggtggcagtacaagctggcggcctgcagcgtgagctgtgggagaggggtcgtgcggaggatcctgtattgtgcccgggcccatggggaggacgatggtgaggagatcctgttggacacccagtgccaggggctgcctcgcccggaaccccaggaggcctgcagcctggagccctg

SEQ ID NO: 403992 - DNA, 1000 bp, Homo Sapiens; identical to SEQ ID NO: 292330

SEQ ID NO: 403993 - DNA, 1000 bp, Homo Sapiens; identical to SEQ ID NO: 115949

SEQ ID NO: 403994 - DNA, 1000 bp, Homo Sapiens
gaagcatcgaaatccaggagctgcaggtttcctccagttacctcgcagttcgaagcctcagtcaaaagtattacctcaccgggggctggagcatcgactggcctggggagttccccttcgctgggaccacgtttgaataccagcgctctttcaaccgcccggaacgtctgtacgcgccagggcccacaaatgagacgctggtctttgaaattctgatgcaaggcaaaaatccagggatagcttggaagtatgcacttcccaaggtcatgaatggaactccaccagccacaaaaagacctgcctatacctggagtatcgtgcagtcagagtgctccgtctcctgtggtggaggttacataaatgtaaaggccatttgcttgcgagatcaaaatactcaagtcaattcctcattctgcagtgcaaaaaccaagccagtaactgagcccaaaatctgcaacgctttctcctgcccggcttactggatgccaggtgaatggagtacatgcagcaaggcctgtgctggaggccagcagagccgaaagatccagtgtgtgcaaaagaagcccttccaaaaggaggaagcagtgttgcattctctctgtccagtgagcacacccactcaggtccaagcctgcaacagccatgcctgccctccacaatggagccttggaccctggtctcagtgttccaagacctgtggacgaggggtgaggaagcgtgaactcctctgcaagggctctgccgcagaaaccctccccgagagccagtgtaccagtctccccagacctgagctgcaggagggctgtgtgcttggacgatgccccaagaacagccggctacagtgggtcgcttcttcgtggagcgaggtatggattagaagtcactgctgggtcaggagattgagaccatcctggctaacacagtgaaaccctgtctctactaaaaatacaaaaaattagccaggcaaggtggcaggcgcctgtagtctgatctactgggg

SEQ ID NO: 403995 - DNA, 1000 bp, Homo Sapiens; identical to SEQ ID NO: 223973

SEQ ID NO: 403996 - DNA, 1000 bp, Homo Sapiens
cggcggaggggagcgcagaaccatcgtctcgtgtacacggattgtcaacaagaccacaactctggtgaacgacagtgactgccctcaagcaagccgcccagagccccaggtccgaaggtgcaacttgcacccctgccagtcacggtgggtggcaggcccgtggagcccctgctcggcgacctgtgagaaaggcttccagcaccgggaggtgacctgcgtgtaccagctgcagaacggcacacacgtcgctacgcggcccctctactgcccgggcccccggccggcggcagtgcagagctgtgaaggccaggactgcctgtccatctgggaggcgtctgagtggtcacagtgctctgccagctgtggtaaaggggtgtggaaacggaccgtggcgtgcaccaactcacaagggaaatgcgacgcatccacgaggccgagagccgaggaggcctgcgaggactactcaggctgctacgagtggaaaactggggactggtctacgtgctcgtcgacctgcgggaagggcctgcagtcccgggtggtgcagtgcatgcacaaggtcacagggcgccacggcagcgagtgccccgccctctcgaagcctgccccctacagacagtgctaccaggaggtctgcaacgacaggatcaacgccaacaccatcacctccccccgccttgctgctctgacctacaaatgcacacgagaccagtggacggtatattgccgggtcatccgagaaaagaacctctgccaggacatgcggtggtaccagcgctgctgccagacctgcagggacttctatgcaaacaagatgcgccagccaccgccgagctcgtgacacgcagtcccaagggtcgctcaaagctcagactcaggtctgaaacccacccacccgcaagcctaccagccttgtggccacgcccccacccggctgccacaagaatccaactgcatagaacatgagcgtggacttggaaaaaaaaaaaaaaaaaaaaaa

SEQ ID NO: 403997 - DNA, 1000 bp, Homo Sapiens; identical to SEQ ID NO: 118534

SEQ ID NO: 403998 - DNA, 1000 bp, Homo Sapiens; identical to SEQ ID NO: 223974

SEQ ID NO: 403999 - DNA, 1000 bp, Homo Sapiens
atcaaaaatgttagtgattgatcctgacaagcggatctctgtagacgaagctctgcgtcacccatacatcactgtttggtatgaccccgccgaagcagaagccccaccacctcaaatttatgatgcccagttggaagaaagagaacatgcaattgaagaatggaaagagctaatttacaaagaagtcatggattgggaagaaagaagcaagaatggtgttgtaaaagatcagccttcagatgcagcagtaagtagcaacgccactccttctcagtcttcatcgatcaatgacatttcatccatgtccactgagcagacgctggcctcagacacagacagcagtcttgatgcctcgacgggaccccttgaaggctgtcgatgataggttagaaatagcaaacctgtcagcattgaaggaactctcacctccgtgggcctgaaatgcttgggagttgatggaaccaaatagaaaaactccatgttctgcatgtaagaaacacaatgccttgccctattcagacctgataggattgcctgcttagatgataaaatgaggcagaatatgtctgaagaaaaaaattgcaagccacacttctagagattttgttcaagatcatttcaggtgagcagttagagtaggtgaatttgtttcaaattgtactagtgacagtttctcatcatctgtaactgttgagatgtatgtgcatgtgaccacaaatgcttgcttggacttgcccatctagcactttggaaatcagtatttaaatgccaaataatcttccaggtagtgctgcttctgaagttatctcttaatcctcttaagtaatttggtgtctgtccagaaaaagtcgatttatgtgtattaattggccatcatgatgttatcatatcttattcccttttatgctatgatttattctatcttttgtatttcagaagacatataattaaatctatttaataaataaaaatatatagctttaaaaaaaaaaaaaaaaaa

SEQ ID NO: 404000 - DNA, 1000 bp, Homo Sapiens; identical to SEQ ID NO: 118535

SEQ ID NO: 404001 - DNA, 1000 bp, Homo Sapiens; identical to SEQ ID NO: 223976

SEQ ID NO: 404002 - DNA, 1000 bp, Homo Sapiens; identical to SEQ ID NO: 118536

SEQ ID NO: 404003 - DNA, 1000 bp, Homo Sapiens; identical to SEQ ID NO: 223978

SEQ ID NO: 404004 - DNA, 1000 bp, Homo Sapiens; identical to SEQ ID NO: 223980

SEQ ID NO: 404005 - DNA, 1000 bp, Homo Sapiens; identical to SEQ ID NO: 292337

SEQ ID NO: 404006 - DNA, 1000 bp, Homo Sapiens; identical to SEQ ID NO: 292338

SEQ ID NO: 404007 - DNA, 1000 bp, Homo Sapiens; identical to SEQ ID NO: 118539

SEQ ID NO: 404008 - DNA, 1000 bp, Homo Sapiens; identical to SEQ ID NO: 289738

SEQ ID NO: 404009 - DNA, 1000 bp, Homo Sapiens; identical to SEQ ID NO: 292340

SEQ ID NO: 404010 - DNA, 1000 bp, Homo Sapiens
gcttcatcctcataatgtcagacttttcatgtttcaacttttgcggggcctggcgtacatccaccaccaacacgttcttcacagggacctgaaacctcagaacttactcatcagtcacctgggagagctcaaactggctgattttggtcttgcccgggccaagtccattcccagccagacatactcttcagaagtcgtgaccctctggtaccggccccctgatgctttgctgggagccactgaatattcctctgagctggacatatggggtgcaggctgcatctttattgaaatgttccagggtcaacctttgtttcctggggtttccaacatccttgaacagctggagaaaatctgggaggtgctgggagtccctacagaggatacttggccgggagtctccaagctacctaactacaatccagaatggttcccactgcctacgcctcgaagccttcatgttgtctggaacaggctgggcagggttcctgaagctgaagacctggcctcccagatgctaaaaggctttcccagagaccgcgtctccgcccaggaagcacttgttcatgattatttcagcgccctgccatctcagctgtaccagcttcctgatgaggagtctttgtttacagtttcaggagtgaggctaaagccagaaatgtgtgaccttttggcctcctaccagaaaggtcaccacccagcccagtttagcaaatgctggtgaaaagaaagggcgagatcaccaaggttcttccagggctgtatttctgcagtttcggttttcatttgcttcagcttactaagaagcttcaaatctaactccatactgaacaaggggctttatgtcctcacctatgacctggaatagtttaaatatggtgttcaaggcaatagtacataatagtggaagaaaattcagtggaaggttattgctattgtcatttgcatagaatttaagtgattgatttaaaaaaactggacataaactaagtctaagcag

SEQ ID NO: 404011 - DNA, 1000 bp, Homo Sapiens; identical to SEQ ID NO: 118540

SEQ ID NO: 404012 - DNA, 1000 bp, Homo Sapiens; identical to SEQ ID NO: 118541

SEQ ID NO: 404013 - DNA, 1000 bp, Homo Sapiens; identical to SEQ ID NO: 292343

SEQ ID NO: 404014 - DNA, 885 bp, Homo Sapiens
accataccagtgagggtgaatgtgtacacgcccagcttcctgcctgttactctccacagtatgcgaagaatatccctgacttctagccctgtgcgccttcttttgtttctgctgttgctactaatagccttggagatcatggttggtggtcactctctttgcttcaacttcactataaaatcattgtccagacctggacagccctggtgtgaagcgcaggtcttcttgaataaaaatcttttccttcagtacaacagtgacaacaacatggtcaaacctctgggcctcctggggaagaaggtatatgccaccagcacttggggagaattgacccaaacgctgggagaagtggggcgagacctcaggatgctcctttgtgacatcaaaccccagataaagaccagtgatccttccactctgcaagtcgagatgttttgtcaacgtgaagcagaacggtgcactggtgcatcctggcagttcgccaccaatggagagaaatccctcctctttgacgcaatgaacatgacctggacagtaattaatcatgaagccagtaagatcaaggagacatggaagaaagacagagggctggaaaagtatttcaggaagctctcaaagggagactgcgatcactggctcagggaattcttagggcactgggaggcaatgccagaaccgacagtgtcaccagtaaatgcttcagatatccactggtcttcttctagtctaccagatagatggatcatcctgggggcattcatcctgttagttttaatgggaattgttctcatctgtgtctggtggcaaaatggtgagtggcaggctggtctctggcccttgaggacgtcttagtctggtaaggactcaagagaggtgaatcatggg

SEQ ID NO: 404015 - DNA, 1000 bp, Homo Sapiens; identical to SEQ ID NO: 292344

SEQ ID NO: 404016 - DNA, 1000 bp, Homo Sapiens; identical to SEQ ID NO: 118542

SEQ ID NO: 404017 - DNA, 1000 bp, Homo Sapiens; identical to SEQ ID NO: 118543

SEQ ID NO: 404018 - DNA, 1000 bp, Homo Sapiens
gcatctccttcctccctggggctacggacctgtaccgggaaaagccagcttctccagcagctcagggcctttcagaaggggacagcccagcccgagctgcctgccagcaaggggcccgcgggtgggagggctcaggcccctgaagacacagctggatcacgaactgggaggaagcaacacatgaagctctgtgccaaggggcagagcgcccaggctcgactcccaagaggcaggcccagagccctgggggatgttcctgagccaggggcagccagggaggccctgatgcctcctctggagcaactatagctgcctcaggatgtgtcctgctgtctgccccgtgggaagagcagagaaatcatcaccaccttgggccccacggtgccacgggctcaggcagcacagtagggcgccgggcctttgggacagtgtcccagcttcccctggggttcacccctggctgccaggccactgaggatgggcaggggtctcttctcatcaagccttgtaccaggcaaaagacaggccctgcttggccgtggtcactggccgccaagatcagggctacagatgtctgctctctggaccccacgtgatctggccactggggacccccacccgaccccactcccaatgatgaggggcattttcattgcaagtcaaaggcaagacaggcttccataaagtcccaggaggtccctcctgtagggcacaaggccaggctgcctcccagcccccaggccctctcccacctacagagaccctcccctgccccctccactccggggcctgtgccgccagaaccgggctctgcccccatacgctgccctcgcagcctggcggcctccgctgtggctgcctagctgtcaagagcaaaggctttttttttcttcaaccccattttcttccatttctcccacctttttaatgccagtaacctcactgagaatgttttacagtgatggaaaataaactctgttccaagttcaaaaaaaaaaaa

SEQ ID NO: 404019 - DNA, 1000 bp, Homo Sapiens
cattccaaccttattaatggctgctagcagtatggatgacattctggctatcactggattcaatacatgcttgagcatagtcttttcctcaggtggtatacttaataacgccatagcctctataaggaacgtatgtattagtctgctggcaggaattgttttgggattttttgttcgatattttccaagtgaagaccagaaaaaacttacattgaagagaggattccttgttttgactatgtgtgtttctgccgtcttaggcagccaacgtattggtttacatggatctggaggattatgcacactagtgttgagtttcattgcagggacaaaatggtcccaagaaaagatgaaagtccaaaagattattacgactgtatgggatatttttcaaccacttctttttggtttagttggagcagaagtatctgtttcatcgcttgaatcaaatattgttggcatatctgttgccactctaagtttggcattatgtgttcgaattttaaccacatatctattgatgtgctttgctggttttagttttaaggagaaaatatttattgctttagcatggatgcccaaagctacagtacaggctgtgttaggtcctctggctctagaaacagcaagagtctccgcaccccacttggaaccatatgcgaaggatgtgatgacagtagcatttttagccatcttgatcacagctccaaatggagctctacttatgggcattctggggcctaaaatgcttacacgccattatgatccaagcaaaataaaactgcagttgtcaacattagaacatcattaaaaagtttacctgtcatcatctgcctgcttcttttaatgaattatttcacatgacagaagaattttaaagtagaaatatgtggggactgtacagagaatccaggatttagtaaacatgtgatttcagtacagggcttttcttggactttttactccaaagttaatttaataaaaataatattaaatggaa

SEQ ID NO: 404020 - DNA, 1000 bp, Homo Sapiens
ctatgtcctcaaagccaaccagtccctgaagcacctgcgtctctcagccaatgtgctcctggatgagggtgccatgttgctgtacaagaccatgacacgcccaaaacacttcctgcagatgttgtcgttggaaaactgtcgtcttacagaagccagttgcaaggaccttgctgctgtcttggttgtcagcaagaagctgacacacctgtgcttggccaagaaccccattggggatacaggggtgaagtttctgtgtgagggcttgagttaccctgattgtaaactgcagaccttggtgttacagcaatgcagcataaccaagcttggctgtagatatctctcagaggcgctccaagaagcctgcagcctcacaaacctggacttgagtatcaaccagatagctcgtggattgtggattctctgtcaggcattagagaatccaaactgtaacctaaaacacctacgcctctggagctgctccctcatgcctttctattgtcagcatcttggatctgctctcctcagcaatcagaagcttgaaactctggacctgggccagaatcatttgtggaagagtggcataattaagctctttggggttctaagacaaagaactggatccttgaagatactcaggttgaagacctatgaaactaatttggaaatcaagaagctgttggaggaagtgaaagaaaagaatcccaagctgactattgattgcaatgcttccggggcaacggcacctccgtgctgtgactttttttgctgagcagcctgggatcgctctacgaattacacaggaagcgggattcgggtctctaagatgtcttatgaatgcaggtcagagggtcacatgttaacactagagtctgtcgagaggtaggatttgacactggttttctcactatttttgggagattctgcacgagtcacgcacccccttcacatgacgctatgtactttctcacagggataataaagttagagcactctcgttgca

SEQ ID NO: 404021 - DNA, 1000 bp, Homo Sapiens; identical to SEQ ID NO: 292348

SEQ ID NO: 404022 - DNA, 1000 bp, Homo Sapiens; identical to SEQ ID NO: 292349

SEQ ID NO: 404023 - DNA, 1000 bp, Homo Sapiens; identical to SEQ ID NO: 288652

SEQ ID NO: 404024 - DNA, 1000 bp, Homo Sapiens; identical to SEQ ID NO: 292351

SEQ ID NO: 404025 - DNA, 1000 bp, Homo Sapiens
ttgggtgtgagaataacactggctttgggtagtgccatggccaggagtgggtttccctgcgtctcctcgtcccgagggcgcctgggtcctcccagctgacggcagtaaatccacagtgagttggggcgactgtgaaactggaatgctgttactttgataattactttccagcaggtgttttccttcacaatggttttgtttctttccttctgatctgagaagacatgaacgttttctcttcaccgccgtggggtgtattgactggtcccccatgggctgctggaaaggcccggagatgcatctgtggcctggggccatcaagatcaaagaaccaggaggcctgggagatgcagctggatggggcggcctgcagaccctgccagggggtttgaggaccctcccaggtttcccactgcggaacaggagtgactctggctgccaagataccttcatggtgttcatgacaagtggaatcattattttcaaccattgaagggggatgcaggcaagacaccttcccagctgctcctagaggggacaagccaggccctctctgcagtcctcggcagctccggaaggacacagtcaggggccgggcaaacactttggccacagccccaaacaagcgccaccgtgggagaggagaggctgctgtcactggtaccggatgcagaccccaccctgtctgcaggccacccccacctccctgcagctttgaggctggcggggtctgctcctgggaatggggtgggagccacagggacgacccggggcgggctgatgtcttcttgggggcagaccagagagctcaagtttcagagtcagaattaggcacttggagcgtttttgctggcttgcactttcttattttcttattttagagcgcttaaaaaatccggaaaaatggggtttaaaagaactgtctctttcagtctacatttttgtttaatacgcttgagcaataaacgctgacttgcagacgtgaaaaaaaaaaaaaaaa

SEQ ID NO: 404026 - DNA, 1000 bp, Homo Sapiens
atcacccccgcgcttccttcactccttccttagagccggaggcgcagggaccatgtcggcggagaccgcgagcggccccacagaggaccaggtggaaatcctggagtacaacttcaacaaggtcgacaagcacccggattccaccacgctgtgcctcatcgcggccgaggcaggcctttccgaggaggagacccagaaatggtttaagcagcgcctggcaaagtggcggcgctcagaaggcctgccctcagagtgcagatccgtcacagactaaggagatggcaggcattgacagcttcactccatgaaggccatctctgtttctctcctccgcttaaccaagctgttgtggtttttcagcatagtgttgtatgttccattgctagctgtcctgctgtttaacacagtgttgtattttttttctaaatgtacataattagaaaagaaaataacaataggaagctatgtgtatcttctgtgtaaagcagtggcttcactggaaaaatggtgtggctagcatttccctttgagtcatgatgacagatggtgtgaaaaccatctaagtttgcttttgaccatcacctcccagtagcaatttgctttcataatccatttagcaatccaggcctctgttgaaaagataatatgagggagaagggaacacatttccttctgaacttacttccctaagtcactttccttatgtatcatctaatacaatgatggttgagtgaaaatacagaaggggtgtttgagtattcagatttcataaaacacttccttggaatatagctgcattaacttggaaagaagcctgttgggccagaagacagaaactccaactggcaaaaaagcaagcatctaagaaaaaaaaccaccaaagttcttgaatttactatatttaaatgcattggttaagtttattttgctaaataaagtgaactgctttttgtctctaaaatgatattctaaataaaaccttaactttttgttgaaaaaa

SEQ ID NO: 404027 - DNA, 1000 bp, Homo Sapiens
ggattgggtttgccctaatccgtcatgcggaaatatgaactttgctcgaaggaattcctgcaatcagtgcaatgagcctagaccagaggactctcgtccctcaggaggagatttccgggggagaggctacggtggagagaggggctacagaggtcgtgggggcagaggtggagaccgaggcggctatggtggagacagaagtgggggtggctatggtggagacagaagcagcggtggtggctacagcggagatagaagtgggggcggctatggtggagacagaagtgggggtggctatggtggggacagaggcggcggctatggtggggacagaggaggcggctatggaggagaccgaggaggtggctatggaggagatcgaggtggctatggaggagaccgaggtggaggctatggtggagaccgaggaggctatggaggagatcgaggaggttacggaggagatcgaggaggttatggaggagatcgaggaggctatggaggagacagaagccgggggggctatggaggagaccgtggtggtggcagtggctacggtggagaccgaagtggaggctatggaggagacaggagtggtggcggctatggaggagaccgaggtgggggctacggaggagaccgaggtggctatggaggcaaaatgggaggaagaaacgactacagaaatgatcagcgcaaccgaccatactgatgactgttttgaatgttcctttgtctctgacatgatccatagtgaaattgccagagttttgcctgctgctttcctcgtggcctcttcttgggtagtgaaattaagtgacatttggatttttatttgggtgggagggctgggacagtttttcttctagaaatgtctgttgagatttccccctttagtttccaaccttctccccaacccttggagctaaatgcgttgtaaaatattgccaaaatgaaaagtgttttgtaatactgcaataaaggctgcttgtttttgtgg

SEQ ID NO: 404028 - DNA, 1000 bp, Homo Sapiens; identical to SEQ ID NO: 118546

SEQ ID NO: 404029 - DNA, 1000 bp, Homo Sapiens
gaaatgcatgtacacccctaagatgcccatcgcgcagccctgcaacatttttgactgccctaaatggctggcacaggagtggtctccgtgcacagtgacatgtggccagggcctcagataccgtgtggtcctctgcatcgaccatcgaggaatgcacacaggaggctgtagcccaaaaacaaagccccacataaaagaggaatgcatcgtacccactccctgctataaacccaaagagaaacttccagtcgaggccaagttgccatggttcaaacaagctcaagagctagaagaaggagctgctgtgtcagaggagccctcgttcatcccagaggcctggtcggcctgcacagtcacctgtggtgtggggacccaggtgcgaatagtcaggtgccaggtgctcctgtctttctctcagtccgtggctgacctgcctattgacgagtgtgaagggcccaagccagcatcccagcgtgcctgttatgcaggcccatgcagcggggaaattcctgagttcaacccagacgagacagatgggctctttggtggcctgcaggatttcgacgagctgtatgactgggagtatgaggggttcaccaagtgctccgagtcctgtggaggaggtgtccaggaggctgtggtgagctgcttgaacaaacagactcgggagcctgctgaggagaacctgtgcgtgaccagccgccggcccccacagctcctgaagtcctgcaatttggatccctgcccagcaagaagcagtatcgactcagcatggaacgcctgcaacgttctttgttaggcaaccaagaggcctggcttctcatcctgctgtcaccaactagctctgtggcctagggcgaggtgtctgccctttatgtttccacatctgcaaagtgaactggttgtacctgatgatctgagatcccatgacttgctcacatgtcccatgattctttattttgtaggcagaagcattaaacagctactcctgctgctgtgt

SEQ ID NO: 404030 - DNA, 1000 bp, Homo Sapiens; identical to SEQ ID NO: 292353

SEQ ID NO: 404031 - DNA, 1000 bp, Homo Sapiens
taaactggcctgtttacttcgtctcctaacaaaaaacactttggattcaggttctccacagcagtcttccactggccacagtgaggggagctaggtttccccagtctccagctagaaaaactcagaacatctaaagatctgaaagatggaaaaaagagaactaaaggcttctgttccaaaatttgacaagattccttggcttagtgaggccagccttgtaaacaagccattagtgctcagccttcccagaagatatcctcatacctctgcgacttttctgacttcatccaagaagaatatgaatttgccaattttgtttcaagttccagatgttttatctaaggccaggaggaaccagtgtgactccatgctgctcagaaaccaacagctgtgctccacatgtcaagaaatgaaaatggtacaaccaagaacaatgaaaatcccagatgatccaaaagcatcctttgagaattgtatgagttatagaatgagtcttcatcaacccaaattccagactacacctgagcctttccatgatgacatcccaacagaaaacattcactacagactgcccattctgggccccaggacagctgtcttccacggattactgacagaggcctacaaaactctaaaagagagacaacgttcttccttgcccagaaaggaaccaataggcaagacaacgaggcagtgagcggtaggagctcatcacctcccagactcccagagagaaaataacctcgccaagccaatctttgacactggcaccttctcctcacaattttctctcttctcccaaaagatgatttaattttgccttcctaagattgctggtattctagctcttacctctatgttctttctcacgtctcctaaagacaaaattgtttaatttacatgattataaagatctgtttatgaaaatgaaaaaaaaaaaaaaaaaaaaaaaaaaaaaaaaaaaaaaaaaaaaaaaaaaaaaaaaaaaaaaaaaaaaaaa

SEQ ID NO: 404032 - DNA, 1000 bp, Homo Sapiens; identical to SEQ ID NO: 118547

SEQ ID NO: 404033 - DNA, 1000 bp, Homo Sapiens; identical to SEQ ID NO: 223985

SEQ ID NO: 404034 - DNA, 1000 bp, Homo Sapiens; identical to SEQ ID NO: 292356

SEQ ID NO: 404035 - DNA, 1000 bp, Homo Sapiens; identical to SEQ ID NO: 223986

SEQ ID NO: 404036 - DNA, 1000 bp, Homo Sapiens; identical to SEQ ID NO: 292359

SEQ ID NO: 404037 - DNA, 1000 bp, Homo Sapiens; identical to SEQ ID NO: 118548

SEQ ID NO: 404038 - DNA, 1000 bp, Homo Sapiens
tcctttggtacaacatgctggtggcggaacccaggaatctgtccttcttcctgactccaccatgtgcacgatgggctcagctttcagaagtgctgagttggcagttttcttctgtcaccaaaagaggtctcaatgtggaccagctgaacatgttgggagagaagcttcttggtcctaacgccagccccgatggtctcattccgtggacgaggttttgtaaggaaaatataaatgataaaaattttcccttctggctttggattgaaagcatcctagaactcattaaaaaacacctgctccctctctggaatgatgggtgcatcatgggcttcatcagcaaggagcgagagcgtgccctgttgaaggaccagcagccggggaccttcctgctgcggttcagtgagagctcccgggaaggggccatcacattcacatgggtggagcggtcccagaacggaggcgaacctgacttccatgcggttgaaccctacacgaagaaagaactttctgctgttactttccctgacatcattcgcaattacaaagtcatggctgctgagaatattcctgagaatcccctgaagtatctgtatccaaatattgacaaagaccatgcctttggaaagtattactccaggccaaaggaagcaccagagccaatggaacttgatggccctaaaggaactggatatatcaagactgagttgatttctgtgtctgaagtgtaagtgaacacagaagagtgacatgtttacaaacctcaagccagccttgctcctggctggggcctgttgaagatgcttgtattttacttttccattgtaattgctatcgccatcacagctgaacttgttgagatccccgtgttactgcctatcagcattttactactttaaaaaaaaaaaaaaaagccaaaaaccaaatttgtatttaaggtatataaattttcccaaaactgataccctttgaaaaagtataaataaaatgagcaaaagttgaa

SEQ ID NO: 404039 - DNA, 1000 bp, Homo Sapiens
gttgaggaattgagcaggattctaccctagtccgattgtatagaaaacaccattttgattcaggtattatttttcatatttcaggtttgacttgttcttttcagaaggctaaagtcagaggaatgggggctgggccactcccttggagctctcagatctacagacaagctgtgtgaatgcatagatgtaatcttgtctcaaatactaatacagtggagatttggtttatgttaccattaagttcctctaaaaagtttttcttcctctcttcagagccaaaataaaagtgaactacactgttcagataaggtcacaatctgatgctgtcagtttgaccgagctggttttgcttatggtcatgctgcaatttgttagaataatagggatcaagttttaaatcctcctccttcccttttttctggagtcttgagggccagagtttttgtttttgtttttgtttttgttttcctgcttgctactgttttgtggtgttgaaaagtggtttaaacctgagactaacttaaacacttccttgaccttcttgttgcctgttcatttttgtgccaaggaagtagctgccccagtgtatgtcttgccttctccgcgtcattgttggaagaggagagatgcatcgagcagtcccagctgcttttcatttattacttcttctttccaggacctgacagaagtcagggaagagtccctgggttatgtccaaacttagcacctgcaattgttgggatgtggatggatgtgtgcataagagagagagagaatatgtgtgtgtgtgtgtgcgtctgcgagcgcacacacatgcacaagtgcgaaggagttgcggttgctccatgttctgacttagggcaatttgattctgcacttggggtctgtctgtacagttactcatgtcattgtaatgatttcactcctaactgtgacatttttatcaaatgtgtgaataaatacataaagattggtacaaaaaaaaaaaaaaaaaaaaaaa

SEQ ID NO: 404040 - DNA, 1000 bp, Homo Sapiens; identical to SEQ ID NO: 116025

SEQ ID NO: 404041 - DNA, 1000 bp, Homo Sapiens; identical to SEQ ID NO: 223988

SEQ ID NO: 404042 - DNA, 1000 bp, Homo Sapiens
ttgtgcttctccttctgcccctctggtctttcctgttggtgctccaggcattgtttacctgctcttgctccccgctgtagcccacagccatatctgtcatgcttccccggggccactcacccctgccccaccccgtctgcatgctcacatggacgcggacggacacactcattacacactcacacgccccgactgcacccggtgtccatctataaacatgtcagggcacgtgtgcatacaagcagattcagcactgcctaccaggctctcctgttaccttgcctctctgcttggagggggccccctctgctcacccccagcgtgccccccccggaactgataaggatgagaatggtggtgccagcttctgagggcctgcttggcctcctgggggcaaagcccctctgcccgaagcaataacaacagcagcagaagcaatcccggggagctgccaggggtgtctgtctctgttctccttggcgtttccttcatggccgtgaatcccagctcacccatggacagaagacctcccctcatctgaaagcctttctgccttccttcctgtagctgtcgctttctcaggcttggactgtcccctggttcaccctgtctttgggatgtggcccttgagctgggcgggctccttgggtggattagagagctggccgagctgcaagcacctgagttacctgcgagggtgcccagagtggagcttggcctgagggcgtgttgcagccctggccccaccagtccacagaggcccccaggagcactgcctttcagtggaccgggtgggggctggtgggaggggccccactagctgagcttctgctgccctctgctgtctgctgagatgccaggctagtggagagggcacaccatgtgcccaaatggtgtgatgctccttgtagcaggataccagggtactggggggcaatgctatgattaacttgcttcaaataaaaagttcccgccccataaaaaaaaaaaaaaaaaaaaa

SEQ ID NO: 404043 - DNA, 1000 bp, Homo Sapiens; identical to SEQ ID NO: 223989

SEQ ID NO: 404044 - DNA, 1000 bp, Homo Sapiens; identical to SEQ ID NO: 223990

SEQ ID NO: 404045 - DNA, 1000 bp, Homo Sapiens; identical to SEQ ID NO: 223991

SEQ ID NO: 404046 - DNA, 885 bp, Homo Sapiens; identical to SEQ ID NO: 292366

SEQ ID NO: 404047 - DNA, 1000 bp, Homo Sapiens
caaagtgccaaagcactttcagtgaaacaactagaatctcacagagcccctggaccatccacctgtcaaaaggagaaccaacacctggactcccagaaaatggatatgtcaaacatcgttctaatgctgattcagaaactgcttaatgagaaccccttcaaatgtgaggatccatgcgaaggtgagaacaagtgttctgagcccagggcaagcaaagcagcttccatgtccaacagatctgacaaagcggaagaacaatgccaggagcatcaagaacttgactgtaccagtgggatgaagcaagcgaacgggcaatttatagataaactagtagaatctgtgatgaagctctgccttatcatggctaagtatagcaacgatggggcagcccttgctgagttggaagaacaagcagcctcggcaaataagcccaatttcaggggcaccagatgcattcacagtggtgcaatgccacagaactatcaagactctcttggacatgaagtaattgtcaataatcagtgctctacaaatagcttgcagaagcagctccaggctgtcctgcagtggattgcagcctcccagtttaacgtgcccatgctctacttcatgggagataaggatggacaactggaaaagcttcctcaggtttcagctaaagcagcagagaaggggtacagtgtaggaggtcttcttcaagaggtcatgaagtttgccaaggaacggcaaccagatgaagctgtgggaaaggtggccaggaaacagttgctggactggctgctcgctaacctgtgagctgatccttgactcctcttcatcttagcccccctagcagcattccatcccagccagagcacccccaccatcaggccagtcaactgcacaatacacaactgtatttcccaatacacttgagcagttgcctgtgaatgtaagaggtgtcaacaaactgggaaataaaataaaaaaaaataataaaaaaaaaaaaaaaaaaaaaaaa

SEQ ID NO: 404048 - DNA, 1000 bp, Homo Sapiens
atggttttaaacccaatgaaggagttatcataataggagccacaaacttcccagaggcattagataatgccttaatacgtcctggtcgttttgacatgcaagttacagttccaaggccagatgtaaaaggtcgaacagaaattttgaaatggtatctcaataaaataaagtttgatcaatccgttgatccagaaattatagctcgaggtactgttggcttttccggagcagagttggagaatcttgtgaaccaggctgcattaaaagcagctgttgatggaaaagaaatggttaccatgaaggagctggagttttccaaagacaaaattctaatggggcctgaaagaagaagtgtggaaattgataacaaaaacaaaaccatcacagcatatcatgaatctggtcatgccattattgcatattacacaaaagatgcaatgcctatcaacaaagctacaatcatgccacgggggccaacacttggacatgtgtccctgttacctgagaatgacagatggaatgaaactagagcccagctgcttgcacaaatggatgttagtatgggaggaagagtggcagaggagcttatatttggaaccgaccatattacaacaggtgcttccagtgattttgataatgccactaaaatagcaaagcggatggttaccaaatttggaatgagtgaaaagcttggagttatgacctacagtgatacagggaaactaagtccagaaacccaatctgccatcgaacaagaaataagaatccttctaagggactcatatgaacgagcaaaacatatcttgaaaactcattcttgatgtggtgtaattgaagggtgtgaaatgctttgtcaatcatttgtcacatttatccagtttgggttattctcattatgacacctattgcaaattagcatcccatggcaaatatattttgaaaaaataaagaactatcaggattgaaaacaaaaaaaaaaaaaaaaaaaaaaaaaaaaaaa

SEQ ID NO: 404049 - DNA, 1000 bp, Homo Sapiens; identical to SEQ ID NO: 292367

SEQ ID NO: 404050 - DNA, 1000 bp, Homo Sapiens; identical to SEQ ID NO: 223992

SEQ ID NO: 404051 - DNA, 1000 bp, Homo Sapiens; identical to SEQ ID NO: 223993

SEQ ID NO: 404052 - DNA, 1000 bp, Homo Sapiens; identical to SEQ ID NO: 292370

SEQ ID NO: 404053 - DNA, 1000 bp, Homo Sapiens; identical to SEQ ID NO: 292372

SEQ ID NO: 404054 - DNA, 1000 bp, Homo Sapiens; identical to SEQ ID NO: 292373

SEQ ID NO: 404055 - DNA, 1000 bp, Homo Sapiens
ttccggggagcccagcgctgccgagggcacctttgctgtgtcctggcccagccagacggccgagccggggcctgcccaaccagcagaggcctcggaggtggcgggtgggacccaacctgcggctggagcccaggagccaggggagacggcggcaagtgaagcagcctccagctctcttcctgctgtcgtggtggagaccttcccagcaactgtgaatggcaccgtggagggcggcagtggggccgggcgcttggacctgcccccaggtttcatgttcaaggtacaggcccagcacgactacacggccactgacacagacgagctgcagctcaaggctggtgatgtggtgctggtgatccccttccagaaccctgaagagcaggatgaaggctggctcatgggcgtgaaggagagcgactggaaccagcacaaggagctggagaagtgccgtggcgtcttccccgagaacttcactgagagggtcccatgacggcggggcccaggcagcctccgggcgtgtgaagaacacctcctcccgaaaaatgtgtggttcttttttttgttttgttttcgtttttcatcttttgaagagcaaagggaaatcaagaggagacccccaggcagaggggcgttctcccaaagattaggtcgttttccaaagagccgcgtcccggcaagtccggcggaattcaccagtgttcctgaagctgctgtgtcctctagttgagtttctggcgcccctgcctgtgcccgcatgtgtgcctggccgcagggcggggctgggggctgccgagccaccatgcttgcctgaagcttcggccgcgccacccgggcaagggtcctcttttcctggcagctgctgtgggtggggcccagacaccagcctagcctggctctgccccgcagacggtctgtgtgctgtttgaaaataaatcttagtgttcaaaacaaaatgaaacaaaaaaaaaatgataaaaactctcaaaaaaaaaaaaaaaaa

SEQ ID NO: 404056 - DNA, 1000 bp, Homo Sapiens; identical to SEQ ID NO: 118552

SEQ ID NO: 404057 - DNA, 1000 bp, Homo Sapiens; identical to SEQ ID NO: 118553

SEQ ID NO: 404058 - DNA, 1000 bp, Homo Sapiens
agtacctggggcaaaaggtggccgtgaagaatatcaagtgtgatgtgacagcccaggccttcctggacgagacggccgtcatgacgaagatgcaacacgagaacctggtgcgtctcctgggcgtgatcctgcaccaggggctgtacattgtcatggagcacgtgagcaagggcaacctggtgaactttctgcggacccggggtcgagccctcgtgaacaccgctcagctcctgcagttttctctgcacgtggccgagggcatggagtacctggagagcaagaagcttgtgcaccgcgacctggccgcccgcaacatcctggtctcagaggacctggtggccaaggtcagcgactttggcctggccaaagccgagcggaaggggctagactcaagccggctgcccgtcaagtggacggcgcccgaggctctcaaacacgggaagttcaccagcaagtcggatgtctggagttttggggtgctgctctgggaggtcttctcatatggacgggctccgtaccctaaaatgtcactgaaagaggtgtcggaggccgtggagaaggggtaccgcatggaaccccccgagggctgtccaggccccgtgcacgtcctcatgagcagctgctgggaggcagagcccgcccgccggccacccttccgcaaactggccgagaagctggcccgggagctacgcagtgcaggtgccccagcctccgtctcagggcaggacgccgacggctccacctcgccccgaagccaggagccctgaccccacccggtggggcccttggccccagaggaccgagagagtggagagtgcggcgtgggggcactgaccaggcccaaggagggtccaggcgggcaagtcatcctcctggtgcccacagcaggggctggcccacgtagggggctctgggcggcccgtggacaccccagacctgcgaaggatgatcgcccgataaagacggattctaaggactctaaaaaaaaaaaaaaaaaaaa

SEQ ID NO: 404059 - DNA, 1000 bp, Homo Sapiens; identical to SEQ ID NO: 292376

SEQ ID NO: 404060 - DNA, 1000 bp, Homo Sapiens; identical to SEQ ID NO: 223996

SEQ ID NO: 404061 - DNA, 1000 bp, Homo Sapiens; identical to SEQ ID NO: 292379

SEQ ID NO: 404062 - DNA, 1000 bp, Homo Sapiens; identical to SEQ ID NO: 118555

SEQ ID NO: 404063 - DNA, 1000 bp, Homo Sapiens; identical to SEQ ID NO: 118555

SEQ ID NO: 404064 - DNA, 456 bp, Homo Sapiens
gttcccagaagctccccaggctctagtgcaggaggagaaggaggaggagcaggaggtggagattcccagttaaaaggctccagaatcgtgtaccaggcagagaactgaagtactggggcctcctccactgggtccgaatcagtaggtgaccccgcccctggattctggaagacctcaccatgggacgcccccgacctcgtgcggccaagacgtggatgttcctgctcttgctggggggagcctgggcagggcgattctggaggccccctggtgtgtgatggtgcactccagggcatcacatcctggggctcagacccctgtgggaggtccgacaaacctggcgtctataccaacatctgccgctacctggactggatcaagaagatcataggcagcaagggctgattctaggataagcactagatctcccttaataaactcacaactctctggttc

SEQ ID NO: 404065 - DNA, 1000 bp, Homo Sapiens; identical to SEQ ID NO: 118556

SEQ ID NO: 404066 - DNA, 1000 bp, Homo Sapiens; identical to SEQ ID NO: 223999

SEQ ID NO: 404067 - DNA, 1000 bp, Homo Sapiens; identical to SEQ ID NO: 118557

SEQ ID NO: 404068 - DNA, 1000 bp, Homo Sapiens; identical to SEQ ID NO: 292383

SEQ ID NO: 404069 - DNA, 1000 bp, Homo Sapiens; identical to SEQ ID NO: 292384

SEQ ID NO: 404070 - DNA, 1000 bp, Homo Sapiens; identical to SEQ ID NO: 292385

SEQ ID NO: 404071 - DNA, 1000 bp, Homo Sapiens; identical to SEQ ID NO: 224001

SEQ ID NO: 404072 - DNA, 1000 bp, Homo Sapiens; identical to SEQ ID NO: 224002

SEQ ID NO: 404073 - DNA, 1000 bp, Homo Sapiens; identical to SEQ ID NO: 224003

SEQ ID NO: 404074 - DNA, 1000 bp, Homo Sapiens; identical to SEQ ID NO: 224005

SEQ ID NO: 404075 - DNA, 1000 bp, Homo Sapiens
cacactccaggggtctaaaacataaaacagttgtgtttagggaaccttaagtcatgcagacatgactgttctctttgtacaagtgtgaatcaaaatatgtatctctttttcagagtctggttaagctatgtcattgtctactgcatagtttcctgagtctgtttgtaaagtgcttatggctaacagttcagttctgtatttgttgacaggtaaataagtggagttgagtgccatctttgaaaaaattaccctctagctctaacactgaaaataataataaattgtagatctctgcaactaagtttaaagcagtgtgactgtgttgcttaaatatcaagtattgtttataaccaccaaaaaaaaaagccctggtagttttttggcaccttatgtttaaatcagattcttagatttggagtagacctgaccttgttatttattagataacattttgaatgtatccattggatttctaaaatgtattgtgaatttctcagacaaacaggatttatgctggagctctgttttgcttagaaataaaatatttagtagtttatttctgctctaattaaaatgtcactttacccctggataaaggcactttcactgcctgtcactgatcagcagatactgacttgttgccattaagtgaacttgacttcttatgtgtgctctatgagtttgttgtaattttcttcttgaaattgtgatttttcactgacagtaatgacaaatttaatgtatgtaattgtctatgcattttaagttaaactgcctaaaatgtgatttgagacatatacatatgtttgtattataaattgtaagcaatcagtttgagatactaggttttatcacctgctgctgtatttgtaaacaaagacaaatgttgctttaagaagtaattataattaggaataggctatggatgtgatacttggtattttttaagataaacttgtttgcttttgtgtattaaaaaaaaaaaaaaaaaaaaaaaaaa

SEQ ID NO: 404076 - DNA, 1000 bp, Homo Sapiens; identical to SEQ ID NO: 292389

SEQ ID NO: 404077 - DNA, 1000 bp, Homo Sapiens; identical to SEQ ID NO: 292391

SEQ ID NO: 404078 - DNA, 1000 bp, Homo Sapiens; identical to SEQ ID NO: 292394

SEQ ID NO: 404079 - DNA, 1000 bp, Homo Sapiens; identical to SEQ ID NO: 292396

SEQ ID NO: 404080 - DNA, 1000 bp, Homo Sapiens; identical to SEQ ID NO: 292398

SEQ ID NO: 404081 - DNA, 785 bp, Homo Sapiens; identical to SEQ ID NO: 26348

SEQ ID NO: 404082 - DNA, 1000 bp, Homo Sapiens; identical to SEQ ID NO: 292399

SEQ ID NO: 404083 - DNA, 1000 bp, Homo Sapiens; identical to SEQ ID NO: 292400

SEQ ID NO: 404084 - DNA, 1000 bp, Homo Sapiens; identical to SEQ ID NO: 118561

SEQ ID NO: 404085 - DNA, 1000 bp, Homo Sapiens; identical to SEQ ID NO: 292402

SEQ ID NO: 404086 - DNA, 1000 bp, Homo Sapiens; identical to SEQ ID NO: 292403

SEQ ID NO: 404087 - DNA, 1000 bp, Homo Sapiens
acgctgttcaagtccaaagtgtggaagtcaaacccaccgggcttgggggtgcccacaccccagacgctgcagctgcattcactgacccatgtcatagaggagaagggtgtgaagctgaagctgacggtgacggacacgcccggcttcggggaccagatcaacaatgacaactgctgggaccccatcctgggctacatcaacgagcaatacgagcagtacctgcaggaggagatcctcatcacccgccagcgccacatcccagacacccgggtgcactgctgcgtgtactttgtaccacccactgggcactgcctgcggcccctggacattgagttcctgcagcggctgtgccggactgtgaatgtggtgcccgtgattgccagggccgacagcctgaccatggaggagcgagaggccttcaggcgcaggatccagcagaacctgaggacccactgcatcgacgtctacccccagatgtgctttgacgaggacatcaatgacaaaatcctcaacagcaagttacgggaccgaatcccttttgccgtggtaggggctgaccaagagcacctgatgaacgggaggtgtgtcctgggccggaagaccaagtggggcatcattgaagtggagaacatggcgcactgtgaatttcctctcctgagagacctgcttatccgctcccacctccaagacctgaaggacataacccacaacatccactatgagaactaccgcgtcatcagactcaatgaaagccacctactgccccgcgggcccggctgggtgaacctggccccggcctccccaggacagctgaccaccccccggaccttcaaggtctgcaggggggcccatgacgattctgatgatgagttctgaccaccggcggatcccggggctgctgggcttcctgagtccccagcggctctcaacacacacctatgtaccagagcatctattaaatgtgagccttgctttttatgaaaagctgtgctttgaaaac

SEQ ID NO: 404088 - DNA, 1000 bp, Homo Sapiens; identical to SEQ ID NO: 292406

SEQ ID NO: 404089 - DNA, 1000 bp, Homo Sapiens; identical to SEQ ID NO: 118563

SEQ ID NO: 404090 - DNA, 1000 bp, Homo Sapiens
aaacaccccctgagcgtcatgactctggtggttccctgcccctgacaccgcggatggagagccactcagaggatgaagatcttgctggggctgtcggtggcctgggctggaacagtaggagtccccggacccagagcccagggggctgctcagcggaggctgtgctggcccggaagaaacaccgtcggcggccatcgaagcgcaaaaggcactggcgaccctacctggagctgagctgggctgagaaacaacagcgggatgagaggcagagccagagggcctcccgggtccgcgaagagatgttcgccaaaggccagcccgtggccccctacaacaccacccagttcctgatgaatgacagggacccggaggagcccaacttggatgtgccccatgggatctcccacccaggttccagtggggagagtgaggccggggacagtgatgggcggggccgagcgcacggtgagttccagcggaaggacttctctgagacttacgaacgcttccacaccgagagcctgcagggccgcagcaagcaggagctggtgcgagactacctggagctggagaagcggctgtcgcaggcggaggaggagactaggaggctgcagcagctgcaggcgtgcaccggccagcagtcctgccgccaggtggaggagctggctgccgaggtccagaggctccggaccgaaaaccagcggcttcgtcaggagaaccagatgtggaaccgagagggctgccgctgtgatgaggagccgggtacctaggggtgcctcccagcctggtggacccaaggagaaggtcccatttcgtgcacactcaggccagctgggtctcaaggaggcaggtggcagatgaaaaccaccgtcaacaccctgtgcgccctgagaacagctaaatcggttcagactcccacctcaccgtttccatagttggctcttttgtgtcatcttaccctttacagagaaattaaatggccttggtgggaccaaatggg

SEQ ID NO: 404091 - DNA, 1000 bp, Homo Sapiens; identical to SEQ ID NO: 292408

SEQ ID NO: 404092 - DNA, 1000 bp, Homo Sapiens; identical to SEQ ID NO: 292409

SEQ ID NO: 404093 - DNA, 1000 bp, Homo Sapiens
ggcttggaggccaacaaactacagctgcaagagaagcagacattcccgccgtgcaacgcggagtggagctcagccaggggcagccggctctggtgctcccagaagagtggaggtgtgagcagagactggattggcgtccccaggaagctgtataagccaggtgctaaggagccccgctgcgtgtgtgtgagaaccaccggcccccctagtggccagatgccggacaaccctccacacagaaatcgtggggacctggaccacccaaacttggcagagtacacaggctgcccaccgctagccatcacatgctcctttccactctaagccgtagcctcttctgttaataacacacagagagctctgccaagcacctgagtaggcccttgacacttgtgtgccctgggatgcctcctggcgcgaatcaggaggttctggaaggactctggctatattctgcaaatgtggctcatgccccttaccgtggctcggcgttgtggtgcctgagggacagccggccacctgcccagtactggtcagcttttcaacactattccctttgacctactggccatcttcctcacagccctcagatatcaacgggcacaaataagaccaactcaatttccacttgaatttacaaccaaaagcctgctgagttgattacagctgggccaatacagtacgaggcaataacaaattagtgtgggttgattctggaattggaaaagcttttgcttgtatggatacagcaaatccagatgtctctgaacaaagcaacaatttaaagcaacgacattttctgtcctttaagcacttaaaatcaggtgtggtgtgttttcaaaggcagaagtctgcattttgagcaaaaggtggcttcccagctctaacaaggtaactggttagcatgacattaaagcttgggcaaggcttcaaacttaaaaaaaaaaaaaaaaaaaaaaaaaaaaaaaaaaaaaaaaaaaaaaaaaaaaaaaaaaaaaaa

SEQ ID NO: 404094 - DNA, 1000 bp, Homo Sapiens
tcggggacactggggagcgataccttggcaagtcagagaaccggaccaacaagttcgagagaggaacggctgacaccttcatcatcgaggccgctgacctaggcgtcatctacaagatcaagctccgccatgacaactccaagtggtgcgcagactggtacgtggagaaggtggagatctggaatgacaccaacgaggacgagttcctgttcctatgcgggcgctggctctccctgaagaaggaggatgggagactcgagaggctcttttacgagaaggagtacactggggaccgcagcagcaactgcagcagccctgctgacttctgggagatcgccctgagctccaagatggccgatgtcgacatcagcacagtgaccgggcccatggctgactacgttcaagagggcccaattattccctactatgtgtcagtcaccactgggaagcacaaggacgcggccactgacagccgagccttcatctttctcatcggggaggatgatgaacgtagtaagcgcatctggttggactacccccgagggaagaggggcttcagccgtggctctgtggaggagttctacgtcgcaggcttggatgtgggcatcatcaagaaaatagaggttctctatgaaatgacggtgtggacaggggatgtggttggcgggggcactgactccaacatcttcatgaccctctacggcatcaacgggagcacagaggagatgcagctggacaaaaggaaagccaggtttgagcgggagcagaacgacaccttcatcatggagatcctagacattgctccattcaccaagatgcggatccggattgatggcctgggcagtcggccggagtggttcctggagagggtaaaatgtctagaccctcactcttccttccagccaccacccaccccttcccctggttcctctggcttgtcaatggaccttgttaaagcacaaatgtcactgtagaggatcattacatgaacccagcccat

SEQ ID NO: 404095 - DNA, 1000 bp, Homo Sapiens; identical to SEQ ID NO: 292410

SEQ ID NO: 404096 - DNA, 1000 bp, Homo Sapiens
cctgggggtctgcgggccccagggacggctctcctggcaggcacccagccatctcaccctgcagctggaccctgtgagcctcaaccacagcggggcgtacgtgtgctgggcggccgtagagattcctgagttggaggaggctgagggcaacataacaaggctctttgtggacccagatgaccccacacagaacagaaaccggatcgcaagcttcccaggattcctcttcgtgctgctgggggtgggaagcatgggtgtggctgcgatcgtgtggggtgcctggttctggggccgccgcagctgccagcaaagggactcaggtaacagcccaggaaatgcattctacagcaacgtcctataccggccccgggggcccccaaagaagagtgaggactgctctggagaggggaaggaccagaggggccagagcatttattcaacctccttcccgcaaccggccccccgccagccgcacctggcgtcaagaccctgccccagcccgagaccctgccccagccccaggcccggccaccccgtctctatggtcagggtctctcctagaccaagccccacccagcagccgaggccaaaagggttccccaaagtgggagaggagtgagagatcccaggagacctcaacaggaccccacccataggtacacacaaaaaaggggggatcgaggccagacacggtggctcacgcctgtaatcccagcagtttgggaagccgaggcgggtggaacacttgaggtcaggggtttgagaccagcctggcttgaacctgggaggcggaggttgcagtgagccgagattgcgccactgcactccagcctgggcgacagagtgagactccgtctcaaaaaaaacaaaaagcaggaggattgggagcctgtcagccccatcctgagaccccgtcctcatttctgtaatgatggatctcgctcccactttcccccaagaacctaataaaggcttgtgaagaaaaaaaaaaaaaaaaaaa

SEQ ID NO: 404097 - DNA, 1000 bp, Homo Sapiens; identical to SEQ ID NO: 292412

SEQ ID NO: 404098 - DNA, 1000 bp, Homo Sapiens
tggtgtcagcatttgatgtcctgcagcaaggcaacatcagtattttgtcccggcgttgtctccttcgtccctcggagcctgacagcactggctacatagtcattggcgtcatgtatggcctatgcttcttcatcaccctgtttggcagctatgtcagccggctgcggcgagtcatctgtgcctcctactacccatcccgggagcaggagaggatctcctacctgtacaatgtacttctgagccgccgaaccaatctgttggctgccctgcaccgatcagtgaggcggcgggcggctgaccagggccacagaagtgccttcctagtgctggccagtcggtgcccctgcctaggtccatttgtcagccacttttggctgcatcaggcctactgcctgggctgtgggcagccccaggatgagggagacatggagaacactgtgtcctgcagtacccccggctgccaaggatttatatgcaagtggcattgcagcagctccctagtgtgcaccccttgacaaggatggttcatccaggtctctactgcctcacttgcttccgcctcctggacaatacctgctccgtgtgtgcatctcccctctcctaccagggggacctggacctggagctggactccagcgatgaggagggccctcagctatggctggctgcagctcaaaggaaggaccctgagcaggcatggttattgcagcaacagctccaagaagtgctcggcaggagcctctcaatggagtccacttccgagtccagtgacctggatgaggagaaggggcctcagcagaggaagcacgggcagcagcccttacctgaagcccatcagcctgtcagcattctcaccagccctgagccccacagaccacctgagacatcctccgccactaaaggagcccccactccagcttcagaaccctcagtccctctctcacctccctctcttcctgatccttcccacccaccccccaaataaaccaaaagtggacac

SEQ ID NO: 404099 - DNA, 1000 bp, Homo Sapiens
gccgcagacgatgcttggagaagattcggcaccaggaaatggtcctagaaagtgctcacagacattgatgggttttaaaacaaaaacagaaacagaacacagtgtgagggggtggaaacccagaggagctcttcagaatcaaagtgttctctcaacttcttggtcccattggcctccaaaacccaggagaaccagctccacccctgagccaagctgaacttccagtcttcaggaaattgctgacatggaggcaagtcccactgctctcttcagcgaggccaggtcccccggccgcgagaagcacggtgcttctgaaggtccccagcgcagcctggctacaaatactctttcttccatgaaggcctcagagaatctctttggatcctggctaaatctcaacaagtccaggctactgacgcgagcagccaagggcttcctgagcaagccactgatcaaagctgtggagtcgacctccgggaaccagagcttcgactacatacctctggtgtctctgcagctggcctccggagccttcctgctcaacgaagccttctgtgaggccacgcacatccccatggagaagctcaagtggacgtcccccttcacctgccatcgagtgtccctcaccacccgcccgtctgagtccaagaccccgagtccccagctgtgcaccagctccccgcctaggcacccgtcctgtgacagcttctccctggagcctctggccaagggcaagctgggcctggagccgagggcagtggtggagcacactgggaagctgtgggccacggtggtggggctggcatggctggagcacagttcggcctcctacttcactgagtgggagttggtggctgccaaggccaactcatggctggagcagcaggaagtacccgagggccgcacgcagggcacactcaaggccgctgcccgccagctgtttgtgcttctgcggcactgggatgagaatctcgagttcaatatgctctgctataacccg

SEQ ID NO: 404100 - DNA, 1000 bp, Homo Sapiens; identical to SEQ ID NO: 118564

SEQ ID NO: 404101 - DNA, 1000 bp, Homo Sapiens; identical to SEQ ID NO: 224014

SEQ ID NO: 404102 - DNA, 1000 bp, Homo Sapiens; identical to SEQ ID NO: 292415

SEQ ID NO: 404103 - DNA, 1000 bp, Homo Sapiens; identical to SEQ ID NO: 224015

SEQ ID NO: 404104 - DNA, 1000 bp, Homo Sapiens; identical to SEQ ID NO: 118565

SEQ ID NO: 404105 - DNA, 1000 bp, Homo Sapiens; identical to SEQ ID NO: 224016

SEQ ID NO: 404106 - DNA, 886 bp, Homo Sapiens; identical to SEQ ID NO: 292417

SEQ ID NO: 404107 - DNA, 1000 bp, Homo Sapiens
tcggataatgtgaaccactaagggggttgtgactgggctgtgtgagggtggggtgggagggggcccagcaaccccccaccctccccatgcctctctcttctctgcttttcttctcacttccgagtccatgtgcagtgcttgatagaatcacccccacctggaggggctggctcctgccctcccggagcctatgggttgagccgtccctcaagggcccctgcccagctgggctcgtgctgtgcttcattcacctctccatcgtctctaaatcttcctcttttttcctaaagacagaaggtttttggtctgttttttcagtcggatcttctcttctctgggaggctttggaatgatgaaagcatgtaccctccacccttttcctggccccctaatggggcctgggccctttcccaacccctcctaggatgtgcgggcagtgtgctggcgcctcacagccagccgggctgcccattcacgcagagctctctgagcgggaggtggaagaaaggatggctctggttgccacagagctgggacttcatgttcttctagagagggccacaagagggccacaggggtggccgggagttgtcagctgatgcctgctgagaggcaggaattgtgccagtgagtgacagtcatgagggagtgtctcttcttggggaggaaagaaggtagagcctttctgtctgaatgaaaggccaaggctacagtacagggccccgccccagccagggtgttaatgcccacgtagtggaggcctctggcagatcctgcattccaaggtcactggactgtacgtttttatggttgtgggaagggtgggtggctttagaattaagggccttgtaggctttggcaggtaagagggcccaaggtaagaacgagagccaacgggcacaagcattctatatataagtggctcattaggtgtttattttgttctatttaagaatttgttttattaaattaatataaaaatctttgtaaatctctaaaa

SEQ ID NO: 404108 - DNA, 1000 bp, Homo Sapiens
ctctttgtccttaccttcttcagtcttgtttcactcaacttctcagaccctggcatcttacatcaaggctccgctgagcagggccccttgacggtgcacgtggtgtgggtgaaccacggggccttccgcctgcaatggtgtccaaagtgctgcttccaccgcccgccccggacttaccactgcccctggtgcaacatctgtgtggaggactttgaccaccactgcaagtgggtcaataactgcatcggtcaccgcaacttccgcttcttcatgctgcttgtcctgtccctgtgcctctactcgggcgccatgctggtcacctgtctcatcttcctggtgcgcacaacccacctgcccttctccaccgacaaggccatcgccatcgtggtggccgtgtccgccgcgggcctcctggtgccgctgtccctcctgctgctgatccaggcactgtccgtgagctcggccgaccgcacctacaagggcaagtgcagacaccttcagggatacaaccccttcgaccagggctgtgccagcaactggtatttaacaatttgtgcaccactgggacccaaggctgctgcatcctggatgaggctggcctcagcttcctgcagagctaagccctgggccgtgtgcttcccaagctgaggcgggcaggggagccggaccagggaggacggtggcccctgcatctggcctgctgctccccagttccacacgggcccagtgctgcccctgctgctgcaggagcccccaggcgaggttcggccttcctctcgcccctgtgcacccggagatgcccacagcaccagcacctgagctcacctccgaacccgcctcctgaacccgcctcctgaacctgcctccttacctcccacttcctgagccctgagtggaagcctttctgtgccttgccctttgcccactcccctggtgggactgccaagaccctcaatgcccattaaatactcttgcctgcctctcaaaaaaaaaaaaaaaa

SEQ ID NO: 404109 - DNA, 1000 bp, Homo Sapiens; identical to SEQ ID NO: 224018

SEQ ID NO: 404110 - DNA, 1000 bp, Homo Sapiens; identical to SEQ ID NO: 224019

SEQ ID NO: 404111 - DNA, 1000 bp, Homo Sapiens
atccgcatgcgccgaagagctcccgcttgtctcgttccgttctgcgttggcttcagggtctggatctcagcttcttccccaggaacatcaacagagatttttcaaatggcttcctaattgcagaaatattctgtatatattacccctgggaacttgaattatcatcctttgaaaacgggacctctttaaaagtcaagttggataactgggcacagttggagaagttcctggcaagaaaaaaatttaaattacctaaagaactaatccatggaacaattcattgtaaagctggagtgcctgaaatattgatagaagaggtttacactttattaacacatcgagaaattaaaagtatccaggatgactttgtgaatttcacggactatagctaccagatgcgtttacccctggtttccaggtctacagtttcgaagtctattaaagataacattaggttatcagaattactaagcaatcccaacatgctgaccaatgaacttaaagcggagttcctcatccttttacatatgttgcaaagaaaattaggcagaaaattgaatccagaatggtttgatgtgaaaccaacagtgggagaagttactctcaatcaccttcctgcccaagcctctgggcgcagatataatttaaaagttaaaagaggaagagttgtccctgttttaccaaatataggtagtggtggcagttcacatagagaaatacatgtgaagcaagctggacaacattcttattactctgctatgaaacctatcagaaacatggacaagaaaccttgaaaagcacctgtcaaatggctttgaagaagtgatgccaccatctctagccataataaagaaacagaatcacctagtattggatgtatttcaataataaatagagtggtgtcttttccataattgtgttaaagaacatttcttttccattcaatttgtttattaaactcctatgccaggcattgttgaaaatacaaaattaaataaat

SEQ ID NO: 404112 - DNA, 948 bp, Homo Sapiens
tggagaaaaggcagaaccagagtagagattgacagtgagctgagccaatcaggctgtgaatctgcagcagtgatcccaggtcctccaattaatactaagagagtggaccagggcccctgaggaagacagatggcagggacagcgcgccatgaccgagagatggcgatccaggccaagaaaaagctcaccacggccaccaaccccattgaaagactccgactgcagtgcctggccaggggctctgctgggatcaaaggacttggcagagtgtttagaattatggatgacgataataatcgaacccttgattttaaagaatttatgaaagggttaaatgattatgctgtggtcatggaaaaagaagaggtggaagaacttttccggaggtttgataaagatggaaatggaacaatagacttcaatgaatttcttctcacattaagacctccaatgtccagagccagaaaagaggtaatcatgcaagcttttagaaagttagacaagactggagatggtgttataacaatcgaagaccttcgtgaagtatataatgcaaaacaccacccaaagtaccagaatggggaatggagtgaggaacaagtatttaggaaatttctggataactttgattcaccctatgacaaagatggattggtgacccctgaggagttcatgaactactatgcaggtgtgagcgcatccattgacactgatgtgtacttcatcatcatgatgagaaccgcctggaagctttaagcacatgacctggggaccaggccctgggacagccatgtggctccaaatgactaaatgtcagctcaaaaaccagaatcgtatttgatttcacactcatcctaatgtttttttctgtgtcaaaatattgcattttctggggccaaaaaacaggcagaaataaaagacattgagtagtcaaaaaaaaaaaaaaaa

SEQ ID NO: 404113 - DNA, 1000 bp, Homo Sapiens; identical to SEQ ID NO: 224020

SEQ ID NO: 404114 - DNA, 1000 bp, Homo Sapiens; identical to SEQ ID NO: 118567

SEQ ID NO: 404115 - DNA, 1000 bp, Homo Sapiens; identical to SEQ ID NO: 292423

SEQ ID NO: 404116 - DNA, 1000 bp, Homo Sapiens; identical to SEQ ID NO: 292424

SEQ ID NO: 404117 - DNA, 1000 bp, Homo Sapiens; identical to SEQ ID NO: 292426

SEQ ID NO: 404118 - DNA, 1000 bp, Homo Sapiens; identical to SEQ ID NO: 292427

SEQ ID NO: 404119 - DNA, 1000 bp, Homo Sapiens; identical to SEQ ID NO: 292428

SEQ ID NO: 404120 - DNA, 1000 bp, Homo Sapiens; identical to SEQ ID NO: 292429

SEQ ID NO: 404121 - DNA, 1000 bp, Homo Sapiens; identical to SEQ ID NO: 292430

SEQ ID NO: 404122 - DNA, 1000 bp, Homo Sapiens; identical to SEQ ID NO: 292431

SEQ ID NO: 404123 - DNA, 1000 bp, Homo Sapiens; identical to SEQ ID NO: 224024

SEQ ID NO: 404124 - DNA, 1000 bp, Homo Sapiens; identical to SEQ ID NO: 118569

SEQ ID NO: 404125 - DNA, 1000 bp, Homo Sapiens
gccaatgaggtgaactgcccattgcaggtggccttggagtgtctgtaccatcgagagaagaggattgggattgatttggtccatgacaacgtggagaaaaaccttatccgggaagtggatttgctaaaatgttgccaagaacagatgagaaaattagctcaaagaattgatatccagatgcgggataaccgggatgctcagcacgtgctggagagggacctcgaagacaaaagctcggcccagtgtatcgatgagaagtgctttaacctgagaaatacgtcagactgcatcagcttcttccacggcatggagaaaattgacggcacgatctccgtacctgagacctgggccaagttcagtaacgacaacatcaaacactctcagaacatgcgggccaactccatccagctgcgggaggaggcggagcacctctttgagaccttgtcggatcagatgtggaggcagttcacagacaccaacctggccttcaacgcccgcatctctgaggtgacggatgtgaagaataagctgcagacgcagctggcgaagacgctgcaggagatcttccaggccgagaacaccatcatgctgctggaaaggtccatcatggccaaggagggcccgctgaaggtggcccagacaaggctggagtgccggacccggcgccccaacatggagctgtgcagggacatcccgcagttgaagctggtgaacgaggtgttcaccatcgacgacaccctgcagaccctcaagctgcggctgcgggagacacaggacacgctgcagctgctggtcatgaccaagtgccggctggagcacgagctcgccatcaaggccaacaccctctgcatcgacaaggagaagtgcatgggcatgcgtaagaccttcccctgcaccccgcgcctggtgggccacacctgagcaccgccctggcgcctcattccgcgctggcgtaaaattggaaaaggctgagaaacaaagtaaaacagtattttgtttg

SEQ ID NO: 404126 - DNA, 937 bp, Homo Sapiens
agttcacctgcagaggaggctccagaaagcggcatgtcccctttgctctttggggctgggctggtcgttctgaatctagtgacgtctgccaggagccagaagacagaacctctaagtggctctggggaccagccactcttccgtggagctgatcgatatgactttgccatcatgatacctccaggaggcacggaatgcttttggcaatttgcccaccagactggatacttctatttcagttgcgaggttcagcggacagtggggatgtcacatgaccggcatgttgctgccacggcacataacccacagggatttctcatagacacctcccagggtgttcggggccagattaacttctctacccaagagacaggtttttatcagctttgtctaagtaatcagcataatcacttcggttctgtgcaagtgtacctcaactttggggtcttctatgaggggcctgagactgatcacaaacagaaggaaagaaaacaactgaatgatactctggatgcaattgaggacggcacacaaaaggtgcagaacaatatctttcacatgtggcgatactacaactttgcccggatgaggaaaatggctgactttttccttatccaatcaaactataactacgtgaactggtggtcgacagcccagagccttgttattattctttctgggatcctgcaactgtatttcttgaagcgtctcttcaatgttccaacaactacagatacaaagaagccaagatgctaagctaaggtgactatagcaccctggctgttttcttctggggcttagtcgaatcagctttgtaatgttatgggacaaaaatcaattatctcattaatgttttagtctgctgcacacatctaaaaaagcaaaatggcaataaaatcataacagcaaaaaaaaaaaaaaaaaaaaaaaaaaaaaa

SEQ ID NO: 404127 - DNA, 1000 bp, Homo Sapiens; identical to SEQ ID NO: 292433

SEQ ID NO: 404128 - DNA, 1000 bp, Homo Sapiens; identical to SEQ ID NO: 224026

SEQ ID NO: 404129 - DNA, 1000 bp, Homo Sapiens
gagacagaaatcatgcatcaaactatggtgcagaagaagaagatgtttcagcgcagaatggaaaccctgaacctgcgctgggaggaactgggcgttaaggaagcccaactgaaggctcacatccagaagtctgagcagttcatccaggagaacgaccagaaacggatccgcgccatgaagaaagccaacaaggagcgagaactcaagtgccagcacatgcaggagctgaccaagcgcaagcaggagatggtggcgctgcggctggagcaccagcggctgagcgccaagctgaaggactactacatcttcaacaagtacctagagaaggtggtggagaactccgagttcgaggagatccatgaggtgattgcacgctacaagacgctggtgagcatgcgccacgacctcatgcagtctgcgcaggaaggccaggagaagattgagcgcgccaaggcccggctggcgcgctacatggaggaaaaggatgatgagatcctgcagcaaaacaatgagctggcaaggctgcagatgcgctttgaccgtgcccgcagcaatgtcatcttctgggaatctcgctgggcgcacatccagaacaccgcagccaagaagaccctcctgctcggcaccattaagatggccacgctgaacctcttccagatcgtgagcaagcacctgaaggaggtgactgaggtggcactggaggacacccacaagcagctggacatgatccagcaatttatccaagaccggtcggacatctgggcagaggtgaaaaagaaggaacaacagcgagtccggatttaaggaggcagccttgttccagaatgtcctgagacagagatcgtgaaagaagaagtcgtgagcctgcggtccagtcagtccagctcgggaccgatgcctgctgtgccttcctgctgagggacacctgcttattttcccccgtgggcctcactctatccctgaaaacagtgaatgttatatgaagtttgttctcaagttc

SEQ ID NO: 404130 - DNA, 1000 bp, Homo Sapiens; identical to SEQ ID NO: 224027

SEQ ID NO: 404131 - DNA, 1000 bp, Homo Sapiens
gatattttgccaactgccatgtggaagaggtgcctccagctgcccgagacgaccgggcagcccatcggctatgggaggccagcaagaggctggcagggcttgggcctggggaggatgctgaacccgatgaagacccccagtctgaggactcagaggccccatcttctctaagcaccccccaccctgaggagcccacagtttctcaaccttaccccagccctcagagctcaccagatttgtctaagatgacgcaccgaattcaggctaaagttgagcctgagatccagctctcctaaccctcaggccaggatgcttgccatggcacttcatggtccttgaaaacctcggatgtgtgcgaggccatgccctggacactgacgggtttgtgatcttgacctccgtggttactttctggggccccaagctgtgccctggacatctcttttcctggttgaaggaataatgggtgattatttcttcctgagagtgacagtaaccccagatggagagataggggtatgctagacactgtgcttctcggaaatttggatgtagtattttcaggccccacccttattgattctgatcagctctggagcagaggcagggagtttgcaatgtgatgcactgccaacattgagaattagtgaactgatccctttgcaaccgtctagctaggtagttaaattacccccatgttaatgaagcggaattaggctcccgagctaagggactcgcctagggtctcacagtgagtaggaggagggcctgggatctgaacccaagggtctgaggccagggccgactgccgtaagatgggtgctgagaagtgagtcagggcagggcagctggtatcgaggtgccccatgggagtaaggggacgccttccgggcggatgcagggctggggtcatctgtatctgaagcccctcggaataaagcgcgttgaccgccaaaaaaaaaaaaaaaaaaaaaaaaaaaaaaaaaaaaaaaaaaaaaaa

SEQ ID NO: 404132 - DNA, 1000 bp, Homo Sapiens; identical to SEQ ID NO: 224028

SEQ ID NO: 404133 - DNA, 1000 bp, Homo Sapiens
ctggctgaggagaaggaggctgcgggtatgggcagtgtggccggcagcagccccttcttccgagaggagaaggcaccaggtatgcaaagagccatcgaccagctggatgacctgagtctgcaggaggctgggcatgggctgtggggtgagacctgcaccaatgcggtctccgacatgatggtccccctcaaggcagccatcactggccaccatgtgcccgactcgggccctgagcccatcctggccttctacagcagccgcctggcaggccgccacaaggcccgcaagccacctgcgggttccaagtccgactccaacttcagcaacctcattcggctgagccaggtctcgcctgaggatgacaggccctgccggggcagcagctgggaggaaggagagcatctcggggcctctgctgagccactggccatcctgcagcgagatgaggatgggcccaacattgacaacatgaccatggaagctgagaggccagaccctgagctcttcgaccccagcagctgtcctggagaatggctgagtgagccagactgcaccctggagagcgtcaggggcccacgggctcaggggctcccaccccgccgctcccaccagcatggtccaccccggggggccaccagcttcctccagcatgtcaccgggcaccactgatggtgattccacccctgcccatcactgggggctgcgctagctgggctggcattccctcccaacctgaactgctcctcagagccatctcctgaacccacaaattattcttacagaaagatagttatccagaaattctcattccccgtctgcggtgcggtgcgtgcctgcacacctctcctaaacacagcagggctttggagtctggcccatgctccttggccagaaggacagcaggaaagggggctgcaccccgctggccctgcgctcgcccttggccctgctgcctctgtctatttcaatatagaactgttcagcaaaaaaaaaaaaaaaa

SEQ ID NO: 404134 - DNA, 1000 bp, Homo Sapiens
acaacttccgtgctgggagactgtcctgggccaggaaatgtacaaacttctgctctttgatctgctgactgtcttggcagtcgcgctgctcatccagtttcctagaaagctcctctgtggcctctgtcctggggcgctgggtcgtctggcggggacccaggagttccaggtgcccgacgaggtgctggggctcatctacgcgcagacggtggtctgggtggggagttttttctgccctttactgcccctgcttaacacggtcaagttcctgctgcttttctacctgaagaagcttaccctcttctccacctgctccccggctgcccgcaccttccgggcctccgcggcgaatttctttttccccttggtccttctcctgggtctggccatctccagcgttcccctgctttacagcatcttcctgatcccgccttctaagctttgtggtccattccgggggcagtcgtccatctgggcccagatccctgagtctatttccagcctccctgagaccacccagaatttcctcttcttcctggggacccaggcttttgctgtgccccttctgctgatctccagcatcctgatggcgtacactgtggctctggctaactcctacggacgcctcatctctgagctcaaacgtcagagacagacggaggcgcagaataaagtcttcctggcacggcgcgctgtggcgctgacctccaccaaaccggctctttgacccccgcagcccacgtcccgctttcagaccccaggcccattgtaagcctaggtcacaacatctgtaaactaggagaactggagaagactccacgcccttccagctttggtatctggagatttccagggcccctcgccgccacgtccctgactctcgggtgatcttccttgtatcaataaatacagccgaggttgctgaaaaaaaaaaaaaaaaaaaaaaaaaaaaaaaaaaaaaaaaaaaaaaaaaaaaaaaaaaaaaaaaaaaaaaaaaaaa

SEQ ID NO: 404135 - DNA, 1000 bp, Homo Sapiens
gagcctgagagagctggacctgagcctgaatgagctgggggacctcggggtgctgctgctgtgtgagggcctcaggcatcccacgtgcaagctccagaccctgcggttgggcatctgccggctgggctctgccgcctgtgagggtctttctgtggtgctccaggccaaccacaacctccgggagctggacttgagtttcaacgacctgggagactggggcctgtggttgctggctgaggggctgcaacatcccgcctgcagactccagaaactgtggctggatagctgtggcctcacagccaaggcttgtgagaatctttacttcaccctggggatcaaccagaccttgaccgacctttacctgaccaacaacgccctaggggacacaggtgtccgactgctttgcaagcggctgagccatcctggctgcaaactccgagtcctctggttatttgggatggacctgaataaaatgacccacagtaggttggcagcgcttcgagtaacaaaaccttatttggacattggctgctgaatggtcctatctgctggctctcccctgagatctggacagaggaagatgggagggtgctcatcacccccccagcataatgatcagcctccttcctagagacagactcatgcagattgagatcaaaagtccctctgcttgggatcaaattaatgtttgacagagctggccaggcgtggtggctcatgtatgtaatcctagcacttcgagaggccgaggcaggtggatcacgaggtcaggagtttgagattagcctggccaagatggtgaaaccctgtctctactaaaaataaaaaaaaattagccaggcatggtggcgggcacctgtagtcccagctactcaggaggctgaggcaggagaatcgcttgaacccgggaggtggaggttgcagtgagccgagatcgcgccactgcactccagcctgggcgacagagtgggactccatctcaaaaaaaaaaaaaaaaaaa

SEQ ID NO: 404136 - DNA, 1000 bp, Homo Sapiens
atctctccaaccctctgtgtggggtgtggcagtgggaggaagtcatccatgagaccagtgaggaaactgagtttccatctgaagccccagctgggggacagagaaacttccagggagagccagcgcaccctgaagaaggaaggaaggagccatccatgtggttgaccagaagagaggaagaggaggatgcagagagccaggtcacggctgatctccctgtccctctaggagcccctcgccctggagacatcccagaaaaccctccagagagacctgcgcggcgggaactccagcaagccctggtgcctgtgatgaaaaagctggtcccagtcaggaggagggcctggggccagctctgcctgcccccacagcggctcagagtcactcgacatccactgatcccagctcctgtcctgggcctgctgctgctgctgctgctctctgtcctgctgcttggcccgtccccacctcccacctggccccacctccagctctgctacctccagccccctccagtgtgagaggctctacttgcccctcagagcagtgtctagctcaataaatcccctggccctctctccactgggatccccattgttagtccactgttgcgcaggcttaccctagatagagtacaggggatccacatccctgtatttttatgtgaattctcctagttttttaatgctgacatttcttaacaatagcaaaactcccccagtaatggattaagcactaaggattattccctcacaaaacaagcctggcgagggcagctgtgggcacacagctaagtctcggttgccttggggtcagggcctcagtgattctcctgtcccctccctcatgctcaggagttggcagttgtagcttcctacatcacatctgcgggaaacggaaatttcttccttcctttttataaagagaggcagtagcctcagtgtgcagtgggtagattcaaatcatattcataataaaagagaagcagttgcctgcccag

SEQ ID NO: 404137 - DNA, 1000 bp, Homo Sapiens; identical to SEQ ID NO: 224029

SEQ ID NO: 404138 - DNA, 1000 bp, Homo Sapiens; identical to SEQ ID NO: 118570

SEQ ID NO: 404139 - DNA, 1000 bp, Homo Sapiens; identical to SEQ ID NO: 292438

SEQ ID NO: 404140 - DNA, 1000 bp, Homo Sapiens; identical to SEQ ID NO: 118571

SEQ ID NO: 404141 - DNA, 1000 bp, Homo Sapiens
ccaggaaacagataactcagaagcatctgggaaatttgccatggaattaatgaagaaaagccctcagcacatcatccttctactctaatcaatatgaaatagcattcagtaactcctattaattcactctgaagagaaaccttttgaggacaatctgtatggtaaagctctcagctcgaattctcaccttcatgggcccagaagattatgtactgagagaatcctgaagaatggaacagctgtagaaagccttcagtgctatcagcagggattcatgtgacagctcacactaagggagaaaacctgtgaaggtctcagaaggcttcagtgacagtcatcccttaagacacactggaaatcacacaatggaacaacactcagaaatgcggaataccctgcagcaaaagtgttcacattactgagcaaactatagtgtggtattctgcagtgactatgggaaagccttgaatgttctatcggtttttaagggacttgagaattaattctggagagaatgccccattgaacatcatcaatattggagagctttctgtttttctacatttgttaggaaacttgtgagcattcacactacagagaaacttgaaatataaagaagaagagaaagccttcagtgatgcctctgtgttagggaaaatatggaacttctccctggatgcaaaacctatgagtatattaatattggaaaatttttcagtgattcttctctttcttgtatatgagagaacttacatggagaaacccctaggaatgtaatcagtgttaggatgcctcagcctgaactcttcactgagtggccacaattttcactgggaacaaaaagtataatcactgttttgagtgtgggatatcctttatcagtgtctcatctgtagattggactgctggctcattaatttttttagtctttttttcttttaatataaacatttgtgtatagctgttccctaaaataaacattaacatatttcataatttt

SEQ ID NO: 404142 - DNA, 1000 bp, Homo Sapiens; identical to SEQ ID NO: 118572

SEQ ID NO: 404143 - DNA, 1000 bp, Homo Sapiens
atttgagcagttgttgcaaagggatggtaacagcaatggctctgagtaaatccactaactcacacaaaaatgctactgaagacctttatgaggtggataagttgaagaaagaatgttatgaatggatcaacacatgctcttgcctcctttctaatatcaaaggcagaaaaattacattattgacatatgaagaaatagagcggctacttgaagaggaggctgtaaaagaattcattgagcctgaaatagacgagtcttttaaagaagatgaagaagaaagtaaggaggataggaaacttcaggaggaaaataaagagagagcagaagaacaaccttcaacatctacagagaaggaaaaactcattcgattcattggagaagatgaaaatgttcattccaaacctctatttgaaacagatgtgttgtcttcctggagagagtcagctaagcaaggtacattggcccaaaaatatcttgaagcaatggctgtaattgaacatatgcaggagaagttactggaggttgaaaatagagccagacaggcagaggagaagtttgaagatgcatatgagaaacttcatcatacccttataaaaaataaagatctagaggaattagtcatgacatcaagaaaggagtctaaagaagagaaagaaaatcaagatgaaagagaagtaaaagaagaagaagaacaacaagaagaagaagaagtcaggtcagcagaaaattcctcaaaatctccaaagaaaggtcactgaatccaaggcaacctgtggaaagaagaattcagatgtcagtgggagcctccaggtgggaggagagcatgcctaaaccctggtggccattgttctgtactaaggaacaacattccctttgaaaggacattatttgcctgttgtatttaacttcacagtgccttgcaaagagttgtttaacttgcatggtgccacccaataaatatctgtgcaattgaaaaaaaaaaaaaaaaaaaaaaaaaaaa

SEQ ID NO: 404144 - DNA, 1000 bp, Homo Sapiens; identical to SEQ ID NO: 118573

SEQ ID NO: 404145 - DNA, 1000 bp, Homo Sapiens
cggtatacccctgcctctgggaaccataaccatcctctgcattgatctcggcactgacatggtccctgccatctccttggcttatgagtcagctgaaagcgacatcatgaagaggcttccaaggaacccaaagacggataatctggtgaaccaccgtctcattggcatggcctatggacagattgggatgatccaggctctggctggattctttacctactttgtaatcctggctgagaatggttttaggcctgttgatctgctgggcatccgcctccactgggaagataaatacttgaatgacctggaggacagctacggacagcagtggacctatgagcaacgaaaagttgtggagttcacatgccaaacggccttttttgtcaccatcgtggttgtgcagtgggcggatctcatcatctccaagactcgccgcaactcacttttccagcagggcatgagaaacaaagtcttaatatttgggatcctggaggagacactcttggctgcatttctgtcctacactccaggcatggacgtggccctgcgaatgtacccactcaagataacctggtggctctgtgccattccctacagtattctcatcttcgtctatgatgaaatcagaaaactcctcatccgtcagcacccggatggctgggtggaaagggagacgtactactaaactcagcagatgaagagcttcatgtgacacaggggtgttgtgagagctgggatggggccagagattataagtttgacacaacatctgagacactaggatgaattatcttggatgagaaagatgggcaatcctgggctggcttgagggaatcatgggcagaggatgaggtgggctgaagggaagcccagcctgcatctagctggagccccgcagggaggggcatggtcctgctgaatcccgtagccagtctagacagtaaatgtctggaaaagccaaaaaaaaaaaaaaaaaaaaaaaaaaaaaaaaaaaaaaaaa

SEQ ID NO: 404146 - DNA, 1000 bp, Homo Sapiens
gtcctgcgcgccttcgagctgacacacaccgaagtggtggagcgccgacgcctcctgctggaaaaagggacacaggagcgctcgcgatcgccctcctcctctcgacacggggactccaaaacggaccgtgagaagagtcagatggtagggatcagcaatagtgcattggtggacaagacagacaagacgcagacaatgaaaacccctaagggcctgggcaagaaaaaggagaaatcatgggaattggccaagaaagaggagaagttggggtctgggcagtcacccacacaaggaacccctaagaaggaagatgccacaaaggcaggcaaggggaaggtaaccatccctgaacagaagccaagcagggcaaaagggatcaagatcgggagcagagagaagcgcagcatcctcctggagtccgagcagctggttgttgaggctactgaggtggtcaaccctctcctggagcctgtggagcaccgagatgggaaagttttcatgcctgggaacaaggtccttttgcacctcaacctcatccggaaccgcatcacagaggtggggctggagggcttcctcgccacggtgcagtatcagatgcagttctccaaggccaagagtgcatccaagggtccagtggggctgctgtggctgtccctggctgtgagtccctttcactctctcctgctgaagcagacgttgcccctatcagctgtcatactagacagctgctgcaggcagcttctgtctccccatttccaaggaagaaaaattgcttcgccccacaatgtcctgcgtacgccataatccaggagctgatgttgccaagggatcccatcaaggccaaactcagggaggatgaggccatggcattcttcccctagccccctcccacctgcttgcctctaagactcggggctacagaagcacctcctgtccctgtgtggggtgacctccctgggggagatctcagaccaataacaaagtctgttgctatactttt

SEQ ID NO: 404147 - DNA, 1000 bp, Homo Sapiens; identical to SEQ ID NO: 292441

SEQ ID NO: 404148 - DNA, 1000 bp, Homo Sapiens
gagcgcgccctggacgccacagaggtgcccttctccatcaccactgacaacctgcagtgccgtgagcgccgcgagcaccccaacctcgtgcgcgaccatgtggaaacggagctgctgaaggaagccgagctcatccggaacattcaggagctgctgaagagaaccatcatgcaagcagtgagccagatccgactgaaccgggagcacaaggagacctgcgagatggactggtcagacaagatggaggcctacaacatcgacgagacctgcgggcgccaccacagccagagcaccgaggtgcaggctcatccgtactccaccaccttccaagagagcgcctccaccccggagacccgggccaagttcacgcaggacaatctgtgccgtgcccagcgcgagcgcctggcctcggccaacctgcgggtgctggtggactgcatccttcgcgacacctccgaggacctgcggctccagtgcgacgccgtgaacctggccttcgggcgccgctgtgaggagctggaggacgcgcggtacaagctgcatcaccacctgcacaagacactgcgggaaatcacagatcaggaacacaacgtggcggcactgaagcaggccatcaaggacaaagaggcacctctgcacgtagcccagacccggctgtacctgcgctcgcaccggcccaacatggagctgtgccgtgacgcagcccagttcaggctgttgagtgaggtggaggagctgaacatgtccctcacagcactgcgagagaagcttctagaagcggagcagtccctgcgcaacctcgaggacatccacatgagcctggagaaggacattgccgccatgaccaacagtctcttcatcgaccgccagaagtgcatggcccatcgtactcgctaccccaccatcctgcagctggctggctaccagtgagcagcggcacggtgcttccccccagtcccccaaataaacagcgcgttagctttcaaaaaaaaaaaaaaaa

SEQ ID NO: 404149 - DNA, 1000 bp, Homo Sapiens; identical to SEQ ID NO: 224031

SEQ ID NO: 404150 - DNA, 1000 bp, Homo Sapiens; identical to SEQ ID NO: 224032

SEQ ID NO: 404151 - DNA, 1000 bp, Homo Sapiens; identical to SEQ ID NO: 292444

SEQ ID NO: 404152 - DNA, 1000 bp, Homo Sapiens; identical to SEQ ID NO: 118574

SEQ ID NO: 404153 - DNA, 1000 bp, Homo Sapiens; identical to SEQ ID NO: 224033

SEQ ID NO: 404154 - DNA, 1000 bp, Homo Sapiens; identical to SEQ ID NO: 118575

SEQ ID NO: 404155 - DNA, 1000 bp, Homo Sapiens; identical to SEQ ID NO: 224034

SEQ ID NO: 404156 - DNA, 874 bp, Homo Sapiens; identical to SEQ ID NO: 118576

SEQ ID NO: 404157 - DNA, 1000 bp, Homo Sapiens; identical to SEQ ID NO: 118577

SEQ ID NO: 404158 - DNA, 1000 bp, Homo Sapiens; identical to SEQ ID NO: 118578

SEQ ID NO: 404159 - DNA, 1000 bp, Homo Sapiens
aggaagctgcaggaggagcgacaccgcaccgtggtgctggagcaacatctggagaagatacgcctggagccagggaaggcatcagcctcccagagagcagctcccaggaccaaaacaggtctgcccacctctaacaacaggcacaacccaaccgggagcgagaagaaggacccatcctttgcccagctctccgatgtgcccgtggaatcccaaatggaagagctgacaaccaggctggccatccaggtggaggagaatgaaatgctaaaggctgccctgggcagtgccctgcggggaaaggaggaggacttccggatgtaccatgagatcctgggccaggtgaaaagtgtcttcctgcaggccctgcggcagcagaagacaggcaagcaataggatgacagcccagtgtcggcctggccgggtgggcagcctcaggtcttgagaggataagactctgtctgaggactccatctgctccgggaagccagcccagggcagccagctcaaccacttctaccagaagaggctccttaaggatgaccaaaaccaatgtctcaggccaggaaggcagaagagaagccctggtgggacactgcaggagaccctgggctggctgggttacagcagcagggaggcccagcagcccactggcagaggcgagagctctgggatggcaaggcggctgtgaatggacagatgcagtccctcgggcaggtgttcatcgccctcatcctaggtactagccctggatgtccccatggcttcacacacagaagagcccttggttaccctaagtgggcatatcccccatgccactcagccctgccctatcccctcacccccatcccggctccatctgtagccgtccacaccctacacagacttggggcactatgctctcaaccagtttgtcagcccactcctcaggacacttcctcaggtgcagacccttggacttgtaataataataagtattttcataaccaaaaaaaaaaaaaaa

SEQ ID NO: 404160 - DNA, 1000 bp, Homo Sapiens
aaagaaaagctgtcagcgcaggcgtctctgaagcggcatacctccttgaatgacctcagcctgacgagggatgagcaggagatcgagttcctgaggctgcaggtgctggagcagcagcacgtcattgacgacctctcactggagagagaacggctgttgcgctccaaaaggcatcgagggaaaagtctgaaaccgcccaagaagcatgttgtggagacattttttggatttgatgaggagtctgtggactcagaaacgttgtccgaaacatcctacaacacagacaggacagacaggaccccagccacgcccgaagaagacttggacgatgccacagcccgagaggaggctgacctgcgcttctgccagctgacccgggagtaccaggccctgcaacgcgcctacgccctgctccaggagcaggtgggaggcacgctggacgctgagagggaggcccggactcgggagcagctacaagctgatctgctgaggtgtcaggccaaaatcgaagatttggagaagttactggttgagaagggacaggattccaagtgggttgaagagaagcagctgctcatcagaacaaaccaagacttgctggaaaagatttacagactggaaatggaagagaaccagctgaagaatgaaatgcaagacgccaaggatcagaacgagctgttagaattcagagtgctagaactcgaagtaagagactctatctgttgtaaactctcaaacggagcagacattctctttgaacccaaactgaaattcatgtaaagctctcagatgttttcaagcatgtgtaaaggggacatgttatagtttctttctttctttctttctttttttttttaaatctgtatgttcagaataatttcactgccttaatgtgttctggagagcgtgctcacccaagtctatggacatgtaccagagctaatatatttattgcctatggcttgttttgcacttaataaaataatttgtttttgcaaaa

SEQ ID NO: 404161 - DNA, 1000 bp, Homo Sapiens; identical to SEQ ID NO: 224037

SEQ ID NO: 404162 - DNA, 1000 bp, Homo Sapiens; identical to SEQ ID NO: 292455

SEQ ID NO: 404163 - DNA, 1000 bp, Homo Sapiens
gaagctctggtcaagctgtactacactctggccgtggcctggctcctgcagaaccgtggcagagaagcctatttcaacctgcagaaggcagagagaaacatgaaggagctgaaagaattatataaaggaggtgtttgtgaattacaagtctctgagaacgacctaacacttgctttgggcagagcctccttggccatccacagactgaacctagctctggcatactttgaaaaggcaattggcgatgttattgctgccaagggtgataggacgtcagatctgatcagcctgtacgaggaagctgctcagatagagcagctgaggaggaaccacaaccaggccatccagtacttgcagcaggctcattctgtctgtgttcctttgttcactgaagtcagccccaaaactgcagaaatgagtgcgttactggccaaagcttatgccatgtctggagaggcccagcacagggatgctgttgagatatatttcataagaagtatcaatgcatatcgagcaacattgggctcagaggattttgaaacactgagcaccactgaagaattttgcaaatggcttgtccaaaatggagaaaaacagatattccaaaaaaggagatataaacatgaccataaaagacatgaaaagatgtttaaccccattagtcatcgtggaaatgcaaatgaaaaccaccatacagacactagagtggtttaaatttgaatgacttccaacaccaaatgccagacaggacatagagcaactggatgtctcatgctcacaggcagaagggaaaactactgtgtgtgacaggaagatggacttacccaaccttcagcattctcaatctcttgtctattaacatgtgtttgaaacattatgcattcaaagcaaacatctgggaggaagatgggagaagccttcttgcccctgttctacagaagtaattgaagttcatgacattcaagctcattcaccagtaaatgaatttgggtcatgcttt

SEQ ID NO: 404164 - DNA, 1000 bp, Homo Sapiens
ttcaacctcagcaacttcagaaactgcccctgatacgtgtgagagagaaataaaatcagattttgagtgttgaagggactgaggaagtgaggataaagagcatgaggacagcatggaaagaaggaggcagaagtggaactgaactttcactctccatgggacagatcaatctcattatcaagtctgaatagcaaccagccctctcctccaccccgtttctcctcagttaattggagctcagtcaggtgattattgagtcttgtacagcactgaaatgaaatcaaagatgaagaagcattgattgtattcgaagattgaagcacgctcatactttgtatgtgctttagggaaggggtgggtgggcacttgggccttgcgggtgcattcatgtaatctgagactcttgaactttatgacggagtcttcaatattttgatgtatatgaaacttttgttaaatatgttgtatacttcgctggctgtgtgaagtaaactaaaactctgatgaacactttggagtctgctttagtgaaggagaccaaagtgggaagggctttagggcactgatagaggccctgggtgtacttttcaatcctgtgtaatgtttaattcttgcaactgaatcaaaacagtgttaaattatggcaatatttgcactttgggaatgagtacataactgtatgatcacactctgcaaatgccacttttaaagctgttaatagactttgcaccttttctttgacaaggatgtgtcatatttaaatttttacattcatcatggctacaggtagaactggggaggggggaatgtaattttttatgggaattttgatatgaaaagaaactagtcatttatttatacaataggcttggctcaaaaagtgtttttcagacctcggtattcctaatgtgggatgtgactttattttatttttagtagcaaatttggatgtagactgacagacatagctgaatgtcttaataaatttaaatttgaagat

SEQ ID NO: 404165 - DNA, 746 bp, Homo Sapiens
ggggccggcccagcaaatcttttgtccggggcggcgctgagccagcagggcgctgcccggtgtaaacggggacccgcggaaggggcggggcgcaccatggcgcagcgctcggggaagatcactctctatgaaggcaagcacttcacagggcagaagctggaggtcttcggggactgtgacaacttccaggaccggggctttatgaaccgagtgaactccatccacgtggagagcggagcctgggtctgcttcaatcaccccgacttccggggccagcagttcatcttggagcacggcgactaccccgacttcttccgctggaacagccacagtgaccacatgggctcctgtcggcctgtaggaatgcacggagaacatttccgcctagaaatcttcgagggttgcaacttcacgggccagtgcctggagttcctggaggacagccccttcctccagagcaggggctgggtcaagaactgtgtgaacaccatcaaggtgtacggggacggagcagcatggagccctagaagcttcggagctgaggacttccagctgagcagctctcttcaatcagatcaaggaccggaagaggccaccacaaaaccagcaacaacccagccacctttcctgactgcaaacctctgagcctggaaccgattgacatgtaaatgcacctgcaccgtttctgagccgggagagtgtttacttaaaatcatgccctcaaaaaaaaaaaaaaaaaaaaaaaa

SEQ ID NO: 404166 - DNA, 1000 bp, Homo Sapiens; identical to SEQ ID NO: 222007

SEQ ID NO: 404167 - DNA, 1000 bp, Homo Sapiens; identical to SEQ ID NO: 222005

SEQ ID NO: 404168 - DNA, 1000 bp, Homo Sapiens; identical to SEQ ID NO: 292459

SEQ ID NO: 404169 - DNA, 1000 bp, Homo Sapiens
gacgaggatggggtggtgagcagccccccacagcgccacaggcagaaggaccaggggttccgtgtagacttttcagtggaaaatgccaacccttcttcccgagacaacagttgtgaagggtttcccgcttatgagctggacccgagccacctgctggctagccgggacatcagtaagaccagcctggacaactactcagacaccaccagctacgtgagcagtgtagcgtccaccagctcagacaggatcccctctgcttatcctgctggcctgtcttccgataggcataaaaagagggctggccagaacgccttaaaattcatccgccagtacccctttgcccacccagccatctactccctgctcagtgggaggacacttgtggtcctgggggaagatgaggccatagtcaggaaactcgtgactgcactggctatctttgtccccagctatggctgctacgctaagcccgtgaaacattgggcctcctcccctttgcacattatggattttcagaagtggaagcttattggcttgcagaggtaaagtggcctcccctgccggtgccggtaccctccatgccctgagccgctacagccgctacacgagcatcctggaccttgacaacaaaaccctgcgctgccccctttacagaggcaccctggtgccccgcctggcagaccaccgcacacagatcaagcggggcagcacctactacctgcatgtccagagcatgctcacccagctctgctccaaggccttcctctacaccttctgccaccacctgcacctgcctacccacgacaaggagacagaggagctggtagccagccgccagatgagcttcctaaagctgaccctgggtctggtgaatgaggatgttagggtggtccagtacctggctgagctgctgaagctgcactacatgcaggaatctccagggaccagccaccccatgctcaggtttgactatgtccccagctttttgtataaaatctga

SEQ ID NO: 404170 - DNA, 1000 bp, Homo Sapiens; identical to SEQ ID NO: 118581

SEQ ID NO: 404171 - DNA, 1000 bp, Homo Sapiens
cgaggctacaccgaccgggccatccgcggggaggcctttgatcgacacctgctgggcctgaagctgcaggccatcgaggacctggtgagcatgcccgacatcttcatggacacctcctacgccatcgccatgcacttccacctctccaccagccaggtccctgccaagacagactgtgtcatgttcttcgggcccgtggtccccgacggctacggtgtctgctataaccccatggaggcccacatcaacttctccctgtcggcctacaacagctgcgcggagaccaacgccgcccgcctggcgcattacctggagaaggcgctcctggacatgcgtgccctgctgcagagccacccccgggccaagctctgagcccctaggactcaggcctgccaatgccacagccaagcccaccctgggatgggccacccaccagggctcagctccttggttccctcttccttggttccctcttccctggtccccccaaatctactgagccacggaccgcatcctccagggggcctgcaggccccagccaagtgccttccgtgggtcatcccagcacctgccagggcccgacctggggctgagtgcagaggctgagcaggacgttaggcccgggcccctggcacgtcctccaccggtgcctcctctggggaagggaaccagccctccagagcaggagactggcaagagctctttgtctcaccagctcagccccggccactccctgccaactccatgaccaggccaccatctgtaccctgcttcccaaactcccaggacctggagacaggattgtctggggccgaggggccagggtgtgaggtttcacctccgttgcggctgtgctcctgtggataacattgctagcgagccgcctctggttccactcagcttggttcctgcccccgccctgctgtatgatattaatgtggaaggtcatcaataaaggggaattgtgttggtgaaaaaaaaaaaaaaaaaaaaaaaaaaa

SEQ ID NO: 404172 - DNA, 1000 bp, Homo Sapiens; identical to SEQ ID NO: 224041

SEQ ID NO: 404173 - DNA, 1000 bp, Homo Sapiens; identical to SEQ ID NO: 224042

SEQ ID NO: 404174 - DNA, 1000 bp, Homo Sapiens
gctgctgctggctcgggctggactcaggaagccggagtcgcaggaggcggcgccgttatcaggaccatgcggccgacgggtcatcacgtcgcgcatcgtgggtggagaggacgccgaactcgggcgttggccgtggcaggggagcctgcgcctgtgggattcccacgtatgcggagtgagcctgctcagccaccgctgggcactcacggcggcgcactgctttgaaacctatagtgaccttagtgatccctccgggtggatggtccagtttggccagctgacttccatgccatccttctggagcctgcaggcctactacacccgttacttcgtatcgaatatctatctgagccctcgctacctggggaattcaccctatgacattgccttggtgaagctgtctgcacctgtcacctacactaaacacatccagcccatctgtctccaggcctccacatttgagtttgagaaccggacagactgctgggtgactggctgggggtacatcaaagaggatgaggcactgccatctccccacaccctccaggaagttcaggtcgccatcataaacaactctatgtgcaaccacctcttcctcaagtacagtttccgcaaggacatctttggagacatgggtgactcaggtggacccttggcctgtaacaagaatggactgtggtatcagattggagtcgtgagctggggagtgggctgtggtcggcccaatcggcccggtgtctacaccaatatcagccaccactttgagtggatccagaagctgatggcccagagtggcatgtcccagccagacccctcctggccgctactctttttccctcttctctgggctctcccactcctggggccggtctgagcctacctgagcccatgcagcctggggccactgccaagtcaggccctggttctcttctgtcttgtttggtaataaacacattccagttgatgccttgcagggcattcttcaaaaaaaaaaaaaaaa

SEQ ID NO: 404175 - DNA, 1000 bp, Homo Sapiens; identical to SEQ ID NO: 292465

SEQ ID NO: 404176 - DNA, 1000 bp, Homo Sapiens; identical to SEQ ID NO: 224043

SEQ ID NO: 404177 - DNA, 1000 bp, Homo Sapiens; identical to SEQ ID NO: 292466

SEQ ID NO: 404178 - DNA, 1000 bp, Homo Sapiens
agatctgaaggtaagaaggagttccacctgatgctcgggtcaggatgagaattccaaacacactgccagccccttcactggggatgcttggtctcttctgctggtaaaagcagagatgtttctgtgtcatgcccaagctccccggtgctaccttgcctttctcttttacccctgatcttggctttctctctctctctgcagactttcctttaattgatgtgacatttgtggtaaacacctttcccagggaacctcacaaatcttgagatgctttcccttccccagatgggattgcatgattccctgactttcctaccctcctccagagagctcagttggaaaggccctcaagaggcatgctagaacgttaggtcagcctactgacagctgacaaacaattaatgcgaaatcatgtcacaccaacccatagccgtgtccacgcagcaactccaccaccttaggatttccccctccaaattattcagaccaatggcttgccaaatggcctctcccaaaattctgtacagttttgctcaggtcacgccaacagggaaacctcaagtgtaggtctaattagtgtttctgggatccaaagttagaggaaaatttagattttattgcctggatctgctttaaagacaattggtgtttacaccctcttgtcagcaaaacagctagttaggtaaggacatatagttccaagtaggtaaagtcacttgattacaaatgttcttaactatcgtctctgtaattcctttatacaggacagtacaaaattgtgggacatgctctggtaacacacagatatgggttgcatatgatccagaattacagctgatattatggatgacaactgctaaggtccataaaatgaagactgtattgtattgagggatagaaattgatcatttaatgggtaacaactgctgagctcaaagatttgtgattgttaaaacttctctggcatttaatcattaataaacatctgtattgtgacagc

SEQ ID NO: 404179 - DNA, 1000 bp, Homo Sapiens; identical to SEQ ID NO: 292467

SEQ ID NO: 404180 - DNA, 1000 bp, Homo Sapiens
gcccagagaaaaatgggttcaaccttggcttcatcaagaatatccagcaggtgtttggagataagaagaagttctggttaatacctattggttccagccctggtgatggacactccttccctatgaggtctatgaatgagtcacagaacccactgctagcaaatgaagaaacctgggaagacaacgaggatgacaaccaagattatccagaaggctcatcatctcttgctgtggaaacggaaacatagcagttttcacatttcctgcatctctcagacaggactcaccatctctgcctcccatgaggcttacagagttcaatgttggaaatcattgtaatcttcaaaataagtcaccgtgttggattgaaagcttcaaaatttgaaagaattccatcaaatacttgctgtgtaaatgtttctggactttatgttatttaatttactgactgaaatccaatttggaatttggtagcagttaattcaagccaattttttttgtttcttcatttcccctcccccaatccatgaaagcctaaatgtaaaatatatcttttcattcatcttatcaggtaaaaggaaattcagaaaatttccttagagtctttaattcccccacaaagattattaatcacatatatagggcctttttggtgttgaagggaatcaaactacatttgctgcttgtgtgcgtgtgcatttgtgaacacgtacagcatatctatacaaaattctgctatagtgtgaaaatcagggctaaaaacctgaagcctttgtttaattatgcttttcctctaaatagcaacttaaatatttgctagactttgaatcatcgctatatcaagtatctaaaatttgggagggtgaatcagtacactgtgaccaaggtcctcaaattggaatttgaacaacaatgtaaaacctgttctgtcacaaatgttcctgaaagcaccacagctactcaagaagatcaaattcaggacataaactttattgaacat

SEQ ID NO: 404181 - DNA, 1000 bp, Homo Sapiens; identical to SEQ ID NO: 292468

SEQ ID NO: 404182 - DNA, 1000 bp, Homo Sapiens; identical to SEQ ID NO: 292469

SEQ ID NO: 404183 - DNA, 1000 bp, Homo Sapiens; identical to SEQ ID NO: 292470

SEQ ID NO: 404184 - DNA, 1000 bp, Homo Sapiens; identical to SEQ ID NO: 118584

SEQ ID NO: 404185 - DNA, 1000 bp, Homo Sapiens; identical to SEQ ID NO: 292472

SEQ ID NO: 404186 - DNA, 1000 bp, Homo Sapiens; identical to SEQ ID NO: 118585

SEQ ID NO: 404187 - DNA, 1000 bp, Homo Sapiens; identical to SEQ ID NO: 292473

SEQ ID NO: 404188 - DNA, 1000 bp, Homo Sapiens; identical to SEQ ID NO: 224044

SEQ ID NO: 404189 - DNA, 1000 bp, Homo Sapiens; identical to SEQ ID NO: 224045

SEQ ID NO: 404190 - DNA, 1000 bp, Homo Sapiens
gaagatatttgtaacagttctttgatatttggtgatctcttgaaaaaagttaaggatgaatatgaactctacatggcaacgctcctggagtcccagcctgcagcacagtacgaggctcttctggctcaactcaaggcgctggggcagaggccggtgaagacggcggacatggatctcgccagggaagagctgaggatgctcgtgacagccacaaaagcagccctggagcagaatgatagactcagaagtgaactggagatggagctggcattgctgcagtctgcaaaggaacgatcagaatcatctgagaaacatataattgatgaaaaccaacttactcttactgagaaggttgaaaagaagaggtgtgaaatactcagtaagtgggatgagatacaagctctggaaaaagaaattaaaacaactttggttcatactggaatttcagatatcactgagaataggattaaaagcatagagcatgaagctatacaattggaaacagaaaatatgattttaaagaagaaaataaaagggcctttggaaatttatcaaggaatttgtaaaatcagaggaaacagaagataacgctcaagtggctgaacaaatggccagtggaaattcttaacttccatgtatgtagcatggatatttgcagatgcatatacattcataaagatacatttcatttcatcagctttaatctctagtaaaattaatgtggtatatgtatcctactcaggatactgaaatacacacatgcgtacacatgattagtttctgttgcatacatatttacaacaatactagttcttaacgtatgttttactttcatttaataatgttcaactttggaaaatacttttgattatttgctaagaataaggaattcagcgctgcttgaatacagctcaaatttgtttatttgccaacacaagtttacatatatgcatttaataaaattttatacaaaaaaaaaaaaaaaaaaaaaaaaaaaaaa

SEQ ID NO: 404191 - DNA, 795 bp, Homo Sapiens; identical to SEQ ID NO: 292475

SEQ ID NO: 404192 - DNA, 1000 bp, Homo Sapiens; identical to SEQ ID NO: 292476

SEQ ID NO: 404193 - DNA, 1000 bp, Homo Sapiens
ttgtcaataaatctccatgaatatccctgaccttagcataaaatcctggaaataagattgccgggtccaaagatctacccaaattaaaaatggacacaatttcaagaagtgaattgacctctaaaatagtttacaaatttatattaccaccagcattgaaaatgccttttccccacggattggtctacataagagtgttggttaattttatgtgttgacttgactaggctaaacgatgcccagatagcaggtaaaacattatttctgggtgtgttcgttctgtttctctgggatcccagactaacacaatcatatactttttgaggatgatgatgataacaatgaatgcctgcaacagtgcctggtacacagttgatcctcaatagatacttgatgaatgaataaaatgttctttgtcaagtgtcattagcaactgttgctgtggatgactttgaagtaggcgtgacttggtggatgtagtcaccctctctgggatgccttacctctctttcccttgacctatttcaatcatacatattttttggggctccacatccagctttcatcttccatcaatgccttctttgggcatgccagcccatggagtgctctcccactggcaacatcttgtagcttctgtttttagcactgtagacacaacattatgtggtcatgccgttgtttttcaagctgctgtggcacagtgatgatgtcaaaaatattatacataaaagagttggccaggcatggtggcttacgcctgtaatcccagcactttgggaggccgaggtgggtggatcacgaagtcaagagttcaagaccagcctggccaacatggtgaaaccccatctctacaaaaatacaaaaattagccaggtgtggtggtgtgcacctgtaatcccagctactcgggaggctgagatgaagaattgcttaaacccaggaggcaaaggctgcagtgagccaagatcccgccactgcactccagcactccgctctc

SEQ ID NO: 404194 - DNA, 711 bp, Homo Sapiens; identical to SEQ ID NO: 292477

SEQ ID NO: 404195 - DNA, 1000 bp, Homo Sapiens; identical to SEQ ID NO: 118586

SEQ ID NO: 404196 - DNA, 1000 bp, Homo Sapiens; identical to SEQ ID NO: 292478

SEQ ID NO: 404197 - DNA, 1000 bp, Homo Sapiens
ggttaatgaagagctcctggggaaggtgacatatgaataaggacttaaaggaggtggggcaagccatgagattggggaagggagttctaagcagaaacaacagcggtgcccaggcctcagggtggagtgcacacgtgtgttggaggaagggccatgagactgggatagctgggcctcagaggtttgccccagacttcctgggggatgtgatccctgaaggaatcagccagctgcaattcagcaaggggtggaggtatgaagggagtttcatggatggtgacaataatacgtgtgaagacttagaaatgaagaaagacatctatgtctggagaaataaaattgattctggctggaacataaaatgagaaggaagggtggaaataataaagctcttcagagaggtgagcatggggctatgcataaagggtcatattaaggatttgcactttaccctgagggcaatgagagccacatttaaagcagtgagaaacacaatcacatttgaagttttcaaaagctctctcccactgctgtgtgaagattggataccaaggggttaggatgtctctggtccctggcttcgggtggtagatagatagtggtacctacaggagatggtggtgtggatggaaagacaatgagatgtgtctgcaacatgatgaattgcaggtgcctgcaagatgcccagatgaagatatcagagaagcaattggagatgtgggtctagagtctggagacagagatttgggagacataactacagaagtcatcactgaaatcatgggaagggtctgtagggaaaagggaactgggagaaaaccctgaggaagctctgtcaggcaaaaagattacattgcagggcgggtgtggtgggtcacacctgtaatcccagcactttgagaggccgaggctggtggatcacttaaggtcaggagttcaagaccagcctggccaacatggtgaaacctcatctctactaaaaaaaaaaaaaaaaaaaaaa

SEQ ID NO: 404198 - DNA, 1000 bp, Homo Sapiens
cagaggaccacaaggcagcagaaagcgcgggtccagatgagggccaggaaggggaggagagtgagggccaagaacgagccttaagggagcagtcccaagctggagccacccagggctgggtctgggagtcctcagtgtccacttgtcccaggttagggggcttgccttgctctctccagggccagtctgtgtgtgtggggactcagcccgtggccggcagatgccatccaggatgtacaaggtgcagccaaggcaggccatgcaggggccgggcctgtctgcagctggtggatgcctgtgggcatggctttctctggggaccccattcctgtcagtagcaaccctggcagtgtccggagcggctctagacaactttggtcataggaactctggaggtgggttctggtcatctgaggtggctactcaacaggtttgaggccccacagcaacagaagtccaggacccactaggttgcctcagaagccctaagactgatgagctggagcgcgcatttgagagaagcctcgcacccactgtgtactggccccgctcaggccggcctggcacaccgttgcctgctggcggctctcatggggaagcgcctgggcactggggattgcttgtggcccactcaactcttggggcagtggcccgtaaccctagtttgcctgaggcccttatgtccccttatgttcctggtactggagcttgagctcttgcctggaacgctgcagctgcacccaccctgcttgatcccacctgggaggccaggacactgaggagctctgaacccagcccacagggaagcagaggaagctcctgccctgtggcgacagccagcgtgcacccagacgctggtgccatggcgaagcaggcgttcaagaccatggagaagacaactcctcatctagaaaatgaggacacctcagtgacaaacacacctttttataccaatcagtatcctctgttcattaaaactggctatccattaaaaaaaaaa

SEQ ID NO: 404199 - DNA, 1000 bp, Homo Sapiens
catgaagtgcccccaaatcaaattgttggaagaatagaaagaagtgtagatgattctcatcttaatgctattgaagatgcatcttttttatatgaacttgaaattcgattttctaaagaccacaaatatccctaccaagctccgctcgtggcattttattccaccaatgagaacctacctctggcttgtcgtttacatatttctgagtttctttatgacaaggccttgacatttgcggaaacttcggaacctgtcgtatattctttgataacccttttagaggaagagtcggaaatagtcaagttactaacgaatacccaccacaagtatagtgaccctcctgtgaactttctgccagtaccctctaggaccagaataaataatcctgcctgtcataaaacagtgattccaaataattcttttgtttctaatcaaattccagaagttgaaaaagcatcagaatctgaggagtcagatgaggatgacggtcctgcacctgttatagtagagaatgaaagctatgtgaaccttaagaaaaagatttccaaaagatatgactggcaggcaaagtcagtacatgctgaaaatggtaaaatctgcaagcagttccgaatgaaacaggtgctcaatagccacatgtagccaggtgttgctgtattggacagcacaggtatagaacatttccatcaacacggaaagttctattggacagtactggtatagagactcttgttgggaagaactggatatgtgctaagcaagagggctttatttcacccagaaaatctttcggtttattcagatgttggaaaactaatgtacagattccacaactcattctggctgattctctgagcagcattctgaataaagtcttctacatccaatcccaacaaatccaacaaaggatcactcaaggccaggagtgcaagaccatccagggcaacataacaagactctgtctctataattaaaaaaaaaaaaaagctgtaatcccaaa

SEQ ID NO: 404200 - DNA, 1000 bp, Homo Sapiens; identical to SEQ ID NO: 292479

SEQ ID NO: 404201 - DNA, 1000 bp, Homo Sapiens; identical to SEQ ID NO: 224046

SEQ ID NO: 404202 - DNA, 863 bp, Homo Sapiens; identical to SEQ ID NO: 224047

SEQ ID NO: 404203 - DNA, 1000 bp, Homo Sapiens; identical to SEQ ID NO: 224048

SEQ ID NO: 404204 - DNA, 1000 bp, Homo Sapiens; identical to SEQ ID NO: 224049

SEQ ID NO: 404205 - DNA, 827 bp, Homo Sapiens
gggccttgctcttggagttcttctcttagtccctgttccctggatgaaagcatcgctccgagcctcatgggaggaatgaaggaagaatcgagactagatatccaactaaggcttcgggacatgttttgagcgaagatgggtgtttctgcccggatagtataaatcgaggatccaggtctgggcagattcaaccatgggagccaacacttcaagaaaaccaccagtgtttgatgaaaatgaagatgtcaactttgaccactttgaaattttgcgagccattgggaaaggcagttttgggaaggtctgcattgtacagaagaatgataccaagaagatgtacgcaatgaagtacatgaataaacaaaagtgcgtggagcgcaatgaagtgagaaatgtcttcaaggaactccagatcatgcagggtctggagcaccctttcctggttaatttgtggtattccttccaagatgaggaagacatgttcatggtggtggacctcctgctgggtggagacctgcgttatcacctgcaacagaacgtccacttcaaggaagaaacagtgaagctcttcatctgtgagctggtcatggccctggactacctgcagaaccagcgcatcattcacagggatatgaagcctgacaatattttacttgacgaacatgatacctggctctcctacaagtcccactgaattggagtttcaggagaccgaagcccaggcacatgtattttgcaaaactacactgaagtttctgataatgacggatatcaacaattaaacgcttacttcttgtcaaaaaaaaaaaaaaaaaaaaaaaaaaaaa

SEQ ID NO: 404206 - DNA, 1000 bp, Homo Sapiens
aacgtcttccgaatcaactccagtgtgacctccttggagcggagccttcagtccttagggacaccgagtgacacgcaggagcttcgggacagcctgcacacggcacagcaggagaccaacaagaccattgcagccagcgccagctccgtgaagcagatggccgagctgctgcgcagctcctgcccgcaggagcgtctgcagcaggagcgtcctcagctggaccggctgaaaacccagctctcagatgccattcagtgctatggagtggtgcagaagaaaattgcagaaaagtccagagcgctgcttcccatggcgcagaggggcagtaaacagagtccccaggccccgtttgccgagctggctgatgatgagaaggtctttaacgggagtgacaacatgtggcagggccaggagcaggcgctgctcccggacatcactgaagaggacctggaggccatccggctgcgggaggaggccatcctgcagatggagagcaacttgctggatgtgaatcagatcatcaaggacttggcctccatggtgtcagagcaaggagaagctgttgatagtattgaagccagccttgaggctgcgtcctcgcatgcggaggcagcccgccagctcctggctggagccagccggcaccaactccagagacacaagatcaagtgctgcttcctatcagctggagtcactgccctgcttgtcatcatcatcatcatcgccacctctgtccgaaagtgatgctacccgtgcatcggccgctgaaccgtcagctggctgtggtgtgggctctccagccccgagcacccctcctggcccggagctgggagctgatggagtccgctgcgttgtcagctgatgccgtcacctggcctgcaatggacccgagagcttcacagctgcctgctgtcctcccctgcactgaccccactcgcccctgtgtcggccccagctgagcacccgaataaaccgctgtggcttatccaaaaaaaaaaag

SEQ ID NO: 404207 - DNA, 1000 bp, Homo Sapiens; identical to SEQ ID NO: 292481

SEQ ID NO: 404208 - DNA, 1000 bp, Homo Sapiens; identical to SEQ ID NO: 224050

SEQ ID NO: 404209 - DNA, 1000 bp, Homo Sapiens; identical to SEQ ID NO: 224051

SEQ ID NO: 404210 - DNA, 1000 bp, Homo Sapiens; identical to SEQ ID NO: 224052

SEQ ID NO: 404211 - DNA, 1000 bp, Homo Sapiens; identical to SEQ ID NO: 292486

SEQ ID NO: 404212 - DNA, 1000 bp, Homo Sapiens
gtgatgaagagaaaggtgctgcgcagaaagccagatggggaagtattagtaacagatgagtcgattatcagtgaatcagaatctggtacagaaaatgatcaggatctctgggacttaagacaaaggctgatgaatgtacagttccaggaagacaaggaatcttcatttgatgtttcacaaaaatttaacctaccacatgaataccaaggaatttctcaagatcagctcatttgctctctacaaagagaaggaatgggctctccagcttacgaacaagacctgattgttgccagcagacccaagtcctttattctcccaaagctggaccagttaagccgaaaccggggcaagacagaccgggtagcccggtattttgagtacaaacgggactgggactcaatacgtttacctggtgaagatcatagaaaggaattacgctggggtgtccgagagcagatgctttgtcgagcagaaccccaatccaaacctcagcatatatatgtcccaaacaattatctagtaccaacagagaagaaaaggtctgcactccgttggggtgttcgttgtgaccttgcaaatggtgtcatacccaggaagcttcccttccctctttctccttcttaaatctttttaaacttctttcacaggattgtttgagataacctagctctttatatcttcccttttaaatagaaacaactgtcttgagaagctcttcgaaacattttatggtaaggacttcacctatcattggtctttcctagctatatatcacattggtatcagatgatacttccaaattgccactcaaatccagcaattgcaagataaatcatatcagagaaagaacaacagacctggtctttctattttgtcaaattagtacgggccctttgtgtcctgtaactttttttacctatcaatatgagttgctgtgcttcagtgtgtgttttttaagttgctgggcattacacttaccaattaaagaattttggaaatt

SEQ ID NO: 404213 - DNA, 1000 bp, Homo Sapiens; identical to SEQ ID NO: 224053

SEQ ID NO: 404214 - DNA, 1000 bp, Homo Sapiens
tgacaaattagaggaagtcctgtcatactccaatgtaatcagctgggagcaaactttgcagatccaaggttgccaagagggcttggatgaagcaataagaaaggttgcaacttcaaaatcagtgcaggtagattacatgaaaaccatcctctttataccggaattaccaaagaaacacaagacctcaagtaatgacaagatggagttatttgaagtggatgatgataacaagaaaggaaacttttcaaacatgttcttagatgcttcacatgcaggtcttgtgaatgaacactgggcctttgggaaaaatgagaggagcttgaaatatattgaacgctgcctccaggattttctaggatttggcgtgctgggtccagagggccagcttgtctcttggattgtgatggaacggtcctgtgagttgagaatgggttatactgtccccaaatacagacaccaaggcaacatgttgcaaattggttaccatcttgaaaagtatctttctcagaaagaaatcccattttatttccatgtggcagataataatgagaaaagcctacaggcactgaacaatttggggtttaagatttgtccctgtggctggcatcagtggaaatgcacccccaagaaatgttgttgattgattccactgtccatttcaaatctttcttatcagtaaaaaaacattaattcaaacacaagcattgtgatctacattagcacaaaatgcaactgattatctaggatctgtgtattacttaagctcacccttaacagttttaccttccttctcctctgtattcttacagaaaattagaagctcaatttaatggtctcataatttcctttatgacagacatctcagaattaaaatcacccaaagccaatcattagtgccaagataaccctttaacggcaacactttcttaaatgaagactatttctttcatgaaaaaattcacttttatgactttcttgttaaaataaaaagtctgctttt

SEQ ID NO: 404215 - DNA, 1000 bp, Homo Sapiens; identical to SEQ ID NO: 224054

SEQ ID NO: 404216 - DNA, 1000 bp, Homo Sapiens; identical to SEQ ID NO: 292488

SEQ ID NO: 404217 - DNA, 1000 bp, Homo Sapiens; identical to SEQ ID NO: 292489

SEQ ID NO: 404218 - DNA, 1000 bp, Homo Sapiens; identical to SEQ ID NO: 292490

SEQ ID NO: 404219 - DNA, 1000 bp, Homo Sapiens; identical to SEQ ID NO: 292491

SEQ ID NO: 404220 - DNA, 1000 bp, Homo Sapiens; identical to SEQ ID NO: 292492

SEQ ID NO: 404221 - DNA, 1000 bp, Homo Sapiens
cggggctgccgtctcccctccatctcaagcacgacctgcggcagacagctggagaaggttccagaaaaaagggactctggcatgaccgaggtggagaggacctacagtgctaattgcagtgattttctggaatctaagggatgttttgccaacacaacaccctctggcaaaagtgtcagttcctcatcttcagtggaaacaggcccaagtgtcagtgagcctcctggcctccccagagtgtctgcttacgtagacaccactgctgacttggatcggaaactctccttctcacattctgatcactcctctgaaatgtcgttgcctgaagtccaaaaggataaatatcctgaggaattcagcctgcttaagttgcagacgaaagatgggcatcgtcctgagtggacattttacccaaggtttagcagcaacatccacacctaccacgtcggaaagcagtgcttctttaatggagtcttcctcggcaacaagaggtctctatcagagaggacggtggacaagtgctttgggagaaagaaatacgatattgatcccaggaatggaatcccaaagttaactccaggcgacaatccatatatgtacccagaacagagtaaaggcttccacaaagcaggatcaatgctcccaccagtgaatttttcaatagtgccttatgaaaagaaatttgatacatttattccacttgagcctcttccacaaattcccaacttgcctttctgggtgaaggagaaggccaacagtttgaaaaatgagatacaagaggttgaggagcttgacaactggcagccagcagtgcccttaatgcacatgctacacctttctggtgctttggactttccaagacaatcctgagcataaacaggcccacaaaacatgtgctgactgcactctggcgacccttttccagttgatgttttttgtcatgtgactgttctaaatccagtgtttgacccttaaaaaaaaaaaaaaaaaaaaaaaaaaa

SEQ ID NO: 404222 - DNA, 1000 bp, Homo Sapiens; identical to SEQ ID NO: 292493

SEQ ID NO: 404223 - DNA, 1000 bp, Homo Sapiens
tcgcccgtgagtgtccgggccctggggagagggctctgccccaggaggcacctgctcccgaggcctctgctgtgggagggcccaaaggcctggcagtcgagcgagagcggcacgggcgggactcaggtgagctccggaggctcctcaactctttggagtgcaaacaggatgagtacgccaagagcatgatcctgcacagtatcactcgctgtgtgtacttgctggaggctgaggcctctgcttgtactacggatgacatcgtgttgctgggctacatgctggatgacaaggacaacagtgtcaaaacccaagctctgaatacacttaaagctttctctggcatcagaaaattcaggctcaaaatccaggaacactccatcaaagtactcgaactgatctccaccatctgggacacggaactgcacattgcgggcctcagactcctcaacaaccttccactgcccgactatgtgcatccacagctgcgacgggtgatgcctgccttgatggagatcctgcagtcagactacatcctagcacaggtgcaagccgtacgactgctgagctacctggcacagaagaatgaccttctctatgacattctcaactgccaggttcactccaacttcctaaacctgttccagcccacacagtcagggagtctcctgtatgaggtactggtgtttgctgagcggctgagtgagggccggaacgcaccccactaccacgtggtgaaatggcattacaacgaacagtccctgcatgaatccctctttggggaagagtcccgactggcagaccgactacttgccctggtcatccaccctgaggaagatgttcagatccaggcctgcaaggtcattgtcagcctgcagtatccccaggacttgagagcccggccctcctcctgccagcccagtcgttcctactttaaaaacacggaataaaattaaggagagccaataaatgagtataggagagaaacaaaaaaaaaaaaaaa

SEQ ID NO: 404224 - DNA, 1000 bp, Homo Sapiens
acagacagcagcctcagatccctttcacctttgaagcaactgactgtgttgaatttggcaaattgtgtaagaattggtgatatgggactaaagcaatttcttgatggtcctgcaagcatgaggataagagagctaaatttaagcaactgtgtgcggctaagtgatgcctctgttatgaaactatctgagcgctgccctaatttaaactacttgagtttacgaaattgtgaacatttgactgcccaaggaattggatatattgtaaacatcttttccttggtatcaatagatctctctggaacagacatctctaatgagggtttgaatgtgctttccagacataaaaaattgaaggaactttctgtatctgaatgttatagaatcactgatgatggaattcaggcattctgcaaaagctcactgatcttggaacatttggatgtctcttattgctcccagctgtcagatatgattatcaaagcactggccatttactgcattaacctcacatctctcagcattgctggctgtccaaagattactgactcagcaatggagatgttatcggcaaaatgccattacctgcacattttggatatctctggttgtgtcttgcttactgaccaaatccttgaggaccttcagataggctgcaaacaactccggatccttaagatgcaatactgcacaaatatttccaagaaggcagctcaaagaatgtcatctaaagttcagcagcaggaatacaacactaatgaccctccacgttggtttggctatgatagggaaggaaaccctgttacagagcttgacaacataacatcatctaaaggagccttagaattaacagtgaaaaagtcaacatacagcagtgaagaccaagcagcgtgaccttcagcctcaagcaggaagaacaaaaaatcaagaacttggcaagttttctccatttgttgcaagtatgtttactagctgaatctcaataacaatgtaaacaagcaac

SEQ ID NO: 404225 - DNA, 880 bp, Homo Sapiens; identical to SEQ ID NO: 292494

SEQ ID NO: 404226 - DNA, 1000 bp, Homo Sapiens; identical to SEQ ID NO: 292495

SEQ ID NO: 404227 - DNA, 1000 bp, Homo Sapiens; identical to SEQ ID NO: 292496

SEQ ID NO: 404228 - DNA, 1000 bp, Homo Sapiens; identical to SEQ ID NO: 118588

SEQ ID NO: 404229 - DNA, 1000 bp, Homo Sapiens; identical to SEQ ID NO: 224056

SEQ ID NO: 404230 - DNA, 1000 bp, Homo Sapiens
gccgccgcggaaccagagtcctacctggatttgccgaagcaaatttctgaaaaaactaccaagaggatcctgatgctcctgtgtgacgagtcggggttcctcatagagagcaagctgctgagccttctcctgcccctggagcagaatgaatgctatctgctgaggctggatgccatcttctccgcccttggaattgaaagtgaggatgacttgtataaactggtgaacttcttccttaaatatcgagctcaccgtttatcttccagcctccagatcaagccctgcagtcaggcgagcatggagaaggcgagcatggaggagacaagcacgaggtcagaattggagctggcagagcagacggagatggagggagaaaaggaagaaagcctggtggaaggggagaaggaggaagaggaggagaccccaccctccccctgggtcatccaccccaatgatgtcctcaagattctggaggccttcgtcatgggtctgaagaagcctagggactcgcgggccccgctgagggtacagaagaatgtgcgtgacaactccaaggactcggagtactggcaggccctgaccacagtgatcccttcctccaagcagaacctctgggatgccctctacacagccttggagaagtaccaccttgtcctgacccagagggccaagctgctgctggaaaacagttctctggagcagcagaacacagagctgcaggcgctactgcagcagtatctgaactccaagatcaactctgaactgcaagttcctcccactcaggtgttgcgggtacccacaaaatgagctggaccgccaaaggctgatgtgttagggctggcctgatgctggtgtctgtgccggagccagctcatatcacccactgggccgcacctgggcctgctctctggattttccagggctgtctttatagcctgtcgaaataaggagccagaggagttacctgtgtcctgcattatgattaaagccttttaaagtt

SEQ ID NO: 404231 - DNA, 1000 bp, Homo Sapiens; identical to SEQ ID NO: 118589

SEQ ID NO: 404232 - DNA, 1000 bp, Homo Sapiens
ggagagtgcgttggagcgggggcctgtgcccgaggcgccggcggggggtcccgtgcacgccgtgacggtggtgaccctgctggagaagctggcctccatgctggagactctgcgggagcggcagggaggcctggctcgaaggcagggaggcctggcagggtccgtgcgccgcatccagagcggcctgggcgctctgagtcgcagccacgacaccaccagcaacaccttggcgcagctgctggccaaggcggagcgcgtgagctcgcacgccaacgccgcccaagagcgcgcggtgcgccgcgcagcccaggtgcagcggctggaggccaaccacgggctgctggtggcgcgcgggaagctccacgttctgctcttcaaggaggagggtgaagtcccagccagcgctttccagaaggcaccagagcccttgggcccggcggaccagtccgagctgggcccagagcagctggaggccgaagttggagagagctcggacgaggagccggtggagtccagggcccagcggctgcggcgcaccggattgcagaaggtacagagcctccgaagggccctttcgggccggaaaggccctgcagcgccaccgcccaccccggtcaagccgcctcgccttgggcctggccggagcgctgaagcccagccggaagcccagcctgcgctggagcccacgctggagccagagcctccgcaggacaccgaggaagatcccgggagacctggggctgccgaagaagctctgctccaaatggagagtgtagcctgagggctggtgttgcctgcctcccctgtgcttgtgccttgtcccaaaataaatcctttcagaatgtagcactcacgccctaataaggagcgaatcctacatccaccaaggcgggcgctctggccctcccttccttaagcccagtcctgtgtcctctgaaagaggtgcagtcactcacacctgcttgcgctcaccatcaataaaagtaatttcacccgaaaa

SEQ ID NO: 404233 - DNA, 1000 bp, Homo Sapiens; identical to SEQ ID NO: 224058

SEQ ID NO: 404234 - DNA, 1000 bp, Homo Sapiens; identical to SEQ ID NO: 292501

SEQ ID NO: 404235 - DNA, 1000 bp, Homo Sapiens; identical to SEQ ID NO: 118590

SEQ ID NO: 404236 - DNA, 1000 bp, Homo Sapiens; identical to SEQ ID NO: 292503

SEQ ID NO: 404237 - DNA, 1000 bp, Homo Sapiens; identical to SEQ ID NO: 224060

SEQ ID NO: 404238 - DNA, 1000 bp, Homo Sapiens; identical to SEQ ID NO: 224061

SEQ ID NO: 404239 - DNA, 1000 bp, Homo Sapiens
tccaaagccaacactgctatgatttccaccaagggccagagccatatctgtgccactcggcagccagctgggataccagccttacctagcatagagcttacccagcagcttcaagaagaatacaaggatgccactgtttctctaagtagctccagacagacattaaagggtgatctccagctgtcagatgagcagagcagctcccagatcacaggaggcatgatgcagttgcttatgaacaacccctacctggcagctcagattatgttgttcacaagtatgccccagctgagtgaacagtggaggcagcagctgcccacattcctgcagcagacacagatttctgatctgcttagtgcttaggcaaccctaaagcattccaagcaatattgcagattgagcaggccctccagctgctggccacagaggctcctgttcttctgccttgggttgcaccctacctatggggcctgggttggcttcctgcccccagctgcagctatcctgacacagtgccctgttcctggaatgtttcagatacagctgagcccaagggacctgagtgctgccacaagcctggaacagtcctgcagaggctacaatccccggatggggacccttcccaccctctgcaagctcctgagatttgttttagcaaacagatggattctctccaggccatgggatttgggaaccaccatgccaatctacaggcactcattgctactgaaggggacaccaatgctgctatccgcaagctcaagagatcccagagattctaaccaccatgcctacttgtttgcttgctacctgcctgctgacccacctgaccatctcatttgccttttgcacctttcctgatgcttccagccaggagaagtcctggaataagagttatcaaccaatgtgtcttgtactgaataatagatcattggtcgtggctgaaacatctgtcaataaaatggctacactcacttgctgcgaaaaaaaaaaaaaaaaa

SEQ ID NO: 404240 - DNA, 1000 bp, Homo Sapiens; identical to SEQ ID NO: 292508

SEQ ID NO: 404241 - DNA, 1000 bp, Homo Sapiens; identical to SEQ ID NO: 224062

SEQ ID NO: 404242 - DNA, 1000 bp, Homo Sapiens
gcgcccgcaggccccgccaaagtcttcgtgaaaatcaaagcttcccacgcgctcaagaaaaagatactgcgtttccgttcgggttctctcaaggtcatgactacagtgtgagtttggggatttgcttgggctcccccttcatggcctctgcacctccacactcccaaccactgacccttccacatctaccttccaaagaccatcgttttctctgcttccaaagacccccctcactctccccactcctaacagtcttggttgaaaaggctcccccaccaccaccgagaggaatggggaggagccctgtttgacccagttcagcttctagcttggaagcccttgggcaagacagttccccttctctgggcgtcactttcctcatctgtacagtaagtgtccatgtatgcaaaaggggtaattcggtttgaatttccccgttttagtttagaagcctagtctgtttgttccccttcaccgctctccctctcattcctgatgagccctctcattcctcctttccttgcccagctatggccccctctcattcacaaagtgccccctccatgtccctggacccttaagatatccccttggcaccctggtcagagactctgtgtctgactcaggtggtccctgcagagtgccctgggaagggaaggagcactgatttgggggttttgagggtcaagtaggggttggtaacacctggaaagaaggactctttcacttcgatccctggacaattatggaggattcggaggtagaagaggggaaggaagatggtttctatctcatgacccccactccctgtgagagggaatgggggaagcctgatgaccctcagctgttccaatctagtattttttttcttttttaaaattactgtatttattatgacgatggtgactccccagtgcaaaggggggccagattctgtgtgtttctctaacctctttgtaaataaatgcacagtgtaacataaaaaaaaaaaaaaaaaaaa

SEQ ID NO: 404243 - DNA, 917 bp, Homo Sapiens
ccgcccccacactccgcccagaggggcctcagcttttccaccactgctttctagtcctttaactcctagaggcaaacttttgggggataagaaagcctgggaggggcctgtgccaaaaccctctctgcctggggactgggcggtgattccgcttctgcctgggctcctgccatggcccccgagaggggctgacactttagctcccggtgcaggtgagaacccgcccggaggaagaaggaaggcgcgggccggggattaggagacggaggcggactcggagccagggaaccaggggtccgggctagagctggagtcgtgagcgcgcgcccgccccgctctgggaggaccgcgagatgcccgtgctgaagcagctgggccccgcgcagcccaagaagcggcctgatcgcggcgccctgtccatctccgcgccgctcggcgacttccggcacacgctgcacgtggggcgcggcggcgacgccttcggggacacctcgttcctgagccgccacggcggcgggccgccccccgagccccgggcgccccccgcgggggccccgcgctccccgccgccgcccgccgtcccgcagtccgcagcgccctcgcctgccgacccgctgctgtccttccacctggatctggggccctccatgctggacgcggtgctgggcgtcatggacgcggcgcgcccggaggcggctgccgccaagcccgacgcggaaccccgccccgggacgcagcccccccaggcccgctgccgccccaacgcggacctcgagctgaacgacgtcatcggcctctaggttccctcattccccgcgcccttcccgcccggcaccccacttctgtatacataaacggccaaggtgtgtgcccggaaaaaaaaaaaaaaaaaaaaaaaaaaaaaaaaaaaaaaaaaa

SEQ ID NO: 404244 - DNA, 1000 bp, Homo Sapiens; identical to SEQ ID NO: 224063

SEQ ID NO: 404245 - DNA, 1000 bp, Homo Sapiens; identical to SEQ ID NO: 292511

SEQ ID NO: 404246 - DNA, 1000 bp, Homo Sapiens; identical to SEQ ID NO: 224064

SEQ ID NO: 404247 - DNA, 1000 bp, Homo Sapiens; identical to SEQ ID NO: 292512

SEQ ID NO: 404248 - DNA, 1000 bp, Homo Sapiens; identical to SEQ ID NO: 118593

SEQ ID NO: 404249 - DNA, 1000 bp, Homo Sapiens; identical to SEQ ID NO: 292513

SEQ ID NO: 404250 - DNA, 1000 bp, Homo Sapiens
gccagcaagagcaaggcatgggagaggggaggtgtcacacaacttggaggtaaatgcccccaggccgcatgtggcttcattatactgagccatgtgtcagaggatggggagacaggcaggaccttgtctcacctgtgggctgggcccagacctccactcgcttgcctgccctggccacctgaactgtatgggcactctcagccctggtttttcaatccccagggtcgggtaggacccctactggcagccagcctctgtttctgggaggatgacatgcagaggaactgagatcgacagtgactagtgaccccttgttgaggggtaagccaggctaggggactgcacaattatacactatttatttatttattctccttggggttggtgtcaggggcgagccaaccccacctctatgccctgagccctggtagtccagagaccccaactctgccctggcttctctggttcttccctgtggaaagcccatcctgagacatcttgctggaaccaaggcaatcctggatgtcctggtactgacccacccgtctgtgaatgtgtccactctcttctgcccccagccatatttggggaggatggacaactacaataggtaagaaaatgcagccggagcctcagtccccagcagagcctgtgtctcaccccctcacaggacagagctgtatctgcatagagctggtctcactgtggcgcaggccccggggggagtgcctgtgctgtcaggaagagggggtgctggtttgagggccaccactgcagttctgctaggtctgcttcctgcccaggaaggtgcctgcacatgagaggagagaaatacacgtctgataagacttcatgaaataataattatagcaaagaacagtttggtggtcttttctcttccactgatttttctgtaatgacattatacctttattacctctttattttattacctctataataaaatgatacctttttcatgtaaaaaaaaaaaaaaaaa

SEQ ID NO: 404251 - DNA, 1000 bp, Homo Sapiens; identical to SEQ ID NO: 118594

SEQ ID NO: 404252 - DNA, 1000 bp, Homo Sapiens; identical to SEQ ID NO: 118595

SEQ ID NO: 404253 - DNA, 1000 bp, Homo Sapiens; identical to SEQ ID NO: 118595

SEQ ID NO: 404254 - DNA, 1000 bp, Homo Sapiens
aaagtaaccgccctagctactatatgtttccaacattattgcaacacatcgaagagaacattattaatgaagactgcttaaaagaaataaaattagagatattgttgcatctcacttctttgtctcaaacttttaattattactttccggaagagaaatttgaatcattaaaggaaaatatttggatgaaagatccatttgcttttcaaaacccagaatcaataattgagttaaacttggagcctgaagaagagaatgaattattgcagctcagttcatcattcacactaaagaattattataagatattaagtttatcagcattttggattaagattaaagatgactttccactgctaagtaggaagagtatattgctgttactaccattcacaactacatatttgtgtgaactaggattttcaatcttgacacggttaaaaacaaagaagagaaataggctcaatagtgcaccagatatgcgggtagcattatcttcatgtgttcctgactggaaggaacttatgaacagacaagcacacccatcacattaaatacaaactttacaaaattctgtgtatagccaggtgtggtggcttacgcctgtaatcccagcagtgggagaccgaggtgggcagatcacttgagttcaagaccagcctggccaacatggtgaaaccccatctctactaaaaatagaaaccttagccaggcgtggtggcacatgcctgcagtcccagttacttgggtgcctgaggcaggagaatctcttaaaccaggaaggcagagattgcagtgagctgagataatcccactgcattccagcctgggcaacagcgtgagacttcatctcaaaaaaaaaaaattgtatttgtacttttaaagggattttgcagtatgttgtagttaaacgttaataaaattatatttgtaattaggaaaaaaaaaaaaaaaaaaaaaaaaaaaaaaaaaaaaaaaaaaaaaaaaaaaaaaaaaaaaa

SEQ ID NO: 404255 - DNA, 942 bp, Homo Sapiens
ggtggttcttgcccgtgttgtgtgtgtgtgtgagtgagagagcgagtgagtgagtgagtgagtgtgtgtgtgggggggactcggcttgttgttgtcggtgacttccccctccccttcaccccttcccctccccgccgccgctgcagtggccgctccctgggccgtaggaaatgagcgataacgatgacatcgaggtggagagcgacgaagagcaaccgaggtttcaatctgcggctgacaaacgggctcatcataatgcactggaacgaaaacgtagggaccacatcaaagacagctttcacagtttgcgggactcagtcccatcactccaaggagagaagctctatttcctcttttggaaattgtgtactcctgtccttcatcgtcaaagtttgatgcagaaatgccacaccttcatttcaagctaccaagtgcacaagaaaaaagaatgcaagatttaaaaaatgattgttttgaccccttacacaaatgtcttactcctggctttaattaagctgcttgagggctgatagctctgccttaccctggtaatcagcaaaatggtcctgtggctggggaggccctggcagcaggaagccttcaaggagccatgggtctgtgctgactctggccttacaaccttccagcctcctttgctggcattgatggggttccatttttgaatgaactagtttaatgtggatccaaatttattgtgcatattctttcgttttggttttcaaaagatggcttattcacatggaaatgtacaccagtttagccctgggccctccctttaccttcatatgtgtaaaagcttacacaggtttcagaaaataaatggtttcattttctctaaaataactagtacaaaataaaacagatgtcagttgttgaaaaaaaaaaaaaaaaaaaaaaaaaaaaaaaaaaaaaaaaaaaaaa

SEQ ID NO: 404256 - DNA, 1000 bp, Homo Sapiens; identical to SEQ ID NO: 224066

SEQ ID NO: 404257 - DNA, 1000 bp, Homo Sapiens; identical to SEQ ID NO: 118596

SEQ ID NO: 404258 - DNA, 1000 bp, Homo Sapiens; identical to SEQ ID NO: 115498

SEQ ID NO: 404259 - DNA, 1000 bp, Homo Sapiens; identical to SEQ ID NO: 118597

SEQ ID NO: 404260 - DNA, 1000 bp, Homo Sapiens; identical to SEQ ID NO: 118598

SEQ ID NO: 404261 - DNA, 1000 bp, Homo Sapiens; identical to SEQ ID NO: 224072

SEQ ID NO: 404262 - DNA, 717 bp, Homo Sapiens; identical to SEQ ID NO: 118599

SEQ ID NO: 404263 - DNA, 1000 bp, Homo Sapiens; identical to SEQ ID NO: 118600

SEQ ID NO: 404264 - DNA, 1000 bp, Homo Sapiens
cccgtatcataatctggaaagtgggatggccaatcttctcaagccaatagatgacttctgcacaaagttctttgtgggaacagaggaaggcgaagtgatatacacagattggaaaatggaaaaagaccctgaaactggccgacttatgtcaaagaagccagtgagccaccacaccattcacgacggaactgtccacactattcagagatcacctttctacaacgacattattctcacggttggaggttggaacgtggccatatggaaagaaggtgttatgactggaccgctccttcagtcatgctgtgcaccaaaaaggtacacctcaggccactggtccctgactcggcccggagttttctacatcggccgagaagatggatacattgatatctgggaccttctggagaaaacccatgaaccagcccagtctcaaaacatttgcataactatgatcacctacatcaaaccctggatcttttcttctaaacagcaatttatagccacagctgattattatggaacactgcatatattagaaattccttggacattaagtcgcccttccaccaatgagatggcaagtgtcaaccactattttgaaagagaagtcaagcatctggaatacgtagaacagcgcaaaaaaattcgtgagcaagaaaagaaagaaatggaactagaaatggcaaagaaaaaagttaaaacatatcagaagtcaaaagaacaaatgcaggctgaattaaaaatggactatgagagttatctggaactggaaaagactgttcttatcaaccttggcctaatcaaagtcacagagaaggggtcatacatggaggtgatgtaaaaaagcttcctgaaggggtgttttggggacttcttccctctatttatttttatgtcaggtgaactggcatgctgaacatatatatatataggctcatttatagacttttatttccctgctattaaaacttttgaatttgaaaaaaaaaaaaaaaaa

SEQ ID NO: 404265 - DNA, 1000 bp, Homo Sapiens; identical to SEQ ID NO: 292523

SEQ ID NO: 404266 - DNA, 1000 bp, Homo Sapiens; identical to SEQ ID NO: 224076

SEQ ID NO: 404267 - DNA, 1000 bp, Homo Sapiens
accaccgtgaggggggcgcttaggagcagaaacacccaggccgagcaggatgagcaggtgaagctgcccaacgcaggggacgggacgcagaggcgattcacgagcctggggctccagcagcagccaggcggatcccgccacacctttcgctctcagctaccagtctgcctgccaccatcaccttcccgcgtgtgagtggggccctggttccccaagcagccgctgactcccggacgcctgctggccaggccccggtcatgagtgcatccggggaaggcttcgggcctacaggaacggaaggaaaagccatccagcctccctgaccctccacacggaagctgaggggttccccatacaccggctgccggggactgcctcgactctggttttggcagagacaggccctgctgtgtccgtcatctctgatggaagtgacagccatttcccctgcagacaggccagagcggcctatccacgctccacggtgtgaggccagtggtggcgtccccagggccacagcccagcgagggtgaggtgggggagcgtcctggctgagggctggccgcctcccgcgtgctctggggaacaatgcttccgcaccacccccgccccttcctggcttctgtgaaactgaacatctccaagtaaatattttcactgctaagcacaggcagcacttcgaggcttcgtgacgaagacgtggaatgcttgaccctcacctctcacctctcacctctgcaggtcctgggcgcagacttcaccttctggaccttctcctatccggaaagtatgtggctcacacggtggtgcaaggagccttgggctgggcagctgctggcctggatccgagtcctgccctggtgaaagtgctgattactttacatacttctacatctgcagaaccaggtgattgatcctcaaagcccagccagctccagcaagctctggtacctgcaaccacgggccgccctgtgcccggcccaccttcctcgaaccgtgt

SEQ ID NO: 404268 - DNA, 1000 bp, Homo Sapiens
tgtgacaagctccagcaggggtgggggccgggctgagggtgggggtgcgaggtggtcactcccatcgtgcccctggccgtccctccactcacccacacctggcccagtccacgttgaggtccaggactgggaaggaccgggtgagtgcaccggggacccaggccaggtgccccccggagcctgctggggtggccagagcaggagggggtgtgtttcctttttgtgggtgttgcatgcaaatcaagtggacaagaaaaaataacaaaacaaaaaacaagaaaaaaaaaacacaaaaccccgtaaaatcacaaagaaaatccaacaccaaaggcgcagaagccggctggccgtggtgggggcagcgtaggcgtagcatccctctcctctcacttagcctgttgactcttgttattatcatgatattcacaaaacgccgcatgtttaaaaagtcatagatgtcatcttctctctgcccccagggaggaaagccaccttctcttgccccttggcccctttgtcaggggccaggggtctgccgggtgggggtgccaacaggcctggccctttcctcccctgcatccagccatgggggcctctgcgattgccggaaggttgcatggctggtcccagggccagcacaggcccgaggccgggctgcctggttttatttttatttaactttattttctgttttatgagtgtgtgtccgcccacccccacccccttcagtgttaagtggggagccctgggggagtctctcctgcctcccagcctctcccaagacctcccccctcgtcaccagccatccctctggaccaggcagagggcggaccgggtgggcaggggcctgagggtggctcgggccagcccaccagccaatggacccctcctcaggccgccagtgtcgccctgcccctttttaaaacaaaatgccctcgtttgtaaacccttagacgcttgagaataaaccccttccttttcttccaaaaaaaaaaaaaaa

SEQ ID NO: 404269 - DNA, 1000 bp, Homo Sapiens; identical to SEQ ID NO: 118601

SEQ ID NO: 404270 - DNA, 1000 bp, Homo Sapiens; identical to SEQ ID NO: 292526

SEQ ID NO: 404271 - DNA, 1000 bp, Homo Sapiens; identical to SEQ ID NO: 118602

SEQ ID NO: 404272 - DNA, 740 bp, Homo Sapiens; identical to SEQ ID NO: 292528

SEQ ID NO: 404273 - DNA, 1000 bp, Homo Sapiens
aaagcaggtagcagagaaactggaggctttcttaggcagaaaaggagacaaactggcctttgtggaagagaaagcccctgcccaacaaaacagctatgactgtgggatgtacgtgatatgtaacactgaggccttgtgtcagaacttctttaggcaacagacagaatcactgctgcagctactcacccctgcatacatcacaaagaagaggggagaatggaaagatctcattgccacacttgctaaaaagtagctattgaagtatatttgcgacttttgaaggctcctctttctgcccttccccatttgttggatggctgcaatctcagtgcctgagggaagatgcctagtagaggaaagcttaatactctttttcctgaaagaatatcatcctctgcattatccccatggaacgtttcactttaaccctgactggggagcaatatgttctgtgaaaatatcttgaaattgtacaccaaaaccttacaaccaacttatttgaacatttattacacacagggtttacgtaagacttttcttattggtatataattaatttcctttggtctcccttatccacattggcttattctggaggaaaagcagtgatctgtaaaacaaatcaagaatatattaaatctagaggaatgcagagaagaaaactataaaacagaaccaaaaacttgttgcacagcctacataattaagagatcaactggctggaagcagatcaaggcctaacttcattcaagacctaaatattatgagactcagttattcggttttatgtgacatctcttccattcaccatgcacaggcttttccagctatctatataatgtttgcaaatatttgataaagatgatgttaccctatcttcctccatctgattcctggaatgcttgaagaaaggggaaatcttgagtaacctcattaaaattaatgtctggtggaaaaaaaaaaaaaaaaaaaaaaaaaaaaaaaaaaaaaaaaaaaaaaa

SEQ ID NO: 404274 - DNA, 1000 bp, Homo Sapiens; identical to SEQ ID NO: 118603

SEQ ID NO: 404275 - DNA, 1000 bp, Homo Sapiens; identical to SEQ ID NO: 224080

SEQ ID NO: 404276 - DNA, 1000 bp, Homo Sapiens; identical to SEQ ID NO: 292531

SEQ ID NO: 404277 - DNA, 1000 bp, Homo Sapiens; identical to SEQ ID NO: 292532

SEQ ID NO: 404278 - DNA, 1000 bp, Homo Sapiens; identical to SEQ ID NO: 224081

SEQ ID NO: 404279 - DNA, 1000 bp, Homo Sapiens; identical to SEQ ID NO: 224082

SEQ ID NO: 404280 - DNA, 1000 bp, Homo Sapiens; identical to SEQ ID NO: 292534

SEQ ID NO: 404281 - DNA, 1000 bp, Homo Sapiens
agacagacagtattggatagggtaaagcaagaaaactcaagctgcagctggactgcaggcttattttgcttaagtcaacagtgccctaaaactccaaactcaaatgcagtcaattattcacgccatgcacagcataatttgctcctttgtgtggagtggtgtgtcagcccttgaacatctcctccaaagagactagaagagtcttaaattatatgtgggaggaggagggatagaacatcacaacactgctctagtttcttggagaatcacatttctttacaggttaaagacaaacaagaccccagggtttttatctagaaagttattcaagtgaaagaaagagaagggaattgcttagtaggagttctgcagtatagaacaattacttgtatgaaattatacctttgaattttagaatgtcatgtgttcttttaaaaaaattagctccccatcctccctcctcactccctccctccctccttctctctctctctctctctccctccctctctcacagacacacacacacacacacacacacacacacacacgcacgtccacactcacattaaacgaaagctttatttgaagcaaagctagccaagattctacgttacttttcccttgactggatcccaagtagcttggaagtttttgtgcccaggagagtaaataactgtgaacaagaggctctgcccttaggtctttgtggctgtttaagtcaccaacaatagagtcagggtaaagaataaaaacactttcatagcctcattcattcacttagaagtggtaataatttttccctaatgataccacttttcttttccccctgtacctatgggacttccagaaagaagttaaattgagtaaaatcatcagaaactgaatccatgtaagaaaaaataattgttgaagaaagaagttgatagaattcaaaaaggccatctttttgctttcacatcaataaaatttaccaagtaataaaaaaaaaaaaaaaaaa

SEQ ID NO: 404282 - DNA, 1000 bp, Homo Sapiens; identical to SEQ ID NO: 292535

SEQ ID NO: 404283 - DNA, 1000 bp, Homo Sapiens
caccactaactgctcagccaatatcaacttgacccaccagccctggttccaggtcctggagccgcagttccggcagtttctcttctaccgccactgccgctacttccccatgctgctgaaccacccggagaagtgcaggggcgatgtctacctgctggtggttgtcaagtcggtcatcacgcagcacgaccgccgcgaggccatccgccagacctggggccgcgagcggcagtccgcgggtgggggccgaggcgccgtgcgcaccctcttcctgctgggcacggcctccaagcaggaggagcgcacgcactaccagcagctgctggcctacgaagaccgcctctacggcgacatcctgcagtggggctttctcgacaccttcttcaacctgaccctcaaggagatccacttcctcaagtggctggacatctactgcccccacgtccccttcattttcaaaggcgacgatgacgtcttcgtcaaccccaccaacctgctagaatttctggctgaccggcagccacaggaaaacctgttcgtgggcgatgtcctgcagcacgctcggcccattcgcaggaaagacaacaaatactacatcccgggggccctgtacggcaaggccagctatccgccgtatgcaggcggcggtggcttcctcatggccggcagcctggcccggcgcctgcaccatgcctgcgacaccctggagctctacccgatcgacgacgtctttctgggcatgtgcctggaggtgctgggcgtgcagcccacggcccacgagggcttcaagactttcggcatctcccggaaccgcaacagccgcatgaacaaggagccgtgctttttccgcgccatgctcgtggtgcacaagctgctgccccctgagctgctcgccatgtgggggctggtgcacagcaatctcacctgctcccgcaagctccaggtgctctgaccccagccgggctactaggacaggccagggcacttgctcctgagcccc

SEQ ID NO: 404284 - DNA, 1000 bp, Homo Sapiens; identical to SEQ ID NO: 292536

SEQ ID NO: 404285 - DNA, 1000 bp, Homo Sapiens; identical to SEQ ID NO: 292537

SEQ ID NO: 404286 - DNA, 1000 bp, Homo Sapiens; identical to SEQ ID NO: 224084

SEQ ID NO: 404287 - DNA, 1000 bp, Homo Sapiens; identical to SEQ ID NO: 118606

SEQ ID NO: 404288 - DNA, 1000 bp, Homo Sapiens; identical to SEQ ID NO: 224085

SEQ ID NO: 404289 - DNA, 1000 bp, Homo Sapiens; identical to SEQ ID NO: 118608

SEQ ID NO: 404290 - DNA, 1000 bp, Homo Sapiens
cacgtcacccccgccacacttcccccatgccgccaccagcagctctgcggcctccagctggcccacggcggcctcgcccccggggggcccacagcaccaccagccacagccgcccctgtggactccaacacccccttctccggcttcagactggccacccctggccccccaacaggccacctcagaacccagggcccaccctgccatggaggcagagagataagggaggcccctcccccctcccggaggccaggaccccgtggggcgggggagaggacgtctctgcgggcccccttcaccccttttctgtctgcaccccttgttccccggagccctggaggggagagcgcggactctagccaggcagggacacgtctggtgccagaacacgcagctgcccacacgcaaggtcatggccccagcggccccggcacatggagtggttcagagcggcctgggtgcctggcggacagaacttcagagaccacgcagccttccttcgaagacgcacctgcccagcccagcccaggggtgccgtggaggaccaccctggcggagacattgctgatccctggcttggagctccttgggggccggcaggcctcgacccccaccctagggaatgcagagcctctccgcatgtgtgcgcgtggccgtgtctgtgtatttctacgtgtgtcgctcttcagaagcaacctagttcctggggcagctggactttgcatgttagtgtgagcccccagccccctgcccgccgccccctccccagggccctgcctcctccccaccccctcgtcagccagcgttgctgttccttgcagagaaaaggattgtgggaaactccaggactcttcccaccgcctcccagcgcctgcctgctggggctgcctgcatgcctcccctgcacctgggggtacccgcatccacttcctttcccccttttaacaaaagagaagaacgaattccaaaccaaaaaaaaaaaaaaaaaaaaaaaaaaaaa

SEQ ID NO: 404291 - DNA, 1000 bp, Homo Sapiens
gtggtgaatggcgacgggatggagcgcgaggggagcggcggcagcggcgggtcggccgggctcctgcagcagatcctgagcctgaaggttgtgccgcgggtgggcaacgggaccctgtgccccaactctacttccctctgctccttcccagagatgtggtatggtgtattcctgtgggcactggtgtcttctctcttctttcatgtccctgctggattactggccctcttcaccctcagacatcacaaatatggtaggttcatgtctgtaagcatcctgttgatgggcatcgtgggaccaattactgctggaatcttgacaagtgcagctattgctggagtttaccgagcagcagggaaggaaatgataccatttgaagccctcacactgggcactggacagacattttgcgtcttggtggtctcctttttacggattttagctactctatagcatacatccttatgctgagatgttgaacttaaactttatggaatcctccaaaagaatacattatggagtgtagtgttttcttagttcttcaaagggaagcaacttggatgaacaggaacatgaaggacaacacatctcagccttttcttcattttgaagctcctagaattgaagacttatgtggactcctattgttctcaaccaaaacaagtcttttggctttcttttttgtagatatttaatttaagcagttttaatgtgtacctttacccaagccaagtcaacagtgtctctggggtggcatcctttgcactgaaatttacagtattctgtgagatgtcgcatattttgaagaaaccgtggaagatactggtttatttcaaatgagcagagtatgttgtattaaaatcttatctaatcttgattaaaatttggcaaactcttttctttgctacatcttagtgacaataaatgccaaataggttttggttgagtatagttttgaaaacaaatttggtgaaataaagcaggaaaaaaaaaaaaaaaa

SEQ ID NO: 404292 - DNA, 1000 bp, Homo Sapiens; identical to SEQ ID NO: 118609

SEQ ID NO: 404293 - DNA, 1000 bp, Homo Sapiens; identical to SEQ ID NO: 118610

SEQ ID NO: 404294 - DNA, 1000 bp, Homo Sapiens; identical to SEQ ID NO: 292543

SEQ ID NO: 404295 - DNA, 1000 bp, Homo Sapiens; identical to SEQ ID NO: 224086

SEQ ID NO: 404296 - DNA, 1000 bp, Homo Sapiens; identical to SEQ ID NO: 118611

SEQ ID NO: 404297 - DNA, 1000 bp, Homo Sapiens; identical to SEQ ID NO: 292544

SEQ ID NO: 404298 - DNA, 1000 bp, Homo Sapiens; identical to SEQ ID NO: 292545

SEQ ID NO: 404299 - DNA, 526 bp, Homo Sapiens; identical to SEQ ID NO: 292546

SEQ ID NO: 404300 - DNA, 1000 bp, Homo Sapiens; identical to SEQ ID NO: 292547

SEQ ID NO: 404301 - DNA, 1000 bp, Homo Sapiens; identical to SEQ ID NO: 118612

SEQ ID NO: 404302 - DNA, 1000 bp, Homo Sapiens; identical to SEQ ID NO: 292550

SEQ ID NO: 404303 - DNA, 1000 bp, Homo Sapiens
cgcggcaagtggtccaggggctggaggcgctgcgggcagagcaccatggcctggctgggcacctggcggaggccctggcgggacagggcccggcagccggcttggagatgctggaggaaaagcagcaggtggtgagccactcgctggaggccatcgagctggggctgggcgaggcccaggtgctgctggccctgtcggcacatgtgggtgcactggaggcagagaagcagcggctgcgctcgcaggcccggcggctggcccaggagaacgtgtggctgcgggaggaactggaggagacgcagcggcggcttcgggccagcgaggagtccgtggcccagctggaggaggagaagcgccacctggagttcctggggcagctgcgacagtacgacccaccggcggagagccaggtgccacgggcagggcgaggcggggggtgctgggcccttcatagagccccacagtcccccagaccctccttagaatcccacagtccccaagatcctccttagaatcccacagtcccccagaccctccttagaatgccacagtcccccaaccctccacagagcccccagacccaccagaacttccacagacgcccccactagctactccacgaagcccccgagcctcgccagacccccagggggcctctgacgctcgtgaccaccacctccctcaaaccttgagataggctgggtgcggtggctcacgcctgtaatcccaacactttgggaggccgaggcgagcagatcacctgaggtccggatttcaagaccagcatgaccaacatggagaaaccccgtctctactaaaaatacaaaattagccgggtgtggtggcacatgcctgtaatcccagctactccggaagctgaggcaggagaatggcttgaacccaggaggtggaggttgctgtgagccaagatcgcaccattgcactccagcctgtgcaacaagcgaaactccgtctcaaaaaaaaaaaaaaaaaaaaaaaa

SEQ ID NO: 404304 - DNA, 1000 bp, Homo Sapiens; identical to SEQ ID NO: 292552

SEQ ID NO: 404305 - DNA, 1000 bp, Homo Sapiens; identical to SEQ ID NO: 292553

SEQ ID NO: 404306 - DNA, 1000 bp, Homo Sapiens; identical to SEQ ID NO: 224088

SEQ ID NO: 404307 - DNA, 1000 bp, Homo Sapiens; identical to SEQ ID NO: 224090

SEQ ID NO: 404308 - DNA, 1000 bp, Homo Sapiens; identical to SEQ ID NO: 292556

SEQ ID NO: 404309 - DNA, 1000 bp, Homo Sapiens
gtggcgtcagctatgataaccacaagaagcttccaaataaagcctgaggtcctcttgcggtagtcagctattgcatagagagtggtgtctattcctatggagaagccagtagttagaaacggtgagaattccaacactgttcatgtaacagtaactccatagatggaagagcattggcaggaaaaagctctagaggctatacagagaagaaaaaaagagcaaaaatgagacctgtatattacttttatttttaggaccataatcaactttgtaatattcttatataattaattagtggtggtctccgactttatagcaggaactttctggtagtatgagaagaaatcattgggtgactatgactaatgtttcagaattactttttaattgttttaaaaagcactccagataatttataagtaacataggcctcatatttacactatatgttcgctttataattccgaagttgttatttgctaaatctccaatggttgcaatcaaaccccacaatgctgaaaacagagattgattttgatgttaagaacaaaagaagtatggaaacttccaggcttaaacatgtcccccgtgccacaaggcaaactgcgatgagctcacagtccaggtctcttgctgtgtgtcctgcagggagtggccaactctccaccttccagcaccattatcagagggtgggaaaaggcacatgaaagtggccagctcctgtcaatttatttgcttacaagggagaatgcttggaaaggttgcattggttgaaaccactgaggagcatcaccctggggatttcatgttttcactctgttcttagtcccaggagccacaggtaatcgagaatgtttgtgaactctatccacatcccctcccccacctgccaaataacctgttcaaaacaaagaaggcatagaatataaatgaatttcaaaagttaaaaaaaaaaaaaaaaaaaaaaaaaaaaaaaaaaaaaaaaaaaaaaaaaaaaaaa

SEQ ID NO: 404310 - DNA, 1000 bp, Homo Sapiens
ggtgacgagagcccagatgtgctggaggagctcagccaagccatcgagacctccgacctcgagaaatctcagagctcagactctttctcccaagacacgtctgtgacgctgatgccagtgtcggttaaactccctgtccacccagtggaaaattctgtggcagaatttgatagccactctggcggctcctattgtaagttacggtccatgatccaacctcatggagttagtgaccaggagaagctgagtttggatcctggtaaacttgccaagccccagatgcagcagacacagcctcaggcctatgcttactcggatgtggacaccccagccggtggcgaaccactgcaggccgatggcatggccatgatccgttcctctctggctgctttggacaaccacggcggtgaccccctgggcagtcgagcatcttccaccacttataggaactcagagggtcagtttttctccagcatgactctctgggggctagcgatgaagacgctgcagaatgaaaacgagttagaccagtgatgtaccgcgcttctccacggtagaggcgtgttctcagtttagcaggctggtgttaaggctgtaggaggacccagtttccccatgacagtgccttctaactagccagagaataggtagcttccctcctgatgatggctcataatctgaagcatcttgagctgggggtgtgagggggagggcctgctggctcaccgtgaggcagccgcgggagggagcgctgacgtcacagaagcgaaggcttgatgctgtctcagcagcctcagctgtgggggggaagcgcgtgtgcatcgtgtcaactactgtacatgttggtcatgtgaaaggaattatatatgtatagtattacaagtatttttgcatttttacaagattgaaatttgtagcattttgtattatttacacagaatttatttgtatatgaaactcataccataatttaattcgaataaatgaaacttttctatat

SEQ ID NO: 404311 - DNA, 1000 bp, Homo Sapiens
gaacctcacgccacactattttcttgaagaaattattttggtagatgacatgagcaaagttgatgatttgaaagaaaaactagactatcacctggaaacttttcggggaaaggttaaaataataagaaacaaaaagagagaggggctgattcgagcaaggctgattggagcttctcatgcttcaggggatgttctggtgttcctggacagccactgtgaggtgaacagagtatggctggagcccctgctgcatgccattgccaaggaccccaaaatggtggtgtgccccctgatagatgtcattgatgatagaactctggagtataagccctctcctcttgtaaggggaacttttgattggaacctacaatttaaatgggataatgttttctcttatgagatggatggaccagaaggatctactaaaccaatccggtcacctgcaatgtctggaggaatttttgctatacgtcggcattattttaatgaaattggacagtatgacaaggatatggatttttggggaagagaaaatttggaactttcactaaggatctggatgtgtggaggccaactctttataatcccctgctctcgagtaggacatatcagtaagaaacaaactggaaaaccttctacaatcatcagtgctatgacacataactacctaagactggtgcacgtttggctggatgaatataaggagcagttttttcttcgaaagcctggtctgaaatatgtcacctacggaaatattcgcgagcgtgttgagttaaggaaacgactgggttgcaagtcatttcagtggtatttggataatgtcttcccagagttggaggcatctgtgaacagcctgtgaaaggaaaacaaatcactttcattaataaagggttaaaagtctcctagtcattcaacatagtgtcacaagagtgtaagtttggaacatcgtggaattacgtgaaatgcaattaaaaaaatatgaccaaaaaaaaaaaaaaaa

SEQ ID NO: 404312 - DNA, 1000 bp, Homo Sapiens; identical to SEQ ID NO: 292558

SEQ ID NO: 404313 - DNA, 1000 bp, Homo Sapiens; identical to SEQ ID NO: 118613

SEQ ID NO: 404314 - DNA, 1000 bp, Homo Sapiens; identical to SEQ ID NO: 118614

SEQ ID NO: 404315 - DNA, 1000 bp, Homo Sapiens; identical to SEQ ID NO: 224092

SEQ ID NO: 404316 - DNA, 1000 bp, Homo Sapiens; identical to SEQ ID NO: 118615

SEQ ID NO: 404317 - DNA, 1000 bp, Homo Sapiens; identical to SEQ ID NO: 292562

SEQ ID NO: 404318 - DNA, 1000 bp, Homo Sapiens
cggccatgattgtgtatgctctgatggtggtgtcttacttcctcgtcactggaggaataatttatgatgttattgttgaacctccaagcattggctctatgactgatgaacacgggcatcagaggccagtagctttcttggccaacagagtaaatgaacaatgtattatggaaggacttgcatccagcttcctgtttacaataggaggtttaggtttcatattcctggaccgatggaatgcaccaaatatcccaaaactcaatagatttcttcttctattcattggattcgtttgtgtcctattgagctttttcatggctagagtattcatgagaatgaaactgccgggctatctgatgggttagagtgcctttgagaagggctatctgatgggttagagtgcctttgagaagaactcaatggatactggatttgctcctgtcaatgaagtttaaaggctgtccaatcctctaatatgaaatgtggaaaagaatgaagagcagcagtaaaagaaataccgagtgaaaaaacaggaagtgtattgaagcttggactagaattccttcttggtattaaagagacaagtttatcacagtatttttttttcccctgctgacccattgctgtaccaacgatgttgagtggcattttcttcttagtttttcatttcttaaaaaaaaaagctccatatttacagctataatatcaaataaagtgattattttttacaacccccttaacaccttttggagatggcgtttctgttttcagaaattaacgtaaaatcaagaagcaagattccataagctgagaactctggacagctgatcaggtttacctatggtgctttgcctttaactagagtgtgtgacggtagattatttcagatatgtatgtaagactgtttcctgaacaataagatgtatgaaaggagcagaaataaataatttttctaattaaaaaaaaaaaaaaaaaaaaaaaaaaaaaaaaaaaaaaaaaa

SEQ ID NO: 404319 - DNA, 1000 bp, Homo Sapiens; identical to SEQ ID NO: 292563

SEQ ID NO: 404320 - DNA, 1000 bp, Homo Sapiens; identical to SEQ ID NO: 118616

SEQ ID NO: 404321 - DNA, 1000 bp, Homo Sapiens; identical to SEQ ID NO: 118617

SEQ ID NO: 404322 - DNA, 1000 bp, Homo Sapiens; identical to SEQ ID NO: 118618

SEQ ID NO: 404323 - DNA, 1000 bp, Homo Sapiens; identical to SEQ ID NO: 292568

SEQ ID NO: 404324 - DNA, 1000 bp, Homo Sapiens; identical to SEQ ID NO: 292570

SEQ ID NO: 404325 - DNA, 1000 bp, Homo Sapiens; identical to SEQ ID NO: 224095

SEQ ID NO: 404326 - DNA, 1000 bp, Homo Sapiens; identical to SEQ ID NO: 292572

SEQ ID NO: 404327 - DNA, 1000 bp, Homo Sapiens; identical to SEQ ID NO: 224096

SEQ ID NO: 404328 - DNA, 991 bp, Homo Sapiens; identical to SEQ ID NO: 224097

SEQ ID NO: 404329 - DNA, 1000 bp, Homo Sapiens
gacaaagggcacaatagagtttactattggtgtctgtgaatttgaaatggcaaacaactccttaagtttttataagctgatttcaggaggtaaagatcttcttttcttgtgttccccagggttttgggatgccctctgggtttgtagtggagtggggttgtaacttggttgcaaggctgctggttctacattagggtccatatttagttgtcatgttacaagaggcttgggtagttgtacttcccaatttttttttttttttttttttttttttgagacaggagtctcgctctgtcgcctggctggagtgcagtggtgtgatctcagctcatcaaaacctttgcctccctagttcaagcgattttcctacctcagcctcctgagtagctgggattacaggtgcccaccagcacgcccagctaattttttgtgtgtttttagtggagacggggtttcaccatgttggctaagctgggtctcgaactcctgacctcaggtgatccacccgccttggcctcctgggtgctgggattacagacgtgagccaccacccccggccacttgtttcttttaaatgcttattaaaagtttctcatcagaatattttatttataattatactgcatattctctgaaattttactgccaatttttcaaaatacctgcttttgatgagtacagttacagtcaaatactgtagttagacaaattcttttttaatggtatattaatgttgcataccaaattgtatgagttaaacgtctcttcctgtgcagtttcatattagtggtgttttcagtgtaggtatcttaatatcagcttatcgtggtttttggttatgtattataattttagtcaatttgcaattctgtctgtatactttatgtcaatgtgaggttgaattaaaagatagccatatgtctatcacaaaaaaaaaaaaaaaaaaaaaaaaaaaaaaaaaaaaaaaaaaaaaaaaaaaaaaaaaaaaaaaaacctcggg

SEQ ID NO: 404330 - DNA, 1000 bp, Homo Sapiens
ctcatacgacttcagctcctcacttggactcctcttgaggcaaaatgtcgtgactttgagaatatgctgtggtttgaatctttgctgttttatggttgtgaagaacgagagcaagaaaaagatgatgtagatgttgccctactacctaccattgtggaaaaggtgattcttcctaaactaacagtgatagctgaaaatatgtgggaccctttttctacaacacagacttcaagaatggtgggaattacactaaaattaatcaatggatatccttcagtagtgaatgcagaaaataaaaatacacaggtatacctaaaggcacttttattgagaatgagaagaactttagatgatgatgtatttatgcccttatatcccaaaaatgtcttagaaaataaaaattctgggccttacttgttttttcaacgacagttttggtcttcagttaagctgttaggcaattttcttcagtggtatggcattttctcaaataaaactctgcaagagttatcaatagatggtttattaaatcgatatattctcatggcttttcagaattcagaatatggagatgacagcatcaaaaaagcccaaaatgtaatcaattgtttccccaaacaatggttcatgaatctgaaaggagaaaggactatttctcagttagaaaacttttgccgataccttgtacacttagcggatacaatttatagaaatagtatcgggtgttctgatgtggaaaaaagaaatgcaagggaaaacataaaacagatagtaaaactccttgcaagtgttcgagctttggatcatgctatgtctgttgcaagtgaccacaatgtgaaagaatttaagtctttgatcgaaggaaaatagatctatgagactgaaaaacctatttgcttgattaccattcccaatgtgtaaattttgtatatatgtaaagtttcttaaactgtaaaatagcaattcttgttttaatacaaaaaacattatattcaatact

SEQ ID NO: 404331 - DNA, 434 bp, Homo Sapiens
agttgttgttggttgggggccttttggccggtgacggagactgcccaggtgtggtcaccatgttcctctccgcggtcttctttgccaagagcaagtcaaatgaaacaaagagtcctcttcgtggaaaagaaaaaaatacgctccctttaaacggtggattgaaaatgactttgatttataaagagaagactgagggcggggatactgattcagaaatcctgtagcgtgtaataaaagaagaggaaatggcatggaatcactgcctcctgtgatttgaaggccattgtgaaggaaaacaatgcagtgaaagaaagttcttcatattaggacagatatcattgcatcacatttatttatctttctgggtatttttatagcccttaataaaaaatattaaaatcgaaaaaaaaaaaaaaaaaaaaaaaaaaaaaaaa

SEQ ID NO: 404332 - DNA, 1000 bp, Homo Sapiens; identical to SEQ ID NO: 118620

SEQ ID NO: 404333 - DNA, 1000 bp, Homo Sapiens; identical to SEQ ID NO: 292577

SEQ ID NO: 404334 - DNA, 1000 bp, Homo Sapiens; identical to SEQ ID NO: 292578

SEQ ID NO: 404335 - DNA, 1000 bp, Homo Sapiens
agccaagaagttctggaagccaggggactcattggcgccccctgaggtggactttgacaggctgctggccagcctgcaggatcttagtgagctggtggtagagggtgacacccaagtgacaccagtgcccggcggggcacggctgcgtaccctcgagcccatcccgctgaagctctaccggaatggcatcatgatgttcgacgggcccttccagcccttctacgatccctccacacagcgctgcctccgagacatattggatggcttctttccctcagagctccagcgactgtaccccaatggggtcccctttaaggtgagtgacttgcgcaatcaggtctacctggaggatggactggaccccttcccaggcgagggccgtgtggtgggcaggcagcggatgcacaaggccttggacagggtggaggagcacccaggctccaggatgactgctgagaaatttctgaacaggctccccaagtttgtgatccggcaaggcgaggtgattgacatccggggccccatcagggacaccttgcagaactgctgcccattgcctgcccggatccaggagattgtggtggagacgcccaccttggccgctgagcgagagaggagccaggagtcacccaacacgccggcacccccgctctccatgctgcgcatcaagtctgagaatggggaacaggccttcctactgatgatgcagcctgacaacaccattggggacgtgcgagctctgctagcgcaggccagggtcatggatgcctctgcctttgagatcttcagcacattcccgcccaccctctaccaggacgatacactcacgctgcaggctgcaggccttgtgcccaaagcagcactgctgctgcgggcacgccgagccccgaagtccagcctgaaattcagtcctggtccctgtccccccggtcccggtcccggccccagtccctgtcctggacccagtcccagcccccaataaagcacccgccccctcaaa

SEQ ID NO: 404336 - DNA, 1000 bp, Homo Sapiens
acgtgagctgcagccccaggcctggggctccgccggccgcgattgggggtgaggcgggcgcgcgggacgggagtgagtcagggagccgccccctcgcgcccatcctcaccgcagccgtgtgcccgcagcccgggtcttctcgacggtgacggctgtctcggtgctgctgctgctgctcctggggctgctgcgtccgctgcgccgacggtgcggggcgctggggcagggcctgagggcggaccggtggtggggagctggagccccagaagggaacagagctaggaaggaactcctgggttcttaagggagcgaggctttgggtccacgcacaggatcgcgcgcgggatcgcaggtagagcaggacgctgcagcgggattggaccggctcggctgatgtctgctccctctctaggagctgtctgctggctccgggaaaagggcccccggcgctgggggcttccaggggccccaggagaagctgggctgtgtggtaccaacagccccgaggggtggccttgccctgctcccccggggacccccaggctgagggttctgccgcgggctaccggcctctgagtgcctccagccagagctccctgcgctcgctcatctccgctctctgactctgggccccgagggtccgctgggcccgccgccggcgagatggacacctgagatgctgtgctgcgccctgcctcggccttgcgcctgtgtaggggcagctcggcctctggtcgccttggggagaccaaaagtcggacaggaaacatctggtgctattatctgggacttggcctgaccgtgggggtccagatggtccaggccctctccatggacctgtatgtgggggtggtctctggtttcggaggtctttgaacccctctgggggtggtcctggactgccgtcctcagtgagaggtcacaggtcagcaaaaacagtcaaaaaacccccacagattttgaataaaggatctactttggtaaaaaaaaaaaaaaaaaa

SEQ ID NO: 404337 - DNA, 1000 bp, Homo Sapiens
atccccagaagcaggctgaagaggaaaggcaggaggaacctgagtatgagaatgttgtacccatctccaggccaccagaaccctgatgaccttgaatttggggagtggggagagtggatggactagactgtgctgtgtgctggaaaatgatcccggggccaggacagacaaaccagagcctctgcgcctccacagggaaaaggcaaggcttccaggccagttggcccaggcccctggcagtgctcccggaggggcccaggaaggcctgggcagagaccctgtaggatggggtcaggaagggttgcctgcagggacttttgctctgctgtcctggaccctgtgtgcctcataagggctattctttctttcacgtgcaaaacatttttctgaaatagcaaacaacctacatgtttgctgataaaagattggctaaacaaatttttttttttttttttgagacagaatctccctctgtcccccaggctggagtgcagtggtgcgatctcggctcactgcaagctctgcctcccgggttcacgcccttctcctgcctcagcctcccgagtagctgggactacaggtgccctccaccacgcttggctaatttttttgtatatttaatagagacagggtttcaccatgttagccaggatggtctcgatctcctgacctcgtgatccacctgcctcggcctcccaaagtgctgggatgacaggcatgagccaccacgcctggtctatgaactttttaaaaaggatgtatgtgtataaaaacagattcaagggaaaggcactaaatggttttttcctctggaagatgagattgtaggtgatatttattttcttctgaaacttttgtatagtttgcaaattttctacagtgaacattcttttttacttttgttactagattgaatttgataaagtataataaaaagcaatgatctttgttaaaaaaataaaaagtactaacattacagacatgtaaaaaaaaaaaaaaa

SEQ ID NO: 404338 - DNA, 1000 bp, Homo Sapiens; identical to SEQ ID NO: 292579

SEQ ID NO: 404339 - DNA, 1000 bp, Homo Sapiens; identical to SEQ ID NO: 288187

SEQ ID NO: 404340 - DNA, 1000 bp, Homo Sapiens; identical to SEQ ID NO: 292581

SEQ ID NO: 404341 - DNA, 1000 bp, Homo Sapiens
gtgcggtttctgaggctgacatgtcagtaactgactggggtgcactgagaacaggcaagactttaaattcccataaaatgtctgacttcactgaaacttgcatgttgcctggattgatttcttctttccctctatccaaaggagcttggtaagtgccttactgcagcgtgtctcctggcacgctgggccctccgggaggagagctgcagatttcgagtatgtcgcttgtcattcaaggtctctgtgaatcctctagctgggttcccttttttacagaaactcacaaatggagattgcaaagtcttggggaactccacgtgttagttggcatcccagtttcttaaacaaatagtatcacctgcttcccatagccatatctcactgtaaaaaaaaaaaattaataaactgttacttatatttaagaaagtgaggattttttttttttaaagataaaagcatggtcagatgctgcaaggattttacataaatgccatatttatggtttccttcctgagaacagtcttgctcttgccatgttctttgatttaggctggtagtaaacacatttcatctgctgcttcaaaaagtacttactttttaaaccatcaacattacttttctttcttaaggcaaggcatgcataagagtcatttgagaccatgtgtcccatctcaagccacagagcaactcacagggtacttcacaccttacctagtcagagtgcttatatatagctttattttggtacgattgagactaaagactgatcatggttgtatgtaaggaaaacattcttttgaacagaaatagtgtaattaaaaataattgaaagtgttaaatgtgaacttgagctgtttgaccagccacatttttgtattgttactgtacgtgtatctggggcttctccgtttgttaatactttttctgtatttgttgctgtatttttggcataactttattataaaaaaaaaaaaaaaaaaaaaaaaaaaaaaaaaaaaaa

SEQ ID NO: 404342 - DNA, 1000 bp, Homo Sapiens
caatcatatttaaagggaatgactttgaagtaaaaccttttttcttgctactgaaaaaaatggagttgttttgggtggtaaagtgttaaggaatagggacagctggtcacacaaggaactcttgaaggccacatgtgaaaacctgtcacttgcacagaggccagtcccactaaggtgaccagagtgggctccaagcacaaactgccattggctatagatgggactgtgtccccccaaaattcatgtgttggagccttaaccctcaatgtgatggtatttgagatggggcctttggtaagggaagtttagatgaggtcacgagggtaggaccctcatgatgggatgagtccccttacaagacctctggcttgggccgggcgtggtggctcacacctgtaatcccaacactttgggaggccaaggcaggtagatcacttgatgccaggagttccagaccaggctggccgacatggtgaaaccccatctctactaaaaaatataaaaattagccgggctttgtggcatgtgcctgtaatcccagctatttggcaggctgaggcatgagaatcgcttgaacccaggaggtggaggttacagtgagctgagagtgccccactgcactccagcctgggtgacagagcgagactttgtcccaaaacaaaataggtgaggggatagcgaatgcactcagggtcagcagtggagtttaaaaattgtctcttttcaacttatttaaatgacagcacctgagaagaggaaccgttttacactggatgtttctcatgtagaacaagaaatctttctggaattgatgtttacatgtctgttgttggtcatctctcctgtgtcttaaatactttaatgttggaagagcatagtgtttgggctagtgggtttctgacagcccatgggaatgccctgaaactactgtatctgatgtttgttttcgatgaggttccatgttttgttttcttgggaataaattaatatattgttttcc

SEQ ID NO: 404343 - DNA, 1000 bp, Homo Sapiens; identical to SEQ ID NO: 118621

SEQ ID NO: 404344 - DNA, 1000 bp, Homo Sapiens
accccagggggaagcggtggggagccacagcaaggggcacaaatcgtcccgcggggcttcggctcagaaatcgcctcctgtccaggaaagccagtcagagaggctgcaggcggccggcgctgattccgccgggccgaaaacggtgcccagccatgtcttctcggagctctgggacccctcagaggcctggatgcaggccaactacgatctgctgtccgcttttgaggccatgacctcccaggcaaacccagaagcactctgcgcgccagcgctccaggaggaagctgctttccctggacgcagagtgaacgctaagatgccggtgtactcgggctccaggcctgcctgccagctccaggtgccgacgctgcgccagcagtgcctccgggtgcctaggaacaatccggacgccctcggcgacgtggaaggggtcccctactcggttcttgaacccgttctggaagggtggacgcccgatcagctgtaccgcacagagaaagacaatgccgcactcgctcgagagacagatgaattatggaggattcattgcctccaggacttcaaggaagaaaagccacaggagcacgagtcttggcgggagctgtacctgcggcttcgggacgcccgagagcagcggctgcgagtagtgaccacgaaaatccgatccgcacgtgaaaacaaacccagcggccgacagacaaagatgatctgtttcaactctgtggccaagacgccttatgatgcttccaggaggcaagagaagtctgcaggagccgctgaccccggaaatggagagatggagccagcccccaagcccgcaggaagcagccaggctccctccggcctcggggacggcgacggcggcagcgtgagcggcggcggcagcagcaaccggcacgcggcgcccgcggacaaaacccgaaaacaggctgccaagaaagtggccccgctgatggccaaggcaattcgagactacaagggaagattctcccgacgataa

SEQ ID NO: 404345 - DNA, 1000 bp, Homo Sapiens; identical to SEQ ID NO: 224102

SEQ ID NO: 404346 - DNA, 1000 bp, Homo Sapiens; identical to SEQ ID NO: 292586

SEQ ID NO: 404347 - DNA, 1000 bp, Homo Sapiens
agacttgacccaggatggatgggtgctgcttgatgtgaatgaggtcccgcagtggctccttggcgtgagcactgctcagactcctttccactccagccccctttccacatcgcaccagatgacttttacccagacccagtgggcattgccttatcttgcagtcagtcccttttcaacatgttgccgtttctttctgaagaggtgtcctccctccacaagtcacactgtctgtccctggccctccagcccacctcgccaaccactcttgttggtttccttctcagacttgccacctttcccctctgccccaaaatgccatgctcctctcctggaaaacacttgagttgattcagtaaatcgacttcaaatacttgaaggctcccaccttctgttctctggctccttcctgcggtctatacctaccgcctcctcttcacctccttcccttccacacttccttcctgggtagctctgcctgaagcattccactaagatcatctattccaaggtcatggacaggctactggtgaccaaagttggttccttttctcctttctttcctccttgaagcctggctcccttggtcgcagcagcccctcagtggcctggttctcctgtccccctgcccttcctcaccattgcccattccctcgttcgttcattcagcacaggccttgccgtctgccctgagtcagctccgagacacctgaagagccctccagccctaactactttactcagactaggtccccaggcctttgttcttgcctcttctcgctgagcctttcacttctcggcagatgtgaccgattggtagctccaccccaactcccttctgctgggtggaatgcaggagctagctgcctccaactcactgtgacctcagaaaaatgcctttattactcgggcctcagtttcctcgtctttaagtaaggggcttggatgagatgatttcaggaccctttccaataataaaatactgtgactgccaaaaaaaaaa

SEQ ID NO: 404348 - DNA, 1000 bp, Homo Sapiens; identical to SEQ ID NO: 224103

SEQ ID NO: 404349 - DNA, 1000 bp, Homo Sapiens; identical to SEQ ID NO: 292588

SEQ ID NO: 404350 - DNA, 1000 bp, Homo Sapiens; identical to SEQ ID NO: 224104

SEQ ID NO: 404351 - DNA, 1000 bp, Homo Sapiens; identical to SEQ ID NO: 292589

SEQ ID NO: 404352 - DNA, 1000 bp, Homo Sapiens
gagatggggcaaatatacacaggcctgaaaagtgctggccggcggctggctcagtgctcctgcgtggtcatcaggacgagcaagtctctgccaatgcaaattgatggggagccatggatgcagaccccatgcacagtgagtacagagtagttgatatgctatgtcaatctcagttttgctttcctctttgactaaataaccacaataactgatttttttctttatttcttttcaacctatcagcaaatagtctttttgttgttgttgttatgtgtgtgtcagagccactacatttaggctgtagacattatatacccttggcaatgatttagctcttgaatgtttgtgctagcctaagtataaatagatcttttaaatagatcaattataaaccatagatcaattataaactatggagctaaacaaaatattaataaaagtttatctgaaacttttttgtttatttcagagcacattattagaatattatttgcgagaaatgcagacctaagcttatatgtgaacttatttctcagcttttctatgcctccatttggggatttgagggctttcttctccataagaaaaaaatttctctccagtttctaccataattaattgtgttttccagaatgaggtattatttaaggcagacactgcccctctcaaaaaaaatcagttttcatttgcatagtgaatattttattgcatttcaaaaacatgctaggaactgcttttggcactgggagtagacacatgaacaagaccaacagtgtaatttccttcaagttacttacattcctataatagaggaccgaataaataaacaactacatgataaatataacttcagactgtgagagttattaaaaaataaggtgaaatgatgataagaagctggattaggtgtggagaataaatactacttgagataagggagacctctttgaaaggacatagccaaaagcttagtataaaattaaaaaaaataaaaaaaaaa

SEQ ID NO: 404353 - DNA, 1000 bp, Homo Sapiens
aaccaagggccggcaggtgggaagtggaggtgatggggagcgctggggctccgacagagggtcccgaggcagcctcaatgagcagatcgccctcgtgctgatgagactgcaggaggacatgcagaatgtccttcagagactgcagaaactggaaacgctgactgctttgcaggcaaaatcatcaacatcaacattgcagactgctcctcagcccacctcacagagaccatcttggtggcccttcgagatgtctcctggtgtgctaacgtttgccatcatatggccttttattgcacagtggttggtgtatttatactatcaaagaaggagaagaaaactgaactgaggaaaatggtgttttcctcaagaagactactggaactggatgacctcagaatgaactggattgtggtgttcacaagaaaatcttagtttgtgatgattacattgctttttgttgtccagtagtttagtttgtgtacatatatacacatatatattttgcactacacaaacgataacattttaaggactaatattgctgatacttgaataatcaatctctactaggttataagtagtatacacagatttaccctgcccttgaacttgaaggacattaaattattaatgatcatttggtaacatgtttacctgattatcttccatagagtaacataagctgcttttcaaaggtaccattgtgataatgagatcaaatttataagttattatttttaattttctaaattaaataaaagaaagaatgcaaaccaggagtgaatttcaaatgagatgtaatcgactttatatcttagtcacggagttgccatggcatgtagtagaaaaccacaggaagaatggtcatattcactttgtgggctgcccataatctttcttgggcattcacaactcttgagtttggtgttcaggcatcattattaaaaagtggagtcctaaaaaaaaaaaaaaaaaaaaaaaaaaaaaaaaaaaaaaaaaa

SEQ ID NO: 404354 - DNA, 1000 bp, Homo Sapiens; identical to SEQ ID NO: 292591

SEQ ID NO: 404355 - DNA, 1000 bp, Homo Sapiens; identical to SEQ ID NO: 292592

SEQ ID NO: 404356 - DNA, 1000 bp, Homo Sapiens
ctcctcatcacctggtacctatgtgggaccccctggtggtggcggtcctccaggaacacccattatgcccagtcccgcagattcaacaaattccagtgacaacatctacacaatgattaatccagtgccgcctggaggcagccggtccaacttcccgatgggtcccggctcggacggtccgatgggcggcatgggtggcatggagccacaccacatgaatggatcattagggtcaggcgacatagacggacttccaaaaaattctcctaacaacataagtggcattagcaatcctccaggcacccctcgagatgacggcgagctaggagggaacttcctccactcctttcagaacgacaattattctccaagcatgacgatgagtgtgtgatccccccttctccgagacgctgagagagcaggcattgcaggcgggaagatgccagaaattatgcaagaagtgaggtgtcattatccaggagctggtggggagggcatctccctgctcccctcaaccccctcccaccccatccacgccccctacctttcccaattttagtttcatgcaataaaaaggccaaactttttattccataaaacaagaaggacaaaactctcaaaaatgtatttcaagtcagtgaccagaaaaatcccaccccttgccctttccccaaaggaccttttctgtacatgacacttttttgttgttttttgtttggggttttaccattgttgggatttttttatttgttttcaggggggttttttgggggaaaatttttttaaatggaagcttctagcaagccccccaccccaatcaacctctatgctttcttcttaaaaaaaaaaaaaaaggaaaaaggaaaaaaaaaaaaggaaaaccagaagccctgctgtctgtctgtgcccaagcccttccaccagaaaagctagtctaggtgtgagagcccacattgtctgtagccatcaaaaataataataataaactggacagtttaca

SEQ ID NO: 404357 - DNA, 1000 bp, Homo Sapiens; identical to SEQ ID NO: 224106

SEQ ID NO: 404358 - DNA, 1000 bp, Homo Sapiens; identical to SEQ ID NO: 224107

SEQ ID NO: 404359 - DNA, 1000 bp, Homo Sapiens; identical to SEQ ID NO: 292594

SEQ ID NO: 404360 - DNA, 1000 bp, Homo Sapiens
cacccgatccctggggtagggcaccaccccctcctggggtgagagcgcagtgcactcccgtgctctgggacacccctgctcctgtggctgtgatgtggggttaagtgaggtggggaccaaaggaaacagagccagagcagccacagaagctgtgcctgaagggtgagtgtggagcttgcccctccggctcacagccccggcagcccctggctccttggtctctccggttggtgttaaagggccctccactgccacctctcatgggatggaccctgccaacctggcctgggtgtgcagggaggggttccccttggtaccaggagagctgctcacttagggcctggggctcaaggagctgtaggtgccggcagaggggcagagctaggctgggaggagcccagggcctgcaccacccacttgcaaccaccaggctggtgccctgcagctgtgccagttgggccacagcctcccgagtgctgacccacatggtcaagaccaggcagaagctcccagagcccctgtctcgggctccccaccgactggcagctgcactatccccaactccccacttctgccccaagggtggtcactgcctgtgatacattcctcagtgtcgcctctgagcccaggcctcctgccacaaagactgggccgagagatggggctgggtaagcgggtgcgcctcctgtttgggtttcttcggggtttctctgtagtgtctgctgccctcctcctggcctcccaggtttcagttgtgtctgacagagcattaggttttcctgttactgctgtgtaataataaagaaagattcggcttttggcaatcacggacacttttttcccctccaccgaatgtcaggattgaaagctgcctccgagtggttggggatggttttctgaccctacggtaactagatctaatatatatcatcagaaaatatatattgtatgtttactcttattttcagaaagagaaaatgaataaaaatgatgacatcaa

SEQ ID NO: 404361 - DNA, 1000 bp, Homo Sapiens; identical to SEQ ID NO: 292595

SEQ ID NO: 404362 - DNA, 1000 bp, Homo Sapiens; identical to SEQ ID NO: 292596

SEQ ID NO: 404363 - DNA, 1000 bp, Homo Sapiens; identical to SEQ ID NO: 292596

SEQ ID NO: 404364 - DNA, 1000 bp, Homo Sapiens
tctatacttactataagtggatttagaagcgattttggttttgtattacatacggtagtcctctgcgtcagggagcacttttttgtttgcctcgagactactcattagcgcactggctaagctgcctttgccttctcgtaggcgtgggttgcctgtgtcatgggctgtgtagaccacaacactcaaacacagttgctgcacttggattttcctttaataccaagtatcatttggttatcttactgggacattttcattgatattctatacaccaaagttttgacggtttaccatcattccattttgtaccagttaaaggcattttgatgatgctttttcttgatgctaagatcactgcagaagaataacctgaccttttctttgcatttgttttgaatgtctaacaccattagcttttgtgatctggttaagaagtattagtgccacaagcctgaaaagacagttctcctgtggcagtggcgatgtggcatccagagggccattgtttctacttttgtgggacttcagtcatgctgataatagaatcttctgttcatacaattctgtaatatttatttgtacagttagtattctaatgaaaggatgaagagtctgaactagaaggtaggtttaagccatcaccaggcctttgcaaatggcctaaatggtgttccctttgaaataacgcttgccacaagtatataataagctatattaattgtgttttgcataaaattgccaaaacacagtaatgtgtatatagtggtataagatcttgaaaaaaatctctataattgtgctctttatctgtgaatgggaaaagccatttttagtaggtgactaccatttgaaaaactcaattggatgtatatctgaatgttgcattgtattgtacagtatgcatattattgtttgtggttgcatatggcaatgaagtgtttgttttatattaaaaaaaacctgttatgtacagttgaaataaattttgcatttgctagcc

SEQ ID NO: 404365 - DNA, 1000 bp, Homo Sapiens; identical to SEQ ID NO: 118622

SEQ ID NO: 404366 - DNA, 1000 bp, Homo Sapiens; identical to SEQ ID NO: 118623

SEQ ID NO: 404367 - DNA, 1000 bp, Homo Sapiens; identical to SEQ ID NO: 118624

SEQ ID NO: 404368 - DNA, 1000 bp, Homo Sapiens; identical to SEQ ID NO: 224109

SEQ ID NO: 404369 - DNA, 1000 bp, Homo Sapiens; identical to SEQ ID NO: 292600

SEQ ID NO: 404370 - DNA, 1000 bp, Homo Sapiens; identical to SEQ ID NO: 224110

SEQ ID NO: 404371 - DNA, 1000 bp, Homo Sapiens; identical to SEQ ID NO: 118625

SEQ ID NO: 404372 - DNA, 1000 bp, Homo Sapiens
ttggcccttccagggtacaatacgccttacaattcttgatcagtctgaagcacctgtaaggcaaaaccacgaagagataatggatgccaaaccagagctgcttgctttccagcgacccacaatcccacggaacccaaaaggttttggctatgtaacttttatgcatctggaagccctaagacaaagaactttcattaaggatgacacattattagtgcgctgtgaggtctccacccgctttgacatgggtagccttcggagggagggttttcagccacgaagtactgatgcaggggtatagcttgccctcacttgctcaaaaacaactacctggagaaaacagtgcctttccttgccctgttctcaataacatgcaaacaaacaagccacgggaaatatgtaatatctactagtgagtgttgttagagaggtcacttactatttcttcctgttacaaatgatctgaggcagttttttcctgggaatccacacgttccatgctttttcagaaatgttaggcctgaagtgcctgtggcatgttgcagcagctattttgccagttagtatacctctttgttgtactttcttgggcttttgctctggtgtattttattgtcagaaagtccagactcaagagtactaaacttttaataataatggattttccttaaaacttcagtctttttgtagtattatatgtaatatattaaaagtgaaaatcactaccgccttgtgctagtgccctcgagaagagttattgctctagaaagttgagttctcatttttttaacctgttatagatttcagaggatttgaaccataatccttggaaaacttaagttctcattcaccccagtttttcctccaggttgttactaaggatattcagggatgagtttaaaccctaaatataaccttaattatttagtgtaaacatgtctgttgaataatacttgtttaagtgttaaaaaaaaaaaaaaaaagaaaaaaaaaaaaaaaa

SEQ ID NO: 404373 - DNA, 1000 bp, Homo Sapiens
tacaggaatccttatgaatgtatagaatgcatactgcctaggcccccagtcgtctgcagtaattcaaaagctggtatttttcttcctaaatgtcacatagcaaaggctgcccaaatccccaaacttgttcttcaaaggtttgacaggcttaatgtgggcatccagtggcctgtggacccccccctgccaccacgactgctgccacccggagttcccccattgtctttggtgcctgggcttccagagtccctcccatcaggactaccagcttgctcagttagcagcagagggcagttccccagcttgatggtttctgagctaagtctggcatggaggggcaaggggtaggggatggggtgctgtgtaggaatggcctcagctcttgttttgctgctggttttaggggccaaagtaaatgggtggattctggaacctcaggcctagactaggttgcctttgtgggggcgatgaagcagagtcccctggtcaagtctctcggctcctttaatgtaggattgagagctgggcaaacaggtcccactggggactgtgactcttggagattaaaggacagggcattgatggaaggtaagggccaggagaagaggcctttctgctgtgtcccctcacggccttgccctcgaattctgcaggccctgggctcccctgacacctgtcatatttatggaccagacactggggcagcatcaggcacagtctgtctgggtgcaacttcttcagctgtctggccgcaccttaaaaactatttattcaccaaaagccccaggcatttcagaaggtggcactcaggtcaccctgaaaagcccccaggggcttgcaattctggaaaatattttgactagctgcttggctggatgtacaaagaaataggcattattttattgctgtaatattgtatgatactttaactgtacaataatgttgtcacttactgtaaatgtactatggttttattaacaataaacactcattaacaatg

SEQ ID NO: 404374 - DNA, 1000 bp, Homo Sapiens
gaagcagctgcagcagcagcagcacagcgacaagacgagccttcagggactgactgggacgcccctggtggcgggcagtcccatccgccatgagaacgccgtgcagggcagcgcagtggaggtgcagacgtaccagccgccgtggaaggcgctcagcgagtttgccctccagagcgacctggaccaacccgccttccaacagctggtctccttctccgagtccggctccctaggcaactcctccggcagcgacgtgacctccctgtcctcgcagctcccggacacccccaacagtatggtgccgagtcccgtggagacgtgagggggacccctccctgccagcccgcggacctcgcatgctccctgcatgagactcacccatgctcaggccattccagttccgaaagctctctcgccttcgtaattattctattgttatttatgagagagtaccgagagacacggtctggacagcccaaggcgccaggatgcaacctgctttcaccagactgcagacccctgctccgaggactcttagtttttcaaaaccagaatctgggacttaccagggttagctctgccctctcctctcctctctacgtggccgccgctctgtctctccacgccccacctgtgtccccatctcggccggcccggagctcgcccacgcggacccccgccctgccccagctcagcgctccctggcggcttcgcccgggctcctagcggggaaaaggaaggggataactcagaggaacagacactcaaactcccaaagcgcatgattgctgggaaacagtagaaaccagacttgccttgaaagtgtttaagttattcgacggaggacagagtatgtgagcctttgccgaacaaacaaacgtaagttattgttatttattgtgagaacagccagttcatagtgggacttgtattttgatcttaataaaaaataataacccgggaaaaaaaaaaaaaaaaaaaaaaaaaaaaaaaaaaaaaa

SEQ ID NO: 404375 - DNA, 1000 bp, Homo Sapiens
gggatcccgcggctggggccgcgccctttcgcttcgttgcgcgccccgtgcgcttcccgcgggagcaccagttcttcgaggatggggacgtgcagcgccacctctacctccaggacgtgatcatgcaggtggccgacgtgcctgagaagcccagggtgcccgcgtttgcctgccaggtggccggctgctgccaggtgttcgatgccctggacgactacgagcaccactaccacacgctgcacggaaatgtttgctccttttgcaagcgggccttcccttccggacacctgctggacgcccacatcctggagtggcacgattcgctcttccagatcctgtctgagaggcaggacatgtatcagtgcttggtagaaggctgcacagagaagttcaagaccagcagagaccggaaggatcacatggtgaggatgcacctgtaccccgcggacttccggtttgataagccaaagaaaagcagaagcccagcctcagcagaagccccaggggacagtggagagcggtcagaaggggaggccatggaaatctgctctgagcctgtggcagcctcccctgcaccggcaggtgagaggcggatctacagacatagaataccctctaccatctgctttggtcagggtgccgctcgaggatttaaaagcaacaagaagaaaaccaaacaatgctgatagactcagaaaaggagtggggggcagtcaccactgctgggcgtggcatccgccttgggcctttctccgaccttctggtgtggccgccctgggggccaggccctcgccatcctccccatccttgttcctcagcaaatggcattagcagctgtcatcagaagctgtgagggacccacagattttggaaacgacctggacacactattgggaaggagatgtggacggcctgtctcctcctgcagggcccaccctaagaatgtatttttaaacacatgaaataagtatttttcactgataaaaaaaaaaaaaaaaaa

SEQ ID NO: 404376 - DNA, 1000 bp, Homo Sapiens; identical to SEQ ID NO: 292607

SEQ ID NO: 404377 - DNA, 1000 bp, Homo Sapiens; identical to SEQ ID NO: 292608

SEQ ID NO: 404378 - DNA, 1000 bp, Homo Sapiens
cagggacacctgcggccccgcggagctgcccggagaagcaaactgcacctattttaaattcttcaccacgggggagaatgcacgcatctttcagagaaccacaaagaaagaggtgaatctggcagctgcggtgatagcagtgctgggcctggcagtcatggccttggggtgcctctgtatcatcatggtgctcagtaaaggtgcagagttcctgctccgagttggagccgtctgctttggcctctcaggcctgctgctcttggtgagcctggaggtgttccggcattccgtgagggccctgctgcagagagtcagcccggagcctcccccggccccacgcctcacctacgagtactcctggtccctgggctgcggcgtgggggccggcctgatcctgctgttgggggccggctgctttctgctgctcacactgccttcctggccctgggggtccctctgtcccaagcgggggcaccgggccacctagagccacgcgtgagacttctctaagcaaccaccgagccctttgaccttctccattgtacccccaagatctttttgccccatctcctagagaaactgtgttctccctgctcgggggcccatgtttttttacacgcctgcctcctgtccccttatcctttctccctctgtaaatacgtttttctctgtggctgtatgtgggttgcttgggggtgggatgggaagaggctctttgcaaacgagggtccccagagaagactggcggggacctgatggggtagctggggtgtggggttgggggatgaggtcagggggtcttgggtgggagttgggggccccttcatttcccaggtctggatcgattcacttgccgggagagactttttacaactcatctgcagctccgggtgcggttgggggagatagcgaagggtctggcctcgctgtgatctgatttgggattaaaggtttggaaatttaaaaaaaaaaaaaaaaaaaaaaaaaaaaaaaaaaaaaa

SEQ ID NO: 404379 - DNA, 1000 bp, Homo Sapiens; identical to SEQ ID NO: 292609

SEQ ID NO: 404380 - DNA, 1000 bp, Homo Sapiens; identical to SEQ ID NO: 292610

SEQ ID NO: 404381 - DNA, 1000 bp, Homo Sapiens; identical to SEQ ID NO: 292612

SEQ ID NO: 404382 - DNA, 1000 bp, Homo Sapiens; identical to SEQ ID NO: 118629

SEQ ID NO: 404383 - DNA, 1000 bp, Homo Sapiens; identical to SEQ ID NO: 118630

SEQ ID NO: 404384 - DNA, 1000 bp, Homo Sapiens; identical to SEQ ID NO: 292614

SEQ ID NO: 404385 - DNA, 1000 bp, Homo Sapiens; identical to SEQ ID NO: 224115

SEQ ID NO: 404386 - DNA, 1000 bp, Homo Sapiens; identical to SEQ ID NO: 118631

SEQ ID NO: 404387 - DNA, 1000 bp, Homo Sapiens; identical to SEQ ID NO: 118632

SEQ ID NO: 404388 - DNA, 1000 bp, Homo Sapiens; identical to SEQ ID NO: 224117

SEQ ID NO: 404389 - DNA, 1000 bp, Homo Sapiens; identical to SEQ ID NO: 224118

SEQ ID NO: 404390 - DNA, 1000 bp, Homo Sapiens; identical to SEQ ID NO: 292618

SEQ ID NO: 404391 - DNA, 1000 bp, Homo Sapiens; identical to SEQ ID NO: 115687

SEQ ID NO: 404392 - DNA, 1000 bp, Homo Sapiens; identical to SEQ ID NO: 224119

SEQ ID NO: 404393 - DNA, 1000 bp, Homo Sapiens; identical to SEQ ID NO: 292619

SEQ ID NO: 404394 - DNA, 1000 bp, Homo Sapiens; identical to SEQ ID NO: 292620

SEQ ID NO: 404395 - DNA, 1000 bp, Homo Sapiens
ctctcctcagggaggcaagcatttgatgctcgaggtccctggcagttgtggtccttggcaagtgatgtgtgagtcccgtgtgtcataggaagctccccatccccatctggtgaccaaaggcctggctacaagtagtgagtccttcctcctccacccagacctcactgctcagatccccttcgccaactgggacatcttccgacatggcctggatgctgttgctcatcttgatcatggtccatccaggatcctgtgctctctgggtgtcccagccccctgagattcgtaccctggaaggatcctctgccttcctgccctgctccttcaatgccagccaagggagactggccattggctccgtcacgtggttccgagatgaggtggttccagggaaggaggtgaggaatggaaccccagagttcaggggccgcctggccccacttgcttcttcccgtttcctccatgaccaccaggctgagctgcacatccgggacgtgcgaggccatgacgccagcatctacgtgtgcagagtggaggtgctgggccttggtgtcgggacagggaatgggactcggctggtggtggagaaagaacatcctcagctaggggctggtacagtcctcctccttcgggctggattctatgctgtcagctttctctctgtggccgtgggcagcaccgtctattaccagggcaaatgtctgacctggaaaggtccaagaaggcagctgccggctgtggtcccagcgcccctcccaccaccatgtgggagctcagcacatctgcttcccccagtcccaggaggctgagcctgattgtcctgagaaatgggaaggatcagatatgactcctccttggcaactgccctttcctgccaggcccacacataccctcttctggctgttaggggagcttgggtccctgaacactgtcattcacccaataaattactatttgaccccagagtgggtggaagggtgaaaaaaaaaaaaaaaaaaaa

SEQ ID NO: 404396 - DNA, 1000 bp, Homo Sapiens; identical to SEQ ID NO: 224120

SEQ ID NO: 404397 - DNA, 1000 bp, Homo Sapiens; identical to SEQ ID NO: 224121

SEQ ID NO: 404398 - DNA, 1000 bp, Homo Sapiens; identical to SEQ ID NO: 292623

SEQ ID NO: 404399 - DNA, 1000 bp, Homo Sapiens; identical to SEQ ID NO: 292624

SEQ ID NO: 404400 - DNA, 1000 bp, Homo Sapiens; identical to SEQ ID NO: 292625

SEQ ID NO: 404401 - DNA, 1000 bp, Homo Sapiens; identical to SEQ ID NO: 292626

SEQ ID NO: 404402 - DNA, 1000 bp, Homo Sapiens
catcaacaggcaacggaattgttaaggcaagcacatatgcggcaaatggagagacagcgagaagaccaggaacagctacaagaagagattaagagacttaatagacaattagcccaggtaagggtcttgtagtcccctttctctccccagttatttttttttccaaacaccaacttgaaccagatccccaattaaaacaacagtattttttatgtagccataatttttttttttttttgccgaaatctgaataaactacatatatttagcatcaggaacacactctatactaagacagcagctttagatcttgttagggacacctatctcaaccttggagtgggcattgtctttctgtcattttatttaactcctttttcaagcactggaaaagtggctacacggttttgtttttttcttttaaatcattccattagccatatatagcaaactcactttgacattttggaaataacattgtgctgaggtgctccattatgcagttactatcattcagttttactatcttcatttatagttttgtgagtccaccaattagcatctcgaaggtttacctttatctgtctttaatccatctttttaatcatgaatggaaatcggaagtagtatgcttctgaaactctttccagggaaacatctcttcttgatttgagaaatgcaaatttatttaacattcttatccctttcttgactaaatttaaatacttcttggtatttgggagctggattcttgtcaactgctgtataaaatatactcacaaaaccattgcagaaaagcaagaaatatttatgtagaagttcttatgaaaacttattgaatttaattttgaaaactgaagctaagagagataataaatatctagagataactattaacagtattctttcaaacataaaataataagataattgggagctgagcataaaacattatttggaaaaattaactttgcttttcttcattgcattttgtgaattc

SEQ ID NO: 404403 - DNA, 1000 bp, Homo Sapiens; identical to SEQ ID NO: 118634

SEQ ID NO: 404404 - DNA, 1000 bp, Homo Sapiens; identical to SEQ ID NO: 292630

SEQ ID NO: 404405 - DNA, 1000 bp, Homo Sapiens; identical to SEQ ID NO: 224125

SEQ ID NO: 404406 - DNA, 1000 bp, Homo Sapiens; identical to SEQ ID NO: 118635

SEQ ID NO: 404407 - DNA, 1000 bp, Homo Sapiens; identical to SEQ ID NO: 292635

SEQ ID NO: 404408 - DNA, 1000 bp, Homo Sapiens; identical to SEQ ID NO: 292636

SEQ ID NO: 404409 - DNA, 1000 bp, Homo Sapiens
tcctgcccccagcgcacgacgtaccttccaggcaccacccgctggatgccaccaccagttcccaccaccatctgtcccctctgcccatggctgagagcacccgggatgggttggggcccggcctcctctcaccaatagtcagccccctgaaggggctggggccaccgccgctgcccccatcctctcagagccattctccggggggccagcccttccccacactccccagcaagccgtcctacccacccttccagagccctccacccccgcctctgcccagcccacaaggttaccagggcagtttccactccatccagagttgcttcccctatggcgactgctaccggatggctgaaccagcagccggtggggacggactggtcggggagacccacggtttcaaccccctgcggcccaatggctaccacagcctcagcacgcccttgcctgccacaggctatgaggccctggctgaggcctcatgccccacagcgctgccacagcagccatctgaagatgtggtgtccagcggccccgaggactgtggcttcttccccaatggagcctttgaccactgcctgggccacatcccctccatctacacagacacctgaaggagcccccacatgcgcctgcccgtccagcactgcagatgccacctcgcccacctgctgtcgctcccaccctccgtgcacctagcaggagtgccaggccacagccggaacagccaggccatgacccaggggagccagcgctgccaccccacccagcgctgccagggagccgccatccgagcttgagctgggcgcacagaggtgcccgccaggatctgtggccctgtaacattccctcgatcttgtcttcccgttcctccccgcagtggttttgaaatcacagacctcgtgtatataaaatatgcagaacttgttttccgttcccctgccagttttatatttttggttttacaagaaaaaacattaaaaactggaaaggagatgtg

SEQ ID NO: 404410 - DNA, 1000 bp, Homo Sapiens; identical to SEQ ID NO: 292637

SEQ ID NO: 404411 - DNA, 1000 bp, Homo Sapiens
ggcgggccctggagctcaagccgtggccggggtccaggcatgttggactctgagctcatttggggaccacagaggctgtggtcagagagggaagctgaggcccatggccacatcctcatggcccatcaggggcaggaaccagacaatctcgtaggtgtcctgccccccagcctaggcttggctcctttcaccccatccacatgggtactgtctcggcagaggtggtctggtgccaccgtccctctgcagatacactgctctccccacccagacctgcctgtctcccaccctttctgccagggatggcagtggctgtgaaggagtaatgggatatggggttacttcagccaccctttctggcacgaaatggctgaagtgcatgggtcagggtgtgaggccacacccagagtagccatgaggaggcagagagggtcactgggggacactgtggcagcaggagggactctgtctggccagggaggagccccagtggtgagaagacttccccaagcctggcaggggatccagctcaagggagtaagtagaggtggcttcagaaatggaacccccagcccagcagacatcaagctcaaggcaatgggctaccctcatttcacacgttgtgatgaagctgaggctgctgccaggcccggcatgaggccccgaggctcgagctcggggctgggggctgcagggctgggtcaggggtacacagagctaaggccaatgggctagagggtgccggaaagagagctggagtctgggctcctcttgggaatcagagtatatttaagaagccaagggggacctcgggctgttctggtggccccttctatgcccagctgtgctgggaggtcccagggccctagaagatcacagcagggccttctgcctgctgaccataacagtgccagcttctttgcagcttcctcttctaccatttcccactacgggcacctaaaagaagcatctctgaccagaagacaaaggcccaaatagc

SEQ ID NO: 404412 - DNA, 659 bp, Homo Sapiens
acaagtggggcatctgtaggggccacagtgagctctcaatgatcatctgtagtggcagcaaaagagttcgagccccacttcaaacaacttcataataaaaggccagacaaaagagctgtcagccagttactacagacactcaatgcagacaccttcagagtattgggaaaagacttgccttctgccagaacttaacccaaatacacacagagagcaccatgaagccctggattcttctactcgtcatgttcatctctggagttgtgatgcttctgcctgtgctgggaagcttctggaacaaagatccctttctagatatgataagagaaactgagcagtgctgggtacagcctccatataagtactgtgagaaaaggtgtactaaaataatgacttgtgtacgtccaaatcatacatgctgctggacctactgtggaaacatctgcttagacaacgaagagccccttaaatcaatgctaaacccctagattctattggccgatcactactgtgggctgaaggatgaccatctggtctaagaagagtgctgcctacttccttcttgggacacccactggctctagctggtaacctttctgctatttccttgacctctttaccctgaagcttttgtcaaataaactgctacatcaacctga

SEQ ID NO: 404413 - DNA, 1000 bp, Homo Sapiens
ggtttctgagcatggatccaaccatctcaaccttggacacagaactgacaccaatcaacggaactgaggagactctttgctacaagcagaccttgagcctcacggtgctgacgtgcatcgtttcccttgtcgggctgacaggaaacgcagttgtgctctggctcctgggctgccgcatgcgcaggaacgccttctccatctacatcctcaacttggccgcagcagacttcctcttcctcagcggccgccttatatattccctgttaagcttcatcagtatcccccataccatctctaaaatcctctatcctgtgatgatgttttcctactttgcaggcctgagctttctgagtgccgtgagcaccgagcgctgcctgtccgtcctgtggcccatctggtaccgctgccaccgccccacacacctgtcagcggtggtgtgtgtcctgctctgggccctgtccctgctgcggagcatcctggaatggatgttatgtggcttcctgttcagtggtgctgattctgcttggtgtcaaacatcagatttcatcacagtcgcgtggctgatttttttatgtgtggttctctgtgggtccagcctggtcctgctgatcaggattctctgtggatcccggaagataccgctgactaggctgtacgtgaccatcctgctcacagtactggtcttcctcctctgtggcctgccctttggcattcagtttttcctatttttatggatccacgtggacagggaagtcttattttgtcatgttcatctagtttctattttcctgtccgctcttaacagcagtgccaaccccatcatttacttcttcgtgggctcctttaggcagcgtcaaaataggcagaacctgaagctggttctccagagggctctgcaggacgcgtctgaggtggatgaaggtggagggcagcttcctgaggaaatcctggagctgtcgggaagcagattggaccagtgaggagcccataatctagatgg

SEQ ID NO: 404414 - DNA, 1000 bp, Homo Sapiens; identical to SEQ ID NO: 118636

SEQ ID NO: 404415 - DNA, 1000 bp, Homo Sapiens
gtgactctgccacatcccatctcatcctggcctctgagtcaagaacccagtgaactgactttctagttctagaagttccgctgcaaggccaggaaagcttgagaaaggtattgtggaagaagcaaaggtagacccccatcactcacctttgtctgcatccctgggcctgtgaatgatgacagcacctgacattctgcaccagctacctctgcctccatggcagagaaaaggccataagaacagtggaagaggagcatggactcagacttcaaggaagaagccatttccccaggtccttccttctgcatctcaccacccctagttacaaataactccattgaacagcatctattcagaaactatgccgaataaaaagattggtggaagggctcatgtggttagcaactatgaaacagaaataggacactcagttacaaacattatctcctttagtttttcagaaaatgcatccctgatttcattcatttccagcttgaaagccagccatattactctagtccctaccaaactgctctagaaggtcatttccattttgtttgtgatatttagacgcgcagacttcaggaagttcacctttaacttcagcattccagatgaagtttcctgactcagtgcttttgcataaggaactagaaaaaaaaagtaaggaaaattggagatgctaacatcctcccccatcccaactgcaccttaaaatatgcatgtcaccttcaaggttttataattgcactgtttgttttatgtatgtacagattaaaattattgctacatttgaggaaaataaaattgcttgcttctatgtaattcctgtcattccacaggaaattcacttttccagctactgaatagaatttgtttaacaacctcatgggttgcctcttcatttacagggaagaaatgaaatgtacatctgcagaaattgccaaagcccaaattaacgagtattataaaaggataataaagcatccctgaagccaaa

SEQ ID NO: 404416 - DNA, 1000 bp, Homo Sapiens; identical to SEQ ID NO: 224127

SEQ ID NO: 404417 - DNA, 1000 bp, Homo Sapiens; identical to SEQ ID NO: 291008

SEQ ID NO: 404418 - DNA, 1000 bp, Homo Sapiens; identical to SEQ ID NO: 292641

SEQ ID NO: 404419 - DNA, 1000 bp, Homo Sapiens; identical to SEQ ID NO: 224128

SEQ ID NO: 404420 - DNA, 905 bp, Homo Sapiens
ggcgaggagaggcacaccactattgttttaatttgcttttacctgattcctggcagacttctgcgttatgacccggctgctgggctacgtggaccccctggatcccagctttgtggctgccgtcatcaccatcaccttcaatccgctctactggaatgtggttgcacgatgggaacacaagacccgcaagctgagcagggccttcggatccccctacctggcctgctactctctaagcgtcaccatcctgctcctgaacttcctgcgctcgcactgcttcacgcaggccatgctgagccagcccaggatggagagcctggacacccccgcggcctacagcctgggcctcgcgctcctgggactgggcgtcgtgctcgtgctctccagcttctttgcactggggttcgctggaactttcctaggtgattacttcgggatcctcaaggaggcgagagtgaccgtgttccccttcaacatcctggacaaccccatgtactggggaagcacagccaactacctgggctgggccatcatgcacgccagccccacgggcctgctcctgacggtgctggtggccctcacctacatagtggctctcctatacgaagagcccttcaccgctgagatctaccggcagaaagcctccgggtcccacaagaggagctgattgagctgcaacagctttgctgaaggcctggccagcctcctggcctgccccaagtggcaggccctgcgcagggcgagaatggtgcctgctgctcagggctcgcccccggcgtgggctgccccagtgccttggaacctgctgccttggggaccctggacgtgccgacatatggccattgagctccaacccacacattcccattcaccaataaaggcaccctgaccccaaaaaaaaaaaa

SEQ ID NO: 404421 - DNA, 1000 bp, Homo Sapiens; identical to SEQ ID NO: 118638

SEQ ID NO: 404422 - DNA, 1000 bp, Homo Sapiens; identical to SEQ ID NO: 118639

SEQ ID NO: 404423 - DNA, 1000 bp, Homo Sapiens
cagccgcagccggctaccacgcctactggaagccagccgcagtcccagcatgcggcccccagtcctgtccagcatcaggcggggcaggccccacacttgggcagtggacagccacagcagaatctgtaccacccaggggccctgacaggcacgccgccctctctgccaccgggaccttctgcccagtcccctcagagcagcttcccccagccagccgctgtgtatgccatccaccaccagcagctgccccacggcttcaccaacatggcccatgttacccaggcccatgtccaaactggaatcacagcagccccgccccctcaccctggggctccccacccgccccaggtgatgctgctgcacccaccccagagtcatggggggcccccccaaggcgcggtgccccagagtggggtgcctgcactctcagcttccacaccctcaccctacccctacatcggacacccccaagttcaatctcatccctcccagcagctccccttccaccccccggggaactgaagattgtcctggccgcgacctgagacctccatgagtggagggaagagtgatctatgtctcttcccccagcagctcggaccactcccagccccccatccccccgttccccaggggagctggggaattcctgccaagcaccttgaatgggaggggcctcacagagggcagggccagggtccagcaggggtggggggttcctgctctgcccctgcccgtccccacccagtcttgccctcccatcctctcatctattcccccgctggagacggaagatcttttattttctattatttataacttcagacttgggccccctgttctttctttcccattaacttgagtgacctgtgtgagagacagacagatgccccacgaggatggctggacaaggacttttactttttattacataaaaatattaaaaaataaataaaaaaaataaaattttaaactaacttaaaaaaaaaaaaaaaaaaaa

SEQ ID NO: 404424 - DNA, 1000 bp, Homo Sapiens; identical to SEQ ID NO: 292643

SEQ ID NO: 404425 - DNA, 1000 bp, Homo Sapiens; identical to SEQ ID NO: 118640

SEQ ID NO: 404426 - DNA, 1000 bp, Homo Sapiens
cgcagcggcacttcccggaagagcccaggatattcggggacccgcaccggacaggcggcccaggccccctggcgcccagctggccgccctgttgcagctctcatgccaagacctgcgcctaacggcagggattccggcggtcatcatttattcttggcgctaagctgccgcttctcttttttatcaccacagagtaacgcagaccccaccgtttccttccattctgagccaaccactccagcagccaccggggcgccaggttatgctggggctgcaccacccggcccgaggcttttgaagccacgcctgagcgcggaggatgggcaggatttgccccgtgaactcccgcgcacgcaggctccgcgcgaggcccgggcgcccgagcggcgattccctcccctatcaccagctccagggtggtgccccccggctgtggagcccagaccccggccgtccagcagcgtatagacgagcccatgtctgcgatgtaactgcaccgcgctggggatccacctcccgccagggtgagggcgccgtcctccagcgtatgctaggcaggcgcgccccgccctcctggtcacgtgaccacgcctacagccgaagaggatgggaaaatgcggccctgttcctgaacaggaagcggaagcaggaaggaactgagaacaccagcatctgctgccgccctgaatcagcgttagcatgtggaggcaacctcagcccccagtttttgaagaaggtgattcagattcagacacaggaattatggtgacggtagaaatggactggaaggttcgttccccttgcccaccaagactccagagcaggtgggttcttgatgtctactctgcatgaagccctgggctttccggccctccctacttttcctccgaattcacagcacagcggagccaaaatgtattcctgccaaaacgggcatttcccaaaagaaaatattgttttagaaaaaaaaaaaaaaaaaaaaaaaaaaaaaaaaaaaaaa

SEQ ID NO: 404427 - DNA, 1000 bp, Homo Sapiens; identical to SEQ ID NO: 118641

SEQ ID NO: 404428 - DNA, 1000 bp, Homo Sapiens
tgctggggagctgcacccacctcccttccagggatttgaatagtggtttttctctagctttttgccagaacaaaggagggtacattacttaaacccagggcatcaggatgtgcttgggctatggtggccataaaccctgagcccagagagcttgggtcactgtcacctgagtgcagctgggctgcctcaggcagcttggagtgccagccattcctgcaagcaccgtttcagctcttggggccaaccccaggacctttggctctgtccatcaccagcaaccaatccaccaacagaatgtggtttctgccatcctgggcagaagctgaaggccagcttcacatttctgctgagagaaggtgacttaacgccttttccggccctagctccaggcgttttgaggcgtctggtgcctgatggtaggtatggtgtgtttgttctgtcccccaggggctggagtcacctggtgcccctgaaggacagatttttggctgttaaaggatggcattttcctgctgtcttctgtgcgtttagttttcttgctgagcgggagctcagtatgacttgccacccacctgatacctcagggcaaggccctttttccctccagccaggtgagtgttttcttcaggcagctgagggtcctgggggagctgaggctctgtgctgcacccccagcccacagctggggcatctcactggagctgttccaggccccactggagagcagaggacctgatcccccactagagaggtccggtgtgcacagccggcctcccagtgtgccaaaatgaactgctctcagctgatggctgtattctgactttgaagcctgttaagaggtagcaagggggctagaggagggagattccacctcccctcccaagtgaccctcctcctgcctctggtatccttccttttgaaacgaagctcagcttcgaagatgtgaacaagaataaaaggaaaaaattctaatgtatatataaaaaaaaaaaaaaaaaaa

SEQ ID NO: 404429 - DNA, 1000 bp, Homo Sapiens; identical to SEQ ID NO: 292647

SEQ ID NO: 404430 - DNA, 1000 bp, Homo Sapiens; identical to SEQ ID NO: 224131

SEQ ID NO: 404431 - DNA, 430 bp, Homo Sapiens
atggcccggtccgcgacactggcggccgccgccctggcgctgtgcctgctgctggcgccgcctggcctcgcgtggtacaagccagcggcggggcacagctcctactcggtgggccgcgccgcggggctgctgtccggcctccgcaggtccccgtacgcgcggcgctcccagccctacagaggggcggaacccccgggcggggccggcgcctccccggagctgcaactgcaccccaggctgcggagcctcgctgtgtgcgtccaggacgtcgccccaaacctgcagaggtgcgagcggctccccgacggccgcgggacctaccagtgcaaggcgaacgtcttcctgtccctgcgcgcagccgactgcctcgccgcctgaaaaaaaaaaaaaaaaaaaaaaaaaaaaaaaaaaaaaaaaaaaaaaaaaaaaa

SEQ ID NO: 404432 - DNA, 942 bp, Homo Sapiens
atggcggccctcacagacctctcatttatgtatcgctggttcaagaactgcaatctggttggcaacctctcagagaagtacgtcttcatcacaggctgtgactctggcttcgggaacctgctggccaaacagctggttgatcggggcatgcaggtgctggctgcttgcttcactgaggagggatcccagaaacttcagcgggatacctcctatcggctgcagaccaccctactggatgtcaccaagagcgaaagcatcaaggcggcggcccagtgggtgagggacaaagtgggcgaacaaggcctctgggccctggtgaacaatgctggtgtgggcctgcccagtggtcccaacgaatggctgaccaaggatgactttgtgaaggtgattaatgtgaacctggtgggactgatcgaagtgacccttcacatgctgcccatggtcaagagagcccggggcagggttgtcaacatgtccagctctggtggtcgtgtggctgtcattggtggtggctactgcgtctccaagtttggcgttgaggccttctctgacagcataaggcgtgagctctactactttggggtgaaagtctgcatcattgagccagggaactatcggacagccattctcggcaaggagaacctggagtcacgcatgcgaaagctttgggagaggctgcctcaggagacccgggacagctacggagaggattatttccgcatctatactgacaagttaaaaaacataatgcaggtggcagagcccagagtcagagatgtcatcaacagcatggagcatgctattgtttcccggagccctcgcatccgctacaaccctggcctggatgccaaactcctctacatccctctggctaagttgcccacccctgtgacagatttcatcctaagccggtaccttccaaggccagcggacagtgtctaa

SEQ ID NO: 404433 - DNA, 1000 bp, Homo Sapiens; identical to SEQ ID NO: 292649

SEQ ID NO: 404434 - DNA, 1000 bp, Homo Sapiens; identical to SEQ ID NO: 220437

SEQ ID NO: 404435 - DNA, 1000 bp, Homo Sapiens; identical to SEQ ID NO: 292651

SEQ ID NO: 404436 - DNA, 1000 bp, Homo Sapiens; identical to SEQ ID NO: 292651

SEQ ID NO: 404437 - DNA, 1000 bp, Homo Sapiens
ggtgggaaaagaacatggccttacataggaagtccttctaaagagctgcctgccagctgcccttccccagatcccgaatatcctcctggccaggtggagcagagaacagttcctcagctggtcatgctgagctcataccctgatggctgctccatgaggtcaagactgggtctcctccctcctcccccttcaccaatgcctggtctcacggggctagttttgacccccacgctatggcatcatcgacctccctcccagctcctggctctcggcctaagaagcctctaggcaagatggctgactggttcaggcagaccctgctgaagaagcccaagaagaggcccaactccccagaaagcacctccagcgatgcttcacagcctacctcacaggacagcccactacccccaagcctcagctcagtcacgtctcccagcctgccacccacacatgcgagtgacagtggcagtagtcgctggagcaaagactatgacgtctgcgtgtgccacagtgaggaagacctggtggccgcccaggacctggtctcctacttggaaggcagcactgccagcctgcgctgcttcctgcaactccgggatgcaaccccaggcggcgctatagtgtccgagctgtgccaggcactgagcagtagtcactgccgggtgctgctcatcacgccgggcttccttcaggacccctggtgcaagtaccagatgctgcaggccctgaccgaggctccaggggccgagggctgcaccatccccctgctgtcgggcctcagcagagctgcctacccacctgagctccgattcatgtactacgtcgatggcaggggccctgatggtggctttcgtcaagtcaaagaagctgtcatgcgttgtaagctactacaggagggagaaggggaacgggattcagctacagtatctgatctactttgacttttaggagacagccctgtagcctagtagttcaaagcgcagcttctggaaaaggctgt

SEQ ID NO: 404438 - DNA, 1000 bp, Homo Sapiens; identical to SEQ ID NO: 118551

SEQ ID NO: 404439 - DNA, 1000 bp, Homo Sapiens; identical to SEQ ID NO: 118642

SEQ ID NO: 404440 - DNA, 1000 bp, Homo Sapiens; identical to SEQ ID NO: 292652

SEQ ID NO: 404441 - DNA, 1000 bp, Homo Sapiens; identical to SEQ ID NO: 292653

SEQ ID NO: 404442 - DNA, 1000 bp, Homo Sapiens; identical to SEQ ID NO: 292654

SEQ ID NO: 404443 - DNA, 1000 bp, Homo Sapiens; identical to SEQ ID NO: 292656

SEQ ID NO: 404444 - DNA, 1000 bp, Homo Sapiens; identical to SEQ ID NO: 292657

SEQ ID NO: 404445 - DNA, 1000 bp, Homo Sapiens; identical to SEQ ID NO: 118644

SEQ ID NO: 404446 - DNA, 1000 bp, Homo Sapiens; identical to SEQ ID NO: 292658

SEQ ID NO: 404447 - DNA, 1000 bp, Homo Sapiens
aaggaaattttgtctcacctgtgaaaaatcagggtgcctgcggcagttgctggactttctccaccactggggccctggagtctgcgatcgccatcgcaaccggaaagatgctgtccttggcggaacagcagctggtggactgcgcccaggacttcaataatcacggctgccaagggggtctccccagccaggctttcgagtatatcctgtacaacaaggggatcatgggtgaagacacctacccctaccagggcaaggatggttattgcaagttccaacctggaaaggccatcggctttgtcaaggatgtagccaacatcacaatctatgacgaggaagcgatggtggaggctgtggccctctacaaccctgtgagctttgcctttgaggtgactcaggacttcatgatgtatagaacgggcatctactccagtacttcctgccataaaactccagataaagtaaaccatgcagtactggctgttgggtatggagaaaaaaatgggatcccttactggatcgtgaaaaactcttggggtccccagtggggaatgaacgggtacttcctcatcgagcgcggaaagaacatgtgtggcctggctgcctgcgcctcctaccccatccctctggtgtgagccgtggcagccgcagcgcagactggcggagaaggagaggaacgggcagcctgggcctgggtggaaatcctgccctggaggaagttgtggggagatccactgggacccccaacattctgccctcacctctgtgcccagcctggaaacctacagacaaggaggagttccaccatgagctcacccgtgtctatgacgcaaagatcaccagccatgtgccttagtgtccttcttaacagactcaaaccacatggaccacgaatattctttctgtccagaagggctactttccacatatagagctccagggactgtcttttctgtattcgctgttcaataaacattgagtgagcacctccccagatgga

SEQ ID NO: 404448 - DNA, 1000 bp, Homo Sapiens; identical to SEQ ID NO: 292660

SEQ ID NO: 404449 - DNA, 1000 bp, Homo Sapiens
cgtgaggtccactatgtcctgctggatccttcctgcagtggctcgggtgagatggtgagaaggcgtggctgagggactcagaggtccacagcagcttagacctggagtcatctgttttggtcttagttctgacactttaatgggcttgggaccctggagcaaaagttctcctctgtgaagcgaggatttcaggagcgaggatttcaggactgaggcagcctgtgaagctgtgtaaccgagacacgcttttccttaggtatgccgagcagacagctggaggagcccggggcagggacacctagcccggtgcgtctgcatgccctggcagggttccagcagcgagccctgtgccacgcgctcactttcccttccctgcagcggctcgtctactccatgtgctccctctgccaggaggagaatgaagacatggtacaagatgcgctgcagcagaacccgggcgccttcaggctagctcccgccctgcctgcccggccccaccgaggcctgagcacgttcccgggtgccgagcactgcctccgggcttcccccaagaccacgcttagcggtggcttcttcgttgctgtaattgaacgggtcgagatgccgacgtgagtgagtgggggcatgcttgggaggcgcaggatggtactggcacatctaacatctacatttctctagctcagcctcacaggccaaagcatcagcaccagaacgcacacccagcccagccccaaagagaaagaagagagcaaaaagctgcagccggtgcttgcacaccgccttgcacatagcagaggctccgggctcactccttcctggtgggaaaggaagatgcctgtcctctccgtggaagaccctgggccctcaccgcaggcagcagtttgcgttttgaaaggttattgggtcccttcctcgggctgtgttcttgctggtgagcaaaagtgttgcctgcagaaataaaatgcagaacgtactctacgataaaaaaaaaaaaaaaaaa

SEQ ID NO: 404450 - DNA, 1000 bp, Homo Sapiens; identical to SEQ ID NO: 292661

SEQ ID NO: 404451 - DNA, 1000 bp, Homo Sapiens; identical to SEQ ID NO: 292662

SEQ ID NO: 404452 - DNA, 1000 bp, Homo Sapiens; identical to SEQ ID NO: 118645

SEQ ID NO: 404453 - DNA, 1000 bp, Homo Sapiens; identical to SEQ ID NO: 292664

SEQ ID NO: 404454 - DNA, 1000 bp, Homo Sapiens
agagtggatactatggaaaacagcgccatcaagatattaagagagagagtgatttcacgaaaaagtgaccttactcgtgctttccaacttcaagaccacagaaaatcaggaaaactttctgtgagccagtgggctttttgcatggagaacattttggggctgaacttaccatggagatccctcagttcgaatctggtaaacatagaccaaaatggaaacgttgaatacatgtccagcttccagaatatccgcattgaaaaacctgtacaagaggctcattctactctagttgaaactctgtacagatacagatctgacctggaaatcatatttaatgccattgacactgatcactcaggcctgatctccgtggaagaatttcgtgccatgtggaaactttttagttctcactacaatgttcacattgatgattcccaagtcaataagcttgccaacataatggacttgaacaaagatggaagcattgactttaatgagtttttaaaggctttctatgtagtgcatagatatgaagacttgatgaaacctgatgtcaccaaccttggctaaacacaaatgagagcttccctcaggctccctgaaacagctaggcccaaatcacaagtacagtcctttccaacacccctgaaattcatagtcagtagcagagaaaagcagatcccaattcatcccacaaacagatgcatagtatgggttttggaagtccctagcaagctgttattggtaagattaggttaaatgtcagtaataggatttggtttcagcattagtacctacatattgccagtgagaaactgggttggacctagtggtgttgtcgtgagtgccacctaaccaggaggccagagcggtttgaaaacatcctgaaaggaactcatacagcacaagagaaaactactaagcttgacatctgtgagtgactgagggagacaggaggaataccaggttattcatggaataaagtctttccatctttaaa

SEQ ID NO: 404455 - DNA, 1000 bp, Homo Sapiens
tctggataaggcccggttaaagagcaaagacgtcaagttggctgaggcacaccagcaggagtgctgccagaaatttgaacaactttccgaatctgcaaaagaagaactgataaatttcaaacggaagagagtggcagcatttagaaagaatctaattgaaatgtctgaactggaaataaaacatgccaggaacaatgtctcccttttgcagagctgtattgacttgttcaagaataactgatatgccttcactcagaagaaaagaaatgaatgtgaaagaaagccaagcatcacttgcacttaaatcattaccacggaagatatattagcttcaactttagtttaaaattatgtgaataaatattttgatttctacaaatcttaacatttaaccatgttggtttaaaaatattattgcttgctacttggacataactaatttttccttgtgcatttaatacctctgggcagaatccaaatactgggttctcccgtagttcgtctttagttactaagaaagggtgtaggacacattagccttctggaaacaagtagaagccatcacctggcccatgtccctacaaacccatgattgtcagggaggtgccagttacagcaggtgattcagctacttgaggtcggtaacagaccttccattcctcactgaaggtggggtttgtgtttttgttttgccctgttactccactggtagtcatctggtgtttgtactataacaacagcaagaaaatctcatttatctttatatactctttgcacctcctttttttagtcgagatataaatatttgaggggagagaaatatctacaggtatatatggaaacaaataatgtggtctgctttataagatggccagatctacattaggaaaagtataagccccctccctaatggccgctggggggtgagggcggtgtgttgtatgtctttgggtgtttgtttttttataaagcatataataaaataatcgtgctactaaaa

SEQ ID NO: 404456 - DNA, 1000 bp, Homo Sapiens
acccattaatggaagagattgggttcttggtgcttggcatgagggtttatcatgttcattccgatagctatgagacagaaaaccagcattacggaagaagcttaacaaaagaaactataaaggatggagtctccagattttttcataatgggtactgcttaagaaaagatgctgttgctgccagtattcagaagattgagaaaattctgcagtggtttgaaaaccagaagcagcttaatttttacgcaagttcattactctttgtttatgaaggttcatctcagccaaccactacaaaattgaatgacagaactttggcagaaaagtttttgtccaaaggacaactgtcagacacagaagtactagagtacaataataactttcatgtgttaagttccacagctaatggaaaaatagagtcttcagtgggcaaaagcttgtccaagatgtatgcgcgtcacaggaaaatatatacaaaaaagcatcacagtcagacttcattgaaagttgaaaatctggagcaagacaatgggtggaaaagcatgtcacaggaacatttaaatggaaatgtactttcccaactggaaaaagttttctaccatcttcccactggttgccaagagattgctgaagtagaagtgcgaatgatagattttgctcatgtgttccctagcaacacaatagatgagggatatgtttatgggctaaagcatttaatttctgtacttcgaagtattttagacaattgaatcctctgttgcagtctttttaaggggtgggccaatcataatgaagaggggcagtcaatatctgcacctttaatgctatgtaaaaaatttgtattatgagtcgacattttatttgtctttatacttttggaagaatggttaacttttttataatcttactcaggaaaactaactatttgttcattagaaaactatgaagaataaagaaacttaggaatggtaaaaaaaaaaaaaaaaaaaaaaaaaaaaaa

SEQ ID NO: 404457 - DNA, 1000 bp, Homo Sapiens
tgtgggcatccacgtctgctgcttcgagtgcatcgactgccttcccggcaccttcctcaaccacactgaagatgaatatgaatgccaggcctgcccgaataacgagtggtcctaccagagtgagacctcctgcttcaagcggcagctggtcttcctggaatggcatgaggcacccaccatcgctgtggccctgctggccgccctgggcttcctcagcaccctggccatcctggtgatattctggaggcacttccagacacccatagttcgctcggctgggggccccatgtgcttcctgatgctgacactgctgctggtggcatacatggtggtcccggtgtacgtggggccgcccaaggtctccacctgcctctgccgccaggccctctttcccctctgcttcacaatttgcatctcctgtatcgccgtgcgttctttccagatcgtctgcgccttcaagatggccagccgcttcccacgcgcctacagctactgggtccgctaccaggggccctacgtctctatggcatttatcacggtactcaaaatggtcattgtggtaattggcatgctggccacgggcctcagtcccaccacccgtactgaccccgatgaccccaagatcacaattgtctcctgtaaccccaactaccgcaacagcctgctgttcaacaccagcctggacctgctgctctcagtggtgggtttcagcttcgcctacatgggcaaagagctgcccaccaactacaacgaggccaagttcatcaccctcagcatgaccttctatttcacctcatccgtctccctctgcaccttcatgtctgcctacagcggggtgctggtcaccatcgtggacctcttggtcactgtgctcaacctcctggccatcagcctgggctacttcggccccaagtgctacatgatcctcttctacccggagcgcaacacgcccgcctacttcaacagcatgatccagggctacaccatgaggagggactag

SEQ ID NO: 404458 - DNA, 1000 bp, Homo Sapiens; identical to SEQ ID NO: 292665

SEQ ID NO: 404459 - DNA, 1000 bp, Homo Sapiens; identical to SEQ ID NO: 118646

SEQ ID NO: 404460 - DNA, 1000 bp, Homo Sapiens
gcttgtgcgcagggatcgagacgggcagcactcatgggtgccaaggggcaggggcagtgggggctcgggcaggagcaccccccagactccccgtgcccgcagccctgcagcaccccggctttcccgggtctccagccccagtccagagttgggcaccacaccggccagcatcttccgcacacccctgcagctcgacccgcagcaggagcagcagctgttccggcgcctggaagaggagttcctggccaatgcccgggcccttgaggctgttgctagcgtgacccccactggaccagcccctgacccagctcgggcccccgaccctccagctcctgactctgcctattgttcctccagttcctcctcttcgtccctcagcgtcctgggtggcaaatgtggccaacctggggactctggccggacggccaatgggctgcctgggccccgaagccaagccctttccagctcctccgatgaaggcagcccctgccctggcatgggggggccactagatgcacctgggagccccctggcttgcactgaaccctcgaggacctgggcacggggtcggatggacacacagccagaccgtaaaccctcacgtatccccacgcctcggggcccccgccgcccctccggacccgcagagctggggacatggcatgccctgcactcagtcaccccgagggctgagccagattcctggatgtgatggaccagctcagctgtccccagaccccatcccttctccttttcctttgtggccttaacccttctgcatcagggagccccctctgcctcttgagtaccagacctcatgggaccagaccccttgggaccacatggcacaatgggacctctgttgtacattccggttgggggatgagcgttgctatttaattactaatattattgaatgccttagaggaggccgggcgagcccggtgttctgaagacctgtggcccagcagagcctctgacagtaaagttttgctccagc

SEQ ID NO: 404461 - DNA, 1000 bp, Homo Sapiens; identical to SEQ ID NO: 292667

SEQ ID NO: 404462 - DNA, 1000 bp, Homo Sapiens; identical to SEQ ID NO: 118647

SEQ ID NO: 404463 - DNA, 1000 bp, Homo Sapiens
gcttttgagagtcgcggcggaaggagcccggccgccgcccgccggcatgagctacgaccgcgccatcaccgtcttctcgcccgacggccacctcttccaagtggagtacgcgcaggaggccgtcaagaagggctcgaccgcggttggtgttcgaggaagagacattgttgttcttggtgtggagaagaagtcagtggccaaactgcaggatgaaagaacagtgcggaagatctgtgctttggatgacaacgtctgcatggcctttgcaggcctcaccgccgatgcaaggatagtcatcaacagggcccgggtggagtgccagagccaccggctgactgtggaggacccggtcactgtggagtacatcacccgctacatcgccagtctgaagcaggtgggtgcctgcccgcttgcatgctcacctctggcagcagggcagtcacggctccgccatggagggtcctgccatgtcacttcagcgttatacgcagagcaatgggcgcaggccgtttggcatctctgccctcatcgtgggtttcgactttgatggcactcctaggctctatcagactgacccctcgggcacataccatgcctggaaggccaatgccataggtcggggtgccaagtcagtgcgcgagttcctggagaagaactatactgacgaagccattgaaacagatgatctgaccattaagctggtgatcaaggcactcctggaagtggttcagtcaggtggcaaaaacattgaacttgctgtcatgaggcgagatcaatccctcaagattttaaatcctgaagaaattgagaagtatgttgctgaaattgaaaaagaaaaagaagaaaacgaaaagaagaaacaaaagaaagcatcatgatgaataaaatgtctttgcttgtaatttttaaattcatatcaatcatggatgagtctcgatgtgtaggcctttccattccatttattcacactgagtgtcctacaataaacttccgtattttt

SEQ ID NO: 404464 - DNA, 1000 bp, Homo Sapiens; identical to SEQ ID NO: 292669

SEQ ID NO: 404465 - DNA, 1000 bp, Homo Sapiens; identical to SEQ ID NO: 292670

SEQ ID NO: 404466 - DNA, 1000 bp, Homo Sapiens; identical to SEQ ID NO: 118648

SEQ ID NO: 404467 - DNA, 1000 bp, Homo Sapiens
actttcgatttcatgaaaggacacaaacacataagaatgcactctggagaaagaccttataaatataagatatatgggaaacacttttattctgccaagttatttcaaacacatgaaaaaattcacactggagagaaaccctataaatgcaagcaatgtggtaaagccttaattgttccagttcctttcgatatctaaaaggactcacagtggagaaaaactctatgagtgtaagcaatgtgggaaagtcttcagatctgtcaagaacctttcaatttatgaaaggacacacactggagagaaaccctatgaatgtaagaaatgtggaaaagcgttccataatttctcttcttttcaaatacatgaaagttgcacagaggagaggcgccctaagaatgtaagcattgtgggaaagcattcatatctgccaagatcgtttgaatacatgcaaaacacacactggagagaaacctatgaatgtaaggaatgcaaacaagcattcaattatttttcttccttgcatatacatgaaaggactcatacgagagagaatccgtatgaatgtaaggattgtgggaaagcattcagcttgcttaattgctttcatagacatgtaaagacacaccagaaggaaaccctatgaatgtaagcaatgtggcaaaagctttcacttcttccagttcttttcaatatcatgaaaggactcacactggggagaaaccgtatcaatgtaagcaatgtgggaaagccgtcagatcagcctcaagacttcaaatgcatggaagcactcacacttggcagaaactctatgaatgtaagcagtatgggaaagccttcagatcggctaggattctttgaatacaaataatgaatgtaaacaattaactgtttataataactgtatactaacaaatgttattctttttaaataattaagaagctataataaaatatccattggtgtcatgtattagatcaagcttaaaaaaaaaaaaaaaaa

SEQ ID NO: 404468 - DNA, 1000 bp, Homo Sapiens; identical to SEQ ID NO: 224133

SEQ ID NO: 404469 - DNA, 1000 bp, Homo Sapiens; identical to SEQ ID NO: 292676

SEQ ID NO: 404470 - DNA, 1000 bp, Homo Sapiens; identical to SEQ ID NO: 224134

SEQ ID NO: 404471 - DNA, 1000 bp, Homo Sapiens; identical to SEQ ID NO: 224135

SEQ ID NO: 404472 - DNA, 1000 bp, Homo Sapiens; identical to SEQ ID NO: 118653

SEQ ID NO: 404473 - DNA, 1000 bp, Homo Sapiens; identical to SEQ ID NO: 292681

SEQ ID NO: 404474 - DNA, 1000 bp, Homo Sapiens; identical to SEQ ID NO: 118654

SEQ ID NO: 404475 - DNA, 1000 bp, Homo Sapiens; identical to SEQ ID NO: 292682

SEQ ID NO: 404476 - DNA, 1000 bp, Homo Sapiens; identical to SEQ ID NO: 292683

SEQ ID NO: 404477 - DNA, 1000 bp, Homo Sapiens; identical to SEQ ID NO: 224137

SEQ ID NO: 404478 - DNA, 1000 bp, Homo Sapiens
accccttggccacgaaagtcaaggtgttgaacatggcagagattcagacgcgcctggcctacgtgtgttgcgtgcggcagctggaggtggtgaagagcagtgactactgcgagtacctgcgcccccccatcgacagctacagcaccctggacttcggcaagttcaacgagatctgcgaagtgggctaccagcacgggcgcacggtgtttgacatctggggccgcagcggcgtgctggagaagatgctccgcgaccagcaggggccgagcaagaagcccgcgagtgcggtcctcacctgtcccaacgcctccttcacggaccttgccgaaattgtgtctcgcattgagcccgccaagcccgccatggtggatgacgaatctgactaccagacggagtacgaggaggagctgctggacgtccccagggatgcatacgcagacttccagagcacctcagcccagcagggctcagacttggaggacgagtcctcactgcggcatcgacaccccagtctggctttcccaaaactgtctgagggctcctctgaccaggacgggtagaggcctctgctaaagagcccggatgcagcgtcttccgtgggactgtccccaaggctgaggctcctgccaagtcctaggggcctctgtacctgccctgctggaagccctgacttccccggggccccaggctgtgttagggttctctgggcctcttctttgtaccagcagccctgcatacagggccctgtgagcccccctgcagtcctgtgaggcccctgaagctctgtgaggcccctgaagctctgtgaaccccctgcagccctgtgaggccccccgaagccctgtgaggccccccgaagccctgtgaaccacctgctgccctgtgaggcccccaaagctctgtgaactgcctgctgtcctgtgaactgcctgctgccctgtgaggtgtgggagccctgatgctgccgtgtgatgtttcaataaaggtggatctcactgtt

SEQ ID NO: 404479 - DNA, 1000 bp, Homo Sapiens; identical to SEQ ID NO: 224139

SEQ ID NO: 404480 - DNA, 1000 bp, Homo Sapiens; identical to SEQ ID NO: 224140

SEQ ID NO: 404481 - DNA, 1000 bp, Homo Sapiens; identical to SEQ ID NO: 292687

SEQ ID NO: 404482 - DNA, 1000 bp, Homo Sapiens; identical to SEQ ID NO: 118655

SEQ ID NO: 404483 - DNA, 1000 bp, Homo Sapiens; identical to SEQ ID NO: 292690

SEQ ID NO: 404484 - DNA, 1000 bp, Homo Sapiens; identical to SEQ ID NO: 293162

SEQ ID NO: 404485 - DNA, 1000 bp, Homo Sapiens; identical to SEQ ID NO: 224142

SEQ ID NO: 404486 - DNA, 1000 bp, Homo Sapiens; identical to SEQ ID NO: 224143

SEQ ID NO: 404487 - DNA, 1000 bp, Homo Sapiens; identical to SEQ ID NO: 224144

SEQ ID NO: 404488 - DNA, 1000 bp, Homo Sapiens
catcattagcccccttttacagaggagagaattgaggcttcgagagagagaaacttggccaggagtttccactcggtccgacgccctcggtgccccgccgggtgcatcaccaggtccttttaccggaatgtggtgggtgtcctgctggtctttgatgtgacaaacaggaagtcctttgaacacatccaagactggcaccaggaggtcatggccactcagggcccggacaaggtcatcttcctgctggttggccacaagagtgacctgcagagcacccgctgtgtctcagcccaggaggccgaggagctagctgcctccctgggcatggccttcgtggagacctcggttaaaaacaactgcaatgtggacctggcctttgacaccctcgctgatgctatccagcaggccctgcagcagggggacatcaagctagaagagggctgggggggtgtccggctcatccacaagacccaaatccccaggtcccccagcaggaagcagcactcaggcccatgccagtgttgactctaggagagaaagggttaaagcagtcccagccttagcccacctggtgggatggggagtgttaatatctctctggaggacaaatgacagaagggttcatataaacagtatcctgacacagtcatgcttcctggattttggagtcgaggctttctacagaaaagaaagttctgatggccaggcatggtggctcacgcctgtaatcctagcatttttggaggccaaggacagtggatcacctgaggtcaggggttcgagaccagcctggccaacatggtgaaaccctgtctctactaaaaatacaaaaattagccaggcgtggtggtgcatgcctgtaatcccagttactccagaggctaaggcaggagaattgcttgaacctgggaggcagagattgcagtgagccaagactgcgccactgcactccagcctgggcaacagagtgagactctgtttcaaaaaaaaaaaaaaaaaa

SEQ ID NO: 404489 - DNA, 1000 bp, Homo Sapiens; identical to SEQ ID NO: 292693

SEQ ID NO: 404490 - DNA, 1000 bp, Homo Sapiens; identical to SEQ ID NO: 118656

SEQ ID NO: 404491 - DNA, 1000 bp, Homo Sapiens; identical to SEQ ID NO: 224146

SEQ ID NO: 404492 - DNA, 1000 bp, Homo Sapiens; identical to SEQ ID NO: 224147

SEQ ID NO: 404493 - DNA, 1000 bp, Homo Sapiens; identical to SEQ ID NO: 224148

SEQ ID NO: 404494 - DNA, 1000 bp, Homo Sapiens
cagcatctctctgaaacgaaaaaagaaattaattaaggaatttcaaaaacaccatccagaagctttgaattaacatttctgatacaagaaactacaatttttggggaggaagttagtatacttccagtggaagacctgagagggtacctgaagagataccgggaaaatattggaaacatgccaccaagccctcttcgacagaagtctccttatttggaaagttgccattttaatgttcagtgtgaatcaggggcggggtcaaacactgttgcccaggctggagtgcagtgacgcgatcctgactgactgtaacctcaaactcctggactcaagccatctccctaccttggccacccaaggtggtggaattgcagaggaaggctgaggcgggaggattgcttaaacgcaggagtctgcagctgcaatgaactgtaatcccactactgcattccagcctgggtggacagaacaaggccctgtctctattttaaaataataataacacaaaaatgcccctcccccatttttttttaaagttcagtatgtaacaagttctatactggatcctttctttctctaataatcctcaagaaatccttacaggtaagtattgcttccgccactgcagaggcgaaagccagtgctttggtaaaggtcctagtctttctggctttaacacagaaagtcttaataccatttggattagagattcacaagttaggccgggcgcggtggctcatgcctgtagtcccagcactttgggaggccgagacaggcagatcgcgaggtcaggagatcgagaccatcctggctggcgcggtggaaccctgtctctactaaaaatacaaaaaactagccggcctggtggcgggcgcctgtggtcccggctgcttggaaggctgaggcgggggagtggcgtgagcccgggaggcggagcttgcggtgggccgggatcgcgccactgcattccagcctggacgacagagcgagactccgtctc

SEQ ID NO: 404495 - DNA, 760 bp, Homo Sapiens; identical to SEQ ID NO: 118657

SEQ ID NO: 404496 - DNA, 1000 bp, Homo Sapiens
catttttcaaactaaaggagtctcaactgccagctttggcaatttaccagactctagatgacgagtgggatacactgcccacagcagaagtttccgtagagcatgtgcaaaacttttgtgatggattcctaagtggaaaattgttgaaagaaaatcgtgaatcagaaggaaagactccaaaggtggaactctgacttctccttggaactacatatggccaagtatctactttatgcaaagtaaaaaggcacaactcaaatctcagagacactaaacaacaggatcactaggcctgccaaccacacacacacgcacgtgcacacacgcacgcacgcgtgcacacacacacgcgcacacacacacacacacacacagagcttcatttcctgtcttaaaatctcgttttctcttcttccttcttttaaatttcatatcctcactccctatccaatttccttcttatcgtgcattcatactctgtaagcccatctgtaacacacctagatcaaggctttaagagactcactgtgatgcctctatgaaagagaggcattcctagagaaagattgttccaatttgtcatttaatatcaagtttgtatactgcacatgacttacacacaacatagttcctgctcttttaaggttacctaagggttgaaactctaccttctttcataagcacatgtccgtctctgactcaggatcaaaaaccaaaggatggttttaaacacctttgtgaaattgtctttttgccagaagttaaaggctgtctccaagtccctgaactcagcagaaatagaccatgtgaaaactccatgcttggttagcatctccaactccctatgtaaatcaacaacctgcataataaataaaaggcaatcatgttaaaaaaaaaaaaaaaaaaaaaaaaaaaaaaaaaaaaaaaaaaaaaaaaaaaaaaaaaaaaaaaaaaaaaaaaaaaaaaaaaaaaaaaaaaaaaaaaaaaaaaaaaaaaaaaa

SEQ ID NO: 404497 - DNA, 1000 bp, Homo Sapiens
ctatgaggactgcattcacgcctaaaacaggagcagtgcctgccttaattcgccaaaacggtatcagaagattaggatatacatattcacttagtgatcctattctcaatcagacacaatatagtgatgagtacacttggaaatcacactctaaagaagatttgatcaaaactgagacttcaagaggaatcaagagccacaaatctcatctcaatgaagacattttcctgtggacactacctcactgtcaacaaacggggacactaaagaactgcctcccttggaaaatcccggcttcaatgaaagaagttaacaaggcactatcaaatcagtttatttcccttactaagagagactttgtggacagatcaaaagctcagaagattaagaaaagttctcacttgtctctggaatggaaaaagttacttccccaacctccagacactgaattccgaaggaattaccaaattccagctaaaattcctgagcttcaagatttcagtttcaaatatggatgctactcaagcttgcctgttgcttctcagggtctagtgccttctgtgctgcacagctacctgaggaaccaagagcacacaaagaaacagaccacataccaaagtgactacgacaaaacctacccagatttcttaatgcttttaaactcatttacttcctctcaagtcaaagagtaccttcagagtctttcctacaaagatagacaaattattgatcgctttattcgtactcactgtgacactaacaaaaagaagaaatgaaaagggaaaatagtacaaatgaagaaaatctgaaaatcaatggaagcacgaggacattcctagtcattttctcaattatcaaggaaaaataagatgcaaatagcttcaaaaaaaaaaaaaaaaaaaaaaaaaaaaaaaaaaaaaaaaaaaaaaaaaaaaaaaaaaaaaaaaaaaaaaaaaaaaaaaaaaaaaaaaaaaaaaaaaaaaaaaaaaaaaaaaaaaaa

SEQ ID NO: 404498 - DNA, 1000 bp, Homo Sapiens; identical to SEQ ID NO: 224150

SEQ ID NO: 404499 - DNA, 1000 bp, Homo Sapiens; identical to SEQ ID NO: 118659

SEQ ID NO: 404500 - DNA, 1000 bp, Homo Sapiens; identical to SEQ ID NO: 292705

SEQ ID NO: 404501 - DNA, 1000 bp, Homo Sapiens; identical to SEQ ID NO: 292707

SEQ ID NO: 404502 - DNA, 1000 bp, Homo Sapiens; identical to SEQ ID NO: 224152

SEQ ID NO: 404503 - DNA, 1000 bp, Homo Sapiens; identical to SEQ ID NO: 292710

SEQ ID NO: 404504 - DNA, 1000 bp, Homo Sapiens
ataattttattttggtggttggagaaaaggaaaagatagataatgctgtaaacgtgcgaacaagagacaacaaaattcatggagagattttagtaacttctgccattgataaactgaagaatctcaggaagacacggacactcaatgctgaggaggccttttgaagtccttccctgatatttgcttctgtgtaactttgttttgacccttaaaaatgtatttttcttaacatgttagtacttctacgactttggagccactgatgggtccactcatggcctcagctgagaaaggagacgatgaacgtgtagctgacatgcacgaagtttaatttactcatgtccacgggggacgtttagagggcacgtgggaaattttccagcaatcaatgccttgagaaacttaaatggggaaatattattcatcgagaaagtgaaacaaaacactaggaaatgattatgaaatgttagtgattttcaaaagatgggcttcaaataaaagtctgcagagttttttttaaataggagggaaaatcttattttctaatatgtctcaggtatttttatgacttctactaaaattcacactgaaactttatcttctaaactggaatcattacttaattttaactaaccaacaaccacaaaagcagcagctactgctaaatattggattactgacaaaggaattcagttttgtggaatctggtgtttgcactataggttaagagttgccatttaaatgtttcttattcataattaggttttgttccgctttagaaaaaaataaattcccaaatgaattgcatcagtgtttccagcgtttcagctgtgggcttctaccaccactaagccgctcacctagagttgttacttttttgatgggatgacattccatggatttatgtactgaaatggatttcagattttaaagagaggaatgctctacgtgctcagaactgaattaaaatggcattatgtcaatagagaattcaaaaaaa

SEQ ID NO: 404505 - DNA, 1000 bp, Homo Sapiens; identical to SEQ ID NO: 292711

SEQ ID NO: 404506 - DNA, 1000 bp, Homo Sapiens
ggggcccagagaaggatcagagcagcccctcccagactcaggcagccccccagggccccagcactgcttccagggcaattagcgacatctgctttcccacctactttcgagcagagaaaaaaagtctgcaaatcaaggagtttatttggtgcaacaaagactgggccatccccggcactaataggggcaaggcctctgggaatcccagtggaggggcccacagagggctatccatcccaggccccctgacttccagggccctcctagttctgcctcccctgaaggctttactttcaaatgctttggatgttctgggtaagaagagtaagaactctttcttgcagtcagaagagaaggtgctggatgtggaaaaggatgggtgtgtggcttatgcatatggcttgaaaacagcagatgggaaaggtgaaaaaagagccagtgagctggccaaacaccctatggtcaacgacacgccatcctccccttccccagcggcccagatatccctgctgaccgatccggagcagcgctgcctgcattggtccctcctgtctgagaaaaacctggcgtgccctccagaccccagcaacgttcgctaccttgctgccttgcagcttctgcagaaacggggagtgcaaagctacaaatccaaattcaaagccaaggagccaagatctcctgtgatcacccgaaagcatgttctcccaaaggccaagcaggaaaacaggccccaaatgctggagaccaaagttttcccaagacctgtcttgccgtctctcacagtgagcagagttatcattcctgtctctacccacaggatcctctgagcggtcgcggtagaacccctgggaataagcaccgtttgagatgcagccatcctttctctttcttctctctcatttcccacccaccccccactctctctttctctcctccccgtcagtctgtctttactcttcttttcctccatttttttttgtagtacaactgaagaaaactg

SEQ ID NO: 404507 - DNA, 1000 bp, Homo Sapiens; identical to SEQ ID NO: 224153

SEQ ID NO: 404508 - DNA, 1000 bp, Homo Sapiens
attctccccagccccatgcatcatagccaatcctaaatgaatgccaatctggaaaagaccaaaataaaccacgtgaagatgggaagagctgctcttggtgatgggagaatggggactctctcttttattgtgcaaattccactttccatcatgcaggaaaatccgtcttgaaggcagctcctctctgtgccgggggtgggtgatccagcctaagctagaatggcggcaagctcaaggcagctgtggccctcaggagagcgtctggagtccacagcacagtgggaagcgcaacggcagctagtctgagggtctggacgatggccatgcacagatgaggacagaggagccactgtagtgactgaagcccacggcatccaccctctccagccagccccgcccacacctgaagcccacagcgtccaccctgtccacccagccctgcccacacctgtggccttcctctccttcctgtttggtgagtgctgcctccacacctggctgcatgccagaaaggcctgcacaggtcagaacacaggtttccaaaccctactccaagtctgaacctccaaggacaccccgagctccccaaggttcttgcatagagggcacaggccagagacagcccaggtgggaagcttactctgagtcagctgccctcaccaagatacatccacaggctcctgtacaaggagaggaggcagaagtccctctctgccaggaggtcctcctcaatctcccaagcccacaccactgccctgctccatctcccaccacctccccctgcagatacgggggccaccctacccaccccacaggaacgatgggaaaacctgcctccctctaggaggagggcgtggcacggctgctgcgcgggtaaggaacctcgctatgccttgctcccatcaacacttttattctagatttgaaggtgttttggggaagccatctctgcacaaaagaagtcaacgcaggaataaattccaagatactgaactacctc

SEQ ID NO: 404509 - DNA, 1000 bp, Homo Sapiens; identical to SEQ ID NO: 292714

SEQ ID NO: 404510 - DNA, 1000 bp, Homo Sapiens
gcctggttccagacgccctacgccaccatccgcctcacgcctgctggctgctcctcctacaccttcccccagatcctgggcgtcgcgctggccaatgagatgctgttctgtgggcggaagctcaccgcccaggaggcctgcagcagggggctggtgtcgcaggtcttctggcccaccacgttcagccaggaggtcatgctgcgggtcaaggagatggcatcctgcagtgccgtggtgttagaggagtccaaatgcctcgtgcggagcttcctgaaatcagtgctggaagacgtgaacgagaaggaatgcctcatgctcaagcagctctggagctcctccaaaggccttgactcccttttcagctacctgcaggacaaaatttatgaagtctgaggggccccagctcacgggcccccaacttccagctctgccctgtgtttcggaaaccagagcacagtgtctgccccggccaaggagtttgtcaaggtgtctctttatacgtagggttgtgtccatttcctcgtgtcctttggttgctcctccttggtttgattttgtgtaatggatggaaaacgcagcatacttggcctcccccacctccctgcccttcctggccagagagctgtccaaggctgtatcttcccagggctccgccaagcaccgctgtcctttccccacttgctgaaatgcaccatgacggtccaggaaggggaagaccactttcacattcttctgactcaggctgtgtctacacagtgcctctgacttggagacttggccatcatggctctctctggttgtatttagatcgggtgtcagaggacgaccaatcttagggaatttccagaccaatgagcaaaatgattgtgcacacctggcctcagtctcctttccgacgcaaatctgtgtgactattagggcttggtcttaaaacccaattgagtgatttgcaaacccagatattgtacatttagaaatgttttgttaaatatatattttt

SEQ ID NO: 404511 - DNA, 1000 bp, Homo Sapiens; identical to SEQ ID NO: 118660

SEQ ID NO: 404512 - DNA, 1000 bp, Homo Sapiens; identical to SEQ ID NO: 224154

SEQ ID NO: 404513 - DNA, 1000 bp, Homo Sapiens
tctgagaacttccgcggcacgctcaccagcctggccttgctgcccactaaacgccacctcctgctgggctcagacaacggggttatccgcctcctggcatagactgaggcaggagctggccgggcaagggtgggaagacatctgcgggcgcgtgtccgctcaccctgttccctgagcagcagctccctccagggaggccctgggtcccacgccctgggtgcccacatggcctgccaactagggcctgcaaatggagtgggggagtcctggcccctgaatcaccagagccaccaagcctgccagaggggtcccattcatggcttggggacacagggctcctagcaagcaggaagttaagagcaggaggaagcgttgctaccttcacttctccccagctctgccctctgggtccacatgaggacagggaagctcgggaaggggaagggagactggccctgcccagccggtctctagcccctcagcccccgctgggcactctctgtcccatccctctaggacagggaagctggcctggtccagggcactgatggtgcttggattccagcctaaggaaggctggccgtggtccaggagttaagggcttgggtctggggtttaagtggccacccatccaggccctggccagtgtgggaccgggacgggaaggaagaaggaggctaggagcagggggaaaaggtgcacttggccagtggcgcctgccaggagtgagtccatgcgttgtctgcccacccctaccacagtgtttgtgccttcagctgagggggcagcctctgggccctgaacccctgctggggctccacgaccctgagagaagggttgagaagaatcatctctgcacctcgggtctctgccagaggaagacttaagcatccctgcgacctcacattctagacagagatgaggtccaagggttggcccctgctgccttctcacaatttgcaatagatgtaaataggaccaataaatcctttggaagagc

SEQ ID NO: 404514 - DNA, 1000 bp, Homo Sapiens; identical to SEQ ID NO: 292718

SEQ ID NO: 404515 - DNA, 1000 bp, Homo Sapiens; identical to SEQ ID NO: 224155

SEQ ID NO: 404516 - DNA, 1000 bp, Homo Sapiens; identical to SEQ ID NO: 292720

SEQ ID NO: 404517 - DNA, 990 bp, Homo Sapiens
gtctctctgggctctgtgtctaaggagccctagggcactgggtgtgagtcacttaggtgggcctgtgtggaggggtgtctggggaggacattgaacaggctgggctgaaagggcgttcggctgtcgggggaggtctctgggaagacaggttcctcacagcaaagcctgtggtgaaggtctcagaggcctctcaggggaagtctcaaggtctccagtaaggggaacgaggtctggagggaggaggttgtggatcctcgggcagggttgttgagggaggggggtctccaggtccccagaagcagggacctcaggcaggagtaccaggggaggagtgtggaggaagcggggtcctcagctgggggcctcggggtaggaaaggcctgggcccatcctgcccttgtggcccccggctgcagcctcagtggcatgggggtgaagcggagcctccagagtgggggcattctgctcagcctcgtggccaacgtcctcatggtgctctccacggccaccaactactggacccgccaacaagagggccacagtggcctgtggcaggaatgcaaccacggcatctgctccagcatcccctgccagaccacgctggcggtgactgtggcgtgcatggtgctggcggtgggtgtcggcgtggtgggcatggtgatgggactgcggattcggtgcgacgagggcgagtcgctgcggggccagaccacgagcgccttcctcttcctcggcggactgctgctgctgaccgccttgataggctacaccgtgaagaatgcgtggaagaacaacgtcttcttctcttggtcctatttttctgggtggctggccttacccttctcaattctcgcgggcttctgctttctgctggcagacatgatcatgcagagcaccgacgccatcagtggattccccgtgtgtctgtgactgcagcctgcctggggcagaataaaggaacggctttttttagcaaaaaaaaaaaaaaaa

SEQ ID NO: 404518 - DNA, 1000 bp, Homo Sapiens
cacacaagagagaggccctataagtgtaaggcatgtggtaagggcttcagtcgtaattcatacctccttgcccatcagagagtgcatatagatgagacacagtacacacactgtgagcgtggaaaggaccttctgactcatcaaagactacatgagcagagagaaacattataaatgtagtaagtcagggttcaattagtaaaacagaagccacactgtattccagatgatagaggcttactcagcctgtgggagggctaggggagcaaaagacagggacactgccatcgataatgtcagcctgcagcactgaagtgtgccaggcaaggactgtggatttcaagaacttctgtgaagctcccatcaactgctgtatgctacaatggcaaagaggttacttttgacaaatgggtggtttgtggtagtggttgtagttagtggtcaaatttccattaaagggtgtgtccaggaaggaaattctaattgggatgatcatggtaaggtcttcagttcagccaacgtctttagatttttttttagtccccagtagaaaaatactctctgtatgaagaacattcaaaagtgtgctcaaaaatgaaacccatgctcttactatgaaagaacgttagtacccaggttttccatgagattctctacacaggcaagaagctccatagaagtggcatttgaagggtgtggcagaggcagtgctgtgtttatcacactggttccatttccttgcaaataagaagtctatttcccagtaacccttgcagttaagagtgtgcccatgtgattgagttctagccaatggagtgtgagcaaaagtgatataagccactttcaggtctagcctttacaaacatcctcaggcttctctatccctgccaaggtgaccttggaggctgcttattccagactgggttgatagaaggtcactacttcatctgtgttggatttctttttagagtaagaaataaaagttcattgtgtctcacca

SEQ ID NO: 404519 - DNA, 1000 bp, Homo Sapiens; identical to SEQ ID NO: 292722

SEQ ID NO: 404520 - DNA, 1000 bp, Homo Sapiens
ctgcaacctctacctccagggttcaagcaattctcctgcctcagtctcctgagtagctgggactgcaggcatgcgccaccatgccaggctgattttttgtgttttttagtagagacggggtttcaccgtgttggctaggctggtctcaaactccagacctcatgatttacccacctcggcctcccaaaatgctgggattgcagacatggaccatcatgcccagctgcaaccctaatttttcattcagtcataataccaatagttatctcatgcacctctgagtgccttcttccccaaaaccagcagtgccatacctgctgtcagcaagggtgtaatataccatagtgataaatatgaccaaaagccataaatgactgtgagatgtatgagaattacaagtcacattagtaagaagagaaaaattttggtcatgtttatgatttgaaatacgttttcctctatcacatttaaaaatatagttacaaaatgcccttgtttttgtcctgattcatcatggtcactgaggagcatcgtctcatatgcctggtatgtgacacgtgtctctccaacaataaaagacttggccttggctgggcatggtggctcacgcctgtagtcccagcactttgggaggccgaggtcaggagttggagaccattctgaccaatgtggtcaaaccccgtctctactaaaaatacaaaagttagcagggcgtggtggcatgctcctgtggtcctagctattcaggaggctgacataggagaattgcttgaatataggaggcagaggttgcagtgagccgaggttgcaccattgtactccagcctgggcaacaagagtgaaactctgtcttaaaaaacacaaaaaaagacttggccttagggccgagtgcggtggctcacgcctgtgatcccagcactttgggaggccgaggcgggcggatcactaggtcaggaaatggagaccatcctggccaacacagtgaggcccagtctctact

SEQ ID NO: 404521 - DNA, 1000 bp, Homo Sapiens
tccactcctccatctctctagccctgaggggagccaagatcttgtctgaaaatgtcgactgccatgtcgttccattctccctatttggcaagagcttcatccgacgctgccacctctcttcagacagcttcatccagatcgccttgcaactggcccacttccgggacaggggtcaattctgcctgacttatgagtcggccatgactcgcttattcctggaaggccggacggagacggtgcggtcttgcacgagggaggcctgcaactttgtcagggccatggaggacaaagagaagacggacccacagtgcctcgccctgttccgcgtggcagtggacaagcaccaggctctgctgaaggcagccatgagcgggcagggagttgaccgccacctgtttgcgctgtacatcgtgtcccgattcctccacctgcagtcgcccttcctgacccaggtccattcggagcagtggcagctgtccaccagccagatccctgttcagcaaatgcatctgtttgacgtccacaattacccggactatgtttcctcaggcggtggattcgggcctgctgatgaccatggttatggtgtttcttatatcttcatgggggatggcatgatcaccttccacatctccagcaaaaaatcaagcacaaaaacggattcccacaggctggggcagcacattgaggacgcactgctggatgtggcctccctgttccaggcgggacagcattttaagcgccggttcagagggtcagggaaggagaactccaggcacaggtgtggatttctctcccgccagactggggcctccaaggcctcaatgacatccaccgacttctgactccttccagcaggcagctggcctctccaaggaataagggtgaaattgccacagctggctgacacaggacaggggcaactggtttggcaaccccacatccaggccaataaagatgtgtgagctgggaaaaaaaaaaaaaaaaaaaaaaaaaaaaa

SEQ ID NO: 404522 - DNA, 1000 bp, Homo Sapiens; identical to SEQ ID NO: 224156

SEQ ID NO: 404523 - DNA, 1000 bp, Homo Sapiens; identical to SEQ ID NO: 118661

SEQ ID NO: 404524 - DNA, 1000 bp, Homo Sapiens; identical to SEQ ID NO: 118662

SEQ ID NO: 404525 - DNA, 1000 bp, Homo Sapiens; identical to SEQ ID NO: 224159

SEQ ID NO: 404526 - DNA, 1000 bp, Homo Sapiens; identical to SEQ ID NO: 292727

SEQ ID NO: 404527 - DNA, 1000 bp, Homo Sapiens; identical to SEQ ID NO: 292728

SEQ ID NO: 404528 - DNA, 1000 bp, Homo Sapiens; identical to SEQ ID NO: 224160

SEQ ID NO: 404529 - DNA, 1000 bp, Homo Sapiens; identical to SEQ ID NO: 118663

SEQ ID NO: 404530 - DNA, 1000 bp, Homo Sapiens
ctttacttgtaggaggtttagtggctgctctggcctgccatggaattttggctgcaattttggcagtgtgtggagaactggtatcaggaaagggaaccaggagtagtgatgaagatgatggtggggatggggacagaggacataggggactgtccctcttgaactctgcctttgggcacatgggagatggggacaggaaagatgataacagtggaaccctgtgaagaataggagaatgggaattctaaaataccagttcccaaacaaaccatctctccattggaaaaggagctgttgcaaaccgtgttcatttaagcttctgatgaaaagcaatgtatgtttataagcttgcaagtaacagacaagatgttccaaggccgatgaggaaaatatcgcttccctgtctctgcctctaccttgctgtgcctctctggctttagcagcattggatgttgaattggtttggttcatttctctgaagtcggactgtcaggaggagccagaggttggctttctgggatgtgaaggggacagtgtcagcctaagcctctggagatgcttaggatgctgaattttaaccccttctttcactgcatggcccttcaaacagggattggcaggctccgcgagttacagagtgggtgagtcttggagagaaccaacgactaaggtagcttagctctctgctttgttcttgggagccaagagaatgcaagatcctggtgggtgagcagtggtatgaagaggggacactggtgggtgaacagtggcatggaagtcactgatgcagcctctggccctcagtctccctatcggcaaagtggggggctcttcctatctctaaagagtttcatccctgacaggtggatgggtgaaagatccagagagtgggggtgaggggtgggccctgaagactttttgtctgtagctcttgcatattgagtgtataaacccggcttctggaccaacccaagatgaataaactggggcagaaaattac

SEQ ID NO: 404531 - DNA, 1000 bp, Homo Sapiens; identical to SEQ ID NO: 224163

SEQ ID NO: 404532 - DNA, 1000 bp, Homo Sapiens; identical to SEQ ID NO: 118664

SEQ ID NO: 404533 - DNA, 1000 bp, Homo Sapiens; identical to SEQ ID NO: 292733

SEQ ID NO: 404534 - DNA, 1000 bp, Homo Sapiens; identical to SEQ ID NO: 292734

SEQ ID NO: 404535 - DNA, 1000 bp, Homo Sapiens; identical to SEQ ID NO: 118665

SEQ ID NO: 404536 - DNA, 1000 bp, Homo Sapiens; identical to SEQ ID NO: 224164

SEQ ID NO: 404537 - DNA, 1000 bp, Homo Sapiens; identical to SEQ ID NO: 292735

SEQ ID NO: 404538 - DNA, 1000 bp, Homo Sapiens; identical to SEQ ID NO: 224165

SEQ ID NO: 404539 - DNA, 1000 bp, Homo Sapiens
tctgcaacaatacaagaccctagcgtatccattccagagtcttctgtacttgcttttggctctgagtacaatttcagcttttgacaggattgactttgctaaaatatcagtagcaatccgaaattttttggccctggatcctacagctttagcatctttcttgtactttactgctcttatactatctctgagtcagcaaatgacaagtgacagaatccacctttacacaccttcttctgttaatggtagcctctgggaagcaggaattgaggaacagattctccagccatggattgtggtgaatctcgtggtggctcttctggttggattatcttggctatttttgtcttataggccaggcatggatcttagtgaagagttaatgttctcctcagaggtggaagaatatcctgataaagagaaagaaatcaaagcctcttcataataccagctcacctttggaggaataatgacccagtatttgtcccatttttgtttttaaatgtatttttataagatgtatacatgtgtatttgtaatagattttttgattatataatactgaaacatctctcaatattatgaaaaatgttaaaattgtgtttgctgtttatgtctaaacattaatttgtctagcattatcatcttaatgacaaagggaataatgaactagaaaccagcaagtgaaagtgtttatttcctattttctcaaaacagttgtatttataactattaccttaaaaagcactggtttagaaaaagccataacttaaatagtgttataaaatatatatcaggtttaaacataaatttagcgaatatggtagaagggaaaaaagccttcatttttgacctccccttactgaataaattgaaatatgaagtttgtcttttctgaaactggcttagtgattgagtatcatgtaataattataatataatttagcttgaaagatgctctacattatgaccaataaaaagggaatgtatgttttgtttg

SEQ ID NO: 404540 - DNA, 1000 bp, Homo Sapiens; identical to SEQ ID NO: 292737

SEQ ID NO: 404541 - DNA, 1000 bp, Homo Sapiens; identical to SEQ ID NO: 292738

SEQ ID NO: 404542 - DNA, 1000 bp, Homo Sapiens
attaaggtcttttataaatttagtaaatcagtttataatctttaaagccaaaggtttttttagacttgaaagaaagagccacttaaattcttgtttaaaaataccaatttgcctcctccttcctcacttcgttaggttatggtagtgctcagacatctgcagtgttgaggccagtcactgttggaagtcatccaagaagcccattttgaggccattttgagccttactcttaagttctctatgaagaactacattgatttgttggctttcagaatcttttaggaaataaatcctctccaggacaaaaatgaacatgaatggagtggcattttgttccaagtcagaggtgggcacctataataaatgactagggttcactttctgggactgatgtttaattgtaacacagatacaacagggtggccttgttgtgtataatacggtattatacctgcatgtgctctagcaaggataccaaggcaagcatacatgtagctggcttgagtttgtaccaaaacagtccttcaactttgcactgtgccttaagtaattactaacaaaaggtactaggattagctgcaatctctactttcgatgaggaaatcccagtaagctttctgattcaagtacaatgctgccattttttaaagggccacaactatagaattaccactgttggaatttggtacaaaatatgttttgtctattgaaaacatacacggtaaatggtgttgttaggtaggttctgtccagttcttagggacttttttcacattatagcatttttaccctaaacatgatgttgagattattatatactgtattttcttctaaattaaccctaatgtttaaaaactcactttccccctttaattgaaggcattgttttgttagatgcagtaatgatgtttaccagagattattgtttcctatgcaaaataaattttcatattttgaattctgctgagtcttaaaaaaaaaaaaaaaaaaaaaaaaaaaa

SEQ ID NO: 404543 - DNA, 1000 bp, Homo Sapiens; identical to SEQ ID NO: 292739

SEQ ID NO: 404544 - DNA, 1000 bp, Homo Sapiens
actcaaggcaaaagaaaaagccctgcaaaggaaacaggagcaacgaatggccagacattttgcaataatatcaagggaacagactcatttctctgaagatgattcaaagcgcttaaaaacaatttcttatcaactttctgtggatattccagaaaaacagataattgatgacattgtatttgattttcaactaagaaacagtaacatgtctatcatttgttgtgattctcggatagcatgtggaaaggttgtcaggaatgagctcttagagaagcactacaaacatgggagcaagtttctgacttcatttccagatgggacaacacaaatattctatccatctggaaacctagccatcattcgagtgcccaacaaggtaaatggttttacttgtatagtccaagaagatatgcccactaaccctgctatcctagcagtgctggattcctctggcagaagttcctgctatcatcccaatggaaatgtctgggtatacatcaatatcttgggaggtcaatattcagatcaagccggcaacagaataagggcttggaattggtcaaattccatcacttcctcaccctttgtttcatttaaacctgtctttctggctttgaaccgttatattggagtccgcatcttagaacaagacaagatttctataacttttctagcaatgggccaacaggcaagaatcagtgttggaaccaaagtgaagctaccaaaccctgaggagattccaatcctccgatacgtaagtggagatgaccttcttctgctggccagtttaataaagatccgtcgcctgtttcataaacttgaaggatgtgtgaattttccctcaagccaggtttgggaaaaattaaagcaaccttcctacctttcttcactttctctaaaactaattgccctttgtcacagttctggtataaagcaagatataatgaagacaataagaaatataataaatgaagaaatttaactaaaaaaaaaaaaaaaa

SEQ ID NO: 404545 - DNA, 710 bp, Homo Sapiens
atggttggatgaacacagatgtgaggggatttgaaccatctacaatcaatccatatgtgaccaatggaggagaagcagccccaaaagacgaaggaaccctcaaaagaagatgagcctcagcagaaggagatgccaacccatttgtccttaggagcagagtcaaaggcagaggctaaaactccagttctggttgagacacagacagtggacaatgccaatgagaaatcagaaaaacccccagaaaaccaaaagaagctctctgacaaagatacggtagccaccaagatcaaggcctggtggcggggcaccctggtgcgtcgggcactgttgcacgcagccctcagtgcctgcatcattcagtgctggtggcggctgatactgtccaagattctgaagaagaggcggcaggcagcgctagaggccttctcccggaaggagtgggcagcagtcacactgcagtcccaggcccgcatgtggcgcatccgcagacgctattgccaggtgctcaatgctgttcgcatcatccaggcttactggaggtgccgctcctgtgcttcccgggggttcatcaagggccagtacagagtcacagccaaccagctgcatctccagctggagatcttgctggactcagggccttgcattgtgacagagtgtattcccttctcaataaaggaatgaagtggtcttttccaaaaaaaaaaaaaaaa

SEQ ID NO: 404546 - DNA, 1000 bp, Homo Sapiens; identical to SEQ ID NO: 292741

SEQ ID NO: 404547 - DNA, 1000 bp, Homo Sapiens; identical to SEQ ID NO: 224167

SEQ ID NO: 404548 - DNA, 873 bp, Homo Sapiens
gaagcgggcgctcttccagcctggagaaggctgcgggtctccatccgtggcgcctcgccagctgcaggacgacgcgggctcttgaggggcagagcagcgcatcatgcaggatcccaatgaagatacagaatggaatgacattttaagagatttcggcattcttcctcctaaagaagagtcaaaagatgaaattgaagaaatggttttacgtttacagaaagaagcaatggtgaaaccatttgaaaagatgactcttgcacagctaaaggaagctgaagatgaatttgatgaagaagatatgcaggctgttgaaacatatagaaagaagcggttacaggaatggaaagctcttaagaaaaaacaaaaatttggagaattaagagaaatttctggaaatcagtatgtgaatgaagtcacaaatgcagaagaagatgtgtgggttataattcatctatacagatcaagcatcccaatgtgtttgttggttaaccagcatcttagtcttctagcaagaaagtttccagaaactaaatttgttaaagccatcgtgaatagctgtattcaacactaccatgacaattgtttaccaacaatttttgtgtataaaaatggtcagatagaagccaaattcattggaattatagaatgtggagggataaatctcaagctggaagaacttgaatggaagctagcagaagttggagcaatacagactgatttggaagaaaaccccagaaaagacatggtagatatgatggtatcttcaattagaaacacttctattcatgatgacagtgatagctccaacagtgataatgataccaaatagagagaaatattcaataaatagcttttagtataaaaaaaaaaaaa

SEQ ID NO: 404549 - DNA, 1000 bp, Homo Sapiens; identical to SEQ ID NO: 224168

SEQ ID NO: 404550 - DNA, 1000 bp, Homo Sapiens; identical to SEQ ID NO: 118667

SEQ ID NO: 404551 - DNA, 1000 bp, Homo Sapiens; identical to SEQ ID NO: 292748

SEQ ID NO: 404552 - DNA, 1000 bp, Homo Sapiens; identical to SEQ ID NO: 292749

SEQ ID NO: 404553 - DNA, 1000 bp, Homo Sapiens; identical to SEQ ID NO: 292750

SEQ ID NO: 404554 - DNA, 1000 bp, Homo Sapiens
agaaaaggctcagccaactgtttgcaatgatagaggccgattggagttgaggcagagtgggacatccaaagcgttgagcaggattggtattgcccaggaatccacagcaacagtagccagacccgctggtagacgggttttaggagcaggtatccttctttgagcaagagtgtcatgcaagttaggaatatgaagaaccacaaaggattttctcttcagaagcatcaccaattatatttctttcttttttttttttttttccaagatggagttttgctctgtcacccaggctggagtgcagtggcgtgatcccagctatattggaaaagacagcattataaaacaaggacataattttatgaaaaaggaggcatctgcaaacgaaaacaatttctacgaggttatatgtgattgttaacatttttaagaaaaggtgcacacagaaatccagataagatgtgattacctttgtgcatttgtataaaaatatatgtgtgtaattataaggaagttctgacattttaaaaagtaattgttataaaagtaaatttaggccaggcacggtggttcatgcctgtaatcccagcacttgggaggccgtggcaggaggatcacgagccaaggagtttgagaccagcttgggcaacatggcaaaaccctgtctctactaaaaatacaaaaattagccaggcatggtggtacacaccagtagtcccagctactcctgaggctgaggtgggaggatcgcctgagcccagggaggtcaaggctgcagtgagcaatgatggtgccactgcactccagtatggatgacatagtatgacactgtctcaaaaaaaaaaaaaaaaatttgggccaggggtggtggctcacgcctgtaatcccagcactttgggaggctgaggtgggtggatcacgaggtcgggagatcgagaccatcctggcaaacacggtgaaaccctgtctctactaaaaattcaaaagaaaaaaaaaaaaaaaa

SEQ ID NO: 404555 - DNA, 1000 bp, Homo Sapiens
gaacagggtagggggtgtacacactgttggtgacagtggtgccttccagcttggcgtccagtttctcagagcttggcataaggatgctcgtatagtttacatcatctcttctcaaaaagaactgcatggactcgtcttccaggacatgggctttacagtttatgaatactctgtctgggaccccaagaagctatgcatggaccccgacatactcctcaatgtggtggagcagatcccacatggctgtgtccttgtgatggggaacattatcgactgcaagttgacaccaagtgggtgggcaaagttgatgtccatgataaagagcaagcagatattcccattttttgatattccctgtcaaggtttatacaccagtggcttggaagaagatactagaatcttacaatactttgtgtctcaaggctttgagttcttctgcagccagtctctgtccaagaattttggcatttatgatgaaggagtggggatgctagtggtggtggcagtcaacaaccagcagctgctgtgtgtcctctcccagctggaaggattagcccaggccctgtggctaaacccccccaacacgggtgcacgtgtcatcacctccatcctctgcaaccctgctctgctgggagaatggaagcagagtctaaaagaagttgtagagaacatcatgctaaccaaggaaaaagtgaaggagaaactccagctcctgggaacccctgggtcctggggtcacatcaccgagcagagtgggacccacggctatcttggactcaactcccagcaggtggaatacctggtcaggaagaagcacatctatatccccaagaacggtcagattaacttcagctgtatcaatgccaacaacataaattacatcactgagggcatcaatgaggctgtcctcctcacagagagctcagagatgtgtcttccaaaggaaaaaaaaacactgattggaataaaactttagtctttgcaaaaaaaaaaaaaaaaa

SEQ ID NO: 404556 - DNA, 1000 bp, Homo Sapiens
gcatttaaaaatatttatgtgcaccttgttactttctactctgcaatgatgtattaacaattcatggtatttatttgttattcttcaatgacccttccacatcaacagtatttatcatgtgttaaagtcatgggtcttatgtgcagatttttttaatgcctctaaaattgttttatagattacttatgctgtgtgccaagtgtttaaaggtttatttgccaacaagtatgaagagaaatattgatgtatctgagctgcttaggtttatgaaaggtcacctggatattttcagttgcatcatccctgtatttaaattgagctttaataaattgcttcagtccaaaaattacaggaaaggtgtattcttaattgatgaatgaattgatctcttttttgaaaggggactcctttacattccaaaagggaaaaacatcacagcaatagttgctatacgtaagaacatgctaagcaaatatttttccaggctgtgctgtgcatttttaaaaggtctaatttaattgcttttaatatatatgtacatatatgttattttaactgtggagaattatttaagttaaaagactggtttgatttgcctatggtgtgaaatcctttgttatttttctaaaaaaataaaatttaaaaagaaagaaaactaaggaagaacaagaagctatttacccaaagtgagctttcagttttagttttgcatggctgtttgactgcctttccgccctatgaaaatcaagaaaatcttttttaaaaatggagtcctgctattttccactccttgcagataatacaaattcagtttgtcaggttggatggtgagttgggagctgtgatggatctgttggcgggttttggatgtgtaaagaatgatatatatattaaataggtcaatcagactatgacagctatgtacgaccatttgtatgtgtatctatgtcagaaagaatctttattaaaatattttgatcaaacaaaaaaaaaaaaaaaa

SEQ ID NO: 404557 - DNA, 1000 bp, Homo Sapiens; identical to SEQ ID NO: 118668

SEQ ID NO: 404558 - DNA, 1000 bp, Homo Sapiens; identical to SEQ ID NO: 118669

SEQ ID NO: 404559 - DNA, 1000 bp, Homo Sapiens; identical to SEQ ID NO: 118670

SEQ ID NO: 404560 - DNA, 1000 bp, Homo Sapiens; identical to SEQ ID NO: 292753

SEQ ID NO: 404561 - DNA, 1000 bp, Homo Sapiens; identical to SEQ ID NO: 292754

SEQ ID NO: 404562 - DNA, 1000 bp, Homo Sapiens; identical to SEQ ID NO: 118671

SEQ ID NO: 404563 - DNA, 1000 bp, Homo Sapiens; identical to SEQ ID NO: 293481

SEQ ID NO: 404564 - DNA, 1000 bp, Homo Sapiens
tagacagcttgtcattttctggctttattttatgtttttctttcttttgaacccttcttccccatgtctagaccctctgagagtactcatgtgtcttattttttttcctcgttatgttttgtgctttagttttgaaatcagagtgcccatgttgtgctttgtcttgttgagtttctccaaaggagcattttgggaacattctccacccaatggggaaggaagggggtttcaaccatgtcccctttccccaagaagctgtgggagacagatgacaatgatgcttgcactatcaggaatttaccatctcgttgaggaaacccttgcataggacttcctaggagctcagttgattgtgacattttcccagaagagaggctttggggaactccttcacccctcttgctgctttgggggaatctcctcccctaccaccattccccctcccctgccctgctccagctcacacgtggatggtactttggggaacagtgactttcagggtgatggcttgctggcctgatccctgactttccaatcctatagtcactccaaagaagaaaatccacatggtatgtatatgtgtgagggttgggtctattgagaggtgggactttaattattgttattattattggtgcttatttttcctgctgtatatgggggtgggggtgggggggaataaaacaggaatgtatatttaggtcatgttaaataaaatggctggaggaaggagggaagaaattaggaactgcagtacatcatcaccccaggtgtaagagttatttctctcccagtgcagaaaggggagtgtggcccctggctgtacctgagcttcctcttctccatccctgagacatcacagaatcacccgggttctgacctctccacttctagctctcactgacatctggatatcttgatgcactgcctgtttgtaacaacatatacttctttgctgaatgctaataaacttctgggttcaagagggaactcctcagtc

SEQ ID NO: 404565 - DNA, 1000 bp, Homo Sapiens; identical to SEQ ID NO: 224172

SEQ ID NO: 404566 - DNA, 1000 bp, Homo Sapiens; identical to SEQ ID NO: 224173

SEQ ID NO: 404567 - DNA, 1000 bp, Homo Sapiens; identical to SEQ ID NO: 292757

SEQ ID NO: 404568 - DNA, 1000 bp, Homo Sapiens
atgccaatggtcatgcatctggcctgtgtaaacatgagaatgtccatgcctgaggccttggccgctgccaccatcaatgcagcttatgcactgggaaagtctcacacacacggatcgttggaagttggcaaacagggagatctcattatcatcaattcatcccgatgggagcatttgatttaccagttcggaggccatcatgaattaattgaatatgttatagctaaaggaaaactcatctataaaacatgatagatttgaaaagagaagactttttgactatatgaaataagtcaatatagttatattaaaagttaaaacaccttaatatttacaagaattatatcacttaaacctaaatgtacttcaatgtctttttaagtcactcaaaaaacccaagggatagatttattttcatttaacacatgcatttgacatataaacaggtaaacctattgtgattaaaatcacaaaacatccaattagttcacaaatattggttacaaatattctgtagattaatatggtggggtatcacaaaaatgcctttgtggggaaaagtaggcttggcttaaaatttccattttgtgtctgtatttcacatctcagtttttaaactatatttagtgaacattgagggatcgaaagaaatctaagtgatacgccccaatggagctaaaatatagccttctgttaagcaaatagtatttcctttccccaagtagttcattttctagatgcttgtcaaatgaattaatgtcctctgatgaagagtgtccttccgtttctaaggtcttctcaatctcagcaatagagcttcccagcagcgttcaagacacatcatttatacacaggcacaggggccttcctgaaatgggtgcatttttaccaactacaatcatgtaatttttttggaaattttttaaaatttttgattctttacattacaattgggtgaaacacattttacagctctcaataaatgtttgctgtcgctctt

SEQ ID NO: 404569 - DNA, 1000 bp, Homo Sapiens; identical to SEQ ID NO: 292758

SEQ ID NO: 404570 - DNA, 1000 bp, Homo Sapiens; identical to SEQ ID NO: 292759

SEQ ID NO: 404571 - DNA, 1000 bp, Homo Sapiens
tggaaagagtctcatagatcatagtccaatcccctagacccaaaggcccagacacgcagggttctctatttctcttcttttttctctttctttttttctttagccataaagaaaggagatggatcacctaatgcctgaaagatcccctccttcctaacgtttttgtttgaggctttctaaccatctcattcctacttttataactattattgttattatcacttcctgattcttaagcttcatcagcaccagaacacttaattctcttcaatttccttttttacttttctctcttttccttttattctgtcatcctttttttcccttcccttctccctggttgtgctgcttttctagtaatctgtcccatttttcaggttataatatttcctcttgccaaatctgttgcttatgtcttgccatgaatttcaaaatataagacattggcaaagcctcctacagaatcatcaaaggtgtcaacaaatccagcctgatacccttccagtctcacttccagtggaaggcatataggagtgatggttccccccgtgcccttgcagccattgacatttctttctgcttccactatttggtgttgggcactggagaaaaacgaagccaagagaatatgaaatttgcatagccaaatgctatggaaccaaagaataagatgactcacatctgtttaacttgaactcttatgcaaaaatcctaatcgtgtcgcaacacgggaccagttactgtgtctatcgggtcatttgggaatgggcaggatactggagctgggaggctaatggggtccagagctgcataatggggatcggatgttggtactcctcccagggagctctcaggacagctgtttgtcgtgggctcccaagtgcctaggccatgccttacgactgctgcacttaccatttgtcatatgatggcacttgactacatatggctttagaaataaaataaccctcaaaactaaaaaaaaaaaaaaaaaaaaaaa

SEQ ID NO: 404572 - DNA, 1000 bp, Homo Sapiens; identical to SEQ ID NO: 292761

SEQ ID NO: 404573 - DNA, 1000 bp, Homo Sapiens; identical to SEQ ID NO: 224174

SEQ ID NO: 404574 - DNA, 1000 bp, Homo Sapiens
gatacaaccattaatgaatcatacacaataggttttttaaaattaatattaataacttttattaatttaaaatagaatgcttaaaataaaatagaatgcttgagaggcactgagtaaagatttgttgaactggaaatgttttacatgattcttaaactgaaacttggtgtaagaatagaattgagatggcctttttttcacattgtagactgaaaagagacttaatggtatgatgtgtacatagggactgggggcaggattgggggtttcggagcttgtgtaacagtttttgggataggagaccagcggttttgggttgggattactatgggaagataaataacttaggttggttaagttgacaagatttactccagaggatcatctctttgtatttgccaaataatttactgtatagcctaaaaactccatatatattgagaaaagcatatgtttattttaggttagcaggcacatactgtcaagttgtaaagattgagagggcaaacagatgtaaacatcacttgtaggtgattaaaaagattgacagccgggcctgatgtctcaagcctgtaatcctagcactttgggaggcagaggcgggcagatcacttgaggtcaggagttcgagaccagcctggccaacacggtgaaaccccatctctctaaaaatacaaaaattagctgggcgtggtggcacacgcctgtaatcccagctactcaggaggctgaggctggagaatcatttgaacctgggagggggaggttgccgtgagctgagcttgcaccattgcactccagcctgggcgacaagagtgaaattccatctcaaaaaacaaaaacagattgacaacaaagacagtttcagaaaatgacaggactgggcaaattaacaaatgtttgtaaacatgaatgttcaggaactactgatgtacctccaaagtttgttttattaattgtactcaaccctcgcagaacagtaaaactgaagattattgtt

SEQ ID NO: 404575 - DNA, 1000 bp, Homo Sapiens; identical to SEQ ID NO: 292764

SEQ ID NO: 404576 - DNA, 1000 bp, Homo Sapiens; identical to SEQ ID NO: 224175

SEQ ID NO: 404577 - DNA, 1000 bp, Homo Sapiens; identical to SEQ ID NO: 118672

SEQ ID NO: 404578 - DNA, 1000 bp, Homo Sapiens
acaagaccaacattttctgatagaaaagcatgatgaagtaacaccaaatgaaataaagacccttagggaaaacagtgaactagcaacagagcacaaaaaagaattatccaaaagcccagaaaagcattttataagaactccagttgtagaaaagcagatgtacttccctctacagaattacccagttaacaacatggtaacaggttatatatcaattgatgccatgaagaaattccttggggagctacatgacttcattcctggaacctcaggatatttggcatatcatgttcaaaatgaaattaatatgtctgctataaaaaacaaattgaagaggaaatagtaaattaaattgtaaataccttggcatttattttctataaaatattatacagatgtgcatatcataaaatgctcccttttggtactgggggatagtgaaatgggaaataatttttctgtttctcaaagtatatctttaggaaatacagaatcattttggttctgtgttttgacatttttcccctagcttataacaacatgttcaaatattctcaatgcacagttgttaatgagtaattgccgttaaaatatatttcataagaagtctcaatctcaaactctccatctctcaatcctcctcctcctcctctttcttgctttctcttttccctctctctttctctcctccccttctctctttctgtctttcaaatgttcttttggctttaacattctattaattatattttttctagattgaatactgtgaatgctaagttttattaatctggtcatcttattttgattttaaaaattaggatgctagttgcattctgaattactgtttctggtttgaaacatggagaaaaacattttaataattcatatttcatgttggatggtttctaataataaatatctcaaaagtgacttaaaaaaaaaaaaaaaaaaaaaaaaaaaaaaaaaaaaaaaaaaaaaaggaaaaaaaaaaaaaaaa

SEQ ID NO: 404579 - DNA, 1000 bp, Homo Sapiens; identical to SEQ ID NO: 224176

SEQ ID NO: 404580 - DNA, 1000 bp, Homo Sapiens; identical to SEQ ID NO: 224177

SEQ ID NO: 404581 - DNA, 1000 bp, Homo Sapiens; identical to SEQ ID NO: 292768

SEQ ID NO: 404582 - DNA, 1000 bp, Homo Sapiens; identical to SEQ ID NO: 224178

SEQ ID NO: 404583 - DNA, 1000 bp, Homo Sapiens; identical to SEQ ID NO: 118673

SEQ ID NO: 404584 - DNA, 1000 bp, Homo Sapiens; identical to SEQ ID NO: 118674

SEQ ID NO: 404585 - DNA, 1000 bp, Homo Sapiens
ctgatgttttcaaactctcttctgttccttgaactatatccctccactcagtggtcacatctttgttttgttgtctgcttcttctatattatgagccttcctcaagtgtctgctgattcttggttatccaatcatagttgagaacaagataaagtgtagctaactgagacctcagagtatgtaggagtaaatagtatataaaatagctctggtggctcatgcctgtaatccagcactttgggaggccaaggcggacagaccacctgaggtcaggagttcgaaaccagcctggccaacatggagaaaccccatctctactaaaaatacaaaaattagccaggtggtggcacacgcctgtaatcccagctactcaggaggctgaggcaggagaatcgcctgaacctgggaggtggagattgcagtgagcccagattgcaccactgctctctagcctgggcaaaaaaactagttccaaaaaagacacttgtacacgcatgtttatagcagcacaatttgcgattgaaaacatagggaaccagcctaaatgcccatcaagcaatgagtggataaagacaatgcggtgtacatatacaccatggaatactattcagccacaaaaaggaacaaaataatggcattcacagcaacctggatggagttggagatcattattctaagtgaaataactcaggaatggagaaccaaatattgtacatcctcacttataagtgggagctgcgctatgaagatacaaaggcacaagaatgatacaatggattttggggacttaggggaaaggatgcaggggatgagggataaaaaaccatacattgggtacagtgtacactgctccagtgaagggtgcaccaaaatctcagaagtcactgctaaagaccttatccttgtaaccaaaagccatctgctccccaaaaactattgaaataaaataaaatataaaaagaaagagaaagaaaagaaaatagttccaatttatcatgcc

SEQ ID NO: 404586 - DNA, 1000 bp, Homo Sapiens; identical to SEQ ID NO: 118677

SEQ ID NO: 404587 - DNA, 1000 bp, Homo Sapiens
ctcctgcatttggccagtaattagcatgctgctgcacattgccactaggtggtgctgctgctccattcccaagtaacccacatgcatccctggctggggtcagccttggggtttcccaagtgtagaggaatccatctctgtgcctgtggtaatggctggacaccaggagagaccctgtctcaaaacaaaacagaaataacaaaaaataaggtgacttgctggaggccacatggctgtgagccaaatacaggtctgggttatcagggctcacatacttctaagtacaccctactgccttggaatctgctgaagaccaagcccctgcccccaagccatggcaaagaaggagggaaggaagcaaaggtgcccagcggggacaactcggggaggggcgaggtgcccagggcccaggaaggccaagcagcatgtggcagggcagcatcaggtgactcccaagaaggaatgaggagaggatatgaggaaagagccacagcacagaggcctgctgttaggtcagcggagaccacggcccatgggacctggatctacccttgatgctaacaatgttctttggggaaaaaatctataatcacaaagtttctgcaactggactgtagtcatggttgcagaactgtatagatttactaggaaccatcaaattgttcacttacaatgggtaaattgtacagtacataggttatccctcagtaaagctgtatgaaatttatagtcatgaaactaatagtgacaaacgagctgggtaagtaggtctcagctgttctgtaggcactttgagaagaggaagagtagcatctcggttttaataaaagaaagcctggcccatggcgtccagcttctgcttgaatactttcagtgcccgggagctcagtatctcaaagcagcccactcctgtttaagagaactctaaaccttagaatgttgaaatacatcattattattctagtactgctgtgaaaaataaatgtctttgttttgccac

SEQ ID NO: 404588 - DNA, 1000 bp, Homo Sapiens; identical to SEQ ID NO: 118679

SEQ ID NO: 404589 - DNA, 1000 bp, Homo Sapiens; identical to SEQ ID NO: 224181

SEQ ID NO: 404590 - DNA, 1000 bp, Homo Sapiens; identical to SEQ ID NO: 224182

SEQ ID NO: 404591 - DNA, 1000 bp, Homo Sapiens
aaaatggaaagagatcatccaatcttccttggaggtcccagcacctacaagtacatatctcccttggatgccagtgggcaaagattctgcaactacggaggggctccttccctgacagagagcaagagagggagaccctgatgacttcttcgtcccacgtcagcaggaagtagttacagaagacccacgacgtccttatgcccaaagcttttcagggtctccaactcttgagggggaatactgttagggtaggcaggtagccagacaagagcaggcaaggaagcccctgggaaaggaatctttagaaatgcagcccgctgatggcctccttggaaacgctgcacgctgagtcagcaaaaggaggagcgtggctacactggctacacctggccttgtggctgcattcctctgttccagaagggaacttatcaaggcccagccagaggttaccaaggtaggagctattccccactaagaagcatgtatacttctctaataattcaccctaatataccattttgttcattaaaataataaaaaaaccacacacctgtgtggagattttattttttaaccagaaattccttgttagactttagatccaaatgacatggcacatgtgtgcccagaccagttcccaacacatgcttactagtaacgcccctgcatgaccccttcatgaataatcatgtaaaattctcataagaagcatctccccagccaggtgtggtggctcacgcctgtaatcccaacactttgggaggctgaggcaggcagatcacctgaggtcgggagcgcgagaccagcctgaccaacatggagaaaccccgtctctactaaaaatacaaaattagctgggcgtggtggcgcatgcctgtaatcccagctacttgggaggctgaggcaggagaatcgcttgaacccgggaggcagaggttgtgttgagccaagatcgtgccattccactccagcctgggcaacgagaggggaactccatctc

SEQ ID NO: 404592 - DNA, 1000 bp, Homo Sapiens; identical to SEQ ID NO: 292779

SEQ ID NO: 404593 - DNA, 1000 bp, Homo Sapiens; identical to SEQ ID NO: 224184

SEQ ID NO: 404594 - DNA, 1000 bp, Homo Sapiens; identical to SEQ ID NO: 292781

SEQ ID NO: 404595 - DNA, 853 bp, Homo Sapiens; identical to SEQ ID NO: 31317

SEQ ID NO: 404596 - DNA, 1000 bp, Homo Sapiens; identical to SEQ ID NO: 292782

SEQ ID NO: 404597 - DNA, 1000 bp, Homo Sapiens; identical to SEQ ID NO: 292783

SEQ ID NO: 404598 - DNA, 1000 bp, Homo Sapiens; identical to SEQ ID NO: 292784

SEQ ID NO: 404599 - DNA, 1000 bp, Homo Sapiens; identical to SEQ ID NO: 292785

SEQ ID NO: 404600 - DNA, 1000 bp, Homo Sapiens; identical to SEQ ID NO: 224185

SEQ ID NO: 404601 - DNA, 1000 bp, Homo Sapiens; identical to SEQ ID NO: 292788

SEQ ID NO: 404602 - DNA, 1000 bp, Homo Sapiens; identical to SEQ ID NO: 224186

SEQ ID NO: 404603 - DNA, 1000 bp, Homo Sapiens
aacatctacatcagtacctacttctgccagatcgatgaccgcaggaagaagctgggcaaacggactctgctgccactccgcaaagctgaggagaaaaccgtcatcttcccttgcaagcccaccatccaggcctcagaaatgagcaatgtggtgagggagctcctggagacactgcccattccgctgctgctggtggtgctgtgtggcttggactgggctctctactccatcttcgacaccatccgccaccactccttcctgcagtactccttccgcagcagtcataaactggaggtgaaggtcgggggagactccctgctagcccggcttcttcgaaaaaccattggggccctgaacacctcctcagagacagtgatggaatcaaacaacatgccctgcctgccccagcctgtgggcctggatgccagggcctactggagagctgcagtaccgattggcctgttagtgtgtctctgcctgttacaggcttttggctaccgactccggagggtcatcgcagccttctacttccccaagcgagagaagaagcggatcctgttcctctacaatgacctattgaagaaaagagcagccttcaccaaactcaggagggccgctatcctgaggcgggagcgacagcagaaggctccgcgccacccgctggcggatatcctgcaccgcggctgcccgctcctgcgccgctggctgtgccggcgctgcgtggtgtgccaggcacccgagacgcccgagtcctacgtgtgccggacgctggactgcgaggccgtgtactgctggtcgtgctgggacgacatgcggcagcggtgcccggtctgcacgccccgcgaagagctctcttcctccgcctttagtgacagcaacgacgacactgcctacgcggggtgaagaggcgtcctgctcgctcttccgcaccgtccttcccggttaataaaatgccctgtacgcttaaaaaaaaaaaaaaaaaaaaaaaaaaaaaaaaaag

SEQ ID NO: 404604 - DNA, 1000 bp, Homo Sapiens; identical to SEQ ID NO: 292790

SEQ ID NO: 404605 - DNA, 1000 bp, Homo Sapiens
gacagaatcaacatttgggtacctttggtacccagaggcagcaatgccaactacaaccacactggaagaagaagaccttctccgcatagattctctgatctcttcctccttcatggcaccagccctggggaaccagcatggtggggaaataatgaagctggaatacaaccacttacagacttcacaacctcctcctgtagataccaaagggattttaggatcacattttatttctcacctgagcaagaaaagctacaggagcatctcaagcagagggcaggagtctccagaggagttcaaggggctctggcaagaaaaatcaaggggctgtgttcaagaactggctcccttggtgattgtattacgaagcccatgtgtgctggatgctgatgaaattgctgccaaatgcctgtgcagccttggcaaggccctttatttctctgggtctccatttctctctctctcttttttttttttttttttttgaggcagagtctcactctgtcgcccaggctggagggcagtggcgtgatctcggctcactgcaagccccaccttctgagttcacgccattctactgcctcagcctcccgagtagctgggactacaggcgcccaccaccacgcccggcttattttttgtatttttagtagagacggggtttcaccgcattagccaagatggtctcgatctcctgacctcgtgattcacccacctcagcctcccaaagtgctgggattacaggcatgagccactgcgcccggcctgggtctccgtttctctagctgtgaaatgactgttctaaaagagccctgccggactttggcagtctgtaagaagacctgagttcttctctcagttccaagcaggaaaattgaacgtaccctgagcccggagcctgcaacaaactctgggcagcctcaggaagtcaggcagtgaagtcggaaaaatgatctcttctgtatagggagaaaataaaagtttaaaaatttgtagtttg

SEQ ID NO: 404606 - DNA, 1000 bp, Homo Sapiens; identical to SEQ ID NO: 292793

SEQ ID NO: 404607 - DNA, 1000 bp, Homo Sapiens
gatggacgggatacaggaaggaccacagcgttgcccccagccctttgcctgcccccacctcctgctcccgggcccatgggcaactgtgccatccttgccagcaggcagcctgtgcccagactaccaccctcatcatcagtatctttggtctgtgagctgcaggtctggcaggggctagcatgggctagggcaccacagccaaaggcttgggtctcacttggactatttgaccaagatcagcgggtgctaagtggccgctggcgcctcccacttcgggcccttcctctggaccccagccttagccttgggcagctgaatgggattcctcaggcaggtcaggctgagctctttctgcggctggtgaatgcaagagatgcagctgtacagacactggcagagatcaatccagcaagtgtccatgagtaccagtacccacctccggtgagggcccagctgcagctagggacaccacagctacacataccggtgtggctggtatggctaacggccagcctttattgaccactgtgtgccagtcattaccaatgctttcttgtttgatcctcacatctctatgaagtcctactatgtaacagataaggaaatcaaagcaggagcaggttaacttggttcacagtgtccagcacatcttcactggaagccagcttcctcacccccgcagttggctttgctgatcccccacctcgtacagaagagatgagggtttgggccctcaccacagttctgacttgcccccagtgagtttctgaacccaagtgaatgtggagatgagcatctgaacatgcacaggactggggcctatttccagacctacaggtttactactccatgttctgacattgggtctagaagcatctagcagttgagtacagaaaaccagttccaaccacagctttaccacctcccgttaagtccttaacttttctgtacctcttctgtttttgtaaaacagattaaggattaaatgagtttgtcaggt

SEQ ID NO: 404608 - DNA, 1000 bp, Homo Sapiens
ccaggagatgagagaagacatcaagagcctgttgccatacattgtagacagcttgcgtgaaaccgatgagaagatcgttctgtcagccatccagatactcctgcaacttgttagaacaatggatttcactaccctggctgccatgatgaggaccctgttctccttatttggtgatgtgagatctgatgttcatcgtttctccgtgactctctttggagccgccataaagtctgtaaaaaacccagataagaagagtatagagaaccaagtcctggacagcttggtcccactacttctgtattctcaggatgaaaatgatgcagtagctgaggagagcaggcaagtcctaactatatgtgcccagttcctgaagtggaagctgccccaagaagtgtactccaaagatccctggcacatcaaacctactgaagcaggaacaatctgcagattctttgaaaaaaagtgcaaggggaaaattaacatcctagaacaaacactgatgtactccaagaacccaaaacttcccatcagaagatcagcagtcttgtttgtaggccttttatcgaagtacatggatcacaatgagctcaggaggatgggtactgactggatagaggacgatctgagagacctgctgtgtgaccctgagccctcgctgtgcatcatcgcttcccagactctgttactagtccagatggcgagggccgaaccaaaacctaagcagagagtgaactggttgcagaagctcatgggcaggtcctctgcctagaaacacaaggcaagcaacatcagagacagaatcttgctatgttgtgcggcaagctagtcttgaactcatggcctcaagtcatcctcctgtgtcagcctcccaaagtgctgggattacaagcatgcaccacggcacccagcagaattccagtcttgagaaacaggtcaaggacagcttcaaaagagattctaaataaatgttaatgttacaatgttaaaaaaaaaaaaaaaa

SEQ ID NO: 404609 - DNA, 1000 bp, Homo Sapiens
cagcgaggctttcagttctttggaattccattcttttccttattcttctgatgtggatccagacaccagtaacttaaatatagaacaaaataactcctggaccgctgagaacttctggcttgaccctgctgtgaaaggccagtcagagaaggaagaggatgatggccttcggaaatccctggatagattctatgaaatgtttggtcatccacagccaggctctgcaaactcactctctgcatctgtctgcaagtgcctgtctcagaaaatcactcaactaagaggccaggagagccaaaagtatgccctccgcagttttcaaatggcccgggtgatcttcaaccgggacggctgctccgtcttacagaggcattccagggacacccacttctacccactggaggaaggaagtacatctttggatgatgaaaagccaaacccaggactgtcaaaggatattactcatttcctcttgcagcagaatgtaatgaaagacctgtaactggtgccgggcggtgtgcagggtagtaatggaggtgctgtgccatgaccagcagtgttggtggccacccagatcccctagggtctctggccagctctgtgtgcccaatcccaattaagtgctttgaggttaaaggctggcacctgtgacctggtattggagccagtcagcccatatggagagccagcagggtctgggagttctccgtcctcttggccaaggccgctgactgactgggctacgagtcaaaagcccagctcccttgcctcaaggaaggacattctctgaggagtaatttatgctctagcactccctttcctctagatcggcctgaggctgggacattacatgaaatcacacccttgctgggcttaatccctttccctaccctcccatttatttactggtgtctctgggagcctttccttaataaacctcttatatctgaaaaaaaaaaaaaaaaaaaaaaaaaaaaaaaaaaaaaaaaaaaaaaaaaaa

SEQ ID NO: 404610 - DNA, 1000 bp, Homo Sapiens; identical to SEQ ID NO: 292795

SEQ ID NO: 404611 - DNA, 1000 bp, Homo Sapiens; identical to SEQ ID NO: 224187

SEQ ID NO: 404612 - DNA, 1000 bp, Homo Sapiens; identical to SEQ ID NO: 118681

SEQ ID NO: 404613 - DNA, 1000 bp, Homo Sapiens; identical to SEQ ID NO: 224188

SEQ ID NO: 404614 - DNA, 1000 bp, Homo Sapiens; identical to SEQ ID NO: 224189

SEQ ID NO: 404615 - DNA, 1000 bp, Homo Sapiens; identical to SEQ ID NO: 292800

SEQ ID NO: 404616 - DNA, 1000 bp, Homo Sapiens; identical to SEQ ID NO: 292801

SEQ ID NO: 404617 - DNA, 1000 bp, Homo Sapiens; identical to SEQ ID NO: 118682

SEQ ID NO: 404618 - DNA, 1000 bp, Homo Sapiens; identical to SEQ ID NO: 292803

SEQ ID NO: 404619 - DNA, 1000 bp, Homo Sapiens; identical to SEQ ID NO: 224191

SEQ ID NO: 404620 - DNA, 1000 bp, Homo Sapiens; identical to SEQ ID NO: 292805

SEQ ID NO: 404621 - DNA, 1000 bp, Homo Sapiens; identical to SEQ ID NO: 224192

SEQ ID NO: 404622 - DNA, 1000 bp, Homo Sapiens; identical to SEQ ID NO: 292806

SEQ ID NO: 404623 - DNA, 1000 bp, Homo Sapiens; identical to SEQ ID NO: 292807

SEQ ID NO: 404624 - DNA, 1000 bp, Homo Sapiens; identical to SEQ ID NO: 292808

SEQ ID NO: 404625 - DNA, 1000 bp, Homo Sapiens; identical to SEQ ID NO: 292809

SEQ ID NO: 404626 - DNA, 1000 bp, Homo Sapiens; identical to SEQ ID NO: 224193

SEQ ID NO: 404627 - DNA, 1000 bp, Homo Sapiens; identical to SEQ ID NO: 292811

SEQ ID NO: 404628 - DNA, 808 bp, Homo Sapiens
agagtctttcgttctttctggtgcagcttaactgatttgaagaagccgaagaagaaaatccagtagcacggttaagactttagccatggcatctgtatcataccaaaagccaacatctactactgtgggaaaacaaatgatttttacaggtccagactacataaaggattatttacccaaaattcatcagcacacctcctatgtaggagaacagcatctggcgttagaaaaaactggagatctcagatatttatggaggcctgcctcaaatagaagcttgccagcaaaatataaacataagtacgtcggtgaaattggttggagaataccacagtataattttatcaacaaatcaagactggagagtggctttcatatcaagtatgaagaactaagtcaagcttctcttgattcaataacccacagatatcaaaacccatggcaaccaaaacctcatgtcctggatatgcaaggaaaacagagtcgcgcttcttttgcctggcatatgagtgctttcgaggacactgatcagagaaattccaaatgggctattcttgttaggcagtgtaagtcatcattgccaagagcttccaaaccacctaagctgccgaagctaccaaaaaggaaaagaaaaggaaacattaacctctaaatcagcataactcaacctgcttttagaaggagaaactgcctactactgtataacaaaaaataagatcataataatccacaagtgcttctcatattgccccaggacagatgtcttgcaagagtacgcttcagcttaaagcccaaataaacagtttgg

SEQ ID NO: 404629 - DNA, 1000 bp, Homo Sapiens; identical to SEQ ID NO: 224194

SEQ ID NO: 404630 - DNA, 1000 bp, Homo Sapiens; identical to SEQ ID NO: 292813

SEQ ID NO: 404631 - DNA, 1000 bp, Homo Sapiens; identical to SEQ ID NO: 118683

SEQ ID NO: 404632 - DNA, 1000 bp, Homo Sapiens; identical to SEQ ID NO: 224195

SEQ ID NO: 404633 - DNA, 1000 bp, Homo Sapiens
cgagataaacatcaaacacctacaaggagttggagatcttcgaggaagagtagccagatgtgattcaagcattgtgaagctttctggagacattcacttattcaggcaagagcaccggcaaattgagaaagccattcaagaattcgtgcccgccctggaaactctttccaagaacttggacatgaaggtgatgcagctcttaggaaagattgaaactgccagttctgagcaaacctcgaatttaaagatggtccagggggattatcgccacgaaatgaaccttttggaattcaaatttcattcactttcaagtaatctgtacgaagaagttgagaataataaaaaatggacagaaaaccaatttctcaaatatagaaaagaccacctgggccatataaatgaatgtctgaaggtcctacaggagaaactggaaaagtctgaaaataaaatggaagaaaaactgctgcagctttcaagcaaagtagagaatttcattaacacacagaaacaggaaacacaactaagtaaagtaaagcatatggaaaataaattgtccaaaaagatggaacaaatggaaaagcagatctggggtgaattagagacaatgcagaatgaatatcaatcaggatttaaatcaattcatgactctctcagctccctccaacaaatacagaaaacaaagatggatttagagaaatataaagtacagaaagacctaaagaaattacagcgcaagatagtggaactccaggaagtataaaccttttcagtcatcttctttttcatcagccaatggagtgatttgttggaaaaagttctgaagaagaaagttactatctctgggatgtttactgcttctaatgtctccttttaaggagacgaatgtaccagaaaaataataaagcaaagaagcttaaaaaaaaaaaaaaaaaaaaaaaaaaaaaaaaaaaaaaaaaaaaaaaaaaaaaaaaaaaaaaaaaaaaaaaaaaaaaaaaaaaaa

SEQ ID NO: 404634 - DNA, 1000 bp, Homo Sapiens; identical to SEQ ID NO: 292816

SEQ ID NO: 404635 - DNA, 1000 bp, Homo Sapiens; identical to SEQ ID NO: 118684

SEQ ID NO: 404636 - DNA, 1000 bp, Homo Sapiens; identical to SEQ ID NO: 292817

SEQ ID NO: 404637 - DNA, 1000 bp, Homo Sapiens; identical to SEQ ID NO: 224197

SEQ ID NO: 404638 - DNA, 1000 bp, Homo Sapiens; identical to SEQ ID NO: 224198

SEQ ID NO: 404639 - DNA, 1000 bp, Homo Sapiens; identical to SEQ ID NO: 224199

SEQ ID NO: 404640 - DNA, 1000 bp, Homo Sapiens; identical to SEQ ID NO: 224200

SEQ ID NO: 404641 - DNA, 1000 bp, Homo Sapiens; identical to SEQ ID NO: 220441

SEQ ID NO: 404642 - DNA, 1000 bp, Homo Sapiens
ccccttgcacctcctcgggcctcgcctgccagttctgcagattcacaagtggacagaggactaaaatgaccaggctctgcagccaagaaactggctgtggggtcccagacatgccactgtgatccagctgttggggcggggggagtgggcaggacttcccagggagggaggcagctggctggggagtcagaagtccagagtcttgggccccaagccagctgctggctgcagaagaaaagacaggtgagtggccaggtgcactcctcagacctgtgcacaggaagggtcccactggaggggccagagctgagcacctaacccaggctgcaggaaatctgcctccaggaggggaagtgggacttcccagtggagaaaaaatgcccctgacactgcaggatgacggtccctgagctgcggaaatccccctggcctcctttctccgatttaccctcagggtcaatacctctgagaccgctgtgccctcctcatcctgacagccggggaaaaggggagggtgcagggagaggggaggcggggacggtgtgcccaagggccacccacctgggcatcatttggtgctgatataaggacaggcccacccagagagaaaaagcatcccacctggggaggaaaggaagggctgggaaagaccccagaacggcacccctccaacaaggcaggaagggagaaggacagcccctccggctgggtggaggatgccaggaaggggctgaaccacggcctgctgggaatcacggcccttcctttcctcagatcgccttgcggcctggcactggagctggtgctgacagggacgctggccaacagggtggtatttttcacccgggtgatctgagctgctggcaggtagggggtgggctgggggaggcgggtgagggctggtcttagataggaatgcagcccagaagggaccaagcacttgcccatcctcactggctttcaaaaaataaacagtaaaaataaaagtcccatgaacctt

SEQ ID NO: 404643 - DNA, 1000 bp, Homo Sapiens; identical to SEQ ID NO: 292823

SEQ ID NO: 404644 - DNA, 1000 bp, Homo Sapiens; identical to SEQ ID NO: 292824

SEQ ID NO: 404645 - DNA, 1000 bp, Homo Sapiens; identical to SEQ ID NO: 118686

SEQ ID NO: 404646 - DNA, 1000 bp, Homo Sapiens; identical to SEQ ID NO: 224202

SEQ ID NO: 404647 - DNA, 1000 bp, Homo Sapiens; identical to SEQ ID NO: 224203

SEQ ID NO: 404648 - DNA, 1000 bp, Homo Sapiens
atattgctccgccacaaactgaaatctctgacatccctaaaagactgcaagacagggaccatctaagctatattccaccagaacagcacaccatggtgtcactaccgtctgtgcaacatatgctacaagagcaacataatcagccacataaggatatccaggctcctcccccagaactatctctaagtctgccttttcccatccagtgggaaaccgttagtatttttacgagaaaacatggcaatttaacagttgatcatattcagaataactcagattctggtgctaagaagccaacacctcccgactattatcctgagtgtcaaagtcaaccagcggtatcgtcccctcatcatattatacctcagaaacagcattatgcgccacctccatctccatcatcaccagtaaaccatcaaatgccatatcctcctcaggatgtagttactcctaactcggttcgtagccaagtgccagctctaaccacgacctacgatccatcatctggatatattattgtaaaggtgccacctgatatgaattctcctccactacgtgctccccagtctcaaaatggtaatccatctgcaagtgaatttgcttctcaccattataaccttaacattttacctcagttcaccgaaaatcaagaaaccttgagccctcagtttacacaaacagatgcaatggatcatagaaggtggcctgcatggaaacgactgtcaccttgtccaccaacgcggagtccacctccttcaaccctacatggtcgatcacatcattcacaccagagaagacatagacggtattaaggatgataacagtatttggaactgaagacctgatgggaaaaaaaccttcaagttctatactgtactgtggataagcggctcagttcagcagagctggagttgaacaactttgttcctctggtgtggtaaattgacctaaaggtgacctctgacgatttcctgaaataaatatgcaatgttacattttc

SEQ ID NO: 404649 - DNA, 1000 bp, Homo Sapiens
gttgggctgtgaggcagcgtctcagcgaggcggcacccggagccatgtcttcacataggaggaaagcgaaggggaggaataggagaagtcaccgtgccatgcgtgtggctcacttagagctggcaacttatgagttggcggcaactgagtcgaatcccgagagcagccatcctggatacgaggccgccatggctgacaggcctcagccaggatggcgggaatctctaaagatgcgggtcagcaaaccctttgggatgctcatgctctccatttggatcctgctgttcgtgtgctactacctgtcctactacctgtgctccgggtcctcatattttgtgcttgcaaatggacatatcctgcccaacagtgaaaatgctcatggccaatctctggaagaagattccgcattggaagctttgctgaattttttctttccaacaacttgcaatctgagggaaaatcaggtggcaaagccttgtaatgagctgcaagatcttagtgagagtgaatgtttgagacacaaatgctgtttttcatcatcggggaccacgagcttcaaatgttttgctccatttagagatgtgcctaaacagatgatgcaaatgtttgggcttggtgcgatcagccttatcctggtatgtctgcccatttattgccgctctcttttctggaggagcgaaccggccgatgatttacaaaggcaggacaacagagttgtaacgggtttgaagaaacaaagaaggaagcgaaagaggaagtctgaaatgttacagaaagcagcaagaggacgtgaggaacatggtgacgagtagcaagagaccaaagcattattttcccctcaagacaacagaaaccattcagagcagaggggactgtctcagccatgcaaacctcatggagcattttggaaagttaaaaattgattcttatttttgtcatgtttactttcaaacatgaaataaaattgagttctgttttcatgcaccaaaaaaaaaaaaaa

SEQ ID NO: 404650 - DNA, 1000 bp, Homo Sapiens; identical to SEQ ID NO: 292828

SEQ ID NO: 404651 - DNA, 1000 bp, Homo Sapiens; identical to SEQ ID NO: 224204

SEQ ID NO: 404652 - DNA, 1000 bp, Homo Sapiens; identical to SEQ ID NO: 292831

SEQ ID NO: 404653 - DNA, 1000 bp, Homo Sapiens; identical to SEQ ID NO: 224205

SEQ ID NO: 404654 - DNA, 1000 bp, Homo Sapiens; identical to SEQ ID NO: 224206

SEQ ID NO: 404655 - DNA, 1000 bp, Homo Sapiens
aaaacatcattgcatgggaaaccaaagactgacattgctgcttttgaaaatggaggaggtgactgttatgttccacagagggtcatatttcttggagtcgatgaaagtgaagctttaactgaagagaaagaaatcaccatatcaaaatgttcaaatactaaagataacaaggacagtcctcatccaaagcattccctaactacccgactagtacctacaacgcatgtattaaatgctactgagaatatcagtatgaagtgcagagaggacccctcttcaatgaatgatgtccagccagtgaagaagcctcattttaaaggtgtgaagaaaagaaaatggatttatgatgaaccacagaactttcctaactctggaatgcagagagcagtacaggccccaagaccccaaaataaaatgagttatcaccgcaataataaaaatcgaaatgcggagaatgcatcctatatccacgttcaaagagatgctgtcaggactgtcgcgttgaatgcaccttcccgcagcaggcccacgcatgggtcctacaataaagtccatgctaacagggaacccaaacccaacctcagtccagacaaatatacgtcaacatcatataatgattcagcctggcgaaaacgaattcctttttcaaaaacatattcaaaaagtgaaaagatatatccagagccaagaagaaatgggagcaagtaaacctggaggttgagagagagaaaaatgagaaaaaattgccagacatcatctgatttacaatcaaaaatgaaaattcaaagaatgagatactcaagtactccatgttatgtagtggatagccaaagatgataaaaatgcaaattctgaaaataagatgcaggaagtacattgtgctctttcaaaactgataaaaatgcaaattaccaacagctgccagtgtatttatgtaggtctggaattcattccgtgcattactccaaacattttaataaaatttaaaagtttgacaatt

SEQ ID NO: 404656 - DNA, 1000 bp, Homo Sapiens
accgattccttccaaacatcgtaatgcaggcaaattccacagtaacagtgtgggcagcagcatctgaagcaaagcatcaacctccatcagattttctttggaaggaacaagacaagtttagagcaagtcctgattgtataacaatcctgtgcaaaccgaacggtcaagccattgcgtggtacacccctatccactggaagcaagcgtgggaaaaattagatgctgacgttgaatttaacagatgttcagtagtatctccaacattccgaaagcgtgtgtttcagtggacagcatctacagctacaataactaaagaaaaacaagatcaacctaagaaagatatctcaaattatcaggtggaacaagctcaagttcttcttaagagagagaaggaaatcccaccaaccgttttccctaatcgcagcccttggtgccagaatccctatgtctctgcacatccttactgtcctctgattgaaccacacaatacatccaccgctggaggcagattggatagacagcccaggtctcggtcaaccagacctaatcgagcctcagggtctaagaaaaagaagacatctgagtcacaaaagcaataagcagtcaactcaacctttaaagtaatctagtccaccctcaaccagctactagaaaagcaaaagagaactcaaatccctgaggcctgctctgcaacctccctgctattccatgagagggtgaagacatcacatttctatatggaaaaaggatccaaaatttgtattgctgtagaattggtgaattatagatgcttgatgaaatcacaagtcctaccactcctgccttccaaatccctgcagaaaacaagcagatggttagtattattcaatggataaaattgctatttgccttagatttctctttttgtaaacaaagttattttgggtacagaactcacaaaagaagagcacgtgcaattgtttaaccattttacattgactgataaatctcttttttccat

SEQ ID NO: 404657 - DNA, 1000 bp, Homo Sapiens
gagctggagcgtctctatgcccatgagagcaagctcaagtccttcctgctcgtcaagctgaatgatcgcaatgaattcgaggagcaggccaaaagggaggaagctctcaaggcaaagaagcatgtcaagaagaacaggggagagagttttgagagctatgaggtggcccacctccggctgctgaagctggctgagagtgggaacctaaaccagctcattgaagattttctggccaaggaggagaagaattttgctcggttcacgtatgtcacggagctcaacaacgacatggagatgatgcacaagaggacccaacgaatccaggacgagatcatcctcttgcgatcccagcagaaattgtcccacgatgacaaccactctgtcctgagacagctggaggataaactgaggaagaccacggaggaggcagatatgtatgagagcaagtacggggaggtcagcaagaccttggatctattgaagaactcagtggagaaactgttcaagaagataaactgtgacgccaccaagatcctggtgcagttaggggagacggggaaagtcactgacatcaaccttccgcagtattttgccatcattgaaaagaagaccaacgacctgctgctgttggagacctacaggcgcatcctggaagtggaaggggcagaggctgagatcccgccacccttcatcaaccctttctggggtggctctgccctcctcaagcccccagaacccatcaaagtcatccccccagttctgggggctgaccccttcagcgacaggttggatgatgtggaacagcccctggaccacagcagccttcggcagctggttctcgacaattatatcctgaaggagaatcggagtaaggaagtgcgcggagacagcctgcctgagaaggtggatgacttcagatccaggaagaaagtaaccatgtgaggtgcatgcatggggccacctttgcaacataaccgaaagaataaatgttttgttctgt

SEQ ID NO: 404658 - DNA, 1000 bp, Homo Sapiens; identical to SEQ ID NO: 292832

SEQ ID NO: 404659 - DNA, 1000 bp, Homo Sapiens; identical to SEQ ID NO: 292833

SEQ ID NO: 404660 - DNA, 1000 bp, Homo Sapiens; identical to SEQ ID NO: 292834

SEQ ID NO: 404661 - DNA, 1000 bp, Homo Sapiens; identical to SEQ ID NO: 292835

SEQ ID NO: 404662 - DNA, 1000 bp, Homo Sapiens; identical to SEQ ID NO: 224207

SEQ ID NO: 404663 - DNA, 1000 bp, Homo Sapiens
gtgtctcatttcccaaatcaaaatgataatgggagcaggatggcagcctctggtttcacagatgaaaaggaaaccagtaagataaaggcagaccctgagaaactcaagaaattgcaagaaagtctcctggaggaggactccgaggaggagggagacttgtgtcgcatctgtcagatagccgggggttccccaagcaaccccctcctggagccttgcggctgtgtgggaagcctgcagtttgttcatcaagagtgcctgaaaaagtggctgaaagtgaaaataacatcaggagcagatcttggtgccgtgaagacctgtgagatgtgtaagcaaggcctgctggttgacctgggtgactttaacatgattgagttctaccagaagcaccagcaatctcaggcacaaaacgagctgatgaattcaggcttgtacctggtgctgctgcttcacctctatgagcagaggtttgcagaactcatgaggctcaaccacaaccaggtggaaagagagaggttgtcaagaaattacccacaacccagaacagaggaaaatgaaaattcggagttgggagatggaaatgaaggcagcatttctcaaagccaggtcgtctagcaaggaagccaactgtggagctcggcggagacctctcccgccagcccttctttctacgtccccaagtgcctccctccctcctcctctttactgaaactgaaaccaaagcgttcacagttagattttcaccttgtgccactctcttttggggtctggcttgagcatctatgggcagccacagcgaccagtctagtcccagacagcacaggtcaagcagcgtgggactgtggagcccctggcaggctggcctggtgctgctcccttagcccagaagccctgccaggtccagtggcctggggtcccactgctgagggcacctgccaggcctcactccaccctgaatggactcgagccatgtattcattcagtaaactgacattattctccc

SEQ ID NO: 404664 - DNA, 1000 bp, Homo Sapiens
tactggtgagcattgcctttcccattcccatctgtcagcagtgggagcccagctacaaaagggtcaaagcactgtccattgtggggggtgacccccacctcattctcctcgcctccaccactgttttggtaggagccatcgtcagtactgtccagaactttctgttctggcacatgaaggaccatgggagcggcgagctggtcatgggtttctcggtcgccctcagcttgctgggggaaattctgcttcatccgttcaaagctacattgcttaggaaactgtccaggacgggcctggtggggctggggctgagctgcctcgctgggcagctgctgtactactctttcctctggagctggtggtccgtcctccccattcagatcttgagtgccattagcaacagagctttgtggtgggctgtgggggcctcagtagaggacctggccactccccgcatggagagggctctgagtgccttgttccgaggccacttttacgggagtggctgtagcctgggcagctttgtcgggggcttcgtggtgatgcgcttcagcctggctgtgctctaccaggcctgctgtgtggccctgttgctctggttggccttgctcctgtccatacagcggaggctgccccgagagcggaaaatcaagtactcgaagctgctgtccatggaggtgagtgacaccagtgactctgagcaggggacagaacaggactggcttgtgaaggccatgagggaggaacactcagactgaaagggctgagaaatccagagtgtgctgatccagcaaggaacgaatggactgaacaaaactcagcctgctgaggacagaaacctgccctggactgctgggagccggggaagagaggatgggtctgtgctgaaggcccaacaggatcatctcattgcatgattttctttacttttgaagtaaaaggagatttaacttttaaaaaaaaaaaaaaaaaaaaaaaaaaaagaaaaaaaaaaaaaaaa

SEQ ID NO: 404665 - DNA, 1000 bp, Homo Sapiens; identical to SEQ ID NO: 224208

SEQ ID NO: 404666 - DNA, 1000 bp, Homo Sapiens
ggagagaaaccctatgattgtaaggaatgtgggaaagcattcatttctcttccaagctatcgaagacatatgataatgcacactggaaatggaccttataaatgcaaggaatgtgggaaagcctttgattgtcctagttcttttcaaatccatgaacgaactcacactggagagaaaccctatgaatgtaaacagtgtggtaaagccttcagttgttccagttcctttcgaatgcatgaaagaactcacactggagagaaaccccatgaatgtaaacaatgtggtaaagccttcagttgttccagttctgttcgaatacatgaaaggactcacactggagagaaaccctatgaatgtaaacagtgtggtaaagccttcagttgttccagttcctttcgaatgcatgaaagaattcacactggagagaaaccctatgaatgtaaacagtgtggtaaagcctttagtttttctagttcctttcggatgcatgaaaggactcacactggagagaaaccctatgaatgtaaacaatgtggtaaagccttcagttgttccagttcctttcgaatgcatgaaaggactcacactggggagaaaccctatgaatgtaaacagtgtggtaaggcgtttagttgttccagttccattcgaatacatgaaaggactcacactggagagaaaccttatgagtgtaaacaatgtggtaaggccttcagttgttctagttctgttcgaatgcatgaaaggactcacactggagtgaaaccctatgaatgtaaacaatgtgacaaagccttcagttgctcacgttcctttcgaatccatgaacgaactcacactggagagaaaccctatgcatgtcaacaatgtggtaaagccttcaagtgttcccgttcctttcgaatacatgaaagagttcatagtggagagtaaccctatgtatataagcaatatggcaaagttttcagttgtcctatttccttttttttttttttttttt

SEQ ID NO: 404667 - DNA, 1000 bp, Homo Sapiens; identical to SEQ ID NO: 292836

SEQ ID NO: 404668 - DNA, 1000 bp, Homo Sapiens; identical to SEQ ID NO: 292837

SEQ ID NO: 404669 - DNA, 1000 bp, Homo Sapiens; identical to SEQ ID NO: 292838

SEQ ID NO: 404670 - DNA, 1000 bp, Homo Sapiens; identical to SEQ ID NO: 224209

SEQ ID NO: 404671 - DNA, 1000 bp, Homo Sapiens; identical to SEQ ID NO: 292840

SEQ ID NO: 404672 - DNA, 1000 bp, Homo Sapiens; identical to SEQ ID NO: 224210

SEQ ID NO: 404673 - DNA, 1000 bp, Homo Sapiens; identical to SEQ ID NO: 118688

SEQ ID NO: 404674 - DNA, 1000 bp, Homo Sapiens
cctccatgtctagtgcccaggtggccaccagattcaaactcaagagcccctgcagcagcagcaggttcacgaagaagaagccgctgccctccatctcgtcgaagtccagcatgtctcacttctccaaccgcctttatgaggagctcgccgacttcctgacccagcaggcagcctccttggtcatccgcaagtacgagttcgaaaaggacctcagtaagcagctgggcttcttctccttccccatcacccacgtgctcagggacctttccctgggcttaaagaaggtaaaaggctcccgcatccacctgtcctcggagacccaccggagctgcctgctgcgtaaactggaggagtccaaaagggcccggcaggcctcccggctcagcacctcccactgcagcacagagacaccctctgtgcagcaggaaccagccacccacactgcccaggaccaggccacagagccctgccgctccctctacaccaacttgccagccagccggcagctcagccctttggagcccaagctctacatgtctgcctgcaccggcatgggttccagtccccccaagtccaaggacatggacaatgagggccgtgataaagccgagattgaagatgaagatgaggatgagttcaaggatgaagaccaggatgaggacaaggatgaggatggagtctagagcctcccagagcctggagaggaggcctcggtcagccactccgtggacgtgggccacggtgacccaccatgaagtccccactagccactcgattccctgctctgtcagagttgctgcacatcacaccagcccctgccaagagcaggagtcaccacaggctgaatgcccacgaggagctctgctgagactctcaagggagccagtgaaagaaatagaaataaagcctgtgttgctgggacacaggtttgctgtcctgaaaaaaaaaaaaaaaaaaaaaaaaaaaaaaaaaaaaaaaaaaaaaaaaaaaaaaaaaaaaa

SEQ ID NO: 404675 - DNA, 1000 bp, Homo Sapiens
tggttttcccaagtcacctcctgggtaaagacaagatgtcacaaatggcgagtgttcctgagagagagccggagtcagccccctctgccccgagtgctgagctacagtccacccagcacatggaggctcagcccgtcgagagtgatgctgaccatgtcacagcaggtgccaatggccagcatggccctcaggctgccagcaccaccaagtctgctgaggagaaagctgagcatccaaaggccccacaccctgaagctgaagctttaccatctgatgagtccccagtggcaatgggggcaaatgtggtggacagcttaggagacctgcagacttggttcttccctccacctccagcaggcagtgtgtccccgtcgcctggcccccacgaggtggccctggggagaaggcccctggaccccagcctgtacacggccagtgaggagaacagctacatgcgctccatgaccagcctgctggacaggggcgagggctccatcagctccctggcagacatcctggtgtggtccgagaccaccatgggcatggccatagccacaggcttcctggattccggccacagcactgtggcagacctgctgcacagctcggggcccagcttgcgctcggtccccagcctggtgggaagcgtcagctcggccttctcctctgggctggtgtcagggaccagctcagccctgcgcaccatcacccgtgtgctggagacagtggagcagaggaccgtggagggcatccgctcagccatgcgctacctgaccagccacctcaccccacgccaggcccaggctgaccccaactatgattagagccctgcacagggacccccgaagggctggttcagtggcctccagagatccctgggaccctcacgccctgctcccttgcccattcttgctctggacggttcccccagcccatgcaataaatcaccagtgagcatttatttctaaaaaaaaaaaaaaaaaaaaaaaaaaaaaaaaaa

SEQ ID NO: 404676 - DNA, 1000 bp, Homo Sapiens
caaatggatatcaagaatgaccataagaataatgagagactcctcttccatgggacagatgcagactcagtgccatatgtcaatcagcacggctttaatagaagttgtgctgggaaaaatgctgtatcctatggaaaaggaacctattttgctgtggatgccagttattctgccaaggacacctactccaagccagacagcaatgggagaaagcacatgtacgttgtgcgagtacttactggagtcttcacaaagggacgtgcaggattagtcacccctccacccaagaatcctcacaatcccacagatctctttgactcagtgacaaacaatacacgatctccaaagctatttgtggtattctttgataatcaggcttacccagaatatctcataactttcacggcttaaaaatatttttatcatcaaagagatgatttaagtcatctgtaagaacaacatgcaatctttgtctttgcttctggcctgtgtaagcagatgaaagtttcccttttaggtgccaaaatgctgaaaattacctttttaaagtgctctattgctgcgatttgtagcatacctttttttctcagcaaattgatgggtggaagctgagaaatgtatggtaaatgtcacagagctacaaccattcacagacaccaaatctctaggagaataaaaagcacattattctttttctatcagaaaaaaacaagatgcatcaccttaaaaccaagatgacattgttcttcttggaacatgttaagacatcgaatggtggcgggttaaactgtactgcttaagtggagcggctaccgttatgcatctatcacagttggggattttgccttattaaggaaaacttgtcaatagttcagctgaaatgactgaatcacagaatattaactctgttatggaacaaatcataacagattttacctgtttacatttcaggtaaaaatgtatcgcattgttatctaatattaaaaaattacccccaatt

SEQ ID NO: 404677 - DNA, 1000 bp, Homo Sapiens
gtggaccagatcgaggacggcatccagaccacctacaggcctgacccacagctccggctgcactcaataaactacgtgcccttggactttgttgagctttccagtgccatccatgagctcttccccacagggcccaagaaggtacgctcctcaggggactccctgccctccccctaccccgtgcactcagaaacaatgattgccaggaaggtcactttcagcacccacagcctcggcaaccagcacatataccagcgaagctcctccatgttgtccttcagcaacactgacaagaaggccaaggtgggtctggaggcctgtgggagagcccagtcagccacccccgccaaacccacagacggcctctacacctactggagtgctggagcagacagccagtctgtacagaacagcagcagcttccacaactggtactcattcaacgatggctctgtgaagaccccaggcccaattgttatctaccagactctggtgtacccaagagctgccaaggtttactggacatgtccagcagaagacgtggactcttttgagatggaattctatgaagtcattacttctcctcctaacaacgtacaaatggagctctgtggacaaattcgggacataatgcagcaaaatctggagctgcacaacctgacccccaacacagaatacgtgtttaaagttagagccatcaatgataatggtcctgggcaatggagtgatatctgcaaggtggtaacaccagatggacatgggaagaaccgagctaagtggggcctgctgaagaatatccagtctgccctccagaagcacttctgagccccttcagagcaggaaacaacctcagactcatcacaaagtagacatatacacacacatatatgtatgtatatttttctcaccacattcttcaaggaggttgtagacaaatgtttccatgacctctcagctttccaacaggaatcttgtaagagctaataaaaggaaatacctg

SEQ ID NO: 404678 - DNA, 1000 bp, Homo Sapiens; identical to SEQ ID NO: 224211

SEQ ID NO: 404679 - DNA, 1000 bp, Homo Sapiens; identical to SEQ ID NO: 224212

SEQ ID NO: 404680 - DNA, 1000 bp, Homo Sapiens; identical to SEQ ID NO: 118689

SEQ ID NO: 404681 - DNA, 1000 bp, Homo Sapiens; identical to SEQ ID NO: 224215

SEQ ID NO: 404682 - DNA, 1000 bp, Homo Sapiens; identical to SEQ ID NO: 224216

SEQ ID NO: 404683 - DNA, 1000 bp, Homo Sapiens; identical to SEQ ID NO: 292846

SEQ ID NO: 404684 - DNA, 1000 bp, Homo Sapiens
gacagcaaacccttcaagtgcctctattgcccaagcaaattcaccctgaaggggaacctgacacgccacatgaaagtcaagcatggagtcatggagcggggccttcattcccaaggtctgggaagggggagaatcgccctggcacagacagccggtgtcctgaggagtctggagcaggaggagccctttgacctctctcagaagcgccgggccaaggtgccggtgttccagtcagacggggagagtgcccagggcagccactgccacgaggaggaagaggaggataactgctacgaggtggagccctacagccctggcctggccccccagagccagcagctctgcacacccgaggatctgtccaccaagtcggagcacgcccccgaggtgctggaggaagcctgcaaggaggagaaggaggatgcatccaagggagaatgggagaagaggagcaagggtgaccttggggcagagggcggccaggagagagactgtgccggcagagatgagtgtctcagtctcagggcttttcagagtacccggcggggcccctctttttctgattacttatacttcaagcacagagatgagagtttgaaagaattactggagaggaaaatggaaaaacaagcagtgcttttaggtatctaagtggacagttttaaaattacatttggaaaatgagaacgaggcagttcaaatatagctttctgtatgaactgtcattttctggagactggcgaatagtaccaatctctacaaatggcttagactaaatgagcagggatgtaggtaatggaaagccttctcaggtcattcacggggcccttgatacccttcacacatgtgcagggtcttcatcagtggcgttttatgcattgccagtataataaactgtgagtattcttccagatatctaattgtaagctgatgctgaggtgcttttagaaattctactttcctttgattcatatgcaatacatggtaaatttctaattgc

SEQ ID NO: 404685 - DNA, 1000 bp, Homo Sapiens; identical to SEQ ID NO: 292847

SEQ ID NO: 404686 - DNA, 1000 bp, Homo Sapiens
tttgggaacataaaggaagaagatctctgaagaaagctctcatattttaaaatatccttggaggctatctcaagacagtgaaagaacttggggattcaggtgggctacctaccatcagtggaggaaatttgacctcttcccatttttttggcattaacatggactgtattcatcaaggtattataccacagcactctatggaaatctcaagattagaaaaaaaaaaagaaccaagttatagagttagtttttattttatttttgcacttcgtcatgacagtatagagtttgtttttaatgtctcataaatgacaagtggcaaattcaaatcaactcatataaaactcattctattttttctctaaaatagatctttatatggcttcatgaagtcttttatgtgttttgaatttacataaatgaaagtctcataaaatatcataaagatattttggatcgatttctaaagatgtgactcttcaacggaggagaatagggctctgagaaatggaatcactgaaaaagaaacctgggttctctgatctatccacacagaactagagcaaggaggtgatgaaatactgatctctttcctcacataagtctgagcctaccaatatggatgtactcaaagtgaaacgctgccctgttctctgcttgaccattgttataattttattctgtccttagagtactgaaggcagttcaataatcaacatgctatttggaatgttttaatttggaaagcaataaggctctgcacctgatatcagataccttataattctcttagctttaaaaatatgtatactttctcacaaggtttttccttatctagcttcatttctctcatggtaattaatgtaattatgtatagaattaagaccacaataagggagatgatcagaggaatctgtatagtgtaattagaaaaagtacaatattctaatgttctaactgggttgtatacctaattatataataaatacaaaataattcc

SEQ ID NO: 404687 - DNA, 1000 bp, Homo Sapiens
gttcacacctgaagtcctatcagccagaaacaaactcttcttttcaaccaaatggtatccatgtccatggattttatgggcagctgcagaagttctgtcccccacactaccccgattcccagagaattgtgccgcctgtcagctcctgcagtgtggtgccttcgtttgaggactgcctagtccctacatccatgggccaggccagttttgatgttttccacagagccttctcgactcactcgggcattacagtgtatgatttaccttcaagttcctcgagcctctttggggagtctctccgcagcggggctgaagatgctaccttcttgcagatcagcaccgtggaccgctgtcctagccagctctcctctgtctacaccgaaggctaaaagctctcttggccactcctgcacacccaggaccttgatgttgcttgccaccttttgttttcgtactctcacagactgcttgaggaaggatgtcagcccaatcagcgggccctgcagagttactgatgttctttcagaaggcaggactgaatggcagagctagctttgcaggaatcattacagttgctcctttttctctctggttttcctggactatgtgaccaggaggactgtcttttcaaagggaatttagagcctcactctcctggatacctgttacttcctggctgtcaacccttaaaggaccccagtgaaatgatgtgcatatgaaaatgtagtttggggatgactctacctgaaaactccaaacagggaaaaagacctcaattacgagaggcatagtgacctgcctcacctaatcctcacccttgctgctcctgatgcaaaaccaggcacaacaagggaaatccatgtccaaagcatagtgtggtctcaactcttagaaactccctgggtttcccttttctcttagccacatgctaaccagttgcttctcagtgtttctcttcaatagaaaaataaggttttatatgccaaaaaaaaaaaaaaaa

SEQ ID NO: 404688 - DNA, 1000 bp, Homo Sapiens
gtaacatctctttcaccacttttaacattcagtaaattttgttgcactgtactgctacaaattatggagagagaaagtggtaactgtcctaaagatcgttatgttgtgtgtggcagagtttttttaagtctagaagatctttcaactgggaagtacctactgacatttccaaagaagaaacctatagagcacatggaagatctttttgcacttcttgcagcattccataaatcttgttttcaaatcacatcacccggctatgccctgaattcaatgaaggtgtggctcttagaacatatgaaatgtgaaataatcaaagaatttccagaagtgtacttttgtgaaagaccgggaagtttctatgggacactcttcacttggaaacagagaacaccattcgaagggattttaataatctattccaggaatcaaacagttatgttccagtgccttcataatctcatcagaattctccctataaactgtttcctcaaaaatctaaaatcaggaagtgagaatttcctaattgataatatggcatttactttggagaaggaactagtcacccttagttctctttcttctgccatagctaaacatgaaagcaattttatgcagaggtgtgaagtgagcaaaggaaagagtagtgtcgtcgcggctgctttatcagacagaagggaaaatatccatccctacagaaaagaacttcagagagaaaagaagaaaatgttgcaaacgaacctaaaagtgagtggtgccctttacagagaaataactttgaaagtagctgaggttcagttgaaatcagactttgctgcacagaaactgagtaatttataattataatttcaatttgatcatattttaaaatatgttttcaccaccatataagattttggttctacttgctatatgcctcctttgtaaaaataaacaccgaggcttactgtagtagaaactttagttttgatgatgcacaaaataaacagcagtggttctc

SEQ ID NO: 404689 - DNA, 1000 bp, Homo Sapiens; identical to SEQ ID NO: 292849

SEQ ID NO: 404690 - DNA, 1000 bp, Homo Sapiens; identical to SEQ ID NO: 224217

SEQ ID NO: 404691 - DNA, 1000 bp, Homo Sapiens; identical to SEQ ID NO: 224218

SEQ ID NO: 404692 - DNA, 1000 bp, Homo Sapiens
aaagcgtttgtttttgaaacaaatttatacaacttggccacttaatgagcttggaatcaagagatagtttattacatgcgtaagaagcacattctaacgctactaaatgttcaccagtgctcttaacataactgaagccattttcaatccctgtattttttcaacaatatttttcctcatagatttttccaccatcagagttcatttttgagggttatattttgttaacctcatttgcaggctcttgtgtcatcgcttattgatattccttgttccacagtgctatggatcttcctcagaagaacatgaagttgcttctgtggaactggttatctgccatggcctcaacaatccataatccagtcatggagaggattccccatggtcagaagtcaacttgcacatctagttaaagtccaaggtaactgcaaacagtggaacatggcttaggttttgaagcctcgttattggatatagtctttatcctaagttctgaggagccataaaaatagttttccagaatggatttttttttttagataaaaagattatctaccttttgggggtggaatatcttattttgtttttgaatttgtctttgttataaagaagagtaaaacaaagatgtgtaagtgtgagtctgtgtgagctagtttctgatgtctaaacagcaattacctatggagaatacatcattcaaagtaatagcttttgttcaaacatttttaggaagtaataatacatttcttcctggacagttgataaaagttccatccatagcatatttccagaatatccctagatgatgaatttaaacatgccttctcagaaattaaatcttttgactttgaaccacaagttagcatttatttgttgaagagaagaatgtgtggtgatgtcttacctgaatgttggttgttactgatatattacaattttcaaggtgataagcttgagctattaaataataaaaagtattaaagtaaaaaaaaaaaaaaaa

SEQ ID NO: 404693 - DNA, 1000 bp, Homo Sapiens; identical to SEQ ID NO: 118690

SEQ ID NO: 404694 - DNA, 1000 bp, Homo Sapiens; identical to SEQ ID NO: 118691

SEQ ID NO: 404695 - DNA, 1000 bp, Homo Sapiens
gaggaaaacacagacttccatgagtttgggaactacgagagaaaagacagacagagtcaaatctacagcatatctctcacctcaggaactggaagatgtattttatcaatatgatgtaaagtctgaaatatacagctttggaatcgtcctctgggaaatcgccactggagatatcccgtttcaaggctgtaattctgagaagatccgcaagctggtggctgtgaagcggcagcaggagccactgggtgaagactgcccttcagagctgcgggagatcattgatgagtgccgggcccatgatccctctgtgcggccctctgtggatgaaatcttaaagaaactctccaccttttctaagtagtgtatcaaaatctaaaccaaggatccctggacaagaagctgggagaggcacaaactggacatctctctctctcatatccttcggcattgggttatctatgggagcaaggagtggcacgcttctctgttacaaatagaaaacgattccagtcatacaggacacatcccactccaaatgatatttccaaaaacatacctctgacagtaactttgatagatggtttgtcaaatgtatctttctgggtatccacacctcttggcaatgaaatttgcagctcctcccttccataaatgaagtctctttccccaccatttgaatctgggctggcactgtgacttgatttgatcaatagaatgtggaagaagtgactgtatgccagttccaagcctaggtttcaagaggccttataaatgtctgttggaaccttacccagccatgaacatgttgagtgagcatgctggagaatgagagaccacatgaagcagaaacatgctttcctagctgaagtcatactagcccaaccaacatggcagctaacacatgaatgaggccaatcaagaccagaagaaccactcaagcagatcccagcccaaattgcccattcacacaatcaggagctaaataaattactgttgtctt

SEQ ID NO: 404696 - DNA, 1000 bp, Homo Sapiens; identical to SEQ ID NO: 224221

SEQ ID NO: 404697 - DNA, 1000 bp, Homo Sapiens; identical to SEQ ID NO: 292855

SEQ ID NO: 404698 - DNA, 1000 bp, Homo Sapiens; identical to SEQ ID NO: 292856

SEQ ID NO: 404699 - DNA, 1000 bp, Homo Sapiens; identical to SEQ ID NO: 292857

SEQ ID NO: 404700 - DNA, 1000 bp, Homo Sapiens; identical to SEQ ID NO: 292858

SEQ ID NO: 404701 - DNA, 1000 bp, Homo Sapiens; identical to SEQ ID NO: 224222

SEQ ID NO: 404702 - DNA, 1000 bp, Homo Sapiens; identical to SEQ ID NO: 292859

SEQ ID NO: 404703 - DNA, 1000 bp, Homo Sapiens
ccaaaaccttacagccaaccaaacagccgaactgctcaagcctgttcaaactcaaacccctctccaacaaaactgccacagacgacacaggcggaaaggatccccggaacgtataacatgatgaagaaactgacaggacagctctgtatttcatatttatacataaaggacttgaggagagaaaaaacactttaatatgtctctttttttagggaaaaagcacacttataaaaaatattctctgaacaacacataatacctatctaacaatatcttagcgtcgtgtacactaaaattaagacttttgtatttgttacctctgacagagaatgtcattctggcgtagaagttagtttttacgtttgcatacaaattttaagactttcattcctgctcctttctagttttagaactttttctgctgacctacccggtcagttgttaggaagcttagcatgaggtgggctctttaacaccattctgagaactgttgatttagagaggaaggtgaggattttgccttggagaagagactgataaaaccaagtgtttattcttgtaaatcgtctccaagacctacacagtcagctaagcatgaatagcttacatctcatgccagccttcaacacccttgaaaaatatccttttctgtcttgctcattttcttcttataccataagttttatttggtatcattttctcttctcacaaaatgttcctattatatagcattttctgtattcacctcaacattacttctaactatgataacatcttttgaaaacatacaaatttttcagaatggatactaagtggaaatagcagtctttcattttcacctttcaactgaatccttttttcccctaccgaattggtatttaaaaaaaatcacagtcagcaatatgtatcctttctctcaagctcagaaaaattatgtagccacctgctaatatccagcaagctatcaagtctgcattttgggaataaagtagtttttcac

SEQ ID NO: 404704 - DNA, 1000 bp, Homo Sapiens; identical to SEQ ID NO: 292862

SEQ ID NO: 404705 - DNA, 1000 bp, Homo Sapiens
ggggcctcagacatagatctcatccccacggaaggggtgaaggcctcgtccacctccgatccaccagctctgcctgactccactgaagcaaaaccacacatcactgaggtcacagcctctgccgagaccctgtcctcagccctctctgttgagacaccaagttacgtcaaagtctcaggagcagctccggtctccatagaggctgggtcagcagtgggcaaaacaacttcctttgctgggagctctgcttcctcctacagcccctcggaagccgccctcaagaacttcaccccttcagagacaccgaccatggacatcgcaaccaaggggcccttccccaccagcagggaccctcttccttctgtccctccgactacaaccaacagcagccgagggacgaacagcaccttagccaagatcacaacctcagcgaagaccacgatgaagcccccaacagccacgcccacgactgcccggacgaggccgaccacagacgtgagtgcaggtgaaaatggaggtttcctcctcctgcggctgagtgtggcttccccggaagacctcactgaccccagagtggcagaaaggctgatgcagcagctccaccgggaactccacgcccacgcgcctcacttccaggtctccttactgcgtgtcaggagaggctaacggacatcagctgcagccaggcatgtcccgtatgccaaaagagggtgctgcccctagcctgggcccccaccgacagactgcagctgcgttactgtgctgagaggtacccagaaggttcccatgaagggcagcatgtccaagcccctaaccccagatgtggcaacaggaccctcgctcacatccaccggagtgtatgtatggggaggggcttcacctgttcccagaggtgtccttggactcaccttggcacatgttctgtgtttcagtaaagagagacctgatcacccatctgtgtgcttccatcctgcattaaaattcactcagtgtggcccag

SEQ ID NO: 404706 - DNA, 1000 bp, Homo Sapiens; identical to SEQ ID NO: 292865

SEQ ID NO: 404707 - DNA, 1000 bp, Homo Sapiens
gcatgttgatctttccataaatgacacatcagttactgttatatggtatggcaaaaaatggccatgcctagcatcattgtcaaccttagatttatgtggcatgacaccagtttttaccgactggtataaaactcccaccaaacatagactccgatggcattctttaattgcaaagtacaatctgagtcatttgaccatatctaccatgattggctgtgacagactcattcggatcttctgcctgcaccctggcctcctggtgggagtgtggaagaaggaggaagaactggcttttgttatggcaaatcttcattttcatcaccttgtggagaggagcacattaggctcggctactatcccctatgaactgcctccacatagcccctttttggatgatagccccgagtatggactgcacggctaccaactccatgttgatctgcacagcggtggggttttctacctatgtggtacatttcgcaatctcttcaccaagagaggaaatattgaaaatggacatgtgaagctcattgttatacatttaaaaaataacagagaacacctacctcttattggaaaagttggcctctcgtggaaaactgatatttttgatggctgtataaagagttgttccatgatggacgtaactcttttggatgaacatgggaaacccttttggtgtttcagttccccggtgtgcctgagatcgcctgccacaccctctgacagctctagcttcttgggacagacatacaacgtggactacgttgatgcggaaggaagagtgcacgtggagctggtgtggatcagagagaccgaagaataccttattgtcaacctggtcctttatcttagtatcgcaaaaatcaaccattggtttgggactgaatattagcagtaggtggcaaattattgttgttatttagttgtttatttttgactggctttgttcttggtgttgaaaattaaaataaagcaaatctgcaaaaaaaaaaaaaaa

SEQ ID NO: 404708 - DNA, 1000 bp, Homo Sapiens; identical to SEQ ID NO: 292866

SEQ ID NO: 404709 - DNA, 1000 bp, Homo Sapiens; identical to SEQ ID NO: 292867

SEQ ID NO: 404710 - DNA, 1000 bp, Homo Sapiens; identical to SEQ ID NO: 224223

SEQ ID NO: 404711 - DNA, 1000 bp, Homo Sapiens; identical to SEQ ID NO: 224225

SEQ ID NO: 404712 - DNA, 1000 bp, Homo Sapiens; identical to SEQ ID NO: 224226

SEQ ID NO: 404713 - DNA, 1000 bp, Homo Sapiens; identical to SEQ ID NO: 118694

SEQ ID NO: 404714 - DNA, 1000 bp, Homo Sapiens; identical to SEQ ID NO: 224227

SEQ ID NO: 404715 - DNA, 1000 bp, Homo Sapiens; identical to SEQ ID NO: 118695

SEQ ID NO: 404716 - DNA, 1000 bp, Homo Sapiens; identical to SEQ ID NO: 292874

SEQ ID NO: 404717 - DNA, 1000 bp, Homo Sapiens; identical to SEQ ID NO: 292875

SEQ ID NO: 404718 - DNA, 1000 bp, Homo Sapiens
tggtcattttgccagagattgccctgtcaagcctcatcaggccctgcaggcgggaaacatccaggcctgccagtaagggggaccccacgtgggccaatctacaaatatgcgtccccctctcttccaatatccatgtctcatacactatggcttactgttgaaatccaactgggaagaagataattctttgagcaagcaatggtagattcaggctcctacagaaacagcattgatcatactgtggttcttcgagagaagctgcccatccgcagtaatatcttccctctgatgctggaaactgtcgacggccatccacttattaatggacccataactaaggaaacatcacctgtccaagttcaaattggaaaccatgttgaagagctccagtttgacattattcatgcaccacgataccctctgattattggaatccattggcttgagacacatgacccaaacatagaatggagtacccgcactgtgtcctttctatcacgttattgtcactacaattgcttcaggcacaggtggaatagaagaaatcgtgatgaaataatttctgggtagatcctgtgtcctagtgactgttcctggcaacctgtcttctgttacctcagctgtcatcagcatttgctgctccctgaatcttctactgaacatcttgctatgtactaaggctacctgtacaacgactctgcctcttagatgatagactgaacctgatgactttgagctgcttttttttttttcactaactctgcatgcctctatctcagaaccctgcatcctgcggaactgttttaattacaattatactaacaatacacatgagaatagatattagaaactaataatgaaaaagcatagctgttaaactgacttgatttttttcttatcaatattttctatatcacaaaaatggcaacatcttttacataaagaaaataagtttgtaagtgatatttcttaaaagaatcaataaatattagcaatttct

SEQ ID NO: 404719 - DNA, 1000 bp, Homo Sapiens; identical to SEQ ID NO: 224231

SEQ ID NO: 404720 - DNA, 1000 bp, Homo Sapiens; identical to SEQ ID NO: 118696

SEQ ID NO: 404721 - DNA, 1000 bp, Homo Sapiens
tgctggcaggctgtgtggcccgtgtggcagccctgaagatcagctcaaacgaacagcccccggccgcatggcctccaaggcaagacatgggcagtgggctctttgggcagcgctgggccaggggccctgacatgctggagcagaaacagtccagcagctcccccagcatgaccaccatccatggcctaccctactcagccagcacacaggaccagaggtgtcgagatcgtgtccaggacctgagctggctcagggtggagcccaccgggctaggtgtccaggcctgggcctctgtggaggaccagcccttgcagctcagcacagaggctgtggagcaggtggcacacggcagccagctggactctgagccccgctcagcccctgctgcccggtggagttcccagggccaccatccagaaagcctgggcctcactttgaacagccagcaggaagggggggtctctgcaagtgccccagaatgccgctgcagcctcctggcccgtgagggcctcctctgtggccagccagaagtgggggcctctgggccagccatggctgagccccatctgtaggacaggctcacatgcaccaggaactgcatgtgtcttcatgaccactttcaggagagcctaggactcaaatctctatcttttgtccctgatgtggggactgtgttgggggtggggggtggcaggactcaggcatgcagagggtagcatgttcatgtggaggcatccttgcctgaacccaccagctcaggcagcccaccgccaaagacagcgcgaagctgcaaccacctagctgctcctcatgcaggggctggagagaggggctagggcttgaaactgagggggagaaagagctgcacattgtaaatgggaagcagagagccaatgagtctgcctgggatgtgtgtgaatcccaaaagacgcaatcccaaatgccatagtcccaagtgttgagaatccaaaatattaaaattactatactctaaaatccg

SEQ ID NO: 404722 - DNA, 1000 bp, Homo Sapiens; identical to SEQ ID NO: 118698

SEQ ID NO: 404723 - DNA, 1000 bp, Homo Sapiens; identical to SEQ ID NO: 292880

SEQ ID NO: 404724 - DNA, 1000 bp, Homo Sapiens; identical to SEQ ID NO: 224234

SEQ ID NO: 404725 - DNA, 1000 bp, Homo Sapiens; identical to SEQ ID NO: 292882

SEQ ID NO: 404726 - DNA, 1000 bp, Homo Sapiens
gaagcacaggaaaaaaaagaaaaatgaagaaataaaaacacgagttcatcagtaaagaggtaccctggcagcataaatattatgataagctaaaagctggaatcatctggaaaaataaataagactcctcatgtccttttcggtccataaccagaagggcagcaaaaggcctttgccactggaacctcttctttttctccaagtcccacgtagcaattacctgcactttcaagaagagaaacaacgactacacctaaagaaattccttcttgataggatgtttctagtggccaagatacaagcaaatgtagaaagaaaagatgttgctgactactatgaacaaatgtttcagtcagttttgaaacatcacctaggagaagcagtgacaggattgctgctcatctatcccacttccattctgcatatcctcgagtcctccagcgacactctctacaaagttcttttagattatattggccatgtcaaagatgaaacagtattttttattcaacaaatgaaaattatagtcatttctcataacattccaatgaggctttttatgcaatggcatgtttcagtgataaaagttccagttatgtatctcgacgatgtgacacagtcacagtccctaaaggaggtcatcacagattttctcacacaaactcataaactgtcactctacctttgccagactatgaaagtaggcactaaaggaccaggcgataacttacaccaagttgcacctgacctactcctcccagaacaaatcataaagtacttgtgcaaatccgaagaattcatggacccggcaacatttataaacatgtataatagacccatacacatcactctggattctgaggtggtatggcctgctccttcacgtttctaggattgagagggataatgtgcccatgtctcttaaggagtttgtgctacttaaataaaaaaaacatttttaaagttaaaaaaaaaaaaaaaaaaaagaaaaaaaaaaaaa

SEQ ID NO: 404727 - DNA, 1000 bp, Homo Sapiens; identical to SEQ ID NO: 224235

SEQ ID NO: 404728 - DNA, 1000 bp, Homo Sapiens; identical to SEQ ID NO: 224236

SEQ ID NO: 404729 - DNA, 1000 bp, Homo Sapiens; identical to SEQ ID NO: 292885

SEQ ID NO: 404730 - DNA, 1000 bp, Homo Sapiens
aacctgggtgaccagtgaggcctactcttctccgtccattgtactatctgcccgtggtggggatggcagtaggatcatatttgatgacttccgagaagcatattattggcttcgtcataatactccagaggatgcgaaggtcatgtcctggtgggattatggctatcagattacagctatggcaaaccgaacaattttagtggacaataacacatggaataatacccatatttctcgagtagggcaggcaatggcgtccacagaggaaaaagcctatgagatcatgagggagctcgatgtcagctatgtgctggtcatttttggaggcctcactgggtattcctctgatgatatcaacaagtttctttggatggtccggattggagggagcacagatacaggcaaacatatcaaggagaatgactattatactccaactggggagttccgtgtggaccgtgaaggttctccagtgctgctcaactgcctcatgtacaagatgtgttactatcgctttggacaggtttacacagaagccaagcgtcctccaggctttgaccgtgtccgaaatgctgagattgggaataaagactttgagcttgatgtcctggaggaagcatataccacagaacattggctggtcaggatatacaaggtaaaggacctggataatcgaggcttgtcaaggacataaatgtcacgtccagctctgatatgcttcgcactgagcacatcacatttaggacgttgaagattttttttttttttttttttttaatatgcagtttgtaagaacaaaactggatggcatcagaattgtctggaagttttgtcttgggcagtatgggctgggccaaatgaaatgatttttataattctaaacaggttaccaaatgaaatgtcatggctttactttggtcaattaaaggggggaatttttttaaaaaaaaaaaaaaaaaaaaaaaaaaaaaaaaaaaaaaaaaaaaaaaaaaaaaaaaaa

SEQ ID NO: 404731 - DNA, 1000 bp, Homo Sapiens; identical to SEQ ID NO: 292887

SEQ ID NO: 404732 - DNA, 1000 bp, Homo Sapiens; identical to SEQ ID NO: 118699

SEQ ID NO: 404733 - DNA, 1000 bp, Homo Sapiens
gaacaaggccctgcgcgaggagaaccggatgctcagcaaggagaacaagatcctacaggtcttctgggaggagcacaaggcctcgctgggccgagaggagagccgggccccctcgccactgctgcacaaagacagcgcgtccctggaggtggtgaagaaggaccacgtcgccctgcaggtgccccgtggcaaggaggacagcaccctgcagctcctccgggaggagaatcgcgcgctgcagcagctgctggagcagaaacaggcctactgggcgcaggcagaggacacggccgcccctgccgaggaaagcaagcccgccccctcaccccacgaggagccctgcagccccgggctgctgcaggaccagggctccggcctctcctcccgcttcgaggagcccaaagggcctccggcccggcaggaggactccaaggagctgcgcgccctgcggaagatggtcagcaacatgtccgggccctccggggaggaggaggccaaggtgggcccgggcctgcccgacggctgccagcccctgcagctgctgagagagatgaggcaggcgctgcaggccctgctcaaggagaaccggctcctgcaggaggagaacaggaccctgcaggtgctacgggcagagcacaggggcttccaggaggagaacaaggccctgtgggagaacaacaagctgaagctgcagcagaagctggtcattgacaccgtgaccgaggtcaccgcgcgcatggaaatgctcatcgaggagctctacgccttcatgccggccaggagccaggaccccaagaagcctagcagggtctgaggcctcggccttgcaccgggacgccgagtttgggacaccgaacactgggcaaaagagaatcccctgccttcccttgtcgtcctcgccttccccagccagttcgtacctattgaaaagcagcgttagcagccttcctaaactcagagttttaataaaggtgtgaggaggctggggccagttgacacc

SEQ ID NO: 404734 - DNA, 1000 bp, Homo Sapiens; identical to SEQ ID NO: 292889

SEQ ID NO: 404735 - DNA, 1000 bp, Homo Sapiens
atccaaatcaatatctcttcctcgcagcgcgtactggcatcacatcactcgtcagaacagcgttggtgaaatctacagtttgcaaggtcatgggtttggttcgtcaaagatgtctcgtgcacagacatttcccagctacgccccagaacagagtgaagaggcccagcagccgttgtcgcggtccagcagctatggattcagctacagctccagcctcatccaatgacacacagagagccgctgttgactagagagacagtctgtcctggacccgtctgtggggtcattaccctctgcctcctggaagaccaattgcagtacaaattgaaatgggtcggctctagccccagtcccattggaaggttaaaaactggagttctgcttccttgattcagtggctaagtcctttatttattgaatttctttgggggaatctatgttttacataaatagaatccaaatcgtatgaacagttatttaaataaacaaaattctttgggtctgacagtaacagaaacctcagcactgggaaaagctgcccacactggggtatgcctgggtgatgggcacctctcactgacctcacagcgcagtccgcccatctgagcacagggtctgtccttagacataatggtgaccctccacaagctctgtggcttttaaagttctgacagggataaatacagtaagctctgcaaatgacatcgtagctgcatataaataaacccagtgacaattaaaggaacatgaaattcagaacacactattaagcagggccctgtagctctactcgtgtgtgtgtgtgcgtgtgtgtgtgtgtgtgtagacaaatggatattgctatatccatctatatataacaagtatatatcaaacatgtgctgggggtgacaggatatgctcacttaaattgttgaaaaccataatttggtgcattaaagttaagattgttatgttgaatagctatttttaaaatagtgctgtaaaaaaaaaaaaaaaa

SEQ ID NO: 404736 - DNA, 1000 bp, Homo Sapiens; identical to SEQ ID NO: 292890

SEQ ID NO: 404737 - DNA, 1000 bp, Homo Sapiens
gtaaagccattattaattttcatttctacacctagaatacacaagatttgccagatttccttctgtgccttagaaatcttaaatttactagtagtatcttctcctacccataagttattaattctcaacctcagatatcttcatttatgttaggattttaaattagcagcttctatgatttaagtcaatctaagtgcagtgagatgtgccattgtgaaaaataattagcacaattacccactgtagatagttaggcttatagtctcccatagttgagattgtaagcaaacatgtatcagcataatagcatgaatgctttgcagaaaaaaaaaagtgtctgactttattttattttgcgctagcttggaaaatgattgagatcaagttctttaacaaagaaggtcaattttattctgtatgagcaatatgattcaaataagttatacaaaacaacttttattttttctgcaagcttagataatattccattttttggttttctctttaaaaagaggatttagatgtgcaataatgcaaatatcagtagcttaatttaatattgcacgatatgctaatagacaattagacaatttggggtaacaaatcatagcagacgtgatctatagagtaactcagaaattgttttgtttctattagcatattttttgtaattaagattttccttttttaaaaaaatctaagctgaacgtgtgtatgtatgcttgcagcatttttgtagtaatacctacattttgtaagaatagttataaaaacatgatatatatatatgtaaagttcttaaaaaagttctcaaaggtagttatattttcttatcttcctgtaattaggtattgatatataaacattattatgaatacctctcaaaatagattgtaatgtaatatttttctcacccattttgctgaaggctaccaagttacataatgaatttacttaaaaaatatgacttggtgcctttttagtaaaaccatttccaagc

SEQ ID NO: 404738 - DNA, 1000 bp, Homo Sapiens
tgacaagaaaagcccagaagattcacaggcagctgaaatgcctataggcagtatgacagcctccaacagaaaatgtaaagccattagcttgttagcaatcatgattctggttggggacagcctgcataattttgcagatggcctagccataggagcagccttctcatcatcatccgagtcaggagtgaccactacgattgctatcttgtgtcatgaaatcccacatgaaatgggagactttgccgtgctcttaagctctggactttctatgaagactgccatcctgatgaattttataagctccctaactgccttcatgggattatacattggcctttccgtgtcagctgatccatgtgttcaagactggatcttcacagtcactgctgggatgttcttatatttatccttggttgaaatgcttcctgaaatgactcatgttcaaacacaacgaccctggatgatgtttctcctgcaaaactttggattgatcctaggttggctttctctcctgctcttggctatatatgagcaaaatattaaaatataagtgaggatcttcaacatctttcaaaaatgcatttatatagtcttactttgtttctttcattgcactctataatgatttttaaattaagaattttttatcttaggcaaagtgtgtctctttcaattcattaacttattaattttataatgcagttttatttttggaaacatataaatatcagactgtccttaattgaaattttgtctttggtttccaacaccatgatgaagctcttgctttttaaaaagtagttagtaaattctgcatgaattttagtaaactttaaaaaatagattttttccctaagaaagaatgtttgtagaatttaaagtggacagatgcctgttggggtaaaatcaactgcaactttttgatgttaatttttttccctgtgcaattataaactataagcaagttaagtgacaagcaaatgtaataaagactagtttt

SEQ ID NO: 404739 - DNA, 1000 bp, Homo Sapiens; identical to SEQ ID NO: 292891

SEQ ID NO: 404740 - DNA, 1000 bp, Homo Sapiens; identical to SEQ ID NO: 118700

SEQ ID NO: 404741 - DNA, 1000 bp, Homo Sapiens; identical to SEQ ID NO: 224237

SEQ ID NO: 404742 - DNA, 1000 bp, Homo Sapiens; identical to SEQ ID NO: 292893

SEQ ID NO: 404743 - DNA, 1000 bp, Homo Sapiens
accagctgtgagctgcaaggcagtggccagagcctcgccctcctgactcttcctgcaggtggctcaggaaggattcagcctggccacttggctaggactctgccagcacccatctgagactgacctcttccgggcctttggacactatgaccttgatgctgcccttcaggcaggaaacagggctggtgcctttcttcacctgcatggccagcttccttccctggcagtggagagggcagccaacaggttctaatgtcagagccatcctttaccaggtgggcctgcttgtccctgtcttgcctgccacatcactctactttttggaaggccatggctgattaaagaagttcttgtagtttcccaagcaaagtggaatctagaaacagtgaaaaaagttcagataactttgaactgcattcaagaagtacacttctttcccattgtccgtggctcttggagtctccgtgatgccaggctagagtctgattatataataattcaaaatggtaactcccaaggtaatgctttcttccatttcatcaggttcttttatccccactgcaccccctccccttctcccttgcctatctggatggcttctcagaagctcggccctagtcctccctgccttggcggggccagagcccactactgctgaggcagcactgctctcgtcagctgtgttgcctttaccaagtgtcttcagagggttatgagttagagtagctggcctggggagagggtgcctccctgggtttgatctttagggtctgactttctgcagagaagatgttttacagatgtgtcaaagctgatgtaatgtggttgggggaggaaatccagactcaaagtgtttgtcagctgggtgtacaactgcctatgtgatcctctgtcttaaaatgatttctgtctgtgctgcgaaacaaagacaaggtgaggtgtttttcttttttgtaataatataaagctgtgtgtttctgaaaaaaaaaaaaaaaaaaaa

SEQ ID NO: 404744 - DNA, 1000 bp, Homo Sapiens; identical to SEQ ID NO: 118701

SEQ ID NO: 404745 - DNA, 1000 bp, Homo Sapiens; identical to SEQ ID NO: 118702

SEQ ID NO: 404746 - DNA, 1000 bp, Homo Sapiens; identical to SEQ ID NO: 224241

SEQ ID NO: 404747 - DNA, 1000 bp, Homo Sapiens; identical to SEQ ID NO: 118703

SEQ ID NO: 404748 - DNA, 1000 bp, Homo Sapiens; identical to SEQ ID NO: 292897

SEQ ID NO: 404749 - DNA, 1000 bp, Homo Sapiens; identical to SEQ ID NO: 224243

SEQ ID NO: 404750 - DNA, 1000 bp, Homo Sapiens; identical to SEQ ID NO: 118704

SEQ ID NO: 404751 - DNA, 1000 bp, Homo Sapiens
gataagcttcccggcccaagagattgggtgcagattctacaggatcaaattaaactggccagaagaaggttaaaaagaggctcagcagagatcgcggacagtgatgaaagactggacggcattgctctaccaccaacaggtgcttgtggtgggccctgcactgttctgccgggtgggagtgcagcggtgaccctagtcttgcagagctctcctcagacaatgtcacaagaaaagggacagatggcagaaccctgggaggagcagcatctcgtgctcctgaacaaccttaccagagacagagctgaaacaggagctttgtcccaaaccagccaagacttcaagcaccattcattcctcataactcaggtctcagctacacttcatcatcagagagggattcgcaactttcccgcgccaggctcagccaagtctcttacccttcacatctcttgcctctctctctgaaattatcttgcttatttatgtgtgtgtgtatcacccatctttccactggaatctgagccttgtgatgtcaggctgttaagatttcaggccctggtgaaaacatgttcaggatgccctctctcccctttgcccagcaagagtggactgattaaagttggacctgaggtttccatgaatatgcaaccgagtcattctgacgacagtgagtcctggcctcccagtgctgccagttaccagaagtgactccccttctcccatcagcccaaacccagagcctttatcacagaacccaagattgagaggagggtcaggctggttggacagtggccttatcatgggatggatggatcaggagccttttacagcgctctcctttccgctgcatcccattgtcttagatcacgtggacttgccttttcccctaataccgccccctcagtgctcttctataattggagaaattgtgtcaatagatcgaccaaagagatgcaggttgtactccatgagaatttaataaacgctagcgattcaaagc

SEQ ID NO: 404752 - DNA, 1000 bp, Homo Sapiens; identical to SEQ ID NO: 292900

SEQ ID NO: 404753 - DNA, 1000 bp, Homo Sapiens; identical to SEQ ID NO: 224244

SEQ ID NO: 404754 - DNA, 1000 bp, Homo Sapiens; identical to SEQ ID NO: 224245

SEQ ID NO: 404755 - DNA, 1000 bp, Homo Sapiens; identical to SEQ ID NO: 118705

SEQ ID NO: 404756 - DNA, 1000 bp, Homo Sapiens
cttgatgagggctgctcccacttcatccgcaggattccagccgcagctaccccacacccgagctgtccctagtcgcccaccgcggccggacaaagccccagcagccaaggtgctccgtggggagggtttcttgggtttcttgaagccagtatttcccatagtatcttacgtcccagcagaggcctccactgtgcccggaccagcggcccactcagtgagtcgagtgtgcacctggcacccctctttctggaaatccacgaacaatgggctcccagcagaggactgaggctgagcaggccacttccctggagctgaccccacagctgtgtaggtacagggtggccgtgaacacttagggctctctcgggctgtgcgcttcttgttcactgcaaggagcagggtgttggctcctgaccaagccctgtcactgctgcccagccacacgtggggccccttcacccacccctgaccacctcatgcaggtgaagccactgtggaaacagcctggcagtcccttgaaaaatgaagtcataaaccccagcaattgcactcctgggcctctgacagagcttgcacgtcccctccaaagctcgtgttaagctgtgagccccagtgccggaggtggggcctggtgtgtttgggttctgggggtggatccctcatggctgggtgccatgaacccactcaccacagtgagttctcacgagatctggttgttgagaagtgtgtcatacctcccccacaactctctgtcttttgttccggctctggcaatgtaacaagcctgctcctccttcgccttctgccatgactgtaagctttctgagggctgaccagaagcccagcagatgccagcaccatgcttcctatacagcctgcagaaccgtgagccagctaaacctctcctcataaatcaccgagccccaggtttatctttacagcaatgcaagacctgactaatacagcaccagctccccaaaataaaaagaaatattcaaac

SEQ ID NO: 404757 - DNA, 1000 bp, Homo Sapiens; identical to SEQ ID NO: 292904

SEQ ID NO: 404758 - DNA, 1000 bp, Homo Sapiens
cctttcatcacttacaactattacgtgacctatgattttgtgaaagatgaagaaggcgaaatgaatgagtccgcgggcgtcctggccgagatcgtcaagccctctcccagcttagaattattagttgaggaatctcctgaagaggtcgtggaagacgtcatcgaagacattgttgaagaggttactgaagaggtcgaagggtctctggagtctgaggtggaggagtcaggagagtcggagctgtctgtcatctcggggccttcgaccatcttgcagatgccgagggcctctgcagaagagctggccaagttgaggctgcgtatagatccccggctctgcccgtccccagggactgtcctcttcagcactgcccacaagccctgggctgaggtcatcccctgcagttacgagatgcagcactctctcagggacctggtcccactgaaggccttcctgctggcggggaccaccgtgaccatcgtggaggagaagattctctcctggcctgtggtgctacctgctgttgacagtcccctgtctgccaagaaaggaaagggggagaaagacaagaaagggaaggagaaagacaggacggggaaaggagagaaagagccggccaaggagtggaaggtgctgaagaagaagaaagagccgcccaaggagctccggcagaacccccccatcctccaggtgctgggccggggcctggtgatcctggagcccctgctcgccggggagcccctggtgtccaccgtgtgcaacttcggcgtggtccgcacattgacatctgacaggctgacgttggccagggattcaaagaagattaagaaagttgccaaaaaagaaaagccgaaagccgtgattccgatctacgaaggcgattaccaccctgagcccctgaccgtagaggtgcagatccagctgaaccagtgccgctcggcggaggaggctctgcgcatgttcgccgtgtagggcgtgggcagtaaaggctgttcccagc

SEQ ID NO: 404759 - DNA, 1000 bp, Homo Sapiens
gggtgctgccccagcgccccaggagggggtcgatctcagaggaggagcaattttcagaggccacagaggaggctgaggagggagagcacaggactccctgcagaaggagggctggttgtcagagaaaggggcagatttctggagaggaagcctccgatgagggagaagtgcagggccagagccaggggagcagccccagcttcaacaacctccgaaggcgacaatggaggaagacaagggccaaggagctgcaggggccatgggacctggagaagctgcacaggcagctacagagagacctggactgtggcccccaaaagctgccctggaagactttgagggctgccttccaggcctccaagcggaatggaaaggcctatgcctcgggatacgatgaaactttcgtgtctgccaacctccctaatcgcaccttccacaaacgacaggaagccaccaggagcctgctgcaggcctgggagcggcagcggcaggaggagcggcagcaggccgagctgcggcgggcccggacacagcatgtacagcggcaggtggcccactgcctggcagcctacgcacccagagggagccggggccctggggcggcccagcgcaagctggaggagctgaggcgccaggagcgacagcgctttgctgagtaccaggcggagctgcaaggcatccagcacagggtgcaggcccggcccttcctgttccagcaggctatgcaggccaatgcccggctcaccgtcactcggcgcttctcccaggtgctgtcagcactggggctggatgaggagcagctgctgtctgaggcaggaaaggtggacagagagggcacccccaggaaacccaggagccacaggtcaatgggggtgagaatggagcactctcctcagaggcccccaaggacagaacccaccggcagccagcctgacaggcactacaaccccagcctggacccggagtgcagtccctgagataaaattaaaggctttatggc

SEQ ID NO: 404760 - DNA, 1000 bp, Homo Sapiens
gaaaagtggaaggtgaaatcttcaaattggagatgctgcttgaagatgttaaagagaaaatggatgaaagcaaatatacttcagctccttcccttcctgtgagttctccagttaccctggatgacttggcctccaccttctcttcactctcaaatgaggtaatacagcaatgtacagtctaattttgtgccaggaaaaatggtgtttttgcatttatagactcctaattcatggattcactgaattccatttttaatatctcatgaaaatttaactttccaaagtcccatgaattatattattttaaatggaaccagcttttaaagattagaagctatttcaagtgttaatttttgaaacatctttatagtttaggatgtaacaatgctgtttaaatccattaaaccaccgaagagctatttcttccaaattaataagaaaatttttgtagatcatgcctggaagaaataattttttttcttcatagttttgtactcaccaggctggagtgtggtagcacgatctcagctcactgcaacctttgtctcccgggctcaagtgattctcctccctcagcctcccaagcagctgagattacaggtgcatgccaccactgcctggctaattttttatatttttggtagagatggggtttcaccatgttggccaggctggtctcaaactcctgacctcaagtgatccgcccgcttggccttccaaagtgttgggattacaggcatgagccacctgaaaataaagaatagcacactcagtgaaataattatttcccatgaatccacttctgcattttccttctctcaagttaaattcttttggatttctacttatgcaagattgggaattcaaattaaccaccactgtctttctatactttttgcctttgtagcctcaactatcagaacattcagactaaaatcaaaattctgagaaacagaatcatttaaataaataccttaaattgacaaaaaaaaaaaaaaaa

SEQ ID NO: 404761 - DNA, 1000 bp, Homo Sapiens; identical to SEQ ID NO: 224246

SEQ ID NO: 404762 - DNA, 958 bp, Homo Sapiens; identical to SEQ ID NO: 118706

SEQ ID NO: 404763 - DNA, 1000 bp, Homo Sapiens; identical to SEQ ID NO: 292906

SEQ ID NO: 404764 - DNA, 1000 bp, Homo Sapiens; identical to SEQ ID NO: 292907

SEQ ID NO: 404765 - DNA, 1000 bp, Homo Sapiens
gccagctagagataatccagctaaaagagaaagaaagattggcaaaaacggaacaagagacacttcttcaaataatagaaacagttaaagatgaaaaactcaaccttgaaacaacattacaagaatctactgctgccagacaaattatggaaagagaaattgagaatattcaaacctaccaatctactgccgaagagaattttctgcaagaaataaaaaatgcaaaatcagaagcaagtatttataagaatagcttgtcagaaattggcaaggaatgtgaaatgttatcaaaaatggtaatggaaaccaaaacagataatcagattctaaaagaagaactaaagaaacatagtcaagaaaatataaaatttgaaaacagcatcagtagacttactgaagacaaaatacttttagaaaattacgtaagaagcatagaaaatgaaagggataccttggaatttgagatgcggcatcttcaacgagaatatttaagtttaagtgataaaatttgtaatcagcataatgacccttcaaaaacaacttatatttcaagaagagagaaattccattttgacaactatactcacgaagatacttctagtcctcagagtaggcctttggcttcggatttgaaaggttatttcaaagttaaagacagaactctcaagcatcattaggattcctcaagattgctaagaaactcccttcgagaaatagccaatgttaattgtactgctaactgaactatgcatatctaactcatctcaaatgactcataatgaggcgctatatatttgctttaaaaattatgcacagaatggtttggtgcagataacttaagctttctcagctgggaatttcagaagatgggggagaacttctacaagggagggcaggtacctgtacatggaaggagctgagatgtctaaagtcacccacatttgtcatttgaaaaagtatatataaataaaagatactattttgaaaaaaaaaaaaaaaa

SEQ ID NO: 404766 - DNA, 1000 bp, Homo Sapiens; identical to SEQ ID NO: 224248

SEQ ID NO: 404767 - DNA, 1000 bp, Homo Sapiens
aaggaaatattgaccaggttgctgttgtggccatcaatgttctgttttttgtgactctatttatctttgccctttttgaaaccatcattactccattaacaatggatatgtatgcctggactcaagaacaagctgtgttatataatggcataatacttgctgctcttggggttgaagccgttgttattttcttaggagttaagttgctttccaaaaagattggcgagcgtgctattctactgggaggactcatcgttgtatgggttggcttctttatcttgttaccttggggaaatcaatttcccaaaatacagtgggaagatttgcacaataattcaatccctaataccacatttggggaaattattattggtctttggaagtctccaatggaagatgacaatgaaagaccaactggttgctcgattgaacaagcctggtgcctctacaccccggtgattcatctggcccagttccttacatcagctgtgctaataggattaggctatccagtctgcaatcttatgtcctatactctatattcaaaaattctaggaccaaaacctcagggtgtatacatgggctggttaacagcatctggaagtggagcccggattcttgggcctatgttcatcagccaagtgtatgctcactggggaccacgatgggcattcagcctggtgtgtggaataatagtgctcaccatcaccctcctgggagtggtttacaaaagactcattgctctttctgtaagatatgggaggattcaggaataaactagctaagactgtgatggaaactacttgctgtgtggcacttcctggtctaaagctctgctagacaattgcggtgagccagtctccaagaatcagactacagatattgcagattttgaagaacaagaacatatgttgaataacagagagaattctacatgtcattgtgaatagtaggttatataaaaacatactagatgataatttcaaaaaaaaaaaaaaaa

SEQ ID NO: 404768 - DNA, 980 bp, Homo Sapiens; identical to SEQ ID NO: 31364

SEQ ID NO: 404769 - DNA, 1000 bp, Homo Sapiens; identical to SEQ ID NO: 118707

SEQ ID NO: 404770 - DNA, 1000 bp, Homo Sapiens; identical to SEQ ID NO: 118708

SEQ ID NO: 404771 - DNA, 1000 bp, Homo Sapiens; identical to SEQ ID NO: 292910

SEQ ID NO: 404772 - DNA, 1000 bp, Homo Sapiens
gcaaacaaggaaatttcatgtgtggatatcaagccactgtcggcactgatttcagttggctgcgacctggataaaaagatcgtcatccagaacaaagtttccgcctgttccatgggcatcctggaccccttgaccctgcaagacaattacagcttcatcatcgagaaggaattctacgaccccggcttccaggggcagcagtcctccgaggacctgcacgtgttttactcctaccagcagctgggctgtcctctcctcgtctactatgacaccctatggaagcccgtggtggagctgtggcgaaaagacagtttccaggaggtcatcgacgccgagtatgtgttactggaggtgaacgggcagttctcatactcctattccctgacggcccagtcggccatgtgtacctcccagccgcagaactggaccaccatgataaaggaattcggggggcccttcttctggaacagagagaactatgtgagctgccacgaccccaacaacaatgcccctttgaggtggccagacgtccagtatcagatcttgggcggccggacagcaaaccagatcattttcggccacaatggcttttatgtcttctacatttcgatcgtggatccgtactacagctactgtcaactggagaccatctttagcatctacgtgtatggagcattccccgtgcagctggtctctgctggagtcgtcatcctactgatcatctccagcatcctggggtccgtttggctggcctacaagacccccaagctgctacgcacagcacgcggccgcaggatcaagaagtgtgcgacacagctgtgtaggagatgcaagacggtctgccagttcagggcctcagccacagccagggcaggcacagagcccccgggacgccaccgcactcctcacggaggcaggtctgaccactgaggccggtccacagggtcccaaccccttgtcttcaaataaagtataatgtaacataaaaaaaaaaaaaaaa

SEQ ID NO: 404773 - DNA, 1000 bp, Homo Sapiens; identical to SEQ ID NO: 292912

SEQ ID NO: 404774 - DNA, 1000 bp, Homo Sapiens; identical to SEQ ID NO: 224626

SEQ ID NO: 404775 - DNA, 1000 bp, Homo Sapiens; identical to SEQ ID NO: 118709

SEQ ID NO: 404776 - DNA, 1000 bp, Homo Sapiens
tcccctcgtatacttttatttacctggggaaggagcttttagggttggggggtggtttgctatctctttagctagcagaatagtgtgcctttgatcctcacacatcctgtattatggacacagtagccatgcttcacggggaggtcagagctggctaccagcagtcttgccctttactgagcttagtgtcatctttggatgctgtcatatgctgctttgagtgaaccagagaaacagccatttgcagcatgagaaagccccaaaagctctgggatttacctccactttagtaataatgaatattttttagcattagaatgtgttatgtcatttgaattaattttgactacactttggcttgggagaggaattattttaaatagacattggtactttttgaacttgatagctaaagattctaaaatgcatgttttatactaagttttaaccagtcaggaaaattttatgtaactagtgatagtttatttttttgtatgaattttgtttaggctgcaatgtttagcttttgttaactcctcactcttgctgtcttaagttcattactatgtttaatggcctacttgccaagatatttagcatgtaaaaagcagggttttgattaaaaaaaaaaaacggcttcatattgaagctgagacttacaataacaagttgagtggcaagcctggtatgctgtgtcttattgccagaatcttagtaaatgtaatgttttaaaagtttgttgtctttgtatattaataacaaattatgacaagttaagtttaaataagagttacattattgctctccctgtgtcatattttactaagattttgtgcctcatgtctactgctgaattgtttactaggaatgttaaaaggaattgataattcattttcattttacatttttatataatcaggtaacatgacatacaacttgatgtacaaaaaaaaaaaaaaaaaaaaaaaaaaaaaaaaaaaaaaaaaaaaaaaaaaaaaaa

SEQ ID NO: 404777 - DNA, 1000 bp, Homo Sapiens
aggggaagattggcaaagtgcccgtgaggttcctggtggactctggggcccaggtctctgtggtccacccaaacttgtgggaggaggtcactgatggcgatctggacaccctgcagccctttgagaatgtggtaaaggtggccaatggtgctgaaatgaagatcctgggtgtctgggatacagcggtgtccctaggcaagctgaagctgaaggcacagttcctagtggccaatgcgagtgccgaggaagccatcattggcactgatgtgctccaggaccacaatgctatcctggactttgagcaccgcacatgcaccctgaaagggaagaagtttcgccttctgcctgtgggagggtccctggaagatgagtttgacctggagctcatagaggaggacccctcctcagaagaagggcggcaggagctatcccactgagaagccaccttttctttaacctcctaaatattggtgggaagacccaccgctgtggggggggttgcatatcctcatgggggtcactgggcttggccagtctgcttatcaactcttgctcttctctcccctttgcctccctctgcaggggccttaatctgcccctggtaggggaggcttccactgaacaggcacaggtgagggagagcaggctggcttagagggacagggtccccatggtcatcaagctgctgttgatgacaaagactcaaaggctggaagagctcccaaggaagctagaaatgcttgtctttgaaagaactgtgggaccccttcagattccctgaggtatggcttggtcactctcaggtcctcaaagcctgtcttagttgggctgggtcctagctgcagggtctttgtgagggtcacagttgctctgggacacctccctgaagagcctttccacctgtacaatcgtattttctttctgtcatttgctttgaagcccattgtgccttatgccaataattcaattgctgcaaacaccaataaagattgattcatgg

SEQ ID NO: 404778 - DNA, 1000 bp, Homo Sapiens; identical to SEQ ID NO: 118710

SEQ ID NO: 404779 - DNA, 1000 bp, Homo Sapiens; identical to SEQ ID NO: 118711

SEQ ID NO: 404780 - DNA, 1000 bp, Homo Sapiens; identical to SEQ ID NO: 292917

SEQ ID NO: 404781 - DNA, 1000 bp, Homo Sapiens; identical to SEQ ID NO: 292918

SEQ ID NO: 404782 - DNA, 1000 bp, Homo Sapiens
cctaaagatgctgactggggagtctgaggtgtctacaaatgtcttcatgacctacttcaaacccctactgacctggctggtgacagaacatgcagcaaggggacatcttaggctggccagacttcagctgttcctttgaagaaaaagacacagacaaagtgacattcctgagtctgaagctggaccccaaccaggctaaatttgggtactgggtgctgttggccctgggctttgtcatgtctctggtggtgctggggctggcctgcaggctgcagtccctggaaaaacagtcactgactcaagacactgagatattcagcccactgcccaatgcctgcttcctgggcatagccatggaaccctgccaggctgctaaaggacagtggatgctgctgggcctctgccttgtcctgatgctgtgctcaatcagcctggccatctggattttcacacagtaaagcaggaagcctccaaggtaacccggctatgggactgcagtgcccaaggaatttctgctctggttagaaaaaggactctgcttcagtccacttctgctctggttagaaaaaggactctgcttcagtccacagtacataaaatgtactcagctatcagctctataagagctggatgcacatcaggagtgtgcccctctgtaacaactctagtcagcacaggccatggtgcacaaaagggacttggaaaatgatggaatgaccagcctgtccaacagaggggcagccaggacatctctgccctcttctcatcccccagccacagtggccaaagaggcccccactaggcactgtggctctgcatgacaaacacacatccagcccaggactctaagcctctcacctggactccagtaaaaaccttgctgagcctccttgtctatccttcctcccccacccaccattgtaaagtttatgtcaccagaatatttctttcatgtctaattgcttaagaacttggttgttcatcaattaaatctagatgt

SEQ ID NO: 404783 - DNA, 1000 bp, Homo Sapiens; identical to SEQ ID NO: 118712

SEQ ID NO: 404784 - DNA, 1000 bp, Homo Sapiens; identical to SEQ ID NO: 292920

SEQ ID NO: 404785 - DNA, 1000 bp, Homo Sapiens; identical to SEQ ID NO: 292921

SEQ ID NO: 404786 - DNA, 1000 bp, Homo Sapiens; identical to SEQ ID NO: 224255

SEQ ID NO: 404787 - DNA, 1000 bp, Homo Sapiens; identical to SEQ ID NO: 118713

SEQ ID NO: 404788 - DNA, 1000 bp, Homo Sapiens; identical to SEQ ID NO: 224256

SEQ ID NO: 404789 - DNA, 1000 bp, Homo Sapiens; identical to SEQ ID NO: 292926

SEQ ID NO: 404790 - DNA, 1000 bp, Homo Sapiens
agccaagtactcgtttccacaccaagactcagactttttgagccaaaaaaaagccacattcttacactgtccagcttgtaatggttaatgtaaaacttaccagatgaaccttgtgtttcagcttttttcttttccccttccccttgcttcagaggcctgatggcgtcggactattccgaagaagtggccacctccgaaaaattccccttctagaacatgtagacacttgagaaatgtttctgtttgaagaaaatagagggagaaacagaagtcttaagtctgtggcacactgtgtcttcagacagtttgaaggaatgaaaacctagagattttaaatcatgaattgaacatgtaaaattccagtaaaatgtaaaaacggaatatgcatcgctcttaaccttgagcatagtgacttagagacactgtgtatcagttttgccaataagactgtggacttcatgattgttgttgaacttctgggtcaaaactcaaatgaggtgaattttgcctttaaagggtttatttgctgagaaccaactttcaatagtcatgagagaatcaaataatagatgtccgtacaagtagcgcatatatttaaccatttagtttggggctctatattacttgcttgagccttaatcaatgtggttttattcaatggtttgttctttgaatggttgcaaaaactgtagataatcttactgaggactgtacaaacatgaaggtgtggtatcaaacttcaggttgaaactgtttgaagcattataaacattcatttcacaactagattgtataaggatattagctgtgatgagactcactgcattattttttttagtgaattttatgaaatccccgttccattcaacaggcacatgtttaaaagagctttgtcgttggtgttaatgggggaatgtgttccttcattgtatttgggccttttgtattgcactcttgatattaaattaaatgtgccttgaaataaaaaaaaaaaaaaaaa

SEQ ID NO: 404791 - DNA, 1000 bp, Homo Sapiens; identical to SEQ ID NO: 292927

SEQ ID NO: 404792 - DNA, 1000 bp, Homo Sapiens; identical to SEQ ID NO: 292928

SEQ ID NO: 404793 - DNA, 1000 bp, Homo Sapiens; identical to SEQ ID NO: 224258

SEQ ID NO: 404794 - DNA, 1000 bp, Homo Sapiens; identical to SEQ ID NO: 292930

SEQ ID NO: 404795 - DNA, 1000 bp, Homo Sapiens; identical to SEQ ID NO: 292931

SEQ ID NO: 404796 - DNA, 1000 bp, Homo Sapiens; identical to SEQ ID NO: 292932

SEQ ID NO: 404797 - DNA, 1000 bp, Homo Sapiens; identical to SEQ ID NO: 292933

SEQ ID NO: 404798 - DNA, 1000 bp, Homo Sapiens
agtaagggtgccgctgctggactcgcgcacctgcgacggcctctaccacgtgggcgcggacgtgccccaggctgagcgcattgtgctgcctgggagtctgtgtgccggctacccccagggccacaaggacgcctgccagggtgattctgggggacctctgacctgcctgcagtctgggagctgggtcctggtgggcgtggtgagctggggcaagggttgtgccctgcccaaccgtccaggggtctacaccagtgtggccacatatagcccctggattcaggctcgcgtcacttctaatgctagccggtgaggctgacctggagccagctgctggggtccctcagcctcctggttcatccaggcacctgcctataccccacatcccttctgcctcgaggccaagatgcctaaaaaagctaaaggccaccccaccccccacccaccaccttctggctcctctcctctttggggatcaccagctctgactccaccaaccctcatccaggaatctgccatgagtcccagggagtcacactccccactcccttcctggcttgtatttacttttcttggccctggccagggctgggcgcaaggcacgcagtgatgggcaaaccaattgctgcccatctggcctgtgtgcccatctttttctggagaaagtcagattcacagcatgacagagatttgacaccagggagatcctccatagctggctttgaggacacggggaccacagccatgagcggcctctaagagctgagagacagccggcagggaatcggaaccctcagacccacagccgcaaggcactggattctggcagcaccctgaaggagctgggaagtaagttcttccccagcctccagataagagccccgccggccaatcccttcatttcaacctaaagagaccctaagcagagaacctagctgagccactcctgacctacaaagttgtgacttaataaatgtgtgctttaagctgccaaaaaaaaaaa

SEQ ID NO: 404799 - DNA, 1000 bp, Homo Sapiens
ctggagtgtgctggcggctgcaggcctacggggcctggtccggctgctgcacgtgcgtgccggcttctgctgcggggtcatccgagcccacaagaaggccatcgccaccctgtgcttcagccccgcccacgagacccatctcttcacggcctcctatgacaagcggatcatcctctgggacatcggggtgcccaaccaggactacgaattccaggccagccagctgctcacactggacaccacctctatccccctgcgcctctgccctgtcgcctcctgcccggacgcccgcctgctggccggctgcgagggcggctgctgctgctgggacgtgcggctggaccagccccaaaagaggagggtgtgtgaagtggaattcgtcttctctgagggctccgaggcatctggacggagagtggatgggctggcatttgtgaatgaggacatcgtggcctccaaggggagcggcctgggcaccatctgcctgtggagctggaggcagacgtgggggggccggggcagccagtccacggtggcagtggtggtcctggcgcggctgcaatggtcgtccaccgagttggcctacttctcgctcagcgcctgccctgataaggggattgtgctctgtggggatgaggagggcaacgtgtggctctacgacgtcagcaacatcctgaagcagccacccctgctgccggcagccctgcaggcccccacacagatcctgaagtggccccagccctgggcccttggccaggtggtgaccaagaccatggtgaacacagtggtggccaatgcctccttcacctacctcaccgccctgacggactccaacatcgtagccatctgggggaggatgtagcctcacaccatcgcaaaggaccagggacacagctaactaacttattcagctttgggccgatgggggtgggggggggtctttcagtgaatatttttattaaactctactgtggacaaaaaaaaaaaaaaaaaaaaaaaa

SEQ ID NO: 404800 - DNA, 1000 bp, Homo Sapiens; identical to SEQ ID NO: 292934

SEQ ID NO: 404801 - DNA, 1000 bp, Homo Sapiens; identical to SEQ ID NO: 291833

SEQ ID NO: 404802 - DNA, 1000 bp, Homo Sapiens; identical to SEQ ID NO: 292936

SEQ ID NO: 404803 - DNA, 587 bp, Homo Sapiens; identical to SEQ ID NO: 292937

SEQ ID NO: 404804 - DNA, 1000 bp, Homo Sapiens; identical to SEQ ID NO: 118715

SEQ ID NO: 404805 - DNA, 1000 bp, Homo Sapiens; identical to SEQ ID NO: 118716

SEQ ID NO: 404806 - DNA, 1000 bp, Homo Sapiens; identical to SEQ ID NO: 292941

SEQ ID NO: 404807 - DNA, 1000 bp, Homo Sapiens
atgaagatgtcattgccctggtgagccaggtcttgccggtttatagtgtctttcacgtgtttgaggccatctgttgtgtctatggcggagttctgagaggaactgggaagcaggcctttggtgccgctgtgaatgccatcacatattacatcatcggcctaccactgggcatccttctgacctttgtggtcagaatgagaatcatgggcctctggctgggcatgctggcctgtgtcttcctggcaactgctgcctttgttgcttatactgcccggctggactggaagcttgctgcagaggaggctaagaaacattcaggccggcagcagcagcagagagcagagagcactgcaaccagacctgggcctgagaaagcagtcctatcttcagtggctacaggcagttcccctggcattaccttgacaacgtattcaaggtctgagtgccacgtggacttcttcaggactccagaggaggcccacgccctttcagctcctaccagcagactatcagtgaaacagctggtcatccgccgtggggctgctctgggggcggcgtcagccacactgatggtggggctcacggtcaggatcctagccaccaggcactagcaaagaagcttggaaatagaaagccaggagtggctgtccccagtatgcaaacacaccacggtctgccctgcaaaaacaccaatggggtctagtgcaggtggacactttgaaccactcctcaaaaaaagaactttggctgattccttgtggtgacactcagaggggtctgaacagacttgacaattctgttctggtcaagctggagttttcttctgtgacttggactgctctacagaagacatcagccaactgcacgagtcagagtccagggattgtcactattattaataatgtaaatggcttcaaatgggacactgcagataaaatcacaaaaaccactgttatattaaagattacacatttcctgggcaaaaaaaaaaaaaaaaaaa

SEQ ID NO: 404808 - DNA, 1000 bp, Homo Sapiens; identical to SEQ ID NO: 224260

SEQ ID NO: 404809 - DNA, 1000 bp, Homo Sapiens; identical to SEQ ID NO: 224261

SEQ ID NO: 404810 - DNA, 1000 bp, Homo Sapiens
ccagtgtcggtagagtgtgaggatggagaccggttcccggcgcaccatgtcatcgtcaccgtgcccttaggttttcttagggaacatttggacaccttctttgaccctcccctgccggctgagaaggcagaagcaatcaggaagataggctttgggaccaacaacaaaatcttcctggagtttgaggagcccttctgggagccagactgccagctgatccagctggtgtgggaggacacgtcgcccctggaggatgctgcccctgagctacaggacgcctggttccggaagctcattggctttgtggtcctgcctgcctttgcgtctgtccacgttctctgtgggttcattgccggacttgagtctgagttcatggagactctgtcggatgaagaagtacttctgtgtctcacccaagtgctccggagagtgacaggaaacccacggctccccgcgcccaagagcgtcctgcggtctcgctggcacagcgccccgtacactagggggtcctacagctacgtggccgtgggcagtactgggggcgacctggacctgctggctcagcccctccctgcagacggcgccggcgcccagctccagatcctgtttgcgggggaagccacacatcgcacgttttactccacgacgcacggggctctgctgtcgggatggagggaggccgaccgcctcctcagtctgtgggccccgcaggtgcagcagcccaggcccaggctctagctgggcccagcctactctgttccacccgtgtcgggggtaggctgggaccctcatttcttctgacagatttcagtctggcttgaaatttggggatgttaatgagggtcctctggtttttggtaaccagggccaccttctcagttcttgtgtctgttattggagtctggccagggttgacttgagctgagacaccagatgctcacggagatgctggacacataaagcaagttacagccacaaaaaaaaaaaaaaaaaaaaaaaa

SEQ ID NO: 404811 - DNA, 1000 bp, Homo Sapiens; identical to SEQ ID NO: 292945

SEQ ID NO: 404812 - DNA, 1000 bp, Homo Sapiens
cagatgatcagctctgtatctggttaagtcggttgctgggatgcaccctgcactagagctgaaaggaaatttgacctccaagcagccctgacaggttctgggcccgggccctccctttgtgctttgtctctgcagttcttgcgccctttataaggccatcctagtccctgctggctggcagggggctggatggggggcaggactaatactgagtgattgcagagtgctttataaatatcaccttattttatcgaaacccatctgtgaaactttcactgaggaaaaggccttgcagcggtagaagaggttgagtcaaggccgggcgcggtggctcacgcctgtaatcccagcactttgggaggccgaggcgggtggatcacgagatcaggagatcgagaccaccctggctaacacggtgaaaccccgtctctactaaaaaaatacaaaaagttagccgggcgtggtggtgggtgcctgtagtcccagctactcgggaggctgaggcaggagaatggtgcgaacccgggaggcggagcttgcagtgagcccagatggcgccactgcactccagcctgagtgacagagcgagactctgtctccaaaaaaaaaaaaagaagaggttgagtcagcagggacttgggttccctgtgtgtgaggggggcattcttgcctgccagctgctcccgaggtggccttgagaaggaagaagcaggatgacagagcctgagcagcggaaccagcctgcaccctcccttctggcccagcgacctgggctgtggctgagacaataatgaggccagaagtagccggagcctgtcaggaagggcaggggaggactgtggggtctgggctctgtcgctgtaaccatctgctcccaggctgtgtgcagaaaatggcatttacactattgtgcagctcattctcatgaaatactgccattgttgctaaataaagcttgtgtgctctgaatatagccaagcatagaaaaaaaaaaaaaaaa

SEQ ID NO: 404813 - DNA, 928 bp, Homo Sapiens; identical to SEQ ID NO: 292946

SEQ ID NO: 404814 - DNA, 1000 bp, Homo Sapiens; identical to SEQ ID NO: 292947

SEQ ID NO: 404815 - DNA, 1000 bp, Homo Sapiens; identical to SEQ ID NO: 118717

SEQ ID NO: 404816 - DNA, 1000 bp, Homo Sapiens
attacagatgactgcatctgtgaccttgctcggagcattgatttcaacaaagatggccacattgatatcaatgagttcctggaggccttccgccttgtggagaaatcctgcccagagggcgatgcctcagaatgcccacaagctacaaatgctaaagacagtggctgcagcagtccaggtgcacactaagaacagcctggtcttcatcacccaaagtgcctcataggcaatgctcagcttctcactagactatctcccttattctccatgtgaaactttatgctgaaaatttacctatccatatgcatcagaatcacctgtgtatttcagtgtggaggggtgggttggggtgttgtgtatgtatgtgttttaagtatatgagtgccccaaccccacctcacaatcttcacaaagtagaacttaggtatagtgttttcaaattctaaagtccacttcagttaagaaccactgacaatgtaactctctcattgttttcattttatacgtttttttgagatggagtttctctcttgttgcccaggctggagtgcattggcgcgatctcggctcaccgcaaagtccgcctcccaggcgattctcctgcctcagcctcctgagtagctgggattacaggcatgcaccaccacaccaggctaattttgtatttttagtagacacagggtttctccatgttggtcaggctggtcttgaactcccaacctcaggtgatccaccctcctcagcctcccaaagtgctgggattacaggcatgagccaccgcacccagcctattttatactttttatttattgtctttaacaatgtctattggtaaaggaaagttatttttaaaaattgtattgtaattccatgacccaagcatatggattttcttcattatttactttttcttacttgttactgtagtgtttatataattttatgttctacttttaaaaaaataaattaatatctaattgtaaaaaaaaaaaaaaaaaaa

SEQ ID NO: 404817 - DNA, 1000 bp, Homo Sapiens; identical to SEQ ID NO: 292949

SEQ ID NO: 404818 - DNA, 1000 bp, Homo Sapiens; identical to SEQ ID NO: 224263

SEQ ID NO: 404819 - DNA, 1000 bp, Homo Sapiens; identical to SEQ ID NO: 118719

SEQ ID NO: 404820 - DNA, 1000 bp, Homo Sapiens; identical to SEQ ID NO: 292953

SEQ ID NO: 404821 - DNA, 1000 bp, Homo Sapiens; identical to SEQ ID NO: 292954

SEQ ID NO: 404822 - DNA, 1000 bp, Homo Sapiens; identical to SEQ ID NO: 118721

SEQ ID NO: 404823 - DNA, 1000 bp, Homo Sapiens
tttagactcaggttgtagccagaagccatggactgagcaaagcctgggtccagaaagaggagaccaagtccccatgaaccccagccagagtctcctaccagatagaggcggctcagatccccagagacagaggcatctggagaactcagaggagcccccagagcggcggtcacgggttagttcagtaatcagggagaaacttcaggaggtcttacaagatctgggcctgggccctgaggcttccctctccaccgccccctcttgtcatcagcaaacctggaagaacagtgctgccttcagcccccaaaagatgcccctctccaaggagctgggctttagcccttacatggtgaggagaaggcgggcagctcagcgggcccgctcacactttcctggctctgcaccctcatctgtggggcatcgggcaaacaggactgttcctggggcacacagcaggctacatgtgcagaatggggacagccccagcctggccccacaaactactgattccagagtacgaagaccttcttccaggaagccttcactaccttcagatcctcaagacagaccaggtaccctggagggcagcaaacaaagccagacagagcccgagggggctagagggagcaaagcagcctttcttcgccagccttctggttctggccgggccccaagtcctgctgccccatgcctctccaaagcctcacctgacttgcctgaacagtggcagctgtggcccccagtgccctcaggctgtgcctccctgtcttctcaacacagctattttgatactgagtccagcagctcagatgagttcttctgccgctgccaccggccctactgtgaaatctgcttccagagctcttctgactctagtgacagtggcacatcagacactgaccctgagcctactggggggctggcttcctgggaaaagctgtgggcccgctccaagcctattgtgaacttcaaagatgacttgaaacccacgctggtgtga

SEQ ID NO: 404824 - DNA, 1000 bp, Homo Sapiens; identical to SEQ ID NO: 224267

SEQ ID NO: 404825 - DNA, 1000 bp, Homo Sapiens; identical to SEQ ID NO: 224268

SEQ ID NO: 404826 - DNA, 1000 bp, Homo Sapiens
tcatcttcttctgggttactgagcagcttcttttaaaatagcaacaccgaggaaggccccgaagcccagtcttgcacctcgtggtgtgaagtcgtttaatcctgcccgctaatgcgtaaggactttccaccgtgtgcaggactccgcgctgggcaggggctctcgcagggtttgaaccgacctccgcctcccctgcgggttcacaggcctgcgaggaagtcgcgtgaaggagattcgctactgtgtgaggctggcctgcgcggcgtgggcagtagctgtccggggctggggacagctttcggctccccaggccatcccgtcggggcatctgcggccaatctcgaaggtggagaggctcagggttggaacagacttcacggaaggggtcctagaagaggaaaggggtcgtgtttgcccttagagcagtctgggcgtgaagcggaaactttaaaccaccagaaactctggagagcttggagcacctgggaaggagcaaccagagtgggccggaggtagggaaggaaggcacccacggcgaatttgcccgctttgaccgcatttagggcggccgcttgtgcagccagccttctggaaggtaggctttgcgcttggtgaagagaagcccccacctccggatctgtgttccgccccagtccatttatcaggaggtgatcacacaagtcaagcttctctagttcccggtggaatgagacgccctggtggggtcttaaggttgaacgtttgaatactgtaaaaaagatgggacctgcctacaattaatctctcacactactgagcgaatgtgcgttgttttggacttccctaaattggcccaaatgcatagccaacacttgaattgcggtgtactaacaacatcattcagcaccaaaccaaaccattcttatttaaaccttgcttcctagcttatttatttcccaaacaacttgaaaacatttgttatactaaaatgtctacatcttactattaaaaaaaaaaaacc

SEQ ID NO: 404827 - DNA, 1000 bp, Homo Sapiens; identical to SEQ ID NO: 292957

SEQ ID NO: 404828 - DNA, 1000 bp, Homo Sapiens
tgtttgtatatgtgctaataattttctaatttcggaacacgatgatgttatgactattgatttaaaaatttcaaataataatttttgaaattatagatgaatgctttcatttgagtttcattctgtaattcagcagttctgggtgaaatacagatagcaaaacaaatcatgatgctgttacaaatgtattagttatccaataagtgttttaagtcaatttttttaaaatgatatgagtcttacaggtttcttccatctttaaaatgctcaaacatggattcagggactaaaaggatgaactgattagacattttctattaggagtttggtaaaatattgtaaaaatatcttcacctgtgttaggagtattatcagaaagaatggattctttaataaatatgtaaaacacagtagttttggaattgccttccttagtattgtggttttcacctagcttatattccaagatttacagaatagcttttaggataagatgttaggactttttttttttccccatgagaattcctttatttttggaggaaattattatctaattattgatctacttataagtaatcctagaatttttgccaaaagatcctgtcgttgcataatcaaacagttggtattctcgtgccgttgttcaaagtcatgtgtttctttcatttggtgctgaaaatttctgttcaatcattgacaaatatttattgaacacccactctgtgccatgtaaaactatgtcaggtgctggatatgttgatgaatgaaacagactctatccttatacaatttgagtcttgtgggctcagaagtaaattctgtgaaagctggacggatagtcgaattgagtgctcttagttttgccaatatttaacatgttgttcttatcaattttttaaaataaatgttaatgtacaaagttaaaaaaaaaaaaaaaaaaaaaaaaaaaaaaaaaaaaaaaaaaaaaaaaaaaaaaaaaaaaaaaaaaaaaaaaaaa

SEQ ID NO: 404829 - DNA, 1000 bp, Homo Sapiens; identical to SEQ ID NO: 292958

SEQ ID NO: 404830 - DNA, 1000 bp, Homo Sapiens; identical to SEQ ID NO: 224269

SEQ ID NO: 404831 - DNA, 1000 bp, Homo Sapiens
tgcttgtttgatgagcttgtcacattctaatccctctccccatcctgtttcaattttgggaaacttgtatctgctggtgtcagcaattctgattctgaaataggatcaggcttttactacaacagccttctctttctatttattgtgtcgactcgtggcttatgaataaaggcaggcaaagtttgcagaactgtcttaaggacatttattttttttccctttttaagtaattttacactttagtatctatttcagagtcatatttaaaactatttattagtgactacagtacatgagacaacaaggttactgagattacaattcttcaaaggttaatgataatgtggtttatactgtgccttaatagtaatgctatttaagatatttatttttaagttttactatgctgcactctaaagaaaggaactttagatgtgacactgtaaaattatgtattcatctcatggcataaattatttagtaagtctagatgtagcgtattaaatattaacctattcaactaaagatgttgacttggatttatttaaattcatatgtgcactgtataagagagtactcttacattaacacattttagtttagtttttagatttttttttaaacgatatattgctagtttcatgcttcctcctctgattttgcctgtgtagatttcattcattggtaattcattagtttaacactattatgtagtttttaaatgctgctttacatttttcttctgaaactgcaatacttgcaatttttattcttaaactaaattgaatactattttacactgtattggatttttatacttgaacaatttcatacaagggaagacaggttagcatttttatggactttctccattatcactggatttactttaagtattcccatactagacagtgttatgtaatgtagacatgactctcctgtgcaaattatttattcgttgtgtatattgctttataacatttcagatcttctaatctat

SEQ ID NO: 404832 - DNA, 1000 bp, Homo Sapiens; identical to SEQ ID NO: 118722

SEQ ID NO: 404833 - DNA, 1000 bp, Homo Sapiens; identical to SEQ ID NO: 292961

SEQ ID NO: 404834 - DNA, 1000 bp, Homo Sapiens; identical to SEQ ID NO: 224270

SEQ ID NO: 404835 - DNA, 1000 bp, Homo Sapiens; identical to SEQ ID NO: 118723

SEQ ID NO: 404836 - DNA, 1000 bp, Homo Sapiens; identical to SEQ ID NO: 224272

SEQ ID NO: 404837 - DNA, 1000 bp, Homo Sapiens
acaaaatcaaactggatagatataatagagttgtttgttagaattgtcttcccaggagatggaaaaagacgccatcacaataggattcatgctttagttttcagctatagaaatgtaataactttgccaaagtaattacactacatagagtggcaatcgttctattaaaagtaagacccagtaatgttaggatttgttctggacaatgaaggggatgaggtttaatcttatgacttgaatgccaggtctgaaatcttttcttcaagtgatatttttatgaaactacttaggctgtgtttcacactgggtatgatttctaacctcttataacctgtacagtaatagattatgaaggatgaattatttgaaagctattttgtattatttaggagaggagctcttcaattctgaattgtctgccacttacaagcagaagaaagtttttttctttcattattttagcaactatcaataaaacagtattagaaatgcctactcttcagagatgtaatgggaataaattgtaaagtacttttgatattctaagatgaaagatggtattacacagtcaataattcaatgcttcccacattatgaattttatcaaaattatgtagagagctattagttcattccagcaacaaaacaggcttatataaaaacaaaaacctcctgggtcatgccatcctacaccaaattcctgttaaacagaggcatgatttattccagtgaccttgctatttcttcataactgtaatatgtctaatgttagacattttaaattaacattctattagataaactgagaatttaggtctctcgcaccacccaggcacatactctatctttccccacaaatatccaaatatggtaatataattggattaatacgttcatatgactatataattgttcacagctgagccacttaggtgctataattataatttctttgatacacaaattttgttttattgtgattaaaattgcctgatttctt

SEQ ID NO: 404838 - DNA, 1000 bp, Homo Sapiens; identical to SEQ ID NO: 224273

SEQ ID NO: 404839 - DNA, 1000 bp, Homo Sapiens; identical to SEQ ID NO: 224274

SEQ ID NO: 404840 - DNA, 1000 bp, Homo Sapiens
tgatcccagcataggagctgagcataggagctcagatgagacttgccagttttgctgcagtaatgtcagcaaaagagtctctctctttctgactctatagacttaagtaagggtttacaggctttcattttaaggtatgactgatatttagagaacaagactaaaccaaggtcaaggggaaaacagttagactgtgaacctgcagaccactccactgcacccagtgtggccgtacacctgtgctgaacggccagagacttcctggtcaatactcccacagataaaagactgcaggatctgcttatacacaaatccatctttcgctgggaacccacaactcataacaactctcctaatgccaagtcatcaaggcctcttgaaagagaatcataaaaaacaaagaatttcaaacttggaaggaaacctaaagtttactggtgaggagcttgaactgagtagaagcaaagaatcatactccagatgagaaacgccccatgcactgagctgagactggaactctcctcttcttactctcagtccaacaacatcactcaaacaaccctattacttcagtagcaatgaactgtctctggattttattaagcatctcactagttccttttcttcagctgtatggcaccctgtcttcctgtacaccagaggctcctcagctgggtaaggtgagccaacgttaccaggagtatatgctgagaggccatttcaaagtctttcatagaaggctgtgcttgggcaagtagaacttttcatcatacagtcccagagatgtgaagttatcaaggtcagagaagaggaaaagagactcagagaaactgtgttctctagtctttcattcgggaacaaatggtgtcgtaccaaatggctaaaaagatcccaggcttactctgagaaacatctctctcttctgaattaaacttgcacagtggttaacagtgttttgtttggtgttgacaaagtaataaaacgttaccgtttctctttc

SEQ ID NO: 404841 - DNA, 1000 bp, Homo Sapiens
atagtgtgtaatggtatttatatttgtgagtgttacactttctctatagacttagagcagctttcaggtttatttcagtaataatgtctttctcaccttctcacattgtgaagtgtttacctgagtcagggagagagtttaatggggttatctgtcggggtgccatgaatgctgatgatggtctgcaggttgtgaacatcagccccattgctacaggggtggacaggtggaaaagctcagacttgacaaaccacctctgctagatagatgtgtcttggaaatccagaaattacagtgaatattttatggaatgccagtgagcagacagcatttcccactttcctatcttaccttgagggtaagacttaaaggtatttttttttcttgtaatttgaagcctaaattctttgattgtttgatgtatgcaatatgatgtaaggcacattttatacccctagtcagtggtttcccttggattcattctcctacttgattgaacccatttaagtcattttaggaaatggtggtttgctattaaaattaattggagagaatacttggtcattctgttagcaaaaagagactgatggagcatggtgttttatggattctgttacagggcttattcctccttgaataatgtgctttaaaaattattgtccattcgattacattttcttttattttcctacaatgtaagcacggttttagtcctgtaggtcagcctttctcacaaactcttttgaactaagatttgcctaggtgaataaattggggatgacggttgtctggagaagatataaggtccatttgtgaatactctgcactatgagaccaggagaaaaatcatctaagaaatcgttcactcttgctaaaaactgaactaaattttatatgatgcatttattcagcaatcataagtgctgtgcataactattgtacatatttttggacaatttcttagggttcagcttaaaaatataatttgcctactgcaact

SEQ ID NO: 404842 - DNA, 1000 bp, Homo Sapiens; identical to SEQ ID NO: 292965

SEQ ID NO: 404843 - DNA, 1000 bp, Homo Sapiens
tgtggctgggaataagcccagctgagcaggtggggatctcagccagcctcccagactgcacctcttctattgctctcctctgtccaccgttccaggcagcagcactcccacctggctgctctgatgtcctcgctccctccattcctgcctctcaccatgcacgcatccattgtccacacacacacaaccagataatcttctgaaagtgtaactcagatgatgcctccaaccctgtggctgcccttcacacttacaggcctaaccccagcaggacctgccagctgcttcatgaacaagtccctgcctcatgttaattgcaagcactcatttcactctccctgtgtgccaggcaatagcataagcactggaagaatacagatgttatagtgagtcctacaatagccctggaaggcaagagctgtttcctttccatttctacaatgagtcaattgcagatgatgctataacacttccagtgtttctgacacttccctgaagctatacctgctaccttcatgggccgagcttgcccttatgaggcccacaggtggcagtgggcagaggggaccccgctataccacctcgctgctgttccactgtctgctcccgtgttctgaccacagctctggtgccgtttctcaagcctgggcttcattcaacattttctatctagctcttcatggtgctgctcctgctatggttccacagggcttcttctcgcaggtcagctccttagagaggtctcccagattccccgtaaagcagccctgcagcctctgcctctctcagccgcatcaccctgttgcttccttcacagcatgtctcaccatctgcaaccatctttctgtttgtcgtcttgttgatttgctgcctccacactgtcagctccttgggaacagagattggtttgtttactgtgcatccctggtgcccagaacagggcatggcatattgttggtgcataataaatattgtggaaataaaaaaaaaaaaaaaaaaa

SEQ ID NO: 404844 - DNA, 1000 bp, Homo Sapiens
aagatgccaaagctcacgagtggatggtttgatgctgaagccaacattgttaacaccatctcagctcaaaagccctgaaggccacttaattctaccaaccttcaaccatcttgtcataagacacatcctcgacccaaagcagatattctgtgtagctgatgtgtgtacagattgcaaattcaattgcggaagcatagagaggcaccagaagaggcatcttatgagagtcagccaggactgggaacatttaataagatacagaaaccagatttgcttgagctgaatgctggatcgccatggcaaccttcctttggaggttatccaagtcaggtagtgacagcaaagctgagttaaaggtcacccctgctgagaaagatgggcattgataaaggattttaacaagacccagaggagctggtatttggaagctacctacagaggatcgacgaggccctaggaatgggtggcaaacaacatcaggaagaggggggcatcctgcaggggctcccaccagagccccgacctcgcccttcagatcgggagctccagccttcaccagaagctgagattggagctgttcgtaattgttcaatggaagggggaacaaccattttaaccaggcatccagatgggaaagaaatacacttatgccactctacacccaagacacgcattcctgaaaagttctgaacaagccaaatgcttgcaaatggaacgggcttgaccttctttatcactccagaaatgctttatttaatcttttttctattggagcatcactttaaaacctcaaagttgagaaggcttttctttgcatgatgctgaagccagaagccttcaaggaaacaacataaatataaatatctctgtggccagtctctacaaaaatacataaaaatgaattttaagcataataaaatgtgaaaaattgcccaactttcctcacaaatgagtaaaagccaatttaaatgataagaaatgaataaatgcatattaaagc

SEQ ID NO: 404845 - DNA, 1000 bp, Homo Sapiens; identical to SEQ ID NO: 224276

SEQ ID NO: 404846 - DNA, 1000 bp, Homo Sapiens; identical to SEQ ID NO: 224277

SEQ ID NO: 404847 - DNA, 1000 bp, Homo Sapiens; identical to SEQ ID NO: 292970

SEQ ID NO: 404848 - DNA, 1000 bp, Homo Sapiens; identical to SEQ ID NO: 292971

SEQ ID NO: 404849 - DNA, 1000 bp, Homo Sapiens; identical to SEQ ID NO: 292972

SEQ ID NO: 404850 - DNA, 1000 bp, Homo Sapiens; identical to SEQ ID NO: 224278

SEQ ID NO: 404851 - DNA, 1000 bp, Homo Sapiens; identical to SEQ ID NO: 118724

SEQ ID NO: 404852 - DNA, 1000 bp, Homo Sapiens; identical to SEQ ID NO: 117827

SEQ ID NO: 404853 - DNA, 1000 bp, Homo Sapiens; identical to SEQ ID NO: 292974

SEQ ID NO: 404854 - DNA, 1000 bp, Homo Sapiens
tttttgtctgtatgtcctagcactgttcaacaacaaatttttctagttcttgttaatttttatttgttatacaatggaagcacaatgttataaggaaaggtaattttaagctaacaaccagtgcacagcctcaggttttaaattacaaccacagttgaataataacctaaaaataaattttagtttgctaaaaatttacaaattttcattttgcagttccagagctgcttacctatgttggtttgccaaaaagaagtgtttaagatatgttttctgtataaatgaactaattctttatattaaattcctgtctatgcattttgtgaggtacaaactgatgaaacagtgagtgatagagaatttctgccatgcttttaactccaaagtgaaagtctctttctctggattattttaaaattttggcgtgtttaaccattaagaaatgctgtattcttaaatatgaaacagttaatctaaagtcttattatttcttctagtaaaataaaatattgttagattagttctcattaaatttattatatgctaaagaataaaactccagttagatttaaaaaaatcccatttacaagcattgcacctttaagaagaaaacaaatatgacagtatggtagctatacttgtgatgtctgacgcatgatggcctatggttttaaaaatagtattgtggaatatatttttgggtaataagaatggttgagtgcaacatcatgtattaatatcaaatgaaagacaagggtgctgtatctttgattatttatcaaaaaagtataaatcttttaaggaaaatgttagaattttaaagtttttttttgattgttgaagcatttatcttgttgatttcttacaaaagaaaaaggacgatgtcagtcaagcagcactttttcagaatatacagaacataaataatatgatgtggttgagtgttaacataataaatcatatacagtatgacattttaaggaaaaaaaaaaaaaaaaaa

SEQ ID NO: 404855 - DNA, 1000 bp, Homo Sapiens; identical to SEQ ID NO: 399509

SEQ ID NO: 404856 - DNA, 1000 bp, Homo Sapiens; identical to SEQ ID NO: 292975

SEQ ID NO: 404857 - DNA, 1000 bp, Homo Sapiens
ctataaaattgggaaaattacttcggccaaatcacttgtggggttattatctttttccggattgttacaaccatcactataagaaacccggttacaatggaagttgcttcaatgtagaaataaaaagaaatgatgatctcagctggttgtggaatgaaagcactgctctttacccatccatttatttgaacactcagcagtctcctgtagctgctacactctatgtgcgcaatcgagttcgggaagccatcagagtttccaaaatacctgatgcaaaaagtccacttccggtttttgcatatacccgcatagtttttactgatcaagttttgaaattcctttctcaagatgaacttgtgtatacatttggcgaaactgttgctctgggtgcttctggaattgtaatatggggaaccctcagtataatgcgaagtatgaaatcttgcttgctcctagacaattacatggagactatactgaatccttacataatcaacgtcacactagcagccaaaatgtgtagccaagtgctttgccaggagcaaggagtgtgtataaggaaaaactggaattcaagtgactatcttcacctcaacccagataattttgctattcaacttgagaaaggtggaaagttcacagtacgtggaaaaccgacacttgaagacctggagcaattttctgaaaaattttattgcagctgttatagcaccttgagttgtaaggagaaagctgatgtaaaagacactgatgctgttgatgtgtgtattgctgatggtgtctgtatagatgcttttctaaaacctcccatggagacagaagaacctcaaattttctacaatgcttcaccctccacactatctgccacaatgttcattgttagtattttgtttcttatcatttcttctgtagcgagtttgtaattgcgcaggttagctgaaatgaacaatatgtccatcttaaagtgtgctttttcgactaattaaatctttgaaaagaa

SEQ ID NO: 404858 - DNA, 1000 bp, Homo Sapiens; identical to SEQ ID NO: 118725

SEQ ID NO: 404859 - DNA, 1000 bp, Homo Sapiens; identical to SEQ ID NO: 118727

SEQ ID NO: 404860 - DNA, 1000 bp, Homo Sapiens; identical to SEQ ID NO: 292977

SEQ ID NO: 404861 - DNA, 1000 bp, Homo Sapiens; identical to SEQ ID NO: 292979

SEQ ID NO: 404862 - DNA, 1000 bp, Homo Sapiens; identical to SEQ ID NO: 118728

SEQ ID NO: 404863 - DNA, 1000 bp, Homo Sapiens; identical to SEQ ID NO: 292982

SEQ ID NO: 404864 - DNA, 1000 bp, Homo Sapiens; identical to SEQ ID NO: 224280

SEQ ID NO: 404865 - DNA, 1000 bp, Homo Sapiens; identical to SEQ ID NO: 224281

SEQ ID NO: 404866 - DNA, 1000 bp, Homo Sapiens; identical to SEQ ID NO: 292984

SEQ ID NO: 404867 - DNA, 1000 bp, Homo Sapiens
ccatttggatctggggcctgggggtgtgtgttggggggggaataaagtggctatgggcaggtctctccttccctactgctggctgccacatctacactatttccttggtgagatttttgtacaagaacctgttgttaacttaatggctgcctccctctcctgatctcttcaagccaggcctagccaagcctctggtgccaaagcctcgctttgggtggcccaaggtcaggggaaggggcaccagcctcctggctcctcctgtggcctgtcaacactctctggccaccccagatggcaggttctgaagtctagaaatagctgcccccatagcaatcacccaaactctgccagggctcccagtgagggtccagcctcagctcttaaagacaggctgggctctgagtagggggagaggcaccacctggggaagactgccttggagggcaaaggtgacatcgtggaagaccagttgggcccaagcctgggatagtagatggggagggagaacagaaaaatacccaggggttaagaccacagaaggctgaccgttctgtttaattatctgtaataatccttaaaaatcagcacacaaatccattccaggtagctttgccaccccacctgctgtggtggcatttgtccagatgccaccacccccctaagagtgggtcatcctgggggagcaaggcctgagaaaggaaaggaagggaaaggccccctagtgcctgccccacagccctgaggaaggcacatatttagcctggcctgagacaggacaggaaggggccacagggctgagtgcagggacaaaggggtcagggtcccaagtgtccgggcccccagctacccaccccatgtctgtttttggttttgtcattaaaaaaaataaagtgacaaatactggtggaaaaaaaaaaaaaaaaaaaaaaaaaaaaaaaaaaaaaaaaaaaaaaaaaaaaaaaaaaaaaaaaaaaaaaaaaaaaaaaaaaaaaaaaaaaaa

SEQ ID NO: 404868 - DNA, 1000 bp, Homo Sapiens
ttgtgcaaagaaagtgaggaaagggtcccggactcggaacagacaccaggaggaccatcatttgttttcactggcatcaaccaacccatcaccttccatggggccactgtggtgcagtacatccctcctccttatggttctccagagcctatggggataaataccagctacctgcagtctgtggtgagcccctgcggcctcataacctctggaggggcagcagccgccatgtcaagtcctcctcaatactacaccatctaccctcaagataactctgcatttgtggttgatgagggctgcctttctttcacggacggtggaaatcacaggcccaatcctgatgttgaccagctagaagagacacagctggaagaggaggcctgtgcctgcttctctcctcccccttatgaagaaatatactctctccctcgctagaggctattctgatataataacacaatgctcagctcagggagcaagtgtttccgtcattgttacctgacaaccgtggtgttctatgttgtaaccttcagaagttacagcagcgcccaggcagcctgacagagatcattcaaggggggaaaggggaagtgggaggtgcaatttctcagattggtaaaaattaggctgggctggggaaattctcctccggaacagtttcaaattccctcgggtaagaaatctcctgtataaggttcaggagcaggaatttcactttttcatccaccaccctcccccttctctgtaggaaggcattggtggctcaattttaaccccagcagccaatggaaaaatcacgacttctgagactttgggagtttccacagaggtgagagtcgggtgggaaggaagcagggaagagaaagcaggcccagctggagatttcctggtggctgtccttggccccaaagcagactcactaatcccaaacaactcagctgccatctggcctctctgaggactctgggtaccttaaagactaaaaaaaaaaaaaaaaaaa

SEQ ID NO: 404869 - DNA, 1000 bp, Homo Sapiens; identical to SEQ ID NO: 292985

SEQ ID NO: 404870 - DNA, 1000 bp, Homo Sapiens; identical to SEQ ID NO: 292987

SEQ ID NO: 404871 - DNA, 1000 bp, Homo Sapiens; identical to SEQ ID NO: 224282

SEQ ID NO: 404872 - DNA, 1000 bp, Homo Sapiens; identical to SEQ ID NO: 292988

SEQ ID NO: 404873 - DNA, 1000 bp, Homo Sapiens
tgaaatagatgactctcacaccagttctattacacaagattttctgtggttcacgaagctgtcttgtatgtgggaagatataaggtggctgaggcaaagcataccaatatcctcatcctcatccacagtgctgcaaactcggcagaagatgctcgcagcaacagcacagctacagaatttacttgggacacacaacttgggaagagtttactatgagcccattaaagatcgacatggaaacatactcatagtcaccatcagggaggtggagatgctttattcattttttaatggcaaatggatgcagatctcaaagctgcaaagccagagaaagtctctatcaacacctgaggagccaacagctttagacattctactgataaccatccaggatattctatcctatcacaaaaggagtcatcagcgtctctttcctggattatatctgggttacctaaagctctgtagctctgtggatcaaatcaaagttcttgttacccaaaagttgcccaacattctctgccacgtgaagatccgtgaaaacaataatatttctagagaggaatgggaatggatccaaaagctttctggctctgaatctatggaaagtgtggatcatacttctgactgccccatgcaattgttcttctacgagctccagatggcagtgaaagctctccttcagcagatcaatatacctctacaccaggcaaggaacttccgcctctacacacaggaggtgttggaaatgggtcacaatgtgtcctttcttctcctgctccctgcctcagacgacgtctgtacagccccaggacagaataatccttacaccccacactcagggtttcttaacctccctcttcagatgtttgaacttggtatagtagcttgtttcacctagaaatattaacccagcctccttataataaaatcacaaagttatatctgttcccccttgtcccagtggagggtcaataaatcacatgatggctttggcaac

SEQ ID NO: 404874 - DNA, 1000 bp, Homo Sapiens; identical to SEQ ID NO: 224284

SEQ ID NO: 404875 - DNA, 1000 bp, Homo Sapiens; identical to SEQ ID NO: 118730

SEQ ID NO: 404876 - DNA, 1000 bp, Homo Sapiens; identical to SEQ ID NO: 118731

SEQ ID NO: 404877 - DNA, 1000 bp, Homo Sapiens
gtcatttccaaaaagccacaatttcccatgctggatgtgatgaaagttaggcacacctttactgcattagcagcctttgacaatgacttcctcaaactgacaccatcttaattagatgcagggacagggatcagatgggacaatatcaaatttactttgtgccctacaagttaaaaactgcacccattctgtaaattgaatatagaggttctcccttggccactgtcagcttttcttgactggccaaaactgcccattcttcctggaatggtatgaaagcttcagcaaaataaataaaagtcagaatctttgctggtccctttaatgctgatttgatagtaaatcaatttcagctgagacataagggctgtcagtctatcatataaacatctttaactatagcctagagaaaagagggttgaagagcaaagcagattttttttttccttttctatatcttgttctgaacaacacactgtgataaaggggactagagtggaagattccctatttaaacacatgaagctctgggtcctagccttttttggttataagccctttgagaatctgataaaagctgtggatcatctcctaggaaaatagaacaaaacatacatattcacattacacagttccagagtatgtggaccccccaaagtccagagattgccctaggggatctttagattcttgtttagaactgttgattttgaacacaacatacactgtcaaactttacatcagggatccaacataactcagacatagcccaggtagcctgtttctaacacaactgtcataatcctgaaatccaaaattgcactgtgtttgacatgagatagtttaagttccacaaaatccaaatttaccatattattgtttttaaaaaagcagtttagagcaaactgtcactaaacttggataaatgggtcagaaagtacagatttaataaagtcgtacctctaatgttcaaaaaaaaaaaaagaaaaaaaaaaaaaaa

SEQ ID NO: 404878 - DNA, 1000 bp, Homo Sapiens; identical to SEQ ID NO: 224285

SEQ ID NO: 404879 - DNA, 1000 bp, Homo Sapiens; identical to SEQ ID NO: 292995

SEQ ID NO: 404880 - DNA, 1000 bp, Homo Sapiens; identical to SEQ ID NO: 224286

SEQ ID NO: 404881 - DNA, 1000 bp, Homo Sapiens; identical to SEQ ID NO: 224287

SEQ ID NO: 404882 - DNA, 1000 bp, Homo Sapiens; identical to SEQ ID NO: 292998

SEQ ID NO: 404883 - DNA, 1000 bp, Homo Sapiens
ttaccttcagtgaggttttgtttggcttgcaatgagtacatgggttttaggttgaatgtgagagtctgcagacaatgtgggttctccgactgccctcccagtgaaggtggacctctgatttagaccggcccgctgggcccgtgcctacatccttttcctcagcgtcaggatcttagtccccatgattgctgcccctttgtggtctgcatgtttcttggtaagggtgcccagtcaagtgtctctgggagccccctcttctctgtcatcgtcaggctccccacttgcagtggccgtggtggctgcacatgctcccggatacccctccagcactcccttttgtcatcttgagtttcagtccgtgacttgggtggcaccctatcttctccatcagggatggtagctatttttctgccatgagactagaggttgcttgagaacaggaaattggatctctcccttcaggctgggatttcactaagggctggagaaggggggaatatgggaggattatctcctatcacagggagcgctctgagggcaaggctgtgtctccgattcagactgacggttccctgaggatggggctgtttctcccctccgactggggctccctgaggatggggctgtttctcccctccgactggggctccctgaggacagggctgtgtctcccctcagcctggggctccctgagtcagggctgtgtctcccctcagactggggctccctgaggacggggctgtgtctgcctcagactgggaatccctgaagatggggccgtgtctccctcaaagtggggctccctcaggacagcgttgtgtctcccctcagactgcggctccctgaggacggggctgtgtctccctcagactggggctccctgaagaaagggctgcttctccctcagactggagctccctgaagatggggctgtgtccccctcagactggggctgcctgaggagatgaatgaaacttactaagaataaaaaaaaaaaaaa

SEQ ID NO: 404884 - DNA, 1000 bp, Homo Sapiens; identical to SEQ ID NO: 292999

SEQ ID NO: 404885 - DNA, 1000 bp, Homo Sapiens; identical to SEQ ID NO: 224288

SEQ ID NO: 404886 - DNA, 1000 bp, Homo Sapiens; identical to SEQ ID NO: 224289

SEQ ID NO: 404887 - DNA, 1000 bp, Homo Sapiens; identical to SEQ ID NO: 118732

SEQ ID NO: 404888 - DNA, 1000 bp, Homo Sapiens; identical to SEQ ID NO: 293001

SEQ ID NO: 404889 - DNA, 1000 bp, Homo Sapiens; identical to SEQ ID NO: 293003

SEQ ID NO: 404890 - DNA, 1000 bp, Homo Sapiens; identical to SEQ ID NO: 224290

SEQ ID NO: 404891 - DNA, 1000 bp, Homo Sapiens; identical to SEQ ID NO: 224291

SEQ ID NO: 404892 - DNA, 1000 bp, Homo Sapiens
ttaatttagcaaaagagccagtcattttatgaaaaatcaaaattataagtgattttaaaaaccagaattttagttgcaatacaattttaatatcaccctacatattatttataaaacatagtttgactggccagtccctggtgtttgtaatgttctttaatatgaaaaagtagttctccaactctatcataagtcatatctaatggtgaagggtttcagtcacattgaaaattgttttatttcaggcatgttccctttgtgcacttaggttcattgtgcctcagttcctctcaaaagcactaaatctaagtgcaaacaagtattcattttcatacaggaatttttttaatatgttacttttttaaaagttcatttttcatttgcctccgctttcacctgatccaaagagaccaagtcactgtactggtcccttgcaagtcttctagacaggttgtactgtagaactacgtaactttctgttgaaagcacttcctgtattcttgtattccaatgtaggaagctaatagagcaggactttactttcaaatttctttcagtgattgactcttcaaaattgcagtagtgtgaaaatacattttttacaaactgaaaatacagtagataagctgtcgaaaatggaaaacaattcaattttaattttctgctctgagtatttagtaaccaacactgcgtaaagcaggtagcattcaaaataagaaactgttctctctctaaatcttcactcttacttcaatttatatttgtgatatgaagactatccagttctcagtttgaattggaacatcatgttaaaaacagttatgagattccttatgaagtttctagtaacttgtaactagactttatgaaattaacagataaagttcttcaacgtgatgtcatcttgtgcctttcatgtaagttaaatttgctcatacagcttgaacgttgtatttgcaaaattaagccttcgatttttataaatgtaaagattcctcag

SEQ ID NO: 404893 - DNA, 1000 bp, Homo Sapiens; identical to SEQ ID NO: 293005

SEQ ID NO: 404894 - DNA, 1000 bp, Homo Sapiens; identical to SEQ ID NO: 293007

SEQ ID NO: 404895 - DNA, 1000 bp, Homo Sapiens
cccctccccaccattccaccatgggcttagatgcccgagtgattgttgtccaaaacaggcgggaaaacagaccagccacacacaaggggcaggggtgagggtgggggtgggggtccttaaacagactaaaatgcagttacctgtggtcattttggaggaagtggaagcctaagaatcgcccccagcatggcttcatcccccaagatggccgatgatctggcctgaaggcctctcacaaagggcaggagaagaagcttccagaaaggctgggatggaggaggagtcctgcggccagctgttgcctgcagcagaggctgcctgtggacacttccctaccggggctgaggccatgctgggagcccccccagtgacgcagaagcacaaattggaggcttggggccatgcccagccaggttggcttccctggggctgaagagctggctgtggtggcaccatggccttggccctgctactcacccaacattcccatcctcccctgataggcccctcctccttgcctgccctctctcccgctgctcagggccagtcactccccccacatgcagctacccctacaacctggggttccttctcagggcctcacctggtccccacatcccctggcctctgctcctgcctcccaaagtccatgtctgcctccatcagccacacacacgcagggacgcccgttccttgccctcccggacttatctactcttcactttcctgatgatccatggggcccaggcctagagggcatccgaggggctgggccttggccacagcctcttggatgatgtccttgctccaccacgcaggcccttgcttctcccatcaacgagtcttggcccaggggacactgaccctcccccagggaggagagaggagttccttccctttcaacgagggcttccacgccctctaaggggtggcggggaagggaggaggctgagaagatgcagattaaataaaggtatggaatagaaaaaaaaaaaaaaaa

SEQ ID NO: 404896 - DNA, 1000 bp, Homo Sapiens; identical to SEQ ID NO: 293008

SEQ ID NO: 404897 - DNA, 1000 bp, Homo Sapiens
ttctatgccatggatgagacccatcacaaatgcctggttctgcggatccaggaggcctttggaaacaagctgtgcccagcctgcagtgtggaaagtttgacgctgcgaactctgtgggagaagaactgccaggttcttattttctaccactgtcccttctacaagcagtaccccttcctgtggccaggaaagaagattccagcgccctgggcaaacaccacaagtgtgcgcaaactaatcctcttcttggagaccactctgagtgagcgggcctcacggggctccttccatgtctcccaagcgatcctcacccccagagtgaagaccattgcccggggcttggttgggggcctcaagaacacgctggttcataggctggcactgatcccagtttatcctttgagattcagcagaagatcctgatggaggaggaggataccaagagagaggtgcccaaggaagatggagttggtgatgtgcaacatttcggtgagaactttattgtcagaggttttcagtacatatttacaagttcttactccatcatacatattgggaatgagctggcattttcaagcatatacccaggagtccagcaatcattggggaagagagcctgaggctggcaatccttgcccagaactttggtcacctgcttgttcacaggccaccatatcttacttcactgaagacatatgctgaggttttatttagtccagatgctgaaggatgggaagacccaagcagctggtgtggaggtctttcccagtgactcatcagtcattcaaaatcaaagcctgcacaagaaagggtggggtgggatgtatagagaaagacaccaagcctttagactccagcagagtagctgatattgacatatctgaggagggaggaggctccaatacgactactcccaattcacagggtttgtggttctggatgaaatctttgcaaagggtttccctggcactcaaacagaataaataggcttataaagtgt

SEQ ID NO: 404898 - DNA, 1000 bp, Homo Sapiens; identical to SEQ ID NO: 118733

SEQ ID NO: 404899 - DNA, 1000 bp, Homo Sapiens; identical to SEQ ID NO: 118734

SEQ ID NO: 404900 - DNA, 1000 bp, Homo Sapiens; identical to SEQ ID NO: 293010

SEQ ID NO: 404901 - DNA, 1000 bp, Homo Sapiens; identical to SEQ ID NO: 118735

SEQ ID NO: 404902 - DNA, 1000 bp, Homo Sapiens
cagctggagtggtgctctgggtgagctgggaaaatacaagaaccaaggaatcatgtcaggccatcaaggagtatatggacactacactggggcccttcatcctgaacgtgaccagtggggcccttctctgcagtcaagccctgtgctccggccatggccgctgtgtccgccgcaccagccaccccaaagccctcctcctccttaaccctgccagtttctccatccagctcacgcctggtggtgggcccctgagcctgcggggtgccctctcacttgaagatcaggcacagatggctgtggagttcaaatgtcgatgctaccctggctggcaggcaccgtggtgtgagcggaagagcatgtggtgattggccacacactgagttgcacatattgagaacctaatgcactctgggtctggccagggcttcctcaaatacatgcacagtcatacaagtcatggtcacagtaaagagtacactcagccactgtcacaggcatattccctgcacacacatgcatacttacagactggaatagtggcataaggagttagaaccacagcagacaccattcattccatgtccatatgcatctacttggcaaggtcatagacaattcctccagagacactgagccagtctttgaactgcagcaatcacaaaggctgacattcactgagtgcctactctttgccaatccccgtgctaagcgttttatgtggacttattcattcctcacaatgaggctatgaggaaactgagtcactcacattgagagtaagcacgttgcccaaggttgcacagcaagaaaagggagaagttgagattcaaacccaggctgtctagctccgggggtacagcccttgcactcctactgagtttgtggtaaccagccctgcacgacccctgaatctgctgagaggcaccagtccagcaaataaagcagtcatgatttacttaaaaaaaaaaaaaaaaaaaaaaaaaaaaaaaaaaaaaaaaaa

SEQ ID NO: 404903 - DNA, 483 bp, Homo Sapiens
gttctaattcactgcccacagccctgctgataaaagcaaagctcatctctgccgtgctgcagggaaccctatttccttcccctgcagctcagccacctcctcctctcaggtctgccagccatgaaacttctttacctgtttcttgccatccttctggccatagaagaaccagtgatatcaggcaaacgccacatccttcgatgcatgggtaacagtggaatttgtagggcctcttgcaaaaagaacgaacagccctacctctattgcagaaattgtcagtcctgctgcctccagtcctacatgaggataagcatttctggcaaagaggaaaataccgactggtcttatgagaagcagtggccaagactaccttgagtgctggtgattaccattctcaagctctctgggcacagagacctgctgtcaacccccctcattaaaattcatgtgcctgctaaaaaaaaaaaaaaaaaaaaaaaaaaa

SEQ ID NO: 404904 - DNA, 1000 bp, Homo Sapiens
gatgtatataatatctccggtttataaaacctatttataacactttttacatatatgtacatagtattgtttgctttttatgttgaccatcagcctcgtgttgagccttaaagaagtagctaaggaactttacatcctaacagtataatccagctcagtatttttgttttgttttttgtttgtttgttttgttttacccagaaataagataactccatctcgccccttccctttcatctgaaagaagatacctccctcccagtccacctcatttagaaaaccaaagtgtgggtagaaaccccaaatgtccaaaagcccttttctggtgggtgacccagtgcatccaacagaaacagccgctgcccgaacctctgtgtgaagctttacgcgcacacggacaaaatgcccaaactggagcccttgcaaaaacacggcttgtggcattggcatacttgcccttacaggtggagtatcttcgtcacacatctaaatgagaaatcagtgacaacaagtctttgaaatggtgctatggatttaccattccttattatcactaatcatctaaacaactcactggaaatccaattaacaattttacaacataagatagaatggagacctgaataattctgtgtaatataaatggtttataactgcttttgtacctagctaggctgctattattactataatgagtaaatcataaagccttcatcactcccacatttttcttacggtcggagcatcagaacaagcgtctagactccttgggaccgtgagttcctagagcttggctgggtctaggctgttctgtgcctccaaggactgtctggcaatgacttgtattggccaccaactgtagatgtatatatggtgcccttctgatgctaagactccagaccttttgtttttgctttgcattttctgattttataccaactgtgtggactaagatgcattaaaataaacatcagagtaactcaaaaaaaaaaaaaaaaaa

SEQ ID NO: 404905 - DNA, 575 bp, Homo Sapiens
atgctgaccttcattatctgtgggttgctaactcgggtgaccaaaggtagctttgaaccccaaaaatgttggaagaataatgtaggacattgcagaagacgatgtttagatactgaaaggtacatacttctttgtaggaacaagctatcatgctgcatttctataatatcacatgaatatactcgacgaccagcatttcctgtgattcacctagaggatataacattggattatagtgatgtggactcttttactggttccccagtatctatgttgaatgatctgataacatttgacacaactaaatttggagaaaccatgacacctgagaccaatactcctgagactactatgccaccatctgaggccactactcccgagactactatgccaccatctgagactgctacttccgagactatgccaccaccttctcagacagctcttactcataattaattaacatttacttctggtatggaacaactagaaatactgctggaaataatatccaaagagctgattctaccaatccaatttcaccaggaaaattccatcagggattggatgaccat

SEQ ID NO: 404906 - DNA, 1000 bp, Homo Sapiens; identical to SEQ ID NO: 221892

SEQ ID NO: 404907 - DNA, 1000 bp, Homo Sapiens; identical to SEQ ID NO: 224293

SEQ ID NO: 404908 - DNA, 1000 bp, Homo Sapiens; identical to SEQ ID NO: 293015

SEQ ID NO: 404909 - DNA, 1000 bp, Homo Sapiens; identical to SEQ ID NO: 118738

SEQ ID NO: 404910 - DNA, 1000 bp, Homo Sapiens
agaaacttcctattactatcctaaatggaaactcagaatcacttgctataattagaaagtagctacaaaaataaacacaatgaaaccgatcactgttattacaccctaacccgcttttacctgagacaggccctgagcctgaggccgctggtagacttttgttaaaagagagagagacagagacagagaaataagcattagagacctgcaatcaccaagctgagacttctctttgatttactcagaaggactggaaaatgttgtcctgcaaaaggaggtaagtttctcaccacgtagcgctgatcatcccgtgttgcccgtgcgttgctgcagaccatctggggtcttgcccaagcaccctggagactttgctccctggtttcctggtcaccaactcgagtgttcagccctgtgtgctctccagctcctaagtcgtgggcctggtttcagctttgattgcccactcttggctttcaacccgtaggctccggctcctgacgccacaccctgatatcaagaccctcagatggagcgagcgttctgggctggtcgaagcctgaagccgcagtatgtccttgagtgggtccccccctacccatctagctgttgcccccatgttctgctttcctccactgtgccttcgctctcagagagagctctcccctggcagtgacaagatggctgcagcagctccagcaacctcagaggactcccccatccagggtccttgtgagctccttatctgtaggatgtgcagtaaacactcacgtgtcctttcctgaggagcccagtggctggggtgggggctgaggggcagcccctatgccctcacagtgcagcaaccttggttagctcacccatcagggcagacttgggcagaaatcatgtcttggcatattgttttgtaatctgctttttaaattgtcactatatattatgagcatttccctataatatacaatattcttccacattaaaaaaaaaaaaaaaaaaaaaaaaa

SEQ ID NO: 404911 - DNA, 1000 bp, Homo Sapiens; identical to SEQ ID NO: 118739

SEQ ID NO: 404912 - DNA, 1000 bp, Homo Sapiens
tggacgtccagcgccgctcaggccggccgcccttcccgcccgaggtcctggccgaggccctcaacacacacctgcggcacccggccatcagggtcctgcgggccttccgagtgcccagcgacttccacgctcgtcacgcagccacgtcccggacctacctgtaccgcctggccactggctgtcaccggcgtgatgagctgccggtgtttgaacgcaacctatgctggactctcccggcagactgcctggatatggtcgccatgcaggaagccgcccagcacctcctcggcacacacgacttcagcgccttccagtccgctggcagcccggtgccgagccccgtgcgaacgctgcgccgggtctccgtttccccaggccaagccagccccttggtcacccccgaggagagcaggaagctgcggttctggaacctggagtttgagagccagtctttcctgtatagacaggtacggaggatgacggctgtgctggtggccgtggggctgggggctttggcacctgcccaggtgaagacgattctggagagccaagatcccctgggcaagcaccagacacgtgtagccccagcccacggcttattcctcaagtcagtgctgtacgggaacctcggtgctgcctcctgcaccctgcaggggccacagttcgggagccacggatgaccctggacactcaagccaaagttaggccacaccaggcccaaccctgtgctggtcaagccagggcagtcacagctgcttggggcccacagcactgctgcctggtctccacagtagcctccctgcccgggtcccagcaccctggatgcccgtctctgtcccaggcgggatggggcacagtgcaggacacagccatgtacaccaagaagagagtaccaagtagtcttttgttcagcttttactggaaactgctgtctaggaccacctgccctaaccaggaataaaggcaagacagcctggaaaaaaaaaaaaaaaaaaaaaaa

SEQ ID NO: 404913 - DNA, 1000 bp, Homo Sapiens; identical to SEQ ID NO: 293020

SEQ ID NO: 404914 - DNA, 1000 bp, Homo Sapiens; identical to SEQ ID NO: 118741

SEQ ID NO: 404915 - DNA, 1000 bp, Homo Sapiens; identical to SEQ ID NO: 224296

SEQ ID NO: 404916 - DNA, 1000 bp, Homo Sapiens; identical to SEQ ID NO: 118742

SEQ ID NO: 404917 - DNA, 1000 bp, Homo Sapiens; identical to SEQ ID NO: 293026

SEQ ID NO: 404918 - DNA, 1000 bp, Homo Sapiens
tccaagctgactccggtcggcctcaacccaggggtggcgcaggcaccttgcaagcctcgagctgtagccaccctcaggcctgggaagaggcctgggccgacctcacacctcagcccttgcacccggccgggctcagttcaggcctgggcaccgagcttcaccctgggtgggtctcctcaggtggagtctgcagagtggacccagccaagggtcagggtcagcactgggtcagcgactccaatcttccagtggccagcacaccctagacaccccgaggagggagggctcctttctagcctgcccccccacccccacttcacccctccccagcttcccaaacttctgtctgcccaaatgggctctgaccgtgctctgtcggcccgagacatttggaagtcctgggggatgctggcaaatctcagctgttgctgaggagggggctgggaccccttcccatcccaaccttgagccccaggagataccgcgcccacacccaatcttgggacactccctatctggttggaagagagtaaccagtttccagagagccagagagtgagagagagaaagagagtgagagagagagagaaagagagagagagatgctgttgaatcagaaacagatcaacagcccaaagattttcctgtccctggagtgccagccccaggaagctccagggctgagtggtcaggagccagtttctccagcccctcctccccacaacccctagtggggaggggcagctgtccatttgcccaaagtattaatgcaactgaagctgtgatatttccaacgactgtaggaggaaaaattaaggggagagaggaaaacaaaaccaaccaacccctaaaatcattttcttattgtacataacgacctcattctcctgtatatgcggaagatataaccttatatttggtaagtgtttcttgtgctattttatcacgtgacctgtttataaaaatatatattaaaaaagttgtaaaaaaaaaaaaaaaa

SEQ ID NO: 404919 - DNA, 1000 bp, Homo Sapiens; identical to SEQ ID NO: 118743

SEQ ID NO: 404920 - DNA, 1000 bp, Homo Sapiens; identical to SEQ ID NO: 293028

SEQ ID NO: 404921 - DNA, 1000 bp, Homo Sapiens
cctgtgctggggcagggtgtgtgttctgtgggagggtgtctgtggggatgtgactatcagggtgggcctgtgctggggatggggcaggcctgggtctggagaggattttgtgtgaaagtaaatggggtgtttgaggcgtatgggtggctgttggtgtggggaggcatctgtgtatggctgttgggaacagcaaccaaaaggtgctttttggttttatttgagatgaagattgtgtttccgcttaattactagtttgtggtctatatcatagaagttatttcccaccccattttatcttgacaaccgtgtttgcatttctgtaaaacttctacaacttctggtgtcagaactgtccagaagatggtactgttaactgttatttcctttgatgttttgattttgaagtttagctctcatgcaaatgtttcaggcgtacatacataggcagaaagcaatttttaggtgatttgtctgtttcttggatgaaatataaagcaagctttaatgttctgacttgttcatttgaaatacaaaaaagtaagtgaattttaatgttttgcattaactaaagaaatctgaagattaatgttgaggaaattgtatggacatgcctttgtgaaaccaggaagtattttaagttaaaaatgaaaaaggttttaattgctttgtgtgtgttttaatggagccccattttagaattattttttccatctccctttaccaacaaaaggaacaatgccaccgtgaatggaatagtttggggaaagctttgccaaacacaaccctgatttcagagcaggaacatggtttggatagatcttcagttccgcttgaattattctgttactgcgctgtcattttcagaagatttccattcctttgcagatgctgttgggagttcgggattatgttcatttcttctgttttaatggcattcagtactaattttataagtgcatcttgtgtgaatctcaataaattcagttttgtaatctttttt

SEQ ID NO: 404922 - DNA, 1000 bp, Homo Sapiens; identical to SEQ ID NO: 293035

SEQ ID NO: 404923 - DNA, 1000 bp, Homo Sapiens; identical to SEQ ID NO: 224299

SEQ ID NO: 404924 - DNA, 1000 bp, Homo Sapiens; identical to SEQ ID NO: 224300

SEQ ID NO: 404925 - DNA, 1000 bp, Homo Sapiens; identical to SEQ ID NO: 293038

SEQ ID NO: 404926 - DNA, 1000 bp, Homo Sapiens; identical to SEQ ID NO: 293039

SEQ ID NO: 404927 - DNA, 1000 bp, Homo Sapiens; identical to SEQ ID NO: 293040

SEQ ID NO: 404928 - DNA, 1000 bp, Homo Sapiens; identical to SEQ ID NO: 224301

SEQ ID NO: 404929 - DNA, 1000 bp, Homo Sapiens; identical to SEQ ID NO: 293042

SEQ ID NO: 404930 - DNA, 1000 bp, Homo Sapiens; identical to SEQ ID NO: 293043

SEQ ID NO: 404931 - DNA, 1000 bp, Homo Sapiens; identical to SEQ ID NO: 293044

SEQ ID NO: 404932 - DNA, 1000 bp, Homo Sapiens; identical to SEQ ID NO: 118745

SEQ ID NO: 404933 - DNA, 1000 bp, Homo Sapiens; identical to SEQ ID NO: 293047

SEQ ID NO: 404934 - DNA, 1000 bp, Homo Sapiens
tctaaattcgttgagagctggaatccattttcaagtagtaggactctaagtcacatgaatgtcaattttccaaactgtccccataaactccgtgcatcccttaaaactcccgcaggactgctgtgggtcttgacactgcttctaaacttgacatgggagaggaaacgtgtaggacccgctgaggaatgcttctgaacggcctcggggagggagcctgctgtaaagctgtcacagttaatgccagtgctactgtgcagaaagagaactcagcccgtgagtccttgaaaccagccctccgaacataaataagcagccgggttcagtgaagcacatgacgcaggcttcacctctgccagcgtttccatcccagaaagtcctgcgggacagattctcacagtccccagtgagccccatccatgacccctgctcgccccccacgtttcccagatgacggcagctggagagccttcctccgacagcggccccaggccacggagaggcggccccgcagagagcggatgtttgtgaagctcctcttggagggaaagctgcccccaacgctgaacactcccgtctcaaggcacagacaggggagcggtcacaagccggccagtcccttttacagccaaaatcgggggctcagaacattctttaatgatttccgagccaccgagtgcactgggcggccccgtctctgttttcattccctgagatgtggtgctttctctcctggagccccgtgttggggacgcttcaaccgcaggccttgcctccctcccacagtgctgaggaaggacaggccctcccttccccaggaaaggccaggctggaggagcccaggtgtggggggaagttctgagctggcattgtcacccccgggtctagtatccccacagagtggaccctggccctgagcccaggctgtgcctcccctatgtgcagccgctgggatgtgtccagggcagcacaggaggcaggtgcccaggtactcccctaggca

SEQ ID NO: 404935 - DNA, 1000 bp, Homo Sapiens
ggttctttctccaaggcactttcggccttccttcttctccccttccgccatctccactggacataagccaatgcctgctctcttctcaccacattcacctggacaaatctgaactaattccttgagacttcaaattagcccttctgagcaagtgggcaggttctgaaacctgtgtgttttgtagcctaatgaattgatggaatgcacatgaacccatcttcacagcatgtgaaagaaccaacctgcctggcagaggtgcagaaatttccagaggactggcctagctataaacaccagcaacatctgcaacacaaaagcccttgaacttctaggcaaggactcatgctaacctagcagtactccagattgagaacgcagatggacaggtgtctcttgagcctgtgttccaagatgtctgtggaaaggattgcaactgtcatcctttggcacactcagtggaacctgtgtgagctacatgttctgctgcattatgggaactcatcaaagggccagattgacatcttgccagaaaaaccagtgttttgaggagcaaaagttttgtgtacttcagtaattgtcacatgtgtcttccacctccttgacatttatttgttaatcatatgatcatttttttttcactttcctttttttctttctcagaagtacttctggggctttgattgcattatttctcttttaatgtatcatttcagtgttggaaagaaaaatctggatctttatgtggggacctattttacatgtagatagttattcagtagatagtaaattatttctcttaagagatatttccttttatttctgtacaataatatgtatgaactcagttactaggggactgtattgtgacattatcaacctttattgctatttaaaaatgatagtttgtagaactgaagatttccattgatgtgaagcacaatttaatgaataagttaaaatattaaactgttgtgatgtcaagaaaaaaaaaaaaaaaaaa

SEQ ID NO: 404936 - DNA, 1000 bp, Homo Sapiens; identical to SEQ ID NO: 118746

SEQ ID NO: 404937 - DNA, 675 bp, Homo Sapiens; identical to SEQ ID NO: 293051

SEQ ID NO: 404938 - DNA, 1000 bp, Homo Sapiens
tgccgtggctctgggcggcgcggacgcgcgtagcgcgggagcagggcactgtgctgctgctgtggagcggcgccgaccttcgcccggtcagcggccccgacccccgcgccgcgcccctgctcgccctgctccacgctgccccgcgcccgctgctgctgctcgcttacttcagtcgcctctgcgccaagggcgacatccccccgccgctgcgcgccctgccgcgctaccgcctgctgcgcgacctgccgcgtctgctgcgggcgctggacgcgcggcctttcgcagaggccaccagctggggccgccttggggcgcggcagcgcaggcagagccgcctagagctgtgcagccggctcgaacgagaggccgcccgacttgcagacctaggttgagcagagctccaccgcagtcccgggtgtctgcggccgcaacgcaacggacactggctggaaccccggaatgagccttcgaccctgaaatccttggggtgcctcgaggacgactggccgaaaagccgcattccctgcctcacaggccggaagtcccagcccagtccccgcgcgcgtccctcttcctcctcatactttcccttgactgagagctcctctaacccctgttctgatgggggagggcggtcttcccacttcctctccagaactccagaaagagcagtgtgcttatgcttcagtccaggctggagaggttggggccggggtagggaggcaggagccatgtcagttctgaaggagggtgaggcggtgggggattgcagggggcggctgagagaaaacctccttgggggccagggattccctttcccactctgaggctctggccagagggagagaggactctggacctaggaaaagaggcttttggctccaggtggtcaggacagtgggggttgggggtggggtgggtgggtgctggcggtggggaccaagatccggaaagatgaataaagacaaacatgacaaactaagaaaaaaaaaaaaaaaaa

SEQ ID NO: 404939 - DNA, 1000 bp, Homo Sapiens; identical to SEQ ID NO: 286339

SEQ ID NO: 404940 - DNA, 1000 bp, Homo Sapiens; identical to SEQ ID NO: 118749

SEQ ID NO: 404941 - DNA, 1000 bp, Homo Sapiens
gacctggagatgcagatcgagagcctgaatgaagagctagcctacatgaagaagaaccatgaagaggagatgaaggaatttagcaaccaggtggtcggccaggtcaacgtggagatggatgccaccccaggcattgacctgacccgcgtgctggcagagatgagggagcagtacgaggccatggcagagaggaaccgccgggatgctgaggaatggttccacgccaagagtgcagagctgaacaaggaggtgtctaccaacactgccatgattcagaccagcaagacagagatcacggagctcaggcgcacgctccaaggcctggagattgagctgcagtcccagctgagcatgaaagcggggctggagaacacggtggcagagacggagtgccgctatgccctgcagctgcagcagatccagggactcatcagcagcatcgaggcccagctgagcgagctccgcagtgagatggagtgccagaaccaagagtacaagatgctgctggacatcaagacacgtctggagcaggagatcgccacctaccgcagcctgctcgagggccaggacgccaagatgattggtttcccttcctcagcaggaagcgtcagcccccgtagcacctctgttaccacgacttctagtgcctctgttaccaccacctctaatgcctctggtcgccgcacttctgatgtccgtaggccttaaatctgcctggcgtcccctccctctgtcttcagcacccagaggaggagagagccggcagttccctgcaggagagaggaggggctgctggacccaaggctcagtccctctgctctcaggaccccctgtcctgactctctcctgatggtgggccctctgtgctcttctcttccggtcggatctctctcctctctgacctggatacgctttggtttctcaacttctctaccccaaagaaaagattattcaataaagtttcctgcctttctgcaaacataaaaaaaaaaaaaaaaaa

SEQ ID NO: 404942 - DNA, 1000 bp, Homo Sapiens; identical to SEQ ID NO: 293055

SEQ ID NO: 404943 - DNA, 1000 bp, Homo Sapiens
ggacaggtgagcgcagccatagctggggcggccaccatcgatgcaggaggaaacaaaggcaacatggcccttgcaggcactgccagcatggctccaaacagcacgaaggtggctgtggcaggggctgcaggcaagtcctcagagcatgtttccagcgcatccatgagcctttcccgagagggcagtgtgagcctggccattgcaggagtagtactgaccagcaggacagctgcagaagcagacatggatgcagcagcgggacctcccgtctccacccggcagagcaagagcagcctgagtggacagcatggaagggagcgaacccaggccagcgctgaaggctgcaaggaggggagggaaagaagggaaaaggacagggctctcggaaggagttcccatcgccgcaggacaggtgaaagccgccacaaaacaaggggagacaagattgcccaaaagtcctccagcaggtcctcattcagccacagagccaatagagatgacaaaaaggagaaaggctgtggcaacccggggagcagcaggcacagggactcgcataaaggtgtcagccacacgcccatctcaaaggagtccaggacctctcacaaatctgggaggagcttatggaccaccagttccggttccagcaagggacttggcagggtcagctctttcctgaggaacgtcagagccaaccttactacaaaagtagtgggcacaccacatggcagagatgtggacgtcatggctaagatggcggagaggagcaccaacgtggccatcgccgagacagcagagggtggccaggggctggagatggttggttctatgacaccggacatcatggagacagtgacctttgaagcccattaaataagacccagagctggaagctgcaaaggagcccagagctcatgggagtgtccctggaaagcctattccagcgttctttactgccgtttaaataaagaatcatacatctgaaaacaaaaaaaaaaaaaaa

SEQ ID NO: 404944 - DNA, 1000 bp, Homo Sapiens
agcttttcctttttaggttggagaaggcaaaacacaggcttgcaagttggaagtatatgaagtcttgacagagtgtgtctggtaaattgaaaagtgtttcaaactatggcagttttgcaatcaggtgaaaatcacctcatgatattcagctgataaggtttataaaattgcccctttctagctgctctgttaggaattctggtttttgatacttttttcctgtctgcaaaccagaatttgattttttggtcttgcatttcaaaaaaaaaaagactttgaatctgtttagtagattccatatctttgagtttcagtgttttatatgtactacttaagttaaatagttaaaagcttttaaatagttgagctttttaatgttgacactttattttgtacctatttatatatgtatgtatatcttagaaaagcactttgttaaaaaaaaattgcattttatatgattcctgccatttgctgctaaatctgggctggtcagaatgctgcagcgatacttgatctatataaaaacctggcagtaaaatgtagagtgaaagttaaatcctcttgctgttttaactttatcataaagatgacataggcaagctgtgcagctttacattttaaccaggggactctgtggcatttaaaaccgtctagaaatggttgtactttaatgccagtaataatctgcttcctctattgtcattaaaatatatacgtttagtgtatcacacaaaccaatcttataagggtaatgtaaaaaccccaacaattgtacatgttctgtttttgaaaattgtggcatgtatttttgggtgaagatcattagagaagagttctctaaaggttttctgtgttcatacatggtatacagatagctcataatgaagtccagaatcttacttttaagtgaaggcattgtgaattcacctcaagtaaacccattgttccaaagcaattataaactttgactctagtactactatgatttaaaaaaaaa

SEQ ID NO: 404945 - DNA, 1000 bp, Homo Sapiens; identical to SEQ ID NO: 293056

SEQ ID NO: 404946 - DNA, 1000 bp, Homo Sapiens; identical to SEQ ID NO: 224302

SEQ ID NO: 404947 - DNA, 1000 bp, Homo Sapiens
ggtgctgggaagccttgccgttgggagtctcctgtatctagtcgccagagttgggagcttggataggctacaacccatttgccccattgaaggtcgactgggtggagcccgcactcaggctgaattcccacttcgcgccctgcagtttaagcgtggcctgctgcacgagttccggaagggcaacgcttccaaggagcaggttcgcctccatgacctggtccagcagctccccaaggccattatcattggggtgaggaaaggaggcacaagggccctgcttgaaatgctgaacctacatccggcagtagtcaaagcctctcaagaaatccacttttttgataatgatgagaattatggtaagggcattgagtggtataggaaaaagatgcctttttcctaccctcagcaaatcacaattgaaaagagcccagcatattttatcacagaggaggttccagaaaggatttacaaaatgaactcatccatcaagttgttgatcattgtcagggagccaaccacaagagctatttctgattatactcaggtgctagaggggaaggagaggaagaacaaaacttattacaagtttgagaagctggccatagaccctaatacatgcgaagtgaacacaaaatacaaagcagtaagaaccagcatctacaccaaacatctggaaaggtggttgaaatactttccaattgagcaatttcatgtcgtcgatggagatcgcctcatcacggaacctctgccagaacttcagctcgtggagaagttcctaaatctgcctccaaggataagtcaatacaatttatacttcaatgctaccagagggttttactgcttgcggtttaatattatctttaataagtgcctggcgggcagcaaggggcgcattcatccagaggtggacccctctgtcattactaaattgcgcaaattctttcatccttttaatcaaaaattttaccagatcactgggaggacattgaactggccctaa

SEQ ID NO: 404948 - DNA, 1000 bp, Homo Sapiens; identical to SEQ ID NO: 118750

SEQ ID NO: 404949 - DNA, 1000 bp, Homo Sapiens; identical to SEQ ID NO: 293060

SEQ ID NO: 404950 - DNA, 1000 bp, Homo Sapiens; identical to SEQ ID NO: 224304

SEQ ID NO: 404951 - DNA, 1000 bp, Homo Sapiens; identical to SEQ ID NO: 293062

SEQ ID NO: 404952 - DNA, 1000 bp, Homo Sapiens; identical to SEQ ID NO: 118751

SEQ ID NO: 404953 - DNA, 1000 bp, Homo Sapiens; identical to SEQ ID NO: 118752

SEQ ID NO: 404954 - DNA, 1000 bp, Homo Sapiens; identical to SEQ ID NO: 293063

SEQ ID NO: 404955 - DNA, 1000 bp, Homo Sapiens; identical to SEQ ID NO: 293064

SEQ ID NO: 404956 - DNA, 1000 bp, Homo Sapiens
gatgttgaagaggatggtggtttatcagacagcattcagacaagatttccggaaatatgaggaaggctttgacccctactctatgttcaccccagagcagatcatggggaaggatgtccggctcctacgcatcaagaaggagggatccttagacctggccctggaaggcggtgtggactcccccattgggaaggtggtcgtttctgctgtgtatgagcggggagctgctgagcggcatggtggcattgtgaaaggggacgagatcatggcaatcaacggcaagattgtgacagactacaccctggctgaggctgaggctgccctgcagaaggcctggaatcagggcggggactggatcgaccttgtggttgccgtctgccccccaaaggagtatgacgatgagctagcttctcttccctcctccgtagctgaaagcccccaaccggtccgaaagctccttgaagaccgtgctgccgtgcacagacacgggttcctcctgcagctggagcccacggaccttcttctgaagtccaaaaggggaaaccaaattcaccgttaggaaacagtgagctccggccccacctcgtgaacacaaagcctcggatcagccttgagagaggccacactacacacaccagatggcatccttgggacctgaatctatcacccaggaatctcaaactccctttggccctgaaccagggccagataaggaacagctcgggccactcttctgaaggccaacgtggaggaaagggagcagccagccatttgggagaagatctcaaggatccagactctcattcctttcctctggcccagtgaatttggtctctcccagctctgggggactccttccttgaaccctaataagaccccactggagtctctctctctccatccctctcctctgccctctgctctaattgctgccaggattgtcactccaaaccttactctgagctcattaataaaataaacagatttattttccagctta

SEQ ID NO: 404957 - DNA, 784 bp, Homo Sapiens
ggcgcgggaggcggttctgcgcggcgggggccgtacccgcggcggagcgaggaggcgagaatggatcaatggtgccacggagcacatcgctgacgctgattgtgttccttttccacagattgtctaaagccccaggaaaaatggtggaaaattcaccgtcgccattgccagaaagagcgatttatggctttgttcttttcttaagctcccaatttggcttcatactttacctcgtgtgggcctttattcctgaatcttggctaaactctttaggtttaacctattggcctcaaaaatattgggcagttgcattacctgtctacctccttattgctatagtaattggctacgtgctcttgtttgggattaacatgatgagtacctctccactcgactccatccatacaatcacagataactatgcaaaaaatcaacagcagaagaaataccaagaggaggccattccagccttaagagatatttctattagtgaagtaaaccaaatgttctttcttgcagccaaagaactttacaccaaaaactgaactgtgtgtaaccatagtaacaccaagcacgtatttatttataagtttttgccattataattttgaccataaattaatttgaccatctctcttattaatagagaagtaaaaaatgtaagttgaccttctcttagattatgttcaatgaatattgtaaatgttcaagtattgttaatgaatagaataaatacaatattgcattcccataaaaaaaaaaaaaaaaaaaaaaaaaaaaaaaa

SEQ ID NO: 404958 - DNA, 1000 bp, Homo Sapiens; identical to SEQ ID NO: 293066

SEQ ID NO: 404959 - DNA, 1000 bp, Homo Sapiens; identical to SEQ ID NO: 118753

SEQ ID NO: 404960 - DNA, 1000 bp, Homo Sapiens; identical to SEQ ID NO: 118754

SEQ ID NO: 404961 - DNA, 1000 bp, Homo Sapiens; identical to SEQ ID NO: 224308

SEQ ID NO: 404962 - DNA, 1000 bp, Homo Sapiens; identical to SEQ ID NO: 224309

SEQ ID NO: 404963 - DNA, 1000 bp, Homo Sapiens; identical to SEQ ID NO: 293073

SEQ ID NO: 404964 - DNA, 1000 bp, Homo Sapiens; identical to SEQ ID NO: 293074

SEQ ID NO: 404965 - DNA, 1000 bp, Homo Sapiens; identical to SEQ ID NO: 293075

SEQ ID NO: 404966 - DNA, 1000 bp, Homo Sapiens; identical to SEQ ID NO: 293076

SEQ ID NO: 404967 - DNA, 1000 bp, Homo Sapiens; identical to SEQ ID NO: 118756

SEQ ID NO: 404968 - DNA, 1000 bp, Homo Sapiens; identical to SEQ ID NO: 224311

SEQ ID NO: 404969 - DNA, 1000 bp, Homo Sapiens; identical to SEQ ID NO: 293079

SEQ ID NO: 404970 - DNA, 1000 bp, Homo Sapiens; identical to SEQ ID NO: 224312

SEQ ID NO: 404971 - DNA, 1000 bp, Homo Sapiens; identical to SEQ ID NO: 293081

SEQ ID NO: 404972 - DNA, 1000 bp, Homo Sapiens; identical to SEQ ID NO: 293083

SEQ ID NO: 404973 - DNA, 1000 bp, Homo Sapiens; identical to SEQ ID NO: 118758

SEQ ID NO: 404974 - DNA, 1000 bp, Homo Sapiens; identical to SEQ ID NO: 118759

SEQ ID NO: 404975 - DNA, 1000 bp, Homo Sapiens; identical to SEQ ID NO: 293085

SEQ ID NO: 404976 - DNA, 1000 bp, Homo Sapiens
agctggcggccttcaaggtggtggtgcaggaggagggcggcagtggcctcagcctcatcaaggagacctaccagctccacagggacgacccggaggtggtggagaacgtgggcatgctgctggtccacctggcttcctatgaggagatcctgccggagctggtgtccagtagtatgaaggccctgctccaggagatcaaggagcgcttcacctccagcctggtgagtgacagcagcgccttcagcaaaccaggcctccctccaggtggaagcccccagctggggtgcaccacgtctgggggactggaatagatgtttgtatggaactgaccttgatctccacgtgtatagttttcaagactgctctcctgcctgcctattatcccatctctatgactggccaaaatcaatcttaaacgggaggggtaatcagacctctccaaagagtttcctgtccatgactgctggattgagtcacatgagtaactgctcctggacccggggactgtccacgaaaactgacttgcctgcttcctccttccaggaactggtttcttgcgcggaaaaagtgctcttgaggctggaggcagccacctctcccagcccactgggtggggaagcagctcagccctgatgcgggggagaagacagataccccacaggcccctccctccacgtgtgccctctccctgtccttcctttccatgggccactgtttcccttggggtggggggaagggtcatccagcaccagaatgcgcacctcacactcctcttaggtgactaataaagaggcccaaggccagtttctgccttaatcatttctggcaagaggctgtgactggccagtgggatacttaattctgcagtctctatagacctcgcccctggacagagcagtccttccagaccattctagatgagagtcaacactgagcctccacaggctccattccaagtaaacatctgcatttattttaaatcgcaaaaaaaaaaaaaaaa

SEQ ID NO: 404977 - DNA, 1000 bp, Homo Sapiens; identical to SEQ ID NO: 293086

SEQ ID NO: 404978 - DNA, 1000 bp, Homo Sapiens; identical to SEQ ID NO: 224313

SEQ ID NO: 404979 - DNA, 1000 bp, Homo Sapiens
aacagccctccttatgtctgctatgtcaccctgcctgggggaagctgctttgggagtttccagttttgccccacaaaagctgaggcccggaggagtgctgcaaagattgcgctaatgaattctgtgtttaatgaacatccttcccgaagaatcactgatgagttcatcgagaagagtgtctctgaggccctggcatcttttaatggcaacagggaggaagctgacaacccaaatacagggattggtgccttccgattcatgctggaatccaacaagggcaaatcaatgttggagttccaggagctaatgacagtttttcaactgctacactggaatggcagccttaaggccatgagggaacgacaatgctctcggcaggaggtgttggctcattattcgcaccgggccctggatgatgatattcgccaccaaatggccttggactgggtgagccgggagcagagtgtgccgggggcactgtctagagagctggcctctactgagcgggagctggatgaagcccgactggcaggcaaggagctgcgcttccacaaggagaagaaagatattcttgtgctggctgctgggcagttgggcaatatgcattcttccaactgctaggcatccacccacataactccccaggctttccacagcctttttttatgtctcctttctaagatttaggatgattttttgtacatactttctcatttttatactttaaaaaatatatatgtgtataaattctacacctagattcctatttgctaagagatcccttttcttactaccagtttttggatgtagttttatttgaaacatcttcagtccactttacaacaaagagcagcttgtctttgcagctttgttagctcttaaacttccagattaactgtgtagccatttcagtagcactaaaagattaactctaaaaaaaaaaaaaaaaaaaaaaaaaaaaaaaaaaaaaaaaaaaaaaaaaaaaaaaaaaaaaaaaaaa

SEQ ID NO: 404980 - DNA, 1000 bp, Homo Sapiens; identical to SEQ ID NO: 293088

SEQ ID NO: 404981 - DNA, 1000 bp, Homo Sapiens
gattttcctgcctcagcctccccagtagctgggactacagacgtgtgccaccacgcctggctaaatcttttttgtattttattttagtagagacggggtttcaccatactggccaggctgctctcgaactcctgacctcatcgtccacctgcctcggcctccccaaagtgctgagattaggcgttagccaccgcgcccggccagaaatcacttttatattgtcacatgggccctctgcacagagtccgatggctcctcccggggaagcctgattttgtgacgtgtgtatagtaaatgcaggccctctggcagcaccataattggtcggttaccctgagcccagagctctgaaagcatctgtggaatgatcacgggacccttctcctctgagaaggctcccggctgcctccccgccaccgagcttgtagcctgaatgcctggctgtcgcatggagcattttgcttctggggtgtcttccttagccaaagggaacgtgtcatttgctcgaccctggcccacccttgccgcccagctgttgtgctgggcacagtctggggcacaggcctccatgatgaagacgcgtgggctgtcggtgctttcatccgtcacaaactggcacctgtacctgccagcaggagcatgatggggacttccatgctggaattgctccctgattaaaatgagatatggctatttggaagacactgcattttagccagtgtacctgggcacagactcggggctgccctgaagctgatgaaggcttgaaggacggaagggctgagccacatgaaggcagcactcagggccaggggagagagaagaggatcagcagtgcagccccaggatgcctcgcaggtaccctgcctccattttggttaccatccccacttattatgggctgtgggctgttatggtgatggatggatgtggatttggaaggggaccatgagagatgatgtattatgatgaactcatgatttaattctttggtgaaaat

SEQ ID NO: 404982 - DNA, 1000 bp, Homo Sapiens; identical to SEQ ID NO: 118760

SEQ ID NO: 404983 - DNA, 1000 bp, Homo Sapiens; identical to SEQ ID NO: 293092

SEQ ID NO: 404984 - DNA, 1000 bp, Homo Sapiens; identical to SEQ ID NO: 293093

SEQ ID NO: 404985 - DNA, 1000 bp, Homo Sapiens
cggcacagagaagtcagagggcctgtcctgggtcacacagccacaggcggcccccagaacgggacttcagggtgcaccactgcaccccagcagagacctccgcctggcacacagggaatgctggagcaatacttaaataggggaggtcagaaatctcacgggctctgctggcttctgtgcttcgtctctcaaggccaaaatcaagatgtcatcagtgctgagctctggtggaggatccacgtccaggctcactggggctgctggcagaattcagctgtgtggggttgtaggaatgaagtccttgtttccttgctggctgttggccaggggctgccctcagcttctggaggccgcctgccctccctggttcatggcccatctcatcctgacagccagcacccgcgggaagtccctcttgcactgtgactctctcccgtctcttccattctctatggcttgtctgcctccctctttcatctttaagagtgcatgtgagtatattggacctacctgaatcagccaggctaacctccccattttaaggtctgcagccttaattctacctgcaaagtcccttttgccatgtaatgtgccatattcacaggtgtcaggaatcagagggcaggtatattgggggaccattattctgccaactacacagggccttatatggtctggctctgtgtccccattcaaatctcatcttgaattgtaatccgaattgtaacccccacgtgttggggggagggaccttgtgggaggtaattaaatcatgggggcggttaccctcatgctgttcttgtgatagtgagtgagttctcacgagatctgaaggttttgcaaggagcttttcccccttttgctcaggactctccttcctgcagccaagtgaaggacaagtttgcttccccttccacaatgattgtaagtttcttgaggcctccccagaactatgagtcaattaaacctctttcctttataaaaaaaaaaaaaaaaaaaa

SEQ ID NO: 404986 - DNA, 1000 bp, Homo Sapiens; identical to SEQ ID NO: 118762

SEQ ID NO: 404987 - DNA, 1000 bp, Homo Sapiens; identical to SEQ ID NO: 293095

SEQ ID NO: 404988 - DNA, 1000 bp, Homo Sapiens; identical to SEQ ID NO: 293096

SEQ ID NO: 404989 - DNA, 1000 bp, Homo Sapiens; identical to SEQ ID NO: 293098

SEQ ID NO: 404990 - DNA, 1000 bp, Homo Sapiens; identical to SEQ ID NO: 118763

SEQ ID NO: 404991 - DNA, 1000 bp, Homo Sapiens; identical to SEQ ID NO: 118764

SEQ ID NO: 404992 - DNA, 1000 bp, Homo Sapiens; identical to SEQ ID NO: 293101

SEQ ID NO: 404993 - DNA, 1000 bp, Homo Sapiens
acgcggaggacgaccccagccgcacgctgtgcgaggcctgcaacatccgcttcagccgccacgagacctacaccgtgcacaagcggtactactgcgcctcgcgccacgacccgccgccgcgccgaccggccgcgcccccgggaccccctgggccggccgcgcccccggccccctctcccgccgcgcctgtgcgcacgcgcagacgccgcaagctctacgagctgcacgcggccggcgccccgccccccccgccgcccggccacgcccccgcgcccgagtcgccgcggcccggaagcggaagcggaagcggccccggcctcgcccctgcgcgctcgcccggccccgcggccgacggccccatcgacctgagcaagaagccgcggcgcccgctccccggagccccggcaccggcgctggccgactaccacgagtgcacggcctgccgcgtgagcttccacagcctcgaggcctacctggcgcacaagaagtactcgtgccccgctgcgccaccgcccggcgcgctcggcctgcccgccgccgcctgcccctactgccccccgaacggcccggtgcgcggggacctgctggagcatttccgcctggcgcacggcctgctgctcggcgcgcccctggccggcccgggggtcgaggcccggacgccggccgaccgcggcccctcgcccgctcccgcccccgccgcctccccgcagcccgggtcccgtggcccccgggacggcctcggcccggagccccaggagccgccgcccggcccgcccccgtccccggccgccgcgcccgaggccgtgccgcccccgccggcgcccccctcctactcggacaagggcgtccagactcccagcaagggcacgccggcgccgctgcccaacggcaaccaccggtactgccgtctttgcaacatcaagttcagcagcctgtccaccttcatcgcccacaagaagtattactgctcctcgcacgccgccgagcacgtgaagtgagc

SEQ ID NO: 404994 - DNA, 1000 bp, Homo Sapiens; identical to SEQ ID NO: 396015

SEQ ID NO: 404995 - DNA, 1000 bp, Homo Sapiens
cacagaaaagctgacagcctttgtaaacacgttgaatggcaaagatggaaccggttctcatctggtgacagtgcctcctgggcccagtttggctgatgctctcatcagttctccgattttggctggtgaaggtggtgccatgctgggtcttggtgccagtgactttgaatttggagtagatcccagtgctgatcctgagctggccttggcccttcgtgtatctatggaagagcagcggcagcggcaggaggaggaggcccggcgggcagctgcagcttctgctgctgaggccgggattgctacgactgggactgaaggtgaaagaggtggaatccgaagtcctgggactgcgggatgctaaacattgaaagctgggtgtaggcactgcagggagagtgtggaggtctgacagggtaggaatatgtgggagggctgggctaggaatggccttggaggctggcctgtgtggatatggcaccaattctaccctgctcctcttttccttttcccagactcagacgatgccctgctgaagatgaccatcagccagcaagagtttggccgcactgggcttcctgacctaagcagtatgactgaggaagagcagattgcttatgccatgcagatgtccctgcagggagcagagtttggccaggcggaatcagcagacattgatgccagctcagctatggacacatctgagccagccaaggaggaggatgattacgacgtgatgcaggaccccgagttccttcagagtgtcctagagaacctcccaggtgtggatcccaacaatgaagccattcgaaatgctatgggctccctggcctcccaggccaccaaggacggcaagaaggacaagaaggaggaagacaagaagtgagactggagggaaagggtagctgagtctgcttaggggactgcatgggaagcacggaatatagggttagatgtgtgttatctgtaaccattacagcctaaataaagcttggcaactttt

SEQ ID NO: 404996 - DNA, 1000 bp, Homo Sapiens
ctggaaattggagaaatggaggtgagcaaattaacggtagtgtgactgtggctcaactttccatggtacgcgcgaattgttctgggagtcacagatgggaagacagaagcgcccctgagtgctttgtcatatagcacagaagtcctccacactgcctgggacagtgtcctgcatccacacagtaggtacccagtaaaagtgttattaaatattgtcccaggagcccttaggagagtggtttaacatgagaaggcgccaacagcacacagggtcagggtcacttctagaaatagcccaccaaggctattcagattggactgtggttcccttctggacagtcacaccagggacttcccagtgaacaagggggcataggctcctctctggatcccaccttttcatcccttctgagaaatgtaccctattatttccttcataaagaatgccacccatctgattcctcaagaatctagacctagaaataccatttgacccagccatcccattactgggtagatacccaaaggattacaaatcatgctgctataaagacacatgcacacatatgtttattacggcactatttataatagcaaagacttggaaccaacccaaatgtccatcagtgatagactggattaagaaaatgtggcacatatacaccatggaatactatgcagccataaagaaggatgagtttatgccctttgtagggacatggatgaagctggaaaccatcattctgagcaaactatcgcaaggatagaaaaccaaacactgcatattctcacgcacaggtgggaattgaacaataaaaacacttggacacagggtggggaacatcacacaccgggcctgtcatggggtggggggaggggggagggatagcattaggagatatactaacgtaaatgacgagttaatgggtgcagcacaccaacatggcacatgtatacatatgtaacaaatctgcacgttgtgcacatgtaccctagaactt

SEQ ID NO: 404997 - DNA, 1000 bp, Homo Sapiens; identical to SEQ ID NO: 293102

SEQ ID NO: 404998 - DNA, 1000 bp, Homo Sapiens; identical to SEQ ID NO: 116447

SEQ ID NO: 404999 - DNA, 1000 bp, Homo Sapiens; identical to SEQ ID NO: 293103

SEQ ID NO: 405000 - DNA, 1000 bp, Homo Sapiens; identical to SEQ ID NO: 293104

SEQ ID NO: 405001 - DNA, 1000 bp, Homo Sapiens
ctgaaatttgattcttactacagatttaaaactttctacatattatatgtaggagctcctagtgtttttgagaaattagactgtacctgtgtacacttctaaggtctacatggacctatgtatatatatctaagacctctgatcattaaaacctataaagggttgagctgtcccaagttttctgtctttctgtaatggctacaaactttctttggtaggttagggaggttgtataacataaaaaacacatcactatatgtaggaaatatacatttttcaagtaaataagagtgttattaatgattatgaacttttgcttaacaaaataacatacaacgagagcttgagttgtcaaaatatattttaattatctattgctaaaaacatagtaagatgcagagaattctttatttgtcataagccagtcctcaaaagagttcctaacagtagtgatttctaatatataagaataaggtacttctgagggaattttatattttcagagtttaaaattattgctactcccaatttagaaaaatggggagaaagctggaagaacaaatgacatgctcaaatgtattgcataagtcaacctcacaccttaatactgggagcttctctgcctcctgatcctgtcttgcagataaggtcccctggctaggtttgcgtttatagtcaggttccatttagctcattaaaggtcactgctgcttcaaaggactttgcccagtggatgccattcataaccacagatgaatgttatcagctatttatccaaattacaggaaatgaaacctgaaaaggttgggtaagaatagtgttgaaaattcatagttttaagtttgatggtctccattcaggcaagtgtgtttcagcaaatctctagaaatttacattgattaaaatgttagaggctgttctggaagttctagacatggcaataaggcaagaaaaagagattaaatgcatacagacctcaaaaaaaaaaaaaaaaaaaaaa

SEQ ID NO: 405002 - DNA, 1000 bp, Homo Sapiens; identical to SEQ ID NO: 224318

SEQ ID NO: 405003 - DNA, 1000 bp, Homo Sapiens; identical to SEQ ID NO: 224319

SEQ ID NO: 405004 - DNA, 1000 bp, Homo Sapiens; identical to SEQ ID NO: 224321

SEQ ID NO: 405005 - DNA, 1000 bp, Homo Sapiens; identical to SEQ ID NO: 293109

SEQ ID NO: 405006 - DNA, 1000 bp, Homo Sapiens; identical to SEQ ID NO: 293110

SEQ ID NO: 405007 - DNA, 1000 bp, Homo Sapiens; identical to SEQ ID NO: 293111

SEQ ID NO: 405008 - DNA, 1000 bp, Homo Sapiens; identical to SEQ ID NO: 293112

SEQ ID NO: 405009 - DNA, 1000 bp, Homo Sapiens
tgctcacgctctccctggacctcttctacacggaagacgagatctatgagctttcttatgcccgggagccgcgttgtcccaagagcctgccaccctcccccttcaatgcacctctggtggtggagtgggcccctggtgtgacacccaagccggacagggtcacactgggtcggcatgtggagcagctggtggagtctgtgttcaagaattatgaccctgaaggccgaggaacaatctctcaggaggactttgagcgactctcgggcaattttcccttcgcctgccatgggcttcacccacccccacgccaggggagaggatccttcagcagagaggagctgacagggtacctgctccgggccagcgccatctgctccaagttgggcctggccttcctgcacaccttccatgaggtcaccttccgaaagcctaccttctgcgacagctgcagtggcttcctctggggtgtcaccaagcaaggctaccgctgtcgggagtgcgggctgtgttgccacaaacactgcagagaccaggtgaaggtagaatgtaagaagaggccaggggccaagggcgatgcaggaccccccggagctcctgtcccatccacaccagctccccatgccagctgtggctccgaggaaaatcactcctacacgctatccctggagcctgagactgggtgccagcttcgccatgcctggacccagactgaatccccacacccttcctgggaaacagatacggtcccctgcccggtgatggacccaccatcaactgcatcctccaagctggattcctagacatctcttggtctcctctcttcctcactcccttcccccagtcagtcctgagtcctgccgtcagactctggcagggctcccagaggtaggcctccagaggcatccgccttcccatccacactgcctttagtggtacgtccgtcatctttttccctggaagtgactttcctcttttgcatcctggtggatgctaatcctgc

SEQ ID NO: 405010 - DNA, 1000 bp, Homo Sapiens; identical to SEQ ID NO: 293113

SEQ ID NO: 405011 - DNA, 1000 bp, Homo Sapiens
tgctccattgaggagaaggatgggcgcccagtgtttgtcatcaggattgtggaacaaggccatgaagacctggttctaagtgacatctcacctaaaggtgtctgggataagattttggagcctgtggcatgtgtgagaaaaaagtctgaaatgctccagcttttcccagcgtatttaaaaggagaggatctgtttggcctgaccgtctctgcagtggcacgcatagcggaatcacttcctggggttgaggcatgtgaaaattataccttccgatacggccgaaatcctctcatggaacttcctcttgccgttaaccccacaggttgtgcccgttctgaacctaaaatgagtgcccatgtcaagaggtttgtgttaaggcctcacaccttaaacagcaccagcacctcaaagtcatttcagagcacagtcactggagaactgaacgcaccttatagtaaacagtttgttcactccaagtcatcgcagtaccggaagatgaaaactgaatggaaatccaatgtgtatctggcacggtctcggattcaggggctgggcctgtatgctgctcgagacattgagaaacacaccatggtcattgagtacatcgggactatcattcgaaacgaagtagccaacaggaaagagaagctttatgagtctcagaaccgtggtgtgtacatgttccgcatggataacgaccatgtgattgacgcgacgctcacaggagggcccgcaaggtatatcaaccattcgtgtgcacctaattgtgtggctgaagtggtgacttttgagagaggacacaaaattatcatcagctccagtcggagaatccagaaaggagaagagctctgctatgactataagtttgactttgaagatgaccagcacaagattccgtgtcactgtggagctgtgaactgccggaagtggatgaactgaaatgcattccttgctagctcagcgggcggcttgtccctaggaagaggcgattcaacacacc

SEQ ID NO: 405012 - DNA, 1000 bp, Homo Sapiens; identical to SEQ ID NO: 293115

SEQ ID NO: 405013 - DNA, 1000 bp, Homo Sapiens; identical to SEQ ID NO: 293116

SEQ ID NO: 405014 - DNA, 1000 bp, Homo Sapiens; identical to SEQ ID NO: 293117

SEQ ID NO: 405015 - DNA, 1000 bp, Homo Sapiens; identical to SEQ ID NO: 118765

SEQ ID NO: 405016 - DNA, 1000 bp, Homo Sapiens; identical to SEQ ID NO: 118766

SEQ ID NO: 405017 - DNA, 1000 bp, Homo Sapiens
tgccaaatactacaagatcaatggcaccaccacccgcacgctcatcaaggcctacgggatccgcattgacgtcattgtgcatggacaggccgggaagttcagcctgattcccaccattattaatctggccacagctctgacttccgtcggggtggtaaggaaccctctctggggtcccagcgggtgcggggggtccaccaggcccttacacaccggtctctgctggccccagggctccttcctgtgcgactggatcttgctaacattcatgaacaaaaacaaggtctacagccataagaaatttgacaaggtgtgtacgccgagccacccctcaggtagctggcctgtgacccttgcccgtgtattgggccaggcccctcccgaacccggccaccgctccgaggaccagcaccccagccctccatcaggccaggagggccaacaaggggcagagtgtggcccagccttcccgcccctgcggccttgccccatctctgccccttctgagcagatggtggacactcctgcctccgagcctgcccaagcctccacacccacagaccccaaaggtttggctcaactctgagctcctttccatctcactggactgcagacccggcctggtggggccagagagtccccagctagggacctgcacgtggacgtgggcacctcagtagcggagcatctccacgaaacggggcaccacaggatccctgtgcaagggctgggggcacgctctggccccaggcttgtgccccaccctggcatacagcccctgacacctcctccccagctggtccctacagggctgctcacttcccatcacctctcacagccacctggaacccaagccagctgagctctgaggggctctgctcccggtcttgggccctgggaaccccaccccaccccaccccacaggcgttgtaaccttgaatctgcccagactcttcccttagaagtcacaacatactcagtccaataaacctgtgagcag

SEQ ID NO: 405018 - DNA, 1000 bp, Homo Sapiens
ttatgcctgtgattgagtttgagtatgctgaaagtatcaatgaaggccttttgaaggtctcccaagaggccattgaaaatggaattcacagcgcatgtctccaaggaccattgcttggatccccaattcaggatgtagcaattactttacattccctgacaattcatcctggcacctccacaactatgatttctgcctgtgtctcaagatgcgtgcaaaaggctctgaagaaagctgataagcaagttttggagcctctgatgaatcttgaggttacagtagctagagattatctcagccctgtcctggcagatctggcacaaagaagaggaaacattcaggaaattcagactcgccaggacaacaaagttgttattggatttgttcccttagcagaaattatgggttattcaactgtgcttcgaacgctaacatcaggctcagctacttttgccttagaactatctacttatcaagccatgaatcctcaagatcaaaatacactgctcaaccggagaagtggtttgacctaaatgttttagtttttggagagaaattcaggagcacctagctacttcattttcagtaagaacaatttttattgctttatttattggacgaataaagtactgtttcagtacattcagagaactagataaaagatataacttaagctttgatagtggcactggagccacccgttttaatttatataatgagaaatgtgctttgatgtttaaagccactgtacctgaatcatgctgttcatctatgaagttattactataagtagccttcagaagagtggtatcacaaagttgtgtttcttttgtgtccttaagcttgtctcacaagaaagatgccaggcctctaaatgtaataagatagagggtcaaaggttcaatcaataaaaatattttattcaaaaaacagtctaatatcttattttacatgatttcaaaataaagttgattgtagtacaaaaaaaaaaaaaaaaaaa

SEQ ID NO: 405019 - DNA, 1000 bp, Homo Sapiens; identical to SEQ ID NO: 221575

SEQ ID NO: 405020 - DNA, 1000 bp, Homo Sapiens; identical to SEQ ID NO: 118768

SEQ ID NO: 405021 - DNA, 1000 bp, Homo Sapiens; identical to SEQ ID NO: 224323

SEQ ID NO: 405022 - DNA, 1000 bp, Homo Sapiens; identical to SEQ ID NO: 118769

SEQ ID NO: 405023 - DNA, 1000 bp, Homo Sapiens; identical to SEQ ID NO: 287981

SEQ ID NO: 405024 - DNA, 1000 bp, Homo Sapiens; identical to SEQ ID NO: 118770

SEQ ID NO: 405025 - DNA, 1000 bp, Homo Sapiens; identical to SEQ ID NO: 118771

SEQ ID NO: 405026 - DNA, 1000 bp, Homo Sapiens
atggtatagactgcctctggggaagcaagttggcagttcttgaacagcatcagatatcaagagtttgtaggtctggattcacctaagattcaagggagtgttgcttctcaactcagccaactgagtagcaaatcatttgttctagaccacctaaggagggaaggttatggaatgccccaagtattcaagatcatcttgattgaccaaagaccaaaaaaaaaaaaaagacctgtggttccagaaagctcattagttgagattctgtgagtctaggttgaccacagaggcaagcactggtgagtctaggacagattttacgtggagagttgaactactccagaaactaaagagtaatgtttctagaatgcacaaaacattgttagtctgtgggtttagaaagactgaagtgacagattaagagttcttgatattagataactccaacttctggctgtagagcacccagccaagagaataagcagtgctttgaaaggatccactgggtgggttgtttttttttaaagtgccattctagaatgtccaaagggaatcaggattctgtggctgtagactgatcacagagtcaaggaagcagtggcaattctagatatctgagattttgctggttccagtttgcccaatggagttgagaatctcaatgattctagatgacttcttgtggttctgtaatgccaaaaggaatgaaggctccagggatacagagttgtccattaccaaagcctggaagttctcatcacctccaggtggactgcttggcagtgctaggaggtggactcaggacttcagaagcaacatttctggcctgacctggaaggtgaaggtgaaggtgagaccctgtagggcacagggctaattagtggacaagggaagggggaggcccagggctggtgagtctagaatgctctggaaccctacacctagtgatgtgtgtctatttctttttctttttcttttttttttttttttgagactgagtctc

SEQ ID NO: 405027 - DNA, 1000 bp, Homo Sapiens; identical to SEQ ID NO: 224325

SEQ ID NO: 405028 - DNA, 1000 bp, Homo Sapiens; identical to SEQ ID NO: 293127

SEQ ID NO: 405029 - DNA, 1000 bp, Homo Sapiens; identical to SEQ ID NO: 118773

SEQ ID NO: 405030 - DNA, 1000 bp, Homo Sapiens; identical to SEQ ID NO: 293129

SEQ ID NO: 405031 - DNA, 1000 bp, Homo Sapiens; identical to SEQ ID NO: 118774

SEQ ID NO: 405032 - DNA, 1000 bp, Homo Sapiens; identical to SEQ ID NO: 293131

SEQ ID NO: 405033 - DNA, 1000 bp, Homo Sapiens; identical to SEQ ID NO: 293132

SEQ ID NO: 405034 - DNA, 1000 bp, Homo Sapiens; identical to SEQ ID NO: 293133

SEQ ID NO: 405035 - DNA, 1000 bp, Homo Sapiens; identical to SEQ ID NO: 224328

SEQ ID NO: 405036 - DNA, 1000 bp, Homo Sapiens; identical to SEQ ID NO: 224328

SEQ ID NO: 405037 - DNA, 1000 bp, Homo Sapiens
cacagtctcctcctctactgcaagattggaccaggcccactccgcatctcaagaataggaaggcacggccctgcaatatggactcagctctggctctctgtgtgaccttgggcagctccgtgcctctctctgtactccctcagtttccttctctgtacaatgtggctggggagggagaggatgggaccaggttggaccacgtggcatcagaggtcccatccagatccaactataggtccaagagtccacgtaagcaggtttgcaaggctctaaagttcctatagtcctgagaccccctgccagcaaagagtgacagtcacctccatgccctgccctcattgcaaagccctcactcaccttctggtctcagcaagggaggagagtctgttgctggcatagccctggaaggagcccccagcctctcccctcctcctccttgtcactggcctcccacaactccccttctggctgcctgtaaccttgaggggcattcaggaggccagcgttccctcaggcactgggggtttgttttggggggtgggagttgatcctcccacccagtctgcccctggtctctgcccatccaatcagagcccaccctcctggaagagacccccgtgttcagagtgctggcagccctgcacgtgtccagggacactgcatttcaaagaaccactgagtgggtgagctaccttgggcaaaccccccactcctgactctgactgccacgtgggtggcccgacctctgacctgctgtcatcatagaggtagaaagcaaacaatctggggctcagcacacctgggggtgctcccactcattcagtgtgtggggcccctgagcagaggctgggcattgccactagaacctgagctcctagagagcaaggacctgggtggcctcgcttactgttccagcccaggccaagcacagggcctggctcgtggcaaaccttgaataaatatttgttggctgaaaaaaaaaaaaaaaaaaaaaaaaaaa

SEQ ID NO: 405038 - DNA, 1000 bp, Homo Sapiens; identical to SEQ ID NO: 292308

SEQ ID NO: 405039 - DNA, 1000 bp, Homo Sapiens
tacttctccagccccctccttccctctcttctgcctgatagagggaagaggaagaggaggacgaacagagatcctgaaattctgacttgctgctattccagaacccagcctcctgggtttccccagtcctcatttttcctcccaatacccacccttctctctcgagggatctaggcaccttggtcccagtgtcttccttttgttctcactgccaaactgcctgtcctgggatctagttatcttggccctgcactctcaacatgagtagcgaacacttaaattgggttttcaacagtcccagctttcactgccagggtcccagtcagattccaggaatttgcgccctaactttgcttgctaatcctggtttagagctatcccactaaaatatttaatcctaattcttagtccttgcctgtgagatatgaggtcttacaggagacctcagagctcccagcccttctcctcctgctaacccttctcacaccctcaagaggagttagaaaagaggtccttgtcattctcacctcttatggaaaatggaataagaaataatcatatcctttcttcccacccttctcctgttatttaggatttctgacaaagctggcttgagattggtcacttagagccgactgtctcctctgccttttgtttttcagcttcagagacagatccaatatagtcccagggacctgggtctctgggagaggaaggaagagggagggagcaaagagattggggtatgtcccctgtagtacactcttacctcttacttcctagactttgatttctccggcagcccagatgttcagttctcttggcccctctctaccccttactgggatctggttttcattttccggtccttttgccatacacagttacagagatcagtcaaatccataccaccactgagatctcatttattgccacagatgcacaaaataaataacccaaaatcacaaaaaaaaaaaaaaaaaaaaaaaaaaaaaaaaaa

SEQ ID NO: 405040 - DNA, 1000 bp, Homo Sapiens; identical to SEQ ID NO: 224329

SEQ ID NO: 405041 - DNA, 1000 bp, Homo Sapiens; identical to SEQ ID NO: 293137

SEQ ID NO: 405042 - DNA, 1000 bp, Homo Sapiens; identical to SEQ ID NO: 115665

SEQ ID NO: 405043 - DNA, 1000 bp, Homo Sapiens; identical to SEQ ID NO: 293138

SEQ ID NO: 405044 - DNA, 1000 bp, Homo Sapiens
ggatcaaggatgaggtgggcgcaccgggcatagtggttggagtttctgtagatggaaaagaagtctggtcagaaggtttaggttatgctgatgttgagaaccgtgtaccatgtaaaccagagacagttatgcgaattgctagcatcagcaaaagtctcaccatggttgctcttgccaaattgtgggaagcagggaaactggatcttgatattccagtacaacattatgttcccgaattcccagaaaaagaatatgaaggtgaaaaggtttctgtcacaacaagattactgatttcccatttaagtggaattcgtcattatgaaaaggacataaaaaaggtgaaagaagagaaagcttataaagccttgaagatgatgaaagagaatgttgcatttgagcaagaaaaagaaggcaaaagtaatgaaaagaatgattttactaaatttaaaacagagcaggagaatgaagccaaatgccggaattcaaaacctggcaagaaaaagaatgattttgaacaaggcgaattatatttgagagaaaagtttgaaaattcaattgaatccctaagattatttaaaaatgatcctttgttcttcaaacctggtagtcagtttttgtattcaacttttggctataccctactggcagccatagtagagagagcttcaggatgtaaatatttggactatatgcagaaaatattccatgacttggatatgctgacgactgtgcaggaagaaaacgagccagtgatttacaatagagcaaggtaaatgaataccttctgctgtgtctagctatatcgcatcttaacactattttattaattaaaagtcaaattttctttgtttccattccaaaatcaacctgccacattttgggagcttttctacatgtctgttttctcatctgtaaagtgaaggaagtaaaacatgtttataaagtaaaaaaaaaaaaaaaaaaaaaaaaaaaaaaaaaaaaaaaaaaaaaaaaaaaaaaa

SEQ ID NO: 405045 - DNA, 1000 bp, Homo Sapiens; identical to SEQ ID NO: 224330

SEQ ID NO: 405046 - DNA, 1000 bp, Homo Sapiens; identical to SEQ ID NO: 118776

SEQ ID NO: 405047 - DNA, 1000 bp, Homo Sapiens; identical to SEQ ID NO: 293142

SEQ ID NO: 405048 - DNA, 632 bp, Homo Sapiens; identical to SEQ ID NO: 293143

SEQ ID NO: 405049 - DNA, 1000 bp, Homo Sapiens
tcgtacggccctcagtgtttgtggtggatggacagaccgacatcccattcacgaggctgggacgaagccaccggagacagtcgtgcagtgtggcccgggacggacctgcaggctcctgggagcagctgatacaagagcgaaggtctcacgaggtcaacccagcagcgcatctcacaggggccaactccagcttgaccggcagcggggggccgctgttatgggagactcagctgggcctggccttcctgaggggcctcagctaccacgatggggcccttgtggtcaccaaagctggctactactacatctactccaaggtgcagctgggcggtgtgggctgcccgctgggcctggccagcaccatcacccacggcctctacaagcgcacaccccgctaccccgaggagctggagctgttggtcagccagcagtcaccctgcggacgggccaccagcagctcccgggtctggtgggacagcagcttcctgggtggtgtggtacacctggaggctggggaggaggtggtcgtccgtgtgctggatgaacgcctggttcgactgcgtgatggtacccggtcttacttcggggctttcatggtgtgaaggaaggagcgtggtgcattggacatgggtctgacacgtggagaactcagagggtgcctcaggggaaagaaaactcacgaagcagaggctgggcgtggtggctctcgcctgtaatcccagcactttgggaggccaaggcaggcggatcacctgaggtcaggagttcgagaccagcctggctaacatggcaaaaccccatctctactaaaaatacaaaaattagccggacgtggtggtgcctgcctgtaatccagctactcaggaggctgaggcaggataattttgcttaaacccgggaggcggaggttgcagtgagccgagatcacaccactgcactccaacctgggaaacgcagtgagactgtgcctcaaaaaaaaaaaaaaaaaaaaaaaaaaaaa

SEQ ID NO: 405050 - DNA, 1000 bp, Homo Sapiens; identical to SEQ ID NO: 224331

SEQ ID NO: 405051 - DNA, 1000 bp, Homo Sapiens; identical to SEQ ID NO: 118777

SEQ ID NO: 405052 - DNA, 1000 bp, Homo Sapiens; identical to SEQ ID NO: 293146

SEQ ID NO: 405053 - DNA, 1000 bp, Homo Sapiens; identical to SEQ ID NO: 224332

SEQ ID NO: 405054 - DNA, 1000 bp, Homo Sapiens; identical to SEQ ID NO: 293147

SEQ ID NO: 405055 - DNA, 1000 bp, Homo Sapiens; identical to SEQ ID NO: 118778

SEQ ID NO: 405056 - DNA, 1000 bp, Homo Sapiens; identical to SEQ ID NO: 220569

SEQ ID NO: 405057 - DNA, 1000 bp, Homo Sapiens; identical to SEQ ID NO: 293150

SEQ ID NO: 405058 - DNA, 1000 bp, Homo Sapiens; identical to SEQ ID NO: 224333

SEQ ID NO: 405059 - DNA, 1000 bp, Homo Sapiens; identical to SEQ ID NO: 224334

SEQ ID NO: 405060 - DNA, 1000 bp, Homo Sapiens
tcaaccagatgctgaccatcaaccctgccaagcgcatcacagcccatgaggccctgaagcacccgtgggtctgccaacgctccacggtagcatccatgatgcacagacaggagactgtggagtgtctgaaaaagttcaatgccaggagaaagctcaagggagccatcctcaccaccatgctggccacacggaatttctcagcagccaagagtttactcaacaagaaagcagatggagtcaagccccagacgaatagcaccaaaaacagtgcagccgccaccagccccaaagggacgcttcctcctgccgccctggagtcttctgacagtgccaataccaccatagaggatgaagacgctaaagcccggaagcaggagatcattaagaccacggagcagctcatcgaggccgtcaacaacggtgactttgaggcctacgcgaaaatctgtgacccagggctgacctcgtttgagcctgaagcactgggcaacctggttgaagggatggacttccacagattctacttcgagaacctgctggccaagaacagcaagccgatccacacgaccatcctgaacccacacgtgcacgtcattggagaggatgccgcctgcatcgcttacatccggctcacgcagtacattgacgggcagggccggccccgcaccagccagtctgaggagacccgcgtgtggcaccgccgcgacggcaagtggcagaacgtgcacttccactgctcgggcgcgcctgtggccccgctgcagtgaagagctgcgccctggtttcgccggacagagttggtgtttggagcccgactgccctcgggcacacggcctgcctgtcgcatgtttgtgtctgcctcgttccctcccctggtgcctgtgtctgcagaaaaacaagaccagatgtgatttgttaaaaaaaaacaaaaaaaaaaaaaaaaaaaacaagatgacgacgacaaccacaaaaaaaattgacatcagatgaaatgaaaaaa

SEQ ID NO: 405061 - DNA, 1000 bp, Homo Sapiens; identical to SEQ ID NO: 293153

SEQ ID NO: 405062 - DNA, 1000 bp, Homo Sapiens; identical to SEQ ID NO: 118779

SEQ ID NO: 405063 - DNA, 1000 bp, Homo Sapiens; identical to SEQ ID NO: 293155

SEQ ID NO: 405064 - DNA, 1000 bp, Homo Sapiens; identical to SEQ ID NO: 293156

SEQ ID NO: 405065 - DNA, 1000 bp, Homo Sapiens; identical to SEQ ID NO: 221427

SEQ ID NO: 405066 - DNA, 1000 bp, Homo Sapiens
ccctgtccagtgtccgccctccacctcctggcagccacagagccacccgcgccagggccacggcacctcccccgtgggggaccacggctccctggtgcgcatcccgccgccgcctgcccacgagcggtcgctgtccgcctacggcgggggcaaccgcgccagcatggagttcctgcggcaggaggacaccccgggctgcaggccccccgaggggaacctgcgggacagcgacacgtccatctccatcccgtccgtggaccacgaggagctggagcgttccttcagcggcttcagcatctcccagtccaaggagaacctggatgctctcaacagctgctacgcggccgtggcgccttgtgccaaagtcaggccctacattgcggagggagagtcagacaccgactccgacctctgtaccccgtgcgggcccccgccacgctcggccaccggcgagggtccctttggtgacgtgggctgggccgggcccaggaagtgaggcggcgctgggccagtggacccgcccgcggccctcctcagcacggtgcctccgaggttttgaggcgggaaccctctggggcccttttcttacagtaactgagtgtggcgggaagggtgggccctggaggggcccatgtgggctgaaggatgggggctcctggcagtgaccttttacaaaagttattttccaacaggggctggagggctgggcagggccctgtggctccaggagcagcgtgcaggagcaaggctgccctgtccactctgctcagggccgcggccgacatcagcccggtgtgaggaggggcgggagtgatgacggggtgttgccagcgtggcaacaggcggggggttgtctcagccgagcccaggggaggcacaaagggcaggcctgttccctgaggacctgcgcaaagggcgggcctgtttggtgaggacctgcggccttgggtcgacctgcgcaaagggcgggcctgtttggtgaggacctgcggccttgggt

SEQ ID NO: 405067 - DNA, 1000 bp, Homo Sapiens; identical to SEQ ID NO: 293157

SEQ ID NO: 405068 - DNA, 1000 bp, Homo Sapiens; identical to SEQ ID NO: 293157

SEQ ID NO: 405069 - DNA, 1000 bp, Homo Sapiens; identical to SEQ ID NO: 118780

SEQ ID NO: 405070 - DNA, 1000 bp, Homo Sapiens
ccctgtggtcatgtgctcctagctgcacggtggctgctggccacaccacggcaagtggcagcaggggccggccctgtgcacaaggatgcactcctctcggcccctgtagactttctctaaagccgcccgccagcccaggccgctgctctgcaccgagctggtgggcttgggttttgtggagcgcatgcttggaccctttcagtaaggaagggtctttggggttttctgtgcccatgacttgggggctgcacccccacagcacccccacaatgtaggaaaagacctcagggaacctctccctggaaagacgggcagggctggttagcccctcccactgcctgacacctgggacaggctgggcagaggggagagagggcaggacaggccagagtgacgcccccgtgcagcttgggccggagggcaagggatgccagtaagtctgcaggtgcggggtgccacctacaggcccaggcctgtgtcccaagcagtacccaggctttgcagaccacgcggggcagggctccactgaagccacccccacccctcgccagctagctccatagggaagcctgtgtctcctgcccccagggcgcaccctcagtgcaggcacctctgttcccgctttgcccctggaggagccactattccagaaggctccaccctgccgtcctgcgggagcctgctgtccagtcctggccgggccaaggcctgggaaactgtgaaagtcagaaaggccagcggggagaggctggggcgaggggaggagggggatcagcttctgctattaccgaccccccttcatgctgcccctggcgcctagaacccttgcccctcctcatagaccaagtcccgggggtctccactcagtcctgctgcctgcttcaccagaagcagccctgtgagtgtggggtggggaagtcccttcccaacggaggtcccagcctatggccctgggcccaggtgggggtcgcctgcttccttcccggacagggtcctgcag

SEQ ID NO: 405071 - DNA, 595 bp, Homo Sapiens; identical to SEQ ID NO: 293160

SEQ ID NO: 405072 - DNA, 856 bp, Homo Sapiens
aattaccttttcactttacacacatcatcttggattgcccattttgcgtggctaaaaagcagagccatgccgctggggaagcagttgcgatttagccatggctgcagcttggaccgtggtgctggtgactttggtgctaggcttggccgtggcaggccctgtccccacttccaagcccaccacaactgggaagggctgccacattggcaggttcaaatctctgtcaccacaggagctagcgagcttcaagaaggccagggacgccttggaagagtcactcaagctgaaaaactggagttgcagctctcctgtcttccccgggaattgggacctgaggcttctccaggtgagggagcgccctgtggccttggaggctgagctggccctgacgctgaaggtcctggaggccgctgctggcccagccctggaggacgtcctagaccagccccttcacaccctgcaccacatcctctcccagctccaggcctgtatccagcctcagcccacagcagggcccaggccccggggccgcctccaccactggctgcaccggctccaggaggcccccaaaaaggagtccgctggctgcctggaggcatctgtcaccttcaacctcttccgcctcctcacgcgagacctcaaatatgtggccgatgggaacctgtgtctgagaacgtcaacccaccctgagtccacctgacaccccacaccttatttatgcgctgagccctactccttccttaatttatttcctctcaccctttatttatgaagctgcagccctgactgagacatagggctgagtttattgttttacttttatacattatgcacaaataaacaacaaggaattgga

SEQ ID NO: 405073 - DNA, 1000 bp, Homo Sapiens; identical to SEQ ID NO: 293161

SEQ ID NO: 405074 - DNA, 1000 bp, Homo Sapiens; identical to SEQ ID NO: 396343

SEQ ID NO: 405075 - DNA, 1000 bp, Homo Sapiens; identical to SEQ ID NO: 293163

SEQ ID NO: 405076 - DNA, 1000 bp, Homo Sapiens
caagaagaccctcaaggagaccttcccggtggaggcgggcctgctgcggagatctgaccgcgttctcccaaagcttctcggtcaggccagcctggatgcaccactgttgggacgcgtggggcgcacgagccgcggcctggcgcgcctgcagctgttggaaacctattctcggaggctgctggcgactgcagagcgcgtggcacggagcccgacgatcactggcttcttcgcaccgcaacccctggacctggagcccgcgctgccacccggcagccgggtgatcctgcccaccccagaggagcagcctctttctcgcgctgcgggccgcctctccatccacagtctggaggctcagagcctgcgctgcctgcagcccttctgtacccaggacacgcgggataggccttttcaggcgcaggcccaggagagcctggacgtgctgctgcggcacccctcaggctggtggctggtggagaacgaagaccggcagaccgcctggtttccagcgccctacctggaggaggcggccccgggccaaggccgggagggaggcccgtccctagggagcagcggtccccagttctgtgcttcccgcgcctacgagagcagccgcgcagatgagctgtccgtgcccgcgggggcgcgcgtgcgcgtgttggaaacgtcagaccgcggctggtggctatgcaggtacggcgaccgggcgggcctactccccgcggtgctgctgcggccggaagggctgggcgctctcctgagcgggacggggttccgtggaggagacgacccggcgggtgaggcccggggcttccctgaaccctcccaggccaccgcccctccccccaccgtgcccacccgaccttcgccgggcgccatccagagccgctgctgcaccgtcacacgcagggccctggagcggcgcccacggcgccagggccgccctcgagggtgcgtggactctgtgccgcaccccacgacggagcagtgagcgcgaggatcc

SEQ ID NO: 405077 - DNA, 1000 bp, Homo Sapiens; identical to SEQ ID NO: 115549

SEQ ID NO: 405078 - DNA, 1000 bp, Homo Sapiens; identical to SEQ ID NO: 115549

SEQ ID NO: 405079 - DNA, 1000 bp, Homo Sapiens; identical to SEQ ID NO: 293164

SEQ ID NO: 405080 - DNA, 1000 bp, Homo Sapiens
cgcaattctaccttctgggccagtagataggaaacacttagaaaatgccaccagtgatatacttgtatctcctggaaatgagcataaaatcgtgcctgaagctttgttgtgtcatcaggaaagttctcactatatcagtcttccaggtgttgtattttctccacaggtctctcaaacaaattctaatgtggagtcagtgctcagtggttcagctagcatggctcaaaatctgcatgatgagtccctctccacaagccctcatggggctctccaccagcacgtgactgatattcagcttcatattcttaaaaataggatgtatggatgtgattctgtaaagcaaccaagaaatatagaggaacccagcaacatacctgtatcagagaaggattctaattctcaggtggatttaagcattcgggttactgatgatgatattggtgaaataattcaagtagatggaagcggtgatacatcttccaatgaagaaataggaagtacaagagatgcagatgagaatgaatttctagggaatattgacgggggagatctgaaggtacctgaagaagaagctgacagtatttcaaatgaggattcagccacaaacagtagtgataatgaagaccctcaagtaaacattgtagaagaggaccctttaaattctggagatgatgttagtgaacaggatgtgccagacctgtttgacacggataatgttattgtctgtcagtatgataaggcattcccaagaaggacatcgtttaacacctaaactcatttaacaaaggatccgagaagaacagggacagtgtgggaagaaatcttcttgtgatggcatatttgcttcctatatttcttctggaatcatgttcgcttggcttcctgattaaaaacacagttttattgctctctgcactgccaaaccaataaatttacagaagagaaagctgtattccactgtaccccttgcagcatcaataaaactgacagccaaaaaaaa

SEQ ID NO: 405081 - DNA, 1000 bp, Homo Sapiens
gcgtggtggaggtgacagaggaggaggttaagaactcagtcaggctcatccccagctggaccacggtgatcctggtgaagtccatgctgaggaagcgttcctttgggaacccgtttgagccccaagcacggagggaagagcgatccatgtctgctccaggaaacctactggtgtaagtactggtgggccagggactgccgggcactccctggagttgggtggggaggtctgaggcccatcctcccactctcactgtcgttgggccaaggccagagcctggggacttggccaggtctcggtgttggccccatttgcatctctgtccccaaggttagtcggggctagaagggaccttttgggcccagctcttgcttcattcctggggccagcatccctcacacacacacttccagggatgaggagctcacgcagcccctccatgggacaggaagacccttcttccatgcagcttgatgtcactctctcactgggtccagcccctctggggcttcaaatctgtggccccctcagcccttggcagcctggcagaggtttgcagacaggctgatgttggcttcctgtaggaggctggcgggctgtagaggaggggtgctggcccctctgcctggccctggggactgttggctgctctcccaagtggcccaggctgcctgcagccattgctggggctctgtgcccagtcagcactttgtgagtgcttgttcagtgagtaagcagggacaggctggccggtggaccacgggagaggaacccgcattggccgagggctccctatggtgagccacgcctgtgggttcaccacctcctaggagggtccagaaaagcagctccccaagcctgtgcgcctcgtcctcagcagatccaccttcttcactataataaaagccagtctgggatgctaaaaaaaaaaaaaaaaaaaaaaaaaaaaaaaaaaaaaaaaaaaaaaaaaaaaaaaaaaaaaaaaaaaaaaaaaaaaaaa

SEQ ID NO: 405082 - DNA, 1000 bp, Homo Sapiens; identical to SEQ ID NO: 224336

SEQ ID NO: 405083 - DNA, 1000 bp, Homo Sapiens; identical to SEQ ID NO: 293165

SEQ ID NO: 405084 - DNA, 1000 bp, Homo Sapiens; identical to SEQ ID NO: 293167

SEQ ID NO: 405085 - DNA, 1000 bp, Homo Sapiens; identical to SEQ ID NO: 224337

SEQ ID NO: 405086 - DNA, 1000 bp, Homo Sapiens; identical to SEQ ID NO: 293170

SEQ ID NO: 405087 - DNA, 1000 bp, Homo Sapiens; identical to SEQ ID NO: 293171

SEQ ID NO: 405088 - DNA, 1000 bp, Homo Sapiens; identical to SEQ ID NO: 293173

SEQ ID NO: 405089 - DNA, 1000 bp, Homo Sapiens; identical to SEQ ID NO: 293176

SEQ ID NO: 405090 - DNA, 1000 bp, Homo Sapiens; identical to SEQ ID NO: 293177

SEQ ID NO: 405091 - DNA, 1000 bp, Homo Sapiens
ccacaggtatacaaggtggggatttatggctggcggaaacgatgcctgtatttctttgtcctgctcctcatgattttaatactggtgaacttggccatgaccatctggattctcaaagtcatgaacttcacaattgatggaatgggaaacctgaggatcacagaaaaaggtctaaagctagaaggagactctgaattcttacaacctctctacgccaaagaaatccagtcccgaccaggtaatgccctgtacttcaagtctgccagaaatgttacagtgaacattctcaatgaccagactaaagtgctaactcagcttataacaggtccaaaagccgtagaagcttatggtaaaaaatttgaggtaaaaactgtttctggaaaattgctcttctctgcagacaataatgaagtggtagtaggagctgaaagattacgagttttaggagcggagggcacagtgttccctaaatctatagaaacacctaatgtcagggcagaccccttcaaagaactaaggttggagtccccaacccggtctctagtgatggaggccccaaaaggagtggaaatcaatgcagaagctggcaatatggaagccacctgcaggacagagctgagactggaatccaaagatggagaggtgagggatgagaaggacagaagttcaaagagctacagcttcaacaggccaacccttcccataactggttgacctcggagttggatcctacagtgtatcaacaaaaggagccaagcaggttttatttctgaaacaattaattgagcagcatgattataagccaaacccacaatccatcaaagtgatgatttcttatttgtaaaatgcagagataatggcatgtattccaagtacagaattatatgaccatgaaaatgaatgctattttcaaattctctcttgtcaccttaaaataagattttgttagccaacataattaagctgtatatattatacacatctggctcaagatgaaaaa

SEQ ID NO: 405092 - DNA, 1000 bp, Homo Sapiens; identical to SEQ ID NO: 293178

SEQ ID NO: 405093 - DNA, 1000 bp, Homo Sapiens; identical to SEQ ID NO: 118782

SEQ ID NO: 405094 - DNA, 1000 bp, Homo Sapiens; identical to SEQ ID NO: 118783

SEQ ID NO: 405095 - DNA, 1000 bp, Homo Sapiens
gtgttcgcctgcctgtcggtgctcttcgtgaccgtcaccgccgtcaacctctccgtcagcaccttgcccagcctgagggaggaggaggagcaggtaagagcccacgccccgcggggaaacgcgccaccacgagggaagggactctgagcattgtcacctcctccagaaagcctcctctgattgcacactggctgaatagcatccctggtccctcctgacatcaggaatgtttgtgtgcatggtctgcctccctgttaatatgtgagcatcatgggggtccacgcctgtgcctgtcctggcctccactgtgcccaccactgccctcccccttgccagtgtttagaacagtgtccagcacaaacaggcactcaaccactatttgttgaatgaacaaatgagtgaataaatgggtggtgtgatttttgacgtgcctggccctgagcgaagcacattacatatatcatcaaatttatctcaaccattcggtcctttctcaacgttcctaatcctttgcatcatagtagcccagacacattttctgggtcctgaagataatttttattgataggtacatgtgtgtctacaaatggtgagcatttctttttgttacataagagaatgaatggaaagtttatttactccagggcctgacacggggtgtgtgctacagtctaagggctcccactcatctgggagttcacgggagccggagctgggctgcatgtgccaactacgtcttatctccccagggaatgctccagcaaccctgtgggggaagtgttttcacacccactaggtatttgaggacactgcccaaccccaggtctaagtccagtctgtctttgtaagcatggaaatatggttcccacgtggcagcttggggacctaatatagccccacaggactatgtgattggcccacacaaggtttcccaaaaatttgacttggttgccaacaataaaagtgaagttttttcataaaaaaaaaaaaaaaaaaaaaa

SEQ ID NO: 405096 - DNA, 678 bp, Homo Sapiens; identical to SEQ ID NO: 118784

SEQ ID NO: 405097 - DNA, 1000 bp, Homo Sapiens; identical to SEQ ID NO: 118785

SEQ ID NO: 405098 - DNA, 1000 bp, Homo Sapiens; identical to SEQ ID NO: 293183

SEQ ID NO: 405099 - DNA, 1000 bp, Homo Sapiens; identical to SEQ ID NO: 118786

SEQ ID NO: 405100 - DNA, 1000 bp, Homo Sapiens; identical to SEQ ID NO: 118786

SEQ ID NO: 405101 - DNA, 1000 bp, Homo Sapiens
tgctggaattctacacggccttctcccattccttctcccggaacctgattctgacgtacaacttgaggaagaggattgtgttccggaagatcagcgatgtgaaacgtgaagaggaagaacgcatgaaacgaaagaatgaggcccccctgatcttgcccccggaccaccctgtccggcgcctcttccagagattccgacagcagaaagaggccaggctggcagctgagagagggggccgggacctggatgacctagatgtggagaagggcaatgtccttacagagcatgcctccgccaaccacagcctcgtgaaggccagcgtggtcaccgtgcgtgagagtcctgccacgcccgtatccttccaggcagcctccacctccggggtgccagaccacgcaaagctacaggcgccagggtccgagtgcctgggccccaaggggggcgggggcgattgtgccaagcgcaaaagctgggcccgcttcaaagatgcttgcgggaagagtgaggactggaacaaggtgtccaaggctgagtcgatggagacacttcccgagaggacaaaagcgtcaggcgaggccacactgaagaagacagactcgtgtgacagtggcatcaccaagagcgacttgcgcctggacaacgtgggtgaggccaggagtccccaggatcggagtcccatcctggcagaggtcaagcattcgttctaccccatccctgagcagacgctgcaggccacagtcctggaggtgaggcacgagctgaaggaggacatcaaggccttaaacgccaaaatgaccaatattgagaaacagctctctgagatactcaggatattaacttccagaagatcctctcagtctcctcaggagttgtttgaaatatcgaggccacagtccccagaatcagagagagacatttttggagccagctgagaggtctatttaaaaaaaaagtcagagacagatacctccaaccctgccgtcaccaccacccctaccac

SEQ ID NO: 405102 - DNA, 1000 bp, Homo Sapiens; identical to SEQ ID NO: 224340

SEQ ID NO: 405103 - DNA, 1000 bp, Homo Sapiens; identical to SEQ ID NO: 224341

SEQ ID NO: 405104 - DNA, 1000 bp, Homo Sapiens; identical to SEQ ID NO: 293185

SEQ ID NO: 405105 - DNA, 1000 bp, Homo Sapiens; identical to SEQ ID NO: 118787

SEQ ID NO: 405106 - DNA, 1000 bp, Homo Sapiens; identical to SEQ ID NO: 293188

SEQ ID NO: 405107 - DNA, 1000 bp, Homo Sapiens
gtcacagattactcccattcagacgtctctggcctatgtgaaaaccagtgaatcccttaagcagaacaaccgtgatgccatggaactcaagcccaacggcggtgctgaccaaaaatgtctcaaagtcaacagcccaataagaatgaagaatggaaatggaaaagggtggctgcgactcaagaataatatgggagcccatgaggagaaaaaggaagactggaataatgtcactaaagctgagtcaatggggctattgtctgaggaccccaagagcagtgattcagagaacagtgtgaccaaaaacccactaaggaaaacagattcttgtgacagtggaattacaaaaagtgaccttcgtttggataaggctggggaggcccgaagtccgctagagcacagtcccatccaggctgatgccaagcaccccttttatcccatccccgagcaggccttacagaccacactgcaggaagtcaaacacgaactcaaagaggacatccagctgctcagctgcagaatgactgccctagaaaagcaggtggcagaaattttaaaaatactgtcggaaaaaagcgtaccccaggcctcatctcccaaatcccaaatgccactccaagtacccccccagataccatgtcaggatatttttagtgtctcaaggcctgaatcacctgaatctgacaaagatgaaatccacttttaatatatatacatatatatttgttaatatattaaaacagtatatacatatgtgtgtatatacagtatatacatatatatattttcacttgctttcaagatgatgaccacacatggattttgatatgtaaatattgcatgtccagctggattctggcctgccaaagaagatgatgattaaaaacatagatattgcttgtatattatgcagttgactgcatgcacactttacatttatttataatctctattctataataaaagagtatgatttttgttacccaaaaaaaaaaaaaaaaaa

SEQ ID NO: 405108 - DNA, 1000 bp, Homo Sapiens; identical to SEQ ID NO: 293189

SEQ ID NO: 405109 - DNA, 1000 bp, Homo Sapiens
tgttccgcgttcacgtcccgcaacccagcggccgcacgctgtccctgcaggtggcctccaaccccatcgaatgctcccagcgctcagctcaggagctgcctctggtggagaagcagagcacggacagctatccggtcgtgggcgggaagaagatggtcctgtctggccacaacttcctgcaggactccaaggtcattttcgtggagaaagccccagatggccaccatgtctgggagatggaagcgaaaactgaccgggacctgtgcaagccgaattctctggtggttgagatcccgccatttcggaatcagaggataaccagccccgttcacgtcagtttctacgtctgcaacgggaagagaaagcgaagccagtaccagcgtttcacctaccttcccgccaacggtaacgccatctttctaaccgtaagccgtgaacatgagcgcgtggggtgctttttctaaagacgcagaaacgacgtcgccgtaaagcagcgtggcgtgttgcacatttaactgtgtgatgtcccgttagtgagaccgagccatcgatgccctgaaaaggaaaggaaaagggaagcttcggatgcattttccttgatccctgttgggggtggggggcgggggttgcatactcagatagtcacggttattttgcttcttgcgaatgtataacagccaaggggaaaacatggctcttctgctccaaaaaactgagggggtcctggtgtgcatttgcaccctaaagctgcttacggtgaaaaggcaaataggtatagctattttgcaggcacctttaggaataaactttgcttttaagcctgtagtcctgatgtggtctttaaggatggtgaatgagctttgtgctgggcggacgtccccgagacacttctccaggggtaacttcatctcctgggaccacgggcatccaggctggggcaccttctcctcaacctgcctgcccctcacccgccgtgggaatggctccttttcactcatac

SEQ ID NO: 405110 - DNA, 1000 bp, Homo Sapiens; identical to SEQ ID NO: 293191

SEQ ID NO: 405111 - DNA, 1000 bp, Homo Sapiens; identical to SEQ ID NO: 118789

SEQ ID NO: 405112 - DNA, 1000 bp, Homo Sapiens; identical to SEQ ID NO: 293194

SEQ ID NO: 405113 - DNA, 1000 bp, Homo Sapiens; identical to SEQ ID NO: 118790

SEQ ID NO: 405114 - DNA, 1000 bp, Homo Sapiens; identical to SEQ ID NO: 224342

SEQ ID NO: 405115 - DNA, 1000 bp, Homo Sapiens; identical to SEQ ID NO: 118791

SEQ ID NO: 405116 - DNA, 1000 bp, Homo Sapiens
ggagacgtattcctataacatataccaccccatgggagagatctatgagtggatgagagagatcagtgagaagtacaaggaagtggtgacacagcatttcctaggagtgacctatgagacccaccccatgtattatctgaagatcagccaaccatctggtaatcccaagaaaatcatttggatggactgtggaattcacgccagagaatggattgctcctgctttttgccaatggttcgtcaaagaaattctacaaaaccataaagacaactcaagtatacgcaagctccttaggaacctggacttctatgtccttccagttcttaacatagatggttatatctacacttggacaactgatcgtctttggaggaaatcccgttcaccccataataatggcacatgttttgggacggatctcaatcgaaatttcaatgcatcttggtgtagtattggtgcctctagaaactgccaagatcaaacattctgtgggacagggccagtgtctgaaccagagactaaagctgttgccagcttcatagagagcaagaaggatgatattttgtgcttcctgaccatgcactcttatgggcagttaattctcacaccttacggctacaccaaaaataaatcaagtaaccacccagaaatgattcaagttggacagaaggcagcaaatgcattgaaagcaaagtatggaaccaattatagagttggatcgagtgcagatattttatatgcctcatcagggtcttcaagagattgggcccgagacattgggattcccttctcatatacgtttgagctgagggacagtggaacatatgggtttgttctgccagaagctcagatccagcccacctgtgaggagaccatggaggctgtgctgtcagtcctggatgatgtgtatgcgaaacactggcactcggacagtgctggaagggtgacatctgccactatgctgctgggcctgctggtgtcctgcatgtctcttctctaa

SEQ ID NO: 405117 - DNA, 1000 bp, Homo Sapiens; identical to SEQ ID NO: 224344

SEQ ID NO: 405118 - DNA, 1000 bp, Homo Sapiens; identical to SEQ ID NO: 293200

SEQ ID NO: 405119 - DNA, 766 bp, Homo Sapiens
aagggctcagcctcctctcctggggtccagcttgtcgcctctggctcacctgttcctagagcaatgtcttcccagcagcagcagcggcagcagcagcagtgcccaccccagagggcccagcagcagcaagtgaagcagccttgtcagccaccccctgttaaatgtcaagagacatgtgcacccaaaaccaaggatccatgtgctccccaggtcaagaagcaatgcccaccgaaaggcaccatcattccagcccagcagaagtgtccctcagcccagcaagcctccaagagtaaacagaagtaaggatggactggatattaccatcatccaccatcctggctaccagatggaaccttctcttcttccttctcctcttccctccagctcttgagcctaccctcctctcacatctcctcctgcccaagatgtaaggaagcattgtaaggatttcttcccatcgtacccttccccacacataccaccttggcttcttctatatcccaccccgatgctctcccaggtgggtgtgagagagacctcattctctgcaggctccagcgtggccacagctaaggcccatccatttcccaaagtgaggaaagtgtctgggcttcttctggggttccaccctgacaagtagggtcacagaggctggtgcacagtttctgcctcattcctctccatgatgccccctgctctgggcttctctcctgttttccccaataaatatgtgcctcatgtaataaatgtgtctgcttcctgggct

SEQ ID NO: 405120 - DNA, 1000 bp, Homo Sapiens; identical to SEQ ID NO: 224345

SEQ ID NO: 405121 - DNA, 1000 bp, Homo Sapiens; identical to SEQ ID NO: 293201

SEQ ID NO: 405122 - DNA, 1000 bp, Homo Sapiens
caatggagagtatgaagaaacctggtctttttattcatgtcggtggcagtgtggaaattccatccagaaaattacaactccacttgatttagttgatcaccatctcagtcttcaaaagataacatcatgaggtgtgggaagtcctagttttaaggaaaccactgaaatatagatgggaaatgtggactttacaagtatatgttatatatacttgcaatgtgacatggttctgtagatcattttataataataaatattttaatttatcataacatataaaagaaacctttgttgtttgttgaaagaaaatgaaggaacagggggaaaaaaggtgcaaaatgctaaatttctaaaaatggatttggcatgtcttcccatcagttcaggtcaaaagtgcattgttgtgagatttattaaaaaaaaaatgataacacactattttcatatttttttgtttatttgcacaacttttaaaccagattactggttaaaatccaacagtacacaatttataaagtaaaaagattttataaggaaaacaaatataataaccagtgctgtgaaatgcagaagaaaggcttgttttggttgtttttcttttttaggaaaacgctgcctaaaatgttaatcttgtaaaaagtatgtatttggaattttcttcgttttaatagaatattataaactcaaaatataaatttttttcaaatttggagtttaagatatagctgtagaggtggttttaattcctttagatgtctcataaaatgagactttttatatgttaatgtataataaaactgaaacaagattattttccatttgaaatttttgtatagtttaaaaaggcttccgtattctttgttggtattgtgccactgcagaactttagtgcagagtttatatttagctaaactgttatgttaattaagaaatgcataaatcttctattcttaatatttgtaattctaaataaattgatctatgaaaaaaaaaaaaaaaa

SEQ ID NO: 405123 - DNA, 1000 bp, Homo Sapiens
ctttgcggagagcttctggagtaagctggaggtcaccttcaacctgcgggacgcagccgggggtctccactcatccccccgacaggctcctggcagccaagaccaccaaggtttctttctcagtgacaaccagtcagatgcagcccctcccctgagcatctcagatgcatctggcctctggcctgagctactgcaggaaatgcccccaaggcacagcccccaaagccctcaggaagacccagattgctggcctctgaagctgggctccaggctagagcagctccaggcccagatgaacaggctggagtcccgcgtgtcctcagacctcagccgcatcttgcagctcctccagaagcccatgccccagggccacgccagctacattctggaagcccctgcctccaatgacctggccttggttcctatagcctcggagacgacgagtccagggcccaggctgccccagggctttctgcctcctgcacagaccccaagctatggagacttggatgactgtagtccaaagcacaggaactcctcccccaggatgcctcacctggctgtggcaacggacaaaactctggcaccatcctcagaacaggaacagcctgaggggctctggccacccctagcctcacctctacatcccctggaagtacaaggactcatctgtggtccctgcttctcctccctccctgaacaccttggctctgttcccaagcagctggacttccagagacatggctcagatcctggatttgcagggagttggggccactgaactccaagataaagacaccatgaggggactgaaggtgggcaaggggatttcctttagctgggcatggtggcgggcgcctgtaatcccagctactcaggaggctgaagcaagagaatcacttgaaccctaaaggcagaggttgcagtgagccgagatagtgccactgcactacagcccgggcgacagagtgagactccatctcaaaaataaaataaaatt

SEQ ID NO: 405124 - DNA, 1000 bp, Homo Sapiens; identical to SEQ ID NO: 118793

SEQ ID NO: 405125 - DNA, 1000 bp, Homo Sapiens
ccacccaccagctgggggagggagagagctattccatgcctacggccttcccaggtttggcacccacttctccacaccttgagggctcggggatactggatacacccgtgacctcaaccaaggcccggagcggggccccaggtggaagtgaaggccgctgtgctgtgtgtggggacaacgcttcatgccagcattatggtgtccgcacatgtgagggctgcaagggcttcttcaaggtaccgcgcagccccaggtggggccttttgttggaaatggagagaggctggcctcatcccattgggacctgtggtctccccctgggttctcctcctagctaagtcctgtcctgcagggtgggatcagccctgccaggtgggccgccttcctggagacccgtagatgccagggctggaagctttcatttgccgggacactcgggcccatgggattgcacagagctggagggaggggtgagataggggcagataggagctgcaggggtgcctggcgagcctctggttttcctctgctcctctgcctgtcctctcccaactcaaggttctagtgggaaggggtgcccccaggctctcatgttcctggcgtgagatgaaaggatccctgcggagggtttggttcttgagggctgggggtggacttgggaacaggctgtgtgtttgtcccagcgatggtgcctgcttagcttcccgtccccaccccccagccccttggccctctcctgtctgccctagggagaaggcaggtggacaagggcccatgaaaaaatacaggtgtctagactgccagggagaccctggcccccagtagtgtgtcctggggacttcctcagagcgagaaacctcccccaatgtcttcaagacttttctctccccccgcccaaccccgtctctccctcccttgccacccaaatgttagaaaaatagctgtgaacagagagcgcttttgtctgcaatggcagcaggatctggacggtcccctcccc

SEQ ID NO: 405126 - DNA, 787 bp, Homo Sapiens
atccgttctctgcgctgccagctcaggtgagccctcgccaaggtgacctcgcaggacactggtgaaggagcagtgaggaacctgcagagtcacacagttggccaccaccatctctagatgggaagacagaaagtagttactttcccaagatctccccacaagcaagtgtatccttggggtttgtacacctactttcaccatggggctctgcctgcccccgcccctgcctcctctcgctgaccaattgagctgtgagcctggagcagatccgtgggctgcagacccccgccccagtgcctctccccctgcagccctgcccctcgaactgtgacatggagagagtgaccctggcccttctcctactggcaggcctgactgccttggaagccaatgacccatttgccaataaagacgatcccttctactatgactggaaaaacctgcagctgagcggactgatctgcggagggctcctggccattgctgggatcgcggcagttctgagtggcaaatgcaaatgcaagagcagccagaagcagcacagtcctgtacctgagaaggccatcccactcatcactccaggctctgccactacttgctgagcacaggactggcctccagggatggcctgaagcctaacactggcccccagcacctcctcccctgggaggccttatcctcaaggaaggacttctctccaagggcaggctgttaggcccctttctgatcaggaggcttctttatgaattaaactcgccccaccaccccctcaaaaaaaaaaaaaaaa

SEQ ID NO: 405127 - DNA, 1000 bp, Homo Sapiens
tcaatgacagagaagaacagaaaagacgagaatgtggctattcttgtagccctttgaatgtggtagacttgattgtggatattatgtttatcatagatattttaataaacttcagaacaacatatgtaaatcagaatgaagaagtggtaagtgatcccgccaaaatagcaatacactacttcaaaggctggttcctgattgacatggttgcagcaattccttttgacttgctgatttttggatcaggttctgatgagacaacaacattaattggtcttttgaagactgcccgactcctccgtcttgtgcgcgtggccaggaaactggatcgatattcagaatatggcgctgctgttctaatgctcttaatgtgcatctttgccctgattgctcactggctggcttgcatttggtatgcgattgggaatgtagaaaggccttacctgactgacaaaatcggatggttggattccttaggacagcaaattgggaaacgttacaatgacagtgactcaagttctggaccatccattaaagacaaatacgtcacagcactttattttaccttcagcagtttaaccagtgtaggattcgggaatgtgtctcctaacacgaattcggagaaaatcttttcaatttgtgtcatgttgattggctcactaatgtatgcaagcatttttgggaatgtatctgcaattatccaaagactatactcgggaactgccaggtaccacatgcagatgctgcgagtaaaagagttcattcgctttcaccaaatccccaaccctctgaggcaacgtcttgaagaatatttccagcacgcatggacttacaccaatggcattgacatgaacatggtatgtatgtctgttttccaaaatgaaagtgccgcaggcattatagtgatagccaaaatggaataaaagccggaatcaccagctttgaaaaaaaaaaaaaaaaaaaaaaaaaaaaaaaaaaaaaaaaaaaaaaaaaaaaaaaa

SEQ ID NO: 405128 - DNA, 1000 bp, Homo Sapiens
cccagcagcttctcatcccttggctagttcaccgctttctgggccaccatctcctcagcttcagcctatgccttaccaatctcctagctcaggaactgcctcatcaccgtctccagccaccagaatgcattctggacagcactcaactcaagcacaaagtacgggccaggggggtctttctgcaccttcatccttaatatgtcacagtttgtgtgatccagcgtcatttccacctgatggggcaactgtgagcattaaacctgaaccagaagatcgagagcctaactttgcaaccattggtctgcaggacatcactttagatgatgatttgtttaccagtaataattttgacttgcttcagttgagacctacgttttggccagtcccagcaggaagatatctgaggaatctagagtgaacgagataattgggagagacatgtcccagatttctgtttcccaaggagcaggggtgagcaggcaggctcccctcccgagtcctgagtccctggatttaggaagatctgatgggctctaacagtgcttactgcagccttgtgtccaccaccaacttctcagcatgtttctctccttggaccttgggtttccaactctgcagccttcaggtctggggccaggagtgggacccaccatttgtggggaaagtagcattcctccacctcaggccttgggtagatttggcaaaagaacaggagcagcataggctgtttgagctttggggaaatgaactttgctttttatatttaactaggatacttttatatgatgggtgctttgagtgtgaatgcagcaggctctcttgtttccgaggtgctgcttttgcaggtgacctggttacttagctaggattggtgatttgtactgctttatggtcatttgaagggccctttagtttttatgataatttttaaaataggaacttttgataagaccttctagaagcaaaaaaaaaaaaaaaaaaaaaaaaaagaaaaaaaaag

SEQ ID NO: 405129 - DNA, 1000 bp, Homo Sapiens
tgtgtggctggaatctctgggtaaggaacttaaagaacaaaaatcatctggtaattctttcctagaaggatcacagcccctgggattccaaggcattggatccagtctctaagaaggctgctgtactggttgaattgtgtccccctcaaattcacatccttcttggaatctcagtctgtgagtttatttggagataaggtctctgcagatgtagttagttaagacaaggtcatgctggatgaaggtagacctaaattcaatatgactggtttccttgtatgaaaaggagaggacacagagacagaggagatgcggggaagactatgtaaagatgaaggcagagatcggagttttgcagccacaagctaagaaacaccaaggattgtggcaaccatcagaagcttggaagaggcaaagaagaattcttccctagaggctttagagggataacggctctgctgaaaccttaatctcagacttccagcctcctgaacgaagaaagaataaatttcggctgttttaagccaccaaggataattggttacagcagctctaggaaactaatacagctgctaaaatgatccctgtctcctcgtgtttacattctgtgtgtgtcccctcccacaatgtaccaaagttgtctttgtgaccaatagaatatggcagaagtgatggcatgccacttccaagattaggttataaaagacactgcagcttctacttgagccctctctctctgccacccaccgcccccaatctatcttggctcactcgctctgggggaagctagctgccatgctatgagcaggcctataaagagacttacgtggtaaaaaatgaagtctcctgcccacagccacattagtgaacctagaagcagagactctgtgagataatcgatgtttgttgttttaagttgctcagttttggtctaacttgttatgcagcaatagataaataatatgcagagaaagagaaaaaaaaaaaaaaaaaaaaaaaa

SEQ ID NO: 405130 - DNA, 1000 bp, Homo Sapiens; identical to SEQ ID NO: 118794

SEQ ID NO: 405131 - DNA, 1000 bp, Homo Sapiens; identical to SEQ ID NO: 399838

SEQ ID NO: 405132 - DNA, 1000 bp, Homo Sapiens; identical to SEQ ID NO: 293205

SEQ ID NO: 405133 - DNA, 1000 bp, Homo Sapiens; identical to SEQ ID NO: 224347

SEQ ID NO: 405134 - DNA, 1000 bp, Homo Sapiens; identical to SEQ ID NO: 118833

SEQ ID NO: 405135 - DNA, 1000 bp, Homo Sapiens; identical to SEQ ID NO: 293208

SEQ ID NO: 405136 - DNA, 1000 bp, Homo Sapiens; identical to SEQ ID NO: 293209

SEQ ID NO: 405137 - DNA, 1000 bp, Homo Sapiens; identical to SEQ ID NO: 118795

SEQ ID NO: 405138 - DNA, 1000 bp, Homo Sapiens; identical to SEQ ID NO: 224348

SEQ ID NO: 405139 - DNA, 1000 bp, Homo Sapiens
atgtgggcccaggacggtgctctgtggcttctgccagccttgcaggaggactctggcacctacgtctgcactactagaaatgcttcttactgtgacaaaatgtccattgagctcagagtttttgagaatacagatgctttcctgccgttcatctcatacccgcaaattttaaccttgtcaacctctggggtattagtatgccctgacctgagtgaattcacccgtgacaaaactgacgtgaagattcaatggtacaaggattctcttcttttggataaagacaatgagaaatttctaagtgtgagggggaccactcacttactcgtacacgatgtggccctggaagatgctggctattaccgctgtgtcctgacatttgcccatgaaggccagcaatacaacatcactaggagtattgagctacgcatcaagaaaaaaaaagaagagaccattcctgtgatcatttcccccctcaagaccatatcagcttctctggggtcaagactgacaatcccgtgtaaggtgtttctgggaaccggcacacccttaaccaccatgctgtggtggacggccaatgacacccacatagagagcgcctacccgggaggccgcgtgaccgaggggccacgccaggaatattcagaaaataatgagaactacattgaagtgccattgatttttgatcctgtcacaagagaggatttgcacatggattttaaatgtgttgtccataataccctgagttttcagacactacgcaccacagtcaaggaagcctcctccacgttctcctggggcattgtgctggccccactttcactggccttcttggttttggggggaatatggatgcacagacggtgcaaacacagaactggaaaagcagatggtctgactgtgctatggcctcatcatcaagactttcaatcctatcccaagtgaaataaatggaatgaaataattcaaacacaaaaaaaaaaaaaaaaaaaaaaaaaaaaaa

SEQ ID NO: 405140 - DNA, 1000 bp, Homo Sapiens; identical to SEQ ID NO: 224349

SEQ ID NO: 405141 - DNA, 1000 bp, Homo Sapiens
accaagtaccaggaacttcaggtgtctgcccagcttcatggggacaggatgcaggaaacgaaagtccagatctctcagctacaccaagagattcagaggctgcagagtcagactgagaacctcaagaagcagaacgccagcctgcaggccgccatcactgatgctgagcagcgtggggagctggccctcaaggacgctcaggccaaggtggacgagctggaggctgctctgaggatggccaagcagaacctggcccggctgctgtgcgagtaccaggagctgacgagcacgaagctttccctggatgtggagattgccacttaccgcaggctgctggagggcgaggagtgcaggatgtctggggagtgcaccagccaggtcactatctcctcggtgggaggcagcgctgtcatgtctggaggagttggtggaggcttggggagcacttgtggactcggtagtgggaaaggcagccctgggtcctgctgcaccagcattgtgactggaggctccaacatcattctgggctctgggaaggaccctgttttggattcctgctctgtgtctggctccagcgctggctccagctgccacaccatcctgaagaagacagttgagtcgagtctgaagacatccatcacctactgagcgacccagcagccacctccttcctgaacacatttggcccactccccccatcagccggctctgcaaggccaactccgtgtccgctgcccacagcccaagccagcccacagcggatgctgcaaaaatcaataaagtctcccctcctgctgttctgaatgctctaagtgcttgcacacctcacccagcaaaacaaaagctgtgtggctccccagcttcctctcctcggaaggcaattgtggcatatctgtgtccagacgtgttctattggtatctcactccacatcccagccactctatcaaggaaactaaattcatccaaggtagttcaattaaattgactttttgaaaaagt

SEQ ID NO: 405142 - DNA, 1000 bp, Homo Sapiens
caggaaggggcggcccttacctggcaggtctgggcgcacctttagcaggtggactccgtggggctccaccagccagaagcctctggaaggcaacgaaggcaatgctgctccctgagtccagtccccgcccccaaacccagcccaggtgccttcagctacttcggcttcttaaaccctgcagtgttaaacagaggcattgagaaaggggaaaggcgggtatttttaaaagccaaagattgacccagttacttgagggtagggaggcgggcccagtgcaggaggctgcatccctggcctgctggtgcccaccgggggctgtgcctgtgccgggccgcagggaagctggctgcccccattcctgctgctgctgctgctgctgctctgtggctgtttcaaagactgggcgaaaggctgtccggagggcagaccaggtgccttgccgcagagaaaacaccaaagtctcctgttcgctcataaagaagtttttgggatgggagagaatccagaccatcttggggcagccaggcccttgccttcatttttacagaggtagcacaactgattccaacacaaaaccccttcccctttttaaaatgatttctgttctaatgccatagatcaaaggcctcagaaaccattgtgtgtttcctctttgaagcaatgacaagcactttactttcacggtggtttttgttttttcttattgctgtggaacctcttttggaggacgttaaaggcgtgttttacttgtttttttaagagtgtgtgatgtgtgttttgtagatttcttgacagtgctgtaatacagacggcaatgcaatagcctatttaaagacactacgtgatctgattgagatgtacatagtttttttttttaccataactgaattattttatctcttatgttaacatgagaaatgtatgccaaatgattagttgatgtatgttttttaatttaatatttaaataaaatatttggaaggaaaaaaaaaaaaaaaaa

SEQ ID NO: 405143 - DNA, 1000 bp, Homo Sapiens
agttctcatccacatgctaaatggaaagactttatgaaatccttctctcttaaaaaggaatttattgtaaaagaatactcacactaaattaaattcaaatttcattttagaataagttaactaaatcagtctaataattaaaattttaaaactcctggattatgacatttggagtttcatatgcagcattaattaagctcacatcaaaatagaccagccatttgcacatagttaccagtcactctgtttctgaaaccaatccagaaattcatgttagaacattgtcaggcacttctaggtattggacaagtgacagaaactgatcatccatattcaaaatatttacagaaaaaagtgtcagtgaaatgtaggtctatatggaaaagttaccattaggaaaatatggccatactgcttttttacccctgcactatttcagtgcaccacagaataggattcgagatttacatatgcctgtttgtgattttatctcagaatataacaactctggattacattttcctctcaactgaaaaccctcagtaatgcaaagaaaggccttcctttttcttcagaatcacaagtgactaaattgccttctagccattttttcttgtaaaaaaagtgttttgaggaggctgtattttttattccatttcaatattaaccaaataggctgagaaattcatagcaattgaattaagacttgagttcaagatgttaaaggaatccttttgtatgacttgtccagaccggcctattgccctacccgtttgattctctgggaggcatggtgctcctcctggctgcacatgctctctgtgaactgatcgcatcttgggttcttctcaatttgacatacttgggagtcggaatgactggatgggggatgggtagaggatgactggcacacttgtatagtatgtaatgttgtgtacatattatttatatggttgtggctcaaataaagtttaattccaacacaaaaaaaaaaaaaaaa

SEQ ID NO: 405144 - DNA, 1000 bp, Homo Sapiens; identical to SEQ ID NO: 118797

SEQ ID NO: 405145 - DNA, 1000 bp, Homo Sapiens; identical to SEQ ID NO: 293212

SEQ ID NO: 405146 - DNA, 1000 bp, Homo Sapiens; identical to SEQ ID NO: 224351

SEQ ID NO: 405147 - DNA, 1000 bp, Homo Sapiens; identical to SEQ ID NO: 293214

SEQ ID NO: 405148 - DNA, 1000 bp, Homo Sapiens; identical to SEQ ID NO: 293215

SEQ ID NO: 405149 - DNA, 523 bp, Homo Sapiens; identical to SEQ ID NO: 118798

SEQ ID NO: 405150 - DNA, 1000 bp, Homo Sapiens; identical to SEQ ID NO: 293216

SEQ ID NO: 405151 - DNA, 1000 bp, Homo Sapiens; identical to SEQ ID NO: 118799

SEQ ID NO: 405152 - DNA, 1000 bp, Homo Sapiens; identical to SEQ ID NO: 293217

SEQ ID NO: 405153 - DNA, 1000 bp, Homo Sapiens; identical to SEQ ID NO: 224353

SEQ ID NO: 405154 - DNA, 1000 bp, Homo Sapiens; identical to SEQ ID NO: 224354

SEQ ID NO: 405155 - DNA, 1000 bp, Homo Sapiens; identical to SEQ ID NO: 293219

SEQ ID NO: 405156 - DNA, 1000 bp, Homo Sapiens; identical to SEQ ID NO: 293220

SEQ ID NO: 405157 - DNA, 1000 bp, Homo Sapiens; identical to SEQ ID NO: 118800

SEQ ID NO: 405158 - DNA, 1000 bp, Homo Sapiens
ttccggcggggagtgggagcctctcgcactctcggcagctccagaccctcgggatctccgtttacagttcaggacctcagctgcactttggcgctaacgccctgtttcccaggactgtcaatggcaggataccagctctggtcaccatggaccccactggatgagagtttccaatggctgcggcacacgacacctacaccttcctccaagcacccattcaaggcctccccctgcttcccacacacaccgtccgaccttgaagtgcagctgtgctttcaagaggtcactctagtcctagacagcccattcctggaatctggagtgagtcccaagttaccctgccacacatcagagttgcgcacgatgaacaacaaaggactggtcaggaagccccagcccatccgcctcagtggagtagattctgtctttggcagggttatcacagctcagccaccaaagtggaccgggactttcagagtttcagacaagtcagccttttgcaaaatcattagcagggagcaccagtggcccattggactgaaggagcctcagattcagatgacagtcactatgtgcaaacagatgctgcgctctatcctcttgctgtatgcaacttacaaaaagtgcacctttgccttgcagcactccaagtaaagggtcctcatttgatccccatttactcacaccatgccctttgtgccttggtgactgtcaaataaaagcaagtatatactcagttctctccacacttcccacatacttaccaagcaaaaagcccatgaaaaatctgcagcagcctctgatagcaggaagacattatgtggtactcctgaactttcactcctggtccatcaactacaccgtgattctcagcagctaaacactaaaaataaaaatgattttaggacaaaaaaaaaaaaaaaaaaaaaaaaaaaaaaaaaaaaaaaaaaaaaaaaaaaaaaaaaaaaaaaaaaaaaaaaaaaaaaaaaaaaaaaaaaaa

SEQ ID NO: 405159 - DNA, 1000 bp, Homo Sapiens; identical to SEQ ID NO: 224355

SEQ ID NO: 405160 - DNA, 1000 bp, Homo Sapiens; identical to SEQ ID NO: 293224

SEQ ID NO: 405161 - DNA, 1000 bp, Homo Sapiens; identical to SEQ ID NO: 293226

SEQ ID NO: 405162 - DNA, 1000 bp, Homo Sapiens; identical to SEQ ID NO: 293227

SEQ ID NO: 405163 - DNA, 1000 bp, Homo Sapiens; identical to SEQ ID NO: 224356

SEQ ID NO: 405164 - DNA, 1000 bp, Homo Sapiens
cttacccccaggcttttcaaagacatgagaagacgcacacgggagagaagccctatgaatgcaagcagtgtgggaaaacattcagttggtctgaaaccttgcgagtccacatgaggatccacaccggggacaaactctataaatgtgaacactgtgggaaggcttttacctcttccagatcattccaaggtcatttgaggacgcacactggagagaaaccttatgagtgtaaacaatgtgggaaagccttcacttggtcctcaacgtttagagaacatgtgagaattcacacgcaagagcagctctataaatgtgaacaatgtgggaaggcttttacctcttccagatcattccgaggtcatttgaggacgcacactggagagaagccttatgagtgtaaacaatgtggaaaaaccttcacttggtcctcaacgtttagagaacatgtgagaattcacacgcaagagcagctccataaatgtgaacactgtgggaaggcctttacctcttccagagcattccaaggtcatttgaggatgcacactggagagaagccttatgagtgtaaacaatgtggaaaaaccttcacttggtcctcaaccttacataatcatgtgaggatgcacactggagagaaacctcacaaatgtaaacaatgtgggatgtccttcaagtggcactcctccttccggaaccatctgaggatgcacacaggacagaaatcccacgaatgtcagtcatactcaaaagccttcagttgccaagtcattctttctaaaaccagtgagagcacacactaaagagaaattctataactttaatggggtaacctcacattaattcatgtataatgctccagaaaattcacaccaggagagaaatcttacaagtatgatattgtctttgtcaatacctcatttgtaaaacagacccattagtcgtgaatttccagctctttcaaaaataaatgtttatgtgagaaaataaaaaaaaaaaaaaa

SEQ ID NO: 405165 - DNA, 1000 bp, Homo Sapiens; identical to SEQ ID NO: 118802

SEQ ID NO: 405166 - DNA, 1000 bp, Homo Sapiens
tgcttcaaggagcggctccaagccgtggacctcatgaaccagcctctggacaaggttctggagcaggccagacgccactcatgggtgaacctctcccgagcccccactccacgcacacagggtcagaaaacgcctcctccagaccctgtgggcacctataacccagcgtgcgccttggcgctaaacgaagccaagcggttgttggtcgagtccaaggacaccttggtagaaatggcaaagaacgaggtggacgtccgggagcaacagctgcagataagcgaccgtgtgtgtgcctcgctggcgcagaaggcgagcgagaccttggagctgaaggaaagattaaatatgacgttaggactgatgaggggaactatcctccggtgtacgaaatataaccaagagttgtacaccacccacggtctcatcaagggtcctctgtcgaaagttcacctggagaccgcagaaaagctggacagacccctggttcgcatgtaccagagacacgtgggcacccaactcccggaggctgcgcgcctcgcacagggcaccgacaagctgcagtgccacatcacgtacctggaaaagaacctggaggagctgctcgccacgcacaagaacctcacctggggcctcaactgcaagaacatcgggcatgaggtggacggcaacgtggtgcgcctgcgcctgcgccagcggcaaccgcacgtgtgctacgagcaggcgcagcgcctggttaaggactgggacccgcgcacgccgccgccgcgcagcaagagcagcgcggacccctagtgaccccagcgtcccccgccccagccagctgattggatgctggctgggacctcggagagcagacacagccccatggccctccctctcccctgacgcaccctccctccaagcaccctctaggagaattataattaaaaataacaataattaaaaaaaaaaaaaaaaaaaaaaaaaaaaaaaaaaaaaaaaaaaaaaaaaaaaaaaaaaa

SEQ ID NO: 405167 - DNA, 1000 bp, Homo Sapiens
tggaggtcacaatctagcggagaaaggatgttactagaagtacacaaattgggcccggcgcgatggctcacgcctgtaatcccagcacttttggaggccgaggcaggcggatcatttgaggttagagattcgagaccagccgggccaacatggtgaaaccccatctctacaaaaaatacaaaaattagcctggcatatggcgggtaccgtaatcctagctactcgggagactgacgggagaatcgcttgaacccaggaggcggaggttgcagtgagctcagatctcaccattgcactccagcctgggcgactgagcgagactctatctcaaaacaatcaaaacaaaaaagacctgtggactctagtagattttgaatcctgcctctgccatttcctggctatgaggtgtcttgagaaatttacttgtcactcttgcttctgatagtaaaggggatggtgcgatagattcaagatggagagataaggttaagtgttttctttggctgcaacatggagattagattagagcaaggatgtaagggagaggaagggacatagcagtatttcaggtgagagtcaaggtggctttggctagggtgtgagagtggaggtagggagaagtaggaaagtgatagttaactggatttgttaggtgagggtgaggccaagggtgacttccaggttcctgacttgtgttataagtaacacagaagaagaatggatgaacttgattcgttttccattgattgtgatatctatcatacctgcaaaaaatattttgtatatatccaatttaataataaatgcactcatgttaggaaggtcaaaaaaaaggaaaaaagaaaaataataaaaaataataaaaatccttaggataacttgaggccaggagtttgagaccagtgtgaccttgtctctgtaaaaaataaaattaaaagaaaaaaaaaaaaaaaaaaaaaaaaaaaaaaaaaaaaaaaaaaaaaaaaaaaaaaaaaaaaaa

SEQ ID NO: 405168 - DNA, 1000 bp, Homo Sapiens; identical to SEQ ID NO: 293229

SEQ ID NO: 405169 - DNA, 1000 bp, Homo Sapiens; identical to SEQ ID NO: 293230

SEQ ID NO: 405170 - DNA, 1000 bp, Homo Sapiens; identical to SEQ ID NO: 118803

SEQ ID NO: 405171 - DNA, 1000 bp, Homo Sapiens; identical to SEQ ID NO: 293232

SEQ ID NO: 405172 - DNA, 1000 bp, Homo Sapiens
ttgcctgacatgattctctcttgatgaagaaatgacatatattatctttgaatatctacaaggaaagttaccaacttatgtaggggtgaaatttggataggcggtatgctcaaagcagccagcaatgagtgctctgttttgatccttcttattattatggaaaggagtacaggacctcttcagtcttccccttaccagaggtagcctctgcaaatggcataccagatgggactctaagatgcttgtgtggtggcttcttgtccttctctttgacttctgtggcatggtgctagtgcatgtaccctgtggtattgcccctctgtccgtagtgtgaactgtcctgtgagctttatgtcaggagactgtgaccttcatgtccagcttcaaagagttgtgcatgaactcggtaatacacatcacacggctgagagtcccctttccaggcagggccagcatgtgtagaatatctttcagaatatggtttcaccatgaaacaggggtggtagatttattcccttgtgtcaggccaaagaagttcttacaaagtacagtgggtagtgtctaaagcgacactttactcacagcctggcttgagtcaacaggaacaccatagcacccacaaatacttctacttgaatcatattctgtgctttttcaatcactagtgcagaataggctgcatttgacacagactgttaggcaatattgatttttttgttttgtttttatttggttttatctgagataacttatgttcaaggtgagaataagaaatagccaactagttaaaatgtatgaaaagaaaactttcccctgctgtatttgttgtgtaacataaataagccttctgagaagcagggtgaataaagtttagggagctgggacacctggtcctgctagctggaccactggctcatcatgcaatgaaaaggtgagcagacttaacccctccgtgcctcagctttttccccacagacacctacctcacaggggcattgag

SEQ ID NO: 405173 - DNA, 1000 bp, Homo Sapiens
tttttatcctgaggcgtatcaagggccccccgtgaaccagctgccattgatagatacctcaaactctgaggcaatttcttcttccagcattcctcagtttcccataacttcagactcaaccataagcaccctggagaccccacaggattacatccggctttggcaagagttgtctgattcactcggtcctgttgtccaagtgaacacttggtcttgcgatgagcagggcaccctgcacggccaacccacctaccatcaggtgcaagtttctgaggtaggagtcgagggacctcctgatccacaggctttccaaggccctgctgcataccagccagaccagatgagatctgcggagcagaccagattgatgcctgcagagcaacgtgactcaaataagccgtgctaacagtactttcatgaccagtgatgaggggaaatggggggagggggcaggccaatgaggtctgcatggccaggggaccttcaaggtgcgtaaagtcccttggggtagggtttagtgggtagagacttatttgtttcctgataggttatgtttgtaattgtttgttaagcacagcctgtttcttggaagttatgctgtagaggcagcctgtgatccgtagtatgctagggtttgacagcagccagccacagctggatctgatgtcttgtctgccccgcccagctttgcatatccatgttctaccacaggaaggtggcctgccaagagtctgctcaaagttttcaacataaagaaaaaagaaaaaaaaatgccaaagtgcttttcaatctagtaaatctagagggttgttttgtcttagccacaagaattccgaggtcttgaccctgatgatcaacctgcctcccctccatagtcttgttggagaagcccagagagaatgggactccaactaagggaacctgaaatcaactcaatggaggcacttcagagctaaaataattatggctaccttgcttaataaacattttcgttcactgc

SEQ ID NO: 405174 - DNA, 1000 bp, Homo Sapiens; identical to SEQ ID NO: 118804

SEQ ID NO: 405175 - DNA, 1000 bp, Homo Sapiens
tcggaaactcaatgtatccactggcttgcctaagaaaaatttcacagacatgttgaggaattcctttctgaaagcccctcaattttcacattttcaagaggacatcatcttctctaaaaaatacaatgatgaggtcgatgtagtggcctccagaatgtttttggtggccaagaccatggaaacaaacagagaagaactctatgatctcttggaaaccctgaggagactttctgtcacctccaaggtgaagttcatcgtcttcaatccgtcctttgtatacatggatcgatatgcctcctctctgggagcccccctgcacaactcctgcatcagtgctttgttcctgctcttcttctcggcattcctggtggcagattcactgattaacgtctggatcactctcacagttgtgtccgtggagtttggagtgataggtttcatgacattatggaaagtagaactggactgcatttctgtgctatgcttaatttatggaattaattacacaattgacaattgtgctccaatgttatccgcatttgttctgggcaaggatttcacaagaactaaatgggtaaaaaatgccctggaagtgcatggggtagctattttacagagttacctctgctatattgttggtctgattcctcttgcagctgtgccttcaaatctgacctgtacactgttcaggtgcttgtttttaatagcatttgtcaccttctttcactgctttgccattttacctgtgatactgactttcctgccaccctctaagaaaaaaaggaaagagaagaaaaatcctgagaaccgggaggaaattgagtgtgtagaaatggtagatatcgatagtacccgtgtggttgaccaaattacaacagtgtgataatgtctgcttggcatattttcaccttaggtcttatcaagaccaaagagattatgttaatgaaacaattaaattcaaagttcttcccttttttaaagataggaaacaggcattgcc

SEQ ID NO: 405176 - DNA, 1000 bp, Homo Sapiens; identical to SEQ ID NO: 224360

SEQ ID NO: 405177 - DNA, 1000 bp, Homo Sapiens
gtcaccattcaaaaaatccagatgcatatttgaaggactaagtgggaatgataaagacagaatgtaaacaaagtctccagaagtttagctatgaagtgaaagacatgttaagaatgaccacattttgagaaccatactgctatagatcaatttgtgaaaaattgacatcttttcaatccataagcatactgtatccttttaggtacctaggtcttctttaatttctcttggtaatgttttgtagttttctggatagaggtgttacacatttctcattacatgtatttctaggtacttcattttttttatcctattataattttattttccaattgtgactaatatatggaaatactttcatatatttatctttatctaaatacagttgacccttgaacaatgcgagggttaggggcgctaaccccctatgcagtaaaaaaaaaaaatctgtgtataacttttaactccccagaagcttaactactaataacctattgttgaccagaagtcttactgataacataaacagtcaattaacgtatattttatgttatatgtattctatactatattgttacaataaagtaagctaaggaaaaggcaatgttattaagaaaaaataaggaagataaaatatatttactatatattaagtggaagtggactatcataaaggtcttcatccttattgagtaggctgaggaagaggaggggttggtcttgctgtctcaggtggcagaggtgaaagaaaataatgtatataagcagacttgcacaattcaagcctgtattcaagagtcaactgtactttgctatattcatccattaattctaatagtacatcagtaaattaacttggattttctgtgtacacaatcttgtcatttgtgaaaaaggagagttttatctccttctaatcctgtatcttatatggatatatgtatgtgtttgcattgactgggacctctttcacaattgtgaataaaagaagtaatagcag

SEQ ID NO: 405178 - DNA, 1000 bp, Homo Sapiens
cctgagtgcaggactctcctgaagaaggggcgtctaaaaggccagcccatgcatcttgttcagaccaggctgctccatctccgctaagcccagggatccacttgtgtgtctttctgggataattgtctttagtggcagcctgggcctcggggaaggaagggcatgaggaatggccccggctgggatgtcaggggcccaggacaactcctgtctctaccaggaaattgccccctcttttcagaggctgccttgtcctagaacctcgtcgcgacatttctcagaagccatgacatgtccctgcggctggaggcctttcaagggtggcccaggaggcctcaagggcccggtgtggcctgcaaaggaagagaacagctgttctcacggaaggatccaaagggttcaaaggcgaagggtgccatctgcttccccactgattcagaagataaacaggagaagtgtcctgtttcacccatattgctggtcctgatttttcaatagtgtccctaccctgaagctcttccattggtcatcatggagttagctaacagcccagggaactggtctcttttcccttttcccttaccacctggaactcacctggaaagggcaatcagctggctctatatcagacgccaccacctggtctttgaagtttctgtcctaccagtgccacagctccctctcccacttctgaactacctccaagagagaccatcctcagcagcctagtatgttatgctagtcctggaatggtgtattctggatgtctactcaaggccaaaccccagtattgcctttcgtttccctattcaaggccaaggctagattctcttcattgtctccatttctctttctccagagctcctatagggcaagacactgtttctcatatatttctggatccttggagcttagctcggagcttggcatacatgcccagcatgaacttttctgaataaaataatttcaaatgctgtatacaggaaaaaaaaaaaaaaaa

SEQ ID NO: 405179 - DNA, 1000 bp, Homo Sapiens
ctgataaattgctagaggagaaactagctactgttcctgctcccttttgtgaggaggaagtgctcactcccttttcaagactgacagtagattctcacctgagtaggtcagctgaagatagctttctgtcacccatcatctcccagtctagaaagagcaaaattccaaggccagtttcatgggtcaacacagatcaggtcaatagctcaacttcgtctcagttctttcctcggccaccaccaggaaagccacccacgaggcctggagtagaagccaggctacgcagatataaagtcctagggagtagtaactccgactcagaccttttctcccgcctggcccaaattcttcaaaatggatctcagaaaccccggagcactactcagtgcaagagtccaggatctcctcacaatccaaaaacaccacccaagagtccagttgtccctcgcaggagtcccagtgcctctcctcgaagctcatccttgcctcgcacgtctagttcctcaccatctagggctggacggccccaccatgaccagaggagttcgtccccacatctggggagaagcaagtcacctcccagccactcaggatcttcctcctccaggaggtcctgccaacaggagcattgcaaacccagcaagaatggcctgaaaggatccggcagcctccaccaccactcagccagcactaaaaccccccaagggaagagtaagccagccagtaaactcagcagataggagccaggctgcatctctttgaaaggtgtgagatcttcctcctaaacctgatgcatgtgtgtccctgtactttctatgtaaaaaaatcagtgttgatcttctcttgcaaaagaaagtaacatgatcaattatttataagaagacataatacatgataaggaattacctaaggcaggcagcaagtagattaggaatcaatgtctttgtacaagaaggaaaaatagagcaaaaatccaagggggagaaactcattaaaatga

SEQ ID NO: 405180 - DNA, 1000 bp, Homo Sapiens
cttcccccggagtgggtcaccacactgttttttatcatcatgggaatcatttcattgactgtcacatgtggtttgctggtggcttcccactggcgaagagaagctacaaaatatgctcgatggatagcattcactggaaagtgtgtgcattcttctcatacctaagaaaatcactgtaaaatctgctgaaaactatttttaggttttatttgcacaagactgaattagtttgacatttttggaagctcctattgaacatacccaaacatctgtaaacatgaaaaatcttcaatttattaaaagcaaacatttcagtatgattctttccaaagtttgctgctgattcttccttgtgtggccttttgaggagcctcctggggaattggaggattaagacatgccactatgagaagattataggaaaaacaccaagactagaggactctgggttctttttatgcaaagtcaactcttctgggtcacagttacccagcaacaaaaataaagaatttccccatggactccagatcctttactactgaactcacagggctgtaacactgttactgtacagagaggaccaggacgatgccagcaccccgtttatcctgagtgaactctccggaggcctcttcaagcttgtgggttctctgctgtcttgaagccatccatccatttgataggttttgcaaagacttggtcctgccaagatggttttaatcatttctgctaaaaggaatggactcgaggatttgatctcattttagatgcagttgtcctcacttggccattttacagcactttagtaaatatggccagtgtatttggtcactattaaatcaatccccattcattatctgtcagggcaactcagtgaactaaatactatgttctgacctctggcactctttctcatgttgtttaaatatttaatattgtctaaggcaattcaagtattttcttaaataaaaaatatgaaaacccaaaaaaaaaaaaaaaa

SEQ ID NO: 405181 - DNA, 1000 bp, Homo Sapiens
gggagctgtcctagataaaattggaaagaaacagtgacccagagacaggtggacaaagaattcggggactgatgggaactgagcttgggatccagactgaaactgattccagactgacctctagcacccaggacccagacacagggccatgggaccccagcatttgagacttgtgcagctgttctgccttctaggggccatccccactctgcctcgggctggagctcttttgtgctatgaagcaacagcctcaagattcagagctgttgctttccataactggaagtggcttctgatgaggaacatggtgtgtaagctgcaagagggctgcgaggagacgctagtgttcattgagacagggactgcaaggggagttgtgggctttaaaggctgcagctcgtcttcgtcttaccctgcgcaaatctcctaccttgtttccccacccggagtgtccattgcctcctacagtcgcgtctgccggtcttatctctgcaacaacctcaccaatttggagccttttgtgaaactcaaggccagcactcctaagtctatcacatctgcgtcctgtagctgcccgacctgtgtgggcgagcacatgaaggattgcctcccaaattttgtcaccactaattcttgccccttggctgcttctacgtgttacagttccaccttaaaatttcaggcagggtttctcaataccaccttcctcctcatggggtgtgctcgtgaacataaccagcttttagcagattttcatcatattgggagcatcaaagtgactgaggtcctcaacatcttagagaagtctcagattgttggtgcagcatcctccaggcaagatcctgcttggggtgtcgtcttaggcctcctgtttgccttcagggactgaccatctagctgcacccgacaagcacccagactctttcacataacaaataaaatagcagagttcccttaaaaaaaaaaaaaaaaaaaaaaaaaaaaaaaaaaaaaaaaaaaa

SEQ ID NO: 405182 - DNA, 1000 bp, Homo Sapiens; identical to SEQ ID NO: 224362

SEQ ID NO: 405183 - DNA, 1000 bp, Homo Sapiens; identical to SEQ ID NO: 293237

SEQ ID NO: 405184 - DNA, 1000 bp, Homo Sapiens; identical to SEQ ID NO: 224363

SEQ ID NO: 405185 - DNA, 1000 bp, Homo Sapiens; identical to SEQ ID NO: 293239

SEQ ID NO: 405186 - DNA, 1000 bp, Homo Sapiens; identical to SEQ ID NO: 293240

SEQ ID NO: 405187 - DNA, 1000 bp, Homo Sapiens; identical to SEQ ID NO: 293241

SEQ ID NO: 405188 - DNA, 1000 bp, Homo Sapiens; identical to SEQ ID NO: 118805

SEQ ID NO: 405189 - DNA, 1000 bp, Homo Sapiens
gcccttagtgggacataatatgatgatggacctgctgcacctccatgagaagttcttcagacccctcccagaaagctacgatcaatttaagcagaatatccacagcctatttcctgttctcattgataccaagagtgtaacaaaggatatctggaaggagatgaatttcccgagggtgtcgaatctttcggaagtctatgaagtcctgaacagtgacttgaatcccaccaagaattctggaccagagattgttcacgcgagcaggtgtgagaaatatgttgagacaaagtgcccccacgaagccgcgtatgatgccttcctctgtgggtcagttcttttgaaagtggcacacttgcttctacagaagatataccacatcgaccccgtgcccgagtcatcctttcctcagtaccttgacgtgctggctccttacgtgaaccaagtgaacctcatccgagcgggggtcccaaagatcaatttttctggtccagattatcccagtatccgacctcccatcctcatcctcagcgtcaaaaggtggcctggggtcagcgagcagcaagtctaccataagtttcagaatctctgcaagtttgatgtcaggcgactcacaagaagccagttcttactcctgaccaataagtttaaggatgcgcggaacatcctgaaggagtaccgggaccacccgaccctgtgcatctccctgtaccgctactggaggcactccccaaacgtcaactgcctgctccaagtctgtggcatagtgactgcctgggcccttctcgcgttcatccttggaagatctggtacctgagtgcagcgaggcctcctgcggccaccctcgggtccccatgctctctgggaggtgtgctgggtgtgttcgtgtaaatcagattctgtttgcagatggatctgtttggtcttttctagaaattctgttatgtcctgaacgtgaaattctgtcaacactctcaatgataaatcagtccttagatatcgt

SEQ ID NO: 405190 - DNA, 1000 bp, Homo Sapiens; identical to SEQ ID NO: 118806

SEQ ID NO: 405191 - DNA, 1000 bp, Homo Sapiens
gcatgacatgggtatttattagtattaccagttggtgctcaaagtcaaacaaaaatattttagttaataatgggcagtaaaatatgattttacattattttaaatatttgggagagttaatttgttagctaaataattcaagggaaagagattattcaactggtcataatcacccctgataatattattactaatcttaattatttattacatcatctctttctcaatggatctaatgttttaattttttcccctattggtagagaacaataacagaagtaatttttatattatacacttggagaaataaagttgaaacagaattaaaaatatttctcaaacaactgtatcacaatataaattaaactaattcatttttgtgtagacatacgaaatcacaaaaataataacactgaaataattctaccaatgcagtgatggaaacacttttcttatgtaccaagacatagataggtaagagaaataaagaattgaagtgaattagaaaatccattttattgcttgggtttaaaatagttgtgggatacaagtatttacaatgctattggagtcaattattgacaacactttgcaacagtaataccatttctagcttttcaattggcaatacttagaaccttactgtagtgacctgattttaaataccatattatatttactaagttaagagctagtttttactctcttccataatttcattacatgaatgtaagatgatggctcaaaaatgacgacttatagtttgaatttatgtgtatgcaatatacatatgagaaccaaattcaacaagtgacatgaatgttactacatgaacattgaattgtattgcccttgtcagttatttcctctgttcaataaatactgaaggtcacaaacacctttttacttttcaaaaaaaaaaaaaaaaaaaaaaaaaaaaaaaaaaaaaaaaaaaaaaaaaaaaaaaaaaaaaaaaaaaaaaaaaaaaaaaaaaaaaaaa

SEQ ID NO: 405192 - DNA, 1000 bp, Homo Sapiens
tgcgccagatccggctgcggcggggccgaaaccacgccggaggccagaggcccgatccgggcagccccgagggccctgcgccacctgcacgccgcgagagcctcaccaagaaagccaagaggttcctcgccaacctggtgccgcgcaacgccaagttcttcaagcagcgctccaggtcgtgtcacgacctctcggtgctctgagccgcggtcgccatggccactgcggtcgccatggtcaccgcgccctccgctcgccccccctcgccccgccccgcccccgtccggcttccttggtggaggccgtctaggaaaccaaaaactcccaggatgccccggtgtgaccgccgggggcggcccggggccgctcggcggcacctccacacccgccccaacgcgttctctggagctttgggcctcagggcgcctagaaggcgaggacgcagacctgaaggcggccggtgagcggggcgggttctgctgggtcgggaagaaaaataattctgcaaggtattttgttttttattaattcgcgcttggccacctcatctgtaaagagattctaaaagcaagatctggaaaagtgcttcgtagactccttgacggagtttgcctcctttgtacgctgcgtgaacatgcctcacctttaagagagtcttaaaggtaaagacacgaaaacacttcctccagggaccttcccgaaaacgttctggctctcatctggtgcggcatgtgtccactttgcctttaaggagttcttaaaggcaagggcctggaagtgctgttcctgagatggattctcttgacttaccagtccaccacggcacttcccctttaaggttattaaaggtaaggggtggacagactttctgcattcagataatgagcagtggcaaccccttttggccagggccaggggggcaccagcaaggggccaccctttcccttttcaataaataatttttgtactgcctcaaaaaaaaaaaaaaaaaaaaaaaaaa

SEQ ID NO: 405193 - DNA, 1000 bp, Homo Sapiens; identical to SEQ ID NO: 293245

SEQ ID NO: 405194 - DNA, 1000 bp, Homo Sapiens; identical to SEQ ID NO: 224366

SEQ ID NO: 405195 - DNA, 1000 bp, Homo Sapiens; identical to SEQ ID NO: 224367

SEQ ID NO: 405196 - DNA, 1000 bp, Homo Sapiens
ggggatgtatacactgtgatggtctcaccagttgctaaaacaggattgaagcttactttctgtccaaaaaaaatatattcagtaacttgctctggaagtacacttggaatggtgatttatagagggaagagaaatgaagaatgacaaagtgagccccagataaaaacaaaaacttgaccaaagttgtctcatttgttagtgattagagatggaaaagatctactagaatgtagaataaaaatgcctctaggataggaaaagctcctttggcctttagaagaacaactctgactctgcttcctgagggcaaggtcaggtgtgtcctcacctgcacagcagttggagatctgctatgtgaggactctggagagaaatgaatccagaaagtcccctggacggctgctagcctgagttggcacactgtgagaaccctggaaacaagaaagttctgcttagcagaaattctgagatttcacatccacacacaccacagacttcaacacatccacttcatgagtgttttacaacagcacttgtctgcagccccctcaggggctggaaatgttcactcccagaaagtcaagccacccacatgcagacagcacttatcccaagacaaacctccagcaggacttcagtataggttggaaagcagtagctgccagggcaacctgagataacaaacgccctcatcgcaagttaggagcaaagctgagctgcttgcagggttcgctgagccaaagcatcaggtggcgtgacatctatgggagcatctgggaaagcagagctgccagcctgttgctagaagggttgcagttatgctttctgcatgagagaagatgtcaaatggagagcctcaaactgtggccgactgacatgcgtgcatcttttgggggaggaccatccatcttattggccatatcccccactcatattgtaattacttttttcatctttggagggggaaggcaatgaaatataacataaatctctcatacct

SEQ ID NO: 405197 - DNA, 1000 bp, Homo Sapiens; identical to SEQ ID NO: 118807

SEQ ID NO: 405198 - DNA, 1000 bp, Homo Sapiens; identical to SEQ ID NO: 293248

SEQ ID NO: 405199 - DNA, 1000 bp, Homo Sapiens; identical to SEQ ID NO: 293249

SEQ ID NO: 405200 - DNA, 1000 bp, Homo Sapiens; identical to SEQ ID NO: 118808

SEQ ID NO: 405201 - DNA, 1000 bp, Homo Sapiens; identical to SEQ ID NO: 224369

SEQ ID NO: 405202 - DNA, 1000 bp, Homo Sapiens; identical to SEQ ID NO: 224370

SEQ ID NO: 405203 - DNA, 1000 bp, Homo Sapiens
tgcctccgggcgcccgcggcctccgcactccagtggcccagacctggctgaggcagctcccgtggtagatcaagcctcacaggcggctggaagagccagttctgggctgggcctgtgggaacaggcgtctgttagtcagggtttcaggaatgcggccttcgaagcctgaagcggggaatggcggctctgggccctcaaggggcaggcggtgagcctgggaggccaggccgggctgacccaaggggagaggaccctctccgcccactgccgctggccctgggcaggtctagagcctgggggtctccagaggcacaatcccttatctccgggagaaggcagagggcagaggcaggaaacaaatctcctgtcaaaattcctaattaaaatactaagtaagtgatggctccaggctgagacaccggacactgagagaataagggaaaatcagccccgacagccagggctaacaagacggttaattacagcccgagaagaacgttaacagtattaattctaaccacaaaggaggaaaagagaagaccacccttgccccagtccggcccggcccctcccacccttgccccagtccggcctggcccctcccacccttgccccagtccggcctggcccctcccacccttgcccagcccctgcttggcccctcccactcgtcccaacccttcgtgtcaccgccaacccttgccccagtcctgcccggcccctcccacccttgccccagtcctgcccggcccctcccacccttgccccagtccggcctggcccctcccacccttgccccagtccggcctggcccctcccacccttgccccagcccctgcctggtcctgcccacctcaccccagcacttcctatgggactcacgcctttgtctcgggcttttggttttcaaaataaattataagttttaataaaaaaaaaaaaaaaaaaaaaaaaaaaaaaaaaaaaaaaaaaaaaaaaaaaaaaaaaaaaaaaaaaaaaa

SEQ ID NO: 405204 - DNA, 1000 bp, Homo Sapiens; identical to SEQ ID NO: 224371

SEQ ID NO: 405205 - DNA, 1000 bp, Homo Sapiens; identical to SEQ ID NO: 224372

SEQ ID NO: 405206 - DNA, 1000 bp, Homo Sapiens; identical to SEQ ID NO: 224373

SEQ ID NO: 405207 - DNA, 1000 bp, Homo Sapiens; identical to SEQ ID NO: 224374

SEQ ID NO: 405208 - DNA, 1000 bp, Homo Sapiens; identical to SEQ ID NO: 293257

SEQ ID NO: 405209 - DNA, 1000 bp, Homo Sapiens; identical to SEQ ID NO: 293258

SEQ ID NO: 405210 - DNA, 1000 bp, Homo Sapiens; identical to SEQ ID NO: 224376

SEQ ID NO: 405211 - DNA, 1000 bp, Homo Sapiens; identical to SEQ ID NO: 118809

SEQ ID NO: 405212 - DNA, 1000 bp, Homo Sapiens; identical to SEQ ID NO: 118810

SEQ ID NO: 405213 - DNA, 1000 bp, Homo Sapiens
agaaagatctgctacaagtacgtgataaattcctatccctgggtgcatgtgcattcagaaatagctgtgagctttacagctctcatctaacttcttttatggaattcatgaagcaagtggtatgtgacaaggactccacttataaatataactgtttttatgttccactgaatccctgaaaatggtgaggagggttggggggaagtgaaggaaagacaagcagggctaattccaaaaagcaaggctagaaaatagccctgtgaggtcaagacaatttaatttatttacatgctgtctgttatcttcaagcagcacaaaatatgcatataaaagtgatggaattaatgtgaaataaaacaaaaatataatggctagaatacaaagctaatactgctaattggcatgagaattcaacataaaattgtgagctctgatttttcaaattgatcataaaacctttaggaaatgtatttgaaagctcaaaatagaaattaggttaaaatgccattttattgtgtaagctcttgggcattatacaacaaataatctaggatttatttggtattaataatttaggtgtcatattagctgaatactatcctctattacatttcgaatagactttgcccttgcaattttaagctatgccatattcagattaattttgtgagtgatatctgcatatgtttctgtacagtgtgaaatgactgaccctgtagtatagtacgtgatagagttctacttgttaaagtaggttagatatagacactaatgtgtgtgatgatagtgtcctgtgtttcttagtgcaaatctgtagagtaaaaatgtccatagaacttttacttaaaaacaatcccatgctagagttgccattaagcagtgcaaaattaatcggctgtatggtagattcttgaccttaaatttaacaacaacaaccaaaatcagattttttttgtgagtcttactgacctaagaaacattgtttaaattgtttaaatgg

SEQ ID NO: 405214 - DNA, 1000 bp, Homo Sapiens; identical to SEQ ID NO: 224378

SEQ ID NO: 405215 - DNA, 1000 bp, Homo Sapiens; identical to SEQ ID NO: 293266

SEQ ID NO: 405216 - DNA, 1000 bp, Homo Sapiens
gcatgcccatcctccccagctggcggcggggacccgagccccgcaagtccggcaccccgccctgccgccggcagcacacggtcctctgggacaccgccatctgaggcgggcgggggggtaccggggcgcctggacttgggagggggcgggcacgcctggctctcccgggagcctcgccttgagagacattgaaagactacgtgagagagtgccagggagaacccctgccctccaacctaccccccgggatggggagagtctgccaggcccattgggcttaggatgccaacagcgctgctgagaaacggaggaggaggagggtttgcttgaggttggggcgagagtcgctctggctgttcttcccgctgggcgctgtacacccctcctcctgaaccaagccagaggtcagcatggggaagggaggaaggaagggatgggaggaagaggggggtgggtgagctgaaagagagggactagagtgccagatggaggagctcttttctagagagccgggagttggggagggggtatttattttgttatttatttcagtctggagggcgattctgggcctttctgacctactcctgagctaggagtggagaatcagggccaagtttgcactctccccaatgccaatgcctaaaggccccgccgtccatgccaccccacagccaaggaggggtctgcatggggagtggaccgagagaagaaggggcccagggaagcagagggcccaagaccattcacagtatttacaatttgccagaatttggtagtcagtgtggcctgctctgaatcaggcatcttatttagttctggggtgagggtctagtgccagggatgggcaggatgatgggggaggaggagggaaattttagcgggtggggggggtgggcagggtatttatttaaattaaaaaacaaaacagaagagatgtcaggaacttttttttaattcctttcttttcagaataatatattaaaagactcatgatcct

SEQ ID NO: 405217 - DNA, 1000 bp, Homo Sapiens; identical to SEQ ID NO: 293267

SEQ ID NO: 405218 - DNA, 1000 bp, Homo Sapiens; identical to SEQ ID NO: 224379

SEQ ID NO: 405219 - DNA, 1000 bp, Homo Sapiens
gagaggttatggagaaacagatgctcccattcatcgacagaattataaattggattgtctaattacagatataaaggatattttagattctttagggtatagcaaatgtgttcttattggccatgactgggggggcatgattgcttggctaattgccatctgttatcctgaaatggtgatgaagcttattgttattaacttccctcatccaaatgtatttacagaatatattttacgacaccctgctcagctgttgaaatccagttattattacttcttccaaataccatggttcccagaatttatgttctcaataaatgatttcaaggttttgaaacatctgtttaccagtcacagcactggcattggaagaaaaggatgccaattaacaacagaggatcttgaagcttatatttatgtcttttctcagcctggagcattaagtggcccaattaaccattaccgaaatatcttcagctgcctgcctctcaaacatcacatggtgaccactccaacactactactgtggggagagaatgacgcattcatggaggttgagatggctgaagtcacaaagatttttgttaaaaactatttcaggctaactattttgtcagaagccagtcattggcttcagcaagaccaacctgacatagtgaacaaattgatatggacatttctaaaagaagaaacaagaaaaaaagattgacttttctttatcttctatgaagggtctgtaatgaaatctctaaataatttttaaaaattgttcatcaacttctttatgttttattagaaaaaaactgttttaatgtgctttatcataaataaatatcctgacaaatggtattgaaaaaaatctgagatcatgtgaacatataatacaatgttgattttcttctggtgtattttgcacagacaagcatctgccttaaaatatatacacttgtacaaaaagggaaaaaaaaaaaaaaaaaaaaaaaaaaaaaaaaaaaaaaaa

SEQ ID NO: 405220 - DNA, 1000 bp, Homo Sapiens; identical to SEQ ID NO: 118812

SEQ ID NO: 405221 - DNA, 1000 bp, Homo Sapiens
tgctgagtcagactgaggaggaagacaaggagtggcgtgctgagctgatgctggaacttctggagtgttatctgcaagccggaagaaaggaggaggctgccaggttctgctccacggcagctccgttcattaagtctcacgtgccacagaaataccggcagatattctctgttatggttcgtcatgaattaatggacgaacttcagttaaaggaagaaaagaaaaattccattagcctgtcagtcactttctatattaatatgctaaaggcaaaagcggagcaaaatgatttaccaggtgacatcaatgtcattctgaggaaggcctacagacacttaggtcattacaaccaccagcgctttccctctatcagtgaagaaaaaatgcttttgctttttgaattggcgcgtttttccttgaccttgaaatgcatggagatctcctctgcctgcctctcagacctgaagaagatggaaagcaaagtaagtggcttcatgacactgctgcctggggatgaggcgctgctcaccgtgcagttggacaaaaggcaaagaaaggaagagcagttcaccaggccacggcccccagggcttcggtccgtggttggcacattgccgtctttcctacctgtgttttgcacagttgcagttagatggtgtttgcaattttacacctgcccgtttctctttacctttcttgtggccacgggtccacagcaccacagttgtttctagagtccaatttacggacggcgtaaaatttcatgatgctgatgatccagaacatcctccaccagtcccattattggacgtgtaaatcacaccggcagtgcctcgttacccgcagttcactttctgcagtttgttacctgcagacagctacagtatgaaaatattaagctattctgagggagaggccacagccacatcacttctgttacagtatagtgttatgattgtatcttattattagttattgttataaatatcttattgtgcct

SEQ ID NO: 405222 - DNA, 1000 bp, Homo Sapiens; identical to SEQ ID NO: 293270

SEQ ID NO: 405223 - DNA, 1000 bp, Homo Sapiens
tgtcagtgtgaatgagggtcaatagtgcagccagtggtgacatttttctttattttgcaaaatgcttttaaaactaaaggctgctctagttgatggacagtatcagtcttgatctaaattgtaggacactttttcatgtaacataacattggggattgggtttatttagtgtaatgaagataatttgatataaaaatattttgtgtatatatatatatttttactttgttttctaaattgctgtttgcagtaacagtaagcgcaaagcaaaatatataagttatgactgtatgatcagatgaagtatgagttcttttggtttgcatccttaaatagttagagatctctgataaaaactttggaatctttgcaaaacaatacaaaaatgccaaaatgtgagcatgtcaatgaaaactaaagacaaatacttcactctttttcatactattataagttattctggtattaaatatgttaataaaagtgtttttgttttgacatatttcagttaaatgaatgaatgctggttgtattttatttgaatgagtcatgattcatgtttgccatctttttaaaaaaatcagcaaatttcttctatgttataaattatagatgacaaggcaatataggacaactattcacatgattttttttaataccaaaggttggaagattttataattaacatgtcaagaagactttatagtaagcacatccttggtaatatctccaattgcaatgactttttaatttattttttcttttgctgctttaacattttctggatattaaaatccccccagtcctttaaaagaatcttgaacaatgctgagccggcagctgaaaatctaactcataatttatgttgtagagaaatagaattacctctattctttgttttgccatatgtaatcattttaataaaattaataactgccaggagttcttgacagatttaaaataaaagttaatttctagacctagaaaaaaaaaaaaaaaa

SEQ ID NO: 405224 - DNA, 1000 bp, Homo Sapiens; identical to SEQ ID NO: 224380

SEQ ID NO: 405225 - DNA, 1000 bp, Homo Sapiens; identical to SEQ ID NO: 293272

SEQ ID NO: 405226 - DNA, 1000 bp, Homo Sapiens; identical to SEQ ID NO: 220443

SEQ ID NO: 405227 - DNA, 1000 bp, Homo Sapiens; identical to SEQ ID NO: 224381

SEQ ID NO: 405228 - DNA, 1000 bp, Homo Sapiens; identical to SEQ ID NO: 118813

SEQ ID NO: 405229 - DNA, 1000 bp, Homo Sapiens; identical to SEQ ID NO: 293277

SEQ ID NO: 405230 - DNA, 1000 bp, Homo Sapiens; identical to SEQ ID NO: 293278

SEQ ID NO: 405231 - DNA, 1000 bp, Homo Sapiens
tcaccatcaggtgcgggatgaggagctcagcctcagccacagtgcgcaaggtgaagagttttgatccctcgcacatcctcgagccaggcagggcgcccggcttctatcccaggtagcagagtctcctatcccaggtctccgacggcgaccgcaaccctttgcccgtggaggacttcccctgtctaagggccattgggagtgggatggcctaatttctggggtcgctttctattgggcacttcaaacagtgctgggcaagggcagtcgtttgaggcagcttggggtgaagttcttagggaggaggtcctgtgcagctccgccagccccggtcaggcccaggcagccaccaaccctggtttctccatcacccctgacccctcccacagccccttctcgtgtttgcccaccgtctaggccatgcttccactttctcacctggctgggtatcccctatggggcacgggtgtcggccccgcagaggctgggctttggtctgtcttgttctctctgggaggggtctggtgcgggtggaatacgtggagggagcctccgtagggggagcaactgctcccggtgttgcaaggaggacagagccaatgcccgccccatcgtgtcatggccgacggtggcctcagaagatgtgtccacgtcccagtcgctggaagctgtgcacgagctcttcctggagaaaaggcccttggcagatacaaggattttgagatgagctcgtcctggagtatctgtgtgggccctaaatgcaatgacaagtgtctctatacaggaaaggagaggagggacactggagagcagggggaggccacgtgaggttggaggccagcaggggttacacagccacaggccaaggagggccagagccaccagaagctgaaagagatgaggaagcaccttcccctggagccctcagggagcgcggccctgctgccaccttgatctcagacttctgtcctctgtaaccaagggaataaagtcctgctgtgtg

SEQ ID NO: 405232 - DNA, 1000 bp, Homo Sapiens
tgctaccgcatgcacaagaagggcggcacgcaggacctggcggactaccagagaaggacctgggcccggggctgtcagtgctcggaggcctcttcctgctctttgtgctggagaacatgctggggcttttgcggcaccgagggctcaggccaagatgctgcaggcgaaaacgaaggaatctcgaaacacgcaacttggatccggagaatggcagtgggatggcccttcagcccctacaggcagctccagagccaggggctcagggccagagggagaagaacagccagcacccaccagctctggcccctcctgggcaccaaggccacagtcatgggcaccagggtggcactgatatcacgtggatggtcctcctgggagatggtctacacaacctcactgatgggctggccataggtgctgccttctctgatggcttctccagcggcctcagtaccaccttagcggtcttctgccatgagctgccccacgaactgggtgactttgccatgctgctccagtcagggctgtcctttcggcggctgctgctgctgagcctcgtgtctggagccctgggattggggggtgcagtcctgggggtggggctcagcctgggccctgtccccctcactccctgggtgtttggggtcactgctggggtcttcctctatgtggcccttgtggacatgctaccagccctgcttcgtcctccggagcccctgcctacgccccatgtgctcctgcaggggctggggctgctgctggggggcggcctcatgcttgccataaccctgctggaggagcggctactgcccgtgaccactgagggctgatggggccagtggaaaggggtcgggttgcccttccttccccccaaccacaggaatggaggcgggacacagggccagtaggagcaataggattttaataaacagaacccatcccaaaaaaaaaaaaaaaaaaaaaaaaaaaaaaaaaaaaaaaaaaaaaaaaaaaaaaaaaa

SEQ ID NO: 405233 - DNA, 1000 bp, Homo Sapiens; identical to SEQ ID NO: 293281

SEQ ID NO: 405234 - DNA, 1000 bp, Homo Sapiens
tgaagaggtccatgatgaggccgaagagtcagaggatgacttcgaggagatgaacctgtccctcctctcggcccggagcttcccacgcaaggccagccagaccagcatcttccttcaggagtgggacatcccctttgagcagctggagatcggcgagctcattggaaagggccgctttgggcaagtgtaccacggccgctggcatggcgaggtggccatccggctgattgacattgagagggacaacgaggaccagctcaaggccttcaagcgggaggtgatggcctacaggcagacacggcatgagaacgtggtgcttttcatgggtgcctgcatgagcccgcctcacctggccatcatcaccagcctctgtaagggacggacgctctattccgttgtgagggatgccaaaatcgttttggatgtcaacaaaaccaggcagattgctcaagaaattgtgaagggcatgggctacctccacgccaagggaatcctacacaaggacctcaagtcaaagaacgtcttctatgacaacggcaaagtggtcatcacggactttggactcttcagcatttctggggtgctgcaggctggcaggcgggaggacaaactgcgcatccagaatggctggctatgccacctggcaccagagatcatccgccagctgtcccccgacacagaggaggataagctccccttctccaagcactctgacgtctttgcccttggcacaatctggtatgaactccacgccagggaatggcctttcaagacccaaccagcagaggcaataatctggcaaatgggcacaggcatgaaacccaacctcagccagattggcatgggaaaagaaatctcggacattcttctcttctgctgggcctttgaacaagaagagagacctaccttcaccaagctcatggacatgctggagaaactgccaaagcgaaaccgtcgcctgtctcaccctggacatttctggaagtctgcagagctgtga

SEQ ID NO: 405235 - DNA, 1000 bp, Homo Sapiens
gaggatttttctgcccactgatactgacatgttctgcactattcaggtgtccgttattcaggtgcaaagaagacaagatataaaataaggcccagaggtgcagtccaggagtatggagtagggcagaaattgaaactgaaactgtggaacgagaaaccatggataagggaggactacagtacatcaaatggaccaatcatggctttctgcaggtcctcatattatgtagcctgtcattcagggatatgtgatctgaatgacaataagaagccagacgtatgtgaagatggtggaaggacattctatgagtaaacagcaagtgcaacgtaacgttgattacaattcacctacccattactttggaaatagaatgaggtgcatctcaccaaccatcctcctgcagaaagccctctgacctgtgaaacaggaagctaaatgtctggaaagtatgtggattggacacatgtcttggattaaattatcttacacgccactggaatgaacctgcctgattctccactttctctgcttcattctgagcgttcttgcctcccctgggtactggaaagagaatggagccttagaatcaatgctcccaacccacccattctttttcctggcactttccacctttacaactacgcctccaaaagtttcagtctattgcagctatggtgggagccacataggaacttctcagggatgcaaaattcatcaaccacaattccctggccagaagaaccacatagacttatctattaccaggatcggagagagcgggcccctttcttcctaaatttcactttttctcttaatttattctgacaatgaggagacagaaaaagctgcatgatagtgatgtagagtctaatggtgtatctctggatacacaaagagccatctcaggtaacaactttaatccttgaaatgagactattatcttcctgttaattattccattatttcctaatgtttttaataataaaaccccccaaacaac

SEQ ID NO: 405236 - DNA, 1000 bp, Homo Sapiens; identical to SEQ ID NO: 118814

SEQ ID NO: 405237 - DNA, 1000 bp, Homo Sapiens; identical to SEQ ID NO: 118815

SEQ ID NO: 405238 - DNA, 1000 bp, Homo Sapiens
cttagccatctgtctgtcactgaagcagagatgctcagggacccagagggaggccagcagctgctgcggactctggagcgtgagaaccagcgcctggaggctgtcctggcgtggcggcgctctgagctggtcttctggcggtggatggacacggtcctgggcacctgtgccccggaggtgcctgctgcagcctcacagcccaccttcctgccctgggtccccgagcgcgggggtggcgagttggacctggtagtgcgggagctgcaggcactggaggaggagctgcgggaggctgcggagcgcaggcgggcggcctgggaggccaaggctggaggctgtggacgggggccagagtggagtgccgcgcggcgggcctctcgggaggctgtggaaaaggagctgggagctctacagcagtgctgggagcgagacggtggcccggcccagccccatgggccacaccggctggtgagacgagaggatggggcagcaggggaccgggacctgcgggcagctgtggtgatcaggacgctgaggagccaggaggcctgcctggaggcggtgctacgtcgactacagggacagtgtcggcaggaactggccaggctggtgggagcccgccctggtctcatctggatcccgccacctggacgctgagggcctgtcgacgggccctcgtgtgggaagcctgccctggcccagcctggctgggtcttggaggagcagattccaaggccaggtggccacagggacgatgcagatgcagagcccacgtcacatgctcgctccaggggtggggctgggctgactctggccggatcccaggcctgtggctagcagcactggggacaggaatgactggtcccttgaggaggtcgtgacaggctcagcctggtggtctggaggggactcggaaataaattgtagcagctttcctgcaaaaaaaaaaaaaaaaaaaaaaaaaaaaaaaaaaaaaaaaaaaaaaaaaaaaaaaaaaaaa

SEQ ID NO: 405239 - DNA, 1000 bp, Homo Sapiens; identical to SEQ ID NO: 293283

SEQ ID NO: 405240 - DNA, 1000 bp, Homo Sapiens; identical to SEQ ID NO: 224384

SEQ ID NO: 405241 - DNA, 1000 bp, Homo Sapiens; identical to SEQ ID NO: 293285

SEQ ID NO: 405242 - DNA, 1000 bp, Homo Sapiens; identical to SEQ ID NO: 293286

SEQ ID NO: 405243 - DNA, 1000 bp, Homo Sapiens
cggaggggtctccagggcagggcagggccagttgcctggggccatctgctgtgtccaggagcccggcgctgccactggccttgccccaaggcccagctctgcccttcatcccttcagcacctccccgtaccttccttccatgggtcttaagctgtggcaagtccttaagctgggacggccagcgccagccctgtccccaacaggtcactcagcggctcggagcccacgtcctcctcggtgacacaggaaaatggtgcagttgtgcaagggcatgagagggtcccgtggaaggcacattccagaaggttctgtcccatggaaggcacgttccggaaggttccatcccatggaagccacgttccagaagtttccatgctgtggaaggcatgttccggaagtttccgtcccgtggaaggcacgttctggaaggttctgtccggtggaaggtcactctgtgcggtgtgcactgaccccagccagtggatgttccccgtccaagagcaaagctacagtcggctgcaggtgcagtgacttttgcacagtggaagaatttctccagaagatattcctgcaggtggaatcactggatcgtaggcccagatgtcttccacttacttgattttgcctgatgcctcccaaggaggctgtgcacagcaggtgtgagatgccccatctcaccaaccggccaacatcccgatgggagatgttgagttttcaccacgctgctgagtgtgacgtggaatcttcttattttagcttgcatttccctgattacaagtcaggtggaacatctcgaatatgtttctgggccatttgattttcctgcaagtcacctgttccagttctttgcccatttcctgttgggttggtcaatattttttgtgattacacgttggatacgtggctggcctttggcttgcctttgacttcgtttgttctatcgaagcatgtgcagaattgttaaattttaatgtattcaaatgcattaatctcatttctt

SEQ ID NO: 405244 - DNA, 1000 bp, Homo Sapiens; identical to SEQ ID NO: 118816

SEQ ID NO: 405245 - DNA, 1000 bp, Homo Sapiens; identical to SEQ ID NO: 118817

SEQ ID NO: 405246 - DNA, 1000 bp, Homo Sapiens; identical to SEQ ID NO: 224389

SEQ ID NO: 405247 - DNA, 1000 bp, Homo Sapiens
ctggggagtgccactcccgcagtgacagctctggcgagaagaggcagctggatgtgtcctccctcctcttgcagagtcctcagagctataatgttactctgagggacctgctggtgattgccactccagcccaactggatccaaggccttgtagaagccacgcaagtgctatgagggacccatgtatgcaggatcaagaagcatacagccattgcctgatctctggccaaaaaggatgtgagaggagctagaatcagactggatctctgccacttttcccttcctacctcttaacttgcaggaaacaatgtgtctcttccggcagtgtctccagtgttcacagaatcaactgaagttttgtttgctcatctagatatactggtcttccattagttcctagtagcagcagtggggccaacagccctgcctctgttccctcccagttagcttacagtgctacaggaccatgatttctggggttggattggtgctgccccaggacacactccagttgccgtaccagtggcacttctctgggttcttcacatggcaccatcatccagaatactcccccagataaagcaacttcgggagtagtgtttcagagaaggactcatgatttccaggagtcaaaagccctcagtccaccaacagaactatgccagttggtcttcatctccaagataaaagatgaggtcagggatgggcatggtgcataactctgagccctgagtgagagaactgaggcagctgcaacttcacaaggtcaaggcccgacctccgcccatccccaccagcccaaagacttgccacctcagtgcccgagcatcctctggtgacctccctcaccagcccaacttaatctcaccagtgaaaacagaggtgaggcgagagtacccagcctgaagatgcttcttctatcagcctgcagaaatgttacactttcccttcaggcatccattaataaaagaaattgccatgcttaaaaaaaaaaaaaaaa

SEQ ID NO: 405248 - DNA, 1000 bp, Homo Sapiens; identical to SEQ ID NO: 224390

SEQ ID NO: 405249 - DNA, 1000 bp, Homo Sapiens; identical to SEQ ID NO: 118819

SEQ ID NO: 405250 - DNA, 1000 bp, Homo Sapiens; identical to SEQ ID NO: 224391

SEQ ID NO: 405251 - DNA, 1000 bp, Homo Sapiens; identical to SEQ ID NO: 224392

SEQ ID NO: 405252 - DNA, 1000 bp, Homo Sapiens; identical to SEQ ID NO: 224393

SEQ ID NO: 405253 - DNA, 1000 bp, Homo Sapiens
ccaagctgctcttctcctccagcttcctcatcttcctgctgatgcttatcctcctggggaagggattcacggtgacacggggccgcatcagccacgcgggctccgtgaagttgcctgtctacatgaccctgtacacgctcacccatgtggtgctgctcatctacgaggcggaattctttgacccaggccaggtactgtacacgtatgagtcgccggccggctacgggctcattggactgcaggtggcggcctacgtgtggttctgctatgctgtgcttgtctcactgcgacactttcctgagaagcagcctttttatgtgcccttctttgctgcctataccctctggttctttgcggttcctgtcatggccctgattgccaatttcggcatccccaagtgggcccgggagaagattgtcaatggcatccagctggggatccacttgtacgcccatggcgtgtttctgatcatgacccgcccgtcagcggccaacaagaacttcccgtaccacgtgcgcacgtcgcagatcgcttcagccggagtccctggacccggagggagccaatccgctgacaaggccttcccgcagcacgtctatgggaacgtgacgtttatcagcgactcggtgcccaacttcacggagctcttctccatccccccgcccgccaccttccccctgccccgagcggcgccggattctgggctcccgctgttccgtgacctccggccccctggcccccttcgagacctctgaccccgctggactccggaacacccgtggtgaccgccgggaccctgcctgtgactctccaggactctgcgaccccgggatggatattgcgatgctggtctcgaccctgaaaccctccctcggatctgtgacctcggacccgtactccatctgccgcatctccattccgggggccttccctcgggtccctggcagaaagacattttaccccttcttgccaaaataaaaaaggattcgtttttatctat

SEQ ID NO: 405254 - DNA, 1000 bp, Homo Sapiens; identical to SEQ ID NO: 293295

SEQ ID NO: 405255 - DNA, 1000 bp, Homo Sapiens; identical to SEQ ID NO: 293297

SEQ ID NO: 405256 - DNA, 1000 bp, Homo Sapiens; identical to SEQ ID NO: 293298

SEQ ID NO: 405257 - DNA, 1000 bp, Homo Sapiens; identical to SEQ ID NO: 293299

SEQ ID NO: 405258 - DNA, 1000 bp, Homo Sapiens
gggcatgaagacttttcaaaaatgattgatgaagctgagcccctgggctacccagtcgtggtgaagagcacacgaggccaccggggaaaagctgtttttctggcaagagataaacatcacctctctgacatctgccatctgatccgccacgatgtgccctacctgttccagaagtacgtgaaggagtcccatggaaaggacatccgggtggtggtggtagggggccaggtcataggctctatgcttcgctgctccactgatggacggatgcagagcaactgctctctcggtggcgtgggcgtcaagtgtccgctgacagaacaaggcaagcagttggctattcaggtgtccaacatcctaggcatggacttctgtggcattgatctccttatcatggacgatggctcctttgtggtgtgtgaggcaaatgctaatgttggcttcctagcctttgaccaggcatgcaacttagatgtgggtgggatcattgcagactataccatgtccttgctgccaaataggcagactggaaagatggctgtcctcccaggactgtcgagtccaagggagaagaacgagccggatggctgtgcttcagctcagggagttgcagagagcgtctataccatcaacagtgggtctacctctagcgaaagtgagcctgaactgggagagatccgggattcctcagcaagcacaatgggggccccaccctccatgctgcccgaacctggctacaacattaacaacaggattgcttctgagttaaaacttaagtgaattcctgctttttggcagcatttaaaccaaatcctactgcttccctagtagttttgagtgaataaaatctggactaatgtgatttcatttgcacagaaactagaaatcccatctgggcactcagcattttttctaacgatgatttaagcaaatggcctagctttgtggtttttacaaagacaaatataaaaacactcacaagaacaaaaaaaaaaaaaaa

SEQ ID NO: 405259 - DNA, 1000 bp, Homo Sapiens; identical to SEQ ID NO: 293300

SEQ ID NO: 405260 - DNA, 1000 bp, Homo Sapiens; identical to SEQ ID NO: 293301

SEQ ID NO: 405261 - DNA, 1000 bp, Homo Sapiens
ggccagtgttattggtatttcccacagtgctgtatgtaaaacattgcagatttcccttctacctgcagtactgagatagagaaggattgttgttaataatatatttgaccctgttaattgtaaactattccttatttgtttttttccaggttgtttgtggacctgggaatatttggtttctagacatctggcttgaatattgggcaaaaaaagtaaaacaatagattgaatatttgataatagaatattagtaaggtagtaaggccatgaatcgttgatgacttatggattctgtcagttcatcatgtcagattctccattcttcatgttatcaatctattttggttaacctatatttgtagagatggatagttgtaaggtacctttaagagagcttagattaatctcctctttttatagatgagtcctcaaagatgacagagctaggaaaggaaggagcctagacttgatcccaaggtgttcggtcatatttcttctaacccatcagccttttatcatactactgttgctagtacttcattataaagcagtttccaggtagtctcaatgacagaggtcacagagttacagggcagtgcttcatgtgattaatacatcatggtttacactgaactttcacataaactatttcattcagtactcaaagctatccttccagagttacaaaaggaaaaaatggcaaagtaagacctagacctggatcttctaactccaagccgagtgtactctccagttcaccttctgtgctctatggctgctgtaatgggggcagagaataccaaaaaggaaatggaaattataaaaaatatagagcaagagtaatctattcaatgttttgacttactgcttttagcagaaagtattcccttttcttatagtagtgaattactgtgtgaagttctcaccgacaatgcccctggataattttctgtctttctgtaattgtgtgcctacaaaaatacatgtatattttatggtg

SEQ ID NO: 405262 - DNA, 1000 bp, Homo Sapiens; identical to SEQ ID NO: 293303

SEQ ID NO: 405263 - DNA, 1000 bp, Homo Sapiens
tccagctctccctaccactgtgggctgaagtgctctgaggtcctaaataagcttgaaaggcagtctcggccacaaggactgcaattcctgggcaagttcaggtgctctgctgggctcagaggcagtggacttagggtacacaagacctagtgagacaccagctggggcagccaaaggagtgcttgtagcagccatcccccagccccaggcagcacagcttgcagcttcaagagagaggccttccttttgcttgagaggaggagaggggagagtaaagaggacttgtcttgaatctggataccagctcagccacagcagaatagggcacctcaggcagagtcctgaggcccccataccaggccctagctcccagacaacatttctagacacatctctggctggaagagaatccactgccttaaagagaaggacccagttctggcaagattcatcacctactgactaaagagcccttgggcttcgaataaacaccagcagtggccagacaacactcactgcaggccttagccagtgctgtgctgcttcaggtgtgatccagcactttcccagctacagtggtcacagagagagactcctgcttgaggaaaggagagggaggagtaaaggggattttgtcttgcagcttgggtaccagttcggccacagtgaagtggagcaccaagcaggctcctggggttcccaattccaggcattggctcctggatgtcatttctggactcccactgggccagaggggagcccactgccctgaagggagagacccaggcctggcagccttcctcacaagctgactgaagagccttgagtgaacattagtggtatccaggcagtacttgctacaggcccgagtggcatagagagattctttctgcttgaggagaggggagggacgagtggaaaaactttgtcttctggcttgggtgccagcttagctgcagtagtatagagtacccaataaattcctaagtttcctgactcc

SEQ ID NO: 405264 - DNA, 1000 bp, Homo Sapiens
gtgctgacccagtgagggtgccttctgctgcccagtcccctggacacattgaagagaggagcaagtagccctgtcctgacattgaccctgatttgacccctcttcttataaggatctcaagaatctcttcagaagcactgatgacgttgatcccagtaaggacatcacctctacccttggtaccacaactctgtatggggttgcccagctactcttcctttcagttgcagtcccaattttactccgtcagaaagcagccctcccctccctccccttatgaggtctcaggcagtggtggcagatttttcctgaagagtctttttcctgtgtctgccttgttattggaaccaatgccagctggtaggatccctgagccccttgcgatatcaccaccaagagcctgataactgagcagggtggatcctgtccctggagctgctgcacccattaattctcccttgttgcaactctgtgtaccaagaacccctagcatcagcctcattcctaagccaataacgcctgtatggagttggtttcatcttctggtgcccacggccattggcattgccagcctcattccatgccactatgagtcaactcaggaaaactgcgagtgcatttgaggcttaggggtagtcattccatctttagattatccttggacttcagctaccagcacagcgtgcattagccttggtcctgtaggttaactgaagttcaaacatcagtgccagcttgcctccatccttttcacatattatgcaggccaattgacatataatttgttcttaaaaataggggcatgaaatatgtgatctggaaaagattgtactttctggactcttttcccactcttgcctctttgtgctgctgtttcgtatcctcctcacaccgtgtatttcccacccactcagggtcacagcctactaattcctcaaacttctctccctggactaggagaaaggctaaagaatgtcagtaaataaaagagctttcatcc

SEQ ID NO: 405265 - DNA, 1000 bp, Homo Sapiens; identical to SEQ ID NO: 293305

SEQ ID NO: 405266 - DNA, 1000 bp, Homo Sapiens; identical to SEQ ID NO: 224394

SEQ ID NO: 405267 - DNA, 1000 bp, Homo Sapiens; identical to SEQ ID NO: 293307

SEQ ID NO: 405268 - DNA, 1000 bp, Homo Sapiens; identical to SEQ ID NO: 293308

SEQ ID NO: 405269 - DNA, 1000 bp, Homo Sapiens
acacttgagaacccacactaaggagaaaccctataaatgtagtgagtgtgggaaagcctatcggtatagttcacagcttattcaacaccagaggaaacataatgaggagaaagaaacctcataaataacaaatattgtgggtagtagggctgactgctgcttttctaaaaagtagttctttagtatcaactttaattctacttctaagaatcatactctacttctaagaaaataattagaagtagacaaagattaatgaaagggatgttcatgacagcatcatatacgactgaaagaagaaaactagattttcaacattacagggttgaaatgaatgatgagctatccatatgatggttctgcagccattgcaaacatttttaaagacaatttaatgccatggggaaatgattggataagacggaagataatgacatacaatccaaaatttaaaaaaatatttttgcataggaaaaattgagaaggaagtaaaccaaaatgttaacagtgatcatctctgggcgataggattataggtgatttctattttcttctgtatacttttctatgctttctagattatctacatgagaatatactaattttatatgcaagaaaaaaagcacagtattttttaaatgcaatgaagacgtgcttattttcactcagcagtgttatgaaaggcacgtagtatatagagcccaaagccctgggattgcaccctgacactggcatttagcagcagtggaaccgcgagcaagtcccttccttttagagcgtgtttcctgttaagtaaaatcataaacaccgatcctttgtcctttttagttttaagacaagctgactttagagttgtcaacaaaatatataataacactgttaggttaaaagaacacagcaaaaattcactgaaccctcctttcccacagttctggaaggatctgcagatgatggagaactacctaggcttcatcttttcaacatatgtctacacaaccag

SEQ ID NO: 405270 - DNA, 1000 bp, Homo Sapiens
gcagccgtggtggaccggaaaggacctctagtgacgttgaacaagccacagggtctaccagtgacaggaaaaccaggagagctgacgttgttctcagtgctgccagagctgagccagtccctagggctcagggagcaggagcttcaggttgtccgagcatctgggaaagaaagctctgggcttgtactcctctccagctgtccccagacagctagtcgcctccagaagtacttcacccatgcacggagagcccaaaggcccacagccacctactgtgctgtcactgatgggatcccagctgcttctgaggggaagatccaggctgccctgaaactggaacacattgatggggtcaatctcacagttccagtgaaggccccatcccgaaaggacatcctggaaggtgtcaagaagactctcagtcactttcgtgtggtagccacaggctctggctgtgccctggtccagctgcagccactgacagtgttctccagtcaactacaggtgcacatggtactacagctctgccctgtgcttggggaccacatgtactctgcccgtgtgggcactgtcctgggccagcgatttctgctgccagctgagaacaacaagccccaaagacaggtcctggatgaagccctcctcagacgcctccacctgaccccctcccaggctgcccagctgcccttgcacctccacctacatcggctccttctcccaggcaccagggccagggacacccctgttgagctcctggcaccactgcccccttatttctccaggaccctacagtgcctggggctccgcttacaatagtcctccctctgttcctgaccccctcacacacactggaaagtgagggtgggggctctgcagtcagacaaacctaagatcacatcctggacaggccacttgcttgctgtgtggcattgggcaagtaactttacctctctggacttgtgataataaaagttcctacctcaaaaaaaaaaaaaaaaaa

SEQ ID NO: 405271 - DNA, 1000 bp, Homo Sapiens
acatggaaatacacacacactcacacacatccacacacaagcatatgcatacacacatatatacatgtatatacacgtgcatataacatatgtagatatctgccaattgctatccaacgtgaattccataaatttacactcctaccagcagcatttgggtatctgaggtgtcacacatccttgccagcactggatattatcccggcttggagattttgccagcctggtgggtgtgaagtggatcttgttgtggttttaatttccatttctctaattatgcagaggctgagtgccaggcttcctctcctgggaagagcctgccggcttgcgggctgtcagcactcactgtgggtgcgggtggcgtgcctgcctgcacggcccttgcctctcttagtctacagggtctccactcctgagttcccggaaacaagatacagatttcagaatggcacctgaacattgtttactgatttccggctggaagtgagggtccgagggattcttctatggaattgtatgactcagcatctttctgattgcaagcagcagcatcgcagcctaaatgaatctattggctttgcttagggttggttccccttcattcttgagctggttgtgggcaactcctgccccctgtggggggactggactgccttagatcacatgtgtgtccctgactctctgtggtcaggggatagaatattcagattggaggggagccagcttctcctaaaccacgtggatctccaaacggaagtcagagcagatgggaagggggagcagacgttgagctcaatcaataaacacccaccttgggagctgcagcctggagggcttggtgactgccacgctggctgctcagagctcctcgcttacttttgggcatatgcctgtgaaccagatggtggcacctcctgaaaatcgggtctgtggataatgggaggattttttaaattatgaaaatgttcattatggaagaataaatgaagaatagcatatg

SEQ ID NO: 405272 - DNA, 1000 bp, Homo Sapiens; identical to SEQ ID NO: 224395

SEQ ID NO: 405273 - DNA, 1000 bp, Homo Sapiens; identical to SEQ ID NO: 224396

SEQ ID NO: 405274 - DNA, 1000 bp, Homo Sapiens; identical to SEQ ID NO: 118821

SEQ ID NO: 405275 - DNA, 1000 bp, Homo Sapiens
aaaaggaacttcttttgaaaagcaattaacagttgataaaggattaaataaaaattatctagtaaggaatttcttattggaatgtaaacgtggttctaattttaaatagacagtgatataaagaataaaaagtaaacagtgaaattgagttctccagggaaaaggcagacctgtttagtaaaaaaaggatgcttttttcagtgatgtctttttttgagtgcatatgtgtgtgactcttgaagaaatccatgttcagatttatcagatgattgaagtgggtgttctgaataaagaaagctgtgaggcctgaggcagtgacgtatcaggaaacatattttattggagatttggaagctatagtaaaacataatggcaataagccaacttcccagtggtaaacccacagtggtggtttagttactaacctcttgatgaccgaggaggttaataattggatattgcagagcagcaatatgtaacctgtgtgtaatctcagggcctcaggttaacagtttcagtcagaagctaagagaaacactgacaaaatttagcttaccatgactagctgccagtttatgtggtctgtgttcgtttgttttaaagaaactaatactgtacagagatctttgacaccaacttcaaggcaccagtgtttagtgcaagcaggtagagaggacctatgaactaggtttctaattggcagtcagtgctaattcagccattagtaagtaaagtcacttttccactaaaatagtgtcccgactaaccacctccttccgtgtcttttccaaccacaaaaccacacacatagaccatctcatcttactttatttcttgcatttattgtatccaaaaaaattggtttagttttttaatgtaattgacaagactcaagcttttgaaatacttacgactgttctcttgattccaggacaccctcccctgtgtctaaacatgtgtggtatactttttaaataaattaaagcttattttacttggc

SEQ ID NO: 405276 - DNA, 1000 bp, Homo Sapiens; identical to SEQ ID NO: 293311

SEQ ID NO: 405277 - DNA, 1000 bp, Homo Sapiens; identical to SEQ ID NO: 293313

SEQ ID NO: 405278 - DNA, 1000 bp, Homo Sapiens; identical to SEQ ID NO: 293314

SEQ ID NO: 405279 - DNA, 1000 bp, Homo Sapiens; identical to SEQ ID NO: 293315

SEQ ID NO: 405280 - DNA, 1000 bp, Homo Sapiens; identical to SEQ ID NO: 224397

SEQ ID NO: 405281 - DNA, 1000 bp, Homo Sapiens; identical to SEQ ID NO: 118823

SEQ ID NO: 405282 - DNA, 1000 bp, Homo Sapiens
acagcttagggaaacagagtcaagtgccgtaaaatggacacacacaaaacactctcgggagctgggtccctaagttacacagagaacctggcttccctggtcttagcagatctcacagccccttcaccccggcctgtgacacacacagccctccagaccttcctccacctgcaccactaggtttatgctagaaggttcccagtgtgcccacttctaagcagtctttgctgagggggatgaagaaaaggggacctgccaagaggccactgaggtggaggagtcctcggagactaaagcagcagaagtttggagaacctcttcaaaagagacaggagaagcaaggctgcgtgcgagtcaggaagaacaggcatggtttaaatcttttttcttggagagtaaacattgtcacatttctgcctctgctgcttcagaggatgcgcctctctggacagcccttcaggcatcagcctgttggcagccgcgcgtcctggaatatggggtcgctggacataaatccatctgtactggccggggctgacagcgactgtcagtccccaggacagggtcaccacctttctctcccttcttctctctcctcttcccactgtttcaaggacagcagagtcttatggatttttcttctcctgtcttgaatgtgcaaaggtccaggggaccacagcaatgccaccttctggtgtcaagagggaggtggaggcaggcactgaataaggtcccaggcgctccttgccctggaattttgattcttcaaagggcatcagaatgcggtgaccagcagcacacagcaaccagtctctcagcggggctttaggcatggtcacttgggcttgcccagggaacctcatcccggaggatcttccaggaagcctgaggtctcctactaatggaactgtgactggctcacccagagggggtcaggttgggaccttggagtgggcactagatgaagcaaatgggattgactctaataaaaacatggaag

SEQ ID NO: 405283 - DNA, 1000 bp, Homo Sapiens
acaaaacaaaaagccaccgcaataattcggtaaggacaggatattctaaagcaaattaaaggagatttctgtacacatagtcagtaataataaaactcagcatagtagcaaaaagaacgacatcagtttaaaggcacaatacttaatcagtgactggcaacaacgattagttccatcattttaaggctgtgaatggtagacatttatcacatgtgatattgtgtaaagcctcttctgtttccatttggtgggaagccttaaattgatctggaaagaattcttcatttttcatttgtgcttttttaaaaaaaaaaataacacaaagaggaaaactagaatatatatatatatatacatatatataaaaagtcaaaattgtaataactgacccatttcaaagactgtttggtgcttctgtctttcaccattgtggttggctgaaaatcattcagctcacctggtgcatctgggttgaatgggaaattttgtgtgtgtagtatgtgtgtgtttgtgtgtgtatgtgtgtgtgtgcccatagcacacgtatatatgtgtgtgtccctgctgcaaagtcttgccagagatatacaaaactgatgtaagacgaacttggatcacggcttggttcagcagagcatgggggcgggggctctggagtggtggggaagtgatgctgcctgcccacgagccctggtttgggtggcaagactcacaccagcagcggactgcaggccttagaggccatgccatttgggtgaggatttgattccactgtttattttctcattgtatcaagttgaatttctgcaggtgttgcaagtatgttcaacgatttaaatttttttttatttttcaaagtattgttcctttaaagaatatttctgttctagggcatcgtttcaatcgcatcgtatctctacttgggcacaaaaaaaaaaaaaaaaaaaaaaaaaaaaaaaaaaaaaaaaaaaaaaaaaaaaaaaaaaaaaaaaaaaaaaaa

SEQ ID NO: 405284 - DNA, 1000 bp, Homo Sapiens; identical to SEQ ID NO: 118824

SEQ ID NO: 405285 - DNA, 1000 bp, Homo Sapiens; identical to SEQ ID NO: 293316

SEQ ID NO: 405286 - DNA, 1000 bp, Homo Sapiens; identical to SEQ ID NO: 293317

SEQ ID NO: 405287 - DNA, 1000 bp, Homo Sapiens
agggaaccacagacccacccgccccctcagccggagcagcccgagggagcagaggaggggctgcctggagcttcccaccctgctgtggtcatttgtcaaagggggaaggcacccactgcctacctcacagggctgttgtgaggatcagagaggacgacagtggggaaagaatctggaagtcttcaactgccgtctgatgggaaggaccgtctgggtgtccttctgggatgaggatgacagagcaacccttctcctgccctgaacccccccagctcacctgaccacctctggttctccagctccggtccttcctagcagcctggtgagctcactccttcccctgatgactggctgcctctacacagactcggcgagaggacttgaaggaagccctctgggttgtctgctgagtacaggggctcagtgaacactggcgctgcctctgagtcggggctgggcctgcagaggccgactcagaggagactctgctgcttgctcccagccccttccccggcgatgcccatcacactgtgacctcccatccctgaagggcacctgcctgagggcctggcctccttccagcttcatggacctggagatgtgccctttcatccttcctgcttcccaggccagtagatccgtttacacttttgggtcgacagtcagcttttccttttggttttggcgggtcccagaggcatgggtgtccagtccaatgtggggagccacgtgacaacgtgggggactgggacatgggactgggaagtcagcagacgctgggatagagagggccctgaacaccaggctcaggggcttgcttggtccttatcctgtaggaggtgggaccacctttccctgaactttctctacaacccttgggagcgtggggaggaggcggctggttccagggtcagtttactaagttagagatttggaaaacctgtgtcagctgtaactcctaggatattttatgtggaacctaacatgcagatgaaagctg

SEQ ID NO: 405288 - DNA, 1000 bp, Homo Sapiens
attggtaattgtaataatcaggttaagttcagtgaactaactgttgacatgttccggatgttacaagctctggaaagggagccaatgaatttagcttcccagatgaataaaccaggaatgcaggaatcagctgacaagcctactagacgagaaaacccccacaagtatctgctctacaaaccaaccttcagccagctatataccttcttagcagcgtcttttaaggagctgcctgccaatagtgtgcttctgatttacctgtcggccactggcgttttccccacaggtcgttctgatagtgaaggtccttatgattttggaggtgtacttactaatagtaaccgggatattattaatggagatgccatccacaaacgaaatcagtcccacaaggaaatgcactgccttcatcccggggatctctatcctttcaccaggaagccactgttcatctttgtggattcgtctaatagtgttgcgtataagaatttcacaaacttgtttggacagccactagtctgcttgctttctcctacagcatatccaaaagctttacaagatcaatctcagcgaggtagcctcttcactctctttttgaacaatcctctaatggccttcctatttgtctctggattgtcaagcatgcgcagaggcctatgggaaaagtgtcaagaatatcttcgaaaaatcaaccgtgatattgcccagctactgactcattcacgttcaatagatcaggcatttctccagttttttggagatgaatttcttcgcttgctcctcacaagatttatcttttgttcagccaccatgaggacgcacaagatttttcgggaaacacgaaattatccagaatcatatccacaactgccaagggatgaaacagtggagaatcctcatctccagaagcacattttggaattagcatccattctggatgttcgaaacgtgttctttgagaataccattgatgactattaaaacaaaaaccctgttgtcg

SEQ ID NO: 405289 - DNA, 1000 bp, Homo Sapiens; identical to SEQ ID NO: 224399

SEQ ID NO: 405290 - DNA, 1000 bp, Homo Sapiens
atgttctattgttatagaaatgtctaaatttgaagcctggagcaaacgggcatggacagatgtatttctacagatatacaaggttttggttctatcccgtgtagtgccatactgcagcaataatatgccccccatatgtgtgcaaaatacaccaaaagtcaatccttgttttgcatccagcaacatatattctgattctgaaagaattttgcttagttggatgaacataaattatgagaatactcgacatgtgatatggaaaaactgtcacaaagatgttatcccttctgagagatggatagtaaattttgacaaagacctttcagatggtcttgtttttgcaacacagttgggagcctattgcccattcttgattgagtctcattttataaatatgtacacacgaccaaaaagtcctgaagagtatctgcacaattgcctgattattgtaaatactctttatgaaattgactttgacgtggaaatacaggtgtgtctgagggtgtttccaaaggagatggatgcaggagtcagtggcctgagaaaggaagatatgccctcagtgtgggttgttaccatccgattggctgtggcagtggccagaacaaagagacagaagaagggggatattcagtttgcttgtttttttgtttgtttgttcttttttatttttgtcgtgatctctttctccctttggagcaggatgcatttttttctccttctgcccttggacatctgattccaggtttttcagcctttggactctaggacttgcaccagcagcctcctttgggctttcagccttcggcctcagaatggggcctgcactgtagcttccctggtttgggggatttgggacttggcctgagccatgcttctggcttccctgggagcccctattggcttctgtcattctgcagtttgtagccagcctactgtgggacttcgcctttgtgattgttcagccaattcttcctaataaattcccgtttatatatat

SEQ ID NO: 405291 - DNA, 1000 bp, Homo Sapiens; identical to SEQ ID NO: 293318

SEQ ID NO: 405292 - DNA, 1000 bp, Homo Sapiens; identical to SEQ ID NO: 293319

SEQ ID NO: 405293 - DNA, 1000 bp, Homo Sapiens; identical to SEQ ID NO: 224400

SEQ ID NO: 405294 - DNA, 1000 bp, Homo Sapiens; identical to SEQ ID NO: 224401

SEQ ID NO: 405295 - DNA, 1000 bp, Homo Sapiens; identical to SEQ ID NO: 293322

SEQ ID NO: 405296 - DNA, 1000 bp, Homo Sapiens; identical to SEQ ID NO: 293325

SEQ ID NO: 405297 - DNA, 1000 bp, Homo Sapiens
catttcagggctccccaccgatagtgatcggcagtgctgactgcaatgtgatagagatagatgataccctcgacgactccgatgaggatgtgatcctggtggagtctcaggaccctccacttccatcctggggtgcccctcccctcagagacagggccagacctcaggatgaagtgctggtcattgattccccccacaattccagggctcagtttccttccaccagtggtggttctggctataagaataacggtcctggggagatgcgtagagccaggaagcgaaaacacacaatccgctgttcgtattgtggtgaggaaggccactcaaaagaaacctgtgacaacgagagtgacaaggcccaggtttttgagaatttgatcatcactctccaggagctgacccatactgagatggagaggtcaagagtggcccctggcgaatacaatgacttctctgagccactgtaagggaccacccccaggtttcagtgaacccttacctatattcagcatccagtagtgggaaaactggggtgggggtgggggtgggacttctaactgcatgaattaatccacaaagcggctatcttttggggtggagtagaaagggtcttggataccagcacattggagggagatagcctgacctctgtccttgctccttctccctgcagcctacgggtctgttttctgtgtgtgcccatttccttgacagctttattctttgtgaaagtggtataatttattgttaaatatttgaacaataaaaaaggtacaaaaagtgaagtacaaattacccaaatctctccacccttatataatcattgtcaaccctttgatgagtgatatttccctatacctatgtacccagatagatatatgcatagataaaagtgatgaaatataagtgctgttctatctgtattttttcaccaaacaatatatgttgtgagcttctatgtcaataaatatatatatcagcaaaaaaaaaaaaaaaa

SEQ ID NO: 405298 - DNA, 1000 bp, Homo Sapiens; identical to SEQ ID NO: 293326

SEQ ID NO: 405299 - DNA, 1000 bp, Homo Sapiens; identical to SEQ ID NO: 118826

SEQ ID NO: 405300 - DNA, 1000 bp, Homo Sapiens; identical to SEQ ID NO: 293327

SEQ ID NO: 405301 - DNA, 1000 bp, Homo Sapiens; identical to SEQ ID NO: 293328

SEQ ID NO: 405302 - DNA, 1000 bp, Homo Sapiens
tgcagaaggcctcccacaaaaacaaaaaagaaagaggagtcagcaacaaggtcaaaacatctgtacacaacttgagcaaaacacagcagaccaaactcactgtgggtagcctgggattaggcctcatcatcatccagcatggaccctacctccagatcacccacctcatcaggaagggggctgcagccaacgacgggaaactccagccaggctgtacaggaagcatggctggggaggcctcaggaaacttacaatcatggcagaaggtgaagaggaaggaggtgatgttctgattagtgttggccatgccaatgtgttaggatatactcttcgagaatttttacagcttttgcaacatatcactattggaacagtgctacaaatcaaggtttaccgagattttattaacattcctgaagaatggcaagaaatatatgatttaatccctgaggccaaattcccagtaacaagcacaccaaagaaaattgagctggcaaaagatgaatctttcacaagcagtgatgataatgaaaatgtagatttagataaaagacttcaatattatagatatccgtggtcaactgtgcatcaccctgcaaggagaccaatatccatctccagagactggcatggatataagaagaagaaccatactattagtgtaggaaaagacattaattgtgacgtgatgattcacagagacgacaagaaagaagtgagggccccttctccatactggataatggtgaagcaagacaatgaaagctcttcctcctctacctcctctacctcagatgcattttggctggaagattgtgcccaagttgaagagggtaaagcccaactggtatcaaaggttggttagcaaatctgtggtcatatgagcatttatcttgcagacacccaagttttgtgcctcaccaggcacaagtttgctgtacttatcaaggactgtctgtagactcacaaaaaaaaaaaaaaaaaaaaaaaaaaaaaaaaa

SEQ ID NO: 405303 - DNA, 1000 bp, Homo Sapiens; identical to SEQ ID NO: 293329

SEQ ID NO: 405304 - DNA, 1000 bp, Homo Sapiens; identical to SEQ ID NO: 293330

SEQ ID NO: 405305 - DNA, 1000 bp, Homo Sapiens; identical to SEQ ID NO: 224404

SEQ ID NO: 405306 - DNA, 1000 bp, Homo Sapiens; identical to SEQ ID NO: 118827

SEQ ID NO: 405307 - DNA, 1000 bp, Homo Sapiens; identical to SEQ ID NO: 293333

SEQ ID NO: 405308 - DNA, 1000 bp, Homo Sapiens; identical to SEQ ID NO: 224405

SEQ ID NO: 405309 - DNA, 1000 bp, Homo Sapiens; identical to SEQ ID NO: 293335

SEQ ID NO: 405310 - DNA, 1000 bp, Homo Sapiens; identical to SEQ ID NO: 118828

SEQ ID NO: 405311 - DNA, 1000 bp, Homo Sapiens; identical to SEQ ID NO: 293336

SEQ ID NO: 405312 - DNA, 1000 bp, Homo Sapiens; identical to SEQ ID NO: 293337

SEQ ID NO: 405313 - DNA, 1000 bp, Homo Sapiens; identical to SEQ ID NO: 224406

SEQ ID NO: 405314 - DNA, 1000 bp, Homo Sapiens; identical to SEQ ID NO: 293339

SEQ ID NO: 405315 - DNA, 1000 bp, Homo Sapiens; identical to SEQ ID NO: 224407

SEQ ID NO: 405316 - DNA, 1000 bp, Homo Sapiens; identical to SEQ ID NO: 224408

SEQ ID NO: 405317 - DNA, 1000 bp, Homo Sapiens; identical to SEQ ID NO: 293344

SEQ ID NO: 405318 - DNA, 1000 bp, Homo Sapiens; identical to SEQ ID NO: 224409

SEQ ID NO: 405319 - DNA, 1000 bp, Homo Sapiens; identical to SEQ ID NO: 293345

SEQ ID NO: 405320 - DNA, 1000 bp, Homo Sapiens; identical to SEQ ID NO: 224410

SEQ ID NO: 405321 - DNA, 1000 bp, Homo Sapiens; identical to SEQ ID NO: 118830

SEQ ID NO: 405322 - DNA, 791 bp, Homo Sapiens
actctaagtcctccctcccccttctccttcacccccaagtgtctcccacgactgccctccccgacctctagctgaccatggcatcagaggcagaaaaaacattccatcggtttgctgcgtttggagaatcatcaagcagtggcactgaaatgaacaacaagaacttctccaagctgtgcaaagactgtggcatcatggatggcaagacagtcacctccacggacgtggacatcgtgttcagcaaagtcaaggccaagaacgcccgaaccatcacgtttcaacagttcaaagaggcagtgaaggaactgggccagaagcgcttcaaagggaagagtccagatgaagtcctggagaacatttatggactcatggagggcaaagacccagccaccactggcgctactaaagcaacaacagtgggtgcagtggaccgtttgacagacaccagcaagtacaccggcacccacaaggagctctttgatgagagtggcaagggcaagggcattgcgggacgggaagagatgactgacaacacaggctatgtgagtggttacaagggttctggcacctacgataagaagaccaagtagagaggagcttcatctcagcctgctagccccctgaccctgcatgtttaacaccagggagcttggaaaacaataaacatctgtgtgtgcagcaaaaaaaaaaaaaaaaaaaaaaaaaaaaaaaaaaaaaaaaaaaaaaaaaaaaaaaaaaaaaaaaaaaaaaaaaaaaaaaaaaaaaaaaaaaaaaaaaaaaaaaaaaaaaaa

SEQ ID NO: 405323 - DNA, 820 bp, Homo Sapiens
gccctggcaaggttgtgggggacatcttgagctgaagcagggttttgagccactgctgctgctgccattgtcaccatggtctcagctctgcggggagcacccctgatcagggtgcactcaagccctgtttcttctccttctgtgagtggaccacggaggctggtgagctgcctgtcatcccaaagctcagctctgagccagagtggtggtggctccacctctgccgccggcatagaagccaggagcagggctctcagaaggcggtggtgcccagctgggatcatgttgttggccctggtctgtctgctcagctgcctgctaccctccagtgaggccaagctctacggtcgttgtgaactggccagagtgctacatgacttcgggctggacggataccggggatacagcctggctgactgggtctgccttgcttatttcacaagcggtttcaacgcagctgctttggactacgaggctgatgggagcaccaacaacgggatcttccagatcaacagccggaggtggtgcagcaacctcaccccgaacgtccccaacgtgtgccggatgtactgctcagatttgttgaatcctaatctcaaggataccgttatctgtgccatgaagataacccaagagcctcagggtctgggttactgggaggcctggaggcatcactgccagggaaaagacctcactgaatgggtggatggctgtgacttctaggatggacggaaccatgcacagcaggctgggaaatgtggtttggttcctgacctaggcttgggaagacaagccagcgaataaaggatggttgaacgtt

SEQ ID NO: 405324 - DNA, 1000 bp, Homo Sapiens
gatgacagatgggatagaggaggacttcgatgaagatgggggtcatgagctgtttctacagataaagtgatctgaaataacgcatgatgccgcaaagcagaaaagagaaactgtgacaacccccagaaatgtgaaaggaggtttcttactggacagcagcatctttggttcaatttatataaaaacccaaataaataaaatggacagtattgctcagttttagaaattccatttcttctatgttttaagctgtacaattgtcaggtttttatggtttaaattgtaaatgtgttttcccctttgctaattatgttttttttttcagtcttaaaatgtgaaaggcatttatgaatggtaagggagacactatatacaaatgtatatttgtaaaagctatttttatgattagcatgtttcactgttgatcatatataaagtcaggtgatattgcaattctgtatttaaagcttatttccaacaatgtcatgtaagaaaagatgcatcttatgctagtttttataatttatttataatttatagtttaaagtacttcagatcataatgataaaatacttgaaaaagttatatttctgccctgtataagcaccctttttattaataaagaatgcagatatttcagatgtgatataatagttaaagaactgttggtttgatctgtgattaagttgagcatgctccgctctactgaactaaatgatccaattattacttcagtctggatatgagattccatggacaagtaaggactagattgccaaggaaaagactgtcttgcccttggatccaaaagtttaaattagtgcatacatcatgtcatttcacctcctgttcctaggaactctccattcccaagcattgccagtgttttccagataatcttagctgttgtcttgtgctgtggaaatggaagaaaccatcttcacagactgtaggagaattcaacatataatttcttaataaatactgtttcttttaaagc

SEQ ID NO: 405325 - DNA, 1000 bp, Homo Sapiens; identical to SEQ ID NO: 224412

SEQ ID NO: 405326 - DNA, 577 bp, Homo Sapiens
agcaagtccgcggtaagcgctgacgcatgcgcatagctaaccgcacccggttcagctcgcctttcttggccagaggcgccggttggactcacgggcggggcatgatggtggtgggtacgggcacctcgctggcgctctcctccctcctgtccctgctgctctttgctgggatgcagatgtacagccgtcagctggcctccaccgagtggctcaccatccagggcggcctgcttggttcgggtctcttcgtgttctcgctcactgccttcaataatctggagaatcttgtctttggcaaaggattccaagcaaagatcttccctgagattctcctgtgcctcctgttggctctctttgcatctggcctcatccaccgagtctgtgtcaccacctgcttcatcttctccatggttggtctgtactacatcaacaagatctcctccaccctgtaccaggcagcagctccagtcctcacaccagccaaggtcacaggcaagagcaagaagagaaactgaccctgaatgttcaataaagttgattctttgtaaaaaaaaaaaaaaaaaaaaaaaaaaaaaaa

SEQ ID NO: 405327 - DNA, 876 bp, Homo Sapiens; identical to SEQ ID NO: 31474

SEQ ID NO: 405328 - DNA, 1000 bp, Homo Sapiens; identical to SEQ ID NO: 293350

SEQ ID NO: 405329 - DNA, 1000 bp, Homo Sapiens
agatatcctttgctttaattttccttctaagatgatcaaacttcctggttttattaccatacaaatcttcttttatccacaagccagctttggaatttcagcaaacaccatccttcttcttttccacatcttcacctttgttttcagtcacaggtctaagtccattgacatgataattagtcacctgtctctcatccacatactgctgctcttcactcaggcaatattggtgtccttagacttctttggttcacagaatactcaggatgatcttaggtataaggtcattgtctttttaaacaaggtgatgaggggcctctccatctgcaccccctgcctcctgagtgtgctccaggccatcatcagccccagcatcttctccttggcaaagctcaaacatccttctgcaagtcacatcttaggattcttccttttctcatgggtcctcaacatgttcattggtgtaatcttctgctgtacactgcggctacccccagtgaaacggggccagtcttctgtttgtcatacagcactgttcctttttgcccatgagctacacccacaggagactgtttttcacactaatgactttgagggatgtcacctttatagggttcatggtcctctcaagaggctacatggtgattattttatacagacaataagaggctatctcagtgccttcacacagccagcctgtccccgagtctcaccagtgaaaagagcctcccaggctatcttactgctggtgagttttgtcttcacatactgggtggactttacgttctcattttcaggaggtgtgacatggataaatgattctctgctagtgtggctccaggttattgtggccaatagctatgccgcaattagtcctttgatgctaatttatgctgataaccaaatattcaagactctgcaaatgttatggtttaaatatttgtctcctccaaagctcatgttgaaatttaatcgccaatgtggcagtactaagaagtga

SEQ ID NO: 405330 - DNA, 1000 bp, Homo Sapiens; identical to SEQ ID NO: 118831

SEQ ID NO: 405331 - DNA, 1000 bp, Homo Sapiens
tcaaggaggtgttcaaggctgccgctgtcccagtggagttccaggagcaccacctgagtgaggtgcagaatatggcatctgaggagaagctggagcaggtgctgagttccatgaaggagaacaaagtggccatcattggaaagattcataccccgatggagtataagggggagctagcctcctatgatatgcggctgaggcgtaagttggacttatttgccaacgtagtccatgtgaagtcacttcctgggtatatgactcggcacaacaatctagacctggtgatcattcgagagcagacagaaggggagtacagctctctggaacatgagagtgcaaggggtgtgattgagtgtttgaagattgtcacacgagccaagtctcagcggattgcaaagttcgcctttgactatgccaccaagaaggggcggggcaaggtcactgctgtccacaaggccaacatcatgaaacttggggatgggttgttcctgcagtgctgtgaggaagttgctgaactgtaccccaaaatcaaatttgagacaatgatcatagacaactgctgcatgcagctggtgcagaatccttaccagtttgatgtgcttgtgatgcccaatctctatgggaacattattgacaatctggctgctggcctggttgggggagctggtgtggtccctggtgagagctatagtgcagaatacgcagtctttgagacgggtgcccggcacccatttgcccaggcagtgggcaggaatatagccaatcccacggccatgctgctgtcggcttccaacatgctgcggcatcttaatcttgagtatcactccagcatgatcgcagatgcggtgaagaaggtgatcaaagttggcaaggttcgaacctctgacatgggtggctatgctacttgccatgacttcactgaggctgtcattgctgccttgccccacccataggccctgtccatacccatgtaaggtgttcaataaagaacatgaaccaa

SEQ ID NO: 405332 - DNA, 1000 bp, Homo Sapiens; identical to SEQ ID NO: 118832

SEQ ID NO: 405333 - DNA, 1000 bp, Homo Sapiens
atctctaatatatccacacatttgttgccagatttcagaaaactgagctgcaatcgctttcctaaaacagtagtgtattaaatgaacatctataaaatgtatcaacacacattttaaaaaatttgtttaaagtatactcttaggccaggcgtggtgactcacacctgtaattccagcacttcaggaggccaaggtgggaagatcatttgagttcaggagttcgagttacagcctgggcaataaagtgagaccctgtcactaacaaaattaaaaaataaaataaatataaaatataggctttaaaaaagcatagtcttattaaccatgtctgttggtcaaaatctgcaaactctaaaagaagaaaagaagaaaaaaccaagcttagggtatttttcctcccgtgcctgagtcccaattacattcacgacagtactttcaatgaacataattgttaggaccactgaggaatcatgaaaaatgatctctgcttagtacatttgatgcaaaatgacttattaggggctgtttttctagctatagtgtctcgagtactaatatgcaattatgaaaattatattaaatctgggattatgacggtatcactgtatcatcttggtcttgttctggctgtcaccaagcatgacccaggtcaactttttttttcccctgaattacccatcaaattgatctgcagctgactaaaggccacagctgagcctggaactgacccttccttcatcctcaacctgctgtcctccagaaagcaccaaggaaaaagcagagaatgacagcaaacagatcactaggcctctgaccacaggtgctgagtactcagcagccctcatataataggtttgaaagtactccttaaaataaaacactgtttccctttggaactatttacaaggatgaaacaaccgtatacctgagaaataacttgctctggtgtcaattcgctattcgccagcagacatcagaacacaccgagtttccagatgct

SEQ ID NO: 405334 - DNA, 1000 bp, Homo Sapiens; identical to SEQ ID NO: 223982

SEQ ID NO: 405335 - DNA, 1000 bp, Homo Sapiens; identical to SEQ ID NO: 118833

SEQ ID NO: 405336 - DNA, 1000 bp, Homo Sapiens; identical to SEQ ID NO: 293356

SEQ ID NO: 405337 - DNA, 1000 bp, Homo Sapiens; identical to SEQ ID NO: 293357

SEQ ID NO: 405338 - DNA, 1000 bp, Homo Sapiens
aggcaatgggaacctccctggcccggcccggtgcttgtcctccccctcccacctcttcctcctcctagctccccaagctccctgcctattcccccacctccgaggggctgcagcttgggagcctcctcagcatgacagcttgggtctcctccccaaaagagcctgtcaggcctcaagaaccacctccaggtggggagggcagtaacgaaaaccatcgcaggaaatggcaccctcccttttcggtgatgttgaaatcatgttactaatgaaaactgtcctagggaagtggttctgtctcctcacaggcttcacccacggcgatgaggcccttgaatgtggtcactttgtgctgtatggttgagggaccctcacaccaaagggaccttcccatgtgagatgtgctcccgcccccacctgcccacaagcaaacacaccacacatgttcggcatgttgccctttgaacacccatgaggacgcctccaacctgctcttggttctaatagggagtactgactgtcagcagtggataaaggagaggggaccctctggtccctagcatggcacccagagcctcccctcttcttgtccttcagccaaagagaaactttctctgactttgaactgaatttaggtctctggccaatgatgggcctgaaaattccataatggccagagaggagagttcgagcccggctaagatcccctgagtcattctgtgagggaccaagacccacagtccaccagccccagggccctacctcctggaatgctttcctggatccagcttcccgaagatccgaccagacccagggaggacggcaccgctccgcgggagggaaagccaaagcatggtgcttcaccagctggactcaggggcgaggggacatgggcgcttgtcaacgtgatgtcattcttttcccaccgtttcttcctgttgatattcaatgaatccgtcaatctctctggaaaaaaaaaaaaaaaaaaaaaaaaaaaaaaaaa

SEQ ID NO: 405339 - DNA, 841 bp, Homo Sapiens
cggctcgcgtgtagcggcggcggcggcgtctccgtgaggaggcgcgcggggccatgacgtcagcgtccacaaaggtcggagagatcttctcggcggccggcgccgccttcacgaagctcggggagctgacgatgcagctgcatcccgtggccgactcttctcctgcgggcgcgaagtggacggagacggaaatagagatgctgagggctgctgtgaagcgatttggggacgatcttaatcacatcagctgtgtcatcaaggaacggacagtggcccagataaaggccactgtgaaacgcaaggtatatgaagattctggcatcccccttccagctgagtcacccaagaaagggcccaagaaggtggcatctggtgtcttgtcacctcctccagctgcccctcctcccagcagctccagtgtccctgaggccgggggtccccccataaagaaacagaaggctgatgtgacactcagtgctctgaacgactccgatgccaacagtgacgtggtggatattgaagggctaggagaaactcctccagctaagaaactcaacttcgaccaggcctgaccctggattctggccttctcatgacctctgctgatcctcctctcctctcctgctgagccttccacctctgacctctcactgttcatgccggacctgtggatctcctgggactccgagcaaggcctgcacgagagagggctgaaaggctgctggggctgccacctcgctattcccgcataagcatctgcccccaacccctttgaccttcatctgatggacatttttatacagaaaacaataaagatttccctctcaaaaaaaaaaaaaaa

SEQ ID NO: 405340 - DNA, 720 bp, Homo Sapiens
aggtcgccctgccccctacccaccatgccagatccagcatcgttgtgggcaaacaattatctggatgatctttatggggcttaagcttgggtgggagcagatggggcatgagctggggatttggggatggggggaatccacacccccacgtcctggacgtttaaaaggccctctctggcactgggccggggcagaggccagcagaaaagtgactggagtccagggacatgatggatcaggaggagaagacggaggaaggctcaggcccctgtgccgaggcgggctccccagaccaggagggcttcttcaatctgctgagccacgtgcagggcgaccggatggagggacagcgctgttcactgcaagccgggccgggccagaccaccaagagccagagcgaccccacccccgagatggacagcctcatggacatgctggccagtacccagggccgccgcatggatgaccaacgtgtgacagtcagcagcctgcccggcttccagcccgtggggtccaaggacggagcacagaaacgagctgggaccctcagtccccaacccctgctcacccctcaggacccgaccgctctcggcttccgtcggaacagcagcccccagcccccgacacaagccccctgagggcctgaggcatcctgggtctcactcggcccccaaaaactgataaaagaataaaacacttaaatgaaaaaaaaaaaaaaaa

SEQ ID NO: 405341 - DNA, 946 bp, Homo Sapiens; identical to SEQ ID NO: 26221

SEQ ID NO: 405342 - DNA, 1000 bp, Homo Sapiens; identical to SEQ ID NO: 224413

SEQ ID NO: 405343 - DNA, 924 bp, Homo Sapiens
agcggggcgtcccaagatggcgtcgtggctgccggagactctctttgaaactgtaggacaaggcccgccgcctagcaaagactattaccagttactggtcacccggtctcaggtaatctttagatggtggaagatctctctaaggagtgagtatcgatcaacaaaacctggagaagcaaaagaaacccatgaagacttcctagagaattcacatcttcaaggtcaaactgccttaatatttggtgcaagaatattagactatgtcatcaatttttgcaaaggtaaatttgacttccttgaacggctctcagacgatttgctcctgactatcatttcttatctggatcttgaagatattgccaggctttgtcaaacatcacacagatttgcaaagctgtgcatgtctgataaactgtgggaacagatagtccagtcgacctgcgacaccatcactcctgacgtgagggccctggcggaggacacaggctggagacagctgttcttcaccaacaagctccagctccagcggcagctccgcaagaggaaacaaaaatatggaaacctgagagaaaagcaaccttaggcacacattttcctaccagcagggagctcaggcatggctgtgtttctcttcagtgtccaaatctcttctgtctccttttcttaagaactaagaggttttgttgatgcgtggagccatttgaaactcgtaggggatttgcacacaaatgcagcagagtctggctccccagtgccttgctagagtcaccgtcattctgaggtcaaatcatggcccgaggacaagggctgtaagacagggagccccataggccatcatcatccttatcccacacccattataaaagaggtttctattgtatataaacaaacaataaatgattattagcaaaaaaaaaaaaaaaa

SEQ ID NO: 405344 - DNA, 1000 bp, Homo Sapiens; identical to SEQ ID NO: 293359

SEQ ID NO: 405345 - DNA, 1000 bp, Homo Sapiens
aatgggtcactatctggtgaaaaaatatggtatttcatgatctaagactaccagtctttttctgtttttgctccatcttgaccataacatattcatcaaaccattttcttcaagcaaagtacatgactgttggacctgctataataatatttcactaaaatctggcattaaaaattttaagtatttggagctccatgtactgattacagtttttaaatttgaaataaatgaccagcatcctttgaatattaaaagctgtttccttttgacatttaatttactctctttaaaatgtgagttgtaaagtgatggtttgtcagtgaactagactttttgttttagagtgtgaggacttggaagagtataatgaaagccctctttttggtgaagagagtcaacttaaaaaataaattgccatgttccaaaataatattgtggtaattgtaagtagtgcatattttatcttaaaaactcaggattgatgtaagcactggaatattttatttgtagaaatgtgtatcgcaattacttaaatttatttttttgaaacagctgcagcaagagttggcacttattcagatgtatcttcaacctctgttattctggtgactgacaaaagaacttgaacctatgttatatgatacatgcataacttgagctacactaaaccacatgacagtgtttagttaattcttgtataaattagtatatctcttctattattagtctgtttgttaaatgccagaccacgtttctatgatctgttgaatgaaccctagacagttctgtgagaaagcagaattgcacagttacatacacagtcaattaaattttaacattaaagataatttagttttaaaaaaaaaaaaaaaaaaaaaaaaaaaaaaaaaaaaaaaaaaaaaaaaaaaaaaaaaaaaaaaaaaaaaaaaaaaaaaaaaaaaaaaaaaaaaaaaaaaaaaaaaaaaaaaaaacaaaaaaaaaaaaaaaaaaaaaaaaaaaa

SEQ ID NO: 405346 - DNA, 1000 bp, Homo Sapiens; identical to SEQ ID NO: 293360

SEQ ID NO: 405347 - DNA, 1000 bp, Homo Sapiens; identical to SEQ ID NO: 224414

SEQ ID NO: 405348 - DNA, 1000 bp, Homo Sapiens; identical to SEQ ID NO: 118834

SEQ ID NO: 405349 - DNA, 1000 bp, Homo Sapiens
gctcgccttttgcaagaaaaggagttacaggaagagaaaaagagaaagaaacactttccagagttccctgcaacccgtgcttatgcagatagttactattatgaagatggaggaatgaagccaagagtgatgaaagaagctgtatctactccatcacgaatggcccacagggatcaggaatggtatgatgctgaaattgccagaaaactgcaagaagaagaacttttggctacccaggtggacatgagagccgctcaagtagctcaagatgaagaaatcgctcgacttctaatggctgaagaaaagaaagcttacaaaaaagccaaggagcgggagaaatcatctttggacaaaagaaagcaagaccccgagtggaagccaaaaacagctaaagcagcaaattccaagtcaaaagagagtgatgaacctcaccattctaagaatgaaaggccagcacggccaccaccacctatcatgacagatggtgaagatgcggattacactcattttacaaaccagcagagttccacacggcatttctcaaaatcagagtcctctcataaaggttttcattacaaacattaaaaacctaggaatctgccttgaaaatggactcactatagcaaatattactgggtgatacagaatgaattctacacttactttttttctcctgtgtttgcattcctgggatttatcctcaagtgcatttctgaccataagtaattttaattcatttcaaatgttttggttattcatgatcacttgggcagtataagaaaatgtagcttctgaatattggccacctctatgctgcatatacttcttgggatatagtatctaagacctttgtaaactgccattttgttaggtatggagtttggtatctagggagtaggccttatttagcaattcaaattttatggagatgaatgatcaaagtgaaacaatgtttggatgcaacgcagaataaaagaatataagaaatagctttttgttg

SEQ ID NO: 405350 - DNA, 747 bp, Homo Sapiens
acttccgccctcgcgggactggctagggcgtttgaccgccggcggtgaaggggaggcggtgggcgtcttggagaacagagcgagatggagaagcgaggccgaggcgtgaagtcgagccccatccagaccccgaaccagacccctcagcaggctccggtgacgcctaggaaagaaaggaggcctagcatgttcgagaaggaggcatatacacagattttaagagaaagactgagagagtcaattcacaatgttcagtatgtggagcctccttttgatgactcaattgctgatataggtaaagaatggaagagtgccctggcaaaattaaagtttgctaattcatatagaatggagccattgaagaaattccaagctcattcagtagaaactaaagtccagcagatactaacagaaagtcttaaagatgtcaaatatgatgataaagtattctctcacttgtcacttgaattggcagaccgcatactgttagcagtcaaagaatttgggtaccaccgttataagttcattataaaagtattatttattcaaaagactggccaagcaataaatattgccagcagatggatctgggacattgcatgggacagctgggtcgcagctaaacacgaagcagaatcctacgtggcactggtcttggtgtttgccctttattatgaatagctcattacaggtactaaggattgtttacttccgaacttttcaaaaataaatgaaatttacatattt

SEQ ID NO: 405351 - DNA, 1000 bp, Homo Sapiens; identical to SEQ ID NO: 293361

SEQ ID NO: 405352 - DNA, 1000 bp, Homo Sapiens; identical to SEQ ID NO: 118835

SEQ ID NO: 405353 - DNA, 1000 bp, Homo Sapiens; identical to SEQ ID NO: 293364

SEQ ID NO: 405354 - DNA, 1000 bp, Homo Sapiens; identical to SEQ ID NO: 293365

SEQ ID NO: 405355 - DNA, 1000 bp, Homo Sapiens; identical to SEQ ID NO: 293366

SEQ ID NO: 405356 - DNA, 1000 bp, Homo Sapiens
aggcccgcccagccgacgaaaacgccgcggctgcgatggcggcggacgtggtgggggacgtgtacgtgctggtggagcaccccttcgagtacaccggcaaggacgggcgccgcgtggccatccggccgaatgagcgctaccggctgctgcggcgcaacaccgagcactggtggcacgtgcggcgtgagcccggcggccgccccttctacctgcctgcgcagtacgtgcgcgagctgcccgcgctgggcaaccctgccgccgccgcgccgccaggtccccacccgagccccgcggcccctgagccgctcgcctacgactaccggtttgtgagcgcggcggcgaccgcgggccccgacggcgcccccgaggagtccggaggccgagccagctccctgtgcggccctgcgcaacgcggcgccgcgacccagcgcagcagcctggcgcccggcctgccagcctgcctgtacctgcggcccgcggcgcccgtgcggcccgcgcagtccctgaacgacctggcctgcgccgccgtctcgcctcccgccggcctcctaggaagcagcggcagcttcaaggcctgcagcgtggcgggctcctgggtgtgcccgcggcctctggcgcgcagcgactcagagaacgtctacgaggtcatccaggacttgcacgtcccgccgccggaggagagcgcagagcaggtacctccccgggcgctggggcgcggaggcgggtggcgcgctagggaccgcgcccgcacggagccggggcgcaaggagacccgctccgctcagcgtcgggcacgacgcccacctctgtccgaagacttcggatgagctccctctccccaaccgcgaaacgtgaggggtgcacgcccgcagtccctcatcagcaattcccaagctccaaagctccctggaagcccagaggcttttcgtaatccaattggtggcaaaattgcgcttgaactgaaaaaaaaaaaaaaaaaaaaaaaaaaaaaaaaaaaaaa

SEQ ID NO: 405357 - DNA, 1000 bp, Homo Sapiens
ctgcgccgagcatccacgggcaagagccggaaggagaaaggcagcaaccgactgtccatgggcagcagggagtcagtggaggggtccggcaggtcagggggctccccgttcctgcctttttcctggttcacggacagcggcaagggctcagcatcctcgggtagcaccacctcccccacctgctcccctaaacacgagggcttcagccctaagaagtcagcttcccaggcccagctcctggctcatgcacaggaggcactgagcaactcctggtgcctagtccaggacttcggctccacccagatagggatggaatccactctgagtgatgactccacgccccccagcagcagccccaagatccccagtgggccctggcaggaggccaaatgttcttacccctaccacacgctgtctcagtcttcagatgagttcctggatgaacccctcccccctgtccaccactggaccagccagcaggtgggccagtggctgcagagcctcaacctggaacagtatgctgctgagtttgctgcacggcaggtagacgggccgcagctgctgcagctggacggaagcaaactaaagagcctggggctcagcaactctcatgaccgggcactggtgaagcgcaagttgaaggagatggcagcagctgccgagaaggagcgcaaggcccaggagaaggctgcgcggcagcgggagaagctccggcgccgagagcaggaggccaagaagagctaggggagggtgcacaggcgctggcacccggcaggggcagccactggctccgcgggcacaggcctcaccagggaggctggacctgggcgctgcacttgggctagcctggtcccacgctctcaggggggacatgctctctcttaccctgtcacttggtctagacccagagaccccagaaagggagaccccagggagagggcctagtaataaatcctattttgaggaaaaaaaaaaaaaaaaaaaaaaaaaaaaaaaaaaa

SEQ ID NO: 405358 - DNA, 1000 bp, Homo Sapiens; identical to SEQ ID NO: 293367

SEQ ID NO: 405359 - DNA, 1000 bp, Homo Sapiens
tacttccgggtcacagaggtcgatatcccatccgtccaaatcctaaacttgagctctgacgccaggtacaaaatgccttcagatgacataacctacgaaagcctcaagaaatttggccgcagcttcctgagtaaaaatgccacaaaacatcaatccagtgaagagattccaaaatactgggaccagggactggttaagcagctcgtggggaagaacttcaacgtagtcgtctttgacaaagaaaaggacgtatttgtgatgttctatgcaccctggtctaaaaagtgcaagatgctgttcccactgttggaggaattgggcagaaaatatcaaaaccactccacaattatcattgccaagatcgatgtcacagcaaatgacattcagctgatgtacctggaccggtacccattcttcaggctgttccccagcggctctcaacaagctgtcctgtataagggagaacacaccctgaagggcttctctgacttcctggaaagccacatcaaaactaagattgaggatgaggatgagctgttgtctgttgagcaaaatgaagtgatagaagaggaagtgctagctgaggaaaaggaggtgcctatgatgaggaaagggttacctgaacagcagtcgcctgagctggagaacatgaccaagtacgtatccaagctggaagagcccgctgggaagaagaaaacatctgaggaggtggtggtggtggtggctaagccaaagggacctccagtgcaaaagaagaaaccaaaagtcaaggaagaactttagcttctccaataccaggaaaaaagatgcttattttccagatcctggcatcattttctgaatggattgattccaataaaagcatatatcattgtggtagggtaggtggggcgggggtaggggtggataataaagcctctgagtgtccttggaaaaaaaaaaaaaaaaaaaaaaaaaaaaaaaaaaaaaaaaaaaaaaaaaaaaaaaaaaaaaaaaaaaa

SEQ ID NO: 405360 - DNA, 1000 bp, Homo Sapiens
ctattgcaatcactcagaaaagaggcgatggcagcttggacctgttggaagcagtagagtgcttccagggaggagaaaggacctgaaggttaatttgatcaccaatggccaatgatgtaatcagttatgcctatgtaatgaagcttccgtaaaaaccaaaaggattgggtttgattgagcttctggatagctaaacatgtggaagttccttgaggatggtggtcctaaacaggggttaccagaaaatttaaagttacgccagtcactcccattctattgctgagagaaaatacagagcggtgaagagcttacagtcgggtgagcaagatacgcccccaatgttagctaatgatgtaaggcatcaacaagaaatgtgggggttcaggaaagtggaaggtggggtcgtccaaagcctgggaaagtcttcagttgaaggcgagacagatgggactattagtgagtttcgagagatccaacgcctcgccgccttcgcttcatttttgtctcacgccccacccttgaacgcgcggcgccttttgaccccgccgccgcgccgtagaccgcgctgcacgccggcggcagccatggcggatgtgtcagagaggacactgcagttgtccgtgctagtagccttcgcttctggagtactcctgggctggcaggcgaaccgactgcggaggcgctacttggactggaggaaaaggaggctgcaggacaagctggcggcgacgcagaagaagctggacctggcctgagactctgcgccttccgccccattctgtccccctcatggccaccttgccatgtccgcgccggagccccggtccgccggcgcccagaaccaggcttgccacacagtccccgcctgccatggccggctcttcctggagtgttgcttgttgaagatgcatatagactaccggaaagaaatgacttcttcttgcactttatgaatcaattttatttttaaaataaaaaaattaaacatcaaaaaaaaaaa

SEQ ID NO: 405361 - DNA, 890 bp, Homo Sapiens; identical to SEQ ID NO: 26228

SEQ ID NO: 405362 - DNA, 1000 bp, Homo Sapiens; identical to SEQ ID NO: 118836

SEQ ID NO: 405363 - DNA, 1000 bp, Homo Sapiens; identical to SEQ ID NO: 118837

SEQ ID NO: 405364 - DNA, 1000 bp, Homo Sapiens; identical to SEQ ID NO: 293370

SEQ ID NO: 405365 - DNA, 1000 bp, Homo Sapiens
agctgtgctcgggtgctgccagctgctcccaatgtgccgatgtccgtgggcagaatgacttttattgagctcttgttccgtgccaggcattcaatcctcaggtctccaccaaggaggcaggattcttcccatggataggggagggggcggtaggggctgcagggacaaacatcgttggggggtgagtgtgaaaggtgctgatggccctcatctccagctaactgtggagaagcccctgggggctccctgattaatggaggcttagctttctggatggcatctagccagaggctggagacaggtgcgcccctggtggtcacaggctgtgccttggtttcctgagccacctttactctgctctatgccaggctgtgctagcaacacccaaaggtggcctgcggggagccatcacctaggactgactcggcagtgtgcagtggtgcatgcactgtctcagccaacccgctccactacccggcagggtacacattcgcacccctacttcacagaggaagaaacctggaaccagagggggcgtgcctgccaagctcacacagcaggaactgagccagaaacgcagattgggctggctctgaagccaagcctcttcttacttcacccggctgggctcctcatttttacgggtaacagtgaggctgggaaggggaacacagaccaggaagctcggtgagtgatggcagaacgatgcctgcaggcatggaactttttccgttatcacccaggcctgattcactggcctggcggagatgcttctaaggcatggtcgggggagagggccaacaactgtccctccttgagcaccagccccacccaagcaagcagacatttatcttttgggtctgtcctctctgttgcctttttacagccaacttttctagacctgttttgcttttgtaacttgaagatatttattctgggttttgtagcatttttattaatatggtgactttttaaaataaaaacaaacaaacgttgtcct

SEQ ID NO: 405366 - DNA, 1000 bp, Homo Sapiens
tgctgctagccaaagaagaattcaagaaacttctagagaaatctaaagtgtctcccaggaccacgtttaaggagtttgcagagaaatacggccgggatcagaggttccgacttgttcaaaaaagaaaggaccaggagcattttttcaacaaattcatacttattcttaagaaacgggacaaggaaaacagactaaggctgcggaaaatgagatgagtttgtgaaaaaatgcaataagcccgggggttgaccctgggcgtgccgggggcgagggggtcacggtggagacggacacgggcgtggggcggccgagacctgcacggcccagcgggcaccggcactgcggggtcttcgttctcagaggattactgtttcatattgaagctctctcttttgtacattcagagtttgatgcatttctaatcaccgtgatacgtcgatcccttaattgttttaattatgcaaattacttgtaatatacacaaattatcaatccactgcaggactgtggggaagcaggaacgggagcctctgtaacaatctcaaggcatttgtgtcatcacctaagacgattggcgaaaacttttctgaaaacctttgtgaattacttcgttcctccaggattcccgcagtgttgaggaattccttactctgtccctaggtctcagtctcgtttctgagtagcagcaatagggttttcatcattcatcatagtgacaactgtgagcattccacacctggaccgtggatcacttacaggtttccaagggtggccgcgcgttcctcccagaggggcgtcccggcctggagcagggagccgtgttggttgccaccggtcctacttcaaaagaattattttgtacaaaatcatcatattaatatttgagttatttttattgtatgcccggagtttgcatgagattttttctcatcacctttgtataaaaaatttttaattttttttaatcaataaatattttaaaccaaaaaaaaaaaaaaaa

SEQ ID NO: 405367 - DNA, 767 bp, Homo Sapiens
aagggcccaccgggctcccggggctgccaggccccaaattgaggaagttgactgccagatcacactctgttggcccacgcagatagattccattcatcctttctaatgtctacaccatattttggataacatgccatcatctcacattgtgttgaaagaagaaaccagaatgttggggttgatgtatgccatatggatgaatttaaacagtttcggccttgcaataattggtatacttctaattgcatgtgaaattatactctttttaacgaaagatgaaactattcagtggccacatgtacccagtaacagagggagcaaagcaaatcttatcctcaaagaactgcagctgcttgttagatctacctggtggttccatagagaaactgctcagagaacctgcctttacctcgcctaaaacagaactatcccggagctcagttcatcaactcaggatccagtagtgtaatacagaagcctgttacgagatataaggcacttcgccctcggaaatctcactgtcggaatccttggaaatcacaccacgcacaacttctatttcttcataatttgcaaagaaccagtgtgactccagtcaagaacaaaagattaattgtgaattagcgaagaactctaattttttcaagcagccacatggaaaacgcattctaatgaaatcctttccattgctcttttttcttagttcttcaataaagcatgcgatttgatcacaaaaaaaaaaaaaaaaaaagaaaaaaaaaaaaaaa

SEQ ID NO: 405368 - DNA, 1000 bp, Homo Sapiens
ctgtggggagaatggagttgtcagcctcgcccctttatctaagacaggctctggtttcatgtgggtggatgacattcagtgtcctaaaacgcatatctccatatggcagtgcctgtctgccccatgggagcgaagaatctccagcccagcagaagagacctggatcacatgtgaagatagaataagagtgcgtggaggagacaccgagtgctctgggagagtggagatctggcacgcaggctcctggggcacagtgtgtgatgactcctgggacctggccgaggcggaagtggtgtgtcagcagctgggctgtggctctgctctggctgccctgagggacgcttcgtttggccagggaactggaaccatctggttggatgacatgcggtgcaaaggaaatgagtcatttctatgggactgtcacgccaaaccctggggacagagtgactgtggacacaaggaagatgctggcgtgaggtgctctggacagtcgctgaaatcactgaatgcctcctcaggtcatttagcacttattttatccagtatctttgggctccttctcctggttctgtttattctatttctcacgtggtgccgagttcagaaacaaaaacatctgcccctcagagtttcaaccagaaggaggggttctctcgaggagaatttattccatgagatggagacctgcctcaagagagaggacccacatgggacaagaacctcagatgacacccccaaccatggttgtgaagatgctagcgacacatcgctgttgggagttcttcctgcctctgaagccacaaaatgactttagacttccagggctcaccagatcaacctctaaatatctttgaaggagacaacaacttttaaatgaataaagaggaagtcaagttgccctatggaaaacttgtccaaataacatttcttgaacaataggagaacagctaaattgataaagactggtgataataaaaattgaattatgtatatcactgtt

SEQ ID NO: 405369 - DNA, 1000 bp, Homo Sapiens; identical to SEQ ID NO: 224421

SEQ ID NO: 405370 - DNA, 891 bp, Homo Sapiens; identical to SEQ ID NO: 293372

SEQ ID NO: 405371 - DNA, 1000 bp, Homo Sapiens
catggctcctatgggtcggtatatgaggctttctacacaaagcagaaggttatggtggcagtcaagatcatctcaaagaagaaggcctctgatgactatcttaacaagttcctgccccgtgaaatacaggtaatgaaagtcttgcggcacaagtacctcatcaacttctatcgggccattgagagcacatctcgagtatacatcattctggaactggctcagggtggtgatgtccttgaatggatccagcgctacggggcctgctctgagccccttgctggcaagtggttctcccagctgaccctgggcattgcctacctgcacagcaagagcatcgtgcaccgggacttaaagttggagaacctgttgctggacaagtgggagaatgtgaagatatcagactttggctttgccaagatggtgccttctaaccagcctgtgggttgtagcccttcttaccgccaagtgaactgcttttcccacctcagccagacttactgtggcagctttgcttacgcttgcccagagatcttacgaggcttgccctacaaccctttcctgtctgacacctggagcatgggcgtcatcctttacactctagtggtcgcccatctgccctttgatgacaccaatctcaaaaagctgctaagagagactcagaaggaggtcactttcccagctaaccataccatctcccaggagtgcaagaacctgatcctccagatgctacgccaagccactaagcgtgccaccattctggacatcatcaaggattcctgggtgctcaagttccagcctgagcaacccacccatgagatcaggctgcttgaggccatgtgccagctccacaacaccactaaacagcaccaatccttgcaaattacgacctgaaaatggctgagggagggggctaagagaggagcaaagcaggaggtcttgggctaaaaatcttttttaccaaaaataaatctaagtctgatttagtttcatcaaaaaaaaa

SEQ ID NO: 405372 - DNA, 696 bp, Homo Sapiens
acctgcatctgccaacaagactggaagcaggtgaggcacacagagggggaggcccgcagctgcgtgggaggaggggtggtctgagggacgtgggatgccgggaatgaggctggtttgcaggttggcgcatggacattttcccagaaagggacagagacggcgaagtttgacggtctggaaagcagagaccagcagggctgactgcttgggagcaccaaatatccggacagcgcctctcgggaggtccgagaagagaaccgcgatctgtttcagcaccggggctcaggacagttcccagcgggctccgtttcgtctccagaaccctggacagctcctccagcttggaatgcactccctccacctccacccagagctccccacaactgaccctgccttcttctgcaagctccatttcatcaagggaaacgatccttattgcctcaccatttcccacgtgaagtctgtattgacattctcatagacctgggatattgtgtctgcagcacatagtccaattattttcatgttatctactgacaggtctatttgtctccctgttacactgtgagctccgtgagggcagaaacaatgttagtattttcactgctgtgtccccagcgcctggtccggggcccggcacacagcaggcatataataagcatgtgttgaatcaataaaggcatcaaagaataaacc

SEQ ID NO: 405373 - DNA, 1000 bp, Homo Sapiens
tatggcaataacttaattgcatatggtatataaagaaccagttccagtagggagatttctttaagtggactgttttctttcttctcaaaattttctttccttttattttttagtaatcaagaaaggctggaaaactactgaaaaactgatcaagcttgacttgtgcatttatgtttgttttaagacactgcattaaagaaagatttgaaaagtatacacaaaaatcagatttagtaactaaaggttgtacaaaattgtaaaactggttgtacaatcatgatgttagtaatagtaatttttttcttaaattaatttacccttaagagtatgttagatttgattatctgataatgattatttaaatattcctatctgcttataaaatggctgctataataataataatgcagatgatgttatataaggtgtatcagacctacaggctgctggcaggatttgtcagataatcaagccacactaactatagaaaatgagcagcattttaaatgctttctagtgaaaaattataatctacttaaactctaatcagaaaaaaagaatattctcaaaaaaatctattacgaaagtcaataaaatagataatttaacaaaagtacaggattagaacatgcttatacctattaacaagaacaaaatttctaatgctgctcaagtggaaagggtattgctaaaaggatgtttccaaaaatcttgtatataagatagcaacagtgattgatgataatactgtacttcatcttacttgccacaaaataacattttataatttctcaaagtaaaattgagaaatctttaagtttttttcaagtaacataatctatctttgtataattcgtatttgggaatatggcttttaataatgttcttcccacaaataatcatgcttttttcctatggttacagcattaaactatattttaagttgtttttgaaaaaaaaaaaaaaaaaaaaaaaaaaaaaaaaaaaaaaaaaaaaaaaa

SEQ ID NO: 405374 - DNA, 1000 bp, Homo Sapiens
atgataaaaatagataaagcagcttacaggaaaaccaagaacacaattgaacgtgctttgaaaaaaaaacaactaaaaaggcagaaacgtgattatagacatactcggaagttgctgaatgtccttaaagaatacatcgcagagaagcagaaagatgatgaagcagaagaagcagaagccgcagcagcagcagcagaagccgcagcagcagcagaagccgcagcagcagcagcagaagtaatagtagtagaagacgaagaggaggaagagaaggaggaggaggaggagaaagaagaggaggaagaagaaggagaagaagaaggaggaggagaagaaggagaagaaggaggaggaggaggagaaggagaagaaacagaagaagaggaagaggaagaagaagaagaggaagaggaagaacaaattaaagcatttcaagaaaaacagaagaggtggcaacaacctacaggtgttaggagctggaggctgagagagatgaagccgctacttgagcaattactaaaggctgccaaggacactaaagacaattattgcatcatttcttccagtgaagaaagtgaacttgataactagccgtgtttttaaaaagaatcgtgtcagaactcttttggaagagttggcacttcattgtctcttcaacctctgttattataatgactgaagaaagaacttgaacctatgttatatgatacgagcacaacttgagctacagtaaactacatgacagtgttttgataattgttgtataaatcggtatagctcctctgtcacttgtctgttaaatgccagacctcgtttctatgatctgttgaatgaatcctagacacttctgtgagaaggcagggattgcacagttatgtacatggtcaattaaattttaacattaaagataatttagatttcagttcacctctgtggatctgtatcagtttcaaaaacgtagaaagcacgggcatagaaaagtacatttttctctaataaa

SEQ ID NO: 405375 - DNA, 1000 bp, Homo Sapiens; identical to SEQ ID NO: 116358

SEQ ID NO: 405376 - DNA, 1000 bp, Homo Sapiens
atgaggccatgactaaactaggtttcaatgtcaccctcccacctttcatgtgtaataaacaggccacagacttccaggggaattattttgataatgaccgtaaccgcaggattcaggttgaacgtcctcagatgacttttggcaggctccagagaatcatcccgaagatcatgcccaagaagccagcagaggaaggaaatgattcgaagggagtgtcagaagcatctggcccacagaacgatgggaaacagctgcgccgccccgggaaaagcaaatacttctgagaagattaataagagatctggacccaaaagggggagacatgcctggacccacagactgcgtgagagaaaccagctggtgatttatgaagagatcagagaccctgaggaagatgatgagtaactcccctgggggatatgacacatgcccatgatgagaagcagaacatggtgacctttcacgaacatgggcatggctgcggaccctcgtcatcaggtgcatagcaagtgaaagcaagtgttcacaacagtgaaaagttgagcgtcatttttcttagtgtgccaagagttcgatgttagtgtttccattgtattttcttacactgtgccattctgttagatactatccttttcaatgatgagcaagacatacttaatgcatatttcggtttgtgtatccatgcacctacgtcagaaaacaagtattgtcatgtattctctgcatagaacagcactatcctcatctctccccagatgtgactactgagggcagtcctgagtgtttaatttcagacttcttcctctgcatttacacaccacacaacacacacacacacacacacacaccaagtaccattataagcatctcccatctgcttttcccattgccgtgcatcctggtcaagcccccctcactctgtttcctgttcagcatgtactcccctcatccgattcccctctatcagtcactgacagttaacaaacctttgcaaacattc

SEQ ID NO: 405377 - DNA, 1000 bp, Homo Sapiens
ggagcagtgtcattgtcagtggcagggcatggggggcagtggtgagctaaggctgaggagtggagatgaccagaatataagggtgcaattcccagaccatccctgcgcatctgactgactccggtggaggcactgctgtgtgttttctgaaacctagaggaccagacccctcctgactgggtcccaaagccaatatgacatccatgcaggcagcagtgctgaatccatgccctgcaatgtccaacccccaactgcagtgacccgctgatagctgcgcaacagcctgggttcttgagcagagattgggaggactttactgtggttctgccttcacaccccctagagagctaatgtagtattggctccacctgctcacatttctccctcccatactcattccttcactcatccatcctacgtatatttattgagtgccaactacgttcccagcctcttccaggcactggcaatgcagtgatgaacaggatgacaagattcatgccatcaggggcaccttgtcactgccgtctgtgcactgattcacactccctgcaaaatggtcactctgccatcttggtggttggtggggcaggtcatttggaaataaagaatgtgatagagatggctgaagaggggaagcctaggctgcctcaatggaggagtcgctgggggcattttcacccacaattctggccatacttaagcaatgggagggagagggaggaggggaagatctgggcaattttggccttgactctttcctggctccagagctcaagcttagaagccagccctgctatttccagcctcctgaaggctcagcacggtgaggcctgacatcctggggaagggcaacagggagacctacaggatgttggctgctcgcagactggtcaatgggggatgacggtggggaggttgccagatgtgagacttgagtagcatttgtacacatggccctgtattgtccttgaagaacatcaataaaatatatggtttt

SEQ ID NO: 405378 - DNA, 1000 bp, Homo Sapiens; identical to SEQ ID NO: 293376

SEQ ID NO: 405379 - DNA, 1000 bp, Homo Sapiens; identical to SEQ ID NO: 293377

SEQ ID NO: 405380 - DNA, 1000 bp, Homo Sapiens
ctcttatatggtgctgatattgaatcaaaaaacaagtgtggcctcacaccacttttgcttggcgtacatgaacaaaaacagcaagtggtgaaatttttaatcaagaaaaaagctaatttaaatgtacttgatagatatggaagaactgccctcatacttgctgtatgttgtggatcagcaagtatagtcaatcttctacttgagcaaaatgttgatgtatcttctcaagatctatctggacagacggccagagagtatgctgtttctagtcatcatcatgtaatttgtgaattactttctgactataaagaaaaacagatgctaaaaatctcttctgaaaacagcaatccagaacaagacttaaagctgacatcagaggaagagtcacaaaggcttaaagtcagtgaaaatagccagccagagaaaatgtctcaagaaccagaaataaataaggactgtgatagagaggttgaagaagaaataaagaagcatggaagtaatcctgtgggattaccagaaaacctgactaatggtgccagtgctggcaatggtgatgatggattaattccacaaaggaggagcagaaaacctgaaaatcagcaatttcctgacactgagaatgaagagtatcacagtgacgaacaaaatgatacccggaaacaactttctgaagaacagaacactggaatatcacaagatgagattctgactaataaacaaaagcagatagaagtggctgaacagaaaatgaattctgagctttctcttagtcataagaaagaagaagatctcttgcgtgaaaacagcgtgttgcaggaagaaattgccgtgctaagactggaactagatgaaacaaaacatcagaaccagctaagggaaaataaaattttggaggaaattgaaagtgtgaaagaaaagactgataaacttctaagggctatgcaattgaatgaagaagcattaacgaaaaccaatatttaagtacagtggacagcttagg

SEQ ID NO: 405381 - DNA, 1000 bp, Homo Sapiens; identical to SEQ ID NO: 224422

SEQ ID NO: 405382 - DNA, 1000 bp, Homo Sapiens; identical to SEQ ID NO: 293379

SEQ ID NO: 405383 - DNA, 1000 bp, Homo Sapiens; identical to SEQ ID NO: 224423

SEQ ID NO: 405384 - DNA, 1000 bp, Homo Sapiens
tcctcgctgcctttggctggcaggaggctttggaggcacaagccattataaccttcttggccctaaggaagctgtgatcatccctagaaagagggaaggagcaggagacgacaggggaggggctggtttgttctgtgcttaggccaagttagctactgtctgagaggttttacatcccctgccagcatggtggggtgacacgagacctgtaagcaggtggtgagaagttagacagcctttacttgctccatcagaaacaactttgcaggatgacgccaatatttaggacaccacgtgtacatctgtagaccaccagctgcacccatctccacaaagccaagtgaaggtgtattggggattctctgccagcctgtgtcacccacccacctccttcattatcagcaatagctaccatcatttgtcaagcacctactagatgccagacaccctacacatattgcctcctattctcatccattcctgcaaagaagatgcaatgagcatccttggaacagactgggagcctgatcccaagaggctgctgaactggccccagtcacccacctatgtgccagagtcaggcctggccgacacaaggatctatgctttttctgtggtgtgtcactgcctttttaacaaaagggctgtcaaagtcaccattctttttgatgagggcagcgtaattacattgccttttgtcaggactgtgggtatgtgatttgtcttccacagtctctctggggctgtgtcctacatagcttctgactctcaatttttggtgccatgagctgagctcagtgagtggagctggcttttctgtcgctgagtggtactgcctagtccagatgtcgtggctcagggtgtaaatattcctaagaatggcagcatctatttcctcttttgtttgaattaaagactctgaatttctgctgaaaaaaaaaaaaaaaaaaaaaaaaaaaaaaaaaaaaaaaaaaaaaaaaaaaaaaaaaaaaaaaaaaaa

SEQ ID NO: 405385 - DNA, 1000 bp, Homo Sapiens; identical to SEQ ID NO: 224424

SEQ ID NO: 405386 - DNA, 1000 bp, Homo Sapiens; identical to SEQ ID NO: 293382

SEQ ID NO: 405387 - DNA, 1000 bp, Homo Sapiens; identical to SEQ ID NO: 224425

SEQ ID NO: 405388 - DNA, 1000 bp, Homo Sapiens
ctcatcaaagacatctacttcctgaatgagggctgcgccaaccgccttcccaatggacacgtcaactttgagaaattcctggagctggccaagcaggtgggggagttcatcacctggaaacaagtggagtgtcccttcgagcaagacgccagcatcacccactacctgtacaccgcccccatcttcagtgaggatggtctttatttggcttcttacgaaagtgagagcccagagaaccaaacagaaaaagaaagatggaaagctctaagatcttctattttggggaagacatgaaagcgctgagctgagggacgaggaagagctggagcccgcagaagccgtccacagccctgcctcagtggcccagtgggcagaggccagggagtgcctcactattttgcaaatgccgaccctgtggcctgctgcccgccccccccccccccacagtggccatacgggcacaggagaccttttatgggactttggccctggcaggacccagggcctccagacgtgcgggcggcacatgccttggggacatcctgccttcaggaccgtggggcctggtcagtctgtccatcctcggcaaggacacaacactgccccagagggtgggaccactgcaagctcgagaccttgcttggtgacatgtgccactttggccaccacccacagtctgtcaccacgtggcttgggaacttctggagccacagcaggcatcacggtgcgacgtgagatgcctgcgccagccccgagcccactggcagccactgccattccacccatggtccctcaccctgccctgccgacgagcttgtctctgcagccccaggtacccccttcctggatgctgctggccccaggagatagctttccggtgacagctgtggaacgcgtcaacaggacaaactggacacatggagttacagtgtgtacacggcagtcccgccacccagcccccttgtaaactctagtcactataaacacacccgtacgccta

SEQ ID NO: 405389 - DNA, 1000 bp, Homo Sapiens
agatcgccacctaccgcaagctgctggagggcgaggagtgcaggatgtccggagaatataccaactccgtgagcatttcggtcatcaacagctccatggccgggatggcaggcacaggggctggctttggattcagcaatgctggcacctacggctactggcccagctctgtcagcgggggctacagcatgctgcctgggggctgtgtcactggcagtgggaactgtagcccccgtggggaagccaggaccaggctggggagtgcaagtgaattcagggactcccagggaaagaccttagctctaagctcacccaccaaaaaaaccatgagataaaagtgcaacacagcccatttcccagtagtctgccttgccctggcagactgctccggactcttctaggaaattcctctgtctcatttgtcctcatctccttcttgctttgctttgctgtggacctctcctccttctccttgacctctctgcctcagtctttgttaatgttgaatcaggatttgagagctggagcccatctttctgcctccatccaaagaggccttttaactcagcctccccttctggaagaagacttggccttttctctgcctgcatgtccctgtgcagaggaaggctgtctctcaagggtaaccccaatctgcctgtgctgctctttcataccctgtctcagtaactatttggccatgtgctccctgggtacacaagttttcagatctactgatagacctgcaggaactctctcatgttagagcaatactggctcaggcaaaacacctggtgggaagttgtatcttgtatagccactgcatattacatagccaggagtaccccttgaggctaattctaccaaccaagggatttgtgctcttcatctgtgggtacttgtccttgtttaggcctcacctccctgctcctgtgtcttaccaataaacttataaagcccaaaaaaaaaaaaaaaaaaaaaaaaaaaaaaaaaaaaaaaa

SEQ ID NO: 405390 - DNA, 1000 bp, Homo Sapiens
tcttgaagctgccccttcgttgtcatgagtgccagcagctgctgccttccattcctcagctgaaagaacatctcaggaagcactggacacagtgattctgcagagcctgagctgctgctgtggtgtggcccactggagcaaactgctggcacctattctgggttgcttgtgaacttctactcatttcctaaattaaaacatgcagctttttcacaaatttattctattattgagtggccacaatgtagagtggctcaaagtacttcaggattaggaatttgggtttgtcatagatgtattctctggtgagggtggctgggatatacctgacccaccatcttcagaaggacccatgtcaggtctgaccattgggagcaaagccatgttcacactgacctaatgcagagtatggaagcattgggctggttatacatttctgtttcttagatttatcctccgcctctgtaggcatggacaacctttaatcagagcatctagagtggcctcttgtttatcctgaagatactgatgggtcttgttttctgttagtctgttttgtaatattcttttcccttccttcatggggaggcttagtttgtccagtccttccatgcccttctatcccagattacctaaatgttcccttctcaggaattctgtctcatcagttcttcacagtgagaaaagaggctagatgatggtgtggggggttggagttttcttctaataccgagggttcctggctgtgaggaaacagccacatgttcgtcatgattgagctgtgaagtcttcttggacctgttgtctgaaaataaagttaatttgtttgaggcatctctcttaagtaggtggaaactattgaagttcagctaacaatcacagcataggttctgatgcatggaaaggtggttggtgaatgaaaaagttgcgtagagccactactttctttttccctgagaataaatttggataaaacagttgtaaaaaaaaaaaaaaaaaa

SEQ ID NO: 405391 - DNA, 1000 bp, Homo Sapiens; identical to SEQ ID NO: 224426

SEQ ID NO: 405392 - DNA, 1000 bp, Homo Sapiens; identical to SEQ ID NO: 293386

SEQ ID NO: 405393 - DNA, 1000 bp, Homo Sapiens
aggctcaagctctaggactggaggtgttccatgcaggcactgccctcaaaaatggcaaagtagtaactcatgggggtagagttcttgcagtcacagccatccgggaaaatctcatatcagcccttgaggaagccaagaaaggactagctgctataaagtttgagggagcaatttataggaaagacgtcggctttcgtgccatagctttcctccagcagcccaggtaaaactctaagcaagttagctgtagtgccatttcagaaactggcctaaatggctatgtagaacatttcattaaccctataagtcattcagtattcttttctctctgtgggagtgatacagtcttggtttgtattttgtttgaatcaaaactggttatagcaatactcaaattaaatggaaaaaacttcatgatagcgtaagtttggaaagtttagcaaaatcacagtggtactgatttttatttgttttctattttttttaatttatatttttaatttttttaacagggtcttcctctctcgcccaagttctcatgcctcagcctcccaaatagctgggactacaggcacaggccaccacacctggctaatttttttgtattttttgtggagatggggtttcaccatgttgccaaggccagtctgaaatcctgggctcaagtgatcctcctgctttggcctcccaaaatgctgggattataggcatgagccgctgcacttggcctgatactgatttttattccttgcgttatcacatagtgttgtatttgaaacatagttcatggttttatcaaagaactgaagatgagaatactggtcatctaactttgtaatttgatttgattatactgtaaagtttgacagtctcattttatcactgcgtttgtatctattactaaaatgtattttttgacctcttactgattcattgttggtatgtacaaactgttgacttgtaaaatcaataaagtcttagttggaaaaaaaaaaaaaaa

SEQ ID NO: 405394 - DNA, 1000 bp, Homo Sapiens; identical to SEQ ID NO: 399020

SEQ ID NO: 405395 - DNA, 1000 bp, Homo Sapiens; identical to SEQ ID NO: 224428

SEQ ID NO: 405396 - DNA, 1000 bp, Homo Sapiens; identical to SEQ ID NO: 118841

SEQ ID NO: 405397 - DNA, 1000 bp, Homo Sapiens
ggtttaagagatggccgctgtgtgctggtcacaggaagtgttgaatggattggcttgcaaagggggtaggtggggagagataggagggcccagggactcatgggacacctttcccacagcctcctcgattgctgtgagcagaggccactcggagttaggggcatgggcaatagcaagctggcggcagagtccagcccagcatatgacttgccctgaatggaagctgctgaaacgggtgcctttgggtggtggtcggcttgcctctgaggccaccacggcaccagcagaatacgtatttcttctccttggctgcactggtttgtcgatctagttcagttcaactcagtggatgttctctgaatgcttactgggtgccaggaccacagagagatgttagtcactgcccagttcttagagccccaacacagataccctcatcccagggcccccagacacacccctccgctggactcacaactgtctggagtttctgtctgatggatggtgtgctttcatatgccactggcttccttggacatagatcagacaaaagccccgggatctgtttggtagcaggagaaatgaaggaagatgaaaaagcaggcagggaagggggtagtaaaggactgagagaggagggaggtggctggagaaggaaaaggaacattgctcgatgctcccatctggtggcggcctcaggaacccacgggaacctggaaggaggctctttgtgagacctgggcaaaggatggggcagctcgtcgatgatttttttgtgtttccaggcttcctgtgtgatcctggccctccggccgctagagagaggattgggaaaccccactgtcagctctgcatctgcccccactaccctcctctgccctattctgtccctgcccctccaagctgaagaaggtccttgtggggcgtcctcatttcttcctcaaatataaggaggaagataccaattaaaagctcatagtatcaaaaaaaaaaaaaaaaa

SEQ ID NO: 405398 - DNA, 1000 bp, Homo Sapiens; identical to SEQ ID NO: 118842

SEQ ID NO: 405399 - DNA, 1000 bp, Homo Sapiens
aagcaaaccaagatagaatatggggcggttagagatggatcaacaatgaccttcttcaagaaatcaaaaatctccacctatgagaagatgtgggctttcatgagcagcaggcagcagaccgccctggtaagaaacagtgatgaggggatccagagagtgctcaccacagactacgcgctgctgatggagtccaccagcattgagtatgtgacgcagagaaactgcaacctcactcagatcgggggcctcattgactccaaaggttacggagtgggaacacctattggttctccttaccgggataaaattactattgctattcttcaactccaagaagaagggaagctgcatatgatgaaagagaagtggtggcgtgggaatggctgccccgaggaagacaacaaagaagccagtgccctgggagtggaaaatattggaggcatcttcattgttctggctgccggactggtcctttctgtatttgtagctattggagaattcatatacaaatcacggaagaataatgatattgaacagtgtctctctttcaacgctatcatggaagaactgggaatctcactgaagaatcagaaaaaaataaagaaaaagtcaagaactaaggggaaatcttccttcacaagtatccttacttgtcatcagagacgaactcagagaaaagagactgtggcgtgatccaaggaaacgcctgtaggaagaaaaaggatgcattccctacagatttttggagaaaggatttctgaggagtgtgtgatgtgtttccatatatctatatccataactctgattatgaatacagatataagaaatacaaaagtttaaaaagctcacatagatatgacttgggaagtgacaccagttcttttaaaataaatttgtatgctcaattattttgcattttttctttttccccaataaattgttgtgtgtgctttctaaataataataaaacaacagggtttttttccagaaaaaaaaaaaa

SEQ ID NO: 405400 - DNA, 1000 bp, Homo Sapiens
agattttcttttcactcaactgagttagcattgtctttgtggtagcattatcttagacattaaatttgaagtaacatatatcctgtagtaacatagacccaaagttactatagtcaaccaagtctttcaaaggataaaagatcattttattatctttaactgtatctattttgaatgtaaatttaaaaaaagtaattctctgtcaatggattcgtaatttctttacaaaatttcttatatataatatgtgtatctctgtaataatagagcccttcttttgaatcaaaattacatatggactttggaagattgctcctatttcaacaaatagttgctgcaagaatttttaatatgactctataaaagctctttagtacaattgtatggtttcttgatgattctgttttgcaataggtagcctagttgctttatatgctttaccttctaggtcttaaaatcacacattggaaaatgacaatatcaacaaaactgtattcttatgaaaagaactatttgttacaatgagaaaggttttgtgagtaaaccctactggacagtgacataaaaggcaatggaattttctataaacattttctcatgtaaacatgctgccaccttttcttctttctcagagaactcaaatttgctatagtttgtcatttttgcttacaaataatataacttttcaaccttctagttatatttatccaataaagtcataatcgggattccatttgtgtaaaaactagggtggtaaccggaaaaaaatattgtcagtatttcaagctgtgttcctttcttagtttgatatggttacttctatgttgaaataaaatttaaaatcacatgcaaaaaaaaaatcagcaaaataataaaatgaacgaaaaaaaatgacacccagggagttcccaaccccagtgtaaatgatatttaccagtgatctagcatatgtaatcttttttaaaggtattgttaataaatattctgtcatttgtaaaga

SEQ ID NO: 405401 - DNA, 1000 bp, Homo Sapiens
gatctggatgctgacagtgctggcctcagctgatgcctctagatacgtgttcaggaatgagagcgtgcaccccttctctccctttgaggttaaagtaggtgtcttcaacaacaaaggagaaggccctttcagtcccaccacggtggtgtattctgcagaagaagaacccaccaaaccaccagccagtatctttgccagaagtctttctgccacagatattgaagttttctgggcctccccactggagaagaatagaggacgaatacaaggttatgaggttaaatattggagacatgaagacaaagaagaaaatgctagaaaaatacgaacagttggaaatcagacatcaacaaaaatcacgaacttaaaaggcagtgtgctgtatcacttagctgtcaaggcatataattctgctgggacaggcccctctagtgcaacagtcaatgtgacaacccgaaagccaccaccaagtcaaccccccggaaacatcatatggaattcatcagactccaaaattatcctgaattgggatcaagtgaaggccctggataatgagtcggaagtaaaaggatacaaagtcttgtacagatggaacagacaaagcagcacatctgtcattgaaacaaataaaacatcggtggagctttctttgcctttcgatgaagattatataatagaaattaagccattcagcgacggaggagatggcagcagcagtgaacaaattcgaattccaaagatatcaaatgcctacgcgagaggatctggggcttccacttcgaatgcatgtacgctgtcagccatcagtacaataatgatttccctcacagctaggtccagtttatgacaaaagttatctgaaggacttgctgtttataatataagcaacatttagctagttgttttgaagacacccagtactaagtaatattgttgttcaagtacatcttattactggaataaaaatgttttttgcttctttaaaaaaaaaaaaaaaaaa

SEQ ID NO: 405402 - DNA, 819 bp, Homo Sapiens; identical to SEQ ID NO: 293389

SEQ ID NO: 405403 - DNA, 1000 bp, Homo Sapiens; identical to SEQ ID NO: 293395

SEQ ID NO: 405404 - DNA, 825 bp, Homo Sapiens; identical to SEQ ID NO: 118843

SEQ ID NO: 405405 - DNA, 1000 bp, Homo Sapiens; identical to SEQ ID NO: 293397

SEQ ID NO: 405406 - DNA, 1000 bp, Homo Sapiens; identical to SEQ ID NO: 293398

SEQ ID NO: 405407 - DNA, 1000 bp, Homo Sapiens; identical to SEQ ID NO: 118844

SEQ ID NO: 405408 - DNA, 1000 bp, Homo Sapiens
ggaagtggtccccatcagccacttgtacatccttgtcacctgcctgggcctctcctacgatggcctgctgggcgacaatcaggtcatgcccaagacaggcctcctgataatcgtcctggccataatcgcaatagagggcgactgtgcccctgaggagaaaatctgggaggagctgagtatgttggaggtgtttgaggggagggaggacagtgtcttcgcacatcccaggaagctgctcatgcaagatctggtgcaggaaaactacctggagtaccggcaggtgcccggcagtgatcctgcatgctacgagttcctgtggggtccaagggccctcattgaaaccagctatgtgaaagtcctgcaccatacactaaagatcggtggagaacctcacatttcctacccacccctgcatgaacgggctttgagagagggagaagagtgagtctcagcacatgttgcagccagggccagtgggagggggtctgggccagtgcaccttccagggccccatccattagcttccactgcctcgtgtgatatgaggcccattcctgcctctttgaagagagcagtcagcattcttagcagtgagtttctgttctgttggatgactttgagatttatctttgtttcctgttggaattgttcaaatgttccttttaacaaatggttggatgaacttcagcatccaagtttatgaatgacagtagtcacacatagtgctgtttatatagtttaggggtaagagtcctgttttttattcagattgggaaatccattccattttgtgagttgtcacataataacagcagtggaatatgtatttgcctatattgtgaacgaattagcagtaaaatacatgatacaaggaactcaaaagatagttaattcttgccttatacctcagtctattatgtaaaattaaaaatatgtgtatgtttttgcttctttgagaatgcaaaagaaattaaatctgaataaataattcttcctgttc

SEQ ID NO: 405409 - DNA, 1000 bp, Homo Sapiens; identical to SEQ ID NO: 293400

SEQ ID NO: 405410 - DNA, 1000 bp, Homo Sapiens
tccacttgacccccggagggaaaggaccaaaatcaaaccgcaatttctaggtggtagcaaagggggactcgaaccagatgtcgtgtgttttgcatgcatgcttcttttccccatgccgcgccagtatttttcactgccatatgctcttgtcaaaactgcatttgttgtataaagatgggatcggtgtagttaaaaacttgcgaagggacttttgagttggctttctctgactctgtgttctcgctttggaaaaagacggccatcccttttgtgcaaaacaaatgtaaatattttcttgagatggatgcgattatgattgtctctgtccttgccacagtttttctagagacaatggagagagaaagagagagagagcgcgagagagatcaagacccaagttttgaatctcaaccgaggtccagggcatgacacctcctatgtgggttttcctttcgacgcagtgtaggtcaaaagaatgcatgcacgcttctaaatgaatcttgtctgaatatgtcgtgcaggctgtggtgccgttttccttgtaacaaggatttattagtgaattatcccaagtactccatatatctgtctgtggttgtatgaaatgaaaaaaggggcagagtgcaaagacccacactcacgcacacgcgcttcttctcccacccccacccccttcaaactttattcggaaccttcctttgctgttctggggccgctattgtaaaagcctgggctccctctagtagcttgcgccaccccccctcgctcagttattctgcatgcggggttggctctctctattatcagctttgaaaacttatcctggttttgggaggggtgccgtttttattttcctgaacatttgcttgaaatattttgttagggcctcaaagacgatacctgtctttattttttatatattcttgataactatgatatatttattaataaccagtgtttctggatgagatttcaaataaaaaagaacctttaaatcgtg

SEQ ID NO: 405411 - DNA, 1000 bp, Homo Sapiens; identical to SEQ ID NO: 293402

SEQ ID NO: 405412 - DNA, 1000 bp, Homo Sapiens; identical to SEQ ID NO: 115881

SEQ ID NO: 405413 - DNA, 1000 bp, Homo Sapiens; identical to SEQ ID NO: 224434

SEQ ID NO: 405414 - DNA, 1000 bp, Homo Sapiens; identical to SEQ ID NO: 293405

SEQ ID NO: 405415 - DNA, 1000 bp, Homo Sapiens; identical to SEQ ID NO: 118845

SEQ ID NO: 405416 - DNA, 1000 bp, Homo Sapiens; identical to SEQ ID NO: 118846

SEQ ID NO: 405417 - DNA, 1000 bp, Homo Sapiens
agttgtgaattttttcttaaagcagtactgtagtactgaatattcctttaaaggaactgcagtgagcctatctaagtttttttaaattaaggcttttaaaatagaaagctgatgcttgatcttgcacaatttttatgtctagtatgtatgcttgagtgaatgtgtgagtatgaatgattagagaaaatttgagtcagtgtactttatagtgtgaatcctgtgagctaatacagtctatacttatttcttccctacctgtttcacatccgtaagatttaggatatacattttttgagaggtagtctgtctgatacaatgtaaatgacaaaacataattcctgagaggcccagaacaaactggagtctagcctggagttaaattgagacttctaaaatgattggaacaaagactaagttgtgccagatgtaaatcaacccctcttttagtttactttagactttgtattagctcatcttttttgtagtaaatctatagttttaaggtttctcaagatgtggctctacctactatgatgaaaattgaagtgggtcaaaagaattagatgtacagtgaagggaaaagaaaaaaaatgggcgaagagagggtggaaaataaaaggattcttttttcttcctttctgtttctcgtatccctgctccctttttcctccccttccctcattctttgcctctatccttagctgaagacaaactagaggagcagcatcccaggtagtttggcttttgactgcaaggtagttaagaaaggtgtagatataatgaggtagaagtagaaaggaagaaaaactcaaagaattctgaaaaggattcatagcaacataatgtgtccctgagtagaggatgctgctatgcgtgagttcatggacacaagttgattacatggtttttagaattataattatggattcttcttatttcatggtaggttgtctttaaagatataaaaattaggatgcctttatgaagcactgattatacc

SEQ ID NO: 405418 - DNA, 1000 bp, Homo Sapiens; identical to SEQ ID NO: 293409

SEQ ID NO: 405419 - DNA, 1000 bp, Homo Sapiens; identical to SEQ ID NO: 118849

SEQ ID NO: 405420 - DNA, 1000 bp, Homo Sapiens; identical to SEQ ID NO: 118850

SEQ ID NO: 405421 - DNA, 1000 bp, Homo Sapiens; identical to SEQ ID NO: 293412

SEQ ID NO: 405422 - DNA, 1000 bp, Homo Sapiens; identical to SEQ ID NO: 224436

SEQ ID NO: 405423 - DNA, 1000 bp, Homo Sapiens; identical to SEQ ID NO: 293413

SEQ ID NO: 405424 - DNA, 1000 bp, Homo Sapiens; identical to SEQ ID NO: 293414

SEQ ID NO: 405425 - DNA, 1000 bp, Homo Sapiens
tgtatatcagtctcactatacgagaatggcctttgaatagagcattgctgatgacattttccctgttatcagttacttatggggccattcgctgcaatatactggccatccagatcagcaatgatgatactaccattaagctaccgccgatagaattcttctgtgtcgtgatgtggcgttttttggaggttatctcacgtgtagtgactctggcattgttcattgcatctctgaaactgaagagcctacccgttttgttaatcatatattttgtatcattgttggcaccgtggctggagttttggaaaagtggagctcatcttcctggcaacaaagaaaataattccaatatggtgggtacagtactgatgcttttcttgatcacactgctatatgctgccatcaacttctcctgctggtcagcagtgaaactgcagttgtcagatgacaaaataattgacgggagacagaggtggggccatagaatcctacactacagctttcagttttttagaaaatgtgataatgatattggtatttaggttctttggagggaaaactttgctgaattgttgtgactcattaattgccgtgcagctcatcataagctacctattggccactggctttatgctcctcttctatcagtatttgtacccatggcagtcaggcaaagtgttgccaggacgtactgaaaatcagccagaagcaccgtactattatgtaaacatcgagaaaactgaaaagaataaaaataagcagctgaggaattactgtaactcctgcaatagggttggatatttttcaatcagaaaaagtatgacatgttcataaaatatacatatatactttcacagaacaatgagtaaagatgctgaatgtgacttgttaagaggctcttaaatttaaaaaatatacacagcaaaatcttggaagtggtttctaataaaattcatttatgttctcctgtgaaaaaaaaaaaaagaaaaaaaaaaaaaaa

SEQ ID NO: 405426 - DNA, 1000 bp, Homo Sapiens; identical to SEQ ID NO: 293415

SEQ ID NO: 405427 - DNA, 1000 bp, Homo Sapiens
ggacacactgggcatttcctactgcctgttcgtcctgcaccgtgtgcggctgcccactctcaagaactgctcctccttcctgctggccctgctggcctttgatgtcttctttgtcttcgtcacccccttcttcaccaaaaccggtgagagcatcatggcgcaggttgccttgggccctgcagagtcttcaagccatgagaggctgcccatggtactcaaagtgccccggctaagagtctccgccttgaccctgtgcagccagcccttctccatccttggcttcggtgacattgtggtccccggcttcctggttgcttactgttgccgctttgatgtgcaagtctgctcccgtcagatctacttcgtggcctgcaccgtggcctatgctgtgggcctgctggtcacattcatggccatggtcctcatgcagatgggccaacctgccttgctctacctagtgtccagcaccctgctcaccagcctggctgtggctgcctgccgccaagagctcagcctcttctggactggccagggcagagctaagatgtgtgggctcggctgtgccccttcggctggctctaggcagaagcaggagggcgcagcagatgcccacacagccagcacacttgagagaggcaccagccgaggagcaggggacttagacagcaaccctggagaagacaccactgagattgtcaccatatctgagaatgaagccaccaatccagaggaccgcagtgatagctccgagggctggagtgacgcccacttggatcctaatgagctgcccttcatcccccctggggcctcggaggagctgatgccactgatgccaatggccatgctgatcccactcatgcccctgatgcccccgccctcagagctgggccatgtccatgcccaggcccaggcccacgagactggcctgccctgggcgggactccacaagaggaagggtttgaaagtaagaaagagcatgtcgacccaggctcccttgtga

SEQ ID NO: 405428 - DNA, 1000 bp, Homo Sapiens; identical to SEQ ID NO: 293416

SEQ ID NO: 405429 - DNA, 1000 bp, Homo Sapiens; identical to SEQ ID NO: 293417

SEQ ID NO: 405430 - DNA, 1000 bp, Homo Sapiens; identical to SEQ ID NO: 224438

SEQ ID NO: 405431 - DNA, 1000 bp, Homo Sapiens
tttctttcaataaaggcagactctggccccaattattctgatagcaaacctcttcctcctcattgaagccatgccatcaccttggtttggagagagacatttttttcccattcataagctttctttttcccatttttatgtgaagccccctctgcttttcagctggtgattgctctggtgagactgaatggacttgctggtgaaatgaaatctcttctttcctgtcttggtcctgcctaaattcctacaaatatatttaagccaaggactcaggctaattcctaagttgatcacattaatttgttactcctagagggaaaaagatcaattcccttgaagcatgtggagtacctcctgtgacagctgacttgccaggggactccctacagaattctgtgatatacattttacttctgtgtatgtatggtatatatggtatgtataccatgtacacacgttacattgagtatgaatgactgtggttggaaacacacacacacactcaagtctgtaaatatccttcctcactgaaacctgtgctttggaaatcatttcttgtacagctgtgcagtttcttgtaacagctgaggacaaagctaagacaggcggacaatttagacaaagatcatctaaagagtatagtatctccctagcaactcatgaggacagacaaccaagtggcaaggttgactcccaatgggatggcagacttttcttctctcctttttgagtttgtgtttcctaagtgtttcttaacttctgagtgcaccaggctgtacccgttagatcctttcaatatgacagttttgtgcttctctctgacaggatgtttctccaccgagctgtagcacaggatgggagggaggtgggaatactccttgcctaggctggagtttacagagacactgcacagcttacactcctgttaagtgtaaatattcaacacttccattccatttgtgtaaaaaataaagcacacacgattataaaatcaagatgt

SEQ ID NO: 405432 - DNA, 1000 bp, Homo Sapiens
tccgggacagaggcggcgtcccctttccctgccttggcaggcgtcagcgtgctaccagaaatcagccctgaaagaggggaccccgattccacgtcaccagagtgctgaggcagcgggcgatgccctccatcggctcagcgggggggagtggagtcccaaacttttttcggcctttgcccgcaaagaagatggcggcgcatatcgccgcctaagcggacacgttgtaccctggccgtggtttgaagtttccggcacctcctttcccaaccagcaaggacacaaccatacgagccccacccacgcggggtggctgccgtgctacattccgcagaaaacaggcgggaaagctgcggcacagcccgctttaaacgcaagcttttgggacttctggttttggctttttctttttaagccaagttagggagaaggctgactgccatggagccacttctgcttttggcccagacaacttacgggattttttttttcctcccatttagagattttttgtaggaagttaacaaattattttaaagaagtagttagggcttgtcagataaaatacaggacgcccagttaaattggaatttcagataaccagtgttttggcatatgtgtgttacatatatttttaaaattgtttatctgatattccaatttaactgcacattctcaatttttaatgactgtatctggcaaccctatcagcctttacccctgaaaatccagactgcttatgacaaaagtaaggaatggagggaaatgaaaagcatgtttacctacaacttagaattgtctttgcccagactttgatccttcatggaggccagagggccgtggtctagaacaaaatttggcagcaactcataaagatatccttgtataattccctttctggcaaagtaagattttttttttcttaagctatcacgatgtaattttggacaacagatcctcttggccaagagtttaattgcaaattaaaaattaaataactggc

SEQ ID NO: 405433 - DNA, 1000 bp, Homo Sapiens; identical to SEQ ID NO: 293420

SEQ ID NO: 405434 - DNA, 1000 bp, Homo Sapiens; identical to SEQ ID NO: 293421

SEQ ID NO: 405435 - DNA, 1000 bp, Homo Sapiens; identical to SEQ ID NO: 118852

SEQ ID NO: 405436 - DNA, 1000 bp, Homo Sapiens; identical to SEQ ID NO: 293423

SEQ ID NO: 405437 - DNA, 1000 bp, Homo Sapiens
gtctatgaatatatggtttttgtaagtacaagcctctttctccttttccctttcattggcatcacttcttcctgtggccgagtcctatttgctgtctatcatatgcactcaaaggaggggagaaaaaaggccttcaccaccatttcaacacatttaactgtagtgatcttttactatgcaccttttgtctacacctatcttcggcccaggaatctccgctcaccagctgaagacaagatcctggcagtcttctacaccatccttacccccatgctcaatcccattatctacagcctgaggaataaggaagtcctgggggctatgaggagagtgtttgggatattctctttcctgaaagaataatcatggccatccccactccctttgtatttcctctttccaagttgattccaacacgctagagcagggttgtccaatagaaatacaacataatttaaaattttctaataggtacatttaagcagtcaaataaatttaaataatatatttaattcaaaacaatgttataattaatattaatattaacaatattgatgttaattacatagcatactatttcaataaattatatgcaatatattatagtacatgtttgtacatatattactattaacgtgataatgtttattcttgtatattgacatagaatttcttcatgtaataacacaaatttgttaatgttgccttttactctgtttgcattctaagtcttcaaagtcttgtgtttgttttatagagtgcagtgcagcttggacaaaacacatttcaagtgcccagtagtcagtgtctatagtgttggacagcacattcttagagcatccccaatcaatagtttcagaagttatatatgcatgtgtatgtgcatgtatggtgtatacaaacatatttttgttatatacaatattgctgatgaactgaaaattaacaagtaaaatgcacatgctaaggtaaaaaaaaaaaaaaaaaaaaaaaaaaaaaa

SEQ ID NO: 405438 - DNA, 1000 bp, Homo Sapiens; identical to SEQ ID NO: 118853

SEQ ID NO: 405439 - DNA, 1000 bp, Homo Sapiens; identical to SEQ ID NO: 293425

SEQ ID NO: 405440 - DNA, 1000 bp, Homo Sapiens; identical to SEQ ID NO: 118854

SEQ ID NO: 405441 - DNA, 1000 bp, Homo Sapiens; identical to SEQ ID NO: 293426

SEQ ID NO: 405442 - DNA, 1000 bp, Homo Sapiens
tggccgaaaacaaacaatcactgagaagtctcaaagaaatataccacgtgaggggaaaaaactgggagaagatccggaatattatcgtttttcctatggtaaaaccggtgcccctcttcaggagaactgatttcaaattattattatgcaaccacaaggatctcttctttctcagggtgtctaagctgctggattgcttttcgcccaaatcaatgtggtttctttggaacattttcagcaaaggaacgcatatgctgcagtgtctttgtggcaagagtcttaagaaaaacaagaacccaactgatccccagctcaagggtatagtgaccaggttatattgcaggcaaggctactacttgcaaatgcaccccgatggagctctcgatggaaccaaggatgacagcactaattctacactcttcaacctcataccagtgggactacgtgttgttgccatccagggagtgaaaacagggttgtatatagccatgaatggagaaggttacctctacccatcagaactttttacccctgaatgcaagtttaaagaatctgtttttgaaaattattatgtaatctactcatccatgttgtacagacaacaggaatctggtagagcctggtttttgggattaaataaggaagggcaagctatgaaagggaacagagtaaagaaaaccaaaccagcagctcattttctacccaagccattggaagttgccatgtaccgagaaccatctttgcatgatgttggggaaacggtcccgaagcctggggtgacgccaagtaaaagcacaagtgcgtctgcaataatgaatggaggcaaaccagtcaacaagagtaagacaacatagccagatcctcacaggtgttgtgacttattcgtcctgagcacagttgagtgatttatcctcaccagacattcctgctccgtggctgaagagcagcaggaagtaagctaatgcttattctttgctgtctccgaacttctctgttgcaa

SEQ ID NO: 405443 - DNA, 1000 bp, Homo Sapiens; identical to SEQ ID NO: 286755

SEQ ID NO: 405444 - DNA, 1000 bp, Homo Sapiens; identical to SEQ ID NO: 118855

SEQ ID NO: 405445 - DNA, 1000 bp, Homo Sapiens; identical to SEQ ID NO: 224442

SEQ ID NO: 405446 - DNA, 1000 bp, Homo Sapiens; identical to SEQ ID NO: 293429

SEQ ID NO: 405447 - DNA, 1000 bp, Homo Sapiens; identical to SEQ ID NO: 287891

SEQ ID NO: 405448 - DNA, 1000 bp, Homo Sapiens; identical to SEQ ID NO: 118856

SEQ ID NO: 405449 - DNA, 1000 bp, Homo Sapiens; identical to SEQ ID NO: 293432

SEQ ID NO: 405450 - DNA, 894 bp, Homo Sapiens
ccggaagcctcgaggtttagtcccgcccccctctcctcgctgcttaggctccgcggcctccaagctgtagctatgacggcgcgcgggactccgagccgcttcttggccagcgttctccacaacggactgggtcgctatgtgcagcagctgcagcgtctgagcttcagcgtcagccgcgacggcgcctcgtctcgcggcgccagggagttcgtggagcgggaggtgatcgacttcgcccgacggaatccaggggtcgtaatatatgtaaactcgcgtccgtgctgcgtgcccagagtagtggccgaataccttaacggggctgtgcgcgaggagagcatccactgcaagtcggtcgaggagatctcgacgctggtgcagaagctggccgaccagtcgggcttggacgtgatccgcatccgcaagcccttccacaccgacaaccctagcatccagggccagtggcaccccttcaccaacaagccgaccacgttccgcgggctacgcccccgagaggttcaggatcctgccccagcccaggatgcggctgagttcctcggcgaaggagcagggccctgctggtactccattgttgctctgcctcagaagcacatagctattgccattcatcctccgcagccggctgggcagtgccaccaagccattggacactggcctgagactgtctgcagttgcaccgcagatcctcctgcccggctggcccgacccaatatcagttcagtcatccgatcttccttggggaaatacccattaccgtcctgaacccttgtcatccactacttggctataagctccagaagtgacaagacacttcacatcttaaatatgtttcctagtttataattcatttgggcagtaaatgtttgttgagcactt

SEQ ID NO: 405451 - DNA, 1000 bp, Homo Sapiens
cgcctgccgcctggtccgcttcctcttctatgccaacctgcacggcagcatcctcttcctcacctgcatcagcttccagcgctacctgggcatctgccacccgctggccccctggcacaaacgtgggggccgccgggctgcctggctagtgtgtgtagccgtgtggctggccgtgacaacccagtgcctgcccacagccatcttcgctgccacaggcatccagcgtaaccgcactgtctgctatgacctcagcccgcctgccctggccacccactatatgccctatggcatggctctcactgtcatcggcttcctgctgccctttgctgccctgctggcctgctactgtctcctggcctgccgcctgtgccgccaggatggcccggcagagcctgtggcccaggagcggcgtggcaaggcggcccgcatggccgtggtggtggctgctgcctttgccatcagcttcctgccttttcacatcaccaagacagcctacctggcagtgcgctcgacgccgggcgtcccctgcactgtattggaggcctttgcagcggcctacaaaggcacgcggccgtttgccagtgccaacagcgtgctggaccccatcctcttctacttcacccagaagaagttccgccggcgaccacatgagctcctacagaaactcacagccaaatggcagaggcagggtcgctgagtcctccaggtcctgggcagccttcatatttgccattgtgtccggggcaccaggagccccaccaaccccaaaccatgcggagaattagagttcagctcagctgggcatggagttaagatccctcacaggacccagaagctcaccaaaaactatttcttcagccccttctctggcccagaccctgtgggcatggagatggacagacctgggcctggctcttgagaggtcccagtcagccatggagagctggggaaaccacattaaggtgctcacaaaaatacagtgtgacgtgtactgtcaaaa

SEQ ID NO: 405452 - DNA, 1000 bp, Homo Sapiens; identical to SEQ ID NO: 118857

SEQ ID NO: 405453 - DNA, 1000 bp, Homo Sapiens; identical to SEQ ID NO: 224444

SEQ ID NO: 405454 - DNA, 1000 bp, Homo Sapiens
gatgcacgcatggaacagcatttgctctacgttggtcacaaatgagaatctgcatgagctagacctgagtaacagcaaacttcatgcttcctctgtgaagggtctctgtcttgcactgaaaaatccaagatgcaaagtccagaaactgacgtgcaaatcggtaactcctgagtgggttctgcaggacctcattattgcccttcagggtaacagcaagctgacccatctgaacttcagctctaacaagctgggaatgactgtccccctgattcttaaagctttgagacactcagcttgcaacctcaagtatctgtgcctggagaaatgcaacttgtcggcagccagctgtcaggacctagccttgtttctcaccagcatccaacacgtaactcgattgtgcctgggatttaatcggctccaagatgatggcataaagctattgtgtgcggccctgactcaccccaagtgtgccttagagagactggagctctggttttgccagctggcagcacccgcttgcaagcacttgtcagatgctctcctgcagaacaggagcctgacacacctgaatctgagcaagaacagcctgagagacgagggagtcaagttcctgtgtgaggccttgggtcgcccagatggtaacctgcagagcctgaatttgtcaggttgttctttcacaagagagggctgtggagagctggctaatgccctcagccataatcataatgtgaaaatcttggatttgggagaaaatgatcttcaggatgatggagtgaagctactgtgtgaggctctgaaaccacatcgtgcattgcacacacttgggttggcgaaatgcaatctgacaactgcttgctgccagcatctcttctctgttctcagcagcagtaagagcctggtcaatctgaaccttctaggcaatgaattggatactgatggtgtcaagatgctatgtaaggctttgaaaaagtcgacatgcaggctgcagaaactcgggtga

SEQ ID NO: 405455 - DNA, 763 bp, Homo Sapiens
agaaacatccagaatacatttccaacaagagcactggccaagtcagcttcttctgagagagtctctagaagacatgatgctacactcagctttgggtctctgcctcttactcgtcacagtttcttccaaccttgccattgcaataaaaaaggaaaagaggcctcctcagacactctcaagaggatggggagatgacatcacttgggtacaaacttatgaagaaggtctcttttatgctcaaaaaagtaagaagccattaatggttattcatcacctggaggattgtcaatactctcaagcactaaagaaagtatttgcccaaaatgaagaaatacaagaaatggctcagaataagttcatcatgctaaaccttatgcatgaaaccactgataagaatttatcacctgatgggcaatatgtgcctagaatcatgtttgtagacccttctttaacagttagagctgacatagctggaagatactctaacagattgtacacatatgagcctcgggatttacccctattgatagaaaacatgaagaaagcattaagacttattcagtcagagctataagagatgatagaaaaaagccttcacttcaaagaagtcaaatttcatgaagaaaacctctggcacattgacaaatactaaatgtgcaagtatatagattttgtaatattactatttagtttttttaatgtgtttgcaatagtcttattaaaataaatgttttttaaatctgagactgaaaaaaaaaaaaaa

SEQ ID NO: 405456 - DNA, 1000 bp, Homo Sapiens; identical to SEQ ID NO: 118859

SEQ ID NO: 405457 - DNA, 1000 bp, Homo Sapiens
tgtagtcccagctactcaggaggctaagcaaaaggatggcttgagcccaagagttcagagcagcctggccaccatagtgagatcccttctcttaaaaataataggttattgccagatttggggcatttagaaagaagtgcattgaagataaagcaaaagtaaaaaaaaaaaaaaacaaaaaaaaacaagggggaagggttggttaggcaataattaattctagggcaggaagaagtacaggataggaagtaagagcatcatacgctgtttttctcaacaatgggcaatatgtacatagtcataatgatgtggtgactgactgcttagcccctaaatctggtaactactttgggacaatatggggggaaaagtgaagatagtgatggtgtaagagctaaatcctcatctgtcatatcaagaaatcactatataatgtataacataatcaagaaatgactaagtagttatgtgaagaaaagaatggaacattgctagaagagttagaagtcattgctccagagaattaggagggatggggcaggggactgttaggatgcattataaactgaagaggcttttaaagattacatgtattaatatatgtattcacttgaaaaactaaaaaaatagtaattttttaaaacccatggaggtaactaccagaaggaaaaactaagagaatgaaaagtgctttcctctggaaagaacaagtcgcaggactgttttcattgtaagacttttggagccatttgattttacttaaccattttcatatatttctttaataaaaataattctatcttaataaaaagttacactcattcattaaaaaaagaattttaagactgtaataagaatcatagtttatttctgttagagaaaggcaatgtgttatacttggaaagaggtcatattaattttatcacatttttgggactcagcatctttatattttctgattttaaataaacaactttgcttacgaaaaaaaaaaaaaaaa

SEQ ID NO: 405458 - DNA, 1000 bp, Homo Sapiens; identical to SEQ ID NO: 293436

SEQ ID NO: 405459 - DNA, 1000 bp, Homo Sapiens; identical to SEQ ID NO: 118860

SEQ ID NO: 405460 - DNA, 1000 bp, Homo Sapiens
atctttctttggctctcatcagcaataaaagactgacacatttgtgcttggcagacaatgtcttgggtgatggtggagtaaagcttatgagtgatgccctgcaacatgcacaatgtactctgaagagccttgtgctgaggcgttgccatttcacttcacttagcagtgaatatctgtcaacttctcttctacacaacaagagcctgacgcatctggatctaggatcaaactggctacaagacaatggagtgaagcttctgtgtgatgtctttcggcatccaagctgtaatcttcaggacttggaattgatgggctgtgttctcactaatgcatgttgtctggatctggcttctgttattttgaataacccaaacctgaggagcctggaccttgggaacaacgatttgcaggatgatggagtgaaaattctgtgtgatgctttgagatatccaaactgtaacattcagaggctcgggttggaatactgtggtttgacatctctctgctgtcaagatctctcctctgctcttatctgcaacaaaagactgataaaaatgaatctgacacagaataccttaggatatgaaggaattgtgaagttatataaagtcttgaagtctcctaagtgtaaactacaagttctagggttgtgcaaagaggcatttgatgaggaagcccagaagctgctggaagctgtgggagttagcaatccacacttaatcattaagccagattgtaactatcataatgaagaagatgtgtcttggtggtggtgtttctgatttgaagaaactgacattcctttaaaaatataaatataaatacatacatacatagatatatacccagacttgggtgcttagcttcagatactctatgcccagagatagtgcacttggcagctgtcagataccattcatctacttctctgtaaaatgtctgttctacttcacacagtggtcgagaggctaaaataaaatgaaaagcataaaactctctg

SEQ ID NO: 405461 - DNA, 1000 bp, Homo Sapiens; identical to SEQ ID NO: 293439

SEQ ID NO: 405462 - DNA, 1000 bp, Homo Sapiens; identical to SEQ ID NO: 224447

SEQ ID NO: 405463 - DNA, 1000 bp, Homo Sapiens; identical to SEQ ID NO: 293441

SEQ ID NO: 405464 - DNA, 1000 bp, Homo Sapiens; identical to SEQ ID NO: 293442

SEQ ID NO: 405465 - DNA, 1000 bp, Homo Sapiens
gaggtcaccacagccctccccagcgctctgtaggctctcagctttgtgcttcctcccacgggtactagctccagctgagcttgcaggaaacccacttcctgaagccaggacttccccatgggaagtgcaggggccactgggcagcctgagggctgaccctgctcaggacactgtctgtctcaggaactcatggcagtggtttaccttgtcaggagtgcatggacgggctgcccctcccattccttcaagcatcactcagagagccctggcctggctctaggcttgggactgcggctgccacaggaagggggcatccccctactttgggtgttgggtcagatcctgcccccgtgcccgccagggctcaggttcctctgagctggtcctgggccaggacgcatctgcatggcggtggtggggaggaggggtgcgccatggcctggaggggagtgtgtgttggggtgtgtgtgtggaggttcttttgagtcacacacaaagcattgtgctgagacactgcattcctgctggctgggcttcctgtttccagatgcattcctgtcccagagtcaccacagagactgtttggaatcccgccccacattctccaaattcagggcgcgatctggcaaaggctccctcccccaccctcttactttggagggagtctgggctccctcctacccagggagggctggcagggctctggcacggccggggtgtgattccacacatcttcttggtcttgcataaggcagttcctggagacccagcactctggttctctctctgcctgtgagaagcggaatgggtactgtctaggaggactgggcagggtgggggcaacccagaggacccatggctagcagggaagggcctgggcttgaatgtgactctgttgagacatggccagcaattctggcacttggctgtcattcggctggcctgcgcagagattggctgtgggcctcagtttccccattttataaagttttaaaatctg

SEQ ID NO: 405466 - DNA, 1000 bp, Homo Sapiens
acggctcctgggccgggatccggctcccggcccacccaggccaagctgctggctaagaagcgcgtggtgcgaatgttgctggtgatcgttgtgcttttttttctgtgttggttgccagtttatagtgccaacacgtggcgcgcctttgatggcccgggtgcacaccgagcactctcgggtgctcctatctccttcattcacttgctgagctacgcctcggcctgtgtcaaccccctggtctactgcttcatgcaccgtcgctttcgccaggcctgcctggaaacttgcgctcgctgctgcccccggcctccacgagctcgccccagggctcttcccgatgaggaccctcccactccctccattgcttcgctgtccaggcttagctacaccaccatcagcacactgggccctggctgaggagtagaggggccgtgggggttgaggcagggcaaatgacatgcactgacccttccagacatagaaaacacaaaccacaactgacacaggaaaccaacacccaaagcatggactaaccccaacgcacaggaaaaggtagcttacctgacacaagaggaataagaatggagcagtacatgggaaaggaggcatgcctctgatatgggactgagcctggcccatagaaacatgacactgaccttggagagacacagcgtccctagcagtgaactatttctacacagtgggaactctgacaagggctgacctgcctctcacacacatagattaatggcactgattgttttagagactatggagcctggcacaggactgactctgggatgctcctagtttgacctcacagtgacccttcccaatcagcactgaaaataccatcaggcctaatctcatacctctgaccaacaggctgttctgcactgaaaaggttcttcatccctttccagttaaggaccgtggccctgccctctccttccttacccaaactgttcaagaaataataaattgtttggcttcctcctga

SEQ ID NO: 405467 - DNA, 1000 bp, Homo Sapiens; identical to SEQ ID NO: 118861

SEQ ID NO: 405468 - DNA, 1000 bp, Homo Sapiens; identical to SEQ ID NO: 293445

SEQ ID NO: 405469 - DNA, 900 bp, Homo Sapiens
atgatgtgttttctgctcatcatttcatcaattctggtagtgtttgcatttgttcttggaaatgttgccaatggcttcatagccctagtaaatgtcattgactgggttaacacacgaaagatctcctcagctgagcaaattctcactgctctggtggtctccagaattggtttactctgggtcatgttattcctttggtatgcaactgtgtttaattctgctttatatggtttagaagtaagaattgttgcttctaatgcctgggctgtaacgaaccatttcagcatgtggcttgctgctagcctcagcatattttgtttgctcaagattgccaatttctccaaccttatttctctccacctaaagaagagaattaagagtgttgttctggtgatactgttggggcccttggtatttttgatttgtaatcttgctgtgataaccatggatgagagagtgtggacaaaagaatatgaaggaaatgtgacttggaagatcaaattgaggaatgcaatacacctttcaagcttgactgtaactactctagcaaacctcataccctttactctgagcctaatatgttttctgctgttaatctgttctctttgtaaacatctcaagaagatgcggctccatagcaaaggatctcaagatcccagcaccaaggtccatataaaagctttgcaaactgtgacctccttcctcatgttatttgccatttactttctgtgtataatcacatcaacttggaatcttaggacacagcagagcaaacttgtactcctgctttgccaaactgttgcaatcatgtatccttcattccactcattcatcctgattatgggaagtaggaagctaaaacagacctttctttcagttttgtggcagatgacacgctga

SEQ ID NO: 405470 - DNA, 1000 bp, Homo Sapiens
aaagcaacaaaagagaacactctccaaaataatctgagatgcatgaaaggcaaacattcactagagctggaatttccctaagtctatgcagggataagtagcatatttgaccttcaccatgattatcaagcacttctttggaactgtgttggtgctgctggcctctaccactatcttctctctagatttgaaactgattatcttccagcaaagacaagtgaatcaagaaagtttaaaactcttgaataagttgcaaaccttgtcaattcagcagtgtctaccacacaggaaaaactttctgcttcctcagaagtctttgagtcctcagcagtaccaaaaaggacacactctggccattctccatgagatgcttcagcagatcttcagcctcttcagggcaaatatttctctggatggttgggaggaaaaccacacggagaaattcctcattcaacttcatcaacagctagaatacctagaagcactcatgggactggaagcagagaagctaagtggtactttgggtagtgataaccttagattacaagttaaaatgtacttccgaaggatccatgattacctggaaaaccaggactacagcacctgtgcctgggccattgtccaagtagaaatcagccgatgtctgttctttgtgttcagtctcacagaaaaactgagcaaacaaggaagacccttgaacgacatgaagcaagagcttactacagagtttagaagcccgaggtaggtggagggactagaggacttctccagacatgattcttcatagagtggtaatacaatttatagtacaatcacattgctttgattttgtgtatatatatatttatctgagttttaagattgtgcatattgaccacaattgtttttattttgtaatgtggctttatatattctatccattttaaattgtttgtatgtcaaaataaattcattaatatggttgattcttcaaaaaaaaaaaaaaaaaaaaaaaaaaaaa

SEQ ID NO: 405471 - DNA, 1000 bp, Homo Sapiens; identical to SEQ ID NO: 224449

SEQ ID NO: 405472 - DNA, 1000 bp, Homo Sapiens
gaaaccctgtctgtttactgtaaccttttgcactcaaattcctttatcaggaataactacatagccactatttacaaagccattggaacctttttatttggtgcagctgctagtcagtccctgactgacattgccaagtattcaataggcagactgcggcctcacttcttggatgtttgtgatccagattggtcaaaaatcaactgcagcgatggttacattgaatactacatatgtcgagggaatgcagaaagagttaaggaaggcaggttgtccttctattcaggccactcttcgttttccatgtactgcatgctgtttgtggcactttatcttcaagccaggatgaagggagactgggcaagactcttacgccccacactgcaatttggtcttgttgccgtatccatttatgtgggcctttctcgagtttctgattataaacaccactggagcgatgtgttgactggactcattcagggagctctggttgcaatattagttgctgtatatgtatcggatttcttcaaagaaagaacttcttttaaagaaagaaaagaggaggactctcatacaactctgcatgaaacaccaacaactgggaatcactatccgagcaatcaccagccttgaaaggcagcagggtgcccaggtgaagctggcctgttttctaaaggaaaatgattgccacaaggcaagaggatgcatctttcttcctggtgtacaagcctttaaagacttctgctgctgctatgcctcttggatgcacactttgtgtgtacatagttacctttaactcagtggttatctaatagctctaaactcattaaaaaaactccaagccttccaccaaaacagtgccccacctgtatacatttttattaaaaaaatgtaatgcttatgtataaacatgtatgtaatatgctttctatgaatgatgtttgatttaaatataatacatattaaaatgtatgggagaaccaaaaaaaaaaaaaaaaaa

SEQ ID NO: 405473 - DNA, 1000 bp, Homo Sapiens; identical to SEQ ID NO: 293447

SEQ ID NO: 405474 - DNA, 834 bp, Homo Sapiens
atggacactaaccgcccgggcgcgttcgtgctgagcagtgccccgctggccgcgctgcacaacatggccgagatgaagacgtcgctgttcccctacgcgctgcagggtccggccggcttcaaggcgcccgcgctggggggcctgggcgcgcagctcccgctcgggaccccgcacggcatcagcgacatcctgggccggcccgtgggcgcggcgggcgggggcctcctgggggggctgccccggctcaacgggctcgcgtcgtccgccggcgtttacttcgggcccgcggccgctgtggcgcgcggctaccccaagcccctggccgagctgccggggcgcccgcccatcttctggcccggcgtggtgcagggcgcgccctggagggacccgcgtctggctggcccggccccggccggcggcgtcctggacaaggacgggaagaagaagcactcgcgcccgaccttctcgggccagcagatcttcgcgctggagaaaaccttcgagcagaccaagtacctggcgggcccggagcgcgcgcgtctcgcctactcgctgggcatgaccgagagccaggtgaaggtctggttccagaaccgccggaccaagtggcgcaagcggcacgcggcggagatggcgtcggccaagaagaagcaggactcggacgccgagaagctgaaggtgggcggctcggacgcggaggacgacgacgaatacaaccggcccctggaccccaactcggacgacgagaagatcacgcggctgctcaagaagcacaaaccctcgaacttggcgctggtcagcccgtgcggcggcggcgcgggggacgccttgtga

SEQ ID NO: 405475 - DNA, 1000 bp, Homo Sapiens; identical to SEQ ID NO: 293448

SEQ ID NO: 405476 - DNA, 1000 bp, Homo Sapiens; identical to SEQ ID NO: 224450

SEQ ID NO: 405477 - DNA, 1000 bp, Homo Sapiens; identical to SEQ ID NO: 224451

SEQ ID NO: 405478 - DNA, 1000 bp, Homo Sapiens; identical to SEQ ID NO: 286097

SEQ ID NO: 405479 - DNA, 1000 bp, Homo Sapiens; identical to SEQ ID NO: 224452

SEQ ID NO: 405480 - DNA, 1000 bp, Homo Sapiens; identical to SEQ ID NO: 118862

SEQ ID NO: 405481 - DNA, 1000 bp, Homo Sapiens; identical to SEQ ID NO: 285564

SEQ ID NO: 405482 - DNA, 1000 bp, Homo Sapiens; identical to SEQ ID NO: 293453

SEQ ID NO: 405483 - DNA, 1000 bp, Homo Sapiens; identical to SEQ ID NO: 293454

SEQ ID NO: 405484 - DNA, 1000 bp, Homo Sapiens; identical to SEQ ID NO: 293455

SEQ ID NO: 405485 - DNA, 1000 bp, Homo Sapiens; identical to SEQ ID NO: 293456

SEQ ID NO: 405486 - DNA, 1000 bp, Homo Sapiens; identical to SEQ ID NO: 118863

SEQ ID NO: 405487 - DNA, 1000 bp, Homo Sapiens; identical to SEQ ID NO: 293458

SEQ ID NO: 405488 - DNA, 1000 bp, Homo Sapiens; identical to SEQ ID NO: 118864

SEQ ID NO: 405489 - DNA, 1000 bp, Homo Sapiens; identical to SEQ ID NO: 224455

SEQ ID NO: 405490 - DNA, 1000 bp, Homo Sapiens
tcacccttgtcctcacccttaccctctactctcattctgggtgttccagaagatgaggatatgcctgctgctgggatgccacctcttccccagagtcctcctgagattcctccccagggtcctcccaagatctctccccagggtcctccgcagagtcctccccagagtcctctagactcctgctcatcccctcttttgtggacccgattggatgaggagtccagcagtgaagaggaggatacagctacttggcatgccttgccagaaagtgaatccttgcccaggtatgccctggatgaaaaggtggctgagttggtgcagtttcttctcctcaaatatcaaacaaaagagcctgtcacaaaggcagagatgctgacgactgtcatcaagaagtataaggactattttcccatgatcttcgggaaagcccatgagttcatagagctaatttttggcattgccctgactgatatggaccccgacaaccactcctatttctttgaagacacattagacctcacctatgagggaagcctgattgatgaccagggcatgcccaagaactgtctcctgattcttattctcagtatgatcttcataaagggcagctgtgtccccgaggaggtcatctgggaagtgttgagtgcaataggggtgtgtgctgggagggagcactttatatatggggatcccagaaagctgctcactatacattgggtgcagagaaagtacctggagtaccgggaggtgcccaacagtgctcctccacgttatgaatttttgtggggtccaagagcccattcagaggccagcaagagaagtcttagagtttttatccaagctatccagtatcatccctagtgcctttccatcctggtacatggatgctttgaaagatatggaagacagagcccaggccataattgacaccacagatgatgctactgccatggccagtgcaagccccagtgtcatgtccaccaacttctgtcctgagtga

SEQ ID NO: 405491 - DNA, 1000 bp, Homo Sapiens
ttatttttctttctcacattggaaaaaatgaaaactttcggacccatgaaattttattacattttgccaaaaacagaaccaataacataagtattcaaagttatgtaaagataattatttaatatgaacattatgatggtgagagggaccacggagcaaggggctgccttgcaggcctgccttccagctttgctacagggaccagaagcgggagctgagcgcaggggaggcaggcggaggccatgggcagcgaggcgggtgcgccaaagggcgccagttccggagctgctgggcctgggctgcaggagggcggagctggggccgcaaggctggtgccggccgacaaacgacgcggcgcgggcgagtgggcggaggcggctgcggggaaggctgggctgccgcgggacgcggtgaagatagcctgcggagtgtccgggctgaacacggttgcagcactcccagtagaccaggagctccgggaggcagggccggccccacgtcctctgcgcaccaccctgagttggatcctctgtgcgccacctgagttggatccagggctagctgctgttgacctccccactcccacgctgccctcctgcctgcagccatgacgcccctgctcaccctgatcctggtggtcctcatgggcttacctctggcccaggccttggactgccacgtgtgtgcctacaacggagacaactgcttcaaccccatgcgctgcccggctatggttgcctactgcatgaccacgcgcacctactacacccccaccaggatgaaggtcagtaagtcctgcgtgccccgctgcttcgagactgtgtatgatggctactccaagcacgcgtccaccacctcctgctgccagtacgacctctgcaacggcaccggccttgccaccccggccaccctggccctggcccccatcctcctggccaccctctggggtctcctctaaagcccccgaggcagacccactcaagaacaaagctctcgagac

SEQ ID NO: 405492 - DNA, 894 bp, Homo Sapiens
ggcggcgctatgctgtcctgcttcaggctcctctccaggcacatcagcccttcgctggcgtctctgcgcccggtgcgctgctgcttcgcgctcccgctgcgttgggccccggggcgccccttggaccccaggcagatcgccccccgccgccccctggccgcagccgcctcctcccgggaccctaccgggcccgccgccggcccctctcgggtgcgccagaacttccaccccgactccgaggctgccatcaaccgccagatcaacctcgagctctatgcgtcctacgtgtacttgtccatggcctattacttctcccgggatgacgtggccttgaacaacttctccaggtatttccttcaccagtcccgggaggagaccgagcacgcggagaagctgatgaggctgcagaaccagcgaggaggccggatccgcctgcaggacatcaagaagccggaacaggacgactgggaaagcgggctgcatgccatggagtgtgctctactcttggaaaagaacgtgaaccagtcgttgctggaattgcacgctctagcctcagataaaggtgacccccatttgtgcgatttcctggaaacctactacctgaatgagcaggtgaagtctatcaaagaactaggtgaccacgtgcacaacttagtgaagatgggggccccggatgctggcctggcggagtacctttttgacacacatacccttggaaatgaaaacaagcagaactaagccacgagctgccttcctcccaggctagtggatccaaagaccaaagtcagctgtctcctgctttcttgcccttaaaatcacctccatctttatattcttctgttatactattcctccaataaagtgatttgtagaaaaaaaaaaaaaaaaaaaaaa

SEQ ID NO: 405493 - DNA, 1000 bp, Homo Sapiens
atgttgggttctctctgccatagaggttcaccgtgtggcctttcaacacacgtagaaataggacacagagctctggagtttcttcagcttcacaatgggcgtgttaactacagagagctgttactagaacaccaggatgcgtatcaggctggaatcgtgtttcctgattgtttttaccctagcatctgcaaaggaggaaaattccatgatgtgtctgagagcactcactggactccgtttcttaatgcaagcgttcattatatccgagagaactatccccttccctgggagaaggacacagagaaactggtagctttcttgtttggaattacttctcacatggcggcagatgtcagctggcatagtctgggccttgaacaaggattccttaggaccatgggagctattgattttcacggctcctattcagaggctcattcggctggtgattttggtactgtttatttacatttgctaaattttctcgtggtatagttcacttataatgacatcactactgtgctttaaatatgtgtgtctttaatattttgctggttgcatgtattttctatttaatgttgcagttcatttagagtagagatgtacctcatttaacatagagatgtatttctaaaaacttgtgtctatatgtatttttttgttaaaaaattctacactttgttgttgacatgtcataattttagaaaaactttacttatacattgggttaaaattcattagctagtgtctcctactttcctaatactttagctttaaactagtaaactccaccttttgcctgtagtagtaaattgcttttaaatatttaaactaggtggtgaatggtgtttattaaacccttatggtcgatatttccttaaagtaaaacaaaaaacacctttggttatatggccagttctttcttaatttatatgtttcactaactaagatttttaaaagataattttttcttaaaaaaaaaaaaaaaaaaaaaaaaaaa

SEQ ID NO: 405494 - DNA, 1000 bp, Homo Sapiens
actgatgcagaaagacgttcttttgcataaaagacttttttttaacactttggacttctctgaaatatttagaagtgctaatttctggcccacccccaacaggaattctatagtaaggaggaggagaaggggggctccttccctctcctcgaatgacgttatgggcacatgccttttaaaagttctttaagcaacacagagctgagtcctctttgtcatacctttggatttagtgtttcatcagctgtttttagttataaacattttgttaaaatagatattggtttaaatgatacagtattttaggtatgatttaagactatgatttacctatacattatatatattttataaagatactaaaccagcatacccttactctgccagagtagtgaagctaattaaacacatttggtttctgaataaattgaactaaatccaaactatttcctaaaatcacaggacattaaggaccaatagcatctgtgccagagatgtactgttattagctgggaagaccaattctaacagcaaataacagtctgagactcctcatacctcagtggttagaagcatgtctctcttgagctacagtagaggggaagggattgttgtgtagtcaagtcaccatgctgaatgtacactgattcctttatgatgactgcttaactccccactgcctgtcccagagaggctttccaatgtagctcagtaattcctgttactttacagacaggaaagttccagaaactttaagaacaaactctgaaagacctatgagcaaatggtgctgaatactttttttttaaagccacatttcattgtcttagtcaaagcaggattattaagtgattatttaaaattcgtttttttaaattagcaacttcaagtataacaactttgaaactggaataagtgtttattttctattaataaaaatgaattgtgacaaaaaaaaaaaaaaaaaaaaaaaaaaaaaaaaaaaaaaaaaaaaaaaaaa

SEQ ID NO: 405495 - DNA, 1000 bp, Homo Sapiens; identical to SEQ ID NO: 293461

SEQ ID NO: 405496 - DNA, 1000 bp, Homo Sapiens; identical to SEQ ID NO: 293462

SEQ ID NO: 405497 - DNA, 1000 bp, Homo Sapiens; identical to SEQ ID NO: 293463

SEQ ID NO: 405498 - DNA, 840 bp, Homo Sapiens
gtcacgcgcccgcccgaaggctcctgtcgggacagggcgccgccccgtgtcggcccccgcctgtccgggcgccgccatggagcgcatcgagggggcgtccgtgggccgctgcgccgcctcaccctacctgcggccgctcacgctgcattaccgccagaatggtgcccagaagtcctgggacttcatgaagacgcatgacagcgtgaccgttctcttattcaactcttctcggaggagcctggtgttggtgaagcagttccggccagctgtgtatgcgggtgaggtggagcgccgcttcccagggtccctagcagctgtagaccaggacgggcctcgggagctacagccagccctgcccggctcagcgggggtgacagttgagctgtgtgccggcctcgtggaccagcctgggctctcgctggaggaagtggcttgcaaggaggcttgggaggagtgtggctaccacttggccccctctgatctgcgccgggtcgccacatactggtctggagtgggactgactggctccagacagaccatgttctacacagaggtgacagatgcccagcgtagcggtccaggtgggggcctggtggaggagggtgagctcattgaggtggtgcacctgcccctggaaggcgcccaggcctttgcagacgacccggacatccccaagaccctcggcgtcatctttggtgtctcatggttcctcagccaggtggcccccaacctggatctccagtgagactccagggttctagacagaggccagtcttggccactcaccccacaccccgcggaccccaataaaggcttgcatagctccaaaaaaaaaaaaaa

SEQ ID NO: 405499 - DNA, 1000 bp, Homo Sapiens; identical to SEQ ID NO: 224456

SEQ ID NO: 405500 - DNA, 1000 bp, Homo Sapiens
gctgtatgatgtgtgttctgactctgccaatgtgtatgccacgctgagagtgctctccctgccagggcaacaccacatagagctccaaggagaccttctccactattcccctacggtgctggcagtgattgggcctgacagcaccaaccgtgctgccaccacagccgccctgctgagccctttcctggtgcccatgcttttggagcagatccacaaggtgcatttccttctacacaaggacactgtggcgtttaatgacaacagagatcccctcagtagctataacataattgcctgggactggaatggacccaagtggaccttcacggtcctcggttcctccacatggtctccagttcagctaaacataaatgagaccaaaatccagtggcacggaaaggacaaccaggtgcctaagtctgtgtgttccagcgactgtcttgaagggcaccagcgagtggttacgggtttccatcactgctgctttgagtgtgtgccctgtggggctgggaccttcctcaacaagagtgctacctgggtaaggacttgccagagaactacaacgaggccaaatgtgtcaccttcagcctgctcttcaacttcgtgtcctggatcgccttcttcaccacggccagcgtctacgacggcaagtacctgcctgcggccaacatgatggctgggctgagcagcctgagcagcggcttcggtgggtattttctgcctaagtgctacgtgatcctctgccgcccagacctcaacagcacagagcacttccaggcctccattcaggactacacgaggcgctgcggctccacctgaccagtgggtcagcaggcacggctggcagccttctctgccctgagggtcgaaggtcgagcaggccgggggtgtccgggaggtctttgggcatcgcggtctggggttgggacgtgtaagcgcctgggagagcctagaccaggctccgggctgccaataaagaagtgaaatgcgtaaaaaaaaa

SEQ ID NO: 405501 - DNA, 1000 bp, Homo Sapiens
gtgtacacagaccggctctattctcgctcggacttcaacaactacgtggctgctgtatacaaggtgctggggaccttcctgtttggggctgccgtgagccagtctctgacagacctggccaagtacatgattgggcgtctgaggcccaacttcctagccgtctgcgaccccgactggagccgggtcaactgctcggtctatgtgcagctggagaaggtgtgcaggggaaaccctgctgatgtcaccgaggccaggttgtctttctactcgggacactcttcctttgggatgtactgcatggtgttcttggcgctgtatgtgcaggcacgactctgttggaagtgggcacggctgctgcgacccacagtccagttcttcctggtggcctttgccctctacgtgggctacacccgcgtgtctgattacaaacaccactggagcgatgtccttgttggcctcctgcagggggcactggtggctgccctcactgtctgctacatctcagacttcttcaaagcccgacccccacagcactgtctgaaggaggaggagctggaacggaagcccagcctgtcactgacgttgaccctgggcgaggctgaccacaaccactatggatacccgcactcctcctcctgaggccggaccccgcccaggcagggagctgctgtgagtccagctgaggcccacccaggtggtccctccagccctggttaggcactgagggctctggacgggctccaggaaccctgggctgatgggagcagtgagcgggctccgctgccccctgccctgcactggaccaggagtctggagatgcctgggtagccctcagcatttggaggggaacctgttcccgtcggtccccaaatatccccttctttttatggggttaaggaagggaccgagagatcagatagttgctgttttgtaaaatgtaatgtatatgtggtttttagtaaaatagggcacctgtttcacaaaaaaaaaaaaaaaaaaa

SEQ ID NO: 405502 - DNA, 1000 bp, Homo Sapiens; identical to SEQ ID NO: 293464

SEQ ID NO: 405503 - DNA, 1000 bp, Homo Sapiens; identical to SEQ ID NO: 224457

SEQ ID NO: 405504 - DNA, 1000 bp, Homo Sapiens
ttggtcatgacaaggggaccctcataatggcctgtatccacttctccagtatagtcagtttagttcatatgttctgaaaactgttttggagaaagatagacagaaaaatgtcatcatattgaaaaatgttcaaagagtagcactatttatttttaatgcttctgtagaatatgacctattaaaagaaaatctaaactcaaatttaaattatccaaattttaggcaaattattatttctcaatatgcgaacacagtatttagaacacaatattagaaacacaattctaactaaagataaataaggagaaaacatttaggatttgcagataagtcaacagaaagtgcctgctttacactcatgagtaaaagcactccagacatttttataattgcaagatttttatgctttttttttttttttttacaaaatgatgattagtgtgataatgtgctgcaaaaaatatccaacagcactacacataagtacagagtattcacaatagtaatatgttactggaaaggccacttccgaaaagtttacattcacttggaaggctgccttaaagtatatctcttatctatgaccaaatatctggggtacttttagaagttttcagtacacccccttagagaatagcttatgagttatttcacacattcctgagcacatggctgtgtttagaatgatctagtgtaattcatacatgagctgacatacgttgatactttgacgagtaaattgtacagtcaaatgttcattgatttcatgttatttcaaagcattttcttattaaaaatatatctttagttaatcctattttgctatgctttctagtaaagtaaattcactgtagctaatgatgttacagacttacgtatacccttgtatacctgggacagggctgttttataccaataaacagcaaaatattgtccttactcattcaagaattaaaaggataaattttaaaaatgttaaaaaaaaaaaaaaaaaaaaaaa

SEQ ID NO: 405505 - DNA, 1000 bp, Homo Sapiens
ccaagcatctgaatggggatgagagaagtggcagtaattacaggcggatcccatggggccggaggcctgcaccaccgcgagatgtggccattttacaagaaagggctaataagttggtgaaatacctgttggttaaggaccagacaaagatccccatcaaacgctcagacatgctgagggatgtcatccaagaatatgatgaatatttcccagaaatcattgaacgagcaagctacactctggagaagatgtttcgagtcaatctgaaagaaattgataagcaaagtagcttgtatattctcatcagcactcaggaatcctctgcaggcatactgggaacgaccaaggacacacccaagctgggtctcctcatggtgattctgagtgtcatttttatgaatggcaacaaggccagtgaggctgtcatctgggaggtgctgcgcaagttggggctgcgccctggggtgaggcattcactctttggggaagtgaggaagctcatcacagacgagtttgtgaagcagaagtacctggagtacaagagggtccctaacagcagaccacctgaatatgagttcttctggggcttgcgctcctaccacgagactagcaagatgaaagtcctcaagtttgcatgcagggtgcagaagaaagaccccaaggactgggctgtgcagtaccgcgaggcagtggagatggaagtccaagctgcagctgtggctgtggctgaggctgaagccagggctgagatttattccccatgtttacagataccgctaataaattgcagtagtccttcccatggagccaaagtacatccttggaatctttgtccacacagcagtcaaggcagttatggccaatcagctgagggtgtcatgtgatggaaaaatctgtttgctgttcctgctttattgtttgctttctgtgtgctgtcatattttggtatcagagttacattaaatttgcaaaatgaaaaaaaaaaaaaaaaaaaaaaaaa

SEQ ID NO: 405506 - DNA, 1000 bp, Homo Sapiens
gcggcaggttctctttgagtcaaaagcttgtcttcgtccatctgttgacaaatgacagacctttttttttcccccatcagttgatttttcttatttacagataacttctttaggggaagtaaaacagtcatctagaattcactgagttttgtttcactttgacatttggggatctggtgggcagtcgaaccatggtgaactccacctccgtggaataaatggagattcagcgtgggtgttgaatccagcacgtctgtgtgagtaacgggacagtaaacactccacattcttcagtttttcacttctacctacatatttgtatgtttttctgtataacagccttttccttctggttctaactgctgttaaaattaatatatcattatctttgctgttattgacagcgatataattttattacatatgattagagggatgagacagacattcacctgtatatttcttttaatgggcacaaaatgggcccttgcctctaaatagcactttttggggttcaagaagtaatcagtatgcaaagcaatcttttatacaataattgaagtgttccctttttcataattactgtacttcccagtaaccctaaggaagttgctaacttaaaaaactgcatcccacgttctgttaatttagtaaataaacaagtcaaagacttgtggaaaataggaagtgaacccatattttaaattctcataagtagcattcatgtaataaacaggtttttagtttgttcttcagattgatagggagttttaaagaaattttagtagttactaaaattatgttactgtatttttcagaaatcaaactgcttatgaaaagtactaatagaacttgttaacctttctaaccttcacgattaactgtgaaatgtacgtcatttgtgcaagaccgtttgtccacttcattttgtataatcacagttgtgttcctgacactcaataaacagtcattggaaagagtgccagtcagcagtcatgca

SEQ ID NO: 405507 - DNA, 1000 bp, Homo Sapiens; identical to SEQ ID NO: 293468

SEQ ID NO: 405508 - DNA, 1000 bp, Homo Sapiens; identical to SEQ ID NO: 293469

SEQ ID NO: 405509 - DNA, 1000 bp, Homo Sapiens
catgaataacctgagtgagaattatgaaaatcagggccggcttcaggtgtacatgaataaagtgatggatgatatcatggcctctaacctgaactcagcagttcaagtagttggactaaaatttctaacaaacatgactattactaatgactaccagcacctgcttgtcaattccattgcaaactttttccgtttgctatctcagggaggtggaaaaatcaaggttgagattttgaaaatcctttcgaattttgctgaaaatccagatatgttgaagaaacttctcagtacccaagtgccagcatcatttagttccctctataattcttacgtggaatcagaaatccttattaatgcccttactctatttgagattatctatgacaatctcagagcagaagtgtttaactatagagaattcaataaaggttcccttttttacttatgcactacatctggagtgtgtgttaagaaaattagagccttagcaaatcaccatgacctcttagtgaaagtgaaagttataaaactagtgaacaaattctgattggttatgtaccgtcaaaagacttgaagaaatttcatgattttgcagtgtggaagcgttgaaaattgaaagttactgcttttccacttgctcatatagtaaagggatcctttcagctgccagtgttgaataatgtatcatccagagtgatgttatctgtgacagtcaccagctttaagctgaaccattttatgaataccaaataaatagacctcttgtactgaaaacatatttgtgactttaatcgtgctgcttggatagaaatatttttactggttcttctgaattgacagtaaacctgtccattatgaatggcctactgttctattatttgttttgacttgaatttatccaccaaagacttcatttgtgtatcatcaataaagttgtatgtttcaactgacaaaaaaaaaaaaaaaaaaaaaaaaaaaaaaaaaaaaaaaaaaaaaaaaa

SEQ ID NO: 405510 - DNA, 1000 bp, Homo Sapiens; identical to SEQ ID NO: 293470

SEQ ID NO: 405511 - DNA, 781 bp, Homo Sapiens
cgcagaaaggcacaggactcgctaagtgttcgctacgcggggctaccggatcggtcggaaatggctgaagtggagagatcgcctgagcccaggaggtcaaggctacagtgagccgtgactgcaccactgcactccaccctgggcagaggtggaggagacactgaagcgactgcagagccagaagggagtgcagggaatcatcgtcgtgaacacagaaggcattcccatcaagagcaccatggacaaccccaccaccacccagtatgccagcctcatgcacagcttcatcctgaaggcacggagcaccgtgcgtgacatcgacccccagaacgatctcaccttccttcgaattcgctccaagaaaaatgaaattatggttgcaccagataaagactatttcctgattgtgattcagaatccaaccgaataagccactctcttggctccctgtgtcattccttaatttaatgccccccaagaatgttaatgtcaatcatgtcagtggactagcacatggcagtcgcttggaacccactcacaccaatccagtgaccgtgtgtgggctggcggctcttctcccccaccaacggaacccctgtgtgcaccaaccttccccagagctccggagcgccctctcctcacttccaggttttggagcaagagcttgcaggaagcccgcacccagcttccttctgaccttcagttcactttgtcgcccttggagaaagctgtttttctttaactaaaaataaccaaaatgcttaaaaaaaaaaaaaaaaaa

SEQ ID NO: 405512 - DNA, 1000 bp, Homo Sapiens; identical to SEQ ID NO: 293472

SEQ ID NO: 405513 - DNA, 1000 bp, Homo Sapiens
tttagcttatttttccctcttttgttcatttaactatcaaaagttattttctattttgattacccaataatatataaaaagagtttgatgcacccaaaatcacaaaaatcctaatacatacaggttattgttggattttccaagtactttctatcctttaatgcctaaaactccatcaagggaagtaaacagcaagtaatataatttttcaggcagcctgtggacttctctggtaggatcaggttgacatatcgtttattaggtgagtaagtgaaaagacaagtaaagcataactgaaccaacaggtaacctgttgggctccttcctgacatcactgagatctgaggagccctacaatagcagcacattcaggaaatcaggtccctcaaaatttctagctcccaaccccattgagagattttgggagctttccaatctgccacaaactccctgctacatatgtactatatagttcaaatgtgtgatacagagcaccctgaaagggaataattgaaacaaagttataatcttcttagtcttatgctaaatttattccagccaccctactgaagggaggaagatctgatcattagaatccttttcctagccatgacacatttacatacttgtaaaatttattgtagtaagtctagcattgcaacagaatagatcttataatggccaatcctcacacttttgtattaaggatattatgacagactaagcatggtagctctcgcctgtaatcccagcactttgggaggctgaggcaggcagatcagctgaggtcaggagttcaagaccagcctggccaacatgataaaacaccgtctctgctagaaatacaaaaattggctgggcgcggtggtgcatgcctgtgatcccaactactcgggaggccgaggcaggaaaatttattgaacctgggaggcggaggttgtagtgagccaaggtcgcgccactgcgctccagcctggacaacacagtgagactctgtctc

SEQ ID NO: 405514 - DNA, 1000 bp, Homo Sapiens; identical to SEQ ID NO: 293474

SEQ ID NO: 405515 - DNA, 1000 bp, Homo Sapiens
tgctgatgttcttgtgggaagagggaggttccaccgcacccctgccctcaaccgcaagactgttgccgttttagtgtggagataagtttgccattacattagcatgtattttctatctatattttttattgggcattttccctaggttggagagtcagcactcgttttgaatgtgtttaaaatgcattaaaatggaagatttctgcaggcagttgaatggcactccagatggggaattgctgtaaccctcttactgtaacatgtcatctcctgcgtcgtgatggggagagggtaatgttacttcacaaaggacatgtcagatccttcttcatggacttttttagttactgttttttctctcaaacttgttttcgaatctcctgggagtgagggagaaacagggagctgaatcctcccccaagctgttccaggccagaggactctgcagtaccttctcctacatctagtaacaaagaatggtgataaccatgcactggttcaaggttctggagttctccatgaaacttgggttaattttgctcagagtatccggagttagccactaggctgcgggtgaaatgggatggagtagaacaacagcaggcttcctggagccacatgggctgactagggcactctgtggctggcctggcacgggctcagcccaggaagaggagaaacgatcccttgcctgcccctccctgtggcagggctaactgcctggccctcctggctcgcagccagccagccccctggcagcaggttctcctcagggcttgggtcttcaacctgtggcgacaggaggcagggcagactgtggaggacaggatgcaggtcagggagagggaaggcaggggtggaccgccatgagcatgaaaagacccgaagcaagttgactcttgcaatgtgcaactgttatgttctgcaaaatgagcaacgatgtatcaaattgatgcaaatttagatgttgatacttacaataaagtttttaatgtgtttt

SEQ ID NO: 405516 - DNA, 1000 bp, Homo Sapiens; identical to SEQ ID NO: 224458

SEQ ID NO: 405517 - DNA, 1000 bp, Homo Sapiens; identical to SEQ ID NO: 224459

SEQ ID NO: 405518 - DNA, 1000 bp, Homo Sapiens; identical to SEQ ID NO: 293476

SEQ ID NO: 405519 - DNA, 1000 bp, Homo Sapiens; identical to SEQ ID NO: 118867

SEQ ID NO: 405520 - DNA, 1000 bp, Homo Sapiens; identical to SEQ ID NO: 224460

SEQ ID NO: 405521 - DNA, 1000 bp, Homo Sapiens
tctgctttttctgttgcgatgctattttgtgcttgaacctaagaggcatggatgctctgtatccaatgatgaaggccaccaaacactggtcatgtataatgcggagagcaaaggcacttcagcccagacatggtcagatgttgaaggccagaggccggctctgctcatctgcacagctgcagcaggacccacgcagggagttaaggatctcgaggaagtgcctccatctgcagcgagtcagtcagcccaagcacgctgtgctctggggagctggggttatggcaagccctttgagccaagaagtgtgaaaaacatacactctactcctgcttacccagatgccacaatgcacagacaactcctggctccggtggaaggaaggatggcagagacattgaatcagaaactccatgttgccaatgtgctggaagatgaccccggctacctacctcacgtctacagcgaggaaggggagtgtggaggggccccatccctcagctctctggccagcttggaacaggagttgcaacctgatttgctggactctttgggttcaaaagcgactccgtttgaggaaatatattcagagtcaggtgttccttcctaaaaaaaaaagtctattttggagaattgaaataattcatggaagggaatcactattcagggatttttcccctttgctcttcttttccctccttaaaagaaaaattaccttctagtcctaggatgaggacacactattagtttgaattaaatgctttgatattctcagatcagccatcttgaaccaaagcaaaaccacaagttacactttcttaaaatttgatttgtcatattttctagagaaacttgaatttaattgtgttattcttagcttccactggcagcctagctttgagggtaaatgaaaatataacccatagattacccagccacttgggaacagcaggtaatactgaagaaaaataaaaatagattttgaaaacgttaaaaaaaaaaa

SEQ ID NO: 405522 - DNA, 1000 bp, Homo Sapiens; identical to SEQ ID NO: 287786

SEQ ID NO: 405523 - DNA, 1000 bp, Homo Sapiens; identical to SEQ ID NO: 282015

SEQ ID NO: 405524 - DNA, 1000 bp, Homo Sapiens; identical to SEQ ID NO: 293479

SEQ ID NO: 405525 - DNA, 1000 bp, Homo Sapiens
caaactcttgtctatatttacctttgtaccacagtattaatcgctattgttcatgtatcgtgctggaagtctgaactgactctagaggatgaattagcaagagggtattttaccaggtatgatctgacttcagttgtgcccatgttataatgtgtttccgacataggagagtcgtgctgctgtctagatcttcttgaatgttgataaaaatgaatgactactacaatacattttgtgttgcttgttggatgaatttgcatgttaactgtaggccaatatagatttgcctttaaaactctggaagagctacatagtcatcattagtttctattaattatgcatcagacaaaagccatttgttaccaaactgggaaaacagaggcttttcttaactatttcacatactgtaacaaatatgaatttaaatttgtgatagcgctctggttgctctaagcataattaagaatttttgtaattaataggttgctaattatttatcactgctaaaaaggaaaaaaggcataaaatgaccttctactgattagattttcagttttctttcaaactggaaatgcctccataaatatgatctatgattttgcttcataaaacagcaaatcaatgttttatgtaaaatattaaagcattaatataaatatgtgagaataaaaacaatctaaatccagaaaatggcagtcctaaatgttcatgagacagattgtattaatttaaccaggactatgtagaagtagaaagaaaagaaaaagaaaatcttttttaaaccagaataaacattaaaaactattgcagaaaatagtggattttggattccaaacattttcgacagtgtaatggaaatttttctgtaattttcttaccatcgggtattttttaaagtattcattgagtttaccaaaagttactgtagcttaaaaggttttgtgagcactaactattggcagaaactgcatttgcaaataaaaataaatgtttgcctttt

SEQ ID NO: 405526 - DNA, 1000 bp, Homo Sapiens; identical to SEQ ID NO: 293481

SEQ ID NO: 405527 - DNA, 1000 bp, Homo Sapiens; identical to SEQ ID NO: 118869

SEQ ID NO: 405528 - DNA, 1000 bp, Homo Sapiens
ggcctccacaatgctctacgtcctgtggaagaacatcgggcgcaaagttgacagccatcagcaccagaagatgcagttcaagtctgatggggtcatggtgggcgcagtcctgggcctgaccgtgctggccgccaccattgctgtggtggtggtatacctgattcatattgggcgctccaagaccaagagcgagtcggcactcatcatgttctacctgtatgccatcaccctgctgatgcttatgggggctgcggggctggctggaatccggatttacaggatagacgagaagtcactggatgagtccaaaaatccggcccgcaaactggactcggacctcttggtgggcactgcctcgggctcctggcttatctcctggggctcaatcttggccatcctctgtgctgagggccacccccgctacacctggtacaacctgccctactccatcctggcgatcgtggagaagtacatccagaacctcttcatctttgaatccattcaccgagagcctgaaaaactctctgaggacatccaaacccttcgggtggtcacagtctgcaatggcaacaccatgccccttgcttcttcctgccccaagagtggaggtgtggccagagatgtggctccccagggcaaggacatgccaccagcagccaatggaaatgtgtgcatgagagaaagccatgacaaggaggaggagaagcaggaggagagcagctggggagggagcccaagcccagtccgccttccccgtttcttacagggcaacgccaagagaaaagtcctgaggaatattgcagccttcttgttcctctgcaatatttcgctttggatacctcccgcctttggctgtcgacctgagtatgacaatggattggaggagattgtctttggctttgaaccctggataattgtggtcaacctggccatgcctttttctattttctatcgaatgcacgcagctgcctccctctttgaggtctattgtaagatatag

SEQ ID NO: 405529 - DNA, 943 bp, Homo Sapiens; identical to SEQ ID NO: 224461

SEQ ID NO: 405530 - DNA, 1000 bp, Homo Sapiens
tttctgatcttggatttttgtgtgtatgtatgtatgtgattatggtactaataataggaataacgttggaccattgtgagttaaacccacatctggggatgaaatcccacatcctcccaagtgactggtctagaaataatcttgaccttgactttgcacttcaaatgacaacttaaccaagtatagggctcagaaattatatttttaaatgtctgattattattggatggatcaggtggccctgtgtaatagaggtgtgcatgtataacatggaagctactagcaaactgctcccagatgtcctttctccctggtcagttggttccattaacgtttgctacttagtgatttttgtttttcctgttgatattttgagcaaaacaatcattgttttcattgaatatatttggccattttttcagacaaatagaattagcttatttcttcaacattccatcctttcccgatcaggaaatgaaactgatgattttataaggtatttttcacccctccatgaagtgaggtggaggcctttagcatttcagaagtgtgggccatatgtagttcatgccataaaaagtaggatttaattaaaagtcattgcagcccaataaaatggagcctggctgcacccagggatccttgccactgctcttcccttgctgtcagattaatccactgaagtccaactttggttcaagcagagtatttgcaaagagcaacaactgaatgtgatgggactgcttatgtagattttgccagccaaatgccaaggcagttgtagggcctgtacaaataaatgcaaaatcatttcaagtcaattgccattatttgtattgaagtatcagatagatagtaaatactgcaactagtagcttgatgtgctatagttttcactccagtcatcattttcctatctcaccccccgaaacaccaccctaaagttggatttttacatataaataaaaaaagaatcccttttaaaaaaaaaaaaaaaaaa

SEQ ID NO: 405531 - DNA, 1000 bp, Homo Sapiens; identical to SEQ ID NO: 293484

SEQ ID NO: 405532 - DNA, 1000 bp, Homo Sapiens; identical to SEQ ID NO: 118871

SEQ ID NO: 405533 - DNA, 1000 bp, Homo Sapiens
gtgtccatctgcacatctgagttgtccatgaaggtctatgtggaccccatcaactactggaagaacggctacaacctgctggatgtgatcattatcatcgttatgtttttaccctatgccctccgccagctcatgggcaaacagttcacttacctgtatatcgctgatggcatgcagtccctgcgcatcctcaagcttatcggctatagccagggcatccggacgctgatcaccgccgtggggcagacagtctacaccgtggcctctgtgctcctcctgctcttcctcctcatgtacatcttcgctatcttgggcttctgcctgtttggatctccagacaatggtgaccatgataactgggggaacctggctgcggcttttttcaccctcttcagcttggccacggttgatggctggacagacctgcagaagcagttggacaatcgggaatttgctttgagccgggcattcaccatcatcttcatcttgctcgcctctttcatcttcctcaacatgttcgtgggtgtgatgatcatgcacacagaggactccatcagaaagtttgagcgagagctgatgttggagcagcaggagatgctcatgggagagaagcaggtgattctgcagcggcagcaggaggagatcagcaggctgatgcacatacagaaaaatgctgactgcacaagtttcagtgagctggtggagaactttaagaagaccttgagccacactgacccaatggtcttggatgattttggcactagcttacccttcatcgatatctacttttccactctggactaccaggacacaactgtccacaagcttcaagagctgtactatgagatcgtgcatgtgctgagcctaatgctggaagacttgccccaggagaagccccagtccttggaaaaggtggatgagaagtagctgggcatggggcacccatgtgccgagagccttgcagaccatgacaggtccctattaaacacaggctttctga

SEQ ID NO: 405534 - DNA, 1000 bp, Homo Sapiens
aacagggatcttctgtggacgcagcggtggcagcagccttgtgtttgggtatcgtggctccacacagttctggcctgggcggtgggggcgtgatgctggtacatgacatccgacgaaatgagagccacctaattgatttccgggagtccgcaccaggggccctcagggaagagaccctgcaaagatcctgggagaccaaggtggggaccctggtgagaagagagagttcaggggagtctctcttcattgcccttctgctaacccaagcattaatttgctaagtatttaccaggggagtgggaaaaagagttgagcaggattctcttaggctatgagagagtcaggcagcccccaagataaaataatgaactagaaaatctggaaccttacttctctgggaatcttacctatctggcacgtgggaaggaagaaaaaaggctactgagtaccctgaaatgtcacgaagttgatgcaatgaaactcacacatctcactctgagccagttgactataactttcccagcccttgatatattggaagattagaggggaattgccagaagtaaaccaactgtctgctgaaagaaaaagaagatatcgaataacttggaaaaatgggtacttagtgcggtggcaaaagccaaacacacccctgagtcttcagagctcagagtaatggtggggtgaaactgaataggttaaatgaaggtcctttgtccaccgttttaaaaggtagggttgcctgggcacagtggctcacacctgtaatcccaacactctgggaagccaaggcaggaggattgcttgaggccaggagtttgagaccagcctgagtgacatagtgagactttgtctctacaaaaaatgctttgaaattagccaggcacagtagcatgcaccaaggatcgcttgacttgagcccaggagttggaggccacagtgagctatgactatgccactgtactccagcctgggtaacaggaaaaaaaaaaaaaaaaaa

SEQ ID NO: 405535 - DNA, 1000 bp, Homo Sapiens
tagacaaccagccctctttagggtgggatttgaaaggaagggcctgcttttctccagaacacctcagaatggctccatgaatgtcttgagaacctgatatatatgccaggcacctattttggcaggtggttctgctgaatgtcctgaccttgaaccggaacctgagtgacagcctggcccgcggccgcctacacccggacctgcagtccaacctcctgcaggtggacagtgagttcacagaggaagagattgagttcctggaagccaggggtcaccacgtggagaaagtagatgtcttatcctgggtccatggcagccgaaggaccaacaacttcatcatcgctgttaaggaccctcggagcccagatgcagctggagccaccatcctgtagagcagcggggtggggcggggtctctgctcccccactttgcatgttcccagagtccctccttctcccaggtttggtctcagggggaccccagggatgccccagatcaggggccagaggggatgcttagcaaacccaatcccagagtaactggaaaattctccatcaggaggcctgtggtggtggtggtggtggtggtggtggtggtggtggtggtgagtgtcagcatctacagtacagccaggcaggcaggaccttgaggaatcagactatctgtctgtgtgtcacctctcctccttcagccatgctggccccgagcttagggatgtgcttgcaaacccttctcaagggtctcacaaccccaacatcttcagactggcctgacctgggccttgtcttccagttcctttctcccattcccagcctcatttcttaaatgactaggaattttttaatggaccatcatagggagggggtgctcctcttttcccaccaggttgaggtgggggccttgcatcgggggtccccagggtatggggtaggggtgggggtgggcaccagctcaggggcttccatttgcaaagggaaattaaagaaagaatgttgcttaa

SEQ ID NO: 405536 - DNA, 1000 bp, Homo Sapiens; identical to SEQ ID NO: 118872

SEQ ID NO: 405537 - DNA, 1000 bp, Homo Sapiens; identical to SEQ ID NO: 118873

SEQ ID NO: 405538 - DNA, 1000 bp, Homo Sapiens; identical to SEQ ID NO: 293488

SEQ ID NO: 405539 - DNA, 1000 bp, Homo Sapiens; identical to SEQ ID NO: 224463

SEQ ID NO: 405540 - DNA, 1000 bp, Homo Sapiens; identical to SEQ ID NO: 224463

SEQ ID NO: 405541 - DNA, 1000 bp, Homo Sapiens; identical to SEQ ID NO: 293491

SEQ ID NO: 405542 - DNA, 812 bp, Homo Sapiens; identical to SEQ ID NO: 31519

SEQ ID NO: 405543 - DNA, 1000 bp, Homo Sapiens
aagacctctctttactccttttagacctttttctctttggagtgggagatcatcttggaatggcagtggccgggcccgggggctgcgcttttccctgactttctctgctggcgggactgaattttctcaaggcttacaggcccttccatggagtccacatggcctgtctaggcctgatagctttcgtctctctatgtggagggaaaaagaaatgtgccctagtggttttggtggaggctgcacagattcgcggtgggtggggagctgccaggctccttttctgatctcccagcaggctttgactgacgctgtttagtctttctgtacattaaccccgccagataccgagaggttacaaagcctccaaggcctgtacaactgtggcctctccagagaagtggttctcagccttgactgcacactgtaatcacctggggactttaaaaagtactgaggcctggggcccacccacaaatgctgatttaactcctccagggtggggtctgggcagtggggaggcaggagccacccaggtgattccaatgataggtgtaggttgagaagcgccaccttccagcttcctaactggctctgggaggggagctgggtgggaagttcaggaggtgggaactttgtacacgcagagcacctggagcacctacagcatggctgtggttccacactcctctgtcatttaaccttcacacatcacctcgttctgacatcaagggtgcgtcacagccacagtgaggcctcgcctgggcagagcaactctgggtgccccactgggtccctcccacaggggcaggcaagcctaatgggaacccgaggcaaaaggaaacatcagtaatacgaatcctgtctttaaaactgtgatgttttgttcaccatggattttttttttgggggggggggccttaattttaaaaatattgcattaaacttatttatcttgcttattgaaaaaaaaaaaaaaaaaaaaaaaaaaaaaaaaaaaaaa

SEQ ID NO: 405544 - DNA, 1000 bp, Homo Sapiens; identical to SEQ ID NO: 293492

SEQ ID NO: 405545 - DNA, 1000 bp, Homo Sapiens; identical to SEQ ID NO: 293494

SEQ ID NO: 405546 - DNA, 1000 bp, Homo Sapiens; identical to SEQ ID NO: 293495

SEQ ID NO: 405547 - DNA, 1000 bp, Homo Sapiens; identical to SEQ ID NO: 224465

SEQ ID NO: 405548 - DNA, 1000 bp, Homo Sapiens; identical to SEQ ID NO: 293497

SEQ ID NO: 405549 - DNA, 1000 bp, Homo Sapiens; identical to SEQ ID NO: 293499

SEQ ID NO: 405550 - DNA, 1000 bp, Homo Sapiens; identical to SEQ ID NO: 118874

SEQ ID NO: 405551 - DNA, 1000 bp, Homo Sapiens
ggaacggacccagttctgacctatccacggggagcagcgggggttaccccgacttccctgccagccccgcctcctggctggatgaggtagaccacgctcagttctgacccaggcccggctccaccctgcacctcacacgagggagctgcccctgggtgggcggctcggggctgctggggtttccgaggaagtggggccagggcgtcaagggagggctggtgccttcggagcctcccactgccgaccgcacagctccctctctgggggctgagggacccacctggcccctcctctgacacagggctggcccgccaggtggcctcccagcaagccagccttttttgtaagcaaatttctcccctttattgaccaattaactgagcacttgctgctatttctagacatgaaatgtcaccttgctgaggcccagcccagcccagcatagcccgagggctggaaaaacgctttcatctctaaaactgagaaatcatcataattgtgctttcacttcccaggctccatgtgtcttggagccgtcaccccgaggctccctctttaggtcggagattggccttgcctgtcgaggcaagaggctgcagaggcggggacacacctgtgtcctcctcaccccaccccaggcccttggtgtccaggctgcacccacagatgtctgttgccaaacagcctgccctccctgccggagccggctctgccagccccagattgggaagtctccccgctggagaagggtggggctcctctgagcctgccctgcctcctccatcagatcctttgggaagaagtttctgggagatgcccgcagctgtgcgtgccccagacacaaaggctggcctgtgtgtaagtcaaagtcactcccgcaaacctgaatctcgagctacctattggttctgtgaatgttctgtgtcttttatttattctcgggtgatcagctctttccaagacttcaataaatttgtcagttacagtcaaaaaaaaaaaa

SEQ ID NO: 405552 - DNA, 1000 bp, Homo Sapiens; identical to SEQ ID NO: 224466

SEQ ID NO: 405553 - DNA, 1000 bp, Homo Sapiens; identical to SEQ ID NO: 293502

SEQ ID NO: 405554 - DNA, 1000 bp, Homo Sapiens; identical to SEQ ID NO: 293504

SEQ ID NO: 405555 - DNA, 1000 bp, Homo Sapiens; identical to SEQ ID NO: 224467

SEQ ID NO: 405556 - DNA, 1000 bp, Homo Sapiens
gatatcattggtgtggctggaaatcattgggatggctattctaaaggtgtcaacaggaaattgggaaggacgggcctatatccctcctacaaagttcgagagaagatagaaacggtcaagtaccccacatatcctgaggctgagaaataaagctcagatggaagagataaacgaccaaactcagttcgaccaaactcagttcaaaccatttcagccaaactgtagatgaagagggctctgatctaacaaaataaggttatatgagtagatactctcagcaccaagagcagctgggaactgacataggcttcaattggtggaattcctctttaacaagggctgcaatgccctcatacccatgcacagtacaataatgtactcacatataacatgcaaacaggttgttttctactttgcccctttcagtatgtccccataagacaaacactgccatattgtgtaatttaagtgacacagacattttgtgtgagacttaaaacatggtgcctatatctgagagacctgtgtgaactattgagaagatcggaacagctccttactctgaggaagttgattcttatttgatggtggtattgtgaccactgaattcactccagtcaacagattcagaatgagaatggacgtttggtttttttttgtttttgtttttgttttttcctttataaggttgtctgtttttttttttttaaataattgcatcagttcattgacctcatcattaataagtgaagaatacatcagaaaataaaatattcactctccattagaaaattttgtaaaacaatgccatgaacaaattctttagtactcaatgtttctggacattctctttgataacaaaaaataaattttaaaaaggaattttgtaaagtttctagaattttatatcattggatgatatgttgatcagccttatgtggaagaactgtgataaaaagaggagctttttagtttttcagcttaaaaaaaaaaaaaaaaa

SEQ ID NO: 405557 - DNA, 1000 bp, Homo Sapiens; identical to SEQ ID NO: 405556

SEQ ID NO: 405558 - DNA, 1000 bp, Homo Sapiens
ggccgtctgccagatcttccagcaggggtacttctacctatatcccttcaacatcgagtacagcctcttcgcctccaccatgctgtatgtcatgtggaagaatgtgggtagattcctggcctccacccctggccacagccacaccccaacccctgtcagcctcttccgggagaccttttttgctggcccggttctgggcctgctgctcttcgtggtggggctggctgtcttcatcatctacgaggttcaagtgagcggggacgggagccgcaccaggcaggccctggtcatctactacagcttcaacattgtctgcttgggactcaccaccttggtcagcctgagcggctccatcatctaccgttttgaccgccgggccatggaccaccataagaaccccacgcgcactctggacgtggccctgctgatgggtgccgccctgggtcagtacgccatctcttactactccatcgtggctgtggtggcgggcacaccccaggacctgctggcagggctcaacctcacccatgcactgctcatgatcgcccagcacaccttccagaacatgtttatcatcgagagccttcaccgaggaccgcccggggctgagcctcacagtacccaccccaaggagccctgccaagacctcaccttcaccaacctggatgccctccacacgttgtccgcctgcccacccaaccccgggctggttagccccagcccttcagaccagcgggaagcagtggccatcgtctcaacccccagaagccagtggagacgccagtgcctaaaagacatttctctgtttctcctactctgcaatgtcattctgtggatcatgcctgccttcggggcccgccctcatttcagcaacacagtggaggtggatttctacggctactccctctgggcggtcatcgtcaacatctgcctccctttcggcatcttctaccgcatgcacgctgtgtccagcctgctggaggtctacgtgctgtcctga

SEQ ID NO: 405559 - DNA, 1000 bp, Homo Sapiens; identical to SEQ ID NO: 293506

SEQ ID NO: 405560 - DNA, 1000 bp, Homo Sapiens; identical to SEQ ID NO: 293507

SEQ ID NO: 405561 - DNA, 1000 bp, Homo Sapiens; identical to SEQ ID NO: 224468

SEQ ID NO: 405562 - DNA, 1000 bp, Homo Sapiens; identical to SEQ ID NO: 293509

SEQ ID NO: 405563 - DNA, 1000 bp, Homo Sapiens; identical to SEQ ID NO: 293510

SEQ ID NO: 405564 - DNA, 1000 bp, Homo Sapiens
aagtatgtttttgtgtgacccacgtgaacatttggtgattaaacagaaagatgggactgtagaaatgcgggggaaagacaagaagcagcagcccaggaaggcccacagggcccacagaggcaggctcatagccagcaagcaaaaacaaatcccaatccagacctgtaaattcaattccaaatatcagagtcctcagcctgcaatttctgtccctcaaagccccttcctggggcagcaggaaccccgtgctcagcctctgcatctgcagtgtcccaggagccccagaaaaccagtctgccctattctgggaggaacagtcatgcccaataagacagtaagggcagtgcagggaagactcttgcagctcagcaggtgctcttcccaagacaactggctactttccagcagttcccagggggaccaccagatgagctggttcagtgacctcaatctcggatgttcagagacccctctatgcaaggaggcaggaaagaatttgctctatgacctgggttttgatagcagtgatgatgatggcttctgaccagtccacagttgatttattggtctcagctagaaagagaaattgcaggacatttgggctggccaacagcagaaagtccctgaagcctgccaagtacccagggtcagaggccctgctgaggtggggcaatgagcacgagggcagggaaggtccagcattctgggtaccaggtgctgcccctgacaaggattaagtgcatccttatttattggaatgaaatgtgaaaatggtgctgatgaaaactgaggcagcagcctggttgtggggcatctggagcagggtgcctgtactttggcgaaaggcaggcaggcctccttatggaatactgtgtagcagaagggctctcataaaactgttgcggtggcagcatgactccaaacaacatttttgggtctttaaaatattccctacacatgaccaatacattttcaggcctcaggaaaaaaaaaaaaaaaa

SEQ ID NO: 405565 - DNA, 1000 bp, Homo Sapiens; identical to SEQ ID NO: 293512

SEQ ID NO: 405566 - DNA, 1000 bp, Homo Sapiens; identical to SEQ ID NO: 293513

SEQ ID NO: 405567 - DNA, 1000 bp, Homo Sapiens; identical to SEQ ID NO: 118875

SEQ ID NO: 405568 - DNA, 1000 bp, Homo Sapiens; identical to SEQ ID NO: 224471

SEQ ID NO: 405569 - DNA, 892 bp, Homo Sapiens
ccgcaaggagcggtttctggcgtggctgggtcccctgcggcggaagggcgcctcccggccacgctcgctgtagtgaaggagcgcggcagcctggggctcgtttgggtgatttccctcggcggtggaggtcgctcctaatagaggcggcggcggatcacccgaacagccttcaggcgacgtactgtaagacgatattactttaatcatcttcacatcagtatttatggaatagccacaggtgcctcatcctttagtaggagttaattatacatttactggccgagtaaacatctccgaatgtatttttttagataaggaaataaaacatttccaataaagctgaagtctcatcccacccatccgttatcagtcactccatggattcctttgggcaacccagaccagaagataatcagtcagtagtcagaagaatgcaaaagaaatactggaaaactaaacaggtctttatcaaagcaacaggaaaaaaagaggatgagcacttggtggcgtctgatgctgaactggatgctaaacttgaggtttttcactctgttcaagagacatgcactgaacttctgaagataatcgagaaataccagctaagactcaatggtatgaaatcatagttatctatctgataattcccatttaaaataaatattagcattttttaaaatgaaagatttaatgtaaaaacaattttgtgaatagcttcttatggcaaaatatgaatatttacagttacctgttctcaaaggccccagtattctctcttctttcctcagttaatcaaatcctctgacccagatttattttttgctgatattttttttctttgagacagggtctttctctgcactccagcctaggcaacagagcaagactccgtctc

SEQ ID NO: 405570 - DNA, 1000 bp, Homo Sapiens
gatgtattctgcttcgctactgccctcaaggggcgggtgtactacctggagcaccctgagaagctgacgctgacagaggcaagggaggcctgccaggaagatgatgccacgatcgccaaggtgggacagctctttgccgcctggaagttccatggcctggaccgctgcgacgctggctggctggcagatggtagcgtccgctaccctgtggttcacccgcatcctaactgtgggcccccagagcctggggtccgaagctttggcttccccgacccgcagagccgcttgtacggtgtttactgctaccgccagcactaggacctggggccctcccctgccgcattccctcactggctgtgtatttattgagtggttcgttttcccttgtgggttggagccattttaactgtttttatacttctcaatttaaattttctttaaacatttttttactattttttgtaaagcaaacagaacccaatgcctccctttgctcctggatgccccactccaggaatcatgcttgctcccctgggccatttgcggttttgtgggcttctggagggttccccgccatccaggctggtctccctcccttaaggaggttggtgcccagagtgggcggtggcctgtctagaatgccgccgggagtccgggcatggtgggcacagttctccctgcccctcagcctgggggaagaagagggcctcgggggcctccggagctgggctttgggcctctcctgcccacctctacttctctgtgaagccgctgaccccagtctgcccactgaggggctagggctggaagccagttctaggcttccaggcgaaagctgagggaaggaagaaactcccctccccgttccccttcccctctcggttccaaagaatctgttttgttgtcatttgtttctcctgtttccctgtgtggggaggggccctcaggtgtgtgtactttggacaataaatggtgctatgactgccttccgccatcccca

SEQ ID NO: 405571 - DNA, 1000 bp, Homo Sapiens; identical to SEQ ID NO: 293515

SEQ ID NO: 405572 - DNA, 1000 bp, Homo Sapiens; identical to SEQ ID NO: 224473

SEQ ID NO: 405573 - DNA, 1000 bp, Homo Sapiens; identical to SEQ ID NO: 224473

SEQ ID NO: 405574 - DNA, 1000 bp, Homo Sapiens; identical to SEQ ID NO: 293518

SEQ ID NO: 405575 - DNA, 1000 bp, Homo Sapiens; identical to SEQ ID NO: 293519

SEQ ID NO: 405576 - DNA, 1000 bp, Homo Sapiens; identical to SEQ ID NO: 293520

SEQ ID NO: 405577 - DNA, 1000 bp, Homo Sapiens; identical to SEQ ID NO: 293521

SEQ ID NO: 405578 - DNA, 998 bp, Homo Sapiens
gcgcttgtgacccgccttccggaaggaagcggctaactatggcgaccgccacggagcagtgggttctggtggagatggtacaggcgctttacgaggctcctgcttaccatcttattttggaagggattctgatcctctggataatcagacttcttttctctaagacttacaaattacaagaacgatctgatcttacagtcaaggaaaaagaagaactgattgaagagtggcaaccagaacctcttgttcctcctgtcccaaaagaccatcctgctctcaactacaacatcgtttcaggccctccaagccacaaaactgtggtgaatggaaaagaatgtataaacttcgcctcatttaattttcttggattgttggataaccctagggttaaggcagcagctttagcatctctaaagaagtatggcgtggggacttgtggacccagaggattttatggcacatttgaatgaagatgaaggatcattgatttccttgtgtatggataatccgggaacaggccaactaaatatttgatgaatgtatgatttcaaatacagtgaattccctgggagtcatcaaagaagaccggcattttatggttgtttttattaagtgtatattctttgctcctgaaaatgttattaaataattgtttaggccgggcatggtggctcatgcctgtaatcccagcactttcaaaggctgaggcaggcagatcacctgaggtcaggagttcaaaaccagcctggccaacatgctgaaacctcgtctctactaaaaatacaaaaattagctgggcgtggtggtggatacctgtaatcccagctacgtgggaggctgaggtgggagaattgcttcaacctgggaggcagaggttgcagtgagccgagatcatgccactgcactccagcctgggcaacagagcaagactgtctcaaaaataaataaataaataaaattgtttaaataaaaaaaaaaaaaaaaaaaaaaaaaaaaaa

SEQ ID NO: 405579 - DNA, 1000 bp, Homo Sapiens; identical to SEQ ID NO: 118876

SEQ ID NO: 405580 - DNA, 1000 bp, Homo Sapiens
tatgagactgaagagttgtttgaagagactctttgcagtgctctttacccagaggatacagtatatagctggaggcatttccacactctgagaatgaccatcttctgtctcgttctccctctgctcgttatggccatctgctacacaggaatcatcaaaacgctgctgaggtgccccagtaaaaaaaagtacaaggccatccggctcatttttgtcatcatggcggtgtttttcattttctggacaccctacaatgtggctatccttctctcttcctatcaatccatcttatttggaaatgactgtgagcggagcaagcatctggacctggtcatgctggtgacagaggtgatcgcctactcccactgctgcatgaacccggtgatctacgcctttgttggagagaggttccggaagtacctgcgccacttcttccacaggcacttgctcatgcacctgggcagatacatcccattccttcctagtgagaagctggaaagaaccagctctgtctctccatccacagcagagccggaactctctattgtgttttaggtcagatgcagaaaattgcctaaagaggaaggaccaaggagatgaagcaaacacattaagccttccacactcacctctaaaacagtccttcaaacttccagtgcaacactgaagctcttgaagacactgaaatatacacacagcagtagcagtagatgcatgtaccctaaggtcattaccacaggccaggggctgggcagcgtactcatcatcaaccctaaaaagcagagctttgcttctctctctaaaatgagttacctacattttaatgcacctgaatgttagatagttactatatgccgctacaaaaaggtaaaactttttatattttatacattaacttcagccagctattgatataaataaaacattttcacacaatacaataagttaactattttattttctaatgtgcctagttctttccctgcttaatgaaaagctt

SEQ ID NO: 405581 - DNA, 1000 bp, Homo Sapiens
agcagggactggctgccaacccctccggctacgggccccttaccgagctcccagactggtcatatgcggatggccgccctgctcccccaatgaaaggccagcttcgaagaaaagctgaaagggagacgtttgcaagacgagttgtactgctgtcacaggaaatggacgctggattacaagcatggcagctcaggcagcagaagttgcaggaagaacaaaggaagcaggaaaatgctcttaaacccaaaggggcttcactgaagagcccacttccaagtcaataaaaagcaactcctgcctcccttcctcaccctgtctctggatttcttttctatcacctagatgcttcatccagccagaagatagccttcacgttccccatctgtcttcagagaaaaagagctgggacaccaagaacaagctgttagatcactgcctgggaggcttggcttagtactctcatctctggttccattccagttcagctaagtcttgctttaaaatttttacctcctagctgggtgcggtggctcacgcctgtaatcccagcactttgggaggctgaggcgggcagatcacaagatcaggagttcgagaccagcctggccaacccagcctggtcaacatggtgaaaccctgtccctactaaagatacaaacaattagccgggcgtggtggggtgcgcttgtaatcccagctactcaggaggctgaggcaggagaatcgcttaaactcgggaggtagaggttgcagtgagccaaggtcacaccattgcactccaacctgggcgacagggcgagactccgtctcaaaaaaaaaaaaaaatttacctcctttgcaggccataggactagcccaactatgagaaatagctgttctgtgaacgtgaaaaggggacagcagttttcccagttttggccaggcagtcaagcctttaacagctcatgcacagtttaggccatgtacagctggcatctaataaatgttttcatgaaaaaga

SEQ ID NO: 405582 - DNA, 1000 bp, Homo Sapiens; identical to SEQ ID NO: 118877

SEQ ID NO: 405583 - DNA, 589 bp, Homo Sapiens; identical to SEQ ID NO: 293523

SEQ ID NO: 405584 - DNA, 981 bp, Homo Sapiens; identical to SEQ ID NO: 293524

SEQ ID NO: 405585 - DNA, 1000 bp, Homo Sapiens; identical to SEQ ID NO: 224474

SEQ ID NO: 405586 - DNA, 1000 bp, Homo Sapiens; identical to SEQ ID NO: 224475

SEQ ID NO: 405587 - DNA, 1000 bp, Homo Sapiens; identical to SEQ ID NO: 118878

SEQ ID NO: 405588 - DNA, 1000 bp, Homo Sapiens; identical to SEQ ID NO: 224478

SEQ ID NO: 405589 - DNA, 1000 bp, Homo Sapiens; identical to SEQ ID NO: 224478

SEQ ID NO: 405590 - DNA, 1000 bp, Homo Sapiens; identical to SEQ ID NO: 118879

SEQ ID NO: 405591 - DNA, 835 bp, Homo Sapiens
caggtagagtgcttctcaggaccaggatgaactcttggtgctggtgttttgggcagaaagagcccctgggtggaggttgaggccattcttgaagaaagacaaggataaagaaggattttggaggggaaggttcttctggaaggggagggtggaagctttattcagcttctacagagatgtcctgccagcagagccagcagcagtgccagcctcctcccaaatgtacccctaaatgccctcccaagtgtactcctaagtgtcctcccaagtgtcccccaaaatgccctccccagtgttcagccccatgcccacctccagtctcttcctgctgtggttccagctctgggggctgctgcagctctgagggtggtggctgctgcctgagccaccacaggccccgccagtccctccgacgccgacctcagagttccagctgctgtggcagtggcagtggccagcagtctgggggctccagctgctgccacagctctgggggctctggctgctgccacagctctggaggctgctgctgacctgggccatgaggagcacggaggagaaggactggcagatcccaggtgctgaagatgtgtgtcagcctgaggcttcttttctctcatttcccatggaaggacttcggaaatgccttaagttcccctctttatcctgctcatgttcactccattgtagggttgaagtctagcttgtgatattttctggcctggctttccctctcagacatagctctttggagaactaggtgttgtaattcagttatgaagctattttctctgtaacaataaagctttttattcctgaaaaaaaaaaaaaaaaa

SEQ ID NO: 405592 - DNA, 1000 bp, Homo Sapiens; identical to SEQ ID NO: 293531

SEQ ID NO: 405593 - DNA, 1000 bp, Homo Sapiens; identical to SEQ ID NO: 118880

SEQ ID NO: 405594 - DNA, 1000 bp, Homo Sapiens; identical to SEQ ID NO: 293533

SEQ ID NO: 405595 - DNA, 1000 bp, Homo Sapiens; identical to SEQ ID NO: 224479

SEQ ID NO: 405596 - DNA, 1000 bp, Homo Sapiens; identical to SEQ ID NO: 293535

SEQ ID NO: 405597 - DNA, 1000 bp, Homo Sapiens; identical to SEQ ID NO: 293536

SEQ ID NO: 405598 - DNA, 1000 bp, Homo Sapiens; identical to SEQ ID NO: 293537

SEQ ID NO: 405599 - DNA, 792 bp, Homo Sapiens
ggccagagcttgcggggcgcacagagcccccaggcctcatggcgcagaaacctctcagcaccgcggcggctgaacgcatgaaccttgtgggtcaggatgagatctggaaataccgtctgaaggctgaatcggaagcacggcagaactggccccagaactgggggtttttaacaaccccttttgaggagttgatcaagtgtgaagaagatctccccaccccaaagcccaaaatcgagcttcctgagcgtttccgcatccggccggtgaccccagtggagaagtacatcaaggtctttccatcccccccagtcccacagaccacccagggcttcatcggctggagatctgcagtgccaggcctgaacaagtgcctagagctcgacgatgcgatcagaagctgcaaaggtgcttttgcacgagagctgtgctggcccaagcagggcgtgcactgaatccagacggagttctgcccaggggtgctgcatatcggtcaccaggcacccagggccatgccagggaaaggaagagctcccctgaatcccgaggacacagtcccctgcgtacttgctcatgggatgttgcaaagaacacaaagtgtgccttagacattctcaagtcatcagcgtcacccttccagaatgttcacgtccacacccattcttggctaatgtaatgaataaggcttctctcatttgtttttgataccttgggaatttctatgcagggctttaaaaaaaaataagtgattcaattttaaaaaaaaaaaaaaaaaaaaaaaaaaaaaaaaaaaaa

SEQ ID NO: 405600 - DNA, 1000 bp, Homo Sapiens
ggggccaggcagggaactgagcctgggggtcccaagggtggccatctcaatggtggtaacagtgacctggtcagggatgagaaacggctgaccctgggtcacagcaaactggacctcatcactaagtacaacaagtccaagttcaagcagctccgaagccgctttgagtcctagccaaaggactggcatcgggggtgcactggcaagggcaggcccctcctctgtccaccgagactctggacttgctcaggtcccagactggggaagggaggtgtctagaaacccaggtcagacacactctctgggctcaagattcttgtgtatacacacacacacacacacacacacacaccctaactagtatcttcttgaatctaggctgtgtttccagccctgtgctgggcctgtagagctgacaggtgggtcacactcagacctggggacagaggtgaaatgcacaagctgctggagaaggggtcagagccatatcaagttaaaggttaaccagttacagagggtgttagaaaacaaagggcagagagtcctggagaaggtggagtagtcagaaaactttcttagaggagatggaggtggcctttgagccaggccctgaaggatggggaggttttggacagagggaggagagagttagaaaaatttttggtagagagaatcaggtgaaagagatgccctaaagaggactgagtgggtctgaggtgaatgagtgaggaagagcagagtatgtggatacccggaaacacacacacacacacatcatcattatcatcatcatcattgtcgtcgtcatcatcttgctgagtcatcatcatcatcatcatcattgtcgtcgtcatcatcttgctgagtgtctcttgaagtacaggctgtgacaggttgtgggccattttcctgaactcaccacttacccgggatagtaaacatgatacacatcaataaaggcagactttattgtgaaaaaaaaaaaaaaaaaaaaaaaaaa

SEQ ID NO: 405601 - DNA, 1000 bp, Homo Sapiens; identical to SEQ ID NO: 293538

SEQ ID NO: 405602 - DNA, 1000 bp, Homo Sapiens
atctttctcatttggagtgatccttgctgtcctggcctccctcatcattgctactaacacactagtggctgtggctgtgctgctgttgatccacaagaatgatggtgtcagtctctgcttcaccttgaatctggctgtggctgacaccttgattggtgtggccatctctggcctactcacagaccagctctccagcccttctcggcccacacagaagaccctgtgcagcctgcggatggcatttgtcacttcctccgcagctgcctctgtcctcacggtcatgctgatcacctttgacaggtaccttgccatcaagcagcccttccgctacttgaagatcatgagtgggttcgtggccggggcctgcattgccgggctgtggttagtgtcttacctcattggcttcctcccactcggaatccccatgttccagcagactgcctacaaagggcagtgcagcttctttgctgtatttcaccctcacttcgtgctgaccctctcctgcgttggcttcttcccagccatgctcctctttgtcttcttctactgcgacatgctcaagattgcctccatgcacagccagcagattcgaaagatggaacatgcaggagccatggctggaggttatcgatccccacggactcccagcgacttcaaagctctccgtactgtgtctgttctcattgggagctttgctctatcctggacccccttccttatcactggcattgtgcaggtggcctgccaggagtgtcacctctacctagtgctggaacggtacctgtggctgctcggcgtgggcaactccctgctcaacccactcatctatgcctattggcagaaggaggtgcgactgcagctctaccacatggccctaggagtgaagaaggtgctcacctcattcctcctctttctctcggccaggaattgtggcccagagaggcccagggaaagttcctgtcacatcgtcactatctccagctcagagtttgatggctaa

SEQ ID NO: 405603 - DNA, 754 bp, Homo Sapiens; identical to SEQ ID NO: 293539

SEQ ID NO: 405604 - DNA, 1000 bp, Homo Sapiens; identical to SEQ ID NO: 293540

SEQ ID NO: 405605 - DNA, 1000 bp, Homo Sapiens
gggataggactcaagcgaagggcgtggcctgaagtgggcagggccaaaatacaggggcggagcctgagggatgctttgaggcacgggagagttagtggaagggacttaagagaaagggcgtggtcttttggaaaggggcgattctgggtcgtaggagccgggccggaagtattgattagtgctggaaggtggaagagcaggtaaacatcagagcgggcggagctttagggaaaaggcattgttctctcaattgggagcgcctaggaccgggtttggtcccagtaggagaggattggcaggtgggtgggacgcgaaagaaatgggcataagtagaatgaagtgggggacttgaacctggggattgttgggaagctctgccttggactctcccccaccgggctcctttttctccaccggcttcagggcagcctggacaacatgacctgcatcctggtctgcttccctggggcccctaggccttctgaggaggcgatcaggagggagctagcactggacgcagccctgggctgcagaatcgctgaactgtgtgcctctgctcagaagccccccagcctgaacacagttttcaggactctggcctcagaggacatcccagatttacctcctgggggagggctggactgcaaggccactgtcattgctgaagtttattctcagatctgccaggtctcagaagagtgcggagagaaggggcaggatggggctgggaagtccaaccccacgcatttgggctcagccttggacatggaggcctgacagctgttgtcctttggggatcctttgcttctctggggcctcaacagaactaaagaagaaaaccgaccctttccccaactacatgtaccagcggaaggaaggaaggccaatgtaggaacccaaaatgcttatttcttcttctcttacttccctctcacagaaaagtcttacgaatggggaaattccaccaacatccagaccaaaaagaaaaaagcccaaaacg

SEQ ID NO: 405606 - DNA, 1000 bp, Homo Sapiens; identical to SEQ ID NO: 118883

SEQ ID NO: 405607 - DNA, 1000 bp, Homo Sapiens; identical to SEQ ID NO: 224480

SEQ ID NO: 405608 - DNA, 1000 bp, Homo Sapiens; identical to SEQ ID NO: 293543

SEQ ID NO: 405609 - DNA, 1000 bp, Homo Sapiens
catgcaccgcctcattcaggaggcccagaaggccgagcccagctcgttccgcgccagcgtggtgccctgggaaacggctgcagatgtgcgcctccacctgcaacaggtgctgaagtcgtgctgagtctggccgcctgcaggggggtacccgggccaacggcggagggggcggggaagggagattcggcaaagacagctttactactcccttttccctttggctttgttatgtccctctgggaatttctggaatctcgtatttgggggcttggggaagggggctcagagccgtccctatctattcagttaacccacctcggctgcctcccccactccactgtgcacggttgagttctggagtctgacccatcgcggggtggcgcgcaaaccttggaaggcagcagtatttcctggtcctcccaactgggaggaaggggcccccccggcaggtgagagaaggaacatctcccgccgctgtaacttgttgcctcgggctgcgtgaccgcccctcctccagtctactgtggagggaacccaggatcctgaaattctcctggccgcaagaactccccacagaggcagaagagggtctccacctatggccccaggcctttgcgatcttgcttcacccaccgcgaccccacactatttctgtgctgtccacactctcttgcctcccgacccccgcactcccttctagcacccccaaaggaaaagccagaggaacaatcgcctcctggtggtggtacgaggtagcgcaccgtccggctcgggtccggacagccagtaacctcgcagagagtgacggtgtctccttgcatcccagcctcgtctatgcagcaagagaccagggacttcaccaaagtcaccctcgcgggctgggccttccacgcatcccccccaccccccatggaacagaaagccatgtttttaagcagaaccagcgaaacccaagcccctccttcctctggtgttttacaactataaaggaggtgaaggg

SEQ ID NO: 405610 - DNA, 1000 bp, Homo Sapiens; identical to SEQ ID NO: 224481

SEQ ID NO: 405611 - DNA, 1000 bp, Homo Sapiens; identical to SEQ ID NO: 293547

SEQ ID NO: 405612 - DNA, 1000 bp, Homo Sapiens; identical to SEQ ID NO: 118884

SEQ ID NO: 405613 - DNA, 1000 bp, Homo Sapiens; identical to SEQ ID NO: 293550

SEQ ID NO: 405614 - DNA, 1000 bp, Homo Sapiens; identical to SEQ ID NO: 224484

SEQ ID NO: 405615 - DNA, 1000 bp, Homo Sapiens; identical to SEQ ID NO: 224485

SEQ ID NO: 405616 - DNA, 1000 bp, Homo Sapiens; identical to SEQ ID NO: 293554

SEQ ID NO: 405617 - DNA, 1000 bp, Homo Sapiens; identical to SEQ ID NO: 293555

SEQ ID NO: 405618 - DNA, 1000 bp, Homo Sapiens; identical to SEQ ID NO: 293556

SEQ ID NO: 405619 - DNA, 1000 bp, Homo Sapiens; identical to SEQ ID NO: 293557

SEQ ID NO: 405620 - DNA, 1000 bp, Homo Sapiens
ataccagctttttgttccccagcttgtgactggcagatgcgctacaagagcttttcatagaaaatcacatagtttggatctgaacatcagtgagaaactgactttattacccactttatatgaaatacatagtaagactactgcctattccagactaaatgaaacacagcctattgacctttcaggcttgcctttacaatctagtaaaaatagctattcctttcagaatccatccagttttgatcctagtatgctgctgcaaagattttcagtggccccccatgagacccagacacaaagaggaggagaatttcagtgtggtctagaagctgcttcagtgtattctgaccatactaatactaacaatctgactttcctgatggacctgccctcagctggcaggagcatgccggaggcctcagaccaggaagagcacctctcccctctggacttcctgcactcagccaatttttcattgggcagcattaatcagaggcttaataagagagaaaggagcaaattgaagaatctaagaaggaaacaacgaaggcgtgaaagatggctacagaagcagggtaaatactcaggagtgggattgctggatcatatggtaagtatatatttacttatatgagaaattgtcaaattgttttccagaatggctgtaccattttgcattccaagcagcaaagacttccattttctgtgcgtccttgaaagcaagcactggtattctcagtgttttaaaattttagtcattcaaatacatagacagttgtatcacatcatgactttaatttgcttttccttaaggatgctgaacatatgtgcttattttacatttgtatatattctttagttaagtgtcttcaaatcttttgggctggtgtggcagcttatgtctgtaatcccagcacttttgagaggccaaggcaggaggattgcttgagttcaggagttcaagaccggcctgggcagcatggcgaagccttatctctac

SEQ ID NO: 405621 - DNA, 1000 bp, Homo Sapiens; identical to SEQ ID NO: 118885

SEQ ID NO: 405622 - DNA, 1000 bp, Homo Sapiens; identical to SEQ ID NO: 293559

SEQ ID NO: 405623 - DNA, 1000 bp, Homo Sapiens; identical to SEQ ID NO: 293560

SEQ ID NO: 405624 - DNA, 1000 bp, Homo Sapiens
ggtgtctttggtcaaaaatggagtaaaaatactgcacaccaaagatgcttacatgagctctgaggaccaggcctctggcggcattgtcctgcagctgaagctcggggatgaggtgtggctgcaggtgacaggaggagagaggttcaatggcttgtttgctgatgaggacgatgacacaactttcacagggttccttctgttcagcagcccgtgacagaggagagtttaaaaatccgccacaccatccatcagaatcagcttgggatgaacttattcagatggttttactttattaattcctccaattattacaataatcataaaaaggtgaaaatggaaaagttattcccaaaactgattctgtgtaacttactatttttccaggagtaaatatttaaaatagctgcatggtttattctaatttatttcacatttcttattcctattatctgaagaatccctcgtctgtgcgtttcttgtgggaagagtgttttaatatcattttagtgctctgaggagtcatatgaagatgtatccctcatctgtgtttctgaggacattaaggggaaattagagggaaatgtttattcaatttagtactagcaacagctttaagctggtgatgctgtcatactccagaaagctgtagacactgctcattttgtcttttaaaaaaattttattttattttaagttctgggatacatatgcaaaacatgcatgtttgttacataggtaaacatgtgctgtggtggtttgctgtatctatcaacccatcacctaggtattaagccctgcatgcattagctatttgtcctggtgctctccctcccactttgctcattttctaacctaggttttaatcaccattttacccaacaaatcattgttcgatcattatttgccagacttgaatctctatgtgttttctaggactgctctaataaagtacacaaactgggagtctttaaacaacaaaaaaaaaaaaaaaaaaaaaaaa

SEQ ID NO: 405625 - DNA, 971 bp, Homo Sapiens; identical to SEQ ID NO: 31535

SEQ ID NO: 405626 - DNA, 717 bp, Homo Sapiens; identical to SEQ ID NO: 118887

SEQ ID NO: 405627 - DNA, 1000 bp, Homo Sapiens
cacgctgacccgggggagctgcacagccgcaagagcatgctgctggctgccaagcagatctgcaaggagtttgcagacttgatggctcaggaccgctcaccgctgggcaacagccgcccagcactcatcctggagcccggagtacagagctgcttgacacactttagcctcatcacccatggcttcggtgggcctgccatctgtgctgccctcactgccttccagaactatttgctggagtcactcaaggggctggacaagatgtttctaagcagtgtgggcagtgggcatggtgaaaccaaggcttcggagaaggatgccaagcatcggaaataactgcttctcccaccccatccctaaggggctcccaggccctgaaatagggacttagctcttgggggtgggcctggaaggactgaaaggtgggattagagtcaggccagaaagagaacattcatccagagatcccagagttggggatctggcttggagtaagggagggtggcctctctgtggtggtgtgttggtaagttaagggcccaggtatttgtctcatgtgtgcaattttctgacctttgatggttgagaagggtttggacagaaaattgacatgaaaagatctggctcatggggcagagccctttccattagcgtggctgggtggccgtgggtgcttctagaggccaaagcctttgtgtttttcactggtggcaggaggaaaattgataaatcagaggtgctactgaggagttggtgcccctcattccagaatctcctacccccagaaaaggggtgctggaaggaggccccagtggactctttgtacccttcctactctcagagagaagtgggcaggaggggtcctcaaggaacaaagaagataaagcacaaatcgcagaacttgaatccaggctgctgctcatcatagtcctgttgctgtctgtcctatttatttatgtatgttgtaattaaatttgaaattttaaaaaaaaaaaaaaaa

SEQ ID NO: 405628 - DNA, 1000 bp, Homo Sapiens; identical to SEQ ID NO: 293563

SEQ ID NO: 405629 - DNA, 1000 bp, Homo Sapiens; identical to SEQ ID NO: 293564

SEQ ID NO: 405630 - DNA, 1000 bp, Homo Sapiens
acctcctcaatctctgaggcagtttgagaacaacatgtatcacaagagtgaattctacaacaaagggatgctgagtgcccacccagagacttccatgatcagaacagtgaatgggaaggccacggtcaccattgagagctgcgccccgacgctgttcatgttcatgctcaatggcaagcaagagcatgggctgctgagcctaaggaagaatgggatgaagttggaggtgtaccctccaaccatgggtactcacaagctgcagatcttcgccaagggcaactccgacatctacagctcagtgctggagtacacgctcaagtgcaattatgtggacatgggtgtccagctgcctgctgagcttcaccagcccgtgggccccagctggttctcggagcagatgggcatcatgaagccctcccaccctgaccctatcatccacaccagcgacgggcgctgctccatcagcttcagcgtggaggagggcattaatgtcctggcttccctccacggggatgatggccccatcactgaggagacacagcggcgctacatcttccagctgcaccgggagaagcagaccgagctgaaagtccagctgccccatgcaggcaagtttgccctcaagatctatgtcatggtgctggagaatgccaaccacaatttctactcctacatcctgaaatacaaagtgaatgcccagtgagggctgtgccccggtcttaccctcccaaagggccaaggccagacctccccagggagggctcgaaggaagtgcagggagccctggacaccactgagtctgcatgaaatcccttctaggcctctgcctcagtgtcccacctctgccacaggagctgtgatctttgtgttctgaaggcttcactcaggtgtggctgtgactgagggggcagaggcagtggctctttagaaggaaaaggtgctatgtaaatctaaggtattttaaactgtacacctgcatccagatgccccttctcgtatt

SEQ ID NO: 405631 - DNA, 1000 bp, Homo Sapiens; identical to SEQ ID NO: 293565

SEQ ID NO: 405632 - DNA, 1000 bp, Homo Sapiens
tgttgtgtcagaatacatgaaaatgcaccagttcctgaaggaagaggagcagctgcaactccagctactagaacaggaagagaaagagaacatgaggaagctgaggaacaatgagatcaaactgacccagcaaatcagaagcctaagcaaaatgatcgcacagattgagtcctcaagtcaaagctcggctttcgaatctcttgaggaagtgagaggagccctggaaaggagcgagccactcttgcttcagtgtccagaggccaccaccacagagctgagtctgtgccgcatcacgggaatgaaggagatgctaagaaaattcagcacggagataacgctggacccagccacagctaatgcctatctcgtgttgtcggaggatctgaagagtgtgaaatatgggggaagcagacagcagctacccgacaacccggaaagatttgaccagtctgcgactgtgctgggtactcagatcttcaccagtgggagacactactgggaggtggaggtgggaaacaagaccgagtgggaagtgggcatctgcaaggactctgtgagcagaaaggggaatctccccaagccacctggggacctgttctcactaataggtttaaaaatcggagatgattacagcctctgggtctcgtcacctttgaaaggtcagcacgtcagagagcctgtgtgtaaggttggtgtcttcctggactatgaatctggacatatagcattctacaacgggacggatgaatccctcatctacagcttcccgcaggcttctttccaagaggccctcaggcctatcttttccccctgcctcccaaatgaggggacaaacacagaccctctcaccatctgctcactgaacagccacgtctgaggggcgtgccctgagccgtcacagcgggcgatgtctgagaccaagacacaactattaagacgatgaaggcatcgacagtattaatgtcaggtgatctgaaataaactcccgtaaccccacccc

SEQ ID NO: 405633 - DNA, 1000 bp, Homo Sapiens; identical to SEQ ID NO: 118888

SEQ ID NO: 405634 - DNA, 1000 bp, Homo Sapiens; identical to SEQ ID NO: 224489

SEQ ID NO: 405635 - DNA, 1000 bp, Homo Sapiens; identical to SEQ ID NO: 293567

SEQ ID NO: 405636 - DNA, 1000 bp, Homo Sapiens; identical to SEQ ID NO: 118889

SEQ ID NO: 405637 - DNA, 1000 bp, Homo Sapiens; identical to SEQ ID NO: 293568

SEQ ID NO: 405638 - DNA, 1000 bp, Homo Sapiens; identical to SEQ ID NO: 293569

SEQ ID NO: 405639 - DNA, 1000 bp, Homo Sapiens
cattgaaggtttatatatattggccaactcatatagaaattttatttataggaagctactactaaaaaaagtcactaactttgtgtacctataatccctaaattaaaattaaattttaattggctggctgtaatttgcattgagagaccttttactagtagctagtgttaggaagtgaacctaaaataagaaaatataatgatctgtgtttatcattagccttgtacaaatgtaaattactaatagtgatgttcttttgcaaggcatagaacatttgtatgaaaagacatttagtatgctttgaaaaaaactcagcttttagtttttttccattagaatactgcaaaacccatatatctttttaaaaaatttatgtactcacagtctttcccttgaagagaagattgaaaaagtctactgttcataaaccatgctaacattttccttttagctagttttgaaagtaaggaacaatacctgggaaataataaaacagaaggttaccattgtcagccagttggctatactgtggttagttctttcagaaattgtaaatatcttgtagcatattctgaaataatagagtaagttcttctcagagatgttaatatcatgtttttcatgttctaattagaatactttattacttacaaactcagaaatacgaacagaaatacagcagacgaacatatttattggtactgaaaagagatgtagtaaattaaatagaagaaatatatttataaagcttagtgaaacacaaaattagaatgttcatgtcaggcacaagggtttggattttgtgcaagctaatttggccacatttggcctggtgacagaactgttcataaggaagtaatatatagataaggtaggtagatatcagttgaatgccttatattgtatacattcctttcaaataaagaccttgagaaaacaaaaaaaaaaaaaaaaaaaaaaaaaaaaaaaaaaaaaaaaaaaaaacaaaaaaaaaaaaaaa

SEQ ID NO: 405640 - DNA, 1000 bp, Homo Sapiens; identical to SEQ ID NO: 224490

SEQ ID NO: 405641 - DNA, 1000 bp, Homo Sapiens
gctcttctccaacaacctctccaccatctacccgggcactttccgccacttgcaagccctggaggagctggacctcggtgacaaccggcacctgcgctcgctggagcccgacaccttccagggcctggagcggctgcagtcgctgcatttgtaccgctgccagctcagcagcctgcccggcaacatcttccgaggcctggtcagcctgcagtacctctacctccaggagaacagcctgctccacctacaggatgacttgttcgcggacctggccaacctgagccacctcttcctccacgggaaccgcctgcggctgctcacagagcacgtgtttcgcggcctgggcagcctggaccggctgctgctgcacgggaaccggctgcagggcgtgcaccgcgcggccttccgcggcctcagccgcctcaccatcctctacctgttcaacaacagcctggcctcgctgcccggcgaggcgctcgccgacctgccctcgctcgagttcctgcggctcaacgctaacccctgggcgtgcgactgccgcgcgcggccgctctgggcctggttccagcgcgcgcgcgtgtccagctccgacgtgacctgcgccacccccccggagcgccagggccgagacctgcgcgcgctccgcgaggccgacttccaggcgtgtccgcccgcggcacccacgcggccgggcagccgcgcccgcggcaacagctcctccaaccacctgtacggggtggccgaggccggggcgcccccagccgatccctccaccctctaccgagatctgcctgccgaagactcgcgggggcgccagggcggggacgcgcctactgaggacgactactgggggggctacgggggtgaggaccagcgaggggagcagatgtgccccggcgctgcctgccaggcgcccccggactcccgaggccctgcgctctcggccgggctccccagccctctgctttgcctcctgctcctggtgccccaccacctctga

SEQ ID NO: 405642 - DNA, 1000 bp, Homo Sapiens
catgaaggagaagggcaagaggtcctccagaatcatccactgcatccagctagatgtcagccacaccctgcagaaacacatgatgttcatacaaagattcggagtcaagcagcaggaattatgtgacatcctcgtggcctattctgcatataaccctgaggtgggctaccacagggacctgagccgcatcactgccatcctcctcctgtgtctgccagaggaagatgttttctgggcgcttacccagttgctcgctggtgagaggcactccctgtggtattctacagcccaaatactgcctggctcgagaagctcctatcgcaccaggagcaggtgctgcacaagtccttcccaaagatcatgagacacctgggcaaggaagggctgtgcattgagggttccatgctgacgaggctcctccggtgtttccttgatgggaaatccttcgggctcaccctgagactgtgggatgtgttcatcttggagggcgcgcgggtactgacagccatggtgcatgcatcattcaaaatacacaggaagcacctcatgaagctttcctggagcactgtctgggagtttcaggagcgactctctcagagctgggccctggaggacaacgcggtcctcaggaaccttcaaacctctatgaaggaactcacaaaaaaacactgggacctgccacccccagggagcttgctacaaaatgcacattgctataccatagcctggggcttgcaatccaaggctggcaaggattcctgcacgtcaagggcctcaggtgactttcatgcacacccaagtcagaaggctctcctgaatcctggatgtcaccttcctgcccaaaaaaggaggaacgagggtcaaccagcagcagaccagtcacaaaaagagatgaaatattgttcactgttggcatagaggaatactactgattttcgtatgttaattttgtatcctgcaacttaactaaatttgtttaactacaaaaaaaaaaaaaaaa

SEQ ID NO: 405643 - DNA, 1000 bp, Homo Sapiens
gtggccaagtccttcgaggcaccaataaaattggtgtttccccaggatctgctggagaaaggcctcgaagcaaacaactttgccatgctgggacttggagatgtcgtcattccagggatcttcattgccttgctgctgcgctttgacatcagcttgaagaagaatacccacacctacttctacaccagctttgcagcctacatcttcggcctgggccttaccatcttcatcatgcacatcttcaagcatgctcagcctgccctcctatacctggtccccgcctgcatcggttttcctgtcctggtggcgctggccaagggagaagtgacagagatgttcagctacgagtcctcggcggaaatcctgcctcataccccgaggctcacccacttccccacagtctcgggctccccagccagcctggccgactccatgcagcagaagctagctggccctcgccgccggcgcccgcagaatcccagcgccatgtaatgcccagcgggtgcccacctgcccgcttccccctactgccccggggcccaagttatgaggagtcaaatcctaaggatccagcggcagtgacagaatccaaagagggaacagaggcatcagcatcgaaggggctggagaagaaagagaaatgatgcagctggtgcccgagcctctcagggccagaccagacagatgggggctgggcccacacaggcgtgcaccggtagagggcacaggaggccaagggcagctccaggacagggcagggggcagcaggatacctccagccaggcctctgtggcctctgtttccttctccctttcttggccctcctctgctcctccccacaccctgcaggcaaaagaaacccccagcttcccccctccccgggagccaggtgggaaaagtgggtgtgatttttagattttgtattgtggactgattttgcctcacattaaaaactcatcccatggccagggcgggccactgtgctcctggaaaaaaaaaa

SEQ ID NO: 405644 - DNA, 1000 bp, Homo Sapiens; identical to SEQ ID NO: 293571

SEQ ID NO: 405645 - DNA, 1000 bp, Homo Sapiens
tgaattaaagggtgtatactaagcatgacttcaacattaagacttgaattatgagttaatccaaaagaatatgaaaacagatgactcttctcctatttgtttgaagtgtatcactttatttttgaatattactcttgctctggtattgtttttttttttttttagcatggaagcctgtgtactatttgtaaattcaggttcaattagttctcattgcagttattggaacagtttctatgaagtttcctttaatgatagtgtttactgttgttttttttctttttagcctcaaaaggtgcatctggacttattgatatgtgttatcaatagaacatcattatgattattcttatttccagacacgtactccatcattctccacatatcatactcctcaaaaaatgatatagttcccaaagagaggtgtcagtgtcttgaaccgtcaagttcaagaggccatcagactcaatatttactcattccttcatgaaataagtacttaacaaaaagctgctgcatgccaagtcactgtgctaggcattgaggattcagctctacacagggctgtcttggtccttgctatcttttagctaaaatgtagacacataaataaacaattacatatagtgtgacacattctacagtgggggaatccagggttctcaggcagattgtaggagagccacttcatctagatcacttattttcagtgcttcaactgtgttttcaatgaagatgtcactttgaaaataatacttctaatttatgccccaagtgttattgcttttaacttaccatagttttactacataaaataaatgaactgccctcatcaatagaccatgtaactacattggatagagcttgtaataggttttgtgtccttttctgtggaatatctgctttgaagtatcaactgagatatttcctgcttcttaacaagatttcttagtcctcagtatttacatttaaaaatccaaacagctttgacaacaattgt

SEQ ID NO: 405646 - DNA, 1000 bp, Homo Sapiens; identical to SEQ ID NO: 117114

SEQ ID NO: 405647 - DNA, 1000 bp, Homo Sapiens
atcagaagtttgtattgcagcttttagagctctttgacagtgaagatcctcgggagagagattttcttaaaaccacccttcacagaatctatgggaaattcctaggcttgagagcttacatcagaaaacagataaataatatattttataggtttatttatgaaacagagcatcataatggcatagcagagttactggaaatattgggaagtataattaatggatttgccttaccactaaaagaagagcacaagattttcttattgaaggtgttactacctttgcacaaagtgaaatctctgagtgtctaccatccccagctggcatactgtgtagtgcagtttttagaaaaggacagcaccctcacggaaccagtggtgatggcacttctcaaatactggccaaagactcacagtccaaaagaagtaatgttcttaaacgaattagaagagattttagatgtcattgaaccatcagaatttgtgaagatcatggaacccctcttccggcagttggccaaatgtgtctccagcccacacttccaggtggcagagcgagctctctattactggaataatgaatacatcatgagtttaatcagtgacaacgcagcgaagattctgcccatcatgtttccttccttgtaccgcaactcaaagacccattggaacaagacaatacatggcttgatatacaacgccctgaagctcttcatggagatgaaccaaaagctatttgatgactgtacacaacagttcaaagcagagaaactaaaagagaagctaaaaatgaaagaacgggaagaagcatgggttaaaatagaaaatctagccaaagccaatccccaggtactaaaaaagagaataacatgaaaacgcccagggttacttgaatgtttttataagataggaatatatgtcttcaccatggggggggtctcgatttcactaacgttgtatatgaaaatgtctgcaataaaaagtacttttaaactttgtaa

SEQ ID NO: 405648 - DNA, 1000 bp, Homo Sapiens; identical to SEQ ID NO: 224492

SEQ ID NO: 405649 - DNA, 1000 bp, Homo Sapiens; identical to SEQ ID NO: 293574

SEQ ID NO: 405650 - DNA, 1000 bp, Homo Sapiens; identical to SEQ ID NO: 293575

SEQ ID NO: 405651 - DNA, 1000 bp, Homo Sapiens; identical to SEQ ID NO: 293577

SEQ ID NO: 405652 - DNA, 1000 bp, Homo Sapiens; identical to SEQ ID NO: 293578

SEQ ID NO: 405653 - DNA, 1000 bp, Homo Sapiens; identical to SEQ ID NO: 118891

SEQ ID NO: 405654 - DNA, 1000 bp, Homo Sapiens; identical to SEQ ID NO: 224493

SEQ ID NO: 405655 - DNA, 1000 bp, Homo Sapiens
ccagtaagaacaaaatcaccaaggccccaactctgataagatcattccaacctcatgaggaccgaataagttccttagagatgtgtgagccaggtggtcagttactgattatctcctcctctgcagactgcagtatttgtgtgactggtgtctgcaatgctcctgtttggatctttggtcaggcaaagcactggcatattgaaaactgccttttccttcctaaaagagatactaatttagtggaaagtgagattcaaaaggaaatttctttattttctaaggaggaatcttgtttagacccaacagaacattctctacttaataagaaaaacaaagatgactcaacatacaatgtcagaccatcagaagatataaatttagatataaaatataaggaaagaagtacctgcatgaaagaaacacaaaaaccttattatggtgaagttataaaaaaatcattcagtacatttaggtcattaaacattggagccctggaagagctgcctgaagtgaataaacctgctttccttctagaccctgagaaatactttaggaaagaaccagaggaagagcgtccccaaattctggaggccccgtcactttttaaaactttgaaagctgtatttgatgagaaaaacctgtttcccaaggaaattctgcatcatgaacgaaaagccaagcaattatgccaagaaaaaagttgtgaagtgaagaaaaataagaagtaattacaacagaaaaaccttcactgttacataaggtacagatataaaatgcagaaaaagcatcaagaattctgccttttattttattttatatttaaacttcaggaagttttctcttcatgggataatttagtactgcttttatctatcatctgtcaatttctctgtattcttaataaaataaatattgaactaaaaaaaaaaaaaaaaaaaaaaaaaaaaaaaaaaaaaaaaaaaaaaaaaaaaaaaaaaaaaaaaaaaaaaaaaaaaaaaaa

SEQ ID NO: 405656 - DNA, 1000 bp, Homo Sapiens; identical to SEQ ID NO: 293581

SEQ ID NO: 405657 - DNA, 1000 bp, Homo Sapiens; identical to SEQ ID NO: 293582

SEQ ID NO: 405658 - DNA, 1000 bp, Homo Sapiens; identical to SEQ ID NO: 224494

SEQ ID NO: 405659 - DNA, 1000 bp, Homo Sapiens; identical to SEQ ID NO: 224495

SEQ ID NO: 405660 - DNA, 1000 bp, Homo Sapiens; identical to SEQ ID NO: 118892

SEQ ID NO: 405661 - DNA, 1000 bp, Homo Sapiens; identical to SEQ ID NO: 293586

SEQ ID NO: 405662 - DNA, 1000 bp, Homo Sapiens; identical to SEQ ID NO: 224496

SEQ ID NO: 405663 - DNA, 1000 bp, Homo Sapiens; identical to SEQ ID NO: 293589

SEQ ID NO: 405664 - DNA, 1000 bp, Homo Sapiens
tttcaccgtccacttcctgccgctcaattctgctcagactctccaccacaagagctgctacaacggccgattccagctcctctatgtggcctgtggtatggtccatcttctcatccctgagcttggggcctgtgtggcacccggagggaacttgattgtggaattagcccggtacctggtggacgtgcggcaggagcagctgcagggattcaacacccgggtcagggagctagctcaggcagctggatttgctccacagaccggggccaggccttcagagaccttcgcacgtttctgcaagtcccaggaatcagctctgggcaacactgtcccagctgtggaacccggaactccgccccttgacatcctggcccagcctcttgaagccagcaacccagcccttgagggcctgacccagcctctgcagggtgggaccccacactgtgagccctgccagctgccctctgagtctccaggttcactctcagaggttctggctcagcctcagggggccttggctccgcccaactgtgagtcagactccaaaactggagtctgacccaacccctagacaccccttatctccaacttccaaagtcaggttgtaggatgagaacccgctgataccattctaagtccgctgctagagtcctcaattttattctaatcattcccactcagtacccgccacccccaccccgggagtgttggtagactttcaaattccatttctgagattctatggtctattcctagaattctagattgttctctcagaattccaaattccacttctgaggctctaagcccagcctaggatctgacactgagtctcaggcccttgactttggcccccttgttcccaggcaccctgtggctgactaggggctggggtgtctcctcaccagggcctggtcagcacccagatggttcaagtaaagcaagttgtgtccaccctaaaaaaaaaaaaaaaaaaaaaaaaaaaaaaaaaaaaaaaaaa

SEQ ID NO: 405665 - DNA, 1000 bp, Homo Sapiens
cgcctcgcgccaccctccactttcagcttcagagcagaggattccgccgacctccacctgtacctgtactcggccgttaggaaatccacttgcatttttaactaccgtgcagaaccagaaacagatcgagcactgggagaacaaggacgacgcctcctaggaaagcctgaacctttatgttagtttatccaaagtttgggctagaagtgaggagaatccctaaactcgaggtggtgtgcccagacccacagcccgtgttcccgaagttgctaagtgcccgagcgcagcgcgttaagtagagaagtcttggtagtaagcgaacccgacccggctctcggggcgctagtgacggaaagcagcacgcatatctttgcgggaagaatctagagtcgccctgggatagatccatctccttctgccactgaatttcacacttgaaaaagataaggtcatgggggcggatgaatgatatccctcactcatttagccattcttattattatataaaaaaaaggcttgtcaattatgaaggtgtgtcccagatattacatgaagatcatgcaaactacttgaaatttgaatccggacatgatcgtaaggaaactctttcataaagcacttttgtggcctagttcccacacacacacaaaagtattaggtctttaaaacttttccaagtagtaagtgagactccctcttactgtctacgaatacacaataaagagatgagacactgccccaatcctaaagaggccagaactgaagtgctacattgtgggagttaggggatgcttcttttttccagctcttttttctagaatcctcattacagctaacgctggtaataaaggtaggaaaacaatagaactcataaaacttagaaatggtaataaatcttggctcctgtctctagcccagttccttcttacatgagattcaaagtttttcagtatgcaatgctgaacgttcacactatggttgcaaaaaaaaaaaaaaaaaa

SEQ ID NO: 405666 - DNA, 948 bp, Homo Sapiens
acatcctggaagagtggcctaggacagctcctctcctgccagagctaggcaggcgccgaagtagccgcatggccccgtcagaagatcccagggactggagagccaacctcaaaggcaccatccgtgagacaggcctggagaccagctccggtgggaagctggctggccatcagaagaccgtccccacggctcacctgacttttgttattgactgcacccacgggaagcagctctccctggcagcaaccgcatcaccaccccaagcccccagtcccaatcgagggcttgtcaccccaccaatgaagacttacatcgtgttctgtggggaaaactggccccatctgactcgggtgacccccatgggtgggggatgccttgcccaggccagggccaccctgccgctctgcagagggtctgtggcctcagcttccttcccagtcagcccgctctgcccccaggaggttcccgaggctaaggggaaacccgtgaaggctgcgcctgtgaggtcttcaacttggggaacagtcaaggactcactgaaagccctctcctcttgtgtctgtgggcaggccgattagctggaagggccgggctctgatgcccagaggctgcaattcccagggcctggccctgcttccccagctaagcaggagtcttttgtgcttgagccaaggaaacatcattagatccgctaaggggcatctgaaacatccgtcgagtggcagaggcaggataagtcacctgcacatgaagagactcattcattcatacagcaaatattactggtacatcttccacatgccaggccctgcaaagtgctggggagataccatggttttcctggagctggtatttttggggtggagggaacccaccctgaataaataaagtaacccaataaataaagaagatgatttcgaaaaaaaaaaaaaaaaaaaaaaaaaaaaa

SEQ ID NO: 405667 - DNA, 1000 bp, Homo Sapiens; identical to SEQ ID NO: 224497

SEQ ID NO: 405668 - DNA, 1000 bp, Homo Sapiens; identical to SEQ ID NO: 293591

SEQ ID NO: 405669 - DNA, 1000 bp, Homo Sapiens; identical to SEQ ID NO: 293592

SEQ ID NO: 405670 - DNA, 1000 bp, Homo Sapiens; identical to SEQ ID NO: 224498

SEQ ID NO: 405671 - DNA, 1000 bp, Homo Sapiens; identical to SEQ ID NO: 293593

SEQ ID NO: 405672 - DNA, 1000 bp, Homo Sapiens
cttgcttcctgctgtccctccacctcctgtatataccacctaggaggagatgccaccaagccctcaagaagttgtgcccttccccgcctgcgatgcccaccatggcctattttcttggtgtcattgcccacttggggcccttcattgggcccatgtcagggggcatctacctgtgggaagaacatagctggagcacaagcatcaacagccagcatcctgagcctcctcatgccctggaccagcctggaacacactagcagagcaggagtacctttctccacatgaccaccatcccgccctggcatggcaacctgcagcaggattaacttgaccatggtgggaactgcaccagggtactcctcacagcgccatcaccaatggccaaaactcctctcaacggtgacctctgggtagtcctggcatgccaacatcagcctcttgggaggtctctagttctctaaagttctggacagttctgcctcctgccctgtcccagtggaggcagtaattctaggagatcctaaggggttcagggggaccctacccccacctcaggttgggcttccctgggcactcatgctccacaccaaagcaggacacgccattttccactgaccaccctataccctgaggaaagggagactttcctccgatgtttatttagctgttgcaaacatcttcaccctaatagtccctcctccaattccagccacttgtcaggctctcctcttgaccactgtgttatgggataaggggagggggtgggcatattctggagaggagcagaggtccaaggacccaggaatttggcatggaacaggtggtaggagagccccagggagacgcccaggagctggctgaaagccactttgtacatgtaatgtattatatggggtctgggctccagccagagaacaatcttttatttctgttgtttccttattaaaatggtgtttttggaaaaaaaaaaaaaaaaaaaaaaaaaaaaaaaaaaaaaaaa

SEQ ID NO: 405673 - DNA, 1000 bp, Homo Sapiens
tgtggaggacagcagtgatgaggatgacaaaagaaaccaaggaaatttgtatgataaggcaggtaaagtgaggaaacatgcaactgaacaggaaaaaactgaagagggattaggccctaatataaaaagcattgtcaccatgttgatgctgatgctattgatgatgtttgctgtccactgtacctgggtcacaagcaatgcctactctagtccaagtgtagtcctggcctcatacaatcatgatggcaccaggaatatcttagatgattttagagaagcttacttttggctaaggcaaaatacagatgaacatgcacgagtaatgtcttggtgggattatggctatcagatagctggaatggctaatagaactacgttggtggataataacacctggaataacagccacatagcactggtgggaaaagctatgtcttctaatgaaacagcagcctataaaatcatgaggactctagatgtagattatgttttggttatttttggaggggttattggctattctggtgatgatatcaacaaatttctctggatggttaggatagctgaaggagaacatcccaaagacattcgggaaagtgactattttaccccacagggagaattccgtgtagacaaagcaggatcccctactttgttgaattgccttatgtataaaatgtcatactacagatttggagaaatgcagctggattttcgtacacccccaggttttgaccgaacacgtaatgctgagattggaaataaggacattaaattcaaacatttggaagaagcctttacatcagaacactggcttgttaggatatataaagtaaaagcacctgataacagggagacattagatcacaaacctcgagtcaccaacattttcccaaaacagaagtatttgtcaaagaagactaccaaaaggaagcgtggctacattaaaaataagctggtttttaagaaaggcaagaaaatatctaagaagactgtttaa

SEQ ID NO: 405674 - DNA, 1000 bp, Homo Sapiens; identical to SEQ ID NO: 224499

SEQ ID NO: 405675 - DNA, 1000 bp, Homo Sapiens
cgtggaagacatcttcatggatctctctaccccagatcccagtgaggaatggggctcaggggatcctgaggcagagggcccaggaggggccccatcgccttgcaacaacctgtccccagaagaccacagcttcctggaggacctggccacatatgaaaccgcctttgagacaggtgtctcagcattcccctatgatgggtttactgatgagttgcatcaactccagagccaagttcaagacagcttccatgaagatggaagtggaggggaaccaacgttttgaataagtctgtgacttaacgtcgtcaagtatggcatattgtcatcaagacgtggagccgctctccacccccccgggactgttggggggattctgagggccagagggggatatatatgattccccaggccctgcaggattttggggggggggaggtgggagggcaagggaggggagcttctttttaaaatcaagagacttcgagcgatcccagtttccatttcaatctgtattcactcgtagtgagtttccttgaatgggatttcaagcggagaatgggggagtctcacttccccgccgccttgccccattggcctgggccagttctccactcctaggggccaagccacccctagccttggtgggggaaaggcagggcccacccgggccagcccgtgccctgaggggctcttgacacccacgtagaattctctacacaccagtaacgggatttcaattccgatggactctgccgccctggcggcccttcctgtgacttttgcgcccctcgcctggggtggggggtgcgaagagacgctacgttcctttccgatggaggaaggcagacctgccgtcacacgtgtgcttgcacgagtgcgtgtacctggtgcgggactcacccggccgccagactgcctgggcctgcccagatggccacctcgtggtgctgcggtgactttgtagccaactttataataaagtccagtttgcctttttggt

SEQ ID NO: 405676 - DNA, 1000 bp, Homo Sapiens; identical to SEQ ID NO: 118896

SEQ ID NO: 405677 - DNA, 1000 bp, Homo Sapiens; identical to SEQ ID NO: 293597

SEQ ID NO: 405678 - DNA, 1000 bp, Homo Sapiens; identical to SEQ ID NO: 293598

SEQ ID NO: 405679 - DNA, 1000 bp, Homo Sapiens; identical to SEQ ID NO: 293598

SEQ ID NO: 405680 - DNA, 1000 bp, Homo Sapiens; identical to SEQ ID NO: 293599

SEQ ID NO: 405681 - DNA, 1000 bp, Homo Sapiens; identical to SEQ ID NO: 293600

SEQ ID NO: 405682 - DNA, 1000 bp, Homo Sapiens; identical to SEQ ID NO: 293601

SEQ ID NO: 405683 - DNA, 1000 bp, Homo Sapiens; identical to SEQ ID NO: 293602

SEQ ID NO: 405684 - DNA, 1000 bp, Homo Sapiens; identical to SEQ ID NO: 293602

SEQ ID NO: 405685 - DNA, 1000 bp, Homo Sapiens; identical to SEQ ID NO: 118897

SEQ ID NO: 405686 - DNA, 1000 bp, Homo Sapiens; identical to SEQ ID NO: 293606

SEQ ID NO: 405687 - DNA, 1000 bp, Homo Sapiens; identical to SEQ ID NO: 224500

SEQ ID NO: 405688 - DNA, 1000 bp, Homo Sapiens; identical to SEQ ID NO: 224501

SEQ ID NO: 405689 - DNA, 1000 bp, Homo Sapiens; identical to SEQ ID NO: 293614

SEQ ID NO: 405690 - DNA, 1000 bp, Homo Sapiens
tcactggacacttcacgcccttggccatgggtcccattcttggcccaggattattgtcaaagaagtcattctttaagcagcgccagtgacagtcagggaaggtgcctctggatgctgtgaagagtctacagagaagattcttgtatttattacaactctatttaattaatgtcagtatttcaactgaagttctatttatttgtgagactgtaagttacatgaaggcagcagaatattgtgccccatgcttctttacccctcacaatccttgccacagtgtggggcagtggatgggtgcttagtaagtacttaataaactgtggtgctttttttggcctgtctttggattgttaaaaaacagagagggatgcttggatgtaaaactgaacttcagagcatgaaaatcacactgtcttctgatatctgcagggacagagcattggggtgggggtaaggtgcatctgtttgaaaagtaaacgataaaatgtggattaaagtgcccagcacaaagcagatcctcaataaacatttcatttcccacccacactcgccagctcaccccatcatccctttcccttggtgccctccttttttttttatcctagtcattcttccctaatcttccacttgagtgtcaagctgaccttgctgatggtgacattgcacctggatgtactatccaatctgtgatgacattccctgctaataaaagacaacataactcaagtctggcagactttcttctctatttctggatgaatgcccagtgagactgtgttgtacagctagaaaaggccttcttcccaatagcaaggctgtgcatctagcctcaagctctggctgaactttgtggtcgacatcaatctaaagatacagtgtctgactataaccttgttccaaaaacctaggcaaagagtatatgtaggaggtgggatatcacttccatgacataagtgctattgcagagccgtggccacccaggaactcctgactgctttcc

SEQ ID NO: 405691 - DNA, 1000 bp, Homo Sapiens; identical to SEQ ID NO: 293615

SEQ ID NO: 405692 - DNA, 1000 bp, Homo Sapiens; identical to SEQ ID NO: 293616

SEQ ID NO: 405693 - DNA, 1000 bp, Homo Sapiens; identical to SEQ ID NO: 293617

SEQ ID NO: 405694 - DNA, 1000 bp, Homo Sapiens
tcagctaattaatggcaggatgtttaggatagtctgtaggtggacaagaatgcagatcacacagttttgaaattttaatttgagtatatttactgccctcagctcacataccttaaaagcagtggttgcccccgtccagcgttttgtctgcattttatttgatatattttataatccaggtttggaacaaggaaacaaaattaaaaggacagtgagttttcgccttcccttacaccaccaactttactttccaacatttgttgacatgtattttagtgacagctatccattttataaacttacagtaatcaaagatctaacagacctgataaatcacctgttcccacctcctttccccttcactccacttatagtatgtgtcattttcaatgcctgcttcccaacttcctgccatctgcctttcatgtgtgtttttcctcacacagaacctcttcctccatcttcatttccctccttttcctgttcctccaatccccagatccaccactcctgcacatgccatacacatttagaagccaagtattcagaatcagtagaaggggagcagagtgatttcttgcttcctcccttcaaagcactaccacacctagactggaaatgtgggctgggtaatttcttgctgttagcagccgagctacccttctggcatctatactttctccagtaaatgaggaaccgtaactctttggaacaaaccaaaatatagcagatgtaattgtacagttcctgattaaacttcagttgcaaaaaagaaagttatttctttaattctgtgggagttttgtataattttacttttatggtttttacacatacttgaaacactctttctaaagaattaataaaaacagaaatgagaaacatgaaaaaaaaaaaaaaaaaaaaaaaaaaaaaaaaaaaaaaaaaaaaaaaaaaaaaaaaaaaaaaaaaaaaaaaaaaaaaaaaaaaaaaaaaaaaaaaaaaaaaaaaaaaaaaaaaa

SEQ ID NO: 405695 - DNA, 1000 bp, Homo Sapiens; identical to SEQ ID NO: 293618

SEQ ID NO: 405696 - DNA, 1000 bp, Homo Sapiens; identical to SEQ ID NO: 293619

SEQ ID NO: 405697 - DNA, 1000 bp, Homo Sapiens; identical to SEQ ID NO: 118901

SEQ ID NO: 405698 - DNA, 1000 bp, Homo Sapiens; identical to SEQ ID NO: 118903

SEQ ID NO: 405699 - DNA, 1000 bp, Homo Sapiens; identical to SEQ ID NO: 118903

SEQ ID NO: 405700 - DNA, 1000 bp, Homo Sapiens; identical to SEQ ID NO: 224503

SEQ ID NO: 405701 - DNA, 1000 bp, Homo Sapiens
gactcttacacactggaaattgaaataaagataaatgcaaccatttttaggaagctagactagctgtaaaggacctcctaaataaattatttgttactgtatcctcatttgtaatctagttgtcaataaatggcccggacatgtcttgctaacaggatatgggctaccaggaagaaggacttgtttccctttcctgtgtggggagaggtgtgtgacgtttttccagttcacatttatttggtagcccacctgggttggaggaagggcacggtggagagaaagtgacatgcattcacatatctgcttatcagtgtgcaatactgtgtacctcatggatgctttggcaatgcccaaggcgatataagcaaaatcagaagtatatttttgcaggtgcttttattttcacagcccataattcatagtgatagagtgcagtgatgtttgccatttgctggacaaccaacacccgggttgctcctttgattagagaccagatcagataattatgcttttaaactgattacgtttacattcttctcttttctatgaaaggcagggcaagaacagaagtgttcacatggctctcatgtacttttaaattatacaatgatatccaatattaaaagattataggaactgaggtttacatacgtttgtgtggtgacattttagaatgtcaataaatttgctttttgagatgttgagaggaacaagaaggtggaaggcagtgttatttatttctttctattcttggaaccacgaatgaggtaggcacaaatacattccttttagagttaagaactatgacgtagcgagttagtgagactagacatagtaccgaatttagttcatgcattggtcttagagggtgatggaacaagagaagtactatctttgtgttgcagcctcaaccaacaacaatgtgttgtaaaaatgtctttcatgtaaaaagtgcagtaaatatttactatttataatgaataaacagttatgaaaactt

SEQ ID NO: 405702 - DNA, 1000 bp, Homo Sapiens; identical to SEQ ID NO: 115907

SEQ ID NO: 405703 - DNA, 1000 bp, Homo Sapiens; identical to SEQ ID NO: 293627

SEQ ID NO: 405704 - DNA, 1000 bp, Homo Sapiens; identical to SEQ ID NO: 118905

SEQ ID NO: 405705 - DNA, 1000 bp, Homo Sapiens; identical to SEQ ID NO: 224505

SEQ ID NO: 405706 - DNA, 1000 bp, Homo Sapiens
atttttgttgagtaagcaaaattacaaagtgtttttaaaaaaacctgtacaaatatgtttatgtattaaatcaccatccaaaatatttaaggaatatataaaaagatttttatgatcatagaaacatctattttcaaaacaatataaattaagcttttccccttgattcctgttggatatccatgttcagcatgacagtcagcactcgtaaatgccaagaaaagaattacctgaaaaagatcatttctccctattcaaatgagaatattttcccttggtagaatccatatacaatatggattgaaaattaagtcaccaagaatacatttagcatctttgtgttgggttctatacctaaaaattttccctccctgcccaaggtgattggaaagtactgcaattgagctaaaattttatctaggatggaaaatcaggatagactcgtttaaaaacaagtatattaaatgggttaaattaagcttttacagaacatgcttaattttgatattgagctctaaatgcaaaactcttttatactgaaaaaacacttaaagtagttttgtgtggcatcacagtgatttgtcatgaaaagccatatatgggggacatgctaaaatggcttctgaatgaaatacgacagcagagaaagatgccactgaaatgctgaaattatctttgctgagcagcttttgaatgctaagggttccagtatgtgacccaaagaaagagttgtctcaactccttggtacagggttcattcaaacccccaagctgtgagagtgtgtttatttttaattttttaaaaggtatttaatttccaaccacacttcttatttttttgaaaagacaattttccatttcagtattacattttaccaagaagtcactgctttttaggtgtgttgcatcaatatttaaataaaatcccagaaatgtattttaaagaatttcaggtttgaaaactcaaaccaacaggaagatatcaaaaaaaaaaaaaaaa

SEQ ID NO: 405707 - DNA, 1000 bp, Homo Sapiens; identical to SEQ ID NO: 293632

SEQ ID NO: 405708 - DNA, 986 bp, Homo Sapiens; identical to SEQ ID NO: 293633

SEQ ID NO: 405709 - DNA, 1000 bp, Homo Sapiens; identical to SEQ ID NO: 118906

SEQ ID NO: 405710 - DNA, 1000 bp, Homo Sapiens; identical to SEQ ID NO: 224506

SEQ ID NO: 405711 - DNA, 990 bp, Homo Sapiens
ggtgcaaggagaaaggattttgaggaggggactccatggcttccgagttgctgactgaccctccacctcagaggtagttctgacactgtctcagttttgcagatgaagatgagattcttcagttctccatgtggaaaagcagctgtggacccagccgaccgctgtaaggaggtacagcagatccgcgaccagcaccccagcaaaatcccggtgatcatcgagcgctacaagggtgagaagcagctgcccgtcctggacaagaccaagtttttggtcccggaccatgtcaacatgagcgagttggtcaagatcatccggcgccgcctgcagctgaaccccacgcaggccttcttcctgctggtgaaccagcacagcatggtgagtgtgtccacgcccatcgcggacatctacgagcaggagaaagacgaggacggcttcctctatatggtctacgcctcccaggaaaccttcggcttctgagccagcagtaggggggctcggcctgggagtcggggggccccggtcaggccctgcccagagagctcctggttcctgaactgagctgcctctaccgtggtgggctgggcaggcatgtgcccccctagtcagagggcaccaacccacctactctgcccctgggtggatcctgggccggtcgtgttagggttgtccctctgggtgctggctggtgggatgggggagggtggggagcagctcccagcacccctgctgtgtggttcatcttttttttaggcccctgcctgtctgcccatctgcccctcacccacccgaggctctgcccaccgcctggacctgcccacccctgaaagactggcccctggctccccgcccctcggtctccacgtggtgtatggatctgtggtcattgtccctctgcagaataaagattgctcaggcctgcctggcaaaaaaaaaaaaaaaaaaaaaaaaaaaaaaaaaaaaaaaaaaaaaaaaaaaaaaaaaaaaaaa

SEQ ID NO: 405712 - DNA, 1000 bp, Homo Sapiens
actcatgtaacacagattttgactgcaaggaataccagaagtgctgcttttttgcctgtcagaagaagtgcatggatccctttcaagaaccctgcatgctacctgtgaggcatggaaactgtaatcatgaggcacagcgctggcattttgactttaaaaattaccgctgcacacccttcaaatacaggggctgcgaagggaatgccaacaacttcttaagtgaggatgcctgcagaacggcctgcatgttaattgttaaggatggacaatgcccactcttccctttcactgaacgtaaggagtgtccaccttcatgtcacagtgacatcgattgtccccagacagacaaatgttgtgaatccaggtgtggctttgtttgtgccagggcctggacagtcaaaaaaggtttctgcccacgcaagcccttgctatgtaccaagattgataaacccaagtgcctgcaggatgaggagtgcccattggtggaaaagtgctgctcacattgtggactgaaatgtatggaccccagacgttgaataacggagttttgctcttattgcccaggcgcaatctcggctcactgcaacctctgcttcccgggttcaagtgattctcctgcctcggcctcccaagtagctgggattgcaggtgcccaccatcatgcccagctaattttttgtgtttttagtggagatggggttttaccatgttggccaggctggtcacaaactcctgacctcaggtgatccacccacctcagcctccgaaagtgctgggatcacaggtgggagccactgtgcctggccagttatttcctttttaagcctatttcctatccatttatagctactactgaaaatgactactgaattttatcaaataccttttaagcatacagtcacataatgatttttctcttctaatttgttggcataataaattactaaattttcttgagccatccttgcattcttaataaacttaattgcagactgctgta

SEQ ID NO: 405713 - DNA, 1000 bp, Homo Sapiens
cggccccgctgagtccgcccgctcctggcgccgggagccagccgcgcgaggcggcccgggccgggcggcagcatgcggagcggcgaggagctggacggcttcgagggcgaggcctcgagcacctccatgatctcgggcgccagcagcccgtaccagcccaccaccgagccggtgagccagcgccgcgggctggccggcctgcgctgcgaccccgactacctgcgcggcgcgctcggccgcctcaaggtcgcccaagtgatcttggccctgattgcattcatctgcatagagaccatcatggcatgctccccgtgtgaaggcctctacttttttgagtttgtgagctgcagtgcgtttgtggtgactggcgtcttgctgattatgttcagtctcaacctgcacatgaggatcccccagatcaactggaatctgacagatttggtcaacactggactcagcgctttccttttctttattgcttcaatcgtactggctgctttaaaccatagagccggagcagaaattgctgccgtgatatttggcttcttggcgactgcggcatatgcagtgaacacattcctggcagtgcagaaatggagagtcagcgtccgccagcagagcaccaatgactacatccgagcccgcacggagtccagggatgtggacagtcgccctgagatccagcgcctggacacgtgaggacctgcctggatcctcctccctcccgtcctcgtgcctgtctctcagtcaagttttctttcccttgtcctgtcagatttccatgtgattcagttgaattttgtcctctttggtaaaagttcattttgggaaagggtttcccgagtggcccagtgggcgggtccgcggtggagttgggaggcccacgttcctcagcgtttggggctgtggagcagccggcgtcactgcccaggtccacttgaggtcttacctgccctgaagcacaggcttcctttgactctgagccaccttgtcgtgtgta

SEQ ID NO: 405714 - DNA, 1000 bp, Homo Sapiens; identical to SEQ ID NO: 293635

SEQ ID NO: 405715 - DNA, 1000 bp, Homo Sapiens
aagcctggcaccttcgacctgggcctggccacatggagcccttccttccagggggaaacccaccgggctcaggcacgccgcagggatgttggcaggcagctgcctgagtacaaggctgtggtggtgggcgccagtggcgtgggcaagagtgcgctgaccatccagctgaaccaccagtgcttcgtggaggaccacgaccccaccatccaggattcctactggaaggagttgaccctggacagtggggactgcattctgaatgtgctggacacagcagggcaggccatccatagggccctgcgtgaccagtgcctggctgtctgtgatggtgtgctgggcgtcttcgctctcgatgacccctcgtctctgatccagctgcagcagatatgggccacctggggccctcaccccgcccagccccttgtcctcgtgggcaacaagtgtgaccttgtgaccactgctggagatgctcatgccgctgctgcagccctcgcacacagctggggggcccacttcgtggagacctcggccaaaacacggcaaggcgtggaggaggccttttccctgctggtccatgagatccagagggtccaggaggccatggcgaaggagcccatggcaaggtcctgtagggagaagacccggcaccagaaggccacctgccactgtggctgctctgtggcctgaaggtcttggccaagaaatgtagacctttccccaggccagggtgattgttcatttgacatgagacccctgaggcaactagctttgagggacacatcaggtatactagggaaagatggacatctctcttgttttcacttggtgaggggctttttggtaacatgggagtgcctaatgttgcttttgttatgtcaagttgaaagattttgtgcaaaattaaataaatggtgttttgggtttcaaagctgcctccatgccgagtgttgtgtgggtgggagtgagactgggtagaatgttacttgagttgtgagaattc

SEQ ID NO: 405716 - DNA, 1000 bp, Homo Sapiens; identical to SEQ ID NO: 224507

SEQ ID NO: 405717 - DNA, 1000 bp, Homo Sapiens; identical to SEQ ID NO: 293641

SEQ ID NO: 405718 - DNA, 1000 bp, Homo Sapiens
accaatggccgggaggggctcctgcgcttcagttcctggccattttctatccaagatgtggtacaacctcttaccctgcaagttcagagacccctggtctctgtgacggtgtcagatgcctcctgggtctcagaactgctgtggtcacttttcgtccctttcacggtgtatcaagtaaggtggcttcgtcctgttcatcgccaactaggggaagcgaatgaggagtttgcactccgtgtacaacagctggtggccaaggaattgggccagacagggacacggctcactccagctgacaaagcagagcacatgaagcgacaaagacaccccagattgcgcccccagtcagcccagtcttctttccctccctcccctggtccttctcctgatgtgcaactggcaactctggctcagagagtcaaggaagttttgccccatgtgccattgggtgtcatccagagagacctggccaagactggctgtgtagacttgactatcactaatctgcttgagggggccgtagctttcatgcctgaagacatcaccaagggaactcagtccctacccacagcctctgcctccaaggcattcgatgcgtgtttaatgatgatgactccgcaagccctctgacattgtgatcacctcagtttcccagctctggcccggtgacccctcagccaacagccctaacatttgccaagtcttcctgggcccggcaggagagcctgcaggagcgcaagcaagcactatatgaatacgcaagaaggagattcacagagagacgagcccaggaggctgactgagctcaaaggaacaggatggcacccagagccgcaggacggagactgggggcagccctcacccaactcacaacaggctggatgggtgggtggtaaaaagggaaggatgaggctcccccaatgtcacattaaattcatggttttcattcaaggcaaaaaaaaaaaaaaaaaaaaaaaaaaaaaaaaaaaaaaaaaaaaaa

SEQ ID NO: 405719 - DNA, 1000 bp, Homo Sapiens; identical to SEQ ID NO: 118907

SEQ ID NO: 405720 - DNA, 1000 bp, Homo Sapiens; identical to SEQ ID NO: 224508

SEQ ID NO: 405721 - DNA, 1000 bp, Homo Sapiens; identical to SEQ ID NO: 293645

SEQ ID NO: 405722 - DNA, 1000 bp, Homo Sapiens
attatgaggcagggggctcctcttggtccctgtggagtcgggtctctgtgggcacaactccaggggctggcattcacactgtacctatgaattactgtgggatagtgctcctgggagccatatggcttggccagactgctggggttgctgggtgagcagagtgggaggccggagactgcccttgaccggcaaatgccctgcaacggtggctcctgacaccaggggatagggagatgtgccagagtccttcctcccctccaaggacaggtagtaggtgccagcctaggggagcttccaaggaggggaaggcaaagccctggcccctgcctgtgtccccttcttggcatgttccacatgctcggtcctgcaggccctgaccctcatcatcttcatctgcttcacggcctccatctctgcctacatggccgcggcgctactggagttcttcatcacacttgccttcctcttcctctatgccacccagtactaccagcgcttcgaccgaattaactggccctgtctggacttcctgcgctgtgtcagtgccatcatcatcttcctggtggtctcctttgcagctgtgacctcccgggacggagctgccattgctgcttttgtttttggcatcatcctggtttccatctttgcctatgatgccttcaagatctaccggactgagatggcacccggggccagccagggggaccagcagtgactctggggctacctggctcctaggcccagccagccagagaggacagtggagcccagacacgtctccttgggattcactagcccccagcccgccaaaccccaccccagccctacacagcagtctggcctgagacgtcactggggacttatctgtggagcctggtgctccaggatgtggcttctcatgaagctctggccagaggaggggaacttattgggggagggggggtggaggggaggaatctggacctctaagtcattcccaaattaaaatattcaaattcta

SEQ ID NO: 405723 - DNA, 1000 bp, Homo Sapiens; identical to SEQ ID NO: 116065

SEQ ID NO: 405724 - DNA, 1000 bp, Homo Sapiens; identical to SEQ ID NO: 118908

SEQ ID NO: 405725 - DNA, 1000 bp, Homo Sapiens; identical to SEQ ID NO: 224510

SEQ ID NO: 405726 - DNA, 1000 bp, Homo Sapiens
ttaaagaagaaataccctttgaactgagcaatttgaaccagaaattagaggaatttagagcaaagtcaagagaatgggacaagcaagagatattatatcagactcatctgatttctttagatgctcaacaaaaattattatctgagaagtgtaatcagtttcagaaacaggcacaaagttaccaaactcaactaaatggtaaaaaacagtgcttagaagacagcagctctgaaattcctcgtttgatatgtgacccagatcccaattgtgaaatcaatgaaagagatgagttcattattgaaaaactgaaatcagctgtaaatgagatagcactaagcaggaataaattacaagatgaaaatcagaagctcttgcaagaactgaaaatgtaccaaagacagtgccaggccatggaagcaggtctctcagaggtaaaaagtgagttacagtcacgtgatgatctcttgagaattatagaaatggaacgattgcaattacacagagaattattaaaaataggagagtgccaaaatgctcaaggaaataaaacaagacttgaatcatcttatttgccttctattaaagaaccagaaaggaaaataaaagagctgttttcagtgatgcaagatcaaccaaatcatgaaaaagaattgaacaagataagaagccaactccaacaggtggaagagtaccataactctgagcagaaataatgaggaatgaaatctctgacctaacagaagagcttcatcagaaggagatcactatagcaactgtcacaaagaaagctgcccttctggaaaaacagttaaaaatggaattagaaataaaagaaaaaatgttagcaaaacaaaaggtctcagatatgaaatataaagctgtcagaactgaaaacacacatctaaaaggaatgatgggagatttagaccccggagaatacatggtaatatgctgacatcattcaataaattgaacaaagagattaaaaaaaaaaaaaaaa

SEQ ID NO: 405727 - DNA, 1000 bp, Homo Sapiens; identical to SEQ ID NO: 293647

SEQ ID NO: 405728 - DNA, 692 bp, Homo Sapiens
gcagtggaggcggcccaggcccgccttccgcagggtgtcgccgctgtgccgctagcggtgccccgcctgctgcggtggcaccagccaggaggcggagtggaagtggccgtggggcgggtatgggactagctggcgtgtgcgccctgagacgctcagcgggctatatactcgtcggtggggccggcggtcagtctgcggcagcggcagcaagacggtgcagtgaaggagagtgggcgtctggcggggtccgcagtttcagcagagccgctgcagccatggccccaatcaaggttcggctcctggctgatcccactggggcctttgggaaggagacagacttattactagatgattcgctggtgtccatctttgggaatcgacgtctcaagaggttctccatggtggtacaggatggcatagtgaaggccctgaatgtggaaccagatggcacaggcctcacctgcagcctggcacccaatatcatctcacagctctgaggccctgggccagattacttcctccacccctccctatctcacctgcccagccctgtgctggggccctgcaattggaatgttggccagatttctgcaataaacacttgtggtttgcggccaaaaaaaaaaaaaaaaaaaaaaaaaaaaaaaaaaaaaaaaaaaaaaaaaaaaaaaaaaaaaaaaaaaaaaaaaaaa

SEQ ID NO: 405729 - DNA, 1000 bp, Homo Sapiens
gaccttgagatgagccaggaagaaacaaaagcaaggggcatttcctctccaactttcttccttggaggccaagttctcaccctgtccaactattcgcaggacaccaggtcccttcagagagaaatgtggagagtcaaggtgtctactgggagccgggtttcccacagggagctgagtctacagactccagggcaatcaaaggtcaccacccccacccctcacctctaggatccttgaatttgtcaatgatactcatcaagtatgcttggatcctttggtccttggatgcttctcagccaagtggcggtagcacagatgtggtgaacaatgacgaattgaggcagggaatagacctcactagccctttgcaatggagatcatcgttctagtggccatgtgaagaatggaaccaagggaggcacaattagaggcagagggaaaccaggcagacggctgctctttttgagttgagcttaactctccttgtctgaacttggtgatagcaatgggaacaaagtgggtagactaacagagagcattaagaagttaaatcaatctctctctgtctcctcccaacctctctctctctttcatccccttctctccctatctctcttttttttttcttctcctgtcccttcccatcccacccctttagactaccttccagtaaatcacactgtcatttggtgccacaagctttcagggtagacactgatttttcccccctaatatctgctctctttcaaaaggaataattcaaaagacttaggacaattaccactgaaacacttcgagctatttagctaaagcccaccaaatcaaaacaaaatactgattttttttttttttttggtgactctgttcatacagtgaataaagatctatcaaaggaaaaggaaactgagaccgaaaacttagggtctaagttgttctaaacccagggttctcaaatgtgttgtacaaaaagtttcatgtaataaaattaagcaaataaaac

SEQ ID NO: 405730 - DNA, 1000 bp, Homo Sapiens; identical to SEQ ID NO: 293650

SEQ ID NO: 405731 - DNA, 1000 bp, Homo Sapiens; identical to SEQ ID NO: 118909

SEQ ID NO: 405732 - DNA, 808 bp, Homo Sapiens
acttccgggagcctggggcccaggactgcagcggcttcggaaggtgggctctgccagcgggaccatgctgctccgagccgcttggaggcgggcggcagtggcggtgacagcggctccagggccgaagcccgcggcgcccactcgggggctgcgcctgcgcgttggagaccgtgctcctcagtctgcggttcccgcagatacagccgctgccccggaggtggggccagtgctgcgacctctctatatggatgtgcaagctacaactcctctggacccccgggtgcttgatgccatgctcccttacctaatcaactactatgggaacccacactcccggacacatgcttatggctgggagagtgaggcagccatggaacgtgctcgtcagcaagtagcatctctgattggagctgatcctcgtgagatcatttttactagtggtgctactgaatccaacaacatagcaattaagactgagtctcactctgtcatccaggctggagtgcagtggcacgatcttgactcactgcaagctccgcctcctgggttcacgccattctcctgcctcagcctcctgagtagctgggactacaggcgccctccaccacacccggctaattttttgtatttttagtagagacagggtttcactgtgttagccagaatggtctcgatctcctgacctcgtgatccgccctcctcggcctcccaaagtgccccacaaccatttttacttactgatgtaaatactttttaggataaaatagagtataaatcaaaaaaaaaaaaaaaaaaaaaaaaaaaaaaa

SEQ ID NO: 405733 - DNA, 1000 bp, Homo Sapiens; identical to SEQ ID NO: 224511

SEQ ID NO: 405734 - DNA, 1000 bp, Homo Sapiens; identical to SEQ ID NO: 293653

SEQ ID NO: 405735 - DNA, 1000 bp, Homo Sapiens; identical to SEQ ID NO: 224512

SEQ ID NO: 405736 - DNA, 1000 bp, Homo Sapiens; identical to SEQ ID NO: 293655

SEQ ID NO: 405737 - DNA, 1000 bp, Homo Sapiens; identical to SEQ ID NO: 224513

SEQ ID NO: 405738 - DNA, 1000 bp, Homo Sapiens; identical to SEQ ID NO: 293656

SEQ ID NO: 405739 - DNA, 971 bp, Homo Sapiens
ctaggtcacagaagcagtgggtcagaagccagaggggacgtggggagtgccaccctggagcctaccggcacacctgctgagatggaggcctcagatgggcaagggggtgaaggggacaagccactagagcaggtgacaaatgtgtcatgcctggagacaagctccagcgccagccctgctagagactcgctcatgcgccatgccaagggcctggatcaggacaccttcaaaacttgtaaagaatacctaagaccgctgaagaagttcctgcgaaagttgcacctgcccagggaccttccccagaagaagaagctgaagtacatgaagcagagccttgtggtcctaggggaccacatcaacacctttctgcagcattactgccaagcctgggaaatcaaacactggagaaagatgctctggcggttcatctccctcttctcggagctggaagcaaagcagcttcgccgactttacaagtacaccaagagcagccagccggccaagttcctggtgacattctgcgcctcggatgcgccggagaggtccttgctggccgaccgggaagacagtctgcccaagctctgccatgcatgggggctgcacagcaacatcagcggcatgaaggagcggctgtccaacatgcagaccccaggtcaagggagccccctgcctgggcagccaagatcccaggaccatgtcaagaaagattctttaagggagctttctcaaaaaccaaaactcaagaggaagaggataaaggaagccccagaaactccagagactgaaccgtaagaagaccaactgggacaaagggcccgcttgtcctggctctcagagcacggggaatggagaccaaaaagggaaaagaattgtccttatcaaaaagattctcaggtcttaattaggaataaatgaggtgggaaataaaaaaaaaaaaaaaaaaaaaaaaaaaaaaaaaaaaaaaaaaaaaa

SEQ ID NO: 405740 - DNA, 1000 bp, Homo Sapiens; identical to SEQ ID NO: 224514

SEQ ID NO: 405741 - DNA, 1000 bp, Homo Sapiens
gggcatacggggctacctgatggaggtcaagccagccaacgcgtgccatcccatcgaggccccgcgactgggcaaccgctctctgggctccatcgcgctgatccgccactacgactgcaccttcgacctcaaggtgctgaacgcccagcgcgccggcttcgaggcggccatcgtgcacaacgtccactccgacgacctcgtgagcatgacccacgtctacgaggacttgaggggccagatcgccatcccctcagtgttcgtgagcgaggccgcctcgcaggacctgcgggtcatcctgggctgcaacaagtcggcccacgcgctgctcctgcccgacgacccaccgtgccacgacctgggctgtcaccccgtgctgaccgtgtcctgggtgctgggctgtaccctggccctggtcgtatcagccttctttgtcctgaaccacctgtggctctgggcccaggcctgctgcagccacagacggccggtgaagacgtctacctgccagaaggcccaggtccgcaccttcacgtggcacaacgacctgtgtgccatctgcctggatgagtacgaggagggcgaccaactcaagatcctgccctgctcccacacctaccactgcaaatgcattgacccctggttctcccaagccccccggcgctcctgccccgtgtgcaaacagtcggtggccgccacagaagacagctttgactccaccacctacagcttcagggacgaggacccctccctaccgggccaccggccccccatctgggccattcaagtccagctacgctcccggaggctggagctgctgggccgcgccagtccccactgccactgcagcaccacgtccctggaggcagagtataccactgtctcctcagcccctcctgaggcccctggtcagtaaagatctagggcagggaggggggtgcaatgaggaatgtttctggtctgaaaagaataaagtgggtttgaaagcggaaaaaaaaaaaaaaaa

SEQ ID NO: 405742 - DNA, 1000 bp, Homo Sapiens; identical to SEQ ID NO: 293658

SEQ ID NO: 405743 - DNA, 1000 bp, Homo Sapiens; identical to SEQ ID NO: 224516

SEQ ID NO: 405744 - DNA, 1000 bp, Homo Sapiens; identical to SEQ ID NO: 293660

SEQ ID NO: 405745 - DNA, 1000 bp, Homo Sapiens; identical to SEQ ID NO: 224517

SEQ ID NO: 405746 - DNA, 1000 bp, Homo Sapiens; identical to SEQ ID NO: 293662

SEQ ID NO: 405747 - DNA, 1000 bp, Homo Sapiens; identical to SEQ ID NO: 118912

SEQ ID NO: 405748 - DNA, 1000 bp, Homo Sapiens
ggcttatgggccagggggtgggagggagaatgggcacagccagagcagagtggaagggttgggggaggcgataaagacagatgtttccgtattaccatttttctttcatggtccgagggagctgcccttcccccaagcccaggaaagtgaaaagagaagcaggaacagtaaaatactccacaggaaagaaaaatcttagtgatccctcctgctgtctctttccttttgcctattctggcaaattttgtaagtgaaatttgttaccaagatgtgaaaatcttataagaaagtctctaaatatttgagaataaaattatcaatgtctcagctctgcaggctgaaaaaacggaggctttacaaaataaaatcatgcttggaaaacttctcctctgagggatgtcaaaggctgcactgaataagctgtaaggtggtgctgaaatgggtcatttatttgcctgtgtaagctcaggcaggtgttggaattgaggaagtataggtaatgaaaaaagtaaccatgtcctcgggacatagcgactggtgatgaccacacaatcaacacaataaactctagcattcacattgtagtccagctcattcaagcaaagctatctccaatagggagtttaccctgtacagaacacgtgcatttccacctgttctcagactgaccctttgctcatcacaatagtgaaaaaaaacacagccctgggtggagatttaagatgctaatgagtcatgagacgtatgaacaagcatgtacagctactgcacacgtgcacccagaagaccgcccagaacatgcttgctagtaacacctcttcccacccacctcctgtaaataatcatgtaagactcccataaagggagtttctccagcagtgatcaatgctgtctcatccttaggagcagcccaccctgaatcctctcagggtgtacagtttattttgcacttaactttcaaaataatatttttcctttgtaataaattgctttgtacttc

SEQ ID NO: 405749 - DNA, 1000 bp, Homo Sapiens; identical to SEQ ID NO: 118913

SEQ ID NO: 405750 - DNA, 1000 bp, Homo Sapiens; identical to SEQ ID NO: 224519

SEQ ID NO: 405751 - DNA, 1000 bp, Homo Sapiens; identical to SEQ ID NO: 293665

SEQ ID NO: 405752 - DNA, 1000 bp, Homo Sapiens
tgtcttagcattttgtaactaataactgaaattttattcaaaggaattgtaaaccttaaaccaccaatttatttccatgtgaaaaagtgttacatatgacaagtgttttttgactgtaattgcgttaaatcttttgagaatgtaaatgccgggctaggcaattgcagttaatacatacagaggttagtgaagggcttattaagttgtaggggaagcaagctgggaagaatcagatcagatattttcctgacaaaaaaaaatgaccctacagagagcatcaaaatgtggtgttcttgttaagtaattgatcgtggtcttcgctttaatcttagttccgccaggcacggtggctcacacctgtaatcccagcactttgggaggccaaggcgggcggatcagctgaggtcaggagttggagaccagcgtggccaacatggtgaaaccccgtctctactaaagataaaaaaattagctgagtgtgttggtgggtgcctgtaatccagctacttgggagactgaggcaggagaattgcttgaacccaggaggcagaggttgcagtgagctgagattgtgccactgcactccagcctgggcaacaaagcaagactctgtctcaaaaaaataaaaataaaaaaaaaatcttagttccatggaattttaagcattgttccccctctaacctgtgtctaaagaattaaaagaatttggccgggtgcggcagctcatgcctgtaatcccaacactttgggaggctgaggcaggcggatcacgaggtcaggagatcgagaccatcctggccaacacggtgaaacctcgtctccactaaaaataccaaaaaaattagctgggcatggtggcacacacctgtagtcccctgtagtcccagctactcgggaggctgaggcaggagaatcgtttgaacctgggaggtggaggttgcagtgagccaagatcatgtcactgcattccagcctgggcaacagaggaagactccgtctc

SEQ ID NO: 405753 - DNA, 941 bp, Homo Sapiens
gcagtgtttgtgtacgtgcggccgtggcggggctggacagggtccgggtcgttgaggattaggctgctcgggcgtaaccggagctggggcgcggctgccaagggccggcccggaagtcccagcggtctttaaattctcccgtgctagggccagcctgcgcattcttacctgtcggggtgcggcgagtgtctcacctctctgcacttccaaggactcttgtcatctgccttaggcgggaaatgctgttgctggattgcaaccccgaggtggatggtctgaagcatttgctggagacaggggcctcggtcaacgcacccccggatccctgcaagcagtcgcctgtccacttagccgcaggaagcggccttgcttgctttcttctctggcagctgcaaacgggcgctgacctcaaccagcaggatgttttaggagaagctccactacacaaggcagcaaaagttggaagcctggagtgcctaagcctgcttgtagccagtgatgcccaaattgatttatgtaataagaacgggcaaacagctgaagatctcgcttggtcatgtggatttccagactgtgccaagtttcttacaacaattaaatgtatgcagacaataaaagcaagtgaacaccctgacaggaatgattgtgttgccgtgctcagacagaaacggagtctcggaagtgtagaaaataccagtgggaaaaggaagtgctgatgtcacgtgggttatgaagaagtctgaagaacgccttcatttcatgcaaatctacaagctcctgcttttggctttaccatatgttgtgtctaatctccttctgagaaggacgagaaactttcttccaagtgaagatccatttaagaacacatgtatttacatgcctataatatgctggttgtgtatgctttgtcttttaagttattaaaggaacgtctagaaaaa

SEQ ID NO: 405754 - DNA, 1000 bp, Homo Sapiens; identical to SEQ ID NO: 293666

SEQ ID NO: 405755 - DNA, 1000 bp, Homo Sapiens; identical to SEQ ID NO: 293667

SEQ ID NO: 405756 - DNA, 1000 bp, Homo Sapiens; identical to SEQ ID NO: 117558

SEQ ID NO: 405757 - DNA, 1000 bp, Homo Sapiens; identical to SEQ ID NO: 293669

SEQ ID NO: 405758 - DNA, 1000 bp, Homo Sapiens; identical to SEQ ID NO: 224522

SEQ ID NO: 405759 - DNA, 916 bp, Homo Sapiens
tgcctcagacaagcaggggcaagtctgctaaggaagctgtggccagaagcacagatcagaaacacgatggctctgttaacagccgaaacattccgcttacagtttaacaacaagcgccgcctcagaaggccttactacccgaggaaggccctcttgtgttaccagctgacgccgcagaatggctccacgcccacgagaggctactttgaaaacaagaaaaagtgccatgcagaaatttgctttattaacgagatcaagtccatgggactggacgaaacgcagtgctaccaagtcacctgttacctcacgtggagcccctgctcctcctgtgcctgggagctggttgacttcatcaaggctcacgaccatctgaacctgggcatcttcgcctcccgcctgtactaccactggtgcaagccccagcagaaggggctgcggcttctgtgtggatcccaggtcccggtggaggtcatgggcttcccagagtttgctgactgctgggaaaactttgtggaccacgagaaaccgctttccttcaacccctataagatgttagaggagctagataaaaacagtcgagccataaagcgacggcttgagaggataaagcagtcctgaagtgtggatgttttagagaatgacttaagaagtttgcagcttggacccgtatcccactcattatcaagaagcaactcaagatgactttccctggggcatgtcagttgcctcatagcctgctggtcctgtaagcaagcactaagctccacagtgccagttccttgccccaacctggccccatccaagtacagaagaccttcctttcctcctttttccatattgctttctgttctaagtgggtgaataattttataattgaaaaaataaagataaagtctgtaaatccagccgggtacgg

SEQ ID NO: 405760 - DNA, 1000 bp, Homo Sapiens; identical to SEQ ID NO: 293670

SEQ ID NO: 405761 - DNA, 1000 bp, Homo Sapiens; identical to SEQ ID NO: 118914

SEQ ID NO: 405762 - DNA, 1000 bp, Homo Sapiens
ggacatctggaacatccatgggaaagaatcatgtgatgtacagctttatataaagagacaatctgaacactccatcttagcaggagatccctttgaactagaatgccctgtgaaatactgtgctaacaggcctcatgtgacttggtgcaagctcaatggaacaacatgtgtaaaacttgaagatagacaaacaagttggaaggaagagaagaacatttcatttttcattctacatttcgaaccagtgcttcctaatgacaatgggtcataccgctgttctgcaaattttcagtctaatctcattgaaagccactcaacaactctttatgtgacagatgtaaaaagtgcctcagaacgaccctccaaggacgaaatggcaagcagaccctggctcctgtatagtttacttcctttggggggattgcctctactcatcactacctgtttctgcctgttctgctgcctgagaaggcaccaaggaaagcaaaatgaactctctgacacagcaggaagggaaattaacctggttgatgctcaccttaagagtgagcaaacagaagcaagcaccaggcaaaattcccaagtactgctatcagaaactggaatttatgataatgaccctgacctttgtttcaggatgcaggaagggtctgaagtttattctaatccatgcctggaagaaaacaaaccaggcattgtttatgcttccctgaaccattctgtcattggactgaactcaagactggcaagaaatgtaaaagaagcaccaacagaatatgcatccatatgtgtgaggagttaagtctgtttctgactccaacagggaccactgaatgatcagcatgttgacatcattgtctgggctcaacaggatgtcaaataatatttctcaatttgagaatttttactttagaaatgttcatgttagtgcttgggtcttaagggtccataggataaatgattaaaatttctctcagaaacttaaaaaaaaaaaaaaaaa

SEQ ID NO: 405763 - DNA, 1000 bp, Homo Sapiens; identical to SEQ ID NO: 224524

SEQ ID NO: 405764 - DNA, 1000 bp, Homo Sapiens; identical to SEQ ID NO: 224525

SEQ ID NO: 405765 - DNA, 1000 bp, Homo Sapiens; identical to SEQ ID NO: 118915

SEQ ID NO: 405766 - DNA, 1000 bp, Homo Sapiens
gcataatgaaaattatgatgaatcactcattggtaggaaaataatgatataagtttcaaatatgtataattttacctatacttggtaatgctttgttttatagagcctgttaagctgctattgatagtcggagcttatatactgtgacttctgaagactatacatgaattccacaatcagtgctttgttgatacaaaatccttaaaagggaggcactttaaagaatatgtatttttcacttttcttaatatgtttcatcggtgacaggcatgataatatttctatatgtaatgggtaattgggaaaaaatagatgataaataaaattgctctaaagaagttaaaaaactgaatgaacagctaatactggtataaagtaactaatgtttggagccaacatttgttccttgtgtcagcaaaaggatattcacattccatgatccctggctgagaattctgcctctagtctttcttacccagctgttgtctatccttgttcaattataaatactgctaagggcatttttaaaatacgatcttgtactccttaaatttgaatccgtcggcacggtcactcataggaaaatgatcaaacaagcaagccagtcatgatttgactccttcccatctcatttcttactgccttacgctcatcctgaggtccaccttggtctctaaaaacaccatgtgttctcatgcctccatgtcttttcacacactgttccatttgctcttcctcccacattacattgaaactttcaagcctcagtcgaaacattgcttcttctggatagcagccttcttgacatccctcctcactccccagtccctacagggcttccatagctctttatgtgcacttcgatcccagcattttccatcgacctgtaattgtttctgctacctgacaatcatcgccttgagtactgggacaacctttgattactcattatatcctcaataaatatttgttgaactaaaaaaaaaaaaaaaaaaaaaaa

SEQ ID NO: 405767 - DNA, 1000 bp, Homo Sapiens; identical to SEQ ID NO: 118916

SEQ ID NO: 405768 - DNA, 1000 bp, Homo Sapiens; identical to SEQ ID NO: 293676

SEQ ID NO: 405769 - DNA, 1000 bp, Homo Sapiens
tctacctcagctatggaacaggccttgactggtgaggcccaaagccggtggccccgcagaggcgggagtggggccatggctgaggcgcctgggcccagtggcgaatcccgaggacactcagccactcagctgccagcggaaaaaactgtcgggggaccatcgaggggctgctcaagctccgtgctcagagtgtcccagttggtgctccaggccatctccactcacaaagggctgactctggcagctctcaagaaggagctccgaaacgccggctacgaagtgcgcaggaagagcggccgccacgaagcgcccagggggcaggccaaggccacgctcctccgggtcagcggcagcgacgccgccggctacttcagggtctggaaggttcccaagcccaggagaaagccgggacgcgcgaggcaagaggagggcacgcgcgctccctggaggaccccagccgcgccccggagctcccggaggcgccgccagccccttcgcaaggcggccaggaaggccagagaagtgtggagacggaacgcgagggcgaaagccaaggccaatgccagggcgaggaggaccaggagggcaaggccgagagccaaggagccgccgtgtgccagagccaaggaggaagcgggagcgacagcggcagacgaggggcgaggacaggccgtgaaggaagacaccacgccgaggtcagggaaggacaagaggcgaagctccaagcccagggaagagaagcaggagcccaagaagcccgcacagcggaccatccagtagccaacgcgggctaaaaccgaccggacatctagcgggcaggggaagactccactaaagacttccacaaagacctcccctaaatctgaaggtcttcctgatccagttgggaatgcatcttgtgggagcagcttcactcccaccacggaccaatgcctttcccccataggccccaagaagagcggctgtcacactcattgaaatgaaatggacctctagacca

SEQ ID NO: 405770 - DNA, 1000 bp, Homo Sapiens; identical to SEQ ID NO: 224527

SEQ ID NO: 405771 - DNA, 1000 bp, Homo Sapiens; identical to SEQ ID NO: 116752

SEQ ID NO: 405772 - DNA, 1000 bp, Homo Sapiens; identical to SEQ ID NO: 293679

SEQ ID NO: 405773 - DNA, 1000 bp, Homo Sapiens; identical to SEQ ID NO: 293680

SEQ ID NO: 405774 - DNA, 1000 bp, Homo Sapiens
catttatctggagatccggaacttctgaagttattccaggaatctgaaagagatgatgtattttctactctgacttcacagtggaaggatgtgcccgtggaacaggtgacacacgcagacagagagcaaaccaagaaggtggtgtacgcggtggtctatggagcagggaaggagcggctggctgcttgccttggagttcctattcaggaagctgcccagtttttggagagttttttgcagaagtacaagaaaatcaaggacttcgcccgagcagctattgcccagtgtcaccagacaggctgtgtggtgtccatcatgggcagaaggagacccctgccaaggattcacgctcatgaccagcaactccgggcacaagcagagcgacaggcagtgaacttcgtggtgcaaggctccgctgctgacctctgcaagctggccatgatccatgtcttcactgcagtggctgcttcccacaccttgacggccaggctggtggcccagatccatgatgagctgctgtttgaagtggaagatccgcagatcccggagtgtgcagctctcgtcaggaggaccatggagtccttggaacaggtgcaggcattggagctgcagcttcaggtacccctcaaggtgagcctgagtgccggccgctcatggggacacctggtgccactgcaggaggcctggggccctccgccaggcccatgtcgcactgagtctcccagcaacagcctggctgcccctgggtcccctgccagcacccagcccccacccctgcatttttcgccttcattttgtctgtagccccaggcaacagtgggaggagagaactggtttccagcagtccattgtgtggccttccccaaggtcaccagctctgtacgccccaggacgcattaaccctttggggctggggtggcccgccatcccctggagtaaatgcctgtgcaaagccctcctcatccttgtctgagtgaattcttcctgtgagtgggaagtg

SEQ ID NO: 405775 - DNA, 1000 bp, Homo Sapiens; identical to SEQ ID NO: 293682

SEQ ID NO: 405776 - DNA, 1000 bp, Homo Sapiens; identical to SEQ ID NO: 224529

SEQ ID NO: 405777 - DNA, 1000 bp, Homo Sapiens; identical to SEQ ID NO: 118918

SEQ ID NO: 405778 - DNA, 1000 bp, Homo Sapiens; identical to SEQ ID NO: 293686

SEQ ID NO: 405779 - DNA, 1000 bp, Homo Sapiens; identical to SEQ ID NO: 118919

SEQ ID NO: 405780 - DNA, 1000 bp, Homo Sapiens
tccagaaagcactgtttttagcattacgtatctgtgtgttactgctgtgttatttacactgttttgtattgtacaatatatatgctcagcactgcccccttctctgattgcttatgaaaaacaaaatgatgtacattactgtgaatttttataccactcatttttaaaagggctgtcttttcattttagttttccatactgtggtggtgtacacaggatagaacacccttttttaaaacacagtctttccccttgctcattgtatgttgatgagttgattaagtctaacagattcatcaagactccattgctttattatagagacatttgaaaatatccattaatgtgaatatcacctgaattcagtctgtttggtgtctgcacagactggaattcaatctgtcaaatttgttttattctcaagtggagaacttctcccacataatatatatatatatatatattttaatttatgagaattttggacaattggaaaggtagaaaagaaaagccaagatcatactaaggactggaaatattttgttctatggaatcaaatttctcacaatgctgtatgatactatttaaatttggaggacaacttatcttcactaagctgaatcaggtggagaaagtaatctccttgcaatcatgtggacaccaatcacaaaagtaaagccctggtgttgtgttttcatgtcttttttcagccctctcagatccaaatgttattatgcactttttaatgtttgtaaacttttactaataattagtgtgaattgcattctgatacaataatgattatcattagaagctaacaaaattctcattaatactgtgtttgatggcctctgctgtgttttaacatcgtgcttcttatatggaaagtttttgtgagctgtgtaatccctctggtcagtattatgaaatcatttgtcagtggtaataaataaggaaccagtaatatgccaatggttcatgaattactggacaaatagca

SEQ ID NO: 405781 - DNA, 834 bp, Homo Sapiens
cggccgcgcaggacttgacatgctgcccgactgcctgtcggccgagggcgagctgcgctgccgccggctgctggcaggggccacggcccggctccgcgcgcggcccgcgtcggccgcggtgctcgtgccgctctgctcagtgcgtggggtgccggcgctgctgtacacgctgcggtccagccgcctgaccgggaggcacaagggcgacgtcagtttcccaggcggcaagtgcgacccggctgaccaagatgtggtgcacacggccctgcgggaaacccgggaggagctgggcctggcagtgcccgaggagcacgtgtggggcctgctgcggcctgtgtatgatccgcaaaaggccaccgtggtgccagtgcttgctggtgtaggcccactggatccccagagcctcaggcccaactcggaggaggtgagctgggggatatgagggggttgggctgttccagtcctctgtctaccctctctgcctcctgcctgcaggtagatgaggtgtttgcactgccgctggcccacctgctgcagacgcagaatcagggctatacccacttctgccggggtggccacttccgctacacactacccgtcttcctgcatggaccacaccgggtctggggcctcacagctgtcatcactgagtttgccctgcagctgctggcacctggtacctaccagccccgcctggccggcctgacctgctcaggggctgagggtctggcccgccctaagcagcccctggcttcaccctgtcaggccagctccactccaggactgaataaaggtctttgacagctctaaaaaaaaaaaaaaaaaaaaaaaaaa

SEQ ID NO: 405782 - DNA, 1000 bp, Homo Sapiens; identical to SEQ ID NO: 293688

SEQ ID NO: 405783 - DNA, 1000 bp, Homo Sapiens; identical to SEQ ID NO: 220446

SEQ ID NO: 405784 - DNA, 1000 bp, Homo Sapiens; identical to SEQ ID NO: 293690

SEQ ID NO: 405785 - DNA, 1000 bp, Homo Sapiens; identical to SEQ ID NO: 293691

SEQ ID NO: 405786 - DNA, 1000 bp, Homo Sapiens
cagtgttagaggatccaagcgacctaaacagctgctttatgaaatatccttactttatctgggcttaataagtcactgacatcagcactgccaactcggctgcaattgtggaccttccctaccaaagggagtgttgaaactcaagtcccgccctggctctttagaatggaccactgagagccacaggaccgttttggggctgacctgtcttattacgtatgtacttctaggttgcaaggttttgaaattttctgtacagtttgtgaggacctttgcactttgccatctgatgtcgtacctcggttcactgtttgttttcgaatgccttgttttcatagagccctattctctcagacggtggaatatttggaaaaattttaaaacaattaaaattttaaagcaatcttggcagactaaaacaagtacatctgtacatgactgtataattacgattatagtaccactgcacatcatgtttttttttttaagacaaaaaagatgtttaaagaccaaaaactgtgctgagaaagtatgccccacctatctttggtatatgataggttacataaaaggaaggtattggctgaactgaatagaggtcttgatctttggaatgcatgccagtaatgtattttacagtacatgtttattatgttcaatatttgtatttgtgttctcttttgttatttttaattagggtatatgaatattttgcaataattttaataattattaagctgtttgaaggaaagaatatggatttttcatgtcttgaggttttgttcatgccccctttgactgatcagtgtgataaggactttaggaaaaaaagcatgtatgttttttactgtttgtaataagtactttcgttaatcttgctgcttatgtgccaatttagtggaaaaaaacaacccttgctgaaaaattccctctttccattctctttcaattctgtgatattgtccaagaatgtatcaataaaatactttggttaactttt

SEQ ID NO: 405787 - DNA, 1000 bp, Homo Sapiens; identical to SEQ ID NO: 224531

SEQ ID NO: 405788 - DNA, 1000 bp, Homo Sapiens; identical to SEQ ID NO: 224532

SEQ ID NO: 405789 - DNA, 573 bp, Homo Sapiens; identical to SEQ ID NO: 224533

SEQ ID NO: 405790 - DNA, 1000 bp, Homo Sapiens; identical to SEQ ID NO: 118923

SEQ ID NO: 405791 - DNA, 1000 bp, Homo Sapiens; identical to SEQ ID NO: 221212

SEQ ID NO: 405792 - DNA, 1000 bp, Homo Sapiens; identical to SEQ ID NO: 293695

SEQ ID NO: 405793 - DNA, 1000 bp, Homo Sapiens; identical to SEQ ID NO: 293696

SEQ ID NO: 405794 - DNA, 1000 bp, Homo Sapiens
aaacgatgggcagttcactgtgattcagcttgttggcatgctgagaggtatctctgcaggaatgaagtacctttctgacatgggctatgtgcatagagatcttgctgccagaaacatcttaatcaacagtaaccttgtgtgcaaagtgtctgactttggactttcccgggtactggaagatgatcccgaggcagcctacaccacaaggggaggaaaaattccaatcagatggactgccccagaagcaatagctttccgaaagtttacttctgccagtgatgtctggagttatggaatagtaatgtgggaagttgtgtcttatggagagagaccctactgggagatgaccaatcaagatgtgattaaagcggtagaggaaggctatcgtctgccaagccccatggattgtcctgctgctctctatcagttaatgctggattgctggcagaaagagcgaaatagcaggcccaagtttgatgaaatagtcaacatgttggacaagctgatacgtaacccaagtagtctgaagacgctggttaatgcatcctgcagagtatctaatttattggcagaacatagcccactaggatctggggcctacagatcagtaggtgaatggctagaggcaatcaagatgggccggtatacagagattttcatggaaaatggatacagttcaatggacgctgtggctcaggtgaccttggaggatttgagacggcttggagtgactcttgtcggtcaccagaagaagatcatgaacagccttcaagaaatgaaggtgcagctggtaaacggaatggtgccattgtaacttcatgtaaatgtcgcttcttcaagtgaatgattctgcactttgtaaacagcactgagatttattttaacaaaaaaagggggaaaagggaaaacagtgatttctaaaccttagaaaacatttgcctcagccacagaatttgtaatcatggttttactgaagtatccagttcttagtccttagtct

SEQ ID NO: 405795 - DNA, 1000 bp, Homo Sapiens; identical to SEQ ID NO: 118924

SEQ ID NO: 405796 - DNA, 1000 bp, Homo Sapiens; identical to SEQ ID NO: 224537

SEQ ID NO: 405797 - DNA, 1000 bp, Homo Sapiens; identical to SEQ ID NO: 224538

SEQ ID NO: 405798 - DNA, 1000 bp, Homo Sapiens; identical to SEQ ID NO: 293701

SEQ ID NO: 405799 - DNA, 878 bp, Homo Sapiens
gataaatggccttaggccgcgggcagcgagatgttgcgttccggtgtgggtgtgggtgtgcctccgacggcgtctcggtgccagtgtcgaggttctttctgcttagctacccggagccgactacggaggaggacacctgagtttacgtctcttccatctgctgctcgcctcagctgcctgggtccccgacgagagccaggtgacacttaactccgccatctgcgttttgagcactgttctcataatggagtttcctgatttggggaagcattgttcagaaaagacttgcaagcagctagattttcttccagtaaaatgtgatgcatgtaaacaagatttctgtaaagatcattttccatacgctgcacataagtgtccgtttgcattccagaaggatgtgctcgtcccagtatgcccactctgtaataccccaatcccagtaaaaaagggccagataccagacgtggtggttggtgatcacattgacagagactgtgactctcaccctgggaagaagaaagagaagatttttacataccgttgctcaaaagagggctgcaagaagaaagagatgctgcagatggtatgtgcccaatgtcacggcaacttctgtatccagcacagacaccctttggaccacagctgcagacacgggagtcgccccaccatcaaagctgggtgagaagagactccgctgcgatggctcggagcacgcagtagcatgcgtggaagcagcttacactctagtgggaagtggagccccattgagcaccatcccacactggctgctgatcttgtttgttgagggagatggtactataataaaattgaatgctgaagttgaaaaaaaaaaaaaaaaaagaaaaaaaaaaaaaaaa

SEQ ID NO: 405800 - DNA, 1000 bp, Homo Sapiens; identical to SEQ ID NO: 293703

SEQ ID NO: 405801 - DNA, 1000 bp, Homo Sapiens
aagagcgccaaggaccgggaggacgtgaagaacgagatcaacatcatgaaccagctcagccacgtgaacctgatccagctctatgacgccttcgagagcaagcacagctgcacccttgtcatggagtacgtggacgggggtgagctcttcgaccggatcacagatgagaagtaccacctgactgagctggatgtggtcctgttcaccaggcagatctgtgagggtgtgcattacctgcaccagcactacatcctgcacctggacctcaagccggagaacatattgtgcgtcaatcagacaggacatcaaattaagatcattgactttgggctggccagaaggtacaagcctcgagagaagctgaaggtgaacttcggcactcctgagttcctggccccagaagtcgtcaattatgagtttgtctcattccccacagacatgtggagtgtgggagtcatcacctacatgctactcagtggcttgtccccatttctaggggaaacagatgcagagaccatgaatttcattgtaaactgtagctgggattttgatgctgacacctttgaagggctctcggaggaggccaaggactttgtttcccggttgctggtcaaagagaagagctgcagaatgagtgccacacagtgcctgaaacacgagtggctgaataatttgcctgccaaagcttcaagatccaaaactcgtctcaaatcccaactactgctgcagaaatacatagctcaaagaaaatggaagaaacatttctatgtggtgactgctgccaacaggttaaggaaatttccaacttctccctaatcttcaactctgctgctccaatgggtccagaaattactgaggccagtggtgaagtgaagagatgactcaaacatttaaataatttggcttttggtattattgattccacttatttgtaaatggttatggctgctgcttcctgtggatgaaagtggctgtaagagctcctagacgtttctgctgt

SEQ ID NO: 405802 - DNA, 1000 bp, Homo Sapiens
tccctgcaaggaggatgagctggtcagggatagccctgctcggaaggcagtgtctcgctacctgcggtgcctgtcacaggccatcggctggagcgtcaccctgctgctgatcatcgcggccttcctggcccgctgcctgaggccctgcttcgaccagacagtcttcctgcagcgcagatactggagcaactacgtggacctggagcagaagctcttcgacgagacctgctgtgagcatgcgcgggacttcgcgcaccgctgcgtgctgcacttctttgccagcatgcggagtgagctgcaggcgcgggggctgcgccggggcaatgcaggcaggagactcgagctccccgcagtgcctgagccccccgcagtgcctgagcccccagaaggcctggatagtggaagtgggaaggcccacctgcgcgcaatctccagccgggagcaggtggaccgcctcctaagcacgtggtactccagcaagccgccgctggacctggctgcatcccccgggctctgcgggggtggccttagccaccgcgcccctaccttggcactgggcacgaggctgtcacaacacaccgacgtgtagggtcctggccaggcttgaagcggcagtgttcgcaggtgaaatgccgcgctgacaaagttctggagtctttccaggccgtggggaccccacggcaggcaccctaagtcttgttagcctcctttttaaagtagcccaatctctgcctagtttctgggtgtggcctccagcgcgcttcacagactttaatgtggactcggttcaccgagggccttgttaaatacaggttcagacagtgtagccaggaccgagtctgagattctgcattttaaacaagctcctggaggctgatgtgcttttggtcagtgaaccaaactttgagtagcaagaatctaagtaaatctgccatgggttctgggttctagatgtcaattctaaataataataatgaccttaaaaaaaaaaaaaaaaaaa

SEQ ID NO: 405803 - DNA, 1000 bp, Homo Sapiens; identical to SEQ ID NO: 293704

SEQ ID NO: 405804 - DNA, 1000 bp, Homo Sapiens; identical to SEQ ID NO: 220447

SEQ ID NO: 405805 - DNA, 1000 bp, Homo Sapiens; identical to SEQ ID NO: 293706

SEQ ID NO: 405806 - DNA, 1000 bp, Homo Sapiens; identical to SEQ ID NO: 224540

SEQ ID NO: 405807 - DNA, 1000 bp, Homo Sapiens; identical to SEQ ID NO: 118927

SEQ ID NO: 405808 - DNA, 866 bp, Homo Sapiens
gcttctcccagccggagtaggtgggggaggccagacatggaggcccttcctccagtcagatccagccttttggggaacctgttgcaggttacgaggctctcagtgctgttggttcagaaccgagatcacctctataatttcctgctcctcaagatcaacctcttcaaccactgggtgtcagggctggcccaggaggcccgggggtcctgtaactggcaggcccacctacccctgggagctgcagactgccccctgggccaggctctccgggctgggctggctctgatacaggtccccgtatggctggtgctacagggacccaggctgatgtgggctggcatgtggggcagcaccaagggcctgggcctggccttgctcagtgcctgggagcagctgggcctgtctgtggccatctggacagatctgtttttgtcatgtctgcacggcctgatgttggtggccttgctcttggtggtagtgacctggagggtgtgtcagaagtcccactgcttccgactgggcaggcagctcagtaaggccttgcaagtgaactgcgtggtaaggaagctcctggtacagctgagacgtctgtattggtgggtggagactatgactgccctcacctcctggcacctggcctatctcatcacttggaccacctgcctggcctcccacctgctgcaggctgcctttgagcacacgacccagctggccgaggcccaggaggttgaaccccaggaggtctcagggtcttccttgctgccctcactgtctgcgtcctcggactcagagtctggaacagttttgccagagcaagaaactcccagagaataaatgtatccccatctacaaaaaaaaaaaaaaaa

SEQ ID NO: 405809 - DNA, 1000 bp, Homo Sapiens; identical to SEQ ID NO: 293710

SEQ ID NO: 405810 - DNA, 1000 bp, Homo Sapiens; identical to SEQ ID NO: 224542

SEQ ID NO: 405811 - DNA, 1000 bp, Homo Sapiens; identical to SEQ ID NO: 224543

SEQ ID NO: 405812 - DNA, 1000 bp, Homo Sapiens; identical to SEQ ID NO: 118928

SEQ ID NO: 405813 - DNA, 1000 bp, Homo Sapiens
ccctacaaatgtgaagaatgtggcaaagctttcaaccgatcctcaaaccttactaaacataacataattcatactggagagaaatcttacaaatgtgaagaatgtggtaaagcctttaaccaatcctcaactcttactaaacataggaaaattcagcagggcatggtggctcatgcctgtaatcccaacactttgagaggactaggtgagcagatcgcgaggtcaggagttcaagaccagcctggccaacatggtaaaaccccatctctactaaaaatacaaaaatttgctgggtgtggtggcaggcgcctgtaatcccagctacttgggaggcagaggcaggagaatcatttgaacctgggaggcagaggttgcagtgagccaagatcgtgccattctactccagcctgggccacaaggcaagactctgtctcaaaaaaaaaaaaaaaagaaaagaaaattcatactggaacgaaaccctacaattgtgaagaatgtgccagtgctttcaaccagtcctcgaacctttttaagaaaataatttatactggagagaaattctacaaatgtgaagaatatggcaaagcctttaaccagtcttcaactcttactaggcattaaaaattcatactgtacagaaaccctacgagggtgaaaaacatggcaaagcctttaacaagccctcaattcttaacagacataacataattcatactggaaagaaactctgcaaaccagaaagatctggcaatgcttttgacaacacctcaaacttttctaaccataaaagaaattatactggtgagaaatcttagaaatctgaagaatgagacaaagcctttaaatggttgtcacacttgattgtaggccaggtgtggtgtcttacacctgtaatcccagcactgtgggaagccagggcaggtggattgcttgagcccaggagtttgagaccagcctggtcaacatggaaaatccccgtctctacaaaaaaaaaaaaaaa

SEQ ID NO: 405814 - DNA, 1000 bp, Homo Sapiens; identical to SEQ ID NO: 224545

SEQ ID NO: 405815 - DNA, 1000 bp, Homo Sapiens; identical to SEQ ID NO: 118929

SEQ ID NO: 405816 - DNA, 1000 bp, Homo Sapiens
gtggttaagctaattacaagaaagctcagaaaaaggagagcagacactgcaaatgcgcaataggcttaaggtaatgaagctgcaggatacaccagcccagatcaagaagctggtaaataatgaggatggcaatgcccaatactgcctggcagtgatgagagtcaataatgtcagctgaatttctccataaagggcttgacttagggttgggccaggaaaagccattactgaatggagatctggaagggaaatggaaagcaatgggacagcaaagggaaacacagccagctcagcaggaagcaagatgggaacttcatggtctccaaggtctctgctccccttctgtgatgctcacttcttgactccctcctgaccttgacccaaagacaggggctgtcaggagtactgcgaggaggtggggaagctttaggcaggcttcctggaactactgttttacttaatatatttgtgcttctgcaacctcatgaggaggtagagatattaaataaagaaacaaaccctttcctttcattttagactacctaatttaagaaaagaatatttgtgtaagttaaaaaaatcctccagtaagcttttgactctatccaagggttcagcacacaaacgtctttggagaacaagaggtttggttcacatcataaaagaaaagggatagagattaaagtgttgtgaaaggcgtcgaagcaacaagcaagagagaaagaagcacagaaaggctgagaaaatacccatccatttcttttcagccaggggagatcagtaaaaacctcctgtctccaaaaagcatggacatttttattaaacagcaataggacctggaattagctggaggctgggtacagttgcaggttgctttatacaagtatcacattcctgaagaagtgtgtagactgacgttctgtaaaccagatccaattttaattgccatttaaatggaagtcagtgaaaaactcttttagtaaagcaaatgatcatcacc

SEQ ID NO: 405817 - DNA, 1000 bp, Homo Sapiens; identical to SEQ ID NO: 293716

SEQ ID NO: 405818 - DNA, 1000 bp, Homo Sapiens
gctaggggctggagaacagagctcagagcacccagtgtagggaaacacagccagaccactgtggtgacagactttctttataaacatttggaagttttctcccccatcttcttaagaagcaggggggcaggtggaggagagtgaggggagagctgcccggtgcagacccaggacgagggctgcacttggtgtggccgtgtcctgagcctcagtgaggctgggcagatggtctcggagcctccatggggcgtagcaggaaccgggcttggcttcctattgtgactgatgagaaaagtgaccacgtgggggtcagtcgggggcaaggggctcagccccactggactctgggctgcagaggccaccccccaggtgggggtgcccgcagggatggaggcagctcctgaactggtggccagcccacggggtactggaagacagtggttctgatgggttcagccctagagagagagagagaagcggggagaataagagtgcactacagcccaggcttatgccacccccagcccacctgcctcaccaccctggctgtggggagggtcagctgcctgcatgacttttctggaaggcagagcctcgaaaataggcagaccgtttgagccagcgacctcacctctaggaactgagcccaaggaaatagcggggttgcaggcagacattgagctgcgagacaatgggaataaccttcgtgtccacctgtgggggactgattcaatacatatgcacgtccacagcagagaatgccatgcggcctgtgtaagaattaaggcagatttatatgcactgatgaggaaagacatactgtgtgatagggagaaaaagcagcttataaaataatgtatatagcatgatactatttttgtttaaaaatatataaaatatataaatgcataaaaaaatcctggaagacacagcaaaaaaaaaaaaaaaaaaaaaaaaaaaaaaaaaaaaaaaaaaaaaaaaaaaaaaaaaaaaaaaaaaa

SEQ ID NO: 405819 - DNA, 1000 bp, Homo Sapiens
agtgcgctgagcgccaccttcagcggccccaagatcgccttctatgtgggtctcaagagcccccacgaaggctatgaggtgctgaagttcgatgacgtggtcaccaacctcggcaatcactatgaccccaccacgggcaagttcagctgccaggtacgcggcatctacttcttcacctaccacatcctcatgcgcggcggcgacggcaccagcatgtgggcggacctctgcaagaacgggcaggtccgggccagcgccattgcacaggacgccgaccagaactacgactacgccagtaacagcgtggtgctgcacttggattcaggggacgaagtgtatgtgaagctggatggcgggaaggctcacggaggcaataataacaagtacagcacgttctcgggctttcttctgtacccggattaggggcgcggggggtgcgaggcggggtggctgcaggccgcccggtctccgcccgggcgcggctccttggcaaaggccactctcgattcataacacttcctgacatctcctttggaaaagacaaatccctgcgtcctccctgccccgctcctggcctcagtgcgtctgcgacccaccacgctcagggctgtgctcctggtctccatccccatcccggcaagggaggaagggacgcccgagcccttgaggcggcggcacagactttgcaaacctgattagactggacaggcagggccgggagcctgccctcctcagacagcctcctcccagtgcctagaagcggagggctccgggccctggccagggaggtaggccagagggagcgcgggcttcctggggcgtccttctttgtgacccgaaatacttgtgcagatttccctgtccatcagccaaaaccccacccacagcagaattccagcaaacagaaaattcacctctccacaccgcattccctcctgactcagactcaccgcgatgcattaaattatgtttttagactttgaaaaaaaaaaaaaaaaaa

SEQ ID NO: 405820 - DNA, 1000 bp, Homo Sapiens
agttgccctctatatacttagcttaaaagatcaagaccgacgtgtcccaaatctccctccaagcaatatcacaagctcacaggagccggctctgctgcccacagcctcctcctcagcacctaatacatccctggtaaccacaccggcctccttacaagtacctgaaattactttctgtgaaatcctgccgtgtcaggagacttactgctgccccatccggggaatgaaagaagtctcttcaagtcctgtgcaaagacaatctgaggagaaggaattccatcagaggcgatggtcagaagacaaaagcaaatcagttttggcaagaaatgcactcagcggccctgactgggagagtgactggattgatacaaccatcagttctattcagattatggaaatccagcaaataatagatcatcagtattgcattcaaagcctccagtgcggatctggaaattataattacaatattcctgttaataaacacacacccaccaatgtcaagttctctctggaaataaacacaacagagccattgatagtcttccagtgcaaattcacccttggaaatatatgtttccatagtaaaaggggaaccaaagggatggaaagccacagagaaatctcccaggagatgacacagggatatcagcacatttggagcctccctgtagccccattttctgacagcatgttccatttccgtgtagctgcaccggatttagctgactgttcaactgatccttattttgctgggatattcttcaccgattacttcttttacttctatcgacgctgtgcctaatttgttcaagtttggggactttaccaaagaaaaatactcaggaatacatttaacagaaacgaacatcctcttgcaacttcttttttcttctttgtaaaacatcatttacgtttattgctgaaggactttttcaggctttagcttccaacagttttgagacattaatgaggagaataaaatgtttgctgaaacttg

SEQ ID NO: 405821 - DNA, 1000 bp, Homo Sapiens; identical to SEQ ID NO: 293717

SEQ ID NO: 405822 - DNA, 1000 bp, Homo Sapiens; identical to SEQ ID NO: 293718

SEQ ID NO: 405823 - DNA, 1000 bp, Homo Sapiens
ctcctaagctgcccccctacgtgtgggttgcgtctgagatgtggggcaggcgccactcacggaaaaaaggcatcagaggagcttccacatcatcggaacattttattcctcaggacgctacacgctcactttcctggcggagcaggtcagtgcatcgagttctgtttccgtggaaaatgtgcaccttggaaaccgcatgacagccccctcggcagggtccccgcggatccgccgcgacgcaggcacagcagcaagttcctccagcacgaagctggcctgcccgggcccaggtgtgagggactgttctgctcccagcagcgcccgctgacgcttccctctgcggtctcggcgcaagcgtctgtccctggccgccctcggagccgtgcccagcctggcatgcatatgcggtggttaaggatacagttaaagggtcaatcacgcgtgtccacgacagagacgcacgcggcctcacaccgactcctcggtggacagcaataatgggttgatatactcaaagccttcgaactctgactggtcgatcctctttatggcatccctgtgggcaaaggtggcaggggggaggggggtgaccgtgtgttcattcccttgggggaagcggagtcacgttcgcataagaatcctcccccaacgcccactggagagatgacaccaggcgggtgggactcaagggcaggctgggtcaccagctgcccaaggtgccggcctgccatggggctgcccgaggggtgctccagggacctgcacccagtgggactcactcatcgtctggggtcagctgcacgggctcgctggtgaactgtgtgtcaaagttgtccagaccgtagtcgtctgtgatctgtggctggaatggagggagcgcctgcttcttctccagcttggaaaaacaataggagaagggccagctccgcgcgggcatcatccctaccagattgagtgttttgcacgcacttcaatcacaaaatgaaacagtgagaaagtc

SEQ ID NO: 405824 - DNA, 1000 bp, Homo Sapiens
gcctgctggcctcctgctgtgaacattttgggcaataccgtctctgccagtgacccccaattgtccacttgtctccagcaagatcgaaccatgtaagtgccatttctgacaagttgggtgaacgttggtttcaaatcatcagctctgcattcaagtgccctgctacaattctgcctcactctgtgggaataactgcctgcctgggcacgttgctgttgctgcctcccaaacggcagtttctggggtcccaggtcatccaggctggatgtggcttgggagagacctgtggcaccaggttggagggaggtctcacctctcctttctgagctgtggactgcagcttcaggaccctatggatgaggccgaatgtcatgaagataatggaatttggagtctcaacaaagccaagccacatgccagagattcaccacctggggcccaggatcataagtgtgcccttaagaggccaaacagtccacctgtctaccaactagacatttggtctcagacagcaagaaaggctgcgtttatgtcattagggggaacaccacggtcttcggcatgagagaggtgtaattctcaagttcatcagagctcggcttcccccatgaggggaaacaatttgccaggttgaagaacacacgctttgagggttctcagaggctgacacctgttgtgaatcttggaaactcaagccccagtgcaaacggccttgaaggaggtcgagcatcatggttccaacaagtgactcgctttgataacccgatgtgtaagcagaatcgcaatgcatccgtccttccctaatcatcacgtggctgtcatctggtcaatgaactgaggcccgaaggcttgagtcaaactggttttcaaggctgtgctcatgggatttatatgtttcttgagccctgttggaggctcttggcaggtctgaacattaaacatttcttttcttccttttgaaaaaaaaaaaaaaaaaaaaaaaaaaaaaaaaaaaaaaaaa

SEQ ID NO: 405825 - DNA, 1000 bp, Homo Sapiens
gccccattcaagatgactgttctgctgggctacagcgtcttcctgctcatgatgaatgacttgctcccagccactagcacttcatcacatgcttcactagtacgtcctcatccatcaagagaccaaaagcgaggtgtctacttcgccctgtgcctgtccctgatggtgggcagcctgctggagaccatcttcatcacccacctgctgcacgtggccaccacccagcccctacctctgcctcggtggctccactccctgctgctgcactgcaccggccaagggagatgctgtcccactgcgccccagaagggaaataagggcccgggtctcacccccacccacctgcccggtgtgaaggagccagaggtatcagcagggcagatgccaggccctggggaggcagagctgacagggggctcagaatggacaagggcccagcgggaacacgaggcccagaagcagcactcggtggagctgtgggtgcagttcagccacgcgatggacgccctgctcttccgcctctacctgctcttcatggcctcctccatcatcaccgtcatatgcctctggaacacctaggcaggtgctcacctgcaaacttcagtctggacttctttttgccagagaactccagaaaccagtcaggctctcagtcagccttgtggccctgtcaaccgcctcatttttaacccagtcctctgtgtagtttcagaccagacctgaatagtctcctatgccctccaaaagtcgggtccttgctcctgcatgccatcagccccactcagccctcccatacctccctggctcctcaggattcaggttcctagggtacgtccttgattaaatcaccccaatatgcccctttgcagaaagtattggcttttccctgaattctgttatggtaaaaaaaatcttgggattgagagtcttcttgcagaaacttctcagccaaagtaaaaaggattttctcttaaaaaaaaaaaaaaaaaaaaaaaaaaaa

SEQ ID NO: 405826 - DNA, 1000 bp, Homo Sapiens
ttcacaggctgcagcctccctgcttccaggagccgtgcagcaaccccgacagcctgatttttggggcactgaccatcatgaccggcgtcattggggtcatcttgggggcagaagctgcgaggaggtacaagaaagtcattccaggagctgagcccctcatctgcgcctccagcctgcttgccacagccccctgcctctacctggctctcgtcctggccccgaccaccctgctggcctcctatgtgttcctgggccttggggagctgcttctgtcctgcaactgggcagtggttgccgacatcctgctgtctgtggtggtgcccagatgccgggggacggcagaggcacttcagatcacggtgggccacatcctgggaggcgctggcagcccctatctcacaggacttatctctagtgtcctgcgggccaggcgccctgactcctatctgcagcgcttccgcagcctgcagcagagcttcctgtgctgcgcctttgtcatcgccctggggggcggctgcttcctgctgactgcgctgtacctggagagagacgagacccgggcctggcagcctgtcacagggaccccagacagcaatgatgtggacagcaatgacctggagagacaaggcctgctttcgggcgctggcgcctctacagaggagccctgaggtccctgcctgcactcgtcctgcctgcaagcctcccgttggtccccacagcagcagtgcctcggttcctctttggctgtcctcggggactccggctgaggcacatctgccacttttgaattcccggctggagagctggcaggaccctgtggctgggctgggaatggagctgtcagcactctgcgtgggaggcctgggcctgtgcctgcatcccgctcaaggctgccccagcctggggtccccagcctggctgctgctgggccctgaataaagagaggccagtacaaagcccatggattttgggcctgtaaaaaaaaaaaaaaaaaaaaaaa

SEQ ID NO: 405827 - DNA, 1000 bp, Homo Sapiens; identical to SEQ ID NO: 118932

SEQ ID NO: 405828 - DNA, 732 bp, Homo Sapiens
aggcagttgcgggttgcaggagttcaggaaaggaggtgggactagagtcaacctggaatagctctacagtaacaatggcagcctttttgttgctgggacatccatacaggcaacttagctggtgaaaggactctggattggttggcagtctgcttttttttttccaaggtgatcactttactgtagaagaaatgaggttaacagaaaagagtgagggagaacaacaactcaagcccaacaactctaatgcacccaatgaagatcaagaagaagaaatccaacagtcagaacagcatactccagcaaggcagcgaacacaaagagcagacacacagccatccagatgtcgattgccttcacgtaggacacctacaacatccagcgacagaacgatcaaccttcttgaagtccttccgtggcctactgagtggattttcaacccctatcgattgcctgctctttttgagctttatcctgaatttcttctggtgtttaaagaagccttccatgacatatcccattgtctgaaagcccagatggaaaagatcggactgcccatcatactccacctcttcgcactctccaccctctacttctacaagtttttccttcctacaattctttccctttctttctttattcttcttgtacttctgcttctgctttttattattgtcttcattctgatcttcttctgattcttttgtttcaataaacagcaatgagcatgaa

SEQ ID NO: 405829 - DNA, 1000 bp, Homo Sapiens; identical to SEQ ID NO: 224547

SEQ ID NO: 405830 - DNA, 1000 bp, Homo Sapiens; identical to SEQ ID NO: 224548

SEQ ID NO: 405831 - DNA, 1000 bp, Homo Sapiens; identical to SEQ ID NO: 220448

SEQ ID NO: 405832 - DNA, 1000 bp, Homo Sapiens; identical to SEQ ID NO: 118933

SEQ ID NO: 405833 - DNA, 1000 bp, Homo Sapiens; identical to SEQ ID NO: 293725

SEQ ID NO: 405834 - DNA, 1000 bp, Homo Sapiens; identical to SEQ ID NO: 293726

SEQ ID NO: 405835 - DNA, 1000 bp, Homo Sapiens; identical to SEQ ID NO: 293727

SEQ ID NO: 405836 - DNA, 1000 bp, Homo Sapiens; identical to SEQ ID NO: 293728

SEQ ID NO: 405837 - DNA, 1000 bp, Homo Sapiens; identical to SEQ ID NO: 224550

SEQ ID NO: 405838 - DNA, 1000 bp, Homo Sapiens; identical to SEQ ID NO: 293730

SEQ ID NO: 405839 - DNA, 1000 bp, Homo Sapiens; identical to SEQ ID NO: 224551

SEQ ID NO: 405840 - DNA, 1000 bp, Homo Sapiens; identical to SEQ ID NO: 118934

SEQ ID NO: 405841 - DNA, 789 bp, Homo Sapiens
tgcggccgcccttccgcaatcggagccctcacagaggccaaactgatataaatctgcttaggaggcctgattcacagacgctacaggatggagcggggcgcaggagccaagctgctgccgctgctgctgcttctgcgggcgactggtttcacatgtgcacagacagatggccggaacggctacacggcggtcatcgaagtgaccagcgggggtccctggggcgactgggcctggcctgagatgtgtcccgatggattcttcgccagcgggttctcgctcaaggtggagcctccccaaggcattcctggcgacgacactgcactgaatgggatcaggctgcactgcgcgcgcgggaacgtcctaggcaatacgcacgtggtagagtcccagtctggaagctggggcgaatggagtgagccgctgtggtgtcgcggcggcgcctacctagtggctttctcgcttcgcgtggaggcacccacgaccctcggtgacaacacagcagcgaacaacgtgcgcttccgctgttcagacggcgaggaactgcaggggcctgggctgagctggggagactttggagactggagtgaccattgccccaagggcgcgtgcggcctgcagaccaagatccagggacctagaggcctcggcgatgacactgcgctgaacgacgcgcgcttattctgctgccgcagttgaacggcgccgccgccgccgctctctcccgggccaggaggctagtcccacctcttgctattaaagcttctctgagttgaaaaaaaaaaaaaaaaa

SEQ ID NO: 405842 - DNA, 1000 bp, Homo Sapiens; identical to SEQ ID NO: 293732

SEQ ID NO: 405843 - DNA, 1000 bp, Homo Sapiens; identical to SEQ ID NO: 293733

SEQ ID NO: 405844 - DNA, 1000 bp, Homo Sapiens
gcagctctaggggggagctatacaatgatgtctttattagtgtcatcatgagaagcccaataagcagtatgccctaacagttagtaggccaggctctggagctaagctgcatgggttcacatcccagctccaccattcagcctgcagagaccatgagcgagttacttaagccaggctctggagctaagctgcatgggttcaaatcccagctccagcattcagcctacagagaccatgggtgagttacttaagccaggctctggagctaagctgcatgggttcaaatcccagctccaccattcagcctgcagagactgtgggtgagttacttgagctctctgtgccaatattttctcacctataaggtggaggtgaaaataaactctataacatgacaagaactacttcacagtagttgcagtgaggattcaacgagatgaacatttagtacttgggacacagcagtggcccagtataaatgggctacttgtcataagccctaagtcacaggtcaacaaactgagaggtaaaagcacttggttgagcttgtgtatctagtgagtatggattcagggaccagattcccagccccacgaactgctaagcaaccccacctcctaaacacatgagtgccgattaacttcacagaaaaacacacaaggcaaagttcagcgaggtgaaattctccaagctataaagatcagggaagacttcctggaggaattcacccttgagcaaaatcctaaaggatcaatagtagctggcaaaaagaagcaggaggaagcacattttaggtagaggagacagcctggacaaaggtctgagggaggaaggaacacaaggagtgcaggacactttcataactgcatgaacttcatagagatgggatcctttagcatgttctctgtgcacatgcttgaccatgttctttcacatgctttttgccacttgatctttccagcaactcagtgagagaagcaaaaaagtaagttgcatcctg

SEQ ID NO: 405845 - DNA, 1000 bp, Homo Sapiens
cacaaagccatgatggaaagggtagagaatgccgtgaaggatttccaggaactgtcgcttaatgaggatgcctatatgggggtcgttgatgaggccacactgcaaaaggggtcctggagtttgctgaaggatctgaaacgcatcacagacagtgatgtaaaaggcgatctctttgtgaaggagctattttggatgttgcacttgcaaaaggaaacctttgccacctatgttgctcgattccaaaaagaggcttattgtcccaacaaatgtggtgtgatgttgcaaactctgatctggtgcaagaactgcaaaaaggaggttcacgcttgtcgaaagtcctacgattgcggggagcggaatgtggaagttcctcaaatggaagacatgatcctggactgtgagttaaactggcatcaggcttcggaaggcctcactgattacagcttttacagggtttgggggaacaatacggagaccttggtgtccaaggggaaagaggccaccctgaccaagcccatggtgggtccagaggatgcaggcagctaccgctgcgagctgggctctgtgaattccagcccagccacgatcatcaattttcacgtcacagtgttgcccaaaatgatcaaggaggaaaaaccttctccaaatatcgtaaccccgggggaggcgaccacggagtcgtccataagcctccagcctctgcagcccgagaaaatgctggcaagccgccttctggggctgctgatctgcggctccctagcactgataaccggccttacctttgcgatatttcgtcgaaggaaggtgatcgatttcatcaaatcctcactgtttggccttggcagtggagttgccgagcaaacccaggtcccaaaagaaaaggccacagattcgaggcaacaataaagatttatcttgttgtctaaaaaaaaaaaaaaaaaaaaaaaaaaaaaaaaaaaaaaaaaaaaaaaaaaaaaaaaaaaaaaaaaaaaaaaaaaaa

SEQ ID NO: 405846 - DNA, 1000 bp, Homo Sapiens
ggaggtgacgccaggccctggggcctacagcccagagaaggtgccccctgtgcgccatcggacaccgccggctttcaccctgggctgccgcctccccctgaagcccctggacacctcagcccctgcccctaatgcctacaccatgccccctctgtggggctcacagatcttcaccaagcccagcagccccagctacacggtggtgggccgcaccccccccgcccgccccccgcaggatcctgctgagataccaggcccgggccagtacgacagcccggacgcaaacacctaccgccagcgcctgcctgccttcaccatgctggggcggccccgggccccgcgacccctggaggagacccccggccctggcgcccactgcccagagcaggtcaccgtgaacaaagccagggctccagcgttctctatgggcatccgccactcgaaacgggccagcaccatggccgccaccacgccctcccggcctgcggggcacaggctgcccggccgctgctgctaggccaggcctgtttcccacacagtgaacgggggctggcgggcctctcctggggcctggctttggctggaggggctagaaggcgagaggggctgggaaaggagtcttccctcccctttcctgaactgtccaggtccttctaggacacctgatccttccagtccctgggggctgtgacccatggccctgtgcagggtacagggtgagtctccttccagtgccccagtttcttccaggtcacgccaggccaggccaggccaggtggggaaagggacaccttccggccctccccagtagctggctggagatggagcttctggtgtcccagaactcggcgtccagctccactagggcctagatccccatcacagcttgggttagccccggtcccagcccaagctcaggctggaggcagccccgaggcctgtgcctttcccactccaccttctacagttgcttagccaataaacctttcctgggctggag

SEQ ID NO: 405847 - DNA, 1000 bp, Homo Sapiens; identical to SEQ ID NO: 293735

SEQ ID NO: 405848 - DNA, 1000 bp, Homo Sapiens
cacttcaacagtcattgccagccccagtggacaatgtaaggaggccaccagccaagaaatgctgtcagtgcctggaagctggaaaggcaatgaaatggattttccccagagcctccagggagaatatggcacagcttctaccttgattttcacccagtgagacacattttggatttctgacctaaagaattgtaaggctgcctggatccccagagtttgtctggaaagcctcttgagatggggttatgtgctccgaggatcccaggaggaaggatggggcaagagcagacaaacctatgcctctgcagcagctgtaccgttgtcctgggagtgagccccagccgtggctcaaggcacacgtgcctccagaggacaatctgggatgctcaggggacagagaggcagagggactatcagggtgaagctgtctttttcacttgtttggcactcagcccagggcctggatttatcctgcacaaaatgaacagtgcagggcccttcatctggggaaagcctaacagtggcacccaagcagagctaggaggtccaggtcctccagtggcagggagggagggagctcctttccaggtactttctttcctagatagaggatcttggtgactcatctcccagttcaactgtaaaggctaagggcctccttgaagtttccttccttatgaaaatgtccatagcaagtttgtcacttaggaatgtttttcaatgataggaaacagaaaagccaactagtaggagatgaaataagttgagatttttttttttaatagcaagaagtctggatattgtcagtagccggcattggtttaggacacaataatattggggatgatgtcctgtatttttcttggcctttttcttagagtcacaatgtggatgccatggctcaaggtatcacatccctattcaaggcaggatataggaggaagggatggtgccagatacatctgtcccatttattaaaaagcaagcttctccaaaaccc

SEQ ID NO: 405849 - DNA, 1000 bp, Homo Sapiens
ggcagaagtgtcctctccacgtaactcattatgcccctcctgggggagattgcatctccaggacaagcatctaaaggaggcccctgctgtgcagaggggtattgttcctgtctctttcattgtcctccctcctctcaaactctccagtgtggtgtgaactcagaagaaacggttactggggctgcatggagaatttcacctgcggtgattttgatccagggactgcatctcctctttcctcatcacagccagtgctgagaggctccttctacctgccgcagggtaggagggccaggcaaagttcaccagcttgctctaagagcaagcaggcaatgccgtaaagcctgagcctgcctgaggtgctgcctcctcccaggtggtgcggggggtggtgggcgggcgggcaggcgtgctgacagccggcagtttgcgtgggctgtgccatctgatgtctattcccagccctggtaggaagggggagtcatttatattctgcaggaggaaggggccccagctgtcgcctttctgaccagcaggcctggagggcaggggcacagagcagagaggagggcactggtggtctcctgcttagcctggtctgactgcagtgtagggaataggtcaccaggaggagcccttcatcctggcaggccggattgtggagggacttccctccccctcttttccatttctccctccatcaccacctgccctcacatcctggggcagcagctggacagccattagacctcagtgccagggcactcttcctccagctgggatctcagtggctcccagctgcatgggctcctgcttgtgtgttccctcctccgccatcctctgttccccgcacctcccttattctgctcatgtctggggtattcacttggctcctcagcaaggaagcaaacgccttggaggagaagcacatggttgcccttttgtccttgctccctggctagggaaagctgctagtggtcagcctgttttgccttttttt

SEQ ID NO: 405850 - DNA, 1000 bp, Homo Sapiens; identical to SEQ ID NO: 293736

SEQ ID NO: 405851 - DNA, 1000 bp, Homo Sapiens; identical to SEQ ID NO: 224553

SEQ ID NO: 405852 - DNA, 1000 bp, Homo Sapiens; identical to SEQ ID NO: 220449

SEQ ID NO: 405853 - DNA, 1000 bp, Homo Sapiens
tcccatcacaggcccagaggcccaggaggaaaaagcagtttcgtgggctgggcccagggtcctcatgctgtgtgcagccgagggacttggtgccgtgggtcccaactgctccaactgtggctgaaaggggccaatgtacagctcaggatgtgacttcagagggtggaagccccaagtctcagtagcttccatgtggtgttgagcctgcaggtgcacagaagtcaagaattgaggtttgggaacctccgcctatatttcagaagatatatggaaactcctggatgcccaggcaaaagtttgctgcaggtgcagggccctcatggagaacctctgctagggcagtgcagaagggaaatgtggggttagaggccccacacagagtccctaatggagtgctgccaggtggagctgtgagaagagggccactgtcctccagaccccagaatggtagttccactgacagcttggatcatgcacctggaaaagccgcagacactcaacaccagcctgtgaaagcagccgagagggaggctgtaccctccaaagccacagggtggagctgcccaagaccatgggaacccacctcttgcatcagtgtaacctggatgtgaggcctggagttaaagaagatcattttggagctttaaagtttgactgtcctgctggactttggacttgcatgccccctgtagcccctttgttttggccaatttctcccatttgaaacggctgtgtttacccaatacctgtacccccattgtatctaggaagtaactaacttgcttttgattttacaggctcataagcgcagggacttgccttgtctcagatgagactttggactgtggacttttgggttaatgctgaaatgagttaagactctgggagactattgggaaggcatggtaggttttgaaatgtgaggatatgagacttggaggcgcaaggggtggaatgatatggtttggctgtgtccccactaaatctcagcttgaatgtt

SEQ ID NO: 405854 - DNA, 1000 bp, Homo Sapiens; identical to SEQ ID NO: 224554

SEQ ID NO: 405855 - DNA, 1000 bp, Homo Sapiens
agcgggtggtctccgagggctggaggcgccctgcccttcccggggagaccgctctggggcgagacctctcctgtgcctgggagggttgcatgaaaggggggctgtgtcgtgcctggaacccaggacggacctggagcccggtgaccatcgggatcgcgccccctgagcgtcaggagagcccctggagatcccctggacagagagcccgccccgcaggccgccccgccgcccaggagctcctggacccctgcacccgggagactctgctgggggcgctcagccagtgccccaagggaagcgctaggttcgacgggccgttgtggttcgaggtctcagacagcaagggtggcaggcggaacctgcagccccggccctctgccttcaagcccctgagcaaaaatggagcggttgcttccttcgtgcccaggccagggcctctgaagccgagcctcggcccctggagcctcagtttttgtgatgatgcttggccttccgtgctggtccagcccgccccatccgccatctgggacttctgggaggcgacaacgccttcctgcggcagctgcagtagggtctccttcgccctcgaggtcacccagtctgctggcccctttggctcctaagaatctgggctctgctacccacctccggagacacaagcccacgtatctactttcacttgctcatccttgctctacctcaacgtggggccctgacaccacgttatcaaacatgcagcccccacacccctcgtctgcccgcccccagatcttccctctgtgctccctgccaccccagcagctgttgatttcagaacccttgccttcgccctgctggccctctcctccctgcccttcttcctgcccttcctctgaaaagaggcatttcgggaaggcttgctttttctccatgtctcccagtttgtatagttaaattgtccagttgtatagttaaatatttgatcttattaaaaacatttgtctgcaaaaaaaaaaaaaaa

SEQ ID NO: 405856 - DNA, 1000 bp, Homo Sapiens; identical to SEQ ID NO: 293739

SEQ ID NO: 405857 - DNA, 1000 bp, Homo Sapiens; identical to SEQ ID NO: 118935

SEQ ID NO: 405858 - DNA, 1000 bp, Homo Sapiens; identical to SEQ ID NO: 293741

SEQ ID NO: 405859 - DNA, 1000 bp, Homo Sapiens; identical to SEQ ID NO: 293743

SEQ ID NO: 405860 - DNA, 1000 bp, Homo Sapiens
ttggtacgtagcatttaaaatcaggtcttataattaatgcttcattcctcatattagatttcccaagaaatcaccctggtatccaatatctgagcatggcaaatttaaaaaataacacaatttcttgcctgtaaccctagcactttgggaggccgaggcaggtggatcacctgaggtcaggagttcgagaccagcctggccggcatggcgaaaccccttctctgctgaaaatacagaaattagctgggcgtggtggtgcatgcctgtagtcccagctacttgggaggctgaggcgggagaatcgcttgaacccagggggtggaggttgcagtgagccgagattgtgccactgcactccaacctgggtgacagagtgagattccatctgaaaaacaaaaacaaaaacagaaaacaaacaaacaaaaaacaaaaaatccccacaactttgtcaaataatgtacaggcaaacactttcaaatataatttccttcagtgaatacaaaatgttgatatcataggtgatgtacaatttagttttgaatgagttattatgttatcactgtgtctgatgttatctactttgaaaggcagtccagaaaagtgttctaagtgaactcttaagatctattttagataatttcaactaattaaataacctgttttactgcctgtacattccacattaataaagcgataccaatcttatatgaatgctaatattactaaaatgcactgatatcacttcttcttcccctgttgaaaagctttctcatgatcatatttcacccacatctcaccttgaagaaacttacaggtagacttaccttttcacttgtggaattaatcatatttaaatcttactttaaggctcaataaataatactcataatgtctcattttagtgactcctaaggctagtccttttataaacaactttttctgacatagcatttatgtataataaaccagacatttaaagtgtaaaaaaaaaaaaaaaaaa

SEQ ID NO: 405861 - DNA, 1000 bp, Homo Sapiens
ttcgacaccgtgtggaggattcggcagctgctgaggcggccccaagtggagcagcttagccggcactacaagcccgagtggccggccttgtccgggctcgtggcccaggcccaggcccaggcccaggttgccccttcactcctagaacggctgcaggctaccttgagcctcccctttgccccgtctcctcaggaggggggtgttctggaccaccttgtgactgccacaaccagcctggccagtcccttcgtcaccactgcctgccacactctgtgccctgaccatccaccttcgctgggcacccgaagcaagtccgtgccagagctgttaggtactgccccgccccctcccctggttccccagtccccgccagggagtccccagaggtccccgtgggtcttcgtcccctaccagagccctcagggcatattgagcaagtgccttcagtggctacaacccagggatagcaccagccccaggccccaagtccccaagatcctcctctccaaggcatcctcatcctcccaccagtgccagccgaagcccagtccttcaggacaccaaagtctggcccttcctctctggcgataccaggagctcaggatagagaagaggaaacaggaggaggaggccagaatggcacagaaataggggaagatgggataggacaggctgggaacaggtaatcaggcccctcccagggcttctttcccctctggagtgcctccggcctccccatccacctctgcctaagtaaatctgctctcaacctatatatatacaaggtcattcattctagcattgtttgcaagagtgaaagagtggaaacacccgaagtgtccatcagtaagggacaggctagattgattacggatgtaattgctgtccatccatacagagcatactctacagtgtattctaaaataagactaaggaagctgtttatattctgatatgaaactaccatcaagatgtataaagtaaaaataactaaggagtg

SEQ ID NO: 405862 - DNA, 1000 bp, Homo Sapiens; identical to SEQ ID NO: 293744

SEQ ID NO: 405863 - DNA, 1000 bp, Homo Sapiens; identical to SEQ ID NO: 293745

SEQ ID NO: 405864 - DNA, 1000 bp, Homo Sapiens; identical to SEQ ID NO: 293747

SEQ ID NO: 405865 - DNA, 1000 bp, Homo Sapiens; identical to SEQ ID NO: 224557

SEQ ID NO: 405866 - DNA, 1000 bp, Homo Sapiens
taggggtcccttcttggggtgttgtacccagccctaggagtagggactgcaccttatatctgctattcctacaggaataggaatagcagagttttcttttctttgtattacctatttccttgttactctaaatcctgttataattaataattttttatattaatattaaattttcctataattataaaaagcattttctgttcaaattattatatggtctatctttcctgattggaccagatttatacatgcaccaaggatctcaagccactgaagagcatctccccacccagtcacctgacaaatctagttgcttgcttgttttatttattgctcatttgttttatttatttatggtttattattttacttatttattgttttacttatatgattacaagaaactttatgcaataaagaattacattaagaagaatttggaaatatgtttttatattaatgaaattaattttgatttttcacattttgtgcatgtttgacacaaaattttattataccattgaggcaaattataatcccttttaaatgtatttcagcttacaacacaaattgtctttcattcactaatgagactgtgtctgaagattttaaattccaagtcatttttcattcatctaactctcttaattatccttatttttgatttctttaaaatggagggaaaagaccatgataactttaaaacaatctgaagacagaatacttctaacacccagaaagtttttgtgtgtgcctttccagtcaacccaccttctggaggcaacagatgttcatatttctagtattacagagactttaactgttttaaaacttcgaatcaacgggattattcagtaggaactctcttctgcctggtttctttcactcgtcatgttctggaggttaatccgtgttcattaccgtaattgttgagaagtttcctattatatgaataaagcacaatttatttattcaaaaaaaaaaaaaaaaaaaaaaaaaa

SEQ ID NO: 405867 - DNA, 1000 bp, Homo Sapiens; identical to SEQ ID NO: 293748

SEQ ID NO: 405868 - DNA, 1000 bp, Homo Sapiens
tggaatatgaaatcaagactaatcatcctgattcagcaagtgagaaaaatccagttacactcttaaaggaattgtcagtgataaagtctcgatatcaaactttgtatgcccgctttaaaccagttgctgttgagcagaaagagagtaagagccgcatttgtgctactgtgaaaaagactatgaatatgatacaaaaactacagaagcaaacagacctggagctgtcaccactgactaaagaagagaaaactgcggcagagcaattcaaatttcacatgccagatttatgaagaaatggacttggaaaggaaattctaacagagaagagcttaattccggagaaatttaggaagatgtcttgttaacccttgatgtctagagattgggggctggtgaagggggtttggcttcaatgactggataatgatatctttcatgagagagattataagaagaagggcagataatatatgaataaagttcagccaaaaggatcaaatgagaataaaacgatttaaatatatgtacacacgcatgcacacacacacttagtcttgtaatttcaggccagaaattctcaacactattttgcatctgttttctttttctaagtcatgataatatagatgttctggtctatcataaaagaatgtttatgtacatttcagtcattcggtatgtggctttgtaaattaaagtataggcaaaacatttgtgttatacatgatatataatttcattttgtaaatgttgattgcacatgtggtcacattattgttgagactgcttttatgtgacctgtagtctcccacagaacctaaagtaataagctggcttttctgtgatagccacgtttgcgtatttctttccctatttcccttgcctgctaatgttgaacagcatgaacttgctttctgatgctgttttagactgtccctgttgtatctcaataatatctttgttttcctacaaaaaaaaaaaaaaaaagaaaaaaaaaaaa

SEQ ID NO: 405869 - DNA, 1000 bp, Homo Sapiens; identical to SEQ ID NO: 293749

SEQ ID NO: 405870 - DNA, 1000 bp, Homo Sapiens
ctgatgggattagtcctgaggagcatctactttctggcattactgatttatgtcttcaggatttgcctttaaaggaacgaatatttataaaattatcatatcctcaggataatctacaaccagatgtcaacctgaaaactttgtccatacttagtgtaaaagaatcttgtattgctaacagtggttctgattgtacatcacatctttcaaaggatcttccaggaattcccttgcaaaatgaatccagagactctaaaattctaaaaggagaccagctgcttcaagaagactataaagtcaatacttctgtcccttattctgtcagtaacacagtggtaaagacctgcaatgttagaccaccaaatactgctttagatcatagtagaaaagttgatatgcaaaccactcggaaaattttaatgaagaagagtgtttgccttgacagacattcctctgatgaacaaagtgccccagtgtttgggaaagctaagtacacaactcaaagaatgaagcacagttctcaaaagcataattcatcccatttcaaagaaagtggccataacaagttgagtagccctaagatacatattaaagaaactgaacagtgtgtcagatcttatgaaacagctgaaaatgaagaaagctgtttcccagattcaacaaaaagttctctgagttctctacaatgtcataagaaagaaaacaactctggtacttgtttggatagccctcttcctttatgccagagattaaaactaagattccaaagcacttgaaatttaaaacacttaggtataacttaactattttagtactatcagcaatagcagagacagagggaaggtatctagttcatgtgtggtaaaaattttaatgttctctgtgtcatgaaacacttgccattttaatcaaagttgtaatttttaaaaagtcacctaaaactctggttttaaaagatcctctgtattgaaaacttctgataatgtatgtcattatgtcc

SEQ ID NO: 405871 - DNA, 1000 bp, Homo Sapiens; identical to SEQ ID NO: 293750

SEQ ID NO: 405872 - DNA, 1000 bp, Homo Sapiens; identical to SEQ ID NO: 118937

SEQ ID NO: 405873 - DNA, 1000 bp, Homo Sapiens; identical to SEQ ID NO: 220450

SEQ ID NO: 405874 - DNA, 1000 bp, Homo Sapiens; identical to SEQ ID NO: 293752

SEQ ID NO: 405875 - DNA, 1000 bp, Homo Sapiens; identical to SEQ ID NO: 118938

SEQ ID NO: 405876 - DNA, 1000 bp, Homo Sapiens; identical to SEQ ID NO: 118939

SEQ ID NO: 405877 - DNA, 1000 bp, Homo Sapiens; identical to SEQ ID NO: 118940

SEQ ID NO: 405878 - DNA, 783 bp, Homo Sapiens
atggacagctcggccgtcattactcagatcagcaaggaggaggctcggggcccgctgcggggcaaaggtgaccagaagtcagcagcttcccagaagccccgaagccggggcatcctccactcactcttctgctgtgtctgccgggatgatggggaggccctgcctgctcacagcggggcgcccctgcttgtggaggagaatggcgccatccctaagaccccagtccaatacctgctccctgaggccaaggcccaggactcagacaagatctgcgtggtcatcgacctggacgagaccctggtgcacagctccttcaagccagtgaacaacgcggacttcatcatccctgtggagattgatggggtggtccaccaggtctacgtgttgaagcgtcctcatgtggatgagttcctgcagcgaatgggcgagctctttgaatgtgtgctgttcactgctagcctcgccaagtacgcagacccagtagctgacctgctggacaaatggggggccttccgggcccggctgtttcgagagtcctgcgtcttccaccgggggaactacgtgaaggacctgagccggttgggtcgagacctgcggcgggtgctcatcctggacaattcacctgcctcctatgtcttccatccagacaatgctgtaccggtggcctcgtggtttgacaacatgagtgacacagagctccacgacctcctccccttcttcgagcaactcagccgtgtggacgacgtgtactcagtgctcaggcagccacggccagggagctag

SEQ ID NO: 405879 - DNA, 1000 bp, Homo Sapiens; identical to SEQ ID NO: 118941

SEQ ID NO: 405880 - DNA, 1000 bp, Homo Sapiens
gctcaaggggcacacccatccttatcctcaagcgctgcagcacgctcctgggccacatcagcctgttctcagggctgctgcccacaccactctttggggtcgtggaacagatgctcttcaaggtgcttccgggactgctgtgccccgtggtggacagtgtgctgggtgtggtgaatgagctcctgggggctgtgctgggcctggtgtcccttggggctcttgggtccgtggaattctctctggccacattgcctctcatctccaaccagtacatagaactggacatcaaccctatcgtgaagagtgtagctggtgatatcattgacttccccaagtcccgtgccccagccaaggtgccccccaagaaggaccacacatcccaggtgatggtgccactgtacctcttcaacaccacgtttggactcctgcagaccaacggcgccctcgacatggacatcacccctgagctggttcccagcgatgtcccactgacaactacagacctggcagctttgctccctgaggccctggggaagctgcccctgcaccagcaactcctactgttcctgcgggtgagggaagctcccacggtcacactccacaacaagaaggccttggtctccctcccagccaacatccatgtgctgttctatgtccctaaggggacccctgaatccctctttgagctgaactccgtcatgactgtgcgtgcccagctggctccctcggctaccaagctgcacatctccctgtccctggaacggctcagtgtcaaggtggcctcctcctttacccatgcctttgacggatcgcgtttagaagaatggctcagccatgtggtcggggcagtgtatgcaccaaagcttaacgtggccctggatgttggaattcccctgcctaaggttcttaatatcaatttttccaattcagttctggagatcgtagagaatgctgttgtgctgaccgtggcatcctgaggctgagacatggccaccagcct

SEQ ID NO: 405881 - DNA, 1000 bp, Homo Sapiens
ctaaatccactgagcagagaagcataaacagtgttaccagccttaacagtcctcacagtggattacacacagtcaatggagaggggctggggaagtcacagagctctacaaaagtagacctgcctttagctagccacagatctacttctcagatcttaccatcaatgtcagtgtctatatgccccagttcaacagaagttctgaaagcatgcaggaatccaggtaaaaatggcttgtctaatagctgcattttgttagataaatgtccacctccaagaccaccaacttcaccatacccacccttgccaaaggacaagttgaatccacccacacctagtatttacttggaaaataaacgtgatgctttctttcctccattacatcaattttgtacaaatccaaaaaaccctgttacagtaatacgtggccttgctggagctcttaaattagatcttggacttttctctaccaaaactttggtagaagctaacaatgaacatatggtagaagtgaggacacagttgctgcaaccagcagatgaaaactgggatcccactggaacaaagaaaatctggcgttgtgaaagcaatagatctcatactacaattgccaaatacgcacaataccaggcttcctccttccaggaatcattgagagctggaatgcaatggtgtgatctcagctcactgcagcctccgcctcctgggttcaagcgattctcccacctcagcctcccgaatagctggaattacaggcacctgccatcatgcccaactaatttttgtatttttgtagagacagggtttcaccatgttggccaggcttgtcttgaactcctgacctcaggtggtctgcttgcctcagcatcccaaagtgctgggattacaggtgtgagccaccatgcccggtaaacttttaaaaatgtaagcaaaattacagtatgtaaaacacacattgctaatggagaaataaagttcctactttacatctaaaaaaaaaa

SEQ ID NO: 405882 - DNA, 1000 bp, Homo Sapiens; identical to SEQ ID NO: 118942

SEQ ID NO: 405883 - DNA, 1000 bp, Homo Sapiens; identical to SEQ ID NO: 293757

SEQ ID NO: 405884 - DNA, 1000 bp, Homo Sapiens; identical to SEQ ID NO: 118943

SEQ ID NO: 405885 - DNA, 1000 bp, Homo Sapiens; identical to SEQ ID NO: 116002

SEQ ID NO: 405886 - DNA, 1000 bp, Homo Sapiens; identical to SEQ ID NO: 293759

SEQ ID NO: 405887 - DNA, 1000 bp, Homo Sapiens
ggagaagagacttgcagcagatgacccagaggtgcgggttctacatagcatcggtcacagtgctgccccacgcctcttcccacttgcctggactgtgctgctccttccacttctgctgctgcaaaccccgtgaaggtgtatgccacacctggccttaaagagggacaggctgaagagagggacaggcactccaaacctgtcttggggccactttcagagcccccagccctgggaaccactcccaccacaggcataagctatcacctagcagcctcaaaacgggtcagtattaaggttttcaaccggaaggaggccaaccagcccgacagtgccatccccaccttcacctcggagggatggagaaagaagtggagacagtcctttcccaccattcctgcctttaagccaaagaaacaagctgtgcaggcatggtcccttaaggcacagtgggagctgagctggaaggggccacgtggatgggcaaagcttgtcaaagatgccccctccaggagagagccaggatgcccagatgaactgactgaaggaaaagcaagaaacagtttcttgcttggaagccaggtacaggagaggcagcatgcttgggctgacccagcatctcccagcaagacctcatctgtggagctgccacagagaagtttgtagccaggtactgcattctctcccatcctggggcagcactccccagagctgtgccagcaggggggctgtgccaacctgttcttagagtgtagctgtaagggcagtgcccatgtgtacattctgcctagagtgtagcctaaagggcagggcccacgtgtatagtatctgtatataagttgctgtgtgtctgtcctgatttctacaactggagtttttttatacaatgttctttgtctcaaaataaagcaatgtgttttttcggacatgcttttctgccactccatattaaaacatatgaccattgagtccctgctaaaaaaaaaaaaaaaaaaaaaaaaaa

SEQ ID NO: 405888 - DNA, 1000 bp, Homo Sapiens; identical to SEQ ID NO: 224560

SEQ ID NO: 405889 - DNA, 1000 bp, Homo Sapiens; identical to SEQ ID NO: 118945

SEQ ID NO: 405890 - DNA, 1000 bp, Homo Sapiens; identical to SEQ ID NO: 293764

SEQ ID NO: 405891 - DNA, 1000 bp, Homo Sapiens; identical to SEQ ID NO: 224561

SEQ ID NO: 405892 - DNA, 1000 bp, Homo Sapiens
cacccgggcccaccctggacttcaccttcagggcagacccgtcggccatcgggctggcggatccccccattcccagtcctgtcccctcgcccatcctggggaccatcccgtcggccatctccttacagaattgtacggaaaccttcccctcctccagcgagaacttcgcgctggacaagagggtcctgattcgagtgacctactgtggcctctgaagctatagccttcggtacattctactgaaaaagagcctggagcagcaatttccgaatcacctactctttgaggaggacagagctgcccaggctacaggggagtttgaggtgtttgtgaacgggagactggtccattccaagaagaggggtgatggctttgtgaacgagtccaggctgcagaaaattgtgagcgttatcgatgaggaaatcaagaaaaggtagccggcaaggggtggagctggaggagtctcagctggatgatgagaagggctgaaatgttgccaagtcaggtccttttctgatggtggctggggctggggtgagctcagggaggggaagaggagaatacatgcagagtcagcacccctgtgtccagtctgactgtgtctgctgtcgccacactcacctctgaggtctgtggaagtcacctgatattctggccccaggggtgggagggaggggagcttggaaggctagtcctgtagctccagtcctctgtctggcctccactcctcttgctcctgagggcagtttgtttcttttgtggattcgtcatttcccatgccctggttccagatacattttgaaaaccttccatcttattggcattttctggggttgtgagggaaacggggatggcagtcagactcaaacccgtgacactccaaactcgattatgctccagggcccactttctaaacctgtaagatctatgttccagcctgcgcaacatagtgagaccccaactctacaaaaaataaaaaattagccaggtgtggtggtgt

SEQ ID NO: 405893 - DNA, 1000 bp, Homo Sapiens; identical to SEQ ID NO: 224565

SEQ ID NO: 405894 - DNA, 1000 bp, Homo Sapiens; identical to SEQ ID NO: 293770

SEQ ID NO: 405895 - DNA, 1000 bp, Homo Sapiens; identical to SEQ ID NO: 293771

SEQ ID NO: 405896 - DNA, 1000 bp, Homo Sapiens; identical to SEQ ID NO: 286836

SEQ ID NO: 405897 - DNA, 840 bp, Homo Sapiens; identical to SEQ ID NO: 293772

SEQ ID NO: 405898 - DNA, 1000 bp, Homo Sapiens; identical to SEQ ID NO: 293773

SEQ ID NO: 405899 - DNA, 1000 bp, Homo Sapiens; identical to SEQ ID NO: 224562

SEQ ID NO: 405900 - DNA, 1000 bp, Homo Sapiens
gcgacttatttttattttttttttttggacagagtctccctttgtcacccaggccggagtgcagtggcatgatcatggttcacttcaacccctacctcctgggctcaagtgttcctctcaccttatcctcctgagcagctgggactacaggcacacaccaccacacctggctaagttttgtattttttgtagagatggggtttctctgtgttgcccagtcttgtctcaaactcctgggctcaagcgatccacccaccttgggctcccaaagtgttgggattacaggtgtgtgtcactgtgcctgacagctgacagttttaactgacaactttgataacagaggctgctatttttgttttagataattggccagtgacagagtttacccttgcctcctttcttggtctgccagctttgtcctttctgagtgattctctttctgtattgagaggaagtgtgggtctacatagggatgtttggatgctatggcaagaatctttttgtgtttggagtgtagtccatttgcaatagaaataaaaaaatccgtcaccaaattgtaacctggatgttatagcccagcatctagaaatcctatgaaatgtattagcacaatatcttgccattgtcccatctaggaaattttttcttgttgtgaggtagggaagtgaggaggaaagccatgccgaagcaaatgttagaatcttaggcatcctatttgttcatgccatgggtatttgctttggacttggagtctgtactttgaaagaggcctttgaaaaacaaataattctgtgtgaattttcttgtagcgtgcttcatgaaaatatctacttatccaggtttgcaaatgtacatgttcatttgaatgtaaatcaccatttcttggaaccccacgttttttcttaaaaattattctgaattaaatgtatatttctttagccttccctacacagtactaataaaagacttttctttctgttcatgaaaaaaaaaaaaaaaa

SEQ ID NO: 405901 - DNA, 1000 bp, Homo Sapiens; identical to SEQ ID NO: 118950

SEQ ID NO: 405902 - DNA, 1000 bp, Homo Sapiens
ctagaaactcttctagctgatatcatgaaacgacgacaaaagaggaaacatttggaaaatgaagagtcccaggaaaccgctgagaagggaggaggaatccagagaatacatcgagacagcccccagcctcaatcacccctggcccaggttcaggaacgaggagagactcctccccgctcacaacatgtctccttgtcgtcctattcatcctataagacttgtgtgtcctctctgtgtgtaaacaaagaggaaaggggcatgaaaatatactacatgcaggtacaaatgaacaaaggtgtggctgtctcctgggagacagaggaaactttggagtccttagaaaagcagccaaggatggaagaagtgaccctttctgaggttgtgagggtaggtactcccccctctgatgtgtccaccagaaacctcctgtctgacagtgagcccagtggggaggagaaagagcatgaggaaaggacagaatcagacagcctgccaggctcacccaccgttgaggacacacccagagccaagactcctgactggctggtgaccatggagaacggcttcaggtgcatggcctgctgccgggtgttcaccaccatggaagccctccaggagcatgtgcagtttgggatcagagagggcttcagctgccccaagatgagcaggaggaggaaaatggaaatgagaaggaggaggaagagaaaccagaagcaaaggaggaggaggggcagcccacagaagaagaccttggcctgaggagatcctggagccaatgtccaggctgtgtgtttcattctccaaaggacagctgagacttatgggccagaagatactggaagatggtgtggccttctcttgcaagagggagaagaaagagccatggagatagtagcagacaggctgcccaaggtatgaagcagatgagggaccagcactcagtctaacatgtaaacatcatacgtaataaaggttgtgtttcaaaccttaaaaaaaaaaa

SEQ ID NO: 405903 - DNA, 1000 bp, Homo Sapiens; identical to SEQ ID NO: 224563

SEQ ID NO: 405904 - DNA, 1000 bp, Homo Sapiens; identical to SEQ ID NO: 118951

SEQ ID NO: 405905 - DNA, 1000 bp, Homo Sapiens; identical to SEQ ID NO: 293778

SEQ ID NO: 405906 - DNA, 1000 bp, Homo Sapiens
tggttcaatggtgttcttatgtagtcttatgattcttgaaaaagtacttacagcctcccaagaaaccatgtgtacaattgactgcttgctgattcaatattgtctgcaaagtataaaagactatgatttttaaataaaactgttgtatatatgaaattggatagagcagaggaacctcactgagtgtcctctagttaaaaatctttcatttatcctaccaccagatcagttacatttttaaaacaatgatggatatagcagcaaaataagtgaggtaatacacatgccatatcaattgatttatttcagccagtattctcgctctgctatagatagatgttaataaatggtatcacagcatttaaagtattaaatccactggtgcataaatttttagtcttttaaaatatattcatgaatattgtgtttgtatccctttaaaatgtttaatattttataaataggcagtatatgcacattatacaaaactaaaaaattatgacaattcagtgtgaagtaagttctcatccaacatttctcctggccatccattctccatctttaaaggcaatcaccattgccagtttcttctgtatccttctggaaatacaatatattacataaatgacagcattctatattctctcttctatatcttacctatttctgtgaataatttattttggacagcattttatgtatgaatattcacaaatgtgcttccttatttcagaggctgaactaataaaaattttgtttatttttgtgttgaggcaatatttttatatggtaccctaatctttaatacttaacctgccagactttaaccgtaacacaataatgtattgccaaatagcaccattcttcttctctcactctcttgccatgggggctcttaaaaaaaaaagtatacatctaaggtgtacaacatgctgttttgatgtatataaatatagtgaaagcaaataaagtatatatctaaggtgtacaaaaaaaaaaa

SEQ ID NO: 405907 - DNA, 1000 bp, Homo Sapiens; identical to SEQ ID NO: 293779

SEQ ID NO: 405908 - DNA, 1000 bp, Homo Sapiens; identical to SEQ ID NO: 118952

SEQ ID NO: 405909 - DNA, 1000 bp, Homo Sapiens
cctgagctcggtggacagctccctctcccgtgagtcccgctgtcctgtacgcgcccggtcgagccccgggctgcgcaccccgctaggagctgcccggccagcccgcttctctgcccggagccatgaatctcagtagcgccagtagcacggaggaaaaggcagtgacgaccgtgctctggggctgcgagctcagtcaggagaggcggacttggaccttcagaccccagctggaggggaagcagagctgcaggctgttgcttcatacgatttgcttgggggagaaagccaaagaggagatgcatcgcgtggagatcctgcccccagcaaaccaggaggacaagaagatgcagccggtcaccattgcctcactccaggcctcagtcctccccatggtctccatggtaggagtgcagctttctcccccagttactttccagctccgggctggctcaggacccgtgttcctcagtggccaggaacgttatgaagcatcagacctaacctgggaggaggaggaggaagaagaaggggaggaggaggaagaggaagaggaagatgatgaggatgaggatgcagatatatctctggaggagcaaagccctgtcaaacaagtcaaaaggctggtgccccagaagcaggcgagcgtggctaagaaaaaaaagctggaaaaagaagaagaggaaataagagccagcgttagagacaagagccctgtgaaaaaggccaaagccacagccagagccaagaagccaggattcaagaaatgaggagccacgccttggggggcacggtgcaaagtgggccttccctgggctgtgctgcaggcacagggtgcccctgtccagcccctccacctgtgtctgaatgcaacaggggtgttgcgggggcaacatgagagcccctcacccccaactctccactttcaggaggcccccagtgaagagccccacctcggggtcacaataaagttgcctggtcaggaaaaaaaaaaaaaaaaaaa

SEQ ID NO: 405910 - DNA, 1000 bp, Homo Sapiens; identical to SEQ ID NO: 293782

SEQ ID NO: 405911 - DNA, 1000 bp, Homo Sapiens; identical to SEQ ID NO: 118954

SEQ ID NO: 405912 - DNA, 1000 bp, Homo Sapiens; identical to SEQ ID NO: 224564

SEQ ID NO: 405913 - DNA, 1000 bp, Homo Sapiens; identical to SEQ ID NO: 223641

SEQ ID NO: 405914 - DNA, 1000 bp, Homo Sapiens; identical to SEQ ID NO: 293786

SEQ ID NO: 405915 - DNA, 1000 bp, Homo Sapiens; identical to SEQ ID NO: 118956

SEQ ID NO: 405916 - DNA, 1000 bp, Homo Sapiens
gcttcctgttcgacgtgtccagccttaacgacgcagacgaggtggtgggtgccgagctgcgcgtgctgcgccggggatctccagagtcgggcccaggcagctggacttctccgccgttgctgctgctgtccacgtgcccgggcgccgcccgagcgccacgcctgctgtactcgcgggcagctgagcccctagtcggtcagcgctgggaggcgttcgacgtggcggacgccatgaggcgccaccgtcgtgaaccgcgccccccccgcgcgttctgcctcttgctgcgcgcagtggcaggcccggtgccgagcccgttggcactgcggcggctgggcttcggctggccgggcggagggggctctgcggcagaggagcgcgcggtgctagtcgtctcctcccgcacgcagaggaaagagagcttattccgggagatccgcgcccaggcccgcgcgctcggggccgctctggcctcagagccgctgcccgacccaggaaccggcaccgcgtcgccaagggcagtcattggcggccgcagacggaggaggacggcgttggccgggacgcggacagcgcagggcagcggcgggggcgcgggccggggccacgggcgcaggggccggagccgctgcagccgcaagccgttgcacgtggacttcaaggagctcggctgggacgactggatcatcgcgccgctggactacgaggcgtaccactgcgagggcctttgcgacttccctttgcgttcgcacctcgagcccaccaaccatgccatcattcagacgctgctcaactccatggcaccagacgcggcgccggcctcctgctgtgtgccagcgcgcctcagccccatcagcatcctctacatcgacgccgccaacaacgttgtctacaagcaatacgaggacatggtggtggaggcctgcggctgcaggtagcgcgagggccggggagggggcagccacgcggccgaggatccccagctgatgagcagcagcgggcc

SEQ ID NO: 405917 - DNA, 1000 bp, Homo Sapiens
cttgcactgctaagagtggtttgtgtaaaactattttataaacaaactacagagcctaaatgtgcaaattacaggcaagacaacaaagccgcttctgaagaagaaaggaccgaagctgctgcgtaagcccatgcagacaagatatttgttgtttaacctcctagacagccatggcctttcggcttattgtccattagaaaatcacttccattgagaccagacatggagcaacactttttttcttccaggttattaaatgggtcaaccagagcaaaaggttattaagaatacttagtgcagaaggtggtaaaacacaaaagtgatttttttactctaacctccatttgaaatgaaattggccctagctttagagggaacaagaaaatgtttgggattgcagtgcatactaactctacagtggaactgggcctgaaaaatctggctttattctaaactctgagggtaatatgcctctgccctttagtcagactctgtgcaaattgtgaaatattattttattattttaccaagattataaaaacacttttacaaaaaaacaaaaacctgtaaaaataattttgagctacctgacgacaaatcatatctttaaccagccagttttccaatgcattgtaaatttcacttaaacctgttggttatgaaaatttgaagatcattttccttaaattatctcagcttttaacttcatttaaaaagacttttgtctaagaagaatattattattatatgttctttcaacaccccaggattaaaaaaactgattatgcaagcaattggaatataagtattaaattatagcatttgcaaatattaatataaaagcacaacaaaatgtagtggaaaatgacaaagcttgttttttaaaacaattctgtagaaatgtttgtgcaaattcagtaattcaacttaaaatataattttacagctatgttcaataaagcctctttccaggtaaggtaaaaaaaaaaaaaaaaaaaaa

SEQ ID NO: 405918 - DNA, 1000 bp, Homo Sapiens
actcatcagtggcgacagatgttctcgatggcaaacgctgacgatattaagaactgtcacgagttagaaccttccatgatgaaaccatcctaaatgatgaatgccatctgcaaccaacaccagccacgatgagctcagaagaaacaagctgcaaccatggttgggactgtccatatcaagaaccatctgcagtgagcaccatgcgtggagtgccacatccacatgaaacttcatcctggccaagcagcaccacactctgtccatcattgtcactgcccgcagaagcactagcaagacagccacggtgcacacggagcaccttcacgactctcagctcccccaaggagtccagactaagtgactgtcaccagagaaggatcatcaggagcagccagggatgcccccggcacacagggactaggtctagtgagaacattagagggcggtgtaaatggatccccatgcctgggcacctgtaatcccaactacttgggaggcaccatcccagagagctccaagcgtccttttttttttttttttcctttgagtgctgtctctggacatcttcagcccagaatcttctcaggagcaaaggcttcctgatgcctcattcatgtcaagaaaggaggccaggagccatcctgtgttcagatggttgagacagtgactacgatggcaggacaatgccgtgagaagcacttcatggtgacagagcccaacccagccgggaacagctgcgatggggaagctctggagcattttgtgagcaccgtctcggtggatgggaaagccaaagtctctgcccgtctcttactggaggcactaaaccccctccctgggttgacctcacagacattgaagtgagtctgcccacaaaggaaaagaggccagagactgtcgtgaagacatccactaggtaccagaaggaaagctgagggggcagcaaagacaataaaaggtgtctagagaggtcaaaaaaaaaagaaaaaaaaaaaaaaaa

SEQ ID NO: 405919 - DNA, 1000 bp, Homo Sapiens; identical to SEQ ID NO: 293789

SEQ ID NO: 405920 - DNA, 1000 bp, Homo Sapiens; identical to SEQ ID NO: 293790

SEQ ID NO: 405921 - DNA, 1000 bp, Homo Sapiens
gaaaaccccagcactggaagagctggttcctggctccgaagagaagccgaaaggcaggtcgcctctcagctggggctctctgtttggtcaccgaagtgagaagattgtttttgccaagagcgacggcggcacagatgagaacgtactgaccgtcaccatcacggagaccacggtcatcgagtcagacttgggtgtgtggagctcgcgggcgctgctctacctcacgctgtggttcttcttcagcttctgcacgctcttcctcaacaagtacatcctgtccctgctgggaggcgagcccagcatgctaggtgcggtgcagatgctgtccaccacggttatcgggtgtgtgaaaaccctcgttccttgctgtttatatcagcacaaggcccggctttcctacccacccaacttccttatgacgatgctgtttgtgggtctgatgaggtttgcaactgtggttttgggtttggtcagcctgaaaaatgtggcggtttcgtttgctgagacggtgaagagctccgcccccatcttcacggtgatcatgtctcggatgattctgggggagtacacaggacgtcccagtgatcgggaggagcgggaagagcttcagctacaaccaggacgtggtgctgctgcttctgacagacggagtcctgttccaccttcagagcgtcacggcgtacgccctcatggggaaaatctccccggtgactttcaggtcccgcaggccctgcaccgagtcgccttgtccatggcgctgccctgccccatgcttcctgcgtcctgagtaggaggtatctccgagacaggaaaagtggccgctctctctcactttttctggaactcatggtggtctcctgggcttggtcactgtctctcaccagcatgtttctttgtgcggtcaggaattatttccaaatgctcctgaagcctagtgttttagtgaacattagtgattgttagcagtggttcaaaaaaaaaaaacttttttttttttttt

SEQ ID NO: 405922 - DNA, 1000 bp, Homo Sapiens
agcatcctcacgttgctggagatcctcgactacatctatgaggtgtcctgggatcgactgaagcgggtatggaggcgtcccaagacccccctgcggacctccactgggggcatctccactttggggcttcaggagctgaaggaacagagtccctgcccgagcctgggccgagcggagggtgggggggtcagcagtctgctccccaatcaccaccacccccacggtcccccaggaggtctctttgaagattttgcttgctaggacggtgctgtgactgaaaggacccaggagtctgggacccctcctgggatccccagcacattctcctgctcctgggagaggcctgggggcggtgctcactgggagggccaggactcagttcctgctctcatcctcccctgccctgatgtcagctgctttgcacaaaggtccttcttgtccacaccccttatccccaggctggtgccccgggagggctggagaccaggccatgggccctcacggagaggaagggaaggaaggagagggagggggaggatagagcccatcccagccggggagggggagccctctgtacatttgtaaatatttagggaaagccgggtggggggaggggatacagatgtagaaggtgggtagggctacaggggtgggtgatttagggacagccagggtcccagccccaatgtcagcaggatagggagagccccaggactcaggagtgctgggctggtcctacttcctgcccctctccaggcccagctcccctcttggcagggggagaggatggcccagcaggcctggcccagctcccagttccccctgcaccagccccacccctagagtcccttctatagggagggggcaggagaccttccagacttcggctgagcttggagggtgggaagggagccttctcagtcctctctccctccagtctgattttataaagtgctgacgagattgggaataaagaggcataaagaaaaaaaaaaaaaaa

SEQ ID NO: 405923 - DNA, 1000 bp, Homo Sapiens; identical to SEQ ID NO: 293791

SEQ ID NO: 405924 - DNA, 1000 bp, Homo Sapiens; identical to SEQ ID NO: 293791

SEQ ID NO: 405925 - DNA, 1000 bp, Homo Sapiens; identical to SEQ ID NO: 224565

SEQ ID NO: 405926 - DNA, 1000 bp, Homo Sapiens; identical to SEQ ID NO: 293793

SEQ ID NO: 405927 - DNA, 1000 bp, Homo Sapiens; identical to SEQ ID NO: 292479

SEQ ID NO: 405928 - DNA, 1000 bp, Homo Sapiens; identical to SEQ ID NO: 293795

SEQ ID NO: 405929 - DNA, 1000 bp, Homo Sapiens
cagcattgagccccttccctcagactccccgaaggaggaattacgcccaattaggcccgacaccccaccctccaaaccagtggcctttgaggagtttaagaatgagcaaggtagtgagatcaaccgaattttcaaagaaaacaaatccatcttgaatgaacggaggaaaagggccagcgagaccacacagcacatcaatgccatcaagcgggagattgatgtgaccaaggaggccctgaatttccagaagtcactatgggagaagcaaggcaagtacgaaaacaaggggctgatgatcatcgatgaggaagaattcctgctgatcctcaagctcaaagacctcaagaagcagtaccgcagcgagtaccaggacctgcgtgacctcagggctgagatccagtattgccagcacctagtggatcagtgtcgccaccgcctgctcatggaatttgacatctggtacaatgagtcctttgtcatccctgaggacatgcagatggcactgaagccaggcggcagcatccggccaggcatggtccctgtgaacaggattgtgtctctgggagaagatgaccaggacaaattcagccagctgcagcagagggtgcttcctgagggccctgattccatctccttctacaatgccaaagtcaagatagagcagaagcataattacttgaaaaccatgatgggcctccagcaggcacatagaaaatagaacctcatcgccagtaccttaaaggacaagaccagcaactcccacctactgtagtggagctgctcaaccacctgcccagagctgcagccccctctactccaatgctgggacccagcacagagaacacatttggcctgcatgttgggaggagcatcctccaaggacaaccttgctcatctccacagagcactttgggttttaattcactgtcttatatgcagggacaggataaaataactttctagtttggactttcaaaaaaaaagaaaaaaaaaaaaaaaa

SEQ ID NO: 405930 - DNA, 1000 bp, Homo Sapiens; identical to SEQ ID NO: 293796

SEQ ID NO: 405931 - DNA, 1000 bp, Homo Sapiens
tgctgccctcacaggccttgatgtccggcctccctatgcagagtatctgcaggtggtgaactatggcatcggaggacactatgagcctcactttgaccatgctacgtcaccaagcagccccctctacagaatgaagtcaggaaaccgagttgcaacatttatgatctatctgagctcggtggaagctggaggagccacagccttcatctatgccaacctcagcgtgcctgtggttaggaatgcagcactgttttggtggaacctgcacaggagtggtgaaggggacagtgacacacttcatgctggctgtcctgtcctggtgggagataagtgggtggccaacaagtggatacatgagtatggacaggaattccgcagaccctgcagctccagccctgaagactgaactgttggcagagagaagctggtggagtcctgtggctttccagagaagccaggagccaaaagctggggtaggagaggagaaagcagagcagcctcctggaagaaggccttgtcagctttgtctgtgcctcgcaaatcagaggcaagggagaggttgttaccaggggacactgagaatgtacatttgatctgccccagccacggaagtcagagtaggatgcacagtacaaaggaggggggagtggaggcctgagagggaagtttctggagttcagatactctctgttgggaacaggacatctcaacagtctcaggttcgatcagtgggtcttttggcactttgaaccttgaccacagggaccaagaagtggcaatgaggacacctgcaggaggggctagcctgactcccagaactttaagactttctccccactgccttctgctgcagcccaagcagggagtgtccccctcccagaagcatatcccagatgagtggtacattatataaggattttttttaagttgaaaacaactttcttttctttttgtatgatggttttttaacacagtcattaaaaatgtttataaatcaaaa

SEQ ID NO: 405932 - DNA, 1000 bp, Homo Sapiens; identical to SEQ ID NO: 118957

SEQ ID NO: 405933 - DNA, 1000 bp, Homo Sapiens; identical to SEQ ID NO: 224568

SEQ ID NO: 405934 - DNA, 1000 bp, Homo Sapiens; identical to SEQ ID NO: 118958

SEQ ID NO: 405935 - DNA, 1000 bp, Homo Sapiens; identical to SEQ ID NO: 220742

SEQ ID NO: 405936 - DNA, 1000 bp, Homo Sapiens; identical to SEQ ID NO: 224570

SEQ ID NO: 405937 - DNA, 1000 bp, Homo Sapiens; identical to SEQ ID NO: 293807

SEQ ID NO: 405938 - DNA, 1000 bp, Homo Sapiens
tcagacgcttgcacagcatctgtcacagctgcttttttctcaaccagattttgctaaacatgttgactttctagaagccataagtagtgctttgagggcccttttgcaaacaatggcctccaagaacatttcccagtgcatgactcctgatcagctgatgacattatgcaaagcaggcattcatagtagtaatgtcggggttagagtgaatgtcgttagcattttaggaatcactggcagcgtccttgccaaagaagatggtacacttgaaactcttaagaacattgggtgctttctgcttgaagttaccaccaaagatccttcccttgtggtagcaggagaagctttggatgccctctttgatgtttttgcagatggtaaagaagccgaaagagcctcgattcaaattaaattattatctgctttgaaagaattccagccggtctttaaaatgaagatacgtaaagaagggagaggtaactatagcacagatcagctgtgtgttcttgacaatgtgaaaatgaatttgcgaagatttattgcttatcaagaaactgttgagaaaagactgacttcttaaacaatccaaaaaagaaaccagttcttcccccaaagtattcaatgcttagaatactaaaaggttttctttgaatgtatatgtttctgaaagtcattttttaatgattacattctgtacattctgtaaaaacttcaaaacctggccaggcatggtggctcacgcctgtgatcccagcaccttgggagaccgaggcgggtggatcacttgaggtcaggagtttggggccagcctggccaacatggtgaaaccgcatgcataagcatggtggcacatgcctgtgatcccagctactcgggaggctgagggaggagaatcggttgagcctgggagacagaggttgcagtgagctgagatcacgctactgcactccagcctgggtgacagagggagaccctgtctccaaaaaaaaaaaaaaaaaaa

SEQ ID NO: 405939 - DNA, 1000 bp, Homo Sapiens
gaaagagaagaatgcaaaggaaagcaaaaggatgggacatcttttggagagtatggcggctggtacaaagcctgcaaagttgatagtccaactgttacaaccactctaaaaaaccttggggcactttacagacgtcaaggcaaatttgaagctgcagaaacgttagaagaagctgctatgaggtctcgtaaacagggtcttgacaatgttcacaaacagagggtggcagaagtgctcaatgaccctgagaacatggagaagcgcaggagccgtgagagcctcaacgtggacgtggtcaagtacgagagtggccctgacggaggggaggaagtgagtatgagcgtagagtggaacggggacggcactggatctttaaaacgcagtggttcctttagcaaactccgggcttccattagacgcagcagtgagaagctggttaggaagctgaagggaggaagttcacgagagagtgagccaaagaaccccggggtctctggccgagcctctttttgtggaaaacgacagcagcagcagtggcctggaagacgccaccgctaacgtgagatgatgtctataaactaagcactgacagctcacagcactgctgccccagctgcagggatgggtcccagcctctcttgcctgcttcttggctacaggacggactccactggcccccgtgggattcaggtccagtagatccaaatccattttgtcggtgggctggccaccaggatgaataacttcccaggaaagacagaacaatggatgcaaattctgaggcactcgccttcaattcaaagcctgtgggaggcccgaaccagggaagtgacagcagccgaggtgtccgtgtcatcggggctctgtcactgagggtggaggagacttcactgtagagggaaggctgtctagctacatctagggcaacatgtttgtcatttacctctaagaattatttagcagcttagaacccattccagacactgatgcatttgaaaaa

SEQ ID NO: 405940 - DNA, 1000 bp, Homo Sapiens
aagacatttgaggaattccccatgaccccaacgacctacaaaggctctgtggacaaccagacagacagtgggatggtgctggcctcggaggagtttgagcagatagagagcaggcatagacaagaaagcggcttcagctgtaaaggacctggccagaatgtggctgtgaccagggcacaccctgactcccaagggaggcggcggcggcctgagcggggggcccgaggaggccaggtgttttacaacagcgagtatggggagctgtcggagccaagcgaggaggaccactgctccccgtctgcccgcgtgactttcttcacagacaacagctactaagcagcatcggacaagacccccagcacttgggggttcaggcccggcagggcgggcagagggctggaggcccaggctgggaactcatctggttgaactctggtggcacaggagtgtcctcttccctctctgcagacttcccagctaggaagagcaggactccaggcccaaggctcccggaattccgtcaccacgactggccagggcacgctccagctgccccggcccctccccctgagattcagatgtcatttagttcagcatccgcaggtgctggtcccggggccagcacttccatgggaatgtctctttggcgacctcctttcatcacactgggtggtggcctggtccctgttttcccacgaggaatctgtgggtctgggagtcacacagtgttggaggttaaggcatacgagagcagaggtctcccaaacgccctttcctcctcaggcacacagctactctccccacgagggctggctggcctcacccacccctgcacagttgaagggaggggctgtgtttccatctcaaagaaggcatttgcagggtcctcttctgggcctgaccaaacagccaactagcccctggggtggccaccagtatgacagtattatacgctggcaacacagaggcagcccgcacacctgcgagtggcaaactgtcc

SEQ ID NO: 405941 - DNA, 1000 bp, Homo Sapiens; identical to SEQ ID NO: 293808

SEQ ID NO: 405942 - DNA, 1000 bp, Homo Sapiens; identical to SEQ ID NO: 293809

SEQ ID NO: 405943 - DNA, 1000 bp, Homo Sapiens
cgaggtctgagcgtcagccacggtcccctccgaggtctgagcgtcagccacggtcccctccgaggtctgagcgtcagccacgtccccgcccagaggtccgaccaccgccagccaagcagcgtccccctcagaagtccaagcaacagccgcgcagcagccccctcagagggccaggcgccagccgtggggggtcccccgtcaaagcttctaggttctggtaacaccatctcttcccttttgttccccagccctaagattgaaaaggaagatcaggccaaccccaaagaagaagtgaccaaggaggagtttaaactgaatgaacaaccttggctcctggactcattgcttcacaacccatctacccctggatgaagttatctggcttcaaatattatgcaggggcaaacacctgctgatgtggcaactgctgatgctcatggtccccatggcatgggggcctcagggcagcctgcctggagtactttgaagatgtcatcccattgtcttctgacctctataattgccactgagagatctgctgtcagtctgcttatccttccacggactcaagtttcttcaatctgaagatacatgtctttctccagggacatgtgggaaaaaaaaagatgttatacaaccatcaaagtggcaaaaataaaaaaaatcaagtattggcaaagatgtggggaaaattctcataagctactgatgagaatttataaattattatgacacctttgggttcaatctggggatactggcaaagcagaaaattgtacaacctgtggtcaagcaataataattttaggcacccatcctagagaaaacttgaattcatagaaaaagtaggtacacgtaaatctgttcaaggaatcattgtttggcattgaaaataggagagagatcatgagaaattaccaaaatgtccaccaatagaatgagtgaatcacccgtggtatatttataaataaaatcttaaatagaaggtaaaacaaatcag

SEQ ID NO: 405944 - DNA, 1000 bp, Homo Sapiens; identical to SEQ ID NO: 224571

SEQ ID NO: 405945 - DNA, 1000 bp, Homo Sapiens; identical to SEQ ID NO: 293812

SEQ ID NO: 405946 - DNA, 1000 bp, Homo Sapiens; identical to SEQ ID NO: 222448

SEQ ID NO: 405947 - DNA, 1000 bp, Homo Sapiens; identical to SEQ ID NO: 220957

SEQ ID NO: 405948 - DNA, 1000 bp, Homo Sapiens; identical to SEQ ID NO: 118596

SEQ ID NO: 405949 - DNA, 1000 bp, Homo Sapiens
ctctgcacacggcttcggggctgcgcctcttctctgtgctcagcctggcctggggcttcattgctgatgtggacctagagagtgagaagtatcggcgtctgggggagatgcgcttcactctgggcaccttcctgcgtctggcagccctgcgcacctaccgcggccgactggcctacctccctgtaggaagagtgggttccaagacacctgcctcccccgttgtggtccagcagggcccggtagatgcacaccttgtgccactggaggagccagtgccctctcactggacagtggtgcccgacgaggactttgtgctagtcctggcactgctgcactcgcacctgggcagtgagatgtttgctgcacccatgggccgctgtgcagctggcgtcatgcatctgttctacgtgcgggcgggagtgtctcgtgccatgctgctgcgcctcttcctggccatggagaagggcaggcatatggagtatgaatgcccctacttggtatatgtgcccgtggtcgccttccgcttggagcccaaggatgggaaaggtgtgtttgcagtggatggggaattgatggttagcgaggccgtgcagggccaggtgcacccaaactacttctggatggtcagcggttgcgtggagcccccgcccagctggaagccccagcagatgccaccgccagaagagcccttatgacccctgggccgcgctgtgccttagtgtctacttgcaggacccttcctccttccctagggctgcagggcctgtccacagctcctgtgggggtggaggagactcctctggagaagggtgagaaggtggaggctatgctttggggggacaggccagaatgaagtcctgggtcaggagcccagctggctgggcccagctgcctatgtaaggccttctagtttgttctgagacccccaccccacgaaccaaatccaaataaagtgacattcccaaaaaaaaaaaaaaaaaaaaaaaaaaaaaaaaaaaaa

SEQ ID NO: 405950 - DNA, 1000 bp, Homo Sapiens; identical to SEQ ID NO: 293815

SEQ ID NO: 405951 - DNA, 1000 bp, Homo Sapiens
ccgcgggtctggagagcaggactgggtcaacaggcccaagaccgtgcgcgacacgctgctggcgctgcaccagcacggccactcggggcccttcgagagcaagtttaagaaggagccggccctgactgcaggcaggttgttgggtttcgaggccaacggggccaacgggtctaaagcagttgcaagaacagcaaggaaaaggaagccctctccagaaccagaaggtgaagtcgggccccctaagatcaacggagaggcccagccgtggctgtccacatccacagaggggctcaagatccccatgactcctacatcctcttttgtgtctccgccaccacccactgcctcacctcattccaaccggaccacaccgcctgaagcggcccagaatggccagtcccccatggcagccctgatcttagtagcagacaatgcagggggcagtcatgcctcaaaagatgccaaccaggttcactccactaccaggaggaatagcaacagtccgccctctccgtcctctatgaaccaaagaaggctgggccccagagaggtggggggccagggagcaggcaacacaggaggactggagccagtgcaccctgccagcctcccggactcctctctggcaaccagtgccccgctgtgctgcaccctctgccacgagcggctggaggacacccattttgtgcagtgcccgtccgtcccttcgcacaagttctgcttcccttgctccagacaaagcatcaaacagcagggagctagtggagaggtctattgtcccagtggggaaaaatgccctcttgtgggctccaatgtcccctgggcctttatgcaaggggaaattgcaaccatccttgctggagatgtgaaagtgaaaaaagagagagactcgtgacttttccggtttcagaaaaacccaatgattacccttaattaaaactgcttgaattgtatatatatctccatatatatatatatccaagacaagggaaatgtagac

SEQ ID NO: 405952 - DNA, 1000 bp, Homo Sapiens
cctgaggccgttcctacactccgcaaataagcacttcatgacaggctaccgagtgatcttctacatcatggtggacgccttcttcaagctgcctgacatagagcccagtcctcttcgaacgttcaaagcatttaaagtgggcaccgagaggtggtggctcgatggccccctggtgcatgtgaagagcctgggtgaacacatcgccagtcacatccaggacgaggtggacttcctcttcagcatggctgccaaccaggtcttccagaatgagttcggggtggagaccctgggcccgttggtggcccagctccacgcctggtggtatttcagaaacaccaagaacttcccttatgagaggaggccgacctcagcagcttgcatcccgtttggacagggagatttctattatggcaacttgatggttggtggcacaccccataatattttagacttcatcaaagaatatctgaacggagttattcatgacatcaaaaatggactcaatagcacttatgaaaagcaccttaacaaatatttttacctcaataaacccactaagctgttatcaccagcatacagctgggatcttgcattttctcctcctccacagatccaatacgtcaaggtcgcacatgattcccagaggaaattatgaattacgccatgaggtttatgacgaataaatgaatcacggcaatttcttataaatgagggaagtcttaagaccttccattttttagagacatacaaatttacatccttcccaaataaatgtttcttcttgccattttgagccatcttatttggctaatgtaggataaagaataaaaggataattacttaatgttaatacacagtaatgttattatctatgtattgtagacaatgtgaaaatacatttgacatagaatgaatatttttaatggagaaagactctagttgagaaaaaacattcataaaatggaaaagtagttcacgcaaaggaaaaaataaatgccag

SEQ ID NO: 405953 - DNA, 1000 bp, Homo Sapiens; identical to SEQ ID NO: 293816

SEQ ID NO: 405954 - DNA, 1000 bp, Homo Sapiens; identical to SEQ ID NO: 293817

SEQ ID NO: 405955 - DNA, 1000 bp, Homo Sapiens; identical to SEQ ID NO: 401872

SEQ ID NO: 405956 - DNA, 1000 bp, Homo Sapiens
gctacatctgcagcaacatgtgtccatggagtttctaaagctgcatcagttcctgcacagcaaagaaaaggacattttaactgagctccgggaagaggggaaagccttgaatgaggagatggagttgaatctgagccagcttcaggagcaatgtctcttagccaaggatatgttggtgagcattcaggcaaagacggaacaacagaactccttcgactttctcaaagacatcacaactctcttacatagcttggagcaaggaatgaaggtgctggcaaccagagagcttatttccagaaagctgaacctgggccagtacaaaggtcctatccagtacatggtatggagggaaatgcaggacactctctgcccaggcctgtctccactaactctggaccctaaaacagctcacccaaatctggtgctctccaaaagccaaaccagcgtctggcatggtgacattaagaagataatgcctgatgatcctgagaggtttgactcaagtgtggctgtactgggctcaagaggcttcacctctggaaagtggtactgggaagtagaagtagcaaagaagacaaaatggacagttggagttgtcagagaatccatcattcggaagggcagctgtcctctaactcctgagcaaggattctggcttttaagactaaggaaccaaactgatctaaaggctctggatttgccttctttcagtctgacactgactaacaacctcgacaaggtgggcatatacctggattatgaaggaggacagttgtccttctacaatgctaaaaccatgactcacatttacaccttcagtaacactttcatggagaaactttatccctacttctgcccctgccttaatgatggtggagagaataaagaaccattgcacatcttacatccacagtaatgagtcataatattatacaaattcagagtgttattaaagaggttttgaaatatttaaaaaaaaaaaaaaaaaaaaaaaaaaaaa

SEQ ID NO: 405957 - DNA, 1000 bp, Homo Sapiens; identical to SEQ ID NO: 224574

SEQ ID NO: 405958 - DNA, 1000 bp, Homo Sapiens; identical to SEQ ID NO: 293819

SEQ ID NO: 405959 - DNA, 1000 bp, Homo Sapiens; identical to SEQ ID NO: 293820

SEQ ID NO: 405960 - DNA, 1000 bp, Homo Sapiens; identical to SEQ ID NO: 224575

SEQ ID NO: 405961 - DNA, 1000 bp, Homo Sapiens; identical to SEQ ID NO: 293822

SEQ ID NO: 405962 - DNA, 1000 bp, Homo Sapiens; identical to SEQ ID NO: 293823

SEQ ID NO: 405963 - DNA, 1000 bp, Homo Sapiens
ccaattcgagggcacagcgggctccggaggcgcggcggcaagcctatcccgcctcccaaccacagcctccagcacccgagagaacggccgcccacagcacacgttctccggacaggagggcgaaggcccaagacctggagagatgggcagctctcaaaaaaggcacaaacaattgaaggatggataccatggcatatgttaaaagcgtgttgaaaggaaaataagaaagccaggaatctcaggatgaatcagtctagatcgagatcagatggtggcagtgaagaaaccttacctcaagaccataatcatcatgaaaatgagagaagatggcagcaagagcgtctccacagagaagaggcctattatcagtttattaatgaactcaatgatgaagattatcggcttatgagagaccataatcttttaggcacccctggagaaataacatcagaagaactgcaacagcggttagatggcgtcaaggaacaactagcatctcagcctgacttgagagatggaacgaattacagagactcagaagtccctagagaaagttcacatgaagattctcttctagaatggttgaacacctttcggcgcacaggaaatgcaactcgaagtggacaaaatgggaaccaaacttggagagctgctttgccagatacaagctgaagtgctaccagaaaaccagttgttaagtctatctggaaaaatagactgtgaagcacctcatcttcatttcaatagcttcgctggaacctggagcctaaggggtaaaatgtattatctttctcttcacaaacagttttttttcttttatggaacatagaatatgacaacatttgttttgtcaactgattacattttaaaacattgtacttgttcatattgtacttggctttgaaataccctgaagcatctatggaattgtaatttattgtaatgcaataagcatttatgtaattaaaaaaaagcattcttaaatatgaaaaaaaaaaaa

SEQ ID NO: 405964 - DNA, 1000 bp, Homo Sapiens; identical to SEQ ID NO: 287916

SEQ ID NO: 405965 - DNA, 1000 bp, Homo Sapiens; identical to SEQ ID NO: 118960

SEQ ID NO: 405966 - DNA, 1000 bp, Homo Sapiens; identical to SEQ ID NO: 293825

SEQ ID NO: 405967 - DNA, 1000 bp, Homo Sapiens; identical to SEQ ID NO: 293827

SEQ ID NO: 405968 - DNA, 1000 bp, Homo Sapiens; identical to SEQ ID NO: 221412

SEQ ID NO: 405969 - DNA, 1000 bp, Homo Sapiens; identical to SEQ ID NO: 393463

SEQ ID NO: 405970 - DNA, 1000 bp, Homo Sapiens; identical to SEQ ID NO: 224577

SEQ ID NO: 405971 - DNA, 1000 bp, Homo Sapiens; identical to SEQ ID NO: 224578

SEQ ID NO: 405972 - DNA, 1000 bp, Homo Sapiens; identical to SEQ ID NO: 293831

SEQ ID NO: 405973 - DNA, 1000 bp, Homo Sapiens; identical to SEQ ID NO: 224579

SEQ ID NO: 405974 - DNA, 579 bp, Homo Sapiens; identical to SEQ ID NO: 293832

SEQ ID NO: 405975 - DNA, 851 bp, Homo Sapiens
cgccgggttcccgctcgcccggcgccatggatccgctgtcgccgccgctctgcacgctgccgccgggccccgagccgccccgcttcgtgtgctactgcgaaggggaggaaagcggggagggggaccgcggcggcttcaacctctacgtgaccgacgccgcggagctttggagcacctgcttcacgccggacagcctggcggccctcaaagcccgttttggcctgagtgcggctgaggacatcaccccccggttcagggcagcctgtgagcagcaagctgtggctctgactctgcaggaggacagagcatccctgacgctttcaggggggccctcggcactggcctttgacctctccaaggtaccaggcccagaggcagcccccaggctgcgggcgctgacactgggcctggcaaaacgcgtgtggagcctggagcggcgactggcagctgcagaagagacagctgtcagcccgaggaagagcccccggcctgcagggcctcagctcttcttaccagacccagatccccagagaggtggccctggacctggagtcaggaggcggtgtccaggagagtcgctcatcaaccccgggttcaagagtaagaaaccagctggtggcgtggacttcgatgagacctgaaggtgcagcacaagcgtggccccgcggggagtccgcctatgaggggagaggcagtctttgaggcccccatcagagaccccccgccaccacctccacctgcctgtcctgggccaggactaacacggctcctcaaattccttccctgtcaaataaacagctcccttggttggaaaaaaaaaaaaaaaaaaaaaaaaaaaaaaaaaaaaaaaa

SEQ ID NO: 405976 - DNA, 1000 bp, Homo Sapiens; identical to SEQ ID NO: 293833

SEQ ID NO: 405977 - DNA, 1000 bp, Homo Sapiens
cctctgttgagaagtccagagagctccgactgcagataattcagagagaacgaaggaggaaggagctgtttcgcaaaaagaacaaggcagcagcagtcatccagcgcgcctggcgaagctaccagctcaggaagcacctgtcccaccttcggcatatgaagcagcttggagctggagatgtggacagatggaggcaagagtctacagcattgctcctccaggtttggaggaaggaactggaactaaaattcccccaaaccactgcagtaagcaaggcccccaagagtccatccaagggcacctcaggcacaaagtccaccaagcactcagtgcttaagcaaatctatggttgttctcacgaagggaaaatacatcatcctacaagatctgtaaaagcctcttctgtgctgcgtctcaactcagtgagcaacctacagtgtatacatctccttgagaacagtggaagatcaaagaacttttcttataacctgcaatcagctactcagccaaaaaacaaaacaaaaccttgactgcctatggaggaagactgtgttcgggggagctggcatagctagtgcagagttcagattttctgctgataatcttttacaccttgggaaaactttaatatccgtacctgaaggctgattcacctaaaaatgtgttaactgaaagaaaatgtcagaatgtttcctttctgctcttacacagcattgttttgtcaatcaacacagcctgcactgaaaggacctgcatagactatgtctgtgcaaagtgcctgagtgtctgctttcacctcagtctgtacagttggaaatgagaattcataattaacagcaaaatctaaggaaaactacggctgctgggttgggatttctgccagctagctggtactggcttcttgtttcaagagatgaacctaaatgagataggaagcctgtcccatagcagccttcctctcactactttcctggcatctaatgcaacaaacttatcacac

SEQ ID NO: 405978 - DNA, 1000 bp, Homo Sapiens; identical to SEQ ID NO: 116624

SEQ ID NO: 405979 - DNA, 1000 bp, Homo Sapiens; identical to SEQ ID NO: 293834

SEQ ID NO: 405980 - DNA, 1000 bp, Homo Sapiens
atcactgttactgataatttatcatatacacttgtcaatttttcctttgttatcttaaaagatctgccttagcaatggctcctttttcatgttgatctttaaattttcccacaccataagagaggagcaaaggaaattaccagtttagactaagttacagtatgtgtttcataagtgattaaagctatatcattcccagttattagttaacacaaattcagccacattctgagtattgtttgttcacctttcagacttggtgatactggacatgtcagtgtaaataacactaaggttaggatcttctaagtgtataactgtctcctaagcccatcactgtggcacactgtagagtgagcttatagtttaattgagatatttatcttgtggaaatattaaaaagcctatgcttgtgtaagtgaaaaaaaatcacattcatttgtttaaaaatgtaaagctattttgtagaggctcagtacttttccaatgcactgttgtatgaatgcattaaaaattgtaaagtaccatgcttagaactgagaaaactgctttttgtgagccaacatagtaacaaacacaccaaacaaagtacaaagctgcttttgtaagtgtgtagatgtcaagagcagaacatatctataatatttaatgtgtgaacagctactgtgacatgcaaaggaaaggacagtgcagaattaaaccgtgttgaagaccagtggaaattgtataatttaacttggatttaggcaggaagtgaaatatgggaggagtaaagaaaactgaagaatttaaagttttcctgaagacagtaataatgcagacacaaactggtttcatatggtgagagcagccacagcagcagcttgacctggtattctacctgagtagatgaagcagaagatcagcaagtttggcagagttttggtttaagaaaaacaaaccactactacctagcacaagttaaatttacaagtctgctcctcaaaaatgaaaaaaaaaa

SEQ ID NO: 405981 - DNA, 1000 bp, Homo Sapiens
aggtgccaggtgtcacgctcttcgacaacgccgacctgctggtcaccgccaacgccatagacttcttcaacaacgggacctcccagtgccctgagcatgcaaccaaggtggcattgaaggtggtgacgcccatcatcatctcagtctttgtgctggccctgtacctgcacgcccagcaggtggagtccactgcccgcctcgacttcctctggaaactgcaggccacagaggagaaagaggagatggaggagctgcaggcctacaaccggcggctgctgcacaacatcctgcccaaggacgtggccgctcacttcctggcccgcgagcggcgcaatgatgagctctactatcagtcctgtgagtgtgtggcggtcatgttcgcctccatcgccaacttctccgagttctacgttgagctggaggccaacaacgagggtgtcgagtgcctgcggctactcaatgagatcatcgctgactttgatgagatcatcagcgaggatcggttccggcagctggagaagatcaagaccatcggcagcacctacatggctgcctccggcctcaacgactctacctacgacaaggtgggcaagacccacatcaaggcactggccgactttgccatgaagctgatggaccagatgaagtacatcaatgagcactccttcaacaacttccagatgaagatcgggctcaacatcggccccgtggtggccggggtgataggggcacgaaagcctcagtacgacatctggggcaataccgtgaacgtggccagccgcatggacagcaccggtgtacccgaccgcatccaggtcaccacagacatgtaccaggtgctggctgccaacacgtaccagctggagtgccggggcgtggtcaaggtcaagggcaaaggcgagatgatgacctacttcctcaatggagggcccccgctcagttagcagctgttggccaatggtgccaggcagcctggcctccagaggcatggaagcagctt

SEQ ID NO: 405982 - DNA, 1000 bp, Homo Sapiens; identical to SEQ ID NO: 293835

SEQ ID NO: 405983 - DNA, 1000 bp, Homo Sapiens; identical to SEQ ID NO: 293838

SEQ ID NO: 405984 - DNA, 1000 bp, Homo Sapiens
gtgacacaatgccaaaccactctgaaaccatcagtcacactgtgaacgtgcccctgcagacgaccctggggaccttggaggagattgcctgctgacacccctcgagtcacccagcactccctccaaacagaccttgaggcccaagacccaggacaaggaacagcaagctcaggtgggatggccccagtgctggaaagaagcaagagccccctatgcacacattgcagactagctgcctagacctcgctccggccacgtccaacacgacgcatccttgggccccgccgtgcgtccctcttaggagagatgagtcacactctggaactgtccaagaacgaacctgccatcacatctcactgccagatgtataaagcacctgcatgctcagacttcttgtggcgccacctccacgtctgtcttgtacatgacactcctccacgcggtttccagtgtccacactgctgcccgtgcagtgggaccagattccaggtccaaagtcaccatgaggccaccctggaatcagaactgcacaatcaagagggaacccatgggactctctgctacattcagttcttgtgtcgtttgtgaaagttcttaacctgcccaaaaacccccttttccccaagctgcccatggggcttcggcgccaaaggtgacccgcgccaacctccctcccccccagtgcctatgacggcggcacagcagccagcgggtgggggacgcctgtgttcacccatggtgcccatgtcgttcttctctccctgtgacacagcttgtacagtctgattctttttatctggggtaggggggcttttatgtttgtccgatggagatttgttttgttttgcttcattttatgcttttttattttagttttgatgttctgaggtttgctttggtttttccattttctttggcatttatttattcgtgcttcaaatcacagtcatattaaaagctggtcttgtggaaaaaaaaaaaaaaaaaaaaaaaaaaaaaa

SEQ ID NO: 405985 - DNA, 1000 bp, Homo Sapiens; identical to SEQ ID NO: 224580

SEQ ID NO: 405986 - DNA, 1000 bp, Homo Sapiens; identical to SEQ ID NO: 118962

SEQ ID NO: 405987 - DNA, 1000 bp, Homo Sapiens; identical to SEQ ID NO: 224581

SEQ ID NO: 405988 - DNA, 1000 bp, Homo Sapiens; identical to SEQ ID NO: 286100

SEQ ID NO: 405989 - DNA, 1000 bp, Homo Sapiens; identical to SEQ ID NO: 293842

SEQ ID NO: 405990 - DNA, 1000 bp, Homo Sapiens
taatgcagccctgaggtgtctggctgtggctcaagatttggccccatgcagaccctcccaaaggatactgccttctcaagatcataggcctcagactccaactggtgttatcccagggttccgtttgctgaagtaaaaacactgattttaaaatcccagtgggtacctttgtatggtggcacaagtggccgaatcaggctgaggaatctacggcttggttccagctgtgcagctgacttctgtgagactggggccagccacactactctctaggcctcaggggtcaaggagctcagaggagggccctgaggtctctttccggtgggtatgttcattcttcaactgttcttatgtcacagagggctccttgctggtgggcagtgggttgtaaatactttttaaaaaacactaagttccttatctcagatgctgttctactggagaagttctagattcccactgtccaatagaaacacgtgagccatatatgtaattaaaatgtttctagtagctgcattacaaaaaagaagcctgggcactgtggctcactcctgtaatctcagaactttgggaggctgaggcaggtggatcacttgagctcaggagcttgagaccagcctgggcaacatggtgaaacccagtttctacaaaaaatacaaaaaattagccgggttccatcacctgtggttccagctgaggtgggaggatcacttgagcctatgaggtcgaggctacagtgagcaaagatcacgccactgcactccagcctgggcgacagtgagaccctgtctcaccaaagaaaaaaaaaaggtgagattaatcttcactatatattttaacacaaatttctaaaagttatttcaacatataattaacatcattagatattttgtactcttttttgtattaagtattcaaaattgggtgtatattttgccacccacattttcaggacccagtagccacatgtggctagtggctgctgtgacgggcaacacag

SEQ ID NO: 405991 - DNA, 1000 bp, Homo Sapiens; identical to SEQ ID NO: 118963

SEQ ID NO: 405992 - DNA, 1000 bp, Homo Sapiens; identical to SEQ ID NO: 118362

SEQ ID NO: 405993 - DNA, 1000 bp, Homo Sapiens; identical to SEQ ID NO: 224583

SEQ ID NO: 405994 - DNA, 1000 bp, Homo Sapiens; identical to SEQ ID NO: 288753

SEQ ID NO: 405995 - DNA, 1000 bp, Homo Sapiens; identical to SEQ ID NO: 293847

SEQ ID NO: 405996 - DNA, 1000 bp, Homo Sapiens; identical to SEQ ID NO: 118964

SEQ ID NO: 405997 - DNA, 1000 bp, Homo Sapiens; identical to SEQ ID NO: 118965

SEQ ID NO: 405998 - DNA, 1000 bp, Homo Sapiens
ctccagggacaggctgcagctccagcgagtggcagtggagctgattctgagccagctcgccatatcttctccttttcctggttgaactccctaaatgaatgatattcattccaactgctgcccctctgtctgcctggctgagatgcatgtgggcagcaggaagcccaagtgaaattaatattatgcagatgatgaaagggacctctgaacaggatttctgcaaaaatagccccaaactgcaattccatatgacttatctaacatcttggggggaaagaatattttgagaaaatagttgcagaaagcactggaaataataaacttgatcttatacaaatcttctattgtgtggaaaatgttgtgaagggtgtgtaggtgtggtacatgtgtatgtcactaacaagtggcaaatggtgaaaaaagtggtcactatgcttttgtctctcataggcactgactttttgttattatattatggtagctttcatttcctttactctttaacagtgcaggtggtcagtgaaaatcagtgtcaactcagaagtgactgatttatcaatacatggacaaaaagtaaatcattgaccaaagctatgaaatgtttcacaaagttttcctcttttgcataacagatgtcactggatgtacattcagaaatgttctttgaatttggtgacactttcatggtccagaaagctgaaggcctgggcatctcttgtgacatttttctaatattagttttagattttcacgtattaggcactttagttgaatcttccagcaaaagctgtctactttctcttttattcactgtggcaccaatctggtaaattgtagaacaattgcatgtgtttaaatatatatacaaacatatcacacattaaatatatatatatttaaatcatgctttgttaatatttgtcccaccataatgcctccttcagaacataagtgtaactttatatgaactcttaaataaatgatgtttttaaaaaaaaaa

SEQ ID NO: 405999 - DNA, 1000 bp, Homo Sapiens; identical to SEQ ID NO: 293850

SEQ ID NO: 406000 - DNA, 1000 bp, Homo Sapiens; identical to SEQ ID NO: 293851

SEQ ID NO: 406001 - DNA, 1000 bp, Homo Sapiens; identical to SEQ ID NO: 293852

SEQ ID NO: 406002 - DNA, 1000 bp, Homo Sapiens
tcccactagaaaaccatgacaaattcaaaaatgtaccatgtgaggtctaccagcacattctgcagccaaacatgctggccaacaaggttaaatttacctttcctccagctgccctcccaccccctagcacacctctgcagcctttgcctttgcagcagtccttatgttctacctctgtaaccactatccatcacactgttttgcagcagcacgctgcagctgctgcagctgcagctgcagccgcagctgcaggaacctttaaagtgcttcagccacaccaacagtttctttcccaaatcccagctctcaccagaacctcattacctcagctctcagtaggaccagtaggaccgaggctttgtcctgggaaccagccaacttttgttgctcctcctcagatgccaatcattccagcttccgttcttcatcctagccatctggctttcccatctttaccccatgcactctttccttcactgctttccccacaccctactgtcatccctttgcaacctctcttctagtcatcaccataatgggaaaaaaatactcttgtgaaaactattgctatatgcgttaagtgttcatctatgtgggtacatggctatttaactggtggaaataaactggccgatacatggcgtcattggtttgaaatcatttactgtaagtgcaatgatgcaaataaatccctaagtttctgatatataatattattaaagcactgaatagtttgaaaatcaatacaatatatgctatatattaaaatgatgtcttaagagtatgtataatgtacataaaatatatttatagtactctaatttatgttgtaaagtatgctcccttggtttttcttaatctttgtgtatttgcacctatttaatgtttagacaaagctgatggcactatgttttgtatcatgttccttgaaactgtaaattcagtgaaaaatatctcttgcaataaatttttgttaactatttaaaaaaaaaaaaaaaaa

SEQ ID NO: 406003 - DNA, 1000 bp, Homo Sapiens; identical to SEQ ID NO: 293855

SEQ ID NO: 406004 - DNA, 1000 bp, Homo Sapiens; identical to SEQ ID NO: 293856

SEQ ID NO: 406005 - DNA, 1000 bp, Homo Sapiens; identical to SEQ ID NO: 293858

SEQ ID NO: 406006 - DNA, 1000 bp, Homo Sapiens
cagtggactgcttcctgttcccctccctcctcttcctcaccttgttctgcaccctcaagcctttctccaatgcctcccaggaggatttggggactttctccctggggcgcccagatccagctcggaggcctcactgggacctggcaaggcctgacctcccgcccaaacttgcttctgtagctccccctcgaggaagtgaggtgtttaattttgcatgttttctggcatgaattaagacacttatacttgtatatatgagtgtacagtttgttctcacactgtcaccatagcgacaggtcctggctcccagtggttcatcctgcctgcccctctctcctcgccccgcccctgcacccaccccgcttcagggaggcccaagttccgtggccccacacgcttccaggctcagctcccacctccacccaacagatagatggggtttgctttttcatttcacatggggctcctccgctcctgccttctcggatgggccaacagtcgtaagaaagccctctctgcccgttctgttcacctctccacagcgcaccccgcccgccgctgctcctcattctttccaaacctcgaaaccaaccaaaacgtgagaagtatttttgtaccctgtgtaacaaaatatttatgcatcataaaggatttttcatgtgcgtaccattaattattaaagcgacctcgttcgccctgtcagataagtttaatgtttagtttgaggcatgaagaagaaaagggtttccattcttcagcagtacgcctttgtgtctggcatttgtttaagaaaatgaaatgaaggaaacactgtgcaatgttttttgttttgagcatatcagtgctttactgtcagccgcagctgtgaccgtctggccatttcagacttgggagatgaggcggctgttgtcattgctgatcctgtgagaatgtgaaactggataatatatgaaatgcaaaataaaacaaaaccaaaaaaaaaaaaaaaaaaaaaaaaaaa

SEQ ID NO: 406007 - DNA, 1000 bp, Homo Sapiens; identical to SEQ ID NO: 293859

SEQ ID NO: 406008 - DNA, 1000 bp, Homo Sapiens; identical to SEQ ID NO: 224587

SEQ ID NO: 406009 - DNA, 1000 bp, Homo Sapiens; identical to SEQ ID NO: 118966

SEQ ID NO: 406010 - DNA, 1000 bp, Homo Sapiens; identical to SEQ ID NO: 224589

SEQ ID NO: 406011 - DNA, 1000 bp, Homo Sapiens; identical to SEQ ID NO: 293863

SEQ ID NO: 406012 - DNA, 1000 bp, Homo Sapiens; identical to SEQ ID NO: 293864

SEQ ID NO: 406013 - DNA, 1000 bp, Homo Sapiens
cgggctgtcttcaggaacttgttcaggaggtgctggggtgcagggcacgtctgaaaggcatttctggacacctgctgtggcctcatacaggagagtaggtgacctggccaaggccagcacacaggacaagattaagcatccagggacccagggtcacagccctcactccattgcaggggtggggatgacagaggccagaggggatcagacaggggcagctgttgatggttctgagatgcagtttctgtctgaggggcctcctcccactcctggcctgtgcagaggggtgggtgtgtggagggaaggtgggtctgccctggtcaaacagcagaggcattgcctgttagtctcattccattccgagtgcccccagggagagtcagccaccttatgtagagaggcaaggccagaaggcagggggggcctcccctctggtgaccaacagggcctgtggtacaagcagtgccggctgctgccctctctggcctttgtctccttccagcctctccgctattagcagaggagcagaacacttgacaggtggacacaggccacccccaacccctggccctggaggaggctccacagtggcctcctagagccaggagaccggactgagctgaatctgctgctcctgacaggacctcacagggggcgcctttgaggacaacctgaggtcactgcacttgcaggagggccaggacttccttcacttcagctgacggacccatggcagctgctcccagtgcatcccaggccagcaggagctttgtgagctgcaggcatggcgatggtgcgcctgttccacacccagcaggcgcaaccagagtctcgtgtgtgccgaccacaggagccaagccttttccactgtgtggactcatgtggccaaggctaggcctggtcacccaggaccctcaccacgtgaccccagccaatcgggacagttcaaggaggaggagacccctattacacaggttggaataaaatatttaaatctcgt

SEQ ID NO: 406014 - DNA, 1000 bp, Homo Sapiens; identical to SEQ ID NO: 293865

SEQ ID NO: 406015 - DNA, 1000 bp, Homo Sapiens; identical to SEQ ID NO: 224590

SEQ ID NO: 406016 - DNA, 1000 bp, Homo Sapiens; identical to SEQ ID NO: 224591

SEQ ID NO: 406017 - DNA, 1000 bp, Homo Sapiens; identical to SEQ ID NO: 293868

SEQ ID NO: 406018 - DNA, 1000 bp, Homo Sapiens; identical to SEQ ID NO: 293869

SEQ ID NO: 406019 - DNA, 1000 bp, Homo Sapiens
ggccctggcagagctgcggagctatcacatcaccatggtcaccaaatacctcatcacagctgcagccaaggcaaagcatgggaagccaaaccatctcccagggcctcctcaggctttaaaagacaggggcacaggtggaaccgcagttatgagctttcttaagagtgtcagggataagaccttggagtcaatccttcacccacgtggttaggaggctgccctctccccagcaatgcagagcccccatggagggcaggtgggcctggagaatgagggttagggttctgcctgggatcatccaggaaggatctcagccctattcatgtttctgctctacagagcactatattctccttgttgagagctgttggcttcacaaaggagagttgatgtggccaagcctttccctccctacctgatcactgcttaacggcatgtataatggatacttcctcatgcagaacccccagaggagtgactgtacgccattctctttgccaagtaatagaaaaccaatctaaatgtcaaaaatcagataaaattgcctggggatacattacttgttgactttcaaaaaaaacaaattcacttaacaattcattaagttcatactgagcactgcctccaagattaaaacaaggatttctgtggtcccagaccagccctcttctccctgaatgtgttgagttggtggcaggaggttggaaatgctccagtggagatgggaagatagaggatgctgacaataaggacttggaagtcactagtgtgaaaatgagcagttaatgatatgggaacggatgagactttccacgtggtacctagatttgcaaattctattgtaatgcctttatttttagaagaattattctctcttcttactctgaaaatctgtatttgtaaaatgaatgaatggatcctatataagtaaataagaaaactgggaataagtagtaaatcaatgtgtttagtgtgcaaataaatgtaaatgcttttattg

SEQ ID NO: 406020 - DNA, 1000 bp, Homo Sapiens; identical to SEQ ID NO: 293870

SEQ ID NO: 406021 - DNA, 1000 bp, Homo Sapiens; identical to SEQ ID NO: 118967

SEQ ID NO: 406022 - DNA, 1000 bp, Homo Sapiens; identical to SEQ ID NO: 293873

SEQ ID NO: 406023 - DNA, 1000 bp, Homo Sapiens; identical to SEQ ID NO: 293874

SEQ ID NO: 406024 - DNA, 1000 bp, Homo Sapiens; identical to SEQ ID NO: 224593

SEQ ID NO: 406025 - DNA, 1000 bp, Homo Sapiens
gggccttctccgtcccctcatcctcctaaggagcctcccctgccaccgtgccagaatgtgccggaggaacagaggcccgagcctcccgtggccccagcgaggcttcctctggggaagacagtgagcccaacgccctggctctcgaggggtggacggagtccagctggcatcaaccgggtgcccctcttcaccggtgtccacagtccttgagagcaaagggttcccagaggcgacctccctcctgcacaggcatttgtcatccttaccctctaggacagctttgccatgtgcagtgaacccctggacagtgttgcgtgccactttgccggatttggactgtatacagaccgaagcatgtggcatgaagccttctgctgtcagcaagttccttgtccctcgacagtatgtgcccaggctgcccttcaaggtggcagtgatggcagttgtctcttgcacgctgcgtacagttctgtcactgactcttacacacagccctggagacgggagagtgccgggagcattctatgcaagtgtcctggcctttgcgggcgtctccacagcacaaacacgagtcagggaccacccctcttctgcttccatgattccaccaactgggtggggcagagcagtgccagggccggaggcacgccccaggtgagggcaggtggccatgccagtgagtgcactgcgttctcagttaattcatccgaaatatttctaagtttcttgattattgcagttgcatccccaagataatgccgccctcaccaagtagaaggcacatgtgctctgatggcccctcccacactggggtcagggcacagcaacttagcgaggcgacgtgggggctcagaggacctcggaccaggctcggcacatggggcttctccagccagccagggggaagcaccctgcagactgctaacttttgcaaaatagagtaaaaaagatcagctagaaaaataaaacaaaaaaggaaagatatacaaaatacaaggcc

SEQ ID NO: 406026 - DNA, 1000 bp, Homo Sapiens; identical to SEQ ID NO: 220451

SEQ ID NO: 406027 - DNA, 1000 bp, Homo Sapiens; identical to SEQ ID NO: 224594

SEQ ID NO: 406028 - DNA, 1000 bp, Homo Sapiens; identical to SEQ ID NO: 293877

SEQ ID NO: 406029 - DNA, 1000 bp, Homo Sapiens; identical to SEQ ID NO: 224595

SEQ ID NO: 406030 - DNA, 1000 bp, Homo Sapiens; identical to SEQ ID NO: 293880

SEQ ID NO: 406031 - DNA, 1000 bp, Homo Sapiens; identical to SEQ ID NO: 224596

SEQ ID NO: 406032 - DNA, 1000 bp, Homo Sapiens; identical to SEQ ID NO: 293882

SEQ ID NO: 406033 - DNA, 1000 bp, Homo Sapiens; identical to SEQ ID NO: 293883

SEQ ID NO: 406034 - DNA, 1000 bp, Homo Sapiens; identical to SEQ ID NO: 118969

SEQ ID NO: 406035 - DNA, 1000 bp, Homo Sapiens; identical to SEQ ID NO: 287616

SEQ ID NO: 406036 - DNA, 1000 bp, Homo Sapiens; identical to SEQ ID NO: 221343

SEQ ID NO: 406037 - DNA, 1000 bp, Homo Sapiens; identical to SEQ ID NO: 224598

SEQ ID NO: 406038 - DNA, 1000 bp, Homo Sapiens; identical to SEQ ID NO: 293889

SEQ ID NO: 406039 - DNA, 1000 bp, Homo Sapiens; identical to SEQ ID NO: 293890

SEQ ID NO: 406040 - DNA, 1000 bp, Homo Sapiens; identical to SEQ ID NO: 118971

SEQ ID NO: 406041 - DNA, 1000 bp, Homo Sapiens; identical to SEQ ID NO: 118972

SEQ ID NO: 406042 - DNA, 1000 bp, Homo Sapiens; identical to SEQ ID NO: 293894

SEQ ID NO: 406043 - DNA, 1000 bp, Homo Sapiens; identical to SEQ ID NO: 224599

SEQ ID NO: 406044 - DNA, 1000 bp, Homo Sapiens; identical to SEQ ID NO: 221587

SEQ ID NO: 406045 - DNA, 1000 bp, Homo Sapiens; identical to SEQ ID NO: 293896

SEQ ID NO: 406046 - DNA, 1000 bp, Homo Sapiens; identical to SEQ ID NO: 293897

SEQ ID NO: 406047 - DNA, 1000 bp, Homo Sapiens; identical to SEQ ID NO: 293898

SEQ ID NO: 406048 - DNA, 1000 bp, Homo Sapiens; identical to SEQ ID NO: 224600

SEQ ID NO: 406049 - DNA, 1000 bp, Homo Sapiens; identical to SEQ ID NO: 293901

SEQ ID NO: 406050 - DNA, 452 bp, Homo Sapiens; identical to SEQ ID NO: 293902

SEQ ID NO: 406051 - DNA, 1000 bp, Homo Sapiens; identical to SEQ ID NO: 118973

SEQ ID NO: 406052 - DNA, 1000 bp, Homo Sapiens
aaggacaggacaatggcggccttagggtccccggcgcacacttttcgaggacttctgcgggagttgcgctacctgagcgcggccaccggccgaccctatcgcgacaccgcggcctatcggtaccttgtgaaggctttccgtgcacatcgggtcaccagtgaaaagttgtgcagagcccaacatgagcttcatttccaagctgccacctatctctgcctcctgcgtagcatccggaaacatgtggccctacatcaggaatttcatggcaagggtgagcgctcggtggaggagtctgctggcttggtgggtctcaagttgccccatcagcctggagggaagggctgggagccatgaacatggagaatatccttggatgctgcattcataggagaattgaataatttctatcaatatgtatttatcattaaattttttttaagtttaaggtttttctctgtaattttgtttactagttcttaggggaattaactggacatttcatctttactctcagtgaatttactgaactttttgcactagactgatgttgtttttctacttaaaaaaatttttttatattttattttaaaagtagtacaagccttagccaggcacggtggctcacgcctgtaatcccagcactttgggaggccaaggcaggcggatcacctgaggtcgggagttcgcgaccagcctgaccaacatggaaaaaccccgtctctactaaaaatacaaaattagccaggcgtggtggcacatgcctgtagtcccagctactcaggaggctgggacaggagaatcgcttgaacccgggaggtggaggttgcggtgagctgagatcgcgccatggcactcactccagcctgggcaacaagagcaaaactctgtctcaaaaaaaaaaaaaaaaattagtataagccttttgtttaaggaattcaaatgttataaacataaaataaaagaaaccctccaaaaaaaaaaaaaaaaaaaaaaaaaaaaa

SEQ ID NO: 406053 - DNA, 1000 bp, Homo Sapiens; identical to SEQ ID NO: 293905

SEQ ID NO: 406054 - DNA, 1000 bp, Homo Sapiens; identical to SEQ ID NO: 293905

SEQ ID NO: 406055 - DNA, 1000 bp, Homo Sapiens; identical to SEQ ID NO: 118974

SEQ ID NO: 406056 - DNA, 1000 bp, Homo Sapiens; identical to SEQ ID NO: 293907

SEQ ID NO: 406057 - DNA, 1000 bp, Homo Sapiens
tgacagttgttttgagtttcgtaccaccttattgtccccttatacagataaggaaactggggtgcagaaaggtgaattaactttacaaagtagacatgacaagtgaacagcagagctgggatctaaacagcaataactaacattaacagagaatttaaaatgttcttagtgctgtgttataagctttggtggatgtcactcctttaatcctcacaacaccctgtcgggtagtcatattttgcaagtatggaagctgaggcagggcaacatgaagtaacttacataactcatacagtaatttgtgcagttgggagatgttcagccttagtccctggctaattgcctgttcttttccagcctgattttttttcccacaggaagagcccacatgtagccctgaggtttccttcccaggacagctgcagggtagagatcattttaagtgcttgtggagttgacatccctattgactctttcccagctgatatcagagacttagacccagcactccttggattagctctgcagagtgtcttggttgagagaataacctcatagtaccaacatgacatgtgacttggaaagagactagaggccacacttgataaatcatggggcacagatatgttcccacccaacaaatgtgataagtgattgtgcagccagagccagccttccttcaatcaaggtttccaggcagagcaaataccctagagattctctgtgatataggaaatttggatcaaggaagctaaaagaattacagggatgtttttaatcccactatggactcagtctcctggaaataggtctgtccactcctggtcattggtggatgttaaacccatattcctttcaactgctgcctgctagggaaaactgctcctcattatcatcactattattgctcaccactgtatcccctctacttggcaagtggttgtcaagttctagttgttcaataaatgtgttaataatgcttaaaaaaaaaaaaaaaaaa

SEQ ID NO: 406058 - DNA, 1000 bp, Homo Sapiens; identical to SEQ ID NO: 118975

SEQ ID NO: 406059 - DNA, 1000 bp, Homo Sapiens; identical to SEQ ID NO: 293909

SEQ ID NO: 406060 - DNA, 1000 bp, Homo Sapiens; identical to SEQ ID NO: 396849

SEQ ID NO: 406061 - DNA, 1000 bp, Homo Sapiens; identical to SEQ ID NO: 293910

SEQ ID NO: 406062 - DNA, 1000 bp, Homo Sapiens; identical to SEQ ID NO: 118977

SEQ ID NO: 406063 - DNA, 1000 bp, Homo Sapiens; identical to SEQ ID NO: 118979

SEQ ID NO: 406064 - DNA, 1000 bp, Homo Sapiens; identical to SEQ ID NO: 118980

SEQ ID NO: 406065 - DNA, 1000 bp, Homo Sapiens; identical to SEQ ID NO: 118981

SEQ ID NO: 406066 - DNA, 1000 bp, Homo Sapiens; identical to SEQ ID NO: 224603

SEQ ID NO: 406067 - DNA, 1000 bp, Homo Sapiens; identical to SEQ ID NO: 224604

SEQ ID NO: 406068 - DNA, 1000 bp, Homo Sapiens
ctgtggctcccccgctcggcccaggccttgaagccgcggcgaacctcttcctaccctacctcggggacctggtggcagcggcggcctcccccagcctggaccccgccggccgcgggtctcccggcccaaccccaccgacccagaccaagaccgcgccgagccgccgggactcagcgccttcgggtggcggcggtaagcggggaggaaacatggcgccgcccaaatgcgcccggaggccgttaggctgtggagggcgaggaaggcggtccagaggcgcgggctcggctgcccgtttaggccacggagccggcaggtccacgtcctgggcgaccgctctgtcgcagttgggcgagacctacctagtcctgacgggtcgtatttccaagacattttcatattctatccattgttttgtgtgcattttattacttctgtatatagaggtgacaacgctaagcttttttgagatgtctgtttcttctagatgttctgaagtacctgatacatgttaaaattagaggtagtaaaatgacacattttgtaaataactttttgttaaaattcataggaaatgttattttgtggggggggggggatggcatggtgtttgtggactggttcagggaaggaggggaaaagggaggtgcagagagctctaagccagtgtgcttacagtgaggcgagattcaccattgtttcttatgattgtgcattttgttttacttatctatgtatacagtgtatctaaaggacaaacgagtcctaatttacaacagctagtctttccagatgttaaagaacttctatcaatagagtaacctatcactagagttcacctctatcaatagagtaacctcattctctgcctgatgattcaaaggcatgggaagaccaaaaccatgtggcagttcctgtttttgattttattatatatatgtatataatatgaaagtagtcattaaagtagtctttcctttcgtaaaaaaaaaaaaaaaaaaaa

SEQ ID NO: 406069 - DNA, 1000 bp, Homo Sapiens; identical to SEQ ID NO: 293919

SEQ ID NO: 406070 - DNA, 1000 bp, Homo Sapiens
cgctcaacaaacagatagactgggagaggcacgtcgtcaaggcgcctgaggagcctccaaaggaattcaaaatatggaagtcaaattatgtaccacctcctgagacctacaccactgagaagaagcctccgcctccagagcttgacatggcaataaaatggtctaacatatatgaggacaatggtgatgatgctccacagaatgctaagaaagctaggcttctaccagaaggggaggagacgttggaatcagatgatgaaaaagatgagcatacttctaaaaagcgcaaagtagagccaggagaaccagcaaagaagaaaaagtagaaacaaatgaccagaatttctgtactgctaaacttgttgaaatgtttctttggacagattaagttgatattgtgggttattatgccacatctccatgaaaatgcatacgttaatgaactaataagtattgcctcaagaactttccactatagaattctttttttatttaaaacatgtatgtatttaaaactcaactggtgacttgtgattgtgaaattgataacacttggatgcattcttgctctcacagaattggtgacatgctttgagagttttgtcacatgttgacatgccaatgttcttataaaccttttataaaggaatatatttttaaagtaaatatattgtaatgtactgtgaacttgtagggtgcttttcaacagtctttgtacagtgtaaatagatcatggaaataaaattacttattcaatattactattactgtataacattaacatttgaatgtttgtctgtgacaagtaccctatttgtcgtgtgacattttaagttgtaataagaagtattaccatttaaagagtgcctcctgtgttccaggtgctttgtgcatatattttctctgatccttaaacaacctagcgcaaggtattattagtattctcattttataataaagagtgcttgagtagcttgtctgaaagaaaaaaaaaaaaaaa

SEQ ID NO: 406071 - DNA, 794 bp, Homo Sapiens
gctctctccggtccccagtgcatgggctggagtgtggcccctggcagagccctggaggccggctctgcttcctgcccccttccagcctggagcagcccgagggcgcagcattcctggggcaggcctgagccctgtggtgggctgagttgagtccccagaaaggatctatgaaagataaaatgtggtgtgaggacacggcccagccccaccgtcgtcttccagccccaccatcgtcttccagccccaccgtcgtcttccagccccaccgtcgtcttctagccccaccatcgtcgtcttggactctctgggtggcaccacgctgtgggtgctgctctcctctgtgtcccaaacgagtttgtgcctcactttgtcgggttttggctgtgacttggagcctcaccaagctcccttttcctctgtctcccattctcctctccaggccagggtggcttccccagccctcctccccgggtcctgcctgtgccgagccttcctcccaggagggaggtgatactgacttgagatcttatgggtgttttgtttgtggctgggcctggccgaccctctctccacggccttagatcacactctggatggataggacagtcgtcctcaatactgagcctctttggagcatacccactgatggtggttcacaagctacccacgcccacaggctgacccagatctccgtgaaattaaaaaatactgtgaaaggaaaaagagccaatgtcatgtggataatgaagtgtcagccactgaaaaatctcaaaataacaaaaaaaaaaaaaaaa

SEQ ID NO: 406072 - DNA, 1000 bp, Homo Sapiens
aaactcaacctttgataagcaaagaaaatcgtgtattagggcaggctaggccacaggatacgtagactccaaaatgtacacaggctcaaataccatagaaatttttgttcgagagccaaaggtgaatgttcctgattcatggatgcatctcaatatagggacataggctccatctattttgtggctctgccaccctctacagccttcatgccccatgcattagggaatagaaagggaaagaaggtgtggagaagacacaggtgcttccctgcaatctgaaagtgatgctcatcacttccactcacatctcattggcaaaagctggtcattttgccacacttaaccataagggactctggaagctgtaggttagctctgcccaggagaaaggagaaccagaccttggtaaagaattgtctcttgcataggaagtgtcaccttcaggatacaaatacatgagcagaggcagagttaggcaaaattcccccaatgctggttgtaatgccacttctgtctcatccactaaagaaagcttgttggaatgcagtctacaaaagcgctataagggctaaaggattatagtaatagcttgaaggcccttctgattgatgttttaaaaaatcattttcaagcttcagtattttgatagtgcctaaaggccatagagtatagtggataatcactgggactagagccagacagcctgggctgagatgctggatctgctgcttcctgcctaccttttgcaagtcttaacttacctgtgcttcagtttcctcacctataaaattgtgataataataatggcagccttgatttcataggtttgtccccagtgttagcttaatatctggcatgtggtaggtgttcaataaacatgcatcatgtctgtgcccaaaaaaaaaaaaaaaaaaaaaaaaaaaaaaaaaaaaaaaaaaaaaaaaaaaaaaaaaaaaaaaaaaaaaaaaaaaaaaaaaaaaaaaaaaaaaaaaaaaaaaaa

SEQ ID NO: 406073 - DNA, 1000 bp, Homo Sapiens; identical to SEQ ID NO: 224605

SEQ ID NO: 406074 - DNA, 1000 bp, Homo Sapiens; identical to SEQ ID NO: 118982

SEQ ID NO: 406075 - DNA, 1000 bp, Homo Sapiens; identical to SEQ ID NO: 221329

SEQ ID NO: 406076 - DNA, 1000 bp, Homo Sapiens; identical to SEQ ID NO: 293923

SEQ ID NO: 406077 - DNA, 1000 bp, Homo Sapiens; identical to SEQ ID NO: 293924

SEQ ID NO: 406078 - DNA, 1000 bp, Homo Sapiens; identical to SEQ ID NO: 293925

SEQ ID NO: 406079 - DNA, 1000 bp, Homo Sapiens; identical to SEQ ID NO: 118983

SEQ ID NO: 406080 - DNA, 1000 bp, Homo Sapiens; identical to SEQ ID NO: 118984

SEQ ID NO: 406081 - DNA, 1000 bp, Homo Sapiens; identical to SEQ ID NO: 293928

SEQ ID NO: 406082 - DNA, 1000 bp, Homo Sapiens; identical to SEQ ID NO: 118985

SEQ ID NO: 406083 - DNA, 1000 bp, Homo Sapiens; identical to SEQ ID NO: 293930

SEQ ID NO: 406084 - DNA, 1000 bp, Homo Sapiens; identical to SEQ ID NO: 118986

SEQ ID NO: 406085 - DNA, 1000 bp, Homo Sapiens; identical to SEQ ID NO: 118987

SEQ ID NO: 406086 - DNA, 1000 bp, Homo Sapiens; identical to SEQ ID NO: 293932

SEQ ID NO: 406087 - DNA, 1000 bp, Homo Sapiens; identical to SEQ ID NO: 293933

SEQ ID NO: 406088 - DNA, 1000 bp, Homo Sapiens
ccccagacttctcggcctttgccttagatgaggtgtccatgaacaaagtcacagagaagactcacagagtcctgagggtcatggaaatcaaagaggctgtctcctcactcccttcatattggagttggcttcgaaagaccaagctccctgagtacaccagggaagctctctgtccccccgcctgcccgttgcctctgctgtctcctgcagggggcagcaccacgctgtacaactgctccacctgcaaggggacggaggtgtcctgctggccccgaaagcgctgcttcccaggaagtcaggatctttgggaagccaagattctgctcctctccatcttcggagctttcctgcttctgggtgttctgagcctcctggtggagtcccaccacctccaagcaaaaagtggcttgtgaagacgctgaaaacctcccagcctccagctctaaggggtatgcactcacaacttccacatcccttggaggggaaccagtcagccccttagtcccagctccaaagacagtctccagaccctaaaacccagacatccctgcttctggttggtgagataatgaaaaacaagaaaatccccaaaaacccagatcccccacaatcccagtgtcagatggcctcccgggaacccaggcacccacagctggaaagttcctcccctccagccctcaaccaatcacatggctgtcaacaatgccaggaaaatatctacagaaggaaagaatcccctacgccactcccaccacacccacacccccttctgcctgttccgggaaagcgggggcatctgccccagaagctattccaggccctcctatgactgatggggaatccgggaatgcatgttctggaaaactcaccccactagagtgagatcacatcagtgggttcgcgggcatgccctccctccatcgtgttaacagtttgaaatcctggcctccctcagaggcctccatcctgccaggcctaagtaaaacttgctgttcatggc

SEQ ID NO: 406089 - DNA, 1000 bp, Homo Sapiens; identical to SEQ ID NO: 118988

SEQ ID NO: 406090 - DNA, 1000 bp, Homo Sapiens; identical to SEQ ID NO: 293936

SEQ ID NO: 406091 - DNA, 1000 bp, Homo Sapiens; identical to SEQ ID NO: 224611

SEQ ID NO: 406092 - DNA, 1000 bp, Homo Sapiens; identical to SEQ ID NO: 293937

SEQ ID NO: 406093 - DNA, 1000 bp, Homo Sapiens; identical to SEQ ID NO: 293938

SEQ ID NO: 406094 - DNA, 1000 bp, Homo Sapiens; identical to SEQ ID NO: 118989

SEQ ID NO: 406095 - DNA, 1000 bp, Homo Sapiens; identical to SEQ ID NO: 287464

SEQ ID NO: 406096 - DNA, 1000 bp, Homo Sapiens; identical to SEQ ID NO: 221750

SEQ ID NO: 406097 - DNA, 1000 bp, Homo Sapiens; identical to SEQ ID NO: 118990

SEQ ID NO: 406098 - DNA, 660 bp, Homo Sapiens
ggtttgcacgccggaccggagagcgcggaggcagccatggtgcggttcaagcacaggtacctgctctgcgaactggtgtctgacgacccccgctgccgcctaagcctcgatgaccgagttctgagcagcctcgtacgggacacgatcgccagggtgcacggaactttcggcgcagccgcctgctccatcggcttcgcgggtacaataagaacatgtcagaagttcctaattcagtacaacaggagacagctgttgatcttgttgcagaactgcactgatgaaggagagcgggaagctatccagaagtctgtgacaagaagctgcttattagaggaggaggaggagtcaggtgaggaggctgcagaagcaatggagtgaacctctgctccccacacagctggctacactgctcaggcttcaggcccacttgttgaacagaacaatctgggtagcaacagcatcttccacagttttccaaactggatagctgccaaccagcagacattacccacttgaaatggagtactcagttaaactgaagttgcctttacctagcattccctggtgaagtgttgcaggttgtgaactctgtagacatctttattgcttggctaagagtagatttaataaatgtatctggtttccgtggcaaaaaaaaaa

SEQ ID NO: 406099 - DNA, 1000 bp, Homo Sapiens; identical to SEQ ID NO: 118991

SEQ ID NO: 406100 - DNA, 1000 bp, Homo Sapiens; identical to SEQ ID NO: 224612

SEQ ID NO: 406101 - DNA, 1000 bp, Homo Sapiens; identical to SEQ ID NO: 224613

SEQ ID NO: 406102 - DNA, 1000 bp, Homo Sapiens; identical to SEQ ID NO: 293945

SEQ ID NO: 406103 - DNA, 1000 bp, Homo Sapiens; identical to SEQ ID NO: 293947

SEQ ID NO: 406104 - DNA, 1000 bp, Homo Sapiens; identical to SEQ ID NO: 224616

SEQ ID NO: 406105 - DNA, 1000 bp, Homo Sapiens; identical to SEQ ID NO: 224616

SEQ ID NO: 406106 - DNA, 1000 bp, Homo Sapiens; identical to SEQ ID NO: 118994

SEQ ID NO: 406107 - DNA, 1000 bp, Homo Sapiens; identical to SEQ ID NO: 293951

SEQ ID NO: 406108 - DNA, 1000 bp, Homo Sapiens; identical to SEQ ID NO: 118995

SEQ ID NO: 406109 - DNA, 1000 bp, Homo Sapiens; identical to SEQ ID NO: 118996

SEQ ID NO: 406110 - DNA, 1000 bp, Homo Sapiens; identical to SEQ ID NO: 118997

SEQ ID NO: 406111 - DNA, 1000 bp, Homo Sapiens; identical to SEQ ID NO: 287412

SEQ ID NO: 406112 - DNA, 1000 bp, Homo Sapiens; identical to SEQ ID NO: 293954

SEQ ID NO: 406113 - DNA, 1000 bp, Homo Sapiens
tggatcaactagaacaaagagtcagtgaattctttatgaatgcaaagaaaaataaacctgagtggagggaagagcaaatggcatccatcaaaaaagactactataaagctttggaagatgcagatgagaaggttcagttggcaaaccagatatatgacttgcagcacttctaaaagattgaaaacaccaagaagatagatagaatattcactatttctcatattgatgcaattgtggtgctctttttcatttgaaacatcttctcctaaaatatacactttaagaaatagtcatttctgtttttgcattaaagtaaattaaagcagaaaacacatgctcacttttggctaacttcagtgtatagatttcatacttatgttgtctttcctgggtacagatttattactgaacaagtacgtgtaagtaaaatgtcattggtgagcaggacacaagataaaaggtgaacaccacatatggtgtgaattgtaaatgcttataccacaaacttgaaaatgtgtcatgtagagccatggaaaatgtctagttgtttttatgtagtacacacattttaatggtgctaacaacctgggctcttttgttcatagagttattctgaaaaaaatttcataaaagacactgcctaaagataggtagaataggctgtagcttgatttactgtggaataaaaaccaaaaaaaaaaaggtcttaattgtttcagtctttaattatgtctataaacttagaaaaaggcatttacatttgaatctagactaatttgtttagtaacattcttcctcatattcaatgactgtatgtatcagtccttatttagagactgcctgctttttaattcatatagctctttggttctattctttgttttgtttattattttgttgttttattgcttgttagacctttactaaagatattttgtgtatttagaaaaaatataacataaatatatgctttttaaatatgaaaaaaaaaaaaaaaaaa

SEQ ID NO: 406114 - DNA, 1000 bp, Homo Sapiens; identical to SEQ ID NO: 293955

SEQ ID NO: 406115 - DNA, 1000 bp, Homo Sapiens; identical to SEQ ID NO: 293955

SEQ ID NO: 406116 - DNA, 1000 bp, Homo Sapiens; identical to SEQ ID NO: 224619

SEQ ID NO: 406117 - DNA, 1000 bp, Homo Sapiens; identical to SEQ ID NO: 293957

SEQ ID NO: 406118 - DNA, 1000 bp, Homo Sapiens; identical to SEQ ID NO: 224620

SEQ ID NO: 406119 - DNA, 983 bp, Homo Sapiens; identical to SEQ ID NO: 224621

SEQ ID NO: 406120 - DNA, 1000 bp, Homo Sapiens; identical to SEQ ID NO: 293960

SEQ ID NO: 406121 - DNA, 1000 bp, Homo Sapiens; identical to SEQ ID NO: 293961

SEQ ID NO: 406122 - DNA, 1000 bp, Homo Sapiens; identical to SEQ ID NO: 224622

SEQ ID NO: 406123 - DNA, 1000 bp, Homo Sapiens; identical to SEQ ID NO: 118998

SEQ ID NO: 406124 - DNA, 1000 bp, Homo Sapiens
tgagcaattttcaggtccattctgtgaggtgtcagcaaaaccttgtgtttctctgcttttttggaaaagaggaatttgcccaaatagcagttctgcttatacttatgaatgcccaaaaggatcttccagccaaaatggtgaaactgatgtcagtgagttttcattagtaccatgtcagaatggtactgactgcatcaaaatatcaaatgatgttatgtgcatctgttcaccaatatttacagatttgctttgtaagagcattcaaacatcatgtgagtcatttcctttgaggaataatgctacatgtaagaaatgtgagaaagattatccttgcagctgtatatcaggatttactgaaaaaaactgtgagaaagcaattgaccactgtaaactgctcagcatcaactgtctgaatgaagaatggtgtttcaatataattggaagattcaaatatgtatgcattccagggtgcacaaaaaatccatgttggtttttgaagaatgtttacctaattcatcaacacctctgctactgtggagtcaccttccatggtatttgccaagataaaggtcctgctcaatttgaatatgtgtggcaattgggatttgcaggatctgaaggcgaaaagtgccaaggggttattgatgcctatttctttctggctgcaaactgcactgaagatgcaacctatgtgaacgatcctgaagataataattcttcatgttggttcccacatgaaggcacaaaagagatttgtgcaaatggatgcagttgtttgagtgaagaagacagtcaggaatatcggtatctatgttttctcagatgggctggcaacatgtatctggaaaatacaactgatgatcaagaaaatgagtgtcaacatgaagctgtttgtaaagatgaaattaatagacccaggtatttatgtatcatttgagcagataatatcacatatcaaaaagttataattaaattgatagtcatcaaaaaaaaaaaaaaa

SEQ ID NO: 406125 - DNA, 1000 bp, Homo Sapiens; identical to SEQ ID NO: 118999

SEQ ID NO: 406126 - DNA, 1000 bp, Homo Sapiens
agcgcgggctctggtctccgaggggaggccccaaccgtccggcggagccctccaggcccctgacatttatgggatcacagactaagcgagtcctgttcaccccgctcatgcatccagctcgccctttccgggtctccaaccatgacaggagcagccggcgtggggtgatggcaagcagcctgcaggagctcatcagcaagactctggatgccctcgtcatcgctaccggactggtcactctggtgctggaggaagatggcaccgtggtggacacagaagagttctttcagaccttgggagacaacacgcatttcatgatcttggaaaaaggacagaagtggatgccgggcagccagcacgtccccacttgctcgccgccgaagaggtcgggaatagcgagagtcaccttcgacttgtacaggctgaaccccaaggacttcatcggctgccttaacgtgaaggccaccatgtatgagatgtactccgtgtcctacgacatccggtgcacgggactcaagggcctgctgaggagtctgctgcggttcctgtcctactccgcccaggtgacgggacagtttctcatctatctgggcacatacatgctccgggtgctggatgacaaggaagagcggccatccctccggtcacaagccaagggcaggttcacgtgtggatagggatgcaggctgtcgccggctcttgagccaaacactgtgtttcgtttggctcaatgacgaatgttgaagatgcttttatgttctgagccacatgcacttggaggccgctggtcacgctgctcaggagtggtgcccagaaaaggaaagggcttggtggtacatgaagtgggggcagtgggcagggtgccctgggggggaggcatagagggccctgggggtcatgggaagcgagcacgcagcaggcgtgcccaggagcgtgtgcatgtgtcagagccatttggtccatcatctcctgcaataaacccatcgcaagaatgaccttc

SEQ ID NO: 406127 - DNA, 1000 bp, Homo Sapiens; identical to SEQ ID NO: 293965

SEQ ID NO: 406128 - DNA, 1000 bp, Homo Sapiens; identical to SEQ ID NO: 224626

SEQ ID NO: 406129 - DNA, 1000 bp, Homo Sapiens; identical to SEQ ID NO: 293967

SEQ ID NO: 406130 - DNA, 1000 bp, Homo Sapiens; identical to SEQ ID NO: 119000

SEQ ID NO: 406131 - DNA, 1000 bp, Homo Sapiens; identical to SEQ ID NO: 293969

SEQ ID NO: 406132 - DNA, 1000 bp, Homo Sapiens; identical to SEQ ID NO: 119001

SEQ ID NO: 406133 - DNA, 1000 bp, Homo Sapiens; identical to SEQ ID NO: 286248

SEQ ID NO: 406134 - DNA, 1000 bp, Homo Sapiens; identical to SEQ ID NO: 118070

SEQ ID NO: 406135 - DNA, 1000 bp, Homo Sapiens; identical to SEQ ID NO: 293973

SEQ ID NO: 406136 - DNA, 951 bp, Homo Sapiens
tctcctcctaccggtcgggtgccccggggcgttccctctgccgctgcttctcggcgcggttcctacccggccgctccccgaggcgcgggctctggcggcctcgaccgactaggacgccccgtgcgccgcccgcgggccgccgcctccctgggcgcgcggggccagcatggagctcttccaagccaaggaccactacatcctgcagcagggcgagcgcgcgctgtggtgcagccgccgcgacggcggcctccagctccgacccgctactgatctacttcttgcctggaatcccatttgtttggggttggtagaaggtgttattgggaaaattcaacttcattcagatcttccatggtggcttattctaattcggcagaaagcattggtgggcaaactcccaggagaccatgaggtctgtaaagttaccaaaattgctgtgctctcactttctgaaatggaacctcaggatcttgagctagagctctgtaagaagcatcattttggtattaacaaaccagagaagatcataccatctcctgatgactcaaagtttctactgaagacctttacgcatattaaatccaatgtgtctgctcctaataaaaagaaagttaaggaaagtaaagagaaggagaagttggagaggagattacttgaagagttgctgaagatgttcatggactcagaatccttttattatagcttgacctatgacctgaccaattccgtgcagaggcagagcactggggagagggacggtcggcccctctggcagaaggtaccactcacagctcgtagagcagggtttgcacttgggaagaagtgatggcctgttttggcttttgtaggaaaactgaaataatgtgtttctgaactattgttcctgcaccttttctaggttgatgaccgatttttttggaataaatacatgatacaagatcttactgagaa

SEQ ID NO: 406137 - DNA, 1000 bp, Homo Sapiens; identical to SEQ ID NO: 293974

SEQ ID NO: 406138 - DNA, 1000 bp, Homo Sapiens
cttccgaccacctcagaaaatagtatcacctaaacaagaacatgaagataggaaacatgacaaagtcactgataaaggaagtgaaagtgggacttcctgtaatgagctctccacttccagttgtgacagccattcagaggcaagcactccccaggacaacccatccagtgcccagcaggcaacagctcaccaacctaacactttaacattggatcgcccctctaaaaaagcacctgtacaatggatacccccaccagacaaacgcagaaacagtgaactctttcagaccctcatcagcaagtcccgggaaacaaatctgtccaaaaagaaagtctgtgagaagctaagtgtggaagaagaaatgaaaaagtgtattcaggattttaaaaaaatccacattccagattattttccagagcgcaaacgccaatggcaatctgaactgttgcagaagtatgggttatagtaattgtcacattcctgcagtattttgatgacattcaatgtttactacagtgtcaccacctgactgatgtcctaacaatggtcagtgtgattcttgctgctcttccttgttgtgaacagtggatgtgggacagtattttcttttatgttttagttgttgttctttttagaaacatgattaaaaaggaaaaaatattaaatcaataagtgttaaatcaaaatggaatatctgattcaaaccattttacaagaatgaaagtaaaatgtgcatgatcaagcttagtatcttggtttttgaactctggtcaactggatatgtttgtcattttgtaacttaccaaaaacaaaccatcatatcataccaactaaaatgatatatggatgaagcaacatcaagtaaaattttagacgatggctataggacccaaatctaaagctgtctaaatgttaattcaatgaaacaagtattatttttgcatgaatacaatgttacaaataaatcacaagaaatagggaagatctgtttgttgcttgg

SEQ ID NO: 406139 - DNA, 1000 bp, Homo Sapiens; identical to SEQ ID NO: 224629

SEQ ID NO: 406140 - DNA, 1000 bp, Homo Sapiens
ctgctggcagaggtgagtgggccctccccgcccctggcccgggcctactctttctggggccagtcaagtacccaggcacagcagcactcccgcagccacagcaagatctccaagcacatgaccccgccagccccttgcccaggcccagaacccaactggggcaagggccctccagagaccagaagcagcttagagttggacacggagctgagctggatttcaggagacctcctgccccctggcggccaggaggagcccccatccccacgggacctgaagaagtgctacagcgtggaggcccagagctgccagcgccggcctacgtcctggctggatgagcagaggagacactctatcgccgtcagctgcctggacagcggctcccaaccccacctgggcacagacccctctaaccttgggggccagcctcttggggggcctgggagccggcccaagaaaaaactcagcccgcctagtatcaccatagacccccccgagagccaaggtcctcggaccccgcccagccctggtatctgcctccggaggagggctccgtccagcgactccaaggatcccttggcctctggcccccctgacagcatggctgcctcgccctccccaaagaaagatgtgctgagtctctccggtttatcctctgacccagcagacctggacccctgagtcctgccccactttcccactcacctttctccactgggtgccaagtcctagctcctcctcctgggctatattcctgacaaaagttccatatagacaccaaggaggcggaggcgctcctccctgcctcagtggctctgggtacctgcaagcagaacttccaaagagagttaaaagcagcagccccggcaactctggctccaggcagaaggagaggcccggtgcagctgaggttcccgacaccagaagctgttgggagaaagcaatacgtttgtgcagaatctctatgtatattctattttattaaattaattgaatctag

SEQ ID NO: 406141 - DNA, 1000 bp, Homo Sapiens
ccgcccctggcccgggcctactctttctggggccagtcaagtacccaggcacagcagcactcccgcagccacagcaagatctccaagcacatgaccccgccagccccttgcccaggcccagaacccaactggggcaagggccctccagagaccagaagcagcttagagttggacacggagctgagctggatttcaggagacctcctgccccctggcggccaggaggagcccccatccccacgggacctgaagaagtgctacagcgtggaggcccagagctgccagcgccggcctacgtcctggctggatgagcagaggagacactctatcgccgtcagctgcctggacagcggctcccaaccccacctgggcacagacccctctaaccttgggggccagcctcttggggggcctgggagccggcccaagaaaaaactcagcccgcctagtatcaccatagacccccccgagagccaaggtcctcggaccccgcccagccctggtatctgcctccggaggagggctccgtccagcgactccaaggatcccttggcctctggcccccctgacagcatggctgcctcgccctccccaaagaaagatgtgctgagtctctccggtttatcctctgacccagcagacctggacccctgagtcctgccccactttcccactcacctttctccactgggtgccaagtcctagctcctcctcctgggctatattcctgacaaaagttccatatagacaccaaggaggcggaggcgctcctccctgcctcagtggctctgggtacctgcaagcagaacttccaaagagagttaaaagcagcagccccggcaactctggctccaggcagaaggagaggcccggtgcagctgaggttcccgacaccagaagctgttgggagaaagcaatacgtttgtgcagaatctctatgtatattctattttattaaattaattgaatctagaaaaaaaaaaaaaaaaaaaaaaaaaaa

SEQ ID NO: 406142 - DNA, 1000 bp, Homo Sapiens; identical to SEQ ID NO: 224630

SEQ ID NO: 406143 - DNA, 1000 bp, Homo Sapiens; identical to SEQ ID NO: 224631

SEQ ID NO: 406144 - DNA, 1000 bp, Homo Sapiens; identical to SEQ ID NO: 293978

SEQ ID NO: 406145 - DNA, 1000 bp, Homo Sapiens; identical to SEQ ID NO: 293979

SEQ ID NO: 406146 - DNA, 1000 bp, Homo Sapiens
gcaacgactagataaagatggcatccccgtgagctcagaggctgagcggcatgagcttgggaaagtcgaggtgacggtgtttgaccctgactccctggaccctgatcgctgtgagagctgctatggtgctgaggcagaagatatcaagtgctgtaacacctgtgaagatgtgcgggaggcatatcgccgtagaggctgggccttcaagaacccagatactattgagcagtgccggcgagagggcttcagccagaagatgcaggagcagaagaatgaaggctgccaggtgtatggcttcttggaagtcaataaggtggccggaaacttccactttgcccctgggaagagcttccagcagtcccatgtgcacgtacatgctgtggagatccatgacttgcagagctttggccttgacaacatcaacatgacccactacatccagcacctgtcatttggggaggactatccaggcattgtgaaccccctggaccacaccaatgtcactgcgccccaagcctccatgatgttccagtactttgtgaaggtggtgcccactgtgtacatgaaggtggacggagaggtactgaggacaaatcagttctctgtgaccagacatgagaaggttgccaatgggctgttgggcgaccaaggccttcccggagtcttcgtcctctatgagctctcgcccatgatggtgaagctgacggagaagcacaggtccttcacccacttcctgacaggtgtgtgcgccatcattgggggcatgttcacagtggctggactcatcgattcgctcatctaccactcagcacgagccatccagaagaaaattgatctagggaagacaacgtagtcaccctcggtgcttcctctgtctcctctttctccctggcctgtggttgtcccccagcctctgccaccctccacctcctcggtcagccccagccccaggttgataaatctattgattgattgtgatagtaaaaaaaaaaaaaaaaaa

SEQ ID NO: 406147 - DNA, 1000 bp, Homo Sapiens
attttacttgggctctgagaaatgtgtggctttccttcagcattttatttgtgcttctctttttaatggagattgaaaagggagaataatgtgaatatcacggcttatattattaaatgttgattgatggcttgtaatgtactgcacacaatatatgttaactctgcagaatgacagaccctgggagaagtaatgccccagttgtcccccactcctaatgccaggcagagaaggacagcctttatagacttaatctgctttttgtcccatttgacaaggtaccaggaggaaattttttaagggatcaactgtatcacagtgcccactctggacctaagtctagtgtatccatacaattggtgcagagaaataaggtgtaaatggtgctttgttcctgctggttccaagctcagaaaccaagactagctttgtaggagagaatgagagcctgcaagcctctctttggattggctgaggagtggtgggagcagggggttgatagaaaacatccagacacacatataagcaagtggccgtgctacctttttagagaataaagaaacagacttttgagtttatatgcaatgccttcattaggtaccaccggcacttacaaaatgtgcggactgaatcccagagaacactggcagatgtatacagtatatggattgtatcgcttccccaatgtttgtaaattcacagtatttggaaaactgccttcattttccagtgtgggaaaaactcttgctacctgtattacttgatctcagacccatacctgatggttcagtctgtccttaagttaaaagaattttgcttttctaatgttatactatttacctgtcagtgtattactgcaacttgaatcactcttttactgttgttggatataaacttatcctgtaccaatgtatttattaacacttgtattttattattgagcatatcaataaaaatattaaaaaataacagattgttttttaccaaaaaaaaaaaaaaa

SEQ ID NO: 406148 - DNA, 1000 bp, Homo Sapiens; identical to SEQ ID NO: 224632

SEQ ID NO: 406149 - DNA, 1000 bp, Homo Sapiens; identical to SEQ ID NO: 293982

SEQ ID NO: 406150 - DNA, 1000 bp, Homo Sapiens
caggctggcgaattgtctctggttcagggaaaggggacagcccagcttgaagatgagggatggtgaatggctgtgaccatggcagacatcaccaatcaagtgcagcacatgggtgatgtcagaattcttcccagcacagtgttctgggcagccagtatcaatcaatttggcactcatgatgggacctctttgcccttcctgtctggtgtgctgtgaaatgggataatggccagagtagctgaaaatctccaaatgggcatttgcatgcctatctcctcatctccccctcccttttgggaaactcctggagtaggcagtttgggggcagtagagggaaactgaggcgcacacccatgcagcccctgatgttctgttccaccgtagttgattctcagtagagttgggaatgaggatgctgttacttggccatttcttcccgtctccaaaaatccagagacattacgagagctattcattcataagatggggcaaacagcccccaggcacttgctccctgctccatacttaaggtttgtgatgccaacatttggattctctcttggtgccaatcagtggctgttagaggctactcaggtgtaccccaaacagaaggcacatggatctggggcgactgttccaggtcctcccaacctctgaagtgctcagtagccaaacaacaaggctgctgggggcctgttcttcagcccccgtcagggcggggccagcctctctgtccaatgctgcctggacatttactggggaggtgagtagcaggcccagctccaggatctgaattggaatctcagattctctggataaagaatctgtctcaagtcaggaggtcctcattctgcgactcccaaccagggtggagtgggcacagacaggatgccttatgcttatctctagcacattccagggggttccagggttcctgcacctggaatccagtgtgtccaagccagtattaaattatctcaacacaaaaaaaaaaaaaaaa

SEQ ID NO: 406151 - DNA, 1000 bp, Homo Sapiens; identical to SEQ ID NO: 224633

SEQ ID NO: 406152 - DNA, 1000 bp, Homo Sapiens; identical to SEQ ID NO: 224634

SEQ ID NO: 406153 - DNA, 1000 bp, Homo Sapiens
agcctctcctgtggaggtgcccccagcttccttgaggagctcagtccccccttccaagaggggcaccgtgggtgctggctgtggtttcaaccagcgctggctcccggtccacgtgctccgggagtggcagtgcggacacaccagcgaccaggactcttacacagattccaccgatggctggtccagcatcaactgcggcacactgccccctcctatgagcaagatccccgcagaccgctacagggtggagggcagcttcgcgcagcccccgctgaatgccccgaagagggagtggtccaggaaggcctttggaatgcaaagcatttttggtccccatcgaaatgttcgaaagactaaggaagataaaaagggctcaaaatttgggcggggaactggactcactcagccttctcaacgcacgtctgctcggagatcatttgggagatccaagagattcagtatcactcgctcccttgatgatcttgagtggtccacatgtgccaggagatgtgggaatggctacccctgaagtcatatggagaaatggggtcctcatcgcacaccatacacaaacatcatctcacaaatggattaaagacacttaagacctgaaaccaaaaaaactcctaggagaaaacacaggggaaagctccatgacatcagtttcggcgatgatttttttttggacatgacactaaaagaacaagcaacaaaactaaaagtaaacaggtgggattacattgaagtaaaaagtttctgcacaacaaaggaaacaaccaacaaaatgaaaaacgaacctgtgaatgggagaaaatacttgcaaactgtatatccagtaaggggttaatatccaaatacataaggaactcatacaactcagtggcaaaaaccaaataacccaattgaaaaatggcaaagagccatagtagacatttttccagagaagctctacagatggccaacaggtatatgcagaggtctcagcatcacccatcaccag

SEQ ID NO: 406154 - DNA, 1000 bp, Homo Sapiens; identical to SEQ ID NO: 116040

SEQ ID NO: 406155 - DNA, 1000 bp, Homo Sapiens; identical to SEQ ID NO: 119003

SEQ ID NO: 406156 - DNA, 1000 bp, Homo Sapiens; identical to SEQ ID NO: 293985

SEQ ID NO: 406157 - DNA, 1000 bp, Homo Sapiens
agggcacctacgtgcaaggggtcccagtgttcctcaccgacattgcgtattgaccactatctgccacccacgttgttcccagcctcccttccttccacctggacgttccccccagccccacttctgctccactcctcccccgactggacctgaagcctgagcttcccctgaacttggagtacgcaacttacaacatgcaagctgccaaacaccctttctgtacaaggcgattggaatggaactgtcatgtacagtgaaagtacacgtcacgtttttcagccaagaagaagccaacccagacaacctggaagaagtgggatgcaacaaggatcactaagcatggaaattaggaaactgtattcttaagtccagagaagtacgattctggaaaaaggattgatgacctagaattaaaattccagaagacactcatatagacatgtgggacatgcgaaaactcagaaggagctagaagttactaaagtgcttctctagtgcctggagacgatagactggctgaatataagagcaataaaaatctagactgacacatttttaagtctcaacgtgggtaccctttgggaaccactaaatgaattggaatagaaggtaaaatttcaaacagattgaggaaaaaggggatcaaaggacatgtgacgaatcagacaaaaggtgttggggtggggggggggcggttaacggaagcaaggagagtgcatgactcactggaaccgctaaaccaggaatcagtaatttgacggcagtgtccttggcttcctcctggctttaatgggaatattttgaatgtttcaccattaaccaagatgttggctgtaggtgtctcttagatgtttaagttgagttagttcccatcttttcagagtttgataaatgttgtattatgaacttttgtattttgtattttattaggtaggctgttgttggctggttttcactcctttgtaaacgtccaaataaaatacagataactttttacatc

SEQ ID NO: 406158 - DNA, 1000 bp, Homo Sapiens
tcagcctcttactgcccatctctctggctgcctcatgggattacttatttctaaatgtgattcgtcttatctgtgttgtcaacaccgtgaccagtgcattccaactcttggagagtcacccacagagactgaaactgggaagaattagtgaaaaaggactaggttagccgtcagaggaagaagcccgccctttaagattgcttcctaatgaatctctgggaaaaccctgggacacagagaaacccaaagtcagcaggtctcccttcaggctgggaacataaccaaggaaatgtataaccggagccactgacaggcccaggttgatagaaggtgaaagcagaaaggcaggaagacatgaggtctgcaggaaacccagcaaccctggaaggcggagtcccctttctgggccaccatgctccctaagcagtctttgggttgtgaggaaaccagtggtgacaggtaccaaaagtttagaaaaattggcctccgatgtacatccttgctactcaaagtgcagtggggagctggttggaaatgcggaatctcaggccttagcccagctgtactaaattagaagctgcatttttcaggagattcccatccccaggcgccccccgtgattcctgtgcatattgaagtttgagaggcctggatttacgccactccctcccatgagcttggaacgtatgaatcagtgctcccttgagccactgataaactgagctctggacctgcaaaactggtccccatccaggtaatgctaacctgggacaccagccctcccctccaccagagcaactggctgcctccactttgacatcttttctttctgactgcaacagactctccttccagtatcaaagagtgagccaagcaacagacaggacttgtttatcgtaaggcgaaggcagccatgccttggattcatcaaaagtttgtgaaacgaggtttataaaatcatcatattatttgtgcatggaataaaatggccatgtgggtg

SEQ ID NO: 406159 - DNA, 1000 bp, Homo Sapiens; identical to SEQ ID NO: 119004

SEQ ID NO: 406160 - DNA, 822 bp, Homo Sapiens
aaggagaccggtggggacggggcggggcgcagccttgcgaagccctaacgcagcgctggggaggggggcggccgaaaggggggcggtggtcgggccgcgcaagcggagatggaatggggcccgggctcagactggtcacggggggaggctgccggcgtggaccgcgggaaggcggggctggggctcggcgggaggccacccccacagccgccccgggaggagcgcgcccagcagctgctggacgcggtggagcagcggcagcggcagctcctggacaccatcgcagcctgcgaggagatgttacggcagctgggccgccggcgcccggagccggctggtggcgggaacgtctcagccaaacctggagcgcccccccagccggctgtctccgccagaggcggctttccaaaggatgctggcgatggagctgcggagccctgaccatccccgagcagaataccctgacttctctccctccccagggccggtggctggactctgaacaactcccttcagtaaaggggccagtcttcactggcagtggctggtacttggctctcagcctggagtggcagctctgctagcagctgggttcactcccacttcatcctggctgaaagcagtgctgtgctttgaaatgcagccaatgaatacccagtctgattacccagatttgggcagaccagcagtgctcgccagagtggtctggcctgctatgggggatccaggtggtgttacatgtccatttcatgttttgggggcttttagccccacaaaacaccttcagtagagccttgattaaaaggaaacctgcagactctc

SEQ ID NO: 406161 - DNA, 1000 bp, Homo Sapiens
gtgatcaatggaacatatgctaacgaaacaaagctgaagataacacaacttttggaggaagatggggaatcttactggtgccgtgcactattccaattaggcgagagtgaagaacacattgagcttgtggtgctgagctatttggtgcccctcaaaccatttcttgtaatagtggctgaggtgattcttttagtggccaccattctgctttgtgaaaagtacacacaaaagaaaaagaagcactcagatgaggggaaagaatttgagcagattgaacagctgaaatcagatgatagcaatggtatagaaaataatgtccccaggcatagaaaaaatgagtctctgggccagtgaatacaaaacatcatgtcgagaatcattggaagatatacagagttcgtatttcagctttgtttatccttcctgttaagagcctctgagtttttagttttaaaaggatgaaaagcttatgcaacatgctcagcaggagcttcatcaacgatatatgtcagatctaaaggtatattttcattctgtaattatgttacataaaagcaatgtaaatcagaataaatatgttagaccagaataaaattaattatattctggtcttcaaaggacacacagaacagatatcagcagaatcacttaatacttcatagaacaaaaatcactcaaaacctgtttataaccaaagaattcatgaaaaagaaagcctttgccatttgtcttagaaagttatttttttaaaaaaaatcatacttactattagtatctatggaagtatatgtaacaatttttatgtaaaggtcatctttctgtgatagtgaaaaaatatgtctttactaagttgaaatgaatactttctgcctttgctaatgatagttattctacaatctccacaagaaaaatataccttttatccggaaatattggtttaaggcaaataaataaaactgtgcttgctctaaagctctgcactacaaaaaaaaaaaaaaaa

SEQ ID NO: 406162 - DNA, 1000 bp, Homo Sapiens; identical to SEQ ID NO: 224638

SEQ ID NO: 406163 - DNA, 1000 bp, Homo Sapiens; identical to SEQ ID NO: 293987

SEQ ID NO: 406164 - DNA, 1000 bp, Homo Sapiens; identical to SEQ ID NO: 293988

SEQ ID NO: 406165 - DNA, 1000 bp, Homo Sapiens; identical to SEQ ID NO: 293989

SEQ ID NO: 406166 - DNA, 1000 bp, Homo Sapiens; identical to SEQ ID NO: 293990

SEQ ID NO: 406167 - DNA, 1000 bp, Homo Sapiens; identical to SEQ ID NO: 224639

SEQ ID NO: 406168 - DNA, 1000 bp, Homo Sapiens
ttttaagtcattttggggtaatgccagacagagaacctgagcctcagagtaatcccagcggccctgcctggtcctggtggatcctggccgtgctgcccctggagcgcaaggctcagctggccatcctcggcatgacctcgctcaaagagcggctccttgccatccgacggatattagtcatcatcacgcgtaagatgaatagtcggcaagagctggctaatgccagggagagaaataattgatttttctctctgtcaaggtttctggcagcccttgtgcttttataaatgtcaggcatggacgaatagccgtccattcattgtgcttcatcaagtgcttgtggatgaggttccaaaatgggacgcttgccaaacattgagtcctcctcaaaaatgacaattctgtgtctggtgggatctgaccttgtgtgaggttagcctgaagtctgaatggagcccatagttggaaaacaacctaagaaaatctcttagaagcaggtgcttggggaatgcagttcactgacagcacaggaccctgcagatggtttacatgtggtttgggtttcacgagaaagaaggattcacttcccagtcagtatctggctctgccagatggtaaaggcgtgctttagtgtgtagacaatatgggggaaccacgtttttatctggaagtggatttcttagaacacaggctaaccgaaactacgcttaggctttgcgtgttgctgtgaagttgtctgtgaaatcgaataatcacaccattgttcagtgcaggagcccaaactagtccttacccaagaagtagtagcctctggatagaactgtgtttaatgtcctgttgtagtcccaggtgttgtaaattgcatgttgtaatcaaacgaatgtcaaaacataagaaagtataccttggatatagaaaaacctgagaacagtatcattcacttgaggatatatatatatatatatttacacacaataaagtgagttaaaattgtatatgc

SEQ ID NO: 406169 - DNA, 1000 bp, Homo Sapiens
gctgctgcaagactgctcctctcgtctcaaaatgacccacccagctagagcactgtacacccccagtggagagccaattcagtcctgggacgacatagagcgagatatggtcatctgtgtgtctatgggacatggtttcaaaaccccaaaagagttaaaacaactgatggagatcagagcaaattatgccagaatccgaaggcagcagggccctcaagccacagacattgtggtgtcaccatccacgaagctgctgtctctggcacatctccacaattaactcctatcagaaccatcggattttctgctgtatttttctgagttcttggttgcaagcaacagaaatctatcatttacaacaaaagcaacgaggagattacatgaagcgaaagagggggctcacagaattgaagggatgccggagaacaagaagctgaagaaaatctcaacattgaaggagccttggacaaccacctaatcctatattcattgaatagttgaactgtatccacccggcgtaatacccatggcaactggtcttccacatatgatgaaatagcctctgagaggttaagtcactcacccaaaatttccactgccaggaagtagtagtgatgggattcaaacctgggtggccctgagaccagagcttccgctctacccacttcactatacttctcttactacaggtacacagcccttttatctctgctttcctgaagcagtctttgtaagtggaaggattgtactgaaggctcagcagcaatagagctaatgaaatggaagctgggcagtgctgagtccctgggtcacagttaccgagaggaaaagtgggctggctgagatttcatcccaggctgcctgctacaaagctcctcatctgcctccctcgaatcaagtgctacatccaataatagggactaaacccacatctgtagcttctgagtcgagagatctgaatagagaaatcagcagttaaaataaaattaaaatagctctg

SEQ ID NO: 406170 - DNA, 1000 bp, Homo Sapiens
aaaagaggataacagtgtgacaagcagagacacccaatcagaggatgatttttacggcggcgacagcagtgaagaggaatatgactggcgaaactatcagccaagccagatgagtgaatccgagttacagatgctagcaagcctacggtggcaacaaaatgaagaactggaggatgctgggacctcccatggcctgagtgcctcccaggtggacaactgtaatgtcagcataagtaccagcagtgacgacacaaccacctggaactcctgcctgccaccccctgtcaaccagggtcgccactatcagaaagaaatgaacccaccttctccttctaatccccgggactggttaaatatgttgagcccaccaatcgttcctcccagtcaacagccggctgagcagcgtccagattcctgtgaaagtttgagtgttcaaggtgaagaagacctcagtgtggaagaggacgaggaagtactgactttgttgtatgacccttgtctgaactgttactttgacccccaaacagggaaatactatgagttggtataatgcctccttccggggcagagagcaggcactcccagctggagcagaatagcagttcagggtcgcttaaggagtcaccacaacttatgtgttgggtgaccacaaaatcaacagtaactgagagaaacgaattcattttgtaaataatgttcaacgttaagaatacctatattccttttgtagatgagtatgattttgaaactgaagaaattaatacagaggcaagattttaggagtttgaattggttcttgtttgttctcattctacatataattttgtttatttcagataattttatgtaaacaaattaagagttattcattcaaattttttgcagtgttaatctgtaaatgatggcttgatgtacagaaaatgtatttttgcttaaaagatgcctgggtaccttttattttatggcatttgtattaaaaataaagtatgatggtaagaag

SEQ ID NO: 406171 - DNA, 1000 bp, Homo Sapiens; identical to SEQ ID NO: 293992

SEQ ID NO: 406172 - DNA, 1000 bp, Homo Sapiens; identical to SEQ ID NO: 224640

SEQ ID NO: 406173 - DNA, 1000 bp, Homo Sapiens; identical to SEQ ID NO: 224641

SEQ ID NO: 406174 - DNA, 1000 bp, Homo Sapiens
cgacggcggcgcagtgcgcctcgtggcccaggagtggtttcgagtgtccagccagcggcgctctcaggcggagcccgtggccaggatgctggaaggggtgaggcgcctgggacccgaactgctggcgcacgtggtgaacctggcggatggcaacgggaacacggccctgcactacagtgtgtcccacgggaacctggccatcgcaagcctgctcctggatacgggggcctgcgaggtcaaccgccagaaccgagccggctactcggccctcatgctggctgcactcacctctgtgaggcaggaagaggaggacatggctgtggtccagagactcttctgcatgggtgatgtcaatgccaaggccagtcagacggggcagacagccctcatgctggccatcagccatggccgacaggacatggtggcaaccctactggcgtgtggggctgatgtgaatgcgcaggatgcggatggggccacagcgctgatgtgtgccagtgagtatgggcgcctggacaccgtgcggctgctgctcacccagccaggctgtgaccctgccatcctagacaatgagggcaccagtgccctggccatcgccctggaggctgagcaggatgaggtggccgctctgctacatgcccacctgagctcgggccagcccgacacccagagcgagtcaccccctggctcccagacagccacacctggtgaaggagaatgcggtgacaatggagagaacccccaggttcagtaagctgcctcgtctggctcactacacctagctgtggggagatctcctcgtcagtcacctcagcctttggcgcacagaagggtccagggtcccctgctaacactggccgaagagaaaggcaatttcagttggggtgactgtggcaggaaggggctcactctggccccaccaaggtgaggtggggaccaagtgatagagccctgatccacccactctctgaaacttctttgctaataaaacattcctact

SEQ ID NO: 406175 - DNA, 1000 bp, Homo Sapiens; identical to SEQ ID NO: 224643

SEQ ID NO: 406176 - DNA, 870 bp, Homo Sapiens; identical to SEQ ID NO: 119005

SEQ ID NO: 406177 - DNA, 1000 bp, Homo Sapiens
ggcccaatctcaggcccaggcccaattataggcccgattcccagcccagcccagatcccaggcccaggcagactccaaggcccaggtcccatcttaagtcctggccggatgcgaagccctggctcacttccaggcctagccccgattttaggcccaggctcaggcccaggctcaggctcagtcccagctccaatcccaggcccaggatcactcccagccccagcccccttatggcctcagagccccgatgcctccgacttcttgccagacacccagttattccctcacttcacagagctgctcctacccctagaccccttggagggatcctcagtctccaccatgacctctcagtaccaagaaggggatgactctatgggcaaaaaacactcagggtctcagccccaagaggagggtggctctgtgaatgaaaatcactcaggccccaggttattactggatttatagggggcctgtgcctgcaaagttcttcagatcccagagggcctggagtggctgatctacactgctggtgactttctgcagtgaatgcatcaccctttacccaccctgctgcaggtggacatttgctgtcttcactgtgcagctatcacaggtggctctgctgtgaatgtgcctgcctgtcatttgaattgagcctgagcgtttctctgctgggattggagtcgctgctcactgggatatctggcattagtggatgctgctcgagagctttctaaagggcttttcccagggcttctgatggtcagcatcttccccaacacttaggattgtgagactttttaatgtttgtcgatccaatgacttgtggttttgttgtggttgtaatatccatttccctgatgattgagaagttaaaccctcacatgttaattgaaccttagatatcttcataatgtgtatttgtttaccccttttccttcatttatttgaatgtattcttatattctcttggcaattaaagttctgcagacacctt

SEQ ID NO: 406178 - DNA, 1000 bp, Homo Sapiens; identical to SEQ ID NO: 119006

SEQ ID NO: 406179 - DNA, 909 bp, Homo Sapiens; identical to SEQ ID NO: 31673

SEQ ID NO: 406180 - DNA, 1000 bp, Homo Sapiens
atcaagagcctcagacttgggctccggaaggctgaggagcaggcccagcgccaggagcagctgctgagggagcaggagggggagctgcaggcacttcgggagcagctcagcaggtgtcaggaagagagagccgagctgcaggcacagctggagcagaagcaacaggaggctgagaggagggatgccatgtaccaggaggagcttggagggcagcgggacttggtccaggccatgaagaggcgggtgttggaactgatccaagagaaggaccgcctgtggcagaggctccagcatctctcttccatggctcccgagtgctgtgtggcctgtagcaagatctttggccgattttctcggcggtatccatgcaggctctgtggaggcctgctctgccatgcttgctccatggattacaagaagagagaccgctgctgcccaccctgcgcccagggaagagaagcccaggtcacctgaccaagaccaagaccagcccatgactggcctcccacctgcctgcccatcccactcaatccactccctgcccgtagctcttcccagccctcttgtttgtccagtcctcattctagacactgaagatctaaggcaccagcacttctgtgggcagagtagggtgtggggagtggttccagccctgcaactaccacaacgagccaggtgactttggcgaagctctcagtgctcagggcttcttctctaatgttaagagttgggccccatcctctctaaagtccctctgggctcagcaaatccatgactgtggataagaccccagcagccctgacatttctcctccacactccccactcacccagcagcggtgcccacctttcctgattcacgagaagtgaagcctgcactatcttggactctccagcagcttcctgtctggagtcagcttcagggatctgtgtttgtgttgctgtgtttctttttatgtttattgaagtactactgacatatgataaacatcacagagtgt

SEQ ID NO: 406181 - DNA, 1000 bp, Homo Sapiens; identical to SEQ ID NO: 224645

SEQ ID NO: 406182 - DNA, 1000 bp, Homo Sapiens; identical to SEQ ID NO: 224646

SEQ ID NO: 406183 - DNA, 1000 bp, Homo Sapiens; identical to SEQ ID NO: 119007

SEQ ID NO: 406184 - DNA, 1000 bp, Homo Sapiens; identical to SEQ ID NO: 119008

SEQ ID NO: 406185 - DNA, 1000 bp, Homo Sapiens; identical to SEQ ID NO: 294003

SEQ ID NO: 406186 - DNA, 1000 bp, Homo Sapiens; identical to SEQ ID NO: 119009

SEQ ID NO: 406187 - DNA, 1000 bp, Homo Sapiens; identical to SEQ ID NO: 294005

SEQ ID NO: 406188 - DNA, 1000 bp, Homo Sapiens; identical to SEQ ID NO: 294006

SEQ ID NO: 406189 - DNA, 1000 bp, Homo Sapiens; identical to SEQ ID NO: 294007

SEQ ID NO: 406190 - DNA, 1000 bp, Homo Sapiens
ttaatggcagcgtcagttcctctcagtctccatttgtgcagatgccaggttcgccggtcacgtcaggttactacggtgtcagaagatctttcttatctgactcagacttccacaacagtaaacagttttcaaatgacgtctacacctccagcgtggggaagccgtttccctgtgagtcctccgcagggcagagccatgcggctctcctggagccctacttcccccaggagccctacggagactaccggcctccggcgctgacgcccaacgcgggctctctgttcagcgcctcgcccctaccgccgctcctgccaccgcccttccccggagacccagctcacttcctatttagggactcatgggagcagacgttgcctgacggtctcagccagcctgaccctgtgtctgccgatgccctgctgaccttgccacccagcacgagttgcctctcccagcttgagtccgggagcatcgcccagcacaggggctcaagctgggggtcatccctggctggggctcagtcatactcgctgcatgctctggaagatctgcaccacactccggggtaccctaccccgcctccttaccccttcacccctttcatgacggtgtcaaatgacctaccgcccaaggtggggccactctccccagatgaggaagcagacaccggttccctccatgacccttccccttgggtgaaagaagatgggagtattgcctgggggtcatatgaatgccgcagagcttattgaggggagggccaaatgacttctgggtttttctttaacttgaggtgtattccaaagatcgttttaggtgtgtcagcccattcaggactggattttcagaataagcctcaatgctgctctttgttagtggacgagggcatttatttgtaatcctctccactgtaaccccactgaaataaaacagaatgttaattaaaaaaaaaaaaaaaaaaaaaaaaaaaaaaaaaaaaaaaaaaaaaaaaaaaaaaaaa

SEQ ID NO: 406191 - DNA, 1000 bp, Homo Sapiens; identical to SEQ ID NO: 294009

SEQ ID NO: 406192 - DNA, 1000 bp, Homo Sapiens; identical to SEQ ID NO: 294010

SEQ ID NO: 406193 - DNA, 1000 bp, Homo Sapiens; identical to SEQ ID NO: 294011

SEQ ID NO: 406194 - DNA, 1000 bp, Homo Sapiens; identical to SEQ ID NO: 224650

SEQ ID NO: 406195 - DNA, 1000 bp, Homo Sapiens; identical to SEQ ID NO: 294012

SEQ ID NO: 406196 - DNA, 1000 bp, Homo Sapiens; identical to SEQ ID NO: 119010

SEQ ID NO: 406197 - DNA, 1000 bp, Homo Sapiens
ggacccagttatccaggtcttcatgctctgctcaagggggccacatgagcgagcctaggagctggacttcaacccaggaagatgcatccgagggaaaggagattttctatggcctcaggcctgagtgccaatattagtctccagcttctgtggatgatcggtttgatgacattgggatggttgtttagcatttctgtgccttggtttcattaaaatgacaatttccccctagaggaaaaagacagggttaacaaccacagcggattccaatctgggttctcattccggctcatggaaatgagtctgccgttgttcagtggcagtgggacttgacagggataacgtcattgctgtgaattctacttcaggcagctgggtgtacatcggacacagcctaccggcagcctctggaaaattaaccaaggaaaaggagcggtcagccctggaaagaggggagagcaaggttttccttccccaccctgagagttggcaaagggttggcagacaggaaggttctgggtggagatcccgcatgtgggctggccagcccctggcacgctgatgcccaagggtgagacaaggcagagaggacagggccacctggcaggagaagccaggagagcaccccagcttggtaggtggaagctgaggagtctgagtgaaaaaggaaatcagagaaatgcaggcacgttccaggcagctcttctacccacagctgcagagacgaccgacctgaagatgtctccatgctggggtgcagtgaagaccttcaggctggaggatgtggctgacagagttgtgtagttcctagaatgaaacccacttgctatccgactccaaaggccgcattctttccatcccagcacgcagtagaggaatctagaaaggtattagtggcagcggagtgggaagccatcaggtggagtgagggagaaaggaggtaccaagttgtttcacacttgtgataatccactccctcggttatctgttgctttataac

SEQ ID NO: 406198 - DNA, 1000 bp, Homo Sapiens; identical to SEQ ID NO: 224651

SEQ ID NO: 406199 - DNA, 1000 bp, Homo Sapiens; identical to SEQ ID NO: 294014

SEQ ID NO: 406200 - DNA, 1000 bp, Homo Sapiens; identical to SEQ ID NO: 224653

SEQ ID NO: 406201 - DNA, 1000 bp, Homo Sapiens; identical to SEQ ID NO: 294017

SEQ ID NO: 406202 - DNA, 1000 bp, Homo Sapiens
gggagtgtggaggtcctgccctgctcacggattgcccacattgagcgagcccacaagccctacacagaggacctcaccgcccatgtccgcaggaacgctctcagggtggctgaagtctggatggatgaatttaaaagccacgtctacatggcatggaacataccgcaggaggactcaggaattgacattggggacatcactgcaaggaaggctctcaggaaacagctgcagtgcaagaccttccggtggtacctggtcagcgtgtacccagagatgaggatgtactccgacatcattgcctatggagtgctgcagaattctctgaagactgatttgtgtcttgaccaggggccagatacagagaatgtccccatcatgtacatctgccatgggatgacgcctcagaacgtgtactacacgagcagtcagcagatccatgtgggcattctgagccccaccgtggatgatgatgacaaccgatgcctggtggacgtcaacagccggccccggctcaccgaatgcagctacgccaaagccaagaggatgaagcttcactggcagttctctcagggaggacccatccagaaccgcaagtctaagcgctgtctggagctgcaggagaatagcgacctggagttcggcttccagctggtgttgcagaagtgctcgggccagcactggagcatcaccaacgtcctgaggagcctcgcgtcctgacccaccggggccacttccggctgcctctttgctactgtgtagcacctgctgcaacgttgcctgctgtccacgtggggttgtttggagtctggggaaccaggttagtgggcccccaagaagagctttttatttcctattcaattttcatggagtttatagaaagatgctgattggtaggtgatggtatgatatcaaactattttgcagttgtaaataggggacagatggaaaatatttataactgacaataaaatattattaagaaaagaaaaaaaaaaaaaaa

SEQ ID NO: 406203 - DNA, 1000 bp, Homo Sapiens
cggacccctgctgtacctgcccgagtggttcctgtgcctcttcgcccgctccctgcccttccccacagtgctgcgtgtctgggatgccttcctcagtgagggtgccagagtactgttccgtgtggggctgacactggtgcgcctggcgctgggcactgcagagcagcgaggggcctgccctggcctcctggagacactgggagcccttcgagccatcccccccgcgcagctgcaggaggaggccttcatgtcacaggtgcacagcgtggtgctgtcagagcgggacctgcagcgggagatcaaggcccagctggcccagctgcccgattccgcgccgggacccccgccccggccacaggtccgcctcgccggggcccaagccatctttgaggcccagcagctggcaggagtgcgacgaggcgccaagcctgaggtgcctcggattgtggtgcagcccccggaggagcccagaccaccgcggcggaaaccccagacccgcggcaagactttccatgggctcctgactcgggcccggggcccccccatcgaggggccccccaggccccaacgaggctccacctccttcctggacacccgcttctgagaggaccatggacttagtgtcccccagtctcaattgcctgatggctgatgccagcccggcaaataggcaccgcactttactcttgggactcggggacttggcttccttcctggcaaggaccaggcagtggggaaggaggaggtcctccgtggtacatactgggtcaggcactagcatggaggagggtcacagagtggggcacgtgaggacccatggaaccgtcctggtgcccaggccctcacaagtaccaaagccagcaccaaaggagtcagggaaggggttggctgagtcaagggaccccagagggcaccaggaataaaatcttcttgaacagaaaaaaaaaaaaaaaaaaaaaaaaaaaaaaaaaaaaaaaaaaaaaaaaaaaaaaaaaaaaaa

SEQ ID NO: 406204 - DNA, 1000 bp, Homo Sapiens; identical to SEQ ID NO: 224654

SEQ ID NO: 406205 - DNA, 1000 bp, Homo Sapiens
tacaagaaaagcatttaaaggcagacatcatgacaaaccttcaggatataatacatttgctggaaggaaatgaatttatttctcctcaatcacggctaaccctggcaagaagcctagttttgctggatgacttaaccaaagctgagaaattcaaggaatctccctcttcaaaaacaggaaaattaaatttgttaactcgggctcatagcattctaactgaacagatgctagcttttggagaaacaattgaatttcgttcatcaaacactaaatatgcaaatccattacagcctttgaaaaatatctatcttccccatgtcatgttattggccaaaataaaaatgagaattggacatacagtggccaagcaagtatattacaagaataaaaggaaggacccctcgaagtggttacctgctcttcatctgtttgatgtggcactgaagctctgtagaacaacagcagtggaggaacatgaggtggaagctgaaatcctttttcagaaaggcaaaatagaacgtcaaatactaatggaagagaaatctccaagttttcaacttgagagtttatatgaagctatacaactaagcctgaaaaatgatcaaaactcaggattgataagagactcctacctagaaatggctctattgtattttcatctgaagaagccaaagataaaaatttcaggatcaccattaacacttaagcctcctctcagaagaagtagttctgttaaagaaacatcagcaaataaatttgaaatgtacagttcattagcctggattgcaataagagctgctgcacaggtcagtgaagctgtgctggcaattaacttacttattggaaagaagaatactagaatgcataaagttaaccaagtggcattaccaaatatcccagaatttgctgctctggatcttttgtcttcgtatacagattatttgcttggtatgtttggatgtctacatattatgcaaaaaaactgatatatgtaatatag

SEQ ID NO: 406206 - DNA, 1000 bp, Homo Sapiens; identical to SEQ ID NO: 119011

SEQ ID NO: 406207 - DNA, 1000 bp, Homo Sapiens; identical to SEQ ID NO: 119012

SEQ ID NO: 406208 - DNA, 1000 bp, Homo Sapiens; identical to SEQ ID NO: 294021

SEQ ID NO: 406209 - DNA, 1000 bp, Homo Sapiens
cagcagcggcggaaggaccccgaggggaccccctacatcaaccaccccatcggtgtggcacggatcctgacccacgaggcgggaatcactgacattgtggtgttacaggcggccctgctccatgacacggtggaggacacagacaccaccctggatgaggtggagctacactttggggcacaagtgcggcgcctggtggaggaggtaacagatgacaagactctgcccaagctggagagaaagaggctgcaggtggagcaagcgccccacagtagccccggggccaaactggtgaagctggcagacaagctgtacaatctgagggacctgaatcgctgcaccccagaggtaaaaatacaatagctgggccaaggggaagttttcaggacagctcattgcatcaggaactcatggccttgaaccaagcttgccaggaagtggggaaaaggcagtgctttccttgacatcacgctagcaagtttctgtcgactcttatgcaggatggtcagaacatcgagtccaggaatacttcgagtgggcagcgcaggtggtgaaggggcttcagggaacaaaccggcaactggaagaggctctaaagcatctgttcaagcagcgggggctgacaatctgatcagtgcttgaagctatccagaggcacaactccagcctcgttcaggccggacaggattcatacgccatcttttctgtgtctcctgagctccctccatccttcccagatattagaggccaaaaaaagacttgcattttttctcagtctgaaggtctcctgctaactaagctgagccccgcgtggtgggaatcagatgtacccatccatttctgatgcactcaccgcctctccccaagtcttgggtctgtttgctattttgcatggtggggtctctggcccctcagggacttgagattatttaagtactagttcctaacacgttctggaaaataaaaataactctgggttaaaaaaaaaaaaaaaaaaaaa

SEQ ID NO: 406210 - DNA, 1000 bp, Homo Sapiens
cacacaccctgcacaccttagataaaaagaacattttaaaagcagagttcactttcactccagtctcccctcttttgccctcactgaagccaaaccacagaagactttgaggaatgagagacaaatgaggtagagctcacctgtgctcaccagctccgtcagggtggtcagccgacccctttccctgggaaccccacttctctctgtggctggcttggttgtcgggggtgagatgccatattgattacagggcagcaaagaaccagtaccaggaatttacttgaccattccccttatttttcatctagaggaatctcggattcagccctttcattgctaagacaccttttcactgaggttcttaccagctcagccaaatctccactctgctatagcagaagcaataatgtttgctttaaaaagatttcttgacctatgccttttcttagaaagtttgatagattagttagaacttcagatcatcagatcagtctcaaatgggtttcttggaattttatatttgacaatatttatactataccaaactcatttgcagttcttaggtttgttggttaaaacatttttttaaagcagtaagtttatagaaaatgttttcatttaatggaaggctggggaatgtccagcatcaacccctatggcatgcattcccaggggccttctcatctgggcctggaacctttggttcagggcttaggggagaacaggccacatggcaacagccacacagtcattgccttcaacacagagccacgtgtccccaaacagcaatagtcatgcccttgtccaggctgggatctaattgacacaataggtcgttgactccctcctagtagagctatctaggtttgtctggaaagtttccgaccctggcttataggcaccacacctcatgtactcctcatggcttggatctctgtattcagcctttgttcagtccaataaactttgagtagatgatctcaaaaaaaaaaaaaaaaaa

SEQ ID NO: 406211 - DNA, 1000 bp, Homo Sapiens
tcagctgcctcccgctgtatgtcctcaagtacctgaggcgcaagctctctcctcccagctactgcaagctggcctcctaaggggctgtgcacccccagcgggctggccccagcaccttctgcccttcccagcaccttgtgcccttgccagtgaacgcagggtttgccattgctaccaagcaagcaccacaagaaagggagggtacgccaggcgagcccagggcacagatgctgagacagcctctccttctcagtgcagggacgtcacccctgccaggcaagcccagggcacagatgccaggatggcttctccctctcagtgcgaggcttcacccctgccaggcaagcccagggcatagatgctgagacagcctctccctctcagtgcagggacgtcacccctgccaggcaagcccagggcacagaggccgggacggcctctccctctcagtgtgaggcttcacccatgctaggcaagcccagggcacagatgccgggatggcccctccctctcagtgcgggaacgtcacccctgccaggcaagcccagggcacagatgctgcgatggcctcttcctcttaagtgtggggcctcacccctgcttttctttctttttttgtattgtcaaaattgtatttccatattgaagcagcttgagtttctactgaaaatgagcccgaattatttcactattactgtaaagggttcatcttactctggcattctgagaattagactgaaagtttaatttctgcagttccctcatattcagattctttctttgatgttataacacaaagtcattcctactcaaatgtaataaaattgaggctccacggaggcccgtgtccacatcagctgcagctcccactcagacagacggcctgccccacagcctgccctttgctgaagataccctcgctttatacttgcatttcgcttttcagtaaaaacagtcaagttactgagttctcacataaaaaaaaaaaaaaaaaaaaaaa

SEQ ID NO: 406212 - DNA, 1000 bp, Homo Sapiens; identical to SEQ ID NO: 294023

SEQ ID NO: 406213 - DNA, 1000 bp, Homo Sapiens; identical to SEQ ID NO: 119013

SEQ ID NO: 406214 - DNA, 1000 bp, Homo Sapiens
cctccaggaggggctgaggtctggaaacatgggcgggggtgggcccgcggtgagaaaggtggaagaatgtctgcaactcaggcggagaataaacaaaccgcactccgggcgacgggcagtggctggatgcacgtttttcctgcaccgacctggcagagcctgagaccgggcctctgcatctccagcggggaaactgaggccccaagaggcccaacccctcatccagaacagctcacctcctgtcctatcctgttgcctccaggcccaagccccatcccttcccctactccgggcctcagtttcctctccaggcaaggaggaatctggactgtgcctgtgcctttgctgtgtcccctaccaccaggcgttcccgttgcccgctctctcccggaagcagaggacggtgctggtcgtgtgtggcccggagcagaacggggcagtggggctggtctgtgcccggcacctgcgggtgtttgagtatgaacccaccatcttctaccccacacgctcgctggacctgctgcatcgggacctgaccacccagtgcgagaagatggacatccccttcctgagctacctgcccactgaggtgcagctcattaacgaagcctatgggctggtggtggatgccgtactgggccccggcgtggagccgggcgaggtcgggggcccctgcacccgcgcgctggccacgctcaagctgctgtccatccccctcgtgagcctggacatcccctcaggctgggacgcagagaccggcagcgattcggaggacgggctgcggcctgacgtgctggtgtctctcgcggcgcccaagcgctgcgctggccgcttctccgggcgccaccacttcgtggccggcaggttcgtgcccgatgacgtgcgccgcaagttcgctctgcgcctgccgggatacacgggcaccgactgcgtcgcggcactgtgaccgccacccgcggccacaccgcagggaccctcgccaataaacagccctcccacc

SEQ ID NO: 406215 - DNA, 1000 bp, Homo Sapiens; identical to SEQ ID NO: 294024

SEQ ID NO: 406216 - DNA, 1000 bp, Homo Sapiens
cccctacctgctgttggccgtcaagtcagaaccagggcgctttgcagaacgacaggccgtgagagagacgtggggcagtccagctccagggatccggctgctcttcctgctagggtctccggtgggtgaggcggggcctgacctagactcactagtggcctgggagagccgtcgctacagtgacctgctgctctgggacttcctcgacgtcccattcaaccagacgctcaaagacctgctgctgctggcctggctgggccgccactgccccaccgtgagttttgtcttgcgagctcaggacgatgcctttgtacacacccctgccctgctggctcacctgcgggccctgccacctgcctcggcccgaagcctctacctgggtgaggtctttacccaggccatgcctctccggaagccaggaggacccttctatgtgcccgagtccttcttcgaaggtggctacccagcctatgcaagcgggggtggctacgtcattgccgggcgcctggcaccctggctgctgcgggcggcagcccgtgtggcacccttcccctttgaggacgtctacactggcctttgcatccgagccctgggcctggtgccccaggcccacccaggcttcctcacagcctggccagcagaccgcactgcggaccactgtgctttccgcaacctgctgctggtacggcccctgggcccccaggccagcattcggctctggaaacaactgcaagacccaaggctccagtgctgactctcattggggagggcggaggtgctgacctggcctgggcctctggggccggcccctggctcagcccctccttccaggtcttgatgggagggaggagggcccagaagctggacaacttaagccactccttggcctcccccagccaggggcctgggcaggaaagatggggtggtggactgtttttgcctactttttgtttttgaaaaacatgcactccccactctgaaaaaaaaaaaaaaaaaaaaa

SEQ ID NO: 406217 - DNA, 1000 bp, Homo Sapiens; identical to SEQ ID NO: 294025

SEQ ID NO: 406218 - DNA, 1000 bp, Homo Sapiens
gctaaaggcagcagttcactatactgtgggttgtctttgcgaggaagttgcattggacaaagagatgcagttcagcaaacagaccattgcggccatttcggagctgactttccgacagtgtgaaaattttgccaaagaccttgaaatgtttgcaagacatgcgaaaagaaccacaattaacactgaagatgtgaagctcttagccaggaggagtaattcactgcatatgcaggaagcggcaggaataaggaaaagcagcctcctgactttcctcgcttggtggtttgagtggacctcccaggccagtgccgggcccctcataggagaggaagcccgggaggtggccaggcggcaggaaggcgcacccccccagcaatctgcgcgccgggacagaatgccctgcaggaacttcttctggaagaccttctcctcctgcaaataaaacctcacccatgaatgctcacgcaagtgtaatgacagacctgaataaaatgtattaagcagcagtgatctttcctctcctccttcccaagtcatttgaaaagtgtttgttatttaaattccaataatgcccaatactgacgtgtcttgagtaatttggaacccaaagtgaagatctttgataaagatttttttgtggttcgactggactgtgctgagtgcgggcactgggcttttcttctgatgttcattatggtgctgggaagctctgtctttgatttaaaataaaatagctaaaggctacacaattaagagttcagaataacatcttatttcagtttatgaattgatatgaattgtctaatttaaaaaatatttccctcacattaaaagcaaatttttaacatcaggctcgaagagcaaaatgattattcctcatgttttagctgaaattaattttaaaacatattaaacagaaaacctgctgacatgcctgtgaaactgatactcgaacttgctgttatgtaccagttttaattagtagcttaatgggttgcaa

SEQ ID NO: 406219 - DNA, 1000 bp, Homo Sapiens; identical to SEQ ID NO: 294026

SEQ ID NO: 406220 - DNA, 1000 bp, Homo Sapiens; identical to SEQ ID NO: 294028

SEQ ID NO: 406221 - DNA, 1000 bp, Homo Sapiens; identical to SEQ ID NO: 224656

SEQ ID NO: 406222 - DNA, 1000 bp, Homo Sapiens; identical to SEQ ID NO: 294030

SEQ ID NO: 406223 - DNA, 1000 bp, Homo Sapiens; identical to SEQ ID NO: 294031

SEQ ID NO: 406224 - DNA, 1000 bp, Homo Sapiens
ctccatctcctgaccttgtgatccacccgcctcggcctcccaaagtgctgggattacaggcgtgagccactgcgcccagcaaactcaccaaactttgaaggaatcttactttctctgtaactccaaattattagagaataataattattaagaagtagccttaacatatgagaaatttgaaaggtgattattatgccatgggcaatttcttaacatttacagtttgtgtttactccgtgtagaattaggatactggcaaaaatcactggggaaactacttagatggaaagcatatcttatgcaggtaatcattatttgactaaattctattgtttcaaggctgctggccacataggatgtttttactatttttttagcctaagtgcttacataaaatggtgattcttttataattgtgcaagttgataatattaattgagtcattcttgtcacatccaactaaaacagactcaagaagctagggggaaaaagtacttgggacacataatattgctccaagaatgtaattctctgtgagcctggctactgaaactgcttgctgtaacctgagaccagttttgtctatagctgctgagataacttgctgtaactctaggactaattttacctatggccattgcccaccagttggagcttgccagctccccagggctttactaataccaatgaactttctcttaagatcacaagttggccgggcgtggtgactcatacctgtaatcccagcactttgggaggccgaggcgggtggatcacagggtcaggagattgagaccatcctggctggcatggtgaaaccccatctctactaaaaatacaaaaattggccgggcgtggtggtgggcgcctgtagtcccacctactcgggaggctagaggctgaggcaggagaatggcgtgaacccgggaggtggagcttgcagtgagccaagactgcactactgcactccagcctgggtgacagagcgagactccgtctc

SEQ ID NO: 406225 - DNA, 1000 bp, Homo Sapiens; identical to SEQ ID NO: 119014

SEQ ID NO: 406226 - DNA, 1000 bp, Homo Sapiens; identical to SEQ ID NO: 119015

SEQ ID NO: 406227 - DNA, 1000 bp, Homo Sapiens; identical to SEQ ID NO: 224657

SEQ ID NO: 406228 - DNA, 1000 bp, Homo Sapiens; identical to SEQ ID NO: 294035

SEQ ID NO: 406229 - DNA, 1000 bp, Homo Sapiens; identical to SEQ ID NO: 294036

SEQ ID NO: 406230 - DNA, 1000 bp, Homo Sapiens; identical to SEQ ID NO: 119016

SEQ ID NO: 406231 - DNA, 1000 bp, Homo Sapiens
agccctggccgcagccgcccaggacgcgattggcccggaactcgcgcccacgcccgagccacccgaggagtacgtgtacccggactaccgtggcaagggctgcgtggacgagagcggcttcgtgtacgcgatcggggagaagttcgcgccgggcccctcggcctgcccgtgcctgtgcaccgaggaggggccgctgtgcgcgcagcccgagtgcccgaggctgcacccgcgctgcatccacgtcgacacgagccagtgctgcccgcagtgcaaggagaggaagaactactgcgagttccggggcaagacctatcagactttggaggagttcgtggtgtctccatgcgagaggtgtcgctgtgaagccaacggtgaggtgctatgcacagtgtcagcgtgtccccagacggagtgtgtggaccctgtgtacgagcctgatcagtgctgtcccatctgcaaaaatggtccaaactgctttgcagaaaccgcggtgatccctgctggcagagaagtgaagactgacgagtgcaccatatgccactgtacttatgaggaaggcacatggagaatcgagcggcaggccatgtgcacgagacatgaatgcaggcaaatgtagacgcttcccagaacacaaactctgactttttctagaacattttactgatgtgaacattctagatgactctgggaactatcagtcaaagaagacttttgatgaggaataatggaaaattgttggtacttttccttttcttgataacagttactacaacagaaggaaatggatatatttcaaaacatcaacaagaactttgggcataaaatccttctctaaataaatgtgctattttcacagtaagtacacaaaagtacactattatatatcaaatgtatttctataatccctccattagagagcttatataagtgttttctatagatgcagattaaaaatgctgtgttgtcaaccgtcaaaaaaaaaaaaaaaaaaaaaaaaaaa

SEQ ID NO: 406232 - DNA, 1000 bp, Homo Sapiens
acttctctctagcccctcatcctcatcctctctggatctctacgacgcttaacaccgcagtgcccatttttctgtccctgttttccttcccatcaccagcccagtgtgcaatccagagagagagagagtgatactgtaaaatgaaatgtatttagaatgctcccccatttgggtccttgttcatctggtgatgcactttctgagcctgcctctctcactggggtttcctcctgctttgcacaactttgctatttcgcaggctcccccgtgccccagctcacccgagccgggcggggtggtggtggtggtggtggtgtgtgtgtggtgtggttctagctgaagagtttggtacagtggagggcgggtccctcagcctggcataggggctgtctcctggttccaaccaggccgccttctagtgcaactggaattcccacctcctggtatttctggacaccactccctttctctggatcatttatgcttttagaactttgagagtcttctatttaattgcaagtagtaacagctgcatctgcacagcgctgtctccaatactggttccccacatcaaaggcagagggagaaaacagaaggctgggaaagatcaaagtgacttctaagtcattcaaagtagctaggagcctcccagcgaatagaacccgggtgtcccaagcctagagcatgacctagaacttcactctgtgggatgatgttagcttgaacttcttgttgggcaatgcgtaggtgctaggagaatgttgacagtgagtttggggttcgctgggatgggatccgagatgtgggcagaggtggacaccagcaggtggaagaatgtggacaaggtggggggtaggggcagccgccgcttcgccactttccgcagctctggttttgctactgtgctgctctccttgggtgcatcctgtgcctggccacgctgccaccctccttgtcacggtgaccacgattgtatgacaataaaatggaccttttggcc

SEQ ID NO: 406233 - DNA, 1000 bp, Homo Sapiens; identical to SEQ ID NO: 294039

SEQ ID NO: 406234 - DNA, 1000 bp, Homo Sapiens; identical to SEQ ID NO: 119017

SEQ ID NO: 406235 - DNA, 1000 bp, Homo Sapiens
tggcagcctcctgagggtgaggggtagcatccgatgggcccctgccagcatgcagcccgactccggctggctcaggctccgagtggcttctccctcatcctgaatgaggcacccacctttgcagctaaggagacaatgaaggactctccctgggtgcccaatggcgtgtccctcctgtcacaggctccgccctgggacatggggctagaagtcaggagtcgggcccggccaggcacaggccctggtgttgccccagaggccctgggcagctccggtctcccgccggatccaggcttcctctccaggaccagcccctgggttcctccttaacaccccccgcccctggggaccagaggggcctctgacatccttgggttctgaggacggaaacccctgagcctcttgagcttctgtaggtagggatctgctttgctcccagacctgcctctcatagcttttttttttttttttttttttttgagacggagtctcgctcttgtcgtccaggctggggtgcaatgctgagatcttggctcactgcaacctccacctcccgggttcaagagattctcctgccttagcctctcaagtagctgggattacaggcactcgccaccacgcctgactaatttttgtatttttagtagaaacagggtttcaccatgttgaccaggctggtcttgaactcctgacctcaggtgatccgcccgcctcagcctcccaaagtgctgggattacaaggtgtgggagaagtgagttgaccctggagggccagacagagtggggcctctgggtgctaccaaaggaacaagagcccagagctgaggagaccttcggtggcagatggattggatgaagcaagggtgagggtttctggggccctgggctctgtttccatgtggaaatctgaaatgttttctagacagtgatggaaggaggtcagccaaagggctgtttaaaaacaaagcctccatgtaaaccatttctgcaagaatatttt

SEQ ID NO: 406236 - DNA, 1000 bp, Homo Sapiens; identical to SEQ ID NO: 294042

SEQ ID NO: 406237 - DNA, 1000 bp, Homo Sapiens; identical to SEQ ID NO: 119019

SEQ ID NO: 406238 - DNA, 1000 bp, Homo Sapiens; identical to SEQ ID NO: 115653

SEQ ID NO: 406239 - DNA, 1000 bp, Homo Sapiens; identical to SEQ ID NO: 294045

SEQ ID NO: 406240 - DNA, 1000 bp, Homo Sapiens; identical to SEQ ID NO: 119022

SEQ ID NO: 406241 - DNA, 1000 bp, Homo Sapiens; identical to SEQ ID NO: 294047

SEQ ID NO: 406242 - DNA, 1000 bp, Homo Sapiens; identical to SEQ ID NO: 119024

SEQ ID NO: 406243 - DNA, 1000 bp, Homo Sapiens
agcccagcccctgccaatcaggctgcaccagctcctgcacgccctcgtgctgccagcagtctagctgccagctggcttgctgtgcctcctccccctgccagcaggcctgctgcgtgcccgtctgctgcaagactgtctgctgcaagcctgtgtgctgtgtgtccgtctgctgtggggattcttcatgctgccagcagtctagctgccagtcagcttgctgcacctcctccccctgccagcaggcctgctgtgtgcccgtctgctgcaagcctgtctgctctgggatttcctcttcgtgctgccagcagtctagctgtgtgagctgtgtgtccagcccctgctgccaggcggtctgtgagcccagcccctgccaatcaggctgcaccagctcctgcacaccctcatgctgccagcagtctagctgccagccaacttgctgcacctcctccccctgccagcaggcctgctgcgtgcccgtctgctgcgtgcctgtgtgctgtgtgcccacctgctctgaggattcctcttcatgctgccagcagtctagctgccagccagcttgctgcacctcctccccctgccagcacgcctgctgtgtgcccgtctgctctggggcttccacatcatgctgccagcagtctagctgccagccggcttgctgcaccgcctcctgctgcagatcctcctcctccgtgtccctcctctgccaccctgtgtgcaagtccacctgctgcgtgcccgtcccctcctgtggtgcctctgcctcctcctgccagcccagctgctgccgcacggcctcctgtgtttccctcctctgccgccccatgtgctcccgccctgcctgctacagcctctgctctggccagaagtccagctgctgacagccctggatgtgatccggagtcccttcccaccaggggctgacctcccagctgccccagcaagctctgccctctctggctttgacaccctcagaagatggggcaggctctttgtctta

SEQ ID NO: 406244 - DNA, 1000 bp, Homo Sapiens; identical to SEQ ID NO: 294048

SEQ ID NO: 406245 - DNA, 1000 bp, Homo Sapiens
ctgcaccccagtgagccgtgtatccagcccctgctgccaggtgacctgtgagcccagcccctgccaatcaggctgcaccagctcctgcacgccctcgtgctgccagcagtctagctgccagccggcttactgcacctcctccccctgccagcaggcctgctgcgtgcccgtctgctgcaagcctgtgtgctgtgtgcccgtctgctgtggggcttcttcgtgctgccaacagtctagctaccagccagcttgctgtgcctcttcctcctgccagccggcctgctgtgtgcccgtctgctgcaaacctgtgtgctgtgcgcccacctgctctgaggattcctattcatgctgccaacagtctagctgccagccagcttgctgcacttcctccccctgccagcagtcctgctgtgtgcctgtctgctgtaagcctgtctgctgcaaacccatctgctgtgtgcctgtctgctctggggcttcctctttgtgctgccagcagtctggctgccagccggcttgctgcaccacctcctgctgcagaccctcctcctctgtgtccctcctctgccgccctgtgtgcaggcccgcctgctgcgtgcccgtctcctcctgctgtgcccccacctcctcccgccagcccagctattgccgccaggcctcctgtgtgtcccttctctgccgccctgtgtgctcccgccctgcctgctacagcttctcctcaggccagaagtccagctgctgacggccatgtcccccagggccagccgggctcaggccccacctccctgccagtccttggacctcccagcccacccagcctcagcacacctcaacgcagaaggagcagccccagccacagccgcccagccccggggtctcagatgctcactggctcctccctgacctcccccccgggcgggcgagccctggctgctcctcactgtgcttcctggctgcagaccacaaccctccgctggtcgctggtcgctggttggggacg

SEQ ID NO: 406246 - DNA, 1000 bp, Homo Sapiens; identical to SEQ ID NO: 119025

SEQ ID NO: 406247 - DNA, 1000 bp, Homo Sapiens; identical to SEQ ID NO: 119025

SEQ ID NO: 406248 - DNA, 1000 bp, Homo Sapiens
ctgccgggccaaggccacggcatctcagtccagtgcccagtggggccgcatcacgaccgagacggccattcagcttatggggatcatgtgcgtgctgtcggtctgctggtctccgctcctgataatgatgttgaaaatgatcttcaatcagacatcagttgagcactgcaagacacacacggagaagcagaaagaatgcaacttcttcttaatagctgttcgcctggcttcactgaaccagatcttggatccttgggtttacctgctgttaagaaagatccttcttcgaaagttttgccagatgagaaaaagaagactcagagagcaagagatggggcctgatggaaggtgtttttgtcatgcatggaggcaggtccccaggacttggtgcagttctcgagaaccctgcagtgtccagctaagctgatgacttgaagataaatctgcctaaccctgggatgaagtatctgtgaactattttgacagcagatgaggaattttggggaaattaaaacctgcctttctgccaggatcacatcactggaagctccatgactctctttttgtaaaagaaaaaaaaatcacagaaacacccacctcccaaactattctcttttacttcttcccccaagcccacccccaaatataactgttatccagaagctgttatgtcctgtttccatacatgtttttgtacttttactatatctacatacatcaattaaacttatgtcctattgttttgtgaatttatatttgcgtatacattatcatatgtaaaatttgcatttttttattgaaaattatgtttcttgagatttatccacattgaaacatggagctctaaatcgttaattttaaccgctatagagtattccataatttgaataaagcataatttgtttgtacaatctcccgccaagggaaaattatttccacactcatcatgacaaggagcactgcaaaaataaaaataaaaattacattcatacatgtttaa

SEQ ID NO: 406249 - DNA, 1000 bp, Homo Sapiens; identical to SEQ ID NO: 224658

SEQ ID NO: 406250 - DNA, 1000 bp, Homo Sapiens
gtgggccagtacaccgtccagtggcccgggacgtggtgcttcatcagcaccgggcgagggggcaacgggactagctcttcgcataactggggcaaccttttcttcgcctctgcctttgccttcctggggctcttggcgctgacagtcaccttttcctgcaacctggccaccattaaggccctggtgtcccgctgccgggccaaggccacggcatctcagtccagtgcccagtggggccgcatcacgaccgagacggccattcagcttatggggatcatgtgcgtgctgtcggtctgctggtctccgctcctgataatgatgttgaaaatgatcttcaatcagacatcagttgagcactgcaagacacacacggagaagcagaaagaatgcaacttcttcttaatagctgttcgcctggcttcactgaaccagatcttggatccttgggtttacctgctgttaagaaagatccttcttcgaaagttttgccagatcaggtaccacacaaacaactatgcatccagctccacctccttaccctgccagtgttcctcaaccttgatgtggagcgaccatttggaaagatgagaaaaagaagactcagagagcaattctggaggccggcaagttcaggatcagggtgccagcagattcggtgtctgactggagtgcagtggagtgatttccgctcactgcaaccttcacctcctccactcactgcaatcttcgcctcctgggttcaagtgattctcctgcctcagcctcccaagtagctggaattgcaggcatgcgccacaagcctggctaatttttgcatttttagtagagatgaggtttcaccatgtttgccaggctggtcttgaacacctgacctcaagtaacccacccaccttggcctcccaaagagctgggattacaggcatgagccaacgtgcctggccatgttctgatcgtttaatgatagcaacatttagtattatagagcatgaaaatgtcaaag

SEQ ID NO: 406251 - DNA, 1000 bp, Homo Sapiens
tttcgccgcagcaggagcttctcagggcgccaggatcccgcgatggcagcatcgcggtgctggccgacggcagcttggccataggcaacgtacaggagcagcatgcgggactcttcgtgtgcctggccactgggccccgcctgcaccacaaccagacgcacgagtacaacgtgagcgtgcactttccgcgcccagagcccgaggctttcaacacaggcttcaccacactgctgggctgtgccgtgggccttgtgctcgtgctgctctacctgttcgccccaccctgccgctgctgccgccgtgcctgccgctgccgccgctggccccaaacacccagcccgctccaagagctgagcgcacagtcctcagtactcagcaccacaccgccagacgcacccagccgcaaggccagcgtccacaagcacgtagtctttctggagccaggccggaggggcctcaatggccgcgtgcagctggcagtagctgaggaattcgatctctacaaccctggaggcctgcagctgaaggctggctctgagtccgccagctccataggctccgagggtcccatgacaacctagactgcccagggctcccccacccaggcccccaccctcttgctgctcgccctgctccctgcttcggtccagagaactggcagatactggtgggaagcactgtgcctggccccccagcttcctgtatgggcctcgaaacacaatgggccttctcgctcactggtagagacaggggttgtggtccccaacctgccttctgctctgcccctgcacaggacccaaaggccccaggccctgcaaggtgtgctagttcctgctttcccgcggacttcctagtgcccaaatgccctgtgaggctgagagacccaggcccctgtggctttcaacacagcacagctgtggaagtggctgtgttcttctacagcctgtggaagaacccctgtagcagagcctcccgtccaccctcaggggctgaggcagct

SEQ ID NO: 406252 - DNA, 1000 bp, Homo Sapiens; identical to SEQ ID NO: 294052

SEQ ID NO: 406253 - DNA, 1000 bp, Homo Sapiens; identical to SEQ ID NO: 224659

SEQ ID NO: 406254 - DNA, 1000 bp, Homo Sapiens; identical to SEQ ID NO: 294054

SEQ ID NO: 406255 - DNA, 1000 bp, Homo Sapiens; identical to SEQ ID NO: 119026

SEQ ID NO: 406256 - DNA, 1000 bp, Homo Sapiens
atgcaggtggtcccgctggagcttgcacgcggacaccaggtggcgctgtcgtctatcagctatgtgggctgctccctctccgtgctctgcctggtggccacgctggtcaccttcgccgtgctgtcctccgtgagcaccatccggaaccagcgctaccacatccacgccaacctgtccttcgccgtgctggtggcccaggtcctgctgctcattagtttccgcctcgagccgggcacgaccccctgccaagtgatggccgtgctcctacactacttcttcctgagtgccttcgcatggatgctggtggaggggctgcacctctacagcatggtgatcaaggtctttgggtcggaggacagcaagcaccgttactactatgggatgggatggggttttcctcttctgatctgcatcatttcactgtcatttgccatggacagttacggaacaagcaacaattgctggctgtcgttggcgagtggcgccatctgggcctttgtagcccctgccctgtttgtcatcgtggtcaacattggcatcctcatcgctgtgaccagagtcatctcacagatcagcgccgacaactacaagatccatggagaccccagtgccttcaagttgacggccaaggcagtggccgtgctgctgcccatcctgggtacctcgtgggtctttggcgtgcttgctgtcaacggttgtgctgtggttttccagtacatgtttgccacgctcaactccctgcagggactgttcatattcctctttcattgtctcctgaattcagaggtgagagccgccttcaagcacaaaaccaaggtctggtcgctcacgagcagctccgcccgcacctccaacgcgaagcccttccactcggacctcatgaatgggacccggccaggcatggcctccaccaagctcagcccttgggacaagagcagccactctgcccaccgcgtcgacctgtcagccgtgtgagccgggaggctgccaaccaggccag

SEQ ID NO: 406257 - DNA, 1000 bp, Homo Sapiens
agcgggctcctgcggccccgtcactgccatgtagtcgctggcggggctccctgcagcccgggagcggcagtgccagtgagcctgagcccaggagcccgcgtcttccccgggaggcgctgagtgcgcgccgcgcccccgccgctcgggaggcactttgggccagacagggaaatgggggagaaagtttcggaggcgccagagccggtgccccgcggctgcagtggccacggcagccggactccagcctctgcgctggtcgccgcgtcctctccgggtgcttcctcggccgagtcctcctcgggctcagaaactctgtcggaggaaggggagcccggcggcttctccagagagcatcagccgccgccgccgccgccgttgggaggcaccctgggcgcccgggcgcccgccgcgtgggctccggcaagcgtgctgctggagcgcggagtccttgcgctgccgccgccgcttcccggaggagctgtgccgcccgcgccccggggcagcagcgcgtcccaggaggagcaggacgaggagcttgaccacatattatcccctccacccatgccgtttcggaaatgcagcaacccagatgtggcttctggccctggaaaatcactgaagtataaaagacagctgagtgaggatggaagacagctaaggcgagggagcctgggaggagccctgactgggaggtaccttcttccaaacccggtggcgggacaggcctggccggcctctgcagagacgtccaacctcgtgcgcatgcgcagccaggccctgggccagtcggcgccctcgctcaccgccagcctgaaggagctgagtctccccagaagaggaagtttgatagattcccagaagtggaattgcttggtcaaacgccctgtgtgtccaaatgctgggagaacatcaccccttggatgaattgccaccacattaaataaaacatatccaaagctcaaaaaaaaaaaaaaaaaaaaaaaaaaaaaaaaaaaaaaaa

SEQ ID NO: 406258 - DNA, 1000 bp, Homo Sapiens; identical to SEQ ID NO: 294056

SEQ ID NO: 406259 - DNA, 1000 bp, Homo Sapiens; identical to SEQ ID NO: 119027

SEQ ID NO: 406260 - DNA, 1000 bp, Homo Sapiens
atttctattaacaaataatagattgctaataatatatattatgctgttttggatatactaaatatttgctcacatccttaatatattttttaaaattcctaacaatagtactgttgagataaaagttgagcacattttgagacttcttccaaattggtccctagaaagttacactggtttgtactctcacttatgtcactgtttataccaccactgactgctgcctgctttattatttctttaatgagttggactgaacagtggttaatcctgactctgtttttgactgacagttaacagttacatgaaccattcatattacagctcttacttaaatttgaccaagccaggatatatctgttaggccacattcatttagggatcatgttttccaaagcaggtttgggcaaaattaatccacaggactgaaaggtatacatctgtgagttttgttctcacttccacctctaatttgaagaacactttaattgacacagaatacatttcacatatttaacctctacaataagttctgacacattttccatgaaacaaaccatcgctatattcaagataatgaacctatctatcatactcccaaattccttcttgcatctttgtaatttctcactcttccttctccctctccccgtcccatcccaaccactgatctgctcaggcaactaccaatcttctttctgtcactatagattaatttgcatttttaaagaaatttacatacatggaaccatacatcatctatgctttgtagtatgactcctgtcactcagtacaattattttgagattcatttatgttattgtatgtatcaatagttcatcccttttattggtaagtaacatttttttgtataggtataccatgatttgttgatgaacaaatttacctgttgatgaacatttacgttgttaccaagatttttgctattgaaaataaagtttttatgaatatttatatatataaaaaaaaaaaaaaaaaa

SEQ ID NO: 406261 - DNA, 1000 bp, Homo Sapiens; identical to SEQ ID NO: 294058

SEQ ID NO: 406262 - DNA, 1000 bp, Homo Sapiens; identical to SEQ ID NO: 294058

SEQ ID NO: 406263 - DNA, 1000 bp, Homo Sapiens
ttcagagttctctctatattggagggtgttttaaagctagagtggtctttatccacttttattaacacatctgaatgtgaaggtcaagagaggaaagtgatatgtcctaagtcagagtagagtcaacaagaaaataagacaaacagcgactgagcccctggtgtatactgggcattggccagctactggggatatggagatgaagaaaacataacccttcttcaaggagcccaacctaccaaggtagacagacatatagacaaatagatacttgcatagaaaaaaagaggaaaaggggatcagtgtgacctgtgtaactaagtaccctataaaccctcctgcaacagatcatattgccctttatagtggggatggtaatcccatctgaattccacaggtactttgcagtcataccacacccatgtgtctgtcggtcctgactgtaccatttataaacagcttcactttcagcagttctcagccctcttaagctagggtcattgtcagtagggatactgcttcataagcaccagcagaacaccaaaggagaccatatgggtgaaagcaaccagcactgccctggcgcttcataggttcttagagtttttatcttttactttcagtctaacacagcactgcctgctttttgtttttgttgcttggtttgtttttttcttaccgtgttcaccaaacttgtgtccaaatagctttgggctgatgcaaaaatatctatgtggaagagaagagttgttctcatggagggccttcagatgagtgctatagactctctaggcaactccaagaggcttctcaagcagggtgggcagtgagagctgctatggaatcaatggacaaactgacagggactgctttgaaagacagtactcagttgagtatatatattctctcttaagggctaaaagtttataatcatcccttaaacactctgtgatgggatcttcaggatcatcttttgaagtaaactatattttacaatgtg

SEQ ID NO: 406264 - DNA, 1000 bp, Homo Sapiens
caaaccactggaaaacatgcattttggaaactttaaaataaatggttaacatggcatttctaagaaggcatttaatccagtatctctagtgtacaaaggaaacttgaagttttaatggattatttttaatgaaatgttttattgtttacaaacggtatgttgctgtgtacctaagagtatagtaaggtcaagaagagtatcaaagtataataaaataaaaattgtatactctccatatatttatttgtttggaatcactcttgtgtgatataaaggcgtgtatattatctttgtattagaaccaaaaaagttatttattttggtccctatgattttattttttaagataaattaatatactgtattttttaaagtataggtttaggtttacagaataatagagcagataatatatagagttccatacacccactgcaccccataccctcattcctccttacacaatttctcctattattaagatggtgcattagtgtggcacatttgttacaaatgatgaaccaatattaatttattattaattatagcccatagttcacattaagattcattgtgttgtaaggttatgtgggttttgacaaattcataatggcatgtgtgcaccattgcagtctcatacagaatagtttcaccaccctcaaaatcctgtgcttcacttatttatccctcccgccgtgccctggcaaccactgatctttttactgtctctacagttttgccttttccaaaatgtcatgtagttggttggagttatgcagtatgtagactttttagactggcttctttcacttagcaatatgcatttaaggttcctccatgtctttttgtgacttgatagctcattttttattgctgaataatgttcattgtatggatatagcatagtatgtttatccattcgcccattaaaggaaatcttgattgcttccagttttcagtgattaaaaataaagccgctataaacaaaaaaaaaaaaaaa

SEQ ID NO: 406265 - DNA, 1000 bp, Homo Sapiens; identical to SEQ ID NO: 119029

SEQ ID NO: 406266 - DNA, 1000 bp, Homo Sapiens; identical to SEQ ID NO: 294062

SEQ ID NO: 406267 - DNA, 1000 bp, Homo Sapiens; identical to SEQ ID NO: 119030

SEQ ID NO: 406268 - DNA, 1000 bp, Homo Sapiens
caccacgcctaccagcacggtcacttctcagggcctttggtccccggcgtgggctgagctgggctctcgctctcctgcgtcactggcattgcttatgtgctgtgcctgtctcccttgacggctctcagccctgcaggaccatggacgtcccttccctctctcagcaggaaaatctccatgatgccagcaggcgtgtccacagaggaaggggcgaagaaaatgtcgaatggacaggcgacctgcatcctgcccagctcggaagaggaggacgtcctgagattcgccacagcctggaggcgattgcgctcgtgacaaaagccagacacagaaagacaaataccacgttctaatttgtgcatgggagctaaaataaacccaggtgctccctgctggaaagccacacgcggcagaggagagctggcaggaggaaaagcgggttcgagtcagcagcctttggagacggcagactgagagtgtcacagagaccatctcaagtctgcacgaattccaggctcttttatgttaagggcagggggacggggagggggttgggatcaagaggtgacaggtgaccgcacacatgtgggtgccagcgagggtccgaggaggctggcgatgccttcgtccttggtcaggtcacgagcacctgtgaatccacagcagaacagctgttcacagcttcccctttcatcccggagtgagtttcaaaacctgcaccacgactgcctctgtgtattttctccgtcctctagaagatcctaggctccgtgcaggaatgggtgaaggccccttacacaaaaacaaagtcaggtcctgagttcttttgctgtttctttgctttctcctgcaaagtcactcgaaaggtgactggcggaggtgaggctgcgataattagcttgattgtggtgacccttccacaaagcacgtgtatgtcggcatattcactgggtcatgcacctcgaatacatatttttacttgtcaaatacatgataataaagg

SEQ ID NO: 406269 - DNA, 1000 bp, Homo Sapiens
tcatttaagcaaagctccagcttcagttcacatcggaaagtccacacaggggaaaggccttatgtgtgtggggaatgtgggaaatcctttagccatagctccaaccttaagaaccaccagagagttcacactggagaaagacctgttgagtgcagtgaatgtagcaaatcctttagctgtaaatctaacctcattaaacacctgagagttcacactggagaaaggccttatgagtgcagtgaatgtgggaaatcctttagccaaagttctagcctcattcaacaccgcagagttcacacgggaaaaaggccttatcagtgcagtcaatgtgggaaatcctttggctgcaaatctgtcctcattcaacaccagagagttcacattggagaaaagccttagctgtactgagaatatgcaatttcctttgagtgtaattatactgaaggagtacacctgtgagagagacaagtacctgatttggaagccccaacatctaaggatatacagtgggcggattccccttaagttccaggtatgtgttacactttctaacatgccatttagaaagtgttagactttctcacctgccatttatggctcttgccgtttatgtcactgacagtttctgaggcagaagccgtatcatgtctaccacctgtgaggtccacacagtgtgtatcatttacctcctgaacctgctcaaggaagcagacctctgcttctccccatttgctagaagaaatcatgaatagtctgagtcttcctctctgacaagttagggcatggacttgacccagctttgtgccagagaacccaatatgagtgttgttggcagcttgccaagaaggactgtctttttcaagacatactggtttcatgtgacacctccatggatttttttccagcctctaagtcaccaacttgggaactgcttgtctcacgttgctttgttttttacaataataaaagcattattatttaagctaaaaaaaaaaaaaaa

SEQ ID NO: 406270 - DNA, 1000 bp, Homo Sapiens; identical to SEQ ID NO: 294064

SEQ ID NO: 406271 - DNA, 1000 bp, Homo Sapiens; identical to SEQ ID NO: 119031

SEQ ID NO: 406272 - DNA, 1000 bp, Homo Sapiens; identical to SEQ ID NO: 224664

SEQ ID NO: 406273 - DNA, 1000 bp, Homo Sapiens; identical to SEQ ID NO: 119032

SEQ ID NO: 406274 - DNA, 1000 bp, Homo Sapiens; identical to SEQ ID NO: 289465

SEQ ID NO: 406275 - DNA, 1000 bp, Homo Sapiens; identical to SEQ ID NO: 294070

SEQ ID NO: 406276 - DNA, 1000 bp, Homo Sapiens; identical to SEQ ID NO: 224665

SEQ ID NO: 406277 - DNA, 1000 bp, Homo Sapiens; identical to SEQ ID NO: 294072

SEQ ID NO: 406278 - DNA, 1000 bp, Homo Sapiens; identical to SEQ ID NO: 224666

SEQ ID NO: 406279 - DNA, 1000 bp, Homo Sapiens
tcctggagagcagcttccctgccattttgcgggacttcggggctgtgagctgggacttctcagggactacccctccgcctcggggctggtccccacctctggcccccgggtgctaccagctcctgctgtaccaagcaggccggtgccaacccagcaactgccgccggtgcccgggggcctatcgggcactgagggggcttcgaagctttatgagtgccaacaccttcggcaatgccggcttttccgttctcctgcctggggcccggctcgagggccgctgtgggcccaccaatgcccgggtcagatgccatctgggcctaaagatccctcctggctgtgagctggtggtcggcggtgagccccagtgctgggctgaggggcactgtctactggtggacgactcttttctacacacagtggctcacaatggctcccccgaagatgggcctcgagtggtcttcatcgtggacctctggcaccccaacgtggcaggggctgagcgccaggccctcgactttgtcttcgccccagacccttgaaggaaggtgctcccttcacacacccaggctggagagacactgcgctcagggacggcttgatgggagaggctggggcagggccttatgtcttctcctagtacaaccaaacagataaccagatgcaacgtgaagatctagactggaccctggtttgatgaaccagctgtaaaaacacatttctggaacaactggagaaaccggagtatgccctggactggatattaaataaaaatttattgacatgtaaagatggcaattattaacaacaacaaaaaacagattataaaacatttcatacaacacgattgtattttggcaagcaaacacacacacacacacatactctcacacaggaaacgacctggaagaatatttggtgcttttattttttagattatttgtgtttctgaaatttctacaattaataaatactgctttaaaataaaaaaaaaaaaaaaaaa

SEQ ID NO: 406280 - DNA, 1000 bp, Homo Sapiens
tggtttgtccagagcgtgatcgcccagtgtctggtgcagctctcctctgctagaagcacttttagattcacgattcaaggtcaggatgacaaagtgtatatcttgctatggcttttaaattcagacagtttggtgattgaatctttgagaaattccaaatatatcaaaaaattccccttgttggaaaacacattcaaagccgattctagttctgcctggagtgctgtcaaggtcctctaccagccatgcatcaaaagcaggaatgaaaaacttgtcagcttgtgggaaagtgacatcagcgtccacccgctaaccctgccctctgcaacctgcttggagctgctgttgatattgtcaaagagtaatgccaatctgccttcatcccttcgccgtgtgaattcctttcaggtggcctttttgaagatgtaactattagagctgggcattctcctcccccggcagacagctctcaagcaggagcacaccgaggccagcagtcagctcaggaggcatcaattacaaagacaagaaccagagctatgggataagagcattgcattgaagttttaagtttacttgtttgcatgtattctctaagagaagagttaactttagatctttgaaaacccaggactgtgaagaaagtcatagtagcaggttgaggcaagtgtagaagttacatctctatttcccacagagaggaatattcacatatgtgcagtgtcagcaccacctggaaggttattacctaatagagatccatctgtcctgtgtggaatccagtgaggaattttattggtggaactgaatgttaactgctgtaaatcctaggaaataaacttttaaagagtttctcaggatgatttaaaacaaattttaaaaaagaaaagtagaaaacattttatactttattcagaggagatgctcaatagatgtttgttgaatgaatgattatcaaattaaaggatttcctatttatgcaaaaaaaaaaaaaaaaaaa

SEQ ID NO: 406281 - DNA, 1000 bp, Homo Sapiens; identical to SEQ ID NO: 294076

SEQ ID NO: 406282 - DNA, 1000 bp, Homo Sapiens; identical to SEQ ID NO: 294077

SEQ ID NO: 406283 - DNA, 1000 bp, Homo Sapiens; identical to SEQ ID NO: 294078

SEQ ID NO: 406284 - DNA, 1000 bp, Homo Sapiens; identical to SEQ ID NO: 222501

SEQ ID NO: 406285 - DNA, 1000 bp, Homo Sapiens; identical to SEQ ID NO: 294080

SEQ ID NO: 406286 - DNA, 1000 bp, Homo Sapiens; identical to SEQ ID NO: 119034

SEQ ID NO: 406287 - DNA, 1000 bp, Homo Sapiens
tgatgttccgtcctacctgcctgacctgcccggcattgccaacgacctcatgtacagtgccgacctgggccccggcattgccccctctgcccctggcaccattccggaactgcccaccttccacactgaggtagccgagcctctcaaggcagacctacaagatggggtactaacagcaccaccaccacccccaccgcccccaccacctcccccagctcctgaggtgctggccagtgcatccccactcccaccctcaaccgcggcccctgtaggccaaggcgccaggcaggacgacagcagcagcagcgcgtctccttcagtccagggagctcccagggaagtggtcgacccctccggtggccgggccactctgctagagtccatccgccaagctgggggcatcggcaaggccaagctgcgcagcgtgaaggagcgaaagctggagaagaagaagcagaaggagcaggagcaagtgagagccacgagccaaggtggggacttgatgtcggatctcttcaacaagctggtcatgaggcgcaagggcatctctgggaaaggacctggggctggtgaggggcccggaggagcctttgcccgcgtgtcagactccatccctcctctgccgccaccgcagcagccacaggcagaggaggacgaggacgactgggaatcgtagggggctccatgacaccttcccccccagacccagacttgggccattgctctgacatggacacagccaggacaagctgctcagacctgcttccctgggtgggggtgatggaaccagcactgtgcggagaccagcttcaaggagcggaaggctggcctgaggccacacagctggggtggggacttctgtctgcctgtgctccatggggggacggctccacccagcctgcgccactgtgttcttctctaaagaggcttccagagaaaatggcacaccaatcaataaagaactgagcagaaaaaaaaaaaaaaaaaaaaaaaaaaaaaa

SEQ ID NO: 406288 - DNA, 963 bp, Homo Sapiens
atggaaacaggaaatcaaacacatgcccaagaatttctcctcctgggattttcagcaacgtcagagattcagttcattctctttgggctgttcctctccatgtacctagtcactttcaccgggaacctgctcatcatcctggccatatgctcagactcccacctccacacccccatgtacttcttcctctccaacctgtcttttgctgacctctgttttacctccacgactgtcccaaagatgttactgaatatactgacacagaacaaattcataacatatgcaggctgtctcagtcagattttttttttcacttcatttggatgcctggacaatttactcttgaccgtgatggcctatgaccgcttcgtggccgtctgtcaccccctgcactatacggtcatcatgaacccccagctctgtggactgctggttctggggtcctggtgcatcagtgtcatgggttccctgctcgagaccttgactgttttgaggctgtccttctgcaccgaaatggaaattccacactttttttgtgatctacttgaagtcctgaagctcgcctgttctgacaccttcattaataacgtggtgatatactttgcaactggcgtcctgggtgtgatttccttcactggaatatttttctcttactataaaattgttttctctatactgaggatttcctcagctgggagaaagcacaaagcgttttccacctgtggttcccacctctcagtggtcaccttgttctatggcacgggctttggggtctatctcagttctgcagccacaccatcttctaggacaagtctggtggcctcagtgatgtacaccatggtcacccccatgctgaaccccttcatctacagcctgaggaacacggacatgaagagggccctggggagactcctcagtagggcaacattttttaatggtgacatcactgcaggactttcataa

SEQ ID NO: 406289 - DNA, 1000 bp, Homo Sapiens; identical to SEQ ID NO: 224668

SEQ ID NO: 406290 - DNA, 1000 bp, Homo Sapiens
cctgcggcgctggaagaaccacggctgccagcgcgtcaagtatggccagtgctgggtcttcgccgccgtggcctgcacagtgctgaggtgcctgggcatccctacccgcgtcgtgaccaactacaactcggcccatgaccagaacagcaaccttctcatcgagtacttccgcaatgagtttggggagatccagggtgacaagagcgagatgatctggaacttccactgctgggtggagtcgtggatgaccaggccggacctgcagccggggtacgagggctggcaggccctggacccaacgccccaggagaagagcgaagggacgtactgctgtggcccagttccagttcgtgccatcaaggagggcgacctgagcaccaagtacgatgcgccctttgtctttgcggaggtcaatgccgacgtggtagactggatccagcaggacgatgggtctgtgcacaaatccatcaaccgttccctgatcgttgggctgaagatcagcactaagagcgtgggccgagacgagcgggaggatatcacccacacctacaaatacccagaggggtcctcagaggagagggaggccttcacaagggcgaaccacctgaacaaactggccgagaaggaggagacagggatggccatgcggatccgtgtgggccagagcatgaacatgggcagtgactttgacgtctttgcccacatcaccaacaacaccgctgaggagtacgtctgccgcctcctgctctgtgcccgcaccgtcagctacaatgggatcttggggcccgagtgtggcaccaagtacctgctcaacctcaacctggagcctttctctggtaaagccctgtgttcctggagcatttgttgaccgccaactgacaacatgctaggtagtgacctaaccacttagcatgtgtgatttcaccccacagacacttacatggcgctgactctggggcaggccctgtcctaagcactttataaatatcaacccacttaa

SEQ ID NO: 406291 - DNA, 1000 bp, Homo Sapiens; identical to SEQ ID NO: 294086

SEQ ID NO: 406292 - DNA, 1000 bp, Homo Sapiens; identical to SEQ ID NO: 294088

SEQ ID NO: 406293 - DNA, 1000 bp, Homo Sapiens
agactggttcagcagtggagcgtcgcggtgttcctgctgagctacgcggtgccctcctgcgggcgctcggtggagggtctcagccgccgcctcaaaagagctgtgtctgaacatcagctcctccatgacaaggggaagtccatccaagatttacggcgacgattcttccttcaccatctgatcgcagaaatccacacagctgaaatcagagctacctcggaggtgtcccctaactccaagccctctcccaacacaaagaaccaccccgtccgatttgggtctgatgatgagggcagatacctaactcaggaaactaacaaggtggagacgtacaaagagcagccgctcaagacacctgggaagaaaaagaaaggcaagcccgggaaacgcaaggagcaggaaaagaaaaaacggcgaactcgctctgcctggttagactctggagtgactgggagtgggctagaaggggaccacctgtctgacacctccacaacgtcgctggagctcgattcacggaggcattgaaattttcagcagagaccttccaaggacatattgcaggattctgtaatagtgaacatatggaaagtattagaaatatttattgtctgtaaatactgtaaatgcattggaataaaactgtctcccccattgctctatgaaactgcacattggtcattgtgaatattttttttttgccaaggctaatccaattattattatcacatttaccataatttattttgtccattgatgtatttattttgtaaatgtatcttggtgctgctgaatttctatattttttgtaacataatgcactttagatatacatatcaagtatgttgataaatgacacaatgaagtgtctctattttgtggttgattttaatgaatgcctaaatataattatccaaattgattttcctttgtgcatgtaaaaataacagtattttaaatttgtaaagaatgtctaataaaatataatctaattacatcatga

SEQ ID NO: 406294 - DNA, 1000 bp, Homo Sapiens; identical to SEQ ID NO: 294089

SEQ ID NO: 406295 - DNA, 1000 bp, Homo Sapiens; identical to SEQ ID NO: 294090

SEQ ID NO: 406296 - DNA, 1000 bp, Homo Sapiens
ttgctcttcaggaaaattatcccctggaaaagtggatgttatagtcgcttttcagaatgtattgtctgaatttcttgtcttccaacattctcctaagccagttacctttgcactgaagtagaattcaaaaggagatagaggttctgaatttcttcctttgaccagatggaagtcgttacatcagaatgctgatgactgcaaaatcttggacatattgttttcacaattaggaaatggcaaacacaaagttcttcagtgcaaagccagcatgcgagttcagcttccatttgctgctataaattttgttcttgttgctgccagtaaacaccaactgttcaagtgaaatagtaaatccaaatgtgcctgttggatgagagtaaaaaaattatatgctgcataaatgctgatgcaaaaggatttttcaacacactaaaccagggtagggaaaggaaccgagaaagaaagttgaactgaatgcagctctcactaacaacttcttggtaaaagcactaaaaaagctcttgatagaatgttgattcaacatactgtttaaacctcaaggaaaaaaacaaacgcagaattgggatattggccttaggatatctgcttaaagtcctactttgagctctcatcagggttaccaaagaaggcgtacatagattgttacaaatcaaagcaaagaaaaatcccaaagttccctcaaaactgatgtgggcacttggcccagaagttgtttgctaatgatcagtctaacagctgaaagtcaaagtcagtggctagtaccatctgcaataggatttaggaagttttgatctcacaaatttactgtaaggctaatcaatgaatgtttgtactcaggtctccctacagttaaatttaatgtgtaactggaattacgattcaaagagatagtttcataaatggtccctgaaatttaattttggattacctaagtttacaatggatttctcttctcctttccccaatatttttcttacgc

SEQ ID NO: 406297 - DNA, 1000 bp, Homo Sapiens; identical to SEQ ID NO: 294092

SEQ ID NO: 406298 - DNA, 1000 bp, Homo Sapiens; identical to SEQ ID NO: 119037

SEQ ID NO: 406299 - DNA, 1000 bp, Homo Sapiens
gttctgtataaacttaaaaggagattttgaacttaacttacacaacattaaatccttgcgcaatcaaattaatgttacttatctgataatacttttctttcattctcagaaaattactttcttggtgaggtttggctctgctaaactcaaaacttgtctctcaagcttgttcttcaaaatacacagacaaagctgtaaatttaaagaatcattttgaatataaatttaagaagtaatacttattggctgaaaaacggaggctgagccattgtggctaccattttacactgttttactgtaacattagctcaaatatctgttgcactgttcaactgatatttttaaaattctaataatcttcatctcaaatgtagcattagtatttctaagtgaacagaatcagaagttaatttttaagtgtttgtaaggttctcaagtactgtgacatgtatttttttgtgacgtgtattttttgtgacttgaagctatcatatagatcctgtatttctgatagaccatactaacagacaccaaaggaacaacaacactgtctgtgttcatcaccgtttagattgtacacagcaatggtgactcttaaacccagtcagaagctcatcattggaattcagtattttcttaaagaaaggatgatttattttcagcaacatatagaaatatactataaatattaataatacaacttcaatgcttaataataataaacaaattaattctaaaggcccaggcctccagtccttgcatgaaaggcatttgccttcataaggatcaaggttcaggccactacatgtaaaaactatgcaagtgtttttacaagacagaactttcttttaagtcaggtcaacatattttgtcccattttcaggccctgttggaaggtatctatactgaattaccccaaccttacttttaagatgtgtggtatagatagtatatatttcaagcttatttcaaaattggtggtttttttaaaaaaagaggc

SEQ ID NO: 406300 - DNA, 1000 bp, Homo Sapiens; identical to SEQ ID NO: 224672

SEQ ID NO: 406301 - DNA, 1000 bp, Homo Sapiens; identical to SEQ ID NO: 294094

SEQ ID NO: 406302 - DNA, 1000 bp, Homo Sapiens
tcttctttgccaccttcgccctctgtgaggcggccaggcgggcctccaaggccctgctcccagtgggcgcctatgaagtcttcgcccgggaggcgatgaggacgctggtcgagctcgggccctgggctggggactttgggcctgacctgctgctcaccctgctcttcctgctcttcctggcgcacggggtcaccttggacggggcctcggccaaccccactgtgtccctgcaggagttcctcatggccgagcagtctctgcctggcacgctgttgaagctggcggcacaggggctgggcatgcaggccgcctgcaccctgatgcgcctctgctgggcctgggagctcagtgacctgcacctgctgcagagcctcatggcccagagctgcagctcggccctgcgcacatccgtgccccacggggcgcttgtggaggccgcctgcgccttttgtttccatctgaccctcctgcacctgcggcacagtcctcccgcctacagcgggcccgctgtggctctgttggtcaccgtcacggcctacacggccgggcccttcacgtctgccttcttcaaccctgccctggccgcctctgtgacctttgcctgctcgggacacaccttactggagtacgtgcaggtgtactggctgggccctctgacagggatggtcctggctgtgctgctgcaccagggccgccttccccaccttttccagaggaacctgttctacggccagaagaacaagtaccgagcaccccgagggaagccggccccggcctcaggggacacccagacccctgcaaaggggtccagtgtccgggagcctgggcgcagtggtgttgaggggccacattccagctgagtggccttgctctgtgtgagccccgtgcgagggccctgcttgtagctggaccctggaaccttctgtagctaagagggaatcctggccccctccccagaagccatttgtcaataaaccatttctaagaaaaaaaaaaaaaa

SEQ ID NO: 406303 - DNA, 1000 bp, Homo Sapiens; identical to SEQ ID NO: 224673

SEQ ID NO: 406304 - DNA, 1000 bp, Homo Sapiens; identical to SEQ ID NO: 116256

SEQ ID NO: 406305 - DNA, 1000 bp, Homo Sapiens; identical to SEQ ID NO: 119038

SEQ ID NO: 406306 - DNA, 1000 bp, Homo Sapiens
agaactcattaagatgaggacaaatctcagactttgctcagagctcagaattcagtggggaccagagagcctgcaattggaaatatgagaaattctttgcccagagagctgccctaacagaacacttcatcctcactccaacgagaaatctacagatgcccagaggttttgaaaacttaccgtctgagctcaaatttgatcactcacaagaggattcatacaagtgggaaaccttagaaatgcactgagtgtgagagagctttctactaatgctcagcccttctcgttgtaagagaattcacaccggagaacaactttttaaatgccttcagtgtcagttgtgctgcagacagtatgaacatctcattggacctcagaaaacccaccctggggagaagccccagcaagtgtgaaaaaagcttctaacaaaactctgacttacccatcagagaagccatactggtgaaaaattgtatatttgtcttacgtatggcaaaagcattcattggagagccttacttgggtttgcacccaaaaaaaaaaacccaatctgaggaaagactgcaagtgtctgaatgaagagtgcttgtcaatgatcaactcttgtggtacatcagggaactcacataggtgaaaaaacccatacttaccttgagtctgagaaaacctttggtagaagctcctgtcttatcaggccccaaaaaacctgttctgcagtgagagatttaattgtgggtgagaatctatgtacatatgtatgagaagactgttctcatagttagttgactcatatggtagagaggactttacatgaaatcagtatgaaaatagttttttagatacccagaagcttgttctgggagaagctagggcgggtcagagtagacctgatgggtaactcaggtaaagatgcttttcttttatctgaactacttaatgattgctttacttttactttttaaaaaattcagaaatccaataaaggaaaggacggtaacct

SEQ ID NO: 406307 - DNA, 1000 bp, Homo Sapiens; identical to SEQ ID NO: 119039

SEQ ID NO: 406308 - DNA, 1000 bp, Homo Sapiens; identical to SEQ ID NO: 119040

SEQ ID NO: 406309 - DNA, 1000 bp, Homo Sapiens
ccccgtttgctttgtttaaggaggtgcctctgttctttgtggaggagtgaaatggagctttaagtgtgtgtgtgtgttatgtgtgtttgcacacacgcgtgtgttattgtagcaataacaaaaagtagccatctccttgttccagctgaaaacctgctgtgagagttttgacagagcactttattttcgtcaagtttcaagtctgagttcaaaaccagccctgatcccttatgaccaactgctactcgaccagtcgccactcagtggccacctggtgcccgtttagatttttgcttgggttttactggccacctctatagacgagagttgcaaagttgctttgagcagagagggaaagattaatttacactgctggccaccgaaggcaggtgtttcctgggtagtaatctcacggctcttgatctggaaacttcagagtacaaattggtggatggtggaaggcaggacacgtatctctgtctgacggaaaacagacctcggggctggcgtaaaccctgctgccaggccctctccccactgccccaaaccggcctagacacgaagaccaaagcagcctgcacagggcaaggcccccgcggaatcctgcagagcaaactcaggttaacttgggtccatgaccgtttgcattcgaaacacaatacactgcctcgttctctcagttagcagctgggcagcagcgcaccattcatcatttaggcttgtggtttgttgtttactctaccaatgttatgtcgaaactgcattgtaaaaagagaagaaagtggcaggttttccaggtccacggaaaggtttggcctgacgctggagtgcggtgatgaacttacgtgacaatgattgtattcctcagtagcactttaaacgccgaagacagccctgcagcaagcctgcacacgggcttgggtgggttcctttggagaagatgtggctggaacacaaacaatctttgaaagaaataaatgtgcacacagaacactaaaaa

SEQ ID NO: 406310 - DNA, 1000 bp, Homo Sapiens; identical to SEQ ID NO: 119041

SEQ ID NO: 406311 - DNA, 1000 bp, Homo Sapiens; identical to SEQ ID NO: 119042

SEQ ID NO: 406312 - DNA, 1000 bp, Homo Sapiens; identical to SEQ ID NO: 294101

SEQ ID NO: 406313 - DNA, 1000 bp, Homo Sapiens
aaaaagaaaaagtttcagaagagcagaagtaaacacaaaaaacataagtcctcttcttcctcatcttcctcctcctcctcctcttcctctactgagacttcagaaagcagtagtgagagtgagagtaacaataaagaaaaaaaaatacaaaggaagaaaagaaagaaaaacaagtgttcagggcataacaacagtgattctgaagagaaggacaagtctaagaagagaaagcttcatgaagaactttctagcagtcaccataaccgggaaaaagccaaggaaaagcccaggttcttaaaacacgagagttctagggaggacagcaaatggagccattctgattctgacaaaaagtccagaacccataaacatagcccagagaagagaggctctgaaagaaaggaggggagcagcagaagccacggcagggaggaaaggagccggagaagccggagcagaagtcctggtagttacaagcaaagggagacaaggaaacgggcacagcgaaatcctggtgaagagcaaagcagaagaaatgacagcagaagccatggcacagacttgtatagaggagaaaaaatgtacagagagcacccaggaggtacacatactaaagtgacacaaagagaatgaagcagaagtagagaagaaagactgtatgtgacaattacctgggaataaaaatatctccacttttttattgaatacctttagcaaggggtaaattatgtactgttgtctttctaataaaaaagctcaattttaatttttcatctctagactgtcaattcaagtacaaaactacatgagtactataagaatgaattttgcaaatatttgtaagtaagctattttggggctgtggaaatattttctgttggtaactgtttcttgttccccataccagataaaaaccgcatataactctgtgacattttctttgttctgaaacatcattaaaagaatgacagtacattgaaaaaaaaaaaaaaaaaaaaaa

SEQ ID NO: 406314 - DNA, 1000 bp, Homo Sapiens; identical to SEQ ID NO: 294102

SEQ ID NO: 406315 - DNA, 1000 bp, Homo Sapiens; identical to SEQ ID NO: 119043

SEQ ID NO: 406316 - DNA, 1000 bp, Homo Sapiens; identical to SEQ ID NO: 119044

SEQ ID NO: 406317 - DNA, 1000 bp, Homo Sapiens; identical to SEQ ID NO: 119046

SEQ ID NO: 406318 - DNA, 1000 bp, Homo Sapiens; identical to SEQ ID NO: 119047

SEQ ID NO: 406319 - DNA, 1000 bp, Homo Sapiens; identical to SEQ ID NO: 294105

SEQ ID NO: 406320 - DNA, 1000 bp, Homo Sapiens
catagaaagccttttttaagaagtctttttaagatttcttgaaggattttagaaatcatatatctcttctaaccccctgaaatcctgagtttaagtggcttgattaaatggctgatcaaaacttaaaaacacactaggtcaatgtttttcaagatacaactgaggaccagctgcttcagaatcatctggggactggctaaaattccaggttcctaagccctagtcccatctgatgaatcagaaactaggttggggcttaggaacgtgcattttaaacacttttccaaagtgattcttatccagactaatatttgagaagtactgtattaaatggcaaactcccaaaacactgcagcctcctgcatctggcccagggcctggcatttggtaggaatacaatgaatgtttgttaaacaaattaatccacagtttctgacacagtttagaatttcttggaccacattatgctattgtaatttaacaccatttctacgtcgggaaatctttacatttcagtctttttcattttcatggaggtttcattttaatggagcaggagagaaaagagagatctactttggtggtttctcaggtctcagggaaggtcttttataaactcaatggggaccaccttcctggagaggctgctcccttacagacctggtagtttggggaaaggaggaggagagcccttcaggtttgctgaaaagcattcagatgcacacccttcttggttggaactgaaagcttctgtttgaagagacatgagttctggaaggagcaaggccaccaggtccagagaacctggcatgcaatggacatggaagctgaaaattacttgggtattctctgatttctagctaatatgaaaataattttctttctagaaacacatttgcctatcttcttaccctgaaacagaaaataaatattgtgctttatgtggtagtgttgtacccattcttaaaaataaatcacatcatatatatgtgtaaaatat

SEQ ID NO: 406321 - DNA, 1000 bp, Homo Sapiens
caggattccatagctgcttcacttgtgcttgtggtcagcctgcatatgcccatgacacagtagtggaaactaagcaagaaagattggctcaggaaaaaccagtgggacaggacattccttatgcagccatgggaggattaactggtttcagctcgctggcggaaggctacatgcggttagatgacagtgggattggtgtaccttcagttgaatttttagaatctcccattacggcagtagacagcccattcctaaaagcatttcaagcatcatctagttcttctccagaaacgttaacagatgtaggtacaagtagtcaagtttcttcattaaggagacctgaagaggatgatatggctttctttgaaagacgataccaggaaaggatgaaaatggaaaaggctgctaagtggaaaggaaaagctccattgccatcagctacaaaaccttcatgaagactattggagaaattaaaaccatcatccaagtatctttttcatgtttatttaaatgtaataatacagtttatttttcctgaaattatttactttttttttttactgtataaatgtcttttgggatgtttccttaatttatttaaataactaaaaatgtctattacttttgtcaaaactcataatttactactttgtatgtacctttctttctcctgacaaatgaggttattttatatgagtctgtctgagagtacagtaaatgttttagtacataataatttaactgtttcaggtatttaaaaaattaaagatattatcaagggttttggacaaacatatgagccatttttttgtcattcaaaatagtaagttaaaaacaagagaacaaaagaaaaaaatagttaaaatcattaatttttttatttttcaaactttgtaatgttatgttttcaaataaaaactatctcaaaattttacaaccaaaaaaaaaaaaaaaaaaaaaaaaaaaaaacaaaaaaaaaaaaaaaaaaaaaaaaaaaaaa

SEQ ID NO: 406322 - DNA, 1000 bp, Homo Sapiens; identical to SEQ ID NO: 294108

SEQ ID NO: 406323 - DNA, 1000 bp, Homo Sapiens; identical to SEQ ID NO: 224679

SEQ ID NO: 406324 - DNA, 1000 bp, Homo Sapiens; identical to SEQ ID NO: 294110

SEQ ID NO: 406325 - DNA, 1000 bp, Homo Sapiens; identical to SEQ ID NO: 294111

SEQ ID NO: 406326 - DNA, 1000 bp, Homo Sapiens; identical to SEQ ID NO: 224681

SEQ ID NO: 406327 - DNA, 1000 bp, Homo Sapiens
ccacaatgatgtcagccacctcagagaactgctgcaaagatctgacccctcagtccccaagattgtggcatttgaaactgtccattcaatggatggggcggtgtgcccactggaagagctgtgtgatgtggcccatgagtttggagcaatcaccttcgtggatgaggtccacgcagtggggctttatggggctcgaggcggagggattggggatcgggatggagtcatgccaaaaatggacatcatttctggaacacttggcaaagcctttggttgtgttggagggtacatcgccagcacgagttctctgattgacaccgtacggtcctatgctgctggcttcatcttcaccacctctctgccacccatgctgctggctggagccctggagtctgtgcggatcctgaagagcgctgagggacgggtgcttcgccgccagcaccagcgcaacgtcaaactcatgagacagatgctaatggatgccggcctccctgttgtccactgccccagccacatcatccctgtgcgggttgcagatgctgctaaaaacacagaagtctgtgatgaactaatgagcagacataacatctacgtgcaagcaatcaattaccctacggtgccccggggagaagagctcctacggattgcccccacccctcaccacacaccccagatgatgaactacttccttgagaatctgctagtcacatggaagcaagtggggctggaactgaagcctcattcctcagctgagtgcaacttctgcaggaggccactgcattttgaagtgatgagtgaaagagagaagtcctatttctcaggcttgagcaagttggtatctgctcaggcctgagcatgacctcaattatttcacttaaccccaggccattatcatatccagatggtcttcagagttgtctttatatgtgaattaagttatattaaattttaatctatagtaaaaacatagtcctggaaataaattcttgcttaaatggtg

SEQ ID NO: 406328 - DNA, 1000 bp, Homo Sapiens; identical to SEQ ID NO: 224683

SEQ ID NO: 406329 - DNA, 1000 bp, Homo Sapiens; identical to SEQ ID NO: 224684

SEQ ID NO: 406330 - DNA, 783 bp, Homo Sapiens; identical to SEQ ID NO: 294120

SEQ ID NO: 406331 - DNA, 1000 bp, Homo Sapiens
gttgcacattgttgaagcagaggcaatgaattacgaaggcagtccaattaaagtaacactggcaactttgaaaatgtctgtacagccaacggtttcccttgggggctttgaaataacaccaccagtggtcttaaggttgaagtgtggttcagggccagtgcatattagtggacagcacttagtagctgtggaggaagatgcagagtcagaagatgaagaggaggaggatgtgaaactcttaagtatatctggaaagcggtctgcccctggaggtggtagcaaggttccacagaaaaaagtaaaacttgctgctgatgaagatgatgacgatgatgatgaagaggatgatgatgaagatgatgatgatgatgattttgatgatgaggaagctgaagaaaaagcgccagtgaagaaaggacaagaatccttcaagaaacaggaaaaaactcctaaaacaccaaaaggacctagttctgtagaagacattaaagcaaaaatgcaagcaagtatagaaaaaggtggttctcttcccaaagtggaagccaaattcatcaattatgtgaagaattgcttccggatgactgaccaagaggctattcaagatctctggcagtggaggaagtctctttaagaaaatagtttaaacaatttgttaaaaaattttccgtcttatttcatttctgtaacagttgatatctggctgtcctttttataatgcagagtgagaactttccctaccgtgtttgataaatgttgtccaggttctattgccaagaatgtgttgtccaaaatgcctgtttagtttttaaagatggaactccaccctttgcttggttttaagtatgtatggaatgttatgataggacatagtagtagcggtggtcagacatggaaatggtggggagacaaaaatatacatgtgaaataaaactcagtattttaataaagtaaaaaaaaaaaaaaaaaaaaaaaaaaaaaaaaaaaaaaaaaaaaaaaaaaa

SEQ ID NO: 406332 - DNA, 1000 bp, Homo Sapiens; identical to SEQ ID NO: 224685

SEQ ID NO: 406333 - DNA, 1000 bp, Homo Sapiens; identical to SEQ ID NO: 115102

SEQ ID NO: 406334 - DNA, 1000 bp, Homo Sapiens; identical to SEQ ID NO: 119052

SEQ ID NO: 406335 - DNA, 1000 bp, Homo Sapiens; identical to SEQ ID NO: 294123

SEQ ID NO: 406336 - DNA, 1000 bp, Homo Sapiens; identical to SEQ ID NO: 397612

SEQ ID NO: 406337 - DNA, 1000 bp, Homo Sapiens; identical to SEQ ID NO: 224686

SEQ ID NO: 406338 - DNA, 1000 bp, Homo Sapiens; identical to SEQ ID NO: 294129

SEQ ID NO: 406339 - DNA, 1000 bp, Homo Sapiens; identical to SEQ ID NO: 294130

SEQ ID NO: 406340 - DNA, 1000 bp, Homo Sapiens; identical to SEQ ID NO: 119053

SEQ ID NO: 406341 - DNA, 1000 bp, Homo Sapiens
gtcacagctggcctgggaactgctgggcgagccccgcgcggccacgggggacctggcgtgccgcttcctgcagctgctgcaggcatccgggcggggcgcctcggcccacctcgtggtgctcatcgccctcgagcgccggcgcgcggtgcgtcttccgcacggccggccgctgcccgcgcgtgccctcgccgccctgggctggctgctggcactgctgctggcgctgcccccggccttcgtggtgcgcggggactccccctcgccgctgccgccgccgccgccgccaacgtccctgcagccaggcgcgcccccggccgcccgcgcctggccgggggagcgtcgctgccacgggatcttcgcgcccctgccgcgctggcacctgcaggtctacgcgttctacgaggccgtcgcgggcttcgtcgcgcctgttacggtcctgggcgtcgcttgcggccacctactctccgtctggtggcggcaccggccgcaggcccccgcggctgcagcgccctggtcggcgagcccaggtcgagcccctgcgcccagcgcgctgccccgcgccaaggtgcagagcctgaagatgagcctgctgctggcgctgctgttcgtgggctgcgagctgccctactttgccgcccggctggcggccgcgtggtcgtccgggcccgcgggagactgggagggagagggcctgtcggcggcgctgcgcgtggtggcgatggccaacagcgctctcaatcccttcgtctacctcttcttccaggcgggcgactgccggctccggcgacagctgcggaagcggctgggctctctgtgctgcgcgccgcagggaggcgcggaggacgaggaggggccccggggccaccaggcgctctaccgccaacgctggccccaccctcattatcaccatgctcggcgggaaccgctggacgagggcggcttgcgcccaccccctccgcgccccagacccctgccttgctcctgcgaaagtgccttctag

SEQ ID NO: 406342 - DNA, 1000 bp, Homo Sapiens; identical to SEQ ID NO: 116952

SEQ ID NO: 406343 - DNA, 1000 bp, Homo Sapiens; identical to SEQ ID NO: 119054

SEQ ID NO: 406344 - DNA, 1000 bp, Homo Sapiens; identical to SEQ ID NO: 119054

SEQ ID NO: 406345 - DNA, 1000 bp, Homo Sapiens; identical to SEQ ID NO: 294138

SEQ ID NO: 406346 - DNA, 1000 bp, Homo Sapiens
gatctaaatgtgactcaggccagttgtgccataagccccagccagactctgatccgcaagtcacaggcaaggcacgtgggcagcagagggggcccgtccgaaaggagccatgccaggaacgcccatttcaggaggacagcgagtttccatgaagccaggcaggcccggccgttccgagagaggagcatgtccactctgactccacggcaggcccctgcctacagctctaggacgcggacctgcgagcaggcagaggacagatttaggcctcagagtcgaggtgcccacctgtttcctgaaaaactggagcatttccaagaggcaagtggaacccgtggtccattaaaccctctccctaaatcctacactttggggcagcccttgaggaaaccagaccttggggatcaccaggcaggattagtggccggaattgagagaacagagccccacagagctcgtcggggaccgtcccccagtcacaagagtgtctcaaggaagcagtcttctcccatatcccccaaagataactaccagagggtcagttctctgagcccttctcagtgtagaaaagacaagtgtcaaagcttccccactcaccctgagtttgccttctatgacaatacgtcgtttggcctcactgaggctgagcagaggatgctggacctcccaggatattttgggtcaaatgaagaggatgaaaccacaagtacacttagcgtggagaagctggtgatctagactgagaatcagcctgagctttacacagctggggtctgctactcgcgttttgtagacttttgtgtaactatttgtaccgtaggacagaatgtgaggaggaagtaacacacagaggaggatgtgtgtgtatgcatgtgtttgaattcacaaggaagaaattatttatcttgagctttttcctttgttattcaatttctattgatttattagtaataacaatgataataaaatgtaaatgagcaaaaaaaaaaaaaaaaaaaaa

SEQ ID NO: 406347 - DNA, 1000 bp, Homo Sapiens; identical to SEQ ID NO: 294139

SEQ ID NO: 406348 - DNA, 1000 bp, Homo Sapiens
gcctgagcctctcacaggctggctgtgggccagtttcatctgctttcctgttgggggtcccgggcctctgctgtccttgacccactggtgttctgtgcaaggcttcttcccattcaccaagtgcacaccttgcatctgccgctcggcatgcaccagttccacacaccatcccattttacagacaaggacgctgaggcctgcagcagcagtgtgacttgcttaaggtccagtgagtgacctcattccccagaaaaggctcctcccacaccagagtacagcctgggtagggggaaaatcagttctttcagctaccacccatccaacctttgggcctatgtgaaaagaaaggaactaagctgggtgtgttctgtctggacctggggaggcccctgaaggcaaagagggaaactgtcccagctgttctgtcctaggggagggggacatagccctagcaggagctcccagcccctcttggcactctgacacacaagtacacccatctggggcccgctttgccacgaagagctgggcaggcctgcagggtgtggggagggaggacacaacctcaagaaaggaagcgtgaaccccagggaacagcgggtcccttccctcctcagacacaagccacctcagcttgtggctcttggcccccagccccaccaacccacctgttcatttattcaacagacaatgacagctgatatttattggacatttgcaccatgccaagcattcggcttggattatcccatttgtttctcacagccggtatttattgtctgctcctctgtgccaggtgctgtgctctgggcaggggcactgcatgggctgcctgccctggtggagcttgtggtctgatgggtgaggctgacccaagcccaccccattgccaacagggccagggcaagagtacacacaggggcctcataccatatgtctaaatatttaaaagttatcaatcaagctaacaactgttaaataaaatatgttctattctcct

SEQ ID NO: 406349 - DNA, 1000 bp, Homo Sapiens
aagatcctggagaagcctagtgttgtgtcaagacgccgatggacccatcacagtttaatccaacctacatcccagggtctccacaaatgctcaccgaagaaaattcccgggacgattcaggggcctctcaaatctcctccgagacgttgataaagaaccttagtaacttgactatcaacgctagtagcgaatctgtttcccctctatcggaagctttactccgtcgagagtctgtaggagcagcagtcctcagggaaatcgaagatgagtggctttacagcaggagaggagtaagaacattgctgtctgtgcagagagaaaagatggcaagattgagatacatgttactcggcggagttcgtacgcatgaaagaagaccaacaaacaaggagcctaagggagttaagaaggaatcaagaccattcaaatgtccctgcagtttctgcgtgtctaatggatgggatccttctgagaatgctagaatagggaatcaagacaccaagccacttcagccataaatcttattcttgcacctttttttcttgctagtaattttatatagcaggttgagaaagctactctatgctagtatagactatacaccaataattttgataatgagttctaggatgtatttttcttgtatctttttcttcctactatgatactagtaattcataagggatctgtgtaatctgaatgtatttgaataactttagctctactgtttgatttgacccaaagaagccaagatgatataagtattcccatgtgtcttagaagcccaaagtcagtgagatgaaacccaacatcaagaaattgaagcaaagttacttatggataaagaaagcattaggtagttgggctatagcataattagattttctggctttcaaaaatttggattgcaatcacagcaaactttgttatttttacagttttcagtacaaaagtgtttatatagaaacaataaagttgacatttgagtaccttttaaaaa

SEQ ID NO: 406350 - DNA, 1000 bp, Homo Sapiens
gggcccagggtgggtgtccctgggagccctggaaatgtgcatatgtgcatgtgtctgccggggcctccctctgctgcctgctgggaccctggccactcatttttctcctccttgggagctgggctcttctgccctggctctgcacataagtgttagccagcagctccagaaaaatcccgattcccgggatctgccacgagtcactcctactccaccctgatggccagcagaggaagggccactcttctcatgggcacagccatcctttgccgggggggcatccagcccgggtggccacccctccttatctctgggtggtgcacatgcccttctttccccactccctgccacgagccactgcacaggaggctatctgtagccccaagctgcctttctgttggacaccaactttagtcttgggctgcaagccagcccagctgaggcgaagtggactccaggcagggaatgggttgcccaattctggtccctttcctttgctcagccccctctgttctgctgattgtagggatgtgcagggctgggagttggcactccccccgagtggggaggtgacagcttgtcacagtagccaggcttgggtgggttcagcactagctcgggacggtgtgtcacacgtctatagtaaaccagttctctgggaggggaaaaaagccctgatttattgcatttgggcagcttctgtggtgtaaattctcccagcagtgtcccatgtcatgctgccagcatcactgaatgcactgaactcagagttgggaagagatgcacataatcgctctcccggcacacctcatgcctcttccctgcctccccattcccctggctgcacttccttgccttctatggggttgaaatattgaagtctcaactgtctctgttcacaagagccaccaaaagttaggggacttcagtcctagcccccagatggccgccctgaagctctctgggctcctcagcaataaagcactttattttcaaaaaa

SEQ ID NO: 406351 - DNA, 1000 bp, Homo Sapiens
agattttttggagcctttgtctggactttacacatgtactctttcttataagactgttaaagcagaaactcaagaagaaaaaacagtcaaaaagagatatgactttatggtctttgcctatcgggaacctgattattcatatcagatggctgtacgttttaccacaaggtcttgtatagggagatacaatgatgtattctttagagtgctgaagaaaatcttggatagtctaatttctgatttgtcatgccatgtcatagagccatcatataaatgccattctgttgaaattccagaacatggcctcatacatgagctatttatagcatttcaagttaatccttttgcgccggggtggaaaggtgcttgcaatggatctgttgactgtgaagataccactaatcataatatcctccaggcaagagatcgaatagaagacttttttcggagccaagcatatattttctaccataactttaataaaactctaccagcaatgcattttgtggaccacagtttgcaagtagtacgtctggatagctgtcgaccaggctttggaaaaaatgaacgtctacacagtaattgcgctagctgttgtgtggtttgtagtcctgcgacttttagtcctgatgttaatgtaacttgtcagacctgcgtttccgtccttacctatggagctaaatcttgcccacaaacttcaaacaaaaatcagcaatatgaagattagaggtgaaagcattgttacttacttgtggaagtcggggacataagatgattttcacatcccagagcatcatagatagttccattaagtaaaatcagtaagaccaaaccactggaaaacatgcattttggaaactttaaaataaatggttaacatggcatttctaagaaggcatttaatccagtatctctagtgtacaaaggaaacttgaagttttaatggattatttttaatgaaatgttttattgtttacaaacggtatgttgctgtgtacct

SEQ ID NO: 406352 - DNA, 1000 bp, Homo Sapiens; identical to SEQ ID NO: 294143

SEQ ID NO: 406353 - DNA, 1000 bp, Homo Sapiens; identical to SEQ ID NO: 294144

SEQ ID NO: 406354 - DNA, 1000 bp, Homo Sapiens; identical to SEQ ID NO: 294146

SEQ ID NO: 406355 - DNA, 1000 bp, Homo Sapiens; identical to SEQ ID NO: 294147

SEQ ID NO: 406356 - DNA, 1000 bp, Homo Sapiens
ctgagtggggagatggctgtcaagcgggagcagctcaagaatggcggcctgggcgtagtctccgacgccatctttgaactgggcaagtcactctctgcctttaacctggatgacacggaagtggctctgctgcaggctgtgctgctaatgtcaacagaccgctcgggcctgctgtgtgtggacaagatcgagaagagtcaggaggcgtacctgctggcgttcgagcactacgtcaaccaccgcaaacacaacattccgcacttctggcccaagctgctgatgaaggtgactgacctccgcatgatcggggcctgccacgccagccgcttcctccacatgaaagtcgagtgccccaccgaactcttccccccactcttcctcgaggtctttgaggatcaggaagtctaaagcctcaggcggccagagggtgtgcggagctggtggggaggagcctggagagaaggggcagagctgggggctgagggagacccccccacaccccttctctccttcctctcgtccttggatagattcagctcccacacacacacccgcactgcccaggtccctcctcagacctccagccctgggacagggcaaacaactgaacttgctatggaaaggacagtgtgggaggctgggggagctgtgtcctgcagttcccaggaccccatcctctcagaaggtaggggaagggcgggaggattgagaagggacaagccaccttgaccgtaggggaaggaggaatgtgggctgggggaagatgccctcaactcaccccctacacacacatgagagagagcccccacccagttccttggcctaggtctcccctccaggctgagggcctctctacttccccagatgcctgggtgcaaagaacggcttggcttggctcctcctctggaggttaaaatttatagtcattctaactgcactttggaaaccaagcaaggggagaagacaaatgaagaaaaactagacagagaaaaaaaaaaaa

SEQ ID NO: 406357 - DNA, 1000 bp, Homo Sapiens; identical to SEQ ID NO: 119057

SEQ ID NO: 406358 - DNA, 1000 bp, Homo Sapiens
gatgatgactgtgtccccgcccccagctcaccgccatcgccgtcgaggctctcccacacgctgtgctcactgcccagtagcttgggctcctgacactgatgacgagaagcctcatcagtacccagccatctgctcctaccactgggatgtccctgaggactgggaaggcttccaacacactcaggggacctgggttccctggtctcaggatgccccagagtcccctccccagaccatccgcttccagcctgggcaacagagcgagactccatctcaaaaaaaaaaaaaaaaaaaaaagaagagaaatattggggcccccctcaagaggtacctcactgtaacatcacagctctctgtgacctcactcctttgattaactcaccatgtcaccagtgaggagactaagttcagagaagctaagggtcttgctcatggttacacagacactgaggatcaagctcatggcctcagatgctccatcccattgctgcagagccagcctgacccaccagaacctcccaccttccccagttcaccatgtgaactcagaaactgagaaacagagaaactcaggccctgcctttctgctacacaattgggatcatatgcacatgcacacacataccacttgagaacaagcagctgtgtgcgtgagcccaggctgagggagctggacttcaccttccactctagacagattcctggaatgtgagcagacggaccgtttacaaatggccctacttctctcattcaactaacgttactgatcattttcaatggattccattcagtggaatctgaatctactctgcatctactctgtgtttggaggctggatgggatatgatcactggcctttctttctgctgagtggttcactgtgtaaacaaatggcttgcagtctccagggcaccacagaccccagtgatgcacctgttttaagtcaaacactctttttggtatattaacaattacatgtattttgtgctttgttaatttc

SEQ ID NO: 406359 - DNA, 1000 bp, Homo Sapiens
tcagaacattttatagaaaacaataatacaaaagacacaactgcaagaaatgcctttgaagaaaatgtttttatggaaaacactaacatgccagaaggaaccatctctgaaaacacaaactacaatcatcctcctgaggcagattccgctgggactgcattcaacttagggccaactgttaaacaaactgagacaaaatgggaatacaacaacgtgggcactgacctgtcccccgagcccaaaagcttcaattacccattgctctcgtccccaggtgatcagtttgaaattcagctaacccagcagctgcagtccgttatccccaacaacaatgtgagaaggctcattgctcatgttatccggaccttgaagatggactgctctggggcccatgtgcaagtgacctgtgccaagctcgtctccaggacaggccacctgatgaagcttctcagtgggcagcaggaagtaaaggcatccaagatagaatgggatacggaccaatggaagactgagaactacattaatgagagcacagaagcccagagtgaacagaaagagaagtcgcttgagttcacaaaagaacttccaggatatggctataccaaaaaactcatcttggcgttaattgtgactggaatactaacgattttgattatacttctctgcctcattgagatctgttgtcaccgaaggtcattacaagaagatgaagaaggattctcaagggacagcgaagccccaacggaggaggagagtgaagccctgccataggaggagaacccagcccacctcaggcctcctgcaaaaatacatagcgtaaacaacggccatcaaaaaagcaggactgaagccagcggcccacacatccacagaggcagcgggcagagcaagcacagggccatcgttcctgcccttgtttcccagtctaattagtcacccagacctgaaaacatatgctcagggggtggagattttacaattaaataacattgtttttggt

SEQ ID NO: 406360 - DNA, 1000 bp, Homo Sapiens
cgtggcgtggcgcagtgccttcgcgacctggtggccatgcagtgggccgacgcggccggggaggcggtgcccgaggggcccgatggcggggggccttggctggaggatgagccagggaggggagcccagggggagaacgagagggtgaggggcctggagacaggcgactggggaggggctccgaaagaaggaagtatttggaggggagcccagatggagaaggagtgggcaagggcactggaaaccagagactggggcggggctcagttcgaaggtgagaaggggagggcactgcagatcagagattggagagggggtcggttggagaatcagaagccgaggggactggaagggggtgtcttgagagggtcgaagttagagaaagggcacctgagagggccagagattagagactggagggggccccagttggagggtgagaaagattggggactggaaggttatgtctggagggggtcccagttggaggaccaggcgctaagaggattggaagggtatacctggagggtggcccagctggaagatcgcaggagtaccaccgacctgagggggacccagtttgactatgagaggggaaagggagaaagtacagaagacagatgaaggagaggaggtaagcgagaaaaaatggaaaggggagccggaaatggaggagagaggacaagcaaagagacagaaatgaagacatgaggaaaagctgggggaagcaggagaggaagggacgggatgtaggagggggaagaaaaatcggagatgagacaaaagaaatgtgtgggagacgggtagagacgaaatgcaaggggcgtggttttggtttttctccaagacctggagacatcgacccccatcgccttctgaagagagagggagggcgggcactgggggtcaggagagtctccagcaggggaggggaattgtttggactattgttcttcaggattggaataaaacaatcttattttggaaaaaaaaaaaaaaa

SEQ ID NO: 406361 - DNA, 1000 bp, Homo Sapiens; identical to SEQ ID NO: 294151

SEQ ID NO: 406362 - DNA, 792 bp, Homo Sapiens
ggtcgccgggtccttgcgggcaccacagagcggggtggcgtccgctccctcgagtcctcggtgccagggaattcaccgctcaccaccccctgccccgccttgggtcctgctcggggaccaaatcactggaaggcagtggcgggaaacgggcgcctgtgccggagagttgagggaacatgagccatttgcagagcttattgttagacaccctcttgggaaccaagcatgtggacagtgcagccctcatcaaaatccaggagcggagcttgtgtgtagcatcaccaggtttcaatgtaacgcccagtgatgtccgaacactggtgaatggatttgccaagaaccctttgcaagcccgaagagaaggactgtatttcaagggaaaagattacagatgtgtccgggcagatgaatattctctttatgccaaaaatgagaacactggtgtggttgtcgtgaagacccatctgtatcttctggtagcaacttacactgagggcatgtatcctagcatctgtgtggaagccacagagagcctgggagactacctaagaaaaaaaggaagttaagtcatcagaggcccatgaaagacaattttattattttagaagaaaattgaagagcctaaagaaaaaatattttatggttgaaaaaacactagacagaaggcactaaaaaagaagaatgaattaagggagcaatttttattacttccagagatcctcttctttcactggaattacttgatcaactgttttttaataagtgttggtcatcgacaaaaaaaaaaaaaaa

SEQ ID NO: 406363 - DNA, 1000 bp, Homo Sapiens; identical to SEQ ID NO: 224690

SEQ ID NO: 406364 - DNA, 1000 bp, Homo Sapiens
aggacgcgcacctgccgcggctggtgagccgcacgccaggcaccgcacccaaatacgaccactcgtacctgggcagcgcgcgggagcgccaggcgcggcccgagggcgccagccgcggtggcagcctggagacgccatccaagcggagcgcgcagctcggcccgcgcagcgcctcctactacgcttggtcgccgcccggcacctacaaggccggctcgtcgcaggacgaccaggaggacgcgtccgacgacgcgctgccgccctacagcgagctggagctgacccgcggcccgtcctaccgcggccgcgacctgccctaccacagcaactcggagaagaagaggaaaaaggagcccgccaagaaaaccaatgactttccaaccaggatgtcccttgtggtctgatgttgtcaacatttctctggataatgagaaatcagacatggactacggggacaagacacaaatctaagaaccagcaggcccaggaccttctctggccatcaccttggaagatttgctgatctctgctttggcaagggatggcaggcagcctttaagggaggctgatttcaaacctctgtgcccatctaactagtttgagaagcttaccaagaaagcaagaatgtgtgagaacattcctacatacagagtttctcaactatagcgtttatcctgcccagcctcctcccttaacagaaccaggactccatttgcaattctgaaagagagttagctctggactgctaaactccagaaattgcctatgcctacaatatgcttttctatacctcctgtgctatacttagagacagaagaatttattactactattagaaggccttcttctgacaagggaagatagcttcaagtcaaaatataccttttatccccatcactttacagtcactagtcaatgactgttgttacactaaaatcaaaaggcctttggtgagctcagtgacagtgacctctgggacaatcacagaaatgacttcact

SEQ ID NO: 406365 - DNA, 1000 bp, Homo Sapiens
aaatactgttttgttaattgtagagtggataactcaccaattctgtgccatggcattgacattgacactttgtgctgctagtattggacatataaccctgggaagcctggcttttgtcattcgagaccagtgcatcctccagttggtgatgtctgcaccatgctttgtcttctttctgttctcaaggtggctggcagagtctgctcggtggctcattatcaacaacaaaccagaagagggcttaaaggaacttagaaaagctgcacacaggaatggaatgaagaatgctgaagacatcctaaccatggaggttttgaaatccaccatgaagcaagaactggaggcagcacagaaaaagcattctctttgtgaattgctccgcatacccaacatatgtaaaagaatctgtttcctgtcctttgtgagatttgcaagtaccatccctttttggggccttactttgcacctccagcatctgggaaacaatgttttcctgttgcagactctctttggtgcagtcaccctcctggccaattgtgttgcaccttgggcactgaatcacatgagccgtcgactaagccagatgcttctcatgttcctactggcaacctgccttctggccatcatatttgtgcctcaagaaatgcagaccctgcgtgtggttttggcaaccctgggtgtgggagctgcttctcttggcattacctgttctactgcccaagaaaatgaactaattccttccataatcaggggaagagctactggaatcactggaaactttgctaatattgggggagccctggcttccctcgtgatgatcctaagcatatattctcgacccctgccctggatcatctatggagtctttgccatcctctctggccttgttgtcctcctccttcctgaaaccaggaaccagcctcttcttgacagcatccaggatgtggaaaatgagggagtaaatagcctagctgcccctcagaggagctctgtgctatag

SEQ ID NO: 406366 - DNA, 1000 bp, Homo Sapiens; identical to SEQ ID NO: 119059

SEQ ID NO: 406367 - DNA, 1000 bp, Homo Sapiens; identical to SEQ ID NO: 294156

SEQ ID NO: 406368 - DNA, 1000 bp, Homo Sapiens; identical to SEQ ID NO: 294156

SEQ ID NO: 406369 - DNA, 1000 bp, Homo Sapiens; identical to SEQ ID NO: 224692

SEQ ID NO: 406370 - DNA, 1000 bp, Homo Sapiens; identical to SEQ ID NO: 294158

SEQ ID NO: 406371 - DNA, 1000 bp, Homo Sapiens; identical to SEQ ID NO: 294159

SEQ ID NO: 406372 - DNA, 1000 bp, Homo Sapiens; identical to SEQ ID NO: 224693

SEQ ID NO: 406373 - DNA, 1000 bp, Homo Sapiens; identical to SEQ ID NO: 119060

SEQ ID NO: 406374 - DNA, 1000 bp, Homo Sapiens; identical to SEQ ID NO: 224694

SEQ ID NO: 406375 - DNA, 1000 bp, Homo Sapiens; identical to SEQ ID NO: 294164

SEQ ID NO: 406376 - DNA, 1000 bp, Homo Sapiens; identical to SEQ ID NO: 294165

SEQ ID NO: 406377 - DNA, 1000 bp, Homo Sapiens; identical to SEQ ID NO: 294166

SEQ ID NO: 406378 - DNA, 1000 bp, Homo Sapiens; identical to SEQ ID NO: 224695

SEQ ID NO: 406379 - DNA, 1000 bp, Homo Sapiens
ggctgtgctgaaggttggtgggacaagtgatgttgaagtgaatgaaaagaaagacagagttacagatgcccttaatgctacaagagctgctgttgaagaaggcattgttttgggagggggttgtgccctccttcgatgcattccagccttggactcattgactccagctaatgaagatcaaaaaattggtatagaaattattaaaagaacactcaaaattccagcaatgaccattgctaagaatgcaggtgttgaaggatctttgatagttgagaaaattatgcaaagttcctcagaagttggttatgatgctatggctggagattttgtgaatatggtggaaaaaggaatcattgacccaacaaaggttgtgagaactgctttattggatgctgctggtgtggcctctctgttaactacagcagaagttgtagtcacagaaattcctaaagaagagaaggaccctggaatgggtgcaatgggtggaatgggaggtggtatgggaggtggcatgttctaactcctagactagtgctttacctttattaatgaactgtgacaggaagcccaaggcagtgttcctcaccaataacttcagagaagtcagttggagaaaatgaagaaaaaggctggctgaaaatcactataaccatcagttactggtttcagttgacaaaatatataatggtttactgctgtcattgtccatgcctacagataatttattttgtatttttgaataaaaaacatttgtacattcctgatactgggtacaagagccatgtaccagtgtactgctttcaacttaaatcactgaggcatttttactactattctgttaaaatcaggattttagtgcttgccaccaccagatgagaagttaagcagcctttctgtggagagtgagaataattgtgtacaaagtagagaagtatccaattatgtgacaacctttgtgtaataaaaatttgtttaaagttaaaaaaaaaaaaaaaaaaaa

SEQ ID NO: 406380 - DNA, 1000 bp, Homo Sapiens
aggagagaagccctatgaatgcagtcaatgtggaaaatttttatgtacgaaatcagccctcattgcacatcagataactcatagaggaaagaagtcttatgaatgtaatgaatgtgggaaatttttctgccataagtcaacactcactatacatcagagaacacacacaggagagaaacatggtgtgtttaataaatgtggtagaatctccattgtgaagtcaaactgcagtcagtgtaagagaatgaacacaaaggagaatctttatgagtgtagtgaacatgggcatgccgtcagcaaaaactcacacctcattgtacatcagagaactatatgggagagaccatatgaatgcaatgaatgtgggagaacctactgcaggaagtcagccctgactcaccatcagagaacacacacaggacagagaccctatgagtgtaatgaatgtgggaaaaccttctgtcagaagttctcctttgttgaacatcagcgaactcacactggggagaaaccatatgaatgtaatgaatgtgggaaatccttctgccataagtcagccttcagagtccatagaagaattcacacaggagagaaaccatatgaatgtaatcaatgtgggaaaacctaccgtcgcctgtggactctcactgaacatcagaaaatacacacaggagagaaaccttatgaatgtaacaaatgtgagaaaacatttcgccacaaatcaaactttcttttacatcagaaatcccacaaggaataagttccaacaaagtaataaattccaacaaagcaacaaatcaaataacttacacaatgctaaactgtgagtatgtatagaggagtaaaatcttataaatgtaatgaatatggaaaatttttctgccataagtcaaccctcaatgtaacatcagagaaatcatgtaggaaagaaataatttgtttaataaatgtattattcattgtgaactatgaaaatattcaacagcaaaaaaaaaaaaaa

SEQ ID NO: 406381 - DNA, 1000 bp, Homo Sapiens
tggacctccatgcagactcgctggatgggacacggtcgggtcctggactgcccacctcagacaccaaagcttctttcgaggcacatgtcagagaaaaattcaatcgaatggttgaggctgtggataggaccattgagaagagaattgataaactcaccaaagagttggcccagaaaactgcggaactgttggaagttcgggcagcttttgtgcagctgactcagaaaaagcaggaagttcagagacgagagcgggccttaaacagacaggtggacgtggccgtggaaatgatagctgtactgaggcaacgcctgacggaatctgaggaggagcttcttaggaaagaagaagaagttgtcacattcaaccatttcctggaagcggcagctgagaaggaggttcaagggaaagcccggctccaggactttattgagaatctgttacagcgggtagaactggcggagaagcagcttgagtactatcagagccagcaggcctctggctttgtccgtgatctcagcgggcacgtgagctggaaaggtgctggcgaagctcgcctggtgtgccaaaatgacctggaattggaggagtctgcgattgtggaataatgaacttcgaatgatgtgattctggatgaggacttggatcaagagaatcgcaaattaattgtgccagagaagctttcattcattcaacaaatatttattaagcatgttttacactccaggaactttacaagaaacttgggctacttggtgactttactcaccaggagtgggttcagactcctgatggatgagctccaggtcctccctaacaagactgcagacttcctgagggcacagcccacccctcatgctttgagtttctcatataacccatcatagcaagtagaagatgcttcagaacatttgtccctatgagatagagtcatattctatttagcttgggacatggcaggtactcagttgttaaataaaaaatagttattgagtaattt

SEQ ID NO: 406382 - DNA, 1000 bp, Homo Sapiens; identical to SEQ ID NO: 294169

SEQ ID NO: 406383 - DNA, 1000 bp, Homo Sapiens; identical to SEQ ID NO: 119062

SEQ ID NO: 406384 - DNA, 1000 bp, Homo Sapiens
ccccaatgggcttgaggaaagccctccaaatgagctttctaaggagagacccgctgatgaccccactgcatcacacatcaatccccagaaggaccctacagctgaccccagtgagccctctgcagacagctatctaactcttagcacagctccgactatcgccaaagcccccttctatgtcaatggggaggctgctgagagaagcagttatgagaacaaggaggtggaaggagagttggagatgggtcctgccggatccagctggtgtccagactccagggaacaccgccccaggaaacacctctccctgaggctttgcaatagggatcctgagcctggaggggctacagagaaaatgaagacccaccagctagagaatgggctctccagatctgtgtcccaagagacagaacctgagagggaagcaggacttcagaacacacacacacacacacacacacacacacacacacacgatcatcaacacatacttagcctttttagatccataaagtccagaaggcagtagggatcccaagacgacctcacccaaagggctccctggctctcctctgatggaggggcactgcttgcttggcccggtcccctccgtgccagttcccaggcgcactctactccagcccttctccctccctcccttcctccctctcctggcccaccctgctcttccctcgccctgcaaattaggtgggtgtggcaagggcaccgcctggtcccaagtgtccctctgtacccacacccacccactcacttgtaagctccttgatgagcaaacccctaaggcccccagctcagactcagcaggcattcaggtcaactcaggcagactggctaaggaccagcccagggcaattttgcagaaatgatcatttgcacagaatgggtttccttcacagggagaaacttgcctctgaaagctattttctgatcaagaaaaggcccactttttaaaaagtgaaacaagtttgcagatacggtt

SEQ ID NO: 406385 - DNA, 1000 bp, Homo Sapiens; identical to SEQ ID NO: 115347

SEQ ID NO: 406386 - DNA, 1000 bp, Homo Sapiens
gcagcaaaacaattgagatgctaacagggaggattacagtgtttacagaacaaccttcagcgccgacctggaatggtaactttttccctcctcagatgaccttacttccactgcctccacaaagaccttcttaccatgacctggttttccagtgtggttctgacagcactactgataaccaaactggagtcaggctggtatgcaatggcgtgatctcggctcaccacaacctccgcctctggggttcaagtgattctcctgcctcagcctcccgagtagctgggattacaggtatgtttctataaaacctgataaccgaaaattggccaacggaacaaatgtcctcggcttactgattgacactttattaaaggaaggctttcatttggtcagcactagaacagtatcttctgaagacaaaactgaatgctatagctttgaaaggataaaaagccctgaagtgctcatcacgaatgaaacaccaaaaccagagactatcatcataccagagcaatctcagataaagaaatgaagttgtctatcctcttttaaagagaaattgccatttttcttgtttcattacgtatttagggcatacatgttagccaaatctacactcagcctaactcttggcttcatctgctgccatgccgtctctgggcaaccaggccccaactgtgcttaagccataatgcctgctgctctctagacaactccatgtacttggtgctttggtatatgttctaccttcaatacatctttccctttctcttcttcatgaatgcttatgagccgagattgcgccactgcacactagcttgggtgacagaggaagactgtctcaaaaaaaaaaaaattgatcaaactgatggataccctaagtaccctgacttgatcattacaccttctatgcatgcaacaaaatgccacgtgtaccccataaatatgtagaaatattatatgtaaataaatagttgggccttccgtattttcccactta

SEQ ID NO: 406387 - DNA, 1000 bp, Homo Sapiens
gcggaaggaggagccgcctcagccgcagctggccaacggggccctcaaagtctccgtctggagtaaggtgctgcggagcgacgcggcctgggaggataaggatgaatttttagatgtgatctactggttccgacagatcattgctgtggtcctgggtgtcatttggggagttttgccattacgagggttcttgggaatagcagggaaaggccattgctgctctggagctgtgtgtgtgtgtgatgactaaagcaaagaagcagccctacagtggcactcctgggtctggtgcaccactcctcaggagcatctcagattctgcctgatcaatgcaggagtcctgtacctctacttcagcaattacctacagattgatgaggaagaatatggtggcacgtgggagctcacgaaggaagggtttatgacctcttttgccttgttcatggtcatttggatcatcttttacactgccatccattatgactgatggtgtacagctcccaagtgctccctatccagtccaaaggaccctcttgattacagcacaggaacttgatcgttggggaaccccagccccttggaacttggaagacccgtgtttcctggaccgcgaatcagtgtgttgggcatcagtgttttctgcaagggttgtgacctgaaactttttaaaaaccacccacctttggggaagcatttctgaatttatccatcaccaaccatttcttcttggataccatcaagtaacagctattatttgccaagtggagctgtcatttaatttgatgcacctctggattcagatgaaacattaaattgtcttcctcgattctccatcgggtgtagagtttttaaactatcaatggcatttcaagtcttctgaaacagcatggctgtatgtgcgtggtccatagcacagtacatgcagcatctaataagagtttccattgtagaatgttttcacatacttgaataaatcaaatctttaattgagaaaaaaaaa

SEQ ID NO: 406388 - DNA, 1000 bp, Homo Sapiens; identical to SEQ ID NO: 119063

SEQ ID NO: 406389 - DNA, 1000 bp, Homo Sapiens; identical to SEQ ID NO: 224697

SEQ ID NO: 406390 - DNA, 1000 bp, Homo Sapiens
caactgcacagagttccagactgaattaaaatgtatgtgccggccaggttttactggagaatggtgtgaaaaggacattgatgagtgtgcctctgatccgtgtgtcaatggaggtctgtgccaggacttactcaacaaattccagtgcctctgtgatgttgcctttgctggcgagcgctgcgaggtggacttggcagatgacttgatctccgacattttcaccactattggctcagtgactgtcgccttgttactgatcctcttgctggccattgttgcttctgttgtcacctccaacaaaagggcaactcagggaacctacagccccagccgtcaggagaaggagggctcccgagtggaaatgtggaacttgatgccaccccctgcaatggagagactgatttaggagcattgtgtcccttcgagatggggatccacacactgtgaatgtgatgactgtacttcaggtatctctgacatacctgacaatgttaatctgcaactgggattacactggaactacaggaatgattcctttgaccaccttaaaaactttcacagtggttccgctcgacaccattgttttattatattatatcagccaattgcaaaaaaagtctgtgccagtaatttcagccttataattagcaaaaacatcttccagagaataaagtcttctgtggctttagtggctatcactgaaactctttcctcttttcaacctgggaacaaattttagttttcattttaggtttctgtactttctgtagtttctgtgtaaactgccatatgtttacatggaaactacaggaaaaaattggctacatttctcacttctcctatcatgtggtcaaagttattgttgtataccagcgatgggatgtatacttttgtccttcattcatggattcagagaaagctctgggaatgacttatggtccaaaaaagtgacccaatggcaacaaataaaaattgaaatgcaaaaaaaaaaaaaaaaaaa

SEQ ID NO: 406391 - DNA, 1000 bp, Homo Sapiens; identical to SEQ ID NO: 294173

SEQ ID NO: 406392 - DNA, 1000 bp, Homo Sapiens; identical to SEQ ID NO: 224698

SEQ ID NO: 406393 - DNA, 1000 bp, Homo Sapiens; identical to SEQ ID NO: 224699

SEQ ID NO: 406394 - DNA, 1000 bp, Homo Sapiens; identical to SEQ ID NO: 224700

SEQ ID NO: 406395 - DNA, 1000 bp, Homo Sapiens; identical to SEQ ID NO: 224701

SEQ ID NO: 406396 - DNA, 1000 bp, Homo Sapiens; identical to SEQ ID NO: 119065

SEQ ID NO: 406397 - DNA, 1000 bp, Homo Sapiens; identical to SEQ ID NO: 294179

SEQ ID NO: 406398 - DNA, 1000 bp, Homo Sapiens; identical to SEQ ID NO: 119066

SEQ ID NO: 406399 - DNA, 1000 bp, Homo Sapiens; identical to SEQ ID NO: 224702

SEQ ID NO: 406400 - DNA, 1000 bp, Homo Sapiens
atgccttagcagtcttatctaactatgatgcaaataaaaccggactgaaggagctgcccatgagaaatttacaggaaatcctgcatggcgccgtgcggttcagcaacaaccctgccctgtgcaacgtggagagcatccagtggcgggacatagtcagcagtgactttctcagcaacatgtcgatggacttccagaaccacctgggcagctgccaaaagtgtgatccaagctgtcccaatgggagctgctggggtgcaggagaggagaactgccagaaactgaccaaaatcatctgtgcccagcagtgctccgggcgctgccgtggcaagtcccccagtgactgctgccacaaccagtgtgctgcaggctgcacaggcccccgggagagcgactgcctggtctgccgcaaattccgagacgaagccacgtgcaaggacacctgccccccactcatgctctacaaccccaccacgtaccagatggatgtgaaccccgagggcaaatacagctttggtgccacctgcgtgaagaagtgtccccgtaattatgtggtgacagatcacggctcgtgcgtccgagcctgtggggccgacagctatgagatggaggaagacggcgtccgcaagtgtaagaagtgcgaagggccttgccgcaaagtgtgtaacggaataggtattggtgaatttaaagactcactctccataaatgctacgaatattaaacacttcaaaaactgcacctccatcagtggcgatctccacatcctgccggtggcatttaggggtgactccttcacacatactcctcctctggatccacaggaactggatattctgaaaaccgtaaaggaaatcacaggtttgagctgaattatcacatgaatataaatgggaaatcagtgttttagagagagaacttttcgacatatttcctgttcccttggaataaaaacatttcttctgaaattttaccgttaaaaaaaaaaaaaaaaaaaaaaaaa

SEQ ID NO: 406401 - DNA, 1000 bp, Homo Sapiens; identical to SEQ ID NO: 224703

SEQ ID NO: 406402 - DNA, 1000 bp, Homo Sapiens; identical to SEQ ID NO: 294184

SEQ ID NO: 406403 - DNA, 1000 bp, Homo Sapiens; identical to SEQ ID NO: 119067

SEQ ID NO: 406404 - DNA, 1000 bp, Homo Sapiens; identical to SEQ ID NO: 119068

SEQ ID NO: 406405 - DNA, 756 bp, Homo Sapiens; identical to SEQ ID NO: 294186

SEQ ID NO: 406406 - DNA, 1000 bp, Homo Sapiens; identical to SEQ ID NO: 119069

SEQ ID NO: 406407 - DNA, 1000 bp, Homo Sapiens
cttatcgagaatgtggcgtccctctgaggcaccacggtccgggactacacccagatgaacgagctgcagcggcgcctcggaccccggggcctggtggtgctcggcttcccgtgcaaccagtttgggcatcaggtgcgccgggcggagcggggcggggcgggggcggacgtgcagtagtggctgggggcgccggcggtgtgctggtgggtgccgtcggctccatgcgcggagagtctggctactctctcgtttcctttctgttgctcgtagctgctgaaattcctctccgcccttgggattgcgcatggagggcaaaatcccggtgactcatagaaaatctcccttgtttgtggttagaacgtttctctcctcctcttgaccccgggttctagctgcccttctctcctgtaggagaacgccaagaacgaagagattctgaattccctcaagtacgtccggcctggtggtgggttcgagcccaacttcatgctcttcgagaagtgcgaggtgaacggtgcgggggcgcaccctctcttcgccttcctgcgggaggccctgccagctcccagcgacgacgccaccgcgcttatgaccgaccccaagctcatcacctggtctccggtgtgtcgcaacgatgttgcctggaactttgagaagttcctggtgggccctgacggtgtgcccctacgcaggtacagccgccgcttccagaccattgacatcgagcctgacatcgaagccctgctgtctcaagggcccagctgtgcctagggcgcccctcctaccccggctgcttggcagttgcagtgctgctgtctcgggggggttttcatctatgagggtgtttcctctaaacctacgagggaggaacacctgatcttacagaaaataccacctcgagatgggtgctggtcctgttgatcccagtctctgccagaccaaggcgagtttccccactaataaagtgccgggtgtcagcagaaaaaaaaaaaaaaaaaaa

SEQ ID NO: 406408 - DNA, 1000 bp, Homo Sapiens; identical to SEQ ID NO: 223489

SEQ ID NO: 406409 - DNA, 1000 bp, Homo Sapiens; identical to SEQ ID NO: 294189

SEQ ID NO: 406410 - DNA, 1000 bp, Homo Sapiens
acggtaccacaggcctggtcacatgggacgccgccctctaccttgcagaatgggccatcgagaacccggcagtcttcactaacaggactgtcctagagcttggcagtggtgctggcctcacaggcctggccatctgcaagatgtgccgcccccgggcatacatcttcagcgactgtcacagccgggtccttgagcagctccgagggaatgtccttctcaatggcctctcattagaggcagacatcactgccaagttagacagccccagggtgacagtggcccagctggactgggacgtcgcgacggtccatcagctctctgccttccagccagatgttgtcattgcagcagatgtgctgtattgcccagaagccatcatgtcgctggtcggcgtcctgcggaggctggctgcctgccgggagcaccagcgggctcctgaggtctacgtggcctttaccgtccgcaacccagagacgtgccagctgttcaccaccgagctaggccgggccgggatcagatgggaagtggaacctcgtcatgagcagaaactgtttccctacgaagagcacttggagatggcaatgctgaatctcaccctgtaggactcacacacgactccaacgggattgtgagaatcaagtcactctcatgggaagaatttttatatgggaaagcggataaaactttcattggactggaatgtttggagaatgttaatttccaaatcaggaaccacaaactgccctctaataagacatcggctatctaagcgtgtgggtgccccctttctgccagcagttctggttcttaagaaaatcaccataaatcagacatgaaaattctggctccaaaaatagcattttctttgtgcaaataaaaacgtgtgtatcaagtatgatgttcccccaacgtggacacactcagttcctcacaaagccaagcccactgcagctgccacatccctgggcttacggtgcagcaggtgcttttttcaagacag

SEQ ID NO: 406411 - DNA, 1000 bp, Homo Sapiens
aggctgctggagatctcaaatcaagtgtctccactgccacgggattccagacacttttgacccttacctggacatcgccctggatatccaggcagctcagagtgtcaagcaagctttggaacagttggtgaagcccgaagaactcaatggagagaatgcctatcattgtggtctttgtctccagagggcgccggcctccaagacgttaactttacacacttctgccaaggtcctcatccttgtmttgaagagattctccgatgtcacaggcaacaaacttgccaagaatgtgcaatatcctgagtgccttgacatgcagccatacatgtctcagcagaacacaggacctcttgtctatgtcctctatgctgtgctggtccacgctgggtggagttgtcacaacggacattacttctcttatgtcaaagctcaagaaggccagtggtataaaatggatgatgccgaggtcaccgcctctagcatcacttctgtcctgagtcaacaggcctacgtcctcttttacatccagaagagtgaatgggaaagacacagtgagagtgtgtcaagaggcagggaaccaagagcccttggcgcagaagacacagacaggcgagcaacgcaaggagagctcaagagagaccacccctgcctccaggcccccgagttggacgagcacttggtggaaagagccactcaggaaagcaccttagaccactggaaattccttcaagagcaaaacaaaacgaagcctgagttcaacgtcagaaaagtcgaaggtaccctgcctcccgacgtacttgtgattcatcaatcaaaatacaagtgtgggatgaagaaccatcatcctgaacagcaaagctccctgctaaacctctcttcgacgaccccgacacatcaggagtccatgaacactggcacactcgcttccctgcgagggagggccaggagatccaaagggaagaacaaacacagcaagagggctctgcttgtgtgccagtga

SEQ ID NO: 406412 - DNA, 1000 bp, Homo Sapiens; identical to SEQ ID NO: 294190

SEQ ID NO: 406413 - DNA, 1000 bp, Homo Sapiens; identical to SEQ ID NO: 294191

SEQ ID NO: 406414 - DNA, 1000 bp, Homo Sapiens; identical to SEQ ID NO: 294192

SEQ ID NO: 406415 - DNA, 1000 bp, Homo Sapiens; identical to SEQ ID NO: 293463

SEQ ID NO: 406416 - DNA, 1000 bp, Homo Sapiens; identical to SEQ ID NO: 116052

SEQ ID NO: 406417 - DNA, 1000 bp, Homo Sapiens
ctccagcgtttgctggcggaatctcgtcagatggtgacggacctggagctgagcacactgctgcccatcagccatgagaatctcactggcagtgccacaaataagtcagaggtcccagaagagtcagctcaaaaaaatacctttgtcagttattgaaggaaacaaaaggcaacttcagtattcatcgtgatcacgaatttctcatctatgtggaaggcagaaagcagacaccaatactgaatgaatacttaaccgtaaaactgaaagaggattctagttcttcataaacggcacttaattccagctgggagcagaactagaaagttaatttttaaacatctacacttcattttcaagttaaccatttttgtgctgaagaaatattttcatgtgtaagaaagtagaccttattgtacatatagaaagttggaattatgctaagaatgaaaaagacttctctgtaaagatacggactacagttaaatgctagagaagctctttaaaaatgtgaatgtcaaatagagaaagaacccctgcatagaaagtgctgttttaactatctgatttttaaaaaatctgtgcatacatttaaattctaaacaatagcttatcagagtcagctcaaaatatatgagaaacagtattctctcatggttttagcttttgactttgctgtgtaaatagacataaggtgctttgatataaaatataaaatgtaactggaaaatagctcgaggtccttctgtcccaagctgagcagagccccatctttctgggtctatattagtcccacctactgacacaaacaaaagcttgctggaagatcgagttttagacgcatttttaaaaatcttaaagactaaaacacttccattttaacttgtaaagtaatttaattttttaaagattatactatatgcctctgtgtcttctctaaaagaatagatcaacttcagtccataaaagatatttttaatattaaagaaaaaaaaaaaaaaaa

SEQ ID NO: 406418 - DNA, 1000 bp, Homo Sapiens; identical to SEQ ID NO: 119071

SEQ ID NO: 406419 - DNA, 1000 bp, Homo Sapiens; identical to SEQ ID NO: 119072

SEQ ID NO: 406420 - DNA, 1000 bp, Homo Sapiens; identical to SEQ ID NO: 294199

SEQ ID NO: 406421 - DNA, 1000 bp, Homo Sapiens; identical to SEQ ID NO: 119073

SEQ ID NO: 406422 - DNA, 1000 bp, Homo Sapiens; identical to SEQ ID NO: 294200

SEQ ID NO: 406423 - DNA, 1000 bp, Homo Sapiens; identical to SEQ ID NO: 294202

SEQ ID NO: 406424 - DNA, 1000 bp, Homo Sapiens
cgcctgtcccggtctcgtacagcctctctgaccagtgcagcatccgttgatggcaaccggtcccgctctcgcaccctgtcccagagcagcgagtctggaactctttcttcggggcccccggggcacaccatggaggtctcctgttgaatggcccttgttgccctagagtgggacccagccctcacctcccccagagctaacctgggaggtgctgaaggggcattgggccaccgtaagcaagggaaaaagggcagatcatgcggggagatgaccttgatctttgattgctaccctaaccttgacctttaacccgtgattccccccagctcctggaagagatgtcctaatatctcttagggacccagacccctaaattctcctcctcccccattttgatgttaaggtggagagggcatatgcatcctctgtcctgatctaggtgtctatagctgaggggtaagaggttgttgtagttgtcctggtgcctccatcagactctccctacttgtcccatatttgcaaggggaggggatttggggctggggctccattcaccaaagctgaggtggcttctcattaaccctttaggactctgaagggtatggacctacgtgaatgtgtgtcagggggagacttgctggtgggttagtggtcctcaggatgtgatagaaacatccagtgtaaaaaggaagttggaatgggagttggcgggcagtgaacgagtgtggggaaggattggtgctggggcaacaggaaggggcctggggccgtttggctgcactaactttggtagctcagtgtgcatctagagtgggactggggagggagctaagcttgggctgggctgcttggggcttggcatagggtggaaagggctaccctggggctctgaccacactgtagtatgtgtggagggtgccctcccgtctcccacaacttctgctataacaataaactgtagaggaatctgagtaccgttaaaaaaaaaaaaaaaaaaaaa

SEQ ID NO: 406425 - DNA, 1000 bp, Homo Sapiens; identical to SEQ ID NO: 406424

SEQ ID NO: 406426 - DNA, 1000 bp, Homo Sapiens; identical to SEQ ID NO: 224706

SEQ ID NO: 406427 - DNA, 1000 bp, Homo Sapiens; identical to SEQ ID NO: 287368

SEQ ID NO: 406428 - DNA, 1000 bp, Homo Sapiens; identical to SEQ ID NO: 294205

SEQ ID NO: 406429 - DNA, 1000 bp, Homo Sapiens
taggcaatcagtcagattcacagaaaaaagttgtttgttgttgtaaaggctcaagatgaaactctttccccagcagtttagtgcctgctgaaaagatccctgatggacaatacttcttggtggactccagctgccccttttattattattagagacaaggtctcactctgttgctaggctggagtgcagtggcacaatcatggctcactgcagccccgaactactgggctcaagccttcctcccgcctcagcctgcccagtaactggtactacagatgtgcacacctggctaagtctttaattttttcgtagagatgaggtcttgctatgttgcccaagctagtttcaaactcctgggctcaagcgatgctcctgcttcagcctcccaaagtgctggggttacaggcatgagccaccacacccagccttcagctgtcaccttaaacttgacagtggctcatgctgatttagttcattttccctaaaaggtttgtcccaagatctgctcccaacagttgactgtcactgacaatgttggaagtcatctggaaaagagaacctctgtggtaatgtggtctcattaaagtcaagccttgttgtgattcctgtctacctccctgaagcaaagcccttctgtttattcacactaatgagccagagctgagctaaattgaatccctgtccttggaggaaaaccacatttccagaagcatgttagtttaaaggtagtaggtgagaaatgtgttctcttgaaacaagcactttgaaatttgaataggaagttgtagtgtatataggaagtctctgcctctttcgcctagtatctctgcctttgtttcaatttgttttgatttttacagactgttttgacaatgtataaaccaaggtattttgttttttggaagtatgtaaattgtgaccttcccacaaatatataaactttaaagaaaaaaaaaaaaaaaaaaaaaaaaaaaaaaaaaaaaaaaaaaaaaaaaaaaaa

SEQ ID NO: 406430 - DNA, 1000 bp, Homo Sapiens; identical to SEQ ID NO: 292102

SEQ ID NO: 406431 - DNA, 1000 bp, Homo Sapiens; identical to SEQ ID NO: 294211

SEQ ID NO: 406432 - DNA, 1000 bp, Homo Sapiens; identical to SEQ ID NO: 294212

SEQ ID NO: 406433 - DNA, 1000 bp, Homo Sapiens
gtgccccgagctgccacctccggagtggggctggagaacggcatcccacggggacctgatccggggcacggtgctcacctaccagtgcgagcctggctacgagctgctaggctccgacattctcacttgccagtgggacctgtcttggagcgccgcgccgcccgcctgccaaaagatcatgacttgtgctgaccctggcgagattgccaacgggcaccgcaccgcctcggacgccggcttccccgttggctcccacgtccagtaccgctgcctgccagggtacagcctcgagggggcagccatgctcacctgctacagccgggacacaggcacacccaagtggagcgatagggtccccaaatgcgccttgaagtacgagccgtgcctgaacccgggggttcccgagaatggctaccagacgctgtacaagcaccactaccaggcgggcgagtctctgcgcttcttctgctatgagggctttgagcttatcggcgaggtcaccatcacctgtgtgcccggccacccctcccagtggaccagccagcccccactctgcaaagtgacccagaccacagatccatcacggcagctggaaggggggaacctggccctggccatcctgctgcctctaggcttggtcattgtcctcggcagtggcgtttacatctactacaccaagcttcagggaaagtcccttttcggcttctcgggctcccactcctacagccccatcaccgtggagtcggacttcagcaacccgctgtatgaagctggggatacgcgggagtatgaagtttccatctgaaccccaagactacagctgcaggacccaggacgcccctcccctcctcattcgggcagagggaaatacgggacccggtctctgcctcctggctgccctcctccctggctgtgtaaatagtctccctatcccacgagggggctttgatggccctggagatcctacagtaaataaaccagcatcctgccgcccaaaaaa

SEQ ID NO: 406434 - DNA, 1000 bp, Homo Sapiens; identical to SEQ ID NO: 224708

SEQ ID NO: 406435 - DNA, 1000 bp, Homo Sapiens
gacttggagacacaaggcccaggaggaggacgaggaggaaaataagtatgagctgcccccccgtgaggctctgcccctcagtctagcccctgcccaccttcctggcactgaggaggactccttgtacctggatcactctggccccctgggtccatcaaagccatcgccacccctgcctcagcccaccatgagcagggtgcatcgtccagagtggtgccaggccctccaaagaaacctgatgaggacctctacttggaatgtgagccggatccagtcctggctttgactcagactctcagcttccaagtcctgatgccctcaggccctctgcccaggacatcagtggtgcccaggcctaccacagccccccaggaaactcggaatggaacagcagatgctgcctctaaagaaggaaggaaatcgtctcttccctctgtagcccccactgggagtgcctcagctgctgaggatggggcctataccgtgcgccccagctcagggcctcatggctcccagcccttcaccctggcagtgcttctccgaggccgggtcttcaacactcccatccggcggctggatggcggacgccactatgccctgggccgggagggcaggaaccgtgaggagctcttctcctccgtggcggccatggtccagcacttcatgtggcaccctctgccccttgtggacagacacagcggcagccgggaactcacctgcctgctcttccccaccaagccttgaggccacagcgaagctgacaccctcttcctggcctccaggaatgcaggtgtctgcccagttcactaggtcctggatgaaggaaccgtggtggcctagaccagtcaggggacagcacaggcactgctggaacagcaaaggatcctctcacatctacttgtgggcctagggcaccctgagagggactggcctaccttgcacaagttcacattcaataaacatttgttgaatgaaaaaaaaaaaaaaaaaaaaaaaaaaa

SEQ ID NO: 406436 - DNA, 1000 bp, Homo Sapiens; identical to SEQ ID NO: 406410

SEQ ID NO: 406437 - DNA, 1000 bp, Homo Sapiens; identical to SEQ ID NO: 294214

SEQ ID NO: 406438 - DNA, 1000 bp, Homo Sapiens; identical to SEQ ID NO: 288525

SEQ ID NO: 406439 - DNA, 1000 bp, Homo Sapiens; identical to SEQ ID NO: 294217

SEQ ID NO: 406440 - DNA, 1000 bp, Homo Sapiens; identical to SEQ ID NO: 224711

SEQ ID NO: 406441 - DNA, 1000 bp, Homo Sapiens; identical to SEQ ID NO: 294219

SEQ ID NO: 406442 - DNA, 1000 bp, Homo Sapiens
ctgagccacagaaagctccttccagaccttatcaggataccagaggaagttatggcagtgatgccgaggaggaggagtaccgccagcagctgtcagaacactccaagcgcggttactatggccagtctgcccgataccgggacacagaattatagatgtctgagcacggactctcccaggcctgcctgcatggcatcagactagccactcctgccaggccgccgggatggttcttctccagttagaatgcaccatggagacgtggtgggactccagctcgtgtgtcctcatggagaacccaggggacagctggtgcaaattcagaactgagggctctgtttgtgggactgggttagaggagtctgtggctttttgttcagaattaagcagaacactgcagtcagatcctgttacttgcttcagtggaccgaaatctgtattctgtttgcgtacttgtaatatgtatattaagaagcaataactatttttcctcattaatagctgccttcaaggactgtttcagtgtgagtcagaatgtgaaaaaggaataaaaaatactgttgggctcaaactaaattcaaagaagtactttattgcaactcttttaagtgccttggatgagaagtgtcttaaattttcttcctttgaagctttaggcagagccataatggactaaaacattttgactaagtttttataccagcttaatagctgtagttttccctgcactgtgtcatcttttcaaggcatttgtctttgtaatattttccataaatttggactgtctatatcataactatacttgatagtttggctataagtgctcaatagcttgaagcccaagaagttggtatcgaaatttgttgtttgtttaaacccaagtgctgcacaaaagcagatacttgaggaaaacactatttccaaaagcacatgtattgacaacagttttataatttaataaaaaggaatacattgcaatccgtaaaaaaaaaaaaaaaaa

SEQ ID NO: 406443 - DNA, 1000 bp, Homo Sapiens; identical to SEQ ID NO: 224712

SEQ ID NO: 406444 - DNA, 1000 bp, Homo Sapiens; identical to SEQ ID NO: 294220

SEQ ID NO: 406445 - DNA, 1000 bp, Homo Sapiens; identical to SEQ ID NO: 119075

SEQ ID NO: 406446 - DNA, 1000 bp, Homo Sapiens; identical to SEQ ID NO: 294222

SEQ ID NO: 406447 - DNA, 1000 bp, Homo Sapiens; identical to SEQ ID NO: 294223

SEQ ID NO: 406448 - DNA, 1000 bp, Homo Sapiens
gtaacaaatgaagtgcgcgctgcgacacctcccagcccaccgaactccgccgccatttcctcgcttggcctaacggttcggccaatcccagcgcgcatcaagaaggactgaggctccgccaatcggaggccgccgatttcgacccttcgcctcggcccggcccaatccaggccccggccccgccgcccccggcccgcccccgcggtgccctctctcctccctctttgtgcgtctcgcgccgccgccgcccgccgcgtgagaggacgggctccgcgcgctccggcagcgcattcgggtcccctccccccgggaggcttgcgaaggagaagccgccgcagaggaaaagcaggtgccggtgcctgtccccgggggcgccatggcgaccggagcgaacgccacgccgttggacttcccaagtaagaagcggaagaggagccgctggaaccaagacacaatggaacagaagacagtgattccaggaatgcctacagttattccccctggacttactcgagaacaagaaagagcttatataggtaaatatacgttctgcatccaaatgcactttgagattgttacgatttattctgagcaagatctgcattttttgaaagtttgagattgtagttatcttttttgagatgagatactttcacgactttggtatcatctgtcagtttttgcccagtgagttctgcatttgcagctccttgttttggtctgttcgtaactgcagtgttctccatgagtatcaggaaggtagggtttcacttaggagtaagaacagtccccagtccagcagccacccttttcagctgctgttcattgccagttgatgaggtgagtgtcatctgcctctctggacaggccccagtggagaacaccgcaggtactgtaaaccaagtacttttcacagcgtggcctttcaccataattttatatttctccccctaaaatgtggtcttttactttttataggtactttctgaaaaaaaaaaaa

SEQ ID NO: 406449 - DNA, 1000 bp, Homo Sapiens; identical to SEQ ID NO: 119077

SEQ ID NO: 406450 - DNA, 1000 bp, Homo Sapiens; identical to SEQ ID NO: 294225

SEQ ID NO: 406451 - DNA, 1000 bp, Homo Sapiens; identical to SEQ ID NO: 294227

SEQ ID NO: 406452 - DNA, 1000 bp, Homo Sapiens; identical to SEQ ID NO: 286997

SEQ ID NO: 406453 - DNA, 1000 bp, Homo Sapiens; identical to SEQ ID NO: 294229

SEQ ID NO: 406454 - DNA, 1000 bp, Homo Sapiens
ctcctgggcttatcaaggaagatgagactaagccagaagattgcataccagatgtaccaggcaatgaacacgccagggaatttctggctcatgcaccaactaaaggactttggatgccactggggaaagaagtcaaagttatgcagtgttggcgttgcaaacgctatggtcaccgaacgggtgacaaagaatgccctttctttatcaaaggcaaccaaaagttagagcagttcagagtggcacatgaagatcccatgtatgacatcatacgagacaataaacgacatgaaaaggacgtaaggatacagcagttaaaacagttactggaggattctacctcagatgaagataggagcagctccagttcctctgaaggtaaagagaaacacaagaaaaagaagaagaaagaaaagcataagaaaaggaagaaagaaaagaaaaagaagaaaaaacggaagcacaaatcttccaagtcaaatgagggttctgactcagagtgacaaggatgtgacttgttcaacattctcttctcaaacactgaccaaggaacagaggaagatgcagtcagagaaagcagcaggatagagacgccgagagaggagtatatgtgggtcacagcagtgagctcccacccgccttgcagtgaagatgtgaccccaggagagggagtgtctccttccaggtgctagctctggacagcagctgattttaggcaggaaagtttcttcatcgttgtcctccctgctggtcacatgagtttacgattcctttgaagtgtctcccacagggtggcaggactgggagaatctctgaggcgtgtcttccaggccctcccacagcttgtgccctccacagtgtggactcaggtcccatagacatcaggctggagtcttctctgttgttgagaataataaaagctcattatttattttttaaaaaaaaaaaaaaaaaaaaaaaaaaaaaaaaaaaaaaaaaaaaaaaaaaaaaaaaaaaaaaaaaa

SEQ ID NO: 406455 - DNA, 1000 bp, Homo Sapiens; identical to SEQ ID NO: 115901

SEQ ID NO: 406456 - DNA, 1000 bp, Homo Sapiens; identical to SEQ ID NO: 224714

SEQ ID NO: 406457 - DNA, 566 bp, Homo Sapiens; identical to SEQ ID NO: 294234

SEQ ID NO: 406458 - DNA, 1000 bp, Homo Sapiens; identical to SEQ ID NO: 294235

SEQ ID NO: 406459 - DNA, 1000 bp, Homo Sapiens; identical to SEQ ID NO: 119082

SEQ ID NO: 406460 - DNA, 1000 bp, Homo Sapiens; identical to SEQ ID NO: 294237

SEQ ID NO: 406461 - DNA, 1000 bp, Homo Sapiens; identical to SEQ ID NO: 294238

SEQ ID NO: 406462 - DNA, 1000 bp, Homo Sapiens; identical to SEQ ID NO: 294239

SEQ ID NO: 406463 - DNA, 1000 bp, Homo Sapiens; identical to SEQ ID NO: 119084

SEQ ID NO: 406464 - DNA, 1000 bp, Homo Sapiens; identical to SEQ ID NO: 294240

SEQ ID NO: 406465 - DNA, 1000 bp, Homo Sapiens; identical to SEQ ID NO: 119085

SEQ ID NO: 406466 - DNA, 1000 bp, Homo Sapiens; identical to SEQ ID NO: 115676

SEQ ID NO: 406467 - DNA, 1000 bp, Homo Sapiens; identical to SEQ ID NO: 224717

SEQ ID NO: 406468 - DNA, 1000 bp, Homo Sapiens; identical to SEQ ID NO: 224717

SEQ ID NO: 406469 - DNA, 1000 bp, Homo Sapiens; identical to SEQ ID NO: 119086

SEQ ID NO: 406470 - DNA, 1000 bp, Homo Sapiens; identical to SEQ ID NO: 294245

SEQ ID NO: 406471 - DNA, 1000 bp, Homo Sapiens; identical to SEQ ID NO: 119087

SEQ ID NO: 406472 - DNA, 1000 bp, Homo Sapiens; identical to SEQ ID NO: 286871

SEQ ID NO: 406473 - DNA, 1000 bp, Homo Sapiens; identical to SEQ ID NO: 294247

SEQ ID NO: 406474 - DNA, 1000 bp, Homo Sapiens; identical to SEQ ID NO: 119088

SEQ ID NO: 406475 - DNA, 1000 bp, Homo Sapiens; identical to SEQ ID NO: 119089

SEQ ID NO: 406476 - DNA, 1000 bp, Homo Sapiens
aacatgttttcatgtaatactggcttactttgtaatttacatctgtaactttcatatttctaaaaggggccaatgcaaaaggagagagaaggactggatttaagccagtttacttagagtatatgataaagaaggcagaggaatagctacatatttggcaattctcctctctgtagtcaccctgacatcctcacaagaaaacaaatctagccattgcccaaactttaaatttgatctctataggtctgcttaaagactcaaattttctccagtttctctcataaattcaattgcaaaagtttctgacaaggctcataccctgtacccttatgcagagcaagcattccatcctaagttataaactacagtgatgtttaattttgaagccaggtctacattatttaattaatggcttcaaaaggtggagatgcactttatttaatgtctttccctagctaattcttactctcaccttaaatatgctttcttgttgcatatatgcacagatacacacacacacacacacgaaaataaataaatgttcatattcttctgttcaacagacatttattttctcctctcccttgaataagaaaataagttttccattcctatgaactgtctaatatctttctattacagaaggggaaactgaggctgggaaaggctaaatgacttatcctccatcagttataacagcccctggtcttcttaaatttaaacacgggacttcccgaactaatttttttaaggatactgaaaaatgagagagagtggtcgaatgcctgaaattttgcttaacttactgtacttaaaatcaattataacttctttttgttactcagggccccactttttgttgctttctagacttgtgtgtagaaagaagattaatgatcacttaaagtagtttccttctttattctgaaaaaatgaggaaaaaataacaacagtggcaaataaaatcatatttggtactaaaaaaaaaaaaaaaaaaaaa

SEQ ID NO: 406477 - DNA, 1000 bp, Homo Sapiens; identical to SEQ ID NO: 119090

SEQ ID NO: 406478 - DNA, 1000 bp, Homo Sapiens
ccgggcggagcgacccagcgagaccccgccggctcccggagtgtcctggggaccgccacctccaggagccccggtggtgatctcggtgaagcaggaggaggggaagcaggggcgcacgggcagaaggagccaccgagccgctcctccttgcggttttgcccgcacgcgcgtctgcccgcccacctttcctggggcggatgcgttcccgcagtgaccgcactcgcgattgtagaaaattcgctcccaattgttgaatgcttacataaactgcatagttacccatattttctactgttctcataagggaaaaagaaatgatttggaagaaaaaaaaagcctcaaactaaacaaaaacaaaaccagcagccctggctaagcttttgataatggaaccattataagctgacaagctagatttttcacctgttggatttgctggacatgagcacaagcctaggcttccaatttgaatttcagggctgtagtcactgatgtgtcacatttagtgaaggctctcggccccccggcagccgcctggtcctgggtcactggggagaattctgggtgggtggaagaggcgaggagcactgtgatgggcgctgttcacactccggctccacccagcgccagctgcgacaaagccctttacccctcccaggccaggtgtttcttctgtgtgaaagaggagcttgatccctactcacaggttccttaattcattgctcaaagagggaaacagcaaggaaaaagacaaattctgttctcatgaagcttaccttctagtgggggaagagacaacaggtaactggtatataagagggtagaagggccaggtgcggtggctcaatgcctgtaatcccagcactttaggaggccaagatgggcgattcacgaggtcaggagatcgagaccatcctggctaacaaggtgaaacccccgtctgtactaaaaaaaaaaaaaaaaaaaaaaaaaaaaaaaaaaaaaaaaaaaaaaaaaaaaa

SEQ ID NO: 406479 - DNA, 1000 bp, Homo Sapiens; identical to SEQ ID NO: 294251

SEQ ID NO: 406480 - DNA, 1000 bp, Homo Sapiens
ggactccccctgccagctggaggcgctcaagctggagagctgcggtgtgacatcagacaactgccgggacctgtgcggcattgtggcctccaaggcctcgctgcgggagctggccctgggcagcaacaagctgggtgatgtgggcatggcggagctgtgcccagggctgctccaccccagctccaggctcaggaccctgtggatctgggagtgtggcatcactgccaagggctgcggggatctgtgccgtgtcctcagggccaaggagagcctgaaggagctcagcctggccggcaacgagctgggggatgagggtgcccgactgctgtgtgagaccctgctggaacctggctgccagctggagtcgctgtgggtgaagtcctgcagcttcacagccgcctgctgctcccacttcagctcagtgctggcccagaacaggtttctcctggagctacagataagcaacaacaggctggaggatgcgggcgtgcgggagctgtgccagggcctgggccagcctggctctgtgctgcgggtgctctggttggccgactgcgatgtgagtgacagcagctgcagcagcctcgccgcaaccctgttggccaaccacagcctgcgtgagctggacctcagcaacaactgcctgggggacgccggcatcctgcagctggtggagagcgtccggcagccgggctgcctcctggagcagctggtcctgtacgacatttactggtctgaggagatggaggaccggctgcaggccctggagaaggacaagccatccctgagggtcatctcctgaggctcttcctgctgctgctctccctggacgaccggcctcgaggcaaccctggggcccaccagcccctgccatgctctcaccctgcatatcctaggtttgaagagaaacgctcagatccgcttatttctgccagtatattttggacactttataatcattaaagcactttcttggcaggaaaaaaaaaaaaaaaaaaaa

SEQ ID NO: 406481 - DNA, 1000 bp, Homo Sapiens; identical to SEQ ID NO: 406480

SEQ ID NO: 406482 - DNA, 1000 bp, Homo Sapiens; identical to SEQ ID NO: 224723

SEQ ID NO: 406483 - DNA, 1000 bp, Homo Sapiens; identical to SEQ ID NO: 224724

SEQ ID NO: 406484 - DNA, 1000 bp, Homo Sapiens; identical to SEQ ID NO: 119091

SEQ ID NO: 406485 - DNA, 1000 bp, Homo Sapiens; identical to SEQ ID NO: 116438

SEQ ID NO: 406486 - DNA, 1000 bp, Homo Sapiens; identical to SEQ ID NO: 224726

SEQ ID NO: 406487 - DNA, 1000 bp, Homo Sapiens; identical to SEQ ID NO: 119092

SEQ ID NO: 406488 - DNA, 1000 bp, Homo Sapiens; identical to SEQ ID NO: 224727

SEQ ID NO: 406489 - DNA, 887 bp, Homo Sapiens
aggcgggccatggcggatgtccccggggcacagcgagcggttcctggtgacggcccagagccccgggaccccctggactgttgggcctgcgctgttcttgtaacagcccagaatctgctggtggctgccttcaatcttctcctgctggtgctggtgctagggaccatcttgctacccgctgtcaccatgctgggcttcggcttcctctgccactctcagttcctgcgctcccaggcacccccttgcaccgcgcacctgcgggaccccggtttcacggccctactggtcaccggattcctgctcctcgtgccgctgctcgtgcttgctctggccagctaccgccgcctctgcctgcgcctccgcctagccgattgcctcgtgccctacagccgagccctttatcggcgtcggcgcgccccgcagccgcggcaaatccgggcctcaccagggtcccaggccgttcccacatcaggaaaggtctgggtctaatgaccctcgagtcaagaacaaccctgacggctgccctccctcttattcggcccaaggacttgaagcccggcatcttccgacctgccctgcccccacccctgcctgagcggagtcctagcatccccttgggagcagcagcgtcagtggacccagtgctgagaaaagcccccacatcccggaaaacccactttcctttcacgacccacatctcaatcctgaacatctaggctggaacctgcacacctccccctcagctccgtcgtgaatgggacaacaatctcgtgccctcgttttatggtgcagcttctctagtatttctggggctggggggcggggctggaggggaaggagtgtccacgcatcaataaagatttaacgaactgaaaaaaaaaaaaaaa

SEQ ID NO: 406490 - DNA, 1000 bp, Homo Sapiens; identical to SEQ ID NO: 119093

SEQ ID NO: 406491 - DNA, 1000 bp, Homo Sapiens; identical to SEQ ID NO: 294258

SEQ ID NO: 406492 - DNA, 1000 bp, Homo Sapiens
gtcttcgcagggccccctctgacgcacacggggaccagccacgccgcgggggcaccgggcaggagccagcgcccgggtccacgcagtcccctccgggcagacgcggggagctggggagcagtggggaccggcccccacccgcaggacgaccgggacccccgcgcgggcccacgcggcgtcgcagcaggcgcggagcccccggtaccacccgaggccgagacaaagcccaggcgcacggaccccggaccctgcggagccccgctcggagcttccacgcccggggcagagacccccgccgggtccggagaccctgccgccagtcgcgccgtctcacctcaggccgccacctcgcagcgctcgctcctcgccgcggcccctgggccgactggagcgcagctgaacagccgacagagccgcagccgccttaacaatggagccccggggcggggccgccgccgccgcctcagcccgtgtaccccgctcgagatccggctcggctcgcggagctgcagccggcgtggggctgcggccgggacagacaccacgcaggcgcacacggccccgcccgccgcccgccgtcccgcccccagcggagccgggcgcccagggcccgccccccggccaatgggaagcgagctgcgcggagtgggcggggcctgagggaacaaagggaggttgggcggggcggtgctgggactgggcttgcggggtcccgcgggaggacccgcctcaaagagccggcccgatcatcgcctcctagaatacccagctcaacgtctacctggagtcggctctacaggacgcgctcatctcaaacccagagctcaggcttttagggcagagagcgagagacaggcttgctttacagaaagggaaactgaggtccaaggaataggattgcctgccgctcgaagaaacgtaatcccattcactcgttcatcttgtagtcattcagcaaacatttggaagcacgtaaaaaaaaaaaaaaaaaaaaaaaaaa

SEQ ID NO: 406493 - DNA, 1000 bp, Homo Sapiens
gcccggggcggttttgcacttggacttccttttgggctctccggaggcgcatatctgttcctcctattggatggggccggggaccccaaacccactccggaagcaccgatttccagcgctgacggccgcgcctggtttcccagcgagtcctcttggcagctcccgcagctccccgccgggagcacgagtgggagcgaacccagagcccgcccaggcctcgggcctcggcaactccccacaggtccacgagatggcgctgcaggccagggcccgggccgcggcctcacagcccgcctcgggcgagagcgggagatagactgcggaccccggcaagcggggcacggaggcacagccaccgacacaggcagagccgggtccggagcccggcacaggccgccgagggaccgagggactccggggctgcggacacactgagcggagggcttgaggctcggggtggggccttctcccctgctgccagaaccgcccggcagcgccagctcggcgaccttccaggctgctgcagaccccagcttgtcctcttctgcgcgcccgcggggctgggccctcgcgttctttctgcgggaagtgagccgccggcctccggcctcctgggcccctccgaagggggctgtggctggcatccgcagcgcgcggggcgcacggccctaggagcgcggggcccactcgacggtgaggacttacgggcgggataggggaaggatcggcggggatccagcgctcctccagcggagagggccccctcggctccgacccgccctcctcaccaccctcatccggctcttcagggcggggtcttcagggtcgagggcaggatgtgccctgtggagctgctcacctaagttcctgcctccataggggaggctttgggctgcgttattccagcgggaggtggtggggactggggagggcccaggggtcagcctgagaatctcgcccttggattaaaagccaccaatgctcaaaaaaaaaaaaaaaa

SEQ ID NO: 406494 - DNA, 698 bp, Homo Sapiens; identical to SEQ ID NO: 294260

SEQ ID NO: 406495 - DNA, 1000 bp, Homo Sapiens; identical to SEQ ID NO: 294261

SEQ ID NO: 406496 - DNA, 1000 bp, Homo Sapiens; identical to SEQ ID NO: 117464

SEQ ID NO: 406497 - DNA, 1000 bp, Homo Sapiens; identical to SEQ ID NO: 224730

SEQ ID NO: 406498 - DNA, 1000 bp, Homo Sapiens; identical to SEQ ID NO: 294265

SEQ ID NO: 406499 - DNA, 1000 bp, Homo Sapiens; identical to SEQ ID NO: 294266

SEQ ID NO: 406500 - DNA, 1000 bp, Homo Sapiens; identical to SEQ ID NO: 294267

SEQ ID NO: 406501 - DNA, 1000 bp, Homo Sapiens
tgtaggcactcaagttgtgtagctgctgggagctttagggatcctaggagctgccgtgctgcaggcagcagagtatgtctgaactcggcgggcgggtggcaggggctgtctgtgaaattaggcacacatgtgagctcagacatggaatgtggaggaactcaagctgcccctaaaaacaaaacaatcaaactgcagctccttaagagtaagaattttaatttaattttgaaaataaatggcccacagggtaaacactgaacttattcaacctacaggaggccactgcatcaacacgccacggtcttcccatggcaactgaatcattccttgttcaaaacatttaatcatcttaagcagtggggcttcaacacaccgtttggttagattgtgcagtcagcactctccagtgattagaatgggggaaagaatccactatttgtacagggtttatctttatcatactaaaatgctgagtgagtggaggtctgggaatgaaaatcagaagtcttcttcttcttttaattcataagcctcacttaaatcagaacacatttaactatttatatatcaaaaacgtccccaaacaccataagaccagcacagagttgctgccctaaaatgtataattagtgaaaaatttacctctgcttccatttaaagcatggcagtgggttgggtgtcattatgtagtataaaaactggactagataaactgctattttagagcattattagcattctctgaatatatgtatatatacatatatatacgcacacacacacacacataaatatatatatatatatatatataaactcacatactcccaattaaaagtcgtgtgaaagctacacaggattacagaggcatctatattatcacttttgctctttgactaatcctatgctgtttttgttatagagagaaacaaggacatggatgaagtgattttttttttaaataaaaggacaaatttgccacacaaaaaaaaaaaaaaaa

SEQ ID NO: 406502 - DNA, 1000 bp, Homo Sapiens; identical to SEQ ID NO: 119095

SEQ ID NO: 406503 - DNA, 1000 bp, Homo Sapiens; identical to SEQ ID NO: 294270

SEQ ID NO: 406504 - DNA, 1000 bp, Homo Sapiens; identical to SEQ ID NO: 294271

SEQ ID NO: 406505 - DNA, 1000 bp, Homo Sapiens; identical to SEQ ID NO: 224731

SEQ ID NO: 406506 - DNA, 1000 bp, Homo Sapiens; identical to SEQ ID NO: 294272

SEQ ID NO: 406507 - DNA, 1000 bp, Homo Sapiens; identical to SEQ ID NO: 119096

SEQ ID NO: 406508 - DNA, 1000 bp, Homo Sapiens; identical to SEQ ID NO: 222145

SEQ ID NO: 406509 - DNA, 1000 bp, Homo Sapiens; identical to SEQ ID NO: 294275

SEQ ID NO: 406510 - DNA, 1000 bp, Homo Sapiens; identical to SEQ ID NO: 294276

SEQ ID NO: 406511 - DNA, 1000 bp, Homo Sapiens
ctgatgttgttgttaaacgacaagaagctttagcagctgctcgactgaaaatgcaagaagaactaaatgcgcaagttgaaaagcataaggaaaaactgaaacaacttgaagaagaaaaaaggagacagaagattgaaatgtgggacagcatgcaagaaggaaaaagttacaaaggaaatgcaaagaagccccaggaggaagacagtcctgggccttccacttcatctgtcctgaaacggaaatcggacagaaagcctttgcggggaggaggttataacccgttgtctggtgaaggaggcggagcttgctcctggagacctggacgcagaggcccgtcatctggcggatgaggctaagaatcttgtagaatattccgtggttgcttcttgaccaagggaaatacagtctggctgtgagagacttaaaatctcttgaggagcgctctggagaatggctgaaggagaggaaacaggagccttgagcagtgtaattacaaacaaataggttggcatagtcttaagtctttgagtctagagagatttgagttttgttttgcctgtggaggcaattgggggtttcaggtcaaagagagggtcagtggaaacaagggtgggccttgtgaggtgtggggaagccctgggaccctcactccccttccagtgtgtaactggattggctcccaccagcccagaagatttacgacgtgggaaatggtatacttggattaaaatatttcatccagatttgtttacatctagagagaaccccttgtaggttataaggaaactttttaacattcttccttgaatatattttctgtagctgaaaatgtttgtgaagtggctgtcaactacacatcgcatgagtagaggggctctgggtcggggtttcatatgcagcagagcagctcccttgctgccgtccatcaagagccctcaacacaagagtttgttataaatagaaataaacgacaaaaagtagaggggtatgtttaagtaca

SEQ ID NO: 406512 - DNA, 1000 bp, Homo Sapiens
tcctctcactgcctgctacagccagcaggtgtcactggagatgagcgaggcagttgccactgagatccgccaagccatcataagtcgcatcccgggaagcttaagaaactgtgtgaacaaggaattctttgtcacatcagcgctttggtccgtaatagaccagcaagaaattcatcctgagctcagtggtgctacctacagatatctgccaggcatggtgggcgtggctccaggaggacttctgcggccagggaagacatcatccctggagacatcccagtgactgacaacctcccaacagtggtacatccttcccaagggccctctcccaacagcccacaaaacacggggacagtcgagagcatcccaacgagcaatagcagagaatgccggaaggtaattattcagatatacttgggaacagtgaaaaatagataatctaagagaaaaagaatctgacggcctttttagctgattccggacatatgcatcattgttgttgcagtgttaaaacaagagctagaaaactgacaatgtcgtctgcttacggaagctctgaaagactagggtgtgatttactaacgaccaacttctattattgtgtgttaagtttttcatctgtgcatcaaatcacaaagaataaatagaacttttccctttatcagtctcttaggcacagcaggtcctgaacaccctgcttatatgttgcatcagcagttcaaatatcaaaataaaaaccatgaagaggaaatccgcatcctgtgacttgagtcccttcagtctacagggactggttactgctttttgctaataggaagattacattactagaaaatgtggagtaaactgtttgcctgtggtaaacacctgcatgcaaaggattgaagacagtacgggctcctgtacagagacgcgtctctcacatctgagctgcatattgagcggcaagttggttgtaagttcagtaaaagccgctgatgatgcaaaaaaaaaaaaaaaa

SEQ ID NO: 406513 - DNA, 1000 bp, Homo Sapiens; identical to SEQ ID NO: 224733

SEQ ID NO: 406514 - DNA, 1000 bp, Homo Sapiens; identical to SEQ ID NO: 294280

SEQ ID NO: 406515 - DNA, 1000 bp, Homo Sapiens; identical to SEQ ID NO: 294281

SEQ ID NO: 406516 - DNA, 1000 bp, Homo Sapiens; identical to SEQ ID NO: 294282

SEQ ID NO: 406517 - DNA, 1000 bp, Homo Sapiens; identical to SEQ ID NO: 294283

SEQ ID NO: 406518 - DNA, 1000 bp, Homo Sapiens
cacggtggtctccaggccctggctggggctctgagattacggagtgactacctgctggtcacccctccatcccctgctcaggaagagataccggaattttggactctactggctgggttccttcgccatgagcatcctggtgttccttacaggaaacattcttggtgcaagaggaacaaagaaagggactcctgcagcgtccggctgacctggcccttgtcatatatctcatccttgctggcttcttcactctgttccggggcctggtggtgcttgattgccccacagatgcctgctttgtctatatctaccagtatgagccatacctgcgggaccctgtggcctaccctaaggtgcagatgctgatgtacatgttttatgtcctgcctttctgcggcctggctgcctatgctctcaccttccctggttgctcctggcttccagactgggccttggtgtttgctggaggcatcggccaggcacagttctcgcacatgggggcttccatgcacctgcgcacacccttcacctaccgtgtgcctgaggacacctggggctgcttcttcgtgtgcaatctgctgtatgcgctgggcccccacctgctggcctaccgttgccttcagtggcccgcattcttccaccagccaccaccctccgaccccctagccctccacaagaagcagcattgagagagctgtggactcaggacccaggactctgtttacgtgcccagtcagccctacctggggaagcgggggttgggtgttttagagacaggagggacatctccgggtgtctttagtcttggctatggtagtttcagtccagtgggtgggatggagaccaacgaccaagtgttcctgcaaggagagcctcccacagctgtcaccatgctccaactcccacacaaacgcttctaccccttccagaacttacccatcatccccccatggatcctttcagtaaaaaccctttcaatttccaaaataaaaaaaaaaaa

SEQ ID NO: 406519 - DNA, 1000 bp, Homo Sapiens; identical to SEQ ID NO: 224735

SEQ ID NO: 406520 - DNA, 1000 bp, Homo Sapiens
gattaatgccgatattcttcctggtccaaatggaaatagcaaagtaatagatgcaaaaccatttttagacaccgtgacatccttctttccagacgtgacgttttccctgggttggacaacaggatggcatcctgagaaagtcaatgaagggtacagttggacaatggtgaaagagatggaatatatatgtaatgaactaagtcagcctgtaacgttccctgtcagagcagcattagtcaggcagtcttgttctcagttactttggctgttaaagaaatcaaacaggtacagcctgactatttggactggaaaaaatgataactattccgttgaagatttactttacattagagaccattttgacaaaaaacaagttttctatgacatcttggaaccacaaaaccatgaatttaaacaagccattggaatcaaagttaatctctaagaagaagattctcaattatttcctgtgttttggtttcataatccttctctccattggtctgaattaattaccatataaattatggttattgattgacgttccaagtcatctaatcaagaaacgtttattgtatgcttactctgtgggcatatgtccttataatagtgcacttacataaaagatttggaaagaagagatttatttacacacgtggcctagtctaataataattcaggaaaatgatactctgcaccccttcataaaaatagttttgataaactaaagatgattggcagaatccatatgtcataaaacaggtataaatcacatgtgcttggcacttgcattacagagattatgaaaaatatggtactcttttcctttttcctagaaaactggttattttagagataacaaaaaaggaagagggcttttaaaatgtttttaattttcacaggggtcagcagctgtctcatatcaagatctattaatccatttcctgaaactgtagattaaattagatagatctagaatttccatgtgattgagaagcat

SEQ ID NO: 406521 - DNA, 943 bp, Homo Sapiens; identical to SEQ ID NO: 294285

SEQ ID NO: 406522 - DNA, 1000 bp, Homo Sapiens; identical to SEQ ID NO: 116603

SEQ ID NO: 406523 - DNA, 1000 bp, Homo Sapiens; identical to SEQ ID NO: 294286

SEQ ID NO: 406524 - DNA, 1000 bp, Homo Sapiens
ggataccctggagacgttgacaggagtagctcagctggtggccaaggctcctatgtacccctgcttcgggacacggacagcagtgtggcctctgaagtccgcagtggctacaggattcaggccagccagcaggacgactccatgcgggtcctgtactacatggagaaggagctggccaacttcgacccttctcgacctggcccccccagtggccgtgtggagcgggccatgagtgaagtcacctccctccacgaggacgactggcgatctcggccttcccggggccctgccctcaccccgatccgggatgaggagtggggtggccactccccccggagtcccaggggatgggaccaggagcccgccagggagcaggcaggcgggggctggcgggccaggcggccccgggcccgctccgtggacgccctggacgacctcaccccgccgagcaccgccgagtcagggagcaggtctcccacgagtaatggtgggagaagccgggcctacatgcccccgcggagccgcagccgggacgacctctatgaccaagacgactcgagggacttcccacgctcccgggacccccactacgacgacttcaggtctcgggagcgccctcctgccgaccccaggtcccaccaccaccgtacccgggaccctcgggacaacggctccaggtccggggacctcccctatgatgggcggctactggaggaggctgtgaggaagaaggggtcggaggagaggaggagaccccacaaggaggaggaggaagaggcctactacccgcccgcgccgcccccgtactcggagaccgactcgcaggcgtcccgagagcgcaggctcaagaagaacttggccctgagtcgggaaagtttagtcgtctgatctgacgttttctacgtagcttttgtatttttttttttaatttgaaggaacactgatgaagccctgccatacccctcccgagtctaataaaacgtataatcacaaaaaaaaa

SEQ ID NO: 406525 - DNA, 1000 bp, Homo Sapiens; identical to SEQ ID NO: 224736

SEQ ID NO: 406526 - DNA, 650 bp, Homo Sapiens
aggctgggggagaagttaaagccagaggaggggcaggaatgtctgaggtggcaacacttctcttcagccagacagcactggccagtttggagtctgtccatcctgcaggccacaagctctggatgaggaacttgaggcaagtcaccagcccctgatcatttcgcctaaaagagcaaggactagagttcctgacctccaggccagtccctgatccctgacctaatgttatcgcggaatgatggcccagggctcctcagagcaggaactccactatgcatctctgcagaggctgccagtgcccagcagtgagggacctgacctcaggggcagagacaagagaggcaccaaggaggatccaagagctgactatgcctgcattgctgagaacaaacccacctgagcaccccagacaccttcctcaacccaggcgggtggacagggtccccctgtggtccagccagtaaaaaccatggtccccccacttctgtgtctcagtcctctcagtccatctcgagcctccgttcaaattgatcatcatcaaaacttatgtggctttttgacctttgaatagggaattttttaaattttttaaaaattaaaataaaaaaaacacatggctcacccttccacccaaaaaaaaaaaaaaaaaa

SEQ ID NO: 406527 - DNA, 690 bp, Homo Sapiens; identical to SEQ ID NO: 224737

SEQ ID NO: 406528 - DNA, 1000 bp, Homo Sapiens; identical to SEQ ID NO: 119097

SEQ ID NO: 406529 - DNA, 1000 bp, Homo Sapiens
atcgaccagagttggtccgaccagccttggaaaggtcactgaaaaatcttcaattggactatgttgacctctatcttattcattttccagtgtctgtaaagccaggtgaggaagtgatcccaaaagatgaaaatggaaaaatactatttgacacagtggatctctgtgccacatgggaggccatggagaagtgtaaagatgcaggattggccaagtccatcggggtgtccaacttcaaccacaggctgctggagatgatcctcaacaagccagggctcaagtacaagcctgtctgcaaccaggtggaatgtcatccttacttcaaccagagaaaactgctggatttctgcaagtcaaaagacattgttctggttgcctatagtgctctgggatcccatcgagaagaaccatgggtggacccgaactccccggtgctcttggaggacccagtcctttgtgccttggcaaaaaagcacaagcgaaccccagccctgattgccctgcgctaccagctgcagcgtggggttgtggtcctggccaagagctacaatgagcagcgcatcagacagaacgtgcaggtgtttgaattccagttgacttcagaggagatgaaagccatagatggcctaaacagaaatgtgcgatatttgacccttgatatttttgctggcccccctaattatccattttctgatgaatattaacatggagggcattgcatgaggtctgccagaaggccctgcgtgtggatggtgacacagaggatggctctatgctggtgactggacacatcgcctctggttaaatctctcctgcttggcgacttcagtaagctacagctaagcccatcggccggaaaagaaagacaataattttgtttttcattttgaaaaaattaaatgctctctcctaaagattcttcacctaaaaaaaaaaaaaaaaaaaaaaaaaaaaaaaaaaaaaaaaaaaaaaaaaaaaaaaaaaaaaaaaaaaaaaaaaa

SEQ ID NO: 406530 - DNA, 1000 bp, Homo Sapiens; identical to SEQ ID NO: 224738

SEQ ID NO: 406531 - DNA, 1000 bp, Homo Sapiens
agctgcatctcagtgtcttcgactttgaccgcttctcccgccatgacatgattggcgaggtcatcctggacaacctctttgaggcctctgacctgtctcgggaaacctccatctggaaggatatccaatatgccacaagtgaaagcgtggacttgggagagatcatgttctccctttgctacctgcccactgcaggcaggctcaccctcacagtgattaagtgtcggaacctcaaggcgatggacatcacaggctattcagatccctatgtgaaagtgtccttgctctgtgatgggcggaggctgaagaagaagaaaacaaccataaagaaaaacactctcaatcctgtctacaatgaggccatcatctttgacattcccccggaaaacatggatcaagtcagcctgctcatctcagtcatggactatgatcgagtgggccacaatgagatcataggagtctgtcgtgtggggatcactgctgaaggcctgggcagggaccactggaacgagatgctggcatacccccggaagcccatcgcacactggcactccttggtggaggtaaagaaatccttcaaagagggaaaccctcggttgtgatttcattcacgtggatgctgcaagcagagagactgccacctggagttaggatggcagggccgagctgctagcttcgacagtgagagctcgtgcccatctccgaaaccacctccaacaccatgagatgtgcagccaaataacacaaatgggactcagcaatgttctctttgcacttgttcaaccgtctaaacagtgttgtgcagtcgcagtggcggcagcagcggcagccgtccgtcactccagagtcttacctgctcctgtgtaggtcaaggctgagacacttgtcatgtggtcagatctgtcttagtcttttgtgtctcccaaggtgatgtttttgtggtttttcactttttatgggtctgctggtaaaaaaaaaaaaaaaaaaaaaaaaaaaaaaa

SEQ ID NO: 406532 - DNA, 1000 bp, Homo Sapiens; identical to SEQ ID NO: 294290

SEQ ID NO: 406533 - DNA, 422 bp, Homo Sapiens; identical to SEQ ID NO: 294291

SEQ ID NO: 406534 - DNA, 1000 bp, Homo Sapiens
gggaccagcacagtaatccagaaagtcttcattctctactccatttacagagaccagcaacaaaacacttaccgctgacacagagcagcagagatcaaacagtaaccccgatgctcttttctccttgtagtttcctggaagacacatctgattcatgccatcatgtgacctgggctggaagaaagggctggaatggtcattcaagacgcctccatgggcagaatggtttgcctatggcaggcagaattctgatatgcttcaacccagagcagtggccacacactcaagagtgagaacaggcgtgagccaccgtgcctggcccaggatctaaaaactttctaagtttcctccatcgttggcatcctcacagctatctccaatgtcactcaagagacatcaacagacatttaactgctgcagacttcattgctctgtcacctcaccttgaatctaacaaatcaaagtatttctgcaggtccaatggtctaaaatcaaatgcttgttaaatgactttttacaacaccccttactttcctaatccatttcaatcttattttttttattgtggtaaaaaacacatcacgtaaaatgtaccatcttaaccatttttaagcatatggtacagcagtgttaactccatgcatgttgtgaaacagacccccggaactttctcatcttgtaattctgaagttctatacccaccgaacaactcctcttttccccttccccctgcctgccccagctcttggcaccattattctgctttctgtttttgagagtctgactacttaagatacctcatacaagcgggatctggcttacatttcttgagcattgtattctggaaaagtgtttccttcctctgaaaaatgggtagagttctgaaggagaactactggtcttattgtacacttgctgtacctatttttatttaacaaatattcatctatggtataataaagatgtcatggttggaaaaaaaaaaaaaaaaaaaaaaaaa

SEQ ID NO: 406535 - DNA, 732 bp, Homo Sapiens; identical to SEQ ID NO: 31758

SEQ ID NO: 406536 - DNA, 1000 bp, Homo Sapiens; identical to SEQ ID NO: 294293

SEQ ID NO: 406537 - DNA, 1000 bp, Homo Sapiens; identical to SEQ ID NO: 294294

SEQ ID NO: 406538 - DNA, 1000 bp, Homo Sapiens; identical to SEQ ID NO: 119100

SEQ ID NO: 406539 - DNA, 1000 bp, Homo Sapiens; identical to SEQ ID NO: 119101

SEQ ID NO: 406540 - DNA, 1000 bp, Homo Sapiens
gtgcttaccaggcttccatgggcgtgactgcgagcgcaaggctggaccctgtgaacaggcaggctccccatgccgcaatggcgggcagtgccaggacgaccagggctttgctctcaacttcacgtgccgctgcttggtgggctttgtgggtgcccgctgtgaggtaaatgtggatgactgcctgatgcggccttgtgctaacggtgccacctgccttgacggcataaaccgcttctcctgcctctgtcctgagggctttgctggacgcttctgcaccatcaacctggatgactgtgccagccgcccatgccagagaggggcccgctgtcgggaccgtgtccacgacttcgactgcctctgccccagtggctatggtggcaagacctgtgagcttgtcttacctgtcccagaccccccaaccacagtggacacccctctagggcccacctcagctgtagtggtacctgccacggggccagccccccacagcgcaggggctggtctgctgcggatctcagtgaaggaggtggtgcggaggcaagaggctgggctaggtgagcctagcttggtggccctggtggtgtttggggccctcactgctgccctggttctggctactgtgttgctgaccctgagggcctggcgccggggtgtctgcccccctggaccctgttgctaccctgccccacactatgctccagcgtgccaggaccaggagtgtcaggttagcatgctgccagcagggctccccctgccacgtgacttgccccctgagcctggaaagaccacagcactgtgatggaggtgggggctttctggcccccttcctcacctcttccacccctcagactggagtggtccgttctcaccacccttcagcttgggtacacacacagaggagacctcagcctcacaccagaaatattatttttttaatacacagaatgtaagatggaattttatcaaataaaactatgaaaatgcaaaaaaaaaaaaaaaa

SEQ ID NO: 406541 - DNA, 1000 bp, Homo Sapiens
caactacactatatataaataaaatatatacaatatatacattgttttcactgtatcacattaaagtacttgggcttcagaagtaagagccaaccaactgaaaacctgagatggagatatgttcaaagaatgagatacaattttttagttttcagtttaagtaactctcagcattacaaaagagtaagtatctcacaaataggaaataaaactaaaacgtggatttaaaaagaactgcacgggctttagggtaaatgctcatcttaaacctcactagagggaagtcttctcaagtttcaagcaagaccatttacttaatgtgaagttttggaaagttataaaggtgtatgttttagccatatgattttaattttaattttgcttcttttaggttcgttcttatttaaagcaatatgattgtgtgactccttgtagttacacttgtgtttcaatcagatcagattgttgtatttattccactattttgcatttaaatgataacataaaagatataaaaaatttaaaactgctatttttcttatagaagagaaaatgggtgttggtgattgtattttaattatttaagcgtctctgtttacctgcctaggaaaacattttatggcagtcttatgtgcaaagatcgtaaaaggacaaaaaatttaaactgcttataataatccaggagttgcattatagccagtagtaaaaataataataataataataaaaccatgtctatagctgtagatgggcttcacatctgtaaagcaatcaattgtatatttttgtgatgtgtaccatactgtgtgctccagcaaatgtccatttgtgtaaatgtatttattttatattgtatatattgttaaatgcaaaaaggagatatgattctgtaactccaatcagttcagatgtgtaactcaaattattatgcctttcaggatgatggtagagcaatattaaacaagcttccacttttgactgctaaaaaaaaaaaaaaaaa

SEQ ID NO: 406542 - DNA, 1000 bp, Homo Sapiens
gtgctcgactgtgaggatggagtggctgcaaacaaaaagaatgaagctcgactgagaattgtaaaaactcttgaagacattgatctgggccctactgaaaaatgtgtgagagtcaactcagtttccagtggtctggcggaagaagacctagagacccttttgcaatcccgggtccttccttccagcctgatgctaccaaaggtggaaagtcctgaagaaatccagtggtttgcagacaaattttcattccacttaaaaggccgaaaacttgaacaaccaatgaatttaatcccttttgtggaaactgcaatgggtttgctcaattttaaggcagtgtgtgaagaaaccctgaaggtcgggcctcaagtaggtctctttctagatgcagtcgtttttggaggagaagactttcgagccagcataggtgcaacaagtagtaaagaaaccctggatattctctacgcccggcaaaagattgttgtcatagcgaaagcctttggtctccaagccatagatctggtgtacattgactttcgagatggagctgggctgcttagacagtcacgagaaggagccgccatgggcttcactggtaagcaggtgattcaccctaaccaaattgccgtggtccaggagcagttttctccttcccctgaaaaaattaagtgggctgaagaactgattgctgcctttaaagaacatcaacaattaggaaagggggcctttactttccaagggagtatgatcgacatgccattactgaagcaggcccagaacactgttacgcttgccacctccatcaaggaaaaatgatctgttaaatgaagctgtcatcaggctaaagggtattgaagctgcagagggatcaacttgtgcttgccagaggacgccaatgaagtttgaaacaccaacaatcagagattttgtttctgttcctcattaaatcatgagcttttgtgccgagaaaaaaaaaaaaaaaaaaaaaaaaaaaaaaaaaaaa

SEQ ID NO: 406543 - DNA, 1000 bp, Homo Sapiens; identical to SEQ ID NO: 294296

SEQ ID NO: 406544 - DNA, 1000 bp, Homo Sapiens
tcccatttttattacccttctttccatttctctctccagtcttccacctggaagccctctctggctaaggacaggcaggtgcccctctctccatcagaggacacctgtactggagagcaacacaggatggtctctgccatgaactggaggccaggaatctcctcactgaaaattacagtatggtaactttgcaaatggtggttgtttcttccaagactccagccctgattgcgcaaaactgaaaggcatgtgaagggaaggaagaggaagagtgcaaaacattgaagagagagctgagtgagctgaagagtgaggatatgagtagccccaacccaaacctggagatggggagaaacctacagaatactagccagagctcctccttgtcttggcagcctactagggacctggggaagcaaaaacgaaagctgggcaacatgcctgctttagaatgttttccttctacttacacatcttccacaggtctcagaatctttccttcctctcatccttttctcctatcttcatatctatcagagtatccactgtttattcaacaactactacttgatggtcagacacaaacaaacaagctaggtgctaattaataaagatacgagttttggccgggtgcggtggctcacgcctgtaatcccagcactttgggaggccgaggcgggcgaatcacgaggtcaggagttcaagaccagcctggccaacatggtgaaaccccatctctactaaaaatacaaacaattaactgagcatagtggtgggcacctataataccagctactccggaggctgaggcaggagaatcgcttgaacccaggaggcagaggttgcagtgagctgagatcgtgccactgcactctagccggagtgacagagtaagactctgtctcaaaaataaataaataaataaataaataaataaataaataaataaataaaaaataataatacaagttttcataagcacacttctaaaaaaaaaaaa

SEQ ID NO: 406545 - DNA, 1000 bp, Homo Sapiens
cagacccaggattcccgggccccagtacctcctccctcagacccaggactccaggcccccagcccctccttcctggacccaggactccaggcccccagcccctccttcctgatccagcagtccaggccccagccccttcttcctggacccaggagttgaagcctccatcgactccccctcaactttgagactgtagagtcaggtccctaagtccaccccaggggctggaaacctggagttcagggcccagactttggggtccgggagctgatggcccctctctcccggctccgcccgcagactctggctcctccgactacacccgggggaacctagtccgcctggggctggccgggctggtcctcatctccctgggcgcgctggtcacttttgactggcgcagtcagaaccgcgctcctgctggtatccgcccctgagccccaggagcactgcagcccgagacttccaacctgagtggcggagaagctgggaccctgggctggactgtcctttcctgcagccccacagtcctgctggctgagctccgcggaacggtccttagaccccgctgtgccctgtgctgtagcttctttccaggcctttcccaaggagtagctgaaaggaagacgcgattagtggttaagacttccaagccagaagacagagggttcgaatcccagcactgccgtctactcactgtagtagtagcagctacagaaaggtagtagtgagacgtgaagccagctggacttcctgggttgaatggggacctggagaacttttctgtcttacaagaggattgtaaaatggaccaatcagcactctgtaagatggaccaatcagcgctctgtaaaatggaccaatcagcaggacatgggcggggacaataagggaataaaagctggcgagcgcggcaccccaccagagtctgcttccacgctgtgggagctttgttctcttgctctacacaataaatcttgctgctgctaaaaaaaaaaaa

SEQ ID NO: 406546 - DNA, 1000 bp, Homo Sapiens; identical to SEQ ID NO: 294301

SEQ ID NO: 406547 - DNA, 1000 bp, Homo Sapiens
tggacgcggagcagcgcacggtgttcgccttcgtgctctgcctgctcgtggtgctggtgctgttgatggtgcgctgcgtgcgcatcctgctcgacccctacagccgcatgcccgcctcgtcctggaccgaccacaaggaggcgctcgagcgcgggcagttcgactacgcgttggtgtgaggggcgcggcgccccctaggcggccctgcgccggggtctcagagggccggcccggcggggggcgccgcggggccaggactgcgctcaggatcccgccccggagcccccagcccgggggagagggggagggagttgagagaagcccagcccctccccctcgagacccctcccatgtcccttcctggcctggccggagccccacctcgtgcctttatccgccctgtcccttcctctctgcgcatctcacccgcccggctggcccccacccccgactctgaatcccgggcgggaggaggacccccgcaccgccccctccccagcgtgtaagtggctctgctattgtgcgtccctggaagtggggacccccttgtccctcctccctcccctgttgtctggccgtcgtcaaccccaccttgactgagtgttgagcccgtccttgggctctggtccctgcggggcaggctctcccgggcccacggggcggacgctgcataccaatttgccctgcaccgcctgtcccggagacggagcccgaaggcctgccatggcggctgtgtcgaggatgcgtggcgcctgccgtggcgggacagcgtgggcaggctcatttctgcccccaacccgggccccaggacaggtcagcgcgccctgccccggtgcccaccgctgccccccatccgccctcctgccacttgcccctgacccccctgccgtgcctcccgcagccctcccatgccgttccactcctccctgcctctgagccgaacatgataataaaagctattattgagcgcaaaaaaaaaaaaaaaaaaaaaaaaaaaaaa

SEQ ID NO: 406548 - DNA, 1000 bp, Homo Sapiens; identical to SEQ ID NO: 294303

SEQ ID NO: 406549 - DNA, 782 bp, Homo Sapiens
attgggacgctgcggcctggccttcaggccactggctaccgaaccccggggctcttcaccagtccagctcgtttccagcaccatgtcggtgcggacgctaccgctgctcttcttgaacttgggcggggagatgctttacatcctcgaccaacggctgcgggcccagaacatcccgggagacaaggcccgcaaagttctgaatgacatcatctccaccatgttcaatagaaagtttatggaggaattattcaagcctcaagagctctactccaagaaggccctgaggactgtctatgagcgcctggctcatgcctccattatgaaactgaaccaggccagcatggataagctctatgacctgatgaccatggctttcaaatatcaagtattgctgtgtccccgacccaaggatgtgctgctggtcactttcaatcacttggataccatcaagggattcatccgagactccccaaccatcctgcagcaagtggacgagactttgcggcagctgacagaaatatatggtggtctctctgcaggggagttccagctgatccggcagacactcctcatcttcttccaagacctgcacatccgaagagagtgcttctggaagcatatgcaagaaactgttcacagtgcacagtgttgccttccaggagtggggaactatatggaggacaggagaaggagactgactttccattatgtatacccttttgagaactttgagttttgtacctgggcaaaataaaattttaaaaaggggaagaaaaaaaaaa

SEQ ID NO: 406550 - DNA, 1000 bp, Homo Sapiens; identical to SEQ ID NO: 294304

SEQ ID NO: 406551 - DNA, 1000 bp, Homo Sapiens; identical to SEQ ID NO: 220453

SEQ ID NO: 406552 - DNA, 1000 bp, Homo Sapiens; identical to SEQ ID NO: 401532

SEQ ID NO: 406553 - DNA, 1000 bp, Homo Sapiens; identical to SEQ ID NO: 224741

SEQ ID NO: 406554 - DNA, 1000 bp, Homo Sapiens; identical to SEQ ID NO: 401532

SEQ ID NO: 406555 - DNA, 1000 bp, Homo Sapiens; identical to SEQ ID NO: 119103

SEQ ID NO: 406556 - DNA, 1000 bp, Homo Sapiens; identical to SEQ ID NO: 119103

SEQ ID NO: 406557 - DNA, 1000 bp, Homo Sapiens; identical to SEQ ID NO: 294308

SEQ ID NO: 406558 - DNA, 1000 bp, Homo Sapiens
tgcaaagcgttgagtcatcaggtatttagagcctagccagctacccagtatccatgctgccatatcccttcattgtaaaaagtacctaaacattcgtgaaatgattttttttagctgaaaaatgctggcaagaagaattttaaagcttaaaataggtggtaaatttgaagtatgagtgtgttcacgagaaacataggcttttcaaaaaaatttttattcaaggcaaagcaaggaacatcttgagatatgtctcaagaatataaagatgtattattttaagccaaggagctgaaatatatctcagtttataaattcaggtatattctttttgtctccatggcaaccataacttttgaaccaaaaaaaattgtttttacatctttatgctgaaaatgtgtttagattaggaatatggtcgggctgaatttgctgttgctccctaaccaaatccacctcttgttttccttgtgagtccatggctaaatcaaagctgcccctgagaagagacttaatccaagcctgattgtactagtggcatcacttagaagtaggctttccctcttcctagtagatctcaatgttttataattccttaaaacagctgaaaattgggacaacatactttacgcaatgaacagtagttaaataggaaataaactagttccatataagtatacacctagagttttaattacctttataatgtttcttaaaagtgaaacttagatacaattgtgattggatacttagatactaagtgaaacttagtgtaacaattttgatctgttaaattggattttacatgtacatttgaatgccagaatttctaaataaatcccctggttaggaaattttaaaagtcaaagcttgttttcttcaaccactaccttctacattggttgacttagaccgtaagctttttaagtttctcattgtaatttaccttctcatgcagattgctgatgttttattaaaccttatttttacaaaaatgaaaaaa

SEQ ID NO: 406559 - DNA, 1000 bp, Homo Sapiens; identical to SEQ ID NO: 294310

SEQ ID NO: 406560 - DNA, 1000 bp, Homo Sapiens
atgttcctacccataactaaatggctgccagcatacaaattcaaggaatatgtgttgggtgacttggtctcaggcataagcacaggggtgcttcagcttcctcaaggcttagcctttgcaatgctggcagctgtgcctccaatatttggcctgtactcttcattttaccctgttatcatgtattgttttcttggaacctccagacacatatccataggtccttttgctgttattagcctgatgattggtggtgtagctgttcgattagtaccagatgatatagtcattccaggaggagtaaatgcaaccaatggcacagaggccagagatgccttgagagtgaaagtcgccatgtctgtgaccttactttcaggaatcattcagttttgcctaggtgtctgtaggtttggatttgtggccatatatctcacagagcctctggtccgtgggtttaccaccgcagcagctgtgcatgtcttcacctccatgttaaaatatctgtttggagttaaaacaaagcggtacagtggaatcttttccgtggtgtatagtacagttgctgtgttgcagaatgttaaaaacctcaacgtgtgttccctaggcgtcgggctgatggtttttggtttgctgttgggtggcaaggagtttaatgagagatttaaagagaaattgccggcgcctattcctttagagttctttgcggtcgtaatgggaactggcatttcagctgggtttaacttgaaagaatcatacaatgtggatgtcgttggaacacttcctctaggctttcatacagagatgaccagaagatggagaccgtaggggaaatgccgtgtaatccaagcagttcaggctttggggccaggtggacagggtttgaatgccagctctggaatctgttagtggggtgacctcagccaagtcacttaacacttctgaactttgttttctcttttgtgaaataaagaaaaaatgaatctacaaaaaaaaaaaaaaaaaa

SEQ ID NO: 406561 - DNA, 1000 bp, Homo Sapiens; identical to SEQ ID NO: 224742

SEQ ID NO: 406562 - DNA, 1000 bp, Homo Sapiens; identical to SEQ ID NO: 294312

SEQ ID NO: 406563 - DNA, 1000 bp, Homo Sapiens
acaagcgtcatgaacaggatgcacgtggtcagcgtcccctacgcgctgatgaaggcgaacccactctcctggatccagaaagtgtgcttctataaagctcgggccgcgctggtgaagtcgcgagacatgcactggtctctcctagctcagcggggccagagggacgtcagcctcagctcactgcgcatgctgattgtggccgatggtgccaacccgtggtcgatctcctcctgtgacgccttcctcaacgtcttccagtccagaggtctgaggccagaggtcatctgtccttgtgcaagttctcctgaggcgctgactgtcgccatccgcaggccacctgatctgggaggaccacctccaagaaaagcagtcctgtcgatgaacggtctaagttatggtgttatcagagtggatactgaagaaaagttgtcagtccttactgttcaggacgttggtcaggtgatgcctggagctaatgtatgtgttgtgaagttagaaggtaccccttatctttgtaaaactgatgaagtgggagaaatatgcgtcagttccagtgcaactggcacagcgtactatggattgcttggaatcacgaagaatgtgtttgaggcagttccggtcaccacaggaggagcacccatctttgacaggccattcaccaggacaggcctgctgggcttcatcgggcctgacaacctggtcttcatcgtgggcaaactggacgggctgatggtcactggagttcgcagacacaatgcagatgacgttgtggccaccgcactggccgtggagcccatgaagtttgtctacagaggcaggtgatgcgctgcggacccccacgccgggagtagattccttcatttgcagctcgggaagtctttgtgcagtagatggaaagcccagcaaacttgaattcacaaagcctaaaaattgttgtacatcagaaaactcctaaagtaaaaggaaaatatttgcagcaatgaaaaaaaaaaaaaaaaaa

SEQ ID NO: 406564 - DNA, 1000 bp, Homo Sapiens
gaaggcgaacccactctcctggatccagaaagtgtgcttctataaagctcgggccgcgctggtgaagtcgcgagacatgcactggtctctcctagctcagcggggccagagggacgtcagcctcagctcactgcgcatgctgattgtggccgatggtgccaacccgtggtcgatctcctcctgtgacgccttcctcaacgtcttccagtccagaggtctgaggccagaggtcatctgtccttgtgcaagttctcctgaggcgctgactgtcgccatccgcaggccacctgatctgggaggaccacctccaagaaaagcagtcctgtcgatgaacggtctaagttatggtgttatcagagtggatactgaagaaaagttgtcagtccttactgttcaggacgttggtcaggtgatgcctggagctaatgtatgtgttgtgaagttagaaggtaccccttatctttgtaaaactgatgaagtgggagaaatatgcgtcagttccagtgcaactggcacagcgtactatggattgcttggaatcacgaagaatgtgtttgaggcagttccggtcaccacaggaggagcacccatctttgacaggccattcaccaggacaggcctgctgggcttcatcgggcctgtgagtatgtcctcctgtaccagcactggcagtcagagaaggtagggggtgtggctaagggacacctcgttgcagccccacccttgtcctggccgttcctgacctcccatgtggccttggtcggtggcgctgacctccctgcccatcaccctacctgtgtgcagggccatccacacctccgagactggtgcacagtcctgcacacaggcctgagtcgggggtccccggggtggatgaggatgttttgctttttatatggagtggcaggtttgtgagtattcattatatcattctttaccattttggatgtctaaactattcaaaaataaatgcttctatttgtaaaaaaaaaaaaaaaaa

SEQ ID NO: 406565 - DNA, 1000 bp, Homo Sapiens; identical to SEQ ID NO: 119105

SEQ ID NO: 406566 - DNA, 1000 bp, Homo Sapiens
gaaaattcacaatgagaggaaatcctatgaatgtaaggaatgtggaaagacctttcttcatggctcagagtttaatcgacatcagaaaattcatactggtgagagaaactatgaatgtaaggaatgtggaaagaccttttttcgtggttcagaacttaatcgacaccagaaaattcatactggaaagaggccatatgaatgtgaagaatgtggaaaagcctttctctggggttcacaacttactcgacatcagagaatgcatactggtgaggaaccttacgtatgtaaagaatgtgggaaatcttttatctggggttcacagcttacacgacataagaaaattcatactgatgcagaaccttatgggtgcaagaaaagtagccacatctttagtcaccattcatattttactgaacaaaaaattcataatagtgcaaatctctgtgaatggacagactatgggaacacctttagtcatgagtcaaactttgctcaacaccagaatatttacacttttgagaaatcctatgaatttaaagattttgagaaagcattttcttcaagctctcacttcatttcactcttgtgaaatattatataaaagtgtaggaagggctttattcatgactcattaattgatgtcatttatttttttctcttgaggaacaccacaaatgtaagtaatattggaaggcattttaacagagcacacatccagcagcagcagcagcagcagcagagaattcatcatgcaatcaatataggaaagaaattactgatcagttatcaattgcagaatatcagggtaaaattttatgagatagcatgaattctttttgaatcacttgaacccgggagacagaggttgcagtgagctgagatcgcaccactgcactccagcctgggcgacagagcgagactccagctcaaaaaaaataaataaaaattaaaaaataaaataaaataaaaaattcaaaaaaaaaaaaaaaaaaaaaaaaaa

SEQ ID NO: 406567 - DNA, 1000 bp, Homo Sapiens; identical to SEQ ID NO: 119107

SEQ ID NO: 406568 - DNA, 1000 bp, Homo Sapiens; identical to SEQ ID NO: 117184

SEQ ID NO: 406569 - DNA, 980 bp, Homo Sapiens; identical to SEQ ID NO: 119109

SEQ ID NO: 406570 - DNA, 836 bp, Homo Sapiens; identical to SEQ ID NO: 294318

SEQ ID NO: 406571 - DNA, 1000 bp, Homo Sapiens; identical to SEQ ID NO: 294319

SEQ ID NO: 406572 - DNA, 1000 bp, Homo Sapiens
tagcaaggaggactttagagcctcttcctctactcttaggagacagactgtagacatgacatatagtgccttacctgaaagcaagcccattatgacaagctcagaggcttttgaacctccaaaatatttaatgcttggtcaacaggcagtaggtggagttcccattcagccttccgtaaggactcagatgtggcttacagagcagctgcggacaaatcctttggaaggtagaaatacagaggattcttacagtttagctccttggcaacagcagcaaattgaagactttcgacaaggaagtgaaacaccaatgcaggttttgactggatcatctcgtcaaagttattcacctggctatcaggatttcagtaagtgggaatcaatgttgaaaataaaagaaggacttctaaggcagaaagaaattgtaatcgatcggcagaagcaacaaattacccacctgcatgagaggataagggataatgaattacgggctcaacatgccatgttaggacattatgtaaattgtgaggattcttatgtggctagtttgcagccacaatatgagaacacttcactccagacaccattttcagaggaatcagtttcccattcccaacaaggggaatttgagcaaaagcttgcatctactgagaaagaagttttacagcttaatgagtttctcaaacaaagactaagcctatttagtgaagagaagaagaaactagaggaaaaagtaggtttttctaataaagttgaattaggtcaacaacatttcctcagcatataattatttgtctgtcatttaccctgtcaggtgtcatgccaggttatgtatacatttatgtggaggtgattaattttgtagtaacttttgagaagccctctgctgtctgcagaaatccaaggattttctttgaggatagaaatgctcttgtatatctttctaacaaatagtaaaatctttaaaaaagtaaaaaaaaaaaaaaaaaaaaaaaaaaaa

SEQ ID NO: 406573 - DNA, 1000 bp, Homo Sapiens
ccagtacgaggatgtggatggcaattggatctacggtggccacaaccatccgccattgatggtgttgcagccgctcttcacgaacacgggctatggcgaccacgaccaggaaatgcttatgttgcagacacaagaggaagtggtgggctattgcgactcagacaaccagctaggcaacgacttggaggaccagttggccctcccggatagcattgaagacgagcacttccagatgaccctggcctctctgtcggcctcggcggcatcaacatcaacatcaacccagagccgcagcaaaaagcccagcaaaaggcccagcggcaagagtgccaccagcactgaggccaacccggcaggcagcagctccagcctgggcacgaggaagtgggagcagaagcaaatgcaggtcaaaacgctggagggtgagttttccgtgactatgtggtcccctaacgataacaatgaccaaggggcagtgggtgaaggccaggctgaaaacccacctgattattccgagtacttgaaagggaagaaacttcctcctggggggttaccaggcattgatctctcagatcctaaacagctggcagaatttactaaagtgaagcccaaaaggtccaaaggagaacctcccaaaacagtcccttgctcttatagcggctgcgaaaagatgttccgggattacgccgccatgagaaaacatctccacatccacgggcccagagtccacgtatgtgcagaatgtggcaaagcttttcttgagagctcaaagctgagacgacaccagctggtccacaccggcgagaagccctttcagtgcacattcgaaggctgcgggaaacgcttttcccttgatttcaatttgcgcacacacttgcgcatccacaccggcgataagcccttcgtgtgccccttcgatgtttgcaacaggaagttcgctcagtcaaccaacctgaaaacccacatattaacgcatgtgaagaccaaaaacaacccgtga

SEQ ID NO: 406574 - DNA, 1000 bp, Homo Sapiens; identical to SEQ ID NO: 115547

SEQ ID NO: 406575 - DNA, 1000 bp, Homo Sapiens; identical to SEQ ID NO: 119111

SEQ ID NO: 406576 - DNA, 1000 bp, Homo Sapiens; identical to SEQ ID NO: 117842

SEQ ID NO: 406577 - DNA, 698 bp, Homo Sapiens; identical to SEQ ID NO: 294324

SEQ ID NO: 406578 - DNA, 1000 bp, Homo Sapiens; identical to SEQ ID NO: 397806

SEQ ID NO: 406579 - DNA, 1000 bp, Homo Sapiens; identical to SEQ ID NO: 115619

SEQ ID NO: 406580 - DNA, 1000 bp, Homo Sapiens; identical to SEQ ID NO: 119113

SEQ ID NO: 406581 - DNA, 1000 bp, Homo Sapiens; identical to SEQ ID NO: 291979

SEQ ID NO: 406582 - DNA, 1000 bp, Homo Sapiens; identical to SEQ ID NO: 224747

SEQ ID NO: 406583 - DNA, 434 bp, Homo Sapiens
gtcgaatccaaatcactcattgtgaaagctgagctcacagccgaataagccaccatgaggctgtcagtgtgtctcctgatggtctcgctggccctttgctgctaccaggcccatgctcttgtctgcccagctgttgcttctgagatcacagtcttcttattcttaagtgacgctgcggtaaacctccaagttgccaaacttaatccacctccagaagctcttgcagccaagttggaagtgaagcactgcaccgatcagatatcttttaagaaacgactctcattgaaaaagtcctggtggaaatagtgaaaaaatgtggtgtgtgacatgtaaaaatgctcaacctggtttccaaagtctttcaacgacaccctgatcttcactaaaaattgtaaaggtttcaacacgttgctttaataaatcacttgccctgc

SEQ ID NO: 406584 - DNA, 1000 bp, Homo Sapiens
ttagaatctagcattcgtagtgtggtttttaggccaccaaacccttggacaatggcaattatgaatgtattagctgagctacatcaggagcatgacttaaagttaaacttgaagtttgaaatcgaggttctctgcaagaaccttgcattagacatcaatgagctaaaacctggaaacctcctaaaggataaagatcgcctgaagaatttagatgagcaactctctgctccaaagaaagatgtcaagcagccagaagaactccctcccatcacaaccacaacaacttctactacaccagctaccaacaccacttgtacagccacggttccaccacagccacagtacagctaccacgacatcaatgtctattcccttgcgggcttggcaccacacattactctgaatccaacaattcccttgtttcaggcccatccacagttgaagcagtgtgtgcgtcaggcaattgaacgggctgtccaggagctggtccatcctgtggtggatcgatcaattaagattgccatgactacttgtgagcaaatagtcaggaaggattttgccctggattcggaggaatctcgaatgcgaatagcagctcatcacatgatgcgtaacttgacagctggaatggctatgattacatgcagggaacctttgctcatgagcatatctaccaacttaaaaaacagttttgcctcagcccttcgtgtaagttggctatttccttggtataggtacaaaacgtattactgcttgtctgtaataatttttttctttgtctatatatggcactgggcgttaccacttattcttaataatcaccatatttgtttgatgtcttccatcattttagattgtaattctgtgaggcaaagcatcatgtctgtgtgtttttttttttttctgttatattctcaacacgatgtttgacagatagtagatacccaaatatttgttggtttaaataaattaagatttaaaaaggaaaaaaaaaaaaaaa

SEQ ID NO: 406585 - DNA, 1000 bp, Homo Sapiens
ccaaatccgggagaagttcatcatctcggactggagatttgtcctgtctggatcttacagcttcacctggctctgcggacacgtgcaccggaacatcctctccaagttcacaggccaggcggtggagctgtttgacgaggagttccgccacctctacgcctcctccaagcctgtgatgggcctgaagtccccgcggctggtcgcccccgtcccgcccggagcagccccggccaatggccgccttagcagcagcagtggctccgccagtgaccgcacgtcctccaaccccttcagcggccgctcggcaggcagccaccccgttcctgaaagtaaacaaaacaaaacaaaaacaaaaaaacaaacaacactttggttcctgatggctttctgaacccagccctgaccttgttgtttcacagctgacggctgagatgaggttagaatgactgggcccggctgaacattccaaattggatttcaccatctgctgagaaagtttaaggaaggcaaagcttgccaggtcacagaagctcccaagcccagctttccaaaggcctcagcctgtgcctgtgtcgagctcagtcctgggagataggggagaacctgcaggcaggaacaagcccccctactcctgaccaccctccatcagcagtctcccctccgtggtcgtctttgttgacaaaggtgcagtttctcctctcctgggcacctgtaacatgtgatgcgctgcctgctgggaggttaggtcggggctgccccggcgagtggagcatgagcagaaccgccgagggtcacttctgggcagaagctttgagagcctgggtccaggttgccacatagaagcagctctccagttgaaaccctcctctgccagcctggggtcctaagcgatgagcagaatcccccactcccaccccaccaacccacaatggatatgtagtgagcaagaaataaacctttgttgtttaagccaaaaaaaaaaaaaaaaaaaaaaaaaaaa

SEQ ID NO: 406586 - DNA, 1000 bp, Homo Sapiens; identical to SEQ ID NO: 294328

SEQ ID NO: 406587 - DNA, 1000 bp, Homo Sapiens; identical to SEQ ID NO: 116816

SEQ ID NO: 406588 - DNA, 1000 bp, Homo Sapiens; identical to SEQ ID NO: 224748

SEQ ID NO: 406589 - DNA, 1000 bp, Homo Sapiens; identical to SEQ ID NO: 283589

SEQ ID NO: 406590 - DNA, 1000 bp, Homo Sapiens
gctccgacttcctcatgaagagactccagaaaggggattataaatcattacattggagtgtgcttctctgtgcggatgaaatgcaaaagtactttgactcaggagactacaacatggccaaagccaagatgaagaataagcagctgccaagtgcaggaccagacaagaacctggtgactggtgatcacatccccaccccacaggatctgccccagagaaagtcctcgctcgtcaccagcaagcttgcgggtggccaagttgaatgatgctgcccggggctctgccagatcctgagacgcttcccctccctgccccacccgggtcctgtgctggctcctgccccttcctgcttttgcagccaggggtcaggaggtggctcgggtgtgggctggagaggcagaagccctttcctgttggtgtcccagcacatggagccccttgggctgagcaccaagaccttgaaccttttttgttttaccttttttccaaataacagttgggagaaatatcaatgaaattctgggggtgggggtggggttgaaagggtggggtgggagatatggaggagtatgaattagggcttggagttggtaaaaacattcctgactatccttcttaaccacgtggctgatgtggggtaggtatgaggggaaggaagtggagtagcctaatgaaaaggggttctagttgagctctgtagataaatgccttgtttcagtgtggttggagacctggtgtcagataaaagaaactccatccgcacagacagatgcaaacagctcctctagttctgcagagctagttgagaactcaacattaatcattttaaaaagtactgtccttgaaatagatttgctgtgggaagaagggcagtgagtgtgggagaaaggagccgtgagcgtggggaaccccacagagcccaaaggactttttcagtattcgaaataaacaaaacaaaaacccatgaaaaaacccaacccagaaataaaaaaaaaaaaaa

SEQ ID NO: 406591 - DNA, 925 bp, Homo Sapiens; identical to SEQ ID NO: 31773

SEQ ID NO: 406592 - DNA, 1000 bp, Homo Sapiens; identical to SEQ ID NO: 119115

SEQ ID NO: 406593 - DNA, 1000 bp, Homo Sapiens; identical to SEQ ID NO: 119116

SEQ ID NO: 406594 - DNA, 1000 bp, Homo Sapiens; identical to SEQ ID NO: 294335

SEQ ID NO: 406595 - DNA, 1000 bp, Homo Sapiens; identical to SEQ ID NO: 119118

SEQ ID NO: 406596 - DNA, 1000 bp, Homo Sapiens; identical to SEQ ID NO: 294340

SEQ ID NO: 406597 - DNA, 1000 bp, Homo Sapiens
accatgccatcgtctaccccatgaagttccttcaaggagaaaagcaagccagggtcctcattgtgatcgcctggagcctgtcttttctgttctccattcccaccctgatcatatttgggaagaggacactgtccaacggtgaagtgcagtgctgggccctgtggcctgacgactcctactggaccccatacatgaccatcgtggccttcctggtgtacttcatccctctgacaatcatcagcatcatgtatggcattgtgatccgaactatttggattaaaagcaaaacctacgaaacagtgatttccaactgctcagatgggaaactgtgcagcagctataaccgaggactcatctcaaaggcaaaaatcaaggctatcaagtatagcatcatcatcattcttgccttcatctgctgttggagtccatacttcctgtttgacattttggacaatttcaacctccttccagacacccaggagcgtttctatgcctctgtgatcattcagaacctgccagcattgaatagtgccatcaaccccctcatctactgtgtcttcagcagctccatctctttcccctgcagggagcaaagatcacaggattccagaatgacgttccgggagagaactgagaggcatgagatgcagattctgtccaagccagaattcatctagaccctagggcagtgccagtgctaggctgagcaccatcagctctcccaggtccttgtcacctgcttgggcacgtgcatggaacccgagccaacttcaccccaccctcgtcattacctgggagatgcacaagacaaatgttctaatgactgcatgcactgcttaagtattggccaacacgaactccccagttattcatgccagccaggaaggaaacgccttccttccccaccattcccagccctccttcccactggccagcacctgaacccagtgaacacaggcattagtggtccagggtcctggcttggagccagtgagtagac

SEQ ID NO: 406598 - DNA, 1000 bp, Homo Sapiens
ctctgggagacaatagatgtgaatgggactgagctgaactgcagctgggtgcacctggacctgggcagtgatgtggcccagcccctcctgactctgcctggcacagcctgtggccctggcctggtgtgtatagaccatcgatgccagcgtgtggatctcctgggggcacaggaatgtcgaagcaaatgccatggacatggggtctgtgacagcaacaggcactgctactgtgaggagggctgggcaccccctgactgcaccactcagctcaaagcaaccagctccctgaccacagggctgctcctcagcctcctggtcttattggtcctggtgatgcttggtgccagctactggtaccgtgcccgcctgcaccagcgactctgccagctcaagggacccacctgccagtacagggcagcccaatctggtccctctgaacggccaggacctccgcagagggccctgctggcacgaggcactaaggctgagctggctgaccgacccaatccccctacccgccctctgcccgctgacccggtggtgagaagcccgaagtctcaggggccagccaagcccccacccccaaggaagccactgcctgccgacccccagggccggtgcccatcgggtgacctgcccggcccaggggctggaatcccgcccctagtggtaccctccagaccagcgccaccgcctccgacagtgtcctcgctctacctctgacctctccggaggttccgctgcctccaagccggacttagggcttcaagaggcgggcgtgccctctggagtcccctaccatgactgaaggcgccagagactggcggtgtcttaagactccgggcaccgccacgcgctgtcaagcaacactctgcggacctgccggcgtagttgcagcgggggcttggggaggggctgggggttggacgggattgaggaaggtccgcacagcctgtctctgctcagttgcaataaacgtgacatcttgggagcgttcaaa

SEQ ID NO: 406599 - DNA, 376 bp, Homo Sapiens; identical to SEQ ID NO: 119120

SEQ ID NO: 406600 - DNA, 1000 bp, Homo Sapiens; identical to SEQ ID NO: 116009

SEQ ID NO: 406601 - DNA, 1000 bp, Homo Sapiens; identical to SEQ ID NO: 294344

SEQ ID NO: 406602 - DNA, 1000 bp, Homo Sapiens; identical to SEQ ID NO: 294345

SEQ ID NO: 406603 - DNA, 1000 bp, Homo Sapiens; identical to SEQ ID NO: 119121

SEQ ID NO: 406604 - DNA, 1000 bp, Homo Sapiens; identical to SEQ ID NO: 294347

SEQ ID NO: 406605 - DNA, 1000 bp, Homo Sapiens; identical to SEQ ID NO: 224751

SEQ ID NO: 406606 - DNA, 1000 bp, Homo Sapiens
ggtaccgcgagcggcagcgacagcacaagctcacgatcccctccatccagtacacggagcaatgtcacctggtgcgctgtgggaatcggcactttgatgagcactgcctcccgtccaccatccacggggatatgagggagctcattgactcggcccgcaggcacaactttctggtctacctgcaatgctggaagctctgtaagtcctatggcctcccgctgacagaggacatcctcatgaaagccttgctgtacccaggagacaagatcattttccagatggacaaagtgtgccccatccggcagccgggaggctactactctgactggaaggtcttttctccgaatctggctctgctccggtcccagggccctggcaagtctaagaggactgacaagaaaacgccaaagaaaagcaagaaaatgcgctttaaggagtttgaggaatttaccaggaagctgaaggtgaagaggtccagtggtctgcagcaaacacaccccaattccttctggccgggtcatcttctggataagctgcagctctacctgcccactgtggccacagaccggagcctggcgctcttcagttgtgttcaacaccagccccatgtctacccagccacctaccaccctgaccactggtggccccttaggaacaagaactacatgacccacgcccattatgatgccgccaaggtgtactacatcaactagagctagccaggtgttgccggacccagccttcctgggccaggggccagtgcagccagcggcccagagcccagacacaagaggagtgtcaaagagtcaaactaaagaaatcctttcaaagagggatggaccgggggccagttccctctggactcaaagtgtccagtgtctcagagggtagatgtgtccaaggaatgacgtgcagtttttgactatttccctcccctgacctctgccctttctacataaagcaggttggagtttttctcatttcaaaaaaaaaaaaaaaa

SEQ ID NO: 406607 - DNA, 1000 bp, Homo Sapiens; identical to SEQ ID NO: 119122

SEQ ID NO: 406608 - DNA, 1000 bp, Homo Sapiens; identical to SEQ ID NO: 119123

SEQ ID NO: 406609 - DNA, 1000 bp, Homo Sapiens; identical to SEQ ID NO: 224752

SEQ ID NO: 406610 - DNA, 1000 bp, Homo Sapiens; identical to SEQ ID NO: 294351

SEQ ID NO: 406611 - DNA, 1000 bp, Homo Sapiens; identical to SEQ ID NO: 294353

SEQ ID NO: 406612 - DNA, 1000 bp, Homo Sapiens; identical to SEQ ID NO: 294355

SEQ ID NO: 406613 - DNA, 1000 bp, Homo Sapiens
gtgtgcgcaccgcctacggcttctgcgcgctgctcgagagcccgcacacgcgccgcaaggagtcgctcctgctcgggggcccgcccgcgccccggccccgggcccacacctacggcggcggcggcggcccggacgccctcctggggaccctgcgcgtcccgcgagctccgggcccggcgacccccgcggcccccggctgtccccgcccgccccaggacgcgctcgcccggcggccccgcggctgccgcctcctgcgcgtccccgacgggctgctgagtcgcgcgctgcgggctgggaggagtcgccgcctgacccgcgtccgctccgtctccagcgggaacgaggacaaggagcgccgcgcgggctcccagtccccggcccgggccccctccacgagcccgccgtcgtcccgggtcccgtttcccgagcgcctggaggccgagggcaccgtggctctgggccgcgccggcgacgccctgcgcctggccgccgagtactgtccgggaaccgggcggctccgcctccggctgctccgcgccgagagcccggccggaggcgcccccgggccccgagccgtcagctgtcgcctcagcctcgtcctgcggccgccgggcaccgcgcttcggcaatgcagcactgtggtggggcgcagccgcaaggcctcctttgaccaggacttctgcttcgacggcctctcggaggacgaagtgcgccgcctggccgttcgagtcaaggcccgggacgagggccgcggccgggagcggggccgcctgctgggccagggtgagctgtccctgggcgccctcctgctgctctgagggcccagccctccccggggcgctctgcccgggggactccggacactgacagccgcgtggtacaaaataaacgtgtatttgttgttcttatcagtcccgtttcagtacaacactggcagagatgattctagattaactatcccagtaaaagatatgatattttccatagatacctccagaaa

SEQ ID NO: 406614 - DNA, 1000 bp, Homo Sapiens; identical to SEQ ID NO: 119124

SEQ ID NO: 406615 - DNA, 1000 bp, Homo Sapiens
aatgttctggatgtggagacccgtgtgcatccaaacccttttttgcatggggcccagggatcctgtgggaaaggttgcggcctcatcactggagttcagacatttacgcacctgtgcgttggactaaggacgtgttctggaaagggacttgagggggatccccaggaagatgtcccaagaaggaggctggcagtgcaggacgaggcggggccagccggcccctgggtcagcatccctccagccacgacggcccgtgggctttcgtacgggggcagggggtgatctgtctgaaggacgtaggtgatggtgcttcccagctggagagctggaagcaggaggaggacactccagcagcagcctcccaggcagggcagccatagagctggggacagctcttgactgggtgaggcccggcatggggtttcccagggctcctgcaggggcctcctgagggagcccttggggtcactccacagtctgggctttctgtagtccggtgggtcagggctccaagcaccaggagagatccagggatgcgcttatgtttgggccacccccggtgggcttgttcgttcagcccccttcgtttcctggcctgctctacttatatctgtttgtgaagaattattacacagaatctagaaaccagctttcccttttctcccagggttggagcccaggaagcaaaccagcactgcaccctagatttcagccagaggacgaaagccctgccctcagctttctcagaccagccctggagtaggtggcccggggagacctgggcagtgtccctgcttgtcctgcagactgtgtggctctgcagacctctagatggaggaggcacaattctctaatgctggacgaggacactgatcatggaaactcaccccaaaccttgaatcgtgatagcatttgaggcagcctgaccggtgccacatgaacctgaaaggaatcaagatataatttattttgaaaataaatcagacactttcagaatttg

SEQ ID NO: 406616 - DNA, 1000 bp, Homo Sapiens; identical to SEQ ID NO: 224754

SEQ ID NO: 406617 - DNA, 1000 bp, Homo Sapiens
ctgcccttgtcctctggcccctctaccagttcaacgagaagtatggtgtccagccctggcagacgagagatgtgagctgcagcgacagaaacccctaccttgtgtgtatctgggaccgccgactggctgtgaccaacctgacggccgtcaacttgctggcctatgtgggcgacctggtgtactctgcccacctggtttttgtcaaggtctaagactcccaaagggccccgtttgcctctccaacctcttcatcctgccccccctgagttttctttattgagtattcatttcctgtgttttcctcttccctatctcccctcctccccttttctttccttcccaattcatcgcactttcccagttctctgatgtatgttcttccctttcctctgctgtttccttcttgttttgttctgttgcccacaacctgttttcacccgtttctctttttccactctctcttttgtttctttcctctcaattcttttctaggtttcctgttggttttcttatctgcctatttcccgaccatcttctcctatttcctggggagccctgaggcttttcttctcctgcccccacgcacctccagcggtgatgagctccacacccccacacccattgcagctgtggcgccacgtcctcccaaggggccttctgcccgcccccgccctagccctagctgtgccttagtcagtgtgtacttgtgtgtgtttgggggagtgggaattgggccccctttctcccagtggaggaaggtgtgctgtgcacctcccctttaaattaaaaaaaatgtatgtatctctggaggtcaataatttccagtgagcgggaggcttcaagcgcagaccctgggtccctagacctcgcctagcactctgccttgccagagattggctccagaatttgtgccagacttacagaaaacccactgcctagaggccatcttaaaggaagcaatggatggatccctttcatcccaactgttcttcgcggtatc

SEQ ID NO: 406618 - DNA, 1000 bp, Homo Sapiens; identical to SEQ ID NO: 294360

SEQ ID NO: 406619 - DNA, 1000 bp, Homo Sapiens; identical to SEQ ID NO: 294361

SEQ ID NO: 406620 - DNA, 1000 bp, Homo Sapiens; identical to SEQ ID NO: 224755

SEQ ID NO: 406621 - DNA, 1000 bp, Homo Sapiens; identical to SEQ ID NO: 119125

SEQ ID NO: 406622 - DNA, 1000 bp, Homo Sapiens; identical to SEQ ID NO: 294365

SEQ ID NO: 406623 - DNA, 500 bp, Homo Sapiens; identical to SEQ ID NO: 294367

SEQ ID NO: 406624 - DNA, 1000 bp, Homo Sapiens; identical to SEQ ID NO: 224757

SEQ ID NO: 406625 - DNA, 1000 bp, Homo Sapiens; identical to SEQ ID NO: 294368

SEQ ID NO: 406626 - DNA, 1000 bp, Homo Sapiens; identical to SEQ ID NO: 224758

SEQ ID NO: 406627 - DNA, 1000 bp, Homo Sapiens; identical to SEQ ID NO: 119126

SEQ ID NO: 406628 - DNA, 1000 bp, Homo Sapiens; identical to SEQ ID NO: 294371

SEQ ID NO: 406629 - DNA, 1000 bp, Homo Sapiens; identical to SEQ ID NO: 294372

SEQ ID NO: 406630 - DNA, 1000 bp, Homo Sapiens; identical to SEQ ID NO: 294373

SEQ ID NO: 406631 - DNA, 1000 bp, Homo Sapiens; identical to SEQ ID NO: 119127

SEQ ID NO: 406632 - DNA, 1000 bp, Homo Sapiens; identical to SEQ ID NO: 224760

SEQ ID NO: 406633 - DNA, 1000 bp, Homo Sapiens; identical to SEQ ID NO: 119128

SEQ ID NO: 406634 - DNA, 1000 bp, Homo Sapiens; identical to SEQ ID NO: 294374

SEQ ID NO: 406635 - DNA, 1000 bp, Homo Sapiens; identical to SEQ ID NO: 294375

SEQ ID NO: 406636 - DNA, 1000 bp, Homo Sapiens; identical to SEQ ID NO: 294376

SEQ ID NO: 406637 - DNA, 1000 bp, Homo Sapiens
tgatgctgttgttgtaggcgtggactataggctggctcctcaacaccactttcctgctcagtttgaagatggccttgctgcagtcaaattttttcttttggaaaaaattcttacaaaatatggagtggatcccacccgaatctgcatttcgggagacagttctgggggcaatttagcaacagcggtcactcaacaggtgcagaatgatgctgaaataaaacataaaatcaagatgcaggtcttactttaccctggcttacagataacagattcttatttgccatctcaccgagaaaatgagcatggtatagttttgaccagggatgtagccataaaactcgtgagcttatatttcaccaaggatgaagcacttccctgggcaatgagaagaaaccaacacatgcctctggagtcaagacatctgtttaagtttgttaactggagtattcttcttcctgagaagtatagaaaagactatgtatatactgaaccaattcttggaggacttagttattcattgccaggacttacagacagcagagcattacccttgttggccaatgattctcagttacagaatttgccactaacctatattcttacttgtcaacatgatctcttaagagatgatggacttatgtatgttacaagacttcgaaatgttggagtccaagttgttcatgaacatattgaggatggaattcatggagctttatcattcatgacttcaccattttatttacgtctaggtcttaggataagagatatgtatgtaagttggctggataagaatttataaatatgtgatgtgtatgtatagcccttacatagtggattgtaatttgtgatattttgtggttttggagcaaagaacaatgtcatttgagttatctaaatctacatttgcaacatttgtagcagttaatgtgtgtccttgaagagttattaaattttctgacttgcagaccccaaaaaaaaaaaaaaaaaaaaaaaaaaaaaa

SEQ ID NO: 406638 - DNA, 1000 bp, Homo Sapiens; identical to SEQ ID NO: 294377

SEQ ID NO: 406639 - DNA, 1000 bp, Homo Sapiens; identical to SEQ ID NO: 224761

SEQ ID NO: 406640 - DNA, 1000 bp, Homo Sapiens; identical to SEQ ID NO: 294378

SEQ ID NO: 406641 - DNA, 1000 bp, Homo Sapiens
ccgcgactcgccccccggcagcccgcgccgccgccccgggcccggcccccgctccgcctcggcctcgctgctgcccgacgccttcgccctgaccgccttcgagtgcgagccacaggccctgcgccgcccgcccgggcccttccccgctgcgcccgccgcccccgacggcgcagatcccggagaggccccgacgcccccaagcagcgcccagcggagcccagggccacgcccctctgcgcactcgcacgccggctctctgcgccccggcctgagcgcgtcgtggggcgagcccggggggctgcgcgcggcgggcggcggcggcagcaccagcagcttcctgagttccccctccgagtcctcgggctacgccacgctgcactcggactcgctgggctccgcgtcctaggaccgccggcgcctccccacggacgccaggcaggccaggccgctctccggggccgcagcaccaaagacgcccgcctcccccccgcgcgcagacatgcgccacccctcccaggggtgagggggcgttggcctcagcgtttgtcttccggctcctcccagctggccttgtcccaggggcgacggctgccccggacgactgcgctgggcaccgcatgtcccgggccgagtgaggtcgggcctggggagctgagtgacatcccaagcttgggcttgggtagtgagtgacatgtgcacacgtccagctgcgccatcaccagccctgcgcaacaggacgtcgggagcagggaacctgagacagggccactgcgggatcggacaaagccccgctttggagaggctgagctggagccattggcctccccaggggctttccacccacactgcaccataaccgccacacccttcggggggggggagggtacagagggtctctaagcacaggggtgttcagagcccgaacaagctttgatcaggtttccctgcaaaaaaaaaaaaaaaaaaaaaaaaaaaaaaaaaaaaaaaaaaaaaaaaaaaa

SEQ ID NO: 406642 - DNA, 1000 bp, Homo Sapiens; identical to SEQ ID NO: 294379

SEQ ID NO: 406643 - DNA, 1000 bp, Homo Sapiens
gtatggtcttgtagaagacagtcctgtaagatcgagcaaccagtcatgatgaaaccaagtggtggccggatcagtatgacaccctgctgcccccgtttttaattcttctctgccttgccctgctctctcctgttgctctgggattgcacttctgaatgaagtagcagctcataagcttttgccacaggctctgtcttttggggaatccaggataagaacccattatacagaagtgttcaataatatcaattttgcaactcactcagctccatggcttcccccggtctacctgtctcactacatgcataaagtgaaatgatggaaggaatctgctttctgaactctaatgtgccttcattgattatcattaaaattatcattaaaattgccttatttctatggactcagaggaatgatgttttagttttggctctctgatttaccaactatgtgactttgtccaagtcatttaacttcagtaaacctcggtatgactgaaaagggagttttctgtatggccgtcactaggtttttttgtgggttagttaaatgataaacatgaaagctctgtccaaatgaaaaaggtatttctaacaacaaccacaataacaataacaacttagtgcttagcccatgatgtatcaggggatatgatgtgatgattttcaaggtgttggaggcaacttctgttccaagaactcccagcagctttgaaagcagactgagatgagttgagaccctgaatccctgggctgttgttcctgtcacccctaattaatatgtgagagacaacagctgggttttccatccctaacacatttatttcattttatttggggcctgcaatttctgcatgtctcatatattttaggttttacctttttacctggctttaaaataaatcccttgtaagttgtcctgcaaatgaaattactgtctggaaaactgcaatttcatcttgagagttttattatgctaataaatgtcaggattctcatat

SEQ ID NO: 406644 - DNA, 732 bp, Homo Sapiens
atcggttagcgccttgccatgattaatccagagctgcgggatggcagagctgatggcttcatacatcggatagttcccaagttgatacaaaactggaagattggccttatgtgcttcctgagtattattattactacagtttgcattattatgatagccacatggtccaagcatgctaaacctgtggcatgttcaggggactggcttggagtgagagataagtgtttctatttttctgatgataccagaaattggacagccagtaaaatattttgtagtttgcagaaagcagaacttgctcagattgatacacaagaagacatggaatttttgaagaggtacgcaggaactgatatgcactggattggactaagcaggaaacaaggagattcttggaaatggacaaatggcaccacattcaatggttggccatcaaactccaaatggtcttgcaactggagcctccgacaatggcttcttctgctgggaccccttagataggcctctgagggagctctgactgccgtttccccaaaacaatgtcccctgtcagcaggaagcagttaaatcagtcttcatccttatccttaatataacggcagttagatgtacttctttagagggagtaaatttatcaattcagagcaattcatcctcctctttccatctttgattcacagttaataggctataaattttgataatgtagaataaactacagaaaacttcttg

SEQ ID NO: 406645 - DNA, 1000 bp, Homo Sapiens
actatggaggagtatatgttggcctaccatctgaagctgtcaatatggtgtccagtcaaacaaagacggttcggaaaaattagaagaaaataacatcatgactcaagaatcaagagcttgctcatcagtttggaaggaatttggctccgtgggacgttgtaatgtgcacagacatttccaaggaaattctaaacagtcacccttcccttttgcattcccccaaatcttaagtgtatacataaaaccctgggtacatattgttgtggtaatagaagggaattggttaaacagtacacttgtttatggaactttctgtggccacctacgaaagacaagttaacaaactgtcatggaggctgttgttgcccagccagggccgctgcattttgacaacatttccaccctggccactcagcacatttcatggaggtcatgtcttttcactgatacttttttgatagtttttatataacaaaatccttattctatttataacttaagatgataaggcactataaattaatgacctaaaataatatatttgtctgttatcttttgctatttctacttcactttaatttttagctgtaaaattggtaaatggattcttacaactatctctttccatttcttactatttggttttcaaatttcatttaaatgtcagaatttccttttttaggaacaaggtgtatttcattgcactatttaaaaataaactcaaatttgcatgccatatgcacattttgattacatttttattttctttcgtgaaaggcatgtgcaactacaaatacttcatagctgtttgggttgctcattctacatcacgacaatctcatcatattatttctataacttttcaaggacttgcgatggatggttagtgggatatctggaaattaatttgataatgacttgtgtatctacttagtattgcaatgtaagttactcaattcaccaatgtatttcaacaattaaaacatttttatccctcttc

SEQ ID NO: 406646 - DNA, 1000 bp, Homo Sapiens
atccagaggaggaggcaggctcctgtgtggataaggtagttagcaatgggaccaggcagtgggagcagtcgggaaggcttcctgcaggaggtgggggagagctgggcttttgtaggtgggtttggggaggagatggccacagtgagttagaatcaggaagtggcaaggccctggggtctggggtgggaagtgtgggggtgtggggggaggtggtgccagaaacgaaaccaggcatcagatcctgggggtccagtgtagggacaagggctttggactttggtgctggcgctgggtgggcctgttcagatcagagctggaggcttagaggagtcccctagccagggggaagctgatacagagtccaaggaaggaggcaggggatcccacttgtgaattcagatttgccaccctgcccttgtataagctgcgtcccccgccccctaggagacttggtggagggcgatggtggcccccactctgagggacgctatttgctgaaatgcaggcatgtggggacacatcagtggcccgtgagggccggagggggaaccctggaattgggtttgccccttgaaatctgcagatgtgccccagacggagatgaggcagatgaggggtgccgggtgggggtggctgagaccagacacctggctcctgccagcactgatcagggcccgctggcttcaggtccaattccggaccccaggctggcctctgaaggctcttgctggccgtggctggcctgaggacgcttctcctggccaggagccctccaagggtgctggacgtgggtgggcctgaatgctctttgccgagatgaactggacctgtcaaagacaccttcatgcaaatttagtgagtggaagaggcctcaggcctaatttgtgccagttggattaaggtgtgagtgcagtctgatggcaaatacgctcaaatgagaatcagcttaatgtagctcaggcctggttctgattaaattgtttctccttcaactgtttgg

SEQ ID NO: 406647 - DNA, 1000 bp, Homo Sapiens; identical to SEQ ID NO: 294381

SEQ ID NO: 406648 - DNA, 1000 bp, Homo Sapiens; identical to SEQ ID NO: 294382

SEQ ID NO: 406649 - DNA, 1000 bp, Homo Sapiens; identical to SEQ ID NO: 224762

SEQ ID NO: 406650 - DNA, 1000 bp, Homo Sapiens
gttccattcgtaagtacagaacgctcagagaagaggcagcagatctaggatatggagcagcagctcttaagggcacagtgggaaggtttcaagactgaggaggatcttggatttgggtaggggaaggcagttcacagtattgtggaggaaatgctgtgaaagagaaagtggaaggcatggaagcttaaacttttaatatgactggtgaatacaaggatgaagggcaaagggaattcagactcatggtggtcagattaagaccttcagcggctctgtctcccagccccacatacccacttccatgttctgctctttactgaagctgaaagtctgcaaccttcattctctgactcccttacattttcttaggcttcttgctagcttctgccaaaaagaggccctggcaggagattagatggcaggaggcagaggtaaggattccatgttaacaggtgctggaagttgctggtgtggcaatgagaactgggccccggtcaaggcagcactactttggtagatccagaatcaaccatgataaccgtgacagtgtcttcaacagtgcagcagtagacacaggcccctggtgctggaatccaatacagggacaggagcagcacggagtcacggaacaccgtcttgccttcatgtcactttaccatttcttctttctccctcttactctaccagctacctgtggagatgttgaaccttttatctgtcgctgtctgcttaggaacagaagaaaaggcagctcattgcttgactcagctttcagcttgatttttttcctttggcagagtgaattggggtcccaggtgttcattttccttttgtagtacctttcctcagcatgcaattaatacaaaaagaacaataaaccttaacaaagtttggcttgtattaaaaaaaaaaaaaaaaaaaaaaaaaaaaaaaaaaaaaaaaaaaaaaaaaaaaaaaaaaaaaaaaaaaaaaaaaaaaaaaaaaaaaaaaaaaaaaaaaa

SEQ ID NO: 406651 - DNA, 1000 bp, Homo Sapiens; identical to SEQ ID NO: 224763

SEQ ID NO: 406652 - DNA, 1000 bp, Homo Sapiens
gccggcccatccgggccatgtcccaggacagggtcctgtccccggatcggggcctgccagatgagttcagcatgccctacgaccgcatcctgtccgacgagcagctgctctccacggagcgcctgcactcccaggacccgctgctgtccccggagcggacggcctttcccgagcagtcgctgtccagggccatctcgcacacggacgtctttgtgtccacacccgtgctggaccgctaccgcatgagcaagatgcactctcatcccagtgcctccaataactcatacgccaccctgggccagagccagacggcagccaagcgtcatgcctttgcctcacgcagacacaacacggtggagcagctgcactacatcccgggccaccacacctgctacacagccagcaagaccgaagtgaccgtgtgaccggcggggcagggccggggctgctgggcgtggcagagcagagcgggggccgggaggggccaggagcagagcttctagccttgccactctcccttcccttgtcccctctgtaggaagtgggggtgggccacctttgcccaaaaagccatacccccggggacacagccccgatggcctggtccaatacacttagacccaggaccaagagcaatcgctcttgctcctccagaagaatcagtggggagtgaggagggggctaggccccattctcacccccgaccaccttcaccaactccctttccgtcccgcgcctccttctccccatccgggggactcagctgcaggttctgtcagcagagagacccttgcttgactgtggtctgaagctgcctgggtttgaaggggccagcgggtccaatcagtgggctgaccggataggctactcggtctcattcattcatctagaaccgcatcacagaaatctcctagtgcctaaaaactgcctgctcgctctctcagagccagggagctgctgtgtccataagcacaataatgattcttttcttgcctgctgg

SEQ ID NO: 406653 - DNA, 1000 bp, Homo Sapiens; identical to SEQ ID NO: 294384

SEQ ID NO: 406654 - DNA, 1000 bp, Homo Sapiens; identical to SEQ ID NO: 294386

SEQ ID NO: 406655 - DNA, 1000 bp, Homo Sapiens; identical to SEQ ID NO: 294387

SEQ ID NO: 406656 - DNA, 662 bp, Homo Sapiens
attctcctagagcatctttggaagcatgaggccacgatgctgcatcttggctcttgtctgctggataacagtcttcctcctccagtgttcaaaaggaactacagacgctcctgttggctcaggactgtggctgtgccagccgacacccaggtgtgggaacaagatctacaacccttcagagcagtgctgttatgatgatgccatcttatccttaaaggagacccgccgctgtggctccacctgcaccttctggccctgctttgagctctgctgtcccgagtcttttggcccccagcagaagtttcttgtgaagttgagggttctgggtatgaagtctcagtgtcacttatctcccatctcccggagctgtaccaggaacaggaggcacgtcctgtacccataaaaaccccaggctccactggcagacggcagacaaggggagaagagacgaagcagctggacatcggagactacagttgaacttcggagagaagcaacttgacttcagagggatggctcaatgacatagctttggagaggagcccagctggggatggccagacttcaggggaagaatgccttcctgcttcatcccctttccagctccccttcccgctgagagccactttcatcggcaataaaatcccccacatttaccatct

SEQ ID NO: 406657 - DNA, 1000 bp, Homo Sapiens; identical to SEQ ID NO: 294388

SEQ ID NO: 406658 - DNA, 1000 bp, Homo Sapiens; identical to SEQ ID NO: 294389

SEQ ID NO: 406659 - DNA, 1000 bp, Homo Sapiens
cgacttctgtgccggctgcctgcgtggccgcgcgaccgacggccgcctcacctgcccgctgtgccaacaccagacggtgctgaagggtcccagcgggctcccgccggtggaccggctgctgcagttcctggtggacagctcaggggatggcgtggaggcggtgcgctgtgccaactgtgacctggagtgcagcgagcaggcaggggcggcagggcgggtgggtgaggagcagagggtacccggttgcacagtccccaatgcttgcacatgcactcagcatgtcttcagaggacgacctggcagtggattctccagcacctccctagggcaccttggccccaaatgtgaaccccattataccggtggggagactgaggtccagaacaagggacttgagccagtgtccagacagtggcagaggctaaggccattcgatctggggagagctcactggtccccaattcagggtggagttgtggacctgcacaggaggggcagtccagtttgcaggcctgggccgaccctgaagggcctctgctacccaagtggcatagaagcagctacagcccaggggaggtggggacagcatgctgttccctctgggctgtaaaaggcacaggggactctggcctgcggaggccagaaaatgtatcgggaatcccaggaggacggcccgactggggcaaaagctccagcgttctggacaagtgctgagcaatgtgtgacccagacgtacagagaggattagcaggaggtagggactgcaggtagggcctgttatgtccatcattgcatgcgtccataccagggctgcaggccaagccctggaatcccagccctgggtcaggcttggggaggagaaccttaaggccctcactgctcttcccctccccccgcccccaagtgtgactccagatggccagggtgtacaccacctttcggccactattgagtgtgccaagggggccgtgagaggccctcacacccttttgttaaaagt

SEQ ID NO: 406660 - DNA, 1000 bp, Homo Sapiens
aaacggcggagattatatcttcccagagtcctaagccactagggttgtgtctctgtggcacaatcagttgtcgcatccaaaaggcctagctaacttttgtattttttgtagagaaagggtttcattatgttgcccatgctggtccccaaactcctgggctcgggcacctccgaggtctcccaaagtgctaggattacaggcatgagccactgcacagggccttatacaatgcttctaatttcagcacatttagcaaacttatcttctgcgggagaggtaccaaatcacattccagtttatttctcaactctaataatgtccctttcttcatttacttgctgacacaacaaattttctcccctcccgtactttttgttttgagactaggtgtcactctatcacccaagatggagtgcagtggcatgatctcatgtcactgcaaactcaccgcccctgcaaccatggcactagtgatcctccagaagagctggaactacagagaggacatcttgctgtgttttccaggctggacctgaatgaactcctgggctcaatcaatccttccacctcagcctaacatttacactgggagcagagatgcatttggacatataaactgttaacatgaggtaagcgccaaggtctagagaaggcagtggaagagatggcaaactccggcaccatgtctgcgtgtccagtgtgctctgctggagcagcacatttttgtacattgctgtatttgaaaaaaccctgcaagaatcatgaaactggacgaccatctttataacactcccagtgataaaacaagtaagaatggctggtttgtagtcatctgagcagcctctctagtttcgtagatatggtttctctctgatatcgaacgacttccaatgtcaagcggaatgctacatcacaaggataaccgtatgtgaaaagaaccagttttctttgtaatcctgaactttctagtttgcgcattaaaagacattatttgaagaag

SEQ ID NO: 406661 - DNA, 1000 bp, Homo Sapiens; identical to SEQ ID NO: 294391

SEQ ID NO: 406662 - DNA, 1000 bp, Homo Sapiens; identical to SEQ ID NO: 224766

SEQ ID NO: 406663 - DNA, 1000 bp, Homo Sapiens; identical to SEQ ID NO: 294392

SEQ ID NO: 406664 - DNA, 1000 bp, Homo Sapiens
tacacttcggcaagccagagtggaaaccataagcactgatgtgtgtaacagaaaggatgtgtatgatggcctgataactccaggaatgttatgtgctggattcatggaaggaaaaatagatgcatgtaagggagattctggtggacctctggtttatgataatcatgacatctggtacattgtgggtatagtaagttggggacaatcatgtgcgcttcccaaaaaacctggagtctacaccagagtaactaagtatcgagattggattgcctcaaagaccggtatgtagtgtggattgtccatgagttatacacatggcacacagagctgatactcctgcgtattttgtattgtttaaattcatttactttggattagtgcttttgctagatgtcaagaagcccttcagacccagacaaatctaatatcctgaggtggcctttacatacgtaggaccaaaccctctctaccatgagggaagaagacacagcaaatgacagacagcacctattccttactcacaagggaaactgcttgtgatacttcctaataagataaatgagtggtttccctcaattgaagacaggaacatcattttccacaggatatgaagagctgccagtaatgccaaaatcttacctcatataatacctggagcatgtgagattcttctagtgaaaaagaacagtcttccctgaagactcagggcttcaacattctagaactgataagtggaccttcagtgtgcaagaatggagaagcatgggatttgcattatgacttgaactgggcttatatctaataatacagagcactatcactaacctcaacagttgacattttaaaagtttttaaatgtatctgaacttgctgttaacacagtgttataactcaagcactagcttcaggaagcatgttgtgttgttaagaagcttttctgatttattctttaacagcatcttgccatctatatgttagtagcagttggcccagaaaggac

SEQ ID NO: 406665 - DNA, 1000 bp, Homo Sapiens; identical to SEQ ID NO: 294394

SEQ ID NO: 406666 - DNA, 1000 bp, Homo Sapiens; identical to SEQ ID NO: 294395

SEQ ID NO: 406667 - DNA, 1000 bp, Homo Sapiens; identical to SEQ ID NO: 294396

SEQ ID NO: 406668 - DNA, 1000 bp, Homo Sapiens
gtccttgggaagctgtatgagacccggagcagtcagctgaggaagtacaagccgcccgtgaagctggacaccctctggcacatgcctcacttccagaaggtgggccgccaccttgatacgttccccacggaggccgatcgccagagagcattaaaagcccaccgggaagagtgtgccgtgcgccaggggaccctgcggatgggcaactacacccacccctagcccctccctcccctgccacaagaagccatcttgacatagtggaaaattcccagaaggactccctatcttgccccaaccctgacattcccccatttttatgcaggttctgcttcaaggagctcagattcaagtcttaggctaattgtttttggtaaaagtccccccttttaggttagccaacattagtctccacttagccccagtgaccctctacctggagcctcctcctctcctcctccttctcctcctagggcaggctcaccctgcctcttctcaagccctcacctgccaagacaagcccaaattacaagacaattttttagactccaggctaagggtcgattccatggctctgcccattaagtgttaagaacgacctgtgtatttgctgcagaaagcatgacagtgacgtgctttgaaagacctcattttctattccaaacatgagttttaattgctctttttgggatgcctgatgtctcatcacggcagtattatctctctgggacctctgacagcaggaagagccaatggttcattactcgagcctgcccccgcctcctcagtgctggggccccgtcaatcaagcaggccaagttggactcctcccccaggactgactttggaaggtcaacccactctggaaaaagccttccaggccagcgggtagactgctgaacacaggctgctgagcttctcagccgaattcctggacacttcctcactcggtctttccgtgtgttctttggattctctctgaaaattttatgctgatcta

SEQ ID NO: 406669 - DNA, 1000 bp, Homo Sapiens; identical to SEQ ID NO: 294397

SEQ ID NO: 406670 - DNA, 1000 bp, Homo Sapiens; identical to SEQ ID NO: 294398

SEQ ID NO: 406671 - DNA, 1000 bp, Homo Sapiens
aacctggacgcctgggaccttgggagcaagcatcccgcagccgagcaggcgacggcgcggccaccgcctagagaggagccggggcccggggcggcgtgcgggtcggcagcagccggcttggcctatccgaaaccccaggcctggaagcggctgctttaggcgtcaagttgagcggggtatgtgtgtcctcttggaaaaaaggtgagaaatggagccggactttctccactcggtaggggttaagctaccacacacacccccaaacacatgcccacgtgcaagtccctcccacccgccctcccaggggcgaagagaccctgtcccagtggaagtggggaaacccagtcgggtacagaaagcagaggccatggcgcagagcggaggcgcggctttctggggctcagccctagggctacagacccagggcgcggagatgctcgcggccgggccacccaccagagccaggcaaccggcgcttccaggcgagctccgcggggccgaggtgccgggagaagcggccccgggcgcccgcgcgctgcccgacctgggtaacaggcaaagcggagccccggggtcgaagtcctaaagttactaatcccgcggagggggagagagcgtgcctcgggccgcccggggcggtcatttgagcgtgtttacttaaagactttgcaagcagagcgcgcgcgaaatcgtcggatttccagcgaggcagcaaatatttgcaggcagaagaaagaagcggagccgagccgagccgccgagtccctccccccggagccccggagccccggcgcctgcctgggcggtcccggccgcgcagacagaaaagaagccgggaatctgcggggctggggggcggggagcgacaccaaaggccagaaactgcagcacggcccgaggccctggcgagctgggcctgggggaggagaagtcccttcccattccagctcgatcaatcttgctgggctgcgatcggtcaataaaaacggtgtgaagcggc

SEQ ID NO: 406672 - DNA, 1000 bp, Homo Sapiens
cactcacacccacacccacactcacacccacactcacacaggctcatggaaggccacacttgttttggtctctttcccctccaaacccacagtttgagccaaagctgtgcgtgtgttcagagctcctgaacagcagcctcccgtgtaaattgaaccctgccccacccagttccttcttagggatggtatctttgtgaaggacaaggagcccccagtcactgggaagaggaattttttggcctctgtactccttagaggacctaagtgccccagtcagatgccctgagtctttgtggcatctgggactccctggagatggagacgttggtggggggggggtacccaccttgttgttgatgggggtacctatcttccctgcattttgggggagggtgggaggggtccttcccaggaagagagtggagacaggttactgttactttggagtgggacaggctggtttagcaatcctaagccccagccacgcaggtattcctgatctgcctgcagggcccctcactgcagctgccaccagtgctggaaatgagagcagggctcctgactgtccctagagctgactcatcatggccctgctgaagagtgaggtgtgtgtgtgtgtgtgcgtgtgtgcgtaagacagagagggagggagaaggaaggaggcgggggaacatggagagaaggagccaggagttgggataaacctggcccctggtcatatgtttcatcagcagtggctcctaactccacgtgccatctctgctgctgccctccacaagcaggtgagcagagtgccagttgtgttgaaggtgatgatgtcgcctaactaaactcacaaccaacccgcaatctctcttggggggacactccccataagcaatacaattaaagaagaccaggaaaggaaaataaattccttagcttatacatttaaaaagtatcccttgaacctattttaatagaatgaaatgctaaaaataaagaccaatataacatacat

SEQ ID NO: 406673 - DNA, 1000 bp, Homo Sapiens; identical to SEQ ID NO: 294399

SEQ ID NO: 406674 - DNA, 1000 bp, Homo Sapiens; identical to SEQ ID NO: 294400

SEQ ID NO: 406675 - DNA, 1000 bp, Homo Sapiens; identical to SEQ ID NO: 294401

SEQ ID NO: 406676 - DNA, 1000 bp, Homo Sapiens; identical to SEQ ID NO: 294402

SEQ ID NO: 406677 - DNA, 1000 bp, Homo Sapiens; identical to SEQ ID NO: 119129

SEQ ID NO: 406678 - DNA, 1000 bp, Homo Sapiens; identical to SEQ ID NO: 294403

SEQ ID NO: 406679 - DNA, 1000 bp, Homo Sapiens
tctctctgaaccctcagataattgaacaagctgttatgatcccccaaaatgtccacaggattctgatcaatcttatgaagtatctacaaaaatggaagcggtatcgacctctctggaaattggacaaagctattgtgatggagaaatttgctgccaagaaacctccttgtgtagcatatgatgaaaagttgcagttctattccaagatagcttatgaggttatgcgccaccctctaattaaggatgagcattgcatcagacttcagctcaggcatctggcaaacacagtgcaggaaaatgccaagtcctgggtgatttcgcttggaaaacttctcaatgagtcagcaaaagaggagctctataatctccatgaagagatggaggtactcaatcgctgtgtgtaattgaaactacttttcgtgtaagttgggtcttcatttgcgccattactgttttttctgtgtttgcttagtgttctttgtactttctgttatagcacctggccaaaaaccttaggaagatccccaatacccttgaagatctcaagtttgtccttgcaacaattgcagaaattagaagtaaatctctagtcatggaactcagatatagggacgtccaggagcgataccgtaccatggcaatgtataacctctttgtaagtcaacttgtattttcttattcatttaacaattggattgaccactaacgacccttttcagaaatgcttctcaagtatactgccattgatttgttttcaaataagtgactttaagtaatacattgtaaatgtaaagcaatgccactgttatttagaataatgaaaatatagagtatttttcaatctgtatggctcaaatggattgatctgtaactataccatttccattctcccttttcttttcttcttttttttgtgttaatttcctttaatagataaagagctcttgcaaaaatgataagaagagagtgaaagatttaagataataaaagaaactggtag

SEQ ID NO: 406680 - DNA, 1000 bp, Homo Sapiens; identical to SEQ ID NO: 119130

SEQ ID NO: 406681 - DNA, 1000 bp, Homo Sapiens; identical to SEQ ID NO: 224767

SEQ ID NO: 406682 - DNA, 1000 bp, Homo Sapiens; identical to SEQ ID NO: 294408

SEQ ID NO: 406683 - DNA, 1000 bp, Homo Sapiens; identical to SEQ ID NO: 294409

SEQ ID NO: 406684 - DNA, 1000 bp, Homo Sapiens; identical to SEQ ID NO: 294410

SEQ ID NO: 406685 - DNA, 1000 bp, Homo Sapiens
agccaagagctggatgggcttctccatccagcacgcccaggctggacagaggcccccaactcaggcaactttgtcgggtaaccgtgtgtccagggagtgctttcttgcacgctccgtctccgggccagcttccaggacctgtgctcactgcaagggacacccatcgagccggccctttctcagaggttttggggaggcttcaggaaggacccccagtgggggcccagcttgtcaacatgggctgtgccaaggagttctgagtttccttcaggtctgtattgtatcttccaccccctcagagctccctccctactgcttagaccacacgaagctgtggggctgtgggcagccagttcacttccctgaccttgtctgcaggtggagacagtggcagtgcccctcccgggctgctgcgtcactcagtgtaaaagcagggaggcactggagagctgctgtctgcaagtttgttgctacttcaaaaggtgcaggtgggccctcacctcctttagaggtgaggatgagctacccaaagtgaaaaggagcttctcagcgtcgcaatggagtcacggccaggctgcccacaccagccgtccggacctgcaccagtgccacggggtctgccccatcttctcttccctctccttcccctctccctctctctccctgtctctttctcctctctccatgctattgactgaatgtttgaattccctgcaaatgcattcctaacccccaatgtgactgtgtttggagacagggtctttaggaggtaactgaggttaaatgaggttgtaaagatggggccctgaaccgatgggactggggtccttatgagaagaggaaaaggggtccctccccatggagggacgaccacagcgaggcagcagccgcccacacgccagagaaggggactcagagggaagccttgcttcaccggcaccttgatcttgactcctagcctccagaattgtgataaataaatttctgttgcttaagcccc

SEQ ID NO: 406686 - DNA, 1000 bp, Homo Sapiens; identical to SEQ ID NO: 294411

SEQ ID NO: 406687 - DNA, 1000 bp, Homo Sapiens; identical to SEQ ID NO: 119131

SEQ ID NO: 406688 - DNA, 1000 bp, Homo Sapiens; identical to SEQ ID NO: 294414

SEQ ID NO: 406689 - DNA, 1000 bp, Homo Sapiens
atcattgaatggtgatcaagacttccaaacccctccacataaaactgttcatgacttgcttcctttttctagccggtttagggccctgtcttaagtcacccacatgtgatttcactcagggcattgtctgtctacaataatattgtgcttttaaaccatttcctttcttacacgtttatctacagtgcatgcgaaatctgagagcgtaatttgatggatgggcaaagagttaagtcctggtgtctggtgtggcagacctagaaaatggcagctggagggccagcatcattttgttactgacaattgaaacgtgttcacattgattgtacacaagtcactggtggttgttcatttgtcaatgcactattcctagctcactccacacacacaaaaaaggtataaaaatcaaatgtttaatacaagtttccatactattcctgtaaccatatttagcattgccaacatttcaactgttttaatagcttcaaacacttaaagtaaccattagggattaagggcaccgtttgcccctggaatggcccaggagagcttctcctattttgaaaggtttacgtaaattatagtatttggatggagcaaagtcagcagtattaatggttgaatattaatggttgattttggctacttgttttattttagtgatatgtgatattttacacatgtatggggtacgtgtatttgttacaagcgtagaatgtgtaatgatcaagtcggggcacttagggtactcatcagctgggatatttattgtttctatgcgttgggaacatttcaagttctgtcttctatctattttgaaatacacaatccattgttattaactgtagtcactgtagtctgctatcaaatattagaactactccttctatctaactgtatgtttgtacccattcactaacttcattcccccccaccctctatttataattttataacagacaataattttggttaatgaaataaatgggggaaagaaagc

SEQ ID NO: 406690 - DNA, 1000 bp, Homo Sapiens; identical to SEQ ID NO: 294415

SEQ ID NO: 406691 - DNA, 1000 bp, Homo Sapiens; identical to SEQ ID NO: 224768

SEQ ID NO: 406692 - DNA, 1000 bp, Homo Sapiens; identical to SEQ ID NO: 294417

SEQ ID NO: 406693 - DNA, 1000 bp, Homo Sapiens; identical to SEQ ID NO: 294418

SEQ ID NO: 406694 - DNA, 1000 bp, Homo Sapiens
catagccaccattggtagtacaccccaaaagcaaggatggcatgatgctggtgactcaaacgtgcctactcatggtgtcaaattggcataatcctcttgggaagctgtgtggaaataagcacagagaagcagaactctaattgcttaatccactaaacattacttctgggaattggctcatcataaattatccaagagaaagcacaaagttatgggcacaaaggttttccatataatattatttaaaatgctgagaaaatgaaaaaatctaaatggtgaaatatatactaatgccatctataaatacaaacaaatagaatgtttatagaataatggaacataataacattattcaaaattgcatttatgctatagttgtcaaaattgtctccttatatgatacaaaactcatgaaaattatgacttttttgtttggttggaaagcagaattatgcataaatttcctcttacagttcgatgcccattagttttatataacatttatttgacacgtactgacttctatctgagaagaacaaaccaaaacactcaggcctaaataattaaaaacggtcctaaaaactagcaaaccagataagaaaagatgttaatgcccattccctaacttatgtcttagaccaaaattaattctagatggttttaaaatgacagtgtaaaagtaaagtattaaaagattgtgtggtcaaatattcaatttaagagcaaggaaattcttataaatataacaatagaggcagaactcatgtaagaataaattgattaggtggtattaaatattaagttcttatgtatgtcaaaagatatcattttgaaattcatccatcttattgggtattgcaggagttcattcctttttgtttataaatactcttccgtcatatgaatagtattcatttgtatactggtttgttgatggacatttgggttgttcccagtttatggctattacaaataaagcttctatgaacatttatgtaca

SEQ ID NO: 406695 - DNA, 1000 bp, Homo Sapiens; identical to SEQ ID NO: 294419

SEQ ID NO: 406696 - DNA, 1000 bp, Homo Sapiens; identical to SEQ ID NO: 294420

SEQ ID NO: 406697 - DNA, 1000 bp, Homo Sapiens
ttgtacctcctgcttgaatgtcccctcccccaactccaaaattcctctctctgtctaccctgtacctctatttgaaccactaagaggcatctcagacttaaagtgtcccaaactgagcccctgtgatgcccccagagctgctcctccccaccacctcctcctcagcaatggcagcttgattcttctttgggctttattcagtcccccaactttggagctttcttgacccctctctattgctcacatgccatattcaatgtgtaggcaaatcctttggccctgccttccaaagacatgcagaatctactcacttctcgccacctcgctgtctcactctgcgtcaggccaccctgtgtgtccttgcacaattgcgggagccttggctcgagtcctccagaccttctacctctttgacttcatctagtgctgctccaagccccgtgctcttccttggacacaccaggcatgctgccagcagagcctttgcatgtgctgttccctttgtcgggaagccttttccccagctatctgctcagctcatccgctgtctctttcgtcctcgctcagattccccttctctgtgaagcctttctgaccatcctcattaaaatcaaataaccccacccctccactctcttgcccattttcctcatccatttccccctaggactaatcactctctaacattctctatatatttttctgatatatttgtttatatgtcttgcataaacaaaatgatttggtttatggtctatctcttcttgctagaatgtgagctctacaagggtagggatgcttattttgtcaccgttgtgtccctgactcctaaaatgctgacggtgtggccagctgcatgccctgctgtctctattttgaaactctaacaaaattttggacaagaccctcctctttcattttatgctggacctggaaaattacagagcaggttctgacttccaggcacatggtacgcattcaataaataatctcttgaatg

SEQ ID NO: 406698 - DNA, 1000 bp, Homo Sapiens
gcggtgctggggtctcatgagcccagggttcactgcccaccaggcggcattagcctgcggctttggcgcccagaagtccgacaggcagcaaagtctcctgctcctggctgctggccaggagagcccagctgggcctcacctgatcgagaggaaacgcctgtgtcctctaatcagcatctcactgacagagtcacccctggtacagcaagtgggctttcaaggacatcaggtggctgcattcaggctggtaacaacaccgccctcagctctcacagtctgaggaagccccctgaaaagtcactggagtggggctgcaggaaccccacaaaggcctttcctgctcctgaataattcccaagcacctaggactccccgggcctggcttctccgccagcccaacctccggacctgaagaccaagcagtgcccaagtgtgaggtccctggagaaggaggaggaagagtggaaggaggtggagggtaacgcatccagaggaagacgctgagggtcaggctggccctgggtctgacctgtccttgggatcaactgcttcattaaaaaacatccgcctaaactgtggagacagaggaaggatcagtgcttgccaagggctgggggaggaggaacaggcagagcgcagagggtttcagggcagtgccgctctgcgtgacgccatcacggagggtccaggtcatcacacgtctctccaaacccctagaatgcccaacactcactctgaagccttctgtcaatgtgggatcatctgtcgtaaagtctgcaccgctgtggtgggggcgtggatagtgggggaggctgtgcgtgtgtgggggcagggagtgtatgggaaatctctgtaccttccgctcaatttggctgcgaacctaaactgctctaaaaaaagtctatttttaaaaagcatatgcccgaaaagtccttgaaaatgcatctttccctaaatattcaaatttatgttcattaataaaatagcacatatttattct

SEQ ID NO: 406699 - DNA, 1000 bp, Homo Sapiens
cttggaggtcatgtcccagatccagatacctaataagatgctggaatgtaatccctggacaatccgtgtcctggcagcatttggtcttcctctaagcgcctggctccgctgttctcaggagtgggttctgaagtctctggagaacaggatacgtggagggttaggaaggggccaggcctagagacgggagactccctcccggagcaggtggaggcacaggaccattcgctaccccatctgccggcacctgcgggggagcccaggcattctttgtaagccctcctgaccacctggctcaaagaaaacagaagcatggaggccgccaagtattttcaagaaataaccccatgaacatggcatcacttttttagaaagaggggtttggggcaggcagaggagagaagggagagcaaactgagagccaagtttccagacagtcctgcaggaggagaggatgcagctgcgcagagggaagcaggatcacatttaaggaagtgtgtggggtccctggatgacaccagcacccagtgcggctctgtctggcaaccgctcccaaggtggcaggagtgggtgtcccctgtatgtcagtgggcagctcctgctgagcccgcagctcactggggagcctgacagcggggccatgtgcctgacactcctctctgcttgtggacctggcaaggcagggagcagaaaacagagccacttgaaggctttctgtctgcatctgtgtgcagtgtggatttagttgtgcttttttcttgctgggagagcacagccaccatttacaagcagtgtcaccctcgtgggtggcgaggacagaacaggagcctctgctctctgtacctatctgggcccggtaggctcccttgtcctggcttccatctctgtctcagcgaccattcagccctgcgcaggaacacgtgttgcttagaaaagccaaatccagccttgtctctgcctcctctggtctcatgatgtgcatctgttaccttgaaactgg

SEQ ID NO: 406700 - DNA, 1000 bp, Homo Sapiens; identical to SEQ ID NO: 119132

SEQ ID NO: 406701 - DNA, 1000 bp, Homo Sapiens; identical to SEQ ID NO: 224769

SEQ ID NO: 406702 - DNA, 1000 bp, Homo Sapiens; identical to SEQ ID NO: 294423

SEQ ID NO: 406703 - DNA, 1000 bp, Homo Sapiens; identical to SEQ ID NO: 294424

SEQ ID NO: 406704 - DNA, 1000 bp, Homo Sapiens; identical to SEQ ID NO: 294425

SEQ ID NO: 406705 - DNA, 1000 bp, Homo Sapiens; identical to SEQ ID NO: 224770

SEQ ID NO: 406706 - DNA, 1000 bp, Homo Sapiens; identical to SEQ ID NO: 294427

SEQ ID NO: 406707 - DNA, 1000 bp, Homo Sapiens
agccccacagctgacccaccctttcagggtaacagtgcagctgcgggggcagccccctccagcccttccttggtcagcctccctgctgctggcccttcctggagacgtgatttgccctagaagtggcaggtgtgtgtggctcatgccctcactgtaaggctgtgccaaggcagtgccaccttgggaaaaatcaaaaccccataccagctcctcccagtccatgccagcacacaccctggctcctcagaaccccccacagaagcaggcaaggaatcaaaaactcaagtctgcaggaagccaggcagggatggaggaggggtatactgtcacaggtgagagggtcccagaagcctttctggaggaggtgacttcaggctggatttggaggggcaacttaacaagcagacaggtgggtggagacgctccagcagaggaaatggcatggagtgtccaggagcccacgaatcagctggcattgttgaatcatggagaacgcagagacggtctcagaagtcggccggagcctgagtcattgggccacgcggcttcagtccttccttgcagcctgtggggagtctcaggggaattctgaggaggaaagggggatgctcatgataggtatttattgtttttgtttgtttgtttttaatcacttattttcacaagtgtaatcgaagcacctggttgtgagtccaggagagtaaaacatttagccctcgcccctcccatccatcacggattttctgacgcctgcagcagggttcctgccaaaggaaaacccatttatagtcatatacttccgtgaacctttgatataacccagttatgtatctagaaacctgccttttcaaaaatattaacctgtctataaatgtagtaaatgttatataaaatgcaatcatgtttaagaagttaactattgttatattaattcgagttgaacaattcaaattctcaacttcatttataaacatagttaattaaattcctttatgcatat

SEQ ID NO: 406708 - DNA, 1000 bp, Homo Sapiens; identical to SEQ ID NO: 294428

SEQ ID NO: 406709 - DNA, 1000 bp, Homo Sapiens; identical to SEQ ID NO: 294429

SEQ ID NO: 406710 - DNA, 1000 bp, Homo Sapiens; identical to SEQ ID NO: 294430

SEQ ID NO: 406711 - DNA, 1000 bp, Homo Sapiens; identical to SEQ ID NO: 294431

SEQ ID NO: 406712 - DNA, 1000 bp, Homo Sapiens; identical to SEQ ID NO: 224771

SEQ ID NO: 406713 - DNA, 1000 bp, Homo Sapiens; identical to SEQ ID NO: 119133

SEQ ID NO: 406714 - DNA, 1000 bp, Homo Sapiens; identical to SEQ ID NO: 294434

SEQ ID NO: 406715 - DNA, 1000 bp, Homo Sapiens
ccagcttggaggttcaggaaaacccttctcaactcaggactcggatcccagagcagggccgcatcacctctgcctttcacactccaaaggagggctttgctgagtgaacaaggcttgaggggcaggggtatggcaaaactctccaaacaaagaaagtctagaaaaacgacttaaggaaaatacaccaaaatattggccgcacatctgtgggtgtaaaattttagggagaatgtggggggggtggggtgttactttccattttacacatatttgtattttcagattttcaacaataacagtattcaatacataatcagaaaaaagagatgtggaggaggaggagagaaacttcccaaggagctcccttgggtgctgctggctcctaattagtgtaacctgttaatcacatgttgctcggtgttagagcggtccctctgtgctctgcctggcagggcgctgttggcctggtctccctcgctatttctatttgcaagcatgggctttcttcccagcagaatctggttcctgggaagagtaatgttccaaaggcctctgatatgcctcgatgccctcctgtcttccagagccccaacctcactccctttccccaccatacaaaacacacctcccaggggtcacatttgggggtcccgccccctgctccaatgccatggtgtccccaagcacagggctttggcctgagttgtcagtctctggatgcatttgaggggcagctagggtgtggctggggggtccaagcagctggggagccgagactcagaatcattcacacacttctatttggagcttttgtggaagtttccagaattccataatattcacctcctgaatggtggctgccccttatcagccagggctggggtttccagtgccctcggagagcttgctttagagtcttggagagacggccatggtctgcgtttgtatgtctgtcacatcttaccatcatcacaaattgaatatacaacatgtgccaggc

SEQ ID NO: 406716 - DNA, 1000 bp, Homo Sapiens; identical to SEQ ID NO: 294435

SEQ ID NO: 406717 - DNA, 1000 bp, Homo Sapiens; identical to SEQ ID NO: 119134

SEQ ID NO: 406718 - DNA, 1000 bp, Homo Sapiens; identical to SEQ ID NO: 294437

SEQ ID NO: 406719 - DNA, 1000 bp, Homo Sapiens
tagacagaggaaatccaaatcgtttctttcctcccagcataagggaacggtccggtaagagctggtgtttatcgatgctacgtgccagaatggggctgagcacggcgcctcactgtatcctaacgtctaatgaggcagggaatgtcactgtcacactctgcagacgaggaagccatgctgtcagcaggtacacatcttgccacaaaaccagtaacctgtggcactgagatcgcacaccggtcgtccactgccaagtccgtggcctccttctctggggtttgcctgcctcttgatggcggccatgcctctgtcctctcgcaggggctggctcttccagtggtcactactttttggttgcaagcagcagagattccctggagggcttgttgaaagcactcacatcaacggagcctcagaaagggagctgaggccatgcacggccctgcagtttctcctcaggctttggtttgcatccctggcctgactttccctcaacaagtcctgctatctccacaaggcggccagcccagccctgtcctcaccttccagccccagctgagcagcccctccccacatcatcttcagctgctgcccaggctccgcagagcaggtgtccaccgcccatccagccattgtgtttagagggcagagcgacctgccgggaccttgacaacacctggccccacccacacgtcctgcaatattcactgaggaatgcacagcagcacatatgtgcctcatgtgtcctgctgtgatgcagcgagtggcacacagcattattgtgtcaatcatgtgtcttgatgtgatgcactggttcagacagtatcatggatgcagtgtttctttaaaactgtcaaatttgaggaaacaatctaacaaaagccaattgatgaacattctgtaaaggtgacataaatacttcaaaaatgtctctgacacagaaagaaaaaaaacaaaaagggagctattccagattttaaaaataaaagatatagtaact

SEQ ID NO: 406720 - DNA, 1000 bp, Homo Sapiens; identical to SEQ ID NO: 294438

SEQ ID NO: 406721 - DNA, 1000 bp, Homo Sapiens; identical to SEQ ID NO: 294439

SEQ ID NO: 406722 - DNA, 1000 bp, Homo Sapiens; identical to SEQ ID NO: 224773

SEQ ID NO: 406723 - DNA, 1000 bp, Homo Sapiens
aggaacaaaagtgaaagagagacgtcatcaaggccgggcgcggtggctcatgcctgtaatcccagcactttggaaggccaaggagggcggatcatgaggtcaggagttcaagaccagcctggccaatatggtgaaaccctgtctgtctctactaaaaataaaaaaattagccaggcgtggtggcgggcgcctgtaatcccagctacttgggaggctgaggcagaagaatcacttgaacctgagaggcagaggttgcaataagccaggattgtgccattgcactccagcctgggagacaaagcgagactccatctcaaaaaaaaagaatgactaaaattaagaagattgatgattccaaatattggtaaagatgtagaacaactagaactcccacatattgctgatgaaaatgaagaataatacattactttggaaaatactttggtactgatttaccatatgaccccaaaatctcacttgtagaaatttatacaggaaaaatgaaaacatatgctcacagaaagcttgtatacacatgcttatggcaataaatttatttatagttgcctatcaacaagtgatgaacaaatatattttagtatcttgatactactttctagctagaaaaggaatactactaagcaaaaatagaggatgaagtagtaatatacataacatatatgaatttaaaaacaccatgctgattgaaagaaaacaattatcaaatacacagtgtaatattctattcacagaaagtttgaaaacaaaaaactatagtctctgaaagaaaaccattggttgcaggaaggtggggattcattggccacaaaagggactgaggaagctttttatgggtaatggaaatattttatatcttgatggtggcaccaattatacaactgtatgtacacatttgtcaaaattctaatcgtattatacacaacatgagtgactttaactgtctataaattatatctcaataaaattggtcttaaaagat

SEQ ID NO: 406724 - DNA, 1000 bp, Homo Sapiens; identical to SEQ ID NO: 294442

SEQ ID NO: 406725 - DNA, 1000 bp, Homo Sapiens; identical to SEQ ID NO: 294443

SEQ ID NO: 406726 - DNA, 1000 bp, Homo Sapiens
ggctgtaggggagggctgcagccagggactctgaacccggggccggcccacccagccacccagggtggggaacaagatcgcctcccagggccagaagctggggatgtccttgcttcctaggatgttggctaggggatcacacgccccacattctgggtcaagcatggtcctgccccagcatcttgctgggttgggggcatctctgcacagatgagtgccaccccagcgtctccgccagggtctgggcatgtcactcttgggcatctgtgctcaggaggtcaccaggtgtgggcagggcaccaagcagggaggtagccgaggctggaagatgcacatcagtgccccgctgggcttcctcaagtgggaactggtggagggggcgctaggctgccgggccagggtcagcaggctcaggccggctcagggctcagagttgagccagaaaccaaggtgaaatctgcctcttactgccgccagggcccttgggacagggacaggaacagcagaaggtaaagtggaaaggaattgagtaatgggcccccaggcaaggctgagccaggccccaagcccaggattggggtctccagagtccctgggggccccagggcagctcacccacagcctggggcctatgggagcaagggggctcctgatgggtgggggcaggagcttggacaaagttgaaggccttctgtctgaattggccagggaccaatgaaagccaaaaagctggtgtggtggcttatgcctgtaatcccactttgggaggccaaggcgggtggatcacctgaggtcaggagttcgagaccagcctggtcaacatggtgaaaccccatctccactaaaaatagctgggcgtggtggcaggcacctgtatgtaatcccaaatactcgggaggctgaggcaggagaatcacttgaacctgggagatggaggttgcagagagccaagatcatatcactgcactccagcctggctgacagagtgagaatctgtctc

SEQ ID NO: 406727 - DNA, 1000 bp, Homo Sapiens; identical to SEQ ID NO: 294445

SEQ ID NO: 406728 - DNA, 1000 bp, Homo Sapiens; identical to SEQ ID NO: 294446

SEQ ID NO: 406729 - DNA, 1000 bp, Homo Sapiens
gtcttggactcttgaggtggggaaatgttggagcaggtagctagtcagacatgagcagggcaggggagggccccctcaccaggaatgtcaggcaaccatcaggtgatggtcaggcagttgttaagctgtgtctctaacataataatgagtggcagctggcgccagggaactatggcctcccaatagataggaaacacctgaagctggtgatcagccgcttcctgataagatctcaggagttgggtgcgcaggctcaagcatgcaccctaagaggcaaaatagtggcatttaactcatatatgaccttcctttaggaaggcttgactggtaagggaaaaactcctccagtgaacacgtgcacaacttcagtaaaaacactgcacatgcgtcccctcccaagtgctggcaggccactgtgcatgcagacagcccgccccaaagaaaaatcagaggaggagaaatggaaaccccggaaaaatgccaatgtataaaaccccaagtcaagggcctaccaaggcaattggatctctcaagtcacccgcttggctctcttcaagtgcactttgcttccttttgttcttgctctaaaacttttactcctgctctaaaacttgccttggactatcatgctaccttacgcctcccgggccaaattccctcctctcctccggggggcaaggatggagtctgctgcagacccattggatttgctgctggtaacagttccaccatttaggttccagcaccaagcaaactaacacccgactcagtgtaaacagccaaacaagcttaaccaattagaaaccaccatctaacctctaactaggtcctttcaactttaaccaagtattttctttgtcttgcttctgtgggaaccttataaaattttcccccttgtacctctgtagtagagacccagttgcttgcagtttggccctgcctgttcatgaatcacccttgctcaaataaactctctaaaatgctaaaaaaaaaaaaaaaa

SEQ ID NO: 406730 - DNA, 1000 bp, Homo Sapiens
tggacagacaagcacctacagggttctttgtctctgcatcctaacttgctgccttatcgtctgcaagtgttctccaagggaaggaggaggaaactgtggtgttcctttcttccaggtgacatcacctatgcacattcccagtatggggaccatagtatcattcagtgcattgtttacatattcaaagtggtgcactttgaaggaagcacatgtgcacctttcctttacactaatgcacttaggatgtttctgcatcatgtctaccagggagcagggttccccacagtttcagaggtggtccaggaccctatgatatttctcttctttcgttcttttttttttttttttttgagacagagtctcgttctgtcgcccaagctggagcgcaatggtgtgatcttggctcactgcaacatccgcctcccaggttcaagtgattctcctgcctcagcctccctcgcaagtagctgggattacaggcgcctgccaccatgcctagcaaatttttgtatttttagtagagacaggattttaccatgttggccaggctggtctcaaactcctgacctcaagtgatctgccctcctcagcctcgtaaagtgctgggattacaggggtgagccgctgtgcctggctggccctgtgatatttctgtgaaataaattgggccagggtgggagcagggaaagaaaaggaaaatagtagcaagagctgcaaagcaggcaggaagggaggaggagagccaggtgagcagtggagagaaggggggccctgcacaaggaaacagggaagagccatcgaagtttcagtcggtgagccttgggcacctcacccatgtcacatcctgtctcctgcaattggaattccaccttgtccagccctccccagttaaagtggggaagacagactttaggatcacgtgtgtgactaatacagaaaggaaacatggcgtcggggagagggataaaacctgaatgccatattttaagttaaaaaaaaa

SEQ ID NO: 406731 - DNA, 1000 bp, Homo Sapiens; identical to SEQ ID NO: 294448

SEQ ID NO: 406732 - DNA, 1000 bp, Homo Sapiens; identical to SEQ ID NO: 294448

SEQ ID NO: 406733 - DNA, 1000 bp, Homo Sapiens; identical to SEQ ID NO: 224776

SEQ ID NO: 406734 - DNA, 1000 bp, Homo Sapiens; identical to SEQ ID NO: 224777

SEQ ID NO: 406735 - DNA, 1000 bp, Homo Sapiens; identical to SEQ ID NO: 224778

SEQ ID NO: 406736 - DNA, 1000 bp, Homo Sapiens; identical to SEQ ID NO: 224779

SEQ ID NO: 406737 - DNA, 1000 bp, Homo Sapiens; identical to SEQ ID NO: 119137

SEQ ID NO: 406738 - DNA, 1000 bp, Homo Sapiens
ctatgtggctctggggatttttgtacagcatcgagtctcagccctgccagtggtggatgagaaggggcgtgtggtggacatctactccaagtttgatgttatcaatctggcagcagaaaagacctacaacaacctagatgtatctgtgactaaagccttgcaacatcgatcacattactttgagggtgttctcaagtgctacctgcatgagactctggagaccatcatcaacaggctagtggaagcagaggttcaccgacttgtagtggtggatgaaaatgatgtggtcaagggaattgtatcactgtctgacatcctgcaggccctggtgctcacaggtggagagaagaagccctgagctgggggaaggggtcatgcagcaccaggggatatgcccaactcactgcctgctggaagctctgtgggaatcagatgaaacttgagggaattgtgactctgttccctgttcagggtcccctgcccttctatctgggagctagggaaggtatgggggaggaaagagaatggatttatagctacccttaccctcacacatacacttgaaaaaactttcagcctagccagttctagcccctgtcctcttagatatatccccctttctgggtgaactataggctctgtgcctctcagacaaattctgatctctaagagatccccagacctcacttgcctctgcctccatcttggccctgattcaaccctaagataatagcacaacaaaattcttcataaagatatttttattcacctgttccgtgctatatggaggaggccaagtccatttagtgacatttcttcccataatgtgagtggggaggattgtggggaggaggggctttgggttcctgtgtttgtgcatatgaagggagatgggggttaggtggaggaggagagcagcgtggttagctaaggttattgctttttgtggcaaatctaattaaatgacaggaatctcttcacgataaaaaaaaaaaaaaaa

SEQ ID NO: 406739 - DNA, 1000 bp, Homo Sapiens; identical to SEQ ID NO: 119139

SEQ ID NO: 406740 - DNA, 1000 bp, Homo Sapiens; identical to SEQ ID NO: 294457

SEQ ID NO: 406741 - DNA, 1000 bp, Homo Sapiens; identical to SEQ ID NO: 116136

SEQ ID NO: 406742 - DNA, 1000 bp, Homo Sapiens; identical to SEQ ID NO: 119141

SEQ ID NO: 406743 - DNA, 1000 bp, Homo Sapiens; identical to SEQ ID NO: 119142

SEQ ID NO: 406744 - DNA, 1000 bp, Homo Sapiens; identical to SEQ ID NO: 294460

SEQ ID NO: 406745 - DNA, 1000 bp, Homo Sapiens
cacactagagacaaaggcaatgaggtgaacgcagaacggatgaagctcttacaccaagtgtcacgagtctggagaacagatgggttgagtagttgttcttataaattagtatctgtggaacacaatcctttatatatcaacatcacagtggatttctggtttggtgcatgaccctgggtcttttggtgatgtttggaagaactgattctttgtttgcaataattttggcctagagacttcaaatagtagcacacattaagaacctgttacagctcattgttgagctgaatttttcctttttgtattttcttagcagagctcctggtgatgtagagtataaaacagttgtaacaagacagctttcttagtcattttgatcatgagggttaaatattgtaatatggatacttgaaggactttatataaaaggatgactcaaaggataaaatgaacgctatttgaggactctggttgaaggagatttatttaaatttgaagtaatatattatgggataaaaggccacaggaaataagactgctgaatgtctgagagaaccagagttgttctcgtccaaggtagaaaggtacgaagatacaatactgttattcatttatcctgtacaatcatctgtgaagtggtggtgtcaggtgagaaggcgtccacaaaagaggggagaaaaggcgacgaatcaggacacagtgaacttgggaatgaagaggtagcaggagggtggagtgtcggctgcaaaggcagcagtagctgagctggttgcagctgctgatagccttcaggggaggacctgcccaggtatgccttccagtgatgcccaccagagaatacattctctattagtttttaaagagtttttgtaaaatgattttgtacaagtaggatatgaattagcagtttacaagtttacatattaactaataataaatatgtctatcaaatacctctgtagtaaaatgtgaaaaagcaaaaaaaaaaaaaaaaaaaaaa

SEQ ID NO: 406746 - DNA, 1000 bp, Homo Sapiens; identical to SEQ ID NO: 294462

SEQ ID NO: 406747 - DNA, 549 bp, Homo Sapiens
agtgacctcgggcggcgggtcacgtcggccgggcatggctgcatggagcccggccgcggcagcgcctctcctccgcgggatccgcgggcttccacttcaccatcggatgtttgccactcagactgagggggagctcagagtgacccaaattctcaaagaaaagtttccacgagctacagctataaaagtcactgacatttcaggaggttgtggggcgatgtatgaaattaaaattgaataagaagaatttaaggagaagagaactgtccagcagcaccagatggttaatcaggcactaaaagaagaaatcaaagagatgcatggattgcggatatttacctctgtccccaaacgctgaccacgccctggctgcatagatgctgctgcttaagaccttggatgaacttcactgacatcattcttccctaagcagtcaccaaaaaatttatatattttgctcatatacatttccatattataattatagaagatgtataatctatttagatgttaattaaaggaaacaaacaactgaaaaaaaaaaaaaaa

SEQ ID NO: 406748 - DNA, 1000 bp, Homo Sapiens; identical to SEQ ID NO: 224783

SEQ ID NO: 406749 - DNA, 1000 bp, Homo Sapiens
tgtgaacacttgggccataataatctccaatttgtactgagaattctgtgactatcctctatcctcatctacacacacactcctctccgttggaattctctttggattagccctgacactttctggcactgtccttttctgcccgtgggttctggagagggctaaccccagcttcccagtgtgttggcagcatgggccaagtctttctctgatagagctcttgggggaacctcagggcagaaaaaaaaaactgaacagacatagggatgagcatcaaagaaaacttcagggggcatttcaactggtaaaaactaagatctgagaaataacttgctgtgggtggaattggcttgaattatcattgccctggctggccaggcagccttgggcacatggttgaactaggtgattggattgggaacagagtgtttttttaaggatggctagtcaggttcttctcatgggactgagcaaacaaaatgctgataatgtggcaggtggtgtagtagttgaagataataggatgtaaatagataccatgaggtagtgttcaagtaacagagtgccctgtgtaagaggaagttatgagtttgcagaaagtgtgagaaaggtagcatatatgggtaacagtggtgggaagagaagaaggaagacacagaaacagataggaagagaaactgagtagcattgatgttggagcacacctgtggccaaggtggcacattttccttggatacacactaaccctggcgtttctgtccttataaggctgactgcaccctagatgacgggttgatgggtgcagcaaaccaccatggcacatgtatacctatgtaacaaacctgcatgctgcactttctttcatgtatcccagaacttaaagtaaaataaaaaaataaataaataaataaaggccagaaaaattggccaaaaaatctgaatagaaaaaaaaaaaaaaaaaaaaaaaaaaaaaaaaaaaaaaaaaaaaaaaaaaaaaaaa

SEQ ID NO: 406750 - DNA, 1000 bp, Homo Sapiens
tttaaaaaatcataattttcaagtcaagttcaagatcaaaaatatgtaattattttagtagggcttaaatatcagaaatgagatgcatgatcttgggcaaattttatcttcttacacctgagtttcctactctgtgaagggagggggaactgattcacacttgattatttctatcattcattttcagtttaaatattctatggtgttatgtcaaaggcattttatatattgccaggaaatgagttacagcaaaattcatgccaaagttatgaaatttatgataattatgtgacatacattgcacagctactactcaaaaaagaattttgtagatgtatgaaagcagattattcaacacaatgcattcctgagaataaaatgaacataatcagagtaaaatatttttgaggagaaaacttaaaatgttggtataactcaaagtaatctaatacacaaccttgcactaaatgtgattgacatttggatttgggatggggagagatagtttcctaaaatcacagtaacttttaataattgtaatgcattttgaaaacagagaatcatatttttataatggtgagaactatgcaataactctttaggaatgaaaacttcctttaagaagtttgccaccgttagagatgaggagatagtgagacagagagatgttcacagagactcagcaaatcttagacaataatgctgcaattttctgaaagaagatgcttgcagtgtcaggtatggtttgggggttggaaaagttacttttctgatttcttggaaccatttaaaactcctttatatcattctgtctctttccaaattgagggtcaactactagtttagagatataaggtattttatcttgttttcaagttctacttcagaagaaaacctatttcatgtttcttctcccattacctacttaagatacttaaggtatttaagtatgcatttgaggaaatattttcctgtgctaaaataaaggtttgcaaatgtt

SEQ ID NO: 406751 - DNA, 1000 bp, Homo Sapiens; identical to SEQ ID NO: 119143

SEQ ID NO: 406752 - DNA, 1000 bp, Homo Sapiens; identical to SEQ ID NO: 294467

SEQ ID NO: 406753 - DNA, 1000 bp, Homo Sapiens; identical to SEQ ID NO: 224785

SEQ ID NO: 406754 - DNA, 1000 bp, Homo Sapiens; identical to SEQ ID NO: 119144

SEQ ID NO: 406755 - DNA, 1000 bp, Homo Sapiens
ttgacaaaatctctttagtcttgaaggatggatactggagacagaatctggtttgtgttcttggatgggcacataatttaccaagagcattcaccttgccatctgtcttgtcattgtactgtacaaggaacagccctcagacgtgttctgcacatcccttcttcctggtggtaccatccctatttcctggagcaccagggctaaatggggagctatctggaaactctagattttctgtcatacccacatctgtcacagtacctgcattgtcttggaatgtaagcactgtcttgagggaaggaagaggtctgttctgtattgccttaagttgattgaggtttgtaggagactggttcttctacatacaaggatttgtcttaagtttgcacaatggctagtgtcagcaaaaggcaggagagggtttttgttttttttttaagttctatgagaatgtggatttatggcattgagtatcacactcagctctgctgtgttaactttgtgaaactggatggaacaaactttaacttaccaagcaccaagtgtgaaagtgactttcacggttccttcataaaactataataatatccgacactttgatagaaaaaaattcaaagctgtgcctttgagcctatactatactgtgtatgtgtggaaataaaaatgtattgtacttttggagaattttttgtaggcatttttctgtcagatttgtagtaatttgtgaggtttgttagagattaatataggttttctttctgtattataaaatgcaccaagcaattatggtggacctattaccctatgggtaagaaataaatggaaatatgacatcggatgtttcagcaactgttctgtaaataaaatctttgatcacaccactcagtgtgataattgtgtctacagctaaaatggaaatagttttatctgtacagttgtgcaagatatgaatggtttcacactcaaataaaaaatattgaaacgaaaaaaaaaaaaaaaa

SEQ ID NO: 406756 - DNA, 990 bp, Homo Sapiens
aggcgcaagccggcaagatggcggcggctggggctttccgtctgaggcgggcggcatcggctctgctgctgcggagcccccgcctgcccgcccgggagctgtcggccccggcccgactctatcacaagaaggttgttgatcattatgaaaatcctagaaacgtggggtcccttgacaagacatctaaaaatgttggaactggactggtgggggctccagcatgtggtgacgtaatgaaattacagattcaagtggatgaaaaggggaagattgtggatgctaggtttaaaacatttggctgtggttccgcaattgcctccagctcattagccactgaatgggtgaaaggaaagacggtggaggaagccttgactatcaaaaacacagatatcgccaaggagctctgccttcctcccgtgaaactgcactgctccatgctggctgaagatgcaatcaaggccgccctggctgattacaaattgaaacaagaacccaaaaaaggagaggcagagaagaaatgagccctccctcggcgaagcctccagcaggccacaccagctgtttcccacctgctgtgcagtcaccttagatgttcagaagccgcttcctctccactgaagagctatgagatacgcacaatacttgctgttcacgttatgactctcatgcaagcaaaatacacagtttcattgttctgaatcctgtggtttctttcagcccacttttatcgccttaacctagttaatgtatattttgaattgtgtgtatgacctcagaactgaaattgataatgaagttgcaagttttgatagcccgtgaagtgcataagtatctaattttacctgaattgatttggggggaaattaccagtagaatgccttggtctgaatatttgatagaaccaattgttgtacataaaacagattgcgcatatatatatatgtataaaaaataataaaataatggaagatgaaaaaaaaaaaaaaaaaa

SEQ ID NO: 406757 - DNA, 1000 bp, Homo Sapiens
acttctgcaaacccatcccgaggcctctggaatgggactccttctccctccctacctcccagccatcctaactcctacaggccagagaatgacatctctaactggctcataatcccttggcagcctggggctactttttagaaccagcaagcactgttgatactgtgaaacatcccattttttccgtattagagaccagatatttttctacctgttcatgattcacatctcttcttgcatgtacctaagaggggcggtgccattgtttgggggcttggggggctttcaaaggggaaaatgcgatgggagagggaggaactggaggggggtgcttttgtactgggatttaagacacccctgatggaatgaaagccaactgaaccacgtaaagctcgaaccacgtggcaagtggtggacaaaacttcaacgcatgatatttattggcacttccttacctccctttgccctgcagctgtttttatgcttctttttctctccttgctaattactgactccccaagtggcaagttccgcagatagctgggttagaagagagacaggggagtgagctagtcaaatgtgaaaaatgctctcccagcaaagctgagacaaaattggagaagctgcagcctcacgcaccatccccctctttccaccagatggatgttgacttggtgtctgggagttcccgaaccctagagccaggatgttctgtttaatcaacagctcagccagctgcctgggagttttggcattaagccccgccttgaagggcgagctttaagtttttcccagttctggaactttctaccgagtatccaccacccttagacacaatcccagtgctacccgtctgacctgcactgctcatctgctttgtgtaacatgacccctgataagatgttgaaactgttattcacaaagactccgtgtttgggcaacatcaagactgtaagtgtagaattgagcaactgtcttctatcaataaaggctgaatggc

SEQ ID NO: 406758 - DNA, 1000 bp, Homo Sapiens; identical to SEQ ID NO: 220455

SEQ ID NO: 406759 - DNA, 1000 bp, Homo Sapiens; identical to SEQ ID NO: 224787

SEQ ID NO: 406760 - DNA, 1000 bp, Homo Sapiens
acaacccaattgaccattataatgaccgggaaacagatttttggaaacattaaagaagccatttatcccttggctttgaattggtggagacgccgaaaagctcggacaaactctgagaagctgtatagtcgatgggagcaggatcatgaccttgaaagttttggaccccttgggcttttctatgagtacttagaaacagttactcaatttggatttgttacactatttgtggcctcttttcctttggctcctcttcttgctctcataaataatattgtagagattcgagtggatgcctggaaacttaccactcaatacaggagaactgtagcttctaaagctcatagcataggtgtttggcaagacattctttatggaatggctgtcctttctgttgcaactaatgcctttattgttgcatttacgtcagacatcattccccgtctagtttactactatgcttactcaacaaatgccacacagcctatgacaggatatgtgaataatagcctgtcagtattcctgatagctgattttccaaaccacactgcaccttcggaaaaacgagacttcatcacttgcaggtacagagattacagatatcctcctgatgacgagaataaatattttcataatatgcaattctggcatgtccttgctgccaagatgaccttcatcattgttatggaacatgttgtgtttttagttaaatttttgctggcctggatgatacctgatgttccaaaagatgttgtggagagaatcaagagagaaaagttaatgactatcaagattctccatgattttgagctcaacaaattaaaagagaacttgggaattaattctaatgaatttgccaagcatgtcatgattgaggaaaacaaagcacagctggctaaatcaacactctaatcagtatagtgaggaagcagcaggtgatctgccttacttcactttatcctctggttttagggccagacgccagaagccatgtgtcaat

SEQ ID NO: 406761 - DNA, 1000 bp, Homo Sapiens
ggagaaggcctttggggactttgtcatcaacaggccagacaccccctatggcatgatgaacttcacctatgagccccaggacttttatcggctggtggccctcagtcgatacaacgtcctgaacaacgtggagaccttgaagtgcgccctccagctggctctggaccggcaccaggctcgggagagggcaggggcctgaccaaggcaggaagcggaggactgtgacagagaggagacacactgctcatggtcagggcttgtagagggaggagcgatggggactctgtgcaggatctgcttcccttctctccaggacctgcctcgaggtgccccaggccccggaaagctcttgcagaattgcagcttggactggggcagggctctccttgtgtgtttttggagaagatgggcagtagatcgctccagggactcttggggatgtagggcagaagagaacagcactcatttcacagcggggtgtggagagaatcaggtgagccacagagcccaccccagacacagaaggacctcagagggcccaagtcctcagacccacacagaacaggggctgagggcactgagaagccagctgtcctccttacactgagatggaaagcagagatgcatccatccacacttcctgcagagcggcccaagccccaaccccacctcgagctcctggatgcactgctatcaagaacaatgaggggctgaggggatggccagcctatgttgctgactccatcatcctaaccctccttctgccttctggtctcctcgtgcctcctcccagatcacccttctcttcccagcgccctaaagcctgtggggtgatgtcccattctggctgctccaggtgggagatgtgcgcgtgtctccctgccagttacccaggcttcactcttcgaacctggaccacagtctctggtgatgtgtgtagtggccacatcatgcaaatatagtctcaccattcctaggagctaaaaaaaaaaaaaaaaaa

SEQ ID NO: 406762 - DNA, 978 bp, Homo Sapiens
atgtctgacctgcaggcggctgaggggccgggctcctggagccccacagcccgcccagggtcggctggcggcgtcggggactgccagggagtggaggggagccaggcggccgcctcagagaatgaagatctagaaaacaaggatacctctttattggcttctgccaccgatccagaaccctgctcctcaccccacaggccacagatggtatctccagtgagtaaggatgccacggaagatctgcggaaagcaactggtcctttggaggctcaggccttggtgaaacaggatttgctgcctgcagaccaggcccaggtcctcaatgagatggctaagtatcaagttccacagaggtctggggacatcgttatgatccagtctgaacatacaggagctatagatgttctttcagctgatttggaatctgcagatcttctgggggaccacaggaaagtctccccacctctgatggctcctccatgcatctggacctttgccaaggtgaaggaattcaaaagcaagctgggcaaagagaagaacagccgtctggtggtgaagcgtggtgaggtggtgaccatccgggtacctactcatccagaggggaagcgtgtctgctgggagtttgcgaccgatgactatgacattggctttggagtttattttgactggacccctgtaactagcactgacataactgtgcaggtcagtgattccagtgacgatgaggatgaagaagaggaagaggaggaagagattgaagaacccgttccagctggagatgtggagagaggctccaggagctccttgcggggtcgctatggggaggtcatgcctgtgtaccggcgggacagccaccgagacgtgcaggctggcagccatgactaccctggtgagggcatctacctgctcaagttcgacaactcctactccctgctgcgcaacaagactctctacttccacatctactacaccagctga

SEQ ID NO: 406763 - DNA, 1000 bp, Homo Sapiens
agtggtgatgaatacagcaggggcttccttcaaaaccttaaccttattcaagatcagaatgcgcaaacaaggtggaagcagggcagatatgatgaggatggcaaacccttcaatcaaagatctttgcttttggggcatgagcgaattctcacaagagcaaagtcttatgaatgcagtgaatgtggaaaagtcattaggcgtaaggcatggtttgatcaacatcaaagaattcactttttagagaatccttttgagtgtaaggtctgtgggcaagccttcagacagcggtcagctcttacggtccataaacagtgtcacctgcaaaacaagccatacagatgtcatgactgtggaaagtgttttcggcagctcgcgtatcttgttgaacataagaggattcacaccaaagaaaaaccttataaatgtagcaaatgtgaaaaaacgtttagtcagaattcaacccttattcgacatcaggtgatccatagtggagaaaaacgccataaatgccttgagtgtggaaaagcctttggccggcattcaacccttctatgtcatcaacagattcacagtaaaccgaacacccataaatgcagtgaatgtggacagtcctttggtaggaatgtggatctcattcagcatcaaagaatccatacaaaggaggaattctttcaatgtggagaatgtgggaaaacgtttagttttaagaggaatctttttcgacatcaggtcattcacactggaagccaaccctaccaatgtgtcatatgtggaaaatctttcaagtggcacacaagctttattaagcaccagggcactcacaaaggacagatatccacatgatgttaattggaaagcagtcattggagaactagaacttataaacctctacttcaagtgtgtatcacgtaattgtttccatgaaaagcaataaatgtaacaaagggttaaaaaaaaaaaaaaaaaaaaaaaaaaaaaaaaaaaaaaaaaaaaaaaaaaa

SEQ ID NO: 406764 - DNA, 1000 bp, Homo Sapiens; identical to SEQ ID NO: 294472

SEQ ID NO: 406765 - DNA, 1000 bp, Homo Sapiens; identical to SEQ ID NO: 224789

SEQ ID NO: 406766 - DNA, 1000 bp, Homo Sapiens; identical to SEQ ID NO: 119145

SEQ ID NO: 406767 - DNA, 1000 bp, Homo Sapiens
aagatgggaggaaagagaactgtgccctggaactgtcacactattcagggaaggaccttccaggatgtggccactgaaatctccccggagaaagcccccctccagcccgagacgtctgctgacttctatcgtgattggcgacgacacttgccaagtgggccagagcgctaccaggctctactgcagcttgggggtccaaggctcggctgcctcttccagacagatgtgggatttggacttcttggggagctgctggtggcactggctgatcacgtggggccggctgaccgggcagcggtgctggggatcctatgcagcctggcgagcactgggcgcttcaccctgaacctaagcctgctgagccgggcagagagagagagctgcaagggcttgtttcagaagctgcaagccatgggcaaccccagatccgtgaaggaggggctcagctgggaggagcagggtctggaggagcagtctggtgggctccaggaggaggagaggctcctgcaggagctgctggagctgtaccaggttgactgatgcagcaagctaccctcagaggtcccagtggtcactggaggcagttttttggttgttgtcttgggggttctgcaggaccataataagaaacccacacctggttcccttctcaacttggaattttcagagcaaaaacaggaatcaagtcttccccacttctccagtccctcagtgtctcgctgttttgaactgtgtgtatccatggacagtcaagagctcaggaagttgagagcggttttgtttcccacccttagagtctgccaagcctctagcccactggccttgagagatgagtgtgtgcccaaccaaatgctggctataccagttacagcctccactcataaaagggaaaaagcaaaatctttatggtaaacaaacactgatctccacagctcttaacaagaatgtttatagccccaaaccaatgaatggacatgtaatcaaaaaaaaaaaaaaaaaa

SEQ ID NO: 406768 - DNA, 1000 bp, Homo Sapiens; identical to SEQ ID NO: 294475

SEQ ID NO: 406769 - DNA, 1000 bp, Homo Sapiens
ttcaaacccagccaggttatgccaacactttgagggatgcagctcccaaaatgtataaggaagaaggcctaaaagcattctacaagggggttgctcctctctggatgagacagataccatacaccatgatgaagttcgcctgctttgaacgtactgttgaagcactgtacaagtttgtggttcctaagccccgcagtgaatgttcaaagccagagcagctggttgtaacatttgtagcaggttacatagctggagtcttttgtgcaattgtttctcaccctgctgattctgtggtatctgtgttgaataaagaaaaaggtagcagtgcttctctggtcctcaagagacttggatttaaaggtgtatggaagggactgtttgcccgtatcatcatgattggtaccctgactgcactacagtggtttatctatgactccgtgaaggtctacttcagacttcctcgccctcctccacccgagatgccagagtctctgaagaagaagcttgggttaactcagtagttagatcaaagcaaatgtggactgaatctgcttgttgatcagtgttgaagaaagtgcaaaaggaacttttatatatttgacagtgtaggaaattgtctattcctgatataattactgtagtactcttgcttaaggcaagagtttcagatttactgttgaaataaacccaactcttcatgatttgcctgtgacttatttttaaaacttttttaaaaaagatttagctttaaaatagttggaaagaatgaagtatataagttaaggaaaaaatacaaaactgaccatgaccattgttggttgaatattccagttgctattcagaaattgtcatatgtctcaagttttatcacacaaagttcctgtatttctagggaagcagactttaaatttctaaaaacttgatttaattatagttaaatatgtgtagtcatttgtggttattttggcaagtaaatgtcagtatatacttacaaaaaaaa

SEQ ID NO: 406770 - DNA, 1000 bp, Homo Sapiens; identical to SEQ ID NO: 294476

SEQ ID NO: 406771 - DNA, 1000 bp, Homo Sapiens
cgcagtgacccagtcaccctgaatctcctccatggtccagacctccccagcatttacccttcattcacctattaccgttcaggagaaaacctctacttgtcctgcttcgccgagtctaacccacgggcacaatattcttggacaattaatgggaagtttcagctatcaggacaaaagctctctatcccccaaataactacaaagcatagtgggctctatgcttgctctgttcgtaactcagccactggcaaggaaagctccaaatccatcacagtcaaagtctctgactggatattaccctgaattctactagttcctccaattccattttctcccatggaatcacgaagagcaagacccactctgttccagaagccctataagctggaggtggacaactcgatgtaaatttcatgggaaaacccttgtacctgacatgtgagccactcagaactcaccaaaatgttcgacaccataacaacagctactcaaactgtaaaccaggataacaagttgatgacttcacactgtggacagtttttccaaagatgtcagaacaagactccccatcatgataaggctcccacccctcttaaccgtccttgctcatgcctgcctctttcacttggcaggataatgcagtcattagaatttcacatgtagtagcttctgagggtaacaacagagtgtcagatatgtcatctcaacctcaaacttttacgtaacatctcaggggaaatgtggctctctccatcttgcatacagggctcccaatagaaatgaacacagagatattgcctgtgtgtttgcagagaagatggtttctataaagagtaggaaagctgaaattatagtagagtctcctttaaatgcacattgtgtggatggctctcaccatttcctaagagatacagtgtaaaacgtgacagtaatactgattctagcagaataaaacatgtaccacatttgctaaaaaaaaaaaaaaaaaaaaaaaaaaaaa

SEQ ID NO: 406772 - DNA, 1000 bp, Homo Sapiens
actggcggccgatcccaacgaggctccctggagcccgacgcagagcagcgccctggccgggccaagcaggagccggcatcatggattccttcaaagtagtgctggaggggccagcaccttggggcttccggctgcaagggggcaaggacttcaatgtgcccctctccatttcccggctcactcctgggggcaaagcggcgcaggccggagtggccgtgggtgactgggtgctgagcatcgatggcgagaatgcgggtagcctcacacacatcgaagctcagaacaagatccgggcctgcggggagcgcctcagcctgggcctcagcagggcccagccggttcagagcaaaccgcagaaggcctccgcccccgccgcggaccctccgcggtacacctttgcacccagcgtctccctcaacaagacggcccggccctttggggcgcccccgcccgctgacagcgccccgcagcagaatggacagccgctccgaccgctggtcccagatgccagcaagcagcggctgatggagaacacagaggactggcggccgcggccggggacaggccagtcgcgttccttccgcatccttgcccacctcacaggcaccgagttcatgcaagacccggatgaggagcacctgaagaaatcaagggaaaagtatgtcctggagctgcagagcccacgctacacccgcctccgggactggcaccaccagcgctctgcccacgtgctcaacgtgcagtcgtagcccggccctctccagccggctgccctctctgcctccctctttctgttcctcctgcccagggcacccccttagtgcctccagcttctgcctacctcaccccccctttcgtgcccctggcctgagcctcctgctggcctggccctggccgcccacctgggttcatctgacactgccttccctctttgccctgtggtactgctgtctgccaggtctgtgctgccttgggcatggaataaacattctcagccctg

SEQ ID NO: 406773 - DNA, 1000 bp, Homo Sapiens
gcttctgtctcatggtaattactgggcctggcctctgtaagcctgtgtatgttatcaatactgtttcttcctgtgagttccattatttctatctcttatgggcaaagcattgtgggtaattggtgctggctaacattgcatggtcggatagagaagtccagctgtgagtctctccccaaagcagccccacagtggagcctttggctggaagtccatgggccaccctgttcttgtccatggaggactccgagggttccaagtatactcttaagacccactctgtttaaaaatatatattctatgtatgcgtatatggaattgaaatgtcattattgtaacctagaaagtgctttgaaatattgatgtggggaggtttattgagcacaagatgtatttcagcccatgccccctcccaaaaagaaattgataagtaaaagcttcgttatacatttgactaagaaatcacccagctttaaagctgcttttaacaatgaagattgaacagagttcagcaattttgattaaattaagacttgggggtgaaactttccagtttactgaactccagaccatgcatgtagtccactccagaaatcatgctcgcttcccttggcacaccagtgttctcctgccaaatgaccctagaccctctgtcctgcagagtcagggtggcttttcccctgactgtgtccgatgccaaggagtcctggcctccgcagatgcttcattttgacccttggctgcagtggaagtcagcacagagcagtgccctggctgtgtccctggacgggtggacttagctagggagaaagtcgaggcagcagccctcgaggccctcacagatgtctaggcaggcctcatttcatcacgcagcatgtgcaggcctggaagagcaaagccaaatctcagggaagtccttggttgatgtatctgggtctcctctggagcactctgccctcctgtcacccagtagagtaaataaacttccttggctcctgct

SEQ ID NO: 406774 - DNA, 1000 bp, Homo Sapiens; identical to SEQ ID NO: 119146

SEQ ID NO: 406775 - DNA, 1000 bp, Homo Sapiens; identical to SEQ ID NO: 119147

SEQ ID NO: 406776 - DNA, 1000 bp, Homo Sapiens; identical to SEQ ID NO: 224791

SEQ ID NO: 406777 - DNA, 1000 bp, Homo Sapiens; identical to SEQ ID NO: 294479

SEQ ID NO: 406778 - DNA, 1000 bp, Homo Sapiens
cagtctctgaaagaggagctcctttgcctcaagaacaaccacaaagaggaaatcaattctttacagtgtcagcttggggagagacttgacattgaagtgactgctgccccttctgctgacctaaaccaggttctacaagaaatgagatgtcaatatgagcccatcatggagacaaaccgcaaagatgtggaacagtggttcaacacgcagatagaggagctgaatcaacaagtggtgaccagctctcaacagcagcaatgctgccaaaaggagatcatagaactgagacgcagtgtgaacactctggaggttgaactgcaggcccagcatcgaatgagagattcccaagagtgcatcctaacggagacagaggctcgctacacggccttgctgacccagatccagagtctgattgataacctggaagctcagctggcagagatccggtgtgccctggaaagacagaaccaagaatacgagatcctgctggacgtcaagtcccggctggaatgtgagattaccacataccgcagccttctggagagctcggatggcaagcgtccctgttacccacgtgccaccaaatgtgagccttccccttggacatcttgtaagtccggagccatagaaagcacggccccagcttgcacatcctcatccccctgcagcttaaaggagcactgcagtgcctgcggacccctgtcccagatactggttaaaatttgcaccatcaccaaggagattaaggatgggaaggtcatttcttcttacgagcatgtgcagccttgtttcatcatcagacctgccaaagtctaacatcccaaggtgatgaaaatgacccacatttatgaaacagaggccaatacatgctcctgccagagaggtttaagaaaactccccagtcccttaaggtacttagtttcttactactacagcgggtccccattgctaggtagaatatcttttattctgctccttccctaactcaccactgctaaca

SEQ ID NO: 406779 - DNA, 1000 bp, Homo Sapiens
gaattatctgtcttatcttaatggcctctgtggtaacgatagttgttattccctctacattaatacagaggcacaacaattcttccctgaatacaagaactcagaaagcacgtcattgtggccattgtcctgaggagtggattacatattccaacagttgttactacattggtaaggaaagaagaacttgggaagagagtttgctggcctgtacttcgaagaactccagtctgctttctatagataatgaagaagaaatgaaatttctgtccatcatttcaccatcctcatggattggtgtgtttcgtaacagcagtcatcatccatgggtgacaatgaatggtttggctttcaaacatgagataaaagactcagataatgctgaacttaactgtgcagtgctacaagtaaatcgacttaaatcagcccagtgtggatcttcaataatatatcattgtaagcataagctttagaggtaaagcgtttgcatttgcagtgcatcagataaattgtatatttcttaaaatagaaatatattatgattgcataaatcttaaaatgaattatgttatttgctctaataagaaaattctaaatcaattattgaaacaggatacacacaattactaaagtacagacatcctagcatttgtgtcgggctcattttgctcaacatggtatttgtggttttcagcctttctaaaagttgcatgttatgtgagtcagcttataggaagtaccaagaacagtcaaacccatggagacagaaagtagaatagtggttgccaatgtctgagggaggttgaaataggagatgacctctaactgatagaacgttactttgtgtcgtgatgaaaactttctaaatttcagtagtggtgatggttgtaactctgcgaatatactaaacatcattgatttttaatcattttaagtgcatgaaatgtatgctttgtacacgacacttcaataaagctatccagaaaaaaaaaaaaaaaaa

SEQ ID NO: 406780 - DNA, 1000 bp, Homo Sapiens
cagcccagtccgtccggtcctcaccgcctgccggccggcccaccccccaccgcagccatggacgccatcaagaagaagatgcagatgctgaagctggacaaggagaacgccatcgaccgcgccgagcaggccgaagccgacaagaagcaagctgaggaccgctgcaagcagctggaggaggagcagcaggccctccagaagaagctgaaggggacagaggatgaggtggaaaagtattctgaatccgtgaaggaggcccaggagaaactggagcaggccgagaagaaggccactgatgctgaggcagatgtggcctccctgaaccgccgcattcagctggttgaggaggagctggaccgggcccaggagcgcctggctacagccctgcagaagctggaggaggccgagaaggcggctgatgagagcgagagaggaatgaaggtcatcgaaaaccgggccatgaaggatgaggagaagatggaactgcaggagatgcagctgaaggaggccaagcacatcgctgaggattcagaccgcaaatatgaagaggtggccaggaagctggtgatcctggaaggagagctggagcgctcggaggagagggctgaggtggccgagagccgagccagacagctggaggaggaacttcgaaccatggaccaggccctcaagtccctgatggcctcagaggaggagtattccaccaaagaagataaatatgaagaggagatcaaactgttggaggagaagctgaaggaggctgagacccgagcagagtttgccgagaggtctgtggcaaagttggagaaaaccatcgatgacctagaagagaccttggccagtgccaaggaggagaacgtcgagattcaccagaccttggaccagaccctgctggaactcaacaacctgtgagggccagccccacccccagccaggctatggttgccaccccaacccaataaaactgatgttactagcctctcaaggccctttaatcctt

SEQ ID NO: 406781 - DNA, 1000 bp, Homo Sapiens; identical to SEQ ID NO: 294482

SEQ ID NO: 406782 - DNA, 1000 bp, Homo Sapiens; identical to SEQ ID NO: 294484

SEQ ID NO: 406783 - DNA, 1000 bp, Homo Sapiens; identical to SEQ ID NO: 224793

SEQ ID NO: 406784 - DNA, 1000 bp, Homo Sapiens; identical to SEQ ID NO: 294487

SEQ ID NO: 406785 - DNA, 1000 bp, Homo Sapiens; identical to SEQ ID NO: 294488

SEQ ID NO: 406786 - DNA, 1000 bp, Homo Sapiens
gggccagcagccaggaacgtggcgaagaacttggatctgaggtgggcccatggtgtagctgtggtgtgctagcaagagtggcctccaaacccaccctggaaggtgatccagagaccatagagcagaaaggcttccttctcagagtgagctgctggaagcccaccagtgtcagcagtgccaagaggagctggggtgccagtatctgtgtatcttcagaggcagcaggggccagtgtgccacatcttgccccagtcctgaaaggatagatggtatttggcctgtgacccttggctgaggagccatggtccggctctgccaggccctgctgctgttagtggccactgtggcccttgcatccagaagattccaagcctggggctcaacaaaggtggtgaggacattccaagatatccctcaaaactacgtctatgtgcagcaggcactctggttcgccatgaaggagtataacaaggccagctttagtataacaagttcagctttagggtgctgaaggttctgaagagccaggagcaggtgacagatagtttggagtactatattgaggtcaaaattgcccgaacaatttgcaagaaaatttcagaagatgaaaactgtgcatttcaagaggatcccaaaatgcaaaaggtggttttttgtacttttattgttgcatctaaaccatggaaatttgaactcaccatgctgaagaaacaatgcaaagatatgtagttatcttctagtgtgttctgccacactcatttccattttaaagaagaagcaaagacacttgcaagaactagaacaacacagttaacccattaacttcatttgtttggcctttttgcatttttgtgtgttcttcatgggctgatgttgaaaatccatgatgtgttttgacagcattgcatagcctattcttgctggatacttcccctactagctgggataatctgctgcaataaatggaagtggtttctacaccccaaaaaaaaaaaaaaaa

SEQ ID NO: 406787 - DNA, 1000 bp, Homo Sapiens; identical to SEQ ID NO: 294489

SEQ ID NO: 406788 - DNA, 1000 bp, Homo Sapiens; identical to SEQ ID NO: 294490

SEQ ID NO: 406789 - DNA, 1000 bp, Homo Sapiens; identical to SEQ ID NO: 294491

SEQ ID NO: 406790 - DNA, 91 bp, Homo Sapiens
gatcgatgatgacttccatatatacattccttggaaagctgaacaaaatgagtgaaaactctatactgtcatcctcgtcgaactgaggtcc

SEQ ID NO: 406791 - DNA, 76 bp, Homo Sapiens
atgatgagaaccttatattatcctgaagagaggtgatgacttaaaaatcatgctcaataggattacgctgaggccc

SEQ ID NO: 406792 - DNA, 67 bp, Homo Sapiens; identical to SEQ ID NO: 294492

SEQ ID NO: 406793 - DNA, 1000 bp, Homo Sapiens
gaccagcgaatgtaaaattatactagaaatcctagatgagaatgacaatgccccagacgtggtttttacttcagtgtccagttctgtaactgaggacgcagaaccctggacggtgatcactctgttcaaaacacatgataaagattcgagagaaaatggggaggttacatgcctcataaacgaaagagttccttttagaatcgaatcttccgccaataatgactataagcttgtaacagatgggaccctggattgggagcggatcccggagtacaacgtcaccatcactgccactgacaagggcaagcctccgctctcatccagcacaagcctcaccctacgcattggtgaagtcaacgacaatgctccggttttccaccaagtctcctacgtggtccacgtggccgaaaacaaccttcccggagcctccatcccacaagtcagcgcctctgacctggacctagggctgaatggccaagtctcctactccatcgttaccactgacttggagctgcgggcactgtcgtcctacgtgtccgtgagcgcacagagcggggtggtggtcgcgcagcgtgccttcgaccacgagcagctgtgcgccttcgagctcacgatgcaggcccacgaccagggctcgcccgcgctcagcgccaacatgagccggcgcatgttggtgggcgacctcaatgacaatgtgccgcgggtgctgtaccccgcgctggggcccgatggctccgcactcttcgatatagtgccacgcgccgcagagtccggctacctggtgaccaaggtggtggcggtggacgcagattcgggacacaacgcttggctgtcctaccacgtgctgcaggccatcgagcccgggcttttcagcctggggctgcacacgggaacctgctggttgctgtgcgtgacggaggacagccgccgctctctgcgccgctacgcttcacctagtcttcgcagacagcctgcaggaggcactgccagacttcagtga

SEQ ID NO: 406794 - DNA, 1000 bp, Homo Sapiens
tgaagcgggtgcagtacctgaacagatacatccataaacgggaggagaacctgcgcttcgacagcaacgtggaggagttccaggcagttacggaactggggcggcctgtcgcagagaactggaacagccagaagggcatcccggaggagaagcgggacaagatggacgactactgcagatacaattacggggttttttgagagcttcacagtgcagccgcgagtccatcctaaggtgactgtgtatcctgcaaagacccagcccctgcatcaccgcaaccccctggtcggctctgtgagtggtttctatccaggcagcattaaagtcaggtggttccagaatggtcaggaagagaaggctgcggtggtctccataggcctgatccagaatggagattggaccttccagaccctggtgatgctggaaacagttcctcggagtggagaggtttacacctgccaagtggagcatccaagcgtgacgagccctctcacagtggaatggagtacacggactgaatctgcacagagcaagatgctgagtggagtcgggggctttgtgctgggcctgctcttccttgggacagggctgttcatctacttcaggaatcagaaaggacactctggacttcagccaacaggactcctgcgctggactcctgagctgaagtgcacatgaccacattcaaggaagaaccttctgccacagctttgcaggatgaaaagctttcccacttggctcttattcttccacaagagctctctcaggaccaggttgttactcgttcagcaactctgcagaaaatgccctcccttgtggcttcctcagctcctgttcttggcctgaaaccccacagccttgatggcagcgcctcgtcttcaacttttgtgcttccttttacctaaattttcctgcctcccctgggtctgtattccccttgtgccacaaacacattgcattattcaatgtttctcaaacatggagttaaaaattatctggt

SEQ ID NO: 406795 - DNA, 1000 bp, Homo Sapiens; identical to SEQ ID NO: 294493

SEQ ID NO: 406796 - DNA, 1000 bp, Homo Sapiens; identical to SEQ ID NO: 220456

SEQ ID NO: 406797 - DNA, 1000 bp, Homo Sapiens; identical to SEQ ID NO: 224795

SEQ ID NO: 406798 - DNA, 1000 bp, Homo Sapiens; identical to SEQ ID NO: 294496

SEQ ID NO: 406799 - DNA, 331 bp, Homo Sapiens; identical to SEQ ID NO: 294497

SEQ ID NO: 406800 - DNA, 1000 bp, Homo Sapiens; identical to SEQ ID NO: 119149

SEQ ID NO: 406801 - DNA, 331 bp, Homo Sapiens
gtttgtgtttttttttttttttttcctcccccacgcaatggaggggaaggggatggtaaaccaagcttgagctggatttcagtgtagggtcacaatgatgaatggtccaaaacattcgcggtttccaccagaattcaaggtgttggcaactaccttccttggatgtctgagtgacccaagatgttaaggaagaataaggccctattttaatgttggtatgggccctcttgtaagagtttgctccagacttttagtatcagattgcgtcagggagaaagaagggttattaacattaaaagaacttgcagtaattcctttttctcttcctcag

SEQ ID NO: 406802 - DNA, 1000 bp, Homo Sapiens; identical to SEQ ID NO: 224796

SEQ ID NO: 406803 - DNA, 1000 bp, Homo Sapiens; identical to SEQ ID NO: 119150

SEQ ID NO: 406804 - DNA, 1000 bp, Homo Sapiens
tcagtctgggatagagactttgaacagcaataagtttccttggtctggctcaacgtcttctaaactcaacattccccagttcatggaaaatgatcctcatgggattctattgtaaaagctgcatgattcctggagaatgttttattgtcctggagtcaacccaaaaatcaacactaccagtcatgttgcagagctccttgaattaaccttgaattcagtttccagctgagcagctgcttcacgttgtgagggggcaatcctccatcatcctgggatttcattctgggacacagagtttgagcagcaataaggctgggtccacattgcccctcaacagcattagtggacatgattgtcagacttgcaatttccgcagacaccttctgtgaacatttttcaacatcatctacatgagtgagagacccgttcgacatgtaagaatactgcttgactttggacctgcctttgtcgtggttcctgcctttctcatagatcccctgccaggcccaggatgataggaggcaatgaagtcaagggccgagccccattcattgaaagctgactctggggtctcgggtataattccatcacataaaatcccctcaacaactcaccagactatattccaatctccatggaacctgattcttgcacacagcctctttcaggaatggagtcagaagagcagtcttcagagaccacctcagtttggaaaagcctcctccttcagtggttcccagccatggagtcatcgtgaaggggctccatggtcaataattttacggtactgcacttggttatcacagacagactttttcatgatagcatgccatctctgtctatatcattttcctctgcttaggcaggctgacaactctgacagccaggggcccgaatctacctggcaaatgtgcatgctctactctcagtgcaaaaggcctgtttgggagttctgactagtgtcacaataaatgccgccattgcctagtgaaaaaaaaaa

SEQ ID NO: 406805 - DNA, 1000 bp, Homo Sapiens; identical to SEQ ID NO: 294499

SEQ ID NO: 406806 - DNA, 1000 bp, Homo Sapiens; identical to SEQ ID NO: 119151

SEQ ID NO: 406807 - DNA, 1000 bp, Homo Sapiens; identical to SEQ ID NO: 294501

SEQ ID NO: 406808 - DNA, 1000 bp, Homo Sapiens; identical to SEQ ID NO: 294503

SEQ ID NO: 406809 - DNA, 633 bp, Homo Sapiens; identical to SEQ ID NO: 294504

SEQ ID NO: 406810 - DNA, 1000 bp, Homo Sapiens; identical to SEQ ID NO: 294505

SEQ ID NO: 406811 - DNA, 1000 bp, Homo Sapiens; identical to SEQ ID NO: 294506

SEQ ID NO: 406812 - DNA, 1000 bp, Homo Sapiens; identical to SEQ ID NO: 294507

SEQ ID NO: 406813 - DNA, 200 bp, Homo Sapiens; identical to SEQ ID NO: 224798

SEQ ID NO: 406814 - DNA, 1000 bp, Homo Sapiens
tccacgaaagaggccatgtctgcagaaaaagtgtagatatgtgtgattttccagaatattgcaatggaacatctgagttttgtgtacctgatgtgaaagctgctgatttagaatactgcagtaataagactagctattgctttaaaggagtatgcagagaaagggatagacagtgttcacagttatttggaaaatttgctaagtctgctaatcttctgtgcacagaagaagtgaattttcaaaatgacaaatttggaaactgtggttcccgttgtgatttttttgatatcctttgtggaaagattgtttgtcactggatacattcagaactagtaccaatgacagacttagacatacaatatacttaccttagaggtcacgtatgtttgtccgcacatgcaagaaatggttcaaaacaatcggagacctatacagaagatataactgcatgtggccaacacaaggtatgtcactcccgagaatgcagaaattttagtgaactaaatataacaaaatatactacaaattgtggacagaatgggatttgcaatgaacatttccattgtcaatgtgatcctggttatgctcctccagattgtgagccagcaatgtcatcaccaggaggaagtatcaatgatggattttggcttacagtagaaaaaagtgtacccttgcttccaaaacgacgtgctgctcctaaaaacaatggtcttttgatcagtttctacattttttcacctttgctcattttaattgctattgttagtcttaaatggaataaaatgaagagattttggagcaaagtgggaacagtaagcagcagatctatctcagaagacagcagtagtaacagcagccagtcacagagttaaagtaaccaagtgataaaatcaaagccatcggatgaagaaaggatattaccaagaaactcacgattaacttaaaactttcaacttcacagaaaaaaataaatcatatgactaaaagcataaaaaaaaaa

SEQ ID NO: 406815 - DNA, 1000 bp, Homo Sapiens; identical to SEQ ID NO: 294509

SEQ ID NO: 406816 - DNA, 1000 bp, Homo Sapiens; identical to SEQ ID NO: 294510

SEQ ID NO: 406817 - DNA, 1000 bp, Homo Sapiens
gtcattcaaaaacagttattcatagagacattaagccagagaacttacttcttggatcagctggagagcttgaaattgcaaattttgggtggtcagaacatgctccatcttccaggaggaccactctctgtggcaccctggactacctgccccccgaaatgattgaaggtcggatgcatgatgagaaggtggatctctggagccttggagttctttgctgtgaatttttagttgggaagcctccttttgaggcaaatacataccaagagacctacaaaagaatatcacgggttgagaattcacattccctgactttgtaacagagggagccagggacctcatttcaagactgttgaagcatgttcccagccagaggccaatgctcagagaagtacttgaatacccctggatcacagcaaattcatcaaaaccatcaaattgccaaaacaaagaatcaactagcaagtattcttaggaatcgtgcagggggagaaatccttgagccagggctgctgtataacctctcaggaacatgctaccaaaatttattttaccattgactgctgccctcaatctagaacactaaaagaaatatttgttttactgagcaggtgtgccttaacctccctactcagaaagctccacatcaataaacatgacactctgaagtgaaagtagccacgagaattgtgctacttatactggttcataatctggaggcaaggttcgactgcagccaccccatcagtctgtgccaggcatggtgtcctcccaggaggcaaatccagagtctggctatggggaaagtgaccactttgtgctgactcgatcggttaaggagctgtccaataaccttccaagtacctgagtgagtgtgtaacttattgggttggccaagcctggtaaagctgttggactgagtacgtgattctttttaagtaggaaaataaagatatttgtacagaaaaaaaagtacttttattttactgtggacagctgc

SEQ ID NO: 406818 - DNA, 1000 bp, Homo Sapiens
acgacctcaggtcctcagaccgaccagcccaagaaacatctcaccaatttcaaatctgatctgttcggcttagcgactgaagattgacgctgcccgatcgcctcggaagtcccctggaccatcacagaagccgagcttcgggtaactctcacagtggaggagttatggattcactaccagattctactgtatgctctgacaactatgaccacaatggcagcaagattaagaaaattgtgcattcaattatatcatcctttgcatttggactatttggagttttcctggtcttactggatgtcactctcgtccttgccgacctaattttcactgacagcaaactttatattccttcggagtatcgttctatttctctagctattgccttattttttctcatggatgttcttcttcgagtatttgtagaagggtatggtttctgtggattctctgctctttgtgctctcctccccacattggtggctccacctggcacagggaagcttctggattccagaagggaacaacactacagtcgcccgtagttttgtttctgttcagtctccattgtggcatgccacactctcctggtttgggccctgctcatttctttactgccttcctgcctgccctttttgtgcaggtggattcttgctctgtcacccaggctggagcgtaatggcacaatcttcgctcacttcaacctctgccttctgggttcgagcaattctcctgcctcagcctcctgagtaactgggattacaggcgtgtaccaccacatctggctaatttttgtatttttagtagggacggtgttttaccatattggccaggctggtcttgagctcctgaactcaagtgatccactcgcctcagcctcccaaagtgctgagattacaggcttgagcaaccttgcccagccaaaagtaaactttttaattccatcaaaaaaaaaaaaaaaaaaaaaaaaaaaaaaaaaaaaaaaaaaaaaaaaaaaaaa

SEQ ID NO: 406819 - DNA, 985 bp, Homo Sapiens
atgtgtatgtttctgaattcactgtcttctatgcagctgggtccagacatatgagagggacaaaccagtgagtgtctccgagttcctcctcttgggactctccaggcagccccagcagcagcatctcctctttgtgttcttcctcagcatgtacctggccactgtcctggggaacctgctcatcatcctggccataagcatagactcccgcctgcacacccccatgtacttcttcctcagcaacatgtcctttgtggacaactgcttctccaccaccgtccccaagatgctggccaatcacatactcaggactcaaaccatctccttctctggctgtctcatgcagatgtattttatcagtgagcttgctgacatggacaatttcctcctggctgtgatggcctatgaccgctttgtcgccgtgtgccgccccttacattacacagcaaagatgacccatcagctctgtgccctgctggtcactggatcatgggtggttgccaactcgaatgctctgctgcacaccctgctgatggctcgactctcattctgtgcagacaacaccatcccccacatcttctgcgatgtgactcccctcctgaaactctcctgttcagacacacacctcagtgaagtgatgattcttactgaggctgccctagtcacgatcaccccatttctttgcctcctggcttcctatatgcacatcacctgcgttgtcctgagggtcccatccacaaagggaagatggaaagccttctccacctgtggctcccacctggctgtggttctcctcttctatggcaccatcatgtctccatatttcagaacttcatcctcccactcagctcagagagatatagcagctgctgtgaggttcacagtggtgactcccgtgatgaatcctttgatctacagcctgaggaacaaggacataaaaggggctcttgtaaaagtggttgctgtgaaatttttttctgttcaa

SEQ ID NO: 406820 - DNA, 1000 bp, Homo Sapiens
tgggggtcccaagagccagggggggaagagggtctggctctccaccaccacaaaatggggggcctttatgttcaggttttgcccaagagtcagcttatttgcttcttgtactagcagggcagttgctgccaaggccctcaaacagggtgccatcctttagaaaccctgtctagttgttcagagacgtaggccaccggcctcatccagggccccacagtttgggttaaaagtccacctgccatcttttctctctctgacgcatacaatggaaaaggctttgtccgatcggatagccccagggctgaagctgccagaagtttttcctttaactcatgaaagacttgctgttgttgggatcccccttccaaaggttcccagtccccgccccctttgtgacatcatacaaagtcttggcttatactgcaaagtttgggatccacagtctacaaaaccccacagctcctgagaactctcttgcctgccttcggctcttaggctatagtagattccaaataacctgctttctttctgttcccgggtggcttcggacccctgtcggatcggaaatcccaagtaaggtacctgccgtcggcagatttgagctttcttcttggacacctaatacccacagtcctccaggctccagtagattgcaaatgacctgcttactttctgttcccgggctgcgttctgacacctgtcggatagtaaatcccaagtaaggtaccagccgtcggcagatttgagctttcttcttggacacctatacccacagtcctccagtgttttagacgcccagctgcacaacttgattgccttacaaatgacctgcttccaggatgcggaaattcctaatttcttctgtgacccttctcaactcccccatcttgcatgttgtgacaccttcaccaataacataatcatgtatttccctgctgtcatatttggttttcttcccatctctgggacccttttctcttactataaaattgtttcctcc

SEQ ID NO: 406821 - DNA, 1000 bp, Homo Sapiens; identical to SEQ ID NO: 119152

SEQ ID NO: 406822 - DNA, 660 bp, Homo Sapiens
atggctgccgcatgccgctgcctctccctcctgctcctgtccacctgtgtggctctgttgctgtagccactgctgggtgcccggggagccccgttggagccattgtacccaggggacaataccacaccggagcagatggcccagtacacagctgagctccgtagatacatcaacatgctgaccaagcctaggcatgtgccatggacaaggagagagatcccagcccctgggaccctgggcccactccacattcctggccacaccctatccccagcccaagccccatctccagccccagtcccagccccttccaggccactcttggggaaacagagcatctgtgctgaccaggcctgggcccatgtgccctgggcaagagggtgcctacaggcggatatgaaaccggtgggctggcacctgggcacagtgcttccaggtatggagaaagagacaaagaggacacgctggccttctcagagtggggtcttcccatgctgctgcccccagagagctcagcccgctggacttgtaacactacctcccgccccctaccactccacgggcagtgccagcccagctctcccctccacactgttggctctggccgaagctcactccctgttcctgcacaggctcaataaagcaagtcaaagcacaaaa

SEQ ID NO: 406823 - DNA, 1000 bp, Homo Sapiens; identical to SEQ ID NO: 294514

SEQ ID NO: 406824 - DNA, 1000 bp, Homo Sapiens; identical to SEQ ID NO: 294515

SEQ ID NO: 406825 - DNA, 1000 bp, Homo Sapiens; identical to SEQ ID NO: 119153

SEQ ID NO: 406826 - DNA, 1000 bp, Homo Sapiens; identical to SEQ ID NO: 294517

SEQ ID NO: 406827 - DNA, 894 bp, Homo Sapiens
cgtcatacgcagcgccctttgtgacaccagggccctggtgctttaactagggcgttgggacctgttgcccacacagaccgccctgcagtttcagactggagggcggtggacggctactcagcggcccaactctctcgcagcccttctctccgcaaaatgtcagcctccacctcctcgcaccggcccatcaaggggatcctgaaaaacaaaagctcgtcgggttcctcggtggcgacttccggtcagcagtctggagggactattcaagatgtgaagagaaagaaatcccaaaagtgggacgaatcaagcatccttgcggcacaccgcgcaacgtacagagattacgatttaatgaaggcaaatgagcccggcacttcctacatgagtgtgcaagataatggggaagattcagtgcgcgatgtcgaaggagaagattcagtgcgtggtgtcgaaggaaaggaagccaccgatgcttccgaccacagctgtgaggtggacgagcaagagagcagtgaggcctacatgagaaaaatcctcctccacaaacaggagaaaaagcggcagttcgaaatgagaagaaggcttcactacaacgaagaattgaacatcaaattagctagacaattaatgtggaaagagctacaaagtgaagataatgaaaacgaagaaacgccacaaggcacgaacgaagagaagactgctgcggaagaatcagaggaagctcctctgaccggtggactgcaaacccagtcatgcgacccttagaagatgcctgcttcacccttgcaattgtttgtgaatatgtgacgcttagaagatatctgcttcacccttgcaattgtttgtgaaatacaaaccttgttactgtaaaaaaaaaaaaaaaaaaaaaaaaaa

SEQ ID NO: 406828 - DNA, 1000 bp, Homo Sapiens; identical to SEQ ID NO: 119155

SEQ ID NO: 406829 - DNA, 716 bp, Homo Sapiens
gatctcccttggtttaatgtagagcaagggatctgaaagcttagggagattgggatggtggagtgcattagtcactttagacctactcatcccagctggaaaggtccagaagatatacccttgaccagtgctttgcaaaatagatttgtgagggcagcacctgcatctttgaagagccctgtaattgctcttctctgtatgtccgatccaatagtgggaatctcagtcactcaactacaaaatttaaatacagaagttgtatctaggctgcctttgggattcagcaccatggcggaagaagacatcgagaccgaaatcaagaactacaagactgccccttttgacagctgcttcccaaccagaaccagaccaggaactgctagcagaactacctggacttccactgctgtcagaaggcagtgaccactaaaggaggtgatatctctgtgtgcgaatggtaccagcatgtgtacaagtccctctgccccacatactgggtcacagcctgggacaagcactgggctgaaggcacgtttcccgggaagatctgaactggctgcacctccctctcctctgtcctctgtccttctcccagggtggtgaagggggacctagtacccggtgatccccaccccggcatccaaaatcatgacttcactgctaataaaaactcatgggaaaaaaaaaatttaagtacagtgggaataactggatcc

SEQ ID NO: 406830 - DNA, 74 bp, Homo Sapiens
agggccagtggcgcaatggataacgcgtctgactacggatcagaagattccaggttcgactcctggctggctcg

SEQ ID NO: 406831 - DNA, 1000 bp, Homo Sapiens; identical to SEQ ID NO: 294523

SEQ ID NO: 406832 - DNA, 1000 bp, Homo Sapiens
aaaaaaactgtcctctgaggaggcacaggtgtgacagataaggaacctgcagctcagattcaacaggcacctgccaagtccacactcaggactgtgacagcctcaacaacatgaggtccagacacattcactgtggaaggctctgcccacgcgaacaaagctgtcagctctagcaaaagggacactgccttcttcctccctcacttctcacctggtaagcccgggaatcaaaacagcaaaaatgagcccccaaaaaagagagagagagagagaagcagccactgttaccagcagcacccgctgcacaggcagaagcacctctggtgccactttcaagacaaaacaagagcacagttgaaacatctaatttgaaaatgttgatctcctttcctaagacattgctaaggggcccacaggaaggctggtggcaccagggaataaaccctggaagtggtgcagccactctgggaccaggcagctccggccagaggcctcaatccatggcagccagctgctcgatggcacggcgcactttctccgcagtttcctcaaattctttcttcttattgttggtttcctttgccaattttgttcttggctctttctctgtccagtttcaaaaattcaccaagggttaattcttcaaactgcttcttgacagaaaggaaagcgcaaccggacgaatgctttttatgttcctctatggggtcgtcatctggctcccagccttccagctccttgaagcagaagaaacactgggccaagtctggctcgttctcagtggggcagtggatgaagccagcctcggccatccgctccggggtgcaggcgcagccctccaagaagggccagttcttgaatgtagagatgcggtggtccttgagaaagggctgccaggcagggggcaacgtcggggcacccatgccgccgccgccacctctgccaacgggtcccgcgattcaaatctggcggttaatggcgcgccgcggggcatgtcggg

SEQ ID NO: 406833 - DNA, 1000 bp, Homo Sapiens; identical to SEQ ID NO: 294524

SEQ ID NO: 406834 - DNA, 583 bp, Homo Sapiens
ccaagatgacaaagaaaagaaggaacaatggtcgtgccaaaaagggccgcggccacgtgcagcctattcgctgcactaactgtgcccgatgcgtgcccaaggacaaggccattaagaaattcgtcattcgaaacatagtggaggccgcagcagtcagggacatttctgaagcgagcgtcttcgatgcctatgtgcttcccaagctgtatgtgaagctacattactgtgtgagttgtgcaattcacagcaaagtagtcaggaatcgatctcgtgaagcccgcaaggaccgaacacccccaccccgatttagacctgcgggtgctgccccacgtcccccaccaaagcccatgtaaggagctgagttcttaaagactgaagacaggctattctctggagaaaaataaaatggaaattgtaccttaagcaacaaacaaaaggaaaaaaaaaaaaaaaaaaaaaaaagaaaacaagaaagaaaagaaaaagaaaagcataacgcaagagagagacgacgaaagagaagagagggagaggacgaagaagaaaggaaagccggcatagagagaaggggccgacgcggcag

SEQ ID NO: 406835 - DNA, 1000 bp, Homo Sapiens; identical to SEQ ID NO: 224800

SEQ ID NO: 406836 - DNA, 1000 bp, Homo Sapiens; identical to SEQ ID NO: 224801

SEQ ID NO: 406837 - DNA, 1000 bp, Homo Sapiens
ttattttaaaaggcaaaatttatatacatatgtgcttttttcctatatgtcaccttcttaaagagactgtgtaagtccatttgttgtgttttcttaaagagggagacaaattatttgcaaaacttgctaaagtcaatgattttgatgggatgattgacttctgcttatggaaaacaaatattagaattggacataatgcacatagaaagtattagatatggagaggtttttcaaagtgaaggggacacatcacatttctgcattttacttgcattaaaagaaacctttttatatactaccatatttgttcctatctctccccacgcccaccccccccccacacacacatttttacagttttacctttttgaagaattttttttttgtaagaccaataaccgggatgagaagaatcctgagaatgcctggaggtgaggtagaaaattagaaatacttcctaattcttctcaaggctgttgctttacttcatttcagataattggagagtaaaaagttaaagcctgttgggaggagttgatggtttctgagaaatactaggtactttcatcctcacagattgcaaagattatttgggtgggggggtacagtaattttctgcttaaaaaatgagtaccttgtaaccattacctgtatgctaaatattcttgaacaattggtagatccagaaagaaaaaaaattatgctttctctgtgtgtgtacctgctgtatatgctaaacttattagaaaattttatatactttttaacatgtccagggcagaagataaagccatgttttgacttggtgaaaatggagttgccaaacagcccattaagctccctggtatttcaccttcctctccatctctcccatccctccagtatgcctttacccctttgaaagggtgccttgtacaattgtatatattttattgaagagttattatatcttattctgaattaaattaaacatgttttattgcaaaaaaaagaagagaaa

SEQ ID NO: 406838 - DNA, 1000 bp, Homo Sapiens; identical to SEQ ID NO: 224802

SEQ ID NO: 406839 - DNA, 1000 bp, Homo Sapiens; identical to SEQ ID NO: 224803

SEQ ID NO: 406840 - DNA, 1000 bp, Homo Sapiens; identical to SEQ ID NO: 224804

SEQ ID NO: 406841 - DNA, 1000 bp, Homo Sapiens; identical to SEQ ID NO: 224805

SEQ ID NO: 406842 - DNA, 1000 bp, Homo Sapiens
tatttcatgattggtggaagctctcaagctccaggagcaacttaaggctcccgtgaaaactctatcagagggaataaagagaaagctatgcttcgtgctgagcatactggggaacccatcagtggtgcttctagacgagctgttcaccgggatggaccctgaggggcagcagcaaatgtggcagatacttcaggctaccattaaaaaccaggagaggggcgccctcttgaccacccattacatgtcagaggctaagtctctgtgtgaccgtgtggccatcatggtgtcaggaacgctaaggtgtattggttccattcaacagctgaaaagtttggtaaagattatttactagaaataaaaatgaaagaacctactcaggtggaagctctccacacagagattttgaagcttttcccacaggctgcttggcaggaaagatattcctctttaatggcatgtaagttacctgtggaggatgtccaccctctgtctcaggcctttttcaaattaaaggcagtgaaacagaccttcaacctggaggaatacagcctctctcaggctaccttggagcaggtgttcttagaactctgtaaagagcaggcgctgggaaatgttgatgataaaattgatataacagttcgatggaaacttctcccacgggaagattcttaaaacgaagaacctcctaacattcaattttaagtcctactgcattattagtttccataattctacaagaatgtttccttttacttcagttaacaaaagaaaatattcaatagtttaaacatgcaacaatgattaaagttttcatttttaaaaattttaggatgaaggaaacaaggaaatatagggaaaagtagcagacaaaattaacaaactcagacatgttattcatccccaacatgggtctattttgtgcttaaaaataattttaaaatcataaaatattaggtttgtttttggttattatcaataaagttaacactgagcacatttt

SEQ ID NO: 406843 - DNA, 1000 bp, Homo Sapiens; identical to SEQ ID NO: 294533

SEQ ID NO: 406844 - DNA, 1000 bp, Homo Sapiens; identical to SEQ ID NO: 119158

SEQ ID NO: 406845 - DNA, 1000 bp, Homo Sapiens; identical to SEQ ID NO: 294534

SEQ ID NO: 406846 - DNA, 1000 bp, Homo Sapiens; identical to SEQ ID NO: 119159

SEQ ID NO: 406847 - DNA, 993 bp, Homo Sapiens; identical to SEQ ID NO: 119160

SEQ ID NO: 406848 - DNA, 1000 bp, Homo Sapiens; identical to SEQ ID NO: 224808

SEQ ID NO: 406849 - DNA, 1000 bp, Homo Sapiens; identical to SEQ ID NO: 224809

SEQ ID NO: 406850 - DNA, 1000 bp, Homo Sapiens
agcttggcggagagaggcctccaaaagcgttccgtctgcgattgtcagctgcctagaggaagtcagtgccctgagcacagaggagcttggctgacctgggatgccactgaggcttgagaagtgccttgacacattttgaacacaaatagtttgatcagctttcagaatacaaagggaggtttcaaaacaaaaagacataaaatagataaaacagaccagaggctctccttattgtttggcaaggagacaggagaaacaagcagtcgcatagtcgtttttccctaaatctaatacgtttcacttaaggctgttgtgatctgtgacatatgggttatattattgtgtctttgtcaaacaacaaaaacttgaacttagccctttttttgctgcagaaagtgtccttttagtggcttcttaaaattgagtggcattttataatgaacttaccaatataaaaacatgatttggttcctgagctgttgttgttggacttgtgttccaatgagtgactaggaaaaaataaattggcaaaaacctagagttttctgctatctttgctggaaatgagttgcaaaagtttttctcaagatgtagtgcgtaattgatcagagcaaaacatgcagagcccttagcagaaacccactttaatgcattttcttcatatccctaaagttccttaaaaatatgtgacaatgcatcaggaagaggagaactgaagagtagaagttcccttgcagatttttttatcagtgacatgtaatgagcaattcacagatgagcgcaggcagagctctgtgtgccgtgtacatatggaccgtgctatgatgtgtctcacattggatgatattccactttgggaattttagtatttgtatatagaaaatgggtttaataactcaccatggttttgatttgtcttatattcgttatttcttaaaactcttgtatgtgtttttataataaaaaataaaagtaagccatggatattactgttctgatt

SEQ ID NO: 406851 - DNA, 1000 bp, Homo Sapiens
caagaccctcaacaacaagtttgcctccttcacagaccaggtatggttcctggagcagcagaacaaggtgctggagaccaagtggagccttctgcagcagcacaagatggctgggagcaacatggacaacatgttcgggagctatatcaacaaccttaggcggctgctggagcaggagaagctgaggctggaagcggagcttggcaacatgcaggggctggtggaggacttcaggaacaagtatgaggatgagatcaataagcctacagagatggagaattaatttgtcctcatcaagaaggatgtggatgaaacttacatgaacaaccagccactcctggacatggacagcatcatcactgaggtaaagaggcagtacaaggaggttgccaactgcagccgggctgaggctgagagcacgtaccagatcaagtatgtggagctgcagacgctggctaggaagcacagggatgacctgcggcatacaaagactcagatctccaagatgaaccggaacatcagccagctccaggctgagattgagggcctccaaggccagggggcttccctggaggccaccatcccagatgctgagcatcgtggggagctggccgttaaggatgccaatgccaagctctccaagctggaggccactctgcaacgtgtgagtaccaggagctatgaaagtcaagctggcctggaaatggaggtcgccacctacagaaagctgcgggagagctaggagagccagctggagtctgggatgcagaacatgagtatccatacgaagaccaccagcggctatgcaggtgatctgagctcggcctatgtgggcctcacaactcgtgacctcagctatggcctgggctccagctttggctctggcacaggcttcagctccttcaggtgcaccagctccaccagggccgtggttgtgaagaagatcgagacccgcgatgggaagctggtgtctgagtcctctgacttcctgcccaagtga

SEQ ID NO: 406852 - DNA, 1000 bp, Homo Sapiens; identical to SEQ ID NO: 294538

SEQ ID NO: 406853 - DNA, 1000 bp, Homo Sapiens
agaatgtacaaagccagaaggaaaagaaggacactgtggacctctacagagaccccaaaatttgatgtactggctattaacattgacaaatcaaagagaatacatggtggaattaggagaaggaaaaacgcatgcaggagtggccttcggtaggccacaagatgcagactgcgctctttttccagctggaaccatggagtgtgtagaagagaagaaggttcttgctgtgccagaaacccttaagaaaaagcgaaggaattttgcagagctgaagatcaagcgcctgagaaagaagtttgcccaaaagacgcttcgaaagacaaggaggaagcttatctatgaaaaagcaaagcactatcacaaggaatacaggcagatgtacagaactgaaattcgaaaggcgaggatggcaagaaaagctggcaatttctatgtacctgcagaacccaaattggcatttgtcgtcagaatcagaggtgtcaatggcgtgagcccaaaggtccgaaaggtgttgcagcttcttcgccttcgtcaaatcttcaatggcacctttgtgaagctcgacaaggcttcgattaacatgctgaggattgtagagccatatattgcatgggggtaccccaatctgaagtcagtaaatgaactaatctacaagcgtggttatggcaaaatgaataagaagcgaattgctttgacagataacactttgattgctcgatctcttggtaaatacggcatcatctgcatggaggatctgattcatgagatctatactgttggaaaaggcttcaaagaggcaaataacttcctgtgggccttcaaattgtcttctccacgaggtggaatgaagaaaaagaccacccattttgtagaaggtggagatgctggcaacagggaggaccaggtcaacaggcttattagaagaatgaactaaggtgtctaccatgattatttttctaagctggtcggttaataaacagtacctgctctcaaaaaaaaa

SEQ ID NO: 406854 - DNA, 1000 bp, Homo Sapiens; identical to SEQ ID NO: 224811

SEQ ID NO: 406855 - DNA, 1000 bp, Homo Sapiens; identical to SEQ ID NO: 294540

SEQ ID NO: 406856 - DNA, 1000 bp, Homo Sapiens; identical to SEQ ID NO: 119161

SEQ ID NO: 406857 - DNA, 1000 bp, Homo Sapiens; identical to SEQ ID NO: 294542

SEQ ID NO: 406858 - DNA, 1000 bp, Homo Sapiens; identical to SEQ ID NO: 119162

SEQ ID NO: 406859 - DNA, 1000 bp, Homo Sapiens; identical to SEQ ID NO: 294544

SEQ ID NO: 406860 - DNA, 1000 bp, Homo Sapiens; identical to SEQ ID NO: 224813

SEQ ID NO: 406861 - DNA, 1000 bp, Homo Sapiens; identical to SEQ ID NO: 224814

SEQ ID NO: 406862 - DNA, 1000 bp, Homo Sapiens; identical to SEQ ID NO: 294548

SEQ ID NO: 406863 - DNA, 1000 bp, Homo Sapiens; identical to SEQ ID NO: 224815

SEQ ID NO: 406864 - DNA, 1000 bp, Homo Sapiens; identical to SEQ ID NO: 224816

SEQ ID NO: 406865 - DNA, 1000 bp, Homo Sapiens; identical to SEQ ID NO: 224817

SEQ ID NO: 406866 - DNA, 1000 bp, Homo Sapiens; identical to SEQ ID NO: 224818

SEQ ID NO: 406867 - DNA, 1000 bp, Homo Sapiens; identical to SEQ ID NO: 294552

SEQ ID NO: 406868 - DNA, 1000 bp, Homo Sapiens; identical to SEQ ID NO: 224819

SEQ ID NO: 406869 - DNA, 1000 bp, Homo Sapiens
gcgttccctgtgcccaccttccaggacctggcgggtttctgggacctcctacagctctccatcgaggatgtgaccctcaagttcctggagctacagcaactcaaggccaacagctggaaactcctggagcctaaggaggagaagaaggtccctccgccgataccaaagaagcccctgcggggccggggcgtgccggtgaaggagcgctccctggactccgtggaccggcagcggcaggaagcgcgcaagcggctcctggcggccaagcgcgccgcttccttccgccacagctcggccaccgagagcgccgacagcatcgagatctacatccccgaggcccagaccaggctgtgaccggtccggcccgcccagcccggcccgggcccgcggttctccacccgtactgtacacccagcgtcgaggtcactgtgaacgcgggccgccccgtgcgcccgccccaccggcaccggacgccccggcccccgggcccgtcacactctcgtgggttttttaccttcctgatcccacgcgaaggcgcccgggctgggcagggggccgtgcctctccgccctgcgcccctcacctggatcccctgcccacctggtccgacgctttgtccccacctcctccccatgggcaccatctctgccattctttcccccacgggccaggccgggccgggtccctcatctgggctctgcgtccccccctcccccaccccgcggggctgggcttcgtggggatcaagcttcgtggctttttatgaagaatcccgaaccctgcctaggagcccgccccaccctcccaggggctccatcctcagccctctgcccactgggcccagggaccacagtggctggaccaacccaggaccagggcgcctgggcctctcccctttcccagcggctggggaggggagatgggggcttcccctcaccacacctgtggctgttcccacatccccttgaatatcccaggaaaaataaaacggcagaactgc

SEQ ID NO: 406870 - DNA, 1000 bp, Homo Sapiens; identical to SEQ ID NO: 119163

SEQ ID NO: 406871 - DNA, 1000 bp, Homo Sapiens; identical to SEQ ID NO: 224820

SEQ ID NO: 406872 - DNA, 1000 bp, Homo Sapiens; identical to SEQ ID NO: 294555

SEQ ID NO: 406873 - DNA, 1000 bp, Homo Sapiens
caagctatggggggaccccgtggagagccgggggctccctgggcctgaagacgacaaaccaactgtgatcagtgagctcagctcccgcctgcagcagctgaacaaggacacgcgttccctgggggaggaaccagttggtggcctgggcagcctgctggaccctgccaagaagtcgcccatcgcagcagctcggtctttccttgaggacccgactcccaaggctccttccaaagaggagcccttcgggcccgtctcccctctcctctttgggtctgggggggtggcagcggagcggagcacaggacacttggtgatgtctgagtccagtcctgtttcagatctggtccttgtgtgcccaccgtggctgttgtcagctcttgtcctgcggcccctaatggctggagtccggctcttcagcagcctcggtgagctgagctccatttcagcgcagcgcagccccgggggcccgggcggcggggcctcgtactcggtgaggcccagtggccgctaccccgtggcgagacgcgccccgagcccggtgaagcccgcgtcgctggagcgggtggaggggctgggggcgggcgcggggggcgcagggcggcccttcggcctcacgccccccaccatcctcaagtcgtccagcctctccatcccgcacgagcccaaggaggtgcgcttcgtggtgcgcagcgtgagcgcgcgcagtcgctccccctcgccgtcgccgctgccctcgcccgcgtccggccccggccccggcgcccccggcccacgccgacccttccagcagaagccgctgcagctctggagcaagttcgacgtgggcgactggctggagagcatccacctaggcgagcaccgcgaccgcttcgaggaccatgagatagaaggcgcgcacctacccgcgcttaccaaggacgacttcgtggagctgggcgtcacgcgcgtgggccaccgcatgaacatcgagcgcgcgctcaggcagctggacggcagctga

SEQ ID NO: 406874 - DNA, 1000 bp, Homo Sapiens; identical to SEQ ID NO: 224821

SEQ ID NO: 406875 - DNA, 1000 bp, Homo Sapiens; identical to SEQ ID NO: 224822

SEQ ID NO: 406876 - DNA, 1000 bp, Homo Sapiens; identical to SEQ ID NO: 294558

SEQ ID NO: 406877 - DNA, 1000 bp, Homo Sapiens; identical to SEQ ID NO: 294559

SEQ ID NO: 406878 - DNA, 1000 bp, Homo Sapiens
tgtgttgcagcccatcatggacctgctggacagcaacctgaccctctttgccaaaatctgtgagaagactgtgctgaagcgagtgctgaaggagctgtggaagctggttatgaacaccatggagaaaaccatcgtcctgccgcccctcactgaccagacgggaacccagatgatcttcaatgcagccaaggagctgggtcagctgtccaaactcaaggatcacatggtacgagaagaagccaagagcttgaccccaaagcagtgcgcggttgttgagttggccctggacaccatcaagcaatatttccacgcgggtggcgtgggcctcaagaagaccttcctggagaagagcccggacctgcaatccttgcgctatgccctgtcgctctacacgcaggccaccgacctgctaatcaagacctttgtacagacgcaatcggcccagggcttgggtgtagaagaccctgtgggtgaagtctctgtccatgttgagctgttcactcatccaggaactggggaacacaaggtcacagtgaaagtggtggctgccaatgacctcaagtggcagacttctggcatcttccggccgttcatcgaggtcaacatcattgggccccagctcagcgacaagaaacgcaagtttgcgaccaaatccaagaacaatagctgggctcccaagtacaatgagagcttccagttcacgctgagcgccgacgcgggtcccgagtgctatgagctgcaggtgtgcgtcaaggactactgcttcgcgcgcgaggaccgcacggtggggctggccgtgctgcagctgcgtgagctggcccagcgcgggagcgccgcctgctggctgccgctcggccgccgcatccacatggacgacacgggcctcacggtgctgcgaatcctctcgcagcgcagcaacgacgaggtggccaaggagttcgtgaagctcaagtcggacacgcgctccgccgaggagggcggtgccgcgcctgcgccttag

SEQ ID NO: 406879 - DNA, 1000 bp, Homo Sapiens; identical to SEQ ID NO: 294560

SEQ ID NO: 406880 - DNA, 1000 bp, Homo Sapiens; identical to SEQ ID NO: 294561

SEQ ID NO: 406881 - DNA, 1000 bp, Homo Sapiens; identical to SEQ ID NO: 224824

SEQ ID NO: 406882 - DNA, 1000 bp, Homo Sapiens; identical to SEQ ID NO: 119164

SEQ ID NO: 406883 - DNA, 882 bp, Homo Sapiens
ctttttggctctctcaccagcaccatggctgttggcaagaacaagcgccttacgaaaggcggcaaaaagggagccaagaagaaagtggttgatccattttctaagaaagattggtatgatgtgaaagcacctgctatgttcaatataagaaatattggaaagacgctcgtcaccaggacccaaggaaccaaaattgcgtctgatggtctcaagggtcgtgtgtttgaagtgagtcttgctgatttgcagaatgatgaagttgcatttagaaaattcaagctgattactgaagatgttcagggtaaaaactgcctgactaacttccatggcatggatcttacccgtgacaaaatgtgttccatggtcaaaaaatggcagacaatgattgaagctcacgttgatgtcaagactaccgatggttacttgcttcgtctgttctgtgttggttttactaaaaaacgcaaaaatcagatacggaagacctcttatgctcagcaccaacaggtccgccaaatccggaagaagatgatggaaatcatgatccgagaggtgcagacaaatgacttgaaagaagtggtcaataaattgattccagacagcattggaaaagacatagaaaaggcttgccaatctatttatcctctccatgatgtcttcgttagaaaagtaaaaatgctgaagaagcccaagtttgaattgggaaagctcatggagcttcatggtgaaggcagtagttctggaaaagccactggggacgagacaggtgctaaagttgaacgagctgatggatatgaaccaccagtccaagaatctgtttaaagttcagacttcaaatagtggcaaataaaacgtgctatttgtaaaaaaaaaaaaaaaaaaaaa

SEQ ID NO: 406884 - DNA, 1000 bp, Homo Sapiens
tctgtgtgtatactgaattccaagagcctgagctcctcaaggagatggggtctgaggaggggctcacctcacgcccaccccgaccacatggagatctggctgtgatctctgagaaaacatcaccttagatggcagcgcctcccaggctaagccaaggtggagactctctggtccttcttggccctcctacctcctcctcgtcttccctgagggaggtctcaccaatcagcatctcacctgtgccctctttgtcttctcttgtgtcagccaggggcagagaatcatggggtgtctctcaggagaagccggggggagggggctgagaagctcctacttggtgttttgagtgaagggcatgtcctccccagaggacggagctggatggagacttggttggtgagaggaagctaaggactctactccccctgctccccgcccatgtccctgctgtgtctctcactctcttgctcatctcccagttgtctgttcatgtttctttctactattaatgaatgctgagcccttataacaggagctggggtggagacatcacgaggggtcgggggacagcaaagggcaggaagcaggatgcagggctggcaggaggtgggcctgtggcatcagcaggcccagcgggcgagtgtggtccctgcagcagcttcccacctcctttgttcataaggagcttgtgttggcctcccacagtcctgtctgctggacgtttttcagagttgggttctctctctttgatgtctttcttctgagggtcccaaggtgttcctggagcttctgggttgaggaaaggcagagcaagataatcttggaggggaactacagggtccccaagatttgcccacatcacctcctatggaaaaggctcccagcctgacctgggttgtaggagagtggggagggtgggatgagtggtgttttggggctcaaggatatcagaagccaactttttggatgttccgtttgaagaaagaaggatctaacacct

SEQ ID NO: 406885 - DNA, 1000 bp, Homo Sapiens; identical to SEQ ID NO: 119165

SEQ ID NO: 406886 - DNA, 1000 bp, Homo Sapiens; identical to SEQ ID NO: 119166

SEQ ID NO: 406887 - DNA, 1000 bp, Homo Sapiens; identical to SEQ ID NO: 294564

SEQ ID NO: 406888 - DNA, 1000 bp, Homo Sapiens
aaattggaaataaaataagttacaagataagtttacagggatatattgcttacaatttttaaaaggcagtttgttttttatgtgaatatgtttcttagtgaaattttacattcctttgttttggaagattggcgatatttgaagagttaaaaatagtacagaaatgtgaagtttggtatctctaaatgtgttgtacttgactttcttttttattttgtttttttttttttttgactacttagaattttcacaattctaataagattgtttccaagtctctcatgtgcaagctttaaaggatgcactcttgccattttatgtactggaagatcattggtcagatgaatactgtgtctgacaaaaatgtaaactgtataaactgaggaacctcagctaatcagtattactttgtagatcaccatgcccaccacatttcaaactcaaactatctgtagatttcaaaatccattgtgtttgagtttgtttgcagttccctcagcttgctggtaattgtggtgttttgttttttgttttgttttcaatgcaaatgtgatgtaatattcttattttctttggatcaaagctggactggaaattgtatcgtgtaattatttttgtgttcttaatgttatttggtactcaagttgtaaataacgtctactactgtttattccagtttctactacctcaggtgtcctatagatttttcttctaccaaagttcactttcacaatgaaattatatttgctgtgtgactatgattcctaagatttccagggcttaagggctaacttctattagcaccttactgtgtaagcaaatgttacaaaaaaaaaaaaaaaaaatctctgggttaagaaaatttggcttaaatgtatcctttgttattttaaatatattgagatattttaattaaaatttttaccccattgaaccgattttatagtatttgtacctattttggtgtttttgtctttatagtaaataaaagtttttgaac

SEQ ID NO: 406889 - DNA, 1000 bp, Homo Sapiens; identical to SEQ ID NO: 294565

SEQ ID NO: 406890 - DNA, 1000 bp, Homo Sapiens; identical to SEQ ID NO: 294566

SEQ ID NO: 406891 - DNA, 1000 bp, Homo Sapiens; identical to SEQ ID NO: 294567

SEQ ID NO: 406892 - DNA, 1000 bp, Homo Sapiens; identical to SEQ ID NO: 224827

SEQ ID NO: 406893 - DNA, 1000 bp, Homo Sapiens
tgcagctgtacatgaaggtgcccggcagccgaacgccaggccaccaggagaataacaacttctgctccgtcaacatcaacattggcccaggcgactgcgagtggttcgcggtgcacgagcactactgggagaccatcagcgctttctgtgatcggcacggcgtggactacttgacgggttcctggtggccaatcctggatgatctctatgcatccaatattcctgtgtaccgcttcgtgcagcgacccggagacctcgtgtggattaatgcggggactgtgcactgggtgcaggccaccggctggtgcaacaacattgcctggaacgtggggcccctcaccgcctatcagtaccagctggccctggaacgatacgagtggaatgaggtgaagaacgtcaaatccatcgtgcccatgattcacgtgtcatggaacgtggctcgcacggtcaaaatcagcgaccccgacttgttcaagatgatcaagttctgcctgctgcagtccatgaagcactgccaggtgcaacgcgagagcctggtgcgggcagggaagaaaatcgcttaccagggccgtgtcaaggacgagccagcctactactgcaacgagtgcgatgtggaggtgtttaacatcctgttcgtgacaagtgagaatggcagccgcaacacgtacctggtacactgcgagggctgtgcccggcgccgcagcgcaggcctgcagggcgtggtggtgctggagcagtaccgcactgaggagctggctcaggcctacgacgccttcacgctggccccagccagcacgtcgcgatgaggccggacgccccgcccgcctgcctgcccgcgcaaggcgccgcggggccaccagcacatgcctgggctggacctaggtcccgcctgtggccgagaagggggtcgggcccagcccttccaccccattggcagctcccctcacttaatttattaagaaaaactttttttttttttttagcaaatatgaggaaaaaa

SEQ ID NO: 406894 - DNA, 1000 bp, Homo Sapiens
gattaaggccttgagggccaagaccaacacctacatcaagacaccggtgaggggcgaggaaccagtgttcatggtgacagggcgacgggaggacgtggccacagcccggcgggaaatcatctcagcagcggagcacttctccatgatccgtgcctcccgcaacaagtcaggcgccgcctttggtgtggctcctgctctgcccggccaggtgaccatccgtgtgcgggtgccctaccgcgtggtggggctggtggtgggccccaaaggggcaaccatcaagcgcatccagcagcaaaccaacacatacattatcacaccaagccgtgaccgcgaccccgtgttcgagatcacgggtgccccaggcaacgtggagcgtgcgcgcgaggagatcgagacgcacatcgcggtgcgcactggcaagatcctcgagtacaacaatgaaaacgacttcctggcggggagccccgacgcagcaatcgatagccgctactccgacgcctggcgggtgcaccagcccggctgcaagcccctctccaccttccggcagaacagcctgggctgcatcggcgagtgcggagtggactctggctttgaggccccacgcctgggtgagcagggcggggactttggctacggcgggtacctctttccgggctatggcgtgggcaagcaggatgtgtactacggcgcccgcgctgggcccccgggcgcacaccgctcccctgccacttccgcgggacccgagctggccggactcccgaggcgccccccgggagagccgctccagggcttctctaaacttggtgggggcggcctgcggagccccggcggcgggcgggattgcatggtctgctttgagagcgaagtgactgccgcccttgtgccctgcggacacaacctgttctgcatggagtgtgcagtacgcatctgcgagaggacggacccagagtgtcccgtctgccacatcacagccacgcaagccatccgaatattctcctaa

SEQ ID NO: 406895 - DNA, 1000 bp, Homo Sapiens; identical to SEQ ID NO: 224828

SEQ ID NO: 406896 - DNA, 1000 bp, Homo Sapiens; identical to SEQ ID NO: 119169

SEQ ID NO: 406897 - DNA, 1000 bp, Homo Sapiens; identical to SEQ ID NO: 224829

SEQ ID NO: 406898 - DNA, 1000 bp, Homo Sapiens; identical to SEQ ID NO: 224830

SEQ ID NO: 406899 - DNA, 1000 bp, Homo Sapiens; identical to SEQ ID NO: 294573

SEQ ID NO: 406900 - DNA, 1000 bp, Homo Sapiens
agaactttgtgtgtgtgtagaggtgtgtaggtgtgggtggcatgtgtgcccgcctgcatgcaatacctgagaccaacctaataaaggtacaatcttcatagaactgcacttgcagcctggagttgctctggctgaaagtagactcaggcttaagaaatgaaacataatgcgtttgtctttatagactttaaattttcaattattactcagttatgtttttggtttaaaaaattataaaagtctaaaagtaatacatgctcagtaaaaacaagtccataaaaaatagaagcatatgacaaaaagcataagtcccacaaactccctagcggtgtgtatgtgtgtgtgtgttattcatggtcacactacatgcaaattaaaaaatgaaagtgtggtcatgctttgtcaactcactatatttttactttattaactatattctgtatcagccatctgaattgacccaatctttattggtgactgcatgaaattccaaggcagggatgtgtcatattttctttagctggtcccataatcatgaacatttaagtagctccaatttttcatcaattacagacattgccgccatgaacatgattgcatggcgtgcaagtatttctgcgaggtagatttccgtacgggatttctggggcaaagggtatgggcattcagtattctgagagaaactgccaaattgctctctgaaatggtggtgtcaatttacatttctcccaagagggtaggagactgattatttttctacaccttcaccaacacttggcattctcagacttttgggttttttttggcctatttaggaggaaaaccgattttaaaagctgcatttccttaatcatgaatgaagtcatctttccacttatttgccagacatttgtattttcttttctgcattgtctttttgttttaagatgtttgccctttgcttgttaatttgttggaaatctttgactctaataagtgtgatcaatcttttctctgctga

SEQ ID NO: 406901 - DNA, 1000 bp, Homo Sapiens; identical to SEQ ID NO: 294574

SEQ ID NO: 406902 - DNA, 1000 bp, Homo Sapiens
catggaaaaggagttcccctgaattatgccgaagcacttaaatactttcagaaagctgcggaaaaagggtggcccgacgcacagttccagttaggcttcatgtactactctggctctggaatatggaaggattataaacttgccttcaaatatttttacctggcatctcagagtgggcagccccttgccatttattatctggccaagatgtatgcaacaggaacaggagtagtaagatcatgcagaactgctgtggagctttataaaggtgtctgtgaactaggccactgggctgagaaattcctgacagcttactttgcctataaggatggtgatatagattcttctcttgttcagtatgcactgcttgcagaaatggggtatgaagtagctcaaagcaattcagcattcattttggaatctaaaaaggctaacattcttgaaaaagagaagatgtatccaatggcgcttctcctatggaatcgagctgccattcaaggcaatgcatttgctagagtaaaaattggagattaccattactatggctatgggactaagaaagactatcaaacagcagccacacactacagcattgcagccaacaaataccacaacgcgcaagccatgttcaatctggcttatatgtatgaacacggcttaggcatcacaaaggacattcacttggccagaagattgtacgacatggctgctcaaacgagtccagatgcccacatacctgtgctctttgccgtcatgaaactggaaactacgcatttgctccgggatatcctgttttttaatttcacaacgagatggaactggctgaaactggacaacaccattggaccacactgggacttatttgtgattggcctcattgttcctgggctgattttgttgcttagaaatcaccatgggtaggatgcggatcacaggaaaacctgctcacgggaatcagttcactccaaggtatccccactaaataaacagtttcccatcc

SEQ ID NO: 406903 - DNA, 1000 bp, Homo Sapiens; identical to SEQ ID NO: 294575

SEQ ID NO: 406904 - DNA, 1000 bp, Homo Sapiens; identical to SEQ ID NO: 294576

SEQ ID NO: 406905 - DNA, 1000 bp, Homo Sapiens; identical to SEQ ID NO: 294577

SEQ ID NO: 406906 - DNA, 1000 bp, Homo Sapiens; identical to SEQ ID NO: 294579

SEQ ID NO: 406907 - DNA, 1000 bp, Homo Sapiens; identical to SEQ ID NO: 294580

SEQ ID NO: 406908 - DNA, 1000 bp, Homo Sapiens; identical to SEQ ID NO: 224832

SEQ ID NO: 406909 - DNA, 1000 bp, Homo Sapiens; identical to SEQ ID NO: 119171

SEQ ID NO: 406910 - DNA, 1000 bp, Homo Sapiens; identical to SEQ ID NO: 294582

SEQ ID NO: 406911 - DNA, 1000 bp, Homo Sapiens; identical to SEQ ID NO: 294583

SEQ ID NO: 406912 - DNA, 1000 bp, Homo Sapiens; identical to SEQ ID NO: 224835

SEQ ID NO: 406913 - DNA, 1000 bp, Homo Sapiens
ccccgggctgcggggtccgggggtccaggtcggggcgggcggagggccacccggcctcgctcgggttgctgtgacgactcagccctggcacgaagcccagcccgcggcctgctgggctctcggctgagcaaaatctattcccagtccaccctgtcactgtccactgtggccaacgaggcccacaataacctcggggtgaagaggcccacgtctcgggctccctccccgtcaggtctcatgtccccaagccgcctgcctggaagccgcgaacgggactgggaaaatggcagcaatgcctcctccccagcgtcagtgcccgagtacacaggtccacggctgtacaaagaacccagcgccaagtccaacaagttcatcatccacaatgccctatcacactgctgcctggcgggcaaggtgaacgaaccgcagaagaatcgcattctggaggaaattgagaaaagcaaggccaaccacttcctgatcctctttcgcgactcgagctgccagttccgggcgctctacacgctgtcgggggagacagaggagctgtcgcggctggcagggtatgggccccggaccgtcacgcccgccatggtggaaggcatctacaagtacaactcggaccgcaagcgcttcacccagatccccgccaagaccatgtccatgagcgtcgatgccttcaccatccagggacacctctggcagggcaagaaacccaccactcccaagaagggcggcggcacccccaaatagccccacccgggcggtccacgggccgggccctgtgtgctgcggccgccatcccctggaggacagtcagtcggtattcctgggtcctgtctgtccccaaccgtgtctgggtggggctggagtctccaccctctgactttgagtccagtcctgctgtgggggctgagctgggaggttcagggactcagggctcagctcagtccccttgtctgtcctcccccacttcttgaataaaataatttaaagagaa

SEQ ID NO: 406914 - DNA, 1000 bp, Homo Sapiens
tcaagcaggactgagaactggtagctggctctagtgatcctgaaagcatgttcccttcagaccagcagagtgaagacagacagatgtgtggccctaaaaggcagaacagttttgatgccagaacttcaggactgtcaccacagtccctttttacccctcctctatttacagtgaaataaaattcctattttcttttttttttttttttaattttccttatttcaagctcttatctgaaaaaatgctactttctcctaccacttagtttgaatttgcccaggatatctgtctgggcccctggctgcaacccagacaatggcgagatctcctggagtgggggatattcacgcatcgtgcctgttcctgacagctcagccctggtgtagggtgggactgggcattttctctgctgttacttttctgctaccactatttttggcaaccttggaaagaaaataaacaggttacagaatttcggctagcactaagggaaagctttttcctctgggccacatgccccagtgacccagagcatggaaagggggtcagctctggtctgggccagtgactaagaagcccaatcacattccagtttctatagcactgggtaggcacaacccacagttaagaacatcaagttataagtagccaggccttttcatagccatggtgacacaaaggccctcaagattagcctcctgccatcatgggttggcctgtgatctgtcccccagccaaacccaagtttgtgagagggactctgagaacacttgagcaacacttgggaatccaatgcgctctggtccctcatgcccttcccatgtgcttttctgcagaaggtaacttgacagcaagctgaggggaacgtccccaagccctgtctccctgtctctacagctgcatgctcctctgcgtggcccagccttcacagcgctccagaagaagctgatgccctgaggctgggcacagtggaaatcataataaagcgattgcgatgctc

SEQ ID NO: 406915 - DNA, 1000 bp, Homo Sapiens; identical to SEQ ID NO: 224836

SEQ ID NO: 406916 - DNA, 1000 bp, Homo Sapiens; identical to SEQ ID NO: 294586

SEQ ID NO: 406917 - DNA, 1000 bp, Homo Sapiens
gtattaaatattttttaaaattaattcacctgtttaaaagaaaacattgcatctcaaaaggtgaagatgattgttctttcttccatatcctccttacggcatgtccttggataacttttcaaaaggtatccacacttttggttgagtttagttttcttagaaagtagagaagtaacactttactagaataatgaacaaggaattgatttgctctaggcccagctctgccataaactcattgtgtattcctagacaggtctttaacttcatcagtgtgttgtttttgtgaagtgcaaaataaagatagtgatagtttctgctgtagccctcatagggacattgggaagcagtataagaaaaacttcagcaacatcatgattattgatgctaataggaaaaataaattcatgtaacccatagagaatccaggtcaattgtatttcctcttggaaagcagtttaacatgtaagcgttcaaagatgtgattcagataaaaatacccaggtccatagtgaaagatgtttttcagtatgttacttatggtttagctactagccagggaggtggtagcccagagaaggcaaaccacatacagatcacctggagttgattatatgagtctatgcttttgagctctttaggcaacacattctcattcctgtcattatcagttgaacctccatgccacacatttctaagaattaaatgcctagatggattaaatgtagtatgtgaatgttctatgtaaaagccaatagagtatacaagtgacttgaatgatttttcctaacttgtttgcaactgatagctcatattgaatgtttttatgtaaactttgtatcgttgggaagaattacccaatcagagatttatattttcataaatgttacatttagttaaattttgttacagagttgttacactagaaaattatttcagtcttcaaacaatatacagtcttgtgtatgtattatttgtatgaataaaagataaactactt

SEQ ID NO: 406918 - DNA, 1000 bp, Homo Sapiens; identical to SEQ ID NO: 224837

SEQ ID NO: 406919 - DNA, 1000 bp, Homo Sapiens
gtcaaggatcttcaaggacgtctgaactccttgaccaccgttcttggacaggaagtggaccggtttaacaacctgctgaagttaattcatacttctctggaaacactcaacaaagccatcgctggatttgtggtgatgtctgaagaaatggaaaaagtgtataacagtttcctcaacaaccaggttcccgctctgtggtccaacacagcctacccatccctgaagccactaggatcatgggtcaaagaccttatcctgaggacctcatttgtggatctgtggctcaaaagaggacagcctaagtcctactggatctctggtttcttctttcctcaaggatttctaacaggaactcttcaaaatcatgctcgaaaatacaatttgcctatagatgagctgagtttcaaatacagcgtaattcccacctatcgggatcaagctgcagtgatagaagctgccaagacagtgcaatttggacaagaactgcccatggacatggagttgccctctcctgaggatggtgttcttgttcatgggatgttcatggatgcttctcgatgggatgataaggagatggtgatagaagatgcattgcccggacagatgaatccagtgctgcctgtggtgcattttgaaccacaacaaaactataagccaagcccaacactttaccactgcccactttataaaacaggagcccgggcaggaacactctcaaccacaggacattcaaccaattttgtggtaaccgtcctgttaccctccaagcggtccaaagactactggattgccaagggatcagctttgctctgccagctgagcgaatgaaaaggtgccacctcagccctgaaaaagaaccaggccagagatctttcctaatgggagcaaaaggtttgaataatttatatgtgagcaaaacggtgttaattctgatttgacttaaacgtattgtgacttttatttctcttatgaccttaaaataaagtgtttgagttctttc

SEQ ID NO: 406920 - DNA, 1000 bp, Homo Sapiens; identical to SEQ ID NO: 224838

SEQ ID NO: 406921 - DNA, 1000 bp, Homo Sapiens; identical to SEQ ID NO: 224839

SEQ ID NO: 406922 - DNA, 1000 bp, Homo Sapiens; identical to SEQ ID NO: 119172

SEQ ID NO: 406923 - DNA, 1000 bp, Homo Sapiens; identical to SEQ ID NO: 224840

SEQ ID NO: 406924 - DNA, 1000 bp, Homo Sapiens; identical to SEQ ID NO: 119173

SEQ ID NO: 406925 - DNA, 1000 bp, Homo Sapiens; identical to SEQ ID NO: 119174

SEQ ID NO: 406926 - DNA, 1000 bp, Homo Sapiens
gaatgtagggacaattttctagtgctgtataaagtagcctcgcatctgtttctcaaccttatccatcatttctgacattcatgcaggacttgccctgttgccaccaatgttctcggtatttcacatgcagctctctttctgccactggatacatgggttcaatccatttgtgaagctgtgatagtgtaactggaaagctagtgtggtgaaaattcctttattattttttgttaacatgctgatctttcccggacaaatgaactgaagggtaatttactggaactctcgtgtacagcttcatcaactgtaaccatataaatataactggaatattcttaaacaaaaagaaactaggggtttttttaagtgtaaatttattactagccaacagagttttactattttgattgtctggttggtttaacaaagagcctagctgactttccttctgtaaagtcctccttgtaggcttttttaaagtactgtacatatttgcaatcacattgtgcatagattcttaatggtagatatgatttcttttgtcaggctacaacaatgaactgcagattccttgtttgtaatgtaaatgattgaatacattttgttaatatgtttttattcctatgttttgctattaaaaattttataacatttccaagacaaaaattccaagtttatgctttgaagaatttatgtaattaaaatttcactaaactaatctttttagtttaggaattatttgggttttgacactggaagttgcgccaaataagcatcagaaataggagatgcttaacattgctatactacttgtgttggttaggggtttggatttgggggttctttggttttaatttttttttccacatttaaaagccttaaatgtactgtaagcctcagatcgttgtacaactggactgcggttgattgccagtttgtgtactgttgcttggatgcggcacagtggttggtaatggaataaaggatgcatggatcagaa

SEQ ID NO: 406927 - DNA, 1000 bp, Homo Sapiens; identical to SEQ ID NO: 294592

SEQ ID NO: 406928 - DNA, 1000 bp, Homo Sapiens; identical to SEQ ID NO: 224844

SEQ ID NO: 406929 - DNA, 1000 bp, Homo Sapiens; identical to SEQ ID NO: 294596

SEQ ID NO: 406930 - DNA, 1000 bp, Homo Sapiens; identical to SEQ ID NO: 294597

SEQ ID NO: 406931 - DNA, 1000 bp, Homo Sapiens; identical to SEQ ID NO: 224845

SEQ ID NO: 406932 - DNA, 1000 bp, Homo Sapiens; identical to SEQ ID NO: 294599

SEQ ID NO: 406933 - DNA, 1000 bp, Homo Sapiens; identical to SEQ ID NO: 224846

SEQ ID NO: 406934 - DNA, 529 bp, Homo Sapiens
ccccactggctgctctgaaaagccatctttgcattgttcctccttgctcgccgcagccgcctccgccgcgcgcctcctccgccgccgcggactgcggcagctttatcgccagagtccctgaactctcgctttctttttaatcccctgcatcggatcaccggcgtgccccaccatgtcagacgcagccgtagacgccagctccgaaatcaccatcaaggacttaaaggagaagaaggaagttgtggaagaggcagaaaatggaagagacgcccctgctaacgggaatgctaatgaggaaaatggggagcaggaagctgacagtgaagtagatgaagaagaggaagaaggtggggaggaagaggaggaggaagaagaaggtgatggtgaggaagaggatggagatgaagatgaggaagctgagtcacctacgggcaagcgggcagctgaagatgatgaggatgacgatgtcgataccaagaagcagaagaccgacgaggatgactagacagcaaaaaaggaaaaaaaaaca

SEQ ID NO: 406935 - DNA, 1000 bp, Homo Sapiens; identical to SEQ ID NO: 119175

SEQ ID NO: 406936 - DNA, 1000 bp, Homo Sapiens; identical to SEQ ID NO: 119176

SEQ ID NO: 406937 - DNA, 1000 bp, Homo Sapiens
catcggggaggccagctactccaccatcgcccccactatcattggcgacctcttcaccaagaacacgcgtacgctcatgctgtccgtcttctacttcgccatcccactgggcagtggcctgggctacattactggctccagcgtgaagcaggcagccggagactggcactgggcattgcgggtgtcccctgtcctgggcatgatcacaggaacactcatcctcattctggtcccagccactaaaaggggtcatgccgaccagctcggggaccagctcaaggcccggacctcatggctccgagatatgaaggccctgattcgaaaccgcagctacgtcttctcctccctggccacgtcggctgtctccttcgccacgggggccctgggcatgtggatcccgctctacctgcaccgcgcccaagttgtgcagaagacagcagagacgtgcaacagcccgccctgtggggccaaggacagcctcatctttggggccatcacctgctttacgggatttctgggcgtggtcacgggggcaggagccacgcgctggtgccgcctgaagacccagcgggccgacccactggtgtgtgccgtgggcatgctgggctctgccatcttcatctgcctgatcttcgtggctgccaagagcagcatcgtaggagcctatatctgtatcttcgtcggggagacgctgctgttttctaactgggccatcactgcagacatcctcatgtacgtggtcatccccacgcggcgcgccactgccgtggccttgcagagcttcacctcccacctgctgggggacgccgggagcccctacctcattggctttatctcagacctgatccgccagagcactaaggactccccgctctgggagttcctgagcctgggctacgcgctcatgctctgccctttcgtcgtggtcctgggcggcatgttcttcctcgccactgcgctcttcttcgtcagcgaccgcgccagggctgagcagcagtga

SEQ ID NO: 406938 - DNA, 1000 bp, Homo Sapiens
ctatcccctggcgggccacctactgtgtcgtcgttgccacctgcggcgcctccaacctgggcctcttccctcacccactgtgcacgtcactgagctctgagcaggggaaaacccgtccctgggccggggtgggtgtgggtgtggagggagggcccgcgtgggtggccctggtcagcgtcaggggagctccctccaatcagtttcccaccgagctgctgtctgcaggggccggacccccgcgtggaagcttctatttattcaccgtctgtgcctgctcaagtcacttccctgcgggccctgcctcccacccaccccatcaccagctttccacttggaggccccctgtgccctgcagcctcagggtaggccgtgggtcaccaggctggagagggcccctgccttggccaggggtgcgaggtgacccggctgcattgctgggtgggagctgctgtctgttgttcaggggcctggcccccgccctcccccccgaccccgacctcgcaaagcgcactcccgggcagggtgtggtctggaaggcggggctggcggggacatgggtgttcctgcatctcctagcgcagttcctgctggtgggtggaagggtgcctggtttaggcggggtcccaggagggggtgaggggtgacacccttggggagggggcctgcaaagggcactgcctgtggccacgtggtgtctgtgggaattggtcctggggactttgatgggtgtttgcggccccagttgccgccctgctccctcttccagggctcctggcttgggccccccgacccccctgctcagctcgggaaaatccccgtgcggctccagccccgggtcacgctcaggagcgatgagaggggcgccctggccacgcttcaggaaagcctgtgtctgcgcgcggggcaaggggctccacgacaaaaggacaagatttgacttaaattaagtttttcccttgaggatattttcattttctttaaaagaatataattttcttct

SEQ ID NO: 406939 - DNA, 1000 bp, Homo Sapiens
accttcaatccccacctgatatctgcgtatcatcacggtatcccgcttttcccccagttccccaagagcgtccttcctttccctagtcacaggatcgcagttttggtctgatagtgcatccacctaccccagtgttgcatccccacttccctctttccatctaacgtggtggcctttcctggggataccttgggtatcccccgctaggagagcaagcacaagacaccagggagccagacccctgccgctcccctgccacaggatatgaatacgagcctcagctggtttgagcagctggatgtgcttctcaacgctactgatggaaatgtggtccggaataagcagtggctgtatcctcttggggtctccacagagctcattggcctgtgcatctgtttcttctgtagcagtggctgtatcttcttggggtctccaccgcagaatagcactgctgtcactcctgcagtgctgtgggaggagtcagagattatgcagaaggaattgaagttgctgcagtaccagttgagccagcaccaggagctgctgctgaaacagctggctgagggacgacaggctcaggttggcagttggaagctcttaattcagtcttctggacagtaacagtagctgggaacttttatggaagccagatccccagaggagcaccctttctaacctggagcccagcatctttcagctccatgcccagagtcttaagcaagaggacctattcctttggggccccaaaatgctcctgaatgacctgtaaggactcgttaagaatagtaggatgaaggcttctttgcccaccctcccctccaaggccctgtttctgggctgcccgcccctaccttcttgaagtagctattatctgtcttatctactgaggcttttcactgcctgcccatccttgccccccatctcagctcactgcaacctccgcctcccaggttcaagcaattgtcctgcctcagcctcccaagtagctgggattacaggt

SEQ ID NO: 406940 - DNA, 1000 bp, Homo Sapiens; identical to SEQ ID NO: 294602

SEQ ID NO: 406941 - DNA, 1000 bp, Homo Sapiens; identical to SEQ ID NO: 224848

SEQ ID NO: 406942 - DNA, 627 bp, Homo Sapiens
gcctggttgcagccacttgtgcgatcccggaccttgccgcggccgcctggctcctttccgcgccatgagccgcaggttcacggtcacctcgctgccccccgcagggcccgccagaagccctgacccagagtcccgccggcattcggtcgcagacccccgccacctcccgggggaagacgtcaaagtctcccctcagggggcactcatcaggggtcctctccctggctctgaggccctcgggtctggaaggaacaaggcgaatcggcttgtagtggccccagcgaggggaggaggaggaggaggaggaggaggaggaggaagaggaggaggaggaagaggaggaggaagaggaggaggaggagaaggaggaggagaagcctccccagaccgccaggggtcgctgccgagccgcagcaaatccaactgatccccacgtcttggccattcacctctgaaacttatcctgaatctggcagcatcggtcccccctctgtcatcatcgccctgctccaagcctcacatggccacgaccacatcctctccactggcctccctgcctccagtccttccctagccctcctccacagaagccccccatcacttgcaaaataaaggccaaagccttaa

SEQ ID NO: 406943 - DNA, 1000 bp, Homo Sapiens; identical to SEQ ID NO: 119178

SEQ ID NO: 406944 - DNA, 1000 bp, Homo Sapiens; identical to SEQ ID NO: 224849

SEQ ID NO: 406945 - DNA, 1000 bp, Homo Sapiens; identical to SEQ ID NO: 294604

SEQ ID NO: 406946 - DNA, 1000 bp, Homo Sapiens; identical to SEQ ID NO: 294605

SEQ ID NO: 406947 - DNA, 1000 bp, Homo Sapiens
agagttgaagccagtgctgatcactttcctgacaacctggctggcagagatgggaccgtaattgcattcgacaacaaattctgcagtgttaaagtgaaggaaattggatataaaatacccaacaattgtgatgtgggctttcaggaagggttgcaaaagcctggcacactgggggtaaggaatgtcagtgctttttccgccaacgtggccgcgcgagtcagttgtaacccggcatccagaaccttctccgtaggggccttgcctgggactacaactcccaggatgccgcaggcggagaagctggccaatcagggggcgcggcttcgccttcaccgtcggctccctgctcctgtcagaacctcggtgacggttggccagtttttttacagtggctctgaaatgagagaaattgcagaaattctccctgctcaggaaaaggtagaggcaaggattgacttaaagatgggtaagaagcgtgttactgatcataagctaaatgtggacaaagtaattaaaaatattaacacaatttcttcggagttgaagaagataaaagatttgcatcacatgctgatgcttacagcagccacagctaaggggactgggactgccaagaccagtttggaccactcagaacttactacaggagctggggaaaggaacacctcaaacaaaatcaagctgtgactccaagaagaagagggcatggccgttcgttaggcaccaaataagctctcccagttattgctttgtgaccttatcctacattttaatcatcccatcaagactgagaacttagcagaagcagaaagaaacaaccccctctttgaagagtctaaaatatcagatgtatcccttgtttctaacagtttttctatctgatttcttatttgttatgagtttctgttttattgttgaactaacaaatatttgggagagttgagtttactaatttgtatatatataatttaaaacaaaataaaaataatgtaaacaagca

SEQ ID NO: 406948 - DNA, 580 bp, Homo Sapiens
aggtgggaaggtgatacaaacaggtggtccgctggtaatccccatcgagtgactggatgatctgcaaaagaggaaaacaacccggccagagagtcaggggacggccaccagatggccctgtggaccgccgcccgacccccgagcaagccgtgtgccccgagggcccgacccaagatcacacagctctctgccactcactctggaggagaccagaaacctcgaggtgctgtcttcactcggctcctctctcacacagccctgatggagaaggtgggtccctggcacgtgggccccaggagggagaagactccgctgtacaggaggttctggaaggaagccgtgcgcctggctcttacgtcccagctcttccctacatcttctttcacgctgcagcggaaaccagaatgcctactaattccttaagaaccaaaggttcaagtggtgctacctatgtatttgcttcttacgtcccctgaacgtcgctacgattccacacgacagccctcgagaattctttcaagttttccaaatgtcctctaccgtagaaacatctcaattaaaacaagagtttccaaactgt

SEQ ID NO: 406949 - DNA, 1000 bp, Homo Sapiens; identical to SEQ ID NO: 294607

SEQ ID NO: 406950 - DNA, 1000 bp, Homo Sapiens; identical to SEQ ID NO: 224852

SEQ ID NO: 406951 - DNA, 1000 bp, Homo Sapiens; identical to SEQ ID NO: 294611

SEQ ID NO: 406952 - DNA, 1000 bp, Homo Sapiens; identical to SEQ ID NO: 294612

SEQ ID NO: 406953 - DNA, 1000 bp, Homo Sapiens
taagctgaaaaccatcgagggcatcgtcatggctgctgacagcgcccgttccttctcaccccttgagaagtttggccagaatttcctagagaagctgattggcattgaggttccccacaaacttctggagagggtcacttttgtggatacaccaggcatcatcgagaaccgcaagcagcaagaaagaggctaccccttcaacgacgtgtgccagtggttcatcgacagagctgacctcatctttgtcgtctttgacccaacaaagctggatgtgggtctagagctggagatgctcttccgccagttgaaggggcgtgaatcccagataaggatcatcctgaacaaggctgacaatctggccacccaaatgctcatgcgggtttacggggccctcttctggagcttggcccctctcatcaatgtcacagagcccccaagggtttacgtcagctccttctggccacaagagtataagccggacacccatcaggaactgttcctccaagaagagatctccctcctagaagacctgaatcaggtgatcgagaacagactggagaacaagattgccttcatccgccagcacgccatccgggtccgcatccacgccctcctggttgaccgctacctgcagacttacaaggacaaaatgaccttcttcagtgatggagaactggtctttaaggacattgtggaagatcccgataaattctacatcttcaagaccatcctggcaaagaccaatgtcagcaaatttgaccttcccaaccgcgaggcctataaggacttcttcggcatcaatcccatttccagtttcaaactgctctcccagcagtgctcctacatgggaggttgctttctggagaagattgagcgggccatcactcaggagcttccgggcctcctgggtagcctcgggctcgggaagaatccaggtgctctcaactgtgacaaaacagggtgtagcgaaacaccaaaaaatcgctacaggaagcactag

SEQ ID NO: 406954 - DNA, 1000 bp, Homo Sapiens; identical to SEQ ID NO: 294614

SEQ ID NO: 406955 - DNA, 1000 bp, Homo Sapiens
tggaaagaaaccctacaaatgtgaagaatgtggcaaagcttttaacaattcctcaacccttatgaaacataagataattcatactgggaagaaaccatacaaatgtgaagaatgtggcaaagcttttaagcaatcttcacatcttactagacataaagcaattcatactggggagaaaccctacaaatgtgaagaatgtggcaaagcttttaaccacttctcagcccttagaaaacatcagataattcatactggaaagaaaccctacaaatgtgaagaatgtggcaaagcttttagccagtcctcaacccttagaaaacatgagataattcatactggagagaaaccctacaaatgtgaagaatgtggtaaagcttttaagtggtcctcacaccttactagacataaagtaattcatactgaagagaaaccctacaaatgtgaagaatgtggcaaggcttttaaccatttctcagcccttaggaaacataagataattcatactggaaagaaaccctacaaatgtgaagaatgtggcaaagcttttagccagtcctcaactcttagaaaacatgagataattcatactggagagaaaccctacaaatgtgaagaatgtggtaaagcttttaagtggtcctcaaaacttactgtacataaggtaattcatactgcagagaaaccctgcaaatgtgaagaatgtggcaaagcttttaagcatttctcagcccttagaaaacataagataattcatactggaaagaaaccctataaatgtgaagaatgtggcaaagcttttaacaattcctcaacccttagaaaacatgagataattcatactggagagaaatcctacaaatgtgaagaatgtggtaaagcttttcagtggtcctcaaaacttactttacataaggtaattcatatggagagaaaccctgcaaatgtgaagaatgtggcaaagcttttaaacatttctcagcccttagaaaacatgagataa

SEQ ID NO: 406956 - DNA, 474 bp, Homo Sapiens; identical to SEQ ID NO: 294615

SEQ ID NO: 406957 - DNA, 1000 bp, Homo Sapiens
gggccttgactcccagcctcgtcttctgcacctgtcccccactgcctctctgcaatcaaatggcactaaccaagaaagccaccatcaacacatttctccacaagtggaccccacacagtcgaggcaactggctttctccattagtaaactgaggatttgcttccaaggtggagagcacacttgggataattggagtagcttgacaaagagacgggggtgtgaactgggcacaaagatacttctgttcattttggagacaaaattcagatacattaaaaaactgaagcttgttcagagtaattcacgtccttggtggagttgtaaatacacttcaaaatgcctatgatccggtgacatgctgattacttttaaatgttgcacaaatggtcaatgcttatttatggtcagatgatgcaagcacatgctcttgtgcctggtgcgtttgctgtggagatctctgagactgtcggtttttctagttcttgcaaaggaacggtgttaaaagttaatagaactgtctctctgtaatgagtcattttttgagagggaaaaattcacttattttcctctgattcttcttgtcatattgtgctctgagcaatttcaattagagggttacattttagtaatctgtacagcttcaactgatgcctgctcgtcgtgacgggagccttttagatttccttcagaagcttcaaggatacaaaactaattggagttttgacgctgttttacatctcggtaattttattttcggggcttagtgttactttgctgtcaaattaaatcagcctctgtattgtgcacgtcagaactgcacagagaaaattccccagtattccaagccggtgcgcccctgtgcagaagaaaacagatctacgtcagccagcccggggggcaaagcctcagttccactgccttcctctccctctccttccacgggagaggagaaacttaaagaggtttacattgctgcatttcaataaaattttatacttgc

SEQ ID NO: 406958 - DNA, 1000 bp, Homo Sapiens
cctcagtctccactattcaaaacccagggagcttgaaagcaagtggtacatcctgaacctggtgaatgggtatgtccttaaactggtgaatgggtatgtccttaaactggtgaatggagacgtccttaaactggtgaatggtgacatccttaaactggtgaatgggtacgtccttaaactggtgaatgggtacgtccttaaactggtgaatgggtacgtccttaaactggtgaatggggacgtccttaaactggtgaatggggacgtccttaaactggtgaatggggacgtccttaaactggtgaatggggacgtccttaaactggtgaatggggacgtccttaaactggtgaatggggacgtccttaaactggtgaatggggacgtccttaaactggtgaatggggacgtccttaaactggtgaatggggacgtccttaaactggtgaatggggacgtccttaaactggtgaatggggccgtccttaaactggtgaatggggccgtccttaaactggtgaatggggacgtccttaaactggtgaatggggacgtccttaaactggtgaatggggacgtccttaaactggtgaatgggtacgtccttaaactggtgaatgggacgttagtttttatcatcttccttgcactcccccgacccttgcctctggaatcccaggcagatggtgcgttcaccgggacccactcttgcaagccctgccctgttccttttcattcctacttccttgtggggcagcggcttgggcaggaagtaccccagggtacagtgcagccagtgggggtcatcgttggtatcattgctttatgggtccaccccctgggggctcctagagggttagagcctgggccacatgtggagaggggaacaccctgttcccccaccctcaaggctctcggagtggccagagggcggacacacagaaaggagctccaccacactgtgaggagagaggtgtccaccaagccctgcagcagctaa

SEQ ID NO: 406959 - DNA, 1000 bp, Homo Sapiens
tctttggaccctggccttcagcctcttcaggccatggtgatcggggtccaccaggagaaagatctcggctgtcatccaagcctctgtgtagcactgctcctccaggcagcattgtccatgacacagaaacacctcaaaggactctctccaacaggccctatgatacagccactcagccagttcaccccacccacattccacaggctgctttaggctttaggacagtggcaaacatggcctctgccatcccggtctgtgagcgccccttcttacaccaagggttcaggcagctgtccaaacaccttatcttttcatctctgaccatttcttcagagtcgactatgagcagaaatcacccagacaccccacagatgcgtacccagtgcagcgagaatgtctgcgagggggactttagaaatttcccagggctacaaagccttcactgtatgagctgcaaatcaagccaaaatgttatcagagatgaagagatggggatagccatcaggcctggggatggacctccctggagctgggcattcaagaggatgagtgcagcagaacgcgtatccagggagcctttcggtgactgtttgggcaaagcctcccttgtggtaaaagatgcctcacttctggggagaggaggctcctcatcttgcagacaagaagcagcacccactggttcctgctccaaaagccattatgaacattataaactggccaggtgcggtggctcaaacctgtaatcccagcaccatttgggaggttgaggcagaaggattgcttgagcccaggagtttgagaacagcctgggcaacaaagtgagacccaatctctacaaaaactagagaaaaaatagctgggtgtggtggcactcacctgtactaaggaggctgggctgggaggatctcctgagcctagttggttgaggctgcagtgagccaagatcatgcctctgcacttgagcttgggtgacagagtaagaccctatctcaaaaaataa

SEQ ID NO: 406960 - DNA, 1000 bp, Homo Sapiens
gcggaccctggggccctcaggaaggagggagttggcagcgggggctgcagcaggagtaggagcagatgaggcgtcttgccaggaaccccaggaggagggggcccgggacctgtcccagagcaaggagactttgtcgggcctgaaggacgggcccccccggggggccacctgtccccttcatcccagccaggcccttgaagatggcccaacaggggtcccatcctcaggcctgtcccctgagctgagaggaccaacagagttcctgttctcctgtttgctgagtgacatgtatgtggagagcaccccggggtctgtggcgggccagcatattttgtacttaattttaggctcatctgagaacctgtcgattcactaccttgtaaggatccagcaccctctgtggcctttctggactcccgacgtccacctgttcctggcctgggatcacctcctcttgcatgagccaatccctaggacaaatatggttttgggctccacgtgcgtgtgtatatttttactcagcaccgagcaccgtgttgggggaagggggacttatgaacgctgcagccagtgggagagcagagaggagtccccacaggcccacgcagcagcggtgagccccgccggggagacgagactgggtgtgcgagttggggctgccaacagagccagtgtgcttgaggctggctgcgggccacaggtcgagctggccctggataccgagagcctcgcctctgggatgggccgcgggccacagacattggcgcctggtgactctctctggtggccagcgtcttcaggttctcgaatcccggtggtggaagtccctcgttctggctgtgacatggagtcgcctttagaccttcagggtgatgatgagccctcccttgcgtctcctctgggagactgtgggctcctggatagtgggggcattggcccctacctctctgtgtgcctggtggctggcacaggggctgactccaccctgagatgtctgtga

SEQ ID NO: 406961 - DNA, 1000 bp, Homo Sapiens
gatgcacaccctggtgtttcgcaggagccacaaatcagaaggtccagaggggccccaggggacggtcccccagggagacagcagaagctacagccaggaaggatgttcagatagggcccaggagatggccaccctggtgtttatcaggaggtgcaaaccagaaggtccaaagaggccccagtggactgtccccctgggggacagcagaagtcatatcaaggaagaaggcccagaggggccccagaggattgtcctccagggagacaacaggagctatagccaggaaggaagcccagagagggcccaggggatggccaccctggtgtttagcaggagctgcaaaccagaagaaggtccagagaggccccaggacactcccctgggggacagcagaagtcatatcaaggaagaaggcccagaggggccccagaggattgtcctccagggagacaacaggagctatagccaggaaggaagcccagagagggcccaggggatggccaccctggtgtttagcaggagctgcaaaccagaagaaggtccagagaggccccaggacactcccctgggggacagcagaagtcatatcaaggaagaaggcccagaggggccccagaggattgtcctccagggagacaacagaagctatagccaggaaggaagccgagagagggcccaggggatggccaccctggtgtttagcaggagctgcaaaccagaagaaggtccagagaggccccagggcactcccctgggggacagcaggagccatggtgtcagagaaagcccaaagaaatggcaacctcagaggcagaaggccaagaaaccaaaagtgaataaagtctcgggatcccagcagcaggagaagcctgcctcatttccagttccagtgaattggaaatgcccatggtgtaaagccattaatttttcatggcgtacggcctgctataaatgcaagaaagcctgtgtgccatttgagagtggaggacaaactcagtga

SEQ ID NO: 406962 - DNA, 1000 bp, Homo Sapiens; identical to SEQ ID NO: 224853

SEQ ID NO: 406963 - DNA, 1000 bp, Homo Sapiens; identical to SEQ ID NO: 294618

SEQ ID NO: 406964 - DNA, 666 bp, Homo Sapiens
atgtcctccggcgtgcgggactttgcctctttcgccggctgcggcggccgcggtctgagcgctccgagagcagcgaagcctcagtgccgggtgcgcgctccagcccggctgtgcgcgccgcggctcctggagggggcgggggcgcaggaccgctccgctgggagcgtgcctcggacccggggtcgcgcggggggcggaggggcgcggctgccgctctgggtccggatcccaggtaatagtgctgaagaggttgtttatgagtgcaccaaccagccacctctgtccctttcccggatgatcccgaaaatgaagcttcctggccaggaaaacaaaacggccgtggttgtgggaaccataacagatgacgtgtgggttcaggaggtgcccaaactgaaggtgtgtgcactgggcgtgaccagccgggcccgcagccacatcttcagggtggggggcaagaacctcactttcgaccagctggccctggactcccccaaggtctgcggcaccgtcctgctctcaggtcctcgcaagggtcgagaggtgtactggcatttcgacaaggccctgggaaccccacacagccacaccaaaccctacgtccgctccaagggccggaagttcgagtatgccagaggccaaggggccagccaaggctacaaaaactaa

SEQ ID NO: 406965 - DNA, 1000 bp, Homo Sapiens
tgacagctgctgcttccagcaccgcaggtgctatgaggaggccgctgagatggactgtctccaagaccccgccaaacttagcacagaggtcaattgtgtcagcaagaagatcatatgtgagtccaaggacaactgtgagcacctgctgtgtacctgtgataaggctgccatagagtgcttggctcgatccagcctcaactcttccctgaaccttctggacacctccttctgcctggctcagactccagtggttcctgtggagcccacagacaccagcctgacagccctttcaggagaaggatctgcagagatagttgcaacaagggttacagctaaaattgtaacccttgtccctgctggcattaaatctctggggctggcagtgtcatctgttgaaaatgatcctgaggagaccactgaaaaagcctgtgacagattcaccttcctgcacctgggaagtggggacaacatgcaggtgatgccacagcttggagagatgctcttttgtctgacatcccggtgcccggaggaatttgagtcttatggctgttactgtggacaagaaggaagaggcgagccaagggatgacctagacaggtgctgcttgtcccatcactgctgcctagagcaagtgagaaggctgggctgcctgcttgagaggcttccttggtcaccggtggtgtgtgtggatcatacgcccaagtgtgggggccaaagcctgtgtgagaagttgctctgtgcctgtgaccagacggcagctgagtgcatgacctctgcctcctttaaccaaagcctcaagtccccaagcagactcgggtgccctgggcagccagcagcctgtgaagacagcctgcaccctgtgcccgcagcccccaccctgggctccagctctgaggaggacagcgaggaggaccctccacaggaggacctcggcagagccaagaggtttctgcggaagtcactgggtcccttggggatcgggcctcttcatggaagatag

SEQ ID NO: 406966 - DNA, 1000 bp, Homo Sapiens
gggtctgtctgcggggcctgcagcgacaagacgggaagttcagggtgccgctcctcacccggacctcctcggccccgccccatccgccttcgggatgctgctgagccccgtcacctccacccccttctcggtcaaggacatcctgcgactggagcgcgagcggagctgccccgcggcttcgccacatccgcgggtgcggaagagcccggaaaactttcagtacctgagaatggacgcagagccgcgagggtcagaggttcacaacgctggtggcggcggcggtgacagaaagctggatggttcggagcctcctgggggtccctgtgaggcagtcttggagatggacgcggaacggatgggggagccacagcccggcctgaacgcggcctcgcccctcggcggcgggaccagggtgccagagcgcggcgttggcaacagcggcgacagcgtgcggggtggccgctcggagcagcccaaggcgcggcaacgacggaagccgcgcgtgctcttttcgcaggcgcaggtgctggccctggagcggcgcttcaagcagcagcggtacctgtcagcgcccgagcgcgagcacctggccagcgcgctgcagctcacgtccacgcaggtcaagatctggttccagaaccgacgctacaaatgcaagagacagcgccaggacaagtcgctggaactggctggccaccctctaacgccgcgccgagtagctgtgcccgtcctggtgcgcgatggcaagccctgcctgggccccgggcccggcgcacctgccttccccagcccctacagtgcagcagtgtcgccctactcttgctacggaggctacagcggagcaccctacggcgcaggctacggcacctgctacgcgggcgcgccctcgggtcctgcgccacacacaccactggccagcgcgggcttcggacacggtggccagaatgccaccccgcagggccatctggcagccacgctgcagggtgtcagggcctggtga

SEQ ID NO: 406967 - DNA, 1000 bp, Homo Sapiens; identical to SEQ ID NO: 294619

SEQ ID NO: 406968 - DNA, 993 bp, Homo Sapiens
atgtcgaagctccttaactgtttagaacaaaagtccctgctcaacaagttgcagaatgaaaaccagacaagtaatggaggtgggagtttaagtgactattcctcctccattccatcgactcccagcatcagccaggaggaacttcggatcgatgttcctcccacttccaacacacccacgcccgttcgcaagcagtccaagcgctggtccaacctgtttacctctcagaaagggagcaacccagacaaagagaagaagggcctggagaatcgtgcagacagcatcaggaggggcagagccatccccattaaacagggcatgctattcaagctaagtggcaaagggctgaagaaatggaaaaagaaatatgtcaccccatgtgacaacggcgtgctgacctaccatccaaatttacatgattacatgaagaatattcatggtaaagagattgaccttgggagaaccactgtgaaagtcccagggaagaggccactgctagccacatctgcctgtgcgcgcatctccagctctaaaaccaatggcctaaccaaggacatgagcagtttacacatctcacccaattcagacacagggctggatgactccctatgctccagccccagtatctccagcaccaccagccccaagctccacacgccccactctcctcaggccaacagaaagaagcaccaaaggaagaaaagcacaaacaacttaaaagaccatggcctgtccggcactgctgaaggacaagaagaaaactttatcattgtgcccctcactggccaaatgtggcactttgaagccacgatgtatgaggagcgggatgcctgggttcaagccatggagagccagatcctggccagcctgcagtcatgcgagagcagcaagagcaagtccgggctgaggagccaaagcgaggccatggccctgcagttgatcggaaacatgcgggaactccaactgtgtggactgcgagacccagaatcctaa

SEQ ID NO: 406969 - DNA, 1000 bp, Homo Sapiens; identical to SEQ ID NO: 294621

SEQ ID NO: 406970 - DNA, 1000 bp, Homo Sapiens; identical to SEQ ID NO: 119180

SEQ ID NO: 406971 - DNA, 1000 bp, Homo Sapiens; identical to SEQ ID NO: 119181

SEQ ID NO: 406972 - DNA, 655 bp, Homo Sapiens
cgccgagcctcggagagcaggggctttgcttttccggctgaggtgttcaataaacatctcttaaacaaaggagtgcgcaagtgagataatataagggggatgcccaactatacaacaaagagttgccaaacatttctctggagcaaataaatggtgtgatggatggaactaactggatcaccaacctgtgagagatggctggttcactggccttggcctcctcgggccatgacattaattcactggctccaccctccaccctgttctatggccctgggcgtgacttgctcttgccccttgccttctgtttggatcctgccaatgaggactcctagcaggagatgggggctctcatatttaactgaaaggctcagctccacgcagcgtttctgtctccagcccacacagcacgatgagataaagactagaggctgctcactgctgagagtggaccatccagctcatttggtcacataatttccagccagccaccttatgggcaagattttggctcacctgtaagctattagctggaaaatactggcttcatgaaatggcttggaagatttggaggcaacctaaatgtccatcaacagatgaatggataaagaacaacagggtgactaaagtcaataataatttaattatacattta

SEQ ID NO: 406973 - DNA, 1000 bp, Homo Sapiens
tcctgccttcaaggatgctgttcctgaatactccttgtggtttgaaccttttgtcatgcaatggctagatgaaaacgaagatgtgtcaatggaattccttcatggagcactgggaagagacaaaaaagatggattccagcagacatctgagcatgctctcttttcttgctccgtggttgatgtctttgctcagctgaatcagagctttgaaattattaagaaactggaatgccctaatcctgaagcattatctcacttaatgagaagatttgcaaagactatcaataaagtgctgctccagtatgctgcaattgtatcaagtgatttcagttcacattgtgataaggaaaatgtgctagattctgaagctagtactattctaaaagaacttcaggttaagctcagtggggtcctggatgagctcagcgtcacttatggtgaaagtttccaggttataattgaagagtgtataaaacagatgagtttcgaactaaatcaaatgagagcaaatggaaacaccacatctaataagaacagtgcagcaatggatgcagagattgtgttaagatctcttatggattttttggacaaaacattaagtctctcagcaaaaatctgtgagaaaacagtcctaaagcgagttttaaaagagttatggaagctagttctcaacaaaatagaaaaacaaattgttcttcctcctctgacagatcaaacaggaccccagatgattttcattgcagctaaagatcttggacaattatccaaactgaaggagcacatgattcgagaggatgccaggggtctgacgccaagacaatgcgctataatggaggtagtcctggctaccatcaagggaaaagcttcccagagaaggacatttggggatgtagaggataaagagggaaaaaacaatgggagaaagacattgcaggcctatagaaaacacagcatgagtgaccgaagagaaggcattggccggcatgaaaactttaaatag

SEQ ID NO: 406974 - DNA, 1000 bp, Homo Sapiens
gcctccctccttggcgccggccggccagagcctgaccaagatcgagacgctgcgcctggccatccgctacatcggccacctatcggccgtgctgggtctcagcgaggagagtctgcagtgccggcgcaggcagcgcggggacgcggggtccccttggggctgcccgctgtgccccgacccccaagccgcacccgagcgcctggggaggggggtccacgacacggatccctgggcaacacccccttactgccccaagatacagtcgcccccgtattcgtcccaagggacaacctccgacgcgtctctttggacgccaccccaaggctgtccctggacgcagtcgtccccagagccccggaacccaccagtgccctggacggcggccccagcaactttggagctggccgcagtgtaccagggtctctctgtgtctccagagccctgtctgtcgctgggagctccatctctcctgccccacccatcatgccagagactgcagcctcagacccccgggaggtgctggagccacagtgcagaggtggtgcccaactcagaggaccagggaccgggcgccgccttccagctcagtgaagcaagccctccccagagctcaggcctgcggttcagtggctgccctgaactttggcaagaagatctggagggggcccgcctgggcatcttctactaaatggcctcggcttccctctttccatccaggaatcagtcctgtagcttgggtgcctccttatttgttaattagtggcttttcatgttctcctttagccaaggctccctttttccaagtgatgtctttcagggaagcagtgtttgaaatagatagcgggtaccttccctggatggagtcagggcgggggcactgtcctccactgctagacacccccagaatgcctggcgctctgcagagcacagtctgagctgctctaagaaggggtctcctttaccctaaaggcagctgggcagggacaggtgggagaatggg

SEQ ID NO: 406975 - DNA, 1000 bp, Homo Sapiens
ggacatggtcaattgcaaacagtgggaattccagccactgacagccacacggagcagccccttggaggaggccaccctgcagctccccttgggaagcgaggctgcttcccagcccagcacctcagctgcctggaaagcccattccacagcctcagagaaggatccaggaccacaggcaggggctggagctggagcgaaagacaaggggccagagccaaccttcaagccatacttacccccaaaaagagctggcaccctgaaggactggagcaagcagaggaccaaggagagagaaagccctgcccctgagcagcctctgcccgaggccagtgaggtggacagcctaggggttatcctcaaagtgactcacccccccgtggtgggcagcgatggcttctgcatgttctttgaggacagcatcatctataccacggagatggacaacctcaggcacacaacacccacagccagtccccagccccaagaagtgactttcctgagtttctctctgtcctgggaagagatgttttatgcacagaaatgtcactgcttcctggctgacatcatcatggattccatcaggcaaaaggaccccaaagccatcacagccaaggtggtctccctggccaatcggctgtggaccctgcacatcagccccaagcagtttgtggtagatttgctggccatcaccggcttcaaggatgaccggcacacccaggagcgcctgtacagctgggtggagcttacactgcccttcgccaggaaatatggccgatgcatggacctgctcatccagaggggcctgtctaggtctgtctcttactccatcctgggaaagtacctacaagaggactagggtgcccagagatgcagcccctcatgccccacccgccaagtctcattttaattggagatagcccagaatgcatgtgcccatcagagggtacatatcagtctattttttattataaacaaataaaagattaaatcacacatcaaa

SEQ ID NO: 406976 - DNA, 1000 bp, Homo Sapiens; identical to SEQ ID NO: 294625

SEQ ID NO: 406977 - DNA, 1000 bp, Homo Sapiens; identical to SEQ ID NO: 294627

SEQ ID NO: 406978 - DNA, 1000 bp, Homo Sapiens; identical to SEQ ID NO: 224856

SEQ ID NO: 406979 - DNA, 1000 bp, Homo Sapiens
cccctgctgctcccaggcaggccactcccagccgggggcagttaggaggcctcccaggggacgcggaggctgggaagtcaggcacaggccaggctggggccgaggcctgcatcgacggggccttgggagagctgagcagccagagaggggccgggcggggggccctggggctggccccaggaccccaccaatgacactgccatcaccaccaacactgcctgcccaggatgggaagaaagaagctcgaggtccagagccacccctggaaacaccactggctgctgaggactgggagacagagtactaggaccttggagggtcaggcacctgagattgcagtcacccaggagggttttcctggggcccagagtgatctcagccctgtcagaagaaccccaagaaacatcttccatcctcccctctccccaaaaccacaatcccaggagtagctcctgtgaggcacttggtgaacctgacctaagtcacctgaatcccaagtgagaagaaaatcctaaacctcgtacccaaacctgtctccttgatggcctcaaccccattcccaatgccatccccaaccacaaccacaatccttacctcattctcaacccccagggctcctccaaccccattccctatcctctccctaatcccaaagccactcctacctgcctctctcttccccactctcaataccctgttcccaaacccattcattcccatccctgtcaccagtcccagctccacttctgcgcctcaaccctaacccaccctctttaccaacccctttctcctcattgcctgtgtacctcagcccatctttaatgtcctctgaatctacagccccaaagagctccatcctcaacctcagccacagccctgtgtccatccccacaaagaaccgcattggccccacatacccagacacctgtgactccccaccccactgcctgctcttcaggtagaaagccctggttgaacaataaacgcatgactctccctg

SEQ ID NO: 406980 - DNA, 605 bp, Homo Sapiens; identical to SEQ ID NO: 294629

SEQ ID NO: 406981 - DNA, 556 bp, Homo Sapiens
tgttgatggggccccgccaaagctgacatagacaggtccagcctccaggtgcccccacaccgttttcttgcattatgaagctgagcggcttctttctactctctgtgaacatcctcctttgcctctgaatgacccagcctggagtcttgaggagtgcagctgcacggaaaccgggatattgcccagagtttgatcttgactgccctttcactctcttacctatgcgctggcgtgataagagttgcagggggtcaagaagtgttgctactacaactgtcggcatcagtgtatggagccctggtggactttggattgagagaggagctaccctctctgcaagagcttcgaagagagaagctaccctttctgcgagagcttcaaagaccagcagacatccgaacaccctgcctgcagagaggagccaccctctccagggccccctctctgttgagagctgaatactcaagggatgatctgcctacagagagtaacaacccactacaggtctcctctgagctcttctaacactaaataaagctcttcttcatcgtcttca

SEQ ID NO: 406982 - DNA, 1000 bp, Homo Sapiens; identical to SEQ ID NO: 294632

SEQ ID NO: 406983 - DNA, 767 bp, Homo Sapiens; identical to SEQ ID NO: 56644

SEQ ID NO: 406984 - DNA, 1000 bp, Homo Sapiens; identical to SEQ ID NO: 294633

SEQ ID NO: 406985 - DNA, 1000 bp, Homo Sapiens; identical to SEQ ID NO: 119184

SEQ ID NO: 406986 - DNA, 1000 bp, Homo Sapiens; identical to SEQ ID NO: 294635

SEQ ID NO: 406987 - DNA, 393 bp, Homo Sapiens; identical to SEQ ID NO: 294636

SEQ ID NO: 406988 - DNA, 1000 bp, Homo Sapiens; identical to SEQ ID NO: 224859

SEQ ID NO: 406989 - DNA, 1000 bp, Homo Sapiens; identical to SEQ ID NO: 119185

SEQ ID NO: 406990 - DNA, 1000 bp, Homo Sapiens; identical to SEQ ID NO: 224860

SEQ ID NO: 406991 - DNA, 1000 bp, Homo Sapiens; identical to SEQ ID NO: 224861

SEQ ID NO: 406992 - DNA, 746 bp, Homo Sapiens
atgaacttccacaaggagaaacatgagttttcaacttcctttaaacatcttgtttgcagactgcatgacaagcatttagaggccgtgagtgtgctttcaaccagacagaaatgccttgcttcaagggaaaaccgtgtgtgctatctagtgcacctaccaaaagtccatgggagcgagagtctagaaagaaagaaaaagggcgtctctctctttccgccgctcaagatgccgaaaggaaagaaggccaaggggaagaaggtggctccggcccctgcggtcatgaagaagcaggaggccaagaaagtggtgaatcccctgtttgagaaaaggcctaagaattttggcattggacaggacatccaacccaaaagagacctcgcccaccttgtgaaacggccctgctatatcaggttgcagcggcagagagccatcctctgtaagcggctgaaagtgcctcctgcgattgaccagttcgcccaggccctggactgccaaacagctactcagctgcttaagctggcccacaagtacagacaagagaccacctgtccttccagccggagttaacaccgtcaccaccttggtggagaacatgaaagctcagctggtggtgattgcacacgacgtggatcccatcgagctggttacctttctgcctgccctgtgtcgtaaaatgggggtcccttactgcattatcaaggggaaggcaagactgggatgtctagtctacaggaagacctgcacca

SEQ ID NO: 406993 - DNA, 761 bp, Homo Sapiens; identical to SEQ ID NO: 119186

SEQ ID NO: 406994 - DNA, 1000 bp, Homo Sapiens; identical to SEQ ID NO: 224862

SEQ ID NO: 406995 - DNA, 1000 bp, Homo Sapiens; identical to SEQ ID NO: 294641

SEQ ID NO: 406996 - DNA, 1000 bp, Homo Sapiens; identical to SEQ ID NO: 224863

SEQ ID NO: 406997 - DNA, 1000 bp, Homo Sapiens; identical to SEQ ID NO: 294642

SEQ ID NO: 406998 - DNA, 1000 bp, Homo Sapiens; identical to SEQ ID NO: 224864

SEQ ID NO: 406999 - DNA, 852 bp, Homo Sapiens; identical to SEQ ID NO: 294644

SEQ ID NO: 407000 - DNA, 1000 bp, Homo Sapiens; identical to SEQ ID NO: 294646

SEQ ID NO: 407001 - DNA, 1000 bp, Homo Sapiens
ccctgagggcctgcgtgcggaggcactgtggggtgtgaacacagcacgccaggagcagaagctgctgagttggctgcaggaacgggcagctccaggtgcctgctacctcaagtgcctgcagttgcttaaggctctgcgcgatctgggggcccgtgggctggactcagcggccgccacccagtggggacgcatcctatcctcatatgtgctcaagacagtgctgctggcagtgctgctgcgcaagggggcccctgggcaaggctgggacgaggagcacctgggaaggtgtttggaggagttggtgcagttccttagggactgcctgctgcgacgccatacgctcttccactgcgtcctgggccctggtggggcggctgccgaggtgggtcccctgcccaaggcactgagggaagccgccccagttgacctcctggccgctttcgacgggcacgcccgggaacttgcagcagcgcggttgctgtccacgtggcaaaggctgccccagcttctccgggcctacgggggtccccgctaccttgccaggtgccccccaccccggagtcagcgcacccagggcttccttgaaggtgaaccgtaaaccctgacagcacccccacctgaccaaatgctcctaaagcctttcccactgggtgggggtgggaatggcggtgaagccagttaaatgcaagattgcagaaggcattggaaaatttggtggctgccacaagctttagtggcttaaatatcaccttctcgcttcacagtccagtataatatgacatcttcacacccactagagtgtcctgggcaaaccatgggaagacatccaacaggagacccaagaattggttcaaatattgttctgtgtagacggattctgtagaaggatgtggcttttagagaagtccagtagaagaagcaagaactagctgcagggaaagttccttctgtcggtttttagacacagatctctctgcccaaattaaaaaaaaacaaaaca

SEQ ID NO: 407002 - DNA, 1000 bp, Homo Sapiens
gactgctgtcttcacctggaataggaagaaatcattagagatgcagctgcttacatgcaagagcatgtgcacgaagcctggatacacagatgcatgtgtgcgagagaaggtggccttcccagtgtggggcccacaagaggccctcacttatgtgctgacgggaaaactcagccaacgtgaagggcagcggatgcaggatggggcatctcggggctgctttcggaaagatatggtgctcaacgagagtcactcagagggcagcagagtgatcgccaacaacactgagagcatcccaatgccctacgatcatgtgaaacttacgttcagtgacatgaataatgtgccagaggcctccaaagggaccaagaaaggcaccatctaccttacccctttcatctttctgtccagggcgaaggatgccacgcagtccttcgtaatgtcattttatctcttgaaggcctatgagatcaagcagcctgtgtttgacacaaactgcatcaagggaacagtgaacaccgaagcaggcggtggctgggaaggctctgcttccggcaagtccgccttcacggcagggggcgccactgaatctggacagcaggtgctccaggtgacatctcaagcgtccaggggtgaagccctcagtggagcctacggccactctcacgtgcctggcaggacatgtgtctttcccccgccagtcactagtggaatgtatccctgccctcctggctgcccttctccaccaccttcccctgagttctatccaggacctcccaagatggacagggccatggggtatgtgcaacccccgccactgccctgtcctgggcccatggaacctccggtcagcccagatgttccctgcactcctgcagccgaagccagggccacaaaagcagctgccagcacctattataacccaggcaaaccacaccacgtctccatgcccacgaagcagcctccgccatcttacccgagggaagataagaagacccagtag

SEQ ID NO: 407003 - DNA, 1000 bp, Homo Sapiens; identical to SEQ ID NO: 294647

SEQ ID NO: 407004 - DNA, 294 bp, Homo Sapiens
atggcatcttctgcagagctggacttcaacctgcaggctcttctggagcagctcagccaggatgagttgagcaagttcaagtctctgatcagaacaatctccctgggaaaggagctacagaccgtcccccagacagaggtagacaaggctaatgggaagcaactggtagaaatcttcaccagccactcctgcagctactgggcagggatggcagccatccaggtctttgaaaagatgaatcaaacgcatctgtctgggagagctgatgaacactgtgtgatgcccccaccttaa

SEQ ID NO: 407005 - DNA, 1000 bp, Homo Sapiens; identical to SEQ ID NO: 224866

SEQ ID NO: 407006 - DNA, 1000 bp, Homo Sapiens; identical to SEQ ID NO: 294649

SEQ ID NO: 407007 - DNA, 1000 bp, Homo Sapiens; identical to SEQ ID NO: 119187

SEQ ID NO: 407008 - DNA, 1000 bp, Homo Sapiens; identical to SEQ ID NO: 294650

SEQ ID NO: 407009 - DNA, 1000 bp, Homo Sapiens
atgcccagttaagaaatataaatttctctttgtctgaagcccttcatgcacagtcattgacaaatatgatcctggatgatgaaggtgttttgggcagcattgagaattcttttcagaagtttcatgctttcttggatctccttaaagatgctgggcttgggcagcttgccacaatggctgggatagatcagtcagattttcaattactaggtcatccccagatgacttctactgttagtaatccacctaaagaagaaaagaaggcgcttgaagatgaaaaaccagaaccgaagcagaatgccctagggcaaatgcaaaatatccaggtttctatttgtatgcagtcagcttacaatgaaggaacactaatgaagtttcagaaaattacaggtgatgctagaattcctttgcctctcgactcctttcctgtcccagtttctactccagagggcttaggaacttccagcaacaacctaggagtcccagctactgagcagcggcaggagtcttttgaaggattcattgctagaatgtgttctccttcaccagatgcgacttctggaactggaagtcaaagaaaagaagaggagttgtccagaaatagcagatcttcttcagagaaaaagaccaaaacaggtgaatataccaaaaaacactctgataagcaacaccctggaaaggacctgcattcctgatctgactgtcctgaaaaccagaaaagcaaagaaactagggaaactagttctttggttaatgaaccaattaaaagtaggtctttgaaaaaatacgtttctgtcaagaaagaaaatagaatagtgactgtttcatccaagacaaataaaagtaaatccagtccactagaacattctgaaagtgatactcttggatgtgattttgaatttcaagaaagcatccattctctatcacacctttcatatgactaaatcttttgaaactatgtttttacctttaaattttaataaattttcttatgttttta

SEQ ID NO: 407010 - DNA, 1000 bp, Homo Sapiens
cgcagagtgtgtgtgccttctacacgcacgtgcagactgtgcggggtgtggctgtggcctgggagacggaggccggcttcgagccggtcaccaggaagccccgcatccatgaagcccagttcatcaagaggcagaggtggaacggctcctccttcgaaatggcttccaacaccgatatgcgctgggacctggaagcctgcaagagcaactgcagccccgagcccgaggacatagacctgctggagtgctgcctgcaggagctgcgggagccgccggactggctggtcaccaccaactacggggtgcgctgcgtggcctgctgcagggtcttgccctccctggacgctctgctggagcacgcccagcatggcatccgggagggcttcagctgtcagatcttttttgaggagatgctggagagaaggcgggctcagggccaagcacatgaccaacagctggaggaggagcagagtccttcagacaacagcgaatgttcccggccccagggtgaggtgctctcagcacagcagcaggagaagcagtgagccagaggggagatacccaaccctgccctcacctccagggcctgggactgctccttccccagccagcagtatcagagccactagggcagggagagaggaccagggtcagggggaaggaaaggcatggagtgtagagcaaggagggccaggagactggaaggaacccccttcctgccctaggcacagcatctccaccagagtccatttcaaaacccaaacgagagggctttgagtgtttctgatggcaggcacaacatctgaaacccacaaacgcatggccagagggatttctatttttgccggtggatcaggcaggtccacacttgctaagtatatgtgggtcacaggacagccaactgcaaattactctccagccctatttttttcactattacaaatctgtcatatgccctagttctatgtcttatgttattgggattaaacttgaataacac

SEQ ID NO: 407011 - DNA, 794 bp, Homo Sapiens
ggctctgtgagacaggccctccactctcctgtagatcctgttgtaagtgatgcagaagccagagagaaggttgctctccatcggaaacatgaggagtttcggagacctccctaaaatatttggcctgaaagggtttgaagccaggaggagagatgcagtcttaggagaaacgtttcatgagctgtagcaggtaccctatcagtctttctcagaataaagaagcctatattcataagaatgctgattcttaaagggctagaaaggccagttgaagaaggccagtctgtagagatgcctgggaattctttgatctttttggaggctaaaggaagtaaaattctgctatggaaattgtcctattatatttctgctttcaagaagtggctacaagattatgaggttttgcaatgttgccctcctagtcctgtgtacattgctgtaaagactcccaggcatggaggccatcactggcactgttcctctcagcagttatttgggtgtgaagttcctcactcctgcaagactcagcctgaaggagcatgtctacatgacccacctgcacaatctccccacttgtcagtaacagctgtgaaatctgcccctgttgtctttagaaactgaaagatggaaaagatctcagatgctgtgacccccatgtaacagatggaggaattgaatccaagagatgaagtgaccactttgcctaaaatcaaatagccatgtagcagccgagctaaaacaaacattcagtcctcctgaatcctaactcagtgattttctcttaatatcatata

SEQ ID NO: 407012 - DNA, 538 bp, Homo Sapiens
ttgaaggttatagtaaatggaaagatgaatctggaaagctaagagaattagaggtcatggctggatgtaaaatcaccatggaaacagctttcatggccaatttgtggggatatgtcaaaaggcagtaacctgtgacttatttttttccaaagccctttctatgaaggttacaggctctatatctgctttcatgatgacatttgtctatgtttttgtaggattctattctgacaagcacaaaaccctgcaccaagttgaacctgtcctttgtgatgaggctgttgaacagaagagcagcgtagcagtctgtctattcttgctccacattcagctaaatgccaactccgatccctttgagatggtgaacaggctgaacccagggatcgtgtcatccctcagtatccagacttcttcagagaaccatgtggtgaaacttcttgattaaggtcgcaaaagaagagacaactatacattttgtgatgctgaagggaaatgtacaagagcactactgaagaagtccagccaaaaaaaaaaaaaa

SEQ ID NO: 407013 - DNA, 1000 bp, Homo Sapiens; identical to SEQ ID NO: 294651

SEQ ID NO: 407014 - DNA, 555 bp, Homo Sapiens; identical to SEQ ID NO: 224868

SEQ ID NO: 407015 - DNA, 1000 bp, Homo Sapiens
ccgcagtcagtgcggcgccagctctgcagagcccagacagggtccggttggggaggtcctcaggttctgaatcttgtgcctggagaaccagagaggaccctggagcaggaggagaaagagaagcttgtctcagaagctccacctcctcctggggcaatgcagagtctcaggcctgagcagacacgggggctgctggagcctgagaggaccaagactctgctgcctcgggagagccgggcctgggagaagcctcctcatcccgcctgcaccaaagactgggaggctgtggaggttggggcctccagccatgacagtgatgagaaagacctgtcttctcaagagactgggctttcccaggagtggagctcggtggaggaagatgacgaatcagagggctcccagggctttgtggagtggtcaaaagctccacaacaaacaaccatagtcttggtagtgtgcgtgctttttttgttcctggttttaacggggatgcctatgatgtttcacatttaactataatggtggctgttgttttaaaagtttaatttaatgaaatagatgccctatgtcatgttaaggaattgtgctagttaaaaatcaggaataggtgttgaatattttcaaatgcctttcaaacatcctttgagatgatttttaaaaaatttttggtgtgagttttcacatactttatttccatgaaatgaagacatcattgattgtaaaacattattttgtataccacggagaaagaaaagtgctaattaatcattaagatgccaccaactggaagatatctcctgactttgagaagatgaaaaaatgtgcaactgaagatcaatgaaatctggtacatttcctaacatcaaaccaactttgcattcttaaggttttggtgcaccagtcttttcatacactagattatatttattgatattttatgtaggattcttgcctctatcttcacatgtgagattggtgctatctttgtgaagttttggta

SEQ ID NO: 407016 - DNA, 1000 bp, Homo Sapiens; identical to SEQ ID NO: 294655

SEQ ID NO: 407017 - DNA, 1000 bp, Homo Sapiens
gttggcgagagtgatcagtgctgccctggcccaggacctccctgaggagcgtggtgtcaaggtcatcgcagagcctggctgcttctatgtggagtctgtctgcatggccgctgtcaacatcattgccaagagggctgtgctggagcccggaggcagccggaagctggtgtattatctcaaagatggccactatggctccttccgcctctgctaccgagagcctgtcccaagggttcccatcgtggtgaaggtaagggggccactccagccccgagtctagtcccttaccttgaggtgccttgtgcctcccctactgggaacagtggctgtgctggaccccagaggcaggtcctggcctgctgcttagaacacatgtggacacgtacatgatgtgtgctcacagatcagagcgtgtgcagcagctggatatgtaggcctcctcaggcaaaggggcgatcaccagaacacaaaggcgtgggttgttttccaaaatattgaagttcttctccctggtggcttaagagccattccttcttcctggtggttaaagagctattcccccgagtccaccaggggcctccctgccgacactcttgctgctcagtccctcccacgatctggcaacaaagcttcaatacctgaccctgtagggccaacaggatcttcctccagctctgcagcagttgtctcctaatgtgatgggttggtgtccgggccacactgctttgtaaatatcttgactgtttctcccggccagtgaacgtcttggtgtgtgcacacatttggtcatgtatgtgacgtgtgtttgcatgcatgtgcgagtgtgtacgtgtgtgaagtgtttctgggtgtgtgtcttcgtgtgtgtatttgcctctcttctcatcggaaggagtgagttctggatgtggaggaaccagtaggagaccctgtgtttgtttggttcccacaatagttttcaattttagttgcccatattaaaaaatctagacatatttca

SEQ ID NO: 407018 - DNA, 1000 bp, Homo Sapiens; identical to SEQ ID NO: 224869

SEQ ID NO: 407019 - DNA, 566 bp, Homo Sapiens; identical to SEQ ID NO: 119190

SEQ ID NO: 407020 - DNA, 1000 bp, Homo Sapiens; identical to SEQ ID NO: 294656

SEQ ID NO: 407021 - DNA, 1000 bp, Homo Sapiens
taactactttcttcagcatttgactcttggtccttgtgttgtgagctccttgttcctgcaaagctggctggggtcaccatagtgggtcaaaaaaaaattcatcaatgaaaaagatagggaatctccaatctctatcccaagacatgttctcgatgacttgagcacatcacacatcagcagatgctcaggatacagaagagagatttcatctacgggaaaaagaccctctgaaaagaagtgtgaaatcatcaaaagagccattggaggggacaccagagagtcgtgtggctgaggtttcacatgatcccgccatgcttccagtccagaggagaaagctagacccactcctcaaaaagtataggcatcataagaaggccacaaggacaaaaagaaggaggaaggagaaaatggaggcccagtgctcccctgttcctccaacaccttcaacaccaccacaaagtgaagaagatgaggctgtagacaaaaagccaactctactcagtgcccaggaagatactcctgaccttctccatgaggacagattacagtatctgcaggaagagggttccggtgtgatgcatcaggaatgtcagatccagtcctgtgagctctcggtggctcagaagcccaggccctcttctcctgcagtgacatccttggcatcaccaccactctgctttggcagtttcctaagctgtgtctgccagaccttctcaaggtctaggaagcagaagcctcccagaagaaagggtaacaaccaggctgaggcaggaggtgatgctgaggtcctgagacctggcccggcaaaaccagagttgagcctcagcaaaacgtgtagccacttgaaatcgatagagctttcctttgtgtttagttttatagttctctctgtatgtcattgttcctcttagttgagtttttgcctgtcaaagagatagagagctgcttttatgctgagatcctcaagccaaaacccacagtaaacgcaaagtaaaacttt

SEQ ID NO: 407022 - DNA, 580 bp, Homo Sapiens
aaaggactgtggaacatctcagagcctctcagtaggagcagaaaagttactggggagtacagatgcatgtatgtgatctgcagaagctggtcaggatccaacttgcatttactacatttccatggatgttcagttgccatcttctgcctactcctgagctttcatccaagagaaatcagtgtttgctttacaagacttccggttgtctaacccaaatgccaattttatatgggcaccctgccactcttctaaaagactacattttgcaggcaattttgcaaccaggaaagaagattcaaggaggaactgaaatacagagaggctcctttgcaaaccagtatcaaacagatgccagtcacttgtaacatctgccctaccattggaataacataatgagaggcctgggcaacccagagagaagtgtaaatgacatcagttactaataagaacactgctgaattttgaaaaacttttgcatgctttaatttctccatattttaagtaattatactaattatgagagtgctgtgtattattagttgtttggtcacaaataaaaacaaaattcatttcaaatata

SEQ ID NO: 407023 - DNA, 859 bp, Homo Sapiens; identical to SEQ ID NO: 294657

SEQ ID NO: 407024 - DNA, 1000 bp, Homo Sapiens
tcagcctgaaatggctgaagagttctggtatttactgaagttaactattgaattaccaaaaccaaccacaatgccagaaatacagtgcgaccttggcaatattgcaaataaaatatatgcagttaggacacataagttacgaatacttatcttcaaacagtttacagaatggaaattctacttatctggagtaggactatttccccagcctctagacacggaaagaataaccacacgcattggtcttcagtcaactattgttatacctttcaaaaatcccacaatggaagatgtcctcattgatataatactgacaagtgtggaacatcccaggaatcttgtcatggatcattgctgggatagcttcatctatgagagttctgccttcagatttagttctccgagtgaaatacaaggaattgcactgcctcctaaaggaaatatagatatctcattgttatttatacctcaaattatgaaattacacaaaacaatggttattattgagatgacgaaagcaaatggaaaatattggcctattgacaattttgatgagttggatataaaatttaaaagtattgtgggaatcgacagcgaagaaatccaagcaatacactggatataccctattgttggactcccacaagcaccacctcctaaatctcccccagttgtcatacaatgtcagtccaggaagcgggcagaagagaaggtagaaatcatactgaatgctggttttttcggatttagtcttactccagatctgacagaagttttagtgattccaaaaagaaattcacataatttttgtgaggatcccaatgaaattcctaaaatacatgaattcgagtatgaaattcaatttgaatctgaagctatgaagtctaagttggaatcctgtgtagctttatatatgattgaaaaatcttatgatattatggctaaaaggataacatttatcttcaatctggtattcacaccaaagaaaccattaaggtaa

SEQ ID NO: 407025 - DNA, 1000 bp, Homo Sapiens; identical to SEQ ID NO: 294659

SEQ ID NO: 407026 - DNA, 1000 bp, Homo Sapiens
cggtaccccatggaactcaagagcaggatatagaagctgcaagcagtcagaggcttcgggtattataccggattgagaagatgttccttcagttactagaaatagaggaaggctggaagtataggcctccaccgccctgcttttctgagcagcaaagcaaccaggttgagaagctcttccagaccttaaagacccaggagcagaacaacctggaagaggcagcagatggcttcctgcaggtgctctctgtgaggaaggggaaggccctggtggcccggctgctccccttcctgccccaggatcaggctgttaccattcttttggctatcacccaccatctgcccctcctggtccggagggatgtggctgatcaggccctacaaatgttattcaaacctctgggcaaatgtattagtcacttgaccctccacgaactcctccaaggacttcagggattaacgctgttgccacctggctcctcagagcggccagtcaccgtggtgcttcagaatcagtttggaatatctttgctctatgccctgctgagccatggggagcaactggtatcgctgcattcttccctagaggaacccaacagtgaccatacagcttggacagacatggtggttctgattgcctgggagatagcccaaatgcctacagcctctctggcagaacccctagctttccccagcaacctacttcccctgttctgtcaccacgtggacaaacaattggttcagcagctggaggccaggatggagtttgcctggatttactgatctgtttgttctggaatacgtgtatgtgggaagttgaatcatcagacactagctacatagactatgtttacagggatccagagagtctgaagacatttcttatgcctttatatattggagaacccttccccattttcatatcctttcttcaaaaatctaaatgatgtgcctaaaaataagacatggcataataaggtataattaaagagataatagaa

SEQ ID NO: 407027 - DNA, 1000 bp, Homo Sapiens; identical to SEQ ID NO: 224873

SEQ ID NO: 407028 - DNA, 1000 bp, Homo Sapiens; identical to SEQ ID NO: 294661

SEQ ID NO: 407029 - DNA, 1000 bp, Homo Sapiens; identical to SEQ ID NO: 224874

SEQ ID NO: 407030 - DNA, 1000 bp, Homo Sapiens
tgagcaccgccggctgcaggaggaggccctggagctgcggggccgggcagccagtctggagcaggaggtggtggccacgggcaaggaggccgcccggctgcgcgcggagctggagcgggagcgtgtgtgcagcgtggcgctctcggagcacgaacgcatcgtgggcaccctgcaggccaacgtggcccagctggaggggcagctggaggagctgggacggcggcatgagaagaccagcgcagaggtcttccaggtgcagcgtgaggccctgttcatgaagagtgagcgacacgcagccgaggcacagctggccacagcagagcagcagctacgggggctacggaccgaggcggaaagggctcgccaggcccagagccgggcccaggaggctctggacaaggccaaggagaaggacaagaagatcacagaactctccaaagaagtcttcaatcttaaggaagccttgaaggagcagccggccgccctcgccacccctgaggtggaggctctccgtgaccaggtgaaggatttacagcagcagctgcaggaagctgccagggaccactccagcgtggtggctttgtacagaagccacctcctatatgccattcagggccagatggatgaagatgtgcagcggattctcagccagattctgcagatgcagagactccaggctcagggccgctgagaaaggccaggcccagtggctacactgaccacacccacgcagggacctcacccccctgcaggccccttgcagaccggcttcacttggcttcacttggccctatccaggcccatgcacttggagaccagcctggttccctgcccgaccacccccagctggctccatcaccccacctggtctctgcacgcacacactggtcagtctggacccgggccgtgactgcccctcccccaccaccggagactgtgattccctgtgtcctccacatccagacgccagcccaggaataaaggcattctgtgcacaggg

SEQ ID NO: 407031 - DNA, 1000 bp, Homo Sapiens
tcagtccgaactccgaaggcgccaaggcagggagggaccgttacgatggagttttgtggcaaaccagcactcccttcgaaaagaagtagataaaatctggtttaaaggaattctgtttgaagtctttgaaaagctaggacccacagggccagctacagaaagcgggaagtatcattccttgattcaggatcaggctcaagagttaacccacctacggcagaagatgaagcttgggagagtggcctctgctcttctcatccagcatgtcaagaacacactaaagacctttgaggagctactccagagcaataactttgaccactatatggagcagcactactgcgagcagctggccaaaggaagccagctggcagagagccttgccagaaaattcagcacagaaagacagaaggaacaggggcagctggtttttgtgggacacggatgtctatcatctccttggagaagggaggaaatgcataatatgagtaaagtgacagaagtcctagagaccaagtgggatgcccggtcccagactcagccccagatctggtgcagcaaccacacccggtctaccccacatcactccctgagcagcacgtctccacagcttgacaaggaggaagtgcatccttcagtgactgtagtcataggggccgacctgctggaaaagaatcttgctgagatgcagaacctgcgccagcgcctggaggagtccatcagtctcaatgaccgcctgagggagaggctggagcatgtgcttagcaatggtgaccaaggaaaaggtactggacagtccactgtagcccctcattcatatactcagagtcactcttctggctgtggcgaggacatcctgtgacatgatgcctagagagtctggaagaatgttctccagaacttttccagccctatccaacagaattcttgggtgggaacttggaggcattggatattatctttaaatgaagagatcaaattaataaattatttttaaaat

SEQ ID NO: 407032 - DNA, 1000 bp, Homo Sapiens; identical to SEQ ID NO: 224875

SEQ ID NO: 407033 - DNA, 1000 bp, Homo Sapiens; identical to SEQ ID NO: 224876

SEQ ID NO: 407034 - DNA, 1000 bp, Homo Sapiens; identical to SEQ ID NO: 294665

SEQ ID NO: 407035 - DNA, 585 bp, Homo Sapiens
aagtagaaagagcagaagggaaacatcatgggaagaaagactattttgtttctgattgcaggggtccttggggcatattatgtttatactcctctctcagataatattgaggaactctggtgactggtgtggatagctacacctgtgaaaatggtaacaaatttggctttgttagttgaactcttgggaatcaatcatttcatgaatactgcaacgttctttgtgagctttcaagaagtcccacctacatctgatgaaaatgtcaccatgatagagacaactttcagtaacattcctgtccgtgtatacatgccaacactaaagtcagagatactaagaacgggcttagtttatattcatggtggtggttggtgtatgggggatgctggtatgtgttccatattaaaagttttagtttatcatataacatacattttactgaaatgttgactccatcatatcaagacaaacatgttagataacaaaacacttcagctgtccaaaatttatttctttggagctatgtagatttaaaagaactattttaaatctcattctgaaagagggcataataaataccaaaag

SEQ ID NO: 407036 - DNA, 677 bp, Homo Sapiens; identical to SEQ ID NO: 119192

SEQ ID NO: 407037 - DNA, 1000 bp, Homo Sapiens
cagaaggacacatgcgccagcgtgcggaggctggtgctccgcggcctggccaacctggcctccggctgccctgacaaggtgcgaacccacggcccccagctcctcacagccatgattggcgggctggacgacggggacaaccctcacagcccagtggccctggaggccatgctgggccttgcgaggctggtgcacctggtggagtcctgggacctgcgctcagggctgctgcacgtggccatccgcatccggcctttcttcgacagtgagaagatggagttccggacggcatctatccgcctctttgggcaccttaacaaggtctgccacggagactgtgaggacgtcttcctggaccaggtggtgggcgggctggcgcccctgctgctgcacctgcaggaccctcaggccaccgtggccagcgcctgcaggtttgccctgcgcatgtgtggccccaatctggcatgtgaggagctctcagctgctttccagaaacacctgcaggagggccgagccctgcacttcggggagttcctcaacaccacctgcaagcacctgatgcaccatttcccagacctgctgggccgtctcctgaccacctgcctgttctacttcaagagcagctgggagaacgtccgagctgctgcacccctgttcaccgggttcctggtgctgcactcggagcccaggcagcagccgcaggtggacctggaccagctcattgcggcgctccagatcctgctgaaggacccggcccccgaggtgcggacgagggctgctgaggccctgggccgcctggtgaagctcgcctaaggctccggccagcacccccagcgaggagtatgcacccagacctgtgcctgagctccaagacagggcctcctgaggaccacagcctgggcacacgactggaggggcctggccccagaacaggcactgctggggaccaaacccaagcccttcagtgagggatgtgcccaataaactcatctgctcccag

SEQ ID NO: 407038 - DNA, 1000 bp, Homo Sapiens
tcttaacaccccagggagtgaaagaagtcttccaacttcagagaccacaaggtcgggagcgcctgcggaggcttctgaactgggaggagtttgacgaacagagagactcccggaggagcatcctgctggacaccctctacgagagcatcatctttgcagtgggcaaaggcttcccatgggtggaggtggcccaggtggtcaagttcacagaagagctgctaagggaaaccaaaggctgctccattactgaggctgtgacgatcctggggaacaagcttagagattaccggggccatttcaacaccacccacctgctggccctctgtgactacttccaccacaccttcatccgccactacaaactctaccagtatgtcctgggccaggaccagcaggtcgacctgaccgttgcccacctggaggtgtgcatgccaccccatcccctcccgctggccgagggcatggacagggacttgtggatccacgagcagcaggtggccacactgacggaggccgaggcacagaagcgcgccgacgtgctgctcctgaaagaggcgctgcgcctggagcgggagaactcgctgcagaaggcgttcgctgccgccgcgcctgcgcagcccggccaggtcctggagagacaggagttggagagcctcatctgccaggcagtccacacccagatggagctcctgcaggagctgctgcagcgccagatccagaacacattcgccatcttggacctgaagcttcagaagaagactctgaacctcaacgcccccacccctatcccgccccccatcaccagccacgcaggccaggaggaagccctgaagccccaaagagcgagcaaaggaaagaaagcgaaggcaaggaagtagaaggtcccgactgccacacgagactgactggggaccagccacccataaccatgagccttgcggcacggtgagctcagcacccacagagagacttcttgtgattaaaagaaacaaacccatgc

SEQ ID NO: 407039 - DNA, 1000 bp, Homo Sapiens; identical to SEQ ID NO: 294666

SEQ ID NO: 407040 - DNA, 1000 bp, Homo Sapiens
agagatttcttgcaacttgagaaaattcggtactttgaaagaattagtcctggaagctaagaaatgtgttaaaaagatgaacaaaagccaaaaaagcaggaaccgtccagactttccaaagaggccccttactgcttataatcgcttcttcgtggagagttggctccagtactcccaaatgtaccctgggatgagaagccaggaactgaccaaaatcctgtcaaagaaatacaaggaactcccagagcagatgaaacagaaatatattcaggatttccagaaggcaaagcaagaatttgaggaaaaacttgctcgattcagtgaagaacaccctgatttagtccagaaggccaagaaatctggtgtctccaagaggactcaaaacaaagtgcaaaagaaggttcagaaaaatattgaagaagtgaggtctcttccaaaaacggatcgatttttcaagaaggtaaaatttcatggagagcctcagaaaccccccatgaatggataccacaagtttcaccaagattcctggtcaagtaaagagctgcaacatttgtcagtgagggagcgcatggtagagattggcagacgctggcaacgcatcccgcagagccagaaggatcattttaagagccaggctgaggagctgcagaagcaatacaaggtgaaattggatctctggctcaagactttgtcacctgaaaattatgctgcatacaaagaatcgacctatgctaagggtaagaatatggccatgacaggaggcccggaccccaggttgaaacaagcagatccgcagtcctcatcaacaaagggtctgcaagaagggtttggggaggggcaagggctccaggctgcaggaacagattcatcacagactatttgggtaaactgtcatgtctccatggaaccagaagagaacaggaagaaagatggagaagaggaagaaagcagtaactcttcagactgcagcagtggagaagaaatggaagttgatgtctga

SEQ ID NO: 407041 - DNA, 669 bp, Homo Sapiens; identical to SEQ ID NO: 32346

SEQ ID NO: 407042 - DNA, 1000 bp, Homo Sapiens; identical to SEQ ID NO: 294667

SEQ ID NO: 407043 - DNA, 416 bp, Homo Sapiens
gactgctctgatcactacgtgctgtgaagggcacggtgccagcctctgatctgggtccttgctgccatatgaagacacccacctaccctgctggagaggggctctggagggccagggagagagaggatagctgggctccagtcggtgccccatccagagcccacagacaggacaaagccatcccgggccctccagcccccgttggccatcgcagcacacgccacctgcacaaagatccggcaggcaccgggagccggctggcaggtacctctgagcacactggattaattcccagggcggccgtcacagcagtgacgttggcactgaccacccacggaaaggacagaatttaaagaggctgagtttttcatctctctctgctgttttctctctggtttcccttttaccattttgac

SEQ ID NO: 407044 - DNA, 694 bp, Homo Sapiens
gcgtcacccccaccagcaggtgcagaggtgccgttgcagcagttggatgtgaggccaagaagcagaagctaagggagggggtctggggcatccctggagctcagaagccaaggcccgtgcctgccccagggctggtgccatacatagttccaggtactggggacggagggtagccgatggggccctgagcaggacgtgcctcttctggacttgaccacagaacccaagcatggttcaagcgattctcctgcttcagcctcctgagtagttgggattacagatgcccgccaccgcacccagtcacagatggactctgagagagaaaatagcacccctgtccaaacatcacatgcctggcggaggaacgcagcctggcctgtgcagccgaatgttggagagtgcaccttcctctcttattttgttttatttccagggaaagggaaaggaagacatgcagtctcattgaagtccttgggtcactttacccctgcccttgggttgatggacgatcagatgtcttccttctcatgctggctgagacatcaaacaccagagtggacttacttggctccagtgctggtgatgggcacttctgggtgaatggaatctggggtgtactagcaaatttgctggttcttagtgcaggatcatttgaaaatttattattctgccaaattgatcaaatcactttgaa

SEQ ID NO: 407045 - DNA, 491 bp, Homo Sapiens
tatcatagacacagaagttacatatgcttttattaagagttaatgatttaaaaaataacctaatgatatgagtgctaaatttgtaaataattgaaatgagtcactttcttctggtaacaccttcctgggcttcaagagccaccatgctgacaagtaagcactttcattaccaatacttctttcaggctattccattccaagatgaccaaataggaacagctctggtctggagctcccagcgtgcccgacacagaagacgggtgatttctgcattttcacagagttattcctttgtagttgtgatccagcatggatgtggtgtggttgtatcagtgactgcaggtagtctgtggagcattacacagttctttacggaaatagcagctgcaagtgaccaggaccactgacagcagaaggcacctcacttaccatggtaaaaagcagtttagaaaaatctcaaaaacaaaataaatgtttattggagactcaaa

SEQ ID NO: 407046 - DNA, 1000 bp, Homo Sapiens; identical to SEQ ID NO: 294669

SEQ ID NO: 407047 - DNA, 1000 bp, Homo Sapiens
acccggccaccccgagtccgcctggggtggccgaacgtatggagctgggctccagggtgcacggggatggggggtgaggagcggggcgttctccctcccagcaccccccagctgactctgtgcccggagggggtgtgtgagccggaacctccagcattcttggggatacgaacttccaacgctgggcagcctcttaaggcttctaggaattcgcatccccagcgccccagccagcagatcggttgcgagagggaccgttcgggtccgcggggccgggaatggaggtgggagggcggggccgaggcggcggccgcctgcggactggagacccgggaggacggacgcggacgcgggctgctcgtcttttacggcccttcaacgcccaccacgacccactcctcttggagaccccgggcgacggtggggctcttgggcattctgagactgcgcttggtggagaccccgggcgacggtggagctcttgggcattctgagactgcgcttggtggagccccctactggccagactggatttctcagcctgcgactcagccccaggctacacgaaagaagccagacctggcttttactgcctcctgaggccttcgtcttgttcacactgagtgtccagtccctccaaatccggctacactctactggcaaggagcacctgggccatgttttagagatcatccgaggactaaccccaaaagtttatgaagagaaagcagaggccgagctgaagagatggacccgggtcacacccaggtaaaggcaggatctaaactgaaactggtgtcagatctggttgccttgcacccctgatatcaggtgaagcaacactgggcaggatagagcagagtgaggtcagagtgtgaagatccagcctgatgcccaaactgacgcctcttcattctcccctgctccatctgtaaacgtcacggttaatccatctactttattgcattatatagagaaataaatgaaatgtcatagctgt

SEQ ID NO: 407048 - DNA, 1000 bp, Homo Sapiens; identical to SEQ ID NO: 294670

SEQ ID NO: 407049 - DNA, 1000 bp, Homo Sapiens; identical to SEQ ID NO: 294671

SEQ ID NO: 407050 - DNA, 1000 bp, Homo Sapiens; identical to SEQ ID NO: 294673

SEQ ID NO: 407051 - DNA, 1000 bp, Homo Sapiens
gctgatcgcctctggggtccccacagtcccagtgaagaacctaaatgggtccagtcctgtcaaccctgccttggcaggaatcactgggatcctcatgagtgcagcggggctgcctgtgtgtctcaccaggccaccaaagctggtcctacacccaccccccgtcagcaagagtgaaataaaatccatcccaggggtttccaacacaagccgcaagaccaccaaaaaacaagccaagaaaggtaaaaccccagaggaagtgctaaaaaaatatctacagaaagtccggcacccaccagatgaggactgcaccatctgtatggaacgcctcacggccccctcaggctacaagggcccgcagcctacggtaaaacctgacctggtagggaagctgtccagatgcggccacgtctaccacatctactgcttggttgccatgtacaacaatgggaacaaggtgaagtgtgctcccatcagtgagagagaaggaagttcttatcacagcgctagacccatggatggaagtttgcagtgtccaacctgcaagaccatttatggggtgaagacaggcacccaacctccagggaagatggagtaccacctcatcccccactccttgcctggccacccagactgcaaaaccatccggatcatctacagcatcccccccggcattcagggaccggaacacccgaatcctgggaagagtttcagcgcccgaggcttcccacgacactgttaccttccggacagcgagaaagggagaaaagttctgaagctgctgctcgtggcctgggatcgccgcctcatttttgccattggcacctccagcaccacaggcgagtcagacaccgtcatctggaatgaggtccaccacaagacagagtttggctctaatctcactggccatggctacccagatgccaattacctggataatgtgctggctgaactggctgcccagggcatctctgaggacagcactgcccaggagaaggactga

SEQ ID NO: 407052 - DNA, 1000 bp, Homo Sapiens; identical to SEQ ID NO: 224878

SEQ ID NO: 407053 - DNA, 1000 bp, Homo Sapiens; identical to SEQ ID NO: 294674

SEQ ID NO: 407054 - DNA, 1000 bp, Homo Sapiens; identical to SEQ ID NO: 119193

SEQ ID NO: 407055 - DNA, 1000 bp, Homo Sapiens; identical to SEQ ID NO: 294676

SEQ ID NO: 407056 - DNA, 1000 bp, Homo Sapiens; identical to SEQ ID NO: 119194

SEQ ID NO: 407057 - DNA, 658 bp, Homo Sapiens
tcaaaatctatgtcctttttccttctttccagcgttcaagatgtggaagcgaggacgtggtgggtcctctggtgtgaacttccggatttctgtgggtcttccggtaggagctgtgatcaactgtgctgacaacacaggagccaaaaacctgtatatcatctccgtgaaggggatcaagggacggctgaacagacttcccgctgctggtgtgggtgacatggggatggctacagtcaagaaagggaaactagagctcagaaaaaagtgctcaggaactctggtcaaaggaacaccactagaaaacactgaaggaggcatgtcaggtggttctgcttctccatggctccctacgatgaatgcctagagagggtattgacatggcaacctgatgccagcacatctgtccacagctgccattgcaaggatctaccttggtgccctctaaagaaattctgaattttctgagaacaagaggtctagtcccatatgtggaagtcttttctgtatgtctctgagtagaaagtgagaattgatatgccaagggatgagtaatgagcctcatcttgatgcagagtccccaagaaccaacttttactgaggagcatgcaggcaactttataccccatttgacaacattaaacccaaaagaagaaaatca

SEQ ID NO: 407058 - DNA, 1000 bp, Homo Sapiens
atgggtgtttttgagtctgtgggtgtcacagagaggagatcgggagctgcctgctcacaggcactttgggaccccgaaagaaaaggctgtgccgagagagttcttccagtcagaggtgtcatgaagactggacatgggcctatcagggccatgggcatgatgtcagccaaggaactcgcggcctgcctctgccaagagaccagcatctcggcctgagcactcccagcctcccatcgccttcaacctggctgcattcagctgccatgcccctacctccttgtgtggtcagcaccctccaggacttcatcttgggtcacccaaaggccgaggacattgctggccagcaggaaattcatggtgcatccaggaagacttccaagaggtggtggagcagggggcgccacacccagacagctgtgtgtaattgcgcagctgcgggctgctgcgggtgctggccggcagtgcattctgggcacactggactgtgtcaccgcatgcaggctgtggccggagggggaactgctggccgccaaggcctatgtgcctggaaaccagcagggctgctgcaggaggagggctgcagaatgctccagctcagacctgactcagggttttagagggcatagggcataaggctgtggacatagacagccctactgcgcaggaagagcataaaccagccggagggcatgcatgtgggctgctgttagattctgttctcctttgaggtagggaaggatgtgtttctattttatggatgagcaaactgaggcagagtgctggagtgatttcccccagcaacgatggcagatttagctccagggcttagattttaggatcctccctctcaaataccatgatgtatcatgggctttctctccacagaaaattagaaactcagaaatggaaagggaacaatgaaacttacccattctcccactgctcacatttccttctggtttttttgcgtgtgcatataaaatatatctcagaaaattga

SEQ ID NO: 407059 - DNA, 1000 bp, Homo Sapiens; identical to SEQ ID NO: 294679

SEQ ID NO: 407060 - DNA, 1000 bp, Homo Sapiens
cagcaccacaacctcagttcgtcgtgaagagcctacaaccttccacagccggccagcctcaactcacacaacactgttcactgaggacagcaccacctcgggcctcactgaagaatctacagccttccccggcagcccagcctccacccaaacagggttacctgccacactcacaaccgcagacctcggtgaggaatcaactacctttcccagcagctcaggctcaactggaacaaaactctcacctgcccgctccaccacctctggcctcgttggagaatccacaccctcacgcctcagtccaagctcaaccgaaacaacaactttacccggcagtcccacaacaccaagcctcagtgagaaatcaaccaccttctacactagccccagatcaccagatgcaacactctcacctgcaaccacaacaagctcaggcgtcagcgaagaatccagcacatcccacagtcaaccaggctcaacgcacacaacagcgttccctgacagcaccaccacctcaggcctcagtcaggaacctacaacttcccacagcagccaaggctcaacagaggcaacactgtcccctggcagtaccacagcctcatcccttggtcaacaatctacaaccttccacagcagcccaggcgacactgaaaccacactcttacctgacgacaccataacctcaggcctcgtggaggcatctacacccacccacagcagcactggctcgctacacacaacactgacccctgccagctccacaagcactggccttcaggaagaatctaccactttccagagctggccaagctcaagtgacacaacaccttcacctcccagcaccacagcagtccctgttgaacagcactggatcgccacacacaacactgtcccctgccggctctacaacccgtcagggagaatctaccaccttccagagctggccaaactcgaaggacactacccctgcacctcctactaccacatcagcctttgttga

SEQ ID NO: 407061 - DNA, 1000 bp, Homo Sapiens; identical to SEQ ID NO: 119195

SEQ ID NO: 407062 - DNA, 1000 bp, Homo Sapiens; identical to SEQ ID NO: 119196

SEQ ID NO: 407063 - DNA, 1000 bp, Homo Sapiens
ggcgctaagcctcagacaggggcaagagaagtccaggtcccagggcctcgagagaggcacagaagggccagatgccactgcccaggagcgggtgccggggagcctgggggacacagagcagctgatccaagcccagcgaagaggcagccggtggtggctgaggcggtaccaacaggtaagaagaaggtgggagagctttgtcgccatcttccccagcgtgactctgagtcagccggcctccccgtagcccacactgggcaccatcagctaaagatgctggaagccatcgtggcccccttgctgtgcctggaccagcccaccgtgtctgctgacctacctcttcacagctctctggactttggctgggtggccctaggaggcttctgccaccagctcactggagtcgccacgtggctgccactcttagctctggcccttccactccagcactagctctctttgaagatcccagcagggtcaaaaagaagggggctcagctgtctgccctctgggcttgggtaggggccttggactatgattctatgaaggtttagaagaagcctgcccggaatgggggctgtggacgctcctgccccacacgaccagctgtcaacttccaggacggagcttgatgaagccagacccatggccgagaggctcacggacgttgcctggtcactgggccatgacccaactgcccttcttgtcagttgctgatggtgggccagggcgcaggtctccctcccagatggtgagccctctggggcaaggaccacagctgggtggccctcctggctgagcactctgtgctgaaaacctttgaacctcacggtgtcctgatgaaggaagcagaggaagtcttcctccctgtgtgacagagggggaaactgaggcccagagtggggaagggatttcttggttttgacatctccgaccccaccccaccccatccagtgtccagcactggagtcgaacacagtaataaagatgctgagaaaaa

SEQ ID NO: 407064 - DNA, 552 bp, Homo Sapiens
agaggccagggaggatctgagatggccttcttcaacttgtatctattgggatatcaaaattcctttcagaacaagaaaaggaacacaactgaagaaacaaaccagaaggaaccagagcctactaggcttccccccattatctcaaaagatgggaattattccgtgcaccagaatagccacacaagataccacgaagctgtccggaaggtgttgttgaagacgtttcccaatcaggtcttcagaatccccttgactgatgctcagaacttcagcttctggtggtcccatgatccaggagtgcgtccagaggaaaccatgccatggatccggagcccacgccattgtctcataaaaagcgcgatgaccaggtttatggatcactctattctcaatgacaggaccttcagtctgtattaagaagatatggctgcagaaagacaagatgaattgtggcaagagtgcagagggggaaagaaggaggtttcccagttccgatggctgactaatgggaggaggagatggagaaagcacagtaaacagactggactaaaa

SEQ ID NO: 407065 - DNA, 866 bp, Homo Sapiens
gagacgctcaagagagcaagatgttctcctgttgcttccccacttcgagaggttgctgcttcaggaatggagggagtgagagccttttccgacaatgccgaagaaggctcatccctcaccccagacgcctgtggccctttgtaagaaggcgcacccaggtaccacaggacagcccggggcaggccctagctggccaggccacaccagagatcccatcggggctgcctctgcacattgtccttgtccaggaggagattcgggagcccatggaggcacagacacatgctcctggtccgtacgcagacatagcagcacttgcggcaccggctgtcgagccaaagccagcatgggaagagccccctccagagagagcgctggaggtggagggagctccagccaaggaccagcccagccaggagctgcctgaaatcatggcacctactgtagccactggccttaatgctggagctgaaaacgtggctggagagagaagtgggagggagggggtgacaagcacagccccagccagcagatcccatgctgcccctagtcctgggcatggtggcaaacatggaggcggagaccagggcattcagactggactcctgtacctcgctggagagaggcttctctcattcgccggaaccacagccctgctgctgcagggcctgtttattgtgctaattctggtggggtatatctctgtgaaggtgatgctcaagagcattaaaacaaggctgggaagaagagttccagcagctcctcctgctctcagacgcaatcttctcctccaggcatggaagtgtgtctgcaactgggcatccaggctgtttgcccctaatgtgctgccccgaacgggctcttaa

SEQ ID NO: 407066 - DNA, 1000 bp, Homo Sapiens; identical to SEQ ID NO: 294682

SEQ ID NO: 407067 - DNA, 1000 bp, Homo Sapiens
aaataatgtgcaggaaaaggaataccgtgtgtgggagtgtgagtcttatgtgcacgaagaacaggacagagataaagtccctccaattaaaccaaatgctggggaagaatctgtcacgaatcttgacaaattgagatttgctgatggaagaagcataagaacatcggaactgcgactcagcatgcagaagggctgctggctcgtgtcacgttcaccaccagaccccacatcaggagtcccgccaggggtgtggggaggcagtgctgcctggttggccgtggagccgtatggaacgtggtgcctcacaggcagtctgcttggcgtcctggaccctggctgtatcccgctggaaaggatgtgttcaacgcaaaatcatgctgccgtgttccgtgtgggaagcttgttgcaagaaggttgtgggaaaatcagcaagctctatggagacctgaagcatctgaagacgtttgaccggggtgagcagacagtgggctctgtgcacactgttgggccctgccttctgcagggaatggtctggaacacggacctggtggagaccctggagctgcagaacctgatgctatgtgcgctgcagaccgtcaatggagcagaggcggggaaggagtcacggggcgcgcacgccggggaagactacaaggtgcagattgatgagtatgatcactccaagcccatccaggggcaacagaagaagccctttgaggtgcactggaggaagcacaccctgtcctatgtggacgtcggcactgggaaggtcagtgtggagctcgttctcaccacagcccagcacccacacggccccgcccaggtctgcgggctggccttgctgatggtgaacgcggaggagcaggccagatttaaatcaactcccgacagatttgaggcaccgctgaaaaaggtcactgtggaatatagacccataattgacaaaactttgaacgaggctgactgtgccactgtccccccagccattcactcctactga

SEQ ID NO: 407068 - DNA, 1000 bp, Homo Sapiens; identical to SEQ ID NO: 294684

SEQ ID NO: 407069 - DNA, 561 bp, Homo Sapiens
ggaaatgctctacaggagcccggacagagtaggatggcatccagcccatgtgggaggacagcaggaataaacggggtggccgctggctggtcagcctggccaagcagcagcgccacattgagctggaccggctgtggctggagacgctgctgtgtctgatcggggagagctttgaggaacacagcagagaggtatgtggggccgtcgtcaacatccgcaccaagggggacaagatcgctgtgtggacgagggaggcggaaaaccaggcgggcgtgctgcacgttgggcgtgtatacaaagagcgcctgggcctctccccaaagaccatcattgggtaccaggcccatgcagacacagccaccaagagcaactccctagccaagaacaagtttgtggtgtgaggggggccttggcacccctcctatgtaatgggacagccgccactgagcctcattactttgggggatggggcgggactggggatcagacagcctagttcttacctgtcctcaagtgaacaggaatgcaaacactctttaacatgagttggggcctgagcct

SEQ ID NO: 407070 - DNA, 1000 bp, Homo Sapiens
atcttcacctacgtcaacctgctcctgtacgtcgttgacctcgcctactcccagaggattcgcttcgtgcccagcctgtagcccacagtggcagcccacccacctctgctctctggccaccagctccaggctctgcgagggaaactcaggtgaaccaaagtgtcaagtagcgagcaggagggaagccgcgggctcaggggagatgaagtacaacgggagaggtcgctccccgacttccagactgggctcagagggacaagggcaggacagtagggcagaggccctgagcagacgcaggggagagcctcacctaggccaatccccaactcactctctctcaccatttcccagcgctcctggggctcagtgctggtcactggaacatcataagggaaaactttaaagcagctgctgttgtgacccattttgcagctggggacatggaggctagaagcatttgcgaggcacccagtacctccattagtgtctggagaccacagtcaggctgggtaaggcaagctgaaagaggaatgacttccagaggagacgaacccaggagagtagctgggccaggcaaggggagggaggggcgtggggagccggaaccactcctggttcagagaggcagctcccagaaccctgggaagagagccctgcctggggagctgtgccagctcacagagaaggagccagaaatctggaccagcctctcccacccacgtccgggaagcctctgggctggtagccacagtgtttggaagcaggcttcctccggagtctccgcaggctggaggtggcgcgggtggcctggaagagcctgcagagcccggcggcaccgagtgcacagtggacggggaggacctggttccgccatagccacggagccccacctggacactcaccattggctgtgacgaagcagcttcagcagtgcccggcgggcatctgtgcactgtgggcatctgtggcactgggagggagcccggctgagggcggccgc

SEQ ID NO: 407071 - DNA, 1000 bp, Homo Sapiens; identical to SEQ ID NO: 224882

SEQ ID NO: 407072 - DNA, 1000 bp, Homo Sapiens
catcttgccacacggtctttttcttttgtagcacagcctccattaataactcctcggctgaggatgaagatgtaggcacctttacccccagagccagttccttaattggctggctttctgagatgcagaccaccctagaatctcatctaggttcactagaagttagttaaatcttcctttctctgtctttctcttcattccatcccccaaacccaccaaacactaagggagagctccctttggatgtctgggcagtaaacctagctcatttttctaggagacccagaagtgacttctgagtagttatcactgtgtctgcctctgttacactgtgctgctttgcttaaacagaaatgcaggcctggacatctgactgtgcctttatattctgagtggggtgctgccccatgcaaaaaaatccagagaggtagtgaggtgtcagagctaaacacttggtgctgggttttgttgatgctggtataatgtgacacagtacaattacatgctaaattttgcattttctctatataacatctatttttcctgatactgtgcctttgccattttgataatgctattttgattgagtgaattttatttcctttgtattcccatagtgaacaatatattaaggtagatgccctttatctgggtactcctggtagattagctgttacacctcccttcccttttttacagtgaacctgtattcagttattgtcactctgagaactctccaataacaatttcttttccacagttaacaacacagctgttacacctcccttcctttttttcacagtgaacctgtattcagctattctcactctgagaactctccaataacaatttcttttccacagttaacaacaaagttctgtttttaaatgaagagattaagttctttttaaatgcctaaaggcatattctgacaacttttctacttctttaacttttttgatttaagatatatgcaaagcaaataaattcaataaagcct

SEQ ID NO: 407073 - DNA, 917 bp, Homo Sapiens
atggactgccccacctatgagcagcagagcaggactgaaatccaggtcctgagctatcttctgtccaagtctgaattaagcatctgtctgtgcttggctggtgggaccctgagaggaccccagtcctgtctgtctgtctatctgctcatcctcctcacgtaccaactgtctcttaggggcagacaaagagcccactccaagctggccaacaagccagtggtgcagcctgttgaggagcaagaacccaagggccctcaggcttccgaggagcggaacttggagccaccttcctcagaacaactggaacccaccgtcacgttcctgtttacactcctgaacacctctgagcccactgagccaaaagaccctgaatcggactcggagatccaggagtaccagttcttagatcaggaggactggggcccccagcggacctcaaaggagatcaggcagttgcagaatgactgcatgaggcttcgggagtcactgaacaccacccaagtgcacaacctggccctgggggagaagctgcagaacctgcccaccttattgtataagagcctgaaggagggagcccaggccatccaggaggaggcccaggccatccaggatgaagtgaaggccctgcaggaggaaagccaggccctgccggaggtggctctgctcaggtgtgcgggcagccatggcagcggggagggaagaggcggctgccccatgctgctcactcgagctgtctctgcctgcagtgacccaaacccccggaaggcaggtctcctcttcaagctgcctgacctgccccacgaccacagagaccagggtcaggcctggccaggccccaggccagaggtcggacacctcctcgggaggccgctccttcagccagctcctccctagatcccagaaataaacttggaagc

SEQ ID NO: 407074 - DNA, 883 bp, Homo Sapiens
atgactcacaagtgggactcttgcctcatccctcaaacctcagttctcacaaatattccagatcagtgggagtctgctttgtctgccttggagagccaagtcattttgggctgggaaaatagaatgcaactgaagaaatggctggtgcaattcagcaaggtaaaagattatcttacccccagctggttaaaggcagaagctatgaatttgtgctattgtctgtgggctcctttcagttctcaaacagtagctgccacttctagctgggagagaaatgagagctctgctcatggtgatccagtatctccagaatccatcaccactgctgacctcccactccatgtctccaagtgctctgctatacctgccaccagcagctgccacctccagactttggaaggttataataaaacctctgttctacgatctgccttctgcttcaacatcctcactccccacaaacaattctaataaacagcaattaatctgaaagtgtttttgcaattttaatgtatgagatatggtttctctcaaaagctacactgctcttgtgtccttacaaggtattttcttagcaagaataatctgtttgcatgggtgttaatgactaaatccctttcttgtaaagttatgcccatctgtcacacaagaagaatagtaccctttagagagcgctgaaatgtagggaaatgtagggaaaatgagcagctattcaaaaaggtaaaatgctgccacagagcctgataagagcaattaattaaacattaagtgtagaatagggaatatatggcatgggataaattatagtcacaattcatgtttcttttgtctccagaagttcacacacaaaaacccatgcctttacaaaacaataaattcagca

SEQ ID NO: 407075 - DNA, 1000 bp, Homo Sapiens
cccgagttctggggctcagtcggctctagctctctcctgccgccggcgccactccagaaagctgtgggtacccgggagcggagcgccgcgggtgtgctgggcgccggtggaggggggaacagcgaggattagacgccgggaagcacttccccaacatctgcgagaggtagacacggcggaacctagtggaatcccatcatcgcgtgcacatctcatcccaggagggagagaggagctgccgagtagaaagcagactggctgcagggacagaagacaccaagggcaccctcccccacagctgcgcctggacctcctgcgagaagaggaagccttaggggtctttattgtaccctcaagaccccagagagaaacagaagtgctgaggggtcgcaggcaggtctcttaccctctctgggcctcgaatatttatccataggaggctgaaggtaactgccttcgcaactcattcatgagggtcaatgggacgacagtggcaagaggggttggcacactgcccagactgttccaaagccagggctggggctgccaaaaaggccacctgtgcttcaccatgctccatcctccctctcttccacctccccaggctgggctccacttgtccagctctctgacttcctggcaaggttgagtaggctccagctaggaaggggccagctgaccttgttggccggagcactaatcccctccagatgggctggtggcttgcactgagggcctggctgcccagacagagctgactctggtcccagtgaccatgtgtggctatgtgtgaccgtgtgaagggagcaattccatccagtctcccggttccttcctgcttcactcctccccactgctgacatcccccacaagcagtggccccatgaaggccttcttgtctctagtagcctcttttggctctctgtgttgcttagctggagggctgaggatgcctggcacagccgattcccaaaggcctcagagggacagctcctccccc

SEQ ID NO: 407076 - DNA, 798 bp, Homo Sapiens
catggcggttgcatccccaggaagcaggcccgcagcgccaggagggggtttcctgaggacagaggcccttgtcctgattgtcgcagcaggccctgtcgatggacttaactgtgaaaatcaccctttcaggggtggatgcaaggacttctgagggcggagaagtagataccttcctggatagctgtggagccggggtcctgcatttccctctggcgtctctgctgactgagatgtgaagcagtcggcccatgtcccgagaagaggttggccacaactctgtgccacatcctcttcattttagaatccaggatgaaggatatgcccttatctgggcacttctccttgctgctgccatgtgaagaaggacatgtttgcttccccttctgcataattgactggtggcctcacaagaagagacaagaagaaagctgtctctgtgcacacacaccgaggaaaagccatgtgagcacacagcgaaaaggcagccgagcccacaagccaggaagagagccctgcaccccagaactcaactgtgagaacatacattcctgttgtttaagccaccagtctgtggtattttatggcagcccaagctaagacacgctaggaagaagaaccactatagtgttaactgtaatgggcagaatggccctttagtcacccttcctgtggcctaacacttggacactgtcacttaagaggcccctcacatctacgcaggaggtgattaaagaacattctaaattacctggtaatttgggggtgtaagtacatgaaagcatttttaaaattctaatt

SEQ ID NO: 407077 - DNA, 1000 bp, Homo Sapiens
agccggcggacgccaggaaacagcagttactgatgctacaatattcctttatgaagccaagaactgaaccaaaatacaaacaacataaactaccacttgatgagaagaacttcaaagtcaaattgcaaaaggtgactaaaaaaggggagtactttcagccgttttcaaaataatctatgatatgtactggaaaacttctaataatccttgtcattttacaactttcccacagttagatcatcagcaaatgtcacttggatccctagctaaattgttcttcccagaaaatagttatctccactatggaaagtattttatcagaagaattcgtagaagtagaatctgtttgtcttcagttaaacaaaagaagaacctcattgctttccaactgggccccggccattttccagttgaaacatcaaatattttatttgtgtctttcactgccaattaaagggcaacagaaatggtacaggctccctctgcagtggaattacccttatgtcttttctgtctatgctgatccacctgatcttgaactggtgctattccatggggaaaattggaacatggggcaattaacactttctccactttatcccatcaacaggaaattgaaatataaccaactaactcaggagacatcatggaagatgtcacacagtgaatgatgatgaagcagaatttttaaaatgtgtaggattacgagaagtggggtcatttttctttgtgtatggtattgctgatgcagtttaatgctccattacttctaaattttcatcataagctagattttccagttgtggtttctataaagaaaaacaaacattctgaagacagtttttccagatttattccagatatcgatgattaacttttgaagctcctctgttgatttgaacatccgctgaagcttatttttcacctcagaatagcatcaacattatttgaaattcaattgtactttctcgttacattaataaatcatggaagttgagaa

SEQ ID NO: 407078 - DNA, 1000 bp, Homo Sapiens; identical to SEQ ID NO: 294685

SEQ ID NO: 407079 - DNA, 790 bp, Homo Sapiens
agcatccaaggagagtgtgggcagctggagccaggtcctcctcctcctccttctcctcttcttcctccttcgtttcttcctttcctcctccacctgcctattgcagagcagcagaaagcaaaggagctagaaaagggtgaaatcaattctttttctgtaacctttttgctttgcttttattaagttcttaaggcttttggtcttgagtcctagataagatgcaaataattctgaagggatcataacttttaatattatcagtggatatttaagaaaaaaataaaaccataagatagactgatagatagtagagaataaaaagaagattcaggagaggccatggggaggcaaaggaagagaaaggagtggagagtgtgcatgagtgtgtgtgagtgtgtgtgtgtatgagtgcatgtgagagagagagggtgggggagggagggagagagagagtgagagagggagaaagagtggaaattctagaaagaaattgcctcttcttctgttcaactacttcactgttttgtcaaaagttagcactgcctctaaggtctcctgcaactcacccacccacccctcttactccatggtattcaacttctaaactaagaggaaagcccgagctagaggtcctatgcatcaatcagggaagagatattgagaagaataaacagagaaactgtattttttctctcaactaaaacatccattttaatcaatatttggcaagaaaatatatacctgtttcatcttcactggttatttccataaactggaaagaaggactgtc

SEQ ID NO: 407080 - DNA, 811 bp, Homo Sapiens
gttgaagatgactcactaccaccatgtccaacctccaatttgaaggaaaatggaaaggggaaagttgaaccaacagtacctttatgaaggcatggcctgaaaatggaagattatcacttctctttgcatcacactggcagatcagtgtggaaatggatgtggacgcggtgctgctgcctgagattagcaggaagcaattcttttcccatttggagagaccccgatattacctatattgccttgatctgctgtctgaaggctttgttgggccaggagatggttttgcagcagcagaagactatgaactgggctttgggagataggatctctggttgtattctggctatccacactctgaaagaggaccgtgacagagaatttgagtatcctaccaatatacctacaaaaggatgaaagaagatttggagtcaagggaaaacaagggcaataaaatagaagcttaccacctgctctcatacagttgctagaagaggactgcatatttggttctaagtttctggaagataaagccaaaatagaaacacaactcattataaaattttggtgtatccataaaataaaaacaaatgacctgtttgagaaaactctttctgagtttgagctctaaaaggaacttctctatggaatccttagaatatgagaaggctgtgatataggggagaaaccccttgacattcctatattgggtttaggtctaatttcactcagtagtttttaaatgttactccttgtagacagatgatgagacgccaaagtacagctgagtgaaagcggttcctttgaaaactaa

SEQ ID NO: 407081 - DNA, 777 bp, Homo Sapiens
tcaagagtggggtcagcaagagaaactctacggctatgggagagcctgcgttcacctcttttccgagcccacctgttctggggaagctcaaaagaaacatgatgccctgggctttacagaagaaacgagaaatccacatggccaaggcccatcggagacgagctgcgaggtctgctctccccatgagactcaccagctgcatcttccggaggccggtgacaaggatcaggtctcatcctgacaaccaggtcagacgcagaaaaggggacgagcacctggagaagccgcagcaactctgcgcctaccggagactgcaggccctgcagccctgcagcagccaaggagaaggttcaagtccactgcatttggagagcgtcttaagtatccttgcaccggggacggccggtgaatctctggacagagctggtgctgagcgtgtgcgcatcccgcttgagcccacccctgggcggtttccagctgtggcaggggggccaaccccaggaatgggttgtcagctcccaccgcccctctctggccaattggtgactcctgcagatatccggagacaggccaggagggtgaagaaagccagggagagactggccaaggccttgcaggcagacaggctggccaggcaggcagaaatgctgacaggtgggtgaagctcagtcctgggctttcggtccctttcttttaatgcccatcctcattcctactctgaattgtcacacttttcccttccccaccagttctttaataaaagtatttgaaaggcaa

SEQ ID NO: 407082 - DNA, 938 bp, Homo Sapiens; identical to SEQ ID NO: 224884

SEQ ID NO: 407083 - DNA, 1000 bp, Homo Sapiens
tggccaggcagctctgtcagagcaaagccctgcggctgatcagaagcagcctgttcctccagggtgtgctgcatgttcaagccagtctccaaaaaagccattcaatagtattattgagcacctgtcagtggtattcccatgttacaacagcactgagcttgctggttttattaaaaaagtgagaagcaaaaacaagaactcactttcaggattgagtattgatgaaattgtccaaagagtgacagaacacattctagatgaacagaaaaagaaaaagccaaacccaggaaaggacaagaggacttatgagcccagctctgccgcccacgtgaccaggtcctcccagggcccacccttggcggttgttgcaccatcacccaaaaccaaggggcagaaagcagaagatgtccctgtgagggttgcactgggtgcaagttcctgtgaaatatgtcacgaggtgttcaaatcaaaaaacgtgcgtgtgctcaaatgtgggcacaagtatcacaaagggtgttttaagcagtggcttaaagggcagagcgcttgcccagcctgccagacttgtgatctcctgtcagaagagtagcctgcaccttctggaagaggctggcccagtgagaatcgggagccgccttcctgctcctctaggtagtcacacttcactaaagcgtcatccgccagcgtgttgaatcggaagaatgacaatttcctaccattggtgtaaaaagcaaacatctgaagacccttgtgcattgtgtgttacaaagctaaatccatggaaatcgttaatatcattgatattaagtaatttccccactctgagtgaatactttgatgatggccaagcagtggctaacaaaatgatggctaccacactcatgggtcgcttgggctgtgcagggctctttgaggtgggtagtttcttttggaaagtactgtgagcgcctcaaagcagtattctagtgataagaattcttaacatattcggccgggcgcg

SEQ ID NO: 407084 - DNA, 1000 bp, Homo Sapiens; identical to SEQ ID NO: 294693

SEQ ID NO: 407085 - DNA, 1000 bp, Homo Sapiens
gagcacttcttagtgggtattccgtccggggccacttttctgaggccgaaggacccctagtcagtgtgtgagacatagcctggccgagcctgggaaccacctggggctgagagacgaccttaagtggacagagattctagaacaggagaaataaaacagctatcgtttgggagcaatgagtttaaaaccctttacctacccgtttccagagacgaggtttcttcatgcaggacccaatgtgtataaattcaaaatcagatatgggaagagtatcagaggagaagagatagaaaataaggaagtcatcacccaggagctggaggtcccagttgagaagaaagcagtaggagctgtgatgaggaaacgaaaacacatggacgagcccagctcccccagcaggccagggctggacagggccaagatagggacttccagccaaggccccagcaaaaagaagccccctgtggaaaccaggagaaatagggaaagaaaaacccaacaaggattgcaggagactctggcctctgatatcactgatgtccagaaacaagattctgagtggggacacagcctgccagggcgaattgtcccacccctgcagcacaactcacctccacctaaggagcgagcagccaccggcttctttgggtttctaagctctctcttcccgtttcgatatttcttcaggaagagcagccactcttgagccttccaaatgcagcgctggaaagaggatcatctcttgtagtgactcctcccgagccattcttcctccaactctatccttttcttatgacacttcagtcgtggggaatgaggtccccatgctgagtcctctgtggttttatcgtgtcctttgcccctttataatagattttttcccccaatttaaaacattaagaatggaactttctaaaatgttcatgtcctgagggccggtttaggccttttgtcttcggcacttaggatcctaatgacaataaattatttatgaagagtt

SEQ ID NO: 407086 - DNA, 1000 bp, Homo Sapiens
cgatggagaaacaaagccatttttccataaaaagggatggttcatcattgtgaaagaaatggttatctcgttggggaggaaaagggggggtgaaggcaagaatcactgaaaaatcttaaatctgtgttttctggaataagctatctagacagcctaaatctgattttagtctttataaaaataatatctcgtattctcatacttttctgtcactgtaagcctgcccagtaggcagtgttttgcagactttggggagcggtctatgtgaccaaatattgtgtgtatagacagaatttgaaatcgggtcctgcttcatttacaagaattttggtgggcatctaatcctacataatgaaaaagaagaacagaccatttaaaaactcagacaagattatatttaatatattaattactaaaaaggcacaagattacactgaacattagctactaaaaaggcactgccaagacattcaaacaaatagctattacacactgcagcagattttacaggtttctaattccaacatatgtttgaaaaatccatgagtgttccaaaatatacttaataatggaaggtctgcattaatataccatccatgtgtttttaccatttggtttaatattgaatatactgtttacctcacactaaaaataaaaccagaaaccttatttgtgactttggagtggaagcttccatttttgggtcaaaaatgaatcctgattcttatggaaatctctgttattaagtcatttcaagatgagacaacactgaagatcaaattgtgttgggtatcagtatcttctctcctcgtttatctcttacacctcatcctcccaggatctaccagttgatggtagaaagatgggaaccttatctgaatgttttttttttccatgatgtccaattttgttgtgggaaaggatttggataaagtttttgtttaaattttggtagatttttatctatacaagtttaaataaaattatgttttgtaagttg

SEQ ID NO: 407087 - DNA, 1000 bp, Homo Sapiens; identical to SEQ ID NO: 294694

SEQ ID NO: 407088 - DNA, 1000 bp, Homo Sapiens; identical to SEQ ID NO: 119198

SEQ ID NO: 407089 - DNA, 1000 bp, Homo Sapiens; identical to SEQ ID NO: 294696

SEQ ID NO: 407090 - DNA, 1000 bp, Homo Sapiens; identical to SEQ ID NO: 220457

SEQ ID NO: 407091 - DNA, 1000 bp, Homo Sapiens; identical to SEQ ID NO: 119199

SEQ ID NO: 407092 - DNA, 1000 bp, Homo Sapiens
gaatgtgaaaaacttgaggaggataaaaagatgttggaagaagaaatattaaatcttaagacacatggaaaacaatatggtagaacttagtaaactacaagaatataaattggagctagatgaaagggcaatgcaggcagtagaaaaattagaagaaatccatttacagaaacaagcacaatatgaaaaacaattagagcagttaaacaaggataatacggcttcactaaatatgaaggaactcacacttaaagatgtggaatgtaaattctccaaaatgaaaactacttatgaagaggttacaaccaaattagaagaatataaagaagcctttgcagcagcattgaacgctaacaattccatgtcaaaaaaattaacgaaatctaataagaaaatagcaatgatcagcaccaagctccttatggagaaagagtgggtgaaatattttctcagcactcttcctacaaggcgaggtcaagagtcaccttgtgttgaaaatcttactagtatagtactcaacagtaaatatattcccaaaatgaccgtaagaattcctacttcaaaccctcagacctcaaataactgccagaactacttgactgagggcttctacagcaccgtgggcttcttggatgccaagaggcagaccacaggccatcttgagaaggactctgaaagagcatcagaaggccgccagttcttcttcagcctcagccaggccttggagctggaccaggccattcacttcagtatagagatcttccacactgtcagtgaggtctttgccaatcagtccaggcaggacctggacccagccatggacctgttggtgctgtctcagggacaccagaccaatatcctggacatcatccacatacacaaggaagctcttactaaagtcacggagagcagacaacaagtggcagaagggaagatagacgtgcagaggctgatgatgtcagaatcacaggaacaggatttctttggccactttggctga

SEQ ID NO: 407093 - DNA, 1000 bp, Homo Sapiens
agggcctcagggagaggcaggggagccaggcttctcacctgccttctgccttccagcttcctggagatgatggaggctcacagtcatggccatgcgtccccactggcggccaaggggcagagtccatcctcaggctcccagtcaccagtggtgcctccaggcgccgtgtccacagggagctctagccccggcacaccccagcctgccccacagctgcccctcaatgctgccccaccatcctctgtgacccctgtaccaccctcagaggccctgcccccacctgcgtgcccctcagcccccgccccacggcgtagcatcatctctaggctgtttgggacgtcacctgcctccgaggcagcccctccacctccagagccagtcccagccgcagaggccccagcaacagtccagagtgtggaggactttgttcccgatgaccgcctggaccgcagcttcctggaagacacaacccccgccagggacgagaagaaggtgggggccaaggctgcccagcaggacagcgacagtgatggggaggccctgggcggcaacccgatggtggcagggttccaggacgatgtggacctcaaagaccagccacgtgggagtcccccgccgcccgcgggccctgtccccagtcaagacatcactctttcaagtgaggaggaagcagaagtggcggatcccccaaaaggccctgccccagctccccagcagtgctcagagccagagaccaagtggtcctccataccagcttcgaagccacagagggggacagctcccatgagggctgcagcacccccctgaccaggtggtgcctctgttggcacaggtctggagaagtgcagcagcaccaggccccctgctgagattgagccagggaagggtgagcaggcctcctcgtccgagagtgaccccgaggggcccatcactgcacaaatgctgtccttcgtcatggatgaccccgactttgagagcgaggcatcagacacacagtgca

SEQ ID NO: 407094 - DNA, 1000 bp, Homo Sapiens; identical to SEQ ID NO: 294698

SEQ ID NO: 407095 - DNA, 1000 bp, Homo Sapiens; identical to SEQ ID NO: 294699

SEQ ID NO: 407096 - DNA, 798 bp, Homo Sapiens
cagccctagcttctggaaggatccttcaggctccagacacccaacctacccgtggccggatgtctgcctgagccccaccccgaatgccagcccttcttccctgagctcacccagccccagctccaggactgagagccccaggaagcttggagaggtgtgagagagacaggtgtccagcctcagccccgatccttcacctgcagagcccggcatgtggggctacctgtcgctgatgcctgtcttcctagctgtctgggctatctctggcgtctggatcgtttttgccattgcagtgaccaacaggactgtggacctcagtaaaggctttccctacatcagcatctgcggatccttcccccctcagagctgcatcttcagccaggtgctcaatatgggagctgctctggccgcgtggatctgcattgtccgttaccaccagctccgggactggggcgtcagaaggtggcctaaccagctgatcctatggacgggtcttctgtgtgccctgggcacctccgtggtaggcaatttccaggaaaagaaccagcggcctacgcacttggcaggggccttccttgccttcatcttgggtaacgtctacttctggctgcagctcctcctgtggaggctgaagaggctgccccagcccggggctgcctggattgggcccctccgcctgggcctctgcagcgtctgcaccatcctcattgtggccagtatccttctttgatcgtcctccacgcctgctcgctgcgtagcgtctctgcggcctgcgagtgggtcgtggccatgctgctg

SEQ ID NO: 407097 - DNA, 1000 bp, Homo Sapiens; identical to SEQ ID NO: 224886

SEQ ID NO: 407098 - DNA, 1000 bp, Homo Sapiens; identical to SEQ ID NO: 294702

SEQ ID NO: 407099 - DNA, 752 bp, Homo Sapiens
ctgggaagaagaggaaaatatatttagacgaacaaccagaaatctatttctattctctggaagagcttgtataagataagaaatacttgaatcatgggtttttttaattacttgacctattttcttgctgctggtgctgtcactttgggaattggtttctttgctttggcatcagctttgtggttcctgatttgcaaacgaagagaaatatttcaaaattccaaatttaaagcaattgatgagagatgcaggcaaagaccatcaatggcgaagattaaatctcattctcagtgtgtttttatttctcgaaattttcatactgggagattccaattacaggaggagcaaagaaaaaaggaagcagcacatataaaagcaattaaagatcattctaaagatgaaccccaacttgcaacaaaaaatatcatttgtgatccctcagagaccagctccacaacaaatcgcagcagtgttacattaagcttatcaacattaccatctgattcttattacagccaaagtatagaagcagctgatgactggttttctgatgattctctagtgaaaaggaactctccaatgccttctctcggggaacctctaatggaaaaagtattttcatacctgtcaaccatttcattagaagagggtactgaaagtgtactgaatgacactttatgaccatcaaaaagatgactacattaagggaaaatgttcatgaagaaacacagaggttgaaatataaaaccttc

SEQ ID NO: 407100 - DNA, 1000 bp, Homo Sapiens
ccaagcaatacagagactccctggtattgagacccaggattcactgatctcattgctaccaggtccaccttctaggcagccagactggaaaagagggcaggaaaggggagcaggaccctcccctttaagtgcacagtcaggaacttggccacctcacttatctctacttggctggaatgtggtcacatggtcacacctagctgcaagaaacactgggagatgtagtctttatttctggcagcaatgcgcccagctgcaagttttcactagagaaaccagatggcagatatcaggggataaccagttatctccaccacagcagcatacagacagcctctcacctgccctgtgggacacctgagttcaatgcccagctagctagccagcacttcttcccactatcacctcccctggggcagcatgatgtggggcagtagttcccaagatgagtgattttgcccccactggacttttggcaatgtctagagatgtttttggttggcacaacctgggggggtgctaccaccatctagtggactgagaagccctgacatggggaagagtgtgcatgcccaggagtcagacacacctgcctttaaccctgaggcctctgcctcctccctgtgcaccctcagtgactaatcagagtcccttcccatcacggaacatccaggatactaatgtggacttctctgcattgtgtaagaaccaattcaagaccaggcacggtggcttatgcatgtaatcccagcactttgggaggccgaggtgggtggatcacctgagttcaggagtttgagaccagcctggctaacatggtgaaacctcgtctctactaaaaatacaaaaaattagccaggcgtggtggtgtgcacctgtaatcccagctacttgggaggatggggcaggagaaccgcttgaactgggaggcagaggctgcagtgagctgagatcgcgccattgcactccagcctgggcaacaagagcaaaactccgtctc

SEQ ID NO: 407101 - DNA, 1000 bp, Homo Sapiens
ctcacagttgtcttactgtgaccaaacactttataagcctgcggcaagtcagccttactctcaggaagtggacaatatttggggaaggagaagcagcaggatatttcaggacagtagccttgagaaactggtgcgtgtaggctgcgcactcccagggagacgggacgggcctggcgccggagaggagcccgcactctgcacgaagtctcgccgcccgccggctgttttctggcggagggtgcgccccggagggcggcgagcgcgggtggaggcgtcgccggggtcgggccagcaggctctgggatcgggcttgtgggacaccccgacagtgagtcccacttggggagaaactgagggcagctcgggcggtctggcagcggagaagccaggctggcggaggcccccggccggctgcggattccctccggccccggagccgcagcaggaccggccgggaggcgccgcggaggggagccccatcccggtgcggacagtgcccaccgcgccccgcgagcaccggcgacccaccggcctcttccagggccagcgcagctacccgcccaacttcatccggagcgcgctgtcgtccgtcggcctgcgcgaccgtcagggccgcaccacgggggcgggcagcgacggcaggttcttcggcaggacggccgtcgaggtcgtggggccgatggccgcggccaacgggattggacgactgattattggacagaatggcgtcttgtcgacacctgcggtctcctgcattatcaggaagatcaaggcagctggtggaatcattctaacagccagccactgccctggaggaccagggggagagtttggagtgaagtttaatgttgccaatggagagatctttctgcatgtgatgaaaatcaaggcagtacatgaggaatttgagaaggtccagcaacctgtggctctgaccttgactgagctgctctctctgctcccggacccctccaggatgggtccagaggccttctgctaa

SEQ ID NO: 407102 - DNA, 691 bp, Homo Sapiens; identical to SEQ ID NO: 294704

SEQ ID NO: 407103 - DNA, 1000 bp, Homo Sapiens; identical to SEQ ID NO: 294705

SEQ ID NO: 407104 - DNA, 1000 bp, Homo Sapiens
gaaagaggagggaatgagattattcggaggaggggaatgggggagacagcctgagtaaaaggcttggaagttggaattaacagtggggagcagaagcactcgtagctcttttaggcagaagaatccaggcccaagctggcagaagagacttagagatgctaatggaatttaaactgaagaaaggagctcaatgaagctaagcgccacgccccacaaggggtcatattggctttagttcctcaagcacatgtgcttatatgcacacacacacacatttccatggacccaggtcttgcttgtgtccccaggcaccagtaatttgagcccccctcaaaagacatgaagggggttggggtctgtgtgagtagtggggaggtgcatgtgtatccacatgtgtgcatacactcttaagttgggtgggaagtggattccttgttggtttctggttcagagtgctctcccaccaccagagacaagtgggtaaaaaggtcagtccattgcaggaatatatatctgggagagctaggtcccttggagctctggatgctgggtaacccagaggtaatgtgggtaccctttctgaagctgtcagggctgtgactagcacccttatcacccctcactgccttgtgggaatagtagagggtttttttcctccagagcccctggcctttcagttcttaactatttccctccaggccagaaagttttctttgaggaaggagaggagagggtggcaatgatgcctttgatctggaattggacattgctctgtcagagcacagaggaggctcatatcacctcttccctctcctacttggcccagctgcttggaggaccgaccccatggctgagaatatgacggcaagaggaacagagtttgctccaagtgggaaagggtcccaagcagtccagagaagatgtctgtgtggctttccctccctgcctcccccagctcccacactggcctttgtaaataaatggcgtggtctttgttgtg

SEQ ID NO: 407105 - DNA, 1000 bp, Homo Sapiens; identical to SEQ ID NO: 224887

SEQ ID NO: 407106 - DNA, 1000 bp, Homo Sapiens; identical to SEQ ID NO: 294708

SEQ ID NO: 407107 - DNA, 1000 bp, Homo Sapiens; identical to SEQ ID NO: 294709

SEQ ID NO: 407108 - DNA, 1000 bp, Homo Sapiens; identical to SEQ ID NO: 224888

SEQ ID NO: 407109 - DNA, 693 bp, Homo Sapiens; identical to SEQ ID NO: 294711

SEQ ID NO: 407110 - DNA, 1000 bp, Homo Sapiens
atttgaggaacaaaatcatttttctgagatagagacagagttacaagctgagctggtcagaatggagcaacagcaccaagagaaggtgctataccttgtcagccagctgcaggaaagccaaatggcagagaagcagttagagaaatcagccagtgaaaaggaacaacagctggtgagcacactgcagtgtcaggatgaagaacttgagaagatgcgagaagtgtgtgagcaaaatcagcagcttctccaagagaatgaaatcatcaagcagaaactgatcctcctccaggtagccagcagacagaaacatcttcctaatgatacccttctatctccagactcttcttttgaatatatcccacctaagccaaaaccttctcgtgttaaagaaaagtttctggagcaaagcatggacatcgaggatctaaaatattgttcagagcattctgtgaatgagcatgaagatggtgatggtgatggcgacagtgatgagggggatgatgaggaatggaagccaacaaaattagtcaaggtgtccaggaagaacatccaagggtgttcctgcaagggctggtgtgggaacaagcagtgtgggtgcaggaagcaaaagtcagactgtggtgtggactgtagctgtgaccccacaaagtgtcggaaccgccagcaaggcaaggatagcttgggcactgttgaacagacccaggattccgaaggctccttcaaactggaggatcctaccgaggtgaccccaggattgagcttctttaaccctgtctgtgccacccccaatagcaagatcctgaaagagatgtgtgacatggagcaggtgctgtcaaagaagactgctccagctccctccccttttgacctcccagagtcgaaacatggagcaacagaataccaacaaaataagcctccagggaagaaaaagaaacgagctctggctagcaacaccagcttcttctctggctgctcccctatcgaagaagaggcccactga

SEQ ID NO: 407111 - DNA, 720 bp, Homo Sapiens; identical to SEQ ID NO: 294712

SEQ ID NO: 407112 - DNA, 1000 bp, Homo Sapiens; identical to SEQ ID NO: 294713

SEQ ID NO: 407113 - DNA, 1000 bp, Homo Sapiens
cgcccctgtcaggctgtgtcttatctctcggaacacgggcaccccacagaaggtcctgcctcctgtggtctggagccccccctcaaggaagaaacccatgctgtctgctcgcaactccatgatgtttggacacctcagccccgtgaggatccctcgtctcagaggcaagtttaaccttcaacttccttcattagatgagcaggtgatcccagccaggctcctgaagatggaggtgagggcagaagagcccaaagaagcaacggaggtgaaagaccaggtagagacccaggggcaggaggacaataaaatgggcccctgtagcaatggggaagcagcctccacctctaggcccctggagactcagggaaacctcacttcctcctggtacaatcccaggcccttggagggaaatgtccacctcaagagcttgacagaaaagaaccagactgacaaggcccaggtgcatgcagtgagtttctactccaagggccatggagtcgccagttcacacagccctgctggtggcatccttccctttgggaagcctgacccacttccaacagtgctccctgccccagttccgggctgctccctgtggccagagaaggcggccttgaaggtgctgggtaaagaccacctgcccagctctccaggcttgctgatggtgggggaggacatgcagcccaaggatcctgcagttcttggatcaagtaggtcttctccacccagagctgccggccacaggtcccgcaaaagaaaactgtcggggccaccactgcagctgcaactgacccctcccctgcaactgagacagagggcttctgtagccaaaaatcaaagtcaagggttgagtctgagggttgccaacattcagagtcagaggaattcactgtattgcctgatttcattggtggatattaaggcatcaaagaggaatgactataatcttgaatatgggaactggaccaaagaagaggatttgggggccttatactcctaa

SEQ ID NO: 407114 - DNA, 461 bp, Homo Sapiens; identical to SEQ ID NO: 294714

SEQ ID NO: 407115 - DNA, 1000 bp, Homo Sapiens; identical to SEQ ID NO: 294715

SEQ ID NO: 407116 - DNA, 1000 bp, Homo Sapiens
cttcagaagctccaccattcaagaccagaagctttttgacagaaactctctcccagtgcctgtcttagaaacatacaatacctgtgatactcctccccctctcaacaatcttaccccttacagggacgatggaacagaggcactcaaattctacacagacccttcatacttctttgatctttggaagaagaagatgctgcaggacaccagggatatcatgaaagagaagagaaagcacaggaaagaaaagaaagataatccaaatcgagggaatgtaaacccacgtaaaatcaagacacgtaaggaagagtgggagaaaattaagatggggcaagaatttgtggagtccaaagaaaagctggggccttttgggtatccacccaccttggtgtaccagaatggcagcattggctgtgttgaaaacgtggatgcaagtagctatccaccaccatcacagtcagactctgcttcttcaccttctccttccttctccgaggacaacttgcctcctcctccggggccccctcctccccctttcactggtgcagatggccagcctgctgtaccaccaccgctttctgacaccaccaagcccaagtcctccttgcctgccataagcgatgcccatagcgacctgctttcagccatctgtcaaggttttcagctgcgcagggttgaggagcagcaggaacaagagaagtgggatgtcgtgggcaatgacgtggccaccatcttgtctcgtcgcattgctgttgagtacagtgactcagaagatgactcctctgaatttgatggggacgactggtctaattaactctttctgcctgatgcccaccttctttttctttccttcctacttgccttctttgatgccaaccccaacagacccataggggagaaaagggaggaaaaacctaattttaaggggccgaagctttccctgaagcaaccaaagctatatccaagtgcttcctccaagtcacatgtatttcctcttccc

SEQ ID NO: 407117 - DNA, 1000 bp, Homo Sapiens; identical to SEQ ID NO: 294716

SEQ ID NO: 407118 - DNA, 777 bp, Homo Sapiens
atgggcagtcgcagcggcggcggctcaacaccgcgaggagcgctgggctctccgcccttcccggccacggcgccgagaggggcgcgcaggcctggagtgtgcgcctgccctctcggtgtcggagagacgcccttccacctctgggagcctcggtctgttggggtcgcggagttcgggcgcggctccgggtacccgagaccagcggcggcaacttctaacacgggagatttcccgccaccccaccccgccgccgcgagtcctcgcggggcgtgttgcgtgcggagaatcgacgggatttctctggctgtcgtttgcgctgcatttatccgaatacatccagctcgcaggcatcctgcaagaaacggctcccggctcgcgtgtacgccgacacctcggcccaacgcaggactcgaggtggtttctagtgcccgggtggctgcaagtctgccctccgagggaggctggacaagcggcgcccccaggtcgagcggcctctcgctgcctggcagtgcctggcagcccccacctctgccagtgcttcggaaacccgcctggccaggttcgcccgcggtgaaaaatgaaagcaaattccccaacagaggtagccggaactttcctcgacgaaggctccctcctgcgcctgtgtctggagaacccccagagcgctgcaagttagcaagagagattcgatggcggctctggaaggcgcacgaagggtggggcgggggagcaaagaggccactgggtgacccagcctggtccggggtgaaacgctag

SEQ ID NO: 407119 - DNA, 1000 bp, Homo Sapiens
gaagtccttcttgaagtctaatctcaagaattcatgccatggattgggccaatgttccacctttattggagtctggggacttaggtggaaaaggcagaactggctggttggaggagccacctccctgcaaggggccaggagggagattacggaggcgccaagcccagagctccaacatgcacctgccacagctccaggggagatcgggggcctgccaatttaccccgccccatgatctcatggctgtgtgcgccaggcactggctcagggagcagcatctcacagagaagatacttggatgggccacaggccaaaactgggccaaaaccctggagagggggacctggctcaaggccacaccacatttccatgtcattttccagtggcaccaactgagctggacagatgttctcacagagctacacatgccacagtcatcactagttgcgagagtctccagtgttcattaagcctattttgctggaagtttagtccctggaggattagtccctgcccttaaggagtgccaaagaagactttggaatctaagtcacatctcccctgctgcaattttttcctcttgataatcaaggaatctcactgataaaactctcaatgaggagcagctctccccatgagcaagttcttgccttcattgccagggaggccccagctaaggttatactgggaaaggaatctctggggagtacctggaagaggtcagcttctcctcaaaggaagcctctccagctggtgtactgcaaagccttccaagaccaagttccctcttcctggcctctggaaccagcctgtgtgccagcgctgtgtccccagtaacacacatgagtctctccctcagaagccacagaaggatgcagagagagaccaacccaggattgattctcagcacttactaattgtgtggacataactgctctggacctcagctttgctatctataaaatgagcaccctttttatagatatgaacactttaagag

SEQ ID NO: 407120 - DNA, 1000 bp, Homo Sapiens
ctgcagccctggattcctggatgaggctcagtccttgtgtccttctatcagggattgggacaccctgctgcatgctcttcaccccccatcaggaattcctgaagtccatgctcatggaccatgggaagttaaggaggcggagagatgctggcaagcctcagcaagactgcccaggaccgcccctgtagccctcattccccaggcccactcagcccagccggccagcaaatgtgagaatgatctgcatctgtttttgtgtaggccaaggtcaaggatttccaccgcagctcgaggggctgagggtacagtggaggagccagggtacaaaggaattcctggtgttggtgagaaaggtggccatggaatccgtggtcaggagggacccacgaggctgcgcgggcagcagttctgctgtgcgctctcaaaggagcgtggagacggatgggaattctgcagccacacccactgcggcagtcaagagatgtttccgcaaggtgagctggacatgcctaaggtcctggggctcccgggtggcggccctgggtggcccagcctgtcaggccactgcctcagagaggccccagctccattggacagctccctgcagggatgctgctcggacgattcccgcggagggtcccacaccgggccctgcctgctcagcatgcctccctccagcctgtcttgtctcagggactggcctgagaattcctcggagcagaggaaggccctggaccccgagggaggaggaattctgaaacgccgttactggaaatgtcctctcccttgcgtggcctgggaggtcctgctcctgtgagccttggccgctggctggtaaccccactccctctgctgcagcacccccatacgggcctcctctgcctgttcttggacctctggctgcagatcttagaaggctgaaatgggtagatgcgaggcctgggagcaccgtggcccctcctggcccctgggcctcctgcctggcacttcatgtttctct

SEQ ID NO: 407121 - DNA, 574 bp, Homo Sapiens
atggggcgtccttactcccagtctttccagatgttcttcccactcctcaactgctcctggctcagaaaccctgcacacctggaagaaagtgagaaccagtttttcaacaaacacattgcacagacttattgtgaaccccgggtggaatcaagcatcggaggaagagaacgtgggtcttgctgtgtccctaggctggagtgcagtggtgcagtctcaattatgccagatggctctgaggtccaagtaaaagataatatttgcaaccaactcactggagttgaccatcaaaactcttttccaggtggaaaagcaccctgaatccagcttcctgctatgaatgaatactgagcttgggttggtggaaattgattttcgagataaagaatccagccaggactgtgaagccccagggaatggctgcacttcaagtcagaaggagcctgggtccctgaatcatcatgtggaaggctctccacccagttcaatggtgcaatggaccacaagcaggaacttaatttagaatgtgcttattttgttagattttgtaattaaaaaatggatcccactctgactg

SEQ ID NO: 407122 - DNA, 787 bp, Homo Sapiens; identical to SEQ ID NO: 294717

SEQ ID NO: 407123 - DNA, 833 bp, Homo Sapiens
gttaaacaagtgcttgaaggcagtatgcttggtaaaagtcatcgccattctctaatcttgagtacccagggacacgatacactgcggaaggctgcagggacctctgcccaggaaagccaggcttgcatgaaggaaatgatttcctatgattctgcttactgcttaaaaaaattaatcaagttttctgcctgacaagatccagtatctgccggaggagccccaccttctgctactattatgttcttcagatgagtagaagagagtggggagggagagagcaggaagaagaaaggaagaataatgtcttgaaattgttttctaaggataatggtctccagcttcgtcaatgttcctgcaaaggacatgatgctgactttgaagatgcaagcttccacatctacagcctcaaggaaacaaattcagccaaccaactgagggagctttccttgtcctgcctcaagatgagatcacagtctgcccaacaccatgatttaggccttgtgacacctggtatggaagacccagttaagttctctccaaactcttgacccacagaacctgtgagaaaatatatggatattattttaaactgctaaatttgtagtaatttgttatgcagcaataaaaaaaactaatgcaaggagatatcaattattgtaaaaagcttagcttttgttttaaaatatagttcaccagtagtaagttactaataagtaactaaacaaataaaagcaagccatttacaaatcaataataagagtaagtcatgaactaaagattgtaattaatcaatttctgtacgcctgtaatgaaaataaaggaggaaaagaaaa

SEQ ID NO: 407124 - DNA, 770 bp, Homo Sapiens
agtctcactcatgccctctccctctagtgtgggaaaacaagaggaacctccaaaatttcctagctgcacaaagaaattggaagaaaaacaagaagtttccttccgcaaacttcctaaaaggtgccatgtgttttcctaaaaccaaggaaaattctaaaatagaactaccatatgattcagcaatcccacttctctaaatctccagaatctccagggattggaaccaagtgctttatctttaccatataccaatccatgaatcaactccaaaacagatctctagaaacagacaagactgactactgcctgaaggtttctgacaccaagttcctgagatgtaccaaatatgaaataattttagaattcgatctcaaatggcccttttgcaaactccaaaatgttgtgtacatggaacagaggctgttaggaaatttgccttgcaactaaaatttaagcaaagaaacaacttgtcatctacctgtttacctctaacagaagcttatacacatatgcatgggcttggagaaaatgatattcacttaaaaacaatataataatgacatgtacagagccatatagctccaaaacctttcaagtgctacgtccatttgtgaggacatatttatcagtctagtactaccttgtaacagtacaaaagtacattcacattattttttctaaaggagcttagttcctagagggaaaaatacactcttctcaaagttttataataataattaacataccctacatgatgtttgtgagactca

SEQ ID NO: 407125 - DNA, 1000 bp, Homo Sapiens; identical to SEQ ID NO: 294719

SEQ ID NO: 407126 - DNA, 1000 bp, Homo Sapiens
acccctctgccccctcccttgttctcaagcctgctaggtacttttcactgagcacttccgggaagagcaggcacccagatctctgtccttgtcctggcacaggctgctgctgcttccggcccccgacccttcctctctgcagcaacccgggggaggtatgccactgtgagtgccctggtgggcacactgagctggcagagatggaagtcccagaagggtggggtgggggtgtcatgccatggtggaggagtttggggccactccttgcctgcctcaaagggggcctggctgagggtgcttcttgaccacaggggccagggctgcctagggtggcgcagggctgggcctggagtttgggatgcaggcttgttaaacacagggcagaaccccaggttgggaggggctcagtttgcaggcccaggcccgcaggcccactgctggtcccagggtgagacaggtgagaagagggatggccagcacacacttgagtccccttgggccacaaaggctggggcacgcccaccgttatgcagatggacagttgaggtggctgcaggagaagggttcccagggcctgtacaacacgtggaagcactaaacggccccgtttggggtttgggggcccttcccgagtcttgagaggtcttgagaggtgtgctggggaaggtggcagcctcttgtagcttgatcttcctccaccctgccccacccctaggtctctttattgattcaaaggttaaggaagctcctgggggcttgagggggtggcacagttttggtggggcccagtgaggacaaatctggggggtgagcagggcctcctcttcctcctggtgtttgaacgtttaccattccatgtgggaccattgtgccaatttgtccttaagtaaatcacttgtgctgtgtgcagtataagccttttatttttcttagaacttttcaaaataggtaacacatgcctgtctgtcataaacagtacaaacgtgagcaaacactgtca

SEQ ID NO: 407127 - DNA, 857 bp, Homo Sapiens; identical to SEQ ID NO: 294720

SEQ ID NO: 407128 - DNA, 1000 bp, Homo Sapiens; identical to SEQ ID NO: 119201

SEQ ID NO: 407129 - DNA, 829 bp, Homo Sapiens; identical to SEQ ID NO: 224889

SEQ ID NO: 407130 - DNA, 916 bp, Homo Sapiens
tagtgaaaaaggtgcctgcttctccttctgccatgattataagtttcctgaggcttccccagccatgcgtaactgagtgaggacctagaattttaatgtctaatatgcggtgtgaattaaagaagcggccttgctatgctgaccttttcaatattctaatctttgctttgctgacctctcaggcctcttcctggcaacagttaggcttttgagaggagagagagctgagactgttggctccttcccatttatgagagagccacatgacatcagcccatagactgtggagagtattccagatctatcacattctgcgattctgcgattcccagaaggctggtcatgaaaaaattccctcttcagtttacatatatggcagtggcacttctagatatctgttgaggcctggaaggggcaaaacaattcaggaagcagttgaagataaaggggtttaccatggaagagaagatccaggtgccttcatggaaatgcttgtggttgaaaagagatgaagatgagggtccctggaaagaggaagaaccagccaggaaaattataccattagcaagactggcatcagcaagtagttcgcagtgttggttgttcttggtttcgcaggattttataggagttctgaacactgggaagtccaagagcaaggcaacaacagattcaacatctgaggctctgatctttttcattaaagaaaaatcactctcacagggttctgctgagggtgtgtgattacagatgttgccaaggagcactccgggaacctctaatggggaggacacaagacaaagcaaatggacagtcatttttccaagagatgggccccctgccatgaggaagttcttcaggctgcgtctcctttttgtgtttttatttgatctttaataaagaatattaagactga

SEQ ID NO: 407131 - DNA, 1000 bp, Homo Sapiens; identical to SEQ ID NO: 294724

SEQ ID NO: 407132 - DNA, 885 bp, Homo Sapiens; identical to SEQ ID NO: 294725

SEQ ID NO: 407133 - DNA, 589 bp, Homo Sapiens
cgagatacaggcgtgcaccccggagaggacaggctgaggaccctcaacagagacaggaaaacctgcccgtcactgagaaatggttggaaaaaacatgagtaaaagcctcactcttaagaatcctggaagagtagcatacgattcaggcgggataaagatgttttgggagaaaaaaatcgagcatcacgcaagacacctgcagaacgaggacatcagggttcgcagaagcgctctgaacaagctccgcgtgggatgggctgagcagctggaggggaggaacaagatgctgcagggcccagggagatgcccagacagggtcccggaggccactgagtccctccacaccaaggacaagaaggcggcctgagggcccacgagctccagactctgcatgagcttccggagggtcatggagaaggaacaccacgcgtggggtccaagcatccacgccagagttcacaggatcttcatcatggaaatggcccgcacctcgctgaccccgtaataatcccacctcggggtccacgctgcagcagagtcccagggttctctagcgcatctctggtgcccaataaaacctaagtcaatt

SEQ ID NO: 407134 - DNA, 1000 bp, Homo Sapiens; identical to SEQ ID NO: 294727

SEQ ID NO: 407135 - DNA, 913 bp, Homo Sapiens
gtttgcctgtctggctgccttgggtctttggtttgctgagggctgcttggaggctatgccctcctctccagcccctgcgttgggaagtcacaggagaccggagctgcgcacgacatcacagcgccgaattctgacccaatctgaatcaaatgtcacccataccctgtcttcaaccaacaaaagagcaacgaagccagagacatcatcttcagctgccttggcctgtgtgccgggggtcccgtcagctgcaggacacgggagggatggagtgaagcagaaaggccccgccgtgaccacactcatcccagaagagcctctctgttggcatgaaaggaaatcacaaggaaagggacttttcaaggtcagactgcaccagtggaaagtcagcaccagcccccagggctcgaggcagcctgtgccctttccactaactgtgccaactctcaccaggggaaggctgaccaggaacaaaggcccttagaggagagcagaactcctgcagcctgcacttccgagagatcctgctccacggagcccggctctactcctgcaggcagaacctgccagcccgcagatgctgggggctgaaggatcccggcgacaccaagcgtcaggtcaggcgtcagaatccagcgcgtttgctcctcgagaacagcgcgccacctgctcccaagtgtgtgaggggctgcagtgccgagctccacttcacaagactcactcctgccccgccacctcctgagcagacgcagtcaagcccgacctacctttcaacaaacatgtattagcactccctccatgccaggcactgtgccaggtgcgagggtaccatgaccaagccaaggccccaggctcagagcactcacacgccagtggagggggcagccctgtgcgacccagcagggcacaccccacc

SEQ ID NO: 407136 - DNA, 673 bp, Homo Sapiens; identical to SEQ ID NO: 119202

SEQ ID NO: 407137 - DNA, 487 bp, Homo Sapiens; identical to SEQ ID NO: 224890

SEQ ID NO: 407138 - DNA, 1000 bp, Homo Sapiens
acgaggcaggcgaggcgcggcggctgcagcgacgcgtggctctggcggagtgcgaggacagctacgggaacacgccgctgtcggaggcggccgcaggcgggcagcccctggccatccagctgcgggccgagctcggcgccagccccaacagcaagggcgctttcggtccgacgccgctgtaccgtgcagcctttgggggccacctggcagctgtggaggtgctcctgaagctcggagcagacccccgggtgtacgcagaggacgggagcacccctgagcgggtgtggaccccagaggtggcctcactggacacagtggtgagcgtgctgcgctcgtgggacctgagcctcacggaggccatgctccagaacatggaggctgagcagcagcgccgggcccaggaggcccagaggcacaaggaggccgaggctgagcggtgtggaagtatgaccctcaaggtccaacagctgaccagggagcagcagcagtgtcacaaggagccttgccagggcctgcccgtacgcccacccagctgcaacaggcctactgtgagcttagccggaggatctcagagcacgaccagtgtgagtggaggtgcatggacaagaccaagctcacgctgcaggccatcaaggacacagaggcccaggtggacaggctgcggcaggaggcccagaaggccgaggaggcgctggctatggccaggctggagcttcgggagcagacgcaggagggtgggcctggcatggggcgccggctgggggctgggacatacagcccagggcggggtccggcgtcgggcttgcctgtcagctgcactctgctaccccgacaggggaggaagaggcgcctgggctgaagtgccaggtcaccgagctgcacgatgtgctgatgaaagatgtaggcaaccgcatccgtgccgatggccggtcagttctccgggccagacgtgggcgatttggggtttggacagacagcagtgacctgatgggtgtcccca

SEQ ID NO: 407139 - DNA, 1000 bp, Homo Sapiens; identical to SEQ ID NO: 119203

SEQ ID NO: 407140 - DNA, 1000 bp, Homo Sapiens; identical to SEQ ID NO: 294732

SEQ ID NO: 407141 - DNA, 1000 bp, Homo Sapiens; identical to SEQ ID NO: 224891

SEQ ID NO: 407142 - DNA, 1000 bp, Homo Sapiens; identical to SEQ ID NO: 224892

SEQ ID NO: 407143 - DNA, 1000 bp, Homo Sapiens; identical to SEQ ID NO: 294734

SEQ ID NO: 407144 - DNA, 1000 bp, Homo Sapiens
gctctgtcatctacaacatgaacactgcagatgcggctttctacccagatcatgcactggtgaagaagtacatgaagctgcagcacgtcaaccgcaagctggagcggcgagttattgactggtatcagcacctgcagatcaacaagaagatgaccaacgaggtagccatcttacagcacttgcctgagcggctgcgggcagaagtggctgtgtctgtgcacctgtccactctgagccgggtgcagatctttcagaactgtgaggccagcctgctggaggagctggtgctgaagctgcagccccagacctactcaccaggtgaatatgtatgccgcaaaggagacattggccaagagatgtacatcatccgagagggtcaactggccgtggtggcagatgatggtatcacacagtatgctgtgctcggtgcagggctctactttggggagatcagcatcatcaacatcaaagggaacatgtctgggaaccgccgcacagccaacatcaagagcctaggttattcagacctattctgcctgagcaaggaggacctgcgggaggtgctgagcgagtatccacaagcacagaccatcatggaggagaaaggacgtgagatcctgctgaaaatgaacaagttggacgtgaatgctgaggcagctgagatcgccctgcaggaggccacagagtcccggctacgaggcctagaccagcagctggatgatctacagaccaagtttgctcgcctcctggctgagctggagtccagcgcacttaagattgcttaccgcattgaacggctggagtggcagactcgagagtggccaatgcccgaggacctggctgaggctgatgacgagggtgagcctgaggagggaacttccaaagatgaagagggcagggccagccaggagggacccccaggtccagagtgaccccatccccatccccaggattcccacctcctagtgaatccagagttgtagtaaagcctaactgctgc

SEQ ID NO: 407145 - DNA, 1000 bp, Homo Sapiens; identical to SEQ ID NO: 119206

SEQ ID NO: 407146 - DNA, 1000 bp, Homo Sapiens; identical to SEQ ID NO: 119207

SEQ ID NO: 407147 - DNA, 1000 bp, Homo Sapiens; identical to SEQ ID NO: 294737

SEQ ID NO: 407148 - DNA, 1000 bp, Homo Sapiens; identical to SEQ ID NO: 294739

SEQ ID NO: 407149 - DNA, 1000 bp, Homo Sapiens
cctcctgtcgcgtcccctgcgtcccacctccctcctgcccggcagtcccgcccgtgcccccagcctggcgaggaagccgtccaacagtagccccggggccagctcccaacagaaagggctgacgtggctccaggactcaggggcgctccatgggaggacgaaggaagcccagccagccaggagccactcctcacacctccaagtgtggccaagtgggccctgaggccaaggacttacttgctcttcctggccatctctccctttctggaggaggcccggggcctgtgtacaccaaggctgacctcgtgctgcctgctgggacccagccctccctgccgctcccctgtgagcccagtccaccgtgggcgcccagggccagggacgggccagcgcccggctgcatcgcgaggttgggagtcacagtggctgtgggcctggacgggcacagccagagcaggggcccatgggaagggcaagggatggggaagcctgggccggccccttccctgctcccaaggcaggtgtccaggtggcgggagcagcaccaaggacagccaggcttacccggtgggaggagcaggagcagagcaggtggcagggaggaacccctggcgaggcagggagcactgaagtagggaagcagcaaaaaatacaggctcccaacgtggctccactgtctcatgaagtgtcaaaaatttaaaaatacacctcactttctattcagcatcagctattgaaatggaattctccttttctattcccgttgtacatagccccacgccctgcctccggctttgtcctctgtacagagccccctgtcccctctgctgttccggacccttttcttgcagcagctcaaccccccgactcactcagatccccaggactgcagccgagccccgggcttcctttcttaccattctgtatgcttccaaggtgtgaccattcaaactaacagtattattaagattattaataaagatttctttcttcaaaccag

SEQ ID NO: 407150 - DNA, 1000 bp, Homo Sapiens; identical to SEQ ID NO: 294740

SEQ ID NO: 407151 - DNA, 1000 bp, Homo Sapiens
ctctgtgctcccctcacccctaaagcagctgtctcagctcagggatgggtttgcttttagaaaggcctttctgacgcaggacatgtctcgccagctgggtcccaccagggctccagagcccaagacccagcatccacgggcggctctgggaagcctggcagctccgctaactccaacattcctcatttggcagcaaattcggcaggagaaaaaaagaaagagcaagtggctggaaatgctgggcaaatgcgagacatataaaaacagcaaaaagctcatagatcgcatctataagggcattcccatgaacatccggggcctgatcatgaaggagaagggcaagaggtcttctgaacacatccaccagatcaaactggacgtgagcaggactctccagaaccatgtcttcttcagggatcgatatggagtgaagcagcgggaactattctacatccttgtggcatattcagagtataacccggaggtgggctactgcagggacctgagccacattgccaccttgtttctcctttatctgcctgaggaagatgcattctgggcactggtgcagctgctggccagtgagaggcactccctgccgggattccacagcccaaatggcgggacagtccaggggctccaagaccaacaggagcatgtggtacccaagtcacaacccaagaccatgtggcatcagatctctctcgggctcaccctgcgcttgtgggacatgtatttgctggaaggacaggtgttgatgccgatcagaagcattgcttttaaggttcagaagaagcgcctcatgaagacatccaggtctggccttttggcatgttttcggaaccagttcttccatacctgggccacggacgatgacactgtgctcaagcatcttagggcctctacgaagaaactaacaaggaagcaaggggacctgccacccccaagtgggctccagtgccatgtcccctcccatgtcaccctctggggcagtcaatag

SEQ ID NO: 407152 - DNA, 1000 bp, Homo Sapiens; identical to SEQ ID NO: 294742

SEQ ID NO: 407153 - DNA, 1000 bp, Homo Sapiens; identical to SEQ ID NO: 224896

SEQ ID NO: 407154 - DNA, 1000 bp, Homo Sapiens; identical to SEQ ID NO: 119209

SEQ ID NO: 407155 - DNA, 921 bp, Homo Sapiens
atgacacatggcaaactcatcagtgtccgcagctctaaagccagacagtccctcttctctgctcacacaggaagcccaggaagcctctgcctcagagatgctgccgctgctgctgccgctgcccctgctgatgcaagattccggctggagatgccagagtccgtgacggtgcaggagggtctgtgcatctttgtgcactgttcggtcttctacctcgagtatggctggaaagattctacccctgcttatggccactggttccgggaaggggtcagtgtagaccaggagactccagtggccacaaacaactcaactcaaaaagtgcagaaggagacccagggccgattccacctcctcggtgatccctcaaggaacaactgctccctgagcatcagagacgccaggaggagggacaacggttcatacttcttttgggtggcgagaggaagaacaaaatttagttacaaatattccccgctctctgtgtatgtgacagccctgacccacaggcccgacatcctcatcccggagttcctaaagtctggccatcccagcaacctgacctgctctgtgccctgggtctgtgagcagggaacaccccccatcttctcctggatgtcagctgcccccacctccctgggccccaggaccctccactcctcagtgctcacgatcatcccacggcctcaggaccacggcaccaacctcatctgtcaggtgacgttccccggagctggtgtgaccacggagagaaccatccagctcagtgtctcctatcctctaatgaacccagtgattgaagcctccctagaagacggcacagggaaatcaggaaccgtggaagaggtggttgttttggccgtgggggtagtggctgtgaagatcctgcttctctgcctttgcctcatcatcctcaggtaa

SEQ ID NO: 407156 - DNA, 1000 bp, Homo Sapiens; identical to SEQ ID NO: 294744

SEQ ID NO: 407157 - DNA, 1000 bp, Homo Sapiens; identical to SEQ ID NO: 294745

SEQ ID NO: 407158 - DNA, 1000 bp, Homo Sapiens; identical to SEQ ID NO: 294746

SEQ ID NO: 407159 - DNA, 1000 bp, Homo Sapiens; identical to SEQ ID NO: 294747

SEQ ID NO: 407160 - DNA, 1000 bp, Homo Sapiens
gaagatttttatgggtgctacaagttgaccacagcagcagtaaagatgactctgaagaatggcatgggatggatcctttcgaatgcatttgagcagcggtctccaaccacagggccacagagctggagctggatctaccatgaaagacttctgaatccaggaagagagactgactgggcaacatgttattcagggtctccctctgttgtccaaggctggagtgtagtagtgctatcgcagctgactgcagcctcaaccttccaggctgaagcgatcctcccacctcaacctcccacgtggctgagactacaggtgcttgccactatgcccaactaatatttggaattttcgtatacgtggattccagaggggtgacagcgaaacgtgggaccatccagttgcaggaaaacaagcttaacatgcccactgattctacattatgctcctacctcccggcagcctctccaggcccagaactttctccagtcagcctctacagaccaagctcatgactcacaatggcctatttaggcccataccctacctcacggcagtctccgcagatgagcctactgcctcacaacagcctccacaggcacagctccatcgttacaatggcctctttagacccagctcctgcctcccagccttctctccaggccctgaactttctcaagtcgacctcaccaggcccagttcatgcttctttgcagcctctccaggcccagctcttcctctcagcgcctctgcaggcccagactgttgtcaagtcggcctccccaggcccagctccggcctcccggcggcctctgcaggcccaagtcgtcctcaagttggcctccccgggcccagctccgtcctctcggcggcctctccaggtgcaaaacttcctcgagtcagcctctccaggcccagctcctcctgcctcccagtggtctctttcagcccagcccagctcatggctctcggcggccttcccaggccccgcttttgacttttg

SEQ ID NO: 407161 - DNA, 1000 bp, Homo Sapiens
taagcaaacacgatgtctcaggatggacggtgaaattctggacctcacaggaccctgctttctcggctgtgattcacgacaaactccaggtccccaacaccatccggaaggcatggaacgaccgggacaaccgctgtgacatttgcgccactcacctgaaccagttgaagcaggaggccatccagatggtgctgacgttggagcaggcagccggcagtgagcactacgacgcctcgccctgctccccgccaccgctctccaacatccccaccctggtggggtcccggcacgtgggtgggctccagcagcccagagactgggcctttgtgcccgccccctgtgccacctccaactacacaggcttcgccaacaagcacggcagcaaacccagcagccttggggtcagcaatggggcggaaaagaagagcgggtccccaacccaccaggccaaggtcagcctccagatggccaccagtccaagcaatgggaacatcctcaattcggtggccatccaggctcaccagtacctggatggcacctggtccctgtcgagaaccaacggggtcaccctgtacccataccaggactccgaagctcttgtcacacgtggcaggggccggttagaagactcggcggctgcgccagcgctgatgagcgaggacagaggagcatgaaactggtgctttcctgtaaaatattcaaaagcagatggcctctggatcagtgccagagccattccccgggcagagaagcatctagaccttgtcactaccaagggtgcggctccacacccgcgggacccgagcctctagaaatgagggagaagacgactctgcctttctgcaatttagacgtcgcaaggatgaaaacgatgcggacaggctttccagcagtgagcctggggaaatctgcgtcacatgggcgacagaaggtccctcgaatccctcaatccccgtggcccgcaccactgtgtaataatctccaaaggttgcagtaggaa

SEQ ID NO: 407162 - DNA, 1000 bp, Homo Sapiens; identical to SEQ ID NO: 294748

SEQ ID NO: 407163 - DNA, 1000 bp, Homo Sapiens; identical to SEQ ID NO: 294749

SEQ ID NO: 407164 - DNA, 1000 bp, Homo Sapiens; identical to SEQ ID NO: 119211

SEQ ID NO: 407165 - DNA, 1000 bp, Homo Sapiens; identical to SEQ ID NO: 224897

SEQ ID NO: 407166 - DNA, 1000 bp, Homo Sapiens
cgaccaggaggaagacgaggccctgcgggtgctgtccctgcgcgccctcggcaacatggccctgggcgcccccaagaaggtgaagcagtaccggaaggtcttgctggagaagtgcctgggccccctgagggagcccgtgagcaacagcgtgactgccgagggcatggaggccctgaccaagatcctggctgagctccgggaaggggatgtggggtcctctttcgacgccatgtctgagcagtgcaggatcttcttcgacaacgagagcgagctgctgcgtctgaaagccttcatcctctttggaaagctggcaagggtggtcgggatgtccaagaagcatttcttcaaaggggaggtgaagaaggcctggatccccctcatgctgcactcccaggacccctgctccaatgcagcccaagcctgtatggctaccatgtttcagtgtgtgcacttctggggctggaagtccctggagcatccctcagggccaagtgataccgctactgatgacaagatgaccgttttccagacaaccatgtgctccatcctgactcggaaaaagccggctgttctctaccgcttcttgctagaaacaatggcctatgttaaaaataacttgtcaagaatcagaatcgctgcttgcaacttggcaggaattattatgaagcagatgtctacacattatctgaaaaagctggacttcccagcattacggaattccctccaggaactacagctggacccggatcccggggtcaggagggcagccctggagacgctcacagtcttggatagctgtagtcagcatgggtttctggcttcaccccaaggaatgtcctaggtggtccaaacataagacgtaaactgtcttcttagtgccaaatgcaagccctttttaatttagtttgtaagaagtttagtttgtaggaaaaacactattgtaaaataactagtatccttttgtttccttccgttgaaataaacctccactgtcgttgga

SEQ ID NO: 407167 - DNA, 1000 bp, Homo Sapiens; identical to SEQ ID NO: 224898

SEQ ID NO: 407168 - DNA, 1000 bp, Homo Sapiens; identical to SEQ ID NO: 119212

SEQ ID NO: 407169 - DNA, 1000 bp, Homo Sapiens; identical to SEQ ID NO: 294754

SEQ ID NO: 407170 - DNA, 1000 bp, Homo Sapiens; identical to SEQ ID NO: 119213

SEQ ID NO: 407171 - DNA, 948 bp, Homo Sapiens
cagggctgtgaccgtctatgacaagccggcatctttctttaaagagacacctctggacctgcagcaccggctcttcatgaagctgggcggcacgcactctccattcagggcccgctcagaacctgaggacccagccacagagcggttggccttcacagagcgggatgctgggagtaggctggtgacacgtctccacgagcggccagctctgctggtcagcagcacaagctggacagaggacgaagacttctctgtcctgctggcagctttagaaaagtttgaacaactgactcttcatggacacaactttccttctctcgtctgtgtgataacaggcaaagggcctctgagggagtattacagccgcctcatctaccagaagcatttccagcacatccaggtctgcaccccctggctggagggccgaggactacccccgcttctagggtcggcggacctgggtgtctgtctgcacacgtcctccagtggcctggacctgcccatgaaggtggtggacatgttcaggagctgtttgcctgcgtgtgccgtgaacttcaagtgtttacatgagctggtgaaacatgaagaaaatggcctggtctttgaggactcagaggaactggcagctcagctgcagatgcttttctcaaactttcctgatcctgcaggcaagctaaaccagttccggaagaacctgcaggagtcgcagcagctctgatgggatgagagctgggtgcagactgtgctccctttggttatggacacataactcctgggccagaggctaaaaccccagggcccctgctgtccttcccgcagcttcttggagtgtcagggcaaaccctttcgagcagcgcctcccagtggccagaagctgaaatgacggcagtggtgccacctggtgaatgacccgggaagctgtggttggccctgatttcttctttggag

SEQ ID NO: 407172 - DNA, 1000 bp, Homo Sapiens
cagctgccaccttgatgtagtaacctgccttgcactggacacctgtggcatctacctcatctcaggctcccgggacaccacgtgcatggtgtggcggctcctgcatcagggtggtctgtcagtaggcctggcaccaaagcctgtgcaggtcctgtatgggcatggggctgcagtgagctgtgtggccatcagcactgaacttgacatggctgtgtctggatctgaggatggaactgtgatcatacacactgtacgccgcggacagtttgtagcggcactacggcctctgggtgccacattccctggacctattttccacctggcattggggtccgaaggccagattgtggtacagagctcagcgtgggaacgtcctggggcccaggtcacctactccttgcacctgtattcagtcaatgggaagttgcgggcttcactgcccctggcagagcagcctacagccctgacggtgacagaggactttgtgttgctgggcaccgcccagtgcgccctgcacatcctccaactaaacacactgctcccggccgcgcctcccttgcccatgaaggtggccatccgcagcgtggccgtgaccaaggagcgcagccacgtgctggtgggcctggaggatggcaagctcatcgtggtggtcgcggggcagccctctgaggtgcgcagcagccagttcgcgcggaagctgtggcggtcctcgcggcgcatctcccaggtgtcctcgggagagacggaatacaaccctactgaggcgcgctgaacctggccagtccggctgctcgggccccgcccccggcaggcctggcccgggaggccccgcccagaagtcggcgggaacaccccggggtgggcagcccaggggggtgagcggggcccaccctgcccagctcagggattggcgggcgatgttaccccctcagggattggcgggcggaagtcccgcccctcgccggctgaggggccgccctgagggccagcactggcgtct

SEQ ID NO: 407173 - DNA, 1000 bp, Homo Sapiens; identical to SEQ ID NO: 294757

SEQ ID NO: 407174 - DNA, 1000 bp, Homo Sapiens
attgaataattacagaaaagggctacatttaaaatttgtatttgtttttcttacttagtgaaggttgtgttttttttcatattcattggccatgctatattcattcttttgagaattgctcattcatattttttctgttgcttgcttggataatttgctctttttttggcatataagttcttaagaatgtccgtcctttgtcatatattgtaactttttttagccttatttgtcatttaacatagtttgtgatatttcagtatagaagttgttttctttaggagtctacctttgtgtatgtgcttgaaactatttttgtaatccaagaatggataaatgtccttattttcttctagtattttcttatttcacttttacacctgtctttaaaaggaatttaaattttgtttatatacattaactaaatcaatacaagtttggggtgaaaaggaaatttttaatccatctcaaatgtatttgggtatattatataaggtagggatttgattttatttcgaagaatttaccaattggttcagtatgtgaaaccaccatttcccctctgattagtaatgctatttttatagaatattaaattcttatgtgtcttttgtgtcttaggccaatttctgggccttctgggtttttctatactgtcaataattatcgctttaattggtgttaatatttggtagtacacaggatctcccctgttcttttaaattttgtgaaatataacttacaaataagtacttaaaacagagtttaatgggtaaagcaacagctgtgtaatcacaaactagatgcagaggaggtcttgccagcactccaaaatctctgtgtgtcccctcttgacactcactgtttccccgagagctaactatcctgacgtacggtaattctccctctgtccttttaagaattattttaccagttatgtgtataacaatatggtttacattttgctcacttttgacttatataaaaatagaataatact

SEQ ID NO: 407175 - DNA, 1000 bp, Homo Sapiens
aggaatctgttgaacacagcgaccagatgaccttccatttcaccggcggcagcagtttcagcgtgcagttcccaaaccccaaagctgaccctgcgccccatttgaatacggccagagcctgctggttcactttgggtagagccgtgcctcttgggcaggctcccatagtgaccacgtccccacgaatgggaaagcacgttagtgggagggacgtaggacacgtgtggaccgccaggccctctcagtccattttccggggctgctcggtgctgctgttaagacgtgagtgcatttcacttggaagaacccattgtacaaagttcaaggctaagagttctgaattctggcgtcagcttcctcaggattttcttcagttgcaagtacctttccactgaaaatatgagcatgcccgcctggctagtaggcatctgtaagagtgtcgccaggcccgcgccagctgaggcctcagactagccaggcaagagccgtctgaccagttggctggcggtggttctggtggagcacgagggagcccgggtggtgccctgagcctcgagctgctctctgtcactgtcttgaatcagactcagaaatggcttcttcccagccctgcctacaagtttttctctggggtcctctttcaaggatgtccacggtaccttcctcctgaaacttgaggaagtcttttgtcttccagctgctcagggttctctggtccaagaccctgctttaaagagagtctttggcgtgctcagactccagcgctccgttcttcaaggaggttgacttgcctctcgggccccgtaggtaccaagagactgtttacctcccagaatgtttgggcttgaagttacattaaagtgaagttatttgaaagaaagaaaacctcatcatttctaaggatgacttaattactgtgccttttcctttctttttacacatcctactgtcccttagggtaaaattttcagcattaaataaaacatttcaaatatattgt

SEQ ID NO: 407176 - DNA, 1000 bp, Homo Sapiens; identical to SEQ ID NO: 294758

SEQ ID NO: 407177 - DNA, 1000 bp, Homo Sapiens; identical to SEQ ID NO: 119214

SEQ ID NO: 407178 - DNA, 1000 bp, Homo Sapiens
tcctgcagctgcagcagcagcccctcccccctccacattgcaccccacgtcggggtcactactcaatgcagtggatggaggcccctcacatttcttggcctcagccacagctgcagcacgtgtccagaggtcagaagtgagatataaccagagatcccagacctcccggaccagatcctgcctccaaggaaatgccagctccagctcccacagctctacggaaggcctcccgcaactaaagcggaggagggggccagcctcatcccactgccagctggcccacagttcctcaaacacagtgagtgaggacggacctcaggctgtctcttcgggtcacacccgctgtgagaagaaggcaggtacagcaccagggcagacacttgcccccaggggtggctcccccagatcccaggcctctaggccccgcatcaacactgcactgcacgttgaggacaaggccatctcggactgcagaccctcacggccttcccacactttgtcctcacttgcaacaggggcttcgggtgggcctcccgtttctaaagcacccactatggatgcacagcaggacagacccaagtcccaagactgcctgggcctactggcccccctagcatctgctgcagaggtctcctctacagctcccgtgtctgggaagaagcacagaccaccaggacccctgttctcctcctcagatccccttcctgccacctcttcccactccggggactcagcccaggacacctcgctgattcctgcccccttcacacctgcaagcagggatgccggcatcagaagaatgtttcgtgctcgagaacaacaggatgctttggtcctgtatcagcaggacgctttttgggtagatcctactgccaccctactatcgggtagatcctactgtcaccctagctatgggcacatgtcagagtcccatgtaataaaggagacaaaaggaaaccaccacgagtataaactaagaaaagtactccaaggtttctaa

SEQ ID NO: 407179 - DNA, 1000 bp, Homo Sapiens; identical to SEQ ID NO: 119215

SEQ ID NO: 407180 - DNA, 1000 bp, Homo Sapiens; identical to SEQ ID NO: 224899

SEQ ID NO: 407181 - DNA, 1000 bp, Homo Sapiens; identical to SEQ ID NO: 119216

SEQ ID NO: 407182 - DNA, 1000 bp, Homo Sapiens; identical to SEQ ID NO: 224900

SEQ ID NO: 407183 - DNA, 1000 bp, Homo Sapiens
ggctcatcatcagcaactttttgaaggccaagcagaagccgggcggcaccccaaacctgcagcagaagaagagccaggcccggctggcccccgagatcgtgtctgcttcccagtaccgcaagttcgatgagttccagacaggcatcctcatctacgagctgctgcaccaacccaacccgttcgaggtgcgcgcccagctgcgggagagagactaccggcaggaggacctgccgccgctgcccgcgctgtccctctactcacccggcctgcagcagctggcacatctgctactggaggccgaccccatcaagcgtatccgcatcggcgaggccaagcgcgtgctgcagtgcctgctgtgggggcctcggcgcgagctggtgcagcagccgggcacctcggaggaggcgctgtgcggcacgctgcacaactggatcgacatgaagcgggccctgatgatgatgaagtttgcggagaaggcggtggatcgcaggcggggcgtggagctggaggactggctttgctgccagtacctggcgtctgcggagcccggggccctcttacagtcgctgaagctcctgcagcttctgtgagccaagccccagcctgcaccgtcgctgccccttccctgcctaaccctttcctgtctcgccttggaagcacccatgtctccctgggaaatggtacagatgactgggatacctggatgtaaaatatataaatatatatatagaaaatacatataccatatataaatatgaaagactaaggatgctgttgcccgtccacactcgtctcctctctgcactaagtcctccctgttttcttctgtaattatacacatttccagttccatgcaacgtcctgaggacagttctgtgaactgaatgcagcctggacactggcctcaataccttgtttaggatttcttcacccttttgtcaaattgttatttaaagaaaaaaaaaaaagaagaaaattccattaaaattttttttggttg

SEQ ID NO: 407184 - DNA, 1000 bp, Homo Sapiens; identical to SEQ ID NO: 294762

SEQ ID NO: 407185 - DNA, 1000 bp, Homo Sapiens; identical to SEQ ID NO: 224901

SEQ ID NO: 407186 - DNA, 1000 bp, Homo Sapiens; identical to SEQ ID NO: 294764

SEQ ID NO: 407187 - DNA, 1000 bp, Homo Sapiens
tatgctgagggaagagctgcagttcaaggaggagaagcttgcagagcagctcaagcaagctgaggagctcaggcaatataaagtcctggttcactctcaggaacgagagctgatccagttaagggagaagttacgggaagggagagatgcctcccactcactgaatcagcatctccaggctcttctcactccggataagcatgacaactcccaggggcaggacttccgagaacagctggctgaggggtgtaggctggcacggcaccttgtccacaagctcagcccagaaaatgacacagatgaggatgaaaatgataaaaccaaggagcttgataaagtacaggaatcacctgctcccagggaggagcagaaggctgaagaaaaggaagtccctgaggactcactggaggaatgtgccatcacttattcaaatagccatggcccttctgactccaacccgcctcacaagaacatcaaaatcacatctgaggaagacaaagtcaactcaattctggttgtagacagtgaatcttctcaagatgaatggcaggatgctctaaacattcttctggaaaatcaaaatgatgatgaggaagaggaagggaaagcgccagtgcccccccaggtaactctgtggatttgtgggctgaagctgcaggagtctgaagagaaggaagtcctgcaggactccccggaggaaagggttacgacttcttgtagtgaccatgatgtgtcccaatcttaccaaccttgtgaaggcactttcttggcactagttgaacagaaagtttgctctgctcaggatgtagccagcgaacactccaattccaaaggggaagaaactccacttggcttcccagataccaaatactgctggaaggatgaaaaggatgaaaggatgtcacaaaaagtagcttttctgctcgatgaaaaaaactacaacagcaaaccaagttcaattccaaacacaacactgcagggctccttcactgaggattga

SEQ ID NO: 407188 - DNA, 1000 bp, Homo Sapiens
ctgtgtggtgatgattttcctggtatctgtcataatttaccatggcatcatcagcattgcaatgttccacactggcaactctgtgctcatgacccaagcgaatgtcctttggggcaatggaggagatgcctccatgaaaatgccttcactttcattttcagtttgtcaatttctattcttctcccttctacatggcattcttcaaaggcagtgcggtcctggtggctgccacattcaggtcacccagcagctcatcatcatcatggtgggcaaacagctgctcaaccacatggaagaatttgttgggctgggaggtggccccgggcctgacactccctgcctgccagagctgcagtttgggttcatcaccatctttgtgggagccttcctgctggcacccctgttcactctgctcaacaaccgggtagagattggactggacgcccacaagttcctgtgcaagtaccagcgaccaatggctgggcgcggctggacatctggatctgactgctcctgctggaggccatgtgagctgattctgccccggacaaatgcgcggagccggctagggtactggctgaacgggcagggccagattctagggagaaggaggggaggaaatgcggggttcggagtcgagatccgagagcctctccagaccccgcaacccagatacaaggcctctcgcgacgtgggggtgaacctcgccctcttctactggaagctgctggctgtgcatgtgcatctgggtttcattatcgccttcgagaatgtagtgttcttcttcctgtgccccaacgaccggctcgtgcccgatgtgccagccctggctaccaagataactgcgcgagcgctacctggccaagcaggcggtggcagacaaccgggagacgctgtttcagtcagcaaggcaggcggaccccggccccacccgcaacataatgaccataatgaccacgccccttggcctgccctcaagcttcagctcagccctctctag

SEQ ID NO: 407189 - DNA, 1000 bp, Homo Sapiens; identical to SEQ ID NO: 294765

SEQ ID NO: 407190 - DNA, 1000 bp, Homo Sapiens; identical to SEQ ID NO: 294766

SEQ ID NO: 407191 - DNA, 1000 bp, Homo Sapiens
tcccaaggagtccccgttctccatcaagaacctgctcaacggagaccaccaccggccgccccctaagcctcagccgcccccacggacgctcttcgcgccagcctcggctgccgccgccgccgccgctgccgctgccgcggcggccaagggggccctggagggcgccgcgggcttcgcgctctcgcaggtgggcgacctggctttccctcgctttgagatcccggcgcagaggtttgccctgcccgcgcactacctggagcgctccccagcctggtggtacccctacaccctgacccccgccggcggccacctcccgcgacctgaagcctcggagaaggccttgctgagagactcctcccccgcctccggcacagaccgcgactctccggagccactgctcaaggccgaccccgatcacaaggagctggactccaagagcccggacgagatcattctggaggagagcgactccgaggaaagcaaaaaggaaggcgaagcggcgccaggcgcggccggggcgagcgtaggggcggcggcggccactccgggcgcagaagactggaagaagggcgctgaaagtccagagaagaagccggcgtgccgcaagaagaagacgcgcacagtcttctcgcgcagccaggtcttccagctcgagtccaccttcgacatgaagcgctatctgagcagctcggagcgagccggcctggccgcgtccctgcacctcaccgagacgcaggtcaagatctggttccagaaccgccgcaacaagtggaagcggcagctggcggcggagctggaggcggccaacctgagccatgccgcggcgcagcgcatcgtgcgggtgcccatcctctaccacgagaactcggcggccgagggcgcggcggctgcagccgcgggggccccggtgccagtcagccagccgctgctcaccttcccgcaccccgtctactactcgcacccggtggtctcttccgtgccgctgctacggccggtctga

SEQ ID NO: 407192 - DNA, 1000 bp, Homo Sapiens; identical to SEQ ID NO: 224902

SEQ ID NO: 407193 - DNA, 357 bp, Homo Sapiens
atgacaaagaaaaggaacaacggcctcaccaaaaagggccacagccatgtgcagcctatttgctgcatgaactgtgcccgatgcatgcccaaggacaaggctattaagaaatttgtcattcgaaacatagtggagcccgcagcagtcagggacatttttgaagcgagggtcttcaatgcctatgtgctttccaagcagtatatgaagctacattactgtgtgagttgtgcaattcacagcaaagtagtcagaaatcaatctcatgaaggcttcaaggacccaacactcccacccttagacctgtgggtgctgccccatgacccccaccaaagcccatgtaaggagctgagtccttaa

SEQ ID NO: 407194 - DNA, 1000 bp, Homo Sapiens
ggactcatgatcgtggaggccagcaaaaccagcaaggcccagggccatggcctgtgcggtatctgtgatggagatgcagccaatgaccttaccctgaaggatggctcagtggtgggtggggctgaggaccctgctccctttctggacagctggcaggtgcccagctccctgacctcagtgggccagacccgcttccgcccagacagctgcgccacaactgactgctcgccctgccttcgcatggtgtccaaccgcaccttcagtgcctgccaccgctttgtgcctccggagtcattctgtgagctgtggatccgggacaccaagtacgtgcagcagccctgcgtggccctgactgtgtacgtggccatgtgccacaaatttcatgtgtgcatcgagtggcggcgctctgactactgccccttcctgtgctccagcgactccacataccaggcatgtgtgacagcctgtgagccacccaagacatgccaggatgggatactagggcctctggacccagagcactgccaggtgctgggcgagggctgcgtctgctccgagggcaccatcttacaccggcgccactctgcactctgcatcccggaggccaagtgcgcctgtggtgactgtccagactccatccccgaatgtcaagaaggggaggcgctcactgtgcacaggaataccacggaactctgctgccctctgtaccagtgtgtgtgtgagaacttccgctgtccccaagtgcagtgtggcctgggcactgccctggtggaggtgtggagccccgaccgctgctgcccctacaaatcctgtggataaaagaaggaaaaagcaagtttcccattccaaagagggtttccgtcttaaaaagtccttactgcggccgggcacggtggctcacacctgtaatcccagcactttgagaggccaaggcgggtggatcatgaggtcaggagttcaagaccagcctggccaagacggtgaaaccctgtgtctactg

SEQ ID NO: 407195 - DNA, 675 bp, Homo Sapiens
atggaaaccaaaaatataaaacatatgaaagaagagctccctcggttgagcaggaagcagggcgccaaagcccagaagttcacttcctcctcacctctcagagcaggcctgggatccctggaacacaatttgaaaactgccagaaatcagagtcgccaaacagtggagcaagggttttcagaccgtactgcattcttccttctagaacctttcacctcctcttgggatctttactttagaatgacaagggacatcgcccccaggatcggatatcctaaacccgtcctgctgcattcttccttcttctctgacctgcagggcatccagaacaaaatgagtgccagtgaccccagctcttttatcttcctcaccaacatggccatgcagatcaagaccaagatcagtaagcatgcattttctggagagagagacaccatcgaggagcacaggcactttgggggcaactgtgttgtggacgtgtctttcatgtacttgaccttcctcaaggatgaagacaagctcgagcagatgaggaaggatgacaccagcagagacatgctcactggtgacctcaagaagatgctcatagaggttctccagcccgtgattacagagcaccaagcccagtgcaaggaggtcatggacgagttagtgaaagagttcactaacgaatga

SEQ ID NO: 407196 - DNA, 495 bp, Homo Sapiens
atggagacaaaaggtggagaaggacagtcccgtgaagtggatgcaacagttgaagcttatgtgacaaacgttcacaatgtttttggtcctcaaaatcaccctgacagcagtagtactccagagaggtgtgaggagacgagtgaaaaacccaaaaagaagaaaaagcaaaagccccaggaggttcctcaggagaaaacagaagacccatctatctctttctccaaacccaagaaaaagaaatctttttccaaggaggagttgatgagtagtgatcttgaagagactgctggcagcaccagtcttctcaagaggaagaagtcttcacccaagacggaaacagttaatgaccccgaagaggcaggcaacagaagtgtctccaagaaaaagacgaaattctccaaagaggagcctgtcagcagtggacctgaagaggctgctggcagcaagagcagctccaagaagaaaatgttccataaagaagcccaggaagattag

SEQ ID NO: 407197 - DNA, 1000 bp, Homo Sapiens; identical to SEQ ID NO: 294768

SEQ ID NO: 407198 - DNA, 964 bp, Homo Sapiens
cttctcaagttgagagaaatttgtgcctttgaactccatggcatattcatcctctaacagcgacatagaggacgacagctccaaatccaattccaacctgagcctctctgtgggctatttcccctgtgaggacaccccctgtgaggacacaacctcctgggaagatgcaccttccaagggtccttccatccactttctgcctcccgtccaaggggcatgggggactgaaaggatagggagacgcatgaagagacaagaccaaattcaggatgaaccagagcagttttgcaaactaagcatcttcctggcctgggacgtggacattggctccgataacacagactcaagagctaataggcttctaaatggagacaacctgtggatagacaagttaccaaaagagagaacaaaactgtctgttggcaaactgaataatcttgtgcaagagtttcagatatttctagaaaatctgaaagatgatgacgctgtatttcctgaaactgctcagcaagatttccagctatccagcggctcccctccggaaatggttcagatgataagccaggcaaccgccagccaaaggacaagcgctccagagatctcctcaatcctgtcagagcagccagagaaggatgacactccttcacacacacaggcccagtgctgcctgaactttgggtgggccttcagctggctgaggcagcgtatcctcccctctctgctgaggagggatcaccctgtgaatgccaccaaaagtccccatcggtcagcaccaacgaaaagactctttcacagaggcaagagaattcaacctcaagaaacccttgaattaggacatcccatatagacagatttttaaactttttggaaagtttaaaataatccataataaggattccattaataatccccatcagtttgttttttcctcaataaacaaaataaatgctcttgttaccccaca

SEQ ID NO: 407199 - DNA, 1000 bp, Homo Sapiens; identical to SEQ ID NO: 294771

SEQ ID NO: 407200 - DNA, 1000 bp, Homo Sapiens
acatatagactgtcttccatccccacccccatccccagagatgcacagaagaaagacagtgagtgattcacagccctgctctgatgaagaagcctgctcagaagtcttcctccccaccaacagtgactacgactccagcgatgccctgagccccagagacctggacctggtctacctatcatctcacgacattgcgcagcagacccttagcggcctaagcggcagcgcccccgacgtcctgcaagtgcacgacgtgaaaacccctctggggccgggccaggatccccagggcgagggcccaaatcccgatcactcatgtgccgagtttctccatagcctgaccctcacggggttcacacccaagaaccacgccaagactgtgtccggtgggcggcccccgctaggcttcctgggaaagcggaagccaggcaagcacccccactatggcggcttcagccgccatcatcgctggttgcgcatccacagcgagacccagtcgctatcgctctctgagggcatttatacacagcacctgtcccaggcctgtggtctggcccaggagcccaaggaggccaagcgggccggccctgcccttgatgatcccaggggcctaactctggcccacgctgccagccttcctgaggagcggaacagcagtctccaggacgcgaggccttccgtccgccgcctctacgtggagccctacgcagcggccgtggtggcccaggacgaaaaaccatgggcaagcttgagcccgccctctggaggccgcatcaccctgcccagccccactggccccgatgtgagtcaggagggccccaccgcctctcccatgtcagaaatactcagcagcatgctttagggaggcccatcccggctgtccacccctccatggctgctacctgcgttttacatcacccttacccccatcctgccccactgtgtacccactcattttcaagcgttttgaatgttataaatacaaaggttacaagttcaa

SEQ ID NO: 407201 - DNA, 1000 bp, Homo Sapiens; identical to SEQ ID NO: 294773

SEQ ID NO: 407202 - DNA, 1000 bp, Homo Sapiens
gcggacctcctctgtgaaccagatgtgtccggaggaaggccaggccagccaagagctgcagaccctgcccagggtccctgcactgttcaggaggcaggaagaggacttcctgctgccagagactactgtcatgaaaggtgacccaaaggctctgagacccaagccgaccttggagaaggacctggaggaagacagggaggagaacccaggacttacatccccagagcctcagcttccaaacagtcccacaggggtggtgggagcaaaggaggggaaggaaccccaaaaaagagcctctgtggaaaatgtggatgctgacacaccttctgcctgcgttgtggagagagaagcttcgactcacagcgggagcagaggagacgctctgaatctgagaggtctcaaaagaagcaaaccagacgccacctccatttcccaagaagagcctcaaggagaagccacacctgtgggcaacagagaatccccgggacaagctgagatcaatccagttcattccccaggccctgcgggcccagtcagtcaccccagtggccaagaagtcaaggaactgctgccctttgcatgtgaggtgtgcggcaagaggtttaagtatcgcggcaagttagccgtccacacgagatcacacacaggcgagagactctttcagtgtaatctctgcgggaagcgcttcatgcagcgcataggcctgcaatttcaccagcgaacccacactggcgagaggccctacacgtgtgacatctgccagaagcagttcacccagaagtcctacttgaagtgtcacaagagaagccacacaggggagaagcccttcgaatgtaaagactgcaagaaagttttcacctacaaggcaaatctgaaggagcaccagcgcatccactctggagagaaaccccacaaatgttccaagtgtccaagagccttcggtcggccggcgaccttaagacgccaccagaaaacacatcgagaagccacttcacagtga

SEQ ID NO: 407203 - DNA, 1000 bp, Homo Sapiens; identical to SEQ ID NO: 224903

SEQ ID NO: 407204 - DNA, 1000 bp, Homo Sapiens
gttcaagtctttaccaacataagaaaattcattctggtgagaaaccatataaatgtgaacaatgtgaaaaggcctttgttcgcagctatctacttgttgaacatcaaagaagtcatactggtgagaaacctcatgaatgcatggaatgtggaaaggcttttggtaagggctcaagccttcttaaacataagagaattcatagtagtgagaaactctatgattgtaaggattgtggaaaggccttttgtagaggctctcaacttacacagcatcagagaattcatactggtgagaagccacatgaatgtaaagaatgtgggaagacttttaagcttcattcatatcttattcaacatcagataattcatactgatttgaagccatatgaatgtaagcaatgtgggaaagccttcagtcgtgttggagaccttaagacacatcaatcaattcatgctggggagaaaccctatgaatgtaaggaatgtggaaaaacctttagacttaattctcaactaatttatcatcagacaattcatactggtttgaaaccctatgtatgtaaagaatgtaagaaggcctttcgttctatctcaggtctttctcaacataagagaattcatactggtgaaaaaccctatgaatgtaaagaatgtgataaggcctttaatcgcagtgatcgacttactcaacatgagacaattcatactggtgtgaaaccacagaaatgcaaagaatgtggtaaggcctttagtcattgctatcaacttagtcaacatcaaagatttcaccatggtgagagactcttaatgtaatgagagggaaagcctttagccatggcacatttttactgttgtcactattatgatgctatagtgaagattaaactagttaatatagaatataaatacttggaaaggcatctggcacatcgtatttgcttactaaatacattatttttatgataattgttagaattactaaaaataaatcttatagaagg

SEQ ID NO: 407205 - DNA, 1000 bp, Homo Sapiens
cgagctcaaatgccgcacgggcacctccatgacctccgtcaactggctgacgcccaacggcaccctcatgacccacggctcctaccgcgtgcgcatctccgtcctgcatgacggcacgcttaacttcaccaacgtcaccgtgcaggacacgggccagtacacgtgcatggtgacgaactcagccggcaacaccaccgcctcggccacgctcaacgtctcggccgtggaccccgtggcggccgggggcaccggcagcggcgggggcggccctgggggcagtggtggtgttggagggggcagtggcggctacacctacttcaccacggtgaccgtggagaccctggagacgcagcccggagaggaggccctgcagccgcgggggacggagaaggaaccgccagggcccacgacagacggtgtctggggtgggggccggcctggggacgcggccggccctgcctcgtcttctaccacggcacccgccccgcgctcctcgcggcccacggagaaggcgttcacggtgcccatcacggatgtgacggagaacgccctcaaggacctggacgacgtcatgaagaccaccaaaatcatcatcggctgcttcgtggccatcacgttcatggccgcggtgatgctcgtggccttctacaagctgcgcaagcagcaccagctccacaagcaccacgggcccacgcgcaccgtggagatcatcaacgtggaggacgagctgcccgccgcctcggccgtgtccgtggccgccgcggccgccgtggccagtgggggtggtgtgggcggggacagccacctggccctgcccgccctggagcgagaccacctcaaccaccaccactacgtggctgccgccttcaaggcgcactacagcagcaaccccagcggcgggggctgcgggggcaaaggcccgcctggcctcaactccatccacgaacctctgctcttcaagagcggctccaaggagaacgtgcaagagacgcagatctga

SEQ ID NO: 407206 - DNA, 742 bp, Homo Sapiens; identical to SEQ ID NO: 294775

SEQ ID NO: 407207 - DNA, 1000 bp, Homo Sapiens; identical to SEQ ID NO: 294776

SEQ ID NO: 407208 - DNA, 1000 bp, Homo Sapiens; identical to SEQ ID NO: 294777

SEQ ID NO: 407209 - DNA, 1000 bp, Homo Sapiens
tgaatgtaagcagtgtgggaaagcattatcttatcttgtaagctttcagacacacatgagaatgcacactggagagagacctcataaatgtaacatatgtgggaaagcctttttttctcccagttcgttaaaaagacacgagaaaagtcacactggagagaaacgctataaatgcaagcaatgtgataaagccttcaattgtcccagttcctttcaatatcatgaaaggactcacagtggagagaaaccctatgagtgtacacaatgtaggaaagccttcagatctgtcaagtacctgcgagtacatgaaagaaaacacactggagagaaaccctatgagtgtaagctatgtggtaagggatttatttcttccacttcctttcgctatcatgaaaagactcacactggagagaaaccttatgaatgtaaaaaatgtgtgaaagccttcagttttgtcaaggatcttcgaatacatgaaaggacacacactggagagaaaccctttgaatgtaaacaatgtgggaaaaccttcacttcttccaattcctttcactatcatgaaaggactcacactggagagaaaccctatgagtgtaagcaatgtgggaaagccttcagatctgcctcagtccttcaaaagcacatacgaactcacacaggagagaaaccctatggatgtaagcaatgtggtaaagtctttagagttgcctcacaacttaaaatgcatgaaaggactcacacaggagagaaaccctatgagtgtaagcaatgtggaaaagccttcatttcttctaattctattcgctatcataaaaggactcacactggagagaaaccctataaatgtaaacagtgtgggaaagccttcatttcttccaactcttttctctaccatgaaaggattcatactggagagaaaccctatgagtgtaagcaatgtggtaaagcctttagatctgcctcaatccttcaaaagcatgtaaggactcacgctggctag

SEQ ID NO: 407210 - DNA, 1000 bp, Homo Sapiens; identical to SEQ ID NO: 224904

SEQ ID NO: 407211 - DNA, 1000 bp, Homo Sapiens
agccatcactcattcctcacacctaaagcagtgtgtaacagttcatactggaaagaaatctaaaaagactaagaaacatgggaaatccttcactaatttttctcaactttctgcacatgtgaaaattcataaaggagagaagtcctttgaatgtaaagaatgtggaagatcctttagaaattcctcatcctttaatgttcacattcaaattcacactggaataaaaccacacaaatatacggaatgtgggaaagccttcactaggtcaactcaccttactcaacatgtaagaactcacactggaataaaaccctatgaatgtaaggaatgtggccaagccttcactcagtacacgggccttgctatacacatacgaaatcacactggagagaaacactatcagtgtaaggaatgtgggaaagccttcaatggatcctcaacccttactcaacataaaataattcacacaggagagaagccttatggatgtgttgaatgtgggaagaccttcattacttcttcctatcgtagtaaacatttgaaaactcaccatgaagaaaggccctttgtatgcaagatatgtgggaaagcatttctatattcctcaccccttaatgttcacctgcaaactcataccagagagaaagccctcatatcggttaagatcgatggcaaggtccgaactgatataacctaccctgctggattaatggatgtcatcaacactgacaagatgggagagaattcccaactgacctgtgacaccaagggtcactttgctgtacaacgtattacacctgaggaggccaagtacatgttatgcaaactgagaaaaatctttgtgggcacaaaaggaatccctcatctggtgactcttgatactcacgccatctgctaccctgatccccttatcaaggtgaatgataccattcagattgatttagagactggcaagattactgatttcatcaagattgacactggaacctgtgtatggtga

SEQ ID NO: 407212 - DNA, 1000 bp, Homo Sapiens
aaataatcaggaccatttcttcaaactccggtggcttccaagcccatctgggcagggagagaacacaggcgtccgcggggcgcacggcagggaaggttcctgttgcctcttctgggagccccgcggcagcgcccagcaggcggaccgtggggaccgaggcctgaggaggaggcacggggaggtgggaggacgaagagcggccggggaggagcaagcagagcccaagaggaagcaccgcgcgaagggagactcacacaaagggaacaggggcaggaggaaggccgagggggcgccaggcagtgcagagaggcccagacgcagcaagaagaatcaccagggtggggatgccgcaaaagaggtgggaaaggtttttattcctggactgccagctccctctctgacgatgtccaacacaatgcctcagcccagtacttcacttgatggcgttagtgctccaaagcctcttagtaaactccttggatcattggacgaggttcttctgttgttcccagttccagaactgagggattcttcaaaacttcatgattctctctataatgaggattgtactttccaacagcttggaacttacattgattctatcagagatcctgtccataacagagtcaccctagaactgagtaatggctccatggttaggatcactgttcctgaaattgccacctctgagttagtacaaacatgtttgcaaacaattaagtttatcctgccaaaagaaatagcagttcagatgcttgtcaagtggtacaatgtccacagtgctccagtaggacccagttatcactcagagtggaatttatttgtgacttgtctcatgaacgtgatgggttttaacacagaccgcttagcatggactagaaattttgactttgaaggatcactttcccctgtcattgcacccaaaaaagcaaggccttctgagactggatctgatgataatatcttaaaatatctgtatttgaaagcatttaaggcttga

SEQ ID NO: 407213 - DNA, 1000 bp, Homo Sapiens
gatggggggcatgcatcagaaagagtcctatgtgggcaaggaggcccagagcaagagaggcatcctgaccctgaagtaccccatggaacacggcatcatcaccaactgggatgacatggagaagatctggcaccacaccttctacaacgagctgcgtgtggcccctgaggagcaccccatcctgctgaccgaggcccccctgaaccccaaggccaaccgcgagaagatgacccagatcatgtttgagaccttcaacaccccagccatgtacgtggccatccaggccatgctgtccctgtacacctctggccgtactactggcatcgtgatggactctggtgacggggtcacccacactgtgcccatctatgatgggaatgccctcccccatgccaccctgcgcctagacctggctgggcgggaactgactgactacctcatgaagatcctcaccgagcgtggctataggttcaccaccatggccgagcgggaaatcgtgcgtgacatcaaagagaagctgtgctatgttgccctggacttcgagcaggagatggccatggcggcctccagctcctccctagagaagagctacgagctgcccgatggccaggtcatcaccatcggcaacgagtggttccgctgccccgaggcgctcttccagccttgcttcctgggcatggaatcctgtggcatccatgaaactaccttcaactccatcatgaagtctgatgtggacatccgcaaagacctgtacaccaacacagtgctgtctggcggcaccaccatgtaccctggcatggcccacagaatgcagaaggagatcgctgccctggcgcctagcatgttgaagatcaggatcattgctcctcccaagcgcaagtactccgtgtgggtcggtggctccatcctggcctcgctgtccaccttccagcagatgtggatcagcaagcaggagtatgatgagtcaggcccctccattgtccaccgcaaatgcttctag

SEQ ID NO: 407214 - DNA, 1000 bp, Homo Sapiens
catggttgatttggccttcagtggcatcacgacttatgggtatttcttaaccagcgcttacaaagatggtaaacctatgctacgccagggagatacaggagactggattggaacattttggggtcataaaggtgctgtttggggtgcaacactgaatgccaccaaagcagcaacagcagctgcagatttcacagccaaagtgtgggatgctgtcttaggagatgaattgatgaccttggctcataaatacattgtcaagactgtgtatttcatgcaggatagtaattatttgttaaccaagggacaggataaactgttacgcatgtatgacttgaacaaacccaaagcaagacctaaggaaattagtggtcacacttctggtataaaaaaaaggctcctatggtgcagtgaggataaacagattctttctgctgatgacaaaactgctcgactttgggatcatgctactatgacagaagtgaaatctctaaattttaatatgtctgttagtagtacaaaatacattcctgagggagagattttggttataacttatggactatctattgcttttcatagtgcagtaagtttggacccaattacatcctttgaagctcctgcaaccatcaattctgcatctcttcatcctgagaaagaatttcttgttgcaggtggtgaagattttaaactttataagtattttaaccatggagaagaattcgaatcctacaagggatactttggtcctattcactgtgtgagatttagtcgtgatggagaactctatgccagtggttctgaagatggaacattgagactagggcaaactgtggtaggaaaaacatacggcctttggaaatgtgtgcttcctgaagaagagagtggtgagctggcaaagccaaagattggctttccagagacaacagaagaggagctagaagaaattgtttcagaggattcagattgcatctattcttcaactcctgatgttaaggcctga

SEQ ID NO: 407215 - DNA, 1000 bp, Homo Sapiens; identical to SEQ ID NO: 294778

SEQ ID NO: 407216 - DNA, 852 bp, Homo Sapiens
atgcagaggaagataaatgctggcatctgggcacctgatgaaagaaaagtatgtcctcagaaaggcaatggagcagttcggaaaaagaaggaaaagggtagaactgcagcttctgtttttgctcaactctggcagctgagtgttgtgggtgggctagaaactttgtggcaatatctggcagcactgtatcaggattctttgagaaatccagaacaggtgtccagtagtgagttgacctccactcgtgtctccctttcctactgctcccaagtggagaagacagtcatgtcactcaccagtggctccacagcccttatactagtggacttttacctagagctccacctgaagcagaagggggataacgaaggaggtctctataccatggctcgtacaaggtggactgcccgcaaatctaccggtggtatagcacccaggaagcaactggctacaaaagccacttgtaagagtgcgccctctactggaggggtgaagaaacctcatcgttacagacctggtactgtggcactccgtgaaattagacattatcagaagtccactgaacttctgattcgcaaacttcccttccagcgtctggtgcgagaaatcgctcaggactttaaaacagatctgcgcttccagagggcagctatcggtactttgcaggaggcaagtgaggcctatctagttggcctttttgaagacaccaacctgtgtgctatccatgccacacgtgtaacaattatgccaaaagacatccagctagcacgccacatacgtggagaacgtgtttcagaatacaccatgatgtgaaacatttcattctcaaaaaaaaaaaaaaaaaaaaaaaac

SEQ ID NO: 407217 - DNA, 1000 bp, Homo Sapiens
agcagagttaattaatgcatcatatttcaacaatactaagtgtgtggcccagcacaggggacctgcccacaagttggctctggagcctgactctccttataagttcctcacttcaggtgaagatgctgttgtcttcaccattgacctcagacaagaccggccagcttcaaaagttgtggtaacaagagaaaatgataagaaagtgggactgtatacaattactgtgaatcccgccaatacctaccaatttgcagtgggtggacaagatcagtttgtaaggatttatgaccagaggaaaattgataagaaagaaaacaatggcgtgctcaagaaattcactcctcatcatctggttaattgtgatttcccaacaaacatcacctgcgttgtgtacagccacgatggcacagagctgctagccagctacaatgatgacgatatttacctcttcaactcctctcacagtgatggtgctcaatacagtaagagatttaagggacacagaaataataccacagtcaaaggtgttaatttctatggccccaggagtgagtttgtagtgagcggtagtgattgcgggcacatcttcttctgggagaaatcatcctgccaaatcatccagttcctaaaggggagcagagaaggtacaataaactgtcttgaaccccacccttacctacctgtgttggcgtgcagtggcctagatcatgatgtcaagatctggacacccacagctaaagctgccactgagcttactgggttaaagaaggtgattaagaagaacaagtgggaacgagatgaagacagcttgcaccatggcagcctgtttgaccagtacatgctttggttcctcctgcgtcacgtgacgcagagaggtcgtcaccaggactggagaagtggtgaagctgaatttccagatgaagaatcggatgagtcttccagcacttcagagacatctgaggaggaggtccaagaccgagtgcagtgcatgccatcctga

SEQ ID NO: 407218 - DNA, 914 bp, Homo Sapiens; identical to SEQ ID NO: 119218

SEQ ID NO: 407219 - DNA, 697 bp, Homo Sapiens
atgtccagcacccagcacacaaaggcctcctgcatctcagaaacccagagaagcagccgcctcacaccacccccggcccctcccgtccctcagctgcaaccacctgcccactttttctgcgtcccgtctatggcgtcacgaggcttgcccacccaatcctctggagagttcttgcgcagaggtagattgtttggcacacgagatgtcggcgtgggtcggaaagcatgcggaagtcctgctttgctacgtgatggatttgcaggtcaggctggggagcctgggtggaggaactcagccatcccggttaccggtggcaggatgatttcctttcatcccaacctttatttccacagtgaaatcatcatgaaggagcactgtgttggcatcctcggctacagggtgtctcattccactgcagtccagcggttctgggatcacgaaggtcaagcctccagctgcaggcagtacacctcctacctgagctcattcagctgtttggctgaacatgactgcccgggttttggcaggattgctgagttggagtctcactgtgtcatccaggctgcagtcaagtggcaaactctcagatcactgcaacctctccctccagcttcaaaggattcctctgcctgctgatgctgtttttcccccacatgaggagaacctgcagacagttataaaaaattctgtgcctggg

SEQ ID NO: 407220 - DNA, 970 bp, Homo Sapiens
gctgccttccccacccgccgccatgaagctgaccgacagcgtgttgcggagcttccgcgtcgccagggtgttttgcgaaaactcggacaagattaactgcttcgatttcagccccaacggccagacggtcatctcaagcagcaacgacgactccatcgtgctatatgactgccaggagggcaaaccaaagagaaccctgtacagtaagaaatatggcgtggacctcatcagatacactcatgaggcaaacacagctgtttacagctctaacaaaatagacgatactattcgttacttgtccttgcatgacaacaaatacatcagatactttcctggacatagcaaaagagtggtggccttgtccatgtcacctgtggatgacattttcatttctgggtctcttgataagaccattcgactctgggatctccgggctcctaactgccagggcctcatgagtctacaggggaagccagtttgttcttttgatccagaagggttaattttggctgcaggtgtcaactctgagatggtcaaactttacgaccttcgttcttttgataaagggccatttactacctttaggatgcagtgtaatcgaacttgtgagtggacaggacttaaattcagcaacgatggcaaggtcatcctcatttccaccaacggcagcttcatttccctcattgatgctttcaaaggagtggtgatgcacacgtttgagggttatgccaacagcaaagctgtcacactggaggcttcatttactccagattctcagtttattatgattggttcagaggatggcaagatccatgtctggaatggagagagtggtataaaagtagctgtgttggatggtaaacacaccggcccaattacctgtttgcagttcaaccccaagttcatgacttttgccagtgcgtgttccagcatggtcttctggctgcccaccattgatgactcaccctga

SEQ ID NO: 407221 - DNA, 1000 bp, Homo Sapiens; identical to SEQ ID NO: 294779

SEQ ID NO: 407222 - DNA, 1000 bp, Homo Sapiens
caatctatcattccaaaaaagttatgggatttataaaatagcacatgaagattactatgatgatgatgaaaattccatattctatcacaacctgatgaactctgagtgtgaaactacaaaagaccctcagagagacaaccgtaacatcttcaatgctataaaagtagaaatcagcaccacgccctctctggacagctccacacaaagaggcatcaacaaatgcacaaatactgatattacagaagctaaacaggattccaacaacaaaaaggatgcgttttctgacaaaacaggaggtgatattaactatgaagaaactaccttttctgaagggccagaaagaagactgtctcatgaagagagtcagaaaccagatctttcagactgggagtggtgtaggagtaaatcagaaagaacccctcgtcagcgttccggttatgcccttgccattcccttgtgtgcattccaggggactgtgtctctccatgcacctacagggaaaaccctatctctttctacctatgaggtaagcgcagaagggcaaaaaataactccagcctctaagaaaatagaagtctatcgatccaaaagtgttggccatgaaccaaactcagaagattcttcatccacgtttgtggacaccagtgtgaaaatacacttggaggttcttgaaatttgtgataatgaagaggccttggacactgtgtcaatcattagtaacatcagtcagtcctccacacaagtcagatctccatccctacgttactccaggaaagaaaacagatttgtttcatgtgacctaggggaaacagcctcatactccctctttttgcccaccagtaatcctgatggtgatattaatatctccattccagacacagtagaagcacacaggcagaacagtaaaaggcagcatcaagagagggatggctaccaggaggaaatccagttgttaaataaagcttacagaaaaagagaggaagaaagcaagggtagttag

SEQ ID NO: 407223 - DNA, 1000 bp, Homo Sapiens; identical to SEQ ID NO: 294780

SEQ ID NO: 407224 - DNA, 1000 bp, Homo Sapiens; identical to SEQ ID NO: 294781

SEQ ID NO: 407225 - DNA, 1000 bp, Homo Sapiens; identical to SEQ ID NO: 224907

SEQ ID NO: 407226 - DNA, 1000 bp, Homo Sapiens
gggggggcaagggcggcttcggggcgcgggcgcgcggcttcggcgggggcggccggggccgggggcgcggcggcggcgacggcaaggatcgcggcggcggtggacagcggcggggcggcgtggccaagagcaagagccgccgcaggaagggcgccatggtggtgtcggtggagccgcaccggcacgagggcgtcttcatctaccgcggggcggaggacgcgctggtcacgctgaacatggtgccgggccagtctgtgtacggcgagaggcgcgtcacggtgaccgagggcggcgtgaagcaggagtaccgcacgtggaacccgttccgctctaagctggccgcggccatcctgggcggggtggaccagatccacatcaagcccaagtccaaggtgctgtacctgggcgccgcgtcgggcaccaccgtctcccatgtctccgacatcattggcccagacggcctggtctacgccgtcgagttctcccaccgcgccggccgcgatctggtcaacgtggccaagaagcgcaccaacatcattccggtcctggaggacgcgcggcacccgctcaagtaccgcatgctcatcgggatggtggacgtgatcttcgccgacgtggcccagccggaccagtcccgcatcgtggccctgaacgcccacaccttcctgcgcaatgggggccactttctcatctccatcaaggccaactgcatcgactccaccgcatccgccgaggctgtgtttgcttctgaggtgaggaagttgcagcaggagaacttgaagcctcaagagcagctgaccctggagccctatgagcgggaccacgctgtggtggtcggggtctaccgacctcttcccaagagcagcagcaaatagcacccagctcaggctcgcctgccatctccccaaggctgcgttgtgtttgctattattttctgtgtgttttctttgtgagtgttttgttttgttgtttttctattaaactgcataaagaaacggca

SEQ ID NO: 407227 - DNA, 1000 bp, Homo Sapiens; identical to SEQ ID NO: 294783

SEQ ID NO: 407228 - DNA, 1000 bp, Homo Sapiens; identical to SEQ ID NO: 294784

SEQ ID NO: 407229 - DNA, 1000 bp, Homo Sapiens
caccgccctgatgaaagccgccatgcagggtcgaacggactgcatccgagccctgatgctagcagaaaggggtgatcccttggctgtaaatggcaagactgtgctgttgaaggtgggcgtagggatggtgggaacggcccaggccatcctaggggcggatgtccacgcgagggacccccgccgtgggatgtcgccgcaggagtgggccacttacacgggccgcgtggatgccgtccgtctcatgcagaggctgctggagcgcccctgcccggagcagttctgggagaagtaccggcccgagctgccgccgccccctgaagcggcgcggaagcccgcgggctccaagaactgcctgcagaggctcacagactgcgtgctgtccgtgctgacgccgcgctccgtgcggggcccggaggacgggggcgtcctggaccacatggtccggatgaccacgagcctctacagccccgccgtggccatcgtgtgccagaccgtgtgccctgagagccctccgagcgtggggaagaggcggctggcggtgcaggagatcctggcggcgcgggctgcacggggcccccaggcgcaggaggaggatgaggtggggggcgcggggcagcgcgggcggaccggacaggaggacgcggactcccgggagggctccccgagagccggcctccctcccgccctggggtcccggggccccgcagcgcccgccccgcggaaggccagcctcctgcccctgcagcgcctgcggcggagaagcgtgcggcccggtgtggtggtgccccgggtccgagtcagcaaggcgcccgcgcccaccttccagcccgagcggccggcgcggaagggcagcaccaaggacagcggccacctgcagatccccaagtggcggtacaaggaggccaaggaggagaagaggaaggcagaggaggccgaaaagaagcgccaggccgaggcgcagaaggagaggcgcactgcgccctggaagaagaggacgtga

SEQ ID NO: 407230 - DNA, 1000 bp, Homo Sapiens
cagtttattcatgaaggagagaatactccagaaggactcagcagaaaagcgagctagagttgtcagagaactcttacagagtgagagaaaatacgtgcagatactggaaattgtgagagatgtttatgtcgcaccactgaaagcagcattgtcatcaaacagagcgattctgagtgctgccaatatccagatcattttctgtgacattctacagattttaagtctcaacaggcagtttctagataacctgagagacagactgcaggaatggggcccagctcactgtgtgggagaaatagtcacgaagtttggaagccagttaaacacatataccaatttcttcaacaattaccctgtcattctgaaaactattgagaagtgcagagaaatgataccagcattccgaactttcctgaagaggcatgataagaccattgttaccaaaatgctgagcctgccagagctgctgctgtacccatcccgaagatttgaagaataccttaatcttctctacgctgtcaggcttcatacccctgcagagcatgttgaccgtggggacttgaccactgcaattgaccaaatcaaaaaatataaaggttatatagatcagactctatcagaagtaaacagatatctgattagggtacaagatgtagcccaacttcattgctgtgatgaagaaataagtttctctttaaggctctatgaacacatccatgatctcagccttttcctcttcaatgatgccctgctcgtttctagtcggggcacatctcacactccatttgagaggacttcaaaaacaacctaccagttcattgcatcagtggcccttcatcggttactcatagaaaatattccagattccaagtatgtcaagaatgcatttattcttcagggtccaaaatataaatggatttgtgctacagaaatagaggatgataagttcctatggctgtcagtacttcgaaatgcaatcaaaagcagtatggagaagtga

SEQ ID NO: 407231 - DNA, 1000 bp, Homo Sapiens; identical to SEQ ID NO: 224909

SEQ ID NO: 407232 - DNA, 1000 bp, Homo Sapiens
cgagccggaccagttcgtcctgcaggtgccgcgaccacaaccccgccccgaggcctcggccggctccacaggggctgtcgctgtggccagggctgctggggtcccgcgcgccttcgggggccgccattgcgcccaagcctctgagtcccagtttaacacctttaatggccggatgctgtcagttcccgaatacaagacacgcctgcgcagcctccacttccaggccaccctccaggagaagacagaggagatccgaggcagccttgaatgcttgcgccaggcctccctggagctcaaaaacagtcggaagctcgccaagatcctggagtttgtgttggccatgggcaactatctcaacgatggacagcccaaaaccaacaagactacgggcttcaagatcaactttctgacagagctgaactccaccaagacagtggatgggaagtccaccttcctgcacatccttgccaaatcgctgagccagcacttccctgaactcctgggctttgctcaggacctgcccaccgtgcccctggctgccaaagtgaaccaacgggccctgaccagtgacctggctgacctccatggcactatcagcgagatacaggatgcctgccagagcatttccccctctagcgaggacaagtttgcaatggtcatgtcggcatcctctgagcagcctgttcctgcaccaggctggatcctggggtgggaacacagggttttccctaatgctgaagctagcacatggggcctggtgcggtccttcctggagacggcccagccagcacttcgggcgctcgacgggctgcagcgcgaggccatggaggagctgggcaaggcgctggccttctttggggaggattccaaggccaccacctctgaggctttcttcggcatctttgcagagttcatgagcaaattcgagcgagcgctgagtgacctgcaggccggggagggcctgcgcagctccgggatggtttcacccctggcctggtga

SEQ ID NO: 407233 - DNA, 1000 bp, Homo Sapiens; identical to SEQ ID NO: 294785

SEQ ID NO: 407234 - DNA, 1000 bp, Homo Sapiens
gatcatcttggagaccgccaagagacagatgttctctttgtgtggcaccaccgtcccagactgcaaactcctgttgcatgtccctccaagaaactcttaccaagatttcctcatcctcttgggcggaaggaaggacagccagcagaccaccagggacgtcctactgtacagcaaacagaccggccaatggcagagccttgccaaactcccgacacggctgtacaaggcctctgccatcaccttgcaccgcagcatctatgtgctggggggcatggctgtcagctcagggaggagtctggtcagtcacaatgtctacatcttctccctgaaactcaatcagtggaggctgggggagcccatgctggtggcccgctactcccacagaagcactgcccataagaacttcatcttctccatcggggggattggagaagggcaggagctcatgggctccatggaaaggtatgacagcatctgcaatgtctgggagagtatggccagcatgcccgtgggggtgctccaccccgcagtcgctgtgaaagaccaaagactctatctctttggaggagaggacatcatgcagaaccctgtgcgccttatccaggtttatcacatttccagaaactcgtggttcaaaatggagacaagaatgatcaagaacgtgtgtgcccctgcagtggtgcttggggagcggattgtcattgtgggaggttacacaaggaggattcttgcttatgaccctcaatccaacaaatttgtcaaatgtgcggacatgaaagaccggaggatgcaccatggggccacagtgatgggaaacaaactctacgtgacgggcgggcggcggctgaccacggactgcaacattgaggactccgcctccttcgattgctacgaccccgagacggacacctggacatcccagggacagctgccgcacaagctctttgaccatgcctgcctcactctccagtgcataccccgcacgtctggcctcccatga

SEQ ID NO: 407235 - DNA, 1000 bp, Homo Sapiens
gaggaatccgtgtggcacagcagcaggagcacagggtccctacgcatgtcttacagaaatgccaagttaagaatttttcaccagctgcaaagagagtgagccctttaagacccaatggaggagagcttggtggaggggatgcagggctggggacatcccaactcactagaaagagcctccctgttcataacaaggcatcaggagaggtgcctgggagcaaatcttccccaaccttgaaaacacagcctccttctgaaaaccttttcagaaaatggatgcagaccttattgcagtggtttaataaacctagcataatgtgtgaagaacaagaaagttcttgggaaaagggtagctccctgtcatcatctgtgcagaatagaagtcgagttacaagtagagctgcttttactggtgctactgaagctcagaaaattaggaaagacactggggagttcctagaagaaaagctggggcatagccatgggatagatatcacctgtccctaagaacccttttccttcccagtggagcttgggaaagctcagcacaacccagaagtgcaggtcagagcagagcctttccagggctatccccgcaactacacagctccctcccgcaaagtgacatgtaccaaatcttgcagccaacaagctatctttgttggacagaattatcctacaaggattagacagatcatagacaaggacagacagccccaggaagttgaggcatttaaggggaagatattgtatcaaaggcatccccaatccatgccccacagggatcctgtaccacatctaaaccccacttgtcagcgtcaagtcaccctggtgtgtccagctgtcccaattagtggcaaaagcactgtgttcagtgatgtgcctttactaactggacacaaaatgcattggaagtatttgcagggaggcaaatctccccccacaaaataattcactacttgttgagaatcttgattctccctaataaatgttctaataag

SEQ ID NO: 407236 - DNA, 1000 bp, Homo Sapiens
ttgttggagggaggtctccaaccaagtggaggccatactgagccatcattccttccaggggagcctctcgggaggcctacctgctggagcacagccacaatgggggaccagttcatcatgctgagctgcgagtggcctggcggcgagccccctgccacgctgggctggcttgacgaacagcagcagcccctgggcggcagcagctcctcgatggccgttcacctcctgcaggcccaagaagatctggctggcagagagttcacctgccggggcactcacctgctcaggacccctgacccccactgccacctccagctgggatatccagctcctcccaatgtcaccatcagccgcctgacctacgggaggcaccggagagaggtgcagcttcaatgggccatcttaggacccgggaacctgacgggcttcctggtgcagcggaagggagcaaaggcaccaacagaggggttccagagaagatgctgaggcaccggcaggccttgaaacaccaaccaccaccccaggtttggatcctgcacaagaaaccacggattctccagtgaatgtcaccatcacagtgactgcaacaccataaggcccaaagaggaagatgcaaataggcttagggagggcaggtgggatttgggaagagcccttctgtcagactttggtcataaaaccaacgtagctaagacaccaactaccactttcacttaatacccagtcttcacaactggtacaaggcccagctgcagtgtccctaagtgacatggttacaagagaagccctggcccaccttgtggaagacagaggtggcaggacaaggaagaggacccacaatggggagacagggatctctgggtgtctgagggcaagtgaaagccatggtactgggaaggatctgtggtgctatagaagtatgagcaagctagctgcttccagaaaaaaagtctgtggatggagcaattcctaaataaatcagagctgatgttcacgccaa

SEQ ID NO: 407237 - DNA, 1000 bp, Homo Sapiens; identical to SEQ ID NO: 294788

SEQ ID NO: 407238 - DNA, 1000 bp, Homo Sapiens; identical to SEQ ID NO: 224910

SEQ ID NO: 407239 - DNA, 1000 bp, Homo Sapiens; identical to SEQ ID NO: 294790

SEQ ID NO: 407240 - DNA, 425 bp, Homo Sapiens
ggacagaggccagactgcaacttaagctatctggaatcttacctctgctgtcttactggctgtctacatggggctacattttaactatggcttacagaaatcattgcctgtcaacagcctccacccccacctccccacccccactcttgggaatggactctgacaaactcaccatcaggaaagttgatgtttcccatctaggatggaagaatgggattctgaactttgtcactgtttctgaaacgtcatcagctcctgtaattgcatggttgggacagatctatttaaattgctttgaagttttcccaggaaattcccacaaaattgtgcaacccaaggaattgaggtggaaaaaatggcactggcatcaatttgcttctcaccacgaccttgtgaaggaggcaggtagccactcatatttatga

SEQ ID NO: 407241 - DNA, 619 bp, Homo Sapiens; identical to SEQ ID NO: 119219

SEQ ID NO: 407242 - DNA, 1000 bp, Homo Sapiens; identical to SEQ ID NO: 119220

SEQ ID NO: 407243 - DNA, 690 bp, Homo Sapiens; identical to SEQ ID NO: 294793

SEQ ID NO: 407244 - DNA, 837 bp, Homo Sapiens
gggacttgagttactgtgacctcagaggcccctaggggcctgatcattttttttctttcttttttcctccatcttttcttttcttttctttcttccttcctttttcttgcttgcttttttttttttcaaatgagtgattgattttaatgaggattgctataggatgctataggatgctataggaatgtctaatgtacagtacattagacattcaagcctctgcataaggtgtgggaaactgagaggggagagagaatcaagcaaaaacccccactctgtgcctctgctgagaatccagggctgtaattgaggccgttgcaaggctttacaagacggattgtagctcaggatgtgaaaagattgcctcatcatcatgctccaatatggctcagaaaggcactgagaaaacctagccttagctaggctaagagcctagcttctggcctggcttttacgtggtcagcggatgtgcgtccatcccccctgcactggttccccttgtcctttctgtggctctcctggattcctctcgttcagctccttggtgtacagagcctatgtcaatggcaatggtgagggaaattgccagagccctgccctccaggcctgtccttattcatggggatctgagaagaagagattaggacccagacatgcacagaggagaccctgtaaggacacaaagagaagacagccatctgcaagccaagaagaaaggccttgggggaaaccagccctgcccacaccttggtctggacttccagctgattcttggatgagctggtccttaggcacggaggcaggactgtgagaaaataaatttctgtttttaattca

SEQ ID NO: 407245 - DNA, 1000 bp, Homo Sapiens; identical to SEQ ID NO: 224911

SEQ ID NO: 407246 - DNA, 1000 bp, Homo Sapiens
cagctgggccatgcgggaggcagaggccgggcctcctcaagtcggcctctcagacccacttgcagcctcccagcgtcctctccgggcccagctcttcctcccggctgcgtctccaggccggactctggcccgactccaggtcccaacaacgtctttggactcagctcctgcccagctcccagaggccctggtaggcccacaacttccctaagccaagctccccaggcccagctcaggcctcacggtggcctctccaggctcagctcctgccctccgatggcatctgcaggccccaaacggcctccggttggtgggcttctctaggcccagcttgggcctcccggtggcctctgcaggcccaaatcgtcccgaagtcggcctctccaggcccagctccggcctcccagcggcctctgcaggcccaagtcgtcctcaagtcggcctggaagtgggcctggaagagcagcaagtcggcctccccgggcccagctccgtcctctcggcggcctctccaggtgcaaaacttcctcgagtcagcctctccaggcccagctcttcctgcctcccagtggcctctttcggcccagcccagttcatggctctcggcggccttcccaggccccgcttttgacttttggcagcctcttcaggcgcagaacttgatctccagtcggcctttgcaggcccggcctcctgcctctcaaaggcctgcacgggcctggccttggccttggcctcacagtggactctccacgcccagctagctctcgcctcactgcggcctcccccgtccaaagctcctgcctttcggccacttcggcaggtccagctactgcctgccagtggcctctttaggccaagctcattcctcacaacggcctttccaggccccgtttttcccttccggcagcctcttggcctctaatttgtttatcttttgtgtataaatcccaaaatatggaattttggaatatttccaccattatatattttggtaggt

SEQ ID NO: 407247 - DNA, 1000 bp, Homo Sapiens
gcctgttggtctctgtgctggtgcgggggagccgcgtgacggcgcgcgtgggtgtggcgacccgctggagcgctacctggaccgtcaggacccgcgctgccgctcctccactacccactgcccgcccccgtcgagggtccgcaccctgtccccgcagagggtgtcgcccacccctagcccctgccctggtagcctggtcccctcgagagagcgccggcgctccgggccctaggtgacccctattcgcttacaaagcataaagcaggtgccgaggctcccaggccctgggatcagctgcccgccgcatccccgctcctactccgaggacagtgactcctcagctttctcagcccagagccgcccccttggtgcccgcagcgaggatgaggcactaggcccggaggaagcgatccagacgggggctgaccaccaccacctggcctctccgagacggccccctgccccgcgcagccagtcccgggaccggctggatccgggtcagccccggggagctccagaagagagaggaggggagcccagctgcgggccctcagccctgccccgtgggcgcaggagcagaccagcccctaaccgggctccagccccagaccctctagctcctgactcggcctacagatcctctagttcctcctcttcatccctcattctcttgtatggcaaacgtggccaacgtggggactctggccttaagaccaatgggctgcccggcccgctgtcaagcccttcccagctcctccctccaatgaaggaaagccctgccctagcatgggaggggctactagatgcacctgggagccccctgactggtccagaacactcgaggacctgagcactgggtaggatggacacacagccagactgcaaaccctcgggcatccccatgcctagggtctcccccgggttcctccagacccacagagttgggggcttcccagctgctagaagtggaatagtcatctttgtgaatgaaaatgactaa

SEQ ID NO: 407248 - DNA, 961 bp, Homo Sapiens; identical to SEQ ID NO: 294795

SEQ ID NO: 407249 - DNA, 627 bp, Homo Sapiens
caggacagaactttatggaaacactttgccaagccatgtggtgctcggcttccctttgcatcaatacccttttaattacctgatcctgagggggaaaaagttagggaaaagtgtcagtgcaaaagcctaggaacctgctgtgaatcagactttttcaaaaagacagcatgataaaatatctggcaattattctacaggacatcgatctaaatccgcaactagcctgcaaagatgctctcttttgaagaagtcataactgaaaatgtggttgaaactcaggactgctcttgcagcgcaacgtcagcagcagtcccttccctggaacactctggaagtctgaggaacctgcaggcacctgtggttgctggagctctcttctctgcgagaggcagcaggcagttctctgtggagggacccagatggtctgcattcaagaatgtaagaaaggcccttaagcaagacctgtcttttattttctcttgcacagtctttggattcatcattagggtcacagacaaaccccagaagtcttgctctcagaataaatgtgaatttcattcaaagaaagaacgtgttctttcccatcattgcattgttttgtgctcagttcagatgctctacatctga

SEQ ID NO: 407250 - DNA, 1000 bp, Homo Sapiens
tggacatgaagactgcatagatggatctgatgaaatggattgtcctctcagccccacccctccactctgtagtaacatggagttcccgtgctctacagacgagtgtataccttccctcctgctatgcgatggagtgcccgactgccactttaatgaagatgagctcatctgctccaacaaaagctgttctaatggagctctggtgtgtgcctcctccaacagctgtatcccagcccaccagcgctgtgatggttttgccgactgcatggatttccagcttgatgagtccagctgctccgccgcggcggcagcggcggggaccacgctgcggtgcaccaccttccgccaccctcccgcgctgggctggggtcgagggggcttcgcagagtcggtaaccgaaccggctctgggagaccccgccagggtcggggcggggcgcgatcgccccccgcagtcgggcgcgaaggcggcccgggagccaggtgggtgtggggcgcagttggcggagctgcccagggcgtgcgagcaggctgcgaggatggcgccccggcggcgcggaggtaccgccccgcgctcccccgatagctccccggcctgtcccctctccccgcgctctggggcagccggctgcctggggcgcacggggctggagtggccctctccctccccttcgctaggctcccccggcttaatctgttggccgcgactcctcagccagccccgaggaaagtgcagccattggacaggtctgtgcgggctgccggtttcagggaggaaggtgggagaagcctggaggagcgaaggggagggcggagggaggagggaggagggtgcggcggcagatctggcaaattgcgagctgccttccctcctcaaagtgtggagaaggagcgcgggggagcgtggcgacggcagcgcctcctccgccaccaaactcctggggctccgcgggggcttggggccacctcctcctgagcccggaggaaccctctcccgatag

SEQ ID NO: 407251 - DNA, 1000 bp, Homo Sapiens
ggaagaaggctatggaggagctcagcaaggacgtgaacaccaagttagtccacagtgatctggatcccttgaagaaagaaatggaagaggtctggaaaatcgtccggaagctgctgattgagggcttaagactggatcctgacagtgctgctggctttaggaggaagctgttcaagcgcgtgaagtgcatctcctgtgaccggcctgtggagatgatgactggcccacagctgatcaccatccgcaaagcccacctgctgtcccggctgcggccagccagcgccaacagctgcgagtacttgcagcggcaacagatgagggaacagcagtggctgcagctccaggacctcggtatccaggaggattgtcagcaggactggggtgatggcccccaaaacgccaccagcctcaagtgcaagtcctgcaacctgttgacgctctatccctacggggatccccacgtgatcgactatgacagcgccgaggtggacatcctgggcgtggatgggatcctgtacaaaggccgcgtgaacagccagcgtggggctcagcccttggccgtcgcaaaggagctggcagctgtgaaggctccatctcccccgtcacaaagcctgtatgaccgtgtgcactccagtgccctatttggcgccatctgcccccccctgtgcccccgctccagtgcctgctcagctgcctcgggccctcacctgacgatgccagctcgaccaccttccctgccacctctgctgctgctgccaccgctgattccatccctaagggacccccagcaggccccagggtccaccaggctctcaagagctccacacattgagtcccgagtcggcaggaagccccccgaggagcccgccaacccgtgagccccaccccgctgcgccccccatcgccaagtcccctccacgtccgaggctgaggcccatgtggccctcccactcccaccaagtcccctccacatcggaggctgaggcctatgtggcccccc

SEQ ID NO: 407252 - DNA, 1000 bp, Homo Sapiens; identical to SEQ ID NO: 224913

SEQ ID NO: 407253 - DNA, 648 bp, Homo Sapiens
atgctaaggcaaatccgggaagcccgtggaaaagaagaaaagcaacaggaagctaacttgaaacataggcagaagagtttaaaagaagaagaacaaaaaagacgtaacattgggttgaagaatgcactaggctatgaaaacaaagggtttgccttgctccaaaagatgggctataaaagtggtcaggcacttggcaaggcagaggaaaaattagaaagctacggaaaaaagattcacatgatgaataaccaagctgaagaaaaagctgcagaccagtttcgaatgcgacttaaaaataagcaagatgaaatgaagctagaaggagatcacagaagaagccagcaagtctgtcaacaattggacacccagaaaaatattcaggttcccagggaagcatggtactggttgaggcttgaaaaggagactgaagatgaagaagaaaaagaacaggatgaagatgaatataagagtgaagatttaagtgtactggaaaaattacaaatattgactagttatttaagagaagaacttctgtatagtatttggtgtggaacagcctatgaagataaagaagacctatcttcaaattgtccaggaccaacttcgcagatcatgactaagattattcccaataaactggaaacttga

SEQ ID NO: 407254 - DNA, 1000 bp, Homo Sapiens; identical to SEQ ID NO: 119221

SEQ ID NO: 407255 - DNA, 1000 bp, Homo Sapiens
cagaaatcaggttatcaatactctggctgaccatcgtcatcgtgggactgactttggtggaagtccttggttacttatcattactgtgtttctgagaagttataaatttgccatctccctctgcacaagttacctttgtgtgtctttcctgaagactatcttcccgtctcaaaatggacatgatggatccacggatgtacagcagagagccaggaggtccaactgccgtagacaggaaggaattaaaattgtcctggaagacatctttactttatggagacaggtggaaaccaaagttcgagctaaaatccgtaagatgaaggtgacaacaaaagtcaaccgtcatgacaaaatcaatggaaagaggaagaccgccaaagaacatctgaggaaactaagcatgaaagaacgtgagcacggagaaaaggagaggcaggtgtcagaggcagaggaaaatgggaaattggatatgaaagaaatacacacctacatggaaatgtttcaacgtgcgcaagcgttgcggcggcgggcagaggactactacagatgcaaaatcaccccttctgcaagaaagcctctttgcaaccgggtcagaatggcggcagtggagcatcgtcattcttcaggattgccctactggccctacctcacagctgaaactttaaaaaacaggatgggccaccagccacctcctccaactcaacaacattctataattgataactccctgagcctcaagacaccttccgagcgtctgctctatccccttccaccctcagcggatgataatctcaagacacctcccgagtgtctgctcactccccttccaccctcagctctaccctcagcggatgataatctcaagacacctgccgagtgtctgctcactccccttccaccctcagctccaccctcagcggatgataatctcaagacacctcccgagtgtgtctgctcactccccttccaccctcagcggatgataatctcaagaaactaa

SEQ ID NO: 407256 - DNA, 1000 bp, Homo Sapiens
gtgcgctgccccatgtgctggcaggtggtggacggcagcagctccttgcccaacgtctccctggcctgggtgatcgaagccctgaggctccctggggacccagagcccaaggtctgcgtgcaccaccggaacccgctcagccttttctgcgagaaggaccaggagctcatctgtggcctctgcggtctgctgggctcccaccaacaccacccggtcacgcccgtctccaccgtctgcagccgcatgaaggaggagctcgcagccctcttctctgagctgaagcaggagcagaagaaggtggatgagctcatcgccaaactggtgaaaaaccggacccgaatcgtcaatgagtcggatgtcttcagctgggtgatccgccgcgagttccaggagctgcgccacccggtggacgaggagaaggcccgctgcctggaggggatagggggtcacacccgtggcctggtggcctccctggacatgcagctggagcaggcccagggaacccgggagcggctggcccaagccgagtgtgtgctggaacagttcggcaatgaggaccaccatgagttcatctggaagttccactccatggcctccaggtaataaccttggagagagctcagccagggtctggtggctgcgggcacgggcatctcagctccactggttcctccattcagcttaaccagcgcctcccaagcagctgcctatagctggctctataactgagcctggggaagatagaggaaagtcacatccctgccttcaagggtctcgcagacaggtggggaggcagatggtgaactgtgggtacctagaacagcagaagttcactcaagctacagaaatactagaggagggtagctcatgcctgcaatcccagtactttgggaggccaaggcaggagtattgctggaggccgggagttcgagaccagcctggccaatgtagtaacacccccgtctctacaaaaaatacaaaaataaaaaaattagttggg

SEQ ID NO: 407257 - DNA, 1000 bp, Homo Sapiens
atgagtgtatcatctgctggggcccagaaagctaaaatgccaaagaaggctttaaaggaagaccaagctgtgtgctgctgcctggtgtattacatcgctgctcaccagagtcaagccggaggtggctgcacccctctagatgctggcagtggactgttgaccactgtctttggatttagcctggccaaacttgttgaagacaaacatggtttggagtctcaaatagaagcattaaaggcaaatttagagaatgagaaaaagaaggtggaaaggtttaggaaggaagctgatcgactaaataaaagctgggaaaagagattctttattctcaggaacagctttcatgtccttaagaatgagatgtttacaaggcacacactgtttcgtcagtttgcagtgcttgctgacacatccttcaattatattaaagtaaaacccttattagtgcagtctagaacgaccatgacagctatatcctcttcaagtcattgtacatcttcaatagacggtaagcatgtggatgtagtcagtgatcaggcagcccttcaactttcaccaaaagggaagttgtcggaatccccaaaagaagagtccttggaggagccctccatgcgccagagcagccccgcagagactgttgattaacccagcagaagcctgggctgcgcagacggggcctcagaaagagtggcctcgccgtcctggtgtaaggtgcctccctcggaaaggatactatctccaaggattttctaaactaattgtttaatctctccagattatgtatattaaccagcactgcgctcgaatagacctcaatgcgcgccttgtgcgcgctcctttccacgcctttaaggaaagccctggctggtgctgggtgagcggggcgcactgaacctccggggcaaccacatccattcaggagctccggggactcagaagagcccaggcgtctaagagtgggaagggacggactttaattaaaaagtttgactccctctct

SEQ ID NO: 407258 - DNA, 790 bp, Homo Sapiens; identical to SEQ ID NO: 294799

SEQ ID NO: 407259 - DNA, 1000 bp, Homo Sapiens
caggaggggcaagcaaaggtaaaggggaggacattagctgagccctggcccacaggttccaccagcaagtgtgcagccaccttcacctgttcttcctgattggagataaacaggcccacaagcagctgccctccacccttttcctgaggctccttcaactggccactgccagcattgaccgctatgaaccctgggaccaagctgccctggccaaggtggcccagcatcacctggagggtgctcagagtgtgccccttgatgacgggtccagaatgccttggagaatctgagaatgctgattaaggagcacggtacccatgccaatctgatctttgacttggaacagcagctgaaagactccggcaagagtctcagcatgtttcagcagcagctagagcaaagcaagctcctatacaagcagcagctggaagagtgtcggcatcaagagaacctcattgagaacctggccaggcaacgggatgccctgcaagctcagcgagaggctttcctggagcagatgagcaaggcatttctggagcctctgagccagctgcaggtggctgactttgaggagatacggagctatcgagcaccaccagaatctgtggtccgggtaactgatgcaatgtgtgacttgttccaccatgaaacaggctgggccagtgccaaacagctgttatgcactgaggatttttatcaggagctggtgttcttccccaaggagaagataacagactcagagctgataaagttacatctaattctgaaggctccaggtatggacgatgcagccctgcgggcagtgagccgacctgcagccagcctggcagcctggctctgggctgttctgcactatgggctggcgcattgccggggactgcccacggacctgctgctgcagcaagtggaggcaacactcactcgggagcaggcccgcctgggctactaccagtttcaggcccaggagaccctggagcataatttggccctggctaagatg

SEQ ID NO: 407260 - DNA, 927 bp, Homo Sapiens
atgcgcggacgccgacgggcgtggcgaggggcgtggcgaggaggtggggctgctgacctcagtctcctctgtcctcaagtcgcctacgtgcgcgcccgggagctgcacactcttgaagtgaccggcctggagacggttgcccagagcaaggcccatgtagcatccctggagggcctcatccctgaagataaggttgtgcttctggcaggttctcccttacagaatgaagccaccctgggtcagtgtggggtggaagccctgacaaccctggaagtggttggccgcaggctaggaggtaataactgcctctcactgcaagtcaaccctgtacaaccagccagatatttgtggacaacacttcacagctcaaaacaaggtgaacctaactcctcagcaaaccacagatgctcctgaaagtctccaaggccagaagaaaacccctaaacatataccacactgtggcaactgtagcctagaaggtaacgaatgaagaacacagcaaatatctgagagttgctgcctgaagacacaggacaatgacctcagaaggatggggatgggctggaaaacctctggtctctaccctccttacagctgtgatttgcttctccctaggaaggtcctgcttccatgcttctccccataccccactcacttgagtgtctcacacgggatggtaactagatgtaacacttgccaaggggtcattatcacctactaaatacaaatagatgtctagcttgtctgtccacagagaggtgaatgatgagagaattcaatctcctggaatcaaaagaactttttggtgtgtattctacaaattaaaaactcaatgaccagccgggcatggtgactcacgcctgtaatcctagcactttgggaggctgaggcaggcagattgcctgagctcaagagttcgaaggccgg

SEQ ID NO: 407261 - DNA, 1000 bp, Homo Sapiens
cctccctcgcccgcagccgagcgtcccctccccccacccgtcgggctcctcggcggctactgcagaggattcagagccgagtcgctgaggaggaggctccggtccccgcgcgccatccgccaccctactggacacgggcgagagcgtcgccgccgtagcctccggagaagacaagggcatcgccgcctcagccgccgccgccgccgttttcgcctgcagctgctcaccggatcctcagtcttccacaatgaaccctgtttacagccccgtgcagcctggggctccttatggcaaccctaagaacatggcctacacgggttaccccacagcctatccagcagctgcccctgcctacaatcccagcctgtaccccaccaatagtcccagttatgctccagagtttcagttcctgcattcagcttatgcaactctgctgatgaaacaggcctggccacagaactcgtcttcctgtggcactgaaggcaccttccacctcccagtggacaccgggaccgagaaccgaacttaccaagcatcctctgcggctttcagatatactgcggggacaccatacaaggtcccaccgacccagagtaacactgctccacccccctactccccatcacccaacccctatcagacggccatgtatccaatcagaagtgcctacccccagcagaatctgtatgcccagggagcctactacacacagccggtgtatgctgcccagcctcatgtcatccaccataccacggtcgtccagcccaacagcattccctctgctatctacccagcacctgttgccgccccgaggaccaacggtgtggccatgggcatggtggcaggcaccaccatggcaatgtcagcaggtaccctgctgactacaccccagcacacggcgattggggcacaccctgtctccatgccaacatatagggcccaaggaacccctgcgtacagctacgtgcccttccagctctatccccttcctcctacctga

SEQ ID NO: 407262 - DNA, 974 bp, Homo Sapiens
atgagacagcagtgccttcagtccctgccgccaccgtccacgctctgcgttgtagagaagacagtgggtcggaagagcgccatcgccgccagtgtatgtggggccctttttatcaggtactgcatctacttttaccacaaaagacgaagtgaccccaatttcaagaacaggcttcgagaacgaagaaagaaacagaagcttcccaaggagagagctgggttttccaagttacctgaccttaaagatgctgacgctgttcagaaattcttccttgaagaaacacagcttggtgaagagttactagctcaaggtaaatatgagaagggtgtagaccatctgacaaatgcaattgctgtgtgtggacagccacagcagttactgcaggtcttacagcaaactcttccaccaccagtgttccagatgcctctgactaagctcccaacaattagagaattgtaagtgcttagagcttggctgaagatgatgtggaatgagaaacaaatgtcaacataataaaatctcagttaaaaatatttaaataattcttggtagttgagcagctccaggggaataagggcaaatatgcttgttatgaactacactgaaatctaccaaagttaatgtttactttgtgtagatccatttgtctatttttttcccagtgaaaagtatattttgatagagaacttttcattttataaatacactatgagttactgaaatattatggattttgtttattccagaaacatagttaaactttacatatgacatggcttatgttaaaaatacccagtggtcagttttgaaaataggcaaaaaaaaaaaaaaaaaaagtataggagaaactgaagaatgcacacttttttagctcatacattttgctgtaaatccggaaatttggtaaacttggttgtgtttgtgaaaactagcattaaaatttttgagcgatcatttatttccatttaatctct

SEQ ID NO: 407263 - DNA, 1000 bp, Homo Sapiens
gcggtgcggccagcacacaccccggcccgcgaggccccgggctcgcccatgaggcctctgcccagcgggaggaggaagacccgaggcatctccctaggactcttcgccctctgcctggccgcagcccgctgtctgcagagtcagggtgtgtccctatacattcctcaggccaccatcaatgccactgtcaaagaagacatcctgctctcagttgagtactcctgtcatggagtgcccaccatcgaatggacatattcatccaattggggaacgcagaagatcgtggagtggaaaccagggactcaggccaacatctctcaaagccacaaggacagagtctgcacctttgacaacggctccatccagctcttcagcgtgggagtgagggattccggctactatgtcatcaccgtgacggagcgcctggggagcagccagtttggcaccatcgtgctgcacgtctctgagatcctctatgaagacctgcactttgtcgctgtcatccttgcttttctcgctgctgtggccgcagtattaatcagcctcatgtgggtttgtaataagtgtgcatataaatttcagaggaagagaagacacaaactcaaagaaagcacaactgaggagattgagctggaagatgttgagtgttagccaaggctgggcctgactgcattcctacctcaagaggaaaccattctccaacaaaaagagcaagcacagctattatacccattgtgtgtggtcctgttgcagcccgctcctaacaggacagtgggagattaacaacattgactgcatggagttgaggactgtggatgggacaaagctagtattaggactcgcgctaagttcaaggagaagagtgattgaggctttgaaccaggagcttcgcttggctgcagcatcagggccgtgctgacacataaccaatgggtgagtgcaggcgttggctgcttgctcacgacacttgctctggtgtgcaggatggcctgttgtcaga

SEQ ID NO: 407264 - DNA, 1000 bp, Homo Sapiens
accactgatgacttacaagttgcacaaagattttatcattgctgttaaatctgatgatcaaaactacagggtggaggctgtacatgcattggtgcacaaattgccggagaaaaacagagagatgctggacatcttaataaagcatctggtcaaagtatcactacacagccaacaaaatctcatgactgtctcaaatcttggtgtcatatttggcccaactctaatgagagcacaggaagaaactgtggctgctatgatgaatattaaatttcagaatattgtggtagaaattctgatagagcactatgaaaagatttttcatactgctccagacccaagcattcctcttcctcagcctcagtctcgatctggatcccgaaggacacgagcaatctgcctctctacagggtctaggaagcccagagggaggtatactccatgcctggccgaacctgatagtgactcctatagcagcagcccagacagcacacctatggggagcattgagtcactctcttctcattcctctgaacaaaatagcactacaaagtcagcttcctgccagcccagggagaaatctggagggattccttggattgcaaccccatcatcttccaatggacagaaaagccttggtctgtggacaactagtcctgaatcaagttccagagaagatgcaaccaagacagatgcagaatcagactgccagagtgttgcttcagtcactagcccaggagacgtttccccacccatagacctagtcaagaaagagccttatgggctttcaggactgaaaagagcttctgcttcttctctcagatccatctctgcagctgaaggaaacaagagctacagtggatctattcaaagcttaacttctgtaggttccaaggagacacccaaagcttcaccaaacccagacctgcctccgaaaatgtgcaggagattaagactagacactgcctcaagcaatggctatcagcggcctggctcagtgtaa

SEQ ID NO: 407265 - DNA, 1000 bp, Homo Sapiens; identical to SEQ ID NO: 220459

SEQ ID NO: 407266 - DNA, 1000 bp, Homo Sapiens; identical to SEQ ID NO: 224915

SEQ ID NO: 407267 - DNA, 1000 bp, Homo Sapiens
gagccgagtgattctttacaccatcacccttaccaaccctctggctcccaaaactgccactgtcagggagacacagaccatgtacaaggcgagccaggagagtgaatgttacgtgatagatgccgaagtcctcacccacgacgtgccctaccatgactacttctacacaatcaatcgctacacgctcacccgtgtggctcggaacaagagccgactcagggtctccacagagctgcgctatcgaaaacagccctgggggttagtgaaaacgttcatcgagaagaacttctggagtgggctggaggactacttccgccatttagagagcgagctggccaaaacggagagcacttatttggctgagatgcacagacaatctcccaaagagaaggccagcaagactacaacggtgcggaggaggaagcgtccccatgcccacctgcgagtccctcacctggaagaggtgatgagcccggtcaccacgcccacagatgaggatgtgggccacaggatcaaacatgtggcaggttccacacagacgcggcatatcccggaggacacccccaacggtttccacctgcagagcgtgtccaagctgctgctggttatcagctgtgtgatctgtttcagtctggtgctgctggtcatccttaacatgatgctcttctacaaactctggatgttggaatacaccacgcagaccctcactgcctggcagggtctaaggctccaagaaaggttaccccagtctcagacagaatgggcccagctcttagagtcccaacaaaagtaccacgatactgagctccaaaaatggagggaaatcatcaaatcctcagtgatgctccttgaccagatgaaggactcgctcatcaaccttcagaacggcatcaggtcccgcgactacacgtcggaaagtgaagaaaagaggaatcgctatcattgacaaggcaggaacagggtggctgcaagaggcctgtgcaatacatgtacatagacc

SEQ ID NO: 407268 - DNA, 1000 bp, Homo Sapiens; identical to SEQ ID NO: 119222

SEQ ID NO: 407269 - DNA, 1000 bp, Homo Sapiens; identical to SEQ ID NO: 119223

SEQ ID NO: 407270 - DNA, 1000 bp, Homo Sapiens
acaaaaatttgagaccagtaagtactacgtgagtatcattgatgccccaggacacagagacttcatcaaaaacatgattacagggacatctcaggctgactgtgctgtcctgattgttgctgctggtgttggtgaatttgaagctggtatctccaagaatggacagacccatgagcatgcccttctggcttacacactaggtgtgaaacaactaattgttggtgttaacaaaatggattccactgagcaaccctacagccagaagacatatgaggaaatcgttaaagaagtcaacacttacattatgaaaattggctgcaaccttgacacagcagcatttgatatctacaaaaattggtggtattggtactgtttctgttggctgagtagagactggtgttctcaaaccctgtatggtgctccagtcaatgttacaactgaagtaaagtctgttgaaatacaccatgaagctttgagtgaagctcttcctggggacaatgtgggcttcaatgtcaagaacgtgtctgtcaaggatgttcgtcatggcaacaatgctggtgacagcaaaaacgacccaccaatggaagcagctggcttcactgctcaggtgattatcctgaaccatccaggccaaataagtgctggctatgcccttgtactggattgtcacacggctcacactgcatgcaagtttgctgagctgaaggaaaagattgatcgctgttctggtaaaaagctggaagacggccctaaattcttgaagtctggtgatgctgccatcatttatatggttcctggcaagcccatgtgtgtagagagcttctcagactatccacctctgggtcactttgctgttggtcatatgagacagacagttgccatgggtatcatcaaagcagaggacaggaaggctgctggagttggcaaggtcactaagtctgcccagaaagctccaaagcctagtgaatattatcccttgtacctgccaccccagtcttaa

SEQ ID NO: 407271 - DNA, 1000 bp, Homo Sapiens; identical to SEQ ID NO: 294809

SEQ ID NO: 407272 - DNA, 1000 bp, Homo Sapiens; identical to SEQ ID NO: 224917

SEQ ID NO: 407273 - DNA, 753 bp, Homo Sapiens
atgagctggtcatcttcagcccacgggctggccaatttggaacttaatgggcctttgcgtcctccttccctgagcctccttttattccagacttctcagtgtgagtctagcctcgccacaagccggcggccagagccccagaccacacagaccgtgcgctcctccgccctcccggcgccgccggcctcgcccatgtctcagtacgcccctagcccggacttcaagagggctttggacagcagtcccgaggccaacactgaagatgacaagaccgaggaggacgtgcccatgcccaagaactacctgtggctcaccatcgtctcgtgtttttgccctgcgtaccccatcaacatcgtggctttggtcttttccatcatgtctctgaacagctacaacgatggagactacgaaggagccaggcggcttgggcggaatgctaagtgggtagccatcgcctccatcatcattggccttctcatcatcggcatttcttgtgcagttcacttcacaaggaaaggggctggaaaatctgacattagaggagtcgaagcctgaagatgagcccaaaacccatgaatcttgcctgaggaaccagcggtcagtgggctgtgagcgtggaggatggacctcatccacacacaccccaaaggagtttctaaggaatggatccttgacttcagactgtgagatcttttcctccaggactctccagaggcaggtccctggcaaatgaacaagaaaaaaaaaaaaaaa

SEQ ID NO: 407274 - DNA, 677 bp, Homo Sapiens; identical to SEQ ID NO: 294810

SEQ ID NO: 407275 - DNA, 1000 bp, Homo Sapiens; identical to SEQ ID NO: 119224

SEQ ID NO: 407276 - DNA, 1000 bp, Homo Sapiens; identical to SEQ ID NO: 224920

SEQ ID NO: 407277 - DNA, 525 bp, Homo Sapiens; identical to SEQ ID NO: 294812

SEQ ID NO: 407278 - DNA, 858 bp, Homo Sapiens
atgaggaaaggctgtcagagagaaaaggcagcatgcaccagatctgtcatttctggaatcttgtgcgaattgtgtatcaacttgaggtcggtagcgactggatcagcttttgactgtcacagtgtcccagaaacaaggcaaatgaatgctgggaggcttgttatcaagagggcagtcagtatctgtgagggcctggggcctgctgagaaagtcaaagtgaagccatcagaggaattcccagaaggctacatgcctccttctcataggactgagaaaggatggggtaacatggggttacagagtgagttctccaaccaggtggccagagcttggggaggtataagagaacctcagggtggtggtagtgtacatttgaaaaagccccgcctttccaacttggacgcggcagaatggttcccgcaaagaagggtggcgagaagaaaacgggccgttgccatcaacgaagtggtaacccgagaatataccatcaacattcacaagcgcatccatggagtgggcttcaagaaacgtgcaccttgggcactcaaagagattcggaaatttgccatgaaggagatgggaactccagatgtgcgcattgacaccaggctcaacaaagctgtctgggccaaaggaataaggaatgtcctataccgaatccatgtgaggctgtccagaaaacgtaatgaggatgaagattcaccaaataagctatatactttggttacctatgtaactgttaccactttcaaaaatctacagacagtcaatgtggatgagaactaatccctgatcgtcagatacatcaaataaagttataaaattgccaaaaaaaaaaaagtaaaaaaaaaaaaaaga

SEQ ID NO: 407279 - DNA, 556 bp, Homo Sapiens; identical to SEQ ID NO: 119227

SEQ ID NO: 407280 - DNA, 1000 bp, Homo Sapiens; identical to SEQ ID NO: 294815

SEQ ID NO: 407281 - DNA, 1000 bp, Homo Sapiens; identical to SEQ ID NO: 294816

SEQ ID NO: 407282 - DNA, 997 bp, Homo Sapiens
atgaacattcggggcgccccggacctcgggcagcccagtgacgaccccagcagtggtggtgagcgggagcggattcgacagcgcatgaagatggtcatcgggcagcttgagggcatccttcgcgagctcaaggaggtggccaaggagctgagggaggtggtgagccagatcgataagctaacctcggacttcgactttgaactggagccggacgactggaccacggccactgtgagcagcacctctagcagtgacaaggcgggcatgggtggcccctttgacctgggccacctggacttcatgacagccgatatcctctcagacagctgggagttctgctccttcctggacgtctctaccccctcggactccgtggatggtcccgagtcgactcggccaggggctggccctgactaccgcctcatgaatggtggcacgcccatccccaatgggccacgagtggagaccccagactcctccagtgaggaggcctttggtgctggccccacggtgaagagccagctgccccagcggaccccagggacacgggagagggtgcggttcagtgacaaagtgctctaccatgctctgtgctgtgacgatgaggagggggacggtgagcaggaggtggaggaggaagaagtgggcttgccccctgagcctgcccatacagaggcccatgcaggcccccacaagccctccccagccccctacaagtcacggcgctctccactgaccagccgccactcaggctctaccttggcccctgaacagactcgaagggtcacgaggaacagcagcacccagacagtgtcagacaagagcacgcagacggttctgccctacacagccactagacagaaagccagggggaaaaactaggggccggggagggggccgggggcggtgggcacatagagctataaataaatatatatatatatatatatatatatatatttaaacaaatgaagtcataataaaatttaaaaatgct

SEQ ID NO: 407283 - DNA, 1000 bp, Homo Sapiens; identical to SEQ ID NO: 224923

SEQ ID NO: 407284 - DNA, 1000 bp, Homo Sapiens; identical to SEQ ID NO: 119228

SEQ ID NO: 407285 - DNA, 1000 bp, Homo Sapiens; identical to SEQ ID NO: 224925

SEQ ID NO: 407286 - DNA, 1000 bp, Homo Sapiens; identical to SEQ ID NO: 294820

SEQ ID NO: 407287 - DNA, 1000 bp, Homo Sapiens; identical to SEQ ID NO: 294821

SEQ ID NO: 407288 - DNA, 1000 bp, Homo Sapiens; identical to SEQ ID NO: 294822

SEQ ID NO: 407289 - DNA, 1000 bp, Homo Sapiens; identical to SEQ ID NO: 224926

SEQ ID NO: 407290 - DNA, 1000 bp, Homo Sapiens
aggcctgtgaggctctcaggaccaacaaggaaaccaccatgctggactattggaagtcggtcactacatgcaacgttattgattatgtcagtacagcctgggagagcattggtcaggctactaccaataactgttgggaaaatgtttggccagactgcgtggagaattttgaagggtttgaaggtgttacagaaaatataaagaacactgtcagagacataatgcatatggcacagcaggtaagtggagagggctttgatgacgtgaaggaaggagatgtggagtacattttggcagagaaggcagtggaaccaaccaacgaagacctggatgagatggcaaaagaaggcattggagttgatggccatgaaagtcggcccaagacttccagaattgtccctctcacagcgccaaaatatcagaatggagttctgccttggaaaaaatttttagcgacatggaagagtgtgaccctacgcttgatcgaagcctcaaatttaaatggctggcctccactgcgtttgccccttataccgagatgcttaaagatttcaggcagaaaagccaggcaggcaaggctaatgcaatttctcaagccagtttgggagggaagattgcccactccttcaacaagtgtcaagagccagactcctaaggtagaaatgccagaggttgacctgccaccctcttcctcttctgcagaataaatttcactcacccctcccctggtttctgtggggcaagccaaggtcgagaggtttaaccacattgtgcagctccatcaaccgtaagattttagttgatatttttataaaacttaggatgctccatctttgaactttttccctttatttgtattgctgtactgtagggtatacagtatgtgtgcaaagtagtgtatgtgtttactgtgggaactgtacagtatgttatactgttgactgtatatgggaactatatgtgtgtactctgtgtgtgccaatgaaaaggttgtacaggc

SEQ ID NO: 407291 - DNA, 1000 bp, Homo Sapiens; identical to SEQ ID NO: 224927

SEQ ID NO: 407292 - DNA, 1000 bp, Homo Sapiens; identical to SEQ ID NO: 119230

SEQ ID NO: 407293 - DNA, 1000 bp, Homo Sapiens; identical to SEQ ID NO: 224929

SEQ ID NO: 407294 - DNA, 922 bp, Homo Sapiens
caaattcaacccatcacataggccatccccgaggccacctctgcgtcatctttgtctacagattctgtgtccgtcttcctctcctcattgactctgcatgaaggggatttctggtggggtaacggtagcagctcttgccgcacgtgcagagagagaggaacttccagtgcccgctatggagccacagcccacagcatggggaagtccccatccagaggcagtgctgcagctagaggtagctccagagtcctccgggccctgcaccgatacagccaaagaccagcaaagcgacaagctgccagacctcatgccacctgccgtagccactgggctcagccctggagctgagagcatcgctggagatagacgtggcagagaagaggttgcgagcatggccccagccagcagctcccacgctgcccctagtcctgggcatggagcgagccttggtgtcagagaccagggtgtgcagtctgagctcctctaccttactaaagagagacctcttttatttaccagagccacagccctgctgcctcaggaccttttcattctgccggtgctggggctgtctatctgcaagctggaggtgttgagagcaggaaaaggaggctgtgaggaagggttcgggcagctcctcctgctctcagaggtggcctcctcctccaggcatggaggtctgtccactactgggcttctgggctatttgcccctgatttgctccctggtacgggctcttcttaacaggcaggcaaggggtgcggggaccaggcgagggcttcaaagggtacagtaccaaatcttccaaactcagcacttgtgccctggggtctccaaactgtcttctgccctaggatttattcatactgttaaattaccagtttatgcaaatgatatgtaaataaagctcaattttttgaaa

SEQ ID NO: 407295 - DNA, 1000 bp, Homo Sapiens; identical to SEQ ID NO: 119231

SEQ ID NO: 407296 - DNA, 1000 bp, Homo Sapiens
gagacctctcagccactgagcctgccacgtgtttcccgagcacccagaaacccacagagccttccgtgcccgtccagcccctgctcccagagtccctggcccggagcctgctgccgagcacagaataccagaagcagctcctggcagcacaggtgcaacttcagtgcagccccgctgagctccaggccgagctgctgcatagccaggcccggctggcagagctggaggcccaggtgcggaagctggagctagaacgggcccagcatgagctgctgctggggagtctgcagcagcagcaccaggcagacctggagctcatcgagagtgcacacagaagccgcatcaaggtgctagaaacatcgtaccagcaacgggaggagcggctccggagagagaacgaagagctgtcagctcggtatctgtcgcagtgccaggaggccgaacaggcccgtgctgagcttacggcccagcaccagcggcgcttggcggccatagcgcaggagaaggaccaggaaatggagcggctccgggagctgcagcgggcgtccatcctagacatgcgcagagaccacgaggagcagctgcagcggctaaagctgctgaaggaccgagaggtcgatgcggccaccagtgccacctcccacacgcggtccctgaatagcatcatccaccagatggagaagttctccagcagcctgcacgagttgtcctcccgcgtggaggcctcgcacctcaccacctcccaggagcgggagctggggatccggcagcgtgacgagcagctgcgggcactgcaggagcggctgggccagcagcagcgggacatggggagggacgaggagggaagcctctgtgctgctcacctgcccaaagcccagctcagcgggtacgcagtggaggcgacaaggaaccaatcacaactacagaggtttctctgatcctcctccactcccgctgcttcaacttgactaagcttaaaaaaactgcttttgccatggct

SEQ ID NO: 407297 - DNA, 991 bp, Homo Sapiens
atgttgacagcgtcgcctagcaacgggaaatggcggaaccgggcggcgcggcgggccggtcccatccggaagatggatcggcttctgagggagagaaggaagggaataatgaaagccacatggtgtcaccaccagagaaggatgatggccagaaaggtgaagaagctgtcggtagcacagagcatcctgaggaagtcacaacccaagcggaagctgcaattgaagagggggaggtggagacagaaggggaagcagcagtggaaggggaagaggaggctgtgtcctatggagatgctgaaagcgaagaggaatattactatacagaaacttcatccccggaagggcaaatcagtgctgcagatacgacttacccgtatttcagtcctcctcaggaactgcctggagaggaggcatacgatagtgttagcggggaggctggtctccaaggcttccagcaagaggccaccggtccaccagaatccagagaaaggagggtcacctccccagagccatcccacggagtcttaggcccgtcggagcaaatgggccaggtcacctctgggccagcagtgggcagattggtgagtagccctgacttctgttttgtgccagtgtcgcacggcccacggggtttgtcaccctatgtgaggaacttgggaatacattataaatacaaattgcaatccctgttagaaatgtcttagcaaggctgggtgcggtggctcacgcctgtaatcccagcactttgggaggcgaaggtgggtgggtcacctgaggtcaggagttcgagaccagcctggccaacgtggtgaaatcctgtctctactaaatatgcaaaaattaggcaggcgtggtggcgcacgcctgtaatcccagctactcaggaggctgaggtgggagaattgcttgaacccgagaggcggaggctgcagtgagccaagatcccaccattgcactatagcctgggcaacagagtgagaccttgtctcaa

SEQ ID NO: 407298 - DNA, 1000 bp, Homo Sapiens
ccaggcagagttcccgctgccctacgacagcgactgccacagctccttctcggacgaggacgaggacgggccggggctggcggccggcgtgccctcccgcttcctcgcccgcctgtccgtgtcctcttcctcctctggctcgtccacctcctcctcctcaggctccgtgtccacctccagcctctgctcctccgacaacgaggactcgtcctacagctcagacgacgaggacccggctctgctgctgcagacctgcctcacccaccccgtgcccaccctcctggcccagcccgaggccctgcgctccaagggcagcggccctcacgcgcatgcccagcgctgcttcctgtccagggccacggtggctggcaccggtgcgggctcaggccccagcagcagcagcaaatccaagctcaagcgcaaagaggccctgagcttctccaaagccaaagagctctcccggaggcagcggccgccctccgtggaaaaccggccaaagatctcagccttcctgcccgcccggcagctctggaagtggtcggggaatcccacacagcggcgtggcatgaaggggaaggcccggaagctgttctacaaggccatcgtgcggggcgaggagaccctgcgtgtcggggactgtgccgtcttcctgtcagctgggcggcccaacctcccctacatcggccgcatcgagagcatgtgggagtcgtggggcagcaacatggtggtcaaggtcaagtggttctaccaccctgaggagaccaagctgggcaagaggcagtgcgacggcaagaatgcgctgtaccagtcctgccacgaggatgagaacgacgtgcagaccatctcccacaagtgccaggtcgtggcgcgcgagcagtatgagcagatggcccggagccgcaagtgccaggaccggcaggacctctactacctggcgggcacctacgaccccaccaccgggcgcctggtgacggctgatggcgtgcccatcctatgctga

SEQ ID NO: 407299 - DNA, 1000 bp, Homo Sapiens
gagttctcctgctttcctcccttaaaaaagacaagattaggaacaacggctggcaagagaggaggggaaagcttaattctccacagatgctgcgcaagggaaccaatgggtcacgcccactcacgggtggccgcctctctgttccatcccggggatgttgggctttcccctcggtccggggcgagcgcacttcccacccggagactgagcgggcagcactcgcaggccaggagcgcgttccgggaggcgccggcgcctccccgcggcctgggcgcacgtgcctgggctggggccggagcccgcggtcgcgccgcgccgggcgggtcaccagcccagccttgcagccccagcccgccgcgtcccggcgctcagcctccgctccagaggcgagcgctgcgcttcgggcgccgcaatctccaggacacggcctcgcggacaccttccgcctcggggaatcggcagcataggcggcgcgaacggccgccgccgcctcggctcctctctcgagtccttcccgtcacctcgctgagagccggtcctggtcgcggggacatctctctccttcctccgaggctcgtgggaccaacggacggacgcagccagcgagggccggactgcgggacgcggccagagcagttgaacatcagatacccagagtgacatcaggttaaaaaaaagcctgcaatttggatcttttcctgactcggaagcaaggaaaatggacaattgataatcaaaggctaaatctcttctgggatccactgaatgccactagagggtctgctcgagagaattcctgattgaatgacaacggcgctaagaacaaaatcaaagttctcctctggactcttccaaaacatttagacatttactggcttccaaaagaaggaactcatggtgatattgaccatttttaaagaaaataaaagcatgaagccgagcatggtagtacacacttggaatcccacatatttggaagactgaggctagaagattgctt

SEQ ID NO: 407300 - DNA, 1000 bp, Homo Sapiens; identical to SEQ ID NO: 119232

SEQ ID NO: 407301 - DNA, 1000 bp, Homo Sapiens; identical to SEQ ID NO: 294830

SEQ ID NO: 407302 - DNA, 954 bp, Homo Sapiens
atgggcagaaagttggcctcaggccgccttttttccccttctgcaacgcctcgggctctctgggcctcagtttccccttctgcaacgcatcgggctctctgggcctcagtttccccttctgcaacgcctcgggctctctgggcctcagtttccccttctgcaacgcctcgggctctctgggcctcagtttccccttctgcaacgcatcgggctctctgggcctcagtttccccttctgcaacgcatcgggctctctgggcctcagtttccccttctgcaacgcatcgggctctctgggcctcagtttccccttctgcaacgcctcgggctctctgggcctcagtttccccttctgcaacgcctcgggctctctgggcctcagtttccccttctgcaacgcatcgggctctctgggcctcagtttccccttctgcaacgcatcgggctctctgggcctcagtttccccttctgcaacgcaccgggctctctgggcctcagtttcctcttctgtaacgcatcaggccctgtttcggggatcaagtcggatgagtcagtgctcaagggcatgcaggcacttgacatttattaggcacctgctgtgtgctgagcgccggtggagcatgtggggagacctcagtggagccgacgggtgcttcgggggtgatcagggctggtggggaggagtcgtccggctggaaaggggtggcccatcccgagtggggactcatttcccctccgtgactgacggctccggggctccctgcgggtctccggctttcgaggacaggaagaaggcagccagggcaggggtgggggtcctcacagccagggcagccccagcgcgttggctccaggagcccgggtgggggccgaccgttggggtgcccctccctgtcctcggccttacctccaccctggagggcaccttgaacataacaggaaatttcaaataa

SEQ ID NO: 407303 - DNA, 1000 bp, Homo Sapiens
attcaacaatttctcttcctttcaaatacatgcaacaatgcacagaggacagaatgcctatgaatgtaaagagtgtgacaaagcattcatatctgccaagatccttcgagtacatgcaagaacacaccctggagagaaaccctatgaatgtaaggaatgcggaaaagcgttcaattatttttcttctttgcgtatacacaaaaggatgcacactggagagaaaccatattaatgtaaggattgtgggaaagcattcagtttgcctggttcctttcgtagacataaaagggctcacactggagtgaaaccgtatgaatgcaaggaatgtggcaaagccttcacttcttctggttcctttcagtgtcataaaaggattcacactggagagaaaccctatgagtgtaagcagtgtggtaaagccttcatttcttccactgccattcgtagacatgaaaggactcacactggagagaaaccctatgagtgtaagcaatgtggaaaagcctttatttctttcagttccattcagtaccatgaaaggactcacactggagagaaacagtatgagtgtaagcagtgtggtaaagccttcatgtcttctactgcatttcagtatcatgaaaagacccacaccagagagaaacactatgaatgtaagcagtgtgggaaagccttcatttcttccggtagccttcgatatcatgaaaggactcacactggagagaaaccctatgaatgtaagcagtgtggtaaagccttcagatctgccactcaacttcagatgcatagaaagattcacactggcgagaaaccctatgaatgtaagcaatgtgggaaagcctacagatctgtctcacaacttctggtgcatgaaaggactcacactgtagagcaaccctatgaatataagcaatatgggaaagccttcagatttgctaagaaccttcaaatacagacaatgaatgtaaacaattaaatgtttatagcagctgcatactaa

SEQ ID NO: 407304 - DNA, 1000 bp, Homo Sapiens; identical to SEQ ID NO: 294832

SEQ ID NO: 407305 - DNA, 1000 bp, Homo Sapiens; identical to SEQ ID NO: 294834

SEQ ID NO: 407306 - DNA, 1000 bp, Homo Sapiens; identical to SEQ ID NO: 224932

SEQ ID NO: 407307 - DNA, 1000 bp, Homo Sapiens
ttccagggatggtttccatagactgtgccagctgctcaaagaccttgcctcaaagggaaacttagaatggctgcatctggccaaacatgaagccattgtgtaccgtcacagacaggccctggagtcacaagacacaaggatctcaagtagacagtccatgagtccaaaatacctgaaagtgattcctcctataaaagcaaaggaaaaggagagctggccaaaacctttggctgtccccacacaaaagtccccattagctaccaagaggattccagacccaagggctaaaaattggcatcttctaggagaaccttacagaagtgagagggcacagcagatatccattgctcacaaggagatggaaatgcaatacttttatcctgccaccagagacatttttccaagtgcccatgcctctgtggaaaaacaaaccctggcactgatgtttcaaaaggacttctgggattttaaggataaacgcaggtttcctaaactgcccaagttagagaagaagacacagcccatttctaaaaaaaaggaagagttgcctttgtgggagacatttgtggcactgtaccatgttttgcggatgctgcagcagcgatatccaaaagacagcactgcttggatggaacagttctaccagctcatggacctgtaccaacttaagtcccccagaatccagaagctgcttcaggagctgctaatgagagaggaacctcaaccccaagagatcatctacgaagaggccctaaaagccacagagctagttcccggggaacggctgttctgctgcctgttttgtggcagttctcatactcctagaagtcctcaggagttccagggtgcggtacccctcccatggcagaactgtgtgcgcaccatccttcccgtgggcattgcccggtatgggatcttagaacttgcctggaagagcctgcctgaagctgatcttcatctcaccaaggcactgacacacaccgttgctcccactctctaa

SEQ ID NO: 407308 - DNA, 1000 bp, Homo Sapiens
ctttcaccactggagcctgggtgactgcaagtttggactgacgtttcagagccctgcagaggctgatgagttccagaagagcctgctggctgcgctggccgcactgggtcgaggctcactcaccccctcctcctcctcctcctcctcctctccttcccaggatactgcagagaccccctgccctctgacgtcccacgtggacagcgactcctcctccagtcacagccgccaggagactcctcccagcgccgctgcggcccccatcatcacgatggagtcagcttcaggcttcgggccgaccacgcccccccagcgccgccgctcctccgctcagagctaccctccgcttctaccgttcacggggattccggaaccctcagagcccctggcaggggcagggggcctggggtggggcggccgcggctacgaggattaccggcgctccgggccacccgcgcccctcgccctgtccacctgcgtcgtgcgcttcgccaagaccggcgcgttgaggggcgctgccctgggtcccccagcggcactacctgcccctttgaccgaggctgcgcccccagcgccccccgctcgcccaccccccggcccgggcccatcctctgcgcctgccaaggcctccccggaagcggaggaggcagcgcgctgcgtgcattgccgcgcgctcttccgtcgcagagcagacgggcgtggcggccgctgcgcagaggccccggacccgggtcgcctcctggtgcgccgtctaagctgcctgtggtgcgccgagagcttgctctaccactgcctgtcggacgccgagggcgacttctcggacccgtgcgcctgcgagccgggccacccgcgccccgccgcgcgctgggccgcgctggccgcgctctccctggcagtgccctgcctctgctgctacgcgcccctgcgcgcgtgccactgggtcgcagcgcgatgcggctgcgccggctgcgggggtcgccacgaggaggctgcgcggtga

SEQ ID NO: 407309 - DNA, 626 bp, Homo Sapiens
atggggatggttggaactcagacctggcagaaaaatatggctcaggagactaaccagaccccggggcccatgctgtgtagcacaggatgtggcttttatggaaatcctaggacaaatggaatgtgttcagtttgctacaaagaacatcttcagaggcagcagaatagtggcagaatgagcccaatggggacagctagtggttccaacagtcctacctcagattctgcatctgtacagagagcagacactagcttaaacaactgtgaaggtgctgctggcagcccatcagtttttcagcccagtacttctcagagtaaagaaaaagctcctgaattgcccaaaccaaagaaaaacagatgtttcatgtgcagaaagaaagttggtcttacaggtttgactgccgatgtggaaatttgttttgtggacttcaccgttaactctgacaagcacaactgtccgtatgattacaaagcagaagctgcagcaaaaatcagaaaagagaatccagttgttgtggctgaaaaaattcagagaatataaattacttcttgtgaagagactgaaactttgtttttattttaatacatcataggaaaacattaaagagcagatgcatggccattttt

SEQ ID NO: 407310 - DNA, 1000 bp, Homo Sapiens; identical to SEQ ID NO: 294836

SEQ ID NO: 407311 - DNA, 1000 bp, Homo Sapiens; identical to SEQ ID NO: 224934

SEQ ID NO: 407312 - DNA, 1000 bp, Homo Sapiens; identical to SEQ ID NO: 224935

SEQ ID NO: 407313 - DNA, 1000 bp, Homo Sapiens; identical to SEQ ID NO: 119233

SEQ ID NO: 407314 - DNA, 680 bp, Homo Sapiens; identical to SEQ ID NO: 57108

SEQ ID NO: 407315 - DNA, 1000 bp, Homo Sapiens
gcccctggcctgctttggcctggtgtgcctgggcctggtctgcctcagcgtcctcctgttccctggccagcccagccctgcccgatgcctggcccagcagcccttgtcccacctcccgctcacgggctgcctgagcacactcttcctgcaggcggccgagatcttcgtggagtcagaactgcctctgagctgggcagaccggctgagtggctgcctgcgggggccctgggcctggctggtggtgctgctggccatgctggtggaggtcgcactgtgcacctggtacctggtggccttcccgccggaggtggtgacggactggcacatgctgcccacggaggcgctggtgcactgccgcacacgctcctgggtcagcttcggcctagcgcacgccaccaatgccacgctggcctttctctgcttcctgggcactttcctggtgcggagccagccgggctgctacaaccgtgcccgtggcctcacctttgccatgctggcctacttcatcacctgggtctcctttgtgcccctcctggccaatgtgcaggtggtcctcaggcccgccgtgcagatgggcgccctcctgctctgtgtcctgggcatcctggctgccttccacctgcccaggtgttacctgctcatgcggcagccagggctcaacacccccgagttcttcctgggagggggccctggggatgcccaaggccagaatgacgggaacacaggaaatcaggggaaacatgaggcccccatcctgcaccctgccaggcaccacagcagtgggaggccaggtgggggcacacaggcatatgcccagggcagagcccgccgaggtaggggtggcacccagcttcctactctgccctttgcccagtgggtagacagcatcatgactgtcaccagtaccagggacagagcccaggatctgacgccagcacgccgccaggcccacacagggtctccggtcagagtcccagggtcagctcccagcagggcctag

SEQ ID NO: 407316 - DNA, 1000 bp, Homo Sapiens
cccgcccagacctgccacctgtgaccaagagcaaatccaaccccaaccttcgggctacaggccagcggcctcccatacctgacgaactgcagcccaggtccctggccccaaggatggctggcctccccttccggcctccctggggctgcctttccctggtgggcgtgcaggactgccccgtggctgccaagtccaagagcctgggcgacctcactgctgatgactttgcccctagctttgagggcggctcccgcagactgagccacagcctgggcctcccgggagggacacggcgggtgtcggggccaggggtgagacgggacaccctgacagagcagctgcgctggctcactgtcttccagcaggcaggagacatcacgtcacccaccagcctgggcccggctggggagggggtggcagggggccctggttttgtgcggcgctcctcctcccgcagccacagccgcgtgcgtgccattgccagccgggcccgccaggcccaggagcggcagcagagactgcagggcctgggccggcagggacccccagaagaggagcggggcacccccgagggcgcctgctccgtgggccacgagggcagtgtggatgcaccagcaccctccaagggagccctcgggccagcatccgcggctgctgaaaacctggtcctgctccgcctctgaccgtcagtggtgggaacctgggcggctctggaggcccagggcaggggtgggcgtgttgtttgctcaggaaacagggcagccaggcccccaaaactgtgtccccctggctgccctgtgtcccctccacccctgcctccctcctgcccctgctcccggggaggaaaggctaaagctgctggcccggggcccacaggaggggcttcgaggctggccctgccaggcagttttcccggcgttttaggatctgtacatagagaaatatttaaatttttagaagcaaaacttatacaacattaaaatgataccaagtccctttc

SEQ ID NO: 407317 - DNA, 539 bp, Homo Sapiens
ggaggaggctccgagccccccctccccgtgctaccccctccccccgggtgctggctccatgtctgtgtgaccggcctcaggggtagagtccaggcccgacgcggggcgggccagcggcggcggcagctgaggtgagagacggcggcggcggcgcgggcacccggccccccagcgggaggatgaagcggcggaacgccgactgcagtaagctccgccgccccctaaagcggaaccggatcaccgagggcatttacggcagtacatttttatacctgaaattcctggtggtgtgggcacttgtcctcctagcagattttgtcctggagttcagatttgaatacctgtggccattctggcttttcatcagaagcgtctatgattccttcagataccagggactggccttctcagtattttttgtttgtgtagcattcacgtcaaatataatatgcctgctgttcatccccatacagtggcttttttttgctgctagcacatatgtatgggttcagtacgtatggcacacaggtaagtcttaa

SEQ ID NO: 407318 - DNA, 1000 bp, Homo Sapiens
tggggcctgtcagaaccaggaccttgaggcacctcagctgcagccctgtgcttcagaaggagtgaacttggactgtgggacaacagggcttcctggcactacttctctctcaagccaacccttcgtcagtgacaagggcccacctctcagatgggagaagggccccataccccctgcattctgggccatggggcttcaggagagtaagggtaccagtttcttcctgagccatgaccagagccattcccagataaatgaggtttcctggaaggatgttaccagtgccttatctctggccaacatggtgctggggctcttctccatcatcttcagcttcagcaggaaatgccactatgcctcccggatgctcctggtcagcttcctgttagacatggcagtcagggcaatgaccagccacatcaacatatgctccaaattgggagccgagctgaatgactttgccgtcttcaccaccttcggcttggcctccgctctgctcctaggcgtggatggacttctgagtgggatcctggccatcatctatgtgtcagctgcttctttccacttgtgcttttattcacctggagtcccctccacatacaagggtctaccctgcccctatgcttcctgcatcttggcttccacctcccttctgaccaaaggcaacaggttcatcctctgctgcatggcctcactcatgattctcttcatgatggaccagagctactatccatatgacaaaatcctggagtctgagaactggaaaaaattggtttatataggaggtgtcatcatgctgtttttctccccattgtctctgtctgctttttactgcctgatgtggtcgctctcgtacatcttctttccagatgctctgtctgataaggcagccaccaaaacaaaaaacaaaaagcacctgcactcccctcttgctgttgatgcaagcctgctgctagctctccacatcaccggtgagggaatcctagcttcaggcctctaa

SEQ ID NO: 407319 - DNA, 746 bp, Homo Sapiens
gaatctttgctcatgcacttatctgctttttattctgtttactcaggaataactgtgtttatcaatatttgggctcttcaccacaacccctatttctgggaaaaccctcaggtctttaaccccttgagattctccagggaaagttctgaaaaaatgcatccctatgccttcataccattctcagctggattaaggaactgcattgggcagcattttgccataattgggtgtaaagtggcagtggcattaactctgctctgcttcgagctggctccagactactcaaggcctccccagcctgttcgtcaaatgctcctcaagtccaagaatggaatccatgtgtttgcaaaaaaagtttgctaattttaagtcctttcatataagaattaatgagataattttcctaccaaaggaagaatggaaggataaatataatacaaaatatatctatatggttgtttaacaaattatataactttggatacttctgactggttttaacatccattaacagtaattctaatttccttgctggatctggtgaaacccacagaaacacctgaaaaaactcaagctgacttccactgcgaagggaaattattggctcgtgtaactagtggtagagtggctttcaagcatagtttgatcaaggctccagtcaatatctgcattacttttatctctgcaaatatctgcatgatagctttattctcagttatctttcccacaataaaaaatatctgcca

SEQ ID NO: 407320 - DNA, 1000 bp, Homo Sapiens; identical to SEQ ID NO: 294838

SEQ ID NO: 407321 - DNA, 1000 bp, Homo Sapiens; identical to SEQ ID NO: 119235

SEQ ID NO: 407322 - DNA, 1000 bp, Homo Sapiens
tcacctgataccatgaatggcagctggtcttcagagggctgtgagctgacatactcaaatgagacccacacctcatgccgctgtaatcacctgacacattttgcaattttgatgtcctctggtccttccattggtattaaagattataatattcttacaaggatcactcaactaggaataattatttcactgatttgtcttgccatatgcatttttaccttctggttcttcagtgaaattcaaagcaccaggacaacaattcacaaaaatctttgctgtagcctatttcttgctgaacttgtttttcttgttgggatcaatacaaatactaataagctcttctgttcaatcattgccggactgctacactacttctttttagctgcttttgcatggatgtgcattgaaggcatacatctctatctcattgttgtgggtgtcatctacaacaagggatttttgcacaagaatttttatatctttggctatctaagcccagccgtggtagttggattttcggcagcactaggatacagatattatggcacaaccaaagtatgttggcttagcaccgaaaacaactttatttggagttttataggaccagcatgcctaatcattcttgttaatctcttggcttttggagtcatcatatacaaagtttttcgtcacactgcagggttgaaaccagaagttagttgctttgagaacataaggtcttgtgcaagaggagccctcgctcttctgttccttctcggcaccacctggatctttggggttctccatgttgtgcacgcatcagtggttacagcttacctcttcacagtcagcaatgctttccaggggatgttcatttttttattcctgtgtgttttatctagaaagattcaagaagaatattacagattgttcaaaaatgtcccctgttgttttggatgtttaagctgttgaaatgaagtctgccaaatcttgctctaacaaataaaatgttatctaaatg

SEQ ID NO: 407323 - DNA, 1000 bp, Homo Sapiens
ctgcctctatcatatatgtcatcggtgtcactcacagagtccatcatgaatgtcaatgtgaaagtcctccaccaggctccacaggaaacgccagggcagggtttaaaggaaggtttatcaccccgactttacataaccaggtaggtacccagcttctgttggaggcctgtgtccaagctacagtgccaatcttcatctacaccagtaccctagaggtagccaggcccaattcctacaaggaaatcattcagaacggtcatgaagaagagcctctggaaaacacatggtacgctccatacccacacagcaaaaagcttgctgagaaggctgtgctggcggctaatgggctgactctgaaaaacggtggcaccttgtacacttgtgccgtaagaccaatgtttatctatggggaaggaagcccaatcctttctgccggtataaatgaggccctaaacaaccatggaatcctgtcaagtttcagcaagttctccagagtcaacccagtctatgttggcaacatagcctgggcccacattctggccttgagggccctgcgggagcccaagaaggccccaagtgtccgaggacagttctactatatctcagatgacacgcctcaccaaagctatgataaccttagttacaccttgagcaaagagttcggcctctgccttgattccagttggagcctgcctttatccctgacgtactggattggcttcctgctggaaatagtgagcttcctgccgaggccagtttacacctgtcgaccgcccttcaaccaccacagagtgacattgtcaaatagcgtgttcaccttctcttacaagaaggctcagcaagatctggcatataagtcactttacagctgggaggaagccaagcagaaaaccatggagtgggttggttcccttgtggactggcacaaggagaccctgaagtccaagactcagtgatcgaaggatgacagagatgtgcatgtgggtattgttaggagatg

SEQ ID NO: 407324 - DNA, 1000 bp, Homo Sapiens; identical to SEQ ID NO: 294841

SEQ ID NO: 407325 - DNA, 1000 bp, Homo Sapiens; identical to SEQ ID NO: 294842

SEQ ID NO: 407326 - DNA, 1000 bp, Homo Sapiens; identical to SEQ ID NO: 294843

SEQ ID NO: 407327 - DNA, 1000 bp, Homo Sapiens; identical to SEQ ID NO: 224936

SEQ ID NO: 407328 - DNA, 1000 bp, Homo Sapiens; identical to SEQ ID NO: 295435

SEQ ID NO: 407329 - DNA, 1000 bp, Homo Sapiens; identical to SEQ ID NO: 224937

SEQ ID NO: 407330 - DNA, 1000 bp, Homo Sapiens; identical to SEQ ID NO: 294845

SEQ ID NO: 407331 - DNA, 1000 bp, Homo Sapiens; identical to SEQ ID NO: 224938
